United States Patent Application Publication US 2012/0017292 A1 - sequence listing, part 13

SEQ ID NO: 54491 - protein, 118 aa, Zea mays
  Coding DNA Sequence Number=SeqID_11116
MACDGYGVRVRVKGWKRGGTGRGEGTCRPAMPSPQLAKYTGRPRSPPAPPLDAVWLFVGKPHPTGGPGPQCPRHPPARGKRGMGTDSGAPVVGACGLAKWAAMGGFIWWAKCGFRGPE

SEQ ID NO: 54492 - protein, 85 aa, Zea mays
  Coding DNA Sequence Number=SeqID_11117
MAVPHWRCDLKHKACPEIFVEFPGVKLGPSCCPTAGMKLSSELTFDFAAHSIKPGSIWGVEALDDLYSGEAPPYLAHVSLPGLRE

SEQ ID NO: 54493 - protein, 488 aa, Zea mays
  Coding DNA Sequence Number=SeqID_11118
  Gene Ontology: Mol. function=cysteine-type peptidase activity; Biological process=proteolysis
  Homolog annotation: Hit_ID=Q8S456; Match level="QueryCoverage=84%, HitCoverage=62%, E-value=0.0, Identity=69%"; Hit description =Putative uncharacterized protein 163K15.6
SPDLRASAFLLDPLYRSAFIDLDKGCGSGSCLTMRSVDRPPTNPKRLTIESSQEKLNIRCIPYDVIVSTWIMSDRQRDAVARLGFSSIFDLRTDVLESRSLIRWLMDKLDPHDMTIRPGAGKELKITKETVRLILGLPCAGGGREFTDWYGEVDAAAKLRRDLKICKEEFDVIKLQDKIVLGNDDELSIRCFFLILFNRLLFPSASWGITNNEVLMTSNMARMADIDWCQLVYTDLCDAATRWHKRNKTNITATIYGCFVLIYYLDHLHHPASPDNKYGTPRIKFFDNETIRDLARGDRRPPPPVKLFRSRSETCYVIAPERPVSDVFNIYVPRIKHLIGNKLKCLPSPHRPMFESMFDAHDKEISPTTSMPPTNAPVSTPPVPTPDNQQHDQEIHVPTDDIKVSEQEGQKTVKHDTPVYGAPHFDKTPLTEGFIDCIRDDDLLYNPDTIINTLILNVNVGTVLNIEEFEQHSSNPQPFSTSVLKEQL

SEQ ID NO: 54494 - protein, 135 aa, Zea mays
  Coding DNA Sequence Number=SeqID_11119
  Subcellular localization annotation: CTP_CleavageSite=29; ConfidenceScore=5.48e-01
MGLGPPVGQTKGKCSPRTAGSGTVAATARPSTARPNTVGWATNCGWNDKGGESGWASVQFYASDSGGRLPDASCRGWPGREMWFGGDEDGNLSLGRRSPPHPTPGLSLGLRRSHRLAQPRPQTDYATGDTSLPYP

SEQ ID NO: 54495 - protein, 130 aa, Zea mays
  Coding DNA Sequence Number=SeqID_11120
MTFGRKVTVKKAKSGPMERGDRAPGGRGEPQAAPWQATAAAARRVRRGRTGDCRLGEPARPDEAARPHRATAAARRARVRDADSAQCLAGPGRGRGYGTSGVRRARGGGRRLGEDRGGGRGAVAGWRLGF

SEQ ID NO: 54496 - protein, 104 aa, Zea mays
  Coding DNA Sequence Number=SeqID_11121
MPRNMVNCGLYPSRDLRRVSHSGYGGCKCGHCTTAVGVSEALYAKAIGSLEDMVAGVTWPSILPPGWTVEWDPASVEETSSNPRFLSVLLETSLSNNLVKASVL

SEQ ID NO: 54497 - protein, 124 aa, Zea mays
  Coding DNA Sequence Number=SeqID_11122
MKFGVYIFQITKEYCIYCGPQILGQTTVTNSNPRGLYPSRDLRRVSHSGYGGCKCGHCTTAVGVSEALYAKAIASAFGNQTPQPNSCMSRGSREDMVAGVTWPSILPPGWTVEWDPASAEEEHE

SEQ ID NO: 54498 - protein, 43 aa, Zea mays
  Coding DNA Sequence Number=SeqID_11123
MAFTGQPLSRMQLRWAVGGYGFLFIAIDKFNKWPEATPVVNIT

SEQ ID NO: 54499 - protein, 130 aa, Zea mays
  Coding DNA Sequence Number=SeqID_11124
MSISDALPVLDSAADRLQRLDQILGTLLEVEGGRLCRAVVEYILTCFRSHDPTISLEPVIAGPVADTEDAAREGIKDAVELVAERFQQDPADDELDVSRLDASILKKELVTWPPRGSLDWDLDLRTALAR

SEQ ID NO: 54500 - protein, 424 aa, Zea mays
  Coding DNA Sequence Number=SeqID_11125
MAYIPSLGGARWENWRGDWVIASTKANDRLALPSDGPRLDQKQWRAKPSLAPEFQLVLDRIKSLAVQRGPGTDLSWEELEVLVKGITGESFVPESLILAEGILALCDDTGLRTVILSTLSTLDESGVAVRQTGGRNPHRGIQISDAPDGGPQSAGVAPSASARASHASVAAPHPLDKGKGLQAAPPPQAALEYRRKRGGAGCVAPTDRLFRTPPLGSRRPAPRNVRGLLAGPRRPAPRPRVRRGASVLRHHNHQARHHHNRHHNRHHHHPGAISPRDTSSSSNNSSSKSSGRPASRVVGRSKAPTAPTPSDATTAEGVPSAPTAATASTTVMPSSTPSVAAEEAPAASASAIEVDAGGVSSSIPPPTPEETEVIFGQRLRSGAEPEAAPVPLPRLEERTKAASRQFASERSELERDHKDYKKDL

SEQ ID NO: 54501 - protein, 91 aa, Zea mays
  Coding DNA Sequence Number=SeqID_11126
MPLCICSLLLHTCAAADAMTSLGQPDRFQTEATLDVVHHLLGWSASTLAERIRAGAVPLGDLAAGEFILFTSYISYGLGAADLAFLLTAVG

SEQ ID NO: 54502 - protein, 913 aa, Zea mays
  Coding DNA Sequence Number=SeqID_11127
  Gene Ontology: Mol. function=protein binding; Biological process =regulation of ethylene biosynthetic process
  Homolog annotation: Hit_ID=Q2R1Z8; Match level="QueryCoverage=100%, HitCoverage=100%, E-value=0.0, Identity=88%"; Hit description=ETO1 -like protein 1, putative, expressed
  Pfam annotation: Domain name=BTB; Domain location=148-280; Score=2.7; E_value=0.002; Accession=PF00651.22; Description=BTBPOZ domain
  Pfam annotation: Domain name=TPR_1; Domain location=710-743; Score =23.6; E_value=0.00072; Accession=PF00515.19; Description =Tetratricopeptide repeat
  Pfam annotation: Domain name=TPR_1; Domain location=865-898; Score =18.8; E_value=0.021; Accession=PF00515.19; Description =Tetratricopeptide repeat
  Pfam annotation: Domain name=TPR_2; Domain location=381-414; Score =5.2; E_value=6.7; Accession=PF07719.8; Description=Tetratricopeptide repeat
  Pfam annotation: Domain name=TPR_2; Domain location=510-543; Score =2.8; E_value=13; Accession=PF07719.8; Description=Tetratricopeptide repeat
  Pfam annotation: Domain name=TPR_2; Domain location=602-635; Score =7.7; E_value=3.3; Accession=PF07719.8; Description=Tetratricopeptide repeat
  Pfam annotation: Domain name=TPR_2; Domain location=636-669; Score =5.3; E_value=6.6; Accession=PF07719.8; Description=Tetratricopeptide repeat
  Pfam annotation: Domain name=TPR_2; Domain location=710-741; Score =7.1; E_value=3.9; Accession=PF07719.8; Description=Tetratricopeptide repeat
  Pfam annotation: Domain name=TPR_2; Domain location=742-775; Score =14.6; E_value=0.38; Accession=PF07719.8; Description=Tetratricopeptid e repeat
  Pfam annotation: Domain name=TPR_2; Domain location=865-898; Score =18.7; E_value=0.021; Accession=PF07719.8; Description=Tetratricopepti de repeat
  Pfam module annotation: Pfam domain module=BTB::TPR_1::TPR_1::TPR _2::TPR_2::TPR_2::TPR_2::TPR_2::TPR_2::TPR_2; Domain location=148 -280::710-743::865-898::381-414::510-543::602-635::636-669::710 -741::742-775::865-898
MRKLFFSESACKETKLHSAPHSWLPLERGKLSKFSGHAAAGSSIESLMKMPEPAVLPHFKPADYVDVLAQIHEELESCPPDDKSSLYLLQYQVFRGLGEAKLSRRSLQSAWEKGSTIHEKLIFGAWLKYEKKGEEAISDLLSSCSKCLQEFRLLDFVLQVSTGSHVINYDGDDDEFRGSAVVHFRIRDDMVACDRRKLAALSTPLYAMLNGGFRESYLEVIDMSRNGISPIGMRAISKFSLSGRLPYLSADAILEILDFANKFCCKGLKDACERKLASFVSSRQDAIDFMECALELGCSILAASCLQVLLNELPECLNDEQVVRIFSSANKAQRLTMVGNASFSLYCLLSEVSMSTNPTSDVTVSFLEKLVESASDSRQNQLALHQLACTKFLRKDYPESERLFNAAFSAGHLYSIVGLARLASLRGNKHFALKLLDSVMSSRWPLGWMYQERALYLDGDNKLENLNKATELDPTLTYPYMFRAASLMKRQSVEAALMEINRILGFKLVLECLELRFCCYLALEDYRAALCDVQAILTLAPDYRMIGGRVAAKQLRMLVLENVEQWTAADCWMQLYDRWSSVDDIGSLSVIYQMLESDTAKGVLYFRQSLLLLRLNCPEAAMRSLQLAREHAASDHERLVYEGWILYDTGHCEEGLQKAEASIAIQRSFEAFFLKAYALADSSLDPSTSATVVSLLEDALRCPSDRLRKGQALNNLGSVYVDCGKLDLAAECYINALKIGHTRAHQGLARVHFLRNNRAGAYDEMTKLIEKARNNASAYEKRSEYCDRELTKTDLQMVTKLDPLRVYPYRYRAADIAHLLNFQYWCYFNEPATLVPNIKAVLMDNHKEKEAIAELTKAIAFKADLNLLHLRAAFHEHVGDVSSALQDCRAALSVDPNHQEMLELHHRVNSQEP

SEQ ID NO: 54503 - protein, 399 aa, Zea mays
  Coding DNA Sequence Number=SeqID_11128
  Gene Ontology: Mol. function=cysteine-type peptidase activity; Biological process=proteolysis
  Homolog annotation: Hit_ID=Q6J9V9; Match level="QueryCoverage=16%, HitCoverage=22%, E-value=2e-24, Identity=87%"; Hit description =Putative uncharacterized protein
MELPLDAQSSGRRLDVDERVEQCRAVAGVLHVLARFVQVLQMQHLRDLNKRRGCLLYKNEKEDDSGSPSDVEILENPTDSNKRKLLHMLDDSEVVYEDEEGPITQADLQRWFVDDWDKRAPVKVSTDWCTNDFLMILDIDYRRTWVRSFNPFKIEISVKDLQNILTINQDMIIRCFDMVVRLLANKESRRPKEEIINNRKHYMDMRFWRMVGYGKLPKYHQDPTTEELAKTLDCWPSMNYYITGCRYVIMSWKFNGCHALFVIDHVKKHVTFIDFTPTQDWCKHMPYKRFAEAIIMASKKYKIAYSKKRSGWAEDIFKWEHTIQTGVPIDLRGFNTSYLVLQAMAMWGNDRRLKFVGMSDAKTIRKNFVIDLLSYEDNSCRYAIPANIQQRLIDIAKKD

SEQ ID NO: 54504 - protein, 696 aa, Zea mays
  Coding DNA Sequence Number=SeqID_11129
  Gene Ontology: Mol. function=catalytic activity; Cellular component =nucleus; Biological process=metabolic process
  Homolog annotation: Hit_ID=A7NWP2; Match level="QueryCoverage=91%, HitCoverage=100%, E-value=0.0, Identity=56%"; Hit description =Chromosome chr5 scaffold_2, whole genome shotgun sequence
  Pfam annotation: Domain name=PPR; Domain location=157-191; Score =12.0; E_value=0.29; Accession=PF01535.11; Description=PPR repeat
  Pfam annotation: Domain name=PPR; Domain location=289-323; Score =21.0; E_value=0.0045; Accession=PF01535.11; Description=PPR repeat
  Pfam annotation: Domain name=PPR; Domain location=390-424; Score =28.9; E_value=1.8e-05; Accession=PF01535.11; Description=PPR repeat
  Pfam annotation: Domain name=PPR; Domain location=426-460; Score=2.8; E_value=3.6; Accession=PF01535.11; Description=PPR repeat
  Pfam annotation: Domain name=PPR; Domain location=462-495; Score=5.7; E_value=1.6; Accession=PF01535.11; Description=PPR repeat
  Pfam annotation: Domain name=PPR; Domain location=528-562; Score =10.2; E_value=0.48; Accession=PF01535.11; Description=PPR repeat
  Pfam annotation: Domain name=PPR; Domain location=85-119; Score=26.5; E_value=9.8e-05; Accession=PF01535.11; Description=PPR repeat
  Pfam module annotation: Pfam domain module=PPR::PPR::PPR::PPR::PPR::PP R::PPR; Domain location=157-191::289-323::390-424::426-460::462 -495::528-562::85-119
MHRAAAATVAAPQATDAQLLAGAVEAAIATRSARLGRAAHARALRLLSPALPPFLCAHLVNLYSKLDLPGAAAASLAADPSPTVVSYTAFISGAAQHARPLQALSAFAAMLRLGLRPNDFTFPSAFKAAASAPPRSAAGTQLHALALRFGYLPDDAFVSCAALDMYFKTGCLALARRLFDEMPNRNVVAWNAVMTNAVLDGRPLETVEAYFGLRGAGGMPNVVSVCAFFNACAGMTNLSLGEQFYGFVAKCGFGKDVSVSNSVVDFYGKCRCVGKARAVFDGMGVRNNVSWCSMVVAYAQNGAEEEAFFVYLGARRAGEEPTDFMVSSVLTTCAGLLGLDLGRALHAVAVRSCIDSNIFVASALVDMYGKCGGIEDAEQVFFEMPQRNLVTWNAMIGGYAHIGDAHNALSVFDKMIMGQETAPNYITLVNVLTACSRGGLTKEGYELFQTMKWRFGIEPRIEHYACVVDLLCRAGMEERAYKIIQGMPMRPSISVWGALLGGCKMHGKTELGRIAAEKLFELDPQDSGNHVLLSNMLASAGRWAEATDVRKEMKNVGIKKDPGRSWITWKNVVHVFQAKDTTHDMNREIQALLAKLKGQMQAAGYMPDTQYALYDLEEEEKESEVFQHSEKLALAFGLICIPPGIPIRIMKNLRICVDCHRAFKFISGIAGREIIVRDNNMFHHFKNYECSCKDYW

SEQ ID NO: 54505 - protein, 271 aa, Zea mays
  Coding DNA Sequence Number=SeqID_11130
MATPRHLPLHLILVVVAAAAFVATGTARTRWPGWKSAGAPSAACCAAYEAAFDADPFCLCYVGRATGDYVDVARALQIPARCGQVQPPIELCSRHAGDRPRSGRTAAFGFKYVRAVGCIGSIVTVALKTSCYSRCGFLPLEPESVWLGLIIVHGITSWSSSSPWLPVHYRNSALCRVPVALPSAFYRALGKADFAERRTRQSPTLGKDLIYRVRDTRHSPTLGKDCFAESQTLGKEGSRQRAVSGRLQLTVVRPSATYWALGKGRFAECLL

SEQ ID NO: 54506 - protein, 88 aa, Zea mays
  Coding DNA Sequence Number=SeqID_11131
MSLSRGRLHFKRGEDDEDITPMDSNNTPLVDVQGMKERTSKDMVKDLEAWKASKDVRIKVEELALMVRSIAQCMVDNQRRSGAAIAGF

SEQ ID NO: 54507 - protein, 592 aa, Zea mays
  Coding DNA Sequence Number=SeqID_11132
  Subcellular localization annotation: CTP_CleavageSite=58; ConfidenceScore=5.36e-01
MNKNTGIQSAITNGTPVLSPRVWTTSTPGKPVERQALGESPANAGRPKAHRQVLTPVLATQARKRTECCILARQQQPASPAWLEDVSSVELEDGLHHQKLEEEVVGRPARGAEHRLSPTPAPARMMKTSWGRGQDHSPACSSPSRGWWSPSWVTPGEGEQLGWLMKILEAERWLKGGHPPFKGDSPYLRPQPSRAESSPTHSKVLPYIAGAGSHTSCKPAQSRRSQTAVRGAYNRPAVTSDSPLLPRPTGERGGQPCRRHATAPSGRTSLTPNTPSMEAQAHASCNRRAECFVHATAPPLAPLPRLLDCGTNTATRGDPAHDPAAPAWRGGQCGQKWAGSNGGGRRAGAVAPSSAKLTSRPGAGPGKGDTPKRILPREGTRLRASLLIRGSKAGPSEGFDSRLRSRGLYTHYWSEVRRPAPRKGSTAASGYSGSAPITDQGFKGWPPKGSQPPQTPSEGARTRARPRKTANSAPPDPGLGLGLSPGRRRTPLRPTQGSDLGSAPEDDELRSARPQGSDYALTSADGLRLARPGGSDSTSATEDRLDLGFGGASTSPNLGRRPATSTGGTIITLPRADSGHGDKTGVPSGSLH

SEQ ID NO: 54508 - protein, 108 aa, Zea mays
  Coding DNA Sequence Number=SeqID_11133
  Subcellular localization annotation: CTP_CleavageSite=51; ConfidenceScore=5.10e-01
PESGAPDCPVCHRTVSGAPGDSKPNSSPSGKLKRRSAIIPPDCPVYPGTVSGAPEESDSELASFRNPLRYISPDMSGAHRTVREVLFPVDLRRESSLGPRDCLREGRG

SEQ ID NO: 54509 - protein, 195 aa, Zea mays
  Coding DNA Sequence Number=SeqID_11134
  Subcellular localization annotation: CTP_CleavageSite=48; ConfidenceScore=5.32e-01
MSTVSSLRSSPRIYKTSIPLFPSKSDTCRPTPIADRHGGRRRKPRTITAVVGGSRCLNGLGLEITSRDDLQTPWMLYARLIRTKVGRDPEQEEESVVEEEVVSQTENPPVENNFYFDICGATARTTGGGEAAVEVTRSGERDRKLSTLRAKADRLDSEATRLRSRRDEKKFSEAHDAMKAAEEAKKEAVDEVKGK

SEQ ID NO: 54510 - protein, 189 aa, Zea mays
  Coding DNA Sequence Number=SeqID_11135
MEPAARPLPSPAIQVTHSRVHVGAISGEGAIGGKGAIDLGAPELGARRGGAQGPCTATLHALRPATYRDASHKPEMAISSTPPPCSAHGVPTRVSDTIFFLQFNRMSIASVRLPESRNSLDLPATPPMTPLPAPRTSQTERPRFRFMGEVRRERERKRSRSRSPSADRDRYHRRHSQSRRGLRRWVTAK

SEQ ID NO: 54511 - protein, 197 aa, Zea mays
  Coding DNA Sequence Number=SeqID_11136
MASAPNARKKGMQPITLDDVLKAPELFFELTYLIVVPAHFWITWLDFLHDLIDNQFGVAPNQELSCSHFAHDLEPVDEGFVFNDVVGSVKVEAMDIVDVKSVELKEPLRDAPGRIPILDDLAKGCSGHHRQGVPVEVVDQLPLGDEDHIEQLLDLRPKRLLGLGAPDCPVVHPDSVRCARLVLVKRPVLGKSSAAYG

SEQ ID NO: 54512 - protein, 40 aa, Zea mays
  Coding DNA Sequence Number=SeqID_11137
MVQELDYGYMMDITSKMDIAKVILGMLELRNVNLDQVKPT

SEQ ID NO: 54513 - protein, 88 aa, Zea mays
  Coding DNA Sequence Number=SeqID_11138
MSKNTRDARFIPRFGHTIKVPYFLVEVPTKSRVSFNPNPLFADHKGPVQPPGGRLTYNLPFRLADYRSDWSGDPDTGLTALRPVQPFD

SEQ ID NO: 54514 - protein, 80 aa, Zea mays
  Coding DNA Sequence Number=SeqID_11139
MKLPKPSNPAEPRRRPQITLAGLLPLTGKRGLDFNLADGEYVLIPEQGAVQEEVQESAPEPATEDLPAALAFEGKPRFYA

SEQ ID NO: 54515 - protein, 809 aa, Zea mays
  Coding DNA Sequence Number=SeqID_11140
  Gene Ontology: Mol. function=nucleoside-triphosphatase activity; Cellular component=integral to membrane; Biological process=protein catabolic process
  Homolog annotation: Hit_ID=Q6H6R9; Match level="QueryCoverage=99%, HitCoverage=99%, E-value=0.0, Identity=77%"; Hit description =Putative cell division protein FtsH3
  Pfam annotation: Domain name=AAA; Domain location=368-558; Score =300.0; E_value=4.5e-87; Accession=PF00004.20; Description=ATPase family associated with various cellular activities (AAA)
  Pfam annotation: Domain name=AAA_2; Domain location=364-498; Score= -18.9; E_value=0.0003; Accession=PF07724.5; Description=ATPase family associated with various
  Pfam annotation: Domain name=AAA_5; Domain location=368-503; Score =15.6; E_value=0.00019; Accession=PF07728.5; Description=ATPase family associated with various
  Pfam annotation: Domain name=FtsH_ext; Domain location=181-342; Score= 64.1; E_value=4.7e-16; Accession=PF06480.6; Description=FtsH Extracellular
  Pfam annotation: Domain name=Peptidase_M41; Domain location=565-781; Score=120.6; E_value=4.7e-33; Accession=PF01434.9; Description =Peptidase family M41
  Pfam module annotation: Pfam domain module=AAA::AAA_2::AAA_5::FtsH _ext::Peptidase_M41; Domain location=368-558::364-498::368-503::181 -342::565-781
  Subcellular localization annotation: CTP_CleavageSite=63; ConfidenceScore=5.64e-01
MASAAAETLASFPIASPSRSLLRPFPRRPAGARTGAPSIRISAVPPRGLGLALVHRRCPPAARANVERDGDGASGNGEPSSSSGDGDRDAAAESGGDSTSTSTTSTAATPPPPSSKRNENKWRRRLTKGGGVGRWLWEPIVQGREMGFLLLQLGFAIFALRMLRPEIALPGSEPRPQTTYVSVPYSDFLASINKDQVKKVEVDGVHIMFRLRPEVESQVRVEQTPTQRGADYVIDNAGVSRRIVFTTTRPVDIKTPYEKMVENMVEFGSPDKRSGGMLNSALVGLIYVVLIAVVLQRLPISFSQQSPGQLRNRKNSNSGGAKVSESSDIVTFADVAGVDEAKEELEEIVEFLRNPERYIRLGARPPRGVLLVGLPGTGKTLLAKAVAGEAEVPFISCSASEFVELYVGMGAARVRDLFAKAKKESPSIIFIDEIDAVAKSRDSRYRIVSNDEREQTLNQLLTEMDGFDTNSAVIVLGATNRADVLDPALRRPGRFDRVVMVEAPDRFGRESILKVHVKRRELPLSKDVDLANIAAMTTGFTGADLANLVNEAALLAGRLNKEIVEKVDFIRAVERSIAGIEKKHAKLKGNEKAVVARHEVGHALVGTAVANLLPGQPRVEKLSILPRSGGALGFTYTPPVTEDRYLLFVDELRGRLVTLLGGRAAEEVVLAGRVSTGALDDIRRATDMAYKAVAEYGLSQRIGPISLATLSNGGLDDSGGSPWGKDQGHLVDLVQREVKALLQSSLEVALSVIRANPAVLEGLGAYLEEKEKVEGEELQEWLKSVVASKELTSFIRGQQEQVLQLEAGS

SEQ ID NO: 54516 - protein, 179 aa, Zea mays
  Coding DNA Sequence Number=SeqID_11141
  Homolog annotation: Hit_ID=Q109I2; Match level="QueryCoverage=56%, HitCoverage=29%, E-value=3e-17, Identity=48%"; Hit description =Expressed protein
MRIEQDHHQMKKLLTSFCDYGWSIYIVSEDPELYHRLAGRSRVLEESSHVCWVGVDLDLALSQVPNLKLTGPSLAVLLVDPLTIEADLKVKGRTESDDKHLSFLPVPFLNMIPLESCLRTRDFTCKLISTLRFALAIVVFSVEATVSVRVRGGSWPDGLRGGSCLILGTMNCLLPSFFY

SEQ ID NO: 54517 - protein, 117 aa, Zea mays
  Coding DNA Sequence Number=SeqID_11142
MARGMSLAALPFRSNLEPRGVSDGDDVWSGISPFEGLDHASPEPSLGQGQPTPEDFRLARGPPPAANIFPARPRPCLRQEATLTKSPHRPTKSQEHLMQRRPDTFILTRAPQPIEPK

SEQ ID NO: 54518 - protein, 511 aa, Zea mays
  Coding DNA Sequence Number=SeqID_11143
  Gene Ontology: Mol. function=carboxyl- or carbamoyltransferase activity; Cellular component=ornithine carbamoyltransferase complex; Biological process=amino acid metabolic process
  Homolog annotation: Hit_ID=Q8SA97; Match level="QueryCoverage=34%, HitCoverage=23%, E-value=5e-16, Identity=37%"; Hit description =Ornithine carbamoyltransferase
MAPPVDVAGLRPRLGDVEAPPKPRSSLSSVAEVESEPLGRARRRPSAEARAESVPWGRAKRSSSSSGAEPESEPWVGRSGPESEPWVGRSGVRRLPGLSPSPSPGSGGAEFNVFRDLARVRALGRAERSGAVLLSGRSVERRSDVGHFGSAGWGARVRIKLYADGGYQLRIRSLKEYFPPIYSSSVYYPVQTLNGTMMNPWLWCGPLCSGLGGSGTNKWRRDDTVPRTQSRGAHALPQPSAIAPAPPRPTFWAVSGRQKLKLYPNGQLLGRLFVAALRIEATRLRCPRSGHQLASSQRLGYVARVVALPPSRRRSLSSPHRRSLSSPHRRLSRVAARTPPWQLRPEAFSPSRRRLRRLPHQHGILRLRFQPPVKLKFTNHLNPHQMDSADSIADKAIGRMQEIADKIFSVARETIRPGRGLTSFEATKLRVALEDIACMLEQDSLVLQENLDNVNNVNNPGDSSYEPPALSSPPPANEYLSPDWNFAEHFENFWGLEYDSDQMPSFSDNEV

SEQ ID NO: 54519 - protein, 212 aa, Zea mays
  Coding DNA Sequence Number=SeqID_11144
  Homolog annotation: Hit_ID=A0EVH6; Match level="QueryCoverage=42%, HitCoverage=26%, E-value=2e-07, Identity=40%"; Hit description=Milt putative polyprotein
MAGSKDHTKISTTNIIKLTMEALPADDQRPFEDLVMRDEKEVMRQWNEQRDKEKAELLHKLSERCKEAADKYLSHFTVDRHQKIVRQGEIDMESLLPPLQGPAPQPLGTRQVLDATGPSEHHLRQSGYTADRPACFAGPSDPMQTRTQNTQVAPYMAGPSGYNPEQFGPITDRPTHHAGPSGYVADRPPSYVGPSGYGMNRPTYYAGPSDST

SEQ ID NO: 54520 - protein, 169 aa, Zea mays
  Coding DNA Sequence Number=SeqID_11145
  Homolog annotation: Hit_ID=Q6J9V9; Match level="QueryCoverage=36%, HitCoverage=21%, E-value=8e-12, Identity=66%"; Hit description =Putative uncharacterized protein
MRRKDGGYPPSGGLEGGKTRCIREHEDMVAFQGGHPPFKGDYPYLRPQPSRTESSPTRSKVLPCGAGAGSHTSCKPTQSRRSQTAVRGAHDRPAGPVKGDTPKRILPREGTRPRASLLIRGSKAGPPRRVRQPPQIAWALHPLLVRGSKAGPSEGFHGRLRLLGLRAHY

SEQ ID NO: 54521 - protein, 66 aa, Zea mays
  Coding DNA Sequence Number=SeqID_11146
MQQRRLLLVLLRHLLPHVQLQLRQKSNLKSDKLKNNRLSDQCYSHQHHLQAMTSIVSNLIQKIVKK

SEQ ID NO: 54522 - protein, 97 aa, Zea mays
  Coding DNA Sequence Number=SeqID_11147
  Subcellular localization annotation: CTP_CleavageSite=58; ConfidenceScore=5.05e-01
MGSGYTSTHEEVFAPVLTAGVGTRPSKNVAATMGVRRLVRPPGATDGAGEAVDVANPRAARPSPVRWTGSHAPPQRQEAAPEAAPEPPRPGSQARGS

SEQ ID NO: 54523 - protein, 1212 aa, Zea mays
  Coding DNA Sequence Number=SeqID_11148
  Homolog annotation: Hit_ID=A5B9N2; Match level="QueryCoverage=84%, HitCoverage=90%, E-value=0.0, Identity=46%"; Hit description =Putative uncharacterized protein
MSSRFHHGGGDDHRVGDAGDAALARDIVTLHKALSLDPSTHRRRTLPLPSPSPVVTEQPRNKPRLKPSSSSSSSRKLLPSTPNSSSASTSSSSSSFWKKSLTAISHLGRRRLDFAFALHVHSVNGLPAALDGSAVSVRFRRMSVSASTRPVVAALGAAAFEEALTLRSPVYFSRGAKAVVKYEPRSFVVSVAASTLELGKHEVDLTRLLPLSFDDLEDGGDSGFGKWSSSFRLSGPARGARLNVTFSCSLLAGGVGSEQHKAVEVAGVRRGSMARPVSVQAPTPVPARSRDVRVLHEVLPSLRSARSLPFVGDGGLDARKEEVAALDCMEDGSPEAKHCTSVEVKKGDLVRPDGDCSTMEFNVVGHGVEVASYDPQRLKHVETSNEADQNEDPGFKIDEEVSFKPVLVCGDVAEDQTVGVKTEVAVCDVAVQRENVEDKHDGIIKANSLPTSALEAEDQLGADVELEDLECILNELLVAKPEEFESPVVEDKYSRRLSCTADSYKSDSRKGRSRSMDISTDSVANEFLDMLAIEHIPFGQPSDSDPESPRERLWKQFEKEALASDKAILGLDFDDGIEGPICENVVEDFDLSAMIHEAELELQNGSQPIDTKFRAKSLEDEETEALMRQFGLNEKSFQSSPPESRSGFGSPINLPPEQPLELPPLAEGLGPFIQTKDGGFLRSMNPALFKNAQNSCSLVMQASSPIVLPAEMGSGIMDILHGLASVGIEKLSMQANKLMPLEDVNGKMMQQIAWEAAPALESAERYDPLDYHSVDALVGGGGNAPSSKKKKCRCADLSSSLGGENASEYVSLEDLAPLAMEKIEALSIEGLRIQSGMSEEEAPSNISAKPIGEFSSLQGKCAENTWSLGLEGTAGLQLLDVKQSGEEVDGLMGLSITLDEWMRLDSGVVDEEEQYSDRTSKILAAHHAKSMELAAENRNGDRKNRRSGRRWGLLGNNFTVALMVQLRDPLRNYEPVGTPMLALIQVERVFVPPKPKIYSTVSDKGNSEQDDEEPKTEKVPDKALVTEEKAEELEDPIPQFKVTEVHVAGFKSEPEKKKPWGNQTQQQSGSRWLLAAGMGKGNKHPLMKSKAIVKPTKEAAGQAGDILWSISSRVHGAGTSKNIHPIIDDDGQVTARWNSSCEDSVKHDIACNCKLIGARFFSRDMLLNNPMVVDGNLTCDIEGHDNFMPRASIFGYDTSTAKSGTLRARIAT

SEQ ID NO: 54524 - protein, 20 aa, Zea mays
  Coding DNA Sequence Number=SeqID_11149
MGKPVPSLLMLLLSRVQWIK

SEQ ID NO: 54525 - protein, 101 aa, Zea mays
  Coding DNA Sequence Number=SeqID_11150
  Subcellular localization annotation: CTP_CleavageSite=47; ConfidenceScore=5.57e-01
MAEARAALPRERLTTVTATPKFSLRRNRSSASPDPRSRPQPWPREVSASPDPRPRPRPQPRPREEVSASPDLSLGLRGSRRLARPRPRINYATGDPSLPYP

SEQ ID NO: 54526 - protein, 270 aa, Zea mays
  Coding DNA Sequence Number=SeqID_11151
MEVRCQTSFCQNEDGFPKLLRACIVRLGIRSQPEYDGREFVEHDTEKCVVTVYIGSSPHHVEWSVTVAGHRFKDTCQVVARKALRALCQIYEEEVADTPLKFFLPFQRDRPVWMARMRALEGQQLLEDDPSVHHRQMIARAEDAEKLNRKLHVDLTTTQARVAALESREAIAVEALKQAKDEHVQKLMEACLVTHNQRRALWIQELASSNPVQPIRAEDPQILEGHPVSIRGKKKAWELPEGAIVLEGVLVFPQAMDKQEHPESSRDPPP

SEQ ID NO: 54527 - protein, 95 aa, Zea mays
  Coding DNA Sequence Number=SeqID_11152
MKYEVLQDEVLTSEAKSLRQNTNFQVMKAEGDSKKSFLPDYPESTSCYKHRPQAGLRISRPIISKSAQRAGACGGQISPGSTGRIKDLTNGLRGF

SEQ ID NO: 54528 - protein, 178 aa, Zea mays
  Coding DNA Sequence Number=SeqID_11153
MDVDNICDIDNNVSNEDEIHGIGGGGDVNGNDSDHMEEEDHVLTPTGSEVNVRKNKSIDGDNRVVKRLLATKSTSTSTSKFMASAFKATRSNKSTDLVPQPQVSKVAQDASASASENASIAASVQISTEDDCDEELDVKKKKLTSWVWEHFTRYDVEVEQNDGSIVKQKWAKCKKMCT

SEQ ID NO: 54529 - protein, 32 aa, Zea mays
  Coding DNA Sequence Number=SeqID_11154
DNEIDGSGYDYGTGEDEAVEGDFQEFQDYDEF

SEQ ID NO: 54530 - protein, 205 aa, Zea mays
  Coding DNA Sequence Number=SeqID_11155
  Homolog annotation: Hit_ID=A2XLZ1; Match level="QueryCoverage=77%, HitCoverage=72%, E-value=3e-18, Identity=40%"; Hit description =Putative uncharacterized protein
  Pfam annotation: Domain name=SMP; Domain location=126-191; Score =10.8; E_value=0.023; Accession=PF04927.3; Description=Seed maturation protein
  Pfam annotation: Domain name=SMP; Domain location=62-122; Score=57.0; E_value=6.4e-14; Accession=PF04927.3; Description=Seed maturation protein
  Pfam module annotation: Pfam domain module=SMP::SMP; Domain location =126-191::62-122
MEARPSRIECSEPNEQPEPKDPGRVFHAERVAPRDATESVTEKLAHGGCGHDGVIDETYDTRIKIAEALEASARAIGDKHVEPSDAAAIRVAEASAAGRGAIPGGVSERAQAAVAANARAARDEDKVTMADVLTWEATVKLPTGKAVTGEVAAAAAEAEAEAANDPRAKTNPRGVSAALGMAAKHNCGHESARTGTAFPDEAKQD

SEQ ID NO: 54531 - protein, 159 aa, Zea mays
  Coding DNA Sequence Number=SeqID_11156
MAEDAGGASNAIPPPIPEEPEKPRHLPSLGCCPTLIRLSGKTEAAILREWEALETEHQRLGDWRTQLEVRTKVVSCQFASERSELEQEREDLKEDLEKVLDREREVTREEKRLVKKKEHLDQREAVTTKFHEKLKAYNAMLEKQRDEQTVIEAALQKLR

SEQ ID NO: 54532 - protein, 137 aa, Zea mays
  Coding DNA Sequence Number=SeqID_11157
MVSSSVRIMPLLRPLCIHALLKQKLGQFLSDCKSCNNTFVAWHADYVSHTLENNFGEDRVREGGDLNVTFADKFLKTHKSLSQTRREYVTTGHEMSTGFPRPPSSMPAGSGVRCFHDGGYRPRGNDWMASVLFDSGG

SEQ ID NO: 54533 - protein, 273 aa, Zea mays
  Coding DNA Sequence Number=SeqID_11158
MWRIADVRYPGEESGSRGGEKSGGAVVPSLATSIHLGEGASRRCSSAPPAKLGSKRPCSSGSGGGPLSVAGGKEVAADESKIQGAGVTVGVRRRRTAIAKKLRRSTAPTKEGGEKHKRISTSPSSSSSIRSGGPDPKTKRKFLCARSFVHIGIETMDSKNAKLRRVLAHLIRVVEQRCADIVDVVHGAFQPVSGPVLNEMNRALVQIEDLAKDLDHLALEKDWEMEHMAPSPIAESSETEDELLLDYDSELNPDDIVGYDDGRDYSTDDTYPY

SEQ ID NO: 54534 - protein, 209 aa, Zea mays
  Coding DNA Sequence Number=SeqID_11159
MSGAHRTVRCSLLTVGSATCPAQIARPTVGPADRWLTGQSGAHRTVRCKKVHTQPIKGPSFGFNKGAKGQPKAPLVWRTGLSGDSAIIHRTVRCTPDSVRCAKGGQPQELASFGKSQRLVRYNSPDCPVCTGLSGATPEQRSSPRQRLSAAHLMRALRAQKSESPMLAHRTANSTCPVCTGHPVGPTSQKLQRSESNGSDDVAGGTGLS

SEQ ID NO: 54535 - protein, 342 aa, Zea mays
  Coding DNA Sequence Number=SeqID_11160
  Homolog annotation: Hit_ID=Q6QP51; Match level="QueryCoverage=46%, HitCoverage=81%, E-value=8e-32, Identity=48%"; Hit description =Putative growth-regulating factor 1
MKAACNCTTGMHPFDFDASSMEAQAHTSCNRRAGYYVRRTAPPLTPMPRLLDSGTGTATQGNPVHGPTVPTKHIGHRDRERGYSERDPSPRRKRAPSPPTDQGFEGWPLGGVRQPPQSTRAPRQLLIRGSKAGPSEGFDSRLRALGLRAHYWSEVRRLAPRKGSTVASGHSGSVPTTNQGFEGWPPEGFDSRLRTRRARDDSGYVRYMAEARATLPSRQGRSDCSHFAPPLTDLTGNSAACPAPTAVPPARVRLTATESSLRRHRKLRIARPGARPPPRPRKTVSASPDPRARTQSRPRKTVSASPDPRARTQPRPRKTVSASPDLGLGPTTLQGGTSLPYP

SEQ ID NO: 54536 - protein, 57 aa, Zea mays
  Coding DNA Sequence Number=SeqID_11161
MVKDLEAWKASKDVRIKVEDQTDVRNLSWQELALMARSIVQCMVDNQRRSGAAIAGF

SEQ ID NO: 54537 - protein, 509 aa, Zea mays
  Coding DNA Sequence Number=SeqID_11162
  Homolog annotation: Hit_ID=Q7XBC6; Match level="QueryCoverage=7%, HitCoverage=2%, E-value=6e-08, Identity=76%"; Hit description =Putative copia-type pol polyprotein
  Subcellular localization annotation: CTP_CleavageSite=44; ConfidenceScore=5.42e-01
MGVLVSGTVIQGVRAHDLASKAKSCRSRSQSRLPPGGRDTNSSLGMLVSSLDTSSLHPKGARYDLLDISRVALEARDRHLRDILYDLLGGVFSNSSRASGHRWRRHRSHQSQRDGAAAQLASHLMELELDQFMVVYHGMLVKLTRKMEPQLSSPSASGRSLRNTYSSECWRKKRHPHRLLAEVGDDGHLKDEAGREVLRLEVELLQQQHEERRDRQRQPAGEVGDEEHELPGARSPRRITAGEQAAACGKKSIRRSRLYRVSSRPQQKTEKVNFQNQCSGIEAPRAWLSKTIKCEGLGLVSSPKASPGATIGSLNQGAATWLDKTVYSRISTEGPNPHGKVSVWATHSKVPGFRNKEYPGLDQGQAGGGCIPPPGRRFPLRQKYTQDILKNFGMKNAKPIKTTMGTNGNLDLDTGEHAKREMVTGENLEGSGRKNDEQTPSKETDDKHKEESASSIKSHRKGDKKKKKTKKAVYYETDSSSPSTSAKAPQVGDEDYNSDEAAQIKHFNF

SEQ ID NO: 54538 - protein, 170 aa, Zea mays
  Coding DNA Sequence Number=SeqID_11163
MQGGWAIARQWSGQGALNAEAAHRHQWNGQDSLNAGAAHGPGALRQAPPVGLRHGHRPRGNNGSPPERGAEAYAVWSGHVSASDPRLALVKAWVFFVPESQDLAVSGPDPTQGGSGTRPRGPGTPVEVLDLARRSGALLELLDLESKEILQLPHQGLNFLHHNSTKLFTR

SEQ ID NO: 54539 - protein, 146 aa, Zea mays
  Coding DNA Sequence Number=SeqID_11164
MGKNNKRKREPTPPSEEFGDSEYSEEEFSSEPEGSPTPASPPASSDDSDDSQGIAAEVWTYIRAVERAGLEGSDESEYSSDEEDSDGGDEGEDDDDDDDDDGDGSGRGGGDGSRDSTKGDSSRGSTKGSSRGSTKGGGGGRGRASG

SEQ ID NO: 54540 - protein, 50 aa, Zea mays
  Coding DNA Sequence Number=SeqID_11165
  Homolog annotation: Hit_ID=P00071; Match level="QueryCoverage=62%, HitCoverage=27%, E-value=2e-08, Identity=87%"; Hit description =Cytochrome c
MASSIGSRMRQESATEVERQYIPGTKMVFPGLKKPQERADLIAYLKNATV

SEQ ID NO: 54541 - protein, 146 aa, Zea mays
  Coding DNA Sequence Number=SeqID_11166
  Subcellular localization annotation: CTP_CleavageSite=30; ConfidenceScore=5.10e-01
MSGAPEDSSANSSPSGNSRGNSAIIHRTVRCSKEERPQELGSLGNSLRLLRYNSPDMSGVHRTVRCNSGATATSGANGYLQRIYCAPARAEVRHAHAGAPDTLQYMSGAPPNIQAGPEVRAPTVGTQLEMATGINPPGFAIPNPYP

SEQ ID NO: 54542 - protein, 68 aa, Zea mays
  Coding DNA Sequence Number=SeqID_11167
MVGVVSGVEDPPLEAAKEWRDGASTGRAGGGTSGGGAGQRGGRLCLPMGEVGSIREKSRVEQRRSRAD

SEQ ID NO: 54543 - protein, 520 aa, Zea mays
  Coding DNA Sequence Number=SeqID_11168
  Gene Ontology: Mol. function=catalytic activity; Cellular component =nucleus; Biological process=metabolic process
  Homolog annotation: Hit_ID=Q8S0S0; Match level="QueryCoverage=100%, HitCoverage=100%, E-value=0.0, Identity=69%"; Hit description =Selenium-binding protein-like
  Pfam annotation: Domain name=PPR; Domain location=10-44; Score=38.9; E_value=1.8e-08; Accession=PF01535.11; Description=PPR repeat
  Pfam annotation: Domain name=PPR; Domain location=114-148; Score =32.7; E_value=1.3e-06; Accession=PF01535.11; Description=PPR repeat
  Pfam annotation: Domain name=PPR; Domain location=215-249; Score =40.5; E_value=5.9e-09; Accession=PF01535.11; Description=PPR repeat
  Pfam annotation: Domain name=PPR; Domain location=286-319; Score=4.7; E_value=2.2; Accession=PF01535.11; Description=PPR repeat
  Pfam annotation: Domain name=PPR; Domain location=352-386; Score=4.3; E_value=2.4; Accession=PF01535.11; Description=PPR repeat
  Pfam annotation: Domain name=TPR_4; Domain location=285-310; Score =12.6; E_value=1.2; Accession=PF07721.5; Description=Tetratricopeptide repeat
  Pfam annotation: Domain name=TPR_4; Domain location=9-34; Score=4.6; E_value=11; Accession=PF07721.5; Description=Tetratricopeptide repeat
  Pfam module annotation: Pfam domain module=PPR::PPR::PPR::PPR::PPR::TP R_4::TPR_4; Domain location=10-44::114-148::215-249::286-319::352 -386::285-310::9-34
MALPAGTVVVAYNAAISRCARAGLYARALALFREMRGRGLRADEYTLPPLLNSAAQLRGPPEAVAALHALLLRAGLAPHLHVANALVDAYARLPHAGAAAARAVFDEMPRRDVVTWTSLLTGLARAGAHGAAVRAYHGMVASGVQPDEFAVPAALSSCAASTALDLGRSVHAAAVRLGLRPFRSVENSLVSMYAKTGALRDARAVFDAMPARCTITWTALIVGYAQNGRGRQSLEVYADMVRSGCRPDYVTFIGLLFACSHAGLVDAGRAHFRSMVPVYGIAPGPDHYACMVDLLGRAGRLDEAMDLLNRSSTELDATVWKSLLGACRVHQNAELAERAAEMVWRLDPADAVPYVMLSNLYSRARRWGDVARIRALMKARGVTKEPGCSWVGVNGITHLFHVEDRDHPRAAEIYRKVEEMTERIRVEGYVPDTDWALQDEVPEWRQRGLAYHSERLAVAFGLLAVPAAAPIRVFKNLRVCGDCHTAIKMVAKVYGREIILRDANCFHHMKDGECSCGDYW

SEQ ID NO: 54544 - protein, 49 aa, Zea mays
  Coding DNA Sequence Number=SeqID_11169
MADVVEVAVLVAAKKFIHLDPSPLSFQSAKELFSLKWMLEIALSPERPT

SEQ ID NO: 54545 - protein, 237 aa, Zea mays
  Coding DNA Sequence Number=SeqID_11170
MRDGEAAQKAKVADCHPVPGFRMRVNPTVPGRTTELGLHVAAVPCNSLDAPPITIQTQNAQLDHDLDMSLTGDFLVVGYCPVSNARGVATVLEEPETEGGRRAPNQAVVVGPAPLTEAIPVSSMEDTGARDAAPTVASSTISDLLRAIPDTLDATWACGAGVVEEVGPLERPRKPVEEYIILPPIVGVGGDLVRARPDFSTWGGPTLTWMATDGDPYFVLDNTKREMWVEFVTEPPK

SEQ ID NO: 54546 - protein, 92 aa, Zea mays
  Coding DNA Sequence Number=SeqID_11171
MGRGAVARVACTLRGKRLDGGVSVLSHTLESLSLSRVRKRQSFVAFAPRWYLMKKNKNEDTGGLGPPHRIFLFDNYWEEFLPPLICVLSTRL

SEQ ID NO: 54547 - protein, 211 aa, Zea mays
  Coding DNA Sequence Number=SeqID_11172
MAVNSFLIVEANHSLNEVHQESMTETKRGVQKLPREFRSQLELLSIPLFKQLAATNELGFLFDIACRFKAVLSTARAATTGDDVTIAKAQHPCGCCSRIAQRRPPPQIVVIRRRCTYRSRRHTILVVVVGQPTSFSNKFSTSIISHRKIGHPSTHWVYQVVSNFRLLGDMEIFEPTEHYIQGIIRHVPSYTGKFDPHAYIDWELKMNAWKM

SEQ ID NO: 54548 - protein, 218 aa, Zea mays
  Coding DNA Sequence Number=SeqID_11173
PIDGGVQFRKVVLAAGDEEGLWRHGFVSHCRGGLTGIGEIAAGKHDDTTEALMVNSVAKLLFVRRECDVWAILQRHQAKHHVNEQLALKSAEVADLLSLCTELKDDVATERGKVPPLEEEVRRLRARVAPLQEEVWLLNGNLPAVAGEQDESRRQVTEASLRVDSLTRELEVERSEGQALRAWMGELEKDLETIAQTSLTLSVTPGWLPREAVKLSQA

SEQ ID NO: 54549 - protein, 430 aa, Zea mays
  Coding DNA Sequence Number=SeqID_11174
MAPCFRRTRGKRGPTCEPESARRAQAETAEPAALIGDDDSGQWAPHGIEAARGQLLVVGCVARLAAVEVLGRLGALLASPGGAPTTRSPRFPSVLLETSLSNNLVKATWRSVHFVAWCQVSPITWRDYIVVCTTSRSADARSRSSSSKTLPPRLSRRWSLRSRLPLHLSQRCPLHHHRASPAAGGDPDGDGDDDDADGSSSHDTELSEEPEPEGWIARPITRDAARGCHFHNTLDTLLRRASDRHTWFIEYCCVVYQQRCGLYPDQWEPTCLVRHPDDDLWGAEAFSEHYSITERDTAEAAMQDAPRQALSQYCSLFSGVADGLDLKYYPRHSTDSARGVIVSPVGEGNPRLNNMVNLAAVLNIELDHTHDELGKVRAEVAELCAECAARHYLDCGSTAPVWIQHPYRSLPCGRFDYGTPDCRTRIDLDP

SEQ ID NO: 54550 - protein, 191 aa, Zea mays
  Coding DNA Sequence Number=SeqID_11175
LEADEAAKAALLAAKKGKALALTHSTHQEATEDDVLRTCEDDALRTCGPEGQPQPPPGFAPPEGADLTEDGEVLDISAEEQLQLRALRIKNRNLHMQKEILEAKRQRVSALAKVRQMIRDEEQKAQDLEQEIALMQREGHLGLQHGCWNLLSVARRPTRVPERPAPCAKDACALSYLGYPQNIPIKQGYRL

SEQ ID NO: 54551 - protein, 154 aa, Zea mays
  Coding DNA Sequence Number=SeqID_11176
MEYTKHALQDNPILQARVLTLEGSSSTLGIDNTFGEVRPSLGRRRGTKISTPKDDVIATPGPSLPGSSPGIQPEQAARSVTPGPRPAVLQGPNSTSVHADTAAPGLGSSESGRGVPLTKLEKPRTTRPTEPRDSYASGIRIPHSSPLHGATHAW

SEQ ID NO: 54552 - protein, 532 aa, Zea mays
  Coding DNA Sequence Number=SeqID_11177
MDKDRQGAAQKRQPVVRLHEARPKRQRGAAKAAAPGGGQPPLATKSAVPASSRAPDAAAAAGGSKSGKAAPASIRVPEAAKAGRDLPPLSKRVADFATDISVDDYLVGADEGQLVVVPPAAATTAAAVVPKAKGGALSAGGEMPTLTAVRDEAGAVSRRLKEMKEAANFADRAASGALTVVVSAEVERLRTQHADAVREKSVADSKCRKLADKVAALEGEKTDLRRQLAEERNEANEALAKVQAAQAEANLARVEGGLARERAEQLEERLHALQSRVERAEAATRMEAERTRKQLMNSYHELGARTVDFEVPDREPGLRCLEWVQEELQALPTIMEGFMSYASLVTCEGAMNALSREGCRHYEVFDQADEDFERDIYKVEDPIVKESAGALYDRMWGPHGREVVRERAETARGQATRGERVDDFGALNSVLPDPESNPAEAALEPLPKTAEGAPDAPAAAAAGGGPPPETAEGVPDAPAAAAAGEGPRSRCRRGFFTCILHGSASLKTSPPGRKRVRARIKLFLRITRANQP

SEQ ID NO: 54553 - protein, 168 aa, Zea mays
  Coding DNA Sequence Number=SeqID_11178
  Gene Ontology: Mol. function=nucleic acid binding
  Homolog annotation: Hit_ID=Q5NKQ1; Match level="QueryCoverage=77%, HitCoverage=19%, E-value=3e-41, Identity=52%"; Hit description =Putative uncharacterized protein 9C20.4a
  Pfam annotation: Domain name=FAR1; Domain location=81-154; Score=7.4; E_value=1.2e-05; Accession=PF03101.6; Description=FAR1 family
MASTGAGDDMPPVSSVHKPTASAIAVYTKGVYVTPPVTLRAPGHIDKHTKTADVVGAEKHIPMRHIGPNEQDTPHILQSHKYRERKNCKWLNCSMEGKNAERVAGNPRIRNTCSKRTHCKVGMKLKKIYDDAKENVISVWIDLVNYEHNHEFLKKDTEKRAIAMQQNA

SEQ ID NO: 54554 - protein, 45 aa, Zea mays
  Coding DNA Sequence Number=SeqID_11179
MDLLSGAADHGLFVPDVVKKGLATIADEVNQLAQRARDNNLNQED

SEQ ID NO: 54555 - protein, 273 aa, Zea mays
  Coding DNA Sequence Number=SeqID_11180
  Gene Ontology: Mol. function=DNA binding; Cellular component=nucleus; Biological process=regulation of transcription
  Homolog annotation: Hit_ID=Q69U51; Match level="QueryCoverage=63%, HitCoverage=51%, E-value=6e-77, Identity=82%"; Hit description =Putative OsNAC7 protein
  Pfam annotation: Domain name=NAM; Domain location=15-155; Score =265.1; E_value=1.4e-76; Accession=PF02365.6; Description=No apical meristem (NAM) protein
MADDEQQQAAAYACVPPGFRFHPTEEELVGYYLARKVASQKIDDLDIIREVDLYRIEPWDLQVQERCGYYGGGQDQEEPTEYYFFSYKDRKYPSGTRTNRATAAGFWKATGRDKPVLSSSSSGVVIGMRKTLVFYRGRAPNGRKTDWIIHEYRLQSNEHAPAQEEGWVVCRAFHKPMPNHHHHMIRHAAASCCYYYPAPAAAPPAAGLPPHNGHLHLHSPSAESAVDWNLLSSLLPPGQLDFVHHTLTPPPASSPSSCSTTTTTTTTRNNNNE

SEQ ID NO: 54556 - protein, 48 aa, Zea mays
  Coding DNA Sequence Number=SeqID_11181
MESHDLRVERESQLVGGNEIVGFGIDSGNGEDEAVEGDHQEFQDFDEF

SEQ ID NO: 54557 - protein, 283 aa, Zea mays
  Coding DNA Sequence Number=SeqID_11182
  Homolog annotation: Hit_ID=Q6QP51; Match level="QueryCoverage=34%, HitCoverage=46%, E-value=1e-14, Identity=49%"; Hit description =Putative growth-regulating factor 1
MAAPNQERGYSERDPSPRRKRAPSPPTDQRFEGWPPKGSTAASEHSGFAPTTGQWLAPKGFDSRLRARRARDDSGYVRYMAEAWATLQSRQGRSDRTHFAPPLADLTGKQRRLHCFDCCATRHGLGLNLDLGRRTPPRPTPGLGLNLDLGRRTPPRPTLGLGLSLDLGRRSPPRPTPGLGLSLDLERRSPPRPTLGLGLNLDPGRRTPPRPTPGLGLSLDLGRRSPPRPTPGLGLSLDSGRRSPPRPTPGFGLNLDLGGVTASPDLGLGPTTSQGGHHYPTPS

SEQ ID NO: 54558 - protein, 110 aa, Zea mays
  Coding DNA Sequence Number=SeqID_11183
  Subcellular localization annotation: CTP_CleavageSite=33; ConfidenceScore=5.18e-01
MVQLHATYMAVCPFDRCPVAFPHQWSSRMMTTSSMVGRSKPGCGLCPALSFKDLHHPCCGGGRAEPEFYLPHGPAGHLFLQHSGERALIGLAKGANFDNAGLVGRKRRQL

SEQ ID NO: 54559 - protein, 179 aa, Zea mays
  Coding DNA Sequence Number=SeqID_11184
MSPNSGGYDDNRDGAIDGPSPQHMLEPPTLLLPGCTPLWSARKYDGEVHSPEMGSWEAGHDARRSGAVEDIPRSNCSGAATPREKLVVAEVFRCPAAALERPADARAYTNYELDGGGPNLSLLPLSLSNCFLTRLVEAWRKERVKASAPPHLNPFRLVQAHATNHPKLTAKLRHARRGG

SEQ ID NO: 54560 - protein, 265 aa, Zea mays
  Coding DNA Sequence Number=SeqID_11185
  Homolog annotation: Hit_ID=A2YGC2; Match level="QueryCoverage=45%, HitCoverage=55%, E-value=4e-08, Identity=28%"; Hit description =Putative uncharacterized protein
MARLRHTARKSVIPFLPSHLAERPLRRPVAGQSSHLERLHHRLHVEQEQQGSSFSLQQEIESAPPAPPLDAPAPGVAAGGDQDDGGGDDSSSYDTDFSADQESEGWVARPITRDAARGCHFHDVLDTLLRRALDRCTWSIEYRCVVYQHSRGVYPDRWEATCLVRRPENSLRGAEACSEHYSISERDSAEAAMQDAARRVLSHYCSVLGGVADGLNLKYYPRRPSGSTGGVIVSPVGENNPRLSSTVNLARRAKHGTGPCIRRAE

SEQ ID NO: 54561 - protein, 188 aa, Zea mays
  Coding DNA Sequence Number=SeqID_11186
  Subcellular localization annotation: CTP_CleavageSite=20; ConfidenceScore=5.41e-01
MQLRGSWYLSAIVRLQGFSSVSPAASPRRWSPKTVTTSPWVGRSKPGCDLGPALSFKDVHHPRWGGGRAEPELYISRGFVGQPLLQHSRERALTGPARGADFGNTGLIDDGRRQLQRVGLAGLAPGAPSCRKGGCHAARTGGPPKTSRAARAAFVFWGCPAFAPVRRLRAEVGALLVREDLSGDLPEG

SEQ ID NO: 54562 - protein, 122 aa, Zea mays
  Coding DNA Sequence Number=SeqID_11187
MAPKRASSKAAPSIDEAAKAALLAEKKGKALTDNTPQEAFEDEAVSKRQRQVHPTPEGTLRICSSGGVPQAPPLEGEDAIEDGEVIGISTKDQLQLQALRIKNHNLQKQKDILKAKRQRVTA

SEQ ID NO: 54563 - protein, 320 aa, Zea mays
  Coding DNA Sequence Number=SeqID_11188
  Subcellular localization annotation: CTP_CleavageSite=30; ConfidenceScore=5.40e-01
MSSRSLMHRVFPPSKPPDGGYPPSFRLIVGGMQLRGSWYLSAIVRLQGFSSASPAVPPRRRSPKTVTTSPWVGRSKPGCDLGPTLSFKDVHHPRWGGGRAELELYLPRGFVGHPLLRRSRERALTGPSGGSDFDNVGLVDGGRRQPQRVELVGLAPGAPSCQKAASAPCAREDRPRCRALLGRRSYSGAVLPLHRYGASARRDVCASESCFSRKVMSEVSVSRRRRSPSARSALPLTRTLTRPWGSVTDSVEKARRIASAEELPNVKTCSVRGITYPNVSYLSQKVMSEVSVSRRRRSPSARSALAAYVYSVVFRIHFLK

SEQ ID NO: 54564 - protein, 465 aa, Zea mays
  Coding DNA Sequence Number=SeqID_11189
  Homolog annotation: Hit_ID=Q6JAD6; Match level="QueryCoverage=66%, HitCoverage=69%, E-value=2e-25, Identity=55%"; Hit description =Putative uncharacterized protein
MPCTKNVSASGGGDDEDPPRPFRQVKGKTVYLEQQEGRKKWRLDRAAQAAIAAAAATEQAERGAQLQIPSDQIAYRVRRLASRPRSSAPTTPTTASTPPPTSPAPVTPAPSTTSAIPATSTTPASTAPPPAPLSAPLIPPARFWERDETEVQPLAADPRLFDLQRATAARESFFRAQMSAQIALRVHRLLDLPAFLLAAGADSELMRRTLLPRMGYREAATHIQLWLLGALVSHSEFDVVDFLICEIEDTVLDAPEDTVPAPSPVIDTQAEDTTFHQFETQGAAVPDDDDDDDDVLGVPPPMPPRTHDHEAGSSSGAALAAPPAIDPALAAILQTLTQQQAHLAATIQDRQDTLQQQLLQDRTENRAFMTLMLQHTSVPIPPVQSAPPPPLQAPIVPAIQPGPPLPTAGPSSSSLRPVTLVFTSPVICSVSTQSLVPPSYTVTAAAVAVSVILTAPAAPAAQPPQ

SEQ ID NO: 54565 - protein, 331 aa, Zea mays
  Coding DNA Sequence Number=SeqID_11190
MDYQLERYPLTAANVEDGGERGSSRVGGERRSKSVAGEGRVFAGLRTQRREYWSEDWGPRGRAAQMPFATGSTASDEGLEESSERGAESPGMEESAEIPGVVAGLRFCDLPSKLVSVSLRTLTTSEFRYRCVRACSGFVDAAKTTSRLVPVGGVASGGRQKLTLKLNSLAATTSTVVSSAGRPLASASEAPRHDHPTIRRNATCPSAHVVSGAESVRHVTVPERPAPCVKDACALSYPGEARSTRRPRRARYNGPDHTWASEQDEAARWEDLIAGLRLASYRAKGVPVRFVFVGPVAPARASSGGWRLCLRPNICPPRDQFDKVTWCRRRR

SEQ ID NO: 54566 - protein, 30 aa, Zea mays
  Coding DNA Sequence Number=SeqID_11191
MDGHPAVPLLIEVLSTNPLGPCAADKNEDA

SEQ ID NO: 54567 - protein, 383 aa, Zea mays
  Coding DNA Sequence Number=SeqID_11192
  Homolog annotation: Hit_ID=Q6I5L3; Match level="QueryCoverage=50%, HitCoverage=75%, E-value=3e-42, Identity=50%"; Hit description =Putative uncharacterized protein OSJNBb0088F07.6
  Pfam annotation: Domain name=DUF1218; Domain location=47-159; Score =81.7; E_value=2.4e-21; Accession=PF06749.3; Description=Protein of unknown function (DUF1218)
  Pfam annotation: Domain name=Voltage_CLC; Domain location=18-374; Score=-182.6; E_value=0.072; Accession=PF00654.11; Description =Voltage gated chloride channel
  Pfam module annotation: Pfam domain module=DUF1218::Voltage_CLC; Domain location=47-159::18-374
MAIQMDKTSIIVCSVIGSLGLLSAILGFSAEGTKLTPYTILVYGDDCLYPQNPAIGLGICAAIFLVVAQITFSAVGGCCGCCRSRAIPSETKRIVSIVCAVFSWIAAVIAFALFIQGAAWNANVVRVEQAPYCPYLKDGVFAGAAVLALAATALSITSFIMQRTQPAAAATATATASAVGTPNMPGGQSPSPEVVMGQPLFPSGKAHQNDYPVKPQGYEHEQQPHQVQQVPPPTDSHHPPQGYAQSAAPNHQLPPRPAPAAAAAAPAAVAAAAAASAPSVLQPALGTVAMGQPLPLQVPPQYCLPVPAPQIGGVDIPAALPSAAAPAAGSGSTLSTAIRNEVVRQGIRMAAEVVKDSLFPENGGSVLSMMTDSAGGDAVQVTN

SEQ ID NO: 54568 - protein, 1036 aa, Zea mays
  Coding DNA Sequence Number=SeqID_11193
  Gene Ontology: Mol. function=metal ion binding
  Homolog annotation: Hit_ID=A2X0C7; Match level="QueryCoverage=82%, HitCoverage=45%, E-value=0.0, Identity=68%"; Hit description =Putative uncharacterized protein
MASQHAPPRRELDLDAFLPSSPTSSGASDADPADDDHRRAVDDLLRLLSSSDSDSDSEESSRIPSTSIQTLSRVQAPAPVAEPSPSPSPSASPSPRRSASALPSETLSSLVARTFSSNGASSSSKPLPSLFRGVRPSPKPGAALAAAAAASRAVLTPHAAAIKSRRSVSAPVEKVLEEEGSGSEGSKEFLPTGSLEAEVEEKGDSEAVADATKQTAGGNVGAELGEDKQAEVGGEENAEAIKLVEASPLDALAAEDSSGHEQGNDANLAETDQVGNQIEAVYEENEDDQTGGDNHVQSGQGMDLIAIALEESSDDEHEFERSDSILQEQVESGSLIDKVIEDRVEQLEASRKAENTEKKLKVSMKPLEWAEELEKRQASSGQHWEEGAAAQPMQLEGIGKGPPAIGYMQIEMDNPVTRVMSSPSFRSDHGSPQVLAVHRSYIAMGTSKGAVIVIPSKYSIHQADDTDAKMLFFWNQGEKTQSPVTAMCFNQQGDLLLVGYGDGHMTIWDVQKSAAAKVIYGEHTAPVVHACFIRQSKAITGDSKGVVLLHTFSIIPVINRLTVKGTQRLFDGNTGIVLSACPLVMDESFGFSNSSAQGNQTTSSSGGLGSMMGGVVGGVVGVDSGWKFFNEGSSPMEDGVVVMFIMHQHALVVRLRTNIDHVDHIETFSRPDGAREGSIAYAAWKYTSYLNESSSVDEERVSWLALAWDRQVQVAKFVKSKIFKHKEWKLDSSAVGVAWLDDQMLVVLNLRGQLCLFSKDGSELRRTTFVPDGLLFDDTILHHAHFFNRFGNPERHFNSSVAVRGATVYILGPSFLTVSRLLPWKERIEALKRAGDWMGALDMAMRLYDGQTQGVVDLPRTVDSIRDAIMPYLVELLLSYISYVFEYISIALPNHTGKGGESGVLIEADRSLLTQRDEQYARVGGVAVEYCVHIGRNDILFDTVFSKFAAAESGGAPLGRPAAAHATTLVRVAVLEAEEKRQRRIRSGGHDSDKSNQEDDDSSKETTDPAGKVAAVVNPVGKVATTTNPMEATKRG

SEQ ID NO: 54569 - protein, 191 aa, Zea mays
  Coding DNA Sequence Number=SeqID_11194
  Subcellular localization annotation: CTP_CleavageSite=73; ConfidenceScore=5.26e-01
AKVEVPPEVKVGVLLLRPRSSPSLCVGRGGDRRLRPGLSPSPGVGRSGSSSSSGAEPESEPWGRAKRSSSSFRGMSPSPSPWGRAKRSSLSSGAEPESEPLGSGGAEFLWRLGPGLGCCQPHSVEWHSSQSGAGGAVLLSGRSVERRSDYGHFGSVNWRARVRIKVSGHLCIKCPCDLVGWRGDLAKVASW

SEQ ID NO: 54570 - protein, 121 aa, Zea mays
  Coding DNA Sequence Number=SeqID_11195
MGLSVCGLLCEGGDEDDGYDYDYGNGKWYSFRLERMARLRHTARKSVIPFLPSRLAEHPLHRPVTGQSSPLERLHHRLHEEQERQRQELEQQGSSFSLQQEIESVRSCSPVLPLEAPPDHH

SEQ ID NO: 54571 - protein, 59 aa, Zea mays
  Coding DNA Sequence Number=SeqID_11196
  Subcellular localization annotation: CTP_CleavageSite=33; ConfidenceScore=5.30e-01
MASPSTWVRVKFRNQQTTFRQQQQSRRQLWGKRAKAVASRHRRLWLIFRQASKKLRICR

SEQ ID NO: 54572 - protein, 70 aa, Zea mays
  Coding DNA Sequence Number=SeqID_11197
MEAEKTDLRRQLEELLVLPTIVTGFMSFASLVTCEGAMNALSCEGCRHYEVFDQADENFEREIFKAKDPW

SEQ ID NO: 54573 - protein, 313 aa, Zea mays
  Coding DNA Sequence Number=SeqID_11198
  Homolog annotation: Hit_ID=Q6QP54; Match level="QueryCoverage=15%, HitCoverage=20%, E-value=7e-08, Identity=52%"; Hit description =Putative kinase
  Subcellular localization annotation: CTP_CleavageSite=55; ConfidenceScore=5.35e-01
MVAPPPSPAAGKVTGQARMLLFRHRGKTSSISPLSGKLTAAIVSVARRRKEYHVVAVVEGHELETPETEQRPGLERLLETTHLELDGKLFVNTQQAPTWHANCRRFDPGGSLDRRGGCACSRGLQAFAREGESLFVSPSYRAATFSYEGPGPSFYRCKEKVQGNDVPPCNVVGPSPRSGEAVTPPRSESEPWGWARRRPSSEVEAESEPWGRARRRLSSEVEVESEPWGRARRRPSSEVEVESEPWGWARRSFLWRLRLDSAAVSLTLAGGTAVGAEAALFSCQAIPALNVPAIRSVGEAIWPRLLLREACPR

SEQ ID NO: 54574 - protein, 57 aa, Zea mays
  Coding DNA Sequence Number=SeqID_11199
MAPGEAVELGGWRNNSLAADSTPGAALDALDDGLGAACQRSGHDTLNAEGAYRLSVG

SEQ ID NO: 54575 - protein, 163 aa, Zea mays
  Coding DNA Sequence Number=SeqID_11200
MVEAGAVHHAARDSCTGPRGRDWAVGFNGGEEARYRRRWRAPCVMVRLLRTQELACQVHDMWAWAPMPKVGPLAVKVKRRTAADGGVLLTRWFAFFIHRGRRPRSLTRGPGPPCQRLVLTRRTSPLPSVEVKRRATAGSGVLLTRRFAFSVYGGRRPRSLTRG

SEQ ID NO: 54576 - protein, 297 aa, Zea mays
  Coding DNA Sequence Number=SeqID_11201
MNDCVKVRTRSLGMLRVCLGDSSICLGVPFIAPRQLGAVGGQQGRVKLPSVGWRTGQSGAPPDSHCSCPVRDLLPILAQSTIAESWQLAHQTLSGAHQTVRNGPRAHFPFSGPGPPCQRLGHPGARWSRSSATLRGVSWGNLSLKRDSPERGSHSHRSQRPFAFEFSALLCRRSHHGFARSSRTLQPKVALNLVRNLFGWGVSAFAGRIRVGVCSYSDLATGEFVFFISKLPSGLALPIPSFFMLLLGGLGLQLLHVTPCFILQAAIIAYLCGISVEATLLPASSSSIQGEGCSPTS

SEQ ID NO: 54577 - protein, 129 aa, Zea mays
  Coding DNA Sequence Number=SeqID_11202
MVDSKDLNGASPNSDTRLTNLSVAEHKRLKDDMKKIDEEDQRQKDQVLKVADKWFLSHFRVDCHHKTVQKRKINVEYMSVVLQQLPTIGDARSADDIPYIKISFDNRIKSIKYDCRRGNLLPGGGMHPP

SEQ ID NO: 54578 - protein, 274 aa, Zea mays
  Coding DNA Sequence Number=SeqID_11203
MRLILRYLFLTCGGGETARVSSHTFIAQQVVGNNVNELAKGGSSCEVKLQCRDPLPDRHRSKINQGPPYTDHSPTALAPFGYLRGSAQKTPRLRTPTVWTAGCFNTSTGALMQLSKAEGVRSDPGHPDLILRPRLDCPNIETQTVFFLTIEQGVPRDRRWRHHARRSTIAQTRKYMNLASTRVMHEGESEPLGRGLASDRGVDSAVHGAKQPGGVGLAPTSNSIAMAQPPSVGMTREHTRCHHNFPKPPAEDPLIPSSKNDGGGWVLLPPILLW

SEQ ID NO: 54579 - protein, 95 aa, Zea mays
  Coding DNA Sequence Number=SeqID_11204
MPCEGDAAAAAVDFEVRAFPLGFVSLAVLQICVTAQARAAHQARRNLIESEDASFRSSYRRMGSREPFEGNVWLSAMSMIKNALAGFNTSLVCYG

SEQ ID NO: 54580 - protein, 212 aa, Zea mays
  Coding DNA Sequence Number=SeqID_11205
  Subcellular localization annotation: CTP_CleavageSite=40; ConfidenceScore=5.03e-01
MRGDFSLSGSMILTSLIEGCSQSQTAAFLTSIISAPVITPAAAVPSGVRGGAREQESPGRRGALQPAGWRSWRGREEEPQRPRRYSFRRHRSGAAEWAAVVLFMVLAVVVLLGAVAVLVVVLLLQPRVSYVAARAGWRCSAPTRSACPPGASSRWRTWRAQGAPLGDAGSAAMEAALRDGVVPFRVDGEARTRWKVAGIIGVDQWSAIGARF

SEQ ID NO: 54581 - protein, 81 aa, Zea mays
  Coding DNA Sequence Number=SeqID_11206
MQGSWLTAIAAKSTRDLPTLTTPLLPLPLSAIANYPSDSGVNKFIMALDWASIFRECRGSGKESPDTENSRIGLRVGFSEA

SEQ ID NO: 54582 - protein, 74 aa, Zea mays
  Coding DNA Sequence Number=SeqID_11207
  Gene Ontology: Biological process=cell division
  Homolog annotation: Hit_ID=Q0DTM7; Match level="QueryCoverage=78%, HitCoverage=21%, E-value=6e-18, Identity=79%"; Hit description =Cyclin-J18-like
MPNTSCFNPFQVAAYAISVPKQTWEFPILPWVRFATSYDEEEIMKIVLTILLHVLKLDGIEEKGKGRFDARCLS

SEQ ID NO: 54583 - protein, 152 aa, Zea mays
  Coding DNA Sequence Number=SeqID_11208
MKRLGILPSVGQPTTAANGEVALEHYINLFKGRYCLPMSQQNCKILSWKGDVGFPPKPRLSLAFSCRGRARARGSGEAEVVRPRPGRSPSPGVGRGGVSSSSGLARVRALGSGGAEFAVFRVLARVRALGSGGTEFAVALLARPDCLSDSLC

SEQ ID NO: 54584 - protein, 199 aa, Zea mays
  Coding DNA Sequence Number=SeqID_11209
  Gene Ontology: Mol. function=inward rectifier potassium channel activity; Cellular component=integral to membrane; Biological process=nitric oxide mediated signal transduction
  Homolog annotation: Hit_ID=A2XM62; Match level="QueryCoverage=35%, HitCoverage=8%, E-value=3e-20, Identity=67%"; Hit description =Putative uncharacterized protein
MEPSTNPDLVSSGSIPGQSDGETLATHEDGGVQGSPGRLARDEEAGGSGGMSGRSSAGGPSGGECYTCTQPGVPAFHSTTCDQVHSPGWDANAGSSLVPVQGQAQAAAAAAPRHAAWWLLGPVLDPRSRRVTRAALELLDPAGPRRRAGGGLALLLRAFLEGLASSPRRSGTTLRRGRRRLSSTAASIAIAATPALLAA

SEQ ID NO: 54585 - protein, 149 aa, Zea mays
  Coding DNA Sequence Number=SeqID_11210
MALGKEVNLGTGKAIFAECFCQGTRQIYWRRGPLEGSLPSVSPPDTRQRGLLCRVPARPLGTGTGGGAHWTSLCRGPLKQTLGKIGLFAECHCWGEGRDATLRSSPFAAVAGLTKTKRAGTPFASFSTRRRHAVTSPRGTASSCSEAHV

SEQ ID NO: 54586 - protein, 347 aa, Zea mays
  Coding DNA Sequence Number=SeqID_11211
  Subcellular localization annotation: CTP_CleavageSite=51; ConfidenceScore=5.34e-01
MSSSSLMRRVFPSSKPPDGGYPPPFRLLVGGTQLHGSWYLSAIVRLQGFSSAGPAAPPRRRSPRMVTAGFWVGKSKPGCDLGPTLSFKDVHHPRWGGSHAEPALYLPRGSAGRPFPRRLGVEALAGPADGADSDNVGLIDGGRLHLQRVEVIGRASGGPSCRRAEAAREVLVTDGITATTCAPGHRAGVLVLVPRASAGESLGPFGLVVWGSSSLVKETPRPPFDGPRSGPTPKSISRGLGSGWRPWKLVDRGLRGNRPSRLLGPDSQRSPWTAPPSEAGSDFAEDAVDAEGAMAPFSVKTRACRIRSSCSKVMSEVSVSRRRRSPSARSALAAYVYSVVSRIRFPK

SEQ ID NO: 54587 - protein, 69 aa, Zea mays
  Coding DNA Sequence Number=SeqID_11212
  Homolog annotation: Hit_ID=Q5NKP3; Match level="QueryCoverage=97%, HitCoverage=24%, E-value=3e-14, Identity=62%"; Hit description =Putative uncharacterized protein 9C20.7
MASSRCPAHHPPEAQPATVHFVWQPNQESSVLAISCAFDDYYIKDCGVILAPEVKQRRTDSNDHSPSSG

SEQ ID NO: 54588 - protein, 774 aa, Zea mays
  Coding DNA Sequence Number=SeqID_11213
  Gene Ontology: Mol. function=3-deoxy-7-phosphoheptulonate synthase activity; Cellular component=chloroplast; Biological process =aromatic amino acid family biosynthetic process
  Homolog annotation: Hit_ID=Q00218; Match level="QueryCoverage=17%, HitCoverage=25%, E-value=7e-34, Identity=58%"; Hit description =Phospho-2-dehydro-3-deoxyheptonate aldolase 2, chloroplast precursor
  Pfam annotation: Domain name=DAHP_synth_2; Domain location=484-773; Score=-209.6; E_value=1.8e-06; Accession=PF01474.7; Description =Class-II DAHP synthetase family
MAEMDAATNASDPVMLDASSSLDPYSFALLLPPAEVVDAPNHDEASSLPPAHDFRVEQAKGEKVPVDTLTKCSTIDLNRGIYSVANTATIRAAMGAVVDVRDSVRFPSLLAAGNFPPPFLTLSPPHDEADPDFGSCQDKELLDHLEGVLATESVVVKRGQHIVPLKGKCVFVRADFNAPLDACSGSVVGSPSPSMQVKRAQRNRPPNSCRVHCASPLCSAAHASTPPSDFCAAARCPLENIEMSSCDAPHACPPLYYGYGDGSPMAHLRRGRVGWGASARAPMAMVVDNFSFACTRTTMGEPVEVAGFDHSQFSLPVQLSYLTPSHHHAHQVFDDRPQPRHLLRPQPGPPPSATIKAAATSTIEDEVLVDTTTKCSMRVLNRGVYLRRGLQEQLSARHLHLQLRRRRHHRHLRRILQRRVGARAVHGPVTGRDVAGPGCDSAVCRHHRVSPHEVPRPEQAEEAHLLDEAGRIGPRCCQVRQGVRQSQGCQAHVPGDQDVEAPQPHEHHWHQGRDPSAGQTGKVVLMKQLADCKPVQITATLGDLLNRKVSEGVRVLMLVWVDRTSVGLLQKDSMMDTHAKCSNTWSYPVSDAHRMESAAMPMLNLLTWSYAQSAHIAFITIDCAAMQRVTEGNLVFTEHTEQDDKFRELARRVTEVLEFRSAAGLIFCHPIMTTTEFWMSHECLLVPYEQALTHEEFFPSIYYDCSAYFLWVGKCTRQLDGGRSGSEIGALDAGVGIVGTGLGLIRLGIGAVAGLITSGLGTVSSGQGNFSIYV

SEQ ID NO: 54589 - protein, 284 aa, Zea mays
  Coding DNA Sequence Number=SeqID_11214
MAAQRPTPRQSELDGGDSGEGKEGSAQPRSLPTLYRREPSRSAGPRMPRVSPRLPIDAATRWKKQAPFRAHTQVLFTPRIRTGRQGSGPRTAESQCAMLPARHKLLIPRARLEGHVVASSERLDSGGDHLSTDGSGHLCTNDPPAVATTSARAPLRRGPCPCLPTGGGNEAIKAKESEARRQVAPVVSPAEATTSAEGSLTSGGDHLSTDDSGRLCTGGGDHLCTGGLPAVGGLRLSKVPSDSDQNHSVRSTKNTKVDVAPKLRARELRHNSGKGNQLKREKAI

SEQ ID NO: 54590 - protein, 27 aa, Zea mays
  Coding DNA Sequence Number=SeqID_11215
MAAPIGAGEIGPTREGGQGEERDYFRI

SEQ ID NO: 54591 - protein, 129 aa, Zea mays
  Coding DNA Sequence Number=SeqID_11216
MASLGHPDRFQSEEALNLVRDLLGWSASGLAGRIRVGAAPLGDLAAGEFVMFTSYISCGLALPISPFFLLLLEEFVTCRNSDGFDVPSYISGSEVLVEVATLEVLLALTRPLQRDSSILARTPAVEFCS

SEQ ID NO: 54592 - protein, 123 aa, Zea mays
  Coding DNA Sequence Number=SeqID_11217
  Homolog annotation: Hit_ID=O48967; Match level="QueryCoverage=94%, HitCoverage=24%, E-value=2e-24, Identity=53%"; Hit description =Putative uncharacterized protein
MVQIVEHRDLSPEDFLIEEGAASSVPRGSYRPAPSAAAVHTVQQHTPVQTFRAPSGAAHGGALSAARELLRNPPSSTASPGAMRQWREDVDCLLGMAHPGSARSRPRSFRRQHEASHLRAHPQ

SEQ ID NO: 54593 - protein, 206 aa, Zea mays
  Coding DNA Sequence Number=SeqID_11218
MDQAVSLAARSRRFESSFYPLKIRAHRLGVQCPIDPDCRRAVTALVPTITGMGDLVSGRVRGYVCGQVLWCRLWCWIRGYLLSSSLLRHEDVLSVSKVTVYRNAMNMRVFSSAASVPAKPRRSGSIQGHGFDSSLGELHWGVYTRLRGLDGAGASWTGPVYGGSGSGGRGHTAHGQTTVNWTPVRLECARKSVTDAWEGFIGAGAG

SEQ ID NO: 54594 - protein, 229 aa, Zea mays
  Coding DNA Sequence Number=SeqID_11219
MELGGCRSNSLAADNAPGATFDGVRDVCAAYGTGALFDNRLDRRVVYRMTPDIVCQQSGQDALNAKRAHRLPRPSAYVTDHKPRDSSGCPPERGAQGKAWTRASTGPLLMLGFPPSRDLVVVRSLLGETWDPSEGSGMPSWEFWTVFKSLVCAYRGPVFLCGGPNPMMPPGVYCLSLPRGAPRPAHVTGNELRNVLKKDSVVGKEYSRDLTTSALGSFRKVTVKNGSIV

SEQ ID NO: 54595 - protein, 145 aa, Zea mays
  Coding DNA Sequence Number=SeqID_11220
MDSIVFEVAELDGAIIICHTNSKTKGYLLVLNETDFGPCGQSLHAAQNHFHCAHSSGKWGPLVNGSASHELTPSAAGWWTPESAPSPSNRPRENGGARHGRGIRAVLTSSYLARMAERRQWPNRDFRPRLTQQATPASLNASSAP

SEQ ID NO: 54596 - protein, 533 aa, Zea mays
  Coding DNA Sequence Number=SeqID_11221
MERAGATPLGDLTAGEFMLFISYLSCGLALSISPFFLLLLEELGLQLQHLTPTPSFRRPSSPTCVRFLWGWRAVPPSFAISSCCAEANDYLTLSSDGPRLDQKQWRAKPSLAPEFEPVLDRIKSLVKRARLSCWFTGPNDIGRIQRGPGTDLSLDDLEVLVKGIMGPERAKERQSSATATIGSATAAAITTIGPATTTWGRCNCAGDYLSLNDGDAVEYIVDSYRGGPSCTRPYHEGAESEAVPVPLPRVLSRAHQALQETEAAIRREWEALEAEHQRLSDWRTQLEERTKAASQRFVFERFELERDRKDYKKDLQRVYARELEAARKEKRLAKKEEHLNQRVEVVTELQEKGLAFREEMFERREKLLAHHELEAEQKEKELEERVHRFQAAQAAPGPQAVEAMKKTLEDLQAEQRAGVQRITTWAGEASTTLVPLGVSPIPVSRPPTSISDALPVRDSAVDCLHRLDQILGARLEAEGGRLCRAVIEYVLTCFRSHDPTISLEPVIAGPVADTEDAARQGVQDTVEVVAERF

SEQ ID NO: 54597 - protein, 107 aa, Zea mays
  Coding DNA Sequence Number=SeqID_11222
MSSLSGGEWNRLPSPTMNRLHLGRNLLSGKLVDEGTDAETPSDIVKPENETWHNLCHEMRSQWWERLQMNESSGKGGIPVDVIVGELKSRLSRRRDNVARTLSSDET

SEQ ID NO: 54598 - protein, 275 aa, Zea mays
  Coding DNA Sequence Number=SeqID_11223
  Gene Ontology: Mol. function=cysteine-type peptidase activity; Biological process=proteolysis
  Homolog annotation: Hit_ID=Q5NKQ2; Match level="QueryCoverage=30%, HitCoverage=9%, E-value=6e-34, Identity=88%"; Hit description =Putative uncharacterized protein 9C20.3a
MWNDGGEWGSSRDAGENGVFSGIGSRLLLQQRRYGRRRMGNHEAPLYCRLRLDRQRAVEGADSSGRAESAERVGVLRWCRQLWKLRPGEERGANDGWPLLYMEAPTTYRPERPEIGQSSFSSTHRSVLHRHLLHSLRRIHDIESLCPLAQLHLKEAPNNRIGGAVISITYSLLHFYSRGLMLDAIYKMLYPGKELKITKDTVHLILGLPNAGGGKPLGIDEVVAANNLRAELGLSKEEFGVAALHDRLRKGFDDDLSIRSFFLILFNRLLFPTAS

SEQ ID NO: 54599 - protein, 72 aa, Zea mays
  Coding DNA Sequence Number=SeqID_11224
MKIMKTRKMIKRFGVKDHHTQESTKRFKEITPSTPFLVIFKRGIEDALRDPDWVDGNARGAQQLSQGMSYVI

SEQ ID NO: 54600 - protein, 164 aa, Zea mays
  Coding DNA Sequence Number=SeqID_11225
  Gene Ontology: Mol. function=nucleic acid binding
  Homolog annotation: Hit_ID=Q5NKP8; Match level="QueryCoverage=100%, HitCoverage=27%, E-value=7e-31, Identity=47%"; Hit description =Putative uncharacterized protein 9C20.4c
MKVVHHASLSKAGNDRALEMMDELLGLLMRVEPDIGTSESCGTSGGDDIQVEAYETEDIVRDDLRNVDDGNEEIVMVSNTNECNTNDVQCNISICTLEHNTDMHLVDSSATDVEARKKLEFHREGVNIARPDKAKPKGRTIKSSEQQVLKLGAKGAKKMSRKCQ

SEQ ID NO: 54601 - protein, 219 aa, Zea mays
  Coding DNA Sequence Number=SeqID_11226
  Subcellular localization annotation: CTP_CleavageSite=10; ConfidenceScore=5.11e-01
MPLKPRASCVAVAVAARTPRGVACSPTLEVPPPRGPRDAVACPQGPAVAHPLDRRAAATDLGTAATTPNQGTVATARRVVSPLHCNHQYHADFDICHDLYGLINGEHVPHMLEEISSYIVSHQTRTTIRSCLNKKNNPRVIDVGDNHEALLLNDGQRGAAALDHVQVVASRELVVHSGACDHVGLLLEVKLTVAKLLLVIDERCQCECLLLMVFVRGFK

SEQ ID NO: 54602 - protein, 135 aa, Zea mays
  Coding DNA Sequence Number=SeqID_11227
  Subcellular localization annotation: CTP_CleavageSite=73; ConfidenceScore=5.24e-01
MQPGCTPPSAVTQDGDLQFDGGGKQTGLRPLPLPQPQGFSSSVVGRGVCRVGVGPCVGGGPLLPSVIGGKGVRRSWRWQLPRAWLSDPSGFGAAPGAAFHYGSWKRFFRRRDRRGRLLEICPRDNHRDEHISLYP

SEQ ID NO: 54603 - protein, 160 aa, Zea mays
  Coding DNA Sequence Number=SeqID_11228
MNRTPASKVPLQTELRFHLRRYEQPHSIGGPAEQRKTDEWLAVARSSSGDDGDFCSEGPNSSSDDLRADAAAMRPSPVPKLMRQGRAEGRRVGDERVEQCRAVAGVLHVLARFVQVLQMQHLRGIHTYREEAPRTELLGSRRRLGEGERRAAAAGLPVAN

SEQ ID NO: 54604 - protein, 149 aa, Zea mays
  Coding DNA Sequence Number=SeqID_11229
  Homolog annotation: Hit_ID=A2Y6J2; Match level="QueryCoverage=25%, HitCoverage=17%, E-value=2e-08, Identity=78%"; Hit description =Putative uncharacterized protein
MAGSARLRHGGARGTGEGRGRRCGEGMGREARRGHRRARFWPPKAAADCQTLSFSASFYKIRSNLLSRFTKNEFILESKSSIGIEFATSSLQVNGKGAKFCRAILAVATIGDLEQLAQAQGIHVPVPPTSRTLSLVFTSTYISTYRTSV

SEQ ID NO: 54605 - protein, 320 aa, Zea mays
  Coding DNA Sequence Number=SeqID_11230
MAERYQLPRSCVPPTTRRKDCGCPPFGGSEGGKTRCIREREDMVAFQGGHPPFKGDFPYLRPQRSWAESSPTRSKVLPLRRGGWVPRVMQAGPEQKKPNRRARCMQPPSGYEHSSAFAQTSGRKGGQPCRRHATAPSGRAPPTFNAPSMGAHAHTSCNRRAGRYVQATAPPLAPLPCLLDCRTNTTTRGNPAYDPAVLARRDGQYDQKWADSNGGGRRAGAAVTSSAKLTSHPGAIIPDRRSFFFGKTSQARTVRALAADRPQHQDDPRTEPIQKSKSALWTVRRISADRLRPRSDRPASGTDRPVGKDPKNPKVTGSEE

SEQ ID NO: 54606 - protein, 308 aa, Zea mays
  Coding DNA Sequence Number=SeqID_11231
MQPSHTPPPAVTRDGDLRLDGGGKRAGLRPLPLPQPQGFSSPRLGRGECRVGVGPCAGDGPLLHSVMGGGAGVARGAGSCSVPGLQTRVASEPLAAPASATAAGRGSSADAIAGAGHGLTSNSTAFCPSLPHEFWHGRGPPGSGIHPGVSVAAVRPPGAEVVVVAAAGAGDGAPFVGLPLLRRPSPSEWGCSSSLVEETPRPLFDEPRPGVAISVRTEAELARKWEPGWPEPSRVVRQRIRRRSRSAEASGRASALGRWLAEAPGVAGRAACSGRIPGEVLGSRRRPRLGRTLPKTSSTPRVLRPPSA

SEQ ID NO: 54607 - protein, 172 aa, Zea mays
  Coding DNA Sequence Number=SeqID_11232
  Gene Ontology: Mol. function=protein serine/threonine kinase activity; Cellular component=plasma membrane; Biological process =protein amino acid phosphorylation
  Homolog annotation: Hit_ID=Q8LPZ7; Match level="QueryCoverage=60%, HitCoverage=18%, E-value=3e-44, Identity=85%"; Hit description =Putative calcium dependent protein kinase
  Pfam annotation: Domain name=Pkinase; Domain location=47-170; Score= -82.7; E_value=0.0012; Accession=PF00069.16; Description=Protein kinase domain
MRLHILRGMKAEVILAFADICTHENVGTDVLKSVKFMCFFKNVGGHGQLLPLAGRRRAGGRQLFALPRIQREEEAAPSVVSLREACEDEGAVHLVMELYEGSKLFDRIVAQGHYTERAAANVTRIIVEVVQLCHQHDVIHRDLKPENFLFANKKENSPLKAIDFGLSIFFKP

SEQ ID NO: 54608 - protein, 85 aa, Zea mays
  Coding DNA Sequence Number=SeqID_11233
MRLHILRGMKAEVILAFADICTHEFDIILLAEMCHLTLALLNAVAFRGVGGPRGITVGIRGYALDSTQFEDKFDTLAHIGRILCK

SEQ ID NO: 54609 - protein, 303 aa, Zea mays
  Coding DNA Sequence Number=SeqID_11234
MASRAHVLGALLHPLDGLLYKAAPSPCFLYVRRGRNSMAAELHSSKLAAPSHGQLPSPAQPFQAPSTPVLPALLPMGASPAGEQRIPCPSGLQGASSISQQPLPWRAAPVGLLPPSVPCRRSSSSSSHAMARRLCSFSLPHKTASAQELLLHGRRPGWSLASALPRGRGSAQSCEQEHAMAGSAPSMDAPCCSLRPALSIQRVPFSSMENQQRAPFLAVRRGARRLFGKMRRKPRAAAALPFDLHSPRRVSSLSCSLRSPIRNAVENRASGRRRASRLARSTKCQAMWTAHASSHDLFRLIDL

SEQ ID NO: 54610 - protein, 374 aa, Zea mays
  Coding DNA Sequence Number=SeqID_11235
  Gene Ontology: Mol. function=protein binding; Cellular component =spliceosome; Biological process=mRNA processing
  Homolog annotation: Hit_ID=A7QJ94; Match level="QueryCoverage=43%, HitCoverage=60%, E-value=4e-30, Identity=48%"; Hit description =Chromosome chr8 scaffold_106, whole genome shotgun sequence
MDVTIREVVFSKHVNFSILSLNLLYFKKPDLEKTTETEQGVAQAILRGNIDFKREPAAASPPTTLFASSPTAPPPASPSRYRRAAGTLSLSARKFLGNHLTTAPGISVSPSEENMRIINRYIYRRKKQRSGHWYYFRSYWFVWRKKIERDVSQGQKAEIEKVKKRREERAIEKTQHEEEMTLLARERACAEFQDWEKKEEEFHFDQSKVRSEIRLREGRTKPIDVLQKNLNFLDEFDIELNEPYLVFKVSIICSSLSKYDKRYSSEPIPQQTDNQFEEEDGSFSPQLMHGNEDEDAIDPEEDKDELFDGTHVLNVKFDGTHVLKVKNVGAVELTSLSSSKNRRRLYSSVHPRSYGTLYMLGMRRVAARPLSLSQ

SEQ ID NO: 54611 - protein, 222 aa, Zea mays
  Coding DNA Sequence Number=SeqID_11236
  Gene Ontology: Mol. function=phosphoric diester hydrolase activity; Cellular component=nucleus; Biological process=DNA repair
  Homolog annotation: Hit_ID=Q5JNF3; Match level="QueryCoverage=19%, HitCoverage=12%, E-value=4e-15, Identity=84%"; Hit description =Putative uncharacterized protein P0435H01.26
  Subcellular localization annotation: CTP_CleavageSite=65; ConfidenceScore=5.13e-01
ARLRRLRPTAYRPRRLRPTAAGRAASAPPPAGRAAAPARHRQQATPPPCHRPGSRHRPGSAPPPRLGTDSGSCRRPCSPTPAVQTLARFHCYCIGFCIVLPWLFDASSRWEKRQAKVLEKVRRRMSQDDSRKGGSWSDIWGAPTRYEKNGALSFGTSINPQFIASFASAAGKRPHQDFDSQESDPEWGWWTANHELKKPSISLLFPTIILLSRRHQQQQQRC

SEQ ID NO: 54612 - protein, 442 aa, Zea mays
  Coding DNA Sequence Number=SeqID_11237
  Gene Ontology: Mol. function=transcription regulator activity; Cellular component=nucleus; Biological process=regulation of transcription
  Homolog annotation: Hit_ID=Q2QLR0; Match level="QueryCoverage=79%, HitCoverage=92%, E-value=4e-50, Identity=42%"; Hit description=Helix- loop-helix DNA-binding domain containing protein
  Pfam annotation: Domain name=HLH; Domain location=192-241; Score =50.9; E_value=4.6e-12; Accession=PF00010.17; Description=Helix-loop -helix DNA-binding domain
MEDDSSTFLQWAMNHLQHPAAATAVSAAYQQQDGGAGVGVRISGGAGDQEDSAAAFPSLQALRASQPQAVPGSVRVRNLTVQVADYGLTNSSSSGDSPGAAMDHDAAAGWSPHTARSRTTGLGGGSNSRPVSWNFSAASAQPADDRGAVGVALPDAPAAVARAQQRAASSAGRRGGGAGPSTAAAPASSPGPVQDHIIAERRRREKINQRFIELSTVIPGLKKMDKATILGDAVKYVRELQEKVKGLEEEGGAGGSGGIQSAVLVKKQLPPEDDAMASSHGGSGDHGGDGGGMPLPEIEARLSERSVLLLRIHCYSARGLLVRVISEVEQMQLSITHTNVMPFPASTAIITITAKVCLNVKPTIKSGNGKGDCGIVETRALYNRDITRGNCQKGRGGGGHHFVKNANARVEDGFNATVDEIVRRINSALHQHYSSSSEETRG

SEQ ID NO: 54613 - protein, 357 aa, Zea mays
  Coding DNA Sequence Number=SeqID_11238
  Gene Ontology: Mol. function=transcription regulator activity; Cellular component=nucleus; Biological process=regulation of transcription
  Homolog annotation: Hit_ID=Q2QLR0; Match level="QueryCoverage=95%, HitCoverage=88%, E-value=1e-43, Identity=40%"; Hit description=Helix- loop-helix DNA-binding domain containing protein
  Pfam annotation: Domain name=HLH; Domain location=192-241; Score =50.9; E_value=4.6e-12; Accession=PF00010.17; Description=Helix-loop -helix DNA-binding domain
MEDDSSTFLQWAMNHLQHPAAATAVSAAYQQQDGGAGVGVRISGGAGDQEDSAAAFPSLQALRASQPQAVPGSVRVRNLTVQVADYGLTNSSSSGDSPGAAMDHDAAAGWSPHTARSRTTGLGGGSNSRPVSWNFSAASAQPADDRGAVGVALPDAPAAVARAQQRAASSAGRRGGGAGPSTAAAPASSPGPVQDHIIAERRRREKINQRFIELSTVIPGLKKMDKATILGDAVKYVRELQEKVKGLEEEGGAGGSGGIQSAVLVKKQLPPEDDAMASSHGGSGDHGGDGGGMPLPEIEARLSERSVLLLRIHCYSARGLLVRVISEVEQMQLSITHTNVMPLRKRSPKWGRLVDRS

SEQ ID NO: 54614 - protein, 288 aa, Zea mays
  Coding DNA Sequence Number=SeqID_11239
  Homolog annotation: Hit_ID=Q6J9V9; Match level="QueryCoverage=45%, HitCoverage=45%, E-value=4e-52, Identity=81%"; Hit description =Putative uncharacterized protein
MAGDREKGYFERILLSEGNGPRALLLIRGSKVAPCGVRQPPQSTQAPSPLLIRGLKAGPSEGFDSRPRARRVRDDPGYVCYMAKAWATLLRYPRTFARPAGMICNGIPPEGGTEPSDPIKWVWVQQITYRVKLTTVSHDLPRVQPRAQQGAPPRPTSGLGLSLGLGRRSPPRPTPGLGLGRRSPPRPTSGLGLSLGLRRSHNLARPQPRPREKSPPRPTSALDRLCHRGYIITLPLPSCLRLRRNKTGVPSRLLWQQPSQESSVLGMSRAFDDYYIEDCGVILAPEVT

SEQ ID NO: 54615 - protein, 29 aa, Zea mays
  Coding DNA Sequence Number=SeqID_11240
MPMGDSISICLVVRINRSWSKPRCRLGLA

SEQ ID NO: 54616 - protein, 85 aa, Zea mays
  Coding DNA Sequence Number=SeqID_11241
MVLVSGILSVWKGYIGLITWVNAKTWLSTTTPEVGRSSLAPTEPQNTLAGENFTAVDNKLILSQDDETDDMIIEYLLKDPYGDLV

SEQ ID NO: 54617 - protein, 162 aa, Zea mays
  Coding DNA Sequence Number=SeqID_11242
MAAGVSGALYAKAKGANLAKLMMLELEKIKLILDLASAFGKPNPSAKQPLGLEVEEKTPHTGFLIEELQMSKSDVAAFKMNLGFGKNSRGKKPMSQLDEEEEFEDDYESDSQHGSPLYDEPWDICSDDEGNNSGGYDWLEDKSGGDVSNNKSDCTEGHGDFN

SEQ ID NO: 54618 - protein, 213 aa, Zea mays
  Coding DNA Sequence Number=SeqID_11243
MEQWPQRKKGAEGLTGGEIALAGELVGDEESGLTRARLVNQMGQGASPGIKEGVCTMNLRMTHRMARSTRAGGRPKSGEDDLGSSVKFCQVRGLGKLHGLLAKLTEWLAQLGSHWRELATVAEARVVMAGGGAACSRRRHCLTGEASATSPDISRPYRVWTRSHGRSTHHQRARPPAHTASPPTVTTADDPHLDVIARDPWTSPDPSPDLYRR

SEQ ID NO: 54619 - protein, 76 aa, Zea mays
  Coding DNA Sequence Number=SeqID_11244
  Homolog annotation: Hit_ID=Q8S474; Match level="QueryCoverage=50%, HitCoverage=4%, E-value=2e-08, Identity=71%"; Hit description =Putative pol protein
MAGGKDLAGAKEGWLAGDGAKGSHLANKKTKKWVQQKEQGITEGSPGLAHRTVRCATGQCPVHQGTPSQTSHLREF

SEQ ID NO: 54620 - protein, 253 aa, Zea mays
  Coding DNA Sequence Number=SeqID_11245
MVTSILMVGESEPGCGLCPSLSLKDFHHQGWGGDCTVPGSRTRVASEPLAASASATAAGRGSSTGEIAKAGHGPTSNSTAFCPSLPHKFGHGRGPPGSSIRPEVNAAAVQPPGAEVVVITAAGAGDGVPFVGLLLLHRPTPVEWGYSPVDYLNRFTKHESPCVKVTSEHEQRRSWLENENLVGRSLAGLSVSGTDAGVDQPRPRVGLAPLEDGLRTASPSEARSNLAKVVVDAEGAAAPFQRQDPSLQDQIVL

SEQ ID NO: 54621 - protein, 190 aa, Zea mays
  Coding DNA Sequence Number=SeqID_11246
  Subcellular localization annotation: CTP_CleavageSite=46; ConfidenceScore=5.02e-01
MNKNTGIQSAITNGTPVPPPQVRTTPFDRGGPVEQQKTDKRHAVTRSSSGDDDDFCSGGLNSGSIDLRADAAARRPPPMPKLVRQRRAEGRRVGGGASGRRSGRRFAFAVITAPKKGPGKGDAPKRILPREGTGLRASLLIRGSKAGPPRGSTAASDRVGPTPTTGQRFEGRPPEGFHGRLRLLGLRAHY

SEQ ID NO: 54622 - protein, 141 aa, Zea mays
  Coding DNA Sequence Number=SeqID_11247
MGKSKKGGSSSHHSSDKRKRELTPPSEDFGDSESEGSLVHASPPASSDDLDNSWGVAAEVWTYIQAVERAGLEGSDESEVSSDEGDSSDSSEEGSDGDDGGEGDGGDGDGDGGGDGSKGGGKGDGGSGNGKGGSGSGKASG

SEQ ID NO: 54623 - protein, 143 aa, Zea mays
  Coding DNA Sequence Number=SeqID_11248
IKEANKVKDRQTALLVPPPSKENRKKLVTTTVTFYPDVLFIGGRVESNPVSEMNQPRQKKNLFSGNLADEGTDAEIFSDITKPESGTRRSQCHETRSQRWERLQKNGSSGKGGIPDDVIVGKLKSRLSRKRDNAERVHFSDET

SEQ ID NO: 54624 - protein, 214 aa, Zea mays
  Coding DNA Sequence Number=SeqID_11249
  Homolog annotation: Hit_ID=Q7XBD3; Match level="QueryCoverage=15%, HitCoverage=6%, E-value=7e-09, Identity=82%"; Hit description=Zeon1 gag protein
MDEYIQADNDFRQRMEEAYMFSEMTRGFGGRLHPSLRPCNKPYTGHQLREAQEEEASVEEGSYKVSSSLISCEKQTIRIEFYPCKAGELVGGEESGLSRAKLTNQTGQRASLGIKEGGRPKFGEGDLGLPVKFCWVRGLGKLHGPLAELTEALARLGGDWSGLATAAEALAAMAGGKELVGAKEGWLGGDEIWSPKIQSISLLKPEANPGFCRV

SEQ ID NO: 54625 - protein, 125 aa, Zea mays
  Coding DNA Sequence Number=SeqID_11250
MRGKVNCCCLARVQLSVLHLDDGRAVRRRLLSPVLKRQPPLVRLPTAAVVASADETVSAICALGLWLFSFNGWFSSPVRGHEQGPSSGFETALDEAVGNCKALAEAAEQKEAEHVAMSEAISAFC

SEQ ID NO: 54626 - protein, 98 aa, Zea mays
  Coding DNA Sequence Number=SeqID_11251
MVVGATPTGWAKEGRGHDATIARCSPVDMVSLGLGAGRLWCSQERPAAADTGEGSPGVATPGPGEATVGGDLQCPGSGGGSPWWQLGEVRQLEFFNPN

SEQ ID NO: 54627 - protein, 97 aa, Zea mays
  Coding DNA Sequence Number=SeqID_11252
MWNYLYTVVGRGFISIEIKGSFEYLHSRRGSNGPRHPFRNVPRDLIPALDSRINGDGTISSPASFIHGSMHQIRLPDLDAKSDPGRLILIQRPESIA

SEQ ID NO: 54628 - protein, 123 aa, Zea mays
  Coding DNA Sequence Number=SeqID_11253
MALLRRVGRAEKDGTTLAQGRSPPPAWTLVTPYCKRTRPGRGTNTKAAGFTSHACLPPAPLPPFALHLAPTHLGWGTRRQFTRRSRDPPGDYKDKDGVKGLCVVGAINNCTSQLPTYGRSSPP

SEQ ID NO: 54629 - protein, 551 aa, Zea mays
  Coding DNA Sequence Number=SeqID_11254
  Gene Ontology: Mol. function=oxidoreductase activity; Cellular component=membrane; Biological process=electron transport
  Homolog annotation: Hit_ID=Q1EPI3; Match level="QueryCoverage=47%, HitCoverage=49%, E-value=1e-104, Identity=69%"; Hit description =Amine oxidase family protein
  Pfam annotation: Domain name=Amino_oxidase; Domain location=93-487; Score=26.3; E_value=2.8e-07; Accession=PF01593.15; Description =Flavin containing amine oxidoreductase
  Pfam annotation: Domain name=Cellulose_synt; Domain location=7-551; Score=-7.4; E_value=5.5e-07; Accession=PF03552.5; Description =Cellulose synthase
  Pfam annotation: Domain name=DAO; Domain location=85-435; Score= -29.3; E_value=0.00092; Accession=PF01266.15; Description=FAD dependent oxidoreductase
  Pfam module annotation: Pfam domain module=Amino_oxidase::Cellulose _synt::DAO; Domain location=93-487::7-551::85-435
MYSAVVTLSTRSKLSIGVVCPYNAQVRAIQEKVGKACRRNDYFSVKVKSVDGFQGAEEDIIIISTIRSNGAGSCGENGRKPHTPSAIVIGGGFTGLAAADALRNASFQVILLESRDRIGGRVHTDYSFGFPVDLGASWLHGVCEENPLAPIIGRLGLPLYRTSGDDSVLFDHDLESYALYDTNGRQVPQELVEKIGKVFETILEETSKLREGTNEDMSIAKAIAIVMDRNPQLRQEGIAHEVLQWYLCRMEGWFATDADSISLQGCDQEVLLPGGHGLMVRGYRPVINTLARGLDIRLNHKVLEIVRHRNKVEVTVSSGQTSVADTAVVTVPSPWKKGRAGKKGSSSCGYEDKTDWGTEIGWIYCSVTEDVLTGFKMHARGWRSIYCMPKRPAFKGSAPINLSDRLNQVLRWALGSIEILFSRHCPIWYGYGGRLKFLERFAYINTTIYPLTSIPLLLYCILPAVCLLTGNFIIPKISNLESVWFISLFISIFATEGDFAELYMFKWTTLLIPPTTILIINLVGVVAGISYAINSGYQSWGPLFGKLFFAF

SEQ ID NO: 54630 - protein, 117 aa, Zea mays
  Coding DNA Sequence Number=SeqID_11255
MSDDIVVPVHFEVGQELCFCLLDHPLLVLLELELLRQPASGVAKKYVDTFLEAPITQENQRRCSLVRCGRSAAQGRTVRDLARGGGALWSGADGAAEDRRRRLDLAPGRDPVREERS

SEQ ID NO: 54631 - protein, 118 aa, Zea mays
  Coding DNA Sequence Number=SeqID_11256
  Gene Ontology: Cellular component=extracellular region; Biological process=sexual reproduction
  Homolog annotation: Hit_ID=Q94KS6; Match level="QueryCoverage=35%, HitCoverage=14%, E-value=4e-13, Identity=85%"; Hit description=Beta -expansin 8 precursor
MNYYPGSKYRFDLSATVFRRLAKPNLNDKLRHSGIIDIEFTRTHRRHWGVSNLVWLRGGMLCGDLRICVADVVLHLDNRKRHYSIGGYEIDGSGYGYGAGEDEAVEGDFQEFQDYDEF

SEQ ID NO: 54632 - protein, 122 aa, Zea mays
  Coding DNA Sequence Number=SeqID_11257
MTETMTIASRATTLASQRNRNVAWRALSQYCSLFSEVADDLNLRYYPHCLTGSTGGVVVLPVGEGNLSHPVLEGKPNANHVRARISNSCTQQLHNMDIITECSNSIKKGNNSRLHHTSETSI

SEQ ID NO: 54633 - protein, 848 aa, Zea mays
  Coding DNA Sequence Number=SeqID_11258
  Gene Ontology: Mol. function=nucleic acid binding; Cellular component= cytosol; Biological process=regulation of transcription, DNA-dependent
  Homolog annotation: Hit_ID=Q2RBQ6; Match level="QueryCoverage=99%, HitCoverage=70%, E-value=0.0, Identity=56%"; Hit description =Expressed protein
  Pfam annotation: Domain name=RRM_1; Domain location=92-172; Score =27.3; E_value=5.8e-05; Accession=PF00076.13; Description=RNA recognition motif. (a.k.a. RRM, RBD,
MAEKEETEGRCPACRTRYDKDRIVKMAATCDRYLKLTFYIDDGSRTVADKNAEKKQKAQRVKPKAAPTATTTSTVESKKHLATVRVIQRNLVYIIGLPAHLCNESVLERREYFGQYGKVLKVSVSRPTGPPSQQASANSSISVYITYAKEEEAIQCIQAVHNFVLEGKVLRACFGTTKYCHAWLRNMTCGNPDCLYLHDVGSQEDSFTKDEIISAYTRTRVPQMASSVSQRRTGNMLPPPGDDFSYSAVVSAKHTFKNATLNTTNQPRPSPPNSSSGRSTLPPAASWGQRDVNARTTATGVTSSQSHTKPKSESQSNPFSSSSVISSTKTPSSWNDDTSTAAKMSEGQQVSEKESKTLQLYKPGISMATQATSSLELSLNIDFSTIPSAWNDDEIVVSDGMSKGSDENQVANENGELTHPASKPLVLSKKDITMKSTSTSKSPPNIVSSLAISKSDVNTSDGDHSLTNISLTSNAVVCQSNHVAGAKILEDIRSRDTDMEKLSVHISSVKLGGNDEIQIMAGNQRPDVMPCTSVDAPMNQNFDRDQSHLNLNEPLLPSENKDTVLSCQYSSDKRLDWSSEMQNGSVTPSNNIVDSTMLTGKLHSILLDVSEQPSYARFPSSLDTSLCNDTESNTAATIDTTISHMQTEFSSINNMYALLNGGQDGLGTVNTHGNVSEQHPGMGNHQCRAMGSVRTEAMGSVRTDSIGSFEKTISINKDESRIISDMLSSEFNPWDDSYSTANNFVRMLRESENNDVHFAVPSWKSGTGNKESRFSFARQDNQGNLLDSSLRNCGTGTEQNFSLLPQNSRGNIYQNGLAFQSLENDFSNSNSLGVLDMLTTGGLHHFIN

SEQ ID NO: 54634 - protein, 890 aa, Zea mays
  Coding DNA Sequence Number=SeqID_11259
MVEDGVAQFGSCTFTPKTGKTTMPVVELVPCARNKWGNWNEFWFYVAEATVEGHEGLPVSLMCSHYYSAYPPYEVAEEDADEGALRCAAGQSSGRDLVEEFVAYGVWPLAHGWALGEVCPRQMPFHGGRVVRSPAFALNLRNRDPAAFVRDAEGLAVRLVGRYVPRTEGQRSFDIRGSNERLNRVFELNQLPYDGYPGQDEADRRGKKPAVETGGDPALVAAASSKKRKLGTAMGRLGVSDSFARDLMRTCAAPGERMSSPELRESSARMLRVTGGCWPKNIPIPCAAEDDCFTSRMVHRWKVFPYGRNIGHVVWAVMDKDRQGAARKRQATVRVHEARPKRQRGTAKAEASGGGKPPLPTKVGAFAPGKAPETTVGAGGPKLSKVVPSVSGVAEATKAARSLPPPGKRVADFGTEIDVEDYLGGSDEGPLALVVPGAAIATAAPAPKAGGETLGAGGEVSALALVRDEAGVATRRLKGATEALSRATEALSQVADFTSGTASGALTAALSAEVERLRTQHADAVREKSASDSKCRKLAEKVAALEKEKADLRRQLAGERREANEAIAKEQAAQAEARLARAEGNIAKELAGELQRRLTAQESRAEGAEAAMNALSREGCRHFEALDQVDEDFGRDIFEVEDPVVKESAGALYDRMWGSYGREVVRARAEAARAQAERGERVDDFGALNSALPKPETTPAEAATGVAPGPTPEIAEDAPGAHASAAAGEDLPPKVQDFGPAHATATTEFLAASTAEDGNECDGSVSEFFDVTDSGSSVEWTEESSEEDLDYFAALDVAAAEAAPHAADAPGVPGPSTGHRRRRAVAKRRISAEEGARLRVSRAGRQELLSLPAASGVGEGELQSLFAGEELRIMLFNYREMGIIPKVEPM

SEQ ID NO: 54635 - protein, 94 aa, Zea mays
  Coding DNA Sequence Number=SeqID_11260
MATKYFRDEVHWHLLLRLAILLFVTEPPKVLGPPTDVLVLRTSDNTVDAHNHSTSLVICIIVKPPKSASPITQTLHHIGGRISGSRIQELNLHS

SEQ ID NO: 54636 - protein, 251 aa, Zea mays
  Coding DNA Sequence Number=SeqID_11261
MAQWLTRSTLTGGQMESGDRGLASPVKQNFDSSLGELHRGVLSPLRGLHGVGKGLAGRSTVAGARVAADTPCTGKRRELVTRRPQYAVQLFEKHRVPRCRVRMTLEPHPLQLGWRSLDSESFGYRAEDTMEAIALHGLTTFCGFHPLELSTHPIGLFPAEKEDDPMWSMPRISRLSTQATKITLDNREELVVDLSTEMVEKDLQVEQLSNEIQELEELVGTRENTIEVLEDQLINTQQQLAEANQHLDMHH

SEQ ID NO: 54637 - protein, 76 aa, Zea mays
  Coding DNA Sequence Number=SeqID_11262
MESHDLRAERESRLVGGNETDGFGYDYGTDKWYSFRLERDLIVIYQRSIMGLGLLGVGFMVSGGCSAGGLAAPPSG

SEQ ID NO: 54638 - protein, 624 aa, Zea mays
  Coding DNA Sequence Number=SeqID_11263
MHLYTEDWKTSVEVVELVPCARNKWGNWYDYWFYVAEGEVEYLPGLPAAVMCSHYYVAFSPFEVAEDDSDEGSLRCAARMSSGRDLVEEFIGYGVWPLAHGWALGEVCPLQMPSLGEQQTLWSWDIRGSNVRLNRVFELNRLPYGGYPGDDAAVPVDRRGKKPVVVTEEGPSQEAAPGTKKRKIGTAVGGLGVSDSFAVELMGMCAAPGGRMSSPKLWESSARMLKVTGGRWSKNVPIPRAAGEDIFTSRMARDLKIFPYGRNIVVVVSTVMEKDRQDAAQKCRAVVRIGDPFREAKKARGGAKSAAPGSSKLAPAAKPAAPGPRKSSAGVKAAASVAGKPPLGEPAKGRRLPSPPRTDEAAARVADFDTDICVGDYLVGKIFFKLGLNQDHGAGSDVGQLAVVPTPVVATSPTAAVGAKGASQDPWSAFCASGAIPSVAAAKDVAGSMSHQLRHASQQLKHVADFADHVASGALTSELAAKVERLRAQHVDAVREKSATESKSRRLTERLACNTPGRICPGVSQLSDSPRCQEEPSEKTVHVSVKLPERGIGLCFTGEAGPRSPDFNRPPATVDRGTPCTSLRFLARLDSLDLHEAPYALGLNYAAVDRPEHTPADELARLLT

SEQ ID NO: 54639 - protein, 65 aa, Zea mays
  Coding DNA Sequence Number=SeqID_11264
MDEVQIDKKDHLFTPPPSRCSHEAEHQRLSDCRTQLEERTRTASHQFISERSQLERDRKEYKKDL

SEQ ID NO: 54640 - protein, 370 aa, Zea mays
  Coding DNA Sequence Number=SeqID_11265
MVPLLSLRVEVDAGPPSDHVDDSAIRLIGKVFLLWGLGVVGVVDVLLLRVWRCGWGRYDLYLLVVLVCVVRWMRSGAVDVWLRGLLICVRDNSRVVGWLRPCHPVSGGLHLWAISCRVHAVFAVEQAVKSARLLRTSPAPTTSSVSAALGGILLAARGLASGVLVGDVVYLLLIAAVPTGVCLRRPGPRTAGLRRLLEVPGQISDAVAVKDAGPKATDGVVDGDLSESSAKASVSGRYPWKLSRNLSRRLLQESMDSGDNLVYQVGRQGTPLVKVVDTLECCGVRNGVSALRDDQVFNLRVLLEGWAMLQTELAFALHERDLLLKLLSLLLFVAYHLAHLSLRRHMLVFGLEDLLLLLEVAVLDAQGAQL

SEQ ID NO: 54641 - protein, 88 aa, Zea mays
  Coding DNA Sequence Number=SeqID_11266
MAVIGRLCASTHDAVMKECVALVSNNTSAIWESTGNIPTIMPGEDEVPADSASETGLLLTGCSDDSDTGAEGTAFGTADATEVDAGSA

SEQ ID NO: 54642 - protein, 109 aa, Zea mays
  Coding DNA Sequence Number=SeqID_11267
MGGSGLDFLPLAGLAVRERSDRTREQMERAEDVEDFASLVGSPPEAAEGKPVLPSGAGEGPSDAPVPAAAGEDPALAAVPTAEGAQGWWWSRQSKAPRPRPRPRRWLSS

SEQ ID NO: 54643 - protein, 823 aa, Zea mays
  Coding DNA Sequence Number=SeqID_11268
MSEDTLSNVAAAELHPGDTMEFGVSRISSVRVPDMQQQGYFGSGVGRVPGAEEVHQLTPNAVVALAKYVWAATSYAAFALDLRGRDPAAFVREAEDGVVRIVGRYVPRTESQRSWDIRGSNARLNRVFQLNRLPYGGYPEDDTVDCRGKRPVAVDEEDPSQEAAPATKKRKLGTAVGELGVSDSFAVELMGTCVALGGRMSSPELRESSARMMEVIGGRWPKNVPIPRVAGEDLFTSRMAHDLKVFPYGRNISAVVSAVMEKDCQDAAQKHRAVVRIVDPMREAKRARGSVKASSSGSSKPVPTAKPAAPGHSKASASAKAAAFGGSKPPPGEPAKGRELPSPARRVADFSTNISVEDYFVGSGEGQLVVVPPPVATTSPTAVVGAKGAARDPWAAFCVSGEILSAAAAKDVAADFADHVASGALTADVAAEVKSLLAQHADAVREKSAAESKNRRLAEKFVDVYRELGARTADFEVPGQEAGLRFLEWLQEELLVLPTIVTGFMSFASLVTYEGVMNALSPKGFRHYEVFDQADENFEREIFMVEDPMVKQSAGALFDRMWGPHGREAMAHAEDIEDLGGLDGALPEAAEVNPVPPSDAGEGTSATPAPTAAGEGPAPAPTPTGEDALRVVAEPAAEDPTATAGPSQVLGFGPAHATATDNAIFVAASTVAADDDSFGSVSKCFESDDSGSSIAWTEESSDEDLDYFAALDVATAETSPHVVGAEDLPGASTGCRRRRAVAKRRVSELSRSGMRHCGEMESGHLLVDGSGKRELLSSPAGASVGEGELQNLFEGEELRIMLFNYREMGIIPKVEPMSYVMPS

SEQ ID NO: 54644 - protein, 121 aa, Zea mays
  Coding DNA Sequence Number=SeqID_11269
MQGTLDITLARIIQIKFVRNPSRRNKIEGLALWNNLANIWCWVNHNSLTIDDVVVDTNTYGTILEWRRDPIWREYSNFGYIGIILTDNINRIYNSVANQIRPCLGGYTKLDDLHQSEKLMS

SEQ ID NO: 54645 - protein, 347 aa, Zea mays
  Coding DNA Sequence Number=SeqID_11270
MQPGCIPSPVVTQDGDHQPLGGEEQARMRSWLRPQLQGCSSSLQGRRARRAGALPPAWVGWPPLLPASGGGNHPPALWRRHPPAMPGKANCCCPARMQHSALFLAFAVRTEVRTCRCALQTVGVVGEADAAVRAAVVVAGGSSPLVEAVSATHGPAPGSLALITETRLVDYPNRFTERELPRAKVTSESWLRKGGVVGQSLAGSSTGGADAGVELPRPQAELMSLRSGGPPTVSPSEARSDPAEGVVDAEGAAAPFGCRRPSLQDQFPDSFVGNRIVCAGESCFSRKVMSEGSVTDAVEKVRKIISAEELSSMKTCSVHGVTYPSASYLSQKVMSEENFDAEGVAPF

SEQ ID NO: 54646 - protein, 217 aa, Zea mays
  Coding DNA Sequence Number=SeqID_11271
MTTVGGPNDLGGSVIAGIGPKPISSDIMKHFKKEILNTYPRKISFILPLSLSKSSHPARPDMARTRKTARKSTGPFGVPRHQLAPRHEGSSSGSNDPIGDLEAKISERDSVIDWAINSRSIAWHREAKARAWVDELSTALDNLQVYGNTLHEEVHVLYGRLHPDVPADAAAMEAGPSGTANEGLGGELDLFKPPPSTNLADERSSAADSEATKDNED

SEQ ID NO: 54647 - protein, 198 aa, Zea mays
  Coding DNA Sequence Number=SeqID_11272
  Gene Ontology: Mol. function=nucleic acid binding
  Homolog annotation: Hit_ID=A3AQ03; Match level="QueryCoverage=54%, HitCoverage=65%, E-value=9e-10, Identity=35%"; Hit description =Putative uncharacterized protein
MQHSNVAEVIAEGQRGTGLSGATLDYPVPHEDKSSNGRPAPSPNNRMMWRRTGHCPVRPSPAAFSNGYKLVGGYKYHPNGPLQGTKDDAYQKLKEENERLKMSLTQIKGKCIAQPSQDNRDHMVKKLEMGITVACTKSLEENVKDLRIAKGKEQKKKINTSTKSLNCASMQGNIQGNNQATLHTKRSKKCSECFEKGH

SEQ ID NO: 54648 - protein, 69 aa, Zea mays
  Coding DNA Sequence Number=SeqID_11273
MDAKRQYCFLRGLVDPLHYQLMNHNFPTFQHLIDRAIMTERKRREMEDRKRKIRGSQAESSSRPRYSGR

SEQ ID NO: 54649 - protein, 132 aa, Zea mays
  Coding DNA Sequence Number=SeqID_11274
MQDATRRALFQYCSLFSGVADGLDLKYYPRRLTDSAGGVIVSLVGEGNPRLNSMVNLAAVLNTELDHALDELGKMSENRRRGARRAQSEHQAPQEDTAQQQQLPPPPPMIVEQMFMMQTQAVQAIGQTLAAM

SEQ ID NO: 54650 - protein, 55 aa, Zea mays
  Coding DNA Sequence Number=SeqID_11275
MAAAGAATAAAGAAAAAAGVAAAAAGAATRPVAKCHWGDGRVIIVDIYVFDIESE

SEQ ID NO: 54651 - protein, 101 aa, Zea mays
  Coding DNA Sequence Number=SeqID_11276
MAGNREDAASSVEGKKGALWCLLSLSSPSCTLDALGDGVLVAGGQADAIGGGSPPVFIGAGEPISANPNNPSNELGRMGRRFCCNNLNLGDVCLHDDHIVT

SEQ ID NO: 54652 - protein, 59 aa, Zea mays
  Coding DNA Sequence Number=SeqID_11277
MARKIDDTKDPSAEATLMGGKFYNDVWVNVVVAVEAEAKKLVNGLSKQQRLQVDCPRIL

SEQ ID NO: 54653 - protein, 520 aa, Zea mays
  Coding DNA Sequence Number=SeqID_11278
  Homolog annotation: Hit_ID=Q6JAD6; Match level="QueryCoverage=89%, HitCoverage=82%, E-value=1e-68, Identity=65%"; Hit description =Putative uncharacterized protein
MPCTKNVSALGRGDDEDPRRPFRQVKGKTVYLEQQEGRKKQRMDRAARAAAAAASAAEKAELGDQPQTPSDQIAYRVRRLASRPRSSTTTTASASTPPPTLPAPVTPIAPSTTSTTPASTAPPPAPVSAPPIPPACFQERDETEVQPLAADPRLFDLQRATAARRDPAAVDLFSTRIQESFFRAQMSAQIALRVHRLLDLPAFLLAVGADSEVHLSYLFGLLTLLSTSGRYVEEWVRVFYATVWIDPDHHWMRFHFEREDVTITASQIRQLFGFHESSTRLHSLCYGTSDPPRRPHGGVAPADSASTVQGTLEASRLVFGSYRPAPEDPVPASAPIFDTQAEDAALHQFEAQDAAVDDDFGIPPPPPMPPRSHDHEDGSSRATPAAPPAIDPALASILQTLTEQQAYLPAEQTRQAAAHQQLSERMLSMFQTIQDRQDSLQQQLLQDRAESRAFMALMLQHSGVSVPPVQSAPPPPLQAPVVPAIQSGPLFLLLVLLPLRSGRSPWLSRHRFSALSALSR

SEQ ID NO: 54654 - protein, 159 aa, Zea mays
  Coding DNA Sequence Number=SeqID_11279
  Gene Ontology: Mol. function=cellulose synthase (UDP-forming) activity; Cellular component=membrane; Biological process=cellulose biosynthetic process
  Homolog annotation: Hit_ID=A2Y0X2; Match level="QueryCoverage=46%, HitCoverage=6%, E-value=5e-29, Identity=82%"; Hit description =Probable cellulose synthase A catalytic subunit 1 [UDP-forming]
  Subcellular localization annotation: CTP_CleavageSite=20; ConfidenceScore=5.08e-01
MANRPPARPTARPTHAARPPSATRGTLQPPPNQPKARPEGHERHRLDPARSSPDPLAIVAAMPGFAPCSPRSDRDFDFPTDVGAVGSHNRKEFVMIRHDCDALGPAKPTKSVNGQVCQIYGDSIGVSATCDVFVACNECAFPVCRPCYEYERERNQCCP

SEQ ID NO: 54655 - protein, 84 aa, Zea mays
  Coding DNA Sequence Number=SeqID_11280
  Subcellular localization annotation: CTP_CleavageSite=34; ConfidenceScore=5.45e-01
MAISTGRRASGSGNTRGVTSFPPSKNLVPRFKVLGAGVTPGFKGQSRVHLIYAPKKTTHIITERIEMNVTISSEYLLQSGSLTK

SEQ ID NO: 54656 - protein, 186 aa, Zea mays
  Coding DNA Sequence Number=SeqID_11281
MAPTVGAEAEAAREVPVTDGITATIRASGLRFFVLVLAPRASVAGGGEPLVSLLLLRRPFPMEWGCSYLRRGNQSSVCNGTLNAISPVDYLNRFTKHESPRVKVTSEHEQRQSWLENGNLVGRSLAGLSVSGTGAGVDQPRPRVGLAPLEDGWPRPLRQPAEPPARAGFPEESLDRVVVRGWVGPR

SEQ ID NO: 54657 - protein, 44 aa, Zea mays
  Coding DNA Sequence Number=SeqID_11282
MSSSSSSAAATPPAGASSEETLSNVAAEELRAGDTVEFEKENRK

SEQ ID NO: 54658 - protein, 217 aa, Zea mays
  Coding DNA Sequence Number=SeqID_11283
MGGLGVSDSFAMELMGTCAAPGGRMSSPELRESSARMLKVTGGWWPKNVPIPRAAGEDFFTSRMVRDLRVFPYGRNIAAVVSAVMDKDRQEAAQKRRAVIRLPEARPKRARGTAKAAAPGGSQPTLAAKSAAPGSSKVPDVVKAAGAGGTKSASAGSAKARELPSSGKRVADFGTDISVDDYLTGSGEGQLVVVRLRWRPWCLSRCLGRRVALSALS

SEQ ID NO: 54659 - protein, 315 aa, Zea mays
  Coding DNA Sequence Number=SeqID_11284
VKRLRAQHADVVREKSAADSKSRKLADKVAALEGERTDLRRQLVEERREANQALAKAQSAQAEANLARVEGSLASQRAEEWETRFNALQARMERAEASTRSEVERTRKQLMDSYRELGARTADFEVPDRESGLRCLEWLQEELLALLTIVEGFMSFASLVTCEGVMNALSREGCSHYEVFDRSDEDFEHEIYKVEDPVVKESAGAPFDRMWGPHGREVVREQSDRARDQAARDEKVEDFGALNSAWPEAESNPVAVEVSPAPPPESVECSLAAPTATVSGGRSLPTAVPRAEDPPKTTTEPAAEDPMAAGSSQVA

SEQ ID NO: 54660 - protein, 73 aa, Zea mays
  Coding DNA Sequence Number=SeqID_11285
  Subcellular localization annotation: CTP_CleavageSite=48; ConfidenceScore=5.29e-01
MVVLVATAARWPGGSTAARARPPAARGRAPLRVAAEPEHKAATVRFVVAMLAKSGFTAAFTLIFVSEIGDKCY

SEQ ID NO: 54661 - protein, 138 aa, Zea mays
  Coding DNA Sequence Number=SeqID_11286
MGKSKKGGSSSHHSGDKRKREPTPPSEDFGDLEYSEEFSSESEGSLIHASPPTSSDDSDDSQGLAVEVWTYIRAVERVGLEGSDESEYSSDLSEEGGGDNGGDGDDDGGDGDGGGKGGSGDGGDGSKGSSRGSNKASG

SEQ ID NO: 54662 - protein, 208 aa, Zea mays
  Coding DNA Sequence Number=SeqID_11287
MGPTAVSRRRSPRMMTVGLVVGKSEPGSGLSLALSFKDVHHPCWGGGRAELGPCLLHGLAIRFFLQHSGEKGVHEPYGGGKLPPAARSGCGCPSTARATVAPCAGRPCPRPSHAAGRTGGSPNTSYPARAVFVFWDSLVLAPVARTGVRTYRITYPSVSYLSRKVMSEDSVIDVVERHAQAMALQQRAWAAGFETALKDSVKNCKALA

SEQ ID NO: 54663 - protein, 32 aa, Zea mays
  Coding DNA Sequence Number=SeqID_11288
  Homolog annotation: Hit_ID=Q8S467; Match level="QueryCoverage=90%, HitCoverage=6%, E-value=2e-07, Identity=93%"; Hit description =Putative gag protein
RLSAANIAVTKGHLFPNVDHKCLMAKDGKRKK

SEQ ID NO: 54664 - protein, 161 aa, Zea mays
  Coding DNA Sequence Number=SeqID_11289
MNKNIGIQSAITNGTPVPPPQGRTTPLHGGGPAEQRKTDGRLAAARSDSDDNDPRSGWPNCSGAGLGVGAAAILPSPTPTLEGRGQPRVVEVRAARRDSERPLPRTSQERATHEPAREVELRLSPASTPARMMNILEAEGGTKIVARLASPHPGAGGHRLG

SEQ ID NO: 54665 - protein, 155 aa, Zea mays
  Coding DNA Sequence Number=SeqID_11290
MASRMLCDDDDSQPPYRSKRTKDQGPLREGWPREDEDETGALLGPLASLSRVDACNPLLQAHLTWARDEHEGRGIPTSLTPVSGRLAPPPFALALALDPSRLGHAATLTRRPKGPPGLGTPTSSQSSHWGSPLLNLSRKEAEGEGSHAAHQEMGS

SEQ ID NO: 54666 - protein, 99 aa, Zea mays
  Coding DNA Sequence Number=SeqID_11291
MRSWFCSPLGKGSGAAMWLMGLQHKPSEGSKLATCIQCERMTHAPTAHRVWQLCVSFERMTCTVRHMISRQAIVSLRRACGWCHHEQLLPQVVHSRHSH

SEQ ID NO: 54667 - protein, 41 aa, Zea mays
  Coding DNA Sequence Number=SeqID_11292
MAIERNGQLQRLPANVNSAQTVRAESEQRQKAHRTVNSACP

SEQ ID NO: 54668 - protein, 193 aa, Zea mays
  Coding DNA Sequence Number=SeqID_11293
MPKLPCAQLRLCSILRSPCVSSYSDFDMSEGSMSESRGSTELVQFLVHFISEVPKIQLKTNKKNKTGFKRKEQRETEVLPGMAHRTVRCHHSGYADPEVCTLRTSPIGHECVAIQGIAQPRLALGSMQWGSTMGGSFQGWRTYHFRLINGPQRPGALSLARSLTGGSQGPRIISPTNINFDGPRNSPEEAHEL

SEQ ID NO: 54669 - protein, 201 aa, Zea mays
  Coding DNA Sequence Number=SeqID_11294
MNKTPTLKVPLQTELRFRPRRYEQPPTIGGPAEQQKADGWLAAARSSSSDNDFCSKRPDSSSDDLRADAAAIRPSPTSPLEGRGRAEGRRVGGQPAGGTDYLVGGETSSGCRGGRWHRRQRRSHSDRRAGHAAAASATNGERPSPRSLREGAGRCPRGDRPQLGALPSPALMMNILEAEGGAEIAAWLASPHPGAGGHRLG

SEQ ID NO: 54670 - protein, 243 aa, Zea mays
  Coding DNA Sequence Number=SeqID_11295
  Gene Ontology: Mol. function=nucleic acid binding
  Homolog annotation: Hit_ID=A2WZF6; Match level="QueryCoverage=60%, HitCoverage=56%, E-value=5e-68, Identity=84%"; Hit description =Putative uncharacterized protein
  Pfam annotation: Domain name=RNA_bind; Domain location=96-177; Score=- 6.4; E_value=0.024; Accession=PF08675.2; Description=RNA binding domain
MDGPRWTEEVDDLVDAGDVDGAIALLESVVSDLSTSAAPPATDLRLATALGDLAGLHASRGDTLRADELRARAIALRSRATVPGTGTLGTSLGFVAATQFGTRHVLVFYDFPPSTRTTDLERIFEKFGDHGVAIRWINDTSALAVFRTPSAANEAQACIPPRYKVRSLKPDDDLLTKIDGRDLDPPKPRPKTSARTAQRLIAHGMGLKQFTNFGSDELKKQEGERKDRIAARQAMRDEAWGSD

SEQ ID NO: 54671 - protein, 225 aa, Zea mays
  Coding DNA Sequence Number=SeqID_11296
MKESTEPKMIEEEDTLVESAYDAEDDSDEEDGSGVTSVRVGESERLMRAVPFPRAANLPYECPGPSFYRRKERAQGNDGSPCDVVGPSPGSSEAEAPPRSRSSMSSVVEVESEPWVGRGGVRRLPEPRPSPSPGSGEAEFVVFRGRARVRALGSGEAKFVVFRGRARVRALGSGEAVFVVFRGRARVRALGSGEAELPMAPEARLGRYWASDEPKVCPSLEGALG

SEQ ID NO: 54672 - protein, 90 aa, Zea mays
  Coding DNA Sequence Number=SeqID_11297
MAVVLDVRSTRVLPLGVASSASRVFRHGWFVASQRDKGGTVVKIYRSAHEDPHIRDPSEATRRNWLTRGPARQRASSARVEKAGGCKYGS

SEQ ID NO: 54673 - protein, 270 aa, Zea mays
  Coding DNA Sequence Number=SeqID_11298
MACTKTTQHKSTGPYGVPRHQLASRHEGSSSGSNNPIRELEVRVDRLRSELRHGCRERARDSRRIAELTAKVNRLQYKISKRDMTIDWVVNSRSFAWDCEAKALARVAELSASLENLQVYCNTLHEKVHVLYDWLHPNVPPDVAAMGVGPSGIANGGSDGGIDLFGAPPSMNLADGQSPKAGSGTTKDEEEYSSIVYVLYLCKISTSRGGEDTPNPPPVPPTLAEAIAALVNTTADNTRFLREIAGNQFQQHGGRVPPQGPRDTTYLGIL

SEQ ID NO: 54674 - protein, 32 aa, Zea mays
  Coding DNA Sequence Number=SeqID_11299
MDGRTVCRLMNWQNSRLNYKTRSVPVRCNRDI

SEQ ID NO: 54675 - protein, 171 aa, Zea mays
  Coding DNA Sequence Number=SeqID_11300
MVGRSKPGCDLCPALSFKDLHHPCWGGGRAEPELYLPHGFVGHLLPQYSGERALTGLAKGADFDNAGPSGRKRRQLPRARVHWLSWLWHCFRCHLPPLGGVRLSARRTGGCRATRTGGPLKTSRAARAAFVFLGCPAFAPVRCPCVEVGVRPSGRTRVGICRWADGCRRRC

SEQ ID NO: 54676 - protein, 273 aa, Zea mays
  Coding DNA Sequence Number=SeqID_11301
MEETHLHVFDAFCPRQSTLTRAPACPAPRPSQASAMARAHAYKTLPDLDCTLPRTLKPHRSLARRRLPVRSESAAAQSLCHCRPASGAIPNSVQPSEKTVHTSVRLPERGIGVCFAGEASPRSPEFSTPPEYVDRVNHSTILRFLVHTVATLPHEAHHALGLNQFAVVWPVHSPPTRTPACARGPGDSGHPRRQVVPRRDRQSLPEPTPPFVGPPSQPIALLTRPETRSPIPVMVGTSAVTARRPIGVSEALYAKAVYLARIKTRFESSASRS

SEQ ID NO: 54677 - protein, 208 aa, Zea mays
  Coding DNA Sequence Number=SeqID_11302
  Subcellular localization annotation: CTP_CleavageSite=49; ConfidenceScore=5.14e-01
MAAFGDPKGDFLPNGTVMWCRVLSLSTTQKMVPKQKTAPGLKVIMLLKVTDMESALFNVVAPTWRASCQCLLPNCAPHGYPRDAFGQDGVVDRDLMRTDFLHLGNHLRPSARVTARGLAYRVSATVPPDILVLSWRLTRALAFAGSEWAFSAWLLSAGPPTGSPRREPARWLQTCFHACVDQRDIHPPQSPIPNCSKPSTLNLEVLSR

SEQ ID NO: 54678 - protein, 103 aa, Zea mays
  Coding DNA Sequence Number=SeqID_11303
MVIKVEPLVGPAEGDHVLQPSVRGWSAIRGHQNLPVGELLLPPVFMRWEHGLLAPDEVLGSLIRGDVDVVQRCSSEVRVHVPSEERVFALESGILLGLFPLVF

SEQ ID NO: 54679 - protein, 446 aa, Zea mays
  Coding DNA Sequence Number=SeqID_11304
  Homolog annotation: Hit_ID=Q5GAU8; Match level="QueryCoverage=32%, HitCoverage=96%, E-value=9e-51, Identity=69%"; Hit description =Putative uncharacterized protein
  Pfam annotation: Domain name=zf-GRF; Domain location=34-78; Score =12.5; E_value=0.00096; Accession=PF06839.3; Description=GRF zinc finger
MYREALWQKRGRPRELYPDVSSKDAPVPPELPVPNCDCGRLAWVHQSQHPDTAARCYYLCGTLDGHQKCFFFQWIDGPDKFDPRYLLFVNWLSGKTSHERFKRWVPPPPNPPPMTDAEKEVATERRMDSPPRCDCGDRAVIDEDYDKQFCCPNIDYPYGWRKFRFREWLYGPLSHWARARAKYGLVPSELGVGYFCGHMVDYDEETRKCSWESYDDKGEVMRTIESKRIMGQKMRCGSRLVDSYINDRIRDMRREAKSVFYDIPKRAEYRRLKAADEKRAQDAREWEAAQAEKQMLDNLADRLKGKIGSGVNYLVDEAHARYVQDKMATMEEEDDDTSRLSELIALAEAGLHEEEEDDTSRLKEEDEFMSQDAAEVEAAYYKKKSDEAEAEDELFSQAADEAEANYYKRTGDKCDAGQCSKWNEVVVEDCATDDSEDELLIDCDSD

SEQ ID NO: 54680 - protein, 196 aa, Zea mays
  Coding DNA Sequence Number=SeqID_11305
  Homolog annotation: Hit_ID=Q6J9V9; Match level="QueryCoverage=46%, HitCoverage=33%, E-value=8e-09, Identity=43%"; Hit description =Putative uncharacterized protein
MGPQVPVGGNPQKPFANRREDGCLRDGVGAEIVQLHPVDVQNRPHETTCRHSEPLLVKRDEAQHIPRRRGRGGSARRGHPLRLWVTGERTKQTIGNKGLQIVRRDGTGNGDTPKGILLYEGSGPRALLLIRGSKAAPSEGFDSRLRALGPRALLLIRGSKAGPSEGFDNRLRALGLRAHHWSEVRRLAPRMGSTAA

SEQ ID NO: 54681 - protein, 168 aa, Zea mays
  Coding DNA Sequence Number=SeqID_11306
  Homolog annotation: Hit_ID=A2ZX37; Match level="QueryCoverage=79%, HitCoverage=15%, E-value=6e-26, Identity=49%"; Hit description =Putative uncharacterized protein
MQSPAASPETAVHPAKHGKDHGTPVSAPSNVSHHHAMPANNTHGKTHGTPVLAPEKRRHHHLPANNSYVKGPAVSPSKSPIIHRKGHGVPVAAPPKEHWSYLPPANRRHHKGSRPAPRKSNNTSAPSHVYPGSPAPAPERLLIKGKGKEISAHAPRHPNHYHSHHNSP

SEQ ID NO: 54682 - protein, 243 aa, Zea mays
  Coding DNA Sequence Number=SeqID_11307
  Gene Ontology: Mol. function=hydrolase activity; Cellular component =cytoplasm
  Homolog annotation: Hit_ID=A2WUB4; Match level="QueryCoverage=89%, HitCoverage=54%, E-value=2e-70, Identity=59%"; Hit description =Putative uncharacterized protein
  Pfam annotation: Domain name=SurE; Domain location=68-234; Score=8.5; E_value=2.1e-10; Accession=PF01975.8; Description=Survival protein SurE
  Subcellular localization annotation: CTP_CleavageSite=33; ConfidenceScore=5.09e-01
MESTSGEDAPKRNPLPSALVSNLQSVLAARRPSAAEVSTAATASEAEAEAQEAEASDAPAGDGTPARPIVLLTCAGGIRSAGLAALVDALVAAGRCDVHVCAPESDKQACGHSITIRETIAASSVDFTGAKAFETSGTPVDCVSLALSGRLFPWSSPALVISGINTGSNCGYEMKKDETKDSDFKDAAQACLPLINAALDDIEKGTFLRGCLLNIGVPRIKGYPQPKTMQSSKANEGWFFVKA

SEQ ID NO: 54683 - protein, 236 aa, Zea mays
  Coding DNA Sequence Number=SeqID_11308
MVGTSAVTARRPVGVSGALYAKAIRGIDGLFPFKCGLASKTGLRHLSQNNSGSSATADDFHGSSDEGNALTHTDGLAREGFPRILWEVLQGAGYLTPPQYAVQQFEKHRVPRCRVRMTLEPHPLQPGWRSLDSESFGYRAEDTIEAIALHGLTTFCGFHPLELATHPIGLFPAEKEDDPMWKDRVEHAKDIWALYPGHTAHLSVRCMNALYRLQVIAWGGNVSPDGTARGNKDHAG

SEQ ID NO: 54684 - protein, 173 aa, Zea mays
  Coding DNA Sequence Number=SeqID_11309
  Subcellular localization annotation: CTP_CleavageSite=36; ConfidenceScore=5.10e-01
MKAARGRRWESRTSAPPSIPPTTKLAAYQTRQLRARSATVMPREGDGGIAAGQIRLLARERKEDRSGGNAGRAATSAPPPIPPPTNPVLEPAPLQACPIPYSATGFTALPSAPAIKRMDTGDPSNPSPLSSDPPIHSRSSISQSWYMPEEIPKVLEISGERSLIYNFFSYPVY

SEQ ID NO: 54685 - protein, 106 aa, Zea mays
  Coding DNA Sequence Number=SeqID_11310
  Subcellular localization annotation: CTP_CleavageSite=67; ConfidenceScore=5.41e-01
MTSRLRRTNIVGVVHLTSVGMLVPFPGVFASIVTISAVMQESEPTTFARNRCTRMHNFGGGFACVVMCSSGSFLRCNKWIPTSFNVQTVQVDLIHHHWARLGSGAT

SEQ ID NO: 54686 - protein, 99 aa, Zea mays
  Coding DNA Sequence Number=SeqID_11311
MAPEAGLGCCQPHFVEWHNSRSDAILALNAPAIRLVVVVIWPRLLLGEDWASGEPKLCADGGYQLRLGVLGVPLIMVPDNTIISKMSEIFMCYIFTIDE

SEQ ID NO: 54687 - protein, 165 aa, Zea mays
  Coding DNA Sequence Number=SeqID_11312
  Homolog annotation: Hit_ID=Q6J9V9; Match level="QueryCoverage=46%, HitCoverage=26%, E-value=7e-29, Identity=80%"; Hit description =Putative uncharacterized protein
MEAQAHMSCNRRAGYYVQGNRTATCANVASSRLQNQCSDSRQPWIGKWDISKKDPSRRRKQASSPPTDQGFEGCALRGSATALEHSGSEPFTDQGFEGCPSEGFDSRPRASRVRDYPGYVRYMAEARAMLPRYPRTFPRPAGTICNGIPPEGGTEPLDPIKWVRV

SEQ ID NO: 54688 - protein, 205 aa, Zea mays
  Coding DNA Sequence Number=SeqID_11313
  Subcellular localization annotation: CTP_CleavageSite=43; ConfidenceScore=5.36e-01
MASSSGCARTAGALRRNNQGATTRTLLSVGRHDPGASPPRTTLCSLLANLGAVAIVLSTPAPASAWTCTAVAPDAAAIAALPLFVIRAAMLSLPGVHAGTLALPTLLVTPISDGLVAVDGGPFIAHGLATEAVVHPPPSTAPAARRLGPASTVVPSPPFLRSDVVYMPPYRVRFSLRDDLFLRGTFVACLASPGDAQSADHSCLL

SEQ ID NO: 54689 - protein, 322 aa, Zea mays
  Coding DNA Sequence Number=SeqID_11314
  Gene Ontology: Mol. function=zinc ion binding; Cellular component =nucleus; Biological process=intracellular signaling cascade
  Homolog annotation: Hit_ID=Q6K431; Match level="QueryCoverage=83%, HitCoverage=25%, E-value=3e-74, Identity=58%"; Hit description =Trithorax-like
MVIAVEGNGFVHDDEEDDGDRPIRYLPLGHIYSSSTPAPAPRPPAQKKPRFDDGRPPMKVYYRRRRKKLRVDESLSPPSPTTAPLAPPERDEKAGPSRRKDSLKHELLSLGPASPALDGEEPERRLGRTRRCGGAEKTVCFSEPERRRQPARPKGSVGRRWVELDIQTADPNAFVGLVCKVFWPLDDDWYKGSIAWYNEATKKHSVKYDDGEAEDLSLADERIKFFISSEEMKSLNLKLGISNQDKKGHDELLALAVSFHDYQGLDPGLSSKGAEYLDYSWFLDNLEPQKWGSASPEVDVVHSATPEVAATQSVSSEPASGR

SEQ ID NO: 54690 - protein, 325 aa, Zea mays
  Coding DNA Sequence Number=SeqID_11315
MGSARVAFVLPSLEERNFAEVVSPAASPCRWSLKTVTTSLMVGRSKPGCDLRPALSFKDLHHPCWGGGRAEPELYLPHGFVGHPLLQHSGEKALTGPAEGADFDNAGPSDRKRRQLQHAWFAGSAGSGLAPGAPSRCRAKCGYLAAVRSRAARTGGPPKTSRAARVAFVFLGCPALAPVRRLHVEVGAKVVAAEEVLVTDEIAAAICAPGLRLFGFDSLSSPLEWGRGRGPCRSSVYPEVIAAVVWPPGAEVVVAAAGAGGDEPPRVLSPRRPSNVGGCSYLREWNRSSICNGTLSVGVCSLCLSGPEQLGILGVIPCFFLIFEH

SEQ ID NO: 54691 - protein, 469 aa, Zea mays
  Coding DNA Sequence Number=SeqID_11316
  Homolog annotation: Hit_ID=Q6QP51; Match level="QueryCoverage=13%, HitCoverage=30%, E-value=1e-16, Identity=66%"; Hit description =Putative growth-regulating factor 1
  Subcellular localization annotation: CTP_CleavageSite=65; ConfidenceScore=5.11e-01
MHEGSAKAWLPSKGVAPFLKAILPTCVLRRHGLSLRQHAPRSSPYDTGAGSHASCKLTQDRRGQTAAHGARNCPAVTSTPPLSPRPAGKRVDRHAGACDHTKGVHPFDFDASSMGPRPTRHVTGAPVTTCKKLHRHLRQYRTSSTAEPVPRLETTLRMAQQCQPSTSVTTQSATGEGATVDMAKSRPTVMVAAGGRKQQSSRLQDHVPSWSSRRTLSHGVKTTRPWDRERGYSERDPSPRRKRASSPPTDQRFEGWPLGRVRQPPQSTRAPRPLLVRGSKAGPSEGFDSRLRALGLRAHYWSEVRRLAPRKGSTAASGLSGSAPTTDQGFVGWPPKGSTTALEHAERGMTLGTSDTWPRLGLCSRGTLRHFRDRQERFCNGIPSEGGIEPSDPIKRDRVRQITCRYFWSAPLGHYPTLIERGTGVHSDHPLATHWRYHVRRPPRATWRFPPSSLRKGDEGAYDKSRVSP

SEQ ID NO: 54692 - protein, 128 aa, Zea mays
  Coding DNA Sequence Number=SeqID_11317
MRGVLDQRHCGTGGYEIDGSGYGYGAASPLQPNRILAEYVDVYSPLLYTPNPPQVVSIATTAQAKMKLWKETSRSSKITTSSRCGLAATPSRLPVKAALSTFLFRTLIYCPYGEVLRKKPEPPKDSEL

SEQ ID NO: 54693 - protein, 323 aa, Zea mays
  Coding DNA Sequence Number=SeqID_11318
  Homolog annotation: Hit_ID=A2XFR6; Match level="QueryCoverage=52%, HitCoverage=48%, E-value=4e-08, Identity=28%"; Hit description =Putative uncharacterized protein
MAHIRCTSPSTASHGAKSVQSPEETASSPARGAGAPTQEQEQDQEQQDSSPSPQQEVESGRPPSPAPQPEMPPAAPPSIPAAGGDPDGGGDDDVGGSSSHDTERSEESEPEGWIARPITRDAARGCHFHDALDTLLRRAFDRHTWSIEYRCVVYQHRRGLYSDQWEATCLVRHPDDDLQGAEAFSEHYSITERDAAEAAMQDVARRTLSQYCSLFSGVTDGLDLKYYPRRSTGSAGGVIVSPVGEGNPRLNNMVNLAAVLNTELDHALNELSKVRAEVAELRAECAASHYLYGGSPAPVGIQHPYRSPPRGCFDYGTPTAGPG

SEQ ID NO: 54694 - protein, 62 aa, Zea mays
  Coding DNA Sequence Number=SeqID_11319
MAQEIIRKSEKAALSPPPEPVEPLADPRAKEEDEIIKMAEAIMDKVVDQLLNEVAEVVLRED

SEQ ID NO: 54695 - protein, 531 aa, Zea mays
  Coding DNA Sequence Number=SeqID_11320
  Gene Ontology: Mol. function=metal ion binding; Cellular component =intracellular; Biological process=regulation of transcription
  Homolog annotation: Hit_ID=Q1KMT9; Match level="QueryCoverage=86%, HitCoverage=94%, E-value=1e-116, Identity=55%"; Hit description =Putative stress resistance-related protein
  Pfam annotation: Domain name=CCT; Domain location=431-469; Score =32.7; E_value=1.4e-06; Accession=PF06203.5; Description=CCT motif
  Pfam annotation: Domain name=CCT_2; Domain location=430-455; Score =17.0; E_value=0.024; Accession=PF09425.1; Description=Divergent CCT motif
  Pfam module annotation: Pfam domain module=CCT::CCT_2; Domain location=431-469::430-455
  Subcellular localization annotation: CTP_CleavageSite=57; ConfidenceScore=5.45e-01
MSSSCIPTGLRLDLDMVKAAASPVGAHSSPLRPAHYSSPSSTLSSEASNASSSSATSVSLKRARAPRKRPNQAYNEAAALLASIHPSVFPVNKSPKTAPPRPPQLSVLAAALDASPDLLPPLPVLADSAFLLRDQDTPSPKPRSPSGAKNCPSPAPVSSAFRDFRDPPSSASLDAVGADELGEIDFDDDGFNADSILDVGDAAAGGLDGIMGSLTVDVESGTAARSDDSILSSSGIHPYLRRLMVVGLAGRFELGLGSQHGARPSLNRALKRRDDDGAWWMWPAVPVKDLTIAPPAPPAPPAPNAAVPQAAAAAAPEKKKSKKKKVVKAMAKGNEELLPNAKCKEEEADASVDDAAANGDGDSDSAPTNAPKAGLGLKLDADEVLKAWSDKGSMFAEGSGPELPTSAAEVRAKLADIDLFPENGAGGGGVREASVLRYKEKRRTRLFSKKIRYQVRKPDDAVHRSKASEVLTCSMFCSAVVLAGKQACLCFGKGSWEKNAAIKPIALNFDRERTTLVKESGQGPHEHCDIC

SEQ ID NO: 54696 - protein, 62 aa, Zea mays
  Coding DNA Sequence Number=SeqID_11321
MDLAWNRWHVCAPRPRRCGGERHSDFDQAEAIKLLRGLKYLHSAENTPQRPKTWKPSGECKL

SEQ ID NO: 54697 - protein, 127 aa, Zea mays
  Coding DNA Sequence Number=SeqID_11322
  Gene Ontology: Mol. function=protein serine/threonine kinase activity; Biological process=protein amino acid phosphorylation
  Homolog annotation: Hit_ID=Q6Z437; Match level="QueryCoverage=55%, HitCoverage=18%, E-value=5e-22, Identity=73%"; Hit description =Mitogen-activated protein kinase 3
MRAGDGGCCRSARAHGCGRRLAAAASFFLWRAAAGITGEIGFWAAAARLKMLIFDPTKRTSVTEALEHPYMSPLYDPSVQIPQPKCPSISTCVDENISSEMIREMMWQEMLHYHPQVVVSARILPLV

SEQ ID NO: 54698 - protein, 892 aa, Zea mays
  Coding DNA Sequence Number=SeqID_11323
  Gene Ontology: Mol. function=binding; Cellular component=protein complex; Biological process=protein catabolic process
  Homolog annotation: Hit_ID=A3BXH7; Match level="QueryCoverage=94%, HitCoverage=93%, E-value=0.0, Identity=74%"; Hit description =Putative uncharacterized protein
  Pfam annotation: Domain name=PC_rep; Domain location=415-448; Score =26.7; E_value=8.5e-05; Accession=PF01851.13; Description =Proteasomecyclosome repeat
  Pfam annotation: Domain name=PC_rep; Domain location=449-485; Score =29.1; E_value=1.6e-05; Accession=PF01851.13; Description =Proteasomecyclosome repeat
  Pfam annotation: Domain name=PC_rep; Domain location=486-520; Score =33.6; E_value=7.4e-07; Accession=PF01851.13; Description =Proteasomecyclosome repeat
  Pfam annotation: Domain name=PC_rep; Domain location=524-558; Score =3.4; E_value=4.3; Accession=PF01851.13; Description=Proteasomecycloso me repeat
  Pfam annotation: Domain name=PC_rep; Domain location=672-706; Score =13.4; E_value=0.18; Accession=PF01851.13; Description=Proteasomecyclo some repeat
  Pfam annotation: Domain name=PC_rep; Domain location=707-741; Score =27.8; E_value=4e-05; Accession=PF01851.13; Description =Proteasomecyclosome repeat
  Pfam module annotation: Pfam domain module=PC_rep::PC_rep::PC_rep::PC_ rep::PC_rep::PC_rep; Domain location=415-448::449-485::486-520::524 -558::672-706::707-741
MSPPENPSPAAPAEPSQPPPPAAAAKGKGKKDEKKDDDLSEEDLALKEQLELYVVRAQDADPGVQKLALESMRQEIRSATSSMTSVPKPLKFLRPHFGTLKSYFETMQESELKKYMADILSVLALTMSVEGERESLKYRLLGSEGDIGSWGHEYVRNLAGEIAQEFQKRQDDDLPIDVLMELVQQIVSFHMKHNAEPEAVDLLMEVEDLDLLVEHVDATNYKRACLYLTSSSKFLPAPDDMLALDIAYTIYMKFGDLASALRISLQLEKSTQYVKQVYTATDDLLLKKQFSYLIARHGLAMEIDDEIAADDNDKEVLQEIVNNTKLSEGYLTLARDIEVMEPKSPEDIYKVHLIDGRGASSSLDSARQNLAATFVNAFVNAGFGQDKLMTAPSDSSSSGSSGNWLFKNKEHGKASAAASLGMILLWDTDSGLAQLDKYLHSNDTHVVAGALLGIGIVTCGVKSDCDPAFAILMEYIGKDDSNIRIGAILGLGIAYAGSQKEELKMHLSAVLGDSQSPLEVLVFSAIAMGLVFVGSCNEEIAQSIIFALMERSEAELAEPIIRLLPVALGLLYLGKQDSVEATAEVSKTFDEKIGKYCDVTLMSLAYAGTGNVLKVQKLLGICSQHLEKGETHQGPAVLGIALIAMAEELGAEMAVRSLERLLQYGEQNIRRAVPLALGILCISNPKVNVMDTLSRLSHDADADVSMAAIISLGLIGAGTNNARIAGMLRNLSSYYYKEAAHLFCVRIAQGLVHLGKGLLTLSPYHSDRFLLSPMALGGLVTVLHACLDMKSTILGKYHYILYIIVLAMQPRMLLTVDEDLKPLSVPVRVGQAVDVVGQAGRPKTITGFQTHSTPVLLAAGERAELATEKYIPLTPVLEGFVILKKNPEYHEE

SEQ ID NO: 54699 - protein, 46 aa, Zea mays
  Coding DNA Sequence Number=SeqID_11324
MGKNNKRKHEPTPPSEEFGDSKYSEEEFSSESEGSPAPIPLRIAAK

SEQ ID NO: 54700 - protein, 185 aa, Zea mays
  Coding DNA Sequence Number=SeqID_11325
  Homolog annotation: Hit_ID=Q6J9V9; Match level="QueryCoverage=41%, HitCoverage=19%, E-value=6e-07, Identity=44%"; Hit description =Putative uncharacterized protein
MAQGHISLSDTPKRILPCEGTRLRASLLIRGSKAGPSKGFDSRLRSRGPYTHYWSEAGPRRVHSRLRHRARDDYGYVRYITKARAALPSSPETPCSAPIEGNMALSPLLLAERRRRGVCKKVESVPDRPLALCRGSGAALANPAPAEPLTASTYQPENLGPDRTPGLRPARMRERSDQPKRYARH

SEQ ID NO: 54701 - protein, 995 aa, Zea mays
  Coding DNA Sequence Number=SeqID_11326
  Gene Ontology: Mol. function=phosphotransferase activity, alcohol group as acceptor; Cellular component=cytoplasm; Biological process =metabolic process
  Homolog annotation: Hit_ID=Q6YX79; Match level="QueryCoverage=98%, HitCoverage=98%, E-value=0.0, Identity=87%"; Hit description=GHMP kinase-like protein
  Pfam annotation: Domain name=GHMP_kinases_C; Domain location=864-962; Score=24.6; E_value=0.00035; Accession=PF08544.4; Description=GHMP kinases C terminal
  Pfam annotation: Domain name=GHMP_kinases_N; Domain location=632-700; Score=70.6; E_value=5.3e-18; Accession=PF00288.17; Description=GHMP kinases N terminal domain
  Pfam module annotation: Pfam domain module=GHMP_kinases_C::GHMP _kinases_N; Domain location=864-962::632-700
MRVQDGDVDGGGEVTAPPQHLVFAYYITGHGFGHATRALEVVRHLVAAGHDVHVVTAAPEFVFTTEIASPSLHIRKVLLDCGAVQADALTVDRLASLEKYHQTAVVPRESILKTEAEWLNSIKADLVVSDVVPVACRAAADAGIRSVCVTNFSWDFIYAEYVVAAGHHHRSIVWQIAEDYSHCEFLLRLPGYCPMPAFRDVIDVPLVVRRLHRSRTEVRKELGIANDVKVVIFNFGGQPAGWELKKEWLPDGWLCLVCGASDTQELPLNFIKLAKDAYTPDLMAASDCMLGKIGYGTVSEALAYNLPFVFVRRDYFNEEPFLRNMLEHYQCGIEMIRRDLLTGHWKPYLQRAITLQPCYDGPINGGKVAAHILQDTAVGKKYISGKLSGARRLRDAIVLGYQLQRAPGRDVGIPYWYSHSEKEISVGPAPTSHDMNGSDESSFEDFEILHGDMQGLTDTMSFLKSLSGLVGNDLRSPEKQTRERAAASVLFDWEEEIYVARAPGRLDVMGGIADYSGSLVLQMPIREACHVAVQRSDPTKQKQWKHTQARQLANGGAVPVLQIVSFGSELSNRAPTFDMDLSDFMDGDKPISYDNVKEYFSRDPSQKWAAYVAGTIFVLMAELGVRFKDSMSILVSSSVPEGKGVSSSASVEVASMSAIAAAYGLNIAPRDLALLCQKVENRVVGAPCGVMDQMTSACGEANKLLAMVCQPAEVKELVNIPTHIRFWGLDSGIRHSVGGTDYGSVRVGTYMGRKMIKCAASNLLSELLLSCTSTQPGDSSPDEYEGHGVDLLKSEASMEYLCNLPPHRYEAVFAKEIPETITGDAFLEKYGDHNDAVTEVDPKRSYCVKAPTRHPIYENFRVEAFKALLTAAKTDEQLSALGELMFQCHYSYNACGLGSDGTDRLVNLVQEIRHRKSSRAGGPSLFGAKITGGGSGGSVCVMGKNCLKSSEEILEIQKRYKAATGYLPTVFDGSSPGAGKFGYLKIRRRSTSPSD

SEQ ID NO: 54702 - protein, 266 aa, Zea mays
  Coding DNA Sequence Number=SeqID_11327
  Gene Ontology: Mol. function=kinase activity; Cellular component =ornithine carbamoyltransferase complex; Biological process=amino acid metabolic process
  Homolog annotation: Hit_ID=Q6QP54; Match level="QueryCoverage=40%, HitCoverage=37%, E-value=1e-25, Identity=56%"; Hit description =Putative kinase
MARARPRQQKTDSASEEPPRRRQRGLDRSNSCPSARLRRTSDSHDITPARCQDLSGCHIGMAFLEKVGRAGPRTGQALSWGRSLPSPAWTLVTPLLQAHLTWARDEHEGRGTSTSLTLDSGHLASPPFALAHALDPSGLGHAAHSLVGLGTPPVSKRRHHHCPSGGASQMGRRSCSPWPESARGRVMMAPPVDVVGLRPRLGDVEAPPRPRSSLSSVVEVESEPLVQARRRPSAEARAESEPWGQAERSSSSSGAEPKSEPWVGRS

SEQ ID NO: 54703 - protein, 250 aa, Zea mays
  Coding DNA Sequence Number=SeqID_11328
  Subcellular localization annotation: CTP_CleavageSite=25; ConfidenceScore=5.48e-01
MSSSSPMRRVFPPSKPPDGGYPPPSRFLVGGTQLHGSWYLSAIVRLQGFSSAGPAAPLRRRSPRMVTTRFWVGKSKPGRDLGPTLSFKDVHHPRWGGDHAEPALYLPRGSAGHPFPRRLGVEALAGPAGGADLDSAGLIDGGRRHLQRVGVVGRASGGPSCRRATAAPCAREDHPRCRALLGRRSCSGVVLLLHWDGALAQRPAAREVPVADGITATTRARATVPACLSSPLERRRGRGQDRSSADPLSP

SEQ ID NO: 54704 - protein, 57 aa, Zea mays
  Coding DNA Sequence Number=SeqID_11329
MEMEQRPEDEGSREGDETSEQLELENKGAPERSLPAPLQKLSPSTPIRPSGVFAISG

SEQ ID NO: 54705 - protein, 150 aa, Zea mays
  Coding DNA Sequence Number=SeqID_11330
MGKNNKRKREPTPPSEEFGDSEYSEEEFSSEPEGSPAPVSPPASSDDSDDSQGIAAEVWTYIRAVERSGLEGSDESEYSSDEEDSDGGEEGEDDDDDDDDDDDDGGSGGGGDGDGRGGTKGGSGGSGDSTRGSSRGSTQGGGGGRGRASG

SEQ ID NO: 54706 - protein, 241 aa, Zea mays
  Coding DNA Sequence Number=SeqID_11331
  Homolog annotation: Hit_ID=Q6J9V9; Match level="QueryCoverage=75%, HitCoverage=45%, E-value=3e-19, Identity=39%"; Hit description =Putative uncharacterized protein
MAAPRTTHPVALTPRQSRRHLWQAKRATLHLRHNDRVKKGAGKGDTPKGILLCEGSGPRALLLIRGSKAGPSEGFDSRLRALRLRALLLIRGSKAGPSEGFDSRLRALELRAHYWSEVRRLAPRKGSTAASGHSGSAPTTDQGFEGWPPKGSTAASEHAERGMTLGTSDTWPRLGLRSRGTLGHFRDQQERFCNRIPSERGIEPSDPIKWDRVRQITCRSRIRPLKGHDLASPEPSLGQEQ

SEQ ID NO: 54707 - protein, 289 aa, Zea mays
  Coding DNA Sequence Number=SeqID_11332
MARLRHTARKSVIPFLPSRLAERPLRRPVAGQSSHLERFHHCLHEEQERRRQEQQGSSFSLQQEIESVRSCSPVLPLEAPPAPPLGAPAPGVAAGGDPDDGGGDDSSSHDTDFPADQEPEGWVARPITRDAARGCHFHDAPDTLLRRALNRRTWSIEYRCVVYQHSRGVYPGLLGGDLLADGLDLKYYPHRPSGSTGGVIVSPVGEDNPRLSSTVNLAAVLNTELDHALDELSRARAEIALLRAERVERRHLDDGSPAPVGTQHPYRSPRRGRQSYGNPDCKTKINLEP

SEQ ID NO: 54708 - protein, 387 aa, Zea mays
  Coding DNA Sequence Number=SeqID_11333
MESARVAFVLLWEERNLVEVGTFQPSLGFKGFSSGSPAASPHQWSPKTVTTSSMVGRSKPGCGLYPALSFKDLHHPCWGGGRGEPGPAFVWAGVPLLPPASGGGNHPPALRRSRPPAMLGKANCCCPAKDGSEDLPVRFGAGCIRWCGDGGQVDAVVGDEVVAAGESFSADETVSVTRGPTSGSLALMSGSHPSSGDANKSLPAVASAPGPSLLLQRSPSRLEKELRRPRSRWLPRPKRRSSGGWNLARSSTGGTDAGVGLPRPRAGLMSSGDSWLRLWSNRLSRLLGPGFWRRPYRRWPRRSADIFLRGGDPSPVSPSEAGSDSAEGGDDAEGAAAPPIDDLFVGSRIAYPSESYLSRKVMSEESLGSVFLAAYVYFVVFRIPLSK

SEQ ID NO: 54709 - protein, 198 aa, Zea mays
  Coding DNA Sequence Number=SeqID_11334
  Subcellular localization annotation: CTP_CleavageSite=78; ConfidenceScore=5.02e-01
MTQWTQHPKKAASKYWSQCISSCAPNSSLNTGLRESKKDHMNWFNYCEQFLHRQCSLGGYMFQLLGHFLVGPSALAPRASALATMALCAPTTDIPTLKALLAQIHDPLAPGPSILAPDALLVPVLVILALLAPTPGSWVSRNIFLALGTSVLVPGALLVMVLGTLHAPTLRTLLAPTLWAAFLASQTTSLLAPRTTQH

SEQ ID NO: 54710 - protein, 39 aa, Zea mays
  Coding DNA Sequence Number=SeqID_11335
MGVPDLCARCARIYASQRLKRIPEAGEFLRPLFLGHRTV

SEQ ID NO: 54711 - protein, 251 aa, Zea mays
  Coding DNA Sequence Number=SeqID_11336
MAKGALYGIIEDLYTFILKEVKKVHTQPIKRSSFGFNKGAKGQPKAPLVWRTGLSGVPPDMSGAPEDSNANSPPSGISRGTRAIIHRTVRCTPDSVRCAKEEQPQELASFGNLQRVVRYNSPDMSGVHRTVRCNSGATAIRRQRLPGTHLMRALRAQKAGAPILAHRTRNSACPVCTGHPGGPTSQKLQRSESNGSNDVAGAPDMSAANTVSVKRTWDHILYDSHHLTQPRLEAELNLPDIRPTKPNSIKS

SEQ ID NO: 54712 - protein, 98 aa, Zea mays
  Coding DNA Sequence Number=SeqID_11337
MGVPDACALWRALIAVAGDRWRETGEFLRRLFLGAPDTVRCTPDSPVNYSGAPLEIPEGGKFELESSGAPDSPVPQTRGAFGCPFSPLLNPILDLFIG

SEQ ID NO: 54713 - protein, 272 aa, Zea mays
  Coding DNA Sequence Number=SeqID_11338
  Homolog annotation: Hit_ID=Q5GAU8; Match level="QueryCoverage=11%, HitCoverage=23%, E-value=3e-09, Identity=87%"; Hit description =Putative uncharacterized protein
MTDAEKEVATERRMDSPPRCDCGDRVVIDEDYDKQFCCPNIDYPYGWRKCRFREWLYGPLSHWPEPEETRKCSWESYDDKGEAVDEKRAQDAREWEAAQAQKQMLDNLADRLKGKIGSGVNYLADEAHARYVQDKMTTVELMEEEDDDTSRLSELIALAEAGLHEEEEDDTSRLSELIALAEAGLRAQEEEDEFMSQAVEEVEAAYYKKKSDEAEAEDELFSQAADEAEANYYKRTGDKCDAGQCSKWNEVVIEDCATDDSEDELLIDCDSD

SEQ ID NO: 54714 - protein, 128 aa, Zea mays
  Coding DNA Sequence Number=SeqID_11339
  Gene Ontology: Mol. function=structural molecule activity; Cellular component=protein complex; Biological process=microtubule-based movement
  Homolog annotation: Hit_ID=Q7YXU3; Match level="QueryCoverage=32%, HitCoverage=9%, E-value=2e-10, Identity=74%"; Hit description=Beta -tubulin
MRWTTSIPRRQWIWSAGPHRRGAVAQGGGHAGAHAVVDMQPLPQSSPAFSAPPSLIHAHAAAASSTPTVVASPVASVLMDLEPGTMDAFRTGPYGQIFCTDNFVFGQSDTGNNLAVHYTECRSPRSTT

SEQ ID NO: 54715 - protein, 97 aa, Zea mays
  Coding DNA Sequence Number=SeqID_11340
MCNNVSGYVAGAPTLGEWPVGVVSSPCSVEVIEFSARIWSTPPTQQAPMYLTSRCSRKFLAGGFDFTETSCSSVLSTAPKDQPALSDCLEWSHAVKH

SEQ ID NO: 54716 - protein, 101 aa, Zea mays
  Coding DNA Sequence Number=SeqID_11341
MRCMSKRSPELVIISALIKTKSLGGKEKMCKKWSNQDLGTSVSQEIGISSHDETRVRSSETTDQAKDRGKKSFEVPSAREKVKKAEEPKAKGEEEGLQSQG

SEQ ID NO: 54717 - protein, 92 aa, Zea mays
  Coding DNA Sequence Number=SeqID_11342
MAGWSCTCDGMQANGGPVRWMATRGLGCDSFPWRRGVDCVWGAEDMDGASTVHGKNDWAMGWSCTSSAMGFLRGGLLRGVDSDEGMCFLLWR

SEQ ID NO: 54718 - protein, 542 aa, Zea mays
  Coding DNA Sequence Number=SeqID_11343
MARVCFGLDGHRKHTLQDDPILQARILTLEGSSGTLGVDNTFGEKSGSGRRLGRSPRGLGQLSLEDISPARGLGGSFPASVPPADDPARLRPTRSSFRANSASVCADTATPGFGSSKSSRGVSLTKQEKPRAARSTEPRDSYASGIRIPHSSPLHGATRLVKRHNEQNTGIRDAITNGTPVPSPRVRTTSTPGSLRSDKLRANHQQTRVAPKRTGSSPSPAWLEDGLHHQKLEEEVASRPAREAELWLSPATAPAGDDEDQLGTGPRSQPSLLLPIQGLAVIVLCDRRKILEAERWLKDVDPRAIDLAMRIIERMFLKMKEDEAKNKIEEENDRWRPNDESTSSQGLSFKSTSHMCFIANGSDSESESEDEEEQESDSEDEDDLQQFFAQLSKKHRMSLLKLMKRAEEQKEMLHKQEDFLIRKIEDLEKLTKDHEKLKCSHDDLVQRKQVNVSYAKENNELKEENERLKRSLIQLKGKCHAQPSQDNRDNMVKKLEKGTIVACTKPLQKNIKLSKKDMSKHQEKKAKAHDKCLNHASTCSTQ

SEQ ID NO: 54719 - protein, 108 aa, Zea mays
  Coding DNA Sequence Number=SeqID_11344
MAGSRDSSDVSPSNIIEPTWETLPADEQLQFEEHKEQMIQEAKAKFLANFKVDRNNKVVRHRATDPASLQPTPDIPNAKSSACASLQLVQKKRQEEAKFTFNVDSIGH

SEQ ID NO: 54720 - protein, 53 aa, Zea mays
  Coding DNA Sequence Number=SeqID_11345
MACWNRRSSSGDQEIKLFEFYEIEDPEHLFGEGKEEGVKADLQEFQDFDEFVV

SEQ ID NO: 54721 - protein, 415 aa, Zea mays
  Coding DNA Sequence Number=SeqID_11346
MPGVLGVGEVRPLGAVACRLHGCPPLSPVGLGKSGESLERNSVGIGTFQPLFGFKDFHQAARLYPPSPPPRRRSPKTVTTSPWVGRSKPGCDLGPTLRFKDVHHPRWGRGRAEPELYLPRGFVGQPLLRCSRERALTGPAGGSDFDNAGLVDGGRRQPQRVELVGLAPGAPSCRKAAAAPCAREDRPRCRALLGRRSCSGAVLPLHWYGASARRSESLGSVGLAARGFSSLVKETPRLLFDEPKPWVAILAQTEAELARKEDLVVRSLAGSSAGRTDAGNEPSRPRAGLMSSRDSWPRPRGDRLSRLLGPDSKRRPWRRRSGLGDDVVLQSGDPRTVSPSEARSDLAEGVVDAEGAAAPFKRQDPSLQDRIILYREGSKNRFGRRAFEREDLFGPRNHLSERELLIAEGDDPLSK

SEQ ID NO: 54722 - protein, 341 aa, Zea mays
  Coding DNA Sequence Number=SeqID_11347
MTASKKQGPGKGDTPKRILPREGTRLRASLLIRGSKAGPSEGFDSRLRSRGPHTHYWSGVRRPAPRKGSTAASCYSGSVPTTDQGGNDLVTESHQREASSPRTPSPGDRVRQITRRLGGCSRKPGSGRTVDSVNIPARELGSRPYTRATASSHEGMTRPAEALREAIRPRRSETTPPRPQGLHPAGALARTHQNKSQPRKAGPLAKKCDESLQAIANTPFEAQGLLSGTIIRGTLKAPNSQLGSDSGSALEDDELRSARPRARTRAQPQKTTDSAPPDPGLGLGLSPRRRRTPLRPTQGSDSGSAPEDDELCSARPRARTRPRPRKTDSTSASEELPHRPT

SEQ ID NO: 54723 - protein, 252 aa, Zea mays
  Coding DNA Sequence Number=SeqID_11348
MAFAASQAPASRAPVAWATNHADGVLLLCRVSQTLGKDYFTLGKGFAECKTRQRTLGELYIGNSLFAEYFLSGTRQRFCRVPFDTRQRKVTVTAPSDGDGSFAECLLWHSAKTGLVGPTASPCAESARRHSAKEASLPSVWWTGTRQRVIQWAPLPVPLPSALATALGKDGFTGSQVSFFAECHGAKGSHLAHKKTKYWVQQKSKGTTEGTSGLAHRCATGQCPMHHRTVSGAPEDSNSNSSPSGISRAGAL

SEQ ID NO: 54724 - protein, 163 aa, Zea mays
  Coding DNA Sequence Number=SeqID_11349
  Gene Ontology: Mol. function=nucleic acid binding; Cellular component= cytoplasm; Biological process=multicellular organismal development
  Homolog annotation: Hit_ID=Q6Z4F1; Match level="QueryCoverage=42%, HitCoverage=7%, E-value=5e-22, Identity=60%"; Hit description =Putative leaf development protein Argonaute
  Pfam annotation: Domain name=Piwi; Domain location=7-163; Score= -90.1; E_value=0.0013; Accession=PF02171.8; Description=Piwi domain
MSALQKVVAAVVHDVNAEGWDRGLEGLRRPRSKWSSTSSTEILGASTAPLFSSSRDNGGPAFETDFADQLKNFSKMGHGVSSGGVLLKSSGWHTPVVPQIRTNASIGTVVDNNICHPTEFDFFLCIHAGAKGTSRPTHYHVLRDDNKFTADALQSLTYNLCYM

SEQ ID NO: 54725 - protein, 378 aa, Zea mays
  Coding DNA Sequence Number=SeqID_11350
  Gene Ontology: Mol. function=RNA binding; Cellular component =spliceosome; Biological process=protein modification process
  Homolog annotation: Hit_ID=A2X2W1; Match level="QueryCoverage=41%, HitCoverage=19%, E-value=1e-71, Identity=88%"; Hit description =Putative uncharacterized protein
MDKEKKVKEKEDYMDQAPMRIVKNYKRPEERIPAERDPTKFVVSPITGELIPISEMEEHMRISLTDPKYKEQKERMLAKIKETTLAPDDEISQNIVGLASTRPGIFGTTEEEVSNAVKAEIEKKKNEQPKQVIWDGHSGSIGRTATHALSQIQGGEEQFDASNVAGRPIPGPAPLVRPGMPLPRPPQPLPLVRNDLLSHFAGDIVKNRSESDAPCWEADAMDESEEREVVSFVCRNEQYCTPAENAIVANGQTAAAAEAGERMSSIASLENRCIKEPEKFSEAGTASALLDDAWNDKHYNDQHSTNLNESRLAFRQEVEVGCLENNGQVLQHLLMDAIAETEPIDTTRSKTMDKSYSSLSESSSASLWSSDSEASRRS

SEQ ID NO: 54726 - protein, 156 aa, Zea mays
  Coding DNA Sequence Number=SeqID_11351
  Gene Ontology: Mol. function=hydrolase activity
  Homolog annotation: Hit_ID=A3AEQ7; Match level="QueryCoverage=53%, HitCoverage=28%, E-value=9e-22, Identity=60%"; Hit description =Putative uncharacterized protein
MQNKERLVHLLKGITVGIEKCQATPLSQEVLIVWGDHNQLFLVEAFAVHRTLKWSARLEVIQKTGHVPQLEDSACFNKVMLDFLKSLICWLMVARNKISYLVHFGVLVFKLGLMFIFGFTLNMIVYITCRTKVSWESYEMETPTLALDYDSESTRN

SEQ ID NO: 54727 - protein, 116 aa, Zea mays
  Coding DNA Sequence Number=SeqID_11352
MAGGAGEAVDMADLRTWPGWGGINSHQTKYGRWRRLLAMGAPDSPVRRRTVSGAPPDSVWCAAMSACLSVLELVDRWRLCPHAASDSAVPLLTNCSDFCRVHCSALFLSESTVARR

SEQ ID NO: 54728 - protein, 22 aa, Zea mays
  Coding DNA Sequence Number=SeqID_11353
MRLLQWYLFLTCVGGCETARVP

SEQ ID NO: 54729 - protein, 89 aa, Zea mays
  Coding DNA Sequence Number=SeqID_11354
MPRSKGYGPIVAVRSMVGGPESAHDNLQSDPFAKDPAVDNPHLILAVYNPSNAPKIIFLLSLRSRTTARHTASVWPPMNCTVAQARTAG

SEQ ID NO: 54730 - protein, 180 aa, Zea mays
  Coding DNA Sequence Number=SeqID_11355
  Homolog annotation: Hit_ID=A2Y0U1; Match level="QueryCoverage=58%, HitCoverage=31%, E-value=1e-50, Identity=84%"; Hit description =Putative uncharacterized protein
  Pfam annotation: Domain name=DUF266; Domain location=1-148; Score= -60.9; E_value=2.8e-10; Accession=PF03267.5; Description=Arabidopsis protein of unknown function, DUF266
MARWTVRCGHRGLDAFTPAPAPSAVAAAAPASTPLRPGPPHVESAEAWKAHNCIPDEHYIQTLLAQSGLEEELTRRSVTYSAWDLSASKDRERRGWHPVTYKVSDATPRLIKSIKTENRREWCTSNGKPAPCFLFARKFPRGAGLKLLDSATLPTHEQEDELDFVETLSTSGGIDHHSSL

SEQ ID NO: 54731 - protein, 935 aa, Zea mays
  Coding DNA Sequence Number=SeqID_11356
  Gene Ontology: Mol. function=hydrolase activity, acting on glycosyl bonds; Cellular component=beta-galactosidase complex; Biological process=carbohydrate metabolic process
  Homolog annotation: Hit_ID=Q10RB4; Match level="QueryCoverage=88%, HitCoverage=95%, E-value=0.0, Identity=77%"; Hit description=Beta -galactosidase 5 precursor
  Pfam annotation: Domain name=Gal_Lectin; Domain location=785-862; Score=127.9; E_value=2.9e-35; Accession=PF02140.9; Description =Galactose binding lectin domain
  Pfam annotation: Domain name=Glyco_hydro_35; Domain location=35-362; Score=452.8; E_value=4.7e-133; Accession=PF01301.10; Description =Glycosyl hydrolases family 35
  Pfam module annotation: Pfam domain module=Gal_Lectin::Glyco_hydro _35; Domain location=785-862::35-362
MGRWWPAALLGCAVAVVAVLAAAVVECAVTYDKKAVLIDGQRRILFSGSIHYPRSTPDVISCILQNLSFFFSPLLPRGGGEFMAVVSCVLDAMLSKANCFPTLAVPLYSTMWEGLIQKAKDGGLDVIQTYVFWNGHEPTPGNYYFEERYDLVRFVKTVQKAGLFVHLRIGPYICGEWNFGGFPVWLKYVPGISFRTDNEPFKIENEYGPEGKEFGAAGQAYINWAAKMAVGLDTGVPWVMCKEEDAPDPVINACNGFYCDAFSPNKPYKPTMWTEAWSGWFTEFGGTIRQRPVEDLAFAVARFVQKGGSFINYYMYHGGTNFGRTAGGPFITTSYDYDAPIDEYGLIREPKHSHLKELHRAVKLCEQALVSVDPTITTLGTMQEAHVFRSPSGCAAFLANYNSNSHAKVVFNNEQYSLPPWSISILPDCKNVVFNSATVGVQTSQMQMWGDGATSMMWERYDEEVDSLAAAPLLTTTGLLEQLNVTRDSSDYLWYITSVDISPSENFLQGGGKPPSLSVQSAGHALHVFVNGQLQGSSYGTREDRRIKYNGNVNLRAGTNKIALLSVACGLPNVGVHYETWNTGVGGPVVLHGLNEGSRDLTWQTWSYQVGLKGEQMNLNSVEGSGSVEWMQGSLIAQKQQPLAWYKAYFETPSGDEPLALDMGSMGKGQVWINGQSIGRYWTAYADGDCKGCSYTGTFRAPKCQAGCGQPTQRWYHVPRSWLQPSRNLLVVLEELGGGDSSKIALAKRSVSSVCADVSEDHPNIKKWQIESYGEREHRRAKVHLRCAHGQSISAIRFASFGTPVGTCGNFQQGGCHSASSHAVLEKRCIGLQRCVVAISPDNFGGDPCPSVTKRVAVEAWKKKATAAAAAASSKRERERERNKEADEVTVELRAVGFDKVVLKQRRRMRRRRRLGEEERAAILLMALSSSVVYA

SEQ ID NO: 54732 - protein, 100 aa, Zea mays
  Coding DNA Sequence Number=SeqID_11357
MAHVGPEWSHGMAYDDTRHTDVAKRGGSWIGNLPSATHDDGGTDVETCDDTMKPENGTQLNLSLGTKPQRWGRPPMKEHIKIGATPAAVTTVKLRNASGS

SEQ ID NO: 54733 - protein, 90 aa, Zea mays
  Coding DNA Sequence Number=SeqID_11358
MAKFGSSALRRGRDTWELNQWYNYYSHVRRFLLSVLAHIRGSLVLPEGGWRSDSWPAAPSSCAEEHVTEDPGEQQVEVAEQELIEGKLCP

SEQ ID NO: 54734 - protein, 84 aa, Zea mays
  Coding DNA Sequence Number=SeqID_11359
MTVGGLSGRKKTNAQYKINCSCRVRLKWGAAAPSGFDEGEVPDLSASRDNSGWGEDDPWDPTTTSKPEGANAIAEPTPCGYRPC

SEQ ID NO: 54735 - protein, 51 aa, Zea mays
  Coding DNA Sequence Number=SeqID_11360
MAHSGGDGMAWAVGGDGTAQSQGAGTQGANSAGLLAIMVHAYDEDNASWGS

SEQ ID NO: 54736 - protein, 204 aa, Zea mays
  Coding DNA Sequence Number=SeqID_11361
MASGVVSAGLGVSRKDCPSYKDRPNPRVMMAGEHREDKMGECFVRFGHGGGLTPSGITIKMEGSFVIRTSYWSEVEGFLHLLRSCALRMGIRKKPEYVWKEYREYGIEKCSMAVYLGESRNYPNNPPFQIIATGHRFPDTCQNAAQKALRQLCQNYSREVSKTPLRYFPPSNKNTPAWRKRLQALSGRDPNEDDPTIVYMAGYL

SEQ ID NO: 54737 - protein, 71 aa, Zea mays
  Coding DNA Sequence Number=SeqID_11362
  Subcellular localization annotation: CTP_CleavageSite=4; ConfidenceScore=5.26e-01
MAARCTTAFPRSLHPLPTPMSLCSSGQLRCSDLCSASTILFGKPYTSHELPSLVKNRYRRMRRMEDNMTSS

SEQ ID NO: 54738 - protein, 106 aa, Zea mays
  Coding DNA Sequence Number=SeqID_11363
MQEACNRTKGAHPFNFDASSMEAQAHTSCNRHDGYYVRKTAPPLASVLRLLDYGTDAATRGNPAHGPTVPTRRVGHGDRERGYSERDPSPRRKRAPSPLTDQRFEG

SEQ ID NO: 54739 - protein, 254 aa, Zea mays
  Coding DNA Sequence Number=SeqID_11364
MSSRSLMHRVFPPSEPLDGEHPQSFCLVVGRTQLHGSWYLSAIVRLQGFSSRGPAASPRRWSPKTLTTSPWMGRSKPGCDLGPALSFKDVHHPCWGGERGKPGLYLPHGFVGQPLLQHSRERVLTGPARGADFDNAGLVDSGRRQLQRVGFASLAPSAPSRRKGSCRAARTVGPPKTSRAARAAFVFWGGPAFAPCQGGGGSRSPRHRRDHRHHPRFGPPALCTCPRPSSVGVGEGKVAAASALRPPLLQFGHP

SEQ ID NO: 54740 - protein, 99 aa, Zea mays
  Coding DNA Sequence Number=SeqID_11365
  Subcellular localization annotation: CTP_CleavageSite=38; ConfidenceScore=5.26e-01
MASPLPSGLSTRTAHFGVDTSLMATPTMSENRRRGGRRAQQEQAAQQDEAPQQQQLPPPPPMSIEQMFMMQTQAVQAIGQTLAAIQQQQQHPPPQPQMP

SEQ ID NO: 54741 - protein, 219 aa, Zea mays
  Coding DNA Sequence Number=SeqID_11366
MTLEPHPLQPGWRSLDSESFGYRAEDTIEAIALHGLTTLCGFHPFELATHPIGLFPAEKEDDPMWKDRVEHAKDIWAIYPGQTAHLTVMRGEAMSHLMALLEATKITLDNREELVVDLSQELVEKDLQVEQLSTDIQELEELVGTRENTIEVLEDQLINTQQQLAEANEHLDMHHQEIQDQEANEDVDIEGGDEPASSVDTAGSGRPPSPESSVASFAH

SEQ ID NO: 54742 - protein, 62 aa, Zea mays
  Coding DNA Sequence Number=SeqID_11367
MVLTGVQEPAGARGPDCNLADGEYILVPEQGAAQEVAPDPAPEPAPEDLPATALEGKPRFYA

SEQ ID NO: 54743 - protein, 266 aa, Zea mays
  Coding DNA Sequence Number=SeqID_11368
MDDQISFCAFVHGVALVHWIRSLQRDRLVWMARMRALEGKQLLEDDPTVVYLTAYLLTLDTQYDFLARHHRQMIARAEDAEKRNRQLHVDLTTAQARATALESREAIAVEALKQAKEEHVQKLMEAYLPVPSNPVQPIKAEDPQILEGHPVSIKGEKKAWELSEGAIDLEGIPVSPLAMDKQEHPESSQDPPPELFEPLTMKNIPAPSLEVKEEAASTPPAPPPSEELQEPVHLEEEFDPVLPSQSPPEEVININSLLTHPRDVSD

SEQ ID NO: 54744 - protein, 184 aa, Zea mays
  Coding DNA Sequence Number=SeqID_11369
MESHDLQTERESRLVGGNENDGFGIDYGNGKWYSFHLERLCNCCVRELLILARTWFTFGLPSKIGCDKEPTCKLGPIVRNDTAWDPKSTDNRSEESNNSTLGDVDHRGGLWPLCELVDGDEKEAVPADGPGEWSQDIHPPYGEWPGGWNHLQSPELVCVSALRGTDTPCRTLPSQLHPGGWLAS

SEQ ID NO: 54745 - protein, 80 aa, Zea mays
  Coding DNA Sequence Number=SeqID_11370
  Subcellular localization annotation: CTP_CleavageSite=64; ConfidenceScore=5.21e-01
MGGSRLGRVALPWTSPMVFDFSNGSLTSTTAPINFLPGALRYNSPDCPVYTGQCLVPQGRATLELASFGNLLRYNSPDVS

SEQ ID NO: 54746 - protein, 58 aa, Zea mays
  Coding DNA Sequence Number=SeqID_11371
MKLWKETSRSSKITTSSRCGLAATPSRLPVKAAVIYVSFPHFDLLCGIENKGTSGFNY

SEQ ID NO: 54747 - protein, 52 aa, Zea mays
  Coding DNA Sequence Number=SeqID_11372
RYFGTGGYEIDGFGYDYGAGGYEIDGFGYDYGAGEDEAVEGDFQEFQDYDEF

SEQ ID NO: 54748 - protein, 112 aa, Zea mays
  Coding DNA Sequence Number=SeqID_11373
  Subcellular localization annotation: CTP_CleavageSite=76; ConfidenceScore=5.08e-01
MAKLPRGLPKTKAKVGEPATTNSGTRRSTISGFTIPLIGDLVKLRLPSLHLCACRCRLCSQIGTEQPKVRHLGALLGEARGSPGKRGPQGSQRTPDIDLAADERRLGGSQIR

SEQ ID NO: 54749 - protein, 38 aa, Zea mays
  Coding DNA Sequence Number=SeqID_11374
RYLGTGGYEIDGFDYDYGAGEDEAVEGDFQEFQDYDEF

SEQ ID NO: 54750 - protein, 431 aa, Zea mays
  Coding DNA Sequence Number=SeqID_11375
MNKTPAFKMPLQTEPRFHLRGYEQPHTIGGPMEQQKTDERLVVARSSSGDDDDFCSGGPNSSNDDLRADAAAVRPSPMPSLERQGRAEGRRVGGQSVGGTGYLVGRRTSSSCHGGRRRRERLQSHSGQRARHAAAASTTDGESPSPRSLREGAGRRPRRDQPQLGTLPSPALMMKILEAEGGVEAAARLASPRHRTGGHRLGRRGLSLLQHAPRSSPYGAGAGSHASCKLAQGRRSQTATRGACNRPAVTSVPPLSPRPAGERVDSRAGGMQPHQVGAPLRLPTHPAWRPRPTRHATGAPVATCEPLHRHSRHYHASSTAEPVPQLEAALRTTQQCQPGATVNTAKNGPAVMAVAGGQEQRSRRQPSSRPIQGQREKPLSRREEGAPVFRSSNGSRTRNGRPANRSPRRINSAAGQAAPLAEEESDASPSP

SEQ ID NO: 54751 - protein, 71 aa, Zea mays
  Coding DNA Sequence Number=SeqID_11376
MAEQRHGQSPIGCISCANRAPARALHSVVGHASLAPTHTSEAKRLPPMASPFACCWYPMEKGFKELTIKLW

SEQ ID NO: 54752 - protein, 272 aa, Zea mays
  Coding DNA Sequence Number=SeqID_11377
  Subcellular localization annotation: CTP_CleavageSite=68; ConfidenceScore=5.54e-01
MSSRSLMHRVSPPSKPPDGGYPPSFRLVVGGTQLRGSWYLSAIVRLQGFSSCNPAAPLRRRSPKTVTSSLMVGESEPGYGLCPSLSLKDFHHQGWGGDCRVPGSRMRVASEPLSAPVSATAAGRGSPASEIARAAHGPTSNSTAFCPSLPHEFGHGRGPPGSSIRPEVIAAAVRPPGAEVVVVAAAGAGDDAPFVGLLLLRRPPQSNSPVGCLNRFTKRESPRAKVTSENGDLRTASPSEARSDLAEGVVDAEGAAAPFKRQDPSLQDRIVL

SEQ ID NO: 54753 - protein, 87 aa, Zea mays
  Coding DNA Sequence Number=SeqID_11378
  Subcellular localization annotation: CTP_CleavageSite=19; ConfidenceScore=5.21e-01
MALLARFLSSLHSLSLLVTAMDTRRRRGNSDPSWLNTPRGLAPNNPPAQHPRRDPWSVLRSAGEEDDQRAPHCGGKRKVSHRDQVLN

SEQ ID NO: 54754 - protein, 47 aa, Zea mays
  Coding DNA Sequence Number=SeqID_11379
MTALSISNDPDYSDRSVSQHLIWAASSQINDRDLNTEEVSHRDQVLS

SEQ ID NO: 54755 - protein, 59 aa, Zea mays
  Coding DNA Sequence Number=SeqID_11380
MGRREPTIGPHQPVTKSMHVARVLFTYDISLKPSTTLKGKERSKREKRKKILRTNSDIS

SEQ ID NO: 54756 - protein, 76 aa, Zea mays
  Coding DNA Sequence Number=SeqID_11381
MQAACNRTKGAHPFDFDASSMEAQAHTSCNRRASYYEDRERGYSERDPSPRRKRAPSPPTDQRFEGWPLGRVRQPP

SEQ ID NO: 54757 - protein, 96 aa, Zea mays
  Coding DNA Sequence Number=SeqID_11382
MWEHRSSRILASASSPEPLLRCPWSGTSICERIEENEEEIEVEEARTTPPPPPEEPQAGNCFYLDICGAKPDSPITQGKPRCICHLLVILKSFSLA

SEQ ID NO: 54758 - protein, 76 aa, Zea mays
  Coding DNA Sequence Number=SeqID_11383
  Subcellular localization annotation: CTP_CleavageSite=40; ConfidenceScore=5.16e-01
MARKRSQKNKKTPPKENNEAFVKVPSPAKGVPARFVSVGPAAAAKASSEGWRLCLRPNICPPRDQFDKVTWCRRRR

SEQ ID NO: 54759 - protein, 165 aa, Zea mays
  Coding DNA Sequence Number=SeqID_11384
MARLACTLRALLGDMMKIQLASRHEGSRSGSNDPIRDLEARVKRLRSELRHGCRERARDSRRIVELSAEVNRLQQEITKCDTAIDWVVNSCSLAWDCEAKALARVAELSASLENLQAYCNTLHEEVHVLYDRLHPNMPLEVTAMGARPSGPFGPFWGPSFHEPCR

SEQ ID NO: 54760 - protein, 102 aa, Zea mays
  Coding DNA Sequence Number=SeqID_11385
MIKAETERNTKLHEDFENLRNKCADFATRSDLVDIPAEAQSIGNKFITQIWAKGGRELAGDEAQKLLNSMYAKNTHRLCIPLGTTLESLHLLLRWYFSFASP

SEQ ID NO: 54761 - protein, 194 aa, Zea mays
  Coding DNA Sequence Number=SeqID_11386
MPPCTKKTKRKHTGPIGVPRHQLAPRHEDSSSGSNDLIGDLEAQVNQLQTELRHRTDIWVTDGDRINELRSDIRRLQDQLADRDLALDWAIHSRSLAWAKEAKARTRVEELSSAIDNLQAYCNTLHEEVHVLYSQLHPNVPADPIGTEAGPSHVVGEAFGGELDLFRPPPSMKLVDEWSPTPDSEATRSNRKQE

SEQ ID NO: 54762 - protein, 251 aa, Zea mays
  Coding DNA Sequence Number=SeqID_11387
MVFPSILWEVLCSTGYPTPPLYTVQLYEEHRVPRCRVWLTLESHPLQPGWRSLDSETVGFRADDITEAAALKALTTFCEYHPLEMMMHPLGLFPAEKRDDPMWCNRVSHVKDVWAMHPDQVGRITVQCMSALYRLQALQSDAMAHLTDLAHTTKITIDSREDIVVDLSSELVEKDLQEQQVEIRDNIIDILEIQLHDVQEELEEANDHLEMHHQDMEANEAGSDGEEDPEELEPTPDPNATPSRMPPFTRI

SEQ ID NO: 54763 - protein, 96 aa, Zea mays
  Coding DNA Sequence Number=SeqID_11388
MWEHRSSRILANASSPEPLLRRPWSGTSIRERIQENKEEIEVEEARTTPPPPLEEPQAGNYFYFDICGAEPDSPITKGKPRCICHLLVILKSLSLA

SEQ ID NO: 54764 - protein, 111 aa, Zea mays
  Coding DNA Sequence Number=SeqID_11389
MAKSYGRVRVHVSGKADRAEGLLRLRDTDTSLITFREKLRRRRKGSSSTLGVDPTFGEVRPSLARQRGRRIFTPKDDINTAPGSSPPGSPPGIRLEQTARPAAPKPQPAVL

SEQ ID NO: 54765 - protein, 250 aa, Zea mays
  Coding DNA Sequence Number=SeqID_11390
MVGRSKPGCDLGPALSFKDLHHPGWGGGRAEPELYLPRGFVGHLLPQHSRERALTGLAGGSDFDNAGLVGGERRQLQRVGLTGSGSAPGAPSCRESGCRAARTGGPPETSSAARAAFVFWGCPAFAPVRRLCAEVGAPLIREDPSGDLPVGRWLPSSALRRWRLKKSSSPMGSPPPSVLRASGSLALIACPRPSSGDVGEGIVAAASALRPSPLQFGHLERRSLSLLPEQAAHGAVFFLISSTRTRLSAN

SEQ ID NO: 54766 - protein, 116 aa, Zea mays
  Coding DNA Sequence Number=SeqID_11391
GRRHLWQAKQATLHLRHNDRAGPSEGFNSRLRALGLHADYWSEVQRLAPEGFDSRLRLRARDDPGYVRYITKARATLPRLGGCSRKPGSGQTVDSVNIPARELGDSIVHPSYGQFA

SEQ ID NO: 54767 - protein, 76 aa, Zea mays
  Coding DNA Sequence Number=SeqID_11392
MNRDWIGMKDPSGIHGGVHALRSYRRSSSKIDWLVTLGGCHLLDGLVVVPHELFNGDCEEATVVIVRSIVLASSEQ

SEQ ID NO: 54768 - protein, 161 aa, Zea mays
  Coding DNA Sequence Number=SeqID_11393
MTYLCRIVINYQKGGDCETMFGFGAKGSHLANKKTKYWVQQREQRDNRSVPPDSVRCTTGQCPVHHRTVSGAPPDNVRCTRGLHAELFTFGKIQRRSAIIHRTVRCTPDSVRCPKEEQLWNSPASGIRSAIIHRTVRCTPDCPVNQQSNGYFAPTVTCRRI

SEQ ID NO: 54769 - protein, 141 aa, Zea mays
  Coding DNA Sequence Number=SeqID_11394
MNALSREGCRHFEVFDQADEDFERDIFKVEDPVVKESVGAIYDRMWGPHGREVVRERAETARAQAVRRVARGWTTSGALNSALPDPEPTPAEAVSGVALEPTPETAEDAPDAPASAAAGEDLPPEVAEGSRFWACARNRYY

SEQ ID NO: 54770 - protein, 93 aa, Zea mays
  Coding DNA Sequence Number=SeqID_11395
MAIWPRLLLCEDWASGEPKLCADGGYQLRLGVLGVPLIMVPDSSPRASKGVLILAWRLLSHFLQGDRPFSVAFRSGGCARAHPPGVAPEASEE

SEQ ID NO: 54771 - protein, 279 aa, Zea mays
  Coding DNA Sequence Number=SeqID_11396
MVTTSSMVGRSEPGCSLCPALSFKDLHYPCWGGGQAEPELYLPHGFVGHPLLQHSGERVLTGLAEGADSDNAGLVGRKHRQLQRIGLAGSAGSGSAPGAPSRRTSGRRAARTGGSPKTPCTARAAFVFLGCPAFALVRRLLRGGRCSPVREDPSGDLPVGRWLPSSTLRWWRLKKSSLPTRSPPPSALRASGSLALIACPRPSSGDMGEELVAAASALRSSLLLFGHSERGSLSLLPERASASHQGFCRPAGPPMWGVVFLGVIPCFFLIFEHWNSPVG

SEQ ID NO: 54772 - protein, 500 aa, Zea mays
  Coding DNA Sequence Number=SeqID_11397
MPSSSSSADTTPPAAASSEETLSSLMVEELRAGDSVDFGVSRMTSARVEDMQRLGYFGGGVARAPGTEEVPEPEVAEEDADEGALRCAAGQSSGRDLVEEFVAYGVWPLAHGWALGEVCPRQMPFHGGRVVRSPAFALNLRNRDPAAFVRDAEDLAVRLVGRYVPRTEGQRSFDIRGSNDRLNRVFELNQLPYDGYPGQDEADRRGKKPAVETGDDPAPAAAPSSKKRKLGTAMGGLGVSDSFARELMRTCAAPGERMSSPELRESSARMLRVTGGCWPRNVPIPCAAEEDCFTSRMVHRWRVFPYGRNIGAVVWAVMDKDRQGAAQKRQATVRLHEARPKRQQGAPKAAASGGGKPPLAAKAGAAAPSEAPEATAGAGGSKSTKVVPPASGVAEASKAAQSLPLSGKRVADFGTDITVDDYLGGPGEGQLAIAAPGAAIATAVMVPKARGEALGAEGEVSALALVRDEAGVATRRLKGVTEALSQATERIKLFSCDSCG

SEQ ID NO: 54773 - protein, 655 aa, Zea mays
  Coding DNA Sequence Number=SeqID_11398
  Homolog annotation: Hit_ID=Q6QP51; Match level="QueryCoverage=26%, HitCoverage=99%, E-value=2e-12, Identity=33%"; Hit description =Putative growth-regulating factor 1
  Subcellular localization annotation: CTP_CleavageSite=24; ConfidenceScore=5.10e-01
MELGPWRRGSSSTLGVNHTFGEVRPSLGRQRGRRISAPKDDISTSSGPSPPGSPPGIRPEQTARPARSLSQPCPEDISPAHGLGNSTPAPVPPVDGPVRLRPMKPSFRANSASVHTDTAASGFGSSKSGRGYEQPPTIGGPVEQQKADGWLAVARSSSSDNDFCSERPNSSSDDLRADAAAIRPSPTSPLEGQGRVEGRRVGGQSAGGTDYLVGEETSSDCRGGRWHRKQRRSHSDRRAGHAAAASATNGKRLSPQSLREGAGRCPRGDRPQLGALPSPALMMNILEAEGGAEAAARLASPHPGAGGHRLGGWVPRVAQAGPRQKEPKPPRVVRVTARWLRAFLHFRLDQRVKGRTAMQAACNRTKGVHPFDFDASSMEAQAHTSCNRRAGYYVQETAPPLAPLPCLLDCGTSTATRGNPAHDPTVPTSTSATGQSAAGEGVTADTARNGPAVMVVAGGRKQRAGGTFGRRSRRHFASAIMTASKKKGSTAASEHSGSAPTTSQRLAPKGFDSRLRRRAKDDPGYVRYITKARAMLPSSLETPCSAPSKGNMALSPPPSSLRKGDAGAARTRPWPRKTTNSASPDPRARTWLRKTTNSASSDPRARTQPWPQPTVSASPDPGLGLDLDLGGASAPPDPGLGPTTSQGGHHYPIPS

SEQ ID NO: 54774 - protein, 110 aa, Zea mays
  Coding DNA Sequence Number=SeqID_11399
MATETRRQPESTVADLGGCAENGGERRQRDSERERGNWGASRVADVGAELTVAEGTAGLQRRRRNELGRRWFNGGGALACAQRGGGGRGVCRPQIQISISKYYAPNKNEI

SEQ ID NO: 54775 - protein, 214 aa, Zea mays
  Coding DNA Sequence Number=SeqID_11400
  Subcellular localization annotation: CTP_CleavageSite=58; ConfidenceScore=5.01e-01
MSTISKVTCSLRALGIVPNDNGSSILPTWKVPLPPKLYKGLSAGLRRLWLVPMRSKARRKMVSAWLPLSTNTLCKSQPATLQSITMASACGTLRKSTSLASKVSGVFIGCEENWTKAMRMQHLKEDIKRYIGVQYSRTKKPEEISEEIQDEGCQPAPGGAPDSLRREAADRRSLAVAPDCPGHQRGLVGTLRGSGYLGKNIGVIHESLLLYFAL

SEQ ID NO: 54776 - protein, 274 aa, Zea mays
  Coding DNA Sequence Number=SeqID_11401
MKLWKETSRNSKIMTSSRWLVLDTLHEVESVRRRSSVAQLEAPPAPPRDAPAVGGATGGGPGGDPDDDDSDHSTESSEPQEAEGWVARPITRDAARGCHFHDALDTLLRQAFDRHTWSIEYRCVVYQHSRGRYPDRWEATCLVRRPEDDLRGAEAVSEHYSISKRDTAEALCRMQHDVHSPKSVVVSPVGEDNPRLSSTVNLVAVLNTELDHSLDELSRARMEIAELHAELAERRHQEGGSPAPVGTQHPYRSPPRGHHTYGSPACKTGIDLDP

SEQ ID NO: 54777 - protein, 43 aa, Zea mays
  Coding DNA Sequence Number=SeqID_11402
MTTDKPLELLHMDLFGPIAYISISRRKISHPRNSKRILETGSK

SEQ ID NO: 54778 - protein, 126 aa, Zea mays
  Coding DNA Sequence Number=SeqID_11403
MEVAPSRPGKGKVQGVGRPTMDEQNAGLEGRGASASKEAEGEGRTPWRGACCCMPWGVPCCCLGAMGKQEGGASSWGRWREELLLLHAPKDREEWKWRVGERKERGGLPFIELELWTCQVAVSSGR

SEQ ID NO: 54779 - protein, 115 aa, Zea mays
  Coding DNA Sequence Number=SeqID_11404
  Homolog annotation: Hit_ID=Q7XBD4; Match level="QueryCoverage=34%, HitCoverage=4%, E-value=2e-08, Identity=80%"; Hit description =Cinful1 polyprotein
MKNFIVILNFFFLPGLILSNALRAQKSAEDEGCTIALSNLRSEVIELRNEVLALWLRTNSLPTTAELSPLPKPYNPLADLEMKEALDTISMANSIIDEVINKLLNKVAEKVLREE

SEQ ID NO: 54780 - protein, 150 aa, Zea mays
  Coding DNA Sequence Number=SeqID_11405
MARGSGTRPRRLLEQRNLTERSNANLQSQIPAARKGGAKQKQHVQRRGDQDHRTFSEMLPARGHCRAQHSESSAAASQATFTQRTGCWNMPASSTIHGPPLPLLMLLYTYSAAHPVTFYTQEGTAQYRRVVSEVRFAVPRTRKRPKTMRG

SEQ ID NO: 54781 - protein, 57 aa, Zea mays
  Coding DNA Sequence Number=SeqID_11406
MESHDLRAERESQLVDGYEIDGFGYDYGTGCEHCNHFSGEDEAVEGDFQEFQDYDEF

SEQ ID NO: 54782 - protein, 79 aa, Zea mays
  Coding DNA Sequence Number=SeqID_11407
MAAAMAGSANPRALLAARPGRPPGRAPAPACSAAQPAGGYEIDDSGYDYGAGCQHCNHCSGEDEAVEGDFQEFQDYDEF

SEQ ID NO: 54783 - protein, 85 aa, Zea mays
  Coding DNA Sequence Number=SeqID_11408
MWLCRSFMGDNFGTAFERIYRSLRRAEGPKNTFPELVAEKRLKYLERKVAHHAAGTNDLVIHLPGAEWSTVQRVRATAQRVQATW

SEQ ID NO: 54784 - protein, 377 aa, Zea mays
  Coding DNA Sequence Number=SeqID_11409
  Homolog annotation: Hit_ID=Q5VMI9; Match level="QueryCoverage=68%, HitCoverage=81%, E-value=1e-67, Identity=48%"; Hit description =Putative uncharacterized protein P0529C07.39
MSAAADDRARRAAAFRPAPLPPPAQKQQLSGVAAAVLDAGGRLGRAVGDVFRRLRIDDTFYSGGGGGGGGAPNRSWRDAGNNGGRPAAAGAPAAASREEATGGGASSGRFARAQGSMNLSATYDSRTHDVESSVVARGDLWRAEASHSSSSSAGAGGNGANNNLFLVQLGPVLFVRDTTLLFPVHLSKRHLIWYGFERKSFMDMQFPNGQLRYVAGDGFTARAFLPLRGGVLQAHGKFPGEKRLSFSFKDSICPTIGGRHPGVCVELIHSADDNVGVVCGYSHTASSPASAYASISALRRRGPRLSPHEKGSSPRTSEGVFDPTGDDSLSAKPKAFAISSTEGPSGRPQPKGAKVRRLLEQRLRVDPEHLRCTRRYR

SEQ ID NO: 54785 - protein, 27 aa, Zea mays
  Coding DNA Sequence Number=SeqID_11410
KEPVTEDPGDQQIEVAEQKLNEGKLFL

SEQ ID NO: 54786 - protein, 280 aa, Zea mays
  Coding DNA Sequence Number=SeqID_11411
MANPKDHNNVALDINTRLTNSPAAEDEKLEEHIQRLDEEVQRQQVHISKLPKKWYLSHFKVLGKLRTEERLIRPEASGGMLHQGKKPKVTFEQLLAKYHKQIKANDVDQTGNAKSSRAYLKPSKSPSKCKSRIGIGEEKSFMHQQHILLLGHQYHYNMVQLLRTFILIHLGAEPEEVLDTLASSTQTIEKLASDSLDTKSELKKPNVPKQPRSPLGLSIWHKRLEKLSAQELKARGMTWAPNGSSQDPGMDDAFGRSGLSANKRRKASTRRLGERRLYVI

SEQ ID NO: 54787 - protein, 96 aa, Zea mays
  Coding DNA Sequence Number=SeqID_11412
MAVARRRWARRWSPRAREAGGATTVAGRGGAGRGGATAVGAAVLAAGHSKLGKPCMQKCYPSYLAQVTTDFRSGPETSSNMLNMAVNLPYTCLKIV

SEQ ID NO: 54788 - protein, 264 aa, Zea mays
  Coding DNA Sequence Number=SeqID_11413
  Subcellular localization annotation: CTP_CleavageSite=47; ConfidenceScore=5.16e-01
MASRMGCAKQRAHGGRRRRVVHWASRNSEPAARGLLRILTNSRRAPRRTARKGARCWFSMEENGARWIERARRRDSKGRPWRGQIRPWHAPARSSAQNRDHGEEEQRSRAAIFWAPWGAKERCRGVEPMEEQRDSRPWRPCSCVRAAAGAPSTGGKGRRWREGTPWARRGRELAHAMDSRGKRWGARPARLLADHGDTLLPSAMNPRGMEVLLPCARKEQGRHVQQREGGRGPSSLRWGRRLGRHPWERLLPALACVKERGLLP

SEQ ID NO: 54789 - protein, 33 aa, Zea mays
  Coding DNA Sequence Number=SeqID_11414
MTATDDTSPWAGISTQPSMVEGVAPGLEKVLLV

SEQ ID NO: 54790 - protein, 45 aa, Zea mays
  Coding DNA Sequence Number=SeqID_11415
MGLGGDEDDGFGYDYGNGCPCCNHYSGEDEVVEEDFQEFQEYDEF

SEQ ID NO: 54791 - protein, 447 aa, Zea mays
  Coding DNA Sequence Number=SeqID_11416
MAERYQLPRSCIPPMTRRKDGGYPPSGGLEGGKTRCIREREDMVAFQGGHPPFKGDSPYLRPQPSRAESSPTRSKVLPCGAGAGSHTSCKPAQSRRSQTAVRGAHNRPGVTSDSPLLPRPTGERGGQPCRRHATAPSGRTSPTPNAPGMEAQAHGSCNRRAECFVHATAPPLAPPPRLLDCGTDTATRGDPEHDPAAPAWRDDNAPVFRSSNGSRTRNGRPANHSPRRINSTAGQAAPLAGEANDASPSPYGNDLVTESHQREASSPRTPSPGDRVRQITRSSPETPCSAPIEGNVALSPSSLRKGDAGAARTRAKPRKTANSAPPDPGLGLGLSPGRRRTPFRPTQVSDSGSAPEDDELRFAQPQGSDYALASADGLRLARPRGSDSTSATGDRFDLGFGGASTSPNLGRRPATSTGGAIITLPRADSSHGRQDRRPIWLAPPDRQ

SEQ ID NO: 54792 - protein, 88 aa, Zea mays
  Coding DNA Sequence Number=SeqID_11417
  Homolog annotation: Hit_ID=Q8SA85; Match level="QueryCoverage=45%, HitCoverage=3%, E-value=2e-07, Identity=72%"; Hit description=Prpol
MTSLDNQVVAPLATKLVLPITGGSSSEPANKKQKKEAQKRRVIEHSLNVDLAIRPRKQKLQKVSDDKAEATTSELMSLLDCYSGYHQI

SEQ ID NO: 54793 - protein, 169 aa, Zea mays
  Coding DNA Sequence Number=SeqID_11418
MARVACILHGKRLDGGVSMLSVGVNLVRATPPEQGTRAGSQRIAELSAEVSRLRFEISEQDSAIDWAINSRSIAWHHEAKARARVDELSAAIYNLQAYCNTLHEEVHDLYARLHPDVPSTATAMEDGPSRTANAGPEGELDLFKPPPSMNLADERSPAADSEATKDDED

SEQ ID NO: 54794 - protein, 93 aa, Zea mays
  Coding DNA Sequence Number=SeqID_11419
MAKLKMDYRSINLMQRIESVTTANLEKIQVEHRLSGALIDGPHEREEEVEVTEEQVQPPLDTQVGNSFYFDICGSEPESPANEGKPRCICHLP

SEQ ID NO: 54795 - protein, 48 aa, Zea mays
  Coding DNA Sequence Number=SeqID_11420
MEWRDGESSVYPPWQEAGQWCIYALGWREPGLDLRNPPYLDSLKPTYP

SEQ ID NO: 54796 - protein, 206 aa, Zea mays
  Coding DNA Sequence Number=SeqID_11421
MGIGFLRDENLNKDYGVGAGYTTPPQYAVQLFEKHRVPRWLRTLWRQFALRGLTTFRGFHPLELSTHPIGLFPTEKEDDPMWKDRVEHAKDIWAIYPGQTAHLTVRCMNALYRLQVMRGEAMSHLMALLEATKITLDNREELVVDLSTEMVEKDLQVEQLSNEIQELEELVGTRENTIEVLEDQLINTQQQLAEANQHLDMHHQEI

SEQ ID NO: 54797 - protein, 334 aa, Zea mays
  Coding DNA Sequence Number=SeqID_11422
  Subcellular localization annotation: CTP_CleavageSite=69; ConfidenceScore=5.48e-01
MQAACNRAKWARFSDSQHAQHGGPGPRVMQPARQMLRACNCTATCATTASPRLWNQHRDSRRPSARPSNASLARRDRERGIPRKGSFPEKEPGSEPPLLIRGSKAGPSEGFDSRLRSRGPYTHYWSEVRRPATRKGSTAASGYSGSAPTTDQGFEGWPPKATLTESPHRPTKSQEHLMQRWPDTFILTRAPQSRSDRRHFAAPLTSLTERQRRLRRSDCGATRQSEADRRPGPVKGTIGSSASPDPGLGLGLSPGRRRTPPDPGLGLGLSPGRRRTPPDPGLGLGLSPGRQRTPPDPGLGLGLSPRRRRSPPRPTQGSDLGSAPEDDELRFARP

SEQ ID NO: 54798 - protein, 434 aa, Zea mays
  Coding DNA Sequence Number=SeqID_11423
MGDIRRLSASSLEERNSLGVGTFQPSFGFKDFHHAARAAPLRRRSPKMVTSSLMVGESEPGCGLCPSLSLMDFHHQGWGGDCSVPGSRTRVASEPFSAPAFATAAGRGSSADEIARAAHGPTSNSTAFCPSLPHEFGHGRGSLGSNICPEVSVAAVRPPEQKSSSSPLLERATERRSSVFCRSAGSLPIEWGCSYLRRWNRSSVCNGTLNASVFVHCGCRGLNMYVFLARSRVFSSFSSTKTRLLVVYTASPSNCFARASSCFSRKVMSEVSVSRRRRSPSARSALPLTRTLARPWGSVPDAVEKAQTIASAEELPNVKTCSVRGITYPNVSYLPQKVMSEVSVSRRRRSPSARSALAAYMYSVVFRIHFRSSQKARKTFWKKRSFFEEKIRRRGGSPPFSPRGRVGLCRGKADPSLMTKLCVGARFMNNLKTS

SEQ ID NO: 54799 - protein, 248 aa, Zea mays
  Coding DNA Sequence Number=SeqID_11424
MLVEAIAALVTVTADNTPASYMKWRDINFQQQGERAYPQGPRETLYLDFSETPSPPLSSKLRIPSKLMNGYGSLSRSLDSSDARRPQKPLFAAQQLRGPAQYLVGKLCGHLTCRTSVRNYQVNTDLKNRNCFMRGLNDRLQRKMATCLDLSYSRTVSTALTVEAKNTDPGKSKGFRGDGFTRGLKSDEGGNPTFHRNRSSPRCPPTSLNSLYFRPATLHSTTGRVPLYCFHLPEFSIRLLQMWNSTNL

SEQ ID NO: 54800 - protein, 174 aa, Zea mays
  Coding DNA Sequence Number=SeqID_11425
MARVACTLRGKRLDGGVSVLSFSPLWTYAAARKSTGPIGVPRHQLAPRHEESSSGSNDPIGDLEAQVEQLRMELCHRNMMPSQTRAHDSVGMSHGQEDTPNPPPVAPMLVEAIAALVTVTADNTRFLHEMAGHQLQQQGERAYPQGPRENFCIWIFSENPSPHFFVKAEDPPRS

SEQ ID NO: 54801 - protein, 283 aa, Zea mays
  Coding DNA Sequence Number=SeqID_11426
  Homolog annotation: Hit_ID=Q6JAD6; Match level="QueryCoverage=52%, HitCoverage=21%, E-value=1e-21, Identity=44%"; Hit description =Putative uncharacterized protein
MPLILAPPLPPLLLLPLHHPLRLPPSLLRHPPPQPYPPPPLLQLPLLLPLPFPLHLSHLLASGSVMRLRCDHLLRIPGRLTFSVLQRHGAQMSAQIALRVHRLLDLVHFCLLLVLTLRYTSPIYLDFSLFGLPALIRPPQFQGTLEASRLIFGSYHPAPEDPVPASAPVIDTQPEVSAFHQFETQGGAAHDDDDDDDVFGVPPPPPPPMPPRSHDHEDGSSSATPAAPLAIDPALAAILQTLTQQQTHLAAEQARQTAVQQQLSERMLSMFQTIQDRQDSLQQ

SEQ ID NO: 54802 - protein, 369 aa, Zea mays
  Coding DNA Sequence Number=SeqID_11427
MNRAPANLYRSNNCHTRVLGHQDPGANIITRLRWSDFNGPKGYALTQSEPHHLGSTTTLLNWCDLISSAHIQSNGPSTVFFLTPLNLSPRMPTPGTGWSMLPRRSVPRSILAPSPAILKSGTPHRSQTEGDKRHGNKSKAIGKILTERYSMVAPAYDVGMFCHMFNPRRVVIVAPVDLQAQHPLGSILRTLANRIDSHWERDRWQGSGSSYRAMLQLKLACRELRSRWERMKTESTTGIQRRFRPTVNIPLIPLLSHPGFREPRPGHEHNHQMLELALCCKWANEGEQWRQQGYAHGGNSSVDLASHGHCAGAFVKVPSPAKGVPARFASVGPAAAAKASSEGWRLCLRPNICPPRDQFDKVTWCRRRR

SEQ ID NO: 54803 - protein, 133 aa, Zea mays
  Coding DNA Sequence Number=SeqID_11428
  Subcellular localization annotation: CTP_CleavageSite=74; ConfidenceScore=5.49e-01
MANSAPPDPGLGLGLSPGRRRTPLHPTPGLGLRLGLGLSPRRRRTPLRPTPGLGLRPGLCRTTSASPDPGGSDSASAKEDRLDLGFGGASTSPDLGRGPATSTGSAIITLPRADSGRREQDRCPIWLAPPDRQ

SEQ ID NO: 54804 - protein, 147 aa, Zea mays
  Coding DNA Sequence Number=SeqID_11429
  Gene Ontology: Mol. function=metal ion binding; Cellular component =nucleus; Biological process=regulation of transcription, DNA -dependent
  Homolog annotation: Hit_ID=Q8LHP0; Match level="QueryCoverage=57%, HitCoverage=92%, E-value=1e-16, Identity=51%"; Hit description =Transcription elongation factor 1 homolog
  Pfam annotation: Domain name=Elf1; Domain location=9-70; Score=47.7; E_value=4.1e-11; Accession=PF05129.4; Description=Transcription elongation factor Elf1 like
MGKRKSRSSKLAAQPKKAPKLEKVFTCPFCNHPESVKCLIDLKLGYAEASCLICEESYCTVPHNLTAPTDIYHEWIDECERANDDARRSRRHHFLVVSLSGIGASDARDTILNYTCTFDLIEGKKYKRDAKASTSQREQYGVLFIYL

SEQ ID NO: 54805 - protein, 42 aa, Zea mays
  Coding DNA Sequence Number=SeqID_11430
MGTNGHLNLDTGGKSVDQKILCFLYACVQGSKPILRKFTLGP

SEQ ID NO: 54806 - protein, 181 aa, Zea mays
  Coding DNA Sequence Number=SeqID_11431
MLVDYTTILDGPSVSVKCPTQQGVESVVEVTPASGVASDGSSDPSLKLLLLQELRVVARTATNIIVVVFVRVYSSSQDSLWWCRGHLWLRGCTLNPRVVIPFQPGLYRPDLHYRGEWPGIHYVTFTKTPLVHNCSLGFASRTNAVHLPKDIIGQRTLAFTRLLLREIFGNTLRNHGLSLSK

SEQ ID NO: 54807 - protein, 133 aa, Zea mays
  Coding DNA Sequence Number=SeqID_11432
  Subcellular localization annotation: CTP_CleavageSite=30; ConfidenceScore=5.39e-01
MEPVGGTAIGAVGSLLTSSCFRWAMWRLLRSRGRVCLPWPRPSPSPGSGGAEFVVFWGCAQVRALGRAERSSPSSRAEPESEPWVGRSGVRRLPGLSPSPSPGSGGAEFAVFRDLARVRALDRAERSSPSSGT

SEQ ID NO: 54808 - protein, 37 aa, Zea mays
  Coding DNA Sequence Number=SeqID_11433
MARVACTHRGKRLVGGVSMLSVGVNPPYLDLLKPAYP

SEQ ID NO: 54809 - protein, 189 aa, Zea mays
  Coding DNA Sequence Number=SeqID_11434
MAPPVDVVGPCPGLGDVEAPPRSRSSLSSEAEVESEPLGRAGGVHRLRPGLSPKFVIFRGCARVRALGRAERSSSSSGAEPESEPWVGRSGVRRLPGLSPSPSPGSGGAEFPMAPRAGLGCCQPHSVEWHSSRSGAGGVVLLSDRSVERRSDCGHFGSVDRRARVRIKVSGHLCIKCSCDLVGWRGDLA

SEQ ID NO: 54810 - protein, 276 aa, Zea mays
  Coding DNA Sequence Number=SeqID_11435
MVCLGLGGRRKHTLQDNPILQAGILTVEGSSSTLGVNYTFGEVRPSLGQRRGPRISTLKDEIITTPRPSPPGSSPGIRLEQTARPVTPRPRPTVPRRHQPGPRPQQLNSSVGPTSGRPGQALPTKLSFRANSTPVRADTATPGFGSSKSDRGVPLTKQEKPRTARPTEPRDSYASGIRIPHSSPLHRATHAWYKQPHTIGGPAEQQKTDERLAVARSSSGDDDDFFSGGPNSSSDDHGADAAAMRPSLMPSLERQGRAEGRRVGGQSVGGESRLEG

SEQ ID NO: 54811 - protein, 141 aa, Zea mays
  Coding DNA Sequence Number=SeqID_11436
  Subcellular localization annotation: CTP_CleavageSite=46; ConfidenceScore=5.37e-01
MDFASPDPSAWVQPRRWTTDSASLDPRARTQPQLRKATNPALPDPRAQTQPRPRKTVSTSPDPGLGLDLDLGRQTRPRPRRSLHLARPRARTDHVTGGAIITLPLASLGYGEQDRRPIWFIPEGPGLSYEKVGRAGERADA

SEQ ID NO: 54812 - protein, 126 aa, Zea mays
  Coding DNA Sequence Number=SeqID_11437
MAIWPRLLLCEDWASDEPKLCADGGYQLRLGVLGVPLIMVPDTSEQQVITNRPHTFSTAARPHSSPAVGRTHYSARRSGACPRPRQHHARSRPHWEPARPQLIAGLHARLHLIVGLPAYNSPLARP

SEQ ID NO: 54813 - protein, 247 aa, Zea mays
  Coding DNA Sequence Number=SeqID_11438
  Subcellular localization annotation: CTP_CleavageSite=41; ConfidenceScore=5.47e-01
MSLYSLHASCPSTFRAPRWGALAVLPSYRRWRNATSRKLVPFRHRSASRIFIRQPGCIPSPVVTQDGDHQFDGGEKRVGLLPLPLPQLQGCSSSLLGRRARRAGALPPARVGGPPFLPASGGGNHPPALQRRRPPAMPRKANCCCPARVQHSVLCPRFRGEDGSEDLPVRFGAAGARWCGIGGQVDAAVGADVVAAGESFSADEPVSATRGPTSSSLALISGSHPLSGDANESLPAAASVLGPSLLL

SEQ ID NO: 54814 - protein, 290 aa, Zea mays
  Coding DNA Sequence Number=SeqID_11439
MEHRPGLEWLLETTHLELDGKLFVNTQQAPTWRANCRRFDPGGSLDRRVGVTRPPSSSWGFGSSGANVKRCCSGVGGPHYSDDYHSLKDGDVVDSILPPTPEGTEMIFGRQLRSGAEPEAAPVPLPRVLSRAHQALQETEALEERTKAASRQFAFERSELERDHKDYKKDLQRVYAWELEQTTAAESLQRLQRGLDDRTSSLALVKENLKEKDASLDKRATDLAWQWKDLAFREEMFERRDKLLAEHELEAKEKERALDERVRQFRAAQVAQAASGPQAVEAMKKTLEDL

SEQ ID NO: 54815 - protein, 29 aa, Zea mays
  Coding DNA Sequence Number=SeqID_11440
MAHVSLTLAGGTAVGAGQAALFSCQYFYV

SEQ ID NO: 54816 - protein, 31 aa, Zea mays
  Coding DNA Sequence Number=SeqID_11441
MAVPNYPADLNEWHQQEYGVHFITPEDENEV

SEQ ID NO: 54817 - protein, 121 aa, Zea mays
  Coding DNA Sequence Number=SeqID_11442
  Subcellular localization annotation: CTP_CleavageSite=19; ConfidenceScore=5.19e-01
MALSPLPPCGKATKGRTMKVEMENNVVRPAPATVPTTRVKLSHDLPRVRPRAQQGAPPRPTPSLGLGRRSAPRSTSGHGLSLGLGRRSPPRPTPGLGLGRSLRLARPQPRTDYATGETSLP

SEQ ID NO: 54818 - protein, 25 aa, Zea mays
  Coding DNA Sequence Number=SeqID_11443
MARVACTVCDRRYFSDMKTWSLTYT

SEQ ID NO: 54819 - protein, 144 aa, Zea mays
  Coding DNA Sequence Number=SeqID_11444
  Subcellular localization annotation: CTP_CleavageSite=13; ConfidenceScore=5.24e-01
MTVGPTCPRHSSSAPEKPESSDFGKLNFSTRIGLSSAHRTVTVHSPKSEKAQKAHRAVNSDVWCTTGLSGGPVVRSSNVAREAFQASDPAELHRKPEITLAGLRSPAYTRGPSSPDLPYTLGHLTGAISPPVSPFAPSYAAGTV

SEQ ID NO: 54820 - protein, 29 aa, Zea mays
  Coding DNA Sequence Number=SeqID_11445
MDGQKESRSCVLDLYGPESQVSAIIGISI

SEQ ID NO: 54821 - protein, 150 aa, Zea mays
  Coding DNA Sequence Number=SeqID_11446
MGKNKKGGSSSHHFGDKRKRGPSPPSEDFGDFEYSEEEFSSESERSLVYTFPPMSFDDSDDSQGIAAEVWTYIRVVERFGLEGSDESEISSDSSDSSEEESGGDGDDEGDDGDGGDGSGDGDGDGKGNGDGNSGKGDSGSSKASGKVPLA

SEQ ID NO: 54822 - protein, 201 aa, Zea mays
  Coding DNA Sequence Number=SeqID_11447
MPLPRRGQWPPAWPRVSPARDNNQLAESKGVVGEYPEQQLVVMRMMVLILTMVMMARFKHTARKSIIPFLPSRLAERPLRRPVTGQSSHLERLRTACTKSRSVGDRVEQQGSSSLPQQEVESVRSYSPVLQLEAPPTPPLGVPVAGVAAGGDPNDGGDDSSSSHSTELLEEQEPEGWVARPITCDAARGCHFHDALNTLLR

SEQ ID NO: 54823 - protein, 31 aa, Zea mays
  Coding DNA Sequence Number=SeqID_11448
MAMMGSTSEKMYLYQASEASKADVGAIAAAA

SEQ ID NO: 54824 - protein, 226 aa, Zea mays
  Coding DNA Sequence Number=SeqID_11449
MEKDAAARALHGDAGSTWRRYELYAAVSCLRLLRLPRMWACNNRLYTLYLASWQTTKRIIHRNRTVTNSPRVVAFRYSSDVLTSRRWRADGHRSSELVSEEWSSEVSTTAPSTKPSVQTRLLLETMEVVEQKSEECWDQMMKILERLGDKVEAMETGQQRLQRQVEAMEAGQQRLHHQVEAAATSARKAEEERVAELPELFQLKCLSPALEARPHLNENNSSIPRI

SEQ ID NO: 54825 - protein, 112 aa, Zea mays
  Coding DNA Sequence Number=SeqID_11450
MLAVVVSRVNARVLRGIRLVVLVGVLCGGGDQETDDFSSKGGVAPWAAMCCGSTHPRPWTKYVGRVESGLGASGDGVDVVASNGAPSREAVRCGQARPWPPPCGMVAPSGLA

SEQ ID NO: 54826 - protein, 194 aa, Zea mays
  Coding DNA Sequence Number=SeqID_11451
MSSCTRRTARKHTGPIGVPCHQLAPRHEDSSSGSNDPIGDLEAQVNRLQTELRRRTDIWVADGDRINELRSDVRRLRDQLADRDLALDWVVQSRSLAWAKEAKAQARVEELSSAIDDLQAYCNTLHEEVHVLYSQLHPSEPADPVGTEAGPSHVAGEAFGGELDLFRPPPSMRLVDEWSPTPDDEAARSNRKQE

SEQ ID NO: 54827 - protein, 37 aa, Zea mays
  Coding DNA Sequence Number=SeqID_11452
MELYGYNSPDCPWCTGLSGGDPGNMEDFEEFQDYDEF

SEQ ID NO: 54828 - protein, 137 aa, Zea mays
  Coding DNA Sequence Number=SeqID_11453
WGWGKLDWPVYGGSGSGGRGHAAHGQTTVNWTPVRLERARKSVTDAWEGFIGAGAGQGAGWPLARRGARGACAGVLWQAQGASNTWSFQSARVPQLTQVANVAKSGVSHCPPRDKNHAKACQTSKSRAQLFPVGALG

SEQ ID NO: 54829 - protein, 101 aa, Zea mays
  Coding DNA Sequence Number=SeqID_11454
ATITIQPYETSVHTPVKLPERGIEARFAGEASPRSPEFTTPPECVDRIAVVWPVHSPPTRTPACARGPGDSGHPRRQAAPRCDRQSLPEPTLPFARPISPP

SEQ ID NO: 54830 - protein, 103 aa, Zea mays
  Coding DNA Sequence Number=SeqID_11455
  Subcellular localization annotation: CTP_CleavageSite=61; ConfidenceScore=5.75e-01
MAGAAATAHCTLSRPPSPISCTHRIFFIPSPSSSSASHQGALTSLNDWHTAQGTTRRARTPRMRGKNRFRPFLSSLIYDTTTIGPDQIEALYQYAKFQFECGT

SEQ ID NO: 54831 - protein, 465 aa, Zea mays
  Coding DNA Sequence Number=SeqID_11456
  Gene Ontology: Mol. function=calmodulin binding; Cellular component =integral to membrane; Biological process=cell death
  Homolog annotation: Hit_ID=Q94CG9; Match level="QueryCoverage=98%, HitCoverage=98%, E-value=0.0, Identity=79%"; Hit description=Seven transmembrane protein Mlo6
  Pfam annotation: Domain name=Mlo; Domain location=8-465; Score=750.3; E_value=1.2e-222; Accession=PF03094.6; Description=Mlo family
MGGGGGGGNSRELDQTPTWAVASVCGVIVLISILLEKGLHHVGEFFSHRKKKAMVEALEKVKAELMVLGFISLLLVFGQNYIIKVCISNHAANTMLPCKLEAAAVEGKDGHGKEAAAVVAGKKKVAVAVPGKKKKKAAAAADHLGGVVDWPPPYYAHNARMLAEASMATKCPEGKVPLISINALHQLHIFIFFLAVFHVSYSAITMALGRAKSNFFRQFFRSVRQADYCALRHSFVNVHLAPGSKFDFQKYIKRSLEDDFKVIVGISPPLWASALIFLFLNVNGWHTMLWISIMPVVIILSVGTKLQGIICRMAIDITERHAVIQGIPMVQVSDSYFWFARPTFVLFLIHFTLFQNGFQIIYFLWILYEYGMDSCFNDSEEFVFARLCLGVVVQVLCSYVTLPLYALVSQMGSTMKQSIFDEQTSKALKNWRAGAKKKAPTGGSKHGGGGSPTAGGSPTKADGDA

SEQ ID NO: 54832 - protein, 99 aa, Zea mays
  Coding DNA Sequence Number=SeqID_11457
MAQRVVFFAADLDLASREGPRRRGEILGTLAKKSRKNHNMGEDNFSVQHTVIPFSVPDMGSYCNTPGVTMARAHLDTMDYDHMWKNLRSKSIRTLETRF

SEQ ID NO: 54833 - protein, 52 aa, Zea mays
  Coding DNA Sequence Number=SeqID_11458
MVLDQRYFGTGGYEIDDSGYDYGAGCQHCNHCSGEDEAVEGDFQEFQDYDEF

SEQ ID NO: 54834 - protein, 1034 aa, Zea mays
  Coding DNA Sequence Number=SeqID_11459
  Gene Ontology: Mol. function=transcription regulator activity; Cellular component=nucleus; Biological process=regulation of transcription, DNA-dependent
  Homolog annotation: Hit_ID=A2YNU4; Match level="QueryCoverage=85%, HitCoverage=95%, E-value=0.0, Identity=74%"; Hit description =Putative uncharacterized protein
  Pfam annotation: Domain name=Ank; Domain location=648-680; Score=3.4; E_value=11; Accession=PF00023.21; Description=Ankyrin repeat
  Pfam annotation: Domain name=Ank; Domain location=681-713; Score =29.2; E_value=1.5e-05; Accession=PF00023.21; Description=Ankyrin repeat
  Pfam annotation: Domain name=Ank; Domain location=720-754; Score=4.2; E_value=8.2; Accession=PF00023.21; Description=Ankyrin repeat
  Pfam annotation: Domain name=CG-1; Domain location=19-137; Score =304.6; E_value=2e-88; Accession=PF03859.7; Description=CG-1 domain
  Pfam annotation: Domain name=IQ; Domain location=855-875; Score=22.1; E_value=0.002; Accession=PF00612.18; Description=IQ calmodulin -binding motif
  Pfam annotation: Domain name=IQ; Domain location=878-898; Score=30.8; E_value=5.1e-06; Accession=PF00612.18; Description=IQ calmodulin -binding motif
  Pfam annotation: Domain name=TIG; Domain location=449-535; Score =13.4; E_value=0.045; Accession=PF01833.15; Description=IPTTIG domain
  Pfam module annotation: Pfam domain module=Ank::Ank::Ank::CG -1::IQ::IQ::TIG; Domain location=648-680::681-713::720-754::19 -137::855-875::878-898::449-535
MAEIRKYAMSNQPPDIPQILLEAQSRWLRPTEICQILSNYKKFSIAPEPPNRPQSGSLFLFDRKILRYFRKDGHNWRKKKDGKTVKEAHEKLKVGSVDVLHCYYAHGEENENFQRRTYWLLEEGFMNIVLVHYLEIKGAKQSFNHAKEAEETAGLSNADSPACSNSFASQSQVASRSMDAESPISGQISEYEDAETDNSRASSRYHPFTEMQQPVDAAGYLGEMQPTGANFTSHFATRNDIASVFNDTGSELGGGPKTSIDSVLLGEPFPEYPGGFMESTLYSSVATLGNSLEDGLQTFMSEALYTNNLTQKEVDALGAAGITSSKYLKNDAVGHWSLPISMSWYDVTLYFQTENDGYTDQSVRYPLLKQSSSDLFKMEPDGLKKFDSFSRWMSNELPEVVDLDIKSSSDAFWSTTETVNVADGSSIPINEPLDVFVVSPSLSQDQLFSIIDVSPSWAYNGTKTKVLITGTFLAKKEDVENCSWSCMFGDSEVSAEVLVDGSLRCYTPVHHSGRVPFYVTCSNRVACSEVREFEFRDSETHYMDISDKHTTGINEMHLRIRLDKLLSLEPEDYEKYVLSNGNKSELINTISSLMLDNNLSNLALPSDEKELCTVQDQNLEKQVKEKLYYWLIHKIHDDGKGPNVLGKEGQGAIHLVAALGYDWAIKPIVAAGVNINFRDIRGWTALHWAACCGRERTVGALIASGAASGALTDPTQQYPSGRTPADLASENGHKGIAGFLAESALTSHLSALTLKESPSGNVEEICGLTAAEGFAASSSSQLACVNSQEESLKDSLGAVRKSTQAAARIFQAFRVESFHRKKVIEYGDDDCGLSDERTLSLVSLRNPKSGHGDSHSAAVRIQNKFRGWKGRKEFMLIRQKIVKIQAHVRGHQVRKNYRKVVWSVGIVEKVILRWRRKGRGLRGFQPEKQLEGPSWQIQPAKAEAEDEYDFLKDGRKQATGRLDRALARVRSMNQYPEARDQYRRLQACVNSLRESQAMQDRMLADSAGTDGGDFMTELEELCRDDGDAPMSTIS

SEQ ID NO: 54835 - protein, 173 aa, Zea mays
  Coding DNA Sequence Number=SeqID_11460
  Homolog annotation: Hit_ID=A0EVH6; Match level="QueryCoverage=72%, HitCoverage=35%, E-value=5e-08, Identity=35%"; Hit description=Milt putative polyprotein
MEALPADDQRPFEDLVMRDEKEPQPLGTRQVLDATGPSEHHLRQSGYTADRPAYFAGPSDQMQAHTQNTQVAPYMAGPSGYNPEHFGPITDRPVHHAGPSGYVADRPPSYVGPSGYGMNRPTYYAGPSDSTRVHAQTTQVTPYMADPSGYSPGPFGPIANRPVLYDRRSVKGN

SEQ ID NO: 54836 - protein, 248 aa, Zea mays
  Coding DNA Sequence Number=SeqID_11461
MVTSSLMVGESEPGCGLSPSLSLKDFHHQGRGGDVPGFRTRVASEPLAALASATAAGRGSSTGAIAKAGHGPTSNSTTFCPSLPYEFWHGRGPPGNSIRPEDSAAAVRPPGAEVVVVAAAGAGDGAPFVGLPLLRRPSPMEWGCSYLRRGNRSSVCNGTLNASVFVHCGCRGLNIRGLGSGWRPWKMVGRGPRGNRPSRLLGPDSRRSPWTASPSEAGSDLAEGVVDAEGATAPFQREDPSLQDQIVL

SEQ ID NO: 54837 - protein, 301 aa, Zea mays
  Coding DNA Sequence Number=SeqID_11462
MAHRTVRCTPDSPVPPATSSLPLDSTVEASDLWARLGVRCTPDIYCSLSGVPEWARLPSARAERALNARQRAVGAEKTVAPESHRTVRCTPDSPVNFSGLTVGVSRSRNDARLHLRREVNARRVPRWGAGVVDSLDSQRGAASCLAMAAPPSPPAAKKVTGQAWMLLFRHAGKTSSIPPPAGGLTAAIVVVARRRKEYHVVAVIKGHELKTPETEHRPGLERLLETTHLEPDGKLFVNTQQAPTWRANCRRFDPGGSLDRRVNCRCVSQPRWVSARRNTRGNKERGTAARVVLRPRRMRLQ

SEQ ID NO: 54838 - protein, 890 aa, Zea mays
  Coding DNA Sequence Number=SeqID_11463
  Subcellular localization annotation: CTP_CleavageSite=26; ConfidenceScore=5.03e-01
MPSSSSSAATTPTIQASSEDLSCTVAAAELRPGDTVEFGVSRMSLVRVQDMQRLGYFGGGVGRVPGAEEVPEPEGELVVFEAFFIAVLRLPAHRFVSEVLQKFEVQAEVEDHPGLPAAIMCSHYYVAYPPFEVAEDDENERALRIAARMSSGRDLVEQFIGYGVWPLAHGWVLGEVCPRKIPSLGGRKGLRVELFAVWWLSRGGRRRPPREKPAAVTEDDPAPEAAPSTKKRKLGTVVGELGVSDSFAMELMGTCAAPRGRMSSPELRESSARMWEVTGGRWPKHVPIPHAAGEDFFTSRMARDLRVFPYRQNIAAIVSAVMNKDRQDAAQKRQAVIRLPEARPKRVRGTVKGTVPVGSQPTLAAKSAAPGSSKVPESAKAVGAGGTKSAPDRAAKVRELPSLGKRVADFGTNISVDDYLVGSGEGQLVVVPPAVATTTSTAVLGVKGSAGGEISAATAVKDEAGAMSHRLREASQQLSQQLSQAADFADRVVSGALTDDVSAEVERLRAQHADAVREKSAADSKSRKLAEKVAALEGERTDLQRQLVEERREANQAIAKAQAAQAEAKLAWVEGSLASQRAEEWEVRFNALQARMERVEASTCSEVERTRKQLVDSYRELGARTADFEVPDREAGLRFLEWLQEELLALPTIMEGFMSFASLVTCKGAMNALSREGCSHYEGFDRSDEDFGREIFKVEDPMVKDFTGALFDRMWGPYGREVVRERSDRARDQMARAEDVEDFRPLNSAQPEAEVNPVVAEAEVQDFGPAHATATANFVAASTVVAGNESNESTSKFSEFDDSGSSVMWMEESSDEDLDYFAALDVAAAEASPCVTDAEVLPGPSDGRRRRRAVAKRRNSEIQTLSQRSGMFTLIPNSNPNGPIDKIVSN

SEQ ID NO: 54839 - protein, 74 aa, Zea mays
  Coding DNA Sequence Number=SeqID_11464
MGRPRHRPSSGDAWDEGEAGEGIEGRVASLPSPHHLPSEGPVRLSHLVPKASLDGGDAALARSGSAGVFDMTVD

SEQ ID NO: 54840 - protein, 292 aa, Zea mays
  Coding DNA Sequence Number=SeqID_11465
RIGTLQVVSELLGWPQDMEVRCQTSFCQNEDGFPKLLRACTVRLGIRSQPEYDGREFVEHGTEKETVPLGWPGCVHWKGQQLLEDDPTVMYLTAYLLTLDAQYDFLARHHCQMIARAEDAEKCNHQLHVDLTTAQPRATALESREVIVVEALKQAKDEHVQKLMEADLITHNQRRALRIQEPAPSNPVQPIKAEIPRFLKAMDKQEHPESSQDPPPELFEPLTMKKIPAPSLEDKGRSCKHPASTAALRGATREMSQIEVVCKPCQKRDARSELVMPSPLHALGSEVFLHFG

SEQ ID NO: 54841 - protein, 158 aa, Zea mays
  Coding DNA Sequence Number=SeqID_11466
MWRLGDVRYPGESSGSRGGEKSERAVLPSLATSIHLGEGASRRGSSAEPGKLGSKRPCSSGSGGGPLSVVGGKEVAREETKIQGSGATVGVRRRRTAIAKKLRRSTAPTKEGAQKRKRISSPPSSSSSTSSGAPHPKRKRLHSPVGIVLIIAIDSEKN

SEQ ID NO: 54842 - protein, 556 aa, Zea mays
  Coding DNA Sequence Number=SeqID_11467
  Gene Ontology: Mol. function=oxidoreductase activity, acting on the CH-OH group of donors, NAD or NADP as acceptor; Cellular component =integral to membrane; Biological process=isoprenoid biosynthetic process
  Homolog annotation: Hit_ID=Q42466; Match level="QueryCoverage=97%, HitCoverage=99%, E-value=0.0, Identity=72%"; Hit description=3 -hydroxy-3-methylglutaryl-CoA reductase
  Pfam annotation: Domain name=HMG-CoA_red; Domain location=166-537; Score=931.8; E_value=2.9e-277; Accession=PF00368.9; Description =Hydroxymethylglutaryl-coenzyme A reductase
MAMEVRRRVPPPHGSAPRRQQATGGEGQRVRVQAGDALPLPIRHTNLIFSALFAASLVYLMRRWREKIRSSTPLHVVSLAEIFAICGLVASLIYLLSFFGIAFVQSVVSNSDDEEDFIIDSRHGQARAPPPPAPAAPCALLGSPAAAPEKMPEEDEEIVAAVVAGKIPSYVLETRLGDCRRAAGIRREALRRITGREMDGLPLDGFDYASILGQCCELPVGFVQLPVGVAGPLLLDGRRLYVPMATTEGCLVASTNRGCKAIAESGGASSVVLKDGMTRAPAVRFPSARRAAELKAFLEDPANFDTLAMVFNRSSRFGRLQGVKCAIAGRNLYMRFSCSTGDAMGMNMVSKGNFCSDKKSAAVNWIDGRGKSVVCEAVIKEEVVKKVLKTNVQALVELNVIKNLAGSAVAGALGGFNAHASNIVAAIFIATGQDPAQNVESSQCITMLEAINDGKDLHISVTMPSIEVGTVGGGTQLASQSACLDLLGVKGANRESPGSNARLLATVVAGAVLAGELSLISAQAAGHLVKSHMKYNRSSKDMSKTLAEETDKPKKC

SEQ ID NO: 54843 - protein, 113 aa, Zea mays
  Coding DNA Sequence Number=SeqID_11468
FYTPLPSPTGQGNPRFGDELVEVVCNGPKLGEDSADGSKIVLPSSRSVGDGRTAEGVHKEVAHPRAPAEDAGGPIHRLITTESVADARINNHARASDTEAEFSRGCESEDRSD

SEQ ID NO: 54844 - protein, 255 aa, Zea mays
  Coding DNA Sequence Number=SeqID_11469
  Gene Ontology: Mol. function=endonuclease activity
  Homolog annotation: Hit_ID=Q2HUP4; Match level="QueryCoverage=70%, HitCoverage=61%, E-value=4e-40, Identity=45%"; Hit description =Endonuclease/exonuclease/phosphatase
  Pfam annotation: Domain name=Exo_endo_phos; Domain location=94-255; Score=-20.7; E_value=0.098; Accession=PF03372.14; Description =EndonucleaseExonucleasephosphatase family
MKLTKKTRWGVTLLATRPYRNPGMVLNEQGPGRHPSSDALSLDLEPVISEQGSGRRILSGALHRRPGVVKNEQGSLHLPRRVRRVRKLVEPTRVRVGSWNVGSLTGKLREIVDVAVRRRVNILCVQETKWKGQKAKEVEGTGFKLWYTGTATNKNGVGVLIDKSLKDGVVDVKRVGDRIILVKLVIGDLVLNVISAYAPQVGLNENSKREFWEGLEDMFSSVPVGAQLVLGGDTYSHQGTSQPVSRVYMEAAPEK

SEQ ID NO: 54845 - protein, 159 aa, Zea mays
  Coding DNA Sequence Number=SeqID_11470
  Subcellular localization annotation: CTP_CleavageSite=34; ConfidenceScore=5.30e-01
MAKLSGGFNTLNRDGRGPNHTPQRLQTRPGDLFRPRMGVERRQWFRFYTPLPSPTGQGFPRFGDELVEVVCNGPKLGEDSADGSKIVPPSSRSVGDGRTAEGVHKEVAHPRAPAEDAGGPIHRLITTESVADARINNHARASDTEAEFSRGCESEDRSD

SEQ ID NO: 54846 - protein, 64 aa, Zea mays
  Coding DNA Sequence Number=SeqID_11471
  Subcellular localization annotation: CTP_CleavageSite=26; ConfidenceScore=5.44e-01
MHRSPILKNKRSPKKSAKKSKKRAVSQRLVVHRTLVSDGNGRIQRSTATGANGRLTWRAPDTAQ

SEQ ID NO: 54847 - protein, 364 aa, Zea mays
  Coding DNA Sequence Number=SeqID_11472
  Gene Ontology: Mol. function=kinase activity; Cellular component =ornithine carbamoyltransferase complex; Biological process=amino acid metabolic process
  Homolog annotation: Hit_ID=Q6QP54; Match level="QueryCoverage=37%, HitCoverage=48%, E-value=7e-24, Identity=50%"; Hit description =Putative kinase
MELGRRHHCLSGGAGQMRHRSCSLRPESARGRVVMALPADVAGLRPRPGDVGAPPKLGSNLPSVAEAESEPLGRARRKSFGRGQGGVRALGSGEAEFVVFRGRARVRALGSGGAEFAVFRVLARVRALGSGGAEFAVFRVLARVRALGSGGAEFAVFRVLARVRALGSGGAEFAMAPLARPDCLSDSLCRVAPQSEWRRRRCPSVRPLYADGGYQLRIRRLEARVHGRGPSSRAGMLTLSTVRPEPGLREQPPSLRTGREDDQGQTRLFAYAPTSPFRKEEGRSAPCYPRWAPNMVSPVSCKRVIRVDVRAPFVGGRLGAQRHAQKYLRVICRTRSPGDGVRGLDASLRWDSVTRSLPLVSEMS

SEQ ID NO: 54848 - protein, 77 aa, Zea mays
  Coding DNA Sequence Number=SeqID_11473
MAERYQLPRSCVPPTRRRKDGGYPDEAEVPDLSASRDNSDLAEDDPCDPTTTSKPEAPMQSLNQLPVVTDLADARSA

SEQ ID NO: 54849 - protein, 273 aa, Zea mays
  Coding DNA Sequence Number=SeqID_11474
  Gene Ontology: Mol. function=binding
  Homolog annotation: Hit_ID=Q69QZ3; Match level="QueryCoverage=50%, HitCoverage=21%, E-value=4e-50, Identity=75%"; Hit description =Neurochondrin protein-like
MAREEEGPAAAKLPPSCADEEDPAPKHPPRLRRARRRDGASARLLPAPISLAGSRFRAFPPTSSPSGRGDDESQSARSDGANKIHRQSGTAQKLSSLAPPHSPQPSMDSSSATAATVAPVVTSAPPLEDCLRLLRGERDEQKLAGLLVAANVCRAGDADAVANVYRAVGPRFLRRLLNTGLGKVEGGKEEEREAYMRLAVTVLAGLARVPEVAADEGVVSTVPLVAEVVAKSTDPAITEECFELLSLIAIASEDGAYEFCEPGLSWHILNLCI

SEQ ID NO: 54850 - protein, 77 aa, Zea mays
  Coding DNA Sequence Number=SeqID_11475
MPDLRKEKKTLDKLTDQPGVLIPIDEAEVPDLSASRDNSDLAEDDPCDPTTTSKPEAPMQSLNQLPVVTDLADARSA

SEQ ID NO: 54851 - protein, 573 aa, Zea mays
  Coding DNA Sequence Number=SeqID_11476
  Gene Ontology: Mol. function=metal ion binding; Biological process =regulation of transcription, DNA-dependent
  Homolog annotation: Hit_ID=Q69QZ4; Match level="QueryCoverage=58%, HitCoverage=86%, E-value=1e-119, Identity=64%"; Hit description=Zinc finger protein-like
  Pfam annotation: Domain name=zf-C3HC4; Domain location=434-514; Score= 30.7; E_value=5.5e-06; Accession=PF00097.16; Description=Zinc finger, C3HC4 type (RING finger)
  Subcellular localization annotation: CTP_CleavageSite=40; ConfidenceScore=5.18e-01
MPESAGSSGTAGGPGLGRGLVSDEVQSRQSGRQVSALNFQASLAAKDLQVSSESNPRLHSSSSTISHHLRFNHLNYHENKEDGLGSENAETSGLQSSSRKPVMVRGSLINEAVNGDISGEGISSIGSELENVPSTVSTNEIGGSTSESGLGPSSMTSERIMSDSEVEISPQGTSSTTVMTSERSDASQSSLTSVFSNSSTASSVIVEPMPDPIPTTADVPIFSGPHGEAGGSILHDDMMSIFSNDGVGRSIDSSSSETRRSHRRILWDAFSRRGSRGYPESDADEMGFFSTWLDLGDDIFEELGESRYFHRRRHGSIRVSQYSRSRIREHRRAVFDSGNEQNTAACPLGIHQIGRCTCNSFFIAEESSARASISRIVMLTEALFEVLDEIHRQPASLSLSMVSVQAPESVVDSLPCKSYKKLETPQCSDDMEQCHICLTEYEDGDQIRTLPCKHEFHLQCVDKWLKEIHRYLSILVRLDLPCILNTVKQGTGSVRDPPSSQRSCRHNAAGCALCAVETSAKSPREDLGAAILPMWRRWIGHHRQAPAVPWLKLVRSGNGDPTWTVDTARARQL

SEQ ID NO: 54852 - protein, 137 aa, Zea mays
  Coding DNA Sequence Number=SeqID_11477
MNLSMTRIPGIKHTNFSSMQVIGIWAFAQIKEARKALRIVHHEDRSQMVHTGNGSYNKPKCKSAGSGDQLHKRMLVRKLPVSATSYLLKRTLPVSRKLPVSTKELTSLNSEHSKGLFGWAVAVKKVVVGCELWKKLL

SEQ ID NO: 54853 - protein, 200 aa, Zea mays
  Coding DNA Sequence Number=SeqID_11478
MSVKNGILKEQRDILIGKGDEPLEHLRLHDTTQKFLQPRGQNGLGVRRGQGSTLGFIRGRCSRVGPGAERRDRRNHLFFEVASERRTLPFNDVGEPSDLCLGKIILPGHVIALAHPLEVYLVVGRDDDQISFHSGVNGTKGQHAAPRGSTRGDVFSADGLTKVHRCHGQSVERDDLLVDSLGESWGLGISPGAPGSPLKL

SEQ ID NO: 54854 - protein, 55 aa, Zea mays
  Coding DNA Sequence Number=SeqID_11479
MRVVSQRLVAHRTLVSGANGRLTWRAPDIYCSVSGGAPDCPVHPTTESCCFLSNG

SEQ ID NO: 54855 - protein, 454 aa, Zea mays
  Coding DNA Sequence Number=SeqID_11480
  Gene Ontology: Mol. function=metal ion binding; Cellular component =endoplasmic reticulum; Biological process=protein modification process
  Homolog annotation: Hit_ID=Q9AS33; Match level="QueryCoverage=99%, HitCoverage=99%, E-value=1e-167, Identity=69%"; Hit description=NPL4- like protein
  Pfam annotation: Domain name=NPL4; Domain location=156-451; Score =417.1; E_value=2.5e-122; Accession=PF05021.6; Description=NPL4 family
MILRIRSRDGTDRISVPDSASATVADLQRLIESHLTVPVPLQRISLDPALLLPNPSAAVPLLADPAAPLASLRLANGAFIYLAYPPDARSARPTPPKVLSAAGSFGKKMTMDDLIARQIRVTRQENALCAAASFDRDAANAFQLYVAEYLAFAVKRAGFLYGRIDAETKEVLVDFIYEPPQQGFEDVVHLMRDPDEEARVDTIAEGLGMRRVGLVFTQAVGRRASKTGEYTMSNREVVQAAQLQAEGGTPEWVTAIVKLEVGDDGTGDVHFEAFQMSEICVKLFKDGVLETEVQDADDPRLSKMRKEVVAGGKDTMKVDNDFFLVPVKISDHQVTTMYSPLLFLVLLLKNGSVLRGVVEPYRILSVNYHKGPLSVGFPIENRGSPVGMSALRSHLERMKHLTFVRRISDFHLLLKLATFLDAKSDMPTIAACVKTQSRMPEGYQFLIESFASQG

SEQ ID NO: 54856 - protein, 90 aa, Zea mays
  Coding DNA Sequence Number=SeqID_11481
MRIKLKTMIKKMSHLKRMTIIKGEMTMIKTRKMIKKYRVKDRHIQESTKVEDALRDSDWVLAMQEELNNFTRNEGDMANSTVGITSAWGH

SEQ ID NO: 54857 - protein, 471 aa, Zea mays
  Coding DNA Sequence Number=SeqID_11482
  Homolog annotation: Hit_ID=Q5N951; Match level="QueryCoverage=94%, HitCoverage=71%, E-value=1e-128, Identity=71%"; Hit description =Putative uncharacterized protein P0677H08.27-1
  Pfam annotation: Domain name=DUF639; Domain location=87-466; Score= -19.0; E_value=6.2e-14; Accession=PF04842.3; Description=Plant protein of unknown function (DUF639)
MLQLQPPGFLPIPRRRVTARGRRARPVIAFNSQWKIPDVDTDAVRERVRSWMSLARGAIADAGRAAREGGRHKEEPEGGKKKQRKEVTVEEQAFVAVPEVTVEPRVPQGWLSLDAVVSIEQFARLNGLTGRQVQRIFESLAPEHLHNDARSLVEYSCFRYLAKDNSDFHPNLKAIGLSGTKKPMRLDLTNQNSRAEKTKVGPFGSKLFDSAVSVSSGSMSDEWTLEFVDFSGEMRRDVWLAFISEIISVYRFIREYGPGGDDPAIHNVYGAYKGKKRAVSSAANSIARLQSLQFIRRLYEDPAKLVQFSYLSNAPFGDVVLQTLAVNFWGGPLTTKARSANHRSTQWHRSSEDPSSGRTHVYDIDGSVYLRKWMTSPSWTSSHSANFWRNSSVKYGIILSKSLVVADKNLVEKAMVDCKEKSKVVERTQATIVAATIEGIPSNIDLFKVSYFSMSYFFLSHPEKSNIDPLY

SEQ ID NO: 54858 - protein, 246 aa, Zea mays
  Coding DNA Sequence Number=SeqID_11483
MEAKKTDLRRQLAEERREANKAIADAQAAQAKAKVARAEGSLARQRIEELEARFNALRSRVDKAESSTRAEEELLVLLTIVIGFMSFASLVTCEGAMNALSCEGCRHYEVFDQGDKNFEREIFKVEDLVVKQSAGALFDRMWGPHGREAVQDRSDRAIEQMAHAEDVKDLVGLDGTLPKAAEVNPVPSSDAGEGTSATPAPNVAGEGPAPAPAPTSEGALKVVAEPAAEPATEDPTTVVGPLQVAE

SEQ ID NO: 54859 - protein, 29 aa, Zea mays
  Coding DNA Sequence Number=SeqID_11484
MENHGPQRRSMSIPSKHKDTTFKVRLHGE

SEQ ID NO: 54860 - protein, 90 aa, Zea mays
  Coding DNA Sequence Number=SeqID_11485
MANTEGGFLTGSDEVSRSNHGESWSAAEINVGQQSQGSWRLISRAMVTHPLLLESEQAPRHDLQGAATVVQNCHERGYLVRKHNGDEYYF

SEQ ID NO: 54861 - protein, 348 aa, Zea mays
  Coding DNA Sequence Number=SeqID_11486
MALAVVRATMKVRSIDLRSKDLGRRLKRQSQDAQWHTDSAGANGSEAQASQAQADKGQVVASNVQATGARPCRATPPTAGAVWRRVPATGPRRADKRSGKDLSKHANRGLSGQSGGGCGSDERASGGLGKRVRNHNREETRRCRRVGQLGRPRRRRQSPSDERGPFGLLRSASIFRFASTLWLLHTPLRPPSEFKAPEPRKKFEEQFAQARCKNKTPKFEEQFAQGSCKNKTPFRFFSIPMRTSGSENRKHKKHITFVEVNMTCLNASLVIETGPGKEKKDNISRNEVKTAAAAKQLLATRKQRHTRDETHQAADEPKSSKAISQLPSRGRSEMNPNKRQAIERVQVQ

SEQ ID NO: 54862 - protein, 286 aa, Zea mays
  Coding DNA Sequence Number=SeqID_11487
  Pfam annotation: Domain name=MAP7; Domain location=99-241; Score= -84.4; E_value=0.1; Accession=PF05672.2; Description=MAP7 (E-MAP-115) family
MKPGRRGSGGLRRLLPPAEACRRWRRSRPSLHPAGHQRLRLPPVVPRLRRLHRRPGRVPEAVKAARGLPPPGKRVADFATDISMEDYLVGSDDGQLVVVPPAAATTAAAGRGGRCVPPAEGDEGGTNKCHKLADKVATLEGEKTDLRRQLAEERREANEALAKAQAAQAETNLARVEGGLARERAEQLEEQLRALQSRVERAEAATCTEAERTRKQLMDSYHELGARTAEFEVPDREPGLRCLEWVQEELQALPTIVEGFMSYASLVTCEGAMNALSLEGCRSLNL

SEQ ID NO: 54863 - protein, 106 aa, Zea mays
  Coding DNA Sequence Number=SeqID_11488
  Homolog annotation: Hit_ID=Q5NKP3; Match level="QueryCoverage=31%, HitCoverage=13%, E-value=3e-07, Identity=81%"; Hit description =Putative uncharacterized protein 9C20.7
MTTGARDPIAAAAHALEVAKQSDSKVTYPRWQCDAYCPRIEALHNDEALALASLIDDEKKLGDCQFDLWKQYYGDLMVVANAGDSRVVLGTASDNGAVTPSSSSST

SEQ ID NO: 54864 - protein, 535 aa, Zea mays
  Coding DNA Sequence Number=SeqID_11489
  Homolog annotation: Hit_ID=Q8SA97; Match level="QueryCoverage=22%, HitCoverage=18%, E-value=9e-08, Identity=42%"; Hit description =Ornithine carbamoyltransferase
  Pfam annotation: Domain name=zf-CCHC; Domain location=346-363; Score =25.1; E_value=0.00024; Accession=PF00098.14; Description=Zinc knuckle
  Subcellular localization annotation: CTP_CleavageSite=9; ConfidenceScore=5.21e-01
MPAPPPPPSAGKVTGQTRMLLFRHVGKTSSIPPPAGGLTAAIVVVARRRKEYHVVAAVEGHELKASETEHRPGLERLLETTHLELDGKLFVNTQQAPTWRANCRRFDPGGSLDRRPEVGRGGDSSEVEAESEPWGRARRRPSSEVEVESEPWGRARRRPSSGVEVESEPWGQARRRPSSGVEVKSEPWGRARRRPSSGVEVESEPSGRARRSLSSEVETGAEPWGRARRSFLWRPGLDLAAVGLTLASGTAVGAGQAALFSCQLCADGGYQLRLGVLGVPLIMVPDRYAFTCDERKGKRRLPLQVPQVKKRKKKKVMMMKIINRAHHPPRTKKQSDASERKKQRKRGCFACGEKGHFRDNCPTMAEPKKERSKGKALTSVRTWDDSSSEDEPPRMRSHRSSSCSSRSSHKCLMARGNKSIPSSSDESSSDNEVGGKPSVDELAESIKFFQDVCTKQKAQLKTLKNKFISSQNDYKGLLEKFKTFANLNSELSTKIELLESSAPSTATDDGLIKKNEKLKAKLASSQEAIENLLEK

SEQ ID NO: 54865 - protein, 280 aa, Zea mays
  Coding DNA Sequence Number=SeqID_11490
  Pfam annotation: Domain name=zf-CCHC; Domain location=31-48; Score =24.5; E_value=0.00029; Accession=PF00098.14; Description=Zinc knuckle
MGMIRKINLMGVPLQVDDLLFNIDRKKQRKRGCFACGEKGHFRDSCPNMVEPTKGRSKGKALTSVKTWDDSSSEDEPRRTRNYRSSSRSSRSSRKCLMAKGKMEILSIHNDELTTKLENIGSTLEVSLVEIPEIIKEDASASCFDLIYDSNPCNQVLVKNVFIETCSDEIAMENEQLKQEVARLGKAMLCHKEGQKSFQCKAKTGNKQKPTSKISNTYINKVYKKAATPYLIKKKKNGKVIAIKANKQANRGKGAKCIWVPKEIISTMKSTKKVWILRGK

SEQ ID NO: 54866 - protein, 70 aa, Zea mays
  Coding DNA Sequence Number=SeqID_11491
MELVVDSTLKVPKNPLDRTQVRLAGIMHVEAELLDNISVVGPGEGEIRKSANKTAVVNGVIDIGEPSPET

SEQ ID NO: 54867 - protein, 125 aa, Zea mays
  Coding DNA Sequence Number=SeqID_11492
MESWCLGMIKECLGTNSMRLGVPFISPRQLGAAGGILGRPKLPSVGWHTGQSADHCRLVAVGAPNTVRCPLPTVGAGHATLADLALGRCTGGRWLTGQSGAPPDSLVNYSRTPPQFPESGQFAGV

SEQ ID NO: 54868 - protein, 103 aa, Zea mays
  Coding DNA Sequence Number=SeqID_11493
MAEGGDDGSIGDTGYSPSYPGEAGDEGPESFPGLLPHCMEMVNTRKGGSVDLPARIRRRRVVVNPQLEMNPPLNPPPAGIDDVVVAQMKLLQQMTNTTMEMQA

SEQ ID NO: 54869 - protein, 113 aa, Zea mays
  Coding DNA Sequence Number=SeqID_11494
MAATPNSFALHELVGAIKLQRDVVEAFVDLGTPTLNLSLIRLERDESRLGLLLSIGETLLEFAAASYERVRQTLLHLAKPPVHLAELIQHPLLTSWSVGDGQEWEEDSPSYSI

SEQ ID NO: 54870 - protein, 611 aa, Zea mays
  Coding DNA Sequence Number=SeqID_11495
  Gene Ontology: Mol. function=DNA-directed RNA polymerase activity; Cellular component=plastid; Biological process=regulation of transcription, DNA-dependent
  Homolog annotation: Hit_ID=Q84JN3; Match level="QueryCoverage=78%, HitCoverage=99%, E-value=1e-146, Identity=59%"; Hit description=Sig5
  Pfam annotation: Domain name=Sigma70_r2; Domain location=263-336; Score=41.4; E_value=3.2e-09; Accession=PF04542.5; Description=Sigma -70 region 2
  Pfam annotation: Domain name=Sigma70_r3; Domain location=339-420; Score=62.5; E_value=1.4e-15; Accession=PF04539.7; Description=Sigma -70 region 3
  Pfam annotation: Domain name=Sigma70_r4; Domain location=419-472; Score=10.5; E_value=0.029; Accession=PF04545.7; Description=Sigma-70, region 4
  Pfam module annotation: Pfam domain module=Sigma70_r2::Sigma70 _r3::Sigma70_r4; Domain location=263-336::339-420::419-472
  Subcellular localization annotation: CTP_CleavageSite=50; ConfidenceScore=5.69e-01
MTSTVTTPSRPLAAGSRPRRSGPAVLSLSKGGGGQRRQRRLAPSTSCAVLASPDKQSTANKLPLSSRKQEEEVEKATDYNEVAAALETIYKLSPAVEVEEKKRQGGNEDDGGGEAKKKRKRRVAGRSTVVVRSRRRRGGRRMDLGKRVEMKGAAAASREQQQGGEEQGEREFEEMLLREHSVSTDMGSLDWKRMKIPPVLTSSQSARLFKTMQPMKAIFEAQESLREELQRDPTDAEVAEATGMTVHQLRRRLDVGRAARNKLIKHNLRLVPYALNKYYPDMGGDERFDELCQAGANGLITAIDRFEPKRGFRISTYALFWIRHSIVRAMTLSSFTRFPFAMESERQEIGRAREELAFELGRPPTDEEVRARVGLSPQRYRDVLRMARPTYSLHARNRVTQEELIGEVTDAEAVGVDAGGKHDALLRLAIDDLRFGLDGRGRRTLSEVAGNLSISREMVRKYELKALMKLKHPTRVEYLRRLRLGRSWVDYVVVVLMPAGPLRYCVEKGDMDDDDDNSRYPRTINDELVELGQLPDDIDVIGDVVAALFIVGSSHTAVDPEGAPVGPVSDAAGSNDLDSLTSSSSGKRRSVVWDDFTEVTENCNDKKVRIA

SEQ ID NO: 54871 - protein, 425 aa, Zea mays
  Coding DNA Sequence Number=SeqID_11496
  Gene Ontology: Mol. function=acid phosphatase activity; Cellular component=extracellular region; Biological process=biological_process
  Homolog annotation: Hit_ID=Q2QLL9; Match level="QueryCoverage=92%, HitCoverage=94%, E-value=0.0, Identity=72%"; Hit description =Expressed protein
  Pfam annotation: Domain name=Metallophos; Domain location=131-319; Score=62.5; E_value=1.4e-15; Accession=PF00149.19; Description =Calcineurin-like phosphoesterase
MSNVLRARRRLDLLQVVLFFVAVLLVVVADAGVTSQYRRKLEATVEMPLDADVFRVPPGYNAPQQVHITLGDQEGTAMIVSWVTANELGSSTVMYSEASPDPEKMELRAEGTHTRYDYFNYTSGFIHHCTLTNLKVSDLGQTFDSNTTLSHYEANGGDAVLYVGDLSYADNHPLHDNTRWDTWARFVERSAAHQPWVWTAGNHELDLAPELGEHVPFKPFAHRYPTPFWYSVRVASAHVVVLASYSAYGKYTAQWEWLRAELARVDRAATPWLIVLVHSPWYSSNGYHYMEGETMRVQFERWIVAAKADLVVAGHVHAYERSHRVSNVAYDIINARCTPVRTRDAPVYVTVGDGGNIEGIADNFTQPQPSYSAFREASFGHATLEIRNRTHAYYAWHRNQDGAKVVADGVWLTNRYWMPTDDDIN

SEQ ID NO: 54872 - protein, 431 aa, Zea mays
  Coding DNA Sequence Number=SeqID_11497
MNSGTREDLEWFGPSERNTLLHFVLDCCESLRAESLSLSSGGQAARPLRDKCRDRAAQRPYVRLRPLAYVTGNKPRGSIGSPPERGAQAHRIKPGHVLVPDPCFGQGTPCPGTSLWVARTLLGWIWTPSKGPWHAYLGVPDRIRGPEEARYWCKQRFDFSAPVPETGLSVSAGAKRRTTAGGGALFTRRFAFSAHRNRRARCMTCGPGPPCQRLDRWLRRRRGGALPRGGSTLLVRRFAFFALEDQRTSCMTCGTGAPFHRMDTPVCIGGDFSRRFEAGAGESSFKEGFIPRVAAMPCFSPTRGVLSPPSSLRPFAFKVSALHCRSLPWPCVRPCGTDTLPPVLGFRNVHQPRGGGERAEPRLRLPHGLVTRLFLQHSEEKDDHQPCEGGELRGLVWEAKLCVRTPWTVVLDTRIPVTEWWSVQAHGTGPG

SEQ ID NO: 54873 - protein, 460 aa, Zea mays
  Coding DNA Sequence Number=SeqID_11498
  Gene Ontology: Mol. function=protein serine/threonine phosphatase activity; Cellular component=protein serine/threonine phosphatase complex; Biological process=protein amino acid dephosphorylation
  Homolog annotation: Hit_ID=Q6L5C4; Match level="QueryCoverage=86%, HitCoverage=77%, E-value=1e-132, Identity=64%"; Hit description =Protein phosphatase 2C
  Pfam annotation: Domain name=PP2C; Domain location=234-456; Score =199.8; E_value=6.9e-57; Accession=PF00481.12; Description=Protein phosphatase 2C
  Subcellular localization annotation: CTP_CleavageSite=39; ConfidenceScore=5.05e-01
MVYDGAVKDQDQETVAASTASAASVVAVSEASPAPVVVVVSARPSARPPHDKRLGVRHPLKHRWFRAGGKMMMEPGGVLPAHAHEEEEEGASEVEEEELVEAEASSAETVTWGAEVEVSSAPAAGVQEMNAEVEGGEMEVSPEPAVAVGGTELEPQQDDEDEVSSVVLARGERKQEAAPASAVLAVEAPMEMGQDEERAEKEKRGKERERQKERERVDEVGYMSGGWKSVDGTLNCGYSSFRGRRASMEDFYDIKASKIDDKQINLFGIFDGHGGSRAAEYLKEHLFENLMKHPEFMTNTKLALSETYRKTDSEFLDAERNTHRDDGSTASTAVMVADHLYVANVGDSRAVISKAGKAIALSEDHKPNRSDERNRIESAGGIVMWAGTWRVGGVLAMSRAFGNRLLKQFVIADPEIQEQEINEELEFLIIASDGLWDVVSNESCIYHVFCAFFMSIFVVE

SEQ ID NO: 54874 - protein, 203 aa, Zea mays
  Coding DNA Sequence Number=SeqID_11499
  Subcellular localization annotation: CTP_CleavageSite=43; ConfidenceScore=5.24e-01
MTANRPTYQVLDSPSQQSRLSELTGRGPSVDPTRTVCDRQINRAEAVRLSLSTLVSFSLTLHTPKVILVVCERTVNQNCARTVREIVWSSSTMSSSRGLGDLKKKLAGRFQSKRRRADDADYNPATDSEAQSSAGGSISMDIEDAPHAHPDYPIDVTGWTYPKRRFSMAKYCSRRTVNQYDLPSDTNIQFFILSFSLMSSGEP

SEQ ID NO: 54875 - protein, 167 aa, Zea mays
  Coding DNA Sequence Number=SeqID_11500
  Homolog annotation: Hit_ID=O48967; Match level="QueryCoverage=43%, HitCoverage=16%, E-value=7e-30, Identity=85%"; Hit description =Putative uncharacterized protein
  Subcellular localization annotation: CTP_CleavageSite=63; ConfidenceScore=5.15e-01
PGARSGPKFSGWYVDAVNGSAGAPEPPQTGVTQTGSSGTVPRDGKKKKDRNHQKPRSTALVVAAAMGGRGDRNKHPRPQRGNSGSCPVHPNGRHSVVECREIIDLAKRVSEQCEQSSKDDSPPHRRLGKERVDDDEVVTAERDLGYQSPEGDLKDVFAGDSYSGGDN

SEQ ID NO: 54876 - protein, 533 aa, Zea mays
  Coding DNA Sequence Number=SeqID_11501
  Gene Ontology: Mol. function=aspartic-type endopeptidase activity; Biological process=DNA integration
  Homolog annotation: Hit_ID=A2Y817; Match level="QueryCoverage=47%, HitCoverage=29%, E-value=1e-67, Identity=58%"; Hit description =Putative uncharacterized protein
MAARDQVVCRPRSPSVDNGRGRGIANEGHSDIEVDGCQQGRDTGDGPKEAAQVFVVERCAQAHPHERRRHVQQRRLAAFSSYKSESLDFFQADSAPRRSYSYPIVSFASASGCGAGVSLLAAMLRAVAVEGGKHCRLSRAGVATDGSYQSQGAWEGVPHLPLNRDEATYRWLDAGGGKMEWSRRRHFHPLWRATFNPTNMRFGLGHRLSCRLGVAIGGLLVPSSSRGLPEAMAAAAVHCSRAYVPLSSGAYSRKKPTCHKYCASVELTWKPCRLVGYRDFRLKELACQQLAHGVDEQYPVKSSTVEQAQDRQPCLPQGDAYFAGLSKKEIERRRKIGAANKGKVPWTKGRKWSEEHKKVIRQRTAEALRDPKVMSYQEENVRAPQTSKDKISAALRTVWERRIVSVRSRQKVLQIWSNSIAEAAKNGGHGQDMLGWDSYERIKSEMVSTFLWIKERGRMVKKLERAVAKIAAKRLQVVRRREEQATRMKKLKPDCQTLLQNADRQPARVVVSARPKLKERLAKEHHRKDGHVP

SEQ ID NO: 54877 - protein, 57 aa, Zea mays
  Coding DNA Sequence Number=SeqID_11502
  Gene Ontology: Mol. function=aspartic-type endopeptidase activity; Biological process=DNA integration
  Homolog annotation: Hit_ID=Q2QSC3; Match level="QueryCoverage=66%, HitCoverage=3%, E-value=1e-08, Identity=56%"; Hit description =Retrotransposon protein, putative, unclassified
MKDAKPIKTPMGTNGHLDLDTGGCKINRKSTSGTCQFLETFNKLRHELNILDSRNFF

SEQ ID NO: 54878 - protein, 102 aa, Zea mays
  Coding DNA Sequence Number=SeqID_11503
MWGPHDRDVVRERSDREIDQMAHDEGVEDLGGLDGMLPEATKVDSVPPSDVGEGPSATPMPTAAGEDPAPAPAPTCEDTSKAVVELATEDPATATEPSQVAE

SEQ ID NO: 54879 - protein, 121 aa, Zea mays
  Coding DNA Sequence Number=SeqID_11504
DLDAFGFGDTFKHGLTDPLLVKLALNECEVPDSVLDALGLVDVAWMALWTADGWRADDVVEHVGGQGLASGGCFGQCVGLLVLGSVHVLQAAPAPAWHHAPSQWMIHTFSAGSSGYVIGPV

SEQ ID NO: 54880 - protein, 41 aa, Zea mays
  Coding DNA Sequence Number=SeqID_11505
MAQCLASTILFGKPYTSHELPPLVKNWYRRMRRMEGVVMRS

SEQ ID NO: 54881 - protein, 207 aa, Zea mays
  Coding DNA Sequence Number=SeqID_11506
  Homolog annotation: Hit_ID=Q6UUN3; Match level="QueryCoverage=22%, HitCoverage=4%, E-value=5e-07, Identity=45%"; Hit description =Putative gag-pol polyprotein
MPPRTRLTARKSMGPIGVPRHQLAPRHESSSSGSNDPIGDLEARDQLADRDLTLDWAVQSRLLMCAKEARAQARIKELSSTVDNLQMPTRTRGQDAAGTSGGRDVTPNPPPVPPTLAEAIAALVNATADNTRFLREMAGQQQFQQQAGRGYPQGPRETTYLDFSETRPPLFVKAEDPLEADEWIRVIEQKFGLLRCSETQKPLFAAQ

SEQ ID NO: 54882 - protein, 251 aa, Zea mays
  Coding DNA Sequence Number=SeqID_11507
MTSHGSSDEGNALSHTDGLAQEGFPRILWEPSWRSLDSESFGYRAEDTIEAIALHGLTTFCGFHPLELSTHPIGLFPAEKEDDPMWKDRVEHAKDIWAIYPGQTVHLTVRCMNALYRLQVICGEAMSHLMALLEATKITLDNREELVVDLSTEMVEKDLQVEQLSNEIQELEELVGTRENTIEVLEDQLINTQQQLAEANEHLDMHHQEIQDMEANEDVDIEGGEEPASSLDTTGSGRPPSPESSVASFAH

SEQ ID NO: 54883 - protein, 178 aa, Zea mays
  Coding DNA Sequence Number=SeqID_11508
MAFMELEWRRDWAWRVGVGARLGLLLGSRGLRLGAGQWRLQACRLRAARWRERCRAGRVSSIQAARLGCRALGALDVGACRGRRAGWAARLTLGGTLRARPCANPRAPAAARDHARATAIKPVPEPGCLPRCILCPVPNSPELTHSSGDLPATRQSRSRATTVANPFPALLRSIQALG

SEQ ID NO: 54884 - protein, 93 aa, Zea mays
  Coding DNA Sequence Number=SeqID_11509
MNVCEFTLAVSHPPTRSRTESSDSSPPGAGSWTAGAGDDEGDDLATKASDSANGYQHQSRAELNMGTLPQQGDWRIVDLKLIIVISEVFSITL

SEQ ID NO: 54885 - protein, 54 aa, Zea mays
  Coding DNA Sequence Number=SeqID_11510
MGMRGLRDEIGIRINQIALLTRPETRSPIPVMVGISAVTARRPVGVSEALYAKA

SEQ ID NO: 54886 - protein, 112 aa, Zea mays
  Coding DNA Sequence Number=SeqID_11511
MKAKSHHQPIDLRSTCKNYATSKAEYTNTQLDLPGYNGSSSLISCEKQTIRIEFLSLQGIRTLILIPISSRRPRIPMDPCPQTIIILLSKWIQSIPDLARVLEKSLDFYRDP

SEQ ID NO: 54887 - protein, 132 aa, Zea mays
  Coding DNA Sequence Number=SeqID_11512
MRKTTQVDPKRRLICKLKLMNQPKDDDVAKVGGRFLKIKFDGGSIRALMDSTSGKDVPLPERSLGVVSPSESIKDLVDVGLMIEDPLTGHMPRHGIHFSKHFCKTESLIIEKPYLGSLTTSIPLRVFSLVGF

SEQ ID NO: 54888 - protein, 131 aa, Zea mays
  Coding DNA Sequence Number=SeqID_11513
MEQRKLRNSLARRGRKPRRTQQGDGAQERGKQGSEASSTASRAGAGCGMGERAEGRGHELGRTEGSYMEVARSGDFEGRTSGESRRTPGLRPLMGRGSSGAGEPVGEDAMGMREVRAQRGLELKGDRRWAR

SEQ ID NO: 54889 - protein, 19 aa, Zea mays
  Coding DNA Sequence Number=SeqID_11514
RDVFTSSHDRPSAPDAAHP

SEQ ID NO: 54890 - protein, 141 aa, Zea mays
  Coding DNA Sequence Number=SeqID_11515
  Subcellular localization annotation: CTP_CleavageSite=30; ConfidenceScore=5.07e-01
MQDAARRALSQYYSLFSGVADGLDLKYYPRRSTGSARGVIVSPVGEGNPRLSSMVNVTPGFRGHQDPGTNIITMCARTKSYTYDDSCFPKPSRAIAKLPNNPSVCKGVSWVHLRKEQGVLCKTGYLKGYQDFLIARSDIKG

SEQ ID NO: 54891 - protein, 114 aa, Zea mays
  Coding DNA Sequence Number=SeqID_11516
MGMPHSGGRISETQRLWIYTQMAPKFRVGARREIRDGLVNCSRRINVSGGVCWAAYRGRVCSGPARSLRFAARFVAWRPPGSSGGRLEVMLILPGRGWSSLALNPGVAIRVKDI

SEQ ID NO: 54892 - protein, 299 aa, Zea mays
  Coding DNA Sequence Number=SeqID_11517
  Gene Ontology: Mol. function=acid phosphatase activity; Cellular component=cellulose and pectin-containing cell wall; Biological process=translation
  Homolog annotation: Hit_ID=A2Y925; Match level="QueryCoverage=82%, HitCoverage=84%, E-value=1e-102, Identity=72%"; Hit description =Putative uncharacterized protein
  Pfam annotation: Domain name=Acid_phosphat_B; Domain location=70-299; Score=368.9; E_value=8.6e-108; Accession=PF03767.5; Description=HAD superfamily, subfamily IIIB (Acid
MARGGIARLLATLLLFLLLATPLADGASEAEAGLAQGASEAAAPDAGADAQQQHLLPRPLVIELPSSRAEDEDEPGADAVPPDVRCASWRLAAEANNLAPWRAVPPECAPHVRDYVTGVAYRSDLDLVARESAAYARAAAPLGADGRDAWVFDVDETLLSNLPYYAEHGYGAELFDHHKFDEWVERGEAAAIPSSLKLYNEVRELGFKTFLLTGRSEGHRGVTVDNLNKQGFHDWEKLVLRAAGDRKKTATVYKSEKRKEMEQEGYRILGNSGDQWSDLLGSSMGARSFKLPNPMYYIP

SEQ ID NO: 54893 - protein, 186 aa, Zea mays
  Coding DNA Sequence Number=SeqID_11518
  Subcellular localization annotation: CTP_CleavageSite=38; ConfidenceScore=5.35e-01
MGRAGLYSSVAGVASSVAARSPETRQTRSPGSLGSPGRARAGQEGLLNSVADYWLQVQDQKWENDDGKISHLGTELRVTWRGARRLRLAGRRRITAAANSDPCREEAERGPGGKVEERGNHCGFPVRQAQAELTVAKALGEVQRRWRNGLAGGAHTMGTTVAEEEDGSDGQGPRVSESEWQNGRTG

SEQ ID NO: 54894 - protein, 122 aa, Zea mays
  Coding DNA Sequence Number=SeqID_11519
  Subcellular localization annotation: CTP_CleavageSite=63; ConfidenceScore=5.14e-01
MQGHSVPTHINRPHRFPVSREGLTALAYNASLTPTGRRAVTALIPTITGMGDLVSGRVRRAICCQVQSGIRTLILIPISSRRPRIPMDPCPQTIIILLSKWIQSIPDLARVLEKSLDFYRDP

SEQ ID NO: 54895 - protein, 172 aa, Zea mays
  Coding DNA Sequence Number=SeqID_11520
  Subcellular localization annotation: CTP_CleavageSite=44; ConfidenceScore=5.53e-01
MSPDISALVPSSAGFLLRRFLPKRSRFVVGNGRRFHSPPIKRTSGRQRKEFRKGTIVMKGPPKQRSGIEIIEEHRKLVLDDSGKRMPPKSKKSVKGLFKGLGLCQGSSSSRNRHRELLSAVEDEQHNEEQHNEEVQHDEEEEHNAELRYRLPDEEDYMGHAKRVFQNNAKKL

SEQ ID NO: 54896 - protein, 55 aa, Zea mays
  Coding DNA Sequence Number=SeqID_11521
MEMEIIVMDRLLEMGITMAEKKEDVLDTPLPEDPGENATAAAKTAYKKAMDTNLE

SEQ ID NO: 54897 - protein, 198 aa, Zea mays
  Coding DNA Sequence Number=SeqID_11522
MAERYQLPRSCVPPTTRRKDGGYPPSGGLEGGKTRCIREREDMVAFQGGHPPFKGDSPYLRPQPSWAESSPTRSKVLPYGAGAGSHTSCKPAQSRRSQTAVRGTGKGDTPKRILPREGTRLRASLLIKGSKAGPSEGFNSRLRARGLHTHYWSEVRRPAPRKGSTAASGYSGSAPTTNQGFEGWPPKGSQPPQTQSEG

SEQ ID NO: 54898 - protein, 130 aa, Zea mays
  Coding DNA Sequence Number=SeqID_11523
MAQNLDGLRLDSVEGVDEDGFGGFTAAHDEVLHHHVLRSNRSWSGETMSGPRMGTQPDGSHLLGRSKEITHMVGGLEKAYLAAKSLLQVMGEKQSTVVVLEMAQQVFLTFILHKNSQCDDDSDSLLILGI

SEQ ID NO: 54899 - protein, 1176 aa, Zea mays
  Coding DNA Sequence Number=SeqID_11524
  Gene Ontology: Mol. function=ATPase activity; Cellular component =chromosome; Biological process=chromosome organization and biogenesis
  Homolog annotation: Hit_ID=Q8GU55; Match level="QueryCoverage=100%, HitCoverage=100%, E-value=0.0, Identity=82%"; Hit description=SMC2 protein
  Pfam annotation: Domain name=DUF869; Domain location=353-904; Score= -364.5; E_value=0.1; Accession=PF05911.2; Description=Plant protein of unknown function (DUF869)
  Pfam annotation: Domain name=SMC_N; Domain location=2-1166; Score =373.6; E_value=3.2e-109; Accession=PF02463.10; Description =RecFRecNSMC N terminal domain
  Pfam annotation: Domain name=SMC_hinge; Domain location=517-638; Score=114.3; E_value=3.8e-31; Accession=PF06470.4; Description=SMC proteins Flexible Hinge Domain
  Pfam module annotation: Pfam domain module=DUF869::SMC_N::SMC_hinge; Domain location=353-904::2-1166::517-638
MHIKEVTLEGFKSYAGRTVVPGFDPLFNAITGLNGSGKSNILDSICFVLGITDLRQVRAASLQELVYKQGQAGVTKATVSIVFDNSDRSRSPLGYEDSPEITVTRQIVVGGRNKYLINGHLAQPSRVQTLFHSVQLNVNNPHFLIMQGRITKVLNMKPPEILSMLEEAAGTRMYEMKKESALKTLEKKQNKVDEINKLLDVEILPALEKLRKERCQYMKWANGNAELDRLKRFCIAYDFVQAERVRDGALNDVKQIKTKIVELDETTENIKAAIQEMDNNISTLAAEKEAKVGGEMKVLSDKVDKLSHVLIKETSVMNNQEETLKSEEKGAEKILTNIEDIKRSILERDAAVKNVENEASDMKRRAEDLTKELDEKEKEYQGVLAGKSSANEKKCLEDQLRDAKAAVGDAESGLKQLATKIKHSEKELKEKKTLLVSKRDEAIAAENELKTRTKDLEGIKASMGSINYDEGQMEALQKDRSAELEIIQKLKDRVRNLSGELANVHFSYRDPERNFDRSKVKGVVARLIRIKDSSTATALEVAAGGRLFNVVVDTEETGKQLLKNGDLRSRVTIIPLNKIQTYMIPDRVQQTARRLVGPDNVTLALELVGYGEEVKNAVAFVFGSTFVCRNMDAAKEVAFNRQISSTSVTLEGDTYQPSGLLTGGSKGGRGNLLRKLDELAKAEADLSDHEKKLFVIEQQIGALLPLQKRHTELKSQFELKSYDLSLFQNRVEQNEHHKLGELVKKIEQELQESKQELTEKQVQHEKCVSTVSELEKTIKTYGTEREGKLKALEKRIKSIKSEMQSMSKQLKAYESDRERLIMEKDAVVGELATLEEQLTTSKAQITSLSETLEKQKDKVTSIKQDYDQAESELNVGRSKLKECDSQINRMAKEQQKLQQKLSDSNVERKKMENEVKRMEIEQKDCSSIVDKLVEKYNWIATEKQLFGKSGTDYDFESCEPHKAREELENLQAQQSSLEKRVNKKVMAMFEKAEDEYNDLMSKKNIIENDKAKIKKVIEELDEKKKETLKVTWLKVNKDFGSIFSTLLPGTMAKLDPPEGGTFLDGLEVRVAFGTVWKQSLSELSGGQRSLLALSLILALLLFKPAPLYILDEEVDAALDLSHTQNIGRMIKAHFPHSQFIVVSLKEGMFNNANVIFRTKFVDGVSTVTRTVPSKQR

SEQ ID NO: 54900 - protein, 242 aa, Zea mays
  Coding DNA Sequence Number=SeqID_11525
  Gene Ontology: Mol. function=small conjugating protein ligase activity; Cellular component=integral to membrane; Biological process=regulation of protein metabolic process
  Homolog annotation: Hit_ID=Q5NAX2; Match level="QueryCoverage=42%, HitCoverage=27%, E-value=3e-47, Identity=85%"; Hit description =Ubiquitin-conjugating enzyme-like
  Pfam annotation: Domain name=UQ_con; Domain location=106-225; Score= -23.8; E_value=0.0019; Accession=PF00179.17; Description=Ubiquitin -conjugating enzyme
MQVENASVLLLLAEIYKKSDNAVLGLPYALASQSFCKSFNLDLLEASATLTLAELWLALGSSHAKKALSLVYQSLPMILGHGELELRARAHVVLAKCHLSDLKFSAVANSLFSTCYKYNMQVENASVLLLLAEIHKKVYYHSGGLRLNPNLYESGKVCLSLLNTWWGKGCEKWGKSSSTMLQVLVSIQGLVLNDRPYFNEPGYKNSAETTGGERCSLAYNQTAFVRSCKTMLYSLRKPPMVN

SEQ ID NO: 54901 - protein, 296 aa, Zea mays
  Coding DNA Sequence Number=SeqID_11526
  Homolog annotation: Hit_ID=A2XFR6; Match level="QueryCoverage=34%, HitCoverage=28%, E-value=3e-11, Identity=38%"; Hit description =Putative uncharacterized protein
MVRTFQTTRVNTSYAPQPRQIPVYPVVVEEAPANLPPVRVENVINLEDSSEEQLPTPTPLAESLAFAAGSSTSASSAPAFQAPAPGGNDPDDSGDGDDEDDDDEDDGEDGHINEEADYAQQDHFMGIGPVVEHYTSMFETGHFPNLLQAVLHELGAYARPLYETRRVSEPPRACYYITRIHVRVMDAGDRGFRTLSAHESLIPLSTYAASVSDAARRTLWSLSHTYRQQLQNTRFRHLPQRLRGESQTNIVPGLQPWKPNCLGLDPPEAQVPVVEWLLPARGCAMESPDQSLGTNL

SEQ ID NO: 54902 - protein, 290 aa, Zea mays
  Coding DNA Sequence Number=SeqID_11527
  Gene Ontology: Mol. function=structural constituent of ribosome; Cellular component=intracellular; Biological process=translation
  Homolog annotation: Hit_ID=Q7XYD4; Match level="QueryCoverage=24%, HitCoverage=46%, E-value=6e-11, Identity=55%"; Hit description =Ubiquitin/ribosomal fusion protein
  Pfam annotation: Domain name=IQ; Domain location=117-137; Score=27.0; E_value=7.2e-05; Accession=PF00612.18; Description=IQ calmodulin -binding motif
  Pfam annotation: Domain name=IQ; Domain location=75-95; Score=25.0; E_ value=0.00028; Accession=PF00612.18; Description=IQ calmodulin -binding motif
  Pfam annotation: Domain name=Ribosomal_L40e; Domain location=235-289; Score=51.3; E_value=3.4e-12; Accession=PF01020.8; Description =Ribosomal L40e family
  Pfam module annotation: Pfam domain module=IQ::IQ::Ribosomal_L40e; Domain location=117-137::75-95::235-289
  Subcellular localization annotation: CTP_CleavageSite=27; ConfidenceScore=5.29e-01
MDRRSMTPGISSRLSSPPPAAHPSPPPAAATPSHPPSPTPDAFTRLEESFGRLAEKWDQFVVMFHRYKEKTEKELQAAVRLQAAARGFLARRQVQSLRGEKHLAVASRAIPWPSSHEQAVVRLQAAVRGFLVRRAVRKLHLLISSSLHQLAACSPNHQVSSILFEPPAEVEIWIQRPLTPSLCAQLRVEVVEGVFAKNTGQRDGCWIQNELSQFNICTMYTKGDTGAFVAPLQFALIAQLHYTGTKDEKEIHYKCKSSRCYARLHPRAVNCRKKKCGHSNQLRAKKKIKN

SEQ ID NO: 54903 - protein, 415 aa, Zea mays
  Coding DNA Sequence Number=SeqID_11528
  Gene Ontology: Mol. function=cation transmembrane transporter activity; Cellular component=membrane; Biological process=cation transport
  Homolog annotation: Hit_ID=A2XE47; Match level="QueryCoverage=98%, HitCoverage=99%, E-value=0.0, Identity=79%"; Hit description =Putative uncharacterized protein
  Pfam annotation: Domain name=Cation_efflux; Domain location=108-401; Score=190.0; E_value=6e-54; Accession=PF01545.12; Description=Cation efflux family
MDANGCGENDDARAPLLAGPGRRRNSVASMRGEFVSRLPKKVLDAVDPERPSHVDFSRSKGLLEGEREYYEKQFATLRSFEEVDSLEESNEINEDEELAEQIQSEFAMKISNYANIVLLALKVYATIKSGSIAIAASTLDSLLDLMAGGILWFTHLSMKSINVYKYPIGKLRVQPVGIIIFAAVMATLGFQVFIQAVEKLVVNEAPDKLNQVQLLWLYSIMIFATIVKLGLWLYCRTSGNKIVRAYAKDHYFDVVTNVVGLAAAVLGDRFYWWIDPIGAIVLAVYTISNWSGTVWENAVSLVGESAPPEMLQKLTYLAIRHHPQIKRVDTVRAYTFGVLYFVEVVLNEEEFLTLSKVDIELPEDLPLKEAHAIGESLQIKIEELPEVERAFVHLDFECDHKPEHSILNKLPSSQP

SEQ ID NO: 54904 - protein, 45 aa, Zea mays
  Coding DNA Sequence Number=SeqID_11529
MQKQFTDDRYYICGRLAKSPEYFEDLLCGLAYFQEYRLRTSGRPL

SEQ ID NO: 54905 - protein, 62 aa, Zea mays
  Coding DNA Sequence Number=SeqID_11530
MDESEKGDRPPGTSNCITFESQRIATLQSGRGRGRRANASWESESVLDPRYIVEAGAGTKSD

SEQ ID NO: 54906 - protein, 116 aa, Zea mays
  Coding DNA Sequence Number=SeqID_11531
MRALEGQQLLEDDPTVVYLTAYLLTLDAQYDFLARHHPQARVAALESREVIAVEALKQAKVEHIQELMEAYLVTHNQRRALRIQEPASSNPVQPIRAEDPQILEGHPVSIRGEMKT

SEQ ID NO: 54907 - protein, 358 aa, Zea mays
  Coding DNA Sequence Number=SeqID_11532
  Subcellular localization annotation: CTP_CleavageSite=56; ConfidenceScore=5.26e-01
MQAACNRAKWTRFSDSQRASMEAPAHASRNRRAGCCMQATAPPLAPPSRLFGCGTNAATRGDPAHDSAAPAWRDGQCGRKWAGSNDGGRRAGAAEKRATLRLRRNNRAKKGTGKGDTPKRILPCEGTGLRAPPTDQRFEGWPSEGFNSRLRSRGPYTHYWLEVRRPAPRRAPRPPQATRAPRPLLIRGSKAGPRRVHSRLRRRARDDQGYVRYITKARAALPRARTRAKTRKTANSAPPDPGLGLGLRPGRRRTPLRPTQGSDSGSAPEDDKLRFARPQGSDSALASAERPPPRPTQGLGLGLGNGRQTRPQLWRSPHVARPRARVRHVNRERHHHPTPSRLGPQRTRPVSHLASSAR

SEQ ID NO: 54908 - protein, 199 aa, Zea mays
  Coding DNA Sequence Number=SeqID_11533
MEVLDATRPNHRVSGAAGKSDLWGGRTCGRSAERHRSRGEEGEKLQGKAPRRVHCSSSDQRRSAPWLEQRGLLSLQPPWLGVSQASPRSGASWALPEPTGSFSAGKKMPGELRFGAAWWGRRLIELDGGYMNLAADKCTGTMACGLASRAGAWREGARRGKSREGGAHVWVPREKSAMEADVEVEAGTSGSGMGERAPS

SEQ ID NO: 54909 - protein, 56 aa, Zea mays
  Coding DNA Sequence Number=SeqID_11534
MAGGGRRAGCVREKLAARKNASALRNRGATLKGGRLQPLAQRARGRAPGPGVGVRL

SEQ ID NO: 54910 - protein, 100 aa, Zea mays
  Coding DNA Sequence Number=SeqID_11535
MELCYGSREHARDSRRIAELSAEVDHLQRENVEWDRAIHWDLHPNVPPEVAAMGAGASGAAGGGPYGVLDLFGAPPSMNIVDDRSLEASSGAGAAKDVDD

SEQ ID NO: 54911 - protein, 59 aa, Zea mays
  Coding DNA Sequence Number=SeqID_11536
MEQKFGLIRCIETLLGAFVFRRNLWTWDKVIHVMKGAVQEKDEPMPKLPMEKLQLGSGK

SEQ ID NO: 54912 - protein, 187 aa, Zea mays
  Coding DNA Sequence Number=SeqID_11537
MKTEVGVKDGEKAWASMFLKLLAMELDTMASWRPTESSARGKELDVHRETETELSSTSDKTLRMSRPWEKPWRGHDQRAEGRDGLRIEGEEARPARLAGGAGDCAGGCARRGSAAGNREQRLMLHDLNGEEARNRLELTATRESTFRPSTMVDDIHGEQSTASRELSRQQREPERDDLGAHQGSSAG

SEQ ID NO: 54913 - protein, 262 aa, Zea mays
  Coding DNA Sequence Number=SeqID_11538
MNKRPAFKVPLQTELRFRPRGTDAATGRLSFASPLKGHELDIKAKEPEAGPLNGGEASPGCHHVSTDGGVCLSTNAAPANAGRSKAHRQDASSAELEDGFHHQKLEEEVASRLVREGLVVTALDDHRRGDAAGLPDENPRSRTMAESRRGLSLLQHAPRSSPYGAGAGSHASCKMAQSRRSQTAARGGQEQRSRRQPSLRPIQGQRENPLSRREDGAPVLRSSNGSCTRNGRLVNHSPHRINSAAGQAAPQAGEASDASPSP

SEQ ID NO: 54914 - protein, 289 aa, Zea mays
  Coding DNA Sequence Number=SeqID_11539
MTSHRSSDEGNAQSHTDGLAREGFPRILWEVLHGAGYTTPPKYAVQLFEKHRVPRCRVRMTLEPQPMQPGWRSLDSESFGYRAEDTMEAIALHGLTTFCGFHPLELSTHPIGLFPAEKEDDPMWKDRVEHAKDIWAIYPGQTAHLTVRCMNALYRLQVMRGEAMSHLMALLEATKITLDNREELVVDLSTEMVEKDLQVEQLSNEIQELEELVGTRENTIEVLEDQLINTQQQLAEANQHLDMHHQEIQDMEANEDVDIEGGEEPASSLDTAGSGRPPSPKSSVASFAH

SEQ ID NO: 54915 - protein, 277 aa, Zea mays
  Coding DNA Sequence Number=SeqID_11540
MESHDLRAEWESRLVGGDEINGFGYDYGAGKWYSFRLERVVSIATTAQAKMKLWKETSRSSKTTTSSRRGLAATPSRLPVKAAVIYVSFSHFDLLHTARKSVIPFLPSRLTERPLRRPVAGQSSHLERLHHRLHEEQERRRQEQQGSSFSLQQEIESVRSCSPVLPLEAPPAPPLGAPASGVAAGGDPDDGGGDDSSSHDIDFSANHEPEGWVARPITRDAARGCHFHDALDTLLRRALNRHTWSIEYRCVVYQHSRGVYPDRWEATCLVRRPENSL

SEQ ID NO: 54916 - protein, 42 aa, Zea mays
  Coding DNA Sequence Number=SeqID_11541
MGSTSEKMYLCQDYGEATLAQNKNFHPHNTKNYCGYRSWNYH

SEQ ID NO: 54917 - protein, 75 aa, Zea mays
  Coding DNA Sequence Number=SeqID_11542
MARGVHGEEIEDRGHLCNLSVTQRNKNEEEIEVTEEKTPPPSESQAGNCFYFDICGSEPDSPTNEGKPRCICHLP

SEQ ID NO: 54918 - protein, 55 aa, Zea mays
  Coding DNA Sequence Number=SeqID_11543
MASPTISDLLLAIPDSPVSAWSPGVASIEEGLMVKSAAKSVFILRERNVWAMLQR

SEQ ID NO: 54919 - protein, 279 aa, Zea mays
  Coding DNA Sequence Number=SeqID_11544
MGRSLSGLRQAMSRIRLHLVGYMVTIFTVVCEGYLGIEPIRTYGSTYSRQSCSTFLPIVVATFHRRKVLPLIERAAGLLNHPTSSPKGRSRLDSVPVGRREEEERCGHETSPRRIGEAPQGAGESGLAVGTLSHHIDDDGDDEGMEVRLGFSPEVELWSESASTSPYGGADAPVQGAKASLSEALASAETGPVHAVAEEAVAMEEKVNAPLQVPVMGSRLAVVPRIKRKAHEPTFTATKTVKSDVGTSAGAVIRSHAWLDASQEAIQRRAEAVRLALDG

SEQ ID NO: 54920 - protein, 66 aa, Zea mays
  Coding DNA Sequence Number=SeqID_11545
MEAQGVDGATVADSGCARKRSSERGPDAAGRERAHRRVSRAADRFSIQIKFQIQTNSNICNNSKNI

SEQ ID NO: 54921 - protein, 142 aa, Zea mays
  Coding DNA Sequence Number=SeqID_11546
  Subcellular localization annotation: CTP_CleavageSite=30; ConfidenceScore=5.15e-01
MQDAARQALSQYCSLFSGVADGLDLKYYPRRSTGSTGGVIVSPVGEGNPRLSSMVNLATVLNTELDHTLDKLGKMSENRRRGARRAQPEQPAPQEEAAPQQHLPPPPSMTIEQMFLMQTQAVQAIGQTLAAMQQVQQQPPPP

SEQ ID NO: 54922 - protein, 428 aa, Zea mays
  Coding DNA Sequence Number=SeqID_11547
  Gene Ontology: Mol. function=fructose-bisphosphate aldolase activity; Cellular component=chloroplast; Biological process=metabolic process
  Homolog annotation: Hit_ID=A2ZNM7; Match level="QueryCoverage=74%, HitCoverage=19%, E-value=1e-173, Identity=96%"; Hit description =Fructose-bisphosphate aldolase
  Pfam annotation: Domain name=Glycolytic; Domain location=99-428; Score=759.2; E_value=2.6e-225; Accession=PF00274.10; Description =Fructose-bisphosphate aldolase class-I
  Subcellular localization annotation: CTP_CleavageSite=32; ConfidenceScore=5.29e-01
MATAKLNSPATSLVAGGRTRRSAPARCTTVIRAAAGSYSDELISTAVEETFSWCLFVAIHRIYHVQTLQEVLKREFGTFSVYCGYVRAYAILTVMLLYLCLLIKSVASPGRGILAIDESNATCGKRLSSIGLDNTEVNRQAYRQLLLTTAGLGEYISGAILFEETLYQSTTDGKKFVDCLKDQNIMPGIKVDKGLVPLPGSNNESWCQGLDGLASRRTVVSIPCGPSALAVKEAAWGLARYAAIAQDNGLVPIVEPEILLDGDHGIEGALEVAEKVWSEVFFYLAENNVLFEGILLKPSMVTPGAEHKEKASPEAIAKYTLTMLRRRVPPAVPGIMFLSGGQSEVEATLNLNAMNQSLNPWHVSFSYARALQNSVLKTWQGRPENVEAAQKALLVRAKANSLAQLGRYTGEGESDDAKKGMFQKGYTY

SEQ ID NO: 54923 - protein, 428 aa, Zea mays
  Coding DNA Sequence Number=SeqID_11548
  Homolog annotation: Hit_ID=Q0Q610; Match level="QueryCoverage=45%, HitCoverage=66%, E-value=1e-07, Identity=31%"; Hit description =Hypothetical accessory gland protein
MAGEIWASCWRDVVAIGGAAEPDGGTAVGAVESLLTLSCCLAVAEPEPGGRARRKSSGRGQGGVRALGSGEAEFAVFRVLARVRALGSGGAEFAVFRVLARVRALGSGGAEFAVFRVLARVRALGSGGAEFAVFRVLARVRALGSGGAEFAVFRVLARVRALGSGGAEFAVFRVLARVRALGSGGAEFAVFRVLARVRALGSGGAEFAVFRVLARVRALGSGGAEFAVFRVLARVRALGSGGAEFAVAPLARPNCLSDSLCRVALQSEWRRAALSFCQTGQWSGGVTAVTSALPGARVRIEVSGHLCVKCPCNLVSRCGDLVKVASERSQGLGQAGDVSAIKRGPRARRKSLELYADGGYQLRIRRLEESLIIEKPYLDSHNQHTLESLFFSRVRKRQIFVASALRWCLKKNIRNEVREERILHIEFL

SEQ ID NO: 54924 - protein, 90 aa, Zea mays
  Coding DNA Sequence Number=SeqID_11549
MATCIDLSYGRAISTALAVEAKYAGSGKSKCYGGDRPNQGPEKRQRYLRTRIREGKAQKIRRLTQRRSCEAGKLRHVRRKGNRLEDEKAI

SEQ ID NO: 54925 - protein, 148 aa, Zea mays
  Coding DNA Sequence Number=SeqID_11550
MGKSKKGSGSSPCSGDKRKREPTPPSEEFGDSEYSEEEFSSESEGSPAPVSPPASSDDSDDSQGIAAKVWTYIRAVQRSGLEGSDESEYSSDEEDSSDSSEEDSDGDGGDGGDDGGDGDGGGDSGSGGDGGSKGGNGSGSKGSNKASG

SEQ ID NO: 54926 - protein, 97 aa, Zea mays
  Coding DNA Sequence Number=SeqID_11551
MGFALEEVIFGILRFIANLLEKLRLILDLLAVLAPHNQVCKDIIYTLANLGIFGLGSEPQYEKAQKNTKVGAEPKLCAGELRSNGGKGNRLKDEKPD

SEQ ID NO: 54927 - protein, 205 aa, Zea mays
  Coding DNA Sequence Number=SeqID_11552
MGCTCVAFFLLLLEEYDLVGVGALQSSLGFKDFHHAARLQSPAGGDSGAASGAASYRWAERGCPFAARVLVAPCAGRPRLGPPCAVGCTGGSHNTSHAAREVLVFWDSLGEDGSEDLPVRIGASAVRRCGVGGQVAAVVGAEVVVTIGEASSAKAVASADETVSATCAPDLRLFGFNGWFSSLVRGHERGPFRSSVCPEAIAAAA

SEQ ID NO: 54928 - protein, 137 aa, Zea mays
  Coding DNA Sequence Number=SeqID_11553
MTLGTSVTWPRLGLRSRGTLGHFRDQRERFVMESHRREAPSPLTLSNGSGSSKSPGASGATGSSASLDLRPRPQPQPRPWEKVSASPDPRPRPQPRPREESHPRPTSASASGEGSRHFSDGHVSTCTGLKALLRQPR

SEQ ID NO: 54929 - protein, 125 aa, Zea mays
  Coding DNA Sequence Number=SeqID_11554
MARRGTGCRRWHRLKGLRGGQAGRQRRLPRSGYYANHPGEADNKSQSTTEFGLRRNRKLHLARPQAPASGGGLRLARPPDSASTSVSGGIASSPDPGLDLKRSLRLARPWAQTDRATGDTSLPYP

SEQ ID NO: 54930 - protein, 272 aa, Zea mays
  Coding DNA Sequence Number=SeqID_11555
  Gene Ontology: Mol. function=oxidoreductase activity; Biological process=electron transport
  Homolog annotation: Hit_ID=A2YZA6; Match level="QueryCoverage=93%, HitCoverage=70%, E-value=1e-101, Identity=69%"; Hit description =Putative uncharacterized protein
MGRRPSSHELGPHACRGGGRCAVELSLKMLKAGKHVIQATTEAETALSIYHSFQNLFPHKPIWAVGENYRFEPAFIESSKLINDIGDMMHIQVIIEGSMNSSNPYFNSTWRRNFVGGFILDMGVHFIAGLRMMFDGFMQPTGKWMRWCLCVCRQFKITKVFLSVLVITQILWRVDGTKGTIQVERGVDSGKHGYQVLFSGENGQCQKTFYPFCGVNEELKTFVHDMLEAGKDGDHKAAPRGSYVEGARDVAVLEAMLESSAKQGAPVQVKRF

SEQ ID NO: 54931 - protein, 154 aa, Zea mays
  Coding DNA Sequence Number=SeqID_11556
MELLSKSYPTKEKTLKGMLVKGVKSNTKHSKTFFEKQGFKEGNQVQGSAKIIKIYYLSLEYNFPSRNSENLGFPESVKEFKGHENGALFYPAHENREGHEHLIAFPMIGGLSVRIGDSGSTVVAGNFNGDARRSDEEKVTGAVASCPQSWRWLR

SEQ ID NO: 54932 - protein, 156 aa, Zea mays
  Coding DNA Sequence Number=SeqID_11557
MLDIFKEMVSLRVFERIFSELLYCEHWTTHYVFLQDYKFILFFRCSKLSMIRKYLLFLCTKSKLQFEMMMCLCEVNADNNTIGCNMGMSALQKAVAAVVHDVNAEGWDRGLEGLRRPRSKWSSTSSTEILGASTAPVNIDKWIKQQAIWIKSRGQS

SEQ ID NO: 54933 - protein, 151 aa, Zea mays
  Coding DNA Sequence Number=SeqID_11558
MGKKRKREPTPPSEDFGDSEYSEEEFSSESERSPAPVSPPASSDDSDDSRGLAAEVWSYIRAVERSGLEGSDESEYSSEEEDSDDGGEGGDEDDDDDGDDDDDDDDDDDDDDDGGSGGGCTRGGGDRGGTRGGGGGGGTKSGGGGRGRASG

SEQ ID NO: 54934 - protein, 95 aa, Zea mays
  Coding DNA Sequence Number=SeqID_11559
MAGFAEFGPQNSAAAVPEGTGGGTWHDRGGCVKAKQLREKDVAVGSIIQELVQFALSGVDRLYVNRGFSALTSSSLDCSSLARDPQRFCTSTVFL

SEQ ID NO: 54935 - protein, 120 aa, Zea mays
  Coding DNA Sequence Number=SeqID_11560
MEAGRSCKDMCWAVACLGPVGGRYASDIWSVSNSGLRGRNLPRIADVGAGSSSQPQRTYVRTRKCLRNAAAQDIGEEDSDDQEDGAAAAQVEQQQTQEATGDMDEDGAAADAFCLDADLL

SEQ ID NO: 54936 - protein, 197 aa, Zea mays
  Coding DNA Sequence Number=SeqID_11561
  Homolog annotation: Hit_ID=Q6ZDM1; Match level="QueryCoverage=28%, HitCoverage=16%, E-value=3e-18, Identity=71%"; Hit description =Putative uncharacterized protein P0025F03.21
MEENRQCIHVRSLRFSGGKEKQNARLPKIWEKALRPLKIPFTLHAIGDRRRAAHDVVPLRTQGDGKQASTVPLMFGSVAMEKVSCHIVHWIFKRTGSHIFLTDDDEGQPPLLQGMVEDHDDLYFISWKIKPHQIIISSNDVSESQFNLVLNIELQQIIDSDRVTAARNHCLKREREVLNQSKGLEELKVEDKRRYMY

SEQ ID NO: 54937 - protein, 117 aa, Zea mays
  Coding DNA Sequence Number=SeqID_11562
MAHQTVRCTPDMSGAPTTSSVPLESDRWSSDLWATLDVRWRTGQLLFIVRCASMGKPDVCARCGTFIASAARVPLEIPEGDEFELESPGAPDTVRWHTGQSGAPRPEGLRLALRPFC

SEQ ID NO: 54938 - protein, 791 aa, Zea mays
  Coding DNA Sequence Number=SeqID_11563
  Homolog annotation: Hit_ID=Q6QP51; Match level="QueryCoverage=13%, HitCoverage=37%, E-value=1e-11, Identity=44%"; Hit description =Putative growth-regulating factor 1
MAVAGGRAQRSRRQPGSRPILGQQESLLSRHEDDAPVTRSSNGSRTRNGRPANHSPRRINSAAGQAAPLTGGASDASPSPDRERGIPRKGSFSAKEPGSEPPTTDQGFEGWPSEGFNSRLRSRGPDTHYWSGVRRPAPQRVPWPPQATRAPRPLLIRGSKAGPRRVHSRLRHRARDDQGYVRYITEARAALPSSPETPCSVPIEGNMAHSPLLLAERRRRGKDSAACATPTAVPLDRVSLTGRQALPKAPRRTPLRPTPGLGLGLRPGRRRTPLRPTPGLGLGLKPGRRRTPLRPTPGLRLGLRPGRRRNSASPDPRARTRAKTRKTTKLRLARPQGSDSALASAERLPPRPTPWLGLGLGNRRQTRLRRSPHVTLPRAQTRHVNRKRHHHPTPNRLGSRRTRPASHPASSAGWAMMTPHKLYDDGGPQLSYGSRTTSAGTRPLQQLSLRQAPTHLRQPRHHASKHSATPPIVHLDPLLTTIKGRTRAFLEKVGRAGPRTGQALSWGRSLPSPAWTLVTPLLQAHLTWARDEHEGRGTSTSLTLDSGHLASPPFALAHALDPSGLGHAAHSLVGLGTPLSRNADRFLPDRHRSKINQGPPYTDHSPTALAPFGGFYAKDTKTENSHSVDCGFIWNKTRGSLEKSPGRRDAQPGAGCAPYRQTCPWHRPPRESASERKTKLTKVSADPADQDWSDVAGADRRRRHQRVIPDAQPGAGRAPYRQTCPWHRPPRESASERKTKLTKVSADPADQDWSDVAGADRRRRHQRVIPGEEEAEGADLQEFPDFDEFED

SEQ ID NO: 54939 - protein, 99 aa, Zea mays
  Coding DNA Sequence Number=SeqID_11564
  Pfam annotation: Domain name=zf-BED; Domain location=30-66; Score =16.5; E_value=0.0056; Accession=PF02892.6; Description=BED zinc finger
MTSMTWEMLLLPCSVSIPLLIPGRTGKRGSAVWDDFTEVTENRNARLSANSNAGTGHLLRHQKSCKKKSDHAAVVQTRLALNPDGVPTGNMILKWLELS

SEQ ID NO: 54940 - protein, 404 aa, Zea mays
  Coding DNA Sequence Number=SeqID_11565
  Gene Ontology: Cellular component=membrane; Biological process=amino acid transport
  Homolog annotation: Hit_ID=A2YJJ9; Match level="QueryCoverage=88%, HitCoverage=70%, E-value=1e-148, Identity=77%"; Hit description =Putative uncharacterized protein
  Pfam annotation: Domain name=Trp_Tyr_perm; Domain location=1-404; Score=220.3; E_value=4.6e-63; Accession=PF03222.4; Description =Tryptophantyrosine permease family
MLGLPSATIRSGQAPSAVCILLSWAYVVSSIVLVAELSFAAMARDGVDEVSFTGLASSTLGAGPGAVVAVVYAALSFSLLVACVAGIGSLVSQLFPGVSPVLANALFPCFAGVLIAFFPFKAVDGANRALCGLMLVSITALVVTGVSVGRTSLLGSLSYACWSPGAILPAIPVTVLTLGFHVITPFICKIVGDSVYDARKAILIGGAVPLAMVLSWNAVILGLASAGGNAGFDDPIKLLLSVNPAALPAVRGFAFAALATSLIGYAVSFPKQLADTVELILQRFSQKQGSMHQANGSGGYGRNGAILTWMVLIIPIFIASFFSAVFSKALDFAGVYANCFLFGILPPVMAWIHRSQKKRSKISSCVKGDIDLIRSPDSCEDVLPGGNAALLILFAVAVVLAIWH

SEQ ID NO: 54941 - protein, 85 aa, Zea mays
  Coding DNA Sequence Number=SeqID_11566
MAARFQARGGGWGGRNPKSLHKHKINCHLPCKHLHELKMRIRLKMMEMKMDRMSHLKRRTMIKGEMIIIKTRKMIKKLRVKDRHT

SEQ ID NO: 54942 - protein, 92 aa, Zea mays
  Coding DNA Sequence Number=SeqID_11567
MAIISKIWSQSALEHDLSLRCLVLDAVPRRQSAHWRSPAHTPSAYCYLADAEYVLIPEQGAIHEKDQEPAPEPAIEDLPAAPAIEGKPRFYA

SEQ ID NO: 54943 - protein, 53 aa, Zea mays
  Coding DNA Sequence Number=SeqID_11568
MANGYHQISAVGLDVSAPGMLQDMVDGVTWPTTLPPGWTVEWDAALAGEEQEE

SEQ ID NO: 54944 - protein, 53 aa, Zea mays
  Coding DNA Sequence Number=SeqID_11569
MAMVNTRKGGGIDLPPNRHTRRIYKQPAEMDPPPPPPPVGVNPLVVAQMRMMQ

SEQ ID NO: 54945 - protein, 116 aa, Zea mays
  Coding DNA Sequence Number=SeqID_11570
  Subcellular localization annotation: CTP_CleavageSite=38; ConfidenceScore=5.50e-01
MARACAYKAYSGVDHTLPRTLKPHRSPTHRRLPVRGVFAATRTPAAVDRPAQPFPTPFDPRRRVKKNRKDCNLVDGEYVLVPEQGDAQEVAPDPAPEPAPEDLPATALEGKPWFYA

SEQ ID NO: 54946 - protein, 93 aa, Zea mays
  Coding DNA Sequence Number=SeqID_11571
  Subcellular localization annotation: CTP_CleavageSite=40; ConfidenceScore=5.46e-01
MVQWITRSTHSGGVVNSGDRGLASPAKQTSIPRSGSFTEVCSLVSEGQTGLGKVGLASLRRQGLGWPRTRRARANDGCGSWVMKDYRLDYMWG

SEQ ID NO: 54947 - protein, 146 aa, Zea mays
  Coding DNA Sequence Number=SeqID_11572
MKGPCTLTCCTLLCASFFCFLLAGSALEPPVIGSTSFVAEGATTWLLNESISSIVEKVFLLKGPSTTKQTPKSALSHYCSILGGVVDGLDLRYYSHCRSGTTGGVVVSPVGMDNPRLSSTVNLAVVLNTELDHALDELSSAHAEVS

SEQ ID NO: 54948 - protein, 142 aa, Zea mays
  Coding DNA Sequence Number=SeqID_11573
MKLFERGIELCLAGEASSRSPDFTQPLVNVNRAPRPGALTADEFTRLRTWNRPIPATTAVEPYLVVIARTSRSQPRPPPDLPHRRIHVSYSLHSIDCNLADGEYILVLEQGVAEEVAPDPALEPAPEDLPAPALEGKPRFYA

SEQ ID NO: 54949 - protein, 238 aa, Zea mays
  Coding DNA Sequence Number=SeqID_11574
  Homolog annotation: Hit_ID=Q8S474; Match level="QueryCoverage=25%, HitCoverage=9%, E-value=8e-08, Identity=50%"; Hit description =Putative pol protein
MDLDPDVEAAEHELEDHNERLDELSFFGTGTSTGSNANVSIDVDATPVTASSSPTATGGSTAHANRPRKRLATSTIWADFEEVTGVDEKGCLRSNDDDLQQIWLRSYPILRIGSCQNEDGAKGSHLANKKTKYGVQQREQGITEGTSGLAHRTVRVRCSKERVSQELASFGNLLRYNSPDMSGGPRSQKLQRSEPNGLVTWLAHRTLSATSPGRWVPTVGASDFWARLDVRRRTGHAL

SEQ ID NO: 54950 - protein, 84 aa, Zea mays
  Coding DNA Sequence Number=SeqID_11575
  Gene Ontology: Mol. function=translation initiation factor activity; Cellular component=cytoplasm; Biological process=regulation of translation
  Homolog annotation: Hit_ID=P48600; Match level="QueryCoverage=52%, HitCoverage=21%, E-value=4e-20, Identity=93%"; Hit description =Eukaryotic translation initiation factor 4E-2 (eIF4E-2) (eIF-4E-2) (mRNA cap-binding ...
  Homolog annotation: Hit description=protein) (eIF-(iso)4F 25 kDa subunit) (eIF-(iso)4F p28 subunit)
  Pfam annotation: Domain name=IF4E; Domain location=6-83; Score=-95.9; E_value=0.00078; Accession=PF01652.9; Description=Eukaryotic initiation factor 4E
MAEVEAPAAAVAAATPEVATVTEGGAATEAKGPHKLHRQWTFWYDIQSKPKPGAAWGTSLKKAYTFDTVEEFWGSCLYGRYCSR

SEQ ID NO: 54951 - protein, 308 aa, Zea mays
  Coding DNA Sequence Number=SeqID_11576
MYLQHTFILGKRVPRDIAASAGRPHACGARFCPHSSAILPNAQISSPRRTPPPHPPPHAIRAAIKGSPTNNGRLPLLRDPPSAQIPSPRRHPTTVQPEPEPPAPAHHKSRTPQPSSVTEPPFTPSHSCYTTAAADGAPHPTASATCASPPRPVGLPAGSVKSTPTFPALWFHEVHCAPSLEDASRVPPPTRGDRWCATAPVRPDPDPPQRVWLFIASTRSGVSTTSFIEGRLWSSPVRQPSVSCVNTCLELYWPLNHGSMSRASLRRSARYGFAQSARLSCPLGRFESSARCPNSISSITTPTWWFLS

SEQ ID NO: 54952 - protein, 119 aa, Zea mays
  Coding DNA Sequence Number=SeqID_11577
MSPTTWRIEAYSNPAVYNRLSEYTIMPQEVHELDGGEDDDGAGDGATGSLGRSAEDGRDVPVHAEPWSCTGFCSTTSIVPSSWPYSVPYSWTTCGIQQPSWIVQPIAEPVQPPTSLMFF

SEQ ID NO: 54953 - protein, 99 aa, Zea mays
  Coding DNA Sequence Number=SeqID_11578
MVTGQSSHLERLHRCLHEEQERRCQEQEQQDSSPRLSRRGVADDLDLKYYPRRSTGSAGGVIVSPIGDGNPRLNNMVNLVVVLNTELDHALDELGKVWT

SEQ ID NO: 54954 - protein, 287 aa, Zea mays
  Coding DNA Sequence Number=SeqID_11579
MAAQGAGRVISSSLAKSLGLRKPKREAGSGAKNHHQTLSQAPSLPTDQRFEGWPPEGFDSRLRSRGPYTHYWSERERSCNGIPSEGGIEPSDPVARGPGLADPPQRLGGCSRKPGSGRTVDSVNIPARELGTRPYTWATASSHEGTTRPAEALREALRPRRSETTPLRPWGLHPAGALARTHRNKMQPRKAGPLAKKCDESLQASASTPFEARGLLSGTIIRGTLKTPNSQLVTPISIKLLRPDGARTRAKSRKMANSAPPDPGLGLGLSPGRRRTPLRPTQGSDSG

SEQ ID NO: 54955 - protein, 87 aa, Zea mays
  Coding DNA Sequence Number=SeqID_11580
  Homolog annotation: Hit_ID=Q8SA97; Match level="QueryCoverage=51%, HitCoverage=9%, E-value=4e-07, Identity=60%"; Hit description =Ornithine carbamoyltransferase
MAPPVDVAGPRPRLGDVEAPPRVEVESVFRGRGRVRAPRSGEAEARWLRPGRSSSSGVGRSGVRRLLGLSPSPSPGSGGAEFVVFWV

SEQ ID NO: 54956 - protein, 317 aa, Zea mays
  Coding DNA Sequence Number=SeqID_11581
  Gene Ontology: Mol. function=zinc ion binding; Cellular component =peroxisomal membrane; Biological process=peroxisome organization and biogenesis
  Homolog annotation: Hit_ID=Q9AV73; Match level="QueryCoverage=42%, HitCoverage=36%, E-value=8e-52, Identity=76%"; Hit description =Putative peroxin
  Pfam annotation: Domain name=Pex2_Pex12; Domain location=1-207; Score= 35.5; E_value=1.9e-07; Accession=PF04757.5; Description=Pex2  Pex12 amino terminal region
MGAPENLAPCVTPTDRPDGSFSESLYGLRRRPVKVAVKRKSPGTESNDKVYGSALRKRQKILSVVFLVVLPYFKSKLQSIYNKEREARLQATLWGQDDVRFDEVDFVLDQEQTSQAQTEPTTGEMSNLTRFKKNFASLIGVCYPWIHATNEGWPSVSANRVSPKNRPWAKKAAIFPNPMFHTSTSVTTDPCTTPSSSKKQKWFYKTRSLVVAWQTPCKFLVKSPPSALGSKLRIHGKALPARPAAHESAGITCKNPSLLVLAIKVDDNPDLPCLRDCLYWLQAVRSHDPLILRDTQLKILDCATSTALQAGKSNVVH

SEQ ID NO: 54957 - protein, 130 aa, Zea mays
  Coding DNA Sequence Number=SeqID_11582
  Subcellular localization annotation: CTP_CleavageSite=88; ConfidenceScore=5.66e-01
MGSSFFSAGKSPKGVHHHLQGMVATKSCQSLNGCRFSGVVCPESNRLGVKTTPTRLKGMSLQSQPDSATRYPMLLIQLLRVQTGRRVPAEYKGLSSLISCEKQTIRIEFLSLQGLTALAYNAPLAPVAAV

SEQ ID NO: 54958 - protein, 151 aa, Zea mays
  Coding DNA Sequence Number=SeqID_11583
  Homolog annotation: Hit_ID=Q6JAD6; Match level="QueryCoverage=70%, HitCoverage=15%, E-value=2e-29, Identity=61%"; Hit description =Putative uncharacterized protein
IEDTVLDGLRARRQLPYAHYLCYIFAQLIRPPQFQGTLEASRLLFSSYRPAPEDPVPAPAPVIDTQAEDTAFHQFETHGAAVPDNDDDDDFGIPPPRSHDHEAGISSAAAAAPPAVDPALAAILQTLTQQQALMASEQARLAAEQARPAAV

SEQ ID NO: 54959 - protein, 103 aa, Zea mays
  Coding DNA Sequence Number=SeqID_11584
MAKMFQYMESLGTAHGFAPPPSLFPAVDPAQFHTHVSIKILVFHDIYSSGTIWGGIQQPSWVAQPIAALVQLSTSCVRTIVGRCACGRVDLGWTKTCITGERQ

SEQ ID NO: 54960 - protein, 266 aa, Zea mays
  Coding DNA Sequence Number=SeqID_11585
  Gene Ontology: Mol. function=nucleotide binding; Cellular component =Golgi apparatus; Biological process=regulation of transcription, DNA- dependent
  Homolog annotation: Hit_ID=Q5VNG4; Match level="QueryCoverage=100%, HitCoverage=54%, E-value=1e-124, Identity=83%"; Hit description =Putative auxin-independent growth promoter
  Pfam annotation: Domain name=DUF246; Domain location=103-265; Score =77.2; E_value=5.2e-20; Accession=PF03138.5; Description=Plant protein family
  Subcellular localization annotation: CTP_CleavageSite=22; ConfidenceScore=5.33e-01
MGWKVASGCKAAGDKLRLPTSSAAARSRMKLWLVRATTTVLLWTCVVQLTAVGDTWGPRVLKGWPSCLTPREEEAAAARPRPLVVDRAALPPKRIYRNNGYLMVSCNGGLNQMRAAICDMVVIARYLNVTLVVPELDKTSFWNDPSEFQDIFDVEHFITSLRGEVRILRELPPRMKRRVELGMFHSMPPISWSDISYYQNQILPLIRKYKVVHLNRTDARLANNGLPMETQKLRCRVNYASLKFTPQIEELGKRVIRILRQNGPFL

SEQ ID NO: 54961 - protein, 368 aa, Zea mays
  Coding DNA Sequence Number=SeqID_11586
MQAACNCIKGMHLFDFDASSMEAQAHTSGRRKQQSNRLQAHVPSWDSERALSHGVKTTRPCSVPRTARACTTAAPRTTRPVALTPRQGRRHLWQAKRATLHLCQDDRVKKGIGKGDTPKGILLREGSGPRALLLIRDSKAGPSEGFDSRLRALGLRAHYWSEVRRLAPRKGSTATSGHSGSAPTTDQGFEGWPQRERFCNGIPSEGGIEPSDPIKRDRENSAACAAPTAVPPVRVRLTAAKSGLRRHRKLRLARPQGSDSTSTSDDGLRLARPQSMDSTSTLDDGFRLARPQGSDSTSTSDDGLRLARPQGSDSASTSEEHVGQLGAGLHDRIAPSCPTCSSKVEAESELWGRARRRPSFEVEAESDP

SEQ ID NO: 54962 - protein, 287 aa, Zea mays
  Coding DNA Sequence Number=SeqID_11587
MATPRTTRPVALTPRQGRQHLWQTKRATLHLRHDDHVKKGTGKGDTLKGILLREGSGPRALLLIRGSKAGPSEGFDSRLRALGLRAHYWSEVRRLAPRKGSTSASGHSGSAPTTDQGFEGWPPKGSTAASEHAERGMTLGSDINRGAAAPSASIPPSVESNPASDDDMVGGSPPRRKTSAPRLVHRRQGLLQKPGPSRRLDQPPRSLSQLSPEDTNPAHGLGNPTPALVPLVDDPTRFQPPLLHLLGPESHLLLGRRSFLFEPIPPLSMLTPLPPAPAHRRAAEVFL

SEQ ID NO: 54963 - protein, 476 aa, Zea mays
  Coding DNA Sequence Number=SeqID_11588
MHRVLPPSEPPDGERPRRFRLAVVGGAQLRGSWYLSAIARLQGFSSGSPAASPRRWSPKTVTTSLMVGRSKPGCNLCPALSFKDLHHPRWGGGRAGQELYLPYGPAGHLLLQHSGERALVGLAEGVDFDNAGPIGRKRRQLQHAWFAGSAGSGAASGATSHRWAECGYLPAVRAAVAPRAPVKPPKTSRAARAAFVFLGCPAFAPMAAVVGAEVVAAEEVLVADEIAAAICAPGLRLFGFDSLSSPLEWGRGQGPCRSSVCPEVIATVVWPPGAEVVVAAAGAGGGEPPGILSSRRPSNVGGCSYLRGWNRSSVCNGTLSATGVCSLWLSGPKHRGKPRQLCDEPEPEAAVSAWTEAESARKENFVGLGAAGSGYGAADQAVCLGQVSGGDPGGDGPGAVLTSSFEGEILRPCRRLRPGWIPPKVESTPRDLFVGSRIVYSSESYFSRKVMSEESLGSVDLAAYVYFVRGLWTFLL

SEQ ID NO: 54964 - protein, 49 aa, Zea mays
  Coding DNA Sequence Number=SeqID_11589
MVGLQVVTRMMVLTMVMVAFGEIYAQVKKKENDVEADLREFQDFDEFKD

SEQ ID NO: 54965 - protein, 128 aa, Zea mays
  Coding DNA Sequence Number=SeqID_11590
MPSSPIIAECPSSDRKNKKPATVDSLWYQRSGLGLGPGCYTASCWGLPWARSTGLVAGVGPISHRGRGWSRLRLVSWPGGIALRILVRTIPFAKPCSQFRVALVNSEFRVPGCLCHCFYMKVTLKFIS

SEQ ID NO: 54966 - protein, 136 aa, Zea mays
  Coding DNA Sequence Number=SeqID_11591
  Subcellular localization annotation: CTP_CleavageSite=41; ConfidenceScore=5.26e-01
MASGQTLLLKDPHSRPLTVDENQPLKPKSRRSGAPVALTVSSAEATAAVGSLTSGGHHFSTGDSSHLRTAQPSPGWRTDSYTLTRQQQFAFPRIAGGCLLRRAGGCPSPLNAGGRSGSPAHAEAGPSSVHPPPQHG

SEQ ID NO: 54967 - protein, 326 aa, Zea mays
  Coding DNA Sequence Number=SeqID_11592
MGSARVAFVLLSLEERNFAEVGTFQPSLGFKDFHQAARLHPLTNGHPRRIFIILAGAEGEASQGLPSRGLASRFFLRLLGVETILQPCGGGVLQPCRGRQTAAVQPGCNIPSSVRAMASSHTRGSHNTSYAARVVDAAIGAEAAGEGFSADETISATRGPTPDSLALISGSRPPRGDANEILPAVASAPGPSLLLQRSPESLGSVGLATQGFSCPVKETLGRSAMSRSRRQRCQHRQRRSWLENELRRPRSRWPPRPKRRSSGDWNLARSSTGRINPGVGLMSSGRGAAIFLRGGDPSPVSPSEAGLDSAEGGVDAEGAAAPPIDV

SEQ ID NO: 54968 - protein, 151 aa, Zea mays
  Coding DNA Sequence Number=SeqID_11593
  Homolog annotation: Hit_ID=Q6QP51; Match level="QueryCoverage=32%, HitCoverage=22%, E-value=4e-14, Identity=75%"; Hit description =Putative growth-regulating factor 1
MQAACNRAAGMHPFDFDASSMESQAHTSWNQRAGYYVRKIAPPLAPVPRLLDCGTGAAIRGNPAHGPTVPAKHAGHRDQERGYSERDPSLRRKRALSPPTDQRFEGWPLGRVRQPPQSTRALRPLLVRGSKAGPSKGFDSHLRPLGLRAHY

SEQ ID NO: 54969 - protein, 85 aa, Zea mays
  Coding DNA Sequence Number=SeqID_11594
MGHFAKSCPRPKKKNDVYPTRVHLTTVDEITNGELVMVVVLFDSGSSRSFMSTAFAHRFNQSLVEVGHKYRISSAGVEVFTNRIV

SEQ ID NO: 54970 - protein, 112 aa, Zea mays
  Coding DNA Sequence Number=SeqID_11595
  Subcellular localization annotation: CTP_CleavageSite=52; ConfidenceScore=5.64e-01
MQKLGTLICMRRFTSFMPSSVQSTRLNQKKQMSLQPTMEMVTTRRINPGATRASGSGNQEGDHEAPLPPPLPFTPKQFFAQFLGAHRNIENLQRNMEAELHNVANNTRHGQP

SEQ ID NO: 54971 - protein, 96 aa, Zea mays
  Coding DNA Sequence Number=SeqID_11596
MAMMDSTSEKMYLCQLCNRFRISLSPMFCNVCKTGETFLERNDLWVVDAAIRYLQDQLVKRDLALNWTVNSRPFAWAKEAKARARVEELSSAMDNL

SEQ ID NO: 54972 - protein, 46 aa, Zea mays
  Coding DNA Sequence Number=SeqID_11597
MEIGIGIKVWYRSLEDMVAGVTWSSILPPGWTVEWDPTSAEEEHEE

SEQ ID NO: 54973 - protein, 67 aa, Zea mays
  Coding DNA Sequence Number=SeqID_11598
MPEQGAAQEVAPDPAPEPASEICLPLLWKASPGSLEDMVAGVTWPSILPPGWTVEWDPTSAEEEHEE

SEQ ID NO: 54974 - protein, 324 aa, Zea mays
  Coding DNA Sequence Number=SeqID_11599
  Homolog annotation: Hit_ID=A2YGC2; Match level="QueryCoverage=44%, HitCoverage=65%, E-value=1e-09, Identity=32%"; Hit description =Putative uncharacterized protein
MVRIRFAFQNQMARIGCTARKFVIPFLPSRLVERPLRRTVPGQSSHLERLHRCLHEEQEQQDSSPSPQQEGIPAAGGDPDGDGDDDDAGGSSSHNTELSEEPELEPEEWIARPITRDTARGCHFHDAHDSLLRQAFDRHTWSIEYRCVVYQHRRRLYPDQWEATCLVRHLDDDLRGAEAFSEHYSITERDTTEAAMQDAARRALSQYCSLFSGVADGLDLKYYPHRSIGSARGVIASLVGEGNPRLNNMVNLAVVLYIELDHALDELGKVWAEVAELCAECAARHYLDGGSPAPVGIQHPYRSPPHGRFDYDTPDYRTCIDLDS

SEQ ID NO: 54975 - protein, 107 aa, Zea mays
  Coding DNA Sequence Number=SeqID_11600
MGKPVPSLLMLLLSRGRVPLGSPTRCDRTCTHHNRNGRPHLRSREEGNLRAGSLRLCIKPGLAFQSSGRQVLWCRLWCWIWGYLLSSSLLRHEDVFSVSKITVYRMQ

SEQ ID NO: 54976 - protein, 134 aa, Zea mays
  Coding DNA Sequence Number=SeqID_11601
MKKVVYYETDSSSPSTSGAESTTLKCQERNKYNRNYRNAFTNEARSTKRPRRARYNGPDRTWASELDEAALWEDLVAGLRLASYRAKGVPARFVFVGPAAPTRTSSGGWRLCLRPNICPPRDQFDKVTWCRRRR

SEQ ID NO: 54977 - protein, 189 aa, Zea mays
  Coding DNA Sequence Number=SeqID_11602
MRLILWYLFLTCGGCETARVSSHTFIAQQVVGNNVHELAKGGRSREVSTASPSSSSPDQSSSGTQRPPQRRHSRREVTQESIALTPLPNDDTQSAGDRELQGRHVTFSSEAGNSVAEFLRTGDSRYPRRAIVGAMVLHRAHRCGERDKDGEWAPPVSDRDKRKGESTGWVVRNKRWSWAGGGNFGPGEV

SEQ ID NO: 54978 - protein, 300 aa, Zea mays
  Coding DNA Sequence Number=SeqID_11603
MARGKIPKEQEDTSERKQGGWSSHFDSHICCVANENDSGSTNEDEEDERSFMQLYAHLSLEDKAVMLKLLKRAREQSEARQMLEDVLSMKMLHFDELTKEHEELKCSHVDLVQSKSFFELEFAGTKDDTYQKLKEENERLKMSLTQLKGKYIAQPYQDNRDHMVKKLETGTTVACTKSLEENVKDLRIVKRKEQKKKINASDKSLNHASMQGNKELSCAKTYNMEESQRMLTYENLQESKCKPQASRVTLQPKEESIFNKFGRKKSQLQREDTQMKKEDIKSNNTYLDNEIFKTINGVVA

SEQ ID NO: 54979 - protein, 94 aa, Zea mays
  Coding DNA Sequence Number=SeqID_11604
MYGRRWRWRDGGGRGRRWARRRCSPRVREAGGATTVAGHGGGGAQRRDDRNGGGGGGARRWARPAVAATAGLVGRRGGAGGKPGGWGGRRSRPA

SEQ ID NO: 54980 - protein, 76 aa, Zea mays
  Coding DNA Sequence Number=SeqID_11605
MTEWQTPDEMMPRRLMTRRRTRRPEPRCHTRFLEGKPNANHLRASHSTLMVALFSRTVIQRTGPYGEALEIPLESP

SEQ ID NO: 54981 - protein, 54 aa, Zea mays
  Coding DNA Sequence Number=SeqID_11606
GDENDGFGIDYGNGEDEAMEGDFQEFQDYDEFLGVGIISSGVCHSVIRPGEWNL

SEQ ID NO: 54982 - protein, 105 aa, Zea mays
  Coding DNA Sequence Number=SeqID_11607
MEPLAKVELELSSLSSIALTLRKPFAELDPIGKPRLTSIFQRMTSLPKIGKCLLQVSNIILFLRAFYYDVINISQHIPAYLRVKDLGCHSAEASYKILEPLRHPK

SEQ ID NO: 54983 - protein, 147 aa, Zea mays
  Coding DNA Sequence Number=SeqID_11608
  Homolog annotation: Hit_ID=Q8W0Y1; Match level="QueryCoverage=49%, HitCoverage=11%, E-value=9e-09, Identity=43%"; Hit description =Putative transposase
  Subcellular localization annotation: CTP_CleavageSite=72; ConfidenceScore=5.23e-01
MEKEWLGSAKPAPAYGAPDYPVVHRTVSDCPLSLQRQRPSTSATNSSLSGKGESTAAKNYRTVRITYSPPSRCSHYTALAQEVHGPEYNPRTEQIDPDVLMRVEGDPARRREEGTLRDGGEDDGGASTGHKTRARNPKPEIPETVPV

SEQ ID NO: 54984 - protein, 66 aa, Zea mays
  Coding DNA Sequence Number=SeqID_11609
MAAINDGGWSLRGARRRGWERRSSGNEEKGSWGAKEARVMQHGHGRRATAVERERAAEAHEVEDIR

SEQ ID NO: 54985 - protein, 359 aa, Zea mays
  Coding DNA Sequence Number=SeqID_11610
MTVAGGQEQQSRRQPSSCPIRGQQENPLSRREDNAPVFHPRTARACATAAPPTTRPVALTSRWDRRRLWQEKRATLRLRHNDRVSKAASDRVGPTPTTGQRFEGRPLGKVSTAASGYSGSAVTDQGFEGWPPKGHFRDQRERSCNGIPSEGGIEPSDPVARGPGPADHPQRLGGCSRKPGSGRTVDSVNIPARELGTRPYTRAMASSHEGTTRQAEALRKALRPRRSETTSSEASGGYTRWAVGPYRRHHRKLRPTQGSDTGSAPEDGELRSARPRARTQAQPRKTANSAPPLGHGLSPRRRRTPLRPTQGSDTGSAPGRGGTFFFRPDPRGLEPGFHPPGKKGEIPFPPPTQGLRKTG

SEQ ID NO: 54986 - protein, 116 aa, Zea mays
  Coding DNA Sequence Number=SeqID_11611
MSSRSLMHRVFPPSKPPDGGYPPSFRLIVGGTQLRGCLCERELLLAEVEKARRIASAEELPNVKTCSVRGITYPNVSYLSQKVMSEPKHQVAHLEVSGPDPSGMVASQGLLVPRRV

SEQ ID NO: 54987 - protein, 168 aa, Zea mays
  Coding DNA Sequence Number=SeqID_11612
MASPGLLTSRAIGGCSLGQLIIFYVSLIHRVIYDTPSTVGGTHETPSTLRANDDTRTRSGVEKNMIGTTVSLRGVRPPELSRQRLRPAAQPGDSRGTTTTTPLPRIDIIIADRRTHVEYRRSLHVSGPFNGPLTSKSPTSTSTSLSRIQEAGWPSTPPPPEPLGRPKM

SEQ ID NO: 54988 - protein, 170 aa, Zea mays
  Coding DNA Sequence Number=SeqID_11613
  Gene Ontology: Mol. function=kinase activity; Cellular component =ornithine carbamoyltransferase complex; Biological process=amino acid metabolic process
  Homolog annotation: Hit_ID=Q6QP54; Match level="QueryCoverage=54%, HitCoverage=39%, E-value=7e-25, Identity=60%"; Hit description =Putative kinase
MGHRSCSLRPESARGRVMMVLPVDVAGLRPRLGDVEAPPKPRSSLSSMAEAESKPLGRARRRSFGRGQGGARALGSGEAEFVVFLGLSPSPSPWGQAERRPDCLSASLCQVALQSEWRWRRCPFVRPSLLFMILMFQMFDHFQHLHNEDSREKPRSETLAIHLGSEYGFS

SEQ ID NO: 54989 - protein, 239 aa, Zea mays
  Coding DNA Sequence Number=SeqID_11614
  Subcellular localization annotation: CTP_CleavageSite=68; ConfidenceScore=5.67e-01
SLGLLGSPARLSTLWPTWRPTSRSAPLAHSARQALRPRSLAPSVRVGRSAGAAPSHARPWTHLSAECRAPLVKTIFPQPPTLVSPGRSLPAPHFLRAWAFPGAMRVDSANYSILLSLPGHRAAAVLSLCRPLSGHSREPLLVGCPDTTAMAEPSAKSSSRTEPLCSHYRRQASVSGRASTSHAPPTNLASVVFLPLRQSTRIGENPLPSLSLYCNECVQIRSQRSSAMAIFGPLFVASI

SEQ ID NO: 54990 - protein, 168 aa, Zea mays
  Coding DNA Sequence Number=SeqID_11615
MSLILPPAGGLSAAIVAVARWRKEYHVVAAVEGHELKTPETENRPGLERLLETTHLELDGKLFVNTQQAPTWRANCRRFDPGGSLDRRVNSRRVSQPRWVGARRSTKGGKGDRQKGKPAAFVLPCAQVGCACSRGLQASAWERARDLRAGPFSRAANLLVREPWTFLL

SEQ ID NO: 54991 - protein, 32 aa, Zea mays
  Coding DNA Sequence Number=SeqID_11616
MALSPLLLVERVRLTAAKSGLGRHKKFRLARP

SEQ ID NO: 54992 - protein, 140 aa, Zea mays
  Coding DNA Sequence Number=SeqID_11617
MAGRGKLTGAKGGVSGQRGLAGFTDWIKRYGGVKLGLSHCRTQRENPGLMCPGHTSRCHLLVQIAKGYFDLCQRPSLRPQLLEGTKRRASIAERGSPHPRARVPKAQTLLDREVQVFTGSGRHDSAGSRPRCANDGQAKM

SEQ ID NO: 54993 - protein, 63 aa, Zea mays
  Coding DNA Sequence Number=SeqID_11618
MEKTLKDMLAFGNQEWVHANREHRYTIVQPLATEDVEVKVVLCWRIFSLGDNLFFYHGFFLVF

SEQ ID NO: 54994 - protein, 140 aa, Zea mays
  Coding DNA Sequence Number=SeqID_11619
MAGRGKLTGAKGGVSGQRGLAGFADWIKRYGGVKLGLSHCRTQREDPGFDVSRAPSRCHLLVQIAKGYFDLCQRPSLRPQLLEGTKRRASIAERGSPHPRARVPKAQTLLDREVQVFTGSGRHDSAGSRPRRANDGQAKM

SEQ ID NO: 54995 - protein, 243 aa, Zea mays
  Coding DNA Sequence Number=SeqID_11620
  Subcellular localization annotation: CTP_CleavageSite=28; ConfidenceScore=5.15e-01
MRTAIRLFGHHSPVSLSLFLYQPLRWTRAGLKVRRCATRFILCTEIGQQRNPSSPRHRDKGETAQRLPDQARMPGARAEEKSLGRVERLREGYSHCWPRFHDLPVASLSSANVVTLPCGNVALRTEHISRSDIVPAELKQVPVQGPSPFFLFHDYSSLHVCSLPFGYMVVLDAKATKFEFILRRDTQVLTILKVVFVLLNCVGSHGWELRWCVSEGKVFNVLFVRIALPFLSTRAAMAALSRE

SEQ ID NO: 54996 - protein, 197 aa, Zea mays
  Coding DNA Sequence Number=SeqID_11621
MTKEASFRGHSTAHSLQDSSKAPLGHQPQGAEAVGASEEDMGINSGKSIAYSVVKTRATRQEHVSLPLRNKRRLLKQKPGRINRSRFYILLRATLLTYQNMWAINLQLLLLPQAIHKPPGPSSHRHHHCNLLIPEASSQKGASIPNNNVTSGRSPKLIQSTTLYQNQSTYTEQYPTSKILLFSMPFCFLYKEQAMKT

SEQ ID NO: 54997 - protein, 186 aa, Zea mays
  Coding DNA Sequence Number=SeqID_11622
MSQERLNDLVTLCIKKKLLDGIDISSVGTLNQGYPLLQYEDTVLVPLSLAARLYPVRFHFLLTRRPDAATWTIARDTMCPLCIKCVLSTPLAGGVQAILQAACLSGPLSNSTPVLRGALMMVQIIENRAETSVDFLVKEEAASSTPQTNDLRAELNRRRAGEDARISLERARERARERRQNIEGRN

SEQ ID NO: 54998 - protein, 473 aa, Zea mays
  Coding DNA Sequence Number=SeqID_11623
  Homolog annotation: Hit_ID=Q6Z3T8; Match level="QueryCoverage=52%, HitCoverage=85%, E-value=8e-90, Identity=61%"; Hit description=Auxin- regulated protein-like
  Pfam annotation: Domain name=OTU; Domain location=365-458; Score =13.3; E_value=0.0015; Accession=PF02338.10; Description=OTU-like cysteine protease
MPANPWGIPLLRYGYGTKIVPMGMDMGQNLHPLGKRVRTPTGMCRTLDTRPEPPGRVQNLREYRLDPRDGSWTSLCGAQVTHNKVPGFYEKEYPDLNQGQAGVQSRHVSGPYCVRLCSPLRRRPDAATWSAARDVSQRAETDVRPLGHAHLLRVRRVACQTGSAAVSVPPSAPPVAFGASSNFKDLRCSVWLPECEASRAVDNVAVSVVIVLVTPISCALVDNFKSMASWKCSHSPSSPYLAKSGLVDSSLNRNVKSSQPQSIKYFVSLMGQQFRCGLSTREGSLSVKLDIPSHEKSRIGWNWKNMHQKIGGVAGGLCFGFSVTGVASAEVPIIRVKDNAETSSSSTSSTHGKEVYTDYSVTGIPGDGRCLFRSVVHGACIRSGRPIPNEDLQRKLADELRATVADEFVKRRKETEWMPITVYMRDEDAGGLIAIAEYGQQYGKEDPIQVLYHGFGHYDALQIPAKVGSKRKL

SEQ ID NO: 54999 - protein, 261 aa, Zea mays
  Coding DNA Sequence Number=SeqID_11624
  Gene Ontology: Mol. function=RNA-directed DNA polymerase activity; Biological process=RNA-dependent DNA replication
  Homolog annotation: Hit_ID=Q2QLW7; Match level="QueryCoverage=83%, HitCoverage=15%, E-value=5e-08, Identity=23%"; Hit description =Retrotransposon protein, putative, unclassified
MWNIQADPGETKNSRSINQTKSSKCSVIIEELDTNEKGVDNSEELFSGTQGSSIVNVSQEEGEDLSDQRKKTDGIIHHEDNQKFMPSPIPIRRVSERLKKDMGIRIEEKNRRMAVKRNLEASKEIIDISKKMGVNINEQNMESIELLKEMELARQCLGQKKIEILQFIGLQETMIGDCDDFITRKLDPSGDYLWLWSPAKGKSGGILVGSRIDDLDVGSFKKGNHILQVNYWDKALLCKWNLMVIYGSCSGENIEYFFERA

SEQ ID NO: 55000 - protein, 160 aa, Zea mays
  Coding DNA Sequence Number=SeqID_11625
MAYSTTVGSRWKRVAAISTAYNVLYDVFSGQASGRSEKERRLHGHPAEVGDDGRLKDEAGRNLLRLEAKILQQQHEGRRNRQRQAAREVEDKEHKLSGGKFAGEDGAGANPSTERRRIPSKLAAHHVEHPHSLGMLGMNLQGHGKLRRRKAETLKAKGRR

SEQ ID NO: 55001 - protein, 82 aa, Zea mays
  Coding DNA Sequence Number=SeqID_11626
MEGHDDGSIRNARYSTSHLGEAGDKHPKSLPGFLPHCVEVGLHAVLLVRPELGWPEHRAEMIRESGAAHAGQGDTRLEPGAH

SEQ ID NO: 55002 - protein, 152 aa, Zea mays
  Coding DNA Sequence Number=SeqID_11627
  Homolog annotation: Hit_ID=A2Y712; Match level="QueryCoverage=40%, HitCoverage=25%, E-value=9e-17, Identity=67%"; Hit description =Putative uncharacterized protein
MKEARNHYHMRGSSRGGGTAAKRDLMLQWGNRKRPRCVKVQRRDEATEKAAISQRRDEAAVAHHHPTGHTHQHHRVLRFVPFSNLFLFYRLCLCGVDVPIAFENKSPTLAPTSGGSCSEPVNKKQKKEAQRRAVQLISYLLRPQTTNQAESQ

SEQ ID NO: 55003 - protein, 362 aa, Zea mays
  Coding DNA Sequence Number=SeqID_11628
MPCWSSSGPPETFSPPFSPLCPWIHGLFLAIEFTVAFSPSLPISGDPRATLAHACPNSGDFTAAERSSAARSRLPLPDNEQSEVPECVVGDLPEQQPARIRCTARKSVIPFLPSRLVERPLRRTVSGQSSHLERLHCRLHEEQERRRQEQEQQDSSPLPQRKVESERLSSLVPQPKMPPTPPQGIPIDGGDPDGDGDDAGGSSSHGTELSEEPEPDGWIATPITRDAARGCHFHDALDTLLRRAFDRHTCGIADGLDLKYYPRRSIDSDGGVIASPVGEGNPRLNNMVNLAVVLNTELDYTLDELGKVRAEVAELRAKCAVRHYLDGGSPAPVGIHHPYRSAPRGRFDYGTLDCRTRIDLDP

SEQ ID NO: 55004 - protein, 48 aa, Zea mays
  Coding DNA Sequence Number=SeqID_11629
MWSPILDMVGTSAVTARRQPGSLGHCGAVWYLLDLVDGVTWPSSLPPG

SEQ ID NO: 55005 - protein, 71 aa, Zea mays
  Coding DNA Sequence Number=SeqID_11630
MDLPIRLTKLDPNLLSVPQKSSSNCNLDDGEYVLIPEQGAVHEEDQEQAPETAIEDLPAAPAIEGKPRFYA

SEQ ID NO: 55006 - protein, 138 aa, Zea mays
  Coding DNA Sequence Number=SeqID_11631
MEDVCARNLRMAYRIARSTRGHGQPKSGEDDLGSPVRFFRVRELGKLHGPLAKLTEGQAQLGRGWSELAAMAEDWAVMAGGGKLVGAKEGCLASEGFADWIKRYGGVKLGLSHCQAQREDPGFDVSRARVLMPSSGMR

SEQ ID NO: 55007 - protein, 209 aa, Zea mays
  Coding DNA Sequence Number=SeqID_11632
MCYGYKEGFKEQKVDWGPRNNPRDQADLASARSVTIESWFSDCIGASGFLVVVGSRGSSSAKSESPKDRTLQLYQVVSDFQVDRPQNHIKIQPTQNSTYFYDEQVSVSPGNRSSNLSPVPPVGCSSPLWFGAHDTVDAQLQEVRGQVDGLVADVRTMHERLDSKVTSTTARFNQLDLAQTATRTTLDTILAHLDVLTTKMEQDYGGDTE

SEQ ID NO: 55008 - protein, 110 aa, Zea mays
  Coding DNA Sequence Number=SeqID_11633
MWNREGSKASCMGCFLTEDRSIVDVAHATQRHCGGEQSTAPRGTATIEANSEEVCLPVKNGWRLLTMVWVHPAADEADLGAIINHVMRKMTQVDPKRGLLRMVMLMNEPA

SEQ ID NO: 55009 - protein, 148 aa, Zea mays
  Coding DNA Sequence Number=SeqID_11634
MQIIERRCEAQKGAGIRRKKTLDKLTDQPRNLIPLDRAGVPDLSVTNMMQQSGCMLVLYVLTNFCQPNVDNSVLYRWHTYDSLGILLVGQLHIRFGAVAEPPKLLGPHAPALVSKTSDGYACAPNNLTRSVRVPQGPQINHLQPELQD

SEQ ID NO: 55010 - protein, 209 aa, Zea mays
  Coding DNA Sequence Number=SeqID_11635
MGTHIQETALGARRRPAPDFCQDLHACDLGELLNKGRRTLPRVRRALNAPEHAQRPTPRALRRAKPCPCLLLAPAPIKPTEASTVLPRVLSTSLEPEITGVCPANGVPAATRTPATVDLPAEPLPAASDPRNCNLADGEYILVPEQGVAQEVAPDPTPEPAQRICLPKLWKASPGSLEDMVAGVTWPSILPPGWTVEWDPASAEEEHEE

SEQ ID NO: 55011 - protein, 46 aa, Zea mays
  Coding DNA Sequence Number=SeqID_11636
MAMMGSTSKKMYLCQVKKQRTFVVFVPRWYQKKKIKIEATGEKVLR

SEQ ID NO: 55012 - protein, 21 aa, Zea mays
  Coding DNA Sequence Number=SeqID_11637
MEERVAGLTVSDLAPGVPKVI

SEQ ID NO: 55013 - protein, 69 aa, Zea mays
  Coding DNA Sequence Number=SeqID_11638
MAEASFHVFDASWHPGARSEHAHCNLADGEYILVPEQGAAQEVAPDLAPEPAPEDLPATALEGKPRFYA

SEQ ID NO: 55014 - protein, 53 aa, Zea mays
  Coding DNA Sequence Number=SeqID_11639
MGIGCLRDKIGIRIKVWYRSLEEMVAGITWPSTLPPGWTVEWDPASAEEEHEE

SEQ ID NO: 55015 - protein, 256 aa, Zea mays
  Coding DNA Sequence Number=SeqID_11640
MTSHGSSDDENALTHTDGLAREGFPRILWEVLQGAGYTTPPQYAVQQFEKHRVPRCRVRMTLEPHPLQPGWRSLDSESFGYRAEDTIEAIALHGLTTFCGFHPLELATHPIGLFPAEKEDDPMWKDRVEHAKDIWAIYPGQTAHLTVRCMNALYRLQEMVEKDLQVEQLSTDIQELEELVGTRENTIEVLEDQLINTQQQLAEANEHLDLHHQEIQDQEANEDVDIEGGDEPASSVDTAGSGRPPSPESSVASFAH

SEQ ID NO: 55016 - protein, 146 aa, Zea mays
  Coding DNA Sequence Number=SeqID_11641
MARTKTTLRKAIGPQGVPRHQLAPCHEGSNSESNDPIGDLELHPNVSPEVAEMGAGAAGAGEGGPYGELDIFRAPPSMNIMDDRPPEASNGSGATKNMPTRTRAQDGTGTSRGSGEETTIPPPIPPTLAEAIAALLHATADNTRFL

SEQ ID NO: 55017 - protein, 132 aa, Zea mays
  Coding DNA Sequence Number=SeqID_11642
MPCGGAGASLAEVQGKAASQTPASAEARGRVLLLLLLLLASALLLLVQVTMQSLQVTGLTWHRATQWTLRQARRQKGITDLHAVHLIRAIYKRNLEAKPTQAADWGFATKKELELVVFLELLEVIHVASITS

SEQ ID NO: 55018 - protein, 72 aa, Zea mays
  Coding DNA Sequence Number=SeqID_11643
MEIDPDNSTLYAKRSLCFLYTGYEGKALEDATTYRDMQPALALVKGRTIREERLLVYREERRLLLHRKNRGS

SEQ ID NO: 55019 - protein, 93 aa, Zea mays
  Coding DNA Sequence Number=SeqID_11644
MDVDNICDIDNNVSNENEIHGIGGMLMATAMTTWRRRIMFLHLLILHKMQVRAQVKMQAYIAASVQISTEDDCDEELDVKKKKLTSWVWEYFT

SEQ ID NO: 55020 - protein, 105 aa, Zea mays
  Coding DNA Sequence Number=SeqID_11645
  Gene Ontology: Mol. function=transporter activity; Cellular component= intracellular; Biological process=transport
  Homolog annotation: Hit_ID=A2X924; Match level="QueryCoverage=80%, HitCoverage=10%, E-value=3e-38, Identity=89%"; Hit description =Putative uncharacterized protein
MPFNSSLLYSLKDFEFHELEEVLQYYPHGYHGVDKEGRPVYIELLGKVEPNKLIQITTVERYIKYHVHEFERAFREQFPACSISAKRHRYYNDDIGCPRCGLQKL

SEQ ID NO: 55021 - protein, 140 aa, Zea mays
  Coding DNA Sequence Number=SeqID_11646
  Subcellular localization annotation: CTP_CleavageSite=50; ConfidenceScore=5.67e-01
MVMPLCPTPAATRTFRLSVARFPMQRVPSPLSPPDSLAWTTPCNTGEQVVASSQVKVSLPLPDPTRSAEHLVGVLVVVEVEPALERLSGGDARRGNRSDPGQVQLPPFRVVQDDGLNWEDYLTDSKFNQEVYVSSLVSEI

SEQ ID NO: 55022 - protein, 277 aa, Zea mays
  Coding DNA Sequence Number=SeqID_11647
MAGEHREDKEGECFVRFGHGGGLTPSGIIIKVLRRCSSPMLMQCRGIGKVHDTLQQFPERAYVRLRSEVHGGYFHADEDGVGVSLRWRRHRLIEEAYAACCYCIRNPWCCSGRSAQVKVRLLEEDNNAGKFGFYSYCLKCHKVAKEEHLRHQDVIIPFAWHKGKLVAWVIGKETWSSSFHDIQGLMSFRSSIDRSFLLHQPKDCRCTSCKDLMSTKQLYGCLISYYSINCWDWTTDRKTETHKTLQVCITVAPSLELRSGYKVFRHILFGKSRNQGY

SEQ ID NO: 55023 - protein, 302 aa, Zea mays
  Coding DNA Sequence Number=SeqID_11648
MSGVGGRTVHYTGVDAYALLLRSSRDMRIEGDEAASDGAKFSKKLGSSAEAACSAAALFLLYCTSLYCCSSSTTTFSSCSCYLSTSFSPAPSAAAPDTKDEPLQDKTVEESTDVVTGNISGFPASQFDHSAWAYKGAMVRNMPDDPSQSQHLVQEDLVDVFDILDDLKNDPVQRDLLKEVEKHDVKNVSTFGSTERSIPLSQGFTMPRYVVPDDTDIQYTPPQPRATRSQAQPLKSSLRTNETRQIRKGQKKLKKSPKKVSQDVELDDNGFPIIDFAALDRFDPPPHLAVDVESYGGPAASG

SEQ ID NO: 55024 - protein, 291 aa, Zea mays
  Coding DNA Sequence Number=SeqID_11649
  Homolog annotation: Hit_ID=Q6JAD6; Match level="QueryCoverage=100%, HitCoverage=52%, E-value=1e-114, Identity=90%"; Hit description =Putative uncharacterized protein
MSRTKNASASGGGDDEDPRRPFRQVKGKTVYLEQQEGRKKRRSDREARAAAAAAAAAAQAALGDQPDIPSDQIAFRARRLASRYVPVESWLPAQRDPAAGVLFSTRIQESFFRAQLSAQIALRVHRLLDLPAFLLAAGAESEAHLTYLPGLLSFLTISGRYVEEWVRVFYASVWIDPDHHWMRFRFEREDVTITADQIRQLFGFPVSTTRLHSLCYGTSDPPRRPHGGVAPGTAHVAALFRPPFSDGSRRSPADFTTAAKYLYELVRRTLLPRMGYREATTHIQLWLLGAL

SEQ ID NO: 55025 - protein, 154 aa, Zea mays
  Coding DNA Sequence Number=SeqID_11650
MASAHKQARGGAAGGATSSVVVDASELKQRGSKGHKKPGTDAEDDDKESGRGAAGAASCKQHAHPYRGVSDDFINLENLQLSLSEALIGSITGYPKYPYYPEVPGVWTPRTVESTVQSNCATVHQGASDLHSSVKGSRCPRGGVNWAFLKINTN

SEQ ID NO: 55026 - protein, 59 aa, Zea mays
  Coding DNA Sequence Number=SeqID_11651
  Gene Ontology: Mol. function=transporter activity; Cellular component= intracellular; Biological process=transport
  Homolog annotation: Hit_ID=Q6Z661; Match level="QueryCoverage=84%, HitCoverage=8%, E-value=2e-14, Identity=78%"; Hit description =Putative phosphatidylinositol transfer
MSESNVDSIQISVSNDEKRNRADAKISQDEPRHTMMRSLKKKALHASTRLRAPRGGVNR

SEQ ID NO: 55027 - protein, 335 aa, Zea mays
  Coding DNA Sequence Number=SeqID_11652
  Homolog annotation: Hit_ID=Q6J9V9; Match level="QueryCoverage=19%, HitCoverage=33%, E-value=3e-07, Identity=45%"; Hit description =Putative uncharacterized protein
  Subcellular localization annotation: CTP_CleavageSite=20; ConfidenceScore=5.23e-01
MTSGRMPLPGGPPPVPKLVRQGRAEGRRVGGQSVGGTGYLIGERTSSSCRGGNRRRERPRSHSGPRAGHAAAAGATDDNRPSPRSLREGAGHHPRGGRPQLGTLPSPALVMKILEAEGGAEAAAWLAFPHHQTGDQRAKGRAAMQAACNRAKWAHFSDSQHARHGAQAHASCNRCAECFVHATAPPLAPLPRLLDCGTNTATRGDPARDPAAPAWRDGGVFGRRSGQRFAFAIMTASKKGPGKGDTPKRILPCEGTRLRASLLIRGSKAGPSEGFDSRLRSRGPYTHYWSEVRRPAPRKGSTTASGYSGSAPTTDQGFEGWPPKGSQPPQTPSEG

SEQ ID NO: 55028 - protein, 89 aa, Zea mays
  Coding DNA Sequence Number=SeqID_11653
MTEDKQRQKLKQKTSSKISNTYIDKKAATPYLIKKKKNGKVIAIKANKQANKGKGAKRIWVPKEIISTMKSTKKVWIPKGKYAYLFSCI

SEQ ID NO: 55029 - protein, 96 aa, Zea mays
  Coding DNA Sequence Number=SeqID_11654
  Gene Ontology: Mol. function=small conjugating protein ligase activity; Biological process=ubiquitin-dependent protein catabolic process
  Homolog annotation: Hit_ID=O22656; Match level="QueryCoverage=36%, HitCoverage=20%, E-value=2e-11, Identity=85%"; Hit description =Ubiquitin carrier protein
MAHRTVRCANGRFQRLVLTVSRWTHGTPDSPGPRCFHPGKPLSRGSRCAVLMDSPQRTFHQRDLLKHPVDGFSAGMVDDSNVFEWQVTIIGPPDTL

SEQ ID NO: 55030 - protein, 417 aa, Zea mays
  Coding DNA Sequence Number=SeqID_11655
  Subcellular localization annotation: CTP_CleavageSite=67; ConfidenceScore=5.09e-01
MHEGSAKTWLPFKGATILLKTTLPTCVLSRHGLTSPTRSKVLPIRHGGWVPRIVQAGPGQKEPKPPRAMCATAQRLRAFLHFRPDQRVKGRTAMQATCNHTKGAHPFDLDASSVEAQAHTSCNRRAGYYVRETAPPLAPVPRLLDCGTSAATRGDPAHGPTVPTKDIDHGRAEAAVKSLASSRPLLGQRENPLPRREDDALVFHSSNGTGKGDISKGILLREGSGPRAPLLIRGSKAGPSEGFNSRLRALGLRAHYWSEVRRPAPQKGSTAASGHSGSAPTTDQGVRLTAAKSGLGRHRKLRLARPQGSDSASAPEDDELHLARPQGLDSASAPEDDELRLARPQGSDSASASAPEDDELRLARPQGSDSASAPEDDELRLARPGARTRPRPRRSLRLARPRARTDHVTGGPSLSYP

SEQ ID NO: 55031 - protein, 190 aa, Zea mays
  Coding DNA Sequence Number=SeqID_11656
  Subcellular localization annotation: CTP_CleavageSite=17; ConfidenceScore=5.28e-01
MARPCPARPLPCACASRAAEVGPWRSPPRRAPLPWRARPALSRLTHPSLRVRGGVAPLLARHGTFLARRVRGLARPRCLRSAFGLGATCCLLAARSATRGNENGGFGIGYGNGKWYSFCLERVVCIATTAQEKMKPWKETSKSSKITTSSRHGLVATPSRLPVKAACIYVSFPHFDYCKDYVDVSDIRCN

SEQ ID NO: 55032 - protein, 99 aa, Zea mays
  Coding DNA Sequence Number=SeqID_11657
  Subcellular localization annotation: CTP_CleavageSite=40; ConfidenceScore=5.33e-01
MAPPVDVANLCPRLGDVEAPPKPRSSLSSMALGRARRRSSAEARAESEPWGRAERSSSSSGAEPESEPWVGRSGVRRLPGFSPSPSPGSGGVEFAVFWG

SEQ ID NO: 55033 - protein, 142 aa, Zea mays
  Coding DNA Sequence Number=SeqID_11658
MAGYLHTLDTHYDDLSSHCTHLNSRVESLEQQVQELKKEKASLQECLDIAEGEEANTREAYRTLKMDYDKKLAPTKKIRKKTTSQGCQTERRKKAPPAPVPARIENLSDIEDMSLASLDDLLKEFGDTLEKEFGSTSGNARV

SEQ ID NO: 55034 - protein, 151 aa, Zea mays
  Coding DNA Sequence Number=SeqID_11659
MQCALFTARPLQQWAVARWWRSPAESAESAPVRLCLVTNPALCGCHMTDPALGHPGLAPVFKERKIASASSRRRELGKSLCALQVDVASGAGTAKAVAAMPMPTDAGGSHAVGIHTVRATKGLRTRVTPPDRGFAPWPYLRKGTAPACRGL

SEQ ID NO: 55035 - protein, 89 aa, Zea mays
  Coding DNA Sequence Number=SeqID_11660
  Subcellular localization annotation: CTP_CleavageSite=47; ConfidenceScore=5.37e-01
MPHFAATNNGHGWPSGPCASFLRRSDSQADRCGQARRPAQLERFAAPARLGSAGPGLPLLCLPGTPLPLACSSAAAGHVRAPASPARSV

SEQ ID NO: 55036 - protein, 101 aa, Zea mays
  Coding DNA Sequence Number=SeqID_11661
  Subcellular localization annotation: CTP_CleavageSite=63; ConfidenceScore=5.67e-01
MVTDVAYYSSTSPLLADVAPLAAPRVSRDARDSRLGTSSSTSARRRSASIIDNNLSCTRRSTVAAENWTNRAKCISMLAAFRCTRHEAPSWAVSVAAAARA

SEQ ID NO: 55037 - protein, 467 aa, Zea mays
  Coding DNA Sequence Number=SeqID_11662
MVTTSSMVERSKPSCGLCPALSFKDLHHPCCGGGRAEPELYLPYGPAGHLFLQHSGERALTDLAEGADFDNMGPVGRRRRQLQHAWLAGSAGSGAASSATSHRWGRAWLSVRRTGGCCAVRTGGPPKMSHAARAVHVLGLSCPHSGTTPLREGRCSPVREDLSGDLPVGRWLPVIDAEVVAAGEGFSADETVSATRGLTSGSLASIACPCPSSGDAGEGLVAAASALRSSLLLFSRAERRSLSLLLQWSAASHPESPSARSALPPKASLAQLKNPRLLCDEPEPEAAVLAWTKAESAQEEASLAREYVASLAGEVHQRRLELGQVARWRDQPRSQAAEAMSRADILGDSWLRLRSGRSRDLGYDGPSLVLVSSFEVEILPPTSPSESGPDSSEGGDDAEGAAAPSVDDLFVGSRIVYPSESYFSRKVMIEKVMSEDLAIEAVEKRERCSGRKTFSEENFDAEGVPPF

SEQ ID NO: 55038 - protein, 652 aa, Zea mays
  Coding DNA Sequence Number=SeqID_11663
  Homolog annotation: Hit_ID=A2XME4; Match level="QueryCoverage=66%, HitCoverage=99%, E-value=0.0, Identity=76%"; Hit description =Putative uncharacterized protein
  Pfam annotation: Domain name=DUF1005; Domain location=248-431; Score =311.5; E_value=1.6e-90; Accession=PF06219.3; Description=Protein of unknown function (DUF1005)
MDPCPFVRVLVGNLALRMPVAPPAAGAGAGVHPSTSPCYCKIRLGKMPVQSVPAPLVVSDGGEQTPASGALAAAFHLSKADLEWFNGKPSLFSSRGEASLKVSVYAGRKGSACGVSSGRLLGKATIALDLKGAEAKPAVLHSGWISIGKRSGKGSTAATELSLTVRAEPDPRFVFEFDGEPECSPQVLQVRGSMKQPMFTCKFGCRSNSDLRRPGMQPERDAASAKERKGWSVTVHDLKGSAVAMASMVTPFVPSPGTDRVSRSNPGAWLILRPAGDGAWEPWARLECWRERGGAGASDSLGYHFALLVPGADHAVALADSSIPSSNGGKFVIDLTAAQPLSRGGTPGCSPRGSGDLSNWPLGNYRGFVMSAAVQGEGRCSKPTVEVGVAHIGCAEDAAAFVALAAAVDLSMDACRLFSHRLRKELSHLQADLLRLLVLDGVVGDFQKENKRNVKGRANDSRSSAEAWAHRMGQQASRERGRWVVVGEHGGSACPSGAGWAAVGAPDAHHSLGVGLQAVGPPEAGVECGQRQAPVVMTSPVLLLGSLLGLAPSYACPLLFRLAACPLAAAVELGPPGPGKPKRNPTHNAVMWSQARTILKAPWARLCRREQIGRIFGARLPPAWLMQPGYQEKPTKQATAMFGFISEVVLAK

SEQ ID NO: 55039 - protein, 96 aa, Zea mays
  Coding DNA Sequence Number=SeqID_11664
MKGISRRPSAASTCGCKSKFQDAKHKLHRREEAKNRTCPLSSTDGNQVYMIVLFMVDSMEGEKPWHDYCRLCVASTPGRRIQGLDTGRRLAGPVGG

SEQ ID NO: 55040 - protein, 28 aa, Zea mays
  Coding DNA Sequence Number=SeqID_11665
MAVEDADVAVTVQLDLGFMVFNRRRKEM

SEQ ID NO: 55041 - protein, 287 aa, Zea mays
  Coding DNA Sequence Number=SeqID_11666
MEEEDCSLCLWADSLECVLPELVDLSPSVPISLMVDAPDITSSGSVLANLLAVEVVTKTGSLSSNGSPGEVPNHTRHLGEVLAEVHQDEVEEQHEPEQEERMRTTLKTGHSMWVLRDTDCAGMRGGAGHATTEALRTATTPKLDPFVQVPPSRRPALGEAVRGAVAEGGLSRQDLQELVAEDGGGPLAAPRSHRARKGGMGDPIAGSWSGVVQGHDDVAKVIIAATGRGRGHRGAGRGCHGPRFDVEKGAPPPSSLPLGPKCRPSRSNPRHALLRNQTRHDLLTARS

SEQ ID NO: 55042 - protein, 56 aa, Zea mays
  Coding DNA Sequence Number=SeqID_11667
  Subcellular localization annotation: CTP_CleavageSite=27; ConfidenceScore=5.20e-01
MSGGAPDTVRWHTGQSACPAPPRMPARSVSRSTHSEWPVFKVVLILSSWLNETINV

SEQ ID NO: 55043 - protein, 349 aa, Zea mays
  Coding DNA Sequence Number=SeqID_11668
  Gene Ontology: Mol. function=catalytic activity; Cellular component =cytoplasm; Biological process=cellular metabolic process
  Homolog annotation: Hit_ID=A2XAV9; Match level="QueryCoverage=99%, HitCoverage=96%, E-value=1e-121, Identity=64%"; Hit description =Putative uncharacterized protein
  Pfam annotation: Domain name=3Beta_HSD; Domain location=14-289; Score= -27.5; E_value=3.8e-08; Accession=PF01073.10; Description=3-beta hydroxysteroid dehydrogenaseisomerase family
  Pfam annotation: Domain name=Epimerase; Domain location=13-268; Score= 66.9; E_value=6.7e-17; Accession=PF01370.12; Description=NAD dependent epimerasedehydratase family
  Pfam annotation: Domain name=KR; Domain location=15-167; Score=-86.4; E_value=0.025; Accession=PF08659.1; Description=KR domain
  Pfam annotation: Domain name=NAD_binding_4; Domain location=15-251; Score=-30.5; E_value=8.1e-07; Accession=PF07993.3; Description=Male sterility protein
  Pfam annotation: Domain name=NmrA; Domain location=13-308; Score= -96.3; E_value=0.01; Accession=PF05368.4; Description=NmrA-like family
  Pfam annotation: Domain name=Polysacc_synt_2; Domain location=13-231; Score=-180.3; E_value=0.011; Accession=PF02719.6; Description =Polysaccharide biosynthesis protein
  Pfam annotation: Domain name=adh_short; Domain location=11-157; Score= -34.2; E_value=0.0022; Accession=PF00106.16; Description=short chain dehydrogenase
  Pfam module annotation: Pfam domain module=3Beta_HSD::Epimerase::KR::N AD_binding_4::NmrA::Polysacc_synt_2::adh_short; Domain location=14 -289::13-268::15-167::15-251::13-308::13-231::11-157
MSSNCGEDEKELVCVTGAGGFIGSWVVNELLQRGYRVRGTARDPADSKNAHLLALEGAKERLTLCRADVLDRASLRAAFAGCHGVFHVASPVSNDPTQCSRLTTPLASAPGPQELVPVAVEGTRNVINAAADEGARRVVFTSSYGAVHMDPSRSPDAVLDETCWSDYDFCKRTDNLYCCAKMMAEVTAAAEADARGLQLAVVLPCMTTGPMLQQTLNFSTNHVARYLMGTKRSIPNAVAAYVDVRDVARAHVLAYERPGARGRYLCIGTVLHRADLVDMLRDLFPQYPVTAKCEEDGKPMAKPFKFSNQRLRDLGLEFTPLRKSLYETVLCLQQKGHLPVIQPQQRAYL

SEQ ID NO: 55044 - protein, 432 aa, Zea mays
  Coding DNA Sequence Number=SeqID_11669
  Gene Ontology: Mol. function=kinase activity; Cellular component =ornithine carbamoyltransferase complex; Biological process=amino acid metabolic process
  Homolog annotation: Hit_ID=Q10I71; Match level="QueryCoverage=26%, HitCoverage=51%, E-value=2e-42, Identity=58%"; Hit description=F-box domain containing protein, expressed
MALPADVAGLRPRPGDVGAPPKLGSNLPSVAEAESEPLGRARRKSFGRGQGGVRALGSGEAEFVVFRGRARALGSGGAEFAVFRVLARVRALGSGGAEFAVFRVLARVRALGSGGAEFAVFRVLARVRALGSGGAEFAVFRVLARVRALGSGGAEFAVFRVLARVRALGSGGAEFAVFRVLARVRALGSGGAEFAVFRVLARVRALGSGGAEFAMAPLARPDCLSDSLCRVAPQSEWRRRRCPSVRPLYADGGYQLRIRRLEDPFLSLFIIPKISSHPGNIQRRAKWRDVFNGTITNSGNSSPPCSREETNAKEYNIFLQFCKAIGGLQSLKGMVVDESLINYDVLLHVHQCCPDFVGLKLEHLDISGYETSAISSTVLEKASWLKVFLWNSKFELGEFVDCSNCGEHNINPQEPCKCMMEHKVMDWLAGPS

SEQ ID NO: 55045 - protein, 34 aa, Zea mays
  Coding DNA Sequence Number=SeqID_11670
  Homolog annotation: Hit_ID=Q9XEJ4; Match level="QueryCoverage=79%, HitCoverage=2%, E-value=3e-07, Identity=96%"; Hit description=Copia -type pol polyprotein
MTTDRPLELLHMDLFGPIAYISIGGRKISYPKRL

SEQ ID NO: 55046 - protein, 96 aa, Zea mays
  Coding DNA Sequence Number=SeqID_11671
MASPTHASMVSPPSGGRDDDLRHVIMPLHNPAPRPRDGITHSPLLGAMGSRSGKRSSSIFDNELLCHEPVYRGGQVVAPLPRAHQDAGLEVTVGAK

SEQ ID NO: 55047 - protein, 134 aa, Zea mays
  Coding DNA Sequence Number=SeqID_11672
MKDPFEAAVEEQDSPPDSPAPPEEEPGAAGLADDAEDYDGGPPPRQPSAPASHAASAAAKAKGRVQREQQEDDDDDEDQMEVDLDKLPSSTGDPDKLAKMKFVPKLFTFFFNLANGTALLSVQIRWLLVIGMIL

SEQ ID NO: 55048 - protein, 146 aa, Zea mays
  Coding DNA Sequence Number=SeqID_11673
MEYKKQIKKVATSHFAECNTRQRCSLPSVKAIALGKELRPGHRYRFFVECNVSDTRQRGTLYRVPYIALGKEPDMGTLPGGFFAECPRWHSAKIDSLLSAAGQTLGKALLVEVTIGLIIIKLHKVHNDEVHATLQARFILIDKPCL

SEQ ID NO: 55049 - protein, 71 aa, Zea mays
  Coding DNA Sequence Number=SeqID_11674
MARRWARSRPRWARAQWRRRGDVESSGDGAAAWRVAAAAREKRLDGKFTGMLSEHGARSLRSAPEIGRNLC

SEQ ID NO: 55050 - protein, 261 aa, Zea mays
  Coding DNA Sequence Number=SeqID_11675
  Homolog annotation: Hit_ID=Q2QSP4; Match level="QueryCoverage=39%, HitCoverage=38%, E-value=1e-06, Identity=31%"; Hit description =Putative uncharacterized protein
MPCLRYKDNSMRHRVPGASNGMSKPICQRQCEVAMVPKSWMTGEPRLPRWRPVARRQSVLVTWSGRRGDQHQGDLEAEEPDAAQCAGEGVGPDPTGHEALEHAGVEDGLKGVQVAQEIAAAGTGDTVWQQHALPPPRRQPDPLADGFRRKTGGKPPTGRDIKAYFQLDIDKTKEKKSSRFRQQLRADEAARTHFGDNEYEDELKAALHQSRVEHEFSQRAGTRYDRGGGSSSQRVPERVRDYNLAQASGLRQQRIDTGPWT

SEQ ID NO: 55051 - protein, 198 aa, Zea mays
  Coding DNA Sequence Number=SeqID_11676
GCYPRTKPAAEGYNLAGEDNPMDRSTKAVARMKETTLFGRAGGLHTQISTSAVGSKSIDETWWLGAQAASWCSDELISKCSFRTARLTRKPRTTACRRTTACSCDDGHGRWNITTNWSHFSSSRVNASRVGEGGWEGVAAADGAAAGGGEGWAAGGGEDNLELIPGVMDLRSMGIAVFSGEVIPLCRRLGSRVAALGA

SEQ ID NO: 55052 - protein, 127 aa, Zea mays
  Coding DNA Sequence Number=SeqID_11677
MGKGNKRKREPTPPSEDFGDSEYSEEEFSSESEGSPAPVSPPTSSDDSDDSHGIAAEGSDESEYSSDEEDSPEEDGDGDDDDDDEGDDGDDGDGGGRGGNGDGKGGDGGSSRGSNGGGSKGSNKASG

SEQ ID NO: 55053 - protein, 162 aa, Zea mays
  Coding DNA Sequence Number=SeqID_11678
MMTASKKGSEKGDIFERILLSERKQALSPPTDQGFEGCALRGPATAPEHSGSEPFTDQGFKGWPLEGIRQPPQSMKTTLFTLFRLLRQPPGLGLGGRSPPRPTPGLGFSLGLGRRSPPRPTSASGEVAASPDLSLGLRRSRRLARPRPWTDYATRDTSLPYL

SEQ ID NO: 55054 - protein, 154 aa, Zea mays
  Coding DNA Sequence Number=SeqID_11679
MPSSSSPLPCELTTVVVVVLRGEEYHVVAAVAGHELETPKAEHRPGLKRLPKIVHLELNGKVLPTRSSPYLARQLSAFWTRVDPQPTSEFDAACPCPDGLIISDYSLAFKGVFNGQLYLVDFTYDNVELDTSLIANTVGVLGPTTHPGLPLKVF

SEQ ID NO: 55055 - protein, 394 aa, Zea mays
  Coding DNA Sequence Number=SeqID_11680
  Homolog annotation: Hit_ID=A2ZWJ9; Match level="QueryCoverage=82%, HitCoverage=88%, E-value=8e-72, Identity=49%"; Hit description =Putative uncharacterized protein
  Pfam annotation: Domain name=DUF1639; Domain location=330-379; Score =106.4; E_value=8.7e-29; Accession=PF07797.5; Description=Protein of unknown function (DUF1639)
MDPYVIGHISLFAYLQCKREGRTYRSDLQVYRLQVRNSPLITKLPRPAPGAVWGKWERWQKGDWYQRLSPDCLPLGNGGGGGGGAVPRKQASRSSYIREDDAPAVATDGSRLASYLAASSHEPKPLRARAPQPAPLSSVAGRSPARDHAHHHHTSDSSDTASPSSTGGGGGAVVGDVLLQWGHKKRSSCRRDSATAAAPSAQRRQSAVGGGVKIQRRASAPAHAEKLMPPPPPAATRGSNLRSASSFPSRASASTAATGSHHPPHHHRTVEDRSGGQKRSSPDKTHRSTMDGVYHHHHHQESPLTGNGVATAGEKLGVERFELPLIYISLSRKEKEDDFLAMKGTKLPQRPKKRAKNVDKTLQFVFPGMWLSDLTRGRYEVREKKCVKKFIQRR

SEQ ID NO: 55056 - protein, 109 aa, Zea mays
  Coding DNA Sequence Number=SeqID_11681
MGILYKQERVVRFQCGKMDSGKTKRLRPYMFGRSTLQEFQMTVLVGRNQKDLNHNISEFDFDPKLAFGPRTGWDGAAPASSENGSVREILEDGCTICEHNFFRVTLILT

SEQ ID NO: 55057 - protein, 275 aa, Zea mays
  Coding DNA Sequence Number=SeqID_11682
MAGSKDHTKISTTNIIKPAMEALPADDQRPFEDLVMRDEKEVMRQWNEQRDKEEAELLHKLFERRKEAAEKYLSHFTVDRHQKIIRQGEIDMVSLLPPLQGPDPQPLGTRQVLDTTGPSEHHLRQSGYTADRPAYFAGPSDPMQARTQNARVAPYMAGPSGYNPEQFGPITDRPVHHAGPSGYVANRPPSYVGPSGYGMNQSTYYAGPSDSTRVHAQTAHVAPYMTDPSGYSPGPFGPIADHPVLYDRRSGYETTHVAPYTTGQSGYTFGPFDQG

SEQ ID NO: 55058 - protein, 243 aa, Zea mays
  Coding DNA Sequence Number=SeqID_11683
MEYLFDELCSHQLVDLLAYGSALFFVETVQRLLHGSGTVSDIHRFEVAGVALRIRHLLGEALQVSDEGIGLGKGLSVLYAIHVAFVRVSVRGSDGDDPVGAWHLELEVRVVGDGHELGVARSPQHRVVGPSEPDHLEREGFPAEVGGSSEADGQIELSKGQDALSGDDPVKGCRIGLDHGQIDPQEPEGLGVDDVEAVASVHEDLGEPGVADDRIDNERVPSWARHAVGVVALVEGDGLVGLV

SEQ ID NO: 55059 - protein, 102 aa, Zea mays
  Coding DNA Sequence Number=SeqID_11684
MSRKMCRGEEPTSSRPYAFACDERKGKKKAPTPSSSSEGEEEEESDDDEDNQPCTSSSEDEETIRRVEKISPGSTRRRKDLTKGLRAQWIVRSLLHGPGEEQ

SEQ ID NO: 55060 - protein, 184 aa, Zea mays
  Coding DNA Sequence Number=SeqID_11685
MGTTISSCVHAVHAGERLKEGRGTGKRGPRNSDTGARARNGLGRQRGGPTGQRGRGQAARDDTLLLLLHDSKITPTSCPAAGACSVFCSPAPVHQRAPPGATGSSSSTMLASSLKLRPRLSHIDGVLTASPSRRTTLQDLDPSWALLYVHAAGLDCRHEAWPHRTHCVHDIVGPTALSLLVFAL

SEQ ID NO: 55061 - protein, 83 aa, Zea mays
  Coding DNA Sequence Number=SeqID_11686
MTEEVNSRGRSTLRKLRGSNKALLGRQLQEAEALGAWEEDMGTSPGRSTAYFVVKTRVTIREHVKSPYKSKKRLQKPKPGKAN

SEQ ID NO: 55062 - protein, 99 aa, Zea mays
  Coding DNA Sequence Number=SeqID_11687
MAKLWYYIEFFVDSLLLELLAPRRLGVSYVDPRAIDLAMIIAKRMFLKMKEDGAKNKIEEENDLWRPNDESTSSQAKQEKSNELAQTHEKSGRTKRDAT

SEQ ID NO: 55063 - protein, 105 aa, Zea mays
  Coding DNA Sequence Number=SeqID_11688
MFANVIDSSQVRVQRGVSLRSAARSSRRSTQDPAEVEQLREELRQHQDYLKQQAAQHEYYATQIQQQQTLIQTPPATLPTHEQEDGLDFVETLFNSGGIDHHCSV

SEQ ID NO: 55064 - protein, 203 aa, Zea mays
  Coding DNA Sequence Number=SeqID_11689
MNKNTGIQSAITNGTPVPPPQVRTTPLDGGGPAEQQKTDERRAVARSSSSDDDDFCSGGPNSGSTDLRADAAAKRPPPTPKLVRQGWAEGRRVGGRSVGGPGYLVGGRTSSSCRGRRRRRERLRSHSRPRARHAAAAGATDDARPSLRSLSGGAGHRPRRGRPQLGTLPSPALVMKILEAEGGAEVAAWLAFPHHQTGGHHLG

SEQ ID NO: 55065 - protein, 152 aa, Zea mays
  Coding DNA Sequence Number=SeqID_11690
MAPPVDVAGLRPRLGDVEAPPRSRSSLSSVAEVESEPLGRARRSSSSSRAEPKSEPWVGPSLSPGSGGAEFVVFQDLARVRALGRAERSSSSSGAEPKSEPRAALSFCQVGQWSGEMTAVTSALPAGGLYADGGYQLRIKSLEGTPNYGPRE

SEQ ID NO: 55066 - protein, 192 aa, Zea mays
  Coding DNA Sequence Number=SeqID_11691
MAERYQLPWSCVPPTTRQKDGGYPPSGGLEGGKTRCIREHEDMVAFQGGHPPFKGDYPYLRPQPSRAESSPTRSKALPCGAGAGPTCHASRLRAEEAKPSCAGPGKRDTPKRILPCEGTRLRATLLIRGSKAGPPEGFDSRLRSRGPYTHYWSEVRRPAPRKGPTAASGYSGSAPITDQGFEGWPPKGSQPP

SEQ ID NO: 55067 - protein, 462 aa, Zea mays
  Coding DNA Sequence Number=SeqID_11692
  Gene Ontology: Mol. function=exo-alpha-sialidase activity; Biological process=pathogenesis
  Homolog annotation: Hit_ID=Q6BTJ4; Match level="QueryCoverage=26%, HitCoverage=28%, E-value=3e-10, Identity=43%"; Hit description =Similar to CA1621|CaIFF6 Candida albicans CaIFF6 unknown function
MEAQAHASFNRRAGCYVRATAPPLAPLPRLLDCGTGTATRGNPAYDPAAPTRRDGQYGQNGPAVMAVAGGQDSGHVISQAYVPSRGSERTLSHGVKTARPCSVPRTARARATAASRTTRPVALTPRRDRRCLRQEKQVMLRLRHNDRVKKGTGKGDTPKRILLREGNRPRASLLIRGSKAGPSKGFNSRLRAPGFRAHYWLALEGFTAASDTKRGMTLARLRASSRPLTNGARASTRITRQQLTGDTMFGALRGQPGAFPPSSLRKGDAGAAACAAPTVVPLGRVRLTAAKSGLMRHRKLRFARPQGSDSGSAPEDGELRSARPQGSDSGSAPEDGELRSARPQGSDSGSAPEAGELRSARPQGSNSGSAPEDGELRSARPQGSDSGSAPEDGELRLARPQGSDSGSAPKDDELHFARPRARTQPWHQPTVSASSDPGARTRPRPWEIDSTSISEEPPPRPT

SEQ ID NO: 55068 - protein, 185 aa, Zea mays
  Coding DNA Sequence Number=SeqID_11693
  Gene Ontology: Mol. function=hydrolase activity; Cellular component =cytoplasm; Biological process=mRNA processing
  Homolog annotation: Hit_ID=A7PHF3; Match level="QueryCoverage=61%, HitCoverage=12%, E-value=2e-52, Identity=84%"; Hit description =Chromosome chr17 scaffold_16, whole genome shotgun sequence
  Subcellular localization annotation: CTP_CleavageSite=39; ConfidenceScore=5.61e-01
MVALASLSSLCPCGIARRRAASATSSTAFSISCCAVATPSFSGKGPQESRTPRRRLRKTEGATKSLEDSVKRKMEQFYEGADGPPLRVLPIGGLGEIGMNCMLVGNYDRYILIDAGVMFPDYDEFGVQKIIPDTTFIKKWSHKIEAVIITHGHEDHIDLFYAVSYLEHGLLENYLFVPKLVYAKE

SEQ ID NO: 55069 - protein, 87 aa, Zea mays
  Coding DNA Sequence Number=SeqID_11694
MNKRPAFKVPLQTEPRFHLRRGKDEQKAVELEVNPWAAPAISSAEKPLSAAVAEGGAGSGSEATRFEEPGTRQLPTPRTANALPPDH

SEQ ID NO: 55070 - protein, 157 aa, Zea mays
  Coding DNA Sequence Number=SeqID_11695
  Homolog annotation: Hit_ID=A2YNB9; Match level="QueryCoverage=83%, HitCoverage=20%, E-value=1e-18, Identity=46%"; Hit description =Putative uncharacterized protein
  Subcellular localization annotation: CTP_CleavageSite=5; ConfidenceScore=5.40e-01
MGCVVSKNVVSVTPAADSSSGLRDWSQLRAHGSVAPLPVPVPSLCSSSSAARRLEKVKDEAEEPGKAVVAVAAASWSFRLRSLRKSLEGDAVAREAIQGWIPLKADSFEKLEKKMNSAHQQIGRPTEEDLGSWGHHCDPSTIPDTILQCSAGEEVTT

SEQ ID NO: 55071 - protein, 143 aa, Zea mays
  Coding DNA Sequence Number=SeqID_11696
  Gene Ontology: Mol. function=hydrolase activity; Cellular component =cytoplasm
  Homolog annotation: Hit_ID=A7PHF3; Match level="QueryCoverage=83%, HitCoverage=20%, E-value=4e-40, Identity=83%"; Hit description =Chromosome chr17 scaffold_16, whole genome shotgun sequence
MELIKKRLKEFGIFLSSRLKVLRIKKRFQAGPFEVEPIRVTHSIPDCCGLVLRCGDGIIFHTGDWKIDESPVDGKKFDRQALEELSKEGVTLVFVGMSLRTYLEAAFKDGKAPLDPSTLFGGAQLFQTRFQGEKLMVPVNIEL

SEQ ID NO: 55072 - protein, 115 aa, Zea mays
  Coding DNA Sequence Number=SeqID_11697
  Gene Ontology: Mol. function=double-stranded RNA binding; Cellular component=intracellular
  Homolog annotation: Hit_ID=Q6H5U8; Match level="QueryCoverage=96%, HitCoverage=11%, E-value=3e-29, Identity=62%"; Hit description =Double-stranded RNA-binding domain (DsRBD)-containing protein-like
MTELQGLTSSLLPQDDKYLSSDPNKLTDMKQDVFGSYRNIFGYSGNTRDDMLALSSTSEESRFMKMEENNFRKTGDSVTTLKELQCTVEGYNLVFQACPSLADGLVGKESYAQAS

SEQ ID NO: 55073 - protein, 536 aa, Zea mays
  Coding DNA Sequence Number=SeqID_11698
  Gene Ontology: Mol. function=DNA binding; Cellular component=nucleus; Biological process=mRNA processing
  Homolog annotation: Hit_ID=A7PHF3; Match level="QueryCoverage=86%, HitCoverage=60%, E-value=1e-140, Identity=52%"; Hit description =Chromosome chr17 scaffold_16, whole genome shotgun sequence
  Pfam annotation: Domain name=RMMBL; Domain location=116-156; Score =43.1; E_value=9.8e-10; Accession=PF07521.3; Description=RNA -metabolising metallo-beta-lactamase
MVPLAPTAPLTRQPNHNYVDLGYLQHDFFNHDNYALKLSYIDIDTKDCHLHELLVGFYSGCNISIATPTREGVKVEDMDAYAPKDLLVVTTGSQVIPGNETRVMKMMNRLTDLGPKIIMGKDSGLHTSGHAYREELEEVLRIVKPQHFLPVHGELLFLKEHELLGRSTGIRHTTVIKNGEMLGVSHLRNRRVLSNGFVSLGKEDLQLMYSDGDKAFGTSTDLCVDERLRIASDGIIFVSMEIFRPQKEHGLAQSGLKGKFKITTRCLWLDNGRLLDALYKAAHAALSSCPVNCPHSHMERMVAEILRKMVRKYSGKRPDVIAVATENTTAGFSEHLDTKASGNFGPSSATSHLSRSPATSLEGSYKTHPDNPEVDAEEILPETVRTTPDDATTSSNGEALFSSDLHQPKTLEHFWESFKSPTAVKIARIVNGGDKQNFGKIGIMGQDSLIQSAPAPVKSSKRNKWKPEEIKSLIQMRGEMNEKFQSVKGRMVLWKEISDTMLNQGESKDTESMKTWPYFSAMDKILSQQGEMATKG

SEQ ID NO: 55074 - protein, 135 aa, Zea mays
  Coding DNA Sequence Number=SeqID_11699
MAVVGKGAVEGKVGAANQRGVATWTSDYGTDGAPGQRMESPPLCPSRMKEKWWGGLQEMKEVCYVYGEWAHYEKNWRDPKERREIYGFIIAVTTQPSYRAHVHQSLPSRPRIDMSCAEVTGPKPTQVISGKDLHS

SEQ ID NO: 55075 - protein, 229 aa, Zea mays
  Coding DNA Sequence Number=SeqID_11700
MQQFRLLLVALFVPLSHHLLLLTPYEVLKGLLVISRECPHGRLDDVGGADVGVILTEWPIGVVFIATNQNLAVGEVCWRRADRTVRVDRCAQIAVGPLVHRTLSGGTPDSLVNYSGDAPGKPEGEEFELKHPGARDSPVLFRCLFEPLGEFMQQFRLLLVALFVPLSHHLLLLTPYEVLKGLLVISRECPHGRLDDVGGADVGVILGTDHPPPKTPLVDVEPKRGEDLR

SEQ ID NO: 55076 - protein, 241 aa, Zea mays
  Coding DNA Sequence Number=SeqID_11701
  Pfam annotation: Domain name=RVP_2; Domain location=14-105; Score= -32.7; E_value=0.00037; Accession=PF08284.2; Description=Retroviral aspartyl protease
  Pfam annotation: Domain name=zf-CCHC; Domain location=182-199; Score =21.7; E_value=0.00079; Accession=PF00098.14; Description=Zinc knuckle
  Pfam module annotation: Pfam domain module=RVP_2::zf-CCHC; Domain location=14-105::182-199
MKKFKKILRKACYPCGREVIFGTLVIRTTIATVLYDPRTTHSFISAQFATKYGIFKCPLRSRKTISTPERKVLANYICPKMLNPNGNEVNDANDNISTLTTMNEKNESRRYSMNGMKNNKRNRKMFGYMISSPQPQAKALKHMDTQTEESSQTQLYEIQTPSQPSPPVGQAKLTRKELKARGACYYYKNEGHIIRECPKKRLDRLEKKAAKHDLSNNSEDLPFYQYDDEGRLISIHFGAEK

SEQ ID NO: 55077 - protein, 519 aa, Zea mays
  Coding DNA Sequence Number=SeqID_11702
  Homolog annotation: Hit_ID=Q6J9V9; Match level="QueryCoverage=27%, HitCoverage=41%, E-value=3e-09, Identity=34%"; Hit description =Putative uncharacterized protein
MQAACNRTKGVHPFDLDASSMEAQAHMSSVPTRPIGHGPVSRGRRRDGRYGQKWAGSNGGGRRAEAAVKSSAKLTSPPGADRRHLWQAKQATLHLRHNDRVKKGTGKGDAPKGILLREGNGPRAPLLIRGSKAGPSEGFNSRLRALGLRAHYWSEVRRPAPRKGSTAASGHLGSAPTTDQGFIGWPSKGSTAASDAERGMTLGTFDTEPRLGLRSRGTLGHFRDQRERFCNRIPSEGGIEPSDPVKRGPGLANHPQGSDSASAPEDDELRLARPQGSDSASAPEDDKLRLARPQGSDSASAPKDDELCLARPQGSDSALASADGLRLARPKGSDSTSTTEDRLDLGLGGASASPNLRLGPTTPQEGPSLPYPYAPPTATTLHEQGAKTSPAATTAWPSYRGLAARGNGTACISLSLSPTRTLVTPYCKRTRPGHGTNTKATESEDVDDVALEVEDADDVALEVEDADDFVAEDQLLHDYLDQIGQNIIANLQERRKRRRSFGRRMNRPLFIQIVEALGN

SEQ ID NO: 55078 - protein, 193 aa, Zea mays
  Coding DNA Sequence Number=SeqID_11703
  Homolog annotation: Hit_ID=Q6QP51; Match level="QueryCoverage=78%, HitCoverage=60%, E-value=2e-28, Identity=51%"; Hit description =Putative growth-regulating factor 1
  Subcellular localization annotation: CTP_CleavageSite=91; ConfidenceScore=5.28e-01
MQEACNRTTVVHPFGFITSGGASDTFGRRSGHRFTSAMMTASKKGRSDHSHFALPLIDLTGKQRRLPRSDCCATRQGEADNSQVRRNRKLRLARPWASASEGGLCLARPQGSASTSASEGGLRLARPQGSASTSTSEGGLRLTRPQGSASTSISEESRPHPTPASASGGVSASPDLGLRPTVPRGIHHYPTPS

SEQ ID NO: 55079 - protein, 349 aa, Zea mays
  Coding DNA Sequence Number=SeqID_11704
  Subcellular localization annotation: CTP_CleavageSite=26; ConfidenceScore=5.22e-01
MPSHSPHASRPSTFRAPDGERPRCLRLAAVGGAQPRGGRHPSAIARLQGFSSCSPAAFPHQWSSRMMTTISVVGRSKPGCSLCPALSFKDLHHPCCGGGRGESGPASAWADDPLLPPAFGGGRHPPALRRRRPPAMRGKANCCFLDRVQLSVLHPSDCGRLHRGVAQHVVRREGGTRVLGRSRSRSRGENGSEDLPVLFGATAACWCGVGGQVAVGEGFSADETIGATCGPGLRLFGFNGWFSSPATGRERGPFSSSVCPEAVAASVLSPETEVVVAAAVVGGELPGVCCPAGPLNLRPLCDEPELEAAASAWTEAESTRKEASSAREHVASLAEEVQQRWQELGQVVR

SEQ ID NO: 55080 - protein, 137 aa, Zea mays
  Coding DNA Sequence Number=SeqID_11705
MTEYLHAFNNLSHYVPDYVDTETKKIASFKRGLSPKMMKSMGISSRTSFNDFVSDCLTQENDNNLKCEPLLEPIEDLGLIDIDYHRVLVCVGARAITIQRELYGGIVHLFIGTGRSSGGQMYYGYYEHCLYPATGDD

SEQ ID NO: 55081 - protein, 284 aa, Zea mays
  Coding DNA Sequence Number=SeqID_11706
  Subcellular localization annotation: CTP_CleavageSite=56; ConfidenceScore=5.32e-01
MKENTHTSATLSSPRDTLARVSTTLKAHNIASVLPRLWPLTVTLTYPPRMWYSSTSLRTLASTCYRVEYLHKRQNPLSAFTLGSRHDNPVSRSDRQIWIPEVSSPSLSPSLSLSLSLPFSLPARPFLFSCARSGGGRALAPTVVPDRARPRAFLPVVAPPVAHPPRDRVPPLAARAPAVVPSPRWARSPTARPPRRLPSPRPCPPPPGGSLPPVAVPLSQPPPRRCLPRSLAGLARPLVGPARLPVAPRRAPAATRTSCPASPHRAPATARAPGSPAPFPGSPC

SEQ ID NO: 55082 - protein, 232 aa, Zea mays
  Coding DNA Sequence Number=SeqID_11707
  Gene Ontology: Mol. function=protein binding; Cellular component =ribonucleoprotein complex; Biological process=translation
  Homolog annotation: Hit_ID=Q08069; Match level="QueryCoverage=84%, HitCoverage=69%, E-value=4e-58, Identity=64%"; Hit description=40S ribosomal protein S8
  Pfam annotation: Domain name=Ribosomal_S8e; Domain location=37-223; Score=176.8; E_value=5.8e-50; Accession=PF01201.13; Description =Ribosomal protein S8e
MGRAPPPSSASRLFCLRWRSGGRANGVVGCFGFLHAGISRDSMHKRQATSGKQKAWRKKRKRHSSKVHNIEEMILSMDAQFDVTQEWLDRVKIARKGLRGTKRRYELGRQPANTKLSSNKTVRRVYVRGGYVKWRALQLDTCNYSWGSEALTRKTGILDVVYNASNNELVRTQTLVKSAIVQVDAAPFKQWYLTHYGVDIGRKKKVIIAKKDATEGQEGEAIVEETKKSNHV

SEQ ID NO: 55083 - protein, 31 aa, Zea mays
  Coding DNA Sequence Number=SeqID_11708
MDVQKLTIKLNHTSKSKDDHTSKSKGQSLLY

SEQ ID NO: 55084 - protein, 156 aa, Zea mays
  Coding DNA Sequence Number=SeqID_11709
  Subcellular localization annotation: CTP_CleavageSite=46; ConfidenceScore=5.03e-01
MNKNTGIQSAITNGTPVPPPQVRTTPLDRGGPAEQQKTDERRAVTRSSSGGDDDFCSGGPNSGSTDLRADAAARRPPPMPKLGPGKGDAPKRILPREGTGLRASLLIRGSKAGPPRGSTTASDRVGPTPTTGQRFEGRPPEGFHGRLRLLGLRAHY

SEQ ID NO: 55085 - protein, 143 aa, Zea mays
  Coding DNA Sequence Number=SeqID_11710
AYSEHYSITEQDTVKAAMHDAARRALSQYCSLFSGVVDGLNLKYYPRRSTGSTRGVIVSHVGEGNPGLSSMVNLVVVLNAELDHTLDKLGKARAKIAKLHAEHRHQEDGSPTPIWTQHPYRSSPRGHHAYGTPDYKTWINLEP

SEQ ID NO: 55086 - protein, 199 aa, Zea mays
  Coding DNA Sequence Number=SeqID_11711
SSPSPGSGEAEFVVFRGRGRVRALGSDEAEVVVFRGRARVRAPGSGEVEFVVFRGRGRVRALGSGEAEFVVFRGRARVRALGSGETELPMAPEAGLGRCHPHSVEWHNSRSDAGGAVFFVRLAPFALNAPTIRSVGVAIWSRLLLGEDWASGEPKLCADGGYQLRLGVLGGTPNYGPRQHLRVRSEKEKKAKPSKQEQQ

SEQ ID NO: 55087 - protein, 379 aa, Zea mays
  Coding DNA Sequence Number=SeqID_11712
  Gene Ontology: Mol. function=protein binding; Cellular component =nucleus; Biological process=tRNA aminoacylation for protein translation
  Homolog annotation: Hit_ID=Q9AWM9; Match level="QueryCoverage=93%, HitCoverage=98%, E-value=1e-141, Identity=73%"; Hit description=Brix domain-containing protein 1 homolog
  Pfam annotation: Domain name=Brix; Domain location=102-303; Score =190.1; E_value=5.6e-54; Accession=PF04427.9; Description=Brix domain
VQPRCLRPAPVALPSHIPPVLCVIVRVPKTQRARRELLKHAPKLVSFLLYPSSHPHSLNKTILRRARVERHPSGGPLAAAHKRIYDCKMSDRAGVETSKKTLILHGTKTSAVLNSVLSDIYHLKRDNAVKYTKKNDNIRPFESGGESSLEFFSLKADCSLIVYGSHSKKRPNNLILARTYDHHIYDLVEVGVENYKSMESYVYDKKLAPLLGSKPFFAFIGEHFESSEELKHLKEVLLDLFRGEVVENLNLAGVDRIYVCTAISPTTVYMMHCALRLKRSGTSIPRMELVEVGPSMDLVVRRHRLPAESLKKEAMKTAEHAKKMKNVTKDPVQGKLGKVYMPDQQVGKLTLSNDVKGLKRERREAKKNQDSKKQKVNPE

SEQ ID NO: 55088 - protein, 146 aa, Zea mays
  Coding DNA Sequence Number=SeqID_11713
  Gene Ontology: Mol. function=kinase activity; Cellular component =ornithine carbamoyltransferase complex; Biological process=amino acid metabolic process
  Homolog annotation: Hit_ID=Q6QP54; Match level="QueryCoverage=71%, HitCoverage=37%, E-value=1e-14, Identity=45%"; Hit description =Putative kinase
RKERIQVYNGGVAECYVSSGGELAPWVHANVAAGEILAPSWVMMALPVDVAGLCPRLGDVEAPPKSRSSLSFMAEAESEPSGRARRRSSAEVRAVSEPWGRVKRSSSSSGAEPESEPWVGRSGVRRLPSLSPSPSSGSGGAEFAVF

SEQ ID NO: 55089 - protein, 178 aa, Zea mays
  Coding DNA Sequence Number=SeqID_11714
MNSRLPETEHRPGLERLLETAHLELDGKLLVNTQQAPTWRANCRRFETGGSLSRRVSVPRALAQMGRARGRARRGERSEEGGVRRKERIQVYNGGVAECYVSSGGELAPWVHANVAAGEILAPSWCGVVAVGEATEPGGGTAVGVVVSLLTSPCFRKRTESRRRHRACGAPSLPIWRS

SEQ ID NO: 55090 - protein, 436 aa, Zea mays
  Coding DNA Sequence Number=SeqID_11715
  Gene Ontology: Mol. function=unfolded protein binding; Cellular component=endoplasmic reticulum; Biological process=protein folding
  Homolog annotation: Hit_ID=A3B5N9; Match level="QueryCoverage=85%, HitCoverage=59%, E-value=1e-170, Identity=76%"; Hit description =Putative uncharacterized protein
  Pfam annotation: Domain name=Calreticulin; Domain location=28-356; Score=472.5; E_value=5.4e-139; Accession=PF00262.9; Description =Calreticulin family
MGRLRDGRAFLHRALVLSSLLLLASGEIFFEERFDDGWDSRWVKSDWKKSQGQAGTFRHTAGTYSGDPDDKGIQTTGDAKHFAISAKFPQFSNKDRTLVIQYSLKIEQDIECGGAYIKLMSGYLNQKKFGGDTPYSFMFGPDICGDQKKKLHLILSYQGQNYPIKKELKCETDKLTHFYTFILRPDATYSILIDNREREFGSMYTDWDILPPRKIKDVNAKKPKDWDDREYIEDPDQVKPEGYDSIPKEIPDPKDKKPESWDDDDDGTWKPRMIPNPEYKGPWKRKKIKNPNYKGKWKTPWIVNPDYVYCLLMTVLSISLGKFEDDPDLYVLKPLQYVGIEVWQVKAGSVFDNILICDDPDYARHVVDETFAANKEAEKEAFEGAERKRKAREEEEARRAREEGERRRRERDRDRGRDRYKDRYKRHRHYDYHDEL

SEQ ID NO: 55091 - protein, 113 aa, Zea mays
  Coding DNA Sequence Number=SeqID_11716
MAERYQLPRSCVPPTTRQKDDGHPPIRGLGRGKDAVHKGGPGKGDTPKGILPREGTRLRAFLLIRGSKAGPPKGSTAASDRVGPTPTTGQRFEGRPPEGFHGRLRLLGLRAHY

SEQ ID NO: 55092 - protein, 83 aa, Zea mays
  Coding DNA Sequence Number=SeqID_11717
MLACQESEKRVHLARLHAACMAARLFRPLVWAKGEGYFPAAPLHRRSPKMVTSGLMVGESEPGCGLCPYFGLKDFRHPGQDGG

SEQ ID NO: 55093 - protein, 118 aa, Zea mays
  Coding DNA Sequence Number=SeqID_11718
  Subcellular localization annotation: CTP_CleavageSite=34; ConfidenceScore=5.72e-01
MATTSLSLAPAPLRSRPTSVHLPSRPRPHRALPSLAAYSAPLARSFASLGAYKRATPSPSSPRTGLGHSPPLPFNSIKPSPATSFRCAHHSFPPITRSGLASDQAAAEARHLTVDWPS

SEQ ID NO: 55094 - protein, 104 aa, Zea mays
  Coding DNA Sequence Number=SeqID_11719
METRALLFCLGTREKIEREKDLNMLDSNCRRTQTCDGHHGHMLARIGMFKHNMESLSSLLSYGSGIIDECPSGQGVTLHKIVTATGGGVSVAKAQRLWKAAVGP

SEQ ID NO: 55095 - protein, 202 aa, Zea mays
  Coding DNA Sequence Number=SeqID_11720
  Homolog annotation: Hit_ID=Q6QP51; Match level="QueryCoverage=53%, HitCoverage=45%, E-value=6e-20, Identity=54%"; Hit description =Putative growth-regulating factor 1
MQVACNRTARAHPLGFVASSMEAQPHTSCNRCAGYYVQATAPPLAPMSRLLNCGTGAATRDNPAHGPTVPIEHIDHRKRAQSPPTDQGFEGWPLERVRQPPQSTRAPRPLLIRGSKAGPSEGFDSRPRARRARDDSGYVCYMAEARATLPRGSGAALANPATAKPLTASTNQPENSEPDHAPGPQSDRMREQPDQPRHHERH

SEQ ID NO: 55096 - protein, 260 aa, Zea mays
  Coding DNA Sequence Number=SeqID_11721
  Homolog annotation: Hit_ID=Q8SA97; Match level="QueryCoverage=13%, HitCoverage=6%, E-value=6e-07, Identity=71%"; Hit description =Ornithine carbamoyltransferase
MEQRPGLKRLLETTHLELNGKLFVNTQQTPTWRANCRRFDPGGSLDRRVKLLLRVPAQMGWHEMEHKGGKRGSCYPAPGDALVVGVTSVRKGERVSLFVSPSSRATLPHEGPGPSFYKCKERVQGNDASSVARSVRAQGRASRRLLLRPRLGLGEDAIPLEVEVEAEPWGRARRRPPSEAEVEAEPWGRARQRPPSEGEAGAEPWGRARRRPPPEAEAQGRARRSFLLRLRLDLAVVSLTLAGGTAVGEGRAALFSCQVG

SEQ ID NO: 55097 - protein, 499 aa, Zea mays
  Coding DNA Sequence Number=SeqID_11722
  Subcellular localization annotation: CTP_CleavageSite=59; ConfidenceScore=5.41e-01
MVAIQGGHPPFKGDSPHLRPQPLRTESSPTRSKVLPLRHGGWVPRVMQAGPGQKKPNRRARSVQPPSGYKHSSTFAQTSGPTRHVTGAPVTTCEKLHNHLRQYRAFSTAEPAPRLEATLRMAQQCQPSTSITGQSAAGEGATVNMAKRGPTVIVAAGRRKQRSRRLQAHVPSWDSKRALSHGVKTTRPCSVPRTARARTTTALRTTRPVALTLRQDRRHLWQAKQATLHLRHNDRVKKGTGKGDTPKGILLREGSGPRAPLLIRGSKAGPSEGFNSRLRALGLQALLLIRGSKDGPLEGFDSRLRALGLRAHHWSEVRRLAPRMGSTAASGHSGSVPTTDQGFVGWPPKGSTAASEHAERGMTLGSGAALANPAPAKPLTASTYQPENLEPDYAPGLRPPRPRKTVSASPDPGLGLSLDPRKMESASPNPRARTQPQPQKTVSASPDPGLGLSLDIRRRTPPRPTPGPRLDLDLGGASASPDLGLGPATSQGRPSLPYP

SEQ ID NO: 55098 - protein, 170 aa, Zea mays
  Coding DNA Sequence Number=SeqID_11723
  Subcellular localization annotation: CTP_CleavageSite=37; ConfidenceScore=5.09e-01
MNAQNATFANPPNGRLQSQRNPDGGGAEGGRKSPGTTESARGGDGSAWRDAFRAATKTERWKTGSAQLYSVLFASALGACLADGEAASRGPLDGSPAALRGLLQQPLLHAYEAKDPAACMDIRRPRGAAAASPRPCSSTLEPIPGGGQSGQAVPRQQPKPLARMLQLFWS

SEQ ID NO: 55099 - protein, 214 aa, Zea mays
  Coding DNA Sequence Number=SeqID_11724
  Homolog annotation: Hit_ID=A2X380; Match level="QueryCoverage=74%, HitCoverage=78%, E-value=1e-31, Identity=54%"; Hit description =Putative uncharacterized protein
  Pfam annotation: Domain name=Hin1; Domain location=37-180; Score =48.0; E_value=3.4e-11; Accession=PF07320.4; Description=Harpin -induced protein 1 (Hin1)
MGSNAVVNFPFLRLRCVLISCGIISILIGAASLAVTLTVYRVREPVMKMNAICVKDPGATVASSSASSTPLLSLTVVADVSVKNPNAASLRYGATETSVYYRARQVGEALGPPGTAPARRTVRLNVTVDVAVGALLGDPAFLEDVVAAGAVVVATATRVRGRVAVLGGLVHRRVVLEINCTATVAVADMSISDQRVYKEDTQVFYLELIKVLLQ

SEQ ID NO: 55100 - protein, 228 aa, Zea mays
  Coding DNA Sequence Number=SeqID_11725
MVTTSLMVGRSKPGCGLCPALSFKDLHHPGWGGGQAEPEIYLPHGFVGHLLPQHSGERALTGLAEGADSDNAGLLALAWLPVPPPAVRAVVAPRTPEDRPRRRALLGQHSCSWVVLPLLRYDASARRSVLAHLGGSEWGSAGGQTAAVVGAEVVAAGEVLVADEIAATIRASGLWLFGFDSLSSPLEWGCGRGPYRSSVCPEVIAAAVWPPGAEVVVAAARSGRRRAT

SEQ ID NO: 55101 - protein, 291 aa, Zea mays
  Coding DNA Sequence Number=SeqID_11726
MGSSRVAFILLLLEERNFAGDDDHQFDGGEKQAGLQPLPRPQLQGSSSSLLGRRASIPSSVRATVAGCTGGSHDTSYAARAVAAAVGAEVVAAGEGFSANDTVSATCALGLRLFGFNGWFSSPARGRERGPSSGSVRPGAIAAAVLLSETEVVAALLVQRSPASHPEFVVPRALRSPSARSALPLKASLAQFENLRLLCDELEPEAAVSAWTEAESAREEASSAREHVASQAEEVEILPPVSPFEAGPDLAEGGDGAEGGDDDEGAAPPPGDDSVIDIVGKHESRFGRKPF

SEQ ID NO: 55102 - protein, 60 aa, Zea mays
  Coding DNA Sequence Number=SeqID_11727
MPMDEQSANLQQSQGAVSVWGTGLSGGAPDSVRWCTEQCPVRQAAPAEEAALGFFSGDFG

SEQ ID NO: 55103 - protein, 141 aa, Zea mays
  Coding DNA Sequence Number=SeqID_11728
  Subcellular localization annotation: CTP_CleavageSite=19; ConfidenceScore=5.45e-01
MADPARKATAATDPAGKTRSSQRDSGSSREGRSNGDPAGKAVATTNPTKAMKRGWAAGWVQPGRGPASDLARGVDDTGDRRSSKWEALLGCQREQVGGGHRDDEGLRRRERCRTVEERLVTVGEGSAHEAVAAAAHVPAWP

SEQ ID NO: 55104 - protein, 107 aa, Zea mays
  Coding DNA Sequence Number=SeqID_11729
MDMVDSSSSNSTLTYSLSAVYGFRNKNYHRDAERVAKLAVAPMYGGQQLGPGSSLPAAFRVGYWETATVPWDVRGEQPAGALVARTYADDAARGYYAIQLAIGIFGT

SEQ ID NO: 55105 - protein, 197 aa, Zea mays
  Coding DNA Sequence Number=SeqID_11730
MKTLATTNVESGSKLREHRGWKILSEDVCKLRTRQNVMNTNIPNNNALTDEVKIDLNMLRVLVLNRVDREVGGVDIVTVDKSTYREGIVELPKDLAASAHFSHTIGNNAVLSLSPQRWSRRPRADAWGTRRRGSWARSIPTSRLRTHASLKGSLQTSKVFPGRHLAPNLLCKGAAKTSAHFQAGHCIRYNRPGEATL

SEQ ID NO: 55106 - protein, 461 aa, Zea mays
  Coding DNA Sequence Number=SeqID_11731
MSVGFSYSVSLYISGPMSISRMQSVAKGFQGVSWTVQCDIVQQFMLGAEPQDEDPMPPYPHDGHQLPVEYFGMGQPVANFQFDLNIPPWEGLKRKKSMLIMLMMAGMPGQFNKFNLLRQCQMIILWRTNSVISSQALKICPLMNLWVSSMTSLSHKRSTSLRWKLQNLWMQFLLCEPFPQRPNHDPAYEDYLARKRLSSWADLFPTNSELVPVPKVSKVHNIANKMTKCWVQQKGKEPTEGPLVWAHRTVRCATGQCPVHHRTVSGAPGDSSSNSPPSGISRGSRAIIHRTVRCTPDSVRCAMEKRPQELFSFGKSQRLVRYNSPDMSGVHRTVRCDSSTTAIPRQRLPAEALNAPQRAQTSGVPILAHRTMNRSCPVRHRTSGVAHKSELQRSDSNGTDDVAGAPDMSGVHRTVRCAIEQTGSPTATFGVWGYKYPNHPTFIAIQVFPLLNHLQELGIQF

SEQ ID NO: 55107 - protein, 634 aa, Zea mays
  Coding DNA Sequence Number=SeqID_11732
  Gene Ontology: Mol. function=protein serine/threonine kinase activity; Cellular component=cellular_component; Biological process =protein amino acid phosphorylation
  Homolog annotation: Hit_ID=A2YD60; Match level="QueryCoverage=98%, HitCoverage=89%, E-value=1e-105, Identity=39%"; Hit description =Putative uncharacterized protein
  Pfam annotation: Domain name=Jacalin; Domain location=168-295; Score =83.0; E_value=9.6e-22; Accession=PF01419.8; Description=Jacalin-like lectin domain
  Pfam annotation: Domain name=Jacalin; Domain location=332-463; Score =106.2; E_value=1e-28; Accession=PF01419.8; Description=Jacalin-like lectin domain
  Pfam annotation: Domain name=Jacalin; Domain location=491-627; Score =54.6; E_value=3.5e-13; Accession=PF01419.8; Description=Jacalin-like lectin domain
  Pfam module annotation: Pfam domain module=Jacalin::Jacalin::Jacalin; Domain location=168-295::332-463::491-627
MVPKITDFGLSRLLGNGKSHTITQTRIGTWGYMAPEYLDDGVITMKTDIYSLGVIIRHMVKGRNSADTTDEEVLANWLIRLEKDPSQMMRQQTTRLLFETEYKEQIKACMDISWRCTLRKPMDRPTTQHILLTLEETEAKIKSVVGPTPPNAGQLQIAKFGPWGGDGGKTRDIRMTPCHLHSVTISSGTIIDSIGFSFTDHYGQHHTTGPWGGKEGTNKIELGPSEFLTGVSGTSGPFKNLTNVVTSLTFVTNTRSYGPFGKGRGTPFHIQTQNNGRIVGFFGRSGQYLYAIGDLSGQQRSRGGGPSGECGDSDDEPNGDFAKFGPWGGDGGQPQDIGTLPCRLDRIKISSGLIIDSIEFSYAGPDSQYRTAGPWGGHGGDNSSFQLAGSEFLTGVSGSIGTFNGHANVITSLTFVTNARSYGPFGRGRGTSFHIPVQGNGCIVGFFGRSGRYLNAIGVYTAPKPEPKAVGKQDGGDEAVVARIGPWGGVGNALHDIAERPHRLHRVTIFSGTIVNSLEYLYSDGDGQQHTTGPWGGCGGTGRKIHLAPEEFIVEVTGTFHPCAWDRTIPSVVSSLTLVTSTGKTHGPFGTQLGAAFQVPVQSDSRIVGFFAHGDNYIEAIGAYVKKLTESSNR

SEQ ID NO: 55108 - protein, 98 aa, Zea mays
  Coding DNA Sequence Number=SeqID_11733
MDDGRRSLVVAQNGMYPLNCVPRMWMVAHSIWVALACESTKRETTDQAKDGGKKSFEVPSAREKVKETRNPKLGVKKKTSKVKVDRVKKSYGASRITT

SEQ ID NO: 55109 - protein, 340 aa, Zea mays
  Coding DNA Sequence Number=SeqID_11734
  Homolog annotation: Hit_ID=A2Y1D9; Match level="QueryCoverage=35%, HitCoverage=66%, E-value=2e-07, Identity=36%"; Hit description =Putative uncharacterized protein
  Pfam annotation: Domain name=Hin1; Domain location=177-316; Score =60.9; E_value=4.2e-15; Accession=PF07320.4; Description=Harpin -induced protein 1 (Hin1)
NWEDLSFDGKGHHTQVNLTLGSLCRLHYPGIVKVSNGDTEDELRYRLPDGEDYMGHAERVLQNNAKKLVKDAIYYARIQATNLYFQKHPEEAGKAHGPDYDWRHEPVDPSVVYASGGGKAHGRRSRSEDERCCWCFSCDCDYIEKPEQKCGFWAVCVFVYSLVDYFIPISLVSVLLWLVLRPSNLRPRVDAAVAVSFSLDNATSSLDYDFAVDLRFRNLHRHLDVRYLDLVALASYGGERLGPSADVLPVFVQRPMASNAVRASFQGSAAPLSPAAAELFAMEAANGSFGVLVKVASTFMYKFPFQKTVYYLDHECYIRFPAPNGGVVTPGTLCSATARK

SEQ ID NO: 55110 - protein, 353 aa, Zea mays
  Coding DNA Sequence Number=SeqID_11735
  Homolog annotation: Hit_ID=Q2R3Z3; Match level="QueryCoverage=11%, HitCoverage=17%, E-value=2e-07, Identity=60%"; Hit description =Transposon protein, putative, CACTA, En/Spm sub-class
MALPIESGNFLSMTSMDTVFAQQAMTKVVPIEKPRVLESFTPGLDKVEYYGRIEEIYELNFHGSKPLTPVIFKCHWFDPEVTRQTHSNLGLMIGQRWWAMGRGRGGGGAPVGRRRWCSRTPSYNSRWSTRPLSMQHNMTTTTTMLSGTPLGLAHQSFDHYAIISRSDVVATTSYKKLVVDMHYKAHIQVVVTYYGFILREKMIPCPWARLRSEDRGHRRRCPHEGRRRQEEWAVLDYRWGNLLVLYSRSILGASKEHEREPSHTTLAGQLTTSHIETPARRREVGTNGDGGEDGGEAGGRVGGSLGRSAEDDRDVPVQVVVHSFAPPPLLFPPTDLAQFHTLVSIKILVLHDI

SEQ ID NO: 55111 - protein, 39 aa, Zea mays
  Coding DNA Sequence Number=SeqID_11736
MTTDELRAQIEQMEKRFKDPKKGKEQFKENNVVNVDFEF

SEQ ID NO: 55112 - protein, 166 aa, Zea mays
  Coding DNA Sequence Number=SeqID_11737
MCMLQQACCKFEASKEKKERRLQYLSSMCLPRLSQLWSRWAKKKKKEERKKKNKKMMRSSLVFHEKRSKAHNDPVRLASREHRFKLQSHQRTLRALEVPHCEEQADDEGDLNTGDTMLLVAEPVTEPEVGPTSISRAKGSKLMTKIVAKLQTDSTLALGSEGAKAS

SEQ ID NO: 55113 - protein, 297 aa, Zea mays
  Coding DNA Sequence Number=SeqID_11738
  Subcellular localization annotation: CTP_CleavageSite=34; ConfidenceScore=5.05e-01
MDELFSKLKCTKIDNQTQAKTENPSAPTIAMVSRCGSSSNPSFSMFALYSLLTIIENDLDHFITNCPKKGKLEASHRDHHSGRCKGKHEYTYDKHKSKGRFDKEALMKKYLQKAKAKDHTFLASLSNLDHDFNDSSSSSSGVKLERWVEDKLNGLCFLNNTTRGLCTSALGDDTVSCGDKDIGDNSPFEDKFLRLAAHVRKQCKSKYEIMLREIESARASILVSDKTKYDECALHMSNITTSQSNSEAQLGMMVSQFKRGTGGPSLPKLVKITPRKSATPVVRDGMLVEPLRAPPQK

SEQ ID NO: 55114 - protein, 50 aa, Zea mays
  Coding DNA Sequence Number=SeqID_11739
MNGSGVMGPNMPPPVIPAPGGAYAGEGATTGENSNRLNNFVNELFAFGEL

SEQ ID NO: 55115 - protein, 310 aa, Zea mays
  Coding DNA Sequence Number=SeqID_11740
MSKTPAEPLRARAASPPSSDVFGTSRWSNRDKTGRDTLRSIQHQTKACDGVIPQCGLAQLRGPPSRIFIILAGAGGRAEPEPYLPYGPAGHLFLQHSGERALTGLAEGADFDNTGPIGHKCPGSGKASGATSHRWAECGYLPAIRAAVAPRVLGDRPRRRTLLGRRSCSWVVLPSLRHDASARRSVLARPGGLEWGSAGGQVAAIVGAEVVAARESFSIDETVSANRGPGLRLFGFDSLSSPLEWGRGRGPCRSSVCPKVIAAAVWPPGAEVVVAADGAGGGEPTGFCRPAGPLMWRLFVPAGVELEFRL

SEQ ID NO: 55116 - protein, 623 aa, Zea mays
  Coding DNA Sequence Number=SeqID_11741
MQVVELVPCARNKWGNWNEFWFYVAEGTVEDHEGLPVSEMCSHFYSAYPPFEVAEEDADEGALRRAAGLSNGRDLVEEFVAYGVWPLAHGWALGEVCPRQMPFHGGRVVRSPVFALNLQNRDPVAFVREAEDRAVRLVGRYVPRTEGQRSWEIRGSNDRLNRVFELNQLPFDGYPGQDDVDRRGKKSVVETRDDPAPAAAPSSKKRKLGTAMGGLGVSDGFARELMRTCVAPGGRMSSPELRESSARMLRVTGGCWPRNVPIPRAAGEDFFTSRMVREWRVFPYGRNIAAVVSAVMDKDRQGAAQKRQAAVRLVEARPKRQRGAAKAAAPGGGKPPLAAKSGVPASSKAPEATAGAGGSKSTKAVPPSSGVAEVAKAARALPLSGKRVADFATDINVDDYLGGSDEGQLAIVAPAAATTTAAVVPKAKGGALSAGGEVSALAAVRDEAGAVSRRLKEVKEALSQAADFVDRTASGALTAVVSAEVERLRTQHADAVREKSAADSKCCKLADKVVALEREKADLRRQLAGERRETNEALAKEQAAQAEAKLARAEGNIARERAEQLQERLTALESRVERAEAVSRAEAERTRKQLMDTYRELGARTGDFEVPDREPGLRCLEWV

SEQ ID NO: 55117 - protein, 150 aa, Zea mays
  Coding DNA Sequence Number=SeqID_11742
MNALSREGCRHFEVFDQADEDFERDIYKVEDPVVKESAGAIYDRMWGPHGREVVRERAETARAQAARGERVDDFGALNSALPDPEPTPAEAMSGAALEPPPETAEGAPDAPAAAASRAQDPATVAAEATAEATAEATTEDPATTGSSQVA

SEQ ID NO: 55118 - protein, 266 aa, Zea mays
  Coding DNA Sequence Number=SeqID_11743
  Subcellular localization annotation: CTP_CleavageSite=45; ConfidenceScore=5.76e-01
ALSSARRQPPSAFLRARPPPESAASGRRPAVLPGASRRQPSRSLRAAAAAAPTGFPCELSLPRRAPAALALARAAAASAARRPGRPTPPALLAVATGSYHSTVASPSIEIGSGVNYLADEAHARYVQDKMATVELMEEEDDDTSRLSELIALAEAGLHKEEEDDMSRLSELIALAEAGLRAQEEEDEFLSQATAEVEAAYYKKKSDEAEAEDELFSQAADEAEANYYKRTGDKCDAGQCSKWNEVVVEDCETDDSEDELLIDCDSD

SEQ ID NO: 55119 - protein, 315 aa, Zea mays
  Coding DNA Sequence Number=SeqID_11744
  Homolog annotation: Hit_ID=A3CEB3; Match level="QueryCoverage=74%, HitCoverage=40%, E-value=3e-94, Identity=77%"; Hit description =Putative uncharacterized protein
MAPIGTIEMTPMEPIAGFNPGPVQTFPSRLIHGFDDDTQVFQHISSCIFCALVYLYTRAVRTYLPVLKMIIDLNNSLHLKVALLNLITISSTWARVIDVMDSEFLISLLVQSGSRLFGFIGAGATLGQLFGSLFAASMAWLGPCFWLILRSPYLIYISLFLWLSAVVSSVFYFQGHILTVAGVTVAICASPFVAASNLVALAVWPTWVAVAVTETIRKVTTYVLTRPGRELLFTVVSQDEKYKAKVCIDVIVQRLGDATAAGIYRWLFSSLEKKTSKVTLFALPLCFLWLVIAFHLGRLQTNLARLQAASAPSYS

SEQ ID NO: 55120 - protein, 357 aa, Zea mays
  Coding DNA Sequence Number=SeqID_11745
  Gene Ontology: Mol. function=nucleic acid binding; Cellular component= lysosome; Biological process=lipid metabolic process
  Homolog annotation: Hit_ID=A2ZAR1; Match level="QueryCoverage=59%, HitCoverage=33%, E-value=2e-80, Identity=67%"; Hit description =Putative uncharacterized protein
  Pfam annotation: Domain name=SapB_1; Domain location=175-214; Score =21.7; E_value=0.0027; Accession=PF05184.6; Description=Saposin-like type B, region 1
  Pfam annotation: Domain name=SapB_1; Domain location=261-299; Score =27.3; E_value=5.7e-05; Accession=PF05184.6; Description=Saposin-like type B, region 1
  Pfam annotation: Domain name=SapB_2; Domain location=216-249; Score =22.6; E_value=0.0014; Accession=PF03489.8; Description=Saposin-like type B, region 2
  Pfam annotation: Domain name=SapB_2; Domain location=302-336; Score =29.6; E_value=1.1e-05; Accession=PF03489.8; Description=Saposin-like type B, region 2
  Pfam module annotation: Pfam domain module=SapB_1::SapB_1::SapB _2::SapB_2; Domain location=175-214::261-299::216-249::302-336
MVVMHCTALEYLIDGVRPPTSFWRGRRPAKMLLHCSCSCSDADAPTEPAHVGPDPDPDPDRGRACTPPRFLAVPNDPKSPTRNGTVNPLRHSNDQPEPPPPPPTGTGTGKPPPPPPAILTAARARWSSTSARDSTRLDCSFRLDLQAAELPDHIAITLKEQVSSTKIPVRLKSGSPLCSACENFTGKAVSYISEKQTQDKVMGFLHDACSQSFSFEQKCDELMDSYATLLFAKITEIKPEAFCKQYGLCRGTALFSGVTSDSTCVFCHHLLDEVMSKLKDPDAEFEIIQILIKECNKIEGHVQQCKRLVLQYIPLILVNGEKFLEKNDVCALVQACPATHKKTFSSVLKGALLLSDA

SEQ ID NO: 55121 - protein, 118 aa, Zea mays
  Coding DNA Sequence Number=SeqID_11746
  Homolog annotation: Hit_ID=Q2QYN3; Match level="QueryCoverage=63%, HitCoverage=15%, E-value=2e-27, Identity=84%"; Hit description =Expressed protein
MATPRRLIRERAEAAVATLVAVRPHEIPPLMSAAATFFFILSAYFVVLPLRDEGAISLGLDTLPGLFAGSLLLTVVAAPIASLAFSLPSIPKPKVPPPFPSLGAYIRLGIIKLTPVIN

SEQ ID NO: 55122 - protein, 147 aa, Zea mays
  Coding DNA Sequence Number=SeqID_11747
MGNASQRPGVQVNWIRKTEDAWIGWLLLRTLRRRRRREPRLRSGRRALHFFRVAGRCTTLRRDDESQGFVLAFWAPAAGLFQGQWTSRRSPPVFRRAWRGGCRWDAATASEESVRSGAAQGPFICLDEKIMTRALHAAGPLEYCVAI

SEQ ID NO: 55123 - protein, 279 aa, Zea mays
  Coding DNA Sequence Number=SeqID_11748
  Gene Ontology: Mol. function=pyridoxal phosphate binding; Cellular component=cytoplasm; Biological process=amino acid metabolic process
  Homolog annotation: Hit_ID=Q10AM0; Match level="QueryCoverage=87%, HitCoverage=22%, E-value=2e-85, Identity=68%"; Hit description =Ser/Thr protein phosphatase family protein, expressed
  Pfam annotation: Domain name=OKR_DC_1; Domain location=1-268; Score= -78.7; E_value=7.4e-07; Accession=PF01276.11; Description=OrnLysArg decarboxylase, major domain
MAACTTARRRKHHQRPLSMRSNSGMTEWLVCVELGEAVKELEEDGKRVGAVLVTSPTYHGVCSNVQGIVSVCHPRGIPVIVDEAHGAHFRFHDSLPSTAIEQGADLAVQSTHKVMCSLTQSSMLHMSGDVDVDKVSQCLQLLQSSSPSYLLLSSLDAARDQLSQNRNIFDEPLVIASETKDLLARIPGISVLDLPCSASYFPAIDPLRITLSASNLQLSGYEADDILYEGHQIVSELVGTRAVTFAVNLGTRVQDAEKLVQSAKHLSEKHFFATGHLAK

SEQ ID NO: 55124 - protein, 348 aa, Zea mays
  Coding DNA Sequence Number=SeqID_11749
  Gene Ontology: Mol. function=metalloendopeptidase activity; Cellular component=mitochondrial respiratory chain; Biological process =proteolysis
  Homolog annotation: Hit_ID=Q7FS91; Match level="QueryCoverage=25%, HitCoverage=29%, E-value=3e-40, Identity=88%"; Hit description =Putative uncharacterized protein
  Pfam annotation: Domain name=MMR_HSR1; Domain location=195-327; Score= -20.3; E_value=0.078; Accession=PF01926.14; Description=GTPase of unknown function
MAIVDEGGKGEAQPPGLDPRTRRSAVTRATGDMDGGGRGEEWEGPPGYVLSLPAAALPLPVAVSCLDATVRRKGRSHIRHRGHPSGWWAFSLPVPAPEEAKGPVPPSSTANNPTEEGPSSNTRGKNLAVSRDQGAVQMSTIIVSVDLECSRCRAKIEKVLNRIQESQPLSRYKPGDWIEGVGGAKAGHFVLPEVTTLLLVGPRGSGKSTLVNRITRVFDKDDDPFAPDRAQVSCNSKSNGTMFLREYPIPRNSSALQNIKSEIADVSANPQGLLLEALHSVGYSGALAKPLMASESAVNRLDVSSLEEFVAEHYTAPRMVLAASRVDHDALISVVEPLLSDLPCVKTS

SEQ ID NO: 55125 - protein, 652 aa, Zea mays
  Coding DNA Sequence Number=SeqID_11750
  Homolog annotation: Hit_ID=Q2QYN0; Match level="QueryCoverage=100%, HitCoverage=92%, E-value=0.0, Identity=50%"; Hit description =Expressed protein
  Pfam annotation: Domain name=TFIIB_Zn_Ribbon; Domain location=84-126; Score=10.0; E_value=0.025; Accession=PF08271.3; Description=TFIIB zinc-binding
MLPWLVVPLIVIWAATQLLLPAAYRFEVTSPRLACVSVLLLTLFWYEILLPRLSLWRARRSARLREERRAHALELHKLRKTATRRCRNCSNPYRDQNPGGGKFMCSYCGHVSKRPVLDLNSAGKAPTGWPCAQDCGYWLDLRCSSGNNSSFLGFSWRLLSSFCSTAMRWLLRNIFRLTSSGDGEGLSIDGKRLAKRGENGGKTEESKTEKARRKAEEKRLARLEREMLEEEERKQREEMAKLVEERRKLRDEKAEAEERSKSATPVGEKDAKREAEKRRQERKKKEDKGSSKSNSDCEDIDRRLVREGDRKRDFDRKSDLDRREGYKPHYFDSNNHSNKTEVLRPLPPQVSKVSRPVVPATDQASVSPCPDVTTSAHDMVRKAEPNGAQIYNAHTFLSQYPPLDYKPSSSQSMQFPGFPPLNGAPPSNPLPHFPAGHMPFYDDAESTLLEEPEQFEDPCYDPDAIALLGPVSESLDNFPLDLDCGFFSSDVAKESHGRPSPIESPLSRSRTVEEKPIEPPHSSVARGPGGSILPESSSEQGTWQMWSTPLVQESLGLQGPQSQWLRQNTNQFNHSANLFSSGGGAISPLGTGLNDSDPWLQKAPFQQLPPDTPSLFLSHEMPGKLHNDLVFGSPNKSARERPFGPPGYLWPK

SEQ ID NO: 55126 - protein, 255 aa, Zea mays
  Coding DNA Sequence Number=SeqID_11751
  Subcellular localization annotation: CTP_CleavageSite=5; ConfidenceScore=5.32e-01
MSSPSLMHRVFPPSKPPDGGYPPSFRLIVGGTQLRGSWYLSAIVRLQVFSSHSPVAPLRWWSPKTVTSSAWMGRGKPGCGPDPALSIEGVRHPHWGGERGEPGLYLLRGSAGHLFFQLLVVAIALPPLGGDVLQPCRGRRTIAAQLGCNIPPSPSHSRWFASLKRDREREPSGGRVHSGPWLLLQRSLASPDARRPAGSRGNRPSRLLGPDSRRSPWTASPSEAGSDLAEGVVDAEVATAPFQSEDPSLQDQSVL

SEQ ID NO: 55127 - protein, 84 aa, Zea mays
  Coding DNA Sequence Number=SeqID_11752
MTNHTACTTTTISIVLLSVTAVVLLHLCGQRIKACQDGVECGAIRRLSKHKEQQNRSYTKFHLKQSLDVVYRKSGISLKSVREL

SEQ ID NO: 55128 - protein, 34 aa, Zea mays
  Coding DNA Sequence Number=SeqID_11753
MSYGSYWAVTTTRDDVLYKFAILTKSKILKNYEI

SEQ ID NO: 55129 - protein, 153 aa, Zea mays
  Coding DNA Sequence Number=SeqID_11754
RICPGVSQLSDSPRCQEEVCGGLLQRFARMRPLATFEHWKKQTATCSTPSAAPEHARARARAAPKPSQCPAIPSPVQPSERTVRVSVKLPERGIGLCFTGEAGPRSPDFNRPPATVDRGSLEEMVAGITWPTTLPPGWTVEWDPASAEEEHEE

SEQ ID NO: 55130 - protein, 83 aa, Zea mays
  Coding DNA Sequence Number=SeqID_11755
  Subcellular localization annotation: CTP_CleavageSite=17; ConfidenceScore=5.02e-01
MDRPKHPPPTSSPACARGLAASGHHRHRAIPRRDRKDLPKPTPPFAGPPSPQSNQFCQILNKVNYLGKIQNPLSVAEEFKVLN

SEQ ID NO: 55131 - protein, 143 aa, Zea mays
  Coding DNA Sequence Number=SeqID_11756
  Subcellular localization annotation: CTP_CleavageSite=64; ConfidenceScore=5.25e-01
MAGLARYGDMVIIIGSSFLNISFLRFGSNLFCIGNSLFCLVSGGSFRGHQSGSSHCFGDRNSLRSFGFASLTANSCSNPLRGGPQRPNSNPAGWDRYALGNCIVSRQRAQGRKRQLRLKLLARDAEGGFGFQMKVFSHDKMKM

SEQ ID NO: 55132 - protein, 239 aa, Zea mays
  Coding DNA Sequence Number=SeqID_11757
MPEPTHLVNPISTKLQRPDERDSGQGSVHSRDTISPRPSPASGRNSRPRQIHASPEGLLKQRTHLRLARGPARAGFAEKQPWPDRYANRPYRRSNQCKDRLTPYPDARSSVDRAEEAPPRPTSGLGLNLDLGTRTPPRPTPELGLSLDSGKRSPPRSTPGLGLNLDLGRRTLPRPTPELGLSLDSGRRSPPRPTLGLGLSLDLGRRPPPRPTPGTGLSLDPKGAFASPDLGLGPTTSQG

SEQ ID NO: 55133 - protein, 83 aa, Zea mays
  Coding DNA Sequence Number=SeqID_11758
MAVQQACRVQTGSSGLAANGKEMGGRTDDSLKTILDAFSSPDADMIGKKLFMFLASSSQSDDKRSWTRIRILGAHGRLFRNNP

SEQ ID NO: 55134 - protein, 420 aa, Zea mays
  Coding DNA Sequence Number=SeqID_11759
  Gene Ontology: Mol. function=transcription factor activity; Cellular component=nucleus; Biological process=regulation of transcription, DNA-dependent
  Homolog annotation: Hit_ID=Q2EPY6; Match level="QueryCoverage=47%, HitCoverage=42%, E-value=4e-51, Identity=54%"; Hit description =AP2/EREBP transcription factor
  Pfam annotation: Domain name=AP2; Domain location=184-237; Score =58.5; E_value=2.3e-14; Accession=PF00847.11; Description=AP2 domain
  Pfam annotation: Domain name=AP2; Domain location=60-117; Score=36.8; E_value=7.7e-08; Accession=PF00847.11; Description=AP2 domain
  Pfam module annotation: Pfam domain module=AP2::AP2; Domain location =184-237::60-117
  Subcellular localization annotation: CTP_CleavageSite=53; ConfidenceScore=5.88e-01
MTKPHSPSSWAASSLSCVFSSSGSCYVPPSWSPKRSSKKKRSSRRRAKNGAAVATRRTSSIYKGVTRHRATGKYEAHLWDKNARNRTGTKKGRQGAFDNEEAAARAYDLAALKYCGWGSHSTLNFPLESYRHEHENMQRMTREAYLAALRRRSSCFSRGASGYRGVANFLQPPLLPVKPCSSKSDERVLVRRHHHNGRWEARIGYPCGKKYVYLGTFGTQEEAARAYDLAALELRGHAAVTNFDISSYTADKDYQQRRHEPAVRTAQPKPKPKVELVDEAPLPQARRPAPTFLTPKPEPEYELGEPLALPPGPVLRDADDADHAIAEILPALCMDPADFEARYPARRARALGCPPDDQLRGLALPDSVRFEDDIETLFDAPGEVRVQFPPAAAVPDVSAADAVSYAAATISSLASGRWWP

SEQ ID NO: 55135 - protein, 236 aa, Zea mays
  Coding DNA Sequence Number=SeqID_11760
MEGRITARGCNLTGVGILPPSLGFKDSHHHSGEKGVRRPRKGGKLRLCGVSRLRRRQLPRAWLLALGGFGATSGAASCRLDEAWLSVHHTGDGCAVRRSSTSTASPAPPATPGVIRDVIRRGGGGDILGWSCPHSRSDDGSEDLFARAGAAAIRRYGTGAQVAAVVGAEVVAAAEVAATVGADVVASAGEPLGASYLAALTGVEILGHLSQGGGACRPTVRDQAERLHGLRTTPGD

SEQ ID NO: 55136 - protein, 101 aa, Zea mays
  Coding DNA Sequence Number=SeqID_11761
MKVLHPYDTSRSHGEQRPTLPHGQALGHHVARKDNTSQEAPLGLDHHRGTPDPCEYESRAPEETRRVPPMRPCQAAHYTHHPFYKKLPLHAEDTEISGIRA

SEQ ID NO: 55137 - protein, 286 aa, Zea mays
  Coding DNA Sequence Number=SeqID_11762
  Gene Ontology: Mol. function=nucleotide binding; Cellular component =intracellular; Biological process=small GTPase mediated signal transduction
  Homolog annotation: Hit_ID=P36397; Match level="QueryCoverage=58%, HitCoverage=99%, E-value=1e-86, Identity=91%"; Hit description=ADP -ribosylation factor 1
  Pfam annotation: Domain name=Arf; Domain location=120-283; Score =362.4; E_value=7.8e-106; Accession=PF00025.12; Description=ADP -ribosylation factor family
  Pfam annotation: Domain name=MMR_HSR1; Domain location=137-235; Score= 2.3; E_value=0.00067; Accession=PF01926.14; Description=GTPase of unknown function
  Pfam annotation: Domain name=Miro; Domain location=138-235; Score =10.2; E_value=0.0011; Accession=PF08477.4; Description=Miro-like protein
  Pfam annotation: Domain name=Ras; Domain location=138-285; Score= -74.0; E_value=0.00088; Accession=PF00071.13; Description=Ras family
  Pfam annotation: Domain name=SRPRB; Domain location=134-283; Score= -40.8; E_value=0.00014; Accession=PF09439.1; Description=Signal recognition particle receptor beta su
  Pfam module annotation: Pfam domain module=Arf::MMR_HSR1::Miro::Ras::S RPRB; Domain location=120-283::137-235::138-235::138-285::134-283
MKKRRNPKCNNGGFSPGKKTLAGAERKSVDCRRFGDPIDEPNALRRSPQRDERSGGLYVSNVGLQMALYALYRKGRPPPSSDQGEHYNRGSPAAQSPGGGSSRRLRKAFTTVADFIEEEMGLSFGKLFSRLFAKKEMRILMVGLDAAGKTTILYKLKLGEIVTTIPTIGFNVETVEYKNISFTVWDVGGQDKGLIFVVDSNDRERVVEARDELHRMLNEDELRDAVLLVFANKQDLPNAMNAAEITDKLGLHSLRQRHWYIQSTCATSGEGLYEGLDWLSNNIANK

SEQ ID NO: 55138 - protein, 583 aa, Zea mays
  Coding DNA Sequence Number=SeqID_11763
WRVLVCPRQMHSHEGKRERSPAFEMNLRSRDPGALVREVEDGAVRIVGRYVPKTEGQRSWYIRGSNDRLNRVFDLNRLPYGGYPGQDDVDRGGQKPVVETGDDPASTAALSSKKRLLGTAMGGLVYIAAVVSGSDGQGSSGGCTEAAWRSSGFMRPGPKSSGGLRRLLPPAEPDALAAKSGVPASSRAPEAAKAAAAGVSKSAKAAPASSTVPEAVKVARELPPPGKRVADFATDISVDDYLVGSDEGQFVVVPPAAATTAAAVVPKAKGDALSAGGEMPALTAVRDEAGAVSRRMKEMKEALSQAADFADRAALGALTAVVSAEVERLRTQHADAVREKSAADSKCRKLADKAEANLARAEGSLAKQRAEQLEERLSALQARVERAEASTRSEAERTRKQLMDSYHELGARTADFEVLDREPGLRCLEWIQEELLALPAIVEGFMSYASLVTCEGAMNALSREGCRHYEVFDQADEDFERDIYKVEDPVVKESAGALYDRMWGPPRSGGGQGAGRAGEGFSELPEPEPIPAAAVSEAALEPPPEAAEGVPDVPAATATGGGPSPTAAPRAEDPVKVAAEPPA

SEQ ID NO: 55139 - protein, 386 aa, Zea mays
  Coding DNA Sequence Number=SeqID_11764
  Homolog annotation: Hit_ID=A3BB24; Match level="QueryCoverage=70%, HitCoverage=43%, E-value=6e-27, Identity=31%"; Hit description =Putative uncharacterized protein
  Pfam annotation: Domain name=DUF1618; Domain location=205-332; Score =12.0; E_value=2.2e-06; Accession=PF07762.5; Description=Protein of unknown function (DUF1618)
MGVPDPEKWFILGRVVVVRHYKKALDSSSLDLRLPLTRTPPRISRLAAVTRDQVERGQLSIVATSNSVLLLHELERPSEPNSPNIFFLALDPMLDERAFAAGRRVFEVAATRLLDRHPELPHFSGVRNVGFIELCRGGTCVFVVAELQATNRQANNSVPFITCCLSGDGNDTWDQMELVWPVLDDEAHPQWINHAVIAHDKKLWWVNLSRGLVAWDPVPVQHAEPRLEFVPLPVLHGFEDRQEPPEQIDRYRTVGVSAGQMRFVDIVRRRNDPLEGTLVVVWTLDLPQMRWRDYPRVTTLVNIWNNASYVPMPRGVVPVVALLHPNEPEVVYFFLGKYVFSVDVNRSAVVHFAVMPNQQDGVPRPINQRDVLSWKQAPFLENVTLD

SEQ ID NO: 55140 - protein, 92 aa, Zea mays
  Coding DNA Sequence Number=SeqID_11765
  Subcellular localization annotation: CTP_CleavageSite=30; ConfidenceScore=5.27e-01
MALGARGGKGLQGANWPSSAGWQGARSGLPAMTVGQAAPVSHPGFRAPKPGREHNHQPFTSVVSKGLANPGDMGNTTCGYRVQPLQSVKLVY

SEQ ID NO: 55141 - protein, 122 aa, Zea mays
  Coding DNA Sequence Number=SeqID_11766
  Homolog annotation: Hit_ID=Q43243; Match level="QueryCoverage=50%, HitCoverage=6%, E-value=2e-07, Identity=54%"; Hit description=H(+) -transporting ATPase
MAKTQPHPGKDRDQLGIGKETTRRLGMSTKCTLPLPYSKQNKDESLASLPIDELTEKSCVDESSNFPKENYTIYVVSITIRIVFDFAPFMVQIIAILNDVHNASRILGNLRATPREVVYQPQ

SEQ ID NO: 55142 - protein, 86 aa, Zea mays
  Coding DNA Sequence Number=SeqID_11767
MKNYTIYVVSITIRIVIIAILNDAAHAVLFEERRARAGETPSSLEEPAEALESSFGEDHSSFDLPANGTDLALLKIELSNASLRSN

SEQ ID NO: 55143 - protein, 146 aa, Zea mays
  Coding DNA Sequence Number=SeqID_11768
  Homolog annotation: Hit_ID=A3BM48; Match level="QueryCoverage=36%, HitCoverage=17%, E-value=2e-07, Identity=58%"; Hit description =Putative uncharacterized protein
MVAPAARLPPAAPFHAGVHAMRPCLGEQQKSSSISISILLYLSMPEFVQRDLLSIAAALPRFVSDGGNKNRTIFSLQRGRRYQAPQICFTVPKIDAGDQAWLLHAGVERVEDIKLLRFPERLWRLLQLAYHHPHHFTSGFVLCDLI

SEQ ID NO: 55144 - protein, 229 aa, Zea mays
  Coding DNA Sequence Number=SeqID_11769
MTSHGSSDEGNAQSHTDGLAREGFPRILWEVLQGAGYTTPPQYAVQLFEKHRVPRCRKEDDQMWKDQVEHAKDIWAIYPGQTAHLTVRCMNALYRLQVMRGEAMSHLMALLEATKITLDNREELVVDLSTEMVEKDLQVEQMSNEIQELEELVGTRENTIEVLEDQLINTQQQLAEANQHLDMHHQEIQDMEANEDVDIEGGEEPASSLDTAGSGRPPSPESSVASFAH

SEQ ID NO: 55145 - protein, 490 aa, Zea mays
  Coding DNA Sequence Number=SeqID_11770
MALGLPSPEKSPTKVGLVIFLGTRGPGDHIPYPGGFGHASMKASTEAKSLGGSRLNPKGTRWESVGTSWSTGGDEVTSGADCTVVSGTRVTPSKSFASMLASSVRLELACCGETALVFVSDARSMPDVSPVGAPAPSTRSTADEVPPPAWPWLPRLLLRRWGRRRDKPECCSSATWGRRRRFSRRRAGCRPPLSLSRGGGKEYHVVAAVEGHELKTPETEHRPRMKRLLETTHLELDGKLFVNTQQAPTWRANCRRFDPGGSLDRRVNYRRVPQPRWVDARRSAKGGNQRETGVKGKPAAFVFVPRPGEAESVVFRGRGRVRALGSGEAEFVVFRGRARVRALGSGEAEFVVFRGRARVRALGSGEAKFVIFRGRARVRALGSGEAELPMAPAVGRGGASYGARGRTWPLSASLCRVAQQSERRGRCCLLVRLATFALNAPAIRSVGVAIWSRLLLGEDWASGEPKLCADGGYQLRLGVLGVPLIMVPDT

SEQ ID NO: 55146 - protein, 147 aa, Zea mays
  Coding DNA Sequence Number=SeqID_11771
MTLEPHPLWPGWRSLDSESFGFRDDDTIEFAALHVLTTFCGFHPLEMSTHPVGLFLAEKENDPMWKDRVEHAKDALRGETMSQLMSLVESTKITLDNQEDLVVDLSTELVEKDLQVEQMANHIQELKDQVEARENTIEVLEDQLQNT

SEQ ID NO: 55147 - protein, 159 aa, Zea mays
  Coding DNA Sequence Number=SeqID_11772
MEHARDSRRIAELSAEFDPLQREIVERDRAIDWVVNSCSIAWDCEANAQARVMELNVALENLQAYNNTLHEEVHVLYDQLHPNVPPEVVAMGAGTSGAAGGGPYGELDLFGAPPSMNLADEHAIKNSCSRRDVSDECPVENTELGAVLLLDELVYPRRN

SEQ ID NO: 55148 - protein, 152 aa, Zea mays
  Coding DNA Sequence Number=SeqID_11773
  Gene Ontology: Mol. function=transferase activity
  Homolog annotation: Hit_ID=Q6QP44; Match level="QueryCoverage=38%, HitCoverage=7%, E-value=8e-16, Identity=71%"; Hit description =Putative aminoalcoholphosphotransferase
MDKSPIGSGPARADTRKDVAEAVNGTRLINGSRRTGIVDTSNIDYGTSRLRPRHRLCRTHDPAQRYNRVWDGLLDAIRQMQLSANELRKLSRRNHVPEYLDMVHKNCLVNAMSDVTEIAKGLDTMSKDLEEVLIGPQPLLEDYEALGMYDDF

SEQ ID NO: 55149 - protein, 195 aa, Zea mays
  Coding DNA Sequence Number=SeqID_11774
  Gene Ontology: Mol. function=protein dimerization activity
  Homolog annotation: Hit_ID=Q3E8T5; Match level="QueryCoverage=27%, HitCoverage=12%, E-value=2e-09, Identity=50%"; Hit description =Uncharacterized protein At5g31412.1
  Pfam annotation: Domain name=zf-C2HC_plant; Domain location=53-108; Score=37.0; E_value=6.6e-08; Accession=PF07567.3; Description =Protein of unknown function, DUF1544
MAETPPSDARDAAAPTPPPLQPLRCDSGQPQEGQSETASAPEGVSGLRRNSDDLGWEYGVLVDINNKDKVKCILCDKQMCGGVYRLKQHIAQEGKNAKKCQGMKTTKEKLLEAQEKCKKALDEAKRKREEKTVRELELREEVHVSRVGGSKEVTCVGSSEPHKLGPMDKWTKAIDPTATKSESLTQQRLNKELWK

SEQ ID NO: 55150 - protein, 371 aa, Zea mays
  Coding DNA Sequence Number=SeqID_11775
  Subcellular localization annotation: CTP_CleavageSite=28; ConfidenceScore=5.03e-01
MQAACNRTKGAHPFDFDASSMGAQAHTSCGRKQRSSRLQAHVPSWDSERALSHGDRRHLWQAKEATLHLRLNDRVKKGTEKGDTPKGILLHEGSGPRALLLIRGSKAGPSEGTDSRLRALGLRAHYWSEVRRLAPRKGSTAASGPSGSAPTTGWPPKGSTAASEHAERGMTLGTSDTWPRLGLRSRGPGAALANSAPAKPLTASTYQPENLEPDYAPRLRPVKALSTQGTRSRLARAQPRAKAADPRGFTSRPRSLRCSTDRPDRKNSAACPAPTVVPLDRVRLTAAKSQPRAPIGSSASPDPRARAQPSTPDDQTFALARPPGARTQPSTLGRRTPPSPQPPGLGLATTWTTVPPRRLGPDSPDLEDLAR

SEQ ID NO: 55151 - protein, 44 aa, Zea mays
  Coding DNA Sequence Number=SeqID_11776
MNWGVVRFAVVPLMGLGVCGSLWQGIEGVEADLQEFQDFDEFED

SEQ ID NO: 55152 - protein, 179 aa, Zea mays
  Coding DNA Sequence Number=SeqID_11777
GGPQGHGNVRVAVGDGRSRPGPRAQAGKLIGGEESGLSRAQLINQMGQKASPGIKEGGRSTSGEDDLGSPVKFCRVQGLGKLHKLLAKLSERLARLGSDWSGLATVAKARVAMAGGKELAGAKEGRLADEGEHGRGRGSDKRSEHARANACACSGAWHGIEHEATQREVEFKRGLAPNL

SEQ ID NO: 55153 - protein, 73 aa, Zea mays
  Coding DNA Sequence Number=SeqID_11778
MGSPTLGDSSSVWCSAWIRTLSWTLAHGDIWGLCAGPLDRIGWIQSDLVFFKSPPLILDPRVPAAYRFDIRAI

SEQ ID NO: 55154 - protein, 95 aa, Zea mays
  Coding DNA Sequence Number=SeqID_11779
MPKLSCSHLRRCINLRIILVCCDTDLSPKIPVHTLNSRILLNPVFEDLHCNLADGEYILVPEQGAAQEVAPDPAPEPAPEDLPATALEGKPRFYA

SEQ ID NO: 55155 - protein, 132 aa, Zea mays
  Coding DNA Sequence Number=SeqID_11780
MRRFWQEKRAMLRLRRNNRAKKGWPPEGFNSRLRSRGPYTHYWARTRAKPRKTANSAPPDLGLGLGLSPGRRRTPLRPTQGLGLGLSPGRRRTPLHPTLGARTPPWALPNDLLLRPTRGLGLGLGMEERLDL

SEQ ID NO: 55156 - protein, 153 aa, Zea mays
  Coding DNA Sequence Number=SeqID_11781
  Homolog annotation: Hit_ID=Q5NKQ2; Match level="QueryCoverage=31%, HitCoverage=5%, E-value=9e-12, Identity=75%"; Hit description =Putative uncharacterized protein 9C20.3a
MVVKQYELADTFAEMIDDAHRAESVDTDNEAEAPQPAKPSDTSHHLSSGDLPTFCRTTSLSIASTPASPPSPMGQQPKSPASPSPLPCSPSDSDPDPGSGFDPIEEWFVDFDSAMSSELEAKGPELAEQAAAVPHTLETAAQKSFELEFGVKV

SEQ ID NO: 55157 - protein, 203 aa, Zea mays
  Coding DNA Sequence Number=SeqID_11782
MLRVMDKLKGKKRGDRGDSSRSRSTRGSGGGDTSSMLFQGSTASRQWLEQLLGCMEEQGREVASHSAPGQEREVAGHSAPGQEREVACHNALEPKREAIGSSGPMLEQDHNAFEQVREAADHNAPRQEDELAHQGSPMRDDDDYGEDYDGEADGEADDEVVTTTQAMNFSAQFTIFVGFGGPLEFHPTQPLDQRRVINPARRE

SEQ ID NO: 55158 - protein, 60 aa, Zea mays
  Coding DNA Sequence Number=SeqID_11783
MTLGLMQSELKRLLNAKAELSPPPEPYDPLADPEMKEALDIISMADSIIEEVVDFIVIIF

SEQ ID NO: 55159 - protein, 287 aa, Zea mays
  Coding DNA Sequence Number=SeqID_11784
  Subcellular localization annotation: CTP_CleavageSite=78; ConfidenceScore=5.37e-01
MAPPVTWSVRALGWARRRLLRGRGRVCLPRSRLSPSPWVGRDGDRRLRPRSSPSPGSGEAEFVVFRGRARVRALGRARQSSLSSGAEPECWSEGRDATLRSKSPLLSRCSDRQSRQGHPSLDRHQTKTGDEGIPQCGLAQLRGPRAIRPIVTGPAWPPRVTGLICKGIHVAEGTCVLNTRRWAFSKFQHRVRALGRARRSSSSSGAEPESEPWVGRGGVRRLPGPSPSPSPGSGEVEFLMAPEARLRRCQPHSVEWHGSRSDAGGAVFLSDWSVERRSDCGHFGSVD

SEQ ID NO: 55160 - protein, 183 aa, Zea mays
  Coding DNA Sequence Number=SeqID_11785
MMKMTSPTPINGGDTCFSSDYLSYEGFPSILWEVLSSASYPTPPLYMVQLYEEHRVPHCRVWLTLEAQPLQPSWRSLESKTIRFRANDTTEAAAMKTLTTFCGYYPLEMVMHPLGLFPAEKRDDPMWCNLVSHVKDEWAMHPDQVGRITVQCMSALYRLQALQSDAMAHLTNLAQTTKLTLDS

SEQ ID NO: 55161 - protein, 74 aa, Zea mays
  Coding DNA Sequence Number=SeqID_11786
MGDSVPGPMRGKVYGQVQSVCIKTRACLQKLRLQEVLGGRLWSWLLDFLLGNSLLKDEHWLPTGSHKPVSKIEA

SEQ ID NO: 55162 - protein, 151 aa, Zea mays
  Coding DNA Sequence Number=SeqID_11787
  Subcellular localization annotation: CTP_CleavageSite=26; ConfidenceScore=5.14e-01
LYPRTHSARPRPRLALDRPRRARPPPASSAPASAAPRPAAPALPEPLSGEPGSAALGLGRLAPLGPDPGRSARPPQRTPPPREPHPPRAARPDPASRRARPRLGRPPAGPSAPPSADPASPAPGSAALGHLASGEPRARSAPRRPARPPAS

SEQ ID NO: 55163 - protein, 199 aa, Zea mays
  Coding DNA Sequence Number=SeqID_11788
MRLHTLKEVLLTQGSVIQPIVVVRGNEMFDVFWGSLMDTKFHKHQVIDWEYMQGQSVMEGLIAKFQTSGLLGIPRRFGETTGLRHHPAVINKIVKGEVMNVVIFMMRLLNDLKMDKNQNLAYAPYIMALIKAKTRFEGRCETTHITFRPFKNEISFLTRPLTPFPDDETVLVDDYAAQPKALPAQQMPPSPPPHQQEQY

SEQ ID NO: 55164 - protein, 103 aa, Zea mays
  Coding DNA Sequence Number=SeqID_11789
  Gene Ontology: Mol. function=cysteine-type peptidase activity; Biological process=proteolysis
  Homolog annotation: Hit_ID=Q5NKQ2; Match level="QueryCoverage=100%, HitCoverage=11%, E-value=7e-38, Identity=76%"; Hit description =Putative uncharacterized protein 9C20.3a
MKSVDRPPANPKRITIESSQEFFSVEIPRSVSTGDPPNTKHFVHRPAPVERPAVIHEANDQTGSGDDDDDFMTPTKKRNATGSPIKILGKTCTKRMKVVETPR

SEQ ID NO: 55165 - protein, 38 aa, Zea mays
  Coding DNA Sequence Number=SeqID_11790
MSTDEPEDGWTKQMSEQKLIVNWPSFNNTNVVLSQASP

SEQ ID NO: 55166 - protein, 65 aa, Zea mays
  Coding DNA Sequence Number=SeqID_11791
QTLSRKGRPSVSLKDRSDCWPADLGPFNWPHASSWNTNPQPGKGNAYMCNVVFEAIQFLNGSTLK

SEQ ID NO: 55167 - protein, 120 aa, Zea mays
  Coding DNA Sequence Number=SeqID_11792
  Gene Ontology: Mol. function=nucleic acid binding
  Homolog annotation: Hit_ID=Q5NKP8; Match level="QueryCoverage=95%, HitCoverage=20%, E-value=2e-08, Identity=34%"; Hit description =Putative uncharacterized protein 9C20.4c
MDVLDELDGVLCRLEPDIGCNESCDVSDDEENQDGDKTMTGCEHALKLITAGNQVDNMRIPPEIGDTSSPCHVAHEQMEHIGASSEAKKRLNFNVDVINLSMPDRARPKGRTIKIQKIGL

SEQ ID NO: 55168 - protein, 200 aa, Zea mays
  Coding DNA Sequence Number=SeqID_11793
MLPTLDESGVAVRQTGGRDPLRGIQISGVPAGPHPIGVAPSANPTVAPSPLDKGKGAASNASALVGSGGASSSVAPKATPPPPGTRNLQHESARSGADGPPPAAVQTAPAASHAPAGGPAAAAPASGGIAATEDIPVGGSRPASDIAPTPDVGGDTGGASSSNPPPAQEEMEVVFGRRLRSGAEEEAAPIPLPRMLSRAH

SEQ ID NO: 55169 - protein, 357 aa, Zea mays
  Coding DNA Sequence Number=SeqID_11794
  Subcellular localization annotation: CTP_CleavageSite=28; ConfidenceScore=5.13e-01
MQAACNRTKWAHPSNSNAPSMGAQAHTSCNRRAGYYIPGTAPPLAPLPCLLDCGTSTATRGNPAYDPIVPARHIGHGDRERGYPERDPSPRRKRSPSPLLIRGSKAGPSEGFNSRLRALGLRARYWLALEGFTAASDAERGMTLADPGGFTSRPRTPSSNGYTFGSPEAQSSPRSNLGQVATPTDRIAGAFNAKASDSGSAPKDDELRLARPQGLDSGSVPEDDELRLARPQGSDLGSAPEDDELRLARPQGSDSALASADGLHLARPRSSDSTSASEDRLDLDLGKASTSPNPGLGPTTSQEAPSLPYPKLTKATGNKTGVPSGSPRLQRSSDGHDTTRTGCQNLSGCHDGMYLGH

SEQ ID NO: 55170 - protein, 73 aa, Zea mays
  Coding DNA Sequence Number=SeqID_11795
MPPPPPPPPPPPPSRLQLLWLLALAFQLCRLPHLPFAPVHGSIRQAAHGPLAELAQRIGLGLGRGSMADRQFD

SEQ ID NO: 55171 - protein, 95 aa, Zea mays
  Coding DNA Sequence Number=SeqID_11796
  Homolog annotation: Hit_ID=Q5NKP3; Match level="QueryCoverage=82%, HitCoverage=40%, E-value=2e-13, Identity=50%"; Hit description =Putative uncharacterized protein 9C20.7
MYDKLRRSHRLDAVQSGCSALSIVKQGGLMVVTNVGDSRPNQESSVLGMSRAFDDYYIEDRGVFLTQEVTQRRADNNDQFVILATVVVAFVPTCL

SEQ ID NO: 55172 - protein, 412 aa, Zea mays
  Coding DNA Sequence Number=SeqID_11797
MGSARVAFVLLLLEERNFAEVGTFQPSLGFKDFQQAAQLHPLADASRIFIILAGAEAGLSRDLPSRGPASRFFLQLLGVEIILQLCRGGALQPCRGRRTVAAQPRVQHSVLCLGDGGQPHRGVSQHVVRREGDTRVLGRSHSRFHDEDGSEDLPVRFGAAGARWCGVGGQVDVTVSAEVVAAGESFSADETVSATHGPTSGSLALISGSRPLRGDTNESLPAVASVLGQSLLLQRSPASHPKFVVPQALRCGGCSYPWEWNRSSVCNGTLSVGVCSLWLSGPERLCIWASPSARSALPPEASLAQFKETLGRSAMSQRRSWLEKKLRRPEPGWAVHWRDQRRSRVVEAMSRADVLGGQLAEATERPVEPSARAGFLEETPAMMAQARRWESLGSVGLAAYVYSIVFRIPLSK

SEQ ID NO: 55173 - protein, 275 aa, Zea mays
  Coding DNA Sequence Number=SeqID_11798
  Subcellular localization annotation: CTP_CleavageSite=60; ConfidenceScore=5.09e-01
MDKRGKRAVSAPASHSRVTALGARKRSAADFCKDSHVCDLWRHLNTGRNKPPRVRRRLPRQSTPARAPAPRPSQASALVRVRGYKTPGSLGRTPPHALKPHRSSVRRRLPIRDAPAATRAPCHRRPASPAIPSPVQPSEKAVPVSVKLPERGIGLCFTGEAGPRSPDFNRPPATVDRGTPCTSLRFLARLDSLDLHEAPYALGLNYAAVDRPEHTPPTSSPACSRGPGDSGHLRRRAVPRRDRQTLPEPTLHFAGTPSPPHKDLLSPEDVSKNNL

SEQ ID NO: 55174 - protein, 170 aa, Zea mays
  Coding DNA Sequence Number=SeqID_11799
MAESMADAWLPVSGEVPLLARPLDPGVILFLRSCPGLSEPPCVLQQPVPCGLQALAMAGPLSLPHCCLNEEEIVDCDPFLSFEGSKIKRWRPSDLALRVYKVATRLMVFGIDSGNASPLQPNRTLAEYVDVYSPLLYTPNPPGCPHCNHCSGEDEAVEGDFLEFQDYVEF

SEQ ID NO: 55175 - protein, 74 aa, Zea mays
  Coding DNA Sequence Number=SeqID_11800
MFGLQVATRLMVFGIDSGNASPLQPNRTLAEYVDVYSPLLYTPNPPGCPHCNHCSGEDEAVEGDFQEFQDYDEL

SEQ ID NO: 55176 - protein, 225 aa, Zea mays
  Coding DNA Sequence Number=SeqID_11801
  Gene Ontology: Cellular component=nucleus; Biological process =ribosome biogenesis and assembly
  Homolog annotation: Hit_ID=A3AYT6; Match level="QueryCoverage=23%, HitCoverage=14%, E-value=1e-14, Identity=73%"; Hit description =Putative uncharacterized protein
MYPDDAGAEPCMLSSFILRELSGEDLKVKTVPLPQRNSMFSSRPKYKKKSSTYNTTTPFHSLQAEKLREKLRQECLRKGTELAHGVADALFAVPPTEDLDGPIVHLPLPVVRLPREKHVSEEAGNHLFVESCIPLHDYMYIIVSQDNATVTLLSNSHVSFLQLGAGTSLPRLVAAKVGADVTLTDIAQNAEEIIQHLKHSCPAHLYATSMSPPAVQQENIKIAPK

SEQ ID NO: 55177 - protein, 365 aa, Zea mays
  Coding DNA Sequence Number=SeqID_11802
  Homolog annotation: Hit_ID=Q05FE8; Match level="QueryCoverage=72%, HitCoverage=99%, E-value=5e-81, Identity=57%"; Hit description =Asparagine synthase-related protein
MTTSSTIRNTTQLGDHGAHGLHPLSFTFDWWLLPKAPYLAYKLKMLALGRTEQIPSLALHKQSTAAERGRMLAIFQKQVAHAPQELNSPRAGASPSKPRNPDEILRDFHAAHPAAAFSASFGGGAALACVGPSSSATATGTATYQRMFCGLDHIYCVFLGRLDNLSGLIRQYGLCGRSTNEAMLVIEAYRTLRDRGPYPADQVVKDLAGAFAFVVFDSRSGAVFAALGAADAGGAPVPLYWGVAADGSAVISDDRDLVKRGCGKSYAPFPAGCMFHSDGGLKSFEHPMNRLKAMPRVDSEGAMCGATFKVDTFTKINSMPRVGSAANWAAWDEAIYRTLSNSFRSELDITGSISVKATLGQGGKQ

SEQ ID NO: 55178 - protein, 81 aa, Zea mays
  Coding DNA Sequence Number=SeqID_11803
  Subcellular localization annotation: CTP_CleavageSite=36; ConfidenceScore=5.60e-01
MPTYGKTPPDFALSMPMLAPPPPPPSQFPTGFQTPPASVAAPGDGSGQDDASHSWVNNLFNTQSSSGGSGYNSNQPGDRYE

SEQ ID NO: 55179 - protein, 208 aa, Zea mays
  Coding DNA Sequence Number=SeqID_11804
MPSWQSERFWHPVHVMSWPSEESWSPAEGNDGPPGDVVGPSPSLGEVAIPPRSRLSPSPRVGRGGVHRLPGLRLSPSPGVGRGGVHRLPEPRLSPSPGVGRGGVRLPRSRLSPSPGSGKAETVFRGRGCVRALGSGEAESVVFRGRDGGRTLGSGEAELPMSPEAGLSRCRPHSGEWRGSRSRAGSAVFLSGRSVERRSDCVHFGPVD

SEQ ID NO: 55180 - protein, 398 aa, Zea mays
  Coding DNA Sequence Number=SeqID_11805
  Homolog annotation: Hit_ID=Q6ZBG7; Match level="QueryCoverage=16%, HitCoverage=24%, E-value=3e-16, Identity=67%"; Hit description =Putative uncharacterized protein P0623F08.43
MAAIVAVARRRKEYHVVAAVEGHELKTPKTEHRPGLERLLETTHLELDGKLFVNTQQGNDGPPGDVVGPSPSLGEVAIPPRSRLSPSPRVGRGGVHRLPGLRLSPSHGVGRDGVHRLLEPRLSPSPRVGRGGVRLPRSRLSPSPGSGEAETVFRGRGCVRALGLGEAESVVFRGRDGGRTLGSGEAELPMLPESGLSRCRPHSGEWRDSRSRAGGAAILALNAPAIWSVGVAIWPRLLLCEDWSSGEPKLCADGGYQLRLGVLGVPLIMVPDRFVAPNLCIAWTPSIESLYLTEVATDDIIEIKPFYAKRAFSRDDYNLRVGWGATDAIGNPSLAGLVESGALVRVSWHWFGPVPAWWLLDFVELEDMWILDTSHLSEDSIANVKRVLHTVQPDNVVV

SEQ ID NO: 55181 - protein, 166 aa, Zea mays
  Coding DNA Sequence Number=SeqID_11806
  Subcellular localization annotation: CTP_CleavageSite=65; ConfidenceScore=5.76e-01
MAAQQQETFSPRLPHPSTQTVPLPAPFLLFLRPPLPTAVNPSSLFVVVPAGCSSKCAASRALPARCFVKPSGQHAVDAHRDCNLADGEYVLVLEQGAAQEVAPDPAPESASEDLPATTLEGKPRNPVEMNTSSLEDMVAGVTWPSILPPGWTVEWDPTSAEEEHEE

SEQ ID NO: 55182 - protein, 381 aa, Zea mays
  Coding DNA Sequence Number=SeqID_11807
MGSACVAFILLLLEERNFAEVGSLAASPHQWLPKTVTTSSMVGRSKPGCGLCPALNFKDLHHPCWGGGRAEPELYLPYGPAGHLLLQHSGERALPGLAEGADFNNAGPIGRKRQCGYLPAVRAAVAPRALGDRPRCRTLLERRSCSWVVLPLLRHDASVRRSVLARPGGLEWGSAGEQVAAVVGAEVVAVGEGLVADEIVGAICASGLRIFGFDSLSSPLEWGRGRGPCRSSVCPEVIAAAVWPPGAEVVVAAAGVGGGEPPRVKENPRPLCDELEPEAAVRGADIFLRGGDPSPVSPSEAGSDSVEGGVDAEGAAAPPTDDLFVGSRIVYPSESYFSRKVMSEKVMSEDPTIEVVEKRERCSGRKTFSEENFDAEGVPPF

SEQ ID NO: 55183 - protein, 148 aa, Zea mays
  Coding DNA Sequence Number=SeqID_11808
  Subcellular localization annotation: CTP_CleavageSite=65; ConfidenceScore=5.79e-01
MAAQQQETFSPRLPHPSTQTVPLPAPFLLFLRPPLPTAVNPSSLFVVVPASCSSKCAASRALPARCFVKPSGQHAVDAHRGLLFLRSPFVVVVHPRRGTLRFARRRPIIQRSSDVWSDAQIRITVILANTVWSKCVWLWLQICAIEKW

SEQ ID NO: 55184 - protein, 59 aa, Zea mays
  Coding DNA Sequence Number=SeqID_11809
MKIKKKEFLSLKQGSMSVSEYRYDLVAHTFPSFQRLLEKAQAIEHKRVQLGDLRRKAIS

SEQ ID NO: 55185 - protein, 525 aa, Zea mays
  Coding DNA Sequence Number=SeqID_11810
MKATQALPIRGLGRWKGAMHEEGAKAWLPPKVVAPLLKVTLPTCVLRRRRLSLHQHAPRSSPYDTGPSPTRHASWPRTEEAKPPRAERVTAQWLQALLHLHLNQRVKEWTAMQAACNCTIGAQPFDFDTSSMEAQAHTSCNRCAGYYVRKTAPPLAPVPRLLDCGTGAATRGDPAHGPAVPTEHIGHGSVSRRRMRDGRYGQKWAGSNGGGRRAEAAVKSSVGSRPLLGQRESPLPWREDDTPVFRSSNGSRNGCPANHSSRRIYSATGQATPLAGEASDASLRRNDRVKKGTEKGDTPKGILLREGSGPRALLLIRGSKAGPSKGFESRLRALELRAHYWSEVRRLAPRKGSTAASGHSGSAPTTDQGFEGWPSEGFDSRLRTRRARDDSGSKLRPLKGHDLALPEPILGQEQQTQENSAACTAPTAVPPARVWLTATKSSLGRHRKLRLARPQGSDSTSTSDDGLRLARPQGSDSTSTSEDGLRLARPQGSDSASTSEESPPHPTSGSDRPRRRGVHHYPTPS

SEQ ID NO: 55186 - protein, 160 aa, Zea mays
  Coding DNA Sequence Number=SeqID_11811
  Gene Ontology: Mol. function=carboxyl- or carbamoyltransferase activity; Cellular component=ornithine carbamoyltransferase complex; Biological process=amino acid metabolic process
  Homolog annotation: Hit_ID=Q8SA97; Match level="QueryCoverage=94%, HitCoverage=24%, E-value=6e-22, Identity=43%"; Hit description =Ornithine carbamoyltransferase
MAPPVDVVGPRPRLGDVEAPPRSRSSLSSVAEVESEPLGRARRRPSAEARAESEPWGRAKRSSSSSGAEPKSEPWGRADRSSPSSGAEPKSEPWVGRSGVHYGRSVERRNDCGHFGSVDRRTCVRIKLCADGGYQMRIRSLEGTPNYGPRQCPMRLSLRP

SEQ ID NO: 55187 - protein, 146 aa, Zea mays
  Coding DNA Sequence Number=SeqID_11812
MSSIPPPAGWLLATIVAIARRGKEYRVVAAVEGHELKTPETEHRPRLERLLETAHLELDGKLFVNTQQAPTWRANCRRFETGGSLDRRVKCRRVPQPRWVGARQSAKGEKAAGEREVEIPRPSCLSRAQVGRKERIQVYNGGVAEC

SEQ ID NO: 55188 - protein, 111 aa, Zea mays
  Coding DNA Sequence Number=SeqID_11813
MEARRASRYRVHKRRSRRPGTQKPGVKKKTCKVKVNRVKKSYDDNSIKGLTSMLSVEQVLNGKLTEFNTKTTDQAKDGGKKSFEVPSAREKVKETRNPKARGEEEDLQSQG

SEQ ID NO: 55189 - protein, 334 aa, Zea mays
  Coding DNA Sequence Number=SeqID_11814
  Homolog annotation: Hit_ID=Q6QP51; Match level="QueryCoverage=30%, HitCoverage=36%, E-value=2e-15, Identity=51%"; Hit description =Putative growth-regulating factor 1
MQAACNHTKGAHPFDSDASSVEAQAHTSSNRRAGYYVREAAPPLAPVPRLLDCGTSAATRGDPAHDLTVPTEHIDHWSDNRGRRRDGQYGQKWVSSNGGSRRAEAAVKSDRERGYSERDRSLRRKRAPSPPTDQRFEGWPLGRVRQPPQSTQAPRLLLIRGSKAGPSEGFDSRLRALRLRAHYRLAPKGFDSRLRARRARDDSGYVRYTTKARATLPRPLADPYRTGHGRPLGSPVRNSLETPCSAPSKGNMALPPPPPCGKAMQGRMKKAESVLDRPLALCGGSGAALANPAPAKPLTASTYQPKNLEPDYAPGLRPVRMREQPDRPKHHETR

SEQ ID NO: 55190 - protein, 220 aa, Zea mays
  Coding DNA Sequence Number=SeqID_11815
  Gene Ontology: Mol. function=oxidoreductase activity, acting on paired donors, with incorporation or reduction of molecular oxygen; Cellular component=integral to membrane; Biological process =carotenoid biosynthetic process
  Homolog annotation: Hit_ID=Q2QLR3; Match level="QueryCoverage=88%, HitCoverage=53%, E-value=7e-37, Identity=53%"; Hit description=Amine oxidase, putative, expressed
  Pfam annotation: Domain name=DAO; Domain location=42-216; Score= -57.6; E_value=0.064; Accession=PF01266.15; Description=FAD dependent oxidoreductase
MSPAARRILLAVAARRRRFSTDAAASDPSRASQQLPRGKRWDAVVIGGGHNGLVAAAYLARAGRSVAVLERRGVLGGAAVSESDLVPGFRFSRCSYLLSLLRPAILRYEEKLENFCKLMDFVIDSAPPELRQEAHFSMVDRMKHRVEKSAFWGHLLRHVMQQGQKNMVYVQGGMGSVSSAISKAALEAGVQIVTNAEVSQVMVNETSGMVEGVSTLNNLT

SEQ ID NO: 55191 - protein, 671 aa, Zea mays
  Coding DNA Sequence Number=SeqID_11816
  Gene Ontology: Mol. function=aspartate-tRNA ligase activity; Cellular component=cytoplasm; Biological process=tRNA aminoacylation for protein translation
  Homolog annotation: Hit_ID=A2X8E8; Match level="QueryCoverage=87%, HitCoverage=82%, E-value=1e-140, Identity=88%"; Hit description =Putative uncharacterized protein
  Pfam annotation: Domain name=tRNA-synt_2; Domain location=361-667; Score=239.4; E_value=8.1e-69; Accession=PF00152.11; Description=tRNA synthetases class II (D, K and N)
  Pfam annotation: Domain name=tRNA_anti; Domain location=97-184; Score= 34.3; E_value=4.6e-07; Accession=PF01336.16; Description=OB-fold nucleic acid binding domain
  Pfam module annotation: Pfam domain module=tRNA-synt_2::tRNA_anti; Domain location=361-667::97-184
MSSEPPPAPSAAAAEGLAADLSAATLSKKQQKKDARKAEKAEKAAQRQQQQQPADAEDPFAANYGDVPVEEIQSKAISGRLWSQIGDLDDSSAGRSVLIRGSLQAIRPVSKKMAFVVLRQSMSTVQCVLVASADAGVSTQMVRFATALSKESIVDVEGVVSLPKEPLKATTQQVEIQVRKIYCINRAIPTLPINLEDAARSEADFEKAELAGEKLVRVGQDTRLNYRAIDLRTPSNQAIFRIQCQVENHQGSCPNEGDDPLGPCRRAAYPDLDFCRGFKKRTTACSCDDGHGVALEATTRCFSPRRDSVEHHNELITLLFEPAKTLFEPTGGGEGWAAGGGEDNLEPISGVIRSMGIAVFSGEVIPLCRRLGSRKFREFLLSKDFVGIHTPKLISGSSEGGAAVFKLLYNGQPACLAQSPQLHKQMALCGGFERVFEVGPVFRAENSNTHRHLCEFVGLDAEMEIKEHYFEVCDIIDGLFVSIFKHLTENCNKELETINRQYPFEPLKYLDKTLKLTYEEGVQMLKEAGTEIEPMGDLNTEAEKKLGRLVREKYDTDFFIMYRYPLAVRPFYTMPCYDNPAYSNSFDVFIRGEEIISGAQRIHTPELLTKRATECGIDVSTISTYIEVFSYGAPPHGGFGVGLERVVMLFCALNNIRKTSMFPRDPQRLVP

SEQ ID NO: 55192 - protein, 263 aa, Zea mays
  Coding DNA Sequence Number=SeqID_11817
MERLLETTHLELDGKLFVNTQQAPTWRANCRRFDPGGSLDRRVNCHRVPQPRWVGARRSAKGGKPEGDRRKRGNSRPSCLSRVQVGSSPSPGSGEAETVVFRAEAESEPWGRARWSPSSSGAEAEAESEPLGSGEAEFVVFRGRARVRALGSGEAESVVFRGRGRVRAVGSGEAEFVVFQGRARVRALGSGEAEFVVFRGRARVRAIGSGEAELPMAPEAGLGRCQPHSVEWHSSRSGTGGAVFLSGWSVERRSDCGHFGSVD

SEQ ID NO: 55193 - protein, 84 aa, Zea mays
  Coding DNA Sequence Number=SeqID_11818
MESALHFSSVYPEPKTFAGEGLQTRILLAEGGFGCNGSGSKVRKLSKMCKRPETTFIANLANTTNLAIAKMGPGSFPLPPAQGN

SEQ ID NO: 55194 - protein, 69 aa, Zea mays
  Coding DNA Sequence Number=SeqID_11819
MSKNTRDTRFIPRFGHTTKVPYFLVEAPTKSRVSFNPNPPFADHKGCGGQISPGSTGRIKDLTKGPRAQ

SEQ ID NO: 55195 - protein, 70 aa, Zea mays
  Coding DNA Sequence Number=SeqID_11820
MRIRLKMMKMKIKRMSYLKRRTMIKGEMKAMKTRKMIKRFRVKDRHTQESTKQFKEITPSTPSFGDIHKG

SEQ ID NO: 55196 - protein, 157 aa, Zea mays
  Coding DNA Sequence Number=SeqID_11821
  Gene Ontology: Mol. function=kinase activity; Cellular component =ornithine carbamoyltransferase complex; Biological process=amino acid metabolic process
  Homolog annotation: Hit_ID=Q6QP54; Match level="QueryCoverage=42%, HitCoverage=31%, E-value=3e-10, Identity=53%"; Hit description =Putative kinase
MIPPVAWSVRARGRARRRLLLRSRPGSSKDAIPPAVEVEAEPWGRARRRPPSEVEVEPWGRARRTPSSEAEAGAEPWGRARRSPSSKAEAGAEPWGRARQSFLWRLRLDSAAVSLTLAGGTAVEAGQAALLSCQVGQWKGEVIVVTSALSTEDRALG

SEQ ID NO: 55197 - protein, 57 aa, Zea mays
  Coding DNA Sequence Number=SeqID_11822
RARGYERTLKLQRLVILDQRYFGTEANEIDGSDYDYGIGEDEAVEGDFQEFQDYDEF

SEQ ID NO: 55198 - protein, 172 aa, Zea mays
  Coding DNA Sequence Number=SeqID_11823
MTGLMSFTSLVTCEVAVNALSHEGCGHFEVFDQSDEGFERVIFQVEDPMAHDEEVEDLGDLNSTLPDSTLPEASGVELAPSPDAGKGPSATPAPTGADGDFNRSACNDSLFGSVSDGEFGSSFPWMEESLDEGLDYFVALDVDAAETSPRVEGARISCASTGVACKVMETMW

SEQ ID NO: 55199 - protein, 216 aa, Zea mays
  Coding DNA Sequence Number=SeqID_11824
MERDRQDTARKRRAVTRVGDPFREAKKAWGEREVCRPWQQQTTAGRQVDRPWAQQVFGGSEIRSWCRVRCGAAGCCHDCGGGHFANGGGRLRRPCCVGCSDFGVCYRNQASPGAAYGCCLGESRLRKNKSRRLTERLAAVEAKRGDLRRQLVEERRDANKAIADAQAAQAEAKLAWVEASLASQRAEELEARLNSLRNRVDKAEASMRAEVERTHA

SEQ ID NO: 55200 - protein, 197 aa, Zea mays
  Coding DNA Sequence Number=SeqID_11825
  Subcellular localization annotation: CTP_CleavageSite=46; ConfidenceScore=5.58e-01
MASFPPPFLLSQGRCSLLHSLPSAPSSSMDCSSSTLLSMAQAPFFRAAEAPPMAQDIPPASSLPVHGRQPLLLFALLRSTPLCSTSSSERPHQPCPGAARRRSPAGRHHGLVGLLLAGELMLLMAPFPACSLSPMTSSPRPLCPPPKQQPWCPSSLRSGAVQKNSSPMTASSICAALVSRRQKSLLDVAAVSRAMHD

SEQ ID NO: 55201 - protein, 87 aa, Zea mays
  Coding DNA Sequence Number=SeqID_11826
MASGLASGVLVGYVMHLLLTASDSSAKASVSGRYPWKLSKNLSQRLLQESMDNGGNLVYQVKAGPLRAMMKDLAIVASSPPDDATAT

SEQ ID NO: 55202 - protein, 334 aa, Zea mays
  Coding DNA Sequence Number=SeqID_11827
  Homolog annotation: Hit_ID=A2XFR6; Match level="QueryCoverage=45%, HitCoverage=48%, E-value=5e-20, Identity=36%"; Hit description =Putative uncharacterized protein
MDPGPHMLCIQFCPQNRMVRTIQTTRINTNYIPPPRQVPVYLVVVEENPVDLPRIRVENRVILEDSSEEFLPTPTPLAESPAFIARSSASAPPALAVQAPAPGGDDSGDDDEDDEEKEEDEENINEEANEEQQDHYIGLWPVTEHYTSMFKTGHFPNLLQDVLHALGTYVRPMYETRRVYEPPRACYYITRIHFRVMDAGDSGFRTLSTHEYLTPLSTYAASLHLPAAANTKYKHLPLCIRGENQTIIVPGGAGEDSLNTLAGVVAGLNTDLDSATLDLSRVHMELEDAHARITALEAQLDGSNPPEVQVPTMALSPPHKRIRYGEPGSITRLL

SEQ ID NO: 55203 - protein, 226 aa, Zea mays
  Coding DNA Sequence Number=SeqID_11828
  Homolog annotation: Hit_ID=O48967; Match level="QueryCoverage=100%, HitCoverage=44%, E-value=4e-48, Identity=51%"; Hit description =Putative uncharacterized protein
MVHIVEHHDFLPEDFVVEEAAASSTPRATNLPAPGATTAVHSARQHTPAQTSRASRAALGALSAARELLRHPPSSTASPGAMKQWRDDVDRLLDMAHSGSTRPRPRSRRQPEASASVRSPSVRAALTEDLQAELNRLQASEDAPVSMERSNDLRAELNHRRVGEDARVSLERARERRQNVEGRNLDYEFAAVAPTGAQIQAGVPLAGVGCAALADHLRAAIWPSKF

SEQ ID NO: 55204 - protein, 156 aa, Zea mays
  Coding DNA Sequence Number=SeqID_11829
MGKSKKSGSSSHHSGDKRKREPSPPSEDFGDSEYSEEEFPSESEGSLVYTSPPVSSDDSDDSQGIAAEVWTYIWAVERFGLEGSDESEVSSDEENSPDSSEEGSGGDDDDEGDGNDGGDGGGDGEGGKCDDKGDDDGGDDKSGSGSSKASGKAPLG

SEQ ID NO: 55205 - protein, 101 aa, Zea mays
  Coding DNA Sequence Number=SeqID_11830
MMLVDYTMGLLQQPGCPEVVQGASLAEVQGKAASQTPPPAEARGKSPTAPAPAPGVGAPAPREGDDAVSPGDRTNLALCDAGDALPGEKAKMGSHIYMQCA

SEQ ID NO: 55206 - protein, 147 aa, Zea mays
  Coding DNA Sequence Number=SeqID_11831
MHIIKDSPTPLGKSRWEEARERCPRIGKPLRALSKLIERCNEKQDRGRGFTTRLATIVAMAEEVGLVDFGNLALLHLEVGLIDFVIVMVCEETQAIILVQATQGPTSSREDEAYITRTVVPVVGEYKHNGRGEVPKSLEMIEASVNI

SEQ ID NO: 55207 - protein, 80 aa, Zea mays
  Coding DNA Sequence Number=SeqID_11832
MEMLMKPRLVILDEPTIGLDRRSSNSRRLARLPCLGVQAVAIFLASPYHLKNHAGVKDDGVLHHCMVRRASQAEFRELLN

SEQ ID NO: 55208 - protein, 115 aa, Zea mays
  Coding DNA Sequence Number=SeqID_11833
MDRPLPVRLFCVESQRGTSKVQTQSMHYAVCTEARSKESRGVLVATIEHKTARQELTEVRREGQRASRCPARRPRLAQWRLAAAASRQQLGAWGLGSAAAAGTQVGWQLATGVGY

SEQ ID NO: 55209 - protein, 231 aa, Zea mays
  Coding DNA Sequence Number=SeqID_11834
  Homolog annotation: Hit_ID=Q6QP51; Match level="QueryCoverage=68%, HitCoverage=81%, E-value=3e-30, Identity=44%"; Hit description =Putative growth-regulating factor 1
  Subcellular localization annotation: CTP_CleavageSite=58; ConfidenceScore=5.09e-01
MMTASKRDRERGYSKKDPSPQRKRAPSPSTDQRFEGWPLGRVQQPPQSTRAPRPLLVRGSKAGPSEGFNGRLRARRARDDPGYVRYITKARATLPSLGGHRKLRLARPQGSDTASASENGLRLARPRARTQPRPRKTVSASPDPRARAQPRRWTTDSASPDPRARTQPRPRKTVSASPDPGLGLNLDLGRRTPPRPTPGLGLSLDLGGASASPDLRLGPATSQGRPSLPYP

SEQ ID NO: 55210 - protein, 411 aa, Zea mays
  Coding DNA Sequence Number=SeqID_11835
  Gene Ontology: Mol. function=protein binding; Biological process=red or far red light signaling pathway
  Homolog annotation: Hit_ID=Q67W96; Match level="QueryCoverage=94%, HitCoverage=98%, E-value=1e-109, Identity=57%"; Hit description =Kelch repeat containing F-box protein-like
  Pfam annotation: Domain name=F-box; Domain location=24-71; Score =27.7; E_value=4.3e-05; Accession=PF00646.24; Description=F-box domain
  Pfam annotation: Domain name=Kelch_1; Domain location=130-179; Score =17.6; E_value=0.024; Accession=PF01344.16; Description=Kelch motif
  Pfam annotation: Domain name=Kelch_1; Domain location=181-220; Score =12.8; E_value=0.088; Accession=PF01344.16; Description=Kelch motif
  Pfam annotation: Domain name=Kelch_1; Domain location=223-269; Score =3.0; E_value=1.3; Accession=PF01344.16; Description=Kelch motif
  Pfam annotation: Domain name=Kelch_2; Domain location=129-179; Score =17.2; E_value=0.062; Accession=PF07646.6; Description=Kelch motif
  Pfam annotation: Domain name=Kelch_2; Domain location=181-220; Score =4.6; E_value=13; Accession=PF07646.6; Description=Kelch motif
  Pfam module annotation: Pfam domain module=F-box::Kelch_1::Kelch _1::Kelch_1::Kelch_2::Kelch_2; Domain location=24-71::130-179::181 -220::223-269::129-179::181-220
MSFSSMSKQQVLDAGDGEGEEVVELIPGLPEEVAEKCLLHLPFLYHRLFRTVSSTWNRFLTDSPAKPLLFTPAEGAGAGAGSAAMGSLSLSLPFLFAFAFDPVSRRLQCQALDPFSRRWLLLPPVPGGAAAGSFAVVGLPRRGEIYVIGGVEEGSDKAVTSVAVYSAARNGWEEAAAMRTPRGYMAAGEVGGRVVVAGEDGEAEVFDPDAGRWSPAAPRRGAAVAWYDAAAAGGKLYVTEGWAWPFERAPRGAVYDSATDSWCEMARGMREGWTGSCAVAGGRMYIVAEYGEWRLKQYDEARDEWRMVAGSGVPPEVRRPHVVAGEIGEVAGGRRRIYVVGAGLDVAVGTVSASDTAAAPGVHGVEEEVVEWEVVKGPTEFVGLAPCNAQAAQSRHVGPVCERAVMGLGRG

SEQ ID NO: 55211 - protein, 326 aa, Zea mays
  Coding DNA Sequence Number=SeqID_11836
  Gene Ontology: Mol. function=histidine-tRNA ligase activity; Cellular component=cytoplasm; Biological process=tRNA aminoacylation for protein translation
  Homolog annotation: Hit_ID=P93422; Match level="QueryCoverage=50%, HitCoverage=29%, E-value=4e-30, Identity=67%"; Hit description =Histidyl-tRNA synthetase
  Subcellular localization annotation: CTP_CleavageSite=4; ConfidenceScore=5.05e-01
MASTAATVTFGGKGAALSPAAVYALSIGLAAPGIDPSAHKALSTRAPSPQETPAPLAAALPALAPAESRAAAAVLLNKLVLTASDSASALVTAATAVGLAGSLDLAAALPLGSRDEVAVAAASAPVAVGLAALVDCCAAPLARVADAVAALSCEAVRGDAAAFDVQASGDGLSSKDEADVAADIKVLVFGSKLVGAAGGAPAAATFAKVPALNGIFRQAVRALHAQVRIELNAPVKLGKKDAGQTDAVSVLKGVYNHLLKFRDFLSWEAAMAMAVIETDSSIEKPQSAVDNEAAGSSEKAQAGGDKAKGDKKSKKKKTLGKDCAEG

SEQ ID NO: 55212 - protein, 379 aa, Zea mays
  Coding DNA Sequence Number=SeqID_11837
MSEEERTGGVVVELAAIVALQGTDRASELGGYPGEEVRVETSRDHSGQDQRPEQPWTWKWKKEDRSDGRADKHDRGAQKSPDTWEDKRSRHVTARLRVDLDAVPKNRVPDWIEGHEHAPDELAVVEEDTHSHESGGRTARIGSGGEAGSRGRQCPTAGEEDAAAGSARGREKGGWGPAVDGGELEEEVAKVGDRAEMRSRTRRDPGEERPGAAGSGTGRLRSRGRDRQRGRAAAGRLGATRDSVDGTARAGGGSKSQGGRRRGVGAGRKARPERARAAAPAEAAVSSCATGWPQGAGVAAGKGRAQRERSSRVGATAGRPTEGGAREGGAARRRWKGQAKAAAGRLTARDGRPAGEGEQPGGCGWEGREKKNGFGTKLE

SEQ ID NO: 55213 - protein, 1111 aa, Zea mays
  Coding DNA Sequence Number=SeqID_11838
  Gene Ontology: Mol. function=nucleic acid binding
  Homolog annotation: Hit_ID=Q60ET1; Match level="QueryCoverage=98%, HitCoverage=95%, E-value=1e-116, Identity=44%"; Hit description =Putative uncharacterized protein OJ1504_G04.6
  Pfam annotation: Domain name=PWWP; Domain location=24-98; Score=62.2; E_value=1.8e-15; Accession=PF00855.8; Description=PWWP domain
MADPAAGGAMVPAAGGGSVWANGAPRFGDMVWAKVKSHPWWPGHIYSVSLTDDEEVHRGYRYGLVLVAFFGDKSYGWFEPSELVPFEEHFTEKAAQGGSTRSSFAGAVAEAVDEVARRSALALLCPCKSPDAFRPHPSDGNFLLVDVPAFDTDADYHPDQIQAARQRFVPRKALDYLLDAAVTQRDAAEKAARTVPGMEMAALFSAYRRAVFSPIDNTYAQAFGVDPELALAAEQKAAAERAQRGINTHTPNPSCIIDCAVVLVALYLKLMAKQRYYCTASIDQATNYFDGSNMKDSDGTSLTIEPVGLAIGVRACPIAAIGGFLSFLLRTKLYGERVVAMSWLPASPDQSPCSWSLGPAEQCGSDSPQQARPLKGGPRKTADQATPAAGRRRGGAGGAAARLMEKIVPGAPAMKTKSSKKDQYLLKRRDAPEASAHSQPQLPDAPPPAPTLAAEDGPPGFPASGDPPTPPLPGSSVADEDFMLQRRVPLVDVPPAVQAQPSEGPAAPKNATKLKKPRKREREEGPDATPDSADAAGDPKKKKKKKKLSDVDGAGGKVAFVVEGRDVLDLTQVLSDIRNLPLAPFHGAERLISDAARSFVLAFRSKYYKKSYENDPPEELKSLDKPSAAATDGQSPKKKKPAPRPGAGNDPTKAGVKRGPSDRQGELAIKKKAKLDKIKVLSSEKKAAGLEQKDTAAAAAQQQARAAGAKDKAEMGAAKKKEPASARTVRTPSPTALMMKFPLNSTLPSVASLKARFARFGPLDVDGIRVYWKSHMCRVVYRFKFDAEAALRYAKANAMFGQVDTQYHLREVEAGAGREPLAAPEAAPQQRSELRLMETAAFRPGTSGNGAPLPMSRAGAAPARPAVGVGQPPKSILKKSTDEGSSGTTREVSRVKFVLDGADGGTLAPPPSVGGNGNGADGGSSMVAKAAKSVGFAPSQALQPPPRTLQPPMRPAHQQPPRAAVTQQLPPPPLPQHLPYHQHPRGADGTPLAPPPGQLLAYPPRGHGEGPSALPGLPPPLPYQPRPTGFPGGQQLGYPPRSGDNLPLLAGQPQFPPRPSNAKAGSEGPAWRRGEKEFKEEVWRLMTGIAKMVEPLTDKNGFFPYHLFRAQ

SEQ ID NO: 55214 - protein, 55 aa, Zea mays
  Coding DNA Sequence Number=SeqID_11839
MEAGVRRRGCTQPWPRLDAGILTSELDEDGEGVTRQGADDGVGEQPCANNKISPK

SEQ ID NO: 55215 - protein, 135 aa, Zea mays
  Coding DNA Sequence Number=SeqID_11840
  Subcellular localization annotation: CTP_CleavageSite=30; ConfidenceScore=5.47e-01
MTAVPPTRVRLTTPKFSLMRNRKLRLARPQASASGGGLGLNLGLGRWSPPRPTPRLGLNLGLGRWSPPRPTLGLGLNLSPGRNSVLARPRPRPQEKLRGNKTGVPSGSPWAQALLRRPRYRVPGALAPLRQPHWH

SEQ ID NO: 55216 - protein, 161 aa, Zea mays
  Coding DNA Sequence Number=SeqID_11841
MTSPTPINRGDTRFSSNYVSHEGFPSILWEVLSSTGYPTPPQADDTTEATTMKTLTTFYRHHPLEMIMHPLGLFPAKKRDDPMWCNRVSHMKDVWAMHLDQVGKITVQCMSAVYRLQALQSDAMAHLTNLAQTTKLTLDCREDFVVDCLQNWWRKTYKWNS

SEQ ID NO: 55217 - protein, 111 aa, Zea mays
  Coding DNA Sequence Number=SeqID_11842
  Subcellular localization annotation: CTP_CleavageSite=35; ConfidenceScore=5.18e-01
MGTVARTSSSVASTVDRCWVDAGTSRHLDGSTTPRIATSPGMGATGLLDTGGLSTISSVDGTATDGGSVSNAQGSEGAANVQDFLVHGSGGSGHLPGGGGGSGQNSHSPQE

SEQ ID NO: 55218 - protein, 124 aa, Zea mays
  Coding DNA Sequence Number=SeqID_11843
MAGSRNSSDVSPSNIIKPTWETLPAVEQLQFEEHKEQLIQEAKAKFLANFKVDRNNKVVRQRATDPASLRPTPDIPNAPTAPYPYPTVGTRESRDGAITARLELAQRPLPSNAEAYIRAARRGY

SEQ ID NO: 55219 - protein, 80 aa, Zea mays
  Coding DNA Sequence Number=SeqID_11844
MGESDGDDKDQHAGGRRGINVGGAASAKGQWKSPFGGYSRTASGNSISTGGFLKQPPVKIAFSLAVLLRKPPVEMLFLLA

SEQ ID NO: 55220 - protein, 544 aa, Zea mays
  Coding DNA Sequence Number=SeqID_11845
  Gene Ontology: Cellular component=integral to membrane; Biological process=response to tellurium ion
  Homolog annotation: Hit_ID=A2Y7Z7; Match level="QueryCoverage=73%, HitCoverage=66%, E-value=1e-153, Identity=68%"; Hit description =Putative uncharacterized protein
  Pfam annotation: Domain name=C4dic_mal_tran; Domain location=312-540; Score=200.7; E_value=3.6e-57; Accession=PF03595.8; Description=C4 -dicarboxylate transportermalic acid transport protein
MEFQSTRNVKEKEKGSVRGFGFYTRSPCHDLFAVDDKGPDKTGWAPSPPAGFAVVIGAGNQRSQTGAERELGGTSPSHSSGPASHKAAASCAPTLPSRSRHLFLLRRRELSGPDEQGAMAIRESSQMPELLRLPLPPPATTGSPYSVCLSVPASPSGLHLGVCASVRSVAPAPQPQPAEDQQLLQNQARYHSQPTLTIRTEEPPPLQRVRTVSRSDSARDRRFDHFKTFSGRLERQLSNLRGVVPVDIEPAGADSTSNKIISEEETDDDDEVPSADRYFAALEGPELETLRPTEVSALPEDETWPFLLRFPINAFGMCLGVSSQAMLWKTLQSEPSTAFLHVSPAVNHVLWWVSASLMALVSFIYLFKVVFYFEAVRREFHHPIRVNFFFAPWIACLFLVKGLPHPVWTIHHVVWYILMAPIFLLDLKIYGQWMSGGARRLSKVANPTNHLAVVGNFVGALLGAKMGLREVPIFFFAVGVVHYLVLFVTLYQRLPSNAQLPRELHPVFFLFIAAPSVASVGWARLCGDFNYAAKILYFTSLFLY

SEQ ID NO: 55221 - protein, 297 aa, Zea mays
  Coding DNA Sequence Number=SeqID_11846
GEKIAQPVGPGSSLRNVGSGIGRIRGATPRTPSREKLAAENKKPAGWRKKRVALEAEKMDLRHQLVEERKEANQAIAEAQAAQAEAKVARAEGSLASQRAEEWEVRFNALRGRVDKAEDSTRSKVERTLAQFVNSYRELGARTADFEEELLVLPTIVEGFMSFASLVTCEGAINALSREGCRHYEVFDQSDESFEREIFKAEDPIVKQSAGALFDRMWGHMMERAEDVEDLGGLVGAPPEAAEGNPVLPLDAGEGPSAVPVPAMAGEDPASAPEPTVEGAPEAVAEPTVGDPSSRPR

SEQ ID NO: 55222 - protein, 152 aa, Zea mays
  Coding DNA Sequence Number=SeqID_11847
  Subcellular localization annotation: CTP_CleavageSite=26; ConfidenceScore=5.03e-01
MNKNTRDTRFIPRFGHTTKVPYFLVEAPTKSRVSFNPNPPFADYKGQAHTLIFAQTSGYRLNLSGPRLNLPWTLVEPAWTPVELEVHLELRKLNSAEVQLSCSSRSSTQLKFSSAAVEEVQLLFNKNTLGFSNLTADLRRRSMVPTVAPSRC

SEQ ID NO: 55223 - protein, 191 aa, Zea mays
  Coding DNA Sequence Number=SeqID_11848
MSTSRIARGLRIFPYGRNIAAVVSAVMNKDRQDAAQNRRAVIRIADPRREAKKARGSAKAAAPGSSQPMPAAKPAAPRSGKSSASAKAAGAGGTKPPPVEAAKVRELPSPGKRVAGFGMNINVEDYFVGSGERQMVVVPPLVVTTSPSTVVRAKGTAQDPWATFCASGEILTEAAAKDVAGTMSQRLRDTS

SEQ ID NO: 55224 - protein, 368 aa, Zea mays
  Coding DNA Sequence Number=SeqID_11849
  Gene Ontology: Mol. function=aspartic-type endopeptidase activity; Biological process=DNA integration
  Homolog annotation: Hit_ID=Q7XBC6; Match level="QueryCoverage=83%, HitCoverage=17%, E-value=2e-10, Identity=26%"; Hit description =Putative copia-type pol polyprotein
  Pfam annotation: Domain name=zf-CCHC; Domain location=105-122; Score =25.8; E_value=0.00016; Accession=PF00098.14; Description=Zinc knuckle
MEDLSTMTPTIVIGKIAAFEMSRKMGRGEEPTSSRPYAFACDERKGKKKAPTPSSSSEEEEEEESDDDEDNQPSKSSSEDEETIRRVGKVEDLLFNIDRKRQRKRGCFACGEKGHFRDNCPNMAEPKKGRSKGKALTSVRTWDDSSSEDEPPRTRSHRSSSRSSRSSHNCLIAREKFETFANLNSELSTKIELLESSVPSTATDDGLIKKNEKLKAKLASSQEAIENLLEKMEILSIHNNELTTKLENIGSTPATSLVEIPEIIKKDASTSCFDLIDDSNPCNQVLVENIVVETCSDDVAKENEQLKQEVARLGKALYDKKGKAKQIRPTQDNTTAGVNKPMEGETVICRLCHKEGHKYKAMQGDDRG

SEQ ID NO: 55225 - protein, 175 aa, Zea mays
  Coding DNA Sequence Number=SeqID_11850
MQDAARRALSQYCSLFSGVADDLDLKYYPHRSTGSAGGVIVSPVGEGNPRLSSMVNLAAVLNTELDHALDELGKSCSFDFHFGDGHFEEIDALSSAYALDISILSFGIKDSLGAPKEGSGGDSDDEGDDGGGGDDSDDGNDGSKGSGGGSGGSSGNDDGKGGSIDGKASGKAPLA

SEQ ID NO: 55226 - protein, 123 aa, Zea mays
  Coding DNA Sequence Number=SeqID_11851
MLVDYTSVLDGPNVSIESSTQQGVESVVEVTPASSVTSDGSRDPPLRLRLLQELRAVARTATGVGIVSVSVKGASLAEVQGKAASQTPPPVEARERSPAAPAPAPGIGAPAPHAGDDAVSPGG

SEQ ID NO: 55227 - protein, 704 aa, Zea mays
  Coding DNA Sequence Number=SeqID_11852
  Gene Ontology: Mol. function=mRNA (2'-O-methyladenosine-N6-) -methyltransferase activity; Cellular component=nucleus; Biological process=nucleobase, nucleoside, nucleotide and nucleic acid metabolic process
  Homolog annotation: Hit_ID=Q6EU10; Match level="QueryCoverage=100%, HitCoverage=100%, E-value=0.0, Identity=72%"; Hit description =Probable N6-adenosine-methyltransferase MT-A70-like
  Pfam annotation: Domain name=MT-A70; Domain location=488-648; Score =318.3; E_value=1.4e-92; Accession=PF05063.5; Description=MT-A70
MEAQTDSAPGGGDDLAIMREQCRTLEESISTRREAQLDLIGSLQHLVPDLVPSLEQSLRLIAAFNGRPFVPTLYPNASVHVQNPNLKPQHRRALPGPARSTRLKTSPGSSPASAAARCAGTSGGIHAVRTMVAVCLLELVPFAEIDAAALARRLQSETSSASEAERAALADLAAELGGSAPAAVALALRRIAEDSGGLQIEEAFIGGKQMTMVWAIDRSKLLKELPESASVLQIQPPPTPQVVPLDTDTNIIPRPPPLQQSDMWGNPMPPMFPRPRGMTMPRIPPGLMPLQRPFMAPGAVIPMGGGPVPSSTQLKLRTEEDDLKDLELLLNKKTYREKQNTKTGEELLDLIHRPTAKETAVAAKFKTKGGSQLKEYCTNLTKEDCRRQTGSFVACDKVHFRRIIAPHTDTNLGDCSFLDTCRHTKTCKYVHYELDQTPDVPQMMAGAIAPPRQIKPQRAEYCSEIELGESQWINCDIRNFRMDILGQFGVIMADPPWDIHMELPYGTMADDEMRTLNVPTLQTDGLIFLWVTGRAMELGRECLELWGYKRVEEIIWVKTNQLQRIIRTGRTGHWLNHSKEHCLVGIKGNPLVNRNIDTDVIVAEVRETSRKPDEMYAMLERISPRTRKLELFARMHNTQAGWLSLGNQLNGVRLVDQGLRARYKAAYPDVEVQPPSPPRTSTPMDVDQSSSQKVAALDGGERPA

SEQ ID NO: 55228 - protein, 103 aa, Zea mays
  Coding DNA Sequence Number=SeqID_11853
  Subcellular localization annotation: CTP_CleavageSite=53; ConfidenceScore=5.37e-01
MAGSARPARPRPGRLGQPPAVPPAGAPPGRPAVRPPGPLAAWPPWPRIRGVVRFAVVPSMGLGVCGSLCQGGNEIDGSDYDYGIGEDEAVEGDFQEFQDYDEF

SEQ ID NO: 55229 - protein, 238 aa, Zea mays
  Coding DNA Sequence Number=SeqID_11854
MQPAQRGMGGSLILYLACKVGAQSNAMAAATAGGAMDTRWGCCSPELASAAMERHRRLAGWEVAGKATPSTCPQWRGRTRHGMGATLQAVAGTAATQGGGATKGAQRRAWERGRRRGAYLLMVTVDVGTSMAHAELWAQAPSADGWAAGRAWRGCCARRGREEAGLNYLDEESGGRGVEWFRLLGEDQQGAGGPAAAGRFSHTRPLRDEMTRGEIDGGGGLRQRVVKGITKGRRDSRG

SEQ ID NO: 55230 - protein, 174 aa, Zea mays
  Coding DNA Sequence Number=SeqID_11855
  Homolog annotation: Hit_ID=Q339L0; Match level="QueryCoverage=35%, HitCoverage=68%, E-value=2e-07, Identity=47%"; Hit description =Putative uncharacterized protein
MSMSMSQWIYDHRKYELQRGGDVENPNVTGSNTLADEVQVDLHVLRALMLHGIGGEIDRADIVAVDEGGALKGTVELVEELTQPGGLCHAVGHGAVLGLSAGARDDGLPFGGPRDEEVVVEGVVEVAQDPLESGEVGLPRRRRVGDRRPVVLRELCLSVNRRGAGLAVRHASPL

SEQ ID NO: 55231 - protein, 95 aa, Zea mays
  Coding DNA Sequence Number=SeqID_11856
MAPPAVAAGMALLCAPCTLAENERRRAQAVAPRLSPSDLDRQPFWRVGLERFLECLSVRTGSLDDHPRKQCNHEGGKEGVEADLQEFQDVDEFED

SEQ ID NO: 55232 - protein, 94 aa, Zea mays
  Coding DNA Sequence Number=SeqID_11857
  Subcellular localization annotation: CTP_CleavageSite=42; ConfidenceScore=5.42e-01
MAHLGSALVTPVMWSCSSEWPPLSSVGARRLTALTTTAGKATAMVRGGSHTGERGLYAPELWSWRVGGRRAFGEGRGCQVGSGDVARRVLAGWG

SEQ ID NO: 55233 - protein, 257 aa, Zea mays
  Coding DNA Sequence Number=SeqID_11858
  Homolog annotation: Hit_ID=A2XNL7; Match level="QueryCoverage=52%, HitCoverage=50%, E-value=5e-35, Identity=58%"; Hit description =Putative uncharacterized protein
  Pfam annotation: Domain name=DUF300; Domain location=5-161; Score= -15.3; E_value=1.6e-11; Accession=PF03619.7; Description=Domain of unknown function
MEWASAAYTAAALVCAAAACVVALAHIYRHLLHYAEPIYQRFIVRIIFMVPVNAQRSPLIPNPRGGRSGAELFRTGYDAWVIYNFLSLCLAWVGGPGAVVGVLVFLAAKSRFIKNADKAADLQNFVLCVEMLIAAVGHLFAFPYKEYTGKWGPPVIHSARFFLALKEREPHGPQSVRLVLRPPGPMPMSLWPPCLRPVSLQLKYLSLLRLRPPCPRQASLRLSDAVESEACSCTLVSARPTLFPPISGYELVPDMEG

SEQ ID NO: 55234 - protein, 715 aa, Zea mays
  Coding DNA Sequence Number=SeqID_11859
  Gene Ontology: Mol. function=metal ion binding; Cellular component =nucleus; Biological process=regulation of transcription, DNA -dependent
  Homolog annotation: Hit_ID=Q75LH6; Match level="QueryCoverage=98%, HitCoverage=73%, E-value=0.0, Identity=70%"; Hit description =Squamosa promoter-binding-like protein 6
  Pfam annotation: Domain name=Ank; Domain location=497-529; Score =14.3; E_value=0.29; Accession=PF00023.21; Description=Ankyrin repeat
  Pfam annotation: Domain name=Ank; Domain location=543-582; Score=5.1; E_value=6.1; Accession=PF00023.21; Description=Ankyrin repeat
  Pfam module annotation: Pfam domain module=Ank::Ank; Domain location =497-529::543-582
MTLRILIAADNAQNANGQELLSTLLKNLGSVAKSLEPKELCKFLEAYQSLQNGLNAGTSGIANGAEEAAGPSNSKLPSVNDSHYGQASSSVVPVQSKATTVVTPEPASCKLKDFDLNDTCIDMEGFEDGQEGSPTPAFKTADSPNCASWMQQDSTQSPPQTSGNSDSTSTQSLSSSNGDTQCRTDKIVFKLFDKVPSDLPPVLRSQILGWLSSSPSDIESHISPGCIILTVYVRLVESAWQELSENMSLLLGKLLNSSTDDFWASGLVFVMVRHHLAFMLNGQIMLDRPLAPSSHHYCKILCVRPVAAPYSATINFRVEGFNLLSTSSRLICSFEGHCIFHEDTDSGAENVEYKDRDIECLSFCCSVPGPRGRGFIEVEDSGFSNGFFPFIIAEKDVCAEVSELESIFESSSNEHANARDQALEFLNELGWLLHRANRMSKEDETDTSLAPFNMWRFRNLGVFAMEREWCAVIKMLLDFLFIGLVDVGSRSAEEMVLSENLLHAAVRRKSVNMVRFLLRYKPNKNSKGTAQAYLFRPDALGPSKITPLHIAAATSDAEDVLDALTHDPGLIGISAWSNARDETGFTPEDYARQRGNGAYLNLVQKKIDKHLGEGHVVLGVPSSICPVITDGVKPGDVSLEICRAMSASVPGCLLCSRQARMHPSSTARTFLYRPAMLTVMGVAVVCVCVGILLHTFPRVYAAPTFRWELLERGPM

SEQ ID NO: 55235 - protein, 131 aa, Zea mays
  Coding DNA Sequence Number=SeqID_11860
MRIASSRVWVLGLAQHERKRRGGRTCWVLVAGRGPEDRYLGIWRRASASAAGEQPPSRRPERQRAHARGTGEPREDRVRDREGREKKRPQGVPIIYLLLTVCFSGFSVPSEKPLKAGPGVLSDLHYEKVGF

SEQ ID NO: 55236 - protein, 586 aa, Zea mays
  Coding DNA Sequence Number=SeqID_11861
  Gene Ontology: Mol. function=hydrolase activity, acting on ester bonds; Cellular component=plasma membrane; Biological process =pathogenesis
  Homolog annotation: Hit_ID=Q10B96; Match level="QueryCoverage=87%, HitCoverage=90%, E-value=0.0, Identity=91%"; Hit description =Phosphoesterase family protein, putative, expressed
  Pfam annotation: Domain name=Phosphoesterase; Domain location=69-447; Score=527.9; E_value=1.2e-155; Accession=PF04185.5; Description =Phosphoesterase family
KRTYPTRRRRRRRPSSRSGAMAAAARRGPGALLLVALLLLALVVSGHCLDAHHRGLKRRRRKHEIHSPIKTVVVVVMENRSFDHILGWLRRTRPDIDGLTGRESNRLNASDPSSPDIFVTDEAGYVDSDPGHGFEDIREQIFGSADTSAVPPPMSGFAQNARGMGLGMPHNVMSGFKPDAVPVYASLADEFAVFDRWFASVPTSTQPNRLFVHSATSHGLTFNARKDLIHGFPQKTIFDSLEENGLSFGIYYQNIPATLFYQSLRRLKHLVKFHQYTLKFKLHAKLGKLPNYAVIEQRYFDCEMFPANDDHPSHDVARGQRFVKEVYETLRASPQWNETALIITYDEHGGFYDHVPTPVVGVPQPDGIVGPDPYYFKFERLGVRVPTFLISPWIDKGTEDALIFLEAVDDFLHVEISLIHKPNGPQDTSQYEHSSIPATVKKLFNLHSNFLTKRDAWAGTFENYFKIRRTPRTDCPEKLPEVTKSLRPFGPKEDSSLSEFQVELIQLASQLNGDHVLNTYPDIGRTMTVGEANRYAEDAVARFLEAGRIALRAGANESALVTMRPALTSRASMSSDIGILMSTSMA

SEQ ID NO: 55237 - protein, 20 aa, Zea mays
  Coding DNA Sequence Number=SeqID_11862
MANWGSLHDTHLKTNRRTRE

SEQ ID NO: 55238 - protein, 263 aa, Zea mays
  Coding DNA Sequence Number=SeqID_11863
MGKGHAFTKRCFQKVYDEGYSPSSPCEWDDQGLPGLGEGLRVMKAGEHREDKEGECFVQFGHGGGLIPSGITVKTLIFLYQMEGSLVIRTSYCSEVEGFPHLLRSCTLRMGIRKKPEYVWKEYHENGTEKCSMAVYLGESRNYPNHPPFQVTFTGHRFPDTCQNVTQKALRQLCQNYSREVFETPLRYFPPSNKNTPTWRKILKALSGRDHTEDDPTIVYMAGYLHTLDNHYDDLSSHCTHLNSQVESLEQQVKELKKEKASL

SEQ ID NO: 55239 - protein, 336 aa, Zea mays
  Coding DNA Sequence Number=SeqID_11864
  Gene Ontology: Mol. function=Rab GTPase activator activity; Cellular component=intracellular; Biological process=regulation of Rab GTPase activity
  Homolog annotation: Hit_ID=Q10N37; Match level="QueryCoverage=45%, HitCoverage=27%, E-value=4e-39, Identity=60%"; Hit description=TBC domain containing protein, expressed
MDADRQFLVVQFHWFLGWRAAAATATAFNGCRLDGPRKGSAFHHMQLSGIPRQVQDRHKRIAASKYIVMMKRRDLRMQNITTTWKAQRKPMPVLNHEKQMKTGSSSSTEAIKALAGLMETNMDFEELKDLNGRSEELEEDNNGNMEKLVELFLDKGLLDELKPIKVESQRRVRATLSIIDKMMSSRIVKGGNGANDIHGNDGAQLTSIEEEGRTAEASDDGDPAEVESCVAEKVELGHETTHDSTGTALDGGNDGSYFPWREELESLVCGGVPMALRGEIWQAFVGVGARRILGYYNKLLDDRTETLDEKDLVDPVVKNREVHPEKLPSLRNGKDM

SEQ ID NO: 55240 - protein, 46 aa, Zea mays
  Coding DNA Sequence Number=SeqID_11865
MESHDLWAERESRLVGGNENDGFGIDSGNGKWYSFRLERKNHIEEL

SEQ ID NO: 55241 - protein, 37 aa, Zea mays
  Coding DNA Sequence Number=SeqID_11866
MGIGCLRDKNLNKDYGVVPYLLVMVDGVTRPSSLPPG

SEQ ID NO: 55242 - protein, 29 aa, Zea mays
  Coding DNA Sequence Number=SeqID_11867
MGIGCLQDKNLNKDYGVVPYLLVMVDGVT

SEQ ID NO: 55243 - protein, 221 aa, Zea mays
  Coding DNA Sequence Number=SeqID_11868
MATNGADLYREVMGKGNGRNERSLIHEEERTRLHGAVDVGLNAGAVARLVQWRRSVRSWAGALVSARPGVGLAGAVGRAPVRARERDSAEAVMQDAARRALSHYCSVLDGVADGLNLKYYPRRPSGSIGGVIVSPVGEDNPRLSSTVNLAAVLNTELDHALDELSRAHAEIAQLQAEREERRHLEDGSPAPVRTQHPYRLPRCGHQSYGNPDCRTKINLEP

SEQ ID NO: 55244 - protein, 140 aa, Zea mays
  Coding DNA Sequence Number=SeqID_11869
  Subcellular localization annotation: CTP_CleavageSite=75; ConfidenceScore=5.73e-01
MAPLGPARPTTSCAPTEPPPRVARGLPAAVPGAASSRGLPVVARPRRVASARPSRRGRPGVPALARRPPPPPHARAPTRSPAPAVAWPSLGGPDASRPPAPARSPAPIPLAGVVARCPARAPAPGVLAHPARRPRPRPRR

SEQ ID NO: 55245 - protein, 104 aa, Zea mays
  Coding DNA Sequence Number=SeqID_11870
MESHDLRAEKESRLVGGNENDDFGIESGNGKWYSFHLERVVSIATTAQEKMKPWKETSKSSKITTSSRCGLAATPSRLPVKAACIYVFFPHFDYCKDYVDVSDI

SEQ ID NO: 55246 - protein, 171 aa, Zea mays
  Coding DNA Sequence Number=SeqID_11871
MAGIARSTRAGRCSRQRRVYRPNHGDLVQSKGTVSFLGLRFLARGASLSCAHSSLRVGWGWGKLDWPVYGGSGSGGHGHAAHGQTAVNWAPVRLERARKSVTDAWEGFIGAGAGQDAGWPLARRGGRAGVLWQAQGASNTWSLQSARVPQLTQVANVRILAKIRRESFPGT

SEQ ID NO: 55247 - protein, 56 aa, Zea mays
  Coding DNA Sequence Number=SeqID_11872
MEGGLVLPAMMAAVGALQRGAWGGVSVYGGGARMQGAWGFNSNDFTTFQGSYTGLS

SEQ ID NO: 55248 - protein, 366 aa, Zea mays
  Coding DNA Sequence Number=SeqID_11873
  Pfam annotation: Domain name=Extensin_2; Domain location=96-361; Score=-138.3; E_value=0.07; Accession=PF04554.4; Description =Extensin-like region
MCALEEQQLLEDDPTVVYLTTYLLTLDAQYDFLARHHRQMIARAEDVEKCNRQLHVDLTAAQARATALESREVIVVEALKQAKDEHVQKLMEAYLVTHNQCIALRIQEPASSNPVQSVRAEDPQILEGHPVSIRGEKKVWELPEGAIVLEGIPVFPQAMNKQELPEFSQDPPPELFEPLTMKKIPAPSQADENSGPTSSSPAFSGSFETVLTTPRRRTPRRRTPPPPTTLPHSSAQGPAPLAAQGTAPPGPHDAAAQPGPHDAARQRRRAPSPTPPKVPRRSAPTTPPRSPAPTTSPASSRAPRRRAELLRPHDAACTPPLQPRPSPPAPARRAPRPCTPAEPHARPAEPHVAARGPRALARPRRR

SEQ ID NO: 55249 - protein, 52 aa, Zea mays
  Coding DNA Sequence Number=SeqID_11874
MKWKISVARKLKHYNLIVERKLTNDEIKGGWGSLAHHSSCSSPAEARSHSTV

SEQ ID NO: 55250 - protein, 558 aa, Zea mays
  Coding DNA Sequence Number=SeqID_11875
  Gene Ontology: Mol. function=zinc ion binding; Cellular component =intracellular; Biological process=regulation of transcription
  Homolog annotation: Hit_ID=Q6ZFX5; Match level="QueryCoverage=29%, HitCoverage=40%, E-value=7e-62, Identity=63%"; Hit description =Pentatricopeptide (PPR) repeat-containing protein-like
  Pfam annotation: Domain name=zf-B_box; Domain location=1-41; Score =4.6; E_value=0.041; Accession=PF00643.15; Description=B-box zinc finger
  Pfam annotation: Domain name=zf-B_box; Domain location=53-100; Score =44.8; E_value=3e-10; Accession=PF00643.15; Description=B-box zinc finger
  Pfam module annotation: Pfam domain module=zf-B_box::zf-B_box; Domain location=1-41::53-100
MQVLCDVCGSAPAAVLRCTGEAALCSACDRRVHRADKRRRIPLVHPCGDDSTAAAPLCDVCKEWRGLVFCMEDRAILCPDCDDPIHSAYDLTAKHTRFLLVGAKLSATLVDQAPPSPDDDDDDDDVAKPDAAPAACAAKAYREEALPHSRNHDKPVVLKDLRWVGANLAATEETEWATRGHGGDGPCSGTMEAAHSRKGLCGNRRRDVAAIERASRDARCNDRTRERERQREEGYYLTDEPVVHFVWQPNQESSVLVMPRSFDDYYIENCGVILAPEVTQRRIDNSDQFVILATVRATDRNRHETCNAIPTKFRLQTSGLSGHRAKRQSDGAATVTSPAAKRARDPSAPAFPTNKEVPDMPPKTRIFCDILASRAAFFRWAGHRHLGHEHSPYSWNLFVDILGKNRLFEPMWDTVKSMHSQQLLSLATFASVFSSLAATPGGSPLKAFMDMPRYGMTRDTAALNSLLSALCRANRFDDARAAIPVAALRLARARMPTPTPSSSRAASLPPTCGLRARCSTKWCAPLALILTTCLPMTPSSLRWFQATPPRRHQKQWGT

SEQ ID NO: 55251 - protein, 100 aa, Zea mays
  Coding DNA Sequence Number=SeqID_11876
  Homolog annotation: Hit_ID=Q9ARI6; Match level="QueryCoverage=34%, HitCoverage=3%, E-value=3e-08, Identity=73%"; Hit description=DNA (cytosine-5)-methyltransferase 2
MCSFKIPSRSDEEEGLKARCHYRSAKVDNVVYCLEDDVYVKLRQMGGAFPRRGGAGLVRQEELLEQPEHHEEAHPPPADDGVLARLQGAVEPGLPHGRQL

SEQ ID NO: 55252 - protein, 256 aa, Zea mays
  Coding DNA Sequence Number=SeqID_11877
MVLLPHHVARVTEPGSRRRARRCDGEQPKPYPAHAKTNLSRFLITLQRGEWNVPPQREVRTGLAHMVRRSSTRWERRGSLTPRYQGAPAAAPEAHAAPGLRSGHTNRARVWQMLWSRCLFSLFSFSRRLPRWVLTMAAEVRALWEGRQGLWRRTHGCAQGGRNGCRYISREYPVAGSDLRARQLRDAFGQVGDGADEAGPPVSEEVRRACSRDRPVGQCAGERTDVSASVTGQWAHLAATRRGRKEQTRCGPRWSA

SEQ ID NO: 55253 - protein, 43 aa, Zea mays
  Coding DNA Sequence Number=SeqID_11878
MTTDRPLELLHMDLFGLIAYISIGGRKISYPRNIKGILETGSK

SEQ ID NO: 55254 - protein, 287 aa, Zea mays
  Coding DNA Sequence Number=SeqID_11879
  Subcellular localization annotation: CTP_CleavageSite=30; ConfidenceScore=5.39e-01
MSSRSLMHRVFPPSKPPNGGYPPSFRLIVVGTQLRGSWYLSAIVRLQGFSSHSPVVPLRWWSPKTVASSSWMGRGKPGCDPDPALSTEGVRHPRWGGERGEPGLYLLRGSVGHLFFQLLLVAIALQPCGGDVLQPCRGRRTVATQLGCNIPPSPSHSRRGRQRGPTGALGSGPLFGFNSWFASLERDREREPSGGRVHPGPRLLLQRSLAGPPTFVAPQARDSLVDYLNRFTKHESPRVKVTSESGDPWTASPSEARSDLAEGVVDAEGATAPFHRQDPSLQDQSVL

SEQ ID NO: 55255 - protein, 598 aa, Zea mays
  Coding DNA Sequence Number=SeqID_11880
  Homolog annotation: Hit_ID=A2WYS1; Match level="QueryCoverage=14%, HitCoverage=22%, E-value=4e-20, Identity=67%"; Hit description =Putative uncharacterized protein
  Subcellular localization annotation: CTP_CleavageSite=49; ConfidenceScore=5.14e-01
MAPPVDVVGPWCPRLSDVEAPPRSRSRSSLSSVAEVESEPLGRVRRRPSAEARAESEPWGRMKRSSSSSGAEPESEPWDRAKRSSSSSGVEPESEPWGRAKRSSSSSGAEPESEPWGQAKRSSSSSGAEPESEPWGRAKRSFLWRLRPGLAAVSLTLSSGTAVGAAQAALSSLSGRSVERRSDCGHLDSVVWSARVRIKVSGHLCIKYSCDLVGWRGDLAKVASWRRLGLGRAEGVSVAGGGPRARRRSSGLSADGGYQLRIRSLEAPSRFHPKRISQSNAAWSCCKAERCCFGVEVRGRDGWRRERKGLSLTETDAGEKAQRKRKARHGAAANENSTTDPGIRIRYDRASAPASVTPAHPAQVRTPLRSERDPLTWGEDTVAWSAPIPSLPPQVGAPSPVRYLVGAAIMMSGVVPSSLHVLLRAERALRERDVGEVHIPLSELLSGAPDGPVPAKFVAYQVRKISSGKPQGVLNLSYKLGEVANGYAPAPPPSPPTPSLHRPPRTRLLQARLMPTRLPPPKADAYPPPYGAYPPAGGKADAAYPPSSGYPPAAGKPGKGGEPEVGRLLSTPVSAHTFYPMPVLNPPHGFLICFYLNQ

SEQ ID NO: 55256 - protein, 217 aa, Zea mays
  Coding DNA Sequence Number=SeqID_11881
RGLRKDSASDDARSKARSWSGELYGADCLTATTAVVTRTTLPHHNITTTINRCAHRQLETERGEMDRTELGMGIEGGELEAEIGAGRRPLLNHESSAPSASAATTRFHWILTSSRNAASSAAASSREGRRRLELAATHDGHGNEQRMGELAMGKKHAQGDVCASESCFSRKVMSEKVMSEPKHQVAHLEVSGPDPSGVALVLGEPYSRSVGKTASAP

SEQ ID NO: 55257 - protein, 365 aa, Zea mays
  Coding DNA Sequence Number=SeqID_11882
  Subcellular localization annotation: CTP_CleavageSite=8; ConfidenceScore=5.06e-01
MSSRSLMRCVFPPSKPPDGGYPPFFRLIVGGTQLRGSWYLSAIVWLQGFSSHSPVAPLRWWSPKTVTSSSWMGRGKSGCDLDPALSVGGVRHPRWGGERGEPGLYLLRGSAGHLFFQLLEVAIALQLCGGDVLQPCRGRRTVAAQLGCNITLSSSHSRRGRQRGPAGALGSGPLFGFNSWFASLEREREREPSGGRVHPGPWLLLQRSLAGLPVFVAPQARGCSYPRGRNRSSVCNGTLNANSHVGYLNRFTKRESPRVKVTSEARGSDISINRGRVGSKMKPGWLEPNRVIRWRDRRWGRPADASGRAGALGGRLVEAPERPTEPPARAGLPEKTLAVAEPPKLLGPHAPVLVSKTAMHVHQIT

SEQ ID NO: 55258 - protein, 38 aa, Zea mays
  Coding DNA Sequence Number=SeqID_11883
MKVGRSMMPWPVVARAESWDGPEARAVPEVWVYGMVKA

SEQ ID NO: 55259 - protein, 369 aa, Zea mays
  Coding DNA Sequence Number=SeqID_11884
  Pfam annotation: Domain name=SlyX; Domain location=279-346; Score= -9.6; E_value=0.081; Accession=PF04102.3; Description=SlyX
MESSAKTKASTPYIILRHHSKQLSIPWGRNEHQRKGLRLWKRVPKIQHKTNKKNKTRVKIKEQRGNRGHPWSGAPDCPMNSPTPASGGDSRFSSDFLSRDGFPSILWEVLNSADYPTPPLYTVQLYEEHRVPRCRVWLTLEAHPLQPGWRSLDSETIGLRTDDTVEAAAMKTLTTFCGYHPLEMVMHPLGLFPAEKKDDPMWCNRVSHVKDVWAMYPDLVGRVTVQCMSALYRLQALQSDAMTLLANTAQAAKLTLDSREDFVVDLSTELVEKDLQVERLSQRITTLEQQVENRDNTIDVLENQLHDVQRELEEANDHLDMHHLEMEANEAGSEGEEAPEELGPAPGANGTTSAIPPSPVSSVASTAQG

SEQ ID NO: 55260 - protein, 182 aa, Zea mays
  Coding DNA Sequence Number=SeqID_11885
  Subcellular localization annotation: CTP_CleavageSite=58; ConfidenceScore=5.20e-01
MSGAPATSPGRWDSTVGASDFWARLAVRCTPDKYCRLSGAPSRACLTSARFWRALNAPAANDPSTKVIVALIEALEKIEYEHAIRDKLPEITERGHHALHLVAILDDEEVPLNEGPNGSINVESESLTDPQDHTIHALLGRDSEGHGVSEDVVVQGVALEGEEDKVMPVGIGGGSQVKDDKN

SEQ ID NO: 55261 - protein, 475 aa, Zea mays
  Coding DNA Sequence Number=SeqID_11886
  Subcellular localization annotation: CTP_CleavageSite=81; ConfidenceScore=5.16e-01
MDGCDHPRGGKTTDAATPCSKTQGWRGCTVAHAPASTGGCNHRPALPCELSFPPSSRQKAPRRRDGSTDPRGLNPQKPFTNCREDGCLHDGVGVEIVQLHPVEMQNRPHEATCWNSEPPLMERDGTQHIPRWRGRGGSTRRSHPLRLRVTREGTKQAIGNKGLQIVRRDGGERPRVAWRNDGYPIGHHQAKEGRRHLWQAKQATLHLRHDDRVKKGTGKGDTPKGILFHEGSGPRALLLIRGSKAGPSEGFDSRLRALGLRAHYWSEVRRLAPRKGSTAASGHSGSAPTTDQGFVGWPPKGSIAASEHAERGMTLGTSDTWPRLGLRSRGTLGHFRDQRERFCNRIPSEGGIEPLDPIKRDRVRQITCRLGGCSRKPGSGQTVDSVKYQPENLEPDYAPGQRPVRMREQPDRPRHHERVRPTAAKSNLGRHRKLRLARPQGSAPVSASKDGLRLARPKGSDSTSTSDDGLRLARP

SEQ ID NO: 55262 - protein, 380 aa, Zea mays
  Coding DNA Sequence Number=SeqID_11887
MGLPVAFLNPSKDLRHRVISFRWRHLFSLGLQPRPDFTPIRVQHRRTRIRTGNKPAAANSLVVDLQWHCLLGLGDKNTPSSLQPPSNLSTSIHALARLGRRPLVCRPARRRETHRVAVSVPIEMSTSPSSHKRGRERDVDAVSSALWVRMDKEFLATQGLLKRAKLLPRLRSAGPSAADKKNCAPALASRRSGAPAVVPSTAPKRETSSQPKAATEAADRTRIAAPAANTKQQQRAGAAAKNPIPPAVRPSKNLPPAEAPAAANSKQQQRAGAAAKNPIPPAVRPSKNLPPAEAPAAAKQQHPRSSVQLLPRRRSRRCLMRWRSQGRSSARCWRRWRSRRCLIRRYTHRTSRPHASRTCRDEDEEAGMVGRPRQALQITS

SEQ ID NO: 55263 - protein, 141 aa, Zea mays
  Coding DNA Sequence Number=SeqID_11888
MAELRWRQGREHARGSKAMGMAQGGWEGAANTEVGTAPTQRHRRVEAKLNEVTNTARTRQQPWNTLETKADGSGVFSCVCTTLGEDGSSTGGRLERQRELIGGIRGSAKEGACNTPGVYIPLDSEYGFKHVISVNKTDTKV

SEQ ID NO: 55264 - protein, 112 aa, Zea mays
  Coding DNA Sequence Number=SeqID_11889
  Subcellular localization annotation: CTP_CleavageSite=53; ConfidenceScore=5.18e-01
MASYNPNKTPSPTLAFGVPKVHKKPIKDKEKGSTKRARDNRSVPWSGAPDSVRCTRGLQAELHTFGNSQRRFAIIHRTVRCITGQCLMPQGRATLNSPASGIRSAKIHRTVR

SEQ ID NO: 55265 - protein, 119 aa, Zea mays
  Coding DNA Sequence Number=SeqID_11890
MARVARTLLAKDRLKGVVCSRVARTCSCGGGSVGMVDMCKRVKRSICRVVGDPQLGINRFGSPNFSDMKTGSSTLIVDNKRNKGFNFVLLLMVLSAGGLGLLISLSNSSILLIEDVHLS

SEQ ID NO: 55266 - protein, 186 aa, Zea mays
  Coding DNA Sequence Number=SeqID_11891
MSRARSARELYGGIGSSRCQSARRGDFGGADSKQAIRRRGSSTRRGEQTKFVRAANKERASCACAESSTIHSRGKRSPSRDQQQIWTPILKTRLRAEAVTTRDRDRAPRLGKRLNAAMVGSLGQLAELEQGTTRAITNSGEDQGDPVEPGKERRGEEKPRGRNALRRGFGYAQERARRWTSSRARP

SEQ ID NO: 55267 - protein, 376 aa, Zea mays
  Coding DNA Sequence Number=SeqID_11892
  Homolog annotation: Hit_ID=Q6ZD72; Match level="QueryCoverage=86%, HitCoverage=100%, E-value=1e-75, Identity=49%"; Hit description =Putative uncharacterized protein P0450B04.17
MECEPEELQFLGVVVIYRFSAEILRGPHRPLFARIAAAFALPLSALFLLHVAISHAFFTHIDSDDTALDASSPGTDTQRHLLSRLASDWLALLLFKSAYLLALLLLSLLSVVSDKRDALTFPRVLSVVPRVWRRLTATFLAAFALLFAYHVVVVLVFIGLLVAADNGSALAGLLAFLVVVAYLLGLGDLGVVWHLANVVSVLEDHKGFAVMRKSKDLIRGKLVTAGAIFFTLNVVFAAVELGFRAWVVRGSGAASSRLLLGLIMLVVRCCVVMLALVTQTIVYLVCKSYHHESLDNANISDHLEVYLGDYVPLNASDVQMEQFQLLWGSGTERDACLIAVLGCRNSDGDEISLQVGSCRIEYDRWVNTFSPEGWLF

SEQ ID NO: 55268 - protein, 141 aa, Zea mays
  Coding DNA Sequence Number=SeqID_11893
MGFHGEQNTGMAFHGEQNAGTAFQGEQIGRGGVDRAVLWVDTEISDGGAGLPWRAEGGVDRDDAPSSVRGDFGSQLPWRAWARRFRIAVHSMESVGEESRDGGGACFTHYRNPRLCRVLASLPSAFCRALGKESCAECRTR

SEQ ID NO: 55269 - protein, 125 aa, Zea mays
  Coding DNA Sequence Number=SeqID_11894
  Subcellular localization annotation: CTP_CleavageSite=22; ConfidenceScore=5.11e-01
MAAVALLSPWSVSFPPHLSLALCFTKRPPPYLLGGHGVDARPIKRLNRAVQVSMHSLYSHSSYSLRYYIYGRFSRCCHTSDAQIFFRPFVGEEYHKGVHLYTHVLYKDSSSRAFAAHIHSFMFVV

SEQ ID NO: 55270 - protein, 147 aa, Zea mays
  Coding DNA Sequence Number=SeqID_11895
MKRASLCKGAKDSTQTNQKNKLGLKRKEQKGNRRLPWSGAPDSVRCTTGQCPVHQGASARTLHLRVSRRISAIIHRTVRCATGLSGAPAEQRLSGRNGRLCKVNNTATEVKAAVRGAPDCPVRHWTVWCHMRIEPPTVDQLQDLTAG

SEQ ID NO: 55271 - protein, 90 aa, Zea mays
  Coding DNA Sequence Number=SeqID_11896
MVKKLETGTTVACTKSLEENVKDLRIAKRRKQKKKINTSSKSLNHASIKGNIQDGYQNMLDKLCRKKRWYEALECLKESIQFLLTQAINL

SEQ ID NO: 55272 - protein, 150 aa, Zea mays
  Coding DNA Sequence Number=SeqID_11897
MGKSKRGGSSSHRSGDKRKCEPTPPSEDFGDSEYSEEEFSSESEGSPAPASPPASSDDSDDSQGIAAEVWTYIRAVERAGLEGSDESEYSLDEENSSDSSEEGSGGDGGDGDDDGGNGDSDGGSGKGGDDSGDGGGDSKGSSKGSNKASG

SEQ ID NO: 55273 - protein, 65 aa, Zea mays
  Coding DNA Sequence Number=SeqID_11898
MDKVKINIKCWKHEKSLWKRDGFVQPKTVQSGSTGLSGGAPDSVPVRQAGSGEKAALGNSSAAYG

SEQ ID NO: 55274 - protein, 274 aa, Zea mays
  Coding DNA Sequence Number=SeqID_11899
  Subcellular localization annotation: CTP_CleavageSite=38; ConfidenceScore=5.38e-01
MQSACNRAKWAHPFDSNAPSMEAQAHTSRNRRASCYVRAAAPPLAPLSRLLDCGTSTATQGNPPRDTTVPARRINHGPVGRGRRRDGRCGQKWAGSNGGGRRAEAAVTSSAKLMDREKGDTLKRILLREGNRPRASLLIRGSKAGPSEGFNSRLRALGLRAHYWSEVRRLAPRKGSTAASSHSGSAPTTDQGGNDLVTESHQREASSPQTPLKGDRVRQITCRCSGAALANPAPAKPLTASTYQPKNFGPDRAPGLRPARMREQPDQPKHYARH

SEQ ID NO: 55275 - protein, 346 aa, Zea mays
  Coding DNA Sequence Number=SeqID_11900
  Gene Ontology: Mol. function=catalytic activity; Cellular component =endoplasmic reticulum membrane; Biological process=metabolic process
  Homolog annotation: Hit_ID=A2WTD6; Match level="QueryCoverage=94%, HitCoverage=50%, E-value=1e-174, Identity=87%"; Hit description =Putative uncharacterized protein
  Pfam annotation: Domain name=AMP-binding; Domain location=1-237; Score=-68.4; E_value=0.00017; Accession=PF00501.19; Description=AMP -binding enzyme
  Subcellular localization annotation: CTP_CleavageSite=63; ConfidenceScore=5.16e-01
MGSSINRHSNWARPITVRGLQAKISSGGFLKSTVFNLAYRFKQFRMMSGAKHNEAASICDKVVFSKVKEGLGGNVRVILSGAAPLATHVEEYLRVVTCAHVVQGYGLTETCAGSFVSLPNQMSMIGTVGPPVPNIDVRLESVPEMGYDALASKPRGEICIRGETLFSGYYKREDLTKEVLIDGWFHTGDIGEWQPDGSMKIIDRKKNIFKLSQGEYVAVENLENVYGLVSAIDSIWIYGNSFESFLVAVVNPNKEVLESWAAANGISGDFESLCNNPRTKEYILGELSRIGKEKRLKGFEFVKDVHLEPVPFDMDRDLITPTYKKKRPQLLKYYQGVIDNMYKSAK

SEQ ID NO: 55276 - protein, 315 aa, Zea mays
  Coding DNA Sequence Number=SeqID_11901
MTSPGSSNDGNALTHTDGLAREGFPRILWEVLQGAGYLTPPQYAVQQFEKHRVPRCRVRMTLGPHPLQPGWRSLDSESFGYRAEDTIEAIALHGLTTFCGFHPLELATHPIGLFPAEKEDDPMWKDRVEHAKDIWAIYPGQTAHLTVRCMNALYRLQVMRGEAMSHLMALLEATKITLDNREELVVDLSQEMVEKDLQVEQLSTDIQELEELVGTRENTIEVLEDQLINTQQQLAEANEHLDMHHQEIQDQEANEDVDIEGGDEPASSVDTTGSGRPPSPRVECCFVRSLGVQGRLRSWIVGLLAASLAFAPLGY

SEQ ID NO: 55277 - protein, 975 aa, Zea mays
  Coding DNA Sequence Number=SeqID_11902
MQVVELVPCARNKWGNWNEFWFYVAEGTVEDHEGLPVSEMCSHFYSAYPPFEVAEEDVDEGALRCAAGLSSGRDLVEEFVAYGVWPLAHGWALGEVCPRQMPSHGGKMVRSPAFALDLQSRDPAAFVREAEDGAVRLVGRYVPRTEGQRSWDIRGSNDRLNRVFELNQLPYNGYPDQDDVDRRGKKPVVETGDDPAPAAAPSSKKRKLGTAMVGLGVSDGFARELMRTCVAPGGRMSSPELRESLARMLRVTGGWWPRNVPIPARPTKTFLHLAWRNIAVVVSAVMDKDRQGAALKRQAVVRLYEARPKRQRGAVKAAAPGGGKPPVAAKSAVPASSKAPEAAAGAGGSRPTKALPASSRVPKVAKAARGLPSPGKVVADFATDISVDDYLGGSDEGQLVVVAPAAATTAAAVVLKAKSGALSAGGEMPALAAVRDEAGAVSRRLKEMKEALSQATDFADRAASGALTTVASAEVERLRTQHADAVREKSAVDSKCRKLADKVAALEGEKTDLRRQLAGERREADEALAKAQAAQAEANLARAEGNLARERAEQLQEWLSALESRVERAEAATRAEAERTRNQLMASYHELGARTCDFEVPEREPGLRYLEWVQEELQALPTIVEGFMSYASLVTCEGAMNALSREGCRHFEVFDQADEDFERDIYKVEDPIVKESAGAIYDRMWGPHGREVVRERAETARAQAACGERVDNFGALNSALPDPEPIPAEAVSGAALEPPPETAGGAPDAPAAAAAVGDPPPETAEGAPDAPAAAAPRAEDPATVAAEATTEAPATAGSSQVQDFGPAHSTATTNFLAASTVDGGNKYDGSASKFSDFADSGSSVEWTEESSEEDLDYFAALDVAAAEASPHAADTEDVPGPSTGRRRRRAVAKCRVSGAEGGRLRVSRAGRQELLSLPAAASTGLYDEVVCPRTFGYARKGFTCLVRCICYAGLWTSVFRTCCANPAAPLGDFCT

SEQ ID NO: 55278 - protein, 138 aa, Zea mays
  Coding DNA Sequence Number=SeqID_11903
MRKTLEDLRAEHRIEVQRIAAWADEAISALVLLGVSPIPVSKQSVSISDALPVLDSAADRLRRLDHILGARLEAEGSRLCRAVIEYILTCFRSHDPAFSLGPVIAGPVANTEDTTRGSVKDAVDVVAKRFQWDPTDDE

SEQ ID NO: 55279 - protein, 295 aa, Zea mays
  Coding DNA Sequence Number=SeqID_11904
MTSHESSEGGNTHSHTDGLAREGFPRILWEVLQGAGCTTPPQYAVQLFKEHRVPRYRVRMTLEPHPLQPGWRSLDSESFGYRAEDTIEAIALHALTTFCGFHTLELSTHPIGLFLAEKEDDPMWKDRVEHGKDVWALYPGQTAHLTVRCMNALYRLQAVRGEAMSQLMGLVEATKITLDNREELVVDLSTEMVKKDLQVEQMATQIQELEELVGARENTIEVLEDQLINTQQQLEKANQHLDMHHQEIQDMEVDEDVDIEGGVEPEPASSLDTAGTGRPPSPESSVASKSVPWTE

SEQ ID NO: 55280 - protein, 243 aa, Zea mays
  Coding DNA Sequence Number=SeqID_11905
MAVNGGRGVVLALPRLCGCLGHLDVIKYLSAIYFEHCVMMSNYVITVYMAHIRCTARKSVIPFLPSRLAERPLHRTVPGQSSHLERLHRRLHEEQEQQDSSPSPQREVESERPPSPAPQPEMPPTPPQGIPAAGGDRDGDGDDDDAGGSLSHGMELSEELEPEGWIARPITHDAARGCHFHDALDTLLCRVFDRHTWSIEYRYVVYQHRRGLYPDQWEAICLVRHPDDDLRGAEAVLKALFDY

SEQ ID NO: 55281 - protein, 162 aa, Zea mays
  Coding DNA Sequence Number=SeqID_11906
  Homolog annotation: Hit_ID=O40947; Match level="QueryCoverage=82%, HitCoverage=12%, E-value=6e-07, Identity=25%"; Hit description=ORF 73
MEEATGGVPDSIPSPLPEEPEALRETEAVILWEWEALETEHQHLGDWRTQLEERTKAASCQFALERSDLEQGHEDLKEDLKKKQRDEQTATEAALQKLQQELDDRASNISLAEENLKAKDASLEERATDLIRREKDLAWREEMWERQDKLLAEHELELEEKE

SEQ ID NO: 55282 - protein, 129 aa, Zea mays
  Coding DNA Sequence Number=SeqID_11907
MEVGLGLVWPGPSDRDCEPRFSVAGARHTWRAARRTCGRTKRQRQGVAHPSSYYRGRQGVRDTPGSRREATVREHGYRLPLPGCARAVRTETWGGSRLRAAPGPRHGPHVRNRRHAPHLAALQTPLSLS

SEQ ID NO: 55283 - protein, 69 aa, Zea mays
  Coding DNA Sequence Number=SeqID_11908
MAASEACSWSSSWTEFTTLEVYDLLDLNKVDFTYWLDTGVCFSVSKFGDQKVNGFRGTKLLNSRAEGVP

SEQ ID NO: 55284 - protein, 42 aa, Zea mays
  Coding DNA Sequence Number=SeqID_11909
MAGGNALAGAKERGLAGEDIWSPEIRSVSLLKPEANPRFCHV

SEQ ID NO: 55285 - protein, 141 aa, Zea mays
  Coding DNA Sequence Number=SeqID_11910
MRDEGPTLRARSCSCSLAEMPMTSSSSVASLPSGGAKSGGGACGSPLELQHEQWAPNVGTRLSGQIDPTGEWRECLQSSTGNDNSSVKSGLSRALYGGIYRYPSVHRPLARMFMPSGTRTILKIFSQGEVTDRHYRKGYYR

SEQ ID NO: 55286 - protein, 224 aa, Zea mays
  Coding DNA Sequence Number=SeqID_11911
  Subcellular localization annotation: CTP_CleavageSite=41; ConfidenceScore=5.52e-01
MTTTGLRKNSKPPTGITACCSLRNKTASRQRAEPSGLLHISSSTLRTSEGAREGALRRAAVFLDRRAGLLFSSTPWKLQRGTRRGGWDSRRGVVLLALMAAAGRRQEVILGAVAAGQSWSSAATEGRLAMEKKLSAEILGAIQGASTVGRLATGLLFVDSRGRHHGNLLLRQGARREHAGRWRRHGRGRAELLLSHGREGALGKLLLPALAARWRKKKAGKSGG

SEQ ID NO: 55287 - protein, 80 aa, Zea mays
  Coding DNA Sequence Number=SeqID_11912
MCSSPDGSARCRLAVLLRSEQHAVMPVGGLLFLRSPVVVIVHPGEKPRVCVEKASRSTLVDVRSDAQIGITVILANAVWV

SEQ ID NO: 55288 - protein, 201 aa, Zea mays
  Coding DNA Sequence Number=SeqID_11913
MAERYQLSWSCVPPTTRQKDGGYPPSGGLEGGRTRCIREREDMVAFQGGHPPFKGDSPYLRRQPSRAESSPTRSKVLPYGAGAGSHTSCKTAQSRRSQTAVRDAYNRPAGPGKGDTPKRILPHEGTRLRASLLIRGSKAGPSEGFNSHLRARGLHTHYWSEVQSPAPRKGSTAASGYSGSAPTTDQGFEGWPPKGSQPPQT

SEQ ID NO: 55289 - protein, 118 aa, Zea mays
  Coding DNA Sequence Number=SeqID_11914
MAGKRPRIRGQRGENGGRRSRADRRNSGEAFRPRGRGLRRIKAWESFSRGRGDTGTYTGELDRAKLAGHLASTVDSHDRAPAMPKLAEHRAKLGKLSTGKGVSPRGGARGGLARSPAS

SEQ ID NO: 55290 - protein, 214 aa, Zea mays
  Coding DNA Sequence Number=SeqID_11915
  Gene Ontology: Mol. function=GTPase activity; Biological process =immune response
  Homolog annotation: Hit_ID=A3B6T9; Match level="QueryCoverage=93%, HitCoverage=18%, E-value=2e-80, Identity=73%"; Hit description =Putative uncharacterized protein
  Pfam annotation: Domain name=GBP_C; Domain location=1-211; Score= -113.3; E_value=0.00041; Accession=PF02841.5; Description=Guanylate -binding protein, C-terminal domain
MEIILEISSLREAHEDAIRKAISAFNVSAVGTRSARSKFEKLLHSSLKKAFEDYNRNAFLEADLQCSNKVQNMESKVRAACNRSNAKLDDIVRLLDDLLTEYESTAYGPGKWKRLATFLQQCLAGPVLDLFRRQLEHIDAERNAMRLKCNSSDDKLALLRKQLEASESHRAEYVRRYEEILNDKQKISKDYSIRITELQAKSSKLDVNLCEFVN

SEQ ID NO: 55291 - protein, 319 aa, Zea mays
  Coding DNA Sequence Number=SeqID_11916
  Homolog annotation: Hit_ID=A2XFR6; Match level="QueryCoverage=51%, HitCoverage=49%, E-value=1e-08, Identity=29%"; Hit description =Putative uncharacterized protein
MRVCGNRFTYAGDSDPTFLVTLVRGIESKEPRSRRKVRHRLKEAKLMVRTHRLVSGESSTGATAKGKLGRAIGAIGPPVTWRDCIAACTRSRSAGGSLSHDTELLEEWEPEGWITRPITRDATHGCHFHDALDTLPRRAFDRHTWSIEYRCVVYQHPRGLYLDQWEATCLVRHPDDDLRGVEAFSEHYSITKRDTANAAMQDVAQRALSQYCSLFSRVADGLDLYARGVIASPVGEGNPRLNSMVNLAVVLNTELDHALDELGKVRAEVAELRAECAARHYLDGGSPAPVGIQRPYRSPPRGRFDYGTPDCRTRIDLDP

SEQ ID NO: 55292 - protein, 83 aa, Zea mays
  Coding DNA Sequence Number=SeqID_11917
MDRLEQPPPTNSPACTRGPVDSGHHHRQAVPRCNRKDLPKPTPPFAGPPSPPSNQFCQILNNVNYLGKIQKPLSIAEEFKVWN

SEQ ID NO: 55293 - protein, 43 aa, Zea mays
  Coding DNA Sequence Number=SeqID_11918
MKPHRRVDRRTYTPTREEPVAEDPNVQQIEVAEQELIEGKLCP

SEQ ID NO: 55294 - protein, 246 aa, Zea mays
  Coding DNA Sequence Number=SeqID_11919
MASHESTEGGNSHSHTDGLAREGFPRILWEVLQGAGYDTPPQYVVQLFEEHRVPRCRVRMTLEPHPLQPGLHSLDSKSFGFRAKDTIESIALHVLTTFYGFHPLELSTHPIGLFPAEKEDNPMWKDRVENAKDVWALYPGQTSHLTVRCMSALYRLQALRGEAMSQLMGLVESTKITLDNREDLVIDLSTELVEKDLQLEQMATQIQELEDQVEARDEREIGSNLFLYEFWWLNCPTKIIELTSLL

SEQ ID NO: 55295 - protein, 30 aa, Zea mays
  Coding DNA Sequence Number=SeqID_11920
MTKVNACRRWSNEFTREGDAEDFADDDDEF

SEQ ID NO: 55296 - protein, 185 aa, Zea mays
  Coding DNA Sequence Number=SeqID_11921
  Subcellular localization annotation: CTP_CleavageSite=46; ConfidenceScore=5.15e-01
MSGRFIAPVRTTTKGASLRGHSTPHNLRGSSKSLLGRQLQGAEAPRASEEDLGISPGRSTAYFVVKTRAILQECAKSPSKSRRRSQKPKLGRINRSRSCTLLRATHPTYQNMWVIILQLRLASHKLLGHSFHLCHHYNPPTHEVSSQKGANTPNSSGISGRNLKLAQSTVLCWSQSTSIERYPTF

SEQ ID NO: 55297 - protein, 253 aa, Zea mays
  Coding DNA Sequence Number=SeqID_11922
  Homolog annotation: Hit_ID=A2YHS6; Match level="QueryCoverage=26%, HitCoverage=15%, E-value=7e-20, Identity=73%"; Hit description =Putative uncharacterized protein
MAAQPKGEEGERGSRGWGPTVAERGKGQRQWRSHEWCRGGPGTPKDPTKFVDVTKSLNKNDNTTVFHHYKFDVFNVAIDQQLNEIEDRFGGHATDLLSLRASLNPILGYFDIEKMVRTIQTTRINTNYIPPPRQVHVYPVNGVILKDSSEKFLPTPTPLAESLTFTAGSSASAPPAPAVQAPAPRGDDPDDSGDDDEDNDEEEEGNINEEANDEQQDHYIGLWPVTEHYTSMFETGHFPNLLQDVLHALGTYV

SEQ ID NO: 55298 - protein, 168 aa, Zea mays
  Coding DNA Sequence Number=SeqID_11923
MTRLEEFSQHLGLLQGDTDYGVDTEYDDQPHRLRHGSHHVATPEHAPGAQPARAAPRRANPAPTPAPTAIKATPASTVHPRASLTQPEHKFAGVFPESGMLAAAQATTTIDRPNQPLPIPSDPRDLPDLTQPFTRPPSPPEVAQEPAQEPAIEDLPAPALEGKPRFYA

SEQ ID NO: 55299 - protein, 67 aa, Zea mays
  Coding DNA Sequence Number=SeqID_11924
MSQLMALLEATKITLDNREELVEIQDMGADEDVDIEGEEEPEPASSLDTAGSRRPPSPESSVALFAH

SEQ ID NO: 55300 - protein, 232 aa, Zea mays
  Coding DNA Sequence Number=SeqID_11925
MGIRCIRLSEVFRTKTSVCGTNILGGNDLRDQADHSLARHGTHEDHPSENDRTSGLPHHQLAPHHEGSSSGSNDPIEDLEARVERLTVELCHGGRERACASRRIAELLEEVELLQREIVEHDRAIDWDVNSRSIAWDCEVTARARVEELSMALENLQVYNNVLHEEVHVLYNQLHPNLPLEVVEMGAGAAEADEGGTYGELDIFGAPPPMNIVDNHPPEASSGSGAAKDVED

SEQ ID NO: 55301 - protein, 124 aa, Zea mays
  Coding DNA Sequence Number=SeqID_11926
  Subcellular localization annotation: CTP_CleavageSite=59; ConfidenceScore=5.03e-01
MESTSQEWEIPPAIVVRAARSIPVQFLAPSASPTPRGARRPIGSSSTATDRPEQAPQMSHSARAHGQLASGHHRRQANHRRVHRDSLGLTRPFAGDLPPPVSLAVSFFASHCSGEEEEHMLDSS

SEQ ID NO: 55302 - protein, 183 aa, Zea mays
  Coding DNA Sequence Number=SeqID_11927
MAWGLLRGGNEPSRARLGTAWCCDEPSLARLDYLTSLRNWLGSARWRLASWLEPAREPATPTVQCLQYAEGEGRASRDCRADNTVEGRGRRCWGSGSVGRPGDDIEQSESGVGHRPSVLACSATVGSKNERGRGLGVEQLGSATTGRRRQDARLGGRQEARTREKLGGAGSKRETLGGAGRER

SEQ ID NO: 55303 - protein, 154 aa, Zea mays
  Coding DNA Sequence Number=SeqID_11928
MGKSKRGGSSSHHLGDKREREPTPPSEDFGDSEYSKEFSSESEGSPAPASPPASSDDSNDSQGIAAEVWTYIRAVERVGLEGSDESEYSSDEENSSDSSEEGSGSDGDDGDDDGGDGDSGGGSGKGDDDSGKGGSGDGGGGSKGSSKGSNKASG

SEQ ID NO: 55304 - protein, 21 aa, Zea mays
  Coding DNA Sequence Number=SeqID_11929
MAGKQCRSLRSDCRVSHPGDD

SEQ ID NO: 55305 - protein, 195 aa, Zea mays
  Coding DNA Sequence Number=SeqID_11930
MSWLSEERWSPAEGNDGTPGDVASPDPSLGEVAIPPRSRLSLSPGVGRGGVHRLPEPRLSPSPGVGRGGVRRLPEPRLSPSPRVGRGGVRRLPEPRLSLSPGVRRGGVHRLLEPRLSPSLGVGRGEVHLPRPRRGPNPRVRQGGASYVARRWDLAVVDLTLASGTTVGAGQAALFSCQVGQWSGEVTAVTSASVD

SEQ ID NO: 55306 - protein, 200 aa, Zea mays
  Coding DNA Sequence Number=SeqID_11931
MQAACNCTKGAHPFDFDASSMEAQAHTSCNRRAGYYVRETAPPLAPVPRLLDCGTGATTRGDPAHGPTVPTEHNGHGSVSRRRRRDDRYGQKWAGRTGKGDTPKGILLREGNGPRAPLLIRGLKVGPSEGFNSRLRALGLRAHYWSEVRRLAPRKGSTAASGHSGSASTTDQGFIGWPPKGSTAASEHAERGMTLGTFDT

SEQ ID NO: 55307 - protein, 122 aa, Zea mays
  Coding DNA Sequence Number=SeqID_11932
MPPAAPRRIILLAAAAAAAALLLMWPAARVTADDGSTAFLPPPPGPASPFPFCPARPPGVSSGPFPWSPPSSSPPPPPSVAMFPQDPGFLPSGACPVGGAAVAWLLLLPLLAVLSAFLPLSQ

SEQ ID NO: 55308 - protein, 681 aa, Zea mays
  Coding DNA Sequence Number=SeqID_11933
  Gene Ontology: Mol. function=nucleic acid binding
  Homolog annotation: Hit_ID=Q2QUK2; Match level="QueryCoverage=51%, HitCoverage=62%, E-value=1e-44, Identity=32%"; Hit description =Putative uncharacterized protein
  Pfam annotation: Domain name=Extensin_2; Domain location=75-467; Score=-141.9; E_value=0.098; Accession=PF04554.4; Description =Extensin-like region
MEKTKYEVARDETVKHVQQVFNSLGIHVLAQTVRDVISPKKKEGRGKAIDSDNDYDPCSDIENQSDTNDDYDDDLNNEVNTEATQMVPGTRPHQKKQKAGTMPAANHQPPCTPVRLTRQSAAMPLPGGRPPPKPRHPLPPKTTSKATPKRNAISSSTQQQVRASTTTTETTETTNPVSFPPKMTRSTQAMSSPVPNTMPRPTRYTRTSGTMSTPGGHTMHSPPRFTRASAAMSSPGANPHHSPPRFTRASAAMSSPSANPHHSTPAATAIVSQQPTPTTSVNKTVPTDNSPGGHSSRQSNAINESAEQFDAATSEGNPNEGEPVGDLVPGPKKNVRKKTMGYGLEKMLNRGNRLAIHVAEGKKRPEVPLQVAKLASETGVALRDNLPIYKSWKLYDNSVGQAEVGKVLDKVTSRLDVDVKNEGPSKDACIYIIKRGVRQTRYNLKRKYFDESLTKEQLLAMQPPPKMKKEDWTGLVEYWCDPKNQEKSAKNKANRGNVQLHQRTGARSYIAHRYSLRTKYNNMEPDAVDFFGECMNSPRNGRTPLANEIYEQMVAEKERELEEGEEQKSPSKIVADSLSQISRSSNFLPNIGVPTMSKTGRSTSLAAQARMQAQFEEKLQAEREEAARKQEELQAQLQAQHAALEENQSLLHQTQEEVKGMHTKFEETNALLRAVLKLQKD

SEQ ID NO: 55309 - protein, 154 aa, Zea mays
  Coding DNA Sequence Number=SeqID_11934
MAMGHGDGDGSRRWGTTRRRARRGLGTPMGHNEEAGTTMAGAAMGHGEEAGTEKAGDALIPSLFIFQLESQLLIIPMCINQGSCRRPGTVPIGVDLEAPINDVTGLPLIMCPDCKDVRVFAANTTIMDIYRQHPPPLQQVRQPRFLSSWKKLTA

SEQ ID NO: 55310 - protein, 349 aa, Zea mays
  Coding DNA Sequence Number=SeqID_11935
MNGGNHPRDGEPSFSQLLQGLQKGLEILLSLARGPVAPVLGGGDHHSLRKRWEPPVVISEIKPPALPPFVRRREDGRDVLQRPRLPQLEDAATSPHRHANSSFPRRRGKKLRGEEMGPQVPVGGNPQISFANRREDGCLRDGVGTEIVQLHTVDVQNRPHKTARRHSKPPLVKGDEAQHIPRRRGRGSSARRGHPLRLTGGTSGRRSRRRFTSAIMTASKKGPGKGILRKGSFSAKEAGPEPPLLIRGLKAGPSEGFNSRLRALGLRTHYWSEVRRLAPRKGSTAASGHSGSAPTTDQGFVGWPPKGSDSRLRARRARDDPGYVRYITKARATLPMYPRTFPRPMGTIL

SEQ ID NO: 55311 - protein, 192 aa, Zea mays
  Coding DNA Sequence Number=SeqID_11936
MARHLAQWRRSSKEAIRDLYIPEGGSKAARHRPSQRKIRRRLWKLACSGFAEEFVTKETVEASKRPCPRHLPKGSRASDVKRYSESGVARRRSRALGFVPTLGEIRPGLGRRREREDLCFEGGRQHRAWARGGRVKPLDFGEGSFIFVGKAIPLADPLQIHVIVGSKHGEGPPDVVVQRLAECAACVVTQGL

SEQ ID NO: 55312 - protein, 203 aa, Zea mays
  Coding DNA Sequence Number=SeqID_11937
MTGPKTQMDKDKGLKTTNGTNDFESRTTQNQEGENDEYMDDAQSIIESQAQGELKSSLFRIPVRTDLYIQGLLGHRLRQGRVQFKLGRMMRTSPPYKQCMDRQHEPCAPTRGAPCITLGAPAAGEDPDDEDDNDSSSSYNTDLSEEQEPEGWVARPITRDAAHGCHFHDALDTLLHRDFDRHTWSIEYRCVVYQHSHEVYPDR

SEQ ID NO: 55313 - protein, 151 aa, Zea mays
  Coding DNA Sequence Number=SeqID_11938
MALMVGRARRGRGESHPPVINGGAGDRDPERSDDNGLEGQNLGWGGAAGGGGREKRKRPEVQSYIMCLVCFTVVLLGMDTGLLQLLAPLLLTGGKGADLVIRGNVVLNTLSARSTSTLLQDQISINSPSSRQVSGLAELSYVTGFDSPLHS

SEQ ID NO: 55314 - protein, 86 aa, Zea mays
  Coding DNA Sequence Number=SeqID_11939
  Pfam annotation: Domain name=zf-CCHC; Domain location=49-66; Score =10.1; E_value=0.045; Accession=PF00098.14; Description=Zinc knuckle
MAISQEDCITARQAEKKRKTTVAGPSAQPQRFRIRSNQQQQQYRQANDNRYFTCGNTGHYAKNCHRNQQRQGQNVNQNQGKRQKVQ

SEQ ID NO: 55315 - protein, 246 aa, Zea mays
  Coding DNA Sequence Number=SeqID_11940
  Subcellular localization annotation: CTP_CleavageSite=35; ConfidenceScore=5.09e-01
MARARAYKTLPDLDCSLPRTLKPHRSLARRRLPVRSESAAAHSLCHRRPASGAIPNSVQPSEKTVHTSVRLPERGIGVYFAGEASPCSPELSTPPEYVDRVNHSTILRFLVHTVAMLPREAHHALGLNQFAVVWPVYSPPTRTPACTRGPGDSGHLRRRAVPRRDRQSLPEPTPPFAGPPSPPTIPIHYVILKENLSLKDCNLADGEYILVPEQGAAQEVAPDPAPELAPEDLSATALEGKPRFYA

SEQ ID NO: 55316 - protein, 246 aa, Zea mays
  Coding DNA Sequence Number=SeqID_11941
  Subcellular localization annotation: CTP_CleavageSite=35; ConfidenceScore=5.09e-01
MARARAYKTLPDLDCSLPRTLKPHRSLARRRLPVRSESAAAHSLCHRRPASGAIPNSVQPSEKTVHTSVRLPERGIGVYFAGEASPRSPELSTPPEYVDRVNHSTTLRFLVHTVAMLPREAHHALGLNQFTVVWPVYSPPTRTPTCTRGPGDSGHLRRQAVPRRDRQSLPEPTPPFAGPPSPPTIPIHYVILKENLSLKDCNLADGEYILVPEQGAAQEVAPDPAPEPAPEDLSATALKGKPRFYA

SEQ ID NO: 55317 - protein, 175 aa, Zea mays
  Coding DNA Sequence Number=SeqID_11942
MARHSVPTHINRPHRFPGNRSGLTVLILDGRLWCWIRGYLLSNSLLRHEDAGELVGGMCSGLSTAIQVNPRARGASRGANELTRARNQRITHRGARSTFTGGRVKSEDLDPVSPMRQSSIPRSGSFTEARRVYSKGWMRLGMAVLAGAGAGQETRARLGVAWGTRGRALGVLWRV

SEQ ID NO: 55318 - protein, 167 aa, Zea mays
  Coding DNA Sequence Number=SeqID_11943
MVGRSKPGCSLCPALSFKDLHHPCWGGGRAEPELYLPYGPVGHLFLQHSGEKALTGLAEGVDFNNVGPIGRKRRHLQHACFRCHLPPLGGVWLYACRMGGCCAARTRGPPKTSQAARAAFVFLGCPTLAPAQRLRAELAEATERPVKPSARARFLEETVAAMAQARC

SEQ ID NO: 55319 - protein, 274 aa, Zea mays
  Coding DNA Sequence Number=SeqID_11944
MQPGCTPPLAVTQDGDLRFDGGGKRTGLRPLPLPQPQGFSSPGLRRGVCRVGIGPCVGEPLSAPASATVAGRGSSADEIARAAHGPTSNSTAFCPPLPHEFGHGRGPPGSGIRPEVIAAAVWPPGVEVVVVAAAGAGDGAPFVNLPLLRSPPPPIEWGCSYLRRWNRSSDYSPVGSLNRFTKCESPHVKVTSEGTAGRGLGGGQPTRLPEPDSWRRPWRRRPGLGDDAVLQSGDLRTASPSEARSGLAEGVADAEGAAAPFSRQDPSLQDRIVL

SEQ ID NO: 55320 - protein, 21 aa, Zea mays
  Coding DNA Sequence Number=SeqID_11945
MAAAVWVGGATALGRWYSITP

SEQ ID NO: 55321 - protein, 307 aa, Zea mays
  Coding DNA Sequence Number=SeqID_11946
MCSHYYVAYPQFEVAEDDEDERALRCVPRMNSGRDLVEEFIGYGVWPLAHGWALGEVCPREMPSLGGQRVRSPPFALDLHGWDPAAFVREAEDSATRIVGCYVPRTEGMRSWDIRGSNVRLNRVFELNCLPYGGYPGDDAADRREKKLLDVTEEGPSQEAAPATKKRKLALGGRMSSPELRESSAQMLEVTGGRWPKNVPIPRAAGEDFFMSRMARDLKVFPYGRNIAAVVSAVMKRDRQDMAQKRRAVVRIVDPMREAKKAWGSAKAAASGGSKPVPAAKPAAPGHGKASASAKAATSGGSKPPRV

SEQ ID NO: 55322 - protein, 203 aa, Zea mays
  Coding DNA Sequence Number=SeqID_11947
MARVACTLYGKRLDDGVSVLSVGVNPVRWTRTTVGGPNDLGGSVTAGIGANPISSDIMKHLKKNFQTLIQENFCHSSLATFWKFSSCKTSWLQDMKGAAAAATIQSETWKPKWNSFGRSYVTETGCGHKMVYCNTLHEEVHVLYSRLHPDMPADPVATGVGPSGTAGEGTDGELDLFRPPPSMNLADDRYPTAGNEETNDDKD

SEQ ID NO: 55323 - protein, 299 aa, Zea mays
  Coding DNA Sequence Number=SeqID_11948
  Pfam annotation: Domain name=TSC22; Domain location=84-144; Score= -1.9; E_value=0.068; Accession=PF01166.9; Description=TSC-22dipbun family
MACCRCVAAPREVEGSSMWPFEACLGTPGARAGSPMGIRCLFGQDGRLAWQNSSPEGATAVRPTSYRDWGFGSHGFMCQAADFADLVASSALTADVAAEVERLRAQYADVVREKSAAESKNCRLSEKVAAMEAEKTDLRRQLAEERREANKAIADAQAAQAEAKVARAEGSLARQRAEELEARFNALRGRMDKAEASTRAEVERMHAQFVDAYRELGAWTADFKVPGQEAGLCFLEWLQEELLVLPTIVTGFMSFASLVTCEGVVNALSREGCRHYEVFDQADKNFEREIFKVEDPVVK

SEQ ID NO: 55324 - protein, 98 aa, Zea mays
  Coding DNA Sequence Number=SeqID_11949
MCVSFFKAALWTSKLQEHGMNALEDFLIGYQTPKNTHCPMNSFTDSGNQREEEVEVPEEQVQPPLDTQAGNSFYFDICGSEPESPAKEGKPRCICHLP

SEQ ID NO: 55325 - protein, 183 aa, Zea mays
  Coding DNA Sequence Number=SeqID_11950
MRGCGGNSAARSCAVGGWICFSRSGGGGAVHWTVQNSEPTERGVVAAAAGGMLVCYGGRLVSMVSGAQSCCAVERRGAGASIEGSRLGEEHRDALLCGDEGRNFLQPNGMENRELDMAPMAAAATKTSHPTGGAKHLGQGASARGRRARASGCPGRRSGAGASMELALFDHHGRRAGAQGTER

SEQ ID NO: 55326 - protein, 826 aa, Zea mays
  Coding DNA Sequence Number=SeqID_11951
  Homolog annotation: Hit_ID=Q6QP51; Match level="QueryCoverage=17%, HitCoverage=65%, E-value=2e-14, Identity=42%"; Hit description =Putative growth-regulating factor 1
  Pfam annotation: Domain name=Extensin_2; Domain location=359-730; Score=-134.3; E_value=0.048; Accession=PF04554.4; Description =Extensin-like region
MQAACNCTTGMHPFDFDASSMEAQAHTSCNRRTGYYVRKTAPPLTQKLRLLDCGTGVATQGDPAHSPTVPTRHIDHGSVSRGRRCDDRYGQKWAGSNGGSRRTGAAVKSSAGSRPLLEQQGSPLPRREADAPVFRSSNGSRNGCPANHSSRRINSTAGQATPLAGEARSGKGDTLKGILLREGSGPRALLLIRSSKAGPSEGFDSHPEHSGSTPTTGQRLPPEGFDSRLRTRRARDDSRYVRYMAEARAMLPRPLADPYRTGHGRPLGSHVSNSLETPCSAPSEGNMVKAPSTQGTRSRLARAQPQAGTVDQGRFTPRPRASSSNRRTFDSPEAQLGQASHRQGRSDRSHFTPPLTDLTGKQRRLPCSDCCATRQGAIGSSSSPDPRAQTPPRPQKTVSASPDPRAQTPPRPQKTVSTSPDPRARTPPRPQKTVSASPNPRARTPPRPRKTVSTSPDSSLLGLIAGSTLKLEPLVIGSTSFVAKGATAWLSCEAIVAVVEVSSPEVGANVGHLFSNASACSKPKLSVASAFCIVAPSRGLRLENLRQKESELLVSLCRRLNPDKVVEPEWFGAPDQSGAPGHGSLQSSLRKWSSAPPDWSSAPGRRRPSAEVSTRPQVLFCPPRFLHVQSAACHRQRAILSIRVRNPPRPCAKYATTPLLTDGRSPRTICRPCAKSAAMPLLADGRSPRAIRRLPSPARNPFHLRPQRSPMCQILLGRAPTAGATPPRATTCGEWKVRGAIKGGAKVIGGGGIFNLFDWKRKSRKKLFSNSPEGSKLVKRSEETLLSGCLHLVSYLWRPQPCSEQQIVVAFLLVVRPFLALRLAPV

SEQ ID NO: 55327 - protein, 476 aa, Zea mays
  Coding DNA Sequence Number=SeqID_11952
  Homolog annotation: Hit_ID=Q6J9V9; Match level="QueryCoverage=22%, HitCoverage=27%, E-value=5e-09, Identity=44%"; Hit description =Putative uncharacterized protein
  Subcellular localization annotation: CTP_CleavageSite=28; ConfidenceScore=5.08e-01
MQAACNRTKWAHPFDSNASSMGAQAHTSCNRRAGCYVQETAPPLAPLPCLLDCGTSTATRGNPAYDPTVPTRHVGHGSVSRGRRRDGRYGQKWAGSNGGGRRAEAAVKSSAKLTTGGAFGRRSRRRFTSAIMAVSKKVRHVTRFRILFLFLFLSLTTGTGKGDTPKGILLREGNGPRAPLLIRGSKAGPSEGFNSRLRALGLRAHYWSEVRRPTPRKGSTAASGHSGSAPTTDQGLVGWPSKGFDSRLRHRARDDPRYVRYITKARATLPSHFAAPLTGLTRGQRRLRRSDCCATRQSEADSGQVRASGAIGSSASPDPRGSDSGSAPEDDELRLARPPGLGLGLSPGRRRTPPRPTLGLGLGLNPGRRRTPPRPTPGLGLGLGPGTRRTPPRPTPGLGLSPGLSRRSLPRPTQGLGLDLGLGRQTRPRPRRSLRLAQPRARTDHVIGGAIITLPQANSGYGEQNRRPIWLALVNK

SEQ ID NO: 55328 - protein, 195 aa, Zea mays
  Coding DNA Sequence Number=SeqID_11953
MPSHSPHASRPSIFRAPRMGSARVAFVLLSLEERNFAEVGTFHPSLGFKDFHQAARLHPLADCHRRRVQHFVLCSGDCGQPHQGVSQHVVRREGDTRVLGRSHSRFRGEDGSEDLPVRFGATGAHWCGVGGQVDAAAGAEVMAAGESFSADKTVSATRGPTSGSLALMSGSRPSSGDTNESLPAVASVLGPSLLL

SEQ ID NO: 55329 - protein, 28 aa, Zea mays
  Coding DNA Sequence Number=SeqID_11954
MAREQRVAAGVIWSHETVTPFPSCVKIL

SEQ ID NO: 55330 - protein, 355 aa, Zea mays
  Coding DNA Sequence Number=SeqID_11955
MATSSLMVGESEPGCGLCPFLSLKDFHHQGWGGESAELGVPGLQPRVASGPLAAPASATAAGRGSSAGAAAGTGHGLTSNFSAFCPSLPHKFWHGRGSPGSGIDPEVGAAAVRPPGAEVVVVATAGAGDGAPFAGPPLLRRPSPSEWGRSCLRRGNRSSVRSGISNASVFCSLRLSGPEHESLGPFGLVVWGSSSLVKETPRPSFGGPRPGGNRSSRLLGPDSRRSPWTAAPPEAGSGFAEDVVDAEGATAPFSVKTRACRIRSSCSVCFLRPPRPEEHTLTALAKPRLFSSCFEHLDSVGNRDVCVSESCFFAEGTSEKVMSEVSVSRRRRSPSARSALAAYVYLVVSRIRFPK

SEQ ID NO: 55331 - protein, 561 aa, Zea mays
  Coding DNA Sequence Number=SeqID_11956
  Gene Ontology: Mol. function=ubiquitin-protein ligase activity; Cellular component=ubiquitin ligase complex; Biological process =protein ubiquitination
  Homolog annotation: Hit_ID=Q6H593; Match level="QueryCoverage=100%, HitCoverage=100%, E-value=1e-114, Identity=68%"; Hit description=Arm repeat-containing protein-like
  Pfam annotation: Domain name=Arm; Domain location=241-282; Score=6.3; E_value=1.7; Accession=PF00514.14; Description=Armadillobeta-catenin -like repeat
  Pfam annotation: Domain name=Arm; Domain location=283-325; Score =29.2; E_value=1.5e-05; Accession=PF00514.14; Description =Armadillobeta-catenin-like repeat
  Pfam annotation: Domain name=Arm; Domain location=326-368; Score =27.3; E_value=5.7e-05; Accession=PF00514.14; Description =Armadillobeta-catenin-like repeat
  Pfam annotation: Domain name=U-box; Domain location=48-120; Score =64.2; E_value=4.4e-16; Accession=PF04564.6; Description=U-box domain
  Pfam module annotation: Pfam domain module=Arm::Arm::Arm::U-box; Domain location=241-282::283-325::326-368::48-120
  Subcellular localization annotation: CTP_CleavageSite=45; ConfidenceScore=5.48e-01
MGAARPRRWKLPFHRTVSAVGGGGGAPCSPSSRSSSSPARSEAWAAEAVPEEFLCPISGALMADPVILPSGKTFERACLQACAELAFLPPGVEAGDADTVIPNSALKAAICTWCARSGREVPAPPSAEAARQAVQRAMPPAAAKSVRTTTTRRAVVMAASTSNSSTSSYGSASEITAAEDEAKAKEEAPRRRTVKEAEVEPAAAPPADPLEDDVVGKVMDADDDGVVAAAMGALREATREGEERRRALCTPRLLGALRRVLLLPRHAAARVDAVAALVNLSLEPANKVRIVRAGAVPALVEVLRSGASAPEAREHAAGALFGLALNEDNRAAIGVLGAVPPLLDLLTSPTHAPRARRDAGMALYHLTLAAVNQSKVARFPGAPKALLAVASGAAEPGPIRRLALMVACNVAACAEGRNALMDAGGVASVSGILLSPSHDTTNGGGGTADLEEWCLSAMYAMSRGSLRFRGLALASGADRALRRVVADEGGGVRREIARKTLRAMRSDLDEDGGEYNDLTGSSAECGDGEDCGGSIVSDGLMSFRRRQRELGVSSCGNTAEF

SEQ ID NO: 55332 - protein, 81 aa, Zea mays
  Coding DNA Sequence Number=SeqID_11957
  Homolog annotation: Hit_ID=Q5GAU8; Match level="QueryCoverage=51%, HitCoverage=30%, E-value=1e-12, Identity=80%"; Hit description =Putative uncharacterized protein
MGTIFVPYPYPDREIPYGLAGIGSPLTSLVIAYGVEVKDMYRETLCQKRGRPRELYPDVSSKDAPVPPELPVPNCDCGRLA

SEQ ID NO: 55333 - protein, 48 aa, Zea mays
  Coding DNA Sequence Number=SeqID_11958
MAPCLDLTYSRAVSMALAVEAKYAGPGKSKGYGGDRPNQGSEKRQRTT

SEQ ID NO: 55334 - protein, 102 aa, Zea mays
  Coding DNA Sequence Number=SeqID_11959
MNSKTPETEHRPGLERLLETAHLELDGKLFVNTQQAPTWRANYRRFETGGVPKPTSEMSPRAPAQMGGREAEREGGKRGGRRQARKERIQVYNGGCSRVLRV

SEQ ID NO: 55335 - protein, 132 aa, Zea mays
  Coding DNA Sequence Number=SeqID_11960
  Subcellular localization annotation: CTP_CleavageSite=41; ConfidenceScore=5.26e-01
MTLSTPWCIGPSIDVLVYQVSLCSLPAQSRGYTQASGRLPACSTRGVIVSPVGEGNPRLSSMVNLVAVLNTELDHALDELGKTRAEIAKLRAKRVECRHHEDSSPDPIRTQHPYCSPPRGHHAYDTPATGPR

SEQ ID NO: 55336 - protein, 57 aa, Zea mays
  Coding DNA Sequence Number=SeqID_11961
MGLGVSGSLCQDDERRMVMIMLMVMVAFGAIYAQVKEKENGVEADLREFQDFDEFED

SEQ ID NO: 55337 - protein, 124 aa, Zea mays
  Coding DNA Sequence Number=SeqID_11962
  Gene Ontology: Mol. function=carboxyl- or carbamoyltransferase activity; Cellular component=ornithine carbamoyltransferase complex; Biological process=amino acid metabolic process
  Homolog annotation: Hit_ID=Q8SA97; Match level="QueryCoverage=91%, HitCoverage=21%, E-value=1e-18, Identity=49%"; Hit description =Ornithine carbamoyltransferase
MAPPVDVAGSRPRLGDVEAPPRSRSSLSSVAVIESEPLGRARRRPSAEARAESEPWGRAKWSSSSSGAEPKSEPWVGRSGARRLQGLSPSPSPGSGGAEFAVFRGLARVRALGRVERSSPSSGA

SEQ ID NO: 55338 - protein, 177 aa, Zea mays
  Coding DNA Sequence Number=SeqID_11963
  Gene Ontology: Mol. function=kinase activity
  Homolog annotation: Hit_ID=Q6QP54; Match level="QueryCoverage=26%, HitCoverage=16%, E-value=2e-13, Identity=82%"; Hit description =Putative kinase
MEHRPGPERLLETAHLELDGKLFVNTQHAPTWRANCRRFETGGSLGRRVKCRRVPQPRWVGARPSAKGGSEVAGDGRERGGNPAAFVFVPRPSRPESAWGRVMMVPPVDVAGSRPRLGDVEAPPRSRPSLSSVAVVKSEPLGRARRRPSAEARAESEPSGRAKRSSSSSGAEPKSEP

SEQ ID NO: 55339 - protein, 51 aa, Zea mays
  Coding DNA Sequence Number=SeqID_11964
MVWLQMMMRRMVMIMLMVMVAFGAIYAQVKEKENGVEADLRDFQDYDEFED

SEQ ID NO: 55340 - protein, 187 aa, Zea mays
  Coding DNA Sequence Number=SeqID_11965
MAPRSSTMDHPDPTVRKLLDAMALMENRLTEALAGRGGEQTPASSFALLFDSFEGTTTSSTTALQYVDDVFSSSVGAAYAASPCARSRSPSYDDDEPVFDAWPLFDEEPVDSATTQALFSDDADHCFDDELDTDRTMEFRFPTSEFDIKQVVFVVSNTKDSLEFASARRVEIRTRVTVACEDWVVDH

SEQ ID NO: 55341 - protein, 534 aa, Zea mays
  Coding DNA Sequence Number=SeqID_11966
  Gene Ontology: Mol. function=cytokinin dehydrogenase activity; Cellular component=extracellular region; Biological process =cytokinin metabolic process
  Homolog annotation: Hit_ID=A2WVL5; Match level="QueryCoverage=100%, HitCoverage=100%, E-value=0.0, Identity=78%"; Hit description =Putative uncharacterized protein
  Pfam annotation: Domain name=Cytokin-bind; Domain location=243-522; Score=637.4; E_value=1.3e-188; Accession=PF09265.1; Description =Cytokinin dehydrogenase 1, FAD and cyt
  Pfam annotation: Domain name=FAD_binding_4; Domain location=65-211; Score=77.2; E_value=5.5e-20; Accession=PF01565.14; Description=FAD binding domain
  Pfam module annotation: Pfam domain module=Cytokin-bind::FAD_binding _4; Domain location=243-522::65-211
MTRCLMFMPPLFLVSSLISTVGLPVEPPAELLQLGGDVSGGRLSVDASDIAEASRDFGGLSRAEPMAVFQPRAAGDVAGLVRAAFGSARGFRVSARGHGHSISGQAQAPGGVVVDMGHGGAVARALPVHSPALGGHYVDVWGGELWVDVLNWTLSHGGLAPRSWTDYLYLSVGGTLSNAGISGQAFHHGPQISNVYELDVVTGKGEVVTCSETENPDLFFGVLGGLGQFGIITRARIALERAPQRVRWIRALYSNFTEFTADQERLISLGSRRFDYVEGFVVAAEGLINNWRSSFFSPQNPVKLSSLKHHSGVLYCLEVTKNYDDATAGSVEQDVDALLGELNFIPGTVFTTDLPYVDFLDRVHKAELKLRAKGMWEVPHPWLNLFVPASRIADFDRGVFRGVLGGGTAGAGGPILIYPMNKHRWDPRSSVVTPDEDVFYLVAFLRSALPGAPESLEALARQNRRVLDFCAEAGIGAKQYLPNHKAPGEWAEHFGAARWERFARLKAQFDPRAILAAGQGIFRPPGSPPLVADS

SEQ ID NO: 55342 - protein, 546 aa, Zea mays
  Coding DNA Sequence Number=SeqID_11967
  Gene Ontology: Mol. function=growth factor activity; Cellular component=cellular_component; Biological process=cell proliferation
  Homolog annotation: Hit_ID=A3B5P1; Match level="QueryCoverage=70%, HitCoverage=54%, E-value=1e-116, Identity=49%"; Hit description =Putative uncharacterized protein
  Pfam annotation: Domain name=Jacalin; Domain location=160-300; Score =107.7; E_value=3.5e-29; Accession=PF01419.8; Description=Jacalin -like lectin domain
  Pfam annotation: Domain name=Jacalin; Domain location=357-492; Score =107.8; E_value=3.3e-29; Accession=PF01419.8; Description=Jacalin -like lectin domain
  Pfam module annotation: Pfam domain module=Jacalin::Jacalin; Domain location=160-300::357-492
MAPNLLENDMDLHFDLLSLHFIELVRSKKFTEALDFGQKKLTSFQKVTKYIEKLEDFMALLAYEEPEKSPMFHLLSPEHRQNVAEGLNRAVLAHANLPAYSSLERVVQQATVVRQYLQQEVGKDSYPPFSLKAFLSNTGTSMSMSISIPVRFGPWGGNSGTIFDDGIYTGVRQINLTRGLVGISSMKVLYDRNGQAVWGDKRGVSGGSTRAQKVVFDFPSEILTHITGYFGSTTATMKMKMGPTVIRSLTFHTTRKSHGPFGGDEQHGTFFSSCLADGRIVGFHGRAGWYIDSVGVHVLEGKVLSQQRDDETRCSLALAAREREAGDEVAPATTTTTYGVVKEPVPIGPGPWGGDGGKPWDDGVYTGVRQMYITRTDDFIGSVQMEYDRSGKSVWSTKHGNGGQQQITITHRIKLDYPHEVLTCVYGYYNACVEEGPRVLRSLTLVSSRGRYGPFGDEVGAYFTSATTEGKVVGFHGRCGLYLDAIGVHMQHWLGVGDARTARASAPSKYYISRPGHIDWGLRPGRGLFDRRRGPFEFDDRVWTRS

SEQ ID NO: 55343 - protein, 53 aa, Zea mays
  Coding DNA Sequence Number=SeqID_11968
MVGTSAVTARRQPGSVEHCTMQDVVDGVTWPTTLPPGWQVEWHVAPAGEEHEE

SEQ ID NO: 55344 - protein, 571 aa, Zea mays
  Coding DNA Sequence Number=SeqID_11969
  Gene Ontology: Mol. function=transferase activity, transferring hexosyl groups; Cellular component=Golgi apparatus; Biological process=carbohydrate biosynthetic process
  Homolog annotation: Hit_ID=Q10Q30; Match level="QueryCoverage=41%, HitCoverage=47%, E-value=1e-103, Identity=69%"; Hit description =Glycosyl transferase family 8 protein, expressed
  Pfam annotation: Domain name=Glyco_transf_8; Domain location=338-570; Score=81.0; E_value=4e-21; Accession=PF01501.11; Description=Glycosyl transferase family 8
  Pfam annotation: Domain name=TFIID_30kDa; Domain location=97-136; Score=-8.4; E_value=0.076; Accession=PF03540.4; Description =Transcription initiation factor TFIID
  Pfam module annotation: Pfam domain module=Glyco_transf_8::TFIID _30kDa; Domain location=338-570::97-136
MAHLAHDYFTLPPEDKPPLGPYIDTAPSPASFIPQLVETEEEDEVFHTSPSTCSTMVPNRNATTSMLAMVEATWSDEYALVDLQSVCYYSTSNAKPKLNSLDEVDPKLLKTFIPLTEQKHLSDVAIDAVIDSASITITHHEALMAKGVIFYSIPKSICEYLDLVRHYLSSIILPGDNYYAALNSAVFSDGSFCFVPKDTVCPMEISTYFRINNKETNQFERTLIVADERCTYVLLIELCLQVDGVKVRLPPWPPPIWTFWLPYDVCSDMHYNCRYCAWFKGIWQPLFLVTPFYIRQLKLGWDVFLGKEIGEPQGLKWLAVSSGNMAEKMQKGGARIHCLSLRLTDEYSSNAHARNRLLPPELLFLLSDTKTHSRMHSWIALNSISPAIVEVKGVHQFDWLTRENVSVLEAIESHRGVRNHYHGDHGTVSSASDNPSIIASKLQARSPKYISLLNHLRIYLPELFPNLNKVVFLDDDIVVQLDLSSLWAINLEGKVNEAVETCRREDNWVMCKRFRTYFNFSHPMIAQRLDPDVCDWAYGTNIFDLAVWRKKNIRDTYHLWLNKNLKSGLTV

SEQ ID NO: 55345 - protein, 443 aa, Zea mays
  Coding DNA Sequence Number=SeqID_11970
  Gene Ontology: Mol. function=mannosyl-oligosaccharide 1,2-alpha -mannosidase activity; Cellular component=membrane; Biological process=ER-associated protein catabolic process
  Homolog annotation: Hit_ID=A2ZYB4; Match level="QueryCoverage=86%, HitCoverage=63%, E-value=0.0, Identity=80%"; Hit description =Putative uncharacterized protein
  Pfam annotation: Domain name=Glyco_hydro_47; Domain location=1-269; Score=18.2; E_value=5.3e-16; Accession=PF01532.11; Description =Glycosyl hydrolase family 47
MAAHDPAGGGDSTRPQPSPRQRVEVPDPTVFERVTKKSVRGIWSRRSKLNLVGAHINVFTGEWTQKAYLLFGDEEYLYIFQEAYKAAMHYLHHDPWYVEVNMNSGATVWPLFNSLQAFWPGLQVLAGDVDPAIRTHAAFFSVWKKYGFTPEGFNLATSTVQNGQRSYPLRPELIESTYWLFKATRDYRYLDVGRDILASLQYGARCPCGYCHISDVETHKQDDHMESFFLAETVKYLWLLFDLAAGPDNIVENGPYKYIFSTEGHLLPVTPEIALEDEHCSYFGAFCNGGADHGYGASASSTKHRNGNYTQLDDIQTPSSHYSMSNVLFTPGYIKGVCPGLTHAQKFGISYSDEEDNFIEQTSESLDHHGESAIESSVQDQSSSIILISHPVASQQDEAFESESGSQDHANIVVTSDSDSDSTSRDNTVGSPGMNSEELMDDI

SEQ ID NO: 55346 - protein, 95 aa, Zea mays
  Coding DNA Sequence Number=SeqID_11971
MDGQVTPATMSSREPVKNYATSKAEYTNTQLDLPGNNGSSSLISCEKQTIRIEFLSLQVTALVPTITGMGDHVSGHVRGKVHCQVQSGCGKHYAK

SEQ ID NO: 55347 - protein, 289 aa, Zea mays
  Coding DNA Sequence Number=SeqID_11972
MTSHGSSDKGNALSHTDGLAREGFPRILWEVLQGAGYMTPPQYAMQQFEKHRVPRCRVRMTLEPHPLQPGWRSLDFESFGYRAEDTIEAIALHGLTTFYGFHPLEMSTHPIGLFPAEKEDDPMWKDRVEHAKDIWAIYLGQTAHLTVWCMNALYRLQVMRGEAMSHLMALLEATKITLDNREELVVDLSTYMVKKDLQVEQLSNEIQELEELVGTRENTIEVLEDQLINTQQQLAEANEHLNMHHQEIQDMEANEDVDIEGGEEPASSLDTAGSGRPPSPESSVALFAH

SEQ ID NO: 55348 - protein, 51 aa, Zea mays
  Coding DNA Sequence Number=SeqID_11973
MVSLAVMVGVALQKGCGGGRWGALQRGSGAVVVRMEAGTRARGTACSRLQG

SEQ ID NO: 55349 - protein, 287 aa, Zea mays
  Coding DNA Sequence Number=SeqID_11974
  Homolog annotation: Hit_ID=Q8RVE5; Match level="QueryCoverage=52%, HitCoverage=22%, E-value=2e-48, Identity=65%"; Hit description =Pentatricopeptide (PPR) repeat-containing protein-like
  Subcellular localization annotation: CTP_CleavageSite=68; ConfidenceScore=5.03e-01
MSGDHAKKEMVTGEKPATSHGKAPSGESGNKMGWGSAARLDNPNRPNPMSLSRSQRRPRVPNPEALSLCSRSGGGAAVFSLPSLPSGLRPSLLVGRARRRRPARQSISCSPASPCSPVALLFSAFVEACKLVVEEKSPAEAAAMRPDRAACNSVLSGCYRGLGSLADAERVLETMSAVGVSPDVESFGCLAFLYAWRGVPSRVDELDTLFDALGFSKKGFFKNLVSGYLKSGDFESVSPIILRAVKERRVGDDNGLDEETYTEVARCFVDRARIRDDNEFCCLNICK

SEQ ID NO: 55350 - protein, 143 aa, Zea mays
  Coding DNA Sequence Number=SeqID_11975
  Gene Ontology: Mol. function=aspartic-type endopeptidase activity; Biological process=RNA-dependent DNA replication
  Homolog annotation: Hit_ID=A2Y2J4; Match level="QueryCoverage=100%, HitCoverage=29%, E-value=9e-12, Identity=35%"; Hit description =Putative uncharacterized protein
MDPNVEIEECVTLIQFNELKQSIEAKQDLLAQDLQTLMAEIRGRRRLPDGVRNHDEDGEEDEGNYSRRASEHGRRNQGAAYGRGRGRNRRNNDNEEYEFGDDQSQHRYGRRHHRGVNQEERFGKLKFTMPKFDGRSDPEDYFT

SEQ ID NO: 55351 - protein, 57 aa, Zea mays
  Coding DNA Sequence Number=SeqID_11976
MAEIAERSEESRPPHGEERVSSDTMKERVRHTKPSYRGALSVGVLTEYFQLWDLIVA

SEQ ID NO: 55352 - protein, 167 aa, Zea mays
  Coding DNA Sequence Number=SeqID_11977
  Homolog annotation: Hit_ID=Q10BD2; Match level="QueryCoverage=20%, HitCoverage=11%, E-value=5e-07, Identity=74%"; Hit description =Armadillo/beta-catenin-like repeat family protein, expressed
  Subcellular localization annotation: CTP_CleavageSite=21; ConfidenceScore=5.36e-01
MAFDFTPRATPPHRVGTLPVFVSSRWCSSLPRGLLPPHGVDLDRRRLKPPRLATATPPAVWIRSWGGRPATARSNGGADLAVFEQFERTIQSVARYVSIHNGLSIVYAWSQGVNHAIIRHANKTSYNCFPAIIRHNQPEVWAFCLGNGYAGLKDALGSNDSRLQRIC

SEQ ID NO: 55353 - protein, 221 aa, Zea mays
  Coding DNA Sequence Number=SeqID_11978
  Gene Ontology: Mol. function=sequence-specific DNA binding; Cellular component=nucleus; Biological process=regulation of transcription, DNA-dependent
  Homolog annotation: Hit_ID=P0C5B1; Match level="QueryCoverage=63%, HitCoverage=57%, E-value=9e-34, Identity=54%"; Hit description=MADS -box transcription factor 14
  Pfam annotation: Domain name=K-box; Domain location=63-150; Score =98.8; E_value=1.7e-26; Accession=PF01486.8; Description=K-box region
MKETTLFGHAGGLHTQISTSAGGSKSIDETWWLDAQAACWCSDELINKCSFRTARLTRKPRAAACRRTTACSCDDGHGVALEAIARHLMGEDLETLNLKELQQLEQQLESSLKHIRTRKNQLMLESISELQRKEKSLQEENKVLQKELAEKQKAQRKQVQWGQTQQQTSSSSSCFVIREAAPTTNISIFPVAAGGRLVEGAAAQPQARVGLPPWMLSHLSS

SEQ ID NO: 55354 - protein, 101 aa, Zea mays
  Coding DNA Sequence Number=SeqID_11979
MLDNLADHLKGKIGCGVNYIADEAHARYVQEKLATVELMEEKDDDTSRLCELIALAEVGLHGEEEDDTSRLSEVIALAEAGLHAQEEEDECWGPSSPPKVL

SEQ ID NO: 55355 - protein, 47 aa, Zea mays
  Coding DNA Sequence Number=SeqID_11980
MLLVQVAMRLMVLGIDYGAGCQHCNHCSGEDEAVEGDFQEFQDYDEF

SEQ ID NO: 55356 - protein, 132 aa, Zea mays
  Coding DNA Sequence Number=SeqID_11981
AVKASFGRHNPRGCHPSVFPEQEQGGGPCGFRNDDPDSSAFGIPQVAGDTQPELRLFPEADADLKGFFYENLFGSEDKCPDDLKDICKDLIQISAGQICKSTLGGGARSQFRELSFPLRLISTTSSLDPFDA

SEQ ID NO: 55357 - protein, 147 aa, Zea mays
  Coding DNA Sequence Number=SeqID_11982
MTDTGLILGEPSSYLLFTIFFSLTLSFSLLFPLEDSIKEYYYHTLEETKDYEPCTTVFNPRITKHCDLRGEGVENEVACDLAEEILSGDTRQQVRQGEGAVLPAMMAAVGALQRGRGAMVVRMEADTRARGTEKTFLKKKENTQAQQ

SEQ ID NO: 55358 - protein, 126 aa, Zea mays
  Coding DNA Sequence Number=SeqID_11983
MCGSPLGMVRVGRSTCAGGGARQRRGVRPIQGTITNQMGQRASPGIKEGGRPKSGEGDLGFPLKFCRVRELGKLYKLMAKLTERLARLGSDWRGVATVAEALVAMAGGKSSPELRRGVWPAKMGTG

SEQ ID NO: 55359 - protein, 177 aa, Zea mays
  Coding DNA Sequence Number=SeqID_11984
  Gene Ontology: Mol. function=protein-tyrosine kinase activity; Biological process=protein amino acid phosphorylation
  Homolog annotation: Hit_ID=A3AA52; Match level="QueryCoverage=97%, HitCoverage=29%, E-value=3e-72, Identity=76%"; Hit description =Putative uncharacterized protein
  Pfam annotation: Domain name=LysM; Domain location=92-138; Score =11.9; E_value=0.036; Accession=PF01476.11; Description=LysM domain
MATAAPASVEGFDCTANRMYPCQAYALYRASFAGVSLDLAAIGDLFAVSRFMVVHANNLSTTATPANGQPLLVPLQCGCPSRSPSSYAPMQYQIDPGDTYWIVSTTKLQNLTQYQAVERVNPTLVPTDLDVGTMVTFPVFCQCPATADNATTLVTYVSSPGTLVDIAVTAERCDFSR

SEQ ID NO: 55360 - protein, 718 aa, Zea mays
  Coding DNA Sequence Number=SeqID_11985
  Gene Ontology: Mol. function=ATP-dependent helicase activity; Cellular component=nucleus; Biological process=mRNA processing
  Homolog annotation: Hit_ID=Q5QLQ8; Match level="QueryCoverage=17%, HitCoverage=42%, E-value=5e-47, Identity=78%"; Hit description =Cytochrome B561-like
MEKKTPVDRRTREYGELYTSLPVSVSLSRRKPSAPAILGVGDGLPSTTARRTPRPPPHEHNLNRSATYARTTCTTPRGEDGWKSHGHQHDEAIAVEEGKNPCSELETHIDIGDKVLTEFITELGRDSTTVLEFDAKLKEKGADFPDYFVRTLLTIIHAILQPTASNPSSATIVEGPAGAESAKFPGLARPDDPDHARNLRLELERDADAAPPAPMRDDRDRRWDGRAETGTTAAAAVSMIKTGGTTIRIETNSMNAIGGSCFIQLFLLMLDCETLYINVFILIPLQRIARRVAAQLISGMHCKIYRDTVLGELNRHEPVPVFLKDTSSNGTFINWKRPRKIHPRSSLIMATLYHYHHLLMTPCVNYLEVLWFISRIRYSSEYWNKDIPELASVEEENAPVEEPVLVPHVTEVVSPPKTEVADTGDLLGLNDPNPAVSAIEESNALALAIVPTASHSHKSFFHAFELDKLELKAVKDGSASYAALEKKAELYEKLSRGKVPDEEDKEKYYVDFFQKGFDRVYEPQIPECSHRATDGAEPVNDHEDSMPNAKPLGLGQAGTTIDRDEHKRFVREVHEEVTEARQKASKRSSLVGGWKRQASCFSPQQARTFVLERHRRSVKVDRRGDDKKYLGKVLARGVECDLALLSVENEEFWRGTEALHFGRLPCLQDDDDTDIIGCCTLKVDNVTCKDSIRYFNIVEIEELVYKAIKGFCAGISLI

SEQ ID NO: 55361 - protein, 676 aa, Zea mays
  Coding DNA Sequence Number=SeqID_11986
  Homolog annotation: Hit_ID=Q6BTJ4; Match level="QueryCoverage=31%, HitCoverage=27%, E-value=5e-12, Identity=32%"; Hit description =Similar to CA1621|CaIFF6 Candida albicans CaIFF6 unknown function
MNKTPALKVPLQTELWFHPCRADAAAIRPSPTPSLERQGQAEGRRVGGQTVGGTSYLVGGETSFGCRGGRRRRKRLRSRLGQRAGHAAAASATNGERPSPRSLREGAGRRPCRDWPQLGALPSPALMMNILEAEGGAEAAARLASPHPGAGGHRLGRITLLLKVTLPTCVPSHRGLSLLQHAPRSSPYDTGAGSHASCKLAQGRRSQTASRGACNCPAVTSIPPLSPQPAGERADSHAVGMQPRQVGAPLRLQRAQHGGLGPHVIQPAPRLLRASNCTAHSRHYRASSTVEPVPRLEATLRMTQQCQPGASVTGQSAAGEGATIDAAKNGPAVMAVAGGQKQRSRRQLSSRPLVGQRENPLPLREDDAPVFRSSNGPRTRNGCPANHSPRRINSTAGQAGPGKGDTPKGILLREGNGPQAPLLIRGSKAGPSEGFNSRLRALGLLAHYWLAHEGFIAASDTERGMTLAAKSGFRRHRKLRIARPQGSDSGSAPEDDELRFARPQGSDSGSAPEDDELRFARPQGSDSGSAPEDDELRFARPQGSDSGSAPEDDELRFAQPQGSDSGSAPEDDELHFARPQGSDSGSAPVDDELCFARPQGSDSALASADGLRLARPRGSDSTSALEDRLDLDLGGASTSPNPGLGPTTSQEAPSLPYPKLTQATGNKTGVPSDSLR

SEQ ID NO: 55362 - protein, 63 aa, Zea mays
  Coding DNA Sequence Number=SeqID_11987
  Gene Ontology: Mol. function=binding
  Homolog annotation: Hit_ID=Q6Z901; Match level="QueryCoverage=58%, HitCoverage=6%, E-value=1e-12, Identity=83%"; Hit description =Kinesin light chain-like protein
MGEEWSLAAFSGWMPLGNTHAMLGRMDDSVACYGKGLQGTQSELYAPLNAVLLLELHHKAGGD

SEQ ID NO: 55363 - protein, 88 aa, Zea mays
  Coding DNA Sequence Number=SeqID_11988
  Homolog annotation: Hit_ID=A2YN66; Match level="QueryCoverage=67%, HitCoverage=11%, E-value=2e-08, Identity=52%"; Hit description =Putative uncharacterized protein
MWVSPQLAIPPVKIFRSEEEKGRALKLNKERRLAQLNFLKRFLGKGFLKHAQENGLLQDIIDIKVDKIQTLSSTNKNKFYGTTFCVTN

SEQ ID NO: 55364 - protein, 140 aa, Zea mays
  Coding DNA Sequence Number=SeqID_11989
  Gene Ontology: Mol. function=aminoacyl-tRNA ligase activity
  Homolog annotation: Hit_ID=A2ZFS2; Match level="QueryCoverage=50%, HitCoverage=27%, E-value=1e-12, Identity=60%"; Hit description =Putative uncharacterized protein
  Subcellular localization annotation: CTP_CleavageSite=46; ConfidenceScore=5.13e-01
MESSCYSVNLSFVISTKSYVSFATWSHELVQQTCPLMLKVFTRMIVGQSLPGTTSETLLQGLKLGLYSYARKGIVVDRLVGFQDLKSKEDFLTRALEHILILKMKGIIDEKKKDDDDDDEESDAKNRRVRSSTAQDTDSD

SEQ ID NO: 55365 - protein, 92 aa, Zea mays
  Coding DNA Sequence Number=SeqID_11990
MTLIIVAHRRAGGEGGGGGAVVAGDGPIQGFLRLLITKVAAGAAAALVGLMVMALTLYGAKLLDSNVLYIHSLYSSFTIFSKRFHPLYFFPL

SEQ ID NO: 55366 - protein, 457 aa, Zea mays
  Coding DNA Sequence Number=SeqID_11991
  Gene Ontology: Mol. function=protein binding; Cellular component =nucleus; Biological process=ribosome biogenesis and assembly
  Homolog annotation: Hit_ID=A2Y8T6; Match level="QueryCoverage=68%, HitCoverage=48%, E-value=1e-129, Identity=71%"; Hit description =Putative uncharacterized protein
  Pfam annotation: Domain name=GRP; Domain location=363-456; Score= -29.6; E_value=0.085; Accession=PF07172.2; Description=Glycine rich protein family
  Pfam annotation: Domain name=NUC153; Domain location=237-266; Score =64.8; E_value=3e-16; Accession=PF08159.3; Description=NUC153 domain
  Pfam module annotation: Pfam domain module=GRP::NUC153; Domain location=363-456::237-266
MSSPLRVKDHMYGSPILNIKWHQTLNSTEPKLITADKHIVRIWDPNTGNNMTSIEPDGGAINDVCVFRNSGLVLLALDNSQIPAHFIPALGPAPKWCSHLDNLTEEMEEKPDTTLFDEYKFLTKEEMERLNLTQYIGSSAVRAYLHGFIVRYELYKKQRAAVAPVEYETIKDEIKKKKLEAQRKSRITQVVKIPKVNRQIMDSIREDEIDLDMENVDKSSIKKKKRKLELNKAILDDDRFKEMFENKDFEIDEESKEYLALHPQAATKEPRLIEEHFDSVSEDDQQSDGNTSDTLAESDSDDVMHNSKRIRLYEVKDEHHAEAFLNSVSLSNEDAAPLEDRIAALERKQNSKALDAVKYGPGGSREISFFSKSRRRHKEESSSDDEPKGVKKRAVQPLGLKQGKAEFYMFGGNRGRGRGGSGRGRSGRGRGGGGGGGGRGGGRGGGGRGGGRGRGRG

SEQ ID NO: 55367 - protein, 201 aa, Zea mays
  Coding DNA Sequence Number=SeqID_11992
MRRPLATQGTTPDPTVWADQRAPRGKERQHISVSLDSHRVTPDPYAYKSGAPGGQNPSRVPERGELWYEQGSGADTQCQGNPEGGMPAGSAGEQYGRAKHHTGGCTPPPGWGFPLRHLARQVGARLRVFAGFLAQHDGADHRAPRRNFGGFRDGARGCILRATSGRPPELWDCCRTRRAAAHTSAGVPDSVEGSAYGAVYG

SEQ ID NO: 55368 - protein, 312 aa, Zea mays
  Coding DNA Sequence Number=SeqID_11993
  Gene Ontology: Mol. function=protein binding; Cellular component =nucleus; Biological process=ribosome biogenesis and assembly
  Homolog annotation: Hit_ID=A7QJJ2; Match level="QueryCoverage=69%, HitCoverage=35%, E-value=7e-80, Identity=62%"; Hit description =Chromosome chr8 scaffold_106, whole genome shotgun sequence
MAASHGAGSLKSTSINGVKLYSLTGGRYVAPWVVAKKKRALRKDKEYQRRLDLIHDLRFETATTKIKLTPDDQYLIASGIYPPQVKVYELKELSMKFERHMISEIVDFQILGDDYSKLAFLCADRSVNLHAKYGSHYSLRIPKGRFLASLSSESPAINAVTRSKIHGLVACGGEDGAVECFDMRKKTSVGRINIPAVSSEDYSQEVTSLQFDEDQGYFMAVGTSTGKPSPSGSALRARRPPPGVPARQAARPQRRCRDLPLRAWSPPPGALRARPRRQPTKRRPGLRAAVQPLRARPRPEPADRAPPRDPRR

SEQ ID NO: 55369 - protein, 721 aa, Zea mays
  Coding DNA Sequence Number=SeqID_11994
  Gene Ontology: Mol. function=binding; Cellular component=nucleus; Biological process=activation of protein kinase C
  Homolog annotation: Hit_ID=Q5Z8I7; Match level="QueryCoverage=74%, HitCoverage=82%, E-value=0.0, Identity=76%"; Hit description =Selenium-binding protein-like
  Pfam annotation: Domain name=PPR; Domain location=251-285; Score =16.9; E_value=0.078; Accession=PF01535.11; Description=PPR repeat
  Pfam annotation: Domain name=PPR; Domain location=313-347; Score =31.6; E_value=2.9e-06; Accession=PF01535.11; Description=PPR repeat
  Pfam annotation: Domain name=PPR; Domain location=348-382; Score=6.7; E_value=1.3; Accession=PF01535.11; Description=PPR repeat
  Pfam annotation: Domain name=PPR; Domain location=414-448; Score =21.7; E_value=0.0027; Accession=PF01535.11; Description=PPR repeat
  Pfam annotation: Domain name=PPR; Domain location=450-484; Score =11.4; E_value=0.35; Accession=PF01535.11; Description=PPR repeat
  Pfam annotation: Domain name=PPR; Domain location=486-520; Score=6.3; E_value=1.4; Accession=PF01535.11; Description=PPR repeat
  Pfam annotation: Domain name=PPR; Domain location=552-586; Score=9.9; E_value=0.53; Accession=PF01535.11; Description=PPR repeat
  Pfam module annotation: Pfam domain module=PPR::PPR::PPR::PPR::PPR::PP R::PPR; Domain location=251-285::313-347::348-382::414-448::450 -484::486-520::552-586
SPETADGPDVHSPEDDFPSLARRGRDCDKLPISKQNPPRPRAATPTLVCLHGAAPCLMHGAAMTPPHRRMVHLAPRHGHPPAQLPAPQLPPTDLPLSLLPPPSLASLLLAAVASSPSFPHLRHLHGLLVRLHLPPPFNPFLLSRLLRRLAALPRPPLGAPLRYAVAVFSSLSPPDPFLAAALLRFAHLTQPPLETFRLFSRLRCAHGSDLPFLPFAFSPLAKSAAAARSLHAAASAHAVSLLLGGFDKHRFVENSLISAYVACGDVGAARKVFDEMLVKDVISWTSIVVAYSRIRDMGSAEEVFALCPVKDMVAWTAMVTGYAQNAMPVKALEAFEQMAVAGMPIDEVSLTGAISACAQLGAVKRAAWVQEIAERNGLGRNVVVGSGLVDMYAKCGLIDEARKVFEGMHDKNVYTYSSMIVGLASHGRANDVIALFNDMVRRADVEPNHVTFIGVLTACSHAGMVKEGRYYFAQMKDRYGILPSADHYACMVDLLARSGLVTEALDLVKSMTVEPHGGVWGALLGACRIHGNTEVAKIAAEHLFRLEPEGIGNYVLLSNTLASAGEWDEVSKLRKLMRIRGLKKDPAVSWFEGRDGFVHQFFAGDNTHPSMHEIKKRLLELREKLNLAGYVPILSSVVYNVSEEEKERLLMGHSEKLALSFGLLTLESRSSIRIVKNLRICEDCHLFIRLVSKVEPIEILVRDNMRFHHFRDGECSCGGFW

SEQ ID NO: 55370 - protein, 86 aa, Zea mays
  Coding DNA Sequence Number=SeqID_11995
MEHRPGLERLLETAHLELDGKLFVNTQQAPTWRANCRRFETGGSLSRRVNVAACPSPDGSTRKERIQVYNGGVAECYASSGGELAP

SEQ ID NO: 55371 - protein, 383 aa, Zea mays
  Coding DNA Sequence Number=SeqID_11996
  Homolog annotation: Hit_ID=A3P9E4; Match level="QueryCoverage=45%, HitCoverage=49%, E-value=2e-07, Identity=30%"; Hit description =Putative uncharacterized protein
MGAPDSPVRLPRHPIVRVRQLELGQPGPPDSLVVHRTVTVHCPIFLLVCVEPLAPVELIIWSKLVSPIICVGQFNHQNHLGKGSDAGQLAVVSAPVAAAPVAKAKGASQDPWSKFCASGEITSAAAVKDVAGSVAQQLKHSVAFADHFASGALTSEFAAERQRLEGRIERLRAQHTEVVWDKSLAENKSRRLMEKLAAAEVEKEDLSRQLAAERKDANRACTEAQAAQSEAKLARAEASLARQCAEEAETSHSSLRDRLDKAEASTRAEVDRTHAQLVDAYQELGARTAPFDTSRKEVGLHFLGWLQEELEVLPTIVTGLMYFASLITYEGAVNALSREGCEHFEVFDRSDEDFERGIFQVEDPVLKRSIGALYDRMWDPHGC

SEQ ID NO: 55372 - protein, 374 aa, Zea mays
  Coding DNA Sequence Number=SeqID_11997
  Homolog annotation: Hit_ID=Q7XBD4; Match level="QueryCoverage=71%, HitCoverage=27%, E-value=5e-09, Identity=24%"; Hit description =Cinful1 polyprotein
MAKYVWAVTSYGGQPSMEVFAKNYCLHWQKREIGNKIAQFGSCTFTPRTGKTSAGVVEIVPYARNKWGNWWDYWFYVSGGEVKDLPGLPTAIMCSHCYVAFLPFEVAEDDEDEGALRYAARMSSGHDLVEEFIGYGVWPLAHGWVLGEVCPRQMPTLGEQLVRSPTFALDLRGRNPSAFVREVEDEAVRIVGRYVPRTETLQSWDIRGSNVRLNRVFELNRLPYGGYPGDTAVATVDRRGKKAAAAVEEGPSRGAVPAVATKKRKLDTAAEGLRVSDRFVVDLMRTCASPRGRMSSPELRESSARMLEVTRGRWPRNVPIPRMAGEDMFMSRLSREMKIFPYGRNIVVVVSIVMDKDRQDATRKRRAFTRVGGP

SEQ ID NO: 55373 - protein, 1040 aa, Zea mays
  Coding DNA Sequence Number=SeqID_11998
MGLRVGRGRETERPRRRPSSCSVLDEGWTFGLRWFGEIGEGIERRVASSPSPQHLPSEGPVRLSHLVPKASLDGGDAALARSGSAGVFDVTVDGRGTVGLRQNHSLLLKPTARLPSLLLLIGDLARVKQTARRRRRYVAMSSSSSSAADTPPVSALSEDTLSNVVAEELHPGDTVEFGVSRMSLIHVHDMQQLGYFDGGVARVPGAEEVPEPEGELVVFEAFFAAGLRLPAHRFVAEVLRRFEMPSRGGMLVRSPAFALDLHGRDPAAFVREVEDGAARIVGRYVPKTEGLWSWDIRGSNDRLNRVFELNRLPYGCYPGEDVADRCGKKPMGGTEEGPSQETAPAPKKRKLGTIVGGKRVSDNFAVELMGTCAAPGGRMSSPELRESSARMLEVTGGRWPKNLPIPWAEGEDMSTSRIARGLRIFPYGRNIAAVVSAVMNKDRQDAAQKRRAVVRILDPKREAKRARGSAKAAAPGGSQPTLAAKPAALGSSKVPESTKTVVAGGTKSTSGGATKVRELPSPGRRVADFDTNISVDDCFVGSGEGQMVVVPPAVATTASTAVVGVKGDAFCASDEISSTAAVKDEAGTMSCRLREASQQLLQQLSQHADAVREKSVAESKNRRLAEKAEAKLARAEGSLTSQRAEEWEVRFNALRGRVDKAEASTRSEVERTRAQLVDSYRELGAWTADFEVPDREAGLRFLEWLQEELLVLPTIMEGFMSFASLVTCEGAMNALSREGCKHYEVFDRSHENFELEIFKVKDPMVKDSAGALFDRMWGPHGREAVRERSDRAREQMARAEDVKDLGDLNDVWAEAEVNPVLPEAEVDPALRSEAVEGASAGPVSTVSGEGSLPAPASMVEDPPKAVAELAAEDPMATVGPSQVQDFGPAHATATDTANFVATSTVVAENELDDFVSKFFESDDSGGSVVWTEESSDEDLDYFAALDVAVVEASPRVMDAEVFPGPSAGRRRRRAVAKRRVSEVEGGCLRVDRAGKRELLSLPVGASVGEGELRSLFEGEELRIMMFNYREMGIILKVEPM

SEQ ID NO: 55374 - protein, 308 aa, Zea mays
  Coding DNA Sequence Number=SeqID_11999
  Homolog annotation: Hit_ID=A2YGJ0; Match level="QueryCoverage=77%, HitCoverage=67%, E-value=4e-69, Identity=56%"; Hit description =Putative uncharacterized protein
  Subcellular localization annotation: CTP_CleavageSite=80; ConfidenceScore=5.16e-01
MPHAAATAAAALPRASLLVISAPLRDSLAAAPYEPPAGASASVKSLLASLLPSPSPPQPQLQEPAGKESGDLLLFCAAVLAASPEYPALHWVPASLVGAAAAAVNELAAAGGWGSVGDMVVAVAPEVVPPLKAVVKDSCVDADSDEIGAVKPPKEHAAVAAHQFRWLVSQVSYPKLGDLCSLVIPCALTTLDHWSPEVKVQGMVSFVHIAKNVKATELSLYEDAILDACCQNIPADDELWYQVIESVVIKSVIPSLHVPNRRAAYLIGIRSLPRIGLRLYECEGTGRGRKRPRVCFGAVDAGRRERGR

SEQ ID NO: 55375 - protein, 401 aa, Zea mays
  Coding DNA Sequence Number=SeqID_12000
  Gene Ontology: Mol. function=hydrolase activity, acting on ester bonds; Cellular component=extracellular region; Biological process =lipid metabolic process
  Homolog annotation: Hit_ID=A2YGJ1; Match level="QueryCoverage=94%, HitCoverage=95%, E-value=1e-153, Identity=72%"; Hit description =Putative uncharacterized protein
  Pfam annotation: Domain name=Lipase_GDSL; Domain location=40-381; Score=189.5; E_value=8.2e-54; Accession=PF00657.13; Description=GDSL- like LipaseAcylhydrolase
MASSSVSAALLLAVSLAALHLCCRHGHGAGDAAGNGITAIYSLGDSITDTGNLVKEAPPGMFETIKHLPYGVTFGYPTGRCSDGLLMIDFLAQDLGLPFLNPYLGKNKSFDHGVNFAVAGATAVDPADQFNLPAVPVPFASKSLKVQLRWFKDFLKYTFGTDEGKHFTLPFLLSINQNQIRRRLQASLVLVGEIGGNDYNYAFFQAKPVAEVEKLIPGVVKTIVGAAKEVLDMGATRVIVPGNFPIGCVPGYLAMNAASSEPADYDSAGCLRELNDFAAKHNSRLRRAVADLQASYPGAAVAYADYFDSFLTLLHNASSFGFDAASTRKACCGAGAGEYNFDWRRMCGFPGTAACADPSTYLSWDGIHMTQAAYRAMSRLIYHGKYLQPQILSFPEKNGQT

SEQ ID NO: 55376 - protein, 37 aa, Zea mays
  Coding DNA Sequence Number=SeqID_12001
MASPSLALNHDEQATEDPEVQQVEVAEQELVEGKLCP

SEQ ID NO: 55377 - protein, 124 aa, Zea mays
  Coding DNA Sequence Number=SeqID_12002
MGKNNKRKREPTPPSEEFGDSEYSEEEFSSESEGSPAPSPCIRAVERSGLEGSDESEYSSDEEDSDGSGEDEDDDDGDGSGRGGSARQQGRRRQRQGRRRRRQQGQQPGWQQQGQHQGRQRRRQ

SEQ ID NO: 55378 - protein, 253 aa, Zea mays
  Coding DNA Sequence Number=SeqID_12003
MTTMIKGEMQMIKTRRMKNQGRRTQESTKRSNEITPSTPSSATSIRGVEEALQDSDWVVAMQEELNNFTRNEDAKPIKTPMGTNGHLDLDTEDEHLHVFDVFCARQSTPVPELACPASCQSPAGAVARARAYKAPRDFDRTPPHTLDLTGARNHRRLPRARRTRGHLSPYHRRPASRASPNPVQPSEKTVPASVKLPEQGIGVCFAGGASPRFPDFARPPVNIDRVILCSILRFLVHIASTPPREAHRAIGLN

SEQ ID NO: 55379 - protein, 80 aa, Zea mays
  Coding DNA Sequence Number=SeqID_12004
MDKIFSTKMISMNNPPRQTGPSLEVASRLYVEDKKIDKHKCFVLTITRGRGMRLQVEASGFPRKTNMAFVGRQVRLAAYD

SEQ ID NO: 55380 - protein, 123 aa, Zea mays
  Coding DNA Sequence Number=SeqID_12005
MTSHGSSDEGNAQSHTDGLAREGFPCILWEVLQGAGYTTPPHCPLTPIGLFPAEKEDEPMWKDRVEHAQGYMGYLPRLDCSLDGAVHECPVSSARDARRGNVSSDGIVGGYQDHFGEQGRNFW

SEQ ID NO: 55381 - protein, 278 aa, Zea mays
  Coding DNA Sequence Number=SeqID_12006
  Gene Ontology: Mol. function=nucleotide binding; Cellular component =microtubule; Biological process=embryonic development
  Homolog annotation: Hit_ID=Q69ST5; Match level="QueryCoverage=97%, HitCoverage=92%, E-value=1e-132, Identity=83%"; Hit description =Putative purine nucleotide binding protein
  Pfam annotation: Domain name=ATP_bind_1; Domain location=7-246; Score= 286.4; E_value=5.7e-83; Accession=PF03029.8; Description=Conserved hypothetical ATP binding pr
MVFGQVVIGPPGSGKTTYCNGMSQFLSLLGRYECAINIEDLIKLSDVMSEHSLGPNGGLVYCMDYLEKNIDWLEEKLKPFIEDHYLLFDFPGQVELFFLHSNARSVINKLIKKMDLRLTAVHLIDAHLCCDPGKYVSALLLSLSTMLHLELPHINVLSKIDLIENYGNLAFNLDFYTDVQDLSYLQYHLEQDPRSAKYSEPANRKLTKELCDVIDDFGLVNFSTLDIQDKESVGNLVKLIDKSNGYIFSSIDSSAVEFSKIAAAPLDWDYYRYPILVL

SEQ ID NO: 55382 - protein, 58 aa, Zea mays
  Coding DNA Sequence Number=SeqID_12007
MGRGSEDIREPSKSASGVIFQSGNRRSAKGSTLRRDRERGIPRKGSFSVKETGSEPPY

SEQ ID NO: 55383 - protein, 158 aa, Zea mays
  Coding DNA Sequence Number=SeqID_12008
MPGKANCCCPARVQHSVLCLGAGGQLHQGSHNTSYAARAILVDAAVGAEVVAAGESFSVDEIVGAICAPGLWLFGFNIWFSSLEWGREREPSSGSIRPGTITVAAEVAGESSGVRRPTGPPMWGLKPRLLCDEPEPKAAVSAWTEVELAREETSSAQE

SEQ ID NO: 55384 - protein, 629 aa, Zea mays
  Coding DNA Sequence Number=SeqID_12009
  Homolog annotation: Hit_ID=Q6QP51; Match level="QueryCoverage=41%, HitCoverage=87%, E-value=3e-18, Identity=33%"; Hit description =Putative growth-regulating factor 1
MQAACNCTKGMHLFDFDASSVVAQAHTSCNWRDSYYVRKTAPPLTPMPRLLDCGTGAAIRGNPAHGPTVPAEHVGHGDRERGYSERDPSLRRKRAPSPPTDQGFEGWPLERVRQPPLSTRAPRPLLIRGSKAGPSEGFDSRLRALRLRAHYKSEVQRLAPRKGSTVASGHSGSAPTTDQGFEGWPPEGFDSRLRTCRARDDSGYVRYMAEAWATFLRSRLRPLKGRDLALARAQPRTGTVDPGGFTPRPRASSSNGRSFNSPGAQLGQENIAACPTPTSVPPARVRLTAPKSSLGRHRKLRLARPQGSDSTSTSEDGLRLARPQGSDSTLTSEDGLRIARPQGSDSTSTSEDGLCLARPQGSDSASTLEESPPRPTSGSDRPHRRGGLGPDPLLRAYRLASRAHRPVVLPRAENSRVGVVTLAGGTAASGQLLPIRALGRNRNRRLPRGRGLPGASLRDHFPDSLCVLGSLHVVAARWDPRQAASAPPSRRPPAAQAHSPLPSRQATSAPPSPSRRLPAAQAHSPLALPRSHGPARPELRARPAASRVPVGRPRAAPCAPVPSVVPEARAAPAPSPRPELRLRHPRGPSCAPATSPSYACPSPSCVVHRSAARCPAPAPELCCCASELV

SEQ ID NO: 55385 - protein, 617 aa, Zea mays
  Coding DNA Sequence Number=SeqID_12010
  Homolog annotation: Hit_ID=Q75HB0; Match level="QueryCoverage=25%, HitCoverage=43%, E-value=2e-70, Identity=85%"; Hit description =Expressed protein
MGWAVAETAGAEGRRRPAWGGALPRQAKAWGGAETAGAGKPCAATPRNACDGARERWRRRRRWEKRAGGRRREGKERGKNVRIPTAILAGIVALPPPYEPPPRRRPHYRQAPAHHKPRTPQPSSATEPPFSPVAPHPRKRSTPTATVNPVDTAAAYIRQTTKRVERLKERKRELVASARASSSSHGSRSRSSSVGAAEVERTAERGASFHCSVHAVEEADGEVQNAHFSIVSARAIYTIHALTRASCVHTPSVLACSCPRPCLRSHAPARPRASCLRPARRARTPPARSCLERVPAVSHAPQSCTRNNQARGSPRSSFPRTRLHSGHPQWIPHFPSLVLLITNAVLAVAHTIVVAAVEQSRFLIPGWVSFGSRSIVQQQHGNYVIARRSIQFISTTKNTEFENCREMQFAAMKRGDLLELCRQHGFATRGSKFVLTCALLNLKCNVLILYITLPFMQLNAMSSFSAGHGRRPKKKVYHREPGLDRAMDLQKKPALLLCLCDLILAQKTGSLLVRDLEKEVGFVQKWNFLSLIERHPNIFHVSGGSASQEPISVTLTEKARKISSEEAEARELMEPILVRNLRKLLMMSMDCQIPLDKIELIQSELGLPNNFKRNLIP

SEQ ID NO: 55386 - protein, 44 aa, Zea mays
  Coding DNA Sequence Number=SeqID_12011
MALDARTSSRSSRGTLINRAMRKTSQVDPKRGLLRMVMLMDEPA

SEQ ID NO: 55387 - protein, 152 aa, Zea mays
  Coding DNA Sequence Number=SeqID_12012
MGGEGEGEWGSGHKWPRARWGESHARRGRGEGGREQLGGGYAGTTGLTSRARNTEREKKAGAGAREAGLTGWAHGQRESEGAGARGKAAAPTGGAGRAVREGGGYAEGDRADRPGPLRRERRGERRARGNGPAGPKGRGGGWVGPLCLFLLF

SEQ ID NO: 55388 - protein, 78 aa, Zea mays
  Coding DNA Sequence Number=SeqID_12013
MDRSHHYTLAAATVDPGPRRVSVAAEESPEPALRPHQWSPRALPDLPDHSDCPRAPPVARAPRLRRALRRGDERRRPS

SEQ ID NO: 55389 - protein, 150 aa, Zea mays
  Coding DNA Sequence Number=SeqID_12014
MSDDLVVPVHFEVGQELCFRLLDHPLLVLLELELLVSRQAESPKSMLTPFWRRQLLKRTSGGALCTGADGPRAGAGRSAAWCEEAVLSGQGRTVRGLGPDGPRPGAGARVPCLTAGRSAPWGRTVRAYAGAAEDRRRRLDLAPGRDPVGE

SEQ ID NO: 55390 - protein, 251 aa, Zea mays
  Coding DNA Sequence Number=SeqID_12015
MEPGGGTAVGAVESLLDVLLLPGHRLMPGRSPSPGVGRSGVHRLLGLSPSPSPGSGEAEIVVFWDLARVRALGRVEFAVFRDLARVRALGRAEFVVFRYLARVRALGRAEFAVFRDLAQVRALGWAEFAVFRDLARVRALGRAEFAVFRDLARVRALGRAEFVVFRDLARVRALGRAEFAVFRDLARVRAPGRAKRSFLWCLRPGLTACQPHSVEWHRSRNGAGGAVFLSGRSVERRSDGGHFGSGGRASG

SEQ ID NO: 55391 - protein, 221 aa, Zea mays
  Coding DNA Sequence Number=SeqID_12016
  Homolog annotation: Hit_ID=Q2QSH6; Match level="QueryCoverage=15%, HitCoverage=3%, E-value=9e-08, Identity=88%"; Hit description=E3 ubiquitin protein ligase UPL1, putative, expressed
MKELRLYENSEKALLSSTSANGTAILRVVQALSSLRRGAVVEQLCTASHDDGEHHVDPLLPSAFQPQEPHFHLPSSSVEDPTATMGKQICVLEQHFRRGGGRGGSEGTRGAVLREEEGGLAAVWGGRGRGEGRGAMDRGTAGNVAGEGNTWGHEIAWATPTIVRGWRCGMRGEDGGVIAVDSRASREGGGAGFSTGGRGRGSRQGCWGRRLRGRRQRVWIR

SEQ ID NO: 55392 - protein, 139 aa, Zea mays
  Coding DNA Sequence Number=SeqID_12017
MGKNNKRKREPTPPSEDFGDSEYSEEEFSSESEGSPAPVSPPASSDDSDDSQGIAAEVWTYIRAVERSGLEGSDESEYSSDEEDSDDGGEDKDDDGNDGDDDDDGDGDSGGGGRGSNSGSGGSRSGNGGSSRGSNKASG

SEQ ID NO: 55393 - protein, 226 aa, Zea mays
  Coding DNA Sequence Number=SeqID_12018
  Subcellular localization annotation: CTP_CleavageSite=56; ConfidenceScore=5.20e-01
MVGLLMPSSWLPHMISLVLRSPPDTLARRPGSRRCSLSGSGNTIWPPKGLDEAVCECDEEGGSMKEKEKVGERVKAAVHVERWGDDLGTERWCRSWARGGLPVGAGEWGGGAARLGREARGSAPGCRAELVAWRGGEGVEHSYDVHGDRHTVSAAVVETSSAEAHNTHKNVTMASAAAARTVAHITICVCAGVGLLRFYLPRLRLDQKSIDRAPQLTEAVVHIIVL

SEQ ID NO: 55394 - protein, 153 aa, Zea mays
  Coding DNA Sequence Number=SeqID_12019
MRQKYPELFVVEASEFEVEFFLRGVECDTRFAKKRSWRVVDFRIVLRDLPKLPVKASKTVMWGVTGTGADVFGDADFGTNGRWSWSSLLACTREDLYVGSGFACRGIPPETSGPPPDPPDSDCLKPSFVSNSDKERRERTDVAEETVAMERAE

SEQ ID NO: 55395 - protein, 75 aa, Zea mays
  Coding DNA Sequence Number=SeqID_12020
  Gene Ontology: Mol. function=nucleic acid binding
  Homolog annotation: Hit_ID=A2XT93; Match level="QueryCoverage=84%, HitCoverage=57%, E-value=3e-16, Identity=73%"; Hit description =Putative uncharacterized protein
MAMAALRETSRCLASRGRSAAWRPVLLAQSRGITYKLFVGGLSQFATEASLAEAFSRYGQVIEGLSSSLARTHPY

SEQ ID NO: 55396 - protein, 101 aa, Zea mays
  Coding DNA Sequence Number=SeqID_12021
MQYNGSSSLISCEKQMIRIEFLSLQEAMCARNLEMVQRVTWSTRSGGVTNSGEHDCTIPVGLVLGSSSGKLHGLLGKLSEGSDRVEVGGDGLATAGALGRL

SEQ ID NO: 55397 - protein, 114 aa, Zea mays
  Coding DNA Sequence Number=SeqID_12022
MGEEALKYRYMISIKMYFRQNWQGVKEEGAVNDKIDEALSSNRDGKEEASKGRFKVKMIIMKSITKDSVKIRLAKWQSGENNKGGTRTKINYKCTFGLKERKYKCGAKVNAKSA

SEQ ID NO: 55398 - protein, 417 aa, Zea mays
  Coding DNA Sequence Number=SeqID_12023
MRDEKEVMRQWNEQRDKEEAELLHKLSERRKEAAEKYLSHFTVDHHQKIICQGEIDMDSLLPPLQGPAVSAPDLSLTTFMDQRGDQLKQYVDESIKIHLHSYEKSTAPSFPSRETNTEPLAPSTSATNGSPLAQPSYVLDIVGSSECHLRQFGYIMDRPTYFAGPFDPTQACTQITQVAPRMAGSSGYNLGQFCPITDRLVHYAEPSGYVADRPVPYAGPSGYGMNQPAYYAEPSDSTRVHTQTIQVMPYMTEPSGYNPGPFGPIADRPALYNGWSRYGTTQTSPYTARQSGYIFGPFGPVADHPTPYDGPSGHAYVEPRAAQYTQFSHSSQQHYGAPPATHYNHTIPTHGHRAEYCSATREPERYRAGAGDINRNLTHTSDIPGRKADRVMSGNLRFPPTNLMDGRQAWRRGSEMR

SEQ ID NO: 55399 - protein, 79 aa, Zea mays
  Coding DNA Sequence Number=SeqID_12024
MRTMAIGDVRKRNYRNKNNPLPLRWCIPQLKAMNRYLKKMGRIKGEHRKNRLWRKKHHRPSNSSPSDDPKKSPSGSDSG

SEQ ID NO: 55400 - protein, 22 aa, Zea mays
  Coding DNA Sequence Number=SeqID_12025
MANAGAGACASALLRENNFRNP

SEQ ID NO: 55401 - protein, 133 aa, Zea mays
  Coding DNA Sequence Number=SeqID_12026
MSATRRTSQLRYFIHGRDRVGEKQGEMQGGASPMGLFPAAAMGKQERRNSGCRPWEMTKKSGRHCWAWQPREMRRQRGASASMGKKWASSRAAALEREGARRPGSSCAGCCCRGRTPARGRRQGEKKVAAREK

SEQ ID NO: 55402 - protein, 36 aa, Zea mays
  Coding DNA Sequence Number=SeqID_12027
MTMMGSTSEKMYLCQDRIDVGLMIEDPLAGHMPHHG

SEQ ID NO: 55403 - protein, 79 aa, Zea mays
  Coding DNA Sequence Number=SeqID_12028
  Gene Ontology: Mol. function=nucleic acid binding; Cellular component= ribonucleoprotein complex; Biological process=mRNA metabolic process
  Homolog annotation: Hit_ID=A3BPN8; Match level="QueryCoverage=97%, HitCoverage=69%, E-value=2e-34, Identity=94%"; Hit description =Putative uncharacterized protein
  Pfam annotation: Domain name=LSM; Domain location=8-76; Score=63.2; E_ value=8.8e-16; Accession=PF01423.13; Description=LSM domain
MASTKVQRIMTQPIKARIQIWLFEQKDLRIEGRIIGFDEYMNLVLEDAEEINVKKNTRKTLGRILLKGDNITLMMNSGK

SEQ ID NO: 55404 - protein, 103 aa, Zea mays
  Coding DNA Sequence Number=SeqID_12029
MSTEKRHLDQIELLSVRRLLLNHLIFSCGGGGCETARVSSHMIIAQQVVGNQWTLTHKGKAIANYSSESGVNKGLFSNLYTRRGIFYSGPDDPDPAARIESSL

SEQ ID NO: 55405 - protein, 256 aa, Zea mays
  Coding DNA Sequence Number=SeqID_12030
DALLGHLGSDQWRVMISGQNGNHGLWGGYEIDGFGYDYGAGKWYSFRLDRMARLRHTARKSVIPFLPSRLAERPLRRPVAGQSSHLERLHHRLHEEQEHRRQEQQGSSFSLQQEIESVRSCSPVLPLEAPPAPPLGAPSFWSSCWRKPRRLRWRRQLEPTTPTSLLTLSRKDGLLDPSLATLLAGVTSTMRSTPCYVGPLTRRTWSIEYRCVVYQHSRGVYPDRWEATCLVRCPENSLQGAEACSEHYSISERDSP

SEQ ID NO: 55406 - protein, 53 aa, Zea mays
  Coding DNA Sequence Number=SeqID_12031
  Subcellular localization annotation: CTP_CleavageSite=32; ConfidenceScore=5.14e-01
MGKPVPSLLMLLLSRVTALVPSINGMGRPRLRSREGQKSTARFKSGTRLTDLP

SEQ ID NO: 55407 - protein, 135 aa, Zea mays
  Coding DNA Sequence Number=SeqID_12032
MDPGPHMLCIRFCPQNQMVRMIQTTRINTNYIPPPRQVLVYPVVVEENPVDLPRIRVENEVILEDSSEEFLPTPTPLAESLAFAAGSSASAPPAPVVQALAPGGDDPNDSCDDDEDEEEEEEEEENMNDEANDEQ

SEQ ID NO: 55408 - protein, 93 aa, Zea mays
  Coding DNA Sequence Number=SeqID_12033
MEAKSHHQPKSGGTCKNYATSKAEYTNTQLDLPVTALVPTITGMGDHVSGRVRGKVCCQVHSDHHHYDIKNGYNQIPDLERVQEKSLDFYRDP

SEQ ID NO: 55409 - protein, 59 aa, Zea mays
  Coding DNA Sequence Number=SeqID_12034
MTLLSGLVVHPAAHHRDTTRQHREFALRCDAVDLRQPRRCLIVVALIFLASAKVLKLRN

SEQ ID NO: 55410 - protein, 109 aa, Zea mays
  Coding DNA Sequence Number=SeqID_12035
MAGGSRFIPCEESPQVRASHPYKIDHNETTRGMEGIETHVAMRLMVLVMIMVLVVSIATTAQEKMKLWKETSRSSKTTTSSRCGLAATPQSAACEGRVIYVSFSHFDLL

SEQ ID NO: 55411 - protein, 216 aa, Zea mays
  Coding DNA Sequence Number=SeqID_12036
  Homolog annotation: Hit_ID=A2YV47; Match level="QueryCoverage=41%, HitCoverage=27%, E-value=8e-29, Identity=71%"; Hit description =Putative uncharacterized protein
  Pfam annotation: Domain name=DUF581; Domain location=122-180; Score =78.8; E_value=1.8e-20; Accession=PF04570.5; Description=Protein of unknown function (DUF581)
  Subcellular localization annotation: CTP_CleavageSite=65; ConfidenceScore=5.69e-01
MATTISTHIYTTSSSAPSQAPAAASRNRAGEMMLGKRSGRPSPTARQHMRRTTSLTEFAAPDKVLADVAEEEDEELQLLPAHAEAAELEGPYGWAIGGAAAAGRADWLAAYRARAAPVLAGLRRNSADFSAAETAAFLRACGLCNRRLGPGRDTFVYRGDTAFCSLECRQQHITIEEWKEKCALATPPASDPVVPLPPRPSGAGSDKPATVLASKS

SEQ ID NO: 55412 - protein, 64 aa, Zea mays
  Coding DNA Sequence Number=SeqID_12037
DALLGHLGSDQWRVMISGQNGNHGLWRYFGTGGYEIDGFGYDYGAGEDEAVEGDFQEFQDYDEF

SEQ ID NO: 55413 - protein, 307 aa, Zea mays
  Coding DNA Sequence Number=SeqID_12038
  Homolog annotation: Hit_ID=Q6J9V9; Match level="QueryCoverage=43%, HitCoverage=47%, E-value=3e-30, Identity=55%"; Hit description =Putative uncharacterized protein
MQEACNCTAVVHPFSFVATDGPAWGLGPTCHVTGAPVTTCKETAPPLAPIQRLLDCRTSAATQGSPTRDPIVPIKCDDHRQSGRRFTSVMMTASKKGSEKGIFWKDPSQRRKRAPSPPIDQGFEGCALRGSATAPEHPGSEPFTDQGIEGWALGRVRQPPRACRVTDDPRYVRYMAKARATLPRYPRTFPRLAGMICNGIPPEGGTEPSDPIKWVRVQQITCRKTALFTLFRLLCQPSRELRLARPQALASGEGLRLARPQASALASASGEVTTSPDLSLGLKRSLRLARPQPRTDHATGDTSLPYP

SEQ ID NO: 55414 - protein, 106 aa, Zea mays
  Coding DNA Sequence Number=SeqID_12039
MVVATSRPTLVDVGTGRVGLALSLSPCVPPRRTWWHLPRFGYLGDEESRSSSCPSSAIIGGLPLPKVLKNVTNMFFSVTQTDTGGFDFGMKACMIWNRMNGRRSCG

SEQ ID NO: 55415 - protein, 232 aa, Zea mays
  Coding DNA Sequence Number=SeqID_12040
MVYCRRVHLPVGITDQVLEKQPAKNSYIISKGLGSKWSYQVRCDPAPALPRACRHPDRAPRPGQLHAHSRARRAGPAQPARVVPLTVPLWAPVAVLALLTGAASLVVCCASLAAVADVASRVRGYYDAYAREYAEHPAAPAVPRLAVQSAPPCAGLHQSLACTGRHELYLARRSRDCACPPSRRPAHPGHVRVLRSSLEPYPSGLRRDPPSGGPSRAWTACLPTCCDRLPSC

SEQ ID NO: 55416 - protein, 75 aa, Zea mays
  Coding DNA Sequence Number=SeqID_12041
MDSMVLSWLNDTITVEIQDIVRDQRKAVDVRFSKRLKRKDGLAFVEAFLAQKVYLREIGLRPFFRGYGFRINGPR

SEQ ID NO: 55417 - protein, 195 aa, Zea mays
  Coding DNA Sequence Number=SeqID_12042
  Subcellular localization annotation: CTP_CleavageSite=27; ConfidenceScore=5.16e-01
MMVLDSIVATSFAILLLFSLPSCLRLRATLFSAEGVGACASSPYSSDTSPDTDLRSGYCTSTRTFHSMRAPSFSSSSDVSFAFPTFALFFLPNLLRPPTVVATSRPTLVDVCTGRVGLALSLSPCVPPRRTRWHLQRFGYLGDEESRRLRLQDESMRDMEQDERAPKLWPKKHWLSTTTKVEDGTDLKDKRLLNP

SEQ ID NO: 55418 - protein, 163 aa, Zea mays
  Coding DNA Sequence Number=SeqID_12043
  Subcellular localization annotation: CTP_CleavageSite=14; ConfidenceScore=5.07e-01
MNRLGPKPAQVGPTAAESRPRPRARWRLCRKALEVLSNRKRVRLLFPGVTDISQKGPLVSVYSVFHVLDGVQARPCSGEQLRRPIEAKTGANLWLRPNPSPHERFPQLNCTIGGLGSSGHGNRADEFKNYAFPVMGGHTVQIDDLISITKLCKCLNKKAGDGG

SEQ ID NO: 55419 - protein, 74 aa, Zea mays
  Coding DNA Sequence Number=SeqID_12044
MAVMDSTSEKDVPLPDYVIRFRISSSPMFCNVYKMGETFLVSCGGWGVFIAPKAPTTKVAVGEAADDGRTGQVR

SEQ ID NO: 55420 - protein, 97 aa, Zea mays
  Coding DNA Sequence Number=SeqID_12045
MGRTTTGGASQLTLRQHMLAQEDKPMDATDTISERPDGNIWDTAFEPSTTAANVDAPTPAQFPVIVGDKTCLMSEGQWQPSDIMSVIFDGLRGGRRN

SEQ ID NO: 55421 - protein, 107 aa, Zea mays
  Coding DNA Sequence Number=SeqID_12046
MKYPRCPADEDITTMDTNNTPLVDVQGMKERTNKDMVKDLEAWKASKDVRIKVEDQTDVRNLSRCCDIIVFLLVSSILRQELALVARSIAKCTVDNQRRSGPAIAGF

SEQ ID NO: 55422 - protein, 49 aa, Zea mays
  Coding DNA Sequence Number=SeqID_12047
MQGSWLTAIAAKSTKDLPTLTTPLLPLPLSGKAIANYPSESGVNKEQES

SEQ ID NO: 55423 - protein, 165 aa, Zea mays
  Coding DNA Sequence Number=SeqID_12048
MTKLQKSFLRERSQLHQYTSSFESLTFGFVILYITKRYKTNRNLGRRLGMLVKSAGDMLKFGLFTIFLCVQSSFIKAMAVPREASRAQKSPCPAITSSSASTSPSICSKTGPRPQDGVAAESDLICFLLWAPLLLLLNTLGFPKSLLILSKVPNHQNIQGPKRKL

SEQ ID NO: 55424 - protein, 336 aa, Zea mays
  Coding DNA Sequence Number=SeqID_12049
STAGGWRDGAGAVDHYLGEAAGCGLEKDMAVVSSATREMALAPWGRRALRLGASTASAHGSEAEQGDGVGEKGRGAGAAIYRAKLWTWQTALAGGRCDSASIGRQFSSFSVWNRTQITANDLFLDYNGSSSLISCEKQTIRIEFYPCKPGLTALAYNDPLTPTAVVQWPHLGLQLKLATFGNFRRHSAIIHQTVRCTPDSVRCSKEERPPELASLGKTQRLLRYNSPDCPVYTGLSDEPAEQRLLRANGHLQAHSMRARSAQKSGTPILVHRTLNSTCPVCTGHPGGPRRQKLQRSNPNGIGDVAGAPDMSSVHRTVRCTIRQTASTNGHVWWLGL

SEQ ID NO: 55425 - protein, 33 aa, Zea mays
  Coding DNA Sequence Number=SeqID_12050
MAEARVAMAGRKELTGAKEGHLAGEGFADWIKR

SEQ ID NO: 55426 - protein, 151 aa, Zea mays
  Coding DNA Sequence Number=SeqID_12051
MGKNNKCKREPTPPSKDFGDSEYSEEELSSESEGSPAPVSPPASSDDSDDSQGIAAEVWTYIRAVERSGLEGSDESEYSSDGEDSPEEDGEGDDDDDDDDGGDDNDDGDGGSRGGNGGSRSGNGGSRGGDGGNSRGSGGGGSSKGSNKASG

SEQ ID NO: 55427 - protein, 37 aa, Zea mays
  Coding DNA Sequence Number=SeqID_12052
MAFKKWLATIETIANKILGTFGIRLRVYKSMVKTKLD

SEQ ID NO: 55428 - protein, 343 aa, Zea mays
  Coding DNA Sequence Number=SeqID_12053
  Homolog annotation: Hit_ID=Q6QP54; Match level="QueryCoverage=30%, HitCoverage=36%, E-value=9e-07, Identity=37%"; Hit description =Putative kinase
MALPVDVAGLCPRQGDVGAPPKPRLSLSSVAEAESEPWGRARRRSFGRGQGGVRALGSGEAEFRSAEARAESEPWGRARRSFVVLRVLARVRALGSGGAEFAVFRPESEPWGRAERSSPSSGSLARVRALGLGGVEFAVFRVLARVRALGSGEAEFAVFRVLARVRALGSGGAEFAVAPSARPDCLSDSLCRVAPQSEWRRRRCPSVRLLYADGGYELRIRRLEGKPHAHRPTPTPTPTPTDTSRSRGSVTQLANVFNINGCSYARGLASASGEVVFGGRRIEAVQNQRREAGRGPNSTTRPSHSSLFYRAATATARQLPSAAGWFLFNLDSMMTLSAKNLTA

SEQ ID NO: 55429 - protein, 36 aa, Zea mays
  Coding DNA Sequence Number=SeqID_12054
MAKVTPYPFAYNEQLVVPECVAEDPSKQQPGEGKCP

SEQ ID NO: 55430 - protein, 227 aa, Zea mays
  Coding DNA Sequence Number=SeqID_12055
  Gene Ontology: Mol. function=heat shock protein binding; Cellular component=nucleus; Biological process=cell division
  Homolog annotation: Hit_ID=A3AT19; Match level="QueryCoverage=88%, HitCoverage=33%, E-value=2e-78, Identity=72%"; Hit description =Putative uncharacterized protein
  Pfam annotation: Domain name=DnaJ; Domain location=116-195; Score =83.7; E_value=5.9e-22; Accession=PF00226.22; Description=DnaJ domain
  Subcellular localization annotation: CTP_CleavageSite=28; ConfidenceScore=5.12e-01
MAPKDVGTLGPSHPTTPGGIRPKGRSCLSASNSEIVDGVPLFVSSNCLPVKALKYEPAGYSFHAAAMKLLGLAEHEDIETDDHSVSSDDKSQDFNTASDTFSSKGKKKSSGSQQQDHYALLGLGHLRFLATEDQIRKSYREMALKHHPDKQAALILAETTEEAKQAKKDEIESHFKSIQEAYEVLIDPTKRRIYDSTDEFDDDVPTDCAPQDFFKVFGPAFHEKWTL

SEQ ID NO: 55431 - protein, 194 aa, Zea mays
  Coding DNA Sequence Number=SeqID_12056
MLERSLLMKAQNDKLSGKSNGNSHVIYAKTVSKMIITPTKVRVLDPNERGSMEQGLEVEEVEVVERVVADERLVEWEVSREDGGDGEVDTVLEAEQKIEVEEAGVDYDGWEAMAREGCGEAGGCGGLSDAGLAGGTQLHPSDVPSRRPSRTQQVIKEARGGGEREGQAGPAVEEVCVGGGGGGGECDMTDVRRE

SEQ ID NO: 55432 - protein, 78 aa, Zea mays
  Coding DNA Sequence Number=SeqID_12057
MGKPVPSLLMLLLSQVTALVPTITGMGDHVSGHVRRAICGQVHSGFNNIMLKEEKLSLMSNLGFLGHTWLLVVYAYHF

SEQ ID NO: 55433 - protein, 88 aa, Zea mays
  Coding DNA Sequence Number=SeqID_12058
MASACGALCKSTSLASKGLGDAEAVVVEPAPLDGAGKHGWVDAGYVCCGMVVGDGYNALQTKVMKDIPSNIEDSKRYERDVKANAKSA

SEQ ID NO: 55434 - protein, 101 aa, Zea mays
  Coding DNA Sequence Number=SeqID_12059
MTFCRVRELGKLHGLLVKLTEWLARLGSDWRELATVAEAQVVMADGGAACSRRSRHGAVHGWSWTGERTRVCTAECGCANGREPDVSATVEHVEPLFLPEF

SEQ ID NO: 55435 - protein, 360 aa, Zea mays
  Coding DNA Sequence Number=SeqID_12060
  Gene Ontology: Mol. function=DNA binding; Cellular component=nucleus; Biological process=cell division
  Homolog annotation: Hit_ID=A3AT19; Match level="QueryCoverage=62%, HitCoverage=38%, E-value=2e-62, Identity=58%"; Hit description =Putative uncharacterized protein
  Pfam annotation: Domain name=Myb_DNA-binding; Domain location=73-120; Score=18.7; E_value=0.023; Accession=PF00249.22; Description=Myb-like DNA-binding domain
MEQLKKLCDGMDGKDAAGKAWLLSNVLPNESSSKEAKKIEGNGVEPSAPKSNSTGGRATEGSSSILNSYEKKERPWGKEEIEMLRKAIQKYPKGTSRRWEVVSEFIGTSRSVEEILKATKTVLLQKPDSSKAFDSFLEKRKPTQSIASPLSTRDEISSTEGAGTASSKSAAQSASSQTANEKAAADPVTDGGPSVSDPDAWTDAQVLALVQALKAFPKDASQRWERVAAAVPARPAAFNSIAHPSFGSPPLLYFARLEKRRRIAATTRLEQSRQSFLRRPNRATMIANTMKNVAGTTTADATPPSLRALPPFDDRHTNPVGPQHQSSYTSRPASAKPQDGRGEEAYMEGGGYPWTTPLIG

SEQ ID NO: 55436 - protein, 128 aa, Zea mays
  Coding DNA Sequence Number=SeqID_12061
  Subcellular localization annotation: CTP_CleavageSite=38; ConfidenceScore=5.35e-01
MARARAYKAHSGVDHTLPRTLNLTGAQTHRRLPVHGVSAATRAPAACRPASQAFPNHVRPSENTEHTSVKLPERGIEVCFAGEASPRSSESLQPPANVDRVSHCAIFRFNAQIASTSPREAHRDKGLN

SEQ ID NO: 55437 - protein, 262 aa, Zea mays
  Coding DNA Sequence Number=SeqID_12062
  Subcellular localization annotation: CTP_CleavageSite=38; ConfidenceScore=5.25e-01
MAMPSSSTYGSASDDTAPALGPRPEPKRQPRRASAILRIAAGGCPSNDVGKARGGARKRRPRTSDEGSKNPDDYNPAQQGEIGKQVRSHGCLTAIHVETVLRSRTVRPAAPAAPKHKAAIIFRPSGSLPAHPSLSYYLTAMAKKNSSWGLPSSAAADLSTSGFYVRAARTSGGGNRRAPGREESRTRTHAQGNRETRAPADSVDVGREMRGPWLASGYSAVARGRHNDEMRRRQQFPVFFIRSRWQSLIPRAVWVIRFQRMT

SEQ ID NO: 55438 - protein, 262 aa, Zea mays
  Coding DNA Sequence Number=SeqID_12063
  Subcellular localization annotation: CTP_CleavageSite=38; ConfidenceScore=5.25e-01
MAMPSSSTYGSASDDTAPALGPRPEPKRQPRRASAILRIAAGGCPSNDVGKARGGARKRRPRTSDEGSKNPDDYNPAQQGEIGKQVRSHGCLTAIHVETVLRSRTVRPAAPAAPKHKAAIIFRPSRSLPAHPSLSYYLTAMAKKNSSWGLPSSAAADLSTSGFYVRAARTSGGGNRRAPGREESRTRTHAQGNRETRAPADNVDVGREMRGPWLASGYSAVARGRHNDEMRRRQQFPVFFIRSRWQSLIPRAVRVIRFQRMT

SEQ ID NO: 55439 - protein, 146 aa, Zea mays
  Coding DNA Sequence Number=SeqID_12064
MTSHGSSDEGNALSHTDGLAREGFPRILWEVLQGAGYMTPPQYAVQQFEKHQMPRCRQLSNVIQELEELVGTRENTIEVLEDQLINTQQQLAEANEHLDMHHQEIQDMEANEDVDIEGGEEPTSSLDTAGSGRPPSPESSVASFAH

SEQ ID NO: 55440 - protein, 234 aa, Zea mays
  Coding DNA Sequence Number=SeqID_12065
  Subcellular localization annotation: CTP_CleavageSite=51; ConfidenceScore=5.38e-01
MSSSSLMHRVFPPSKPPDGGHPPSFRLIVGGTRLRGSWYLSAIVQLQGFSSCSPVAPPRWWSPKTVTASSWVGRSKPGCDLGPTLSFKDVHHPRWGGGRAEPALYLPRGFAGHPFPRRSRERALTGPAGGPDFDNARLVDGGRHHLQRVGPVGLAPGVPSCRRAAAALCAREDHPRCRALLGRRSCSGAEAAREVPVTDGVTATIRASGLRLFALVLAPRASVWARARLQQRPP

SEQ ID NO: 55441 - protein, 278 aa, Zea mays
  Coding DNA Sequence Number=SeqID_12066
MTSHGSSDEGNALSHTDGLAREGFPRILWEVLQGACYMTPPQYAVQQFEKHQVPRCRPGWRSLDSESFGYRAEDTIEAIALHELTTFCGFHPLELSTHYIGLFPAEREDDPMWKDRVEHAKDIWAIYLGQTAHLIVWCMNALYCLQVMHGEAMSHLMALLEATKITLDNREELVVDLSTGMVEKDLQVQQLSNEIQELEELVGTKKNTIEVLEDQLINTQQQLAKANEHLDMHHQEIQDMEDNEDVNIEGGEEPASSLDTTGSWRPPSLESSVASFAH

SEQ ID NO: 55442 - protein, 371 aa, Zea mays
  Coding DNA Sequence Number=SeqID_12067
MANTDDHSLPAIERRRDLATMSSGSTGQKGERISCPVYSLREVEAELVAVGYAGWSEDSADSGGNGLRRHRREVVRRRWSPGPTWQWSEPAHKARAGCGRCRPACHRRRVKPTAGLERGSTDGLKPGDFGPSTVEFQFQTSTEIFWANFYEVPKLGFWDVTNTDTSLITFREKKPSLTQTSLLPTKSPDARNKRKGDAALQRSEGVFSGLSGRRRHTLQDNLILQARVFTLEEGCNTLGIDDTFSEVRPSLGRRRGPGTSPGIRPEQAARPVASGASANHLPRAPARPEASAGQLRRRSRRRTTRLGSGQPGSHFRANSASVRADIATPGLGSSKSGRGVSLTKLEEPQTTRPIEPRDSYASGIRIPHSSP

SEQ ID NO: 55443 - protein, 151 aa, Zea mays
  Coding DNA Sequence Number=SeqID_12068
MTTPYRRLSDAGIWQRCPAAPRWFWGADDNPRSFTASHHQLHGSEGSDARPRGSRLIFTGRETSHARSPCGSPSGPDTPFLLPPGFEFYDYGGPQEHIARSLVSTRVLLWYRGPPVIQPERWRLLSLRTVLAMAVETYEGAERGKNQLPSL

SEQ ID NO: 55444 - protein, 797 aa, Zea mays
  Coding DNA Sequence Number=SeqID_12069
MQVVELVPCARNKWGNWNEFWFYVAEGTVEGHEGLPVSEMCSHFYSAYPPFEVAEEDVDEGALRCAAGLSSGRDLVEESMAYGVWPLAHGWALGEVCPRQMPFHGGRVVRSPAFALNLRNRDPAAFVREAEDGAVRLVGRYVPRTEGQRSWDIRGSNDRLNRVFELNQLPYDGYPGQDDVDRRGKKPAVETGDDAAPAAAPSSKKRKLGTAMGGIGVSDGFARELMRTCAAPGERMSSPELRESSARMMRVTGGCWPRNVPIPRAAGRDFFTSRMVRQWRVFPYGRNIAAVVSAVMDKDRQGAAQKRLAAVRLVEARPKRQRGSAKAAAPGGGRPPPAAKSGVPAASKAPEATAKAVPPSGGVAEVAKAARALPLSGKRVADFATDISVEDYLGGSGEGQLAMVAPAAATTTAAAVPKAKGGALSAGGEVSALAVVMDEAGAATRRLKEVTEALSQVADFASRTASGALTAAVAAEVERLRTQHADAVREKSATDSKCRKLADKVATLEGEKADLRRQLAGERRETNEALVKAQAAQAEANLARAEGNLARERAEQLQERLTALECRVERAEAMSRVEAERTRQLLVDTYRGLGAGTGDFEVPDREPGLRCLEWVQEELQALPTVVEGFMAYASLVTCEGAMNALSREGCRHFEVFDQADEDFERDIFKVEDPVVKESAGALYDRMWGLHGREVVRERAETARAQVLRGERVDDFGALNSMLSVPEPTPGTAEDAPGAPASAAAGEGLPPEVAEGAPDALAAATPSAEDPAAVAAEAAAEATAEPTAEAPATSGSSQ

SEQ ID NO: 55445 - protein, 101 aa, Zea mays
  Coding DNA Sequence Number=SeqID_12070
  Homolog annotation: Hit_ID=A2YH36; Match level="QueryCoverage=48%, HitCoverage=10%, E-value=8e-07, Identity=55%"; Hit description =Putative uncharacterized protein
MAVASKADGVTMRMVSRRGVVQLVLMSAIAWVMLGLVALAFHLRPCISLVAFLLVYSITSGYGAAVVLARQAQEGTRYTTSMDPSCIYLINSRRVLLLPTY

SEQ ID NO: 55446 - protein, 66 aa, Zea mays
  Coding DNA Sequence Number=SeqID_12071
MAMLAGLRWRVLGRPLAHHCNLADGEYVLIPKQGAVHEEDQEPAPEPAIEDLPVAPAIEGKPRFYA

SEQ ID NO: 55447 - protein, 49 aa, Zea mays
  Coding DNA Sequence Number=SeqID_12072
MAVRVSEALYAKAIGSLEDMVAGVTWPSILPPGWTVEWDPTSAEEEHEE

SEQ ID NO: 55448 - protein, 186 aa, Zea mays
  Coding DNA Sequence Number=SeqID_12073
  Homolog annotation: Hit_ID=Q33AL8; Match level="QueryCoverage=62%, HitCoverage=16%, E-value=8e-07, Identity=26%"; Hit description =Retrotransposon protein, putative, Ty3-gypsy subclass
MQELMAQQNKILRQLAHRQPPPQHYGGGDHHQRPPAAATYQEFLSTQLSLFTQAEDPLDADAFNDLCQYARYHADTDEKKRDRFRRGLSTKLRDRLNTVMANSYNELVNMAISQEDCIIARQAEKKRKTPVAGSSAQPQRFRIVSDTQNRGPQLQQGRWVIRPQQQQQQAPNRSQPPVQRNNQPQQ

SEQ ID NO: 55449 - protein, 256 aa, Zea mays
  Coding DNA Sequence Number=SeqID_12074
MEQGKPCKRTISVKNALATDAALYGCPKVMKCANLEKRSTTKEAHHRCTVFYIPSWLLSWALESSCCHTVDASGTKTVPRNSSRPSAIVQPSDAVPAAILERSSVTCGSPPSFSSQCFKYLKDGCRDTVNCKCFLIAPRQSISGSIQLARPVLHCQVITKQFTNPCMLWNCGQSLIQDVFKAVMVSLYGEGAAPNVRTPMSNSLDQPNELPLIGRELMMMGCYRPVGAKAQRPLARSSPQQKRNMSEEKEKHAKTE

SEQ ID NO: 55450 - protein, 660 aa, Zea mays
  Coding DNA Sequence Number=SeqID_12075
  Gene Ontology: Mol. function=hydrolase activity, acting on acid anhydrides, catalyzing transmembrane movement of substances; Cellular component=integral to membrane; Biological process =metabolic process
  Homolog annotation: Hit_ID=Q6AUL4; Match level="QueryCoverage=99%, HitCoverage=60%, E-value=0.0, Identity=70%"; Hit description =Putative uncharacterized protein OSJNBb0006J12.7
  Pfam annotation: Domain name=E1-E2_ATPase; Domain location=210-458; Score=-51.7; E_value=7.4e-06; Accession=PF00122.11; Description=E1 -E2 ATPase
MARFEVNGKSVQGVDLLRRRHWASRLDFWPFLALYALWLLLAVPALDFTDALIVLAALSAAHILAFLFTAWFVDFRAFIGYSKASRLSILNPSNFRAEKLELGNITGETAEIYFDFRKQRFIYSAEKDNFLKLRYPTKELISHYAKGTGYGTEAKISTAVDKWGRNVFEYPQPTFQKLMKEQIMEPFFVFQVFCVVLWCLDEYWYYSLFTLFMLFLFESTMAKNRLKTLTELRRVKVDSQIVLTYRCGKWVKIPGTELLPGDIVSIGRSTSGEDRSVPADMLLLAGSAIVNEAILTGESTPQWKVSIAGRSPDDMLSIKRDKNHILFGGTKVLQHTADKSVNLRAPDGGCLAFVLRTGFETSQGKLMRTILFSTERVTANNKESGLFILFLLFFAIIASGYVLVKGLEDPTRSRYKLLLSCSLIITSVIPPELPMELSIAVNTSLIALARRGIFCTEPFRIPFAGKVDICCFDKTGTLTSDDMGEHGMTNPAFQEFQGIVTLEDDTELISDANKLPLRTQEVLSSCHALVFVDNKLVGDPLEKAAIKGIDWIYTSDEKAMSKRPGGQPVQIVHRYHFASHLKRMSVIVRIQERFYAFIKGAPETIQERLVDLPAAYVETYKKYTRQGSRVLALAYKLLPEMPCTSIKVLCQNTAKSFLIL

SEQ ID NO: 55451 - protein, 276 aa, Zea mays
  Coding DNA Sequence Number=SeqID_12076
MPDRVFEISTVPQGVPHVLVLWALGVEDLILCPYSTAGSATGSSHGWPGGVHFLPGLLFTALVWLLVYVFLRCRRHGLHASNEVLSLLIRSDVDVRLPEQLFRGGSSPGGGRVEIQAAPRVLLGFVFVDIGDFEVGRPLDAPKPGGERGDPAPSDRSQGIVSVRGVGSLVEASIMFSFLVLAFLSLAKIAAVGVVPFSSSLYIHHIGDGPKAENCPSSEGDLALQNDDHGDDIVDCDPMVRAAAREGNTQVCTGSDRFEKRNTLLPVVVFCIEMGL

SEQ ID NO: 55452 - protein, 183 aa, Zea mays
  Coding DNA Sequence Number=SeqID_12077
MAEKYQLPRSCVSPTMRRKDGEYPPSGGLEGGKSRCMKGRENMVYFQGGHPPFKGDYPYLRPQPSRAESSPTRSKALPCGVGAGSRMSCKPAQSRRSQTAALGAHDRPAGPGKGDTLKRILPREGTRLRASLLIRGSKAGPPKGSRAASDRVGPTPTTGQRFEGRPPEGFHGRLRLLGLRAHY

SEQ ID NO: 55453 - protein, 201 aa, Zea mays
  Coding DNA Sequence Number=SeqID_12078
  Gene Ontology: Mol. function=amino acid binding; Biological process =metabolic process
  Homolog annotation: Hit_ID=Q6YU01; Match level="QueryCoverage=46%, HitCoverage=9%, E-value=2e-29, Identity=65%"; Hit description=CCAAT -box-binding transcription factor-like protein
MNPLRVTIDNTSCPSATVIHVDNTNKYGILLEVVQVLTDLKLIVTKAYISSDGGWFMDAQYEGCIGKVWWLKEAGGSIIGGTIKTNSGDEQESKTTQGCCFLAFVYGGDPLTDLSLHALLDKLMENKPKGSCIAEGRWHSGTQIALAKKLNLNHHIIGGELLELSENEVPPEDIVFHRFYLNKTAQLSIRQSGRTQFLMKE

SEQ ID NO: 55454 - protein, 295 aa, Zea mays
  Coding DNA Sequence Number=SeqID_12079
  Homolog annotation: Hit_ID=A3B4V2; Match level="QueryCoverage=28%, HitCoverage=5%, E-value=8e-09, Identity=47%"; Hit description =Putative uncharacterized protein
MTIERIHDSFTNDIFLNTPITVISLYLENHGLEIPDLNMSEAPKDSMEVDLVQKTEKVKVTGHLKKLRLQGKHLKWKLQTIGEDAEAASVSKESSQQVDDIEQAYTQKEESVSDLPTEIETLHSDAIIKGLPQKAPDNMQTGIATAPKQSHNRGDNDVFEAVTEVPSTAQDHSEDDVRVEVPEEHTVSPVLQSQTPGEKPVLVVDVPAAAGSATPEHAEAESNKVEENHVNVEPGRKNNESDHGVVPSDKEIQNNVLGDMEESSEEHEGDGAPAVDQPNNIAEMLPQTGEQFSDS

SEQ ID NO: 55455 - protein, 120 aa, Zea mays
  Coding DNA Sequence Number=SeqID_12080
MTECSVSIAYGSGNKSYGPVGVKTLTKPRKGMHNNDVTPQVLVRVFTKEYTSKPIITCDLSWKSTPKLELKILNCNLADGEYVLVPEQGVAQEVAPDPAPEPAPEDLPIPALEGKLRFYA

SEQ ID NO: 55456 - protein, 117 aa, Zea mays; identical to SEQ ID NO: 46106
  Coding DNA Sequence Number=SeqID_12081

SEQ ID NO: 55457 - protein, 453 aa, Zea mays
  Coding DNA Sequence Number=SeqID_12082
  Homolog annotation: Hit_ID=O40947; Match level="QueryCoverage=35%, HitCoverage=16%, E-value=2e-08, Identity=22%"; Hit description=ORF 73
MAAQRLPAPLGVGHVGSAILGAAEADVEERAVAGVVERVPAAGAGPDPLLVEQVALLLLVVGGGDGLTATAIPRRRSTRRGDRPAGHIHRCRDGDPARPQPPRWRRSQLRTLAIEGDAGGASSSIPPPTLEEPEVVFGQRLRSGAEPEAVPVPLPSVLSRAHQALHETEAAILQEWEALEERTKVASRQFAFERSELERDHKDYKKDLQKVYAWELEVSPKEKRLAKREEALNQREEVVTELRAKLSAMDKILEEQRIQQTAAVERLQKMQQELEGKACDAALAEEKLKAKGESLDRRETDLARRETDLARRETDLARREKDLAFREETLERQEKLLAEHELEVEEKERKLEERVRQFHAMQAAPGPQAVEATRKALEDLQADHHVGVQRIAAWAGEASTTLVPLGMSPIPVSGLPTSIFDALPVLDSAADRLRCLDQILGARLEVEGGRPSP

SEQ ID NO: 55458 - protein, 219 aa, Zea mays
  Coding DNA Sequence Number=SeqID_12083
  Gene Ontology: Mol. function=ATPase activity; Cellular component =chromosome; Biological process=chromosome organization and biogenesis
  Homolog annotation: Hit_ID=Q8GU54; Match level="QueryCoverage=29%, HitCoverage=5%, E-value=4e-26, Identity=89%"; Hit description=SMC3 protein
  Pfam annotation: Domain name=SMC_N; Domain location=19-207; Score= -78.0; E_value=6.4e-06; Accession=PF02463.10; Description=RecFRecNSMC N terminal domain
  Subcellular localization annotation: CTP_CleavageSite=24; ConfidenceScore=5.18e-01
MSTHQGFHGSVTCVSLKMYIKKARCSALVGANGSGKSNFFHAIRFVLSDMFQNLRTEDRGALLHEGAGHSVVSAFVEIVFDNLDNRIPEQMVAEKERELEEGEAQKSPSKIVADSLSQISRSSTFLPNIGVPTTSKTGRSTSLAAQARMQAQFEEKLQAEREEATRKQEELQAQLQAQQAALEENQSLLRQTQEEVKGMHTKFEETNALQRAVLKLQKD

SEQ ID NO: 55459 - protein, 135 aa, Zea mays
  Coding DNA Sequence Number=SeqID_12084
MRRLEAPSLPAWLQAPPPRPPAPWTRAKGLQAVPPPQVAPGGRRKRGDAGCAAPTGHLFRTPQKRQRTAGGAEEAGSQAQGTQRHVSPPPPQPPPPSVPPPPPPPGRDLPQGHQQQQQQHTTKKWFCMTKVKCHV

SEQ ID NO: 55460 - protein, 164 aa, Zea mays
  Coding DNA Sequence Number=SeqID_12085
MWMTASVHGDESSAISPTPACTDPQGRSDEHSRRDHPSPNNAVVELKVRRPTSFLCAPTSSSWFINGGSGETVRGQRPGFYVGREGKRGRAVATVERNPGGDQCACERRIRGASVDTGSARATSTEAVGEDDPGADWMGPPSRDPRPGQRRWFWAAGRKKRPIR

SEQ ID NO: 55461 - protein, 151 aa, Zea mays
  Coding DNA Sequence Number=SeqID_12086
SIEAPRAWPNETSKRGGRGLAFSPEVGPGATVSTLKQGPWLASASGDYSGPTIAPDPSTWGGSRAATWPEKMIYSKVSTVSPDPHGKVPDHCIYRPALRVRSRTPTGANRTPRMGSRPLYVGSGPLTARSRDSGTENTQALIKARRGSRAD

SEQ ID NO: 55462 - protein, 76 aa, Zea mays
  Coding DNA Sequence Number=SeqID_12087
  Subcellular localization annotation: CTP_CleavageSite=73; ConfidenceScore=5.34e-01
MNHSVRQALFMGAERIRSRNLRAKVGESPSRGALRRSRSVCLQQSRAARVEFRRKRTDNARNTETARQMGPTRQSA

SEQ ID NO: 55463 - protein, 188 aa, Zea mays
  Coding DNA Sequence Number=SeqID_12088
MAMMGSTSEKMYLCQVKKQQTFVAFVPRWYQKKKIKTKVVGGKVRNSDTDLVKWSGAPTGLSEVHWTRTTVGGPNDLGGSVTADMPPCIRKTVRKSTGPIGVPRHQLAPRHEDSSSGSNDPIGDLEAQVEQLRSELLHRNDVWVEDGERINELRTDIHHLQDQLAERDLALDWAVNSRSLAWAKEAKA

SEQ ID NO: 55464 - protein, 36 aa, Zea mays
  Coding DNA Sequence Number=SeqID_12089
MTMMGSTLEKMYLCRDLLDVGLMIKDPLTGHMPHHG

SEQ ID NO: 55465 - protein, 140 aa, Zea mays
  Coding DNA Sequence Number=SeqID_12090
MNPSEDSDNIDIEEDSTIIHPTKPIHVNFDKSKIKGGHIKDSIHQCSSSIKFVHVNPTSGGIYGPDRINHWSDDSLKQLKLPELQKRKKGKKLATSIGALTSNSLVGVWPCKPGMIMYDPRSGKVARINAASSTLYGPAR

SEQ ID NO: 55466 - protein, 37 aa, Zea mays
  Coding DNA Sequence Number=SeqID_12091
MVVAPWVRYLRQEYVPMLTWAASTYRSPSCPYFRLMS

SEQ ID NO: 55467 - protein, 84 aa, Zea mays
  Coding DNA Sequence Number=SeqID_12092
  Subcellular localization annotation: CTP_CleavageSite=51; ConfidenceScore=5.03e-01
MARARAYKAPRGLDLTGAQTHRRLPVHGVSAAARSPYHRRPASRPLPNPVQPSERTEHTSVKLPERGIEVCITGEASPRSPDSI

SEQ ID NO: 55468 - protein, 175 aa, Zea mays
  Coding DNA Sequence Number=SeqID_12093
  Subcellular localization annotation: CTP_CleavageSite=65; ConfidenceScore=5.13e-01
MSTQSASSHWHKQEALKQTQVVTKVYERQMPKQSKKIVKKKGKSTRKRSVRQPYPPQVRKSGRINAKTKGLKVSFDLGSSSGSLEVPSQHMSHELGDLHDLNAFLGPVKFTSLQKPLDFDGFYPAITVATLQKVAIERHDVPPCGSIYGGAALSGPQSGGQCWGAFNYRKSSRYT

SEQ ID NO: 55469 - protein, 203 aa, Zea mays
  Coding DNA Sequence Number=SeqID_12094
  Homolog annotation: Hit_ID=A2GBV8; Match level="QueryCoverage=66%, HitCoverage=27%, E-value=5e-07, Identity=31%"; Hit description =Putative uncharacterized protein
MAPKLPAFSAAESCEIMSLKAIESGEVKIMSPKRTEEVEKKGVNETPIQDEVSIYDTEPKVQEQSKGIILSKILKAQKDVEDEINKLKESQAELAKFSEQGSRISKLEDEKKADAKRIAHLESMLKAQVESHKSEVEKAKREIAKAERDRVRRDVEELRTSKEQCFSVAGHCCGRLDNMFANIGAFQMTKILFTVMSKELLNG

SEQ ID NO: 55470 - protein, 74 aa, Zea mays
  Coding DNA Sequence Number=SeqID_12095
MGPLGFELGIKVNIPDLWLKSVGKEFGDQFYGYVKEVNGYVIINVNQIADLGDHSNERGVKTFKIDRTFEEVMT

SEQ ID NO: 55471 - protein, 52 aa, Zea mays
  Coding DNA Sequence Number=SeqID_12096
MAGGIELVGAKERWLAGEGVIGFCLLIAEIWSQEIRSVSLPKPEANPGFCRV

SEQ ID NO: 55472 - protein, 128 aa, Zea mays
  Coding DNA Sequence Number=SeqID_12097
MTVRSRTARLCRRTMPWLPDCFNPKSMRCNMKQRQMQTGEVSLTRIGGDDEQYPRTIHAELRLHSYFLLRASQRYILVFVDDEDLFFITFVREPSNPKGFDASNDEVIINKRPTLAPTVGGLTSTTTT

SEQ ID NO: 55473 - protein, 228 aa, Zea mays
  Coding DNA Sequence Number=SeqID_12098
  Subcellular localization annotation: CTP_CleavageSite=36; ConfidenceScore=5.05e-01
MARAYKAPRGLDRTPPHALDLTGAQTHRRLPVHGVSAAARSPCHRRPASRPLPNPVQPSERTEHSSVKLPDHFDLPLTDLTGKQRRLPRSDYCATRQGEADNSQVQPQAQQEAPPRPTLGLGLGRWSPPHPTPGLGLNLGLRRWSLPRPTSGLGLNLGLGRWSPPRPTPGLDLNLGLGRWSPPRPTLGLGLNLDLGGIASSPDPGLGLKRSLRLVRRWARTDRAMGDT

SEQ ID NO: 55474 - protein, 74 aa, Zea mays
  Coding DNA Sequence Number=SeqID_12099
MAHDSTARCDSRENTGTEEGKRGRNSWEGDLYGWGKRGLGVLVFGVFIRVWDKRLRYICYVGQVVGYGRVDLGH

SEQ ID NO: 55475 - protein, 482 aa, Zea mays
  Coding DNA Sequence Number=SeqID_12100
MGRPPARGRLRSSPLVLPATVDIVMPGITAIRQTVQLEDPVQAIVGPANIPTTLALRPWHVPTNNPHRPILCLTHECGGIAAMQIQCEGGTSHQHPTTGRHLARAYFAQCPAMRQGPHPIRDKFLNQIPPATQAGRASESPFVSILLRHFKLRGHHDIRRQLVDLDVESEQDFSHESMRGQTKTSGEECLEDNQLAFWLGDLLRPRDTCHSAAKITKLLHVLHATRGHPRCAEIHRVAGAQLLHCHGAQCLLRRRVGRRRSGSRRRRGRHRYVPAAAAGGLLHTGQIFDEQEQGGQTSSERFQKAVRVFVERGKIKFKTRCPPPPFIHRARRFGKPAIPQYDVNQRSCQKPPRNHFKRGQHLRHLATCSAPDDLVELVPRRANVGAKAKTPPYARCLRRPRCTNGDKTTGRLTLRPIRHRTKTCDEVVSSCDLVHHGGPRVTRPIVTGPAWPLRITGLICKGITDAGHTDTYKYPRTVPLRG

SEQ ID NO: 55476 - protein, 554 aa, Zea mays
  Coding DNA Sequence Number=SeqID_12101
MELMGTCAAPGGRMSSPELRESSARMLKVTGGWWPKNVLIPRAAGEDFFTSRMVRDFRVFPYGRNIAAVVSAVMDKDRQEAAQKRRAVVRLPEARPKRARGTAKAAAPGGSQPTLAAKSAGPGSSKVPDVVKAAGDGGAKSTSPEAAKARELPPPGKRIADFGTDISVDDYLTVPVAKGGALSAGSEILALAAVKDEAGAVSRRLKEASQRLSQAADFADRVASGALTAVVSAKVERLRAQHAEAVREKSAADSKCRKLAEKVAVLEGERTKLRRQLAEERREANQALAKAQSAQAEANVARARVERAEASTRSEVERMRKQLMDSYHELGARTADFEVPDRQSGLRCLEWLQEELLALPTIVEGFMSYASLVTCEGAMNALSREETVEGAPDALAAIAAGGGSSPTAAPRAEDPPKTAAEPAAEDPAAAGSSQVQDFGPAHATATANFLAASTVDDGNEWDESASKFSDFGDSGSSVEWTEESSDEDLDYFAALDVAAAEAWPRAADAEVVPGPSAGSRRRKAIAKRRVSEAVGFVWAELAGRNCCPCRPLRV

SEQ ID NO: 55477 - protein, 208 aa, Zea mays
  Coding DNA Sequence Number=SeqID_12102
MEQRITRSTFTGGVPNSGEHDCAIPVARVLGSSSCKLHGLPGELSEGLDRAEEGGKRVGHSGCPRAALAGRGEVVGAMGELGEVRRGTEKATGKTVGLWDGLYSRGAGVGAKAKTPPFARCLRRPRCTNGDKTTGRLTLHPIRHRTKTCDEVVSSCDLVQHGGPRVTRPVVTGPAWPLRITGLICKGIPVITVCNPALWEYSGDNLGV

SEQ ID NO: 55478 - protein, 77 aa, Zea mays
  Coding DNA Sequence Number=SeqID_12103
MYNGSSSLISYEKQTIRIEFLNLARLCIKPGLAFQSCGRQILWYRLWCWIRGYLLSSSLLRHEDVLSVSEVAVYRMQ

SEQ ID NO: 55479 - protein, 394 aa, Zea mays
  Coding DNA Sequence Number=SeqID_12104
  Gene Ontology: Mol. function=sequence-specific DNA binding; Cellular component=nucleus; Biological process=regulation of transcription, DNA-dependent
  Homolog annotation: Hit_ID=A6MD12; Match level="QueryCoverage=88%, HitCoverage=92%, E-value=5e-78, Identity=47%"; Hit description=Heat shock factor
  Pfam annotation: Domain name=HSF_DNA-bind; Domain location=35-238; Score=156.3; E_value=8.4e-44; Accession=PF00447.8; Description=HSF -type DNA-binding
MVAEQATTTVAVGEPPTATPQPAAAAAAGQRSVPTPFLTKTYQLVDDPAVDDVISWNDDGSAFIVWRPAEFARDLLPKYFKHNNFSSFVRQLNTYGFRKIVPDRWEFANDCFRRGEKRLLCDIHRRKVTLPVAAATRAVTVVATIPMALPVDSPVYSGEEQVLSSSSSPEPPSLLQQQPTPSASGSGDMGEENERLRRENAWLARELGQMKKLCNNILLLMSKYAATKQPDAAKAAAAGNCSGGESSGAAAAPPLPSILELLPSCRRDPASAAVDAAAAAAGTEHEVDEKAGARLFGVSIGRKRMRDESSGHGGGGEDPVGRSAEVKAEPVDARLDHQHSATEPQSWPIYRPRPVYHPLRACSGLVSAGSDHDWSNNSRAVAHLAPPRAGPAHR

SEQ ID NO: 55480 - protein, 445 aa, Zea mays
  Coding DNA Sequence Number=SeqID_12105
  Gene Ontology: Mol. function=phosphatidylinositol phosphate kinase activity; Cellular component=mitochondrion; Biological process =phosphatidylinositol metabolic process
  Homolog annotation: Hit_ID=A3AYY4; Match level="QueryCoverage=47%, HitCoverage=17%, E-value=1e-69, Identity=62%"; Hit description =Putative uncharacterized protein
  Pfam annotation: Domain name=NAM; Domain location=218-353; Score =152.7; E_value=1e-42; Accession=PF02365.6; Description=No apical meristem (NAM) protein
  Pfam annotation: Domain name=PIP5K; Domain location=143-329; Score= -139.7; E_value=0.017; Accession=PF01504.9; Description =Phosphatidylinositol-4-phosphate 5-Kinase
  Pfam module annotation: Pfam domain module=NAM::PIP5K; Domain location=218-353::143-329
MGGSPQFTVVPGGSILCVSDDEISSIISRALAVSEERRHLLMDAITETEPADTTRSKTMDKSYNSLSKSSSASLWSSDSEASISFDDLSNYDTSLLLSSSLHPEIDVNGTTTLKGRYSVICVHSNQFYNLRRKCCPSELAYVASLSRCKRWDAQGGKSKAFFARTIDGRLIIKQIKKTEFESFIKFAPDYFRHVNHSLDTGSQTCLAKILGIYQHYDELAGSVMELLEHLEGEARSDTRKLHPLVDEFIPTIDGENDICYTHPERLPGVSKDGLVWHFFHRPSRAYTTGTRKRRKVHSGDDGGVTRWHKTGKTRSVLSNGRPRGYKKILVLYTNYSKQRKPENNWVMHQYHLGSDEEERDGELVVSKSGGGGSSVLREANGGADQLYSPGAMMGYDQGGLETGHLLPLLCLPTSCLTLLSMQQGLALPLEPRIQDKIQTYQNCQI

SEQ ID NO: 55481 - protein, 116 aa, Zea mays
  Coding DNA Sequence Number=SeqID_12106
MGANNRSETHWIARSTRGGGRPKSGEVDLGPPVKSGRVRGLGKLYGLLAGLAEALARLEDGWSGLATVAEALAAMAGGIELAGAKERGLAGEEIWSQEIRSVSLPKPEANPRFCRV

SEQ ID NO: 55482 - protein, 104 aa, Zea mays
  Coding DNA Sequence Number=SeqID_12107
  Subcellular localization annotation: CTP_CleavageSite=29; ConfidenceScore=5.06e-01
MAASPSTSTGTVDKAHPKWLACKRLPLCPAHRGASRCLLKERGAEVPGPELRKGRRDRSNLPTGALDGRVCAEPPPGWLDEFWKEGALWVLSANKDIRKPLGGI

SEQ ID NO: 55483 - protein, 167 aa, Zea mays
  Coding DNA Sequence Number=SeqID_12108
MPLSVPRVKVLRDYRYEPKPPWAGPGPPRMSSRPLWAGLGPPCLAFKPPAGRAQVFRPAYALGPHSPLGQGSGAATWPMGTWHKPSTGSKLTARIQTSDCGIGELQRGGDAENPNVTGSDTLTDEVQVDLHVLRALMLHGIGGEVDRANVVAVDEGGALKGVVEFLE

SEQ ID NO: 55484 - protein, 167 aa, Zea mays
  Coding DNA Sequence Number=SeqID_12109
MKLWKETSRSSMITTSSRCGLAATPSWLPVKAAVIYVSFPHFDLLWLDLDTLHESPSSPSYPPALLSVRFAVPWPDSPATWRDYTTACVRSRSVDDRSSRALPFSLPQEKESVRSCFPVPSSGTAPLHHPWGAPFFGNSCLEENLRQRKMGEQQLPAPNPQLPLLNP

SEQ ID NO: 55485 - protein, 153 aa, Zea mays
  Coding DNA Sequence Number=SeqID_12110
  Subcellular localization annotation: CTP_CleavageSite=44; ConfidenceScore=5.16e-01
MSGGTPDMSGAPGGLRLKLATFGNFQRRLGYNSPDCPVYTGHVRCSREGRPQELTSLGFSPSPLRYNSPDCPVCTGLSGATSEQRLLRANGYLQRHLMRAQRAQESESPMLAHRTANSTCPVCTGHPGGPTRQKLQRSESNGSDDVAGGTGLS

SEQ ID NO: 55486 - protein, 37 aa, Zea mays
  Coding DNA Sequence Number=SeqID_12111
MEQKGAPKFGDNKVLSWQFIEKGKVSRWKREDEQEME

SEQ ID NO: 55487 - protein, 81 aa, Zea mays
  Coding DNA Sequence Number=SeqID_12112
MTIDSLLELLHVDLFGPIAYISIGGKTTNQAKDGSKKSFEVSSAWEKVKETRNPRPGVKKKTCGIKVDRVKKSYGASRNTT

SEQ ID NO: 55488 - protein, 493 aa, Zea mays
  Coding DNA Sequence Number=SeqID_12113
  Gene Ontology: Mol. function=indole-3-glycerol-phosphate synthase activity; Cellular component=chloroplast; Biological process =tryptophan metabolic process
  Homolog annotation: Hit_ID=A2XUG3; Match level="QueryCoverage=75%, HitCoverage=40%, E-value=1e-143, Identity=72%"; Hit description =Putative uncharacterized protein
  Pfam annotation: Domain name=IGPS; Domain location=98-366; Score =320.3; E_value=3.5e-93; Accession=PF00218.12; Description=Indole-3 -glycerol phosphate synthase
MDAAVGRPSRAPIRCTSAETDSVDEVATSSHAAEANAGGTTEQEGNGSPVAAAAAYSPVVAGVDGIRIRRRPVTGPAVHYVGPFQFRLENEGNTPRNILEKIIWNKDVEVSQARLMKERRPLYMLKGPLEAAPPARDFVGALKASYDRTGLPALIAEVKKASPSRGVIRENFDPVQIAQAYEKNGAACLSVLTDEKYFQGSFYNLEAIRNAGVQCPLLCKEFIIDAWQLYYARSKGADAVLLIAAVLPDRDIKYMLKICKILGMAALVEVHDEREMDRVLGIDGVQLIGINNRNLETFEVDITNTKKLLEGERGQVIAQKDVIVVGESALFTPDDISFVQNAGVKAVLVGESLIKQEDPGKAIAGLFGKDISHAAARNRVVVGVLAALGFLTSAAVGSVRSCGGEVLARRGIGLGLGASRSWSGASGRSLGGVGCVQQGDEQSRLLKREHGGKEVTGDELSGSQMPFKGRERERAEVVGGEKFAAKLTLLIVD

SEQ ID NO: 55489 - protein, 189 aa, Zea mays
  Coding DNA Sequence Number=SeqID_12114
MRKKHGFTPKYIDVQAPDSHNEQTPALKVPLQTELRFHSRGYEQPPHRRACGMTNSGRLASDLYSSSDGPKTDAAAGRLSFASPRGGREPDIKAIGDAMFDALRGQHGAFPPPPCGKATQGRMKKAESVLGRPLALCGGSGAALANPAPAKPLTASTYQPENSEPDYAPGLRPVRMREQPDRPRHHERH

SEQ ID NO: 55490 - protein, 221 aa, Zea mays
  Coding DNA Sequence Number=SeqID_12115
MRGGIYRLKEHLAHVGKNVKKCTSATPQALEAKEKCKKAIEAAKRKREEKTVRAKGSHLANKKTKNRVQQRSKGITEVCPGLAHRTVRCTRGLHAKLFTFGKIQRHSAIIHRTVRCTQDSVRCSKEERLRNSSASGIRSAIIHRTVRCDTGATAISRQRSPADALNARQSAQKSGTRDVAHRTLYSTCSVRHRTSRRAQKSEAPTVESQRPGDVAGAPDMS

SEQ ID NO: 55491 - protein, 158 aa, Zea mays
  Coding DNA Sequence Number=SeqID_12116
  Gene Ontology: Mol. function=aspartic-type endopeptidase activity; Biological process=DNA integration
  Homolog annotation: Hit_ID=Q8S474; Match level="QueryCoverage=47%, HitCoverage=6%, E-value=4e-09, Identity=46%"; Hit description =Putative pol protein
MSKIEETIYAYLISTYIGLIPSAKGSHLANKKTKIWVQQREQGITEGTSGLAHRIVRCTRGLQVKLVTFGKIQRRSAIIHRTVRCTPDSVRCSKEGRLWNSPASGICSAIIHRTVRCTPDCPVNQQSNGYFAPTAQKTELQRSEPNGFGDVAGAPDMS

SEQ ID NO: 55492 - protein, 152 aa, Zea mays
  Coding DNA Sequence Number=SeqID_12117
MWRTGHSIVHVPVCHRTSRQAQKTELQRSEPNGFGDVAGAPDMSGDRWREVAVALLVHRTVWCTPDSPVNYSGANSRGWRVPEPPFLGAPDTVRCTPDSPVNYSGAPLDFPEGDEFDLESSGAPDNSVRQTRGAFGYPLLSLLNPNLGLFIG

SEQ ID NO: 55493 - protein, 92 aa, Zea mays
  Coding DNA Sequence Number=SeqID_12118
  Gene Ontology: Mol. function=kinase activity; Cellular component =ornithine carbamoyltransferase complex; Biological process=amino acid metabolic process
  Homolog annotation: Hit_ID=Q6QP54; Match level="QueryCoverage=45%, HitCoverage=14%, E-value=4e-12, Identity=88%"; Hit description =Putative kinase
MALPVDVAGLCPRSGDVEAPPKPRSSLSSVAEAEPEPLGRARSFLYVRQDGFYLNVFQESYKGDMLSYRTSSEEYTYMSQTAGHSLWDLGNP

SEQ ID NO: 55494 - protein, 222 aa, Zea mays
  Coding DNA Sequence Number=SeqID_12119
  Homolog annotation: Hit_ID=A2XMM2; Match level="QueryCoverage=40%, HitCoverage=16%, E-value=1e-22, Identity=62%"; Hit description =Putative uncharacterized protein
  Subcellular localization annotation: CTP_CleavageSite=38; ConfidenceScore=5.06e-01
MAGMRWGRWLGLVTVAWVQCISGNNYTLMSSSSPENCSSSSEWPDRAAASRSNRYLFDANAQARCAGYLDLMRLEVDAQLGRLRGGVTGLESYALPGNGRAIRGAHLGMSLDVMLIEIDERFNALKLLMGSVFRSTSAHGRGTGCIESNSYQLCWLSNEEDIKMSSLTSLECLHRTLSTGRNKHQATTVSTAGEGSAPRVSAGIQHLDTDIRIPRNIDRGEK

SEQ ID NO: 55495 - protein, 42 aa, Zea mays
  Coding DNA Sequence Number=SeqID_12120
  Homolog annotation: Hit_ID=Q6AVK1; Match level="QueryCoverage=76%, HitCoverage=36%, E-value=2e-07, Identity=84%"; Hit description =Striated muscle activator-like protein
MNVEEEVGRLKEEIHRLGQQQPDGSYKVAFCVGCGGMTTISL

SEQ ID NO: 55496 - protein, 456 aa, Zea mays
  Coding DNA Sequence Number=SeqID_12121
  Gene Ontology: Mol. function=binding; Biological process=embryonic development ending in birth or egg hatching
  Homolog annotation: Hit_ID=Q6AVK0; Match level="QueryCoverage=87%, HitCoverage=90%, E-value=1e-167, Identity=72%"; Hit description =Expressed protein, having alternative splicing products
MSFGRGRVAAVLRAAAADPTCALAAAHAAQSVAPRDPAGAAAFLNAAADNLGKATEYERAVFGTLSVLVGEKRDEEVAIERHFELLEQFPRDLLSLKRAQLICFYMGKPDLSLKFVQQVLPKNQDQNFIYGMLAFPLLELGRMDEAERAARRGLAINKNDFWSQHNLCHVFQQECRFREATEFMESCSPSWEACTSFLLTHNWWHVAVCYLEAESPLCKVLEIYDHNIMKELEKSDCETAEVYLNGLGLLLRLFIRGHIDSAKERLTTLLDALKNESIWHVEWLLDLLILWALSSMGELKSAHNMLESLKSRNTRRFINSTKSEKQPDCRVRLMDRNRQQAMQKAIKLAEAAYEYGKGDHMKVYDTLGPDFDALGYKMIGASDEQVDVFNEVWYTVLINAGETSKAIEILGKQIRKREGAPFLWRLLEKSYSLAGRSADASVASKKANALQSSYFH

SEQ ID NO: 55497 - protein, 171 aa, Zea mays
  Coding DNA Sequence Number=SeqID_12122
  Homolog annotation: Hit_ID=A2WQJ4; Match level="QueryCoverage=71%, HitCoverage=38%, E-value=4e-32, Identity=61%"; Hit description =Putative uncharacterized protein
MAADTAEYAARVEVERIDIGEPENPGPKYNNRSTYQSVTVDPFALSPDPNEQENLDILGDDDGNASPNNLAAGQEASVRGFDINLPNQDDMDDEIADVDVNDDTDLWINAADALRAQVNAEEHQEQQDSSSSSGSSSSSSGSESGSGSGSSSSGSDGSDADSASSGGDVDI

SEQ ID NO: 55498 - protein, 277 aa, Zea mays
  Coding DNA Sequence Number=SeqID_12123
MKRHIACQRSEQGSLNDEAAHDLPVEWTGHVAASGLRLSGEQKRTRDPAVSGTYPTQRGPETVLGVRLAPMEVLDLTRRSGLHIQGSGTFPWGSEPTVDTLEYIVFSGHVAAPEPSTCGGTGQCHDEQTDSGAIHDVVGRSDVAGGGPVGGARGAARWRHLVARFAAGWIYKQEGLRRPTRREEEFLGWKTGTTEADGEDVLPLGHLERDPALQPAALLQCPRSVVALLLDLAPAMEVGSDLSLASPAWRTLQTDFPSTSASATHLVASIRAQGSPL

SEQ ID NO: 55499 - protein, 157 aa, Zea mays
  Coding DNA Sequence Number=SeqID_12124
  Subcellular localization annotation: CTP_CleavageSite=22; ConfidenceScore=5.16e-01
MAFLPRPLTCPHGRPSSPLGPQAFSVAGGAQEGQSLMASLSLVTQDGEENGQARSGLLAAGALGASCAWAPLPGSLLLRWRSMSLMNTQHRDPWADDVPDEDKEDVEEDEDEWDEAVGLGYGDRDVADMAAHEVVPPEQPVAAFRVIPRGDRGTGGR

SEQ ID NO: 55500 - protein, 241 aa, Zea mays
  Coding DNA Sequence Number=SeqID_12125
MPKEYDSWAQAPRVRDWAVFSAEMKRRTTAGGGSLLAWRFTFFALGDPHTSRKIELEMRWLCQPKSARSGCTGQCPVCQAGSGELAALGKELTAYGYNSSDCPVCTGLSGEPTVSRANGRLRDPRGTRGRANGREGHRTVRCAPDSVRCANGSKAANDRLRQIRKDIRTGQCPVRQATEGKNCLPGLLSMAPSCLRAIKGTPRRMEENTKHPLSIVDHSHFTLAHLFDILSDLSSVLVRNL

SEQ ID NO: 55501 - protein, 215 aa, Zea mays
  Coding DNA Sequence Number=SeqID_12126
  Subcellular localization annotation: CTP_CleavageSite=28; ConfidenceScore=5.29e-01
MPRLKATQRRQPGATVNAAKSGPAVMTVAGGQEQRSRRQPGSRPIQGQQESLLSRREDGAPVICPSNGSRTRSGCPANYSPRRINSAAGQAALLAGAAGDASPSPKQPHQKRDRERGIPRKGSFPVKEPGSEPPLLIRGSKAGPLWGSTVASDRVGPTPTTGQRGSGAALANPAPAKPLTASTYQPENLDPDRAPGLRPARMREQPDQPKHYARH

SEQ ID NO: 55502 - protein, 344 aa, Zea mays
  Coding DNA Sequence Number=SeqID_12127
MAASMRAPLQRGPRPRPPTGGGNEAIKAKELQARRLTSGGDHLSTDDSDHLCTGGLPATTAASAREERSSPPSSYGAAPRLAAGGGAVGGTKAIQAKEPDTRQLTTPAAGRPRAADKSANPHEVALLQQQQEEDNIGSTTVQETKSASSPAVRPLGGGPDMDPSNEHRRAPSRGPEGGRARQIPAHSIQAGGIPFRALTQSGRARDEVTRPWQTTTTQSRNLEGKGAQIAQRRKGAASGREAKHGCYSKGEPLFKGRFPARTPKRHGQGLPRCAPGFPSYDMGARPHMSYKLAQSAKKANRRTGSVQLPRGYTPFHLRRNQRSRRKVAPLLAPIPRLFEAVAEG

SEQ ID NO: 55503 - protein, 143 aa, Zea mays
  Coding DNA Sequence Number=SeqID_12128
MNNTVGTLKQEYPLLQYEDAVLDVSVELDLRKGAPDPCMHNLDPRLWPGTPERRPDAPTWLIARDISQRAEPDAMCPLSIYCVLSTPLVGGVRATLQTAHLSNPLSNRRKKIAPAANICGSNATSVMFLGPHVGAQYLCACPP

SEQ ID NO: 55504 - protein, 257 aa, Zea mays
  Coding DNA Sequence Number=SeqID_12129
  Gene Ontology: Mol. function=cysteine-type peptidase activity; Biological process=proteolysis
  Homolog annotation: Hit_ID=Q5NKQ2; Match level="QueryCoverage=66%, HitCoverage=22%, E-value=2e-47, Identity=48%"; Hit description =Putative uncharacterized protein 9C20.3a
MPTNTNVTPQATPHTESCSLIFDAMSQIKVSVETDPATNTPQVDQVSLDSEMQTVLALREYLCGTQSDTSMYEVQTKSKSVYMLSLLNFEEQERHSQNPQPFDESVLKTLLDNALPETDHGSHDSNPYGATLGGTTSKDYHFAELDLGGRKLPWAKVIMSRLNKAIQHAWPRTCFPKFGNFTIDLCPNCPNMAVGSNDCGFYVMGYILFYDCVEGSLRSDIEAGNTSEIQSLALHYITFHPKNKALSLLEDIKRFKV

SEQ ID NO: 55505 - protein, 127 aa, Zea mays
  Coding DNA Sequence Number=SeqID_12130
  Homolog annotation: Hit_ID=A2XFR6; Match level="QueryCoverage=72%, HitCoverage=26%, E-value=2e-13, Identity=44%"; Hit description =Putative uncharacterized protein
MDLPLCLRGESQTNIVPSGAGEDRLNTLVGVVAGLNTDLDSATLDLSRVHLKLEDAHTRIAALEAQLEARDPPKAQVPAMALSPPRKRIRYGELGSITRLLYIFKLYFEPLDADDWLKVIGKKLDIA

SEQ ID NO: 55506 - protein, 266 aa, Zea mays
  Coding DNA Sequence Number=SeqID_12131
MAERYQLPRSCVPPTTRRKDCGHPPSGGSEGGKTRCIREREDMVAFQGGHPPFKGDSPYLRPQPSWAESSPTRSKVLPLWHGGWVPHVMQAGPEQKKPNRRARCMQPPTGYKWPSTFAQTSGRKGGPTRHATGAPDAACEQLHRRPRHYRSSSTAEPIPRLEATQCTTQQRQPGATVNAAKNGPTVMAVVGGQEQRSRRQPSLRPIRGQRENPLSWREDDVPVFRSLNGPRTRNDRPANHSPRRINSAAGQATPLAGEASDASPSP

SEQ ID NO: 55507 - protein, 91 aa, Zea mays
  Coding DNA Sequence Number=SeqID_12132
  Subcellular localization annotation: CTP_CleavageSite=52; ConfidenceScore=5.24e-01
METTTTASRATSPTSQRSRRQSDGSLDPSLVTPLVTEPPKILGPPTTVFVLRTSDKPVDAHNHLTSSVFCILIISPKSASPITQTLHHIGG

SEQ ID NO: 55508 - protein, 175 aa, Zea mays
  Coding DNA Sequence Number=SeqID_12133
MEEDLVDFQYFDYKLAQREPKSSLEEALVNNNFVFFKGRDVVVFASPHNRHVPKVPSSHVLKMTLFNGRFSEDRMPWPPGPILRIFIPTFHIIAIVVTSTFELKSKPPCEEAQRTRRLTQSRSYAKGSFGMIAERGTDLKGKRLFRPRWITIELLANVKGMDVILHGLCPVPINR

SEQ ID NO: 55509 - protein, 54 aa, Zea mays
  Coding DNA Sequence Number=SeqID_12134
MAMMGSTSEKMYLSQNKITRNGSGEMERVACTLRGKRLDDGVSVLSVGVNLIWS

SEQ ID NO: 55510 - protein, 329 aa, Zea mays
  Coding DNA Sequence Number=SeqID_12135
  Subcellular localization annotation: CTP_CleavageSite=82; ConfidenceScore=5.22e-01
MALTKAAMASANVGGTGGGLGVASLPRELLVTFGSLAVGCRRPFINQLHRGRRPEKIQFATKCFSRYSRRSGFHPDRIRRPRSTTVNSTGPNSDEPTPADLLDDWELDEDAWRLEKKRVTGAMDWWPLPWQAPRRSPDRLNTIDSDVAYDRQAANAGELICANRKARGYGGQPPGLFPSEDLLPRSVIRSLVSTNRNDGVDLGARPSAGRLLVEGMMSSVRRSVWAHCLSTDWIDAPSAGRRVLSAINAEAARRYGPYVRPSPLAYVMGHGPRGSSESLPERGAQGRAWTRVSTRAILKPGSSPSCSGGGRKKLGVAGTWKRKAQRLCD

SEQ ID NO: 55511 - protein, 108 aa, Zea mays
  Coding DNA Sequence Number=SeqID_12136
  Homolog annotation: Hit_ID=Q2QVF2; Match level="QueryCoverage=87%, HitCoverage=9%, E-value=1e-07, Identity=34%"; Hit description =Transposon protein, putative, CACTA, En/Spm sub-class
MLLTNLFWELSLRYAQSRAYRFYWKDLGGEHPEDKPNLSISLFPYGDKQPPGTVLCGYYVCEWCRVTFHYMVNREDVPKSKINAEWLERDMVSVGVAKVVKDLLYFTP

SEQ ID NO: 55512 - protein, 321 aa, Zea mays
  Coding DNA Sequence Number=SeqID_12137
MQATADEAEMNVVLSMLASESSESAHTESASVAAGRAFGEDEGACSPGGARQKRLYQIGYSVVSAEGKKRKIRLQHLSELELGADSAALVLGANPASANLEDDIESYGGTRIGGCVCDEDEEDEEEIPPLVRKSRRSKTNNDVQNSGSVRAEVPDDIPLARKFVGQEITRTVSHTSSTFEGGLIHVDTLVPDVTCKGYLIPVGTIEDTSAPEGAVEGDPAPEGASEVLTNLPTALVGPVTLEVSDLSAGNPLHAVGAEVPLVVALGMSSNHPLGLESALNITSAKYPELCVGSVKVLRCPYPRSSFILVAEESSPASEIHR

SEQ ID NO: 55513 - protein, 216 aa, Zea mays
  Coding DNA Sequence Number=SeqID_12138
MEELDERAFLFVIEAGTDDCGLVFITESKVDSFSFFSRPHRGRGRGFTRRDCKVFLHQLAINLCGKGYRGPRSESRLNGTPKAFCGTLEVSADGDDPLRSWHFEYHIHVVRGGHEFRQPWSPNNGVVPAIEARHLKPQELSSVVLWGSKGDRHVDVPQRVLPLGQHNAKERSIRLSEIIDGDPQGLKRSGKGDVDVAATIHQYLLNPVFSDHRVDK

SEQ ID NO: 55514 - protein, 764 aa, Zea mays
  Coding DNA Sequence Number=SeqID_12139
  Gene Ontology: Mol. function=zinc ion binding; Cellular component =intracellular
  Homolog annotation: Hit_ID=A3BTQ6; Match level="QueryCoverage=31%, HitCoverage=32%, E-value=1e-62, Identity=54%"; Hit description =Putative uncharacterized protein
MPTSEQKGEERWDKVMRVLDRLDSRLEAMEVKAEGSARSYVQRGSSSAEHPSFAWSEEVIALPRCFGGSGYSVFDETSAEKVVWDEEVLLRSDSLDFWQRLAHGMGNQMPNDCKQDVVPDAPWLFVGMSQQVSTYSISSEMGLTVAWDGEMQAETHTHEGLLQQLAQGEEALKESAKKEGDVEDEATAVVMNGGNRDEFIPASVVSVLEDDPKQDAENVDATSAGGILSQELAPESINETNGAGKIVGVAWVDDHEEEVVGSDIHEAMTDEVDEEEGCFEGFSAIRIHDEDMNLKFLLCGVPCTLDACLLGTLKDGLNALLNIEICASKLQNRASAHPPLQAEDLSHGVATMRSEITTCSSAHVAYFVSGSAQTCFGDQLLGSRIKNEIIEKRQLVCVLLNNEDIKPSSFEPWPSMGVACEASTFEVWITMQKWAAQVLKHLAPEISYRSLVALGIAWINGIPVSSFGRQDADQFIFFCSNQCGDQAILNGSFAHVSNWAAPFTKDNFMLVLYEACTGQEVRLECKNVLLFEGRQNKGSFRHGISELTQWWLNGFSPGNGAMAVQSQPYTQQKFMNKLMGLQFRMVYDRGKEKIATDAFVQDLWPRVTIYIPYGNVFSVQKDKTRRLPQFWVGRSSTFSTKLIRSFHDSMVWECSVSAAEAWWIGLQTMVEQFGEQWSVTEQEKEEQQYLFAIQDHPRLWKIGGCFPYTARYGYNNVVLVVLVLNGIVDLVGATWIQLKAMCLRRNFHMLLLEGKQVLQQGEMS

SEQ ID NO: 55515 - protein, 340 aa, Zea mays
  Coding DNA Sequence Number=SeqID_12140
  Gene Ontology: Mol. function=DNA binding; Cellular component=nucleus; Biological process=regulation of transcription, DNA-dependent
  Homolog annotation: Hit_ID=Q7XSS9; Match level="QueryCoverage=93%, HitCoverage=61%, E-value=2e-55, Identity=42%"; Hit description=Auxin response factor 13
  Pfam annotation: Domain name=Auxin_resp; Domain location=246-322; Score=15.5; E_value=4.9e-06; Accession=PF06507.4; Description=Auxin response factor
  Pfam annotation: Domain name=B3; Domain location=120-224; Score=58.1; E_value=3.1e-14; Accession=PF02362.12; Description=B3 DNA binding domain
  Pfam module annotation: Pfam domain module=Auxin_resp::B3; Domain location=246-322::120-224
MATQQPLPPADCVGDNTVDRDVWLACAAPFSRIPTVGDEVDYFPDGHIEQHLSAAPQPLPAQHRFHCTVTDVSLGVDDKTDEVFAKISLRPRPGRAAAPPPGPGGSSNSPAPSPPQKLRYFTKELSQTDVYARFRIPLDNEHVLPIPMVDTDGVQRQDVVMRDTSGKSWRFSKTYSVNPSKQHSLTTGWLDFAKAKRLAAGDKIVFMRRPNGDLIVGVRRLDVPRYPLFDFQGPDPDQPAQDVMEAVRLAAAGRPFTVTYFPRQAAVEFIVPRSEVDDALATSWEPGALVRMEVMEDENRQYTMWVVGRVEAIRQNIWRMLEVLKLSSRLPSIGLMTFTP

SEQ ID NO: 55516 - protein, 210 aa, Zea mays
  Coding DNA Sequence Number=SeqID_12141
MTGMVQMPAEMHVRPGLEKRERNGNLAQEVQMLAQKLENELQKLTGREKQCARFSFGVENDELFQLKEQLEKYKEEAQANKNYMVHVHVSHLVEVQKIMLYLDCQGSSSYLETESEILEGTYKYSSIGGHFRLDHNILSGNKIMYCLRASVRLHIRLYHLFLVHCDPGRGDPEATCANQVLYECLRQELGRQWVFFRLIVLLCEGLNSRT

SEQ ID NO: 55517 - protein, 238 aa, Zea mays
  Coding DNA Sequence Number=SeqID_12142
  Subcellular localization annotation: CTP_CleavageSite=20; ConfidenceScore=5.08e-01
MALACSPSAVPSNVASVTTSASAYLCYAERTNDSNLQHLEVVSGTVIRGTPNTPKHGWKTSSKQTVKTGRNDRSHFAPLLIVLIEKQHDSPRFDYCANHQGKTNNSLGFSLGLGRRSPHRPIPGLSLSLSLGLGRRSPPRPTPGLGLGRSHDLTRPQPQPQEKSPPRPTSASDQPRYREYIFSLPLASRLRLRRNKTGVTSRLLRQQLSTKAKKRQQDPGPHRQLRFYRAQALLRRPR

SEQ ID NO: 55518 - protein, 172 aa, Zea mays
  Coding DNA Sequence Number=SeqID_12143
MAIALLIQPLKGTTVITEKPLQIGPVTHFSVRGLLQWVESHVGLQVSEIDEGWSEGRDGGSLARRWGTGETTGRGRDGGSQAKRRAGKGAAGARLGHGAGTAWARQGHGLGAAGARLGRGTGHSLGVGTAWVRAQLRRRGARLGRGCGGAAAEQRGLGHGGSTVARRGRGND

SEQ ID NO: 55519 - protein, 539 aa, Zea mays
  Coding DNA Sequence Number=SeqID_12144
  Pfam annotation: Domain name=TSC22; Domain location=248-308; Score= -0.5; E_value=0.046; Accession=PF01166.9; Description=TSC-22dipbun family
MCSHYYVAYPQFEVAEDDEDEGALWCATRMSSGRDLVEEFIGYGVWPLAHAWALGKVCPREMPSLGGQRWRGTVKTLRRNVGRSSGSRILCARRKRRGGARRLLPLAVANRCRLRNRPAPGHGKASASAKAAASGGSKPPPGGLVKGRGPLLPAQRIADFGTDISVDDYLFGSGEGQLVVVPPPVVTTSPTAVVGAKGATRDPWATFCASGEILSAAAAKDVAGSMSQRLREASQQLSQQLKQAADFADLVASGALTADVAAEVERLRAQHADAVREKSAAERKNRRLSEKVAAMEAEKTDLWRQLAEERREANKAIADAQAEAKAVRAEGSLARQRVEELEARFNALRSRVDKAESSTRAEVERMHAQFVDAYRQLGAWTADFEVPGQEAGLRFLEWLQEELLVLPTIVTGFMSFASLVTCEGAMNVLSREWCRHYEVFDQADDNFEREIFKMAHAEDIEDLVSLDGALPEATEVDPVPPSYAGEGPSVTPALPATGEDPAPAPAPTSEGALKVVAEPAAEPVAEDPTAAVGPSHVAE

SEQ ID NO: 55520 - protein, 58 aa, Zea mays
  Coding DNA Sequence Number=SeqID_12145
MDVADLRTARPSPVRWTDNHTPTRQQVAVCLLRKAGIGKGDISKEPFAAKETGPEPSY

SEQ ID NO: 55521 - protein, 47 aa, Zea mays
  Coding DNA Sequence Number=SeqID_12146
MWEDLDDFRAHFLNFQLEDEQAFEAGRDVMYGSFDCEYIADLLPIYP

SEQ ID NO: 55522 - protein, 177 aa, Zea mays
  Coding DNA Sequence Number=SeqID_12147
MAASMRAPLRRGPRLRPPTGGDNEAIKAKESEARRQVALMVSPAKAATSAVGSLTSGGDHLSTDNSGHLCTGDLPTTATASARAKRSLLPSSYGSEDKTIQERGRHPRGVRHLVRPPGRRRNSVTGGAGDAVDVANLRTVRPSHVRWTDIHAPTKLQEAAPEVAPKPSRPRSQARGS

SEQ ID NO: 55523 - protein, 94 aa, Zea mays
  Coding DNA Sequence Number=SeqID_12148
MDTSTPLSVYAISIHILTSTVGATSTRPIEHRSIRSPGIDPTGSLDYSASKADQSGMADSLANKAGQTAPGADRPPPESGPSAPHQEASNDMPT

SEQ ID NO: 55524 - protein, 154 aa, Zea mays
  Coding DNA Sequence Number=SeqID_12149
MTPHTRVPRSEQSPEKRREIVGPRKNDLTIYWALGPFVRSFTLLVDPGDIYPPQAPDLWVNLEDSEIHWVHRRCTRMGVAPEFRVDFRKTIYPKVLLRNYFHLCFCILVENWPFNLVPCSLEVGTVLAWNDNPWGAPEVHPMGVAPDLQMDFRG

SEQ ID NO: 55525 - protein, 294 aa, Zea mays
  Coding DNA Sequence Number=SeqID_12150
MAERYQLPRSCVPPTTRRKDGGYPPSGGLEGGKTRCIREREGMIAFQGGHPPFKGGSPYLRPQSSWAESSPTHPKDLPYGAGAGSHTSCKPAQSRRSQTAVRGAYNRPAVTSGPPLLPRPAGERAGSHAGGMQPRQLHRHLRHHRASSTAEPIPRLEATQRTTQQRQSGATGPGKGDTPKRILSREGTRLRASLLIRGSKAGPSGGFNSRLRARGLHTHYWSEVRRSAPRKGSTAASGCSGSAPTTDQGFEGWPPKEARGCSRKPGSGHTVDSVNIPARELGTRPYTPGYGQLA

SEQ ID NO: 55526 - protein, 181 aa, Zea mays
  Coding DNA Sequence Number=SeqID_12151
  Gene Ontology: Mol. function=cyclin-dependent protein kinase regulator activity; Cellular component=nucleus; Biological process =cell division
  Homolog annotation: Hit_ID=Q2RAC5; Match level="QueryCoverage=72%, HitCoverage=26%, E-value=7e-66, Identity=95%"; Hit description =Cyclin-T1-3
  Pfam annotation: Domain name=Cyclin_N; Domain location=8-138; Score =7.6; E_value=2.6e-05; Accession=PF00134.14; Description=Cyclin, N -terminal domain
MGSGEGDWSGARCMEEEGADHPDLLRRASCLARMIPDSLRPQVTIATAIVFCHRFFLRQSHAKNDRRTIATVCMFLAGKVEETPRPLKDVILLSYEIIHKKDPAAVQRIKHKEVYEQQKELILLGERVVLVTLGFDFNVNHPYKPLVEAIKKFEVAQNALAQVAWNFVNDGYAKITLHHCK

SEQ ID NO: 55527 - protein, 47 aa, Zea mays
  Coding DNA Sequence Number=SeqID_12152
MASTVTFSFSLSRRCGDEDDGFGYDYGTGCPRCNHCSGEDEAVEEDF

SEQ ID NO: 55528 - protein, 282 aa, Zea mays
  Coding DNA Sequence Number=SeqID_12153
  Subcellular localization annotation: CTP_CleavageSite=25; ConfidenceScore=5.36e-01
AATSFVIMLLFSLPSCLCLRATPFSAENVGAGASSPYSSNTSPDTDPRSGYCTSTRTFHSMRAPSFSQSSDVSFVFPSFALFFLPNLLPPAHGRSRVPTDDLRRGYGVFVVSFSDNEQGGCACSRGLQAFARESLFVGPSSRATTPLYEGPGPSFYRCKERVQGNDVPLVVWSVLAQGRVRRRLLLRPRPGSGEDTIPSEVEVEVEPWGRARRRPPSEAEVEAEPSGRARWGPPSEAEAGAELRGRARRSFLLRLRLDLAVVSLILVGGAVVGARQATLFSC

SEQ ID NO: 55529 - protein, 374 aa, Zea mays
  Coding DNA Sequence Number=SeqID_12154
MGSARVAFVLSLEERNLTEVGTLQPSLGFKDFHQERAGAQPHGGWHPSAIARLQGFSSGSPAAFPHQWSHRTVTISSTVGRSKPGCGLCPALIFKDLHHPCWGGGRGEPEPAFAWAGVPLLPPASGGGNHPPALRRRRPPAMRGKVNCCCLARVQHSVLCPGDCGRLHRGVAQHVVRREGGTRVLGRSRSRVRGEDGSEDLSVRFGAASARRCGVGGQVDAAVGAEVVAAGEGFSADDTVNATHAPGLQLLGFNGWFLSPVRDVNEGLPAVTFALGPLLLLQRLPASHPEFVVPQALRCGGCSYPREWNRSSVCNGTLSAAQLKNPQLLYDEPEPEAAVSAWTEAESVREEASSAREHVASLVEEVQQRQLELD

SEQ ID NO: 55530 - protein, 62 aa, Zea mays
  Coding DNA Sequence Number=SeqID_12155
MGMGGGSEPASGELGVASDFDGSTIEVVRSQLQFRAYILPLQSGYREQSLSVDPLKRVALGA

SEQ ID NO: 55531 - protein, 130 aa, Zea mays
  Coding DNA Sequence Number=SeqID_12156
  Gene Ontology: Mol. function=structural molecule activity; Cellular component=protein complex; Biological process=microtubule-based movement
  Homolog annotation: Hit_ID=Q01G07; Match level="QueryCoverage=50%, HitCoverage=11%, E-value=1e-25, Identity=83%"; Hit description=TBB1 _VOLCA Tubulin beta chain
MPFLVVMQLSSSLSPPSQRIPPPRCLICDDHGIDHTGKYAGDSDLQLERALVYYNEASGGRFVPRAVLMDLEPDTMDSMRSGPFGQIFRPFGPTAPSAAPPPPSVRDLDPAPIISASSLPARDPDPAAPP

SEQ ID NO: 55532 - protein, 137 aa, Zea mays
  Coding DNA Sequence Number=SeqID_12157
MGKSKKGSGSSPRSGDKHKHEPTPPSEDFGDSEYSEKEFSSESEGSLAPVSPPASSDDSDDSQGIAAEVWTYIQAVERSSDEEDSSDSSEEDNSGDGGDGGDDGGDGDGGNDGGRGDDSGGKGDHDSGSKGSNKTSG

SEQ ID NO: 55533 - protein, 216 aa, Zea mays
  Coding DNA Sequence Number=SeqID_12158
MDLPFIIRSLPERGNQGTNFFSRGSHSKAQTAITGGFDTKRVKALGGGKFQAEYATGAPTFDTLPLRIISSRFTKSAEGILLLDRIGIQMGQIKMVEIKEAAEKGRNGKAKAAEKERSINHRLMGILSWDSNPMANPPRAEFPRRKNPDGHEVEKFGLRDDRHVVTCERQLAIGVDWRNHHGRRTRGFPLGCHLDSTGEQSRRRIAERIRKQESKN

SEQ ID NO: 55534 - protein, 122 aa, Zea mays
  Coding DNA Sequence Number=SeqID_12159
MDVTNSRSTRKVNKIVIPNKINAPHHILHLDHALDPLTWQALRSNGLDESDMGDGGGVGPVARLGGGGRAWRIWNKREQTPSPGARFTAVRWTSLAQAMVVTQAKWRGREEEAVTPDFGGKT

SEQ ID NO: 55535 - protein, 112 aa, Zea mays
  Coding DNA Sequence Number=SeqID_12160
MPSTLCFGGIHCVPCTDVTVLKNILIIPGRPPQWVWARDGLRSELEGSDESEYSSDEEDSDGAGEDEDGDDDDNEGGGDGDGGDGRGGSGGGGSSRGSNKGGSGGGSNRASG

SEQ ID NO: 55536 - protein, 64 aa, Zea mays
  Coding DNA Sequence Number=SeqID_12161
  Subcellular localization annotation: CTP_CleavageSite=37; ConfidenceScore=5.41e-01
MEQRKPKTTLVWRTGVSGVPPDSVRTGLSGVPSGATVASATVEFNGRLTTLQCADCARRSQSRR

SEQ ID NO: 55537 - protein, 115 aa, Zea mays
  Coding DNA Sequence Number=SeqID_12162
MDEGCTQSLSSDPMIYLNTTIFFLIADVYLCEESPQVRASHLYNIDHNENHNTKPTVAHAVPLAHRTVWCGLVTVGSSHTSPVDCALIALPTIGADDVGSPDSPVNFSRSVLGDS

SEQ ID NO: 55538 - protein, 230 aa, Zea mays
  Coding DNA Sequence Number=SeqID_12163
  Gene Ontology: Mol. function=methylcrotonoyl-CoA carboxylase activity; Cellular component=mitochondrial matrix; Biological process=metabolic process
  Homolog annotation: Hit_ID=Q2QMG2; Match level="QueryCoverage=48%, HitCoverage=15%, E-value=4e-51, Identity=84%"; Hit description =Methylcrotonoyl-CoA carboxylase subunit alpha, mitochondrial precursor
  Pfam annotation: Domain name=CPSase_L_D2; Domain location=41-228; Score=68.7; E_value=2e-17; Accession=PF02786.8; Description =Carbamoyl-phosphate synthase L chain, ATP binding domain
MAEGCDPGQCGLAASSEEASVAPPVAALDSILKKLIVSLYRGKAQPRMAMVAPSALTGRTWYIGADQDVELLKLEANKISYPVLIKPTHGGGGKGMRIVEKPDEFVDSVLSAQREAASLFGVNTLLIEKYITQPRHVEVEVFGDQHGNAIYLYERDCSLQRRHQKIIEEAPALGHAHLVTETHRRLLELNPEHGRRLGASPIRCLCLLLAAPAAAAAAAKAEAAADPSVM

SEQ ID NO: 55539 - protein, 94 aa, Zea mays
  Coding DNA Sequence Number=SeqID_12164
  Gene Ontology: Mol. function=nucleic acid binding; Biological process= RNA splicing
  Homolog annotation: Hit_ID=Q5JN45; Match level="QueryCoverage=63%, HitCoverage=13%, E-value=5e-15, Identity=66%"; Hit description =Putative Ser/Arg-related nuclear matrix protein
MTNITILPVEGNFGEVVNAELSLDRMVNLPRGHGYIAFKKRADAEKALLYMDGRSTGATCAQPTVTRLPQTVRCATGLSGVPWDQRMAMVGFAK

SEQ ID NO: 55540 - protein, 194 aa, Zea mays
  Coding DNA Sequence Number=SeqID_12165
MQDVARRALSYYCSVLGGVADGLNLKYYPRRPSGSIGGMIVSPVGEDNPRLSSTINLAVVLNTELDHALDELSRARAEIALLRAERVERRHLDDGSPAPVGTQHPYRSPRRGHQSYGNPDYVRKQAQRRKACSAGASCSAGGSTPATAAAAPAPDVYRADVPDADPGSSSHRSDSGRHSAAAAATTSASDALDA

SEQ ID NO: 55541 - protein, 126 aa, Zea mays
  Coding DNA Sequence Number=SeqID_12166
MVLVKPGAVDAGRGRGYMVEGVAVFAMERGSRIGAAAAPAPDPYREFHFRGPGGILLATRGVSSGVLGWPMLQAEVAFARVFQLCALLEGWPLLQAKVAFALHQRDLPLEVLGLLLFVAYHLPHFG

SEQ ID NO: 55542 - protein, 192 aa, Zea mays
  Coding DNA Sequence Number=SeqID_12167
  Gene Ontology: Mol. function=RNA binding; Cellular component =ribonucleoprotein complex; Biological process=mRNA metabolic process
  Homolog annotation: Hit_ID=Q9LGE6; Match level="QueryCoverage=45%, HitCoverage=59%, E-value=1e-46, Identity=100%"; Hit description =Probable U6 snRNA-associated Sm-like protein LSm4
  Pfam annotation: Domain name=LSM; Domain location=5-71; Score=76.5; E_ value=8.8e-20; Accession=PF01423.13; Description=LSM domain
MLPLSLLKTAQGHPMLVELKNGETYNGHLVNCDTWMNIHLREVICTSKDGDKFWRMPECYIRGNTIKYLRVPDEVIDKVQEETSKSRSDRKPPGVGRGRGRGDVGAKPGGRGIGRGQDDGGRGSGGRGRGGVGAKGGNKVGWLYWGTNQNGSCDLDTEDAAATRLVAIPQNCLVDILSMIQFVHLLRVIPVR

SEQ ID NO: 55543 - protein, 115 aa, Zea mays
  Coding DNA Sequence Number=SeqID_12168
MAGMYCNARDCLNKRMQPPARTAARILLSPVDKAKGSTRKKDRERGIPRKGSFSAKEPGSEPPITDQGFEGWPPEGSTVASHRVGPTPTTGQGFEGQPPEGLHGRLRLLGLRAHY

SEQ ID NO: 55544 - protein, 127 aa, Zea mays
  Coding DNA Sequence Number=SeqID_12169
MSGGAPDSLVRQTREHYSISERDSAEAAMQDVARRGVIVSPVGEDNPRLSSTVNLAVVLNTELDHALDELSRARAEIAQLRAERAERRRLDDGSPAPVGTQHPYRSPRRGHQSYGNPDCKTKINLEP

SEQ ID NO: 55545 - protein, 47 aa, Zea mays
  Coding DNA Sequence Number=SeqID_12170
MFGLQVAMRLMVLGFDSGNGCPHCNHCSGEDEAVEGDFQEFQDYDDF

SEQ ID NO: 55546 - protein, 234 aa, Zea mays
  Coding DNA Sequence Number=SeqID_12171
MAGQSSHLEGLHHRLHEEQEHRRQEQQGSSFSLQQEIESVRSCSPVLPLEAPPAPPLGALASGVAAGGDPDDGGGDDSSSHTPTFLLTRSRKDGLLDPSLAMLLVGVTSTMRSTPCYVGHLTGVLGLSKHYSISERDSAEAAMQDATRRALSHYCSVLGVNLAAVLNTELDHALDELSRARAEIAQLWAERAERCHLDDGSPAPVGTQYPYRSPRRGHQPYGNPDCKTKIDLEP

SEQ ID NO: 55547 - protein, 127 aa, Zea mays
  Coding DNA Sequence Number=SeqID_12172
MNECVALVSNNTSAIWESTGNIPTIMPGAETHSALLGHWGLTAARLPSSDIALPNGLALHSGNMLCFQPELVLPDCSVGLLGQEDEVPADSASETDLLLTDCSDDSDTGAEDTAFGTADAEVDASSA

SEQ ID NO: 55548 - protein, 200 aa, Zea mays
  Coding DNA Sequence Number=SeqID_12173
  Gene Ontology: Mol. function=transferase activity, transferring nitrogenous groups; Biological process=biosynthetic process
  Homolog annotation: Hit_ID=A2ZEQ2; Match level="QueryCoverage=31%, HitCoverage=20%, E-value=2e-22, Identity=61%"; Hit description =Putative uncharacterized protein
MVAINTFLSRVVKFDHKDKQLAPCPFEVTILAGEAWQNKKRQRIGDTLDFEIKRWSTGKQGNLRFVINFTICELMILLIHPSDKKLRAGTSLPGLVAAKVGVDVTLTDIAQNAEVPKNLLASARIVISSGQSSRRWVFEVLGDNDSPVMPIMLYNPAKIPAFSRECLRQKVISRVGDLVGIKYFPAETPKIAGADHDKLE

SEQ ID NO: 55549 - protein, 40 aa, Zea mays
  Coding DNA Sequence Number=SeqID_12174
MANIASSGPKHLSRTSLTVRRDMPNTEFVKRMDYAPTFLK

SEQ ID NO: 55550 - protein, 238 aa, Zea mays
  Coding DNA Sequence Number=SeqID_12175
MAGSRDSSEVSPSNIIEPTWDTLPADEQLQFEEHKEQMIQEAKARFLANFKVDRNNKVVRLRATDPASLRPTPDIPNPRGLISSLFASLPDRRPAQPPPCRTAARACPCPERRQRGRPRPSRPVRARRPPPPEPPRLSPAALPEVALPDRRRVRAPPPLERLRPARGRPAPEATLPEAAPPQRRRRPARAPSARPGAPPLPPECHHKLPSSSYPEHRRPQPVVIHRSLVPRRESVTEV

SEQ ID NO: 55551 - protein, 174 aa, Zea mays
  Coding DNA Sequence Number=SeqID_12176
MLGVRGARELVVALGRQRRCSGAGRRRSGGAAAALGRGGLGQGGLGGRATSGRAEALKRRRCSDTAPVGQGDLGQGGGAQAGRLGRGRPAGSDGAARAGAASLAALGAGAGSGGGPAGRRLSRAAVGQGCEQRRNEPARLRPGSKKINPRRLIYRADGNYLIPVGQSTGPTGIS

SEQ ID NO: 55552 - protein, 145 aa, Zea mays
  Coding DNA Sequence Number=SeqID_12177
MGKSKKGGSSSHHFGDKRKREPTPPSEDFGDSEYSEEEFSSESEGSPIPASSLAPSDDSDDSQGIAAEVWTYIRAVERAGLEGSDESEVSLDEENSSDLFKEGGGDGDGGDGGGGDGDGGGSSDGGKGGSGDGGDGSKGSNKASG

SEQ ID NO: 55553 - protein, 184 aa, Zea mays
  Coding DNA Sequence Number=SeqID_12178
  Subcellular localization annotation: CTP_CleavageSite=59; ConfidenceScore=5.15e-01
MDSTSEKDVPLSGSTLLCNRFRISLSPMFCNVCKTGETFLTRTTVGGPNYLGGFVTTPTSEREKQNLVPLKANEKGSNFMMRKTLRLKKAQLTLMKVMVATMMMVAMGTMETMMMVATGMVEVMMEHMVLEVEHMVLELEHMVVGAAMALKIQVMEHLIRNDVIQFADLLMMVPTVHSTSVTTA

SEQ ID NO: 55554 - protein, 41 aa, Zea mays
  Coding DNA Sequence Number=SeqID_12179
MGAGGAEGEDGRARRKSYFRKFGLWSLFRGYGFWINDPRFF

SEQ ID NO: 55555 - protein, 97 aa, Zea mays
  Coding DNA Sequence Number=SeqID_12180
MGSARVAFVLLLLEERNFVEGRRRSSALAEGADFDNVGGRSAASVVSSSMPGSLAQLALAQLPVAPPTGGRSVAICPPYGWLLCRVHRGTAQDITRC

SEQ ID NO: 55556 - protein, 215 aa, Zea mays
  Coding DNA Sequence Number=SeqID_12181
MQAACNCTTGMHPFDFDASSMEAQAHTSCNRRAGYYVRKTVPPLTPMPRLLDCGTGAATRGNPTHGPIVPTKCIGHGSVSRGRRRDGQYGQKWAGSNGGSRRAEATVKASGGSRPLLEQRGSPLPRREDDAPVFRPSNDSRTHNGCPPNHPSRRINSVAGQATPLGGTEKGDTPKGILLREGSGPRALLLIRGLKAGPSEGFDSRLRALGLRAHY

SEQ ID NO: 55557 - protein, 103 aa, Zea mays
  Coding DNA Sequence Number=SeqID_12182
  Subcellular localization annotation: CTP_CleavageSite=66; ConfidenceScore=5.53e-01
MVPDGEQTGWGKGPTAPPSVCACRPLLLDASRRGSAFSVLRLASLVPRSPDSPSATSTSWATGSTLAFQLGNIFDRGVDELRLLHPLRLLVPSAEARVGAFLP

SEQ ID NO: 55558 - protein, 207 aa, Zea mays
  Coding DNA Sequence Number=SeqID_12183
  Gene Ontology: Mol. function=phosphoenolpyruvate carboxykinase (ATP) activity; Biological process=gluconeogenesis
  Homolog annotation: Hit_ID=A7PB84; Match level="QueryCoverage=33%, HitCoverage=21%, E-value=2e-18, Identity=68%"; Hit description =Chromosome chr16 scaffold_10, whole genome shotgun sequence
MDMDKDLQNILSKLRDQYQYCLYCGCKVMFHLSSISCTYVQDGAIGSSAEWDAKVRGISDNPSAVMLLSNVLWKIPDRAISHDTSPLTIYATSSIRILGFGGSTVSLFAQVEIMMSCLEIHNALLSIDYGAVISSNRRDFFVSIDGIIVTVLQAPLAQIAKNVLHVLELEVGFVEHVAKALLYSFEERNIICSARTNCIQPVVDAIE

SEQ ID NO: 55559 - protein, 332 aa, Zea mays
  Coding DNA Sequence Number=SeqID_12184
  Homolog annotation: Hit_ID=A3A6K5; Match level="QueryCoverage=94%, HitCoverage=84%, E-value=2e-53, Identity=44%"; Hit description =Putative uncharacterized protein
  Pfam annotation: Domain name=PB1; Domain location=31-130; Score=59.4; E_value=1.3e-14; Accession=PF00564.15; Description=PB1 domain
MALRASVALPDVCCEILVCCLSFGGRILPRPGDRQLRYVGGETRIVSFPRAAASFAALVAALAKAAPALFAPGAPRPSLKYQLPQDDLDSLISVTSDDDVDHLVDELDRIHDLSANVARPPRLRVFLFAPAPAPDAAFGSVLSGTAGDAAPSDQWFVDALNAPAPHPIERVRSESSSIVSDVPDYLFSLDSPSDDPSPGPSAARAKSDATETPHHHGDDVPPSARQIPHVAGGASSWPAPPPPYMAQPMYYFPVPPPVHYLDQSAQSGYMPRPIYHIVGGGGSEAPGGDLHAAGGVYGVSHHMQGFPPMMYAPPRAVIYNYKSEGMPSLPPE

SEQ ID NO: 55560 - protein, 353 aa, Zea mays
  Coding DNA Sequence Number=SeqID_12185
  Homolog annotation: Hit_ID=A3BP95; Match level="QueryCoverage=19%, HitCoverage=33%, E-value=4e-11, Identity=57%"; Hit description =Putative uncharacterized protein
  Pfam annotation: Domain name=DUF212; Domain location=260-353; Score= -44.0; E_value=0.0068; Accession=PF02681.5; Description=Divergent PAP2 family
MHLTLHQSCCPWRKRASGTTFRAHVHCPCLPHARPTQSPTALRNPLPPAVIPAAAAVALRNLCLDKDRGRPPPSIIRTCVAIAPSTPATATRRFASGLAAYDLEVTEPAGSMTTTVTPEAKMAAQQQAPASRSSSRPRRRVPIPAGPRYLRRPLDPAGAGGWMAFVQSVVSNSDDEEDFIIDSRHGQASWLGGRRRTPPLPPQFFRLLAGLSSALNKRTKTMPMRGVDFKCISSGAHIRSHNLSLQHKLVKAIKDAGNIKDVFTREIWRLANARGETIQGETIMYKENRWDAKQLVGSGGMSSSHSATVTALAVAVGLQEGFASSLFATVAVFASVLPIVIQTIIVNLRLCQL

SEQ ID NO: 55561 - protein, 82 aa, Zea mays
  Coding DNA Sequence Number=SeqID_12186
  Gene Ontology: Cellular component=membrane
  Homolog annotation: Hit_ID=P0ACG4; Match level="QueryCoverage=60%, HitCoverage=100%, E-value=5e-20, Identity=100%"; Hit description =Protein hokC
  Pfam annotation: Domain name=HOK_GEF; Domain location=2-51; Score =103.1; E_value=8.8e-28; Accession=PF01848.7; Description=Hokgef family
MKQHKAMIVALIVICITAVVAALVTRKDLCEVHIRTGQTEVAVFTAYESELSGILSHEWPPRFRLNYSSFSTILAEQSGFTD

SEQ ID NO: 55562 - protein, 148 aa, Zea mays
  Coding DNA Sequence Number=SeqID_12187
  Homolog annotation: Hit_ID=Q2QWB8; Match level="QueryCoverage=70%, HitCoverage=12%, E-value=8e-07, Identity=31%"; Hit description =Transposon protein, putative, CACTA, En/Spm sub-class
MAHRRVFLGLASPSALGTEKTSLPFDLNGRMQYMDDKKKQLKTRFLDPLMISQARYKEVARRHGEEYKDLDDAEFEKAVKQNQRKKMKDGKFVVFDSLRMEKATYNDFLKILENAYRFYWKDLGGEQPEDKPNLSISLFLFPIEATSR

SEQ ID NO: 55563 - protein, 57 aa, Zea mays
  Coding DNA Sequence Number=SeqID_12188
MPAFPTIQLAGDRARPPRGPPRDNEQSEIPECVVGDLPEQQPGEGKSPLTYYVLHTL

SEQ ID NO: 55564 - protein, 115 aa, Zea mays
  Coding DNA Sequence Number=SeqID_12189
MYPPSYQVKLVGYSSFGYPLPSLDGAVSGRAGLHPIHRADRARGIRRLGGGELLEDSEEEGDGGGDDGSGYEGSDEGGGGGNGGNTDDSGVGGDDESGVDKGGGDDNVGGGAPPA

SEQ ID NO: 55565 - protein, 365 aa, Zea mays
  Coding DNA Sequence Number=SeqID_12190
MKILEAEWWWKDANPHRVAPLQRQQEEDKISDTTTSARSAPVKSPEETTLTRIPPENTGAPHLEAQKIPPLAPLKRHGGSLPQRTPRIPPYDTGARPHMSYRPTLRRSVQLPYGYVLLHFRGNQRSGRRTAAQGACNCPTVRYPFVFAAPSGQRGEPPRKKRTTVLQLCAPSAPPQLAVQRGGPGPHDMPVSRGIGAAVGMAIGGPTVIAATGVQEERSNRQSDSGPTCRLTSSPEAGPGATVGTLNQGGPVLTRVWAMPSTSCSGGDPLLVAHDISYRAEPDAVSRSSSRRRACWVCWRTVPLCQAAQCNQHPSYKKLPLYAKDTQISSVRDEKIVSTTGISSSKAGALRHSAGDFLSDSDPID

SEQ ID NO: 55566 - protein, 222 aa, Zea mays
  Coding DNA Sequence Number=SeqID_12191
MTTGLMVERSEPGCGLPLPSASRMFTIRAGEEAFGGEGRSSSSRRRRTLGTLGRPSVAPSAAACLAPRPGLLWCRLRRCLLPLGRSVAACPPHGRRSHRAQVGHIHGFSRATSRTGRSYKTSYAVRVEAVFLDGLVLTPVVRTGAKTSSCALVQPLPIGAEVVAATGGADVAASAGEAAHCRCGCLCWRDRQCHLPLDPWLFGFNGLAVTPCRRTGARTYSQ

SEQ ID NO: 55567 - protein, 108 aa, Zea mays
  Coding DNA Sequence Number=SeqID_12192
  Subcellular localization annotation: CTP_CleavageSite=83; ConfidenceScore=5.52e-01
MEPTRQPVRPFGRSLSLARGPYPLDPSSSSGTTTPMVCALSARPTPTSARPAHVARTLGKAAHTPSPRPYLTFVFPPPSHSPSCEAVSPSSLLHYSTVTAGLMPALWP

SEQ ID NO: 55568 - protein, 302 aa, Zea mays
  Coding DNA Sequence Number=SeqID_12193
  Subcellular localization annotation: CTP_CleavageSite=48; ConfidenceScore=5.00e-01
MARESKPGYGLCPSLSLKDFHHQCWGGDCRVPGSRTRVASEPLPAPPSATAAGRGSSADEIAGATHGPTSNSTAFCPSLPHEFGHGRGPHGSSIRPEVIAAVVRPSGAEVVVVAAAGAGDGEPFVGLLLLRRPPNRVGLFVPGEESLSSVDLTVRGFSCLVKGTPRPLFDEPKPGVAVSARTEAELARKEDLVGRSLAGSSVSGTDAGVDLPRPRAGLMSSGDSWPRPRGDQPSRLLEPDSWRRPWRRWPGHDDDVVLQSGDPRTASPSEARPDLAEGVVDAVGAAAPFNRQDPSLQDRIIL

SEQ ID NO: 55569 - protein, 681 aa, Zea mays
  Coding DNA Sequence Number=SeqID_12194
MDKDRQGAAQKRQAVVRLHEARPKRQRGAAKAAAPGGGKPPLAAKSAVPASSKAAEAAAGAGGSKSVKTVPPSSRAPEVAKAARGLPSLGKRVADFATDISVDDYLGGLDEGQLVIVAPAAATTAAAVVPKAKGGALSAGGEMPALAAVRDEAGAVSRRLKEMKEALSQRLRTQHADTVREKSAADSKCRKLADKVAVLEGEKTDLRRQLVEERRDANEALAKAQAALAEANLARAEGSLAKERAAQLEERLNALQSRVERTEATVRAEAERTRKQLMDSYHELGAWTGDFEVPDREPGLRCLEWVQEELQALPTIVEGFMSYASLVTCEGAMNALSREGCRHFEVFDQADEDFERDIYKVEDPIVKESAGAIYDRMWGPHGREVVRERAETARAQAARGERVDDFGALNSVLPDPESNPAEAVSEVALEPPPETAEGAPDAPAAAAAGGGPPPETAGGAPDAPAAAALRAEDPATVAAEAPAEAPATAGSSQVQDFGPVHATATTNFLAASTVDGGNKYDGSASEFSDFADSGSSVEWTEESSEEDLDYFAALDVAAAEASPHATDTEDVPGPSTGRRRRRAVAKRRVSGAEGGRLRACMMKLCALAHLAMLAEALRAWSGVFVTLDWCVYSRSWRGKFGVVVFAFVTPRPAVPSGNFCADSFCSGLRFFALAVLVRLHP

SEQ ID NO: 55570 - protein, 117 aa, Zea mays
  Coding DNA Sequence Number=SeqID_12195
MARIRCTARKLVIPFLPSRLAERPLRRTVIGQSSHLERLHRRLHEEQERRRQEQEQQDSSPSPQQEVESGRQPSPAPQPEMPPASPQGIPAAGGDPDDDDDDDASGSLSHNTELLEE

SEQ ID NO: 55571 - protein, 238 aa, Zea mays
  Coding DNA Sequence Number=SeqID_12196
  Homolog annotation: Hit_ID=A2Y0R6; Match level="QueryCoverage=94%, HitCoverage=97%, E-value=7e-28, Identity=41%"; Hit description =Putative uncharacterized protein
QSRVPVSAQCMFAMSSAGCKAEPGLLAKQGSKLHAKMLSKEAAAQLAVPSFRVYYSMASAGAVPFLWESQPGTPKNDSPSAAVLPPLTPPPSYYAAGRGSAGGRSRNRRHGGLLGVVLPRITLLRRPGGSQATPPCSSSSSSWSSSSSNTSSTMSPVFTVQSSPAVHVGASCRHHRPAFSAGGADDVAEATPRCFWTERECCERRVVRGCGVAVAVRNALATVVGGKTSRRAATSAAV

SEQ ID NO: 55572 - protein, 140 aa, Zea mays
  Coding DNA Sequence Number=SeqID_12197
MALGIGRWAPAWAAGRARCMAASMHGRWPLGPLESLDAVPGSGRVAAGPLDATPGSGRARCMAAGGGWRRRRAAADALGVEARIGDGLTRGKTRILSVHMKNIGRAEKTEHWPLGVDVWLIDDPVVSSGSWRISSDGCSL

SEQ ID NO: 55573 - protein, 164 aa, Zea mays
  Coding DNA Sequence Number=SeqID_12198
MGVWRMLEDSISSKISTYARLEMPEDHATLTLIRGSCVTSGIAVYRGRNCVQCKLSEAGIRSRYAPRPPLCLSAVVITRSRAVTLIIAVWWWSIGPMMMISAQELGSVGAAAHGPGSESQLLLLHGQLPMHQRPRLSGGQLARRHMIKVKWPFLQQVLRMKGVR

SEQ ID NO: 55574 - protein, 271 aa, Zea mays
  Coding DNA Sequence Number=SeqID_12199
MASGLWPRGVGRREDSSSSSQQHPHDSMPTRGFEYSSGVWLVSLHRFKGRCLGRKKSIPIGSLFLCLPIVDMLGFVPLSLCSDPSAEDVLGIEGVHRLHRGSALALPRANLAPGILASASLFVNGRRHSGILRVRLRGSTIFKLATLKLDGKRNSMPSPPCRKSRAAMPPSSPRPARHRRLFPARKMPVVVPVLLPSYERQMEERHARNSLLPLCHLWHRRAPQRHRLLLLPRRGILQGQAAARSAGRQPLLAPQELRVAAGRSRGSWTER

SEQ ID NO: 55575 - protein, 59 aa, Zea mays
  Coding DNA Sequence Number=SeqID_12200
MVYFMKTFMGMVTSKDDIVGFEAPQLEDTTRVVPGQISTTVSACELRSCDYACSLDRYS

SEQ ID NO: 55576 - protein, 92 aa, Zea mays
  Coding DNA Sequence Number=SeqID_12201
MAWHWQARLGSRGAPGAPLLPAARRHLESAAVGVGCVNAAERPGENVEHPEPSTLRQLQAQGPCVRRQHQHKHAHRGSGGRPPYPSEPALRL

SEQ ID NO: 55577 - protein, 193 aa, Zea mays
  Coding DNA Sequence Number=SeqID_12202
MTCGPFRVRCDEARQKEKKKKSRCSRSIDIILEDPLDLWLAANPLNRSVDMHLVKMMLTLILTDLEELEVAKWTGARGKGSEKRGKGNDQERVGKTTLLNWNEGGALKCSDGISIKERKDIKGEIGNSQLSNWVERKGRLLKDKFKVSIKKDESMKDFKEVSIPIPRDKKLPKDSDLTTEEERVSKDRKIMDI

SEQ ID NO: 55578 - protein, 723 aa, Zea mays
  Coding DNA Sequence Number=SeqID_12203
  Gene Ontology: Mol. function=galactosylgalactosylxylosylprotein 3 -beta-glucuronosyltransferase activity; Cellular component=membrane; Biological process=regulation of transcription, DNA-dependent
  Homolog annotation: Hit_ID=Q4VYU4; Match level="QueryCoverage=37%, HitCoverage=59%, E-value=1e-112, Identity=78%"; Hit description =Glycosyltransferase
  Pfam annotation: Domain name=Glyco_transf_43; Domain location=176 -449; Score=-2.1; E_value=2.3e-09; Accession=PF03360.7; Description =Glycosyltransferase family 43
  Subcellular localization annotation: CTP_CleavageSite=34; ConfidenceScore=5.40e-01
MRGLLASVISLDFFLLSSKLKSVCAAMTSQRHSRSQERSKSKGLTCRRVAVHLLFFFMVGIFIGFMPLFSVDVYKKIVSENERLPFHDGVIEVEMMGTKVKELETVVVEKEVELIDEPQVQESPPVPAMLDDEADFAESSPALPAIEESDIPVKKLLIIVTITSVRPQQAYYLNRLAHVLKAVQAPLLWLVVEWPEQSYETAEILRSSGVMYRHLICRKNTTSVRKIAVCQRNNAIYHVKRHHLDGIMHFADEERSYSADVFEEMQKISQSTPSIYMRQIITVRPSPPLQASDTVVAPGSPSSSPHSPWTHATVSLPRSRCIPRNPRPSAMRSRLLLPPSWRSRAPPPRQRHRRDRPLPPRAPHAQPPPRERCPTPRPSTTRSSSPPISVTAFSAVASASTPSPRSTSTISSPRTSPPSSTSAVTTPMGSSSPVRSRRSQQQDQPRTLASRSLMLPGKDHDVHADAHLYNALMKANVAADDPGAVLRVFRQVSVTGTFLVNKEHVESHRWSCMFGDVEVPAEVLTDGTLRCYAPAHQSGRVPFYVTCSNMVACSEVREFEYRDSEAHYMETSRSQANGVNEMHLHIRLEKLLTLGPDDHQMLAINSLMLDGKWSNQESSVKEVVSTARVQSLKKLVKEKLHQWLICKHWGYDWAIRPIIIAGVNVNFRDAHGWTTLHWVASLGRVEGLPQHPFLHRRDIGQLICDDEASSTDFPTPHPPSMRL

SEQ ID NO: 55579 - protein, 84 aa, Zea mays
  Coding DNA Sequence Number=SeqID_12204
  Gene Ontology: Mol. function=acyltransferase activity; Cellular component=integral to membrane; Biological process=metabolic process
  Homolog annotation: Hit_ID=A2X281; Match level="QueryCoverage=46%, HitCoverage=7%, E-value=1e-11, Identity=82%"; Hit description =Putative uncharacterized protein
MTLKQIRGRFSWLVGGMDQVNKLSFKIEFSRDLFMPGCAPLAKISSKLVSNCLFRMGGAVVLLSNRWSDRRRAKYELVHTVSLH

SEQ ID NO: 55580 - protein, 203 aa, Zea mays
  Coding DNA Sequence Number=SeqID_12205
  Gene Ontology: Mol. function=inositol or phosphatidylinositol phosphatase activity; Cellular component=intracellular; Biological process=abscisic acid mediated signaling
  Homolog annotation: Hit_ID=Q6AVN0; Match level="QueryCoverage=44%, HitCoverage=16%, E-value=1e-41, Identity=86%"; Hit description ='putative inositol-1, 4, 5-trisphosphate 5-phosphatase'
  Pfam annotation: Domain name=Exo_endo_phos; Domain location=13-194; Score=-20.8; E_value=0.1; Accession=PF03372.14; Description =EndonucleaseExonucleasephosphatase family
MAERRRKVDGGKMGVAVFGARCTLRYEMDLQFFNIPGNSKMLSLRGRRTSVDIGKSCANGCAGMMENNREHKIALVATGLATGIASACWIGPRCVLPMINQSITNSNHTNQLNIQHASGSVFKGWSEEKIYFAPTYNYSCNSDSYAGETATSKKKRRTPAWCDRILWHGDGIAQLSYFRGESQFSDHRPVCGTFTVEVKRLDG

SEQ ID NO: 55581 - protein, 212 aa, Zea mays
  Coding DNA Sequence Number=SeqID_12206
  Homolog annotation: Hit_ID=A2X003; Match level="QueryCoverage=82%, HitCoverage=7%, E-value=2e-19, Identity=37%"; Hit description =Putative uncharacterized protein
MGGILFELVGPIHISRDPGTIPRPAASLQRCCASDTRTSHYLGLFTPLKGKHTDEVAKSKQSIVSTKTKKKLQRLPDGCHPDFDNDHLCSVNNHDLLPEISTPSVDLHLLPETGVENMRTPKSLHAELKHELLKLNTVLKLPDNVLFLANQFLEYLLNNHLVVREPRSILHAFNIALCWRAASFLKYTELNRRESLALASDGLNYECNEAPS

SEQ ID NO: 55582 - protein, 289 aa, Zea mays
  Coding DNA Sequence Number=SeqID_12207
  Gene Ontology: Mol. function=small conjugating protein ligase activity; Cellular component=plasma membrane; Biological process =regulation of protein metabolic process
  Homolog annotation: Hit_ID=A0EVF8; Match level="QueryCoverage=40%, HitCoverage=48%, E-value=6e-43, Identity=77%"; Hit description =Ubiquitin conjugating enzyme 2
MQFLPFRCVTQVEHLQTRTTGYGSSNPLFGGASSNKNNRIFFFLHAIPGMLLALVLFFDNRKFKDVNFPPAMSPPKRWDHVCCTRCWDLVLVSSTALLYLVMSMSTGLANMSLKHNSILTGLLSFMMDDALTTGSIKTSDAEKRRLAKASLAYNCESKNCPHFRKLFPEYVEKYNQQLQLENTAAEPVPQENPAPAPSPAAQQAPTVANRAQPLAEARRDKNQKKAVPFWMVLSAKTNLNVEQVFFSIARDIKQRLSETDSKPEDRTIKIKAEGEADAAEAQKSACCDS

SEQ ID NO: 55583 - protein, 98 aa, Zea mays
  Coding DNA Sequence Number=SeqID_12208
  Gene Ontology: Mol. function=carboxyl- or carbamoyltransferase activity; Cellular component=ornithine carbamoyltransferase complex; Biological process=amino acid metabolic process
  Homolog annotation: Hit_ID=Q8SA97; Match level="QueryCoverage=88%, HitCoverage=21%, E-value=5e-12, Identity=43%"; Hit description =Ornithine carbamoyltransferase
MALPVDMAGLRPRSGGVEAPPKLRSSLSSMAEAESEPLGWARRRSFGKGQGRVRALGSGEADPSPSPGSGGAEFAVFRDLARVRALGRAERSSPSSGT

SEQ ID NO: 55584 - protein, 228 aa, Zea mays
  Coding DNA Sequence Number=SeqID_12209
  Homolog annotation: Hit_ID=Q6J9V9; Match level="QueryCoverage=35%, HitCoverage=32%, E-value=1e-09, Identity=45%"; Hit description =Putative uncharacterized protein
  Subcellular localization annotation: CTP_CleavageSite=69; ConfidenceScore=5.65e-01
MQAACNRAKWTRFPDSQRAQPGGPGPRVTQPARRMLHASNCTATCATTAPLRLRNQYRDSRRPSARPSSASLARRSMQPKGLGKGDTPKRILPREGTGLRASLLIRGSKAGPPRGSTAASDRVGPTPTTGQSRLRRRARDDQGYVRYITKARAALPSSPETPCSAPIEGNMALSPLLLAERRRRGKDSAACATPTAVPLDRVRLTGSQALPKAPQETPLRPTQGSDSG

SEQ ID NO: 55585 - protein, 127 aa, Zea mays
  Coding DNA Sequence Number=SeqID_12210
  Subcellular localization annotation: CTP_CleavageSite=56; ConfidenceScore=5.73e-01
MATPGVLHMKARAKPFPAHRPDRTRDSKSAKRNSRSSNGSRTRNGRPANHSPRRINSTAGQAAPLAGEADDASPSPDRERGIPRKGSFSAKEPGSEPPPPLLIRGSKTGPPKGSTVPSDRVGPTPTT

SEQ ID NO: 55586 - protein, 63 aa, Zea mays
  Coding DNA Sequence Number=SeqID_12211
KALVLLATKPHSQTAACLEVEGYRLLTPGSLEEMVAGITWPTTLPPGWTVEWDPASAEEEHEE

SEQ ID NO: 55587 - protein, 56 aa, Zea mays
  Coding DNA Sequence Number=SeqID_12212
MPSMGLGVCGSLCQGDNEIDGSDYDYGIGCQHCNHCSGEDEAVEGDFQEFQDYDEF

SEQ ID NO: 55588 - protein, 86 aa, Zea mays
  Coding DNA Sequence Number=SeqID_12213
MALQSFCVCTVVQVAAEDRAPFNLTVVTDGELGLRWALSVNAAAVACLVTWSAPPSEGYEGEDDTRQCGPSDREWVVTIKSRYLFT

SEQ ID NO: 55589 - protein, 43 aa, Zea mays
  Coding DNA Sequence Number=SeqID_12214
MEARRALRYQVHGRRSKRLRNPKPRVKKKTCKVKGCWSSEMSV

SEQ ID NO: 55590 - protein, 55 aa, Zea mays
  Coding DNA Sequence Number=SeqID_12215
MAWGNDGEKRVVGVGEAEGFAIYGRVGAVSWPASPGEDHGEAGPPTSDANPNARA

SEQ ID NO: 55591 - protein, 18 aa, Zea mays
  Coding DNA Sequence Number=SeqID_12216
MPQNYGACGQSPVSSRSR

SEQ ID NO: 55592 - protein, 100 aa, Zea mays
  Coding DNA Sequence Number=SeqID_12217
MRQEKRVQQHQAPLPPPPPLPPRDKNWEFMSHKPPTFASSPDPLHADDWLNETQVRSSETTDQAKDGGKKSFEVPSAREKVKEAEEPKAKGEEEDLQSQG

SEQ ID NO: 55593 - protein, 57 aa, Zea mays
  Coding DNA Sequence Number=SeqID_12218
  Gene Ontology: Mol. function=transferase activity, transferring hexosyl groups; Cellular component=Golgi apparatus; Biological process=carbohydrate biosynthetic process
  Homolog annotation: Hit_ID=A3AJ26; Match level="QueryCoverage=94%, HitCoverage=9%, E-value=5e-25, Identity=96%"; Hit description =Putative uncharacterized protein
MEPLDCRWHVLGLGYDVDIDDRMIESAAVVHYNGNMKPWLKLAIRRYKYIWERKCKL

SEQ ID NO: 55594 - protein, 106 aa, Zea mays
  Coding DNA Sequence Number=SeqID_12219
  Homolog annotation: Hit_ID=Q10MS1; Match level="QueryCoverage=71%, HitCoverage=30%, E-value=4e-14, Identity=57%"; Hit description =Pentatricopeptide, putative, expressed
  Subcellular localization annotation: CTP_CleavageSite=24; ConfidenceScore=5.09e-01
MTLVPFPSRAAAAPDVDLHQRLCSSSAASSTSLSIWWRKKEMGKEGLMAVALLKRLAALPPVGCHPRLEQFMRSHVSQLLRTDLLAELLRQGPCQPLNEGLTLLSQ

SEQ ID NO: 55595 - protein, 412 aa, Zea mays
  Coding DNA Sequence Number=SeqID_12220
  Subcellular localization annotation: CTP_CleavageSite=78; ConfidenceScore=5.02e-01
MSSRSLMHRVFPPSEPPDGEHPQSFRLVVGGTQLRGSWYLSAIVRLQGFSSRGPAAPPRRRSPKTVTTSPWVGRSKPGCDLGPALSFKDVHHPRWGGGRAEPELYLPLGFVGQPLLQHSRERALTGPARGADFDNAGLVDGGRRQLQRVGLDGLALGAPSCRKGGCCAARTGGPPKTSHAARAAFVFWGGPAFAPVRRLRAELKGTPRPLFDEPKPGVAVSARTEAELARKEDSVGRSPAGSSTGGTDAGIELPRPRAGLMSSGDSRPRPRGDRPSRLLELDSWRRPWRRRPGRGDDVVLRSGDSPTASPSEARSDLAEGVVDAEGAAAPFNCQDPSLQDRIILVAVVCASESCFSRKVMSEGSIIDVVEKARRIASAEELSSVKTCPVRGITYPNASYLSQKVMSEDPLSK

SEQ ID NO: 55596 - protein, 188 aa, Zea mays
  Coding DNA Sequence Number=SeqID_12221
MAHALRRPSPLSRRLGGFRKDSGRELPTQLRWRLVVYTCRVEMELGFRLKADVILLLFVRLTVRDQAKRLHCFGPLHGTSSCSLELAPRLSDLPAFVKEVLNCKPGCSIRMSSCQDRWELRGWTNRPGLWGQTSLGWRTRLGPDPGFPSTFDEGALVFGCGHFRMNLSEVWTRGESRRVSGGRQALAP

SEQ ID NO: 55597 - protein, 173 aa, Zea mays
  Coding DNA Sequence Number=SeqID_12222
MGESPPMHTKAPSLWHGGPTLRDSHKERATALRLYALPSSPQPAVKKANRHTRNVQPPCGYTPFHLRRNQRSRRRTAIQGACNRPAVARPLSFAATDGKLHRRSRQYRASSRPSQKTKKINFQNQCSDLRHPAHGPTKTLSTEVTGQSAAGAGVAVSKTKGGPAVTTSTGVQE

SEQ ID NO: 55598 - protein, 183 aa, Zea mays
  Coding DNA Sequence Number=SeqID_12223
  Subcellular localization annotation: CTP_CleavageSite=37; ConfidenceScore=5.46e-01
MGPKPAFPRKPFWTPYGSRLPTGSCRNGHSRRRGLPRQMQMGTQGRDLVLRQVPNQKGLRNSPPAGKDPSSTQKYLTKSKSITSAFKWNPSSISTLQMTTGGRVQLGCMMKILEAERWQKSANPHVVALLQQQQEEDKIDSTTAQETKSTSSPAVRPLGDGPDADPSSEHRSTRSVVKARGAW

SEQ ID NO: 55599 - protein, 346 aa, Zea mays
  Coding DNA Sequence Number=SeqID_12224
  Gene Ontology: Mol. function=sodium channel inhibitor activity; Cellular component=nematocyst; Biological process=pathogenesis
  Homolog annotation: Hit_ID=A2YB57; Match level="QueryCoverage=94%, HitCoverage=73%, E-value=1e-101, Identity=55%"; Hit description =Putative uncharacterized protein
  Pfam annotation: Domain name=Methyltransf_7; Domain location=28-346; Score=210.2; E_value=4.9e-60; Accession=PF03492.6; Description=SAM dependent carboxyl methyltransferase
LTLTDLIPCSCIDASYQQIAVRETKPMVETAVKQVYAALLPRTMVVADLGCSAGPNTLLFISSVLSSIAAAAAAERCKPPSGGGDDDDHHVELQFVLNDLPGNDFNHLFRSVEEEFRRAAGCERGPPPPPYYVMGLPESYYNRLFPRQSVHLFHSSYCLHWRSQEPEGLEAWRKPCLNEDNIYIARTTAPSVAKLFQEQFQKDFSLFLKLRHEELVHGGRMVLIFLGRKNEDVYSGDLNQLFALVATALQSLVSKSGLFSMDLIKQFETNWDPLDDSEGGDVVEDSARSSMNVAKFIRPALKSSIVYHFGEAIIDAWFAEFRRLVAEHLEKEKTKFTTFAMCLKKE

SEQ ID NO: 55600 - protein, 722 aa, Zea mays
  Coding DNA Sequence Number=SeqID_12225
  Gene Ontology: Mol. function=cysteine-type peptidase activity; Biological process=proteolysis
  Homolog annotation: Hit_ID=Q5NKQ2; Match level="QueryCoverage=99%, HitCoverage=88%, E-value=0.0, Identity=86%"; Hit description =Putative uncharacterized protein 9C20.3a
  Pfam annotation: Domain name=Peptidase_C48; Domain location=570-706; Score=-27.9; E_value=0.024; Accession=PF02902.10; Description=Ulp1 protease family, C-terminal catalytic domain
MQKLNVRCNPQDVIITIKILNERQRQAVARKGFSNILDMTLDALGSRSHLRWLMDKLDHKDMTIRPGQGKELKITKETVHLILGLPNDGGGKPLGIDEAVAGNNLRAELGLSKNEFVVASLHDRLRKGNDDDLSIRCFFLILFNRLLFPTSSWGISNHEVLLTEEMDRFHETDWCHLIFNDLCEAAQKWHTRSTSNVSTTIYGCSVVILPPNKRGTPRIKFFDKNIIQALTKADKRKPRQSGEPFGYCEFRSTSETCYSAVPSVQFQSEHRDRTNIFDVPRPDPCGHHTIHIQLPLVKDMLSSKIKQLQPRDRPKFIEKFVEYDSEVGKACSIIKSTLTKMVAKQYELADTFAELIDDVLRAESGDPDNVAEAPQTAKPPDISQHMSSEAHIHKGTQNTQDLIMPYSQPNTELTGTQFEEIHEKQQQMRRAFEGCPDDLETNTNSNAKKQGGDIDASHDTPTYMGPFFDQAPSGHVAYGEETHSLHTTHDHSLPRLTELDCARSLRDFLCSSKPNPNRKIIELGECIGNCLDIQQSFADGMCLDNVFMQCFILCFRDEEINNCSSINKNRLVLDVNVGTLLNFEEHERYNKSPQIFDQTVLDAYLDKTLPQLDNFVDCKTIMVPILHMGHWTLYVINIQFRCIHILDSNPYGLELGAGSNDCGFFVMRYIQYYDYMDGSIKQYIQRENSGDLRSLALYYLTFHSKNKCLSLPPEIQRFMFAR

SEQ ID NO: 55601 - protein, 109 aa, Zea mays
  Coding DNA Sequence Number=SeqID_12226
MALFSQRQLGLGAPDCPVVHWTVSGGVPDSVRWCTEQCPVRQAGDCQLAALGKQLTAYDYNSPDCPCFIVILIVRARDSNCGDSSQTGKRKVKKNTVVFKLIIGSLERS

SEQ ID NO: 55602 - protein, 230 aa, Zea mays
  Coding DNA Sequence Number=SeqID_12227
MPHNICKEGLRSDTSCDGTSQVIRPTYSCPCPTDLRQPWPDEGQLAIAAPGAAIATAVIVPKARGEALGAGGEVSALALVRDEAGVATRRLKGVTEALSQATEALSQVADFASRTASGALTAAVSAEVERLRTQHADAVREKSASDSKCRKLTDRVAALEREKADLRRQLAAERREANEAIAKEQAAQAEAKLARAEGNLAKELAEHLQERITALESRTKGTEARDACGG

SEQ ID NO: 55603 - protein, 335 aa, Zea mays
  Coding DNA Sequence Number=SeqID_12228
MNALSREGCRHFEVFDQADEDFERDVYKVEDPVVKESAGALYDRMWGLHGCEVVRERAETARAQAERGERVDDFGALNSALPDPEPTLAEAVTGVALEPTPETAAIATAASTSAAAGEDLPPKVAEGAPDAPAAAVPSAEDPAAVAAETKAEAAAEPTAEPTAEAPAASGPSQVQDFGPAHATATTEFLAASTAEGGNEYGGFTSEFFDFTDSGSSVEWTEESSEEDLDYFAALDVAAAEASPHAADAPDVPGPSTGRRRRRAVAKRRVSAEEGARLRFGCALRRLLRGVFAIDFGFFRTCCASPAAPLGDFCADSLRDRHRIFSHLLCLVRLHP

SEQ ID NO: 55604 - protein, 363 aa, Zea mays
  Coding DNA Sequence Number=SeqID_12229
  Homolog annotation: Hit_ID=Q8H6I5; Match level="QueryCoverage=18%, HitCoverage=6%, E-value=3e-08, Identity=57%"; Hit description =Putative RIRE2 orf3
  Subcellular localization annotation: CTP_CleavageSite=67; ConfidenceScore=5.06e-01
MVIRRDDHQPCGGEKQAGLRPLPRPQLQGSSSSGLGRRAGRVGAYLRVGRQPASSSGIRERKASSSSAEEASSSHAGEGELLLPGQGAAVRPPPGRRLCRARAGYVQVLPAPSAAQHVIRREGGTRVLGRSRSRSHGENGSEDLPVRFGAVAACWCGVGGQVAAVVGAEVVVARGAVAGEPPGVCCPAGPLVASQAEEVQQRRLELGQVIRERDQPRSHAAEAVSRAEVLGGQLAEATERPAEVSARAGTLAETLAAMAQARCWRPPSRWRSFRPCRRPRLGQVSPRVETTPRVLLLPLPMSEPAGTVCLYIRTCSSVAELLIRARVTFRGRISLSKQPKGAKDVLAKDFSEENFDAEGVPPF

SEQ ID NO: 55605 - protein, 412 aa, Zea mays
  Coding DNA Sequence Number=SeqID_12230
MDDSAPMEVEANARADGVELAEHEEVVLEPRDTVGVRHQIHLPPVVHGHHEDVQGRHLMGVTVGVGIGWGQGSRMSRRGKYAKQRKGPLTGTAFDPLPLPTVFRCLCVFVVILARLTKDKERIEKRGEELATEQQRVDEQEMRRLAECKEEKEKKFERARRAKDAMEENPDAFLSGTFNAKGRLTPYPDTRASVGKVEVTRSHFALFTDRPDRNNNAARPAPTAVPPTRPRPQEESRPRTDPSLGLRRRLRHFSNGHVIAYTRLKHLSDIHVGMAFLEGVMRGNELTNRLAHSLSLANACNPYYEHPLGPPGSETPTVGAPGRGLLRVNEHLPVKFQMGSLQQPLQPRTVLRFGSLEFIDGELNDVFPPWRKSSIRVCPTTLLAAGGGDGATVARQEAAPRRLSSESTTPAP

SEQ ID NO: 55606 - protein, 115 aa, Zea mays
  Coding DNA Sequence Number=SeqID_12231
MGKNNKRKREPTPPSEDFDDSQGLAVEVWTYIRAVERSGLEGSDESEYSSDEDDSSEGGGGDGDDDDDEGGDGNDGDDGDDGDGGGRGGSKDGDGGSSRGSNRGGSGRGSNRANG

SEQ ID NO: 55607 - protein, 152 aa, Zea mays
  Coding DNA Sequence Number=SeqID_12232
MCHGPHASTGSLHEYRAGARNACRHGDAGPPLAGNSAGTCGNLSLTRNGPYMWQHRTSPAGGPDGTCRGPGLFHRTKKELYIASRIHRRESLPQQSPGKSEQSRKKRNLQRSERRLPPASREQRIRLPGELRCPPLLRKNGHGSQGKRKQTR

SEQ ID NO: 55608 - protein, 263 aa, Zea mays
  Coding DNA Sequence Number=SeqID_12233
  Homolog annotation: Hit_ID=Q7XBE0; Match level="QueryCoverage=91%, HitCoverage=26%, E-value=1e-19, Identity=30%"; Hit description =Putative gypsy-type retrotransposon
MPMSPGDAEISAMLDMLAGDSSNSVPAETMVVATIPEPEKIVDTRRPEGARPKRLHQVSHPADPVEGKKKKRDGFSECCAWIMMSALLFLLPKKYQWNSLLELIPMGVFLLMLIPMGVALLMLNSMGVALLMLIPMGVSLLMLMPIALSALVGLQELSIANFDQALKDVVPEDMLSEPADGDMMDVYSDIPKVTESPSALEVAVVENPVLKDGASGCLALKGVAGNDPAQVGSASCDPAPRVLPVVIWLRWAVRAATQPPRVS

SEQ ID NO: 55609 - protein, 93 aa, Zea mays
  Coding DNA Sequence Number=SeqID_12234
MEIFIPVVLIVETFLMKLSARRPSVLVILNKMTNLFGSFIYLSLEDRQVLDLLIQVIFRRRWTNSLPLLASGLPKRKDVLIGVQWLQSSSPCR

SEQ ID NO: 55610 - protein, 246 aa, Zea mays
  Coding DNA Sequence Number=SeqID_12235
  Subcellular localization annotation: CTP_CleavageSite=24; ConfidenceScore=5.11e-01
MAERYRLPRSCVPPTMRRKDGGTGGASGRSSGRRFAFAVITVPKKAPSLLTDQRFEGWPPEGFDSRLRSRGPYTHYWSERERSCNGIPSKGGIEPSDPVARGPGPADHPQLTGDTMFGAHRGQHGAFPPSSLRKGDAGAARTRAKSRKTVNFAPPDPGLGLRPGLYRRPPPRPTQGLGLSLGHERQTRPRLRRSLHIAQPRARASYINKEVPSSPYPELTRAAGYKTGVPSGQHRQIGNDGAPHTL

SEQ ID NO: 55611 - protein, 139 aa, Zea mays
  Coding DNA Sequence Number=SeqID_12236
MKEEKERRSNGLLALLAPSLPYARGGSEVLESALIITQQQSERGGMAPRDAVDMHWQSPAGRGQCFVSCLRLGEQHSALWGSGFIGCTEEISIVLSSSQALEISILSLVHALEISILSFGVDDSLGAPEVHPMGVAPEL

SEQ ID NO: 55612 - protein, 487 aa, Zea mays
  Coding DNA Sequence Number=SeqID_12237
  Gene Ontology: Mol. function=heparan-alpha-glucosaminide N -acetyltransferase activity; Cellular component=integral to membrane; Biological process=glycosaminoglycan metabolic process
  Homolog annotation: Hit_ID=A3A7I4; Match level="QueryCoverage=81%, HitCoverage=87%, E-value=1e-168, Identity=71%"; Hit description =Putative uncharacterized protein
MDSSAALVEVEAKDPPTPKKRTMGQIDVNGDPIPVNPWGIPLLGYGYETKIVPMSMDMGQNLHPLGKRPYLGAITYGAELCYLGAIGYGAEQRLMIIVDDAGGFLPALNHSPWDGVTVADFIMPFFLFIVGVSLTLAYKRVPDRVEATRKAVLRALKLFCLGLVLQGGFFHGVHSLTFGVDLTKIRLMGILQRIAIAYLLAAVCEIWLKGDDDVDSGYGLVLSIAYSILLYGMYVPDWEYQIAGPGSSSTEKSFSVSANCHCILLYVSPHKFSTQDGRSADVHAAFGIRQVKCGVRGDTGPACNAVGMVDRTVLGIDHLYRRPVYARTKECSIDYPENGPLPPDAPSWCQAPFDPEGLLSSVMAIVTCLIGLQFGHVIIHFEKHRGRIASWLVPSFSMLALAFVMDFVGMRMNKPLYTMSYTLATAGAAGLLFAGIYALVDLYGFRRPTIAMEWMGKHALMIYVLVACNILPMFIRGFYWRDPNNSL

SEQ ID NO: 55613 - protein, 53 aa, Zea mays
  Coding DNA Sequence Number=SeqID_12238
MSQGIIRIKPKGKAGLQKCSSGTPRSYPGTEVAVPGYNFVKLFDFSFNMIEGL

SEQ ID NO: 55614 - protein, 217 aa, Zea mays
  Coding DNA Sequence Number=SeqID_12239
MSIILQYLVLTCGVCETARVSSHTFIAQQVVGNNVHELAKEVVPFTHKSCYPSAKGSRLPIHLYRGGEAGTAIAAKSSRGPPYTDHSPTALAPFGGLGDKIPKTQCTPSEDGGLITQNPEGSLATRLAEGADGGARVYVAAADIAGATAVPTRQSSSIPARCTTKRRRWPKSEASSMEHPWFYVGGILISLESGWLTGGPGLSARSGDGIGLRGLGN

SEQ ID NO: 55615 - protein, 142 aa, Zea mays
  Coding DNA Sequence Number=SeqID_12240
MKVLCVSANFLACICQIEGHGGTNVEHTSVPRKGPLTGTAFDPLPLTTGVLVHMCFCGDPCKKDKKWLENLKKWDAEDKKRMKKRREELAAEQQREDEQEMRHVVECWEEKEKKLERARRAKEAMEEIPDAFRKGKWPRFTQ

SEQ ID NO: 55616 - protein, 211 aa, Zea mays
  Coding DNA Sequence Number=SeqID_12241
MKKIPAPSLEIKEEAASTPPAPPPSEELQEPVALEEEFNPVLPSQSPPEEKKEIGSQMEVRCQTSLCQNEDGFPKLLRAWTVRLGIRSQPEYDGREFVEHGTEKCVVTVYIRSSPHHVEWSVTAAGHRFKDTCQVVARKALRTLCQIYEEEVANTPLRFFPPFQRDRPVWMARMRALEVQQLLEDDLTVVYLTAYLLTLDAQYDFLARHHR

SEQ ID NO: 55617 - protein, 262 aa, Zea mays
  Coding DNA Sequence Number=SeqID_12242
MAAIFAPSVAMEKNALTCGPEFQGAELQQLRGGRHRPVGPTGREGAGGRARSRKKGWAARVSFPDEAHEIEDISLLFLVYNFEYYKLHVDLTIAQDCVAALESREVIAVEALKQAKDEHVQKLMEAYLVTHNQRRALRIQEPASSNLVQPLRAEDPQILEGHPVSIRGEKKAWELPEGSIVFEGIPVFPQAMNKQEHPESAQDPPPELFEPLTMKKIPAPFREIKEEAASTPPALPPSEELQEPVQLEEEFDPVLPSQSPPE

SEQ ID NO: 55618 - protein, 72 aa, Zea mays
  Coding DNA Sequence Number=SeqID_12243
  Homolog annotation: Hit_ID=A3AYI5; Match level="QueryCoverage=72%, HitCoverage=6%, E-value=2e-07, Identity=44%"; Hit description =Putative uncharacterized protein
MYTLPNLRRLSLHKNQLTGKLGSDLGNLSFPDVFGEMRRPESVNLATNRLDGYDVTLQQESSKENSLTTIAP

SEQ ID NO: 55619 - protein, 239 aa, Zea mays
  Coding DNA Sequence Number=SeqID_12244
  Homolog annotation: Hit_ID=A2X4P0; Match level="QueryCoverage=66%, HitCoverage=34%, E-value=2e-55, Identity=66%"; Hit description =Putative uncharacterized protein
MRLHTLRGNIANYLSLAEVDSIYLLIPVNFIFIRFDGNGRHEFKLGPKELERWFTKIDHIFDHTRIPPVGEVLTPFYKTTVKKLQHYDLPLVSHVNHNFSMHAIHMGEDVLSVFEHAIKALSYKDDLMDSSVSRYAGSLLARADVPGREDLPQHALLAIVDQELYEVQPHAHVVPWPHAVAGVGGPILVDLGMEKHNCTMMTRWLRPRLLALLLLICMVNQEPAIFTTTILDYTTWKAR

SEQ ID NO: 55620 - protein, 223 aa, Zea mays
  Coding DNA Sequence Number=SeqID_12245
  Gene Ontology: Mol. function=kinase activity; Cellular component =ornithine carbamoyltransferase complex; Biological process=amino acid metabolic process
  Homolog annotation: Hit_ID=Q6QP54; Match level="QueryCoverage=35%, HitCoverage=26%, E-value=3e-16, Identity=62%"; Hit description =Putative kinase
MEHRPGLERLPETAHLELDGKLFVNTQQAPTWRANCRRFEPGGSLDRRVNYRRVPQPRWVGVRRSAKGGGSRRETGVRGGIPRPSCLSRAQVGAEPESEPWGRAKWSSSSFRAEPESEPWGRAKRSSSSSGVEPESEPWVGRNGVRRLPGLSPTPSPRVGRSGVRRLPGLSPSPGVGRSGVRRLPGLSPSPSPRVGRSGVRRLPGLSPSPSPGVGRSGVSHGT

SEQ ID NO: 55621 - protein, 111 aa, Zea mays
  Coding DNA Sequence Number=SeqID_12246
  Subcellular localization annotation: CTP_CleavageSite=70; ConfidenceScore=5.08e-01
MAQGHISLSIWHPPFVLQIAPMMAPKKVTTRTTSSLDAAAKEALAVGVLGPIAHPGLPLKFCRPILAWLRCMGAPARESRISVVVARSTLWAVRAGINPASCRSALLIVPP

SEQ ID NO: 55622 - protein, 147 aa, Zea mays
  Coding DNA Sequence Number=SeqID_12247
MGKNNKRKREPTPPSEDFGDSEYSEEEFSSESEGSPAPIPLRESSDDSDDSQGLAAEVWTYIRAIERFGLEGSDESEYSSDEEDSDGGGEDEDGGDNDDDDEGGGGGDGDGDGSGRGGSSGSKDGDGGSSRGINRGGSGGGSNRASG

SEQ ID NO: 55623 - protein, 340 aa, Zea mays
  Coding DNA Sequence Number=SeqID_12248
ALRAGGEVSALAAVRDGAGAASRRLEEVTEALSQASRRLKEVADFANRTASGALTAAVSAEVERLRTQHADAVHEKLAADSKCRKLTDRVAVLEREKANLRCQLAGEKRETNEALAKERAAQAEAKLARAEGNIARERAEQLQERLTALESRVESAEAVSRAEAERTRKQLMDTYRELGTRTGEFEVPDREPGLRCLEWVQEELQALPTIVEGFMSYASLVTCEGAMNALSREGCRHFEVFDQADEDFDRDIFKVEDPVVKESAGAIYDRMWGAHGREVVRERAETARAQVARGERVDDFGALNSAPPDPEPTPAEAVPRVALEPTPVWQNRPNYSSLSA

SEQ ID NO: 55624 - protein, 171 aa, Zea mays
  Coding DNA Sequence Number=SeqID_12249
SRGEEKGGGAYRRRDCSGEVVEGEGEVAGITTVCGTPSEGGPRDAREDMSERNRAETHWIARSTRGGGRPKSGEVDLGPPVKSGRVRGLGKLHGLLAELAEALVGLEGGWSGLATAAVALAAMAGRNELAGAKERWLAGEGECGAKREIWSQEIWSVSLPKPEANPKFCRV

SEQ ID NO: 55625 - protein, 327 aa, Zea mays
  Coding DNA Sequence Number=SeqID_12250
MVRSPAFVLNLQNRDPAAFVREAEDGAVRLVGRYVPRTEGQRSWNIRGSNDRLNRVFELNQLPYDGYPGQDDVDRRGKKPAVETGDDPAPAAAPSSKKRKLGTVMGGLGVSDGFARELMRTCAAPGGRMSSPELRESSAQMLRVTGGCWPRNVPIPCAAGEDSFTSRMVLKWRVFPYERNIAAVVSAVMDKDRQGAAQKRQAAVRLVEARPKRQRGAAKAAAPGGGKPPLAAKSGAPASSKAPEATAGAGGNGRRRRQRQAPEAPNRQRWCRLPAEWRRSRRRPERCRCQANASPTSPPILVWTTILVVSRWLRFFYNLFVVIRAPF

SEQ ID NO: 55626 - protein, 626 aa, Zea mays
  Coding DNA Sequence Number=SeqID_12251
  Gene Ontology: Mol. function=protein binding; Cellular component =nucleus; Biological process=regulation of transcription
  Homolog annotation: Hit_ID=Q65XW3; Match level="QueryCoverage=99%, HitCoverage=93%, E-value=0.0, Identity=57%"; Hit description =Putative scarecrow gene regulator
  Pfam annotation: Domain name=GRAS; Domain location=221-527; Score =420.2; E_value=3e-123; Accession=PF03514.5; Description=GRAS family transcription factor
MESPEYCEINSNMTLDYINRLLMEEGTDEKASIYQQLDALQAMEKPFYDIIGQTYPSSPMETMISRDNQVDCPQDNYSKQARRGCFVSDILEPQGVHLVANDWTYECDHFSLQFERGAEEANKLVPNIAKLADLDSNGLSDSNRMIEATIGQKGKHGSKIRSHPHVDLEFLEARNSKHLAISASETTRDEMFDSVLLCDCRFNCDAAHIREIKAKEANNSSQNVRRKGYGQRQVKSRGKKKEEEVDLRAHLMQCAQAIVVNNLPFASELLEKIRRHASPYGDGSQRLALYLANGLEARLAGTGSQMYKELMEKQTRATDMLKAYRLFNAVCPFARVAYYFSNQTIADLSNGQPKVHIIDFGITLGFQWPSLIQRFAKREGGPPKLRITGIDVPQPGFRPRAIIEATGKRLTEYAEMFNVPFEYQDIASPWEDICIENLNIDNDEALIVNCMFRTQYLGDETEDIDSARDRVLRTMKRINPEVLILGIVNGMYSSPFFLTRFREVVFHYSALFDMLDATAPQSHEDRIQIERDLLGASALNVVACEGAERIVRPETYKPWQVRCLKAGFKQLPVDKAIMKRSIDEKDKHYHEDFVIDEDSRWLIQGWKGRIMHAVSSWKPKESYTNQ

SEQ ID NO: 55627 - protein, 278 aa, Zea mays
  Coding DNA Sequence Number=SeqID_12252
  Gene Ontology: Mol. function=GTP binding; Cellular component =intracellular; Biological process=small GTPase mediated signal transduction
  Homolog annotation: Hit_ID=A7R1W1; Match level="QueryCoverage=85%, HitCoverage=48%, E-value=3e-55, Identity=54%"; Hit description =Chromosome chr7 scaffold_382, whole genome shotgun sequence
  Pfam annotation: Domain name=MMR_HSR1; Domain location=38-156; Score =72.3; E_value=1.6e-18; Accession=PF01926.14; Description=GTPase of unknown function
MGEKGRCLGHIRRIYPSDSHTKCHGGSNQVPGSMGSRNGNMGKSTLVSALSEADLYSDDRLFATVDPRLRSVILPSGRKALLSDTVGFISDLPVQLVEAFHATLEEVVEADMLVHVLDSSASNLEEHRSTVLQVLQQIGVSQEKINNMIEVWNKIDLVDENVKSDGIDDEVFLTEGEQEDDIFSEDDAPSEQTSFDSVDVDDGADSEYLSEENSEDSNELPSKKSFAEPTEMGAMKELSSKECFGELRVLDTNGHTFPQPASTCHVKTSAVTGTGLQE

SEQ ID NO: 55628 - protein, 159 aa, Zea mays
  Coding DNA Sequence Number=SeqID_12253
  Subcellular localization annotation: CTP_CleavageSite=37; ConfidenceScore=5.37e-01
MVERLNRSLPGLTAQACSRSFTTFSIMVRRRNPSVVEFSSDSDEIQEESPVPSPPPRRSLSKRGRGSGRKDGEGSSMPSQPTRGRRQKVGASRPRRSTSSSGYAPCQEEDGAFDDFVDLPAPDALFVTGLHMHPANVSRGPHESPVDFTQKGIDTPSAF

SEQ ID NO: 55629 - protein, 522 aa, Zea mays
  Coding DNA Sequence Number=SeqID_12254
  Homolog annotation: Hit_ID=Q6ATI4; Match level="QueryCoverage=80%, HitCoverage=95%, E-value=1e-127, Identity=58%"; Hit description =Expressed protein
  Pfam annotation: Domain name=F-box; Domain location=94-142; Score =21.7; E_value=0.0027; Accession=PF00646.24; Description=F-box domain
  Subcellular localization annotation: CTP_CleavageSite=59; ConfidenceScore=5.74e-01
MVSSCIVRRKRSRSPTHCFDSGSRTRPRPSPSSPDVGRKRSRSPPHCSDREGRKCTRPSASPYGGPNRSLSTSCGFDSARFERARLTTGDGKVAAVASLSDDMLLEVFKRLPPPRDVIRCAAVCRRWRRVISGAGAACLPRPPSHFGFFRNYGPSPLPPFVRTAGLSLDISFLPVPPACGAVLVDSRNGRLLLRELGPGYPRELRLLVCSPLEKAYVRVPPLCIAEHMVACSVLVPGEGDAFRVVVVLFGNDPKHFSVLVYFSISSAWESATGPVHRNLVPRQGPSVVVGDVMYKLQSEEKYIMVVDAVQMTLSAVPLPDARTLLYAGNHWIGRTPDGRLCFFVIREQLTLATWVLQAPGKWVEQQPVDLRTLMHPAFMGDLAHMKLSAKMSDQLRGFKLVSFAAFCEGTCTLFFVMADWVVMLDPRTRRLLRLWRNSDESRPLGDVYPCEMLQWPPVLKNFGGSESDEAGKCCWYLFYCGKIRTIQLEYTDAKESVLQAAQKALETLNYLAQPHVVSIFAE

SEQ ID NO: 55630 - protein, 88 aa, Zea mays
  Coding DNA Sequence Number=SeqID_12255
MAPLPLFLFLICFLTVLIMLQGLNSLLDEEAVMRKRLRETKEQLVRQRNNEFRVISTNMKSSLNDFNLVAANKKGFDLQRSVHATIVA

SEQ ID NO: 55631 - protein, 27 aa, Zea mays
  Coding DNA Sequence Number=SeqID_12256
MGSQMRKEENDASDPDGMNDEEELFGT

SEQ ID NO: 55632 - protein, 28 aa, Zea mays
  Coding DNA Sequence Number=SeqID_12257
MATGLRNESFIPRGRMTGTTMTVEPMKP

SEQ ID NO: 55633 - protein, 189 aa, Zea mays
  Coding DNA Sequence Number=SeqID_12258
  Subcellular localization annotation: CTP_CleavageSite=98; ConfidenceScore=5.20e-01
MGGGAGIARGAGSCSVPGLQTRVASEPLAAPASATAAGRGSSAGAIAGAGHGLTSNFSAFCPSLPHKFWRGRGPPGSGIRPEVSVAAVRPPGAEVVVVAAAGAGDGVPFVGLPLLRRPSPSEWGRSYLRRGNRSSVCNGTSNASVFCSLWLSRPKHDPLFEVVKKHERNSAKKRSFFEENFDAEGVSLL

SEQ ID NO: 55634 - protein, 258 aa, Zea mays
  Coding DNA Sequence Number=SeqID_12259
  Gene Ontology: Mol. function=ATPase activity, coupled to transmembrane movement of ions, phosphorylative mechanism; Cellular component=integral to membrane; Biological process=phospholipid transport
  Homolog annotation: Hit_ID=Q2R575; Match level="QueryCoverage=93%, HitCoverage=23%, E-value=1e-133, Identity=93%"; Hit description =Phospholipid-translocating P-type ATPase, flippase family protein, expressed
MKRFVYINDESYQNDYCDNRVSNTKYTLLNFVPKNLWEQFRRFMNQYFLLIACLQLWSLITPVNPASTWGPLIFIFAVSATKEAWDDYNRYISDKQANDKEVWIVKNGARKHIQAQDIRVGNIVWIRENEEVPCDLVLLGTSEPQGICHVETAALDGEIDLKTRASPPPCVGLEFEQLHKIKGVIECPIPDKDIRRFDANIRLFPPFIDNDICPLTINNTLLQSCYLRNTEWACGVAVYTARTGSSYNNHGMTTFQEW

SEQ ID NO: 55635 - protein, 166 aa, Zea mays
  Coding DNA Sequence Number=SeqID_12260
MDADIPDNNTLTNKVKIDLDMLHPLMLDGVGREVDDADVVAVNHGIPGEGTMKLLEKLAYPARLSHPISNTPVLSLSTREGDHIMTFGGQRDEVGPKKYHIDGGGEILKSTSEAAISGRVTDMSAITKELACLSTSVTKGLHASPLEDVLPLLEEEALGATLDNNP

SEQ ID NO: 55636 - protein, 391 aa, Zea mays
  Coding DNA Sequence Number=SeqID_12261
  Homolog annotation: Hit_ID=Q33AJ2; Match level="QueryCoverage=30%, HitCoverage=51%, E-value=2e-08, Identity=31%"; Hit description =Putative uncharacterized protein
MATKTTMENLNHTQVIDPGLLREGEIHNQPSMKTWILILTHTPSQMKPLAMTDVEAGLELQKYQRGKNLCEDISEMGSRRDVKNTDITNGNSLTHKVEIYLNMLCALVLNRIGGEINCTDVITINQSTLGQRAIEFMQQLAQPASVNNSIFHCMVFSSCTGPRNYILALGGPGNEIATNEDPIRKVSENAFDSYKVRLSRIMHVETYLLNCVSYVRTSKGAVLESASQTAKTSLLNDVKEVSENVFDSCKVRLSRIMHVETYLVNCVSYVRMSEGEVLESANQTAKTSPLNDVKEKLKTGGSEKNINIQKKAKCLIIVNAWSLGESTTYPASLVSPKRSICVELVFEVPLASNDVDTGRPRYQIPSMVGHECRVLILHSTTPMWIRKTLVE

SEQ ID NO: 55637 - protein, 56 aa, Zea mays
  Coding DNA Sequence Number=SeqID_12262
MESHDLRAERESRLVGKVRNLYRVAMRLMVFGIDSGNGEDEAVEGDPQEFQDYDEF

SEQ ID NO: 55638 - protein, 441 aa, Zea mays
  Coding DNA Sequence Number=SeqID_12263
  Gene Ontology: Mol. function=phosphoprotein phosphatase activity; Cellular component=cytoplasm; Biological process=protein amino acid dephosphorylation
  Homolog annotation: Hit_ID=A2YE92; Match level="QueryCoverage=42%, HitCoverage=60%, E-value=5e-72, Identity=71%"; Hit description =Putative uncharacterized protein
  Pfam annotation: Domain name=Metallophos; Domain location=90-260; Score=71.3; E_value=3.2e-18; Accession=PF00149.19; Description =Calcineurin-like phosphoesterase
MPESPWGLSPFKVRERSTARAGKSAIVKYSNKKKGAGKTAIIEGLALIIANGDVHIFLVGGSDPLQFMLQVRALCEKAKEILMEESNVQSPVTICGDIHGQFHDLAELFRIGGKCPDTNYLFMGDYVDRGYYSIETVTLLVALKVRYPQRITILRGNHESRLLTCHIVSSINLPAGLIDPGEICAAAALRSDHEAVITRIQVSFINQGSATLLPIEGNYSRGNLMLQRIKTYIAFLEQKLVEFDRTERLNHFVLTDSDIAVVDDLGHIFEKYPHFHLAVTFCNNKGQPLNSGFVAVRGTRDGITKAVEFLKQVLGTYSLRYIKASRMLGDQLALAWVVKFHLPSALGKFSKHEAFTGEVNGTSVLFLPCVVYNWTPPEGAGQFHGIPLDVKPHGQYSTKNADHEAVITRIQVSFSMTMILLDLEVVLLQLEMALMLFLSSP

SEQ ID NO: 55639 - protein, 88 aa, Zea mays
  Coding DNA Sequence Number=SeqID_12264
MVGSKGKNEDSFLDFFDESKEAFSDSSDDKGLLEELSPTKGYNTEEWAIMRGLKCHGLEGFSDEEEKEDGDGDEATTTPYPLHRVDVG

SEQ ID NO: 55640 - protein, 473 aa, Zea mays
  Coding DNA Sequence Number=SeqID_12265
  Gene Ontology: Mol. function=phospholipid binding; Cellular component= intracellular; Biological process=steroid metabolic process
  Homolog annotation: Hit_ID=Q10NC7; Match level="QueryCoverage=94%, HitCoverage=94%, E-value=0.0, Identity=87%"; Hit description =Oxysterol-binding protein, expressed
  Pfam annotation: Domain name=Oxysterol_BP; Domain location=30-445; Score=115.4; E_value=1.7e-31; Accession=PF01237.9; Description =Oxysterol-binding protein
MGSKDQDGGAASSGGGFFSSFAAGMRSWGTAVHKSVNGLLGYEGLEVINPDGGTDDAEEEALKGRWKQEDRDSYWKMMHKYIGSDVTSLVTLPVIIFEPMTMLQKMAELMEYCELLDKADECEDPYMCMVYASTWAVSVYFAYQRTWKPFNPILGETYEMVNHQGITFLAEQVSHHPPMGVAHCENEHFTYDITSKLKTKFLGNSVEIYPVGRTRVTLKKSGVVLDLVPPLTKVNNLIFGRTWVDSPGEMVMTNLTTGDKVVLYFQPCGWFGAGRYEVDGYVYSAAEEPKIMITGKWNKSLSCQPCDQEGDPLPGTELKEIWRVAPAPQGDKYQYTHFAHKINSFDTAPKKLLASDSRLRPDRYALEKGDMSKSGAEKSSFDTTPEFLQTFRLEEQQRAEKRTREAKGEQFTPRWFNLTDVVSPTPWGDLEIYEYNGKYTEHRAAIDRSDVTDETDVTSVKFSPWQYGSSSSQ

SEQ ID NO: 55641 - protein, 304 aa, Zea mays
  Coding DNA Sequence Number=SeqID_12266
MVTTSPWVGRSKPGCDLGPTLSFKDVHHPRWGGGRAEPELYLPRGFVGHPLLRCSRERALAGPAGGSDFDNTGLVDSGRRQPQRVELVGLAPGGPSCQKAAAAPCRCPTLPGGSEWGSAGGLTAPVVGAGVEATREVPVADGITATIRASGLRLFVLVLTPQRAAASRPSVFCCSAGPPPSSGVDSPVGCLNRFTKRESPRVKVTSEARGSDISMNRGGVGSKRKPGWPEPSRVSVSGTDAGVYQPRPRVGLAPLEDGWPRPQNPWTASPSEARSDLAEGVVDAEGAAAPFQRQDPSLQDQIVL

SEQ ID NO: 55642 - protein, 334 aa, Zea mays
  Coding DNA Sequence Number=SeqID_12267
MVTTGPWVGRSKPGCDLGPTLSFKDVHHPRWGGGRAEPELYLRAGSWVSLSLSVRGRGRSLALQEGQTSTTRGWSTAGVVSFSALGSPAWLPAPPPASRAVIVPSAREDRPRRRALPGPRSCSGAALPLHRYGASARRSVPRSSGRIRVGICRCADGPCRRCRGGDGSRSPRRRRGHRHHLRFGPPALCTCPRRSSVGVGEGRVAAAFALRPSLLQFGHPERGSLSLLLERATESLGSVDLAVRGFSCLVKGTPRPLFDEPKPGVAASGRADVFGGQLAEASGRDDEVVLQSGDPRTVSPSEGRSDLAEGVVHAEGAAAPFNRQDPSLQDRIIL

SEQ ID NO: 55643 - protein, 57 aa, Zea mays; identical to SEQ ID NO: 44635
  Coding DNA Sequence Number=SeqID_12268

SEQ ID NO: 55644 - protein, 46 aa, Zea mays
  Coding DNA Sequence Number=SeqID_12269
MGFNIGKDVPLTGSLGVVSPSESLKDRVDVGLLTEDPLTGHMPRHG

SEQ ID NO: 55645 - protein, 82 aa, Zea mays
  Coding DNA Sequence Number=SeqID_12270
  Homolog annotation: Hit_ID=Q8W1D1; Match level="QueryCoverage=51%, HitCoverage=2%, E-value=5e-07, Identity=57%"; Hit description=Gag-pol
MAEKGTDLKGKRLSSPRWVVHKSIVNIKGMNHLRTSPQQTALLAKRVEFKWTLACQKSFETLKEKLTTAPVLILLDVHKPYS

SEQ ID NO: 55646 - protein, 230 aa, Zea mays
  Coding DNA Sequence Number=SeqID_12271
  Homolog annotation: Hit_ID=A2YGC2; Match level="QueryCoverage=69%, HitCoverage=71%, E-value=1e-08, Identity=29%"; Hit description =Putative uncharacterized protein
MYGFTGGDEDDDFGMTMVMQEVEYERPPSPAPQPEMPTAPPQGISAVGGDPDGDRDDDEASGSSSHGTELSEEPEPEGWIARPITRDVARGCHFHDALDTLLRWAFDRHTWSIEYRCVVYQHRHGLYPDQWEATCLVRRPDDDLQGAEAFSEHYSITEAAIIDAARRALSQYCSLFSRVADSLDLKYYPRHSTGSAGGVIVLLVGEGNPRLNIMVNLAVVLNTELDHALD

SEQ ID NO: 55647 - protein, 183 aa, Zea mays
  Coding DNA Sequence Number=SeqID_12272
  Homolog annotation: Hit_ID=Q6QP51; Match level="QueryCoverage=67%, HitCoverage=63%, E-value=1e-14, Identity=41%"; Hit description =Putative growth-regulating factor 1
MVPTGTEKGDISKGILPHEGSGPRALLLIRGSKAGPSEGFDSRPRALGLQAHYCSGVRRLAPRKGSTAAPEHSGSVPTTDQGFEGWPLGRVRQPPRARRARDDSGYVRYMAEARATLPSGRTLDTPEAQLGQASSRSNLGQIASPTDRIENSSAPTAVPPTRARLTTAKFSLRRNRKLRLARP

SEQ ID NO: 55648 - protein, 244 aa, Zea mays
  Coding DNA Sequence Number=SeqID_12273
  Subcellular localization annotation: CTP_CleavageSite=31; ConfidenceScore=5.49e-01
MGSARAQQPSCSLHVPINPGFRHYRSSTTPVAPHRERENRGGRRRGQFLRRSPALPLSEEIAQRICGLLYSGGHATVHRGRRRRLLDREILRTLSRDGFWIVDLRSCGSGESLNKPAVRKDWLCVWGFIAPGPLDFLARDSCTGALLGTFGIRRSSKTGFNSISGVQCVNRYPRTKVGIAVDQNNTKVDTEPKVRAGKLRRDSKEWNRLKDEKAIQTSIDYYKIIIKCKGHECNFTWAASRAYK

SEQ ID NO: 55649 - protein, 25 aa, Zea mays
  Coding DNA Sequence Number=SeqID_12274
MGTTGHLNLDTGDSKPNLRKFTLGP

SEQ ID NO: 55650 - protein, 357 aa, Zea mays
  Coding DNA Sequence Number=SeqID_12275
  Homolog annotation: Hit_ID=Q6J9V9; Match level="QueryCoverage=21%, HitCoverage=28%, E-value=9e-08, Identity=42%"; Hit description =Putative uncharacterized protein
  Subcellular localization annotation: CTP_CleavageSite=28; ConfidenceScore=5.02e-01
MQAACDRAKWAHPFDSNAPSMEAQAHTSCNRRAGCYVRATAPPLAPLPRLLDCGTSTATRGNPAYDPTVPARRIGHGSVSCGRRRDGQYGQKWASSNGGGRRAEAAGPGKGDTPKGILLREGNGSRAPLLIRGSKAGPSEGFNSRLRALGLRAHYWSEAGPRRVHSRLRRRARDDPGYVRYITKAQATLPRGSGDALANSAPAKPLTASTYQPENGSDSGSAPEDDGLRPARPRARTRAQPRKTMNSASPDPGLGLGLSPGRRRTPPRPTQGSNSGSAPEDDELRLARPRARTRAQPRKTTNYASSDPGLGLDLDLGRQTQPRTRRSLRLALPRAQTDHVIGGAIITLPLANSGYGE

SEQ ID NO: 55651 - protein, 328 aa, Zea mays
  Coding DNA Sequence Number=SeqID_12276
MSLRSLMHRVFPPSEPPDGERPRFFRLVVGGTQLRGSWYLSAIVRLQGFSSGSLAAPPRRWSPKTVTTSPWVGRSKPGCDLGPALSFKDVHHPGWGGGRAEPELYLPRGFVGQPLPQCSRERALSGPAGGSDFDNAGLVDGGRRQLQRAGLAGSARGAPSRRKGDCRAARTGEPPKTSCAARAAFVFGGCPAFAPVRHLCTEIGAPLIREDPSGDLPEGRRLLSSVRRWRRLEKSSSPARSPPPSALGASGSLYLSSPLERRRGRGQGCSSVRPEAITAAVRLPGAGVVVAAAGAGDGEPPVGLLLLRRPPYHVGLFVPAEVEPEFRL

SEQ ID NO: 55652 - protein, 218 aa, Zea mays
  Coding DNA Sequence Number=SeqID_12277
MHATAQRLQAFLHFRPDQRVKGRTAMQAASYRAKWAHPSDSNAPSMEAQAHTSCNRRAGCYVRATAPPLTPLPRLLDCGTSTATRGNPAYDPTVPARRDGQYGQKWAGSNGGGRRAEAADRRHLWQEKRATLRLRHNDRVKKGTGKGDTPKGILLREGNGPRAPLLIRGSKAGPSEGFNSRLRALGLCAHYWSEVRRLAPRKGSTAASGHSGSAPTTD

SEQ ID NO: 55653 - protein, 44 aa, Zea mays
  Coding DNA Sequence Number=SeqID_12278
MAHRTVRCAIGKNTAEDQPGPTWQRVHRTVRCTPDSPVPLSQKH

SEQ ID NO: 55654 - protein, 109 aa, Zea mays
  Coding DNA Sequence Number=SeqID_12279
MGVGKGRLALSDDSDDSQGIAAEVWTYIRAVERSGLEGSDESEYSSDEEDSGGGGEDEDDDDGGGGDDGDSDGDGSGRGSNGGSRSGNGGSSRGSGGGGSSKGSNKASG

SEQ ID NO: 55655 - protein, 58 aa, Zea mays
  Coding DNA Sequence Number=SeqID_12280
GVAQAALSFCQTGQWSGGVTAVTSALPGARVRIELYADGGYQLRIRRLEGTPNYGPRQ

SEQ ID NO: 55656 - protein, 625 aa, Zea mays
  Coding DNA Sequence Number=SeqID_12281
  Gene Ontology: Mol. function=DNA binding; Biological process =regulation of transcription
  Homolog annotation: Hit_ID=A2WMA3; Match level="QueryCoverage=20%, HitCoverage=28%, E-value=9e-42, Identity=68%"; Hit description =Putative uncharacterized protein
MGISQDTHESMATDAANYLCHQLQHLLGPISSATSQSGPWEERSAMVRLTQKLQKSKRNKRWRQRRRKHVEELFQKERADYDRVDQEADEWRAKQIAKDIAKQRVESMQQIARKKTNVERKRLESELELALMVEKLQELRSIRVQKMKKQDPYLNTDASTMSPFEHGETHSVKICSQVDLCNFDGTHGVNVPVGQGYDLTETCAGAAFTEWDDTTSLLLCEVLADPRRTHKFDGHRAPSNLTVRTWVPTNLWKKIRRPPSNLKTHVLIVKFDGTYVLNVKFDAFIHHADVYTAAPEELVAGLEPVPGTNVTEDGYNRQWYIYCPKRYKNGEGRTSGHRLRAVETAGTCWHSETGPKSMQGLPGATVCSLSYGHKEKEDGTSGRHRFHRMGWRMFEYDDTQGGGGDHVLCKVHRSSSSLAKNKSKAKRTATGDHPEAPPTKVIHDVQVQMQDPAGAIFTGAYPTMDDPLLMVRGEEASEAEHGGDLGKFNIGGLLLNIDNVDWKTLLDNVDGEQQQQQPCAEPAKQSSVQVQVDPAATLMPSNVHGHEQGGDSMMVGGEEEQRRRIEEQVSVDDLLDVNNVDWKALLDMLEDDEEQGLPLQQQPCAEPAAEQSQSSRIEDPAVPPV

SEQ ID NO: 55657 - protein, 192 aa, Zea mays
  Coding DNA Sequence Number=SeqID_12282
  Homolog annotation: Hit_ID=A2XNP4; Match level="QueryCoverage=38%, HitCoverage=18%, E-value=7e-10, Identity=43%"; Hit description =Putative uncharacterized protein
AIESAIHEYVALAPGTTIEVAEGWVVTREGRGGEVAMGCRGDTQIRVMIGLADKPSPASSPATRERTLAGRHHLEIGDRWHMAANDHVFRATNEASVALLRSLRAGTVDQRFKAFIHHADVYTAAPEELVAGLEPVPGTNVTEDGYNRQWYIYCPKRYKNGEGRTSGHRLRAVETAGTCWHTETGPKLPSAK

SEQ ID NO: 55658 - protein, 245 aa, Zea mays
  Coding DNA Sequence Number=SeqID_12283
MADCFPPESDDFHRRWLPREILADIGIADPEAVGAETPPEAAAAAAVEELAAQLAGILGGGAKAWPLGPPPTPPTPAAPPAAAAAVAPCYGAKVCGLQGSVVVSCGETNGGGAVSWPFVPYPPQLHWQVGSGLVNHGGVLDYPVLPPAALPCHVPPPANLRGGTGVFLPRIEAYRYAAAPPATAKGGAATKPWAGTGSRPATGKKQERQQAEQAAPAAKHPQKQRQQQQQATGAALALPQDWCYR

SEQ ID NO: 55659 - protein, 207 aa, Zea mays
  Coding DNA Sequence Number=SeqID_12284
WRREDQVVDRLVDTSGPSGDGVVLVVGEGDGTARGPSDNTGKGKDREATGSASDDTGKVGIEEGIKVGRWGRMSKGENILIKNNMMRRLRHWHTQRPEDAHRRGVVLKKAKNKEAKGPPVVREVIQNDEIVPHTRDAEDGRCPKVTMNEVEGASSAGQGRRKGESREDIVAGVAETTVLGGGRGIRGEGVGRGNMGARRWVGESNGI

SEQ ID NO: 55660 - protein, 88 aa, Zea mays
  Coding DNA Sequence Number=SeqID_12285
MPVLAVFKYYVVSWLRVSHHHWCEVLSQVSDLVINHDREKDHDREKDHGFSMEDEEEAGFSTAALQRKPRWWWRMRKRQGWRMRKRRL

SEQ ID NO: 55661 - protein, 157 aa, Zea mays
  Coding DNA Sequence Number=SeqID_12286
MVGGIRGRDERISGRMRGLVGGCGEMTDTGFILGQPSSHLLFTIFFSLLTFHFSLPLSFSLLFPLEDSIKEYYHHTEEETEDVEPYTTVFNPRITKHCDLRGEGWKNGVASDLAEGIYLECAFALSEMGVEGDGGACTPSFSGSAFRSSQEARKTFC

SEQ ID NO: 55662 - protein, 27 aa, Zea mays
  Coding DNA Sequence Number=SeqID_12287
MATGGAYSLDLLPIRPADKRCMRVVSG

SEQ ID NO: 55663 - protein, 123 aa, Zea mays
  Coding DNA Sequence Number=SeqID_12288
MQAACNRTKGAHPFDFDASSMEAQAHTSCNRLASYYVRETAPPLAPVPHLLDCGTGAATRGDPAHDPTVPTEHIGHGTGGTFGRQSRQRFTFAMMTASKKGPVKGILRKGSFSAKEAGPEPPY

SEQ ID NO: 55664 - protein, 154 aa, Zea mays
  Coding DNA Sequence Number=SeqID_12289
MGIRKKPEYVWKEYRENGIENNKNTPTWRKRLQALSEGDPTEDDPTIVYMAGYLHTLDNHYDELSSHCTHLNSRVESLEQQVKELKQEKASLQESLDIAEGEEANTREAYRTLKMDYDKKLKKLAPKKKIQKKTTNQGCQTEKKKKAPLALPPP

SEQ ID NO: 55665 - protein, 61 aa, Zea mays
  Coding DNA Sequence Number=SeqID_12290
MGSRHSACSAEAECREIQMVRDAMIMIWFWFDYDDDVPRGGNGEGEAVEGDFQEFQDYDEF

SEQ ID NO: 55666 - protein, 908 aa, Zea mays
  Coding DNA Sequence Number=SeqID_12291
  Gene Ontology: Mol. function=aspartic-type endopeptidase activity; Cellular component=chromatin; Biological process=chromatin assembly or disassembly
  Homolog annotation: Hit_ID=Q8W1D1; Match level="QueryCoverage=98%, HitCoverage=66%, E-value=0.0, Identity=62%"; Hit description=Gag-pol
  Pfam annotation: Domain name=RVP_2; Domain location=1-75; Score=30.0; E_value=4.9e-09; Accession=PF08284.2; Description=Retroviral aspartyl protease
  Pfam annotation: Domain name=RVT_1; Domain location=128-298; Score= -34.4; E_value=0.0086; Accession=PF00078.18; Description=Reverse transcriptase (RNA-dependent
  Pfam annotation: Domain name=rve; Domain location=637-794; Score =115.7; E_value=1.4e-31; Accession=PF00665.17; Description=Integrase core domain
  Pfam annotation: Domain name=zf-H2C2; Domain location=578-619; Score =5.7; E_value=0.067; Accession=PF09337.1; Description=His(2)-Cys(2) zinc finger
  Pfam module annotation: Pfam domain module=RVP_2::RVT_1::rve::zf -H2C2; Domain location=1-75::128-298::637-794::578-619
MSTPIQIDSTGGRIRADSICLNVCVEIRGIAFPANLIVMGTQGIDVILGMNWLDKYQAVISCDKRTIKLVSPLGEEVVTELVPPEPKKGSCYQMVVDSSEADPIESIKVVSEFPDVFPKDLPGMPPERKVEFAIELLPGTAPIFKRAYRISGPELVELKEQIDELSEKGYIRPSTSPWAAPVLFVEKKDGTKRMCIDYRALNEVTIKNKYPLPRIEDLFDQLRGASVFSKIDLSVFMDYLDKFVVVFIDDILIDSQSEEEHASHLRMVLQRLREHQLYAKLSKCEFWINEVLFLGHIINKEGLAVDPKKVADILNWKAPTDARGIKSFIGMAGYYRRFIEGFSKIAKPMTALLGNKVEFKWTQRCQEAFEALKEKLTTTPVLVLPDVHKPFSVYCDACYTGLGELAAVVHALKTWRHYLYGQKCDVYTDHKSLKYIFTQSELNMRQRRWLELIKDYELEIHYHPGKANVVADALSRKSQINLMVVRPMPYELAKEFDRLSLGFLNNMRGVTVELEPTLEQEIKEAQKNDEKISEIWRLILEGKGKDFREDAEGVIWFKDRLCVPNVQSIRELILKEAHETAYSIHPGSEKMYQDLKKKFWWYGMKREIAEYVAMCDSCRRIKAEHQRPAGLLQPLQIPQWKWDEIGMDFIVGLPRTRAGYDSIWVVVDRLTKSAHFIPVKTNYSSAVLEELYMSRIVCLHGVPKKIVSDRGTQFTSHFWQQLHEALGTHLNFSSAYHPQTDGQTERTNQILEDMLRACALQDQSGWDKRLPYSEFSYNNSYQASLKMSPFQALYGRSCRTPLQWDQPGEKQVFGPDILLEAEENIKMVRENLKMAQSRQRSYADTRRRELSFEVGDFVYLKVSPIRGVRRFRVKGKLAPRYIGSYQILSRRGEVAYQLSLPENFVCCA

SEQ ID NO: 55667 - protein, 151 aa, Zea mays
  Coding DNA Sequence Number=SeqID_12292
MGKGTKRKREPTPPSEDFGDSEYSEEEFFSESEGSPAPVSPPASSDDSDDSQGIAAEVWTYIRAVERSGLEGSDESEFSSDEEDSDGGEDEDDDDDDGDDDDGGDGDGDGSGGKGSTRGGSSTGSTRGGSSKGMLHPDFRGPKPGREHNHQ

SEQ ID NO: 55668 - protein, 374 aa, Zea mays
  Coding DNA Sequence Number=SeqID_12293
MAERYRLPRSCVPPTTRRKDCGHPPSGGLEGGKTRCIRERGDMVAFQGGHPPFKGDSPYLRPQLSWAESSPTRSNVLPLRRGGWVPHVIQAVPGQKKPRGRLVTCMGEPGSYLVSLAQTGLAECMQYSVFGYAAAPPEKATKRPPNRRARCMQPPSGYKQFSTFAQTSGRKGGQPCRRHATAPSGHTSTTSNAPSMEAHAHTSCNRRAGRYVQATAPPLAPLPRLLDCGTSTATRGYPAYDPAVPARRDGQCGQKRAGSDGGGRQAGAAVTSSAKLTSHPGAGPGKGDTPKRTLLREGNRLRASLLIRGSKAGPSEGFNSRLRARGLHTHYWSEVRRPAPRKGSTVASGHSGSAPTTDQGFVGWPSKGSQPPQT

SEQ ID NO: 55669 - protein, 311 aa, Zea mays
  Coding DNA Sequence Number=SeqID_12294
MASSHEGTTRPAEALREALRPRRSQTTPPRPRGLHPAGALARTHRNKTQPRKAGPLAKKCDESLQASANTPFEARGLLSGTIIRGTLKSPNSQLVTPISIKLQRPDGRQSRSDRSHFAAPLTGRTEGQRRLRRSDCCAARQSEADRQSGPTSGTIGSSAPPDPGLGLGLSPRRRRTPLRSTQGSDLGSAPEDGELRSARPRARTWAQPQKTANSAPPDPGLGLGLSPRRRRTPLRPTRGLGLSPGLSRRSPPRPTQGLGLDLNLGGASTSPNLGRGPATSTGGAIITLPQADSGYGEQDQRPIWLAPPDRQ

SEQ ID NO: 55670 - protein, 126 aa, Zea mays
  Coding DNA Sequence Number=SeqID_12295
  Homolog annotation: Hit_ID=Q6H4V6; Match level="QueryCoverage=49%, HitCoverage=49%, E-value=2e-15, Identity=69%"; Hit description=Auxin responsive protein-like
  Pfam annotation: Domain name=Auxin_inducible; Domain location=4-113; Score=95.1; E_value=2.2e-25; Accession=PF02519.5; Description=Auxin responsive protein
MKRLLRRLSRTVVAAAASSEDGGAAARPSSKDDGSRRRRRKKAGSVPEGHVPVCVGEEGGPVERFAVRAELLGEPPFAALLRRAAQEYGYAHPGALRIPCPVADFRRLLLRLSRDPAPAAGRYAYA

SEQ ID NO: 55671 - protein, 235 aa, Zea mays
  Coding DNA Sequence Number=SeqID_12296
MGRSKSGFDLGPALSFKDVHHPCWGRERGEPGLYLPRGSAGHLLFQLLVVETILQLCGGGVLQPCRGRRTVAAQLGCNIPPSSSLSWRGQERGPAGTPRPLFDESKPGVAVSARTEAELARKEDLVGRSLAGSSVSGTDAGVDLPRPRAGLMSSGDSWPRPQGDQPSRLLEPDSWRRPGRRWPGRDDEVVLQSGDPRTVSPSVARSDLAEGVVDAEGAAAPFNHQDPSLQDRIIL

SEQ ID NO: 55672 - protein, 293 aa, Zea mays
  Coding DNA Sequence Number=SeqID_12297
  Pfam annotation: Domain name=Transposase_28; Domain location=1-164; Score=-15.9; E_value=1.4e-05; Accession=PF04195.3; Description =Putative gypsy type transposon
MALLDPPECFQSEVALNSVRNLLKRGAPTFAERICASATPPSDLTAEEFMLFVSNFSCGLALPISPFFLLLLEELGLQLQHLTPRSILRAAIFAHLWEMFVGVVLLPPAPGQKGVVQRPSGGGKRGELRLHLSRGLHQHPMEAAAAGKLYHRVAASAAVPSGHHRVQVFALAVCDFTNSSPGAWPLGMLRVQNQAKRLHGSGPPQETSVHSLGPDPRFPDPSGYSSKYSDTCRRVVERAGLWYETKLSDYTAPDHPKERSTSSRHNHSCIDSSEDWARGEPIRVSRGRQASDP

SEQ ID NO: 55673 - protein, 60 aa, Zea mays
  Coding DNA Sequence Number=SeqID_12298
MAHFPFSLVMEMSGYSEEALIVAYTLLLDNKAQGQGFVNMNEGHRNLWLRTFLAKNYYYM

SEQ ID NO: 55674 - protein, 259 aa, Zea mays
  Coding DNA Sequence Number=SeqID_12299
MTASKKALSLPTDQRFKGWPLEGFNSRLRALGFRAHYWSEVRRPAPRKGSTAASGHSGSAPTTDQGFVGWPSKGSQSPQTQSEGWPWVCSIHNQGSGYAPERLGGCSRKPGSGQTVDSVNIPAQELGTRPAACVAPTAVPLDGVRLTAAKSGLRHHRKLRFARPQGSDSGSAPEDDELRFARPQGSDSSSAPEDDELRFARPQGSDLGSAPKDDELRLARPQGSDSGLAPEDDELRFARPQGSDSGSAPKDDELRFARP

SEQ ID NO: 55675 - protein, 169 aa, Zea mays
  Coding DNA Sequence Number=SeqID_12300
KRTARADDSMQNASTRGIEDAHISYAQKRGALISIHMLLCMELAEGWVKINSDAAFVAKTGKGAGGVVMRNSQGEVLAAAAQLYEHIPDALTSEALAARDGVVLAQMLSMEKVILEVDNSVLVALLRSDEGRRSAIAGIFGLESVPQWEKPKEYEGLHSTKAVSRKAST

SEQ ID NO: 55676 - protein, 500 aa, Zea mays
  Coding DNA Sequence Number=SeqID_12301
  Homolog annotation: Hit_ID=Q6QP51; Match level="QueryCoverage=16%, HitCoverage=27%, E-value=2e-07, Identity=45%"; Hit description =Putative growth-regulating factor 1
  Subcellular localization annotation: CTP_CleavageSite=53; ConfidenceScore=5.03e-01
MFHFRANSASVHADIATPGLGSSKSGQGVRTTPLHGGRPAEQQKTDERLAVARSDYDNNDPRSGWSSCSSAGLRVGAAAILPSIRGLGRPTRRATGAPDAACKQLHRHLRHHRASLIAEPIPRLEATQRATQQRQPDAAVNAAKSGPAVMTVAGAREQWSRRQPSSRPIRGQQENPLSRREDNAPVTRSSNGSRTRNGHPANYSPRRFNSAAGQAALLAGAAGDASPSPKQPRQKRLAPRRVQQPPQIAWALHPLLVRGSKAGPPKGSTAASGYSGSRPLLIRGSKADPRRVHSRLRHRARDDQGYVRYITKARAALPRLEGCSRKPGSGRTVDSVNIPARELGPRPCTRATASSHEGTTRPTEALRKALRPRGSETTPPRPQGLHPAGALARTHRNKMQPRKAGPLAKKCDESLQASANTPFEARGLLSGTIIRGTLKTPNSQLVTPISIKLQRPDGARTRAKPRKTANSAPPDPGLGLGLGPGRRRTPLRPTQGSDSG

SEQ ID NO: 55677 - protein, 198 aa, Zea mays
  Coding DNA Sequence Number=SeqID_12302
  Subcellular localization annotation: CTP_CleavageSite=56; ConfidenceScore=5.19e-01
MQAACNRAKWTRFSDSQRASMEAQAHASRNRRAGCCMQATAPPLAPPSRLFGCGTNAATRGDPAHDPAAPAWRDGQCGRKWAGGGGRSGRRFAFAVITAPKKVRHVVRFRILFLFSSFSISCNRDRERGIPRKGSFPVKEPGSEPPPTDQRFEDWPSEGLTVPSDRVGPTPTTGQRFEGRPPEGLHGHLRLLGLRAHY

SEQ ID NO: 55678 - protein, 199 aa, Zea mays
  Coding DNA Sequence Number=SeqID_12303
MKRGRWRRIVACMVDPCPPEVVAHERYNQASSQRDIPRPQPLRGTRSTATSLDPVQTTAILSRWTRREEVEVREGKRGYPYLSPEDSARDRGNDALDFRQWFRASLAGCCCRRNRDNMRGPTGSDSSARAMSRCQWAPDVRMTMCGERQRLGPRQRDSQGGPNGYSRPRSLRPSKDHHTPGGNAGNMEDFEEFQDYDEF

SEQ ID NO: 55679 - protein, 55 aa, Zea mays
  Coding DNA Sequence Number=SeqID_12304
MAGDMDIFDPNERYIGGIIQHLPSYAGKFDPHAYIDWELKAQQSSTILGRIQISF

SEQ ID NO: 55680 - protein, 82 aa, Zea mays
  Coding DNA Sequence Number=SeqID_12305
MESHDRRAERESQLVGGNENDGLSLTMVMVVCIATTSQEKMKSWKETSRSSKITTSSRRGLAATPSRLPMKAACIYVSFFAL

SEQ ID NO: 55681 - protein, 64 aa, Zea mays
  Coding DNA Sequence Number=SeqID_12306
MWKDRVEHAKDVWALYPGQTAHLTALRGEAMYQLMGLVESTKITLDNREDLVVDLSTELVEKDL

SEQ ID NO: 55682 - protein, 247 aa, Zea mays
  Coding DNA Sequence Number=SeqID_12307
MACIRCTTCKSVIPFLPSRLAERPLRRTVPGQFNHLERLHCRLHEEQERRCQKQEQDSSPSPQREVEFERPPSPAPPPEMPPAPPQGIPAAGGDPDGDGDDDDAGEAFSEHYSITERDTVEATRWALSQYCSLFSGVADGLDLKYYPRRSTGSAGGVIALPVSEGNPRLNSMVNLAVVLNTELDHALDELGKVRAEVAELCAECAARHYLDGGSPAPVGIQHPYRSPPRGRFDYGTPDCRTRIDLDP

SEQ ID NO: 55683 - protein, 46 aa, Zea mays
  Coding DNA Sequence Number=SeqID_12308
MAVMGSTSEKMYLCQVRKQPTFVASVLRWYRRKNTRSKAAGGRVPP

SEQ ID NO: 55684 - protein, 224 aa, Zea mays
  Coding DNA Sequence Number=SeqID_12309
MDFVQDLDAFGLSDTFKHGLTEPLLVKLSLNECEVLASVFEALGLVDIAWMVISLQELGYWCPQVFGHDEVDYAVALSVVGYLEALWAVDGWRADDVVEYVGGQGLASGCCFGQRISLLVLGTVYMLQATPAPAWHHASSQWMVHTFSASSSGCVIGLVQSMMKSARTCDLMAILGSKLRHVAFGSREDFGDVINWTLPSCALSGLLLDQRCADCVWRSCDVEQ

SEQ ID NO: 55685 - protein, 37 aa, Zea mays
  Coding DNA Sequence Number=SeqID_12310
HCGTGGYEIDGSGYDYGIGEDEAVEGDFQEFQDYDEF

SEQ ID NO: 55686 - protein, 223 aa, Zea mays
  Coding DNA Sequence Number=SeqID_12311
  Homolog annotation: Hit_ID=Q7Y145; Match level="QueryCoverage=21%, HitCoverage=7%, E-value=1e-16, Identity=87%"; Hit description =Putative uncharacterized protein OSJNBa0078D06.31
MGSAADVEQSNERLDGLEHHSRLVSLLAEGNSCLSQLQKALIFVKLMVVVLNWNTRGGKSNMILFNYDSKRDMPLQFRLCKKNYTGRAPDGAPDGARHRYQTAQQQLMCNPSVLPLEEARSIRILVVLCLKLLRTRKSPAKQTARNLFRGGDDEDDSADADTNDPVVPWSLGRVGVGHMVYISGLTCALSSTNILEVSWREKEPGSLFVNLSLLPYADAEKLL

SEQ ID NO: 55687 - protein, 245 aa, Zea mays
  Coding DNA Sequence Number=SeqID_12312
  Gene Ontology: Biological process=intracellular signaling cascade
  Homolog annotation: Hit_ID=Q10MX5; Match level="QueryCoverage=54%, HitCoverage=36%, E-value=4e-55, Identity=76%"; Hit description =Expressed protein
  Subcellular localization annotation: CTP_CleavageSite=88; ConfidenceScore=5.21e-01
METFGLHNPMAYGSLEWLSLRSSTSANTTSPGNRSLGHKSLSVPVGEERLPANSDTSLLWCSSPSSLSFDCSTSAALPMTATAAPTSSSSTLWAPAYHTGLGTWRGRCATVFLTRMKGKTVMFVGDSLGRNQWESLVCLLHAAALQSPTQLVSVDPLYTYKFLEYQVTVSFYRAPYLVDIDVVQGKQVLMLDDIYENAESWRDADVLSFNSGLWWDYMGESGRYYEDMDRTVAFQRGAWSTEHWQ

SEQ ID NO: 55688 - protein, 132 aa, Zea mays
  Coding DNA Sequence Number=SeqID_12313
  Homolog annotation: Hit_ID=A3BJR4; Match level="QueryCoverage=71%, HitCoverage=17%, E-value=2e-07, Identity=42%"; Hit description =Putative uncharacterized protein
MSMEEEAYKGNFEGELRQQWGAVELGREELEAHAHLTDKGVHADGDVVQRLVIEEAWPGCCQLFEWREKGAVTGVKMQGRGRVRGVQHGGRSGVEGANFLASGKLLDLSEQQLVDCERRGEQRARAVIRRPS

SEQ ID NO: 55689 - protein, 517 aa, Zea mays
  Coding DNA Sequence Number=SeqID_12314
  Gene Ontology: Mol. function=transferase activity, transferring hexosyl groups; Cellular component=integral to membrane; Biological process=carbohydrate biosynthetic process
  Homolog annotation: Hit_ID=Q10MP3; Match level="QueryCoverage=71%, HitCoverage=99%, E-value=1e-153, Identity=72%"; Hit description =Glycosyl transferase family 8 protein, putative, expressed
  Pfam annotation: Domain name=Glyco_transf_8; Domain location=230-487; Score=304.1; E_value=2.7e-88; Accession=PF01501.11; Description =Glycosyl transferase family 8
MSIAADATVTPPRRERKAERWQARGRLPRWVGGCRLRIRCRCSVPQSAPIYLAWIPACFSPTPRADPPTSRRARRDPIEVQEVEGACAVRVFPFVSIPSLAAPPLDAIARLHSVLVRWSKQRRRPQLGRPGARKRWPSRRSAMLWVARLSGLLSAAMVVVVLSPSLQSFPPAEAIRSSQFDGSVRFPGQIAGGARGVAFRRAPPFRNAADCGAGADNGTGANVCDPWLVHIAITLDNEYLRGSVAAVHSVVQHARCPESVFFHFLVSDPGLGDLVRAVFPQLRFKVYYLDPGRVRGLISTSVRQALEQPLNYARNYLAELLEPCVRRAIYLDSDLVVVDDVAKLWRTDLGGRTVGAPEYCHANFTKYFTGRFWSDQRFAGTFAGRRPCYFNTGVMVVDLERWRQAGYTQRIERWMEVQKSAAGRIYELGSLPPFLLVFAGHVAPIEHRWNQHGLGGDNVLGSCRDLHPGPVSLLHWSGSGKPWARLGAGRPCPLDALWAPFDLYDPGGGAEESPYKF

SEQ ID NO: 55690 - protein, 17 aa, Zea mays
  Coding DNA Sequence Number=SeqID_12315
MGGDAPSHPTGGVSDYS

SEQ ID NO: 55691 - protein, 97 aa, Zea mays
  Coding DNA Sequence Number=SeqID_12316
MASTAETTELPYDPCPYGDQCEFISFVSGQEHIPILIGANEPQKFVILLSSQEARRSVDSESEGRIEPPHPHHSLYPLRMAPVHQIRLPPIYFCGAR

SEQ ID NO: 55692 - protein, 143 aa, Zea mays
  Coding DNA Sequence Number=SeqID_12317
MGVPDLCAHWRAINALQVCLSAARRLPSATVLVLDGAVVLPLAQRLFAATLGEAEAELEAVVLGRLFVSTLGCGSRQLRTRHAATQQPCVSTQLLSIGCPELAWWTRRARTSGGFSLVQPWSVRSGSARRGSVAAGRGCCCYV

SEQ ID NO: 55693 - protein, 188 aa, Zea mays
  Coding DNA Sequence Number=SeqID_12318
  Gene Ontology: Mol. function=protein serine/threonine kinase activity; Cellular component=cytoplasm; Biological process=protein amino acid phosphorylation
  Homolog annotation: Hit_ID=A2Z3N4; Match level="QueryCoverage=44%, HitCoverage=13%, E-value=2e-37, Identity=90%"; Hit description =Putative uncharacterized protein
MVFISFNSWSTPVEKMQIAENSAADRVEVPTDGASEWEIDVKLLKFGNKVASGSYGDLYRGTYCSQDVAIKVLKPERINADMQREFAQQALCRGYPTKFASYFHYCRSLRFEDAPDYQYLKRLFRDLFIREGRLATVVAHRQSFVEWVKNVGTHVLNVKNVGTVELIVQSSQTHAGHIRSTATWPRRT

SEQ ID NO: 55694 - protein, 55 aa, Zea mays
  Coding DNA Sequence Number=SeqID_12319
  Subcellular localization annotation: CTP_CleavageSite=34; ConfidenceScore=5.30e-01
MAPKRANPQGSSSHGGGNAGSPAAPGVSGVGQLQAEVAFARVFRLCAPLEGRLLR

SEQ ID NO: 55695 - protein, 95 aa, Zea mays
  Coding DNA Sequence Number=SeqID_12320
  Subcellular localization annotation: CTP_CleavageSite=48; ConfidenceScore=5.67e-01
MELIRPSSWCPGSPPVPRLSPGHRRFRPNRLRFTAPLPCSGSTQRLPCSSAGGALRSSPPSIELRRWFTIHHGRICCHFLPPGNGVIGRVGGGVR

SEQ ID NO: 55696 - protein, 57 aa, Zea mays
  Coding DNA Sequence Number=SeqID_12321
MESHDLRAEWESRLVGGNEIDGSGYDYGIGCQHCNHCSGEDEAVEGDFQEFQDYDEF

SEQ ID NO: 55697 - protein, 186 aa, Zea mays
  Coding DNA Sequence Number=SeqID_12322
  Subcellular localization annotation: CTP_CleavageSite=57; ConfidenceScore=5.29e-01
GVAQAALSFCQTGQWSGGVTAVTSALPGARVRIEVSGHLCVKCPCNLVSRCGDLVKVASERSQGLGQAGDVSAIKRGPRARRKSLEVGCLRPRLGSGEARSSHSCGLIPDLIVPIRPLQLYADGGYQLRIRRLEAPEPLHRARGRSGTDSAFYIRPFVAFPQGGGGECAMLPSMGTEHGVSGELQA

SEQ ID NO: 55698 - protein, 331 aa, Zea mays
  Coding DNA Sequence Number=SeqID_12323
MARARTEGFSIQIQTNSNMCINSKVNELAPMQTDGKNLNQSFGHIVVIPYPKQYIYRSNTSTLMRHPKYTRLSKTNEVEGNESDRLGLGMRKLPYIDVTIERQNLMPTHMLENSSESNSIAHQTCALETLANKGEQVGKIGTSEELKLDMSPHSAQNKSNPKDALRRSLRCNVPMTNGSSIAYMDSLEKAMNLATARNFYVNGGSSFVVGHKQYYTSPCLRPQATDRLSSHNIITILSKIGIKIGGNRLGVEEHKIMSNCIEISLGVKNRDSSKAISNWSKLVAWNELCQKLVNIALHEIRIFFAGICIQMRPRDDLYRTLNAMKFLSKKI

SEQ ID NO: 55699 - protein, 643 aa, Zea mays
  Coding DNA Sequence Number=SeqID_12324
  Gene Ontology: Mol. function=pyridoxal phosphate binding; Biological process=metabolic process
  Homolog annotation: Hit_ID=Q2R902; Match level="QueryCoverage=95%, HitCoverage=95%, E-value=0.0, Identity=62%"; Hit description =Aminotransferase, putative
  Pfam annotation: Domain name=Aminotran_5; Domain location=74-526; Score=-6.3; E_value=2.2e-11; Accession=PF00266.10; Description =Aminotransferase class-V
MPSLRAVMVHGGGEKDGGGSTDGVPPPCAHTLVSLLRARSQRSAKADEKVEWVRSQLVGSDAEFETPFGRRALLYADHTASGRSLRYIEDYIVKHVLPFYGNTHTEDSYVGSKTTRMARKAASYIKRCMGAGPDDALLFCGSGATAAAKRLQEAIGVACPPALRARAASQLRAEERWVVFVGPYEHHSNLLSWRQSLADVVQVGAGADDGLVDLAALRRALGSPEYASRPMLGSFSACSNVTGVLTDTRAIARLLHQHGAFACFDFAASGPYVDIDMRSGEMDGYDAVFLSPHKFVGGPGTPGILLMNRALYRLAGMPPSTCGGGTVAYVNGFSEEDTVYYDDIEEREDAGTPPIVQKVRASLAFWVKEHVGRDAVAMRERAYAEAAMARLLANPSVEVLGNVAARRLPIFSFLVYPPDDDDGAAVAAAVAHDDADDDASSASPAPRRRLPLHGRFVAKLLNDLFGIQARGGCACAGPYGHALLGVGEDLSLRIRDAIVRGYHGVKPGWTRVSFAYYLSRDEFRFVLAAIDFVAKHGHRFLPLYSFDWATGNWAFRRRTFKHHVMREELLRERDTSTDDSDDDDDQQHFTKKKTAAAEYQQQDKFQSYLDTATKIALSLPDTYRELVASVPNGLDPDIILFRV

SEQ ID NO: 55700 - protein, 193 aa, Zea mays
  Coding DNA Sequence Number=SeqID_12325
MGRRHDRRVFGRCNRVLSSVINQPNHHNRLPPRPRSRAPRLPNPSVPLDTEIHRHWRHSANTTGEIRHGAHPTFFMVPWIPSRATPEPWASPFPTQPSEIHRAATLFRLNAATALLQRRWSPAFFPAVNRAPSMVHHTPWSNLLPFSPTGKWGDWARGWRCPMSYADEQATVESEVQQVEIAEQELVEGKLCP

SEQ ID NO: 55701 - protein, 138 aa, Zea mays
  Coding DNA Sequence Number=SeqID_12326
MAPAWLWRDAGHARSGAGVLWRAEHVEHVELPSGSVSHDYSVAESGCLLQAETHSALLGHWGLIAAGLPSSDIASPNGPAPHSGNMLCFQPELEDEVPADSASGTDLLLTDCFDDSDTGAEDTAFGTAATAEVDAGST

SEQ ID NO: 55702 - protein, 114 aa, Zea mays
  Coding DNA Sequence Number=SeqID_12327
MATCLDLSYSRAVSTEKAVEAKYAGPGKSKGFGGDRSNQGPEKRQRVALFVESLNFSSKTAHIEGETTPIFSETREVPAKAMETRKKMSGQKYEKMGESIIHKWHHAGGEPVMM

SEQ ID NO: 55703 - protein, 139 aa, Zea mays
  Coding DNA Sequence Number=SeqID_12328
MDSNLGAIIIGVEVTHSGANGTGVVVRYLGANDDDAELKGACTKGKLLAEGIKQCAAWHGRIVYQQTQQARRLLDDLDAACQRMGRDTLNAERARHPSAQWQATRPLLNKCRRCTALRQARPDGLCHGPQAAGLYLSGK

SEQ ID NO: 55704 - protein, 264 aa, Zea mays
  Coding DNA Sequence Number=SeqID_12329
  Gene Ontology: Mol. function=sugar binding
  Homolog annotation: Hit_ID=Q4U0C9; Match level="QueryCoverage=69%, HitCoverage=93%, E-value=1e-99, Identity=90%"; Hit description =Stress responsive protein
MHHQWGSWGRREQPAAPYKSAGPAVALSASGPLDHQSPEELLIEVSEVEKQAANKGTIVMDGGYYGGRDQRYSGGYYGGGGIATPGYAPAVPYGMSQVNIEGNGCGRALPPQPTVKVYCRANPNYAMSVRDGKVVLAPANPKDEYQHWIKDMRWSTSIKDEEGYPAFALVNKATGEAIKHSLGQSHPVRLVPYNPDFLDESVLWTESRDVGNGFRCVRMVNNIYLNFDALHGDKWHGGVRDGTNVVLWKWCEGDNQRWKIQPYY

SEQ ID NO: 55705 - protein, 365 aa, Zea mays
  Coding DNA Sequence Number=SeqID_12330
  Gene Ontology: Mol. function=DNA binding; Cellular component=nucleus; Biological process=regulation of transcription
  Homolog annotation: Hit_ID=A2YQ18; Match level="QueryCoverage=85%, HitCoverage=94%, E-value=2e-79, Identity=53%"; Hit description =Putative uncharacterized protein
  Pfam annotation: Domain name=NAM; Domain location=9-141; Score=310.6; E_value=3e-90; Accession=PF02365.6; Description=No apical meristem (NAM) protein
MASSSRLDLPPGFRFHPTDEEVVSHYLTHKALDSRFSCVVIADADLNKIEPWDLPSKAKMGEKEWFFFCHKDRKYPTGMRTNRATASGYWKATGKDKEIFRGSSSSPRRVLVGMKKTLVFYTGRAPRGGKTPWVMHEYRLEGSLPHNLHRGAKDEWAVCKVINKDLAGKAGQQQMAPPPHAVSVGMERSDSLAFLDDLVLDNADDLPPLVDSTTYAAGSLFAAAGTTTTTNDDSGGYQQATKAEPQPQLPAPSNSPYQHQQQAIRRHCKAEAPAPAMVLSPSRETPGADMFQLQHVDELLQLDGGFMEDYYNMNMWKTQKSGRKGRPRRLAWTRRIDYLTTHQLVFGRYDTVFLCCRHAKRSRTR

SEQ ID NO: 55706 - protein, 172 aa, Zea mays
  Coding DNA Sequence Number=SeqID_12331
MEREALKRTGLEACRNGQQQPLLGLGSHLGRPKAGGLACWQFVTRLFEGHARISDPMPSLLQFTAVAASQAAVVVVVAGLLLVRVWYYLVLYCYKEVATTRSGAEEVGPRPGRWGGGRRPDPAAPENWESKGLSMTTMMDGWMDGSQSQVYILRAAAVVLPFVSCIRRESHV

SEQ ID NO: 55707 - protein, 174 aa, Zea mays
  Coding DNA Sequence Number=SeqID_12332
  Homolog annotation: Hit_ID=A2XNG1; Match level="QueryCoverage=71%, HitCoverage=28%, E-value=5e-45, Identity=69%"; Hit description =Putative uncharacterized protein
MTWQGAPDCPAKTPWDVQCVDLRCDGVSLKSSTGNQQQQDLSEASLWLPLQVLKPATKQKLRFEGDSYKKALAEFLQAVPAFLGGKCSCLRCESPRDDSVIQAGEGSKKQPRLVSVDDGSPVTDLDFDLDEEEIPSPYSCDNAIRAVIIDLLMVCIFVAFLAGMIDPASVPANA

SEQ ID NO: 55708 - protein, 300 aa, Zea mays
  Coding DNA Sequence Number=SeqID_12333
  Gene Ontology: Mol. function=hydrolase activity, acting on ester bonds; Cellular component=extracellular region; Biological process =lipid metabolic process
  Homolog annotation: Hit_ID=A3B3V1; Match level="QueryCoverage=54%, HitCoverage=26%, E-value=5e-42, Identity=81%"; Hit description =Putative uncharacterized protein
MPVTAGDMHSRYIPQQDYFSEGLYTFDIGQNDLAGEFYSRTEDQVIVSIPTILLEFENGLKKLYDQGASKFWIHNTGPLGCLPQNIALFGKDSSQLDELHCEKPDALQKGISPSDDAFTLGIAPALAKEHLLNAENKGKLYDQGASKFWIHNTGPLGCLPQNIALFDACLYLSLLWCRDTPLYLECAPENILSPTSAPVDEEVKNEDGKHILTKANIDQTVEGVSAEDIDPDRVEVASDALQKGISPSDAAFTLGIAPALAKEHLLNAENKGLLCRDVSPDGFRFFSNLFNDIDPQNIHS

SEQ ID NO: 55709 - protein, 81 aa, Zea mays
  Coding DNA Sequence Number=SeqID_12334
  Subcellular localization annotation: CTP_CleavageSite=25; ConfidenceScore=5.17e-01
MHNRRSSPRPTPGARLPPRPQNTVSASPDPKLGVRLGLGRWAPPRPTPGLGLDLDLGRWSPHRPTPGPSLYLNLGRNRVLA

SEQ ID NO: 55710 - protein, 98 aa, Zea mays
  Coding DNA Sequence Number=SeqID_12335
MGKSVPSLLMLLLSRVTALVPTITGMRDHVSGRVRGKVCGQVHLGIRTLILIPISSRRPRVPMDPCPQTIIIPLSKWIQPIPDLARVLEKSLNFYRDP

SEQ ID NO: 55711 - protein, 254 aa, Zea mays
  Coding DNA Sequence Number=SeqID_12336
CGSNGANMVSENKSWPLKLESTANNAPSTSRWTSKEAALPATMAVTHDIASAIWTAPRDWSAVMGVNVAEWTNKQLNAWMWAWRGSSGRRRQHPGEGGIDGNGIGLEPTPGVLQTAEAHTARDGGQVIDHKFCGKENRGRVRSGRRSSKVVRRGSRGAVEGARHGNPGGPAKPPRPGAPTTDERRRPAMGEVVGGRIESYIMGAPKSHEPSRSRRLWIRHEGDGAARWVPRDKDTRPRHAGCRPSDCPVGPMCK

SEQ ID NO: 55712 - protein, 70 aa, Zea mays
  Coding DNA Sequence Number=SeqID_12337
MSGDHAKREIVTGDKPATSHEKAPLKESGNKLKKGSPPHKSHQSGDKNKKMKKANHWFLTVKIIVCGVIK

SEQ ID NO: 55713 - protein, 224 aa, Zea mays
  Coding DNA Sequence Number=SeqID_12338
  Gene Ontology: Mol. function=small conjugating protein ligase activity; Cellular component=intracellular; Biological process =regulation of protein metabolic process
  Homolog annotation: Hit_ID=A2WK64; Match level="QueryCoverage=79%, HitCoverage=21%, E-value=5e-82, Identity=67%"; Hit description =Putative uncharacterized protein
  Pfam annotation: Domain name=UQ_con; Domain location=55-220; Score= -9.0; E_value=0.00016; Accession=PF00179.17; Description=Ubiquitin -conjugating enzyme
  Subcellular localization annotation: CTP_CleavageSite=33; ConfidenceScore=5.24e-01
MAASRSTTHGCSSSSAPDARCLTFSRHRRSRAHASAVGDVQLQHLGTGGKKWVKKVQQEWSILEKNLPDYIYVRVFEDRMDLLRAVIVGASGTPYQDGLFFFDFHLPLEYPLVPPSAYYHSGGLRVNPNLYVDGKHFEDFVKSHFRKRGHYILKACHAYLQGNVVGTLTDDACTTDRSKEHSSSVGFKLVLAKILPRLITALKDTGADCDQYEHLGRTETVTES

SEQ ID NO: 55714 - protein, 108 aa, Zea mays
  Coding DNA Sequence Number=SeqID_12339
  Subcellular localization annotation: CTP_CleavageSite=75; ConfidenceScore=5.25e-01
MPRPRRGAAPALMRRAAGLCQSRAPTTSPGLGPAAMPAYAPGLAPPEPPRLRSCRRGCARALGARPHSPGRPHPRAAGEAAPMRAGIRALAAGPPRHRGRDWEPSPRL

SEQ ID NO: 55715 - protein, 194 aa, Zea mays
  Coding DNA Sequence Number=SeqID_12340
MACASASQRLGLGVRSSHRERVRGPGSTRASAQIWQHAGKRTDLARGRAASARAPPVRAIPQRGHGGPQRAHGRDPRKRSGSGAGGARGQAPGGSACDSGTAVLAPAQARRPGLKWKIVRPTSLQHQLLQQQQQQQQQSLLSQARWGRLEMKPRMKTSELNPQRKQGRQRQRRTENDETGEHIKEIKPTITSKV

SEQ ID NO: 55716 - protein, 106 aa, Zea mays
  Coding DNA Sequence Number=SeqID_12341
MVPIGIDTITKAKITAPQSKGESGKGGGKSRLAEPRQHLGSLLPDGVPSGSEVQAPPATFAAPAHVRTVRPVRQETLALLQVVDHLAPGRGQSVSMQRAPPPVLVQ

SEQ ID NO: 55717 - protein, 187 aa, Zea mays
  Coding DNA Sequence Number=SeqID_12342
  Homolog annotation: Hit_ID=A2ZLQ7; Match level="QueryCoverage=29%, HitCoverage=7%, E-value=1e-07, Identity=50%"; Hit description =Putative uncharacterized protein
MNPNDVFALAIVPMGTEEPTNENSREEEHVDINADDNNVSGHENMSNSSDDINTDDNIYDPRNWDNLDNKARDILIEKGPIREEGDGGGAQVWALSDGVSGFPSRLSLVASRPRLRSSAHRPVTLRACLSLFLLSPLVDRQWLPAAAAAPHAARGLRAAGASSRYSTKAVAPLWGRLCPKAKRYPSA

SEQ ID NO: 55718 - protein, 107 aa, Zea mays
  Coding DNA Sequence Number=SeqID_12343
  Gene Ontology: Mol. function=small conjugating protein ligase activity; Biological process=regulation of protein metabolic process
  Homolog annotation: Hit_ID=A2WK64; Match level="QueryCoverage=98%, HitCoverage=9%, E-value=1e-23, Identity=57%"; Hit description =Putative uncharacterized protein
METLPNGSVNNAELNQENEKSMYASESEEARDIFVYREDVVSLKSKEDVRGVVLEVAGEYDYDGSITDDDIDTEEHEDKTAYGAENGVADGGNVSNGAEVESQSSFA

SEQ ID NO: 55719 - protein, 463 aa, Zea mays
  Coding DNA Sequence Number=SeqID_12344
  Gene Ontology: Mol. function=small conjugating protein ligase activity; Biological process=regulation of protein metabolic process
  Homolog annotation: Hit_ID=A2WK64; Match level="QueryCoverage=96%, HitCoverage=44%, E-value=1e-164, Identity=63%"; Hit description =Putative uncharacterized protein
MIDSDKHTWQICTCSENSVPLSGIPESQADAQIDTDTGHRQTDVDSTADVLSMSDGDNSCIAKESETGTSASSISNEGPQDNATSRKKFRKDGTKECGVAATALIPIHSPNEHEFFPEQYVVDKVTNDVGVDDSSEPRRVGLVRGVNAKDRTATVSWFKPPLHPEEPKEIACNEIVSVYELDVHPDYDYCYGDIVVRLPPVKPVIESTNSKEQMELDKTLDSSEGFAASYSAPPDTSADEQLSQKESCLQFTSLSWAGNIVGFQDGEIEVIWGDGSISKVGPHEIYVVGREDDGASLDDGTASDGSSWETVDDNEMDVLHDSAKGDSQNVPENSIGRENGSFSSQDGSSVATGPLSVAFEFVTRLASDLFARGRRHLDGSSDAMDEVESHWSNEISEIGDDIDKCNKNHVESPEHAAVIENDSSVEKSVDVVMADNPVHSECFKHFDVLQCPLDHHYLENTTQ

SEQ ID NO: 55720 - protein, 23 aa, Zea mays
  Coding DNA Sequence Number=SeqID_12345
MGVPLIMVPDNIAPGKTRVPIIL

SEQ ID NO: 55721 - protein, 255 aa, Zea mays
  Coding DNA Sequence Number=SeqID_12346
MALWLPSPEKSQQKLGSSSSSDPEGPYEGDTQQAFHERAGVVRLLGIGVSQGDSARLRLKREVDARRAPRWGAGAVDSLDSRRGAASCLALVALPPPPSAGKRTGQARRLFFHHAGKTLSIPPPAGGLSAAIVAVARRWKEYHVVAAVEGHELKAPKMEHRPGSERLLETAHLELDGKLFVNTQQAPTWRTNCRRFETGGSLSRRVKCRRVPQPRWVGARPSTKGGSEVAGDGRERGGNPAAFVFVPCPGRVRLQ

SEQ ID NO: 55722 - protein, 19 aa, Zea mays
  Coding DNA Sequence Number=SeqID_12347
MPFTIVGNMQQRNTEERVF

SEQ ID NO: 55723 - protein, 387 aa, Zea mays
  Coding DNA Sequence Number=SeqID_12348
MKILEAERWLKGTNSRGVAFLQRQGGKTAGDSPYLRPQPSGAESSPTRSKVLPLRRGDWVPHVMQAGPEQKKPNRRARCMQPPSGYKRLSTFAQTSGRKGGQPCRRHATAPCGRTSPTSNTPSMEAQAHASCNQRAGCFVQATAPPLAPLPRLLDCGTNTATRGDPAHDPAAPAWHDGQCGQKWAGSNGGGRRAGAAFMSLRASLLIRGSKAGPLEGFDSRLRSRGLYTHYWSEVRRPAPRKGSTTASGYSGSAPTTDQGGNDLVTESHRREASSPRTPSTGDQVRQITRSSPETPCSVPTEGNMALPPLLLAERRRRGVCKKVESVPNRPLALCRGSGAALANPAPAKPLKASTYQPENLGPDRTPGLRPARMRERPDQSKHYARH

SEQ ID NO: 55724 - protein, 89 aa, Zea mays
  Coding DNA Sequence Number=SeqID_12349
MAQGHISLSVIHMELEHKEVLHTAVDHMEEGCTEVPRKKLCFHPHQVEEGHTCVSGKKLKFRLGKLEVDHMKASMDTNDRENGMVVDAV

SEQ ID NO: 55725 - protein, 139 aa, Zea mays
  Coding DNA Sequence Number=SeqID_12350
MGKGKKGGSSPHHSGDKRKREPSPPSEDFGDSEYSEEEFSSESEWSPTYTSPPVSSDDSDDSQGITAEVWTYIQAVEHSGLEGSDESEISSDEENSSDSSEEGSGGDGDDEADGGDKGDGGSGKDDSGSDRASGKAPLA

SEQ ID NO: 55726 - protein, 91 aa, Zea mays
  Coding DNA Sequence Number=SeqID_12351
MNQPCLGKNHLSGKLVGEGTDAVTPGDIMRPENEIRRSLCHEMRSRRWEKLQMNESSGRGGIPADVIVGKLKSRPSRRRDNVDRTLSSDEI

SEQ ID NO: 55727 - protein, 52 aa, Zea mays
  Coding DNA Sequence Number=SeqID_12352
MEVTEGPSAVEVAVAENPAPKGGAGDYLAPEGVAGRETITCGFARQSRSVIS

SEQ ID NO: 55728 - protein, 179 aa, Zea mays
  Coding DNA Sequence Number=SeqID_12353
MQAACSRTEGAHPFDFDASSMEAQAHTSWTGKGDTPKGILLREGSGPRAPLLIRGSKAGPSEGFNSRLRALGLRAHYWSEVRRLAPRKGSTAASGHSGSVPTTDQGFVGWPPKGSTAASEHAERGMTLGELVALWNSSSTYGYNSPDCPVCIGLSGEPTVGRANGRPRDLRGTRGRANG

SEQ ID NO: 55729 - protein, 162 aa, Zea mays
  Coding DNA Sequence Number=SeqID_12354
MGRVAFKKRVTPLDGNHVFALPSCIAPFHLPSPPDGERPRSFRLVVVGGTQLHGSWYLLAIARLQGFSSGSPAASPRRWSPKAVTTSSMVGRSEPGCDLCPSLSFKDVHHPGWGRGRTEPKLYLLRGFVGHLLPQHSGERALTGLAGGSDFDNAGLVGGERR

SEQ ID NO: 55730 - protein, 299 aa, Zea mays
  Coding DNA Sequence Number=SeqID_12355
  Homolog annotation: Hit_ID=Q10QQ9; Match level="QueryCoverage=22%, HitCoverage=6%, E-value=2e-19, Identity=67%"; Hit description =Expressed protein
MPHNLGQPCCTPACLCTLPRAMEAVRHTPPTTTAQHRPGHGAPRGALLGPHLLAEIGLDEEGLGGGRGGERREGDEQRAGGEEDRRGDEEQEKQQAKTSTTSSLPSSSERSSSSACNNLTKGGAESDEEIRRVPEMGGASASASSGAGADERPKGEDGKQGQVAAPNPLLVIDVSGKEFKFTWASERGELCDIYEERRSGEDGNGLLLECGSAWRKPPARLRSGAAREDRTGDGRKPGPYATVPTASVTAQSLGWRRVALVALLCLGPSPVRSGRPKATTDAPEPVGPPSEWWELFLSG

SEQ ID NO: 55731 - protein, 32 aa, Zea mays
  Coding DNA Sequence Number=SeqID_12356
MDITNPFQQVVEWKAASSLIRNAPNNDRYFIH

SEQ ID NO: 55732 - protein, 184 aa, Zea mays
  Coding DNA Sequence Number=SeqID_12357
  Subcellular localization annotation: CTP_CleavageSite=46; ConfidenceScore=5.43e-01
MASGQTLLLKGPRSRPLTGDKNQPLKPKSRRSGAQVSLTVSSAEATASARGSLTYGDHPLNTDDSGHLPTNTAPPNSDRPKLTDRSSLLSSPRLSQNTSTALAAYDVLCDPPPVQPTAQGGPGRGRPAHGATDTRAAEEQPRSAPAADLLTRTPKRHGQSLHRRAPEFPPYDMRAGSHTSCDMT

SEQ ID NO: 55733 - protein, 145 aa, Zea mays
  Coding DNA Sequence Number=SeqID_12358
MPRRHITCQWNRQAARLIRNKCSGHVAQRPYVRLRPLAYVTGSWPRGSIGSPPERGAETINGSANKDSYLRASPVKISNKSKNVSSSNPSISSNVLKIYFDVGPFGASSLIALVNLSNFSTIIEVKESLDRCLFKLPEVVYEKTI

SEQ ID NO: 55734 - protein, 285 aa, Zea mays
  Coding DNA Sequence Number=SeqID_12359
  Gene Ontology: Mol. function=metal ion binding; Cellular component =integral to membrane; Biological process=metabolic process
  Homolog annotation: Hit_ID=A7PXR8; Match level="QueryCoverage=68%, HitCoverage=72%, E-value=4e-61, Identity=56%"; Hit description =Chromosome chr15 scaffold_37, whole genome shotgun sequence
  Pfam annotation: Domain name=zf-DHHC; Domain location=38-102; Score =127.7; E_value=3.4e-35; Accession=PF01529.11; Description=DHHC zinc finger domain
MLAMILWCYLMAVFTDPGAVPENWRHDAEDSGNPSFSSSDEQESAPRYCSRCQNGKPPRCHHCSVCNRCVLKMDHHCIWVVNCVGARNYKYFLLFLVYTFIETVLDTLVLLPNFIEFFQDEHRRSSSPGDIAILFLAFVLNLAFALSLLCFIGMHASLVTRNTTSIEVYERKKSVSWKYDLGWKRNLEQVQGLKQDYLNVVSGYSSKLERQEKTLGDVSILAVPQPNTPLISRPKTKLRIDLKKQVWGAADCRFRGLPSVILSSPALSSAQPTQCRTPSQVGAVG

SEQ ID NO: 55735 - protein, 112 aa, Zea mays
  Coding DNA Sequence Number=SeqID_12360
MDREIDPNPYPNRAKTHRVSGSGYPLPCLFSGDSWPRPRGVQPSRLLEPDSWRRPGRRWPGRDDEVVLQSGDPRTVSPSEARSDLAEGVVDAEGAAAPFNRQDPSLQDRIIL

SEQ ID NO: 55736 - protein, 172 aa, Zea mays
  Coding DNA Sequence Number=SeqID_12361
  Gene Ontology: Mol. function=hydrolase activity; Biological process =metabolic process
  Homolog annotation: Hit_ID=Q850X1; Match level="QueryCoverage=43%, HitCoverage=38%, E-value=4e-23, Identity=69%"; Hit description =Putative isomerase
  Pfam annotation: Domain name=FAA_hydrolase; Domain location=47-171; Score=-41.5; E_value=3.9e-05; Accession=PF01557.9; Description =Fumarylacetoacetate (FAA) hydrolase family
MPNLKKQCGRFVSTTPCPRCFDLLAMGEHNGHVPVPVIGPQRNDEELDNPVPKEPIMFLKPTSSFLHAGVATITVEIPETLESLHHKVELVVVISRRGRDVPEASAMDFVRVGVAQAALSFCQTGQWSGGVTAVTSALPGARVRIEVSGHLCVKCPCNLVSRCGDLVKVASE

SEQ ID NO: 55737 - protein, 228 aa, Zea mays
  Coding DNA Sequence Number=SeqID_12362
  Pfam annotation: Domain name=DUF793; Domain location=39-226; Score= -190.3; E_value=0.00043; Accession=PF05633.2; Description=Protein of unknown function (DUF793)
  Subcellular localization annotation: CTP_CleavageSite=50; ConfidenceScore=5.36e-01
PPPLCFHPTTATPTCAAAAPGRLLPPGAAPAPGAPWPSRPPSPSQPAASLCNVVRDQNQTHSFPPPPDAIDAFQRRAAQLLADLPASDNVLSLAWTRRLLESFLLCLEEFRALLFGSGDSPTARPPLDRLVAGFSDRAVKALDLCNAVRNGLWPSSALQRRCAQSPRQAELFPATTTPSTPGRARWPLRGVCAPPRCQRPPRVEPPGPSCACRPPHRAGHLTARVDNK

SEQ ID NO: 55738 - protein, 97 aa, Zea mays
  Coding DNA Sequence Number=SeqID_12363
MTMRSHNLVLHGPKGPFFPLRCFGWAWPPCLALVREGEGNCGLRPLCYVVNITLVEDEVSPYIMSHLLVLIDCYYVEGTKDLLVEIEFVDGNHKLVK

SEQ ID NO: 55739 - protein, 145 aa, Zea mays
  Coding DNA Sequence Number=SeqID_12364
MTVRRGPLTGEDAVMNTFHGEVWPVANPLGQVRAPGVLPVPPRPPVRARYGLARAPVCVQDTEMKHTPPNPLAPVIPSHLHELVNGDHSSPRFARLCTTQHGYMRIAARWDSGTRYLNLRGHRNGPRRGGNLVSRARDAHGVYYG

SEQ ID NO: 55740 - protein, 164 aa, Zea mays
  Coding DNA Sequence Number=SeqID_12365
MGTHIQETTLGARRRPAPDFCQDSQACDLGELLNEGRRTLPRVRRALSSPEHAQRPTPRAPRRAVPRPCLLLEPAPIKPTEASTVLPRVLSTSPEPEITGVCPADSVPVANRSPATVDRPIEPFPAAPDPRSERACLGEAPRASNRTCLVGEAVHGRQTHPDRR

SEQ ID NO: 55741 - protein, 289 aa, Zea mays
  Coding DNA Sequence Number=SeqID_12366
MTSHRSSDEGNAQSHTDGLAREGFPRILWEVLQGAGYTTPPQYAVQLFKKHRVPCCRVRMTLEPHPLQPGWRSLDSESFGYRAEDTIEAIALHGLTTFCGFHPLELSTHPIGLFPAEKEDAPMWKDRVEHGKDIWAIYPGQTAHLTVRCMNALYRLQVMRGEAMSHLWHCWRQPKITLDNREELVVDLSNKMVEKYLQVEQLSNEIQELEELVGTRENTIEVLEDQLINTQQQLAEANQHLDMHHQEIQNMEANEDVDIEGGEEPASSLDTAGSGRPPSPESSVASFAH

SEQ ID NO: 55742 - protein, 70 aa, Zea mays
  Coding DNA Sequence Number=SeqID_12367
  Subcellular localization annotation: CTP_CleavageSite=37; ConfidenceScore=5.43e-01
MSSFSPSRGAFSPSSSLYPFAFKLLEGLGPQPLPVVSCFNLQATIVAYLHRMSVEATLLPASSSSIQGEG

SEQ ID NO: 55743 - protein, 185 aa, Zea mays
  Coding DNA Sequence Number=SeqID_12368
MGHDLRLLKIHDGVAIGVVVVDEPPHRPLRAAIGWRRRYMKVPKVQHKPIKSPRKGSNKKSKRQPKAALVWRTGLSGVPPDSVRCTREINTELATFGNLGSHSAIIHRTDRCSTGLSGVPAEQRLTTPTVVYKSNSEHMNSARLRAQSQSRRQKAHQTVNSDCSVHHRPPDCPVVPHVRAPTVEL

SEQ ID NO: 55744 - protein, 118 aa, Zea mays
  Coding DNA Sequence Number=SeqID_12369
MNVCELTLAVSHPPTGQEQRKKRRPHEHLAEVDEDGRLKDGVGRKVLMLEAELLQRQQEERLDRQHQPTGATGNEEHKLPGGEAVEERSAGADPSGERRRTPFEQVECHLRLEALGMD

SEQ ID NO: 55745 - protein, 103 aa, Zea mays
  Coding DNA Sequence Number=SeqID_12370
MQESLAGPPSQQNPPEGLPTLTTPLLPLPLSDNKGVIMNNVSSYPKPHKALASTTQKVQCLNKLWTGPHLNRNIGGSGGSLTKVPAKGYRGCSAVRSEPDGED

SEQ ID NO: 55746 - protein, 308 aa, Zea mays
  Coding DNA Sequence Number=SeqID_12371
MLHDPCLNLEKWRRARSMAAASTEVVEEHCPHTSPGDDDGSAAASRTTQNFWAHGVYRRLSKRPLGRGQWHAAQAPHGHGGCGSAAEMIFGEKSVAARISAGEFGDRITDAGGQTCAISARTLILDSFFSWGMKRLTTWVPRFRVGKWARATQKLPQVRLGLRGSDLSEMESGLSCGSIFHMNFIASCNDLISFSRSFTSTSWPLAGGSAYVSSFPSGTPYGGKGNVAVGESITRALMNAVAALNSDDAAAWDLGDRVRVLSSEYPDVGSSHAGAKGPWRRGNCSSEQHHRAGPAGFHGQEVLLSKSW

SEQ ID NO: 55747 - protein, 150 aa, Zea mays
  Coding DNA Sequence Number=SeqID_12372
MVAWARCDSRELGRRPELYTQVLHSYTSGIRIPHSSPTAKNNSYMELGVARRRSRALGFVSTLGEIRPGLGRRRKRKDLCFEGGRQHRAWAHGGRVKPLDFGQGSFIFVGKAIPLADPLQIHVVVGSEHGEGPPDAVMQRLPESAVRMVT

SEQ ID NO: 55748 - protein, 99 aa, Zea mays
  Coding DNA Sequence Number=SeqID_12373
  Homolog annotation: Hit_ID=O48967; Match level="QueryCoverage=100%, HitCoverage=21%, E-value=6e-29, Identity=62%"; Hit description =Putative uncharacterized protein
MVRIIEHHVETLEDLAMEQEVASSAPRVPDRPESGAAAVHAVQQHTPTQVSWTPSRATPTALSAAKELLRYPPSTTASPEAMKQWRDDIDRLLVMAHST

SEQ ID NO: 55749 - protein, 311 aa, Zea mays
  Coding DNA Sequence Number=SeqID_12374
  Subcellular localization annotation: CTP_CleavageSite=31; ConfidenceScore=5.52e-01
MAGSPAPWPGPETSGSRSHAPRGRAVVLHPRGGVARPRVRRGCVLVRHPGSRRICAGVAHRERSRQGCRRRATGSRRGRARPGTRAPPRPWKAAPACLAGLQRRGCRARARRWASPAPLGELTHAHQGGCARAAGGRTHEQSGRPRSCAHGSRARALAKAACQGGHETDDWGLGEALRGAQARRPQARCEAHRPGEAPRPGGLKPGPRVTHRQVARLPGRASARLGRLSHWRLLPRTRREALLLHGAVSWTTPGSLASDGADWRWLDHVVVWAQCSALGHEVVLALGATRGWARQRPTHAGGWGFAPSGGG

SEQ ID NO: 55750 - protein, 73 aa, Zea mays
  Coding DNA Sequence Number=SeqID_12375
MGATVGTLNQGYPLLQHEDVAPMQRLQATRRTVPDPTTWAGGNEIDGSGYDYGIGEDEAVEGDFQEFQDYDEF

SEQ ID NO: 55751 - protein, 895 aa, Zea mays
  Coding DNA Sequence Number=SeqID_12376
MEVVELVPCARNKWGNWHEFWFYVAEGTIEDHPGLPVAEMCSHYYSAYPQFEVAEEDANEGALRCAAGLSSGRDLVEEFVAYGDGAVRIVGRYVPKTEGQRSWDIRGSNDRLNRVFELNCLSYGGYPGQDDVDHRGKKPAAETGDDPAPAAAPSSKKRKLGIATGGLGVSDGFARELMRTCAAPRGRMSSPELRESSVRMLRVTGGWWPKNVPIPRAAGEDFFTSRMVRYWRVFPYGRNIAAVVSAVMHKDRQGAAQKRQAVVRLHEARPKRSRGTVKAAAPSGSQPTLAAKSAAPGSSRVPEAVKAAAAGGTKSVPAGAVKARELPPPGKRVADFATDISVDDYLGSGEGQLVVVPPAVATAAAAVVPRAKGSAVSAGGEIPALTAVRDEAGAVSRRLKEALSQVADFADRATSGALTAVVSAEVERLRVQHADAVREKLATDSKCRKLADKVAALEGERTDLRRQLAEERKEANEALAKAQSAQAEANLARAEGSLARQRAEELEERFNALQTHVERAEASTSSEAERTRKQLMDSYHELGARTTDFEVPDRESGLRCLEWLQEELLALPTIVEGFMTYASLVTCEGAMNALSREGCQHYEVFDQADEDFERDIYKVEDPVVKESAGALFDQMWGPHGREVVRERSETARGQAARNEKVEDFGALNSAQPDSESNPVAAVSETAPALPPETVEGAPDAPAATAAGGGSSPTAAPRAEDPVKMAAEPAAEDPATAGSSQVQDFGPAHATATANFLAASTVDGGNESDESASKFSDFGDSGTSVEWIEESSDEDLDYFAVLGVAAVEASPRVVDAEVVPGPSVGRRRRRAVAKRRVSESDGSRLRVGRVGRQELLSLPAAASEGEGELRSLFAGEELRIMLFNYREMGIIPKVEP

SEQ ID NO: 55752 - protein, 300 aa, Zea mays
  Coding DNA Sequence Number=SeqID_12377
  Subcellular localization annotation: CTP_CleavageSite=49; ConfidenceScore=5.68e-01
MVAFQGGHPPFKGDSPYLRPQPSWAESSPTRSKVLPLRRGAGSHASCKPAQSRRSQTASRGAYNHPAVTSGPPLLPRPAGERAGSHAGGMQPHQVGALLRLPTRPTWRPKPTRHTTGAPDAACEQLHRRPRHYRASSTAEPIPRLEATQRTTQQRQPGATVNAAKNGPAVMAVAGGQEQRGTGGASGRRSERRFAFAIMTASKKGPGKGDTPKRILPREGTKLRASLLIRGLKAGPSEGFNSRLRACGLHTHYWSEVQRPAPRKGSTTASGYSGSAPTTDQGFEGWPPKGSQPPQTQSEG

SEQ ID NO: 55753 - protein, 149 aa, Zea mays
  Coding DNA Sequence Number=SeqID_12378
MPITGMPTPRHLFCFCRQGHGMLHPNLQNVQTTGRMSYLRQKLSTIAVDAHESPLDDNVTAVLIQLAKTYYVNLEPSGSRVENPPMRLSAAPLPDLGVHLRFLYLDRTGSRCGDYAQTQLLLSLDFLQVVAGHHRVYHGISFIMRAYQE

SEQ ID NO: 55754 - protein, 137 aa, Zea mays
  Coding DNA Sequence Number=SeqID_12379
MAPYTSHELPPLMVNTRKGGGIDLPPNQHTQRIFRQPQQQQPKMDPLQPPPAGVDPTVAAQMRMMQQMADTWQICTRRCGRNAKRCARRERTYTRSCVRRERSYDRKGGCNSNNNSSKYHCHHHHLHFHPGTSTGNL

SEQ ID NO: 55755 - protein, 169 aa, Zea mays
  Coding DNA Sequence Number=SeqID_12380
MAPPRPDDLVMQILANLEEGNRETHRRMENMQKTMANMETTVKSVMAEQGEFQKSKPEVEAKVQEIADVLITIQGKVDWFVEKQPVDVSGNDALKEDGVPAPTQLGASSGEAVHGQVRHRTIDPYQRSGTGSEMTRTPPPVEGGRAAAYGKARWKKDGAWCSPEAKSEA

SEQ ID NO: 55756 - protein, 131 aa, Zea mays
  Coding DNA Sequence Number=SeqID_12381
MGHARGASSRCIGPESLSFSVFYDGPEGAHHWRKRRGAQPREGRCSSVITWLQGFSSCSLAAIPRQWPSRRMTTSLTVGRSKPGYGFHPSLSFKDVHHPHRGGGRAKSGPCPPRGLATRFFLQHSEEKGVC

SEQ ID NO: 55757 - protein, 107 aa, Zea mays
  Coding DNA Sequence Number=SeqID_12382
MAIGGPAVIALADPQEQQADCQSGSGSTCRLASSPEAGPGATVSTLNQGYLLLLHKGAALVQRLKTTWRMAPNGQVQARRVARKGGTSRCSSLEPDPCRKTPDPYTY

SEQ ID NO: 55758 - protein, 92 aa, Zea mays
  Coding DNA Sequence Number=SeqID_12383
MHPLLLSLSHLDFPCSNLSLPPLSPHGALGFGDGDRRSWIPGENEEEIEVTEEKTPPPLESQAGTYLYFDICGPEPDSPTNEGKPWCICHLP

SEQ ID NO: 55759 - protein, 292 aa, Zea mays
  Coding DNA Sequence Number=SeqID_12384
MEFYNSSHKAPEMVTSSSWPGSQHVFKDLIGPFSLTICLRMVGETEIQMCACRCFGSDRTPGVTPQGAFRSRTVLSTIAQWFVSVARETVDNGLQARAALKCVTPYVLARMLYVVGYKGSSAGRSGLCCDYLLEVVGPSGLAPIRPYVDPLHWSSLPGPPGDDLTNYGALGPFVRSFILLVNPGDICPPQAPDLWVDFEINGPMILGPASSLLILTRKRFGDKLAGSTLLNSEWSGKNNFSLPSSAFIARNLVFCLRLLLQRSAFRSAGLRTSLGAPKVHPMGVAPELRVDF

SEQ ID NO: 55760 - protein, 160 aa, Zea mays
  Coding DNA Sequence Number=SeqID_12385
MGKSKKGSGSSPRSGDKRKREPTPPSEDFGNSEYSEEEFSSESEGSPALVSPPASSDDSNDSLGIAVEVWTYIRSIESAGLEGSDESEYSSDEEDSSDSFEEGSGGDGGDGDDDGGDGDGGDDSGKGGDGSGKGGGGDGGSGSKGSNNKGSSRGSNQASG

SEQ ID NO: 55761 - protein, 46 aa, Zea mays
  Coding DNA Sequence Number=SeqID_12386
MAVGEAICRWAHRTVWCATGHCPTTVGAVAVTPHGTPDSPAHQTVR

SEQ ID NO: 55762 - protein, 383 aa, Zea mays
  Coding DNA Sequence Number=SeqID_12387
  Homolog annotation: Hit_ID=A7P225; Match level="QueryCoverage=40%, HitCoverage=31%, E-value=2e-13, Identity=36%"; Hit description =Chromosome chr19 scaffold_4, whole genome shotgun sequence
MKTLRSRNSLEGSSDGETIFASSVARIPFVQLKKWWGHLVVTAEDCLLSTVHERTPPPPVLSYAASEASGEIERGDGGGIARDISKHDDVDLHHATQPHPVNNVELDGGQERAQRPCAEEDMVEDWGCLLFREKKYAVAQSKPSVTPKEQFVTARRQDLPVSSKQGADTKSEKDNSTILYKAGNGPIIKEQSVDAYASKSKAQNGKAMPSNGGSLVNMWGRASAKPMPPSTTNSTAVASVAATADAQICAKEEADGNSSDDEHGIKYKRGSTNANNRKRRVVFDYSDDEEDDNIVSIASPELPKQHTPDLVVGTADDTEVNQKSLENEYNLPNNGKGSTTLVDSDFTSESDGDGRMRPVEGAVRRHRREAAIVEVEVVVARRE

SEQ ID NO: 55763 - protein, 126 aa, Zea mays
  Coding DNA Sequence Number=SeqID_12388
MASVKGGKGKRGSLEDFGGSKFSKEDSPWCHPMTLTIPWDCWRSSRPTFDPSSGQGSRGRMTRRGRTPWIAAAREAHDGSGGEGGSGGGDEGSANDGLGGSDCGDDSGNKSVGSGGGNVSGGVPPT

SEQ ID NO: 55764 - protein, 91 aa, Zea mays
  Coding DNA Sequence Number=SeqID_12389
MQTIGNKGLQIVRRDGGERPRVARRNNGHPVGHHQAEEVAAERTRTGDTFGRRSRRRFTSAMMTASKRDRERGILRKGSFSAKEAGPEPPY

SEQ ID NO: 55765 - protein, 110 aa, Zea mays
  Coding DNA Sequence Number=SeqID_12390
MDITNIEKLMDKVEDNLPNQHWPERAKEKAMIEGVMEVTKHPLCKGKVWLLWCVHMEAHLLDGVRNVMPSKHGVLEGLCEALDVKGVLMLVDKETLPAVLHGAPRKRLRG

SEQ ID NO: 55766 - protein, 403 aa, Zea mays
  Coding DNA Sequence Number=SeqID_12391
  Gene Ontology: Mol. function=ATPase activity, coupled to transmembrane movement of ions, phosphorylative mechanism; Cellular component=integral to membrane; Biological process=phospholipid transport
  Homolog annotation: Hit_ID=A7PGK8; Match level="QueryCoverage=67%, HitCoverage=61%, E-value=1e-102, Identity=63%"; Hit description =Chromosome chr17 scaffold_16, whole genome shotgun sequence
MLALGDSGPVPLLMAVRQGEVAPLCAEVNHHQGCLEHLLAHLPHSPSCKEATSSSLDAVNEDDVMKFGVVSGDGHVGVQDVVTKLAGDAAHGDRDADCQDGVTKVACGVAHGDGDVDCQGGVMKICYFFYKNVTFGVTIFLYEAFASFSGKPAYNDWFLSLYNVFFTSLPVIALGVFDQDVSARLCIQYPQLYQEGVQNILFSWRRILGWMFNGVMNAVLIFFFCITAFEDQAFRRDGQVAGLDALGVVMYTCIVWVVNCQMALSVNYFTIIQHIFIWGSIAVWYLFLLVYGAINPRFSTTAYMVFIEQLAPALSFWLVTLFVVVATLVPYFSYAAIQIRFFPMFHNKIQWKRYLGKAEDPEVARQLSSKHRTSLQHRMVGISARRDGKAVQITKETELQVQE

SEQ ID NO: 55767 - protein, 105 aa, Zea mays
  Coding DNA Sequence Number=SeqID_12392
  Homolog annotation: Hit_ID=Q339K1; Match level="QueryCoverage=37%, HitCoverage=3%, E-value=5e-07, Identity=66%"; Hit description =Retrotransposon protein, putative, unclassified
MALDANEDGEPVDQKKYRSMIGSLVYLTPMRLDIHFAVMSLGAQVYFWDLCGAQGWCSMVEVKVMRARADGPGVVKAAEVSEGTVGGMWRHSKGCVKAKQLRVEH

SEQ ID NO: 55768 - protein, 937 aa, Zea mays
  Coding DNA Sequence Number=SeqID_12393
  Gene Ontology: Mol. function=ATPase activity, coupled to transmembrane movement of ions, phosphorylative mechanism; Cellular component=integral to membrane; Biological process=phospholipid transport
  Homolog annotation: Hit_ID=Q9SX33; Match level="QueryCoverage=97%, HitCoverage=76%, E-value=0.0, Identity=65%"; Hit description =Putative phospholipid-transporting ATPase 9
  Pfam annotation: Domain name=E1-E2_ATPase; Domain location=110-392; Score=-129.9; E_value=0.093; Accession=PF00122.11; Description=E1-E2 ATPase
  Pfam annotation: Domain name=Hydrolase; Domain location=421-881; Score=24.2; E_value=0.00049; Accession=PF00702.17; Description =haloacid dehalogenase-like hydrolase
  Pfam module annotation: Pfam domain module=E1-E2_ATPase::Hydrolase; Domain location=110-392::421-881
MAPTKRLEKLKLSTLLTFMRCHGGSSDDHLRIGTVGFSRVVYVNEPDRLEEEGFSYLLNEVSTTKYNLATFLPKSLFEQFRRVANFYFLVSGILALTPLAPYTAVSALAPLCVVIVATMAKEGVEDWRRKQQDHELNNRIVKVHRGNGHFEESKWKNIKVGDVIKVEKDNFFPADMILLSSNYPDGICYVETMNLDGETNLKIKQALKVTLDLHEDIKFREVRQTIKCEDPNANLYSFVGSMEWRGQQYPLSSLQLLLRDSKLRNTDYIYGAVIFTGHDTKVMQNATDPPSKRSKVEKKMDQIIYLLMSSLLMIALLGSVFFGIWTKEDLRDGELKRWYLRPDATTIFYDPKRAALASFFHLLTSLMLYSYFIPISLYISIEMVKILQALFINQDIRMYHEESDKPTHARTSNLNEELGMVDTILSDKTGTLTCNMMEFIKCSIAGTAYGQGVTEVERAMAMRKGARLDDDIENGDHKDKKNDNSPHVKGFNFKDQRIMDGKWVHEPNRVMIRDFFRLLAICHTCIAEIDENEKVSYEAESPDEAAFVIAARELGFEFYKRSLATIIVRERNPSQNVVEKRKYELLNMLEFSSSRSRMSVIVKEPEGRILLLSKGADRLAPIGRKFEEETRSHINQYSDSGLRTFVLAYRVLDEKEYKEFNEKLNAAKASVSADKDEKIEQVADSIERDLILLGATAVEDKLQQGVPECIDKLAQAGIKMWVLTGDKLETAINIGFACSLLRQGMTQIIVTLEQPDIIALEKNGDKPKIAKASKQRVMGQIEDGIKQIPPSTQISTASFALIIDGKSLTYALEDDVKFKFLDLALKCASVICCRSSPKQKALVTRLVKEVTHKVTLAIGDGANDVGMLQEADIGVGISGAEGMQAVMASDVAVAQFRFLERLLLVHGHWCYRRISLMGLRRPTEGLRQQQSWPSKDD

SEQ ID NO: 55769 - protein, 375 aa, Zea mays
  Coding DNA Sequence Number=SeqID_12394
  Gene Ontology: Mol. function=nucleic acid binding; Biological process= DNA integration
  Homolog annotation: Hit_ID=Q2QRI6; Match level="QueryCoverage=69%, HitCoverage=42%, E-value=5e-10, Identity=26%"; Hit description=Zinc knuckle family protein
  Pfam annotation: Domain name=zf-CCHC; Domain location=63-80; Score =7.8; E_value=0.1; Accession=PF00098.14; Description=Zinc knuckle
MALISRGGSSSNPSLAMFALSSLLFITEEQVESLEDEEMALVASRFTWFHNNCQNRWRGGSKDGCFNYSDPEHFVASCLEKYKFEAGPCDYHSGQCKGKREYTSDKYKSKGGFNKESLKRKYLQKAKIKESAFLASLNDLDHNPNDALSSSSDEETERRVGDKLNRLCFLADTIGDLYTMALGNDQVGGDDQYIGYDSAFELEELTTALASQDKLLRLAAREWKEFKFKYESTLRELESARASVVVSNETECDECALHMSNITTLQTKYATLLDERDEFKSRFSLLGVCTTCPGLQTELAERDARITLLEKDSSFKRRIGRLGFDFAAKDGSVACFGKPVQGHPARPRGALPLANRPQAVRSRGGRAQRGAGHVP

SEQ ID NO: 55770 - protein, 265 aa, Zea mays
  Coding DNA Sequence Number=SeqID_12395
MERARMLFFHHAGKVSSIPPPAGGLSAAIVVVARRWKKYDVVAAVEGHELKSPETKHRPGPERLLETAHLELDGELFVSTQQAPTWRANCRRFETGGSLSRRAGRRGGSSEAEVESVFHCRGRARAPGSGEAEIVWPRPGRSPSPGVGRGGVFVVFRGLARVRALGSGGADFAVFRVLARVRALGSGGAEFAVFPGLSPSLSPGVGAERSSLWRLWQGLTACQTHSVEWHCSRSGAGGAVLLSDWSVERWSDGGHFSSAGGRVSG

SEQ ID NO: 55771 - protein, 259 aa, Zea mays
  Coding DNA Sequence Number=SeqID_12396
  Gene Ontology: Mol. function=hydrolase activity, hydrolyzing O -glycosyl compounds; Cellular component=cell wall; Biological process= carbohydrate metabolic process
  Homolog annotation: Hit_ID=Q5JZX2; Match level="QueryCoverage=89%, HitCoverage=90%, E-value=9e-96, Identity=68%"; Hit description =Xyloglucan endo-transglycosylase/hydrolase precursor
  Pfam annotation: Domain name=Glyco_hydro_16; Domain location=28-187; Score=179.9; E_value=6.6e-51; Accession=PF00722.12; Description =Glycosyl hydrolases family 16
  Pfam annotation: Domain name=XET_C; Domain location=208-256; Score =82.2; E_value=1.7e-21; Accession=PF06955.3; Description=Xyloglucan endo-transglycosylase (XET)
  Pfam module annotation: Pfam domain module=Glyco_hydro_16::XET_C; Domain location=28-187::208-256
MAPRSLLAVLAVAALAFLHAASAKSSWLDRRFTTDGTVRTGYDDSGQQVVMLRLDQHSGAAGFNSKEQYLYGEFSVEMKLIRGNSAGTVSCFYLSSGDGDGRDEIDMEFMGNSSGQPVVLNTNVWASGDGKKEHQFEPLVDDLFIRSFKRYADLPYPSSRPMTLHATLWNGSYWATEKGRVGIDWSDAPFVVSYRSYYASACVSGGACRAAGSGGWMNRQLDSAEWGTVRWAERNFMRYNYCQDGWRFPQGLPAECARH

SEQ ID NO: 55772 - protein, 81 aa, Zea mays
  Coding DNA Sequence Number=SeqID_12397
MAKRGRGVKIVILPIRWERNFCDEDLAIFCDGGRLGIEGVNGDACGFDQFNLGKRGRDEYSIRLVLEPGEGLAWRFIENVV

SEQ ID NO: 55773 - protein, 68 aa, Zea mays
  Coding DNA Sequence Number=SeqID_12398
MQAACNLATGMHPFDFDASSMESQAHTTWTGKGDTLKGILLCEGSGPRALLLIRGSKAGPLEGFDSRL

SEQ ID NO: 55774 - protein, 149 aa, Zea mays
  Coding DNA Sequence Number=SeqID_12399
MPKPCVHANVAVGGELEPCTRDSVVVGEAPEPCRSTVGSAARILLTSPCCRKGLRATGVMVARGAPSLPVAGVSQMGRRSCSLYPELARDRVMMYPLLAQLVRAQGRARWRLLLRPRPGSSEDAIPPETEVEAESGGRARRRPPPEAGA

SEQ ID NO: 55775 - protein, 200 aa, Zea mays
  Coding DNA Sequence Number=SeqID_12400
  Homolog annotation: Hit_ID=Q6QP51; Match level="QueryCoverage=38%, HitCoverage=31%, E-value=2e-10, Identity=51%"; Hit description =Putative growth-regulating factor 1
MTGKQRRPPRSDCRANHPGEADNKSQSTTEFGLGRNKKLRLARPQAPASGGGLRLARPPDSASTSVSGGIASSPDPDLCLKRSLRLARPWARTDRAYRGYIITLSLASSGYTEQDRRPIWLTPATGNDGAPACNHDAGGSQPLTAVRRRQQDPCRTTICASIGLRLFSDGHAITCTGAQALPPTAMLACIQGLGISLPTR

SEQ ID NO: 55776 - protein, 196 aa, Zea mays
  Coding DNA Sequence Number=SeqID_12401
  Homolog annotation: Hit_ID=Q6QP51; Match level="QueryCoverage=46%, HitCoverage=41%, E-value=4e-19, Identity=56%"; Hit description =Putative growth-regulating factor 1
MGQSAAGIGTTVGMAKSGPAVIAAADERKQRDRERGRCGEDPSRRRKRAPSPPTDQGFEGWPLERVSTATPEHSGFKPITDQGFEGWPLGRVRQPPQSARAPRPLLIRGSKAGPSEGFDSRPRARRVRDDSGYFWSVPLGHQPTPNERGTGVHSDHPLAAHWKHHVRRPPRATWRFPPSSLRKGNAGAYDKSRESP

SEQ ID NO: 55777 - protein, 295 aa, Zea mays
  Coding DNA Sequence Number=SeqID_12402
MHCALPPFEPSDGVHQFAFFLLSLEERGLVEIGALQPPLGFKDFRRAARLHSLTNEGRSPPVALTAAARLAPWRERPRRCFRCRPHHWSLLRRQLLGVAQHVVRHEGGVRVLGRPRSRSCGEDGSKDLPVRFGADAVRRWGVGGQMAVGAEVVAAREPPGVCCPAGPLDPRLLCDEPEPKAAVLARIEAESARKETSLARELAASQAEEDVAAAAGAWPRHPLARCWRPPLGGGPFAWVTVRGQARFHRGWKQRRGIVYPSESYFSRKVMSEDSVIDTVEKARKSFSTRVFGLAR

SEQ ID NO: 55778 - protein, 390 aa, Zea mays
  Coding DNA Sequence Number=SeqID_12403
  Gene Ontology: Mol. function=cysteine-type peptidase activity; Biological process=proteolysis
  Homolog annotation: Hit_ID=Q8S456; Match level="QueryCoverage=91%, HitCoverage=54%, E-value=1e-103, Identity=77%"; Hit description =Putative uncharacterized protein 163K15.6
MRSVDRPPSNAKRLTIESSQGDQLHLPLHKNHAKKIKVPSPQVSIVSSRSKFDIDVKSKIITKTSSPKQRTPRKSQKLNIRCIPYDVIVSTWIMSDRQRDVVARLGFQCIFDLRTDALESRSLIRWLMDKLDPDDMTICPEASKELKITKETVRLILGSPSAGGGREFTDCCWHKRNITNITATVYGCSLIVLIYYLDHLHHPASPENKYGTPCIKCFDNETIRDLARGDRRAPRQTGEPFGHAEFRSRTETCYVIAPEQPISDVFNIYVPRIKHLIGNKLKCLPSQHRPMFESMFDAHDEVDKYCDSLQQSHQMLVSKQIELSETFGEMIDEVLRAATQRDTQQEDIPPTTSMPPTNDPVSTPPVRTPDHQQHDQKIHVPTDDNKVSEQ

SEQ ID NO: 55779 - protein, 80 aa, Zea mays
  Coding DNA Sequence Number=SeqID_12404
MALQSGLQCSEIEGAQLDWSGGNRLASRLGHRESRLGRRDGFGNRETGETWDADGETGVNGVVTVYMLTRIAATAMQLDS

SEQ ID NO: 55780 - protein, 544 aa, Zea mays
  Coding DNA Sequence Number=SeqID_12405
MNRHRHSRCHYKRNSGSIPAGGADGLDGGEASPSCHHVSTDGGVRLSTNAAPADAGRSKAHRQDASSAELEDGFHHQKLEEEVASRPVREVEPRLTSLSAPARMMKILEAEGGTKIAARLASPHPGAGAIAGCVFSNTLQGPPPMTRALGPMRHASWPRAEEAKPPRAVRATAQRLQAFLHFRPDQRVKGRTAMQAACDRAKWAHPFDSNTPRMEAQAHTSCNRRAGCYVRATAPPLAPLSRLLDCGTSTATRGNPAYDPTVPARRIGHGSVSCGRRRDGQYGQKWAGSNGGGRRAEAAGTGKGDTPKGILLREGNGPQAPLLIRGSKAGPSEGFNSRLRALGLRAHYWSEVRRPTPQKGSTAASGHSGSAPTTDQGARSTQGTRPRLARAQPRARAADPGGFTSRPRSPSSNGHTFDSPEAQSSPRSNFGPIATPTDRIAGAFNAKGSDSGSAPEDDELRLARPQGSDSGSAPEDDELRLARPQGSDSALASADGLRLARPRGSDSTSASEDRLDLDLGGASALPSPGLGPTTSQEGPSLPYP

SEQ ID NO: 55781 - protein, 136 aa, Zea mays
  Coding DNA Sequence Number=SeqID_12406
MLVGSDVRTGASCQAGSSARGQGRDGDCALAGSHAGGGVRARGRRKEASSGGVRDQARICADVGRDSRLHGKDGRAVGCVGADILEGGAKWVFGRRRRGDKGSAAVSGGRRGKDAGGWGRRSRSRRGGRRRRPGCP

SEQ ID NO: 55782 - protein, 136 aa, Zea mays
  Coding DNA Sequence Number=SeqID_12407
MARTSWEREAAAPCYWGRRASLSSVGRRARSRELAPRGEQGGRSAACHGQQREGGRDGRHGSSFSAPRKRGVLLQGYRAPGAEGRPGERGQRPGRSSAAWGLGARLPACYRVGGMGELLRERRRQGGRMAVAAGKN

SEQ ID NO: 55783 - protein, 120 aa, Zea mays
  Coding DNA Sequence Number=SeqID_12408
MSCRRIGGDIKATGFAGGFGGGEMSDVWRAARSQCKANALGGVKDLGTSSRIEEHHLIKVLKESFSMPGVGYPETGYLRQGPQTSIKSPLGEKVANPEAGIRSHGSPEAIAEQKPDEAKS

SEQ ID NO: 55784 - protein, 198 aa, Zea mays
  Coding DNA Sequence Number=SeqID_12409
  Gene Ontology: Mol. function=small conjugating protein ligase activity; Cellular component=synaptonemal complex; Biological process=embryonic development ending in seed dormancy
  Homolog annotation: Hit_ID=Q8W2X7; Match level="QueryCoverage=75%, HitCoverage=100%, E-value=1e-80, Identity=86%"; Hit description =Ubiquitin carrier protein
  Pfam annotation: Domain name=UQ_con; Domain location=57-191; Score =201.9; E_value=1.5e-57; Accession=PF00179.17; Description=Ubiquitin -conjugating enzyme
MACPQPGTPLTRRLRRQPPSWSPLAREKAAENRGRAEEEEVAAAATASMSGGIARGRLAEERKAWRKNHPHGFVAKPESLPDGTVNLMIWHCTIPGKQGTDWEGGYFPLTLHFSEDYPSKPPKCKFPQGFFHPNVYPSGTGWRPAITVKQILVGIQDLLDQPNPADPAQTDGYHLFIQDPTEYKRRVKLQAKQYPALV

SEQ ID NO: 55785 - protein, 134 aa, Zea mays
  Coding DNA Sequence Number=SeqID_12410
MAETVCEVVYTCESEKKSFEAASRIPPLDPIAGSTTVLFRKFGPKIHHDAFRTKERRCARHCNRLKAPAERARPHVLNLRRRPLWWNDSAEVHQRLQHQGRQWTLEEVDAGLQRGTCSSLIRRLAFLRQQAQAL

SEQ ID NO: 55786 - protein, 249 aa, Zea mays
  Coding DNA Sequence Number=SeqID_12411
MVGRSESGCDLGPALSFKDLHHPGWGGGRAEPELYLPRGFVGHLLPQHSRERALIGLAGGSDFDNAGPVDGERRQLQRVGLAGSVGSGSAPGAPSCRGSGRRAVRTGGPPKTPRAARAAFVFWGCPAFAPVRRLCACLGGSEWGSAGGRMASVVGAEVVAAEEVLVADGITATIRAPGLLLFGFDSWFASLEWGHEREPSGGCVRSGTMATAARGRRQVARSLLPRGLPGVEVVHTRGDGTEIPFVMAP

SEQ ID NO: 55787 - protein, 294 aa, Zea mays
  Coding DNA Sequence Number=SeqID_12412
MQDPAPESQGRALERVGEDSARGAWGRTNATPWELVPLSHRSASRIFITQPGRAPSPAVTREGDLQLDGGGKRVGLRPLPLPQPQGFSSPRLGRGECRVGVGPYVGGGPLLHSVMGGEAGIARGVRQLQRAWSSVASGFGAICGAGVCHGSWKGFFRRRGGRDRPRADLQPLRPSARPCLTSFGMGGGLLAAASTLRSALPLFGPPEQKSSSSPLLEQVTARRSSAFRCSAGLPPRSGVVRTCGGGTGVPFVMALRMPVFFVHCGCRGLNVGNRLSRLLGPDSRRSPWTAAEST

SEQ ID NO: 55788 - protein, 243 aa, Zea mays
  Coding DNA Sequence Number=SeqID_12413
  Homolog annotation: Hit_ID=A2XBY7; Match level="QueryCoverage=16%, HitCoverage=15%, E-value=2e-07, Identity=67%"; Hit description =Putative uncharacterized protein
MALRKLCDDSGPRLSYGSRTTLRRTSDSHDITPAGCLDLSGCHIGMAFSEEVGRAGPRTGQALSWGRSLPSPAWTLVTPLLQAHPTWARDGHEGRGTYTSLTLDSGHLASPPFALAHALDPSGLGHAAHSLVGLGTPYLETPTREERKVLLGIGYWPTANYPWGPVEEKRASPELGSARRRGTKEDGGGAEMGSPLGGWPSYNPHNFSQLVPADPSAQPSVSNLPFLAIWPLISCCAAWLRTS

SEQ ID NO: 55789 - protein, 134 aa, Zea mays
  Coding DNA Sequence Number=SeqID_12414
  Subcellular localization annotation: CTP_CleavageSite=81; ConfidenceScore=5.44e-01
MAPPVGVAVYALGRATWGFLRSQVGVAQAALSFCQTGQWSSGVTAVTSALPGARVRIEVSGHLCVECPRNLVSRCGDLVKVASERSQGLGQAGDVSAIKRGPRARRKSLELYADGGYQLRIRRLEGTPNYGPQQ

SEQ ID NO: 55790 - protein, 117 aa, Zea mays
  Coding DNA Sequence Number=SeqID_12415
MHRTISLLYSRLLFDFHGDCLIFGAIQHGGNISRGRDGNGYPKPEYPTGLTRYEGGYRMISLPAGMLMGKNLYPLGRQTFLAGTGMSKILYPRVYMGNGYEYGMVLPDGHVPVAIPT

SEQ ID NO: 55791 - protein, 82 aa, Zea mays
  Coding DNA Sequence Number=SeqID_12416
MHVGYKYVFKNKLRLDGTIEKYKGGGGDQTGGSLGMGVGVGYAGGGGGGGAECSSSSVAAAAAAAAAAAEAEERQLLKGGRS

SEQ ID NO: 55792 - protein, 110 aa, Zea mays
  Coding DNA Sequence Number=SeqID_12417
  Homolog annotation: Hit_ID=Q10SE4; Match level="QueryCoverage=47%, HitCoverage=13%, E-value=2e-08, Identity=59%"; Hit description =Expressed protein
  Pfam annotation: Domain name=DAGK_cat; Domain location=2-104; Score= -13.1; E_value=0.012; Accession=PF00781.15; Description =Diacylglycerol kinase catalytic domain (pres
MAAREESSGSSCCRSSEVRTRLADQCNAIKDGADAVIAVGGDGTLHELIPLGTGSDFAWTFGWTNDPRVAIDRIIKGIHPALLESSTKTNDPVLGNPAYRFQEDLSKQQV

SEQ ID NO: 55793 - protein, 175 aa, Zea mays
  Coding DNA Sequence Number=SeqID_12418
PAAPLRRCPERSSYACAAATSDRPKLRFACRFIFYSTISTGYPIPDGYPSVCPWMLLPVVDPSVHGQHGPRCVCGLEALNATDVAFAGSGVRRNINTSNHRRLAFPAPLTIKAHSMDYKQAREREARLPSLLFVMEVVTKVNGTERDCESGIGTERLRPIDFLERNGSGSEENIP

SEQ ID NO: 55794 - protein, 702 aa, Zea mays
  Coding DNA Sequence Number=SeqID_12419
  Homolog annotation: Hit_ID=Q7XBD4; Match level="QueryCoverage=23%, HitCoverage=16%, E-value=9e-09, Identity=28%"; Hit description =Cinful1 polyprotein
  Pfam annotation: Domain name=HR1; Domain location=548-618; Score=5.2; E_value=0.067; Accession=PF02185.7; Description=Hr1 repeat
MVALSKYVWATTSYGGQPSVEVFAKYYCLHWQKRMIGNEVAQFGSCTFTPKTGKTSMEVVELVPCARNKWGNWHEFWFYVAEGAVEDHPGLPVAEMCSHYYSAYPPFEVAEEDADEGALRCAAGLSSGRDLVEEFVVYGVWPLAHGWALGEVCPRQMPSHGGKLVRSPAFALDLHSRDPAAFVRETEDGRVFELNRLPYGGCPGQDDVDRRGKKPVVETGDDPAPAAAPSSKKRKLGIAMGGLGVSDGFARELMRTCAAPGGRMSSPELLESSARMLRVTGGWWPKNVPIPRAAGEDFFTSRMVRDWRVFPYGRNIAAVVSLVMDKDRQGAAQKCQAVVRLHEARPKRPRGTTKAAAPGGSQSPLAAKSAAPASSRAPEAAKAAAAGGSKSAKAAPVSSRVPEAAKAARELPPPGKRVADFATDISVEDYLVGSDEGQLVVVPPAVATAAAAVVPRTKGSALSAGGEIPALTAVRDEAGAVSHRLKELKGALNQAADFADRAASGALTAVVSAEVERLQTQHADAVQEKSTADSKCRKLADKVAALEGERTDLRRQLAEERKEANEALAKAQSAQAEANLARAEGSLARQRAEQLEERLNALQTRVERVEASTRSEAERTRKQLMDSNHELGARTTDFEVPDREPGLRCLEWIQEELLALSAIVEGFMSYASLVTCEGAMNVLSRKGCRHYEVFDQADEDFE

SEQ ID NO: 55795 - protein, 117 aa, Zea mays
  Coding DNA Sequence Number=SeqID_12420
  Subcellular localization annotation: CTP_CleavageSite=50; ConfidenceScore=5.06e-01
MLDEVARWDDLVTGLRPVTYGAKAMPTSSSSAAATPAADASSKKTLSTVAAEELRAGDTVDFGVSRMSSVRVQDMQQLGYFGGEVARVPGTEEVLEPEGELVVFEAFFAAGLRLPAP

SEQ ID NO: 55796 - protein, 144 aa, Zea mays
  Coding DNA Sequence Number=SeqID_12421
MGTRNWRMAHRIARPTRGGGRPKSSDSDLAVPMRQGFDPWLEKLHGSSGKLSKGSVEAEVLWKWLATVAGARVARAGSVELSGAKDGVWTVKVVFQLCIPLGTTLEISSASPEERLWSFFTFYLGGILALHSLMNDFGASSPFT

SEQ ID NO: 55797 - protein, 163 aa, Zea mays
  Coding DNA Sequence Number=SeqID_12422
  Homolog annotation: Hit_ID=Q338S6; Match level="QueryCoverage=42%, HitCoverage=24%, E-value=2e-08, Identity=44%"; Hit description =Retrotransposon protein, putative, Ty1-copia subclass
MAVGGGQSRSGHALWQKSSSAARSPAYTGRFSSIGWLGEVHWTSWKLENYNEGVVERELHSDCPILQKAPAMLDKYVADQWLVYVFEDLRKMKAPISSNGGFLGYALHSHAYHVLNQETNRIMETCEVTFDETAPCPPPIFEPVGLDQVGQTIFVEEEHDNVD

SEQ ID NO: 55798 - protein, 114 aa, Zea mays
  Coding DNA Sequence Number=SeqID_12423
MLDEVARWDDLVTGLRSVTYGAKGEPARCLVSVGSTITAKASSEGWRLRLRPNRRPACSMTTAALGPLRKQGDVSKDSTAPTAVLPLGSSAPPTATTSHEQGAKTSPAATTACT

SEQ ID NO: 55799 - protein, 132 aa, Zea mays
  Coding DNA Sequence Number=SeqID_12424
MGSARVAFVLLSLEEHNFAKVASRIFIILAGEEGEASRGSTSLTGSWATFSFSIQGRGRSPGLAEGADFDNAGPIARKRHQLQHAWFAGSAGSGAASGATSPPLGGVRLSAPPYGRLLRRAHRGTAQDVARC

SEQ ID NO: 55800 - protein, 107 aa, Zea mays
  Coding DNA Sequence Number=SeqID_12425
MEEQLPVPLVPIIGKGVLEEEVMVSFVTTNGEPTTTTTSKLVWWNLVDQMTMTLTSCTSAAMLPTRTRASPSRALYKSGSIIVLGKTNFLRPGMILLLQLRCLKRES

SEQ ID NO: 55801 - protein, 138 aa, Zea mays
  Coding DNA Sequence Number=SeqID_12426
  Gene Ontology: Mol. function=hydrolase activity, acting on acid anhydrides, catalyzing transmembrane movement of substances; Cellular component=integral to membrane; Biological process =metabolic process
  Homolog annotation: Hit_ID=Q9LY32; Match level="QueryCoverage=83%, HitCoverage=18%, E-value=9e-20, Identity=38%"; Hit description =ATPase 7, plasma membrane-type
MITGDQHAIGKETTRRLGMSTKCTLPLLYSEQNKDESLASLPIDELTEKADGLSRVFPEHRVVLTGRAIFQKMKDYTIYVVSITIRIVLGFMLLALIWKFDFPPFMVQIIAILNDVHNASRILGNLRATPREVVYQPQ

SEQ ID NO: 55802 - protein, 274 aa, Zea mays
  Coding DNA Sequence Number=SeqID_12427
  Gene Ontology: Mol. function=nucleic acid binding
  Homolog annotation: Hit_ID=Q6UU68; Match level="QueryCoverage=67%, HitCoverage=44%, E-value=2e-11, Identity=27%"; Hit description =Putative DNA-binding protein
  Pfam annotation: Domain name=zf-CCHC; Domain location=158-175; Score =26.2; E_value=0.00012; Accession=PF00098.14; Description=Zinc knuckle
  Pfam annotation: Domain name=zf-CCHC; Domain location=183-200; Score =14.3; E_value=0.01; Accession=PF00098.14; Description=Zinc knuckle
  Pfam module annotation: Pfam domain module=zf-CCHC::zf-CCHC; Domain location=158-175::183-200
MWKKRRFAGSTPISTKEDKVLLVKLLRRNKEQGETLLRLEETLIKTNDSLEKMTKEHEELKCSHDNLVQQKLLGNKKQRPLRRRRYARLSQDIYKRVVKKLEEGETAARVKLHEKEVPKAISEAINMKQEKGKDSISHVVCTDHLSMSSKCKKGRGKRRCFKCKELGHFIASCPHKDKDEGMRRCFGCNDKDHMITSCPLMKNQRRAPSKMTLTKKKDKQQVSCQVERHFIYMCGEHGHLPKETQISTTAIWVPKALLDERYGPISRWVPNRAN

SEQ ID NO: 55803 - protein, 150 aa, Zea mays
  Coding DNA Sequence Number=SeqID_12428
MKEGLSPHIRTGLSSFTTCTHDKYNHSRLYGQSLNLNSYDPNPRVMMVGEHREDKEGECFVRFGHGGGLTPSGITVKGDTSKSRKDRVNPKSLSMIEASANIRSEEAQEYKGCYVVVMVRGNVSEPCNMVGGMTLVLVSSFSQEKDAQSL

SEQ ID NO: 55804 - protein, 270 aa, Zea mays
  Coding DNA Sequence Number=SeqID_12429
  Subcellular localization annotation: CTP_CleavageSite=77; ConfidenceScore=5.38e-01
RARAPGSGEAEVVRQRPGRSPSPGVGRSGVRRLQGLSPSSSPGSGGAEFAVFRGLSPSPSPWSGGAEFAVFWGLSPSPSPGSGGAEFAVFRGLARVRALGRAERISPSSGALARVRALGRAERRLSPSPSPGVGRSGVRRLPGLSPSPSPGSGGAEFAVFRGLSPSPSPGSGRAEPLQLYADGGYQLRIRRLRGQLRSNSPDCPVYTGHVRCSKEGWPPELASLGNSLQLLRYNSPDCPRSGTPMLVHRTIYSACPVRHRTSRRAQKTEL

SEQ ID NO: 55805 - protein, 49 aa, Zea mays
  Coding DNA Sequence Number=SeqID_12430
MAERRHFWQEKRATLRLRRNNRAKKGTGKGGYPEKGSFPVKEPGSEPPY

SEQ ID NO: 55806 - protein, 108 aa, Zea mays
  Coding DNA Sequence Number=SeqID_12431
MEARRGSRYRVHGRRSRRPGTQSQGEEEDLQSQESNIDLKQAKLGKTMKKVKYVRESTILSSTGGETEKLGEEQERFSGKSSQKLKSNGERTEEKALSVLLAGAQDSE

SEQ ID NO: 55807 - protein, 134 aa, Zea mays
  Coding DNA Sequence Number=SeqID_12432
  Gene Ontology: Mol. function=protein serine/threonine kinase activity; Biological process=protein amino acid phosphorylation
  Homolog annotation: Hit_ID=A2ZWX4; Match level="QueryCoverage=97%, HitCoverage=32%, E-value=2e-38, Identity=66%"; Hit description =Putative uncharacterized protein
  Pfam annotation: Domain name=Pkinase; Domain location=6-134; Score= -89.7; E_value=0.0031; Accession=PF00069.16; Description=Protein kinase domain
  Pfam annotation: Domain name=Pkinase_Tyr; Domain location=6-134; Score=-125.1; E_value=9.5e-05; Accession=PF07714.8; Description =Protein tyrosine kinase
  Pfam module annotation: Pfam domain module=Pkinase::Pkinase_Tyr; Domain location=6-134::6-134
MTTKQLRRVRTLGRGASGAVVWLASDEASGELVAVKSARAAGAAAQLRREGRVLRGLSSPHIVPCVGARAAAGGEYQLLLEFAPGGSLADAAARGGGRLAERDIRAYAGDVARALAYLHGRSLVHGDVKARNVV

SEQ ID NO: 55808 - protein, 147 aa, Zea mays
  Coding DNA Sequence Number=SeqID_12433
  Subcellular localization annotation: CTP_CleavageSite=28; ConfidenceScore=5.14e-01
MNQLDSWEGSCSVTKVPVSESLVPRLSCAKTVSNEFGLSSNFPRMCSRETLGDTGVSHQPQKTTNSASPDPRARTPPWPLPNNLRLARPRGSGSASAMEDRLDLGFGGTSTSPDLGHRPRHVNRKRHHHPTPEPTRAAENKTGVPSG

SEQ ID NO: 55809 - protein, 358 aa, Zea mays
  Coding DNA Sequence Number=SeqID_12434
  Gene Ontology: Mol. function=oxidoreductase activity; Biological process=metabolic process
  Homolog annotation: Hit_ID=A7PL44; Match level="QueryCoverage=30%, HitCoverage=38%, E-value=1e-19, Identity=48%"; Hit description =Chromosome chr7 scaffold_20, whole genome shotgun sequence
  Pfam annotation: Domain name=adh_short; Domain location=253-358; Score=-35.8; E_value=0.0028; Accession=PF00106.16; Description=short chain dehydrogenase
MASIITGDFAEAYVRKNACEEETRKAEASTAGGVAAAATPGDKKADASASSEKKVAKEAAAGSNKGEGGSLFGLLKKKDPTPVRHNWKVLTTESALPYIGIRLAKRVVSRGELFAENDGVTAFPELSTSKENEGAEQFGGGLGALQAGEDILFIRVDPHTQKRSGSFHILALPTDENNFNIWPYKVQHIFHGYGFETAKPSGFVPVAISTPCAEPRGSESECETPDPVRPRTKNPNLTAMAASRSEERDQNQPVVLVTGCSEGGIGHAMARAFAAAGCAVVATARSRGSMRGLDGDPRFLLLELDVRSDESARAAVADALREHGRIDVLVNNAGVHLVAPLAEVPMESFHQVFDTNVY

SEQ ID NO: 55810 - protein, 145 aa, Zea mays
  Coding DNA Sequence Number=SeqID_12435
MPRRNTKIPIQSETGARAIAVSNSANNLAVCVQALRQSPHNLKMPLEKVVIQTFTGNNLKLKRELQGSHVIIYMRGQERVKLTEKPYSLGSVVYPPGSDSLCIGRNLLLNYFWNGKYTVDEVKDLLFTRETFWGQISERLINRIL

SEQ ID NO: 55811 - protein, 374 aa, Zea mays
  Coding DNA Sequence Number=SeqID_12436
MVMQFGLLGLHFIELVRCRQNLDFLSSGHNFVLERNALKSIQIELIEEIAPNLLQNDMVMQFGLLGLHFIELVRCRQKEGGIVICIYGQNLDLVLVDVNLNNMAPETLANSNLFNHILNELRVPLIAQGSAYPESNGYEKPKKQKRVTWTIELHEKVLGGYRISWGNKSATRERILHPMNVKDSSSVILNAFPSLLPKTAEMVLDICVLRCIYRECGIGFIGGHSIKKVGDQWWYRCNHKCTKLLKKVVSFSENTINTGNVCFHVNAVVGEIETLPFLRHPWGQNNRGLFSRTLEAAASKPLLKQLPPLNYCRHRQSHLKETRPLRWTWFNSRQHRCRSIVASDSSSTKEQKYTSRKQQAPLTEVGFLLTSAMQ

SEQ ID NO: 55812 - protein, 229 aa, Zea mays
  Coding DNA Sequence Number=SeqID_12437
  Homolog annotation: Hit_ID=A0EVG2; Match level="QueryCoverage=60%, HitCoverage=13%, E-value=6e-07, Identity=31%"; Hit description =Milt1a putative polyprotein
MAISKDHTKVSTTNIIKPAIEALPADNQQPFEDLVMRDEKEVMCQWNEQRDKEESRYTLRLFGPVADRPTPYAEPSGYAYAEPRVAQYTQFPHPSQQHYGAPLVTCYNHARPPHEHRAEYSSATREPERCKAGGGGINMTPSAHLGHPWEESRQNDVRQPEISTHKLNGGPPDMVERIRDEVVGLFRDKLRVSVSGIGQSYQKPYSHRFDVVPCISAMGLDTKLLQIFR

SEQ ID NO: 55813 - protein, 129 aa, Zea mays
  Coding DNA Sequence Number=SeqID_12438
MSGGAPDTVRWHTGQSGTRCKPNSLSHTLQDNLILQARVLMLEGASSTLGIDDNFGKVRPSLGRRRGPKTSTPKDDVITTLGPSPPGSSPGIRTEQAARPVTSRASADHLPRAPARPKASAGQLRRRSR

SEQ ID NO: 55814 - protein, 330 aa, Zea mays
  Coding DNA Sequence Number=SeqID_12439
  Subcellular localization annotation: CTP_CleavageSite=27; ConfidenceScore=5.06e-01
MQAACNRTKWTRFSDSQRARPGGPGPRVTQPQGPGKGDTPKRILPREGTGLRASLLIRGSKAGPRGVQQPPQIALAPEGFTAASDAERGMTRGDRVRQITRMYFWACLWAPSRPLTNGARTSTRITRLQLTGDTMFGAHRGGSGAALANPAPAKPLTASTYQPENLGLDRTPGLRPVRMRPCQRHHRKLRPTPGLGLGLSPGRRRTPLRPTPGLGLGLSPGRRRTPLRPTQGSDSGSAPEDDELRSARPQGSDSGSAPEDDELRSARPQGSDSALASAERPPPRPTQGLGLGLGHGRQTQPRLRRSLHVVQPRAQASHVNRKRHHHPTLS

SEQ ID NO: 55815 - protein, 183 aa, Zea mays
  Coding DNA Sequence Number=SeqID_12440
  Subcellular localization annotation: CTP_CleavageSite=80; ConfidenceScore=5.27e-01
MQEFPCRTAIAAKSSRGPPYTDHSPTALAPFGFSSFWTGPQIQRNPGVSRVGYIPRDLNATEKTISSWRPPATRKSWRPRLDGLASVGEICGEEAPSRGSHLSAKTSSAPRKGSTRGSQTQAVIHAVKLGVRCASSVKQRIPTGWAHASVGRRGFWFLLSRADQRGRWRIGLANGPVRQWEEE

SEQ ID NO: 55816 - protein, 232 aa, Zea mays
  Coding DNA Sequence Number=SeqID_12441
MESISGEDAPKHNLILSALVSNLQCMLAARRPFTAEVSTAATASEAEALAQEAEASDAPTGDGTLARPIVLLTCAGGEPKTKPQRDRCSDRVQRRCKQGVACGRRGADRLLHVQRSRVTVKQGGRDRRHREGATEAKCKHLGTSDKILSKMGEGLGFLQSVVSSSAGYLRYYSNEEGYELDFRRSFVLYPSSDCFFCSTTNMPNMAGRGLEVKPGPTVKCVLGHDFILHFPL

SEQ ID NO: 55817 - protein, 384 aa, Zea mays
  Coding DNA Sequence Number=SeqID_12442
MRLPSEQSERQQSHAGHEVPHGTGVTKSGEIPTKVGLVIFPRSPEGPVGRDGCQPGPQASTEAKSLGGSRPNPKGTRWESVGTSWSTGGDESHVGGRLHRRLRYEGDARQVFHERAGVVRPLGVGVLQGNGARLRLRREVDARRVSRWGAGAVDSLDSRRGAASYLALVAPPPPPSAGEGTGQARMLFFRHVGKTSSIPTPAGGLSAAIVAVARRGKEYHVVAAVEGHELKTPETEHRSGMERSLETAHLELDGKLFVRLQQAPTWRANCRRFEPGGSLDPRVNCRHVPQPIWVGARRSAKGGRSRRETGVKGETRGLRVCPAPRSGALAVGGYKRPRGREREAYASVVPSFPARPTLCKRALDLPFIGVRRGSRCTMGGVVVC

SEQ ID NO: 55818 - protein, 98 aa, Zea mays
  Coding DNA Sequence Number=SeqID_12443
  Homolog annotation: Hit_ID=A3AES9; Match level="QueryCoverage=88%, HitCoverage=58%, E-value=8e-15, Identity=47%"; Hit description =Putative uncharacterized protein
  Pfam annotation: Domain name=CCT_2; Domain location=44-71; Score =39.1; E_value=1.6e-08; Accession=PF09425.1; Description=Divergent CCT motif
  Pfam annotation: Domain name=tify; Domain location=5-40; Score=54.0; E_value=5.3e-13; Accession=PF06200.5; Description=tify domain
  Pfam module annotation: Pfam domain module=CCT_2::tify; Domain location=44-71::5-40
MSGPAPVTAPPLTIFYDGRVVVFEDFLAEKAVEVMRLAAGDDLPIARKATLQRFLAKRKDRLVKRVALHPPIVPHGGAGEEDGQAGLGLGHMLDKMTV

SEQ ID NO: 55819 - protein, 221 aa, Zea mays
  Coding DNA Sequence Number=SeqID_12444
  Subcellular localization annotation: CTP_CleavageSite=52; ConfidenceScore=5.11e-01
MWKLLRGRGRVCLPWSRPSPSPGSGGAEFAVFRDLARVRALGRAERSSPSSRAEPKSEPWVGRSGVRRLLGLSPSPSPKSGGAEFVVFWGWARVRALGRAERSSPSSGAEPVSEPWVGRSFLWCLRRGRNVDGNLQLSTLEMGRTLCIHGFTLYVLVPMNLRPDANVVEIARVTGICKIEIKTVPEKQLREHTLCTQMFGPAWDKRKKFGYRKQKFHGFTI

SEQ ID NO: 55820 - protein, 151 aa, Zea mays
  Coding DNA Sequence Number=SeqID_12445
MALVFASDARSTPDVSPAGAPAPPTRCHLLLGHACPTSSSISGEGDGTDPDVALQPRGEDAVDSAAGIVVVARRRKEYHVVAAIEGHELQTPETKHRPGLKRLLETTHLELDGKLFVNTQQAPTWRANYRRFDPGGSLDRRVKCRHVSQPR

SEQ ID NO: 55821 - protein, 132 aa, Zea mays
  Coding DNA Sequence Number=SeqID_12446
  Subcellular localization annotation: CTP_CleavageSite=62; ConfidenceScore=5.30e-01
MAERYQLSRSCVPPTMKRKDGGASGRRSRRRFAFAIITASKKGPGKGDTPKRILPREGTRLRASLLMRGSKAAPLEGFDSRLRSRGPYPHHWSEVRRPAPRKGSTAVSGYSGSAPITDQGFEGWPAKGSQPP

SEQ ID NO: 55822 - protein, 403 aa, Zea mays
  Coding DNA Sequence Number=SeqID_12447
MHRVLPPSEPLDGERPRFFCLVIVGGTQLRGSWYLSAIARLQGFSSGSPAASPRRWSPKTVTTSLMVGRSKPGCGLCPALIFKDAHLPGWGRGQAEPKLYLPRGALGSLAQLALARLPVPPPTARAVVAPHAPEDRPRRRALLGRRSCSWAVLPLLRYDASAWRSVLARSGGSEWGSAGGQMASVVGAEVVAAEEVLVADGITATIRAPSLQLFGFDSLSSPLEWGRGRGPCRSSVCPEVITAAVWPPGAEVVVAAAGAGVGEPPGVSSPRRPSNVGGCSYLQGRNQSSVCNGTLSAGVCSLWLSRPEHRWLEKKLRRPEPGWVVHWRDRRRSQVAEATSRADVLEGQLAEATERPVESSARAGFPEETPAMMAQAWCQQKVTSEVSVFRRRRSPSARSALLA

SEQ ID NO: 55823 - protein, 47 aa, Zea mays
  Coding DNA Sequence Number=SeqID_12448
MQVACNRTKGTHPFDSDASSMGAQGPGKGILRKGSFSMKEAGLEPPY

SEQ ID NO: 55824 - protein, 100 aa, Zea mays
  Coding DNA Sequence Number=SeqID_12449
  Subcellular localization annotation: CTP_CleavageSite=69; ConfidenceScore=5.02e-01
MNVFDLPSLSYNATSHDLGLPSFFSNLQIWPSDTLILRRNIFNIRPTQPDGTPSLRRSIPKLDSERAVNENSVVVLNDCGSKCNVLVFESFPDLRQLIGC

SEQ ID NO: 55825 - protein, 126 aa, Zea mays
  Coding DNA Sequence Number=SeqID_12450
MEAAMQDAARRALSQYCSLFSGVADGLDLKYYPHHSTVALVLCSTLSWTTPLTSWARFGRRLRNCVLSAQHATIWMVVLPPLSGFSTLTVHRPVVASSMMSENRRRVTRRAQPEQQAPQEEAAQQH

SEQ ID NO: 55826 - protein, 62 aa, Zea mays
  Coding DNA Sequence Number=SeqID_12451
MVSHSSYGGYKCGHCTTAVEVSEALYAKAVSPDLLPGNRWERLMYLLVMVNGVTWPSSLPSG

SEQ ID NO: 55827 - protein, 92 aa, Zea mays
  Coding DNA Sequence Number=SeqID_12452
MELLLATLELLRWLLLSWEDSCARRSMRLTRNERFRQINIRYLRTSYSIYPDNRAGLIGDPEIRMISHNMIHQGKDLPDSDEGEVGKQDLLG

SEQ ID NO: 55828 - protein, 24 aa, Zea mays
  Coding DNA Sequence Number=SeqID_12453
MELLLATLELLRWLLLPWEDSCAR

SEQ ID NO: 55829 - protein, 180 aa, Zea mays
  Coding DNA Sequence Number=SeqID_12454
MDQPTPTTSDANPYLYVTAVTSPTSLDASPELSRRRYGGYKCGHCTTAAGVSGALYAKAKGANLDDFTHPINGGDTRFSSDYLFHEGFPSILWEVLYSAGLPYTPLYTVQLYEEHRVPRCKVWLTLEAHPLQPSWRSLDSKTIGFRADDTTEDAAMKDPDDFLRIPSPGNGNAPTWYSSC

SEQ ID NO: 55830 - protein, 186 aa, Zea mays
  Coding DNA Sequence Number=SeqID_12455
MYPLWHGRSEAKVGRGGDSSEIEVEAEPWGRARRRPSSEVEVESEPRGRARRRPSSEVEVESEPWGQARRRPSSEVEAGAESWGRARRRPSSEVEAGAEPRGRARRSFLWRLRLDSAAVSLTLAGGTAVGAGQAALFSCQAILALNAPAIRSVGEAIWPRLLHYEACPSWASGESKLVLMVITSRV

SEQ ID NO: 55831 - protein, 125 aa, Zea mays
  Coding DNA Sequence Number=SeqID_12456
MACGNVLGFGGGKTKTPRISPETDKSLMCSFYQFYTLPNRHRNILLNQRFTSRVEVEMPIGSHWCLDGFAILHPKLLKNVLNVLCLADEGALLELLDLKSKEILQLPHHRHLEFLYHDPTKLFTS

SEQ ID NO: 55832 - protein, 919 aa, Zea mays
  Coding DNA Sequence Number=SeqID_12457
  Homolog annotation: Hit_ID=Q5JJU6; Match level="QueryCoverage=97%, HitCoverage=75%, E-value=0.0, Identity=54%"; Hit description =Putative uncharacterized protein P0458E05.36
MAGTFREGAGPGDAHAPPPTPTPPLSQFLALDALPSWGSDPKQPHWRHPELRRALASDDQADELRRIRASVQDSAGKAKEKVRSLHEAIQKLDKYKNIVTRKRQRATEASAAPDKLGPAGASSSGALRMGAQNNSAVLSKRVRSSLADARVEGRGSVPTRQGPLISTEKNSPLEKEKSSARISATVSGLSDDKLRGLSTGSEGWEKKMKRKRSVGTMLSRGSDVDRDVKSAGQHRPANEVRPRSSDGLGYRHGVSAGALVGNKLDGTSQQNNIVSRILSKSDADYVAQPNERRERHPGVEKERTTLKGNKANSSDDMQNVSLNPLPKAKACRAPRTSSLAMNSSSNFQRSTGGSDEWEETPYPNKASPLGGMTNRKRSTHSNASSPPIAWVGQRPQKMSRTRRANVVSPVSNFDEALSEGSPLDTATRSAPIESGSVLLTKNTSTTKMDNISSPAGLSESEGSAVNESKSKEKAMHSGEVGNEGANAAHNAMGLIFSSNKNRIPLKEELEDGSIRRQGRSGRGAMHVKGCSPIPKEKLDTAETRKPTKGGRPGSEKNESKLGRPPMKKASDRKASSWHSQALNSDITDITGEPEDDQEELLAAVNAARSAIVCGQINLVEELEVSMSCMSDGEHDIIASVGHRRMSKMEEHSSQGLVPSNFSPSSQQSKTNGVGEKGLVGCFSHGDESRTGPQKLEADKWFNEMAPMTHRLLSALIMEDDLPDSNGVQRDILVEFPNSHNPYTVNRYLENELQASAITSNFGLSVDFVHSNSTSVVHQSMCNGFTASSNFINSNSENSVHSENLSDGLNFTVYPESGPLHDLIPLTPRQCQNPGKDFPLSPYEYQYGQMSMEDKILIELQSIGICPETVPKLDDGEDEDINKMISELRKRLHDQINVNCHNLYYVLEPWLCEPEEMQIT

SEQ ID NO: 55833 - protein, 120 aa, Zea mays
  Coding DNA Sequence Number=SeqID_12458
MAPCRGSSASSAMARWVRPLLTAGRAERGAVQRGVELPAFQKRERGGRRGACTFLRDGEAELGDATCARKKEQGRRVWNLRQWEKGWKSRRHGWRKLPARWGRRCCCAWGKKPGREESGS

SEQ ID NO: 55834 - protein, 342 aa, Zea mays
  Coding DNA Sequence Number=SeqID_12459
  Homolog annotation: Hit_ID=A2XFR6; Match level="QueryCoverage=48%, HitCoverage=48%, E-value=1e-29, Identity=43%"; Hit description =Putative uncharacterized protein
MDPDTHMMVRTLQTTRISTSYAPQPRQIPIYPVVVEEVPADLPPIRVENVVNLEDSSEEQLPTPTPLAESLAFAAGSSTSASSALAFQAPAPGGNDPDDSGDDDDEDDDVDEGGDEHVHEEADYAQQDNFMGFGPVVEHYTSMFETGHFPNLLQEVLHALGTYICPLYETRRVSEPPRACYYITRINVRVMDAGDRGFRTLPAHESLTPLSTYAASVSDAARRTLWSLSHTYRQQLQNTRFRHLPQCLRGGSQTNIVPGEAGKDRLNTLASVVAGLNTDLDSATLDLYRVHLELENAHARIAALEAQLQGLDPPEAQVPAMALSPPRKRLRYGEPGSVTRLL

SEQ ID NO: 55835 - protein, 291 aa, Zea mays
  Coding DNA Sequence Number=SeqID_12460
  Homolog annotation: Hit_ID=Q67VC9; Match level="QueryCoverage=75%, HitCoverage=100%, E-value=5e-72, Identity=65%"; Hit description =RNase H domain-containing protein-like
  Pfam annotation: Domain name=DUF393; Domain location=131-260; Score =78.2; E_value=2.7e-20; Accession=PF04134.3; Description=Protein of unknown function, DUF393
MVVAPWVRYLSQEYVSMLTWAASTYRSPSFPYFRRAALRNGRGHEAEAKKKSKTKNRRLAVREKGRGGKKMLARTIGGAVRTRLAPSLASLLCRGYASPASSADDLVIDEDPPRAASTSVAATTVAATVPTLLQPRVLIYDGVCHLCHRGEWNSDTLLWGVKWVIRTDKHAKIKFCCVQSKAAEPYLRLVGMDREDVLRRVLFVEGPEAYYEGSTAALKVASYLPPPYSVLSSLLIVPTPLRDAVYDYIAKNRYDWFGKDDECIVTKDKEILERFIDREEMLGGGPSNSFF

SEQ ID NO: 55836 - protein, 183 aa, Zea mays
  Coding DNA Sequence Number=SeqID_12461
  Subcellular localization annotation: CTP_CleavageSite=8; ConfidenceScore=5.52e-01
MRTFHSMRAPSFSPSSDVPFVFLDFALFFLPNLLPPPTIAVASRPMLVDAGTGRVGLGPSISSMPRSSSCPSPATNKCQRFIYNYTKSTVRNTVDYFGQEKLFGKTGQARTVRALAADRPQHQDDTRTEPMQKSKYALRTVRRKSKDRPRPCADRPGSGADRPARTVRTRRADRPRSAEWSNG

SEQ ID NO: 55837 - protein, 155 aa, Zea mays
  Coding DNA Sequence Number=SeqID_12462
MGKNNKRKREPTPPSEEFGDSEYSEEEFSSESEGSPAPVSPPASSDDSDDSQGIAAEVWTYIRAVERAGLEGSDESEYSSDEEDSDGGDEGEDDDDDDDGDGGGSGSGRGGGDGSRDNTKGDSRGSTKGDSRGSTKGSSRGSTKGGGGGRGRASG

SEQ ID NO: 55838 - protein, 154 aa, Zea mays
  Coding DNA Sequence Number=SeqID_12463
MGKNNKRKREPTPPSEEFGDSEYSEEEFSSESEGSPAPVSPPASSDDSDDSQGIAVEVWTYIRAVERAGLEGSDESECSSDEEDSDGGDEGEDDDDDGDDGGGSGSGRGGGDGSRDSTKGDSRGSTKGDSRGSTKGSSRGSTKGGGGGRGRASG

SEQ ID NO: 55839 - protein, 98 aa, Zea mays
  Coding DNA Sequence Number=SeqID_12464
MKYPDYERLDEGAGGAKRKRVVSVLSRQAARSVKADKEALKKAAPEKKALAPKKRKLEEIPSAEPKLLSPLGLELTNLLQKKKMHSAAEEKVGGQKKR

SEQ ID NO: 55840 - protein, 176 aa, Zea mays
  Coding DNA Sequence Number=SeqID_12465
  Gene Ontology: Cellular component=small subunit processome; Biological process=rRNA processing
  Homolog annotation: Hit_ID=Q10LM2; Match level="QueryCoverage=55%, HitCoverage=11%, E-value=4e-31, Identity=71%"; Hit description=Utp14 protein, expressed
MVIIECSGLFNTPVRNIGNPIAPVRIGASFTLPWFYCIDHLGWSFDDTINNPGPKTTFEVGMLAGDSWKKAFAGDDVEAEFEKSKMDVLSVKNLESEKLAFVRCWVQWTDIQQKKGLPSWMVKDYEVAKRNREEALKRKDSKLKHVIISKHVDKKLKLYLIRYMHMLDVSVIYVKC

SEQ ID NO: 55841 - protein, 128 aa, Zea mays
  Coding DNA Sequence Number=SeqID_12466
MECGSLRMFRVCLGDSSMRLGVPFIAPRQLGAVESNLGRQFLPSVGWRTGQSGVPPNRHCSVSGADCFPKLAQPTVEDLEPLAHRTLSDAHRTVRCPHQTVGSATRHARIARPTVGSPDSPVHHRIVR

SEQ ID NO: 55842 - protein, 197 aa, Zea mays
  Coding DNA Sequence Number=SeqID_12467
MELFPAIVMGLMSFASLITCEGAANALSHEGCRHFESAGALYDRMWGLHDRDTIWERSDQALEQMANDEEVDNFGGLESSVTQAEDVRMEVGEQPAPLTGPCEDPTAAVVPTGEDPPATAAEDPAAPIAPSQVAGIVLGESSDEDLDYFAVLDVAAVESVPRLEGHEAFDPPTGARTEEHRRRKVVSKHSVGEMSRS

SEQ ID NO: 55843 - protein, 101 aa, Zea mays
  Coding DNA Sequence Number=SeqID_12468
MVLESHGSLREVPYARTVHMLSISNSDYQTPPMADVEAESVCGALVDEGVGGAEDHKSRRLFPLDLGMKTNGVAHRDARQHVQRDADFFLRDVVVLRCSVV

SEQ ID NO: 55844 - protein, 37 aa, Zea mays
  Coding DNA Sequence Number=SeqID_12469
MAGPCSAAWALLQAVASLLAGSPMVAMFDAEALVPFL

SEQ ID NO: 55845 - protein, 131 aa, Zea mays
  Coding DNA Sequence Number=SeqID_12470
MGNPYSRTISSKKAFATEVVEYGWLSGMKLNPNIWRPPFVLQKQPVMAPKRANSKAVPSIDDAAKAALLAEKKGKALVDNTPKRPSKMTLSTAKDSAMTIPPPRALYAPAALKAHHKHHRQASLHQRAKTP

SEQ ID NO: 55846 - protein, 156 aa, Zea mays
  Coding DNA Sequence Number=SeqID_12471
  Gene Ontology: Mol. function=kinase activity; Cellular component =ornithine carbamoyltransferase complex; Biological process=amino acid metabolic process
  Homolog annotation: Hit_ID=Q6QP54; Match level="QueryCoverage=53%, HitCoverage=29%, E-value=4e-20, Identity=61%"; Hit description =Putative kinase
  Subcellular localization annotation: CTP_CleavageSite=46; ConfidenceScore=5.09e-01
MAPPVDVAGLRPRLGDVGAPPKPTSSLSSVAEVESEPLVRARRRPSAEARVESEPWGRAERSSSSSGAEPKSEPWVGRSGVRRLLGLSPSPSPGSGGAEAEPKSEPWVGRSGVRRLLGLSPSPSPGSGGAEFAVFRGLARVRALGRAERSSPSSGA

SEQ ID NO: 55847 - protein, 87 aa, Zea mays
  Coding DNA Sequence Number=SeqID_12472
MEQSGLGYLHKSSNWYLKLYSYGSGTLNWYLNETTDQAKDGGKKSFEVPSAREKVKEARNPKPGVKKKTCKVKVDRVKSYGASRITT

SEQ ID NO: 55848 - protein, 386 aa, Zea mays
  Coding DNA Sequence Number=SeqID_12473
  Subcellular localization annotation: CTP_CleavageSite=76; ConfidenceScore=5.31e-01
MQKQMARGRALVLGHGVRSASVGPGVLGRGGSHGVGCRAGRSAWRQHAVSGSGSRAVAASGMQGAVGRLARTHGLLASGRWGVTQPNPQSQTVACLEVTSHISSDEGNALSHTDGLAREGFPHILWEVLQGAGYTMPPQYAVQQFEKHRVPRCRVRMTLEPHPLQPGWRSLDSESFGYQAEDTIEAIVLHGLTTFCGFHPLELSTHPIGLFPTEKEDDPMWKDRVEHAKDIWAIYPSQTAHLTVRCMNALYRLQVMRGEAMSHLMALLEATKITLDNREELVVDLSTEMVEKDLQVEQLSNEIQELEELVGTRENTIEVLEDQLINTQQQLAEANEHLDMHHQEIQDMEANEDVDIEGGEEPASSLDTAGSGRPPSPESSVASFAH

SEQ ID NO: 55849 - protein, 607 aa, Zea mays
  Coding DNA Sequence Number=SeqID_12474
  Homolog annotation: Hit_ID=Q6JAD6; Match level="QueryCoverage=64%, HitCoverage=65%, E-value=2e-54, Identity=60%"; Hit description =Putative uncharacterized protein
  Subcellular localization annotation: CTP_CleavageSite=22; ConfidenceScore=5.25e-01
MMRILVAPSGRSRARQFTWSSRKAARSGVRTEQPVQQQQQQPLRRPSLEISHRLRQIRLHTVFVVSPPGLAPPLTPLLPLHHPLCLLPSPLLRHPPPQPYPLPPLRQLPLPLLPLPLQLLLSLHLDSGSAMRLRFNPLLRIPDFLTFSVLQRHGYVGSDTYPWSLGYQLRGTLQQLTYSAHLFRSLFSELRSGADSEAHLTYLPGLLTLLTTSGRYVEEWVRVFYASVWIDPDHHWMRFRFEREDVTITATQIHQLFGFPESTTRLHSLCYGTSDPPRRPHGGVAPGTAHVAALFRPPFSDGSRRSPADFTTAANLLGFRAHLRPHASFLDPTVLRLRLLCQLLLLFLTLRPRTLLFVSSTLRIQQLLMMMMMMMILGPPPPPPPMPPRSHDHEAGSSSAAPAAPPAMDPALASILQSITQQQAHLAAEQTRLSERMLSMFQNIQDRQDSLQQQLLQDRAESRAFMALMLQQSGVLVPPVQSAPPPLLHAPVVPAIQSGPPIPTVGPSPLRPVTLAFTSPVLSSVCPQPPVPPASAVTTTVVAVSVTSSVPAAPAARPQSESVPAPASTADPGSETDSDPPTGVRSAASTATGCAPAASSRFRCLGS

SEQ ID NO: 55850 - protein, 145 aa, Zea mays
  Coding DNA Sequence Number=SeqID_12475
MGECWTPRYTVRTSKVGPGPRRVQAEPLEWDPDPPYGVRATHNGVPKFQDRTYSDLEQDPGGGPMPTRVRTKCAGAYSPRYAGRAVIHHYLYVSAIKAAWTAVIKTPDDYSGVTGINYSNNVLLPLCSWARMSGLSILVCASLKL

SEQ ID NO: 55851 - protein, 137 aa, Zea mays
  Coding DNA Sequence Number=SeqID_12476
MASLAHSDRFQSEVALNLARPDSVVPYISTFSGARWENWRGDWVIASAEDNDRLVLPSNGPSLDRKHWMTKPSLSPELLPVLDRIKTLATGGLTSMHVMLRTLPTSRDFPFCPEIMTLIDHYKGPYGEALEKPLESP

SEQ ID NO: 55852 - protein, 237 aa, Zea mays
  Coding DNA Sequence Number=SeqID_12477
PFGEAAPSPARGAGASTTGAGAGDRVCEELLPRASPGGAPAPPLSALAPGVAVGGDPDDGGGDSSLSHDTDLSADQEMEGWVARPITRDAARGCHFHDTLDTLLCRALDRQHYSISERDSAEAAMQDAARRALSHYCSVLGGVADGLNLKYYPCRPSGSTGGVIVSPVGEDNPRLSSIVNLVVVLNMELDHALDERSRARAEIAQLRAERAERRHLDDGSPAPVGTQHPYRSPRRGH

SEQ ID NO: 55853 - protein, 253 aa, Zea mays
  Coding DNA Sequence Number=SeqID_12478
MAKGTWGLVRCHAGFGGWFGLNSVIQTGQILGGFWPPEAEAATKRASAAANEPAAAAHPTDRRQVDLLPATAEPESRREGTFFPRRPSVGSLTPATSLRLPLLPPSRRHLPRYPYQFRVCLFASKINSSQADSIADKAIGRMQEIADKIFSVARETIRPGRGLTSFEATKLRVALEDIACMLEQDSLVLQENLDIVNNVNNPGDSNYEPSALSSPPPADEYLSPDWDFADHFANFWGLEYDSDQMPSFSDNEV

SEQ ID NO: 55854 - protein, 272 aa, Zea mays
  Coding DNA Sequence Number=SeqID_12479
  Gene Ontology: Mol. function=transposase activity; Biological process= transposition, DNA-mediated
  Homolog annotation: Hit_ID=Q10FD4; Match level="QueryCoverage=94%, HitCoverage=44%, E-value=3e-22, Identity=27%"; Hit description =Transposon protein, putative, CACTA, En/Spm sub-class
MDKSGKVIAKWDSRATKIYTEICVEEVNARNRPQQFLNAKGYANLIRKFKERTGRTYTRDQMKNRWDSLKRMFTQWKTLNERATGTTMLVQAMPGCIMFKTAPLENEDELKVMFGPIVYTNERTLVPGVEDANSSSDDHLEATLGGGENSTPDPCTNATGKRKMRHDSPKPKKKKDSREEYMKRLVEAFESRSMTTNKSITSTDNDPVRLEIKNQLQQVMDDGSPEGSQLHLFATHLLTEKKYRDIFANLQTKEGRIAWLCNAYEIDLKKCT

SEQ ID NO: 55855 - protein, 128 aa, Zea mays
  Coding DNA Sequence Number=SeqID_12480
MSQAWSSTARSQRRSTARDVVEPRPLAVVAAGTVPIGIDLEAPIDDVTGLPLIMCPDCKDGTCDRFWFEEEYLVFLQDNGYLPSASFTIAAGSTTKVPELVGKIDSLEQNLNKVTEMEIWAFVLWTNL

SEQ ID NO: 55856 - protein, 87 aa, Zea mays
  Coding DNA Sequence Number=SeqID_12481
  Subcellular localization annotation: CTP_CleavageSite=50; ConfidenceScore=5.04e-01
MVCMGDLISLCGFRTVMSPKSKKLVKGLFKGLGLFQGSSLSSSRRRELLSAVHGDEDEQHTEEQHIEEEEHNEAEQHNEEELGGPVL

SEQ ID NO: 55857 - protein, 170 aa, Zea mays
  Coding DNA Sequence Number=SeqID_12482
  Subcellular localization annotation: CTP_CleavageSite=53; ConfidenceScore=5.56e-01
MTTVALNTLRKQGDVSRIPAAPTAVLLQGLGTSPTATLSPTQGSSTSPTATLACTQGSGTFLPDTLAPSYTPHCTSGPSPCIYKREVQGLHAEGRAGERANEQAHSLSLASACNPYYEHTPLVRDNTSRVSPLCSILRQPIRAGTRSDKFTRRSRDLPGSKCRQLYSLFY

SEQ ID NO: 55858 - protein, 343 aa, Zea mays
  Coding DNA Sequence Number=SeqID_12483
MEKTKYEVARDETVKHVQQVFNSLGIHVLAQTVRDVISPKKKEGRGKAIYSDNDYDPCSDIENQSDTDDDYDDDLNNEVNTEATQMVLGTRPHQKKQKAGTMPAANHQPPRTPVRLTRQSAAMPSPGGRPPPKPRHPLPPKTTSKATPKRNAISSSTQQQVQVQRTGARSYIAHRYSLRTKYNNMEPDAVDFFGECMNSPQNGRTPLANEIYEQMVAEKERELEEGEAQKSPSKIVADSLSQISRSSTFLPNIGVPTMSKTGRSTSLAAQAHMQAQFEEKLQAEREEAARKQEELQAQLQAQQAALEENQSLLRQTQEEVKGMHTKFEETNALVRAILKLQKD

SEQ ID NO: 55859 - protein, 291 aa, Zea mays
  Coding DNA Sequence Number=SeqID_12484
MVRLHASCMAVRPFACWFQQEWGNAYNRGVPDCIPSPMVIQDDDHQFGGGEKQAGLWPLPRPQLQGWGRAYPSSAEEASSSHAGEGELLLPGQGQSRSRSCGESGSEDLPVCFGAAAARWCGVGGQVAVVVGAEVVVAIGEAASAEAVAPADETVSATCAPGLRLFGFNGWFSSPVRGRERGPSSSSVCPGAIAVVVLPSETEVVAALLVQRSPASLPEFVVPQALWCRGCSYPQEWNRSPNLRPLCDEPKPEAAVSAWTEAESARKEASSAREHVASLAEEVQQRWLELG

SEQ ID NO: 55860 - protein, 180 aa, Zea mays
  Coding DNA Sequence Number=SeqID_12485
  Homolog annotation: Hit_ID=Q6J9V9; Match level="QueryCoverage=40%, HitCoverage=25%, E-value=2e-11, Identity=54%"; Hit description =Putative uncharacterized protein
MTEGRQPPRDRAPPTAARRRQHGCSPSGGSEGGRARCMRGVRRHGYRPGDRPLFKGGSPHSHPQASRAKSSPTCSEVLPYDTGAGSHTSCKLTRNGRSQTTAREAGTGKGDISKGILLHEGSGPQALLLIRGSKASPSEGFNSRLRALGLQALLLIRGSKAGPSEGFDSRPRALGLRAHY

SEQ ID NO: 55861 - protein, 72 aa, Zea mays
  Coding DNA Sequence Number=SeqID_12486
DLGVVRLAVVPSMGLGVCGSLCQAWVRPLGEECETLWFTGGNEIDGSGYDYGAGEDEAVEGDFQEFQDYDEF

SEQ ID NO: 55862 - protein, 54 aa, Zea mays
  Coding DNA Sequence Number=SeqID_12487
MKHLRTSPQQMGSTALETELLLGQQHHTTSAGRHSINQSLWLKTDKHKKDNLPI

SEQ ID NO: 55863 - protein, 665 aa, Zea mays
  Coding DNA Sequence Number=SeqID_12488
  Subcellular localization annotation: CTP_CleavageSite=8; ConfidenceScore=5.27e-01
MQTKGALRCAAGQSSGRDFSLKSSWRTGSGPWRHGWVLGEVCPRQMPFHGGRVVRSPAFALNLRNRDPAAFVRDAEDLAVRLVGCYVPRTEGQRSFDIRGSNERLNRVFELNQLPYDGYPGQDEADRRGKKPAVETGGDPVLAAAPSSKKRKLGTAMGGLGVSDSFARELMRTCAAPGERMSSPELRESSARMLRVTGGCWPRNVPIPCAAEEDCFTSRMVHRWRVFPYGRNIGHVVWAVMDKDREGAARKRQATVRVHEARPKRQRGTAKAEASGGGKPPLPAKVGASAPGKAPEVTVGAGGPKLTKVVPSVSGVAEAAKAARTLPPPGKRVADFGTEINVEDYLGGSDEGPLALVVPGAAIATAAPAPKAGGETLGAGGEMSALALVRDEAGVATRWLEGATEALRRATEALSQVTDFTSRTASGALTAALSAEVERLWTQHADAVREKSASDSKCRKLADKVAALEKEKADLRRQLAGERWEANEAIAKEQAAQAEARLARAEGNIAKELAGELQRRLTALESRAEGAEAAMRAEAERTRTQLMTAYRELGVRTGDFEVPEREAGLRCLEWVQEELQELPTVLAGLMSFTSLVTCEAAMNALSREGCRHFEALDQADEDFGRDIFEVEDPVVKESAGALYDRMWGSHGREVVRARAEAARAQ

SEQ ID NO: 55864 - protein, 164 aa, Zea mays
  Coding DNA Sequence Number=SeqID_12489
MGKSKKGGSSSHHSSDKRKREPTPPSKDFGDSEYSDEEFSSESEGSPAPASPPASSDDSDDSQGIAAEGSDESEYSSDEENSSDSSKEDDGGDGGDGDDDGGDGDGGGGDSKSGDGGGKGGSGRRRWWQRQRQWRQQGQQQGQQQGQQQGQQQGQWLDATGFKY

SEQ ID NO: 55865 - protein, 133 aa, Zea mays
  Coding DNA Sequence Number=SeqID_12490
MSVFGSDRAPRVAPQGAFWYRTVLSIVARWPSGLALIRFIGRFPPGPRRDDFVDYWAHGPLARHLVLLVDPGDICPPQAPDVWVDFEITGPKIQDVSLALVLPYALEVNILSFGDDYSLGATQVHPMGVAPEL

SEQ ID NO: 55866 - protein, 94 aa, Zea mays
  Coding DNA Sequence Number=SeqID_12491
MAMMDSTSEKMYLCQTIAHWEWRDSESGTYPPGKGPPKRGGVLSGGVDMFMWWRIRGNGFNFVLLLMVLSVGGLGLLISLRNSSILLIEDVHLS

SEQ ID NO: 55867 - protein, 212 aa, Zea mays
  Coding DNA Sequence Number=SeqID_12492
MAVGVSEALYAKAVSPDLLTGNRWGRLMCVGTEFLATSYFRELVTRRPPPVHGATVRRSTECPAVGTEDTMEAIALHGLITFCGFHPLELSTHPIGLFPAEKEDDPMWKDRVEHAKDIWDIYLGQTAHLTVRCMNALYRLQVMCGEAMSHLMALLEATKITLDNREELVEIEDMEANEDVDIEGGEEPASSLDTAGSGRPPSPESSVASFAH

SEQ ID NO: 55868 - protein, 38 aa, Zea mays
  Coding DNA Sequence Number=SeqID_12493
MAPRTVAGEFRGDARRSEVTKVIGFATTCLPPWRAHRP

SEQ ID NO: 55869 - protein, 130 aa, Zea mays
  Coding DNA Sequence Number=SeqID_12494
MDGRNIVEEDLSCNDRGLGTFWRLLTESLTSFFCHVGDVLGSRVDAPQKPNCRSPVQGLERHRLRRHLPSRFSVRAESRDGNTLTRRLDCDSESVLARVYRVTGVLLYLTSRRGKLKEKGRRVTPRVGQL

SEQ ID NO: 55870 - protein, 39 aa, Zea mays
  Coding DNA Sequence Number=SeqID_12495
MDLSKAMMGSTSEKMYLCQDRLDVGLMIEDPLTGHMPRH

SEQ ID NO: 55871 - protein, 83 aa, Zea mays
  Coding DNA Sequence Number=SeqID_12496
  Subcellular localization annotation: CTP_CleavageSite=46; ConfidenceScore=5.49e-01
MKLWKETSRSSKITTSSRCGLAATPSRLPVKAALSTFLFRTLIYCMVSQRSAEALDSTSCAGPVEFDGPLLNIESIFSGPRVP

SEQ ID NO: 55872 - protein, 403 aa, Zea mays
  Coding DNA Sequence Number=SeqID_12497
MTCGTQPPRRRRRTLERVGEDSAYDGWGRKNATPWELVPFSHHSASRIFIVQPGCTPPPAVTQDGDLQFDGGGKRTGLRPLPLPQPQGFSSPGLGRGVCRVGVGPCVGGGPLLPSVIGGRAVVVRGAGSCRVPGSRTRVASEPLSAPASATAAGRGSSTDETARAAHGPTSNSTAFCPSLPHEFGHGRGPPGSGIRPEVIAAAVRPPGAEVVVVAAAEAGDGTPFVGLPLLRRPPRRVGLFVPVEESLGSVSIIARGFSCSVKGTPRSLFNEPRPGVAVSARTEAELARKEDLVGRSLVGSSVSGIDAGIDLPRPRAGLMSLEDSWPRPRGDGPRRLLGPDSRRRPWQRWPGLGDDVVLQSRDPWTASPSEARSGLAKGVVDAGGPAAPFSRQDPSLQDRIIL

SEQ ID NO: 55873 - protein, 506 aa, Zea mays
  Coding DNA Sequence Number=SeqID_12498
  Gene Ontology: Mol. function=ubiquitin-protein ligase activity; Cellular component=anaphase-promoting complex; Biological process =ubiquitin-dependent protein catabolic process
  Homolog annotation: Hit_ID=A7PJT3; Match level="QueryCoverage=99%, HitCoverage=74%, E-value=1e-152, Identity=57%"; Hit description =Chromosome chr12 scaffold_18, whole genome shotgun sequence
MPQNNDDSCLAYVLGAISNLLSKIGISNTVGIISSPYSLGTNIGLGTPLSIQQQLLVLLKRSLKRADALKLPSLLSFDHLSLAKFDLKHVQRPLVSFGPNASTKLRTCPADVCKNLRLGSRVLTDFGADVLSTSNDNGSFSTSWLRNLSATSDSWRSSSKNTKKIHINDFDNFHYHAQPSPVPASILQLAGSAYLLRATAWEHYGSSSELSLAYVKLIQQLAVFKGYSAAFCALKLAEKKFPSSTSLHIQLLGMQILHERALHRGHLKVAQQICDEFGVLSSSVSGVDIELKTEFSVRRARTLLAAKQFSQAAAVANSLFSTCYKYNMQVENASVLLLLAEIHKKSDNAVLGLPYALASQSFCKSFNLDLLEASATLTLAELWLDLGSSHAKKALSLVYQSLPMILGHGGLELRARAHVVLAKCHLSDLKFSVLEDPEAVLDPLNQATEDLQALEYHEMAAEAYYLKAMAYNHLGKLDEREEAAARFKDHVTALETPHNEEDSLKY

SEQ ID NO: 55874 - protein, 803 aa, Zea mays
  Coding DNA Sequence Number=SeqID_12499
  Gene Ontology: Mol. function=RNA binding; Cellular component =spliceosome; Biological process=protein modification process
  Homolog annotation: Hit_ID=A2X2W1; Match level="QueryCoverage=94%, HitCoverage=94%, E-value=0.0, Identity=71%"; Hit description =Putative uncharacterized protein
  Pfam annotation: Domain name=Surp; Domain location=197-241; Score =61.7; E_value=2.4e-15; Accession=PF01805.11; Description=Surp module
  Pfam annotation: Domain name=Surp; Domain location=65-109; Score =75.9; E_value=1.3e-19; Accession=PF01805.11; Description=Surp module
  Pfam annotation: Domain name=ubiquitin; Domain location=729-798; Score=42.6; E_value=1.4e-09; Accession=PF00240.14; Description =Ubiquitin family
  Pfam module annotation: Pfam domain module=Surp::Surp::ubiquitin; Domain location=197-241::65-109::729-798
MGTPILTLPAPDGNGTGGGDANQQLLQAPPKPPPPGAKTDPPATVATHTRTIGIIHPPPDIRVIIEKTATFVAKNGPEFERRIISLNQGNAKFNFLQPSDPYHAYYQHRVSEIAATPPSADGLSGAETDTAPAEAPASTPADGAAAVPADGAAVDTKADHSAPFRVVPPPKVLVPPKAELYTVRLPEGITGEELDIIKLTAQFVARNGKNFLTSLAQRESNNMQFHFIRPTHSMFPFFTELTDAYSRVLRPAEGVPALLKELREGSKDLTTVLERCLNRLEWDRSQEQARQQAEDEVEQERMQMSMIDWHDFVVVETIEFADDEYEGLPVPLTLEELKRQKRMENLGEEEAMDLTEPAKEVEMEMDEEEMQLVEEGMRAAQLEENDGGSQVNVAGDDETPMRIVKNYKRPEERIPAERDPTKFVVSPITGELIPISEMEEHMRISLIDPKYKEQKERMLAKIKETTLAPDDEISRNIVGLARTRPDIFGTTEEEVSNAVKAEIEKKKDEQPKQVIWDGHSGSIGRTATHALSQIQGGEEQFDASNVDGRPVPGPAPLVRPGMPLPRPPQPLPLVNVPRFIAPPAPYSVPPPGSHMPGVPQMMPHMHLHPQQIPGQPPMVRMPGQMVHMPTSIPPPPGQTQFMPGPPPHTFAMPPSSHMPHMINPIGIPQPPAPPLPPQPPAEEQPPPPDEPEPKRQRTDDGSLIPAEQFLAQHQGPASISVSVPNLDEGNLRGQVLQIPVQSLSDTVGSLKEQIAGELQLPANKQKLSVRTSFLKDNLTLAYYNVGPGVVINLTLRERGGRKK

SEQ ID NO: 55875 - protein, 180 aa, Zea mays
  Coding DNA Sequence Number=SeqID_12500
  Subcellular localization annotation: CTP_CleavageSite=4; ConfidenceScore=5.52e-01
MATVARAIAPTFQRSRSWKDGLPDPSLVTLLVGVTSTTRSTPCCARHLTGALGLSSIVVLSSSTVVGFTRTTGRRPAWCVVWRTVFGVRRSTQSTIPSLSGTQLRRPCKMSHGMSDNKRRGGRCAQQEQAAPQDEAPQQQQLPPPPPMTIEQMFLMQTQAVQAISQTLAAIQQQQPPPQP

SEQ ID NO: 55876 - protein, 53 aa, Zea mays
  Coding DNA Sequence Number=SeqID_12501
MGLDVCDSLCQGGDEDDGFGYDYGTSCPRCNHCSGEDEVVEEDFQEFQEYDEF

SEQ ID NO: 55877 - protein, 48 aa, Zea mays
  Coding DNA Sequence Number=SeqID_12502
MAMMGSTSEKMYLCQVWKQPTFVASVQRWYPKKRTVGTCSLQQEGQQE

SEQ ID NO: 55878 - protein, 917 aa, Zea mays
  Coding DNA Sequence Number=SeqID_12503
MPFHGGRVVRSPAFALNLRNRDPAAFVRDAEGLAVRLVGRYVPRTEGQRSFDIRGSNERLNRVFELNQPPYDGYPGQDEADRRGKKPAVETGGDPALVAAASSKKRKLGTAMGRLGVSDSFARDLMRTCAAPGERMSSPELRESSARMLRVTGGCWPKNIPIPCAAEEDCFTSRMVHRWKVFPYGRNIGHVVWAVMDKDRQGAARKRQATVRVHEARPKRHRGTAKAEASGGGKPPLPTKVGASAPGKAPETTVGAGGPKLSKVVPSASGVAEAAKAARSLPLPGKRVADFGTEIDVDDYLGGSDEGPLALVVPGAAIATAAPAPKAGGETLGARGEVSALALVRDEAGVATRRLKGATEALSRATEALSQVADFTSRTASGALTAALSAEVERLRTQHADAVREKSASDSKCRKLAEKVAVLEKEKADLRRQLAGERREANEAIAKEQAAQAEARLARAEGNIAKELAGELQRRLTAQESRAEGAEAAMRAEAERTRTQLMTSYRELGVRTGDFEVPEREAGLRCLEWVQEELQELPTVLAGLMAFTSLVTCEAAMNALSREGCRHFEALDQVDEDFGRDIFEVEDPVVKESAGALYDRMWGSYGREVVRARAEAARAQAERGERVDDFGALNSELPESETTPAEAATGVAPGPTPETAEDAPGAPASAAAGEDLPPKVAEGAPDAPAATVPSAEDPAEAAAEAPAAAGPSQVQDFGPAHATATTEFLAASTAEDGNECGGSVSEFFDVTDSGSSVEWTEESSEEDLDYFAALDVAAAEAAPHAADAPGVPGPSTGHRRRRAVAKRRISAEEGARLRVSRAGRQELLSLPAASGVGEGGSCDRLRIFARLCLVRLHLLGDFCADSLRDRLRFCALVVLSPAAPLGDFCADSLRDRLRFLRTCCAKSGCTLRRLLRG

SEQ ID NO: 55879 - protein, 41 aa, Zea mays
  Coding DNA Sequence Number=SeqID_12504
MAMMGSTSEKDVPLPESLIIDKPYLDSLKASISLRVFYFVG

SEQ ID NO: 55880 - protein, 329 aa, Zea mays
  Coding DNA Sequence Number=SeqID_12505
  Homolog annotation: Hit_ID=Q67YV2; Match level="QueryCoverage=93%, HitCoverage=36%, E-value=8e-58, Identity=38%"; Hit description=MRNA, complete cds, clone: RAFL24-07-B09
MNLFAGVGGGAADGGGTGTALLELTPHKMAVCHLVQVFAPAAQAGGDVVPPFPFESLTHHNRLGLFLFTLTRSCDDFLEPPLEEFLKQLRAVDDLTNGWFCEQLTSALSALNSPDDLFNFFDKLRGVFTAPEGASAEDVFLDPNSQLGVFLRCCILAFNSMTFEGVCHLLADLVMYCNSADASYDLAEHEDFNSEMGNLMDADIGSHAGIFDKFHQGYASEHHMGESSSTLTRASMSPYDFDNANTFKADDNPTCLRSRWQLEAYLNQQADILEKDPGSVPLNLFNATMTQLQTLAPELHRVQFLQYLNALYHDDYVASLDNLHRYFDY

SEQ ID NO: 55881 - protein, 162 aa, Zea mays
  Coding DNA Sequence Number=SeqID_12506
MAIIFKSKINLNPGAMFCFETISCIADIEGTLHRIADPPKKRPSSEFREKLKQPGELCCPPCPLRSGHGSLRERKGDWSHRPSPTMNLPCRGRNLPSVMPDDRETDAGMCGDITMPENGTQHNPYLRMNPQKWEKHLMNEHIEKDATPAAAIADSLKNESGN

SEQ ID NO: 55882 - protein, 413 aa, Zea mays
  Coding DNA Sequence Number=SeqID_12507
  Gene Ontology: Mol. function=aspartic-type endopeptidase activity; Cellular component=extracellular region; Biological process =proteolysis
  Homolog annotation: Hit_ID=Q69IP6; Match level="QueryCoverage=80%, HitCoverage=78%, E-value=1e-46, Identity=37%"; Hit description =Putative aspartic proteinase nepenthesin I
  Pfam annotation: Domain name=Asp; Domain location=90-410; Score= -135.6; E_value=1.4e-05; Accession=PF00026.14; Description=Eukaryotic aspartyl protease
  Subcellular localization annotation: CTP_CleavageSite=60; ConfidenceScore=5.03e-01
MTAHHRLVILASFVICILLPALPADAESLPGFRGTMIRRTGTTAINFTQAARDSYRRLSSLASRSSTSHLNSSDNNTQRIPLRMDDSGGAYDMEFSMGTPPQKLTALADTGSDLIWAKCGGACTTSCEPQGSPSYLPNASSTFAKLPCSDRLCSLLRSDSVAWCAAAGAECDYRYSYGLGDDDHHYTQGFLARETFTLGADAVPSVRFGCTTASEGGYGSGSGLVGLGRGPLSLVSQLNASTFMYCLTSDASKASPLLFGSLASLTGAQVQSTGLLASTTFYAVNLRSISIGSATTPGVGEPEGVVFDSGTTLTYLAEPAYSEAKAAFLSQTSLDQVEDTDGFEACFQKPANGRLSNAAVPTMVLHFDGADMALPVANYVVEVEDGVVCWIVQRSPSLSIIGNIMQSITVVGF

SEQ ID NO: 55883 - protein, 27 aa, Zea mays
  Coding DNA Sequence Number=SeqID_12508
MKCDPGEFWCHVSEFLFFDFSVVGLLR

SEQ ID NO: 55884 - protein, 98 aa, Zea mays
  Coding DNA Sequence Number=SeqID_12509
MASPEFSLGRNRELRLARSQASALASTSGEGLRLARSQALASASASGEGLRLARPQASASEGVTTSPDLSLGLRRSHHLARPRPRTDYTTGDTSLPYL

SEQ ID NO: 55885 - protein, 177 aa, Zea mays
  Coding DNA Sequence Number=SeqID_12510
  Homolog annotation: Hit_ID=Q6J9V9; Match level="QueryCoverage=75%, HitCoverage=46%, E-value=3e-40, Identity=64%"; Hit description =Putative uncharacterized protein
  Subcellular localization annotation: CTP_CleavageSite=37; ConfidenceScore=5.60e-01
MRLRRQKQKTSTNGRVKNHCRPLFRAVERRFASVMMTASKKGSGKGTFQRSPSQQKKRAPSPPTDQGFEGCALWGSATAQSTRAPSPLLIRGLKAGPSKGFDSRPITCRVRDDPGYVRYMAKARATLPRYPKTFPRPAGTVCNEIPPKGGTEPSDPIEWVWVQQITCRYFWSTPLGH

SEQ ID NO: 55886 - protein, 35 aa, Zea mays
  Coding DNA Sequence Number=SeqID_12511
MQKGDIPWHAKLDGGRDVNGDPIPANPWGIPLLGY

SEQ ID NO: 55887 - protein, 198 aa, Zea mays
  Coding DNA Sequence Number=SeqID_12512
MECGLISEFPEGSLAKSTRKWVSQHPAKTGSDGDASTPYGRLTTRRRGGAIAGARQFSVSCSRTSIGTLLYEDSTIANALTRFIPESERCPGLPAARSGRTTTVRNSGVTSALQAPRPHTSTPKDPAEYRRSHLEPPDTGNTRSSTGGGLPKSAREHWRRFGLCWDGLRSSMWLNRWVFRLQFIPEPSVNFLQRGLAD

SEQ ID NO: 55888 - protein, 88 aa, Zea mays
  Coding DNA Sequence Number=SeqID_12513
MCAPLSLSLIWFLAQQLPLPLFHLSHLLALGDPVDGYRQILDPKYLRTCIKEGEAQKIRRLTQRRSCEAGKLRHVRRKGNRLKDEKAI

SEQ ID NO: 55889 - protein, 135 aa, Zea mays
  Coding DNA Sequence Number=SeqID_12514
MEIPRLKIDDETSHLLRILLALWRWSRATWRRRAAMVAAVCVLLFMSATLAHRVVDVSAFTTGRLQLHRPRSYTTVYDLQRFATSPDSPSLQDRRGGGRRRRRRGVSSPCLHRFVAATPPPEDLDSDTTLMGCLG

SEQ ID NO: 55890 - protein, 221 aa, Zea mays
  Coding DNA Sequence Number=SeqID_12515
  Homolog annotation: Hit_ID=Q6J9V9; Match level="QueryCoverage=55%, HitCoverage=43%, E-value=2e-50, Identity=80%"; Hit description =Putative uncharacterized protein
  Subcellular localization annotation: CTP_CleavageSite=41; ConfidenceScore=5.05e-01
MAGDREKGHFKGALHSKRNGPRALLLIRGSKVAPCGVRRPPQSTRAPSPLLIRGLKAGPSKGFDSRPRTCRVRDDPGYVRYMAKARATLPRYPKTFPRPAGTVCNEIPPKGGTEPSDPIKWVWVQQITCSLGRNRELCLARSQASALASASGEGLRLARSQALASASASGEGLRLARPQASASGGVTTSPDLSLGLRRSHHLARPRPRTDYTTGDTSLPYL

SEQ ID NO: 55891 - protein, 125 aa, Zea mays
  Coding DNA Sequence Number=SeqID_12516
MDADGWDFEATSKSDSDLTEREDDLQFLVDEELDSDTSIGWSWMSDGESSDVESLDNDDDPMSGHWMGISSCDEKDDDDENDDGSSDDDSDGSDDDDNDDDGGASQICDEMPPSKRRRLHGSLFW

SEQ ID NO: 55892 - protein, 180 aa, Zea mays
  Coding DNA Sequence Number=SeqID_12517
MEMQSGLRSQTGIDNSHRHQQDRENDEVVVNHTYGADGHIRLAKRMEAQTGVVLRPIDAYRQGHRAKTVKSLMSYAVKRPLSVWRLTGRRWLVSMEKTMIGKECLPSTLKLCILLEERPMDVYSMFIGVIDSTELRSRGGSLSQAGCGSIRSRRSSMEEAMREQQERFCEEMQEQQMTFI

SEQ ID NO: 55893 - protein, 249 aa, Zea mays
  Coding DNA Sequence Number=SeqID_12518
  Gene Ontology: Mol. function=branched-chain-amino-acid transaminase activity; Cellular component=chloroplast; Biological process =branched chain family amino acid metabolic process
  Homolog annotation: Hit_ID=A7QJ94; Match level="QueryCoverage=39%, HitCoverage=16%, E-value=7e-12, Identity=37%"; Hit description =Chromosome chr8 scaffold_106, whole genome shotgun sequence
EGLAPINLIVEDKFHRATPGGTGGVKTIGNYASSEQVNAGIKAESLFCDSIVCTTLAIEYFLHACSLVIDVEPDVESEKEVDNKLEDEMHEDEDDKRYSPEPIPQQTDNQFEEEDGSFSPQLMHGNEDEDAIDHEEDKAELFDGTHVLKVKNVGAVETYFSKFVQKLSSAIFVGTPTFLRLSPPSRLRCCLRRALREDCGGAAVLIVRVHAYFTGAAKIKLGLDTGASESLKSTSTWIRGDRQITDTTG

SEQ ID NO: 55894 - protein, 158 aa, Zea mays
  Coding DNA Sequence Number=SeqID_12519
MRRKDGGYPPSGGLEGGKTRCIREREDMVAFQGGRPPFKGDYPYLRPQPSRAESSPTRSKALPCGAGAESHMSCKPAQSRRSQTAGRGTGKGGYPEKDPSPGRNQAPSLPTDQRGSKAGPPKGSTAASGYSGSAPITDQGFEGWPPKGSQPPQTPSEG

SEQ ID NO: 55895 - protein, 275 aa, Zea mays
  Coding DNA Sequence Number=SeqID_12520
  Subcellular localization annotation: CTP_CleavageSite=42; ConfidenceScore=5.29e-01
MAEDATIVRLQGFSSGSPTASPRRWSPKTVTTSSWVGRSKPGCDLGPALSFKDLHHPCWGGERGEPGLYLPHGSAGHLLFQLLVVETILQLCEGGILQPCRGRRTVTAQLGCNIPSSSSLSWQGRERGPSAGGSFPTVKAVSAAYGPTSGSLALMSEVAGEPPGACRPAGSPESLGSVGLAARGFSCLVKGNPRPLFDEPKPEAAVSAWTEAELAQKEDFVGRSLAGSSAGGTDVGVELPRPRARLMSSGDSWLRLRGGRPSRLLEPDSWRRPWR

SEQ ID NO: 55896 - protein, 50 aa, Zea mays
  Coding DNA Sequence Number=SeqID_12521
MGKNNKRKREPTPPSEEFGDSEYSEEDVSVLERQRRVIGKRYQRFRGNAE

SEQ ID NO: 55897 - protein, 238 aa, Zea mays
  Coding DNA Sequence Number=SeqID_12522
  Subcellular localization annotation: CTP_CleavageSite=64; ConfidenceScore=5.59e-01
MSSSSLMHRVFPSSKPSDGGYPPSFRLLVGGTQLRGSWYLSAIVRLQGFSSAGPAAPPRRRSPRMMTTSSWVGKSKPGCDLGPTLSFKDVHHPCWGGGQAEPALNLPFGSAACRSRRLGSRRPLLPEGGCRAVCTGGPPTMPRAARAAFVFWGGPAFALGWHPHAEAGAPLVWEDLSGDLPGGLVAPAISAEAEAAREVLVADGITATIRAPGLRFFVLVLAPRASAWARARLQQRPP

SEQ ID NO: 55898 - protein, 162 aa, Zea mays
  Coding DNA Sequence Number=SeqID_12523
  Subcellular localization annotation: CTP_CleavageSite=18; ConfidenceScore=5.09e-01
MQEACNHAKWTRFSDSQRASMEAPAHASRNRRVGCCMQAIAPPLAPPSRLFGCGTNAATRGDPAHDPSGASLARRSTRPKRDRRCFWQEKRATLRLRRNNHAKKGTGKGGYPEKIVPYEGTGLRAPPTVQRFEGWPSEGFNSRLRSRGPYTHYWSEVRRPAP

SEQ ID NO: 55899 - protein, 441 aa, Zea mays
  Coding DNA Sequence Number=SeqID_12524
  Gene Ontology: Mol. function=protein binding; Cellular component =cytoplasm; Biological process=regulation of transcription
  Homolog annotation: Hit_ID=A3BNU1; Match level="QueryCoverage=93%, HitCoverage=75%, E-value=1e-156, Identity=69%"; Hit description =Putative uncharacterized protein
  Pfam annotation: Domain name=Tub; Domain location=109-435; Score =574.0; E_value=1.5e-169; Accession=PF01167.9; Description=Tub family
MSFRSIVRDVRESFGSLSRRSLEVRISGLPGLSGGHHRGKSVGSVSDLRDRPVVVDQSRWVGLPPELLRDVMRRLEEAVCGTWREICKDIVLSPEFCGKLTFPVSLKQPGPRNGIIQCFIKRDKSTSTYYLYLCLSPVVLSEDGKFLLAAKRNRRTTYTEYIISVDPKSISRSSDGCVGKMRSNFLGTKFIVHDTRAPHNAGSLVSCERGSRRISSRRVSPKVPTASYPIARVNYELNLLGTRGPRRMNCTMHSIPASTLDPQGMVPEPGQPKQIFVPGSSSFEDSFRSANNTPSSSRFSVADRSLDWSSSRFSETSGLAQQDDDDSDQAKERPLVLCNKEPRWHEQLQCWCLNFHGRVTVASVKNFQLIAAPQLDSEPSQQAQQQTQPSNSSSASDHDKVILQFGKVANDMFTMDYRYPLSAFQAFAICLTSFDSKLACE

SEQ ID NO: 55900 - protein, 241 aa, Zea mays
  Coding DNA Sequence Number=SeqID_12525
  Gene Ontology: Mol. function=cysteine-type peptidase activity; Biological process=proteolysis
  Homolog annotation: Hit_ID=Q5NKQ2; Match level="QueryCoverage=91%, HitCoverage=24%, E-value=1e-118, Identity=93%"; Hit description =Putative uncharacterized protein 9C20.3a
MQKLNVRCNPQDIIITIKILNERQRQAVARKGFSNILDMTLDALGSRSYLLWLMDKLDHKDMTLRPGQGKELKITKEIVHLILGLPNAGGGKPLGIDEAVAGNNLRAELGLPKDEFVVASLQDRLRKGDDDDISIICFFLILFNRLLFPTSSWGISNHEVLLTEEMDRFHETDWCHLIFNDICEAAQKWHTRSTTNVSTTIYGCSIVILLYYLDHLHDAAAPTTNVAHLAYNFLIKTLSKL

SEQ ID NO: 55901 - protein, 255 aa, Zea mays
  Coding DNA Sequence Number=SeqID_12526
SSSLSRLAHCRWDPLTSAPLAGLTNCADRAAITSVAAGHPMFPRLGRYMEGYARSTSTIALARLQLCNSLHLATAGCLIGVPGSAIVAKSRATALRSGRSDRVFTKPWGTLAHTQTEETITESVGIARRSSSSAAGADEGVHSSGRGQGADEVDGLGRGLDEVGGLRRGVDEVSGLGQGTDRVGGLGRWLGADSGCASAETGNRKLGAWGGGFPREKALERLSDDENKLEPQAEHTGATDTAEDQRWPRNKPEIA

SEQ ID NO: 55902 - protein, 42 aa, Zea mays
  Coding DNA Sequence Number=SeqID_12527
MTVGEGCLSYGAPDSPVYTGHVRKTIEGIVIEAVAKGHEQLG

SEQ ID NO: 55903 - protein, 135 aa, Zea mays
  Coding DNA Sequence Number=SeqID_12528
MALPVDVAGLCPRLGDVEAPPKPRSSLSSMAEAESEPLGRLYADGGYQLRIRSLEGTPNYGPRQGLTYPKGARAVEELRYREVLRSIMLQCLFERGIPILPFSETIAGFLKLVELCKGLVVLPCLVSKAEMNRKS

SEQ ID NO: 55904 - protein, 84 aa, Zea mays
  Coding DNA Sequence Number=SeqID_12529
MAHEIMKKSEKDIHDSREAAKKAEKAAELERRIAKLPPPPEPFDPLADPETNKVIEIINMAEAIIDEVVTELLNEAAEKVLKEE

SEQ ID NO: 55905 - protein, 408 aa, Zea mays
  Coding DNA Sequence Number=SeqID_12530
MQAACNRAKWTRFSDSRRASMEAQAHASRTGKGDTPKRILPREGTRLRASLLIRGSKAGPPKGFNSRLRSRGPYTHYWSEVRRPAPRRVPRPPQATRAPRPLLIRGSKAGPRRVHSRLRRRARDDKGIPSEGGIEPSDPVARGPGPADHPQLTGDTMFGAHRGLGGCSRKSGSGRTVDSVDIPARELGPRPYTRATTSSHEGTTRPAEALRKALRPRRNETTPPRPRGLHPAGALTRTHRNKMQPRKAGPLAKKCDESLQASANTPFEARGLLSGTIIRGTLKTPNSQLGSDSGSAPEDDELRSARPRARTRAQPQKTTNSASPDPRVRTPPRPLPNDLRLARPRGSDSASAMEDILDLGFGGASTSPNLGRRPTTSTGSAIITLPRADSGRREQDRCPIWLAPPDRQ

SEQ ID NO: 55906 - protein, 187 aa, Zea mays
  Coding DNA Sequence Number=SeqID_12531
MGLCLHPVLPVAWAILSSTALYDIRLTLELVSPALVASIVDTSSLCPLPDWSTFTTEYSGNLAGVVHANQIEGDLIGLALVGLTCQTQIDVCYAPRRGVVACCKSMAVCPAFYLGYMSDVRGHFWWLVAGDEANRCWSRSSGLKPRLSGRAQEHDLFPNRWSRMWMAIIGVHRHPIKGLGLGMLIYN

SEQ ID NO: 55907 - protein, 277 aa, Zea mays
  Coding DNA Sequence Number=SeqID_12532
  Subcellular localization annotation: CTP_CleavageSite=51; ConfidenceScore=5.25e-01
MSSRSLMHRVFPPSKPPDGGYPPSFRLIIGGTQLRGSWYLSAIVRLQGFSSCSPAAPLHRRSPKMVTSNLMVGESEPGCGLCPSLSLKDFHHQGWGGDCTVPGSRTRVASEPLAAPASATAAGRGSSTGELAKAGHGPTSNSTAFCPSLPHEFGHGRGPPGSSIRPEASAAAVRPPGAEVVVVVVAAAGAGDGAPFVGLLLLRRPTPIEWGYSPVDYLNRFTKHESPRVKVTSESEDPWTASPSEARSDLVEGVVDAEGATAPFQRQDPSLQDQSVL

SEQ ID NO: 55908 - protein, 131 aa, Zea mays
  Coding DNA Sequence Number=SeqID_12533
MARGPHARERGWLTELMARRREGGLDRGPAGGESRGGSPPWVRFFGGEAVAKHERVKGVTGVGRILPVGAYGGRSAARWRVPAAVMPPVRLSSTLEWEKWRPVIVRVWRSFEHSLIGQRIAREGEGSSPER

SEQ ID NO: 55909 - protein, 164 aa, Zea mays
  Coding DNA Sequence Number=SeqID_12534
MTVAGGREQRSRRQPSSRPIRGQQENPLSRREDNALVIRSSNGSRTRNGRPVALTPRWDRRRLWQEKRAMLRLRHNDRVSKAGTGKGGYPEKDPSPGRNQAPSPPTDQRFEGCPPEGFDSRLRSRGPYTRYWSELTEDIMFGAHRGQHGAFPPPPCGKATQGRM

SEQ ID NO: 55910 - protein, 269 aa, Zea mays
  Coding DNA Sequence Number=SeqID_12535
  Subcellular localization annotation: CTP_CleavageSite=45; ConfidenceScore=5.28e-01
MEGIDAKVTVSRPRPHQPRARPPPISLPGALPSSAPPNAVKSPTNAALPSPVAHPRQIHAPRAHQPREPPPGYPPPISATSFALRASRAAVTVMPHEGLIPLLDVLANKVKAIRRLRELLTAKLHICHVSSQGTSCEDEMWFYDCCRVRRRGQASAYNVPGCSSELGLRLFPEYLSVVRIVTTAQGKVKPWKETSRSSKTTMNSRHEVSDAGSIPVIRVLQMGAAPMSSDVPVPCVADLADQVADVLHFFRLREEVLLKSPLSVVEISK

SEQ ID NO: 55911 - protein, 142 aa, Zea mays
  Coding DNA Sequence Number=SeqID_12536
MGKNNKRKREPTPPSEDFGDSEYLEKEFSSESEGSPAPVSPPVSSDDSDDSQGIAAEVWTYIRAVERSGLEGSNESEYSSDEEDSSKEGGEGDDDDDDGGDGSDDGDGGGRGGSGGGRSGDDRSSRGSGGGGNSKGSNKASG

SEQ ID NO: 55912 - protein, 184 aa, Zea mays
  Coding DNA Sequence Number=SeqID_12537
MNALSREGCRHFEVFDQADEDFERDIYKVEDPIVKESAGAIYDRMWGPHGREVVRERAETARAQAARGDRVDDFGALNSALPDPEPIPAEAVSGSALEPPPETTEGAPDAPAAAEAGGDPPPETAGGAPDAPAAAAADGDPPPETAEGAPDAPAAAAPRAEDPATVAAEATAEAPAMAGSSQVA

SEQ ID NO: 55913 - protein, 103 aa, Zea mays
  Coding DNA Sequence Number=SeqID_12538
MRSSPSSGAEPESEPWVGRGGVRRLPGLSPSPSPGSDEADRLKGARQDKVSGHLCIKCSCDTVGRCGDLAKVAPWRRLGLGRAEGGDAGNMEDFEEFKDYDEF

SEQ ID NO: 55914 - protein, 696 aa, Zea mays
  Coding DNA Sequence Number=SeqID_12539
  Subcellular localization annotation: CTP_CleavageSite=25; ConfidenceScore=5.49e-01
MPTSSSSAATTPPADASSVDFGVSRMSSVRVQDMQRLGYFGGGVACVPGTEEVPEPEGELVLTPNVVVALSKYVWATTSYGGQPSVEVFAKYYCLHWQKRMIGDEVAQFGSFAEGTVEDHEGLPVSEMCSHFYSAYPPFEVAEEDADEGALRCAAGLSSGRDLVEEFVAYGVWPLVHGWALGEVCPRQMPSHGGKMVRSPAFALNLQSRDPAAFVREAEDGAVRLVGRYVPRTEGQRSWDIRGSNDRLNRVFELNQMLYDGYPGQDDVDRRGKKPVVETGDDPAPAAAPSSKKRKLGTVMGGLGVSDGFARELMRTCAAPGGRMSSPELRESSARMLRVTGGWWPRNVPIPRAAGEDFFTSRMVREWKVFPYGRNIAAVVLAVMDKDRQGAAQKRQAVVRLHEARPKRQRGAAKAAAPGGGKPPLAAKSGVPASSKAPEAAAGAGGSKSTKAVPPFSRVPEVAKAARVLSSSGKRVADFATDISVDDYLGGSDEGQLAIVAPAAATTAAAVVPKAKGGALSAGGEMSALAAVRDEASVVSRRLKEVKEALSQAADFADRTASGALTAVVSAEVERLRTQHADAVREKSAADSKCRKLADKVVALEGEKTDLQRQLAGERRETNEALAKAQAAQAEANLARAEGNLARERVEQLQERLSALESREERAEAATRAEAERTRKQLMDSYHELGARTGDF

SEQ ID NO: 55915 - protein, 54 aa, Zea mays
  Coding DNA Sequence Number=SeqID_12540
  Subcellular localization annotation: CTP_CleavageSite=12; ConfidenceScore=5.06e-01
MPRAVPPPRPRRAPAVPSPARHLARDPPSRPRPVVSPATKPPRFNIELIIYVYD

SEQ ID NO: 55916 - protein, 1106 aa, Zea mays
  Coding DNA Sequence Number=SeqID_12541
MPTSSSSAAATPPADASSEETLSSLMAEELRAGDSVDFGVSRMSSVRVQDMQRLGYFGGGVARVPGTEEVPEPEGELVVFEAFFACLHTDLLAKSCAVFAKYYCLHWQKRMIGDEVAQFGSCTFTPKTGKTTMQVVELVPCARNKWGNWNEFWFYVAEGTVEDHEGLPVSEMCSHFYSAYPPFEVVEEDADEGALRCAAGLSSGRDLVEEFVAYGVWPLAHGWALREVCPRQMPFHGGRVVRSPVFALNLQSRDPAAFVREAEDGAVRLVGHYVPRTEGQRSWEIRGSNDRLNGVFELNQLPYDGYPGQDDVDHRGKKPVVETRDDPAPAAAPSSKKRKLGTAMGGLGVSDGFARELMRTCAAPGGRMSSPELRESSARMLRVTGDCWPRNVPIPRAAGEDFFTSRMVREWRVFPYGRNIAVVVSAVMDKDRQGAAQKRQAVVRLVEARPKRQRGAAKAAAPGGGKPPLAAKSGVPASSKAPEATAGAGGSKSTKAVPPSSKVPEVAKAARALSSSGKRVADFATDISVDDYLGGSDEGQLAIVAPAAATTTAAVVPKAKGGALSVGGEVLALAAVRDEAGAVSRRLKEVKEALSQAADFVDRTASRALTAVVSAKVERLRTQHADAVREKSAANSKCRKLADKVAALEREKTDLRCQLAWERRETNEALAKEQAAQAEAKLARAEGNIARERAEQLQERLTALESRMERAEAASRAEAERTRKQLMDTYHELGARTGDFEVPDREPGLRCLEWVQEELQALPTVVEGFMSYASLVTCEGAMNALSREGCRHFEVFDQADEDFERDIYKVEDPIVKDSAGAIYDRMWGPHGREVVRERAETARAQAARGERVDDFGALNNALPDPEPIPAEAVSGAALEPPPETVEGAPDAPAAAAAVGDLPPETAEGAPDAPAAAAPSAEDPATVAAEATAEATVEATAEAPATAGSSQVQDFGPAHATATTKFLEASTVDGGNKCDGSASEFSDFADSGSSVEWTEESSEEDLDYFAALDVAAAEASPHVADAEDVPGPSTGRRRRRAIAKRRVSEAEGGRLRVSRAGRQELLSLPVAVSTGEGELRSLFAGEELRIMLFNYREMGIIPKVEPM

SEQ ID NO: 55917 - protein, 72 aa, Zea mays
  Coding DNA Sequence Number=SeqID_12542
MVVAPWVKYLSQEYDPMFCGLPAPTAPPLAHLSGTNRICRGRIHLPCSSESCGSSSNEFGSSTAQSASNRVA

SEQ ID NO: 55918 - protein, 267 aa, Zea mays
  Coding DNA Sequence Number=SeqID_12543
MAIFDKNGGCVAIDIRPEARKSHYTYVSLPYITFLDLWWRPFLGQKSITFLDFWWRPFHGQKSVGVSLRIIENGCSWLFSSIMGVVWPFIIDQRLVHLTPHMFPCHRSHSWISGGVHFLVKNPYMLAFGIIENGHSWLFSTKMGVVWPFIIDKKLVHLTPSMFPCHRSHSWISGGDHFLVKNSYVLAFGIIENGRSWLFLTKWGLWPLIIDQRLVHLTPHMFPCHRSHSWISGGDHFLGKNSNVLAFGIIENGHSWLFSKKWGLRGH

SEQ ID NO: 55919 - protein, 84 aa, Zea mays
  Coding DNA Sequence Number=SeqID_12544
MAEEQSQNRLNRFRDRLNRFPGLKPNFEYFEENKNGVFVGTKTNKKGYTGHFVECNTRQRDFETAPTSVATPEDGSGQGDASAS

SEQ ID NO: 55920 - protein, 150 aa, Zea mays
  Coding DNA Sequence Number=SeqID_12545
  Subcellular localization annotation: CTP_CleavageSite=54; ConfidenceScore=5.02e-01
MVLEIQQRLQLSGIAKSCPMHDRGPRKKDSSAFRCIAALPMPSRNWSGLNAPASAPHTSSSRWSIAIGISRRVPLGTFTPQWSAPVVARLTINGTALYSRSVSYNTMVSWIRCGHGGGRCHRALYHRREHACGLCEAASVGTGFHATPCS

SEQ ID NO: 55921 - protein, 47 aa, Zea mays
  Coding DNA Sequence Number=SeqID_12546
MAAAPLPSQNLELELDLFHLHPDPPSPSVFLDLPPTPSPTTWTTTTM

SEQ ID NO: 55922 - protein, 70 aa, Zea mays
  Coding DNA Sequence Number=SeqID_12547
  Subcellular localization annotation: CTP_CleavageSite=43; ConfidenceScore=5.11e-01
MAVLSGQARTVRGLGPDGPRPGAGARVLCLTARRSVPWGRTVRAYAEAAEVTGGSLDLAPGRDPVGEERS

SEQ ID NO: 55923 - protein, 89 aa, Zea mays
  Coding DNA Sequence Number=SeqID_12548
MAVWALECDPLLKKLVLWLLRLEKFSMMNGKSTLRKRKRDVFDKYLVWIGALVLRFLLLRRFPCLNLLTLTPMGVALVDRMASQLRSQA

SEQ ID NO: 55924 - protein, 70 aa, Zea mays
  Coding DNA Sequence Number=SeqID_12549
MEDAMREQQEKFREELRQQQMAFLKEQSEYMAAYNAQAQQAMNNPNPLHDFVNEFFASGGSGHNSNDPDM

SEQ ID NO: 55925 - protein, 247 aa, Zea mays
  Coding DNA Sequence Number=SeqID_12550
  Homolog annotation: Hit_ID=Q6QP54; Match level="QueryCoverage=21%, HitCoverage=19%, E-value=2e-08, Identity=55%"; Hit description =Putative kinase
MELGGGTAVGAVESLLTSSCFRKGAESRRHHRACRAPSLPIWWSEPDGTPVLFPAARVSSGSSEAEVESEPPGRARRRLPAGAGAESEPWGRAKRSSSSSGAEPNSEPWVGRGGDHRLLGPSPSPSPGLGEAEIVVFWGRAQVRALGRAEFAVFRDLARVRALGRAEFTVFRDLARVRALGRAEFAVFQDLARVRALGRAEFAIFRDLARVRALGQAERSSSSSGAEPKSEPWVGRSGASYGASGRA

SEQ ID NO: 55926 - protein, 172 aa, Zea mays
  Coding DNA Sequence Number=SeqID_12551
  Subcellular localization annotation: CTP_CleavageSite=52; ConfidenceScore=5.23e-01
MGEIRRLSASSLGGTQLRGSWYLSAIVRLQGFSSCSPAAPLRRRSPKTVTTSLMVGESEPGCDLGPTLSFKDVHHPCWGGGRAEPELYLPRGLVGHPLPRRSRERALAGPAGGSDFDNAGPVDSRRRQPQRVGLVGFAPGAPSRRKVATAPCAREDRPRCRALLGRRRISRS

SEQ ID NO: 55927 - protein, 76 aa, Zea mays
  Coding DNA Sequence Number=SeqID_12552
  Gene Ontology: Mol. function=ion channel activity; Cellular component= integral to membrane; Biological process=ion transport
  Homolog annotation: Hit_ID=Q4VDM4; Match level="QueryCoverage=80%, HitCoverage=11%, E-value=9e-14, Identity=58%"; Hit description =Cyclic nucleotide-gated ion channel 2
MDFGLASAVTTLWTCTDVTHLMHVLLQFRLAWCDKLICYARAVAAHYVCSVKGLCFDLFIIRGGNRAFNACWRCTM

SEQ ID NO: 55928 - protein, 52 aa, Zea mays
  Coding DNA Sequence Number=SeqID_12553
MTLAIDYDEQTQGANDECPSGQGVTLHKIVTAIGGGVSVAKAQRLWKAVVGP

SEQ ID NO: 55929 - protein, 40 aa, Zea mays
  Coding DNA Sequence Number=SeqID_12554
MARRRGGSGVVALRRRGGMGGVWGRFDPKARATIRGWGDR

SEQ ID NO: 55930 - protein, 82 aa, Zea mays
  Coding DNA Sequence Number=SeqID_12555
MNTLSREGCRHYEVFDQADEDFERDIYKVEDPVVKESAGALYDRMWGPHGREVVRERAETARGQAARGESDVHPLGDCPIFR

SEQ ID NO: 55931 - protein, 91 aa, Zea mays
  Coding DNA Sequence Number=SeqID_12556
MWSNYFSGNSVPHGCVRVYRHENTEKCNVLVTTHLRSGKLGCNGIFFRYTNLENDECPSGQGVTLHKIVTAIGGGVSVAKAQRLWKAVVGP

SEQ ID NO: 55932 - protein, 595 aa, Zea mays
  Coding DNA Sequence Number=SeqID_12557
MALLHSARYQQSLRCYHARGARILTVEGSSNTLGVNYTFGEVRPSLGRRRGRRISTPKDDISTTPEPLLPGPSPGIRLEQTARAGHPEASASCPPRTSARLAASATQLRRRSCQWTTRPGSGRPSLLFEPTLPLFVLTPLPPASAHRRAAEGPDSHNEQNTGIQGAITNGTPVSPPRVRTTPHIGGPAEQQKADGWLVFARSSSGDDDDFCSGGPNSSSDDLRADAAAIRPSPMPSLERQGRAEGRRVGGQSVGGTGYLVGGETSSGCRGGRWCRKRLRSHSGQRAGHAAAASATNGERPSPRSLREGAGRRPRKDPPQLGALPSPALMMNILEAEGGAEAATRLASPHPGPGRLMKILEAERWLKGTNFHEVAFSNDKAKGLRPSRAESSPTRSKVLPLRHGGWVPRVMQAGPGQKKPNRRARCMQPPSGYKHSSTFAQTSGPTRHATGVPVATCEQLHHHSRHYRASSTAEPVPRLEATLRMIQQRQPGASVTGQSAAGEGTMVDAAKNGLAVMAVAGGQKQRSRRQSSSCPLVGQRENPLPRREDDAPVFRSSNGPRSRNGCPANHSPRCINSAAGQAAPLAREAGDASPSP

SEQ ID NO: 55933 - protein, 548 aa, Zea mays
  Coding DNA Sequence Number=SeqID_12558
  Gene Ontology: Mol. function=CTP synthase activity; Cellular component=cellular_component; Biological process=pyrimidine nucleotide biosynthetic process
  Homolog annotation: Hit_ID=A2Y7Q4; Match level="QueryCoverage=99%, HitCoverage=99%, E-value=0.0, Identity=59%"; Hit description =Putative uncharacterized protein
  Pfam annotation: Domain name=CTP_synth_N; Domain location=1-302; Score=550.7; E_value=1.5e-162; Accession=PF06418.5; Description=CTP synthase N-terminus
  Pfam annotation: Domain name=CbiA; Domain location=5-182; Score= -37.5; E_value=0.078; Accession=PF01656.14; Description=Cobyrinic acid a,c-diamide synthase
  Pfam annotation: Domain name=GATase; Domain location=326-491; Score =110.6; E_value=4.6e-30; Accession=PF00117.19; Description=Glutamine amidotransferase class-I
  Pfam annotation: Domain name=Peptidase_C26; Domain location=354-473; Score=-105.6; E_value=0.023; Accession=PF07722.4; Description =Peptidase C26
  Pfam module annotation: Pfam domain module=CTP_synth_N::CbiA::GATase:: Peptidase_C26; Domain location=1-302::5-182::326-491::354-473
MKYVLVTGGVVSGLGKGVTASSVGVVLKSCGLRVTSIKIDPYLNIDAGTMSPLEHGEVFVLDDGGEVDLDLGNYERFLDIKLTRDNNITTGKIYQSVIDKERRGDYLGKTVQVRNAYQNRDFLCFSVATEKMPTVTLALQIRVHSLYQVVPHITDEIQEWIERVAMNPVDGTEEPADVCVIELGGTIGDIESMPFIEALGQFSYRVGPGNFCLVHVSLVPVLNVVGEQKTKPTQHSVRGLRGLGLMPDILACRSTQPLEEHVKVKLAQFCHVPDQKAHEAILKVLDIQCVGKVAREPQLSEWTERASRCDRLKSPVRIAMVGKYTGLSDSYLSVIKALLHASVALDRKLVVDWVPSCDLEDSAAEENLDAYEKAWELLKGADGVLVPGGFGDRGVQGKILAAKYARENNIPYLGICLGMQIAVIEFARSIMKLHGANSTEFDPTTKTPCVIFMPEIIELPTHRFFVGAQFHPEFKSRPGKPSPLFLGLVAASSGQLDHLLQPGLISSTGRHTCSKGGAQKLKAGHVMKPLNGLVNAHYSATGNGAIPI

SEQ ID NO: 55934 - protein, 205 aa, Zea mays
  Coding DNA Sequence Number=SeqID_12559
MRSSSSSEAEPESEPWGRAKRSSSSSGAKPESEPWGRAKRSSSSSRAEPGSKPWGRAKRSFLWRLRPDLAAVSLTLPSGTTVGAAQAVLSSCQAVCHGTGLAVKLIKDQGARDKKPETQRIVTMDGGLILMKPRGYFAVLAQRRGKLYSGPFDQQCAAQIRSNLTEMLSAASRWIQDPRPRFNESRACLSRRMANLRCPFDCANG

SEQ ID NO: 55935 - protein, 47 aa, Zea mays
  Coding DNA Sequence Number=SeqID_12560
MESADSFDGAHPEIQRDSVDIAPAKVGLVVEDGPDILAPRNKIEHDT

SEQ ID NO: 55936 - protein, 68 aa, Zea mays
  Coding DNA Sequence Number=SeqID_12561
  Subcellular localization annotation: CTP_CleavageSite=33; ConfidenceScore=5.05e-01
MEKRPQELFSFGKSQRLVSYNSPDMSGVHRTVRCDSSATAIPRQRLPAEALNAPQRAQTSVSPYSPPL

SEQ ID NO: 55937 - protein, 180 aa, Zea mays
  Coding DNA Sequence Number=SeqID_12562
  Homolog annotation: Hit_ID=Q8H3D2; Match level="QueryCoverage=16%, HitCoverage=11%, E-value=8e-07, Identity=89%"; Hit description =Putative Vesicle-associated membrane protein
MRSQRLRLFLTKRNTNKAQMLLHVELVCRMIITSTSSAHLRKTSLRKCLKEWNVYCVVAKESASKNVSVTFLERLKDDFMKRYYSVMFVVPYLCFIPTFLLLLQRMGTYLVNIYEPYILVLANTKTESSVLGPWHWPQESPINYLVDQAKAEHNKKEIIYNLGVVLELEAQFEDVFVEKP

SEQ ID NO: 55938 - protein, 543 aa, Zea mays
  Coding DNA Sequence Number=SeqID_12563
  Pfam annotation: Domain name=MAP7; Domain location=51-196; Score= -84.6; E_value=0.1; Accession=PF05672.2; Description=MAP7 (E-MAP-115) family
MVGTSAATARRPVGVSGALYAKAIRGIDGLFPFKCGLASEAGLGHLSWNNSGSSATAAVSAEVERLRTQHADAVHEKSASDSKCRKLTDRVAALEREKADLRRQLAAERREANEAIAKEQAAQAEANLARAEGNLAKELAEHLQERLTALESRAKGAEAAMRAEAERTRAQLIDTYRELGARTGDFEVPDREPRLRCLQWVQEELQELPTVLGGFMSYASLVTCEGAMNALSREGCRHFEVFDQADEDFERDVYKVEEPVVKESVGALYDPDVGRRAASGVDDFGALNSALPDPEPTLAEGCDWGCPGANLGDRRRSRRLPPHPAAAGEDLPPKAAEGAPDAPAAAVPSAEDPRGGGGGNNGGGSGGANGGANGGGSRSVRAFAGGVVQDFGPAHATATTEFLAASTAEGGNEYGGSVSEFFDFTDSGSSVEWTEESSEEDLDYFAALDVAAAEASPHAADAPDVPGPSTGRRRRRAVAKRRVSAEEGARLRVSRAGRQELLSLPAAAGRGERELRSLFAGEELRIMLFNYREMGIIPKVEPM

SEQ ID NO: 55939 - protein, 128 aa, Zea mays
  Coding DNA Sequence Number=SeqID_12564
MAPKRASSKAAPSVDEAAKAALLAEKKGKALVDVTHHEACEDDALSKSSRGQPQPPPGFAPPEGADATEDGEVIGVSAEEQLQLRALRIKNRNLQKQKEILEAKRQHVSVQAKGAPDDTRRGAEGSGA

SEQ ID NO: 55940 - protein, 273 aa, Zea mays
  Coding DNA Sequence Number=SeqID_12565
MEGNPVLPSDAGEGPSAMPMPPMAGEDPVLAPAPAVEGALEVVAEPAVEDPTAAGRAFAGFELHSNPLLTMLILWRLRPWFLKMIRMILCLSFLSMMIPGVRLCGRKSLRMRTWIILRPWMWAAAEASPRVMDAEILPGPSAGRRRRRAVAKWRVSEVEGGRLRVDEASKRELLSSLVGASLGEGELRNLFEGEELRIMLFNYREMGIIPKVEPMSSPDCVVNLYALGDNFVLTINGPSHFGSSLPRDSVRVGEDTVYVNEVFGSWFIDVGYY

SEQ ID NO: 55941 - protein, 570 aa, Zea mays
  Coding DNA Sequence Number=SeqID_12566
  Gene Ontology: Mol. function=protein dimerization activity
  Homolog annotation: Hit_ID=A5ALW2; Match level="QueryCoverage=52%, HitCoverage=30%, E-value=5e-27, Identity=29%"; Hit description =Putative uncharacterized protein
  Pfam annotation: Domain name=DUF659; Domain location=138-293; Score= -67.5; E_value=0.068; Accession=PF04937.6; Description=Protein of unknown function (DUF 659)
  Pfam annotation: Domain name=zf-C2HC_plant; Domain location=26-81; Score=61.8; E_value=2.3e-15; Accession=PF07567.3; Description =Protein of unknown function, DUF1544
  Pfam module annotation: Pfam domain module=DUF659::zf-C2HC_plant; Domain location=138-293::26-81
MASPSSVNNVNYDPKTDKARKASSNDPGWKYGYWANLANRDQVTCTLCDIIVSGGIKRLKQHLAGGYGDTKICSKTTTAIRKEMRDYLESKRRKRAIFLDDNEQQEEEEDVMVVDVAAESVQVQQDAPIESEGSKVQPSSGTAAKHKHATYLYKDTTSIKTKANQASKKKSIVEMLRKSPEDVFDERRKGVPFNAAAARQFQVAVEATAQFGSGYKPPSPYQLGQPLLKDAVKLTTDLLGKKIEEIGKEKVVQVITDNGANYKAAGKEACDIVLSMEFWNKVEDCLRASAPLLIVLRVVDGDEKPAMPEVAALMKHAKEKIKLSFAIDSKKSLLKRIIDITEKRWMKQMDHPFYGAALYLNPGKLHPLIRDDDDATVVQLRGCFLDVLARMVDDEETRDKIDAQFLDYEALRGEAFSNKMAKNNLETMNPHSKIHTKKRNRLLHKRLNDIVYVSYNRRMKTRFQIRREKKGKGFDPLVIEEFDWDNEWADSSYVQPQGARGCNCGEDENGLTWELVDQAVGASSSLRGRNLPRNANKRARVSHSRFDFEEDFGSANEEEECGGTARIIPT

SEQ ID NO: 55942 - protein, 240 aa, Zea mays
  Coding DNA Sequence Number=SeqID_12567
MTVMPSSTPSAAAEETPAVSAAAIEVDTGGASSSNPPPTPVEIEVIFGRWLWSDAEPEAAPVPLPRVLSRAHQALQETEAAILLEWEALEAEHQRLSDWRAQLEERTKAASCQFASERSELERDCKDYRKDLKKVFARELEVTRKEKRLAKKELHLDQREERELDGKARDAALAEEKLKVKGESLDRREADLASRAADLTRREKDIAFKKEMLERREKSLAEHELEVEEKEWTLEERVHQ

SEQ ID NO: 55943 - protein, 274 aa, Zea mays
  Coding DNA Sequence Number=SeqID_12568
MGSGPHGNIGSPPEWGAEVYTTWSGHVSALDPRLVLIKVQVFFVPESRDPAVSGPDPTQRGPGPTPGVRFVPVEVLDLARRSGLYMQGSDTFPWGSGPTVYTLEDFVFSSHVAAPEPSTWWGRVLFASRLEIAAWAPRLHTVPRGDAVLARAAVRLLRTRRPTPKEYDSWARAPVSETRSFVSCDGDEEAHYRGRRFAFRARAVVRLLRTQELTPKEHDSWARAPVSATGPLFLAEMKGNTIAGGGSLLVAVRLLSTQRPAFHLYDLWARAPVS

SEQ ID NO: 55944 - protein, 123 aa, Zea mays
  Coding DNA Sequence Number=SeqID_12569
  Subcellular localization annotation: CTP_CleavageSite=60; ConfidenceScore=5.13e-01
MVTRWAASRRTAGGAMVAGSGAAARVQQQCSGQPSRDEVGLERCRTLTRGFGLGIGHRMSSSSRLSVRIWPTARVTSVSFQKIDPNLGAIIIGAEVTYSGADIIGASYVYEGGDVASLRMVQA

SEQ ID NO: 55945 - protein, 84 aa, Zea mays
  Coding DNA Sequence Number=SeqID_12570
MTMEEEPFTNTKVVVQCVFVDTYEDDDVTAGIECLVVDVVNSPAKAAVIVVVEDTDTVPKQRTSMRLVALSGEADPEWLDCSVP

SEQ ID NO: 55946 - protein, 179 aa, Zea mays
  Coding DNA Sequence Number=SeqID_12571
MAIIFKSKITFSPRAIFCCGTISCVAESAFIPFVSFGDLDNNTFKVISRRHSSKVHNIEEMILPMDAQYDVTQEWLDRVKIARKGLRGTKRRGDWSHRPYLMMNPPCWGRNLPSMMLGDGETCVIMCSDITKSENRTRNSPSLGTKPQRWGRPSTKEHIENCTIAVTATTVKLRNASGN

SEQ ID NO: 55947 - protein, 72 aa, Zea mays
  Coding DNA Sequence Number=SeqID_12572
MNALSATHEMVPQQKIALGLKVILLLKMMAMELALIDDTPLPGRFEERNTLLPGMALYVSGATGGVYRAVRC

SEQ ID NO: 55948 - protein, 98 aa, Zea mays
  Coding DNA Sequence Number=SeqID_12573
MALSAHALLVALVEHCLDAHHLGQKRRRRNRGAAVQVRLHPEHARGLSQVHPGAGPLANGGGQFLLNALASEEPVTEDPGDQQIEVAEQELIEGKLCP

SEQ ID NO: 55949 - protein, 98 aa, Zea mays
  Coding DNA Sequence Number=SeqID_12574
MALSAHALLVALVEHCLDAHHLGQKRRRRNRGAAVQVRLHPEHARGLSQVHPGAGPLANGGGQFLLNALASEEPVTKDPGDQQIEVAEQELIEGKLCP

SEQ ID NO: 55950 - protein, 56 aa, Zea mays
  Coding DNA Sequence Number=SeqID_12575
MGTNGHLDLDMGGKSIDQKGARETVDNGVQVRAALRCVTPYVLVRMLYMVDYKGAL

SEQ ID NO: 55951 - protein, 906 aa, Zea mays
  Coding DNA Sequence Number=SeqID_12576
  Homolog annotation: Hit_ID=A2X4D6; Match level="QueryCoverage=82%, HitCoverage=93%, E-value=0.0, Identity=79%"; Hit description =Putative uncharacterized protein
MSTATAKEEEAAAAAAPAMVGEEAAARAALKRYEALLTVRAKAVKGKGAWYWAHLEPVLVPPAETGMPPKAVKLRCALCSAVFSASNPSRTASEHLKRGTCPNFASPPPGPAGASALQPAPTPTQQLALPSNSTASSPVPISSIAPSSSHHHSNPHHHHHQQQQSGSRKRHSMPPAYTPAEPVSHHHHLVVVDPSLVYPSALPALPAPPPPHQSELVLSGGKGDFSALAMLEDSVKRLKSPKASPVTMMPKPQADAALALLSDWFLESSPGVSLSAASHPKLRAFLRHVGLPDLQRADLAGPRLDARFAEARADATARVRDALFFQLAADGWREQVVTLCVNLPNGTSVFHRAVPVPAMAPSDYAEELMLEAVASVSASGSSSDLHRCAGIISDRFKSKALRDLEKKNYWMVNLSCQIHSFTRLVWDFARELSLFRSATAKSAKLAAFFNAEQTARSLLHKHQIQQLGHASLLRVAHVPFNGNGRNYRAAFEMLEDILNSAHPLHRAVQEDSYKLVCIDDSAAREIAEMVHSEAFWIEVDAVHSLVKLIFDMVREMEADRPLVGQCLPLWEELRSKVRDWCEKFNTDEGAALNVLEKRFRKSYHPAWSAAFILDPLYLVKDASGRYLPPFKCLTPDQEKDVDRLITRMVSREEAHLVLMELMKWRSDGLDPLYAQAVQVRQPDPSTGRMKVANKQSSRLVWETCLSELKSLGKVAVRLIFLHATSRGFRCTPSMVRWLCAPGTMASGNDRAHRLVFVAANSKLERRDFSSDEDKDAELLAEGDDDDGRLRLRLSGAGTGLLARTASSCGLMMIAVVLAVTSSASICPPPRRRCTAHDCTGRRLEERKAVVGGGMPISAIVGFLSSPIPMPPVTIRTIIRFFFSSLSRVSCHCYRLLPCHKAVAHGK

SEQ ID NO: 55952 - protein, 87 aa, Zea mays
  Coding DNA Sequence Number=SeqID_12577
MISLIRCRRALRARGSDESEYSSDEEDSSDSSEEGSDGDGRDDDGGDGDDGDDSGSGDDGGSKGGNDDSSRSSNGGGSSKGSNKASG

SEQ ID NO: 55953 - protein, 421 aa, Zea mays
  Coding DNA Sequence Number=SeqID_12578
  Gene Ontology: Mol. function=isochorismate synthase activity; Cellular component=chloroplast; Biological process=biosynthetic process
  Homolog annotation: Hit_ID=A3BY15; Match level="QueryCoverage=85%, HitCoverage=68%, E-value=0.0, Identity=88%"; Hit description =Putative uncharacterized protein
  Pfam annotation: Domain name=Chorismate_bind; Domain location=196 -402; Score=-17.1; E_value=1.2e-15; Accession=PF00425.9; Description =chorismate binding enzyme
RHRPRPPGIIRIEVPITQRVDAVEWLHAQTTLPRCFFSARAPLPDAPALAGNGNGNGSVHRQQPVSVAGVGSAVFFRGTEPFSLADWRAIKRFLPRDCPLVRAYGAIRFDATSDASVEWEDYGSFYFVVPQVEFNELEESSVLATTIAWDDSLSWTWHNAVEELQSTLRKISPCSSVQANKASLQTAIVSLNHVPTKASWDLAVTKALHMIKGRQRELVKVVLARCSRYITDTCIDPVELLACLKAEGQNAYQFCIQPPGAPAFVGNSMICDEVVVHPSKALRKLPRVQHLSAQLAARIRNEDDEFEILNTLHPSPAVCGLPTEEARQFIRDCEIFDRGMYAGPVGWLGGAECEFAVGIRSALLGKGHSTLVYAGAGIVEGTNPSFEWDELDLKASQFAKLLRYQERPIRYQEAENLGTVI

SEQ ID NO: 55954 - protein, 114 aa, Zea mays
  Coding DNA Sequence Number=SeqID_12579
  Subcellular localization annotation: CTP_CleavageSite=64; ConfidenceScore=5.36e-01
MASTLRCLGSFAVRWSPCAPAVELSGHGSGRRFGLDNRSSGKGSSKQGIPSQRPSTARGIAGLRASQASAPAPALPPWLIRTQGEVGILGAAAWNIAGDYHGDRGLGRALVGIR

SEQ ID NO: 55955 - protein, 358 aa, Zea mays
  Coding DNA Sequence Number=SeqID_12580
  Subcellular localization annotation: CTP_CleavageSite=41; ConfidenceScore=5.18e-01
MAYWRSPQIIMAKLPMSQRGRPPRLHHTPASPRDARARDSRAASRSACHPFHPRACPCPCTRRAHPLAHDPYAPANPRVPRQPSCASSLRPLTDVAARLNYARHGSHPQPIVRPPSPSSHSASTPRARCYRHQGSYSRDPPPLVGTPQNLAVTRTTTNHYTWRAAILPPRFVVHQICTVALLHWALPHRADYRKHLGSSSWTSVQGFVLEDSTGLSPNGDLNVHPVIAGSLPLHNQSVDVKEHPVVIYTKGYPDAPRCRFSALAVKTGTGKANTIEGEMRQKCRYPETGCTHPYPRSSTRKLQFEVSPKALKNSARFALAVASLLRVSSSALIVCSSIPKSSSSFTAPLIELDRPGLP

SEQ ID NO: 55956 - protein, 111 aa, Zea mays
  Coding DNA Sequence Number=SeqID_12581
MKIVAVVVTIQSGIWKHKLISFDQNSDTGTIYGSRMLTTLVSCGKWQGDRCSNKKILWKRMNGSALLNRSSGFSGPTGHQITWDEFKLAFPEHYIPEGVLHMKQEEFMKLK

SEQ ID NO: 55957 - protein, 261 aa, Zea mays
  Coding DNA Sequence Number=SeqID_12582
MTTSLVVERSEPGCSLPLPSASRMFIILAREEGEPSGSFAFRVGWRSASSSSIRGRRAFAGFAKEANSGYAGPAVCGAVSYRVSGSWPGWLWCRLRRYLLPLGQSVAARPPHGRRSRRARVGHIHGFSRATGRTGRSYKTSYAMGAAVVFLDGLVLTPVTWSLPLVGLIWLPPLVRLPTAEVVASAGETVSATCRRTSGSLALMASLSPPIGGRGRGPIRSSAHPEVIAAAGEPLGAEVVVAAGAEVVAIVGGTVQNQLPA

SEQ ID NO: 55958 - protein, 109 aa, Zea mays
  Coding DNA Sequence Number=SeqID_12583
LPERGIELCLAEDTRSRSPDFTRPPASAGAPAADELARLRTWTSRFRPSPSSSRTSSRKDFPEPTLSFAGPPSPPEQRVVQEVAQDPALEPAIEDLPAPTLEGKPRFYA

SEQ ID NO: 55959 - protein, 24 aa, Zea mays
  Coding DNA Sequence Number=SeqID_12584
MTGMTGGTQPTATHAQRRVRQILS

SEQ ID NO: 55960 - protein, 175 aa, Zea mays
  Coding DNA Sequence Number=SeqID_12585
  Gene Ontology: Mol. function=ATP-dependent DNA helicase activity; Cellular component=DNA-dependent protein kinase complex; Biological process=double-strand break repair via nonhomologous end joining
  Homolog annotation: Hit_ID=A2YIV5; Match level="QueryCoverage=22%, HitCoverage=9%, E-value=1e-12, Identity=82%"; Hit description =Putative uncharacterized protein
MPREGDEGRPHESPPGKPPGIIVRRDPVAREGEEGRPRESLSGKPPVCAQMARRRFLIGRWRPASWSSTAHNNEPLQIVCGYHALPQPPRGGELVFHTLEHALYSLFLFADTFLGKGIFRDDRDEDEDSVQEREVNKEMVVYLVDASPKMFTPATTQVSMFYVSIEKLRTVKLHH

SEQ ID NO: 55961 - protein, 71 aa, Zea mays
  Coding DNA Sequence Number=SeqID_12586
MDRLATQVHCNVLSFQDAWRMIVKRLTAVRITPASRSSSGYGGHNADESKFLLYNPYPFVGFQRVFGFNEE

SEQ ID NO: 55962 - protein, 66 aa, Zea mays
  Coding DNA Sequence Number=SeqID_12587
MTSTGNRRRACDYRVELVRVMLQWVGMFSKIKLDGGSVNGLYGFNIGKDVPLPASIPLRVFSLVGL

SEQ ID NO: 55963 - protein, 75 aa, Zea mays
  Coding DNA Sequence Number=SeqID_12588
MARVACTLRGKRLDGGYSFVLLMMVLSVGGLDLLAAMWSIYFSGIQYPMDLYGYTNMGILRSVMYLQQHTYAQVH

SEQ ID NO: 55964 - protein, 83 aa, Zea mays
  Coding DNA Sequence Number=SeqID_12589
MAYQIPPLGIHIYTPSALQLGGSRLSLTVAILAKGRDLWHWDEAVHNMKSVIREKDEPAPKLCEDKLRLSDGKWNRLKEEKTI

SEQ ID NO: 55965 - protein, 46 aa, Zea mays
  Coding DNA Sequence Number=SeqID_12590
MGTNGHLDLDTGDCSVCHRIVSDAPGPYRIKLATLGFLQARSAIIH

SEQ ID NO: 55966 - protein, 401 aa, Zea mays
  Coding DNA Sequence Number=SeqID_12591
  Homolog annotation: Hit_ID=Q6J9V9; Match level="QueryCoverage=32%, HitCoverage=45%, E-value=2e-35, Identity=62%"; Hit description =Putative uncharacterized protein
  Pfam annotation: Domain name=Erythro-docking; Domain location=318 -366; Score=-2.1; E_value=0.083; Accession=PF09277.2; Description =Erythronolide synthase, docking
  Subcellular localization annotation: CTP_CleavageSite=38; ConfidenceScore=5.58e-01
MKLTTYPSGGVGSASLAGAIHSGCGPSVRGRSRPSATRASRSSTTTVEKGHGSHGGITKPKQKASANGRVKNHHRLLFRVYKGPGEIHQRLRLNPPRDSNSKDKRHLWQAKRAPFRLRHDDRVIKGTEKGDIAKRIIPSKGNGPRALLLIRGSKVVPSGVPQPPQSTRAPSPLLIRGSKAGPSEGFESRPRARRVRDDPRYVRYMAEARATLPRYPRTFSRPAGTICNGIPPEGGIEPSDPIEWVKVQQITYRDRLTPYPDTRASVGKVEPRPREKDSASPDPRPWPREKDSASPDLSLGLGGVTASPDHSLGLGGVAASPDLGLGSRHFSDGHVVTSTGLKALLRRPRWHTYRAQGASPTTTLLSVQGSGHFPASHDNISLIPSLVFHLASTHLDRGTRH

SEQ ID NO: 55967 - protein, 211 aa, Zea mays
  Coding DNA Sequence Number=SeqID_12592
  Subcellular localization annotation: CTP_CleavageSite=84; ConfidenceScore=5.32e-01
MMILASVATTSFAILLLFSLPSCLHLHATPFSTEGVGAGASSPYSSMRTFHIMRAPSFSPSSDVPFIFPAFALFFHPNLLPPPTVAAVSRPTLVDAGTGRVSHAPGLSPPNHQKWSLGSCMSHGAPDSSATVGAEVAVALLAHRTCPVLHRTLSGASPDSPVNYSGAASRISEGEQFGVGDPGAPDTVRWHTEQSGAPEQSTLRLTLALNI

SEQ ID NO: 55968 - protein, 322 aa, Zea mays
  Coding DNA Sequence Number=SeqID_12593
  Homolog annotation: Hit_ID=A2XFR6; Match level="QueryCoverage=36%, HitCoverage=33%, E-value=2e-17, Identity=41%"; Hit description =Putative uncharacterized protein
MDPGTHMMVRTLQTTRTNTSYAPQPRQIPVYPAVVEEVPADLPPIRVENVVNLEDNSEKQLPTPTPLAESLAFAARSSTSAPPAPAFQAPAPGGDDPDDSGDDDDEDEEGGDEHVHEEADYAQHDYFMGFGPVVEHYTSMFETGHFPNLLQEVLHALGTYVHPLVMDARDRGFKTLSAHESLTPLSTYAASVSDAAHRTLWSLSHTYRQQLQNTRFRHLPQRLRGGSQTSIVPGEAGEDRLNTLAGVVAGLNTDLDSATLDLYRVHLELENAHARIAPWKPNCKDWIRPKLRSLPWRCLLPARGCAMGSPDPSLGCFRCFET

SEQ ID NO: 55969 - protein, 168 aa, Zea mays
  Coding DNA Sequence Number=SeqID_12594
MASSKDHTDISPDNILKPAVESLMADEQQQYEDYMRQAKEKFLSQYTPQPLYGIADELISRASTTTTIPTWQIGAPGHGRTVRAFARTVRPLRRPSGFPCRTVRDRTRATAWRSNNSEHNRPVRMYHRTDRISIRRTYCRTLRTKLLHITAAVRSAPYIFKPQHVIRS

SEQ ID NO: 55970 - protein, 501 aa, Zea mays
  Coding DNA Sequence Number=SeqID_12595
MDIYVDDYRVGGVMMFDAHTGWGLVGSYAGQLAIVPAPVAAAPAAAAGGTKDASQDTWSKFSASGEIASAAAVKDVAGSVSQQLKHAMQQLKHHTEAVRDKSAAKNKSHRLTEKLAAEVAEKEDLIRQLATERKDANRACAEVQAAQTEAKLARAKASLARQHAEELETSLSSQRDRLDKAEASTRAEVDRTHAQLVDTYRELGARTAPFEASGKEVGLHFLEWLQEELEVLPTIVTGLMSFASLITCEGAVNALSYEGCGHFEVFDQSDEDFERGIFQIENPVLKRSAGALYDRMWGPHGRETVRERSDRAMEQMAHDEEVKDLGDLDSTLPEASATAADDTNFVAAATVVPANDNLSGSRSGCFLYDAESGSTFSWTEESSDEDLDYFAALDVDTAESSPQVEVGEVAGLPSARTKCRRQRVVSKHSVGEVSRSGRRRRMGMERDSLRVDRFGKRELLSLSIGTSIGEVDLWNLFEGEELKIMLFNYREAGIIPKVEPM

SEQ ID NO: 55971 - protein, 120 aa, Zea mays
  Coding DNA Sequence Number=SeqID_12596
MGQKPSYLLLLVGLLAIAMLCAGPGHALRQLNDANGGGLELSLGSKAATAGAKTEPLDPSLSDDYEVCAVMGYGDGCFVAGGGRMAMALRWGCALLSGAGCGSCRRARGWVAGALWTLMF

SEQ ID NO: 55972 - protein, 161 aa, Zea mays
  Coding DNA Sequence Number=SeqID_12597
MERRVASSPSPQHLPSEGPVRLSHLVPKTSLDGGDAALARSGPAGVFETAHRRRRYVAMSSSSSAASASLAGPSTEDTLSDLAAMELQSGHTVEFGTSRISSVRVQEMQQLGYFGDGVGRVLDAEEIPEPEGELVVFEEFFIAGLRLPAHLKGKCALGPFL

SEQ ID NO: 55973 - protein, 34 aa, Zea mays
  Coding DNA Sequence Number=SeqID_12598
MGKPVPSLLMLLLSRGTSFMTFVLNSLYPKGNND

SEQ ID NO: 55974 - protein, 206 aa, Zea mays
  Coding DNA Sequence Number=SeqID_12599
  Gene Ontology: Cellular component=integral to membrane; Biological process=molting cycle, collagen and cuticulin-based cuticle
  Homolog annotation: Hit_ID=Q6Z750; Match level="QueryCoverage=52%, HitCoverage=20%, E-value=1e-53, Identity=97%"; Hit description =Ankyrin-like protein
  Pfam annotation: Domain name=Ank; Domain location=116-149; Score =18.3; E_value=0.03; Accession=PF00023.21; Description=Ankyrin repeat
  Pfam annotation: Domain name=Ank; Domain location=150-180; Score =29.6; E_value=1.2e-05; Accession=PF00023.21; Description=Ankyrin repeat
  Pfam module annotation: Pfam domain module=Ank::Ank; Domain location =116-149::150-180
  Subcellular localization annotation: CTP_CleavageSite=49; ConfidenceScore=5.27e-01
MAAPPPSPPSPPGYPDSMAAAAPAISLVADLAPAPATAPPSALLLQALSLSHGTRPICNTVDPRRVIELKRLFAVCVDDAILISRGCDLYIVKDHLDVVNAILDTDDSCIRIVRKNGKTSLHTAARIGYHRIVKALIERDPGIVPIKDRKGQTALHMAVKGKNTDVVEELLMADVSILNVRDKKGNTALHIATRKWRPQGSGITGA

SEQ ID NO: 55975 - protein, 154 aa, Zea mays
  Coding DNA Sequence Number=SeqID_12600
MLVDYTTILDRPGVSVEGPTQQDIESVVEVTPASSVTSDGSSDPPLRLRLLRALRAVARTATGVVVVSVSVRGESLAEVQGKAASQTPPPVEARGKSPTTPTPAPAPSIGAPAPRVGDDAVSPGGWTDLTSCDAVDAPPDEKAKRGSQTYVQCT

SEQ ID NO: 55976 - protein, 90 aa, Zea mays
  Coding DNA Sequence Number=SeqID_12601
  Gene Ontology: Mol. function=kinase activity; Cellular component =ornithine carbamoyltransferase complex; Biological process=amino acid metabolic process
  Homolog annotation: Hit_ID=Q6QP54; Match level="QueryCoverage=71%, HitCoverage=22%, E-value=3e-15, Identity=65%"; Hit description =Putative kinase
MAPPVDVAGLRPRLDDAEAPPKPRSNLSSWAEAESEPLGRARRRSSAEARAESEPWGRAKRSGTVLLSGRSVERRSDGGHFGSAGGRASG

SEQ ID NO: 55977 - protein, 91 aa, Zea mays
  Coding DNA Sequence Number=SeqID_12602
MNKNTGIQGAITNGTLVPSPRDVSAAGLEGDFHHQKLEEEVARRPAQEVEPRLASPPAPARMTDTLDAEGGIEITARLASPRPGAGGHRLG

SEQ ID NO: 55978 - protein, 142 aa, Zea mays
  Coding DNA Sequence Number=SeqID_12603
MAGVPPCAVQLTARSPGEAAAAQGAGTGRRCEVAATRTRALAGGDPDAGTGRRCENSAAMRMHGSLRGSRARRGQRRPRRAVLLPGVEQKACFGHDRAPPRLRQGARVHGGLQPGTHAGSLAVNGGWLPGGGSGVFPGGDGG

SEQ ID NO: 55979 - protein, 280 aa, Zea mays
  Coding DNA Sequence Number=SeqID_12604
  Gene Ontology: Mol. function=transferase activity, transferring glycosyl groups; Biological process=biosynthetic process
  Homolog annotation: Hit_ID=Q6EZE3; Match level="QueryCoverage=100%, HitCoverage=67%, E-value=1e-105, Identity=67%"; Hit description =Sucrose-phosphate synthase 7
MSDLTGFVLSTSLTIAELQSVIVRTGMLPTDFDAFICNSGSDIYYPSQSSDVPSNSRVTFASDHNYRSHIEYRWGGEGLRKYLVKWASSVVERRGRTEKQVIFEDSEHSSTYCLAFKVINPSHLPPLKELQKLMRIQSLRCHALYNHGATRGSVLLIMVFEKHFMYLFPYAPCRKQVCQPTKKIFYYRYLSICWGIELPDAVVIVGETGDSDYEELFGGLHKTVILKGGFNTPANRIHTVRRYPLQDVVALDSSNIIAIEGFSTGDIRSAMQQKLGIPTR

SEQ ID NO: 55980 - protein, 124 aa, Zea mays
  Coding DNA Sequence Number=SeqID_12605
  Homolog annotation: Hit_ID=Q9ZQE9; Match level="QueryCoverage=25%, HitCoverage=2%, E-value=5e-07, Identity=78%"; Hit description =Putative retroelement pol polyprotein
  Pfam annotation: Domain name=RVT_2; Domain location=1-67; Score= -192.7; E_value=0.063; Accession=PF07727.5; Description=Reverse transcriptase (RNA-dependent DNA pol
MDVKSAFLNGELEEEVYVHQPPGFAVKGGSDKQQPKGMKASGMKLRRTFLLTLLLVLSTAVTPILSLPADNVVACDCDKPKAPKPSQPRPPKTKPSHPSPKPENPKPPKGPACWNSLALKHSRT

SEQ ID NO: 55981 - protein, 468 aa, Zea mays
  Coding DNA Sequence Number=SeqID_12606
  Gene Ontology: Mol. function=hydrolase activity, hydrolyzing N -glycosyl compounds; Biological process=nucleotide-excision repair
  Homolog annotation: Hit_ID=A3BE06; Match level="QueryCoverage=76%, HitCoverage=96%, E-value=1e-127, Identity=65%"; Hit description =Putative uncharacterized protein
  Pfam annotation: Domain name=Fapy_DNA_glyco; Domain location=2-115; Score=98.8; E_value=1.7e-26; Accession=PF01149.15; Description =Formamidopyrimidine-DNA glycosylase
  Pfam annotation: Domain name=H2TH; Domain location=129-221; Score =132.8; E_value=9.9e-37; Accession=PF06831.5; Description =Formamidopyrimidine-DNA glycosylase H
  Pfam module annotation: Pfam domain module=Fapy_DNA_glyco::H2TH; Domain location=2-115::129-221
MPELPEVEAARRALQAHCVGRRIARCAVADDAKVVVAAAGRAAFERAMVGRTIVAARRRGKNLWLQLDAPPFPSFQFGMAGAIYIKGIPVTNYKRQLDDGLEFSFTDKRRFARVRLFEDPETLPPISELGPDALFEPMSVDSFLDSLGRKKIGIKALLLDQSFISGIGNWIADEVLYQSRIHPLQIASNLPRESCEALHQSIEEVVKYAVEVDADMDRFPKEWLFHHRWGKKPGKVDGKKIEFITAGGRTTAYVPQLQKLVGTQSSKTISVAENGDAKDSGTEGEDADADVLKPRKRAATSRGQRNKDTAGSRKARGNGADAEAAEPATGVVGSNSEQAFGQANSDAVDKSDRATRRSSRKVKARKQQQLQYRQQSRVAWQQSAGAHGRLQLHQPLQHRAALVHHAVAEADVHQPAQQVTGRWYDDRRARDRWAYDRRVGGALRRWVSRRRSSVVAKHELNRLAASCA

SEQ ID NO: 55982 - protein, 463 aa, Zea mays
  Coding DNA Sequence Number=SeqID_12607
MPSSSSSAATTSTAEMPSEDLSGGVAAAELRLGDTVEFGVSRMSSGRVQDMQRLGYFGGGVGRVPGAEEIPKPEGELVVFEAFFIAGLRLPAHRFVSEVLQKFEVQKRRAVVRLPEARLKRAWGSAKAAVPGGSQPSLATKPVAPGSGKLPESTKAAGAGGTKSAPEGAAKVREQPSPGKRVVDFGTNISMDDYLVGSGEGQLVAVSPAVATTASTTVFGVKGGAFSAGGEVSAATAVKDEAGTVSHRLRKASLQLTQQLNQAADFADRVASGALSADMAAEVKRLRAQHADAVQEKSAAESKSRRLAEKVAALEGERTDLRRQLVEERREANQAITKAQTALAEAKLARAEESLASQRAEEWEARFNALQARMERVEASTRAEVERTCKQLVDSYHELGAQTADFKVPDREAGLRFLEWLQVELLALPTIVEGFMSFASLVTCEGAMNALSREGCSHYEGFD

SEQ ID NO: 55983 - protein, 55 aa, Zea mays
  Coding DNA Sequence Number=SeqID_12608
MPLNIDIALFKLDIDELIADYAKLKIILAVEPLIPSEGPRIGENIFGYTESNVAG

SEQ ID NO: 55984 - protein, 116 aa, Zea mays
  Coding DNA Sequence Number=SeqID_12609
MQAACNCTTGTHPFNFDASSMEAQAHASCNRRAGYYVRKFASPLTPMPHLFDCGTGAATRGNTAHGPTVATKHIGHRDRERGYSERDPSPQRKQAPSPPTDQGFEGWPLGRVRQPP

SEQ ID NO: 55985 - protein, 147 aa, Zea mays
  Coding DNA Sequence Number=SeqID_12610
  Gene Ontology: Mol. function=hydrolase activity; Cellular component =chloroplast; Biological process=isoprenoid biosynthetic process
  Homolog annotation: Hit_ID=A2YZT7; Match level="QueryCoverage=72%, HitCoverage=26%, E-value=5e-44, Identity=80%"; Hit description =Putative uncharacterized protein
MLVWDIRLQHQSIDQIPDKQIFCNDRPYGMSCKENIIKECEEEAGITRSISTNATSVGAVSYMDIEGFRYKRDVLFCYDLQLPADFVPNNEDGEVDSFRLVPVIHAANIIRRTDFFKPNCNLVIIDFLFRHGYYMHIALRVHQVLSK

SEQ ID NO: 55986 - protein, 168 aa, Zea mays
  Coding DNA Sequence Number=SeqID_12611
MAKKREKGLKMLSADDGDDFSFIVAISAFRVDISVVIDCSAPMTSLMVGSSIGRGCVEEAVEVGGDGGSLFGWPSTSVGLLIAWQTGAYPTSQPALSATCDQVEESINHILSACVLSREEWVCLLRELELNVLPPRSSSRFCSWWRKATVSIEKGLRKGFDSLVILVT

SEQ ID NO: 55987 - protein, 134 aa, Zea mays
  Coding DNA Sequence Number=SeqID_12612
  Gene Ontology: Mol. function=manganese ion binding; Cellular component=chloroplast
  Homolog annotation: Hit_ID=A2YZT7; Match level="QueryCoverage=94%, HitCoverage=31%, E-value=1e-55, Identity=78%"; Hit description =Putative uncharacterized protein
MGNSDKKGQFVKFSVEDQVVGYIHKGFIEHIRDFHDVFTIVMDDNGSNTVEHVSLQSSLRTPEDRTHAIGSVIKSLGELIPGIRNEAYGVHMNGYVEKDGQKFLWIGKRSDVKQTYPGMLDHLVAGGLVCIFIL

SEQ ID NO: 55988 - protein, 128 aa, Zea mays
  Coding DNA Sequence Number=SeqID_12613
MALLDPPECFQPEVALDLVRNLLGWGVPAFAEKIHVGASLHGDLTAGEFVLFVSNLPSGLALPISSFFVSLLEELGLQPQHFMPCFILQVAIIAYLCKVFVGATLLPASSSSIQREGCSPALSRWTAG

SEQ ID NO: 55989 - protein, 125 aa, Zea mays
  Coding DNA Sequence Number=SeqID_12614
MVVVVGAEARKLVNGLPKQQKLQVDFPHILPGCTHPFSEAASPESGELPGEVLGRRLWPKTLDHGLNDDFIEHYGRLCSQTQEPSDIRLKVFVMVLCALEQGLSYDWLRLKALKTGNQHVLELLP

SEQ ID NO: 55990 - protein, 17 aa, Zea mays
  Coding DNA Sequence Number=SeqID_12615
MAERSAKRGDSRISFRI

SEQ ID NO: 55991 - protein, 42 aa, Zea mays
  Coding DNA Sequence Number=SeqID_12616
MAHRHGGVCSAVRGCPVGAENVRRRILKGRTRLDRAYPFATS

SEQ ID NO: 55992 - protein, 96 aa, Zea mays
  Coding DNA Sequence Number=SeqID_12617
MTKPLIAPADRTNDAGPPSQEPAFIYPSGELEDESDIPPVGHYTTDRAEPKAAEARVGVADMMTPGTIGALTSSAKIGGGGATTRTRRLEPRQAKT

SEQ ID NO: 55993 - protein, 313 aa, Zea mays
  Coding DNA Sequence Number=SeqID_12618
  Homolog annotation: Hit_ID=Q10M62; Match level="QueryCoverage=31%, HitCoverage=11%, E-value=3e-17, Identity=52%"; Hit description =Expressed protein
MSFSARVPRSRSVEIFSMVREGQVGGLAPHGGMDVEPVLEECLHPGLSHTGLPIWYIKIGSLVNPGSATVDKDNDDEERGRHTSKMTKEEEDEEYHEEEEDALAGAGGNTFSFTTFMLLTPLILVRGRLDSDGEVTSEVDQVRALQEEVVIQVQLHQGQEFIDKNAVTISSVSNKGETAARKEPTFSESSPVISELVLVSAHNNEIMREVAKGENSSVQEVLVTDVSQDLEKQLKEEAMLNKVLKETVLSKVVAIDKLQSGLASSLRIQDVMRNEIQRVQDELSCITHKAKQLELQPKFDAGVRHGVKMAAIL

SEQ ID NO: 55994 - protein, 97 aa, Zea mays
  Coding DNA Sequence Number=SeqID_12619
MPFAGPISPPVSRATLFFPWVLFTLGEALRVRGREDCNLADREYVLVPEQGAAQEVALDTTPEPAPEDLPATALEGKPRWLVDMDPWGCMVYEVKVE

SEQ ID NO: 55995 - protein, 136 aa, Zea mays
  Coding DNA Sequence Number=SeqID_12620
PVVKDSAGALFDRMWDPHGWEAVRERSDRARDQMARAEDVEDFGHLNSAQPEAEVNPVVAEAEAETERRALRNWLVASHCTNGGGSPEGSDGAGSGGSYGGDWVFTAEASPRVTDAEVLPGLSAGRRRQRAVAKRR

SEQ ID NO: 55996 - protein, 160 aa, Zea mays
  Coding DNA Sequence Number=SeqID_12621
  Homolog annotation: Hit_ID=A2X6T6; Match level="QueryCoverage=40%, HitCoverage=6%, E-value=2e-08, Identity=47%"; Hit description =Putative uncharacterized protein
  Subcellular localization annotation: CTP_CleavageSite=73; ConfidenceScore=5.31e-01
MYHSCILISGVDNLESCTVVKNGLPFTNFGGTSSFLYRSTRIVVTRTILPAPFTGAARCLPFKFGRVFINFVRRTESPNPPPGQDRAGKHEADRSALPNAVRQRRHGCDVIMLKDPKKRLCPVIHHCPLFVGSTEGGKHLVTSNDLRAGDVCELVKGPDD

SEQ ID NO: 55997 - protein, 95 aa, Zea mays
  Coding DNA Sequence Number=SeqID_12622
MAMNKSKMGDKNKSYNIGLGSKDSSGKKKWNLNFDLIERKKTELVDGGASGSGTVTAALGLGDAALGLGDGERSGSVKGTAALGLGEGDGGARAR

SEQ ID NO: 55998 - protein, 113 aa, Zea mays
  Coding DNA Sequence Number=SeqID_12623
MARARAYKAPRDFDRTPPHALDLTGAQTHRRLPVHGVFAAARSPCHRRPANKTLPNPVRPSEKTEHTSVKLPERGIGVCFAGEASPRSPDSTRPPASVDRPLRHPVKLTVPLD

SEQ ID NO: 55999 - protein, 286 aa, Zea mays
  Coding DNA Sequence Number=SeqID_12624
  Gene Ontology: Mol. function=diacylglycerol kinase activity; Biological process=activation of protein kinase C
  Homolog annotation: Hit_ID=A7QYH0; Match level="QueryCoverage=14%, HitCoverage=8%, E-value=5e-12, Identity=80%"; Hit description =Chromosome undetermined scaffold_247, whole genome shotgun sequence
  Subcellular localization annotation: CTP_CleavageSite=27; ConfidenceScore=5.47e-01
MMRSPSRFSPSRFSPQSSLPLLRLNLRGNRLSGPTVPPPFSHEAEQGRAAQIETPSRPSGALHLHLGHPPARVEDELLPCLCQLCAPSFAACLPRPQGGCVGVASDKAKAPSTGASPSSPCRASTGAPSASEGCQWSPAKGGLGNSNKSATWDHFSRLFTQYNVQQGKARFFSVLMLTWGLVADVDIESEKYRWMGSARLDFIATIQDADRTNLQKNGSPVSGRKNRVKLAMDRAPLKERLQKGNMQVKDSDGNHEISPAEKHKGNLIKRIQVVMEIIFVLCLYHG

SEQ ID NO: 56000 - protein, 242 aa, Zea mays
  Coding DNA Sequence Number=SeqID_12625
  Gene Ontology: Mol. function=3-deoxy-7-phosphoheptulonate synthase activity; Cellular component=chloroplast; Biological process =aromatic amino acid family biosynthetic process
  Homolog annotation: Hit_ID=Q75W16; Match level="QueryCoverage=27%, HitCoverage=12%, E-value=2e-27, Identity=94%"; Hit description =Phospho-2-dehydro-3-deoxyheptonate aldolase 2, chloroplast precursor
  Pfam annotation: Domain name=LRR_1; Domain location=111-132; Score =10.7; E_value=3.2; Accession=PF00560.24; Description=Leucine Rich Repeat
  Pfam annotation: Domain name=LRR_1; Domain location=87-109; Score =8.7; E_value=7.6; Accession=PF00560.24; Description=Leucine Rich Repeat
  Pfam module annotation: Pfam domain module=LRR_1::LRR_1; Domain location=111-132::87-109
MLWVGERTRQLDGAHVEFLCGVANPLGIKVSDKMNPSDLVKLIEILNPSNKPGRITIITWMEAENMRYSDLSNNNLNGDLPYQLPPNVVELNLGKNHLSGQLTDMFSQLPKLSTLNVESNQFSGHIDVLAKLPLEDLRPQPVVHGSATILPTAAARQRFPRIPPARGAPFHPRIKQSRLPSMALLSILDRGFLATALRLSRPFRITAPRPLSRFLFSQDPIPDVSRSAAVDPFPKAFYSPDP

SEQ ID NO: 56001 - protein, 98 aa, Zea mays
  Coding DNA Sequence Number=SeqID_12626
  Subcellular localization annotation: CTP_CleavageSite=28; ConfidenceScore=5.10e-01
MDFDRTPPHALDLTGAQTRLRLPVHGMSAAARSPCHRRPANGTLPNPVRPSEKTEHTSVKLPKRGIGVCFAGEASPRSPDSTRPPPLCHPVKLTVPLD

SEQ ID NO: 56002 - protein, 549 aa, Zea mays
  Coding DNA Sequence Number=SeqID_12627
MAASPGDSVPVASLSPTLESVLGREEGGSGATHWRGYGVWPLAHGWALGEVCPREMPSLGGRKVRSPLFALDVRGRDPAAVVREAEDGAVRIVGRYVPKTEAQRSWDIHGSNDRLNRVFELNCLPYGGYPGEDVVDRRGKKPAAVTEDDPAPEAAPATKKRKLVDGDMSDPRGKDVFARAPGVFGADAGGYRGRWPKNVPIPHAAGEDFFTSRIARDLRVFPYGRNIAAVVSAVMNKDRQDAAQNRRAVIRLPDARPKRARGTAKATVPGGSQPTLVAKPAAPGSSKVPESAKAVGAGGTKSAPDGAAKVRELPSPGKRVADFGTNISVDDYLVGKHFFDSAGGEISAATAVKDKAGTVSRRLREASQQLAQQLSQAADFADHVALGALTADVAAEVERLRAQHADAVREKSAAESKSHGLAEKVVALEGERTDLRRQLVEERREANQAIAKAQAAQAEAKLARAEGSLASQRAEEWEVRFNALQARMERAEASTRSEVERTRKQLVDSYCELGAQTADFKVPDREAGLRFLEWLQEELLALPTIVEGF

SEQ ID NO: 56003 - protein, 143 aa, Zea mays
  Coding DNA Sequence Number=SeqID_12628
MGKSKKGGSSSHHSGDKRKREPTPPSEDFGDSEYSEEEFSSESEGSPAPASPPVSSDDSDDSQGIAAEVWTYIRAIERAGLEGSYESEYSSDEEDSSDSSEEGSSGDSDDDGGDGDGGSGSGKGGDGSGKGGSDSKGSNKTSG

SEQ ID NO: 56004 - protein, 136 aa, Zea mays
  Coding DNA Sequence Number=SeqID_12629
  Subcellular localization annotation: CTP_CleavageSite=59; ConfidenceScore=5.01e-01
MPCLLLGLFLSPSTITPSGIPSFPEDTFLQSFSYLRDLVSRYGLRWVPLPGLVMSPDISASVPSFVGFPLRRFLSGRSRLVVGDGGDSTLPMKRTSGGVLRAEGPLAPILLERLLRKAFSSAGPRGDAESLLICYR

SEQ ID NO: 56005 - protein, 53 aa, Zea mays
  Coding DNA Sequence Number=SeqID_12630
MGTVDVCGDGVPLPVVCLGSLEEMVAGITWPSTLPPGWTVEWDPASAEEEHEE

SEQ ID NO: 56006 - protein, 121 aa, Zea mays
  Coding DNA Sequence Number=SeqID_12631
MAGVSGNRLADEDEEEPAERPLRPDLLLLPQAQVLRGAGITRRRDALESVQPAMQSNRKSLKKNLGKSKTRFVRAELRVWHVREEGVDVGRAGGDCGIRGGDCGGIRGGDCGARVGGSQWA

SEQ ID NO: 56007 - protein, 206 aa, Zea mays
  Coding DNA Sequence Number=SeqID_12632
  Gene Ontology: Mol. function=nucleotide binding; Cellular component =cytoplasm; Biological process=response to stress
  Homolog annotation: Hit_ID=A2XF47; Match level="QueryCoverage=35%, HitCoverage=17%, E-value=2e-29, Identity=86%"; Hit description =Putative uncharacterized protein
MAGWTDSSASLLLVMPAPQGPPEPELDRRLWDDISMLTDQIQCLTQELAAQRNDWHVDTLFPKQLGPVYLSAILEYLTAEREEEMAKGEVPAIGIDLGTMYSCVGVWQHNRVKIITNDQGNHTTPSYVAFTDTERLIGDAAKNQVAMNPTNTVFGSDGLTIRWMRADLWNSSNYVSGAFIRKAIDFIANNYKIVVEVELLLFLWEQ

SEQ ID NO: 56008 - protein, 133 aa, Zea mays
  Coding DNA Sequence Number=SeqID_12633
MAGAAQFHHSRPHSPIRSPLRDTGMKTNMIEQSYQRKFVAQARATLTAQSDHGGPDPGGGGGSGELNTHKEVEGGEEVAKMVQGRRGCDPAVARTCEAPGEVESGVETPERSDPPVIVRAQGACGRLPGPTSQ

SEQ ID NO: 56009 - protein, 83 aa, Zea mays
  Coding DNA Sequence Number=SeqID_12634
MAGAAQFHHSRPHSPIRSPLRDTGMKTNMIEQSYQRKFVAQARATLTAQSDHGGPDPSGGGGSGELNTHEEVEGGEEVAKMVQ

SEQ ID NO: 56010 - protein, 128 aa, Zea mays
  Coding DNA Sequence Number=SeqID_12635
MAVGRGILANGHLSMYHHKMVNTRRGGGIDLPPNRHTRRIFRQPQTQPVEMDPPPPPPPAGVDLLVAAQMRMMQQMADTMTDMRAQMQQERQEMRQEREDIRRELRQEREEIRQERRAQQQQLQQQMQ

SEQ ID NO: 56011 - protein, 152 aa, Zea mays
  Coding DNA Sequence Number=SeqID_12636
MTRLSCIKTQPSPDEDIPPNDTPIPTTQQGPMTRARARELNYQTTRIARFRTPISCVLDFSFGQGSRLFLAQQEQHKFEAPPIAPQIIYYITGLCLCNHLCCSCWLPTPPALLGTGSEDEDGGGLLTPRTKGIVQHFQRQVREYTFGIDNDL

SEQ ID NO: 56012 - protein, 96 aa, Zea mays
  Coding DNA Sequence Number=SeqID_12637
MEATTHFFSQWRSYCAVPRVDLVGAAHHVDGGSLVAAGFIPGPKSDHRNNDKPQSQRLDELQTKFIGKGISLTGGDHLLMTLVAPSHRRKTTWMQQ

SEQ ID NO: 56013 - protein, 123 aa, Zea mays
  Coding DNA Sequence Number=SeqID_12638
  Gene Ontology: Mol. function=dihydroorotate dehydrogenase activity; Cellular component=cytoplasm; Biological process='de novo' pyrimidine base biosynthetic process
  Homolog annotation: Hit_ID=A2X9D2; Match level="QueryCoverage=47%, HitCoverage=12%, E-value=1e-19, Identity=81%"; Hit description =Putative uncharacterized protein
MVHRTVRCTPDSPVPLPRHHCRWILAVGASDLWARLGVRCTPDRSWFRDRSYVGTQVSLDAEKVINVTPRYAKLRAEPNGAAMGRIIGWQNIELISDRPLETMLNEFKQLNTYRFNYGGVQQS

SEQ ID NO: 56014 - protein, 126 aa, Zea mays
  Coding DNA Sequence Number=SeqID_12639
MVVVAVEAEARKLVNGLPKQQKLQVDCPHILPGCTHPFSEAASPESGGVSGEVLSRRPWPKTFDHGLNDDFIGHHGCLCSQTQEPSDIRLKVLLMVLSALEQCLSSDWLLLKPLKNCDQHVLKLLP

SEQ ID NO: 56015 - protein, 115 aa, Zea mays
  Coding DNA Sequence Number=SeqID_12640
MADNIGYSKHELGLSVMSKDQLGDNLAYNSLKGGREIADEAIKKNEKESHDAQVTAKETDEAAKPSLSPPPEPFNPEADPVMKEALDMMEVANTFVDEVVNRLLNEAAERILKED

SEQ ID NO: 56016 - protein, 150 aa, Zea mays
  Coding DNA Sequence Number=SeqID_12641
MHVPVLGLGVSSPHKDNEIVQEKSMFDWNSMVLCGFWEEEGRRDVPCEMQMYSQLGLNEDDKDEGNRRDEELRGGTRGDCPWRIYAWEEKKGLPTIVLLDDFWPPEAEAVTKRPASRAAFPRSASNRSEPSTVLEKRPSVGFLRTLRFRR

SEQ ID NO: 56017 - protein, 264 aa, Zea mays
  Coding DNA Sequence Number=SeqID_12642
  Homolog annotation: Hit_ID=A7QES3; Match level="QueryCoverage=50%, HitCoverage=65%, E-value=2e-17, Identity=39%"; Hit description =Chromosome chr16 scaffold_86, whole genome shotgun sequence
MADGKGRENSAVALKTSPSVPMARGLRGGSNPLEEWSGRVKAIEAGFRAWMAKQPIHIEAAVSTAVGAVQGGALGGLMGSLTADGGSPFPIPQPPSNANSDAMASFKQAQLPVPLFEGDSMNVITDYSDLYRVNMTAAFGSGALFSIVSGMGTPNPVLNAITTGVAFAVFQGGFFMDPQVLIIIRRRICYATLGLELSDSLILSPDVCDWIWRWNWVLRSWMIESELEARGLEGGLELRRPDQLHKGVTEVVSIWQLTTSTETI

SEQ ID NO: 56018 - protein, 290 aa, Zea mays
  Coding DNA Sequence Number=SeqID_12643
  Homolog annotation: Hit_ID=A2XFR6; Match level="QueryCoverage=54%, HitCoverage=53%, E-value=4e-21, Identity=34%"; Hit description =Putative uncharacterized protein
MDKRGQQWFGGSSLVVEKILVDLPRIRVEHGVILEDSSEEFLPTPTPLAESLAFAAGSSASAPPAPAVQAPAFGGDDPDDSSDDDEDDDEEEEDEENINKERQDYYVGLWPITEHYTSMFETEHFPNLLQDVLHALGTYAQPLYETRRVYEPPRACYYITRIHVRVMDAGDRGFRTLSAHESLTPLSTYAASVSSAAKRTLWSLSHTYRQQLHNTKYMHLPLCHNTDLDSATLDLSRVHLELEDAHARIAALEAQLDGRNPPEVQVPAMTLSPPRKRIRYGEPEYITRLL

SEQ ID NO: 56019 - protein, 465 aa, Zea mays
  Coding DNA Sequence Number=SeqID_12644
  Pfam annotation: Domain name=Transposase_28; Domain location=185-347; Score=-43.8; E_value=0.002; Accession=PF04195.3; Description=Putative gypsy type transposon
MGSRPCGSIGTPPERGAEAYMDPAEGGPDPTQRGLGPVPGVRSVPMEVLDPARSPGAVRMVGLGVVRHATRDSRVDTAPSCCGKGYPCFRVPIVAPGPASGEDTSLQVGPKLDWRLVRRFRVFADVIIARPPSVTPTAMEYDSWARTLVPETGPFVSCGGDDEAHVVGGGSLFGHVRRDEGAYYRERRFAPRGGSPSRHSEARTPSRSPEGSAPGASLLGGLAAGESALFVSCLSYGLVLPISPFFLRLLEKLDLQHQSLMAHPILQAAIFAHLCEMSMGVALLPLAFGRKGAAQRPSRGGKRAELRRHLSLLPVILRLKGVAQRPFGGRKRAELWLHLSLLPELSCAFRSSLVSSSLNFTSTWWYASMNWSSSDSVSAARPPSVVCRRAPISLALMASTSHPTRRAPSPSCTRRGGRRRVQGERQVCAWHLQLKTPLGRSYKMPWRRRPRASSVTLLMSSSSYL

SEQ ID NO: 56020 - protein, 148 aa, Zea mays
  Coding DNA Sequence Number=SeqID_12645
  Subcellular localization annotation: CTP_CleavageSite=65; ConfidenceScore=5.27e-01
MDLDRFAGDGLFAALRHVPWHINLTAVTHLSSSGGRQGACHGNRPRITAPVTFFSRRRASLSNSPATAVGAYKLPTPPAPLSSCATSEATRASNHPLELPQFWDFPQITQEHRTVLAHHGQRTPGSFVLPALFFQYPYLPLILIDQLD

SEQ ID NO: 56021 - protein, 88 aa, Zea mays
  Coding DNA Sequence Number=SeqID_12646
  Subcellular localization annotation: CTP_CleavageSite=18; ConfidenceScore=5.27e-01
MKLWKETSRSPKTTTSSRCGLAATPSRLPVKAALSTFLFRTLIYWIGKRHSFSCGEADTYRSACFRHLEGSFPTGGEFAEPFSVQYLS

SEQ ID NO: 56022 - protein, 73 aa, Zea mays
  Coding DNA Sequence Number=SeqID_12647
MASAKVGGTGGGLGVASLPREVADVSSQLVYLLTILDPYFVPMTELCSKMLDLSFQISYRIIATTTTVFMPWS

SEQ ID NO: 56023 - protein, 119 aa, Zea mays
  Coding DNA Sequence Number=SeqID_12648
MERWHVMPTCTRNPIVKCKGPSSFEASYAFGHDGSRTKLQHAWLLHLRHSVPLIIYDFFVLRTFGREGDPNTCVDMWLTRTPAYPGSFGKAPAPASLAPDPDPREELILLLLLENQNHF

SEQ ID NO: 56024 - protein, 48 aa, Zea mays
  Coding DNA Sequence Number=SeqID_12649
MEEDEPAAHGGDFDYDEMEKEAPVAAGPSTVAAAGDGKEGFHWMMICI

SEQ ID NO: 56025 - protein, 73 aa, Zea mays
  Coding DNA Sequence Number=SeqID_12650
MANQMLPLWVPIYTPSALQLGGPHLSLTFSILAKGRNLQLRDEGAHGMKGAIWEKDEPVPKLRMEKLRLSGGK

SEQ ID NO: 56026 - protein, 161 aa, Zea mays
  Coding DNA Sequence Number=SeqID_12651
  Homolog annotation: Hit_ID=A2ZIJ2; Match level="QueryCoverage=51%, HitCoverage=13%, E-value=9e-37, Identity=84%"; Hit description =Putative uncharacterized protein
MVSRSRWCTGWREEALGVTEREGIFVVSHADGNLYVYDKCKDGNTDWTFPTVKDQSQVLISHAKSSKSNPIARWHICQGAINDISFSPDGAYLATVGRDGKFLYPRMRIDSFTQKMLAPSLLCQLLLEEPLEPLRRRCWRSHNATVGGAAAGATTGLSHSP

SEQ ID NO: 56027 - protein, 127 aa, Zea mays
  Coding DNA Sequence Number=SeqID_12652
MARVACTLRGKRLDSGVSMLLVRKADTELSSDSGAPTGLSEMARLRCTALNSMIPLLLSRLAEHPLRLTVIGQSSHLERLHRHLHEEQEHRHQEQEQQDSSPSPEQEVESKRQPSPVPQLEVPPTPP

SEQ ID NO: 56028 - protein, 43 aa, Zea mays
  Coding DNA Sequence Number=SeqID_12653
MATRWKGLDTRHKAGKRRSPASECTPDVSNICNVNAHDAMLKF

SEQ ID NO: 56029 - protein, 94 aa, Zea mays
  Coding DNA Sequence Number=SeqID_12654
MSDRFITLRVMTGEASSRGRNIPPRLRGSSRAILGLQLQGAEVPGASEEDLGISPGRFIAYSLKSGNNIKLQMYLRLERRRKYKRDAKANVKSA

SEQ ID NO: 56030 - protein, 114 aa, Zea mays
  Coding DNA Sequence Number=SeqID_12655
MVTAGFWVGKSKPGCDLGPTLSFKDVHHPRWGGSHAEPALYLPRGSAGRPFPRRLGVEALAGPADGADLDNVGLIDGGRRHLQRVGVVGRASGGPSCRGVTAALCAREDVTPGF

SEQ ID NO: 56031 - protein, 172 aa, Zea mays
  Coding DNA Sequence Number=SeqID_12656
MVTAGFWVGKSKPGCDLGPTLSFKDVHHPRWGGSHAEPVLYLPRGSAGRPFPRRLGVEALAGPADGADLDNVGLNDGGRRYLQRVGVVGRASGGPSCRRVTAASGRRPTRLGGFEWGSAGGLVSPAIGADAEAAREVLVTDGITATTHAPGHRGSVLVLAPRASAGARARSQ

SEQ ID NO: 56032 - protein, 90 aa, Zea mays
  Coding DNA Sequence Number=SeqID_12657
  Gene Ontology: Mol. function=hydrolase activity
  Homolog annotation: Hit_ID=Q10SN5; Match level="QueryCoverage=55%, HitCoverage=13%, E-value=3e-15, Identity=80%"; Hit description =Hydrolase, alpha/beta fold family protein, expressed
MRNESIISEIQAQLKHKNVTVDVKANSDPHLAMIFLVALKSELAAEVYAKQKVDDQWALRVSHHTSDILHCWMEQSWLPTSTVVQAGTTP

SEQ ID NO: 56033 - protein, 189 aa, Zea mays
  Coding DNA Sequence Number=SeqID_12658
  Gene Ontology: Mol. function=helicase activity; Biological process =protein amino acid phosphorylation
  Homolog annotation: Hit_ID=Q1EPC6; Match level="QueryCoverage=99%, HitCoverage=25%, E-value=4e-30, Identity=54%"; Hit description=DNA helicase homolog, putative
MPGGRTAHSRFKIPLTIDDGADEASMTKRQCVEALDNSMRDIMGRPGLPFGGKTIVFGGDFRQVLPIVRKEFLLRIGGGTEVTNRDGDIRLPGEFKRKPFPIRISFAMTVNKAQGQTIPNVGVYLPESVFCHGQLYVALSRATARSNIKILVTPAVDGNKRSRKGVRKNPTVDCGTYTKNIVYKEVLTN

SEQ ID NO: 56034 - protein, 393 aa, Zea mays
  Coding DNA Sequence Number=SeqID_12659
MHQDSTLVAGTYFCLLFCCLSNPDICFLSEKGLLTLSIRLLFIYQGTVLVMDQMGYNADRTPFTNISNTIITGTDTNPQSYIVGNQNESNSLGPIVDAREHSFPDDCSTIDFKILSTQGIAGGDEQVNVDLDDDSDWLHRNETFQVNNIVASNDLLTIGCVHESVDNTPNHTMKRAAYFSERYKNLTPIERESRREHLRLYNKTPKRKDAKTEYGRKRRALQSDTLHQESIAMEDPTYTPEVGRHRTDATQPYGSSVTTCDWVIPEFVGIPFLSTSIQIEDVGSLTISTEPLSRKHHVLSGARPAILGSRNQQFEAAISRNVATVTEDTISDAVEGDDWTQPHTTTEIHNNGDDDEGVIFEEDDDDNDGYLFAGQYDETDEDIKIDGTQERIY

SEQ ID NO: 56035 - protein, 157 aa, Zea mays
  Coding DNA Sequence Number=SeqID_12660
  Subcellular localization annotation: CTP_CleavageSite=45; ConfidenceScore=5.22e-01
MLVGWPPRKAPFGGGPRRYGLSWGKPPRSTPPPVGATIVLGEAVDAAAASSPPASSQAPTSIPAGAAAGAPTEPPAAADVEMAKVPPPPAPSVLVIPDSPVFDHEEGASVVAGVGERRPVALTEEGPDASAAKGPDDSVAGRADPWLVVGSSGLIHT

SEQ ID NO: 56036 - protein, 152 aa, Zea mays
  Coding DNA Sequence Number=SeqID_12661
  Homolog annotation: Hit_ID=A2ZAL6; Match level="QueryCoverage=34%, HitCoverage=42%, E-value=1e-20, Identity=81%"; Hit description =Putative uncharacterized protein
  Pfam annotation: Domain name=NDUFA12; Domain location=79-147; Score= -10.3; E_value=0.0023; Accession=PF05071.7; Description=NADH ubiquinone oxidoreductase subunit
MAEARAPLPRYPRTFPRPVGSIGNGIPPEGGPEPSDPINGPGPANHLQILLERASGSLADPYRTGLGRPLGLPVSNSLKTLSSEPSEDHLPTTGVRLTTLLNQKTARYLVAHKQNYSGEGEELIYHSKGHALNPGQRDWTRYQPWEPKKEQA

SEQ ID NO: 56037 - protein, 190 aa, Zea mays
  Coding DNA Sequence Number=SeqID_12662
MGAVTWPEKTISSKVSMVGPDSHGKVPDPTISGPDLRAGVRTTLSRVPGFWDKEYPGLTQGEAGVRSRHVSGPYHVHFCSPLRRRPDAATWPTTHDPGLEVAVELVLADIASSQNDSRFLAALSLEKKTFEGGFDRETAQVPLRKCMAVSFLANEVSDLCIGKPAVRSLQWRRRLWQWGMETRSKGGGTP

SEQ ID NO: 56038 - protein, 90 aa, Zea mays
  Coding DNA Sequence Number=SeqID_12663
  Homolog annotation: Hit_ID=A2ZAL6; Match level="QueryCoverage=61%, HitCoverage=44%, E-value=4e-21, Identity=80%"; Hit description =Putative uncharacterized protein
  Pfam annotation: Domain name=NDUFA12; Domain location=7-85; Score= -1.7; E_value=0.00033; Accession=PF05071.7; Description=NADH ubiquinone oxidoreductase subunit
MTSTVLSSLRRQRNVSRTWGCTASHAFIGLKHFSTGHLLNQKTARYLVAHKQNYSGEGEELIYHSKGHALNPGQRDWTRYQPWEPKKEQA

SEQ ID NO: 56039 - protein, 107 aa, Zea mays
  Coding DNA Sequence Number=SeqID_12664
MDEQSANHKLRNRKKKRREDLAVYSQGAVSVSGTGLSGGAPDSVRCAWPPRPKRPLSGFSPATSAKIHRTVPGERLQVVEIPRKREKIKGKKNTVVFKLIIGSLERS

SEQ ID NO: 56040 - protein, 95 aa, Zea mays
  Coding DNA Sequence Number=SeqID_12665
MGKSKKGGSSSHHSGDKRKREPDSSLEGLRRFRVLGGGLSPFESKGSPVHASPPALSDDSDDSQGSLQRSGPTSGLSSVPGSRARMSRRGKKTNS

SEQ ID NO: 56041 - protein, 95 aa, Zea mays
  Coding DNA Sequence Number=SeqID_12666
MGVDWEHTYYHAGSLLNCFSLQVVQSSMIVTWLRAVACSRLRHILLCRGIGEDEVSADSASETDLLTDCSDGSDIGAEDTAFGTADAAEVDAGSA

SEQ ID NO: 56042 - protein, 278 aa, Zea mays
  Coding DNA Sequence Number=SeqID_12667
  Gene Ontology: Mol. function=sequence-specific DNA binding; Cellular component=nucleus; Biological process=regulation of transcription, DNA-dependent
  Homolog annotation: Hit_ID=A7Q4V5; Match level="QueryCoverage=38%, HitCoverage=24%, E-value=4e-42, Identity=77%"; Hit description =Chromosome chr10 scaffold_50, whole genome shotgun sequence
  Pfam annotation: Domain name=WRKY; Domain location=46-106; Score =135.4; E_value=1.6e-37; Accession=PF03106.6; Description=WRKY DNA -binding domain
  Subcellular localization annotation: CTP_CleavageSite=28; ConfidenceScore=5.03e-01
MAPHRPHSSAVKRRKSQTKKVVCIPAPVAAPPGVGGRPSTSGEVVPSDLWAWRKYGQKPIKGSPYPRGYYRCSSSKACSARKQVERSRTDPSMLVVTYTSDHNHPWPTQRNALAGSTRPASSSSSSARGHHGHNHRHHPSAAAVPDTAPAAHRHASNVAVADNATTPGSIISASVHRQLLKQEVVDMDNSKPAEDAAADHDLGFGMFADMDGALDVLCAPDFHPKKQQQQATAQQLEKLPEEEGTQLLLGPDPFSFGFLDWVGASFGVGERAADDGGQ

SEQ ID NO: 56043 - protein, 61 aa, Zea mays
  Coding DNA Sequence Number=SeqID_12668
MAQTKAAFSTDDMKDPSAEATLMVGKFYNDVWVNGRVARSSVQDLLRLILPSFVFCNLLLL

SEQ ID NO: 56044 - protein, 66 aa, Zea mays
  Coding DNA Sequence Number=SeqID_12669
MGKGAREGAEVKANMIGAYRGVEVEERVGDERWQRDELQRGRGDAVRLDKRMEELREDRRSNNELK

SEQ ID NO: 56045 - protein, 330 aa, Zea mays
  Coding DNA Sequence Number=SeqID_12670
  Gene Ontology: Mol. function=potassium channel activity; Cellular component=integral to membrane; Biological process=potassium ion transport
  Homolog annotation: Hit_ID=A7QQK6; Match level="QueryCoverage=88%, HitCoverage=93%, E-value=1e-100, Identity=63%"; Hit description =Chromosome undetermined scaffold_143, whole genome shotgun sequence
  Pfam annotation: Domain name=Ion_trans_2; Domain location=162-236; Score=50.9; E_value=4.6e-12; Accession=PF07885.7; Description=Ion channel
  Pfam annotation: Domain name=Ion_trans_2; Domain location=34-118; Score=63.3; E_value=8.2e-16; Accession=PF07885.7; Description=Ion channel
  Pfam module annotation: Pfam domain module=Ion_trans_2::Ion_trans_2; Domain location=162-236::34-118
MAPLSAVTLAAAAAAGDQAPAPPERPSIVLHTFLFLLAYLALGVTFYAAAPANFSSSAGPTHPVADALYFCIVTLCTIGYGDITPATPAAKLFSISFVLIGFGFVDILLSGMVSYVLDLQEHLLITALKNPTSARKHRHNYIFDVKKGRMRIRMKVALALGVVAVCVGVGAAVLRRVESLGWLDAVYLAVMSVTTVGYGDQAFRTLAGRLFASAWLLVSTLAVARAFLYLAEMRIDKRHRAMANWVLSRDMTVSEFLAADIDNNGYVTKSEFVVYKLKEMGKITEKDIMMICDQFQRLDTGSCGKITLSDLLESHHLVSEPRDKKKGKKS

SEQ ID NO: 56046 - protein, 161 aa, Zea mays
  Coding DNA Sequence Number=SeqID_12671
MERLTSTRSRADQAKTSLLWERGKEFFLVSRCQVFADYYCLPRRRRVEGYCLRPIVSLELGLDFSVFDWANALKAFALYREAVYVSLPWDKVSFDVARCLLVAVDSDHTLWAWDFHTEVEPMNGCLKFVDRATPHYVIVWVDHIDDVECDLLTLRVGCYTK

SEQ ID NO: 56047 - protein, 129 aa, Zea mays
  Coding DNA Sequence Number=SeqID_12672
MSSLSASLETPISHGILIFPRKISSFSLGKMRILWEIGVSKLALKDVTQSELVRSNPRVMKAGEHREDKEGECFVRFGHGGGLTPSGITVKKKEIGPPETSNCITFESQRIGDALGGIRAVRLAAGRNP

SEQ ID NO: 56048 - protein, 188 aa, Zea mays
  Coding DNA Sequence Number=SeqID_12673
  Homolog annotation: Hit_ID=Q9LYM9; Match level="QueryCoverage=23%, HitCoverage=10%, E-value=7e-12, Identity=71%"; Hit description =Putative uncharacterized protein F18O21_80
MRSSTTTNSVVEVAAFELGGISAPLGSHSRLVGSYGIGEVVGLGGGRPVPVLRRRLGTTRGIVGGGDVGQYQLYDDRQARLKPDTAGMAFPALQTEKAPAALGPNSEAIKANNLVLVSRVLGLNPETRKFTYGVSTLLRSNYLLAYKDVTTKVVYDKNYPRIQTVVNIVGTITNEFRFPKFEILTGKW

SEQ ID NO: 56049 - protein, 112 aa, Zea mays
  Coding DNA Sequence Number=SeqID_12674
MARCMGVAIPWQMGIMTCGYMVQPLQSVKLCLLMEIRLVLKLSLGHYFVALNVAAAESLPQPEVREVSAPLAGAMAEERCWRKVESKHNVGVISRSGRRRRMGMERSRLRLD

SEQ ID NO: 56050 - protein, 491 aa, Zea mays
  Coding DNA Sequence Number=SeqID_12675
  Homolog annotation: Hit_ID=A2Y9N4; Match level="QueryCoverage=43%, HitCoverage=11%, E-value=1e-07, Identity=25%"; Hit description =Putative uncharacterized protein
  Pfam annotation: Domain name=zf-CCHC; Domain location=113-130; Score =11.6; E_value=0.027; Accession=PF00098.14; Description=Zinc knuckle
  Pfam annotation: Domain name=zf-CCHC; Domain location=132-149; Score =8.5; E_value=0.08; Accession=PF00098.14; Description=Zinc knuckle
  Pfam module annotation: Pfam domain module=zf-CCHC::zf-CCHC; Domain location=113-130::132-149
  Subcellular localization annotation: CTP_CleavageSite=28; ConfidenceScore=5.51e-01
MPVILLRPAATQPATPASPSSPLSAQFVAALPGGRSKAQRWCEQDFPSVASLCRSDLHRSYKEALVDGRSTTRGADVGDSGWVKVVGHRSHRRSPFPPLPSHLPRPVSANLRGKCFNCFSLSHRAAECGSLVRCFHCRLPRHRVHACPRQKKTLHHPARVLVWHPVPRKVVLEKVPLYDMEGGSRVGGKVHSLWTEALKDAPGGFGPTWSGLIFGIIILAFGGIQGCSTNVHRALIVNVLGQEGSDCAAVILEALASKYGLEADALQIRHDASISWWSRQASASGGGALLVLMDVELGGIPAHLWGTYTVEHLLGGHCIVQGLHPDSVDGTNMSVLKLKAWGFSMDCLPSRCDLHVEEPTSIGEDGSCFRRTLIYSVSVKVAISVALLVEEQPLFSSPEDDEDRDNKHQRQRQHLPNHQFSSVRTSVHARLGPRIAPSCGGGRPVDAAPLPNSSVDELQAPVPSLPCNPSSPAMGAPINANIGPLPASVGD

SEQ ID NO: 56051 - protein, 152 aa, Zea mays
  Coding DNA Sequence Number=SeqID_12676
MAGAGAALGVGDQRGELRGAAREARKELGERRAREKLGATTLWRRRSRARWRDEDQGAAGMKEEGSRVKLKEPGRSAPSSPQREFGCARVMARRRDDRGSFGLGCGPFALPQREPPLDSSDISPNNIIEPTMETLSAEDQKEFEEHKEQLIK

SEQ ID NO: 56052 - protein, 134 aa, Zea mays
  Coding DNA Sequence Number=SeqID_12677
MQGLLRWAGFETGEGIERRVASSPSPQQTSLTAKAKQAAPTVQSAEDSIVVPKVPTVGPAEAKDDAAEEPKLEKIVIMPEILSPPAKAELPKVQKAPAATPKRRRMASVLDAVMETTKALSPAPTKKVVEVVKV

SEQ ID NO: 56053 - protein, 223 aa, Zea mays
  Coding DNA Sequence Number=SeqID_12678
MRAEAERTRAQLMDTYRELGARTGDFEEELQKLPTVVGGFMSYASLVTCEGAMNALSREGCRHFEVFDQADEDFERDVYKVEDPVVKESAGALYDRMWGPHGREVVRERAETARAQAARGLRVDDFGALNSALPDPEPTPAEAVSGVALEPTPETAAIATVAPTSAAAGEDLPPKVAEGAPDAPAAAVLSAEDPAAEAAETTAEAAAEATAEAPAASGPSQVA

SEQ ID NO: 56054 - protein, 159 aa, Zea mays
  Coding DNA Sequence Number=SeqID_12679
MEGVMNVDEREWFDGQIPERGRRAGAVRLRVRPGRGVSSGSVAAQGIHVGVVRHRGRALARVARCVRSGLRAGARRCFWARLDRILDAGRWLARLEAHRRTRWAQGLTRPGRDGCSAGWSCARGWLVRPGRGKRGEGREWGDRKKKPGGGWHRKRKGAR

SEQ ID NO: 56055 - protein, 353 aa, Zea mays
  Coding DNA Sequence Number=SeqID_12680
  Subcellular localization annotation: CTP_CleavageSite=54; ConfidenceScore=5.27e-01
MEKDRQGAPRKRRAFARVGNSRREAKMVRASTKPTAPGARAGSGQLAVVPVPVVASPVVVPTVANGFSQDPWSKFCTGGEIALVAAAKDMAASVVQQLKHAEKEDLGRRLAGEREDAKKARVEAQAARVEASLALKRATDAESGQRSLCGYVDKTVASTRTGVERAHALLVDAYRQLGVGLRFLGWLQEELEFLSSIVTGLMSFDSLITYEGAANALSREGCRHFEVFDRATEDFDRGIFQVEDEVLKRSAGTLYDRMWGPHDRDTVRERFDRALEQMMNDEEVEDFGGLESSMTRAEDARTGTEEQSAPQADPCGDPAAAVVPAGGDPAAAAAPAGKDPTAVAAPFKVAASC

SEQ ID NO: 56056 - protein, 292 aa, Zea mays
  Coding DNA Sequence Number=SeqID_12681
  Homolog annotation: Hit_ID=Q7XBD1; Match level="QueryCoverage=35%, HitCoverage=26%, E-value=6e-08, Identity=32%"; Hit description =Putative retrotransposon protein
  Pfam annotation: Domain name=Transposase_28; Domain location=1-148; Score=-65.8; E_value=0.1; Accession=PF04195.3; Description=Putative gypsy type transposon
MELQPGHTVEFGTSRISSVRVLEMQRLGYFGNNVGQAPEVLRRFEVEVHQLTPNAVVALAKYVWAVTFDGGQPSVQVFTKNYCLHWQKRKIGNKIAQFGSCTFTLRTGKTSAEVVEIVPYARNKWGNWWDFWFYVAPGDIEDLPSLHSAILCSHCYMVFPRFEVVEEDEDEGDLRHAARLSSGRDLVEEFIVLNRVFELNRPPYAGYPGDDYGDVAICQGKKAMTTADEGPSSGTAPGTAAKRKLGTAAEGSRASDHFAVDLLETYAVLGETMSSPKLRESSARMLKVTRGR

SEQ ID NO: 56057 - protein, 259 aa, Zea mays
  Coding DNA Sequence Number=SeqID_12682
MPLAPPQGIPAAGGDPDGDGDDDDAGGSLSHGTELSEELEPEGWIARPITRDAARGCHFHDALDTLLCRAFDRHTWSIEYCCVVYQHRRGLYPNQWEATCLVRRPDDDLRGAEAFSEHYSITERDTAEAAMQDAARQALSQYCSLFSGVADGLDLKYYPRRSTGSAGSVIASPVGEGNPRLNNMVNLVAVLNTELDHALDELGKVRAEVAELRAECAARHYLDGGSPAPVRIQHPYRSPPCGRFDYGTPDCRTRIDLDP

SEQ ID NO: 56058 - protein, 101 aa, Zea mays
  Coding DNA Sequence Number=SeqID_12683
  Subcellular localization annotation: CTP_CleavageSite=32; ConfidenceScore=5.41e-01
MTPAHVPSSLLRALLVPRAHPLPHFTHPRPLSCSALVARHRRRPAPTFPTIQLAGDRAKPSRAPPRDNEQSEVPECVVGDLPEQQPGEGKCPLTYYVLHTL

SEQ ID NO: 56059 - protein, 185 aa, Zea mays
  Coding DNA Sequence Number=SeqID_12684
MDSVVFEVAELDGATMICHTNSKNESKEKRAQRREEQGHGKETLRRGRSRGRGRAQRKTATTGKGARRPGEMRAWERRTGARARELSRAPELEAEREYAAACHGRESTEQRELGAPWEESWSAGRGQKEGDEAEGAAQRPGELGETSAGRTMADRNNQAARRAQLPWEIRPAASRQGRKYPKRRR

SEQ ID NO: 56060 - protein, 123 aa, Zea mays
  Coding DNA Sequence Number=SeqID_12685
MRELAAPVVFVANGHAEQSWWACVDEDEEDDPPLVRRNRRSKASNDVPIQALSGLVNLEGMTMSAIDHALEEIIPEGLLLELPEAGGAGIHVEVPDDVHSASLLVGPEITRAVPMHLRPLRVV

SEQ ID NO: 56061 - protein, 80 aa, Zea mays
  Coding DNA Sequence Number=SeqID_12686
MYPSTYRTHLHPKSLTSKHEFRILPNPVLKHRELNPAVVSPTQNVKKKWKSLKKGHHHPRILKQATASTLIFVDPSQTHL

SEQ ID NO: 56062 - protein, 77 aa, Zea mays
  Coding DNA Sequence Number=SeqID_12687
MYPSTYRTHLHPKSLTSKHEFRILPNPVLKHRELNPAVVSPTQALAGARLGVSAVGDLPLRRIRTTGTSLQSVSDTV

SEQ ID NO: 56063 - protein, 31 aa, Zea mays
  Coding DNA Sequence Number=SeqID_12688
MAPKRKTANSSAAVIPAIDPNSQLPFAAAER

SEQ ID NO: 56064 - protein, 3666 aa, Zea mays
  Coding DNA Sequence Number=SeqID_12689
  Gene Ontology: Mol. function=ubiquitin-protein ligase activity; Cellular component=intracellular; Biological process=protein modification process
  Homolog annotation: Hit_ID=A3CGV1; Match level="QueryCoverage=96%, HitCoverage=93%, E-value=0.0, Identity=73%"; Hit description =Putative uncharacterized protein
  Pfam annotation: Domain name=DUF908; Domain location=76-391; Score =111.2; E_value=3.1e-30; Accession=PF06012.3; Description=Domain of Unknown Function (DUF908)
  Pfam annotation: Domain name=DUF913; Domain location=439-776; Score =149.8; E_value=7.5e-42; Accession=PF06025.3; Description=Domain of Unknown Function (DUF913)
  Pfam annotation: Domain name=HEAT; Domain location=100-135; Score =11.6; E_value=0.49; Accession=PF02985.13; Description=HEAT repeat
  Pfam annotation: Domain name=HEAT; Domain location=418-455; Score =7.0; E_value=2.5; Accession=PF02985.13; Description=HEAT repeat
  Pfam annotation: Domain name=HECT; Domain location=3235-3530; Score =500.7; E_value=1.8e-147; Accession=PF00632.16; Description=HECT -domain (ubiquitin-transferase)
  Pfam annotation: Domain name=UBA; Domain location=1267-1304; Score =41.0; E_value=4.3e-09; Accession=PF00627.22; Description=UBATS-N domain
  Pfam annotation: Domain name=UIM; Domain location=1312-1329; Score =22.7; E_value=0.0014; Accession=PF02809.11; Description=Ubiquitin interaction motif
  Pfam module annotation: Pfam domain module=DUF908::DUF913::HEAT::HEAT: :HECT::UBA::UIM; Domain location=76-391::439-776::100-135::418 -455::3235-3530::1267-1304::1312-1329
MAAHRASFPLRLQQILAGSRAVSPAIKIESEPPANIKAFIDRVVNIPLHDIAIPLSGFCWEFNKDLLLSDDMTEADPMPKNAILKILRVMQIILENCQNRSSFTGLAHLKLLLASSDPEIVVAALETLVALVKINPSKLHMNGKLISCGPINTHLLSLAQGWGSKEEGLGIYSCVVANEGNHQGGLSLFPVDLENKYGGTQHRLGSTLHFEYNLGPAQYPGQTSDKGKSSNLCVIHIPDMHLQKEDDLSILKQCVDKFNVPPEHRFALLTRIRYARAFNSARTCRIYSRISLLSFIVLVQSSDAHDELTYFFTNEPEYINELIRLVRSEDSVPGSIRALAMLALGAQLAAYASSHERARILSGSSIISAGGNRMVLLSVLQKAISSLNSLNDTSSPLIVDALLQFFLLHVLSSSSSGTTVRGSGMVPPLLPLLRDNDPSHMHLVCLAVKTLQKLMEYSSPAVSLFKDLGGVELLSQRLHVEVQRVIGTADGHNSMVTDAVKSDDNHMYSQKRLIKALLKALGSATYSPGNPARSQSSQDNSLPVSLSLIFQNVDKFGGDIYFSAVTVMSEIIHKDPTCFITLKELGVPDAFISSVTAGVIPSCKALICVPNGLGAICLNNQGLEAVRETSALRFLVDTFTSRKYLIPMNEGVVLLANAVEELLRHVQSLRSIGVDIIIEIINKLSSSQEYKNNETATLQEKTDMETDVEGRDLVSAMDSSVDGSNDEQFSHLSIFHVMVLVHRTMENSETCRLFVEKGGLHALLTLLLRPSITQSSGGMPIALHSTMVFKGFTQHHSTPLARAFCSSLKEHLKSALKELDKVSNSFDMTKIEKGAIPSLFVVEFLLFLAASKDNRWMNALLSEFGDASREVLEDVGQVHREVLWKISLFEKNKIVAETSSSSSTSEAQQPDMSASDIGDSRYTSFRQYLDPILRRRGSGWNIESQVSDLINMYRDIGRAASDSQRVGSDRYSSLGLPSSSQDQFSSSSDANASTRSEEDKKKSEHSSCFDMMRSLSYHINHLFLELGKAMLFASRRENSPVNLSPAVISVANNIASIVLEHLNFEGHSVSFERDMTVTTKCRYLGKVVEFVDGMLLDRPESCNSIMVNSFYCRGVIQAILTTFQATSELLFTMSRPPSSPMETDSKTGKDGKEMDSSWIYGPLTSYGAIMDHLVTSSFILSSSTRQLLEQPIFNGSVRFPQDAETFMKLLQSKVLKTVLPIWAHPQFPECNIELISSVMSIMRHVCSGVEVKDTVGNGGARLAGPPPDESAISLIVEMGFSRARAEEALRQVGTNSVEIATDWLFAHPEEPQEEDDELARALAMSLGNSVTPAQEGDSRSNDLELEEATVQPPPIDEMLRSCLQLLQRKEALAFSVRDMLVTISSQNDGQNRVKVLTYLIDNLKQCVVASEPSNDTALSALLHVLALILHGDTAAREVASKAGLVKVALDLLCSWEVQIRESSMIEVPNWVISCFLSVDQMLQLEPKLPDVTELHVLKRDNSNIKTSLVIDDSKRKDSESLPNVGLLDMEDQFQLLKICCKCIGKQLPSASMHAILQLSATLTKVHAAAICFLESGGLNALLSLPTSSLFSGFNNMASTIIRHILEDPHTLQQAMELEIRHSLVTAANRHANPRVTPRNFIQNLAFVVYRDPVIFMKAAQSVCQIEMVGDRPYVVLLKDREKERIKEKDKDKSVDKDKATVAVTKVVSGDTAAGSPANSHGKQSDLNSRNVKSHRKPPQSFVTVIEHLLDLLMSFVPPPRPEDQVDVSGTALSSDMDIDCSSAKGKGKAVSVPPEESKHAIQESTASLAKTAFFLKLLTDVLLTYASSIHVVLRHDAELSNMHGPNRTSARLTSGGIFNHILQHFLPHATRQKKERKNDGDWMYKLATRANQFLVASSIRSAEARKRIFSEICSIFLDFTDSSAGYNAPVPRMNVYVDLLNDILSARSPTGSSLSAESAVIFVEAGLVHSLSTMLQVLDLDHPDSAKIVTAVVKALELVSKEHIHSADNAKGVNSSKIASDSNNVNSSSNRFQALDMTSQPTEMVTDHRETFNAVRTSQISDSVADEMDHDRDMDGGFARDGEDDFMHEMAEDGTGDGSTMEIRIEIPRNREDDMAPAADDTDEDISAEDGEDDEDEDEENNNLEEDDAHRMSHPDTDQEDREMDEEEFDEDLLEEDDEDEDEEGVILRLEEGINGINVLDHVEVFGGSNNLSGDTLRVMPLDIFGTRRQGRSTSIYNLLGRASDHGVLDHPLLEEPSSTTNFSDQGHPENLVEMAFSDRNHESSSSRLDAIFRSLRSGRNGHRFNMWLDDGPQRNGSAAPAVPEGIEELLISHLRRPTPQPDGQRTPVGGAQENDQPNHGSDAEAREVAPAQQNENSESTLNPLDLSECAGPAPPDSDALQRDVSNASELATEMQYERSDAITRDVEAVSQASSGSGATLGESLRSLEVEIGSVEGHDDGDRHGTSGTSERLPLGDIQAAARSRRPSGNAVPVSSRDMSLESVSEVPQNPDQEPDQNASEGNQEPTRAAGADSIDPTFLEALPEDLRAEVLSSRQNQVTQTSNDQPQDDGDIDPEFLAALPPDIREEVLAQQRTQRMQQQSQELEGQPVEMDAVSIIATFPSEIREEVLLTSPDTLLATLTPALVAEANMLRERFAHRYHSSSLFGMNSRNRRGESSRRDIMAAGLDRNTGDPSRSTSKPIETEGAPLVDEDGLKALIRLLRVVQPLYKGQLQKLLVNLCTHRGSRQALVQILVDMLMLDLQGFSKKSIDAPEPPFRLHGKAVLLDDGEEQKTFALVLLLNLLDQPLYMRSVAHLEQLLNLLDVVMHNAENEIKQAKLEASSEKPSAPDNAVQDGKNNSDISVSYGSELNPEDGSKAPAVDNRSNLQAVLRSLPQPELRLLCSLLAHDGLSDSAYLLVGEVLKKIVALAPFFCCHFINELARSMQNLTLRAMKELHLYENSEKALLSSSSANGTAVLRVVQALSSLVNTLQERKDPEQPAEKDHSDAVSQISEINTALDSLWLELSNCISKIESSSEYASNLSPASASAAMLTTGVAPPLPAGTQNLLPYIESFFVTCEKLRPGQPDAVQDASTSDMEDASTSSGGQRSSACQASLDEKQNAFVKFSEKHRRLLNAFIRQNSGLLEKSFSLMLKIPRLIDFDNKRAYFRSKIKHQYDHHHHSPVRISVRRPYILEDSYNQLRMRSPQDLKGRLTVQFQGEEGIDAGGLTREWYQSISRVIVDKSALLFTTVGNDLTFQPNPNSVYQTEHLSYFKFVGRVLLDAHFTRSFYKHILGVKVTYHDIEAIDPSYYKNLKWMLENDISDVLDLTFSMDADEEKLILYEKAEVTDCELIPGGRNIRVTEENKHEYVDRVAEHRLTTAIRPQINAFLEGFNELIPRELISIFNDKELELLISGLPDIDLDDLKTNTEYSGYSIASPVVQWFWEIVQGFSKEDKARFLQFVTGTSKVPLEGFSELQGISGPQRFQIHKAYGSTNHLPSAHTCFNQLDLPEYTSKEQLQERRRLNSQNPQALIGRRPVRPPSLTRDKTKAPPKSRSLTTERPMFQHLAPTVRATRNNLRWPPKRATSKAAASIDDAAKAALLAEKKGKALADTTPKRPSKTTLSTTRDSARITPPPTTLYAPVVPRAHHKHHHQASLRQRAKTP

SEQ ID NO: 56065 - protein, 22 aa, Zea mays
  Coding DNA Sequence Number=SeqID_12690
MARRRSQKNKKTQENKESDKCL

SEQ ID NO: 56066 - protein, 89 aa, Zea mays
  Coding DNA Sequence Number=SeqID_12691
MAPRRSIWTTSIEVVDAQCVKDVVYELRSSTNRIENMSLDGNVIQRPLKSKVWPQSPEEVNAEDEIEAMATDGEVLKAGAQTTLWVMPS

SEQ ID NO: 56067 - protein, 304 aa, Zea mays
  Coding DNA Sequence Number=SeqID_12692
  Gene Ontology: Mol. function=pyridoxal phosphate binding; Cellular component=cellular_component; Biological process=Mo-molybdopterin cofactor biosynthetic process
  Homolog annotation: Hit_ID=Q655R6; Match level="QueryCoverage=99%, HitCoverage=40%, E-value=1e-120, Identity=70%"; Hit description =Molybdenum cofactor sulfurase
MGQSKAEFLKQFGGDYGYPDAPRGIDELRAAEFKRLEGMVYLDHAGATLYSEAQMTDVARDLMSNVYGNPRILKFGRYALSKGATVSAVDVEEVVDPSKNHESDSLFKVSKRSNQRRGDNVLLHNYQNGSLSAISGNNLNLFAFPSECNFSGHKFNLSLVKLIKEGKFMDFSSQQQGQWMVLIDAAKGCATEPPNLTLYPADFVVCSFYKIFGYPTGLGALIVKNEAASLLNKTYFSGVTLWNTYDIGTVAASIADIDFVQKRKGIEQTLEDGTISFLSISSLRYGFKIIDILTISAIARYYQR

SEQ ID NO: 56068 - protein, 106 aa, Zea mays
  Coding DNA Sequence Number=SeqID_12693
MAGSRDSSDISPSNIIEPTWETLPADEQLQFEEHKERMIQEVKAKFLANFKVDRNNKVVRHRATDPASLQPTPDIPNNIIGGMQSDLKRLVLALALSCKEANKGEQ

SEQ ID NO: 56069 - protein, 82 aa, Zea mays
  Coding DNA Sequence Number=SeqID_12694
MESSAETRLPLHSIGAKGSAQTNKKIKLGFKNKGAKETEENPGLAHQTVSGAPGPYDFKLATFGFQKSRSAIIHLVHQRSNG

SEQ ID NO: 56070 - protein, 317 aa, Zea mays
  Coding DNA Sequence Number=SeqID_12695
MVTTGSMVGRSKPGCGLCPALSFKDLHHPYCGGGRAEPELYLPHRGEGAHWLGGGADFDNTGPVGRKRRQLQHAWLAGSTGSSAASGATSHHWGGARQPAHRMGGCCAVRTGGPSKTSHAARAAFVFLDCLVLAPARRLRAEVTSEVSVSRRRRSPSAWSALPLKASLAQLRNLRLLCDEPEPEAAVSTWTEAESARKGASSAQEQVTSQAEKVQQRRLEPGRVIRERDQLQSHASEAVSRADVLGGQLAEATERPAEPSARAGILEETLAADGPGAVLTSSFEVEILPPMSPSEAGPDPVEGGNNTEGAAVPSVDV

SEQ ID NO: 56071 - protein, 118 aa, Zea mays
  Coding DNA Sequence Number=SeqID_12696
MADKGKGKGIVISNPRMSDISQKEIARKASDEKAKRKPPESERWDDIPEDAVISLFPNGPIHHRNNFYKDILLVFKHAEEVKIGVPLDARVILRINSISENKPEKDFDLFADFELPNP

SEQ ID NO: 56072 - protein, 227 aa, Zea mays
  Coding DNA Sequence Number=SeqID_12697
MMEDNDAVGRDIKTLVSLMVKRVSEEDTPSETRCKFVGSNRGKVGIASATKNTKVFIGGGVPNRATWGHEALMVFVGRQFSKVKQDVVDKGVSLESKQHLIKPTGIIVKGGHGDNHHQHSNVGNSSCLDVEVGNDGSPGGGLLLFEEMSGYLDTNVCIGSFLVRILSRSEHVVDLLAKGHNLILSVVRSSSVNEVLSWVREKEGEDVCTLLRPHDTTVTTALEGPLP

SEQ ID NO: 56073 - protein, 136 aa, Zea mays
  Coding DNA Sequence Number=SeqID_12698
MLSGSELRKHYGGEALRENISELCRHREVKDADYTNGVLFTNEMEVDLQMLCALMLNGFGGEMGLPRIMHVEADLLNTISNVKPVNILKGTGGTSKLCGIRHKRGGVRGKLGLKIHKHGAYHPNALKNVLCVEAPM

SEQ ID NO: 56074 - protein, 345 aa, Zea mays
  Coding DNA Sequence Number=SeqID_12699
  Homolog annotation: Hit_ID=A3ATK9; Match level="QueryCoverage=62%, HitCoverage=48%, E-value=4e-81, Identity=73%"; Hit description =Putative uncharacterized protein
  Pfam annotation: Domain name=DUF868; Domain location=40-340; Score =122.1; E_value=1.7e-33; Accession=PF05910.3; Description=Plant protein of unknown function (DUF868)
MKDLVSCFSEHAVRISDVACSGSGPANAAAGAPEAGGGGRAPAVSAVTTAYRSRLSASGKELLIDVTWSWSRAPDGPALSVAVHEADAVSRHRAASGAAAPRHLHKKKGSGTFTAGSCVVGVFWDYAAARYGAGSGPEPTSGFYVAVVADAEFVLLLGDLSRGYVDRLHGGIPIAGSRMARRRERFVGCGRWSTRARFLESGEEHEIGVALLDGDAEAWVTVDGRKVVQLRRLRWNFRGCHTIFLDGGAPVDVTWDLHGWLFHAGAESPQPSSTSPCAVFTFQARGASETKLWTDDDCFDDGEEADKLPVTPSGRQQKAGGGGASGSGQGFCLLIQGSRSFSMST

SEQ ID NO: 56075 - protein, 290 aa, Zea mays
  Coding DNA Sequence Number=SeqID_12700
  Gene Ontology: Mol. function=hydrolase activity
  Homolog annotation: Hit_ID=A7PPH8; Match level="QueryCoverage=17%, HitCoverage=16%, E-value=2e-12, Identity=63%"; Hit description =Chromosome chr8 scaffold_23, whole genome shotgun sequence
MSCAFDDYYIEDCGVILAPEVTQRRIDNSDQFVILATVRGLAGKQTIIVSGHHGKLHIDGLRFIIDEGGGYEDKPIAAIVFPSKTLIRSTEEAGTTSESDEHTSGSPETLSSPRSNPDQIATPTDQIAGAFNAKGSDSGSAPEDGELRSARPRARTRAQPRKTANSAPPDPGLGLGLSPGRRRTPLRPTQGSDSGSAPEDDELRFAQPQGSDSALASADGLRLARPRGPDSTTAAEDRLDLDLGGASTSPNLGRGPTTSKGGAIITLPQADSGHGEQDRRPIWLAPPDRQ

SEQ ID NO: 56076 - protein, 60 aa, Zea mays
  Coding DNA Sequence Number=SeqID_12701
MALAPGESGRYRLALAHAGAPARARGGLCTGAAGARVEARADVAGAKGRLCTGLSLTSLS

SEQ ID NO: 56077 - protein, 292 aa, Zea mays
  Coding DNA Sequence Number=SeqID_12702
  Gene Ontology: Mol. function=carboxyl- or carbamoyltransferase activity; Cellular component=ornithine carbamoyltransferase complex; Biological process=amino acid metabolic process
  Homolog annotation: Hit_ID=Q8SA97; Match level="QueryCoverage=56%, HitCoverage=23%, E-value=4e-25, Identity=45%"; Hit description =Ornithine carbamoyltransferase
MATPIDVAGLRPRLGDVEAPPKPRSSLSSVAEVESEPLGRARRRPPAEARAESEPWGRAERSSPSSGAEPKSEPWVGRSGVRRLPGLSPSPSPGSGGAEFAVFRDLARVRALGRAERSGAVLLSGRSVERRSDGGHFGSASWGARVRIKLYADGGYQLRIRSLEVPSDINGSRPSPTPDGAGTLEHKLHRWRPPAEHLPDKQALPPSPEAVAASPSAKDVPLLPDAGMRHWAACGRFAQCSGSFRGEVDRATAEAFLLTRLPVILLRYLGVAETINDAVEFVHQNFIEMNKL

SEQ ID NO: 56078 - protein, 290 aa, Zea mays
  Coding DNA Sequence Number=SeqID_12703
MRRKDGGYPPSGGLEGGKTRCIREREDMVAFQRGPTRHATGAPNASCMQLHRHLRHYRASSTAEPISRLEATQRATQQRQPGATGPGKGDTPKRILPREGTRLRASLLIRGSKAGPSEGFDSRLRSRGPYTHYWSEVRRSAPRKGSTTASVYSGSAPTTDQGFEGWPPKESHQREASSPRTPSPGDRVRQITRSSPETPCSAPIKGNMALLPLLLAERRRRGVCKKAESVPDRPLALCRGSGAALANPAPAEPLKASTYQPENLGPDRTPGLRPARMRERPDQPKHYARH

SEQ ID NO: 56079 - protein, 152 aa, Zea mays
  Coding DNA Sequence Number=SeqID_12704
  Gene Ontology: Mol. function=sequence-specific DNA binding; Cellular component=nucleus; Biological process=regulation of transcription, DNA-dependent
  Homolog annotation: Hit_ID=Q5HZ67; Match level="QueryCoverage=96%, HitCoverage=43%, E-value=8e-66, Identity=65%"; Hit description=WRKY transcription factor 78
  Pfam annotation: Domain name=WRKY; Domain location=33-91; Score =142.8; E_value=9.5e-40; Accession=PF03106.6; Description=WRKY DNA -binding domain
MPAEVGTSEMHQINSSENATQETQIENVAEKSAEDGYNWRKYGQKHVKGSENPRSYYKCTHPNCEVKKLLERSLDGQVTEVVYKGRHNHSKPQPNRRLAAGAVPSSQGEERYDGVATIEASDDDVDARGGRSYPGDDANDDDLDSKRRCCHG

SEQ ID NO: 56080 - protein, 103 aa, Zea mays
  Coding DNA Sequence Number=SeqID_12705
MSGEPTVGRAIFAQHMDCSNGQLVHRIVSGGPISPEEQRSDMPNLEGDRAPDRLQDLSGSPIHPPLGTLKRSPKRNVVSEDELVWSCPPDHQCDVAPEPPSDL

SEQ ID NO: 56081 - protein, 713 aa, Zea mays
  Coding DNA Sequence Number=SeqID_12706
  Gene Ontology: Mol. function=transcription elongation regulator activity; Cellular component=nucleus; Biological process=nucleobase, nucleoside, nucleotide and nucleic acid metabolic process
  Homolog annotation: Hit_ID=A7PTE3; Match level="QueryCoverage=63%, HitCoverage=28%, E-value=1e-116, Identity=52%"; Hit description =Chromosome chr8 scaffold_29, whole genome shotgun sequence
  Subcellular localization annotation: CTP_CleavageSite=37; ConfidenceScore=5.44e-01
MDDRPPSWPRPPCTPSRPSGSPLLHCPSGSHSSSALRALAKAAPTATLGEIALGESALGDVMLDRGASSIISPAQGHAGHGSCIIVLVFHEYYVNIKSCLHPASYKYQLPGSCANKLQIANTSFLVLQLASCWPAVDPVERESADEYFCQIMISPWACEVTIVEVWLYAEDGQDEFEKDDFIVDDEEEEVEGEEEEQKSDDERRRKKKKKKRESDDFMLDEDDYMLLQDNNITGISRPKPGNKFKRLKKAGRESEMDEHSGFSDGDGTGKKRSGKERVEYSLFGDHQDAAPFEEDFEDDQQAGEGEEEVGDDEDEMADFIVEEDEIDGNGQVVRRKKFKKKVPRQAAGVSSSALQEAQDIFGDVDELLALRKQELEREALNSGELRGARLEDEFEPFILAEKYMTSKDEQIKENDVPERMQLSEELTGYPPTDKTTIEEESSWIHSHLTGDGFLSFFGNEHINKDIDQKDIVNVVTMLHANKFEIPFIAMYRKESCPTLLSFDSDEDNEDIESDARKLRWHKLLWAVQALDRKWLLLQKRKVALQLYYEKRFDDEKRRIDDVTRQELNSQLYNSIIEALKDAKSEKEVEDVDAKFNLHFPPGEVEEEGQFKRPKRKSLYSICHKAGLWEVANQFGRSAEQLGHHLTLTKIPEAGELESGRHSPEEVAANFTCAMFETSQDVLRGARHMVFNRPTILTLFCTPSIPNYKTFWFF

SEQ ID NO: 56082 - protein, 351 aa, Zea mays
  Coding DNA Sequence Number=SeqID_12707
  Gene Ontology: Mol. function=zinc ion binding; Cellular component =intracellular; Biological process=multicellular organismal development
  Homolog annotation: Hit_ID=A2Y635; Match level="QueryCoverage=100%, HitCoverage=100%, E-value=1e-118, Identity=62%"; Hit description =Putative uncharacterized protein
MDQRKAIFRAKLRETKEKQQRRIDPALVRYNEFDQPICRVCNITLKSEALWPAHQVSRKHHEAKAAAADKATTLTGSRGSNAKLEQPLEPQERKSSTLPTKFFDNQGAKRKSDDTISEGRSVRHEVAVIQPKTIGASTDKSSVRMDQMSKKGSQSNTNVQGILPGNFFDYGEDEASAPAPKELSTSQIHTKVKGVPDGFFDHNKSSSGMQPNEPSSEAAQVIGSLPEGFFDNKDADLRARGIQPQKVDMNDAYKEFEKEIQEDLQEVDDRLEEEEIDAAAEREEYLTLEQQEYRQQVDMLKKQLVESKAARTARVNRKPIGMDSDSSSDSSSDEEDDNTDFAVDWRAQHLK

SEQ ID NO: 56083 - protein, 22 aa, Zea mays
  Coding DNA Sequence Number=SeqID_12708
MAFGANRCQAATASAVCYSIYS

SEQ ID NO: 56084 - protein, 138 aa, Zea mays
  Coding DNA Sequence Number=SeqID_12709
  Subcellular localization annotation: CTP_CleavageSite=39; ConfidenceScore=5.23e-01
TRMGTVARTSSSVAATVDWCWVDAGTSRHLDTSTTPRIAASPGMGATGLPATGGLSTISSVDGTATDGVGATTSGVASTTVPVDACTASSSPWITASHAQGSEGAVNVQDFLVHGSGGSGHLPGGGGGSGQNSHSPPE

SEQ ID NO: 56085 - protein, 106 aa, Zea mays
  Coding DNA Sequence Number=SeqID_12710
MACFPSFFEGEGAGKITRRGSIPFVGTLASFFLVIRVHSFVGEVGRGVLRARGYAIRCLAPAFLGISEENFFFGGSAMRCRVPSSSAMDEMVPKQNTDPGRRVILH

SEQ ID NO: 56086 - protein, 153 aa, Zea mays
  Coding DNA Sequence Number=SeqID_12711
  Gene Ontology: Mol. function=histone acetyltransferase activity; Cellular component=nucleus; Biological process=regulation of transcription, DNA-dependent
  Homolog annotation: Hit_ID=A2WXV3; Match level="QueryCoverage=67%, HitCoverage=9%, E-value=4e-38, Identity=72%"; Hit description =Putative uncharacterized protein
MKEHALHLLVLSHVFSVPSLKTVCVDQLERGFLAPDNVVDMLQLARLCDAPRLALACVRMVIGDFKTISLTDGWKVMRRANPSMEQELLESLVEADTRRQERAKKMEEKKVYQQLYEAMEALVTPNLYGNLVANTTACIVGGMGIMPGGRDCS

SEQ ID NO: 56087 - protein, 131 aa, Zea mays
  Coding DNA Sequence Number=SeqID_12712
MGRGTRGRGRPRRANGKRKRASSPPSKDFGDSEYSKEASSELDCSLAPASPPASSEDSDDSMGLSTAPRAYWRSIEHAGLGGSDESGVSSDEADSSDSSEEWSGGDGDDKGDDSGEGDGDDSDGDGSEGSG

SEQ ID NO: 56088 - protein, 189 aa, Zea mays
  Coding DNA Sequence Number=SeqID_12713
MALLGHPGHFQSEEALNLASAADFSLLPTTAGGVRASASTPHTPLHPADSNLHPPLRDTRPDPAVVYIPTFGGARWENWRSEWVIANTEANDRLILPSDGPALDRKQWRTKPSLSLEFLPVLDRIKVLATGGLTSMHVDIPTLCDDPGLRTAILATLPTLDDSGVAVRQTGGRDPLHGIRISDASAGGP

SEQ ID NO: 56089 - protein, 155 aa, Zea mays
  Coding DNA Sequence Number=SeqID_12714
MGKSKKGGSSLHHSGDKRKHEPTPPSKDFGDSEYSEEEFSSEYEGSPVHASPSASSDDSDDSQGIAAEVWTYIRAVERAGLEGSDESEVSSNEGDSSHSSEEGSDGGDGDGGDGDGDDGGDGDDGGGGSKGDDKGDGGNGSGNGKGDGGSGKASG

SEQ ID NO: 56090 - protein, 104 aa, Zea mays
  Coding DNA Sequence Number=SeqID_12715
MAAGFYRVYATDSKQRGPRMLREVRPSAPARVVSADFVAQQRVHVEEEDDLGKSVNGTPRVRGCGSVMATWAARVSVNLGRPTGNSAQMNTSIMEYTHGIYLFT

SEQ ID NO: 56091 - protein, 73 aa, Zea mays
  Coding DNA Sequence Number=SeqID_12716
  Subcellular localization annotation: CTP_CleavageSite=38; ConfidenceScore=5.14e-01
MARPLQAIPTQSRALVSFPQSPVELLEARNRALFHRRRCSTLAGVVIPAGTRGHGKPVSQFPIPRAYVFPSIQ

SEQ ID NO: 56092 - protein, 41 aa, Zea mays
  Coding DNA Sequence Number=SeqID_12717
MARTPSLCQIAEETLENLGFNPLSTVRKSPLLRILVSSRLK

SEQ ID NO: 56093 - protein, 60 aa, Zea mays
  Coding DNA Sequence Number=SeqID_12718
MGKIEHGWNRTAERTTNFVTVNTDECPSGQGVTLHKIVTAIGGGVSVAKAQRLWKAVVGP

SEQ ID NO: 56094 - protein, 104 aa, Zea mays; identical to SEQ ID NO: 53382
  Coding DNA Sequence Number=SeqID_12719
  Homolog annotation: Hit_ID=Q2QTF5; Match level="QueryCoverage=87%, HitCoverage=98%, E-value=9e-09, Identity=39%"; Hit description =Retrotransposon, putative, centromere-specific

SEQ ID NO: 56095 - protein, 31 aa, Zea mays
  Coding DNA Sequence Number=SeqID_12720
MAKWAELVVLEMKVAFDPSQTFDNSHIFCTR

SEQ ID NO: 56096 - protein, 342 aa, Zea mays
  Coding DNA Sequence Number=SeqID_12721
MNVDFQHLLDEMSKRFDGYDAKLTQRLSDYGVKLQQRMLDRNLELERRMADLDTRMDDKLASLSTANETRLSQLESVAISFDGWHPCMEGSVDDIRLHVSKLTNLYERSAVEHPTVMTGVLVPAPSPAVRPSAAASTDAQPDRHRLNPSIRDDGCGVVTILDHHPAKGASSPSHPMCLLLLFSTVRDPSLRNPWVEVWLVYLIIFLKCCFLRPMGINPSYGSVDEEVSEYGKRPPTRQPDPFSRTQSTPPASLPLPPPPWKGEKQTTLGEDRRGANSNNMEDKWSTLRAYRRARGCVLSVQRNGLRITVVLIRFNSMLCRRYLSCFSGIRMLNQKGMTQSNL

SEQ ID NO: 56097 - protein, 66 aa, Zea mays
  Coding DNA Sequence Number=SeqID_12722
MQLYEEEVGKPSTKSTEIICQADEGIGNGCSRPVVAASISTENGCPKLGNFNTCAKHKDCFSTLKA

SEQ ID NO: 56098 - protein, 183 aa, Zea mays
  Coding DNA Sequence Number=SeqID_12723
MKKVVYYETDSSSPSTSGVESTLKGKCALGPILSILMLETGKIKLELKDGFVQPKSAQSGCTGQCPVRQADSGELAALEKSSATYGYNSPDCPVCTGLFGEPTVGRVIRARRVAEPTARRGHQTVRCAPDSVWCANGSKASMVGFAKEGKKSAPDSVRWCTRLSGAPGDRRQELPSWNALNGS

SEQ ID NO: 56099 - protein, 177 aa, Zea mays
  Coding DNA Sequence Number=SeqID_12724
  Gene Ontology: Mol. function=lipid binding; Biological process=lipid transport
  Homolog annotation: Hit_ID=A3BEQ2; Match level="QueryCoverage=46%, HitCoverage=29%, E-value=9e-15, Identity=46%"; Hit description =Putative uncharacterized protein
MALGNKRTTLLVAMAALILQPSAASRVGGGLARAIADPGNGDGDGGIPQLPPQPRECRPWLARMMPCAGFLTNNSTVYAPDATCCDGFGSMFTLDTVTCLCHVVDGDIGKLLPAPMSRMRMVELFSVCGHAGRVDLLAAACSLSKSQSGWSAADRPSESLTVDAIAISSICMCVIIS

SEQ ID NO: 56100 - protein, 82 aa, Zea mays
  Coding DNA Sequence Number=SeqID_12725
  Subcellular localization annotation: CTP_CleavageSite=44; ConfidenceScore=5.41e-01
MANGRGPGRGQSSAAGWASVTRCAGACARLLFLGVRLRSDFLARSARRHRGRLGVEWFQARVGRLRVGRCWGSAGHLARGGR

SEQ ID NO: 56101 - protein, 200 aa, Zea mays
  Coding DNA Sequence Number=SeqID_12726
MTANGLERTTGSVRLGGGSGTSPARHDGELRLRSTTATTVSSGGEGETEEGVREGARAGRGRGLGVQFIVKGEGEPQRGRNGRFKAPLMRGSDGRESNGSIKAMANGRGRGRDGCMLLARLVFGCGMGVGNAMRGACARLLLLGARLRSDFRARSARRHRGRLGVVWLQARAGWLRVERCRGLAGRLERGGQSGQGCQGG

SEQ ID NO: 56102 - protein, 149 aa, Zea mays
  Coding DNA Sequence Number=SeqID_12727
MPRRVATGEAALAKRCRGLGEDPGVAALAGTSRAREARAWRLSVSARRCSRGGLGEADDRQARTSWEGSRRDGRLGRGGEDGVRMRGGSRGCSGEVSRVLSRRATARRAARDRGFMRGRDEEVGESGVRGRGNGEVAELLAWRGRSLRE

SEQ ID NO: 56103 - protein, 159 aa, Zea mays
  Coding DNA Sequence Number=SeqID_12728
  Subcellular localization annotation: CTP_CleavageSite=45; ConfidenceScore=5.06e-01
MAKFCQSQSSLGAPDSVRCARLARANWSLSGIHRRRTAIIHQTVRCAPDCPVSQRSAGPTVDCAICARHVAEPTIGRGHRTVRCTPDSVWCANGSQAPTVGFDREGKKSAPDCPVRQATEGKICLPGMLSTAPSCLGAIKGTPRRMEEYTKHSLSIPKH

SEQ ID NO: 56104 - protein, 65 aa, Zea mays
  Coding DNA Sequence Number=SeqID_12729
MVKNFGSKTVQIAMNAVVTSHLLVCLYSTAGTIQEMVDGVTWPTTLPPGWTVEWDVAPAGEEHEE

SEQ ID NO: 56105 - protein, 72 aa, Zea mays
  Coding DNA Sequence Number=SeqID_12730
MDDTKDPSTKASTLGGRFYSDVWMKGSPELSPPLEPYNPEADPTMKEALYIIRISNEAVDEAVDTLLNEVAE

SEQ ID NO: 56106 - protein, 114 aa, Zea mays
  Coding DNA Sequence Number=SeqID_12731
MEQGGALFGCSDGGAEGRKSPAAGQPWSATAGSWPPLTRAGGRVHGSFCHCAREARERAPWKRSQAPSCSRGKNISLLPNAVEKGTKKGTRLEQACAREKEQGERSAVEGSLAA

SEQ ID NO: 56107 - protein, 179 aa, Zea mays
  Coding DNA Sequence Number=SeqID_12732
MNSHVPTGGGNPQSHTDGLAREGFPRILWEVLQGAGYTTPPQYAVQLFEEHRVPCCRVRMTLEPHPLQLGWRSLDSESFGFRADDTIESTTLHVLTTFCGFHPLEMSTHPIGLFLAEKEDDPMWKDRALRGEVMSQLMGLVESTKITLDNREDLVVDLVTPQVSISHYVGRNILISDAQ

SEQ ID NO: 56108 - protein, 95 aa, Zea mays
  Coding DNA Sequence Number=SeqID_12733
  Subcellular localization annotation: CTP_CleavageSite=67; ConfidenceScore=5.68e-01
MARARAYKAPQASTTLFRARSNLTGAQLTVVCPARNRSLLRRRGQSTVVGVHNPAGVRGPGSLEDMVAGVTWSSILPPGWTVEWDPASAKEEHEE

SEQ ID NO: 56109 - protein, 311 aa, Zea mays
  Coding DNA Sequence Number=SeqID_12734
MTSHGSSEDGNALSHTEGLAREGFPRILWEVLQGAGYTTPPQYAVQQFEKHRVPRCRVRMTLEPHPLQPGWRSLDSESFGYRAEDTIETIALHGLTTFCGFHPLELATHPIGLFPVEREDDPMWKDQVEHAKDIWAIYPGQTAHLTVRCMNALYRLQVMRGEAMPHLMALLEATKITLDNREELVVDLSTEMVEKDLQVEQLSTDIQVLEELVGTRENTIEVLEVQLINTQQQLVEANEHLDMHHQEIQDMEANKDVDIEAGEEPASSVDTAGSGRPPSPESSVASWPGGSVVARMSAFLHHRHRPPLYRS

SEQ ID NO: 56110 - protein, 71 aa, Zea mays
  Coding DNA Sequence Number=SeqID_12735
MAVGVSEALYAKAMSPDLLTGNRWGRLILACGIIFTGSLEDMVAGVTWPSILPPGWTVEWDPASAEEEHEE

SEQ ID NO: 56111 - protein, 178 aa, Zea mays
  Coding DNA Sequence Number=SeqID_12736
MPEKTYVLDARQVFDGSYYATRRKWDRAVIPQLAIYHFLFIKLQNQSATIFMFFAQGADGSRGRGLHGCAVLQEGVDGRRINNSNSGIQKPSDWNGIVTNNLNDGIISSDENNLVRGAEHAAITRITYETAVSGSILTLVYGDNGSNLAKLREGVLDKESMRLKTGGYKKLEWLYEGF

SEQ ID NO: 56112 - protein, 99 aa, Zea mays
  Coding DNA Sequence Number=SeqID_12737
MAGSKDHTDVSTTKIIKTTMEALPTDDQQPFDDLIRREKEEVLRQLTKRHDKEEEEVLRQLKERYEKATEKYLSYFTLDCHQKIIRQGEIDMTSLLPPS

SEQ ID NO: 56113 - protein, 103 aa, Zea mays
  Coding DNA Sequence Number=SeqID_12738
MGEGAGRVAWRAFISFVSFFLVIRVHSLVDEVDDGVLQNSFFVCHGREGPKAEHGSRKESNLALKVTAIELAWINDTLPTWRASCQCFEADYTPGVTTRGAVE

SEQ ID NO: 56114 - protein, 160 aa, Zea mays
  Coding DNA Sequence Number=SeqID_12739
MQDAARRALLQYCSLFSGVADRLDLKYYPCCSTGSAGGVIVSPIGEDNLRLNSMVNLAAMLNTELDHALDEFGKVQVEVVELRVDCTTRHYLDVVLPPLSGFSTLTIHHPVVTLSMMSKDRWRGARRAQQEQQAPQEDAAQQQLPPSPLMTIEQMFLMQT

SEQ ID NO: 56115 - protein, 90 aa, Zea mays
  Coding DNA Sequence Number=SeqID_12740
MMLVDYTTVLDRPSVSVEGSTQQGVESVVEVTPSSGVASDGCSDPSLPLLLLQELRAVARTATGVVVISISVRVSFSSRNALWCCGGIPA

SEQ ID NO: 56116 - protein, 46 aa, Zea mays
  Coding DNA Sequence Number=SeqID_12741
MGRLEPQAEWESRLMGKRVVPIVLSAQGADTGNMEDFKEFQDYDEF

SEQ ID NO: 56117 - protein, 107 aa, Zea mays
  Coding DNA Sequence Number=SeqID_12742
MGKDKKGRGSPCRSGDKWKREPSPPSEDFDESEVSSDEENSSNSSEEGSGGNGDDDEGDSSGSDGGGGGGDNGGSDGDKRSGDGKGSDDGGRGGSSSSKASGKAPLA

SEQ ID NO: 56118 - protein, 345 aa, Zea mays
  Coding DNA Sequence Number=SeqID_12743
MQRKLTNGKEREDGKAWPITPHAEQHGSSSLISCEKQTIRIEFLTLQVTALVPTITGMGDYVSGRVRRAICGQNSSRREKKQWRSLPAVGEAQWRVGCGPGAPGGHVEGRITGDGGRSRVGRVLRPANSSRAQSKCSGSFTGGQWCCARKESKGGSLCSSVYVRRRSDEVRRCQSGTSGEVVFDLRAQGASWSSGEASRGVGLDGGGPEWPVHGGRGSGGRWHAVRRGNSGDLALGGGVRSRPRSVLLAWAKCGRGVGRRAVRASGAERRVMLWHARAEPPKSLGPSIVVLVHRTSDNPAGAPDHLTSSVSEFLTLPKSVSPVTQILQHIGGTSMRKQLQQFILY

SEQ ID NO: 56119 - protein, 176 aa, Zea mays
  Coding DNA Sequence Number=SeqID_12744
MKETLPWPAILRSTPALFDHVLEPVLAHDTHQLDPLCLTTLNQPERLELCLVFTVAVVGCRQGQINPIKACSRFTSENKEEVEAKEARATPPPPEEPQAKNCFYFDICGAELTSPITQVGWDVFKIKLDGGSIIAMMGSTSEKMYLCEVPNFGLNDKAETGQLTCTRKESRCSVSV

SEQ ID NO: 56120 - protein, 107 aa, Zea mays
  Coding DNA Sequence Number=SeqID_12745
MAVLQGIPALELPLAGFLKLVELCKGLVVLPCLASLVEVYGKSRSLGRWVMLLLLFCYLIGFGIYLYLVTANKILTNFKSNAQLQPSSLVKNRYHRMRRMEDAVMSS

SEQ ID NO: 56121 - protein, 105 aa, Zea mays
  Coding DNA Sequence Number=SeqID_12746
  Subcellular localization annotation: CTP_CleavageSite=67; ConfidenceScore=5.53e-01
MQGHFVPTHINRPHRFPVSRTGLTTLAYNASLTPTGRRAVTALVPTITRMGDLVSGRVRGKVYCQVQSDHASPWTPCPQTITILLSKWIQPIPDLARVLEKSLDF

SEQ ID NO: 56122 - protein, 111 aa, Zea mays
  Coding DNA Sequence Number=SeqID_12747
MVAALGFEWWKNTMQPATRKRESTQIQQCRLLKESARLKREKETLDKLTDQPGNLIPIDVAEVPDLSASRDNSDLAEDDPCDPTTTSKPEAPMQSLNQLPVVTDLADARSA

SEQ ID NO: 56123 - protein, 343 aa, Zea mays
  Coding DNA Sequence Number=SeqID_12748
VDRTPPRTLDLTGARNHRHLPRTWCARDHPNSCHRRLANRTLPSRARPLEEIVHASVKLPEQGIGFCFAGEASPRSPDFARPPVNVDQKHVITVYCNLADREYVIVPEQGAAQEGAGYTTPPQYAVQQFEKHRVPRCRDTIEVIALHGLTTFCGFHPLELSTHPIGLFPAEKEDDPMWKDRVEHAKDIWAIYPGQTAHLTVRCMNAMYRLQVMRGEAMSHLMALLEATKITLDNREELVVDLSTEMVEKDLQVEQLLNEIQELEELVGTRENTIEVLEDQLINTQQQLAEANQHLDMHHQEIQDTEANEDVDIEGGEEPASSLDTAGSGRPPSPESSVASFAH

SEQ ID NO: 56124 - protein, 147 aa, Zea mays
  Coding DNA Sequence Number=SeqID_12749
MGKNNKRKREPTPPSEEFGDSEYSEEEFSSESEGSPAPIPLRESSDDSQGLAAEVWTYIRAVERSGLGGSDESEYSSDEEDSDGGGEDEDDDDDEGGGDGDGDGSGKGGGGSSKDGDGGGSKGSNWGGSSMGSTRGGSGGGSNRASG

SEQ ID NO: 56125 - protein, 39 aa, Zea mays
  Coding DNA Sequence Number=SeqID_12750
MGVADGETRSRGQTHVVVGDETVEFCYFCSKVVPKDEEN

SEQ ID NO: 56126 - protein, 510 aa, Zea mays
  Coding DNA Sequence Number=SeqID_12751
MNGGNHSRSGEPSFPQHLQGLQKGLEILMSVVRGPVAPSIGGDGHHTLRKRRGPPVVISEIEPPALPPFVRGRKDGRIILRRPRLPQLEDAATGPHCRADPSLPRRRSKKLRGEEMSPQVPVRVNPQVSFTNRCEDGGLRDGVRAEVVQLHPVDMQNRPHKAACRHSEPPLVEGDEAHDIPRRRGRGGSARGGIHSGCLSSERGQSKPSATRASRSSVMTVEKGHGSRDGTMVTRSAITKQRRWRRKGRSGRDRERGIPRKGSFSVKETGPEPPTDQRFEGWPPEGFNSRLRALGLRAHYWLALEGFTAASDAERGMTLAPKDDELHIARPEGSDSGSAPEDDELRFARPQGSDSGSAPEDDELRFARPQGSDSGSAPEDDKLRFARPQGSDSALASADGLRLARPRGSDSTSALEDRLDLDLDLGGASTSPNPGLEPTTSQEAPSLPYPKLTQATGNKTSVPSGSPRLQRSSDGHDTTRTGCQNLSGCHDGMALLQRVGRAGKDGTALA

SEQ ID NO: 56127 - protein, 45 aa, Zea mays
  Coding DNA Sequence Number=SeqID_12752
MAVRQGQEQNLSAFRDRGVPKPTSACRRVPQTRWVERVGEREGGK

SEQ ID NO: 56128 - protein, 323 aa, Zea mays
  Coding DNA Sequence Number=SeqID_12753
MEGSITAGQLHAPCVVVRLLCVSDGVRRYSLEGSVSGLPPPAISPPESSRSCPAAISRQWSSRGMATSLVVERSEPGYGLPLPSRIPPVRRWPLSSVLRWSPPLVRLPVAEVVASAGETISATCRRAPNSLALMASLSPPVGRRGRGPFRNGARAEVIAIAGESSVQRWPPSSVLRWSPPLASRLELAIPWPYWVVERAGPRYRIRLSGYTGSGPPQETNVHSLVLAKRPHRLRTTPWNGVPFSGAGSQTVEPPNFRIGGAKLQAWLLNSDVIISVQMGTVRAGFMGTDPTGLAYTHSCMYLSEAWTRGESRRVSGGRQASAP

SEQ ID NO: 56129 - protein, 173 aa, Zea mays
  Coding DNA Sequence Number=SeqID_12754
  Subcellular localization annotation: CTP_CleavageSite=48; ConfidenceScore=5.27e-01
MERSLHKRCFAVPFPSHPTPSPPPSCSCLCPPSRRSELGASDPAHLLPAAAAPLHRSPNLEGNGRVSGVMALRQYVPHRQQLQLPAAGGSRGPPHRGLAGDSVGRRHGRAGAQGYFEADWTSSSMASTRSTPATWRSTAPSATRRPALNSSISRSVKVELGSGTDNNFIDMQV

SEQ ID NO: 56130 - protein, 450 aa, Zea mays
  Coding DNA Sequence Number=SeqID_12755
MHCALPPSEPPDGEHPHCFCLAAVGGAQLRGGWHPSAVARLQGFSSGSPAAFPHQWSPRTVTTSSMVGRSKPGCDLCPALGFKDLHHPCWEGGRGEPGPAFAWAGVPLLPLASGGGNHPLALQRRHPPAMRGKANCCCLARVQHSVLCPGDCVRPHRRVSQHVVRREGGTRVLGWSRSRFRGEDGSEDLPVCFGAADTRWCGVGGQVDAAVGAEVVAAGEGFSADEIVGVTCAPGLRLFGFNGWFSSPARGHEREPSSDSVRPGAIAAAAEVAGEPPGLRNPRLLFDEPEPEAAVSAWTEAESARKGASSAQEQVASQAEEVQQRRPEPGRVICDRDRAVLTSSFEVEILPPVSPSEAGPDPAEGGNNAKGAAAPSVDVRACRNSLFVVRDLFVSSRITYPSESYLSCKVMSEKVMSEDPAIEAVEKRERCSGRKTFSEENFFAEGVPPF

SEQ ID NO: 56131 - protein, 390 aa, Zea mays
  Coding DNA Sequence Number=SeqID_12756
MAMPVETAVCIARNVLLLLDAWVWTCVLAADGAARLLRYQARQGGCSKTQRWSDVSSSGGSSRELCSFKDALVSGSRRLPTPIQAPSHATTSSRAPEAVKEREKEKVGESLVVQNQSVGSQRDEFGWQVVERRKKTQRELLPYKTYGAYEAVWRIEARNEAAPPLPLAPFRESEDDQDHNEQDPHLRRRGNAGAAGDSRRPLQFRLGPRLPLGRAHDMHRSREEDPLPLRVLGIDCNNDTTGRHEALQLRVPGKGGDDETTRGHEMFEVLTLRAARKARHEEMVGSQEMQSTSCMGNEEDMAADEREIPIPEAVGQRAVENLNRFSSFRSSGPLGWIAPWTPQLDVSAGLLNSLGSSLPHQASRDMNYPPVESLGSIWPPLPQQISLFGL

SEQ ID NO: 56132 - protein, 50 aa, Zea mays
  Coding DNA Sequence Number=SeqID_12757
MVMSLVTNGNLEDLVVVEHVKLDLVVMDQGMVLCMSKQLQILHFVQDQQG

SEQ ID NO: 56133 - protein, 95 aa, Zea mays
  Coding DNA Sequence Number=SeqID_12758
MERCYKETPMSRILVWRLNKDKTKHILKHVKSLFMASHRQRNGEDAMRVKICGKRWTAELGQFNTADKYSTDHLNAAKLLQTTKISIADGTGVTI

SEQ ID NO: 56134 - protein, 54 aa, Zea mays
  Coding DNA Sequence Number=SeqID_12759
MEGSITAGQLHAPCVVVRLLCVSGLQMGCAGILWRDPCQAASSGDLTAGELTLM

SEQ ID NO: 56135 - protein, 134 aa, Zea mays
  Coding DNA Sequence Number=SeqID_12760
MSDLGMSTTSDVTKCKECGVLTSQNNTINETTDEQKFKTQKDAQPNQQTSDLGTCCCLFQKGNVTRMPSPKKKHMSVTLMDGLLLAHSFSLVVTSVPVNEKGNMEKVKKYLPEKLAISVDMKIITSVSVLRRVH

SEQ ID NO: 56136 - protein, 211 aa, Zea mays
  Coding DNA Sequence Number=SeqID_12761
MAPPVDVVGPCPRLGDVEAPPRSRSSLSSVAEVESEPLGRARRRPSAEARAESEPWGRAKRSSSSSGAEPESEPWVGRSGVRRLPGLSPSRSPGSGGAEFAVFRGLARVRALGRAERSGAVLLSGRSVEWRSDCGHFGSVDWRTRVRIKVSGHLCIKCPCDLVGWRGDLARVASWRRLGLGRAGSMFVAGGGLGRDGDPPGSAALARGWAR

SEQ ID NO: 56137 - protein, 248 aa, Zea mays
  Coding DNA Sequence Number=SeqID_12762
  Homolog annotation: Hit_ID=Q8W1D1; Match level="QueryCoverage=27%, HitCoverage=4%, E-value=3e-08, Identity=44%"; Hit description=Gag-pol
  Pfam annotation: Domain name=RVP_2; Domain location=1-114; Score=0.1; E_value=1e-06; Accession=PF08284.2; Description=Retroviral aspartyl protease
  Pfam annotation: Domain name=zf-CCHC; Domain location=189-206; Score =28.5; E_value=2.4e-05; Accession=PF00098.14; Description=Zinc knuckle
  Pfam module annotation: Pfam domain module=RVP_2::zf-CCHC; Domain location=1-114::189-206
MALLERVGRAGKRTGLALAAQFATKYGIFKCPLRSRKNFSTPERKMLVNYICPKVSVKINGIDFPADLLVIESMGKDVILGKNWLQRTKMMNPNGNEVNDANDNIPTLTTMNERNESPRYSMNGMKNNKRNRKMFGYMISPPQAKATKHMDTQTEESSQAQLHEIHTPNEPSPPVGQAKLTRKELKARGACYYCKNEGHIIRECPKKRLDRLEKKAAKHDLSNSSEDPPFYKYDDEGRLISIHFGAKK

SEQ ID NO: 56138 - protein, 76 aa, Zea mays
  Coding DNA Sequence Number=SeqID_12763
MSGVSFFPTRSTLNRSQLNGAISAASDCSDFAGRWGCIRRPSALPRCMHWQFLDGDKLPPWIRSSARAGASTASGS

SEQ ID NO: 56139 - protein, 142 aa, Zea mays
  Coding DNA Sequence Number=SeqID_12764
MKRASLCEGAKGSTKTNKKNMLGFKRKEQKGNRSVPWPFKNKIGFLTRPLTPFPDDEGAQGDTFDAQPEAHPAQQMPPPPPPPQQGQYWQPASRYFDPYFQQMHQGLQTHIDGQFQGMMSHVDDRFDHMQSTFDGPFSDLHD

SEQ ID NO: 56140 - protein, 230 aa, Zea mays
  Coding DNA Sequence Number=SeqID_12765
  Gene Ontology: Mol. function=ubiquitin thiolesterase activity; Cellular component=nucleus; Biological process=ubiquitin-dependent protein catabolic process
  Homolog annotation: Hit_ID=Q2QQM3; Match level="QueryCoverage=54%, HitCoverage=11%, E-value=3e-48, Identity=69%"; Hit description =Ubiquitin-specific protease 12, putative, expressed
MPSGSGMRRPIGAWPWLALASASVPWVSTATLLHHATDPCSASPYQQLPLVCLGLGLASALDLGRSSSCSRRRPPPPLLGGRLSHTHRSAGDEDPMTMMTPPPLEQQQGDEMLVPHQELPVAGPEPAPQPMEEPANTAETQPPEDPQTSRFTWTIESFSRLNTKKHYSDAFVVGGYKWRVLIFPKGNNVDHLSLYLDVADSGSLPYGWSRYAQFSLAVVNQVHPKYTIRK

SEQ ID NO: 56141 - protein, 157 aa, Zea mays
  Coding DNA Sequence Number=SeqID_12766
  Gene Ontology: Mol. function=transcription factor activity; Cellular component=nucleus; Biological process=regulation of transcription, DNA-dependent
  Homolog annotation: Hit_ID=Q6J832; Match level="QueryCoverage=38%, HitCoverage=25%, E-value=5e-09, Identity=55%"; Hit description =Ethylene-responsive element binding factor
MPLLPSLKLDLFHRVAAAGTGTGAAVVRFPFGSIPVTHLYYFFGQTAATAEAGCRVLKLASTNYFLKGNISQFSGFVGTDNQVQLKLFLFSAMSIPKQPFTFSTFICVFEAMSVDSSDAENPGLDDVDVANMHMEATDSQLIDALYFSLTVDRRECI

SEQ ID NO: 56142 - protein, 291 aa, Zea mays
  Coding DNA Sequence Number=SeqID_12767
MEDIVDAGAFWKVSKISDGANALGDLERIGEPRARVCAGQGGDTRGRTEGQRGSDREGHGSNGTNDGGDEGGGRRGGHPLVGVAWLHARACTGRRGEEGPPVLDLVRRAGEQRRPRRCGSRSVAAPNGRSTVRAGEVRVTATCPRGGDLPWTRWQRGSRRTAPPPTSSAIRAGVGGRRRRGTRRGRPGKGVTVAHVCLRGGDVHARAPTVVWRRLALARLLVAVAARARVLARGGVQARVLRRGGGREGGHATGVGRSGGGEEGEVPVAGMGVSPLGDMEQPPGNGGGGRT

SEQ ID NO: 56143 - protein, 450 aa, Zea mays
  Coding DNA Sequence Number=SeqID_12768
  Gene Ontology: Mol. function=ubiquitin thiolesterase activity; Cellular component=nucleus; Biological process=ubiquitin-dependent protein catabolic process
  Homolog annotation: Hit_ID=Q2QQM3; Match level="QueryCoverage=74%, HitCoverage=31%, E-value=1e-175, Identity=83%"; Hit description =Ubiquitin-specific protease 12, putative, expressed
MFVSFTGLTGPCAHSSALRSRVWHVLVQWEHLLTGEPLNNLRARFPSFQLADELFIEGGRDVMLEDGDIICFQKAPVPDGDAQVRYPDVPSFLEYVHNRQVVHFRCLDKPKDDDFSLELSKLHTYDDVVERVAHQLGLDDPSKIRLTSHNCYSQQPKPQPIRYRGVAHLLDMLVHYNQTSDILYYEVLDIPLPDLQRLKTLKVAFHHATKDEVVVHSIRLPRNSTISDVITDLKTKVELSNPDAELRLLEVFYHKIYKIFPPHEKIENINDQYWTLRAEEIPEEEKNLGPHDRLIHVYHFMKDPNQNQQIQNFGDPFLMVIREGETAAEVMERIQRKLRVPDDEFSKRRDVYGAWEQYLGLEHTDTTSKRSYTSNQNRHTYEKPLWEQWQRLYNGFGIILRAVEKLLNANTVHSKFGQKTFVVCTISATVTPHHGPPHLGVGPRRPHLET

SEQ ID NO: 56144 - protein, 95 aa, Zea mays
  Coding DNA Sequence Number=SeqID_12769
  Subcellular localization annotation: CTP_CleavageSite=53; ConfidenceScore=5.00e-01
MAQGHISLSKSKRYLKMKHKNRNSQTHSKISLQRFEMGEARDVREREWEVFFKLEMEFGSCSLLWGERSSRLSTNLTIRLTGRLTYRLTRVDPTG

SEQ ID NO: 56145 - protein, 38 aa, Zea mays
  Coding DNA Sequence Number=SeqID_12770
DIVVQVAMRIDGFGYDYGAGEDEAVEGDFQEFQDYDEF

SEQ ID NO: 56146 - protein, 134 aa, Zea mays
  Coding DNA Sequence Number=SeqID_12771
MGKSKKGRSSSHHSGDKRKREPTPPSKDFGDSEYSEEEFSSESEGSPVDTSPPASSDDSDDSQGLIAEVWTYIRAVERARLEGSDESEVSSDEEGGGGDGDDEGDDDGGGNGGGDGDGGRGDGKGGSGSSKASG

SEQ ID NO: 56147 - protein, 41 aa, Zea mays
  Coding DNA Sequence Number=SeqID_12772
MAAAARSQGRRLRVREGAGGGRLMGLMGQGGDKAESSLSGG

SEQ ID NO: 56148 - protein, 99 aa, Zea mays
  Coding DNA Sequence Number=SeqID_12773
MAYRWVDPEPFLPPGFSAMVVQHRETIVGTCSPVQVDPTGGCGNVSECPASRVKDACALRHLGYPRNIPIKRASTTKASSEGWRLRLRPNICPPRDQFD

SEQ ID NO: 56149 - protein, 275 aa, Zea mays
  Coding DNA Sequence Number=SeqID_12774
  Gene Ontology: Mol. function=cysteine-type endopeptidase activity; Cellular component=lysosome; Biological process=proteolysis
  Homolog annotation: Hit_ID=Q10716; Match level="QueryCoverage=34%, HitCoverage=25%, E-value=2e-43, Identity=87%"; Hit description =Cysteine proteinase 1 precursor
  Pfam annotation: Domain name=Peptidase_C1; Domain location=100-273; Score=-24.8; E_value=7.4e-10; Accession=PF00112.14; Description =Papain family cysteine protease
  Pfam annotation: Domain name=zf-C3HC4; Domain location=94-131; Score =2.5; E_value=0.048; Accession=PF00097.16; Description=Zinc finger, C3HC4 type (RING finger)
  Pfam module annotation: Pfam domain module=Peptidase_C1::zf-C3HC4; Domain location=100-273::94-131
  Subcellular localization annotation: CTP_CleavageSite=27; ConfidenceScore=5.08e-01
MVVIAYNGRSGGRPRPVVTPSRSGAVLSSEKAKIQPPSSLRVIQMMRPDAVERSEGWRFTDRHDTALQLHDADQPSFMAFADPRHVGPPPDHVCLGCHLRPASVVLLPCRHLSLCGECFAAGDAVMSCPMCLSLIDLINIVLDSHCNSSCVMERTFIAIRPDGVQRGRNFGVVSVDEGQKVANLIKHGPLAIGINAAYMQTYIEGMPCPYICGRHLDHVVLLVGYGAAGFAPIRLKDKPYWIIKNSWGMNWRENGYYKICRVPTFATSVVTPFMF

SEQ ID NO: 56150 - protein, 604 aa, Zea mays
  Coding DNA Sequence Number=SeqID_12775
MIVGAKAKTPPFARGLRRTRCTNDTYKYPRIVPLRGLINRAIAISYENPVYVTTPPRWINLHRRASSNIWRGGTKPAPAGAAKARELPPPGKRVADFATEISVDDYLVGKSAGGEIPALTAVKDEAGAVSRRLKEPLSQAADFTDRVASGALTAVVSAEVERLRAQHADAVREKSAADSKCRKLAKKVAALEGERTDLRRQLAEERREANEAFAKAQSAQAEANLARRAEASTRSEAERTRKQLMDSYHELGARTADFEVLDQEPELRCLEWLQEELLALPAIVEGFMSYASLVTCEGAMNALSREGCRHYEVFDQSDEDFEREIYKVEDLVVKEFVGALFDQMWGPHGREVVRERSDTARGQAARNEKVEDFGALNSAQPDSESNPAAAVSEAAPAPPPETVEGAPDAPAATAAGGGSSPTAAPRAEDPVKMVAEPAAEDPATAGSSQVQDFGPAHANATANFLAASTVDDGNESDESVSKFSDFGDSGSSVEWTEESSDEDLDYFAALDVAAAESSPRAVDAEVVPGPSAGRRRRRAVAKRRVSEADGGRLRVGRAGRQELLSLPAAASVGEGELRGLFAGEELRIMLFNYREMGIIPKVEP

SEQ ID NO: 56151 - protein, 44 aa, Zea mays
  Coding DNA Sequence Number=SeqID_12776
MTVGVSEALYAKTTQLVLLANQTPQPNSCMSRGRGVDSSHRVPP

SEQ ID NO: 56152 - protein, 177 aa, Zea mays
  Coding DNA Sequence Number=SeqID_12777
MEDVPLPDANQPDSFKWSKSFLSSEKSPTLLEPELEALSFAIPKSCPNDKFLDNVMSEDTQSMTSDLEDVDSSPSRPIMVDSDLRRSKRLRESKAGFRQGSCQKRNCLMCHHKFDGPPSLSAKVIRNLGAKFCNMSEEDLSDKKLKKKKNSLGCVGPKKPNKKDNNDKKEDNADEDK

SEQ ID NO: 56153 - protein, 434 aa, Zea mays
  Coding DNA Sequence Number=SeqID_12778
MTFVLNVTVGPCTGCLESLHWFSELIFSVFRDGPEKTCEAEGAHNRGAVFISLTAGCSGNEGAHNHGAVARSFVRWFAFFVLQPGLNLPPVVIHKDDYQPCGGENIRGRRAFTSLAEEANFGYAGSADSRCRQLPCVWLLGLDGFGGASGAASWCLVGAWLYVHRMGHGRAVRRRTGARTSSCVLRQPPPTGAEVAAVVGAKVVAVAGEAARCRGRRGRGPFRNGARAEVIATAGESSVQRWSPLLASRSELATTRPYWLDVSRLDTSVSEKIVNNSREATRRDLDLYTASAREHPRYGTRLSGYTGSEPPQETNVHSLAPNLRLSDLPTFVSGALNCKPGCSIRMSSCQTDGNCTGGLDKKYYLKNCKTNRPGLWGRTPPGWRTRLGPDPGFPSVFDEGALIFGCGHSCMNLSNVWTRGESRIAFGGRQASAP

SEQ ID NO: 56154 - protein, 119 aa, Zea mays
  Coding DNA Sequence Number=SeqID_12779
MKKGLQARMQQAEFSDGPSAIGPPAHRLPAFRLRRGVHATISSRVANNTQPHHADGSGAATWPEKTICSKASAVGPDPHGKVPDPCIYGLNLRATHNRVPGLWDKEYPDLNQDQTGVRS

SEQ ID NO: 56155 - protein, 765 aa, Zea mays
  Coding DNA Sequence Number=SeqID_12780
  Gene Ontology: Mol. function=protein kinase activity; Cellular component=integral to membrane; Biological process=recognition or rejection of self pollen
  Homolog annotation: Hit_ID=Q6K4X2; Match level="QueryCoverage=48%, HitCoverage=91%, E-value=1e-163, Identity=76%"; Hit description =Tyrosine-specific protein phosphatase-like
  Pfam annotation: Domain name=Peptidase_C12; Domain location=51-373; Score=114.0; E_value=4.6e-31; Accession=PF01088.12; Description =Ubiquitin carboxyl-terminal hydrolase, family 1
  Subcellular localization annotation: CTP_CleavageSite=17; ConfidenceScore=5.07e-01
MATIISGARSLHSLALRSRMLGEMTQLGPFNRNVQRRWRKPVDSARTRLEGRTMDHRLDKLMVQLRNLRLALALHEVISQQRNGYASLQLLSRWRHEVGLNIEVGAFLKKYPHVFQTYVHPVKRNHCCKITQKMSDLIAEEDAVVRENEVGVVQRLKKLLMLSVDGTLNMHALWLIRRELGLPDDYRSSILPNHRHDLILESPATLSLFSMDETLAVAKVDEWRKREYTEKWLAESETKYAFPINFPTGFKVQKGFREKLKNWQRLPYTKPYEKNDSHSIRNVERLEKRIVGVLHELLSLTIERMMPLERLSHFRRLYTMEVNLLEFFLKYPGIFYISTKGSTQTVILRESYSKGYLIEPNPVYIVRRKMLDLVLSGSRNVGECQQDSATWSAEEHGLGSSHGCQDNICQVDSAIPYWNMELEAIQLAALLTCFPEYLCSSIANYPSFDSDLLGWLLPSCVHSHFQTSMFSTAWRGVLEEKVPLIYSLLKGLALQLPDDVPDKNEIIRLRKVASSVGVGDKHDAEWVHSILADAGAANDNSWILLPYLCAAFMVSNIWNGAVYDVNIGGLSNNLHCLARCVSAVIGGSEYTRVEREQRINSLSNVHTDELQEAELPSRVSAEANIKSCMQIYVKLSAGIVLDSWNDTSRQHIVPKLTFQDQLCELSPYVPRSTLEAHIPYTILRSIYHQLYGGSLLASEPAEQSPRQSPLISLAHASPSARQMQNRPETTPRSHTFDPGYYSSSGSQHDDGYDADRRAGRLLRGA

SEQ ID NO: 56156 - protein, 1234 aa, Zea mays
  Coding DNA Sequence Number=SeqID_12781
  Gene Ontology: Mol. function=binding; Cellular component=TORC1 complex; Biological process=embryonic development ending in seed dormancy
  Homolog annotation: Hit_ID=Q6RUS5; Match level="QueryCoverage=98%, HitCoverage=99%, E-value=0.0, Identity=73%"; Hit description =Transducin/WD-40 repeat protein
  Pfam annotation: Domain name=HEAT; Domain location=524-556; Score =17.3; E_value=0.057; Accession=PF02985.13; Description=HEAT repeat
  Pfam annotation: Domain name=HEAT; Domain location=572-607; Score =12.6; E_value=0.36; Accession=PF02985.13; Description=HEAT repeat
  Pfam annotation: Domain name=WD40; Domain location=1005-1045; Score =3.5; E_value=12; Accession=PF00400.23; Description=WD domain, G-beta repeat
  Pfam annotation: Domain name=WD40; Domain location=1050-1089; Score =7.4; E_value=3.8; Accession=PF00400.23; Description=WD domain, G -beta repeat
  Pfam annotation: Domain name=WD40; Domain location=1142-1180; Score =21.9; E_value=0.0024; Accession=PF00400.23; Description=WD domain, G- beta repeat
  Pfam annotation: Domain name=WD40; Domain location=1190-1229; Score =3.7; E_value=11; Accession=PF00400.23; Description=WD domain, G-beta repeat
  Pfam annotation: Domain name=WD40; Domain location=951-994; Score =5.8; E_value=6; Accession=PF00400.23; Description=WD domain, G-beta repeat
  Pfam module annotation: Pfam domain module=HEAT::HEAT::WD40::WD40::WD4 0::WD40::WD40; Domain location=524-556::572-607::1005-1045::1050 -1089::1142-1180::1190-1229::951-994
MAYGMMKTGCVALVLCLNISVDPPDVIKISPCARMECWIDPFSMAPPKALESIGKTLHSQYERWQPKARYKLQLDPTVEEVKKLCNTCRKYARSERVLFHYNGHGVPKPTSNGEIWVFNKSYTQYIPLPITDLDSWLKTPSIYVFDCSASGIIVKAFLEMKVIMIYGLVFVFVPGLSNIHNDFCLLQRLDWSSSSSASSRKDCILLAACEAHQTLPQSAEFPADVFTACLTTPIKMALHWFCKRSLLRGSLDLSLIDQIPGRQNDRKTLLGELNWIFTAITDTIAWNVLPHGMASAMDAWDMAAEICLSKLPQLIADPNAEFQPSPFFTEQLTAFEVWLDHGSEDKKPPEQLPIVLQVLLSQSHRFRALVLLGRFLDMGPWAVDLALSVGIFPYVLKLLQTSAMELRQILVFIWTKILSLDKSCQVDLVKDGGHTYFVRFLDSLDAYPEQRAMAAFVLAVIVDGHRTGQEACMNAGLIDVCLRHLQPENPHDSQTEPLLLQWLCLCLGKLWEDFPDVQLLTLQTNTPEIVLCLLSEPQPEVRAAAVFALGTLLDTTSSNGADDDSDYDEKVKAEINVVRSLLQISSDASPLVRSEVAIALTRFALGHNKHLKSVAAEYWKPQSNSLLKSLPSLANINNPNNVYSPNNILQGSIGPVLRVGSDSSAAGRDGRMSTSSPIATSSIMHGSPQSDDSSQLSDSGLLLRENASNGGPGYTRSRPVDNVIYSQFISTMCSFAKDPYPRIATIGRRALSLIGVEQVVMKNTRFNSGGAHRGETSASNFGMARSSSWLDMNSGNNLIKFRTPPVSPPQHDFLPGLRRVCSMEFGQHPISSPDGLAVPLLSSAAATSNAELSILPQSTIYNWSCGHFSRPLLIGSDDNEEANARREERERLALDYIAKCQRSSCKMTNQIASWDTRFELGTKTALLLPFSPIVVAADENEQIRVWNYDDALPVNSYQNHNLSDRGLSKLLLINELDESLLLAASSDGNVRVWKNFTQKGGQKLVTAFSSVQGHRTAGRSIVIDWQQQSGYLYASGDMSSILLWDLDKEQQLSTIQSSGDSAISSLSASQVCSGHFAAGFAAGSVRIYDIRSPDRVVYTARPHAPRTEKVVGIGFQPGFDPYKIVSASQAGDIQFLDVRRSAEPYLTIEAHRGSLTALAVHRHAPVVASGSAKQMIKVFSLEGEQLTIIRYQPSFMGQRIGTVNCLSFHPYKSLLSAGAGDNALVSIYAEENYK

SEQ ID NO: 56157 - protein, 321 aa, Zea mays
  Coding DNA Sequence Number=SeqID_12782
  Gene Ontology: Mol. function=chlorophyllide a oxygenase activity; Cellular component=chloroplast; Biological process=chlorophyll biosynthetic process
  Homolog annotation: Hit_ID=Q8S7E1; Match level="QueryCoverage=57%, HitCoverage=58%, E-value=9e-38, Identity=63%"; Hit description =Chlorophyllide a oxygenase, chloroplast precursor
  Pfam annotation: Domain name=Rieske; Domain location=126-227; Score =71.6; E_value=2.7e-18; Accession=PF00355.17; Description=Rieske [2Fe- 2S] domain
MSATCDLLKSKVGLLEFLQKLNGIQKSVGQNGAVEPDTSWDIITSVDLWENGGSDDGYVLVKHEDVVDGMTSFMAACLVSIKKTKDLPPDQLQKALRKTFSAEKKKGKIRKAWDGTKVIYNVHGAPLLLVRTSKNAFLESLKGEMGIATAIGEQWVIFRGKDERPGCVQNTCAHRACSLHLGSMNEGRIQCPYHGWEYSTDGKCEKMPSTKMLNVPPSGFIVHAEIVMELPVEHVLLLDNLLDLAHAPFTHTSTFAKGLECSKNEDLRLFLGQQERMINGANVWNWPVSYDKLGVRYRLWRDTVERGSKRLPFSNQAESGS

SEQ ID NO: 56158 - protein, 421 aa, Zea mays
  Coding DNA Sequence Number=SeqID_12783
  Homolog annotation: Hit_ID=Q2QQ41; Match level="QueryCoverage=41%, HitCoverage=60%, E-value=2e-11, Identity=27%"; Hit description =Putative uncharacterized protein
  Subcellular localization annotation: CTP_CleavageSite=47; ConfidenceScore=5.24e-01
MEGCRASNARGWKVAAPASSARIAPALLATNDRGWKVAAPNRRSRKSASAAKVLAERRPTTSSTQINNLNKSHAWIDAENAGLFFTCSNPDNVPKEVPSDLEELYLQRQNPSYLYGISRLYILALPPFVLGYKVYMHSSGYKVLMEPVVLNRERAAADRLKRMPILFDDYRDEDFYGLPRKYSIVARVEVKFPIEPRFRDRQHFVLSDINGAKIEAITYMYETVKHFDNLLHEKHVYKMHNVKFSLHPGEFNFRHLNGPMELCLDQQTIVEPYTVPIQMAPFPKQILLNLADIAELLNRTLVDIMAVVVHLDTIHRTMWGPFRKIVIMDARGYLHIIKVWGDLLNKNALRWGLAKEDYGIIIGTMFRRFRRQECLESSDHTAIHFNPFHHNTHHFRPIQKALVALNNRQFAVTFLEEERRR

SEQ ID NO: 56159 - protein, 170 aa, Zea mays
  Coding DNA Sequence Number=SeqID_12784
MPRGHIVRWLGSRRHVLSAINAVAARLQWPDVRLLPLAHVMGHKPCGSSGSLPWWGAWCKPRTRASTGPLPGQGPGISCPRVWDPVVNRPDLTRKGPGSVPEVRSSCTGSGAFHVAGPDLLRTSGAHPFPWSHGDPKAADVARRGYPCFKVPTVAPGLTSGEGASLQVGP

SEQ ID NO: 56160 - protein, 238 aa, Zea mays
  Coding DNA Sequence Number=SeqID_12785
MGNPVVRSRVINTDSWRARCPASHRGSIREVIFSDGTNCGGKLALPNLSKNYSYKLQGAKTSTNLCPTQDCAHMKLPQALDLKGKLEIEFGEKEKKIENKKERKEKKKKKVRGLCPEASLSCRGGARLSAWARETISGQQFLVGVACRRRSRRAVDRGLCGPKPQYVSGFEFPTYWLLCTIVEFSEWVVRGGRLAVASVFSVAGIGGVVVLCDRVKKTGAHPSDFALAAEISWANPLG

SEQ ID NO: 56161 - protein, 331 aa, Zea mays
  Coding DNA Sequence Number=SeqID_12786
  Gene Ontology: Mol. function=sequence-specific DNA binding; Cellular component=nucleus; Biological process=regulation of transcription, DNA-dependent
  Homolog annotation: Hit_ID=Q6VBA4; Match level="QueryCoverage=100%, HitCoverage=100%, E-value=3e-87, Identity=53%"; Hit description=Heat shock factor RHSF13
  Pfam annotation: Domain name=HSF_DNA-bind; Domain location=25-203; Score=153.0; E_value=8.4e-43; Accession=PF00447.8; Description=HSF -type DNA-binding
MDGLHTELALGLLECGVVGSGGETAPFVAKTYQMVCDSRTDALVRWGRGNNSFVVADPAGFSRLLLPCFFKHSNFSSFVRQLNTYGFRKVHPDRWEFAHESFLRGQTHLLPRIVRRKKRGGGGGACSSGGDAPQAGCCISTMGEDHRPEADPDEKQEADAEAALLEEVQRLRQEQTAIGEELAQMSRRLQATERRPDQLMSFLDRLAEDPDGVTRNLVEQAAEKKRRRMQLASQSQPARPPLPPAPPPPVLHPLLALGGAAAKGLDGWQWAELQKPSVVLPAFDFDPAASCCGAQHAPNLGGAGIIGMGLTADETTVETPFPFCLLGQGFF

SEQ ID NO: 56162 - protein, 463 aa, Zea mays
  Coding DNA Sequence Number=SeqID_12787
  Gene Ontology: Mol. function=protein binding; Cellular component =membrane coat; Biological process=intracellular protein transport
  Homolog annotation: Hit_ID=Q5ZEA1; Match level="QueryCoverage=65%, HitCoverage=44%, E-value=2e-80, Identity=83%"; Hit description=Beta adaptin-like
MGSEGRESGGLALGDKGSGGRWGGGSVGGRGHKGRGAEGETWAGDEGSITDEADASWTSITPNRAVSADRWLRINVWESYICRRNAMKEFCDTGDVLVAAAAPEVVGMVVVTGETEGWGGSSDILGSVRSSDTRLLGTGLRSDPSYVKKLKLEMLTAIANESNTYEIVTELCEYAGNVDVPIARESIRAVGKIALQQYDVNAIVDRLLQFLEMDKDYVTAETLVLVKDLLRKYPQWSHDCIAVVGNISSKNIQEPKGKAALIWMLGEYSQDMHDAPYILENLVENWDEEHSPEPSYMFTDREHREPFEYSEDLTSLTVGAEDPENVISAQRYQENDNDLLLSTSDKEDNGTRASNGSSTSAYNAPSDLISPSLISSQTPAETSLVNTGGPTHSSQSNFSLDDLLGIGVTEAPAPTPPALTLNSKPVLDPGTFQRKWGQLALALSQVTNKDVSSILIHIKGLLV

SEQ ID NO: 56163 - protein, 131 aa, Zea mays
  Coding DNA Sequence Number=SeqID_12788
MWWGQVLLLAQSSRSRLGRVMAWSHIQLFYHATKNSHMGTASLYSSKGYPSFRKFKEESLVAVVKVTGGVFSETQVILELPRLVSILDPNLIPQFVDEVIRDHLYELQFWVEENMNKDNPKPMDMDDMDFG

SEQ ID NO: 56164 - protein, 94 aa, Zea mays
  Coding DNA Sequence Number=SeqID_12789
  Subcellular localization annotation: CTP_CleavageSite=55; ConfidenceScore=5.73e-01
MGTAAAAQPLGSRRCACLVEQQSSSCFGNNSRCRVPLRICRRARASGSSRHAPPRGATVVRTPRGTVIARASGSSLRAPLGNHLRSYVGVRHQN

SEQ ID NO: 56165 - protein, 266 aa, Zea mays
  Coding DNA Sequence Number=SeqID_12790
  Homolog annotation: Hit_ID=Q9FWC4; Match level="QueryCoverage=27%, HitCoverage=16%, E-value=5e-17, Identity=65%"; Hit description =Putative uncharacterized protein OSJNBb0018B10.16
  Subcellular localization annotation: CTP_CleavageSite=59; ConfidenceScore=5.62e-01
MEPPIPCRRRPHSASANLFATKHGTWPAPHSRSNSATKSVASAADGGSSSMRLALSACPARSRRERERDIMPLATQAPRRKVPARRDLPLWSLIVADLESQTGIAQRRCTNSSTSLNLFICCTFYEDPKFVGPKLQLAIAVREKDLLVGTFRLGAWVARGMMSRSLSLLDLAGQADSANRMLELPPSAVEAIDFVAEFECECGAGHVPCFVAKRFADALCGRGRQGMGGSMRTGGGEGSTSRGRRWHGLVPCARERGAWRGRGGMA

SEQ ID NO: 56166 - protein, 399 aa, Zea mays
  Coding DNA Sequence Number=SeqID_12791
  Gene Ontology: Mol. function=nucleoside-triphosphatase activity; Cellular component=membrane; Biological process=defense response
  Homolog annotation: Hit_ID=A2Z4T1; Match level="QueryCoverage=94%, HitCoverage=51%, E-value=1e-111, Identity=58%"; Hit description =Putative uncharacterized protein
  Pfam annotation: Domain name=NB-ARC; Domain location=157-398; Score= -65.5; E_value=4.3e-06; Accession=PF00931.13; Description=NB-ARC domain
MNTLLGKLGNLLAQEYAMLRGVRGDIQYINDELASMKAFLLDLARDNQDNRRKDWMKQIREMAYDCEDCIDDFAHRLPKDSSNLLNTKCWPRWMATLIYDLTTCWPRREIACNIAELKVRAQLIAERRVRYGVKEPDSSGSMPADAPPENIAEDQLARRDLTIKEPVGMGHVMADLERWVKHDEQGAGGQRAVASIVGFGGVGKTTVAMALYKKVMKDFDCRAWVTVSQNYDIEAVLREILKQINPDYMHQDGGTAATISEKTKTNRTASASIACKLLNRALNHRTGHTHGGGTAGSSKKNDTSKAVMEHLKGKRYLILVDDIWSAETWKRISKSLPDNDKGSRIIVTSRLRAVGATCCQNGKDHLCAVDFLRDEDAGHSVEVFLNRLRATTITWSRKL

SEQ ID NO: 56167 - protein, 945 aa, Zea mays
  Coding DNA Sequence Number=SeqID_12792
  Pfam annotation: Domain name=HR1; Domain location=508-578; Score=4.5; E_value=0.078; Accession=PF02185.7; Description=Hr1 repeat
MEVVELVPCARNKWGNWHEFWFYVAEGTVEDHPGLPVAEMCSHYYSAYPQFEVAEEDADEGALRCAAGLSSGRDLVEEFVAYGVWPLAHGWALGEVCPRQMPSRGEMLVRSPAFALDLHSRDPAAFVREAEDGVVRIVGRYVPKTEGQHSWDIRGSNDRLNRVFELNRLPYRGYPGQDDVDRRGKKPATETEDDPAPAAAPSSKKRKLGISTGGLGVSDGFARELMRTCAAPGGRMSSPELRESSARMLRVTRGWWPKNVPIPRAAGEDFFTSRMVHDWRVFPYGRNIAAVVSAVMDKDRQGAAQKRQAIVRLHEARPKRSRGTAKAAAPGGSQPTLAVKSAAPGSSRVSEAVKAAAAGGTKSVPAGAAKARELPPSGKRVADFATDISVDDYLVGSGEGQLVVVPPAVATAAAAVVPRAKGSALGAGGEIPALTTVRDEAGAVSRRLKEALSQAADFADRAASGALTTVVFVEVERLRAQHADAVREKSAADSKCCKLADKVAALEGERTDLRRQLAEERKEANEAIAKAQSAQAEANLARAEGSLARQRAEELEERLNALQTRVERVEASTRSEAERTHKQLMDSYHELGARTADFEVPDREPGLRCLEWLQGELLALPTIVEGFMSYASLVTCEGAMNALSREGCRHYEVFDQADEDFEREIYKVEDPVVKESAGALFDRMWGPHGREVVRERSETARGQAARNEKVEDFGALNSAQPDSESNPVAAVTEAAPTPPPETVEGTPEAPASTAAGSGSSPTAAPRAEDHVKMVAEPAAEDPATAGSSQVQDFGPAHATATANFLAASTVDDGNELDESASKFSDFGDSGTSVEWTEESSDEDLDYFAALDVAAAEASPRAVDAEVVPGPSVGRRRRRAVAKRRVSEADDGPLRVGRVGRQELLSLPAAASAGEEELQSLFAGEEVRIMLFNYREMGIIPKVELM

SEQ ID NO: 56168 - protein, 124 aa, Zea mays
  Coding DNA Sequence Number=SeqID_12793
  Gene Ontology: Mol. function=catalytic activity
  Homolog annotation: Hit_ID=A2Y3P0; Match level="QueryCoverage=65%, HitCoverage=23%, E-value=2e-20, Identity=63%"; Hit description =Putative uncharacterized protein
MGQIARGPPFWTRSQDETTLSRVFVRRRMRRREALVLASLIDDVKKLGDCNFDLWKQSHVTACAAVYNKLRRSRRLDAVQSGCTALSIIKQGDLMVVANIGDSRDVLSAAFDDSAITPSSSSST

SEQ ID NO: 56169 - protein, 203 aa, Zea mays
  Coding DNA Sequence Number=SeqID_12794
  Gene Ontology: Mol. function=sugar binding
  Homolog annotation: Hit_ID=A9PGH1; Match level="QueryCoverage=84%, HitCoverage=42%, E-value=3e-13, Identity=33%"; Hit description =Putative uncharacterized protein
MAQSVKILCKDGFNLYVTIRGNKAVLAPEDPDDEMQYDHTLYVHIFCLAMYALNLEEWFKDYSRVSSVTDDNGQRVFALVNKETQQAMVNRRDEQEVQLVPYYKDDDRVDISMLWTELPEDHGDGFHQIAALKNTYEALDGLGGNCKEGTIVGIDPTHYSYLGTVNKNQLWKIVDKGTARRLTKELGLGGARLKKLAPISLRN

SEQ ID NO: 56170 - protein, 280 aa, Zea mays
  Coding DNA Sequence Number=SeqID_12795
  Gene Ontology: Mol. function=phospholipase D activity; Cellular component=membrane; Biological process=phosphatidylcholine metabolic process
  Homolog annotation: Hit_ID=Q43270; Match level="QueryCoverage=31%, HitCoverage=10%, E-value=5e-25, Identity=68%"; Hit description =Phospholipase D alpha 1
MVDSLLSSRVRTGTDRVDGMEDAAKVFDEMLTKGEEAPSVVMYNALINSYCTGANMEGLCADKTQQLVDITDWIVDTEIILLRDNNRPKPGGNVTFGELLKSSVLTEGVRVLMLVWNARTSVGLFKKDGLLAAHDEEPANYFQGHDCVVDFELKLEECQLKQYQWEQEQMASMMEYIARFGPDSAKLVRGIKQPWPPPRAVPPQLDYSDDEAYVGSAWTRLYPLTKKRAKPAVPLGANYRLIDITVSSCLNSNIIGLMFLGMFPVVGRDPVDEFPYMNLP

SEQ ID NO: 56171 - protein, 261 aa, Zea mays
  Coding DNA Sequence Number=SeqID_12796
MPRKANCCCPARMQHSVLCPRFRGEDGSEDLLVRFGAACARWCGVGGQADAVVGADVVEAGESFSAVEAVSAAYGPTSGSLALMSGSRPLSGDANESLSVAASVLGPWLLLQRSLASRPELVAPQALRWLRLQGGRSSRLLGPDSWRRHWRRWPGRGADVILRSLGPPTVLPSEARSDFAEGGVDAEGAAAPPPSTSETTGSYLDLFVGNRIVCPSESYFSRKVTSEDSAIDIVEKARKIVSAERFPTLRLVRSAESLIRA

SEQ ID NO: 56172 - protein, 231 aa, Zea mays
  Coding DNA Sequence Number=SeqID_12797
  Gene Ontology: Mol. function=phosphoenolpyruvate carboxylase activity; Cellular component=cytoplasm; Biological process=carbon utilization by fixation of carbon dioxide
  Homolog annotation: Hit_ID=P04711; Match level="QueryCoverage=100%, HitCoverage=22%, E-value=1e-109, Identity=90%"; Hit description =Phosphoenolpyruvate carboxylase 1
MASTKAPGPGEKHHSIDAQLHQLVPGKVSEDDKLIEYDALLVDRFLNILQDLHGPSLREFVQECYEVSADYEGKGDTTKLGELGAKLTGLAPADAILVASSILHMLNLANVAEEKIEWGPVPPLSSTSVRPWHRSRNSKLKKGGFADEGSATTESDIEETLKRLVSEVGKSPEEVFEALKNQTVDLVFTAHPTQSARRLLQQKNARIRNCLTQLNAKDITDDDKQELDEAL

SEQ ID NO: 56173 - protein, 157 aa, Zea mays
  Coding DNA Sequence Number=SeqID_12798
MEEEQEEALLECLRHGRTKLGRVRDREPWRKSRGRSGTLRQGQRKVLDTHGSRKAEQRARREGQRPWKELAAAVREREDGVGRKGAGQVGCHLKRRSLQPLVDMGGMLQSSAYVSLLAGDGRTTLDAQFWHFLFGFGPGSLQKICSLMYTLQIVYRD

SEQ ID NO: 56174 - protein, 373 aa, Zea mays
  Coding DNA Sequence Number=SeqID_12799
MAKERSDPPRDRRRHIYVSYGSSEIRSWYRVGCGATGCCPDCGGGTSPTAAGGAKGASQDPWSAFCASGEISSIAVAKDVVDSVSHQLRHASQQLKHAADFADHVASGALTLEFAAEIERLWAQHTDAVRQKSDAENKSRRLTERLAAAKAEKGGLRRQLVEERRDANKAIADAQAAQAEAKLVREEASLARQRAEELEARLNSLRNCMDKTEASTRGGRMCSSWTRTGSWGELGVLPTIVTGLMSFASLVTCEGAVNALSREGCGHFEVFDQSNDGFKHEIFQVEIECGSGKNVGSAGALFDRMWGPHGREMVWERSDRAMDQMAHDEEVEDLGNLDGTLPEASGWSWRRRPMRPRAPRRPPRRLELAKTPR

SEQ ID NO: 56175 - protein, 195 aa, Zea mays
  Coding DNA Sequence Number=SeqID_12800
  Gene Ontology: Mol. function=nucleotide binding; Biological process =defense response
  Homolog annotation: Hit_ID=A2YLY4; Match level="QueryCoverage=88%, HitCoverage=17%, E-value=1e-11, Identity=27%"; Hit description =Putative uncharacterized protein
MAPVAIGEWMASACIAKMVSKVCSYLEDQYEYQRDDAKDKLTKLKNNLWKIPFVLDKASSLQTKDPSMKSWQGSIKDAAYQAVDVLDLFDYRFFEAKAEDIEKVLAESSDYATVNSSSSATTNTTASTSSSSTVKRSVRVLKRVLFSDEDLNKLIAILEKFDKISSEMQTFLELVNPRNKKPGKALQWRRTTSML

SEQ ID NO: 56176 - protein, 106 aa, Zea mays
  Coding DNA Sequence Number=SeqID_12801
MAVWSGRVAAREWGAMERRVELLHLWTGSRLRCMEEEQEGRCWNVWRHGRTKLGRVRDREPWRKSRGRSGTLRQGQRKVLDTMGAGKPSRELVGRASGHGRNLLLP

SEQ ID NO: 56177 - protein, 298 aa, Zea mays
  Coding DNA Sequence Number=SeqID_12802
MNSPTPASGGDTRFSSDFLSHDGFPSILWEVLNSVGYPTPPLYTVQLYEEHRVPHCRVWLTLEAHPLQPGWHSLDSDTIGFRADDTTEAVAMKTLTTFCGYHPLEMVMHPLGRFPAEKKDDPMWCNRVSHVKDVWAMYPDLVGRENVTLRNKPRQNPHDDIAVSCAMPAGTCCAESTRMERTRPGRVRFARQPLRNPRHYKSVVPLLPPSARQCTMNQAGEALHATGKIIVASPVRNCALRYRNHVPHPSNQSSGIGVVPRRAPAMVPLLCVLDLIRALDPSSGGSGWLVPPSHHRFC

SEQ ID NO: 56178 - protein, 42 aa, Zea mays
  Coding DNA Sequence Number=SeqID_12803
MAGPVPLPCYRTRGWGLYQLLRPSRNFWSHRHAPWKSFSVKI

SEQ ID NO: 56179 - protein, 171 aa, Zea mays
  Coding DNA Sequence Number=SeqID_12804
MSGKVTYQETMLGAAWHDMRGLWLAGRRETVAEANSDLRRGGVKRGPFSWRSRLPQSILDIFVTNDLRKGITIKVRTCEERKRLRIRVSRRKGDWPPGTSNCITFESQRIWGASSGDMGGSWGRGRGLTARGAHTMSAAVAGKGLGLTGKAREPARAGVHEHAMALTGRSH

SEQ ID NO: 56180 - protein, 262 aa, Zea mays
  Coding DNA Sequence Number=SeqID_12805
MSFVDGSYQEQEQQDSSPRLSGRWSLGGRLPLYLSQRCPLHHHRAFRMLEETLMETEMTTTLVAVRATARSSRRSKSRRDGSLDPSLVTPLMGVTSMTLSIPCCVGPSTDTLGPSKAFSEHYSITERDTAEAAMQDAARRSLSQYCSLFSGVVDGLDLKYYPRRSTGSAGGVIASLVGEGNPRLNNMVNLAAVLNTVLDHALDELGKVRAEVAELRAECAARHYLDGGSPTPVGIQHPYRSPPRGRFDYGTPDYRTQIDLDP

SEQ ID NO: 56181 - protein, 66 aa, Zea mays
  Coding DNA Sequence Number=SeqID_12806
METRALLFCLGIREKTEREKDLNMLDSDCRRTPTCDGHHGTSALVAQGVTLPQDRDQPIGRWCIGC

SEQ ID NO: 56182 - protein, 83 aa, Zea mays
  Coding DNA Sequence Number=SeqID_12807
MSIILDHGDPLHSVLLRIQGEDRKGKGFEHAGFRTAEEHQLVTVTTDECPSGQGVTLHKIVTAIGGGVSVAKAQRLWKAVVGP

SEQ ID NO: 56183 - protein, 124 aa, Zea mays
  Coding DNA Sequence Number=SeqID_12808
MDECMCACNRIENDPVEEPEELAGEAPEQQSVGGDGYEIDGFGYDYGTGKWYSFRLERVVSIATTAQEKMKPWKETSRSSKTTTSSRRGLAATPSRLLVKAAFIYVSFPHFDFYCKDYVDVSDV

SEQ ID NO: 56184 - protein, 411 aa, Zea mays
  Coding DNA Sequence Number=SeqID_12809
  Gene Ontology: Mol. function=protein serine/threonine kinase activity; Cellular component=plasma membrane; Biological process =protein amino acid phosphorylation
  Homolog annotation: Hit_ID=A9NWM8; Match level="QueryCoverage=28%, HitCoverage=22%, E-value=1e-46, Identity=72%"; Hit description =Putative uncharacterized protein
  Pfam annotation: Domain name=Pkinase; Domain location=148-411; Score=- 11.1; E_value=5.9e-08; Accession=PF00069.16; Description=Protein kinase domain
MDALNFDYHDYEKLDKGVEGVKRKRVVSILSRQAARMVKEDEKFSKKTKSTPESKATVSKKRKAEALEPKVTEVTEETPSTPPTTEIAEILKLKQHYSRFRGGQDLGQSSSEELMLDDPFPLSAYTMVTMGLLKLKEEDNAEERDFAVRDVQIGGTSSVQMALERSVGYSGRVEAARATLDQVRVEDIDTNVVGLKELLFPLIEIGKRLLALAGWEEPCKSYVFLLCFLYMAYRYCFLNFIFSTREEHSPMKIIDFGLSDFIRPVFLAADQCPIGYSLKMVELELLRFLCERIVKREKVKKFLFSTREGHSPMKIIDFGLSDFIRPDERLNDIVGSAYYVAPEVLHRSYSTEADMWSIGVITYILLCVLRADPNFDNSPWQSVSPQAKDFVKRLLNKDYRKRMTAAQALYS

SEQ ID NO: 56185 - protein, 219 aa, Zea mays
  Coding DNA Sequence Number=SeqID_12810
SSAIILTVADRIQGGFCGRTTGERGERAPSRGRGNWGAFRVADVGAELTGAKGAAELQRRRETELGTAGLWRRRSACAQRGGKRVYWAQMGGEGEGKWGSGHKWPRARWGESHARRGRGEGGREQLGGGYAGTTGLTSRARNAEREKKAGAGAREAGLTGWAHGQRESEGAGARGKAAAPTGGAGRAVREGGGKVLQFVAAFHLTGACSANIKEMVEML

SEQ ID NO: 56186 - protein, 129 aa, Zea mays
  Coding DNA Sequence Number=SeqID_12811
MTGDKQRQKLKQKPSSKISNTYIKKVNKKDATPYLIKKKKNGKVIAIKANKQANKGKGAKRIWVPKEIISTMKSTKKVWIPKGKHVEPLGISARFRKEVLDRISAEKRANTVELMNKMPNRLQVPSESH

SEQ ID NO: 56187 - protein, 28 aa, Zea mays
  Coding DNA Sequence Number=SeqID_12812
MGPLLQRKLRMQEDSEGYAYELQHGGLV

SEQ ID NO: 56188 - protein, 350 aa, Zea mays
  Coding DNA Sequence Number=SeqID_12813
  Homolog annotation: Hit_ID=A3C4M6; Match level="QueryCoverage=32%, HitCoverage=20%, E-value=4e-18, Identity=48%"; Hit description =Putative uncharacterized protein
  Pfam annotation: Domain name=Nodulin-like; Domain location=34-147; Score=-110.7; E_value=0.00019; Accession=PF06813.4; Description =Nodulin-like
MAGLTGGSREDTDYSTHPPLIVTPRSRASATDPCRDSPPRRITCIRNFRWSRGPISGLLKGYVGLSTAIFIDTCFALFADDPASFLVMLVVVPAAVCALAMVFLREGTAAADEEDDGRCFARTAPSRRDRQRTVEGSDARLKWAAGPRRGRSGAERRQGDARIAPEQAPRPCPARPAPSSHGLATTQPPMEPAQLCATQTPRDSDRPRRAQLPTPGADRTSAPVQRHARADRRARQPSRDTAPNCTPSDQRPKPSRRRRPPRVRFPSLMEFNASVTPSHFAGVHRCSSPEFDHAIAVLPAVCGDSPELVFTVRVSPPEFHPRSTTIAPVPMPVEPSLLVDIHPCAGTKTQ

SEQ ID NO: 56189 - protein, 152 aa, Zea mays
  Coding DNA Sequence Number=SeqID_12814
MGKNNKRKREPTPPSEEFGDSEYSEEEFSSESEGSLAPIPLRESSDDSDDSQGLAAEVWTYIRAVERSGLEGSDESEYSSDEKDSDGGGEDEDDDDDDGGGGGDGDGDGSGKSGKSGGKDGDGGGSRGSNRGGSSRGSTRGGSGGSSNRASG

SEQ ID NO: 56190 - protein, 1015 aa, Zea mays
  Coding DNA Sequence Number=SeqID_12815
  Gene Ontology: Mol. function=cysteine-type peptidase activity; Biological process=proteolysis
  Homolog annotation: Hit_ID=Q8S456; Match level="QueryCoverage=14%, HitCoverage=18%, E-value=2e-11, Identity=32%"; Hit description =Putative uncharacterized protein 163K15.6
  Pfam annotation: Domain name=TolA; Domain location=489-823; Score= -117.8; E_value=0.0024; Accession=PF06519.2; Description=TolA protein
FFIMDQDQNVSGQQGAHAVRRSPRVENKRKQLDKNELKERKKRLRLKVPPIQDAESDDEKDTEFVPGGDGSGDDNVGIVGGDENKDARALRDELGEQICGKSYRRISGINISVITDRLQKRTLNGELGLRAFFMAAFQCLLFSNTDTRIRIDDVKYTQDIQNMGNKNWCRAVEDKLSIAARLYRKDFAEKGINAPISGCGIFVAMLYVDNLQHGLDTSPFSIPRCAFLDSKMIDAIANMDLRGDVPPGTTEFGHLRLRSITDTCYGVPIGALAILHAPVPAPAPVAVPNPTAAPNPVAAASVPVATAAPTGTSADKAVKYSTISRDLMAKAHHECYTGIQKLIADAIVEKRAAKERRRKVKNDPRAGAGAGTSSIAPEDQSRGGDGEEIIRSPVAIDPRAGAGSGTTSNVPEDQPGGGDSEEIQLDCSGGDLDDSLDFTRTPSCGDDIDLEEGNLNRTPPDLRGSIRSIDDILQMMYSPEHFASIDGESPPNSQPTRAPRIAVRKRKASSNPPGNDQRPVGPPETEEEPLSRDTGMQHPTAQDHITYSRRSDRSIQVANTQKAEAEKKKAEIEMKNAKAEEAEKRKAEAEQADKKKAEEAENKRKAEAEVAEIKRKAAAEEAEKKKEVEAENKRKAEAEVAEIKRKAAAEEAEKKKEEEAEDKRKAEAEEAEIKRKAEAEEAEIKRKAEAEEAEIKRMAAAEEVVKKKADAEKKVDADEKRIQVAIQKQLKDNIKALKKPVPAAKLKKMFQLQMSKEYAEQRQQYEDRLNMLRQEAKAEIDSLEKSIDGQAGPSSSFDDIQFPAESDDDINNLTQPIRLSQDEVSVGQADFSEFQRMIFKRLGDRVLKKPREYISPFKIPRNRPEIPLAKAVALRRKIASDPELKRRILLEFGLLVGLTGEEILTYFSNDTLAFQKVSNLKLPRVSKWRRSFIDVPKQAGQSDCLFFVWKYMEYYDGDKMTKEINPFKGLIYRCELLHYEIFHPLNQAEIPGSLDKFRIGGRPLPIEWDSSQSNN

SEQ ID NO: 56191 - protein, 106 aa, Zea mays
  Coding DNA Sequence Number=SeqID_12816
MTLLTLSLGRNSPHSSEITTSLLGLMKIKKKEFLSIKQGDIYHGMLLMRWLMLRESKSTSLKDPMGHYNMHWLLIPSHHFQRLLDKALGIEHKRVQLGDMKRKAIT

SEQ ID NO: 56192 - protein, 212 aa, Zea mays
  Coding DNA Sequence Number=SeqID_12817
MSFTTARRHSASRARCEYVALLRVSGCCADELWHGGHEFWRGTVGELRRRGFGKERGREKRASLSREKEGLGWDFIEKERGRAEVVAMNGQGKNKRMAVNSITREETDGAFGASLGRRVAASDPSSEVAWGGSVAARPGRRRARRSVDPGRGRASGVGSARDRLEPLQARGREESRGGERNGRGEGERSKGGGIGAAAAARKAWGTRRLAPR

SEQ ID NO: 56193 - protein, 93 aa, Zea mays
  Coding DNA Sequence Number=SeqID_12818
MTHMSAPSPELGCAEGWMVNTRKGGGIDLPANNRHRRIVSQPQPEMNPLPNPPPAGTDPVAAAQMKLLQQMANTMTEMHAQMRQERQEMRQER

SEQ ID NO: 56194 - protein, 157 aa, Zea mays
  Coding DNA Sequence Number=SeqID_12819
MTGPVEPPPRAVEPPPDNPGDLTASLTSKLQMARLRHNAQKSAIPFLLSRLAEHPLCRPVTGQSSHLERLHYRLHEEQERRRQELEQQGSSSSLQQEVESVRSCSPMPPLEAPPAPPLGVPATGVAVGGDPDEGGDDNSSSHSTDLSEEQEPEGWVA

SEQ ID NO: 56195 - protein, 167 aa, Zea mays
  Coding DNA Sequence Number=SeqID_12820
MARCMRFMTPWQKGNMTCGYRVQPLQSVKLSLARTMVDKSHFLLDQREALEHSAGDHLTTKSEATKAHARVASFQDAHNTLVDASAIQGKFDAAEGSFVEAQSRLVQLEKERHLLSKMGYCQVFAIATSHFEDGIELEALSEGYCDALNDSDLISMVRAAESFARKL

SEQ ID NO: 56196 - protein, 58 aa, Zea mays
  Coding DNA Sequence Number=SeqID_12821
MARVACTLRGKRPDGGVSVLSSYDRSTTLLKSLSIDAIQKLEINGLEVWLSVNPGTEF

SEQ ID NO: 56197 - protein, 462 aa, Zea mays
  Coding DNA Sequence Number=SeqID_12822
  Homolog annotation: Hit_ID=A2WQE8; Match level="QueryCoverage=59%, HitCoverage=85%, E-value=4e-57, Identity=40%"; Hit description =Putative uncharacterized protein
MVVVDVSEFGTEDFDPKRWINAALDARHPSEPLDRFLTSTGISSRIVGFRPSIFLTYDDDSRRLTGEIWTLKFHCIGAQSGKEIVTVNIDKAYVAFYNMVYIKSKLGYSRRDFLFYKKRCGIDRSRLLALDYIHQEEAMLSDNMDERKISFVLTKDPPSDLEVSITPIKRPRQRTNVDEETIEVSIDAYKEWLAILQHDNPETDEEIHGSSKPTANWPSHARRHRKRDPDVIGIYVDNDGVFKKEGRGTLKGIAAATKRMKNGDHKLKIEFSSKLGGPTINLLFISKLKQRRWEFPTNEDAHEKIWSIAKERYKGWRSMLSSTYKAYNSYAERMKNKPEDVDIVEWHYMILYFGSEKFQKISSRNSENRQKQRTKHIMGSRTFSQISFQQRDPETGIEPTDLSLWMITHCKNDEWSEEASRGIYEKATEKIVEKMYQTERFDLTREEENAIFQTTFKETTVM

SEQ ID NO: 56198 - protein, 146 aa, Zea mays
  Coding DNA Sequence Number=SeqID_12823
MGKSKKGGGSSHHSGDKHELTPPSEDFSDSEYSEEEFSSESEGSPAPASPPASSDDSDDSQGIAAEVWTYIRAIERAGLEGSDESEYSSDEENSSDSSEEGGGGDDNDDGGDGDGGGDSGKGGDGSGKGGSGDGSGGSKGSSKASG

SEQ ID NO: 56199 - protein, 151 aa, Zea mays
  Coding DNA Sequence Number=SeqID_12824
MDMERSLTFTSDNAVPQSISDNAVNALQCAQKSEQSQKAHRIVNTDCPVHHRTVRWSRCQKLQRSESNGWVTWLAHRTVSGGAPDCPMRHATEALTNDSFGGWGYKYPSTTTLQCIQVFSLQTPYKSYNIQYKTQSKRSNPLPSPKIIPIK

SEQ ID NO: 56200 - protein, 52 aa, Zea mays
  Coding DNA Sequence Number=SeqID_12825
MARVACTLHGKMLDGGVSMLSVKKRQTIVASVQRWYPKKRTKTRAAGEKALR

SEQ ID NO: 56201 - protein, 120 aa, Zea mays
  Coding DNA Sequence Number=SeqID_12826
  Subcellular localization annotation: CTP_CleavageSite=45; ConfidenceScore=5.09e-01
MGKPVPSLLMLLLSRGGVPLDSPPRWQDGRPSHSSNHVLQGTCKNCSTSKAEYTNTQLDLPVTALVPTITRNGRPRLRSREGQSLLPGSIRVSSVGLNYNSGLIFSKNSVKISVGCQGSL

SEQ ID NO: 56202 - protein, 55 aa, Zea mays
  Coding DNA Sequence Number=SeqID_12827
MGKPVPSLLMLLLSRVTALVPTITGMGDHVSGRVRGYVCGQVHSGFNNIMLRKKN

SEQ ID NO: 56203 - protein, 201 aa, Zea mays
  Coding DNA Sequence Number=SeqID_12828
  Subcellular localization annotation: CTP_CleavageSite=70; ConfidenceScore=5.83e-01
MALSPLPPCGKATKGHTIKSRDSPRSFSRTVQRLGGCSRTRLRPNYRPRRQTSLKTRSPTVHRGCGQAARGNNKADRGITKRIKTSEESNHSSEASGPTPDGKTALFTCSDYCANHQGKTNDRTGISVCWQRTHDPILTEVRVESPSPSAQSRVATTGVGNAGECSSLIVLVLSQKHSDVGHELPLSNGNVNGEVTLMLPL

SEQ ID NO: 56204 - protein, 36 aa, Zea mays
  Coding DNA Sequence Number=SeqID_12829
MENYGQGIIPGPSLLCFVLDVLLEAPQLDDIPGEKG

SEQ ID NO: 56205 - protein, 128 aa, Zea mays
  Coding DNA Sequence Number=SeqID_12830
MASYYGLSGEELGPSYPANNGVRVKLTTVSHDLPRVQPRAQQGAPSRPTPGLGRRSPPRPTSGLGLSLGLGRSHILARPQPRPQEKSPPRPTSASNRLRHWRYIITLPLASCLRLRRNKTGVPSRLLR

SEQ ID NO: 56206 - protein, 193 aa, Zea mays
  Coding DNA Sequence Number=SeqID_12831
  Homolog annotation: Hit_ID=Q6J9V9; Match level="QueryCoverage=64%, HitCoverage=43%, E-value=3e-51, Identity=82%"; Hit description =Putative uncharacterized protein
MRLRKPKQKASANGRVKNHHRPLFRAYKGSGEIHPKLRPNPSRNSNSKGTRHLWQTKRAPFRLRHDDRLKKGSRKGGYFERILLNEGSGSRALLLIRGSKVVPCGVRQPPQSTRAPSPLLIRGSKAGPSEGFDSRPRARRVRDDPMYVCYMAKARATLPRYLRTFSRPAGTICNGIPPEGGAEPLDPIKWVRV

SEQ ID NO: 56207 - protein, 274 aa, Zea mays
  Coding DNA Sequence Number=SeqID_12832
MTSHGSSDEGNALSHTDGLAREGFPRILWEVLQGAGYTTPPQYVVQQFEKHRVPRCRVRMTLEPHPLQPGWRSLDSESFGYRAEDMIEAIALHGLTTFCGFHSLELSNHPIGLFPAEKEDDPMWKDRVEHAKDIWAIYPGQTAHLIVRCMNALYRLQVMRGEAMSHLMALLEATKITLDNREELVVDLSTEMSLRKVVGTRENTIEVLEDQLINTQQQLAEANEHLDMHHQEIQDMEANEDVDIEGGEEPASSLDTAGSGRPPSPESSVASFAH

SEQ ID NO: 56208 - protein, 68 aa, Zea mays
  Coding DNA Sequence Number=SeqID_12833
MENRASHTTTRDPARKREEGTSRNGGEDDGGAGGPPGRSVEDGGDVPIHAKPWRRTGFRSATTIVPYS

SEQ ID NO: 56209 - protein, 171 aa, Zea mays
  Coding DNA Sequence Number=SeqID_12834
MGEFEKISEFEFLGCYTLSAGRLPLFLRAASADRCVGPACVLTSAKGSAQTNKKIKVRVQKKGAKETEVNPGLTHWTVRCTRVDRLQTLHLRVSEAALRYNSPDCPVCQRSNGSQAQRSTPTVACNVNSVQTVRAESEQRQKAHRTVNSDCPVAQAVRAPTVETVRTLTVG

SEQ ID NO: 56210 - protein, 580 aa, Zea mays
  Coding DNA Sequence Number=SeqID_12835
  Gene Ontology: Mol. function=metal ion transmembrane transporter activity; Cellular component=membrane; Biological process=metal ion transport
  Homolog annotation: Hit_ID=Q5W6X5; Match level="QueryCoverage=62%, HitCoverage=90%, E-value=1e-97, Identity=67%"; Hit description =Putative uncharacterized protein OSJNBa0065C11.1
  Pfam annotation: Domain name=Zip; Domain location=54-390; Score= -103.5; E_value=0.056; Accession=PF02535.13; Description=ZIP Zinc transporter
MDRRAGAILVFLLVVLVWDVAAVAETEPGSVRLVQEAPHRKVVEDGAKAGRVPVSTVAWSTLAMAAATGLGAVPFFFMELEAQWAGLCNGLAAGVMLAASFDLVQEGQVYGSGSWVVFGILSGAGCMIWIVIAEVLPDAFKEATPSQVASAGTLAVAFMETLSTVLLGFTDGNNMPHPLLTGVASGIAFRLAAWRPVQLLMTSKMGLFTTLFLLIGGSLAYHAATSSILRLFNRKRSSVNVIASSSGLSLSALTVQSLLACGAVFLHAYAEGLALGVAARKAYGLGRYMVLPASLHGLPRGAAAASCVYGATDSWRGALAAAALTGLAAPSAAISAILAKIDYDGLDYWMVIACGALIPSFGRVFRRSLRLDVRKSVVGLLRHFLPSRLFYVDLSPYKWDPSSLHSPASPPNRNRMLPGSTARLPSTAPSVEQSSGCRPPNLHRASLERRALLWAAAGLGRRGPHRQADLGRRGSTAPSLHCSTARLPTTAPSIEQSSGCRPPNLHRASLERRALLSGERSSRPPWVSDAAGRTGRRISAAAGRTAGGSRPPRAAQQADLGLRGPHDRRISAVAVLSHPD

SEQ ID NO: 56211 - protein, 408 aa, Zea mays
  Coding DNA Sequence Number=SeqID_12836
MDGGNHPCGGEPPISHHSLRKRWEPSIVIPEPPARTAIRTFFSPVVKAKSSAEKRWVHRSQWGSIPKKPSQTAREDGRLRNGVGVEVVQLHPVVIQERPHKTACWHSEPSFMEGDEAQHIPRRRGRVCPARRDHPLRLWVTGEGTEQTIGDKGLQIVHCDDGKRPWVTRRNNGHPVGHRQTKGVVAERTRDRERGCCGKDPSWRRKRAPSPPTDQGFEGWPLGRVSTAAPEDSDLKPITDQGFEGWPLGRENSVARSASTAVSATPATTDNKSRSTTEFSLGRNRKLRLTRPHAPASGGGGIASSPDPGLGLKRSLRLARPWARTDRANRGYIITLSLACSGYKEQDRRPIWLTPATGSSLRCQLCSYRAQAPLRQPAITCTGPKLSPNGHIGMYTGLRHSTARHVSA

SEQ ID NO: 56212 - protein, 103 aa, Zea mays
  Coding DNA Sequence Number=SeqID_12837
  Homolog annotation: Hit_ID=Q2QX08; Match level="QueryCoverage=66%, HitCoverage=36%, E-value=4e-25, Identity=77%"; Hit description =Dirigent-like protein, expressed
  Pfam annotation: Domain name=Dirigent; Domain location=9-103; Score= -25.2; E_value=0.0005; Accession=PF03018.5; Description=Dirigent-like protein
MAAAVPLLQLLILPLLVASAAGGGGGGEKSTHMKLYWHDVVSGPSPTAVQVARAAVTNTSKTAFGAVVVIDDPLTEGPDLKSSKPLGRAQGTYIGAGITNCPP

SEQ ID NO: 56213 - protein, 876 aa, Zea mays
  Coding DNA Sequence Number=SeqID_12838
  Gene Ontology: Mol. function=protein phosphatase type 2A regulator activity; Cellular component=protein phosphatase type 2A complex; Biological process=signal transduction
  Homolog annotation: Hit_ID=A3CFH2; Match level="QueryCoverage=99%, HitCoverage=52%, E-value=1e-154, Identity=58%"; Hit description =Putative uncharacterized protein
  Pfam annotation: Domain name=WD40; Domain location=431-469; Score =39.5; E_value=1.2e-08; Accession=PF00400.23; Description=WD domain, G-beta repeat
  Pfam annotation: Domain name=WD40; Domain location=542-580; Score =44.8; E_value=3.1e-10; Accession=PF00400.23; Description=WD domain, G-beta repeat
  Pfam annotation: Domain name=WD40; Domain location=583-622; Score =35.2; E_value=2.3e-07; Accession=PF00400.23; Description=WD domain, G-beta repeat
  Pfam annotation: Domain name=WD40; Domain location=650-689; Score =6.3; E_value=5.3; Accession=PF00400.23; Description=WD domain, G -beta repeat
  Pfam annotation: Domain name=WD40; Domain location=693-731; Score =9.1; E_value=2.4; Accession=PF00400.23; Description=WD domain, G -beta repeat
  Pfam annotation: Domain name=WD40; Domain location=749-861; Score =0.5; E_value=28; Accession=PF00400.23; Description=WD domain, G-beta repeat
  Pfam module annotation: Pfam domain module=WD40::WD40::WD40::WD40::WD4 0::WD40; Domain location=431-469::542-580::583-622::650-689::693 -731::749-861
MSGGGDGGDKEAFFHCLDRVPSGLHLDADFPSDDEEDDEDDVRVSFTSAAGDQHFKSFRYQAAVPVEDDEDDDDDDDDDEDTSKYDMWMSDEPMSIQERRRRLHQGLGMASSRDLALRRHSMKKRPADVPRAMSRSVSRSKPPPSPIPANAASAANVPSTTSVAQAAAAAPRPAKEVITRRRSDSNLVVRDGASVSGKPPSQQPLRRVLSLPARPDARDSTPVVGKPQAGAPRGLPVVPPQAAPGIKGGKGDGDEGSKNNRDGEKEVAVVAASTPKDASSSTQQQTGVLGLEEFEKFIGNTPIMKLMRRGTSQNQPAPLPAGVPPKADKSGGKKKGGWLKNIKSVAIGFMQDKDANAKSGVVSAAAAVPKSVPTNASAGSAAPPAAGSERPKVHQYGKSSKELTGTLHVSGTTGHRPACWPGLEHARGSRWLAAQEIQAHEGSIWSIKFSADGRRLASAGEDSVVRVWQVVETSAPPCSLAMDGKSGPLAPLPSPGAADGASSTTTPALASMPKKPAKGKSGGRDALPEHLVVPDKVFALAEQPACVLEGHQDDVLDLTWSKSDQQLLSSSMDKTVRLWDTESQACLKTFAHSDYVTCIQFNPVDDRYFISGSLDAKVRLWSIPDRQVVDWTDLNEMVTAASYTPDGQIDIQPKKRKAQAKKITGFQFAPGNPAEVLVTSADSQIRVFDGVTMVQKFRGFKNTSSQITAAYTSDGRYAVCASEDSHVYLWRTTRVPPAAAIGIGMKPKAWCTIRSYENFYCKDVSAAVPWTQSPSPPGAGDGSPTGGSPASADKPPQGASCNDESCSVAAKPEGGDPSSCSAAAAEPSSSARQGGAKGDGGNAWGLVVVTASLGGEIRVYQNFGMPFRIKGQANFF

SEQ ID NO: 56214 - protein, 246 aa, Zea mays
  Coding DNA Sequence Number=SeqID_12839
  Gene Ontology: Mol. function=nucleic acid binding
  Homolog annotation: Hit_ID=Q69UJ1; Match level="QueryCoverage=55%, HitCoverage=56%, E-value=7e-70, Identity=75%"; Hit description =Putative RNA-binding protein RBP37
  Pfam annotation: Domain name=RRM_1; Domain location=111-175; Score =4.1; E_value=0.061; Accession=PF00076.13; Description=RNA recognition motif. (a.k.a. RRM, RBD,
  Pfam annotation: Domain name=RRM_1; Domain location=21-82; Score =29.7; E_value=1.1e-05; Accession=PF00076.13; Description=RNA recognition motif. (a.k.a. RRM, RBD,
  Pfam module annotation: Pfam domain module=RRM_1::RRM_1; Domain location=111-175::21-82
MMWDFTVTEDHTNIPDQQIVFKVTEENLAALFINCGQVVDCHMCGDPNSVLRFTFIEFTDEEGARAALNLSGTMLGYYPVRVLPSKTAIAPVNPTFLPRSDDEREMCARTIYCTNIDKKVTQADLKLFFESICGEVFRLRLLGDYHHSTRIAFVEFVMRYVFSGLKMIRIRCLRFEWIKFGWSVPPSEETNPDGKRHLLLNISGRKCYRCPELQWRDTGILANKGEPLEDSRASPCASLADALEVS

SEQ ID NO: 56215 - protein, 122 aa, Zea mays
  Coding DNA Sequence Number=SeqID_12840
MAMVNTRKGGGIDLPPNRHTQRIFRQPQPQQPEMDPPPPPPPAGVNPLVAAQMRIMQQMADTMADMRAQMQQERQEMRQEREEIRRELRQEREEIRQERRAQQQQQQHQQVPLPPPPPPVPP

SEQ ID NO: 56216 - protein, 347 aa, Zea mays
  Coding DNA Sequence Number=SeqID_12841
  Gene Ontology: Mol. function=nucleoside-triphosphatase activity; Cellular component=DNA replication factor C complex; Biological process=DNA replication
  Homolog annotation: Hit_ID=A7NVH0; Match level="QueryCoverage=98%, HitCoverage=97%, E-value=1e-143, Identity=75%"; Hit description =Chromosome chr18 scaffold_1, whole genome shotgun sequence
  Pfam annotation: Domain name=AAA; Domain location=44-234; Score=47.6; E_value=4.4e-11; Accession=PF00004.20; Description=ATPase family associated with various cellular activities (AAA)
  Pfam annotation: Domain name=AAA_5; Domain location=44-181; Score= -19.2; E_value=0.082; Accession=PF07728.5; Description=ATPase family associated with various
  Pfam annotation: Domain name=Mg_chelatase; Domain location=21-186; Score=-142.7; E_value=0.0087; Accession=PF01078.12; Description =Magnesium chelatase, subunit ChlI
  Pfam annotation: Domain name=Rep_fac_C; Domain location=245-334; Score=113.5; E_value=6.5e-31; Accession=PF08542.2; Description =Replication factor C
  Pfam module annotation: Pfam domain module=AAA::AAA_5::Mg _chelatase::Rep_fac_C; Domain location=44-234::44-181::21-186::245-334
MAPLVPMSQPWVEKYRPRQVKDVAHQEEVIRVLNNTLQTADLPHMLFYGPPGTGKTTTALAIAYQLYGPELYKSRVLELNASDDRGINVVRTKIKNFAAVAVGTARKAFLVVMDFSGYPCPPYKIIILDEADSMTEDAQNALRRTTETYSKVTRFFFICNYISRIIEPLASRCAKFRFKPLSEEVMSSRIMHICNEEGLNLNAQAMSTLSVISQGDLRRAITYLQSAARLFGSSISSSDLISVSGVIPEDVVKSLLAACRSGEFDVANKEVSSIIADGYPVSQLMAQFLDVIVSADDIPDDQKARICKKLGETDKCLVDGADEYLQLLDVASETIRSLFNMPRTLVF

SEQ ID NO: 56217 - protein, 278 aa, Zea mays
  Coding DNA Sequence Number=SeqID_12842
  Homolog annotation: Hit_ID=Q6J9V9; Match level="QueryCoverage=40%, HitCoverage=30%, E-value=1e-10, Identity=43%"; Hit description =Putative uncharacterized protein
MQEACDRTKGAHPFDFNASSMVAQAHTSWTGKGDTPKGILLREGNRPRAPLLIRGSKAGPSEGFNSSLRALGLHAHYWSEVRRPAPWKGSTAASGHSGSAPTTDQGFVGWPSKGFDNRLRRRARDDPGYVRYITKARATLPSAACAAPTAVPLDRVRLTAAKSGLGRHRRLRLARPQGLNWASTPKDDELRLARPQGSDSASAPEDDKVRLARPLGSDSASAPEDDELHLARPQGSDSASAPEDDELRLARPQGLDSALASVDGLRLARPRGSDSTST

SEQ ID NO: 56218 - protein, 103 aa, Zea mays
  Coding DNA Sequence Number=SeqID_12843
MESHDLRAERESWLVGGNENDGFGIDSGNGKWYSFRLERVVSIATTPQEKMKLWKETTRSSKMMSPKHGLAATPSRLPVKAACIYVSFLHFDYCKDYVDVSDI

SEQ ID NO: 56219 - protein, 183 aa, Zea mays
  Coding DNA Sequence Number=SeqID_12844
  Subcellular localization annotation: CTP_CleavageSite=45; ConfidenceScore=5.37e-01
MVVESSGTSLIAVCMQRQTSTRMEPGQSSQSASLPPLAAAAVPVRPSADVPVRRRLDAEPLSACPAGASLCPSAAPPLCLRPPRRRAAVRLRAAGLSLRAPSAEAEPLCLPASPSAEQVRPTIPIRMKAAPNFYSMSPRPPRVLRLLHLFGSSSSPPPTTPEEPDDYEVPALLILRDFLSSTS

SEQ ID NO: 56220 - protein, 50 aa, Zea mays
  Coding DNA Sequence Number=SeqID_12845
MLDEAAGWDDLVIGLRPTTRGTKARLAKASSEGWRLRLRPNICPPRDQFD

SEQ ID NO: 56221 - protein, 93 aa, Zea mays
  Coding DNA Sequence Number=SeqID_12846
MSFVLFDYFESGILKTTEYTLGPRRRGSNSTLGVNYTFGEVRPSLGRQRGRRISTPKDDISTALGPSPLGSSPGIRPEQTARPATPKPKPPVL

SEQ ID NO: 56222 - protein, 160 aa, Zea mays
  Coding DNA Sequence Number=SeqID_12847
MSKTPALKVPLQMELRFRLRGYEQPPTIGGPAEQQKADGWLAAARSSSGDNDFCSERPNSSSDDLRADAAAIKPSPTSPLEGRGRAEGRRVGGNSPHLRPQPSRAKSSPTRSKVLPLRHRGWVPRIKQAGPGQKKPNRRARCAQLPSGYKHSSTFAQTNG

SEQ ID NO: 56223 - protein, 193 aa, Zea mays
  Coding DNA Sequence Number=SeqID_12848
MGRREAEREGGRKVAGDRRERGGNPAAFVFVPRPGRPEPAWGRVMMAPPVDVVGPRPRLGDVEAPPRSRSSLSSVAVVESEPLGRARRRPSAEARAESEPWGRAKRSSSSSRAEPKSEPWVRRSGVRRLLGLSLSPSPGSGGAKFAIFRGLAQVRALGRAERSSSSSGAVPKSEPWVGQRMLCQDKGVRPPLH

SEQ ID NO: 56224 - protein, 215 aa, Zea mays
  Coding DNA Sequence Number=SeqID_12849
  Subcellular localization annotation: CTP_CleavageSite=31; ConfidenceScore=5.18e-01
MVTFQGGHPPFKGDSPYLRPQPTWAESSPTRSKTNGRKGGQPCRRHANRAKWAHFSDFQYAQHGGPGPRVMQPARRMLRASNCTAARATTAPPRLRNQYRDSRGSERRFAFAIMTTSKKGPGKGDTPKRILPREETRLRASLLIRGSKAGPSEGFNSRLRARGLHTHYWSEVRRPAPRKGSTTASGYSGSAPTTDQGFEGWPSKGSQPPQTQSEG

SEQ ID NO: 56225 - protein, 322 aa, Zea mays
  Coding DNA Sequence Number=SeqID_12850
  Subcellular localization annotation: CTP_CleavageSite=34; ConfidenceScore=5.25e-01
MGGCLQSFRLVVGGTQFRGSWYLSAIVRLQGFSSCSPAAPLRRGLPKTVTSSPWMGRGKPGCDLGPALSLKDVHHPCWGGERGEPGLYLPRGPAGHLFFQLLVVATILQLCGGGVLQPCQGRRTVAAQLGCNIPPSSSLSWRGRERGPAGALRSGPLFSFDGWFASLEREHEREPSDGRVRPGTMAAAAEVAGESPGTRRPAGSPESLGSVSLVVRGFSCLVKGTPRPLFDELRPGVAVSARTEAELARKEDLVGRSLAGSSVSGTDAGVDLPRPRARLMSSGDSWPRPRDIRHPVDVPKSLDKFGIFPYLTRNVPPVLQTL

SEQ ID NO: 56226 - protein, 64 aa, Zea mays
  Coding DNA Sequence Number=SeqID_12851
SEEESEVTEEKTPPPLDSQAETWLYFDICESEPDSPNNEGKPRINAYVGVLTEDPLTGHMPRHG

SEQ ID NO: 56227 - protein, 204 aa, Zea mays
  Coding DNA Sequence Number=SeqID_12852
MNTSPWPAQLRRADRGPFNWSHASSWHTLESLFLSRVRKRQIFVAFAPRWYPMKKNKTEVREDLVLHIELLLKTYREEFVPPLGLLRESGPSRRLGWSPRGLGQLSPEDISLARGLGRSTPASVPLTDDPARLRPTKSSFRANSASVRADTATPGLSSSKSGRGVPLTKQEKPRTTRLTEPRDSYASEIRISHSSPLHGATHAW

SEQ ID NO: 56228 - protein, 107 aa, Zea mays
  Coding DNA Sequence Number=SeqID_12853
MALFTVCPVRSDFAVLTSDFCIVHCSFVGEVDRCFVGSPDSPVNFSVVALRKPKSGQFARAAAWGTGQCPVRHWLRPFFYAPNFIEFPKSLSLLVYVELYAPEINDN

SEQ ID NO: 56229 - protein, 214 aa, Zea mays
  Coding DNA Sequence Number=SeqID_12854
  Subcellular localization annotation: CTP_CleavageSite=66; ConfidenceScore=5.20e-01
MARAAALPHRETRAPTPTLNRPPELTNFQLPPISVSAVVKHTSLRLAQLSLCNHFRISISPMFCNVCKTGETFLERSIAILYMRKSMYCICNYTLVHLRTLLSRKPDPRMLQDTRLVMPSKTRAQDGAGTSRGRESTPNPPPVPPTLAEAIAALVNATADNTRFLREMAGQQFQQQGGRGYQQGPRETSYLDFSETRPPLFVKAEDPLEADEWL

SEQ ID NO: 56230 - protein, 67 aa, Zea mays
  Coding DNA Sequence Number=SeqID_12855
MAEEQSQNRLNRFQDRSNRISVYMLGANLLESLFVLSFNHQNPQLGLIALTVLAMQEELNNFKRNEV

SEQ ID NO: 56231 - protein, 147 aa, Zea mays
  Coding DNA Sequence Number=SeqID_12856
MWPQQRGRGLAGAWAVLGQVGWRDGSRSWGQVRRRGNGGKVGGLDSRWQERRPRRPVAGGTDVDEGGSYCIKYMASNMFSWLGLVNGTTREDEAQDKTPEMDDEEEVQQQPRAATEHARRGRHPNVSKSTSLLRINKGKIEVLDQGF

SEQ ID NO: 56232 - protein, 971 aa, Zea mays
  Coding DNA Sequence Number=SeqID_12857
  Gene Ontology: Mol. function=DNA binding; Cellular component =chromatin; Biological process=regulation of transcription, DNA -dependent
  Homolog annotation: Hit_ID=Q5N909; Match level="QueryCoverage=99%, HitCoverage=62%, E-value=5e-75, Identity=35%"; Hit description=AT hook motif-containing protein-like
  Pfam annotation: Domain name=AT_hook; Domain location=155-167; Score =12.7; E_value=0.15; Accession=PF02178.10; Description=AT hook motif
  Pfam annotation: Domain name=AT_hook; Domain location=175-187; Score =8.5; E_value=0.81; Accession=PF02178.10; Description=AT hook motif
  Pfam annotation: Domain name=AT_hook; Domain location=195-207; Score =15.9; E_value=0.044; Accession=PF02178.10; Description=AT hook motif
  Pfam annotation: Domain name=AT_hook; Domain location=256-268; Score =18.4; E_value=0.016; Accession=PF02178.10; Description=AT hook motif
  Pfam annotation: Domain name=AT_hook; Domain location=296-308; Score =13.6; E_value=0.11; Accession=PF02178.10; Description=AT hook motif
  Pfam annotation: Domain name=AT_hook; Domain location=389-401; Score =19.5; E_value=0.01; Accession=PF02178.10; Description=AT hook motif
  Pfam annotation: Domain name=AT_hook; Domain location=479-491; Score =7.7; E_value=1.1; Accession=PF02178.10; Description=AT hook motif
  Pfam annotation: Domain name=AT_hook; Domain location=646-658; Score =3.9; E_value=5.1; Accession=PF02178.10; Description=AT hook motif
  Pfam module annotation: Pfam domain module=AT_hook::AT_hook::AT _hook::AT_hook::AT_hook::AT_hook::AT_hook::AT_hook; Domain location =155-167::175-187::195-207::256-268::296-308::389-401::479-491::646 -658
MAAAPPVAGEDIKDGVEVCLFDESADGFSRTVRAISELVDIEPETDFPEAEVERLSSSITFLREWRHFSYEPKSVTFTNGTESTSYRDDMHSVTLPQFSSASVPQYLAVSAHPPGSSYHKLGMPLTGRGIIQVWCLLAPFEDSHSHQPVNAFNNGKQRGRPRKIPCSDKLVPVPKGPRGRPKKRSYDDQLEPVPKRPRGRPRKYPLPVAKFEGSSQNGESQDIILFDPLSTSSFIPDDLSLASVMPTEKSVQSTPKRGRGRPRKNPSDKLTDSSGIVSEDVCTALPPTTAISTKPKRPRGRPRKYPIPMNDGSVSGADVELGKETTCQTASFGCSLDHTACTEFNAKLCIVAVDAALPPIDKLTCSPGTVSGDVCTAPTLTTAICTKPKRPRGRPRKYPVQINGRSVSGTVAELGQESTCQPVSFGHTVCTEFNANLSIVPVDAALPIVDKLCSSSGTVVKESVCTEPSPATATRKQPKRTRGMPRKYSDTMIDLGKDTTGHPVLFGRSMDHTACTESNSSFSIVAVDASSLFASSSTATCDDKSKGQSIRGKDKKKTISNALYCPVVSGVESQSICSTEILPNDPAVSVENALPSAQNTVSMNELCSASLLNREGNACKSALSDDSELPIHISPKSSNKRESSGRRGRGRPKTIPLSAGTGHFVASVASLPKTTCVLTSSSNLTSLNKSGGKFIVSSVSSCGCDVEKCSVHSGVLLSDDAPPAHGLQNTNCKEESNTKIGKAGSRNKPVAVEHNHFTDLNVKEQKVQTTPMSGDPVILVENCMEGQGPRKAGGQLQRIPASNKSSGASVGGGTYKIETLSTPMTKGSSKNNDMAYGAGLNQSQNAIVGCEGMEVIESNTANYTSHCNENARANQVAPSFKNSDRVIDETEAAELGPLKEPREDDNLFTCVNSNSASITSDIAQPRVVLCLAHNGKVAWDIKWKPPLLSQPEQKSRLGFLAVLLGNGALEV

SEQ ID NO: 56233 - protein, 254 aa, Zea mays
  Coding DNA Sequence Number=SeqID_12858
MAHIFCKHLTLDFRITHRSHYRDYGDVRHRQGGGSYGGAVGHGRSGGGKRTEVKWSRKKALLATRMHEFIDAGPPPNHCIPWLPLPRASASSPSGSHVDGRPPHWEPALRLRLDSLCRCSFILPVPSMWRQGARCCRGADRRRRCRRGRGSGQGKARRAMSLESGRGKVRRAKSSGDSRRRLADQMAEAAAGGRAAGLGGGGGGVAAGGRGIAAGVVVRVIAAGGRGIAVGAVVREIRGVRAGLVRRGQSTLSP

SEQ ID NO: 56234 - protein, 146 aa, Zea mays
  Coding DNA Sequence Number=SeqID_12859
  Subcellular localization annotation: CTP_CleavageSite=73; ConfidenceScore=5.45e-01
MPGRLLRARGIKSRSSWASRLLSLLSPPSPIASYPNAVALRYRHTRRSRSSRRCLGFLPPALPGVRTEEIEVRQRVVVACARTPTLGGHRSLVNFSPEFSGAVKPPIGVNRIPHGTIDDHYVNGNMENHPRKQCYHKGIMGTPLAD

SEQ ID NO: 56235 - protein, 281 aa, Zea mays
  Coding DNA Sequence Number=SeqID_12860
  Gene Ontology: Mol. function=kinase activity
  Homolog annotation: Hit_ID=Q6QP54; Match level="QueryCoverage=29%, HitCoverage=29%, E-value=1e-09, Identity=45%"; Hit description =Putative kinase
MEKKHGFTPKYTNVQAPTATMNIRQHSRWLADARSDNSGNDLRSGRPNSSNYDLRADAAATRSSPTSPLEGRGQDINAKEPEVGPQVALTVSMAEKLSPAATTSAPTAASTCPLTPHQQAPAAPKRTGRSSLPSSPQKRGQRTECCTMAGQRQFAFPGLAEGRLLRRAGGWFPPPDVEGEESARGRVMMALPVDVVRPYPRLGEVEAPPRSRSSLSSKVEVESEPPGRTRRRPSAEARAESEPWGRARRTSSSFGAEPESEPWGRAKRSSSSSGAEPESEP

SEQ ID NO: 56236 - protein, 304 aa, Zea mays
  Coding DNA Sequence Number=SeqID_12861
MASVVGAEVVAAEEVLVADGVTATIRAPGLWLFGFDSLSSPLEWGRGRGHCYSGVCPEVIVAAVWPPRAEVVVAAAGAGGVKGNPRPLFDELEPEAAVSAWTEADLARKEDFVGRSLTGPSTGGTGAEVELPRPWARLMSSGDSWLRLRGDLPSRLLEPGSWKRPWQRWLGRGADVVLRSGDPPTVLPFEARSDFTEGGVDAEGAAAPPPSRIVCLSESYFSRKVMSEDSANDVVEKARKIVSAERSPSIKTCLVSGSAYPSVSYLSQKVMSEVSVSRRRRSPSARSALAAYVYSVVFRIPLLK

SEQ ID NO: 56237 - protein, 251 aa, Zea mays
  Coding DNA Sequence Number=SeqID_12862
  Pfam annotation: Domain name=VQ; Domain location=120-150; Score=36.0; E_value=1.3e-07; Accession=PF05678.5; Description=VQ motif
  Subcellular localization annotation: CTP_CleavageSite=35; ConfidenceScore=5.37e-01
MGMGRMAGAATHGFSSSRSEVVRVGVAVRPRRMLMAAATHYLGGSAHSSSTTSSSISPSPPPWHPVLVVPSNQRQAVVYDLTEDLATPPSPSPSPSTTPQHLRPASRRRAGKPRRPRPSRKLPTTYISADAASFRRMVHQVTGAGVGADVDAVHQGTEQLLCRPAPPSRAVLSTATTTLVPTLDTSAFLLDAGGGGRPGAACFHGSAAAAEAEACGCGGGGGIGGGGEYSCSNGGGGGFPSLESWDDHDLF

SEQ ID NO: 56238 - protein, 312 aa, Zea mays
  Coding DNA Sequence Number=SeqID_12863
  Homolog annotation: Hit_ID=A2YGZ4; Match level="QueryCoverage=90%, HitCoverage=94%, E-value=4e-76, Identity=60%"; Hit description =Putative uncharacterized protein
MEDSAPSSAAPDPPLSPPPSTPPHPHPHPPEEEGGCWVLVPASEVEGAHAPKVIHWDDLQQELARLWSLSAALQPAEDRKAHLTARLESALQVRQAFLEQDNELAEMRQRLQERTDRLGDLKTRAKKLSEDVVVRREQLCVKIRTLSGASKALEAARSNLKEANELLSGENGCGRLKDLEQQLRMRQQYMVAQVAQIYPVRPLDEQSSDHKPGFTSNITKTSNVESVLPNSPQNRPLVILGLQLSKLSVKKTGYFSDKTEVQKSSTVLGYAAHDIEQLLNYIGAESLGPRHVLANLKQLTTIIQSQGYISDG

SEQ ID NO: 56239 - protein, 354 aa, Zea mays
  Coding DNA Sequence Number=SeqID_12864
  Gene Ontology: Mol. function=zinc ion binding; Cellular component =nucleus; Biological process=response to DNA damage stimulus
  Homolog annotation: Hit_ID=Q2RB11; Match level="QueryCoverage=95%, HitCoverage=99%, E-value=1e-134, Identity=74%"; Hit description=Nse1 non-SMC component of SMC5-6 complex family protein, expressed
  Pfam annotation: Domain name=SMC_Nse1; Domain location=8-190; Score =174.8; E_value=2.2e-49; Accession=PF07574.4; Description=Nse1 non -SMC component of SMC5-6 comp
  Pfam annotation: Domain name=zf-C3HC4; Domain location=202-245; Score= 2.1; E_value=0.053; Accession=PF00097.16; Description=Zinc finger, C3HC4 type (RING finger)
  Pfam annotation: Domain name=zf-RING-like; Domain location=202-245; Score=47.3; E_value=5.4e-11; Accession=PF08746.2; Description=RING -like domain
  Pfam module annotation: Pfam domain module=SMC_Nse1::zf-C3HC4::zf -RING-like; Domain location=8-190::202-245::202-245
MAPPSWRQRHHTLLQALLSRGPLAEPDFRALFTAVSDRDPATHQQLFNDTLLKINKDLAYLQFELRACINQYDGMVYYGVVNNIADEESKLGTKYSVPQIAFYKGLLEAIVQEAGNDGSITSIDALNVRLDNQVAVLDGSQDSQSRLPSSIKNFSMSQKEKTLDELIRDRWLSYTATGKIGLGTRSFLDLRSWFRGNDIPSCVVCNEACIKASSCPNEGCDVRIHEYCLKKKFSQRKASRACPSCGTGWPCQDGEGEADEVNEPGEEDLASPANHPSRKKRSRVKAELVEENDIAGPSTEVPRTRRTLRSAKAEAVEADQEASSTAASQPGRGSKRRKKAKEPSSSALCYSRDS

SEQ ID NO: 56240 - protein, 104 aa, Zea mays
  Coding DNA Sequence Number=SeqID_12865
MQAACNCTKGAHPFNFDASSMEAQAHTSCNRRAGYYVQKTAAPLAPAPRLLDYETGTGKGDTPKGILLREGSGPRAPLLIRGLKAGPSEGFDSRLRPLGLRAHY

SEQ ID NO: 56241 - protein, 140 aa, Zea mays
  Coding DNA Sequence Number=SeqID_12866
  Homolog annotation: Hit_ID=Q53L81; Match level="QueryCoverage=44%, HitCoverage=5%, E-value=3e-08, Identity=42%"; Hit description =Retrotransposon protein, putative, Ty3-gypsy sub-class
  Subcellular localization annotation: CTP_CleavageSite=58; ConfidenceScore=5.26e-01
MKTAAVVATIQSGIWKPKLISFDQNSIAGTTYGSRMDGAGTSSGREATPNPPPVPPTLAEAIATLVNATADNTHFLQEMAEDPLEADEWIRVIEHKFGLLQPVQPAGHQITWDEFKLAFREHYIPEGVLHMKQEEFMKLK

SEQ ID NO: 56242 - protein, 473 aa, Zea mays
  Coding DNA Sequence Number=SeqID_12867
  Homolog annotation: Hit_ID=A2ZTZ2; Match level="QueryCoverage=91%, HitCoverage=80%, E-value=2e-21, Identity=25%"; Hit description =Putative uncharacterized protein
  Pfam annotation: Domain name=SANTA; Domain location=50-172; Score =24.8; E_value=1.6e-06; Accession=PF09133.1; Description=SANTA (SANT Associated)
  Subcellular localization annotation: CTP_CleavageSite=38; ConfidenceScore=5.73e-01
MPSQPQPSSIGGTSQTPAPFQTAPVFTGGSPRTLATLSAQSVPRVTRRSIALVDWCLERVEGEEGKIRVAGTTYTPQTSPQTRHLLRAYYANRREASSSKGSRKVAGRVFRSSAIVRRHDHFRIMSEDGYLIRIGCLLNIPKTRNNGFSEEVCECFEFGFPIQWHRLVNPKMVPDNKHALSPSETTASAPSHSVGYYMEKFLSDSFSNSNRYSFTENDSYTSVVCTGSRNGLTTQTLSNLPDDNAGNITVSWGLYGLGMDMSEKPWTPPAEACNNRQESDQHESMQIDACKQELVNRSMSSVSVKQSISSISPNSKVDGNRIVPSKIMSVVNESYRSTVGCGQAEEDVGIQQEKKHSCSSEHGMVTLSINCTSSQLGAPGIPKFGKDSVNLWTTDALELSTEGMTPKIGADSTDRRLRSGKILGMPSGGLMNRGHKLKKIKQEASSKQMVNQGATCTVDLTSHENVGLILHLE

SEQ ID NO: 56243 - protein, 41 aa, Zea mays
  Coding DNA Sequence Number=SeqID_12868
MTVNEGKVAQCQGAFQFPEHSMPNDDGGKAANNMIKKRVRE

SEQ ID NO: 56244 - protein, 539 aa, Zea mays
  Coding DNA Sequence Number=SeqID_12869
  Homolog annotation: Hit_ID=Q6J9V9; Match level="QueryCoverage=17%, HitCoverage=34%, E-value=6e-15, Identity=47%"; Hit description =Putative uncharacterized protein
MQVACNRTKGAHSFDFDASSMEAQAHTSCNRRASCYVQETAPPLAPVPRLLGCGTNAATRGDPARDPTVPTEHIGHGSVSRGRRRDGRYGQKWAGSNGGGRRAEAADRRHLWQAKQATLRFRHNDRVKKGTRKGDTPKGILLREGKRAPSPLLIRGSKAGPSEGFNSRLRALGLCAHYWLAPEGFDSRLKRRARDDPRYVRYITKARAALPRYPRTFLRPTCWRFDPGGTWTDESGALAVGGYKRPRGREREACTCRPILSARPTFSYECPGPSFYRRKERAQVEVESEPRVGRGGDHRLRTRLSLSPGGRARQSSSSSRAEAESEPWGRARRSLSSSGTEAESEPWVGRGRVRRLPKLRPSPSPGSGEAEFVVFRSRGRVQALGSGEAEFVVRGRDGGRALGSGEAELPMVPEAGLGCCQPHSVEWHSSRSGAGGAVLLSGRSVERRSDCGHFGSVDWRARVRIRCQAILALNAFAIRSVGVAIWPRLLLGEDWASGEPKLCADRGYQLRLGVLGGAEHGVSSELLTGNPSGRSCPIR

SEQ ID NO: 56245 - protein, 207 aa, Zea mays
  Coding DNA Sequence Number=SeqID_12870
  Subcellular localization annotation: CTP_CleavageSite=69; ConfidenceScore=5.78e-01
MPPPYDVVGPSPGSGEAVAPPRSRSKPRLSPSPRVKRGGVCRLPEPRPSPSPGSGEAEFVVFRSRGRVRALGRARRSSSSSGAEAESEPLGSGEAEFVVCGRDGGRVLGSGEAELPMAPEVGLGCCQPHSVEWHNSRSGAGGAVLLSGRSVERRSDCGHFSSVDWRARVRIRCQTILALNASAIRSVGVAIWPRLLLGEDWASGEPK

SEQ ID NO: 56246 - protein, 51 aa, Zea mays
  Coding DNA Sequence Number=SeqID_12871
MARVACTLHGKRLDGGYSFMLLMMVLSAGGLDLLISLSNPSILLIEDGPLS

SEQ ID NO: 56247 - protein, 144 aa, Zea mays
  Coding DNA Sequence Number=SeqID_12872
  Subcellular localization annotation: CTP_CleavageSite=45; ConfidenceScore=5.03e-01
MAWHDKLKQGRGNTGLDLTNSDAESKARLRPGGLGYKHKQCFTVSSARVTDSISTASSFARTTTRQRRTEHGALWQHAQEQRNSTRATQRRAGRGLGRVEPGSFDEHKGAQAGSTVRLGNRRCARKNTRGATVREMEVQPSAAR

SEQ ID NO: 56248 - protein, 134 aa, Zea mays
  Coding DNA Sequence Number=SeqID_12873
MEPRRIACNRELSTAQQGDAERREGAGQGRDPSREKGSEQDATMDELEEVLSRGNSRLGKQWPRKSAMGWNWGSRLEMELGRMAAMGREHGRARPEQRDESTGASAASRGGRGGQGRAAGARRGGTQGERSRVR

SEQ ID NO: 56249 - protein, 80 aa, Zea mays
  Coding DNA Sequence Number=SeqID_12874
  Subcellular localization annotation: CTP_CleavageSite=42; ConfidenceScore=5.07e-01
MWSNYFSGNSVPHGCVWVYKHGNTKKCDVLVMTHLRSCTLTSKMYVVGDSFSNAMNLRTRQHKMLNVNALRPMKHYSFKD

SEQ ID NO: 56250 - protein, 53 aa, Zea mays
  Coding DNA Sequence Number=SeqID_12875
MVGTSAVTARRQPRSVEHCKLQDMVDGVTWPTTLPLGWTVEWDAAPAGEEQEE

SEQ ID NO: 56251 - protein, 118 aa, Zea mays
  Coding DNA Sequence Number=SeqID_12876
MGNRERWTCDSSRRSRFWLRNERGSAEGFMLGDEESEPGCFNRLAIPAGTTLTATTGEEGGSDREAPPKSTEALADVIVDITPQLITLNQRSKSDKYQRKGKINQSKAEIDEKRLRKD

SEQ ID NO: 56252 - protein, 139 aa, Zea mays
  Coding DNA Sequence Number=SeqID_12877
  Subcellular localization annotation: CTP_CleavageSite=85; ConfidenceScore=5.03e-01
MAGNDAYRKSFLVSAVVHYTRGAVFATVAAQIGVTAVAGHLGTHSALLFLTGVGMSAAPSSASVPVFTSTPTPVRFLRNAWVMFMASHGGDLWPMRSVSLTIVVQCHGSAPLREHRRLRPSRFNGLGADAVEPSANERD

SEQ ID NO: 56253 - protein, 115 aa, Zea mays
  Coding DNA Sequence Number=SeqID_12878
  Subcellular localization annotation: CTP_CleavageSite=37; ConfidenceScore=5.03e-01
MSGAPEDSNLNSPPSGISRGTRAIIHRTVRCTPDSVRCSSEELPQELASLGKSERLLRYNSPDMSGAFNARQKRAEVRHAHTGAPDIEQYMSSVHRTSRQAHKSEAPTVGIQRNW

SEQ ID NO: 56254 - protein, 261 aa, Zea mays
  Coding DNA Sequence Number=SeqID_12879
MRLGVPFIAPRQLGAVESNLGRLILPSVDWRTGQSVRCPLLAVGSATCPAQIAWPTVGPADRWLTGQSSAHRTVRRRRQSPSTAARPSRPATTAVLAARLSRPAPNAIPAARPSRPAANPSSPAALPSRPTPNAVLSHAPKQAGRQTAVPRCVCCLQAVPLYLSVLDWCSFGETTMRTNAEGGGPWADWGFSDAETTAPSPSPHSWRFFIGLGPQLVQGRAAFAFSPFWHFWSCDHEHDGKSFLARETRLRNIGAAAYQHH

SEQ ID NO: 56255 - protein, 461 aa, Zea mays
  Coding DNA Sequence Number=SeqID_12880
  Gene Ontology: Mol. function=receptor activity; Cellular component =integral to membrane; Biological process=protein amino acid phosphorylation
  Homolog annotation: Hit_ID=Q53PX8; Match level="QueryCoverage=93%, HitCoverage=94%, E-value=2e-85, Identity=62%"; Hit description=S -receptor kinase-like protein, putative
  Pfam annotation: Domain name=B_lectin; Domain location=93-192; Score=- 9.4; E_value=0.017; Accession=PF01453.15; Description=D-mannose binding lectin
  Pfam annotation: Domain name=PAN_1; Domain location=310-385; Score =5.9; E_value=0.043; Accession=PF00024.17; Description=PAN domain
  Pfam annotation: Domain name=PAN_2; Domain location=298-365; Score= -8.9; E_value=0.012; Accession=PF08276.2; Description=PAN-like domain
  Pfam annotation: Domain name=S_locus_glycop; Domain location=163-285; Score=-41.3; E_value=0.041; Accession=PF00954.11; Description=S-locus glycoprotein family
  Pfam module annotation: Pfam domain module=B_lectin::PAN_1::PAN_2::S _locus_glycop; Domain location=93-192::310-385::298-365::163-285
MRQGKGDPAIAALAIAIAVVLLCVASSAVLAIDGAKAEEELPTQLLNGFAATHAAGSAATFEPVLYATSAVFALGFLRVGPASLDLAVVHLPSSFPVWRATPARLGDWSRPATLAFDDGTLVLAGPDGAVLWRTLNTVGDTVALLNSSNLVVQRSAGRRDGAPCTGSTRRSRRTWRTPRRRLSTAASTPLGFFGLYLDGGGGQRVDVLSFDTFALNLTGVFRRMTLDDDGNLRAYYWTTGDSSAWTSDYKAIAERCELPTSCGAYGVCVPGNAQCQCLDSNGTSTAPPCHGEDTADLCSTASSNGARQLGFDVVRRTRVSVAYKEELPFRTNTTADGCELACAGNCTCRGALYNGASGYCYLIDFPVETLVYQADDRMLGYFKIRKAATANSARRGMSPGVTAATVALSLVLAGLAAAGAYWGYRTWERRKRKRAGMEQELVPGPYRDLKSMASSNNSFKA

SEQ ID NO: 56256 - protein, 431 aa, Zea mays
  Coding DNA Sequence Number=SeqID_12881
  Gene Ontology: Mol. function=metal ion binding; Cellular component =integral to membrane; Biological process=ubiquitin cycle
  Homolog annotation: Hit_ID=Q53PZ1; Match level="QueryCoverage=12%, HitCoverage=21%, E-value=3e-13, Identity=61%"; Hit description=RING zinc finger protein, putative
  Pfam annotation: Domain name=PHD; Domain location=255-300; Score= -2.3; E_value=0.025; Accession=PF00628.20; Description=PHD-finger
  Pfam annotation: Domain name=zf-C3HC4; Domain location=256-297; Score= 40.8; E_value=4.9e-09; Accession=PF00097.16; Description=Zinc finger, C3HC4 type (RING finger)
  Pfam module annotation: Pfam domain module=PHD::zf-C3HC4; Domain location=255-300::256-297
  Subcellular localization annotation: CTP_CleavageSite=35; ConfidenceScore=5.36e-01
RSIIPPSVADLEAAKAQPKRGPKTQRRVRNGTFCCLSLLSNTGSTVHRHTAARPPGARTGTATEGAPTARTRHSAPVHRATGSTLPSRPGSMGSGVSSSMALALAGFCFSVLFIVFVCTRLACALVRRRRRQARARLAAAPPLPHYAHGYADPDPFPSFRAARHHHHAPGPRSRRLPHPRLRRRTSLRLRRRLPGRRGRVHRRGSIAGGARNQIGNGVLCFIPGSLALFTGNNWALPDIAVMLVWCSLREYRYRGCVICLAEYEEGDELRVLPPCSHTFHTGCISLWLAQNSTCPVCRVSLLVPDTSTTPESEHSAPHPPPPPHHHHHLSSIVIISPPSSPEPSRSDPCRCLFASGGGHSSRAAEAPPPPPPPRHEPDQVVSGPPPAADGASGYSSPLPEVIHPAPAPETNGQTVRKQAGSRSTTPLGPCK

SEQ ID NO: 56257 - protein, 742 aa, Zea mays
  Coding DNA Sequence Number=SeqID_12882
  Gene Ontology: Mol. function=transferase activity, transferring glycosyl groups; Cellular component=integral to membrane; Biological process=cell wall organization and biogenesis
  Homolog annotation: Hit_ID=Q7PC69; Match level="QueryCoverage=100%, HitCoverage=96%, E-value=0.0, Identity=72%"; Hit description =Probable xyloglucan glycosyltransferase 3
  Pfam annotation: Domain name=Glycos_transf_2; Domain location=252 -427; Score=6.9; E_value=0.014; Accession=PF00535.17; Description =Glycosyl transferase
MDNPYSLVEIDGPGMPPSDKARGKNAKQFTWVLLLRAHRAVGCVAWLAGGFWGVLGAVNRRVRRSRDADDEPDAEASGRGRVMLRFLRAFLLLSLAMLAFETVAHLKGWQFPQHLMPGNLQELEEQLQHLPEHLRHLPENLRQLPDHLRVPERQEIQGWLHRAYVAWLEFRVDYIAWAIQKLSTFCILLFMVQSVDRIVQCLACFWIKIRGIKPRIPASAGGKPRGGTTGRKRVDDVENGDADDDRYFPMVLVQMPMCNEKEVYETSISHVCQMDWPRDRLLIQVLDDSDDEVCQMLIKAEVTKWSQRGVNVIYRHRLSRTGYKAGNLKSAMACDYVKDYEFVAIFDADFQPNPDFLKLTVPHFKENPELGLVQARWSFVNKDENLLTRLQNINLCFHFEVEQQVNGVYLNFFGFNGTAGVWRIKALEDSGGWMERTTVEDMDIAVRAHLNGWKFIFLNDVKVLCELPESYEAYRKQQHRWHSGPMQLFRLCIPTVFRSKIPFWKKANLVMLFFLLRKLVLPFYSFTLFCVILPLTMFVPEAELPIWVICYIPVLMSILNILPAPKSFPFIIPYLLFENTMSVTKFNAMVSGLFQLGSSYEWIVTKKAGRTSSASDILALAEADAHAHAPAPAAKLVRGVSEGGLQEWGRLREQEAAEWANKEDAAAALAAAAAPATPKKSSNKAKKPPNRIFKKELALACLLLTAATRSLLSKQGLHFYFLLFQGVTFLAVGLDLIGEQVS

SEQ ID NO: 56258 - protein, 338 aa, Zea mays
  Coding DNA Sequence Number=SeqID_12883
MAPPVDVVGPCPRLGDVEAPPRSRSSLSSEAEVESEPLGRARRRPSAEARAESEPWGRAKRSSSSSGAELESEPWGRAKRSSSSSGAEPESEPWGRAKRSSSSSGAEPESEPWGRAKRSSSSSRAEPESEPWGRAKRSSSSSGAEPESEPWGRAKRSSSSSGAEPESEPWGQAKRSSSSSGAEPESEPWGSGEADSRCGAGDAVLLSDWSVERRCDCGHFGSVDWRARVRIKLYADGGYQLRIRSLEGPKFSGWYVDVVNSLAGAGFARAAPEPLHRARGRAPIMVSSVSYWRVIRVDARAPFVRGRLEARRRAQKYLRVICRTRSPFDGVRGLDASL

SEQ ID NO: 56259 - protein, 431 aa, Zea mays
  Coding DNA Sequence Number=SeqID_12884
MNRRPAFKVPLQTELRFHLRRHEQPHTIGGPAEQQKADERLAVARSSSGDDDDFCSGGLNSSSDDLRADAAAMRPSPMPSLERQGWAEGRRVGGQSVGGTSYLVGGRTSSSCRGGRRRWERLRSHSDQRARHAATASATNGERPSPRSLREGAGRRLRRGRPQLGTLPSPAPMMKILEAEGGAEAAARLDFPRHRAGGHRLGRRGLSLLQHAPRSSPYGAGAGSHASCKLAQSRRSQTAARGACNRPAVTSVPPLSPRPAGERVDSRAGGMQPRQVGAPLRLPTHPAWKPRPTRHATGAPVATCEQLHRRSHHYHASSIEEPVPRLEATLRTTQQCQLGATVNTAKNGPAVMAVAGGQEQRSRRQPSLCPIQGQREIPLSRREDGAPVFRSSNGSRTRNGRLANHSPCRINSAAGQAAPLAGEASDASPSP

SEQ ID NO: 56260 - protein, 282 aa, Zea mays
  Coding DNA Sequence Number=SeqID_12885
  Gene Ontology: Mol. function=kinase activity; Cellular component =ornithine carbamoyltransferase complex; Biological process=amino acid metabolic process
  Homolog annotation: Hit_ID=Q6QP54; Match level="QueryCoverage=26%, HitCoverage=36%, E-value=2e-11, Identity=48%"; Hit description =Putative kinase
MALPVDVAGLCPRLGDVGAPPKPRLSLSSVAEAEPEPWGRPESEPWGRARRSFVVFRVLARVRALGSGGAEFAVFRVLARVRALGSGRAEFAVFRVLARVRALGSGGAEFAVFRVLARVRALGSGGAEFAVFRVLARVRALGSGGAEFAVFRVLARVRALGSGGAEFAVALLARPDCLSDSLCRVAPQSEWRRRRCPSVRLLYADGGYQLRIRRLEERPRWPVASSSFRRLFTEVTSGRRLRPPLCHLAAQGSLAPLRPPPLTSVLAGTAPSWCPLGGAVQH

SEQ ID NO: 56261 - protein, 521 aa, Zea mays
  Coding DNA Sequence Number=SeqID_12886
  Gene Ontology: Mol. function=cysteine-type peptidase activity; Biological process=proteolysis
  Homolog annotation: Hit_ID=Q109R5; Match level="QueryCoverage=72%, HitCoverage=41%, E-value=2e-42, Identity=29%"; Hit description=Ulp1 protease family, C-terminal catalytic domain containing protein
MDIVVEEGNVDVGNTAEPSYEVVARSGCSAQLSTKDTDEHELAIESEDSKVSVGNAAKQSHDVVGVGIDCIFNHAKVSTEANLGPQPDVIHLTSLDVPNESSQISSDADMVEQNKQDALDTLIRISQHKKPKKLNVARVVSEDYKCTPEDVQLIEYIKTLPGKQVVVDIDSAWLNRNDMECLFHGDIQLSGEALSAYIHCIRDEEHLLHREGGKVFLENTFISSLLKRDGDPKVLLNCVHSNEYRKFSLVPRSSECKKSELKGLERQIKLAAEHKELYQGKWSNLDVASWPVIEKITTQMQTDGVSCGLWMINYMEYWTGSSLSDNVTQDDTTMFRFKLPAILWDSRLNTKKGHQNLDHNVDEDGESSSDVQIIDTPLTSTNTQELMFVLCTYIMGIDNAKYLKKHWIQSTKPYPISLSLQKLKDILDVNKPMDTDCFNMAVRMIACNDALFLLEDKYHYMDLQFCGFIWLSCYQLYARLEWYKNGNDLRTKFLVELLKYKDNESKDNIPEEIQEIIRHIR

SEQ ID NO: 56262 - protein, 686 aa, Zea mays
  Coding DNA Sequence Number=SeqID_12887
  Gene Ontology: Mol. function=sequence-specific DNA binding; Cellular component=nucleus; Biological process=regulation of transcription, DNA-dependent
  Homolog annotation: Hit_ID=Q41813; Match level="QueryCoverage=56%, HitCoverage=51%, E-value=0.0, Identity=61%"; Hit description=Hox2b protein
  Pfam annotation: Domain name=Homeobox; Domain location=109-165; Score= 9.9; E_value=0.0012; Accession=PF00046.20; Description=Homeobox domain
MAEYMLVVQSNLNQCNNEDIPLSGTKIEMESYEQESSDSSDEEWSTLSTPRKTKLQGNEKVSLTESVRFAKRCSRRAPAREQNNEHTQSEQLHGSASELESNFMVLSGDASKCHFGPIVTQKLKEHFEKDPYPCHATKEGLAQELGLAFNQISKWFSATRHYSRVIVAKNQKYPGENTTENNSSAIFDGIQVIEPNFGLIDKPDADTNDMISEKLMVQINLNEGIEEDIPPSQYTTRCEEKLTMTQAAISREAGPPGYDPGENCLQVSSMITSCEQSVIMAPSAIARGVGPPGYTPGEHQGNGAPWNTSYERRPFTSPVTSSREVRPPGYGPEENQGSGISCNTSREQILFMSPTTISRELGPPGYLPRENQRSDTSWNTSCESGLFMSLATTSIEHEIAQSFSQQRKKREGGGPTYHETFAYAQGPFARVPEAYVLSLGIYLLPNRECTRTLFTCGIPTIKMWEQQVLEISAMVPPPSTSANRLGSILPEPLNTGDALERYKQVAQKVLIFWLVLRDVNGDPIPANPWGFPLLGYWYGTKIVPMGTDMGQNLHPLGKWVWEAIIRTRLPMGISYVYTCHVCMNELRSSRPPSPARQRTRPQGNVDCPVTRLVGTSRWKFFTSKIMKSICDLDKTPGPGRQLLLYSVNCLVMRFLLYLVNCVVLRTHCRSFCIKCSSDEELLLSLS

SEQ ID NO: 56263 - protein, 404 aa, Zea mays
  Coding DNA Sequence Number=SeqID_12888
  Homolog annotation: Hit_ID=Q94J37; Match level="QueryCoverage=25%, HitCoverage=24%, E-value=5e-24, Identity=56%"; Hit description =Pentatricopeptide (PPR) repeat-containing protein-like
  Pfam annotation: Domain name=PPR; Domain location=290-324; Score=8.2; E_value=0.82; Accession=PF01535.11; Description=PPR repeat
  Pfam annotation: Domain name=PPR; Domain location=326-360; Score =27.1; E_value=6.5e-05; Accession=PF01535.11; Description=PPR repeat
  Pfam module annotation: Pfam domain module=PPR::PPR; Domain location =290-324::326-360
  Subcellular localization annotation: CTP_CleavageSite=45; ConfidenceScore=5.70e-01
MARVRPLPRQPSLTLARSLRSRLFLLRSSRVATTPSTPEIVARRRAAPETAPQSRGTSSPMHRRAPEPASRRMLKAWCGRGSAFADGNGPDLPLSPAHVVGLRLFNIDMIREHPPLSSNSHHFKIYTTWHLHRQGLAQLSAVLTADTWRCDTARCVAQANHTALLFFKEQPLATSSRGRPVSNDSCTNPWEKASGPGNVTRTSLAPQGLQAQVGSSTCHHSMADVQGARSWTLELTDVWSGIKEEMFLTVFTLIKLMNLSAVSGLNRGLAASQEDLNHTDAAAGCPVDTSTVNMLIRGYRQSLHLNDALRLFHQMRPLYWFEPDAFTYSYLVHGLSAQGRTRNAWELFDEMCGSGLLGSHTRYLQILSDPTKSYLKRGAGCGVGPVRYRGAVQDDLIPISLSSV

SEQ ID NO: 56264 - protein, 148 aa, Zea mays
  Coding DNA Sequence Number=SeqID_12889
  Gene Ontology: Mol. function=RNA-directed DNA polymerase activity; Cellular component=integral to membrane; Biological process=RNA -dependent DNA replication
  Homolog annotation: Hit_ID=Q7FS87; Match level="QueryCoverage=54%, HitCoverage=6%, E-value=5e-23, Identity=70%"; Hit description =Putative glycerol 3-phosphate permease
MANEVVATEARTIVIVRRYRWPIGSSAGVLSTLFDVRGIIGGILAGRISDHLDAHTLTAASFTFSAIPALFFYKIYRNVSLAWSIALMFSIGRLVNGPYVQITTVAFTVLRHWRSRLSSCSRRPPDMNPSHHAVLLCLRGASKDQGRS

SEQ ID NO: 56265 - protein, 139 aa, Zea mays
  Coding DNA Sequence Number=SeqID_12890
MGKGHKRKREPTPPSEDFGDSEYSEEEFSSESERSPAPVSPPVSSDDSDDSQGLAAEVWSYIRAVERSGLEGSDESEYSSDEEDSDGGGEDEDDDDDDDDGGDSGGGKGGGDGGRGSTEGGSSKGSTKGGGGSRGKASG

SEQ ID NO: 56266 - protein, 140 aa, Zea mays
  Coding DNA Sequence Number=SeqID_12891
MRQHAKISFAKVNENRDLEDGIRVQVSQVDMIKIKDATEKRRYGKAEAAKKERSVNHRFMGIFGWDSSPVASPPRTEFPWRENPDGDKAEKLNFRNYRHMVTCESVTSKTLMSIFTLLGVVKRISSTFSKSKDKSSKRKG

SEQ ID NO: 56267 - protein, 313 aa, Zea mays
  Coding DNA Sequence Number=SeqID_12892
MGNNCLRYGIYCNVKSSSFTRDDKARDGGSALCLNPNPIGYPAFQLSPTSSPQPWPDALSALGLWRRCRRFLSRLSCLGRWRFGRARLAAARPARRSSIGDLVVLADGDLVLAGRARLLALLIDRRLGISSCSPIGDLALVGRARLLALLVGRRLGISSCSPIGDLVLVGRARLLASAPCGRLGISCSAARPVALLCLATARARPSRSLVAQAFSCPSCGTPQSTRRRRRLWCSGFESSSGSWSKSGSCMDLDAAAEEEERRLEDHNEAQDARYFLGFGDTHGDPIEVDTVVGSQIGTGIGSTSPSAAVPNPD

SEQ ID NO: 56268 - protein, 214 aa, Zea mays
  Coding DNA Sequence Number=SeqID_12893
MTRPSLCRLLWASNSARPHHMRGSGAATCPEKVIYSKASTMSPDPHGRVPDPCRTPVYTVQTSKFGPRPPRVRTGPLEWDPDLPYGVRAAHSGVPRFQDKTYPGLNQDPGGGPEPTRVQTWSGGIRTYPHTLLLPTQAETRCCHVAYCAQYKPTGGTWHEASGLRAPSHSLRIRYLNRLNPTQYMWIITKTNKPSGRAYGMHMGISKVTFTKNP

SEQ ID NO: 56269 - protein, 91 aa, Zea mays
  Coding DNA Sequence Number=SeqID_12894
MDKDVEEEVRLRDEKGKGNKKQKHNKDEVTNSRDTTGQRSYSQHDFDTTYVTPGFGRGEYTSTYSANVPVWAEGGLALCGVKLKQLLLVGQ

SEQ ID NO: 56270 - protein, 494 aa, Zea mays
  Coding DNA Sequence Number=SeqID_12895
  Homolog annotation: Hit_ID=Q6J9V9; Match level="QueryCoverage=25%, HitCoverage=25%, E-value=1e-17, Identity=45%"; Hit description =Putative uncharacterized protein
MNGGNHPCGGEPSFSQLLQGLQKGLEILLSVARGPVAPVLASGGHHSLRKRREPPVVISEIKPLALPPFVRRREDGGDVLQRPHLPQLEDAAAGPHHHTNSSFPRRRGKKLHGEEMGPQVPVGGNPQISFANRREDGCLRDGVGTEVVQLHPVDVQNRPHKTACQHSEPPLVKGDEAHHIPRRWGRGGSARRGHPLWLRVTGQRAKQTISNKGLQVVRRDGGERPRVARRNNGHPVGHHQAEEDRRHLWQAKQATLHLRHNDRVKKGTGKGDTLKGILLREGSGPRAPLLIRGSKAGPSEGFNSRLRALGLRAHYWSEVRRLAPRKGSTTASGHSGSAPTTDQGFVGWPPKGSDSRLRARRARDDPGYVRYITKARATLPRYPRTFPRPTGTIFNGIPPEGGIEPSDPVKRGPGPANHLQVKAQSTQGTRSRLARAQPRARAADPGGFTSRPRAPSSNRHTFGSPKAQSLQRSNLGQVATPTDHIAGAFNARMA

SEQ ID NO: 56271 - protein, 178 aa, Zea mays
  Coding DNA Sequence Number=SeqID_12896
  Subcellular localization annotation: CTP_CleavageSite=35; ConfidenceScore=5.46e-01
MARARAYKALPGFDCTLPRTLKPHRSLARRRLPVRRVSVAAQSLCHRRPANRAIPNPVQPSEKTVHTSVKLPERGIGVCFAGEASPRSPELSTPPECVDRDNLEKPYKNNPKDTRAIQIPYVYPQQKPKPKDCNLADGEYILVPEQGAAQEVAPDPAPEPAPEDLPATVLEGKPQFYA

SEQ ID NO: 56272 - protein, 148 aa, Zea mays
  Coding DNA Sequence Number=SeqID_12897
MGKNNKRKREPTPPSEEFGDSEYSEEEFSSEPEGSPAPVSPPASSDDSDDSQGIAAEVWTYIRAVERAGLEGSDESEYSSDEEDSDGGEEGEDDDDDDDDDDGGINGGGDGDGRGGTKGGSGGSGDSTRGSSRGSTRGGGGGRGRASG

SEQ ID NO: 56273 - protein, 142 aa, Zea mays
  Coding DNA Sequence Number=SeqID_12898
MGKNNKRKREPTPPSEDFGDSEYSEEEFSSESEGSPAPVSPPASSDDSDDSQGIAAEVWTYIRAVERSGLDGSDESEYSSDEEDSDGGDEDEDDDDDDDDDGDGDGSGSGRGGGDGSRGSTKGDSSKGSTKGDGGGRGRASG

SEQ ID NO: 56274 - protein, 112 aa, Zea mays
  Coding DNA Sequence Number=SeqID_12899
MARPEHSPPTSSPACARRPTDSDHRQRRADHRRDRRDLPDLLGHLTGARSPPENKKGDRKWKPEDCNLADGEYVLIPEQGVAQEEVQEPAPDPATENLPAALAFEGKPRFYA

SEQ ID NO: 56275 - protein, 63 aa, Zea mays
  Coding DNA Sequence Number=SeqID_12900
MKKKPMMLEKKLTELSRLPEPYDPQADPVMKEALDVMIVANTIIDEVVDRLLNEATEKIQKED

SEQ ID NO: 56276 - protein, 203 aa, Zea mays
  Coding DNA Sequence Number=SeqID_12901
  Gene Ontology: Mol. function=protein serine/threonine kinase activity; Cellular component=plasma membrane; Biological process =protein amino acid phosphorylation
  Homolog annotation: Hit_ID=Q2QW32; Match level="QueryCoverage=56%, HitCoverage=11%, E-value=1e-11, Identity=41%"; Hit description =Leucine Rich Repeat family protein, expressed
MRVRHKESKSSISYVGMKVKLRYKESKSITCQGLQVYPKQPESRLIAARTQEPDSDVLLPSPIHQVNGLRSSKTSIQEFSVALEGSQQLTEKSDAYSIGVLMLEEWRWSRRGSRWRAATGRYIVRDEGGAGPDQGSVRPARAAGPGGGGLEQYMDLVLRCVEEAGADRPSMGEVDGEIEQVLKMAGGTGLHPYAESAASIPTP

SEQ ID NO: 56277 - protein, 341 aa, Zea mays
  Coding DNA Sequence Number=SeqID_12902
MANHLLSAYCQVLQELQDQDSFDVKRWKGNGGRVTKLASSQQHVKTIQEEDVVQATFEPWNLPEFNDFNGPEWRSSPSPKTMELKNKVHMSTYFNACRMTSDWNHLMPHYGHLLSQAEVDSFDPQQIGNPKCQNYAEGSRPPPVANNATQRANLANFFADEMLGFVVLGLQFTALEKNPFHFLHCRSILKDEPKWTDHHIGQQKPNLALIANDSNTIDLDPKESLPSSFASKLPLDRDLSKEKAKKTQSMDTSSTDSEYLTRLGDLSLERLSVYKLVASVEERKLEAYDKIHRQKLIIEEKLNLEHVRTDMQKENEDKEEKDMILSMDLNKCNMLLREYTK

SEQ ID NO: 56278 - protein, 60 aa, Zea mays
  Coding DNA Sequence Number=SeqID_12903
MGAVLFALVTGEYPVPSSIASGDRVAPHRVERVEELVVEDPGVQQIEVAEQELIEGKLCP

SEQ ID NO: 56279 - protein, 72 aa, Zea mays
  Coding DNA Sequence Number=SeqID_12904
MKLWKETFRSSKTTTSSRRGLAATPSWLPVKAAFIYVSFPHFDLLRCIQGDGLEAHLISLHGGNLFYMIEDP

SEQ ID NO: 56280 - protein, 678 aa, Zea mays
  Coding DNA Sequence Number=SeqID_12905
MCGPGGKDVFARAPGVFGADAEGYRGLHEARPKRQRGAAKAAAPGGGKPPLAAKSVVPASSKAAEAAAGAGGSKSAKTVPPSSRAPEVAKAARGLPSPGKRIADFATDISVDDYLGGSDEGQLVIVAPAAATTAAAVVPKAKGGALSAGGEMPTLAAVRDEAGAVSRRLKEMKEALSQAADFADRAASGALTAVVSAEVERLRTQHADVVREKSTADSKCRKLVDKVAALEGEKTDLRRQLVEERREANEALAKAQAALAEANLARAEGSLARERAAQLEERLNALQSRVERTEAATRAEAERMRKQLMDSYHELGARTGDFEVPDREPGLRCLEWVQEELQALPTIVEGFMSYASLVTCEGAMNALSREGCRHFEVFDQADEDFERDIYKVEDPIVKESAGAIYDRMWGPHGREVVRERAETARAQAARGERVDDFGALNSALPDPESNPAEAVSEAALEPPLETAEGAPDAPAAAAPRAEDPATVAAEAIAEATAEAPATAGSSQVQDFGPAHATATTNFLAASTVDGGNKYDGSVSEFSDFADSGSSVEWTEESSEEDLDYFAALDVAVAEASPHAADTEDVPGPSIGRRRRRAVAKRRVSGAEGGRLRACMMKLCALAHLAMLAKALRAWSGVFVMLDWCVYSRSWRGQFGVVVFAFVTLRPAVPSGNFCADGL

SEQ ID NO: 56281 - protein, 137 aa, Zea mays
  Coding DNA Sequence Number=SeqID_12906
  Gene Ontology: Mol. function=structural constituent of ribosome; Cellular component=ribonucleoprotein complex; Biological process =translation
  Homolog annotation: Hit_ID=O22424; Match level="QueryCoverage=43%, HitCoverage=22%, E-value=8e-23, Identity=90%"; Hit description=40S ribosomal protein S4
MSLTHVDPHCLNRLLTKYYYSIVLPLAHKVFDILLCPVDAAYKAVDKIIQALKPYFGPHKSRECLPLILIIRNMLKYALAYREVISILMQRHVLVDGKVWTDKTYPAGFMVQALQGEENIDWNSNLVAAKVWRLEFI

SEQ ID NO: 56282 - protein, 148 aa, Zea mays
  Coding DNA Sequence Number=SeqID_12907
MSICFAGCLFPGPRKNDLTIYWALGPFVRSFTLLVDPGDIYPPQAPDLWVNLEVISPKIPGPACRNWHEAIRLMLWRSALCHQYFASEVVQFICSATDWTFDGRSLSSLHAASVGHILYFTGYIWLSSDPLLASHFCLEVFTACPAQM

SEQ ID NO: 56283 - protein, 74 aa, Zea mays
  Coding DNA Sequence Number=SeqID_12908
MGKPIPSLLTLLLCRVTALVPTITGMGDHVSGRVRRAICCQVHSGIRTLILIPISSRRPRIPMDPCPQTIIILI

SEQ ID NO: 56284 - protein, 71 aa, Zea mays
  Coding DNA Sequence Number=SeqID_12909
MVTSGLMVGESEPGCGPFPSLSLKDFHHQGWGGECVELRGLLAAAPALRSVLPLFDPPEQKSSSSPLLEQA

SEQ ID NO: 56285 - protein, 37 aa, Zea mays
  Coding DNA Sequence Number=SeqID_12910
MKVPKSKINAEWLERDMVSTGVAKVAVHHKRFLEPPV

SEQ ID NO: 56286 - protein, 190 aa, Zea mays
  Coding DNA Sequence Number=SeqID_12911
MTPWLELSSDRDTIRSTPTISPPSISPTAHYNVLATVTERMDKRMNMFRSDSDGDGQIEAGNTRGVTYRFSAYHAAFALLFAYHVVVVLVFVGLLVAAEHGSALMGLLAFLVCAREAHHGTIGNTTIPHTQLHLRHGAWRHGEMELGRNHDNKVKLGCARDGEAKRDHGRRALCVHDHWALPYMFCSIRV

SEQ ID NO: 56287 - protein, 365 aa, Zea mays
  Coding DNA Sequence Number=SeqID_12912
MTSHGSSEGGNAHSHTDGLAREGFPRILWEVLQGAGYTTPPQYMVQLFEKHRVPRCRVRMTLEPHPLQPGWRSLDSESFGYRAEDTIEAIALHGLTTFCGFHPLELSTHPIGLFPVEKEDDPMWKDRVEHAKDVWALYPGQTAHLTVRCMNALYRLQVLRGEAMSQLMALLEATKITLDNREELVVDLSTNMVEKDLQVEQMANQIQELEELMGARENTIEVLEDQLINTQQQLEEANQHLDMHHQEIQEMEANEDVDIEGGVELEPASSLDTAGSGRPPFPRVKRCLVCPLSCRDRMAGRACRGQNERIPPPPPPPPTMQELMAQQNEILRQLAQRQPPPQHYGGGDHHQRPPAAATYQEFLSI

SEQ ID NO: 56288 - protein, 114 aa, Zea mays
  Coding DNA Sequence Number=SeqID_12913
MAQWLTRSTLAGGRRESDDRGLASPAKQTSIPRSGSFTEVCSVISEGRTGLGKAWLAGLRRQGLGWPRTRRARATDGEFELRFSGGYGCCSDLAVYLATRLDSRVGPYLSRRGA

SEQ ID NO: 56289 - protein, 230 aa, Zea mays
  Coding DNA Sequence Number=SeqID_12914
MESRSALWHSTWEKTEATQTTLLSRPPLLATLPRHCQNAAQKALRQLLHNYSKEVAETPLRYFPPSNKNNPTWRKRLQALSGREHNEDDPTVIYMAGYLHTLDTHFDDLFSHCTHLNSRVESLEQRIKELKEQNATLQNSLEMVEGEEANTREAYWTLKMDYARRMKRFALVKKIRKRFKSQGCQTDPKEESLPALPSLGIENLSNVEEVSLASLDDLLREFGDTLVGNA

SEQ ID NO: 56290 - protein, 37 aa, Zea mays
  Coding DNA Sequence Number=SeqID_12915
MAIHLGSEDRYFLLEECSGGDAGNMEDFEEFQDYDEF

SEQ ID NO: 56291 - protein, 173 aa, Zea mays
  Coding DNA Sequence Number=SeqID_12916
  Subcellular localization annotation: CTP_CleavageSite=54; ConfidenceScore=5.10e-01
MARWWRSSIRGGAIASEQRAQGPVPPTTASRCYAMQRIPRIQQRTYQSGRCPRRVSTADSGPRRRHDLGDEFQRTTVDLRPRRPNGNQPEGKSKAARLIYSAMESNQAMESLWPRGEGADYLGPLGNEKCAANTGDVGLTSEVPLSVERGEGWPMGPTGQTHVQQVESARGGD

SEQ ID NO: 56292 - protein, 131 aa, Zea mays
  Coding DNA Sequence Number=SeqID_12917
MGKDKKGQGSPRRSGDKRKREPSPSSEDFGDSEYSEEEFSSESEGSPGIAAEVWTYIRSVERAGLEGSDESEVSSDEENSSDSYEEGSGGDGDGGDGSDGGKGGGGDDSGKGGDDSKGSSSSKASGKASLA

SEQ ID NO: 56293 - protein, 129 aa, Zea mays
  Coding DNA Sequence Number=SeqID_12918
MDAHGSPRNKGGQKHVNRNVLNKHWDIKEEWNHLPSPTTSQLCLRKSLLSEKLTDGGTDAGMFSDITKLGSGTWHSLYPEMKSRRWEKLLTNESSEKGGTLADVIAGRLKGKLNRMRGYTERTHSSRKT

SEQ ID NO: 56294 - protein, 56 aa, Zea mays
  Coding DNA Sequence Number=SeqID_12919
MESHDLRAERESRLVGDENDGFGIDSGDGCQHCNHCSGQDEAVEGDFQEFQDYDEF

SEQ ID NO: 56295 - protein, 72 aa, Zea mays
  Coding DNA Sequence Number=SeqID_12920
MGPPQAPVQASVAAEQDDTAEEPEDGLPSGDAHAAEEEKRVDPESVQAAVAADAPKSSEESEAANDDDDASA

SEQ ID NO: 56296 - protein, 251 aa, Zea mays
  Coding DNA Sequence Number=SeqID_12921
MTSHGSSDDGNALSHTDGLAREGFPRILWEPGWCSLDSESFGYRAEDTIEAIDLHGLTTFCGFHPLELSTHPIGLFPMEKEDDPMWKDRVEHAKDIWAIYPGLTAHLTVRCMNALYRLQVMRGEAMSHLMALLEATKITLDNREELVVDLSTEMVEKDLQVEQLSNEIQELEELVGTRENTIEVLEDQLINTQQQLAEANEHLDMHHQEIQDMEANEDVDIEGGEEPASSLDTAGSGRPPSPESSVASFAH

SEQ ID NO: 56297 - protein, 101 aa, Zea mays
  Coding DNA Sequence Number=SeqID_12922
MRCMSIRSPQLVTTGALTPHYLKRMNLMAFSNRYSYGSGALNWYLNETTDQTKDVGKKSFEVPSAREKVKETRNPKPGVKKKTCKVKVDRVKSYGGSRITT

SEQ ID NO: 56298 - protein, 107 aa, Zea mays
  Coding DNA Sequence Number=SeqID_12923
MAHQIARFTRGGGRPKSGEDDSVSPVRQCLDSSLEKLHRILGKLSKGLVEAEGLWKWLATVTGARVARAGGAELAGAKGCVSGQRGLMGFADWIKRYGGVKLGLSHC

SEQ ID NO: 56299 - protein, 234 aa, Zea mays
  Coding DNA Sequence Number=SeqID_12924
  Subcellular localization annotation: CTP_CleavageSite=58; ConfidenceScore=5.71e-01
MAVTHSGIPPSACSWAAYTTSRLDMVYSPVSLAFPPTACVNTRPTRRIPSPSAMVSTRASSSGSLKRWDHVLGYLLRRLIDKVDEDILGLCVDAAVEENPPRLTLMPRNSATESWNALATSRSKEAAAQSAFFWRVTWIWRVIRFSLLRRREKRIAWRAGGSKWEGFAGAGVWAVRPPLVPHILSVVLRRVPDQDSSVRVALVDTGRIVAAASPPPRFSLSRTRSSTSRTSARS

SEQ ID NO: 56300 - protein, 157 aa, Zea mays
  Coding DNA Sequence Number=SeqID_12925
  Homolog annotation: Hit_ID=A3ANN7; Match level="QueryCoverage=55%, HitCoverage=26%, E-value=2e-26, Identity=70%"; Hit description =Putative uncharacterized protein
MEGDNDFFLMLSRSRTPASSQALLFQKGLGSENVVITQFYTKLEEKHKALEAEKDEAEARKKRNPCQASIKKGPPPKAELKKVPPTRAKSPKFTSSRRRSCSDTLLTPDGENTNATSTQPHRHSIRSPKDANRVQQCSPKSGVATKTRSVKAELKAL

SEQ ID NO: 56301 - protein, 90 aa, Zea mays
  Coding DNA Sequence Number=SeqID_12926
CNLADGEYVLVPEQEAAQEVAPDPAPEPALEDLPDTALEGKPRTPVEMNTSMLGRGSLKDMVAGVTWPSILPPGWTVEWDPTSAEEEHEE

SEQ ID NO: 56302 - protein, 646 aa, Zea mays
  Coding DNA Sequence Number=SeqID_12927
MRGPRGKDVFARAPGVFGADAGGYRGRWPKNVPIPRAAGEDFFTSRMARDLRVFHYGRNIAAVVSAVMTKDRQDAAQKCRAVVRMVDPVREAKRARGSAKAVASGSGKLVPAAKTAAPRGSKASTGEKDTAVGGTKPLSSGPSPAKLPPPGKRVADFGTNISVDDYLGGSGEGQLVVVPPSVAATLPSAVVKAKGATQDPWAAFCASGEILTAAAARDVAGTMSQRLREVSQQLSQQVTQQLKQAADFADRVASGVLTTDVAAEVENLRAQHADAVRDKSAAESKNRRLTEKVAALEAEKIDLRRRLAEERREANQAVAEVQATQAEAKVALAKGSLASQRAEEWEARFNALRSCVDKAETSVHSEVVRTHAQLVEAYRDLGARTAVFEVPDCEASLRFLEWLQEELLVLPTIVHGFMSYASLVTCEGAMNALSHEGCKHYEVFDQSDDNFEREIFKVEDPVVKDSAGALFDRMWGPHGREAVRERSDRAREQMARAEDVEDFGHLNATQPEAEVNPVLPEAEVDPAPPSETGEGSLAAPASTVSGGGSSPAPAPMAEDPLKAAVELAAEDPMAAAGSSQVQDFGPAHATATANFVAASTVVAGNESDESVSKFPEFDDSGSLVVWLEESSDEDLDYFAALDVAAA

SEQ ID NO: 56303 - protein, 213 aa, Zea mays
  Coding DNA Sequence Number=SeqID_12928
  Gene Ontology: Mol. function=ARF GTPase activator activity; Cellular component=cytoplasm; Biological process=regulation of ARF GTPase activity
  Homolog annotation: Hit_ID=Q6ZD39; Match level="QueryCoverage=74%, HitCoverage=22%, E-value=4e-68, Identity=74%"; Hit description =Putative ARF GTPase-activating domain-containing protein
  Pfam annotation: Domain name=ArfGap; Domain location=57-194; Score =143.2; E_value=7.1e-40; Accession=PF01412.9; Description=Putative GTPase activating protein for Arf
MGRKGRKCLVVGRGDLCMSPVEFEPSVSDDLVLEQKSGNGQHDVRGTHHHRTRMKPEKPIDLLRKVDGNNMCADCGASEPDWASLNLGALLCIECSGVHRNLGVHISMVRSLTHDVRVWEPSVINLFQSLGNMFVNSIWEETLPDDNSSADGSDTSQYLSISKPKHKDVFSAKEKFIHAKDSGSHQVTPPPHANFADRCLNSSGGATNNNPMF

SEQ ID NO: 56304 - protein, 104 aa, Zea mays
  Coding DNA Sequence Number=SeqID_12929
  Homolog annotation: Hit_ID=Q2QTF5; Match level="QueryCoverage=87%, HitCoverage=98%, E-value=8e-08, Identity=38%"; Hit description =Retrotransposon, putative, centromere-specific
METRALLFCLGIREKTEREKDLNMLDSDCRRTPTCDGHHGQMRARIGMFKHNMESLSSLLSYGSGIIDECPSGQGVTLHKIVTAIEGGVSVAKAQRLWKAVVGP

SEQ ID NO: 56305 - protein, 125 aa, Zea mays
  Coding DNA Sequence Number=SeqID_12930
MESHDLRAERESRLVDGYEIDGFGYDYGTASPLQPNRILAEYVDVYSPLLYTPTPPIPRVVSIATTAQEKMKPWKETSRSSKTTTSSRRGLAATPSRLLVKAAFIYVSFPHFDFYCKDYVDVSDV

SEQ ID NO: 56306 - protein, 73 aa, Zea mays
  Coding DNA Sequence Number=SeqID_12931
MGSSFFSAGEESQGSQENANPAKGDEPPKSARPDNEDECPSGQGVTLHKIVTAIGGGVSVAKAQRLWKAVVGP

SEQ ID NO: 56307 - protein, 19 aa, Zea mays
  Coding DNA Sequence Number=SeqID_12932
RHYGASGYEIDGSSYDYGA

SEQ ID NO: 56308 - protein, 52 aa, Zea mays
  Coding DNA Sequence Number=SeqID_12933
MARVACTLRGKRLDGGVSVLSVKKQQTFVASVPRWCPKKKIKTEAAGGSVLL

SEQ ID NO: 56309 - protein, 54 aa, Zea mays
  Coding DNA Sequence Number=SeqID_12934
MAMMGSTSEKMYLCQNKITHNESGEMARVACTLRGKRLDGGVSVLSDGMNLIWS

SEQ ID NO: 56310 - protein, 84 aa, Zea mays
  Coding DNA Sequence Number=SeqID_12935
MKGCSSSPQSGVKDLVLKDKELGRENEEEIEVEEARTTPPPPPPPPRLKNLRQETAFTLISVEQSRTLLSLKASPGAFYTPLLF

SEQ ID NO: 56311 - protein, 60 aa, Zea mays
  Coding DNA Sequence Number=SeqID_12936
  Homolog annotation: Hit_ID=A6N1H4; Match level="QueryCoverage=60%, HitCoverage=33%, E-value=3e-13, Identity=97%"; Hit description =Retrotransposon protein
MGDKLHRREGNSPDHQLTPLNDRSVIKEVGVQRQPGEPFEKTFKGFSKIRDRSNSEKDGT

SEQ ID NO: 56312 - protein, 122 aa, Zea mays
  Coding DNA Sequence Number=SeqID_12937
MTASITRSGEETENSTLWNAWLYSGFCTVAFGVDDGQSRAASGAARRAPGRGMAARRGRERHEGEGEPGNGRRTQGRLRRIGRLASWRRRGRKERDTCGWGPQGGEWRKRRPPVQGRGARAA

SEQ ID NO: 56313 - protein, 50 aa, Zea mays
  Coding DNA Sequence Number=SeqID_12938
MERGHLTSAYSTGSGRLDTGIVPKALPCGLDYKLVTKFADEDYDAELHGC

SEQ ID NO: 56314 - protein, 160 aa, Zea mays
  Coding DNA Sequence Number=SeqID_12939
MARVACTLCGKRLDGGLSKVSWTRTTVGGPNDLGGSVTAGIGAKPISSDIMKHFKKNFQILTQEIFFHPYLATFWKFSSCKTRVWAEDGQRINELAADVRRLQDELSERDLAVDWAVNSRSIAWDRETKARDRVTELSTTLDNLQVYCNTLHEEVHVLYA

SEQ ID NO: 56315 - protein, 88 aa, Zea mays
  Coding DNA Sequence Number=SeqID_12940
MKKMIKPQHHPPRTKKYSDASERSRIFSLTLTGKCKEREDASHVGRRAIYGIIAQIRLNPKRGEAKARRLQVSRLGMILQAKMNLQNS

SEQ ID NO: 56316 - protein, 176 aa, Zea mays
  Coding DNA Sequence Number=SeqID_12941
MGRGKRAKDWPHHANGKRKRAPSPPSEDFGDSEYSEEASSEYDRSPAPASPMASFEDSDDSMGLSTTARAYWRSIERAGLGGSDDLEEVSSEEVDSSDSSKEWSSSEGDGGYDDDGKGGGGGDGGDDNGDGEGDAKGKDGDGEGDGSDGKGDGDGDGGKATVTAARATTATTRPVA

SEQ ID NO: 56317 - protein, 101 aa, Zea mays
  Coding DNA Sequence Number=SeqID_12942
MAMTAAMIGYFIFVDACLRWIAILALLPLLYASNGCDVNGTFKHDSDGNHHKKRDMVMEIMRVPWCWGEGVTPPRSIVSQQKRNMSEGKQEQAKTGRAKAP

SEQ ID NO: 56318 - protein, 516 aa, Zea mays
  Coding DNA Sequence Number=SeqID_12943
  Gene Ontology: Mol. function=nucleic acid binding; Cellular component= ribonucleoprotein complex; Biological process=regulation of alternative nuclear mRNA splicing, via spliceosome
  Homolog annotation: Hit_ID=A2WYW1; Match level="QueryCoverage=35%, HitCoverage=40%, E-value=8e-65, Identity=67%"; Hit description =Putative uncharacterized protein
MLNANAMRQNSVFGALQMGYVPQYNGFGYQPQGTYGLMQYPPLSPVQNQAAFQNMVQPINQASSTRGANSELPPDLVPRSFNSTQLGSPYSPLPGLQYPGVYPGGPINHRPFSNSHSSTKVQNLNANLPSSSPSSNPAPQIEGPPGANLFIYHIPQEFGDHDLANAFHSFGRVLSAKVFVDKATGGKLLVEGITQCAVWHRHTVLQQTQQARRLLDDLDAVCQRMGRDTLNAERAHHPSTQWQAARPLLNKCRGYTTLRQARPDGLCHGPQAAGLRLRGERRTRPAHVSAPDPCIPQGPSRSGPLPGFGPPPGLRTCMTSVFIGLAGVGGPKYRYAFGYQLYSRHALYNENAVACDHMVRCHTRVSRAQRPVREIITRVDAIEVGGYKRPRGRERESLFVSPSSRATTSSYEGLGPSFYRCRALGSGEAETVFQGRGGGRAPGSGEAEAVFRGRGGGRAPGSGKAELPMAPEAGLGCCQPHLGGWHNSRSRAGDTVFLSGQSVEGRSDCGRFGPAD

SEQ ID NO: 56319 - protein, 199 aa, Zea mays
  Coding DNA Sequence Number=SeqID_12944
  Homolog annotation: Hit_ID=Q6J9V9; Match level="QueryCoverage=58%, HitCoverage=44%, E-value=5e-16, Identity=43%"; Hit description =Putative uncharacterized protein
MQVACNCTTETRPFDFDTSSMEAQAHTSWTGKGDTPKGILLRKGSKPRALLLIRAASEHSGSAPTTDQGFEGWPPEGFDSRPRTRRARDDSGSSDTWPRLRLRSRGTLGHLRDQQERFCNGIPSEGGIEPSDPMKRDRVRQITCRGLGAALANLAPAKPLTASTYQPENSEPNHAPGSRLRPLKGHDLASPEPSLGQEQ

SEQ ID NO: 56320 - protein, 250 aa, Zea mays
  Coding DNA Sequence Number=SeqID_12945
MVGRSKPGCGLCPALSFKDLHHPCWGGGQGEPGHAFAWAGVPLLPPASGGGNHPPVLRRRRPPAMRGKANCCCPARVQRSVLYPGDFGRPHRRVSQHVVRREGGTRVLGRSRSRFHGDDGGEDLPVRFGATDACWCGVGGQVDAAIGAEVVAAREGFSADEIVDAICAPGLRLFGFDSLSSPLEWGCGRGPCRSSVCPEVIAAAVWPPGAEVVVAADGAVGGEPTGVRCPAGPPVWRLFIPTGVEPEFRL

SEQ ID NO: 56321 - protein, 125 aa, Zea mays
  Coding DNA Sequence Number=SeqID_12946
MEQEYQREGHTSHKPHLAPARDHEDRLAAAQQFLDPTAVALIGAMAAWKLWRWWHRVAAAEDLEGGGGGDEGREIKGDSRQRLRESSTWDGAKWTARDADGTHPDDHDFLSGVDQPTGKGFHLVL

SEQ ID NO: 56322 - protein, 58 aa, Zea mays
  Coding DNA Sequence Number=SeqID_12947
MAVRRGIPTLELPRNCSEFSEANGTLLRTRSGTLPRFLGRGEEQVVEEEPHNEEFDLI

SEQ ID NO: 56323 - protein, 149 aa, Zea mays
  Coding DNA Sequence Number=SeqID_12948
MSLCQSSLDGGFGVYLRACICLCADLPKVFLLKGPSTTKQSPNNCIVCNRSLCKYDVRYTARVNQDVVDQKYLDNTRDNHGIIVRIVFKLKIFLGEAGSELEPPVIGSTSFVTEGATTWLLYEAIVTTVEVSSLEVGANVGHLFSKAMN

SEQ ID NO: 56324 - protein, 346 aa, Zea mays
  Coding DNA Sequence Number=SeqID_12949
  Gene Ontology: Mol. function=binding
  Homolog annotation: Hit_ID=A3AKF2; Match level="QueryCoverage=64%, HitCoverage=21%, E-value=1e-68, Identity=61%"; Hit description =Putative uncharacterized protein
  Subcellular localization annotation: CTP_CleavageSite=58; ConfidenceScore=5.48e-01
SAAAVIAATARATYRHRPSAPPLCCAARAPLAGGSQARPLPRRRAQAAPSPPLCRHTRAAGAPPRPSRSLAAPLECRHAQAARPAVLCCWLRRLPASPALPPSAQEEFASWVALDHENRQPSDLSPEESCPPEEAFFLANDLLDIVPAVESFAGSRFAPSIVSALKQWLPVLLLGLVCRWLIGSHNEMAPNVFHFADSVLPLWVTTVAKNELVDSKEPGQDEQSNLTAEGEDSLLSRKLAEMMAILLKKGSPRILDCASGVLLSTFQLTLRRSDYDIVLGMTRFICDKLLGNNSLALEKLQLTRDFLHENFLEIDRYVRDELVHDDDSRQQLEKAKALIRSVLTDV

SEQ ID NO: 56325 - protein, 78 aa, Zea mays
  Coding DNA Sequence Number=SeqID_12950
  Subcellular localization annotation: CTP_CleavageSite=53; ConfidenceScore=5.31e-01
MGCCWFSLVLVLVLLLPSCQASSWRGVQVQPLKARPPLQGGASSNSFLGFLPRQAAPPSGPSRQHDSVGLESQRQRQP

SEQ ID NO: 56326 - protein, 98 aa, Zea mays
  Coding DNA Sequence Number=SeqID_12951
  Homolog annotation: Hit_ID=A2ZHB7; Match level="QueryCoverage=32%, HitCoverage=4%, E-value=2e-07, Identity=84%"; Hit description =Putative uncharacterized protein
MEAANRLIGEGRGAAAGVLEGTTSGVVYMEKTVEDAEGTASVVRAMSEKFDLLIVGRCPCALESDPRRRERAKSRGNQILKGNREFFRGGGRGAAGGG

SEQ ID NO: 56327 - protein, 373 aa, Zea mays
  Coding DNA Sequence Number=SeqID_12952
MTTAALSPLTEARRRQQGLDSPDSCPSARLQRSSDGHDITRTGCQNLSGCHDGMALLQRVGRAGEGRDDAHKPLALSHADAYAQMALSDLVFTLAIGRPELIILEKWRGQRRQDAQAVSKRDAALEPGALERRCGDWSLERSRQSRSDRSHFAAPLTGLTKGQRHLRRSDCCAARQSEADRQSGPTSGTIGSSAPPDPGLGLGLSPGRRRTSLRPTQGSDSGSAPEDGELRSARPRARTWAQPQKTTNSAPPDPGLGLGLSPGRRRTPLRADPGLGLGLSPRRRRTPLRPTQGSDSALASADGLRLARPRGSDSTTATEDRLDPDLGGASTSPNLGHGPTTSTGGAIITLPQADSGYGEQDRRPIWLTPPDRQ

SEQ ID NO: 56328 - protein, 209 aa, Zea mays
  Coding DNA Sequence Number=SeqID_12953
MCRHQRTGKTSAEVVEIVPCARNKWGNWCDFWFYVAPGDVEGLPSLPPAILCSHCYVAFPRFEVVEENEEEGALRYVAHLSSGRDLVEEFIAYGVWALGTWLDVGQSDPPPDAYLGGQMVQSLAFAVDLRGRDATAFVCEVEAEAVKIVGKYVPKTETLRSRDIRGSNVRLNRVFELNHLSYGGYPRGTMPTLLAAGGNKRCQRPTRAP

SEQ ID NO: 56329 - protein, 98 aa, Zea mays
  Coding DNA Sequence Number=SeqID_12954
MKGMPNVIQSLMTFFAHVIYKGNFEALVAKGAATKHVEQTSGLLPFIFIGLLLHTQTIEPKLPGSASVALSFTNDVLTMGLIFANHLTMQLGLTSSME

SEQ ID NO: 56330 - protein, 132 aa, Zea mays
  Coding DNA Sequence Number=SeqID_12955
MAGQKLDNVLKIVTGLATKFADLSTCIIDMESHPTATQTTFPTSQPEFPYGRRPIRSADEAPTDRPAAAGRPGPALSVRGGGQPGHSDATSTCTLPPFRIRRRLVSPSVAPTAEIARTPPRRYVQQLHSDRR

SEQ ID NO: 56331 - protein, 180 aa, Zea mays
  Coding DNA Sequence Number=SeqID_12956
  Subcellular localization annotation: CTP_CleavageSite=27; ConfidenceScore=5.41e-01
MATSNPSRGMAQRFNCLSQRRRHQPTMCSQVCDPCFQIPFFVPLLLKRVPFFLPLRSLCSAKTATSSRNCDVLVVVVRSMSRGSALTGHKVEELAAIGPSLGADHVNTSAREEDVENDLSTQYHPTCRVVVLARYPLARPSLNFDSSSFHLLLFLSKSPLNLVLSVLLNRCLRRWRDRDM

SEQ ID NO: 56332 - protein, 30 aa, Zea mays
  Coding DNA Sequence Number=SeqID_12957
MASEGWLVTKLEVTLSRMTKLKYDGLKLDS

SEQ ID NO: 56333 - protein, 129 aa, Zea mays
  Coding DNA Sequence Number=SeqID_12958
MEFPTKVGLRLSVLSNTASVLRRLFAELVPIERLWLISALRKNGKFLSADLKINLFIDASLPVNIWAPFLDFGGSIQSITSIFLGLASIPFVDTKQPRNLPFFTLKTPFSGFILRPVWWNCPNYSDLSA

SEQ ID NO: 56334 - protein, 58 aa, Zea mays
  Coding DNA Sequence Number=SeqID_12959
MGNNPWGLVVHGIKIGIRIKVWYRSLEDMVAGVTWPSALPPGWTVEWDPASAEEEHEE

SEQ ID NO: 56335 - protein, 63 aa, Zea mays
  Coding DNA Sequence Number=SeqID_12960
MKLPEQGIEVCFAGEASPRSPECTTPPECVDRDMVAGVTWPSILPPGWTVEWDPTSAEEEHEE

SEQ ID NO: 56336 - protein, 289 aa, Zea mays
  Coding DNA Sequence Number=SeqID_12961
MHDLLLVLGLLGYSGWLPGQEDELPGCSEAGTGFLPAECFDGIAAATTAEETASGTGAGADFDAGADFDAGAGADFDAGAGADFDATDDVDAGASCLSSGNGCYSRPEVHQSCVFCPPFPTLPSSHDCSVYQMLEGGESVVHELGTLLHGEKLLPHYHQSLGHMVAMEVVPELLPSNGFWVGMGGEAPMSSGLALEAKAGVAAAVPAASLLRFDQLPGLLGSASRTFAQWSLGVAGANAAAELPPPGVPVALAEHASHLCACSQTSVETIHVSNLTLQSFSIRKIYGNL

SEQ ID NO: 56337 - protein, 131 aa, Zea mays
  Coding DNA Sequence Number=SeqID_12962
SGFPQPNCMVSLTPGSGRQPLVQCAVESSGPLLADVRVPLIGYTGLVRGLRSPTDGPQLAGLAPTSRDDRNSFARISSMPRSLDTKPPMRVLGRDGGFAGHGTVVRAGGVAVRMVQGEKKGAGPLDPCRMA

SEQ ID NO: 56338 - protein, 201 aa, Zea mays
  Coding DNA Sequence Number=SeqID_12963
MPSAPPQGIPAAEGDPDGDGDDDDTGGSSSHGIERSEEPEPEGWIARPITRDATRGCHFHDALDTLLRRAFDRHTWSIEYRCVVYQHRRGVVDGLDLKYYPHHSTGSAGGVIVSPVGEGNPRLSSMVNLAAVLNAELDHTFDELGKVRAEVVELHAECVARHYLDGGSPAPIGIQHPYRSLPRGRFDYGTLDCRTRIDLDP

SEQ ID NO: 56339 - protein, 124 aa, Zea mays
  Coding DNA Sequence Number=SeqID_12964
MNVCELTLAVSHPPQVKNRYHRMRRMEDVCAMFVRGVRLDPSTPGEYFVSGFWTPKTGCDTPSRLEASSSHRDIYNTPDYLQQHGFGNPEYEVYFRTSYSTKEKDFQGYVGFGNQGKAFSKNQL

SEQ ID NO: 56340 - protein, 68 aa, Zea mays
  Coding DNA Sequence Number=SeqID_12965
MAIDRACVSGRGRETRSIARTRENCTYLRINDWAIGVQRISPQRLTPSQIKAIPWPVVFIAPIPMDIV

SEQ ID NO: 56341 - protein, 246 aa, Zea mays
  Coding DNA Sequence Number=SeqID_12966
  Subcellular localization annotation: CTP_CleavageSite=93; ConfidenceScore=5.49e-01
MDQPLRPIPAQASYSTNFPESAPTSPSEAPRTIQSNSTTVYRPSPSPPTTSSAPARGQHDSDHLRPNQSYRRVCHILPLLPDLTPGTLPTTLSGAAVISSRNTVSAERGPQVERGNSGVSPRSCAARGKEKLAARGLLGHGDVVGASSTARALAPCSSAQDRGFIGAPWKGEVDELLLAVEQGRGASAVCESWSLGEGEQRRCAGKKGTMAGASGFIPEQGVGPRGTTPCACCSLEEEEEGLLGRG

SEQ ID NO: 56342 - protein, 252 aa, Zea mays
  Coding DNA Sequence Number=SeqID_12967
MTEDPLTGHMPRHGIHFSKHFCKTESLIIEKPHLDSLNQHTLESLFFSRLCNRFRISISLMFCNVCKTGETFLESHQLAPRQDNSSSGSNDPIGDLEAEVSRLQAELRRRTTIWVVDGDRINELRRDVRHLRDQLVDRDLALDWVVQSHSLAWDKEQKAQARVAELNLTVEELQTYCNTLHEEVHVLYSQLHPSEPTNPDESEAGPLHVAGHALGGELDLFSAPSFYEAGRRMVSHTRRRGRQKQWEAGIMV

SEQ ID NO: 56343 - protein, 205 aa, Zea mays
  Coding DNA Sequence Number=SeqID_12968
  Homolog annotation: Hit_ID=A3AJE1; Match level="QueryCoverage=23%, HitCoverage=28%, E-value=4e-08, Identity=53%"; Hit description =Putative uncharacterized protein
MTWNLRGTYLGAIDLGTEVGARSMMPTSVPRSMAPRDISLIYRMSRRGKSAKQRKGPLTGTAFDPLPLPSGVPVPMCYCGDPCKVDKSEDHDTYRQRYWMCANFAFEPTIVQRRMNLMIDTEISGKDKKWLENLKKWDAEDKERMEKRREELAAEQQREDEQEMRSVAECREEKEKKLERLRRAKKAMEENPDAFRKGKWPRCTQ

SEQ ID NO: 56344 - protein, 285 aa, Zea mays
  Coding DNA Sequence Number=SeqID_12969
MSCTTTVTTGGTKLGTRVQLVDIDRQLLTVGDTSMHSFLQRLSRRLRGAAARCGCRTNVAHDIHVPSCTDTTTPSTGMGAGFDYDHDEIGPSQLQGAPSTQPLQPQDRRRHRSPQRYTPGTDALGKGSSRGKGAGNERRKDGGKLTPMCFDGPLGPDFFEEAVFNFPVQSKKDFNKEHSLVKENCGFTRWVDPRPIFPHAEYISYLQNRIFDLEREVSNKNDEEERDNNNGGASQVQVCPDPYCCCPCHNKNVGPPSSPPHPQQTTTMGGYYGEGSTQFGMWEHY

SEQ ID NO: 56345 - protein, 78 aa, Zea mays
  Coding DNA Sequence Number=SeqID_12970
MARAHLGTTHYDHMWKNLRSKDCNLADGEYVLVPEQGAAQEVAPDPAPEPAPEDLPATALEGKPRFMHNMLFMLSYFT

SEQ ID NO: 56346 - protein, 44 aa, Zea mays
  Coding DNA Sequence Number=SeqID_12971
MAVGVSEALYAKAHLSGFDLGIARYEGRSWFSLRGLFENFAKLH

SEQ ID NO: 56347 - protein, 118 aa, Zea mays
  Coding DNA Sequence Number=SeqID_12972
MNNTPVLFTLTWTRLCITLVFLSSVKLKHLRTSPQQLQYVQGFNDLCQYAGYHADSYEKKRDRFRRGLSTKLRERLNTVRANNYNELVNLAISQEDCILAHREDKKRKAPMAGSSAQP

SEQ ID NO: 56348 - protein, 57 aa, Zea mays
  Coding DNA Sequence Number=SeqID_12973
MESHDLRAERESRLVGGNETDGFRYDYGDGCQHCNHCSGEDEAVEGDFKEFQDYDEF

SEQ ID NO: 56349 - protein, 147 aa, Zea mays
  Coding DNA Sequence Number=SeqID_12974
MGEKKGRRGKLLQGGPTMDSEGRAAEGVHGRGLGFPALEESLHVSRVGGHARRGEGEAGARVHGAEEQGAMEGAYAGASSPKRPLATGREEQGAAGDTPAPWTPGRSFSAEEEGRPTAGASSAMGEGAALPAAAVRKKETGKKEGSG

SEQ ID NO: 56350 - protein, 232 aa, Zea mays
  Coding DNA Sequence Number=SeqID_12975
  Subcellular localization annotation: CTP_CleavageSite=18; ConfidenceScore=5.31e-01
MKLWKETSRSSKITTSSRCGLAATPSRLPVKAALSTFLFRTLIYCKNYMDVSDMARLRHTARKSVIPFLPSRLAERPLRRPVAGQSSHLERLHHRLREEQERRRQEQQSSSFSLHQEIESVRSCSPVLPLEPPPAPPLGAPASGVAAGGDPDDGDGDDSSSHDTDFSANPEPEGWVARPITRDAARGCHFHDALDTLLRRAFDRHTWSVEYRCVVYQHSRGVYPDRWGGNLL

SEQ ID NO: 56351 - protein, 68 aa, Zea mays
  Coding DNA Sequence Number=SeqID_12976
MACGRLTVLPQRSRASMLAFQVKIVDFVQGERCANWTNESQPRAYPGPGATGLRRRCRSVAVPGGQMC

SEQ ID NO: 56352 - protein, 242 aa, Zea mays
  Coding DNA Sequence Number=SeqID_12977
MGVALPMLLSALGREISFSLDPWRPAQVLHGQRPPPTPRTRYIAQLGLAIAQGRVGASFFHLWPSSLFPCSMVPPAMSPCSSPCFNAQNSRPLSGLGGTAPSLFIFLPVGLPPLLLLAPFLLSPLVRQPWRPSFLRSDVGPKQQPRIPSAPCASLDLCSPDPRHRIGVWDSPCRVVDLRSSTVYASHFARFVQPHPRHRSPPERNPVFCVEEKASRPTLVDVRSDAQIGIAIVLTNTDWVCL

SEQ ID NO: 56353 - protein, 74 aa, Zea mays
  Coding DNA Sequence Number=SeqID_12978
MAQSVRGRGRARRRLLLRPRLRSGEVVTPPEAEAEAEAEAQGQARRRSSPEAEAEAEAWGRARRRPSPEAEAEA

SEQ ID NO: 56354 - protein, 75 aa, Zea mays
  Coding DNA Sequence Number=SeqID_12979
MFRLQVTMRLMVLGFDSGNGGIIGSMGMLCDSTQDVETKECVAPVGCSDGTAVAAAEETASGTGANVDAGAGDLA

SEQ ID NO: 56355 - protein, 293 aa, Zea mays
  Coding DNA Sequence Number=SeqID_12980
  Homolog annotation: Hit_ID=A2XFR6; Match level="QueryCoverage=59%, HitCoverage=49%, E-value=4e-10, Identity=28%"; Hit description =Putative uncharacterized protein
MVALRTIDPYSYLDLSVLLKFYSHSCAYDVFYRWLVLDARHGIPTTGGDPDGDGDDDDAGGGLSHDTELSEEPEPKGWIARPITCDGARGCHFHDALDTLLRRAFDRRTWSIEYRCVVYQHHRGLYPDQSEATCLVRRLDDDLRGAEAFLEHKSITERDTIEASMQDATRRALFQYCLLFSGVADSLDQKYYPRRSTGSAGGVIVSLVSEGNPRLNIMVNLAAVLNTELDHALDELGKVRAKVAELRAECATHHYLDGGSPAPVRIQHPYRSSPRGRFDYGTPDCRTRIDLDP

SEQ ID NO: 56356 - protein, 98 aa, Zea mays
  Coding DNA Sequence Number=SeqID_12981
  Subcellular localization annotation: CTP_CleavageSite=68; ConfidenceScore=5.43e-01
MPAACNRAKWAHLSDFQRAQHGSPGPHVMQPVRRMLRASNCTATRATATPPRLWNQYRDSRQPYARPSSASLARWDRERGIPRKGSFSVKEPGSEPPY

SEQ ID NO: 56357 - protein, 148 aa, Zea mays
  Coding DNA Sequence Number=SeqID_12982
RCVRPRSGEAQEQAVRAEADEVQREVAKAHEEEEAVPEEKDVAVVGEEAEAEAETETEGEEEAEVEVEAEVEVEAEAGASSAKKNRIQVSTNKKPLYFYVNLASAMCSPNMWFMLGLGIRSIRVIQFGLFGSIRVLKVRNRTRTRKPE

SEQ ID NO: 56358 - protein, 106 aa, Zea mays
  Coding DNA Sequence Number=SeqID_12983
MANVECAGSGTTVIAGRGATSPMMAYWPRAGIRWQEESGMGELGTRQQGRCGGERLDRRLLFSQLLRALGEVGKGRLRPIDIILEDLLDLWVRTHTLSLRHFNLVG

SEQ ID NO: 56359 - protein, 210 aa, Zea mays
  Coding DNA Sequence Number=SeqID_12984
MTAVTSALPGGGGRVRIKGLGRAGNTFAAGGGPRARRKSSGLYADGGYQLRIRSLEVRTGGSVAVVAAHWSPRARATPEAHLLFQPSEFPAPMSQKPPTPVPAPTHPFPTSPNARNSWENRSQRSSLSPPHRPCCRVPSSPMPLSSCHRIPARGQYAIIGEAAPRPAVTVVPDPAHSTFAMAAHRLPCPVVARWPRRSRLAGARRCRLGW

SEQ ID NO: 56360 - protein, 307 aa, Zea mays
  Coding DNA Sequence Number=SeqID_12985
MHRHYDPIPPDFFFSLPVCTTVVFLRTGVGYDYDHKRPEIYRGGRPGAQAESACMRNTDGIRSCRAQSSADFCFRPTNFQAAGTASNVPGEPRAADYARDLSPEIPARALPYWSRRPCDSHRCCIQEKMILPELDGEGLGWRVGQGHGQPPGRHGWALRRHWGSGGSRNEGELSRLGGNPAAYSADRGNLAWVCCEPSGLVRTAETVAAWRGRLWKVGPTRQSTTRGDFLAYGFRPSTTRVQRLRSCLRQAVSAKGTEVTPWSHVSLRQGNVWLVDYIKKQTRRRGLHEGLKVIGRLEDGSERMWFF

SEQ ID NO: 56361 - protein, 153 aa, Zea mays
  Coding DNA Sequence Number=SeqID_12986
MAALSPLTEARGRQQGLNSLDSCPFARLQRSSDGHDITPAGCQNLSGCHNGMKDQGPFREGWPRGDEDETGARVRPLAPSLVWTLVTPYCKRTRPGRGTNTKAAGFPPLSRPSPATSLPPFALGLAPTHLGWGSRRHFTRRLRDPRSRNTDTT

SEQ ID NO: 56362 - protein, 113 aa, Zea mays
  Coding DNA Sequence Number=SeqID_12987
MAGALGLTNRRLIPTENLGYATWTTRRVRGRGSYQYWRRAEHRLRRDMARGGLLPTVRNSEVRVRIPERRVHIYPPTSQGKRQGTILGPDRWHDKDLTRRHVSLRCSTMAAWG

SEQ ID NO: 56363 - protein, 116 aa, Zea mays
  Coding DNA Sequence Number=SeqID_12988
MEASVMAPIFLLKDLGTGIVPQLFPEGRGIGFGTSDGLYAVVASVMAPIFSLRDLDTGIVTQLFPEGGGIGFGMSDGLYAVLISNIRIVRTLGISHIVIPLPSAECATSAECYDGS

SEQ ID NO: 56364 - protein, 176 aa, Zea mays
  Coding DNA Sequence Number=SeqID_12989
MGVSEVKIPRPSCSSRAQVRRKERIQMYNGSWCDVVAVGGALEPGGGTAVGAVESLLTSSCFRKGAESRRRHKVCGAPSLPIWRSEPDGTPVLFPVARVSLGAESEPWGRAKWSSSSSGAEPKSEPWVGRSGVRRLLGLSPSLSPGSGGAEFAVFRDLARVRAPGGAEWSSPSSGT

SEQ ID NO: 56365 - protein, 82 aa, Zea mays
  Coding DNA Sequence Number=SeqID_12990
MAQLYNGGVAMCYVASGEVPGRYARVNVSVGEVHEPCRSTAVGVAWILLTSPCFRRGLRTTDVMDACGEPSLPVTGVFISRV

SEQ ID NO: 56366 - protein, 515 aa, Zea mays
  Coding DNA Sequence Number=SeqID_12991
  Gene Ontology: Mol. function=DNA binding; Cellular component=nucleus; Biological process=cell division
  Homolog annotation: Hit_ID=A7P2I8; Match level="QueryCoverage=90%, HitCoverage=62%, E-value=3e-37, Identity=40%"; Hit description =Chromosome chr1 scaffold_5, whole genome shotgun sequence
DHTTPIEDVDKFYNFWYNLKSWREFSDDDEYDLEQAESPEHKRWMERQNAMPQEKAKKVEYARVRTLVDNVYKKDPKIQMRKEEQKAEKQRRKEAKYLTKKLQEEEATRAAEEERVRKEEESKKVAEAALHQKKVKEKEKKLLRKEKTRLCTLAAPVVADSHFGMSKEDVESTCASLDMEQLKKLCDGMDGKDAAENARMMSNALRNESSSKEEKKIEANSVECPGGAVVVLRAVPGFFRGDGGDALVASLYLLGHHWEASCSLLHGALEGVNPVHPWTCDGGAIGVVPSLEAPHLRLVLVRGAMGDGGLELMRLVRWCPQCRWAACRSLRLLAWHSVDDGSAVRGGFFRFLSQFVVKPDSSKAFDSFLEKCKQAQSIASPLWTRDEISSSTEGARTASSKAPQPASSQTANGKAVVDPVPDEAPSVADPDAWTEAQVLALLQALKAFPKDASQRWERVAAAVPGHQSCCTVASRRMMPVDAFSERQTLNKNRGGGGAAEDRRRRLDLAPGRDPV

SEQ ID NO: 56367 - protein, 160 aa, Zea mays
  Coding DNA Sequence Number=SeqID_12992
MRSESAAAQPLCHHRPASGAIPNPVQPSEKTVHTSVKLTERGIGVYFAGEASPRSPELSTPPEYVDRVNHFTVLRFLVHTVATSPREAHRALGLNQLAVVWPVYSPPTRTPACTRGPDCNLADGEYILVPEQGAAQEVAPEPAPEDLSATALEGKPRFYA

SEQ ID NO: 56368 - protein, 279 aa, Zea mays
  Coding DNA Sequence Number=SeqID_12993
  Gene Ontology: Cellular component=extracellular region; Biological process=cell wall organization and biogenesis
  Homolog annotation: Hit_ID=Q7XCA7; Match level="QueryCoverage=91%, HitCoverage=92%, E-value=7e-78, Identity=56%"; Hit description =Expansin-B6 precursor
  Pfam annotation: Domain name=DPBB_1; Domain location=88-170; Score =114.1; E_value=4.1e-31; Accession=PF03330.9; Description=Rare lipoprotein A (RlpA)-like double
  Pfam annotation: Domain name=Pollen_allerg_1; Domain location=182 -263; Score=128.8; E_value=1.5e-35; Accession=PF01357.12; Description= Pollen allergen
  Pfam module annotation: Pfam domain module=DPBB_1::Pollen_allerg_1; Domain location=88-170::182-263
MAVAISIKLAALAALVVSVFATHGARAQPSYYNASAARRELYYSSTTGGSWLPARATWYGRPNGAGPDNNGGGCGYSGTNTYPFNSMTSCGNQPLFRDGKGCGACYQIKCVSKNNAACSGEPKTVIITDVNYDTKVAPYHFDLSGTAFGAMAKPGLNGKLRDAGILDIQFRRVPCDYKGLNVKFHVMGGCNPFYFAVIVYYAGSDGAVVQVDLKEANSPAWMPLYESWGAVWRIDPGHPLKAPLSLRVRSDSGKTLVAYDVIPINWRGNADYRTIAQFH

SEQ ID NO: 56369 - protein, 215 aa, Zea mays
  Coding DNA Sequence Number=SeqID_12994
MATHEARCSSEWRHGRPEIRAAMIARDILRSGAVFFSIIVFYAYHIRGRGWCNRQSGPVEVEPFVEKEGRGRESEKVLSGACGSDEDVREGRRRSGWDGWLGPGASHSVCLPKPGVTPTGSTESVVVSPVGEANPRLSSTVNLVAVLNTELDHSLDELSRARTEIAELRAELAERHHQEGGSPAPVGTQHPYRSPPRGHHTYGSPVCKTRIDLDP

SEQ ID NO: 56370 - protein, 31 aa, Zea mays
  Coding DNA Sequence Number=SeqID_12995
MAIIFNTLLNFNAGEIFHFGSISCIADQEGN

SEQ ID NO: 56371 - protein, 484 aa, Zea mays
  Coding DNA Sequence Number=SeqID_12996
MAVTYTCRNSDGFDVPSYFFWQVRPELRRPRRHAEMIRKSGTTHAGQGDTHLGPDVDASCWRQDDRGLDLVEVECAMPSSQSMSSRHCFMATGEAVELGGCRNNSLAADNAPGVALDGVRDVCAVVCCCAACTAAVPDTGQLGTSGEASRIRDGEHNAPIRDGEHNAPHDTGALFDNRLDMRAVYRAARPFRNKCRNRTALEALRQAPLVGLCHGPQATRQQRVSASTGSAGEGLDTCQHRTPTHARVPPVPGPCCGPDLSRRDLGPSEGPDMPSWESGSVIEDPGCAYRGPVFLRGGPEPMMHPGDASWAWAPVPETGLSVWTEVKRRTTAGGGVLLMRQFAFSAHGGRHPRSMTRGPGPHVRGWAAAFGGDEEVHYRRRWRAPPAAVRLLRTRRPTPKEYDSWAWAPVSEARPLLSVEMKRRTTAGGGVLLTRRFAFSAHGGQHPRSMTRGPGPPRQRLGLPGARRARSSATSRGVSGGIFL

SEQ ID NO: 56372 - protein, 263 aa, Zea mays
  Coding DNA Sequence Number=SeqID_12997
MASLVHPERYLTERRLDTVCRLLGWRARSPAPAPHPHSILQAAIFAHLCEMFMGVAPCTSLFRHFFVLVKSGKAKDHLELLVKGITGESFVAESLIPPEGISPLCDDQGLRSVILDWLPTLDESGIAVRQTGGRDPHRGIQIPGVPAEVPGPPMPALELPRDSQPLGEGHGSCEQFFRLGWFREVLTRPLFIRASSPSVSKVTPTGESGSQQQVSTGLDAGDLPPPATAKAVPPVPQVSADTMAAPLGPQVPAGTTEAVPPDL

SEQ ID NO: 56373 - protein, 171 aa, Zea mays
  Coding DNA Sequence Number=SeqID_12998
MAAIGVKSREMRVQQRRRGLRGERMQQLKKVRMRNCWPRNESPFLKEGSPARIPTPSNAHLVLTVTRSPTWGPRWPEKLADTVISSVDPDSHGKVPDPSTCGSDLCIPLNGTRTPLSEVRTVQDKVSGRRIPWPKSRAYMGPTQALVRVLLGVPPLPALAGTRSCRVAYGP

SEQ ID NO: 56374 - protein, 157 aa, Zea mays
  Coding DNA Sequence Number=SeqID_12999
MGKPVPSLLMLPLSRGRVPLDSPTRWQDGRPSHSSNHFLQRTCKNYATSKAEYTNTQLDLPGYNGSSSLISCEKQTIRIEFLSLQGLTALAYNAPLTPTGRRAVTALVPTITGMGDHVSGRVRGKVYGQVHSGIRTLILIPFSHLVVNKSPWIVVYH

SEQ ID NO: 56375 - protein, 233 aa, Zea mays
  Coding DNA Sequence Number=SeqID_13000
  Homolog annotation: Hit_ID=Q6J9V9; Match level="QueryCoverage=35%, HitCoverage=28%, E-value=2e-07, Identity=40%"; Hit description =Putative uncharacterized protein
MTVAGGREQRSRRQPSSRPIRRQQENPLSRREDDAPVIRSSNGSRTRNGRPANNSPRRINSAEGQTALLAGEAGDASPSPLRASLLIRGSKAGPRKGFNSRLRSRGPYTHYCRLRRRARDDQGYVRYITKARAVLPSSPETPCSAPIEGNMALSPLLLAERRRRGVCKKAESVPDRPLALCRGSGAALANPAPAEPLTASTYQPENLGPDRTPGLRPVRMREQPDQPKHYARH

SEQ ID NO: 56376 - protein, 59 aa, Zea mays
  Coding DNA Sequence Number=SeqID_13001
MARVACTLRVKRLDGESLILDKPYLDSLKASISLRVFYFIGWYPKKKTKTKAVGGKALR

SEQ ID NO: 56377 - protein, 128 aa, Zea mays
  Coding DNA Sequence Number=SeqID_13002
  Gene Ontology: Mol. function=catalytic activity
  Homolog annotation: Hit_ID=A2Y3P0; Match level="QueryCoverage=81%, HitCoverage=30%, E-value=5e-22, Identity=56%"; Hit description =Putative uncharacterized protein
MGRTDTVRRPVCRAWIGVEVAGVRPSGPVPVADGAGEALALASLIDDEKKLGDCQFDLLKQSYMVACATVFGKLRRSRRLDAVHSGCTALSIVKQGDLMVVADANDSRVILGTAPDDGAITSSSSSST

SEQ ID NO: 56378 - protein, 79 aa, Zea mays
  Coding DNA Sequence Number=SeqID_13003
MSVGLWCAGVEHRDDDQWLRWLCGLVLMDRRGGVDHVVGVVEDSWNMRLVVDDAHAVRYSRGFDGMGLKPPSTIDDRFC

SEQ ID NO: 56379 - protein, 102 aa, Zea mays
  Coding DNA Sequence Number=SeqID_13004
MGENPEIGLTQMNKNGNLQDRIRVQVGQVQIVEIKESTEEGRNGESKAADKERNIDNGLMGVLRRNSDPAANPPRAEFFRRMTTTTELYLFRFNAIAISPAE

SEQ ID NO: 56380 - protein, 145 aa, Zea mays
  Coding DNA Sequence Number=SeqID_13005
MGKEKKGQGSPCRSGDKRKREPSPSSEDFGDSEYLEEEFSSESEGSPGIVAEVWTYIRSVERAGLEGSDESEVSSDEENSSGSSEEGSGGDDDDKGDSSGGSGGGDDGNDDGKGGGGGSGDRRGDDDGKGGISRSNKASGKAPLA

SEQ ID NO: 56381 - protein, 126 aa, Zea mays
  Coding DNA Sequence Number=SeqID_13006
MRPNLMKLDNLSRLPHPEPSDDDIHEHPGCKGPLSTMHGSYAAATTMIYNPGWSPTKGIDPKRLQWPANLANRAHFSPNELRGSSDLLLPASAQVWGGRRLTRMVCWKWQTLIPRAGFFMLTPNYA

SEQ ID NO: 56382 - protein, 63 aa, Zea mays
  Coding DNA Sequence Number=SeqID_13007
MEPPCHMGGIAVTPIRGMMPSLSHDYLTNAALKVFWWSSAACWGGAAVVFVVGMRERMLTVGS

SEQ ID NO: 56383 - protein, 81 aa, Zea mays
  Coding DNA Sequence Number=SeqID_13008
MDLVLGLLHLSEGLSKYDISCTACINQNIMDQKSFDHTRDNHSIIVWVILELKILLRKALSMNRLLSGEPASEPKQFQLDS

SEQ ID NO: 56384 - protein, 143 aa, Zea mays
  Coding DNA Sequence Number=SeqID_13009
MAEARATLTGIPPEGGIEPSDPIERGQENSVACPAPTAAPPARARLTTAKSSLRRNRKLHLARPWASASEGGLRLARPQGSAPASASEGGLRLARPQGSASTLASEDGLRLALPQGSTSAPTSEGIASSPNPGLGLRRSLRLA

SEQ ID NO: 56385 - protein, 267 aa, Zea mays
  Coding DNA Sequence Number=SeqID_13010
  Homolog annotation: Hit_ID=Q5GAU8; Match level="QueryCoverage=11%, HitCoverage=23%, E-value=4e-09, Identity=87%"; Hit description =Putative uncharacterized protein
MTDAEKEVATERRMDSPPRCDCGDRAVIDEDHEKQFCCPNINHPYGWRKCRFKEWLYGPLSHWLEPEETRKCSWESYDDKGEVMRTIESKRLMGQKMRCGSQLVDSYINDHIRDMRRDTKFVFYDSPKRAEYRRLKAADEKRAHDAREWEAAQAEKQMLDNLADRLKGKIGCGVNYLADEAHARYVEDKMATAAEEVEAAYYKKKSDEAEAEDELFSQAADEAEANYYKRTVDKCDAGQCSKWNEVVVEDCATDDSEDELLIDCDSD

SEQ ID NO: 56386 - protein, 35 aa, Zea mays
  Coding DNA Sequence Number=SeqID_13011
MSSSTPLHESVSELVPDEYGEEAHVPTPSAKNGVA

SEQ ID NO: 56387 - protein, 366 aa, Zea mays
  Coding DNA Sequence Number=SeqID_13012
  Homolog annotation: Hit_ID=Q6QP51; Match level="QueryCoverage=56%, HitCoverage=86%, E-value=2e-10, Identity=32%"; Hit description =Putative growth-regulating factor 1
MTTSKKGPGKGILRKGSFSAKEAGPEPPTDQRFEGWPLGRVRQPPQSTRAPSPPTDQRFEGWPLERVRQPPQSTRAPRPPTGRRFEGLAPRMGSTAASGHSGSAPTTDQGFVGWPPKGSTAASEHAEREMTLGTFDTQPRLGLRSRAGNPHQHKSCKGLMGAIKVKAQSTQGTRSRLARAQPRAKAADPGGFTSRPRAPSSDEHTFDSPEAQSSRRSNLGQIATPTDPKSSLGRHRKLRLARPQGSGSTSTPEDGLRLARPQGSDSASASEDGLRLARPRARTQPRPRKMDSTSPDPRARTQPRPRKTVSASPDPGLGLSLDPGRRIPPRPTLGPRLDLDLGGASASPDLGLRPATSQGRSSLPYP

SEQ ID NO: 56388 - protein, 37 aa, Zea mays
  Coding DNA Sequence Number=SeqID_13013
MVDFPKSKMTRFAWHPTVVLIFGTSFFNISLRLLRQQ

SEQ ID NO: 56389 - protein, 215 aa, Zea mays
  Coding DNA Sequence Number=SeqID_13014
MRSFLQRLSRRLRGAAARCGCRTTVAHDVHVPSCTDTATPSTGLGAGFDYDHDEIGPSQLEGAPSTQPLQPQDRRRHRSPQRYTPGTDALGKDFYELAWNCLQLYALHSLVKENCGFTRWVDPRPIFPHAEYISYLQNRIFDLEREVSNKNDEEERDTNNGGASQVQVCPDPYCCCPCHNKNVGPPSSPPHPQQTPTMGGYYGEGSTQFGMWEHY

SEQ ID NO: 56390 - protein, 128 aa, Zea mays
  Coding DNA Sequence Number=SeqID_13015
MEDFQEFQDFDEFYNSLVANPQWPVLDTPHGTSDARGDPDRDDNGGSSSHSTEPPKEQKLEGWVARPITRDAASGCHFDDALDTLLRRAFDRHNWSIKYHCVVYQHSRGLYLDQWEATFLVRHLDNDL

SEQ ID NO: 56391 - protein, 101 aa, Zea mays
  Coding DNA Sequence Number=SeqID_13016
MDGGLIFKKARGSLERKPGRRGIVDSEPPDSFRMVQIKYVKGGVGDDPDERVPWMGETSKRQQASRSTRRDHRADSGEERAWWGVGQWGIVASVRENGGLA

SEQ ID NO: 56392 - protein, 122 aa, Zea mays
  Coding DNA Sequence Number=SeqID_13017
MGGSRAATCPEKVIYSKASIVSPDPHGRAPDPWIYSSKLQGWSRTFTCASRTPRMGSGPPVWGPGHPKWGHKVLGQNILGPGTRPRQGSGADTCPDLDLSAYTPAPRSDGDPMRPRGLLHVT

SEQ ID NO: 56393 - protein, 81 aa, Zea mays
  Coding DNA Sequence Number=SeqID_13018
MVQIVEHHGLTPEDFLMEEEAASSMPLSHPGFGAPRPRCEHNHQFIGSSNAGTPRMTAIAAKSSQGPPYTDHSPTALAPFG

SEQ ID NO: 56394 - protein, 367 aa, Zea mays
  Coding DNA Sequence Number=SeqID_13019
  Homolog annotation: Hit_ID=O48967; Match level="QueryCoverage=50%, HitCoverage=35%, E-value=6e-36, Identity=48%"; Hit description =Putative uncharacterized protein
MAHDGFGLAEVLRRAIAGRHAMHTPYRGVLLIPGGRSAARECLLLCAPGAAVKSSESRPAQFDGEGESAQRTISWRGREDPRISGDDHGGNRAELLRDFSLEKEKSLATRAPHGGGSNRHRITFKNEDSYIKIPFNPKPYKEIFINLRIGFWVLQPRGSNRPTPGAAVVHAARQHTPTQSSRAPSRAAPGALSAAMELLGHPPSSKASPGAMKQWRDDVDSLLSMAHSGSARPRPRSFRRQREASVSVRSPSVKAAPTEDLWAELNRRRAGEDAPISLERPNDLRTELNRRRAGEDARVSLERARERRLNFEGRNLDQDFPPPAPQTPRGARTHMGVPLVYVTTITAAGGDIAAMASYFHVALTGPT

SEQ ID NO: 56395 - protein, 788 aa, Zea mays
  Coding DNA Sequence Number=SeqID_13020
  Gene Ontology: Mol. function=binding; Cellular component=nucleus; Biological process=activation of protein kinase C
  Homolog annotation: Hit_ID=Q2QVE3; Match level="QueryCoverage=79%, HitCoverage=89%, E-value=0.0, Identity=72%"; Hit description =Pentatricopeptide, putative, expressed
  Pfam annotation: Domain name=PPR; Domain location=192-226; Score =35.0; E_value=2.6e-07; Accession=PF01535.11; Description=PPR repeat
  Pfam annotation: Domain name=PPR; Domain location=325-359; Score =40.5; E_value=6e-09; Accession=PF01535.11; Description=PPR repeat
  Pfam annotation: Domain name=PPR; Domain location=427-461; Score =45.7; E_value=1.6e-10; Accession=PF01535.11; Description=PPR repeat
  Pfam annotation: Domain name=PPR; Domain location=462-496; Score=2.2; E_value=4.3; Accession=PF01535.11; Description=PPR repeat
  Pfam annotation: Domain name=PPR; Domain location=498-532; Score=6.8; E_value=1.2; Accession=PF01535.11; Description=PPR repeat
  Pfam annotation: Domain name=PPR; Domain location=92-126; Score=19.6; E_value=0.012; Accession=PF01535.11; Description=PPR repeat
  Pfam annotation: Domain name=Pro_isomerase; Domain location=658-787; Score=-7.2; E_value=8.6e-08; Accession=PF00160.12; Description =Cyclophilin type peptidyl-prolyl cis-tr
  Pfam module annotation: Pfam domain module=PPR::PPR::PPR::PPR::PPR::PP R::Pro_isomerase; Domain location=192-226::325-359::427-461::462 -496::498-532::92-126::658-787
  Subcellular localization annotation: CTP_CleavageSite=74; ConfidenceScore=5.46e-01
MPSPPTLAPPSPRPAWNTNCNLVVTHPLLSVLESCASFRRLLQLQALLTVSGLASNRFPASRLLAFCALSDPPRLAHAAAVLAQCTEGPNAYMLATMMRGFLRAGKPTHALTLFRRVLRDRLAVDARTIVFAVKAAATSSSPTEAIHCVAFKRGFIGQSVLAGNALVHMYTSSMLLPDARKLFDEMADRDVVSWTTLIDGYARGGLPDEAWRVFCRMVVAESVWPNEVTLVAAASAAGQMGLLGLGRTVHQCIVESGGRMSVNLENALVDMFGKCGCVAAAKEVFDGMPIKDVYSWTSMVSAYAKCGDLENAAKLFKEIPNRNVVSWSCMVAAYSHANMPDEAIRIFNDMIAAGVEPIDATLVSVLSACAQLCSLDVGTWLYDTYIVSHKVELTPNLSNAFIDMFAKCGDVGAASRLFSNMEDKNVVSWNTMIMAHGLHGQPEEALHLFQEFKGNGILPDEATYIGVLSACSHGGLVSEGRCHFKEMKIVYGIEPRAEHYACMIDLLGKVGLLQEAFEVARSMPVGADEAGWGALLNACRMHGNVEIGKCAADKLAGLDPSDSGIYVLMSQIYASKSKWGQVKMLRTVMRDRRVKKNPGCSSIEVDGKCHEFLVADVSHVHSEDIYAALGNIYLHSKAEGSGVSFYCGPCTQFLPQNLEFFSIGENEVLQCVSVPQGGEGFLGTNPTGTGTDGDSVYKFLYGDQARFFDDEIRPELRHSKTGTVAMASAGENCNASQFYITLRDDMDYLDKHTVFGMVAKGFDMLTKINEAYVDDKGRPFKDIRWSVD

SEQ ID NO: 56396 - protein, 130 aa, Zea mays
  Coding DNA Sequence Number=SeqID_13021
  Homolog annotation: Hit_ID=Q339L0; Match level="QueryCoverage=46%, HitCoverage=68%, E-value=6e-07, Identity=44%"; Hit description =Putative uncharacterized protein
MQRGGDAENTNVTGSDTLADEVYVDLHVLRALMLHEIGGEVDCADVIVVDEGGTLKGDMELVEELAQLAGLCHAVGHSAVLGLYAGAGDDELPLRAPGDEVGVQEHDITRCGSVRVGAASPVSVGVNDEL

SEQ ID NO: 56397 - protein, 329 aa, Zea mays
  Coding DNA Sequence Number=SeqID_13022
MLTPSRRKSAADSKCRKLADKVAALEGEKADLQRQLAGERRETNEALAKAQAAQAETNLARAEGNLARERAEQLQERLIALESRVERAEAAARAEAERTRTQLMDTYRELGARTSDFEVPDREPGLCCLEWVQEELQALPTVVEGFMLYASVVTCEGEMNALSHEGCRHFEVFDQADEDFERDIYKVEDPVVKESAGAIYDRMWGPHGREVVRERAETARAQAARGERVDDFGALNSALPDPEPTPAEAVSGVALVPTPETAEDAPDAPASATAGEDLPPKVVEGAPDVPAAAAPSAEGPAAVAAETTTEATAERTAEAPATSGPSQVA

SEQ ID NO: 56398 - protein, 146 aa, Zea mays
  Coding DNA Sequence Number=SeqID_13023
MTTEEVSNRGHNIPRKLRGTNKAIFSRQLQGAQVLGATEECLGISPEKFIAYSVTYGVQKVAEAQKVIPKSQVSLKLQKVILRNTAKFAEVVLRNAAAKYRRNIRRSAKSQREYRRNRRRRSSKDVPKGMQNLQQKVSADTPKNKQ

SEQ ID NO: 56399 - protein, 135 aa, Zea mays
  Coding DNA Sequence Number=SeqID_13024
MARSDFTVIFLELSLDAPRLICTVCFCSFIEARGVIPLHLSGFIGEAWLLRLMFDVLFGLGYLPARCVLAYSDVPRSAEVGNEELHFQRPCNCYSIISLRPFRVGSAEDEQATADPEVQQIEAAEQELVEGKLFP

SEQ ID NO: 56400 - protein, 102 aa, Zea mays
  Coding DNA Sequence Number=SeqID_13025
MAGDDDEARIPTDFDECVSRQDLEANNKLLKEQMEETYNGSSSLISCEKQTIRIEFLSLQVTALVPTITGMGDHVSGRVRGKVYCQVQSGFNNIRLREEKLS

SEQ ID NO: 56401 - protein, 113 aa, Zea mays
  Coding DNA Sequence Number=SeqID_13026
MAQWLTRSTLAGGRRESDDRGLASPAKQTSIPRSRSFTEVCSVFSEGRTGLGKAGLAGLRRQGLGWSRTRRARATDARPSRKRANLGKNPARVFSWLLGLSLIRESPWQICPR

SEQ ID NO: 56402 - protein, 303 aa, Zea mays
  Coding DNA Sequence Number=SeqID_13027
  Subcellular localization annotation: CTP_CleavageSite=33; ConfidenceScore=5.30e-01
MASMRLSTSPKILHTVGFCFTFCRFDRPLPPSSSALVFEVHTFSPTHQPLRHAMLLGGSPPFQAPIRHPWPHMFTAMPPPPAAPTLCPVPHALCLPPPASRPVLRGFALAWVGRARSFAAPLASVHSRACRAAQRSAHSLCRLPRRVLRGSAPGFALEHTELCLQPDTPSSTGSQEYRIISDLVSLFRRHQSPSTAARPSRPAATAVLAARPSRPGPNAIPAARPSRPATNPSSPAALPSRPAPNAVLSHAPKQVGRQTAVPSETMTRTNAEGGGPWADWGFSDAETTAPSPSQHSWRFFIGL

SEQ ID NO: 56403 - protein, 60 aa, Zea mays
  Coding DNA Sequence Number=SeqID_13028
MAQWLTRSTLAGGRRESDDRGLASPAKQTLIPRSGSFTELAQVANVRILAKIRRESFPGT

SEQ ID NO: 56404 - protein, 358 aa, Zea mays
  Coding DNA Sequence Number=SeqID_13029
  Subcellular localization annotation: CTP_CleavageSite=40; ConfidenceScore=5.51e-01
MRGWSAASVVSFSALGSLAQLALARLPVPPPAARAVVAPRAPEDRPRRRALLGRRSCSWVVLPLLRYGASARRSVLARPGGSEWGSAGGQIASVVGAEAVAAEEVLVADGITATIRAPGLRLFGFDSLSSPLEWGHGQGARCSSVRPEAISAAVWPSGAEVVVAAAGAGGVKETLGRSAVSRGRGQRCQRGQRRSWLEKGSFVGRGLAGSSTGGTNAGVGLPRPRAGLVSSGDSWLRFRGGRPSRLLGPGSWRRPWRRWPGRGADVVLRSGDPSPVLPSEARSDFAEGGVDAEGAAAPPPSTSEPAGSVRLYRITHPNASYFSQKAMSERGFPPSSPRGRVGLCRGKAAPSLMVRLHM

SEQ ID NO: 56405 - protein, 339 aa, Zea mays
  Coding DNA Sequence Number=SeqID_13030
MQAACNRTKGTHPFDFDASSLEVQAHTSCNRRIGYYMQETALPLAPVPRLLDCGTGAATRGDPAHDPTVPTEHIGHGSVSRERRRDGQYGQKWADSNGGGRRAEAAVKSDRERGYSERDPSPRRKQALSPPTDQRVAPRKGSTAASGHSGSAPTTDQGFVGWPPKGSIAASEHAEQGMTLASASEDGLCLARPRARTQPRPRKTDSASPDPRARAQPQRWTTDSASPDPRARTQPRPRKTVSASPDPGLGLDLDLGGTSASPDLELGPTTSQGGAIITLPLASSGYGEQDRRPIWLAPGSNSPPTATTSHEQGAKTSPTATTAWLSYERAGRVGERADA

SEQ ID NO: 56406 - protein, 110 aa, Zea mays
  Coding DNA Sequence Number=SeqID_13031
MESHDLWAEWESRLVGYIGLITWVNAKTWLSTNYGQRVHLAKAGGLLCKTVSAKGYSWISVSNLKRAPRIRPESPLNRCAMTTTRSEIDGSGPSITKSAVHTPPHTSVYS

SEQ ID NO: 56407 - protein, 96 aa, Zea mays
  Coding DNA Sequence Number=SeqID_13032
MAEEKHHHHHLFHHKKDEEQLAAGGYGESAEYTEATVTEVVSTGENEYDEYKKEEKEHKHKQHLGEAGAIAAGAFALMTQPDLQENAHFYGIIHDY

SEQ ID NO: 56408 - protein, 1323 aa, Zea mays
  Coding DNA Sequence Number=SeqID_13033
  Gene Ontology: Mol. function=nucleic acid binding
  Homolog annotation: Hit_ID=A2WMU4; Match level="QueryCoverage=73%, HitCoverage=79%, E-value=8e-17, Identity=26%"; Hit description =Putative uncharacterized protein
  Pfam annotation: Domain name=SAP; Domain location=1-32; Score=13.8; E_ value=0.045; Accession=PF02037.18; Description=SAP domain
MDRVGLQAFCKRHGLSARGSNADLIARLDAALGRAAGAEEAAAGVAARKACVRQTGGDADETKKVTFVEVGGDVPVKLSRRNSLGAHVPVRRSRRNSLGADVLVRQSSRNSLCAEAQDCELRSQVTCSPVVAKTRGKSAQAGSVEVGAVVPLRRSRRNSLRAAESEEVEVAVFVDRKRKCKNQENDKGVVLSAQVGASSRVTRRSSLAVAAAVLPPLVEPKRGRGEAAGVQTSTQVEVPARITRSRSIAPVVMSPTVVENKRRKNGDAQTNVELPTVSDVPRNDAPVTRSLRNRVVQVNNSVVDANKPATKEPVRGLRRRSVVSELHEKEKDVEKQLIVKQPVRRSSRKSVLPDMLENNIQSGKSQDNEKEQKLKEPIRRSRRSVATVLLEEQNSGLHEEKLSKLTMRRSTRKSVALNGVEKTSMDHTEIVVQSETLKGRSSKRRRTIDPVEMMPVKEANDDMIIREATIDTHKATHEYNKSTSRIQESCQVNATREEFSSGPLLVTVTPTNEIYTVQSIHEVVPGSESGDNAKENLDKSKQPQEHHDIQAVDSHLSETRSGELDQSSCIAGLVPHNCVASDDKALISGDRVEQSPVSGEGRVGLEANAIESGEKNLTGIMSTALYTKSLQHDIDIVAEETAKGDLEKPSLCSLAQKCKHQCGLLEEIVLPSRNMGSLPNAEESPFGLESLFWQESIHESVEYGAPASATTHTENGFGESKGCHVKSALENTHVSEPFSHHDTEENISKIGGCMHTSQQDNGMEDAIENPLISLSTPGCKHEGALSEEAVHTMKDYAGTCSSNPRVPMQLHDDLAFPGPEKSGDESVNIEVKVHHGSNLSQLGSTDLLDDTELLHQGHNYKDRSNEDMLEQAASEPCTNGDDIVEAAAATKCLESGAMLVPSEERSNLNDRQLTPKLESPDIMESGLNCDKDARNTLDNGSVVAVAGKRTPSGSGHYEHNVYQVSGICATSEAAPVGVVETGIAVETSSLVDDQPNPVLDGDEVEKHSLNCEADTGRILGTGSVTSNTTLVPKDGHTICCQELELPNGLSSFLFPEESGICQYASVSGSGPCLQHVNESTSTQATYNIETLNQQHHEEYDQTARGILASSFPEAVGIEQSGLAPAAEAPVLAVPDGQPNSKLEGNEVDEHSCSYDAEFLNREASNLHKDLFSEDSHRSHLPSLRSPQRSAYFHNGNDSGSVGVCQSSRRGGVDGLRAKRQSFKVSSSIKGSYVAKTSVPRPKPGDSLSQSAIALRGVRKNTTAVEVGGHPVSLKPNAVRSVAKDPSSSRGPPRDSLSQSAIALPKHRKDATAVKSKTNNKPWL

SEQ ID NO: 56409 - protein, 157 aa, Zea mays
  Coding DNA Sequence Number=SeqID_13034
MGEKEGRGAAARGGEGEGGPTQTEKGINEEILGCYTRSRSAAKKIILCTIADRPAQAWTVEAPGVDRPDARREGDALAPRSRTVCVSAESTTVVFCAHLSLLFLELKSVGHCNPSAALAHVVPIPVPEQPSSCRLDASLFWNPVPEKLEKSLSLQRF

SEQ ID NO: 56410 - protein, 70 aa, Zea mays
  Coding DNA Sequence Number=SeqID_13035
MARRWPGGDGGGPSRLHGETAGEREQREIGRGRGNWGASRVADAGAKLTEATDTAELQRRPRNELETAVI

SEQ ID NO: 56411 - protein, 47 aa, Zea mays
  Coding DNA Sequence Number=SeqID_13036
MGLGVCGSLCQDDDEDNAGFYYDYGNGKEGGVEADLQEFQDFDEFED

SEQ ID NO: 56412 - protein, 225 aa, Zea mays
  Coding DNA Sequence Number=SeqID_13037
MAGSHHELSRWIPPSNRAEQHIAETKASSLGPSYLRLGRRGTPPTRSAARQWEACSGDKFLNARPPSTSMSIAPHFGALQGTILRAHRGPDAASRNYTVAAASLSSLSLSLLQLWHQGDMRMALRDEGEDRDWFYSHEKRCLAFVGTGDPMGDPYPHGYGYGARPIASSCKRRTPPTPPLWRSEPRARSNTLPEIAADSGASGPAPDLHSAQGLLLTTSRPRLSK

SEQ ID NO: 56413 - protein, 135 aa, Zea mays
  Coding DNA Sequence Number=SeqID_13038
MAPKKASSKAAPTFNEAAKAALLAEKKCKALADTTHQEAYEDDAVSKRQRNDQPTPEGSLHTCSSGEQPQQPPPGFAPLEGEDATEDDEVIGILAEEQLQLRALRIKNRNLQKQKEILEAKRQRVSAQAKVRQMI

SEQ ID NO: 56414 - protein, 67 aa, Zea mays
  Coding DNA Sequence Number=SeqID_13039
MTPEQKQNELKRLQNAKGVAVVVAVGAEAKKLVNGLPKPQKLQVDCPHILNSDLARSCSVALVLTTE

SEQ ID NO: 56415 - protein, 443 aa, Zea mays
  Coding DNA Sequence Number=SeqID_13040
  Gene Ontology: Cellular component=endoplasmic reticulum
  Homolog annotation: Hit_ID=Q7XE12; Match level="QueryCoverage=62%, HitCoverage=66%, E-value=2e-95, Identity=57%"; Hit description =Putative uncharacterized protein
NRKNRGGLGRLAPPSRSLHHLFLHLLIDADRLTQPRTPPEKAQCPSSGIPSGAGLAKAVVLMLPPHNKASQLSLSFSPVNQIRFIWSTNKEALSPPTVSISTRQSQPAGHPPHLAMCGGCRRRQCGPDGTPDGGRRGCGTVIAVLALAAAAAVAFLESAAGGISYAGDGWLHECAKWDAEGGRFLASTFFGGGVAEVRAGEGEAEERVVVADPVAAGRVALGLAVDAPRRRLLLVYADRPPRLGYAALGAYDLGSWRRLFLTRLDVPGESTFPDDVAADEEGNAYVTDAKGSKIWKVGPDGALLGVIKNATFVQRPGLRHNLVGLNGIVYHPNGYLLVVHTSGGDFFKVDPKTETVRVVKVRGSLRRGDGLELLSPTRLVVAGLPNRLVESSDDWETASVTGQYVGPVHRIGSSATVKDGDVYVNHIVGFGLGRKKTHVLARA

SEQ ID NO: 56416 - protein, 358 aa, Zea mays
  Coding DNA Sequence Number=SeqID_13041
  Gene Ontology: Mol. function=RNA-directed DNA polymerase activity; Biological process=RNA-dependent DNA replication
  Homolog annotation: Hit_ID=A3CCK6; Match level="QueryCoverage=25%, HitCoverage=35%, E-value=8e-12, Identity=34%"; Hit description =Putative uncharacterized protein
  Subcellular localization annotation: CTP_CleavageSite=69; ConfidenceScore=5.01e-01
MGNASKRRRGENEMEKKKGRSPASPALRSCSSSARSDSRADLGPPPSHPCFGRSSAVSSSLGPERQAVEAAHNGRFPSGTRLGFLSDYVGSHSFPHLVSCLSRLWSLPCSSRASFCGGWVFSPFRPPTIAEEWPLPGLSAAPLQMDPKNRNPNWDRWGPKEAPQGSQSWGKNRSLSWRLKPGSGKPESKDDIPISSSGDGGHSGILKTPPPTILKVENEMAKPKSKLHSVWIVAENVPEELQNYQAICELGSTIGAVEEVDITSLNSKEIVRFKVHVKSVAMIPPIIEVGVKPFLYDIFFKIDNITDEGWNDESINLGKRASVDRQGFGDLSFEKFVKKAKSGDEESGRDVKGNISLK

SEQ ID NO: 56417 - protein, 90 aa, Zea mays
  Coding DNA Sequence Number=SeqID_13042
  Homolog annotation: Hit_ID=Q8H6I2; Match level="QueryCoverage=87%, HitCoverage=32%, E-value=6e-21, Identity=67%"; Hit description =Putative MURBZC
MDSGMESVAELCAQKFSVAVEAGRDTVNASVATCVVAGDLCATASVGNHVVSTLDVLESVVEAEKCVMCSYQQASAAVVCAQEQWPNTLR

SEQ ID NO: 56418 - protein, 138 aa, Zea mays
  Coding DNA Sequence Number=SeqID_13043
MGKNNKRKREPTPPSEDFGDSEYSEEEFSSGSEGSPAPVSPPASSDDSDDSQGIAVEVWTYIRAVERSGLKGSDESEYSSDEEDSPEEDDEGDDDDGGDGSDDGDDGSRGDNGGSRSGNGGSRGGDGGSSKGSNRASG

SEQ ID NO: 56419 - protein, 210 aa, Zea mays
  Coding DNA Sequence Number=SeqID_13044
MAHRTVRCTPDSPVPLPRHHCRWILAVGASDLWTRLGVRCTPDMYCLMSGAPWSARKIREDKFLMRLPDPKIINDLGYFRPLGMRSANAQITIDPWSPSINAKGCLQRGLFRIRGIPMEQRSIKTIAKIGGLVGKVVEIDEKSGLRNEYVRARIACREVSAVPEVVESALGMYIYDFFFKREVQADEDEEKLKTAVSSEGNKHHTAKHQV

SEQ ID NO: 56420 - protein, 608 aa, Zea mays
  Coding DNA Sequence Number=SeqID_13045
  Subcellular localization annotation: CTP_CleavageSite=60; ConfidenceScore=5.08e-01
MNNNGSVFPSYRGKSSFWNLGGRSVWCWPSGRLSASDDEAAFALRPTTSADRVCNILTTSARLGSSLAMAGCTEGDATEVGGDGGGAVGGAVGGDTSAVDRKDRRDVDTRLSRAVFDRDAGPLLRSSYSRSVITPAGLCPRAADTLTGHHSDLLPPPRDPVVDDDSARQRRRYRSRSTPPDFDGRGTPDVENTHRGRRSVLHRLGPTSETAPKDAGVSAGDLPGDAWVTSSVMTVLGSELPQGNSVPVEELVPVELYGSVSDTTNVALNSSSLDLDGVLEAVTVAPEAVLLQDVVVPVEEVGPVEPLGPVGDAPLYAINSASSSPVLVVDSTNVALNSSGLVLDGVLETVTVTPEAMLIQDVVVPVEEVVPVEPHGPVDDAPLFAIASASSSPVLVLPTQNLFDQRWRPDRCCLNVYSRRTKVGSDPSILKELVDSLPLETFKQIITKPINGLLSPPRCNLRKKKTLPKDFMPRRSRRVAKLPPVLGNVSVAKVCRHLGYYGDHEEISLENAASYAKLFENGLSKSHVEAMAALIGWEVLVEIQETKLSSISAFDVLSILGVGYVSIQLQEESGMQWWFTGVYGPHQDNLTQFFLQELRDVRGLCAGP

SEQ ID NO: 56421 - protein, 113 aa, Zea mays
  Coding DNA Sequence Number=SeqID_13046
  Subcellular localization annotation: CTP_CleavageSite=30; ConfidenceScore=5.21e-01
MDRSCRLRRRRRGSSSTLGVNSTFGKVQPRVSTPKDDVSATPGLSPPGSPPGIQPEQTARPAAPKPQPAVLRGHQPGSWLRQLDSGAGPTSGRPGQAPADEVFFSSQLCLCPC

SEQ ID NO: 56422 - protein, 57 aa, Zea mays
  Coding DNA Sequence Number=SeqID_13047
  Subcellular localization annotation: CTP_CleavageSite=41; ConfidenceScore=5.03e-01
MAGGIKLAGAKGRGWPERRYGARKSGLSPCPNPRQIPGFVVSRARVPMPSSGTRQRG

SEQ ID NO: 56423 - protein, 360 aa, Zea mays
  Coding DNA Sequence Number=SeqID_13048
  Homolog annotation: Hit_ID=Q6QP51; Match level="QueryCoverage=20%, HitCoverage=34%, E-value=2e-16, Identity=61%"; Hit description =Putative growth-regulating factor 1
  Subcellular localization annotation: CTP_CleavageSite=57; ConfidenceScore=5.24e-01
MHEGSAKAWLPPKGVAPFLKATLLTRVLRRRGLSLHQRAPRSSPYDTGAGSHTPCKLAGTKEAKPPRAERVTAQRLQALLHLRLNQWVKGWTAMQVACNCTIEMHPFDFDASSMEPRPTRHVTGAPVATCEKLHRHLRQCRASSTTEPVPRLEATLHMAQQCQPSTSVTGQSTAGKGATVDMAKSGPAVMAAAGGRKQQSNRLQAHVPSWDSERALSHGMKTTHPCSVPRTARTTAAPRTTRPVALTPRQGRDRERGYSERDPSLRRKRAPSPPTDQRFEGWPLGRDRQPPQSTRAPSPPTDQRLPPEGFDSRLRTRRARDDSGYIRYMAEAWATLSRSKLRPLKGHDLASPEPSLGQEQ

SEQ ID NO: 56424 - protein, 139 aa, Zea mays
  Coding DNA Sequence Number=SeqID_13049
MVGDTAGQRGSLTTLTEASTLEGRLVSRDGNGYPLPETRWVFALLRYGFGSISLPMGLLMGSNGNPTVGMENSLGTRNPHGYGFGQNFIPVMGMGFLAGVFFLRGYGFGQVIPIGFLPIAISTSEGLITGGTRGINVGG

SEQ ID NO: 56425 - protein, 382 aa, Zea mays
  Coding DNA Sequence Number=SeqID_13050
  Subcellular localization annotation: CTP_CleavageSite=61; ConfidenceScore=5.37e-01
MSSRSPYASRLPTFRAPGWGTLAVLPPCRWRNATSRKLVPFSHRLASRIFISQPGRIPSPVVTQDGDHQLLGGEKQAGLRSLPCPQLQGSSSSLLGQRARRRPPAMPGKANCCCPARIQHSVLYPRFRGEDGSEDLPVRFGAARARWCGVGGQADAAVGANVVAAGESFPIIEAISAAYRPTSGSLALMAGSRPLSGDANESLLVAASVLGPWLLLQRSLASRPELVAPQAPCMDRGRVGSKRRLRRPEPGRAVHWRDQRRSRVAEAMSRADVLGGQLAEASGDPQTALLSEARSDFAEGVVDAEGVAAPSPSRSEPDSAIDIVEKVRKIVSAEEFSSVKTCSVRGITYPSGSYLSQKVMSETSYVNEVYEQLESILRVEAT

SEQ ID NO: 56426 - protein, 330 aa, Zea mays
  Coding DNA Sequence Number=SeqID_13051
  Homolog annotation: Hit_ID=Q6J9V9; Match level="QueryCoverage=25%, HitCoverage=31%, E-value=3e-13, Identity=47%"; Hit description =Putative uncharacterized protein
MQAACNRTKGAHPFDFNASSMEAQAHTSCNQLVGCYVQETAPPLAPLPCLLDCGTSTMTRGNPAHDPTVPTRHIGHGSVSRRRRRDGRYGQKWAGSNGGGRRAEAADRRHLWQAKQATLRFRHNDRVKKGIGKGDTLKGILLHEGNGPRVPLLIRGSKAGPSEGFNSRLRALGLRAHYWLALEGFDSLLRRRARDDPGYVRYITKARATLPRVRLTAAKSGLGRHRKLRLARPQGSDSAPEDDELRLARPQGSDSALAPEDDELRLARPQGSDSASAPEDDELRLARPQGSGSTSTMEDRLDLDLGGASASPNPGLGPTTPQGGPSLPYP

SEQ ID NO: 56427 - protein, 274 aa, Zea mays
  Coding DNA Sequence Number=SeqID_13052
  Gene Ontology: Mol. function=RNA polymerase II transcription factor activity; Cellular component=nucleus; Biological process =transcription initiation
  Homolog annotation: Hit_ID=Q69MK0; Match level="QueryCoverage=19%, HitCoverage=24%, E-value=2e-12, Identity=70%"; Hit description =Putative TATA box-binding protein associated factor 10
  Pfam annotation: Domain name=TFIID_30kDa; Domain location=153-183; Score=-6.1; E_value=0.041; Accession=PF03540.4; Description =Transcription initiation factor TFIID
MKRNICFGVQKSNFFWEKCEHIVCLEKSNFLLTDAAPVPRHRLRYARRPNTSARLRSCLRCPSPRRLFGLLPLVTTCAVGAVRQQDVRSRMMNNNSGGGAGGPGGGMGTGVGGGGDGRHDDEAALTEFLSSLMDYTPTVCGLTLMLGSVARKIPDELVEHYLGRSGFHCPDLRLRIWIERERREYAGYVGVTMYMRTGAIDTGREGEAKERKSMKRTRQGCTCTCTCPRPSLLAPAPVVLQIFTGQLQACRCSKTALERTDVNRQTASSEELVD

SEQ ID NO: 56428 - protein, 65 aa, Zea mays
  Coding DNA Sequence Number=SeqID_13053
MAEALAAMAGGIELAGAKGRGLAGEGFELGIKVNIPDLWLKRTISAPRVNNARRVVVLDRPVKAD

SEQ ID NO: 56429 - protein, 130 aa, Zea mays
  Coding DNA Sequence Number=SeqID_13054
VDKSEDHDTYRQRYWMCANYAFEPTIAQHRMILMWNDTEISQKNKECLENLKKWDAEEERIEKRREELTAEQQRVQEEEMRHVTECREEKEKKLERARRAKEAMEENPDAFRKGKQSRCTQWSRCLYYVM

SEQ ID NO: 56430 - protein, 42 aa, Zea mays
  Coding DNA Sequence Number=SeqID_13055
MAEALAAMAGGIELAGAKGRGLAGEGFELGIKVNIPDLWLKV

SEQ ID NO: 56431 - protein, 171 aa, Zea mays
  Coding DNA Sequence Number=SeqID_13056
MGTGLFQHVFNQTCKLRKRMGWRADVNDSNRSNVETTKIDGIQEGAKVLGTDALVSPAPPLPPSQQPAPLLCTPLCMPPLCKPSQQALVSPAPPLPPSQQHEPLLCKPSQQALVSPAPPLPPSQQPALPLCNMPNDDEEVDDFGESPHSNPNQAGAGGEENAMDDLDLGDI

SEQ ID NO: 56432 - protein, 205 aa, Zea mays
  Coding DNA Sequence Number=SeqID_13057
MARVACTLCGKRLDGDVSVLSVGVNLICFPPYGDMLPCTRKTARKSTGPIGVPRHQLVPRHEESSSGSNDPIGDLEAQVEQLRTELCHRNRVWEEDDELAEWDLAIDWAINSRSIAWDWEAKARARVAELSTVVDNVQVYCNTLHEEVHELYSRLHLDVPADHVGMGAGPQEQQGSSNKGPRCEEARKQHEGWSRAEAVRKGASA

SEQ ID NO: 56433 - protein, 55 aa, Zea mays
  Coding DNA Sequence Number=SeqID_13058
MESHDLRAESESRLVGKRHYGTGGYEIDGSGYDYGAGEDEAVEGDFQEFQDYDEF

SEQ ID NO: 56434 - protein, 163 aa, Zea mays
  Coding DNA Sequence Number=SeqID_13059
  Gene Ontology: Mol. function=triacylglycerol lipase activity; Biological process=lipid metabolic process
  Homolog annotation: Hit_ID=A2Y7R2; Match level="QueryCoverage=36%, HitCoverage=14%, E-value=2e-14, Identity=61%"; Hit description =Putative uncharacterized protein
MLLLHAFPGFIAEQCGGGPPSSSATTTRWRELQGNNSWNDLLDPLDMDVRRSIISYDELVQATYDNFNRERRHQLGHRCRNLTLAATRPKVEYWMTYYTICRRFETGGSLSRRVSVPRAPAQMGRARGRARRGESEVAGDGRERGGNPAAFVFVPRPGRVRLQ

SEQ ID NO: 56435 - protein, 218 aa, Zea mays
  Coding DNA Sequence Number=SeqID_13060
  Gene Ontology: Cellular component=thylakoid membrane; Biological process=response to singlet oxygen
  Homolog annotation: Hit_ID=A7PD17; Match level="QueryCoverage=45%, HitCoverage=16%, E-value=3e-38, Identity=73%"; Hit description =Chromosome chr17 scaffold_12, whole genome shotgun sequence
  Subcellular localization annotation: CTP_CleavageSite=52; ConfidenceScore=5.29e-01
MNPANRPPLLQLREPPARRALPQRPDPTAHPTPTPGSRPRKRRQRGLRGRSRADARSMSPLHSSSSRLKLINALVVPAPDLGPGPDATGTHGEAAPPVTASSRSSSSTSSSSSSGTSPYGPEIVQLRRKFGHWNSFDDVEFFEYVEAVKLTGDLSVPAGQITFRAKIGKGKRLENRGAYPEEFGVIASYKGQGRIAQPGFKNPRWVDGELLVLNGKVD

SEQ ID NO: 56436 - protein, 301 aa, Zea mays
  Coding DNA Sequence Number=SeqID_13061
MNALSREGCRHFEVFDQTDESFEREIFKAEDPVVKQSAVALFDRMWGAHGREAVREQSDRAREQMERAEDVEDFEGLVGAPPEAAEGKPVLPTDAGEGPSDAPVPAAAGEDPVSAPVLTVEGAQEAAAEPAVEGPTTADAPSQVQGFGPAHATATESANFVVASTVVAENDSDDSVSKFFESDDSGSSVVWTEESSDEDLDYFAALDVAAAEASPRVMGAEVLPGPSAGRRRRRAVAKRRVSEVEGGRLRVDRAGKRELLSSPVGVCVVEGELRSLFEGEELRIMLFNYREMGIIPKVEPM

SEQ ID NO: 56437 - protein, 551 aa, Zea mays
  Coding DNA Sequence Number=SeqID_13062
MKIGHKIAQFGSCTFTPKTGKTSMEVVELVPCACNKWGNWWEFWFYISEGTVEDHQGLPVAVMCSHYYAAYPQFEVAEDDENEEALRCAACMSSGRDLVEEFVGMLVRNPAFALDLHGRDPTAFVREAEDGAVRIVGRYVPKTEGLRSWDIHGSNDRLNRVFELNRLSYGGYPGEDAADRRGKKPMGGTEEGPSQVAAPATKKRKLGTIVGGKGVSDNFVVELMGTCAAPGGRMSSPELRESSAIFPYGRNIAAVVSAVMNKDRQDAAQKRRAVIRLPDPRREAKRARGSAKAAAPGGSQPTLAGKPTAPGSSKVSKSTKAVVAGGTKSTPGEAAKVRELPSLRKRVADFATNISVDDYFVGKGGAFCASGEISSAATVKDEAGTMSRRLREASQHLSQQLSQAADFTDRVVSGALTADVSAEVERLRAQHTDAVREKLAAESKNRRLAEKVAALEAEKTDLQCQLVEERREANQAIAEAHATQAEAKLARAEGSLTSQHAEEWEVRFNVLRGRVEKAEASTHSEVERTRAQLVDSYRELGARTADFEVPD

SEQ ID NO: 56438 - protein, 239 aa, Zea mays
  Coding DNA Sequence Number=SeqID_13063
MNSPTPASGGDSRFSSDFLSRDGFPSILWEVLNSAGYPMPPLYTVQLYEEHRVPRCRVWLTLEAHPLQPGWRSLDSEMIGLRTDDTVEAAAMKTLTTFCGYHPLEMVMHPLGLFPPEKKDDLMWCNRSDAMELLANTAQTAKLTLDSREDFVVDLSTELVEKDLQVERLSQRITTLEQQMELEEANDHLDMHHLEMEANEVGSEGEEAPKEQGPAPGANGTTSAMPPSPVSSVASTAQG

SEQ ID NO: 56439 - protein, 329 aa, Zea mays
  Coding DNA Sequence Number=SeqID_13064
  Pfam annotation: Domain name=SlyX; Domain location=241-308; Score= -2.7; E_value=0.015; Accession=PF04102.3; Description=SlyX
MHISYSLHSLDCNIADREYMLIPEQGVVHEEDQEQALETATEDLPAAPAFEGKSRYGGYKCGHCTAAAGVSGALYAKAVRFRIWLMLYEEHRVPRCRVWLTLEAHPLQPGWHSLDSETIGFRTDDTTEVVAMKTLMTFYGYHPMEMVMHPLGLFPVEKKDDPMWCNRVSHVKDVWAMYPDLVGRVIVQCMSALYHLQALQSDAMTHLANIAQTTKLTLDSREDFVVDLSSELVEKDLQVERLSQRITTLEHQVEIRDNTIDALENQLHDVQRELEEANDHLDIHHLEMEANESKSEGEEAPEELGPALGANGTTSTMPPSPASSVTSTA

SEQ ID NO: 56440 - protein, 49 aa, Zea mays
  Coding DNA Sequence Number=SeqID_13065
MADGGDGNGGRRHGYGVYADAIVDITPQSITLNQRSKSDKYHKNKHSSV

SEQ ID NO: 56441 - protein, 71 aa, Zea mays
  Coding DNA Sequence Number=SeqID_13066
MGQGFLMAARGQPNERAQHSLTPVTTMSWLLSSVNGKVEKEKALRFMGEVHGRVGRPKGVYNSSRIFRSFR

SEQ ID NO: 56442 - protein, 65 aa, Zea mays
  Coding DNA Sequence Number=SeqID_13067
MVSHSGYGGYKCGHCTTTVGVSGALYGKAIGSLEDMVAGVTWSSILPPGWTVEWDATSAEEEHEE

SEQ ID NO: 56443 - protein, 182 aa, Zea mays
  Coding DNA Sequence Number=SeqID_13068
  Subcellular localization annotation: CTP_CleavageSite=54; ConfidenceScore=5.11e-01
MDRGLQWFMAIRWRCQGTWRQAVRRLSPASLSAQAAKQGGYGGESPESSPARTVASSSPRRRHCNAHRRLLPHARCPYPLARAPRAPLLGRHTRCHAALLARARCAAAARRPPLHRCHAAGCLLAAPLLPLPNSARVARPTPTASAVRHHRRRPLPSSATVDRPRLLLLPLRRRRQTLRHPK

SEQ ID NO: 56444 - protein, 221 aa, Zea mays
  Coding DNA Sequence Number=SeqID_13069
MAVMGSTSEKMYLCQVPNFGFEMIKLRLGGLLAREGSLGVVSSSESIKDLVDVGLLIEDLLTGHMPHHGSNKSLSLPHLKTTGNKTLSMELLSKSYPTKEKTLKGTSRKVIKSKEGNAGIVLAINSYHLMHQKKPAHYFGESLTVLEEPLRFYSFTRRHPRRRTASRRAPTSTRIGQLAQRLAPSFGRTQIQDLVSVFPKSISQMGAWLALATVTVDVADE

SEQ ID NO: 56445 - protein, 138 aa, Zea mays
  Coding DNA Sequence Number=SeqID_13070
MPPRTRRTARKHTGPIGVPCHQLAPRHEDSSSGSNDPIRDLEVQVNRLQIELRRRTDIWVADGDRINELRSDVRRLRDQLMDRDLALDWVVQSRSLAWAKEAKAQARVEELSSATARSAHGPRFSARLGGSISFACLG

SEQ ID NO: 56446 - protein, 200 aa, Zea mays
  Coding DNA Sequence Number=SeqID_13071
  Homolog annotation: Hit_ID=Q6QP51; Match level="QueryCoverage=43%, HitCoverage=43%, E-value=2e-22, Identity=60%"; Hit description =Putative growth-regulating factor 1
  Subcellular localization annotation: CTP_CleavageSite=96; ConfidenceScore=5.33e-01
MMTTSKKPPQSTRASSPLLIRGSKAGPSEGFDSRPRARRARDDSGYVRYMAEAQATLPSRFALSLTDQTEKQRRSPRSDCCATHQGETDNSQVRPRAQQEAPPLPTLGLGLGRRSLPQGSASTSTSERGLHPARPQGSASTSASEGGIRLARPQGSASTSASGGIASSPNPGLGLRRNLCLARLWARTNRATGDTSLPYP

SEQ ID NO: 56447 - protein, 19 aa, Zea mays
  Coding DNA Sequence Number=SeqID_13072
MAPPPVWGIAAVAVRCLGG

SEQ ID NO: 56448 - protein, 213 aa, Zea mays
  Coding DNA Sequence Number=SeqID_13073
  Pfam annotation: Domain name=zf-CCHC; Domain location=180-197; Score =27.9; E_value=3.7e-05; Accession=PF00098.14; Description=Zinc knuckle
MQELMAQQNDILRQLAQHQPPPQHYGGADHHHHAPAAATYQEFLSTQPPLFTRAEDPLDANVWLRVVESKFPLLNGECLEAAKVRFAAQSFVGPLGHGGLHHSPPGIEEEKDPLAGPSAQPQCFRIVSDTQSRGPQQQQGRWVIRPQQQQQAPNRSQPPPQRNNNQQQPLQQQYHHGNDNRCFTCGNTGHYAKNCPRNQQRQGQNANQNQYKR

SEQ ID NO: 56449 - protein, 296 aa, Zea mays
  Coding DNA Sequence Number=SeqID_13074
MAGQHTPDESYSYSLIRHMVCVAKNSAKQWEACSPRMAHARTQSTVTCGATRSSYSGERFPTVSPLRGPQITHASSGYSGYDPRSLLRLQSTANGWKGTAAAGFTRGVRGDAVMVARSWRNHREDRRDAARRPYTQVGAWKSGGVGSAHADPLLSAKLRGLRARWAMTCGPRVEVAQGEELIAGTAEWVHVQAEAREWLTRGGHMSARARDKALNPVIDDSHSVTISYNPIHLFADQRLTHIVYLPTANHANDPGPMAESAVAYWVYDSVADTAPICGGKVTGDKADAAIGGVWGH

SEQ ID NO: 56450 - protein, 42 aa, Zea mays
  Coding DNA Sequence Number=SeqID_13075
MRLRTLRDGMVLYSKRYLIHVGNEGSSSTSTFTDNNAVQAHP

SEQ ID NO: 56451 - protein, 118 aa, Zea mays
  Coding DNA Sequence Number=SeqID_13076
MGGFPWRWDLRRGIRAATSFDPSRIQGEAPEPVLEPSQLASARVNTVAQGTSHEQIREGDDVLPAGGLPDRLAAKGYDNRGSGRWDYQGEGEKNSRAPAFNHKRGGGTLGYETKLYMV

SEQ ID NO: 56452 - protein, 57 aa, Zea mays
  Coding DNA Sequence Number=SeqID_13077
MDNIDEVTDKRLMALKDIEKDKLIVVRACNKKDRILIPCVIILTMHGKLFGFAEEWV

SEQ ID NO: 56453 - protein, 56 aa, Zea mays
  Coding DNA Sequence Number=SeqID_13078
MVKNFGSKTVQIAVNDVVFKGEAQKIQRLTQRRSCEAGKLRHVRRKRNRLKDEKAI

SEQ ID NO: 56454 - protein, 89 aa, Zea mays
  Coding DNA Sequence Number=SeqID_13079
MGEDRSRDGEAGNVAMDSRGGGELEGDGDSRGAGRRHREEGDEGAPAMEMRRERGTPTWAGESTVATAEQASCALYQGAGVSRPWGERS

SEQ ID NO: 56455 - protein, 141 aa, Zea mays
  Coding DNA Sequence Number=SeqID_13080
MVTSSSTLDRLWTIRLRSTIGSYPNPSVISAMIMIVHVQINDYHQSRARKNKILTQEAKFVPDSHTIGNDATLTKERNKARVRNRGSPKAEVELAQDPHGGSVYPPRSDEELRGHRPTTRVTAHPNTVLGSRGTTANPAEA

SEQ ID NO: 56456 - protein, 125 aa, Zea mays
  Coding DNA Sequence Number=SeqID_13081
MSSYAPGGLCKGYVVKPCRLTLVVFEGLIDPRQKGITTRGSHLVCLLKLDVTPAFEVSTEETDIEAVQTDKPKVEMLKVLLLAPTKFLILLLDKKKDEEGVAEMPIQDKVSLASLQSEVSSKVVP

SEQ ID NO: 56457 - protein, 66 aa, Zea mays
  Coding DNA Sequence Number=SeqID_13082
MPEKKQSELKKLQNAKGVVVKVAVEAEAKKPVNSLPKRQRLQVDCPRILYGDLARSCSMALILTTK

SEQ ID NO: 56458 - protein, 102 aa, Zea mays
  Coding DNA Sequence Number=SeqID_13083
  Subcellular localization annotation: CTP_CleavageSite=40; ConfidenceScore=5.05e-01
MMVTALPKLSATTTGTPRKRRMASVLDAILESVKTPPPTSAEASGGKIEDAREMVTTSTSSAHAEAGPLETTLENLVEESLPEKPSTPAPEAPSRSDLNCST

SEQ ID NO: 56459 - protein, 84 aa, Zea mays
  Coding DNA Sequence Number=SeqID_13084
MTKDQLADSVAYNSLKLHKFFNFGIDRCLCFNAAELSPPSEPYNLETDPSVKEPLDTIKIANDAMDQAVDNLLNEVADKVLKEE

SEQ ID NO: 56460 - protein, 45 aa, Zea mays
  Coding DNA Sequence Number=SeqID_13085
MTNVIKRAVVEGGRLSSPEVGANVGKEEGIEADLQEFQDFEEFED

SEQ ID NO: 56461 - protein, 172 aa, Zea mays
  Coding DNA Sequence Number=SeqID_13086
MAIALELMSWEASGGHGGSVCQRNLMVVGYGGRSTFTGARLILVAVACGLCAVSCCGESEGGKACSGGQQPTGSLSSVAVVESEPLGRARRRPSAEARAESEPWGRAKRSSSSSGAEPKSEPWVGRSGVRRLLGLSPSPSPGSGGAEFVVFRGLAQVRALGRAERSSPSSGA

SEQ ID NO: 56462 - protein, 155 aa, Zea mays
  Coding DNA Sequence Number=SeqID_13087
MAAGEVLAPGSCGVVAVGGALEPGRRTTVGAVESLLTSSCFRKGAESRRRHRACGAPSLLVWRLGDVEAPPRSRSSLSSEAEVESEPLGRVRRRPSAKARAESEPWGRAKRSSSSSGAEPESEPWVGQNGVRRLPGLSPSPSPRSGGAKFAVFRG

SEQ ID NO: 56463 - protein, 171 aa, Zea mays
  Coding DNA Sequence Number=SeqID_13088
  Subcellular localization annotation: CTP_CleavageSite=52; ConfidenceScore=5.03e-01
MAQQCRLSTTVMGQSAVGIGMAVGVVIGGPTVIAATGARKQGSNRQSDSGPTCKLASSPEAGPGATVGTQNQGYPLLQGKTPHPSGVKVIQQAARLLGLLTNSVPVPDGALYSSSLPQEASPARQGYADLERQGTRRLPWQQTLEDPSSIFFISLGPHVGAQSFCACPLQL

SEQ ID NO: 56464 - protein, 124 aa, Zea mays
  Coding DNA Sequence Number=SeqID_13089
MNYLHTSKGRGITIPERLTGKGNCISTDGDDRLCTNDSPAAAIILACAPLQVGPRPRLPTRGDKRPLKPKSWKLAPDSPTNGGDHLCTVGQQLHQRARRGLRSRPHYGSDDKTIQERRPTRTAY

SEQ ID NO: 56465 - protein, 208 aa, Zea mays
  Coding DNA Sequence Number=SeqID_13090
MSKMSEKDASDVEPGLVRLCYKYKFEDEFREPSDGWRRLNRVFDAVDFFYPDYPNMVLDSKNRKRKVTTKRSKVLKMQVESTPQASEEILTDGCNSDTFGDHSSQRERFLQPVSIEDKGKGPVKIEEAKKAIEDDTTFGEGPFDQDLVGRRYRVHHAAGNVMGAKQLAEAIAFAKSWVQSCEDGDYAIITGLLEAFEADGKLNLGSYN

SEQ ID NO: 56466 - protein, 36 aa, Zea mays
  Coding DNA Sequence Number=SeqID_13091
MRRFWQEKRATLRLRRNNRAKKGTGKGGYPEKDPSP

SEQ ID NO: 56467 - protein, 218 aa, Zea mays
  Coding DNA Sequence Number=SeqID_13092
  Gene Ontology: Mol. function=carboxyl- or carbamoyltransferase activity; Cellular component=ornithine carbamoyltransferase complex; Biological process=amino acid metabolic process
  Homolog annotation: Hit_ID=Q8SA97; Match level="QueryCoverage=51%, HitCoverage=21%, E-value=2e-21, Identity=51%"; Hit description =Ornithine carbamoyltransferase
MALPVDVAGLRPRLGDVEAPPKPRSSLSSMAEAEAELLGRARRGSSAEARAESEPWGRAKRSSSSSGTEPESEPWVGQSGVRRLPGLNPSPSPGSGGAEFVVFWDLARVRALGSGGAEFVVFWDLARVRALGRAERRPDCLSVSFCQVALQSEWRRRRCPSVRPLYADGGYQLRIRSLEGTPNYGPRQELTDTSTSTKEEEYIRDVPILRKVPGVLEF

SEQ ID NO: 56468 - protein, 69 aa, Zea mays
  Coding DNA Sequence Number=SeqID_13093
  Gene Ontology: Mol. function=cysteine-type peptidase activity; Biological process=proteolysis
  Homolog annotation: Hit_ID=Q5NKP7; Match level="QueryCoverage=98%, HitCoverage=7%, E-value=7e-28, Identity=82%"; Hit description =Putative uncharacterized protein 9C20.3c
MRIGSNDCGFYVMSYMKYYDHNSGVITSYTQPDNSRDLRAHALYHLTFHRMNKALPLPIEIQRFMFARK

SEQ ID NO: 56469 - protein, 159 aa, Zea mays
  Coding DNA Sequence Number=SeqID_13094
MGKNNKRKREPTPPSEEFGDSEYSEEEFSSESEGSPAPIPLRESSDDSDDSQGLAAEIWTYIRAVERSGLEGSDESEFSSDEEDSDGGEDEDDDDDDGDDDGDDNDGGDGDGDGGNGDGGNGGGGSGGKDSTRGGSSTGSTRGGSSKGSTKGGGSKASG

SEQ ID NO: 56470 - protein, 140 aa, Zea mays
  Coding DNA Sequence Number=SeqID_13095
MGKSKKGGSSSHHFGDKQKREPTPPSEDFDDSEYSEEEFSSESEGSPVHASPSALSDDSDDSQGIAAEVWTYIRVVERARLEGSDESEYSSDSSEEGGGNDDGGDGDDGGGDGDGGGKGGSGDGGDGSKGSSRGSNKASG

SEQ ID NO: 56471 - protein, 364 aa, Zea mays
  Coding DNA Sequence Number=SeqID_13096
MDHHCAANDGEPYDLGDVRRISRPRPQVEEVSCSDGRLPVVGVCEGDEEVAQRASNHLDVLFPHPKAGAEGPPLRADVRAVTPEPHYHNMRTQPLKLPFHVAGGGGDDAGMLLAVSRVAGLSHGRGSEHERWKVDVIEAGSLALGGWRCLTTPSGALPGTVSVAQAIYAPHRVSAINGEVASAQEAGAFTLQTYQQTARSRGRVRHPCHAVWFRTGSALTPTLNRCPPARSIVFNAVAAMGCRIGGDIKATGFAGGFEGGEVSDVWRATRNQCKAYTLGGGKDLGQAGRHGRARWRRSGGRGMGGRASGARGVRWVGSAEDDGTAADRADATAGGARSPWGREWVGREAISLLLLFLLPVYGNI

SEQ ID NO: 56472 - protein, 44 aa, Zea mays
  Coding DNA Sequence Number=SeqID_13097
MAESLDEAEPGRIHAAIGVLLGKKGCGFAFYIPRRRPNEGGAGG

SEQ ID NO: 56473 - protein, 100 aa, Zea mays
  Coding DNA Sequence Number=SeqID_13098
MVTGQSAVGIGAVVGMATGGPAVIAATGAQAVRRCQGHPVGGTHAGSAGEQYGYARQHTVLNISPTRVFLWRVHSTTRPEISSLTMTKAGTLDRGTDEDF

SEQ ID NO: 56474 - protein, 97 aa, Zea mays
  Coding DNA Sequence Number=SeqID_13099
MAGWSLERLDTSQEPLEILAGGAGVEEEAMDECEGGNQGGVCRSEAGSRGGRATRGAGADGGRSGVLQKLLYRIPSEQDEDKDEDVKLCHNSIWKWR

SEQ ID NO: 56475 - protein, 232 aa, Zea mays
  Coding DNA Sequence Number=SeqID_13100
  Subcellular localization annotation: CTP_CleavageSite=59; ConfidenceScore=5.23e-01
MGFGTRWREWISILFGFASSRALLNGRQGANIQHRRRAPTHVLSRPSAAVPPRHLAPPRAGVSSARRPRPLSTCCRAPTPLGRAHVLPRHHAPPDSCPSPDFCGVCSLHPDSAGIELIALHPLSFSPRLFHLGRVASFFSICRRHPRLAGVGLRLVRPIHLSSLPSTPSPSLSPCRCFLGPVRGFVPVGRKCASVQRIPAFATPSPVLVCPQLGAAGGESSAHANPSSGGQR

SEQ ID NO: 56476 - protein, 18 aa, Zea mays
  Coding DNA Sequence Number=SeqID_13101
MAEDASERNSEARGNEYA

SEQ ID NO: 56477 - protein, 219 aa, Zea mays
  Coding DNA Sequence Number=SeqID_13102
  Homolog annotation: Hit_ID=A2Z349; Match level="QueryCoverage=52%, HitCoverage=70%, E-value=3e-41, Identity=66%"; Hit description =Putative uncharacterized protein
  Subcellular localization annotation: CTP_CleavageSite=71; ConfidenceScore=5.34e-01
MGVPDLCARWRAINALQPGGKKDTSPKGTGNRTIVGPVQRTAQPPDLRRRRARTSDLRRRRRGEAALWPFSARERPDPSRRLVHFAVNPCGLGARIMDPKEKPNVSSSPPTPRLDCIKCFDMLWFCYSPFHQMQNYYRYGEFDTCFGKWGDLMGCLALKTKRKAEVEEILIAREKAKPHIWTYRTVDEASENWWRMYKHAVMMSPLPGSAQLPPRSDES

SEQ ID NO: 56478 - protein, 386 aa, Zea mays
  Coding DNA Sequence Number=SeqID_13103
  Gene Ontology: Mol. function=nucleic acid binding
  Homolog annotation: Hit_ID=Q2QUK2; Match level="QueryCoverage=100%, HitCoverage=77%, E-value=7e-73, Identity=39%"; Hit description =Putative uncharacterized protein
MAPGIRFSKRVRAGSQPEEQSSKRLHSTETDGHNVQEPTDGNDDIPNSPTTPGLADHFSRAAEEAMASAAHDSTGDAEGNSRTTPGLADHFSRAEEEDMASAAHDSTAPTQRAPRRPRAATKGKQLDRMTKVMQRRLPIAVEEGKKRPHEPVQAAKFASETGIIIRETMPILTRWKDYKDDHKYYNSFVSQLNGRLSINTEGKATKEACTDMLRSAVKNQRYRLKQKYFNGVPANEIRTTSPVSYMTDEQWRALVAKWSDPKNMEISEKNKQNRSQVKFHQATGSRCYVAHLHAYSHMEALRAEPVAEGEMPASSVHLVSKVLSQSSSHQFLKSVGIKTSATSKASSSNQSELREQLAAEATAAIQGELDQLRKKCEEVEEQQART

SEQ ID NO: 56479 - protein, 97 aa, Zea mays
  Coding DNA Sequence Number=SeqID_13104
  Homolog annotation: Hit_ID=A2YU40; Match level="QueryCoverage=36%, HitCoverage=3%, E-value=7e-07, Identity=74%"; Hit description =Putative uncharacterized protein
  Subcellular localization annotation: CTP_CleavageSite=26; ConfidenceScore=5.05e-01
MARRPAAASLPSQPRRPGVAVHRGVAAGPAPYSLRKLRGLERFLECLSVAFDAIYAQVSGALLWVYKVGDPITTSAFVDELLTSESFGPSERYWTYW

SEQ ID NO: 56480 - protein, 148 aa, Zea mays
  Coding DNA Sequence Number=SeqID_13105
MADTDMGGVGGRFDGVFATWASQTGGRGWGRETVGGGATNRWARWLVSAFRDRGVPKPTSECAAYPSPDGSSAWASAEGGEARRPEPSVREVEVPRPSCSSRAQVSCKERIQVYNGDVAECYVSSGGRASALGTCRCGSRRDLGILLA

SEQ ID NO: 56481 - protein, 114 aa, Zea mays
  Coding DNA Sequence Number=SeqID_13106
MAVASSCWELLRVTNRAHGPLASRQNRPEIGPCSSIKSLGRLILSSSRLPETEILAPPIRVSVHLGDERLHSGKGLPRGKVGAAVLWAGGGRWRASRWIRDGCLRLDQPILVQG

SEQ ID NO: 56482 - protein, 68 aa, Zea mays
  Coding DNA Sequence Number=SeqID_13107
MVGRSEPGYDLYPALSFKDLHHPCWGGGRAEPELYLPHGLCLFSSRFAYPDSFVSSRIAYPSKSYFSR

SEQ ID NO: 56483 - protein, 359 aa, Zea mays
  Coding DNA Sequence Number=SeqID_13108
  Subcellular localization annotation: CTP_CleavageSite=67; ConfidenceScore=5.25e-01
MHEESAKAWLPSKGVTLLLKATLPTCVLNRRGLSLLQHAPRPSPMTRGLGPTRHASWPRTEEAKPPRAERVTARRLQAFLRLRPNQRVKGRTDMQAECDCTKGAHPFDFDASSMEAQAHTSCNWRAGYYVRETAPPLVPVPRLLDCGTSAVTRGDPAHDPTVPTEHIGHGSVSRGRRRDDRYGQKWADSNGGGRRAEAEVKSSASSRPLLGQQGSPLPRREDDAPVFRSSNGSLTHNGCPTNHSSHRINSAAGQAAHLAGEAGTGKGDTLKGVLLREGSGPRAPLLIRGSKASPSEGFNSRLRALGLRAHYWLAPKGSTAASEHAERGMTLGSGAALANPAPAKPLTASTYQPENLGPD

SEQ ID NO: 56484 - protein, 236 aa, Zea mays
  Coding DNA Sequence Number=SeqID_13109
  Subcellular localization annotation: CTP_CleavageSite=24; ConfidenceScore=5.24e-01
MGAIKAKAQSAQGTRSRLARAQPRAKEADPGGFTSRPREAPPRPTPGFGPRLGLGRRTSPPPTPGLGLNHDLEDDELRLARPQGSDSASAPEDDELHLARPQGSDSASAPEDDELRLARPQGSKSASAPEDDGLRLARPQGSDSASAPEDDGLGLGSRRRWTPPCPTPGLGLNLDLGGIATSLKLGKQVMMTPRTLHDDGSSQPLTSARRRQQGSDSPDSCTSAGLQRSSDGHDIT

SEQ ID NO: 56485 - protein, 54 aa, Zea mays
  Coding DNA Sequence Number=SeqID_13110
MAMMGSTSEKMYLYQNKITRNGSGEMARVACTLRGKRLDGGVSVLSVGVNLIWS

SEQ ID NO: 56486 - protein, 104 aa, Zea mays
  Coding DNA Sequence Number=SeqID_13111
MKDAMLSQQPPRVVLLQCLGPKRHRQEVKEAAELLVLVDIDSAELLVLVVEVKAIDLDPTAEEEERQLQDHNEVMDARQALMGVDVTHEDPIKLKDFACSRTGT

SEQ ID NO: 56487 - protein, 46 aa, Zea mays
  Coding DNA Sequence Number=SeqID_13112
MARVACTLRGKRLDGGEEATIFAAFVRRWCLKKKIKTEAAGGRVLR

SEQ ID NO: 56488 - protein, 938 aa, Zea mays
  Coding DNA Sequence Number=SeqID_13113
MCSHFYSAYPPFEVAEDDVDEGALRCAAGQSSGRDLVEEFVAYGVWPLAHGWALGEVCPRQMPFRGGEVVRSPAFALNLRNRDPAAFVREAEDGAVRLVGRYVPRTEGQRSWEIRGSNDRLNRVFKLNQLPYDGYPSQDDADRRGKKPVVETKDDPAPAAAPSSKKRKLGTAMGGLGVSDGFARELMRTCAAPGERMSSPELRESSARMLKVTGGCWPRNVPIPRAASGDVFTSRMVRKWRVFPYGRNIAAVVSAVKDKDRQGAAQKRQAAVRLVEARPKRQRGSAKAAALGGGKPPLAAKTGVPASSKAPETAAGAGGSKPAKAVPPPSRVAEAAKAARALPSAGKRVADFATDICVEDYLGGSDEGQLVIVAPAAATAVAAAAPKAKGGALSAGGEVAALAAVRDEAGAASRRLKEVVESLSQVADFANRTASGAFTAVVSAEVERLRTQHADAIREKSAADSKCRKLADKVAALEGEKADLRCQLAGERRETNEALVKAQASQAEAKLARAEGNIARERAEQLQERLIALESRVERAEAAMRAEAERTRTQLVNTYRELGARTGDFEVPDREPGLRCLEWVQEELQELPTVVGGFMSYASLVTCEGAMNALSREGCRHFEVFDQADEDFDRDVYKVEDLVVKESAGALYDRMWGPHGREVVRERAETAMAQALRGERVDDFGSLNSALPDPEPTPAEAATGVPLERTPGTAEDAPDAPASAAAGEDRPPKVDEGAPDAPAAAAPSVEDPAVVAAETTAEATAEPTAEAPATSGPSQVQDFGPAHATATAKFLAASTAEGGNECGGSASEFSEFFDFADSGSSVEWTEESSEEDLDYFAALDVAGVETSPHAVDTEDVPGPSTGRRQRRAVAKRRVSEAEGGRLRVSRAGRQELLSLPAAGSTGEGELRSLFAGEELRIMLFNYREMGIIPKVEPM

SEQ ID NO: 56489 - protein, 155 aa, Zea mays
  Coding DNA Sequence Number=SeqID_13114
MGKNNKRKREPTPPSEEFGDSEYSEEEFSSEPEGSPAPVSPPASSDDSDDSQGIAAEVWTYIRAVERAGLEGSDESECSSDEEDSDGGDEGEDDDDDDDDDDDGGWGGGRRQQGQHQGQRQGQHQGAAAAAGAAPRAAAAAGAGAGPVARRHWSS

SEQ ID NO: 56490 - protein, 299 aa, Zea mays
  Coding DNA Sequence Number=SeqID_13115
  Homolog annotation: Hit_ID=A2GBN7; Match level="QueryCoverage=57%, HitCoverage=35%, E-value=1e-10, Identity=31%"; Hit description =Putative uncharacterized protein
  Subcellular localization annotation: CTP_CleavageSite=37; ConfidenceScore=5.01e-01
MCHLITRPFSSKKLEEAGYYSALPLKRRPRVQSLGITSKMPTPTFNHSALPLKRRPRVQSLGITSKMPTPTFNHSALPLKRRPRVQSLGITSKMPTPTFNHSALPLKRRPRVQSLGIASKMPTPTFNHSALPLKRRPRVQSLGITSKMPTPTFNHSALPLKRRTRIQSLGITSKMPTPTFNHSALPLKRRPRVQTPSITSKMLMLIFYHSVLFLKCWPRILSLGIISKMPMPTFYHSALPLKCWSCVRLLSATSKTLMSTFTSLGAVSTISKEPVQHSAKAVASHQKEGIKRYTSLKGS

SEQ ID NO: 56491 - protein, 198 aa, Zea mays
  Coding DNA Sequence Number=SeqID_13116
MAERYQLPRSCVPPMTRQKDCGYPPSGGLEGGKARCIREHEDMVAFQGGHPPFKGDSPYLCPQPSGAESSPTRSKVLPVRREGWVPHVMKAGLEQKKPNRRAQCMQPPSGYKRLSTFAQTSGQPCRRHATAQSGRTSPTSSTPSMEAQAHASCNRRAGCFVQATAPPLAPLPRLLDCGTNTASRGTRKGGYPEKDPYP

SEQ ID NO: 56492 - protein, 207 aa, Zea mays
  Coding DNA Sequence Number=SeqID_13117
  Subcellular localization annotation: CTP_CleavageSite=37; ConfidenceScore=5.25e-01
MNKNTGIQSAITNGTPVPPPQQRWPPGGRCCNLALAYADARGARTSTKSWRPEAQMVAILLDEWGTDLRMEAPYRCKGRTAPEHERRPGSARHLGRSSRALGATTAFAAGGGTGSQADESNAPRLTTPAVDQPRVVEVRPSRRASERPLPRTMKERLTHETAREVELRLSPASTPARMMNILEAEGGTKIAARLASPHPRAGGHRLG

SEQ ID NO: 56493 - protein, 270 aa, Zea mays
  Coding DNA Sequence Number=SeqID_13118
MSSFFLSLPLRRRPILAAGRRLVEKTLSSLMAEELRAADSVNFGVSRMSSARVQDMQRLGYFGGGVARAPGTEEVPEPEVMDKDRQGAAQKRQAAVRLHEARPKRQRGSAKAAASGGGKPPLAAKSGAPASSKAPEATAGAGGSKSTKVVPSPSGVAEVAKAARALPSADKCVADFATDISVEDYLGGSDEGQLAIVAPAAVTTTAAVPPKAKGGALSAGGEVAILAAVRDEADAASRRLKEVVESLSQVADFPQRTASGALTAVVHESS

SEQ ID NO: 56494 - protein, 277 aa, Zea mays
  Coding DNA Sequence Number=SeqID_13119
MTTTGIEKNGSKIIGIEAHTRFSSRPISQGNYAPPNHIIFVSFLQTYRNGGTTHDETGVEAEGRSRRVEIPPQSQRRDGANLAAGVENGVCSKKTIAPRCRGSRSRGGRGRKTRSKSLIFRRGRRSSVNGRQGDTAKRHQQADLPASSIVRASRSPAREADGSARVCASHGVRARGRIEGETTDPAGKATAATDPVGKTRSSQRDGGSSRKGRSNVDPTGKVAAATDPAKAKKGVGGVACPAGQGPAPDLAEGVDGTGDGRSSKWEALLGRQHGQHV

SEQ ID NO: 56495 - protein, 383 aa, Zea mays
  Coding DNA Sequence Number=SeqID_13120
  Homolog annotation: Hit_ID=Q6J9V9; Match level="QueryCoverage=16%, HitCoverage=32%, E-value=1e-07, Identity=45%"; Hit description =Putative uncharacterized protein
MNKTSTLKVPLQTELRFHLRSRGDDDDFCSGGPNSSSNDLRADATAIRPPPMPSLERQGRAEGRRVGGQSVGGTGYLVGGETSSGCRGGRQRRKRLRSHSGQRAGHAAAASATNGERPSPRSLREGADRRPRRDRPQLGALPSPALMMKILEAEGGAEAAARLASPHPGAGGHRLGGSEGGKTRCIRGRKDMVAFQGDHPPFLGDFPHSRPQPSRAEPSPTRSKVLPLRHGGWVPRVMQAGPVQKKPNRRARCMQLPSGGRKQRSRRQPSLRPIQGQQGNPLPRTGGIVGRRSGRRFAFAIMTASKKGPRKGDTPKGILLREGNGPRAPLLIRGSKAGPSEGFNSRLRALGLRAHYWSEVRRPAPWKGSTAASGHSGSAPTTD

SEQ ID NO: 56496 - protein, 129 aa, Zea mays
  Coding DNA Sequence Number=SeqID_13121
  Gene Ontology: Mol. function=kinase activity; Cellular component =ornithine carbamoyltransferase complex; Biological process=amino acid metabolic process
  Homolog annotation: Hit_ID=Q6QP54; Match level="QueryCoverage=65%, HitCoverage=29%, E-value=9e-12, Identity=52%"; Hit description =Putative kinase
MAPPVDVVGPSPGLGEVEAPPRLRSSLSSKAEVESEPLGRARRRPSAEARAVSEPWGRPHSVEWHSSQSSAGGAVLLSGRSVERRSDYGHFGSVNWRACVRIKVSGHLCIKCPCDLVGWRGDLAKVASW

SEQ ID NO: 56497 - protein, 36 aa, Zea mays
  Coding DNA Sequence Number=SeqID_13122
MGSRHSAGSAEAECRGKEEGVKVDLQEFQDVDEFED

SEQ ID NO: 56498 - protein, 136 aa, Zea mays
  Coding DNA Sequence Number=SeqID_13123
MGKSNKRKREPTPPSEDFGDSEYSEEEFSSESEGSPAPVSPPASSDDSDDSQGIAAEVWTYIRAVERSGLEGSDESEFSSEEEDSDGGEGEDDDDDDDGGDGDGDGSGGKGSTRGGSSKGSTRGGGGKGSSSKASG

SEQ ID NO: 56499 - protein, 158 aa, Zea mays
  Coding DNA Sequence Number=SeqID_13124
  Subcellular localization annotation: CTP_CleavageSite=46; ConfidenceScore=5.28e-01
MALFSQSLLSLGAPDCPVVHQTVSGLQAVITRMPLQTRPVTQRRPRGARYNGPDHTWASEQDEAVLRGDVTAGLRLVLNEAKGVPARFVFVRPATAAKGDERRVASLPSPQHPVRQSTEGKNCLPGMLSTAPSCLGAIKGTPRRMEEYTKHSQSIPKH

SEQ ID NO: 56500 - protein, 178 aa, Zea mays
  Coding DNA Sequence Number=SeqID_13125
MNKENTNLERHKLRDIAKVSETLVTAATQKTLCILGQDNKTRTLPHHPDRGNWVLRKPKHSLNAINSPSTLIDVVDAFSERQTLNKNRGGALCTGADGPRAGAGRSAAWCEARWCSLRKGGLSAAWGRTVRGLVRGWDFCLTAGRSAPWGWTVRTYAGTAEDRRRRLDLAPGRDPVGE

SEQ ID NO: 56501 - protein, 474 aa, Zea mays
  Coding DNA Sequence Number=SeqID_13126
  Gene Ontology: Mol. function=DNA binding; Biological process =regulation of transcription
  Homolog annotation: Hit_ID=Q6Z869; Match level="QueryCoverage=97%, HitCoverage=99%, E-value=3e-77, Identity=45%"; Hit description=Myb family transcription factor-like
  Pfam annotation: Domain name=Myb_DNA-binding; Domain location=279 -330; Score=24.1; E_value=0.00051; Accession=PF00249.22; Description =Myb-like DNA-binding domain
MEMDPPPPPPLHADRRRRFRDYLLALEEERRKIQVFQRELPLCLDLVTQTIEGMRSHMDSVVVGSEETVSDHGGPVLEEFMPLKPTTLSSSSSQPHYQDEHDSAHYLEHRRGSAATANDVVDADKDGEAVGDLETAAASSSRPLPHPETKKAMPDWLQSVQLWSNQQQPSASPPQHQDELLLPCRPVALNACRKPGGAFQPFEKEKKKKDKEEKQRAELELPLPAAASSAVVGDSCDRAGATDTDTDTAENNKASSNKGGNDKEAQLSSQSQAPSRKARRCWAPELHRRFLQALQQLGGSHVATPKQIRELMNVDGLTNDEVKSHLQVLTSPFILNILGGPQKYRLHTRRPNSAAAAVQSGGTSVVAPPAAPQFVVVGGIWVPPPEYAAAVAVAAAAAAQPQQVHLAGDASGTTTTAADKVYAPVATTLTPAPRPRPRPRPERQSSSCSGARRSGDACSGSPAVLSSSSHTASA

SEQ ID NO: 56502 - protein, 442 aa, Zea mays
  Coding DNA Sequence Number=SeqID_13127
  Gene Ontology: Mol. function=transferase activity, transferring hexosyl groups; Cellular component=integral to membrane; Biological process=electron transport
  Homolog annotation: Hit_ID=Q2QXP0; Match level="QueryCoverage=95%, HitCoverage=95%, E-value=1e-154, Identity=60%"; Hit description =Glycosyltransferase 3, putative, expressed
  Pfam annotation: Domain name=Glyco_transf_34; Domain location=152 -382; Score=277.9; E_value=2e-80; Accession=PF05637.3; Description =galactosyl transferase GMA12MNN10 family
  Subcellular localization annotation: CTP_CleavageSite=14; ConfidenceScore=5.03e-01
MGVAAGGGARLRASSAKKQRQRTLNNIKITLLCGFITVLVLRGTAGFNLLVSSGDLDGAAADAKVVEDVERILAEIRSDSEADDVVVVVEGGSSSSSSPRNATAASFGNFSASATLVKVREYSLGPPVRGWDAQRREWMAQHPEFPRLHPRGRPRVLLVTGSPPGPCDNPAGDHYLLKATKNKIDYCRLHGIDVVHNMAHLDPELTGYWSKLPLVRRLMLAHPEVEWICSRCPRYDGRNLVIHGYPDLLFEKRSWISLNAGIFLLRNCQWSLDLLDAWVPMGPRGPSRVEAGKLLTASLTGRPPFDADDQSALIHLLLVQKERWMDKVHVETEFYLHGFWTGLVDRYEQMMEDNHPGLGDDRWPFITHFVGCKTCGRYEDYPLDRCIRGMERAFNFADNQVLRLYGFRHRSLTTAKVRRVTDPTTNPLEAKEAALNMDAKFT

SEQ ID NO: 56503 - protein, 490 aa, Zea mays
  Coding DNA Sequence Number=SeqID_13128
  Gene Ontology: Mol. function=transferase activity, transferring hexosyl groups; Cellular component=integral to membrane; Biological process=electron transport
  Homolog annotation: Hit_ID=Q2QXP0; Match level="QueryCoverage=87%, HitCoverage=95%, E-value=1e-108, Identity=47%"; Hit description =Glycosyltransferase 3, putative, expressed
  Pfam annotation: Domain name=Glyco_transf_34; Domain location=161 -391; Score=185.5; E_value=1.3e-52; Accession=PF05637.3; Description =galactosyl transferase GMA12MNN10 family
  Subcellular localization annotation: CTP_CleavageSite=68; ConfidenceScore=5.33e-01
MRTPAAGGWRLHPRGSSSSKLTRRIISNVKITLLCAFVTLLVLRGTVGVNRRLVYIAGSPDNRADSATATATGSARPVEDVERILREIRADSDDDPDAGPDDNDEAPTSTSSSAATGHHYDRGAAWTTTNYRLQPRVTRWNAKRRRWLHQNPGFPSRDARGGPRVLLVTASPQGPCGSSDGDRFLLRATKNRLDYCRLHGVEMVHATARLEDPELRSAGDGNGWAKLALLRRLMLAHPEVEWLWWLDAGALVTDMGFELPLARYEGAPPRGARRLWSLDLLDAWTVMAPRGRARYDAGALLTATLAGRRAGEADDQSALVHLLVTEKERWMDRVYLENQYYLHGVWTALVGKYEEAMEKHHPGYGDDRWPFVTNFAGCNPCDDGKNCSDEYPLDRCASGMERAFNFADNQVLRLYGFRHESLASAEVRRVANRSTDPLEAKEEALAFLKKPNEPDLWSNDVRKNRKRKGKGDLDSVLARILRRLGWRSKC

SEQ ID NO: 56504 - protein, 58 aa, Zea mays
  Coding DNA Sequence Number=SeqID_13129
MESHDLRAERESRLVGGNDTDGFGYDYGAGCQHLQPTAQEKMKLWKKDFQEFQDYDEF

SEQ ID NO: 56505 - protein, 91 aa, Zea mays
  Coding DNA Sequence Number=SeqID_13130
MACARDHVQSKPKAHFSTPPDDQTARPPVRHSWSDRTGPVEPPPRAVEPPPDNPGDLTASLTGRLQIRSQRGQIPVELPPRTSSAGLDQRV

SEQ ID NO: 56506 - protein, 83 aa, Zea mays
  Coding DNA Sequence Number=SeqID_13131
MTRSERRIGEPQALKGVHSLQREVDKRLIWSADTELQLTGQSQTGSTGPQHRFNRFWPGKSWLFLVKAAELKFSSEVQLASSR

SEQ ID NO: 56507 - protein, 119 aa, Zea mays
  Coding DNA Sequence Number=SeqID_13132
MTAPETVPVHPGQSVPCQVIMPVILAVGALTCWPAWCPVHTDSRVAPGIPEGEEFESESPGAPDSPAGFASSKAIARNNVLRQCTRLRRWKEQPNFASLKPKTPRIFPRTGKSPMCSSY

SEQ ID NO: 56508 - protein, 146 aa, Zea mays
  Coding DNA Sequence Number=SeqID_13133
MGKNNKRKREPTPPSEEFGDSEYSEEEFSSESEGSPAPIPLRESSDDSDDSQRLTAEVWTYIRVVERSGLEGSDESEYSSDEEDSEGGGEDEDNDDDDGGGDGDGSGKGGGGGSKGGDGSDSRDSNRGGSSKGSTRGGGGSSRASG

SEQ ID NO: 56509 - protein, 87 aa, Zea mays
  Coding DNA Sequence Number=SeqID_13134
  Subcellular localization annotation: CTP_CleavageSite=32; ConfidenceScore=5.64e-01
MAARRAPLSAMSPSPVFARPDVPPACPARIVMASARPRARPSVPLARGLELGQRAAPTCARLVRDTIVYPEPPVYPPMHSVRSDRVM

SEQ ID NO: 56510 - protein, 185 aa, Zea mays
  Coding DNA Sequence Number=SeqID_13135
  Subcellular localization annotation: CTP_CleavageSite=68; ConfidenceScore=5.78e-01
MGAVPGRSSMANSTFHSGGMPSGTNSVTTSSPSGDTNLIVLGSQLMTACRLGTYLLSCRGSPELLQPPSGSVSHDYNAAKSGCLLQAETHSASLGHWGLTAAGLPSSDIASPNGLALHSGNMPCFQLELVLPDCSAGLLGQEDDVLADSASGTDLLTDCSDDSDTGAKDTAFGTADVAEVDVGSA

SEQ ID NO: 56511 - protein, 15 aa, Zea mays
  Coding DNA Sequence Number=SeqID_13136
GGKMPPDMEAIVKVA

SEQ ID NO: 56512 - protein, 320 aa, Zea mays
  Coding DNA Sequence Number=SeqID_13137
  Homolog annotation: Hit_ID=A2DGN0; Match level="QueryCoverage=50%, HitCoverage=12%, E-value=5e-12, Identity=23%"; Hit description=Viral A-type inclusion protein, putative
MTSHGSSDEGNAQSHTDGLAREGFPRILWEVLQGAGYTTPPQYAVQLFKKHRVPRCRVRMTLEPHPLQPGWRSLDSESFGYRAEDTIEAIALHGLTTFYGFHPLELSTHPIGLFPTEKEDDPMWKDRVEHAKDIWAIYPGQTAHLTVRCMNALYRLQVMRGEAMSHLMALLEATKITLDNREELVVDLSTEMVEKDLQVEQLSNEIQELEELVGTRENTIEVLEDQLINTQQQLAEANQHLDMALLEATKITLDNREELVVDLSTEMVEKDLQVEQLSNEIQELEELVGTRENTIEVLEDQLINTQQQLAEANQHLDMHH

SEQ ID NO: 56513 - protein, 160 aa, Zea mays
  Coding DNA Sequence Number=SeqID_13138
MAPKRASSKAAPSVDEAAKAALLAEKKGKALADNTPQEAYEDEALSTRQRHEHPTPEGTLRTCSSGGLPQAPPLGFAPPEGEDATEDSKVIGVSTEEQLQLRALRIKNRSLQKQKDILEAKRRRVTAQAKVRQMIQDKEQKARELEQEIALMQCEGQHDL

SEQ ID NO: 56514 - protein, 61 aa, Zea mays
  Coding DNA Sequence Number=SeqID_13139
MQESLAGPPSQQNLPEGLPTLTTPLLPLPLSVVLDDKQHYYKIIGTGMGQFGLQMNFLMIK

SEQ ID NO: 56515 - protein, 90 aa, Zea mays
  Coding DNA Sequence Number=SeqID_13140
  Gene Ontology: Mol. function=kinase activity; Cellular component =ornithine carbamoyltransferase complex; Biological process=amino acid metabolic process
  Homolog annotation: Hit_ID=Q6QP54; Match level="QueryCoverage=71%, HitCoverage=22%, E-value=7e-11, Identity=54%"; Hit description =Putative kinase
MAPPVDVAGLRPRLGDVEAPPKPRSSLSSVAEVESEPLGRARRRSSAEARAESEPWGRAKRSGAVLLSGRSVERRSDGGHFGSAGGRASG

SEQ ID NO: 56516 - protein, 40 aa, Zea mays
  Coding DNA Sequence Number=SeqID_13141
MAHGPSEGEGPQQCATFAECKTGISAVLTVMHEQLGHSHD

SEQ ID NO: 56517 - protein, 400 aa, Zea mays
  Coding DNA Sequence Number=SeqID_13142
MNKNTGIQSAITNGTPVPPPQVRRTPLDGGGPAEQQKTDERRAVARSSSSDDDDFCSGGPNSGSTDLRANAAAKRPPPMPKLVRQGRAEGCRVGGRSVGGPGYLVGGRTSSSCRGRRRRRERLRSHSRPRARHGAAASATDDDRPSLRSLSEGASHRPRRGRPQLGTLPSPALVMKILEAEGGAEAATRLAFPHHQAGGGHPPFKGDSPYLRPQPSWAESSPTHSKTSGRKGRAAMQAARNRAKWTPFSDSQHAQPGGPGPRVMQPVRRMLRACNCTATCATTVPPRLRNRYRDSRRPRARPSSASLAWRSVRPKKGPAVMTMAGGREQRSRRQPSSRPIRGQQENPLSRREGNAPVIHSSNDSRTRNGHPANDSPRRINSAAGQAAPLAEEAGDASPSP

SEQ ID NO: 56518 - protein, 78 aa, Zea mays
  Coding DNA Sequence Number=SeqID_13143
  Gene Ontology: Mol. function=carboxyl- or carbamoyltransferase activity; Cellular component=ornithine carbamoyltransferase complex; Biological process=amino acid metabolic process
  Homolog annotation: Hit_ID=Q8SA97; Match level="QueryCoverage=98%, HitCoverage=12%, E-value=1e-16, Identity=65%"; Hit description =Ornithine carbamoyltransferase
MAPPVDVAGLRPRLGDVEAPPKPRSSLSSVVDAESEPLGRASPSPSPGSGGAEFAVFRDLARVRALGRAERSSPSSGT

SEQ ID NO: 56519 - protein, 212 aa, Zea mays
  Coding DNA Sequence Number=SeqID_13144
  Gene Ontology: Mol. function=transition metal ion binding
  Homolog annotation: Hit_ID=Q2QVN9; Match level="QueryCoverage=43%, HitCoverage=62%, E-value=6e-21, Identity=59%"; Hit description =Cytochrome b5-like Heme/Steroid binding domain containing protein, expressed
MAGEAKKLFFASEVTLHASRKDCWVVIGGKATAPCPVQARAHPCCAICRARPCALAEAAAAPTTTLGEIALGEVVLGDVMLDRAPHKLQVANTSFLLLTNLQFTNTSFLLASCSLDPASGDATEAFEEVGHSTSAVSMMDSYLIGSIKDYVRPSASKATDPWSADVLPNSRTMQGNKVTPNPNTFLDFLLPLFVLGLAFAAWYYLTFISKNH

SEQ ID NO: 56520 - protein, 70 aa, Zea mays
  Coding DNA Sequence Number=SeqID_13145
MGVGALLEASWYGADDPDSRVGQSTAGSDGLASRAGLSEGTVDAEWPTIQRVRAIWRFTFPPASLYKTDG

SEQ ID NO: 56521 - protein, 256 aa, Zea mays
  Coding DNA Sequence Number=SeqID_13146
  Gene Ontology: Mol. function=histone acetyltransferase activity; Cellular component=nucleus; Biological process=regulation of transcription, DNA-dependent
  Homolog annotation: Hit_ID=Q84P64; Match level="QueryCoverage=19%, HitCoverage=28%, E-value=2e-09, Identity=48%"; Hit description =Putative uncharacterized protein
MELPLDAQSSGRRLDVDERVEQCRAVVGVLHVLARFVLVLQMQHLRASGAVVFFGGLVKLNAYRRWSFEFTGGYKPIPHDEGTQDEDRFKEDKSVHTVRHRSASLPTLPCGSGHTFVAAIIGYLPLNILPSAPRPDLNRAQPSLSPPPTSSPTVPRTPRVALPHHTHRTRHRLSMEETRHSLSGMGGMLEEARLRDGFRCIHMVCVDQLERGILAPDNVVDMLHLARLCDAPRLALACARMELLESLVEADTASSL

SEQ ID NO: 56522 - protein, 130 aa, Zea mays
  Coding DNA Sequence Number=SeqID_13147
MGKNKKSGSLSHHSGDKRKREPSPPSEDFGDSEYSEEEFSSESEGSPGIAAEVWTYIQTVERSELEGSDESEISSDEENSSDSSEEKSDGDGDDEDDGGDGGGDGDGDGDGGSDKGDSGSSKASGKASLA

SEQ ID NO: 56523 - protein, 140 aa, Zea mays
  Coding DNA Sequence Number=SeqID_13148
MDALNFEYPDYERLNKGGEGAKRKRVVSVLSRQAASMVKEDEKTLKKRIRSRAESSGFEEEKSCNSRAEDTCSCRIGHGPQCLIKGKELPKLLQKKKVSIVGTWLVKNSLRPRRRSYRNMAFSVATSQEPCSLVESIKRP

SEQ ID NO: 56524 - protein, 430 aa, Zea mays
  Coding DNA Sequence Number=SeqID_13149
  Subcellular localization annotation: CTP_CleavageSite=36; ConfidenceScore=5.14e-01
MGEGLRSNRRLTGGSPPPALTATTTTPAPGGRTAAVQASGWALLQSCPCPRRRSRGEDKYKEPEAQSADGGGDPVGDGDFSSRLRLGTDDRGRQPSGRSPLKSSRTSGAPTSARRRHTGAKAGPPQNTNAALAARDILGGPPVHTARQPPSGRRGHREPSRRARHARADDARRRPAPRCRSPARPQGQRAPSPSNSVGEGDPRTRAGGRAPVSPASTLARMMNILEAEGGTKIAARLASPHPGAGGRRLGKSGRRFAFAIMTASVKGPGKGDTPKRILPREGTRLRASLLIRGSKASPPEGFDSRLRSRGPYTHYWSEVRRPAPRKGSTAASGYSSSAPITDQGFEGWPRRVHSRLRRRARDDHGYVRYITKARAALPRGSWAALANPAPAEPLTASTYQPENMGPDRTPGLRPVRMREQPDQPKHYARH

SEQ ID NO: 56525 - protein, 122 aa, Zea mays
  Coding DNA Sequence Number=SeqID_13150
MEGHFVLPLSAHAQSEAQLLIIPVGDSQWDDMPFDGRGHQRQVNQVLERRYRVELKAQEHIDRVLEKNEKKVCKDAISNAHLHVVNAYMKHRGHSINNFRQYSNVYLTVDQYMELAKRMMSM

SEQ ID NO: 56526 - protein, 326 aa, Zea mays
  Coding DNA Sequence Number=SeqID_13151
  Gene Ontology: Mol. function=kinase activity; Cellular component =ornithine carbamoyltransferase complex; Biological process=amino acid metabolic process
  Homolog annotation: Hit_ID=Q6QP54; Match level="QueryCoverage=31%, HitCoverage=36%, E-value=5e-23, Identity=60%"; Hit description =Putative kinase
MAPLVDVVGPRPRLGDVEAPPRSRSSLSFVAEVESEPLGRARRRPSAEARVESEPWGRAKRSSSSSGAEPESEPWVGRSGVRRLPGLSPSPSPGSGGAEVVVRGSLRRGDNFSTRSVADSRDTVASTSGHFNTDMPPRTRKTARKSTVPIGVPRHQLAPRHEGSSSGSNDPIGDLEAQVEQLRTELRHRNRVLVEDGQRMNELRADVRHLQDELAERDLAIDWAVNSRSIAWDREAKARARVDELSTALDNLQVYCNTLHEEVHVLYSRLHPDVPADPVAMGAGPSRTAGEGLGGELDLFKPPPSMNLADERSPTTDSEATKDDKY

SEQ ID NO: 56527 - protein, 387 aa, Zea mays
  Coding DNA Sequence Number=SeqID_13152
  Subcellular localization annotation: CTP_CleavageSite=20; ConfidenceScore=5.27e-01
MTASKKPPQSAWAPHPLLVRGSKAGPSEGFNGRLRPLGLRAHYGSGVRRLALEGLGGCSRKPGFGQTVDSVNIPARELGTRPCARATASSHEGITRPAEALREALRPRRSQTTPPRPRGLHPAGVLACTHRNKTQPRKAGPLAKKCDKSLQASVNTPFEARGLLSGTIIRGTLKTPNSQLGSDSGSSPEDGELRSARPRARTWTQPRKTANSAPPDPGVGLGLSPGRRRTPLRPTQGSDSGSAPEDDELRFARPQGSDSALASADGLRLARPRGSDSTSATKDRLDLDLGGASTSPNLGRGPATSTRGAIITLPQADSGYGKQDRRPIWLAPPDKVMMAPRTLYDDGGFQPPYGSKRTLQRSSNGDDTTRTGCQNPSGYHDGMYLGR

SEQ ID NO: 56528 - protein, 247 aa, Zea mays
  Coding DNA Sequence Number=SeqID_13153
  Gene Ontology: Mol. function=phosphoglucan, water dikinase activity; Cellular component=chloroplast; Biological process=carbohydrate metabolic process
  Homolog annotation: Hit_ID=Q2QTC2; Match level="QueryCoverage=49%, HitCoverage=10%, E-value=6e-35, Identity=64%"; Hit description =Phosphoglucan, water dikinase, chloroplast precursor
MPKRWCPLCTNEVANRKMNTSLISSLYKGLSYLLEGFLGALFGVVSGATPDTTVFLGRLLILIHFIVYAFLGDNLISWTFKRQPMVPRYSVEVEYHTIPNGVVEVERIAPGSLPSSMKEPVVLVVNKADGDEEVKAAGDNIVGVVLLQELPHLSHLGVRARQEKVVFVTCEDDDTIKNMRLLEGKHVRLGASSNNVDLSVVSNKDDCAAMSSEPSAGGDLFAQQFSLLTTDKKLELSEVNFLLPQIM

SEQ ID NO: 56529 - protein, 66 aa, Zea mays
  Coding DNA Sequence Number=SeqID_13154
MEYREGGEVGEQEGPSDDMLISSLVRSHRRLETTTVQQVSRIQEKGQGTQGVVAAANRVLIADQPD

SEQ ID NO: 56530 - protein, 169 aa, Zea mays
  Coding DNA Sequence Number=SeqID_13155
MEHRVHDPIKDHKGASEKLAVVKGDAHTIGRHVDSGMAKDGRQQSRCESGHVAARKVPYACAGVGLGKPKFNSAGETVGHNGRHCGREEQWRPTIVGERPTTKPGVVKKLGSIAAIEGGHRVLRGRKRTPNKPDEGVATDAERGCWWTECGRKVGGSVVSEEMDVGLLS

SEQ ID NO: 56531 - protein, 49 aa, Zea mays
  Coding DNA Sequence Number=SeqID_13156
MAPLRSRGSSVARAAREVLGKALGIPENSVRTYTEAEIRARSRNFALYF

SEQ ID NO: 56532 - protein, 82 aa, Zea mays
  Coding DNA Sequence Number=SeqID_13157
MTNGDDVMASRIMLRAPASCEDGWRRMAPGAGGIEIGQDAYIVNDDTLMDKVEVDLYMLHGVGGEQIFPEQHNAGIKSVHEQ

SEQ ID NO: 56533 - protein, 181 aa, Zea mays
  Coding DNA Sequence Number=SeqID_13158
MEGASLPIAEKLVLKGKPGDAGSGATLHDHLSKFREDGTGDPRLDNAILACLVGEGRRGSIVEDVAVQGVLADDEENLIAPMRVVVGGEVEGDVDETPDVLDSDNLGILSSEGASTISACEGGANAFGNHVALLGSGGRLLLCLESLGEGACLATVSAVVSSTVGGVADLKEPWPEEGAAG

SEQ ID NO: 56534 - protein, 44 aa, Zea mays
  Coding DNA Sequence Number=SeqID_13159
MAKTTMPKWSGAGDEAPICWGGVRDTVLKGLGTQYGVADYPRMP

SEQ ID NO: 56535 - protein, 322 aa, Zea mays
  Coding DNA Sequence Number=SeqID_13160
ATFKAAAEEAVKKKADADKKVEAEEKRIQYEDRLNMLRQEAKAEIDSLENNIDGQAGSSSSFDDIQFPAESDDDINNLTQPIRLSQDEVSVGQADFSEFQRMIFKRLGDRVLKKPREYISPFKIPRNRPEIPLAKAVALRRKIASDPELKRRILLEFGFLVGLTGKKILTSFSNDTLGESGIIDFFVHCMRHDDIVHKENSAACPAPTAVPPARVRLTTAESSLMRHRKLHLARPRARPLPRPRKTVSASPDPGLGLRLSLGKRSLPRPTPGLGLNLDLGRRSPPRPTPGLGLSLDLRGVTASPDLGLGPTTLQGGTSLPYP

SEQ ID NO: 56536 - protein, 310 aa, Zea mays
  Coding DNA Sequence Number=SeqID_13161
  Homolog annotation: Hit_ID=Q6QP51; Match level="QueryCoverage=19%, HitCoverage=27%, E-value=8e-20, Identity=78%"; Hit description =Putative growth-regulating factor 1
MPHLLDCGTGAATRGNPTHGPTVPTKHISHRDRERGYSERDPSLQRKRALSPPTDQRLAPRKGSTAASEHSGSAPITDQRFEGWPLGRVRQPPQSTRAPRPLLIRGSKAGPPKGSTAAPEHAERGMTLGTFDTWPRLGLRSRGQSSVHSRDTISPRPSPASGRNSRPRRIHASPEGLLKQRAHLRLTRGPARENSAACPAPTAVPPARVRLTATKSSLRRHRKLRLARPRARPPPRPRKTVSALPDPGLGLRLGLGKRSPPRPTLGLGLNLDLGRRSPPRPTPRARTQPRPRKKSPPRPTLGSDQPRAGG

SEQ ID NO: 56537 - protein, 136 aa, Zea mays
  Coding DNA Sequence Number=SeqID_13162
MTQWFIPWFGQDQRLPTPRCGVPTDEGCNQPLSSGPKTHLNTTKWSKGTFPFQEEAEIKRKAAAEEAEKKKADAEKKKAEEAENKRKTEAKEAEIKRKATAEEAEKNKADAEKKKAEEVENKRKAEAEEAEIKRKA

SEQ ID NO: 56538 - protein, 84 aa, Zea mays
  Coding DNA Sequence Number=SeqID_13163
MEFLTKVELSTSKNGKFLSADLEMNLFNDANLPINLWAPFLDFDGSIQSMASILLGLASIPFVDTKQPRNLPFFTPKTHFLDLI

SEQ ID NO: 56539 - protein, 93 aa, Zea mays
  Coding DNA Sequence Number=SeqID_13164
  Subcellular localization annotation: CTP_CleavageSite=54; ConfidenceScore=5.02e-01
MAERRSGRRFAFAVKTAPKKGPGKGDTPKRILPREGTMLRASLLIRGSKAGPPRGSTAASDRVGPTPTTGQRFEGRPPEGFHGRLRFEGRAHY

SEQ ID NO: 56540 - protein, 96 aa, Zea mays
  Coding DNA Sequence Number=SeqID_13165
MASPIAHRSDGFTADPPCVVAGLLRPPISGEYPLPRFAIKKASGRLPYPKGARAVGERSVRGGPREDFAAMAVLQGIPVLDLPINCSGFSEASGTL

SEQ ID NO: 56541 - protein, 165 aa, Zea mays
  Coding DNA Sequence Number=SeqID_13166
  Gene Ontology: Mol. function=nucleic acid binding; Biological process= metabolic process
  Homolog annotation: Hit_ID=Q5NKQ1; Match level="QueryCoverage=43%, HitCoverage=8%, E-value=5e-24, Identity=66%"; Hit description =Putative uncharacterized protein 9C20.4a
  Pfam annotation: Domain name=FAR1; Domain location=104-159; Score= -3.3; E_value=0.00016; Accession=PF03101.6; Description=FAR1 family
MTSRNSVNMVHEIGQSRAYKNGNWRLHCIAFVDHGLTAEKKKLAMIVLARLYKAASDTCSGLPAAPTLRANCAANPRRKNPESIDPNMVPRIGMTFGNVDEAYNFYSRYAYEVGFPLKKYRERKNCKWLNCSMEGRNTERKQAKQREKNVNDVSKLLAFFIMQKG

SEQ ID NO: 56542 - protein, 165 aa, Zea mays
  Coding DNA Sequence Number=SeqID_13167
  Gene Ontology: Mol. function=unfolded protein binding; Cellular component=mitochondrion; Biological process=response to stress
  Homolog annotation: Hit_ID=Q10SR3; Match level="QueryCoverage=52%, HitCoverage=12%, E-value=6e-28, Identity=75%"; Hit description=Heat shock 70 kDa protein, mitochondrial, putative, expressed
MEAPKMTDTCRSGNGITEAIPFVEWSEKGGRRFLTPAGILTFNRHSMSGFSGISKSLKTFFDAQVANTGALEAIQIAYPNTIGFNFTQVGICVLQSEHEMATYNKCLGEIDLMGIPPAPRGLPRIEVTFDIDANGIVTVSAKDKATRKDRNITIRSSSGLSEADI

SEQ ID NO: 56543 - protein, 217 aa, Zea mays
  Coding DNA Sequence Number=SeqID_13168
  Gene Ontology: Mol. function=nucleic acid binding
  Homolog annotation: Hit_ID=Q5NKP8; Match level="QueryCoverage=91%, HitCoverage=41%, E-value=5e-50, Identity=48%"; Hit description =Putative uncharacterized protein 9C20.4c
MWYFQEMTEKWGEKDGETKSYRQKMLLKKAMKVGEEGAVGNDEGEHVSQCDNEEHVAVHSRQHDGSINIDAHHQSELQMTLVGNDDCEGTQYGDVRKRLEYDVDGISLVRPNNARPKERTIKTSEQRVVKLGAKGEKKNTRKCQKCGIADGHNSLTCLSIEENRVKLASLADRKRGRPPGSRNKNSTMAPHWNETSTSKKHKHIDSGEHSSDDDNLT

SEQ ID NO: 56544 - protein, 104 aa, Zea mays
  Coding DNA Sequence Number=SeqID_13169
MEEDGGAGESEDSGSEVGGGDRRSQLCASREIDRGGKDREQDWGERCQSVATANVEGVGVLGPIAHPGLPLKAHERMPYNLLTLAFVGLYSLVTRKLSTNDNYS

SEQ ID NO: 56545 - protein, 141 aa, Zea mays
  Coding DNA Sequence Number=SeqID_13170
MSSRKNHELPEGGAWGSDAGRTAVWDTGSSLYDSYKLAAVRRLLDKRLLTLRDAEETRGKGRQLVVMPVVSSRRVHHRGKGHAKGALQGRWPTCAARTRQALPLAYAYAAGMVHDHQGGSPVEPEDLPSRPTVNFDDHPYV

SEQ ID NO: 56546 - protein, 75 aa, Zea mays
  Coding DNA Sequence Number=SeqID_13171
  Gene Ontology: Mol. function=catalytic activity; Cellular component =nucleus; Biological process=red or far red light signaling pathway
  Homolog annotation: Hit_ID=Q658D0; Match level="QueryCoverage=88%, HitCoverage=12%, E-value=3e-16, Identity=63%"; Hit description =Putative tDET1 protein
MVVDQAQFLDRQHLFVKFGSVDGGVSRSTDQNLAFFVVYNMETTDIVSVHQDIVIFPEDLYKFVIYIKKPKYAWY

SEQ ID NO: 56547 - protein, 29 aa, Zea mays
  Coding DNA Sequence Number=SeqID_13172
MGTPLADSLSSAVRQTLGKDRCIITPEHK

SEQ ID NO: 56548 - protein, 94 aa, Zea mays
  Coding DNA Sequence Number=SeqID_13173
  Gene Ontology: Mol. function=cysteine-type peptidase activity; Biological process=proteolysis
  Homolog annotation: Hit_ID=Q5NKQ2; Match level="QueryCoverage=100%, HitCoverage=10%, E-value=6e-24, Identity=52%"; Hit description =Putative uncharacterized protein 9C20.3a
MGGTIWKNYHCIPMDMGDRKVSWTRLIMSRLNLAIQNARPRSALPAFLKYPIELLNYCPTMKLGSNDCGFFVMRYMQHYDYMDGAINAVIDPDN

SEQ ID NO: 56549 - protein, 534 aa, Zea mays
  Coding DNA Sequence Number=SeqID_13174
  Gene Ontology: Mol. function=cysteine-type peptidase activity; Biological process=proteolysis
  Homolog annotation: Hit_ID=Q5NKQ2; Match level="QueryCoverage=81%, HitCoverage=55%, E-value=1e-103, Identity=45%"; Hit description =Putative uncharacterized protein 9C20.3a
MAIRLHPLPPARFAVLRRRTPSTSIAAAADSIVEPLPLSILRAPRHIGIRPRTICHPDSKAAASIMRKVDRPPTNPKRLIIESSQERFSVDIPRSTDIGDPTNTQCDGDPPQHRKRGVAADAKKIPMPNVDDDDDFEPPKKKCNITMDAPNKTQRLNIRCNPGDVLASIQILNERQRQAIVRKDFFSILDMTIDAIRCRTLLCWLMQKLDPRDMTLRIGPDKELKITQQTVHQILGLPNLGGGKPLNIDEANDAATLRSSLNISKDEFVISKLQDRLRLGQDDDLSIRCFFILFNRLLFPTASWSISYNEVLLTEELEWFPQIDWCHLIFSDLCEAAHKWHNRSINNVSTMIYGCSIVLLLYYLDHLHHVAAPNNKSGTPRIKYFNKNIIRALSMADKRKPRQGGEPFGVCPFQSSSETCYVSKSPSTGQLEKFQAKLIDYDLEVGKIFANIKQCLNNIGTKQSKLAATFGELIDEQGQIVPGGIVDHDSGPVFDKTPIGSVCAPDIFLSELECTRALRAYLCSKVIELDRYIM

SEQ ID NO: 56550 - protein, 349 aa, Zea mays
  Coding DNA Sequence Number=SeqID_13175
  Gene Ontology: Mol. function=oxidoreductase activity; Cellular component=membrane; Biological process=response to oxidative stress
  Homolog annotation: Hit_ID=A2Y047; Match level="QueryCoverage=55%, HitCoverage=57%, E-value=8e-67, Identity=69%"; Hit description =Putative uncharacterized protein
  Pfam annotation: Domain name=peroxidase; Domain location=57-341; Score=169.3; E_value=9.9e-48; Accession=PF00141.14; Description =Peroxidase
  Subcellular localization annotation: CTP_CleavageSite=52; ConfidenceScore=5.36e-01
MAMLMMTWTWTCNAKLLLMTLVFAAALSATVTTSRAQSPPLQYNFYGASCPQAEATVRNVTEGIIANDRTMGAAFMRLFFHDCFVRGCDASILLDPTSSNTQVEKKAIALRGYAAVNTIKAAVEAVCPGVVSCADILAFAARDTAVVSGGFAGFGMPSGRRDGVVSSFIEVLQNIPSPTFKLPDLVSNFAKKGLDVDDLVTLSAAHSFGQGALLLRQRPPLPHRRPHHERHLRRRAQDGVPAAWQRRRRPGHQQQPGHGPQRAQQPVLQQPDDRAGALRLGPAAHEHHLHGGQGGQQLRRFCRLDDPVPNGAAQDGQHPGAHRDGRPGQEVLQRRQQQLTDSRPARITS

SEQ ID NO: 56551 - protein, 153 aa, Zea mays
  Coding DNA Sequence Number=SeqID_13176
MGKNNKRKREPTPPSEEFGDSEYLEEEFSSESEGSPAPIPLCESSDDSDDSQGLAAEVWTYIRAVERSGLEGSDESEYSSDEEDSNGGGEDEDDEDDDDDEGGGGGDGDGSGKGGSSGSKDGGGGIGRGSTRGDSGGGSTRGGSGGDSNRASG

SEQ ID NO: 56552 - protein, 99 aa, Zea mays
  Coding DNA Sequence Number=SeqID_13177
MEVEGPTQHKVATLNLGQEVAVLTGSPPSSLSTRGDDTVPADKLDLSIYLALASRVHLLRCPSTFICFARLDRSPTTSIGSQLRVNPNCVVSLFSDLIN

SEQ ID NO: 56553 - protein, 269 aa, Zea mays
  Coding DNA Sequence Number=SeqID_13178
MASNEPLGTISDVTEGAGASEEPCLVGTTASGSTGASPSHSGAGAGSSYGSYGKKRRLSDEELGIMTGLTGAVNKLAEAVQAPVIVQTTYVHPDLYQICMSIPGFTDEDLMTCLTYLLDNKRQGDGFVKMEPKHRVLWLSSYKSEAFSVIGIMTAICCSQDARLTWTKELRKATPQKKTLKRSKKSPSVLPVDCLCVEHRTVRWHTGLSGAHTPDCLVHQGTEAKWLLLGGTRRKDHRTVRCGDRTVWCEKSTAPTVTYSDRAMARRTG

SEQ ID NO: 56554 - protein, 327 aa, Zea mays
  Coding DNA Sequence Number=SeqID_13179
  Gene Ontology: Mol. function=oxidoreductase activity; Cellular component=membrane; Biological process=response to oxidative stress
  Homolog annotation: Hit_ID=A2Y047; Match level="QueryCoverage=89%, HitCoverage=87%, E-value=1e-110, Identity=65%"; Hit description =Putative uncharacterized protein
  Pfam annotation: Domain name=peroxidase; Domain location=46-288; Score=383.9; E_value=2.4e-112; Accession=PF00141.14; Description =Peroxidase
MAATSSAALVTMVVVIAAAAISTASGTALLQYNFYGSSCPKAEEAVRNATQKIISDDPTMGAAFVRLFFHDCFVRGCDASILLDQSNSNPQPEKLAIPLRGYAQVNTIKAAVEAVCPGVVSCADILAYAARDSAAASGGFAFAMPGGRRDGSVSNLNDIPGNLPAPNMQVQDLIASFGSKGLSAADLVALSGAHSFGQTHCSFVTPRLYPAVDATMNATFAAALKAVCPPPSQGGGGTVLNNNRVTDPNKLSNQYYTNLATGQVMFTSDQTLTSSNTTNKMVQDNAADPIAWMARFAGAMLKMGGIQVLTGTQGEIRRVCGATNGGN

SEQ ID NO: 56555 - protein, 47 aa, Zea mays
  Coding DNA Sequence Number=SeqID_13180
MGRLKGKCALGPFLSILVIECQHKCLSVNRCQLMDKVQIKSKACCLK

SEQ ID NO: 56556 - protein, 230 aa, Zea mays
  Coding DNA Sequence Number=SeqID_13181
MVTSGLMVGESEPGCGLCPSLSLKDFHHQGWGGDCTVPGSRTRVASEPLAAPASATTAGRGSSAGGIARAGHGPTSNSTAFCPSLPHEFGHGRGPLGSSIRPEVSAAAVRPPGAEVAVVAAAGAGDDAPFVGLLLLRRPSPMEWGCSYPRRGNRSSVCNGTLNANLPVGCLNRFTKRESPRVKVTSESGDPWTASPSEARSDLTEGVVDVEGAAAPFQRQDPSLQDQIVL

SEQ ID NO: 56557 - protein, 413 aa, Zea mays
  Coding DNA Sequence Number=SeqID_13182
MAERYQLPRSCVPPAMRRKDGGYPPSGGLEGGKTRCMREREDMVYFQGGHPPFKGDYPYLRPQPSRAESSPTRSKALPCGAGARSHTSCKPAQSRRSQTAARGAHDRPAVTSDPPLLPRPAGERGGRPYRRHATAPSGHASPTPDTPGMEAQAHASRNRCAGCFMQETAPPLAPPPRLLDCGTNTATRGDPAHDPAAPAWRGSQCGQKWAGSNDGGRWAGTAVTSSVKLTSHLGAPREPPLTEKRATLRLRHNDRVKKGVRRLAPEGFTAASDAERGMTMGIGPFERLDHASPEPSLGQGQPTPEDFRLARGPPPTEHLTQRWPDTFILTCAPRQSRSDRRHFAAPLTGLTEGQRRLLHSDYSATWQSETDKQSGPAKGTIGSSAPPDPWLGLGLSLGRRRTPLRPTQGSDSG

SEQ ID NO: 56558 - protein, 109 aa, Zea mays
  Coding DNA Sequence Number=SeqID_13183
  Gene Ontology: Mol. function=kinase activity
  Homolog annotation: Hit_ID=Q6QP54; Match level="QueryCoverage=66%, HitCoverage=25%, E-value=1e-22, Identity=73%"; Hit description =Putative kinase
  Subcellular localization annotation: CTP_CleavageSite=52; ConfidenceScore=5.37e-01
MEPGGGTAVGAVGSLLTSSCFQHAGRHHCLSGGASQMGRRSGSLRPESARGRVMMAPPVDVAGLRPRLGDVEAPPKPRSSLSSVAEAESEPLGRARRRSSAEARAESEP

SEQ ID NO: 56559 - protein, 37 aa, Zea mays; identical to SEQ ID NO: 54096
  Coding DNA Sequence Number=SeqID_13184

SEQ ID NO: 56560 - protein, 40 aa, Zea mays
  Coding DNA Sequence Number=SeqID_13185
MVGLQMMMRMVMIMLMVIVSGKEGVEADLQEFQDVDEFED

SEQ ID NO: 56561 - protein, 208 aa, Zea mays
  Coding DNA Sequence Number=SeqID_13186
MAERYQLPRSCVPPTTRRKDGGYPPSEGLEGGKTRRIREREDMVAFQRGPTRHATGALNASCMQQHHHLRHYRASSTAEPIPRLEATQRTTRQRQPGAAVNAAKNGPAVMEMGPGKGDTTKGIHPREGTRLRASLLIRGSKAGPSEGFDSRLRSRGPYTHYWSEVRRPAPWKGSTAASGYSGSAPITDQGFEGWPPKGSQPPQTPSEG

SEQ ID NO: 56562 - protein, 318 aa, Zea mays
  Coding DNA Sequence Number=SeqID_13187
  Homolog annotation: Hit_ID=Q6JAD6; Match level="QueryCoverage=97%, HitCoverage=64%, E-value=3e-74, Identity=77%"; Hit description =Putative uncharacterized protein
RQVRMPRTKNVSAPGGGDDEDPPCPFRQVKGKTVYLEQQEGRKKRRMDRVARAEAAAAAAAEQAEHGAQLLFDLQRATAARVRRFRYIPVESWLPAQRDPAAADPFNTRIQESFYRAQLSAQIALRAHRLLDIPAFLLAVGADSEVHLSYLPRLLTLLTTSGRYVEEWVRVFYATVWIDPDHHWMRFRFEPEDVTIHASQIRQVFGFNESSTRLHSMCYGTSDPPRRPHGGVAPEFDVVDFLICEIEDTVLDGLRAHRQLPYAHYLCHIFAQLIRPPQFQGTLEASRLIFGSYHPAPEDPVPAPAPVIDTQAKDTTFH

SEQ ID NO: 56563 - protein, 90 aa, Zea mays
  Coding DNA Sequence Number=SeqID_13188
MVDSDSEQCATVHAADVRAEIRGAPDCPVPHEDKASNGRPAPTPTDRLTWAGAPDTVRCAPDCPAWDAAHVKYIHALYIANDYKEQFKED

SEQ ID NO: 56564 - protein, 97 aa, Zea mays
  Coding DNA Sequence Number=SeqID_13189
MQRISPQIEHSTPLPTLRRCSSTQSRDETLAGERTRGDLRSAQNVGSHTRICARWRSQQGEGETDVIVDITPQLITLNQRSKSNKYHKNNIQAYKYL

SEQ ID NO: 56565 - protein, 959 aa, Zea mays
  Coding DNA Sequence Number=SeqID_13190
  Gene Ontology: Mol. function=metal ion binding; Cellular component =late endosome membrane; Biological process=protein transport
  Homolog annotation: Hit_ID=A7Q339; Match level="QueryCoverage=99%, HitCoverage=98%, E-value=0.0, Identity=71%"; Hit description =Chromosome chr12 scaffold_47, whole genome shotgun sequence
  Pfam annotation: Domain name=Clathrin; Domain location=400-541; Score= -12.1; E_value=0.038; Accession=PF00637.11; Description=Region in Clathrin and VPS
MYQWRKFEFFEEKSAGRGGGGGSAAAVPAEIAGRVTCCSGGRGRVAVGCDDGTVGLLDRGFRLSYGFQAYASSVLFLQQLKQRNVLVTVGDDDQSSSQASAICLKVFDLDKVQEEGSSTTTPFCVQILRIFTDQFPQAKITSFMVLEEAPPILMIAIGLDNGFIYCIKGDIARERITRFKLQVEAASDGSTSLPITGLGFRVEGQAHQLFSVTPGSVTLFSLHIQPPRRQTLDQIGCQTNAVAMSDRMDLIIGRPEAVYFYEVDGRGPCWAFDGEKKFVGWFRGYLLCIIEDQRTHKSTLNVYDLKNRLIAHSMPVGDVSHLVCEWGYIILIMSDKKILCIGEKDMESKLDMLFKKNLYTVAINLVQSQQADPASTAEVLRKYGDHLYGKQEYDEAMSQYIHTIGHLEPSYVIQKFLDAKRIYNLTNYLEKLHDRGLASKDHTTLLLNCYTKLKDVEKLNHFIKDEDGVGEIKFDVETAIRVCRAAGYHEHAMFVAKKAGRHELYLKILLEDLGRYDEALQYISGLEANQAGLTVKEYGKILVEHRPAETVEILLRLCTDVGDPTSRRGSNSMHLLMIPSPMDFVNIFVHSPQYLMGFLENYIKTVTDSPAQTEIHNTLLELYISNDLSFPSISQENEYENHYIKEIKGKETANVYRSGIKEKTGLGKEDPKVAKNIVDRRRKGLALLKSAWTSEMEDPLYDVDLALILCNTNAFKDGLLFLYEKLKLYKEVISCYKQAHDHQGLIACCKKLGDSSQGGDPSLWGDLLKYFGDLGEDCSKEVKEVLTYIEKEDVVPPIVVLQTLSKNPCLTLSVVKDYIARKLEQESKLIEDDRKSIDKYQAETELMKREIQDLKTNAKVFQLSKCSACTFTLDLPAVHFLCMHSFHLRCLGDNEKECPECAPEYRSVMEAKQKLEQNARDHDLFFRQLRGSKDGFSVIADYFSKGIVSKTTLPPENGR

SEQ ID NO: 56566 - protein, 172 aa, Zea mays
  Coding DNA Sequence Number=SeqID_13191
  Homolog annotation: Hit_ID=O48967; Match level="QueryCoverage=50%, HitCoverage=18%, E-value=8e-10, Identity=47%"; Hit description =Putative uncharacterized protein
MGKCRTPVYADRTSGQSADAATWPTARDVSQRVKPNLAGKTLRPLLILGFRVGALRHPAGEFPLRHLARQVGGLGFRFLLVSLLDAIVHIVEHHDLMPEDFMLEEEAASSTSQATNLPAPVAAAAVHSARQHTPAQTSRAYRAAPEARGAVSGQRVVAPPPRSTASPGAMKK

SEQ ID NO: 56567 - protein, 293 aa, Zea mays
  Coding DNA Sequence Number=SeqID_13192
MGREGSNNGFEGAGLGLRRRRLGGGWHVQEVEVAEGTPSHRARLSQRTWFEGTSRMRIWTSHPYPGGRVWTMTGAEVVCGATALGRTHGAACAGRWLSRRGRTEAGAVYITILIDSRDKATVSTDDRLASHFYEKPLYLSKINSQFCIKPLVLNLTRRTFTPHHRNPRLHLVSTLNPSFLLSPSPIAAATARALPNHRELLPFHQTRACELSRCNPPPLSLSLLLLVLLAFASIAIRANMDGHVLDGVKKNIVVANNAESDGLDRFAVDEHKCEVSGHVVFLTGDMSLTRTRC

SEQ ID NO: 56568 - protein, 213 aa, Zea mays
  Coding DNA Sequence Number=SeqID_13193
  Gene Ontology: Mol. function=tRNA-intron endonuclease activity; Cellular component=tRNA-intron endonuclease complex; Biological process=tRNA splicing
  Homolog annotation: Hit_ID=Q2R1K2; Match level="QueryCoverage=41%, HitCoverage=30%, E-value=6e-24, Identity=62%"; Hit description=TRNA intron endonuclease, catalytic C-terminal domain containing protein, expressed
MDFLFTIVGFLTACSVDRRGEKNPQSWMQFQLGLSLRIVDLDSTLNELGDGEDTQGSKEKEKELHALKFLTVESEQGVDGCDGAIRSLVLQLREIHGDVQVVSTPQAEELFVEVVAPEGKAFDTRCTRMKFWSELLCALWDSSSVAKMLLLTISTKSYELGSLDCLEQMIIHEMTITRWIPQSCREQQDKPCKEETNRDRQRQKSCREVLSNE

SEQ ID NO: 56569 - protein, 159 aa, Zea mays
  Coding DNA Sequence Number=SeqID_13194
  Homolog annotation: Hit_ID=A2YZV1; Match level="QueryCoverage=19%, HitCoverage=11%, E-value=2e-07, Identity=83%"; Hit description =Putative uncharacterized protein
MNTVYAAARAYCLPTEWTGTPPLRLRPLAYVTGSRPHGSIGAPPERGVEAYVDPAMSGPNPTQRGSDPSRGSGLHPWRFGLHIQGSGTFPWGSGPTVDTLEDIVFSGHTAALEPSTWWGRGTDNSDFVKGLYGTRSSAILSMNYDREASLYEKYLESGI

SEQ ID NO: 56570 - protein, 367 aa, Zea mays
  Coding DNA Sequence Number=SeqID_13195
  Homolog annotation: Hit_ID=O48967; Match level="QueryCoverage=66%, HitCoverage=82%, E-value=6e-26, Identity=40%"; Hit description =Putative uncharacterized protein
  Subcellular localization annotation: CTP_CleavageSite=34; ConfidenceScore=5.27e-01
MKQWRDDVDRLLGMAHSGLARPRPRSSRRQHEASASVRSPSVRATPTEDLRAELNRRRAGEDAPVSLERSNDLRAELNRRHAGEDARVSLERAREHRQNVEGHNLDYDFAAVAPQTPTGARIQAANFTIAYQRHGVEAHLHAVRQEPEETLRTFISRFTKMGGLGVVVQDGKKKKKKNHDHERPPSAAPIVAAATEGRGKRNKRPRPQRGNSGSCPVHPNSRHSATECREIIELAKRVSERREQTSKDGSPPHHRPGKERVDDGEVTTREWDLGNSYIVWTWTSSTSTDGKRRSKMHVTTKRSGATASGSCIVGSSGSRDLVLRRILNREGLHKLPSSWEGPFKVTEVCRPGYVRLTTAEGMPLPNP

SEQ ID NO: 56571 - protein, 244 aa, Zea mays
  Coding DNA Sequence Number=SeqID_13196
  Subcellular localization annotation: CTP_CleavageSite=37; ConfidenceScore=5.11e-01
MILCHSGAVDPSRPLTNLSWVTNKISTGAPAFAGRIRAGASPLGDLAAGEFVLFVSYLSCGLAVPISPFFLLLLEEFGLQLQHEDGVGVALLPPVPGRKAASQYASMNWSSSGSVSSARPLGAVHYRASISLALMASASPPMMGGLLRLDARIKETTVVGKLQHWVAANAAVPSGHHRVQGERQACARRLPWQLRYDGAEGGCTRAAVVIAGPAAATEDTAWEVVQDTTETAAARFQRDPTDVE

SEQ ID NO: 56572 - protein, 39 aa, Zea mays
  Coding DNA Sequence Number=SeqID_13197
GYEIDGSGYDYGAALQPLLHAKMKLWKGDFQEFQDYDEF

SEQ ID NO: 56573 - protein, 214 aa, Zea mays
  Coding DNA Sequence Number=SeqID_13198
MSGAPEDSDLIVFALGNFQRPLRYNSPDCLVCTGHVRCSKKERPQELASLGFSRQSLRHNSPDCPVCTGLSGASTGQRLLQAPTATCGAFIARQRAQRSGTPMMAHRTLYSTCLVRHQISRRAQKSELQRSIQWPFGDVAVAPDMSGVHRTVRCAIEQTAPPTVKFGGWGYKYPNHPTIHGIQVFQLPTTIQELAFIAKHNKRDQILSQLHTKP

SEQ ID NO: 56574 - protein, 200 aa, Zea mays
  Coding DNA Sequence Number=SeqID_13199
  Subcellular localization annotation: CTP_CleavageSite=19; ConfidenceScore=5.13e-01
MKSRMAPGSRSPEKSQLTSGSSSSSKPTGPEVETAVSRSQVDHIWYPGRRETDARQVPRKGVGVISSPGVGVLLGSDTRRCLRCEDNARHIPRRGAGVVDSLWSDSRRGAAPCLAMVAPSPSPLARRVAGLTRVFLFCHVEMSSSSSSPPGEPTTVVVVVLRGEEYHVIAAVAGHELETPGLKRLPKIVHLELNRKVFVN

SEQ ID NO: 56575 - protein, 99 aa, Zea mays
  Coding DNA Sequence Number=SeqID_13200
  Homolog annotation: Hit_ID=A2YXJ1; Match level="QueryCoverage=54%, HitCoverage=16%, E-value=3e-15, Identity=64%"; Hit description =Putative uncharacterized protein
MGAGLDPSPSFGGCSDPVLVELSMGGDYYRACCGEPDSDIPEGPKLPCVGDKTCTDLVQILVVAVCTALGGSDSAAAQLSVGYLVFKLCWMHQVSRWSV

SEQ ID NO: 56576 - protein, 588 aa, Zea mays
  Coding DNA Sequence Number=SeqID_13201
  Subcellular localization annotation: CTP_CleavageSite=50; ConfidenceScore=5.48e-01
MGRGLCASRPPALAHGVRPLRARLPFPFFPASVWLACPPAAPRLARRGVPAAAPARRCARPWRLARPWSTRPQPCAQLGVAAQLACPQLGVAAQLACPQLGRGGAARLLPSSAAVAGVRPRRPAPPGTRVVEYGKGYVILTTSKGQSDLVEEPEELAGEAPEQQSVGGGKIRGVVRFAVVPSMGLGVCGSLCQGGYEIDDSGYDYGAGKCIATTAQAKMKLWKETSRSSKITTSSRCGLAATPSRLPVKAAMARLRHTARKSVIPFLPSRLAERPLRRPVAGQSSHLERLHHRLHEEQERRRQEQQGSSFSLQQEIESVRSCSPVLPLEAPPAPPLGAPASGVAAGGDPDDGCGDDNSSHDIDFSASHEPEGWVARPITRDAARGCHFHDALDTLLRQVLNRRTWSIEYRCVVYQHSRGVYPDRWEATCLVRRPENSLQGAEACSEHYSISERDSAEAAMQDAARRALSHYCSVFGGVADGLDLKYYPRRPSGSTGGVIVSPVGEGNPRLSSTVNLAAVLNTELDHALDELSRARAEIALLRAERAERRHLDGGSPAPVGTQHPYRSPRRGHQSYGNPDCKTKIDLEP

SEQ ID NO: 56577 - protein, 88 aa, Zea mays
  Coding DNA Sequence Number=SeqID_13202
MAAFLYALPDKLTKISKIAASKTKIYMVLQLVNRGDLFDRIVIPRMELLILILSIHSYTSTKKVVPDDKIAEFALLDPKPPRGEQALS

SEQ ID NO: 56578 - protein, 562 aa, Zea mays
  Coding DNA Sequence Number=SeqID_13203
  Gene Ontology: Mol. function=transcription regulator activity; Cellular component=transcription factor complex; Biological process =regulation of transcription, DNA-dependent
  Homolog annotation: Hit_ID=A2YXG0; Match level="QueryCoverage=99%, HitCoverage=99%, E-value=1e-158, Identity=55%"; Hit description =Putative uncharacterized protein
  Pfam annotation: Domain name=TFIIB; Domain location=78-150; Score= -4.3; E_value=0.049; Accession=PF00382.10; Description=Transcription factor TFIIB repeat
  Pfam annotation: Domain name=TFIIB_Zn_Ribbon; Domain location=3-47; Score=19.9; E_value=0.0017; Accession=PF08271.3; Description=TFIIB zinc-binding
  Pfam module annotation: Pfam domain module=TFIIB::TFIIB_Zn_Ribbon; Domain location=78-150::3-47
MGSTCLSCGEGAVVADADSGVLVCTSCGIIQDAGGAEFVHQSTFNESGGLDRRVSSLVRNDSDSAYRDQKLAIATAGITSIATRLGLSHTRAEEALRMAKSATDGQLATPGSAFLPALAAACALLVARSHRLPLSLAEAAEAAFCSAPALADLVSRVTAQLSLPPLPCFDYTAALDRAVHLSTSLNAAAPDKTDAILAQARFLFRCASKWSLTTGRFPLPLVAALLAFSAEVNGVTSVSLEDIARDISAGLRTSLLRYKELVDALVHVAGHLLPWGADVNAKNLLLNAPVLLRLMEMRSQSDPSEEFLMSCAPNIAAIVQANSKVDDEVSKYLHITPVGSDDFDFDNLEPEEKEFENQNISEKGLSDAYQNVLNRLAQLQKLGKVGKGTDRRKRLKGGLELEPCMDTVNNGWRKDMLLEDVVDIDVGYDAPPPSFTAGLELQKQRRARIEAAKQRIDATRKAPAAPAAKANNSEDVVRKKLTMKNRGGKKKDDIDHILPSDNMTGCSGARKKRRRGSCDSIDWEDCIIELLLLHGANEAEIEQGQYRRLLELHVFSAVSGEN

SEQ ID NO: 56579 - protein, 197 aa, Zea mays
  Coding DNA Sequence Number=SeqID_13204
MEHAPDQRLQGLVPAVPLAARVGLSAVLPMVGSTHCDAGHSIQSLAAPVGDDLLAARLGDRARPDPPEGGEMASPSLSSWAAWASRVLLGRRLGLMPVRCDSKIDREKQEREIYLHALHKSKRLRCGSCADPSHFPSVLVFSYLGFSLAALAPPRRPRPEARLAAQHRRLQSQLPSPGSNIWYQRQGKFYSGCVSPP

SEQ ID NO: 56580 - protein, 126 aa, Zea mays
  Coding DNA Sequence Number=SeqID_13205
  Gene Ontology: Mol. function=protein binding; Cellular component =integral to membrane
  Homolog annotation: Hit_ID=O64614; Match level="QueryCoverage=65%, HitCoverage=29%, E-value=1e-34, Identity=87%"; Hit description =Expressed protein
  Pfam annotation: Domain name=Yip1; Domain location=6-107; Score=22.0; E_value=1e-05; Accession=PF04893.8; Description=Yip1 domain
MSRQLLKSTCLRDVDSQVFAVAFAVLAAGAIVLTLNVLLLGGNIIFFQSLSLLGYCLFPLDVGALICMLKDSVILKMVVVTVTLAWSSWAAYPLMSAAVNPKRKALALYPVFLMYISVACLIIAID

SEQ ID NO: 56581 - protein, 91 aa, Zea mays
  Coding DNA Sequence Number=SeqID_13206
MVVGEGRSTCAGGGARRRRGRPKSGEDDLGSPVRFYRVQELGKLHGPLAKLTERPTQLGRGWSELSAVAEAWAVMAGDGAACSRRSPVNFA

SEQ ID NO: 56582 - protein, 147 aa, Zea mays
  Coding DNA Sequence Number=SeqID_13207
MAHQIAWSTRGRGRLKSGEDDLGSPLRFCPVRELGKLHRPLAKLTERSAQLGHGWSELAVVAEAWAVMAGGGAACSRRSPDLAYWFQRYGALKSGLSLSPSPRQIFGFVVSRARVPMPSSDMWQRGLELRIKVNVLGFGSKVENSEI

SEQ ID NO: 56583 - protein, 45 aa, Zea mays
  Coding DNA Sequence Number=SeqID_13208
MAWQWQALTIRMEMDWQVLMVCLVLMLHSGISVFGPWSLAVSSIM

SEQ ID NO: 56584 - protein, 435 aa, Zea mays
  Coding DNA Sequence Number=SeqID_13209
  Homolog annotation: Hit_ID=Q5GAU8; Match level="QueryCoverage=28%, HitCoverage=96%, E-value=2e-51, Identity=73%"; Hit description =Putative uncharacterized protein
MASVSLSMCKRDNAVAAVDATSATAMADARTQMKDMYREALWQKRGRPRELYPDVSSKDAPVPPELPVPNCDCGRLAWGHQRCFFFQWIDGPDKFDPRYLLFVNWLSGRTTHERFKRWVPPPPNPPPMTDAEKEVATERRMDSPPRCDCGDRAVIDEDYDKQFCCPNIDYPYGWRKCRFREWLYGPLSHWPEPQETRKCSWESYDDKGEVMRTIESKRIMGQKMRWKQSLPFMIAPKRAEYRRLKAADEKRAQDAREWEAAQAEKQMLDNLADRLKGKIGSGVNYLADEAHARYVQDKMATVELMEEEDDDTSRLSELIALAEAGLHKEEEDDMSRLSELIALAEAGLRAQEEEDEFLSQAAAEVEAAYYKKKSDEAEAEDELFSQAADEAEANYYKRTGDKCDAGQCSKWNEVVVEDCETDDSEDELLIDCDSD

SEQ ID NO: 56585 - protein, 131 aa, Zea mays
  Coding DNA Sequence Number=SeqID_13210
MAIKNLMLSRKCLASESALSHNLLSWGEVSSGDSSTFPPRQQKPDIWVCVESSSSSASLIISSATLAMFLEMDASNCRFRRGKIACLSPRGTCCLRVSGLVDIRSESASSVCVEAGRNGLLAISGITQSEE

SEQ ID NO: 56586 - protein, 219 aa, Zea mays
  Coding DNA Sequence Number=SeqID_13211
  Subcellular localization annotation: CTP_CleavageSite=67; ConfidenceScore=5.29e-01
MTNPSHLKVTFDIDNFNSATCIAHPNPVSECLYASNRRTMSRSDRSHFAAPLTGLTRGQCRLRRSDCCATRQRLGLDLGPGRRRTLPRPTAGLELGLDPERRRTPPRPTQGSDSASAPEDDKLRLARPQGSDSASAPEDDELHLARPQGSDSASASEDDELRLARPQGSDSALASADGLRLARPKGSDSTSTSEETPPRPTQGSDRPRHRRGHHYPTPS

SEQ ID NO: 56587 - protein, 82 aa, Zea mays
  Coding DNA Sequence Number=SeqID_13212
MAELGQKVRWQNVNRRISYYVPASTKTLLEYGPTDKDILLASQHEGIIPENEEATHLDGMTLIESFGSTHGVNGYGRFSVSK

SEQ ID NO: 56588 - protein, 228 aa, Zea mays
  Coding DNA Sequence Number=SeqID_13213
  Gene Ontology: Mol. function=helicase activity
  Homolog annotation: Hit_ID=Q1EPC6; Match level="QueryCoverage=99%, HitCoverage=18%, E-value=5e-61, Identity=46%"; Hit description=DNA helicase homolog, putative
MHMVAFHERQMVERVVNRPGVDRSMLTSYFEANMLHDEARCILYRDFPEWYTWQSGKGKVWQRRKRDTGGQVGRIVSAHPAEGERYYLRVLLNHVTGATSYVDLRTVDGVTLPTFHAIVAATAFCHNTGVLNMLQSMGKDIKTFPLPPIIDAYDDAIGTAREVYEEESIEPTAGDVALKDSLNEEQRDAYDKIMSAVDTDQGGLFFVDGPGGTGKTYLYRVLLATLCN

SEQ ID NO: 56589 - protein, 68 aa, Zea mays
  Coding DNA Sequence Number=SeqID_13214
MEKAEPHPITHREIELTMLVVIRRLGPTVHHLEGSGAERRVERGIVAIFHPQKLVDPSTQSVHSGATE

SEQ ID NO: 56590 - protein, 386 aa, Zea mays
  Coding DNA Sequence Number=SeqID_13215
  Gene Ontology: Mol. function=fructose-bisphosphate aldolase activity; Cellular component=chloroplast; Biological process=metabolic process
  Homolog annotation: Hit_ID=A2ZNM7; Match level="QueryCoverage=20%, HitCoverage=5%, E-value=2e-36, Identity=92%"; Hit description =Fructose-bisphosphate aldolase
  Pfam annotation: Domain name=Glycolytic; Domain location=163-386; Score=-114.6; E_value=3.6e-07; Accession=PF00274.10; Description =Fructose-bisphosphate aldolase class-I
MAAILLSSDLNKRRGCLLYKNEKEVDSGSSSDVEILENPTDSNKRKLLHVLDDSEVVYEDEEGPITQADLQRWFVDDWDKKAPVKVSTDGCTNDFLMVGLSTKDMPVTKADSIDVLCDYIMAIEDDTTLDKKRSGWAEDIFKWEHTIQTGVPIDLRGFNTSYLVLQAMAMWGNDRRLKFVGPPENWNSGVGFVSKEMIQSHCPAPAEYIQSSVSVAVDAVDLVDDKGDSDDDIVDHHGDEDRMTDVELWQQLESELYRKREGEEDDIAEEMAESTIAEEVGGVAEDVLSETKEDNGLVPIVEPEILLDGDHGIERTLEVAEKVWSEVFFYLAQNNVLFEGILLKPSMVTPGADHKEKASPEAIAKHTLTMLKRIPSGCVLHVARDD

SEQ ID NO: 56591 - protein, 225 aa, Zea mays
  Coding DNA Sequence Number=SeqID_13216
MTFQGHGMWMSFVDIIYMSGTIISGTPKTPKHGWRIHASPEGLLKQRAHPRLARGPARAGFAVKQPWPDRLVNRLYRRSIQCEDRLTPYPDTRSSVDRSKAQQEAPPRPTSGLGPRLGLGRWSPPRPTPRLGVNLDLGRRSPPRPTAGLGLNLDLGRWSPPRPTPRLGLNLDLGRWSPPRPTLGLALNLDLGGVTASPDLGLGPTTPQGGLKRSSDGHDITCTGH

SEQ ID NO: 56592 - protein, 64 aa, Zea mays
  Coding DNA Sequence Number=SeqID_13217
MVALYQRQQTNKDDRLADCRLPVRCDGLQQYPPTSNTMESIAPMWSQKQPNACKSQERRAVLGL

SEQ ID NO: 56593 - protein, 489 aa, Zea mays
  Coding DNA Sequence Number=SeqID_13218
  Homolog annotation: Hit_ID=Q6J9V9; Match level="QueryCoverage=21%, HitCoverage=36%, E-value=2e-08, Identity=41%"; Hit description =Putative uncharacterized protein
MDGGNHPRGGKPSVSQLLQGLQDGLEFLLFLARGPIAPVAASGSHHSLRKRREPPIVIPEPPARTAMRTFFPPVVKAKGSAEKRWVHRSQWGSARMKQLASTPNPRSWKETKLSTYPGGEVGPAPLGGTIHSGCGPPERGRSKPSETRASRSSTVTVEKGHGSRGGTTVTRSAIAKRRRWRRSGQGTGKGDILKRILLREGSGPRALLLIRGLKAGPSEGFRQPPQSTPAPLPPTDQGFEGWPLEGFDSRPRARRARDNSRYVRYMAEARATLPRRIHASPEGLLKQRAHPRLARGPARAGFAVKQPWPDSLVNRPYRRSIQCEDRLTPYPDTRSSVDRSKPQAQQEAPPRPTSGLDPRLGLGRWSLHRPTPRLGLNLDLGRRSPPRRTPGLSLNLDLGRWSPPRPTPRLGHNLDLGRWSPPRPTPGLGLNLDLGGVTASPDLGLGPTMPQGPPTEARRRQQGPVSPDSCASTGLKLSSDGHDITCTGH

SEQ ID NO: 56594 - protein, 129 aa, Zea mays
  Coding DNA Sequence Number=SeqID_13219
  Homolog annotation: Hit_ID=A2Y3P0; Match level="QueryCoverage=40%, HitCoverage=14%, E-value=6e-13, Identity=73%"; Hit description =Putative uncharacterized protein
MEGEQLFSELALMLASDVPKEKGGGSIMVAGATVPRAEDADVDPAEGLDDDCGDIDIEVDKPFLHGPCAAVYGKLRHSRRLDVVQSGCTALSIVKHGDLMVVANVDDSRVVLGIATYDDAITPSSSSST

SEQ ID NO: 56595 - protein, 334 aa, Zea mays
  Coding DNA Sequence Number=SeqID_13220
MHVLTTFCAFHPLEMATHPIELFPTAKEDDPMWQDRVDHAKEVWALFAGATARLTVWCMSALYRLRDLQREAMPQLMGLAQDAKVTITDREDLVVDLSIELVEKDLQTKHMNARIKELEEQVEERNYTIEQQLEEANEHLDMHHQEMQQDMKSEPWVELADSPATVAASYDAGADGPSRMKFCDSLHSASGSLDPLGVTDNISAHQPQLPTRSSSALSHHFSLGRRIHLTWVYGSGWWNPNSHYSRGHVPMPPRPCLPRSNFVGQPGPEAFNDLCQYAGYHADTDEKKRDRFRRGLSTKLRERLNTVRANSYNELDIVQHPEKGTTTATRKMGT

SEQ ID NO: 56596 - protein, 105 aa, Zea mays
  Coding DNA Sequence Number=SeqID_13221
  Gene Ontology: Mol. function=kinase activity; Cellular component =ornithine carbamoyltransferase complex; Biological process=amino acid metabolic process
  Homolog annotation: Hit_ID=Q6QP54; Match level="QueryCoverage=100%, HitCoverage=37%, E-value=7e-12, Identity=41%"; Hit description =Putative kinase
MAPPVDVVSPCPRLGDVEAPPRSRSSLSSEAEIESEPLGRARQRPSAEARAEFEPWGRAKRSSSSSEAEPESEPWAGQSEVRRLPGLSPSPSPGSGRAEFAVFRG

SEQ ID NO: 56597 - protein, 110 aa, Zea mays
  Coding DNA Sequence Number=SeqID_13222
MAPEAGLGCCKPLSVEWHISRSGAGGTVFLSGRAHVRIRCQAKVASRRRLGLGQAEENEEEVVVEKEEVAPPPREDPPTGNYFYFHICGAEPDSPITQGKPRCICHLLAI

SEQ ID NO: 56598 - protein, 121 aa, Zea mays
  Coding DNA Sequence Number=SeqID_13223
  Subcellular localization annotation: CTP_CleavageSite=61; ConfidenceScore=5.40e-01
MARVACTLCGKRLDGGVSVLSVRKQQTFVVSVPRWSQKKKTKSKAAGGKATPNPPPVPPTLAEAIAALVNATADNTRFLQEMAGQQLQQQGGRVYQQGLRETSYLDFSETRPGCSSRQKIL

SEQ ID NO: 56599 - protein, 107 aa, Zea mays
  Coding DNA Sequence Number=SeqID_13224
MASSRRRVRGDDEASATTSSTGMAMLRQDEPDGKRCDGRAHAHVALGGGRWLHRQGSTPGQRHCARARRATEGRTELRSGQAAAQAGHAGYRTGQAAGRRCERVSAG

SEQ ID NO: 56600 - protein, 214 aa, Zea mays
  Coding DNA Sequence Number=SeqID_13225
MPSLGGRKVQSPLFALDVRGRDPAAVVREAEDGAVRIVGRYVPKTEGPRSWDIRGSNDRLNRVFELNRLSYGGYPGEDAADRRRKKPMGGTEEGPSQDAAPTAKRRKLGTTVGGVGVSDNFAMELMGTCVAPWGRMSSPELRESSARMLEVTGGRWPKNVLIPWAEGEDMSTSRIARGLRIFPYGRNIAAVVSIVMNKDRQHAAQKRRAVIRIA

SEQ ID NO: 56601 - protein, 541 aa, Zea mays
  Coding DNA Sequence Number=SeqID_13226
  Subcellular localization annotation: CTP_CleavageSite=32; ConfidenceScore=5.33e-01
MPATKPVAPGSGKSSASAKAAGAGGTKPPLVEAAKVRELPSPVKRVADFGTNISVEDYFVGPGEEQMVVVPPLVATTSPSAVAADFADRVASGILTADVAAKVERLQAQHADAVWEKSAAESKNRRLAEKVAALEADKTDLRRQLVEEWKEANQAISEAQAAQAEAKVARVEGSLASQRVEEWEARFNALRGRVDKVEASTRSEVEWTLTQFVNSYHELGARTADFEVPDREAGLRFLEWLPEELLVLPTIVEGFIHYEVFDQSDESFERKIFKAEDPVVKQSAGALFDMMWGAHGREAVRERFDQAREQMERAEDIEDLGGLVGAPPEAAEGNPVLPLDASEGPSAAPVPAMAGEDPASAPEPTVEGAPEAVAEPAVEDPTAAVVPSQVQGFGPAHATTTNNANFVAASTVVAENDSDDSVSKFFESDDSGSSVVWTEESSDEDLDYFTALDVATAEASPRVMDAEVLPGPSAGRRRRRAVAKRRVSEVEGGRLHVDGASKRELLSSPVGASVGEGELRSLFEGEELRIMLFNYREMGIM

SEQ ID NO: 56602 - protein, 90 aa, Zea mays
  Coding DNA Sequence Number=SeqID_13227
MFPKHNICTGTFGLGMKLYTIWKAGSERRLNQRRSCAQGSFGLVEERGTDLRRKRLSSPQQIVIKSIVSIVNMKGILSVWKEYFWVNNLG

SEQ ID NO: 56603 - protein, 206 aa, Zea mays
  Coding DNA Sequence Number=SeqID_13228
MDFAQDLDAFGLVSLQEQGYWCPPVFGHDEVDYVVALAVIGYLEALWAADGWRADDMVEYVGGQGLASGGCLGQCVGLLILGSVHMLQGETFELPLETADSREVVTPSALSLRRPRMTTSYSAILLVHLSDSKAKLRHAAYLCLTPVGEVMTAAAPAPAWHHAPSQWIVHTFSADVSDCVIGPVQSTMKSARTCDLMAVLGSNVIW

SEQ ID NO: 56604 - protein, 84 aa, Zea mays
  Coding DNA Sequence Number=SeqID_13229
MAHEIIKKSEKDTHDARVEARQAEEAVEREKCIAELSPPLELLDPLADPKTKEALEIINMAESIVDEVVKKLLNEVVEKVLKEE

SEQ ID NO: 56605 - protein, 24 aa, Zea mays
  Coding DNA Sequence Number=SeqID_13230
MAGGNKLAGAKGKGLAGEENTDDL

SEQ ID NO: 56606 - protein, 148 aa, Zea mays
  Coding DNA Sequence Number=SeqID_13231
MALLSTVETCPVSNLSWCCLTVLLILLGQEDEVFADSAFETDLLTDCSDGSGTDAEDTAFGTADTADAAEWRPESDRWLELPESASETSARSTSGAGAAGAAAGAPHPAERLAPAEHAFLLYACSLTSAERNHTSELIWQSLQHKKRV

SEQ ID NO: 56607 - protein, 107 aa, Zea mays
  Coding DNA Sequence Number=SeqID_13232
MEVLGVLVVGHTCVDEDSTPLSEQVDDVSWNSFMAAARLSCPELPHRYYGTGGRVSRGKEIWSMDYGFIALEKWLKRPQPPSNSAPVIRASWSQLGEGDGMAQSCWG

SEQ ID NO: 56608 - protein, 97 aa, Zea mays
  Coding DNA Sequence Number=SeqID_13233
  Subcellular localization annotation: CTP_CleavageSite=18; ConfidenceScore=5.17e-01
MAPLCRPAHHPPEAQLPRSSLKPGRRANFFLTHFFSKAKGGGCKCKRNETKRPWQKMGSQGKGNRFWPPKAAADCQTLSFSANFYKIRLGKNHSKST

SEQ ID NO: 56609 - protein, 262 aa, Zea mays
  Coding DNA Sequence Number=SeqID_13234
MALDKEGNLGTGKAIFAECCCQGTRQRDWQRGPTGGLSADDRLPRHSAKSPPLLSAYESSRHRDWRWGPLDPSLPRAMIAGTRQNWPLCRVPKKTLGKGSVTVTWRRDGDFSLPSVKWHSANSLSSARQKVLGKETAADVQFAERSLPSVTLGKAFAECKIAFAECLRHTTKELCPVVRITRLMLSYKTLLKSGSLPSARCFAECFLSGTRQSLALGNDGVCQEQDSRHRHTLDDGRQTPVNHSVKLTAIIFAERRVLALGK

SEQ ID NO: 56610 - protein, 120 aa, Zea mays
  Coding DNA Sequence Number=SeqID_13235
  Homolog annotation: Hit_ID=Q7XBD4; Match level="QueryCoverage=27%, HitCoverage=3%, E-value=8e-07, Identity=75%"; Hit description =Cinful1 polyprotein
MTKNMGFPKLELGLSAMSKDELADSLAYNSLKGGREMADEAIKKNEKEYHDAREEAKKAEEAVERAMIIADLSPPQEPYNPEADPVMKEALDVMQIANEVVDKVVDKLLHEAAERILNED

SEQ ID NO: 56611 - protein, 258 aa, Zea mays
  Coding DNA Sequence Number=SeqID_13236
MAERYQLPRSCVPPTTRRKDYEHPPSGGSEGGKTRCIRKREDMAAFQEGHPPFKGDSPYLRPQPSWAESSPTRSKVLPLRRGGWVPHVMQAGPGQKKPNRRARCMQAPQRLQAPLHFRPDRRMKGRAAMQAACNRAKWARPSDFQRAKHGGPRPRVMQPARRSLRASNCTATRTTAAPPRLWIQLRAPLLIRGSKAGPSEGFNSRLRARGLHTHYWSEVRRPAPQKGSTAASGHSGSTPTTDQGFEGWPSKGSQPPQT

SEQ ID NO: 56612 - protein, 131 aa, Zea mays
  Coding DNA Sequence Number=SeqID_13237
MAPPTVEKTSIIARSGIAAPMLVGGGGRGLYLVEVLLAVYSSSTLRHTKEYTTMSHVPTCTAARVGGSEGRVTRDGQSIRRREHKRHGPWRGEALEEGSKHRDSGRGGHRCLWPVERVRQEVIDLREVRRE

SEQ ID NO: 56613 - protein, 270 aa, Zea mays
  Coding DNA Sequence Number=SeqID_13238
  Gene Ontology: Mol. function=metal ion transmembrane transporter activity; Cellular component=membrane; Biological process=metal ion transport
  Homolog annotation: Hit_ID=A2WXD3; Match level="QueryCoverage=70%, HitCoverage=38%, E-value=9e-35, Identity=47%"; Hit description =Putative uncharacterized protein
  Pfam annotation: Domain name=CorA; Domain location=24-270; Score= -48.1; E_value=0.00072; Accession=PF01544.9; Description=CorA-like Mg2+ transporter protein
MRPHAVGTGGGGVGRRKAGAAAAAASREWMVVPASGPARVEEAGKHAVMARTGLPARDLRVLDPLLSYPSTILGRERAIVVNLERVKALITATEVLLPNTKDPAFARFVRDLQTRVLASSSDQAAEFTDMEGESSNVASPFPLPSASKGHEMEMTKKTTAVVPEMTSSSSMPNLAIAKDGNTNVLPFEFRALEVCLESACRSLEDERGGDAENSYVTGSDTFADEVQVDLHVVRVLMTHGIGREVDRAGVVALDEGGVLKGVVELLKKLA

SEQ ID NO: 56614 - protein, 237 aa, Zea mays
  Coding DNA Sequence Number=SeqID_13239
MGTQPHKMKRSGIWPLGQGRRKASHQLGAKHAAARDWGGSRHWAGWAAMARMGRRRRLLGQRDRGSTRGSWAARWPRRASIVERQHACATDDDAKATRTKTQQGGDADLTSQDDIGKHDAQGVPVRHIYAGAPTRRVSMVCAEWTACSRGVATGLEGALVAEVVDASSGGRNGAKQLLERGDRNGVRGPARSDVGWEMRALAILALNAPAIRSVDEAIWPRLLHCEACPSWSSGESK

SEQ ID NO: 56615 - protein, 284 aa, Zea mays
  Coding DNA Sequence Number=SeqID_13240
MHCVLPPSEPPDGERPRCLRLVVGGAQPRGGWHLSAIARLQGFSSGSPVASPHQWSRRRVTTGSMVGRSKPGCGLCPALSFKDLHHPCWGGGRAEPKLFLPYGSAGHLLLQHSGEKALTSLAEGADFDNAGPIGRKRRQLQHAWFAGSAGSGTAFGATSHRWVECGYLPAVRAAVAPRAPGDRPRRRTPLGRRSCSWVVLPLLQHDAFARRSVLARPKGLEWGSTGGQVVVVVGAEVVAAGEGFSTDETVSATRGPTSGSLALIACPRPSSGTRARALSQQRLP

SEQ ID NO: 56616 - protein, 260 aa, Zea mays
  Coding DNA Sequence Number=SeqID_13241
  Gene Ontology: Mol. function=acid phosphatase activity
  Homolog annotation: Hit_ID=A2ZLZ0; Match level="QueryCoverage=16%, HitCoverage=7%, E-value=2e-08, Identity=67%"; Hit description =Putative uncharacterized protein
MLLFRHVGKTSSIPPPPGGLTTAIVVVARRRKEYHVVAAVEGHELKTPETEQHPGLERLLETTHLELDGKLFVNTQQAPTWRANCRRFDPMGVPGPTSKLSLRVPAQMGPSPRSGEAVTPPRSRLSPSPGVGRGGDRLPRSRLSPSPRVGRGGDRLPRSRRGPSPGSGEAELPMVPEAGLGCCQPHPGGWHNSRSRAAALFSCQMTDTCRSGNGITEAIPFVEWSEKGGRRFLTPAGILTFNRNSMSGISNHSKLFLVLK

SEQ ID NO: 56617 - protein, 463 aa, Zea mays
  Coding DNA Sequence Number=SeqID_13242
MALDQIENPGSKKTIVEGVAEVAKNPLRNDKLSDRVVKGGIGCREHDVVNVEQKVHDVVTAPKDKHGCVQLALNEAEGDIGGKAIVPTPQHLLEAIQRAVKLTDHTQASGVDETNGLTAVHHLGQSVVKKGILDIQLVDYLFLGEREEVDGPNGGELHSEAEGLIVLHSRAISKATKNPTRRVPIEGTIGLELAPKDPLASDYIDARGHATRSHSAGGCEHQPVDWSENAGWCTEGSSRERARARGDSSKEGEKIEELVPLVIRRVPEEKATSASGHKFVGSDGRGVKIASTTKDTKVHIGRAGAKEDEERSRMTDRLGGEAVQKGMTEVPESLRERYDRAAQDDGAKWRQRRRRDNLGTAEHKWPWSVVDLLRVDRDQRVAELDAVTENRVHLSVKCHERAPEKLPAVKECTNTVGWHVDRSEAKDKRRGSSHKVAWGLRQPIELTQRRYRQPMQGRWDQCD

SEQ ID NO: 56618 - protein, 209 aa, Zea mays
  Coding DNA Sequence Number=SeqID_13243
  Homolog annotation: Hit_ID=A2Y331; Match level="QueryCoverage=30%, HitCoverage=12%, E-value=1e-12, Identity=53%"; Hit description =Putative uncharacterized protein
MEQKLYGAALYLNPSKFFALRDKDRRQAARLRSMFNDVMWKMINDDDEQTKISKQADDYERSEGLLAYVVQHLNVNEIGVTLPKSIQKNRLEHQRLNKLVYVSYNRKMENRFAKIRKLNSKGKKRKPLVLEEFQWENEWVDEESDSGNLWAAVDEALSATEGLRGQNVPRAAGGLPVQTQGEVDEEEESESGGGAASDAAFQLDEALLL

SEQ ID NO: 56619 - protein, 275 aa, Zea mays
  Coding DNA Sequence Number=SeqID_13244
  Homolog annotation: Hit_ID=Q6QP51; Match level="QueryCoverage=14%, HitCoverage=29%, E-value=9e-09, Identity=52%"; Hit description =Putative growth-regulating factor 1
  Subcellular localization annotation: CTP_CleavageSite=28; ConfidenceScore=5.16e-01
MQAACNCTTGMLPFDFDASSMGAQAHTSCNRRAGYYVRKTAPSLTPMPRLLDCGTGTATRGNPVHGPTVPTKHIGHRSVSRGRRRDGRYGQKWAGSNGGGKWAEAAVKSSAGSCPLLEQQGSPLPRHEDDAPAFRPSNGSRNGCPAKRATLHLRHDDRVKKGTGKGDTPKGILLCEGSGPRALLLMRGSKAGPSEGFDSRLRALGLRAHYWSEVRRLVPRKGSTAASGHSGSAPTTDQGFEGWPPEGFNSRLRTCRARDDSGYVRYMAEARATLP

SEQ ID NO: 56620 - protein, 409 aa, Zea mays
  Coding DNA Sequence Number=SeqID_13245
MGSARVAFVSLWEERNLVEVGTFQPSLGFMDFHQAARLHPLTNASRIFIILAGAGGESGPAFAWASVPLLPPASGGGNHPSALWRGILQPCGGKANCCCPARVQHSVLCPGDCGRPHRRVSQHVVRREGGTRVLGRSRSRFRGENGGEDLPVRFRAAGARWCGVGGQVDAAVGAEVVAARESFSADETVSATRGPTSGSLALISGSRPPRGDTNKSLPAVASALGPSLLLQRSPASHPEFVVPQALRCGGCSYPREWNRSSVCNGILSVGESLGSVGLAAQGFSCSVKETLGRSVMSRSWRQRCQHGQRQSWLEKKLRRPRSRRGADIFLRGGDPPTVSPSEAGPDSAEGGVDAEGAAAPPIDDLFVGSRIAHSSENYLSRKVMSEESLGSVGLAAYVYSIIFRIPLSK

SEQ ID NO: 56621 - protein, 174 aa, Zea mays
  Coding DNA Sequence Number=SeqID_13246
  Subcellular localization annotation: CTP_CleavageSite=33; ConfidenceScore=5.05e-01
MVNHGRIETTTAAATSVALSHGGMSTGPHRRQRADQRRPGVQSYSPEAGRIQGHNVEERRLARVLRIARRGPARESRRFRGKGSVAGARVCCGKVDGASAQLAPHGGETAHPGVHCSDQKCGTRPSVAEREERVVFMWAGQGGKDFGLYRLACMSCGTQPRVVGGGPWSTLVKT

SEQ ID NO: 56622 - protein, 100 aa, Zea mays
  Coding DNA Sequence Number=SeqID_13247
  Subcellular localization annotation: CTP_CleavageSite=28; ConfidenceScore=5.03e-01
MQAACNCTTGMLPFDFNASIMGAQAHKSCNRRAGYYVRKTTPPLTPMPRLLDCGTRYRDSRTPCAWPNIANQAHRSQGPRKGILRKGSFSAREASPEPSY

SEQ ID NO: 56623 - protein, 194 aa, Zea mays
  Coding DNA Sequence Number=SeqID_13248
MTNGQVERANEGLRDNKLRVARRRPLHQQRGNDLRLGRQDSCSDGLKANAAAEKPSFTSPHGGRELAIKAKEPEARSASGTDGVVGGSNRFGRGSLTYGDHHLSTNDNGHLPTNTAPASGGRPKAHRQVLAPALATRMRTGPSRNMSTALAAYDVLCDPLVQPATVTRVEDGQLHPVQEATIHLPPHGWRMPPP

SEQ ID NO: 56624 - protein, 202 aa, Zea mays
  Coding DNA Sequence Number=SeqID_13249
  Gene Ontology: Mol. function=unfolded protein binding; Cellular component=mitochondrion; Biological process=response to stress
  Homolog annotation: Hit_ID=Q10SR3; Match level="QueryCoverage=43%, HitCoverage=13%, E-value=2e-31, Identity=82%"; Hit description=Heat shock 70 kDa protein, mitochondrial, putative, expressed
MAQGHISLSGDSSEVEAEFEPWGRARRRPSSEVEAESEPWGRARRRPSSEVKVESEPWGRAWRRLSSEVEAGAEPRGRARRSFLWRLRPDSAAVSLTLAGGTAVRAGQAALFSCQVFSDADNQTQVGIYVLQSEHEMATYNKCLDEFDLMGIPPAPRGLPQIEVTFDIDANGIVTVSAKDKATRKDQKITIRSSGGLCEADI

SEQ ID NO: 56625 - protein, 80 aa, Zea mays
  Coding DNA Sequence Number=SeqID_13250
  Subcellular localization annotation: CTP_CleavageSite=18; ConfidenceScore=5.02e-01
MAGSAAPPPCLARLGRPTAGSAAPCAAPCPAGFGRPCAPPRHCGTGGYEIDGLVMTMVLVKGEDEAVEGDFQEFQDYDEF

SEQ ID NO: 56626 - protein, 134 aa, Zea mays
  Coding DNA Sequence Number=SeqID_13251
  Homolog annotation: Hit_ID=Q6QP51; Match level="QueryCoverage=50%, HitCoverage=27%, E-value=2e-11, Identity=79%"; Hit description =Putative growth-regulating factor 1
  Subcellular localization annotation: CTP_CleavageSite=36; ConfidenceScore=5.18e-01
MQEACNRTTVVHPFGFIASGGASDTFGRRSEHRFASAMTTTSKRDRERGYFERDPSRRRKRAPSPPTDQGFEGWPLERVWQPPQSTRAPRPLLIRGSKVAPRKGSTAAPEHSGSSPITDQGFEGWPLGRVRQPP

SEQ ID NO: 56627 - protein, 153 aa, Zea mays
  Coding DNA Sequence Number=SeqID_13252
  Subcellular localization annotation: CTP_CleavageSite=19; ConfidenceScore=5.26e-01
MTTVVLSPLRKQGDVSRIPAALPAVLLKGSGTSPTATDKFTGWLTDPRVRNADSCAGSRCSAGVLDSSVTHRTVRESVLTILGAAAQQPACTLLGGPTTCSEHRQGSNMSSSSDEWGWRRERATAVEVIMGDSYIREESTGGGDATAESRLEG

SEQ ID NO: 56628 - protein, 87 aa, Zea mays
  Coding DNA Sequence Number=SeqID_13253
MGHGRLLRLPASSSPETPCSAPTEGNMALSPLLLAERRRRGSEADRQSDPTSGALGSSAPPDTGLGLGLSPGRRRTPLRLTQGSDSG

SEQ ID NO: 56629 - protein, 152 aa, Zea mays
  Coding DNA Sequence Number=SeqID_13254
  Homolog annotation: Hit_ID=A3APT8; Match level="QueryCoverage=65%, HitCoverage=27%, E-value=1e-22, Identity=59%"; Hit description =Putative uncharacterized protein
  Subcellular localization annotation: CTP_CleavageSite=32; ConfidenceScore=5.31e-01
MEHASAFLARALTTPLPAPAALPRRRPARVAVAAAAPERRPPGAVASTTNYVVPLDAAPSGITRPLVEILRDLNKRVPDAIVRPSSRRASASDPVIPWYHANRMLSFYAPGEATLRTHATDNAHSLTHYHVMRSRYNSACFSYTYTIELVET

SEQ ID NO: 56630 - protein, 326 aa, Zea mays
  Coding DNA Sequence Number=SeqID_13255
MVTSSSTAGESKPGCDLCPSLSLKDFHHQGWGGDCRVPGSRTRVASEPLSAPASATAAGRGSSTDEIAGAAYGPTSNSTAFCPSLPHEFGHGRGPPGSSIRPEVIAAVVWPPGAEVVVVAAAGAGDGAPFVGLLLLRRLPPVECGDSPVGCLNRFTKRELPRVKVTSEESLGSVSLVVRGLSCLVKGTPWPLFDEPRPGVAVSARTEAELARKEDLVGRSLAGSSVSGTDAGVDLSRPRAGLMSSGDSSPRPRGDQPSRLLGPDSRRRPWRRWPGRGDDVVLQSGDPRTASPSEARSDLAEGVVDAEGAAAPFNRQDPSLQDRIIL

SEQ ID NO: 56631 - protein, 82 aa, Zea mays
  Coding DNA Sequence Number=SeqID_13256
  Subcellular localization annotation: CTP_CleavageSite=63; ConfidenceScore=5.59e-01
MAQSTVGSLGAVGAPNMSGAHQTVRCPLLAVGSATCPAQIARSTVGPADRWLTGLSGAHRTVRVQSSRSEKGTSQNPHTKKI

SEQ ID NO: 56632 - protein, 472 aa, Zea mays
  Coding DNA Sequence Number=SeqID_13257
  Homolog annotation: Hit_ID=Q8S474; Match level="QueryCoverage=5%, HitCoverage=3%, E-value=8e-07, Identity=96%"; Hit description =Putative pol protein
  Subcellular localization annotation: CTP_CleavageSite=40; ConfidenceScore=5.30e-01
MSSSSPYASRLSTFRAPGWGTLAILPPCRWRNATLRKLVPFSHRSASRIFIRQLDRIPSPVVTQDGDHQLLGGEKQAGLRPLPLPHLQGCSSSVLGRGLSGPSGFGTASGATFRRGSRKRFLRDEIVGVARGLTSNSTAFCSSSPLEWGRGRGPYGSSIRPEVIAAAVRPLGAEVVVAVAGAGGGKPSVGLLLLRRPSNRGGCSYLRRWNRSSVCNGTLSAVKGNPRPLFDEPKPKAAVSVWTEAELARKEDFVGRSLAGPSTGGTDAGAELPRPRAGLMSSGDRWLRLRGVVDAEGAAAPPPSRIVCPSESYFSRKVMSERTSTSTLRPPEDFDFNPSPSRGLRLQPFALGNSRRPARYNSPDCPVCTGHVRCANEPRPPELVILGFSRQPLRYNSPDCPVCTGLSGVPAEQRLSAAPTAPCAALNARAARADVRAAHTGAPDIKQCMSGVHRTPRRAHKSEAPTARIQRQ

SEQ ID NO: 56633 - protein, 214 aa, Zea mays
  Coding DNA Sequence Number=SeqID_13258
  Subcellular localization annotation: CTP_CleavageSite=27; ConfidenceScore=5.03e-01
MAPPMTWSVQALGRARRRLLRGRGRVRALGSGEAEFVVFRGQGRVRALGSGEAEFVVFRGRGRVRALGSGEAEFVVFWGRGRVRALGSGEAEFVVFRGRGRVRALRLGEAELPMEPEAGLGCCQPHSVEWHSSRSGAVLLSGRLVERQIVVAIWPRLLLGEDWVLGEPKLCADGGYQLRLGVLGASEEWFDSFEVLMRFVMLRPVWLFPQASWP

SEQ ID NO: 56634 - protein, 164 aa, Zea mays
  Coding DNA Sequence Number=SeqID_13259
  Homolog annotation: Hit_ID=Q6QP51; Match level="QueryCoverage=94%, HitCoverage=60%, E-value=3e-21, Identity=42%"; Hit description =Putative growth-regulating factor 1
  Subcellular localization annotation: CTP_CleavageSite=38; ConfidenceScore=5.39e-01
MDAIQVKASSTQGTRSRLARAQPQAGTVVPGEFTPRPRASSSNGHTLDSPEAQLGQASLGSNLGQIASPTDPSGATGSSASPDLGPRPQEEVSASPDPRARPSPRPQEEVSASPDPRARPQPRPWEESRPHPTPASASGGVSASPDLGLGPTAPWGIHHYPTPS

SEQ ID NO: 56635 - protein, 442 aa, Zea mays
  Coding DNA Sequence Number=SeqID_13260
  Subcellular localization annotation: CTP_CleavageSite=66; ConfidenceScore=5.22e-01
MSSPSLMRRVFPSSKPPDGGYPPSFCLLVGGTQLRGSWYLSAIIRLQGFSSAGPAVPPRRWSPKMVATSFWVGKSKPGCDIGPTLSFKDVHHPRWGGAQAEPALYLPRGSAGRPLPRRSREEAPTGPAGGADLDNVGLIDGGRRHLQRVGVVGLAPGGPSCRGGGGGGCRAVSTGGPPTMPRTARAAFVFWGGPAFAPGWRPPTEAGAPLVWEDLSGDLPGGRRPPLSAPRRRRLEKSPSPTGSLPPSAPRASGSSHLSSPLERRRTPWPLFDEPRPGVAISIRTEAELARKWEPGWPEPSRVAHQRGSSSESMTRGLGSGWHPWKMLGRGPRGNWPSRLLGPDSRRSPWAASPPEAGSDLAEGVVDAEGATAPFSVKTRACRIRLSRSVDVCVGESCFSRKVMSEKVMSEVSVSRRRRSPSARSALAAYVYSVVSRIRFSK

SEQ ID NO: 56636 - protein, 391 aa, Zea mays
  Coding DNA Sequence Number=SeqID_13261
  Subcellular localization annotation: CTP_CleavageSite=51; ConfidenceScore=5.46e-01
MSSRYLMHRVFPPSKPPDGGYPPSFRLVVGGTQLRGSWYLSAIVRLQGFSSASPAVPLRRRSPETVTTSPWVGRSKPGCDLGPTLSFKDVHHPRWGGGRAEPELYLPRGFVGRPLLLRSRERALTGPAGRSDFDNAGPVDGGVVSISASGSSAWLPVSPPAGRRLPRRVHGRTAQDIARCQGGVRVLRRSCLCTGTAPPRGGWCPTRPGGSEWGSAGGLTAPVVGAEVEAAREESLGSVSLVARGFSCLVKGTPRPLFDEPRPGVAVSARTEVELAQKENLVGRSLAGSSVSGTDAGIDQPRPRVGLTSSEDSWPRPRGDRPSRLVGPDSRRRPWRRWPGRGNDVVLQSRDLWTASPSEARSDLAEGVVDAEGAAAPFKRQDPSLQDRIVL

SEQ ID NO: 56637 - protein, 166 aa, Zea mays
  Coding DNA Sequence Number=SeqID_13262
  Subcellular localization annotation: CTP_CleavageSite=46; ConfidenceScore=5.52e-01
MALPVDVAGSCPRSGDVGVPPKPGSSLSSVPRLSPSPRVGRGGDCSAEARAESEPWGRLYADGGYQLRIRRLEGTPNYGPRQIGNQSTFPVCSHDLLDTVTARPTQYDSFEANSGRGDAVPICQSPTLAGDAVPIHPGPTLAETRFRLAQGQPQRETRFRFIRAQS

SEQ ID NO: 56638 - protein, 77 aa, Zea mays
  Coding DNA Sequence Number=SeqID_13263
  Subcellular localization annotation: CTP_CleavageSite=38; ConfidenceScore=5.72e-01
MGGPPVSLFVALCAPRRLSPPVGPQSPGRPFSPCSFPRLTLVSQTVRRKGPDGPSIGVFPEKTSPVRNNLRYSGQST

SEQ ID NO: 56639 - protein, 352 aa, Zea mays
  Coding DNA Sequence Number=SeqID_13264
MPKDASGPRLRTLFMHCALPPSEPPDGERPRCFRLAVVGGAQLHRSWHLSAIARLQGFSSGSPTASPHQWSPKTVTTSSIVERSKPGCGLCPALSFKDLHHPCWGGGQAEPELYLSHGSVGHLFLQHSGERAPTGLAEGADFDNVGPVGRERRQLQHVGLAGSAGSGSASGAPSRCRAECGYLAAVRAAVAPRVQRDRPRRRALLGRRSCSWAVLPVLRHDASARRSVLARPGGLEWGSAGRQVAAVVGAEVVAAGEVLVADEIVGAICAPGLRLFGFDSLSSPLEWGRGRGPCRSSVCPEVIAAAVWPPGAEVVVAAAGVGGDEPPGSCRPAGPPMWRLFIPAGVEPEFRL

SEQ ID NO: 56640 - protein, 267 aa, Zea mays
  Coding DNA Sequence Number=SeqID_13265
MNALSREGCRHYEVFDQSDESFEREIFKAKDPVVKQSAGALFDRMWGAHGQEAVRERSDWAREQMERAEDVQDLGGLVGAQPEAAEGNPVLPLDNGEGPSAMPVPAMAGEDPASAPEPTVEGAPEVVAEPAVEDPTTVVVPSQVQGFGPTHAATTNNANFVAALTMVAENDSDDSVSKLFESDDSGSSVVWTEESSDEDLDYFAALDVAAAEASPRVMDAEVLPSPSAGRRRRRAVAKRRVSEVEGGRLRVDGASKRELLSSPAGRV

SEQ ID NO: 56641 - protein, 112 aa, Zea mays
  Coding DNA Sequence Number=SeqID_13266
MTHFLTGFINLPLKIGETKHLFFLLLDLLMDGFEVPDLLVQLLLLSGCNAAPSPDDFFGGMTKITLFHTMHAFVLKLKLPMTVYYTGKHVSRVFEDLQKMKAPNTVLDLLGV

SEQ ID NO: 56642 - protein, 226 aa, Zea mays
  Coding DNA Sequence Number=SeqID_13267
MKLLEPSDLAQPNRKPRITVVGLLPLTRERGPDCNLADGEYMLIPEQGVDGLFRFKCVVASKASLGHLSWNNSDGSATADDFTHPCQWRRHPFQFRLPCPRGFSLYLVEVLCSAGYPTPPLYTVQLYEEHRVPRCRVWLTLKAHPLQPGWRSLDSETIGFRADDTTKAAALKTLTTFCGYHPLEMVMHPLGLFPAEKRDDPMWCNRVSHVKDVWAMHPDHVRRITV

SEQ ID NO: 56643 - protein, 158 aa, Zea mays
  Coding DNA Sequence Number=SeqID_13268
MEDYFVGPGEGQMVVVPPLVVTTSPSVVVRAKGTAQDPWAAFCASSEILTATTGKDVTGTMSQRLRDASQRLSQQLSQAADFADRVASGGLTVDVAAEVDKLQAQHGDSVREKSVAESKNRRLAEKVAALEAEKTELRRQLVEERKEANQAIAKAQAA

SEQ ID NO: 56644 - protein, 369 aa, Zea mays
  Coding DNA Sequence Number=SeqID_13269
  Homolog annotation: Hit_ID=Q7XBD1; Match level="QueryCoverage=40%, HitCoverage=39%, E-value=3e-10, Identity=29%"; Hit description =Putative retrotransposon protein
  Pfam annotation: Domain name=Transposase_28; Domain location=1-148; Score=-63.4; E_value=0.067; Accession=PF04195.3; Description =Putative gypsy type transposon
MAAAELRPGDMVEFGVSRMSSVRVQDMQHLGYFSGGVGRVPGAEEKFEVQVHQLTPNAVVALAKYVWATTSYGGQPSVEVFAKQYCLHWQKRKIGHKIAQFGSCTFTPKSGKTSMEVMELVPCARNKWGNWWDYWFYVSEAEVEDHPGLLAAIMCSHHYVAYPPFEVAEDDENEGALRIAARTSSGRDLVEEFIGGLRSWDIRGSNDRLNRVFELNHLSYGCYPGEDAADRHRKKPMGGTEEGPSQDAAPAPGGSGGVGVSDNFAVELMGTFVAPRGKDVFARAPGVLGVNAGVMNKDRQDAAQKRRAVIRIADPRREAKKERGSAKAAAPGSSQPMPAAKPTAPGSSKSSASAKAAGAGGSRPPRSRL

SEQ ID NO: 56645 - protein, 60 aa, Zea mays
  Coding DNA Sequence Number=SeqID_13270
MLFHIVYNFIPSSKLGGAGGGGGGSGRLGEHRYPATIYVGYKPNRLRWGIENNDTSEFGH

SEQ ID NO: 56646 - protein, 100 aa, Zea mays
  Coding DNA Sequence Number=SeqID_13271
MEAGRESVDRNALPPAGGWARRGRARREPGIIGRVRTADSVEMSMEQGEGDDRAAPQPRWVERVGEREGGRGEVAGVEREGGGSPAAFVFVPRPGQVRLQ

SEQ ID NO: 56647 - protein, 515 aa, Zea mays
  Coding DNA Sequence Number=SeqID_13272
  Homolog annotation: Hit_ID=A2WQE8; Match level="QueryCoverage=45%, HitCoverage=64%, E-value=6e-70, Identity=52%"; Hit description =Putative uncharacterized protein
  Pfam annotation: Domain name=Transposase_24; Domain location=310-445; Score=-22.5; E_value=0.052; Accession=PF03004.5; Description=Plant transposase (PttaEnSpm family)
MTTQGGLQPTSNEANMCTNDNGSQLGTRIVDEIMAGKNVFFDLPDKLTVNIDKAYVAFYNVVYIKSKLGYSGRDFLFYKKRCGIDRSRLLALDYIHQEEAMLSDNMDERKISFVLTKDPPSDLEVSITPIKRPRQRTNVDEETIEVSIDAYKEWLAILQHDNPEMDVIGIYVDNDGVFKKEGRGTLKGIAAATKRIKNGDHKLKIEFSSKLGGPVGPNARTFVDEIVLFTKKKAPLIGVKKWKDIELNVRSSIASDVLRRWEFLTNEDAHEKIWSIAKERYKGWRSTLSSTYKAYNSYAERMKNKPEDVDIVEWHYMMLYFGSEKFQKISSRNSENRQKQRTKHIMGSRTFSQISFQQRDPETGIEPTNLSLWMITHCKNDEWSEEASRGIYEKAAQKIVEKIYQTERFKLTREEENAIFQTTFKETTGCKANRLHGHGYLSRYPTRSQVMESKFLEQARATVATNQKNIELESQVQLLNEKLACEVAERERILQEKCKHCKKKKKEKDKCLEKK

SEQ ID NO: 56648 - protein, 52 aa, Zea mays
  Coding DNA Sequence Number=SeqID_13273
MLKNFGNPRKAELSQPPEPYDPLADPEMKESIVDEVVNKLLNEVAEKVLKEE

SEQ ID NO: 56649 - protein, 60 aa, Zea mays
  Coding DNA Sequence Number=SeqID_13274
MAVRVIEALYAKAVSPFLLTGNRWGRLMFSGGYGYWSDLVVHLATRLDSRVGHYHNRRGA

SEQ ID NO: 56650 - protein, 67 aa, Zea mays
  Coding DNA Sequence Number=SeqID_13275
MVSHSGYGGYKCGHSTTAVGVSEALYAKANFTGSLEDMVAGVTWPSILPPGWTVEWDPTSAEEEHEE

SEQ ID NO: 56651 - protein, 331 aa, Zea mays
  Coding DNA Sequence Number=SeqID_13276
MDAQVLGTISPVRPTTWGPELEKRCLSPGVVWRRVATQPGPVPWACTLHYPAAGVTLEVGSEQPHQRRRLPLHQRIAGGSNHLYTSSDNDLRSERLTSGGDHPKEEEASHQPAWRVGPRLGSPPTPARMMNILEAEAGGKPQPGLLLPTARLMAHPIWGPRRWKGTKDAKGPRHDYYPRGQPLFKGERSRMLTATQEANNCPAVIRSLGFAPVGGPTCGPRPTCHATDAPNRCSDSRHPAHGSTVILSTKVMGQSAVGTDVTVGVAIGGPVVIAPTGAQEQQADRQSNSGPTCRLVSSPEAGPGATVSTLDQGYPLLKHEDAASVQHLKAT

SEQ ID NO: 56652 - protein, 157 aa, Zea mays
  Coding DNA Sequence Number=SeqID_13277
MTVAGAREQRSRRHPSSRPIRGQQENPLSRREDNAPVIRSSNGSRTRNGCPANYSPRRINSAAGQAALLAGAAGDASPSPKQPRQKRGSKGWPPEGFNNAPQIAWARHPLLVRGSKAGPLKGSTAASGYSGSAPITDQGFEGWPPKGSQSPQTPSEG

SEQ ID NO: 56653 - protein, 152 aa, Zea mays
  Coding DNA Sequence Number=SeqID_13278
MGKSKKGSGSSPRSGDKCKREPTPPSEDFGNSEYSKEEFSFESEGSPAPVSPPASSDDSDDSQGIAAEVWTYIRAVERAGLEGSNELEYSSDAEDSSDSSEEGSGGDGDDDGGDGDGGDGSGKGGHDSGKGGGGDGGSGGKGSNRGSNEASG

SEQ ID NO: 56654 - protein, 17 aa, Zea mays
  Coding DNA Sequence Number=SeqID_13279
MASKPYYLRKFNYQAKV

SEQ ID NO: 56655 - protein, 91 aa, Zea mays
  Coding DNA Sequence Number=SeqID_13280
MSGALAMSPGRWDSTVGAFDFWARLAVRCDRWREVAVALLVHRTVRCTPDMSGDEFDLESPGAPDTVRWHTGQSGRSVKGRSDCGHFDLDD

SEQ ID NO: 56656 - protein, 113 aa, Zea mays
  Coding DNA Sequence Number=SeqID_13281
MDLAFKEEMLERRDKLLADYELEEEEKEWALEEKERTLGERILGAHLEAKGSRLCRSVIEYILTCLWSHDLAISLVPVIAGPVADTEDAAREGVQDVVDAVAERFQRDPADDE

SEQ ID NO: 56657 - protein, 213 aa, Zea mays
  Coding DNA Sequence Number=SeqID_13282
  Gene Ontology: Mol. function=ribonuclease activity; Cellular component=cytoplasm; Biological process=carbohydrate metabolic process
  Homolog annotation: Hit_ID=A2YTX1; Match level="QueryCoverage=47%, HitCoverage=9%, E-value=4e-20, Identity=57%"; Hit description =Putative uncharacterized protein
  Subcellular localization annotation: CTP_CleavageSite=58; ConfidenceScore=5.75e-01
MEAQLLMSLRRLAASTPTGAASSVTQSSASKGFDVGSLSSTKGPPSISISVSIVQALKMMMGFRPFLDNPSTALLALSLQPSKDVSPSWDERVPLNNGGSLVIEQTEALVSVDVNGGHSMFGQGTSQEKAILEVNLEAAKQKVVVDGLKRQEHHGVPDGLHMLELIVETAKEVEDEQNDIEVKDDNLVIAQKVVLDGELGISGCATTDANHVL

SEQ ID NO: 56658 - protein, 190 aa, Zea mays
  Coding DNA Sequence Number=SeqID_13283
MPTAAHASAPVMPKGRRVEPERSQQRGSGREGRDSDGSNEDDEGGLLVISCPTGECATHQGGHQPGRQSHHRGCCDTHVRVLAATEALDKVQAAATALECAVTTALKLAQHLITFSDAEVTKASVIANLHEQAIGVEHLIARFGHPGGLDPLSTNYPNGTISSSSPSSATPLIATSSPTLSTPPPLYGSA

SEQ ID NO: 56659 - protein, 170 aa, Zea mays
  Coding DNA Sequence Number=SeqID_13284
  Subcellular localization annotation: CTP_CleavageSite=40; ConfidenceScore=5.00e-01
MGLGVCGSLCQVWVRPLGRSAVVMRLMVLVMIMVLMARLRHTARKSVIPFLPSRLAERPLRRPVASQSSHLERLHHRLHEEQERRRQEQGQQGSSFSLQQEIESVRSCSPVLPLEAPPAPPLGAPASRVAAGGDPDDGCGDDSSSHGTDFSADHEPEGWVALPITRDAAL

SEQ ID NO: 56660 - protein, 46 aa, Zea mays
  Coding DNA Sequence Number=SeqID_13285
MGLGVAMRLMVLVMTMVLVVNIATTAQEKMKPWKGNFQEFKNTDEF

SEQ ID NO: 56661 - protein, 144 aa, Zea mays
  Coding DNA Sequence Number=SeqID_13286
  Gene Ontology: Mol. function=DNA-directed RNA polymerase activity; Cellular component=DNA-directed RNA polymerase II, core complex; Biological process=transcription
  Homolog annotation: Hit_ID=A2YRD6; Match level="QueryCoverage=42%, HitCoverage=5%, E-value=3e-10, Identity=50%"; Hit description=DNA -directed RNA polymerase
  Subcellular localization annotation: CTP_CleavageSite=38; ConfidenceScore=5.44e-01
MADLVAAAIHQMPRSSSGPLSARSITSQILIKARDVARSSARNSLSERNNLLWVTTVSKNVEGKHVPFGFIDLMLAHFIKDDYGLESLCSTVNCEIFLPRPRDPGTIVASAEHSESVVSVITLLQYTVIACANIYFSDANKNVE

SEQ ID NO: 56662 - protein, 93 aa, Zea mays
  Coding DNA Sequence Number=SeqID_13287
  Subcellular localization annotation: CTP_CleavageSite=68; ConfidenceScore=5.49e-01
MAACVLGLAPTLVSMWPLRCATACSAATEASTTAAHASRRGVGAVSSALSGLRGRHSLSSAQFMDGLRSNLQVERNLTLSPKSPMSRSGNFYF

SEQ ID NO: 56663 - protein, 201 aa, Zea mays
  Coding DNA Sequence Number=SeqID_13288
MHVVGDFLKCWIALLQQRACLCCWFTSSNNIGRVQRGPGTDLSWEELEVLVKGITGESFVPESLILPEGIPALCDDVGLRTVILATLPTLDELGVAGHQQQQQQQQQQQKQRSPNFQGRWKVQGPKASSPSAPKVVPPPPPAAAAETALPGPQAPAGGPAAAAPAPSGAAAAEGVPTAPTAGTASMTAMSSSTPSAAAEEA

SEQ ID NO: 56664 - protein, 112 aa, Zea mays
  Coding DNA Sequence Number=SeqID_13289
MFEMREKLLVDHELEAEEKKRALEERVRQFEAAQAAQAAPGPQAVEAMQKTLEDLQAEQRVGVQRIAAWIGEASTTLVPLGVRPIPVSELPTSISDALLVLDSAADRLRRLD

SEQ ID NO: 56665 - protein, 57 aa, Zea mays
  Coding DNA Sequence Number=SeqID_13290
MESHDLRAEWESRLVGGYETVESDYDYGAGCQHCNHCSGEDEAVEGDFQEFQDYDEF

SEQ ID NO: 56666 - protein, 135 aa, Zea mays
  Coding DNA Sequence Number=SeqID_13291
MTEVDACRRCSKLKKWKRVGMMLGYKYTFDLKEACDPEIPVGIWCPQKAVLNSSHVTSWSVGNMARKWSHHVLEGTLDRLLWLEDAAAGLHHTAEGGADAAIAATESHSAEPLAPAPWELEEVVGEPARSARDAA

SEQ ID NO: 56667 - protein, 215 aa, Zea mays
  Coding DNA Sequence Number=SeqID_13292
MTSPTPINGGDTRFSSDYLSHEGFPSILWEVLCSAGYPTPALYTVQRYEEHRVPRCRVWLTLEAQPLQPGWRSLDSETIGFRADDTTEAAAMNTLTTFCGYHPLEMVMHPLRLFPAEKRDDPMWRNRTLQSDAMAHLTNLAQTTKLTLDSREDFVVDLSSELVEKDLQVEQLSQCIATLEQQVEIWDNTIDILEIQLHDMQEELEEANDHLEMHH

SEQ ID NO: 56668 - protein, 227 aa, Zea mays
  Coding DNA Sequence Number=SeqID_13293
MGKPVPSLLMLLLSRGGVPLDSPTRWQDYNGSSSLISCEKQTIRIEFFYPCKNRAHRLGVQCLTDPDCRRAVTALVPTITGMGDHVSGRVRGKVYCQVLWCRLWCWIWGYLLSSSLLRHEDIFFVSKAGVLVGGECTGQTTAIWFNPRARGVMNSGDRGLASPAKQASIPRSGSFTEARARDRAPAGRWRDAGHAGARAGVLWRAQSASNTWLVASAHVLPSAERPK

SEQ ID NO: 56669 - protein, 139 aa, Zea mays
  Coding DNA Sequence Number=SeqID_13294
MEGEQQHPRRQLHLRRSPTEPRIATRASRSPAVTVEKGPGSRGETTVTRSAITKQKRWRRRGRGTGKGDTPKGILLREGSGPRAPLLIRGSKAGPSEGFNSRLRALGLRAHYWSEVRRLAPQKGSTAASGHSGSAPTTD

SEQ ID NO: 56670 - protein, 107 aa, Zea mays
  Coding DNA Sequence Number=SeqID_13295
MREARTSIKEARANLQKAGHDAAANSGEAIWTDREASGYGGQPLVSSAVKIFSPQSVIRPPKGTNRIADANPGAVVAGGKTPLPFFSSPRSLDVWLANPLALYCSAM

SEQ ID NO: 56671 - protein, 162 aa, Zea mays
  Coding DNA Sequence Number=SeqID_13296
  Gene Ontology: Mol. function=pyruvate dehydrogenase (acetyl -transferring) activity; Cellular component=mitochondrial matrix; Biological process=metabolic process
  Homolog annotation: Hit_ID=A9NWJ6; Match level="QueryCoverage=68%, HitCoverage=29%, E-value=9e-45, Identity=82%"; Hit description =Putative uncharacterized protein
  Pfam annotation: Domain name=Transket_pyr; Domain location=75-162; Score=-29.3; E_value=0.0003; Accession=PF02779.15; Description =Transketolase, pyrimidine binding domain
  Subcellular localization annotation: CTP_CleavageSite=59; ConfidenceScore=5.16e-01
MADGGRVCRRSGGRLAGVFNVGVFSSSPSSHHLRRRTWQTPDKERSEEEMLGQVLRRLRPAVAAEVARGYSAAAKEMTVRDALNSALDEEMSADPSVFLMGEEVGEYQGAYKISKGLLDRYGPDRVLDTPITEAGFTGIGVGAAYHGLRPIIEFMTFNFSMQ

SEQ ID NO: 56672 - protein, 149 aa, Zea mays
  Coding DNA Sequence Number=SeqID_13297
  Gene Ontology: Mol. function=kinase activity; Cellular component =ornithine carbamoyltransferase complex; Biological process=amino acid metabolic process
  Homolog annotation: Hit_ID=Q6QP54; Match level="QueryCoverage=85%, HitCoverage=36%, E-value=3e-26, Identity=54%"; Hit description =Putative kinase
MAPPVDVAGLRPRLGDVEAPPKPRSSLSPVAEVESEPLGGVRALGSGGVEFVVFWDLARVRALGRAERRPSAEARVESEPWGRAERSSSSSGAEPKSEPWVGRSGVRCLSGLSPSPSPGSGGAEFAVFRGLARVRALGRAERSSPSSGA

SEQ ID NO: 56673 - protein, 423 aa, Zea mays
  Coding DNA Sequence Number=SeqID_13298
  Subcellular localization annotation: CTP_CleavageSite=12; ConfidenceScore=5.39e-01
MSSRFLMHRVFLASKPPNGGYPPSFRLVVGGTQLCGSWYLSAIVRLQGFSSYSPVAPLRRWSPKTVTSSPWMRRGKPGCDLGPALSLKDVRHPCWGGERGEPGLYLPRGPAGHLFFQLLVVATILQLCGGDVLQPCRGRRTVAAQLGCNIPPSSSLSWREWERGPAGALWSGPLFGFNSWFVSLERERKREPSGCRVRPETMAAAVEVAGGSPSARRPAGSRCGGCTYPRGRNQSSVCNGTSNASVFVHRGCRGLNMYVIPAQSHESLGSVSLVARGSSCSVKGTPRPLFDEPRPGVAVSAQTKAELARKEDLVGLSLAGSSVSGTDAGTDLPRPRVGLMSLEDSWPRPRGDRPSRLLGPDSRRRPWRRWPGLGDDVGLQSRDPWTTSPSEARSGLAKGVVDAEGAAAPFSRQDPSLQDRIIL

SEQ ID NO: 56674 - protein, 101 aa, Zea mays
  Coding DNA Sequence Number=SeqID_13299
  Gene Ontology: Mol. function=pyruvate dehydrogenase (acetyl -transferring) activity; Cellular component=mitochondrial matrix; Biological process=metabolic process
  Homolog annotation: Hit_ID=A7PHN1; Match level="QueryCoverage=92%, HitCoverage=27%, E-value=4e-41, Identity=90%"; Hit description =Chromosome chr17 scaffold_16, whole genome shotgun sequence
  Pfam annotation: Domain name=Transketolase_C; Domain location=1-94; Score=99.2; E_value=1.3e-26; Accession=PF02780.11; Description =Transketolase, C-terminal domain
AAEILSKEGISAEVINLRSIRPLDRAAINASVRKTNRLVTVEEGFPQHGIGAEICMSVVEESFAYLDAPVERIAGADVPMPYAANLERMAVPQKFYQWLIV

SEQ ID NO: 56675 - protein, 339 aa, Zea mays
  Coding DNA Sequence Number=SeqID_13300
MAARRAGRAVLSSLARSLGFRKPKGQAGSRAKNHHRTLSGVYKDQGEDGFNVPPGPDAGLKNAKRNGRSSNGSRTRNGCPANYSPRRINSAAGQAALLAGAAGDASPSPKQPRQKRYAASFGFAPSLLNDQGFEGWPPEGFNSRLRSRGPYTHYWSERLGGCSRKPSSGQTVDSVNIPARELGPRPYTRATAGSHEGTTRPAEALRKALRPRRSETTPPRPRGLHPAGALARTHRNKMQPRKAGPLAKKCDGSLQASANTPFEARGLLSGTIIRGTLKTPNSQLVTPISIKLQRPDGAQTRAKPRKTANSAPPDPGLGLGLRPGRRRTPLRPTQGSDSG

SEQ ID NO: 56676 - protein, 65 aa, Zea mays
  Coding DNA Sequence Number=SeqID_13301
MMPVGVGVICWLDIIRCPYPNSTNNYCTIRVNGTERDCESGIGTERLRPIDFLERNGSGSEENIP

SEQ ID NO: 56677 - protein, 211 aa, Zea mays
  Coding DNA Sequence Number=SeqID_13302
  Homolog annotation: Hit_ID=A3AE48; Match level="QueryCoverage=33%, HitCoverage=31%, E-value=8e-07, Identity=36%"; Hit description =Putative uncharacterized protein
MDPKGSNPNWDRWNQKENPQGSQSWNKIRNPSWRLKPIIGKAETKEDIGASSAGEGGHTEDLEKDFGFHFPWGKTWKATKCHAGYLMQFPSQEKLDEMINFPELKMKMSGAKISVSHWSSQAKPKSKLHAVDRQGMDDPACEKTGKKARNVGDKMKEELGVEKVGEPLSHGKNIIQKSDFGIVNEDLNPISEDPVNEEDEFHESEDDLLSS

SEQ ID NO: 56678 - protein, 102 aa, Zea mays
  Coding DNA Sequence Number=SeqID_13303
  Subcellular localization annotation: CTP_CleavageSite=92; ConfidenceScore=5.12e-01
MSGAPKDSNSNSSPSGNSRGDSAIIHWTVRCTPDSVRCSKEERPQELASLGNSLRLIRYNSPDMSGVHRTVRCICGATTLRANGHLQQQLMRARARRSQARA

SEQ ID NO: 56679 - protein, 57 aa, Zea mays
  Coding DNA Sequence Number=SeqID_13304
MESHDLRAEWESRLVGGYEIDDSGYDYDAGCQHCNHCSGEDEAVEGDFQEFQDYDEF

SEQ ID NO: 56680 - protein, 385 aa, Zea mays
  Coding DNA Sequence Number=SeqID_13305
  Gene Ontology: Mol. function=transferase activity; Cellular component= membrane; Biological process=metabolic process
  Homolog annotation: Hit_ID=Q5VNX0; Match level="QueryCoverage=98%, HitCoverage=76%, E-value=0.0, Identity=87%"; Hit description=Pectin -glucuronyltransferase-like
  Pfam annotation: Domain name=Exostosin; Domain location=50-345; Score= 312.2; E_value=9.5e-91; Accession=PF03016.6; Description=Exostosin family
MAPEEALRYAKKEIRDAEPVLDDPDLYAPLFKNVSQFKRSYELMERILKVYIYQDGRRPIFHTPPLSGIYASEGWFMKLLKESRRHVVADAGKAHLFYLPYSSQQLRLTLYEAGSHNLRPLAAYLRNFVRGLASKYPFWNRTRGADHFLVACHDWGPYTTTAHRDLRKNAIKALCNADSSEGIFTPGKDVSLPETTIRTPRRPLRYVGGLPVSRRSILAFFAGNVHGRVRPVLLRHWGNGQDDDMRVYSLLPSRVSRRMNYIQHMKNSRFCLCPMGYEVNSPRIVEALYYECVPVIIADNFVLPFSEVLDWSAFSVVIAEKDIPDLKKILKGISLRRYVAMHDSVKRLQRHFLWHARPIKYDLFHMILHSIWLSRVNQVQVQLEG

SEQ ID NO: 56681 - protein, 130 aa, Zea mays
  Coding DNA Sequence Number=SeqID_13306
MDAAAGGLSFAFPLKGREPAIKAKQRATPKRTGRDRERGIPRKGSFPEKEPGSEPPLLIRGSKAGPSEGFDSRLRSRGPYTHYWSEVRRPAPRKGSTAASGYSGSAPTTDQGFEGWPPKGSQPPQTPSEG

SEQ ID NO: 56682 - protein, 385 aa, Zea mays
  Coding DNA Sequence Number=SeqID_13307
  Homolog annotation: Hit_ID=Q6QP51; Match level="QueryCoverage=53%, HitCoverage=83%, E-value=6e-10, Identity=29%"; Hit description =Putative growth-regulating factor 1
MQAACNRIKGAHPFDFDASSMEAQGHTSCNRHAGYYVRETAPPLAPVPRLLDCGTGATTRGDPAHDPTVPTEHIGHGSISRGRRRDGRYSQKWAGSNGGGRRTEAAVKSSASSCPLMGQQENPLPRREDDAPVFRSSNGSCTHNGCPTNHSSRRINSAAGQAAPLAGEAERGYSERNPPPRRKRAPSPLLIRGSKASPSEGSNSRLRALRLHAHYWLAPEGFDSRLRARRARDDPGYVRYITKAPATLPSLGRHRKLRLARPQGSGSTSTLDDGLHLARPQGSDTASASEDGIRLARPRARAQPRRWMTDSASPDPMARTQPRPRKTVSASPDPGLGLDLDLGRQTPPRSTPGFGLSLGLRGIATSPKLGSRPATSPGGPSLPCP

SEQ ID NO: 56683 - protein, 111 aa, Zea mays
  Coding DNA Sequence Number=SeqID_13308
  Subcellular localization annotation: CTP_CleavageSite=17; ConfidenceScore=5.03e-01
MDFASPDPRARTPPQLRKMTVSASPDLGLRLNLDAGRWTPPRPTPGLGHSLGLGRWSPPRPTQGSDSTSEDGLRLARPQGSDSASTPEDGLDLDLGGASASPDLGLGPTTS

SEQ ID NO: 56684 - protein, 359 aa, Zea mays
  Coding DNA Sequence Number=SeqID_13309
MNQRRASVECEHGEGACRSRQLWRQRDSAIEQGDTLPPKYIRAILYVKPKFSPGADTTPPGSAPPFPSPSPSRDARHAVAEPEPNRHRLRAGPRPRAPPSPRPTPPSPSPSPRAAEPISECATVPFPVPEPEHAEPISECATVPFPVPEPERAAVPISECATVPFPVPEPKRHRLRGQAPPSPSSSPSAAEPERRMEKEPLDMVESSVRVIETHVDIIRSLVTDGVVDTSEPESVYTLKTTLFQIGDVCDMLEKCALSIKKYADSKRAKIIQDEALQYAEDDEAADDLEELPSPDLLTQADILEKYFGIDDIDDPKKRLSPVVYHLPLFVGFTDGWKHLVIANDLRVEDVCELVKGPDD

SEQ ID NO: 56685 - protein, 409 aa, Zea mays
  Coding DNA Sequence Number=SeqID_13310
  Subcellular localization annotation: CTP_CleavageSite=38; ConfidenceScore=5.76e-01
MVQCSDVDQTASTGCSPPATSSPGFVLRAYGFCSPGNRASSETTRSSDRLPQLPNLGFPPKRLKNTANPSSPWEALLSFRISISPMFYNVCKTGETFLMNQQEAPTGVGEFLRDFGVPVVLWRLLQEVGYIEAPKYQWSRTVLRGQPWYEVVVRIPERARKPSWPHWMFHAEGMTPWEGAQVAALEVLTTICYQKREEIQATSMRLFPAVALSDPFVYHHQARLLESIPIGQDSVESASARVLMAVLELQLTRGHSHQKWQQLYTGSYATFKMMEMAMNRACTQAQERLEETKVQAEQIIGLEHQVTELQTQHQADQNRIKELEHQLTNAHSKSKVLSQQQEEIRLYVVAVREDLKETISFISHQDQAIKELNRAHPMEFQVAQRLVNHLQQAVHRLNVSFYPTPASAD

SEQ ID NO: 56686 - protein, 832 aa, Zea mays
  Coding DNA Sequence Number=SeqID_13311
MIYCGSIHFYIFSPNRFPRFECMICSSWGILGTALGVSQGRKRFLSLRASPPVDTERRGGPGEVCLGGDFVRWSAFRRGLRQELLSALAKRKIGNKIAQFGSCTYMPRTKKTSAEVVELVPCVCNKWGNWWDYWFYVSGSEIEDLSGLPVAVMCSHCYVAFPQFEVAEDDEDEGAIWCAARMSSGRDLVEEFIGYGVWPLAHGLVLGEVCPRQMPTLGQQLVRSLAFSLDLRGRDPAAFVREVEDRSVRIVGRYTPRTKSLRSWDIRGSNVRLNQVFELNRLPYGGYPRDDAAAAADRRGKKPVVVAEEGPSRDATPATKKRKIVDGDLRSPRGKDVFARAPVVFGANAEGYRGSMAKERSDSPRGRRDIFTSRMARELKIFPYGWNIAAVVSVMVDKDRQDAARKHRAITRVGDPMREVKRARGGAKSAAPVGSKPPPAAKPAIPGPSKSSAGSRAATSGASKPPLTEPAKERRPPSPVRTDKAAAGGSDAGQLAIVPSPVAATSPAAAVGAKSTSQDPWSKFCASGEILLTSAARDVAAIVSQQLKHATAFADHVASGALSSEFAAERQRLKGRIERLRAQHVDVVRDKSAAEKKSRRLVERLAAAEAEKEDLRRRLAEERRDANKAYAEVHSAQAEAKLARAEASLARQRTDEMETRLGSLRDRLDKTEASTRVEVEWTHTQLVDEELEVLPTIVTGLMSFASLVTCEGAVNTLSREGCGHFEAFDQSDEGFEREIFQVEDPVMKRSAGALFDRMWGPHGQEIVRERSDRAMDQMAHDEEVEDLGDLDSTLAKASGVELVPPSDAGEGPSMTLTPTGAGEDPALATALT

SEQ ID NO: 56687 - protein, 294 aa, Zea mays
  Coding DNA Sequence Number=SeqID_13312
  Gene Ontology: Mol. function=structural constituent of ribosome; Cellular component=ribonucleoprotein complex; Biological process =translation
  Homolog annotation: Hit_ID=O22424; Match level="QueryCoverage=29%, HitCoverage=33%, E-value=3e-31, Identity=77%"; Hit description=40S ribosomal protein S4
  Pfam annotation: Domain name=KOW; Domain location=248-282; Score =33.5; E_value=7.6e-07; Accession=PF00467.20; Description=KOW motif
  Pfam annotation: Domain name=Ribosomal_S4e; Domain location=174-241; Score=71.5; E_value=2.8e-18; Accession=PF00900.11; Description =Ribosomal family S4e
  Pfam module annotation: Pfam domain module=KOW::Ribosomal_S4e; Domain location=248-282::174-241
MRATVQRRPSFSPRRIWRGIQEIIDEEMEEDVIVKAVDCSNQSEFNIPLLNLRDHIAFDPKETNRFVATDCLDGKVTIWSLDSPEPEYHLPETDFKGIMFLEFFTRYGWQYLIIADEDHKAHVWDFRLRKFVSEKRKLLSRETFVFSRPNVPLLLTPSSKGTCRFWDAKKFSQFNTSSLIVLVEHDNLGSCFKLCKVRSIQFGQKGIPYLNTYDGRTIRYPDPLIKANDTIKIDLETNKIMDFIKFDVGNVVMVTGGRNTGRVGVIKNREKHKGSFETIMYFSLDLEYTYVCVV

SEQ ID NO: 56688 - protein, 246 aa, Zea mays
  Coding DNA Sequence Number=SeqID_13313
  Gene Ontology: Mol. function=protein serine/threonine kinase activity; Biological process=protein amino acid phosphorylation
MGKCYARNVHGVDADGGGMEATTITVSAAGGPEDAASVGGGQGGGGRRSARPSPAGKPRGGRAGATPARLSTAGSPWTGSPLGLPDGIAPSPATSASTPRRSFRRPFAPPSPAKHIKASLARRLDHRSPPSALQVPRPPVEVPIPEQGAGDAGEGGGPRPFRPHLPRAPLQGRHERPGHGCQGHLHRVISFFPMVLALAFPRRMTTTISIEDVRKEVKILKALSGHSNLAISIKIKIMFYDNGNIN

SEQ ID NO: 56689 - protein, 210 aa, Zea mays
  Coding DNA Sequence Number=SeqID_13314
  Gene Ontology: Mol. function=protein serine/threonine kinase activity; Biological process=protein amino acid phosphorylation
  Homolog annotation: Hit_ID=A9T3G6; Match level="QueryCoverage=31%, HitCoverage=8%, E-value=4e-16, Identity=67%"; Hit description=Crk2 CDPK-related kinase
  Pfam annotation: Domain name=WD40; Domain location=102-140; Score =14.4; E_value=0.43; Accession=PF00400.23; Description=WD domain, G -beta repeat
  Pfam annotation: Domain name=WD40; Domain location=58-97; Score=19.8; E_value=0.01; Accession=PF00400.23; Description=WD domain, G-beta repeat
  Pfam module annotation: Pfam domain module=WD40::WD40; Domain location=102-140::58-97
MELCEGGELLDRILSKYYIFLRNHFANTTTRGGRYNEGDAKIIVEQILKVVAFCHLQGVVHRDLKPEGDQGVNATQWLHNEPVLVTVSGDGSVGMWDVTLGQPCVRHIVAHTRCANVVVVAPNDKYLCTGGSDQKVVVAPNDKYLCTGGSDQKVVSCLFVLLVSYVAYVMSYWKRFYIITEVGVHILIGVFHILCKEMIDMLPEIIELFR

SEQ ID NO: 56690 - protein, 304 aa, Zea mays
  Coding DNA Sequence Number=SeqID_13315
MTKVVVGVLLDEGGRLSSPKCRQTRLGTTISSKPNPISPWSSHELDSSRCREEILHKSYGKIPRLGALQAQELGQINMATCSTRPGNARAHRGAWPARTALRRINPAPTPAPAAIKPTPTSTVHPHTLPTLPEHEFTGVCPENGMPAAARAPPIVDRPRQPSTPSDPSASFPGAQRSSPSPQTEHHLTGDARLTSPDFNQPSSHIDRATREAPRAIQLSYTAANRPQHTPPMNPTASARGQPYSGHHRRQFAPQRDRQDLPDLAQPSTGPLPPLAGRELGLREIKAKGICKVSDSVEQFRRGTV

SEQ ID NO: 56691 - protein, 159 aa, Zea mays
  Coding DNA Sequence Number=SeqID_13316
  Subcellular localization annotation: CTP_CleavageSite=55; ConfidenceScore=5.24e-01
MAVGVSEALYAKATQLVLLANKTPQPNSCMSRGRGVDSSHRLGWRSLDSESFGFRAEDTVESTALHVLTTFCGFHPLELTTHPIGLFPTEKEDDPMWKDRVEHAKDMWALYPGHTAHLTALRGEEMSQLMGLVESTKITLDNREDLVVYLSTELVEKDL

SEQ ID NO: 56692 - protein, 199 aa, Zea mays
  Coding DNA Sequence Number=SeqID_13317
MSQRMRKTTRKSIGPIDVPRHQLAPRHEESSSGSNDPIGDLEAQVEQLRTELCHRNRDQDAKAHARVAELSAAIDNLQMPSRTRAHDGAGTSRGREDTPNPPPVPPTLAEAITALVNATADNTRFLREMAGNQFQQQGGRAYPQGPRETSYLDFSETRPPLFVKAEDPLEADEWVRVIKQKFGLIHYTIPKSRCSRLNS

SEQ ID NO: 56693 - protein, 142 aa, Zea mays
  Coding DNA Sequence Number=SeqID_13318
  Gene Ontology: Mol. function=aspartic-type endopeptidase activity; Cellular component=chromatin; Biological process=chromatin assembly or disassembly
  Homolog annotation: Hit_ID=Q5TKF0; Match level="QueryCoverage=60%, HitCoverage=6%, E-value=7e-09, Identity=38%"; Hit description =Putative uncharacterized protein OSJNBa0030I14.16
  Pfam annotation: Domain name=RVP_2; Domain location=8-110; Score= -11.4; E_value=8.1e-06; Accession=PF08284.2; Description=Retroviral aspartyl protease
MATYLDLSYSRAVSTALAVEAKNTGSRKSKGFGGDRSNQGPEKRPRGQIFTKEVAFHVPVTLAERDFPTNMIVLKGQDIDVILGMNWLARHKAILNTDLRNIRLSYGHEEVLLSIPVAIPAKPFGRVNEAIIPKNLRYSSSV

SEQ ID NO: 56694 - protein, 103 aa, Zea mays
  Coding DNA Sequence Number=SeqID_13319
MGLTSGPHARVKQGAGGREIADETIRKNEKESRDALEEAKRAEEAVEQARLIAKLSPPPEPYDPETNPSLKEALDIIKIANEAIDEAVDKLLNEAADKILKED

SEQ ID NO: 56695 - protein, 91 aa, Zea mays
  Coding DNA Sequence Number=SeqID_13320
MKLSKSSDPAELHRKPKITLAELRSPAPARGPSSPIGRNPRHRRAPPPAHVDRPTPTIPDGDTHIAVTLRTSPTPSTTSPEQSRRRCSNPI

SEQ ID NO: 56696 - protein, 91 aa, Zea mays
  Coding DNA Sequence Number=SeqID_13321
MGSRHSACSAEAECRGSFVLLLLVTLLRGEYFLSEEVAFGAIYAQVKKKASRQISRSSRTSMSSRIRLATSPSQLPVVGLFTLATFRFWIL

SEQ ID NO: 56697 - protein, 97 aa, Zea mays
  Coding DNA Sequence Number=SeqID_13322
MTKDEGLNIESFVKKIQPTIMDGMMTSTMPRNDHVMAKDEGYAGNQLPGFPDEACDCPSTFSNVQKTMRSTCRHMSEDSCDSEPRPQQCPMRSLLML

SEQ ID NO: 56698 - protein, 66 aa, Zea mays
  Coding DNA Sequence Number=SeqID_13323
MPSMGYRHSACSAEAECRGSDQWGVMILGQNGNHGSWVKCATSAEGNETDISAVLTVKSSLGILFD

SEQ ID NO: 56699 - protein, 184 aa, Zea mays
  Coding DNA Sequence Number=SeqID_13324
MALLRHTAQKSVIPFLPSRLAERPLRRLVTGSGVCEELLPYAPAGGAPAPPLSAPTAGVPIGGDPNDEGGDSSSSFSTHLSAEHEPEGWVARPITRDIARGCHFHDVLDTLLRQALDRRTWSIEYRCAVFQQSRRVYSDRWEATCLVHRPENSLRGAEMSDNRRRGGRRAQQEQATPQDEAPQQ

SEQ ID NO: 56700 - protein, 125 aa, Zea mays
  Coding DNA Sequence Number=SeqID_13325
MAWCLTGGAVDKIGGKSGVWELRCTRAASWGWNEGLIQRRSEGSTQFKGIGYASRQFWSKTITTAVGYFTGEFVVAPAGAKAQRCAQAHPIAEIFLPQVIIRVSQGMNHNTSGDRGAEITGGEIH

SEQ ID NO: 56701 - protein, 264 aa, Zea mays
  Coding DNA Sequence Number=SeqID_13326
MTSHGSSDDGNALSHTDGLAREGFPRILWEVLQGAGYMTPPQYAVQQFEKHRVPRCRVRMTLEPHPLQPGWRSLDSESFEYRAEDTIEAIALHGLTTFYGFHPLELSTHPIGLFPAEREDDPMWKDRVEHAKDIWAIYPRQMAHLTVRCMNALYRLQVMRGEAMSHLMALLEATKITLDNREELVVDLSTEMVEKDLQVEQLSNEIQELEELVGTRENTIEEIQDMEANEDVDIEGGEEPASSLDTAGSGRPPSPESSVDSFAH

SEQ ID NO: 56702 - protein, 96 aa, Zea mays
  Coding DNA Sequence Number=SeqID_13327
MGKPVPSLLMLLLGQVTALVPTITGMGDHVSGRVRGYVHCQVHSGFNNIMLKKKTKLMSNLGFFGHAGLLVVYAYHSRFRFLLRISIVDWYFLYIF

SEQ ID NO: 56703 - protein, 226 aa, Zea mays
  Coding DNA Sequence Number=SeqID_13328
MPLAAPTFQCSDYCTKLLVVYSVMEGYVMRCGGAGTEARPAGASATPTLDEASKRGPRDLLMAAKGMAAGAGYSDSNGKNVMPLAAPTFQCSDYYTELFVVYSATEGYAMRCGGAGTEARPAGASATPTFGQSEQAWPGDLLMAAKGMAAGAGYIDSSGKNAMPLATPTFQCSDYCTELLVVYSATEGYVMSKYGNEGTDNRSKWHAYIQTERASTTRQPAKKIVA

SEQ ID NO: 56704 - protein, 320 aa, Zea mays
  Coding DNA Sequence Number=SeqID_13329
  Gene Ontology: Mol. function=heat shock protein binding; Cellular component=cytoplasm; Biological process=protein folding
  Homolog annotation: Hit_ID=Q5VRK6; Match level="QueryCoverage=93%, HitCoverage=74%, E-value=1e-127, Identity=70%"; Hit description =Putative GFA2
  Pfam annotation: Domain name=DnaJ; Domain location=38-72; Score=17.5; E_value=8.1e-05; Accession=PF00226.22; Description=DnaJ domain
  Pfam annotation: Domain name=DnaJ_C; Domain location=237-320; Score =41.8; E_value=7.5e-10; Accession=PF01556.9; Description=DnaJ C terminal region
  Pfam annotation: Domain name=DnaJ_CXXCXGXG; Domain location=144-224; Score=69.1; E_value=1.4e-17; Accession=PF00684.10; Description=DnaJ central domain (4 repeats)
  Pfam module annotation: Pfam domain module=DnaJ::DnaJ_C::DnaJ _CXXCXGXG; Domain location=38-72::237-320::144-224
MRLHAGARLALLLARRSLSSSPRIPRVHTGTRPVAARDYYDVLGVSKSASQAEIKKAYYGTLKDEQKRSLYDQVGPDQYEKTASGGGGTGFEGGFGNPFEDIFGGGGGGGGMNDFFRNIFGDRDFRGRDVKVALELSFMEAVQGCSKTVTFQTSVTCEICGGAGVPPGTTPETCLSCRGSGFIFMQTGPFRMQSTCTKCGGSGKTVKEFCKACRGNKVVPGRKSVRLDILPGLDNEDTIKVVRSGGEDPDGRPGDLYVTLEVREDPVFRREKGDIHVDAVLNVTQAILGGTVQVPTLSGDVVLKVKPGTQPGQKVVLRGK

SEQ ID NO: 56705 - protein, 150 aa, Zea mays
  Coding DNA Sequence Number=SeqID_13330
MWDEKRAVFLLNDDFKKCMMKGIHPHHLYNHSRLYGQSLNLNSYGPNPRVMKAGEHQEDKEGECFVRFGHGGGLTPSGITVMTLLFLYQMEGSLVIRTSYCSEVEGFPHLLWSCALRMEIRKKSEYIWKEYHENGTEKCSMAVYLGENRN

SEQ ID NO: 56706 - protein, 68 aa, Zea mays
  Coding DNA Sequence Number=SeqID_13331
MTTKEVFMVTSTTLVKLVCPPYSLAMWSSTVVFVGKLTGPKINLIMQHKTKNPDLLPDSIHDIKTEHI

SEQ ID NO: 56707 - protein, 362 aa, Zea mays
  Coding DNA Sequence Number=SeqID_13332
MAVAVGQKQRSRCQPSSRHLVGQRENPLSRREDDAPVLRSSNGPRTRNGCPANHPPRRINSAAGQATPLAGEGPGKGDTPKRILLREGNRPRASLLIRGSKAGSSEGFNSRLRALGIRTHYWSERLGGCSRKPGSGQTVDSVNIPARELGTRSCTRAMASSHEGTTRPAETLQNALRPRRSQTTPPRPRGLHPVGALARTHRNKTQPRKAGPLAKKCDKSLQASINTPFEARGLLSGTIIRGTLKAPKSQLPRARAADPGGSTSRPRTPSSNGHTFGSPEAQSSPRSNLGQITTPTNQIAGAFNAKGSDSGSAPEDDELRFARPQGSDSGSAPEDDKLRFTRPQGSDSGSIPEDDELRFARP

SEQ ID NO: 56708 - protein, 149 aa, Zea mays
  Coding DNA Sequence Number=SeqID_13333
METVESAEATLSTLEIIHVAAVETTTVQLEISEPGSSRTEQQPKLQSPSAMVGLSKIATATAATPRKGRRMTSVLDAVFKTLKTTTPAPTTVSEEKIEELKTPAPTKISEGKVDELKMTSDKATLPDSAKVGPTETRPFEQECKSLAEK

SEQ ID NO: 56709 - protein, 89 aa, Zea mays
  Coding DNA Sequence Number=SeqID_13334
  Homolog annotation: Hit_ID=Q7XBD4; Match level="QueryCoverage=100%, HitCoverage=11%, E-value=4e-08, Identity=34%"; Hit description =Cinful1 polyprotein
MAKAEAAFSMDVMKDPSAEATLMGGKFYNDVLIKKKSAAKLSPPLEPFDPLAEPETKEALEIINIAESVVDKVVNKLLNEVAEKVLKEE

SEQ ID NO: 56710 - protein, 78 aa, Zea mays
  Coding DNA Sequence Number=SeqID_13335
MSCRVDVARLYQVGSSYESAVILLGFLEDQLVGILALLDYSVGRVFEDVVDKYDYKFPHPPQDEDFFYKQDATCISNN

SEQ ID NO: 56711 - protein, 47 aa, Zea mays
  Coding DNA Sequence Number=SeqID_13336
MESHDLRAEWESRLVGGYEIDGSGYGYGAGEWYSFRLERIHWVNNLG

SEQ ID NO: 56712 - protein, 74 aa, Zea mays
  Coding DNA Sequence Number=SeqID_13337
MAWDDPWKPRSFACHRVAPKSRACAQPPRQHGCDTWQRPQRSPLPDTQIGLDPDPYPDLDLYLYRYGLSNARQQ

SEQ ID NO: 56713 - protein, 66 aa, Zea mays
  Coding DNA Sequence Number=SeqID_13338
MGFDRISEVHGQLPESIAPAQDSPSTRGDFRCCGGAQFVLTFLFEAGIGDGHDREVPPARDGNIFL

SEQ ID NO: 56714 - protein, 147 aa, Zea mays
  Coding DNA Sequence Number=SeqID_13339
MDSWVSSVGTVTPWQIRQEQSSFGGRTPMDTRWRRSDSETTDIWLPAKGNWLLGSIGGITAVDELEAFRLGAISTPPANRAGAEMQKDREDLEAGKQELGHGKQRRLKAQYIWGLLGSDTVSKKRPVITRRLLLKHRRAMSSPGGYF

SEQ ID NO: 56715 - protein, 151 aa, Zea mays
  Coding DNA Sequence Number=SeqID_13340
MGKSNKRKREPTPPSEDFGDSEYSEEEFSSESEGSPAPVSPPALSNYLDNSQGIAAEVWTYIRAVERSGLEGSDESEYSSDEEDSSDSSEEGGGGDGGNDDDDEGGDGDDGDDGGDGGSRGGNGGSKGGNGGSSRGSNGGGSSKGSNKASG

SEQ ID NO: 56716 - protein, 55 aa, Zea mays
  Coding DNA Sequence Number=SeqID_13341
MAASRWLWPFPIHICWLEGLVEDVVAAVEGSCSRQIKGRGRPGVPEIDWGHQVIV

SEQ ID NO: 56717 - protein, 153 aa, Zea mays
  Coding DNA Sequence Number=SeqID_13342
  Gene Ontology: Mol. function=structural constituent of ribosome; Cellular component=intracellular; Biological process=translation
  Homolog annotation: Hit_ID=A3AVJ9; Match level="QueryCoverage=32%, HitCoverage=16%, E-value=3e-18, Identity=90%"; Hit description =Putative uncharacterized protein
  Pfam annotation: Domain name=Ribosomal_L14e; Domain location=87-143; Score=43.3; E_value=8.8e-10; Accession=PF01929.8; Description =Ribosomal protein L14
MKGLEKVLYGHMVKVCNDQYSLTNKYTDGWLSSVLGTTILTLVYPAAFTWFTTRFPFPRLCAAVQPFLPSMSVFATALCVGSPLTINIKFTDIKIEIKRVPKKTTLIKAMEEADVKTKWENSSWGKKLIVQKRRASLTQRALHGCNDVLYKTL

SEQ ID NO: 56718 - protein, 75 aa, Zea mays
  Coding DNA Sequence Number=SeqID_13343
MTTAVLSPLRKQGDVSKGGPGPSCERVARENGLTSRLTLSRANACNPYCKRIPLAQDNTSRVFPLVFHLAPTHLG

SEQ ID NO: 56719 - protein, 128 aa, Zea mays
  Coding DNA Sequence Number=SeqID_13344
  Homolog annotation: Hit_ID=Q8W0Y1; Match level="QueryCoverage=25%, HitCoverage=4%, E-value=1e-07, Identity=78%"; Hit description =Putative transposase
MAQHVHGLDYDLMTEDIDRDILMRVGGGKRHGRNRKQEKKIGKTCVGRFSPTPAHPALGQPSYAAAPALRADMWVIPSTANCARSFNYGRRQHGLAWHPHYHGRFPALPDGRAHSPDASSTRALALSH

SEQ ID NO: 56720 - protein, 58 aa, Zea mays
  Coding DNA Sequence Number=SeqID_13345
MGLGVCGSLCQGGDEDDGFFIMIMVMVAFGAIYAQVKKKENGVEADLQEFQDFDEFED

SEQ ID NO: 56721 - protein, 270 aa, Zea mays
  Coding DNA Sequence Number=SeqID_13346
MEALNVSWNELLALVLNVEEVRGPTERAQTLAPFTLRGHTRSSTALIPSLLTPIQTLAIAAIAEYQASGERLIGLHVDPHRPPCSVRHPPHGGEGALRRRSRDGSTRLLGYQLAIRIFPRSLPHSSSLKATTTVEEAAGPHGPSYVSSSPLPDDADSHGLWLRDSSYWNPSPPAQPAPAPPPSDPAVAGDQPQPHHKAGDKEADVATAETDGYKAGSSSSHLSRLLREVLDLGENLLSGVLHPTLFGNLTSLLKSYVHNRASILKSCNIG

SEQ ID NO: 56722 - protein, 328 aa, Zea mays
  Coding DNA Sequence Number=SeqID_13347
MQPGRTPPSVVTQDGRAEPELYLRAGSWVSLSLSVRGRERSLALREGRDFDNAGLVDGGRRQLQRVGFAGLAPGAPSCRKGGYRAVRTGGPPKTSRAARAAFVFWGGPAFAPIRRLRAEVGAPLVREDSSGDLRRADGPCRRCRGGGGSRSPRRRRDHRHHPRFGPPALCTCPRPSSVGVGEGRVAAAFALRPSLLLERATESLGSVSLVARGFSCSVKGTPRPPFDEPRPGVAVSAQTEAELARKEDPVSRSQAGSSVSGTDAGIDLPRPRAGLMSLEDSWPRPRETLGPASPSEARSGLAEGVADAEGAVAPFSHQDPSLQDRIIL

SEQ ID NO: 56723 - protein, 341 aa, Zea mays
  Coding DNA Sequence Number=SeqID_13348
MAERYQLPRSCVPPMTRRKDGGYPPSGGLEGGKTRCIREREDMVAFQGGRPPFKGGSPYLRPQSSWAESPPTHPKDLPYGAGAGSHMSCKSAQSRRSQTVVRGAYNRPAVTSDPPLLPRPAGERAGSHAGGMQPRQVGTLLRLPTRPARRPRPTRHATGGPNASCMQLHRHLRHHRASSIAEPIPRLGATQRTTQQRQPGTTVNTAKNGPAVMAVAGGQEPRKGGASGRRRERRFAFTIMITSKKGPGKGDTPKRILPREGTRLRASLLIRGSKAGPSEGFNSRLRVRGLHTHYWSEVRRPAPQKGSTAASGYSGSVPTTDQGFEGWPPKGSQPPQTQSEG

SEQ ID NO: 56724 - protein, 147 aa, Zea mays
  Coding DNA Sequence Number=SeqID_13349
  Subcellular localization annotation: CTP_CleavageSite=35; ConfidenceScore=5.49e-01
MARARAYKTLPDLDCTLPRTLKPRRSLARRRLPVRSVSAAAQSLCHRRPASGAFPNSVQLSEKTVHTSVKLPEQGIGVCFAGEASSRSLELSTPTGVRGPDCNLADGEYILVPEQGAAQEVAPDPAPEPAPEDLPATALEGKPRFYA

SEQ ID NO: 56725 - protein, 440 aa, Zea mays
  Coding DNA Sequence Number=SeqID_13350
  Subcellular localization annotation: CTP_CleavageSite=51; ConfidenceScore=5.76e-01
MSSCSLMHRVFPPSKPPDGGFPSSFRFVVGGTQLRGSWYLSTIVRLQGFSSCSPVAPLRRRSPKTVTTSPWVGRSKPGCDLGPTLSFKDVHHPCWGGGRAEPELYLRVGSWVSLSLSVRGRERSLALREGGLRQCGAGRRRASSASACWVHRLGSRCPLLPEGGCRTVCTGGLPKMSRAARATFVFWGGPAFAPVWRLRAEVGAPLVREDLSGDLPEDWRSMSSVPRWRRLEKSPLPTGSPPPSALRASGSLYLSSPLERRRGRGQDCSSTRPKAYAAAVWPPGAGVVVAAARVGGGEPPVSLLLLRRPPPIEWGCSYLRRWNRSFVCNGTLNASVFVHCGCRGLNIGTDAGIDQPRPRVGLTSLEDSWPRPRGDRPSRLLGPDSRRRPWRRRPGLGDDAVLQGGDPRTASPSEARSDLAEGVVDAEGAAAPFQRQDPSL

SEQ ID NO: 56726 - protein, 342 aa, Zea mays
  Coding DNA Sequence Number=SeqID_13351
  Homolog annotation: Hit_ID=Q6QP51; Match level="QueryCoverage=20%, HitCoverage=45%, E-value=7e-18, Identity=54%"; Hit description =Putative growth-regulating factor 1
MQAVCNCTKGMNLFNFDVSSMEAQAHTSCGRKQHSNRLQAHVPSWDSERALSHGMKTTRPCSVPQTARACTTAAPRTTRPVALTPRQGRRHLWQAKRATLHLRHDDRVKKGTEKGDTPKGILLREGSGPRALLLIRATSGHPGSAPTTDQGFEGWPPEGFDSRLRTCRARDDSGYVRYIAKARAMLPRSDRSHFAPPLADLTGKQRRLLLRLLCRLSRRHRKLLLARPQGSDSTSTSNDGLRLAQPQGSDSTSTSDDGLRLARPQGSDSTSTSDDGLRLARPQGSNSASTSEEPPPRLTLGSDRPRRRGPPTEARRRQQGPDSSDSYAPTGLKRSSDGRDIT

SEQ ID NO: 56727 - protein, 73 aa, Zea mays
  Coding DNA Sequence Number=SeqID_13352
MGTERADSRPHRRRSCSAPNWNPVCGPKASPESLVRFGGDSGAGGRPVGAQFVSAVTGSAGRRGLTGAVPDSM

SEQ ID NO: 56728 - protein, 139 aa, Zea mays
  Coding DNA Sequence Number=SeqID_13353
MEDLSVQGDLTYAEYPIRILDTLTRVTRNKVIGAPRSQGVDGFPLLSGTNWSAFHSREVHDAASANKEAGKGAGGLGAVLVNGDPGIARRRVPPPQRRGLGVRAGRIAVRINGAAVGARPPPSPGLWVEDGMRVVRSGM

SEQ ID NO: 56729 - protein, 111 aa, Zea mays
  Coding DNA Sequence Number=SeqID_13354
MPPPFHGGALAEVRRSAPLVTHITCLHALYDAEVLAKQVTARHEIPSSHGALAWEDEEPRCPRLILTENRLQSIQEDLTRRWWLTARACDPVRAHTVERMTERPYVSAPDE

SEQ ID NO: 56730 - protein, 118 aa, Zea mays
  Coding DNA Sequence Number=SeqID_13355
MEQRPGLERLMETTHLELDGKLFVNTQQAPTWRANCRRFDPGGCKEKAQVYNGGCSNVLMCLAEGSQSPMYMPTWLSERFWRPVHVMSWPSEERLSPVGAQLSELSDPCRRLLASVGG

SEQ ID NO: 56731 - protein, 288 aa, Zea mays
  Coding DNA Sequence Number=SeqID_13356
  Gene Ontology: Mol. function=carboxyl- or carbamoyltransferase activity; Cellular component=ornithine carbamoyltransferase complex; Biological process=amino acid metabolic process
  Homolog annotation: Hit_ID=Q8SA97; Match level="QueryCoverage=55%, HitCoverage=21%, E-value=2e-20, Identity=43%"; Hit description =Ornithine carbamoyltransferase
MAPPVDVAGLRPRLGDVEAPPKLRSSLSSVAEVESEPLGRARRRPSAEARAESEPWGRAERSSSSSGAEPKSEPWVGLSPSPSPGSGGAEFAVFRDLARVRALGRAERSSPSSGAEPKSEPWVGRSGVRRLPGLSPSPSPGSGGAEFAVFRDLARVRALGRAKRSFLWCLRSGLTACQSHSVKWHRSRSGAGGAVLLSGRSVERRSDGGHFGSADWGARVRIKVSGHLCIKCSCDLVGRCGDLVRVASWRRQGLGRAGNIFAAGEGPRARRKSFGVGCPCPRLGSGEA

SEQ ID NO: 56732 - protein, 223 aa, Zea mays
  Coding DNA Sequence Number=SeqID_13357
  Gene Ontology: Mol. function=oxidoreductase activity; Cellular component=integral to membrane; Biological process=electron transport
  Homolog annotation: Hit_ID=A2X547; Match level="QueryCoverage=39%, HitCoverage=16%, E-value=3e-28, Identity=68%"; Hit description =Putative uncharacterized protein
MSLRFGSFPIVVGSSVEVAEVLLKTQDLANVDWPRMACGKHTVYNYSGMLWSHYGPYWRQLRKSWVTELLSARQLRLTERVRAEEERDRSSIAPWAGLACLTVDRAKEETVTPVFHSPQIGGGVDHTEFLDRVGEATPVFHREEIGHGGEAEEDTTTREWIAPICTLRRGSAPRHGRGSRRWVEKWITPMESRWVGEVDHADLRAKEEICAAPRHVDDAVVEA

SEQ ID NO: 56733 - protein, 157 aa, Zea mays
  Coding DNA Sequence Number=SeqID_13358
MTLGTSVTWPRLELRSRGTLGHFRDQQERFCNGIPPEGGIEPSDPIEWVRVRQITYRSRPRLPRDAILPRLSPASDGNNSPERIHASPEGLHRRWAHPRLARSPARAGFVEKQPWPNRFTNRSYRRRIQCEDRLTPYPDTRVSVGKVEVTAVTSPSH

SEQ ID NO: 56734 - protein, 132 aa, Zea mays
  Coding DNA Sequence Number=SeqID_13359
  Subcellular localization annotation: CTP_CleavageSite=74; ConfidenceScore=5.79e-01
MTKDLLRTKAPNSRPNSAQPGRAPAPPDRRTPPVSGNALSRAPSLSRSLPSGANLSVPSYFGPPKTFSPLFSPLCPRIRGLFPAIEFAVALSPSLPNSGDPGATLAHACPNFGDLTARRGAALPAAVRPSPV

SEQ ID NO: 56735 - protein, 123 aa, Zea mays
  Coding DNA Sequence Number=SeqID_13360
MTSGQTLLRQGPRPRPRSRGEDMQKAVELEPSRAESSPTRSKVLHLRHGGWVPRVMQAGPGQKEPKSPRAVRATAQQLQAFLYYRPDQRGKGRTDMQAACNRTKGAHPFNFDASSMEAQAHTS

SEQ ID NO: 56736 - protein, 382 aa, Zea mays
  Coding DNA Sequence Number=SeqID_13361
  Gene Ontology: Mol. function=metal ion binding; Biological process =metal ion transport
  Homolog annotation: Hit_ID=A2X595; Match level="QueryCoverage=45%, HitCoverage=45%, E-value=7e-56, Identity=67%"; Hit description =Putative uncharacterized protein
  Pfam annotation: Domain name=HMA; Domain location=174-236; Score =42.8; E_value=1.2e-09; Accession=PF00403.17; Description=Heavy-metal- associated domain
  Pfam annotation: Domain name=HMA; Domain location=64-128; Score=44.1; E_value=4.8e-10; Accession=PF00403.17; Description=Heavy-metal -associated domain
  Pfam module annotation: Pfam domain module=HMA::HMA; Domain location =174-236::64-128
MGEEAAKKEEVEKPKEAAAAEEKKKDDKPKEVGGGGGGEKPKDGEEEEKKKEDAPPPPPPEEVEMRVYMHCEGCARKVKKILRRFDGVEDVIADSKAHKVLVKGKKAAADPMKVVERVQKKTGRKVELLSPMPPPPEVEEKKEDEAEKKKDDEKKAEPEPPKPEEKKEPPVIAVVLKVHMHCEACAEGIKKRILKMKGVQSVEPDLKASEVTVKGVFEESKLAEYVYKRTGKHAAVVKSEPAPAPEGGGGDKAAKEEEENKKDAGGAGGEEKKDGKEEEEKKDGGEKNEEKKDGGDGDGDKKDEAGDKDKDPAASLYMHYPRFPFAGGYYQPPAYPPPPGYPYAYQPAYPPPFYAPPHHLHQQQPMAPQIFSDENPNACSVM

SEQ ID NO: 56737 - protein, 64 aa, Zea mays
  Coding DNA Sequence Number=SeqID_13362
LVVYAHLFLPHRDPGRGDFEDLRHRQCLLKDDGKGVGESLDEVVCQVCSLFFLAFTHEVYLLTI

SEQ ID NO: 56738 - protein, 752 aa, Zea mays
  Coding DNA Sequence Number=SeqID_13363
  Homolog annotation: Hit_ID=Q6JAD6; Match level="QueryCoverage=62%, HitCoverage=82%, E-value=1e-102, Identity=55%"; Hit description =Putative uncharacterized protein
MEKSKPIKTPMPTNGHLDLDEGDPLAGDHPASTVSGRAPATSDLLRSSLLPLVRMPRTKNVSAPGGADDEDPRRPFRQVKGKTVYLEQQEGRKKRRTDRAARAAAAAAAAAQAELGDQPETPLDQIVYHVRRLASQPRSSTHTTASTPPPTLPAPVTPVAPSTTTAIPATSTTPASTAPPPAPASAPPIPPPRFRERDETERDPVAVDLFSTRIQESFFRAQMYVEEWVRVFYATVWIDPDHHWMRFRFEREDVTITASWIRQLFGFPESSTRLHSLCYGTSDPPRRPHDGVAPGTAHVAALFRPPFSDGSRRSPADFTTAAKFLFELIRRTLLPRMRYREATTHIQLWLLGALVSHSEFDVVDFLICEIEDTGTLEASRLVFGSYRPAPEAPVPASAPVFDSQAEDVALHQFEAQDAAVHDDDDDDDDDFGVPPPPPPPMPPRSHDHEAGSSSATTAAPPAIDPAIASILHSLTQQQAHLAAEQTRLSERMLSMFQTIQDRQDSLLQQYSRIELRAGHSWLLCYSILVSRFPRFSLHHLLRFRFLLCQRFSQDPLFLLLVLLPLLSHPDFGAPRPGREQSPASSMRLILWYPFCETARVSSHTFIAQQVVGNNVHELAKGGSSREVGCTSLPTSHVTHLPRDHDFPYTSTEEARQGIPCLTAIAAKSTKDLPTLTTPLLPLPLSGGAKSEPGRAARISAGEVGDRIADVVGQTCDFRADSVPGRALSAGTKRLTTWVPLRRSESGGEGFRR

SEQ ID NO: 56739 - protein, 91 aa, Zea mays
  Coding DNA Sequence Number=SeqID_13364
  Subcellular localization annotation: CTP_CleavageSite=32; ConfidenceScore=5.31e-01
MAAISCFSLRSRISLSDLSSLPWRWMPVLVTRASTDGTRVIRLREVNLTKRARMPVTEEFAREEDWLTAWGPHVSAQNWVDWRVRFVEEVG

SEQ ID NO: 56740 - protein, 113 aa, Zea mays
  Coding DNA Sequence Number=SeqID_13365
MPHSWGSPGVLGCVLIDSSACGDGNRSRIRAQGVMGEWNSHRAARSRERTRNPESLTEVIACHEALTRRGRVLGQQTASRRGGYEADHYVNGNMENHPGKQCYHKGLWTPLAD

SEQ ID NO: 56741 - protein, 248 aa, Zea mays
  Coding DNA Sequence Number=SeqID_13366
  Homolog annotation: Hit_ID=Q5Z9G5; Match level="QueryCoverage=32%, HitCoverage=32%, E-value=4e-09, Identity=43%"; Hit description =Putative uncharacterized protein P0655A07.24
MARGRDGGVLSSFIPTAGLGGLAPGVDCDGIVTCVGARYYTRADQPPDRDHWSSPAEIRQHLLARPELYGEDDAPDQWALRAVTTEHGRAVAAEEGLTSEPHQSSAGITTCPREHARRPLTGWARLSARRAARFSRAAPRVVRGGVGGLAVLCAYPFRVPARGVLSLAYVARAQGAPLGDAGSAAMEAALCDGVVPFRVDVEARTRWKVAGIIVVDQWTRLACQLRFFWPNGTVLPFRCISKSKFLFF

SEQ ID NO: 56742 - protein, 139 aa, Zea mays
  Coding DNA Sequence Number=SeqID_13367
NIGGADPPPINDGNHSPQHTQEDREGGGDGPSLQDVVAMMDRNNNDGEASRRRDDELSAPLGTGALFVNRLDRRAVCWAARPLRNKCRGCAALWASRQAQPVGLCHGPQATWQQRVSALSGERRAGPGRVSASNPLKVT

SEQ ID NO: 56743 - protein, 245 aa, Zea mays
  Coding DNA Sequence Number=SeqID_13368
  Gene Ontology: Mol. function=pyruvate dehydrogenase (acetyl -transferring) activity; Cellular component=mitochondrial matrix; Biological process=metabolic process
  Homolog annotation: Hit_ID=A7PHN1; Match level="QueryCoverage=18%, HitCoverage=13%, E-value=6e-16, Identity=95%"; Hit description =Chromosome chr17 scaffold_16, whole genome shotgun sequence
MAHRTVNSACPVHHRTVRWPHKSELQRSNPNSWVTWLAHRTVQWRIGLSDLHIHPPLGDFQQSFKEIYATLCDCRMDPDIAVERLISQENEVLAIDHIINSAAKSNYMSAGQISVPIVLRGPNGAAAGVGAQHSQVFAQTCLYMVALLLLLELVPNTHRSSTVFPSKCFSPLYLFGPSWAVRWGTYGSVNLVLSYDGKPTSQFVVVEPSKKGRYLTKKRLKLQRKRIKNERKEANKNDQQSIRRK

SEQ ID NO: 56744 - protein, 60 aa, Zea mays
  Coding DNA Sequence Number=SeqID_13369
MESHDLRAELESRLVAPVPTGDGWDQTVALFLWMALFLQWSLLLVGNQQPSPLPTTQGWE

SEQ ID NO: 56745 - protein, 92 aa, Zea mays
  Coding DNA Sequence Number=SeqID_13370
MEAKSHQQPIILRSTCKNCATSKAEYTNTQLDLPAAWIKRLISCEKQTIRIEFLSSQVTALVPTIAGMGDHVSGRVRGYVRLQVHSDFWTAT

SEQ ID NO: 56746 - protein, 135 aa, Zea mays
  Coding DNA Sequence Number=SeqID_13371
MVGAAAVVGKNREEDCVREKKVASGGWEKNRAEKKGKALADTTHQEACEDDAVSKRQRNDQPTPEGSLRTCSFGGKPQQPPPGFAPLEGEDATEDGEVIGVSAEEQLQLRALRIKNRNLQKQKEILKAKHQRVSA

SEQ ID NO: 56747 - protein, 205 aa, Zea mays
  Coding DNA Sequence Number=SeqID_13372
MQAACDRTKGAHPFDFNASSMEAQAHTSCNQLAGCYAQETAPPLAPLPCLLDCGTSTATRGNPAHDPAVPTRHIGHGSDERHLWRAKQATLHLRHNDRVKKGTGKGDTPKGILLREGNGPRAPLLIRGSKAGPSEGFNSRLRALGLRAHYWSEVRRPAPRKGSTTASGHSGSAPTTDQGFVGWPSKGSTAAPDAERGMTLGTFDT

SEQ ID NO: 56748 - protein, 332 aa, Zea mays
  Coding DNA Sequence Number=SeqID_13373
  Subcellular localization annotation: CTP_CleavageSite=63; ConfidenceScore=5.10e-01
MRRVFPPSEPPDGEHSQSFRLVVGGTQLRGSRYLSGIVRLQEFSSGSPAASPRRWSPKIVTTSSMVGRSEPGCDLGPALSFKDLHHPGWGGSRAEPELYLPRGFVGHLLPQHSRERAHTGLAGGSDFDNAGLVGGKRPQLQRVGLTGSAGSGSAPGAPSRRKSGCRAAHTGGPPKTSRAARAAFVFWGCPAFAPVWRFCAEVGAPLVREDPSGDLPVGRWLPSSALRWWRLKKSSSPTGSPSPSALRASGSLALIACPRPSSGDVGEGIVAAASALRPSLLQFGHLERRSLSLLLERAAVGHLEPYRPAGPPMWGVVRTRGGGTGVPFVMAP

SEQ ID NO: 56749 - protein, 131 aa, Zea mays
  Coding DNA Sequence Number=SeqID_13374
MGKNTRADTGMGKILYPRAYMGNLTGRFFFDGYGYRMVLPDGYVPVAIPRHEHATEGAVGGVRLVAMGARREARRALYRPARGDRQARGRERATALTPGESGRYRPALARVGARVWARGRREGGDALTGRE

SEQ ID NO: 56750 - protein, 197 aa, Zea mays
  Coding DNA Sequence Number=SeqID_13375
  Gene Ontology: Mol. function=binding
  Homolog annotation: Hit_ID=A7NUP0; Match level="QueryCoverage=25%, HitCoverage=21%, E-value=1e-11, Identity=66%"; Hit description =Chromosome chr18 scaffold_1, whole genome shotgun sequence
MGCSKAIIPFLRKRLGYSAHKLLSADFPSEDAGKRWQSKLIGDKPEKDFEVEFEEFGVKADDSELDSADEAMTFAAPGAHSPEDTTGSSQSPKLSLFVTPFLATIAVPLEEKTSTRYMALVDLEEGNERLFYKLLIDNIEEPLVRPAKRPAPDQLQKALRKTFSAEKKSKIRKAWDGTKVIYNVASWGATAVGQHKA

SEQ ID NO: 56751 - protein, 414 aa, Zea mays
  Coding DNA Sequence Number=SeqID_13376
  Subcellular localization annotation: CTP_CleavageSite=41; ConfidenceScore=5.23e-01
MAPPVDVAVCALGRATWGAESEPWGRARRSFVVFRVLARVRALGSGGAEFAVFRVLARVRALGSGGAEFAVFRVLARVRALGSGGAEFAVFRVLARVRALGSGGAEFAVFRVLARVRALGSGGAEFAVFRVLARVRALGSGGAEFAVAPLARPDCLSNSLCRVALQSEWRRRRYPSVRLASGVCGDLVKVASERSQGLGRAGDVSAIKGGPRARRKSLELYADGGYQLRIRRLEAPEPPHRARGRSGTDSTFYIRPYVAFPQGGGGECAMLPSMGTEHGVSGELQAATGAPVARRVGLGSKLACQKSEKRVHLARLHAACMAARPFCPLVWAKMGGRLGEPWSVSEKSQPAAPGGAPSCLLIFQAPGWGPGHTPPPAVTQDGDLQFDGGENGPGRGLYSSLGLKDFCHPGQDGR

SEQ ID NO: 56752 - protein, 145 aa, Zea mays
  Coding DNA Sequence Number=SeqID_13377
  Subcellular localization annotation: CTP_CleavageSite=48; ConfidenceScore=5.69e-01
MAHPQSLLSLCLSLLSMAAGRSFLSRPVLCTAPSLGLRLAACARLPCRSSAIRGLCPASLAACPSAGQARLCAFPFSVLVLAVPCSINCVSHETLVDFAVLAIIKPGTLINRAMRKTSQVDPKRGLLRRMMLMDKPEDTRQVDVT

SEQ ID NO: 56753 - protein, 57 aa, Zea mays
  Coding DNA Sequence Number=SeqID_13378
MESHDLRAEWESRLVGGYEIDGFDYDYGTGCQHCNHCSGEDEAMEGDFQEFQDYDEF

SEQ ID NO: 56754 - protein, 95 aa, Zea mays
  Coding DNA Sequence Number=SeqID_13379
MRIKLKMMKMKIKRSHLKRRTMIKGEMPMIKTRKMMRDQDCHTQESTRRFKEITPVEDALKDSDWVLVMQEELNNFTRNEEPSWYSATSKMSMVW

SEQ ID NO: 56755 - protein, 148 aa, Zea mays
  Coding DNA Sequence Number=SeqID_13380
MESFDQMRAHVSGKADQAEGLLRLRDMDTSLITFREKFGHRQGEQQHPRRCFHPRRNLAQPRTATRAKGPPPKGGRQHRARRCLGQAPATASTSSSAWEAAISRADEVSFRADSASVRANTAASGSGSSQSSRGFQKLSKGSLEWQDR

SEQ ID NO: 56756 - protein, 293 aa, Zea mays
  Coding DNA Sequence Number=SeqID_13381
MLPSEGAEHGVSSKLLTDPFDRVRGLDASLRWDFVTNRSRRSRKCPREGTRAYRRLDRCLCSSAAAVTTGPLLTMPAVVPTPRLTGPWPSPLTSTVGSCAGLPRVAARFLCAGPPDVDGAEGAHSCGAVGCLSRGSPPFRPPVSAKMGERLRRTLEDVSGDFAHDAKGCNAALLLLSLEERDLVEIGTFQPSLGLKDFRRAARLHSLTNGQFGGEKLAGLRPPPRPQLQGEKALTDLAEGRTSATQDRSAASVVSSSVPGSLALSWPPMLPPAAWSSWGPALACGGTIRIIPT

SEQ ID NO: 56757 - protein, 180 aa, Zea mays
  Coding DNA Sequence Number=SeqID_13382
MAAIGELGTTDRVLIPTAKPILAADSRAVEAVCELIGDQSARTHGQMGDGLTAGEIGPRSPIPKGHFRHRISKCEIHICLLEGKRFRPTVNIALIPLLSRPDFGAPRPGREHNHQVGAHVKCKAYQRRWLELSIAFKVMELPLDAQSSGRRLDVDERVEQCRAVAGVLHVLARFVQVLQM

SEQ ID NO: 56758 - protein, 131 aa, Zea mays
  Coding DNA Sequence Number=SeqID_13383
  Subcellular localization annotation: CTP_CleavageSite=78; ConfidenceScore=5.37e-01
MAAVRPARRAVAGPTRPSGRGRKPPERSCRYAMPASPCASVQLRLRPRTTAVIGHGITTRRAEQRKTSRCRRTRRAVPCSRRRPSRPRTVRPSAPDVAPPRYPHVQGGSTAYRTARFATAAWRGREVGGGC

SEQ ID NO: 56759 - protein, 210 aa, Zea mays
  Coding DNA Sequence Number=SeqID_13384
  Subcellular localization annotation: CTP_CleavageSite=35; ConfidenceScore=5.56e-01
MARARAYKTLPDFGCTLPRTLKPHRSPARRRLLVRSVSAAAQSLCHRRPASRAIPNSVQPSEKTVHTSVKLPERGIGVCFAGEASPRSPELSTPPEYVDRVNHSTILRFPVHTVATLPREAHRALGLNQFAVVWPDNLEKPYKNNPKTIQIHYVILKENLSLKDCNLADREYILVPEQGAAQEVAPDPAPEPAPEDLPATALEGKPRFYA

SEQ ID NO: 56760 - protein, 271 aa, Zea mays
  Coding DNA Sequence Number=SeqID_13385
  Gene Ontology: Mol. function=carboxyl- or carbamoyltransferase activity; Cellular component=ornithine carbamoyltransferase complex; Biological process=amino acid metabolic process
  Homolog annotation: Hit_ID=Q8SA97; Match level="QueryCoverage=35%, HitCoverage=20%, E-value=2e-22, Identity=59%"; Hit description =Ornithine carbamoyltransferase
MEPGGGTAVGAVESLLTSSCFRKGAESRRRHRVCEAPSLPIWRSEPDGTPVLFPAARVSSGRVMMAPPVDVAGLRPRLGDVEAPPKPRSSLSSVAEVESGPLGRARRSSSSSRAEPKAEPKSEPWVGRSGVRRLLGLSPSPSPGSGGAEFAVFRDLARVRALGRAERSSPSSGAEPESEPWVGRSGVRRLPGLSPSPSPGSGEVELPMVPSAGPDFLSVSLCQVAPQSEWRRRRCPSVRPLYADGGYQLRIRSLEGTPNYGPRQAACYNLI

SEQ ID NO: 56761 - protein, 74 aa, Zea mays
  Coding DNA Sequence Number=SeqID_13386
  Gene Ontology: Mol. function=aspartic-type endopeptidase activity; Biological process=DNA integration
  Homolog annotation: Hit_ID=Q8H6I0; Match level="QueryCoverage=62%, HitCoverage=2%, E-value=1e-08, Identity=67%"; Hit description =Putative gag-pol polyprotein
MKDVKPIKTPMGTNGHLDLDMGGKSVDQKHRTVRCTKWSNGYQRNGRLHSALTELQSRQKSEQAPKAHQAVEST

SEQ ID NO: 56762 - protein, 178 aa, Zea mays
  Coding DNA Sequence Number=SeqID_13387
  Gene Ontology: Mol. function=6-phosphofructokinase activity; Cellular component=6-phosphofructokinase complex; Biological process=glycolysis
  Homolog annotation: Hit_ID=Q69QS5; Match level="QueryCoverage=83%, HitCoverage=35%, E-value=5e-32, Identity=48%"; Hit description =Phosphofructokinase-like
MRKVMKKIFIGTSKMIRKELYEVCAIFGVRNGYRGFYQLRGGRRARDGAQIVDTIDRRGFNQVCAIGGEGTMRGLVRIFEGVQRLGVPVAAAGVPKTVDNNVGIIDRSFGFHTAVEAAQRAIAAAHVEPRARRNRVGLVKLVGRSADHMALHATAATSTAASSPRRISTSAFGCGGGC

SEQ ID NO: 56763 - protein, 760 aa, Zea mays
  Coding DNA Sequence Number=SeqID_13388
  Gene Ontology: Mol. function=peptidase activity; Cellular component =extracellular region; Biological process=proteolysis
  Homolog annotation: Hit_ID=Q2L3T0; Match level="QueryCoverage=74%, HitCoverage=77%, E-value=0.0, Identity=79%"; Hit description =Subtilisin-like protease
  Pfam annotation: Domain name=PA; Domain location=484-587; Score =100.5; E_value=5.3e-27; Accession=PF02225.13; Description=PA domain
  Pfam annotation: Domain name=Peptidase_S8; Domain location=228-727; Score=24.9; E_value=4.2e-08; Accession=PF00082.13; Description =Subtilase family
  Pfam annotation: Domain name=Subtilisin_N; Domain location=127-215; Score=66.3; E_value=1e-16; Accession=PF05922.7; Description =Subtilisin N-terminal Region
  Pfam module annotation: Pfam domain module=PA::Peptidase _S8::Subtilisin_N; Domain location=484-587::228-727::127-215
MLTVKYIDPSYMVRAVAADNLCCTLLAHSAIDGAMAGYTGYVPGLINGNYGYIPVVEVAEARNPVDTSGLGSGQDSPPCRVMPLPPILGSCSCLYNTNSAEARTSTLHHHHRAPASSKLLTPSPLQASYVVYLGGHAHGRAGAALASCRARARSSHRALLGSVLRSEARARDAIFYSYTRYINGFAATLEEDEAAEVSRHPRVVSVFPNRGHPLHTTRSWEFLGMEEEGGRVRPGSIWAKARFGEGVVIGNLDTGVWPEAGSFRDDGMGPAPPGWRGICQDQQASDDAQVRCNRKLIGARFFNKGYLATVGRRQQQQEVNPASTRDTDGHGTHTLSTAAGRLVPGANLFGYGNGTAKGGAPAAHAAAYKVCWRPVNGSECFDADIIAAFDAAIHDGVHVLSVSLGGSPADYFRDGLAIGSFHAARHGVTVVCSAGNSGPGAGTVSNTAPWLLTVGASTMDREFPAYLVLDNNKRIKGQSLSRTRLPANKYYQLISSEEAKGANATVTQAKLCIGGSLDKAKVKGKIVVCVRGKNARVEKGEAVHRAGGAGMVLANDEASGNEVIADAHVLPATHITYADGVTLLAYLKATRLASGYITVPYTALDAKPAPFMAAFSSQGPNTVTPEILKPDITAPGVSILAAFTGEAGPTGLAFDDRRVLFNAESGTSMSCPHVAGIAGLLKAVHPDWSPAAIKSAIMTTARVQDNMRKPMSNSSFLRATPFGYGAGHVQPNRAADPGLVYDANTTDYLSFLCALGYNSS

SEQ ID NO: 56764 - protein, 162 aa, Zea mays
  Coding DNA Sequence Number=SeqID_13389
  Gene Ontology: Mol. function=metal ion binding; Biological process =response to osmotic stress
  Homolog annotation: Hit_ID=Q6Z8T9; Match level="QueryCoverage=92%, HitCoverage=88%, E-value=1e-21, Identity=41%"; Hit description=Zinc finger protein family-like
  Pfam annotation: Domain name=PHD; Domain location=100-145; Score= -1.8; E_value=0.021; Accession=PF00628.20; Description=PHD-finger
  Pfam annotation: Domain name=zf-C3HC4; Domain location=101-142; Score= 47.3; E_value=5.2e-11; Accession=PF00097.16; Description=Zinc finger, C3HC4 type (RING finger)
  Pfam module annotation: Pfam domain module=PHD::zf-C3HC4; Domain location=100-145::101-142
MGISSMPEPRDSLLGYLVYNAVVSIAALAGLVRAALVFLDLQAAQLPGGAGAGADDDRLAASGPGLGLAERFLRAFRPALYGVLVSTACGAAEAAAGDDDCSVCLAGFEAEAVVNRLPCGHLFHRACLETWLRYERATCPLCRAHVPLPADETPVLRYPELE

SEQ ID NO: 56765 - protein, 126 aa, Zea mays
  Coding DNA Sequence Number=SeqID_13390
  Gene Ontology: Mol. function=oxidoreductase activity; Cellular component=fatty acid synthase complex; Biological process=metabolic process
  Homolog annotation: Hit_ID=A7NVR5; Match level="QueryCoverage=80%, HitCoverage=42%, E-value=3e-26, Identity=60%"; Hit description =Chromosome chr18 scaffold_1, whole genome shotgun sequence
MARSASATAPVSCAIDPAMVLSHKFPEVAYEYDERDEVLYALAMGACNADAADEKELQLVYHRDGQSSIKVLPTFISALNAKTGDGFYMDVPGLHYNPTLLLHGQQYIEIYKPIPSRDNIADGKFF

SEQ ID NO: 56766 - protein, 58 aa, Zea mays
  Coding DNA Sequence Number=SeqID_13391
  Subcellular localization annotation: CTP_CleavageSite=24; ConfidenceScore=5.09e-01
MGISYTSNGDLGTPPWPTQPLPSPADSGSHQVTPPPHADFADRCLNSSGAATNNNTMS

SEQ ID NO: 56767 - protein, 219 aa, Zea mays
  Coding DNA Sequence Number=SeqID_13392
MVALGRHWRVEGRSPELRASSGRSGEATFALNAPAIWSVGVAIWPGLLLGEDWASGEPELCADGGYQLRIRSLEEALRKNSPGCPVYTGQCPVLQGTAPQELASFGNSQRLVRYNSPDMSGVHWTVWCDIEATDTSAPTATCSALNARQRTQKSGTPILAHQTLYSTCPVRHRTSRRAQKSELQRSEPNDFGDVARAPDMSSVHRTVRCTIRQSAPPNG

SEQ ID NO: 56768 - protein, 88 aa, Zea mays
  Coding DNA Sequence Number=SeqID_13393
MTHFLSSLIDLLLKIGKTKHLVLLPLDLLMDGFERLEDVAAGLHHTAEGGASAAIAATESNSAEPLAPAPWELEEVAGERARSTRDAA

SEQ ID NO: 56769 - protein, 91 aa, Zea mays
  Coding DNA Sequence Number=SeqID_13394
MTLTSNPLSHMTSPTPINGGDTCFSFDYLSHEGFPSILWEVLCSAGYPTPPLYMVQLYEEHRVPRCRVWLTLESHPLQPGWRSLDSVTVGF

SEQ ID NO: 56770 - protein, 224 aa, Zea mays
  Coding DNA Sequence Number=SeqID_13395
MAMMGSTSEKMYLCQVILLNLTNKTGLLRIHFSKHFCKTESLIIEKPYLDSLNQHTLESLFFSRVRKQQIFVAFAPRWFPRKKNKSEAAGGLGPPYRTFMKELSGGVFASLGIVIILLCTPRITLVRKKILNLSSGSGAPTGLSKKMPSRTRRIARKHTGPIGVPSHQLAPRHDNSSSGRNDPIGDLKAEVSRLQAELHRRTAIWVVDGDRINELRRDVRHLRD

SEQ ID NO: 56771 - protein, 211 aa, Zea mays
  Coding DNA Sequence Number=SeqID_13396
MAMMGSTSEKMYLCQVRKQQIFVAFAPRWFPRKKNKSEAAGGLGPPYRTFMKELSGGVFASLGIVIILLCTPRITLVRKKIPNLSSGSGAPTGLSKVRWTRTTVGGPNYLGGSVTMSALYNLQALQSDTMAHLTNIAQTTNITLDSREDFVVDLSSELVEKDLQVEQLSQRIATLEQHVEIWDNTIDILEIQLHDVQEELEEANNHLEMHH

SEQ ID NO: 56772 - protein, 81 aa, Zea mays
  Coding DNA Sequence Number=SeqID_13397
MAHRMLPLWASIYMPSALQLGGPHLSSTFAILAKGRNKLILRGATIGGLHLLKVLKNTTNMFSKYNVLTGTFGLEMKVYKI

SEQ ID NO: 56773 - protein, 90 aa, Zea mays
  Coding DNA Sequence Number=SeqID_13398
MARCMESDQPHGKWVTRLVGKDVQPLLSVKLPYTSHELPPLIVNTRKGGGIDLAPNRHTWRIFRQPQQQQPEMDPPQPPPAKADPAVADG

SEQ ID NO: 56774 - protein, 123 aa, Zea mays
  Coding DNA Sequence Number=SeqID_13399
MNICELTLAVSHPPLVKNRYHRMRRMEDAVESHLVILFVPQSLKHGCDILGGRPSSQTVCERGCILQTSLLDSRSFDYRGRTVHVLHLEHWDEPCEDVKDADDCTALLDAFVYIETSSAALRV

SEQ ID NO: 56775 - protein, 288 aa, Zea mays
  Coding DNA Sequence Number=SeqID_13400
  Homolog annotation: Hit_ID=Q6J9V9; Match level="QueryCoverage=22%, HitCoverage=33%, E-value=4e-08, Identity=46%"; Hit description =Putative uncharacterized protein
MNKRPAFKVPSQTELRFRPRGYEQPPHRGACGATSSGQLTSDLCSSSYGPRTDAATGRLSFASPLKGRELDIKAKESCGVRLFTNAAPANAGRSKAHRQDASSAELGDGFHHQKLEEKVASRPVPEVEPRLASLSAPARMVTAGEGVQPGCMMKILEAERWLKDQRVKGADRACKRHATRAKRSKRRFAFAIMTASKKGPGKGDTPKRILLREGNRPRASLLIRGSKAGPSEGFNSRLRALGFRTHYWSEVRRPAPRKGSTAASGHSGSAPTTDQGFVGWPSKGSQLP

SEQ ID NO: 56776 - protein, 130 aa, Zea mays
  Coding DNA Sequence Number=SeqID_13401
MCGSPSGMVGVGGPRAQARELVGGEESGLSRAQLTNQMGQRASPGIKEGGRLKSGEDDLGSPVKFCWVRELGKLHKLLAKLSERLAQLGSDRSGLATVAEARVALAGGRELAGAKEGRLAGEGFADWIKR

SEQ ID NO: 56777 - protein, 25 aa, Zea mays
  Coding DNA Sequence Number=SeqID_13402
MAKRTLRETRGGCNADNLGMGGFGV

SEQ ID NO: 56778 - protein, 135 aa, Zea mays
  Coding DNA Sequence Number=SeqID_13403
MACRHSKPPLVKGDEAQHILRWRGRGNSARRGHPLRLRVTGERAKQTFSNKGLQITCRDGGKRPRVTRRNNGHPVGHHQAEEVAAERTRTGDTFGRRSRRRFTSAMMTASKKGPEKGILRKGSFSAKEAGPEPPY

SEQ ID NO: 56779 - protein, 467 aa, Zea mays
  Coding DNA Sequence Number=SeqID_13404
MAIISKIWSQSMLELDLSLCCLVLDAVPGARAHTGVRPRTPRALVRAPPSAVLARAYKASPGAPHLTPCSPSPARCPSLAPASSLPPAIATRASATVANPLRSLPSYASRSDSFAKSLPDSSPSTSSPACARGPADSDHPRRRPAHRRDPQDLPYTLGHLTGTVSPPMARLRHTTRKYVIPFLPSRLAERPLRRPVAGQSSHLERLHHRLHEEQERRRQEQEQQGSSFSLQQEIESVRSCSPMLPLEAPPAPPLGAPASGVAAGGDPDDGGGDDSSSHDTDFSADQEPEGWVARPIARDAARGCHFHDALDTLLRRALDRRTWSIEYRCVVYQHSRGVYPDRWEATCLVRRLENSLQANGLNLKYYPRRPSGSTGGVIVSPVGEDNPRLSSTVNLATVLNTELDHALDELSRARAEIALLRAKRAERRHLDDGSPAPVGTQHPYRSPRRGHQSYGNPDCKTKINLEP

SEQ ID NO: 56780 - protein, 127 aa, Zea mays
  Coding DNA Sequence Number=SeqID_13405
  Gene Ontology: Mol. function=structural constituent of ribosome; Cellular component=intracellular; Biological process=translation
  Homolog annotation: Hit_ID=Q6AVN3; Match level="QueryCoverage=48%, HitCoverage=26%, E-value=8e-16, Identity=67%"; Hit description =Putative uncharacterized protein OJ1119_H02.10
  Subcellular localization annotation: CTP_CleavageSite=26; ConfidenceScore=5.63e-01
MATVATSHPAAPCVPLAAGVAAGAVRAGVGRRWYRARRCGSPGAMAYARPWSTTSSSRRRSACGLLPLAHSVGGGAGATRSVAGLADEHRELEAVLRKMTPPNGRTVLIFRAPCGCPKDRMEVWGAG

SEQ ID NO: 56781 - protein, 150 aa, Zea mays
  Coding DNA Sequence Number=SeqID_13406
MLFWERTIVSCHRCHVVVFSVRDAAIPKSVVGCANIPNFSQPTVAQDAARNASAASEARSASASTAAGEEWSQRAGNNRPRDRDREVEEEGRAAGPRGGRIGGGAALVQLWCSKVRTSLGIWVGFFEQPQTRPKNKKPKGRPGMKKNGSG

SEQ ID NO: 56782 - protein, 175 aa, Zea mays
  Coding DNA Sequence Number=SeqID_13407
MAPKRANPKADEAAKAALLAARKGKALALTQSTHQETTEDHVPRTCEDDTLRTCGPKGQSQPPPGFAPLKGVDLTEDGEVLGVSAEEQLQLRALLKGKSKTLLSLEHRTVRWCTGQCPVRQAGSSELAALGNSPATYGYNSPDCPVCTGLSGEPTVGRANGRPRDLRGTRGRANG

SEQ ID NO: 56783 - protein, 70 aa, Zea mays
  Coding DNA Sequence Number=SeqID_13408
  Subcellular localization annotation: CTP_CleavageSite=73; ConfidenceScore=5.70e-01
MAPTGGPLASVTCTLQSLLVWARSSGSLSVSASASPGVMAAKTQLLQRLRRFFGGRVPHDGRTSRSVILS

SEQ ID NO: 56784 - protein, 202 aa, Zea mays
  Coding DNA Sequence Number=SeqID_13409
  Subcellular localization annotation: CTP_CleavageSite=44; ConfidenceScore=5.32e-01
MKLWKETSRSSKITTSSRCGLAATPSRLPVKAALSTFLFRTLIYCKTYMDVSDMARLRHTARKSVIPFLPSRLAERPLRRPVAGQSSHLERLHHRLREEQERRRQEQRSSSLSLHQEIESVRSCSPVLPLEPPPAPPLGAPASGVAAGGDPDDGDGDDSSSHDTDFSANPEPGRMGCSTHHSRRCSRVSLPRCARHPATSGI

SEQ ID NO: 56785 - protein, 77 aa, Zea mays
  Coding DNA Sequence Number=SeqID_13410
MGCTSPMPGRNKELHSHDITARHPKFHGIGLKRGKRHNPLGKSQKSLGAKLSEGGSGDKQPPQGPIGNGNPSLVGGP

SEQ ID NO: 56786 - protein, 347 aa, Zea mays
  Coding DNA Sequence Number=SeqID_13411
  Homolog annotation: Hit_ID=Q6J9V9; Match level="QueryCoverage=43%, HitCoverage=40%, E-value=3e-10, Identity=37%"; Hit description =Putative uncharacterized protein
MQAACDRTKGAHPFDFDASSMEAQAHTSCNRRTGYYVRETAPPLAPVPHLLDCGTGAATRGDPAHDSTVPTEHIGHGSVSRGRRRDGRYDQKWAGSNGGGRRAEAAVKSSASSRPPPGTAREPSPTATLHLRHNDRVKKGTEKGDTPKGILLREGSGPRAPLLIKGSKAGPSEGFNSRLRALGLRAHYWSEVRRLAPRKGSTAASGHSGSAPTTDQGFVGWPPKGSDSHLRARRARDDPRYVRYITKARAMLPSLGQRQPTPEDSRLARGTGKGDISKGILLSEGSGPRALLLIRGPKAGPSEGFDSHPEHSGSKPITDQGFEGWPLRRVRLSPQSAWAPRPLLIRD

SEQ ID NO: 56787 - protein, 215 aa, Zea mays
  Coding DNA Sequence Number=SeqID_13412
MSGKANCCCPARMQHSVLCPLFRGEDGSEDLPVRFGVAGARWCGASAQVGVVVDADVVAAGESFSTDKPVSATRGPTSGSLALMSGSRPLSGDANESLPAAASVLGPSLLLQRSLASRPELVAPQALRNPRPLCDEPEPEAAVSAWTEADLARKEDFVGRSLAGPSAGGTSAGVGDPPTVLPSEARSDFAEGGVDAKGAAAPPPSTSEPAGSVRL

SEQ ID NO: 56788 - protein, 1064 aa, Zea mays
  Coding DNA Sequence Number=SeqID_13413
MCSHFYSAYPPFEVAEEDADEGALRCAAGLSSGRDLVEEFVAYGVWPLAHGWALGEVCPRQMPSHGGKLVRSPAFALDLQSRDPAAFVREAEDGAVRIVGRYVPRTEGQRSWDIRGSNDRLNRVFELNRLPYNGYPGQDDVDRRGKKPVVESGDDPAPAAAPSSKKRKLGTAMGGLGVSDGFARELMRTCAAPGGRMSLPELRESSARMLRVTGGWWPRNVPIPRVAGEDFFTSRMVREWRVFPYGRNIAAVVSAVMDKDYQGAAQKRQAVVRLHEARPKRQRGAAKAAAPGGGKPPLAAKSVVPASSKTAEAAAGAGGSKSVKTVPPSSRAPEVAKAARGLPSPGKRVADFATDISVDDYLGGSDECQLVIVEPAAATTAAAIVPKAKGGALSAGGEMPALAAVRDEAGVVSRRLKEMKEALSQAADFADRAASGALMAVVSAEVERLRTQHADAVREKSAADSKCRKLADKVAALEGEKTDLRRQLVKERREANEALAKAQAALAEANLARAKGSLARERAAQLEERLNALQSRVERTEAAARAEAERTRKQLMDSYHELGARTGDFEVPDREPGLRCLEWVQEELQALPTIVEGFMSYASLVTCEGAMNALSREGCRHFEVFDQADEDFERDIYKVEDPIVKESAGAIYDRMWGPHGREVVRERAETARAQAARGERVDDFGALNSALPDPESNPAEAVSEAALEPPPETAEGAPDALAAATTGGGPPPETAGGAPDAPAAAAPRAEDPATVAAEATAEAPATAGSSQVQDFGPAHATTTTNFLAASTVDGGNKYDGSASEFSNFADSGSSVEWTEESSEEDLDYFAALDVAAAEASPHAADTEDVPGPSTGRRRRRAVAKRRVSGAQASRLCVSRASRQELLSLPAAASTGEGELRSLFAGEELRIMLFNYREMGIIPKVEPMTGAYIVGLGADSLVWSFLLLLRFVRLCPSGNFCVDSFCSGLRFFALGCASPGYTPLGNFCTVVDVPGVLQVFAAWRCEPVSAGGSFRLDYEGALPPGLQLAPGLCPSCPDEYEIPFVEFPWDDCMVAPCFCLGLVFV

SEQ ID NO: 56789 - protein, 234 aa, Zea mays
  Coding DNA Sequence Number=SeqID_13414
  Subcellular localization annotation: CTP_CleavageSite=53; ConfidenceScore=5.71e-01
MGAIKVKAQSTQGTRSRLSRAQPRAKAVDPRGFTSRPRAPSSNGHTFGSPEAQSSQRSNLDQIATPTDRLRLNLDAERRTPPRPTPGLGHSLGLGRRSPPRPTQGSGSTSTLDDGLRLARPQGSDTVSASEDGLRLARPRARAQPRRWTTDSASPDPRARTQSRPRKTVSALPDLGLGLNLDLGRWTPPRPTPGVGLSLDLGRRTRPRPRRSLRLARPRARTDHVTRGPSLTYP

SEQ ID NO: 56790 - protein, 126 aa, Zea mays
  Coding DNA Sequence Number=SeqID_13415
MEMSLRERTNADLGELHGTYGRTRRAPELVGEGRKQTELEQRLGYTYLSAFRTRGSLDRRVNLSLRAPAQMGWRTMEHKGETRLVLSRTRGGAENHRRHGRTRGAIITYFRGEPDGTPVLFPRSLS

SEQ ID NO: 56791 - protein, 269 aa, Zea mays
  Coding DNA Sequence Number=SeqID_13416
  Homolog annotation: Hit_ID=Q6QP51; Match level="QueryCoverage=65%, HitCoverage=80%, E-value=7e-19, Identity=39%"; Hit description =Putative growth-regulating factor 1
MEALAHMSCNRRTGYYVQRNRTATCANDASSRDYRTSATTRGSLAHDPTVPIKCDGHRDRKRGYFERILLSKGKEPRARLLIRGSKVAPRGVRRPPQSTRALSPLLIKGSKARPSKGLGLRSRCTLGNFRDQRERFVMESHRREAPSPRTLSNGSGSSKSPAGKQHYSPHSDYCANHQGKTNNSKSRHPPSSASGATGSSTSPDLRPREKVSASPDPRPQPREKVSASPDLGPRPQPRPREESRPRLTSASTSGEVSASPYLSLGPTTL

SEQ ID NO: 56792 - protein, 190 aa, Zea mays
  Coding DNA Sequence Number=SeqID_13417
MERVQRSLKSGSPHSSFADPQGLGGTIFMPCSQRTERYGREEARQVQKGAQHLLRDRLNTVRANSYNELVNMAISQEDCITARQAEKKRKTPVAGPSAQPQRFRIVSDTQNRGPQQQQGRWVIRPQQQQQAPNRTQFPAQRNNQQQQQNQQRQGQNVNQNQGKRQKVQVRQGKLNFTTMADIPEGAPVMT

SEQ ID NO: 56793 - protein, 228 aa, Zea mays
  Coding DNA Sequence Number=SeqID_13418
MTSHGSSEDGNALSHTDGLAREGFPRILWEVLQGAGYTTPPQYAVQQFEKHRVPRCRLATHPIGLFPTEREDDPTWKDRVEHAKDIWAIYPGQTAHVTVRCMNALYRLQVMRGEEMSHLMALLEATKITLDNREELVVEQLSTDIQELEELVGTRENTIEVLEDQLINTQQQLAEANEHLDMHHQEIQDMEANEDVDIEGGEEPASSVDTAGSGRPPSPESSVASFAH

SEQ ID NO: 56794 - protein, 255 aa, Zea mays
  Coding DNA Sequence Number=SeqID_13419
  Gene Ontology: Mol. function=nucleic acid binding; Cellular component= spliceosome; Biological process=regulation of transcription, DNA -dependent
  Homolog annotation: Hit_ID=A3BQ85; Match level="QueryCoverage=64%, HitCoverage=15%, E-value=3e-33, Identity=49%"; Hit description =Putative uncharacterized protein
MVKQSRFMTAGSYSTKFVPNSDYDNGSDVVISMDKKEPKDEPLNELDGSARLHVASSLKLCDSKPNTATDKAEPKKKTRVRYSASNLRSKTRPAAGTVVVCPASVLRQWANELSVKVMEDNKLSVLVYHGSSRTRDPNELATCDVVVTTYMTVANEVPKENSNDERKKCEMDGICLEISIGSKRKKQSKPKKKNKPSNSEGGPLARLVPHLSLSTLEQIGTCGFDCIIVGVHGNVMCACSEHATGLTPGTFFQFV

SEQ ID NO: 56795 - protein, 199 aa, Zea mays
  Coding DNA Sequence Number=SeqID_13420
  Gene Ontology: Mol. function=nucleic acid binding
  Homolog annotation: Hit_ID=A2X2U6; Match level="QueryCoverage=55%, HitCoverage=23%, E-value=4e-23, Identity=50%"; Hit description =Putative uncharacterized protein
MAPGRKTTAKSTKPTEVPLTEYEKLRAENLMRNNQKLQRLGVTTLASILNHTSAKSKVDTREKSGSLYEVLEGALKATIDPNGKRNRSMGRELDRISRGLCTNIPIHIAEGKIRPEAPMQAAKLASEGGIILRQQMPILRHWKEYKKDKSIVTNYIDKVAAQFTMDTNNNAIKAACADLLKGGQRQMSQYKFNKLEYCC

SEQ ID NO: 56796 - protein, 363 aa, Zea mays
  Coding DNA Sequence Number=SeqID_13421
  Gene Ontology: Mol. function=carboxyl- or carbamoyltransferase activity; Cellular component=ornithine carbamoyltransferase complex; Biological process=amino acid metabolic process
  Homolog annotation: Hit_ID=Q8SA97; Match level="QueryCoverage=31%, HitCoverage=21%, E-value=7e-11, Identity=45%"; Hit description =Ornithine carbamoyltransferase
MALPVDVAGPRPRPGDVGAPPKLGSNLSSVAEAESEPLGQARRKSFGRGQGGVRALGSGEAEFVVFRGRARVRALGSGGAEFAVFRVLARVRALGSGGAEFAVFRVLARVRALGSGGAEFAVFRVLARVRAVGSGGAEFAVFRVLARVRALGSGGAEFPMAPLARPDCMSDSLCRVAPQSEWRRRRCPSVRPFIDERRERRNDVEQGAVDSEARGLGHGAVGDDAMWHGRDRGTGTVDDELQRRRCRAPAAASSKGGGRAFGGEGETAASVVTAINGTAKVEGEWGKGKRRGWSLRGGEAALGRPSGATAAQGRRGGAGEAERRSGGASARALWRTHAKKRAGPGRARLEVWEGWGKGEGLMG

SEQ ID NO: 56797 - protein, 110 aa, Zea mays
  Coding DNA Sequence Number=SeqID_13422
MAGLNLNSPGVQVKFSQVKGYLLILAVGLGLRAPDYTTHLSEALRDVDNAVNWAVANLPPVRRGCGQQRGRRSWPPMTNPDQESAEFHQRTRVFPDMIHVASTGLSSHGH

SEQ ID NO: 56798 - protein, 100 aa, Zea mays
  Coding DNA Sequence Number=SeqID_13423
MTNPDQESAEFHQRTRVFPDMIHVASTGLSSHGHQRTPNRHKRPNFNGGEELSRPGVVASAVDSRRMKDIFKAYIVLGKKEWGQVVGYGRVDLSYRFKLG

SEQ ID NO: 56799 - protein, 330 aa, Zea mays
  Coding DNA Sequence Number=SeqID_13424
  Subcellular localization annotation: CTP_CleavageSite=44; ConfidenceScore=5.15e-01
MAPRILCDDGGSQPPYGSKRTSARTQQLRQLSLRQASALLRRPRHHTGWVPKSLWLPRRHGPLREGWPRGDEDETGARARPLAPSPAWTLVTPYCKRTRPGHGTNTKASGFPPLSRLSPAASLPPFALGLALDPSGLGHAATFTHRLRDPPRLETPTNSKKQKGRIWSREETIHSGFAKIRTLRCSNPSLNHGRSELPRVRRGLTLGGALRSRPCANPRAPATARDHARATAIKPVPVPGCLPRCLLRTTPNSLELAHSSGDLPSLPRLKPRTRATGNSEIVLAGVQNPAGARGPGSLEDMVARVNWPSILPPGWTVEWDPASAEEEHEE

SEQ ID NO: 56800 - protein, 244 aa, Zea mays
  Coding DNA Sequence Number=SeqID_13425
MDQAVSLAARSRRFESSFYSLQVTALVPTITGMGDHVSGRVRGKVYCQVQSDPLVQALVLDPGLPPEQLLAPARGCSGGHNGVRLDGGAGRNRPVHVRRRVLSSAAGGVLNSGEHDFAFPVARVLGLSLGKLYDLPGKLSEGLDQAEEGGKGVGHGGCPRAALASRGEVAGAMGELGGVRRGTETATGKAAGHWDGLYSHGAGVVTGGRGHAGVHARACSERAPECQPSSNTWELASAMVQRRI

SEQ ID NO: 56801 - protein, 201 aa, Zea mays
  Coding DNA Sequence Number=SeqID_13426
  Gene Ontology: Mol. function=carboxyl- or carbamoyltransferase activity; Cellular component=ornithine carbamoyltransferase complex; Biological process=amino acid metabolic process
  Homolog annotation: Hit_ID=Q8SA97; Match level="QueryCoverage=41%, HitCoverage=20%, E-value=4e-10, Identity=48%"; Hit description =Ornithine carbamoyltransferase
MAPPVDVADLRPRLGDVEAPPKSRLSPSPWVERGGGCRLRPGRSPSPGIERSGVRRLLGLSPSPSPWSGGAEFVVFRDLARVRALGRAERSSSSSGAEPKSEPWVGRSGVRRLPGLSPSPSPGSGGAESVERRSDGGHFGSVGWGARVRIKGLGRAGNMFAAGGGPRARRKSSGLYADGGYQLRIRSLEGTPNYGPRHYYL

SEQ ID NO: 56802 - protein, 66 aa, Zea mays
  Coding DNA Sequence Number=SeqID_13427
MTAIGELGTTDRVFIPTAKPILAADSRAVEAVCELIDVIVGITPQLITLNQRSKSDKYHKNKHSSA

SEQ ID NO: 56803 - protein, 85 aa, Zea mays
  Coding DNA Sequence Number=SeqID_13428
MPMSRCHRTSGTSLLYCPKPDNGQLVKTEGVAGEDPEQQSVGEGGDKDDGYDYAYGNGCPRCNHYSGEDEVVEEDFQEFQEYDEF

SEQ ID NO: 56804 - protein, 267 aa, Zea mays
  Coding DNA Sequence Number=SeqID_13429
MAMGQVRVLVVAYRSYRRFEFFDGDHEGGKELKAYRSVPWSGAPDCPVAHRTVSGAPGDIAQNSSSSGKSQSRRAKIHRTVRCTPDSVRCSKKSRLRNSAASGIQNGCSAIIHRTCPVYTGLSGATVEQRLLRANGHLQAHSMRARIAQKSGTPILAHRTLNSTCPVCTGHPGGPRSQNSNGQIPTTLVTWLAHRTCPVCTGLSGAPYDRHPSPTVMFGGWDYKYPNHPTIHGIQVFQLPTTIQELAFIAKHTKRDQILSQLHTKPK

SEQ ID NO: 56805 - protein, 153 aa, Zea mays
  Coding DNA Sequence Number=SeqID_13430
MAGDGGTMDDGESNVGAADGGIAIDPSRSSPHRNRPPSTQWMLAAQRIERSLSQNSCAKRGGVLLGIVAWRSEAGTRSPWKLGSGLGRNPYAAVFQRGQKMSHRFFTPNGMTRLSTMEVTIDSWSHFALAPHATYGIAQCTIKHNFWMQETYR

SEQ ID NO: 56806 - protein, 174 aa, Zea mays
  Coding DNA Sequence Number=SeqID_13431
  Homolog annotation: Hit_ID=Q8LN48; Match level="QueryCoverage=82%, HitCoverage=55%, E-value=4e-17, Identity=33%"; Hit description =Putative uncharacterized protein P0031G09.3
MSPSPIPESSVFAAEPACAPDTVRYTPDSLAHSKVARFRKKPFPLFYSLEALYEGSVATRELNFTSTQRLPPYAPLSVDNLAPPATVPPLAPPAPTFVIPSARTREGEGSKSRKHKQSHVGAALEDYVEFKKSQTNKTLDALKELSMRKCMKKMEAMDGFTDEKKSYAVEVFKS

SEQ ID NO: 56807 - protein, 248 aa, Zea mays
  Coding DNA Sequence Number=SeqID_13432
MSCKLILRGSVRLPCGYAPLHFRGNQRLGRRTTVQGACNHPTIKCPFHLRRIQRSKRQTAAQEAYNRPTAVRSLSSATTGGPTQGPRPTRHVTGASVTVCKEGARRLRQCLVFSELSQILKRLVSSPEAGPRATVGTLNHGYPLLQHKGITPMRRLLATRRTTPNSTRWAGQRAPCGEERHHASVRLDPHRGSPGPYIHTGPEPPGGVKVIQQTARLLGLLVNSTPVPSDALYSSSLPQEASSFIVFE

SEQ ID NO: 56808 - protein, 383 aa, Zea mays
  Coding DNA Sequence Number=SeqID_13433
MDRGKGPASSSSAPGGTGGSEEERRRRPRARRGASVLRHYHHRAPRHHHHHHHRSRRYHHHLGESAGSGAGGPPPTAAQIAPAASQASAVGPAAAASASGGVAAIEEVPTAPTATAALMTVMSSSTPSAAAEEVPTAPTPAIEGDVGGVSSSIPPPTPEETEVVFGRRLRSGAEPEAAPVPLPRVLSPRGAHQGSVPLVHLRAGPQGLQKGPPEGVRPGARGVAMGEEVGQEGRSPKREGGPHNRVSGQAAGPGLDPGGPVSQQVEAIERMKKWKKELEDKARDIALAEENLKEKDTSLDRRAADLARRETYLAFQKEMLERRGMLLAEHELEAEEKERKLEEQIRQFQAALAAPGPQAVEATRKALEDLQAEHRARVQRITA

SEQ ID NO: 56809 - protein, 113 aa, Zea mays
  Coding DNA Sequence Number=SeqID_13434
MASLGHPDRFQTEVALNLVRGLLGWSAPGLTGRIRAGAAPLGDLVVVEFVLFVSYISCGRDSAVAYISTLGGVRWENWRTDWVIASAEANDRLVLPSNGPSLDRKHWRTKPSL

SEQ ID NO: 56810 - protein, 217 aa, Zea mays
  Coding DNA Sequence Number=SeqID_13435
MAMLVRPDHYQTEEALDSVRRMLGWGSTALAGRIRASTIPLGNLAAGEFVLFVSYLFRGLALPILSFFLLLLEEFGSNSSISRPTPSSRILREPGTNLTWEELEIFVRGITGEAFIPESLMLPQGISPLCNDPRLQSAVLAQLSTLDESGVAVRQTSGRDPIGGSIFLIDRHHRRGSGSNDNGRPASKATRRFMAPKVVPSDPQDPPITVEAAPLGP

SEQ ID NO: 56811 - protein, 802 aa, Zea mays
  Coding DNA Sequence Number=SeqID_13436
  Homolog annotation: Hit_ID=O48967; Match level="QueryCoverage=11%, HitCoverage=20%, E-value=9e-23, Identity=61%"; Hit description =Putative uncharacterized protein
MRDRRKQRGSALEAKPKILFSTAHRHMLLSARQHHRFFIGNGMERRRRSVQRWPRCGEGGPRPAPSGGLLQVQAEPSAAADRPAWLSWAWPRVHAACACAAGWRTNQQLAPLEPSLARASEEELARGRRRARVSTAQAADEIEMRSWPRLWLLRCGLRTPSAGRPGRGASGRTRGPARAIISSRLVSLLPPVAQLSCARAACVATTELHGKKGLALRESEGESTTLTLEQGATAQETNVVRARGTAGLEEGSDKNKQSDGWIRLQSIFTAISTSLLRLVRCRGHARPALRTNAKRTQSAPRICRTDGRPAGESFWRTAQTFSSYHLAAQLGTPGYSDRRGALAVWLWPRLDAAVAASAAAAWSRSCLALPCLGLLGPAPPVVPDPSPAHHRLPAGPNPNSLHPYPPPASQDRDQGQGQGQGQGRPSSIAVPTATSTTAAGVWAGRHAARSHTSMDPVATCRASAGAPQFFTIYVSGYTVRFLEMLAHSSRCRCSHIHEERGWPRQPLWLAWHGQQGGGSSSKPVDEDGSAQSRCITHRQSGTAAAEILAWLGFFSSSSFFSSSLNGEEKNEVRSPRVGPNPGSVPEREGPWGDVKVIQRTARLLGLLVNSTPVPSGALYSSSLPQEASSHDGADHRAPRRNFGGFRDVARGCILRATSARPPRLWDCCRARRAAAHASAGVLDSVEGSAYGDVYGQRVATPPPSSTASPGAMKQWRDDVDRLLSMAHSTSTRSRPRSSWRQREATSSVRSPSVRGAQIDDVRAELNRRRTGEDTRVSLERARERRQNVEGRNLDRDFAAEAP

SEQ ID NO: 56812 - protein, 302 aa, Zea mays
  Coding DNA Sequence Number=SeqID_13437
MQDRQDALQQQLLQDRAESRAFMALMLQQSGVSVPPVLSAPPPPLNAPVVPLILSGPPVGTSPLRPVTLAFTSPVLSSVCPQPPVPPASAVTTTTVAVSVTTSVPVAPVARPQSESVPAPASTADPGSETDSDPPPAVTGPLGLDGSDAASDAASRRLGALGVCTRRRARTPSCVLRQPPPTGAEVVTVAEVVDVVGGAVRSQLPARLLLVWRLTIRDQAERLHGFRTPQETRFWVRDQANRPHRLRTTLWNGHPFLRTGSQAFPCFVKLDVSRLDTSVYKRVINGLREAASPRPGSIYSFS

SEQ ID NO: 56813 - protein, 163 aa, Zea mays
  Coding DNA Sequence Number=SeqID_13438
MDPGRGGAPTYWAHELVARAGGLGAGRADRETPAERGPLVSDEAGAWLGETRDRASRWGLPVDDLVRGKEGSGVGADGWALGVRVPVPLAEHARRRFGRRPTSSPACPRARCRAWGFGRSIERLWSGRTEEGKMVRWMERGKRVLTHRVTNVDEAWLGRGRIW

SEQ ID NO: 56814 - protein, 438 aa, Zea mays
  Coding DNA Sequence Number=SeqID_13439
MPHRVAALLLLPLAAASEAPGPAAEAALLERHEIRGPGSLAACCPGGGRRGPSHGRVFVFSARAARARGECRVTALLVYLSPRSRQHLSSLALLATAAASPAAAPQQLPPPPLSLQPPMPCSRRCSLPGARAHRPATLRVLPPRLSASGIPAAAAAYLQAAAAAIAAGNAAKHRPCRCGRPSPGRRDHPPPHCCRNTSTMACAISQHPHSGLAPSGSRRPCSPPSVRRGRPRCSSALARFPSHGATAPHRRHPRQRLALLIRCRLPIHVRAGACAAHPSLLRLYSVARIRAAAASSDCAVTEQCLLTLLLSPASPIPCQVRRRPLPGWNRPVALPFLAFVGSVAAAAFSAGSTLLRPSRLDQPSLWLDRVSPSGSVAAVAFPAGSDIPLLFCRGRGHLDQRSRVRCCRPPWRGSLTSGRSKKQEERKRKDKVNMKKRQ

SEQ ID NO: 56815 - protein, 107 aa, Zea mays
  Coding DNA Sequence Number=SeqID_13440
MDVWCIGNEGVVLKVVPIKVGVIRRRLDHSTRTSGAIEGGVDAGIHDITLCLGEDDIALSLSNMSKAIVVALQAFTERGSSCRRLEGVEGEGAGLVITDCLIPFLQV

SEQ ID NO: 56816 - protein, 165 aa, Zea mays
  Coding DNA Sequence Number=SeqID_13441
MTASKKGTGKGDTLKGILLREGSGPRALLLIRGSKAGPSEGFDSRLRALGLRAHYWSEENSAACPAPTAVPLARVRLTAAKSNLRRHRKLRLARPQGSDSTSTSEDGLRLARPQGSDSTSTPEDGLRLARPQGSDSTSTSEDGLRLARPQGSDSTSTSEDGLRLA

SEQ ID NO: 56817 - protein, 239 aa, Zea mays
  Coding DNA Sequence Number=SeqID_13442
MARIRGTARKSMIPFLPSRLTERPLRRIVPSQSSHLERLHRRLHEEQEHRRQEQEQDQEQDQQDSSPSLQQESHNTNLSEEQELEGWIARPITRDVARGCHFHDALDTLLRRGFDRHTWSIEYRCVVYQPRRRLYLDQWEATCLRPFLEHYLITERDTAEAGIGVADGLDMKYYPRRSTGSVGGLIVSPVGEGNPKLNIMVNLAAVLHTELDHALDELGKMSENRHRGARRAQPGQQAP

SEQ ID NO: 56818 - protein, 92 aa, Zea mays
  Coding DNA Sequence Number=SeqID_13443
MEAKSHQQPNILMSTCKNYATSKAEYTNTQLDLPGALCPTHISRLHWFPGNRTGLTTLAYNAQIVPDCRRAMAALVPTIIRHGRLRLRSSEG

SEQ ID NO: 56819 - protein, 308 aa, Zea mays
  Coding DNA Sequence Number=SeqID_13444
MARLRHTARKSVIPFLPSRLAERLLHRPVAGQSSHLEKLHHHLHEEQQRRRQEQEQQGSSFSLQQEIESVRSCSPVLPLEAPPAPPLDAPASRVAAGGDPDDGSGDDSSSHDTDFSADQEPEGWVARPITRDAARGCHFHDALDTLLRRALDRRTWSIEYRCVVFQHSRRVYPDRWEATCLVRRPENSLWVRRPAQSTIPSLSGTQLRRPCKMPHGGVIVSPVGEDNPRLSSTVNLAVVLNTELDHALDELSRARAEIALLRAEHTERRHLDDGSPSPIGTQHPYRSPRRGHQSYGNPDCKTKIDLEP

SEQ ID NO: 56820 - protein, 176 aa, Zea mays
  Coding DNA Sequence Number=SeqID_13445
MTQCGKDQVEHAKDVWALYPGQTAHLTVPCMNALYCMQAVRGEAMFQLMGLVEATKITLDNREDLVVDLSTEMVEKDLQVEQMATQIQELEELVGARENTIEVLEDQLINTQQHLKEAKQHLDMHHQEIQDMEADEDVDIEGGVEPEPASSLDTTGSGRPPPPSQALPRLLIRLQG

SEQ ID NO: 56821 - protein, 74 aa, Zea mays
  Coding DNA Sequence Number=SeqID_13446
MRVCDYALSRKAQCNCVIMDSKIATLCEELCKLNMEVVSSGTLSYISVEPTLHEQIVMTQISDKGVQVIKNMLE

SEQ ID NO: 56822 - protein, 155 aa, Zea mays
  Coding DNA Sequence Number=SeqID_13447
  Gene Ontology: Mol. function=metal ion binding
  Homolog annotation: Hit_ID=Q656E5; Match level="QueryCoverage=92%, HitCoverage=39%, E-value=5e-41, Identity=57%"; Hit description =Putative uncharacterized protein OSJNBb0022N24.15
  Pfam annotation: Domain name=DUF789; Domain location=1-146; Score =38.2; E_value=6.8e-19; Accession=PF05623.3; Description=Protein of unknown function (DUF789)
MGNLWILAAKVSVLASRFPDLKKFRSCDLLPTSWMSVAWYPIYRIPTGPTLKDLDACFLTFHYLSTPSKDTDPSTPPCPNLGGLNCNMNAAGKLTLPVFGLASYKLKSSIWSSNRPEEQQLAASLTQTADDWLRHRQVYHPDFRFFLTHFNTALR

SEQ ID NO: 56823 - protein, 47 aa, Zea mays
  Coding DNA Sequence Number=SeqID_13448
MWLFAAVDDADVRPRDPRHGQRDPDPATCECAPPRRAGSPDAQDLAI

SEQ ID NO: 56824 - protein, 115 aa, Zea mays
  Coding DNA Sequence Number=SeqID_13449
MPSSSSSADTTPPAAASSEETLSSLMVEELRAGDSVDFGVSRMTSARVEDMQRLGYFSGGVARAPGTEEVPEPEGELVVFEAFFARRPPLACAPKRMGGDGVAQFGSCTFTPKTG

SEQ ID NO: 56825 - protein, 265 aa, Zea mays
  Coding DNA Sequence Number=SeqID_13450
MSGAHRTVRCPLLAVGSATCPAQIARPTVGPADRWLTGQSEKEIADRPHFDDMSRVVDQLLKLIATFIGLGRFNRYSTGTLGSDPTAHSRAVDWITRSDPSVCPQIDGYRYGGGSPENSGATNRRIVLRDLSNSSHVRAAITPLSTIRWSGHRRHWPTWQRLHDRTEFVEWENAMWVRGVSVRRMPDRAKGSQDTRTLRVEHPIRTPLQAPPLSHLTPTLTGPFLRAGERRRAIHLVSGTLWRPPPPAACRRAAEIRGSDLAPSA

SEQ ID NO: 56826 - protein, 34 aa, Zea mays
  Coding DNA Sequence Number=SeqID_13451
MAAPDPYMDEGLAPRTQPGRRFSACTPRGPEVDA

SEQ ID NO: 56827 - protein, 328 aa, Zea mays
  Coding DNA Sequence Number=SeqID_13452
MNALSREGCRHFEVFDQADEDFERDVYKVEDPVVKESAGALYDRMWGLHGCEVVRERAETARAQAERGERVDDFGALNSALPDPEPTLAEAVTGVALEPTLETAAITTAASTSAAAGEDLPPKVAEGAPDAPAAAVSSAEDPAAVAAETTAEAAAGPTAEPTAEAPAASGPSQVQDFGPAHATATTEFLAASTAEGGNEYGGFASEFFDFTDSGSSVEWTEESSEDLDYFAALDVAAAEASPHAADAPDVPGPSTGRRRRRAVAKRRVSAEEGARLRVSRAGRQELLPLPAAASTGERELRSLFAEVCTMKLCALACLCLRGRCVPLS

SEQ ID NO: 56828 - protein, 271 aa, Zea mays
  Coding DNA Sequence Number=SeqID_13453
MELDATELAQEAARHGRDQARADASTGPPWGSSRTRPHDTRERAGRRGMDEGEAGASLAATASKAQSARARAAGGAVEQSIGQQRTERERKELEGKLRDGDKKVNVDPDDDSDWLHRNETFQSNDYVAMTHLLTPGSVHDSVGVIGEPGIDVREYRLEHLRLYNQTPKQKEAKIEYMIKHRALQADTLNVASIAMEDPTYTPKVVHLTTDATEPDRSSSYRLRLGFPEFIRTPFLPAQTQTEDVGSFDMSSEAIRRKVPHGERQAILACRN

SEQ ID NO: 56829 - protein, 115 aa, Zea mays
  Coding DNA Sequence Number=SeqID_13454
MGSIVSVGKRARGDLICKLLASSGSCCRVEELRLCPGEVGIASPWLKGPPCALNFSPGVGIVAVRRVLCAGPLLLQSEVKMLHLVYSILNHVGSSENHNSITVAPNLAVLDPTIS

SEQ ID NO: 56830 - protein, 60 aa, Zea mays
  Coding DNA Sequence Number=SeqID_13455
MKEALDMIRIANEAVDEAVDKLLNEAAEKVAFKLYIPLGTTSELRDLLYIPLGTTLERKT

SEQ ID NO: 56831 - protein, 74 aa, Zea mays
  Coding DNA Sequence Number=SeqID_13456
MEKIVMISNYKCTFSLKEETTDQAKYGGKKSFEVLSAQEKVKETRNPKPGVKKKTCKVKVDRVKKSYGASRITT

SEQ ID NO: 56832 - protein, 226 aa, Zea mays
  Coding DNA Sequence Number=SeqID_13457
  Subcellular localization annotation: CTP_CleavageSite=33; ConfidenceScore=5.05e-01
MESIAPMWSQKRPNACKSPRTPCHAWTVTSACSADGDGAPTASGGLTVTRRAHPAPGGAAPLDPPYRLRLMLPASCSALMMLQPTRHGREGGGPAGPAWQLPPLETTTLRRVRVSRYRWFLGKAPYIDDLRKRDTFVVNQEVLFVLVGTNLQKKGLPAGPRNRGKATPHAPRLGDFAARSASPDPEAASATATLLAAAPAPPQNQRWGRERPPSLFILPVSRRRLH

SEQ ID NO: 56833 - protein, 427 aa, Zea mays
  Coding DNA Sequence Number=SeqID_13458
  Gene Ontology: Mol. function=aspartic-type endopeptidase activity; Biological process=xylan catabolic process
  Homolog annotation: Hit_ID=Q8S1V0; Match level="QueryCoverage=94%, HitCoverage=94%, E-value=8e-97, Identity=50%"; Hit description =Putative xylanase inhibitor
MPRRNPLLPLFLLPISALVLAWPASCTADPVPVLFPVAKDPATSLYTIPVRDGASHVIDLAGPLLWSTCDDDHLPANISCRDRLCKLANAYRAPSCGGGVAGHPCSKRCKAYPYNPVTGRCAAADLVHTRLVANTTDGRNPLSQVPVRAVAACAPRTLLDHRLPRDATGVAGLSAAGLALPAQVATSQRVANANAFLLCLPRSGSGDGVAVFGGRGPFFLKLFVTGEPSSGDLTRTLQFAPLRSRPGNPLYYVPVSGVAVGRAPVPLPPRALAAGGVVLCTRVPYTALRPDVYRPVVEAFDRGLVRSDMRVAAVPPFEFCYNRTLLPPTRLGYGVPEIALLLEGGKQEWTFVGSSSMVDVDARTACLALLEMKGVKAGDPSAAAVVVGGFQMEDHLLQFDLDKKQLGFARVPIPSACSNFNFTRGRQ

SEQ ID NO: 56834 - protein, 995 aa, Zea mays
  Coding DNA Sequence Number=SeqID_13459
  Gene Ontology: Mol. function=nucleic acid binding; Cellular component= mitochondrial inner membrane; Biological process=protein amino acid phosphorylation
  Homolog annotation: Hit_ID=Q8S1U2; Match level="QueryCoverage=72%, HitCoverage=93%, E-value=1e-178, Identity=45%"; Hit description=PPR -repeat protein-like
  Pfam annotation: Domain name=PPR; Domain location=358-392; Score=8.8; E_value=0.71; Accession=PF01535.11; Description=PPR repeat
  Pfam annotation: Domain name=PPR; Domain location=393-427; Score=1.3; E_value=5.5; Accession=PF01535.11; Description=PPR repeat
  Pfam annotation: Domain name=PPR; Domain location=460-494; Score =17.4; E_value=0.053; Accession=PF01535.11; Description=PPR repeat
  Pfam annotation: Domain name=PPR; Domain location=564-597; Score =36.7; E_value=8.5e-08; Accession=PF01535.11; Description=PPR repeat
  Pfam annotation: Domain name=PPR; Domain location=598-632; Score=8.0; E_value=0.87; Accession=PF01535.11; Description=PPR repeat
  Pfam annotation: Domain name=PPR; Domain location=665-699; Score=2.9; E_value=3.5; Accession=PF01535.11; Description=PPR repeat
  Pfam annotation: Domain name=PPR; Domain location=737-771; Score=1.0; E_value=5.9; Accession=PF01535.11; Description=PPR repeat
  Pfam annotation: Domain name=PPR; Domain location=818-852; Score =23.7; E_value=0.00067; Accession=PF01535.11; Description=PPR repeat
  Pfam annotation: Domain name=PPR; Domain location=853-887; Score =11.4; E_value=0.34; Accession=PF01535.11; Description=PPR repeat
  Pfam module annotation: Pfam domain module=PPR::PPR::PPR::PPR::PPR::PP R::PPR::PPR::PPR; Domain location=358-392::393-427::460-494::564 -597::598-632::665-699::737-771::818-852::853-887
  Subcellular localization annotation: CTP_CleavageSite=32; ConfidenceScore=5.02e-01
MARARLPLLLLLLVAFLAGTGSTAARHAAPAPASAPRASPSISAAPEYGAPLPRLPNQHQRPSALAPSQALAPDIMPVLPSPAEDGAAPPPDADEPTIPSSPSPPNPDALEPAWALAPFGSAPAVAAQSPAAAPAPASALVLLAVPWLLLVVVGARKKVVLAGWSASAGLAGSAARLAATTLCVLVKNCCFCCYISSAFTSLYLLGDYYLGDSCRAAPQPPPKLDAPRRWMRRHTPGLLAANLLRASSLLRPPSVLAARAALLHHAPDDAHRLLDETPRGRAAAIVRALTSAPSSSSGDTACIACLHCAALKSGAVLDPPVRTSLLAAYARAGRGAGAGAGAGAALALFREAVAPDVILWNAAVGALTTSCRYDDAAALFRRMARELGEFDSTTVVVMLSGASRAGNLRRGMELHGMAAKSCLGAHCLGAWNALVDMYAKCGEFRSAEVVFHSMPCRDTTSWNSVISGSIFNGLAEVSACYFREMSCSIFQPDEVSLSSVLSACSRLDDLFSFGESVHSCAVKLGYEDTASCSVANSLVTFYSEFGMPEAAKKVFASNLNRNLVSWNAMIKGLVQNERVTEALAVLRQMRLENQPDVATLVTIVSGCADQGLLSEGETLHGYVIRKGLLREEPSMGNSLLDLYLKCDEPSNAGLLFMTMPRRDLISWNTMISGYSRYGPLREEAQLMFKGLLSEGSSCSLATMLAVIPSCSIPEELSFGKALHSFSLKCGFTSSGVSAVNALIHMYMSCGDPLAAFSLIERIIPNNKGWRALQFYQKMEDFEPNEISVVASLVDMYCKCGRLDIAVRVFEASAEKSIAGWNSLISAFGFHGHGMKSIDLFWKMHDSGMKATKSTFIALLSACSHSGLVDEGWKYYCLMSEKFGITPAPEHHVCIVDMLGRAGRLQEAHKFVESLPSQQTHGIWGALLNACSSRSELKMGESIAKHLLHLEPGNSGYYVTAANLYAYKDMWSGVAQVRSVLQDKGLVKPHGRSTVG

SEQ ID NO: 56835 - protein, 192 aa, Zea mays
  Coding DNA Sequence Number=SeqID_13460
  Subcellular localization annotation: CTP_CleavageSite=34; ConfidenceScore=5.22e-01
MPAGRSSYLATMGSRSFSYHRLKKLPVAAPSPPPATTAPASRGLEHEGDPRRAAAAIEDSYRSYYRALVARGRRQRWRDGGGRQRPRPRPRRRLRAWGALARALRRRAAAAGALVRASVARVARRLREGRPYVGDLFAGNYMFLQVAPSPTTTAPPRGAVVPFADYYYGCKAKARARAAGQLHPAAGVLYKV

SEQ ID NO: 56836 - protein, 445 aa, Zea mays
  Coding DNA Sequence Number=SeqID_13461
  Gene Ontology: Mol. function=nucleic acid binding; Cellular component= ribonucleoprotein complex; Biological process=mRNA processing
  Homolog annotation: Hit_ID=A2WYW1; Match level="QueryCoverage=91%, HitCoverage=90%, E-value=0.0, Identity=71%"; Hit description =Putative uncharacterized protein
  Pfam annotation: Domain name=RRM_1; Domain location=122-194; Score =71.1; E_value=3.7e-18; Accession=PF00076.13; Description=RNA recognition motif. (a.k.a. RRM, RBD,
  Pfam annotation: Domain name=RRM_1; Domain location=34-106; Score =48.5; E_value=2.3e-11; Accession=PF00076.13; Description=RNA recognition motif. (a.k.a. RRM, RBD,
  Pfam annotation: Domain name=RRM_1; Domain location=369-440; Score =87.5; E_value=4.2e-23; Accession=PF00076.13; Description=RNA recognition motif. (a.k.a. RRM, RBD,
  Pfam module annotation: Pfam domain module=RRM_1::RRM_1::RRM_1; Domain location=122-194::34-106::369-440
MAEDGGKAAAASAAAAEAGGGGAKEGGEERTVKLFVGQVPKHMAEADLLALFREVAAVDEVTVIKDKATKVSRGCCFVICPSREEADKAVNAYHNKQTLSGASSPLQVKYADGELERLEHKLFIGMLPKNVTDTELTDLFSKYGNVTDLQILRGSQQTNKAGCAFIKYQTKDQALAAIEALNGKHKIEGSSVPLVVKWADTEKERQARKAQKAQSQLSHIPNASPMQQHSSVFGALQMGYMPQYNGFGYQPPGTYGLMQYPLSPMQNQGPFQNMVQPLNQGNSIRGVNPEVSPSSVQRSFNAMQLGSPYPAMPGMQYPGSYPGGPMGNRHLGNSHNPIKAPNSNANSTVSSSPSSNAGGQVEGPPGANLFIYHIPQEYGDQELSSAFQSFGRVVSAKVFVDKATGVSKCFGFVSYDSPASAQAAINRMNGYQLGGKKLKPAFILE

SEQ ID NO: 56837 - protein, 87 aa, Zea mays
  Coding DNA Sequence Number=SeqID_13462
  Subcellular localization annotation: CTP_CleavageSite=37; ConfidenceScore=5.09e-01
MIRQQIPVSQPILWSPLTTAGSILQAAAPKGAMHTLAASTDSARITRFNNENEAQADALNFGQSSGSLKNKKVTSAFSILLYILDSH

SEQ ID NO: 56838 - protein, 153 aa, Zea mays
  Coding DNA Sequence Number=SeqID_13463
MSIPSEGDASGDGEPEEPPVGFSQRLGQLPRHRPPASGSPALLLATTGALRRWLDAAVPPGYSASSSDPSASPNISSAMPSPTPSPAPAPSPTKNPAPGIPASPPAPSSIGQMPTAVCIELAGFGSFGSGLWISIRKGCLGFRGCGFLLEYIF

SEQ ID NO: 56839 - protein, 122 aa, Zea mays
  Coding DNA Sequence Number=SeqID_13464
MQTAVGIWPMELGAGGDAGMPGAGFLVGDGAGAGEGVGDGIAEEILGLALGSDEEAERLLRLPVAGSIAFGRDGHEENCIRHMRARERALFTDTRTGRHHAMSQDQIRPVPMSGLKPIVRLK

SEQ ID NO: 56840 - protein, 237 aa, Zea mays
  Coding DNA Sequence Number=SeqID_13465
MTYAETVVRQRRGVRLAWKPASTTLLVHGSAIPRLRDSRLCRCSWEDEILGCLPGRPAILALAPLIEGRAPFQGLPMRQPRHPRPHPPPPSTRAIPCPRSSPLRAILAPRAPAHPARPSLAPVVSQGSVVSALPRLARSPPRAVREHGGWGRQGGAEEEVKLNIDNMFTTLESLKKKGNKNRADGPSSSKNHGAGPALQQSRNCLKGGLLGSRAAHYCLASFTADDWLDNRIWGPSS

SEQ ID NO: 56841 - protein, 82 aa, Zea mays
  Coding DNA Sequence Number=SeqID_13466
  Gene Ontology: Mol. function=phosphoprotein phosphatase activity; Cellular component=nucleus
  Homolog annotation: Hit_ID=Q2QM47; Match level="QueryCoverage=56%, HitCoverage=4%, E-value=3e-18, Identity=97%"; Hit description =Serine/threonine-protein phosphatase BSL2 homolog
MEIDIGMEKLRNPPQQNPTQRKADIMELHSPLNTLGLTPLGEPPSPRAAHVATAVGTMVVIQGGIGPAGLSAEDLHVLDLTQ

SEQ ID NO: 56842 - protein, 66 aa, Zea mays
  Coding DNA Sequence Number=SeqID_13467
MRYELSYFRRLATVHLGRVAKGQDFLVGAAKNTIPVLVLVGTWSWLWLWLWLWLWLWLWLWLWLWL

SEQ ID NO: 56843 - protein, 127 aa, Zea mays
  Coding DNA Sequence Number=SeqID_13468
MDQEEEEEEGGFTVSIWSRRWWQAGLRFGPSCAGDSDGMSGHRAWSGRGLVAGWLGVGVGGGASADPAIREGSAIEGEGRGRAFGVGMSDPGREQFAAEGAVRGRNAGRKEEDARGSGHHGAAGEGA

SEQ ID NO: 56844 - protein, 175 aa, Zea mays
  Coding DNA Sequence Number=SeqID_13469
  Gene Ontology: Mol. function=iron ion binding; Cellular component =integral to membrane; Biological process=iron ion transport
  Homolog annotation: Hit_ID=A2Y2F7; Match level="QueryCoverage=86%, HitCoverage=23%, E-value=6e-38, Identity=52%"; Hit description =Putative uncharacterized protein
MDATIGESAPSVERAFEGQPHPGFWGLVTPRSMAVAVVYAFVFSMVSMRIYMIVGLVGAFNMPSNILCFVTLRGLVSLLRRCGIAAAPFTRQENVFLQTSVITCVNVAVASGFATYLVAMTSDLAKSLSESPDKEDVVEDVPMGRYGLLIFFATPSAIPESSEFIAETAWAPDSL

SEQ ID NO: 56845 - protein, 146 aa, Zea mays
  Coding DNA Sequence Number=SeqID_13470
MGGRAFAVRGAGSCRVPGSLTRVALEPLPAPPSATAAGRGSSADEIAGAAHGPTSNSTAFCPPLPHEFGHGRGPHGSSIRPEVIAAAVRPPGAEVVVVVAAGAGDGAFEREGPKNRFGRGAFEREDLFGPRNRLSERELLIAEGDE

SEQ ID NO: 56846 - protein, 198 aa, Zea mays
  Coding DNA Sequence Number=SeqID_13471
  Gene Ontology: Mol. function=metal ion binding
  Homolog annotation: Hit_ID=Q6AUF9; Match level="QueryCoverage=45%, HitCoverage=19%, E-value=5e-16, Identity=48%"; Hit description =Putative uncharacterized protein OSJNBb0053D02.12
MPNGNTQDYQAVHSSIHGPLLHFCQNPLHSMQAPQIQVPHQEFIDNNVVHGLNPSATGLPLHPRMLALPFNAEHTFGHPMHPTSSIVISATEVLSLAPQTLQVHVWDFSGQENLILMNEWNGLHDYFHADQAVASAAISDPSICHLRSFKAPCLHVIQNLLLAIVPEQPLILFLECTPDSSNGIMDNRLCSCVGYELQ

SEQ ID NO: 56847 - protein, 849 aa, Zea mays
  Coding DNA Sequence Number=SeqID_13472
MALRIVARSSSGRDLVEEFIGYEVWPLAHGWALGKVCPREMPSLGGRKVRSPRFALDLRGRDPTSVVREAEDGAVRIVGRYVPKTEAQRSWDIRGSNDRLNRVFELNSLLYGGYPGEDVVDRRGKKPAAVTEDDPAPEAALATKKRKLGTAVGEPGVSDSFAMELMGTCAAPGGRMSSPELRESSARMLETKYCCCCVGSDEQGSLGSCAEAPGGHQAPEARPKRARGTAKATAPSGSQPTLAAKPAAPGSSKVPESVKAAGVGGTKSAPDGAAKARELPSPGKRVADFGTNISVDDYLVGSGEGQLVVVPPAVATMVSVAVPGVKGSALSTGGEISAVAVVKDEAADFADRVASGALTADVSAEVERLRAQHADAVQEKSAADSKYRKLAEKVVALEGERTDIRRQLVEERREANQAIAKAQAAQAEAKLARVEGSLASQRAEEWEVQFNALQARMERAKASTRSEVERTCKQLVDSYRELGARTADFEVPDREAGLRFLEWLQEELLALPTIVEGFMSFASLVTCEGAMNALSREGCSHYEVFDRSDEDFGREIYKVEDPVVKDSAGALFDRMWGPYGREVVRERSDRARDQMARAEDVENFGPLNSAQPEAEANPVVAEVEVDPAPPPETGEGSLAAPAAAVSGGGSSPATAPMVENPPKAATELAAEDPPMAATEPAAEDPTAAARSSQVQDFGPAHATATANFVAASTVVAGNESDESAFKFSDFDDSGSSVEWTEESSDEDLDYFATLDVAAAEASPHAMDAEVLPGPSARRRQRRAVAKRRVSEVDGGRLRVGRAGKRELLSSPVGASVGEGELRSLFEGEELRLMLFNYREMGIILKVEPM

SEQ ID NO: 56848 - protein, 374 aa, Zea mays
  Coding DNA Sequence Number=SeqID_13473
MEMAREIGSGGVREEAATSCEEEVVSRVPSASLRRVTGMRDVAKGEMRLERVLGQEVVKRRFLLHSGYGAVDVNVERLGDLICPLIFLESGTAAVDARASSGSWSGSTEAGLLLAASSSRRCRWRLETMNGCSSSCPAVDRSSEHRVRLAPAQEVLGLRGQPPGHLQYGEAHRGEHVGDNASPRRATSVHLEDGALLYIFLKNACAEPVVDDPYIYLQTAVQAAGSTDVQTELPYKISDVLHEIGEQPKQAGSAWTKQTSNTTSWRFVLYHRLERRAVVVPSVCPKGNQQWICSLLVYIRPFVEQSRASIASQGNFLVLPNKSWYRDIDMLDRKRPLAPAAWIAELLNHQDYWKATGRYGAAIFNMATYTRQTG

SEQ ID NO: 56849 - protein, 77 aa, Zea mays
  Coding DNA Sequence Number=SeqID_13474
MTFWESDLGLAQSTANKIGVLAYPASVLPDQDPDEALASTAAVPDSRKMRGQIRSPSLSTLTSTAPYPECRRNRRFT

SEQ ID NO: 56850 - protein, 150 aa, Zea mays
  Coding DNA Sequence Number=SeqID_13475
  Gene Ontology: Mol. function=structural constituent of ribosome; Cellular component=ribonucleoprotein complex; Biological process =translation
  Homolog annotation: Hit_ID=O22424; Match level="QueryCoverage=30%, HitCoverage=16%, E-value=5e-15, Identity=88%"; Hit description=40S ribosomal protein S4
  Pfam annotation: Domain name=KOW; Domain location=121-150; Score =19.6; E_value=0.012; Accession=PF00467.20; Description=KOW motif
MAWRVAENPHRCTDAHCFSEKPFCQCKDETWSECLPYGLAVKPKKKAHYCSSIFMSMQQQLCLVSGDKWRWHYQFLDVPGMFGLLYSDIVWFNIFKVQQASRHQAIYLETNKIMDFFKFDVGNVVMVTGGRNTGHVGVIKNWEKHKGSFE

SEQ ID NO: 56851 - protein, 53 aa, Zea mays
  Coding DNA Sequence Number=SeqID_13476
MGLGVCGSLCQGGDEDDRFDYAYGTGCQQCNHYSGEDEVVEEDFQEFQEYDEF

SEQ ID NO: 56852 - protein, 50 aa, Zea mays
  Coding DNA Sequence Number=SeqID_13477
MYGLQVVMRMIDLIMLMVLVKKQQIFVASVPRWCPKKKIKTEVAGGSVLL

SEQ ID NO: 56853 - protein, 64 aa, Zea mays
  Coding DNA Sequence Number=SeqID_13478
  Gene Ontology: Mol. function=oxidoreductase activity; Biological process=metabolic process
  Homolog annotation: Hit_ID=Q2QVJ8; Match level="QueryCoverage=93%, HitCoverage=17%, E-value=3e-23, Identity=81%"; Hit description=NADP -dependent oxidoreductase P2, putative, expressed
VLENFGVCKVIASGQQDFKVGDLVWGMTGWEEYTLIHNPESFLKIKHPELPLSYYTGVLGEFIV

SEQ ID NO: 56854 - protein, 107 aa, Zea mays
  Coding DNA Sequence Number=SeqID_13479
MANGGEPNSDELISAGSLNDRIRGKWENWRVVVANRRQERVLRLGDDLTQHTVSSIYSGAKRWPVNLVWCGGGQRRKESLAHKISGCNRGKITDDLWIGQYESRRCG

SEQ ID NO: 56855 - protein, 70 aa, Zea mays
  Coding DNA Sequence Number=SeqID_13480
MDVFMIRYLGEDQQGLGKGQRVEQEQQGRPQQEGDQVRLGCDSILGSRTRISLHGEVIRVSWVITNGAVV

SEQ ID NO: 56856 - protein, 30 aa, Zea mays
  Coding DNA Sequence Number=SeqID_13481
MARVACTLRGKRLDGGASVLAVVLKQEENQ

SEQ ID NO: 56857 - protein, 88 aa, Zea mays
  Coding DNA Sequence Number=SeqID_13482
MATERWRTDNKKSEKDSHDAKEATKAAEKAAELERRIAELSPPPEPFEPTADPEAKREEEITKMAEAILDKAISQLLNKVVEVVLKEE

SEQ ID NO: 56858 - protein, 139 aa, Zea mays
  Coding DNA Sequence Number=SeqID_13483
  Homolog annotation: Hit_ID=Q6J9V9; Match level="QueryCoverage=48%, HitCoverage=23%, E-value=3e-16, Identity=70%"; Hit description =Putative uncharacterized protein
  Subcellular localization annotation: CTP_CleavageSite=37; ConfidenceScore=5.46e-01
MQAACYRAKWAHPSDFQRTQHGGPGPRVMQPARRLLRASNCTAARTTTTPPRLRDQYRDSRQPYGPGKGDTPKRILLREGNRPRASLLIRGSKGWPLGGVQQPPQSAWAPHPLLVRGSKAGPSEGFNGRLRPLGLRAHY

SEQ ID NO: 56859 - protein, 68 aa, Zea mays
  Coding DNA Sequence Number=SeqID_13484
MAADFLAFLPFSTAKQLLRHGASVEALILLFVDFFTGLFTFNRHLFLIFGFTRFNFYFHMVELPPVDG

SEQ ID NO: 56860 - protein, 77 aa, Zea mays
  Coding DNA Sequence Number=SeqID_13485
  Subcellular localization annotation: CTP_CleavageSite=22; ConfidenceScore=5.21e-01
MAHQASSLPLVRGKVASQTPTPAEARGKSLAAPTPAPGVGTPARRASDDAVSPGDWTDLAPCDVVDASPGEKAKRGS

SEQ ID NO: 56861 - protein, 290 aa, Zea mays
  Coding DNA Sequence Number=SeqID_13486
  Subcellular localization annotation: CTP_CleavageSite=36; ConfidenceScore=5.49e-01
RLPVQSEHPAARVPPVRSRRRAPSRHAAARPSAPPRARQRRRAPGRPAPPCPPSLVSVVPHTAHIAAGPPIALTNAAAAAATSRSVVAASSSAAAAPKRRLRPRPHLRTNYDTHKRDCLTHTLYSYTAAIMGDRHDWMYEGFKKGGCHTSEWNWEDLSFDGKGHHTQVNLTLGSLCRLHYPGIVKVSNGDTEDELRYRLPDGEDYMGHAERVFQNNAKKLVMVPWMAPVPDAYYAWCRYWASEGFQKASAHHRQCRGTNPNHKFGGDDMIRKAKRMEATSGQKPSDIEVY

SEQ ID NO: 56862 - protein, 168 aa, Zea mays
  Coding DNA Sequence Number=SeqID_13487
  Subcellular localization annotation: CTP_CleavageSite=57; ConfidenceScore=5.22e-01
MALTSTSAMNRWIPQWCTQVVVAKRMDDTHSSTDSLTRRRSCSRRPNEQELEIMRMREEMRQQREFMEACNAHNQAMYQLMHQQGMTSNFPPPPQWSQFANTPVPPPQFTTPPTHIPAPGDRVTPEAGGSGSDPAAGTGFVDSLFAFPPPGGGGGSVQSSNHPSGGYL

SEQ ID NO: 56863 - protein, 341 aa, Zea mays
  Coding DNA Sequence Number=SeqID_13488
  Pfam annotation: Domain name=zf-CCHC; Domain location=31-48; Score =16.8; E_value=0.0044; Accession=PF00098.14; Description=Zinc knuckle
MGMIRKINLMGVPLQVEDLLFNIDRKKKRKRGCFTCGEQGHFRDNYPSMTEPTKGRSKGKALRSVTTWDDSSSEDEPPRTHSHRSSSRSSWSSRKCLMARGKMSNPSSSDDSSSDDGEALSKKNEKLKAKLAISQEAIENLIGKIEILSIHTNELTTKLENIGSTSEASLIEIPEIIKKDASTSYFDLIDDSNPCNQVLVENVVLETCSNGVAKENEQLRKATSLTNASEDRDKQKQKPSSKISNTYINKVNKKAATPYLIKKKKNGKVIAIKANKKVNKGKGIKHIWVPKKIISTKKSTKKVWIPRGKKSKGLQGIWRFGKIGTYIMGCIILDQVYCQVG

SEQ ID NO: 56864 - protein, 428 aa, Zea mays
  Coding DNA Sequence Number=SeqID_13489
  Pfam annotation: Domain name=zf-CCHC; Domain location=121-138; Score =23.8; E_value=0.00038; Accession=PF00098.14; Description=Zinc knuckle
MEDLSTMTPTIVIEKITAFEMSRKMCQGEEPTSSRPYAFACDERKGKKKASTPSSSSEVEEEEENDDEGNNQPSTSSSEDEKTIRRVGKVMRMIRKINLMGVPLQVEDLLFNIDRKKKRKRGCFACGEKGHFRDSCPTMVEPKKKRSKGNALTSVKTWIDSSSEDEPPRTRSHRSSSRSSHKCLIPRGKMSIQSSSDESSSDDEGEGKPSVDELAEAVKFFQDDAKGTWTKALRKATPQKKTLRRSSKVQEEKKWHRGGKITGLSGVKSGLSGKTEHRLPPRVGLGQTEQCLLSEVGLEQDGTTSLIQGAMNYVSHPRLASSKMEHHLPSEVGLGRDGTTSPIRGWPRAIWNNISYLELALSETERLYAHKDSRDISLPQAPELQQLIPPSGLGEVGSGTRAEEAVTEMGNDSASEPMKQLVARRVIG

SEQ ID NO: 56865 - protein, 124 aa, Zea mays
  Coding DNA Sequence Number=SeqID_13490
MGGTKEVPHTSYDEAAEADHGGEWLNSEAPTPVMICRTHSRCPCHFLGTVQAWRSRGAGFSFYTQGDRVQVAVSVEFVVALCLLPRHQGEKMELTMRGHMASGPRGRETRLHGGEEEKEKPGRL

SEQ ID NO: 56866 - protein, 274 aa, Zea mays
  Coding DNA Sequence Number=SeqID_13491
MALAGLWHDAGHARSGAGVLWRAQNVSNTWKCPSARVQTPAEIANMRILAKIRHRPLPGTYGYLPYVNKLLNFVPKVQAARMRNTLLPISAEYLSIAGVHKLEMSRGQWSVELIQPDCGSWACLAKQVIGRLTKRAMEHFCAPARGWPWARRNNISCPRLASGETEQHLHPRLASGETEICLLSEVGLGASVVRWPWVRQNNISGPRLAPGEMEKRLPSEVGLGQEGTSYPIRGWPQGRWNYVSRLRLASGEMEQHLSFKVGFGQDRTTSLVRG

SEQ ID NO: 56867 - protein, 165 aa, Zea mays
  Coding DNA Sequence Number=SeqID_13492
MTSHRSSDDGNALSHTDGLAREGFPRILWEVLQGARYTTPPQYAVQQFEKHRVPRCRDTIEAIALHGLTTFCGFHPLELSTHPIGLFPAEREDDPMWKDRVEHAKDIWAIYPGQTAHLTVRCMNALYRLQVMRCEAMSHLMALLEATKITLDNREELVVDLSTEM

SEQ ID NO: 56868 - protein, 144 aa, Zea mays
  Coding DNA Sequence Number=SeqID_13493
MVSPVSCKRVIRVDVRAPFVGGRLGAQRHAQKYLRQPARQLLDAWAWASPLACQKSEKRVHLARLHAACMAARPFRPLVWAKPGCTPPPVVTQDGDLRLDGGGKRAGLRPLPLPQPQGFSSPRLGRGERRVGVGPCAGGGPLLH

SEQ ID NO: 56869 - protein, 90 aa, Zea mays
  Coding DNA Sequence Number=SeqID_13494
MESHDLRAERESRLVGGDVNGGFGIDSGDGKWHSFRLERMARLRHTAWKSVSPFLPSRLAERPLRRPVTGQSSHLERLHHRLHEEQERRW

SEQ ID NO: 56870 - protein, 56 aa, Zea mays
  Coding DNA Sequence Number=SeqID_13495
MATVELMEEDDTSRLSELIALAEKCGEAEAEDQLFSQATDEAEANYYKRKAEKYDA

SEQ ID NO: 56871 - protein, 95 aa, Zea mays
  Coding DNA Sequence Number=SeqID_13496
  Homolog annotation: Hit_ID=Q5NKP3; Match level="QueryCoverage=82%, HitCoverage=40%, E-value=1e-10, Identity=45%"; Hit description =Putative uncharacterized protein 9C20.7
MYDKLWRRRRLDAVQSGCSALSIVKQGDLMVVANVGYSRPSQESLVLGMSRTFDDYYIDDCGIILAPEVTQGRTDNNDQFVILATVEVAFVPTCL

SEQ ID NO: 56872 - protein, 50 aa, Zea mays
  Coding DNA Sequence Number=SeqID_13497
MEDLIGGTLPPDFHERAGTSVSRQTRGREEIGPWTGEGVPGPRQTVLQNM

SEQ ID NO: 56873 - protein, 158 aa, Zea mays
  Coding DNA Sequence Number=SeqID_13498
  Gene Ontology: Mol. function=catalytic activity
  Homolog annotation: Hit_ID=Q5NKP3; Match level="QueryCoverage=87%, HitCoverage=44%, E-value=2e-33, Identity=55%"; Hit description =Putative uncharacterized protein 9C20.7
MTRKAWRLSVRPLEAVLRGPCTPVYGKLQRSRRLDAVQSGCIALSIVKQGTSWSSPIPTTLGLFWAPQPTTTPSRRPAHHPPEAQPATSSTSGGATTRVYYLADEPGVHFIWQPSQESSVLTMSRTFDDYYIKDCGVISVPEVTQRRTDNNDHSPSSG

SEQ ID NO: 56874 - protein, 197 aa, Zea mays
  Coding DNA Sequence Number=SeqID_13499
  Homolog annotation: Hit_ID=Q4VDM4; Match level="QueryCoverage=19%, HitCoverage=7%, E-value=1e-06, Identity=64%"; Hit description=Cyclic nucleotide-gated ion channel 2
MDAGLASAVTMLRTCTDVVHLAHVLEQFRLAWCGKLVRDTRAVAPSRASASTSSSLGVETELSMYAGGERCDRYYPCLINYDNGDGHDIWSGSIRTSGELGTGDRMAASGAKIWRSQPSRAVDEVFACDSIIRGRAVLLAAPVPPPLARTPAIGRELLMGETKIGRDIGDNPCRVHPLLTSRNHGSGLQVSVNLARN

SEQ ID NO: 56875 - protein, 170 aa, Zea mays
  Coding DNA Sequence Number=SeqID_13500
MAAGEVYHGRTTTRWRGDGCCVVADSVPGRPQHAAPGNPAALATRACGIADDWEGEEQLAAHLGVLLPVVDLPIEPSAIAKPCTRPPFSQNGMGSMHCGDGRAQIAGFHRRSRGREDPGAEARMEGHGRENGGNNGEMQRREDPWEARLWARQSRGRSHGEVVDAHVRVL

SEQ ID NO: 56876 - protein, 272 aa, Zea mays
  Coding DNA Sequence Number=SeqID_13501
  Homolog annotation: Hit_ID=Q6J9V9; Match level="QueryCoverage=39%, HitCoverage=28%, E-value=2e-08, Identity=41%"; Hit description =Putative uncharacterized protein
MQAACNRTKGAHPFDFDASSMEAQAHKSCNRRVGYYVRETAPPIAPVPRLLDCGTGATTRGNPAHGPTVPTEHIGHGSVSRKRRRDSRYGQKWVGSNGGGRRAEAAVKSSAGSRPLLGQRENPLPRREDDAPVFRSSNGSRTHNGCLANHSSRRINSAAGQATPLAGEAGTGKGDTPKGILLCEGSGPRAPLLIRGSKAGPSEGFDSRLRALGLRAHYWSEVRRLPPRKGSIAASGQSGSAPTTDQGFEGWPPEGFDSRLRTRRARDDSGYV

SEQ ID NO: 56877 - protein, 346 aa, Zea mays
  Coding DNA Sequence Number=SeqID_13502
  Homolog annotation: Hit_ID=A5BKV4; Match level="QueryCoverage=89%, HitCoverage=82%, E-value=1e-17, Identity=27%"; Hit description =Putative uncharacterized protein
  Pfam annotation: Domain name=UEV; Domain location=29-152; Score=63.5; E_value=7.1e-16; Accession=PF05743.4; Description=UEV domain
MAMAAATGTVVLVDAALAPYEHPDLRWLVRKHVLAVLQDFPTLSPSVDTYTSDSGASAVLLNARGLLTVSPALPPVLLTLWLPLEYPYLPPLVYVFPAAPPASLARDHPFVDHRTGRVRQTLPYLEDWAVPRSSVAGLVRSLVGALRMCHPLTSRFGSVVHATATARATTTTTPTPEEEEQERMHAALLDELVSRLGRDAAAFRGHVDEDIHALSSSQGNLRARADAMDRAVRDLEGERMRLERAVTASLSHRGELLSWLHKTSCAPDDAGAALLLAPHGAAGGDAPRWLESKASELAMDDTVDALGRALEDGERVIGFHEYIKRVKEAENVAIGGSAFFTLLIVC

SEQ ID NO: 56878 - protein, 146 aa, Zea mays
  Coding DNA Sequence Number=SeqID_13503
MTVAGGREQRSRRQPSSRPIRGQQENPLSRREDDAPVIRSSNGSRTRNGRPANHSPHRINSAAGAVITAPKKGPGKGDTPKRILPREGTGLRAPLLIRGLKAGPPRGSTAASDRVGPTPTTGQRFEGRPPEGFHGRLRLLGLRAHY

SEQ ID NO: 56879 - protein, 105 aa, Zea mays
  Coding DNA Sequence Number=SeqID_13504
  Gene Ontology: Mol. function=catalytic activity
  Homolog annotation: Hit_ID=A2Y3P0; Match level="QueryCoverage=84%, HitCoverage=38%, E-value=5e-18, Identity=44%"; Hit description =Putative uncharacterized protein
MYDKLWRRHRLDAVQSGCSALSIVKLGDLMVVANIGDSRVVLGTAFNDDPSQESSVLGMSRAFDDYYIEDCGVILAPEVTQRRTDNNDQFVILATVGVAFVPAFL

SEQ ID NO: 56880 - protein, 225 aa, Zea mays
  Coding DNA Sequence Number=SeqID_13505
  Gene Ontology: Mol. function=tetrahydrofolylpolyglutamate synthase activity; Biological process=folic acid and derivative biosynthetic process
  Homolog annotation: Hit_ID=Q2QLY6; Match level="QueryCoverage=31%, HitCoverage=13%, E-value=6e-20, Identity=70%"; Hit description =Dihydrofolate synthetase/folylpolyglutamate synthetase, putative, expressed
MATTFSSSSSSLEEELLEYSISSFAPTILPVAIGMLLLCSLLVVCRLLALVLRCPTPASSPQSAPADPTTAQALTQHLSVSRGKEHLRVTSAIARSTSPPAAAARPRRMLGHRFPTALRLPHGLLQRRSIMARRGLTIMAGGEAEGPLAGFFDYMERLRNYERSGVPRGAGTDSDDGFDLGRMRRLLRRLGDPHTHFPTEHIAGTKGKGSTAAFLSNIMRAQGYN

SEQ ID NO: 56881 - protein, 274 aa, Zea mays
  Coding DNA Sequence Number=SeqID_13506
  Subcellular localization annotation: CTP_CleavageSite=29; ConfidenceScore=5.51e-01
MSSHSPHASRPSTFRAPGWGAPVLLSSCRCWRNATSRKLVPFGHCSASRIFIRQPDCIPSPVVTQDGDHQFDGGEKQAGLRPPPRPQLQGCSSSVLGRGVRRVGAYLRAGSGSLLPSVIGGGGGKGVSRSWRWQLPRVWLSVLSGFGAASGATSHRGSRKRFLYRRDSRCHPWTDLRLYGLGSLSSPLEWGRGRGPCGNSVCPEVIAAAVWPPGAEVVVAAARAGGGEPPRVLSSRRPSNVGGCSYPREWNRSSICNGTLNVAVCSLWLSGPEH

SEQ ID NO: 56882 - protein, 250 aa, Zea mays
  Coding DNA Sequence Number=SeqID_13507
MTASKRYATSFKFISLFLFPFLSLATGTGKGDTPKGILLREGSGPRALLLIRGSKAGPSEGFDSRLRALGLRAHYWSEVRRLAPRKGSTTASGHSGSAPTTDQGFVGWPPKGSTAASEHAERGMTLGFPKEDGGFIQAKSGDSFLSYHGTEAAPQCFCGGELAGDGQNGPLATNLPDRDNLNSESTMVNTVMWLTERAELWRKQATTGCGERLGASTGEEFPDCPARGVTLMRGNTFLPRSDVSRAKPEL

SEQ ID NO: 56883 - protein, 288 aa, Zea mays
  Coding DNA Sequence Number=SeqID_13508
MASPVDVAGLRPRLGDVEAPPKPRSSLSSVAEVESEPLVRARRRPSAEARAESEPWGRAERSSSSSRAEPKSEPWVGRSGPESEPWVGRSGVRRLSGLSPSPSPGSGGAEFAVFRGLARVRALGRAKRSFLWCLRPGPDCLSASLCQVAPQSEWRKRRCLSVRPLYADGGYQLRIRSLEGTPNYGPRHQSQLGLGAPDSVRWCTGQCLVRQAGSGELAALGKKLTAYGYNSPDCPVCTGLSGEPTVSRANDRLRDQRGTRGRANGREGAPDSVRCANGSQAPTVGFAK

SEQ ID NO: 56884 - protein, 353 aa, Zea mays
  Coding DNA Sequence Number=SeqID_13509
  Gene Ontology: Mol. function=transferase activity, transferring phosphorus-containing groups; Cellular component=membrane; Biological process=two-component signal transduction system (phosphorelay)
  Homolog annotation: Hit_ID=Q2ACC1; Match level="QueryCoverage=56%, HitCoverage=22%, E-value=5e-90, Identity=79%"; Hit description =Histidine kinase
  Pfam annotation: Domain name=HATPase_c; Domain location=162-266; Score=72.2; E_value=1.8e-18; Accession=PF02518.17; Description =Histidine kinase-, DNA gyrase B-, and HSP90-like ATPase
MNRPRLETQYAVNGCGGEQVRRDSQLMRKVLSFGGGILQWQMEAPKEHNLDGNLSATMELTPNNSAHGGICAGAAGEGELCDGAGGREVVKGEGRGRDQGKGSGSAIGSSHQKGGRRNENRVRWPLAINKKWHRRVWESESGTEQKLPKTKSQQDRQNSWQYFKMLLSDKESLLDDLEGENSDQSDSDHVTLAISIEDTGVGIPLQAQDRVFTPFMQADSSTSRNYGGTGIGLSISKCLAELMGGQISFVSRPFVGSTFTFSATLKRSYKDTSVDSSRSFAVTRYHLKRLGIIVQVVNNLSAVAKAFPGQNGATVSREKATILFIESDFWRPETDVQLLNHLRENKNRQLSDG

SEQ ID NO: 56885 - protein, 18 aa, Zea mays
  Coding DNA Sequence Number=SeqID_13510
MAPPALVNATAGVCDYAY

SEQ ID NO: 56886 - protein, 146 aa, Zea mays
  Coding DNA Sequence Number=SeqID_13511
MSTEKRHLDQIELLSVRRLLFDHLIFSCGGCETARFIGRSSTGFLADSHRSKINQGPPRTDLSPTALAPFGELRGLGVNLQRHREQSTTDGGFYFQKVQGLLCNCGTVKGIAEHGPFDSHSRAQIRFNIYRTDVSVTSDGSEYNVT

SEQ ID NO: 56887 - protein, 313 aa, Zea mays
  Coding DNA Sequence Number=SeqID_13512
  Gene Ontology: Mol. function=nucleotide binding; Cellular component =intracellular; Biological process=signal transduction
  Homolog annotation: Hit_ID=A2ZNL3; Match level="QueryCoverage=98%, HitCoverage=42%, E-value=1e-145, Identity=82%"; Hit description =Putative uncharacterized protein
  Pfam annotation: Domain name=GTP_EFTU; Domain location=1-106; Score= -50.2; E_value=0.00022; Accession=PF00009.18; Description=Elongation factor Tu GTP binding domain
  Pfam annotation: Domain name=GTP_EFTU_D2; Domain location=128-195; Score=45.2; E_value=2.3e-10; Accession=PF03144.16; Description =Elongation factor Tu domain 2
  Pfam annotation: Domain name=GTP_EFTU_D3; Domain location=201-308; Score=26.9; E_value=2.4e-06; Accession=PF03143.8; Description =Elongation factor Tu C-terminal domain
  Pfam module annotation: Pfam domain module=GTP_EFTU::GTP_EFTU_D2::GTP_ EFTU_D3; Domain location=1-106::128-195::201-308
MAKEEKVLAQTKEHAQLVRSFGVEQLVVAVNKMDAVDYAKERFDFIKLQLGSFLRSCNFKDSAITWIPLSAVENQNLIKAPSDARLTSWYQGFCLLDAIDFLQLPSRDVSKPLIIPICDVIKSQSTGQLAAYGKLETGAIQIGSKVLVLPSGQEATVKAIERDSNSCTVARAGDNVAICLQGIDGKQLIPGGVLCHPGFPVPVANHLELKVLVLDITTPILVGSQVEFHIHHVKEAARVTKIVALLDKTGKPSKSAPRFLKSKQNSVIQVTLDGAVCVQEFSKSRALGRAYLRSAGRTIAVGVVNRIIGQDQN

SEQ ID NO: 56888 - protein, 114 aa, Zea mays
  Coding DNA Sequence Number=SeqID_13513
MGVPDFCARWRAFNALQLKGGTYKDTEPRHMGPGAKWKEVTTACNARVIFERHNVCSAYSIDIPRCFLGNARVMMSIVYAAAWAYCLPTEWTGTPSARWPGRRPSAEWTGHIKC

SEQ ID NO: 56889 - protein, 95 aa, Zea mays
  Coding DNA Sequence Number=SeqID_13514
MAHRTVRYATGAPTVRHRCANGHFQRLVLTQSRWTHGAPDSEQSTVRCTPDSPAALSGFCDWEGSAVNQPGPTWQRVHRTVRCTPDSPVPQSQKP

SEQ ID NO: 56890 - protein, 594 aa, Zea mays
  Coding DNA Sequence Number=SeqID_13515
  Homolog annotation: Hit_ID=Q6JAD6; Match level="QueryCoverage=52%, HitCoverage=46%, E-value=1e-134, Identity=71%"; Hit description =Putative uncharacterized protein
MQCPVHRQPHAQIPFSCALSGGSPDSYCALSGVHRTCTVDCLVRPYCVLKKRLQPEAEPEALSFLSVLWRSNPLSGDLLTGGDPPATKCSSPAFSPSVVRSGCRARRMCRRQGEEMMRTLLAPLGRSRERPCIWSSRKAARSDVWTEQPEQRQQPLSRQSKEISCIFLQIRLPIEFVVMPLVLAPTTPSTATTPPPTLPAPVTPVPSTTSAIPTTSTTPASTAPASAPPIPPARFREHDETEVRPLAVDHRLFDLQRATAARVRRFRNVPVENWLPAQRDPAAADPFSTRIQDSFYRAQLSVQIAKRTHQLWDLPAFLLAAGADYEVHLSYLSGLLPLLTTSGRYVEEWVQVFYATVWIDPDHHWMRFRFEREDVIIHASQIRQVFGFHESSTRLHSMCYGTSDPPRRPHGGVAPGTAHVAALFRPPFSDGSRRSSADFTTAARFLYQLMRQTLLPQMGHREAATHIQLWLLGALVSHLEFDVVDFLICEIEDTVLDGLRARRQLPYAHNMCHIFAQLIRPPQFQVIDTQAEDTTFHQFETQDAAVHDDDDDDDDFGVPPPPPPPMPPRTHDHEAGSSSGAAPPAIDPALAAIL

SEQ ID NO: 56891 - protein, 141 aa, Zea mays
  Coding DNA Sequence Number=SeqID_13516
  Homolog annotation: Hit_ID=Q6JAD6; Match level="QueryCoverage=86%, HitCoverage=16%, E-value=6e-10, Identity=37%"; Hit description =Putative uncharacterized protein
  Subcellular localization annotation: CTP_CleavageSite=15; ConfidenceScore=5.46e-01
MTLMLQHTGVPIPPVQSAPPPPLHAPVVPAIQPGPPLPTVGPSSSPLRPVTLVFTSPVIGSVSSQPPVPPTPVVTTAVVAVSVTSLAPAAPAAQLPSESVPAPASTADPGSETDSDPQLAFALLPRPQPDAPLPPPPSSDA

SEQ ID NO: 56892 - protein, 176 aa, Zea mays
  Coding DNA Sequence Number=SeqID_13517
  Subcellular localization annotation: CTP_CleavageSite=80; ConfidenceScore=5.65e-01
MSLSLWLFHISRCSLLLPFLLSRLLPPWARTTSASVSQLLHRRSLVTRSTQRRSSPLSLRGPGSHPLRESSDDSDDSQGLAAEVWTYIRAVERSGLEGSDESEYSSDEEDSDGGGEDDDDDDDDDDGGDGDGDGSGRGSGGGSKDDGGGSRGSDRGGSSRGSTRGGSGGGSNRASG

SEQ ID NO: 56893 - protein, 201 aa, Zea mays
  Coding DNA Sequence Number=SeqID_13518
  Gene Ontology: Mol. function=kinase activity; Cellular component =ornithine carbamoyltransferase complex; Biological process=amino acid metabolic process
  Homolog annotation: Hit_ID=Q6QP54; Match level="QueryCoverage=42%, HitCoverage=23%, E-value=7e-13, Identity=50%"; Hit description =Putative kinase
MRGAIITRIAERARWDAGLVPRSLSQLGVGPGLGEVEAPPRSRSSLSSEAEVESKPLGRARRRPSAEARAESEPWGQAKRSSSSSGAKPESEPWGRVKRSSSSSGAEPESEPWGRAKRSSSSSGAELESEPWGRAKRSSSSSGAEPESEPWGRAKRSFLWRLRPDLAAVSLTLSSGIAVRAAQAALSSCQKLMKILHPNMG

SEQ ID NO: 56894 - protein, 141 aa, Zea mays
  Coding DNA Sequence Number=SeqID_13519
MTLGTSDTWPRLGLRSRCTLGHFRDRQERFCNGIPSEGGIEPSDPIKRDRVRQITCRVRLTAAESSLKRNRKLCLARPWASASGGGLCLAQPQGSAPASASEGGLRFARPQGSASTSTSGGIAPSPDLSLGLRRSLRLARP

SEQ ID NO: 56895 - protein, 83 aa, Zea mays
  Coding DNA Sequence Number=SeqID_13520
MAAKSRYTRRLPLRREVAITVANPDGFAYMHLAIDVGFALANLRGGACGHRRGRTDGEVLNNSEVHNPIIVAPNLAILESTIS

SEQ ID NO: 56896 - protein, 292 aa, Zea mays
  Coding DNA Sequence Number=SeqID_13521
MVQCNVVDGSNIYIYLSLLVQGLRLEILVQHRLSEEKATRFLYRKHRWSSWRTAGKIPTSLLRCTSEFVTKRFEFSAGCYEQDDEDDVIMSVIVPYNQLKFLKALFRVYTTHPIGLFLAKREDDPMWKDRVEHAKDIWAIYSGQTAHLIVRCMNALYRLQVMRVEAMSHLMALLEATKITLDNREELMVDLSTEMVEKDLQVEQLSNDIQELEELVGTRENTIEVLEDKLINTQQQLAEANEHLDMHHQEIQDMEANEDVDIEEGDEPASSVDTAGSGRPPSPESSVASFAH

SEQ ID NO: 56897 - protein, 291 aa, Zea mays
  Coding DNA Sequence Number=SeqID_13522
  Homolog annotation: Hit_ID=Q6JAD6; Match level="QueryCoverage=56%, HitCoverage=22%, E-value=5e-69, Identity=74%"; Hit description =Putative uncharacterized protein
  Subcellular localization annotation: CTP_CleavageSite=57; ConfidenceScore=5.02e-01
MFGAPGWASRGICHCAVLSGVHRTVIVRCPPAVQLSDICLSRTVTALPSPAVTTVIRASVIFSLWKVLHPEIAISPSNPNPTHQVLVCLLARLRDSSPAWFFSLETYPDVSAFRIVADAESESHITYLPGLYSLLTFGGRYVEEWVRVFYATIWIDPDHQWMRFRFDREDITLHTTQIRELFGFPESTTRLHNLFYGTSDPPRCPHDRVAPGTAHVATLFRPPFSDGSRCSSVDFTPATKFLYELMRCTLLPRMGYRKATTRIQLRVLGALVSITPGFGRQTECEPCTCQD

SEQ ID NO: 56898 - protein, 98 aa, Zea mays
  Coding DNA Sequence Number=SeqID_13523
METNGHLDLDTGGAIGSTQTNKKNKLRFKKKGAKETEGCPGLAHRTVRCTREINSELLTFGFSPGHSAIIHWTVRCSTRLSGVPCGATTTVPTVVCKR

SEQ ID NO: 56899 - protein, 107 aa, Zea mays
  Coding DNA Sequence Number=SeqID_13524
  Homolog annotation: Hit_ID=Q6EPV6; Match level="QueryCoverage=83%, HitCoverage=26%, E-value=5e-25, Identity=65%"; Hit description =Putative uncharacterized protein OSJNBa0016D04.11
MGHLNPQTLGEAVLKVKTKTSRSLQKSGRGNQVQGEGPNWVLVAGGFLLSALSVKIGCKLKQWFNGKQQNNTSKAKRRPEACELHSDLYRFSDQTGCCYSVSFFFFL

SEQ ID NO: 56900 - protein, 97 aa, Zea mays
  Coding DNA Sequence Number=SeqID_13525
MCKVVATFRRTFAITFDGSLTRDNIEGKARILEEVALHALRDEEELRRHACASSGTYERVMAPPMGVFMACLEEHLLGRRNHAWSDQGLIRPRFRRQ

SEQ ID NO: 56901 - protein, 269 aa, Zea mays
  Coding DNA Sequence Number=SeqID_13526
MQYNGSSSLISCEKQTIRIEFLSLQVTALVPTITGMGDHVSGRVRGKVYGQVHSGSGAGSGGYLLSSSLLRHEDVLSVSEALAVTTVYGSTAGVDGIARSTCAGGCSRRRRVCRPNHGDLVQSNGTVSFTGWHRGCVHKESKNGAEDYPVYARRRSGGVRRPWTGLSGEANSDSSLGELHRGGSGSRGHAVHGQTPVGLGSDEVERVRRGTVKSASNTWPLISAFVLAPDEQPNWRQVLSVCTVQPETKQAPTRVKRSWLGFKLFQGVP

SEQ ID NO: 56902 - protein, 125 aa, Zea mays
  Coding DNA Sequence Number=SeqID_13527
  Subcellular localization annotation: CTP_CleavageSite=38; ConfidenceScore=5.12e-01
MARARAYKTPRDLDRTPPHALNLAGAQTHRRLPVHGVSAAVRSPCHRRPASKAFPNPVQPSEKTVHTSVKLPERGIGVRFAREASPRSPDSTRPPASVDRVILSSILRFLVHTASTPPREAHCAI

SEQ ID NO: 56903 - protein, 62 aa, Zea mays
  Coding DNA Sequence Number=SeqID_13528
MAMMGSTSEKMYLCQVPNFGLIPERPTRNGSGEMVRVACTLHGKRLDDGVSVLSIGVNPVWS

SEQ ID NO: 56904 - protein, 197 aa, Zea mays
  Coding DNA Sequence Number=SeqID_13529
  Subcellular localization annotation: CTP_CleavageSite=32; ConfidenceScore=5.13e-01
MSLRVISLTGLSKVRWTKTTVGGPNNLGGSVTAGSSSGSNDPIVDLEAQVEQLRTELRHRNRVWAQDGQRIAELAADVRCLQDELAERDLAVDWAVNSRSVAWNREAKARAHVTELSAALDNLQVYCNTLHEEVHVLYTRLHPDVPADPVAMGAGPSGTSGEGPDGELDLFRPPPSLNLADDRSPASGNKETKDDED

SEQ ID NO: 56905 - protein, 170 aa, Zea mays
  Coding DNA Sequence Number=SeqID_13530
  Homolog annotation: Hit_ID=Q6J9V9; Match level="QueryCoverage=70%, HitCoverage=33%, E-value=1e-09, Identity=40%"; Hit description =Putative uncharacterized protein
MTASKEGPGEGDTPKRILLCEGTRLRASLLIRGSKAGPSKGSTAASERVGSTPTTGQRFEGRPLGRVQRPPQATRAPRPLLIRGSKAGPRRVHSRLRRRARDDHGYVRYITKARAALPRGSGAALANPAPAKSLTASTYQPENLESDRAPGLRPARMRERPDQPKHYARH

SEQ ID NO: 56906 - protein, 336 aa, Zea mays
  Coding DNA Sequence Number=SeqID_13531
MSSCSLMHRVFPPSEPPDGGCLQPFRLVVGETQLRGSWYLSAIVRLQGFSSCSPAAPLRRWSPKTVTSSLMAGESKPGCGLQSDGLKDFHHQGWGGESAELGCRVPGSRTRVASEPLSAPASATAAGRGSSADEIAGAAHGPTSNSTAFCPSLPHEFGQGRGPPGSSILPEVIAAAVRPPGAKVVVAAGADSPVGCLDRFTKCESPRAKVTSEHGQRQSWLEKEDLVGRSLAGSSVSGTDARIDLPRPRAGLMSSEDSWPRPRGDQPSRLLGPDSRRRPWRRWPGCGDDVVLQSGDPRTASTSEARSDLVEGAADAEGAAAPFNRQDPSLQDRIIL

SEQ ID NO: 56907 - protein, 53 aa, Zea mays
  Coding DNA Sequence Number=SeqID_13532
MSSLQRFLMGECFCDTVICNDLPQMLNLSFGFKQITIGNIQLRLQGEPELFEY

SEQ ID NO: 56908 - protein, 468 aa, Zea mays
  Coding DNA Sequence Number=SeqID_13533
  Subcellular localization annotation: CTP_CleavageSite=64; ConfidenceScore=5.13e-01
MHRVFPPSEPPDGGRPQFFRLVVVGGTQLRGSWYLSAIVRLQGFSSGSPAASPHRWSPKTVTTSSMVGRSEPGCDLGPSLSFKDLHHPGWGGGRAEPELYLPRGFVGHLLPQHSRERALTGLAGGSDFDNAGLVGGERRQLQRVGLAGSAGSGSAPGAPSRRESGCRAARIEGPPKTLRAARAAFVFWGYPAFAPMASTVGAEVVAAEEVLVADGITATIRALGLRLFGFDSLSSPLEWRRGRGHCCSGVRPEAIDAAVWPPGAEVVVAAAGASGGDPRSLFDEPKLEAAVLAWTEAKLARKEDFVGRSLAGPPTGGTDAGVELPKPRIGLVSSEDSWLRLRGGRPSRLLGPDSWRRPWRRWPRRGADVVLRSGDPPTALPSEARSDFAEGRVDAEGAAAPLPSMSEPAGSVHLVIIVCASESYFSRKVTSEKVISEVSVSRRRRSPSARSALAAYVYSVVFRIPLSK

SEQ ID NO: 56909 - protein, 235 aa, Zea mays
  Coding DNA Sequence Number=SeqID_13534
  Homolog annotation: Hit_ID=Q6QP51; Match level="QueryCoverage=20%, HitCoverage=22%, E-value=1e-11, Identity=71%"; Hit description =Putative growth-regulating factor 1
  Subcellular localization annotation: CTP_CleavageSite=60; ConfidenceScore=5.60e-01
MVASQGGHPPFKGGSPYLRPQPSRAESSPTHSKVLPYGAGAGSHTSCKPAQSGRSQTAVRGAYNRPAVTSDSPLLPRPTGERGGQPCRRHATAPSGRSSPTPNTPSMEAQAHASCNRRAKCFVHATAPPLAPLPRLLDCGTNTATRGNPARDPATPAWRDGTGKGGYPEKDPSPRRNQALSPPTDQRFEGWPLGRVRQPPQIAWALHPLLVRGSKAGPSEGFHSRLRLLGLRAHY

SEQ ID NO: 56910 - protein, 59 aa, Zea mays
  Coding DNA Sequence Number=SeqID_13535
MVTSSLMVGESEPGYDLCPSLSLKDFHHQGWGGEPEWLRSRSRRRLPPRQLEEVLPPTR

SEQ ID NO: 56911 - protein, 141 aa, Zea mays
  Coding DNA Sequence Number=SeqID_13536
  Subcellular localization annotation: CTP_CleavageSite=57; ConfidenceScore=5.11e-01
MRDFQQYEITNSFTQLLQETDCSPTSRGADCRWSQQLHSATAMVQNRTTGVPCTRSRLAVVSAGCGPSSTRDVTRWWGHRPERAKQLQASGLGRGRRRPDGPKQNKQGSPTAEACPRIWPVAFYWSSSGLPLLRRQMYQMK

SEQ ID NO: 56912 - protein, 124 aa, Zea mays
  Coding DNA Sequence Number=SeqID_13537
MEKRYLSRFSIDCHQKVVRENEINCDSLSACCSNSPFNIVLIHFYSLALLLLHLKGNLDGYRHRSDGMGELGALSYVIDPYAKVGSSGDGIVVSSHELTSKVSHSDLRANPGGSQMCARIKSHT

SEQ ID NO: 56913 - protein, 147 aa, Zea mays
  Coding DNA Sequence Number=SeqID_13538
MTHFFSGLINLPLKIGETKHLFFLLLNLLMDGFEVPDFLVQLLLLSGCSAALGPDDFFGGMTKVKACQRWSKGTGRNLGNITFMSLTFTISQKLWNWFILLPDRAFHTIYTFISKPKPPVTVYYTGKHVSRVFEDLQKTKAPNSIGI

SEQ ID NO: 56914 - protein, 67 aa, Zea mays
  Coding DNA Sequence Number=SeqID_13539
MGRLGLEGRDLPREAVVRKHLKLRQAAATRAWGRYLASEAWCSSMVFLVFEYKMTVINYFHYPLAFC

SEQ ID NO: 56915 - protein, 190 aa, Zea mays
  Coding DNA Sequence Number=SeqID_13540
  Subcellular localization annotation: CTP_CleavageSite=80; ConfidenceScore=5.38e-01
MASAGPWRDAGHARSGAGVLWHAQNASNTWRCSSARVQTLAEIANPSLASGAIGSSVSPDPRARPSSRPRTTNSASPDPSARTRPRLPEDNGLCLARPQGSDSALGSGRRRTLPCPTQGSDSAFGFGRTTKFRLTRPQCSDSVLDLKRRLPPPPDPGLGLDLDLGGASASPDPGLGPTTSQGGHHYPTPS

SEQ ID NO: 56916 - protein, 112 aa, Zea mays
  Coding DNA Sequence Number=SeqID_13541
MGAGHTRVEIETHTHTRKTSSRVRVAPAGQNLHPYLHLSGFGFQQCSALTIIFGKLYTSHELPPLVPSDIYQRGRTSKDMKVGSAEAVKQESFGMFAEKGTDLKMKRPFRPR

SEQ ID NO: 56917 - protein, 141 aa, Zea mays
  Coding DNA Sequence Number=SeqID_13542
MALRHDLQMEEERKASISHGSKATTDKGMREKMKALESQWYEYNKEWSYVQAYTRQDRVVRRIKEITNKNTTKDRVKNSQVTKKRIHPKGKIGKMYNSQIEMGETRFLKGKYKDKRQRVKAKTDKVRKQAKGKIGKVQQNG

SEQ ID NO: 56918 - protein, 89 aa, Zea mays
  Coding DNA Sequence Number=SeqID_13543
MPVSLIVQQALIGDGYGEGRVEEMTHGVHLNLAPEIQEEASKKTRCLRPIDAIIEDLLEQWVRTHTHFCYTTLILLVDVYHIVFIGVSD

SEQ ID NO: 56919 - protein, 36 aa, Zea mays
  Coding DNA Sequence Number=SeqID_13544
MGSRRSACSAEAGCRGKEEGVEADLQEFQGFGEFED

SEQ ID NO: 56920 - protein, 221 aa, Zea mays
  Coding DNA Sequence Number=SeqID_13545
MAERYQLPRSCVPPTARRKDCEHPPSGGLEGGKTRCIREREDMVAFQGGHPPFKGDSPYLRPQSSGTESSPTRSKVLPYGAGAGSHTSCMPAQSRRSQTTVRGGASGRRSERRLAFAIMTASKKQGPRKGDTPKRILLREGTRLRASLLIRGSKAGPSEGFDSRLRSRGLYTHYWSEVRRPAPRKGSTAASGYSGSAPTTDQGFEGWPPKGSQLPQTQSEG

SEQ ID NO: 56921 - protein, 145 aa, Zea mays
  Coding DNA Sequence Number=SeqID_13546
MVTSSLMAGESKPGRGLCPSLSLKDFHHQGWGGDCRVPGSRTRVASEPLSALASATAAGRGSSADEIAEVAHGPTSNSMAFCPSLPHEFGHGRQNGSCRSHEGQWIRFTGSGRLEMRNTLRPGEYVSMVTRGLSGLKAQRVDVGG

SEQ ID NO: 56922 - protein, 146 aa, Zea mays
  Coding DNA Sequence Number=SeqID_13547
MGKGNKRKREPTPPSEDFGDSEYSEEEFSSESEGSPAPVSPPASSDDSDDSQGLAAEVWTYIRAVERSGLEGSDESEFSSDEEDSDGGEDEDDDDDDGDDDDGGDGDGDGGKGSTRGGSSTGSTRGGDGNDSTKGGGGGSSSKASG

SEQ ID NO: 56923 - protein, 144 aa, Zea mays
  Coding DNA Sequence Number=SeqID_13548
MNKNTGIQSAITNGTPVPPPQVRTTPLDRGGPVEQQKTDERLATARSDYDDNDPRSGWPNCSSAGLRGPSALRQIPTQILPDEWGTGLRVKMPRRCKGRTTPEHERRPSSARHLGWTSRAHGAAAALRQEGPPGAKPTSPTRWR

SEQ ID NO: 56924 - protein, 112 aa, Zea mays
  Coding DNA Sequence Number=SeqID_13549
MSDDLVVPVHFEVGQELCFCFLDQLLLALLEQELFFSRQGLPCSGVVKKYVDAFLERQTLNKNRGGALCTGADGPRAEARRSAAWCEAQWCSLHRGGMSARRGQTVRDLVRG

SEQ ID NO: 56925 - protein, 518 aa, Zea mays
  Coding DNA Sequence Number=SeqID_13550
  Gene Ontology: Mol. function=nucleic acid binding; Biological process= DNA integration
  Homolog annotation: Hit_ID=A2WP36; Match level="QueryCoverage=25%, HitCoverage=63%, E-value=2e-49, Identity=71%"; Hit description =Putative uncharacterized protein
MTLSPPGATDWVMDSDASSHMTPDSGSSFQERDRQEAIEVVAHRVVQDVGGVYLMLIKYNYVEWAMLMMELMLQACDFWEAIDSDDVNNFDGKMRPSFGLYRHILCIIAKKTMKQDRNAIKTMCMDSDHATRQDCPPIEVPNDPVDDDKVIAKYLRVVSSKFAQIVLSIETLLNSMMMSIMELARISPILAVADRCCRVVFHARVAPQPPSRTAVATPSSSLLHLCAGLAAVFRVRAVPGPRSRPLSLCAGRSAVRFFCVQAAPPSAIFPAWAAPLSPRCAALGRLRGPRVIFASPLLPPEICACRCLPRIYAVAASAGLRTLRRSLPLRAESRTFVNSSKSGCWVSGLLFSLIFIEFNMATNAIVVNITLDGQNYPEWAFCVETALRGHGLLFHLTNVAPVLADDRRNAANIKTWQLNDGKVMSAMVNSVKPSMIMSLSKFKTAKAIWSHLKERFVQDSGALLHTLMQQTHVIEQNDMSIDEYYSAFDRLMSALTSMVPALSSASTPNVAGPRLRSS

SEQ ID NO: 56926 - protein, 92 aa, Zea mays
  Coding DNA Sequence Number=SeqID_13551
SSGWVRRRSGEEAVEAIGENGGLDVDSPSLRATWAGEAVGEEGRGVLLSGGPEQAAGATAGTAHARGAAPSGSLVHYGARARAGRSRGWVAR

SEQ ID NO: 56927 - protein, 229 aa, Zea mays
  Coding DNA Sequence Number=SeqID_13552
MDCQHSGFRENNITLSNEGKSVLKEKIENTSSVEVLFEYRRTAVWWDAENPNVTGNDTLADEVQVDLYVLRALMLHGVGGEVDRADVVAVDEGGTLEGSVEIVEELAQPGCLCHTVGHDTVLGFSAGARDDGLPLGGPRDEVGVQEHGVTGGGPARVGTASPVSVGVYHELRRRGWAGLTGPRVAQAGSTVSRVAQAGSTWPRVAQAGSSGPRVARKWARAEASWSHEV

SEQ ID NO: 56928 - protein, 49 aa, Zea mays
  Coding DNA Sequence Number=SeqID_13553
MSKNMVTDLVGTSAVIVRRQPGSVEHCTPRRYLLDLVDGVTWPSSLPPG

SEQ ID NO: 56929 - protein, 200 aa, Zea mays
  Coding DNA Sequence Number=SeqID_13554
  Subcellular localization annotation: CTP_CleavageSite=57; ConfidenceScore=5.79e-01
MSPVPLALRHSALSFRSFSSTLPPPSIPPRCRPSAPNRPASLPAAGSSHRPLSLPPTAASRRPPSLARRQVHPPPPLRPVVPKAVPGAAARCTRSRPCAPVSPSAATPALRPKPPVAAMDDTTTAATDPIAPVAISSELAHGGGPYIAGLGPLPAVPSLTLHRGSPPGFPTLASPTWSHAVAPSALPTTDSPLVDTLATI

SEQ ID NO: 56930 - protein, 85 aa, Zea mays
  Coding DNA Sequence Number=SeqID_13555
  Subcellular localization annotation: CTP_CleavageSite=55; ConfidenceScore=5.06e-01
MANEAPTPASALYSAPTSEQPPLGGTGHPSSVDQGSYLSSSRRPGLALEGLVPVEESTKDGSLSALSLSQPIPKIGELFFFSRVT

SEQ ID NO: 56931 - protein, 195 aa, Zea mays
  Coding DNA Sequence Number=SeqID_13556
  Subcellular localization annotation: CTP_CleavageSite=43; ConfidenceScore=5.24e-01
MVAPPPSPAARKATGQTRMLLFPHGGKTSPSPPPPGGLTTIVVAAALRRKEYHVVAAVDGHELETPETEQRPGLKRFLETTHLELGRKMFVNTQQAPTWRANCRRFDPRGSLDRRVKLSLRALAQMGWREMEHKGGKPRLVLSCARVVALAVGVTSVREGERESRVTTLLYEGPGPSFYRCKERVQVYNWGVAIC

SEQ ID NO: 56932 - protein, 172 aa, Zea mays
  Coding DNA Sequence Number=SeqID_13557
  Homolog annotation: Hit_ID=Q6QP51; Match level="QueryCoverage=63%, HitCoverage=76%, E-value=7e-12, Identity=35%"; Hit description =Putative growth-regulating factor 1
MMTASKKAGPSEGFDSRPRARRARDDSGYVRYMAEAQATLPRRNLRLARPQGSTLASASEGEVSASPDPRARPQPRPREESLPRPTPASASGGVSASLDLGLGPTTPQGLRGNKTGVPSRLAPVKSNDGSPRASMTTGALSPLRKQGEDSHHRNTLGKDFFAECQTLGEGWR

SEQ ID NO: 56933 - protein, 516 aa, Zea mays
  Coding DNA Sequence Number=SeqID_13558
  Gene Ontology: Mol. function=transporter activity; Cellular component= membrane; Biological process=oligopeptide transport
  Homolog annotation: Hit_ID=Q5JM42; Match level="QueryCoverage=13%, HitCoverage=43%, E-value=2e-21, Identity=76%"; Hit description =Abscisic acid-induced protein-like
  Subcellular localization annotation: CTP_CleavageSite=30; ConfidenceScore=5.14e-01
MTPSAPVASSRGVAKKEGRAHPYGSASACPASVNHAPRPTTPSASLPHPSAQIWIPPPSSAPPPPRVRDPDPPLPRQAPQSLLTFLPSPSLLGPYGGLTANRIFLGLLSLRPSGRLGARRPDLQQPRLAARVCRLCGGCGRRRSDRPLFHAFVSAALSPLPLSDFGISRADASRRRRIGSGRSPGPSAARRPRERMRGPTGRPARRYFLPSPSLLGPYGGLTANRIFLSLLSLRPSGRHGARRPDLQPPRLPSPTVKRRVGRYSQTLSSADLPRGMKTMITGLFLSTLSLGFFFSTDIVSAVHAVTTSGGRTPGLTDDLDQGSLHKFYWLLAAISAVDLLAFVAVARGYVYKEKRLAHRRPRPRDPWRRPRPTPPAVILNISCISTFNGVILSSRLVLPIFNDAAYIYEAHVRRYFKISSYVSPSYSEHHCRVLQMTSLDACKSVERFINTHGPDALDRIIRAVSSFFFVVLAMRLVFLVSLTEKHLKLMGVKAKQCELFGAKTEAARCSPTPQFC

SEQ ID NO: 56934 - protein, 139 aa, Zea mays
  Coding DNA Sequence Number=SeqID_13559
MELKSLSQRIECAKLESWSLRMFLTTVAAPGRLAHRTLSGAHRTVQCPLPTVGVGHASPADCATDRWLTGQSGALPDSPTEVLNPDFVFHVSRYGEEMSYNAYGAEVTQLGAIDYGAEVRAALAQPGHRGADVAPSSAP

SEQ ID NO: 56935 - protein, 91 aa, Zea mays
  Coding DNA Sequence Number=SeqID_13560
  Subcellular localization annotation: CTP_CleavageSite=84; ConfidenceScore=5.62e-01
MSWTGSARLAPIVSGAAVGGGGNWQSSSGRSRAGHQGLALNLNQVLLSSSRLPPSGLPPGPSLSFLKHKAPNSHRRGVGSETVVQARLGYI

SEQ ID NO: 56936 - protein, 100 aa, Zea mays
  Coding DNA Sequence Number=SeqID_13561
MVGGCHGRRGVANQGKKGGGWWPREGGGGKRGGHLGFCGRKEPTPQMTSAFASNGPQPFPTSRHRRSTFGPKMFLGYYTLRDDGVLYPQRCLLLIKGSGK

SEQ ID NO: 56937 - protein, 170 aa, Zea mays
  Coding DNA Sequence Number=SeqID_13562
  Homolog annotation: Hit_ID=Q6QP51; Match level="QueryCoverage=28%, HitCoverage=22%, E-value=1e-13, Identity=73%"; Hit description =Putative growth-regulating factor 1
MQAACNRTKGAHPLDFDTSSMEAQAHMSCNRRAGYYVQETAPPLSLVPRLLDCGTSAATRGDPAHDPTVPTEHIGHGTVSRGRRHDGRYGQKMDRQDRERGYSERDPSPRRKRALSPPTDQRFEDWPLGRVQQPPQSTRAPRPLLVRGSKAGPSEGFNIRLRPLGLRAHY

SEQ ID NO: 56938 - protein, 271 aa, Zea mays
  Coding DNA Sequence Number=SeqID_13563
MQPPANIAIVTFGEMWFHDSVPHTEHIPMMSPNNGVTSVRVGESERLYASSRSPTQPTFSYESPGPSFYRRKERAQGNDGPSCDVVGPSPGSGEAEAPPRSRSSLSSEVEVESEPWVGRGGDHRPRPRLSPSPGLGRGGVRRLPEPRLSPSPGVGLGGVRCLPEPRLSPSPGVGRGGVRRLPEPRRGPSPRIGRGGVRRLPEPRLSPSPRAILALNAPAIRSVGVAIWPRLLLGEDWASGEPRLCADGGYQLRLGVLGVPLIMVPDSSPEP

SEQ ID NO: 56939 - protein, 136 aa, Zea mays
  Coding DNA Sequence Number=SeqID_13564
MPQSILDIFVTNDLRKGFSPLSPLSRDDQGLPGLGEGLRVMKAREHREDKEGECLVQFGHGGGLTPSGITVKKKEIGYELRLFPTLPVAVGPLICFAAYIGLLQPHSDDMSRVVDQLLKLIATFLGLSRLSRSGII

SEQ ID NO: 56940 - protein, 282 aa, Zea mays
  Coding DNA Sequence Number=SeqID_13565
  Subcellular localization annotation: CTP_CleavageSite=64; ConfidenceScore=5.18e-01
MHRVLPPSEPPDGERPQFFRLVVVGGTQLRRSWNLSAIVRLQGFSSGSPAASPRRWSPKTVTTSLMVGRSKPGYDLCPALSFKDLHHPGWGGGRTEPELYLPVRGERALTGLVGGSDFGNAGLVGDERRQLQRVELAGLAGSGSAPGAPSRRESGRRASRTGGPPKTSRTARAAFVFLGCPAFAPVWRLYTKDPSGDLPVGRWLPSSVLRWWQLKKSSSPTGSPPPSALRASGSLALIACPRPSSGDVGEGLMAVASALRSSLLLFGRSERRSLSLLLFGRR

SEQ ID NO: 56941 - protein, 89 aa, Zea mays
  Coding DNA Sequence Number=SeqID_13566
MENRPGLERLLETTHLELDGKLFVNTQQAPTWRANYRRFDPGGRWTDESGALAVGGYKRPRGRERETLRVVPFPRMANLLVREPWTFLL

SEQ ID NO: 56942 - protein, 45 aa, Zea mays
  Coding DNA Sequence Number=SeqID_13567
MATVGAQQRGTGAVVVCCKGGRGAVVVRMEAGTRAGGTTYSRLQG

SEQ ID NO: 56943 - protein, 168 aa, Zea mays
  Coding DNA Sequence Number=SeqID_13568
MYLTAYLLTLDAQYDFLARHHRQMIARAEDAGKRNHQLHVDLTTAQARATALESREVIAVEALKQAKDEHVQKLMEAYLAMNKQEHPESSQDPPPELFEPLTMKKIPTPSREIKEEAANTPPAPPPSKELQEPVPLEEEFNPVLPYQSPPEEVINISSLLTHPEDVSD

SEQ ID NO: 56944 - protein, 22 aa, Zea mays
  Coding DNA Sequence Number=SeqID_13569
MTKDMHQSKKLLSGLDGVVMEF

SEQ ID NO: 56945 - protein, 84 aa, Zea mays
  Coding DNA Sequence Number=SeqID_13570
MAHVLRWSSPLVRLPGAEVVASAGEPLGAGVVASADEPLGAEVVAAADQQAGLMRADLTGLAYTYVLPSYKREKNSTPQTCFYG

SEQ ID NO: 56946 - protein, 412 aa, Zea mays
  Coding DNA Sequence Number=SeqID_13571
MKGRLIVGRLHAPCAVARLPDRRLPRKWRGAWGAPVFSGGIRIKVVSSGDFTVGERAPVVPSCSPPPVVIQKDDYQPCGGEKQTELQPPSCPQLQGCSSSVLGRGRPASSLSVRGRRVFAVCGAVSCRVPGFSAWVALALPPALHPAAGAERGCPSTARAMVVLCVGRSHPRFLSRLRLHWEVVQDVVHRRGGSGILDGLAFTPAARTGAKTSSCALVQLLPTGAEVITAPGGADVVASAEVVDVVGGAVWSQLPAWLLLVWRAVEYAGSQYGTRLSGYMVSEPPGDKALERAGPRYRIRLSGCTGSGPPQETSPRYRTWLSGYTGSRPPYGTGSRSPELAPRLSDLPTFASGALNWKSGYSIRMPPCQTDGNRTGGPIVRVHGADPTGLSYTLDPWGGPEGRPEERRVLAS

SEQ ID NO: 56947 - protein, 107 aa, Zea mays
  Coding DNA Sequence Number=SeqID_13572
  Subcellular localization annotation: CTP_CleavageSite=54; ConfidenceScore=5.35e-01
MWQGKAPCLSKARPPQRVTGPLYTYRSGAPRGVKVIQQTARLLGLLVNSMPVLSGALYTSSLPQEASSIRQGEMPKTLLISGLRAGALRHPTRDLLSDSVVCGCDLS

SEQ ID NO: 56948 - protein, 172 aa, Zea mays
  Coding DNA Sequence Number=SeqID_13573
  Homolog annotation: Hit_ID=O48967; Match level="QueryCoverage=28%, HitCoverage=10%, E-value=6e-16, Identity=83%"; Hit description =Putative uncharacterized protein
MTHFFNSLIDLLLKIGETKHLLPFPLDMLRNSFEGSKPDPLGEVRTPLSGVQATHGEAMCRLSIYCDLSTQLAGGVQAILQAACLSSPLPNRRKKIAPAANISSSKYYICYVPGPTCRGSVPFMMVQIVEHRVETSTDFLVKEEVVSSTPQVPNRPVPGTVAMHAARQHTTA

SEQ ID NO: 56949 - protein, 234 aa, Zea mays
  Coding DNA Sequence Number=SeqID_13574
MLRRHIARQQSGQAARPLRNKCRDRAAQRPYVRLRPLAYVMGNKPRGSIGSPPKRGAQAHRLKPGHVLVLDPCLGQGIPCPGTSLWVAWTPLRGVRTSPKGSGLEPWIILGDPGRGAALARATVRLLCTLESAPKEDDSWVQVLVPGTGLLVLAEAKMRTTIGGGALFTRRFAFSAHRNRRARCMTCGPGPPCQRLDRWLQRRRGGALPRGGSTLLVRRFAFLTVGRSEVEGAH

SEQ ID NO: 56950 - protein, 74 aa, Zea mays
  Coding DNA Sequence Number=SeqID_13575
AGSSGNHVDDPSKRVDRRSPLASVGVVVVMVDLDAVVVVEEVELGFLGFAHVDPREIDLAMRIAERMFLKMKMR

SEQ ID NO: 56951 - protein, 132 aa, Zea mays
  Coding DNA Sequence Number=SeqID_13576
  Gene Ontology: Mol. function=cellulose synthase (UDP-forming) activity; Cellular component=membrane; Biological process=cellulose biosynthetic process
  Homolog annotation: Hit_ID=A2Y0X2; Match level="QueryCoverage=66%, HitCoverage=8%, E-value=3e-42, Identity=88%"; Hit description =Probable cellulose synthase A catalytic subunit 1 [UDP-forming]
  Pfam annotation: Domain name=PHD; Domain location=36-84; Score=-6.8; E_value=0.083; Accession=PF00628.20; Description=PHD-finger
  Pfam annotation: Domain name=zf-C3HC4; Domain location=37-81; Score= -0.5; E_value=0.1; Accession=PF00097.16; Description=Zinc finger, C3HC4 type (RING finger)
  Pfam module annotation: Pfam domain module=PHD::zf-C3HC4; Domain location=36-84::37-81
MGMVAGSHNRNEFVMIRHDGDAPGPAKPTKSANGQVCQICGDSIGVSATGDVFVACNECAFPVCHPCYEYEREGNQCCPQCKTRYKRQKCWFPGNFFEWDYKDKDGVKGLCVVDAIYNCTSQLLTYGRSSPP

SEQ ID NO: 56952 - protein, 126 aa, Zea mays
  Coding DNA Sequence Number=SeqID_13577
MARRSGEERARSRRWRSCPSGLALGWFGGGCRVPRVALGGRAACVGRAGLRRADGRAGGRAVRHGRGGICGLAVCGREDGSPWSRRGLQVCGVRVGEHREAGAVYIHRMRRELDQGNEDATPQKKT

SEQ ID NO: 56953 - protein, 79 aa, Zea mays
  Coding DNA Sequence Number=SeqID_13578
MEPGGGTAAGAVESLLTSSCFRKGAESHRCHRVGRCGSSSEAEVESEPQGRARRSSSSSRAEPKPSPGSGGAEFVVFWG

SEQ ID NO: 56954 - protein, 150 aa, Zea mays
  Coding DNA Sequence Number=SeqID_13579
MGENLEKGLAQMYENGNLQNGIRVQMCQVQFVEIKETAEKGGDGKSKTTNKKRNVNDRFMGILCRNGDAATNPPKVEIFWKQNPNVNKMKEVRFQNDGHMVTNEWHLAVGVNRRDERSNGALPLPLRRHHNLSGGTSRIEISGKLRSGLR

SEQ ID NO: 56955 - protein, 35 aa, Zea mays
  Coding DNA Sequence Number=SeqID_13580
MALGWCDVKRTRWSGTECRRGWGFHIVIKFIKVLT

SEQ ID NO: 56956 - protein, 38 aa, Zea mays
  Coding DNA Sequence Number=SeqID_13581
MPFGLKNTGATYQRAIQTCLVSHPDFRGPKPGREHNHQ

SEQ ID NO: 56957 - protein, 155 aa, Zea mays
  Coding DNA Sequence Number=SeqID_13582
  Subcellular localization annotation: CTP_CleavageSite=67; ConfidenceScore=5.05e-01
MIKESESRPRDGWPRSTENSCSTMSEKVTPGVLQPPSSPSPPLPPSSSPWPLSSPPPMPSSSLSSPLCSTDEPKEFSSFEETSDPSSLARSTERMYVHTSAASPWESPESSKDVGERREPAIPQTRRKPPPPSTQNLRSPLREDIVGNLFSNASD

SEQ ID NO: 56958 - protein, 112 aa, Zea mays
  Coding DNA Sequence Number=SeqID_13583
MTLGTFDTWPRLGLCSRGTLGHFRDQQERFCNGIPSEGGIEPSDPIKRDRVRQITCRVRLTAAKSSLRRHRKLRLPRLQGSDSTSTPEDGLRLARPQGSDSTSTSEDGLRLA

SEQ ID NO: 56959 - protein, 207 aa, Zea mays
  Coding DNA Sequence Number=SeqID_13584
  Subcellular localization annotation: CTP_CleavageSite=55; ConfidenceScore=5.10e-01
MDGMFSKIKLDGGSIMATMGSTSERMYLCQVTKQQTSAVFALKWCPRMNLNSNVVAEGRGGVFASQGCNNNTYALLYPGDVLITLFLYFNEWLSEVRWTRTTVGGPNDLGGSGTAGIEAKPISSDIMKNFKKNFQILIRENFFLTLSFSGSTHLARPGTFGLGMKMYTIWKSGSERRSNQRRSCGQGSFGSIAEKGTDLRRKRLSSP

SEQ ID NO: 56960 - protein, 183 aa, Zea mays
  Coding DNA Sequence Number=SeqID_13585
  Subcellular localization annotation: CTP_CleavageSite=40; ConfidenceScore=5.64e-01
MGAIQVKAPPTQGTRSRLARAQPRARTADPGGFTSRPRVSSSNGRTFDSPEAQLGQALRRSNLGQIASPTDRKQRACPALTAVPPARVRLTAAKSSLRRHRKLRLAQPQGSNSTSTPEDDLRLARPQGSDSTSTSEDGLRLARPQGSDSTSTPEDGLHLARPQGSDSASISEESPPRPTLGSD

SEQ ID NO: 56961 - protein, 78 aa, Zea mays
  Coding DNA Sequence Number=SeqID_13586
  Gene Ontology: Mol. function=sequence-specific DNA binding; Cellular component=nucleus; Biological process=regulation of transcription, DNA-dependent
  Homolog annotation: Hit_ID=Q2LGI4; Match level="QueryCoverage=98%, HitCoverage=23%, E-value=2e-21, Identity=67%"; Hit description =KNOTTED1 homeodomain protein
  Pfam annotation: Domain name=KNOX2; Domain location=10-61; Score =87.4; E_value=4.4e-23; Accession=PF03791.4; Description=KNOX2 domain
MEARQRTALGGLAAETEPDLDQFMEAYHEVLVKLREELTRPLQEAMKFMQKMEPQLSSLSIPRSRKKGEIDSTNPQER

SEQ ID NO: 56962 - protein, 119 aa, Zea mays
  Coding DNA Sequence Number=SeqID_13587
MATTAAESGRARRRRGAAVGRKCESVIAAREVNPFSRRLPCSRPETPQKILPDAHQGNPTYDMGARAHESYNWSRRRPPPPVFVARVAPTTSDADPHTDVTVVTSRTSLTTPPELYCRR

SEQ ID NO: 56963 - protein, 43 aa, Zea mays
  Coding DNA Sequence Number=SeqID_13588
MTTDRLLELLHMDLFGPIAYISIGGRKITNPRDLKGILEMSSK

SEQ ID NO: 56964 - protein, 101 aa, Zea mays
  Coding DNA Sequence Number=SeqID_13589
MSGGAPDTIRWHTGQSGAPDQREYFLVPEQGAAQEVAPDPAPESAPEDLPATALEGKPRNPVEMNTSSLEDMVAGVTWPSILPPGWTVEWDPTSAEEEHEE

SEQ ID NO: 56965 - protein, 179 aa, Zea mays
  Coding DNA Sequence Number=SeqID_13590
MRLSQNTLNTKQPAKVSKDDGGGPLGETPVELEVQLELRKLNSAEVQLNCSSRSSTQLKFSSAAVEEVQLLLNKNTLARFSPCFVAPSPPDLSPSTPAPPDPSQSASPPSPLTDVLLLPQVGVLGGHDADHHIRALPFSGPTQGYHHVAPASSPRSRRPLVPSRPSSCRERSPLQPPLP

SEQ ID NO: 56966 - protein, 113 aa, Zea mays
  Coding DNA Sequence Number=SeqID_13591
MARFADPAVVYHHREPTIPAAPNVLTARSEPSVYHPVVIHRDPRHVHPMVTWCAAGVLRLVDRLILVVDTIYTPPDASLTVSGALGESDSELASFGFPLRYNSPDMSGAHRTV

SEQ ID NO: 56967 - protein, 278 aa, Zea mays
  Coding DNA Sequence Number=SeqID_13592
  Homolog annotation: Hit_ID=Q6QP51; Match level="QueryCoverage=11%, HitCoverage=14%, E-value=4e-09, Identity=90%"; Hit description =Putative growth-regulating factor 1
MQPGCLMKILEAERWLKGANLHEVALLQQQQDESNAGAPHPGARKGVDPFLKVTLPTRVLRHRGLSLHQRAPGTSPYDTGARSHTSCKLARTEEAKLPHAERVTAQRLQALLHLRLNQRVKRQTVMQAACNCTTRMHPFDFNASSIEAQAHTSCNRCAGYYVRKTAPPLAPVPCLLDCGIGAATRGNPTHSPTVPTKCIGHGDRERGYSERDPSPRRKRASSPPTDQRFEGWPLGRVRQPPQSTRAPRPLLIRGLKERFTRLADITEHQRYRNAEAIT

SEQ ID NO: 56968 - protein, 46 aa, Zea mays
  Coding DNA Sequence Number=SeqID_13593
MALMDSTSEKMYLCQVRKRQIFVAFAPRWFQRKKNKNEVREERILH

SEQ ID NO: 56969 - protein, 46 aa, Zea mays
  Coding DNA Sequence Number=SeqID_13594
MAVMDSTSEKMYLCQVRKRQIFVAFAPRWFQRKKNKNEVREERILH

SEQ ID NO: 56970 - protein, 38 aa, Zea mays
  Coding DNA Sequence Number=SeqID_13595
MRRRRRQVYLKSYAFGTKGEGGGGKCPYVVTVHNYMLE

SEQ ID NO: 56971 - protein, 150 aa, Zea mays
  Coding DNA Sequence Number=SeqID_13596
MSDFSIQTVRCPLDRYCSLSEGSGAGGPPATSSFLLHLACLAWSWYIYYYLCSFSFAAASLLLLLLLLLLLLLPPGTSKGTNEEPSKDMRPAAYTLTKDLPPITRVYLFELRGCLRMTTIPTACSRSQPLDSSMMIWKTSSSKSAGSASS

SEQ ID NO: 56972 - protein, 208 aa, Zea mays
  Coding DNA Sequence Number=SeqID_13597
MTLDTTILYPCQGALLLWWCRRTSMRMSLSGQETRKVGRVKSVCEEMASMRACIMGERKETRTVVVSMLGVECSYCWARVDIGGIARCRSESSKSIEGHDDKGLARLVFEKARFARSSGASEHGNGCGINTWGEGGLGWHTSMGMRTHNMFRELSAQLKGNGIGMRIRNKGVKFNLHNVENTNVPDDNALTDKVKFDLNMLRVGGGPG

SEQ ID NO: 56973 - protein, 1133 aa, Zea mays
  Coding DNA Sequence Number=SeqID_13598
  Gene Ontology: Mol. function=kinase activity
  Homolog annotation: Hit_ID=Q6Z3X7; Match level="QueryCoverage=100%, HitCoverage=97%, E-value=0.0, Identity=52%"; Hit description =Putative kinase interacting protein 1
  Pfam annotation: Domain name=Filament; Domain location=96-377; Score=- 181.1; E_value=0.019; Accession=PF00038.12; Description=Intermediate filament protein
  Pfam annotation: Domain name=KIP1; Domain location=1-52; Score=75.1; E_value=2.2e-19; Accession=PF07765.3; Description=KIP1-like protein
  Pfam module annotation: Pfam domain module=Filament::KIP1; Domain location=96-377::1-52
MENRVKIMLKLLGQEADSFGKRAEMYYHTRPEVISHVEQVYRAYRALVERYDHISKELHKANHTIATACPEEVQYAMLEEEDHDFPKAITPIKTHKSLVQEILNAKRQGPSGSGWNKPPSHPRMSAEEAQEEIGRLQKSILVLQTEKEYVKSSYESGIARYREIEKQIADTQNEICLIQDRFDAHAAIGDDEARALMTITALRSCQGTIAELVRHFEELIKLAAVELEKTKSLRAQLYAMMDGDTDTCSREASSTDTSVVARSYPVTKAILELQPIYEKLDKFFSSGSESSAEEIAENVDELVDKVINLELKFPKQTAQINQLIQENENLKNKLDELQDEMALRDDQSELNEQIKQLEDEFSTVRVLERSILEEEASVSTGFSEVFSCIINISKALGSFGPEDLHNLSAAVEDGAMVPRDVFLEQSAEESKGGDFRDIEAPTLRHSLGQDREDVSEVVSDNGNDGIHGSRNANEEIIPGSCLMQQVRYKLRLHFDDHIDPLFSSENENIVHDSGEGNVDSSSGKVFQSSSETENGSRNFPNGEIMRGEYPLGIVGQTHLLHSGSMDHLDRKYDSNEASQSLMEVAEGNIDDGNSFSSSSVIQEEGLGDSKSQNTSGQISPIASSDLYRLKEYDSVEESSFPKATCFSGADKKSLHMGHADEAKSVEESPHQVDQLNGPQNIESSNECNQVGLLKEDDCISLVHVDNVHDMKNIYSSEVRDETSICAPAGDYEQVPTNSERKTSHGRELASEATTSNNHGGRSQGVKSGLMGEDFVPSWQEFLPDGLEGKEAILLADCTSVLRNYKETKRRLSELERRNQEHLEETKAVIRELRNANSMKYVEIRSLRDLLDSSEVPPSKAGGNSNGFLSLRSFREIDRSIATLGRDISAVEENSSSNIETPNNTSLHKMTRFRNDIDALVEENLQFLVRYSMACYRMQEFDRRYQEAQDEMEDNKSREPDTPAEPGPAEKKLRELRTELDVWFEQSALLDQEVQLKSASLCRMQEEIAEALRGSLEMDRARFTPYEAAKFQGEVLNMQQSTSKIEGEMQAASEHMRGLQAKVSHALEGLRESFEISSQRLSRPETERSHEKQFKHFPSRTRVPLRNFLFGTKRKKKSIFACINPTFQKQFSDL

SEQ ID NO: 56974 - protein, 119 aa, Zea mays
  Coding DNA Sequence Number=SeqID_13599
  Gene Ontology: Mol. function=metalloendopeptidase activity; Biological process=proteolysis
  Homolog annotation: Hit_ID=Q10Q21; Match level="QueryCoverage=37%, HitCoverage=9%, E-value=1e-10, Identity=75%"; Hit description =Mitochondrial processing peptidase beta subunit, mitochondrial, putative, expressed
MPTLVRGYLFTHCTAEILLNPVFEDLRTPKVPNTSDQHLLFFVPLMFQLLTYGRRIPTPELFARIDVVDASIVKRVANRFIFDQAATTGSVQLEAMVVIEMVVTEPTTHGRGEHVKAPP

SEQ ID NO: 56975 - protein, 141 aa, Zea mays
  Coding DNA Sequence Number=SeqID_13600
MTKDFAMTPKLPPYKDMLGHQTFPIWGAVQRWSGCHLQLWCQWGSFVIEELLKVDWFMMKIVLVEALVILVSIVVLVLRFNIAHFFSCFVNLFLKFIKMTHLLPALLKLLVDCFEVVDLLIKLLVLWLWADSLPFFGFLPP

SEQ ID NO: 56976 - protein, 51 aa, Zea mays
  Coding DNA Sequence Number=SeqID_13601
KLQPEEDPIPLLVAGGPSPLITACRDSCAVAMDKHNPVKISASDPLKLGYG

SEQ ID NO: 56977 - protein, 756 aa, Zea mays
  Coding DNA Sequence Number=SeqID_13602
  Gene Ontology: Mol. function=solute:hydrogen antiporter activity; Cellular component=integral to membrane; Biological process =regulation of pH
  Homolog annotation: Hit_ID=A3CJG8; Match level="QueryCoverage=91%, HitCoverage=97%, E-value=0.0, Identity=66%"; Hit description =Putative uncharacterized protein
  Pfam annotation: Domain name=Na_H_Exchanger; Domain location=36-423; Score=289.3; E_value=7.4e-84; Accession=PF00999.12; Description =Sodiumhydrogen exchanger family
MAAAAMCPGPMKATSQGAFQGENPLDYALPLAILQICLVVVVTRGLAYLLRPLRQPRVIAEIIGGILLGPSALGRSHRFLHAVFPAQSMTVLDTLANIGLLFFLFLVGLELDISAIRRTGKKALAIALAGISAPFALGIGTSFAFRATIVKGTPQGPFLVFMGVALSITAFPVLARILAELKLLTTDLGRMAMSAAAVNDVAAWILLALAIALSGSGSPIVSLWVLLTAAGFVVAVSLFLRPVLAWMARRSPEGEPVKEVYICATLAIVLAAGFVTDTIGIHALFGAFMVGIVVPKDGPFAGVLIEKVEDLISGLLLPLYFVSSGLKTDVATIKGAKSWGLLVLVIANACLGKIGGTVITSLLVKIPVREAVTLGFLMNTKGLVELIVLNIGRDRKVLNDEAFAILVLMALFTTFITTPIVMAIYKPARRAVPYKRRTVECAAGDADGELRVLACFHTNRHIPTLLNLVEASRGTARRRLTMYAMHLVELSERSSAISLVQRARRDGMPFFSGGKEQRAEQVVVAFEAFQQLSSVRVRAMTAISDLDTIHRDVIDSAADKRAAIVVMPYHRALGHDGSFASLGSAYHAVNKRVLREAPCSVAILVDRGLGGHAQPSRPPLLDEAESAADEAAVEAFKARVGAVKDGSVRFEEPEACTREQVLETIESLSGFNVFVVGRMPPVAPLVERPDELGPVGSYLVSPEFRTSASVLVIKRYDPATNPKSKRFDPKAGPPVATEEDVLDEEMGMGRATVVPV

SEQ ID NO: 56978 - protein, 234 aa, Zea mays
  Coding DNA Sequence Number=SeqID_13603
  Subcellular localization annotation: CTP_CleavageSite=66; ConfidenceScore=5.33e-01
MAAQGAGRAVSSSLAKSLGLRKPKREAGSGAKNRHQTLSQGPGKGDTPKRILPREGTRLRACLLIRGSKAGPPEGFDSRLRSRGPYTHYWSERLGGCSRKPGSGRTVDSVNIPARELGTRPYTRATTSSHEGTTRPAEALREALRPRRSETTPPRPRGLHPAGALARTHRNKMQPRKAGPLAKKCDESLQASANTPFEARGLLSGTIIRGTLKTPNSQLVTPISITLLRPDGCD

SEQ ID NO: 56979 - protein, 146 aa, Zea mays
  Coding DNA Sequence Number=SeqID_13604
MAPRMLCDDGGSQPPYGSKRTKDQGPLREGWSRGDEDETGARLEAARSLTRVDACNPLLQAHPTWAWDEHEGRGIPTSLTPVSGRLASPPFALALALAPSGLGHAATLTRRPKGPPGLETPTTSITKKGEIEREIGSNLFLNDFGG

SEQ ID NO: 56980 - protein, 368 aa, Zea mays
  Coding DNA Sequence Number=SeqID_13605
  Homolog annotation: Hit_ID=Q6J9V9; Match level="QueryCoverage=30%, HitCoverage=46%, E-value=1e-08, Identity=36%"; Hit description =Putative uncharacterized protein
MNKTPAFKMPLQMELRFHLRRYEQPHTIGGPAEQQKTNERLAVARSSSGDDDDFCSGGPNSSSDDLRADAAAMRLSPMPSLERQGQAEGRRVGGQSVGGTDYLVGGGTSSSCRGGRRRRERLRSHSSQRAKHAAAASATNGERPSPPSLREGAGRRPRRDRPQLGTLPSPALMMKVLEAEGGAEATARLAFPRHRTRGGASGRRGERRFTFAIMTASKKGPGKGDTPKRILLHEGNRPRASLLIRGSKAGPSEGFNSRLRALGFHAHYWSEVRRPAPRKGSTAASGHSGSAPTTDQGGNDLVTESHQREASSPRTPLKGDRVRQITRSAACAAPTAEPLDRVRLTAAKSGPRRHGKLRSARPQGSDSG

SEQ ID NO: 56981 - protein, 34 aa, Zea mays
  Coding DNA Sequence Number=SeqID_13606
MAPTAMVRLPGAPRPPTVLAPPARAMPPRPRSPA

SEQ ID NO: 56982 - protein, 612 aa, Zea mays
  Coding DNA Sequence Number=SeqID_13607
  Homolog annotation: Hit_ID=A2X7M1; Match level="QueryCoverage=83%, HitCoverage=82%, E-value=9e-82, Identity=50%"; Hit description =Putative uncharacterized protein
  Subcellular localization annotation: CTP_CleavageSite=55; ConfidenceScore=5.26e-01
MGLCFSKKKPPAKPGKVAAAVSDDKAKKSPAQQPKRAAAAAANKAAVSAKDAAVPGEEKRRRSGSQGPAAEKQLPVVLVPSAPVRTSSCTKEEVDAILIQCGRLSRSSSGAGRAASTGDTAACGGGHRRRRSGSKRSYDFDQDGGADEECDWERQGRAAPVSSSRPSPHRGSPQRKRSGSRERSGAGAGSRRASRSPGRRADGAATSAGSGGGDRARQQPGKMVSVPAREKGRAPSPVAASGKRCASPRSSSPARMAAGTGNENAGACGPAAGPAPVLSRSSSRKNEQSPYRRCPMAELDDNALRNSSNHGARPHKKSAETAVAATPRKATGRGKEPTAVKEKLEITEASETRAHSSKTSSKTTTTPTLSVVAESLTQMPGAAQPGCRSRRASRDFDQNPGSYATQLLEDIHNYHQQSTSATPATPSISLPACVAKACSIVEAVADLNSSSSENRAYEHEPGHSADDKGSVNAPVGSGSDGFVEPSAAARKHLLPARDAHAETEPQESAGSNSVSGHPWTPSWEPTSAESTDRTWSTGDEVVEQSGSHGGRCSPMNRHQLSKQRQCQPELSGRSRAGSGNANGQYRGRSSAHRASGSVASGRSGVRVVSANS

SEQ ID NO: 56983 - protein, 26 aa, Zea mays
  Coding DNA Sequence Number=SeqID_13608
MDLGVYLGDKIYGTEVLVAEVKTHTS

SEQ ID NO: 56984 - protein, 641 aa, Zea mays
  Coding DNA Sequence Number=SeqID_13609
  Gene Ontology: Mol. function=ferredoxin reductase activity; Cellular component=chloroplast; Biological process=lipoate biosynthetic process
  Homolog annotation: Hit_ID=P80680; Match level="QueryCoverage=12%, HitCoverage=84%, E-value=3e-36, Identity=90%"; Hit description =Ferredoxin-thioredoxin reductase, variable chain
  Pfam annotation: Domain name=FeThRed_A; Domain location=561-634; Score=162.0; E_value=1.6e-45; Accession=PF02941.6; Description =Ferredoxin thioredoxin reductase variable alpha chain
  Subcellular localization annotation: CTP_CleavageSite=37; ConfidenceScore=5.19e-01
MKSRMALGLPSPEKSQQKSGSSSSSEPEGPLNPKGTRWESVGTSWSTGGDEVTSGADCTVVSGTRVTPSKSSASVLASSVRLELACCGETALVFVSDARSMPDVSPVGAPVPSTCSTADEVSPPAWPCCLASSSVGGGGDGTNPNVVLPPRGEDVVDSAAVGGYKRPRGREREACARCPVLPARPTLPYECPGPSFYRRKERAQGNDAPPRDVVGPSPGSGEAEAPPRSRSSLSFVVEVESEPRVGRGGDRRLRPGLSPSPGVGQGGVRRLRGLSPSPSPRVGRGGVRRLPGAEAESEPWGRARRSSSSFGAEAESEPWGRARQSFLWRPRPDLAAVSLTLSSGTTVGAAQAALSSRQAAILALNASAVRSVGVAIWPRLLVGEDWASGETFVLMGLPAEIRSLGDALQTRQTLSVSRGPDEQRQTEASITSAERQNPYATRSRSDRPLAPAFRLPRRLYPFLDSSASTTCSTQHRRVPTHPMATATAAVAPPSTSTSSVLLRRRLPSPAPASASAAFPRLPGPPPPPPRRARLLLLQVALTSEVASDDVAAEEAAAAPKIGRRVRVTAPLRVHHVIKAPDLDVQGMEGVVKQYVGVWKGKRVTANLPFKVEVQLAVEGQPKPVRFFVHLREDEFEFVDGE

SEQ ID NO: 56985 - protein, 98 aa, Zea mays
  Coding DNA Sequence Number=SeqID_13610
MATSCGGCVRCACAAALCWARAADVRRADDRWVDRGGLLAGPWAMSREFGIWAGLVNSFGKFRILNLVNSDLKRFLAGTKDAAPSGITGRIFLLGTAL

SEQ ID NO: 56986 - protein, 244 aa, Zea mays
  Coding DNA Sequence Number=SeqID_13611
MSIYKHQLGFEIQNQKADNNLKNEYQAADRPPMDRGPSAASGNGHGFGGLRKKLAGRFKSKRPRGNDDDYTPTTDSEAQSSAGGTESMDAEDFPHVHPDYPIDTQGWTYPKRRFSMAEYCSRRTVNQYTLPSDTNIQFFHTQLQFDVFWGTLVDTNFHKHQVIDWSFLLGQSVMEDFNEMAVKQFLATSEIDIEEESITWMTGFKRYSASFADFVAANSLNYGTISAGLDLYTEDNFEDFCAVL

SEQ ID NO: 56987 - protein, 211 aa, Zea mays
  Coding DNA Sequence Number=SeqID_13612
  Gene Ontology: Mol. function=double-stranded RNA binding; Cellular component=endoplasmic reticulum; Biological process=protein modification process
  Homolog annotation: Hit_ID=Q9AS33; Match level="QueryCoverage=27%, HitCoverage=13%, E-value=3e-24, Identity=94%"; Hit description=NPL4 -like protein
  Pfam annotation: Domain name=TPX2; Domain location=55-97; Score=10.2; E_value=0.055; Accession=PF06886.2; Description=Targeting protein for Xklp2 (TPX2)
MSEICVKLFKDGVLETEVQDADDPRLSKMRKEVVAGGKDTMEVDNDFFLVPVKISDHQFYTKLEEKHKALEAEKDEAEARKKCTVEGYNLVFQACPSPADGLVGKESYAQVQIGRQILGKGVGLTWEEAKLQKFVGVLLPKSAIKFERYLMDEILSINADVSEVEFGKKVKLTHPCCRADSRSRGSDPEGGYGFCKYETQDLVQGRWLWYF

SEQ ID NO: 56988 - protein, 36 aa, Zea mays
  Coding DNA Sequence Number=SeqID_13613
MRGKANCCSLARVQLSVFHSGGGRAACGPATSRGHW

SEQ ID NO: 56989 - protein, 266 aa, Zea mays
  Coding DNA Sequence Number=SeqID_13614
MRQSLEASITTPLEARGLLSGTEIRGTSNTPNHGWDSASPRLSLASDGTVVQDEFAPRPRVSSGRKQRHPPCSGCCANRPGETDNGQDKPRAQQEAPPRPTLGLGLNLYLGRRSPPRPTPGLGLDFGLGKSHILARPWASAPASALEEPPPRPTSGSDQPRHGGSIITLLLASSGYEGTRPVSHPAYPGNRRWWFPACNHDVGDPQALYGSKETSARSMQRQQLYCYRAQGISPTATMLPLQDSRRPPDGHVVICTGLRAPPCQPR

SEQ ID NO: 56990 - protein, 285 aa, Zea mays
  Coding DNA Sequence Number=SeqID_13615
MQPGRLMKILEAERWLKGTNFREVAFLQRQQDKSDASVPHPGAQKPSRTESSPTRSKVLPYDTGAGPHASCKLAQGGRSQTATRGARNCPAVTSASPLSPRPTGERADRHAGGMQPHQGAHPFDFDASSMEAQAHTSCNRRAGYYVRETAPPLAPVPRLLDCGTGAATRGDPTHDPTVPTEHIGHGSVSRGRRRDGRYGQKWAGSNGGGRRAEAAVKPSASSCPLLGQQESPLPRREDDAPVFCSSNGSCTHNGCPANHSSRRINSAAGQAAPLAGEAGDASPPP

SEQ ID NO: 56991 - protein, 156 aa, Zea mays
  Coding DNA Sequence Number=SeqID_13616
MAHTRKTSCKSTGPFGVPRHQLAPRYEGSSSGSNDPIGDLEAKISERSSAIDWAVNSHSITWDREAKARARVAELSAALDSLQVYCNALHVEVHVLYARLHPDVPSDAAAMGARPSGTASEGPDGELDLFRPLPSMNLADERSPGAENEATKDDED

SEQ ID NO: 56992 - protein, 126 aa, Zea mays
  Coding DNA Sequence Number=SeqID_13617
GGLDKQGRGSARVRAVAPARRGAAPVSTTSAGPIEFTSIWSLGIGPTRMSDYSIIKVDQSGREHGEKTVGDRYPRAHQKDKRPHERPVGPMVREVIPSWAWEKRPIRRIDARLDRRKPRWPDGLEQ

SEQ ID NO: 56993 - protein, 194 aa, Zea mays
  Coding DNA Sequence Number=SeqID_13618
MPPRTRRTARKHIGPIGVPCHQLAPRHDDSSSGSNDPIGDLEAQVNRLQAELCRRIDIWAADGDRINEMRSDIRHLRDQLVDQDLALNWVVQSCSLAWAKEARAQARIAELNSAIDDLQTYCNTLHEEVHVLYSQLHPSEPADPVGTEAGPSHVAGEALGGELDLYRPPPSMRLVDEWSPTPDDEAARSNRKQE

SEQ ID NO: 56994 - protein, 289 aa, Zea mays
  Coding DNA Sequence Number=SeqID_13619
MTSHGSSDEGNAQSHTDGLAREGFPRILWEVLQGAGYTTPPQYAVQQFEKHRVPRCRVRMTLEPHPLQPGWRSLDSESFGYRTEDTIEAIALHGLTTFCGFHPLELSTHPIGLLPAEKEDDPMWKDRVEHAKDIWAIYPGQTTHLTVRCMNALYRLQVIRGEAMSHLMALLEATKITLDNREELVVDLSTEMVEKDLQVEQLSNEIQELEELLGTRENTIEVLEDQLINTQQQLAEANQHLDMHHQEIQDMEANEDVNIEGGEEPASSLDTAGSGRPPSPESSVALFAH

SEQ ID NO: 56995 - protein, 395 aa, Zea mays
  Coding DNA Sequence Number=SeqID_13620
MARRRRGRGWPCRGDNKCKCALSPPSEDFGDSEYFEEVSSESDRSPTLASPPSSSEDSDDSMGLSTATRAYWRSIERAGLGGSDESGVSSDEADSSDSSEEWSSGLWKIILSFQVACLGHWELVPAELLSLGNDSPSGLVPHNGNMCSLLLALALPDCSSWMLGQEGEVPDCSGAGCTRDDRQFSTGSSRLERCNTLLPSVDLYVRQEGSWLASPWRQQAQACPKYPSEDFGDSKYFEEVSSESDRSPALASPPASSEDSDDSMRLSTAVRAYWRSIERAELDGSDESGVSSDEADSSDSSEEWSSGDGDDEGDDSGDDSGEGDSGDNSDDGDKGGSEGDDGNDSGDDDDGGDSGSKGDGSNEGSKGDGGDDSSKGDGGDDDSGNGKASGIAPLV

SEQ ID NO: 56996 - protein, 188 aa, Zea mays
  Coding DNA Sequence Number=SeqID_13621
MLNSLHSDESEWDDGEVRARWKDLHGRRDAEENSTRPRRADVVAGTNGEPRVEYKERQRRGEGWRRQPGEASPRQLACSTTTDTAGEGARATCLLMTKRDARLTTAQDPKTSELEDWAPTAADATAGREKMKGMKLDTMACMRDRKQGECVSVLEAHLVKKLRNGWDFSQGEEQHGRIREENGGEEYL

SEQ ID NO: 56997 - protein, 137 aa, Zea mays
  Coding DNA Sequence Number=SeqID_13622
  Subcellular localization annotation: CTP_CleavageSite=43; ConfidenceScore=5.23e-01
MVGTSAVTTRQQPGSVEHCMPRRRSNLAKVRFRIWLMMNSPTPASGGDTCFNSDFLSHDGFPSILWEVLNSAGYPTPPLYMVQLYEEHRVPRCRVWLTLEAHPLQSGWGSLDSETIGFRTDDTTEAAAMKTLTTFCG

SEQ ID NO: 56998 - protein, 125 aa, Zea mays
  Coding DNA Sequence Number=SeqID_13623
MGSEQRQCGCAIHRAGGMQATPRESGAAGGLLFWGRVECERAAGHGEESGEARRRRKAKNGAAAAHGLLRRSAVELAARRGSKVVAATSDDNAREELAAGGLLAMGAELAAGASAWSKERSACWG

SEQ ID NO: 56999 - protein, 37 aa, Zea mays
  Coding DNA Sequence Number=SeqID_13624
MAQTPGYRFPPAHPDAMARLSVPKSSGTEPARLCFNT

SEQ ID NO: 57000 - protein, 441 aa, Zea mays
  Coding DNA Sequence Number=SeqID_13625
  Homolog annotation: Hit_ID=Q6J9V9; Match level="QueryCoverage=22%, HitCoverage=37%, E-value=4e-09, Identity=41%"; Hit description =Putative uncharacterized protein
  Subcellular localization annotation: CTP_CleavageSite=38; ConfidenceScore=5.45e-01
MQTGSEQKKPNRRVWGTQPPSGYKRSSTFAQTNGRERRAAMQAACNRAKWTRFSDSQRAQPGGPGPRVTQPARRMLHASNCTATCATTAPLWLRNQYRDSRRPGTRPSSASLTRRSNGRRFALAETTAPKKGPRKGDPPKGILPREGTRLRASLLIRGSKAGPRRVQQPPQIAWALHPLLVRGSKAGPRRVPRPPQATRAPCPLLIRGSKAGPRRVHSRLRRRARDDQGIPSEGGIEPSDPVARGPGPADHPQRLGGCSRKPGSGRTVDSVNIPARELGPRPYTRATASSHEGTTRPAEALRKALRPRRSEITPPRPRGLHPAGALARTHLNQMQPRKAGPLAKKCGESLQASTNTPFEARGLLSGTIIRGTLKTPNSQLGSDSGKAPEDGKLRSARPRARTRAKPRKTANSALPDPGLGLGLSPGRRRTPLRPTQGSDSG

SEQ ID NO: 57001 - protein, 80 aa, Zea mays
  Coding DNA Sequence Number=SeqID_13626
  Subcellular localization annotation: CTP_CleavageSite=59; ConfidenceScore=5.14e-01
MGVRTRPSKNAGATTVAYGVLYGPPSMANGQEKGWMCRTRTWRNHRSCGGRTSMPRPERQEAASEAAPKPSSPKGRARCS

SEQ ID NO: 57002 - protein, 151 aa, Zea mays
  Coding DNA Sequence Number=SeqID_13627
MAPAVGAEAEAAREVPVTDGITATIHASGLRSAHPEACAAAARPSGAGVVVVVVIAGGGEPLVSLLLLRRPSPMEWGYSPVDYLNRFTKHESPRVKVTSEHEQRRSWLEDENLVGRSLAGLSVSGTDAGVDQPRPRIGLAPLEDGWPRPQG

SEQ ID NO: 57003 - protein, 51 aa, Zea mays
  Coding DNA Sequence Number=SeqID_13628
MFGLQVVMRMMVLIMIMVMVAFGAIYAQVKKKENGVEADLQEFQDIEEFED

SEQ ID NO: 57004 - protein, 245 aa, Zea mays
  Coding DNA Sequence Number=SeqID_13629
MKNQMLHWIEEARCDEDITSIHTINGPITRSRARQLNLQLRSTLVNCVSELTLGAIDVLMIRDKPPWRGHSCVMGDNQRSRGVVIARNRSLGALDHQRRDLHSIKLSYLTEDWAASTINWYQISRLPVRPATRTSTWNTYSALLSITDLWAIYIYLSAFPELQLSLEQNRYSFAITPTLVGQSHRSPFAACSAGPKNQMDKDKGPQLNDDECVSQMELKVMMRAMTEAFKKYQDSMATSYEQLDR

SEQ ID NO: 57005 - protein, 166 aa, Zea mays
  Coding DNA Sequence Number=SeqID_13630
MDVDIEIVVDEEDDEVQNDNDLVILEGNDINDELASSDGFWTNMVDGNWLRGRRGRRSRTADEAEQAAPQDDLVQQQATPQDDDDQQQDNDDQQQDASGSGASGLGWLWIMLGVIVAPPMASLACCAGEHFLGLVEISSDARLDTRLGRMWWPPRAVRKLVMGHAL

SEQ ID NO: 57006 - protein, 57 aa, Zea mays
  Coding DNA Sequence Number=SeqID_13631
MARVACTLCGKRLDGGVFVLSVRKRQIFAVFVQRWCPKKKTRSEASGGKDPPLKTFV

SEQ ID NO: 57007 - protein, 139 aa, Zea mays
  Coding DNA Sequence Number=SeqID_13632
MGKNNKRKREPTPPSEEFGDSEYSEEEFSSEPEGSPAPVSPPASSDDSDDSQGIATEVWTYIRAVERAGLEGSDESEYSSDEEDSDGGDEGEDDDDDDDDDDGDDSGRGGGDGSRDSTKGDSSRGSTKGGGGGRDRASG

SEQ ID NO: 57008 - protein, 134 aa, Zea mays
  Coding DNA Sequence Number=SeqID_13633
MAICDAQNCTRLHLGRMHQAAIPDGYPISARYPMGTSMGTKLYPLLFGFYCPTPKDTSPTSVDPLVPNFRDEDEEICQCEDQGAIANTSSDDEDLGIPPPPPVSPCSHDHEAGGSGVAPSTARLAIDPALAAIL

SEQ ID NO: 57009 - protein, 154 aa, Zea mays
  Coding DNA Sequence Number=SeqID_13634
  Gene Ontology: Mol. function=protein heterodimerization activity; Cellular component=microtubule; Biological process=cell division
  Homolog annotation: Hit_ID=Q337H9; Match level="QueryCoverage=85%, HitCoverage=23%, E-value=4e-55, Identity=58%"; Hit description =Katanin p80 WD40-containing subunit B1, putative, expressed
  Pfam annotation: Domain name=WD40; Domain location=102-140; Score =47.1; E_value=6e-11; Accession=PF00400.23; Description=WD domain, G -beta repeat
  Pfam annotation: Domain name=WD40; Domain location=19-58; Score=15.0; E_value=0.29; Accession=PF00400.23; Description=WD domain, G-beta repeat
  Pfam module annotation: Pfam domain module=WD40::WD40; Domain location=102-140::19-58
MRRGRQILKDVIEDFARGVGASSEFVAHTLNVNCAKFGRRASRILITGGEDLKVNLWAIGKPGALLSLSGFISPVESVRPDSSEVTIGAGAASGTIKNIEEAKVVRTFTGHRSSCASLDFHPFGEFLATGSSDTNMKIWDTQQKRCIHTYKGHT

SEQ ID NO: 57010 - protein, 79 aa, Zea mays
  Coding DNA Sequence Number=SeqID_13635
MKDAKPIKTPMGTNGHLHLDMGAPTTIPAVAVDGHTRQSGGAPDTALFTVRCRMYFSNLTSPSALMHMLRGRIFYNFAL

SEQ ID NO: 57011 - protein, 45 aa, Zea mays
  Coding DNA Sequence Number=SeqID_13636
MGLGVCGSLCQGGYEIDGSGYDYGNGKEGVEADLQEFQDVDEFED

SEQ ID NO: 57012 - protein, 224 aa, Zea mays
  Coding DNA Sequence Number=SeqID_13637
MMVTRSAITERKGWRRKGQGGRFPLLWLSLSGCENLRGRQEAEQRTVTRPSPGYIKTKARPVQTFRPDRTRDLKTQSETAVPRTARARATAAPRTTRPVALTPRRDRRRLWQEKQATLRLRHNNRAKKGIGKGDTPKWILPREGTRLRAPLLIRGSKAGPPEGFDSRLRSRGPYTHYWSEVRRSAPRKGSTAASGYLGSTPITDQGFEGWPPKGSQPPQTPSEG

SEQ ID NO: 57013 - protein, 18 aa, Zea mays
  Coding DNA Sequence Number=SeqID_13638
MGYNASDSDSDANDDANQ

SEQ ID NO: 57014 - protein, 134 aa, Zea mays
  Coding DNA Sequence Number=SeqID_13639
MREAQEMGAILALATMEVLAPAARAASAPTRLAGDKAKNEEPGSRIDGVMKWEHGAHHRGPHMWPRPRVEVLIWCPRDDLVAEAYRGNGGQGSTEAAEEDTRERARYARGPTIASTLLSKIGSSREIKAHLDQF

SEQ ID NO: 57015 - protein, 163 aa, Zea mays
  Coding DNA Sequence Number=SeqID_13640
MGKSKKGGSSSHHSSDKRKREPTPPSEDFGDSEYSEEEFSSESEGSPVHASPPVSSDDSDDSQGIAAEVWTYIRVVERAGLEGSDESEYSSNKENSSNSSEEATAMAVTATTTEAMVTAAVVAAKAAARAVTAAARVAAATAAMAVRAATGAATRPVARRHWF

SEQ ID NO: 57016 - protein, 91 aa, Zea mays
  Coding DNA Sequence Number=SeqID_13641
MALELHGVHDDVPHHWSEDDLLVVGHSRAETGTRLDGQPGRNRLANEVVGRSGIEECSVVAPRDAHIYIVLQMAPLATACREKTGVGLGIR

SEQ ID NO: 57017 - protein, 164 aa, Zea mays
  Coding DNA Sequence Number=SeqID_13642
  Homolog annotation: Hit_ID=Q5Z9G5; Match level="QueryCoverage=48%, HitCoverage=32%, E-value=2e-11, Identity=43%"; Hit description =Putative uncharacterized protein P0655A07.24
  Subcellular localization annotation: CTP_CleavageSite=48; ConfidenceScore=5.00e-01
MGVACSPALEVQPSRGFGDAAACPHKGPAIARPLDRGTAATTPDRGTSATARRAPRAVRGGAGGLAVLRAYPFRVPARGVLPLAYVARAQGAPLGDAGSAAMEAALRDGVVPFRVDGEAQTQWKVAGIVGVDQWTRLACQLRFFWPNGTVLPFRCISKSKFLFF

SEQ ID NO: 57018 - protein, 85 aa, Zea mays
  Coding DNA Sequence Number=SeqID_13643
  Subcellular localization annotation: CTP_CleavageSite=32; ConfidenceScore=5.74e-01
MNPKSMPRGTPKTHFSGLSFTPFALRHRNVVSRSKKTSEAFLVLTTLSSTVGKPFRMEYLFDEPCCHQLVDLLAYGSTLFFVESA

SEQ ID NO: 57019 - protein, 226 aa, Zea mays
  Coding DNA Sequence Number=SeqID_13644
MQAACNRTKGAHPFDFDASNMEAQAHTSCNRRAGYCVRETALPLAPLPHLLDCGTGTATRDSPAHDPTVPTEHIGHGTGGTFGGRSRRRFTSAIMTASKKVRHDIRIRIPFPFHFLFLSLATRTGKGDTPKGILLREGSGPRAPLLIRGLKAGPSEGFDSRLRALGLRAHYWSEVRRLAPRKGSTATSGHSGSAPTTDQGFVGWPPKGSTAASDAERGMTLGTFDT

SEQ ID NO: 57020 - protein, 176 aa, Zea mays
  Coding DNA Sequence Number=SeqID_13645
MAPGIRAPPHHDISPLLERQLVLELKCRELGEEWVDVLPSCRSSGLAFPLNQNLAHTACHARPNRTFRLRCNDAVRTVVPMLQLAEAGLWQGCSAVVSKTEEDPVAHLVGDVVGALVRGAEDILRPRQPLAWLVPDEAEQIHDNDVVHTFIYNYSKSTVRNTVDYSGREKLFGKID

SEQ ID NO: 57021 - protein, 731 aa, Zea mays
  Coding DNA Sequence Number=SeqID_13646
  Gene Ontology: Mol. function=nucleoside-triphosphatase activity; Cellular component=mitochondrion; Biological process=PSII associated light-harvesting complex II catabolic process
  Homolog annotation: Hit_ID=A7QTW2; Match level="QueryCoverage=83%, HitCoverage=82%, E-value=0.0, Identity=70%"; Hit description =Chromosome undetermined scaffold_171, whole genome shotgun sequence
  Pfam annotation: Domain name=AAA; Domain location=362-503; Score =172.8; E_value=8.9e-49; Accession=PF00004.20; Description=ATPase family associated with various cellular activities (AAA)
  Pfam annotation: Domain name=AAA_5; Domain location=362-505; Score= -17.6; E_value=0.062; Accession=PF07728.5; Description=ATPase family associated with various
  Pfam annotation: Domain name=FtsH_ext; Domain location=165-336; Score= -12.2; E_value=0.0063; Accession=PF06480.6; Description=FtsH Extracellular
  Pfam annotation: Domain name=Peptidase_M41; Domain location=510-711; Score=272.4; E_value=9.5e-79; Accession=PF01434.9; Description =Peptidase family M41
  Pfam module annotation: Pfam domain module=AAA::AAA_5::FtsH _ext::Peptidase_M41; Domain location=362-503::362-505::165-336::510 -711
  Subcellular localization annotation: CTP_CleavageSite=62; ConfidenceScore=5.58e-01
MSALQASLLLRPLFSPLPPRRRQLLSSASFSFPRGAHAPRLRALVPGAPQPDAAEPPAIASSAAAAAAAEAEPEAEPTTAAAQPVAMSAKEGLEDMVDKARAWAVAVAAAVLAAARRFVDWVLSRDWMGWWPFWRSEHRLQRLIDEADANPNDAAKQSALLHELNKLSPEDVIKRFEERSHAVDSRGAAEYLRALILTNTIADYLPDEQSGRSASLPALLQELKQRVSGNEDKPFMNPGISEKQPLHVVMVDPKSTGRSTRFAQEIFSTILFTIAVGVMWVMGAAALQKYIGSLGGIGASGAGSSSSYSPKEMNKDMMPEKNVKTFKDVKGCDDAKKELEEVVEYLKNPSKFTRLGGKLPKGILLTGAPGTGKTLLAKAIAGEAGVPFFYRAGSEFEEMFVGVGARRVRSLFQAAKKKGIIVMAATNLPDILDPALTRPGRFDRHIVVPSPDVRGRQEILELYLQDKPVANDVDINAIARSTPGFNGADLANLVNIAAIKAAVEGADKLNAVQLEFAKDRIIMGTERRSMFISDESRKACLFLLTYLFGNGHAIVALNTQGAHPIHKATILPRGSALGMVTQLPSQDETSISKKQLLARLDVCMGGRVAEELIFGEDNVTTGARNDLHTATELAQYMVSNCGMSDAIGPVHVKERPSIEMQSRIDAEVVKLLREAYGRVKRLLRKHEKQLHALANALLERETLTADEINKVVHPYQEEPHLSFQDEEFALA

SEQ ID NO: 57022 - protein, 576 aa, Zea mays
  Coding DNA Sequence Number=SeqID_13647
  Gene Ontology: Mol. function=binding; Cellular component=nucleus; Biological process=regulation of transcription
  Homolog annotation: Hit_ID=A7QUP3; Match level="QueryCoverage=65%, HitCoverage=89%, E-value=1e-103, Identity=43%"; Hit description =Chromosome chr10 scaffold_179, whole genome shotgun sequence
  Pfam annotation: Domain name=PPR; Domain location=225-259; Score=0.5; E_value=6.7; Accession=PF01535.11; Description=PPR repeat
  Pfam annotation: Domain name=PPR; Domain location=260-294; Score =21.5; E_value=0.0031; Accession=PF01535.11; Description=PPR repeat
  Pfam annotation: Domain name=PPR; Domain location=322-356; Score =31.7; E_value=2.6e-06; Accession=PF01535.11; Description=PPR repeat
  Pfam annotation: Domain name=PPR; Domain location=424-458; Score =50.7; E_value=4.9e-12; Accession=PF01535.11; Description=PPR repeat
  Pfam annotation: Domain name=PPR; Domain location=459-492; Score =12.8; E_value=0.24; Accession=PF01535.11; Description=PPR repeat
  Pfam module annotation: Pfam domain module=PPR::PPR::PPR::PPR::PPR; Domain location=225-259::260-294::322-356::424-458::459-492
MVSESIAPTKYISQIETNHSTVTFQSFFLKLHPFCPHRTTGDAHVRAAGQCGPILHGLNLGSHEPSAPHSVTHQPPLRDEVSRVTQTAVLRLASGDLRPPSPAAVLCHGPWTVVRQQQGSSLCPTACPPPASATSASGLWAPVSRLCPRRSSSGLRHQALSYSSTAPVPATARSSTPPSRTALKVFDQSPAPWRAFLKAYSHGPFPLEALHLFKHARQHLADDTFVFTFVLKACAGLGWHRAGAQLHALVVQKGFEFHAYVHTALINVYVMSRCLVEARKVFDEMPVKNVVSWNVMITGFAGWGEVEYARLLFDQMPCRNVVSWTGLIDGYTRACLYAEALTLLRHMMAGGISPSEITVLAVIPAISNLGGILMGEMLNGYCEKKGIMSDARVGNSLIDLYAKIGSVQNSLKVFDEMLDRRNLVSWTSIISGFAMHGLSVEALELFAEMRRAGIKPNRITFLSVINACSHGGLVEQGLAFFKSMVYEYNIDPEIKHFGCIIDMLGRAGRLCEAEQIIEGLPMEVNVTVWRILLGCCILSNVLTELGRFSDAEQARKLLDQRKIVKVPGLALVGEIQ

SEQ ID NO: 57023 - protein, 205 aa, Zea mays
  Coding DNA Sequence Number=SeqID_13648
  Gene Ontology: Mol. function=nucleic acid binding
  Homolog annotation: Hit_ID=A3AQ03; Match level="QueryCoverage=42%, HitCoverage=51%, E-value=6e-08, Identity=36%"; Hit description =Putative uncharacterized protein
MQLYAHLSLEDKAVMLKLLKRAREQSETRQMLEDVLSMKMLRFDELTKEHEELKCSHVDLVQSKSSFELEFTGTKDDTYQKLKEENERLKMSLTQLKGKCIAQPSQDNRDHMVKKLETGTTMACTKSLKENFKDLRIVKRKEQKKKINTSAKSLNHASIQGNIQGNPKLQLVLERNRNNIELQMYLQLDGDESTSVTQKRMSKSA

SEQ ID NO: 57024 - protein, 546 aa, Zea mays
  Coding DNA Sequence Number=SeqID_13649
  Gene Ontology: Mol. function=hydrolase activity, acting on glycosyl bonds; Cellular component=cellulose and pectin-containing cell wall; Biological process=cell wall organization and biogenesis
  Homolog annotation: Hit_ID=A2ZVG8; Match level="QueryCoverage=75%, HitCoverage=91%, E-value=0.0, Identity=81%"; Hit description =Putative uncharacterized protein
  Pfam annotation: Domain name=Glyco_hydro_28; Domain location=74-431; Score=77.0; E_value=6e-20; Accession=PF00295.8; Description=Glycosyl hydrolases family 28
  Subcellular localization annotation: CTP_CleavageSite=45; ConfidenceScore=5.02e-01
MARRCPCRLLLAVAAAAVLVAAAAQAQETCSGTVPAPPRRGARVSVASFGGAGDGRTLNTAAFARAVASIERRAAPGGAELYVPPGVWLTGPFNLTSRMTLFLARGAVIRATQDTSSWPLIEPLPSYGRGRELPGGRYTSLIHGNGLQDVVITGENGTIDGQGSAWWDMWKNRTLLYTRPHLLELMSSSDIIVSNVVFQDSPFWNIHPVYCSNVVIRNVTILAPHDSPNTDGIDPDSSSNICIEDCYISTGDDSIAIKSGWDEYGIAYGRASSGITVRRITGSSPFAGFAVGSETSGGVENVLAEHLNFFNSGFGIHVKTNTGRGGFIRNITVSDVTLDNVRYGLRIVGDVGNHPDDSYNRSALPIVDALTVKNVQGQNVREAGLIKGIPNSAFSRICLSNVKFTGGAPVRPWKCEAVSGGALDVQPSPCTELTSTSYEEKKTTLRHRRPSGPERIPFGHSAEKAFPAAGSLTVRPSLLETQTVHTAPVSTARRPDDPSWTAASYTSQSQTQDIAHHEKTIRPSGVHDRTVRDYLYLTSDDALNAI

SEQ ID NO: 57025 - protein, 23 aa, Zea mays
  Coding DNA Sequence Number=SeqID_13650
MDKDERESEQQFGLSRPKKLSDL

SEQ ID NO: 57026 - protein, 140 aa, Zea mays
  Coding DNA Sequence Number=SeqID_13651
  Homolog annotation: Hit_ID=A3AJE1; Match level="QueryCoverage=47%, HitCoverage=46%, E-value=4e-09, Identity=40%"; Hit description =Putative uncharacterized protein
MGVWDTDGFAFLSLRLRGIYKVRIQTTVELTWQYLDAVDLGAEVGAQIHVPYLGAKIYGAENLSKFKKGPLTGTASDPLPLPTGVLVPMCFCGDPCKVDKSEDHDTYRQKYWMCANYAFESMIVQRRMNLMTPPPLCDFE

SEQ ID NO: 57027 - protein, 30 aa, Zea mays
  Coding DNA Sequence Number=SeqID_13652
MNGQSANQEQSQEAVSVWSTGLSGSAPDSV

SEQ ID NO: 57028 - protein, 34 aa, Zea mays
  Coding DNA Sequence Number=SeqID_13653
MASDTPSLARVDANAEVKIVTHARTNYTCASGQI

SEQ ID NO: 57029 - protein, 645 aa, Zea mays
  Coding DNA Sequence Number=SeqID_13654
  Gene Ontology: Mol. function=triacylglycerol lipase activity; Biological process=lipid metabolic process
  Homolog annotation: Hit_ID=Q5ZBH3; Match level="QueryCoverage=96%, HitCoverage=95%, E-value=0.0, Identity=64%"; Hit description=Lipase class 3 family protein-like
  Pfam annotation: Domain name=Lipase_3; Domain location=338-479; Score= 104.2; E_value=4e-28; Accession=PF01764.16; Description=Lipase (class 3)
  Subcellular localization annotation: CTP_CleavageSite=32; ConfidenceScore=5.51e-01
MAAATVAAAGTAAPAAAMHAGIRRSRSEPHLRCPRRAGAALTTSRSIGVFPFQLGAAPLRPPPLPDGGADGSRLLTVADDDPPEEPGPEMPPARRPEAHWLGRLLELRSRFHDPTKRDVLDDDDDDLYRLDADHHDGGCGVSYDDEEEDARWDRHSFAKLLARAPLGDARLFAQLAFLCNMAYVIPEIKVEELKKHYGLRFVTSSLEKKAEAGIISAKLDADSTRPRTAPAYEVASGPQPRRPIRPHLAYEVAASAANYVRARARGLLSFGTPQAQLQAGHGRLYNSGVAAYMAASTVTAVVAAEDEARQEAARDLRSPLSSPCEWFVCDEADARTRCLVIQGSDSLASWQANLLFEPTEFEGTGVLVHRGIYEAAKGIYEQVVPEVEAHLRRARAGRAPRLRLTGHSLGGSLAVLVSLMLLARGVVTPEALHPVVTFGAPSVFCGGNRVLEALGVGEAHVRSVAMHRDIVPRAFSCRYPGQAIALLKRLNGVLRAHPCLNTHRSLYMPMGATYILQPDSSVSPRHPFLPEGAALFRLDSERSPTALVASALRAFLYSPHPLETLSDLSAYGAGGAILRDHESSNYFRALSALARAPPRRRKQPEIVWQLPGVERLQQYWWPGIAGTVIPAPVAVLSNKELVSEA

SEQ ID NO: 57030 - protein, 27 aa, Zea mays
  Coding DNA Sequence Number=SeqID_13655
MAWGKVAGRNPREGFIADSCREDGGGC

SEQ ID NO: 57031 - protein, 297 aa, Zea mays
  Coding DNA Sequence Number=SeqID_13656
  Gene Ontology: Mol. function=nucleoside-triphosphatase activity; Cellular component=nucleus; Biological process=DNA metabolic process
  Homolog annotation: Hit_ID=A2XZT8; Match level="QueryCoverage=83%, HitCoverage=66%, E-value=9e-58, Identity=57%"; Hit description =Putative uncharacterized protein
  Pfam annotation: Domain name=Rad51; Domain location=56-276; Score= -103.6; E_value=0.00046; Accession=PF08423.2; Description=Rad51
MANMLVSEMRLPLYLAHLLAARRLDTAKDVLSLPEVELMAILDAGLPTARAAIAHVSEAACPPCQTALSLLEERVRLGGGGRLATMLCGLDEALGGGIPTGKLTEVVGPSGIGKTQFCLKLALLAALPEYYGGLDGRVVYIDTEFKFSPRRMIEIGQKSFPQIFRQEGLAQKVLILHILILGVDTFSEAPITQKNQRRCSLIEVVLVRLLGVQSAVALHLYKGGGLDPLPTDFRVNPAVLGNKSREKLGTLTDSAHARTVRATTADGPDRGPSGLRAGPSARSFWVPTYAPLPFGEG

SEQ ID NO: 57032 - protein, 328 aa, Zea mays
  Coding DNA Sequence Number=SeqID_13657
  Gene Ontology: Mol. function=sugar:hydrogen symporter activity; Cellular component=membrane; Biological process=carbohydrate transport
  Homolog annotation: Hit_ID=A2XFD3; Match level="QueryCoverage=88%, HitCoverage=93%, E-value=2e-86, Identity=58%"; Hit description =Putative uncharacterized protein
  Pfam annotation: Domain name=DUF6; Domain location=187-322; Score =0.9; E_value=0.061; Accession=PF00892.11; Description=Integral membrane protein DUF6
  Pfam annotation: Domain name=DUF6; Domain location=41-169; Score=7.5; E_value=0.026; Accession=PF00892.11; Description=Integral membrane protein DUF6
  Pfam annotation: Domain name=TPT; Domain location=178-322; Score =159.2; E_value=1.1e-44; Accession=PF03151.7; Description=Triose -phosphate Transporter family
  Pfam annotation: Domain name=UAA; Domain location=41-328; Score= -66.6; E_value=4.5e-07; Accession=PF08449.2; Description=UAA transporter family
  Pfam module annotation: Pfam domain module=DUF6::DUF6::TPT::UAA; Domain location=187-322::41-169::178-322::41-328
  Subcellular localization annotation: CTP_CleavageSite=45; ConfidenceScore=5.28e-01
MGQQEGHSNPHPDEAALPTTTAAPSPSPSPSPSPSSSRLYTAWLVASWYASNIGVLLLNKYLLSVYGLPLPAAADRVPHHASPRPRSSSSPRSHRQLARVALLGAVFCASVVAGNVSLRHLPVSFNQAVGATTPFFTALLAYAVAARREACATYAALVPVVAGVAIATGGEPSFHLFGFVMCVAATVGRALKTVLQGILLSSEEEKMDSMDLLRYMAPVAVLLLVPATLAMERDAFGVVAGLAREDPSFLWLLLCNSCLAYFVNLTNFLVTKHTSPLTLQVLGNAKGAVAVVVSILIFRNPVTVVGMLGYGVTVAGVVLYGEAKKRSK

SEQ ID NO: 57033 - protein, 20 aa, Zea mays
  Coding DNA Sequence Number=SeqID_13658
MDRTASATARNGKHAEMVRK

SEQ ID NO: 57034 - protein, 229 aa, Zea mays
  Coding DNA Sequence Number=SeqID_13659
  Gene Ontology: Mol. function=polynucleotide adenylyltransferase activity; Cellular component=nucleus; Biological process=RNA 3'-end processing
  Homolog annotation: Hit_ID=Q5G7K0; Match level="QueryCoverage=53%, HitCoverage=15%, E-value=3e-29, Identity=56%"; Hit description =Putative polynucleotide adenylyltransferase
  Pfam annotation: Domain name=PAP_RNA-bind; Domain location=1-67; Score=-49.4; E_value=0.016; Accession=PF04926.6; Description=Poly(A) polymerase predicted RNA binding domain
MGLWRKQTTQAQETEQFDIRGIVNEFKNTICAYQHQKEGMDIEVSHVKRKEIPLFVFPGGVRPSRTSRTTHKNSRAIPTRDVSADDQVGNLLGVASCSDAQHVPCKGSYMKQPEPDFAGGFQLPGSISLLPPSLPNKNLLRVNIQNTIRKKDVNAENNLEIGSENNLEQICSLRPQESNNNLKRKVNQELEHSRVGVGRLEDSITVGDGAISGGRGCNVLADNGLKNTG

SEQ ID NO: 57035 - protein, 85 aa, Zea mays
  Coding DNA Sequence Number=SeqID_13660
MVLVDIPCKNHGWIDRLLAVGQIPPWCLGSPWTRVSMPSRPFVAPSGVWEVSLECHTGGVPAKIHHCEPCVVGQSDGGKKMGSAS

SEQ ID NO: 57036 - protein, 456 aa, Zea mays
  Coding DNA Sequence Number=SeqID_13661
  Pfam annotation: Domain name=Lem_TRP; Domain location=206-215; Score =3.0; E_value=74; Accession=PF08262.2; Description=Leucophaea maderae tachykinin-related
  Pfam annotation: Domain name=Lem_TRP; Domain location=225-234; Score =3.0; E_value=74; Accession=PF08262.2; Description=Leucophaea maderae tachykinin-related
  Pfam annotation: Domain name=Lem_TRP; Domain location=244-253; Score =3.0; E_value=74; Accession=PF08262.2; Description=Leucophaea maderae tachykinin-related
  Pfam annotation: Domain name=Lem_TRP; Domain location=263-272; Score =3.0; E_value=74; Accession=PF08262.2; Description=Leucophaea maderae tachykinin-related
  Pfam annotation: Domain name=Lem_TRP; Domain location=282-291; Score =3.0; E_value=74; Accession=PF08262.2; Description=Leucophaea maderae tachykinin-related
  Pfam annotation: Domain name=Lem_TRP; Domain location=301-310; Score =3.0; E_value=74; Accession=PF08262.2; Description=Leucophaea maderae tachykinin-related
  Pfam module annotation: Pfam domain module=Lem_TRP::Lem_TRP::Lem _TRP::Lem_TRP::Lem_TRP::Lem_TRP; Domain location=206-215::225 -234::244-253::263-272::282-291::301-310
MSSSELSSLVHRTLSGGPLGSPVRQTRAHFGCLLLSLFDPFLGLFICIGVCYSSSPLIQKLFLKTKNHFNIIWLTMSTSRTGSQVVSAFRDRGVPKPTSECAACPSPDGSSAWASAKGGEARWPESSVREVEVPRPSCSSRAQVRQGDVGVPPKPRLSLPSVAVAEPEPWGRARRKSFGRGQGGVRALGSGEAEFCRLPGLSPSPSPGVGRSGVRRLPGLSPSPSPGVGRSGVRRLPGLSPSPSPGVGRSGVRRLPGLSPSPSPGVGRSGVRRLPGLSPSPSPGVGRSGVRRLPGLSPSPSPGVGRSGVRRGAFGKAWLPVRLTLSSGTAVGVAQAALSFCQTGQWSGGVTAVTSALPGARVRIKVSGHLCVKCPCNLVSRCGDLVKVASERSQGLGRAGDVSAIKRGPRARRKSLELYADGGYQLRIRRLEGTPNYGPRQVARGVRGRFNRSWLV

SEQ ID NO: 57037 - protein, 600 aa, Zea mays
  Coding DNA Sequence Number=SeqID_13662
  Gene Ontology: Mol. function=nucleic acid binding
MRIRLKMMKMKIKRMSHLKKRSMIKGEIKIKKTRKMSKRYRVKDRHTQESTKQFNEIAPSTPSVVTFIRGVEDALRDPDWVPTMQEELNNFTRNEDGKPIKTPIGTNGHLDLDTGGVSRYMASPPLPGKDAAFGSGTTVRRPGRLRVMHPHVAELLRSPRRHARPAAAPQAKAQAPVPERARCSTRRMRRRLRGRGAGCAAPSSSRTSGTGPSRGPTPRRCSRSAPASRASPPWPPSPPPSTPRWPRSRARVLAGLSCCCGGGGDNEATASTQAIDNAGVRAGAPGAAVDAAFARRALQAEALLGYLSALATSPRAGGDRVDLAVAAAQLGALGRWKGSARGLPEYTVVHGIDDAVVAAPGRAKAKRRRPPSTGVDGPAPAKRRVSRNTHIAATKGNAACDTGDYEALELEDLPLGTPAQQTPTPTRIGKLMSRAAQNMSLSPVVLRVRATAANGSNCAPPPPTAVLPAPHMVRCAVVAAHEQLPPTRKDDSGDHEAWAGAGLVLNFSSAHAVPSARHLATAFSRFGPVKEVRVDNTTVVFDSDAHADEAFSGAAEIGSISASLVSFRVTSSLPAAPDDPAAQPQTQSMPSDTSPVEALR

SEQ ID NO: 57038 - protein, 38 aa, Zea mays
  Coding DNA Sequence Number=SeqID_13663
  Homolog annotation: Hit_ID=Q9SPD7; Match level="QueryCoverage=71%, HitCoverage=9%, E-value=5e-07, Identity=92%"; Hit description =Voltage-dependent anion channel protein 2
MAAAGPGLYSDIGKKARGLLYKDYHTDGVHAHHLRATS

SEQ ID NO: 57039 - protein, 73 aa, Zea mays
  Coding DNA Sequence Number=SeqID_13664
  Homolog annotation: Hit_ID=Q2QQ28; Match level="QueryCoverage=84%, HitCoverage=7%, E-value=6e-07, Identity=43%"; Hit description =Retrotransposon protein, putative, Ty1-copia subclass
MDANLEPELQMQFETNHEVYDMIVALKDMFQTQARTERFNVSKAFLECELAKVTAVGPHFLQKPSFFGKRAKT

SEQ ID NO: 57040 - protein, 127 aa, Zea mays
  Coding DNA Sequence Number=SeqID_13665
MIARNGREGGKRGMGARPSRGDEGGSRGDEGGGIFGKTGLPSSFLSLARHHCDLSLTWNWRRISPSGLVGAQRWQVSRRWLMRLVGRAEREASGGGLHLGEPGKEGHPTARLVAGGLGVGGGASEIP

SEQ ID NO: 57041 - protein, 162 aa, Zea mays
  Coding DNA Sequence Number=SeqID_13666
  Gene Ontology: Mol. function=methyltransferase activity
  Homolog annotation: Hit_ID=A2XNI6; Match level="QueryCoverage=35%, HitCoverage=20%, E-value=5e-21, Identity=85%"; Hit description =Putative uncharacterized protein
  Subcellular localization annotation: CTP_CleavageSite=40; ConfidenceScore=5.53e-01
MGAQPAHSLVPPSASGRWSPARGNGERRRRGSNGEARGAPSGAKKGLPRKGKASSGRTLNTTQIPLVASHPDVYEPCDDSFALVDALLSDKAQLLTLQPRHSERIKNQPSLIGLPQLVTRIQKRVRKKGTTHFNKSKDQNANSSYGTHDIVIGSTWLDYLSC

SEQ ID NO: 57042 - protein, 96 aa, Zea mays
  Coding DNA Sequence Number=SeqID_13667
  Subcellular localization annotation: CTP_CleavageSite=46; ConfidenceScore=5.33e-01
MDSTSPDPRARTQPRPRKMVSASPDPRAQTQPRPRRNHRLARPRARTDHAVGGGYGKPVGYPKPAWVWVWAKFYTRHGYGFFSGRIFFFAGTGLGK

SEQ ID NO: 57043 - protein, 202 aa, Zea mays
  Coding DNA Sequence Number=SeqID_13668
  Homolog annotation: Hit_ID=Q6J9V9; Match level="QueryCoverage=62%, HitCoverage=35%, E-value=5e-21, Identity=50%"; Hit description =Putative uncharacterized protein
MQAACNCAKGAHPFDFDASSMEAQAHTSCNRHAGYYVRKTAPPLAPVPRLLDCGTGAATRGNPAHGPTVQPEHIGTGKGDTPKGILLHEGSGPRALLLIRGSKAGPSEGFDSRLRALRLHAHYWSEVQRLAPRKGSTAASGHSGSAPTTDQGFEGWPLEGFDSRLRTRRARDDSGYVRYMVEARATLPSYPRTFPRPAGAIL

SEQ ID NO: 57044 - protein, 150 aa, Zea mays
  Coding DNA Sequence Number=SeqID_13669
  Subcellular localization annotation: CTP_CleavageSite=79; ConfidenceScore=5.46e-01
MATQAKDLHLEGRCQHRAWAVAAGVSSRNSARADGSTGRSVASASCPPRTSARLMASAARLQGWSRQWTTWPGSNRRCYASSAWEVPCSWADEVFFLQPTPPLSTLTPLPPAPTHRRAAEVFLLTEQEKPRAARPTEPRDSYASEIRIPH

SEQ ID NO: 57045 - protein, 324 aa, Zea mays
  Coding DNA Sequence Number=SeqID_13670
MVTTSSMVGRSKPGCDLCPALSFKDLHHPCWGKGQAEPELYLPYGPAGHLLLQQSGERALTGLAEAVDFDNAGPISHKRRQLQHPGSLAQLALAQLPVPPPTAGRSVGYLPAVRAAVASRAPGDRPRRRALLGRRSCSWVVLPLLRYDASARRSVLARPGGLEWGSAGWRVDTIIGAEVVAAGEGLVADEIVGSICALGLRLFGFDSLSSPLEWGRGRGPCCSSVCPEVIAAAVWPPGAEVVVAAAGVGGGEPPGILSSRRPSNVGGCSYLWEWNRSSICNGTLSAGVCSLWLSGPKHLGILGVIPCFFLISGTRTRMSASWTA

SEQ ID NO: 57046 - protein, 89 aa, Zea mays
  Coding DNA Sequence Number=SeqID_13671
MAPKRASSKAAPSIDEAAKAVLLAKKKGKALADNTPKRPSKMKLSAKDSAKSTPPPKAPYAPLRALRIKNHNLQKQKDILEAKRQRVTT

SEQ ID NO: 57047 - protein, 309 aa, Zea mays
  Coding DNA Sequence Number=SeqID_13672
VAVASGAGAAKAVVAMLMPTDAGGRHAVGIHTVRAMKGLRTRVAPPDRGFAPWPYLRKGTAPARRGLQPHAPGTARPCRHTGQSCRRDAMPPSPQMAAPSLKRRVVVPAPLPCHRRSLLRPRRWGNSRPPTPETLPWRMPPGRYSTPGLRRRAARHAPAQKKTRSAPPGPWLEAAATGAGAGSRVRHGAEAGGRACEPPGHDENTPAPVRSRAPRVPELGTRAAAQPWPPALAEGRLARVLGPTPALADGRLAQSRQRSRPHGVAPPGAAPWPPVAPEGATEALCAGDSSSDFNRDHITWLWAVCAARA

SEQ ID NO: 57048 - protein, 145 aa, Zea mays
  Coding DNA Sequence Number=SeqID_13673
MGALSVLEFNAGLMEHGDAHATVREVQPTMPMNEGGIRWRWIWASVLKPSKGKGQHYAGSARENDQDIKITILINIPCLSPYLRFTYSNTWGVTLLPALLLLKINRLSLELPEGARMVLVDSTPDDETFFVRTILTRLLHNRVKR

SEQ ID NO: 57049 - protein, 70 aa, Zea mays
  Coding DNA Sequence Number=SeqID_13674
PGESLLRLRSETLPTHLGSVQGSVQPEAKRESQLMGKVATRLMVLGNDSGNGEDEDVEGDFQEFQDYDEF

SEQ ID NO: 57050 - protein, 230 aa, Zea mays
  Coding DNA Sequence Number=SeqID_13675
  Subcellular localization annotation: CTP_CleavageSite=42; ConfidenceScore=5.04e-01
MARVACTLRGKRLDGGVFVLSVSLCNRFRISVSPMICNVCVTGETLLGKGQRTNAPLRGLGLGADLLGPTSCPLTLLGGAGGHGRTGTRGRTGRLGTPSRYTRDLDPAERVQTVGLTNRHAAIVEGRQCGQDRRSQPWIITERRGVLGEYQGFRDKGLTSNALHQEFQLLLGQIGTQPALHPADIIWASEPAAQARPPLQRHDPALQEVADHMHGGHTTGCQGLDHVQYG

SEQ ID NO: 57051 - protein, 91 aa, Zea mays
  Coding DNA Sequence Number=SeqID_13676
MTTVVLSPLRKQGDVSKEGPGPPCRRVARENGLTNRLTLSLANACNPYYERIPLAQDNTSRVFPLVFRLAPTHVGWDTQRQFYSSVQVKGN

SEQ ID NO: 57052 - protein, 159 aa, Zea mays
  Coding DNA Sequence Number=SeqID_13677
MSREGHHRDTPAPIVARAGKGRRVETVHKFIYNYSKLTAQNTIDYCKQEKLFGKHLCMDRSGLLQRTVRDTRGRLPEWNGMEGRLAGPGGIGWVRVLPAPVSDARQINASSQRMSKPAGLNKRWGRERAALVVIVGANRVENTKAPGAWGIEEEATAEG

SEQ ID NO: 57053 - protein, 98 aa, Zea mays
  Coding DNA Sequence Number=SeqID_13678
  Subcellular localization annotation: CTP_CleavageSite=31; ConfidenceScore=5.26e-01
MTVGGGCLSYGAPDSPVHTGHVRRPLARSSRCPAVAPDSPVYTGHVRPRRFSLFETRDVNGDPIPANPWGIPLLGYEYGMESVPMGMVMGQNLHPLDK

SEQ ID NO: 57054 - protein, 485 aa, Zea mays
  Coding DNA Sequence Number=SeqID_13679
  Gene Ontology: Mol. function=molecular_function; Cellular component =membrane; Biological process=auxin mediated signaling pathway
  Homolog annotation: Hit_ID=Q10RR0; Match level="QueryCoverage=74%, HitCoverage=96%, E-value=1e-150, Identity=72%"; Hit description =Integral membrane protein DUF6 containing protein, expressed
  Pfam annotation: Domain name=DUF6; Domain location=208-337; Score =66.1; E_value=1.2e-16; Accession=PF00892.11; Description=Integral membrane protein DUF6
  Pfam annotation: Domain name=DUF6; Domain location=32-165; Score =22.6; E_value=0.0015; Accession=PF00892.11; Description=Integral membrane protein DUF6
  Pfam annotation: Domain name=TPT; Domain location=199-337; Score= -10.3; E_value=0.0023; Accession=PF03151.7; Description=Triose -phosphate Transporter family
  Pfam module annotation: Pfam domain module=DUF6::DUF6::TPT; Domain location=208-337::32-165::199-337
MAEREVVEGGTTTGGGLWRRYAPHVQMVLAQLCYTLMYFITEAAFNQGLNPYVYITYRHLLVAVLIWPFAYYLEKGLRPKMTLMLFVEIFVLSLLGVSLTLNMYFTSLKYTSPTFVTSVVNTIASMTFVIAIILRMEIVDVKSLRGVAKVAGTVVSFAGVTTMTLYKGAAITSLWKSPVQIAGSGSGGGGVAHDSWVKGSVLAVASCVCWSIWYIMQASSLKRYPAQLSLTAWMCTVGGIQSTVFTLFMQHEPEEWRIGFGVKFWSIVYSGLACNGFTVFVQLWCTEKKGPVFVTMFNPLSTIMVAILAYFIFGENLYVGSIVGGGVVILGLYMLLWGKEKDQERGTGKEREQLETDCEKQAKKVSDCVYEAPKTTKVTDPVSPHQLFSTLICPTLSLQALAGAMRDWAPSIIATALFALLCPGGVLQMPGRHRPVDLMNMKTSFPSTPSSTSCCSCSSSSSCSLTSTSDVSVFPTPSHKLLACF

SEQ ID NO: 57055 - protein, 100 aa, Zea mays
  Coding DNA Sequence Number=SeqID_13680
MGRTPKFSLPSGNRSIQLIAWPDGDGFHSTQSRRDRHYGGDDATTVHSEEKNTEDIQKRQLFDDTLRLPGGHPHGHTLASQPTRDVRHSLVVVVVVPDPD

SEQ ID NO: 57056 - protein, 148 aa, Zea mays
  Coding DNA Sequence Number=SeqID_13681
  Homolog annotation: Hit_ID=Q6QP51; Match level="QueryCoverage=50%, HitCoverage=33%, E-value=9e-27, Identity=77%"; Hit description =Putative growth-regulating factor 1
  Subcellular localization annotation: CTP_CleavageSite=39; ConfidenceScore=5.13e-01
MAKSGPAVIAADQGFEGWPIGRVRQSPQSARAPRPLLIRGSKAGPSEGFDSRPRTRRVRDDSGYVRYMAEAQATLPRGRHRALGPYRMGSGLANHLQGLGGCSRNLATAKLLTASTNQLRNSELDHAPGLWPGHMREQPGRLRYHERH

SEQ ID NO: 57057 - protein, 215 aa, Zea mays
  Coding DNA Sequence Number=SeqID_13682
  Gene Ontology: Mol. function=oxidoreductase activity, acting on single donors with incorporation of molecular oxygen, incorporation of two atoms of oxygen; Cellular component=chloroplast; Biological process=abscisic ...
  Gene Ontology: Biological process=acid biosynthetic process
  Homolog annotation: Hit_ID=O24592; Match level="QueryCoverage=61%, HitCoverage=22%, E-value=2e-14, Identity=43%"; Hit description=9-cis- epoxycarotenoid dioxygenase 1, chloroplast precursor
MIHDFAITENLVVVPDHQVVFKLQEMLRAAWFGVHTDTKLTTLPHNLLNKHPSIEGLLLGSDGSALKSTREHMEKQLVTCKSSDDPCRLHLQRVGRAARGRADEIRLDARTGRSMCRAVLPPSWQVNLEMDMGLPSGDSSEDDSDAAPHEHGGPSAAPPSGHERVLIGEDRGGEAVGEDPVVDGLPACLTWRAGIAEGSGDCGGRAGESWLLVDE

SEQ ID NO: 57058 - protein, 168 aa, Zea mays
  Coding DNA Sequence Number=SeqID_13683
MECERLRLLKVCLDGSSMRLGVPFIAPRQLGAVGSNPKRQFLPSVGWRTGQSGAPPDIHCSQSGADCFPKLAQPTVEDLEPLAHRTLSGAHRTVRCPHPTVGSATRHVRIARPTVGAVDRWLTGQSGVPPDSPVIFSRTLLTVSRERRLRPQTRHQTVRCTTGQSGDL

SEQ ID NO: 57059 - protein, 58 aa, Zea mays
  Coding DNA Sequence Number=SeqID_13684
MRLHTLRGGVVLYSKRYLIHVGNEGSSSTSTFTLIITLPRHSHDLIRNFLSKDVYFFN

SEQ ID NO: 57060 - protein, 772 aa, Zea mays
  Coding DNA Sequence Number=SeqID_13685
  Gene Ontology: Mol. function=nucleoside-triphosphatase activity; Cellular component=integral to membrane; Biological process=defense response
  Homolog annotation: Hit_ID=Q8GU88; Match level="QueryCoverage=93%, HitCoverage=93%, E-value=0.0, Identity=55%"; Hit description =Putative pleiotropic drug resistance protein 7
  Pfam annotation: Domain name=ABC2_membrane; Domain location=492-705; Score=211.9; E_value=1.5e-60; Accession=PF01061.15; Description=ABC -2 type transporter
  Pfam annotation: Domain name=ABC_tran; Domain location=186-390; Score= 55.8; E_value=1.5e-13; Accession=PF00005.18; Description=ABC transporter
  Pfam annotation: Domain name=PDR_assoc; Domain location=710-771; Score=78.0; E_value=3e-20; Accession=PF08370.2; Description=Plant PDR ABC transporter associated
  Pfam module annotation: Pfam domain module=ABC2_membrane::ABC _tran::PDR_assoc; Domain location=492-705::186-390::710-771
MEDDSRRVDTMQMGSNLDGSLLRRSSSWWASRGNNAFWWPAREDDDEEALRWAAIEKLPTYDRMRKGILTAVGDGIQEVDIQGLNMQERKCLIQRLIRIPEEDNERFLLKLCERMERVGIQNPTIEVRFEHLTIDTEIYVGKQGVPTFTNFFSNKVRDALIALHIISSGKRPICILHGISGIVRPNRMSLLLGAPGSGKTSLLLALAGKLDSTLKMSGRVTYNGHAMDEFVPQSTSAYIGQHDVHIGEMTICSLNSQEEKNMPKLSQILTFDVYMKAISQEGQENFITDYVLKILGLDICADIMVGDSMIRGISGGQKKRVTIGEMLVGPANTLFMDEISNGLDSATAYQIVNSLRQSVHILGATALISLLQPAPEIYELFDDIVLLAEGQIVYQGPRENVLEFFEAMGFRCPDRKGVADFLQEVTSRKDQYQYWCTRDEPYRYISVNDFVDSFKAFHVGHALQSELELPFDRTKNHPAALTTSKFGISKMELLKACFCREWLMMKRNSFVYIIKIVQLIILGTITMTVFLHTKMHRHSVEDGVIFLGAMFLGLVTHLFNGFAEVAMSIAKLPIFYKQRDNLFYPSWAYALPTWLIKIPISFLECAVWTGMTYYVIGFDPSIERFFRHYLLLVLISQMASGLFRLLAAVGREMVVADTFGSFAQIVLLILGGFLIARNNIKKSWIWGYWSSPLMYAQNAIAVNEFLGNSWQVDRAENNDTLGVQILKARGIFVGPKWYWIGVGALLGYIMIFNLLFVLFLDWLGREYSPAQR

SEQ ID NO: 57061 - protein, 23 aa, Zea mays
  Coding DNA Sequence Number=SeqID_13686
MANLRKYLQNEVAQQNIGWRAIK

SEQ ID NO: 57062 - protein, 131 aa, Zea mays
  Coding DNA Sequence Number=SeqID_13687
  Subcellular localization annotation: CTP_CleavageSite=81; ConfidenceScore=5.55e-01
MTASSTLAILLLLGVVARAFATFGNSASAGGLKISGSIIVFSSSGFLAASSLASAGSAKGTFGTTADSSALRPVGAACSVSAMEDAHSPNFDNVAISIYLGRWVKTLIFLPFGATEMTEAAVFLFFPCLHE

SEQ ID NO: 57063 - protein, 363 aa, Zea mays
  Coding DNA Sequence Number=SeqID_13688
  Gene Ontology: Mol. function=kinase activity; Cellular component =ornithine carbamoyltransferase complex; Biological process=amino acid metabolic process
  Homolog annotation: Hit_ID=Q6QP54; Match level="QueryCoverage=87%, HitCoverage=48%, E-value=1e-29, Identity=54%"; Hit description =Putative kinase
NLQRGGVLVTSSCSRKGAESRRRHRVRESASLPIWRASRWDAGLFLRPESARGRVMMAPPVDVAGLRPRLGDVEAPPKPRSSLSSVAEAESEPWVGRSGVRRLSGLSPSPSPGSGGAEFAVFRDLARVRALGQAERSFLWCLRQGLTACQPHSVKWHRSRRGAGGAVLLSGRSVERRSYGGHFGSAGGRAASGEPEMCSVAQRSARARFAADGRVPHDSDPRKRVMRREYGQRGPQVGAKNRSWAARRLRVNGPNSGSLAHPEYAGRHHCLSGGASQMGRRSCSLRPESARGRVMMAPPVDVAGLRPRLGDVEAPPKPRSSLSSVAEAESEPLGRARRRPSAEARAESEPWGRVKRSSSSSGA

SEQ ID NO: 57064 - protein, 126 aa, Zea mays
  Coding DNA Sequence Number=SeqID_13689
MKQTLRDGIIAGGCLQEVVGQGFVTCHGDEPSHVLAKCLWGVRLTTNPFRHFECGVGLVLSSLGGWAHVWVHLGMGLPLWPLLPSRAFYGITSCAALGHGSKLFLTKMLEARLPEVPLEALGSTGA

SEQ ID NO: 57065 - protein, 122 aa, Zea mays
  Coding DNA Sequence Number=SeqID_13690
MAGMPTVFPGTRSPRIPDAKRNWEGSELGTCVLTTIPVVSRSAHDALRICNGGVEFPAPQSGIPPGFTPTPSRIPASSPGSAHESDRRSAEDVQVAALPHRTALRRCFSRHVEVLLMAAQEG

SEQ ID NO: 57066 - protein, 142 aa, Zea mays
  Coding DNA Sequence Number=SeqID_13691
MPGSRTRVALEPLAALASATAAGRGSSADEIARAAHGPTSNSTAFCPSLPHEFGHGRGPLGSSIRPEYLDFFVGNRDVCASESCFSRKVMSEDPLFEVVKKHERHSGRRDLFSRKISTQRGFPALLAPEGGSGFAEARPTLP

SEQ ID NO: 57067 - protein, 133 aa, Zea mays
  Coding DNA Sequence Number=SeqID_13692
  Gene Ontology: Mol. function=kinase activity; Cellular component =ornithine carbamoyltransferase complex; Biological process=amino acid metabolic process
  Homolog annotation: Hit_ID=Q6QP54; Match level="QueryCoverage=70%, HitCoverage=32%, E-value=9e-17, Identity=56%"; Hit description =Putative kinase
MDEYIPADNDFHQRSVGVSRPGVPWADDRGLQASTREREASGSKRAPVSSSSPRDQPSLRGPWVMMAPPVDVTGLRPRLGDVEAPPKPRSSLSFVAEAESEPLGRARRRPSAEARAESEPWGRAKRSSSSSGA

SEQ ID NO: 57068 - protein, 427 aa, Zea mays
  Coding DNA Sequence Number=SeqID_13693
  Gene Ontology: Cellular component=endoplasmic reticulum membrane; Biological process=vesicle-mediated transport
  Homolog annotation: Hit_ID=Q2R1C4; Match level="QueryCoverage=80%, HitCoverage=91%, E-value=1e-103, Identity=56%"; Hit description =St12p protein, putative, expressed
  Pfam annotation: Domain name=WD40; Domain location=229-266; Score =8.9; E_value=2.5; Accession=PF00400.23; Description=WD domain, G -beta repeat
  Pfam annotation: Domain name=WD40; Domain location=271-308; Score =4.1; E_value=10; Accession=PF00400.23; Description=WD domain, G-beta repeat
  Pfam annotation: Domain name=WD40; Domain location=382-420; Score =22.8; E_value=0.0013; Accession=PF00400.23; Description=WD domain, G- beta repeat
  Pfam module annotation: Pfam domain module=WD40::WD40::WD40; Domain location=229-266::271-308::382-420
ISKDKNPEGKHPRYLFNRGIFSRVSRLGHNSVSPEVTITPSVSPELISDSPPHALPSTVRRASPPAATATGPPPRRPLPFFGAMVTRGGGSQSYGFPIYCAAWLPLAHIIKPDPPAAEADADDPSSSTPSLPMAVLGGGGGEGRSGVPNKLVVAALATGEEAAPALSPDTVVEVNSEEEVPYRMAVHPRGDGVFCAFPNGCRHALSYPWIISLEPEGEGPQRLALEPDQDALAELKDVGLQLAVSFSGEGSILAIGGEDGYLRVFNWPTMGSVLTEIDTKTSIKDLTISSDEKFLAVNRSSGPCRVWDLQSSEVVASLPRETGEIFGFCRFSNKADNSHVLFITVMEGDIKAINKALGVHLRFNQDGTIEGSIIVVGSKDMRTLVTVKKAHLGIVTTLTFSQDSRTLLSTSFDSSARVTSVGSPKSN

SEQ ID NO: 57069 - protein, 154 aa, Zea mays
  Coding DNA Sequence Number=SeqID_13694
MHCSVVSRPLNSTVALETVAPLGTPDSPVNYSGVASQIPEGGKFGVALPGAPDTVRWHTGQSVHHVPSEQDIGTAAEGSPAALEVSSQVWADISIDFIEGLPKVVGQVRYPHGSGPLLQIRPLHRSRPPLHRIFSRMGILRLHRTPTRVPTVHC

SEQ ID NO: 57070 - protein, 447 aa, Zea mays
  Coding DNA Sequence Number=SeqID_13695
  Homolog annotation: Hit_ID=Q5ZMJ9; Match level="QueryCoverage=60%, HitCoverage=29%, E-value=7e-08, Identity=26%"; Hit description =Serine/arginine repetitive matrix protein 1
MTLAIMIRETWLSGTKKNSWAGKELCLSIKKNGIGPVLRKTGPKTYTERTVEKPANELTNNLDNDSPHTQTHLESSLPSSNTRDEQLRLPKTSHTLSKQLDDAYIQTSTQGIRPQRAIVAKPQHTLTRQLRLFTTSKDPQRRTPRASRRLKRQKPGHHRAKRSDKEPPQHGRTRKLEVFWAAPSRRRNNVEKPSPPAWYKPSKVSSEDLAEQCRSPAPRRKLKGQPRRCHPAKPPRDVTFCRPPTHQPTSPNPQSPNAGRAPARDPKKAEARVPAWGERSKDGTLNRVGVAPAGVTAVRPQASMAFAGGPPTTRPNARSHPDPAHTTSRNERRDESSRRGSRSGPQPQTQPEGHRRASYHNSRKGAPPATPSGWAQGPGRAAAAPRAAPPAGHPWQQPMRRAITAGTRTTANAAGATTVHLPTPHTTGARSSAPRRRTVVAPSTVVV

SEQ ID NO: 57071 - protein, 73 aa, Zea mays
  Coding DNA Sequence Number=SeqID_13696
  Gene Ontology: Mol. function=two-component response regulator activity; Biological process=two-component signal transduction system (phosphorelay)
  Homolog annotation: Hit_ID=Q7FS86; Match level="QueryCoverage=69%, HitCoverage=62%, E-value=6e-16, Identity=85%"; Hit description =Putative response regulator
  Subcellular localization annotation: CTP_CleavageSite=18; ConfidenceScore=5.35e-01
MATASAAPASVAPSPAPKANNSRKAVVPGMTGYELLKRVKESTALRDILVVIMSSENKPTRCLEEFDPRLAVI

SEQ ID NO: 57072 - protein, 336 aa, Zea mays
  Coding DNA Sequence Number=SeqID_13697
  Homolog annotation: Hit_ID=Q8LQ55; Match level="QueryCoverage=89%, HitCoverage=80%, E-value=1e-27, Identity=31%"; Hit description =Integral membrane protein-like
  Pfam annotation: Domain name=DUF588; Domain location=217-320; Score =4.4; E_value=0.0021; Accession=PF04535.3; Description=Domain of unknown function (DUF588)
MASTPRTPAPERSPPPVPTPPPPLEDEPPPYLADGSPREEASFSSDGREGAPPKNPQLSPTHHAAPRLVPPPSSPARQDGQEQEGSANKAAAATAEPAREPLRQMATGLARPLSSQTSPATTNSPTPSASPTPSSPAPVANNSKRSGQSTPKRAETKLPLSSPAVAVHFDPVEEAVTSPLRLGKARLDQQQQQQHAAGAAESGASVVPGVAAAVAAVAERRELLLALRLATAVLSLAAFSVIASARTSGWAGDYYARHLQYSHLGQNPPPGLTQVLAYLLMSASSAAASRNDLWVSRFGTDAFVRKITGALWLSFVAFLVLALNAVISTANLFSMV

SEQ ID NO: 57073 - protein, 1477 aa, Zea mays
  Coding DNA Sequence Number=SeqID_13698
  Gene Ontology: Mol. function=structural constituent of ribosome; Cellular component=intracellular; Biological process=translation
  Homolog annotation: Hit_ID=Q2L3D4; Match level="QueryCoverage=98%, HitCoverage=69%, E-value=0.0, Identity=75%"; Hit description =Putative uncharacterized protein
MWSQVPKSMHFFLSAHLDEKNVRQIIRLLLSKFGRRQPVRSDNEWANMWRDLKLFQEKAFPFLDSEYMLAEFIRGLLKAGKFSLARNYLGGTSAVSLSTEKAENLVIQAAREYFFSASTLSGNEIWKARECLNLLPNSKNVQAETDIIDALTVRLPYLGVTILPLQFRQVKDPMDIIRMVITCQAGAYLHFEEIIDVAKLLGLRSEEEVADVEEAIAREAVVNGDLQLALDICLNLTKKSHGAVWDLCAAIARGPPLDNLDTGTREKLLGFALSHCDDDSVGELLNAWKELHAQGTFEKLMITTATNPPNFLIDGSSITPLPVQSVQDILDLRDDNGHDRRSDLVGIVKDMLSKVCLDFSNGDTHNWESMLEENRKLLCFGALVLPWLLKLFSNEACDGEIMDHLTRRCRFSTKVKAATSIIYWLVINGLAPNDNIIMILAKSIMEPPIDEEFDVLGCSVLLNLMDPFNGVKIIEEELKRRESYQEISSIMSVGMLYSSLNNSKKECSTPEQRRNLLLHKFHEKFTSADTDDLDQVDMANTTFWREWKSKLEEDKQLADQARMLKQILPDIDTSRFLSGDVNYIKIVVYSFVNSVKMEKKHILKEAVRIAEAYGLQRTEVLLRFLACSLVSEYWDNNDILNEISEFREDIVSSAKGVIDMIYSDVYLEIDGYNKQRLSYIYGILSACHSYLKRTNEIELRYPVHVHTHKLEPFQYYKVLEEECKKVCFIDGLNFKNIAGLDNLNFEHFNDEVCKNIHASTVTAIADMVQSLVSMYVDVLAKGLISQQGVYKHYVLGLLASLEGRSEAQSNNTDYEKLQASLCEFELNYDSCREYIQALPATDISYIVRRYCTLCFPSNLARSHPQEPSWRKPLATLLEFWSKVVDDIPGDSIDACSYGRTDYLNSNRLSLCMRAFRQLLIIDEIALHQGWDAISMYVKDCLRNGKMMETPCFCRAMILSGCSFESVVEVYFGGQGQLGSENADPSNYLDLLELYNAATEKCLSDLSEESCEYRILLHNLLSSLSRSTGKHAGALEMVRSGVWGKLIRYSEDMQLESQLRVYALQLMQCITGRNLKSLPNEMVCQVEPWESWYEHGAGAAIADESINSSSSITGTLVALRSTQMVAAVLPDANITPENLATLDSAVSCFLKLSERASGVSVAVFEAVLEEWEQLFSPKEEHVAPHESPKETSDWSDGWDDGWEALPEELESPKNKQEGVLLSVHPLHSCWMEIIRKRVELGELHKVLELLDRASLKHSVFLEEEEAHSLVELVSALDCFMALKTVLLLPYESLRLQCLQMVEVKMREGIVSTSSNADDQELLALVLSSGTMQKIITEEAYSKFFSYICHLVGHLARSFQTDLLVQWNEATSKINRSLLFARVLFPCFVSELVLGGQYLLAGFVISRWMHTHPSLGLMDITETSVRCFLQGQVAQLDEVGGSDAALTDGEVCVRHTISTLQPKLVSLLQSALALSNKEL

SEQ ID NO: 57074 - protein, 130 aa, Zea mays
  Coding DNA Sequence Number=SeqID_13699
MYDVEDERLLSDRMAKVPEALHHALEATTVVDDGHITLGESLELLVGIESVGGAVSKELGFNGDPDHAGGGAALGGGADEVVGDGAKKAGADAPFIRTQEGDAGVTVSERACSSNEYLLRTSRNDSFERA

SEQ ID NO: 57075 - protein, 155 aa, Zea mays
  Coding DNA Sequence Number=SeqID_13700
MHIGARNEEYYDGGAESGLGGAPGPGAGGASVAAASTVNDTATQSGVGGAPAWLRCADACCGGGPRLIKNAAALFAAAVSPLHSCEQSTNARACRMPAFPVRASASSSVVGSLTGTRRPRLIKNTTVIFATAPSTLVGWDNKSARTLMYDLAGRE

SEQ ID NO: 57076 - protein, 43 aa, Zea mays
  Coding DNA Sequence Number=SeqID_13701
  Subcellular localization annotation: CTP_CleavageSite=8; ConfidenceScore=5.14e-01
MPPPPTPRAITAVGSHLLARRNRLPATPRVPSSPPRERRYSSS

SEQ ID NO: 57077 - protein, 260 aa, Zea mays
  Coding DNA Sequence Number=SeqID_13702
  Homolog annotation: Hit_ID=A2WT22; Match level="QueryCoverage=94%, HitCoverage=97%, E-value=2e-32, Identity=38%"; Hit description =Putative uncharacterized protein
  Pfam annotation: Domain name=DUF1645; Domain location=51-238; Score =188.3; E_value=1.9e-53; Accession=PF07816.2; Description=Protein of unknown function (DUF1645)
MEHKRPVVRRQEPTVARTEDDVASGDEESDVEFEFPFVSQESGAGAGAAAADELFADGRIRASYPVFGRVLDEAAAPAPRAPLGRLFQLERARTSSVASRSSSSSSSSSTAADADAGVDGASPDSYCLWTPGSSPASSPSRPPRKSGSTGSVARWRRIGELVVGRSHSDGKERFLFLSAPPSPARDRDHSTDSKAKQPSRASKSAAAELDTVPAGRRMSYGGGGGAKASTGGRRTFLPYRQDLVGLFASAHGLSRSTLPF

SEQ ID NO: 57078 - protein, 202 aa, Zea mays
  Coding DNA Sequence Number=SeqID_13703
MALSPLLLAERQRRGRLGGCSRKPGSDRTVDSVNIPARELGTRPYTRATASSHEGTTRPAEALREALRPQRSQTTPPRPRGLHPAGALVRTHRNKTQPRKAGPLAKKCDESLQASANTPFEARGLLSGTIIRGTLKAPNSQLAVRTGRRHHRKLRFARPRARTRAKPRKTANSAPPDPGLGLELSPGRRRTPLRPTQGSDSS

SEQ ID NO: 57079 - protein, 273 aa, Zea mays
  Coding DNA Sequence Number=SeqID_13704
  Pfam annotation: Domain name=PT; Domain location=140-173; Score=8.6; E_value=0.082; Accession=PF04886.3; Description=PT repeat
MNALSREGCRHFEAFDQVDEDFERDIYKVEDPVVKESAGALYDRMWGLYGREVVRERAEAARAQAERGERVDDFGALDSALPDLGSTLAEAVTGVALEPTPETAAIATAALPSAATGGGGADAPAAAAPSAEGSAAEAAETAAEAAAEPTAEPTAEASAAPGPSQESSEEDLDYFAALDVAAAEVSPHAADAPDVPGPSTGRRRRRAVAKRRVSTEEGARLRVSKVGRQELLSLPAAASTGEGELRSLFAGEELRIMLFNYREMGIIPKVEPM

SEQ ID NO: 57080 - protein, 245 aa, Zea mays
  Coding DNA Sequence Number=SeqID_13705
MGPDPRSTKSSPRPPLVLIMSTVLHLIGYKIIFLKQIEASKGSDEGQLAIVAPAAAIATAAQAPKARGEILGAGGEVPALALVRDEAGAATRRLKGVTEALSQATEVLSQVADFTSRTASGALTAALSAEVERLRTQHADAVREKSASDSKCRNLTDKVAALEREKVDLRRQLAAERREANEAIAKEQAAQADAKLARAEGNLAKELAEQLQGRLTALESRAKEAEAAMRAEARTDAHAAYGYIS

SEQ ID NO: 57081 - protein, 69 aa, Zea mays
  Coding DNA Sequence Number=SeqID_13706
MDRAWLLPPPARPACDARKVDHLFRPRAILVPKSSLQSTTTSHLHQDQEAHAAEAICRYKKSQEEQLDE

SEQ ID NO: 57082 - protein, 420 aa, Zea mays
  Coding DNA Sequence Number=SeqID_13707
  Gene Ontology: Mol. function=5'-3' exonuclease activity; Cellular component=nucleus; Biological process=nucleobase, nucleoside, nucleotide and nucleic acid metabolic process
  Homolog annotation: Hit_ID=A2WXH8; Match level="QueryCoverage=73%, HitCoverage=81%, E-value=1e-114, Identity=69%"; Hit description =Putative uncharacterized protein
  Pfam annotation: Domain name=5_3_exonuc; Domain location=318-409; Score=-7.9; E_value=0.00076; Accession=PF01367.11; Description=5'-3' exonuclease, C-terminal SAM fold
  Pfam annotation: Domain name=5_3_exonuc_N; Domain location=131-279; Score=1.7; E_value=3.2e-09; Accession=PF02739.7; Description=5'-3' exonuclease, N-terminal resolvase-like domain
  Pfam module annotation: Pfam domain module=5_3_exonuc::5_3_exonuc_N; Domain location=318-409::131-279
MVGWSCTCDGMQADGGPVRWMATRGLCCDSFHGGEAWIVFGARKIWVGHPWCMGIMIRRGGPARRRLWDSSAAGVAAPLGSRLLRLVATRATTTPSSPTTSTSAISTASPAGHSRKDLSGRDGAPSKPTKPRVFFLDVNPLCFRGSQRNLGAFARWLALFFAHVSLRDPVVVLDGDGGNEYWRRVLPSYKSHRARGVGTGADTRVVNVLCECNVPVVRVDGYEADDVVATLTEQVLQKGYRVFKASPDKDFKQLMSDDVQLAVMPIPEIGRWSFRGPVMANPPASDVQSVLHCSTCLQIRLLAKPDARQLQSGISKSPRGCFMGDEADGVPGIQHLVLGFGRKTALKLLQKHGSLENLLNTAAIRTVGKGYAQDALTKHADYLRDVNVQFDDSWLSTRNTSNDTYVLADFILKLNGEGRS

SEQ ID NO: 57083 - protein, 107 aa, Zea mays
  Coding DNA Sequence Number=SeqID_13708
  Homolog annotation: Hit_ID=A2XS22; Match level="QueryCoverage=71%, HitCoverage=9%, E-value=8e-10, Identity=44%"; Hit description =Putative uncharacterized protein
MASNGGDDERLQAAPWPVSLDAGGFKVLSLADRVFRFTVSSKDVGFHIYNSRCIVRPEFKAFFNLWNSGGPNWNYELRLFLQEENANWWFVKGRKKSRSLIWLGVRR

SEQ ID NO: 57084 - protein, 267 aa, Zea mays
  Coding DNA Sequence Number=SeqID_13709
  Homolog annotation: Hit_ID=A2WLA7; Match level="QueryCoverage=49%, HitCoverage=18%, E-value=5e-32, Identity=54%"; Hit description =Putative uncharacterized protein
MNHVGKGNVDRWLHMLMDNQQEDHAAYHSSDEHDNDEENASDEQRTQSRVDEESCRNGITEYFDEIVEVEDEIVSDQGAERGRNSFGIKDREEKKIWFHRTDSTWGFRSLPSSPSMILGMRKALSFRAQQPVQLRLDARAQDVAHEPVHLSEAQVVRRQGELNSLDVDARDRGTIVSALDDWFWANLKQDLSLMKGANLKQDLVSIIFCAINTIQVAFSVNCWSEKREGSTTLVSSPSAPRRREHSHEKVRPESLRFSATAPKPAPP

SEQ ID NO: 57085 - protein, 74 aa, Zea mays
  Coding DNA Sequence Number=SeqID_13710
ARGPRVLREIAPSVEAKPGGGCDVVRARSAAFAASSAFGARYNGPDRTWASELDEAALWDAFVAGLRLVPIKRR

SEQ ID NO: 57086 - protein, 135 aa, Zea mays
  Coding DNA Sequence Number=SeqID_13711
MDEQSGKSRAKETERRRKREEWTGVQPKRARFGSGGTGTCPGWVHPDSVPEGDRAPDSVRCAPDCLVRPMTEGKISLPELLSTAPSCLGAIKGTPRRMEEYTKQPKSILDHPHSVFAHSFVILSDSSSVLVRTLR

SEQ ID NO: 57087 - protein, 88 aa, Zea mays
  Coding DNA Sequence Number=SeqID_13712
  Homolog annotation: Hit_ID=A2YZT0; Match level="QueryCoverage=61%, HitCoverage=10%, E-value=2e-07, Identity=60%"; Hit description =Putative uncharacterized protein
MVVVVATAGVVVANSPLEGMWPYGRPPPQPAFTVFPQYGGSFGSAPDGGVYGTGYTAPPPYVYGGAVPSPSTFQGPSAPYQAAAQAPW

SEQ ID NO: 57088 - protein, 72 aa, Zea mays
  Coding DNA Sequence Number=SeqID_13713
MAMMGSTSEKLYLCQVPNFGFEMIKLRPGGLIPERPTRNGSGEMARVACTLHGKRLDGDVSVLSVGVNPVWS

SEQ ID NO: 57089 - protein, 188 aa, Zea mays
  Coding DNA Sequence Number=SeqID_13714
MRVEWDALSLIIRGTEEPWPYPSARTQASPELSSPPFAHTRRARGHPSPCHRRPANPATPNPVQPSEKTVHVSVKLPERGIGLCFTGEAGPRSPDFNRPSATVDRGTPCTSLRFLARLDSLDLHEAPYALGLNYAAVDRPEHTPPTSSPACSRGPGDSGHPRRRAVPRHDRRTLPEPTLPFVGTPSPP

SEQ ID NO: 57090 - protein, 135 aa, Zea mays
  Coding DNA Sequence Number=SeqID_13715
VNNETGISETPSSYPLHTAPRIAQPPEPKRVLHAPRLGPPRRAPHRYSPSPSPGEPLPPASPRALAVAPRPHVPMAAPRSPRRALGHALGCALARPCPSPCPGLAPRAPARFACPRHAQRALVRATVVMLRLTLV

SEQ ID NO: 57091 - protein, 204 aa, Zea mays
  Coding DNA Sequence Number=SeqID_13716
  Subcellular localization annotation: CTP_CleavageSite=33; ConfidenceScore=5.07e-01
MQDAARQAQSHYCSVLGGVADGLNLKYYPRRPSGSTGGVIVSPVGEDNPRLSSTVNLAVVLNTELDHALDELSRARVEIAQLWAEHVERRHLDDGSPAPVGTQHPYRSPRVWISPAFLVYLLYVNEVSYLVRKPFIPLSSLSEKLCWSVLEISEDVHLFSVVEEFYALFLCCKISSDVWLHSADVRKQAQRRKACSTGAGSTAG

SEQ ID NO: 57092 - protein, 230 aa, Zea mays
  Coding DNA Sequence Number=SeqID_13717
MAPSRRPAHHPPEAQPATGNLYYYIRRYCRRPQLFGARFCQSVINAHAKVVADPPPSSPSAPRHQRARAAPRRGSPTLLPLCTPPSTPTVASRRGSPTLRSSTAVPVASPTRSPNSTPAFAHRNIDIGKRKLESPASGMATGEEHVAAPVVKETSEKKQASTTARTLRLDEEASVLVELDAPQSKRIWPKPVALLPAKAANENMQSSVRHPRMPDEAGCAIWLLVSQKGL

SEQ ID NO: 57093 - protein, 187 aa, Zea mays
  Coding DNA Sequence Number=SeqID_13718
MGKPVPSLLMLLLSRGGVPLDSPTQWQDGRPSHSSNHVLQRTCKNYATSKAEYTNTQLDLPVTALVPTITGMGDHVSGRVRGKVYCQVQSGWSRDFTPVYVHPAVERSPATRGLAFSSEAKFDSKFGELHRVMYSLFQGSGVAGKGSVGRSTVAGARVAAGTPCAGQTPVVLGSGEVERARRSTGDT

SEQ ID NO: 57094 - protein, 365 aa, Zea mays
  Coding DNA Sequence Number=SeqID_13719
  Homolog annotation: Hit_ID=Q6QP51; Match level="QueryCoverage=42%, HitCoverage=81%, E-value=4e-18, Identity=36%"; Hit description =Putative growth-regulating factor 1
  Subcellular localization annotation: CTP_CleavageSite=41; ConfidenceScore=5.71e-01
MATAGGRKQQSNRLQAHVPSWSSRGALSHGVKTTRPCSVPRTAHATAAPRTTRPVALTSRQGRRHLWQAKRATLHLRHDDRVKKGTGKGDIPKGILLRERSGPRALLLIRGSKAGPSEGFSTAASEHPGSAPTTDQRLAPRKGSTAASEHSGSAPTTDQGFEGWHLEGFDSRPRACTARDDSRYVGYMAEARATLPRGSRAALANLATAKPLTASTDQPENSQTDQGITKCIKTSEESNHSSEASGATPGKSIQCKDRLTPYPDARSSVGRDEAQPEVSASPDLGARPPPRPQKMVSASPDPRDRPRPRKVVSTSPDPRGPASTSTSGGIASSPNPGSASGGLSASPDLGLGPTTPQGGSSLTYP

SEQ ID NO: 57095 - protein, 104 aa, Zea mays
  Coding DNA Sequence Number=SeqID_13720
  Subcellular localization annotation: CTP_CleavageSite=46; ConfidenceScore=5.31e-01
MEQRFTRSTFTGSPTKSGDRGLASPAKQSPIPYSGSFTESLVHRCAIAMVTVGTMLRRRRCCGKKQLRLKLLEHDDEDTVCKASKLQQTTAYPKLKGRTDLKIE

SEQ ID NO: 57096 - protein, 209 aa, Zea mays
  Coding DNA Sequence Number=SeqID_13721
  Gene Ontology: Mol. function=helicase activity; Biological process =viral genome replication
  Homolog annotation: Hit_ID=Q1EPC6; Match level="QueryCoverage=100%, HitCoverage=21%, E-value=1e-74, Identity=75%"; Hit description=DNA helicase homolog, putative
MALVRKFGKPDIFLTMTCNPNWNEIRRELLPRQHRKDSYPIYRRRDDGRKEKVRGCELDNRWVVPYNPYLLRLFNCHINVEACRIIKAVKYLFKYIYKGHDRASVVMRDASKADDDGDEIKQYRDARWVTPLEALWRIYDFELSQNSPPVMQLQLYLPNMHKVSFHERQMVERVINRPGADRSILTAYFEANRLHEGARGILYRDFPEW

SEQ ID NO: 57097 - protein, 143 aa, Zea mays
  Coding DNA Sequence Number=SeqID_13722
  Gene Ontology: Mol. function=helicase activity; Biological process =protein amino acid phosphorylation
  Homolog annotation: Hit_ID=Q8LML8; Match level="QueryCoverage=91%, HitCoverage=9%, E-value=2e-29, Identity=53%"; Hit description =Putative DNA helicase homolog
MTSCHNTGVLNMLQSMGKDIMTFHLPLIIDAYDDAIDTAREVYEEESIEPAAGDVALKDSLNEEQRAAYDKILSVIGTYEGGLFFVDGSGGTGKTYLYRVLLTMLRSQGKIAVATATSGVAASTMLGGRTAHSRFKIPLCRGP

SEQ ID NO: 57098 - protein, 30 aa, Zea mays
  Coding DNA Sequence Number=SeqID_13723
MPLELLHMDLFGPIAYISISGRKITNPKRP

SEQ ID NO: 57099 - protein, 162 aa, Zea mays
  Coding DNA Sequence Number=SeqID_13724
MQVACNRTTGTHPLDFDTSSMEAQAHTSCNRHAGYYVRETAPPLAPMSRLLDCGAGAVTRGNPVHGPTMPTEHIGHGRAGAAVKSSAGSRPLLEQQGSPLPRREDDAPVFRPSNGSCNDRPANHPSRRINSAAGQATPLGLGKGIFRKGSFSTKEAGPEPSY

SEQ ID NO: 57100 - protein, 261 aa, Zea mays
  Coding DNA Sequence Number=SeqID_13725
MVTTSSMVGRSKPGCDLCPALSFKDLHHPCWGGGRGEPGPAFAWAGDPLCPPASGGGNHPPALRRRRPPAMRGKANCCCSARVQHSVLRPGDCGWLHRRVAQHVIRREGGTRVLGRSHSRFCGEDRSEDLLVRFGRRFLRRRDHRRHLRSDVRLFGLGGLSSPLVWGHGRGTSSSSVCPEAVAVAVLPFEMEVVVAAGAAVGGEPPGNPRLLCDEPEPEAAVSAWTKAESAREEALSAWEHVASLAEEVQQRRLELGQVVR

SEQ ID NO: 57101 - protein, 40 aa, Zea mays
  Coding DNA Sequence Number=SeqID_13726
MLSFLWRLWLALAAVSLALSSGTAVGAAQAALSSCQAALC

SEQ ID NO: 57102 - protein, 351 aa, Zea mays
  Coding DNA Sequence Number=SeqID_13727
  Gene Ontology: Mol. function=5-formyltetrahydrofolate cyclo-ligase activity; Biological process=folic acid and derivative biosynthetic process
  Homolog annotation: Hit_ID=Q2QX67; Match level="QueryCoverage=57%, HitCoverage=48%, E-value=5e-79, Identity=74%"; Hit description=5 -formyltetrahydrofolate cyclo-ligase family protein, putative, expressed
  Pfam annotation: Domain name=5-FTHF_cyc-lig; Domain location=76-291; Score=39.1; E_value=1.6e-08; Accession=PF01812.11; Description=5 -formyltetrahydrofolate cyclo-ligase family
  Subcellular localization annotation: CTP_CleavageSite=15; ConfidenceScore=5.58e-01
MPLLFPATPPLPLCRAARVSRRATASVASAARSSSSSSASFDAAAFEAERLRLDAAARAGMESTAAAAEAGPRAWKWAIRKRVWDALEAEGIARDPRPVHHRIPNFDGAPAAADALECYVEPCIAFDQSDQAPECLVCMLHKVVHWCWCMLGRLDIFQKSHCVKVNPDTPQKQVRFLTLSGDKKLLTPQPRLRTGFFSVMDSQMIPVGCIPEACTSVGAAKYGRPIGLDESLKVDLIVIGSVAVDPSSGARLGKGEGFAELEYGMLRYMGAIDDSTMIVTTGCHGLSQPTGDDSSNCDFCCHACLVGMPGGTVGLLELDHQHTARLPDCPHTWHTRCHGHHRERDATARLG

SEQ ID NO: 57103 - protein, 183 aa, Zea mays
  Coding DNA Sequence Number=SeqID_13728
  Homolog annotation: Hit_ID=Q6J9V9; Match level="QueryCoverage=35%, HitCoverage=33%, E-value=4e-08, Identity=45%"; Hit description =Putative uncharacterized protein
  Subcellular localization annotation: CTP_CleavageSite=83; ConfidenceScore=5.15e-01
MAVAGGQKQRSRRQPSSRHLVGQRENPLSRREDDAPVFRSSNGPRTRNGCPVNHSPRRINSAAGQVAPSGRRSERRFAFAIMTASKKGPGKGDTPKRILLYEGNRPRASLLIRGSKAGPSEGFNSRLKALGFRAHYWSEVRRPAPRKGSTAASGHSGSAPTTDQGFVGWPSKGSQPPQTQSEG

SEQ ID NO: 57104 - protein, 237 aa, Zea mays
  Coding DNA Sequence Number=SeqID_13729
  Homolog annotation: Hit_ID=Q6J9V9; Match level="QueryCoverage=22%, HitCoverage=18%, E-value=1e-14, Identity=72%"; Hit description =Putative uncharacterized protein
  Subcellular localization annotation: CTP_CleavageSite=68; ConfidenceScore=5.19e-01
MAGARDTSGRRSRRRFASVIVTASKKVAPCGVRQPPQSTQAPSPLLIRGSKAGPSEGFDSRPKACRVRDDAGGHTPGSPEAKLGQPLSYNNLDQIALPPTVSHENNTIHPVPTTVPTTRVKLTTVSHDLPRVQPQAQQGALPRSTPGLGLGRRSPPRPTPGLSLSLGLGRSHNLARPQPRPREKVSASPDPRPQPQPREESQPRPTSASASGEVTASLDLDLGPTTPQGIHHYPTPS

SEQ ID NO: 57105 - protein, 168 aa, Zea mays
  Coding DNA Sequence Number=SeqID_13730
  Gene Ontology: Mol. function=5-formyltetrahydrofolate cyclo-ligase activity; Biological process=folic acid and derivative biosynthetic process
  Homolog annotation: Hit_ID=A3CFB0; Match level="QueryCoverage=70%, HitCoverage=34%, E-value=2e-44, Identity=77%"; Hit description =Putative uncharacterized protein
MTLLRYANLFKGPLSDLVIKALVAHSGLNRPAMSGQIKPRLDGCQGLWLLFTVGSQSCSLLLVISSAMRTCVHDKQLVDDIPVEKLLVHDVPVDIICTPTQVIFTKTTIPKPQGIYWEKLSPEKLGQIRILRELKQRIEQETGTMLPCGPSEKLPPTAQRKQRWQRRR

SEQ ID NO: 57106 - protein, 120 aa, Zea mays
  Coding DNA Sequence Number=SeqID_13731
MQSLQRKVNADSVEIKGEEAPKGGLQRKVNADSAEIKGEEAPKGGLQRKVSADTPKNKRFSFGLVNLYERSSGAPRSYQGTKVVVSSNNIIEVINLTFDVFEGSWQIFSRRNKFFTTGPD

SEQ ID NO: 57107 - protein, 168 aa, Zea mays
  Coding DNA Sequence Number=SeqID_13732
MASRGLQTLRAIGGCSLGQLIILCLSPILRAIYGTPSIVGGTRRAPSMLRANDDMRTRSGAEKSMIGIKASLHEVRPPGLSQQWLQLVAQPGDGRGSTSATPLPGTDTTIVDRRSRVEYLRSLRVSGPFSGPQTSKSPTSTSTSLSKTQEAGWLSIPLLPGPLGQPKM

SEQ ID NO: 57108 - protein, 65 aa, Zea mays
  Coding DNA Sequence Number=SeqID_13733
MGDRREPCPKPRESFLGESSGNKKKEDFLWAGSNSHRSGDKKKKMKKVEPSVGDEDYDSDEVAQI

SEQ ID NO: 57109 - protein, 194 aa, Zea mays
  Coding DNA Sequence Number=SeqID_13734
  Subcellular localization annotation: CTP_CleavageSite=48; ConfidenceScore=5.01e-01
MSPSIPASVPSSASFSLRRFFPRHGWLVVGDGGRFHSSPDEEDVGEVVFARGAGGCAFSCSVPAFLEIFEEGFFSGRICPGVSQLSDSPRCQEEVYAGLLQRFARLRPLATFEHWKKQTATCSTPSAAPEHARARARAAPKPSQCPAIPNPVQPSEKTVHVSVKLPERGIRLCFTGEAGPRSPDFNRPLATVDR

SEQ ID NO: 57110 - protein, 27 aa, Zea mays
  Coding DNA Sequence Number=SeqID_13735
MVLAVVVLLGAVAVLVVVLLLQPRVSY

SEQ ID NO: 57111 - protein, 227 aa, Zea mays
  Coding DNA Sequence Number=SeqID_13736
MQQLGYFGNGVGRVPGAEEIPKPEGEIVVFEAFFTVGIWLPAHRFVVESVAEVAEDDSAEGALRCAARVCSGRDLVEEFISYGVWPLAHGWALGEVCPRQMPSLGEQQVRSPAFALDLRGRDPTAFVREVEDGAVRIVGHYVSRTEALWSWDIRGSNIRLNRVFELNRLPYDGYPGDDAAMAIDRRGKKPVAVTEEGPSQEAAPATKKRKIGTAVGDWGSLIVLLWS

SEQ ID NO: 57112 - protein, 167 aa, Zea mays
  Coding DNA Sequence Number=SeqID_13737
MAVGEVLEPCVRDNVAVGEVPEPCRSTAGGAAGILLTSPCFRRRLRTTDVMDARGEPSLPVIGASQMGRRSRSGASDAIFLSDRSVKGRSDRGHFGLDDCGARVRIRCQAIFTLNAHAIRSVGKTIWPRLLHDEACPSWASGELRVRPLSEEALGRGVNLSKTTVSA

SEQ ID NO: 57113 - protein, 111 aa, Zea mays
  Coding DNA Sequence Number=SeqID_13738
MKFGSKQGVDARRGNQPMRRRTASADWDFWPLRLPRRTGLTAQEQDVLLDVVVAADLHRLRIGLVPTDPLPPRPMSSEFQRAVERNVKAPIFGPLAVVAGSAALDSAGFRR

SEQ ID NO: 57114 - protein, 429 aa, Zea mays
  Coding DNA Sequence Number=SeqID_13739
  Gene Ontology: Mol. function=nutrient reservoir activity
  Homolog annotation: Hit_ID=A2YTS3; Match level="QueryCoverage=31%, HitCoverage=18%, E-value=8e-11, Identity=33%"; Hit description =Putative uncharacterized protein
MASSTEENMKALLKVLVDCAEDATKSLGGLVDHALDHMHDEEIQDALEAKVQAFPEIVKYDGDDISVEPTSLSTPPTVTEPSVDEEEFYCPMSVMSGTSAILIGLHNGPSKQCHIFAADVKYLSAQQYPPPPPLWPTGFMQQAPMDCNVMANLNFPNPGQGPTTMWAPIQTGNSTSQSTMIPASQSAVYWNHYMNFVRNPLGSVEVNPFPEYYPPSNTSTPLQGSNTIPSLPVNLDSDAEHSVHDINSPKKNAAPVQKQKKSKEQNFTGPEDLLLCTTWLQISSDPIVHTRQRREGLWARIEKRYNEQRGQLPCRLNRALSSRCDKIRADVSKFSGYYARVLREKQSGLTDDDKENGPVVVITVNQRKKGASSSSTEYLSRLQEMTEKQIQRSIEKGEKKEKCSKEDREIEKKRLELEAQKNIINLLEP

SEQ ID NO: 57115 - protein, 133 aa, Zea mays
  Coding DNA Sequence Number=SeqID_13740
MTSCNTVQRYDPWRRAREGEQLGTAGPGASHVHDHCSTGTSESATPVRPPMSLCPDPSAGNRKTHADLYHRPRRQDLWCRGLPREPPAESIYASSVAPRRVTSAPRLMAPSKGSKFGNCSCRDLNVKFLRKRG

SEQ ID NO: 57116 - protein, 521 aa, Zea mays
  Coding DNA Sequence Number=SeqID_13741
  Gene Ontology: Mol. function=ubiquitin-protein ligase activity; Cellular component=ubiquitin ligase complex; Biological process =protein ubiquitination
  Homolog annotation: Hit_ID=Q6H593; Match level="QueryCoverage=100%, HitCoverage=100%, E-value=4e-89, Identity=61%"; Hit description=Arm repeat-containing protein-like
  Pfam annotation: Domain name=Arm; Domain location=241-282; Score=6.3; E_value=1.7; Accession=PF00514.14; Description=Armadillobeta-catenin -like repeat
  Pfam annotation: Domain name=Arm; Domain location=283-325; Score =29.2; E_value=1.5e-05; Accession=PF00514.14; Description =Armadillobeta-catenin-like repeat
  Pfam annotation: Domain name=Arm; Domain location=326-368; Score =27.3; E_value=5.7e-05; Accession=PF00514.14; Description =Armadillobeta-catenin-like repeat
  Pfam annotation: Domain name=U-box; Domain location=48-120; Score =64.2; E_value=4.4e-16; Accession=PF04564.6; Description=U-box domain
  Pfam module annotation: Pfam domain module=Arm::Arm::Arm::U-box; Domain location=241-282::283-325::326-368::48-120
  Subcellular localization annotation: CTP_CleavageSite=45; ConfidenceScore=5.48e-01
MGAARPRRWKLPFHRTVSAVGGGGGAPCSPSSRSSSSPARSEAWAAEAVPEEFLCPISGALMADPVILPSGKTFERACLQACAELAFLPPGVEAGDADTVIPNSALKAAICTWCARSGREVPAPPSAEAARQAVQRAMPPAAAKSVRTTTTRRAVVMAASTSNSSTSSYGSASEITAAEDEAKAKEEAPRRRTVKEAEVEPAAAPPADPLEDDVVGKVMDADDDGVVAAAMGALREATREGEERRRALCTPRLLGALRRVLLLPRHAAARVDAVAALVNLSLEPANKVRIVRAGAVPALVEVLRSGASAPEAREHAAGALFGLALNEDNRAAIGVLGAVPPLLDLLTSPTHAPRARRDAGMALYHLTLAAVNQSKGRNALMDAGGVASVSGILLSPSHDTTNGGGGTADLEEWCLSAMYAMSRGSLRFRGLALASGADRALRRVVADEGGGVRREIARKTLRAMRSDLDEDGGEYNDLTGSSAECGDGEDCGGSIVSDGLMSFRRRQRELGVSSCGNTAEF

SEQ ID NO: 57117 - protein, 449 aa, Zea mays
  Coding DNA Sequence Number=SeqID_13742
  Gene Ontology: Mol. function=ATP-dependent helicase activity; Cellular component=nucleus; Biological process=ribosome biogenesis and assembly
  Homolog annotation: Hit_ID=Q6H601; Match level="QueryCoverage=81%, HitCoverage=66%, E-value=1e-142, Identity=69%"; Hit description=DEAD- box ATP-dependent RNA helicase 22
  Pfam annotation: Domain name=DEAD; Domain location=104-357; Score =68.6; E_value=2.1e-17; Accession=PF00270.20; Description=DEADDEAH box helicase
  Subcellular localization annotation: CTP_CleavageSite=59; ConfidenceScore=5.31e-01
MALHHLRLAPLALLRAASLPPLASSRIAARGHRRVLLFAPPSWPWRLLSPGARPRALATAAAEADDATSGSGNEFFAESTSWASLGVSERLASALCSAGLSRPSLVQATCIPHVLMANDVIVAAETGSGKTHGYLVPLIEKLCSKSSTTKDDNCQDTTPGAHDMVLVLCPNVMLCEQVVRMANSLLDESGKPLKRAAAVCGPNGWPAVHPDILVATPAALLNYLFDYDPEKRRRERFMRNVFDEADMLLCGSFENQVIRLINMLRFDEKLLSRAQDSGKDISLGSDDEYHEDSKFETAEFGSSDKEIEDNIVEDRLVKLENSHVGAHKDWRRVRKIYRRSKQYVFVAATLPQSGKKTAGGVLQRMFPDAVWVSGTYLHRHNPSFADASWSPSRLSVAIKYKPVVCVPISLSLGRHHQPRVSPSSAVSGVQKPPHDDSGGEDELLSFDPL

SEQ ID NO: 57118 - protein, 361 aa, Zea mays
  Coding DNA Sequence Number=SeqID_13743
  Gene Ontology: Mol. function=glycine hydroxymethyltransferase activity; Cellular component=phagocytic vesicle; Biological process =one-carbon compound metabolic process
  Homolog annotation: Hit_ID=A2WXH9; Match level="QueryCoverage=86%, HitCoverage=55%, E-value=1e-143, Identity=78%"; Hit description =Putative uncharacterized protein
  Pfam annotation: Domain name=SHMT; Domain location=129-359; Score =234.3; E_value=2.8e-67; Accession=PF00464.10; Description=Serine hydroxymethyltransferase
MDLSRPASSDLSLGLHSHAHAHARVHAAAAPLRLFDDAKPERLVAGEADAERDDGDGGDQHFSLLGHSLCVKRPRRAVNGGGGGGGETSSCSSTSPALRPAKRQAAGEDSGADLETRRAAVRSWGNQSLAEADPDVHSLMEQELARQVRGIELIASENFVCRAVLDALGSHLTNKYSEGAPGARYYGGNQHIDAIERLCHERALTAFGLDPACWGVNVQPYSCTSANLAVYTGLLQPKDRIMGLEPPSGGHVSHGYYTPSGKKVSGASIFFESMSYKVNPQTGYIDYDKLEERAMDFHPKILICGGSSYPREWDFARMRLVADKCGAVLLCDMAHISGLVAAKLVHCILLNNVHKSNWSTS

SEQ ID NO: 57119 - protein, 81 aa, Zea mays
  Coding DNA Sequence Number=SeqID_13744
MAPLSGAKVLKWFKMGPDVDESAFIPFDVTQEWLDRVKIARKGLRGTKRRNRRTIKGDPKRRLVWVLKLKKSHDPKLPFYP

SEQ ID NO: 57120 - protein, 82 aa, Zea mays
  Coding DNA Sequence Number=SeqID_13745
MAQARSLGLGDGGRRRCVGRSSGMADGDVGRRRPDAQLGGLAAQLGAGGTTGQRQRVVRLRCGRAVAGAGWGAGGWELGSGN

SEQ ID NO: 57121 - protein, 443 aa, Zea mays
  Coding DNA Sequence Number=SeqID_13746
  Gene Ontology: Biological process=response to stress
  Homolog annotation: Hit_ID=Q75HQ2; Match level="QueryCoverage=31%, HitCoverage=56%, E-value=2e-47, Identity=74%"; Hit description =Putative uncharacterized protein P0636F09.16
  Pfam annotation: Domain name=Usp; Domain location=296-436; Score =44.5; E_value=3.8e-10; Accession=PF00582.17; Description=Universal stress protein family
  Subcellular localization annotation: CTP_CleavageSite=39; ConfidenceScore=5.47e-01
TQAAQPRRARRALSPSRAGARKSRPAGRRRAAEQGRLCRAGATPPSRGAEAALVTVALAQGRRAQPSGATSVAPSRSRWSWGPPGRLGGLRRRLDGDGTRPHGTGARGLGILGFLGNGPRLRPIRRGQVRRRPAAAEAVEAAISGLFVPVNGPFRVCLNGSGSCPPVGLDIGPSTARYIGPGRPGPARNDFVPCRAWAVLFFVLRVSPLSPAQITKTKLWYMASSAEERFLRQLSASNGGDEGVCGGQQLGHKEYCAERRGSRRWSRKRAAAARGYCGGYDDYDVKQQAEAASAAARKRVIVVVDDTSGSKHAMMWALTHVASKGDFLTLLHVLLPHSASGGGCSRGEEASSLANSLGTLCKASRPEVEVEALVIQGPKLGTVLSQVKKLEASVLVLGQGRPSPCYRWLSCFLRSSSEEFVEQCIDQAECLTLAVRKQSKAVG

SEQ ID NO: 57122 - protein, 200 aa, Zea mays
  Coding DNA Sequence Number=SeqID_13747
MAHRTVRCATGAPTAALSGFYDWEHSAEDQAGPTRQRVPKVHNKPIKKTIVGFKIESKRHPERLPGLAHRTVRWRTGQCPVHQETSPRTPQPREILGAGAQKFTGLTERLLRYNSPDMSGVHRTVRCDCGATATSRQRSPAGAFNARQKRAEVRHAHTGAPDIEQYMSGVHRTSRRAQKSELQRSNSNGIGDVAGAPDMS

SEQ ID NO: 57123 - protein, 138 aa, Zea mays
  Coding DNA Sequence Number=SeqID_13748
  Gene Ontology: Mol. function=transferase activity, transferring hexosyl groups; Biological process=carbohydrate biosynthetic process
  Homolog annotation: Hit_ID=A2X7E5; Match level="QueryCoverage=65%, HitCoverage=18%, E-value=9e-33, Identity=73%"; Hit description =Putative uncharacterized protein
  Subcellular localization annotation: CTP_CleavageSite=38; ConfidenceScore=5.16e-01
MVRSGAASPPPVVQPPGCRTTLGTRPLERREMGVTGCQASGAASQPSCLLLMLEWTFVAFFLLFGSYLRFVYRWGSISANHVGFSNSDSSENHMGPGHQRNMSDCDMDATFYWIGMASIATITVLLPTILGITALFTK

SEQ ID NO: 57124 - protein, 57 aa, Zea mays
  Coding DNA Sequence Number=SeqID_13749
MESHDLRAEWESRLVDGYEIDGFGYDYGAGCQHCNHCSGEDEAVEGDFQEFQDYDEF

SEQ ID NO: 57125 - protein, 157 aa, Zea mays
  Coding DNA Sequence Number=SeqID_13750
MARYIGWARGKSRRRQCDRATNSQYDDNRESAARQGHEWEHIAAVLVGEAGRKVKPAPATQEALRCVRVRNWQGTMWQLETMLLRSRRGGSERSNRKKDTEEVALPPIEHVEADGDIVEVDLAPDPVHPLPRDVRRRSSPRPDPKGAAPLMLYDYEG

SEQ ID NO: 57126 - protein, 510 aa, Zea mays
  Coding DNA Sequence Number=SeqID_13751
  Gene Ontology: Mol. function=nucleotide binding; Cellular component =integral to membrane; Biological process=response to chemical stimulus
  Homolog annotation: Hit_ID=A7NZL1; Match level="QueryCoverage=38%, HitCoverage=87%, E-value=8e-62, Identity=61%"; Hit description =Chromosome chr6 scaffold_3, whole genome shotgun sequence
  Pfam annotation: Domain name=Lysine_decarbox; Domain location=103 -216; Score=172.8; E_value=9.1e-49; Accession=PF03641.5; Description =Lysine decarboxylase family
MDAAEHHVEETKEEEAAQVMETTTAHSRFGRICVFCGSSQGKKKSYQDAAVELGEELNFLFFANPQFQLPPPHGNNVIMAADKIRYVSRNIDLVYGGGSVGLMGLVSRAVYNGGRHVMGVIPKTLMPREITGETVGEVKAVAGGYGTLEELLEVITWAQLGIHDKPVGLLNVNGYYNSLLSFIDKAVEEEFISPTARHIVVLAPTPKELLDKLEEYSPRHEKLGRAEDEVGDGAADEQLQELRGTHKKRVRPKAHRTVAGIAVGEPLPSLASPGTPPRFIHNHNHLPTNLVLQRGLFVFGVALGRDGSLVMQSGWVDCCPVQLKMHGLLLKTHVSGYGGMSVPVVWKLPGDPELMAPTRVKSVKALFRQSDRKEICCGGSVPAQGTKSGGKSLEKRKDQGTGEEVAATAQVSTGFQIGVIGSLALSVASSVSIVLCNKALISTLGFPFATTLTSWHLMVTFCTLHVAQRLRFFEPKAIDGQTVILFGLLNGTSIGLLNLSLGFNSIGFYQ

SEQ ID NO: 57127 - protein, 117 aa, Zea mays
  Coding DNA Sequence Number=SeqID_13752
MRKKHGSVPKLHTCSGLNSHNEQKHWHSKCHYKRNSGSPSAGTNDPTSWGRPAERQKTDERLAAARSDYDDNHPRPRRRSGFGSSFEADVTTGGLSPAEDENQPFRPGDGDPGLPAP

SEQ ID NO: 57128 - protein, 210 aa, Zea mays
  Coding DNA Sequence Number=SeqID_13753
  Gene Ontology: Mol. function=nucleoside-triphosphatase activity; Cellular component=cytoplasm; Biological process=transport
  Homolog annotation: Hit_ID=P63390; Match level="QueryCoverage=92%, HitCoverage=30%, E-value=1e-103, Identity=98%"; Hit description =Uncharacterized ABC transporter ATP-binding protein yheS
  Pfam annotation: Domain name=ABC_tran; Domain location=122-209; Score= -37.8; E_value=0.00095; Accession=PF00005.18; Description=ABC transporter
MNNWSARMFEYTGNYSSFEVQRATRLAQQQAMYESQQERVAHLQSYIDRFRAKATKAKQAQSRIKMLERMELIAPAHVDNPFRFSFRAPESLPNPLLKMEKVSAGYGDRIILDSIKLNLVPGSRIGLLGRNGAGKSTLIKLLAGELAPVSGEIGLAKGIKLGYFAQHQLEYLRADESPIQHLARLAPQELEHFLRDYLGGFGSRAITNQA

SEQ ID NO: 57129 - protein, 53 aa, Zea mays
  Coding DNA Sequence Number=SeqID_13754
MSRRSLILLPARARVGGNADNWDPHDANEAHKLEELSLLFFVYNFEYYKSYPP

SEQ ID NO: 57130 - protein, 125 aa, Zea mays
  Coding DNA Sequence Number=SeqID_13755
MAVADLSMACFDGRRKGRIYTPESPSQAGQIQPKSCDRIPPNKPRSAILLICRKKAGRQPQCPSGIYGAGDGSLLQSAGLEEKEKMATEIRAGTRNSRRDFRQEIDVLLRRPKQREQGNVPLGGG

SEQ ID NO: 57131 - protein, 125 aa, Zea mays
  Coding DNA Sequence Number=SeqID_13756
MAAADLSMACFDGRRKGRIYTPESPSQAGQIQPKSCDRIPPNKPRSAILLICRKKAGRQPQCPSGIYGAGDGSLLQSAGLEEKEKMATEIRAGTRNSRRDFRREIDVLLRRPKQREQGNVPLGGG

SEQ ID NO: 57132 - protein, 472 aa, Zea mays
  Coding DNA Sequence Number=SeqID_13757
  Homolog annotation: Hit_ID=Q6QP51; Match level="QueryCoverage=10%, HitCoverage=23%, E-value=2e-11, Identity=66%"; Hit description =Putative growth-regulating factor 1
MEPAGRARMANAGYGPARKGFQVLHLQESGSSRRLGRSPRGLGQLSPENISPARGLGNSVLASVPPVDDPARLWPTKSSFRANSASVPADAATPGFGSSKSGRGVPLTKQEKPRTARPTEPRDSYSSGIRIPHSSPLHGGGRGHRKALVRVPAQGMRTRHQSQRAGGRPVGGSNGLDGGEASPGYHHVSTDDGVRLSTNAASANAGRSKAHRQVLAPVLATKTRKRVECCILVGQQQFAFPGMAGGRLLRRAGGWFPPPEAGRGGGQLTRAGGRAPARLALRPSKDAVVGRVFSNTLRVPPPAAQGLGPTRHADWPRAEEAKPPRTVHATAQRLQAFLHFRLDQRVKGRAAMQAACNRAKWAHPSDFQRTQHGGPGPRVMQPARRLLRASNCTAARTTTTPPRLRDQYRDSRQPYAPSLTTDQRFEGWPLGGVQQPPQSAWAPHPLLVRGSKAGPSKGFNGRLRPLGLRAHY

SEQ ID NO: 57133 - protein, 214 aa, Zea mays
  Coding DNA Sequence Number=SeqID_13758
MYVSQLCFHLTFLGITLGSGEAEFVVFRGRARVRALGSSEAEFVVFRGRARVRALRSDEAEFPMAPEAEPGCCQPYSVEWHSSRSGAGGAVLLSDRSVERRSDCGRFGSVDWRARVRIKVSDHLCIKCPCDLVGRRGDLAKLCADGGYQLRFRSLEGDQPISVAFCSGGFARAHPPGVAPEASEEWFDSSKGAEHGVSGELLAGNPSGRPCPIC

SEQ ID NO: 57134 - protein, 301 aa, Zea mays
  Coding DNA Sequence Number=SeqID_13759
MAPTAAEERGELKSERALRVMRMATTLGGIPFLKKDSPTDAPRHRRRSRPTRAKVTQPLTRGPGPTSHTPWASASVCGKEKSNCRSRQYRAFSGPPPKAEKNRHVAGGKDDITQDIDCGFGPPWESAGPLCVRTGPPGSGPLTARSQGPGAKDTQALIKRPDAATRPTARDVSQLVEPDVRPLGRAVSAFIAEKTRRPVTPLTGDVPPQHLMCPVHSTDGQRPGHPADGVPVRFVGRQYAHAAACAALIMTRTSPGKLPQHANTTQAADIRAQGDCTWPSISGSGCSIRYVLGPTCWGSTS

SEQ ID NO: 57135 - protein, 31 aa, Zea mays
  Coding DNA Sequence Number=SeqID_13760
MAGKKTLNGREYYYKILEIGMVQFGPKMEFL

SEQ ID NO: 57136 - protein, 144 aa, Zea mays
  Coding DNA Sequence Number=SeqID_13761
MGKSNKRKREPTPPSEDFSDSEYSEEEFSSESEGSPAPVSPPASSDDSDDSQGLAAEVWTYIRAVERSGLEGSDESEYSSDEEDSSEEGGGGDGGDDDDDDGGDGDDGDDDGDGGSRGGKGGNGGSSWGSNGGGSSKGSNKASG

SEQ ID NO: 57137 - protein, 229 aa, Zea mays
  Coding DNA Sequence Number=SeqID_13762
  Gene Ontology: Mol. function=metal ion transmembrane transporter activity; Cellular component=membrane; Biological process=metal ion transport
  Homolog annotation: Hit_ID=O65875; Match level="QueryCoverage=24%, HitCoverage=12%, E-value=2e-08, Identity=58%"; Hit description=FtsZ protein
MGTRETHGLDNIDPAFLRYKNTEKSYGDIYLYIDEWCDANWQVMAARSPNVRLQRLSTGRTRAAPVVAQISKEAGYLTVGVVTYPFSFEGQTTVRCSRVFEPVSRFTELLENLNLFPPVSLHWLLLLEVSPEAGLGGALVPTSIFSRAELADMEGESSIVASPFPVPSSSKGHEMEMTKKTAAVVPEMTSSSSMPNLAVAKDGNTKVLPFEFRALEVCLESACRSLEEE

SEQ ID NO: 57138 - protein, 113 aa, Zea mays
  Coding DNA Sequence Number=SeqID_13763
  Gene Ontology: Mol. function=hydrolase activity; Cellular component =nucleus; Biological process=mRNA processing
  Homolog annotation: Hit_ID=A3C1P2; Match level="QueryCoverage=32%, HitCoverage=3%, E-value=5e-12, Identity=86%"; Hit description =Putative uncharacterized protein
MGMSVQVMPLSGVYREGPLCYLFAVDGFRFLLDCGWTTKLNSCPNEESLATSILTKQDIDIQSVPHHAYLGCCDSKPAKVKRCNNLKTCSGMRTFFPIGEAIRPTVEVVLFSP

SEQ ID NO: 57139 - protein, 409 aa, Zea mays
  Coding DNA Sequence Number=SeqID_13764
  Gene Ontology: Mol. function=nucleic acid binding; Cellular component= cytoplasm; Biological process=coenzyme A metabolic process
  Homolog annotation: Hit_ID=Q69K57; Match level="QueryCoverage=43%, HitCoverage=33%, E-value=1e-79, Identity=82%"; Hit description=Smr domain-containing protein-like
  Pfam annotation: Domain name=DUF1771; Domain location=253-318; Score =59.2; E_value=1.4e-14; Accession=PF08590.1; Description=Domain of unknown function (DUF1771)
  Pfam annotation: Domain name=Smr; Domain location=329-409; Score =41.4; E_value=3.3e-09; Accession=PF01713.12; Description=Smr domain
  Pfam module annotation: Pfam domain module=DUF1771::Smr; Domain location=253-318::329-409
MAVREHGGGEMGAAEEAWRPLGRSTAAAALRLWTMTSTAPAPPRSPARRPAPDVPTPSAAEAEAEATSSARRPAPIHHLLSTSCSGLRDSQHRVGVGAWGDAEFEFGRPGGPMISADELFHNGQIRPLTLPPLPDLDPGSDDDEDCDRAPTRGHDLTPRSASVHRRARSMSPLRSASPRLKLINALVPAPDLSPALDATGEAAPPVTASPRSESRGEARDFARVRNTCFEQFQSISSGRVAPWLETGDAVASMYSESRGEARDFARVQNTCFEQARQAYLVGNKALAKELSMKGQAYNVQMKAAHEKAREAIYRQRNPVSSQRGGDHLIDLHGLHVNEAIHILKGELTALKSVGRAAGERMQVMVCIGTGHHTKGSRTARLPIAVEQFLLDKGLQYMQPQAGLLRVMVY

SEQ ID NO: 57140 - protein, 125 aa, Zea mays
  Coding DNA Sequence Number=SeqID_13765
  Gene Ontology: Mol. function=structural constituent of ribosome; Cellular component=intracellular; Biological process=translation
  Homolog annotation: Hit_ID=A2WNY2; Match level="QueryCoverage=42%, HitCoverage=88%, E-value=6e-23, Identity=96%"; Hit description =Putative uncharacterized protein
  Pfam annotation: Domain name=Ribosomal_L29e; Domain location=60-99; Score=70.1; E_value=7.3e-18; Accession=PF01779.8; Description =Ribosomal L29e protein family
METSPETEVGSAHGHDSWPRLSLGEAEFPIEADFERVSSSFVDCSVIGGAGVRDPEEMAKSKNHTAHNQSYKAHKNGIKKPKRHRQTSTKGMDPKFLRNLRYSRKGNKKSACRYRCCLGARETVT

SEQ ID NO: 57141 - protein, 637 aa, Zea mays
  Coding DNA Sequence Number=SeqID_13766
MDKDRQGAAQKRQAVVRLHEARPKRQRGAAKVTAPGGGQPPLAAKSAVPASGRAPEAAAAAGGSKAAKAASASGRVPEAVKSARGLPPPGKRVADFATDISVDDYLVGQLVVVPPAAATTATAVMPKAKGGALSAGGEIPALAAVRDVAGAVTRRLEEMKEALSQAADFAGPCGVRGPLRPLCLPKSRDFGRNMQTPSGKNRPPTGEKTDLRRQLVEERREANEALAKAQAALAEANLARAEGSLARERAAQLEERLNALQGRVERTEAATRTEAERTRKQLVDSYHELGARTGDFEVPDREPGLRCLEWVQEELQALPTIVEGFMSYASLVTCEGAMNALSREGCRHFEVFDQADEDFERDIYKVEDPIVKESAGTIYDRMWGPHGREVVREQAETARAQAARGERVDDFRALNSALPDPVSNPAEAVSEVALEPPPETVEGVPDAPAAAAAGEGPRVEDPATVAVEATAEAPATAGSSQVQDFGPAHATATAKFLAASTVDDVNKSDGSTSKFSDFGDSGSSVEWTEGSSDKDLDYFAALDAAAAEASPRAADAADVPGPSTGRRRRRAVAKRRVSGADGGRLRVSRAGRQELLSLPAAVGTGEGELRSLFAGEELRIMLFNYREMGIIPKAEPM

SEQ ID NO: 57142 - protein, 536 aa, Zea mays
  Coding DNA Sequence Number=SeqID_13767
  Gene Ontology: Mol. function=DNA binding; Biological process =regulation of transcription, DNA-dependent
  Homolog annotation: Hit_ID=Q5JNA1; Match level="QueryCoverage=99%, HitCoverage=72%, E-value=1e-132, Identity=48%"; Hit description =Putative uncharacterized protein P0022F10.18
MEDDKAKAVAEVMKTLRVDKLTVDLFCAILCLCEWKVEAAAEYFNFCRGKPQIPEKSLKQKFVFQFDFVKGQLQRFFPEDYDSEKIKKNNIESPNLSDQPLQRDLIVAPVKRRLVDEFKSCDLSHRQKRKVKLQGNSLQTQTPRRSPRLVNVNNTCNKNKKVSKGRAKVLKTPPDATDQVKDRAHKSCLLDEKLDNALKAVHEEATGSLSQDLRKLDSPRCEVGLSKEHGHDQGDTGKMLDEVSDVENSKEHVGSDAMGNSESYMSTYCVEPLPTNSRLTAYSRINELSFTWKHSQHASSLEKVLLDIQRDNFVNTIARIQKIVRDDPSDVLSADVIEATVQIEILKWGLCLQDKCAHKIVNTMLDYAKKVKGRHNFNTEMRKEEFSAKLQDLLKWQLKELEFKYTSLESDYKKAMADASNFFSTFEEHRKKLHAIKDGIKDLQQACMTKDDEMQKLALQVAEHATAYQKSIMEKVRVKMALKSHEQTLGYIKEQLASAESGSIDVGALVKIEMDNMSREIELSKQNLLNINFKKE

SEQ ID NO: 57143 - protein, 280 aa, Zea mays
  Coding DNA Sequence Number=SeqID_13768
  Homolog annotation: Hit_ID=Q6J9V9; Match level="QueryCoverage=55%, HitCoverage=45%, E-value=3e-22, Identity=45%"; Hit description =Putative uncharacterized protein
MAERNCTATRATTVPPRLWNQYRDSRQPCAGPNSANQAHRSQGPGKGIPRKGSFSAKETGPEPPTDQRFEGWPLGGVQQPPQSTRAPRPLLVRGSKGRAPRKGSTAASGHSGSVPTTDQGFVGWPSKGFDSRLRRRARDDPGYVRYITKARATLPRYPRTFPRPTGTIFVTESHQREASSPRTPSKGDRVWQITRRLGGCLKGKCALGPFLSILVIECQCKCFCVDICNVVDKVQIMSKGKEQLETSWPEQPRLCSVWEHRTVRCARLARANWPLSGIHR

SEQ ID NO: 57144 - protein, 52 aa, Zea mays
  Coding DNA Sequence Number=SeqID_13769
MQQASEKDFKTSREVANASGLAFVHRVSKLYLCLDKDWFPNDAIAITGIREQ

SEQ ID NO: 57145 - protein, 401 aa, Zea mays
  Coding DNA Sequence Number=SeqID_13770
  Gene Ontology: Mol. function=phosphatidylcholine-sterol O -acyltransferase activity; Biological process=lipid metabolic process
  Homolog annotation: Hit_ID=A2XLN3; Match level="QueryCoverage=27%, HitCoverage=20%, E-value=5e-21, Identity=54%"; Hit description =Putative uncharacterized protein
MAHMELRLTDALAGRGGEHRMEDAVSGLRSSNSATSFVAAPVYDDDVFSSSATSVCPDDVFSSSAAPTGFDGEPIFDEEPDNSITESVDVSCHDHLFLLDTAWDCSQQHNASILGRRQHLSRSARLQRRPLQHLTVDPVSAVHGSDDSELSHSEVDRVLATVVLSNPREKVHDGLVGVTEFAHRPLAVYDSYVEHDLYSFIPLLFYTEQAKEEQVPVDTPTRCSMRVLNCRTFPRQGLQGHPSSLVCPLVRRHDGRFHLWFEPSVLVAPHTRGRAEQMTLSYDADAEADDYYNAPDVEIMVSNFGSTSTLSYLEPDLMLPTRYRNILAGMLEKAVYEEGHDLFGVLYESRPLQWRAVHVQRLGTLSTPWGNSMQEMLENIFDCLYCVFRVLENKESLYCLV

SEQ ID NO: 57146 - protein, 70 aa, Zea mays
  Coding DNA Sequence Number=SeqID_13771
  Gene Ontology: Mol. function=ATPase activity, coupled to transmembrane movement of substances; Cellular component=integral to membrane; Biological process=transport
  Homolog annotation: Hit_ID=A2WUM4; Match level="QueryCoverage=95%, HitCoverage=5%, E-value=4e-19, Identity=67%"; Hit description =Putative uncharacterized protein
MADDTEEWMVRIDGMDVREMGIIKFQGFTTLISQELAMFSGNVRDNISFGKPEADEDDIVKAANTHEFIS

SEQ ID NO: 57147 - protein, 257 aa, Zea mays
  Coding DNA Sequence Number=SeqID_13772
  Subcellular localization annotation: CTP_CleavageSite=22; ConfidenceScore=5.24e-01
MDGNATALASPSAGSFPDKRARSEYSVERAPGDSTATATPPEKVAVVPRTAPNPFYWSGRRASEVVVAADPPACFVERPPRRSVRRRRCRSSLSAGAASAGRRSTGVRRFAERSTLTRSASLELEGPSGHFSVSTNLQPRSNNLRIAIKMRSHDAKLLQNLVLNLASSVESGAFNIRTFLEEAFRHLGDEHYLLNALLAIRKEVDMMEQDALESKARSDPEKERMEEQIHLAEPAKTAPRQFTFTPPPSSPELYEPC

SEQ ID NO: 57148 - protein, 62 aa, Zea mays
  Coding DNA Sequence Number=SeqID_13773
MAHPPQINPSHGGTVMVGHGWKGGRAKALRALIAQERVDRALAQAVRDEEVEDLTGLESSVA

SEQ ID NO: 57149 - protein, 127 aa, Zea mays
  Coding DNA Sequence Number=SeqID_13774
  Subcellular localization annotation: CTP_CleavageSite=57; ConfidenceScore=5.45e-01
MKLWKETSRSSKTTTSSRRGLAATPSRLPVKAAVIYVSFPHFDLLRPLESTVALASRCSAGTPDSPVNSSRAALQNPEGEEFESITPGAPDSPIKSEVEMQTLVDDAGIVDDASIFTEVSGTTQGPD

SEQ ID NO: 57150 - protein, 526 aa, Zea mays
  Coding DNA Sequence Number=SeqID_13775
  Gene Ontology: Mol. function=DNA binding; Cellular component=nucleus; Biological process=regulation of transcription
  Homolog annotation: Hit_ID=A2Z183; Match level="QueryCoverage=33%, HitCoverage=82%, E-value=5e-30, Identity=45%"; Hit description =Putative uncharacterized protein
  Pfam annotation: Domain name=ZF-HD_dimer; Domain location=193-254; Score=135.6; E_value=1.5e-37; Accession=PF04770.3; Description=ZF-HD protein dimerisation region
MSPKFPPYLTSSLAEPRPDNTVHFREKTETNKRRQEGDQSGGAAGACCSDRMAGDQDASSGDAVLSLQFRAAGGEPALRYKRQRVQAEDGRRGHSSGVCGGEDGIPGDGNDKGEEDGTGALAVAVTHHCRHRRQKIKGKKKLWMTVVTPSLSEKKGARERMEATVDLKYEPLFPNGGVSSATKKTRLRVAAGGETWVYRECLKNHAASLGGHALDGCGEFMPSPEADRADPSSLRCAACGCHRNFHRRLVELPLPPPLLALPPPLAPAPAVASHVMRDSRRTMRGEEARLPAAFDDEAEESDASSDFYEDRPLSPMPAQAAIVSPGYRQATTHTLLALIIGAPSPQTPAAAPRPPPPTSVGPMPAPATAPGAAAAAAAAARKRSRTKFSPEQKQRMQALSSRLGWRLQKCDEAAVDQCCQEIGVSKGVFKVWMHNNKHNFVGGHSARRSASASASAAAANPAMQQRSDAAAVYPSSHGDGAPAAAVVAHPSAPPPVPVHSNFNIEGTAADDFRVQPSTASGGSPQS

SEQ ID NO: 57151 - protein, 145 aa, Zea mays
  Coding DNA Sequence Number=SeqID_13776
  Gene Ontology: Mol. function=hydrolase activity, hydrolyzing O -glycosyl compounds; Biological process=carbohydrate metabolic process
  Homolog annotation: Hit_ID=Q5NBJ1; Match level="QueryCoverage=44%, HitCoverage=6%, E-value=4e-16, Identity=67%"; Hit description=Alpha -glucosidase-like
MVSPKTAKKHHAHLNNPFPRAVPTAAIRDDGDAALRLSFPSTSKLAHAHDFPVGTRFCLRWDPSRGGEDHAWSGAAARIRRGWGREREHMAVGRGRLRAWRRVRMRERERGNRTVGMEAGLIRQSDGQDGGGGMVVPSLHYCLKY

SEQ ID NO: 57152 - protein, 632 aa, Zea mays
  Coding DNA Sequence Number=SeqID_13777
  Gene Ontology: Mol. function=oxidoreductase activity, acting on the CH-NH2 group of donors, NAD or NADP as acceptor; Cellular component =chloroplast; Biological process=nitrogen compound metabolic process
  Homolog annotation: Hit_ID=A7QEP8; Match level="QueryCoverage=22%, HitCoverage=8%, E-value=2e-54, Identity=68%"; Hit description =Chromosome chr16 scaffold_86, whole genome shotgun sequence
  Pfam annotation: Domain name=GATase_2; Domain location=262-479; Score= 47.9; E_value=3.1e-13; Accession=PF00310.12; Description=Glutamine amidotransferases class-II
  Pfam annotation: Domain name=RRM_1; Domain location=489-557; Score =3.8; E_value=0.066; Accession=PF00076.13; Description=RNA recognition motif. (a.k.a. RRM, RBD,
  Pfam module annotation: Pfam domain module=GATase_2::RRM_1; Domain location=262-479::489-557
MEVGKLRVGGVEAGALVAPAPTLTAPASKNHAPASARPHAGNLAAENRPPYRPPANPSANRPTTRLNPALFSCYSSILRKRTSGTTSGAGGRPGSRAHEAPPGGLVLVSKDLDNIHEIALREYTELVIDETEVSEAALVRNVLYAYQGVSDREPWRNPSCPAPPPRRRGCRPVKERQGDLPVGPLLLEDHEDNIIIHVDSEPTKSTPEIGVVSLGGLENHQYFIDDSAVKDNLAKWLRQTHRRQEGTPLRHCVERHAKLNLFTVVHAAARRIQEMVPASWSLYHMTSSKRSQRMLGFELPPPGEYAVGMFFMPTDEKRREKGKAEFKKVAESLGHVILGWRLVPTNNSDLGESALETEPVIEQVFITKSSRSDAEFEQQLYILRRLSITSVRASLNIKRGGERDFYMTIVYKGQLKPSQLKGYYYANLGHENFMSYMALSPAAVLLWPTAMPDSSGCDLRLGGGKEMAAVGMLLGGEDMHRFPVRSPRMDCGDLIRSPVARQIVSNYFSMFGPVQDVRIPYQQKRMFGFATFVYAETVKAILSKGNPHFMCDARVLVKPYKEKGKVPGRFRKLLHAHHGGAEFVGCASPTGLLDSRDPYALLLLSGAQAVSGSLMGLALGHGSKRNCLNVLG

SEQ ID NO: 57153 - protein, 299 aa, Zea mays
  Coding DNA Sequence Number=SeqID_13778
  Gene Ontology: Mol. function=amino acid transmembrane transporter activity; Cellular component=integral to membrane; Biological process=amino acid transport
  Homolog annotation: Hit_ID=P24207; Match level="QueryCoverage=100%, HitCoverage=89%, E-value=4e-85, Identity=91%"; Hit description =Phenylalanine-specific permease
  Pfam annotation: Domain name=AA_permease; Domain location=1-299; Score=121.6; E_value=2.3e-33; Accession=PF00324.12; Description =Amino acid permease
MAGPAVLLGYGVAGIIAFLIMRQLGEMVVEEPVSGSFAHFAYKYWGPFAGFLSGWNYWVMFVLVGMAELTAAGIYMQYWFPDVPTWIWAAAFFIIINAVNLVNVRLYGETEFWFALIKVLAIIGMIGFGLWLLFSGHGGEKASIDNLWRYGGFFATGWNGLILSLAGNAPKFLTRVSRRGVPINSLMLSGAITSLVVLINYLLPQKAFGLLMALVVATLLLNWIMICLAHLRFRAAMRRQGRETQFKALLYPFGNYLCIAFLGMILLLMCTMDDMRLSAILLPVWIVFLFMAFKTLRRK

SEQ ID NO: 57154 - protein, 104 aa, Zea mays
  Coding DNA Sequence Number=SeqID_13779
MLGVLGVGEARPLGAVACRLHGCPPLSPVGLGKSGESLVTAGRFFKDVHHPRWGGGQAEPELYLPRGFVGHPLLRRSRERALAGPAGGSDFDNAGPVDGRRRQP

SEQ ID NO: 57155 - protein, 581 aa, Zea mays
  Coding DNA Sequence Number=SeqID_13780
  Gene Ontology: Mol. function=binding; Cellular component=nucleus; Biological process=cell division
  Homolog annotation: Hit_ID=Q8S521; Match level="QueryCoverage=24%, HitCoverage=67%, E-value=4e-47, Identity=71%"; Hit description=D -type cyclin
  Pfam annotation: Domain name=Cyclin_N; Domain location=89-227; Score =17.1; E_value=3.7e-06; Accession=PF00134.14; Description=Cyclin, N -terminal domain
MDPVGPPLPTVPALQLQRRRHGETRSCRVPAEGNGAQQLRDGGFHPAVRRGQQQHPRPRSGAQEEEEVLLARSRTRGEPSVVFPVPSEDCVAGFVEVEAAHMPWEDYAERLRGGGTDLRVRTDAIDWIWKVGRSPRSMQSSLISRVCVPIPSIRAMNLTVLPLDRFTRTKEGKSWTTQLLSVACLSLAAKMEETYVPPSLDLQLVLPIFNGAAYIYEAHVRRYFKISSYVSPSYSEHHRRVLQMTSLDACSFSCVNLELPQEHVVTALSVESYYRPDAPRRPLPRQEEDFEVDFEEFGVKAGDSELDSADEAMTFAAPGVHSPEVTTGSSQSPELSLSVTPFLAAIAVPLEDKTSTVDFVWAIPLSLLFLGDLQPPRRRCLYTMASVMLIFSAKAADIHQIIPLVKAAGPDKMSSNSEMVYGFEEDENDALAFLSAISEYDTELIETVMCHFREKFENLPEKFNGVEQLLQEFSLDDLFPLVAPLFMETPHSCSMYAEKAEQCFDEYCRCNLLFLSAHLLSTGYYKFPLQRYMALVDLQEGNERLFYKLLIDNIEEPLVRPAKSSIKLETICLVYADQFDC

SEQ ID NO: 57156 - protein, 334 aa, Zea mays
  Coding DNA Sequence Number=SeqID_13781
  Homolog annotation: Hit_ID=Q6BTJ4; Match level="QueryCoverage=83%, HitCoverage=30%, E-value=2e-08, Identity=25%"; Hit description =Similar to CA1621|CaIFF6 Candida albicans CaIFF6 unknown function
MALGAGRWGAVAWARRRSWLLPAACSSDPDTQAGCVLSGTIIRVPPRLLISADNPYQHKAAKENSAACPAPTAVPLARVRPTAAKSSLGRHRKLRLARPQGSTPVSASEDGLRLARPQGSDSASTSEDGLRLARPQGSDSASTSEDGLRLARPQGSDSASTSEDGLRLARPQDSDSASTLEDGLRLARPQGSDSASTSEEPPPRPTSGSDRPHHRGAIITLPLASSDYGEQDRRPIWLAPVKQVMMAPRVLHDDGGSQPLTEARRRQQGSDSPTAVLPQGSSAPPTATTSHEQGAKNLSDSHDGMYIGLWLSFARHVSTLLHPPLYTWALSLHL

SEQ ID NO: 57157 - protein, 324 aa, Zea mays
  Coding DNA Sequence Number=SeqID_13782
  Homolog annotation: Hit_ID=A2WY92; Match level="QueryCoverage=16%, HitCoverage=52%, E-value=2e-12, Identity=61%"; Hit description =Putative uncharacterized protein
MPPPNLPCTLRRVHPPRRNLAPASGLGTGSDDAAEAAERAPVPTAEAKKRASSVALSKQEIVDDFVAIRGTRPPASAQEATSHGAATTRFAVPGIVLSRCGTQLLQDRGEVIVALVELSMDDRLQEDVGLLLLHHRRYHAAYWNATAGQEYEDEQAQDDCKWHRIPMFGDWNLRDDMPVTQYLQAGTFFIIVPPAEKDSDEDLFKELAQAYEVLSDPKNQEFYDALGEPRINGKWQQRPDQNPGIQRWQRLQQTQAASTWYTTSTGTISLSTGHTQGAPDASARRTAPPPRLLSDPARWSLAKDSLLGPRGHPGQHLLYGFIGR

SEQ ID NO: 57158 - protein, 79 aa, Zea mays
  Coding DNA Sequence Number=SeqID_13783
MSDQSIAPVRMMTNEASFRGHSTPQSLRDSSKAPLGRQLQGAEAPGASEEDMGISLGKSIAYSVVRTRVILQECAKSLF

SEQ ID NO: 57159 - protein, 160 aa, Zea mays
  Coding DNA Sequence Number=SeqID_13784
MGKSKRGGSSSHHSGDKRKREPTPPSEDFSDSEYSEEKFSSESKGSPAPASPPASSDDSDDSQGIAVEVWTYIRVVERARLEGSDESEYSSDEENSPDSSEGSGGDDDGGDSDSGGGSGKGGDDSGKGGSGDSGGGSKGSSKGSNKASGYMPLVLDVRVD

SEQ ID NO: 57160 - protein, 268 aa, Zea mays
  Coding DNA Sequence Number=SeqID_13785
MGGKTSPSPPPPGELTVVVVAAALRRKEYHVVAAVEGHELETPETEQRPGLKRLLETTHLELDGKLFVNTQQAPTWRANYRRFDPGGSLDRRVKLSLRAPAQMGWREMEHKGGKTATHVILRQTQGRARRRLLLRPRPGSGEDAIPPEVEVEAGPWGRARRRPPSEVEVEAELWGRARQRPPSEAEAGAEPWGLARRRLPPEAEAQGRARRSFLWRLRLDSAAVSLTLAGGTAVGEGRVALFSCQVSQWEGEVTAVTSTLPTEARMLG

SEQ ID NO: 57161 - protein, 606 aa, Zea mays
  Coding DNA Sequence Number=SeqID_13786
  Gene Ontology: Mol. function=L-isoleucine transmembrane transporter activity; Cellular component=integral to membrane; Biological process=amino acid transport
  Homolog annotation: Hit_ID=Q2QN95; Match level="QueryCoverage=99%, HitCoverage=99%, E-value=0.0, Identity=60%"; Hit description=Amino acid transporter family protein, putative, expressed
  Pfam annotation: Domain name=Aa_trans; Domain location=225-596; Score= 133.8; E_value=5e-37; Accession=PF01490.9; Description=Transmembrane amino acid transporter protein
  Pfam annotation: Domain name=Trp_Tyr_perm; Domain location=229-588; Score=-265.8; E_value=0.018; Accession=PF03222.4; Description =Tryptophantyrosine permease family
  Pfam module annotation: Pfam domain module=Aa_trans::Trp_Tyr_perm; Domain location=225-596::229-588
MDRDEEMGHGDRSLLFVGDEDDDIGTYRDGGFMETSSDEGSFSDPSDGEARGGRRGGDGSKSAWPQSYRFVNQSPRPRPHLRVYDGCTRSQCRSRRDYSELTAALSSSRRQSIDMLSVVPSPTVSMLMAASPNLTRFGSSFLKAGSSFFLRKGDDSVLPLARPLLPPSLPQLSQSSLRPQPPMRQSTDILAQPPRPPAGHEAQLPDRPSSACLRPDYIELPPPASKCSRNQSIINGFNVLCGVGILSTSYGIKEGGWSSLLLLPLLGGSSCYTGLLLKRCIDSSPNIGTYPDIGQAAFGVAGRIFVSVVLYLELYASCVEYITLLGDSMSSVFPSAHLAFAGIDMNAHTLFAITTALAILPTVCLRNLSLLSYLSVIVCLFWVGIGEGIGFHFSGALVNVTHLPVALGLYGFCYSGHSVFPNIYSSMKERSQFPFVLLFCFTVVTVAYAGIAVSGFLMFGESTMSQFTLNLPQQYIPSKIAIWMTIVNPYTKYALTMTPVALSIEEALPKKMQNYLVGMSVRTCLVLSTVVVALLFPYFGLVMALLGSVFTMLVALILPCACYLSIKKGAVPLWEIILCIVIIMIGAVCASVGSYTSVSQMISSTR

SEQ ID NO: 57162 - protein, 162 aa, Zea mays
  Coding DNA Sequence Number=SeqID_13787
  Gene Ontology: Mol. function=hydrolase activity; Cellular component =cytoplasm; Biological process=metabolic process
  Homolog annotation: Hit_ID=A7QB13; Match level="QueryCoverage=77%, HitCoverage=39%, E-value=6e-48, Identity=73%"; Hit description =Chromosome chr5 scaffold_72, whole genome shotgun sequence
  Pfam annotation: Domain name=IU_nuc_hydro; Domain location=15-162; Score=-146.4; E_value=0.072; Accession=PF01156.10; Description =Inosine-uridine preferring nucleoside hydrolase
MAVVEGTKKKSTDRTEPLFDGADDAIAIFLALRSPELEVLGLTTTFGNVHTALATRNALHLLEAVGRTDIPVAEGSHLTIKKATKLRIASFVHGTDGLGNQDFPRPATKPVDQSAAVFLVEQTNLYPGQVTVVTLGPLTNLALIVWIVSYTLLCFSFLLGFN

SEQ ID NO: 57163 - protein, 21 aa, Zea mays
  Coding DNA Sequence Number=SeqID_13788
MANPPQARLIELDHADLPRTP

SEQ ID NO: 57164 - protein, 112 aa, Zea mays
  Coding DNA Sequence Number=SeqID_13789
  Subcellular localization annotation: CTP_CleavageSite=56; ConfidenceScore=5.47e-01
MGKPVPSLLMLLLNRAINKFCQVITFPLVTQCSSMDQAVSLAARSRRFESSFNLARAHRLGVQCLTNPDYRRAVTALVPTITGMGDHVSGRVRGKVCGQDLVTIMLSEEKLS

SEQ ID NO: 57165 - protein, 70 aa, Zea mays
  Coding DNA Sequence Number=SeqID_13790
  Gene Ontology: Cellular component=viral envelope
  Homolog annotation: Hit_ID=A2Z8U8; Match level="QueryCoverage=51%, HitCoverage=3%, E-value=8e-10, Identity=86%"; Hit description =Putative uncharacterized protein
MSNPKQPFTFSTFIYVFEARSVDSSDAENPGLDDVDAANMHMEIGRRIYGERLITSDRDVDMEQRQLIPR

SEQ ID NO: 57166 - protein, 432 aa, Zea mays
  Coding DNA Sequence Number=SeqID_13791
  Gene Ontology: Mol. function=sugar:hydrogen symporter activity; Cellular component=integral to membrane; Biological process =carbohydrate transport
  Homolog annotation: Hit_ID=Q688W0; Match level="QueryCoverage=99%, HitCoverage=97%, E-value=1e-142, Identity=56%"; Hit description =Putative integral membrane protein
  Pfam annotation: Domain name=MFS_1; Domain location=64-413; Score =8.1; E_value=0.01; Accession=PF07690.7; Description=Major Facilitator Superfamily
  Pfam annotation: Domain name=Sugar_tr; Domain location=60-431; Score =124.5; E_value=3e-34; Accession=PF00083.15; Description=Sugar (and other) transporter
  Pfam module annotation: Pfam domain module=MFS_1::Sugar_tr; Domain location=64-413::60-431
  Subcellular localization annotation: CTP_CleavageSite=59; ConfidenceScore=5.46e-01
MASDGDHGGALQKPLLPKAPRSGGWFRKGTSTARLGAAAAGTSSKAAALRPPHHVPALLCTLVVALGTVQFGFTSGYSSPAQDGVTRDLDLSISEFSVFGSLSNVGAMVGAIASGQMAKYVGRRGSLMIAAVPNVMGWLAISLARMTASALMAVNVCSALQDTSFLYVGRLLEGFGVGVISYVVPVYVAEISPQNMRGALGAVNPLSATFGVVFADVLGLFFPWRLLALIGTLPCLLLIPGLFFIPESPRWLIAVASANKSGAMSFQELNQKKYRTPLIVGSIFKAAVPVNLVLTISSFGMTLSLLVVAVVFYIKDNISHDSDLGNTLSMVSLVGVLAYVTAYSFGMGAIPWIIMAEILPVSIKSVAGSFATLANWLTSFGITMTANLLLSWSAAGTFAFYMMVSAFTLVFVILWVPETKGRTLEEIQWSFQ

SEQ ID NO: 57167 - protein, 140 aa, Zea mays
  Coding DNA Sequence Number=SeqID_13792
  Subcellular localization annotation: CTP_CleavageSite=53; ConfidenceScore=5.59e-01
MDAIKVKAQFTQGTRSRLARVQPRAKATDPGGFTSCPRAPSSNGHTFGSPEAQSSQRSNLGQIATPTDRLGHSLGLGRWTSPRLTPGLGLNHDLEDGELRLARPQDSDSASAPEDDGLRLARPQSSDSISTSEEPPPCPT

SEQ ID NO: 57168 - protein, 242 aa, Zea mays
  Coding DNA Sequence Number=SeqID_13793
  Gene Ontology: Mol. function=kinase activity; Cellular component =ornithine carbamoyltransferase complex; Biological process=amino acid metabolic process
  Homolog annotation: Hit_ID=Q6QP54; Match level="QueryCoverage=49%, HitCoverage=43%, E-value=1e-34, Identity=65%"; Hit description =Putative kinase
MWQPERSWHPAGVKSWLSEEQRSLAEGQLSERLSPCWRPPASVRELRAVVVTGLAGRHHCLSGGASQMGHRSCSLRPESARGRVMMALPVDVAGLCPRSGDVVVPPKPRSSLSSVAEAEPEPLGRARRRSFGRGQGGVRALGSGGAEFPRPSPSPWVGRGGGRSMEAKAESEPWGRAERSSSSSGAEPESEPWVGRSGVRRLPGLSPSPSPGSGGAEFAVFRGLARVRALGRAERSSPSSGA

SEQ ID NO: 57169 - protein, 346 aa, Zea mays
  Coding DNA Sequence Number=SeqID_13794
  Subcellular localization annotation: CTP_CleavageSite=68; ConfidenceScore=5.34e-01
MSSRSLMHRVFPPSKPPDGGYPPSFRLIVGGTQLRGSWYLLAIVRLQGFSSCSPAAPLRRRSPKMVTSSLMVGESEPGCGLSPSLSLKDFHHQGWGGDCSVPGFRTRVASEPFAAPASATAAGRGSSADVIAKASHGPTSNSTAFCPSLPHKFWHGRGPPGSSIRPEVSAAAVRPPGAEVVVVAAAGAGDGAPFVGLLLLRRPSPMEWGCSYLRRGNRSSVCNGTLNANSPVDCLNRFTKHESPRAKVTSETPWPLFDEPRPGVAISARTEADRGLGPGWRPWKMVGRGPWGNRPSRLLGPGSRRSPWTASPSEAGSDLAEGAADAEGARAPFQREDPILQDQIVL

SEQ ID NO: 57170 - protein, 181 aa, Zea mays
  Coding DNA Sequence Number=SeqID_13795
  Gene Ontology: Mol. function=transporter activity; Cellular component= integral to membrane; Biological process=transport
  Homolog annotation: Hit_ID=Q688W1; Match level="QueryCoverage=91%, HitCoverage=75%, E-value=8e-52, Identity=65%"; Hit description =Putative uncharacterized protein OJ1781_H11.16
  Subcellular localization annotation: CTP_CleavageSite=62; ConfidenceScore=5.33e-01
MASDGDHGGALQKPLLPKAARGGGWFRKGTSTAHPSGLSAAAAGTSSKAAALRPTHHVPALLCTLVVALGPIQFGFTTGYSSPAQDGVTRDLNLSISEFSAFGSLSNVGAMVGAIASGQMAKYVGRRGSLMIAAVPNIMGWLAISLARDTSFLYMGRLLEGFGVGVISYVKINWRAWAAGG

SEQ ID NO: 57171 - protein, 199 aa, Zea mays
  Coding DNA Sequence Number=SeqID_13796
  Subcellular localization annotation: CTP_CleavageSite=67; ConfidenceScore=5.25e-01
MAQGHISLSNDRVSFNPFPLSNGHLDRMSFSPQSNGSLRPHKDHHNLVSLALITKVLRTRNGEEEKRSKNKSSKNTSKDSLSLSSHYLLGVKMGLGEALILFDLCLVLIALALVLNVKSENLDVLKCGGWGGKMCPGPFLSILVIECQRKCFCVNLCKVVDKVQIKSKVANPSLTPFFFVNFKCKGERLQVVEIPRERD

SEQ ID NO: 57172 - protein, 182 aa, Zea mays
  Coding DNA Sequence Number=SeqID_13797
  Subcellular localization annotation: CTP_CleavageSite=53; ConfidenceScore=5.01e-01
MAIIVKIWSQSALELDHSLRSLVLNAVPRRQSTHWRSPAHTPSACQSHPSTVLARALKDHPRTRLTSLLAYPTDQTLSLAPVSSAPPARATRAPATATSHFQRPPSLTRASGKLPREAVKLVQARIEALPHRDSKITVARLRPPTTARRLSYQVNLTRFKNSIRIVCFSQLMRLLDPLYCIE

SEQ ID NO: 57173 - protein, 169 aa, Zea mays
  Coding DNA Sequence Number=SeqID_13798
MWKDRVEHAKDVWALYLGQTAHLTVRCMNALYHLQAVRGEAMSQLMGLVEATKITLDNREELVVDLSTEMVEKDLWVEQMATQIQELEELVGARENTIEVLEDQLINTQQQLEEANQHLDMHHQGIQDMEVDEDVDIEGGVELEPASSLDTAGSGRPPSLESSAASFAH

SEQ ID NO: 57174 - protein, 48 aa, Zea mays
  Coding DNA Sequence Number=SeqID_13799
MEAKSHHQPSQGGLTALAYNAPLTPAAAVQWPHLYPPYLEWETQSQVA

SEQ ID NO: 57175 - protein, 111 aa, Zea mays
  Coding DNA Sequence Number=SeqID_13800
MSQLMGLVESTKITLDNREDLVIQELEEQVGARENTIEVIKDQLLNTQQQLEEANQHLDMHHQEIQDMEAKGADEDVDIEGGEEPEPASSLDTAGSGRPPSPESSVASFAH

SEQ ID NO: 57176 - protein, 84 aa, Zea mays
  Coding DNA Sequence Number=SeqID_13801
MEILGELDNVQLKPSKNPMKPKDVIKYCKFIQNPKNEDCNLADGEYILVPEHGVAQEIAQEPAPEPAIEDLPAPALEGKPRSYA

SEQ ID NO: 57177 - protein, 151 aa, Zea mays
  Coding DNA Sequence Number=SeqID_13802
MAHWRAQSTRGGGRPKSGEGDLGLPVKFCQARGLGKLHEPMAELTEALARLGRDWRELATAAEALKAWRAVARRARGNFRLGTWSCSVTKVPMLECLVPRSNCAKTVSNEFGLSSNFSRACSREFGTTLIFGSPGFEFRKTENAVDPWKEV

SEQ ID NO: 57178 - protein, 273 aa, Zea mays
  Coding DNA Sequence Number=SeqID_13803
MARLRHTARKSVIPFLPSCLTEHSLHRLVTNQSSHLERLHHRLHEEQERRRQELEQQGSSYSPQQKVESMRRCSPVPPLEAHLAPPLGIPAAGLAKGGDPDDGDDGNSSSSHSIDLSESWDIQRPLIGDLLGVPSEDSLQGVEVCSMHYSISKRDSAEATMQDTARRALSHYCSVLGGVADGLDPRKSVKMFICSVLWRNSILFSYAARFARSVLICDCIPQMSDNRRRGGRHAQQEQQALQDEAPQQQLPPLPPMTIEQMFLMQTHAIQAIG

SEQ ID NO: 57179 - protein, 306 aa, Zea mays
  Coding DNA Sequence Number=SeqID_13804
  Homolog annotation: Hit_ID=A2YGC2; Match level="QueryCoverage=38%, HitCoverage=52%, E-value=6e-09, Identity=32%"; Hit description =Putative uncharacterized protein
MKPWKKTFRSSKITTTSRRGLAATPSRLPMKAAFIYISFSHFDYCKDYVDVSDMAHLRHTARKSVIPFLPSRLAERPLRRHEIESVRSCSPVLPLEAPPAPPLSALAPGLAAGGDPNDEGGDNSSSHDTDFSADQEPKGWVARPITRDAARGCHFHDALDTLLRRALDQRTWSIEYRCVVFQHSRGVYPDRWEATCLVRRPENSLWGAEVCSEHYSISERDSTEAAMQDATRRALSHYCSVLGGVADGLNLKYYPRRPSGSTGGMIVSPVGEDNPRLSGTVNLAIVLNTELDHALDELSRARAEIA

SEQ ID NO: 57180 - protein, 133 aa, Zea mays
  Coding DNA Sequence Number=SeqID_13805
  Homolog annotation: Hit_ID=Q6UU50; Match level="QueryCoverage=40%, HitCoverage=12%, E-value=1e-07, Identity=57%"; Hit description =Putative integrase
MAGGRELAGAKEGRLAGEVLKKIVSYRGTQFTSHFLQHLQEALGTHLKFSSAYHPRILRHCMEGVVELHCSGINLGKAKEVFVSTRGEVASGRTGSPRRPGICGEANADSGDNKQSHPEKYHQNVQSQMGSPL

SEQ ID NO: 57181 - protein, 143 aa, Zea mays
  Coding DNA Sequence Number=SeqID_13806
  Homolog annotation: Hit_ID=UPI00005A9633; Match level="QueryCoverage =27%, HitCoverage=7%, E-value=2e-07, Identity=74%"; Hit description =PREDICTED: similar to Copia protein (Gag-int-pol protein)
MRTKLKMMKMKIKRMSHLKRRTMIKGEMIMIKRRKMIKKYRVKDRHTQESTKRFKEITPVEDALRDSDWVLAMQEELNNFTRNEDAKPIKTSMGTNGHLDLDTGDKSVDQKKRFKYSECKVVPPYDGYAWSGDSPSRALWSTV

SEQ ID NO: 57182 - protein, 492 aa, Zea mays
  Coding DNA Sequence Number=SeqID_13807
  Gene Ontology: Mol. function=nucleic acid binding; Cellular component= cytoplasm; Biological process=multicellular organismal development
  Homolog annotation: Hit_ID=A2XWI3; Match level="QueryCoverage=64%, HitCoverage=27%, E-value=1e-128, Identity=73%"; Hit description =Putative uncharacterized protein
MVRKKRTGPGESSGESSGAPGHGSSQRPQATQQGTRGGGQHQGRGGYLGPGVPPSQHPGGGPPEYHQPLDYQGRGGYQGRGGPPSQHPGGGTPPGSQPRGYQGHGGYQGRGGPPSQYPGGGTPPGSQPRDYHGRGGPRPRGGMPQSYRGGHVGGSVVPSVPSGPSRPVPELHQAPDVQHQAPVVATPSSPGAGSSSQPGKAEVSAGQVQQQFQQLAIRNQSLASQAGQMAPASSKSVRFPLRPGKGTHGSRCIVKANHFFAELPNKDLHQYDVSITPEVTSRGVNRAVMAELVKLYRHSHLDGRLPAYDGRKSLYTAGALPFASKTFEITLQDEEDSLGGGQRRQRVFRVTIKFAARADLHHLAMFLAGRQPDAPQEALQVLDIVLREMPTAKYCPVGRSFYSPKLGRPQQLGEDMSSTAFFEALPVIDFVSQLLNRDISVRPLSDSDRVKIKKALRGVKVEVTHRGNMRRKYRISGLTPQATRELSYVHVS

SEQ ID NO: 57183 - protein, 74 aa, Zea mays
  Coding DNA Sequence Number=SeqID_13808
MKYYLRLVLYLKVLLTQGSVIEPIVVVRGNEMISLVIGENEVVIMLVIYKYAYVVFTMFFMVEFYYNNIVTLAL

SEQ ID NO: 57184 - protein, 160 aa, Zea mays
  Coding DNA Sequence Number=SeqID_13809
MHPWSGRIKGWEKALASGFPNATTTRPWRMSMERGSEDIHEPSKSASGVISQSGNRRSAKGSTLRRWMAAITPAADRPHKAARRHTESPLVEGDEAHDAPRRRGQSGSRSSRSPAVTVEKGHGSRSEMMVTRSAITKRKGWRWKGLGTGKGGYPENDPSP

SEQ ID NO: 57185 - protein, 222 aa, Zea mays
  Coding DNA Sequence Number=SeqID_13810
GGGRGVGRFLEVGAAWGGGSAWLGAAMARGEGTRHGEGKRRGRSTRLLGVGAAWGGGSVWRGSGRAARRRLGGRATRRWIDGRAARAGERSKVNVCLPGEETTPKPGKDEVVVYKSFFKAGLRHPMPYEAKGVVSTLMRCARQKNGSMLKLTPNNTKIVRQLISSAASQNTLKAANKQKLLFTSLSDKLLFQQAAAVPNRANVRAREKRKRAAKNEVEEPSS

SEQ ID NO: 57186 - protein, 131 aa, Zea mays
  Coding DNA Sequence Number=SeqID_13811
  Subcellular localization annotation: CTP_CleavageSite=37; ConfidenceScore=5.27e-01
MGTVARTSSSVASTLDWCWVDAGTSRHLDASTTPRIAASLRMGATGLPATGGLSAISSVDGSATDGVGATTSGVASTTVYVELWMHPQPPHHHGSQGSASHAQGSEGAVNVQDFFVHGSGGSGQNSHSPQE

SEQ ID NO: 57187 - protein, 440 aa, Zea mays
  Coding DNA Sequence Number=SeqID_13812
  Gene Ontology: Mol. function=aspartic-type endopeptidase activity; Cellular component=extracellular region; Biological process =proteolysis
  Homolog annotation: Hit_ID=Q6AUQ1; Match level="QueryCoverage=94%, HitCoverage=95%, E-value=1e-113, Identity=52%"; Hit description =Putative uncharacterized protein OSJNBa0007A06.3
  Pfam annotation: Domain name=Asp; Domain location=70-435; Score= -131.8; E_value=8.3e-06; Accession=PF00026.14; Description=Eukaryotic aspartyl protease
MARTLLWLALLCAALAFCTRAAGLRLELTHVDAKQNCSTEERMRRATERTHRRLASMGEASAPVHWAESQYIAEYLIGDPPQQAEAIIDTGSNLIWTQCSTCQPAGCFSQNLSFYDPSRSRTARPVACNDTACALGSETRCARDNKACAVLTAYGAGVIGGVLGTEAFTFQPQSENVSLAFGCIAATRLTPGSLDGASGIIGLGRGNLSLVSQLGDNKFSYCLTPYFSQSTNTSRLFVGASAGLSSGGAPATSVPFLKNPDVDPFSTFYYLPLTGITVGDAKLAVPEAAFDLRQVATGLWAGTLIDSGSPFTSLVDVAYQALRDELVQQLGASIVPPPAGAEGLDLCAAVAHGDVGKLVPPLVLHFGSGGGDVAVPPENYWGPVDDSTACMVVFSSGGPNSTLPMNETTIIGNYMQQDMHLLYDLEKGMLSFQPADCSSM

SEQ ID NO: 57188 - protein, 282 aa, Zea mays
  Coding DNA Sequence Number=SeqID_13813
MACIRCTARKSVNPLLPSHLAERPLRPMVPGQSSHLERLHRRLHEEQERRHQEQEQQDSPPHLSRRWSLRGCLPLHLSQRCPPHHHRASRLLEDTLTETETIMTSVAVRAMARSSRRSQSQRDGSLDPSLVTPLAEAFSEHYFITERDTAEVAMQDAARQALSQYCSLFSGVADGLDLKYYPRRSTGSAGGVIASPVGEGNPRLNNMVNLTVVLNTELDHALDELGKVWAEVAELRAECVARHYLNGGSPAPVEIQHLYRSLPHGRFDYGTPDYRTQIDLDP

SEQ ID NO: 57189 - protein, 90 aa, Zea mays
  Coding DNA Sequence Number=SeqID_13814
MDDKKKQLKTEFLDPLMISQALYKEVVRRHGEEYKDLDDDEFEKAVKQNQRKKMKVPKSKINVEWLERDMVSVGVAKVVVHHKRFLEPPV

SEQ ID NO: 57190 - protein, 333 aa, Zea mays
  Coding DNA Sequence Number=SeqID_13815
MVTTSSMVGRSNPGCGLCLALSFKDLHHPCWGGGRGEPGLYLPHGPAGRLFLRHSGGMALTGLAEGANFDNAGPVDRKRRHLQRAWLAGSAGSVAASDAASFRLIRAWPSAHRTGGCCAVRTGGPSKTSHAARAAFVFLDCLVLTPSRRLRAEVDACPADAQVAAIVGAEVVVARGGFFADETVGATRGQTSGSLALIACPRPSSGDVGEGLVTAASAQRSSLLLSSRLERRSLSLLVQWSAASHPEFVIPQALRCGGCSYPREWNRSSICNGTLSTGFKNPRLLCDEPEPEAATSAWTEAELAQKEASSAQEQVASQAEEVQQRLELGQVIR

SEQ ID NO: 57191 - protein, 157 aa, Zea mays
  Coding DNA Sequence Number=SeqID_13816
  Subcellular localization annotation: CTP_CleavageSite=17; ConfidenceScore=5.05e-01
MTTVVLSPYGSKETSARSQQPRQLCFYRAQALLLRRPRYRVHRALAPLRQPRWYVHRAQAPLCRTRTPRGRNADTAASIEVVDVPDGQGEDGSGNRHGRGVLAGGGGGVGPPGFHGGTPWALAMQGAGSAGLLAAAPSRAQPVGWALAAGSLATAPL

SEQ ID NO: 57192 - protein, 237 aa, Zea mays
  Coding DNA Sequence Number=SeqID_13817
MGRRETEREGGKKPEGDRRKRGNPRPSCLSRVQVGRKERIQGNDGASCDVVGPSPRLGEVEAPPRSRSSLSSEAEVESEPLGRARRRPSAEARAEFEPWGRAMRSSSSSGAEPESEPWGRAKRSSSSFGAEPESEPWGRAKRSSSSSGAEPESEPWGRAKRSSSSSGAEPESEPWGRAMRSFIWRLRPDLAAVSLTLSSGTAVGAAQAALSSCQAGQWSGEVTAATSALSTEGRASG

SEQ ID NO: 57193 - protein, 227 aa, Zea mays
  Coding DNA Sequence Number=SeqID_13818
MPPQYTVQLFKKHRVPRCRVRMTLEPHPLQPGWRSLDTESFGYRAEDTIEAIALHGLTTFCGFHPLELSTHPIGLFPADKEDDPMWKDRVEHAKDIWALYPGQTAHLTATKITLDNREELVVDLSTEMVEKDLQVEQMSNEIQELEELVGTRENTIEVLEDQLINTQQQLAEANQHLDMHHQEIQDMEANEDVDIEGGEKPEPASSLDTARSGRPPSPESSVASFAH

SEQ ID NO: 57194 - protein, 165 aa, Zea mays
  Coding DNA Sequence Number=SeqID_13819
MSGGLRNKSASKLEIVEVASTSSFGLDVDPRAIDLAMRITKRMFLKMKEDEAKTGFKKKMIDGDQTMNPPLHKSDNESRSEDEEEHESDSEDEDDLQQFFAQLSKKNRMSFLKLMKRAEEQKEMLHKQEDFLIRKIEDLEKLTKEHEKLKCSHDDLVQRHGTQPE

SEQ ID NO: 57195 - protein, 238 aa, Zea mays
  Coding DNA Sequence Number=SeqID_13820
  Subcellular localization annotation: CTP_CleavageSite=28; ConfidenceScore=5.12e-01
MQSACNRAKWAHPFDSNAPSMETQAHTSCNRRAGCYVRATAPPLAPLPCLLDCGTSTATRGNPAYDPTVLARRISHGSVSCRRRRDGQYGQKWAGSNGSGRRAEAAVTSSAKLTSPHGTTREPSPTEKRATLRLRHNDRVKKGTGKGDTLKGILIREGSGPRAPLLIRGSKVGPSEGFNSRLRALELLAHYWSEVQRPAPRKGSTTASGHLGSAPTTDQGFEGWPSKGSQPPQTQSEG

SEQ ID NO: 57196 - protein, 116 aa, Zea mays
  Coding DNA Sequence Number=SeqID_13821
MEKESLDMVESSVRVIETHVDIIRSLVTDGVVDTSEPESVYTLKTTLFQIGDVCDMLEKCALSIKKYADSKRAKIIQDDEAADDLEELPSPDLLTQADILEKYFGIEYDSDQSRGC

SEQ ID NO: 57197 - protein, 486 aa, Zea mays
  Coding DNA Sequence Number=SeqID_13822
  Gene Ontology: Mol. function=carbon-sulfur lyase activity; Cellular component=vacuole
  Homolog annotation: Hit_ID=Q942G1; Match level="QueryCoverage=91%, HitCoverage=90%, E-value=1e-160, Identity=65%"; Hit description =Alliin lyase-like
  Pfam annotation: Domain name=Alliinase_C; Domain location=111-470; Score=748.9; E_value=3.5e-222; Accession=PF04864.4; Description =Allinase, C-terminal domain
  Pfam annotation: Domain name=Aminotran_1_2; Domain location=114-466; Score=-62.6; E_value=0.0004; Accession=PF00155.12; Description =Aminotransferase class I and II
  Pfam annotation: Domain name=EGF_alliinase; Domain location=52-109; Score=112.4; E_value=1.3e-30; Accession=PF04863.4; Description =Alliinase EGF-like domain
  Pfam module annotation: Pfam domain module=Alliinase_C::Aminotran_1 _2::EGF_alliinase; Domain location=111-470::114-466::52-109
MEAAEERPRRRPAGLGVLALLCSSLLLNVLFLAYYYFLSPPSQLADGGSCGLSWALRAARDAEALAATDSCSGHGQVFLDGVVGEDGRPGCECNRCFDGPHCSIRTPNCTADATSGDPLFLEPYWKRHAAASAVLVPGWHRLSYATTDGLFQSVELENHIRRLHRAVGNAVVDGKRLVFGAGSTQLINALVHALSPDANAAAASPPARVVATAPYYPPYRTQTAMFDGREYRWEGTTAAAWANASRNSSSFIEFVTSPNNPDALLRAPVLRGSAVIADHAYYWPHFTHIAAPADEDVMLFTMSKPSGHAGSRLGWALIRDEKVAKRAYEYVQSSIMGASRDTQLRMLEIVKVMLANLHGEEDIFAFGHDVMRTRWRRLSAVVSRSRRISLQRINPQYCTYFNRVREPSPAYAWVKCEREEDDDCYEALLKARIITRSGAGYDASSRYTRVSLLKSDDDFEVLVERVTDLVNAENYDDDVPRGSSSM

SEQ ID NO: 57198 - protein, 573 aa, Zea mays
  Coding DNA Sequence Number=SeqID_13823
  Homolog annotation: Hit_ID=Q6JAD6; Match level="QueryCoverage=76%, HitCoverage=70%, E-value=1e-173, Identity=84%"; Hit description =Putative uncharacterized protein
MPRTKNVSAPGGGDDEDPRRPFRQVKGKTVYLEQQESRKKRPIPTPSITQLPLLFLSRFRFQLLLSLPPDSGERDEMKFLLRVWNLVLFDLQRATPAHVRRLKYVPVESWLPAQRDPAAGDLFSTRIQESFFRAQMSAQIALRVHRLLDLPSFLLAAGADSEAHLTYLPGLQTLLTISGRYVEEWVRVFYASVWINPDHHWMRFRFEREDVTITASQIRQLFGFPESTTRLHSLCYGTSDPPRRPHGGVAPGTAHVAALFRPPFTDGSRRSPADFTTAAKYLYELIRRTLLPRMGYREATTHIQLWLLGALVSHSEFDVVDFLICEIEDTVLDGIRARRQLPYAHYLCHIFAQLVQPPRFQSTLEASRLVFGSYRPAPETPVPASASVFDSQVEDAALRQLDTQGTAADDDDDDDDDFGVPPPPPPPMPPRSHDHEAGSLWTLLLLRFWPTWRPSRPGYPRGCSRCFRTCRTGRMPFSSSYFRIGLRLGHSWLLCFSILPPVPPASAVTTTAVAVSVTASVPVAPAARPQSESVPAPASIADPGSETDSDPPPAFALLPRPDAPQPPPPASDV

SEQ ID NO: 57199 - protein, 126 aa, Zea mays
  Coding DNA Sequence Number=SeqID_13824
MTTWKAHTRGDDPGRTGDGTRSIKVTEMTEEAKKRRFGHSVRKRSLETGNLVKLKPGNSDWREIWQVGYWKCCEEFEEIHKRWKRVNTDIVREQWKEGEMDGLLTERERTSPGTRSLEHGGRRRGE

SEQ ID NO: 57200 - protein, 250 aa, Zea mays
  Coding DNA Sequence Number=SeqID_13825
MGGEAGIARGVRQLQRAWSSAASGFGATCGAGVCHGSWKRFFHRRGGRDRPRADLQLLRPSARPCLTSFGTGGGLLAAASTLRSALPLFGPPEQKSSPSPLLEQPVDRGPRGNRLSRLLGPDSRRSPWTAAPPEAGSGFAEDVIDAEGATAPFSVKTRACRIRSSCSVCFLRPPRPEEHTLAALAKLRLFSSCFERLDSVGNRDVCVSESCFSRKGRVRYPYPGGVGIPRLGRPCGLRILSLVHEALSPT

SEQ ID NO: 57201 - protein, 499 aa, Zea mays
  Coding DNA Sequence Number=SeqID_13826
  Homolog annotation: Hit_ID=A9XLD3; Match level="QueryCoverage=23%, HitCoverage=14%, E-value=7e-07, Identity=34%"; Hit description =Putative uncharacterized protein
  Pfam annotation: Domain name=MAP7; Domain location=153-310; Score= -74.6; E_value=0.029; Accession=PF05672.2; Description=MAP7 (E-MAP -115) family
MARVLRVFPYGRNIAAVVSVVMNKDHQDAAQKRRAVVRLPEARPKRVRGSAKAAVPGGSQPSLAAKPAAHGSSKLPESTKAAGAGGTKSALEGAAKVREQPSPGKRVADFGTNISVDDYLVGSGEGQLVAVSPAVATTASTAVFGVKGGAFSAGGEAADFADRVASGALTADVAAEVERLWAQHADAVREKSAAESKSRRLAEKVAALEGERTDLRRQLVEERREANQAITKAQTAQAEAKLARAEESLASQRAKEWEAQFNALQARMERTEASTRAEVERTRKQLVDSYRELGARTADFEVPDREASLRFLEWLQEELLALPTIVEGFMSFASLVTCEGAMNALSREGCSHYEGFDRSDEDFGREIFKVEDPVVKDAAGALFDRMWGPHGREAVREWADWARDQMARAEDVEDFGHLNSALPEAEVNPVLAEAEVDPEPLLETSEGSHAAPVSTVSGGGSPPATMLMAEDPPEGGDGASIEGSRGGGWVFVGGLVGVG

SEQ ID NO: 57202 - protein, 198 aa, Zea mays
  Coding DNA Sequence Number=SeqID_13827
  Gene Ontology: Mol. function=kinase activity; Cellular component =ornithine carbamoyltransferase complex; Biological process=amino acid metabolic process
  Homolog annotation: Hit_ID=Q6QP54; Match level="QueryCoverage=57%, HitCoverage=26%, E-value=2e-20, Identity=53%"; Hit description =Putative kinase
MAPLVDVVGPCPRLGEVEAPPRSRSSLSSKVGVESEPPGRTRRRPSAEASAESEPWGRAKRSSSSSGAEPESEPWGRAERSPSSSGAEPESEPWGRAKRSSLSSGAEPESEPWGRADRSSPSSGAEPESEPWGRVERSSPSSGAEPESEPWGGAVLLSDRSVERRSDCGHFGSVDWKACVRIKLCADVGYQLRFRSLE

SEQ ID NO: 57203 - protein, 102 aa, Zea mays
  Coding DNA Sequence Number=SeqID_13828
MPPWIGRSTRRRRARPPAHVDRAIPAIPDDEPYLDVIARPSPSQPYPSPDLPRRRYPRTKVGIAVDRNNTKVDQSRRCEQESFGVTAKSGTDLKMKRLFRPR

SEQ ID NO: 57204 - protein, 73 aa, Zea mays
  Coding DNA Sequence Number=SeqID_13829
MGKPVPSLLMLLLGRVTALVPTITGMGDHVSGRVRSKVCCQVQSGIRTLILIPIFRLVDYASPWIRVHRPTSV

SEQ ID NO: 57205 - protein, 112 aa, Zea mays
  Coding DNA Sequence Number=SeqID_13830
MGEKRSEKKGGSSGVGWRHKRRRGLYRWTPAPEKKGRVAAPSDACTEEEGEGSSAVGRQHRRRRGGQPSGTGTKEGEGSRRTPTPEKGMVVVGRWTSRDQELVIPYRPYASD

SEQ ID NO: 57206 - protein, 281 aa, Zea mays
  Coding DNA Sequence Number=SeqID_13831
MPHNICEEGLRSDTSCDGTSQGSDQVFITAKGFKEGNQDQGSKQVRKILKTSREVANAPGLAFVNSPVAQHKGRKRPRARWRSCGKITERPFPFYFFSRYVLDDGSARRSSGEPLHRPIGGDDRRHPSGGHQIQATPSNSPKLIAQIVNYCGLATRPTVVTVNFGRYRAAVGSEEEHGCSEYVFHDVAVTPVIDGKLEGVTAMRWRGWDTRRKAGRRLSPAFLSASTVVTQYGGRSSLTVEAYPRRRTPVLPTYPENNVDRLPHESRRQSVAGGEVAALVA

SEQ ID NO: 57207 - protein, 760 aa, Zea mays
  Coding DNA Sequence Number=SeqID_13832
  Gene Ontology: Mol. function=sequence-specific DNA binding; Cellular component=nucleus; Biological process=regulation of transcription, DNA-dependent
  Homolog annotation: Hit_ID=A7QJZ6; Match level="QueryCoverage=98%, HitCoverage=97%, E-value=0.0, Identity=57%"; Hit description =Chromosome undetermined scaffold_109, whole genome shotgun sequence
  Pfam annotation: Domain name=Homeobox; Domain location=18-99; Score =53.9; E_value=5.7e-13; Accession=PF00046.20; Description=Homeobox domain
  Pfam annotation: Domain name=START; Domain location=268-492; Score =194.8; E_value=2.1e-55; Accession=PF01852.10; Description=START domain
  Pfam module annotation: Pfam domain module=Homeobox::START; Domain location=18-99::268-492
MDFGDDVMDGGSDAQRRKKRYHRHTPRQIQQLEAYVHPAGRQACADFPLPSVLIYWLVWMFKECPHPDENQRMQLSRELGLEPRQIKFWFQNRRTQMKAQHERQDNCFLRAENDKIRCENIAMQEALRNVICPTCGGPPVADDHFDEQKLRMENARLKEEASRFAFTIALAPGPASLDGPAILPRSSFTFTSGDLDRVSSLTSKYLGRPITQLPSAQALSMSSLDLSVGGLGGPSLDLDLLSGGSSGYPPFHLLPMAVSEMERPMMAEMATRAMDELIRMAQAGEHLWVKTGGREVLNVDTYDSIFAKPDGSFRGPDVHVEGSRETGLVFMSAIGLVDMFMDSSKWTELFPAIVSKARTVDVLVNGMGGRSESLLLMYEELHVMSPVVPTREFCFLRYCRQIEHGLWAIADISVDQQQRDARFGAPPSRSCRLPSGCLIADMADGSSKVTWVEHMEIEDRVPIHLLYRDLVLSGAAFGAHRWLAALQRACERCACLATAGIMPHRDIAAAGDISHRELLAVTPEGKRSMMKLSQRMVNSFCASLSASQLHRWTTLSGPNDVGVRVMVHRSTDPGQPSGVVLSAATSIWLPVPCDRAFAFVRDEHTRSQWDVLSHGNPVQEVSRIPNGSHPGNCISLLRGLNASQNSMLILQESCTDASGSLVVYAPIDIPAANVVMSGEDPSAIPLLPSGFSILPDGRPGASSSRAGQAPSAGSLVTVAFQILVSSLPSAKLNAESVATVNSLISTTVEQIKAALNCASH

SEQ ID NO: 57208 - protein, 370 aa, Zea mays
  Coding DNA Sequence Number=SeqID_13833
  Gene Ontology: Mol. function=nutrient reservoir activity; Cellular component=ornithine carbamoyltransferase complex; Biological process= amino acid metabolic process
  Homolog annotation: Hit_ID=Q03866; Match level="QueryCoverage=13%, HitCoverage=9%, E-value=1e-18, Identity=90%"; Hit description =Vicilin-like embryo storage protein
MGVREVEMPRPSCSSRAQVGVMVAPPVDVAGPRPRLGDVEAPPRSSPSSVVEAESEPLGRARRRPLVEARAEFESWGRAKRSSSSSGAEPKSEPWVGRSGVRHLLGLSPSPSPGSGGAEFVVFRGLARVRALGRAERRPRASRERVRRWRGASGEAEILRGPLQLYADGGYQLRIRSLEGTPNYGPRHSAKELTCASSPFPLIRRLLSPFWAATPWGAAAARSAPPCTSSPSPAPPHTTCGGARAGPGTSAPGAWSSAGRRSGRSGKSGAGTRPTTRSGEGSSEDEREREQEKEEKQKDRQSGPLRVLQPFDEVSRLLRGIQDYRVVVLEANPRSFVVPSHTDAHCICYMAEVDYRKADLEMKSQLHKFF

SEQ ID NO: 57209 - protein, 322 aa, Zea mays
  Coding DNA Sequence Number=SeqID_13834
MTCGTQPPRRTGRTLERVGEDSAHDGWGRNPAAPLRRRSPKTVTSSSMAGESEPGRGLCPSLSLKDFHHQGWGGDCSVPGSLSRAASEPLPVPPSAMAAGRGSAADELAGATRGPTSNSTAFCPSLPHEFGHGRGPPGSSIRPDVIAAAVRPPGAEVFIVAAAGAGDGEPFVGLLLLRRPPPQSCGVVRTCGDSPVGCLNRFTKRESPRVKVTSESGDPWTASPSEARSDLAEGVVDAEVEKARRIAPTEELPNVKTCSVRGITYPNVSYLWQKVMSEPKHQVAHLEVSGPDPSGVVASHGLLALVLGEPYSRSVGKMASAP

SEQ ID NO: 57210 - protein, 423 aa, Zea mays
  Coding DNA Sequence Number=SeqID_13835
MEAQTHASCNRRAECFVQATAPPPAPPPRLLDCGINTVTRGDPAHDPAAPAWRDDNAPVFRSSNGSRTRNGCPANHSPRHINSAAGQAGPGKGDTPKRTLPREGTRLRASLLIRGSKAGPSEGFNSRLRARGLHTHYWSEVRRPAPRKGSTAASGYSGSAPTTDQGGNDLVMESHQREASSPRTPSPGDRVRQITRSSPETPCSAPTEGNMALSPLLLAERRRRGVCKKVEYVRDRPLALRRGSGAALEYVRDRPLALPKPLTASTYQPENLGPDRISPFEGLDHASPEPSLGQGQPTPEDLRLARGPPPAANTFPARPRPCLRQEATPTKSQGHLMQRWPDTFILTRAPQLTESKARTRAKPRKTANSAPPDPGLGLGSAPEDGELRSADPGLDLGSPTDDELRSADPDSNLPCLSNAPLAD

SEQ ID NO: 57211 - protein, 178 aa, Zea mays
  Coding DNA Sequence Number=SeqID_13836
MAPPPPPLAGERTERARMLLFHHAGKMSSIPPPAGGLSAAIVVVARRWKKYHVVAAVEGHELKSPETKHRPGPERLLETAHLELDGELFVSTQQAPTWRAKCRRFETGGVPKPTSECAVCPSPDGSSAWASAKGGEARWPEPSVREVEVPRPSCSSRAQVGIRIQVYNEGVVAHRYVV

SEQ ID NO: 57212 - protein, 274 aa, Zea mays
  Coding DNA Sequence Number=SeqID_13837
MALPVDVAGLCPRQGDVGAPPKPRLSLSSVAEAESEPWGRARRRSFGRGQGGVRALGSGEAEFRRLPGLSPSPSPGVGRGGGRSAEARAESEPWGRARRSFVVFRVLARVRALGSGGAEFAVFRVLARVRALGSGGAEFAVFQVLARVRALGSGGAEFAVFRVLARVRALGSGGAEFAIFRVLARVRALGSGGAELAVFRVLARVRALGSGGAEFAVFRVLARVRALGSGGAEFAVAPLARPDCLSDSLCRVAPQSEWRRRRCPSVRLVSGAVE

SEQ ID NO: 57213 - protein, 138 aa, Zea mays
  Coding DNA Sequence Number=SeqID_13838
  Gene Ontology: Mol. function=aspartic-type endopeptidase activity; Biological process=DNA integration
  Homolog annotation: Hit_ID=Q8S474; Match level="QueryCoverage=50%, HitCoverage=9%, E-value=9e-09, Identity=41%"; Hit description =Putative pol protein
MLPTWREADWSDKDISIAPANTGAKGSHLANKRTKYWVQTKEQGPTEGTLDWCTGLSGAPPDMSGAPGKTDFKLFTFGKFQRQLRYNSPDCPVYTGHVRCSKEERPPELASLGNSFGLLRYNSPDCPVYTGLSGVTAG

SEQ ID NO: 57214 - protein, 73 aa, Zea mays
  Coding DNA Sequence Number=SeqID_13839
QLACRLLDAWAWASKLACQKSEKRVHLARLHAACMAARPFRPLVWAKVGAPESQGRALERVGEDSARGVWGRT

SEQ ID NO: 57215 - protein, 373 aa, Zea mays
  Coding DNA Sequence Number=SeqID_13840
  Gene Ontology: Mol. function=protein binding; Cellular component =intracellular; Biological process=RNA processing
  Homolog annotation: Hit_ID=Q6ZHF3; Match level="QueryCoverage=86%, HitCoverage=39%, E-value=2e-93, Identity=72%"; Hit description =Putative uncharacterized protein OJ1611_C08.15
  Pfam annotation: Domain name=DUF1740; Domain location=121-373; Score =293.5; E_value=4.2e-85; Accession=PF08424.1; Description=Protein of unknown function (DUF1740)
  Subcellular localization annotation: CTP_CleavageSite=36; ConfidenceScore=5.32e-01
MEPSSPATTATFPAAVEEHETYPPMVSSSLFPLFPFAASTSSAPPAESQWLSNPSFSFDASSLNIPATTSSSLPSPQSHSSDEDTPLQAAPAKYELVPSSPSSDEERGSRRKRSGRRKRKREKERYDGAATSRKAGIRAWAGLETKPAKDYYVDAKGDHDNLAFGSLYRSDHEDKVASTQPQKAARLQTTERKISILEKAVELNPDSEELLLCLLKSYGKRDNTETLLTKWEQILTKHPDSSTLWKQYLLLCQGEFSRFKVSEIRKSYVYAVQALSAACTKLCRQDNKSMDSKSSSLVQLEVGLVDIFVNLCRFEWQTGHRELATGLFQAQMEFSLFAPPLYLTTSSKQRLFEHFWNSGGARIGEDGALGWSE

SEQ ID NO: 57216 - protein, 113 aa, Zea mays
  Coding DNA Sequence Number=SeqID_13841
MRMVWNALDQVIRKVLCLVLVFVMGDGGICYALIFSLRGLDEVMMTDEVISDIMILMNHTSRDTGTSTPMTCSLNGDGKKGGKYKCVVVTITRIRIIVPTQRRHNAQRLVSLS

SEQ ID NO: 57217 - protein, 22 aa, Zea mays
  Coding DNA Sequence Number=SeqID_13842
MGCSFEPCQKTGDSKAIDQLSG

SEQ ID NO: 57218 - protein, 52 aa, Zea mays
  Coding DNA Sequence Number=SeqID_13843
MSGAPATSPKPLQFDRWSSDFWARLGDRWREVAVAPQLHRTVWCTPDMSGEL

SEQ ID NO: 57219 - protein, 79 aa, Zea mays
  Coding DNA Sequence Number=SeqID_13844
MELLSKSYPTKEKTLKGMLVIWESRVSRKQASEKDFKTSREVANASGLAFVHRVSKLYLCLDKDWFPNDAIAITGIREQ

SEQ ID NO: 57220 - protein, 165 aa, Zea mays
  Coding DNA Sequence Number=SeqID_13845
  Gene Ontology: Mol. function=structural constituent of ribosome; Cellular component=ribonucleoprotein complex; Biological process =translation
  Homolog annotation: Hit_ID=Q9FUL7; Match level="QueryCoverage=77%, HitCoverage=93%, E-value=3e-63, Identity=96%"; Hit description=40S ribosomal protein S24
  Pfam annotation: Domain name=Ribosomal_S24e; Domain location=28-111; Score=150.0; E_value=6.3e-42; Accession=PF01282.10; Description =Ribosomal protein S24e
MADSKATSAVTLRTRKFMTNRLLARKQFVLEVIHPGRANVSKAELKERLAKMYEVKDPNTIFVFKFRTHFGGGKSTGFGLIYDNLESAKKFEPKYRLIRNGLATKVEKSRKQMKERKNRAKKIRGVKKLCHLQANPFCHAVVICSPLIHISFDRAAFAPVNSDCS

SEQ ID NO: 57221 - protein, 187 aa, Zea mays
  Coding DNA Sequence Number=SeqID_13846
MKIMEGRIKGALLTRRSGRVRSGRRSPRIQRSGWERGRRGWGGGSARQETGLPTAGAGNGDRAAPPRGSGARAPPPIRVILELAGRRYGAIAGQAGGVASRDLLVQCPCCPRAVRNLPPSSSSTVAREGPVFHSLCALAVVFLAPTLLALAVVFLELLSLSPRTGPCPSPDLALPCVAGSCASGPLR

SEQ ID NO: 57222 - protein, 194 aa, Zea mays
  Coding DNA Sequence Number=SeqID_13847
  Subcellular localization annotation: CTP_CleavageSite=51; ConfidenceScore=5.06e-01
MSSRSLMHRVFPPSEPPDGEHPQSFRLVVGGTQLRGSWYLSAIVRLQGFSSCSPAASPRRRSPKTVTASPWVGRSKPGCDLGPALRFKDVHHPCWGGGRAEPELYLPRGFVDQPLLQHSRERALTSPARGADFDNVGLVDGGCRQLQRVGLAGLAPGAPSRRKGGCRAVRTGGPPKTSHAARAAFVFWGCPVLG

SEQ ID NO: 57223 - protein, 210 aa, Zea mays
  Coding DNA Sequence Number=SeqID_13848
  Homolog annotation: Hit_ID=Q8H6I2; Match level="QueryCoverage=100%, HitCoverage=100%, E-value=1e-101, Identity=79%"; Hit description =Putative MURBZC
  Pfam annotation: Domain name=Zea_mays_MuDR; Domain location=10-210; Score=-38.4; E_value=0.0071; Accession=PF05928.2; Description=Zea mays MURB-like protein (MuDR)
MDSAAEHCAQKLSLAAVAARDTLKASAAASIVAGDYCATFSLGNDVVSTLDVLESAVAGENSALRSYKQATAAIDCAKETVAKYSEVNQKLAQALRYAMSQMSDTAKKLQEAASLCYTDEDVVDGFKLTQVARSMDEIAEMLEVTAIDCQVSMMDPTSMLEAGYASEDTAVWEDVFRDREIMNQPLQAETLAEHCAKWGLNYNEIWDRSV

SEQ ID NO: 57224 - protein, 169 aa, Zea mays
  Coding DNA Sequence Number=SeqID_13849
MEGGWWWCRPLQWLVTVAASTCKVRISQFFYMQVEVHVRHSSSRIIASPDNIEVMRHISIQVTVESMGHGLVRISQFFYMQVEVHVRHSSSRRIASPDNIEVMRHINIQVTVESMGHGLGCLQPRPPLVFPGPPPPLDLAATEALYGRNDTLYKASHAADVNSNTLQPA

SEQ ID NO: 57225 - protein, 242 aa, Zea mays
  Coding DNA Sequence Number=SeqID_13850
  Gene Ontology: Mol. function=transcription factor activity; Cellular component=transcription factor complex; Biological process =regulation of transcription, DNA-dependent
  Homolog annotation: Hit_ID=Q84VD5; Match level="QueryCoverage=14%, HitCoverage=10%, E-value=2e-09, Identity=85%"; Hit description=DP TF
  Subcellular localization annotation: CTP_CleavageSite=48; ConfidenceScore=5.70e-01
MASSPSTPYHGARPGSPASMAYNLYSWSTTSPDLRLRAAPMDSVVRVRLTAAKSSLGRHRKLRLARPQGSDSTSTLDDRLRLARPQGSDTASASEDGLRLAQPRARAQPRRWTTDSASPDPRAWTQPWPRKTVSASPDLGLKLNLDLGRWTRPRPRRSLRLARPRARTDHVTRGAIITLPLASSGYGEQDRCTIWLAPVRCVVKSRFEYVGLQNLIQQNEQLYGSGNTPSGGVALPFILVQT

SEQ ID NO: 57226 - protein, 427 aa, Zea mays
  Coding DNA Sequence Number=SeqID_13851
MQACPEQKKPNRHARCMQLPSGYKRSSTFARTDGPTRHATGAPVATCEQLHRHSHHYRVSSTAELVPRLKATLRMTQQCQPGASVTGQSAAGEGATVDAAKNGSAVMAVAGGQKQRSRRQPSSRHLVGQRENPLSRREDDTPVLRSSNGSRTRNGCPANHLPRRINSAAGQAGPGKGDTPKRILLREGNRPRASLLIRGSKAGPSEGFNSRLRALGLRAHYWSEVRRPAPRKGSTAASGHSGSAPTTDQGNDLVTESHQREASSPRTPSKGDRVRQITRRGSGAALANPAPTKPLTTSTYQPENLGPDRAPGLRPARMREQPDQPKRETLRPRRSQTTPPRPRVLHPAGALAHTHRNKTQPRKAGPLAKKCDKSLQASINTPFEARGLLSGTIIRGTLKAPKSQLPRARAADPGGSMSRPRTPSINE

SEQ ID NO: 57227 - protein, 269 aa, Zea mays
  Coding DNA Sequence Number=SeqID_13852
  Gene Ontology: Mol. function=kinase activity; Cellular component =ornithine carbamoyltransferase complex; Biological process=amino acid metabolic process
  Homolog annotation: Hit_ID=Q6QP54; Match level="QueryCoverage=25%, HitCoverage=24%, E-value=4e-11, Identity=55%"; Hit description =Putative kinase
MGRRETEREGGKEPEGDGRERWNPAAFVFVPRPGRGNDGASCDVVGPSPGLGEVEAPPRSRSSLSFEAEVESEPLGRARRRLSAEARAESEPWGRVKRSSSSSGAEPESEPWGRAKRSSSSSGAEPESEPWGRAKRSSSSSGAEPESEARGQAKRSSSSSGAEPESEPWGRAKRSSSSSGAEPESEPWGRAKRSSSSSGAEPESEPWGRAKRSFLWRLRPDLAAVSLTLSSGIAVKAAQAALSSCQVGQWSGEVTTVTLALSTGGRASG

SEQ ID NO: 57228 - protein, 78 aa, Zea mays
  Coding DNA Sequence Number=SeqID_13853
  Subcellular localization annotation: CTP_CleavageSite=38; ConfidenceScore=5.07e-01
MQESLAGPPSQQNPPEGLPTLTTALAPFGGLGRKNSKTQSTVARDGGFVFPKIEGSICKVGDPKGYQWFSAVGSPRDG

SEQ ID NO: 57229 - protein, 233 aa, Zea mays
  Coding DNA Sequence Number=SeqID_13854
MGDSDFCARRGRIKCAAESRWRGDDRCFGVAPDSPVYTGQSGEFLRPTSLGAPDTVRCTPDSPVNYSRVALEIPEGGEFESESPGAPDRYCSLSGGTPDSPRDRPVWMARMRSLEGQLLLEDDPTVVYLTAYLLTLDAQYDFLARHHRQMIAQVEDAEKLNRKLHVDLTTAQARVAALESREVIAVEALKQAKDEHVQKLMEAYLVTRNQRRALRIQEPASSNPVQPMRVEDP

SEQ ID NO: 57230 - protein, 404 aa, Zea mays
  Coding DNA Sequence Number=SeqID_13855
  Gene Ontology: Mol. function=hydrolase activity; Cellular component =nucleus; Biological process=metabolic process
  Homolog annotation: Hit_ID=A7PLV3; Match level="QueryCoverage=100%, HitCoverage=100%, E-value=1e-149, Identity=66%"; Hit description =Chromosome chr14 scaffold_21, whole genome shotgun sequence
  Pfam annotation: Domain name=Abhydrolase_3; Domain location=129-370; Score=257.6; E_value=2.7e-74; Accession=PF07859.4; Description =alphabeta hydrolase fold
MPSVGVKIYSVFFKLLLRHRLQSLASAGGLDNAAFGVSCRPDEATAPPNPAFSAAADGVASKDLHIDPNSSLSVRIFLPTPPPPHAHPRRASDPTPTAPAAGAPYRGYLPHAVASPRAAASARRRLPIVVQFHGGGFVTGSNTAAANDAFCRRVAKLCDAIVVAVGYRLAPESRYPAAFEDGVKVLKWITKQANLAMMTKVRGGVDTFGASTVEPWIAAHGDPARCVLLGASCGANIADYVTRKVVEDGKPFDPVKVVAQVLMYPFFIGSVPTHSEIRLANSYFYDKSTCLLAWRLFLSDKEFNLDHPAANPLAPGRGGPPLKCMPPTLTVIAEHDWMRDRAIAYSEELRKVNVDSPVLDYKDTVHEFATLDVFLKTPQAQACAEDIAIWMKKYISLRGHEFSY

SEQ ID NO: 57231 - protein, 618 aa, Zea mays
  Coding DNA Sequence Number=SeqID_13856
  Gene Ontology: Mol. function=RNA binding; Cellular component=plastid chromosome
  Homolog annotation: Hit_ID=A3A0M1; Match level="QueryCoverage=100%, HitCoverage=100%, E-value=0.0, Identity=71%"; Hit description =Putative uncharacterized protein
  Subcellular localization annotation: CTP_CleavageSite=34; ConfidenceScore=5.35e-01
MAASPAAAATFLHHHLPFPSRPKTLLRPRLHRLAASINPSSTDETPAADPPVIPSISIKNTEPEEVARRRSWVEHGWAPWEEIMTPEVAFARHSLNEGEEVPLQSPESLEAFRMLTPSYRKKVEAEPGYLERLFATRDTPEPLETTWAGRLPLRLVPPRDWPPPGWEVDPDELEFIREAHRAASERLDMEAAAAAGVTNVEKLEDAPQDLALERYKMFLKQYKEWVEANRDRLEQESYQFDQDYFPGRRKRGKDYSEDMICYGQVTTVHLYQGAFVNIGCVHEGWVPIKGNDWYWIRHHIKPGMKVYVEILAKRDPYRFRFPLEMRFVYPNIDHLIFNRFDFPPIFHRKEDTNLEQLWLWEWHNAEQMILDYEEQNPDKFKNTTYESTVDAPSIDEEKRVEYTEGYFKETLLKKKVVNISIKELDLDAARAERQSVQLIKRLKKEAEERGEEYKVRKLRRNKEMDEYDLMQWRRSFEEREALIRDICCRKALDLPIEEPGRYDVDETEVYGKDYYDPEKPMYRYDYWGEPKNTEKTKLERDVERHNQQVVGDAKKWCEMSYDDYVRKKLRLEAAEARERRRKAAEAQEDEQEYDDGMDLDLKKMTDPRAPHNRFYITK

SEQ ID NO: 57232 - protein, 373 aa, Zea mays
  Coding DNA Sequence Number=SeqID_13857
  Gene Ontology: Mol. function=electron carrier activity; Cellular component=plastoglobule; Biological process=protein amino acid phosphorylation
  Homolog annotation: Hit_ID=Q5N6W3; Match level="QueryCoverage=70%, HitCoverage=59%, E-value=1e-129, Identity=81%"; Hit description=ABC1- like
  Pfam annotation: Domain name=ABC1; Domain location=123-218; Score =81.1; E_value=3.7e-21; Accession=PF03109.7; Description=ABC1 family
MPLALAQLQDLRDRISDRLRPWSRSAQFWVRAADIYTSYKVCQLRAGFVKDEDELETMWERQHELGAEKMYSLCSELGGLFLKAAQILGKPDLAPMAWVKRLVTLCDQAPSTPFDVVRDVVEKQLGKNFDDMFEFFDVEPVGSASIAQVHRARLKLSKTDVAVKKHDLNFDLFSATKEMEKQICYEFDFVREARAMERIREFLRVTNKKPPVMVPRVIPGMVSREVLIMEFIKGTPIMNLGNEMAKRGIDPGGKIAAMAKQRAAKLSNCVWCSVVSSLIHQLDRKVGNEQDVGDWGAPLRETTSCLAPSMSHQPHKKLAFSWIPEFPNPLPGPKEGSTMKHSIAYTFVKVVGRARPLCWGQRSADPDDFWLNQ

SEQ ID NO: 57233 - protein, 212 aa, Zea mays
  Coding DNA Sequence Number=SeqID_13858
  Homolog annotation: Hit_ID=Q5Z9G5; Match level="QueryCoverage=36%, HitCoverage=31%, E-value=8e-13, Identity=50%"; Hit description =Putative uncharacterized protein P0655A07.24
MTQLLLNKEALTRCADRTGALGLLYLPVFTLNYNTSYADRRRRFPRACEEAPVSRRAPAAAALSSQRIGGRGGGARRSLSVRVGTASGGTAPRVVRGGAGGLAVLCAYPFRVPARGVLPLAYVARAQGAPLAYVARAQGAPLGDAGSAAMEAALRDGVVPFRVDGEARTRWKVAGIISVDQWTRLACQLRFFWPNGTVLPFRCISKSKFLFF

SEQ ID NO: 57234 - protein, 148 aa, Zea mays
  Coding DNA Sequence Number=SeqID_13859
  Subcellular localization annotation: CTP_CleavageSite=22; ConfidenceScore=5.36e-01
MADGVTEGGSATTTSASTRKQRASHYSGFGPTCRLVPSPEVGSRATVGTPKLGHPLLLYKGEEPTWLSLSRVAEGLCGGPSVARPRHGRLLRAHDNTRLRHVDGPKDATWPEEVVYSRIPSVGPDLQEKAPDPCTHNPDIRVRSRILK

SEQ ID NO: 57235 - protein, 724 aa, Zea mays
  Coding DNA Sequence Number=SeqID_13860
  Gene Ontology: Mol. function=carboxyl- or carbamoyltransferase activity; Cellular component=ornithine carbamoyltransferase complex; Biological process=amino acid metabolic process
  Homolog annotation: Hit_ID=Q8SA97; Match level="QueryCoverage=15%, HitCoverage=21%, E-value=6e-11, Identity=46%"; Hit description =Ornithine carbamoyltransferase
MALPVDVAGPRPRPGDVGAPPKLGSNLSSVAEAESEPLGRARRKSFGRGQGGVRALGSGEAEFVVFRGRARVRALGSGGAEFAVFRVLARVRALGSGGAEFAVFRVLARVRALGSGGAEFAVFRVLARVRALGSGGAEFAVFRVLARVRALGSGGAEFAVFRVLARVRALGSGGAEFPMAPLARPDCLSDSLFRVAPQSEWRRRRCPFVRPLYANGGYQLRIRRLEGTPNYGPRQQGNHSSGSLARLETNPPKMIGTINYAWRRAMTKATVRLPLMANEPLGYRCPQPHGCHRTTPPPAIPLPAPAAPAAVLAAAAEHSRHARKSRDSRFHVLVSSIAVAYMASPLPSMAASRARKSHDSPFHGVAPFHPWQVRAPAPQIARMEGTRLLSPLLSVGNPQIRASTPPPTLHSSFHVTRTYSRTREPTANRPRPEMAVALRFPWVARESLSGRARRRLQAREGAAPGPREREPGAAMLEARRGLAVRCQTRSTAVPFLRTEEASAAAAGARNAQAGFTFVLATSVNQLKMVKLEKCQAGYAKTFADLDPLPNHDYDTCFRRRQVMVNPDTQIILDEMSRRFAEQDAKWDRRTADQESRWEAVLSSHTAAQDARVRTLEQATGALEEWKMSIEGVVDDLRMEVGKVAKHCERTLVEKPATLAGVLAPSPTPAVRLSAGSPAVSPHGLRLDSSTRENGFGSVTTLLHSPAKELTSVADLLGQFSVRNC

SEQ ID NO: 57236 - protein, 142 aa, Zea mays
  Coding DNA Sequence Number=SeqID_13861
  Homolog annotation: Hit_ID=Q851X4; Match level="QueryCoverage=45%, HitCoverage=40%, E-value=3e-17, Identity=67%"; Hit description =Putative uncharacterized protein OSJNBa0015N08.27
MVKLEKCQAGYAKTAGEKAVSCGGGGASEIPELAVIRELNLRKRSVDVRRINPKVPKEEAVTISGRLVQILSDHGPLTIGNTWNNTKVPNQPVSQAEWQKPGSDAGVGAATTEDSAGVDEKETHKEHQKQVQRSYVNPSTSE

SEQ ID NO: 57237 - protein, 140 aa, Zea mays
  Coding DNA Sequence Number=SeqID_13862
  Homolog annotation: Hit_ID=A2ZF08; Match level="QueryCoverage=77%, HitCoverage=39%, E-value=2e-23, Identity=51%"; Hit description =Putative uncharacterized protein
MAARRSRGWARGAAAFAAVALAVGAGRRYGWDGASAVAAFREAQGALGHWAAPAYVAAHALTLALCPPYAIFFEGGAALIFGFLPGVACVFSAKVLGASLSFWIGRRRDLGTLYTHAIRIWEKKKFAQLLLRDTDLEGRQ

SEQ ID NO: 57238 - protein, 970 aa, Zea mays
  Coding DNA Sequence Number=SeqID_13863
  Gene Ontology: Mol. function=oxidoreductase activity; Cellular component=integral to membrane; Biological process=electron transport
  Homolog annotation: Hit_ID=Q2R351; Match level="QueryCoverage=99%, HitCoverage=98%, E-value=0.0, Identity=79%"; Hit description =Respiratory burst oxidase protein D, putative, expressed
  Pfam annotation: Domain name=FAD_binding_6; Domain location=618-708; Score=-22.5; E_value=0.1; Accession=PF00970.15; Description =Oxidoreductase FAD-binding domain
  Pfam annotation: Domain name=FAD_binding_8; Domain location=616-776; Score=171.1; E_value=2.9e-48; Accession=PF08022.3; Description=FAD -binding domain
  Pfam annotation: Domain name=Ferric_reduct; Domain location=416-575; Score=160.2; E_value=5.6e-45; Accession=PF01794.10; Description =Ferric reductase like transmembrane component
  Pfam annotation: Domain name=NADPH_Ox; Domain location=158-255; Score= 209.6; E_value=7.7e-60; Accession=PF08414.1; Description=Respiratory burst NADPH oxidase
  Pfam annotation: Domain name=NAD_binding_6; Domain location=782-953; Score=263.9; E_value=3.3e-76; Accession=PF08030.3; Description =Ferric reductase NAD binding domain
  Pfam annotation: Domain name=efhand; Domain location=256-284; Score =28.0; E_value=3.4e-05; Accession=PF00036.23; Description=EF hand
  Pfam module annotation: Pfam domain module=FAD_binding_6::FAD_binding_ 8::Ferric_reduct::NADPH_Ox::NAD_binding_6::efhand; Domain location =618-708::616-776::416-575::158-255::782-953::256-284
  Subcellular localization annotation: CTP_CleavageSite=57; ConfidenceScore=5.10e-01
MHNPRPGGGDIVEMSSSATAEGRVIPHSGPLSKKSGARKSARFAESVSAPLSAPPPRASANNNNNNDDDDYVEITLDVRDDSVAVHSVKPAHGGGAGAGAGAGGDDPDVTLLARTLESRRSSSYGHSVIRNASSRIKQVSQELRRIASINRRGAAGPRIDRSKSAAAHALKGLKFISKAEGAAGWEAVERRFDKLAENGLLHRSKFGQCIGMKEPEFAGELFDALSRRRNISGDSISKAELLEFWDQISDTSFDGRLQTFFDMVDKDADGRITEEEVKEIITLSASANKLSKITDQAEEYARLIMEELDPGNLGYIELYNLEMLLLQAPSQSVRIGTTNSRNLSQMLSQSLRPTAEPNPLRRWYRRAQYFLEDNWRRVWVMLLWLCICAGLFAWKFIQYRQRYVFQVMGYCVCVAKGGAETLKFNMALILLPVCRNTITWIRNRTAGVGRVVPFDDNLNFHKVVAVGIAVGAGLHIISHLTCDFPRLLHATDAEYAPLGQYFGVPRPPNYWWFVRGTEGWTGLVMLVLMAVAFTLATPWFRRGRIALPGPLRRLTGFNAFWYSHHCFVVVYALLIVHGHYLYLTHKWYKKSTWMYLAVPMVLYACERLTRALRSSVRPVRILKVAVYPGNVLSLHFSKPQGFRYKSGQYIFVNCAAVSPFQWHPFSITSAPQDDYVSVHIRTLGDWTRELKNVFSRVCRPPTEGKSGLLRAEYDRDGSAVANPSLAVGHDELGEPTTTNGGDRWPVIFPAADRNTSCDCWSCFPKVLIDGPYGAPAQDYKQYDIVLLVGLGIGATPMISIIKDIINNMRQLDGGGDLEASDASASSSSMASFRTRRAYFYWVTREQGSFEWFRGVMDEVAETDRKGVIELHNYCTSVYEEGDARSALIAMLQSLNHAKHGVDVVSGTRVKTHFARPNWRNVYKRIALNHQNQRVGVFYCGAPVLTKELRELAQDFSRKTNTKFEFHKENF

SEQ ID NO: 57239 - protein, 39 aa, Zea mays
  Coding DNA Sequence Number=SeqID_13864
MASVDADTCPSTLGCPAVAPLCSSYGAAGCRRFDPAILV

SEQ ID NO: 57240 - protein, 30 aa, Zea mays
  Coding DNA Sequence Number=SeqID_13865
MALSTQTGPKPMGCQVRPCRQIRWSLSGEP

SEQ ID NO: 57241 - protein, 446 aa, Zea mays
  Coding DNA Sequence Number=SeqID_13866
  Homolog annotation: Hit_ID=Q2R179; Match level="QueryCoverage=84%, HitCoverage=93%, E-value=1e-146, Identity=69%"; Hit description =Expressed protein
  Pfam annotation: Domain name=DUF829; Domain location=100-370; Score =27.8; E_value=6.8e-08; Accession=PF05705.5; Description=Eukaryotic protein of unknown function (DUF829)
MWGRHYWGGGRRPSWAPGGNGAGTGGVVVMFAWLSSQERHVRAYVELYAAHGWACLVCHSDFLTLFFPEKAAMLADRVIGELVKVLKITPVPVVFASFSGGPKGCTYKVLQDEYQLVRDCLCGQMYDSSPVDFVSDLGTRFLLDPSVLKMSEPPRVLSWMTKGIASGLDVLFINKFEEQRKDYWETLYSSVHFGPILILCSEDDQLATYSVVQNFGQHLLELGGDVSLIKWHSSPHVGHYKHHPEEYRAAVTELLKKASTLYASRRQLNGHAVGTSEHTDAPAPASTSKSNPHRDAASSVGRSRLIQAPADPAGQFPSIPSSMECHESSSQGPPQPELLSMPGVESSGLRCGVLGQALYGVCVPKDVEEGWDLAPPSASSDGMGRRVRAAAAPPRRGCGMAWVRGACTMNFAKNDVSVRALVAASRQVWFERASIQNLHLGFSASS

SEQ ID NO: 57242 - protein, 289 aa, Zea mays
  Coding DNA Sequence Number=SeqID_13867
  Homolog annotation: Hit_ID=A5HEH5; Match level="QueryCoverage=56%, HitCoverage=74%, E-value=5e-43, Identity=60%"; Hit description =Putative GRF-interacting factor 2
  Subcellular localization annotation: CTP_CleavageSite=49; ConfidenceScore=5.07e-01
LRLPAVPQLLFHQTPEASNSRRGKQDTPTHPLRQPAAMQQQMPMPPAPAAAAAAAPPAAGITTEQIQKVRAAPPRPAPRLPARIWTPCLVRSAGRLSSFRQETDGYFSSGGWLLRAPCLLLALSGSYQAQLQKNLLYLAAIADAQPQPPQNPAGRPQMMQPGIVPGAGHYMSQVPMFPPRTPLTPQQMQEQQQQQQFQQQQQQVQALTFPGQMVMRPGTINGMQQQQPMQADPARAAAELQQAAPIPADGRGSKQDTAGGASSEPSANESHKSATGADTEAGGDVAEKS

SEQ ID NO: 57243 - protein, 131 aa, Zea mays
  Coding DNA Sequence Number=SeqID_13868
  Gene Ontology: Mol. function=serine carboxypeptidase activity; Biological process=proteolysis
  Homolog annotation: Hit_ID=Q9XE83; Match level="QueryCoverage=87%, HitCoverage=19%, E-value=2e-16, Identity=39%"; Hit description =Serine carboxypeptidase-like protein
VGNGLTDDRTDMTGMFEYLWHHGLTSDETLVSAGGVPGDLPDPPLAGVQGGVGRGHQGARQTSTATASTRRAPCEKGTPYAYERIFEKGAAAYMNLPDVQKAMHANASGFKEYPWHYADTVSYEQGALLLP

SEQ ID NO: 57244 - protein, 104 aa, Zea mays
  Coding DNA Sequence Number=SeqID_13869
  Subcellular localization annotation: CTP_CleavageSite=29; ConfidenceScore=5.17e-01
MGSPSRNCWNTKSACSGRWCSGTSCPAPRTVTKQAQPFVVLHAPAANLGRHDDVPGVPTGLYGKAQGRAARELLAPGRAQRHRSVRVTTVQLHADEKKKKKHVF

SEQ ID NO: 57245 - protein, 113 aa, Zea mays
  Coding DNA Sequence Number=SeqID_13870
MGSDAGSQGGSESQRKSDGEQRERGRADDTRFDRRFVWSKSAETTMGMKTRRFSWRSSPCGSYHPREFWRHRVVCTVWSGGNETTRSRRCVRVSIDCRAMFRKAAGSRGCSAQ

SEQ ID NO: 57246 - protein, 152 aa, Zea mays
  Coding DNA Sequence Number=SeqID_13871
  Subcellular localization annotation: CTP_CleavageSite=71; ConfidenceScore=5.00e-01
MMMMIDDGETRSTLSSWDKQFDCFDPPNSTPDSNSAGADPDGRRTRTRNSDSLTHPRRRCTCLAKSCGGVRQAARSQGTTGHRHEIVRRGWPQPLALASVLGAALLCLGAAAAASPPTMPAAGRFAMEGMAVDQGIAHFLVLAAVFAVCLFR

SEQ ID NO: 57247 - protein, 93 aa, Zea mays
  Coding DNA Sequence Number=SeqID_13872
MSFVLLDYFESGILKTTEYTRLGRPPRSLSQLSPKDISPARGLGNSTPASVPPVDGPARLRPMKSSFRANSASVRADTATSGFGSSKSGRGFL

SEQ ID NO: 57248 - protein, 27 aa, Zea mays
  Coding DNA Sequence Number=SeqID_13873
MSEPAHDHVNDIDFDYKEYARQRFEQY

SEQ ID NO: 57249 - protein, 171 aa, Zea mays
  Coding DNA Sequence Number=SeqID_13874
  Gene Ontology: Mol. function=carboxyl- or carbamoyltransferase activity; Cellular component=ornithine carbamoyltransferase complex; Biological process=amino acid metabolic process
  Homolog annotation: Hit_ID=Q8SA97; Match level="QueryCoverage=63%, HitCoverage=20%, E-value=4e-11, Identity=41%"; Hit description =Ornithine carbamoyltransferase
MAPSVDVAGLRPRLGDVEAPPKPRSSLSSVAESESLGRARRRPSAEARAESEPWGRAKRSSSSSGAEPESEPWVGRSGVRRLLGLSPSPSPGSGGAEFAVFRDLARVRALCRAKRSFLWCLRRGLTVCQSHSVKWHCSRSGAGGAVLLSGRSVERRSDGGHFGSAGGRASG

SEQ ID NO: 57250 - protein, 113 aa, Zea mays
  Coding DNA Sequence Number=SeqID_13875
  Subcellular localization annotation: CTP_CleavageSite=54; ConfidenceScore=5.52e-01
MALFGHNVDAAVNIDAVEPQPTPTMAGTVTGSSSPAATGSGSTVRDTRSRKRLPTSRVWSDFDEVTGVDDKESTFSLAGRVLEERRRRLTTYMVEIVCKTIMCVSVIAVILCV

SEQ ID NO: 57251 - protein, 862 aa, Zea mays
  Coding DNA Sequence Number=SeqID_13876
MAGRWAKYALARCLPGDPAAFVRSPAFALDLHGLDPAAFVREAEDGAARIMGRYVPKTEGVRSWDIHGANDRLNRVFELNGLPYGGYPGEDTVDHRGKGLVAVTEEDPSQEAAPAAKKRKLGTAVGELGVSDSFAMELMGTCAALGGRMSSPELHESSARMLEVTGGRWPKNVLIPRVAGEDFFLSRMAHDLKVFPYGRNIAAIVMAVMNKDRQDAAQKRRAVIRIADPRREAKRARGSTKAAASGSSQPMPAAKPAALGSSKASASVKTAASGGTKPPPGGSAKGRELPSPERLVGHFGTDISVEDYFVGSGEGQLVVVPPSAATVLPTAVAAAKGAAQDPWAAFCASGEIPSAAAAKDVAGSMSQRLREASQQLSQQLKQAVDFADRVVSGVLTADVAAEVERLRAQHTDAVREKSAAESKNHRLAEKVAALEAEKTDLWRQLVEERREANQAIAEAQAAQAEAKVARAESSLAHQRAEELEARFNALRGRVDKAEASTRSEVERTHAQFVDSYRELGVRTADFKELVVLPTIVEGFMSFASLVTCEGAMNALSREGCRHYEVFDQSDENFEREIFKADDPVVKQSAGALFDRMWGPHGREAVRERFDRAREQMERAEYVEDFGSLAGAPPKAAEVNPVLPSDAGEGPSAVPVPTVAGEDPVSAPAPTAEGSLKVVAEPAVEDPTAAAGPSQVQGFGPAHATATDNANFVASTVVAKDVSDDSVSKFFESDDSGSSIVWTEGSSDEDLDYFAALDVAAAETSLRVMGDEDIPGASAGRRRRRAVVKRRVSELSRSDRRHHGEVEDGRLRVDGTAKRELLSSPAGVSVGEGELRNLFEGEELRIMLFNYREMGIIPKVEPL

SEQ ID NO: 57252 - protein, 190 aa, Zea mays
  Coding DNA Sequence Number=SeqID_13877
  Pfam annotation: Domain name=MAP7; Domain location=6-167; Score= -82.9; E_value=0.082; Accession=PF05672.2; Description=MAP7 (E-MAP -115) family
MAPKRASSKAVPSIDEAAKAALLAEKKGKALADNTHQEASEDEALSKRQRQEHPTPEGTSRTCSSRGQPQAPPPGFAPLEGEDAAEDGEVIGISAEEQLQLRALRIKNSNLQKQRDILEAKRQRVTAQAKVRQMIRDEEQRARELEQEIALMQSEGHHDLQHDPPLRQHAPAEDLFIPQRGPFIPHAATF

SEQ ID NO: 57253 - protein, 246 aa, Zea mays
  Coding DNA Sequence Number=SeqID_13878
MSPSPAWWSHVPLTFDARDVDLRSAPHIDAMLTQAFEQPLYGFGGKGTFPVGKIELPLSFGVAPNAQSEQVTFDIERRIRIERDPTLCGRLNEEVGHLGDVDPRAIDLAMRIAERMFLKMKEDEKNKIKEENDRWRPNDESTSSQGSSFKSTSHMCFIANGSDSESESEDEEEQESDSEDEDDLQQFFAQLSKKHQMSLLKLMKRAEEQKEMLHKQEDFLIRKIEDLEKLTKEHEKLKCSHDDLVQ

SEQ ID NO: 57254 - protein, 182 aa, Zea mays
  Coding DNA Sequence Number=SeqID_13879
MASMWGALRRSTSLASKSSCFSAGGDFGGVGSGDVEAEAGVEGFVLPGDADMRGWPRPRVPLSRPWGDIPDGEGPRQRGAGWLCCAPTADCGCPVWSLAAKALSRFGWTTEGPWAFSETRPFVDGALRIWRISRTADRALRDFWSDSSAKASVSGRYPWKLSRNMSRSPFQESMDNGGNLVY

SEQ ID NO: 57255 - protein, 180 aa, Zea mays
  Coding DNA Sequence Number=SeqID_13880
  Pfam annotation: Domain name=MAP7; Domain location=2-163; Score= -84.1; E_value=0.096; Accession=PF05672.2; Description=MAP7 (E-MAP -115) family
MAPKRANSKVAPSIDEAAKAALLAEKKGKALAYNTHQGAGEDEAHSKRQRNDQHTPEGTLRTCSSEGQPQVPPPGFAPPEGEDAAEDGEVLDVSAEEQLQLRALRLKNCNLQKQKEILEAKRQCVSAQAKVRQMIRDEEQRAQELEQEIALLQHEGQHDLQHGPPLQQRAPVGDLFVPQH

SEQ ID NO: 57256 - protein, 107 aa, Zea mays
  Coding DNA Sequence Number=SeqID_13881
  Homolog annotation: Hit_ID=Q41866; Match level="QueryCoverage=67%, HitCoverage=48%, E-value=4e-09, Identity=44%"; Hit description =Putative uncharacterized protein
MEELDPYFEMFDSIYLAGHKPTPKELDNLRMKGMNGEEGDQSENREFTISKDLGLNEVASLTIDLMAEEPGPSRARTHKSQRILEKQQRLEIIKQRIAEADSDADDF

SEQ ID NO: 57257 - protein, 154 aa, Zea mays
  Coding DNA Sequence Number=SeqID_13882
MELGLCLKADVILLLFVSVRVAKLRVRTPLGRGSRTDGNRAGGLDKRYYLKSCKGPSQLGESCGTLLGLVLTVRLGPDPGSPSVFDEGALVFGYGHSRMNLSEVWICGESRRVSGGRQAPASQTGEHGVPLGVRLVVSTRVGASGEDILQVPLR

SEQ ID NO: 57258 - protein, 2219 aa, Zea mays
  Coding DNA Sequence Number=SeqID_13883
  Gene Ontology: Mol. function=small protein activating enzyme activity; Cellular component=cytoplasm; Biological process=protein modification process
  Homolog annotation: Hit_ID=Q2RBM4; Match level="QueryCoverage=47%, HitCoverage=100%, E-value=0.0, Identity=88%"; Hit description =Ubiquitin-activating enzyme E1 2, putative, expressed
  Pfam annotation: Domain name=Bac_surface_Ag; Domain location=1883 -2218; Score=28.9; E_value=8.9e-07; Accession=PF01103.14; Description= Surface antigen
  Pfam annotation: Domain name=DUF641; Domain location=1293-1430; Score= 217.4; E_value=3.4e-62; Accession=PF04859.3; Description=Plant protein of unknown function (DUF641)
  Pfam annotation: Domain name=ThiF; Domain location=268-401; Score =20.5; E_value=2.4e-08; Accession=PF00899.12; Description=ThiF family
  Pfam annotation: Domain name=ThiF; Domain location=665-809; Score =176.2; E_value=8.4e-50; Accession=PF00899.12; Description=ThiF family
  Pfam annotation: Domain name=UBACT; Domain location=1053-1121; Score =118.9; E_value=1.5e-32; Accession=PF02134.12; Description=Repeat in ubiquitin-activating (UBA) protein
  Pfam annotation: Domain name=UBACT; Domain location=952-1013; Score =50.8; E_value=4.9e-12; Accession=PF02134.12; Description=Repeat in ubiquitin-activating (UBA) protein
  Pfam annotation: Domain name=UBA_e1_C; Domain location=1127-1249; Score=231.0; E_value=2.7e-66; Accession=PF09358.1; Description =Ubiquitin-activating enzyme e1 C-termin
  Pfam module annotation: Pfam domain module=Bac_surface_Ag::DUF641::Thi F::ThiF::UBACT::UBACT::UBA_e1_C; Domain location=1883-2218::1293 -1430::268-401::665-809::1053-1121::952-1013::1127-1249
MVREERAPRRGARKTYRAGASGRRRDPLAAAWRRHGPVPVPVTARWRRGLPACGDVGSRIKFDGVYKPDKLNLRTCARWPFAFPEGDEFTADDSPDSLVHHRTVRSCALRLPLELSHSSVVLQTLGQTRAEVERKSKVSSLSPNPPDATSLFPPHRGPIRAGTAATPHPPHDLDLTRLPLPPSASHLLAAAAVLGLLGGLLLYMLPRKRGVDAGEVQDLHNKAPRAAPAQDKDREEVAEMAGRAPEIDEDLHSRQLAVYGRETMKRLFGSNVLVSGLQGLGAEIAKNLVLAGVKSVTLHDDGKVELWDLSSNFFLSEKDIGQNRAHACVPKLQELNNAVIISTVTGDLTKEQLSNFQAVVFTDISIEKAVEYDEYCHSHQPPIAFIKSEVCGLFGSVFCDFGPEFTVLDVDGEEPHTGIVASISNDNPALVSCVDDERLEFQDGDLVVFSEVHGMTELNDGKPRKIKNARPYSFTLEEDTTSYGTYFRGGIVTQVKPPKVLKFKTLKDAIKEPGEFLMSDFSKFDRPPLLHLAFQALDKFRSELARFPIAGSDDDAQKLIDLAISINETLGDSKLEEIDKKLLQHFASGSRAVLNPMAAMFGGIVGQEVVKACSGKFHPLYQFFYFDSVESLPVEPLEPSDLKPENSRHDAQISVFGAQLQKKLEQSKIFMVGSGALGCEFLKNLALMGISCSQNGKLTVTDDDVIEKSNLSRQFLFRDWNIGQPKSTVAATAAMAINPELHVEALQNRASPETENVFNDAFWESLDAVVNALDNVTARMYIDSRCVYFQKPLLESGTLGAKCNTQMVIPHLTENYGASRDPPEKQAPMCTVHSFPHNIDHCLTWARSEFEGLLEKTPTEVNAFLSNPGGYATTARTAGDAQARDQLERVIECLETDKCETFQDCITWARLKFEDYFSNRVKQLTFTFPEDAMTSSGAPFWSAPKRFPRPLEFSSSDSSHLNFLLAASILRAETFGIPIPGWAKNPKKLAEAVDKVIVPDFHPKEGVKIETDEKATSLSSASVDDAAVIEELIAKLQAISKTLSPGFRMNPIQFEKDDDTNFHMDLIAGFANMRARNYSIPEVDKLKAKFIAGRIIPAIATSTAMATGLVCLELYKVLAGGHKVEDYRNTFANLAIPLFSMAEPVPPKTMKHQDMSWTVWDRWTVTGNMTLRELLEWLKEKGLNAYSISCGTSLLYNSMFPRHKERLDKKVVDVAREVAKVEVPSYRRHLDVVVACEDDDDNDVDIPLVSIYFRDDWANAASLRHLFAGGDDHPPGSKDSQNYDNNNQRVHPQPIDDNMNQNGDSMDTVIGRIFNNISSLKSAYIQLQEAHTPYDPDKIQEADKLVIEELTRLSELKHAYREKHPKPIAASPQDSRLLSEIQEQQNLLKTYEVMVKKFQSQIQSRDTEITHLQQQIDEAKLRKSKLEKKLKQRGLLNRESEESDEEENYFSIELTPSLFTSAVDNAYQSIHDFSKPLINMMKAAGWDLDGAASAIEPGVVYTRRAHKKFAFESYICQRMFSGFQEESFSIKDSNISVSNEAFFHQFLAVRAMDPLDVLSQNPDSVFGKFCRSKYLSLVHQKMEGSFFGNVDQRNYVMSGGHPRTPFYQAFLKLAKSIWLLHRLAHSFDPKAKVFQVKKGSEFSDIHMESVVKDIILEDVAERPKVGLMVTPGFLIGTSIIQSRVYLSEEKQSNRPRPSESSVSPLQSLLSTAAMANASDSDIPSVTHDLDEDEEFDDDDLDDEDDDGGEPLASSSEAARLEAVLRRLTADEVRIRVHQVTIRGCARTRRAAVEAAVGPDVSRAATVRDLVRAAAAAGDRLRCLGAFDTVSITLDAAPPGIPGSAVVVLIDVAEARGRAAGDFGVFANTQSRSCSLEGSVKLKNLFGYCETWDASGALELDKTAELSAGVQMPRIGAIPTPLMARISFVSDDWLKSSLKEHLMGVSVGLLSTINHNIAYNLTWRKLTDPTRMSSNSVQEELGHSLLSSIKYAYKVDRRDSSIRPARGYAFMSTSQVGGLAPGSKYSRFLRQEFDLRVALPLGVLNGALNAGVAAGVIHPLERGSAGSVSPLVERFNLGGNRALVCRLGGPSSLLGFKTRGLRAATESRTQDPNTPGNGTSPSPELNGLGGEVAVTAFADLSFDLPLKPLRELGIHGHAFVCAGNLGRLTECDLRKFPVTEFLQTFRSCAGWGVVVPTRLFRVELDHDGGKTGIQLNFSSS

SEQ ID NO: 57259 - protein, 256 aa, Zea mays
  Coding DNA Sequence Number=SeqID_13884
  Subcellular localization annotation: CTP_CleavageSite=20; ConfidenceScore=5.39e-01
MISAACVASACSGSSPVQVMMSTVAHLMLRRHITCQWSGQAARLTRIKCRGRVAQRPYVRLRPPIYVTGSRPRGSIGSPPERGVGAHAVWSGHVSAPDPRMTSIKAWVFSALESRDLLRVARTPLRGPRPVPVVWFVPVEVLNLTRRSGLFIQGPDTFPWGSGPTAATLEYIVSSSHVAAPESPTWRGQVLFTVRLEIAARAPCLHTVVRGEASRIRDGENSAPHGTGALFDNRLDRRAVCRVTLTPSTSEVDRTH

SEQ ID NO: 57260 - protein, 1690 aa, Zea mays
  Coding DNA Sequence Number=SeqID_13885
  Gene Ontology: Mol. function=protein transporter activity; Cellular component=clathrin coat of trans-Golgi network vesicle; Biological process=intracellular protein transport
  Homolog annotation: Hit_ID=Q2QYW2; Match level="QueryCoverage=97%, HitCoverage=97%, E-value=0.0, Identity=93%"; Hit description =Clathrin heavy chain, putative, expressed
  Pfam annotation: Domain name=Clathrin; Domain location=1125-1266; Score=140.8; E_value=3.9e-39; Accession=PF00637.11; Description =Region in Clathrin and VPS
  Pfam annotation: Domain name=Clathrin; Domain location=1271-1417; Score=116.2; E_value=9.5e-32; Accession=PF00637.11; Description =Region in Clathrin and VPS
  Pfam annotation: Domain name=Clathrin; Domain location=1420-1579; Score=84.2; E_value=4.2e-22; Accession=PF00637.11; Description =Region in Clathrin and VPS
  Pfam annotation: Domain name=Clathrin; Domain location=534-676; Score= 65.8; E_value=1.5e-16; Accession=PF00637.11; Description=Region in Clathrin and VPS
  Pfam annotation: Domain name=Clathrin; Domain location=683-825; Score= 106.0; E_value=1.2e-28; Accession=PF00637.11; Description=Region in Clathrin and VPS
  Pfam annotation: Domain name=Clathrin; Domain location=830-969; Score= 126.0; E_value=1.1e-34; Accession=PF00637.11; Description=Region in Clathrin and VPS
  Pfam annotation: Domain name=Clathrin; Domain location=976-1121; Score=124.8; E_value=2.4e-34; Accession=PF00637.11; Description =Region in Clathrin and VPS
  Pfam annotation: Domain name=Clathrin-link; Domain location=327-350; Score=31.3; E_value=3.4e-06; Accession=PF09268.1; Description =Clathrin, heavy-chain linker
  Pfam annotation: Domain name=Clathrin_propel; Domain location=108 -139; Score=22.4; E_value=0.0017; Accession=PF01394.11; Description =Clathrin propeller repeat
  Pfam annotation: Domain name=Clathrin_propel; Domain location=191 -231; Score=24.5; E_value=0.00039; Accession=PF01394.11; Description =Clathrin propeller repeat
  Pfam annotation: Domain name=Clathrin_propel; Domain location=20-56; Score=21.0; E_value=0.0044; Accession=PF01394.11; Description =Clathrin propeller repeat
  Pfam annotation: Domain name=Clathrin_propel; Domain location=249 -284; Score=19.1; E_value=0.017; Accession=PF01394.11; Description =Clathrin propeller repeat
  Pfam annotation: Domain name=Clathrin_propel; Domain location=292 -326; Score=24.6; E_value=0.00036; Accession=PF01394.11; Description =Clathrin propeller repeat
  Pfam annotation: Domain name=Clathrin_propel; Domain location=60-100; Score=22.2; E_value=0.0019; Accession=PF01394.11; Description =Clathrin propeller repeat
  Pfam module annotation: Pfam domain module=Clathrin::Clathrin::Clathri n::Clathrin::Clathrin::Clathrin::Clathrin::Clathrin-link::Clathrin _propel::Clathrin_propel::Clathrin_propel::Clathrin_propel::Clathrin _propel::...
  Pfam module annotation: Pfam domain module=Clathrin_propel; Domain location=1125-1266::1271-1417::1420-1579::534-676::683-825::830 -969::976-1121::327-350::108-139::191-231::20-56::249-284::292 -326::60-100
MAAANAPIAMREALTLTSLGIAPQFVTFTHVTMESEKYICVRETSPQNSVVIIDMAMPMQPLRRPITADSALMNPDARILALKAQIPGTTQDHLQIFNIEAKTKIKSHQMPEQVVFWKWITPKLLGLVTQTSVYHWSIEGDSEPTKMFDRTANLANNQIINYRCDPAEKWLVLIGIAPGAPERSQALEAHAASFATFKVVGNENPSTLICFASKTTNAGQITSKLHVIELGAQPGKPGFSKKQADLFFPPDFQDDFPVAMQVSQKYGLIYVITKLGLLFVYDLETAAAVYRNRISPDPIFLTAESSSTGGFYAINRRGQVLHATVNDATVVPFVSGQLNNLELAVNLAKRANLPGAENLVVQRFQELFAQTKYKEAAELAAESPQGLLRTPETVAKFQSVPVQAGQTPPLLQYFGTLLTRGKLNAFESLELSRLVVNQNKKNLLENWLAEDKLECSEELGDLVKTVDNDLALKIYIKARATPKVVAAFAERREFDKILIYSKQVGYTPDYLFLLQTILRTDPQGAVNFALMMSQMEGGCPVDYNTITDLFLQRNMIREATAFLLDVLKPNLPDHAFLQTKVLEINLVTYPNVADAILANGMFSHYDRPRIAQLCEKAGLYLRALQHYSELPDIKRVIVNTHAIEPQALVEFFGTLSREWALECMKDLLLVNLRGNLQIVVQAAKEYSEQLGVDACIKLFEQFKSYEGLYFFLGSYLSSSEDPDIHFKYIEAAARTGQIKEVERVTRESNFYDAEKTKNFLMEAKLPDARPLINVCDRFGFVPDLTHYLYTNNMLRYIEGYVQKVNPGNAPLVVGQLLDDECPEDFIKGLILSVRSLLPVEPLVDECEKRNRLRLLTQFLEHLVSEGSQDVHVHNALGKIIIDSNNNPEHFLTTNPFYDSRVVGKYCEKRDPTLAVVAYRRGQCDDELINVTNKNSLFKLQARYVVERMDGDLWDKVLQPENEYRRQLIDQVVSTALPESKSPEQVSAAVKAFMTADLPHELIELLEKIVLQNSAFSGNFNLQNLLILTAIKADPSRVMDYVNRLDNFDGPAVGEVAVEAQLYEEAFAIFKKFNLNVQAVDVLLDNIRSIDRAEEFAFRVEEDAVWSQVAKAQLREGLVSEAIESFIRADDAAHFLDVIRAAEEANVYNDLVKYLLMVRQKAREPKVDGELIFAYAKIDRLSDIEEFILMPNVANLQNVGDRLYDEELYEAAKIIYAFISNWAKLAVTLVKLKQYQGAVDAARKANSAKTWKEVCFACVDAEEFRLAQICGLNIIVQVDDLEEVSEYYQNRGCFSELIALMESGLGLERAHMGIFTELGVLYARYRSEKLMEHIKLFSTRLNIPKLIRACDEQQHWKELTYLYIQYDEFDNAATTIMNHSPDAWDHMQFKDVCVKVAIVELYYKAVHFYLQEHPDLINDMLNVLALRLDHTIVVDIMRKAGQLHLVKPYMVAVQSNNVSAVNEALNELYVEEEDYERLRESVDMHDNFDQIGLAQKLEKHELLEMRRIAAYIYKKAGRWKQSIALSKKDNMYKDCMETCSQSGDRELSEDLLVYFIEQGKKECFASCLFICYDLIRPDVALELAWMNNMVDFAFPYLLQFIREYTSKVDDLVKDKIESQKEERAKEKEEKDLVAQQNMYAQLLPLALPAPPMPGMGGPPPPMGGMGMPPMGGMGMPPMGPGPMPAFGMGGY

SEQ ID NO: 57261 - protein, 433 aa, Zea mays
  Coding DNA Sequence Number=SeqID_13886
MAVSMRAPLRRGPRPRPPTGGNSEAIKAKELEARRQVALMVSPAEATTSALGSLTSGGDHLSTDDSGHLYTGGLPATAAASAHAKRSSLPSSYGSEDKTIQERGRHPHCVRRLPRPDQAAGDSVGGGTEAIQAKEPDTRQMTVPAAGRPHVAEVRLLRKATGLHDEKPWSRTMAEERQPEREMITYSPPPPSRCSHNPREVALLQQQQEEDKIGSTTAQEMKSASSPARSRRRTAAQGACNRPTVMRPFIFVKTSGREGELPRRKRTPDPRLCAPSASLRPVVQHGGLDPHVMQPAHRLLSVKKPHRRSRQYHISSGPSRKTEKISFQNQCSDSRHPAHGPIVTLSTKVMGQSTAGTGMAVGVTIGGPVVIASTSAQEQQANHQSDFGPTCRLVSSPEAGSGATVDPDSQEGMSGPSDGSQVPPRKVRTTTRS

SEQ ID NO: 57262 - protein, 575 aa, Zea mays
  Coding DNA Sequence Number=SeqID_13887
MATGEAVELGGCRNNSLAADNAPGVALDGVRDVCAVVCCCAACTAAVPDTGQLGTSGEASRIRDGEHNAPIRDGEHNAPHDTGALFDNRLDMRAVYRAARPFRNKCRNRTALEALRQAPLVGLCHGPQATRQQRVSASTGSAGEGLDTCQHRTPTHARVPPVPGPCCGPDLSRRDLGPSEGPDMPSWESGSVIEDPGCAYRGPVFLRGGPEPMMHPGDASWAWAPVPETGLSVWTEVKRRTTAGGGVLLMRQFAFSAHGGRHPRSMTRGPGPHVRGWAAAFGGDEEVHYRRRWRAPPAAVRLLRTRRPTPKEYDSWAWAPVPTPKEHDSWARAPAPEAGSPWRASGEIFCDISGRQWGNLSLKRDSPERGSHSRHSQRPFALEFSALFCRHDLARPSRVLPVRGGTRLGAQPARMGCADVRRKDPCRHLSSRRPCRRGVRAFRLQPPERVGAADLVFLCAAAGGAQPSTSALYALFHPSGGHHRLPLQDVHGGDTSSRFFLQHSKERMFTSLVKVGSELSYGSIFHASISLALMASVPPPMVTAGLAAEDAARGVVQDVAKMAAARFQRDPTDVE

SEQ ID NO: 57263 - protein, 267 aa, Zea mays
  Coding DNA Sequence Number=SeqID_13888
  Gene Ontology: Mol. function=protein binding; Cellular component =protein complex; Biological process=isoprenoid biosynthetic process
  Homolog annotation: Hit_ID=A3BVI6; Match level="QueryCoverage=26%, HitCoverage=14%, E-value=1e-27, Identity=87%"; Hit description =Putative uncharacterized protein
  Subcellular localization annotation: CTP_CleavageSite=60; ConfidenceScore=5.28e-01
MVGRGGGIQSAASGEDLVWPLSRLASMCPGSRSSPTLCPGSRSSPTLSIEGDPVYRKQTVVGRGGGIRSMTRTPVSVRGYGDLRMKGQINGAQGDSGADQLNTTIDDSEEVLSLESTAGLESLCIYKLREHIGGSSFHFVSEFKQEAFIENNNCGSFNTSNACPCFVALQRLWNCEFYRYLFYLGKIRTIQLEYTDAKESLLQVARKAPTTAHGFRIQCNKWVIIERLLLGEIPERTVFMQKGINAFNHIMIKYDLYGMSFSIVSNL

SEQ ID NO: 57264 - protein, 104 aa, Zea mays
  Coding DNA Sequence Number=SeqID_13889
  Subcellular localization annotation: CTP_CleavageSite=41; ConfidenceScore=5.09e-01
MERVGEDRDSGHKEADLPRGQTGSSPLTVFRMSPPLPTTIRGKSAGVQRRRSPSIESVGEDREPRQFGARRRGLRETEWGEERQAGAWRASPEFDVDAHSHHIE

SEQ ID NO: 57265 - protein, 212 aa, Zea mays
  Coding DNA Sequence Number=SeqID_13890
MATENHSESYPSGPMCHCDHSCDRSPDRDRDPPRANRVLKSSKGWWGRSAVKKNPPGVRGGSLRHAVEHRGRSGGRSGREAKLLEKETALSKLAESSLKVQNLSLVVAEELSLKGTLDLVSSIVRHSNGVLKFGREGAMDPRRHHLILQEPIVRRVSDPGEDVVGEGIAGEGLQDLVTPSRVLSGVRRENVGDCFPYASEGRHLSMKRGMKR

SEQ ID NO: 57266 - protein, 32 aa, Zea mays
  Coding DNA Sequence Number=SeqID_13891
MAVYGTRTTPWLMGNMTCGYRVQPLQSVKLVY

SEQ ID NO: 57267 - protein, 241 aa, Zea mays
  Coding DNA Sequence Number=SeqID_13892
  Subcellular localization annotation: CTP_CleavageSite=33; ConfidenceScore=5.46e-01
MVGRPPPPPSSAAAGAPFPLLPLSYRATLAMPLAAMYGPARATPAVGASLGHVFIAVAAPSPPGTPPSAHATAGSERVNLPSRLRLCRRTFLARHTSSACATIGSGHASLPSPHPTRVGRPSIRRICADLIRPPGGRPWPRRVSAGPCCFPACRHIPLSRLPFQRALPTGCHPASLPAVGAGFPHVLLGMTVRAHVRDCPPPMTVYSQLSAITSSLRAPSDDAAAILTATRAAIMAACQRA

SEQ ID NO: 57268 - protein, 88 aa, Zea mays
  Coding DNA Sequence Number=SeqID_13893
MLGLLQQLGCPEVVQEASLAEVQGKAASQTPPPTEARGKSPTAPAPAPGVGTPAPRASDDAVSLTGWTDLTPCDAVDAPPGEKAKKES

SEQ ID NO: 57269 - protein, 105 aa, Zea mays
  Coding DNA Sequence Number=SeqID_13894
MQAACNRAKWARFFDSQRAQPGGPGPRVMQPGLGKGDTLKRILPREGTRLRASLLIRGSKDGPPKGSTAASDRVGPTPTTGQRFEGRPLEGFYGRLRLLGLHAHY

SEQ ID NO: 57270 - protein, 318 aa, Zea mays
  Coding DNA Sequence Number=SeqID_13895
  Gene Ontology: Mol. function=oxidoreductase activity, acting on single donors with incorporation of molecular oxygen, incorporation of two atoms of oxygen; Cellular component=chloroplast; Biological process=abscisic ...
  Gene Ontology: Biological process=acid biosynthetic process
  Homolog annotation: Hit_ID=Q5MBR3; Match level="QueryCoverage=100%, HitCoverage=56%, E-value=1e-145, Identity=76%"; Hit description=9 -cis-epoxycarotenoid dioxygenase 5
  Pfam annotation: Domain name=RPE65; Domain location=1-311; Score =326.9; E_value=3.7e-95; Accession=PF03055.6; Description=Retinal pigment epithelial membrane protein
MSEDDLPYQVRVTADGDLRTVGRYDFEGQLGCASMIAHPKLDPASGDLFALSYDVIRRPYLRYFYFRPDGTKSDDVEIPLEQPTMIHDFAITERFVVVPDHQVVFKLGEMLRGGSPVVLDQGKTSRFGVLPKYARDASEMVWVDVPDCFCFHLWNAWEEPGTGESVLTEIRLDTRTGASTRRAVLPPSAQVNLEVGMVNRNMVGRRTRYAYLAVAEPWPKVSGFAKVDLDTGDLVRFDYGDGRFGGEPCFVPTEGAPARGEDDGYILSLVRDERAGTSELLVVNAADMRLEATVQLPSRVPYGFHGTFIGERELEAQA

SEQ ID NO: 57271 - protein, 34 aa, Zea mays
  Coding DNA Sequence Number=SeqID_13896
MGDTLLGKSVLDGPVMLGDDEPVLLTHLFCATSL

SEQ ID NO: 57272 - protein, 304 aa, Zea mays
  Coding DNA Sequence Number=SeqID_13897
  Homolog annotation: Hit_ID=A3ACY9; Match level="QueryCoverage=48%, HitCoverage=13%, E-value=8e-22, Identity=45%"; Hit description =Putative uncharacterized protein
MEAEVKTIVPDDVLGKAEARRQHDTAEITGRLHTIDGHMQMGHASDYHELALTVACRSAPLGSASTISDEWVPVRQVRSVSLAHVLLTGSLETRENRLPTATAATSPFCMPSLPSSPSFRVCRRHCPIRGRCHQQQPWRCCPRPRLTQVHALLVSLLSFLPDHPLCDHLVTVVFAFASSLTVPISRDHEDLHLAASYTCSSSPPTAPTTCPTTPRVLACDACAPSMPRYQVSLLRSSGTSTRSPARQSYLLLLASATRHAVRLGRLASSASILAVAGLPIPFIIPSHLLLSPAALGATIEMSGT

SEQ ID NO: 57273 - protein, 107 aa, Zea mays
  Coding DNA Sequence Number=SeqID_13898
MRIIKQESYKNVVSAEDDSMGLRMHQYYQEDAHVEPFGRPCFFTPSGGGDEVTTALTLVRRTQTPPSSRSKNFDASGAGFRRRTDLGEVRRRQSSSVGAEKVTKARR

SEQ ID NO: 57274 - protein, 116 aa, Zea mays
  Coding DNA Sequence Number=SeqID_13899
MLLESSASSSNPPTRRRDQHTKVEGRGGRSTFGGGRAWDGRHAEGGSGGGVGGGSEGASCLHGAATGTPRWRVGGRRSTLDLCLFHLGGGVRSGANITGALRGGGYRGGGGEASSE

SEQ ID NO: 57275 - protein, 124 aa, Zea mays
  Coding DNA Sequence Number=SeqID_13900
  Subcellular localization annotation: CTP_CleavageSite=13; ConfidenceScore=5.18e-01
MASMWGALRRSTSRASKWSLFCRFVSKSTLDPPSDHVGVGEVRFVPPGGVGMRGEVDAERGRGFFAVEQAVKSARLLRPSSAPTTSSVATALGGILLAARGLTSRVLVGDVVHLLLIAAVPTGV

SEQ ID NO: 57276 - protein, 165 aa, Zea mays
  Coding DNA Sequence Number=SeqID_13901
MTLIIKSFRQILKQRRGKYYKPRFKKGTKGGTRRSFRIRWCSGIGEGIERRVASLPSPQHLPSERPVRLSHLVSKMSLDGGDAALARSGSPGVFDVTVDGHGTVGLRTARRRQRYVAMPSSSSSAAATPTAGASSEDTLSNMAAKELHPGDTVEFGVSWMSSVRV

SEQ ID NO: 57277 - protein, 548 aa, Zea mays
  Coding DNA Sequence Number=SeqID_13902
MPSRGGMLVRSPAFALDLHGRDPAAFVREAEDGAARIMGRYVPKTEGLRSWDIRGSNDRLNRVFELNRLPYGGYPGEDTADRRGKKPMGGTEEGPSPEAAPATKKRKLGTIVGGKGVSDNFAVELMGTCAAPGGRMSLPELRESSARMLENIAAVVSTVMNKDRQDAAQKRRAVIRLPDIRHEAKRARGSVMAAAPGGSQPAPAAKPVVPGSSKVPESAKTVVAGGTKPTPGEAAKVRELPSPGKRVADFGTNISVEDYFVGSGEGQLVVVPPAVATTVSTAVVGVKGGAFCASSEIPSAAAVKDVAGSMSHRLREASQQLSQQLSEAADFADRVVSGALTADVAVEVERLRAQHVDAVREKSAAESKNRRLAEKVAALEAEKTDLRRQLVEERREANQAIAEAQATQAEAKVARAEGSLASQRAEEWEVRFNALRGRVDKDEASTRSEVERTLAQLVDSYRELGAWTADLEVPDREAGLLFLKWLQEELLVLPTIVEGFMSFASLVTCEGAMNALSREGCRHYEVFDRSDESFEREIFKAEDPVVKQ

SEQ ID NO: 57278 - protein, 57 aa, Zea mays; identical to SEQ ID NO: 44116
  Coding DNA Sequence Number=SeqID_13903

SEQ ID NO: 57279 - protein, 120 aa, Zea mays
  Coding DNA Sequence Number=SeqID_13904
MAVTITMRDHRRRYTKSGDLRQKKKCLRKKVVAETKLTDEAKLFEEKKAVDPYIAGFVKSMAKTNTEKILKRYWKVYLKIRVTAIAMMWKVGTKILRIGPGGQVIQSSKNRPSNKVILRT

SEQ ID NO: 57280 - protein, 383 aa, Zea mays
  Coding DNA Sequence Number=SeqID_13905
MSTSRIACGLRIFPYGQNIAAVVSAVMNKDRQDAAQKRQAVTRLPDPRREAKRARGSAKAAAPGCSQPAPAVKLAAPGSSKVSESAKAVVAGGTKPAPGEAAKARELPSPGKRVVDFGTNISVDDYFVGSGEGQLVVVPPAVTTTASTAVAGVKGGAFCVSGEIPSAAAVKDVAGSMSRRLREASQQLSQQLSQQLSEAADFADRVASGPLTADVAAEVERLRAQHADAVREKSAAESKNRRLAEKVAALEAEKTDLRCQLVEERREANQAIAEEQAAQAEAKVARAEGSLASQRAEEWEVRFNALCGHVDKAEASARSICSNSTFTQQKPHIPTRNKPQKNNNLHLLSRPVGSLPDSLPTMRPPTSYQKVPPLIASLQGLRP

SEQ ID NO: 57281 - protein, 326 aa, Zea mays
  Coding DNA Sequence Number=SeqID_13906
MEVGCQTSFCQNEDGFPKLLRACTVCLGIRSQPENDGREFVEHGTEKCVVTVYIGSSLHHVEWSVTAAGRRFKDTCQVVARKALRALCQIYEEEVADTPLRFFPPFQRNRPVWMARMRALEGQQLLEDDPTVVFLTAYLLTLDAQYDFLARHHRQMIARAEDAEKRNPLKQAKDEHVQKLMEAYLVTHNQRRALRIQESASSNPVQPMRTEDPQIREGHPVSIRGEKKSWELPEGAIVLEGIPVFPQAMNKQEHPESSQDPPLELFEPLTMKKILAPSREIKEEATSTPPALPPSEELKGKCALGPFLSILVIECQHKYSNVNLCP

SEQ ID NO: 57282 - protein, 105 aa, Zea mays
  Coding DNA Sequence Number=SeqID_13907
MAQKVTQSTCSGGFTNSGERDYFVPVGLVLGSSSGKLHGLLGKLSEGLDRAEVGRKGLATVIALGRLWRVAGRSPELRASLGELGVWPGWALINRKIPGLRCKYS

SEQ ID NO: 57283 - protein, 119 aa, Zea mays
  Coding DNA Sequence Number=SeqID_13908
MVQGFGPAHATATDNANVVAASTVVAENASDDSESSDEDLDYFAALDVAAAEASPRVMDAEVLPGPSAGHRRRRAVAKRRVSEVESGRLRVDGAGKRELLSSPVGASVGEGELRNLFEG

SEQ ID NO: 57284 - protein, 52 aa, Zea mays
  Coding DNA Sequence Number=SeqID_13909
MGKHVPSLLMLLLSRVTALVPTITGMGDHVSGRVRGKVCCQVQSGFSNHYAY

SEQ ID NO: 57285 - protein, 293 aa, Zea mays
  Coding DNA Sequence Number=SeqID_13910
  Gene Ontology: Mol. function=catalytic activity
  Homolog annotation: Hit_ID=A3B342; Match level="QueryCoverage=29%, HitCoverage=26%, E-value=6e-11, Identity=45%"; Hit description =Putative uncharacterized protein
MSRAFDNYYIKGCGIISTPEVTQRRTGSNDQFVILATVGVWDVLPNDKTMQIVAYIEVCMNSVLYSLMRTPVSHWGGQYGGVRVDEDGKVKHREEEHMCHDGGRDDGLEHKAMQHEEVFKATSKPTSTTSFAVALCQRPPSGEEDHPTVYVVRAVDPTVGRLVVKLGSSHRIKKSNMGTPLPKSLVYASFLLPDVQHQRLCPKSPAPAVVPQISSTSGCPRSAKLQHRQLRPISLAPATAHLRPQLSCSIQRRIRSSACFATHLLQSRYRLRPSACLADRLLQSRYQRLLQHH

SEQ ID NO: 57286 - protein, 125 aa, Zea mays
  Coding DNA Sequence Number=SeqID_13911
MENSNITKSNTLADKVKVNLNVLGTLVLDWIRRYVDCADVVAIHQGGLGQGECNSVRSWRIQAASATALATARYSASTLKLETVFCRLEDQETRLSPRKTAYPDVGLRVSEQPAQSASEQTTSSN

SEQ ID NO: 57287 - protein, 96 aa, Zea mays
  Coding DNA Sequence Number=SeqID_13912
  Gene Ontology: Mol. function=structural constituent of ribosome; Cellular component=ribonucleoprotein complex; Biological process =translation
  Homolog annotation: Hit_ID=Q96S84; Match level="QueryCoverage=41%, HitCoverage=19%, E-value=6e-11, Identity=87%"; Hit description =Ribosomal protein L15
  Pfam annotation: Domain name=Ribosomal_L15e; Domain location=13-96; Score=-60.4; E_value=0.0012; Accession=PF00827.8; Description =Ribosomal L15
MARRGEGRLTVEGAHRGRKEWRAFSSSLLCSNGVEGYVVYLVRVRRGGRKRPLPKCIVYGKPKHQGITQLKFQRYKRYVAEERAIRKLGGLRVLMS

SEQ ID NO: 57288 - protein, 93 aa, Zea mays
  Coding DNA Sequence Number=SeqID_13913
MTCGHDTIQQVDMLPQLQERLVVAIPSLHAKKDIQVKCTSGMGMVKTSQMLTILATYPVKDNQNNHGSSWRLQPAVRGSIILLLWPFFSSSPL

SEQ ID NO: 57289 - protein, 157 aa, Zea mays
  Coding DNA Sequence Number=SeqID_13914
MQIKEQGNKTLKVVFFLCDWFDSNNGIRQSQYGIIEEEEEVQRHEEDVAATDDGVQDHEEEVAGIDAGVQDHEEVQEDDETIKALAFRHRGTRKGQFVLPLLVSAQSEAWRHYRVEPEAQEHADRVLEKNAKNVCKDAFSNARLQVVNAYMKRRGHS

SEQ ID NO: 57290 - protein, 354 aa, Zea mays
  Coding DNA Sequence Number=SeqID_13915
  Gene Ontology: Cellular component=peroxisome
  Homolog annotation: Hit_ID=A6N172; Match level="QueryCoverage=55%, HitCoverage=100%, E-value=1e-42, Identity=53%"; Hit description =Peroxin pex14
LKSWIRNVVAEGNGTEGNQLKPRIDDETADAVKASASAVSAIAKTNQQLLASKDEEKKILVTLTQALDSQAKELKSLTDSIGHTREPINITRDDRFSQYRPLEDHAPTVIRNGAINSSWRASQQTNMYGVSNGDFGSVRSSFAPAPAEPTAGSFSRSYGEPMSTAQRSDRSSGSKPWEMHSYSQQRPGYGSNSQLSDDGSYSDAQDSYAPSYHQNGKAPDFQADEPRPLTYNTGVEERPPPQRRWVPPQPPGVAMPEAAAAIRQPKALPKQPSSDASEAAGEMQVNGSSASDAVTEVPVNGATASDAGRRSAKNENESIQVFSRGYFLRLPGMRMNGGVKGGIPPAKEHYPDRG

SEQ ID NO: 57291 - protein, 112 aa, Zea mays
  Coding DNA Sequence Number=SeqID_13916
MGETLSPSRSHLPRTVVSASPEPVSSKEDNPKAELSRSPQGTGAFNVHTYPTQCCRWARVCDRTLALALSRNWVGISQQQVQDPCSRPYRLLGLGYASSPYAANSGTPSIPP

SEQ ID NO: 57292 - protein, 71 aa, Zea mays
  Coding DNA Sequence Number=SeqID_13917
  Homolog annotation: Hit_ID=Q8S474; Match level="QueryCoverage=43%, HitCoverage=3%, E-value=5e-07, Identity=77%"; Hit description =Putative pol protein
MRIKLKIMKMKIKKSHLKRRTTIKGEMPIIKTRKMMRPYRVEDALRDSDWVLAMQEELNDFTRNEVLKGSQ

SEQ ID NO: 57293 - protein, 626 aa, Zea mays
  Coding DNA Sequence Number=SeqID_13918
  Gene Ontology: Mol. function=glutamate-5-semialdehyde dehydrogenase activity; Cellular component=cytoplasm; Biological process=amino acid biosynthetic process
  Homolog annotation: Hit_ID=O04226; Match level="QueryCoverage=99%, HitCoverage=80%, E-value=0.0, Identity=76%"; Hit description=Delta-1- pyrroline-5-carboxylate synthetase (P5CS) [Includes: Glutamate 5 -kinase (EC ...
  Homolog annotation: Hit description=2.7.2.11) (Gamma-glutamyl kinase) (GK); Gamma-glutamyl phosphate reductase (GPR) (EC 1.2.1.41) (Glutamate-5-semialdehyde dehydrogenase) (Glutamyl-gamma -semialdehyde dehydrogenase)]
  Pfam annotation: Domain name=AA_kinase; Domain location=15-261; Score= 192.5; E_value=1e-54; Accession=PF00696.19; Description=Amino acid kinase family
MATADRTRTFMKDVKRVIIKVGTAVVTRGDDGRLAVGRLGCLCEQVKELNVLGYEVILVTSGAVGVGKQRLKYRKLVNSSFADLQKPQMELDGKACAAVGQSGLMALYDMLFTQLDVSSSQLLVTDSDFENPNFRERLCETVESLLDLKVVPIFNENDAISTRKAPYEDSSGIFWDNDSLAGLLAIELKADLLVLLSDVDGLYSGPPSEPGSKIIHTYIKDKHYSGITFGDKSRVGRGGMTAKVKAAFVASNSGTPVVITSGFASQSIVRVLQGEKIGTLFHKDASLWEPSKDVSAREMAVAARECSRRLQNLSSDERKKILLDIADALEQNEDLIRTENEADVSAAQDAGYQKSLVDRLTLKPEKIASLAKSIRTLANMEDPINQILKRTEVTAYKLLTKEKLTYFIPKTNVTSARVLFQVAEDLVLEKTSCPLGVLLIVFESRPDALVQIASLAVRSGNGLLLKGGKEAMRSNTVLHKVITGAIPDNVGQKLIGLVTSRDEIADLLKLDDVIDLVIPRGSNKLVSQIKASTKIPVLGHADGICHVYIDKSADMNMAKRIVMDAKTDYPAACNAMVVVLEQPDCLEDDSAMLVKHGRETLLVHKDLIKAPGLDDILLSLKTEDVE

SEQ ID NO: 57294 - protein, 188 aa, Zea mays
  Coding DNA Sequence Number=SeqID_13919
  Gene Ontology: Mol. function=RNA binding
  Homolog annotation: Hit_ID=O82762; Match level="QueryCoverage=31%, HitCoverage=9%, E-value=3e-14, Identity=67%"; Hit description =Putative uncharacterized protein At2g25970
  Pfam annotation: Domain name=KH_1; Domain location=15-79; Score=45.8; E_value=1.6e-10; Accession=PF00013.20; Description=KH domain
MESASRSVMFVFSLTGTVVNLLLVGVIIGKAGETIRYIQLQSGAKIQVTRDHEAEPGALTRQVELSGKLERISKAEQLIKEVLAEADAGSSGAGSGGRKYNATQPDFMGELISCLNERSGYSEQQDEIPNDNALSFQIDSYHGSGMVSLADLYEAEWVILLQEEEGVILLEVEEDEVVKTSSQLQVPC

SEQ ID NO: 57295 - protein, 62 aa, Zea mays
  Coding DNA Sequence Number=SeqID_13920
MAHPTFRCTPDSPVAPATSSLPLDLTVGASDLWAPPGCPVHTGQVYRALPRGGGGGGAAPRL

SEQ ID NO: 57296 - protein, 422 aa, Zea mays
  Coding DNA Sequence Number=SeqID_13921
  Homolog annotation: Hit_ID=Q6J9V9; Match level="QueryCoverage=15%, HitCoverage=33%, E-value=6e-11, Identity=49%"; Hit description =Putative uncharacterized protein
  Subcellular localization annotation: CTP_CleavageSite=28; ConfidenceScore=5.04e-01
MQAACDRAKWAHPFDSNAPSMEAQAHTSCNRRAGCYVRATAPPLVPLSCLLDCGTSTATRGNPTYDPTVPARRIGHGSVSCERRRDGQYGQKWADSNGGGRRAEAAVTSTGGTFGRKSGRRFAFAIMTASKKGPGKGDTPKRILLREGNGPRAPLLIRGSKAGPSEGFNSRLRALGLHARYWSEVRRLAPRKGSTAASGHSGSVPTTDQGFVGWPPKADPGGFTSRPRAPSSNGHTFGSPEAQSLPRSNLGPIATPTDRIAGAFNAKLTAAKSGLERHRKLRLARPQGSDSGSAPEDDELRLARPQGSDSGSAPEDDELRLARPQGSDSGSAPEDDELRLARPQGSDSGSASEDDELRLARPQGSDSALASADSLRLARPRGSDSTSASEDRLDLDLGGASASPNPGLGPTTSQEGPSLPYP

SEQ ID NO: 57297 - protein, 152 aa, Zea mays
  Coding DNA Sequence Number=SeqID_13922
MGKSKKGSGSSHHSGDKRKREPTPPSEDFGDSEYSEEEFSSGSEGSPAPISPLASSDDSDDSQGIAAEVWTYIRTVERAGLKGSDESEYSSDEEDSSDSSEEGSGGDGDDDGDDGGDGHGGGDDDRGGDGGSKGGNGGGSKGSSKGSNKASG

SEQ ID NO: 57298 - protein, 90 aa, Zea mays
  Coding DNA Sequence Number=SeqID_13923
MKKIDEEVQRKKDQVLKVADKWFLSHFRVDCHQKTVQEREIDADYMSSVLQQLPTIGDARSDRPEQQKSPVIRLVRKADINIIGHPSPKN

SEQ ID NO: 57299 - protein, 126 aa, Zea mays
  Coding DNA Sequence Number=SeqID_13924
MTTERGGGVRGGRRRSRARGREGRTGGRENNGREKEHIYFTSELDGKIYGAELGDISTTRCSLSLGTEPGIEDERSALGAGWEEDCASARTAVLGLGAWEEPEWSLEEDAVGGRPVGRLGATELGT

SEQ ID NO: 57300 - protein, 260 aa, Zea mays
  Coding DNA Sequence Number=SeqID_13925
  Homolog annotation: Hit_ID=A2YMW5; Match level="QueryCoverage=22%, HitCoverage=9%, E-value=2e-08, Identity=51%"; Hit description =Putative uncharacterized protein
  Pfam annotation: Domain name=hATC; Domain location=186-229; Score= -2.7; E_value=0.064; Accession=PF05699.5; Description=hAT family dimerisation domain
MDVDVRVDIENGSNENEVQAPIIDDGNARSDDQVAGEPSDGANAAATPLVGKKKKFMGVENRAVKQRTTTPVSKLKTSKSVGSNKDRAIVLVPSFAKAVQSANASASQSANASASTPSGSQCANASATAQGSIWRQMKNKENDVKIGKKTHFMGFGGHFTSIAQHKYFVKFIKSLRPSFPMKKVSELDLYMSEDLVKSAFSSGGRIVDAFRSRLKPEIIEALVCCKDWKIASEKDLENEIKTLTEAMDGVDLEDDFAIGT

SEQ ID NO: 57301 - protein, 84 aa, Zea mays
  Coding DNA Sequence Number=SeqID_13926
  Homolog annotation: Hit_ID=Q5TKN9; Match level="QueryCoverage=40%, HitCoverage=40%, E-value=1e-07, Identity=64%"; Hit description =Putative uncharacterized protein OJ1362_G11.18
  Subcellular localization annotation: CTP_CleavageSite=18; ConfidenceScore=5.04e-01
MDNIWACPFQLLGIGAASATVRRSTVRFLAGQTAATQASDADLSEAVEVERRSGKVLTYVQDYDYGGSNPKHDPRRKPGSGHPP

SEQ ID NO: 57302 - protein, 131 aa, Zea mays
  Coding DNA Sequence Number=SeqID_13927
  Gene Ontology: Mol. function=translation initiation factor activity; Cellular component=transcription factor complex; Biological process =regulation of transcription, DNA-dependent
  Homolog annotation: Hit_ID=A2Y2Z8; Match level="QueryCoverage=57%, HitCoverage=14%, E-value=1e-16, Identity=61%"; Hit description =Putative uncharacterized protein
MTLEDELFVGEGGNVVDTFVGRQYARRHKGKRKRNEDTKSSTPADTPAEATYNMLKRKGLGSKINEGAVGELYKTKDEVESASRKEEMEFDALFGPDNADGETVDDGGYGYGGCGDGGAEAYNGIDDDFDF

SEQ ID NO: 57303 - protein, 293 aa, Zea mays
  Coding DNA Sequence Number=SeqID_13928
MTDAEKEVATERERTRRFDAIVKIVLSPTRTQRSTSCVRTLIIARGEGKAKNEWAEELKFDPVLCKCGIEAKYGLVPSELGVGYFCGHMVDYDEETRKCGWESYDDKGEDMRRFVKSVSFDSPMRAEQRRLKAANEKRAYDAREWEAARAEKQMLDNLADRLKRKIGCVVNYITDEARARYVEKKMTTVELMEEEEDDTSRLSELIALTDRRLHGEEEDDTSRLSELITLAEAGLHAQEEEDEFMSQAAEEVEAAYYKQKCDEAEDEDQLFSQAADEAEANYYKRTAKNCDVG

SEQ ID NO: 57304 - protein, 85 aa, Zea mays
  Coding DNA Sequence Number=SeqID_13929
MKKRVSRRLRRAAARCGCWSLASIDVQLHVPPIQPDVHLHIPIVGPSATGQSSSRSTWDMFADVDDDDDDDDNDDSAGQEVIGPS

SEQ ID NO: 57305 - protein, 133 aa, Zea mays
  Coding DNA Sequence Number=SeqID_13930
  Homolog annotation: Hit_ID=A2YGW4; Match level="QueryCoverage=37%, HitCoverage=17%, E-value=1e-09, Identity=62%"; Hit description =Putative uncharacterized protein
  Subcellular localization annotation: CTP_CleavageSite=64; ConfidenceScore=5.40e-01
MDRATSPFEGDSPMLQSQAPPSSPPSGAHDSMDRATSPRSGSATGRSDAAAVGPRRQVLLCPIPEMALSAKGKEVCHRSCDVLDINADEWGNENRSMTTELREQQYRLRKALEDRVQVSRETAKMWRWDKLHQ

SEQ ID NO: 57306 - protein, 232 aa, Zea mays
  Coding DNA Sequence Number=SeqID_13931
  Gene Ontology: Mol. function=protein serine/threonine kinase activity; Cellular component=spindle pole body; Biological process =protein amino acid phosphorylation
  Homolog annotation: Hit_ID=A2XYJ7; Match level="QueryCoverage=28%, HitCoverage=4%, E-value=2e-22, Identity=83%"; Hit description =Putative uncharacterized protein
MVKRRAEVVSRLKSLEEAAAPLVAFLQNPRLVQEFRLVVSRLRYVENGSLSNIIKPNKFGPIPESLVALYIAQFLYDQVLEGLVYLHEQGVIHRDIKGANILSTKEPLKFELHFHITDTIIGCFEAGCDYITVLGVDFMSENVRAVIDQAGFNKSHMEALRAEPVAEGEMPASSVRLVSKVKKRLGHVLCIKRVEINPRPGSVWFHPNSRNPDILKRFLHWIMRQLTKEFGQ

SEQ ID NO: 57307 - protein, 412 aa, Zea mays
  Coding DNA Sequence Number=SeqID_13932
  Gene Ontology: Mol. function=sequence-specific DNA binding; Cellular component=nucleus; Biological process=regulation of transcription
  Homolog annotation: Hit_ID=A5AP07; Match level="QueryCoverage=41%, HitCoverage=73%, E-value=7e-20, Identity=38%"; Hit description =Putative uncharacterized protein
  Pfam annotation: Domain name=VQ; Domain location=234-264; Score=42.2; E_value=1.8e-09; Accession=PF05678.5; Description=VQ motif
  Subcellular localization annotation: CTP_CleavageSite=62; ConfidenceScore=5.61e-01
MTTAALSSLRKQGDVSKDPTAPTAVLPQGSSTPPTATTSHEQGAKTSPTTTTAWLSYEKVGRAGERAAAQSLSLSLSPTRTLVTPYCKHTRPGRRTTRRPRGPPGSKRRQRGNKQGGKETKQEKLGYEEKERTTTTESRRRKELLPPGRGKKQDTGEGIPYMLVESIGMGDRVEGRENSDPTLLETHPRRGGRGGLGISTKEDTGRHRFVGFWNPVNNPYLPMSMPQASADPSNTFPTTFVQADTNSFKQVVQILTGTPETAEAAASSGAQAPPPAQQKPALTPPGPKKPAFKLYERRSSMRSLKMLCPLLPAFAAGDSVEGFSPRGFSPRGIELLSPSMLDFPSLALGSPVTPLPPLPGSQEAAAAEDRAIAEKGFYLHPSPRGNAGAGSDLQPPPRLLPLFPVQSPTARP

SEQ ID NO: 57308 - protein, 269 aa, Zea mays
  Coding DNA Sequence Number=SeqID_13933
  Gene Ontology: Mol. function=3-deoxy-manno-octulosonate cytidylyltransferase activity; Cellular component=cytoplasm; Biological process=lipopolysaccharide biosynthetic process
  Homolog annotation: Hit_ID=Q9M4G3; Match level="QueryCoverage=100%, HitCoverage=100%, E-value=1e-126, Identity=79%"; Hit description=CMP- KDO synthetase precursor
  Pfam annotation: Domain name=CTP_transf_3; Domain location=54-240; Score=132.4; E_value=1.3e-36; Accession=PF02348.10; Description =Cytidylyltransferase
  Subcellular localization annotation: CTP_CleavageSite=50; ConfidenceScore=5.22e-01
MPICAPSSDSSASASSGLGARVWVLHGLALGAAAAAAAVAYLYRRPTGFRSRAVGIIPARFASTRFEGKPLVPILGKPMIQRTWERVMLASSLDHVGSERCCEALKKLDKHYDIVVNIQGDEPLIEPEIIDGVVMSLQRAPDAVFSTAVTSLKPEDAFDTNRVKCVVDNLGYAIYFSRGLIPFNKSGNANPKYPYLLHLGIAGFDSKFLKIYPELPPTPLQMEEDLEQLKVLENGYRMKVIKVDHDAHGVDAPEDVEKIEALMRTRNIQ

SEQ ID NO: 57309 - protein, 518 aa, Zea mays
  Coding DNA Sequence Number=SeqID_13934
  Homolog annotation: Hit_ID=A2WV63; Match level="QueryCoverage=93%, HitCoverage=89%, E-value=2e-50, Identity=31%"; Hit description =Putative uncharacterized protein
  Pfam annotation: Domain name=DUF1421; Domain location=124-516; Score=- 47.3; E_value=3.2e-05; Accession=PF07223.2; Description=Protein of unknown function (DUF1421)
MASPARPVAASVSGAFGLSPDPKRCSFDQALRHKDFQENRLLMSFVNFHEQEKISKEIVTHAIESCMKKQADNLLNSLDVISGRLSQLELYCYRLERSIGELRSDVMDYHNEANLNFRCVEKQVKEVQKSVQAVQEKQELAETQKEMTKLQIVHEDSAQKSEGTAPSVFMNRENEVALVPLHQVNAVQSPPVQFQSCSGLILQQLMPVQDQQRSNQTAVYCMRGQSHLEHRQAQMFEAAGQSLQTHTRKTQPPTVVEVSQVTSQAPEFYPHPQHQWQHQTGQQVFSQARQPQPHVLQQQYSNIQQGPAQMVQLQTSSPHAHSTPQVTVVYPPYGPHQSACGNAEARSGGIVVPPSYSTISSSHRKHHEAAPVYVQSNTVSVPLAEQHQQLHSLGNGSFVPQPSKVSPCGLASYTVQGNAQTYSPAYGSPSSNPATIVAVLNQQAHGSSPMVLHHLGPQSVLNHPIDIAEKVTRMGYSKDQVEGLALRMVAAGQPADHNPLHDRLSSVSHGVAPHAWSG

SEQ ID NO: 57310 - protein, 130 aa, Zea mays
  Coding DNA Sequence Number=SeqID_13935
MAPLARPDCLSVSLCQVALQSEWRRRRCPSVRPLYADGGYQLRIRRLEGTPNYGPRQIQVTVPALKFGNKLPHLHVGKSKSLIFFNAGYISETLQLIRVLKDVLIPMKARGKRRSLITSKVGYITETLQP

SEQ ID NO: 57311 - protein, 116 aa, Zea mays
  Coding DNA Sequence Number=SeqID_13936
MDAITHSIAIPLAPYIKSVVIVRGSSDFCWEMRRPRRVHLLACLVVLAVILTSGPFVETSMARMMIRGVDPPRELLPALAVVVAAEADDGRRSAVKATAEGRGKREVPGGADPQHH

SEQ ID NO: 57312 - protein, 118 aa, Zea mays
  Coding DNA Sequence Number=SeqID_13937
MEAKSHHQPIILWSTCKNYATSKAEYTNTQLDLPVAALVPTISRMGDPVSGRVRDKVRAWLHSGIRMLILIQILSHRQHIPMDPCPQTIIILLSKWIQPIPDLTRVLEQSLDFYRDPD

SEQ ID NO: 57313 - protein, 143 aa, Zea mays
  Coding DNA Sequence Number=SeqID_13938
  Subcellular localization annotation: CTP_CleavageSite=76; ConfidenceScore=5.51e-01
MALDPCSSLPHDAQPFYRSRRPLHLPGAGNPQVQAPRTPMAASLSMQPSSLTSQPWTSLRHRRTSMDPICAVQQRRSTAVASTSPLRHALGVLDVMPQQAAAVTPFAVSSSPSRASRRRSAQRFCVVVKTHGETPLSRVSHVQ

SEQ ID NO: 57314 - protein, 86 aa, Zea mays
  Coding DNA Sequence Number=SeqID_13939
MRKTLENNEQWMNIFFLVHLSNEEPRKNKKSPSPEQIQDCNLADGEYVLIPEQGAIHEEDQEPAPEPAIEDLPAAPAIEGKPRFYA

SEQ ID NO: 57315 - protein, 71 aa, Zea mays
  Coding DNA Sequence Number=SeqID_13940
  Subcellular localization annotation: CTP_CleavageSite=40; ConfidenceScore=5.56e-01
MALDPCSSLPHDTQPFYRSKRPLHLPSAGNPQVQAPRTPMAASLSMQPSSLTSQPWTSLRKIMRCVVDAKN

SEQ ID NO: 57316 - protein, 112 aa, Zea mays
  Coding DNA Sequence Number=SeqID_13941
  Subcellular localization annotation: CTP_CleavageSite=80; ConfidenceScore=5.53e-01
MAQPPCNPAAVSPTSARGENRITDWRSPGTSPATVETPSTAHPRLPGVVGSVARPRLLARPTFGVPGAADSVRTPGLRVVAMRLMVLGIDSGNGEDEVVEGDFQVFQDYDEF

SEQ ID NO: 57317 - protein, 190 aa, Zea mays
  Coding DNA Sequence Number=SeqID_13942
MAARRAGRAVLSSLARSLGLRKPKGQAGSGAKNRHRTLSGVYKDQGEDGSNVPPGPDAGFKNAKRNSRSSNGSRTRNGNPANYSPRRINSATGQAALLAGATGDASPSPKQPRRKRDRERGIPRKGSFPVKEPGSEPPLLIRGSKASPPKGSTSASDRVGPTPTTGQRFEGRPPEGSHGRLRLLGLRAHY

SEQ ID NO: 57318 - protein, 256 aa, Zea mays
  Coding DNA Sequence Number=SeqID_13943
MARGLGPTRHTSWPRAEEAKPPCAAGRSSGHVVSQAHVTSWDSERTLSHGVKTARPCSVPRTARARATAAPRTTRPVKLTPRRDRRRLWRGKQATLRLRHNDRVKKRPRASLLIRGSKAGPSEGFNSRLRARGLHTHYWSEVRRPAPRKGSTAASGHSGSAPTTDQGNGHTFGSPEAQSSPRSNLGQIAAPTDQITGAFNAKRRLRRTDCCATRQSEADRQPGPASGAIGNSASPDPRARTRAQPLKTTDSAPEST

SEQ ID NO: 57319 - protein, 319 aa, Zea mays
  Coding DNA Sequence Number=SeqID_13944
  Homolog annotation: Hit_ID=A7Q3P1; Match level="QueryCoverage=94%, HitCoverage=40%, E-value=7e-33, Identity=31%"; Hit description =Chromosome chr13 scaffold_48, whole genome shotgun sequence
MSPQKCWNALFEVPTATCPSHIGFKAEPYSGGNCLTVKGSLQQNIIFSEQLFNGGLAMEDGPVHLFYSIRANASSALGLSLDLSSRNKQGTSKILVAEDIATFTRKKQNHKYGSYVKADKVELHAPDNHGWVLYKATVSSSAGHTLTGINIVCTLKFTGEISPESEDGSILVEDVDGTSLYQASLGHLSIRNTDKNTEFPPAESWITEGDYISWSKCSNGSELVNLKISWKLKNPDQPQPPFSKYNIYVEKLTADSDLKVPSPKSYLGVASVDAFYVSGLEVSNEVTGLKFFIQAFAHDGSWQELEECPKFFLFPVHSE

SEQ ID NO: 57320 - protein, 68 aa, Zea mays
  Coding DNA Sequence Number=SeqID_13945
MAPEAGLGCCQPHPGGWHNSRSRAGGAVFLSGSEFSGWYVDAVNGLVGAGFCESNPRASAQSERTIKG

SEQ ID NO: 57321 - protein, 105 aa, Zea mays
  Coding DNA Sequence Number=SeqID_13946
MKSGSDKFINEIIKYHFRTHNSQSCPVERAVAAAEAGIGDDVAPGLAHEGCADEARRLSCRDAQEDLADEVVHQLRRRCCAPWPLRISDGVSSPVSLITYSALRH

SEQ ID NO: 57322 - protein, 217 aa, Zea mays
  Coding DNA Sequence Number=SeqID_13947
  Homolog annotation: Hit_ID=Q6QP51; Match level="QueryCoverage=26%, HitCoverage=38%, E-value=9e-12, Identity=51%"; Hit description =Putative growth-regulating factor 1
  Subcellular localization annotation: CTP_CleavageSite=22; ConfidenceScore=5.11e-01
MQAACNCTMGTHPFDFNASSVEAQAHTSCNRRAGYCVRKTPPPLALVPRLLDCGTGAATRGNPAHSPTVPTKRIGHGSVSRGRRRDGRYGQKWADSNGGSRQAEAAVKSDRERGYYKRDPSLRRKRAPSPPTDQGLAPRKGSTAASGHLGSTPTTDQGFEGWPPEGFDSLLRTRRARDDSGYVRYMAEARAMLPRSKLRPLQGYDLASPEPSLGQER

SEQ ID NO: 57323 - protein, 209 aa, Zea mays
  Coding DNA Sequence Number=SeqID_13948
MSCRLSDDSWREVVVAPLATPDSPVNYSGVAPRISEEQSLERRETDLTRRETDLTFREEMLTRRSEMLVEHELEVEEKERKLEKQIRQFNAAQAVPGPQVVEATRKALEDLQAEHRAGVQRIAAWVGEASTALVPLGILGARLEVEGSKLCRAVVEYVLTCFWSHDPAISLAPVIDGPVATTKDAARESVQDVVEMVAARFQRDPADAE

SEQ ID NO: 57324 - protein, 20 aa, Zea mays
  Coding DNA Sequence Number=SeqID_13949
MYRQDEEHEGCSDEFVRERN

SEQ ID NO: 57325 - protein, 319 aa, Zea mays
  Coding DNA Sequence Number=SeqID_13950
  Gene Ontology: Mol. function=transferase activity; Cellular component= mitochondrion; Biological process=ubiquitin cycle
  Homolog annotation: Hit_ID=A2Y0U8; Match level="QueryCoverage=100%, HitCoverage=99%, E-value=1e-109, Identity=67%"; Hit description =Putative uncharacterized protein
  Pfam annotation: Domain name=DUF525; Domain location=188-311; Score =173.1; E_value=7.2e-49; Accession=PF04379.5; Description=Protein of unknown function (DUF525)
  Pfam annotation: Domain name=UVR; Domain location=145-180; Score =19.8; E_value=0.0029; Accession=PF02151.10; Description=UvrBuvrC motif
  Pfam module annotation: Pfam domain module=DUF525::UVR; Domain location=188-311::145-180
  Subcellular localization annotation: CTP_CleavageSite=40; ConfidenceScore=5.68e-01
MQWAGLRSQAPVPTAAWTGPRPRTARCPQGRFPTARRALVASAAASDANSSSNSPGKDEEGEEVVRREKEEKAVASLLMRSQKYAMLKQQLAVAAQFEAKAEMKFCNISIGRNLVSSLTCTLGLVLQDYKEAARLRDSLRSFEEKEPVLCLRRLMKKAIEEERFEDAAKYRDELKILAPHSLLKCSSDATTLGIRVQVRSVYIESRSQPLKGQFFFAYRIRITNSSQRPVQLLKRHWIVTDGNGRTENIWGVGVVGEQPVIFPKTGFEYSSACPLSTPNGRMEGDFEMKHIDKAGSSTFNVAIAPFSLSILGDDNDVLL

SEQ ID NO: 57326 - protein, 37 aa, Zea mays
  Coding DNA Sequence Number=SeqID_13951
DTWTNGYEIDGFGYDYGAGEDEVVEGDFQEFQDYDEF

SEQ ID NO: 57327 - protein, 76 aa, Zea mays
  Coding DNA Sequence Number=SeqID_13952
MVGETSPAMTRHSMPSGRAVLRDAGHRAETELELGVTRKDRRPSGQRAGARNEWSRSQGHHSREEQEGWATKHESS

SEQ ID NO: 57328 - protein, 435 aa, Zea mays
  Coding DNA Sequence Number=SeqID_13953
  Subcellular localization annotation: CTP_CleavageSite=34; ConfidenceScore=5.24e-01
MPPFAGRVYSGVVVLAASLVFSSGPPALSLPSARAQLAPDPPSHDARFPVPRVPSLHCFLCSIFKHAALQIACCSSSPAMAAPGSPAFRPRLPPPTPVGQEPSCPLASLPPFPSSALSLSKPFYGARGFLLLHPQLACELLPPPCIHGSRRPSPWLALRPAAAPGSESLSWPSSLLHLCPLPALQLLHPWPCLLLVGARRGRRRLVAQPSCSSLLSCPWLLLHSLRAPARCPDGRLSFRVTPSSSSVSARCPASRSTARPDGIESLRRCRSDFRVLARYAAVVFTSAASASPSPLNSQTCSSLFACPQFRSDLARVILKLCAFVVSRCVPIFSTASLARLFGDNLLTGCRSQSSAHRLTVVFLVFPRRSASPWLSMSAVLCASVFGRCLLLTIPYSISSSSFASALARWSRSSDVRPRTSAEGRRQATTKSSCDV

SEQ ID NO: 57329 - protein, 26 aa, Zea mays
  Coding DNA Sequence Number=SeqID_13954
MAGEKELAGAKEGRLAGEGFADWIKR

SEQ ID NO: 57330 - protein, 155 aa, Zea mays
  Coding DNA Sequence Number=SeqID_13955
  Subcellular localization annotation: CTP_CleavageSite=27; ConfidenceScore=5.10e-01
MARAISSRLGSAASGRPDRRAGTLRCVAMAMPRRREGEIAVLESLGARRTMQMAGRSTTGLGPIAGSCLRPWLALVTLGCPPRRRRRRALHVPCREGSTSSDLHPAPGKLVTAIPSVGAGARLLSRTHLPQHLAYAHQVFDRVPSVRLAGWYEHR

SEQ ID NO: 57331 - protein, 87 aa, Zea mays
  Coding DNA Sequence Number=SeqID_13956
MDSQAPTNSDSDQGSVEDFILSVGSGGGTVLGCVLCSSLLLCLGTCVVPCTLSGLCPPWPGAWFPCCAVFLFSGWCRGCLPRLRQRL

SEQ ID NO: 57332 - protein, 186 aa, Zea mays
  Coding DNA Sequence Number=SeqID_13957
  Subcellular localization annotation: CTP_CleavageSite=55; ConfidenceScore=5.08e-01
MAPRILCDNGGFLAPLWKQKDVSKDSTALTVVPPPGSIAPPTATTSHQQGAKISPAATTASLCYTPHCTPGSSHYAYKRKDQGPLREGWPRGDEDKTGARVRPLAPSPAWTLVTTYCKRTLPGRGTNTKAAGFPPLSRRSPATSLPPFALGLALDPSGLGHAATFTRRPRDPPVSKRRQSCLQHFI

SEQ ID NO: 57333 - protein, 142 aa, Zea mays
  Coding DNA Sequence Number=SeqID_13958
  Gene Ontology: Mol. function=kinase activity; Cellular component =ornithine carbamoyltransferase complex; Biological process=amino acid metabolic process
  Homolog annotation: Hit_ID=Q6QP54; Match level="QueryCoverage=59%, HitCoverage=30%, E-value=2e-22, Identity=67%"; Hit description =Putative kinase
MAPPVVVAGLRPRLGDVEAPPKPRSSLPSVAEVESEPLVRARRRSPADAGAESKPWGRAKRSSSSSRAEPESEPWVGRSGDCRLMPGRSPSPRVGRSGVRRLLGPSLSPSPGSGGAEFAVFRGLARVRALGRAERSSPSSGA

SEQ ID NO: 57334 - protein, 161 aa, Zea mays
  Coding DNA Sequence Number=SeqID_13959
MNVCELTLAVSHPPTGQEQARVLTLEGSSSTLGIDNTFGEGLLRESGPSRRLGRSPWGLGQLSSKDVSPTRGLGWSIPASVPLTDGPARPRPTRSSHRANSASVRADTATPGLGSSKSGRGVPLTEQEKPRATRLTEPRDSYASRIRIPHSTPLHGATHAW

SEQ ID NO: 57335 - protein, 109 aa, Zea mays
  Coding DNA Sequence Number=SeqID_13960
  Subcellular localization annotation: CTP_CleavageSite=41; ConfidenceScore=5.13e-01
MTHLLSGFVNLLLKSWAGGLPFWLLASRRESASWFVSSGCRADPGTVAFFGGMSKVDALPKVPSACQKDLRKRKAPNRQEIRNKQVAEVGPVIDAMAGKMAKPLERILS

SEQ ID NO: 57336 - protein, 91 aa, Zea mays
  Coding DNA Sequence Number=SeqID_13961
MGKSKKSGSSSHHSSDKQKREPTPPSEDFGDSEYSEEEFSSESEGSPGGGDSDGEGEGDGGGGGDGNGDGGGKGGSGDGGDDSKGSSKASG

SEQ ID NO: 57337 - protein, 182 aa, Zea mays
  Coding DNA Sequence Number=SeqID_13962
  Subcellular localization annotation: CTP_CleavageSite=51; ConfidenceScore=5.46e-01
MSSRSLMHRVFPPSKPPDGGYPPSFRFVVGGTQLRGSWYLSAIIRLQGFSSASPAVPLCRRSPETVTTSPWVGRSKPGCDLGPTLSFKDVHHPRWGGGRAELELYVPRGFVGRPLLRRSRERALTGPAGRSDFDNAGLVDGGRRQPQRVGLVGLAPGAPSCQKAAAEGNSTRRSVPHSPGRI

SEQ ID NO: 57338 - protein, 74 aa, Zea mays
  Coding DNA Sequence Number=SeqID_13963
MASSWSCGERCRSVGLRTGASVDRWMQFGRSRLDRRVPLRGVPRGRQMIFTVYFIYMSDVMLIYAILCLVFTYT

SEQ ID NO: 57339 - protein, 191 aa, Zea mays
  Coding DNA Sequence Number=SeqID_13964
MEARRASRYQVHGRRSKRLRNPKPRPRLSSVWHTGLSGGAPDSVRCARLNSGEQAALGRSLATYGYNSPDCPVVHRTVRVRCANGSKTATVDCANFGRKSGTGQCPMGPPGVETPTHMLRSRVIIMEEIVFQVVPNVRVPLSHSVLEAKPNANHRKYQNPQLETSLTHNGGQNNLIALGDPEIKPLNMMGP

SEQ ID NO: 57340 - protein, 170 aa, Zea mays
  Coding DNA Sequence Number=SeqID_13965
  Subcellular localization annotation: CTP_CleavageSite=51; ConfidenceScore=5.69e-01
MGAIQVKAPSTQGTRSRLARAQPRAGTVDQGRFTPRPRVSSSNGRTFDSPEAQLGKASRRRNLGQIATPNRPYRRSIQCKDRLTPYPDARSPVDKAEENNAACAAPTAVPPARVRLTAAKSSLGRHRKLRLARPQGSDSTSTSEDGLRLARPQGSDSTSTPEDGLRLARP

SEQ ID NO: 57341 - protein, 164 aa, Zea mays
  Coding DNA Sequence Number=SeqID_13966
  Homolog annotation: Hit_ID=A3AQ03; Match level="QueryCoverage=42%, HitCoverage=42%, E-value=3e-07, Identity=45%"; Hit description =Putative uncharacterized protein
TNDDSYQKLKEENERLKMSLTQLKGKCIAQPSQDNRDHMVKKLETRTTVACTKTLEENVKDLRIAKRKKQKMKFNASSKSLNHASTKAADRRMPSRAWANKVVGPKGAKIGEASGELYVDDYLIEDVGMFDTQTVLSAGGAGSGQMVAVPVKPVEERTHAKTVM

SEQ ID NO: 57342 - protein, 140 aa, Zea mays
  Coding DNA Sequence Number=SeqID_13967
  Subcellular localization annotation: CTP_CleavageSite=58; ConfidenceScore=5.02e-01
MHRAVPIKQPKASVVPPRTLSVLPEPKFTGLRLEHAVPPPAKPPEPRPPQPAPSSHFQAMPVTSWMQIFFLVYLSNREPRKNKRNLSPEQIHDCNLADGEYVLIPEQGAVHEEDQEQAPETAIEDLLAAPAFEGKPQFYA

SEQ ID NO: 57343 - protein, 111 aa, Zea mays
  Coding DNA Sequence Number=SeqID_13968
  Subcellular localization annotation: CTP_CleavageSite=55; ConfidenceScore=5.47e-01
MAARGQMRGRLVARVGLGWVRVGVARLAGSSRRGTGASSRLGARAVQGARRLGCCARRAWVGSRPGSELEPPVIGSTSFVTEGATSWSLYKAIATISGSEFCGRTARIILA

SEQ ID NO: 57344 - protein, 158 aa, Zea mays
  Coding DNA Sequence Number=SeqID_13969
MDWLLQRGKVRFLARGASPGHAQSLPRVGRGWEGLCRPVYGGGGSGGRGHAVCKANTGDLWLRAPLVQKGFELGLGQFSPLYVHNKPSYGRYKCGHCTAAAEVSGALYAKAVRPGHERGIDVDGTIQDMVDGVTWPTTLPPGWTVEWDVAPTGEEHEE

SEQ ID NO: 57345 - protein, 87 aa, Zea mays
  Coding DNA Sequence Number=SeqID_13970
MKLSKPSDLAELHRKAKIDLTGLQPPACACRLGTPIGRTPRRRRAPPPAHADRPTLTIPDGGPHIAVTLRTSSTPSATSPEQSRYRV

SEQ ID NO: 57346 - protein, 494 aa, Zea mays
  Coding DNA Sequence Number=SeqID_13971
MNKRPAFKVPLQMELRFHLRSNDNDPRSGWPNCSSDGLRADATATLPLPTPTLEGRGQGLSALRQIPTRILPDDRSTDLRAGAPYRCKGRTALEHERRPSSARRLGRSSLTRGATTAFTARGGTGSQASEPNALRLTTPAVDQPRVVEVCPSHRASERPLPRTLKERLTHEPAREVELQLSPASTPARMMNILEAEGGTKIAARLASPHPGAGGHRLGRTAGNPHPGARKPSWVESSPTRSKVLPLWRGGWVPRVMQAGPEQKKPNRRARCMQSPSGYEHSSAFAQTSGPKGGQPCRRHATAPSGRAPPTSNAPSMGAHAHASCNRRAGRYVQATAPPLVPLPRLLDCGTSTATRGNPAYDPAVPARRDGQYGQKWAGSNGGGRRAGAAVTSSAKLTSHPGAGPGKGDTPKRTLLREGNRIRASLLIRGSKAGPSEGFNSRLRARGLHTHYWSEVRRPAPRNGSTAASGHSGSAPTTDQGFEGWSSKGSQPPQT

SEQ ID NO: 57347 - protein, 82 aa, Zea mays
  Coding DNA Sequence Number=SeqID_13972
  Subcellular localization annotation: CTP_CleavageSite=24; ConfidenceScore=5.44e-01
MGAIKVKAQSTQGTRSCLARAQPRAKAADPEGFTSRPRVPSNNGRTFDSPEAQLRQASRRSNLGQIAMPTDRIAGAFNARID

SEQ ID NO: 57348 - protein, 150 aa, Zea mays
  Coding DNA Sequence Number=SeqID_13973
  Homolog annotation: Hit_ID=Q6QP51; Match level="QueryCoverage=74%, HitCoverage=37%, E-value=4e-09, Identity=40%"; Hit description =Putative growth-regulating factor 1
MGSSASPDLGLGLSLGLGRRSSPRPTQGSDSASTPEDGHRLARPQGSDSASASEDGLHLARPRAQTQPRPRKMDSASPDPRARTQPRPRKTVSASPDPGLGLSLDPGRRTLPRPTPGPRLDLDLRGASASPDLGLGPATSQEVHHYPTPS

SEQ ID NO: 57349 - protein, 231 aa, Zea mays
  Coding DNA Sequence Number=SeqID_13974
  Gene Ontology: Mol. function=carboxyl- or carbamoyltransferase activity; Cellular component=ornithine carbamoyltransferase complex; Biological process=amino acid metabolic process
  Homolog annotation: Hit_ID=Q8SA97; Match level="QueryCoverage=83%, HitCoverage=23%, E-value=1e-29, Identity=45%"; Hit description =Ornithine carbamoyltransferase
MAPPVDVVGPHPRLGDVEAPPKSRSSLSSVAEVEYEPLGRARRRPSAEARAKSEPWGRAKRSSSSSGAEPESEPWGRVDRSSSSSGAEPKSEPWGRADRSSPSSGDELKSKPWVGRSGVHRLPGLSPRSGGAEFAVFRAEPESELWVGRSGVSYGRSVERRSDCGHFGSVDRRTCVRIKLCADGGYQLRIRSLEDDDEDNAGFYCDYDYDYGKEGVEADLQEFQDFDEFED

SEQ ID NO: 57350 - protein, 494 aa, Zea mays
  Coding DNA Sequence Number=SeqID_13975
MPSSSSSAANTPLGKSSSEETMSDLAAVELHPGHTVEFGVSRISSKRKVGDEIAQFGSCTFTPRTSKTSAEVVELVPCARNKWGNWIGDPFHEAKKARGAVKSATPGSSKPLPATKPTAPRPSNASAGAKAAASGTGKPPSGGPAKGRRLPSPARTGEAAARVADFDTDICVGDYFVGSDGGQLAVVLPPVAATSPTAVVGAKGATRDSWATFCTSGEILSAAAAKDVAGSMSQQLRQASQQLKHAADFADLVALGAFTVEFAAEVENLRAQHVDAMRDKSAAESISRRLSEKVAAMEAGRADLRRQLAEERREANKAIADVQATHYEVFDQSDENFELEIFKVEDPVLKQSVRALFDRMWGPHGRETVRERSDRAIDQMAHAESVEDFGFLDGALPEAVEVPTFGPAQATTTENTDFAVETSAVVPADDSVPGSMSECFESDAETSPRVEGAEDLHVASNRCRRRRVVGRQCVGEFSRSAGAVAWGWSVADFE

SEQ ID NO: 57351 - protein, 85 aa, Zea mays
  Coding DNA Sequence Number=SeqID_13976
MPLILLLVLALMLVLVSLRTCWNMTSTEIIAEFFLGNGFGVGMGGEGASLSEALGRAASQTPPPTEARGRVMLLLLLASALLLLV

SEQ ID NO: 57352 - protein, 161 aa, Zea mays
  Coding DNA Sequence Number=SeqID_13977
MSPRTRLTARKSTGPIGVPRHQLAPRHENSSSGSNDPIGDLEARDQLADRDLALDWAVQSRLLACAKEARAQARIKELSSTVDDLQVFCNTLHEEVHVLYSQLHPSAPAHPAEAEAEPSHVAGRALGGELDLFKPPPSMRLVDVWTPTPDDEAAKSNGKQD

SEQ ID NO: 57353 - protein, 18 aa, Zea mays
  Coding DNA Sequence Number=SeqID_13978
MSLQENVEGVSWRMATYL

SEQ ID NO: 57354 - protein, 109 aa, Zea mays
  Coding DNA Sequence Number=SeqID_13979
MRLKLIKEMIKQMSHLKMTAMIKGEMQMSKTRRMKNKDRHTQESTKQSNEITPLTPSSATYIRGVEEALQDSDWVVAMQEELNNFTRNEDVKPIKTPMGINGHLDLDTE

SEQ ID NO: 57355 - protein, 383 aa, Zea mays
  Coding DNA Sequence Number=SeqID_13980
MTTSLVVERSETGYGLPLPSASRMFIIRAGEEGKPSGSFAFRVGWRSASSFSIQGRRAFAGFAEEANSGYAGLAVCGTVSCRVSGSPAWVALVLPSVLPPAAGAERGCPSTARATVALCAGWPHPWLLPRHRSHREVVQNVPLPIGAKVVAATGGADVVASTGGRGQGSIRSSAHPEVIAAAGEPLGAEVVVAAGAEVVAVAGGAVRNQLPARLLLGGGVCRLTVRDQAERLHGFRTPPRRQVPVLQSRTSRLDVLRLDTSVSKKVVNNPREANSPGSGSGGGACRPTVREAARAPDHPRRLMPTVQDLAERLHGLQTTLWNGVPFSRAGPQAVGPPYFRIRGPNLQAWLFNSDVAMSDRRKSYGPDPWGYGRASGRRRASAS

SEQ ID NO: 57356 - protein, 406 aa, Zea mays
  Coding DNA Sequence Number=SeqID_13981
MKGCLIVGRLHAPCRAVRLPGRWLPREWRGAWGAPVFSGGIRVKAVSSGDFIVGERALVVVVSPILSSSCCRWRGATPWGLASFHHHSASRIFITQPGCSPPPVVIQKDDYQPCGGEKQTGLRPPSCPQLQGCSSSVLGRRVRRVGTRLRVGSGPLLPSVFGGEGRSPSVALSATACLASRPGRLRCHLRRRLLLLGRSVAARPPYGRRSRRARVGHTHGFSCGTSRTGRSYKTSYTVRVGAAFLDGLVLTPIVRTGVKTSSCALVRPPFAGTVRVCRWPLSSVLRWSPPLVRLPTAEVVASIGETRRTCWDDCRCWQVVDAEATVVVGADAVASAGEPLGVGYPMALLVWRPMAQGLAERLHGFRTPQETSVCSSKPDLQGGGVCRLTVRDQAGRLRGLRTTLGD

SEQ ID NO: 57357 - protein, 108 aa, Zea mays
  Coding DNA Sequence Number=SeqID_13982
METPSLLTCSWTVTLKWFCSCVPSARGPPLLKLSQREAEGEGSCAGAWVFELEEAVPVRQMVTEGLGVAKHHDTLSASMRHLFRMSRDGDWIVVAHAAGFHMVSNELR

SEQ ID NO: 57358 - protein, 123 aa, Zea mays
  Coding DNA Sequence Number=SeqID_13983
MGKNNKRKREPTSPSEEFGDLEYSEEEFSSESEGSQAPTYIRAVECSGLEGSNESEYSSDEEDSDDDDDGDDDDDGDGDGDGSGSGGGSKGGDGGGSRGSNRGGSSRGSTRGGSGGGSNRASG

SEQ ID NO: 57359 - protein, 62 aa, Zea mays
  Coding DNA Sequence Number=SeqID_13984
MADNEFCTRADVPCSTRSSCCAPVRLGICQSVNDRCMQACSQSKEGVEADLQEFQDFHEFED

SEQ ID NO: 57360 - protein, 93 aa, Zea mays
  Coding DNA Sequence Number=SeqID_13985
  Gene Ontology: Mol. function=oxidoreductase activity; Biological process=electron transport
  Homolog annotation: Hit_ID=Q6K661; Match level="QueryCoverage=86%, HitCoverage=15%, E-value=8e-16, Identity=53%"; Hit description =Putative cytochrome P450
MGHSNCGPYWRQARRTTSTEFSSVERVQHFADVHEQEARAMARRLCRVAHASGGRALVDVKSRLLEMLMNGLLDMLFKRTTSRSWRRVTEDRQ

SEQ ID NO: 57361 - protein, 90 aa, Zea mays
  Coding DNA Sequence Number=SeqID_13986
  Subcellular localization annotation: CTP_CleavageSite=25; ConfidenceScore=5.40e-01
MAERKIPPPTRPNPTRKVTETRRSRSRRVWSPNVAPGSESTRRNQSTGAAEHRRRKRDMILGLWVRWSASTLEKGQPCGTEPGVGRGGTG

SEQ ID NO: 57362 - protein, 42 aa, Zea mays
  Coding DNA Sequence Number=SeqID_13987
GGALTERRAAARGQGGARRRGDREALGGGGKRVALRPAVGER

SEQ ID NO: 57363 - protein, 18 aa, Zea mays
  Coding DNA Sequence Number=SeqID_13988
MAAEAKTPSLAEDESHQG

SEQ ID NO: 57364 - protein, 204 aa, Zea mays
  Coding DNA Sequence Number=SeqID_13989
  Homolog annotation: Hit_ID=Q6J9V9; Match level="QueryCoverage=31%, HitCoverage=33%, E-value=5e-08, Identity=45%"; Hit description =Putative uncharacterized protein
MTASKKGPGKGDTPKRILPREGTRLRASLLIRGSKAGPSEGFDSRLRSRGLYTHYWSEVRRPAPRKGSTAASGYSGSAPTTDQEFEGWPPKGIGPYEGLDHASPEPGLGQGQPTPEDLRLARGPPPAANVFPARPRPCLRQEATLTKSPHRPTKSQERLMQRWPDTFILTRAPQSRSDRRHFAAPLTGLTERQRRLRRSDCGAT

SEQ ID NO: 57365 - protein, 187 aa, Zea mays
  Coding DNA Sequence Number=SeqID_13990
MTSNPRVGRSKPGYDLGPTLSSKDVHHPCWGGGRAEPELYLPHGLADHLLFQLLVDATFRPLPRLRGEDRSEDLPESLGSVDLVVRGFSSLVKGTPRPLSDEPRPGGTTGRGLGGGQPTRLPEPDSWRRPWRRRPGLGDDAVLQSGDLRTASPSEARSGLAEGVADAEGAAAPFSRQDPSLQDRIVL

SEQ ID NO: 57366 - protein, 151 aa, Zea mays
  Coding DNA Sequence Number=SeqID_13991
  Homolog annotation: Hit_ID=Q6QP51; Match level="QueryCoverage=32%, HitCoverage=22%, E-value=2e-17, Identity=85%"; Hit description =Putative growth-regulating factor 1
MQVACNRTMGAHPFGFVASSMEAQAHTSCNRLAGYYVQETAPPLAPMPRLLDRGTGVATRGKPAHGPTVPIEHNDHGDRERGYFERDPSPRRKRAPSPPTDQGFEGWPLGRVRQPPQSTRASSSLLIRGSKAGPSEGFDSRPRALRLRSHY

SEQ ID NO: 57367 - protein, 146 aa, Zea mays
  Coding DNA Sequence Number=SeqID_13992
MGKSNKRKREPTPPSEDFGDSEYSEEEFSSESEGSPAPVSPPASSDDSDDSQGIAAEVWTYIRAVERSGLEGSDESEFSSDEEDSDGGEDEDDDDDDGDDDDGGDGDGDGSGSGGGSGGKGSTKGGSSKGSTRGGGGKGSSSKASG

SEQ ID NO: 57368 - protein, 142 aa, Zea mays
  Coding DNA Sequence Number=SeqID_13993
MAGKNLLFPGLRAIIQRNTRASAQEFLRPIALLLWIAGAPISPRGFGGQVPGRTSRQKGPTRQQEPWGLRRSEWMTGRCGIVVREDLARRTDHAAPPAQSSAEDASRAVEDERGKGLTAMAHSQSHVQDDGGWRMWKKKVLV

SEQ ID NO: 57369 - protein, 151 aa, Zea mays
  Coding DNA Sequence Number=SeqID_13994
SSAGKALPSPLVEEATVSQVPKEVAAASTGTDAAASGDILVAPALDLLGVLNQKRIDDLKAANDAPCVKDACALRHLVYPQNIPIKQGYRLQLQAFVKVPNGAKGVPARFVSVRPATAAEASSEGWRLCLRPNICPPRDQFDRVTWCRRRR

SEQ ID NO: 57370 - protein, 204 aa, Zea mays
  Coding DNA Sequence Number=SeqID_13995
MSYRSKTFLPERLSCRFDCFDSRTLKTTRVHVSSKADRAEGLLRIRDTDTSLITFREKFRHRQREQQHPRRRFHPRRNLAQPRTATRAEGSPPRRRTPTPRLGPHGQVLRKGSGPSGRLGWPLRSLSQLSPEDLSPAHGLGSMTLGLVPLADDLAKLQPPLPHLLGQEATCSRADEASFRADSASVHADTPASGFSSSQSGRRF

SEQ ID NO: 57371 - protein, 218 aa, Zea mays
  Coding DNA Sequence Number=SeqID_13996
  Homolog annotation: Hit_ID=Q6QP51; Match level="QueryCoverage=55%, HitCoverage=58%, E-value=1e-51, Identity=81%"; Hit description =Putative growth-regulating factor 1
MQEACNRTTVMHPFGFIASGGDQKRGYFERDSSPRRKRAPSPPTDQGFEGWHLGRVRQPPQSTRAPSSLLIRGSKAGPSEGSDSRPRTRRVRDDSGYVRYMAEARATLPSHFALPLTDLTGKQRRSPRSDCCASHPGEADNNKFSLGHDRKLRLAQPWASASGGGLCLARPQDSASASASGGITSSPDPGLGLRRSLCLARPWARTDRATGDTSLPYP

SEQ ID NO: 57372 - protein, 487 aa, Zea mays
  Coding DNA Sequence Number=SeqID_13997
  Gene Ontology: Mol. function=protein binding; Cellular component =nucleus; Biological process=DNA mediated transformation
  Homolog annotation: Hit_ID=Q6Z1C1; Match level="QueryCoverage=92%, HitCoverage=91%, E-value=1e-122, Identity=56%"; Hit description =Putative RNA-binding protein Virp1a
  Pfam annotation: Domain name=Bromodomain; Domain location=140-229; Score=71.4; E_value=2.9e-18; Accession=PF00439.16; Description =Bromodomain
  Subcellular localization annotation: CTP_CleavageSite=58; ConfidenceScore=5.01e-01
MTSAVLAGRDEVHHGHPHHRHWGGARAPLMPKPSSNPNPRRYRPGPNPIVSGSPPAPRAGSAVAAEPLPSPLRHVKFRPSELTPAEARHLRERLTGELGRVRAFVSRIDSWQDGRRRGPEPEPEPPARRSSPPPALVEAMRRRCADILTRLRRSKKSVWFNSPVDVEGLKLHDYRAIIRSPMDLGTVKQNLTAGRYPSHEAFAGDVRLTFNNALRYNPPDHHVHRYAGDLLATFEGMYKEAVSWFEQQRQQLEPPMQLDLLPPPPPPQLPVSVPVQAPLRMWGGRRPKPKARQPNKREMDEEEKQKLRVEIENLPEDKVLNVLQIVQKRNRDPALSGEVVELDFDELDIETLWELDRFVVNWRKALKKSQRNSRMNGDAAVMNADAIDATIVPDDDDRVEVAVNPSVVVEIGESETDVPEKNEVEAEMGDEYVDIGDEMLTMNYQSVEIQRDSLAASSSSGPGSGSSSSTDSDLDPESDGDNASAPH

SEQ ID NO: 57373 - protein, 277 aa, Zea mays
  Coding DNA Sequence Number=SeqID_13998
MHRVLPPSEPPDGERPRRFRLVVVGGTQLRGSWYLSAIARLQGFSSGSPAASPRRWSPKTVTTSLKVGRSKPGCDLCPALIFKDVHHPCWGGGRAEPELYLPHGSGGHLGFCRPAGPPIWGVESLGSVGLAARGFSCLVKETLGRSAMSRSRRQQCQHGQRRSWLEKRLRRPEPGRAVHWLDQRQSWVAEAMSRADVLEGQLAEATERPVELSARAGFPDETLAAMAQAWCRQVPSSGDPPTVLPSEAGSDSAEGGVDAEGAAAPPLMSDPTGTVYL

SEQ ID NO: 57374 - protein, 340 aa, Zea mays
  Coding DNA Sequence Number=SeqID_13999
  Subcellular localization annotation: CTP_CleavageSite=28; ConfidenceScore=5.05e-01
MQAACDRTKGAHPFGFDASSMGAQAHTSCNRRASYYVRETAPPLAPVPRLLDCGTGAATRGNPAPGPIVPTEHIGHGGSKAGPSEGFDSRLRALGLRALLLIRGSKAGPSEGFDSRLRALGLRAHYWSEVRRLAPRRGSTAASDHSGSAPTTDQGFEGWPPKGSTAASEHAERGMTLGTSDTWPRLVLRSRGTLGHFQDQQERFCNGIPSEGGVEPSDPIKRDRVRQITCRKTAPPAPTPTAVPLDRVRLTAAKSSLGRHRKLRLARPQGSGSTSTPDDRLRLARPQGSDSASTSEDGLRLARRQGSDSTSTLDDSLRLARPQGSDSTSTSDDDLRLARP

SEQ ID NO: 57375 - protein, 97 aa, Zea mays
  Coding DNA Sequence Number=SeqID_14000
  Homolog annotation: Hit_ID=A2Y0X2; Match level="QueryCoverage=41%, HitCoverage=3%, E-value=1e-09, Identity=70%"; Hit description =Probable cellulose synthase A catalytic subunit 1 [UDP-forming]
MPGFTPCSPRSDRDFDFPIDVGAVGSHNRNELIMIRHDGDVRGPDKPTKSANGQVCQICGDSIGDYKDKDGVKGLCVVGAINNCTSQLPTYGRSSPP

SEQ ID NO: 57376 - protein, 43 aa, Zea mays
  Coding DNA Sequence Number=SeqID_14001
MAVAPVPLRSRFGLVRGRLQGSTGRARWACGMRQACGIAACGR

SEQ ID NO: 57377 - protein, 118 aa, Zea mays
  Coding DNA Sequence Number=SeqID_14002
  Subcellular localization annotation: CTP_CleavageSite=13; ConfidenceScore=5.16e-01
MGALVEAPVPPMRTWMVRHVKPGAPPPLPPRAPPWPARPLGRPAPCPAPLRAQRLGRPAPLLGRLGRPLRCPPSPARPPAAGSAAPARPPLRAPPRAGSTAPRAGGNEIDGSGYDYGI

SEQ ID NO: 57378 - protein, 604 aa, Zea mays
  Coding DNA Sequence Number=SeqID_14003
  Gene Ontology: Mol. function=acid phosphatase activity; Cellular component=extracellular region; Biological process=biological_process
  Homolog annotation: Hit_ID=Q2QXM4; Match level="QueryCoverage=69%, HitCoverage=87%, E-value=1e-149, Identity=63%"; Hit description =Ser/Thr protein phosphatase family protein, expressed
  Pfam annotation: Domain name=Metallophos; Domain location=167-360; Score=35.8; E_value=1.6e-07; Accession=PF00149.19; Description =Calcineurin-like phosphoesterase
  Pfam annotation: Domain name=PhoD; Domain location=81-423; Score= -247.4; E_value=0.044; Accession=PF09423.1; Description=PhoD-like phosphatase
  Pfam module annotation: Pfam domain module=Metallophos::PhoD; Domain location=167-360::81-423
MATAALALLVLALPASLAVTSTYVRPPPRATLSLLQDAGSDGQTPQQHVWLDWITVLGICRMGPHSVHDVSARVPVHISLVGPDKVRVSWITAADAPATVDYGTASGQYPFSATGNTTSYSYVLYHSGSIHDAVIGPLQPSTTYYYRCSGSASRDLSFRTPPAVLPFRFVVVGDLGQTGWTESTLKHVAAADYDALLLPGDLSYADFVQPRWDSYGRLVEPLASARPWMVTQGNHEVERLPLLEPRPFKAYNARWRMPYDYAADGTPPSDDNLFYSFDVAGGAVHVLMLGSYADYAAGSAQLRWLRADLAALRRRGTPPAFVLALQQGAPGGGRRHAGRHGGAAVPRRVDAVFAGHVHAYERFHRVYAGKEDPCGPVYVTIGDGGNREGLADKFIDPQPSISVFREASFGHGRLEVVNTTHALWTWHRNDDDQPVVADQKRSRTARLLGRGAVTGCLLLWSSGLRSSHLSSSGDRRSGSASVGGGSRQLGELAMWRGAEQSRCGRAGAAASGGAPGRRAVGSGHGAVGASCLGGGAEARCRRLWQLDQGNTSLCLENLLIMQENDRLRRKAQQLDQENKALLAELKQREQGTSASASTNLKQPK

SEQ ID NO: 57379 - protein, 230 aa, Zea mays
  Coding DNA Sequence Number=SeqID_14004
  Gene Ontology: Mol. function=nucleic acid binding; Biological process= metabolic process
  Homolog annotation: Hit_ID=Q5NKQ1; Match level="QueryCoverage=84%, HitCoverage=25%, E-value=1e-85, Identity=71%"; Hit description =Putative uncharacterized protein 9C20.4a
  Pfam annotation: Domain name=FAR1; Domain location=83-171; Score =72.5; E_value=1.4e-18; Accession=PF03101.6; Description=FAR1 family
MGGEKMSTTGAGDDILPITFVHKPAASAIAPYTEGVSVTPPAALRAPGHIEEHTKTADVPDNIDIRLIPKVGMTFSNVDETYNFYSQYAYEVGFPLKKYRERKNCKWLNCSMEGKNAERVAGNPRIRNTCSKRTQCKAGMKLKKIYDDAKENVISVRIDLVNYEHNHEFLKKDTEKGQLQCNKTHDREYMEFLSAMQESRIPQHCIMDFVTEMHGGPENVPITVQDMSNL

SEQ ID NO: 57380 - protein, 155 aa, Zea mays
  Coding DNA Sequence Number=SeqID_14005
MSTPVSQQDTQFTDTQGKHGDGGKNMPTNTNVTPKATPHIDPDAPIFDATPQIKIWEQLAHRTCPVHTGQSGAPFRPLARPRVARRFRDRPLARPTVGSPDSPVNFSRTPLANSRERPLRSRQPGAPDTVRCTTGQSGAPRLSGFLAARAKTFSI

SEQ ID NO: 57381 - protein, 232 aa, Zea mays
  Coding DNA Sequence Number=SeqID_14006
MRALEGQQLLEDDPTVVYLTAYLLTLDAQYDLLARHHRQMIARAEDAEKLNRKLHVDLTSAQARVAALESREAIVVEALKQAKDEHVQKLMKAYLVTHNQLQLRRAEDPQILEGHPVSIRGEKKAWELSEGAIVLEGIPVFPQAMDKKEHPESSQDPPPELFEPLTMKKILAPSLKVKEKAASTPPATPPSEELQEPVPREEEFDPVLPSQSLPEEVINISSLLTHPGDISD

SEQ ID NO: 57382 - protein, 730 aa, Zea mays
  Coding DNA Sequence Number=SeqID_14007
  Gene Ontology: Mol. function=oxidoreductase activity; Cellular component=endoplasmic reticulum membrane; Biological process =electron transport
  Homolog annotation: Hit_ID=Q53PZ7; Match level="QueryCoverage=60%, HitCoverage=95%, E-value=1e-174, Identity=66%"; Hit description =Cytochrome P450
  Pfam annotation: Domain name=p450; Domain location=33-452; Score=6.1; E_value=1.1e-13; Accession=PF00067.13; Description=Cytochrome P450
MEAAADAFPWAAQCAGMALLASSLCVVALALVLLLLRRWPWCSCHVCRAYLTGSWARDFTNLGDWYAHLLRESATGTVHVHVLGCTVTANPANVEYMLKTNFDNFPKGKTFAALLGDLLGRGIFNVDGHAWRHQRKMASLELGSVTVRSYAFGIIAQEVEARLLPLVASAADAGAVVDLQDVFRRFAFDTICKISFGLDPGCLEPEMPMSELADALDTATRLSATRGAAAAPLLWRAKRLLNVGSERELRAAIKLVDELAAAVIRERRKLGVAASGHDLLSRFMASAGADDDDRYLRDIVVSFLLAGRDTVSSALTTLFMLLSENPGVAAAMRAEAGDGGPAPPLTYEHLKRMHYTHAVLYENMRLFPPVQFDSKFCVGPDVLPDGTYVPGGTRAGLRVCLGKELAVTEMKAVAVAVVRAFDVHVVGDSGSAACKPKFVSGLTASISGGLPPPDPAAQALLLPRRLEARGRWCSCSTSCFNSNGGSSRRRMRFGGVAAFPAAMGHGQQVDYGEDAGGLGDSDAGGSEPEPPLERTRGGSGGGSKRSRAAEVHNPHSLCSQPLERPPEIRILSAATAAAMDASFTLSYSHHCPNLLSALDLPSGEAGTTSSALTRHPSGAPRSAATVAHAPATPRLCAAPPSPPFPVSPSKQAPAPDLQLVCRFPVSETPRVCNCRRWTMKRWIKEMEEDGRHGRHFQVSTAPPPPFLPPDSISLDPDTSFLGSISEFIDS

SEQ ID NO: 57383 - protein, 88 aa, Zea mays
  Coding DNA Sequence Number=SeqID_14008
MVSSVHKKQQNRSYTKFHEKTLDKLTDQPGNLIPINVAEVPDLSARGDNSDLAEDDPCDPTTTSKPEAPMQSLNQLPVVTDLADARSA

SEQ ID NO: 57384 - protein, 131 aa, Zea mays
  Coding DNA Sequence Number=SeqID_14009
MPFHLPSPQMGCTCVAFFLLLLEERDLVGVGALQSPLGFKDFHHAAGCSPPSAVTQDDDRRPRGGEERAGPWPPPYPQLQGRSSSVLGRRVRRIGAYLRVGIGPLLPLVIGGEGRPPSVVLAVAACLGSPA

SEQ ID NO: 57385 - protein, 539 aa, Zea mays
  Coding DNA Sequence Number=SeqID_14010
  Gene Ontology: Mol. function=P-P-bond-hydrolysis-driven protein transmembrane transporter activity; Cellular component=integral to membrane; Biological process=protein transport
  Homolog annotation: Hit_ID=Q2R237; Match level="QueryCoverage=27%, HitCoverage=57%, E-value=4e-40, Identity=64%"; Hit description =HCF106 protein, putative, expressed
  Pfam annotation: Domain name=IQ; Domain location=205-225; Score=25.0; E_value=0.00028; Accession=PF00612.18; Description=IQ calmodulin -binding motif
  Pfam annotation: Domain name=IQ; Domain location=247-267; Score=22.5; E_value=0.0016; Accession=PF00612.18; Description=IQ calmodulin -binding motif
  Pfam annotation: Domain name=MttA_Hcf106; Domain location=393-451; Score=54.1; E_value=4.7e-13; Accession=PF02416.7; Description =mttAHcf106 family
  Pfam module annotation: Pfam domain module=IQ::IQ::MttA_Hcf106; Domain location=205-225::247-267::393-451
  Subcellular localization annotation: CTP_CleavageSite=32; ConfidenceScore=5.44e-01
MDRRSMTPGISSRLSSPPPAAHPSPPPVAAPSATATPSHPPSPTPDAFTRLKESFGRLAEKWDQFVVMFHRYKERQRRNSKQRCSFRRQREGSWHAASSQAPRAATLEPSLQQRGITSPEKTAIPMDRRSMTPGISSRLSSPPPAAHPSPPPVAAPSATATLSHPPSPTLDAFTRLEESFGRLAEKWDQFVVMFHRYKEKTEKELQAAVRLQAAARGFLARRQVQSLRGEKHLAVASRATPRPSSHEQAMVRLQAAVRGFHVRRAVRKLHLLISSSLHQLAACASNHQVSSILFEPPAEVEIWVCSPPARPKRVVSLIRATALVLDRPKGWFLLHLSSNVKSAVQLFPWDPGGQEDIAAVQIYILVPQLFCIFVLNNKGKPRCKRLNLKSCQVARNLGKTLRAFQPTIRELQDVSREFRSTLEREIGIDEVSQSTNYRPTTMNNNQQPAADPNVKPEPAPYTSEELMKVTEEQIAASAAAAWNPQQPATSQQQEEAPTTPRSEDAPTSGGSDGPAAPARAVSDSDPNQVNKSQKAEGER

SEQ ID NO: 57386 - protein, 28 aa, Zea mays
  Coding DNA Sequence Number=SeqID_14011
MAGGIELAGAKERWLAGEERVQGNLAQL

SEQ ID NO: 57387 - protein, 93 aa, Zea mays
  Coding DNA Sequence Number=SeqID_14012
MEALPNNDQQPFEDLVMCDEKGVMRQWNEQRDKEEAELLHKLFERRKEAAEKYLYTSRFEYSLATREPERCRAGGGGINMTPSTHLGHHWEES

SEQ ID NO: 57388 - protein, 205 aa, Zea mays
  Coding DNA Sequence Number=SeqID_14013
MGRFLADLDTLVPSGVAKNCVGTDPVAKHGNRPPGEALCGGADAAPPPLHNFGRSAPGAGRSAIAQRVFSTKNPRTRLGTDLVEGESFKGLLQENNTIHPIPTTVPTTRVKLTTVCHDLPHVQPRAQQGAPPRPTSVLGLSLGLRRRSPPRPTSGLGLCLGLRRRSPPCPTSGLGLSLGLRRSLHLARPRPRTDYAIGDTSLPYP

SEQ ID NO: 57389 - protein, 576 aa, Zea mays
  Coding DNA Sequence Number=SeqID_14014
  Homolog annotation: Hit_ID=Q6JAD6; Match level="QueryCoverage=58%, HitCoverage=50%, E-value=3e-68, Identity=42%"; Hit description =Putative uncharacterized protein
TQVRMVRTKNVSAPGGGDDEDPPCPFRQVKGKTFYLKQQKCRKKRPGVDSEVHLSYLPGLLSLLTTSGRYIEEWVQVFYASMWIDSDHQWTRFRFEREDVTLHVSQIRQLFGFPESSTHLHSLCYGTSDPPRRPHGGVAPATAHVAALFIPLFPDGSQRSPADFTPVAKYLYQLSYVHYLYYIFAQLIRSPQFQGTLEASRLQFGSYRPAPEDPVPVPDSPVPSHLGRARSLLAKPSTACQPPFLRMNKSSKAEDEAFCQFETQGTAVAAADDDDDDDDDDFGIPPPPHVPPRSHDHEAGSSSAAPPAIDPALATILQSLTQQQAHLAAEQARQAKVQQQMSERMLSMFQTIQDHQDTLQQRLLADRAEHQAFMTHILQHTVFSSHLFSLPLLQLFRQRLCQRFRRDPHYLLLVLLPLLFGWPLWISRRRSSDPSVLSHQCHHRLLLPLLLSRGAVAEVVRRRGIGGATGHNPIQGSHEQHPSNHTKPHGPRTSSDSAHNWIDRVVTPSHGPRTSYNSAHSSKFMAWRGRKLVGLGREIRTGDLPRRILRHRFKQPEDGDNPDGLTPPGGDPRRRS

SEQ ID NO: 57390 - protein, 135 aa, Zea mays
  Coding DNA Sequence Number=SeqID_14015
MGEQEIRTVDWESNRAAHLQIGIGSMDGPRTPARRLDLLLLGRLLTGLGWDRSLPRHSRRAVLLLFSETLGTPIGDVWKTRGGEPLFESVSGLVSNEYRKEAHAPTPSAENGVARRWMHEGREKKKLNGEQGGGN

SEQ ID NO: 57391 - protein, 489 aa, Zea mays
  Coding DNA Sequence Number=SeqID_14016
  Homolog annotation: Hit_ID=Q10RM9; Match level="QueryCoverage=39%, HitCoverage=27%, E-value=7e-60, Identity=56%"; Hit description =Expressed protein
  Subcellular localization annotation: CTP_CleavageSite=19; ConfidenceScore=5.58e-01
MCTPSFSPSSDVPFVLPAFAMAGKTLTFSRPSRITPGAASDLTLLPLLTTFAPLNQKSRHLKTDGALFSILCVPSTKTDGDVALLHRCSALSLHQRRSTDARRAPPVGAGQIRSAVINLAHRVARASVGSPTAARPSPSAPGDPDRTRLLGLTTGSCPAAAEAPSVLLQAELKVQRAGGVRRRNSVTSYLSASRLPDVSNRGSQRLGEEEQHGTAAVARKAPVPSQPREIHGLLLQSMAAEHTVARSALVTSGDPPPSPIASADQFPSLALRDRRPPPVFPRLRRHFLKVGTTYQKWVQLQALDRSFLFPGEQVPILACLSASKQDLQVISPFRIAAVMSKNGTSMQNFTNKSSPVSANGHDNGAAGESGYQDVELNGEASPSGHDILETQSLLQMEDHKQQIEHVLRRFRESNFFVRIAESVEPLWSKKSVTSTTMADERSDNQGNSKSSRSNVYNTISDKGVFDGNTSGGVARDVVKCYSLQNGDIV

SEQ ID NO: 57392 - protein, 58 aa, Zea mays
  Coding DNA Sequence Number=SeqID_14017
MEKCKPIKAPMPINGHLDLDERGPISCLVSVCVLDFNQILRKLIFALLKEFLGILSTP

SEQ ID NO: 57393 - protein, 106 aa, Zea mays
  Coding DNA Sequence Number=SeqID_14018
MAAWGAARAGQARRAGLHDRESARRRLGERLAGGGARVWDAVLCALWPPREVAAGRERRGAGAGWVARPRAGVGRGVVAGPRPGERASWAGVARWWAAKSWPRKAG

SEQ ID NO: 57394 - protein, 121 aa, Zea mays
  Coding DNA Sequence Number=SeqID_14019
  Gene Ontology: Cellular component=extracellular region; Biological process=sexual reproduction
  Homolog annotation: Hit_ID=Q94KS6; Match level="QueryCoverage=35%, HitCoverage=15%, E-value=1e-14, Identity=88%"; Hit description=Beta -expansin 8 precursor
MNYYPVSKCHFDLSDTVFGRLAKPGLNDKLRPSGIIDIEFTRIHRRHWGFESSLVARRHVIWRPPDLCCRCDCDPFPNLKELKIEHGDQVIRFFEFYEIEDPEHLFGEGKCSLTHYVPFTL

SEQ ID NO: 57395 - protein, 128 aa, Zea mays
  Coding DNA Sequence Number=SeqID_14020
  Homolog annotation: Hit_ID=Q7XYE4; Match level="QueryCoverage=35%, HitCoverage=66%, E-value=3e-08, Identity=69%"; Hit description=40S ribosomal protein S9
MRIGLKMMKMKINKMSHLKRRTMIKGEMKRMKIRKMIKKYRVKDRHTQESTKQFNEITPSTPSLVTFIRGVGRQIVNVPSFMVRVEFEKHIDFSLSSPFGGGPPGRVKRKNQKKASGGGGGDGDEDEE

SEQ ID NO: 57396 - protein, 98 aa, Zea mays
  Coding DNA Sequence Number=SeqID_14021
MQSIIDHLQRLHSFLDRPTLQILQLEFSTSTCHPPTSMGGAASQALPAIFLEGLVSVGVAPPIEVKLFIEFRALFIVIRNIALKITIHPAGDKNATAA

SEQ ID NO: 57397 - protein, 108 aa, Zea mays
  Coding DNA Sequence Number=SeqID_14022
MSCFKVQLLKTQIIVCLGIGSNFRLSFSNLGFEAKGNCQGSPCLECQAAPSLAQVLRQAEEECDLWVAAGDKGISLLLAATQVLNGVEYRVKQVQEMQLNCDKAGYNC

SEQ ID NO: 57398 - protein, 141 aa, Zea mays
  Coding DNA Sequence Number=SeqID_14023
MDLDATAEEEERRFEDHNEAEDARFFIGFDDTHGDSIEIDIVVGSGIGTGTGSMSPPDSVPNPDAGGSNSNSNSKKRSKDWNDFDVLTKIVIVVKAGLDPIRTYLDDFRTAISFLNASNQHIAACKRYCMSIFGAIACNLV

SEQ ID NO: 57399 - protein, 604 aa, Zea mays
  Coding DNA Sequence Number=SeqID_14024
  Gene Ontology: Mol. function=binding; Cellular component=integral to membrane; Biological process=phagocytosis, engulfment
  Homolog annotation: Hit_ID=Q2QWZ9; Match level="QueryCoverage=93%, HitCoverage=93%, E-value=0.0, Identity=76%"; Hit description =Endomembrane protein 70 containing protein, expressed
  Pfam annotation: Domain name=EMP70; Domain location=62-562; Score =919.8; E_value=1.2e-273; Accession=PF02990.7; Description =Endomembrane protein 70
MLPSSGSGWGRGRGRHLLLSRALALAALLALASASESDHKYKTEEPVKLWVNKVGPYNNPQETYNYYSLPFCQPSENPTHKWGGLGEVLGGNELIDSQLEIKFLKNVEKGFICTLELDAKKVQQFADAIESSYWFEFFIGFVGESDKNSENKHYLYTHKNILVKYNDNRIIHVNLTQESPKLLEDGKKLEMTYSVKWVATDVSFARRFEVYLDYPFFEHQIHWFSIFNSFMMVIFLTGLVSMILMRTLRNDYAKYAREDDDLESLERDVNEESGWKLVHGDVFRPPRSLMFLSALVGIGTQLAALILLVIVLAIVGMLYIGILITKFPDRGMGTWRGAIITTFIVCYALTSFISGYVSGGLYSRSGGKNWIKAMVLTASLFPFLCFSIGFALNTIAIFYRSLAAIPFGTMVVMFVLWAFISFPLVLLGTVVGRNWSGAPNNPCRVKTIPRPIPEKKWYLTPSVISLMGGLLPFGSIFIEMYFVFTSFWNYKVYYVYGFMLLVFVILLIVTICVTIVGTYFLLNAENYHWQWTSFSSAASTALYVYLYSIYYYHVKTKMSGFFQTSFYFGYTLMFCLGLGILCGAIGYLGSTLFVRRIYRNIKCD

SEQ ID NO: 57400 - protein, 232 aa, Zea mays
  Coding DNA Sequence Number=SeqID_14025
MARHSVPTHINHPHRFPGNRKGLTALAYNASLTPTAVVQLWCWIWGYLLSSSLLRHEDVLSVSKGDSGGHSEVRLDGGDGRNRPVHERRRVFSSAASVPAKPRRSGSIQGHGELHGRVGWGWGKLDWPVYGGSGSGGRGHVARGQTAVNWTPVRLERARKSVTDAWEGFIGAGAGQGVGWPLARRGARAGVLWQAQGASNTWSLQSARVPQLTQVANVRILAKIRRGSTPGT

SEQ ID NO: 57401 - protein, 48 aa, Zea mays
  Coding DNA Sequence Number=SeqID_14026
SAFGKPNPSAKQLHGLEDMVDGVTWPTTLPPGWTVEWDAAPTGEEHEE

SEQ ID NO: 57402 - protein, 43 aa, Zea mays
  Coding DNA Sequence Number=SeqID_14027
  Homolog annotation: Hit_ID=Q7XBD3; Match level="QueryCoverage=67%, HitCoverage=5%, E-value=2e-08, Identity=93%"; Hit description=Zeon1 gag protein
MDEYIRANNDFRQRREEAYRFSEMTRGFGIYEAQKLPKLKSRS

SEQ ID NO: 57403 - protein, 123 aa, Zea mays
  Coding DNA Sequence Number=SeqID_14028
  Subcellular localization annotation: CTP_CleavageSite=36; ConfidenceScore=5.15e-01
MPSTLTCWGHWPIPKRVRRQPGPACKPATAACAHCVSHTGGAPTSSLTDRPHRLGSLLVGAATSATASSRVRGLDRGIRSYTPHFPALSHHPLLMPCKLFAITGRVSRIRRSSVLEHLRAYLW

SEQ ID NO: 57404 - protein, 49 aa, Zea mays
  Coding DNA Sequence Number=SeqID_14029
MARCMGSDQLRGKWVTRFMGKDVQPLQSVKLLKGGTYKDAEPRHVGPGA

SEQ ID NO: 57405 - protein, 421 aa, Zea mays
  Coding DNA Sequence Number=SeqID_14030
  Homolog annotation: Hit_ID=O40947; Match level="QueryCoverage=38%, HitCoverage=18%, E-value=2e-09, Identity=23%"; Hit description=ORF 73
MPTLDESDMAVRQTGGRDPHHGIQIFDAPAGGPQPAGVAPSAPVVAPSAPAAAPHPLDEGKGAASSSFAQGGTGGSEEERRRRLRRTDGSFVSDPPEASEDCWGTSGSSNNNSNNSSSSNSNGSNSRGRPASRVTGRSRAPRLPPPSAPKVAPPSLDSMPAGGSGSQQEASAGSGTGEPPTATAASTMAMPSSTPSVAAEEVPATPTPAMEGDAGGASSSIPPPTPKETEVVFGRRLQSGAEPEAAPVPLLQVLSRAHQALHETEAAIQQEWEALESEHQRLSDWRTQLEERTKAASHQFAFERSELARDRKDYKKDLQKVYALELEVSRKEKMLAKREEALNQREALMTELRAKLKALDQTLEAQRTQQVEAIEKIKKWEQELEDKASDIALAEENLKAKDASLDRRVTDLARREADLAF

SEQ ID NO: 57406 - protein, 53 aa, Zea mays
  Coding DNA Sequence Number=SeqID_14031
MQEACNRTTVVHPFGFIASGGDRERGYLKRDPSPRRKRAPSPPTDQGFEGWPL

SEQ ID NO: 57407 - protein, 283 aa, Zea mays
  Coding DNA Sequence Number=SeqID_14032
MMTTSFVVGRSKLGCGLCPALSFKDVHHPGWGGGRTESGFYLPHGPAGRLFLQLSGDRALTGLAEGANFDNAGPVSCKHRQLQRAWLAGSAGSVAASDAASCRLIRAWPSVHHTGDCCAVRTRGSSKTSYAAWAAFVFLDCLVLTPARRLRAEVVAVVGAEVVVARGGFSADETVGATRGQTSGSLSLMACPRPSSGDPPKAEVVVAADGAVAGKLPRVLLSRRPSGVENLRPLCDELKPEAAVSAWIEAESARKEASSARGHVASLAEEVRQRRLELGQVVR

SEQ ID NO: 57408 - protein, 37 aa, Zea mays
  Coding DNA Sequence Number=SeqID_14033
MAAPRVLIPRLSPILGENRLTERADEFCSMVPTGVHM

SEQ ID NO: 57409 - protein, 136 aa, Zea mays
  Coding DNA Sequence Number=SeqID_14034
MKIAPRARQVYPCPSSRLGLFLDISMQKYLFSWWVVYNANPRECLYTPGEDEYRFVYLEQVDEDVVKVEEVSEGVVQEPVSGHFFEQQQTSRAIERCTWRQGALFYSGLVYYPSPDSRALSDSHLLLCSALSAQSG

SEQ ID NO: 57410 - protein, 273 aa, Zea mays
  Coding DNA Sequence Number=SeqID_14035
MGQRTLAFTKLLIRDFLCNFLGKHRLLVVYVKRRGIRLLRPSDLKRTARIRSCGRARERAAAWATDRRDRAGSAGRGQADRRGPTGRETGAARSGMNGGDRGDLSGREGWGGHGESSGGVWVGAEAPEGGGSRRSGSAAGLLYSGEELHAAESKTKVDRGGRGPLPQGGLRGLLGGGNGATVVRGDDVGAELTGAKGTVELQRRRGTELGMAGVMAAALCVRAARGEEGLLERKWGRGRGRVGLGAQVARGGSVASSTRDVGAGKAGARSSAA

SEQ ID NO: 57411 - protein, 82 aa, Zea mays
  Coding DNA Sequence Number=SeqID_14036
MALLSTVETCSASTLNWCCLTALVVRWGRKTSRGCHKTGVHAEVSGTGAESRRERGAIIQVTTLRALSPQLGDLSASPTQLV

SEQ ID NO: 57412 - protein, 83 aa, Zea mays
  Coding DNA Sequence Number=SeqID_14037
  Subcellular localization annotation: CTP_CleavageSite=21; ConfidenceScore=5.44e-01
MPHLLAPSLVPSAHAHQSFPRAARKPPSLTKDLTVSLLPFKGPGVFSRDNEQPVVPECVAEDLPEQQPGEGKCPLTYYVLHTL

SEQ ID NO: 57413 - protein, 283 aa, Zea mays
  Coding DNA Sequence Number=SeqID_14038
  Gene Ontology: Mol. function=protein binding; Cellular component =peroxisomal membrane; Biological process=protein import into peroxisome matrix
  Homolog annotation: Hit_ID=Q10CE6; Match level="QueryCoverage=91%, HitCoverage=98%, E-value=1e-39, Identity=75%"; Hit description =Expressed protein
MDVASVMYIAYILRNQNIEVSPSGNPPPKPWERAGNSSGPVPFKPPSGGSTSDVVEASGTAKHGEVVSAAGNNVASNVNSTISMPVPPRPWQQQGYENSYGGYGSNMYSSYGGYSGPYGNNMYSGYGGGYGGMYGGSGMYGGPMYSGGMGGPYGGYGMGMSPYNQGPNSFGPPTPPPGFWVSFLRVMHGVVNFCGRVSFLVSQNTQAFHMFITALLQLCDRAGMLYGELARFVLRLLGIKRKPKKSGVKGPGAPSSEGRGQQLVEAPKVNSWDSVWTENGKGN

SEQ ID NO: 57414 - protein, 57 aa, Zea mays
  Coding DNA Sequence Number=SeqID_14039
MNQLDSFLIRDTLVQVVMRKRRFGYDYGAGCQHCNHCSGEDEAVEGDFQEFQDYDEF

SEQ ID NO: 57415 - protein, 140 aa, Zea mays
  Coding DNA Sequence Number=SeqID_14040
MVTMSTESSDAPVIFLWEIAHVISVDVLHALGTYVRPLYDTRRVSEPPRACYYIIHMHIRVLDAGDRRFRTLSSHESLTSLSTYAASVSNAAWRALWSLSHTYGCSCTTRRTGTFPYVPVEKARQVLFQVKLEKIALPPL

SEQ ID NO: 57416 - protein, 31 aa, Zea mays
  Coding DNA Sequence Number=SeqID_14041
MAIGDVRPQEQQEQDQPSSSTMVLPLTQTVN

SEQ ID NO: 57417 - protein, 304 aa, Zea mays
  Coding DNA Sequence Number=SeqID_14042
MSRAFDDYYIEDCGVILAPEVTQRRIDNSDQFVILATVRDLSAKAGGPDSLGADSKEQEPVPWGGLEPVWPLSLVPYLKACTLHHSVMGTLVFGAISPVGLATWGPELENGHLSPREVRSRVAAQPGSVPWACTLHHSATGGGSYGYAGLQPQQIEPTSQGAKYKLPDASGVELEVRGRCPCGILQDSVTAVMAASMRVPLRRGPRPRSPTGGNNEAIKAKELEARPQVALVVSPAEATMSAPGSLTSGSDHLCNGQPPPAEATTSATDSHRQRRRPPLHRWLTGDGGCLSACRKVLAPDLLWG

SEQ ID NO: 57418 - protein, 232 aa, Zea mays
  Coding DNA Sequence Number=SeqID_14043
  Gene Ontology: Mol. function=kinase activity; Cellular component =cytoplasm; Biological process=phosphatidylcholine biosynthetic process
  Homolog annotation: Hit_ID=A2WLF7; Match level="QueryCoverage=93%, HitCoverage=99%, E-value=8e-52, Identity=74%"; Hit description =Putative uncharacterized protein
  Pfam annotation: Domain name=Choline_kinase; Domain location=77-223; Score=-31.8; E_value=0.00017; Accession=PF01633.11; Description =Cholineethanolamine kinase
MAAADPPPRGEAAPALKRSASIDRIPADARRILHRLAGDLWGGDVDPGALAVSQLRGAMTNEVFRITWPGGEAEGNGPRKVLVRIYGRGVEVFFDRADEVRTFECMSRHGQGPRLLGRFANGRVEEFINARDYEYASFNPVAFDIANHFYTGEQRRFVEAYLSSAGKKPTDGEVEELLGLIAKYTLASHLFWGLWGIISAHVNENIDFAYKEYARQRLDQYWQTKPRILGPK

SEQ ID NO: 57419 - protein, 45 aa, Zea mays
  Coding DNA Sequence Number=SeqID_14044
MGECQTPGYTVRTFEGCETARVSSQTFIAQQVVGNNVHELAKGGR

SEQ ID NO: 57420 - protein, 46 aa, Zea mays
  Coding DNA Sequence Number=SeqID_14045
MEEDMEVTEEEERGVVDSDVEGFNIALADLDPVQERVKIFHIPLQS

SEQ ID NO: 57421 - protein, 156 aa, Zea mays
  Coding DNA Sequence Number=SeqID_14046
  Gene Ontology: Mol. function=oxidoreductase activity; Cellular component=intracellular; Biological process=electron transport
  Homolog annotation: Hit_ID=Q94KE5; Match level="QueryCoverage=47%, HitCoverage=10%, E-value=3e-16, Identity=60%"; Hit description =Cytochrome P450-like protein
MKPRSTDSTPLEVVSPSSVLTGNLDWKRDIHDEAVNKRRCTTKKPYFRSTVGASLEVIQKNKAEKPDVCGVEDYSVNVEHVLKTNFTNYPKVNMSNSVMFSLARCCAKGDMYRSYMDLLLGEDIFNTDDELWRKQRKTTIFKFTSKTLRLSVGQRW

SEQ ID NO: 57422 - protein, 67 aa, Zea mays
  Coding DNA Sequence Number=SeqID_14047
  Gene Ontology: Mol. function=homocysteine S-methyltransferase activity; Biological process=methionine biosynthetic process
  Homolog annotation: Hit_ID=Q9FUM9; Match level="QueryCoverage=79%, HitCoverage=15%, E-value=3e-15, Identity=75%"; Hit description =Homocysteine S-methyltransferase 2
MGSFQKPLSKTKELTGVSDGDFVSYVNEWCIDGATLNWSWYRTTPNIIRAIHRTLNQGSNEQQLPLA

SEQ ID NO: 57423 - protein, 239 aa, Zea mays
  Coding DNA Sequence Number=SeqID_14048
MAEERQPPRGCAPLTAVRGKQDHRHHHECKLSDGHVKNGTQPHHIGQVQGCHVARKGGASQSSPLGPDLRRTPDPYTYKLRAPKKARQVPWEGSSPPLSKVRALARSRDGKDPGIRGRGPVLARVQALPCASCYWRKACDISQRAKIDVKPTKPCSLYIYCRKDAPPATTLIGDVSSQHLIRPVQSDGRRRQGHPAGGAPDWSVGKQCACAEQRTILIIPSTRSLPCTLRIRRSRVSGH

SEQ ID NO: 57424 - protein, 202 aa, Zea mays
  Coding DNA Sequence Number=SeqID_14049
  Subcellular localization annotation: CTP_CleavageSite=2; ConfidenceScore=5.59e-01
MSSSSLMRRVFPSSKPPDGGYPPSFRLLVGGTQLRGSWYLSAIVRLQGFSSRSPVASLRWWSPETVTTSFWVGRSNPGCDLGPTLSFKDVHHPRWGGCRAEPALYLPRGFAGHPLPRRSRERALTGPAGEADAPLVWEDLSGDLLGGLVAPAISAEAEAAREVPVTDGITATIRAPGLRFFVLVLAPRASVWARARSQQRPP

SEQ ID NO: 57425 - protein, 68 aa, Zea mays
  Coding DNA Sequence Number=SeqID_14050
MAGLSFPPVVLCANGQHRHAWPEATAGLATGTGGRARDAARPDQPLPAQPEPTSVLPKRWWQPCVHAV

SEQ ID NO: 57426 - protein, 190 aa, Zea mays
  Coding DNA Sequence Number=SeqID_14051
MVRARCTRNNRQCLQVRAAWRCVTLYVLIILSACKNRHDAIRIMLWRSALCHQYYASEYSEEEFSSESEGSPAPIPLRESSDDSDDSQGLAAEVWTYIRAVERSGLEGSDESEYSSDEEDSDGGGEDEDSDDDDDDEGGGGGDGDGSGRGGSSGSKDGDGSDSRGGSGGGGNSRDSNRGGSGGGGNRASG

SEQ ID NO: 57427 - protein, 98 aa, Zea mays
  Coding DNA Sequence Number=SeqID_14052
MVGPFSCYAARGPRGGMERVQGSFQGAPYTSRHYGPKAQRVSGTHSGKPDGVTYAGYHADTDEKKRDKFRRGLSTKLRDHLNTVRANSYNELVNMAIS

SEQ ID NO: 57428 - protein, 143 aa, Zea mays
  Coding DNA Sequence Number=SeqID_14053
MWKDRVEHAKDIWAIYPGQTAHLTVRCMNALYHLQVMRGEAMSHLMALLEATKITLDNMEELVVDLSTEMVEKDLQMAGRARRGQNERVPPPPPPPPTLQELMAQHNEILRQLAQRQQPPQHYGGGDHQRHPAAATYQEFLST

SEQ ID NO: 57429 - protein, 279 aa, Zea mays
  Coding DNA Sequence Number=SeqID_14054
PLHGGGFTGALESGQFERQTPIRPTLARFETSRTQFTPQFQSLHNADPRSTVLRDIGRPTVLRCEIPGAHAEVSARRYFHCLLTTPEKGVGANLDAPAVAEARSHGAAEAVHDGEQFPMRHPGIRGRGKKQGSGAPPHWFRSRVEPPASARTVMAQIDMATKHTHRRGRAAMAWVPGGCGVGFIPRRCPESERVRAARSAEVVELAPTESAAADSRTVRAMRGLLRGRRRPDDAGPARQPVRAESTAGFRGALDERLPTWGPHAGMLVGGEETGLVTAR

SEQ ID NO: 57430 - protein, 95 aa, Zea mays
  Coding DNA Sequence Number=SeqID_14055
MAGGIELAGAKERGLAGEDKRGVKLGTGSCSVTKVPVSECLVPRLNCAKTVSNEFGLSSNFSRTCSRGFGTTLIFGSPSFEFRKTENVVDLWKEV

SEQ ID NO: 57431 - protein, 154 aa, Zea mays
  Coding DNA Sequence Number=SeqID_14056
  Subcellular localization annotation: CTP_CleavageSite=7; ConfidenceScore=5.06e-01
MPAWFPVCRRGSQRPRQSFPCLCHGLPPLGQGQRGCKQLLRPSQRRGVGGREATPVAPRRWIVCLDPPIGAEKASSQKLQRTAGGAEETGSQAQGTQRRISPPPSGPPPPQPPPPSVPPPPTAPGDDLPQGHHHQQQQQQQQQQKQRSPNFQGR

SEQ ID NO: 57432 - protein, 118 aa, Zea mays
  Coding DNA Sequence Number=SeqID_14057
MAEALAAMAGGIELAGAKERGLAGEDERGVKTCSRGFGTTLIFGSPSFEFRKTENAVDLWKELKGGTYKDTEPQHVGPGAKWREYTIEVSHASNAWAISRHRNVHSPYNIDMSRLLPW

SEQ ID NO: 57433 - protein, 291 aa, Zea mays
  Coding DNA Sequence Number=SeqID_14058
  Pfam annotation: Domain name=Vicilin_N; Domain location=90-207; Score= -73.8; E_value=0.095; Accession=PF04702.3; Description=Vicilin N terminal region
MPSSTPSAAAEEAPATPAPAIEVDAGGASSSNLSPTPEETEVIFGWRLRSGAEPEAAPIPLPQVLSRAHQALQETEAAILREWEALEAEHQRLNDWRTQLEERTKAASRQFASERSKLEWDHKDYKKDLQKVYARELEVAQKEKRLAKKEEHLDQREEVVTELQAKLNAFNKFLEEQWVQEEMFERQEKLLADHELEAEEKERALEERVCQFERIAAWAGEASTTLMPLGMSPILVSRLPTSISAVLPVLDSAADRLRRLDQADTEDTAREGVQDTVEVVAERFQRDPVDD

SEQ ID NO: 57434 - protein, 177 aa, Zea mays
  Coding DNA Sequence Number=SeqID_14059
MAQPMTWGPRPTSHTPWALVPECRKSEPPLAPVLRLLGAAAEDREDMAVGMTRGGLTVITSANAWKRRANRQSSFSPTCRLVSSPEVDPGAIVSTLKQGALTAGSRDSETKNTQALIKARRGSGADTCPDHAVYASTPRSGGDPMLPRGLLPVTRDISISYGLRTLRRLEIAQALLA

SEQ ID NO: 57435 - protein, 283 aa, Zea mays
  Coding DNA Sequence Number=SeqID_14060
  Homolog annotation: Hit_ID=Q6JAD6; Match level="QueryCoverage=84%, HitCoverage=43%, E-value=2e-73, Identity=78%"; Hit description =Putative uncharacterized protein
VLQRPGYVGSNTYSWSLGYLLRGTLQRQIYSAPGYRKSFFRDQIYVEEWVRVFYASVWIDPDHQWMRFCFEREDVTIHASQIRQLFEFTESSTRLHSLCYGTSDPPRRPHGGVAPATAHVVALFRPPFTDGSRCSPAYFTLAAKYLYQLMRRTLLPRMGYREATTHIQLWLLGALISYSEFDVVDFLICEIEDTGTTVPDDDDDDFGIPPPPPVPPRSHDHEAGSSRAAPTALPTVDPALAAILQSLTQQQALIASEQARQAAEQARQTAVQQQMSERMLSLF

SEQ ID NO: 57436 - protein, 249 aa, Zea mays
  Coding DNA Sequence Number=SeqID_14061
MELRLESAHKGGDGALARADTTAALPFERMRESMEFLEVGHADDIWWEGFVLHLESFSNGQKTSAFEWSGERKTLRAIGSTGTTTRFTGRMGKKPSKHRDLSCGVKTSVFEWSGERKTFRATCSIGTTTWFKEGQGKKLSKFRDLSCGMVMWPKETPDMHQHLIYRIASELGTYWLVIDGNSATSNEQKTSTFEWSGERKTLRAIGSTGTTIGFKEGRGKKLSKHRDLSCGVRMRESMEFLEVGHAVGV

SEQ ID NO: 57437 - protein, 24 aa, Zea mays
  Coding DNA Sequence Number=SeqID_14062
MGFPKLEADFCRYRQRHIVEHAIK

SEQ ID NO: 57438 - protein, 170 aa, Zea mays
  Coding DNA Sequence Number=SeqID_14063
MAPHLRTLPKISGRDSFKGEGCNTPEEHLHVFDAFWARQSTPAPDPACPAQSSRARVSARARTYKSPSRVDCTPPRTLNLTGARNHRRLPHARRARGHPSPCHHRPANRAFPSYARPLEETVHASVKLPEQGIGLCFAGEASPRSSYFARPSVNVDRPLRHPVELIVPFD

SEQ ID NO: 57439 - protein, 328 aa, Zea mays
  Coding DNA Sequence Number=SeqID_14064
MATSGLMVGESEPGCGLCPSLSLKDFHHQGWGGESAELGVPGLQPRVASGPLAAPASATAAGRGSSAGAVAGAGHELTSNFSAFCPSLPHKFWHGRGPPGSGIHPEVSAAAVRPPGAEVVVVAAAGAGDGVSFVGLPLLRRSSPSEWGCSHLRRGNRSSVCNGTSNASVFCLLWLSGPEHESLGPFGLVVWGSSSLAKETPRPPFDGPRPGPTPKSISRGLGSGWRPWKPVGRGPRGNRPSRLLGSDSRRSPWTASPSEAGSDFAEDVVDAEGAMAPFSVKTRACRIRSSCSKVMSEVSVSRRRRSPSARSALAAYVYSVVSRIRFPK

SEQ ID NO: 57440 - protein, 239 aa, Zea mays
  Coding DNA Sequence Number=SeqID_14065
  Homolog annotation: Hit_ID=Q6QP51; Match level="QueryCoverage=20%, HitCoverage=22%, E-value=3e-14, Identity=75%"; Hit description =Putative growth-regulating factor 1
MQAACNRTEGAHPFDFDASSMEAQAHTSCNWRASYYVRETAPLLALVPRLLDYGTGAATRGDPAHDPTVPTEHIGHGSVSRGRRRDGRYGQKWAGSNGGGRRAEAAVKSSASSRPLLGQRENPLPRREDDAPMFRSSNGSRTHNGCPANHSSRRVNSGQDRRHLWDRERGYSERDPSPRRKRAPSPPTDQRFEGWPLRRVQQPPQSTRAPRPLLVRGSKAGPSEGFNGRLRPLRLRAHY

SEQ ID NO: 57441 - protein, 110 aa, Zea mays
  Coding DNA Sequence Number=SeqID_14066
MIPSVENAVNKLQLWSKFLEAQQCNSSKCCELSEVRWTRTTVGGPNDLGGSVTTTTENPCLSPVDCSILEIERSIAATVLDYFKKVYGHVEPLLKWSNMDLERETQSCLA

SEQ ID NO: 57442 - protein, 77 aa, Zea mays
  Coding DNA Sequence Number=SeqID_14067
MVENFGSKTVQIAVNAVVTSHLLVCLYSVADCNLADGEYILVPEQGAAQEVAPDPAPEPAPEDLPATALEGKPRFYA

SEQ ID NO: 57443 - protein, 120 aa, Zea mays
  Coding DNA Sequence Number=SeqID_14068
  Homolog annotation: Hit_ID=A3A9U0; Match level="QueryCoverage=73%, HitCoverage=36%, E-value=2e-30, Identity=75%"; Hit description =Putative uncharacterized protein
SPCRPEFEGSAENEFIERNQLQKSEPNNDLGLDIGGAITRVLVGTRPLLFLIITNITIVFTLLMENKDPNVKSRPVGANLGSADSLGQMLEIGLLLQKALGALLIDCSVCAVIMICFLGF

SEQ ID NO: 57444 - protein, 292 aa, Zea mays
  Coding DNA Sequence Number=SeqID_14069
  Gene Ontology: Mol. function=DNA binding; Cellular component=nucleus; Biological process=regulation of transcription
  Homolog annotation: Hit_ID=Q94CW0; Match level="QueryCoverage=97%, HitCoverage=96%, E-value=2e-77, Identity=57%"; Hit description=NAC transcription factor-like protein
  Pfam annotation: Domain name=NAM; Domain location=5-142; Score=168.4; E_value=1.9e-47; Accession=PF02365.6; Description=No apical meristem (NAM) protein
MAVGLPPGYRFYPTEEELICFYLRNKLDNLRDDIERVIPVVDVYSVDPCQLPGIHELLCDGGAGAGEGEPWFYFCPRQEREARGGRPSRTTPSGYWKAAGTPGAVYSADRRAIGVKKTMVFYYGRAPSGTKTKWKMNEYRAFQFETPGPGLGLAAAGVAADGSSSSSAHHAADGPAPPPNVGPQLRGEFSLCRLYTKSGSLRQFDRRPLAATGGVVVPGEDPAGPFTAVAASPPDDDDGSGSSMQQQQQQLTGGGANNDPYGDGVVTEREDAHDPFGDDVAMLDALLYWPGD

SEQ ID NO: 57445 - protein, 755 aa, Zea mays
  Coding DNA Sequence Number=SeqID_14070
  Gene Ontology: Mol. function=hydrolase activity; Cellular component =membrane; Biological process=phosphatidylcholine metabolic process
  Homolog annotation: Hit_ID=A7PPA8; Match level="QueryCoverage=35%, HitCoverage=87%, E-value=1e-104, Identity=62%"; Hit description =Chromosome chr8 scaffold_23, whole genome shotgun sequence
  Pfam annotation: Domain name=Abhydrolase_1; Domain location=96-316; Score=13.1; E_value=0.00045; Accession=PF00561.11; Description =alphabeta hydrolase fold
  Pfam annotation: Domain name=Glyco_hydro_9; Domain location=386-701; Score=-198.9; E_value=5.7e-05; Accession=PF00759.10; Description =Glycosyl hydrolase family 9
  Pfam annotation: Domain name=PGAP1; Domain location=57-237; Score= -85.4; E_value=0.04; Accession=PF07819.4; Description=PGAP1-like protein
  Pfam annotation: Domain name=PPR; Domain location=359-393; Score =19.9; E_value=0.0093; Accession=PF01535.11; Description=PPR repeat
  Pfam module annotation: Pfam domain module=Abhydrolase_1::Glyco_hydro_ 9::PGAP1::PPR; Domain location=96-316::386-701::57-237::359-393
MAASLRASSSLRSRLLSFSSGCSLCPWRLLLSSPVHSDAPHQTETLAFDEIQLSPEKPATATAFVLHGLLGSGRNWRSFSRALVSELRNRSPSDEWRMVLVDLRNHGRSAGIKGLGPPHNISTAAKDLADLVKARGWPWPDVVVGHSMGGKVALDFAESCSREQLWVLDSVPGQVETENSDGEVEQLLRATRWVVDHMLSLGFSKSLSEWIGSNLKKDNDHVTWAFNLQAAIDMFSSYRERDYWSVLEHPPKDLEIAIVQAEHSDRWVPDDVQRLKALAGRESKPDVGKVSLHVLPNSGHWVHVDNPKGLLEIMELRGFQAITYYQAIINNSLVDLYVQCGTVEFARHAFDRMPERHLASWNAMALALANHGRGKDSLDLFNRMTRVENVVPNAITFVAGFSACNHGGLAMAAMGATASPLPSLFPTGQRHTLLKHRLHPQPRGPRRRGRQGHRRAELWVHVGDDDSDHYCWQQHVDMTTSRRASEVDADHPGSEVAAVMAAATAVFHWAGDAHYAHLLLHHAQQLFDFANTYRGRYDAALQVLGLHPDHGLVNSFHAIRLLLSTEYYISTMLTYVARVSLMVTVASQPASISIDAQGMFDEMQQSDTSVAIAHTAFNSFFNTEELDRWLESCDEQGELVGVNKIHVKPQFFDVGKDCNWARGIRRTEIQLADGKNCELHRCWTDILDAISKAQHLIYITGWLTILVRDDSNSVDLLTKEGLLTTHDVEIAKGEQEIMNEVLPAESRIAVPVDAR

SEQ ID NO: 57446 - protein, 276 aa, Zea mays
  Coding DNA Sequence Number=SeqID_14071
  Homolog annotation: Hit_ID=A2ZZS9; Match level="QueryCoverage=86%, HitCoverage=84%, E-value=1e-46, Identity=48%"; Hit description =Putative uncharacterized protein
MPQVDLESLVCGVSGAGAGAGDRKVSCETVIAGGSGDASPPPDPDLPPESITIPIGDDAAFSELNPIYERDDSTKGSTNPKFAAAAAVANPVAAKTRSNSTRVAGAPPPPAAGTTFFGLPARIRPTFTRRRPSQGRILHGKRAGGGGGGGGEVEPRSPKVSCIGKVLSDRERHGRRRRGWWYGVAAMFRCDGCARVPGGASRKKVALEDDAGRRRQQQQQPGGIAGMRRFKSGRRAASWGDEALAAAATGADPDEGEEEEEPDSKDAVQWSRRPVT

SEQ ID NO: 57447 - protein, 287 aa, Zea mays
  Coding DNA Sequence Number=SeqID_14072
  Gene Ontology: Mol. function=hydrolase activity, hydrolyzing O -glycosyl compounds; Cellular component=vacuole; Biological process =carbohydrate metabolic process
  Homolog annotation: Hit_ID=O04139; Match level="QueryCoverage=90%, HitCoverage=89%, E-value=1e-118, Identity=76%"; Hit description =Basic class III chitinase OsChib3b precursor
  Pfam annotation: Domain name=Glyco_hydro_18; Domain location=23-274; Score=159.4; E_value=9.5e-45; Accession=PF00704.19; Description =Glycosyl hydrolases family 18
MALAMATVLMALGGVAATARAGGGIAIYWGQNGNEGTLAQTCATGNYRRRALNLAGHCDPASGGCTGVGADVKACQRMGVKVLLSIGGGVGSYGLSSRADARSVAAYLWDNYLGGGGSESRPLGDAVLDGVDFDIESGGGMYWDDLARFLKSYSRRGRGRARRPVYLSAAPQCPFPDASLGTALATGLFDYVWVQFYNNPPCQYSASAGVGSLAQAWAQWTSIRAGRVFLGLPAAPQAAGSGFVPASDLVAQVLPVVKNSTKYGGIMLWSRYYDGLTGYSDAVKSYV

SEQ ID NO: 57448 - protein, 338 aa, Zea mays
  Coding DNA Sequence Number=SeqID_14073
  Gene Ontology: Mol. function=kinase activity; Cellular component =ornithine carbamoyltransferase complex; Biological process=amino acid metabolic process
  Homolog annotation: Hit_ID=Q6QP54; Match level="QueryCoverage=25%, HitCoverage=24%, E-value=1e-11, Identity=54%"; Hit description =Putative kinase
GNDGASCDVVGPSPRLGEVEAPSRSRSSLSSKAEVESEPLGRARQRPSAEAGAESEPWGRAKRSSSSSGAEPESEPWGRAMRSLSSSGAEPESEPWGRAKWSSSSSGAEPESEPWGRAMRSSSSSGAEPESEPWVGRSGVRHLLGLSPSLSPGSGEAELPMALEARLGCCQPHSVEWHSSRSGTGGTVFLSGRSVERRNDYDHFGSVDWRACVRIKPRLLLGEDWASGEPKVCPLLEEGLGRDLCADGGYQLRFRSLEDFDICHDLHGLIIEEHVPHLPVLVPSYIVSHQVELQVDDELDVVTAPLSDAVPRTTRESLALTMTMRSPCLKMDSAVQPL

SEQ ID NO: 57449 - protein, 80 aa, Zea mays
  Coding DNA Sequence Number=SeqID_14074
  Gene Ontology: Mol. function=binding
  Homolog annotation: Hit_ID=A3BFY7; Match level="QueryCoverage=95%, HitCoverage=7%, E-value=4e-33, Identity=88%"; Hit description =Putative uncharacterized protein
  Pfam annotation: Domain name=TPR_1; Domain location=35-68; Score =18.0; E_value=0.036; Accession=PF00515.19; Description =Tetratricopeptide repeat
MGSDRAELARLCSARNWSKAIRLLDSILARSPSSIHDLCNRAFCYSQLELHKHVVKDCDRALLLDPALLQAYILKGSLRL

SEQ ID NO: 57450 - protein, 350 aa, Zea mays
  Coding DNA Sequence Number=SeqID_14075
  Gene Ontology: Mol. function=binding
  Homolog annotation: Hit_ID=A3BFY7; Match level="QueryCoverage=99%, HitCoverage=37%, E-value=1e-172, Identity=81%"; Hit description =Putative uncharacterized protein
  Subcellular localization annotation: CTP_CleavageSite=47; ConfidenceScore=5.03e-01
MAGLAAIEIAQKVSKAWRFLRNPKNIAKLVRKRDKLNMSQNRGGYCSTSTLAGSPTSSPNEDRVSSGISLSWQDVYNIAVKWRQISEPCDPVVWVNKLSEEFNSGFGSHTPMLLGQAKVIRYYPYYQRVLETAKTIMLDLKYVNNAEDRAIFLTDIDKLKKIEIASSCSDLYHVVGETYWVATRCDSMAFRGGKTGFDFAIRTPCTPSRWEEYDEEMTAAWEAICEAYCNDTNPTRDPGVLDAVKDAILRMTYYWYNFMPLSRGSAVVGYVVLLGLFLAANMDITASIPPGVQVDWEAILSPDPGTFVDAVKPWLYPSTKISRCLKDYTDVSCAFSTTGSVVAALTSVDP

SEQ ID NO: 57451 - protein, 279 aa, Zea mays
  Coding DNA Sequence Number=SeqID_14076
MWRLGDVRYPGESSGSRGGEKSERAVVPSLATSIHLGEGASRRGSSAEPGKLGSKRPCSSGSGGGPLSVVGGKEVAHEETEIQGSGATVGFRRRRTAIAKKLRRSTAPTKEGAQKRKRISSPPSSSSSTSSGAPHPKRKRSRVYGYANTHSMLVGFIDQLTMDSKNAKLRRALAHLIRVVEERCADIVDVVHGAFQPVSGPVLNEMNRALVQIEDLANDLDQLALEKDWEMEHMTPTPIAESSQTEDELLIDYDSELNNDDIVGYDDGRDYSTDDTYPY

SEQ ID NO: 57452 - protein, 454 aa, Zea mays
  Coding DNA Sequence Number=SeqID_14077
  Gene Ontology: Mol. function=binding; Cellular component =intracellular; Biological process=protein amino acid phosphorylation
  Homolog annotation: Hit_ID=Q7XHN9; Match level="QueryCoverage=73%, HitCoverage=32%, E-value=1e-125, Identity=72%"; Hit description =Tetratricopeptide repeat(TPR)-containing protein-like
  Pfam annotation: Domain name=TPR_1; Domain location=190-223; Score =11.1; E_value=0.25; Accession=PF00515.19; Description=Tetratricopepti de repeat
  Pfam annotation: Domain name=TPR_1; Domain location=224-257; Score =24.9; E_value=0.00029; Accession=PF00515.19; Description =Tetratricopeptide repeat
  Pfam annotation: Domain name=TPR_1; Domain location=258-291; Score =40.5; E_value=6e-09; Accession=PF00515.19; Description =Tetratricopeptide repeat
  Pfam annotation: Domain name=TPR_1; Domain location=292-325; Score =18.2; E_value=0.031; Accession=PF00515.19; Description =Tetratricopeptide repeat
  Pfam annotation: Domain name=TPR_2; Domain location=190-223; Score =15.6; E_value=0.19; Accession=PF07719.8; Description=Tetratricopeptid e repeat
  Pfam annotation: Domain name=TPR_2; Domain location=224-257; Score =24.2; E_value=0.00048; Accession=PF07719.8; Description =Tetratricopeptide repeat
  Pfam annotation: Domain name=TPR_2; Domain location=258-291; Score =35.3; E_value=2.3e-07; Accession=PF07719.8; Description =Tetratricopeptide repeat
  Pfam annotation: Domain name=TPR_2; Domain location=292-325; Score =13.3; E_value=0.66; Accession=PF07719.8; Description=Tetratricopeptid e repeat
  Pfam module annotation: Pfam domain module=TPR_1::TPR_1::TPR_1::TPR _1::TPR_2::TPR_2::TPR_2::TPR_2; Domain location=190-223::224-257::258- 291::292-325::190-223::224-257::258-291::292-325
KALSSLDKKEDALAAWKQGYEIAVRDTTDLKQLLDLEELVSSVKICGTTQSADHVMDASTCDTKVVISEDRVADTSFAATTMADTKTVVCEEAIGSSKVSSNGDTKLTNYNKKADHNKVSSSSVKDITGTQAPKKAPKLDKKNKAKAVKEINGRAEGVTGRASTDESETISLDQALFATKISKSSKSISLDFRLSRGIAQVNEGRYDQAISIFDQILRETPTYPEALIGRGTAYAFQRELDSAISDFTKAIQSSPSAGEAWKRRGQARAALGEFKEAIEDLTKALEFEPNSPDILHERGIVNFKFKDYNSALEDLSTCVKHDKKNSSAHTYLRPARGQSAGRSPRASCSDAARDWWRGRPPDVVAVDEADMLDGAVELVEKLAQPGGLCHAVSHNALLGLCAGAGDDGLSLGDPGDEVGAQEHDITGSGPARVGTTIPVSVGVDHELGRLGGSE

SEQ ID NO: 57453 - protein, 121 aa, Zea mays
  Coding DNA Sequence Number=SeqID_14078
  Subcellular localization annotation: CTP_CleavageSite=12; ConfidenceScore=5.19e-01
MDGDATALASPSAGTFPDKHPRSENSVQRAPGDSIATSTPPEKEAVDPRTAAIPFYWSVRRRRRRSSLSAGSASAGRRSMGVRRFADRSALTRSASLELQVPRYVTRCSKFQSSDSIRVPT

SEQ ID NO: 57454 - protein, 138 aa, Zea mays
  Coding DNA Sequence Number=SeqID_14079
MTWLNVTESCAWHDRRHLRKHHLAASGGQLVDNLGDGVEGLEPAGAGDRGASEAERARQEGRRGANRGSGWLATEVEEKQYGRERLRQSGIERQLIGNLDEGLRSGVAIETGHVFAPASVSVHRMTGNAEEAGNSSGF

SEQ ID NO: 57455 - protein, 308 aa, Zea mays
  Coding DNA Sequence Number=SeqID_14080
  Homolog annotation: Hit_ID=A2YHC8; Match level="QueryCoverage=60%, HitCoverage=42%, E-value=4e-34, Identity=45%"; Hit description =Putative uncharacterized protein
MAKQTESYELHKLRPQVDDLFKEFDALVDRPLDEREDLAAIFKVLEEIRDKIKIKHGGKKVDDDELLPRSKRGDLANLLPLIRTALELRSKPPPPPVQQDATGGAHDSKPTGCIPCKPRPSQQHKEEKEGSKEVVSLKLLLRLTQNVLEPEQYYEWTTSYVDEERIYGWDKEAGEVIDALVAAADGSGARMFRAAGIAGIHGSGKTALARKVFVHDKAKDNFALRLWVCVGPPDSEDRFNLLYRMLDNLGLDTDKVEEVVDKSSVVRDARGRTEAELRKGRSQTCRAEEGRRADSIYDEFILRRICLA

SEQ ID NO: 57456 - protein, 549 aa, Zea mays
  Coding DNA Sequence Number=SeqID_14081
  Gene Ontology: Mol. function=protein binding; Cellular component =intracellular; Biological process=RNA processing
  Homolog annotation: Hit_ID=A3A269; Match level="QueryCoverage=94%, HitCoverage=71%, E-value=0.0, Identity=67%"; Hit description =Putative uncharacterized protein
  Pfam annotation: Domain name=U3_assoc_6; Domain location=9-91; Score =90.4; E_value=5.8e-24; Accession=PF08640.2; Description=U3 small nucleolar RNA-associated pro
MADTVQYRLERMTDELDDLERRGLFTRGELADVVRKRRDFEYRLRRHSPLRQDFLDYIAYELRLDSLRNLRKRAIIRAAAEDDDDEPQHDARSSDDEGGRRKRKKDKSKKKWKKSVSDVAGVLRVLDIYRMATVRFKGDLDLWFRYLEFCRDKRHGRMKQMSRSGLYTDISAMLTRRSGKPETFSMPIMCYIPATHLVLAQAIRFHPKVPGLWIYAAAWEFDQNLNVAAARALMQSGLRSCPQSEDMWIEYLRMELTYLNKLKARKVALGEDVKTLQKKDNDASQWKEENKELFMPLNEQVKDPKEPGSAGDALEEKEDLFWRQGLLIIQTIYHGAVEALPSSLTLRKKFLEILNSVDLAHSDELKLEVLDDLKRDFSHSEDYWDWFARLQLSNLNSSSNSNRKDAISNKLNRSIQVYDEAIRKLPNSKMYSLYAKFWMDVIYTDREDSVTLFQDSEFDASEFTSSILKVYENAESCGCLTEDLACQYISLYLKLERLEEAKTLAEKLCDGPLSNAANFVEPEIYYGDKFNCNCSWQFFLEQGEPELSA

SEQ ID NO: 57457 - protein, 169 aa, Zea mays
  Coding DNA Sequence Number=SeqID_14082
  Gene Ontology: Mol. function=translation initiation factor activity; Cellular component=transcription factor TFIID complex; Biological process=transcription initiation
  Homolog annotation: Hit_ID=Q10JT5; Match level="QueryCoverage=48%, HitCoverage=36%, E-value=9e-38, Identity=93%"; Hit description =Transcription initiation factor IID, 31kD subunit family protein, expressed
  Pfam annotation: Domain name=TFIID-31kDa; Domain location=16-123; Score=69.5; E_value=1.1e-17; Accession=PF02291.6; Description =Transcription initiation factor IID, 31kD
MDAAGARPSTPSAAAAAVVGASVADEPRDARVVRELLRSMGLGEGEYEPRVVHQFLDLAYRYVGDVLGDAQVYADHAGKAQIDADDVRLAIQAKVNFSFSQPPSRESNIVASGGLGGEVFIWDLDAALAPVAKSVDAKEDEVPNGNSGPALTTLCSINSSSYYVDKRFL

SEQ ID NO: 57458 - protein, 1009 aa, Zea mays
  Coding DNA Sequence Number=SeqID_14083
  Gene Ontology: Mol. function=binding; Cellular component=nucleus; Biological process=cell cycle
  Homolog annotation: Hit_ID=A7PN44; Match level="QueryCoverage=92%, HitCoverage=52%, E-value=0.0, Identity=60%"; Hit description =Chromosome chr14 scaffold_21, whole genome shotgun sequence
  Pfam annotation: Domain name=HEAT; Domain location=484-522; Score =6.8; E_value=2.6; Accession=PF02985.13; Description=HEAT repeat
  Pfam annotation: Domain name=HEAT; Domain location=723-758; Score =11.4; E_value=0.53; Accession=PF02985.13; Description=HEAT repeat
  Pfam annotation: Domain name=HEAT; Domain location=765-797; Score =0.6; E_value=22; Accession=PF02985.13; Description=HEAT repeat
  Pfam annotation: Domain name=HEAT; Domain location=836-872; Score =2.2; E_value=13; Accession=PF02985.13; Description=HEAT repeat
  Pfam annotation: Domain name=PHD; Domain location=554-600; Score=7.3; E_value=0.0019; Accession=PF00628.20; Description=PHD-finger
  Pfam module annotation: Pfam domain module=HEAT::HEAT::HEAT::HEAT::PHD ; Domain location=484-522::723-758::765-797::836-872::554-600
MYKRAPQKLKSKFYRMTIRPAMLYGPFGGPGYHNQEREKHFEHLTPNMSKTRNGSAFSQDEINSHREHFRNELTPDSVASKKPKVRKKEINNSVSTSPHSIPNNQEVIATFCEAVEDFCGKAEIPDDGDGGDWLSIPLDDVKVLVNENYICFDPKGYCMRFLWIQLQGLSIDVKENSDAFDAEPLVFSALESSHAALAIMTHHDMPKQLYREELIERIIDFSRHQITDCMAASNPTFRALYKPAGNVANDGDDDEGDLENGQVSKRRRTATNLSMRKSSNRVSASVYSAVQKLCLILGFLKELLTTVRLSDSCILQLAKTCFTTFLVDNMQLLQLKAIGVICTVFSSYTQHRSYLVDETLHLLRKLQFSKNAVRTYHLADEDQKQIQMITALLVHLVQFSAIVPDSLKGTVDWTTIVDASSDADYYPIQCHEAATEACCRFWTDVLQRFTAAKSQDMSETKGIIDNLVQDFLTILNLPEYPAAASILEVLCVLLLQNAGLKSKDINARCFAIDLLGGIASRLKRDSVVCSEEKLWILQDFTDKGSDGSIFLKNKCCVCLGGRGINIACNECGRCFHSDCMGAGSQDNLQRDSVCPLCFCKQQLNVLQSYCQSQIKENGKKTAASASKKSAKPTEVSAVEIVQQILLSYLQEAGSQDDGNLFTRWFYLCIWNKDDQHSQEKIIYYLARLKSKEILRDSGNGLAISRDSAKKICLALGQKNSFCRGFDKILALLLASLRENSPVIRAKALRAVSCIVEADPEVLGDKRVQYAVEGRFCDSAISVREAALELVGRHIASHPDVGLKYIEKVAERIKDTGVSVRKRAIKIIRDLCASNPNTDTTHAFVEIISRVNDEESSVQDLVCKTFYELWFEEPTGSHKHLVADGSSVPMEIAKKTEQIVDMLRKMPNHQPLITIIKRNLTLDFLPQSTKAAGINSSMVASIRKRCELICKRLLERILQVEEGAANEMEIHTLPYIVALQAFCIVDPTLCIPVTDPSKFVVTLQPYLNIQ

SEQ ID NO: 57459 - protein, 196 aa, Zea mays
  Coding DNA Sequence Number=SeqID_14084
  Homolog annotation: Hit_ID=Q6Z1S0; Match level="QueryCoverage=24%, HitCoverage=27%, E-value=5e-10, Identity=66%"; Hit description =Putative uncharacterized protein OSJNBa0038P10.26
  Subcellular localization annotation: CTP_CleavageSite=71; ConfidenceScore=5.37e-01
MSRAAVTGSENTPADASRIQGLPLPSPALTPSAMPGFMVAQALEASTGGDTRFGEAMPPSVAPPLSPSPPPASSPSTASTSLRGLATKVEIVEIDLTEEDTSSLAHDSPSSTSIEVVGIRRLEEAIHGVIDHDSPSSTSIEVVGIRRLEEAIHGVIPEGCFGLEHRTVRWCTGQCPVRQAASAEEAALRNLLTAYG

SEQ ID NO: 57460 - protein, 640 aa, Zea mays
  Coding DNA Sequence Number=SeqID_14085
  Gene Ontology: Mol. function=protein tyrosine/serine/threonine phosphatase activity; Cellular component=cytoplasm; Biological process=protein amino acid dephosphorylation
  Homolog annotation: Hit_ID=Q2QT46; Match level="QueryCoverage=98%, HitCoverage=99%, E-value=0.0, Identity=67%"; Hit description=PTEN, putative, expressed
  Subcellular localization annotation: CTP_CleavageSite=69; ConfidenceScore=5.29e-01
MEEHQVKPSDLPPTSLHNQDSAATPVTSADPARPAASNDSPSQVASAAPAAVSAPTAAPAEDAAGREASASVFSASGLSSWAKNLKIPQPSPAAQQDEGAEGSTSPTTGQPGVFGSLTKGIVDSSKNAVKAVQVKARHMVSQNKRRYQEGGFDLDMTYITENIIAMGFPAGDLSSGLFGYFEGNNTPFQGFYRNHMEEVIRFFEMHHKGKYKVYNLCSERLYDASLFEGKVACFPFDDHNCPPIQLVISFCHSAYSWLKEDIENVVVVHCKAGKARTGLMISSLLLFLKFFPTAEESIEYYNQKRCVDGKGLILPSQIRYVKYFERILTYFNGENQPPRRCMLRGFRLHRCPYWIRPSITVSNHNGVLFSTKKHPRTKELMPEDFWFSAPKKGIMVFALPGEPGLAEVAGDFKIQFHDRQGDFYCWLNTTMMENRVTLNPTDLDDFDKRKLPSPGFQIEVVLVDYDGSQPAKPKPGAGPAADKSHADSSASTVAKENSAAPEESNKGTGSNNDRDEVFSDSDGEDGSSNGRKEKTAGGGQSSVNAAKPSQTGNMEEAAASAAASRLDKVAISSEQGTTKAPDGTSLKTEVSSKASSTTAPPPPAADSSSMSEFKAIAADASVFSFGDEDDYETLEINNGN

SEQ ID NO: 57461 - protein, 122 aa, Zea mays
  Coding DNA Sequence Number=SeqID_14086
MTGITTSLCGVRPPELSRQRLRLVARPGDGRGTTTTTPLLRTDIIIDDRRTRVEYRRSLHAPGPFNGPLTSKSPTSTSTSLSRIWEAGWPSTPPRLEPLGATEDVMTAYLPIVLGQDALQWL

SEQ ID NO: 57462 - protein, 151 aa, Zea mays
  Coding DNA Sequence Number=SeqID_14087
MAWLDILQSNFPITPFYCFSLIFIDVLYSLKSGPFYSVFCYLRISFVLAEAVVLIDPVLASSGVIASSPNKSLKGVKPVDLEMVVLWLHTTLINSSGHFSLGWLKINFIIPVIIIPFALSTSPFDSGCLTDAKCILVPIRSQKTLNVSAMN

SEQ ID NO: 57463 - protein, 112 aa, Zea mays
  Coding DNA Sequence Number=SeqID_14088
MSIAHGDHVTKEHSEVELRLSPNSCDLLLTEQLHATGSLIFVQQHRNDLRDQADLASARSVTTGSWFSDCIGASGLLVVVGSQGSSSAKSELSLLAERSGTSATSIGIRFPG

SEQ ID NO: 57464 - protein, 311 aa, Zea mays
  Coding DNA Sequence Number=SeqID_14089
  Subcellular localization annotation: CTP_CleavageSite=82; ConfidenceScore=5.18e-01
MARVACTLRGKRLDGGVSVLSVGVNPDPLSVSISANRVFDSLNSLTLTPSSQHILESLFFYRVRKQQTFAVFVQRWYPRKSPSSEVTGGCWPPTLKTINLCAGGCFASRNLLINLPILWRHGAYKQNCTQVYWTFWRASPSASPRHEGSSSGNTNPIGDLEAKVEPLRSELRHQNRAWAQDSQRIAELSADVSRLQYEISERDSAIDWAVNSHSIAWDREAKARARVAELSAALDSLRVYCNTLHEEVHVLYARLHLDVPSAAAAMAAGPSGTANEGPDEELDLFRPPPSMNLPDERSPAAGNEATKDDED

SEQ ID NO: 57465 - protein, 161 aa, Zea mays
  Coding DNA Sequence Number=SeqID_14090
MRQTDDNRGMVVTTCSLNGMMLSSSYTFLPSHSGELQSTGGTGERLDERLPGETETFSSSKGRMELAEWQYRKYCTSDFKKELVGITDRRRKKTLDKLTDQPGNLIPIDIAEVPDLSASRDNSNLAEDDPCDPTTTSKPEAPMQSLNQLPVVTDLADARSA

SEQ ID NO: 57466 - protein, 86 aa, Zea mays
  Coding DNA Sequence Number=SeqID_14091
MEVDYGEWKAKMSGTGGLVGGRGRGAALVGMAGARGGRAGRGNLGTRRGLGVGGAGRGARVGCSGAWGRASCAGARSAGGSMGAVG

SEQ ID NO: 57467 - protein, 131 aa, Zea mays
  Coding DNA Sequence Number=SeqID_14092
  Homolog annotation: Hit_ID=A2YRT1; Match level="QueryCoverage=96%, HitCoverage=31%, E-value=9e-30, Identity=55%"; Hit description =Putative uncharacterized protein
MANAGRKLPYVFLLLVALAAGVLSVVVLQKVREQRVFARRLQERDRQLVTLRILLQKEKAFNKEMKRKVEEMKATTSSLRTQKTDQKTKLKGLETTVADLKKTQKDLEVALAEKDNRINLMEEAATNLEKV

SEQ ID NO: 57468 - protein, 93 aa, Zea mays
  Coding DNA Sequence Number=SeqID_14093
MPERCAGRLYLSSFTDSKDKRPDHPYKKIEFGQEQCVFVTLHYGLSGVFSQTALGGTPGKRHRLVTLGGCRLLDGLAVVFVELSVKIVEEPRD

SEQ ID NO: 57469 - protein, 91 aa, Zea mays
  Coding DNA Sequence Number=SeqID_14094
RLGVPFIAPRELGAVELHLEVIVAFCPLAHRTVRPSGVGHRDADINTNTSTSTPAAPSPAQAPPLPPGPVTRARARELNYIMLLKNEGPEE

SEQ ID NO: 57470 - protein, 138 aa, Zea mays
  Coding DNA Sequence Number=SeqID_14095
MELAEWQYRKYCTSEAKKALVGITGRVWLASEWCQQSPVKISDFLNNRAKSYAQFKEGEKQGNGVDSEKKTLNKLTDQPGNLIPLDIVEVPDLSASGDNSDLAEDGPCDSTTTSKPEAPMQSLNQLPVVTDLADAGSA

SEQ ID NO: 57471 - protein, 647 aa, Zea mays
  Coding DNA Sequence Number=SeqID_14096
MPSSSSSADATPPAAASFEETLSSVMVEELRAGDSVDFGVSRMTSARVEDMQRLGYFGGGVARAPGTEEVPEPEGELVVFEAFFVAGLRLPAHRVFELNQLPYDGYPGQDEADRRGKKPAVETGGDPALAAAPSSKKRKLVMDKDLQGAAQKCQATVRVHEARPKRQRGTAKAAASGGGKPLLPAKAGASAPSKAPEATVGAGGSKLTKVVPLASGVAEAAKVARTLPLPGKRVADFGTEINVDDYLGGSGEGQLALAVPGAAIVTAALAPKARGETLGVGGEVPALALVRDEAGAATRRLKGVTEALSQATEALSQLCLPKVERLRTQHADAVREKSASDSKCRKLADKVAALEKEKADLRRQLAGERREANEAIAKEQAAQAEGNIAKELAGQLQQRLTALESCAKGAEAATRAEAERTRTQLVATYRELGVRTGDFEVSEREPGLHCLEWVQEELQELPTILEGLMSFASLVTCEAAMNALSREGCRHFEALDQADEDFGRDIFEVEDPVVKESAGALYDRMWGSYGREVVRERAEAARAHAERGERVDDFGALNSALPDPEMTPAEAATGVALGPTPGTAEDAPGAPASAAAGEDLPPKVAEGAPDAPAAAVPSVEDPAAVEAEAAAEALAEAPAAAGPSQVA

SEQ ID NO: 57472 - protein, 86 aa, Zea mays
  Coding DNA Sequence Number=SeqID_14097
MDEGCTQPLSSDPKIHLNTTVFSSFTISRLRGISTTWSLSPLQMMITKKHGYDEQPVVPECVAEDLPEPQPGEGKCPLTFYVLLTS

SEQ ID NO: 57473 - protein, 137 aa, Zea mays
  Coding DNA Sequence Number=SeqID_14098
MGKSKKGGGSSHHSGDKRKREPTPPSEDFGDSEYSEEEFSSEFEGSLAPASPPASSDDSDDSQGIAAEVWTYIWPIERAGLEGSDESEYSSDEENSSDSSEEGSGGDGGDDDSGKGGSGDGSGGSKGSSKDNNKASG

SEQ ID NO: 57474 - protein, 101 aa, Zea mays
  Coding DNA Sequence Number=SeqID_14099
MLPGVRDMDEEVFAREIRKADKSLAPGVVGGEAVRCGALSLDRGQTELEEVPVPAPAICAGTQDVEFVRLTCMLMSHMCHDDLICGKRIKKKKMDVDMGCK

SEQ ID NO: 57475 - protein, 57 aa, Zea mays
  Coding DNA Sequence Number=SeqID_14100
MESHDLRAEWESWLVGGYEIDGFGYDYGAGCQHCNHCSGEDEAVEGDFQEFQDYDEF

SEQ ID NO: 57476 - protein, 198 aa, Zea mays
  Coding DNA Sequence Number=SeqID_14101
MAERYQLPRSCVPPTMRRKDGEYPPSGGLEGGKTRCIREREDMVYFQGGHPPFKGDYPYLRPQPSRAESSPTRSKALPCGAGAGSHTSCKPAQSRRSQTAASGGASGRRSERRFAFTIITASVKGPGKGDTPERILPREGTRLRASLLIRGSKAGPPKGSTSASYRVGPTPTTGQRFEGRPPEGFHGRLRLLGLRAHY

SEQ ID NO: 57477 - protein, 191 aa, Zea mays
  Coding DNA Sequence Number=SeqID_14102
  Gene Ontology: Mol. function=kinase activity; Cellular component =ornithine carbamoyltransferase complex; Biological process=amino acid metabolic process
  Homolog annotation: Hit_ID=Q6QP54; Match level="QueryCoverage=77%, HitCoverage=51%, E-value=6e-24, Identity=43%"; Hit description =Putative kinase
  Subcellular localization annotation: CTP_CleavageSite=78; ConfidenceScore=5.15e-01
MEPGGGTAVGAVGSLLTSSCFRKGLRAAVVTEHAGRHHCLFGGASQMGRRSGSLRPESARGWGDVEAPPKPRSSLSSVAEAESEPLGRARRRSSDEARAESEPWGQSKRSSSSSGAEPESEPWVGRSGVRRLPGLSPSQSPGVGRSGVRRLPGLSPSPSPASGGAEFAVFWDLARVRALGRAERSSPSSGA

SEQ ID NO: 57478 - protein, 348 aa, Zea mays
  Coding DNA Sequence Number=SeqID_14103
MEVRCQTRFCQNEDGFPKLLRACTVRLGIRSQPEYDGREFVEHGTEKCVVTVYIGSSPHHVEWSVTATGHRFKDTCQVVARKALRALCQIYEEEVADNPLRFFPPFQRDRPAWMARMRALEEQQLLEDDPTVVYLTAYLLTLDTQYDFLARHHRQMIARAEDAEKRNRQLHSREVIVVEALKQAKDEHVQKLMEAYLVTHNQRRALRIQEPASSNLVQPIRAEDPQILEGHPVSIIGEKKAWELPEGAIVLEGIPVSPKAMDKKEHPESSQDPLPKLFEPLTMEKILAPSREIKEEAASTPPAPPPSEELQEPVPLEEEFDPVLPSQSPPEEVINISSLLTHPGDISD

SEQ ID NO: 57479 - protein, 84 aa, Zea mays
  Coding DNA Sequence Number=SeqID_14104
MADEIIKKNEKESHYAREEAKQVEEATERPRRIAELSPLPEPYDPQANPVMKEALDVMSVANTIVDEVVDKLPNEAAEKILKED

SEQ ID NO: 57480 - protein, 242 aa, Zea mays
  Coding DNA Sequence Number=SeqID_14105
SLEDMVAGVTWSSILPPGWTVEWDPSSAEEEHEEWTEDTMEAIALHGLTTFCGFHPLELPTHPIGLFPAEKENDPMWKDQVEHAKDIWAIYPGQIAHLTVRCMNALYRLQVMHGEAMSHLMALLEATKITLDNREELVVDLSTEMVEKHLQVEQLSNEIQELEELVGTRENTIEVLEDQLINTQQQLTEANQHLDMHHQEIQDMEANEDVDIEGGEEPASSLDTAGSGRPPSPESSVASFVH

SEQ ID NO: 57481 - protein, 24 aa, Zea mays
  Coding DNA Sequence Number=SeqID_14106
MAAATDLVTGGHWCGVTARGRKMQ

SEQ ID NO: 57482 - protein, 199 aa, Zea mays
  Coding DNA Sequence Number=SeqID_14107
PTLTGLHERVSLVSSERAEDTMEAIALHGLTTFCGFHPLELSTHPIGLFPAEKEDDPMCKDRVEHAKDIWAIYPGQTAHLTVRCMNALYHLQVMRGEAMSHLMALLEATKITLDNREELVVDLSTKMVEKDLQVEQLSNEIQELEELVGTRENTIEEIQDMEANEDVDIEGGEEPASSLDTAGSGRPPSPESSVASFAH

SEQ ID NO: 57483 - protein, 600 aa, Zea mays
  Coding DNA Sequence Number=SeqID_14108
MVALGRHWRVAGRSPELMAGSGKSGEVRRRVLGDPHLDVHDELGHDIQVMNKDRQDAAQKRRAVIRLLDARPKRPRGTAKATVPGGSQPTLAAKAVAPGSSKVPESAKAVGACGTKSAPDGAAKVRELPSPGKRVADFGTNISVDDYLVGSGEGQLVVVPPAVATTASTAAFGVKGGAFSAGGEISAASAIKDEAGTMSRRLREASQQLSQQLSQQLSQVAALEGERTDLRRQLVEERREANQAIAKAQAEAKLAWAEGSLASQRAEEWELRFNALHARVERVEASTCSEVERTRKQLVDSYRELGARTADFEVPDREAGLRFLEWLQEELLALPTIMEGFMSFASLVTCEGALNALSREGCSHYGGFDRSDEEFGRKIFKVEDPVVKDSVGGLFDRMWGSYGREAVRERSDRAREQMANAEEVEDLRGLNSVPPEAAEGGPVLPADAGEGPSDVPVPADADEDLVSAPVPTVEGAQEFFESDDSGSSVVWTEESSDEDFDYFAALDVAAAEASPCVMGVEVPVPSAGRRQRRAVAKCRVSEVEGGRLRVDRAGRRELLSSPVGASVGEGEMRSLFEGEELRIMMFNYREMGIIPKVEPL

SEQ ID NO: 57484 - protein, 74 aa, Zea mays
  Coding DNA Sequence Number=SeqID_14109
MGRPRHRPSSSDAIDEGEAGEGIERRVASSPSPQHLPSEGPVRLSHLVPKASLDGGDAALAQSGSAGVFDMTVD

SEQ ID NO: 57485 - protein, 457 aa, Zea mays
  Coding DNA Sequence Number=SeqID_14110
MAAVGMKGTSQDPWSNFCAAAFADHVASGALTSEFAAEIERLRAQHMDAAREKSAAENKSCRLTERLAVVETEKGDLRCKLVEERRDTNRACADVQAAQAEAKLAQAEASLARQRAEELEARLSILRNRLDKTQASTRAEVERTHTQFMDAYRELGAWTAAFEAPGQEEELEVLPTIVKGLMSFASLVTCEGVVNALSREGCGHFEVFDQSDKGFESEIFQVEDSVLKPLTGGALRWDVGPSRPERRSGRDAHDEDVEDLGDLDSTLPEASGLELAPPSVRGKGPSVPTFGPTQATAVGDTNFVAASTVVPADDNLFGSVSECFESEGESGSSFSWTEESLDEGLDYFAALDVAAAESSPRVEGTGDLPSASTGYRRRRVVSKHSVGDFSRSGRHCRMGMERGRLRVDRVGKRELLSSPIGASIGEEDLRNLFEGEELRLMMFNSREMGIIPKVEPM

SEQ ID NO: 57486 - protein, 136 aa, Zea mays
  Coding DNA Sequence Number=SeqID_14111
MSVSKSAPPVAATSVCTGYGGLHSFVGSAEGGLPAPEATALAPAEDLLGPGTAGFAAGGGLLLRGAADFTPPRAFFASRKESPTLVVAELPELFRLKCLSPALEARPHLNGNNPSIPRIQSDEATDSIKYHNLTRW

SEQ ID NO: 57487 - protein, 55 aa, Zea mays
  Coding DNA Sequence Number=SeqID_14112
MARSGGGRAGRKKEKGERRKKKGERRKPRARKFRFELQVTRNLENRECKNDIHAT

SEQ ID NO: 57488 - protein, 313 aa, Zea mays
  Coding DNA Sequence Number=SeqID_14113
MGCPHGSTSHRTGKARSAASTTSTIFDGVADGAAQRARERRHATRGVEIERECCCSARLAAHFAEQPAGTTTNSEEGGSLLVFHGRKWGALDRESWAQGTARGVHGGGRSGHGMLLLAALRRIATTGKKSRGAELLGADHGEKNNRGVKKGKGHGGRWRRHGRGRAELLLGHGKEGSSQGVACREMWRARGAGRRRAPRHGWPREEAELGVCSSLRDGEAELGEGSRCSTLLGKKGVAAGMPSVGSRGPAMGERPAPWEEGSRAPCVLGKKAPCCAWGKKPGRKMLWRLKEMEGWECKTAKDKGEGSIFIEKP

SEQ ID NO: 57489 - protein, 150 aa, Zea mays
  Coding DNA Sequence Number=SeqID_14114
  Subcellular localization annotation: CTP_CleavageSite=59; ConfidenceScore=5.11e-01
MARARAYKAPRDFDRTPPHALDLTGAQNHRRLLVHGVPTAARFPRHRRLTNRTFPNPVRPSEKTVHTSMKLPERGIRGRVCHLFYIVLKVKENRKGIWEKIKLQLGLSDKPFTESGALFTVFRKYRVVDKDLDPAGDKDVTAVGMDWRPR

SEQ ID NO: 57490 - protein, 227 aa, Zea mays
  Coding DNA Sequence Number=SeqID_14115
  Pfam annotation: Domain name=zf-CCHC; Domain location=31-48; Score =28.4; E_value=2.7e-05; Accession=PF00098.14; Description=Zinc knuckle
MGMIRKINLMGVPLQVEDLLFNIDRKKQRKRGCFACGEKGHFSDNCPNMAEPKKERSKGKALTSARTWDDSSSEDEPPRTRNHRSSSRSSRSSHKCLMARGKMSIPFSSDDSSSDDDGEGKPSIDELAEAVKFFQDVCTKQKAQLKTLKNKLISSQNDYKSLTENFETFANLNKTCSDEVAKENEQLRQEVARLGKALYDKKGKAKQIRPPQDNTTAGVNKPRREKL

SEQ ID NO: 57491 - protein, 254 aa, Zea mays
  Coding DNA Sequence Number=SeqID_14116
  Homolog annotation: Hit_ID=Q6UUN3; Match level="QueryCoverage=27%, HitCoverage=6%, E-value=9e-08, Identity=45%"; Hit description =Putative gag-pol polyprotein
  Pfam annotation: Domain name=SlyX; Domain location=38-106; Score= -4.4; E_value=0.023; Accession=PF04102.3; Description=SlyX
MSHLMALLEATKITLDNREELVVDLSTEMVEKDLQVEQLSNEIQELEELVGTRENTIEVLEDQLINTQQQLAEANEHLDMHHQEIQDMEANKDVDIEGGESLPPAWTLLTQGDHLPLSRMVGRARRGQNERVPPLPPPPPTLQELMAQPNEILRQLAQRQPPPQHYGGGDHQRHPAAATYQEFLSTQPPSFTRAEDPLDADVWLRIVESKFLLLHGVCSEVTKVRFITQQLRGSFFDLVGPFSCYAARDRGRIF

SEQ ID NO: 57492 - protein, 45 aa, Zea mays
  Coding DNA Sequence Number=SeqID_14117
MALLCFGKKRRSSSCPYGSGSFSVGNPSEIEPASSTQEHFLLFNR

SEQ ID NO: 57493 - protein, 181 aa, Zea mays
  Coding DNA Sequence Number=SeqID_14118
  Homolog annotation: Hit_ID=Q1KK90; Match level="QueryCoverage=39%, HitCoverage=75%, E-value=1e-25, Identity=68%"; Hit description=CMS-T pore-forming protein
MSTHHILGLKKVPRVRLFADESGTAGQLSWYGRIAAPREILLYTSSHTRFLNRTSIGERCKHRESSEDVSVPFSKDRVSLEKPRPVEINLFHQKSGKEKTFSSMITTFLNLPPFDKGLIKGYLSKIDESYLTQLSEFANHNRVEAAKVGHVALHELSFSWLRGVKMRVKTFPIQQKGPICL

SEQ ID NO: 57494 - protein, 74 aa, Zea mays
  Coding DNA Sequence Number=SeqID_14119
MASYVAKFQMDALAKGWPRCPNGNTFPLVVDNLDGVRVDTSDLSWFEQCKALLPAKGDGAYITRTEVLEVGITS

SEQ ID NO: 57495 - protein, 44 aa, Zea mays
  Coding DNA Sequence Number=SeqID_14120
MGGGLLAAASTLRSVLPLFGPPEQKSSSSPLLEQSRVFFLIFEH

SEQ ID NO: 57496 - protein, 57 aa, Zea mays
  Coding DNA Sequence Number=SeqID_14121
MGSSSLRAEKESRLVGGNETDGFGYDYGTGCQHCNHCSGEDEAVEGDFQEFQDYDEF

SEQ ID NO: 57497 - protein, 170 aa, Zea mays
  Coding DNA Sequence Number=SeqID_14122
MSGFGRHRKLRLARPQGSAPVSAPEDDELRLTRPQGSDSASAPEDDGLRLARPRARTRPRPRKTTDSASPDPRLGLGLGPERRRTPPRPTPGLGLGLGPGRRRTPPRPTPGLGFSLGLRRWSPSRPTRGSDSTSTSKDRLDLDLGEASASPDPGLGPTTSQGGHHYPSPS

SEQ ID NO: 57498 - protein, 111 aa, Zea mays
  Coding DNA Sequence Number=SeqID_14123
MARARAYITPSDLDRTPPHALNLTGAQLTVTSEHTSVKLPERGIEACFAGEASPRSPEFTTPPECVDRPCLWHNFTGSLEDMVAGVTWPSILPPGWTVEWDPASAEEEHEE

SEQ ID NO: 57499 - protein, 225 aa, Zea mays
  Coding DNA Sequence Number=SeqID_14124
MQRMGEATRATLERECRGRGMEALTGSGCRRDLPLLPLAGRRRSVGRARRGGGQRRDDRGIGRSDQGFRGRVWGQIGRGGGGFRGNQTQRPRFSAHSGQGGGRYGGRAPGALMAAGDRGGADGGRRGTRTRVGLGASRAWGGGTVMPVDALTVLLRPLSGTIIRGTPRLLISAADPEGFTPRLRTPSSNGHTFGSPEAQSSPRSNLGQVATPTDRIAEAFNAKMA

SEQ ID NO: 57500 - protein, 36 aa, Zea mays
  Coding DNA Sequence Number=SeqID_14125
MARSGDPLVWKAANQIVQRLGVSRSHKPDERGEVMM

SEQ ID NO: 57501 - protein, 140 aa, Zea mays
  Coding DNA Sequence Number=SeqID_14126
  Subcellular localization annotation: CTP_CleavageSite=59; ConfidenceScore=5.33e-01
MRYTDADVHRDGFEWGCVYRALAAPASTATSSISRLRFCSLVAPASTATSSISRLRSLSASYYFSFVSAVSVLQLAYSDSTSEPSLLASTSGSIPTGHNGFFLLWDCLSEIVFNAQEIVISGYCMHMTLDVLQDLPLTDL

SEQ ID NO: 57502 - protein, 62 aa, Zea mays
  Coding DNA Sequence Number=SeqID_14127
MAGEKVASKLALVMASNVPGMIEEALVNESRLLTKAAGPSAVDVLAIRLRGEELDLPSSQKS

SEQ ID NO: 57503 - protein, 142 aa, Zea mays
  Coding DNA Sequence Number=SeqID_14128
  Subcellular localization annotation: CTP_CleavageSite=39; ConfidenceScore=5.18e-01
MDAGRLPPGADPAAAVAPNAAPAAAAAPGAALAAGAPSRAAVTPGAGLAAGATHLAFTAAPLCAAGSLHAGLASLTAIGPPPPGLTAPRSDRTGGSHPYIDGLGAPPRFFFPMGPALYPSHHYFPTMPGKPTRTIPSLDDDN

SEQ ID NO: 57504 - protein, 127 aa, Zea mays
  Coding DNA Sequence Number=SeqID_14129
  Homolog annotation: Hit_ID=Q7XBD3; Match level="QueryCoverage=33%, HitCoverage=8%, E-value=2e-07, Identity=60%"; Hit description=Zeon1 gag protein
MATILQATTASYVRWAFESEAIIHELRSNHILIWWQHGCHGEVFRHGSQEYSSDVVFFPSLGNDHIMAKAEGHAEEKGGGLQVSEMTRGFGGRLHPRHVRTIHNPNSNDDRANHTQGNQQSFQSSGM

SEQ ID NO: 57505 - protein, 265 aa, Zea mays
  Coding DNA Sequence Number=SeqID_14130
  Gene Ontology: Mol. function=kinase activity; Cellular component =ornithine carbamoyltransferase complex; Biological process=amino acid metabolic process
  Homolog annotation: Hit_ID=Q6QP54; Match level="QueryCoverage=50%, HitCoverage=42%, E-value=1e-27, Identity=53%"; Hit description =Putative kinase
MGRRSCSLRPESAQGRVMMAPPVDVAGLRPRLGDVEAPPKPRSSLSSGVEVESEPLGGARRRPPAEARAESEPWGRAERSSPSSGAEPKSEPWIGRGGVRRLPGLSPSPSPGSGGAEFAVFRAGSGGAEFAVFRDLARVRALGRAERSFLWCLRPGLTACQSHSVKWHRSRSGAGGAVLLSGRSVERRSDGGHFGSAGWGARVRIKVLGHLCIKCSCDLVGRCGDLVRVASWRRQGLGRAVNMFAAGGGLGRDGNPPGSAALVRG

SEQ ID NO: 57506 - protein, 370 aa, Zea mays
  Coding DNA Sequence Number=SeqID_14131
  Gene Ontology: Mol. function=nucleic acid binding
  Homolog annotation: Hit_ID=Q2QU58; Match level="QueryCoverage=56%, HitCoverage=49%, E-value=1e-08, Identity=26%"; Hit description=Zinc knuckle family protein
  Pfam annotation: Domain name=zf-CCHC; Domain location=137-154; Score =23.4; E_value=0.00043; Accession=PF00098.14; Description=Zinc knuckle
  Pfam annotation: Domain name=zf-CCHC; Domain location=162-179; Score =9.4; E_value=0.058; Accession=PF00098.14; Description=Zinc knuckle
  Pfam module annotation: Pfam domain module=zf-CCHC::zf-CCHC; Domain location=137-154::162-179
MYDSILIKKRNNDDALSCVSPLKIENDMLKSQVDLLNLEKLALSKKYDMLSYSHGQSLIEQQVVGSKEKFLGNNKTRQLRRRHHAQPPQDIHGRVVKKLEKGEIIASVKLHKKEVPKSINKEINMNKEKAQKGRGKRRCFKCKEPDHFIVSCPHKDKDERMRRCFGCNDKDHVITSCSLMKNQRCAFPTMTLTKNKNEQQASYQAKRHFWTVSHPVSEGKPKCEPYKRLRLQGRWRDTKLGSSATLGCEGWLCRDEQSRAEGGQSTPGRTQPRRGQALTLFKLVAEGTTAWLPCEAIVVVVEVGYSASWLKRAKRRYIKVTLLSTSNDEYESIDNYVDLSLLFEGLSFSQIEKINELVKSINEKDELLES

SEQ ID NO: 57507 - protein, 50 aa, Zea mays
  Coding DNA Sequence Number=SeqID_14132
MEPAASCLIDSPGPSCLIPTDLAQPQPYKREHEDNYKVTFGLTNENTKWC

SEQ ID NO: 57508 - protein, 267 aa, Zea mays
  Coding DNA Sequence Number=SeqID_14133
MASHGSSDDGNALSHTDGLAREGFPRILWEVLQGAGYTTPPQYAVQQFEKHRVPHCRVRMTLEPHPLQPGWRSLDSESFGYRAEDTIEAIALHGLTTFCGFHPLELTTHPIGLFPGWSMPRTSGPSTQATKITLDNREELVVDLSTEMVEKDLQVEQLSNDIQELEELVGTRENTIEVLEDQPINTQQQLAEANEHLDMHHQEIQDMEANEDVDIEGGEEPASSVDTAGSGRPPSPESSVASWPGDSVVARMSAFLHRRHRLPLCRS

SEQ ID NO: 57509 - protein, 214 aa, Zea mays
  Coding DNA Sequence Number=SeqID_14134
  Subcellular localization annotation: CTP_CleavageSite=79; ConfidenceScore=5.58e-01
MAHARAYKARSGVDHTLPRTLKPHRSSAHRRLPVRGVSAATRAPAAVDRPAQPFPNPVRPSKTTEHTSVKLPERGIEVCFAGEASPRPPEFPTPPECVDRSLPEPTPPLAGPISPPTLPLTRPETWSPHSGYGGYKCGHCTTAVGVSEALYAKAVSPDLLTGNRWGRLMCVGTECPYKSCSLEDMVAGVTWPSILPPGWTVEWDPTSAEEEHEE

SEQ ID NO: 57510 - protein, 463 aa, Zea mays
  Coding DNA Sequence Number=SeqID_14135
GDEDDDYDYAYGNGEDEVMEEDFQEFQEYDEFYVWVSGKPPVGCLWAFFSMGVGQDHPMALGFLERSSMPAQGLPMVPPPAAHLPVPSLPWCLCSFLPGQETPRPGAPRARPCFAPVARLPRGRQPPPTPATNPPSPAGVLLLHGLSPSPPGRFPRFPQTPAASSASPAVPWWILALLWSGHGGSSSPKFGPCPCSPRGLPFPKPAGRAPLSELAPSLLLPMTSAPAAALARSVLYSAAPPLSLPKRSPNPCNKPRRALPHKSMLLRLARWVLDESQQRATPSGFASVSHARRCVRLHATCAATTTEEEIESVRSCSPVLPLEAPPTPPLSATATRVAAGGDPDDGGGDNSSSHNTDLSTDLEPEGWVAQPITRDAARRCHFHDALDRRTWSIEYRCVVFQHNRGVYPDRWEATYLVRHPENSLRGAEICSEHYSISERDSAEAAMLDVARMRFRTTAQCSAG

SEQ ID NO: 57511 - protein, 168 aa, Zea mays
  Coding DNA Sequence Number=SeqID_14136
  Gene Ontology: Mol. function=carboxyl- or carbamoyltransferase activity; Cellular component=ornithine carbamoyltransferase complex; Biological process=amino acid metabolic process
  Homolog annotation: Hit_ID=Q8SA97; Match level="QueryCoverage=61%, HitCoverage=19%, E-value=9e-19, Identity=52%"; Hit description =Ornithine carbamoyltransferase
MAPPVDVAGLRPRLGDVEAPPKSRSILSSVAEVESEPLGRARRRPSAEARAESEPWGRAKRSSSSSGAEPKSEPWVGQSGVRRLPGLCPSPSPGSGGAEFAVFRGLARVRALGRAKRSFLWCLRPGLTACQPHSVKWHRSQSGASGAVFLLGQLVERRSDGGHFGSVD

SEQ ID NO: 57512 - protein, 110 aa, Zea mays
  Coding DNA Sequence Number=SeqID_14137
MAASMHAPFRRGPRPRPPMVGDNEAIKAKEWEARRQVALVVSPAEATTSATGSLTSGGDHLSTDDNGHLCTGGLPATAAVLTACRKVLAPILLQGEDKTIQERGRHLRGI

SEQ ID NO: 57513 - protein, 56 aa, Zea mays
  Coding DNA Sequence Number=SeqID_14138
MYVVVPNSPHGGGAGGQCAQRPYLDSEELYAGEDVTDNMGGFLTCKRLRRSLPSRE

SEQ ID NO: 57514 - protein, 253 aa, Zea mays
  Coding DNA Sequence Number=SeqID_14139
  Homolog annotation: Hit_ID=Q6QP51; Match level="QueryCoverage=19%, HitCoverage=22%, E-value=7e-15, Identity=83%"; Hit description =Putative growth-regulating factor 1
MMTASKRDRERGYFERDPSLRRKRAPSPPTDQRFEGWSLGRVRQPPQSTQAPRLLLIRGSKAGPSEGFDSRLRALGLRAHYWSEEALPRLTPELGLNLDLGRRTPPRPTPGLGLSLDLGRWSPPRPTPGLGFSLDLGRRTPPHPTPRLGLSLDLGRRSPPRPTPQLGLSLDLGRWTPPRPTPGLGLSLDLGRRSPPRSTPGLGLSLDLGGASASPDLELGPSTSQGAIITLPLASSGYGEHDRCPIWLAPVNK

SEQ ID NO: 57515 - protein, 224 aa, Zea mays
  Coding DNA Sequence Number=SeqID_14140
MAGVGRSTCAGGDARRRRGDRPGHGEIVQSDGSGRSTGCQRRHERKELGGDSLDSSVHTRRRKTEVRTCSREFGMTLIFGSPGFEFRKAENADDLWEEEVESGRQPSPVPQLDVPRAPPQGTSTTGGDPDGDDDDGSSSHNTKLLEEQEPEGWITRPIIRDAARGCHFHDALDTLLCWAFNRHNWSIEYRCVVYQHRRGLYPDQWEATCLVRRPDDDLQGAEAF

SEQ ID NO: 57516 - protein, 94 aa, Zea mays
  Coding DNA Sequence Number=SeqID_14141
MDLHERVFLVSCERYFREPVRRGEAMSHLMALLEATKITLDNIEELVVDLSTEMVEKDLHVEQMSNEIQELEELVGTRENTIEVLEDQLINTQQ

SEQ ID NO: 57517 - protein, 325 aa, Zea mays
  Coding DNA Sequence Number=SeqID_14142
  Homolog annotation: Hit_ID=Q6K2P2; Match level="QueryCoverage=88%, HitCoverage=80%, E-value=2e-52, Identity=45%"; Hit description =Putative uncharacterized protein P0706E03.10
  Subcellular localization annotation: CTP_CleavageSite=33; ConfidenceScore=5.43e-01
MEAATTAAVTCAVDYAILTPTSATFTATTTNSVQSSDSSQLRGGRPSTADLELTLSGAPPAGQEQRSGVDDGNRRNDTKIAISGFPRSRLFDGARAPYRREIEDGLKSLAARETPAPRPESGHGYRVITLAGHNVGASMVLGYGGGLTEAPAPLPRAAEPGVPVPGPGSRPSAVAANVNSNVQSVNNSSMEESTCTAGNPGVHVDIKNAREELAAVTPTPIQMEEEKPKEPVRRPPLAVTPQQKSSAAGGAEVAPARPRPRRCLRALMMENGSNTEAARKPRPSACRFQCVTDHAPTATATPSNGGGAGDKNAEDGGKSSTEGAS

SEQ ID NO: 57518 - protein, 444 aa, Zea mays
  Coding DNA Sequence Number=SeqID_14143
  Homolog annotation: Hit_ID=Q6QP51; Match level="QueryCoverage=32%, HitCoverage=92%, E-value=9e-14, Identity=36%"; Hit description =Putative growth-regulating factor 1
MQAASNRTKGAHPFDFDASSMEVQAHTSCNRRAGYYVRETAPPLAPVPRLLDCGTGAATRGDPAHDPTVPAEHIGHGSVSCERRRDGRYGQKWADSNGGGRRAEAAVKSSASSRPLLGQRENPLPRREDDAPVFRSSNGSRTHNGCPADHSSRRINSTAGQAAPLAGEAGPSEGFNNRLRALGLRAHYWSEVRRLARKGSTAASGHSGFVPTTDQGFVGWPPKGSDSRLRARRARDDPGYVRYITKARATLPSLGCHRKLRLARPQGLAPVSASEDGLCLARPQGSDSATTQKTTDSASPDPRARTQPRPQKTVSASPDPRARTQPRPRKTVSASPNPGVGLSLDLGRRTRPRPRRSLHLAQPRARTDHVTGGAIITLPLASSGYGEQDRRPIWLAPGRVGEAEGRLASSGSTTSSACGRSRGGEREKGGWRRLREQEARAAAG

SEQ ID NO: 57519 - protein, 30 aa, Zea mays
  Coding DNA Sequence Number=SeqID_14144
MTKKAQGTTCVNLHSCPSYLLLTYGQPNGD

SEQ ID NO: 57520 - protein, 66 aa, Zea mays
  Coding DNA Sequence Number=SeqID_14145
  Subcellular localization annotation: CTP_CleavageSite=24; ConfidenceScore=5.38e-01
SASQTGKQVARGVRGGSTGLVNPDQSAGQSASQTGSQAARPARGGSTALGGGVGDLRHPKVLKNRI

SEQ ID NO: 57521 - protein, 56 aa, Zea mays
  Coding DNA Sequence Number=SeqID_14146
MARPRRDLPPNTNLHAGPTLNQAREIESAPVDLPPRLRVQPKPPTLHRGSAAATQR

SEQ ID NO: 57522 - protein, 100 aa, Zea mays
  Coding DNA Sequence Number=SeqID_14147
MARPRRDLPPNTNLHAGPTLNQAREIESAPVDLPPRLRVQPKPPTLHRGSAAATQRRLIFYFPALVSFIRDVIVDITPQPITLNQRSKSDKYHKNKHSST

SEQ ID NO: 57523 - protein, 234 aa, Zea mays
  Coding DNA Sequence Number=SeqID_14148
  Pfam annotation: Domain name=zf-CCHC; Domain location=103-120; Score =18.3; E_value=0.0026; Accession=PF00098.14; Description=Zinc knuckle
  Pfam annotation: Domain name=zf-CCHC; Domain location=32-49; Score =22.4; E_value=0.00062; Accession=PF00098.14; Description=Zinc knuckle
  Pfam annotation: Domain name=zf-CCHC; Domain location=57-74; Score =14.4; E_value=0.01; Accession=PF00098.14; Description=Zinc knuckle
  Pfam module annotation: Pfam domain module=zf-CCHC::zf-CCHC::zf-CCHC; Domain location=103-120::32-49::57-74
MKKEKGKDSINHVVCTDLLSMSFKYKKGKGKRRCFKCKKLGHLIASCPYKDKNEGTRSCFGCNKKDHTITSCPVMKNQGCASSKVTLTKENDTQQASCQVERHFCYKCGEQGHLSKVCYKVSRWKREDEQEMERSGLGYLHKSSNWYLKFNKKKLGERIRHKCGEALKRLTIFKMGSTLNHGKALIVLPSITKKGEIQSSLDVGAKKCQSRSSQADSTIYESNIKAQACEMLQM

SEQ ID NO: 57524 - protein, 106 aa, Zea mays
  Coding DNA Sequence Number=SeqID_14149
MAPKRASSKAAPSVDEAAKAALLAERKGKALADNTHQGAGEDEAHNRNLQKQKEILEAKRQRVSAQTKVRQMIRDEEQRAQELEQEIAIMQREGQHDLQHEDLFIP

SEQ ID NO: 57525 - protein, 234 aa, Zea mays
  Coding DNA Sequence Number=SeqID_14150
MLPRSRLLHRILCPLAGLALSNRHLLGVVPLVRPRLLPLGQRHRAPCSSWGSSSSGANTKRRCSSGGGPNCADGYRSLNDDDVVEYTIGSSGGDPNRAHSCRRGELEASRREKRLAKREEALSQREALTTELWAKLKALDQTLDAQWAQQVEAVEKIRKWEQELEDKASDIALAEENLKEKDASLDRRAADLARREIDLAFQEEMLERRGKFLAEHELEAEEKEKKLEERIQQF

SEQ ID NO: 57526 - protein, 145 aa, Zea mays
  Coding DNA Sequence Number=SeqID_14151
MGKKRKREPTPPSEDFGDSEYSEEEFSSESEESPAPIPLRESSDDSDDSQGLATEVWTYIRAVERSGLAGSDESEYSSDEEDSSEEDGGGGEGDDDDDNDGGDGDDDDGDDDGGSRGDGGISRGGSSGGSRGGSGGGRGGNKASG

SEQ ID NO: 57527 - protein, 552 aa, Zea mays
  Coding DNA Sequence Number=SeqID_14152
MDRGKRPASSSSALGGTGGSEEERRRRLRRTDGSLILDPLEMSEDCWWGRGGWLLGPGGAKARQSSDSATTTTTATTAAAATIASTATAARAAVVLLPGSLEVHRAARAHCLDNGLDRGPGHAHRGPASSGPDSVISENATLTAHKIPLRLFPTRLWVGPEFDWRSARCSCVPVDALTAGPPMVTSTATPVPTANWPVTSVLNVFVGPCAGGLIAEELALFVSAWWCCQSCLLLVAVGEAQPRGGWHSSAIARLQGFSSCSPTVVSRRWSSIRMTTSLVVERSKLGCGLPPTLSFKDVHHPRWGGRRAESGPCPPHGLATRFFLQHLEEKDVHQPCGGGEPRLRGAGWLQAVIYSVFGSLARMALVPPPTLPPTVKSSVAVRPPHGRRSHRAQEDGGEDLSARAEASAVAEVVAAAGEAAQCRGGCLRWRDHQRRLWPSLQLFGFNGLVVTPIGGQGRGPLRNGMCIEVAITAATPSWRIPQGQRPQTSNATPLAYGPWYGTRLSGYTAPDLPRRQDQAKRPHRLRTTPWNGLPLFRAGPRLSGPPAFAERS

SEQ ID NO: 57528 - protein, 540 aa, Zea mays
  Coding DNA Sequence Number=SeqID_14153
  Gene Ontology: Mol. function=drug transporter activity; Cellular component=membrane; Biological process=multidrug transport
  Homolog annotation: Hit_ID=Q2RB46; Match level="QueryCoverage=87%, HitCoverage=93%, E-value=0.0, Identity=76%"; Hit description=MATE efflux family protein, expressed
  Pfam annotation: Domain name=MatE; Domain location=305-468; Score =130.2; E_value=5.8e-36; Accession=PF01554.9; Description=MatE
  Pfam annotation: Domain name=MatE; Domain location=85-245; Score =113.7; E_value=5.5e-31; Accession=PF01554.9; Description=MatE
  Pfam module annotation: Pfam domain module=MatE::MatE; Domain location=305-468::85-245
MEKSATTGGGSSGGGGEAAEEAKVPLLQPRAAAAAAAAEEDHGGGGGYDGKAAADEEGRDASWSSLPLRRRAWEENKKLWVVAGPSIFTRFASFGVTVISQAFIGHIGATELAAYALVSTVLMRFSNGILLGMASALETLCGQSYGAKQYHMLGIYLQRSWIILSACAVVQLPVYLFTEPLLVALGQDPDISAVAGTVALWYIPVLFSFVWAFPLQMYLQAQIKNMIITYLAMLNLGLHLALSWLAAVHLRLGLAGVMGSMVVAMWIPVFGQLAFVFFGGCPLTWTGFSSAAFADLGAIVRLSLSSGVMLCLELWYNTILVLLTGYMKNAEIALDALSICLNINGWEMMISIGFLAATGVRVANELGAGSARRAKFAIYNVVVTSFAIGLVLFVLFLFFRGSLAYIFTESQAVAAAVADLSPLLAFSILLNSVQPVLSGVAVGAGWQGVVAYVNVTSYYLIGIPLGAVLGYVVGLHVKVRCSQSLGIWIGMLLGTLVQTIVLLFITVKTDWDKQVVAAQERLKKWYMEENRRMQASRGNP

SEQ ID NO: 57529 - protein, 84 aa, Zea mays
  Coding DNA Sequence Number=SeqID_14154
  Homolog annotation: Hit_ID=A2Z3L9; Match level="QueryCoverage=46%, HitCoverage=20%, E-value=2e-11, Identity=87%"; Hit description =Putative uncharacterized protein
RAEVNESGSVLAVDALSQVKHVLLPVLDRNPYLSEGTRQQCSALTILFVTMALLPELDWEPVRLHEKEGVSSVLKLQFSHSGHH

SEQ ID NO: 57530 - protein, 423 aa, Zea mays
  Coding DNA Sequence Number=SeqID_14155
  Homolog annotation: Hit_ID=Q5GAU8; Match level="QueryCoverage=34%, HitCoverage=96%, E-value=1e-49, Identity=68%"; Hit description =Putative uncharacterized protein
  Pfam annotation: Domain name=zf-GRF; Domain location=34-78; Score =7.5; E_value=0.0038; Accession=PF06839.3; Description=GRF zinc finger
MYREALWQKRGRPRELYPDVSSKDAPVPPELPVPNCDCGRLAWVHQSQHPDTAARCYYLCGTLDGHERCFFFQWIDGPDKFDPRYLLSVNWLSGKTSHERFKRWVPPPPNPPPMTDEEKEVATERRMDSPPRCDCGDRAVIDEDYDKQFCCPNIDYPYGWRKCRFREWLYGPLSHWPEPEETRKCSWESYDDKGEVMRTIESKRIMGQKMRCGSRLVDSYINDRIRDMRREAKSAFYDSPKRAEYRRLKAADEKRAQDVREWEAAQAEKQMLDNLADRLKGNIGSGVNYLADEAHARYVQDKMATMEEEDDDTSRLKEEDDTSRLSELIALAEAGLRAQEEEDEFMSQAVAEVETAYYKKKSDEAEAEDELFSQAADEAEANYYKRTGDKCDAGQCSKWNEVVVEDCATDDSEDELLIDCDSD

SEQ ID NO: 57531 - protein, 600 aa, Zea mays
  Coding DNA Sequence Number=SeqID_14156
  Gene Ontology: Mol. function=protein serine/threonine kinase activity; Cellular component=outer kinetochore of condensed chromosome; Biological process=mitotic cell cycle spindle assembly checkpoint
  Homolog annotation: Hit_ID=A2ZHN6; Match level="QueryCoverage=98%, HitCoverage=97%, E-value=0.0, Identity=62%"; Hit description =Putative uncharacterized protein
  Pfam annotation: Domain name=Mad3_BUB1_I; Domain location=6-133; Score=154.2; E_value=3.6e-43; Accession=PF08311.3; Description =Mad3BUB1 homology region 1
MAAAAAEDEKGLLSSVVGDIRCYSGSDPLRPWLRGMRRMERALPPATLREKLPRFLQKCAQEFQDNSRYRDDPRYLRVWIQLMDYVTDAKPLLKTMERNGIGLKRASFYMAYALYYEKHRRFNDAEKMYRLGIQNLAEPIGELHKAHEQFRFRMDSYKKKDKERMPRKVGSSATSMNQVKGESRHYKELKSNIKQTSESSSNPSLGPTKVGVLSRGNSGANNNLPRCNSDDTVVVRFIGSALVGKSETEDACHHGLVEPTINTKEALDAINSMFMEPLEPETVLKRQSKRENPNHNQQTRAFGIFVDEDEPTTKNGTQNRNSSKEQSGFEIFVDEDCANGNNQNAGQNRNCRKENTKLNQERNKSELFVKEDEANDTVQNALCHKSNRYPPRPLLSDSSRHQGESDFQKPFVGGFAILPDDEEPCEKSYGGANINCRTVQPTHNTNNLLCPVQDDSGTRNREGPHSVTSGLQEDTVIRRFVASSIDDEPKVENAWHHGLVDPTVNLKEAMDDINSMFGKPLNFKGEKTKRKTNAHSDGKAAPISGFSILADDDLKEGCTSKASQSNSFKFGDENGLFEPTITTRDVMAEINDMFGMPLDL

SEQ ID NO: 57532 - protein, 418 aa, Zea mays
  Coding DNA Sequence Number=SeqID_14157
  Gene Ontology: Mol. function=homoserine dehydrogenase activity; Cellular component=chloroplast; Biological process=branched chain family amino acid biosynthetic process
  Homolog annotation: Hit_ID=Q2QYB7; Match level="QueryCoverage=100%, HitCoverage=100%, E-value=1e-157, Identity=71%"; Hit description =Homoserine dehydrogenase
  Pfam annotation: Domain name=Homoserine_dh; Domain location=176-408; Score=163.4; E_value=6e-46; Accession=PF00742.10; Description =Homoserine dehydrogenase
  Pfam annotation: Domain name=NAD_binding_3; Domain location=15-168; Score=-5.1; E_value=0.02; Accession=PF03447.7; Description =Homoserine dehydrogenase, NAD binding domain
  Pfam module annotation: Pfam domain module=Homoserine_dh::NAD_binding_ 3; Domain location=176-408::15-168
MPTPVKSVLPVVLLGCGGVGRYLLRHIVSCRPLHANQGVAIRVVGVADSSSLLVAEDVHSTGLDDALLTQLCAAKSAGSPLSSLLGRGHCQLFKNPEARGKVIDAATTLGRTTGLVLVDCSATYDTVSLLKDAVDHGCCVVLANKKPLTGAYEDFQKLVSNFRRIRFESTVGAGLPVIASVTRIIASGDPITRIVGSLSGTLGYVMSELEDGKKFSEVVKTAKSLGYTEPDPRDDLGGMDVARKALILARLLGQQISMESINKRCSVHWVAFSLLLVRDMVSDSVTLKILYFSTPQVESLYPSELGPDAVSTKDFLESGLVQLDKSMEERIRAASSRGNVLRYVCEIESAGCQVGLKELPKDSALGRLRGSDNVVEIYSRCYQSSPLVIQGAGAGNDTTAAGVLADIIDLQDLFQTMA

SEQ ID NO: 57533 - protein, 47 aa, Zea mays
  Coding DNA Sequence Number=SeqID_14158
MFGFAGGNENDGFGIDYGNGCPHCNHCSGEDEVLEGDFQEFQDYDEF

SEQ ID NO: 57534 - protein, 81 aa, Zea mays
  Coding DNA Sequence Number=SeqID_14159
MAHRIARSMRGGRRLKSGDDDLAVPVRQGFDFCLEKLHGSSRKLSKGSVEAEGLWKWLAMVAGAWVARTSGEELAGAKDGV

SEQ ID NO: 57535 - protein, 200 aa, Zea mays
  Coding DNA Sequence Number=SeqID_14160
MTEEVNNRGRSILRKLRGSNKALSCCQLQEVEGPEASEEDMGTSPGRSTAYFVVKTRATIQERVKSPSKSKKRLQKPKPGKVNRSRSCTLLCVIHPTYQNMWIIIPQLVLLRLVSRKFLGHSFHLRRHNSLPTHETYENTEATKRYSFRNAELKIAVKVSPKLQKVVLKERIISCRSFKKSFPRERVYVLHDLRLKIIIS

SEQ ID NO: 57536 - protein, 385 aa, Zea mays
  Coding DNA Sequence Number=SeqID_14161
MESHDLRALRESRLVGGYETDGFGYDYGAASPLQPNRILAEYVDVYSPLLYTPNPPIPRVVSIATTAQAKMKLWKETSRSSKTTTSSRRGMARLRHTARKSVIPFLPSRLAERPLRRPVAGQSSHLERLHHRLHEEQERRRQEQHGSSFSLQQEIESVRSCSPMLPLEAPPAPPLGATASGVAAGGDPDDGGGGDSSSHDTDFSADHEPEGWHSRGVYPDRWEATCLVRLPENSLQGAEACSEHYSISERDSAEAAMQDAARRALSHYCSVLGGVADSLDLKYYPRRPSGSTGGVIVSPVGESNPRLSSTVNLAAVLNTELDHALDELSRARAEIALLRAERAERRHLDDGSPAPVGTQHPYRSPRRGRQPYGNPDCKTKINLEP

SEQ ID NO: 57537 - protein, 17 aa, Zea mays
  Coding DNA Sequence Number=SeqID_14162
MARLSSSQSPPPSRVLK

SEQ ID NO: 57538 - protein, 144 aa, Zea mays
  Coding DNA Sequence Number=SeqID_14163
MELPVGSWSASPPHRVTGWDLVNLSASQSCPVELVPRWVSAWPLRGATHGALPEPGAVCRTDSFSARGHRRAEFGAANPPTPWSCHYEGEWLYTKNMEGSVPPFTDWVPVSTTEWGYNTEACFKSKVEHLLKAVVVESCLEGGG

SEQ ID NO: 57539 - protein, 524 aa, Zea mays
  Coding DNA Sequence Number=SeqID_14164
  Homolog annotation: Hit_ID=A3AG28; Match level="QueryCoverage=13%, HitCoverage=16%, E-value=5e-08, Identity=50%"; Hit description =Putative uncharacterized protein
  Subcellular localization annotation: CTP_CleavageSite=84; ConfidenceScore=5.39e-01
ALNLYYTRLERGRPPPSPCPCSSPARAVFLPTILPAPSLNPPRKRRRFPQSRPRNRLHRGTAPVACPRTRPRDARPCARPVPVTHATVTPSVRDARGRRLLFHTTRPRLAFLSSPPDMPSISTVSTHSRFVFLSALNHSCLLPASVIPASVLSPARTPPPSQECLATPRPHLPSMHPPYPAHNPLHRARAWMPDLAMRAPRQPNPRRPDADLQRSRSLGAAPLASLPFLTVSALILSLLASLSPDCLAASLPDKWRNLLKGYQAQLWVWGQDWGCSKMPNSQSGRQMQLAFQALAQSPWNANFDKLHLICTVDRNSESRLKYICHGGTLGTRMVRADAAAINLDRRLHQLLNEHEESESRADHATAIPVQEWGQRSVGVYSLLGLGSPSRCSSSPTNNGVSVEISIGFAASRLLHIDLAWNVLAGMLPLLPPTLRYLSVAGDTMEGTLEGPSALVKLEMDIESDDEDLDDEVDDGAEDEDLCLYYTESFYKEWEFMANISGPCRFISNTQDGSWYPDRADLFVP

SEQ ID NO: 57540 - protein, 521 aa, Zea mays
  Coding DNA Sequence Number=SeqID_14165
MDKDRQGAAQKRHAVVRLVEARPKRQRGSAKAAAPGGGKPPLAAKSGAPTSSKAPEATAGAGGSKSMKAVPPASRVPEVAKAARALPSAGKRVADFATDISVEDYLGGSDEGQLAIVAPAAATTTAVVAPKAKGGALSAGGEVAALAAVRDEAGAASRRLKEVVESLSQVADFANCTVSGALTTVVSAEVERLRTQHADAVREKSAADSKCRKLADKVATLEGEKADLRRQLAGERRETNEALVKAQAAQAEANLARAEGNLARERAEQLQERLIALEGRVERAEAATRAEAERTRTQLMDTYRELGARTGDFEVPDREPGLRCLEWVQEELQALPTIVEGFMSYTSLVTCEGAMNALSREGCRHFEVFDQADEDFERDIYKVEDPVVKESAKAIYDRMWGPHGREVVRERAETARAQAARGERVDDFGALNSALPDLEPTPAEAVSGVALEPTPETAEDAPDAPASAAAGEDLPPKVAEGAPDAPAAAAPSAEDPAAVAAETTAEATTEAPATSGPSQVA

SEQ ID NO: 57541 - protein, 227 aa, Zea mays
  Coding DNA Sequence Number=SeqID_14166
  Homolog annotation: Hit_ID=A2XND2; Match level="QueryCoverage=31%, HitCoverage=32%, E-value=6e-14, Identity=56%"; Hit description =Putative uncharacterized protein
  Pfam annotation: Domain name=L51_S25_CI-B8; Domain location=132-197; Score=15.7; E_value=0.0039; Accession=PF05047.7; Description =Mitochondrial ribosomal protein L51  S25  CI-B8 domain
  Subcellular localization annotation: CTP_CleavageSite=53; ConfidenceScore=5.62e-01
MRTLSPPTHRPRPHHGSRIPHGSRSRAAAAPSRAPFAPAHGSPTASAAAASPRQTRLQGDSSRRWDLVFSVVKPSVIQLRGPTKVSVFIASNDAEQACNFKITGIYHDGTNLAPSSTLPVRFDYLKLLFLIRCAGDLVARREFVKKNYGDIKARNPSLPFLVRECSGVQPQLWARYGLASVIARIRVQAMLRFWGANCRITGLIHLLGVSSYSEYEGTVLVECCSGV

SEQ ID NO: 57542 - protein, 153 aa, Zea mays
  Coding DNA Sequence Number=SeqID_14167
MAAVTKMKMSTEYHFLWYSVCTGSDRQRGCLHRRRPVFAVIRATAVVIHVDDDPIRPPSKSHAPGDNSGDSPPYPSCSADVEDKFTDESRLPALCHVPEYLHRTAVSLSDSLLIAGMTATVEATNSLRQYFLPPPAAARPPKNSRPPSYPPIN

SEQ ID NO: 57543 - protein, 253 aa, Zea mays
  Coding DNA Sequence Number=SeqID_14168
  Gene Ontology: Mol. function=4 iron, 4 sulfur cluster binding; Cellular component=intracellular; Biological process=base-excision repair
  Homolog annotation: Hit_ID=Q53LY1; Match level="QueryCoverage=55%, HitCoverage=16%, E-value=2e-12, Identity=68%"; Hit description =Endonuclease III homologue
MAILGPMISTSYKAIYTGLPLFFVSIHIFHFIGIFLMFMYVGAPDNWETVLGGIKIMRLSGEAPIDTKGCVKAGSLLPPKCGPPVWPVTRHDSSPVQARPGTVSNGFESAWPVKRAEFERLWRPACYGPARPELQAGTKAALGAPDNWETVLGGIKIMRLSGEAPIDTKGCVKAGSLLPPKVTWSKICSISIIHMMRCNDNDSQPNTGGNDWNRCTNDYSGYDASTVKVRKNSFFKCDFVTDVKLEMKNKVPC

SEQ ID NO: 57544 - protein, 85 aa, Zea mays
  Coding DNA Sequence Number=SeqID_14169
MSELQRSEPNDLVTWLAHRTVRCPIRPIHPFFVGPSIQTQHPGPYEPHLSDNGVDVEYVVLIPNAQSTPNEESFLIMAVVLQFLK

SEQ ID NO: 57545 - protein, 105 aa, Zea mays
  Coding DNA Sequence Number=SeqID_14170
MRKWARPSPLLLMLLSCRSNIPLDRPTRWQGGRPSHTINYILHGTCKNGATSKAEYTNTQLDLTGYKESSSLISCEKQTIRIEFLNLARSLLGDEHVLSVGKITI

SEQ ID NO: 57546 - protein, 25 aa, Zea mays
  Coding DNA Sequence Number=SeqID_14171
MAKVASLRSLPELGLGRVEGTMNER

SEQ ID NO: 57547 - protein, 130 aa, Zea mays
  Coding DNA Sequence Number=SeqID_14172
MGKGREDGASSPRRRDDSGRDEARRVGPTGGGGSSDHARTCVLGACAQGCRPLGELACVGWVGGAGERALGHGRALAKQAARREVGPARAHGAGLLAELGRDAGSWASWAAWRARAHEGGAGAVGRAGGK

SEQ ID NO: 57548 - protein, 261 aa, Zea mays
  Coding DNA Sequence Number=SeqID_14173
  Subcellular localization annotation: CTP_CleavageSite=49; ConfidenceScore=5.51e-01
MAPTISSAEKPSSAATTSAPTVVSTCPPTPHQRAPATPKAHRQVLTPVLAMKTNGTIPEHEYRPHGVRRVVGPSGSSPYDTRGWVPRVMRAVPGQKKPTAARVACNRPTVTSTPPPSPKPAGERADRHAGGMQPAPRRRTLSTSTHPAWRPRPTRHVTGVPVTTCKKLHRHLRQCRDFVTVEPVPRLEATLRMAQQCQPSTSVTEQQGSPLPRREDDAPVFRPSNGSRNGCLANHPSRRINFVAGQATPLAGEAGDASPPP

SEQ ID NO: 57549 - protein, 192 aa, Zea mays
  Coding DNA Sequence Number=SeqID_14174
  Gene Ontology: Mol. function=kinase activity; Cellular component =ornithine carbamoyltransferase complex; Biological process=amino acid metabolic process
  Homolog annotation: Hit_ID=Q6QP54; Match level="QueryCoverage=44%, HitCoverage=30%, E-value=2e-10, Identity=49%"; Hit description =Putative kinase
MNSVGVSTPGGPWTDDRLQAFARERERESLLVSPSSRAATSSYEGPGPFFYRCKERVQGNDVPPVAWSVRALGSGEAETAFLEVEAEPWGRARRRPSSEVEVEAEPWGRARRRPSSEVEVEAEPWGRARRRPSSEVEVEAEPWGRVRRRPSSEVEAGTEPWGRARRSFLWCLRLDSTAVSLTLAGGTAVGAG

SEQ ID NO: 57550 - protein, 120 aa, Zea mays
  Coding DNA Sequence Number=SeqID_14175
MGTGWAAASAQQLGCDAQGRGAWVPLAAAAAVHHARTCALSACAQGCRLLGRARECWLGWRRRRALAEQAVRREVGLAREHGAGLLAELGRDAGSWASWAAQRARAHEGGAGAVGRAGGK

SEQ ID NO: 57551 - protein, 229 aa, Zea mays
  Coding DNA Sequence Number=SeqID_14176
MAFTGPCAGRLDTAAYGFENSPSLSSVAALRRHGTGASGGSTSLHPGTAAQGGDPWAWALAIELGLLVSADMKGHTTTAGGVLLTRRLASSPHGGRHPRSMTHGPEPPCQRLDRCPWRRRRGAANRSSHGSSPSAHQEAIAPARSTASWGLAPFRHCSASRIFIMQLGCGLPPVVIYKDDHQPCGGEKRAGLWPPPALSFKDVHQPCRGGERAELGFCLPHELVARFFI

SEQ ID NO: 57552 - protein, 347 aa, Zea mays
  Coding DNA Sequence Number=SeqID_14177
  Homolog annotation: Hit_ID=Q6BTJ4; Match level="QueryCoverage=78%, HitCoverage=28%, E-value=2e-07, Identity=25%"; Hit description =Similar to CA1621|CaIFF6 Candida albicans CaIFF6 unknown function
  Subcellular localization annotation: CTP_CleavageSite=50; ConfidenceScore=5.35e-01
MDTPSARPRPSLHQEATLAKSPRQPTKSQGHLMQSAACATPTAEPLDRVRLTAAKSGLRRQRKLRFARPQGSESGSAPEDGELRSARPLGSDSGSAPEDDELRLARPQGSDSGSAPEDGELRSARPQGSDSGSAPEDDSGSAPEDNELRFARPQDSDSALASADGLRLVRPGGSDSTPTLEDRLDLDLRGASTSPNLGHRLTTSTGGAIITLPRADSGYGEQDRRPIWLAPLYELQRSSDGHNTTRTGCQDLSGCHDGMALLQSVGRTGKDGTALAQGRSLPPAWTLVTPYCKRTRLGRGANTKAAGSTSHACLPPAAFSPFAFRLAPTHLGWGTRRQFTRRSRDPS

SEQ ID NO: 57553 - protein, 46 aa, Zea mays
  Coding DNA Sequence Number=SeqID_14178
MAMMGSSSEKMYLCQVKKQQTFVASVPRCCLKKKIKTEAAGGSVLR

SEQ ID NO: 57554 - protein, 78 aa, Zea mays
  Coding DNA Sequence Number=SeqID_14179
  Subcellular localization annotation: CTP_CleavageSite=71; ConfidenceScore=5.01e-01
MVNTAHTDAINFLRRGVLTVNVSLDPHGSAPKFADRTFRGGLRPPRVHTGPPKVGTRPLRKGSGPLTAGSRCTRTENA

SEQ ID NO: 57555 - protein, 193 aa, Zea mays
  Coding DNA Sequence Number=SeqID_14180
MDKNQNLAYAPYIMALIKAKTRFEGPCEIVHTPFQPFKNEIGFLTRPLTLFPDDEEDPGYDAGEAPVAEQGLQTHIDTRFQGMMTHMDQRLDDMQSSFDSNWDALNTEYSEFRSHIQTNVTDPIMSRLNNMQQSFQDNMGALSSQFDNLSTNDSMQEISQRQQQLQQDFGQFSSLFDTFSTHYYNMHPPPSDQ

SEQ ID NO: 57556 - protein, 139 aa, Zea mays
  Coding DNA Sequence Number=SeqID_14181
MAARRAGRAVLSSLARSLGLRKPKGQAGSGAKNHRRTLSGVYKDQGEDGSNVPPGPDAGFKNAKRNGCSSNGSRTRNGNPANYSPRRINSATGQAALLAGATGDASPSPKQPRRKRDRERGIPRKGSFPVKEPGSEPPY

SEQ ID NO: 57557 - protein, 138 aa, Zea mays
  Coding DNA Sequence Number=SeqID_14182
MRTIPSADEDPNYACCSTLYVLSEGSSESVRSARSDVAMDVRSILSWVREARHTHGGHCECVVEGQDDGEVRGVLSMHCLGLVGVDIWICLRWEQGDPEFVADGSEAVGGMKFVARDEHDGGRRLLRRLSVKGEMTTG

SEQ ID NO: 57558 - protein, 100 aa, Zea mays
  Coding DNA Sequence Number=SeqID_14183
MAPRAPPTRPSVAPGGAPVPPRGDEDDGYDYAYGNGKWYSFRLERLVHYSQTGHFAEYVDVYSPLLYTPNPPGCPRCNHCSGEDEVVEEDFQEFQEYDEF

SEQ ID NO: 57559 - protein, 122 aa, Zea mays
  Coding DNA Sequence Number=SeqID_14184
  Gene Ontology: Mol. function=hydrolase activity
  Homolog annotation: Hit_ID=Q3SC78; Match level="QueryCoverage=100%, HitCoverage=38%, E-value=6e-37, Identity=54%"; Hit description=ACI14
MVICVGDVHGYITKLESLWSNLQAALPADALATALVIFLGDYNDCGPHTRRVLNFLLALPTRYLAQHHVFLCGNHDLPFTAFIGALPPPPDGSPFSATWDEYIHNEEHKGWFRGPGFEGMHV

SEQ ID NO: 57560 - protein, 280 aa, Zea mays
  Coding DNA Sequence Number=SeqID_14185
MAHLRHTARKSVIPFLPSRLVEHPLRRPVTGGRVCEELLSCAPDGGAPAPPLGIPAAGVAAGGDPDDGGDDSSSSHSIDLSEEQEPEVWVARPITRDAARGCHFHDTLDTLLRQTLDRRTWSIEYRCVIFQHSRGVYPDRWEATCLVRRPENSLRGAEVCSEHYSISERDSTEAAMQDAARRALSHYCSVFGGVADGLNLRLSSTVNLAAVLNTELDHALDELSRACAEIAQLWAERAEHRHLVDGSPAPIGTRHPYRSPQRGHHAYSNPDCRTKINLEP

SEQ ID NO: 57561 - protein, 69 aa, Zea mays
  Coding DNA Sequence Number=SeqID_14186
MGFTASYRRSSWPMCGGDRGKVRLRLDGRQHTHSGSAKASPSCPLSDVITINIVRGTILSLECYILQCL

SEQ ID NO: 57562 - protein, 136 aa, Zea mays
  Coding DNA Sequence Number=SeqID_14187
MGKNKKGGSSSHHSGDKRKREPSPHSKGFGDSEYSEKKFSFESEGSPVYVSPPVSSDDSDDSQWIVADVWTYIRAVERSRLKGSDESEISSDEENSSDLSKEESGSDGDDGDGKGDGNGGKGSGGSSKTSGKVPLV

SEQ ID NO: 57563 - protein, 247 aa, Zea mays
  Coding DNA Sequence Number=SeqID_14188
MAKLNFNFNWGPGKFNRGPERFNRGPRKVQPGYFFRTSLLWYYIEFFVDSLLLELLAPRRLGVSYVDPRAIDLAMRIAERMFLKMKEDEAKNKIEENDRWRPNDESTSSQGSSFKSTSHMCFIANGSDSESESEDEEEQESDSEDEDDLQQFFAQLSKKHRMSLLKLMKRAEEQKEMLHKQEDFLIRKIEDLEKLTKEHEKLKCSHDDLVQRYEDISIEQIKVVNHSSYIAQLENKKCYVQEHDRKA

SEQ ID NO: 57564 - protein, 430 aa, Zea mays
  Coding DNA Sequence Number=SeqID_14189
  Gene Ontology: Mol. function=CDP-diacylglycerol-serine O -phosphatidyltransferase activity; Cellular component=integral to membrane; Biological process=phosphatidylserine biosynthetic process
  Homolog annotation: Hit_ID=Q6I628; Match level="QueryCoverage=96%, HitCoverage=90%, E-value=0.0, Identity=86%"; Hit description =Putative phosphatidylserine synthase
  Pfam annotation: Domain name=PSS; Domain location=99-414; Score =591.9; E_value=6e-175; Accession=PF03034.6; Description=Phosphatidyl serine synthase
MEAKQRPRHGEERRPPATDNGGGGGEEYDPWTAWLYKPHTISVLLVGACLLIWASGALDPEGAAAHSSLTSIKRGVWAMIAAFLAYCTLQAPSTILIRPHPAVWRLVHGLAVVYLVALTFLLFQNRDDARQFMKHLHPDLGVELPERSYGADCRLYVPENPKNKFINIYETLFDEFVVAHILGWFGKAVMIRNQLLLWVLSIGFELMEVRSECTIGTTSKIFFIPVIFLARKNAYYDILQLTFRHMLPNFNECWWDSIILDILICNWFGIWAGMHTVRYFDGKTYEWVGLSRQRSIMGKVKRSLSQFTPAQWDKDQWHPFMGPLRFIQVLFLCVVFMTVELNTFFLKFCLWIPPRNPLVVYRLILWWLIAIPTIREYNSYLQDSKPAKKVGAFCWLSLAICIVELLICMKFGHGEGVYVKKAANRLPDIQ

SEQ ID NO: 57565 - protein, 130 aa, Zea mays
  Coding DNA Sequence Number=SeqID_14190
  Gene Ontology: Mol. function=metal ion binding
  Homolog annotation: Hit_ID=A3BIK8; Match level="QueryCoverage=41%, HitCoverage=25%, E-value=2e-16, Identity=75%"; Hit description =Putative uncharacterized protein
  Subcellular localization annotation: CTP_CleavageSite=52; ConfidenceScore=5.22e-01
MPAPTPVPAIPATTAPPPPDALCAQCLLTKATTPGARGRMSALHGPGEGGPCADAAPGLSPSCEKQKLLTGVVQLRIIPGVYADGDSSVSTYERRASLRQFYAIVYLILQQLESSLIERDLKGKGRCKDI

SEQ ID NO: 57566 - protein, 233 aa, Zea mays
  Coding DNA Sequence Number=SeqID_14191
MMHALEGKQLLEDDPIVVYLTAYLLTLDAQYDFLARDHHQMIARAEDAEKRNSALESREVIAVEALKQAKDEHVQKLIEAYLVTHNQRKALRIQEPASSNPVQPRRAEDPQILEGRPVSIKGEKKTWELPEGAIVLEGIPVFPQVMDKQERPESSQDPPLELFEPLTMKKILAPSPEVKEEVASTPPAPPPSEELQEPVPLEEEFDPVLPYQSPPEEVINISSLLTHLGDFSD

SEQ ID NO: 57567 - protein, 86 aa, Zea mays
  Coding DNA Sequence Number=SeqID_14192
LDSYVLVPEQEAAQEVAPDPAPEPAPEDLPATALEGKLRTPVEMNTSMLGRGSLENMVAGVTWPSILPPGWTIEWDPTSAEEEHEE

SEQ ID NO: 57568 - protein, 202 aa, Zea mays
  Coding DNA Sequence Number=SeqID_14193
MPPAPPQGIPAAGGDPDRDGDDDDASGSSSHGTELSEEPEPEGWISRPITRDAARRSLLRALSNTERDTAEVAMQDVARRALSQYCLLFSGVADGLDLKYYPRRSTGSAGGVIASLVGEGNPRLNNMVNLAAVLNTELDHALDELGKVRAEVAELRAKCAARHYLDGGSPAPIGIQHPYMSLPRGRFDYGTPDCRTHIDLDP

SEQ ID NO: 57569 - protein, 369 aa, Zea mays
  Coding DNA Sequence Number=SeqID_14194
  Gene Ontology: Cellular component=endoplasmic reticulum; Biological process=protein modification process
  Homolog annotation: Hit_ID=Q9AS33; Match level="QueryCoverage=55%, HitCoverage=48%, E-value=1e-50, Identity=56%"; Hit description=NPL4 -like protein
  Pfam annotation: Domain name=NPL4; Domain location=203-369; Score= -41.5; E_value=5.2e-07; Accession=PF05021.6; Description=NPL4 family
  Pfam annotation: Domain name=TPX2; Domain location=9-65; Score=84.2; E_value=4.1e-22; Accession=PF06886.2; Description=Targeting protein for Xklp2 (TPX2)
  Pfam module annotation: Pfam domain module=NPL4::TPX2; Domain location=203-369::9-65
MTVPVAPSFVCANRVDKRKEFYTKLEEKHKALEAEKDEAEARKKEEQDVALKQLRKSLVIRAKPMPSFYQEGPPPKAELKKTVPAPNQRPALPHACQPPRNSSQPNAPHAHRRRESRPHGRRHETLRYRTAHTLAPENPSGSEPPARHAIRSFLRRSKENLIARQIRVTRQENALCTAASFDRDAANAFQLYVAEFLGFGVKRAGFLYGRVDVETKDVFVDFIDEPPQQGSEDVVHLLRDPDEEARVDTIAEGLGMRRVGFVLTQAVGRKASETGEYTMSNQEVMQILGKGVGLTWEEAKLQILSINADVSEVGFGKKDRTVRDLSQERLLLCTLQDGPCNTLNSEVKLTHPCRRADSRSRGSDPEGGY

SEQ ID NO: 57570 - protein, 295 aa, Zea mays
  Coding DNA Sequence Number=SeqID_14195
MLNNSTQKKDMRMSQNKSPLPEDEMPSQVIMCGRKLKTWNKSMISFQYPILEELDTNLTHLKGLEVDIPGAIIPHLQFDYGGDTLRDPALSLQLGRLHDLPVGHGVLTSLAGLSPNGLREHEADPAHPKPLGDGIDAGLLVGVPQEVDHVLGSLLRRLIDKVDEDILGLCVDAAVEETRPLDADAEELGDGELERVGDITVKRGGGAERVLLACDMDLARDKVLPAAAEGEADCVACGRFKMGGIRGRWRVGGAVSEGFVAAAVRARFTAVDFAAAAGVGGVRLRRVSRGLADVR

SEQ ID NO: 57571 - protein, 139 aa, Zea mays
  Coding DNA Sequence Number=SeqID_14196
  Gene Ontology: Mol. function=transcription regulator activity; Cellular component=nucleus; Biological process=regulation of transcription, DNA-dependent
  Homolog annotation: Hit_ID=Q10KD2; Match level="QueryCoverage=87%, HitCoverage=22%, E-value=1e-39, Identity=71%"; Hit description=IQ calmodulin-binding motif family protein, expressed
  Pfam annotation: Domain name=IQ; Domain location=94-114; Score=22.1; E_value=0.002; Accession=PF00612.18; Description=IQ calmodulin -binding motif
MRCGLPFAEDLTGIDSVHLAGEGPDAESLEGSLNVVRKSTQAAARIFQAFRVDSLYRKKVVEYGDVTCGLSDECTLSLVSLKNVKPEQHDTHLHSAAVRIQNKFRGWKGRKEFMIIRQRIVKPQLITEDFCSTNLLGWF

SEQ ID NO: 57572 - protein, 107 aa, Zea mays
  Coding DNA Sequence Number=SeqID_14197
MLDDAARWDDLVTGLHPMSYGVKGVPAHCLVSVGPTTTTKALSEGWRLRLRPNISPHGHAEIPRQRGLVFQGPDFFSFTIEGEVKTPKIDHRSGRVIVVTACHPELG

SEQ ID NO: 57573 - protein, 25 aa, Zea mays
  Coding DNA Sequence Number=SeqID_14198
IGSKVAAALEHWETLLSCSVCVVGQ

SEQ ID NO: 57574 - protein, 75 aa, Zea mays
  Coding DNA Sequence Number=SeqID_14199
MLRYEGVDHEPHESGWSVPKPKGEEDTKRKITNRELIMIEKEYITFGDNSRGKVISRGTIQVFFMDAKNDAFSHA

SEQ ID NO: 57575 - protein, 108 aa, Zea mays
  Coding DNA Sequence Number=SeqID_14200
MPNEVRMHLENMVILEELPLFQEKVMELPLDAQSSGRRLDVDERVEQCRAVAGVLHVLARFVQVLQMQHLRGIHMYREEAPRTELLGSRRRLGEGERWAAAVSSQVAN

SEQ ID NO: 57576 - protein, 61 aa, Zea mays
  Coding DNA Sequence Number=SeqID_14201
MELPLDAQSSGRRLDVDERVEQCRAVAGVLHVLARFVQVLQMQHLRERDQVTLLFSALEMT

SEQ ID NO: 57577 - protein, 819 aa, Zea mays
  Coding DNA Sequence Number=SeqID_14202
  Pfam annotation: Domain name=HR1; Domain location=443-513; Score=7.1; E_value=0.046; Accession=PF02185.7; Description=Hr1 repeat
MEVVELVPCARNKWGNWHEFWFYVAEGTIEDHTGLPVSEMCSHYYSAYPSFEVAEEDADEGALRCAAGLSSGRDLVEEFVAYGVWPLAHGWALGEDGAVRIVGRYVPKTEGQRSWDIRGSNDRLNRVFELNRLPYGGYPGQDDVDRRGKKPVVETGDDPAPAAALSSKKRKLGIAVGGLGVSDGFSRELMRTCAAPGGRMSSPELRESSARMLRVTGVMDKDRQGAAQKRQAVVRLHEARPKRPRGATKAAAPGGSQPPLAAKSATPASSRAPEAAKAAAAGGSKSAKAAPVSSRVPEAAKAARELPPPGRRVADFATDISVEDYLVGSDEGQLVVVPPAVATAAAAVVPRAKGSALSAGGEITALTAVRDEAGAVSRRLKEMKEALSQAADFADRAASGALTAVVSAKVERLRTQHADAVWEKSAADSKCRKLVDKVAALEGEKTDLRRQLAEERKEANEALAKAQSTQAEANLARAEGSLARQRAEQLEERLSALQAHVERAEASTRSEAERTRKQLMDSYHELGARTADYEVPDREPGLRCLEWIQEELLALPAIVEGFMSYASLVTCEGAMNALSREGCRHYEVFDQADEDFERDIYKVEDPVVKESAGALYDQMWGPHGREVVRERAETARGQVMFGFCLVLAECGLYVGLLNLCDVSQAARGERVDDFGALNSVLPDPEPNPAVAVSEATLQPPPETAEGVPDAPAATAVGGGPSPTAAPRVEDPVKVAAELTAEDPATAGSSQESSDGDLDYFAALDVAAAEASPHAADAEVVPGPSTGREGELRSLFAGEEIRIMLFNYREMGIIPKVEPM

SEQ ID NO: 57578 - protein, 174 aa, Zea mays
  Coding DNA Sequence Number=SeqID_14203
  Subcellular localization annotation: CTP_CleavageSite=34; ConfidenceScore=5.10e-01
MALVSRGGSSSNSSPGLFALSSLLSLTEEQPCTRGNEARDVSAGSLIVKTTGSIQEEPEAKTTCMWRRDSMFTGMIDSTELRSHGSSSSLAGCGSSHSRCSSMEEAMREQQERFRKEGSGVLSHNTPPLVIPAPGQACGGEETTTEETPNQIDDFVNNFFASGGSGHNSNDPYM

SEQ ID NO: 57579 - protein, 280 aa, Zea mays
  Coding DNA Sequence Number=SeqID_14204
MVILLWKVTAIELAWIVDTPPTWRASCRCFGSDRTPGVAPQGPRKNDLTNYWALGLFVRPFTSLVDPGGYLSPTAGYTTPPQAEDTIEAIALHGLTTFCGFHPLELSTHPIGLFPAEKEDDPMWKDQVEHAKDIWAIYPSQTAHLTVRCMNALYRLQVMRGEAMSHLMALLEATKITLDNREELVVDLSTEIVEKDLQVEQLSNEIQELEELVGTRENTIEVLEDQLINTQQQLAEANQHLDMHHQEIQDMEANEDVDIEGGEEPASSLDTAGSGRPPSP

SEQ ID NO: 57580 - protein, 108 aa, Zea mays
  Coding DNA Sequence Number=SeqID_14205
MAGGRELAGAKEGCLAGEGLQVLLTGSRDREGRNRVDKFIYNYSKLTVRNTVDYSRQEKLFGKTPMCGPSGPLRRTVHDTRGRTVRTRGADRPRSAEKEQRLGSGWRL

SEQ ID NO: 57581 - protein, 70 aa, Zea mays
  Coding DNA Sequence Number=SeqID_14206
MRIRLKMVKMKIKRKSHLKRRTMIKGEMKTIKTRKMIKKYRVKDRHTQESTKQFNKITLSTPSLVTFIRG

SEQ ID NO: 57582 - protein, 141 aa, Zea mays
  Coding DNA Sequence Number=SeqID_14207
MRARVRAAPDGAPDSLQNLSGASLDSPEAPPIRAPTVDKFIYNYSKSTVQNTVDYFGQEKLFWKNTYERTVRDTRPLMCKGGPSAVGRKGAMTRKWLEAINTTSTTSIHLIQALHSYTFNTRASNSFQDTFKASNLSKFPN

SEQ ID NO: 57583 - protein, 516 aa, Zea mays
  Coding DNA Sequence Number=SeqID_14208
RTASGALTATLSAEVERLRTQHADAVREKSASDSKCRKLAEKVAALEKEKADLRRQLMEERREANEAIAKEQSAQAEARLARAEGNVAKELAGELQRRLAAFESRAEGAEAAARAEAERTRTQLMTSYRELGVRTSDFEVPEREAGLHCLEWVQEELQELPTVLAGLMSFTSLVTCEAAMNALSREGCRHFEALDQVDEDFGRDIFEVEDPVVKESGGALYDRMWGSYGREVVRARAEAARAQAERGERVDDFGALNSAPPEPETTPAEAATGVAPVTAEDAPGALVPAAAGEGLLPRVAEGASDAPAAAVPGAEDPAETTAEAAAEAPAAAGPSQVQDFGPAHATATTGFLAASTAEGGNECGGSVSEFFDFTDSGSSAEWTEESSEEDLDYFAALDVAAAEAALHAADAPGVPGPSTGHRRRRAVAKRRISAEEGARLRVSRVGRQELLSLPAVSGVGEGELRSLFAGEELLLSLPAVSGVGEGELRSLFAGEELRIMLFNYREMGIIPKVEPM

SEQ ID NO: 57584 - protein, 43 aa, Zea mays
  Coding DNA Sequence Number=SeqID_14209
  Homolog annotation: Hit_ID=Q9XEJ4; Match level="QueryCoverage=62%, HitCoverage=2%, E-value=3e-07, Identity=96%"; Hit description=Copia -type pol polyprotein
MTTDRPLELLHMDLFGPIAYISIGGRKNSNPRDFKGILETSSK

SEQ ID NO: 57585 - protein, 286 aa, Zea mays
  Coding DNA Sequence Number=SeqID_14210
  Gene Ontology: Mol. function=protein binding; Cellular component =nucleus
  Homolog annotation: Hit_ID=Q2QNS5; Match level="QueryCoverage=59%, HitCoverage=83%, E-value=2e-50, Identity=56%"; Hit description=Fiber protein Fb2, putative, expressed
  Pfam annotation: Domain name=Di19; Domain location=70-281; Score =115.8; E_value=1.2e-31; Accession=PF05605.3; Description=Drought induced 19 protein (Di19)
MATETDMKRCPRGYPFSRYDAEEWGIRLNEVTSWDARGLYNIHKNSAKSPTPCSGTSAATAMDMEVYERLTAETSHYRGTRFDALIGLDEVEPSDEEEDEEEEERAAGAGAGDELLCPFCSEELDAVGLWCHMDDEHRAEVNAGVCPICTDKVDMNLIVHISSQHRGFLKDKWRNQQGSSGVRYSTLALLKKDLHERISGSSRAAPVSTVPDPLLSSFVGSFYEVDLPKDAKKESLVETEVRSDNIEQRAAESFDEPLLPEVKEEKTRRSQFVQGLVLSLMFDDIL

SEQ ID NO: 57586 - protein, 919 aa, Zea mays
  Coding DNA Sequence Number=SeqID_14211
MCSHYYSAYPPFEVAEEDADEGALRCAAGQSSGRDLVEEFVAYGVWPLAHGWALGEVCPRQMPFHGGRVVRSPAFALNLRNRDPAAFVRDAEDLAVRLVGRYVPRTEGQRSFDIRGSNERLNRVFELNQLPYDGYPGQDEADRRGKKPAVETGGDPALAAAVSSKKRKLGTAMGGLGVSDSFARELMRTCAAPRERMSSPELRESSARMLRVTGGCWPRDVPIPCAAEEDCFTSRMVHRWRVFPYGQNIGAVVWAVMDKDRQGAAQKRQATVRVHEARSKRQRGPAKAAASGGGKPPLPAKAGASAPSKAPEATVGAGGPRLTKVVPPASGVAEAAKAARTLPLPSKRVADFGTEINVDDYLGGSDEGQLALAAPGRGDRDSCASAEGKGLDPWRRRRGVGPRAGQGRGGRGDPPAERSDGGAESGDGGAESALSAEVERLRTQHADAVREKSASDSKCRKLADKVAALEKEKADLQRQLAGERREANEAIAKEQAAQAEARLARAEGNIAKELAGELQGRLTALESRAEGAEAAMRAEAERTRTQLMTAYRELGVRTGDFEVPEREAGLRCLEWVQEELQELPTVLAGLMSFTSLVTCEAAMNALSREGCRHFEALDQADEDFGRDIFEVEDPVVKESVGALYDRMWGSYGREVVRARAEAARAQAERGERVDDFGALNSALPDPETTPAEAATGVAPGPTPETAEDAPGAPASAAAGEDLPPKVAEGAPDAPAAAVPSAEDPAAVGAEPAAEAPAAAGPSQVQDFGPAHATATNECLAASTAEDGNEYGGSVSEFFDFTDSGSSVEWTEESSEEDLDYFAALDVAAAEAVPHVADAPDVPGPSTGRRRRRAVAKRRVSVEEGARLRVSRAGRQELLSLPAAAGAGEGELRSLFAGEELRIMLFNYREMGIIPKVEPM

SEQ ID NO: 57587 - protein, 136 aa, Zea mays
  Coding DNA Sequence Number=SeqID_14212
  Pfam annotation: Domain name=GRP; Domain location=48-119; Score= -29.6; E_value=0.085; Accession=PF07172.2; Description=Glycine rich protein family
MGKDKKGRGLPRRSGDKRKREPSPPLEDFGDFEYSKEEFSSKSERSPGIAAEVWMYIRSVERARLEGSDESEVSSDKENSSDSFEEGSGDDGSGGGGGDGDDGDKGGDGGSGGGRSDNDNKGGRSSSKATGKAPLA

SEQ ID NO: 57588 - protein, 149 aa, Zea mays
  Coding DNA Sequence Number=SeqID_14213
MGKSNKRKREPTPPLADFGDSEYSEEFSSESEGSPAPVSPPASSDDSDDSQGIAAEVWTYIRAVEPSGLEGSDESEYSSDEEDSSDSSEEGGGGDGGDDDDDGGDGDDGDDGSDGSSRGGNGGSKGGNGGSSRGSNGGGSSKGSNKASG

SEQ ID NO: 57589 - protein, 185 aa, Zea mays
  Coding DNA Sequence Number=SeqID_14214
MAMMGSTLDKMYLCEVPNFGIFKAETGNDPIGDLEARVEQLRSELRHRNRAREQDNQRIAELSADIRRLQYEISEWDSAIDWAINSRSIAWDREAKARACKAELSAALDSLQGYCNTLHEEVHVLYARLHSNVPSDVAAMGSGPSGIANEGPERELDLFRPPPSMNLADERSPAAGNEGTKDDED

SEQ ID NO: 57590 - protein, 126 aa, Zea mays
  Coding DNA Sequence Number=SeqID_14215
  Subcellular localization annotation: CTP_CleavageSite=44; ConfidenceScore=5.34e-01
MSCARGPTNSSHPNENPHTDVTVATSPTSSTTSPELIRRRYALTCLAEKCLSPMYMPTWLSEKCLSPAYAITWPSEKCLSPVEAQLARLLPRSRLGSGEDAIPPKAKAEAESWGRARRRPPLEAEA

SEQ ID NO: 57591 - protein, 80 aa, Zea mays
  Coding DNA Sequence Number=SeqID_14216
YKCGHCTTAVEVSEALYAKAVGPDLLAGNHWGQLICVGTECLATSCSLEDMVAGVTWPSVLPPGWTVEWDPTSAEEEHEE

SEQ ID NO: 57592 - protein, 32 aa, Zea mays
  Coding DNA Sequence Number=SeqID_14217
  Gene Ontology: Mol. function=aspartic-type endopeptidase activity; Biological process=DNA integration
  Homolog annotation: Hit_ID=Q8W0X4; Match level="QueryCoverage=100%, HitCoverage=1%, E-value=5e-09, Identity=90%"; Hit description =Putative pol protein
MTGEKKMFTSYVKNKDSRDSIIFGDGNQCKKK

SEQ ID NO: 57593 - protein, 289 aa, Zea mays
  Coding DNA Sequence Number=SeqID_14218
  Gene Ontology: Mol. function=binding
  Homolog annotation: Hit_ID=A3BC52; Match level="QueryCoverage=69%, HitCoverage=8%, E-value=3e-57, Identity=63%"; Hit description =Putative uncharacterized protein
  Pfam annotation: Domain name=HEAT; Domain location=127-162; Score =15.6; E_value=0.13; Accession=PF02985.13; Description=HEAT repeat
  Pfam annotation: Domain name=HEAT; Domain location=84-120; Score =21.8; E_value=0.0025; Accession=PF02985.13; Description=HEAT repeat
  Pfam module annotation: Pfam domain module=HEAT::HEAT; Domain location=127-162::84-120
MTTNKMYLPSLQGLLQIDERAGEGAAQCLGEIYRLFGRKITAGLIETSSIVAKLMKYHEVDFVRQDALLLLENALEGSGGGGAAAAYQEAFRIIMRGVSDKSFIVRAAAARCLKAFANIGGPALGMADFDSSMSYCVKGLEDSVSSVRDSFAEALGAILALAVNPDAQVKKGGKKQTASAKKIEDGVQKHLIVPFVKDRADVDTGAKLREHLGGKTIGEDVGKLRARRDVDPDIPDDNTVTDDVEVDLNVLGALMLDRVDIEVDGADVVVVDQGALGEGAMEFLEKLAV

SEQ ID NO: 57594 - protein, 122 aa, Zea mays
  Coding DNA Sequence Number=SeqID_14219
MGNNVTWAAEIEDLDWWGPIRRWVGLGPVTEGVGDVELAPGRGVEAGEGLVEKGLGRRARLGAEESMNLAILIETKPKSPRLSSKSCCSTTVCKTSQRVPAEFKDVLDNTVVAALSHSSAHG

SEQ ID NO: 57595 - protein, 178 aa, Zea mays
  Coding DNA Sequence Number=SeqID_14220
MNAVVTSHLPVCLYSAAGPAERKQLRLKLLERNAEDYSFTLELKLGMAILPAGSGIHGYPTRRFRVRAVTHSRQKAETAPALLLLTGVDPAAVPHCRLRGWLAASLLGCPATWPSPAIATPPVRSEIQASVDMIHRVFGLLVKGLFGVARLPPHRASLAAVKLAATTAAAEVWQAVAA

SEQ ID NO: 57596 - protein, 142 aa, Zea mays
  Coding DNA Sequence Number=SeqID_14221
MGKSKKGGGSLHHSDDKRKREPTPPSEDFGDSEYSEEEFSSEFEGSPAPASPPASSDDSDDSQGIAAEVWTYIRAVERAGLESSDESEYSSDEENSSDPSEEGSGGDGGDGADDGGDGDGDSGKGGDGSGKGSSKGSNKASG

SEQ ID NO: 57597 - protein, 145 aa, Zea mays
  Coding DNA Sequence Number=SeqID_14222
MGKNNKRKREPTPPSEEFGDSEYSEEEFSSESEGSPAPIPLCESSDDSDDSQGLAAEVWTYIRAVERSGLEGSDESEYSSDEEDSDGGGEDEDDDDDDDGDGSGRGGGGGSKDGDGGGSRGSNRGGNSRGSTRGGSGGSGNRASG

SEQ ID NO: 57598 - protein, 59 aa, Zea mays
  Coding DNA Sequence Number=SeqID_14223
MARHPPVAQSNGARANAAEVRRLARIPSPEARIPHSLGNIQVLWPESNRWCPAAFPQTQ

SEQ ID NO: 57599 - protein, 36 aa, Zea mays
  Coding DNA Sequence Number=SeqID_14224
MGSHDPRAKWKSRLMGKEEGVEADLQEFRDFDEFED

SEQ ID NO: 57600 - protein, 114 aa, Zea mays
  Coding DNA Sequence Number=SeqID_14225
MISGVQRPAQSIIPSLSGTLPAAMQDAARHALSQYCLLFSGVADGLDLKYYSRHSTDSTGGVIVSPVGEGNPRLSSMINLVVVLNTELDHAHDELGKAREEIAELRAERAKRRH

SEQ ID NO: 57601 - protein, 143 aa, Zea mays
  Coding DNA Sequence Number=SeqID_14226
MEVRCQTNFCQNEDGFPKLLRACTVRLGIRSQLEYDGREFVEHGTEKETVPFGWPECVHWEGQQLLEDDPTVVYLTAYLLTLDAQYDFLARHHRQMIARAKDAEKRNRKLHVDLTTAQARVAALESHEVITLEALKQAKDEHV

SEQ ID NO: 57602 - protein, 39 aa, Zea mays
  Coding DNA Sequence Number=SeqID_14227
MAGGNTLAGAKERWLAGEGKEEGVEADLQEFRDFDEFED

SEQ ID NO: 57603 - protein, 44 aa, Zea mays
  Coding DNA Sequence Number=SeqID_14228
MAPARSLLAGLLSLCSLLRPWKKKLCASFPSFEESKTKRWRPSD

SEQ ID NO: 57604 - protein, 182 aa, Zea mays
  Coding DNA Sequence Number=SeqID_14229
  Subcellular localization annotation: CTP_CleavageSite=33; ConfidenceScore=5.53e-01
MQAACNCAKWVHFSDFQRAQHGSPGPRVMQPVRRMLRASNCTATRATATPPRLRNQQRARVPFLERLAHAQWLPCEPHASSHQLRGGTGGASGKRSKRRFAFAIRTASKKAPSLPTDQRFEGRPLEGFNSRLRARGLHTHYWSERLGGYSRKPGSGQTVDSVNIPAPRTWDPTVHPGYGQLA

SEQ ID NO: 57605 - protein, 160 aa, Zea mays
  Coding DNA Sequence Number=SeqID_14230
MAADSFFSSAASPYLVEARTMTKAERESPEPPTYTLGSRATLESTNGHGELPSGFRGEENGFRRNHPRKTRPDHWDPLHSDSTRQPVGEGNPRLNSMVNLAAVLNTELDHTLDELGKVRAEVAELRAECTARHYLDGGSPAPVGIQHPYRFEYGTPDCRT

SEQ ID NO: 57606 - protein, 59 aa, Zea mays
  Coding DNA Sequence Number=SeqID_14231
MAEGLAAMAGGIKLAGAKEKWLADEEIWSQEIWSVSLPKPEANLRMTKPKVNDPKLDGY

SEQ ID NO: 57607 - protein, 109 aa, Zea mays
  Coding DNA Sequence Number=SeqID_14232
MRHLAVPVLDLWGCETARVSSHTFIAQQVVGNNVHELAKGGSSREVTAHRSKILPEGLPYTDHSPTALAPFGRFLPPWNTPAAEPERTTAEGSPEHAKFWVLAVDVGLD

SEQ ID NO: 57608 - protein, 47 aa, Zea mays
  Coding DNA Sequence Number=SeqID_14233
MAGGIKLAGAKEKWLAGEAFPLKGISSRDSGQSPFRVKRRVRLIGNG

SEQ ID NO: 57609 - protein, 45 aa, Zea mays
  Coding DNA Sequence Number=SeqID_14234
MAEVTPYPFACPKLRERCLRHHVQAASAEAVSFCRTFGDEAWSQQ

SEQ ID NO: 57610 - protein, 356 aa, Zea mays
  Coding DNA Sequence Number=SeqID_14235
  Subcellular localization annotation: CTP_CleavageSite=48; ConfidenceScore=5.35e-01
MAGSAAPMPRPARPPLWPPGLGRPWPVQPPRPRPGRPAPVPALPDRVPAHPRSRWLDLDTLHESQSSPSYPPALLSVRFAVLWPDSPATWRDYTTACAPPAPPLGAPASGVAAGGDPDDGDGDDSSSHDTDFSANLEPEGWVARPITRDAARGCHFHDALDTLLRRAFDRHTWSVEYRCVVYQHSRGVYPDRWEATCLVRCPENSLQGAEACSEHYSISERDSAEAAMQDAARRALSHYCSVFGGAADGLDLKYYPRRPSGSTGGVIVSPVGEGNPRLSSTVNLAAVLNTELDHALDELSRARAEIALLRAERAERRHLDGGSPAPVGTQHPYRSPQRGHQSYGNPDCKTKITLEP

SEQ ID NO: 57611 - protein, 102 aa, Zea mays
  Coding DNA Sequence Number=SeqID_14236
  Subcellular localization annotation: CTP_CleavageSite=46; ConfidenceScore=5.13e-01
MASGQTLLLKGPRSRPLTGDENQPLKPKSWRPGAQVALTVSSTEATASARGSLTSGYPHLGTDDSGHLPTNTAPAGGGRPKAQNSQNSGPSKKNETDVPGTR

SEQ ID NO: 57612 - protein, 120 aa, Zea mays
  Coding DNA Sequence Number=SeqID_14237
MSWEGQGIECLGHPADLMHLVVECGRPFIDQPHRRRGLKKVFNGQVELGYSSLSLFLLGPCKRTRLNNPVECQILVRELIPQMADVSSQLIYAVVIYDSYSRPTAEFRLEPTHFCFRDPL

SEQ ID NO: 57613 - protein, 67 aa, Zea mays
  Coding DNA Sequence Number=SeqID_14238
MEVAENHSALEVADVENPVLKDGPSGYPAPRVLPIASVDIPLSSHQLASHDLGIPSFFSNLQAKYCL

SEQ ID NO: 57614 - protein, 168 aa, Zea mays
  Coding DNA Sequence Number=SeqID_14239
MASLGLRTLRAIGGCSLGQQIIFYLSLILRVIYDTPSTVVGTHGAPSTHHANDDTRTRSGAEKNMIGTMASLHGVRPPELSRQRLRLAAQPEDGRGITTTTPLPKIDIIIDDRRTRVEYWRSLHALGPFNGPLTSKSPTSTSTSLSRIQEAGWPSTPPLPELLGQPKM

SEQ ID NO: 57615 - protein, 74 aa, Zea mays
  Coding DNA Sequence Number=SeqID_14240
MGRTRVAFVLLLLEERDPEGVGALQTSLGFKDFHHTARLHSVTEPPKNVSPILQTLQNIGDIEMRKRLHKLTFI

SEQ ID NO: 57616 - protein, 252 aa, Zea mays
  Coding DNA Sequence Number=SeqID_14241
  Homolog annotation: Hit_ID=Q6QP51; Match level="QueryCoverage=30%, HitCoverage=58%, E-value=2e-13, Identity=41%"; Hit description =Putative growth-regulating factor 1
MKARARMSRNRRDGYCVPGNHRHPRQCRVFSTAEPVPRLEAALRMTQQCQSSTTITCQSAAGGGATVDMAKSGPAGKRHLWQAKRASFRLRRDDRVKKGTEKGDILKRILLSEGNRLPSPPTDQGFEGWPLGRAGPSEGFDSRPRARRVRDDSRYVRYMAKARATLPSHPGKVDSSKFSLGRNRKLRLARPQASASGGGLRLARPQDSASASALGGIASSPDPGLGLRRSLRLARPWARTDRATWDTSLPYP

SEQ ID NO: 57617 - protein, 251 aa, Zea mays
  Coding DNA Sequence Number=SeqID_14242
MTTDRERGYSERDPSPRRKRAPSPLLIRGSKAGPSEGFNSRLRALGLRAHYWSEVRRLAPRKGSTAASGHSGSAPTTDQGFVGWPPKGSDSRLRARRARDDPGYVRYITKARATLPRVRLTVAKSSLGRHRKLRLARPQGSDSTSTLDDGIRLARPQGSDTASTSEDGLRLARPRARAQPRRWTTDSASPDPRARTQPRPRKTVSASPNPGLGLNLDLGRRTRPRPRRSLRLARPRARTDHVTGGPSLPYP

SEQ ID NO: 57618 - protein, 71 aa, Zea mays
  Coding DNA Sequence Number=SeqID_14243
MTRVACTLHGKRLVGGVSVLSVGVNPDFVDGISAQLKSCGATVPEQALSLMQWNPLLLQKQIDDLKTSNAG

SEQ ID NO: 57619 - protein, 139 aa, Zea mays
  Coding DNA Sequence Number=SeqID_14244
  Subcellular localization annotation: CTP_CleavageSite=45; ConfidenceScore=5.64e-01
MAQGIAKSTAPNTSKPPLGAKSAAPGPSKPLPAMPAQERRPPSPPCSAKTELFMLGGRLSRTYCIGALTSEFAAERRRLEGGIERLQTQHTEAVRDKSAEENKSRNLMEKLSAVEAEKEDLGRRLVVEKECADRACAEA

SEQ ID NO: 57620 - protein, 147 aa, Zea mays
  Coding DNA Sequence Number=SeqID_14245
MANDEEVDDFRGLESMVPLAEDARAGIGEQLAPPTGAGEDPVAAVAPPGLYFCDTENRLLRKVLTSGPAQATPTDDTNFVAAATAVPADDSLSGSKSGSFSCDDVATVESSPRLEVGEGSDPPAGAGIERRRRKVVSKHNVGEMSRI

SEQ ID NO: 57621 - protein, 77 aa, Zea mays
  Coding DNA Sequence Number=SeqID_14246
MTHRIARSTGGDRRPKSGEDNLGPPMKFCRVRGLGKLHGLLAKLAKLLARLGSDLRELATVAEARAVVAGGGKARRS

SEQ ID NO: 57622 - protein, 217 aa, Zea mays
  Coding DNA Sequence Number=SeqID_14247
  Gene Ontology: Mol. function=RNA-directed DNA polymerase activity; Cellular component=chromatin; Biological process=RNA-dependent DNA replication
  Homolog annotation: Hit_ID=Q2QQC0; Match level="QueryCoverage=35%, HitCoverage=4%, E-value=3e-09, Identity=37%"; Hit description =Retrotransposon protein, putative, Ty3-gypsy subclass
  Pfam annotation: Domain name=Retrotrans_gag; Domain location=79-169; Score=7.4; E_value=0.01; Accession=PF03732.8; Description =Retrotransposon gag protein
MMPSRTHAHDGSGTSRGQEDTPNPPPVPPTLAEAIVALVTATADNTCFLREMADNNCSSKAGELIRKDPAKLHIWISQKHVPHYLSRLKIPLKRTNGFGSLDRSLDSSDEHYILEGVLHMKQEEFMKLKQGGDTVTQYLNKFNHMSQYTIDQVNTDLKKRNCFMRGLNDRLQQKMVTCLDLSYSRAISTALAVAAKYAGPGKSKGYGGDRSNQGPKK

SEQ ID NO: 57623 - protein, 174 aa, Zea mays
  Coding DNA Sequence Number=SeqID_14248
MAQRLTWSTFVGERKKSGEGDSGSLDLAYWFQRYGALKSGLSLSLSLRQIFGFVVSRVRIPMESSDMCLPPLKESRPEIQGRVLEGEEKFLWLDPLGLIHRQGEGWAWLHADSIRTLEGYSWYDISGSISTSGSAMISIGNRTHLFSWDTWNTLWMPDIFGVTKSVPKISLSPG

SEQ ID NO: 57624 - protein, 76 aa, Zea mays
  Coding DNA Sequence Number=SeqID_14249
MGKNKKGGSSSHHSGDKRKCEPTPPSEDFGDSEYSAEEFSSESEGSPAPASPPTSSNDSDDSQGIACGGTARIIPA

SEQ ID NO: 57625 - protein, 709 aa, Zea mays
  Coding DNA Sequence Number=SeqID_14250
  Homolog annotation: Hit_ID=A3BQI5; Match level="QueryCoverage=27%, HitCoverage=18%, E-value=4e-12, Identity=30%"; Hit description =Putative uncharacterized protein
  Subcellular localization annotation: CTP_CleavageSite=82; ConfidenceScore=5.56e-01
MSFPLPPLSLSSLPLPSHALPPPADAPAPPTHSLTPVILPWSAATQPATPASVSSPLSAQSVADIPGGRSKAQRWCEQEFPSAASRSDLRRSYKEALVDGRFTASGADDGDGGWVKVVGRRHRSPCSPLPLRPPDPFLLIYVGDASTISRRPTVRLSVAVWYGVFITACLGIGCVRAHAGRGLCITQRRCWCGVQFPGRSSVWRPVPRKVLRRCWCGVQFPGRSSRRSFLSAIWKVFRGSAMMVMAEEDLHRALFVNVLGQEGSDCAVVILEALASKYGLEADALQIRRAASISFLVFFPSVDHAVRALAGGNSISIPPLRLHLRRWSRQASASGGGALPVLMDVELGGIPAHLWRIDSAEHLLGGHCIVQGLHPDAVDGTDLSVLKLKAWGFSMDCLPSRCDLHVEEPTSIGEDGSCFPRTLIYSILVKVTTPIVLPVEEQPLFSSPDDDDDRDSKHQRQRQHVTDHQFSSVRTSVHAWLGPRITPGGGGGTVDAAPLPNSSVDELQAHVPSFPGCPPSPVLGAPFIDNTGLLPASVGVSDVSTGGKAAEPFSGNALVPLVSSFNLEEQSASRILVSSWDYKIRAKPPCFKVYVRKKIPVQIALSEEIGTSTPLQKFKDGITKQINGILPAPIQPVKRKRKLIPSNFNLRRSRRVAKIPPELGSPSTAKVCKLLGFCDERENISFTDARRYAKLFDSPLSREHIRANR

SEQ ID NO: 57626 - protein, 192 aa, Zea mays
  Coding DNA Sequence Number=SeqID_14251
MAQRLTRSMFAGERKKSGEGDSGSPVRLCWVQGLGELHGSLAMLTEQLAQTRSGWSELTEVAELPQKRSQVQSPSPPVTSAQGFTVIAPYDVARPPVSSWKLRRPQLCHIVALYCAVLTVECLGIPFLNRCTAPQFGISPKSIKNTAVCELAVDSSTQARRSHCSVVHGRGPQFVKEQKVNDLDANVSDIAE

SEQ ID NO: 57627 - protein, 92 aa, Zea mays
  Coding DNA Sequence Number=SeqID_14252
MSNHIKNEEEVTVEEEETTPSTEKPPAGNYFYFDICGIEPDSPTTQGKPRLIPERPTLNGSGEMARVACTLRGKRLDGGVSVLSVGVNPILS

SEQ ID NO: 57628 - protein, 222 aa, Zea mays
  Coding DNA Sequence Number=SeqID_14253
MEQRPGGSRTQRGEGKPAVGGSSATREEKLLLTGLGKKEQGRRAKGLKTGSAGVEGGGVQRRGGWGRTPCWMGAGRHGKEPSSGVRGACGWKMAEDEEKRCWRLGSEKANRDILKSLSIRGFEFGSNMGYLAESKVWTYIRAVERAVLEGSDESEYSSDEENSSYSSEEGGGGDGGDDDGGDGDGGGGGGEGGDGGGSGDGSKGSSRGSNKGSSKGGNRASG

SEQ ID NO: 57629 - protein, 154 aa, Zea mays
  Coding DNA Sequence Number=SeqID_14254
  Subcellular localization annotation: CTP_CleavageSite=62; ConfidenceScore=5.28e-01
MGKPVPSLLMLLLSRGRVPLNSPTRWQGGRPSHSSNHVLPRTCKNYATSKAEYTNTQLDLPVTALVPTITGMGDLVSGRVRRAICGQVHSGTRLTDLPYFSWQAGPLVQALVLDRGQPPGQLLAPARGCTLRPQDYSLSKCNEMYVMIMQDLRT

SEQ ID NO: 57630 - protein, 224 aa, Zea mays
  Coding DNA Sequence Number=SeqID_14255
MLAPGGALRARRCANPHAPAATHDHARAKAIKPVPVLDYCPRCLVRTSPDLPEPAVASGDLANRQCRPRATTVADPSPAILHSIQAPRKFPGEAVNLAQALPGGPRHRSSRITLTGVHEPAGARGPDCNLADGEYILVPEQGAAQEVAPDPAPEPAPEDLPATAFEGKPRNSASAFGNQTPQPNSCMSRGSREDMVAGVTWPSTLPPGWTVEWDPASAEEEHEE

SEQ ID NO: 57631 - protein, 349 aa, Zea mays
  Coding DNA Sequence Number=SeqID_14256
MWGTKNPERKERRSKREILRKETPKTPKFFKFLSKDFFSQRFENGKRQKKVWKKEGRGFLGLEKEVQIGVQCWGGERPGRPVCQSDWQTDAQTDRRLVKVDQHRLNRPGGAVEPPLTAPGDLFASLTGRLQIRGQRGQRPAELPLRTSSTGLDQKISTWNPQQKDRIWSREVTVHSDLAKICTPWRSNRSLNLGRRNHPRVRRMLAPGGALRARRCANPRAPAATRDHARAKAIKPVPVLDYCPRCLVRTSPDLPEPAVASGDLLANRQCRPRATTVADPSPAILRSIQAPRKFPGEAVNLAQALPGGPRHRSSRITLTGVHEPAGARGPGKPLRHFPIPRAYGLCVIP

SEQ ID NO: 57632 - protein, 70 aa, Zea mays
  Coding DNA Sequence Number=SeqID_14257
  Gene Ontology: Mol. function=uroporphyrinogen decarboxylase activity; Biological process=porphyrin biosynthetic process
  Homolog annotation: Hit_ID=Q9AXB0; Match level="QueryCoverage=81%, HitCoverage=14%, E-value=1e-19, Identity=84%"; Hit description =Uroporphyrinogen decarboxylase
MNYIIATSVPEHPNRVVKAAGPKGHILNLGHGVLQKTPEEAVAHFFDVTRRLRYDTLFQGSVAEELHHVA

SEQ ID NO: 57633 - protein, 23 aa, Zea mays
  Coding DNA Sequence Number=SeqID_14258
VTPPYSTEGPNALYELVLRRSVM

SEQ ID NO: 57634 - protein, 204 aa, Zea mays
  Coding DNA Sequence Number=SeqID_14259
MENDVVETPMLEIVLIDLKLIVKKAYTSSDIGCLHYDEPKWARGFVVKRPWPNHLTNRPYRRRIQCKDRLAPYPDTRASVGKVEPQAQQEALPRPTLGLDLRRKSSPRPTPGLGPRLGLGRWSPPRPTLGLGLNLDLRRKSLPRPTPGLGPRIGLGRWSPPRPTPGLSLNLDLGRWSPPRPTPGPSLNLDLGRNRVLARPQPRP

SEQ ID NO: 57635 - protein, 235 aa, Zea mays
  Coding DNA Sequence Number=SeqID_14260
  Gene Ontology: Mol. function=sugar:hydrogen symporter activity; Cellular component=integral to membrane; Biological process=transport
  Homolog annotation: Hit_ID=A2Y9F0; Match level="QueryCoverage=43%, HitCoverage=26%, E-value=3e-44, Identity=87%"; Hit description =Putative uncharacterized protein
MKEKVDVSAVDLEAGIGETLYRGSREDVIPSVFLSSPPPPLDPPSLPQLSSMWDKEGAAKGNAVTPTLATAMLGSLAPWVCAAAGAPVMAPRLKLLQGAQPRSNYRVPRAQGAHLEQDTTRSTGVARSGRGGVYNKTLLGDKLGKFSASLLMNTMHFALQAGLSKLIICFQPKGPEAAVDMGWKDYFMRVVPTALGTALDINLSNASLVFMSVTFATMCKSASPIFLLLFAFAFR

SEQ ID NO: 57636 - protein, 66 aa, Zea mays
  Coding DNA Sequence Number=SeqID_14261
MGSRHSACSAEAECRGSFVLLLLVTLLRGEKGDHDSWVKCATSAEGNETDISAVLTVMSDLGILFD

SEQ ID NO: 57637 - protein, 69 aa, Zea mays
  Coding DNA Sequence Number=SeqID_14262
MPSMGSRHSACSAEAECRGSFVLLLLVTLLRGEKGDHDSWVKCATYAEGNETDISAVLTVMSDLGILFD

SEQ ID NO: 57638 - protein, 152 aa, Zea mays
  Coding DNA Sequence Number=SeqID_14263
  Subcellular localization annotation: CTP_CleavageSite=43; ConfidenceScore=5.11e-01
MVAPPPTPVARKATGQTRMLLFCHGGKTSPSLPPPGGLTVVVVAAALRGKEYHVVAVVEGHELEAPEMEQRPGLKRLLETTHLELNGKLFVNTQQAPTWRANYRCFDLGGSMDRRVKMSLCAPAQMGWREMEHKGGKLRLVLSCAQGRMRLQ

SEQ ID NO: 57639 - protein, 254 aa, Zea mays
  Coding DNA Sequence Number=SeqID_14264
  Subcellular localization annotation: CTP_CleavageSite=60; ConfidenceScore=5.21e-01
MSPASAADLAPPPPPPADLALAHNRVPSHARWNAPPTTTAQHHPGHGAPRGASTKRGSAEAAEGSGEKEMSSAGEEEKESDAEMRSDESRTDSSGAAHRRSPPPSPSPIGHVVADGLRVEQRGGRPRPGRGEGRLGVPGAERVASSTVGKVPSHTRAAFCGSRISATHFPHGRRPNAPRVEEASVPVATKEPVHDAAGLGGFENPRIVEGRVEERLPLFTAARRGHGARARATPPRQSSVPLMAAISAFTASVS

SEQ ID NO: 57640 - protein, 208 aa, Zea mays
  Coding DNA Sequence Number=SeqID_14265
MDKSGKVIAKWDSRATKIYTEICVEESNISIGHLKVGLRIGAGNARLYYVQNNPLENEDELKVMFGPIVCTNERTLVPGVEDANSSSDDHLEYTLGGGENSTPDPCTNATGKRKMRHDSPKPKKKKDSREEYMKRLVAAFESRSITTNKSITSSDNDPVRLEIKKQLIQVKEDGSPEGSEIHLFATHLLIHKKYRDVFANLETKEGRI

SEQ ID NO: 57641 - protein, 424 aa, Zea mays
  Coding DNA Sequence Number=SeqID_14266
  Gene Ontology: Mol. function=3'-5'-exoribonuclease activity; Cellular component=nucleus; Biological process=RNA processing
  Homolog annotation: Hit_ID=Q7XHQ0; Match level="QueryCoverage=29%, HitCoverage=56%, E-value=4e-36, Identity=61%"; Hit description =Putative uncharacterized protein P0565A07.132
MKTQVVTTQRQLMRDLEVLPLEEATASAKSMNVNGACQRGKLLRFLEQVVVMVVAVDVDEVLGSFLAALNKFIVDRCSWNHSVSKYHVYEFFKVALESGRIQTAINDVILNLFDKFFEMQRNDIIRALNMYKREIEQVLDPTYKEEAVMAGRMTAIVNSNGDVCAIQKAGGEGLMSSVTMQCLRIASVKAADITSKIKKAILTGHKENEEFALAMCPAEPYVLSGGKDKSVVLWSIQDHISALGDSSSSPGASGSKQSVKTANEKESPKLILEGGEFDAVKPLKQSRVGFRGQAWFHINFWARPRSSSSNNKTIKRFFAEVHYKPTSISSPSSSSSSLAITAVPIVQICIIIEEPLSQYRRSCAFCPSYRDILHPKGCRKVVCGNDKDLFEQRLDPCCCTGMGIGKMPFTARPDMSAFLNISPK

SEQ ID NO: 57642 - protein, 47 aa, Zea mays
  Coding DNA Sequence Number=SeqID_14267
MASLSNTFYRTLDKDFTRQRKVVVTAPGLHSLGTNHKKFGGKKKKCK

SEQ ID NO: 57643 - protein, 691 aa, Zea mays
  Coding DNA Sequence Number=SeqID_14268
MAERYQLPRSCVPPTMRRKDGRPTRHATGAPDASCKQLHRHLRHHLASLIAEPIPRLEVNQRTTQQRQPSAAVNAVKNGPAVMTVAGGREQRSRRQPSSRPIRGKQENPLSRREDNAPVIRSSNGSRTRNGRPANRSPRRINSTARQAALPAGAGPGKGDTPKKILPREGTRLRASLLIRGSKAGPPKGFNSHLRSRGPYTHYWSEVRRPAPPKGSTAASGYSGSTPITDQGFEGWPLKGHFRDQRERSCNGIPSEGGIEPSDPVARGPGPADHPQLTGDTMFGAHRGLGGCSRKPDSGRTVDSVNIPARELGPRPNTRATAISHEGTTRPAEALRKALRPRRSETTPPRPRGLHPAGALARTHRNKMQPRKAGPLAKKCDESLQASANTPFEARGLLSGTIIRGTLKTPNSQLVTPISIKLQRPDGARTRARSRKTANSAPPVPGLGLGLSPRRRRTPLRPTQGSDSGSAPKDDELRFARPQGSDSALASAERPPPRPTLEASDSASAMEDILDLGFGRASTPPNLGRRPSHVNRKRHHHPAPEPIRAAENKTGGRQQGLNRSDSCPSARLRRSSDGHDITPAGCQDLSGCHIGMKDQGPLREGWPRGDEDGTGALLGPLASLSRVDACNPLLQAHPTWARDEHEGRGISTSLTPISGHLTSPFALGLASTHLGWGTQRHSLVGLGTPRS

SEQ ID NO: 57644 - protein, 358 aa, Zea mays
  Coding DNA Sequence Number=SeqID_14269
  Gene Ontology: Mol. function=nucleic acid binding
  Homolog annotation: Hit_ID=A2X2U6; Match level="QueryCoverage=91%, HitCoverage=63%, E-value=1e-46, Identity=37%"; Hit description =Putative uncharacterized protein
MAPGKRSAWTSRKPEEPMPTDYEKIRAMNMMKNNQLFQRLGLGQLKSLVTATAANNKDDSPQQSESLYDGENTDNSNEEESQCRYNGRANLSNDGDQISTKERTIRVTRQRIAEINQENSHNLSVHKQLSSCPTTNHDSIETLVVPTQPSANTTIDNNPTHNIDNAIEPNSLIQEESDNHNAVEGTIDIIPRRKSMGKQLESLSRGLGMKIPIQITEGSKRPEPPIQAAKFASEGGITLRQHIPIFHHWKEYKRKENEPTIKNYIGKVTAQFTMDNDSKAVEDACLDMLKVGQRQMRYRLKQKYFNGIPANQVRSTSPISSMSDEDWRKLVEKWSTPKHKVFAINLHWLALYYLYCLK

SEQ ID NO: 57645 - protein, 53 aa, Zea mays
  Coding DNA Sequence Number=SeqID_14270
MAAPPTTSPAALTSRRDRRRLWQEKRTTLRLRHNDRDKKGTEKGGYPEKDPSP

SEQ ID NO: 57646 - protein, 77 aa, Zea mays
  Coding DNA Sequence Number=SeqID_14271
MNSDTHVEALEDDVLNNAHEDERMFPEFIENGHARGYDMLAQFEDSDDEEREENHTMGVPNDVEDEDRLIVDWDREI

SEQ ID NO: 57647 - protein, 103 aa, Zea mays
  Coding DNA Sequence Number=SeqID_14272
MEWGDRRRPGGDLEARWSWRHAGAANPALEWGERLARDARWTWEARVGAGCALWERGCYLRLLLHSVRRGVLLTLVKPGSSRSGGGRSAAAGLRQSTTADEWS

SEQ ID NO: 57648 - protein, 191 aa, Zea mays
  Coding DNA Sequence Number=SeqID_14273
MGIHKKPEYVWKEYRENGMEKCSMARKRLQALSGRDPTEDDLTIVYMVRYLHTLDNHYDDIFSHCTHLNSRVESLEQQVKELKKEKASLQECLDIAEGEEANTREAYRTLKMDYDKKLRKLAPTKKIQKKTKNQGGQTERRKKAPPAPTPARIENLSDVEYMSLASLDDLLKEFGDTLEKEFGSTSENARV

SEQ ID NO: 57649 - protein, 353 aa, Zea mays
  Coding DNA Sequence Number=SeqID_14274
MAERYQLPRSCVPATTRRKDGGYPPSGGLEGGKTRCIREREDMVAFQGGHPPFKGDSPYLRPQPSRAESSPTRSKVLPCSAGTGSHTSCKPAQGRRSQTAQRLFTFAQTNGRKGRAAMQAACNRAKWARFSDSQHAQHGGSGPRVMQPAHRMLRACNCTATCATTAPPRLRNQYRDSRRPSARPSSASLARRGSERTLSHGVKTTHPCSVPRTARARATAAPPTTRPVALTPRRDRWRLWQEKRATLRLRHNDHFKKGPGKGDTPKRILPREGTRLRASLLIRGSKAGPSEGFDNRLRSRGPYTHYWSEVRRPAPRKGSTAASGYSGSAPTTDQGFEGWPPKGSQSPQTQSEG

SEQ ID NO: 57650 - protein, 164 aa, Zea mays
  Coding DNA Sequence Number=SeqID_14275
  Subcellular localization annotation: CTP_CleavageSite=58; ConfidenceScore=5.18e-01
MQPGCTLPPAVTQDGDLQFDGGGKRAGLRPLPLPQPQGFSSPGLGRGTRVASEPLSAPASATAAGRGSSADEIARAAHGLTSNSTAFCPSLLHEFGHGRGPPGSGIRPEVIAAAVRPPGAEVVVVVAARAGDSAPFVGLLLLRSPPPRRVGLFVPAEVEPEFHL

SEQ ID NO: 57651 - protein, 499 aa, Zea mays
  Coding DNA Sequence Number=SeqID_14276
  Gene Ontology: Mol. function=sequence-specific DNA binding; Cellular component=nucleus; Biological process=regulation of transcription, DNA-dependent
  Homolog annotation: Hit_ID=Q652B0; Match level="QueryCoverage=74%, HitCoverage=84%, E-value=2e-96, Identity=52%"; Hit description =Putative heat shock factor
  Pfam annotation: Domain name=HSF_DNA-bind; Domain location=43-271; Score=124.0; E_value=4.4e-34; Accession=PF00447.8; Description=HSF -type DNA-binding
MAEQGGAAGEAAGSDPPAPAPATAPAPAPALAADAAGQRSLPTPFLTKTYQLVDDPAVDDVISWNEDGSTFVVWRPAEFARDLLPKYFKHNNFSSFVRQLNTYVRYLMLARLIFLRPGFRKMVPDRWEFANDFFRRGEKRLLCDIHRRKVAPAPAAGLATAAAAAASGAVTVAAAPIPMALPVRPASPSLSTDEHVLSSNSGSAEDHPQAAASGSVSASASGDTGEENERLRRENARLTRELGQMKKLCNNILLLMTKYASSQQLDASAALSSVVNCSGESSEAVPAPPPLPPAILELMPACPGLATAAAGLVAEADPDQASRLFGVSIGMKRMRDDDDTGEEQADHGAAADVKTEASDPQHRMEPSPESPDQHPWPIYRPTPVYHSMRPCNGPDQGAGSDQDGSNSSLGRNRELRLAQPQASASASAEGEGLRLARPQASASASASGEGLRLARPRASASGGVTSSPDLSLGLRRSLRLARPRPRTDYATGDASLPYP

SEQ ID NO: 57652 - protein, 386 aa, Zea mays
  Coding DNA Sequence Number=SeqID_14277
  Homolog annotation: Hit_ID=Q6AU54; Match level="QueryCoverage=63%, HitCoverage=44%, E-value=3e-47, Identity=48%"; Hit description =Expressed protein
  Subcellular localization annotation: CTP_CleavageSite=29; ConfidenceScore=5.60e-01
MDASLSGPVMHPPLRPAPPSSPSSPPPPPAQRPGSPPLLALAGVEIGFGGPSRAGGCGDRLPWFREAQRARGRVPLQSEDVKLVIVDDPFITTDYMLDAEMLALCAAKASESSREEEGTDHTPQSKAVRPRQELFHSVKHQKESLAAAARKGTVVKSLFMSTTPKKEPVQTPAADKSKGAVSEVCSKLRKLNLACREVPSRYMSQPQPKNTKTTKKSEETTVAKSEKRGLESKTNAKKKILGRSVKRANAGPDGENRNGCSTAADENSLAETAGSHQERKVVLQELRIEVDVSRCGNSDDNKENVSSAPSEEALDNSSHYGSENRLLENNDNVPLKENVALKVAKLQKKVHQEQAGKLKKTTNPRVLRDGVPTSHDSNPFDGYTSL

SEQ ID NO: 57653 - protein, 454 aa, Zea mays
  Coding DNA Sequence Number=SeqID_14278
  Subcellular localization annotation: CTP_CleavageSite=50; ConfidenceScore=5.48e-01
MAGSARPARPLPGRLGQPPAVPPAGAPPGRPAVRPPGPLAAWPPWPARPLAALAARSSGRLAGSAAWPARPPRALAWPPVQPGRLSRPAAQPAGGYEIDGFGYDYGAGKWYSFRLERMARLRHTARKSVIPFLPSRLAERPLRRPVAGQSSHLERLHHRLREEQECRRQEQQSSSFSLHQEIESVRSCSPVLPLEPPPASPLGAPASGVAAGGDPDDGDGDDSSSHDTDFSANPEPEGWVARPITRDAARGCHFHDALDTLLRRAFDRHTWSVEYRCVVYQHSRGVYPDRWEATCLVRCPEDSLQGAEACSEHYSISERDSAEAAMQDAARRALSHYCSVFGGAADGLDLKYYPRRSSGSTGGVIVSPVGEGNPRLSSTVNLATVLNTELDHALDELSRARAEIALLRAERAERRYLDGGSPAPVGTQHPYRSPQRGHQPYGNPDCKTKINLEP

SEQ ID NO: 57654 - protein, 117 aa, Zea mays
  Coding DNA Sequence Number=SeqID_14279
MVAAHLGRRFFPDGGTIVGHQALVAQGSRGENPVHRWTCDGGAFGVVPSLEASDLEPVSACGRGGVGWLVEMLVRSGRRGGALIAVSVARILGAVFRVMGGEVPVHFKVVVSEEIRV

SEQ ID NO: 57655 - protein, 301 aa, Zea mays
  Coding DNA Sequence Number=SeqID_14280
  Homolog annotation: Hit_ID=Q5GAU8; Match level="QueryCoverage=10%, HitCoverage=23%, E-value=5e-09, Identity=87%"; Hit description =Putative uncharacterized protein
MTDAEKEVATERRMDSPPRCDCGDRAVIDEDHEKQFCCPNIDYPYGWRKCRFREWLYGPLSHWPELEETRKCSWESYDDKGEVMRTIESKRLMGQKMRCGSQLIDSYINDRIRDMRRDAKSAFYDSPKRAEYRRLKAADEKRAHDIGCGVNYLADEAHARYVQDKMSTVELMEEEEEEDTPRLSELIALAEAGLHEEEEDDTSRLSELIALAEAGLRAQEEDDEFMSQATEEVEAAYYKKESDEAEDELVFQAADEAEANYYKRTVDKCDAGQCSKWNEVVVEDCTTDDSKDKLLIDCDSD

SEQ ID NO: 57656 - protein, 353 aa, Zea mays
  Coding DNA Sequence Number=SeqID_14281
  Gene Ontology: Mol. function=sequence-specific DNA binding; Cellular component=nucleus; Biological process=regulation of transcription, DNA-dependent
  Homolog annotation: Hit_ID=Q0JKK6; Match level="QueryCoverage=79%, HitCoverage=70%, E-value=2e-36, Identity=35%"; Hit description =WUSCHEL-related homeobox 7
  Pfam annotation: Domain name=Homeobox; Domain location=32-91; Score= -7.3; E_value=0.055; Accession=PF00046.20; Description=Homeobox domain
MAGGPVCRAVPAPTFVMPPISFRGGEERTPDPKPQWNPRPEQIRILEAIFNSGMVNPPHDEIPRIRMRLQEYGQVGDANVFYCGARQAAAQSLIQNQFQLLASPTQAQAPASSSSSSSDRSSGSSKPVPQPMFTTAAAMDFPGPLGATCAQMYYQAHPVASVSASPAHKVQDPVASDEPVFQLWPQGYFLSAVEVATILGGSIGTTTCAWGPARLGQFWPVGGADHHQHHKNNTTATTNTVARDAAHEHNTTLGLLQYGFGDSAAMETTSMAVPLTASPGTAASVVTAGLTALPLSTNAVVVNYDLLQDNLGVPFLKRIFYSHKVLTQKSPLGTVWIAAHFELFEQHQVRRLR

SEQ ID NO: 57657 - protein, 424 aa, Zea mays
  Coding DNA Sequence Number=SeqID_14282
  Gene Ontology: Mol. function=binding; Biological process=ubiquitin -dependent protein catabolic process
  Homolog annotation: Hit_ID=Q10P70; Match level="QueryCoverage=52%, HitCoverage=38%, E-value=2e-78, Identity=63%"; Hit description =Armadillo/beta-catenin-like repeat family protein, expressed
  Pfam annotation: Domain name=Arm; Domain location=158-198; Score =25.2; E_value=0.00023; Accession=PF00514.14; Description =Armadillobeta-catenin-like repeat
  Pfam annotation: Domain name=zf-UBP; Domain location=292-366; Score =5.1; E_value=0.031; Accession=PF02148.10; Description=Zn-finger in ubiquitin-hydrolases and other protein
  Pfam module annotation: Pfam domain module=Arm::zf-UBP; Domain location=158-198::292-366
MGEGSKAMLAKPIQLADQVAQQAGWQCLRADCTELQSRAMKLAELLRQAARGALHKAAGMAALCFQSHSCLRRFFTLNPVSGLPRTLALLDTMLEDIAWLIHVSSPQVDDGDLRGLPNITQNEPVLGMVWDNIACLHTGGLAARADAAATLASLAVGNSYFAKYIVEEDGVAPLVKLLKEGTDDGQEATTMALSLLCRDEDSLHKLLHSGVCSIFAAALKEPPCPGPIRAEQRRPGILSPTSLPPRPYHRPALHLAAHRLSSRPLRFLRRCLRVRPLGRPEIRRDPRELPCCSPCAAASPSPTSRLYACLSCATVFCPSHAATHASASTRPSHQIAVDVDRAELFCAAYEDQVYDPDFDHAVFLAQSSSLLPSTSTASTSLTLRKRRRVDYCAWLRTSSIADAEWGEDWTTAVEGVAGFSAWWL

SEQ ID NO: 57658 - protein, 379 aa, Zea mays
  Coding DNA Sequence Number=SeqID_14283
MALPVDVVGLCPRQGDVGAPPKPRLSLSSVAEAESEPWGRARRRSFGRGQGGVRALGLGEAEFRRLPGLSPSPSPGVGRSGVRRLPGLSPSPSPRVGRGGGRSAEARAESEPWGRARRSFVVFRPRVRALGVGRERSSPVFPGLAPSPSPGVGARRSSSSFRVLARVRALGVGRERSFAVFPGISPKSEPWGRAERKFAVFRVLARVRALGSGGAEFAVAPLARPDCLSDSLCRVAPQSEWRRRRCPSVRLLYADGGYQLRIRRLEAPEPLHRARGRSGTDSTFYIRPYVAFPQGGGGSAPYYPRWAPNMVSPVSCKRVIRVDVRAPFVGGRLGAQRHAQKYLRVICRTRSPGDGVRGLDASLRWDSVTRSFPLVSEMS

SEQ ID NO: 57659 - protein, 88 aa, Zea mays
  Coding DNA Sequence Number=SeqID_14284
MVWTVKVGADVHRDAREGVLEFERAFRERFSAYTLAAKRHIDSTTIFDVQANLYDMRPRSCHFAYACFNSSQGLTWIILERKQTLRSR

SEQ ID NO: 57660 - protein, 204 aa, Zea mays
  Coding DNA Sequence Number=SeqID_14285
  Gene Ontology: Cellular component=extracellular region; Biological process=cell wall organization and biogenesis
  Homolog annotation: Hit_ID=Q7XT39; Match level="QueryCoverage=85%, HitCoverage=63%, E-value=2e-66, Identity=69%"; Hit description =Expansin-B5 precursor
  Pfam annotation: Domain name=DPBB_1; Domain location=17-93; Score =62.8; E_value=1.2e-15; Accession=PF03330.9; Description=Rare lipoprotein A (RlpA)-like double
  Pfam annotation: Domain name=Pollen_allerg_1; Domain location=105 -187; Score=122.7; E_value=1.1e-33; Accession=PF01357.12; Description= Pollen allergen
  Pfam module annotation: Pfam domain module=DPBB_1::Pollen_allerg_1; Domain location=17-93::105-187
MAAAHAIRLLLVTCQVLCVLSVLLYEHNTKIKCTGNKACSGWPVTVTITDSCPGGVCLAQAAHFDMSGTAFGAMANRGMADRLRAAGTLKIQYKRVPCNYNGMGIAFKVDRGSNPFYLAVLIQYQNGDGDLAAVHIMQQGQGGAWTPMQHSWGAMWRANTGKPLRAPFSARLVSGSGKVLVVGNAIPAGWRAGMTYWSKLNYAT

SEQ ID NO: 57661 - protein, 262 aa, Zea mays
  Coding DNA Sequence Number=SeqID_14286
  Gene Ontology: Mol. function=hydrolase activity, hydrolyzing O -glycosyl compounds; Cellular component=extracellular region; Biological process=cell wall organization and biogenesis
  Homolog annotation: Hit_ID=Q7XT40; Match level="QueryCoverage=100%, HitCoverage=100%, E-value=1e-101, Identity=69%"; Hit description =Expansin-B15 precursor
  Pfam annotation: Domain name=DPBB_1; Domain location=71-153; Score =130.7; E_value=4.1e-36; Accession=PF03330.9; Description=Rare lipoprotein A (RlpA)-like double
  Pfam annotation: Domain name=Pollen_allerg_1; Domain location=165 -247; Score=126.0; E_value=1.1e-34; Accession=PF01357.12; Description= Pollen allergen
  Pfam module annotation: Pfam domain module=DPBB_1::Pollen_allerg_1; Domain location=71-153::165-247
MACKPQLLFFTAIAALASIIHPCASVEFHRKLSSWSDGGATWYGAATGAGSDGGACGYRGAVDQAPFSSMIAAGSPSIYNSGKGCGSCFQVKCTGNDACSGDPVTVVITDECPGGACLSEPSHFDMSGTAFGAMAKPGQADKLRGAGVLQIQYTRVQCNWPGVQLTFVVDAGSNPEYFAVLVKYVNGDGDLSAVDLMQTGAGASWASMQPSWGAVWKFSAGSPLLAPLSIRLTSSSGKQLVASNVIPAGWTPGATYQSSVNY

SEQ ID NO: 57662 - protein, 255 aa, Zea mays
  Coding DNA Sequence Number=SeqID_14287
MALPVDVAGLCPRSGDVEAPPKPGSNLSSMAEAEPELLGRARRRLFGRGQSRVRALGSGEAEFVVFRGLSPSPSPGSGGAEFAVFRGLSLSPSPGSGGAEFAVFRGLSPCPSLGSGGAEFAVFQGLSPSPSPGSGGAEFAVFRGLSLSPSPGSGGVEFAVFRGFSPSPSPGSGGAEFAVFRGLSPSPSPGSGGAEFAVFRGFSPSPSPGSGGAEFPMAPLARPDCLSVSLCQVALQSEWRRRRCPSVRPVSGAAK

SEQ ID NO: 57663 - protein, 267 aa, Zea mays
  Coding DNA Sequence Number=SeqID_14288
  Gene Ontology: Mol. function=transporter activity; Cellular component= integral to membrane; Biological process=transport
  Homolog annotation: Hit_ID=Q9ATL2; Match level="QueryCoverage=100%, HitCoverage=100%, E-value=1e-113, Identity=82%"; Hit description =Aquaporin TIP5-1
  Pfam annotation: Domain name=MIP; Domain location=12-250; Score =190.9; E_value=3.2e-54; Accession=PF00230.11; Description=Major intrinsic protein
  Subcellular localization annotation: CTP_CleavageSite=59; ConfidenceScore=5.25e-01
MASNNLLVDLKRCFSAPSLRSYLAEFISTFLFVFTAVGSAISARMLATPDVTSSAWPLVATAVAQAFGLFAAVLIAADVSGGHVNPAVTFAYAIGGRIGVPRAIFYWASQLLGATFACLSLNLLSAGEACACLRNRSRFLPANYTVVSHTDPSMNGVLTFLLVYTVHVVGEREPRSRGGDGKREFAATALGALAVGLTQGAFVLAAGALTGASMNPARSFGPAVVSGHFKNQAVYWAGPMVGAAVAALVYQIMACPSVTGNVEAVVV

SEQ ID NO: 57664 - protein, 516 aa, Zea mays
  Coding DNA Sequence Number=SeqID_14289
  Homolog annotation: Hit_ID=A2YIV9; Match level="QueryCoverage=89%, HitCoverage=91%, E-value=1e-103, Identity=75%"; Hit description =Putative uncharacterized protein
MAGWCEEAVALLQRPAAAEMAVDVLLCAVPIWAAVMIGLVVGWSWRPRWTGLLFLGLRTRLRIIWLPPGLGARRLWFACTALSACSVAPRLLSSAFRRCRGKQQDKASPEDTAAVARDGGGCADGRTNFEGEHDTVTEKDLELLLQLLDNKESGDTAWQNLMERTTSNMTYKAWRREPEEGPIMYCSRTIFEDATPELVRDFFWDGDFRLKWDPMLAYSKSLDEFPQNGATIVHWIKKFPFFCSDREYIFGGRIWESGKTYYCVTKSHAFIFLAALGQMPRRSYSPAPELPGKRPRVVAAAGAGTRTRALPMPGWGHRQVVDFVDFPNSIADESREKATVKFGLGVPYPSLPKKEKPRRVELYFSSWRIRAVQSPKHVGQQSACEVTLVHYEDMGIPKDVARVAVRHGMWGAVKKLQSGFRAYQQMRDTENTLSHSAIMARMTTRVSITASNGGLDHDLSIADKISGENDSSHAVQHGFDWKWVVFGGAVAAVCVLNTGLVGKVLLLGAARRQAKK

SEQ ID NO: 57665 - protein, 856 aa, Zea mays
  Coding DNA Sequence Number=SeqID_14290
  Gene Ontology: Mol. function=metal ion binding; Cellular component =nucleus; Biological process=regulation of transcription, DNA -dependent
  Homolog annotation: Hit_ID=Q01JD1; Match level="QueryCoverage=44%, HitCoverage=95%, E-value=1e-58, Identity=41%"; Hit description =Squamosa promoter-binding-like protein 7
  Pfam annotation: Domain name=SBP; Domain location=172-250; Score =177.5; E_value=3.5e-50; Accession=PF03110.5; Description=SBP domain
MTFGTHLTETPHVIRVSLWPESHSGVPRVPPRAGLNSSMTPLHQQHHQPPPPPPRFHFVLSPALNDDSRAGSTARIAMEGNGGAGGGSGSAAPPWDLAMHWAPAVVSSYPPQPLELQQQELTCLKLGKRPACCWAGAPGNQAAQVHGNGGAGGAAAEGKRKDKAPAAAAVTRCQVEGCHLSLADAKEYHRRHKVCEAHSKAPRVVVLGAEQRFCQQCSRFHAISEFDDAKRSCRRRLAGHNERRRKSNASEAMARGVAHPHGVTAFGHGGFLPSRGLVPAGSSPAAAGALSLLSSARGSVAGASGPWLVTAAREDIPARSSAALDDLIAENRAAALLARQYFVSDRSPAPRRDFVASSTAGCSLQQQQHPPDHDHTAGWHPHPHPYSGGGGGSCGGRYQYHHVAPPSAWHATTLDLMQPTASTTAAPATAGAALWPAVPERAGARSSRSRSETKDGDASGCSGLDAWAPTGGARVLTQEVAQEHFAALVDVDPKPLLEPPCKLTAKEGETTPPQTEAEHASRTRTSLRVVEQGPAARSLRSGMDKLCRSLGGKTLSAARGSTRTLTARQEQRQRLRLKRQAKQQQRQRSGGSKRWGARWLGERMQQGARRRVALAIGEKREGGRDDQQSRRARSEARQHNPARRQRKHRGQRQSGGRQLLRGKRHPTGIGTGLTERRGAGERAVEGGLYARDRHLAGGPDCLWPEAPQAQHRMGSLAAITHEVIRLQRQGNGSQPKASPTSAVSRELEEGAVLKARSWPQQPKAQSDVPIQHVWLESSNSVFFNPRQPNCSSSPHGGRQTGVRRQREDPASLSGPTQLISRRRKLLHASTSLGAAPVFEKLCTSETVLKLSSPDGT

SEQ ID NO: 57666 - protein, 36 aa, Zea mays
  Coding DNA Sequence Number=SeqID_14291
MAVNPAHRGPRVLLLVALLVALVVSGHCPGSLKDWS

SEQ ID NO: 57667 - protein, 43 aa, Zea mays
  Coding DNA Sequence Number=SeqID_14292
MAAPAYALSWRLKGTGRPWHGRARAGATGHGLAHCSAGGCLGL

SEQ ID NO: 57668 - protein, 267 aa, Zea mays
  Coding DNA Sequence Number=SeqID_14293
MTSHGSSDEGNAQSHTDGLAREGFPRILWEVLQGAGYTTSPQYAVQLFEKHQVPHCRVRMTLEPHPLQPGWRSLDSESFGYRAEDTMEAIALHGLTTFCGFHPLELSTHPIGLFPAEKEDDPMWKDQVEHAKDIWAIYPEAMSHLMALLEATNITMDNGEELVVDLSTEMVEKDLQVEQLSNEIQELEELVGTRENTIEVLEDQLINTQHQLAEANQHLDMHHQEIQDMEANEDVDIEGGEEPASSLDTAGSGRPPSPESSVASFAH

SEQ ID NO: 57669 - protein, 361 aa, Zea mays
  Coding DNA Sequence Number=SeqID_14294
MGSARVAFVLSSLEERNFAEVGSLAASPCRWSPKTATTSLVVGRSKPGCGLCPALSFKDVHHPGWGGGQAEPELYLPYGFVGHLLPQHSGERALTGLAEGADFDNAGPSGRKRRQLPRARFAGSAGSGAASGATFRRWVECGYLPVVWAAVASRAPGDRPRRRALLGRRSCSWAVLPLLRYDAPARRSVLARPGGPEWGSTGGQMAVVVGAEVVAAEDVLVADEIAATIRAPGLRLFGFDSLSSPLEWGRGRGPYRSSVCPEVIAAIVWLPGAEVVVAATGVGGGEPPGVLSSRRPSNVGGCSYLRGWNRSSVCNGTLSAGVCSLRLSGPEHLGILGVIPCFSSFRALGLTCRLAGPLNQV

SEQ ID NO: 57670 - protein, 437 aa, Zea mays
  Coding DNA Sequence Number=SeqID_14295
  Homolog annotation: Hit_ID=Q6J9V9; Match level="QueryCoverage=34%, HitCoverage=44%, E-value=2e-14, Identity=43%"; Hit description =Putative uncharacterized protein
MTASKKVRHVVRFRILFLFLFLSLATRTGKGDTPKGILLREGSGPRAFLLIRGSKAGPSEGFDSRLRALGLRAHYWSEAGPSEGFDSRLRPPGSPPTTDQGFVGWPPKGSTAASEHAEREMTLGTSDTWPRLGLRSRGTLGHFRDQQERFCNGIPSEGGIELSDLIKRDRVRQITCRYFWSAPLGHYPTLIERGTGVHSDHPLATHWRHNVRRPPRETWRFPPPPCGKATQGRMKKVESVLDRPLALCGGSGAALANPAPAKPLTVSTYQPDNSEPDYAPGLRPVKAPSTQGTRSRLARAQPRAKEADPGGFTSRPRSRSDRSHFAAPLTDLTGKQRRLCCSDCCATRQGLGLNLDLGRRTPPRLTPGLGLNLDLGRRILPRPTPGLGLNLDLGRRTPPRPTPGLGLNLDLGGSSASPDLGLGSTTSQRGHHYPIPS

SEQ ID NO: 57671 - protein, 115 aa, Zea mays
  Coding DNA Sequence Number=SeqID_14296
MWRFRNVVGRWRCGTVEVAAVDDSGGGRACSWWLVGSGVMVARLGAMARAIGGGDGEGLTWRRCTDPVATTTMHQAGNGEGQRWRPCPTAARSQDDGEDPPWWLEAATTFFCGGG

SEQ ID NO: 57672 - protein, 153 aa, Zea mays
  Coding DNA Sequence Number=SeqID_14297
MASVCGALRKSTSQASKVSVGGCGVEGWVEPAPLDGAGKHGWVDAGFARCGMVVGDVFAVKQAIESPRLLCPSTTSSSCVVATPLGVFLAMGRLSSWVLIGYIVHLLMIAIVPAGVWLRQPGPGSAGLRRVLGLPLRFNLALMELLRPSILLK

SEQ ID NO: 57673 - protein, 103 aa, Zea mays
  Coding DNA Sequence Number=SeqID_14298
MGLLCLGLGDRSWGSATAEPRSWGDVTPGFRGHEDPGTNIITRHEPYYTYPGGAHLYGPNHTWAPLVVREWEPSSAQGEAKSSSEGWRVHIRPNICPPRDQFD

SEQ ID NO: 57674 - protein, 497 aa, Zea mays
  Coding DNA Sequence Number=SeqID_14299
  Subcellular localization annotation: CTP_CleavageSite=42; ConfidenceScore=5.47e-01
MARASVKPAAPCASMPPPGAPSASMLLPAAPTHERRPPSPSRAAEAAVGGTEVSMDISVDDYLVGGVAMFDAHTGRGPAGGGWPGDRGEGVFAGPMVQAPAFAEHIASGAFASEFSAERRRLEGRIERLGTQHTEVVRDKSTVENKSHNLLEKLLAAEAEKEDLGHRLAAKKEDTEKARGEAQATRAEASLALKRATDVESGQRSLRGYVDKAEASTCTGSTEHTRCSWTRTEELELLLSIVMGLMSFASLITCEGAANALSHEGCRHFEVEDEVLKRSAGALYDRMWGPHGRDTVRERSDRALEQMMNDEEVDNFGGLESSVIQAEDARTGVEEQPAPQAGPVGDPTAVAAPASEDPLAAVAPAGEDPAASAALSQVPTSRPAQATPTDDINFVAAVNAVPVSRNLSGSEMESWSSNMGEFGSPFSWTEESSDEDLDYFTALDVAAAESLPQPEVCEVSAPPAGAMNKERCRRKVVSKHNVGEMSRSGRHRRMGME

SEQ ID NO: 57675 - protein, 109 aa, Zea mays
  Coding DNA Sequence Number=SeqID_14300
MEPPTLEDGEMAEPLKAGDGTPLSQGKGEAIHRACLIEASEVSVFTGGESFAPGSCIMFGSLDFLATSEPCLVHYDNIQGVQGCHHQHQLSSTLDTYQDGPIDCLTVEV

SEQ ID NO: 57676 - protein, 200 aa, Zea mays
  Coding DNA Sequence Number=SeqID_14301
MTLEASSPCSQGWALLGLRVFSGTGAEDTIEAIALHGLTTFCGIPSLGAGYPPHWLVPPLRREDDPMWKDRVEHAKDIWAIYLGQTAHLTVREELVVDLSQEMVEKDLQVEQLSTDIQELEELVGTRENTIEVLEDQLLNTQQQLAEANEHLDMHHQEIQDQEANEDVDIEGGDEPASSVDTAGSGRPPSPESSVASFAH

SEQ ID NO: 57677 - protein, 99 aa, Zea mays
  Coding DNA Sequence Number=SeqID_14302
MPDPSPEQPHRRKMRRALENNEQWMQIFFLAHLSNKEPRKNKRNPSPEQIQDCNLENGEYVLIPEQGVVHEEDQEQAPETAIEDLPTAPTIEGNPRLYA

SEQ ID NO: 57678 - protein, 50 aa, Zea mays
  Coding DNA Sequence Number=SeqID_14303
MAGGGELAGAKGGVFGQRGKIEIILNYKGTFGLKEGKSTSVTQKQNDKSA

SEQ ID NO: 57679 - protein, 33 aa, Zea mays
  Coding DNA Sequence Number=SeqID_14304
MVAEARAVMAGGGELAGAKGGVFGQRGLMGFAD

SEQ ID NO: 57680 - protein, 361 aa, Zea mays
  Coding DNA Sequence Number=SeqID_14305
MKDILFANAPKKHLDQLEKKTMKQDPSNNLEDQTVYKYDDEGCLAPNTILAVGESAALRGTPDSPVGFGAESPGVKALRGTPRLAIGSDTTGDQLHNFHRSLPGLRCESALSELRNLMSNFSLLPVQTILLGEDLHRRLTAIRRRCPGILRQRHHGVRCQLMNQDFELLQNLRHKTMRGQTKVGDEKCLKNNQFALGLGNLLCPRDAPNPAAKIPQPLHILHADQRHPRNTEFHHEEEDGMATYRRRRRAVCFTRASSQANRSKEGRRASESRRFGKPAIQQCGVNQRSCQKPPRNHFERGQRLHHLATPSAPDDLVELVPRRANVGAKAKTPPFARCLRQTRYTNEDKMIDRLYPSSHAS

SEQ ID NO: 57681 - protein, 168 aa, Zea mays
  Coding DNA Sequence Number=SeqID_14306
MTNGQVERANERLSCRFDCFDSRTLKTTRVHVQTSAGGGAAPSASFPPSAEPGPASDGDTGGRISTSKEDADTVLGPSRPGSPQGSGPSGRLGWPLRSLSQLSPEDLSPAHGLDSMTPGLVPLTDDLAKLQPSLLHLLGLGSHMLPSRRSLFSSRLRLYPHRHRCLRL

SEQ ID NO: 57682 - protein, 121 aa, Zea mays
  Coding DNA Sequence Number=SeqID_14307
MTDLTEKQRRSPRSDCCANNPSKADNSQVQPRAQQEAPPRPTLGLSLGGRSPPRPTLGLGLNLGLGRNRVLVRPQDSASAPASGGIASSPDPGLGLRRSLRLAQPWARTDRATGDTSLPYP

SEQ ID NO: 57683 - protein, 111 aa, Zea mays
  Coding DNA Sequence Number=SeqID_14308
MQAACNRTKGAHPFDFDASSMEAQAHTSCNRRVGYYGPGKGDTPKGILLREGSGPRAPLLIRGSKAGPSEGFSSRLRALGLHAHYWSEVSKAGPSKGFNGRLRPLGLRAHN

SEQ ID NO: 57684 - protein, 103 aa, Zea mays
  Coding DNA Sequence Number=SeqID_14309
MVMTTRGWMSGWAWPGSDLSHPRLAVGLDVLVLELEASMPPLDSRASAELGPILIAEEEEVAVDKGPEEPGAEKARHALVWELMAKSVAKSISSTASAASGMR

SEQ ID NO: 57685 - protein, 90 aa, Zea mays
  Coding DNA Sequence Number=SeqID_14310
  Subcellular localization annotation: CTP_CleavageSite=53; ConfidenceScore=5.06e-01
MAAYAIRELSMEASSVILSRHRHRSTSGNTLLKWKAMTTLTVVRVEGMYRCARSERSWSVQPLALTTWQTFFMSEGRENGSTRKRWSHRS

SEQ ID NO: 57686 - protein, 181 aa, Zea mays
  Coding DNA Sequence Number=SeqID_14311
MSQRLREASQQLSQQLKQAADFADHVASGALTVDVASEVKSLRAQHADAVREKSAAESKNRRLAEKVAAMEAKKTDLRRKLAEERREEELLVLSTIVTGFMSFASLVTCEGAVNTLSREGYRHYEDFDQADENFEREIFKVEDPVVKQSTGALFDRMWGPHGREAVRERWHMSKTSRTLVV

SEQ ID NO: 57687 - protein, 361 aa, Zea mays
  Coding DNA Sequence Number=SeqID_14312
  Subcellular localization annotation: CTP_CleavageSite=48; ConfidenceScore=5.46e-01
MATSRNGRLQKLMNNATMKNSARQSQSAESVAHQTMNRSCLVWHRTVRCHKKTTALSVFRDRGVPEPTSECRRVPQPKWVEREGEREGGRARRPETGVREVGIPRPSCSSRAQVGLGDVEAPSKPRSSLSSVAEVGSEPQVRARRRLPAGAGAESEPWGRAKRSSSSSGAEPKSEPWVGRGGDRRLRPGRSPSPGVGRSGVRRLPGLSPCPSPGSGGAEFAVFRDLARVRALGRAERSFLWSLRPGLTACQSHSVKWHRSRSGAGGAVLLSGRSVERRSDGGHFGSAGWGARVRIKVSGHLCIKCSCGLVGRCGDLVRVASWRRQGLGQAGNMFAAGGGPRARRKSSGVGCPCLRLGSGEA

SEQ ID NO: 57688 - protein, 70 aa, Zea mays
  Coding DNA Sequence Number=SeqID_14313
MYHCMRQEKTTKGEEEAMRLCRKQDKNNQGRGGGSGARTPEGEEEAPPPPMQVVEQSTLRCHAPLQVSGQ

SEQ ID NO: 57689 - protein, 368 aa, Zea mays
  Coding DNA Sequence Number=SeqID_14314
MAERYQLPQSCVPPTTRQKDDRYPPSGGLEAVTGWVFSNTLQGPPLRRGGWVPRVMQADSEQKKPNRRARRSERRFAFSIMTASKEADPPEGFDSRLRSRGPYTHYWSEVRRSASRKGSTAASGYSGSAPITDQGSPETPCSAPIEGNMALPPPSSLRQGDAGAARTRAKSRKTANSAPPDPGLGHGLRPGRRRTPLRPTPGLGLRPGLRRRSPPRPTQGSDLGSAPEDDELRFARPQGSDSAPAPAGNLRLARTWGSDPTSATEDRLDLGFEGASTSPNLGHRPATGTRPASHLARSAQIGNDGAPAYSVTTAALSPLTEARGRQQGLNRSDSCPFARLHRSSDGHDITPARCQDLSGCHNGMYLGR

SEQ ID NO: 57690 - protein, 684 aa, Zea mays
  Coding DNA Sequence Number=SeqID_14315
  Gene Ontology: Mol. function=phosphatidylcholine-sterol O -acyltransferase activity; Cellular component=endoplasmic reticulum membrane; Biological process=lipid metabolic process
  Homolog annotation: Hit_ID=Q67U60; Match level="QueryCoverage=92%, HitCoverage=87%, E-value=0.0, Identity=88%"; Hit description =Putative lecithin diacylglycerol cholesterol acyltransferase
  Pfam annotation: Domain name=LACT; Domain location=120-662; Score =134.7; E_value=2.7e-37; Accession=PF02450.6; Description =Lecithin:cholesterol acyltransferase
MSFLRRRKPLPPSDGDESDHDDNDKGKKPSSSSGSPSKEPTKRTKAKWSCVDSCCWLVGCVCSAWWLLLFLYNAMPASFPQYVTEAITGPLPDPPGVKLQKEGLRVKHPVVFVPGIVTGGLELWEGHHCAEGLFRKRLWGGTFGDVYKRPLCWVEHMSLDNETGLDKPGIRVRPVTGLVAADYFVPGYFVWAVLIANLARIGYEEKTMYMAAYDWRLSFQNTEVPFFDGLIQVRDQTLSRIKSNIELMVATNGGNRVVVIPHSMGVLYFLHFMKWVEAPPPMGGGGGPDWCEKHIKAVMNIGGPFLGVPKAVAGLFSSEAKDVAVARAIAPDVLDSDFLGLQTLRHLMRMTRTWDSTMSMIPKGGDTIWGNLDWSPEDGIECKAKKHKANDTGVSKDSNGGNIEVQPEPINYGRLVSFGKDVAEAPSSEIEQIEFRVSIQRLINMFLPVPRDAVKGNNIAHSNTSCREIWTEYHELGWGGIKAVADYKVYTASSVVDLLHFVAPRMMQRGNVHFSYGIADNLDDPKYQHYKYWSNPLETKLPNAPDMEIFSMYGVGIPTERAYVYKLAPQAECYIPFRIDTSAEGGEENSCLKGGVYLADGDETVPVLSAGYMCAKGWRGKTRFNPAGSKTYVREYSHSPPSTLLEGRGTQSGAHVDIMGNFALIEDVIRIAAGATGEEIGGDQ

SEQ ID NO: 57691 - protein, 449 aa, Zea mays
  Coding DNA Sequence Number=SeqID_14316
  Subcellular localization annotation: CTP_CleavageSite=28; ConfidenceScore=5.20e-01
MVSTLDGFTRPCAGYLDTTAFGFKNSPSLSSAVAPRRHDTGPRVRDWAVGFGGGEEAFYRRRWHAPHAAIPLLCTWKPTPEEYDSWARAPVPEVGLLLSAEVKRRTTGGGGVLLARRFAFSAHGRQCPKSEEAHYRRRWRAPRAVVRLLRTRKPTPEEYDSWARAPVLEAWYTAMPSLLSHSLCPFASELSVPLCLQGFWMERAGVWWKDPRQRLPPWSATSWGLALFRQCSVSRMFISLAVVGSEPGCSLPPALGFKDDHQPCGGGKRAGLQPPPVLSFKDVHQPCRGGERAELRFCLPHELVARLFLQHSEERMFIILVMEANFGYAAPARPQMSGLSYGCAPISLALMASVPPLMVTVGLAAEDVAWGVVQDVVRCGGGGRALPALDVSRLYTSIPKKELAMAPRRLTVRDQAERLHGYGPPQETSVHSLEPDPRLSDPQYYSSKY

SEQ ID NO: 57692 - protein, 329 aa, Zea mays
  Coding DNA Sequence Number=SeqID_14317
  Homolog annotation: Hit_ID=O48967; Match level="QueryCoverage=50%, HitCoverage=30%, E-value=1e-41, Identity=56%"; Hit description =Putative uncharacterized protein
  Subcellular localization annotation: CTP_CleavageSite=43; ConfidenceScore=5.19e-01
MKQWRDNVDRLLSIAHSGSTRPRPRSSRRQHEASALVRSPLVRAALTEDLWAELNRRRAVEDALISLERSNDLRAELNRRRAGEDARVSLDRARERRQNIEGRNLGQDFAAVAPQTPVAARFQVGVPLAGVGCAALADHLRAASWPSKFRPHLLENRRRQEASSRPTPTTERVLRDPAYRTRPAHRAQAALHVRDTEHCAEPRAPCSPARPSTEAPASPPGPRRAAWTPAAPTPTARHRGATACVPQLRSRRAAPSAALDARQDPLATRTRSQSATTPMLHSRQEPTVSDPGDLAVRDVRLQETSMHQFLSSVNGTSMLSLPPSVDECH

SEQ ID NO: 57693 - protein, 35 aa, Zea mays
  Coding DNA Sequence Number=SeqID_14318
MARSWRWKRRYSDIVQLPTHKYFEQTRLSIINTFN

SEQ ID NO: 57694 - protein, 360 aa, Zea mays
  Coding DNA Sequence Number=SeqID_14319
  Gene Ontology: Mol. function=acid phosphatase activity; Cellular component=intracellular; Biological process=translation
  Homolog annotation: Hit_ID=A2Y182; Match level="QueryCoverage=64%, HitCoverage=84%, E-value=4e-84, Identity=63%"; Hit description =Putative uncharacterized protein
  Pfam annotation: Domain name=Acid_phosphat_B; Domain location=40-268; Score=290.2; E_value=4.2e-84; Accession=PF03767.5; Description=HAD superfamily, subfamily IIIB (Acid
MAKKHLAAVVLAILLALAAGATGMRASEIDDGMPLIHMLRPLLHSGGDLGRRGRVPCDSWRFAVETNTLRDWDTVPARCEKYVGNYMLGGHYRSDSRAVANEAIAYAEGLNLTGQGKEVWVFDVDETTLSNLPYYAKHGFGVEPYNWSTFGAYVKEANAPVLPETQRLYKRLQALGIKPVILTGRREDKREATANNLAAAGYTGYLKLLLKPQNVKVSSIEFKSGERKKLQDAGYVIVGNIGDQWTDLLGEPEGGRTFKLPDPICVVIVVLVTPSADVHLRLRELRNASPLRSCTGRGRIRFLGSGLTRLPVTFSSISSMTPSLLVDLVNDIILNLAASMSSILLLRHYRPCCFDPRRLA

SEQ ID NO: 57695 - protein, 146 aa, Zea mays
  Coding DNA Sequence Number=SeqID_14320
  Subcellular localization annotation: CTP_CleavageSite=47; ConfidenceScore=5.49e-01
MGTIGTNMHTGSTSPTVDASTSAPILGKLSRRRGPTSKVWLNFEEVTAMQRGKEEYINEREIGLKTISTLVLVTSTTFVRLRAEKVDLETKIEYLLTMDTEDAWENWRPSRRVDGMHDRVATLELEFSIAKTYDEKLEAEMWAGVD

SEQ ID NO: 57696 - protein, 186 aa, Zea mays
  Coding DNA Sequence Number=SeqID_14321
MGSRLRAVAISKGPEELRSQMQKKWSPHNPADAKELCMGVGGQNEPLGKSGSKIIVGTVECDILNAAESLQAEMAKQNGQVAVTKNYTKNGEEVATKPNIGQGHIAAAGTNRLQESRPQSGGGQGMRSKRMKLDVVATRQMSNSASWDRKHRTEMIANQRVVGPGVVMDGHCRGEHHTWAEQPGAV

SEQ ID NO: 57697 - protein, 155 aa, Zea mays
  Coding DNA Sequence Number=SeqID_14322
  Homolog annotation: Hit_ID=Q6QP51; Match level="QueryCoverage=31%, HitCoverage=22%, E-value=5e-13, Identity=71%"; Hit description =Putative growth-regulating factor 1
MTVEKGHGSRDETMVTWSAITKQKRWRRKGLGVRFPFSGYSLGLRKPKWEASSRVKNRHQSLSRIYKGPGETRSTLRPNPPDRERGYSERDPSPRRKRAPSPPTDQRFEGWPLGRVQWPPQSTRAPCPLLVRGSKAGPSEGFNGRLRPLGLRAHY

SEQ ID NO: 57698 - protein, 249 aa, Zea mays
  Coding DNA Sequence Number=SeqID_14323
  Homolog annotation: Hit_ID=Q6QP54; Match level="QueryCoverage=51%, HitCoverage=41%, E-value=9e-07, Identity=35%"; Hit description =Putative kinase
  Subcellular localization annotation: CTP_CleavageSite=55; ConfidenceScore=5.31e-01
MKGRKQAKGKPAAFVLPCAQVGCACSRGYKRPLGRALCVGPSSRAANLLGNDGPSCDVVGPSPRSGEVEAPPRPRSSLSSEAKAESEPWARARRTEAESEPWGRARRSSSSSGAEAESEPWGRARRSPSSEAKTGAEPWGRARRSFLWRPRPDLAAVSLTLSSGTTVGVTQAALFSCQAILALTAPAIWSVGVTIWPRLLLCEDWASGKPRLCADGGYQLTLGVLGGAEHGVSSELLMGDPSGRPCPIR

SEQ ID NO: 57699 - protein, 103 aa, Zea mays
  Coding DNA Sequence Number=SeqID_14324
MDGGKKSRNPHKASADYRSDRKSASGMSGDPKKGGRGGKFTWEGADDYGYGYADEDLGLISKKGNINSGRASQVQGGAAAKKDDDEEGATTMGSFGAIKVIVA

SEQ ID NO: 57700 - protein, 142 aa, Zea mays
  Coding DNA Sequence Number=SeqID_14325
PGEGEQLRAAPLLLATVKSSELGQVRATVGPGSPKLGREGENDTTNSVAGKRPRIRGQRGGMAGKRPWAHRRNSGEGFRPRGGGLRRAKAWDSFSRGRGTLGTNARALGRANLAGHRAGAADRHDRTPAKPKLVDNKAKIDL

SEQ ID NO: 57701 - protein, 156 aa, Zea mays
  Coding DNA Sequence Number=SeqID_14326
  Gene Ontology: Mol. function=nucleic acid binding
  Homolog annotation: Hit_ID=Q5NKQ1; Match level="QueryCoverage=52%, HitCoverage=9%, E-value=2e-25, Identity=67%"; Hit description =Putative uncharacterized protein 9C20.4a
MGGEKMSTIGAGDDILPVTSVHKPAASAIAPYTEGVSVTPPAALRAPGHIDEHTKTTDVVGAEKHIPMRHIGPHEQDTPHILQRHPDNIDIRLIPKVGMTFSNVDEAYNFYSQYAYEIETLPCQSHLAEYSQTQYIDCVCGMCQTGSKGYNYIVYV

SEQ ID NO: 57702 - protein, 172 aa, Zea mays
  Coding DNA Sequence Number=SeqID_14327
MQQRWASCGRDVAALGGRRRRELAGQWRGWAALGAPEGAGRERAARGRLQRGASGAGQAGGSREERAAWGVLRRGAGGAGRAARGELRATASTQRRAAERAGRATRLGGTVARGRGRRRRGLEEHDVRAVEEGARAAGSGGGRRRRRRRRRGREENEERENDVGWNRTANFG

SEQ ID NO: 57703 - protein, 294 aa, Zea mays
  Coding DNA Sequence Number=SeqID_14328
  Gene Ontology: Mol. function=cysteine-type peptidase activity; Biological process=proteolysis
  Homolog annotation: Hit_ID=Q5NKQ2; Match level="QueryCoverage=99%, HitCoverage=70%, E-value=5e-32, Identity=33%"; Hit description =Putative uncharacterized protein 9C20.3a
MKNVDRPPSNPKRIIIQSTQECFSVDIPCAPAGTVRPETRKAADEDDDFMPLSKKRNLDDSPGKVLKKHKTRTSTFDVPRPDPSGQHSIHIELPLIRDLISSKLNQLPSRDRLGFIEKLSHFDAEVGKACSVIKQTLQQIVEKQYNLSDVFGELIDEVLRAEAGDNEDAYDVQKTTSKSDDILPQTAESCADEADIDPLVHTNIMKRNKTPTPSVGKHGDGGKNMPTNTNVTLKATPHMDPDAPIFDATPQIKVSVETDPATNTPQVGQASLDSEMQTVLALREYLCGLQSDTG

SEQ ID NO: 57704 - protein, 105 aa, Zea mays
  Coding DNA Sequence Number=SeqID_14329
MGEDDEHDAIVAASLPPVGQLEEAHGVSSADGRPNKPEENQPGIDNHHGVPDKKGRGRSQAMRSYKEQLFRNGANVEIVVYMDSKRSNHSGNTNEEQLYMRKVSL

SEQ ID NO: 57705 - protein, 189 aa, Zea mays
  Coding DNA Sequence Number=SeqID_14330
MSSSSSSAAATPPADTLFEETLSHVAAEELRAGDTVEFGVSRMSSVHVQDMQQLGYFGGGVGRVPGAEEVPEPEGELVVFEAFFAAGLRLPVHRFVGEVLQIQRPGPPADAECRGGPVKICLGDDFQHGSSSLISCEKQTIQIEFLNLASGRQILWCRLGCWIRGYLLSSSLLRHEDVLSVSKDLITLC

SEQ ID NO: 57706 - protein, 48 aa, Zea mays
  Coding DNA Sequence Number=SeqID_14331
MGKPVPSLLMLLLGRVTALVPTITGMGDLVSGRVRRAICCQVQSGFLV

SEQ ID NO: 57707 - protein, 414 aa, Zea mays
  Coding DNA Sequence Number=SeqID_14332
MVTPEVLHLHWQKRMIGNKIAQFGSCTFMPKTGKTSMEVVELVPCARNKWDNWWEFWFYVVEGTVEDHPGLPVAEMCSHYYSAYPQFEVAEEDADEGALRCAADISRGRDLVEEFVAYGVWPLARGWALGEVCPRQMPSRGGMQVRSPAFALDLHGRDPAAFVREVEDGAVRIVGRYVPRTEAQRSWDIRGSNDRLNRVFELNRLPYDGYPGQDVADRRGKKPAAETEDDSAPAVAPSSKKRKLGSGEGQLVVVPPAVVTTVPAAVPGAKGSALSAGGEIPALTAVKDEAGTVSRRLKEVSQRLSQAVDFANRVASGALTAVVSAEVERLRAQHADAAREKSAANSKCRKLAEKVGALEGERTELRRQLAEERREANQALAKAQSAQAEANLAWVEGSVARQRTEEWEEWFNAL

SEQ ID NO: 57708 - protein, 90 aa, Zea mays
  Coding DNA Sequence Number=SeqID_14333
MAADAASFLLQLLWEVLLCCCPRRPGQDAAPSQGDMRESTPTEQPVDDVVQLQRDLTSPSSPSQPKETDKQFRHHGQPPTAHGGGGSHHH

SEQ ID NO: 57709 - protein, 120 aa, Zea mays
  Coding DNA Sequence Number=SeqID_14334
MLVDYTTILNGPSVSVEGPTQQGVESVVEVTTASGITSDGSSNPSLRLLLLRELHVVAQTATIFVVSVYVRGASLAEVQGRVAFQNPAPVEARRKRPAAPAPSVGAPTLRAGDDAASPSG

SEQ ID NO: 57710 - protein, 276 aa, Zea mays
  Coding DNA Sequence Number=SeqID_14335
MGVTGILCVSTHDAVTKECVAPVSTNTFAEWDSTENVLSATPGGQWELTAAELLSLGNDSPSGLVPHNGNIRGLLFALELLGYSGWLLGQEGEVLGCSSGTAATAAVEGIVSGTTAGVDADVDATLPFGHDCSVDQMLEGREGVVHELVVKGVNQTSQKTVLPLGICIDIFRHMVTTEIVSELLPCDSFRVYMGGEVEVGVAAAAPAALLLKSGQLLGLLGFALGRSVQWSSRVAMATAAEVPPPGVPAAPAEHAFHLCVGFHTSVESIHTSDLTL

SEQ ID NO: 57711 - protein, 291 aa, Zea mays
  Coding DNA Sequence Number=SeqID_14336
  Pfam annotation: Domain name=SlyX; Domain location=201-268; Score= -9.0; E_value=0.069; Accession=PF04102.3; Description=SlyX
MGSLMLGAGRGRPERGHLASSYSSGSGRLDTGIVPKALPCSLDYKLVTMNSPTPASGGDSRFSSDFLSRNGFPSILWEVLNSAGYPTPPLYTVQLYEEHRVPRCRVWLTLEAHPLQPGWRSLDSEMIGLRTDDTVEAAAMKTLTTFCGYHPLEMVMHPLGLFPAEKKDDPMWCNRLTLDSREDFVVDLSTELVEKDLQVERLNQRINTLEQQVEIRDNTIDVLENQLHDVQRELEEANDHLDMHHLEMEANEAGSEGEEAPEELGPAPGANGTTSAMPPSLVSSVASTAQG

SEQ ID NO: 57712 - protein, 61 aa, Zea mays
  Coding DNA Sequence Number=SeqID_14337
MDQGILQQPGCPVVVQGASLAEVQGKAASQTPTPSVDAPAAPIPGVGAPAPRAGDAASPGG

SEQ ID NO: 57713 - protein, 212 aa, Zea mays
  Coding DNA Sequence Number=SeqID_14338
  Gene Ontology: Mol. function=carboxyl- or carbamoyltransferase activity; Cellular component=ornithine carbamoyltransferase complex; Biological process=amino acid metabolic process
  Homolog annotation: Hit_ID=Q8SA97; Match level="QueryCoverage=42%, HitCoverage=16%, E-value=5e-25, Identity=65%"; Hit description =Ornithine carbamoyltransferase
MAPPVDVVGPRPRLGDVEAPPRSRSSLSSEAEVESEPLGRVRQRPSVEARAESEPWGRADQSSLSSGAEPKSEPWVGRNGVRRLPGLSPSGAVLLSGRSVERRNDCGHFGSVDWRTCVRIKGERTVRDRLDFFTYAPASPFHKEEWGKAPCCPRRAPNMVSPVSCWRVIRVDARAPFVRGRLEARRRAQKYLRVICRTRSPVDGVRGLDASL

SEQ ID NO: 57714 - protein, 239 aa, Zea mays
  Coding DNA Sequence Number=SeqID_14339
MAEGYQLPRSCVPLTTRRKDCGCPPSGGSEGGKTRCIREREDMVAFQGGHPPFKGDSPYLRPQPPWAESSPTRSKVLPLRRGGWVPRVVQAGPEQKKPNRRARCMQPPSGYEHSSTFAQTSGQPCRRHATAPSGRAPLTSNAPSMGAHAHASCNRRAGCYVRATAPPLAPLPRLLDCGTSTATRGDPAHDPAAPAWRDGQCGQKWAGSNCGGRQAGAVITSSAKLTSHPGAAREPSPTA

SEQ ID NO: 57715 - protein, 176 aa, Zea mays
  Coding DNA Sequence Number=SeqID_14340
  Homolog annotation: Hit_ID=A2X6T6; Match level="QueryCoverage=32%, HitCoverage=5%, E-value=2e-13, Identity=56%"; Hit description =Putative uncharacterized protein
  Subcellular localization annotation: CTP_CleavageSite=61; ConfidenceScore=5.45e-01
MAPHTLYDDGGSQPPYGSKRTYRRTRIVVTRTILPAPFTGAACCMPFKFGRVFINSVRRTSADHIHPSRYLEGRMSSNCEVLESLLPTKDEIPEQDRTGKHRADRSALSNAVRQRRHGCDVIMLKDPKKRLWPIIYHHYPLFVGFTEGWKHLVAANDLRTGDVCELVKGPDDGGFG

SEQ ID NO: 57716 - protein, 86 aa, Zea mays
  Coding DNA Sequence Number=SeqID_14341
MANTTVGTMLAQGHQRAQNAAGWPNGRCESTPAINRAKNRAINREIWAQGVCSPREETLEHRSNGGDAGTPRVDGGGAPVTRGELW

SEQ ID NO: 57717 - protein, 230 aa, Zea mays
  Coding DNA Sequence Number=SeqID_14342
MPPRMRKTARKSTRPIGVLQHQLAPRHEESSSGSNDPIGDLEAQVEQLPTELHHRNRVWVEDGQRINELRADIRHLQDELFEQDLAIDWAVNSCSIAWDREAKARARVEELSMAIDNLQTYLPTLSEWEPDLLEQQMPSRTRAHDGAGTSRGQEDTPNPQPVPPTLAEVIAALVTATANNTRFLREMAGNQFQQQGGRAYPQGPRETSYLDFSETRPPLFVKVEDPLEAD

SEQ ID NO: 57718 - protein, 252 aa, Zea mays
  Coding DNA Sequence Number=SeqID_14343
  Homolog annotation: Hit_ID=Q7XBD3; Match level="QueryCoverage=13%, HitCoverage=6%, E-value=1e-08, Identity=85%"; Hit description=Zeon1 gag protein
MDEYIWADNDFRQRREEAYRFSEMTRGFEGRIHPSMSDQSTDPVRVMTKEASFRGHNIAHSLQDSSKVPSGHQLQEAEAAGASEEDMGISPGKSIAYYMVKTRATLQEHARLPFRSKKRLPKQKPDRTSRSRFYILLRATLLTYQNMWAINLQLLLLRQAIHKISGPSFHCHLHCHLFIPKASSQMGASTPNSNATSGRSLKLVQSTTLYQNRSTYIEEYPNFENLYRRNTRRRGSKVVPKGMQNLYHRNRR

SEQ ID NO: 57719 - protein, 75 aa, Zea mays
  Coding DNA Sequence Number=SeqID_14344
MARIKWPIGTLNPRSWKETKLTTYPGGGDGAAPPMGGIHSGRCLSEKRATLRLRRNNRAKKGTGKGGYPKKGPSL

SEQ ID NO: 57720 - protein, 165 aa, Zea mays
  Coding DNA Sequence Number=SeqID_14345
MAELDKVFSPAIDRAKSCSRHPSVCPFPLYCVRSMLTGAIFAQPEPRCHRPIESLLLRRCFATPSLPLKVSNPPVPLIWSSPLCSSRDCSPEQSSAAVSLPRRGLHSLLPPRQREGHSRVRQTALIAPRLVPEPLVPRRGQPSHLRRALAAGPSGATVPKSAPDR

SEQ ID NO: 57721 - protein, 223 aa, Zea mays
  Coding DNA Sequence Number=SeqID_14346
  Homolog annotation: Hit_ID=Q6J9V9; Match level="QueryCoverage=29%, HitCoverage=33%, E-value=2e-08, Identity=45%"; Hit description =Putative uncharacterized protein
  Subcellular localization annotation: CTP_CleavageSite=37; ConfidenceScore=5.61e-01
MQAACNRAKWAHLSDFQRAQHGSSRPRVMQPARRSLRASNCTATCATTAPPRLQNQYRDSRRPSVRPSSASLARRSMRPKNGPAVMAVAGGREQRSRRQPGLRPILGQTSGASSRGSERRFAFAIMTASKKGPGKGDTPKRILLREGNKLRASLLIRGSKASPSEGFNSRLRARGLHTHYWSEVRRSVPRKGSTAASGHSGSAPTTDQGFEGWPSKGSQPPQT

SEQ ID NO: 57722 - protein, 431 aa, Zea mays
  Coding DNA Sequence Number=SeqID_14347
  Subcellular localization annotation: CTP_CleavageSite=51; ConfidenceScore=5.41e-01
MSSRSLMHRVFPPSVPPDGGYPQSFRLVIGGTQLRGSWYLSAIVRLQGFSSCSSAAPFRRWSPETVTTNPWMGRGKPGCVLGPALSFKDVHHPCWGGERGEPGLYLPRGSVGHLLFQLLVDATFRPLPRFSGEGGSEDLPVRFGAARVCQRGVGADVVAAGGSFPIVEGVSAAYGSASGSLALMAGSHPLSGDANESLSVAASVLGPWLLLQRSPASRPELVAPQAPQCGGCSYPRGRNRSSVCDGTLNADSPIGCLNRFTKRESPRAKVTSEESLGSVGLAVRGFSCLVKGTPRPLFYEPRPGVAVSARTEAELARKEDLVGRSLAGSSVSGTDAGVDLPRPRAGLMSSGDSWPRPRGDQPSRLLEPDSWRRPRRRWPGRDGEVVLQSGDPRTVSPSEARSDLAEGVVDAEGAAVPLNCRDPSLQDRIIL

SEQ ID NO: 57723 - protein, 320 aa, Zea mays
  Coding DNA Sequence Number=SeqID_14348
MWGPHGRKTVRERSDRAMDQMAHDEEVEDLGDLDSTLPDSMLPEASRVELAPPPDAGKGPSANPMPTGGGEDPTPAPAPTGEDTSKAVVEPAAEDLAAAAGPSQVPTFGPAQATATDNTNFVAETSTVVPADDSLFGSVSECFESDGESGNLFPWTKESSDEGLDYFVALDVATVETSPHVEGAGDLPDRVGKRELLSSPTGASIGEGDLRKLFEGEELRIMLFNYREMGIILKVELMYITWLRLVKNLTPGRKRECSRSSPDGVVSLYALGDAFVLTMNGPSHFGSSLPCDSVRVVWTRQNAVSVDEVFGCWFVYVGDG

SEQ ID NO: 57724 - protein, 166 aa, Zea mays
  Coding DNA Sequence Number=SeqID_14349
MATCIDLTYGKAVSTALSVEAKYTNSGKNKGFGGERPNQGQAKKQRQSLSAPTIPPLPQNSRVPQALDSLPCLVLQLGVLIAASRDILSKTAHILGKIKSNAPQGSGKSAQPKGNAVGKNTRKTGRVYYTQVATTPEGEPVMMGTFPVASHPAIILFDFWCFTYIH

SEQ ID NO: 57725 - protein, 404 aa, Zea mays
  Coding DNA Sequence Number=SeqID_14350
  Pfam annotation: Domain name=zf-CCHC; Domain location=244-261; Score =18.2; E_value=0.0027; Accession=PF00098.14; Description=Zinc knuckle
  Pfam annotation: Domain name=zf-CCHC; Domain location=359-376; Score =24.2; E_value=0.00033; Accession=PF00098.14; Description=Zinc knuckle
  Pfam module annotation: Pfam domain module=zf-CCHC::zf-CCHC; Domain location=244-261::359-376
MSILGMSTTSEVTKCKEYIVLATPPAKDQMEQFKKAHAQFLQATSQVVARLQQVDLAEFIAHEQTTDNHMTSTTTSPSIVDLEKLLHAQALVIQNVSQLTSSYQQVLASRNVTRNETTDEQKDAHQQTNDLGTCCCCEYYGIPCRQISTNESETTKQKNRILFSGIKSQWSSQEQLIADALSDDELPGFPKRKHHKDAQLQKEANEYYIDGWTITCTQFQPRRRISSKKQKGKHGKSQEITSRKACYQCGREGHYFRNYPKKSSLPDTSEIKLSQSPDMEYEQKCVETSINIVKNNKRYRKTFGYMSSQPQPQAKAPKHMDTQTEESSQTQLCETQTLNHPSSPVGQAKLTRKELKARGACFYCKNEEHIIRECPKKRLDRLEKKAAKQDPSYNPEDQLVYKYF

SEQ ID NO: 57726 - protein, 215 aa, Zea mays
  Coding DNA Sequence Number=SeqID_14351
  Homolog annotation: Hit_ID=A2X9C8; Match level="QueryCoverage=34%, HitCoverage=17%, E-value=1e-17, Identity=63%"; Hit description =Putative uncharacterized protein
MLSSSAEESPVKPLRLWVVGYATQCLVHVGLVCADTRRETWRARRSASDVESAGAGTDSSDADSKDDERAEGRSRSPLSPFSISLRRRLSARRSPIRAGVAAASEVSEDESLFDWDSMVLGGLWEEEGRRDVPSEMQMYSQLGLIEEDEVEKNRRDEALRGGTTNLDQSDHIDSGDQHESEAQHTTTNDEAPIVAGAHESEAQHMTATSPPRSVK

SEQ ID NO: 57727 - protein, 94 aa, Zea mays
  Coding DNA Sequence Number=SeqID_14352
  Subcellular localization annotation: CTP_CleavageSite=19; ConfidenceScore=5.24e-01
MSSTRTGRECAQSARLRCSCSAAVSCTSIEGPRRPVARPMSAARRLRLAAEGGLEARSPELAASARRLGCGDGGRSSGSSCHGDVGRQVTDSNM

SEQ ID NO: 57728 - protein, 845 aa, Zea mays
  Coding DNA Sequence Number=SeqID_14353
MPSSSSSADTTPPAAASSEETLSSLVVEELRAGDSVDFGVSRMTSARVEDMQRLGYFGGGVARAPGTEEVPEPEVAEEDADEGALRCAAGQSSGRDLVEEFVAYGVWPLAHGWALGEVCPRQMPFHGGRVVRSPAFALNLRNRDPAAFVRDAEDLAVRLVGRYVPRTEGQRSFDIRGSNERLNRVFELNQLPYDGYPGQDEADRRGKKPAVETGGDPALAAAPSSKRRKLGTAMGGLGVSDSFARELMRTCAAPGERMSSPELRESSARMLRVTGGCWPKNVPIPCAAEEDCFTSRMVHRWRVFPYGRNIGAVVWTVMDKDRQGAAQKRQATVRIHEARPKRQRGTAKAVASGGGKPPLAVKAGASAPSKAPEATAGAGGSKSTKVVPPASGVAEASKAARALPLAGKRVADFGTDITVDDYLGGPDEGQLAIVAPGAAIATAAKAPKAGGEALGAGGEVSVLALVRDEAGAATRWLKGVTEALSQATEALSQVADFASRTASGALTAAVSAEVERLRTQHADAVREKSASDSKCRKLTDRVAALEREKADLRRQLAAERREANEAVAKGQAAQAEAKLARAEGNLAKELAEHLQERLTALESRAKEAEVAMHAEAERTRTQLMDTYRELGARTGDFGVPDREPGLRCLQWVQEELLELPAVVGGLMSYASLVTCEGAMNALSREGCRHFEAFDQADEDFDRDIYKVEDPVVKESAGALYDRMWGLYGCEVVRERAEAARAQAERGERVDDFGALNSALPGPEPTPAEAATGVALETTPETAEDAPGVPHLCCGRRRPVPKDGRRPPDAPAAAAPSAEDSAVVVAEAAAEATAEAPAAAGPSQVA

SEQ ID NO: 57729 - protein, 57 aa, Zea mays
  Coding DNA Sequence Number=SeqID_14354
MGSSSLRAERESRLVGGNEIDGSGYDYGTGCQHCNHCSGEDEAVKGDFQEFQDYDEF

SEQ ID NO: 57730 - protein, 58 aa, Zea mays
  Coding DNA Sequence Number=SeqID_14355
  Subcellular localization annotation: CTP_CleavageSite=35; ConfidenceScore=5.63e-01
MAARASTQPTSAPLAHRRPAFGRRPSRHPAPRTIRSKSPRNSQEKPLSSSRLVEASVL

SEQ ID NO: 57731 - protein, 345 aa, Zea mays
  Coding DNA Sequence Number=SeqID_14356
MGRWILKTKPVHVHMASHRYSIDTIGLVQQNVQLRNQTHMLSDVLDQRTCNNIWRCMGNSVRRGRRLVQMFNQHPLLRKKEYILQQPAALVIINNTVDAQRIEARMCAPDDFCKNSKQLGIMARSGFRELRIWGAWLRKGRTGREGSRHTWWVIVSGDEVEKRGSIRPAVVGGTGEDPTAAVAVAGSVVAWREIASELRPANKDPEGGNFASRIACGGDNRLAEDQQIQIRSPWLSSERWQRHQQESTEDPRGRGTGCGDVWDEWEHVRSRGIEPSDGGRGSGGGGKHEVWEREGDGDLVTRETSGLDDRARHPTHPNGHDFPDEVDRPITWKIAPSFNIREEKR

SEQ ID NO: 57732 - protein, 301 aa, Zea mays
  Coding DNA Sequence Number=SeqID_14357
  Subcellular localization annotation: CTP_CleavageSite=55; ConfidenceScore=5.72e-01
MQVVPHLLSAALVSPPPSVATITAVRRGRRRPLRAPPALPSRGCSVSLWYPSRVPLPARRDPAPPLAPSSALACAAAPLRARCAAAASLARRDPAPSPALARGAAPLRSPGAVVAPRVARCPTQPPGARPWRATPGPLASPSLVQPDTTRHASARPAVCSSHGQRGAQPARLAAWHGQPSSGSPVPCAAALCAPCASGLAGHGHRGRVAVVFIAPMSSPTVRHVLCPRLNVVRLRPTVRRRLRNRRSSFGNQEIKLFEFYEDEDPEHLFGGDKDDVYDYGNGKEGVEVDLQEFQDVDEFED

SEQ ID NO: 57733 - protein, 217 aa, Zea mays
  Coding DNA Sequence Number=SeqID_14358
MGSPQMTVNCGAQTHDVEAWMQNMTNCWRRLRRDEDDGDSATVAMAGQAMGARGAQGGRAGHGRAAVWLVVPGREPRRLCAALAVRAAHRGPRRLRRGTARTAPRHGEPGQAAPGRGDASGPGGCAGHRATRGATTEPGERKGAAPRARAGEGARAGAGSRRAGHAVAAQRARRGAAPRRATPRAVPGHRALAGWATTLAGRGPERAGARGMGTAAA

SEQ ID NO: 57734 - protein, 98 aa, Zea mays
  Coding DNA Sequence Number=SeqID_14359
MARGRAPTGGKEEGGGGEEGRGRESLTEAREDIKEIIMRPIWQHFGLRKPKVPSDIYQRGRTSKDTKVGSAEAVKQESFGMFAEKGTDLKMKRPFRPR

SEQ ID NO: 57735 - protein, 139 aa, Zea mays
  Coding DNA Sequence Number=SeqID_14360
  Gene Ontology: Mol. function=protein serine/threonine kinase activity; Cellular component=cell cortex; Biological process=protein amino acid phosphorylation
  Homolog annotation: Hit_ID=A2YSH4; Match level="QueryCoverage=81%, HitCoverage=25%, E-value=3e-47, Identity=77%"; Hit description =Putative uncharacterized protein
  Pfam annotation: Domain name=Pkinase_Tyr; Domain location=1-112; Score=-115.6; E_value=2.5e-05; Accession=PF07714.8; Description =Protein tyrosine kinase
MASLVLSLLTSQTNVAKDPNVHVEDGSEMIQHRPYNQKVDVYSFAIVLWELVTGNVPFANMSAVQAAFAVVNKGVRPAIPHDCLPALAEIMTMCWDTNPEVRPPFAEIVRMLEQVEVEVLTTVRKARFRCCIAQPMTLD

SEQ ID NO: 57736 - protein, 182 aa, Zea mays
  Coding DNA Sequence Number=SeqID_14361
  Subcellular localization annotation: CTP_CleavageSite=57; ConfidenceScore=5.19e-01
MQPGRTPPPAVTLDGDLQLDGGGKRAGLRPLPLPQPQGFSSSRPRWRMRRIMGLPPRGSDLPSSSPGVWGRNGILRFRGDFLQPCRERRAAATRSDCGNDHPRPGRRSSFSSSFGAGATTEGLSPTEDESQPFEPGDGDPGLLAELAISSVEKPLVSLLLLCRPTPMEWGCSYLRRGNRSSV

SEQ ID NO: 57737 - protein, 571 aa, Zea mays
  Coding DNA Sequence Number=SeqID_14362
  Homolog annotation: Hit_ID=UPI00015558E9; Match level="QueryCoverage =96%, HitCoverage=20%, E-value=4e-07, Identity=23%"; Hit description =PREDICTED: similar to splicing coactivator subunit SRm300, partial
MRRKGGGHPPSGGLEDGKTRPTGERGGQPCRRHATAPSGRASPTPDTPAWRPRPTRHATGAPDAACKQLHRHLRHHRASSIAEPTPRLEATQRTTQQRQPGATVNVAKGGPAVMTVAGGREQRSHRQPSSRSIREQQENPLSRREDDAPVIRPSNGSRTRNGRPANHSPRRINSAAGQAALPAGKAGDVSPSPKQPHQKRLRASLLIRGSKAGPLKGSTDASDRVGPTPTTGQRLAPEGFTVASDTERGMTRESHRREASSPRTPSPGDRVWQITRRARTRARPQKTTNSASPDPRAQTPPWPPPNDLRLARPRGSASATEDRLDLGFGGASTSPNLGRRPATSTGSTIITLPRAASGRREQDRRTSARTRPLQQLSLAKHRSLLRRPRHHTSRGPRSLRLPHWHGPLREGWPREDEDETGAPLGPLASLTRVDACNPLLQAHPTWARDEHEGREIPTTLTPDSGRLAPLPPLCSPTRSTHLGWGTRHSLVGLRDPRSRNADTFLISHPRASHTTLVVALFSRVGDPNRIPKLTASSMQLPKKEEAPGNAGPPVSESGTSGAVMRLARAAE

SEQ ID NO: 57738 - protein, 256 aa, Zea mays
  Coding DNA Sequence Number=SeqID_14363
  Gene Ontology: Mol. function=catalytic activity; Cellular component =cellular_component; Biological process=metabolic process
  Homolog annotation: Hit_ID=A3BQS2; Match level="QueryCoverage=60%, HitCoverage=22%, E-value=2e-56, Identity=67%"; Hit description =Putative uncharacterized protein
  Pfam annotation: Domain name=Prenyltrans; Domain location=99-154; Score=28.4; E_value=2.6e-05; Accession=PF00432.12; Description =Prenyltransferase and squalene oxidas
MDNPSGDFSRKYRHISKGGWGFQVADQGWQVSDCTAEALKVLLMLSRFSSDIGSDQMETCRLYDAVNVLFGSWGICFTYGTWFAIEGLSAVGQSYGNSTCIQKACKFLLAKQLKNGGWGESHLSSTTKAYTNLDKEKSHIVNTAWAMLALMKAGQAERDPTPLHKAARLIMSMQLSNGDFPQESGHYANYCPNRAAYTTPAPMKHGQASGGKSQPLSVNRVQANHAKVEAKPGEPDNQEVLIEDEEVGEEVNEQQD

SEQ ID NO: 57739 - protein, 169 aa, Zea mays
  Coding DNA Sequence Number=SeqID_14364
  Subcellular localization annotation: CTP_CleavageSite=36; ConfidenceScore=5.09e-01
MEGAEERSHKGKKGATTGHHGTGSRAPWGSWPGRLCASMRGTASRGATERTTSKRAPTWVEDEQGGVELERRGSLELGSLLQLAVDSRGREEGEDAMAAEGRSWALGCWAEEGGWECGGAMGEGAQLPAHVQETEKSCWWRLGKNGGVGVENDQVNTPIYRRSPRVRVS

SEQ ID NO: 57740 - protein, 243 aa, Zea mays
  Coding DNA Sequence Number=SeqID_14365
MDEGTPLGGLEPEDNTEPSHGFSRRSSRSTGPRLSCPLTWNTAPRGRGPTAIKATKLAEKTRWTSWKRPGTRPYYTRRGTSSPCDATTPEGSGPETSRRHTLQDILILQAQVLTLEGGSSTLRIDDTFGEVRPSLGRRRGPKASAPKDDVITTPGPSPPGSSPGIRPEQVAQPDTPGASADYLPGAPARPEASADQLRRRSRYRTTRLGSGQPGFIFEPTPPLFMLISLPLASARRRAAKGSL

SEQ ID NO: 57741 - protein, 385 aa, Zea mays
  Coding DNA Sequence Number=SeqID_14366
  Gene Ontology: Mol. function=catalytic activity; Cellular component =cellular_component; Biological process=metabolic process
  Homolog annotation: Hit_ID=Q7F1V2; Match level="QueryCoverage=99%, HitCoverage=44%, E-value=1e-172, Identity=76%"; Hit description =Putative Cycloartenol Synthase
  Pfam annotation: Domain name=Prenyltrans; Domain location=100-141; Score=3.4; E_value=1.8; Accession=PF00432.12; Description =Prenyltransferase and squalene oxidas
  Pfam annotation: Domain name=Prenyltrans; Domain location=150-193; Score=47.3; E_value=5.3e-11; Accession=PF00432.12; Description =Prenyltransferase and squalene oxidas
  Pfam module annotation: Pfam domain module=Prenyltrans::Prenyltrans; Domain location=100-141::150-193
MWRLKIGEGGPWLKSGNGHIGRETWEFDEDFGSEADREAVDSAREEFSKNRLRMRHSSDLLARMQIAKENGFSLDLHKTRDDDGRSPLLVATTGSSTVSETLRKALDYFAAIQAHDGHWPGDFPGPLFTTATMITVLYVTGSLDSTLSSEHRREICRYLHNRQNADGGWGLHAEGESSMLSTALNYTALRLLGEGGDGGGGPGMSSSSMLIRARKWIRDRGGATMIPILGKVWLSVLGVFEWSGVNPIPPELFLFPSWVPIQPGRLWSHFRMAFIPMSYLYGKKFVGPITRLVVSLREELHVHPYEKIDWKAARNSCAKEDVYSPHTWLQECLSHCLYSFGEPFLTRWPISYMRKKALQQVAEFLKYEDENSQYICIGAAQKTQC

SEQ ID NO: 57742 - protein, 104 aa, Zea mays
  Coding DNA Sequence Number=SeqID_14367
MASVLPWSCEAAAASVPAGDACRAMHVLSCSVHHRNCVRCDANASPGAQLAHFQLWVLQAVSWMPHVLFHERLCVRVTRTWDFYDPGDDKKLLHSDLVLIDEEV

SEQ ID NO: 57743 - protein, 323 aa, Zea mays
  Coding DNA Sequence Number=SeqID_14368
MFGLHVAMRMMVLGIDSGNGGIKAMLMMARLRHTAWKSVIPFLPSRLAERPLRRPVTGQSSHLERLHHRLREEQERRRQEQEQQGSSFSLQQEIESVRSCSPVLPLEAPPAPPLSAPAPGVAAGGDLDDGGGDSSSSHDTDLSADQEPEGWVARPITRDAARGCHFHDALDTLLRRALDRRTWSIEYRCVVFQHSRGVYPDRWEATCLVRRPENSLWGAKYYPRRPSGSTGGVIVSPVDEDNPRLSSIVNLAVVLNTKLNHALDELSRARAEIAQLRVERAERRHLDDGSPAPVGTQHPYRSPRRGHQSYGNPDCKTKINLEP

SEQ ID NO: 57744 - protein, 343 aa, Zea mays
  Coding DNA Sequence Number=SeqID_14369
  Subcellular localization annotation: CTP_CleavageSite=35; ConfidenceScore=5.09e-01
MARTRTYKTLPDLDCTLPRTLKPHRSRARRRLPVRSESAAAHSLCHRRPASGAIPNSVQPSEKIVHTSVRLPERGIGVYFAGEASPRSPELSTPPEYVDRQFEKHRVPRCRVRMTLEPHPLQPGWRSLDFESFGYRAEDTIEAIALHGLTTFCGFHPLELATHPIGLFPAEREDDPMWKNRVEHAKDIWAIYPGQTAHLTVRCMNALYRLQVMRGEAMSHLMALLEATKITLDNREELVVDLSQEMVEKDLQVEQLSTDIQELEELVGTRENTIEVLEDQLLNTQQQLAEANEHLDMHHQEIQDQEANEDVDIEGGDEPASSVDTAGSGRPPSPESSVASFAH

SEQ ID NO: 57745 - protein, 125 aa, Zea mays
  Coding DNA Sequence Number=SeqID_14370
MQYKGSSSLISCEKQTIQIEFYPCKAGELVGGEDSGLSRAKLTNQTGQRASPGIKEGVRGLGKVHGPMAELTEELARLGGGWSGLATVAEALAAMAGGKELAGDKEGRLAGEGIKVYSLDLWLKV

SEQ ID NO: 57746 - protein, 106 aa, Zea mays
  Coding DNA Sequence Number=SeqID_14371
MGKNNKRKLTQTTPQGLAAEVWTYIRAVERSGLEGSDESEYSSDEEDSDGGGEDEDDDDDDEGGGGGDGDGDGSGRGGSSRGNNRGGSGGGSNRGGSGGGSNRASG

SEQ ID NO: 57747 - protein, 168 aa, Zea mays
  Coding DNA Sequence Number=SeqID_14372
MPPAPPQGIPAAGGDPDGDRDDDDAGGTSSHGTELLKEPEPEGWIARPITHDVARGGVADDLDLKYYPRHSTGSAEGVIVSPVGEGNPRLSSMVNLAAVLNIELDHALDELGKVRAEVVELHAECAARHYLDGGSPAPVGIQHPYRSPPRGRFDYGTPDFRTRIDLDL

SEQ ID NO: 57748 - protein, 123 aa, Zea mays
  Coding DNA Sequence Number=SeqID_14373
MNPRKCAFGVSAAGVRHRRPIEPLRLNRCFATPALLLEEQSSAAVSPLHRGQCAVVPLRQRIGHGRVRQTSLIAPRLVPEPLVPRRVRYARIQRTLAAGPRDATAPKSALAVRSRSSVRDRMV

SEQ ID NO: 57749 - protein, 74 aa, Zea mays
  Coding DNA Sequence Number=SeqID_14374
MTAHCRVGPSCLSLWRVRLRCVADKSAPLSVASTAPRIRLNGVRPWRSAPAELGAPMPDARPPISDRIDRAGYA

SEQ ID NO: 57750 - protein, 715 aa, Zea mays
  Coding DNA Sequence Number=SeqID_14375
MGELGVSDSFAMELMGTCAAPGGRMSSPELRESSARMLEVTRGRWPKNVPIPRAVGEDFFTSRMVRDLRVFPYGRNIAVVMSAVMNKDRQEAAQKRRAVIRLPEARPKRARGTVKAAVPGGSQPTLAAKSAAPGSGKVLESVKAAGAGGIKSASDGPAKARELPSPGKRVADFGTNISVDDYLVGSGEGQLAVVPPVVATTVSVAVPGVRGSALSTGGEILAVTAVKDKAGTVSRRLREASQRLSQAADFADRVALGALTADVSAEVERLRAQHADAVREKSAADSKCCKLAEKVTALEGERTDLRCQLVEEKREANQAIAKAHAAQAKANLARVEGSLASQRTEEWEVRFNALQARMERAEASTCSEVERTRKQLVDSYRELGARTADFEVPDREAGLRFLEWLQEELLVLPTIVEGFMSFASLVTCEGAMNALSREGCSHYEVFDRSDEDFGREIFKVEDPVVKDSAGALFDRMWGPHGREVVRERSDRARDQAARVEDVEDFGPLNKTSEGSLAAPAATVSGGGSSPTAVPRVEDPMKAATEPAAEDPMAAAGSSQVQDFGPAHATATANFVAASTVDAGNESDESASKFSDFGDSGSSVEWTEESSDEDLDYFAAFDVAAAEASPRVADAKVVSGPSAGRRRRRAVAKRRVSEVDGGRLRVGRAGKQELLSSPAGASVGEGELRSLFEGEELMLMLFNYREMGIIPKVEPM

SEQ ID NO: 57751 - protein, 88 aa, Zea mays
  Coding DNA Sequence Number=SeqID_14376
MGARVATTQIGADGAPDEGTRGGSPDGRRHAGGAPGGGDRVDGDRGLYRRRKSRSPDQYHARRANLPHRIGTMLAAGLKGKCAFGPFL

SEQ ID NO: 57752 - protein, 405 aa, Zea mays
  Coding DNA Sequence Number=SeqID_14377
  Gene Ontology: Mol. function=oxidoreductase activity; Biological process=metabolic process
  Homolog annotation: Hit_ID=A2Y334; Match level="QueryCoverage=100%, HitCoverage=100%, E-value=2e-77, Identity=71%"; Hit description =Putative uncharacterized protein
  Pfam annotation: Domain name=ADH_N; Domain location=38-119; Score =58.0; E_value=3.3e-14; Accession=PF08240.3; Description=Alcohol dehydrogenase GroES-like domain
  Pfam annotation: Domain name=ADH_zinc_N; Domain location=235-354; Score=37.2; E_value=6e-08; Accession=PF00107.17; Description=Zinc -binding dehydrogenase
  Pfam module annotation: Pfam domain module=ADH_N::ADH_zinc_N; Domain location=38-119::235-354
MEALVVRQLGDPTLPPGGEASPFAAVSGDHPVPEISSPTAVRVRVAATSLNFATFLQVQGKYQERPPLPFVPGSDYSGVVDAVGPGVRGLRPGDRVCSFTGLGSFADFIVAEEKQLLSPKMLLKLKDIIKPFLQAFLSIWLWSWLLKESKYLVDYMLSGMIISGTQIIPKNAFKTQGHHQESDCRADCGKDLSIVGLHAARFLVPDGCDLVTAGALPVAFGTSHLALVHRAQLKAGQVLLVLGAAGGVGASAVQIGKVCGAVVIAVARKCQSFLKARGLKGVDVLYDPVGGKLTQDSLKLLNWGAQILVIGFASGDVPVIRANIALVKNWTVHGLYWGSYLTHRPQVLIDSLNELLSWLSKGLITVQISHCYRLVEVHLAFSALRDRKAVGKVMIVMGSSAVPRL

SEQ ID NO: 57753 - protein, 25 aa, Zea mays
  Coding DNA Sequence Number=SeqID_14378
MGTNGHLDLDTGGSKLILRKFTLGP

SEQ ID NO: 57754 - protein, 47 aa, Zea mays
  Coding DNA Sequence Number=SeqID_14379
MGSHDPRAKRESRLMDDDDDDGYDYGNGKQGVEADLQEFQDVDEFED

SEQ ID NO: 57755 - protein, 140 aa, Zea mays
  Coding DNA Sequence Number=SeqID_14380
MVVTGRLFASTHDAVIKECVAPVSNNTSAIWDVAESGCLLQTEAHSALLGHWGLTAAGLPSSDIASPNGFALHSGNMPCFHPELVLLNCSAGSLGQEDEVPADSAFGTDLLLTDCSGDSTAGAEGTAFGTATAEVDVGSA

SEQ ID NO: 57756 - protein, 146 aa, Zea mays
  Coding DNA Sequence Number=SeqID_14381
  Gene Ontology: Mol. function=carboxyl- or carbamoyltransferase activity; Cellular component=ornithine carbamoyltransferase complex; Biological process=amino acid metabolic process
  Homolog annotation: Hit_ID=Q8SA97; Match level="QueryCoverage=69%, HitCoverage=24%, E-value=4e-12, Identity=37%"; Hit description =Ornithine carbamoyltransferase
MALPVDVTGLRPRLGDVEAPPKPRSSLSSMAEAESEPLGRARRRSSAEARTVSEPWGRAKRSSSSSGAEPESEPWVGRSGLYADGGYQVRIRSLEAELSPSPELFEPTVDPEAKKEDEIIKMAEAILDEAVAQLLNKTAEAVLKEE

SEQ ID NO: 57757 - protein, 837 aa, Zea mays
  Coding DNA Sequence Number=SeqID_14382
  Gene Ontology: Mol. function=signal transducer activity; Cellular component=membrane; Biological process=signal transduction
  Homolog annotation: Hit_ID=Q6YZ90; Match level="QueryCoverage=71%, HitCoverage=88%, E-value=0.0, Identity=59%"; Hit description =Putative uncharacterized protein B1099H05.52
MERLEEEQACRSLLVLFSSAFSACLSEFPVLSLDDVENCWCDDCDATVLAVYVCIWTLKGSSSLPFSEVGQPAVYTALHDVTAAACSAAYEGLQNRQKPAPLPALPHQNTTPLRVRRPHSSPLPVCLPCRAVPCSPPDAAADAGRAEPQPEMSSRNRSAAASSAAPALRTPRRLKRRPVKASAPGPGSGRRSGPATPLLKWDVGGGGGRGEGRKAGADEAGDAARARETKAKATEVSVRRLAAGVWRLRPPEAVAGGGSGVRVGVEHIPRHLQVQLLKQNTSGHHQSSKNEVSSPISVLERKSGELHKGQLHATSAMLPVATMEKATKWEPGDIKGMESHDAYLIASQLNLLDEHRDTAYVADLQMELQQARDRISAMETERRSAKKRLDHLFKKLAEEKAAWRNREHEKVRAILEDMKADLDHEKKNRRRLEMINMKLVNELKEAKMSAKQLLQEYETERKARELTEEVCNELAREVDEDKAEIEALKRDSQRLREEVDEERKMLQMAEVWREERVQMKLVDAKLTLDAKYTQLSKLQQDVEAFIAACSTANGDVTVVEQAESIIQAIKSVRAQDAEFRYEPPAASEDIFSIFEELRPSEEPVIKEIEPCYKNSSAKCEPEIQEVSPMTDIFLEKKAKANSNKSPKDESDTEDGSSWETISHEDVQGSSGSPDGSEPSVSNKVCDGSIPWKSRNGFERMESEKLKDESADACLTNMNQPKKKESAISKLWKSSRPKNSEICKKDAVETVNARSSNVRLSVGTYSTVESGIQEIGLSPPCVEQWSSPDSMNVQFNRGFKGCIEYPRMSQKHSLKAKLMEARLESHKVQLRQVLKQKI

SEQ ID NO: 57758 - protein, 62 aa, Zea mays
  Coding DNA Sequence Number=SeqID_14383
MGSATVGALLLGFAHAPAPTIAEWLLGSLLEFCSQFKVEPLMKCYKEITDYLEVDKKSSDSG

SEQ ID NO: 57759 - protein, 224 aa, Zea mays
  Coding DNA Sequence Number=SeqID_14384
  Gene Ontology: Mol. function=sequence-specific DNA binding; Cellular component=nucleus; Biological process=regulation of transcription, DNA-dependent
  Homolog annotation: Hit_ID=Q6H6J2; Match level="QueryCoverage=65%, HitCoverage=28%, E-value=2e-53, Identity=71%"; Hit description =Putative homeobox protein
  Subcellular localization annotation: CTP_CleavageSite=53; ConfidenceScore=5.11e-01
MALHFTAVVVRSRWTSNQCLDKIQSTTAKFNTLMHSPPGGGGICAPFAHRAVSAMYRGLRRWLAGEIMATASRASCWGESSSSVTVAAGGDVEQSWESAFIQKHWSAQQLWRTEQQCWRPQCGLPEKSVAVLKAWMFENFLHPYPKDHEKDVLAARSSLTRNQAQIEIPPDSFQIRFFFGEMGCETVIPGIAPRTSEKDESKAIGLDAEVDGSRSIRQDLSSHS

SEQ ID NO: 57760 - protein, 1427 aa, Zea mays
  Coding DNA Sequence Number=SeqID_14385
  Gene Ontology: Cellular component=mitochondrion
  Homolog annotation: Hit_ID=A2XXT0; Match level="QueryCoverage=99%, HitCoverage=57%, E-value=0.0, Identity=64%"; Hit description =Putative uncharacterized protein
MASAAVEPPKREQNFLVKVGMEAWTQSFAVAHKVRLVHILKNLHTSEVKIYSDASKEFIGVLDGESGGEVLQEYVQQSPQLGELLEAWRLHRENPGMAHILLLFAAVLGHPDGKLRRHGSVKKSLDGVARMILEDKEKMGDVYLELNSGEFRRQNAALDLLAAIVRRGGGLASEVAERFDFKIPILPQLAGTMKKKGSRDGRNRRKGADFGSTRRSFIGFAMSFLEVGNPRLLRWVLQQKEVYSGVLRGIGNDDAETVIYVLSTLRDNVLVDESLVPPGLRSVLFGSVTLEQLSLISGNLESGEAADIAHEVLVMVCTDPKNGLMPGSNLRGNEKRLLDLMKKLKATEVVHHKKLLLAIVSNRLSLCSAYMNEFPYNIEPRSSPSWFSAISLAADVIASAKCNSIVQTLSSSSHGLVSVDDEEVQHGSLRLVFESVNLLCYITESINCMVSKGRLKSEFIGSEKVTMKIDGFPVLSCSDATDASLVDEVHQGDEMQVKRWTSLREYIQDEVHGAMPDPQVFLKLLSSTSQKHQSYSQSIQKNNAQLSEPPQKKRRCSPSCEVDDIIIGGIDVEQDKDASEEQGLELKNDRTTTLCEIWSLDKQDPKTKDANVVENVFHSKLLDVLRLYLGVMPSSFDGSYDFFKIIPPNPLDLSMDEQQSLLSFLLEYSGQSRGCLDPERVPESMYKYLQPLVYIMLHSQIKNIRDQAYILVKAAMASSGAFDHNFTEIDAWLVFLPGYEAKWCVRENLRIGAPNKLSHIVIPFLCDAISVVGNNLYKYQEHTHKLISKSGQLEGRSPDFSPLIICVLQKCLRLLDTASRSTKLHEKSTISLYVCNTIHLILQSQVDMHLLPDLIGTILKERFDKFSSQELNSRIYLAEWRPLTNMLHFLRKISDQQNYSLFNTLEHSPEFDGNSLCSVSRQVEELLNQEQTNSLDDVATAFLFSIICAPPKDVISAFPDLLDLVKAHFPSHVAFLSSVLFLQHDYLAKVASCWPDIFFSSIRLFKDDINADHANTVEDECQNLSVSTESAPLSTFLSVSPFCALLPSVLSLACSSPDEIMEAHKDALLRLLEVKLSDCTFSELTLYLRVILFWTHHLLSSYTIKDSNSDDLEQVCHLCFGLLDRVFERIQVLTADPSQSNSEYPYYPAQHIQDIVDSVLRHPVITLSLSCSLSNCQNLADGSLEHLEEALAIFATENLHLIDRFVLNLLGKLYDLLLMFGSYGGNYSTDNGPSHESLFAAPNLLLENIILLFKEKFELCVDKLNFELLLPNFYMVRTLSKFFSPFKLLELANWMFSKLDGHNFSSPAFVSAVLMCLYIIDVTMEMLCFYLQKTDQRSQSYLFRHLEIHNSDINAIQQAYHIILHFATKWNVEFADHCLLKMLCHIHYTERCAGWNTDYIAFHMVLSTMAINTPIDILHHCIFPTSK

SEQ ID NO: 57761 - protein, 203 aa, Zea mays
  Coding DNA Sequence Number=SeqID_14386
MEILSIHNNELTTKLENIGSTPATSLVEIPEIIKKDASTSCFDLIDDSNPCNQVLVENIVVETCSDDVAKENEQLKQEVAHLGKALYDKKGKAKQIRPPQDNTTALCHMEGHKSFQCKAMTGDKQRQKLKQKPSSKISNSYIKKVNKKDATPYLIKKKKNGKVIAIKANKQANKGKGAKRIWVPKEIISTMKSTKKVWIPKGK

SEQ ID NO: 57762 - protein, 21 aa, Zea mays
  Coding DNA Sequence Number=SeqID_14387
LMNQLDSFAPLDIKSKCMSPT

SEQ ID NO: 57763 - protein, 516 aa, Zea mays
  Coding DNA Sequence Number=SeqID_14388
  Gene Ontology: Mol. function=aspartic-type endopeptidase activity; Biological process=DNA integration
  Homolog annotation: Hit_ID=Q94GR9; Match level="QueryCoverage=70%, HitCoverage=16%, E-value=1e-10, Identity=23%"; Hit description =Putative gag-pol polyprotein
  Pfam annotation: Domain name=zf-CCHC; Domain location=37-54; Score =26.3; E_value=0.00012; Accession=PF00098.14; Description=Zinc knuckle
  Pfam annotation: Domain name=zf-CCHC; Domain location=431-448; Score =28.0; E_value=3.4e-05; Accession=PF00098.14; Description=Zinc knuckle
  Pfam module annotation: Pfam domain module=zf-CCHC::zf-CCHC; Domain location=37-54::431-448
MVRKTTKMLKKLNREGIKFDSRKKKFFSSKRKPISEMHCYNCGELGHLAHQCNKPKKNKLKGKKDDDSDDEKKEKKFFKRKDGKHKRFHKKKNGKTYIVGDWLTDIESSSGSSSSEEENDEKVAAITGDFSSPPPSPSSTSHLCLMAKGERKVQIDNDIINDSDSDSDDEFASPSYDELADLLKEYTQIIRKSKAKCDKLKDENEFLNAKYDIAIKSSDEMKEENKTMSCTVNELKSSLKDVKDKCEKLNEANRELKERFVKIKEDYIKIKIDHDNLLVANELLYCSTHEAINPVVKIDVATSCDDLSQDDQTSLHDELTKKVEVLTLDNQKLKRHLTDATTRGKVAIENNDFNNELAVDNERLRNEVKKLKSENEHLATSVQMFNKGQYLQNELLMNTIMKNNKSGIGYNSFVQKKATNQYKPKQTHKPIKCFECGKEGHFAHNCKAKPPTPLPKHSRPFAFNAHYVLRKVANGKVKVTFLGPPSKSRPRQIWVAKSLIEKVTGPMQNRALKIQA

SEQ ID NO: 57764 - protein, 359 aa, Zea mays
  Coding DNA Sequence Number=SeqID_14389
MVSPVSCKRVIRVDVRAPFVRGRLGAQRHAQKYLRGPRDLRRLLNPSRGPAFEPLISRGGSEPGSFTGKDPFWGEASPASPARGAACPAAELMRRGEWLAGRPLRVREPFEEQSAGALSSHRERGFSCCPRMGRRVTFKRRVTPLEGDHVFVLPYASCLSTFQAPGWGIPAVFPPHRWRNATPWELVPFSHRSASRIFISQPGCTPRRRSPKTVTTSPWVGRSKPGCDLGPTLSFKDVHHPRWGGGRAEPELYLPHGFVGHRLLRRSRERALTSPAGGSDFDNAGLVDGGRRQPQRVELVGLAPGAPSCRKAAAAPCAREDRPRYRALLGRRSCSGAVLPLHRYGASTRRSMPHSSGRI

SEQ ID NO: 57765 - protein, 30 aa, Zea mays
  Coding DNA Sequence Number=SeqID_14390
MESRLRKAWRPRKRRPGKWAYTRLAVAQEF

SEQ ID NO: 57766 - protein, 455 aa, Zea mays
  Coding DNA Sequence Number=SeqID_14391
MGGRPAEQQKTDERLAAARSDYDDNDPRSGWSSCSSAGLRVGAAAILPSPTPTLEGRGQRATSRVVLPCTRRGSRPPAEGAAGSQADEPDTLEVTTPAIDQPCVVEVRATRRASERPLPRMPRERMTHEPAREVERRLSPAPTLARMMNILEAEGGTKIAARLAPPHPGAGGHRLGPTRRATGAPDAACKQLHRLRHHRASSIAEPIPRLEATQCATQQHQPDAAANAAKSGPAVMTVAGAREQRSRRQPSSRPIRGQQENPLSRREDNAPVIRSSNGSRTRNGCPANYSPHRINSAAGQAALLAGAAGDALPSPKQPRQKRFRASLLIRGSKAGPPKGSTAASDRVGPTPTIGQRGSKAGPRRVHSRLRRQARDDQGYVRYITKARAALPSSPETPCSAPIEGNMALSPPPPCGKATQGPSTYQPENLGPDRTPGLRPARMREQPDQPKHYARH

SEQ ID NO: 57767 - protein, 17 aa, Zea mays
  Coding DNA Sequence Number=SeqID_14392
MGPGSIRPTSTSARIFF

SEQ ID NO: 57768 - protein, 71 aa, Zea mays
  Coding DNA Sequence Number=SeqID_14393
MAELPVAPEAELGCCKPYPGGWQSSRSGASDAVFLSDRIRCQAIFALNAPAIRSVGKAIWPRLLHDEACPS

SEQ ID NO: 57769 - protein, 282 aa, Zea mays
  Coding DNA Sequence Number=SeqID_14394
  Homolog annotation: Hit_ID=Q6BTJ4; Match level="QueryCoverage=67%, HitCoverage=21%, E-value=7e-07, Identity=27%"; Hit description =Similar to CA1621|CaIFF6 Candida albicans CaIFF6 unknown function
MQAACNRTKWAHPFDSNASSMEAQAHTSWTGKGDTPKGILLHEGNGPRAPLLIRGSKAGPSEGFNGRLRALELRAHYWSEVRRLAPRKGSTTASGHSGSVPTTDQGFVGWPSKGSIAASDAEQGMTLEDSAARVAPTVVPLDGVRLTAAKSGLGCHRKLRLARPQGSDSGSAPEDDELRLARPQGSDSGSAPEDNELCLARPQGSDSASAPEDEELRLARPQGSDSALAPKDNELRLARPRGSDSTSTSEDRLNLDLGGASASPDPGLGPTTSQKGPSLPYP

SEQ ID NO: 57770 - protein, 287 aa, Zea mays
  Coding DNA Sequence Number=SeqID_14395
MAPPMTWSVRALGRRGGGSSEVEVEPVFRGRGRVRAPGSGEAEFVVFRGRGRVRALGSGEAEFVVFRGRVRALGSGEAEFVVFRGRALGSGEAEFVVFQGRARVRALGSGEAELPMAPEAGLGRCQPHSVEWHSSRSDAGGTVFLSGRIRCQATFALNAPATRSVGVTIRPRLLLGGDWASSELKLCADGGYQLRLGVLGVPLIMVPDTHLPWAHESHTPLSRKRGRRRWSALGGLPAAEELLRRAIPGGPECNPPRNCDVHDLRSFTKLLGPIPYPERQQTRFTKN

SEQ ID NO: 57771 - protein, 333 aa, Zea mays
  Coding DNA Sequence Number=SeqID_14396
  Homolog annotation: Hit_ID=Q6BTJ4; Match level="QueryCoverage=36%, HitCoverage=12%, E-value=1e-07, Identity=38%"; Hit description =Similar to CA1621|CaIFF6 Candida albicans CaIFF6 unknown function
  Subcellular localization annotation: CTP_CleavageSite=39; ConfidenceScore=5.12e-01
MEAQARASCNRRAGCYVRATAPPLAPLPRLLDCGTACARATAASRTTRPVALTPRRDRRRLRQEKQAMLRLRHNDRVKKGNKPRASLLIRGSKAGPSEGFNSRLRALGFRAHYWLALEGFTVASDIERGMTLARLRASSRPLTNGARVSTRITRQQLTGDTMFGALRGQHGAFPPSSLRKGDTGAAACAAPTAVPLGRVRLTAAKSGLRRHRKLRFARPQGSDSGLALEDGELHSARPQGSDLGSAPEDGELRSAQPQGSDSGSAPKDDELRSARPQGSDLGSAPEDDELRSARPQGSDSGSAPEDDELCSARPQGSDLGSAPEDDELRSARP

SEQ ID NO: 57772 - protein, 105 aa, Zea mays
  Coding DNA Sequence Number=SeqID_14397
  Gene Ontology: Mol. function=protein dimerization activity
  Homolog annotation: Hit_ID=A2Y331; Match level="QueryCoverage=43%, HitCoverage=9%, E-value=9e-14, Identity=73%"; Hit description =Putative uncharacterized protein
  Pfam annotation: Domain name=DUF659; Domain location=29-105; Score= -39.9; E_value=0.0004; Accession=PF04937.6; Description=Protein of unknown function (DUF 659)
MKLWKETSRSSKTTTSSRCGLAATPSRLPVKAALSTFLFRTLIYYIDDERKKHEEAWSQYGCTLMSDGWIDKRGRHLINFLVNSPQGTFFLESVDASNESHSCRI

SEQ ID NO: 57773 - protein, 452 aa, Zea mays
  Coding DNA Sequence Number=SeqID_14398
  Homolog annotation: Hit_ID=A3C8M9; Match level="QueryCoverage=15%, HitCoverage=56%, E-value=1e-16, Identity=61%"; Hit description =Putative uncharacterized protein
MALSSSRPKHLLRPILRGFHASARALARVEPHEFSKPSEYLGSWEPAAEPREAWARLDRLRKGYASEVRELRRQYAYEVQLLQAERQRKADARAEAARAANQERKAAKLAAAQTRAAERRAFEEDFRQTLMKERAEKLESWRKKEKRKEEKKAIKKELLRRKSSMKADNSSLRIMRRGGGHHMDVLVVTCEKLIRTDLLLCPRLLRCIVQMQICERSVGVYDADEEGAGMKRRGGKVQSKKGGAKAGSASLQPFLNDVRSEDAGAVASSGSLATLHKVVSRDGQTGRPARPGPARPLILPCRARTGPKKRASCRAHVPRAFWPSMVVSLPSPTLPGVMLDYEVVHAVASYRFEARGGHPPLYYLPNSAPTTPSRAIKGSLLHSRIAIDPTTTSSERGLMAAQLRYMISHYFESFSEEFSPNLVHFFGSGLTGLFVPNEAGGDPRSGLRLEDK

SEQ ID NO: 57774 - protein, 165 aa, Zea mays
  Coding DNA Sequence Number=SeqID_14399
  Homolog annotation: Hit_ID=Q6QP51; Match level="QueryCoverage=70%, HitCoverage=59%, E-value=6e-18, Identity=46%"; Hit description =Putative growth-regulating factor 1
MTLGTSVTWPRLGLRSRGTLGHFRDQQERFCNRIPPEGGIEPSDPIEWVQVRQITCSQQGRSDRSHFTLSLTNLTEKQRRSPRSDCCANHPGKADISRVQPRAQQEALPRPTLGLGFGRRSPPRPTPRLGLSLGLGRNRVLARPPASASGEVSASPDLGLGPTAP

SEQ ID NO: 57775 - protein, 331 aa, Zea mays
  Coding DNA Sequence Number=SeqID_14400
  Gene Ontology: Cellular component=integral to membrane; Biological process=peroxisome organization and biogenesis
  Homolog annotation: Hit_ID=A2WX54; Match level="QueryCoverage=95%, HitCoverage=60%, E-value=1e-129, Identity=76%"; Hit description =Putative uncharacterized protein
  Pfam annotation: Domain name=Aa_trans; Domain location=1-317; Score= -37.6; E_value=0.00031; Accession=PF01490.9; Description =Transmembrane amino acid transporter protein
MTHPRRHAFLLLQFQAIYLLANPGGTIKLYVFVAIFGVFMMILAQLPSFHSLRHVNLVSLLLCLAYSFCAVAGSIYLGTDSSRTSSSSARPKDYSISGDAQNRVFGVFNAIAIIATTYGNGIIPEIQATVAAPVTGKMFRGLCLCYAVVVTTFFSVAISGYWAVGNQAQGILLSNFMVDGAAVIPKGLLLVTQLFTLLQLSAVGVVYLQPTNEVLEGLFSDAKQGQYAARNVVPRLVSRTVAVALATTVAAMLPFFGDMNSLIGAFGFLPLDFAVPALFYNVTFKPSKKGFVFWLNKTIAVVFSGLAVIASVAAVRQIALDAKTYKLFANV

SEQ ID NO: 57776 - protein, 142 aa, Zea mays
  Coding DNA Sequence Number=SeqID_14401
MGKSNKCKREPTPPSEDFGDSEYSEEEFSSESEGSPAPVSPPASSDDSDDSQGIAAEVWTYIWAIERSGLEGSDGSKYSSDEEDSPEEDGDDDDDDDDGGDGGDDGDGGGRGGNGDDKGGNGGSSRGSNDGGSSKGSNKTSG

SEQ ID NO: 57777 - protein, 84 aa, Zea mays
  Coding DNA Sequence Number=SeqID_14402
  Homolog annotation: Hit_ID=A2WX54; Match level="QueryCoverage=40%, HitCoverage=6%, E-value=4e-08, Identity=88%"; Hit description =Putative uncharacterized protein
MGLGAVAATREDEEAKMEAGGDTAGQKLDAGALFVLQSKGDLPRRFFCSRSPCISFRVVMFLEHEQASTAVDVGGGCVFSPCCK

SEQ ID NO: 57778 - protein, 190 aa, Zea mays
  Coding DNA Sequence Number=SeqID_14403
  Gene Ontology: Mol. function=metal ion binding; Cellular component =nucleus; Biological process=regulation of transcription from RNA polymerase II promoter
  Homolog annotation: Hit_ID=Q94DE2; Match level="QueryCoverage=49%, HitCoverage=64%, E-value=3e-48, Identity=95%"; Hit description =Protein BUD31 homolog 1
  Pfam annotation: Domain name=G10; Domain location=1-145; Score=206.9; E_value=4.7e-59; Accession=PF01125.8; Description=G10 protein
MPKIKTSRVKYPEGWELIEPTIRELDAKMREAENDPHDGKRKCEALWPIFRISHQRSRYIYDLYYRRKEISRELYEFCLDQSYADRNLIAKWKKCSPVCFFGYEVCGCAMPDLASSFLTATFGPLAASFLEARDVYRNTDAVISSLEELKNLYDTGDSVGDLYPQGMSMGVNLYPPADMNDSTWFVFVGV

SEQ ID NO: 57779 - protein, 82 aa, Zea mays
  Coding DNA Sequence Number=SeqID_14404
MGAIQRSNDGSSSARLWLRRRGGFEFASAAAVRLLRLGRLADLRLAQAAGAAARGGAKLSRSIPSRGSLGRDMEEGVLGYVD

SEQ ID NO: 57780 - protein, 39 aa, Zea mays
  Coding DNA Sequence Number=SeqID_14405
MDLSKALIGSTSEKMYLCQDLVDVGLLIEDPLTGHMPRH

SEQ ID NO: 57781 - protein, 22 aa, Zea mays
  Coding DNA Sequence Number=SeqID_14406
MEKKAMEDEALGRDLSEGLAFI

SEQ ID NO: 57782 - protein, 41 aa, Zea mays
  Coding DNA Sequence Number=SeqID_14407
MWAQEASRIRLQSMIPYGPYKNLHSDKSFRGKLMKIYLECL

SEQ ID NO: 57783 - protein, 128 aa, Zea mays
  Coding DNA Sequence Number=SeqID_14408
  Homolog annotation: Hit_ID=Q6QP51; Match level="QueryCoverage=49%, HitCoverage=29%, E-value=7e-19, Identity=76%"; Hit description =Putative growth-regulating factor 1
MSRLLDCGTSAATRGSPARDPIVPIKCNDHGVSDISSRRGGRHFTSAMMTASKKGPGKAIFRKGSFSAKETGSEPITDQGFEGWPLGRVRQLPQSTRAPSPLLIRGSKAGPLEGFDSRPRALWLQAHY

SEQ ID NO: 57784 - protein, 314 aa, Zea mays
  Coding DNA Sequence Number=SeqID_14409
  Homolog annotation: Hit_ID=Q8H6I5; Match level="QueryCoverage=20%, HitCoverage=6%, E-value=8e-07, Identity=53%"; Hit description =Putative RIRE2 orf3
MMMTVGLVVGKSEPGRGLLPTLSFKDVHHPCWGGGCTKSGPASARVAARSFLNDRGRRVRHPLAEAVAFADEIVSATCAPDLWLFGFNGWSSSPRSLASHTEFVIPQAFRCGGCSFLWEWTRSPDLRPLCDELKPEAAVSARTEAVSARIEASSAQEQVASQAEEVQQRRLELGQVIRERDQPRSHAAEAMSRAEVLGGQLAEATERPAEASARAGTLVESLTVRAQARCWRPHSRWRSFCPCRRLRPGQIPPRVEMTPRVLLLPLPMSEPAETVCLKHAITYPSESYFSRKVMSEGFVIDIVESTKVVFYPSV

SEQ ID NO: 57785 - protein, 359 aa, Zea mays
  Coding DNA Sequence Number=SeqID_14410
MASTAVLGVKGGAFSAGGEISAATAVKDEAGTMSRRLREASQQLSQQLSQAADFVDRVASGALTADVSAEVERLRAQHEDAVREKSATESKSRRLAEKVAALEGERTDLRRQLVEERREANQAIAEAQAAQAEAKLARVEGSLASQRTEEWEVRFNALHGRMERAEASMRSEVERARKQLVDSYRELGARTADFEVPDREAGLRFLEWLQEELLALPTIVEGFMSFASLVTCEGAMYALSREGCNHYEGFDRSNEDFGRGIFKVEDPVVKDSAGALFDRMWGPHGREAVREWSDRTREHMVRAEDVEDLGDLNGERPKAEVNPVLPEAEVNPEAAEGSAAGPVLTVSGSRFWACARNHY

SEQ ID NO: 57786 - protein, 168 aa, Zea mays
  Coding DNA Sequence Number=SeqID_14411
MITSFVVGRSKPGYDLCPALSFKDVHHSGWGGGRTEVGPASAWVGDPLLPPAFGGEGHPPALRRRRPPAMRGKVNCCCLARVQMYVLHLDDGRAVRRWLLSPVLKRQPPLVRFPTAAVVASADETVSATCDPGLRLFGFNGWFSSPVRGRERGPSSGSICPEAIAAAV

SEQ ID NO: 57787 - protein, 166 aa, Zea mays
  Coding DNA Sequence Number=SeqID_14412
  Homolog annotation: Hit_ID=Q8S481; Match level="QueryCoverage=19%, HitCoverage=3%, E-value=2e-11, Identity=96%"; Hit description =Putative TNP2
MEGYTTEEVIESCIDYISDGTMIGVPIPKHEGVEPWGQARRSFLWRLRLDSAAVSLTLAGGTAVEAGQAVLFSCQAILALNAPAIWSVGEAIWPRLLHCEACPSWASGESKAFVACADGDYQPSLGVLGASTLDALKSKGCIPVVQLHAACMAASSYDAWDPAPVS

SEQ ID NO: 57788 - protein, 382 aa, Zea mays
  Coding DNA Sequence Number=SeqID_14413
MHCALPPSEPPDGERPRCFRLAAVGGAQLRRRWHLSAIARLQGFSSGSPTASPHQWSPRTVTTSSMVWRSKSGCGLCPALIFKDLHHPCWGGGQAEPELYLPYGLAGHFFLQHSGEKALTGLAEGADFDNAGPIGRKRRQLQHAWFAGSAGSGAASGATSHRRAECGYLPTVRAAVAPRASGDRPRRRTLLERRSCSWVVLPSLRHDASTWRSVLARPGGLEWGSTGGQVAAVVGAEVVAAGEGFPTDETVSATRGPTSGSLALIACPRPSSGDAGEGLVVAASALRSLLLLFSRPERRLLSPLTERAAASQLEFVVPQALRCGGCSYPREWNRSSVCNGTLSAGVCSLWLSGPEHLGILGAIPCFFLISSTRTRLSASWTA

SEQ ID NO: 57789 - protein, 542 aa, Zea mays
  Coding DNA Sequence Number=SeqID_14414
  Homolog annotation: Hit_ID=Q6ZAK7; Match level="QueryCoverage=54%, HitCoverage=76%, E-value=1e-37, Identity=41%"; Hit description =Putative uncharacterized protein P0042B03.23
  Pfam annotation: Domain name=VQ; Domain location=315-345; Score=52.7; E_value=1.3e-12; Accession=PF05678.5; Description=VQ motif
MSWPSEERLSPVEAQLSGLSGEWGRARRRPSSEVEVESEPWGRARRRPSSEVEAGAEPWGRARRSFLWRLRLDSAAVSLTLAGGTAVGAEQAALFSCQAILALNAPAIRSVGETIWPRLLHCEACPSWASGESKSVPVLFSLLCLASSLRDRIISFSPVRLRFGGSAEILGELRTAVPLAPRPRPEPWTITPTFRGMDSGKSASLQSSSGGDDEFDCRSGADSSPLSALLRQPPPPPSVPGFGGGSLIYGLQELRTPPLSHWCSTTAPLPAGAEASPPSLSGHGSMTAYQADAAPVQLAAAAPPQGSRKRARASRRAPTTVLTTDTSNFRAMVQEFTGIPAPPFAGAASARSLFDHIFPLRTAAGTGSLATLPQYLRRPFAQKLHASNPYPPSFASSSTSSPAPTNVSIAPASTTTPGTAAVASSDSYHQLTAASTSALLWMQQDHGSNNYHPFHQCSSLGDGKYAAHPVFDRGIPSPPSSSTRLQDRADFVGLTHDVMVGSQGPNVYLHPRNGGDDLSSLVGGASVTGAGGCKSTAGAQSA

SEQ ID NO: 57790 - protein, 149 aa, Zea mays
  Coding DNA Sequence Number=SeqID_14415
MGMGEFGIRRYGYGYNKVTGIHWIADTRWVQAWTLGDPSSNSVRNTASAPNDKKKGVQAVALEGVAVSALDPVVGSWVCHDSPVNADVEVVTEPEEGFTCELSPIIYYDRVGDSESIDDVAEECGGLRRLEFDEWLCLDPLCELVYRDE

SEQ ID NO: 57791 - protein, 79 aa, Zea mays
  Coding DNA Sequence Number=SeqID_14416
MGRQQGEIGETEHGYKCLTSGRSSGWLGAVYSELDGWGGGCGSPARSGGVSRVRVRAGVREMRRGVVFNPNSIQVSNSN

SEQ ID NO: 57792 - protein, 250 aa, Zea mays
  Coding DNA Sequence Number=SeqID_14417
  Gene Ontology: Mol. function=acid phosphatase activity; Cellular component=chloroplast
  Homolog annotation: Hit_ID=Q2QN72; Match level="QueryCoverage=52%, HitCoverage=26%, E-value=9e-37, Identity=55%"; Hit description =Diphosphonucleotide phosphatase 1, putative, expressed
MKWVEWVAAVEDRHREGDGRALDGSASISAHPTVLGLKGQSSNWVVVEFRHPNPSNDDWVGVFSPSGFSEHGGGLGAGNGAVQVHRSKQPWLVFLAHRVLGYSSGGWYETMMGSYGEPMGRDGLQDLWQRYDIAVFGHIHGYERTCPVYQAKARLSLHLCIRRDELVRQCAVLELLQGRRHLMFGKLTAINSSFLLFEYKKSRDGHVYDRFSLARLPSPGGLLRRQLPPKHLGRLIELRTLETCVDRYTV

SEQ ID NO: 57793 - protein, 795 aa, Zea mays
  Coding DNA Sequence Number=SeqID_14418
  Gene Ontology: Mol. function=diacylglycerol kinase activity; Cellular component=integral to membrane; Biological process=intracellular signaling cascade
  Homolog annotation: Hit_ID=A8QM12; Match level="QueryCoverage=84%, HitCoverage=100%, E-value=0.0, Identity=88%"; Hit description =Diacylglycerol kinase 1
  Pfam annotation: Domain name=C1_1; Domain location=193-250; Score =3.1; E_value=0.012; Accession=PF00130.13; Description=Phorbol estersdiacylglycerol binding
  Pfam annotation: Domain name=C1_1; Domain location=260-321; Score =38.3; E_value=2.7e-08; Accession=PF00130.13; Description=Phorbol estersdiacylglycerol binding
  Pfam annotation: Domain name=DAGK_acc; Domain location=614-731; Score= 74.4; E_value=3.7e-19; Accession=PF00609.10; Description =Diacylglycerol kinase accessory domain
  Pfam annotation: Domain name=DAGK_cat; Domain location=468-597; Score= 131.6; E_value=2.3e-36; Accession=PF00781.15; Description =Diacylglycerol kinase catalytic domain (pres
  Pfam module annotation: Pfam domain module=C1_1::C1_1::DAGK_acc::DAGK_ cat; Domain location=193-250::260-321::614-731::468-597
MAPEAGLSCCQPHSVEWHNSRSDAGSAVFLSGRLRGFCLSCGSESESGGEGKAQQRRRASGPFEDRNVSTSRLVLIPIPEPHPLPGCPDLVISLSPLYFMQQTASSACLFAVHCDCHGTHKMLHPSWVGVSAHVSEYWSVIIATVVFAFVGAVTIYYTVNQLNKNISLSLIRAIKARAKRYKKSKDKVPAASHIWRKEVVSRSKGLKCCVCLKSVSPPQYSGGTIHQCDICGAAAHPSCSGNAHKDCKCVSMAGLGHVLHQWAVQWIDSADHSEEDSFCCHCDESCNGAFLAGSPVWYCMWCQRLVHVDCHSSLAKETGDICDLGPLKRLILSPLCVKELHWTGAGILSSITNGANELASSVRETIRIRSKRYKRGSASADSDSSGAIELPSDAEGDSQEVNSKAKVRDDHANCKLNEVHQSSESEKDKQLVPDNAATTNMSDVQRENSHVQNNQKYEIINVPSDSRPLLVFINKRSGAQSGDSLRQRLQILLNPVQVFELSKQQGPDVGLALFRKVTHFRVLVCGGDGTAGWVLDAIEKQKFETPPPVAILPAGTGNDLARVLCWGGGLGVIEKRGGLFSVLQDVEHAAVTVLDRWKITIKDNQGKLMRPPKFMNNYFGVGCDAKVALDIHNLREENPERFYSQDSEGILVANIRSYMGGVDLWKNEDDVSDTYLPQSMHDKKLEVVSFTGMLHLGKLQVGLSRAKRLAQGHHIKVEVSTTMPIQVDGEPWSQEPGTIEVSHHSQAFMLKRVSEEPLGHAASVMADILENAESSGIISALQKRTLLQEIASRLL

SEQ ID NO: 57794 - protein, 646 aa, Zea mays
  Coding DNA Sequence Number=SeqID_14419
  Gene Ontology: Mol. function=DNA binding; Cellular component=integral to membrane
  Homolog annotation: Hit_ID=A3B2C8; Match level="QueryCoverage=7%, HitCoverage=19%, E-value=5e-14, Identity=79%"; Hit description =Putative uncharacterized protein
  Pfam annotation: Domain name=Extensin_2; Domain location=166-567; Score=-130.1; E_value=0.033; Accession=PF04554.4; Description =Extensin-like region
MGAGIGDLVRSEASRMQATPGMAGKETSDDEATEGHDTSISSAPRGVAVNVAVAVASSFLLLLAAPLFRAVGPPPPPSKRSRSNVSTRYLTRPSPGSGRPAMASSIATTLIARFREAEAALPLRRSWPAASLTRASSPAPAAGAENLLVLVQGSSLLLIAVPGARFTAAGVFMEERQTGDGPERHFLAASPPAPRTAGPATFPAHATNLLRTGRANEDGASSRSSRFSACDGGDTATGANGRRGRPLALVAAAAVIPPIKKCANQEEGRRKQKRSRARRLMSGRRPPGVTVPPPPPVRHHRAAPPTTPEPPPPHPVPTRGAAELSAPFPRPASTLMEPSSPRILAAVFVPKFSPRILALPHRTFGVSTTITAVASPCPRNHRGGQIHYLAFLPGDVLFIAHHLATLFVFLTCCHLVRHSAYALLVLAEVTSLLQNAGRSPGSSGTSPPPRPASTAPSRRPSTRSTRSSGASPARSSSSRWPPSTCPARPSTPSRGGCGSPGSWLSAPPLRSATCGFGTSGRSSSGNGSSRPLPSQRKTHRPPPPSRVPRSRRTRSTSSCRSWPVAHPGAYAREATHLGRFGARRRYRPLPPIHLSCQPARLPLPRASGGLPPPTGEEDAHQMWDYRVGTLLIRFEEHNGPVRGIQF

SEQ ID NO: 57795 - protein, 434 aa, Zea mays
  Coding DNA Sequence Number=SeqID_14420
  Gene Ontology: Mol. function=nucleic acid binding
  Homolog annotation: Hit_ID=A3CIR4; Match level="QueryCoverage=32%, HitCoverage=30%, E-value=1e-30, Identity=49%"; Hit description =Putative uncharacterized protein
  Subcellular localization annotation: CTP_CleavageSite=20; ConfidenceScore=5.01e-01
MTAAAATRARGRPRRPFAPVAVSPPSQAENRLEREDAPSSFARPVRRRFVACAGKVAGPAVLGAGGEAARKCRSGPSPVCLSSMKTPAAVKRAPGTAIRRRLDPCTKTSKFSAPAAGAGDEARVSEAAGQERRRGSAASASRKRAMSVVAMEEAMAGLPEPGEGRVKYLVDTFERLLLLGGGGGPTARNRGAARRRRKDEATATATLTATPRGAEEIDVSCPSVASSSEVSFPAIPGVACILDASDRTRINHARGQRRQRAYNSTAGSSDRAWSCSRKVTRVTTTQQPFRLRTEQRGKAKEGSFVERLRKMQQEEERLRNPLAQGLPYSTDEPEIPMKPPTKEPTEPIDHVLHSEVRVARRAKFDSQADEEIEIKYMRKQQVPRAHPMPDFSKPFVPKRSVKLPTIGREPRFHPRLMRRISTAECSLKMLASRK

SEQ ID NO: 57796 - protein, 182 aa, Zea mays
  Coding DNA Sequence Number=SeqID_14421
MSIVHAAVWVCRLPVEWQARRLWNGQVAACQRNEQRPYVRLRPLAYVTCSRPRGSIGSPPGRRAEAYTIRSRHVSAPNPRLALIKAWVFSVLESRDPAVSGPDPTQRGLDPILGVRFAPMEVLYLIRRPSVYIQGSGTSPWGSRLTVDTLEHIIFSGHVVAPEPSTWRGRVLLLAQSSHSKL

SEQ ID NO: 57797 - protein, 77 aa, Zea mays
  Coding DNA Sequence Number=SeqID_14422
MAVPSRAATIAAASRAAAAAPLVCHNRKEVGRFRDLSRLLRRAFYTTGSKKDHSKPKIAWTKKTTTFCYSSYPTFYN

SEQ ID NO: 57798 - protein, 484 aa, Zea mays
  Coding DNA Sequence Number=SeqID_14423
  Gene Ontology: Mol. function=nucleic acid binding; Cellular component= ribonucleoprotein complex; Biological process=mRNA processing
  Homolog annotation: Hit_ID=Q2QN68; Match level="QueryCoverage=78%, HitCoverage=100%, E-value=1e-122, Identity=57%"; Hit description=RNA recognition motif family protein, expressed
  Pfam annotation: Domain name=RRM_1; Domain location=110-177; Score =52.9; E_value=1.1e-12; Accession=PF00076.13; Description=RNA recognition motif. (a.k.a. RRM, RBD,
METKAIFCNLQNEGASSWVGSPLLVIRSAFQERFFTASQMESLQQRGAQDFQIRFHGAKRMELRKKAAARVIRIGSRTDFMLGDILHPAINWADKESHLDPDEMAKMKSAFIGNLPEDVNEEYLRKLFGQFGEVVRVAISRKGQCPVAFVHFAKRSELENAIEEMDGKTVSVARPTADNDKKRSREEVRTRRSNASGDRRDYSHGRYGHDSLDRQVKAPRLSNYVADAADPYESAVNSLPSAVKEVLLRILRLRIGTRYDIDIHCVKSLDELPESSALAVLNQHQAETFGLTHALHGTTYLSRNPEMHSKRYPHEDYDFVTPRSSRYDSSAHHPSTYYEDDPPVSESRVRRYAEERSTIVRSPEPRPRYDETDIRINPEPRLPYESRHNAEKHLDRRYIQEHSSNIERPAEEALLSRERRFLPAAGYMPNPGGSDFRSRSPAEYSAQRQQMRFDPFTGEPYKFDPFTGEPIRPDPNQRRSGSLY

SEQ ID NO: 57799 - protein, 52 aa, Zea mays
  Coding DNA Sequence Number=SeqID_14424
MMIESSLALLLIESFKQPLTPCMDICPRPQNPSRTVLWERKWVGYAVTRANA

SEQ ID NO: 57800 - protein, 296 aa, Zea mays
  Coding DNA Sequence Number=SeqID_14425
  Homolog annotation: Hit_ID=Q6J9V9; Match level="QueryCoverage=44%, HitCoverage=38%, E-value=1e-11, Identity=39%"; Hit description =Putative uncharacterized protein
MQATCNCTTGTHPFDFNTSSVEAQAHTSSAGEGTTVDIAKSGPAVMAAEDGRKQQSNCLQAHVPSWGSRGALSHGVKTTRPCSVPRTAHTTAALRTTRPVALTPWQGRRHLWQAKRAMLHLRHNDRVKKGTGKGDTPKGILPREGSGPQALLLIRGSKAGPSEGFDSRLRALGLRAHYWSEVRRLAPRTGSTAASGHSGSAPTTDQGFEGWPHEGFDSRLRTRRARDDSGYVRYMSEARATLPSVRCANGSESPTVGFAKEGKKSAPDSVRWCTGLSSAPGDRRQELPSWNALNGS

SEQ ID NO: 57801 - protein, 23 aa, Zea mays
  Coding DNA Sequence Number=SeqID_14426
MAAAAVATAPPLGLRWGTWAEFQ

SEQ ID NO: 57802 - protein, 100 aa, Zea mays
  Coding DNA Sequence Number=SeqID_14427
  Subcellular localization annotation: CTP_CleavageSite=32; ConfidenceScore=5.48e-01
MPAHAPNPLLIAPLVPHTHPSPHFAHPHPLSRSALAASRRRRPALVFLTIQLVGDRPKPPRAPPRDNEQSEVPMCVVGDLPEQQPGEGKCSLTHYVLHTL

SEQ ID NO: 57803 - protein, 119 aa, Zea mays
  Coding DNA Sequence Number=SeqID_14428
MARIAHRSYSGTPETISLPLYPLCAWIHGLFPAIEFVVAPSPSLPNSGDPRATLAHASLSSSDLTVVERSGAARSHLFSRDNEQSKVPGYVVGDLPEQQPGGEAGNMDDFEEFQEYDEF

SEQ ID NO: 57804 - protein, 137 aa, Zea mays
  Coding DNA Sequence Number=SeqID_14429
MDTVSKFLVANASQAKLPSGAADPKVNAWKIKTDGRNAMPGATNGCAVEQEGDPVTLSDSGSTRRPWFARALLGSEDGVFAVQSTLGHNNRPQRHGYPNGTAPNGPTVPERESDRSSTAFDRLCGHGPHAPKPDTIL

SEQ ID NO: 57805 - protein, 311 aa, Zea mays
  Coding DNA Sequence Number=SeqID_14430
  Gene Ontology: Mol. function=sequence-specific DNA binding; Cellular component=nucleus; Biological process=regulation of transcription, DNA-dependent
  Homolog annotation: Hit_ID=Q6IEQ6; Match level="QueryCoverage=91%, HitCoverage=87%, E-value=1e-46, Identity=43%"; Hit description=WRKY transcription factor 25
  Pfam annotation: Domain name=WRKY; Domain location=233-293; Score =137.7; E_value=3.4e-38; Accession=PF03106.6; Description=WRKY DNA -binding domain
MAVDLMSCGGGAYEQLAFQEAAAAGLRSLELLASSLSPCGAGRAESPPLGQIADQAVSRFRRVINLLDRTGHARFRRAPAVAAVEPIETETPASQQAAAEPPHQAQNKALTLDFAKSVPPAANKKAPRAPAVSATSTSFLSSVTAGGEGSVSKGCSLAAVSSGKPPLPKRTSPCPAAAPPGAHHAESGAGGCHCSKKKRSRQGLSRRTVRLPAAAATPGSQPPGHVPASSDVPHDEYSWRKYGQKPIKGSPYPRGYYRCSSAKGCPARKHVERAADDPAVLVVTYEGDHRHDGDGDGDGGVGAGAARSRAA

SEQ ID NO: 57806 - protein, 128 aa, Zea mays
  Coding DNA Sequence Number=SeqID_14431
MGKNNKRKREPTPPSEDFGDSEYSEEEFSSESEGSPAPVWTYIRAVERSGLEGSDESEYSSDEEDSPEEDGEGDDDDGGDDSDDGDGGSRGGNGGSRSGNGGRRGGDGGSSRGSGGGGSSKGSNKASG

SEQ ID NO: 57807 - protein, 105 aa, Zea mays
  Coding DNA Sequence Number=SeqID_14432
MRRPRHRPSSGDVWDEGLVCPLSCLRWCNEDGEGIERRVATTVSTTVPVAKGGALSAGGDISALAAVKDEAGAVSRRLKEASQRLSQAADFADRVAVIPNFLKRS

SEQ ID NO: 57808 - protein, 180 aa, Zea mays
  Coding DNA Sequence Number=SeqID_14433
MWQDAKKSFAQMNINGNLQNGIGIQMGQIKTIKIKEAAEKGRNGKTETAEKKRNINYGFVGILCRDSDPMANPPRTKLPRGKDPDGYEVEKVRLGDNRHMRGSGGRKARTRAQKAEAAKKRSAYGIFPSQIPFPKAPSQHPAVTSKTPACHVVTRRLLLKPLRATSSLGYYPQSGRHDPF

SEQ ID NO: 57809 - protein, 75 aa, Zea mays
  Coding DNA Sequence Number=SeqID_14434
MAEPEHRRVSSEQQNAVAFKLMAWESGSACKVSTAAFQGDDAVFSELCGGSVQPIDIVSNQRLKACQNKDYMGMN

SEQ ID NO: 57810 - protein, 151 aa, Zea mays
  Coding DNA Sequence Number=SeqID_14435
MSLTQLKGKCIAQPSQDNRDHMVKKLETTVACTKSLEENVKDLRSAKRREQNKKINTSSKSLNHAYIKGNVQENKRMINSLKDTSIKGLLFARRKKVWKEKGVNYEGRTFKGKKEDIKSNNTYLKNEIFKNNGVVDCSFHYQSSIFTGLSY

SEQ ID NO: 57811 - protein, 94 aa, Zea mays
  Coding DNA Sequence Number=SeqID_14436
MALFSQSQLCLGAPDSVRWCTGQCPVCQTGSGELAALGKKLTAYSYNSPECPATEGKKCLPGMLSTAPSCLGAIKGTPRRMEEYTKHSLSIPKH

SEQ ID NO: 57812 - protein, 326 aa, Zea mays
  Coding DNA Sequence Number=SeqID_14437
  Gene Ontology: Mol. function=DNA binding; Cellular component=nucleus; Biological process=regulation of transcription
  Homolog annotation: Hit_ID=A2ZCI8; Match level="QueryCoverage=100%, HitCoverage=78%, E-value=1e-111, Identity=61%"; Hit description =Putative uncharacterized protein
  Pfam annotation: Domain name=NAM; Domain location=10-139; Score =300.1; E_value=4.3e-87; Accession=PF02365.6; Description=No apical meristem (NAM) protein
MAAFSSSNGVPPGFRFHPTDEELLLYYLKKKVGFEKFDLEVIREVDLNKIEPWDLQERCRIGSAPQNEWYFFSHKDRKYPTGSRTNRATTAGFWKATGRDKCIRTSYRKIGMRKTLVFYRGRAPHGQKSDWIMHEYRLEDADDAQGGTSEDGWVVCRVFKKKCFFKIGGGEGSTSQSADAGGHLAVSPPLGGHHDQQARAALAYMHPHPYYHHASSYYSQMHAPGPHAAAYSHHVQVQDLLTNHRPTDDGAGTSYDFSGLPVEHHPGGGLDVGTSDGVATDGGETTGTAAEQWQAMDGFSNGGSAAVQQMTGAQRGGEMDLWGYGR

SEQ ID NO: 57813 - protein, 49 aa, Zea mays
  Coding DNA Sequence Number=SeqID_14438
MVAACWLVSACFLCHMLACCPWFQAPASVLNLLVWKSVNGCMLQKYKGL

SEQ ID NO: 57814 - protein, 44 aa, Zea mays
  Coding DNA Sequence Number=SeqID_14439
MGLSVCGSLCQGGDKDDGFDYGNGKEEGVKADLQEFQDFDEFED

SEQ ID NO: 57815 - protein, 113 aa, Zea mays
  Coding DNA Sequence Number=SeqID_14440
MGDADRARASHAGHGASHWLQHRACHGLVVQAATPGKPRAEPRWLPRAEPATQVAVGEPREGEPRAAQATASGLAAHRAPRRGATAGPGRGCEGAVPRWDSRQAAGKPGPRSS

SEQ ID NO: 57816 - protein, 177 aa, Zea mays
  Coding DNA Sequence Number=SeqID_14441
MGNLPQEDDRRIVRLRTHRRNLHQSLQHHPLIKILARFSLDYKFLQVPKVHNKPIKRPRKGSNKESKSQPKCVLVWRTGLSGVPPDSVRCTRELNSELLTFGNSGSRSAIIHRTVRCSTRLSGVPAEQRLLCANGRLQRAVNALQCAQKSEQSQKAHRTVNSDCPVVQKTEAPTVEP

SEQ ID NO: 57817 - protein, 154 aa, Zea mays
  Coding DNA Sequence Number=SeqID_14442
MKGRTTTGGIMLFTRRTGPLLLAEMKGRIYRGRWRAPPAADWSAAFGTEEERPTPEEYDSWARASALETRSLVAAEVKRRVITGQQYAPCAAVRLLRTRRLTPKEYDSWARAPVPETGSPWCASTEVFCGASGRRWGNPCLKSERELGLHLFPN

SEQ ID NO: 57818 - protein, 283 aa, Zea mays
  Coding DNA Sequence Number=SeqID_14443
MALLDPPGRLQPEVALNLVCNSLGWGVLAFTGRIRVGVSPHGDLAAGEFVFFVSKLPSGLGLPNPSFFVLLPEGLGLQPLHVTPCFILQATIIAYLRGMFVEATLLPASSSSIGGEGCSPALSATPTAPPAPPATADHAAPTPPGESYKTSYAVEVAGAFLDGLVLTPILGHPSQSGGACRLTVWDQAKRLHGSGPPQETSQHAGFMRADLTGLAYTYAQPGYKREKNSTLRLAPMDRTYRDAPERLDPWGVQKGFQGKTGFGSIDRGVRGPPGGPSSCRHRS

SEQ ID NO: 57819 - protein, 422 aa, Zea mays
  Coding DNA Sequence Number=SeqID_14444
MDGKQKGRLRCAYKGTTRYNQKHLHCLRVRNCSATRIYLHNVVPLLRRIASLRTNSHRATPVLAIPSLTKPEVGQPTNPTLTGYPEEFEERAQERHNAAASGRGGFSSGRPRAGRARSDEGSDAAAIGKVSSTRSGREVEMAAAGGVCERQHGSQRWFEGALELGVGVSVTTGTRRVAAVAGGGRAVRLALWTRPLSRRGPLSDQRNGLFGRKLAKNWRPRIPDCGHGACAAISGRVMNNTRLHRMSGPKDVTPPSTVQDSQVSKPDPLDEARTPLSEAKVQYRHVPRLYLVRFHSPLRRRPDAATWTIARDVSQWTEPDVRPLDRAATTFIVEKTRRLSIPLTGDVPPRYLMCPVHSAGKRRPGHPTGGVPVQSIVKQYARAARCTVSIITYTLPGKLPLHADTTQISDVRAQEDCPSNEH

SEQ ID NO: 57820 - protein, 86 aa, Zea mays
  Coding DNA Sequence Number=SeqID_14445
  Homolog annotation: Hit_ID=O48967; Match level="QueryCoverage=84%, HitCoverage=15%, E-value=3e-11, Identity=53%"; Hit description =Putative uncharacterized protein
MVQIVEHRDLVPEDFLMEEETTSSMPQSSNRPATGAAAMHAAQQHTHVQTSRAPSRAAPGALSAARELLRKPPKFHGLAGGHEAVA

SEQ ID NO: 57821 - protein, 163 aa, Zea mays
  Coding DNA Sequence Number=SeqID_14446
  Gene Ontology: Mol. function=transporter activity; Cellular component= integral to membrane; Biological process=transport
  Homolog annotation: Hit_ID=A2YLF4; Match level="QueryCoverage=31%, HitCoverage=7%, E-value=8e-20, Identity=96%"; Hit description =Putative uncharacterized protein
MVYTPPKQQESTRAVRSVYQKQVKFTSFFGPRIKAEIGYPDYVLKEGEGGTIVFGMSSLLIFSPQELDYLICGQQEIWESRIPGAVTWMLGYKIAIVLSKKFKHIMRELQGAILVGSVFQIILGYTGLISLFLRLINPVVVAPTIAAVGLAFLVMVSLRLAAV

SEQ ID NO: 57822 - protein, 212 aa, Zea mays
  Coding DNA Sequence Number=SeqID_14447
MRGKGIAGAAAGKRMRRDECGRDVGCVRGVGCGLDVLDAAERAPQLAVNAYNRKFEVSIVISFPVEYMKWFQTGKPKGYDEARVFQGTLGFVSSTRMDFRKSYYAFRSASTEFIMYGWAVDFIERMGRSLKAFVILNWDWMNPKAIDALLWRGKMGGRRCHANSERSPTDDDRVSRESRIGGPFLFLLLTLYRHAMPCGPSRSDRGSLAPRK

SEQ ID NO: 57823 - protein, 105 aa, Zea mays
  Coding DNA Sequence Number=SeqID_14448
MGSICVLLTLQGRSCVQVQVPVQSRIPLEALGQQLHGVLYALPGGVFSSGYRTSDHRLQGYGRVVTTEARQDIFDHRPAEPAALCLQAGSKNLVQASETIDGGVQ

SEQ ID NO: 57824 - protein, 83 aa, Zea mays
  Coding DNA Sequence Number=SeqID_14449
MDRVPPTPTIHAGAPDPTHQPFLHARALDSAVAAVWAIDRIGQHRPELPQPTPFVRWRILTAIAFCRELDCARGQESVEPNHR

SEQ ID NO: 57825 - protein, 97 aa, Zea mays
  Coding DNA Sequence Number=SeqID_14450
MESWCLEMIKECLGVSSMRLGASFIAPRQLGAVGGNLGRQFLPSVGWRTRQSGAPPDSSQVVADPFALALISPPLALSTKTGSLLALKPHCLTKIVN

SEQ ID NO: 57826 - protein, 148 aa, Zea mays
  Coding DNA Sequence Number=SeqID_14451
MADVHLGTDVGIECAPGMVRQGSKNVGTRCGTNHGGRGARPRGAPVTAVEGNGVAGARLRVARAWVVGGSDGAGCEGRDGVLVPILGRRAQGGRTTRADGLHGARRRLVEGTQARCGSAAAERGCWAWASTLGFGRWVARCGVGHAMG

SEQ ID NO: 57827 - protein, 16 aa, Zea mays
  Coding DNA Sequence Number=SeqID_14452
MATHEVRGSSGVTEGA

SEQ ID NO: 57828 - protein, 42 aa, Zea mays
  Coding DNA Sequence Number=SeqID_14453
MGTNGHLDLDMGGKFIDQKILCFPYVCVQDSKPILRKFTLGP

SEQ ID NO: 57829 - protein, 211 aa, Zea mays
  Coding DNA Sequence Number=SeqID_14454
  Subcellular localization annotation: CTP_CleavageSite=51; ConfidenceScore=5.43e-01
MSSRFLMHRVFPPSKPPDGGYPPSFRLVVGGTQLRGSWYLSAIARLQGFSSASPAVPLRWRSPETVTTSPWVGRSKPGCDLGPTLSFKDVHHPRWGGGRAELELYLPRGFVGRPLLRRSRERALTGPAGGSDFDNAGLVDGGRRQPQRVRLVGLAPGAPSCRKAAAAPCAREDRPRYRALPWRRSCSGAVLPLHRYGAFARRSVPHSSGRI

SEQ ID NO: 57830 - protein, 111 aa, Zea mays
  Coding DNA Sequence Number=SeqID_14455
MEAQAHASCNRRAECFVHAAAPPLAPPPRLLDCGTNTATRGDPAHDPAAPAWRDSQCGQKWADNNAPVFRSSNGSRTCNGRPANHSPRRINSAAGQEAPLAGEASDASPSQ

SEQ ID NO: 57831 - protein, 488 aa, Zea mays
  Coding DNA Sequence Number=SeqID_14456
MTSSPRSRQEEDVLEEVVAQRDLAETSSSVAHPLKENDHAHKRQSIPISKFVTGLSPKSSLVFCISLLFASAYGSDRSDDRMDGCTFASNNAAGGSLPPSRCLPSLPPGGPTFAPGGSLPAPQPPLLVLLSATNSLAQSPATALAKAPPKSSKAMPAASPADASASTPAVVPAPATKAAAPAPATLLSSLRHSPSRRTCSCSASSSPSPSCLCATGGAGRSHREPALHAGVVEPVATHQEHADALAAFQLGQADGALHIFSVLAQGSSGNNFRMAPPLPQLPLFPMVGLGQACAPPQCAALPWRPLPATAGHCRPCPAAPSRRPRRHASSSPRACFATTTVLPSPGLVQPRPFELLPSPVPSTPLARSGAGPCPTGPAPPPIPFIAFVGSVAVAAFPAGSTLLRPFRLDPPSLWLDRVFPAGSVAAAAFPASRGYRLLGAHTGLCSSRNIGTITTLRLRGDFNTSALTFGLYSSLIVCGAPVATAGGC

SEQ ID NO: 57832 - protein, 326 aa, Zea mays
  Coding DNA Sequence Number=SeqID_14457
  Gene Ontology: Mol. function=serine-type endopeptidase activity; Cellular component=chloroplast thylakoid membrane; Biological process=proteolysis
  Homolog annotation: Hit_ID=Q6ASR0; Match level="QueryCoverage=94%, HitCoverage=62%, E-value=2e-72, Identity=60%"; Hit description =Putative DegP2 protease
  Subcellular localization annotation: CTP_CleavageSite=35; ConfidenceScore=5.74e-01
MACVAALFASPALLPFPSTTSSMASCSCRLRPAVVARAPRQQPRGRRALRRFDEVEGVSKKRRGIGGGGGVGAGGSQPSSSRRDRGLSVDFKEPQVAEFDDLEEDKFLNAVVKVKVKRRGDDKKYIAKVLARGVECDLALLSVENEEFWRGTEALHFGRLPCLQETVGDQPLMIKGSALVWHFRYFPLHILAIFPSLRFLSVPSVLSLQYFTIKKSDEAENIGYVIPTTVVSHFLNDYQKNGKYTGFPCLGVLLQKLENPALRESLKVPSSEGVLVRRVEPTAPASSVLRKGDVIVSFDGIAVGCEATVPFRSTERIAFRYLTSQK

SEQ ID NO: 57833 - protein, 108 aa, Zea mays
  Coding DNA Sequence Number=SeqID_14458
  Subcellular localization annotation: CTP_CleavageSite=49; ConfidenceScore=5.29e-01
MKMPSERPASGRGLQASGQQRLTGSTVSACGRAVVLGLRVRLCVWGFGRAAVRGEGSIGGGFPEKKPGGDGPMRHHYVYADPWPPSLGFGTTRGVVPCGRSAYSGLVR

SEQ ID NO: 57834 - protein, 611 aa, Zea mays
  Coding DNA Sequence Number=SeqID_14459
  Gene Ontology: Mol. function=protein kinase activity; Cellular component=nucleus; Biological process=protein amino acid phosphorylation
  Homolog annotation: Hit_ID=A2Y0D6; Match level="QueryCoverage=95%, HitCoverage=98%, E-value=0.0, Identity=72%"; Hit description =Putative uncharacterized protein
  Pfam annotation: Domain name=PPR; Domain location=193-226; Score =22.9; E_value=0.0012; Accession=PF01535.11; Description=PPR repeat
  Pfam annotation: Domain name=PPR; Domain location=293-327; Score =36.7; E_value=8.2e-08; Accession=PF01535.11; Description=PPR repeat
  Pfam annotation: Domain name=PPR; Domain location=394-428; Score =45.9; E_value=1.4e-10; Accession=PF01535.11; Description=PPR repeat
  Pfam annotation: Domain name=PPR; Domain location=429-463; Score =13.8; E_value=0.18; Accession=PF01535.11; Description=PPR repeat
  Pfam annotation: Domain name=PPR; Domain location=531-565; Score =10.4; E_value=0.46; Accession=PF01535.11; Description=PPR repeat
  Pfam annotation: Domain name=PPR; Domain location=58-92; Score=17.0; E_value=0.072; Accession=PF01535.11; Description=PPR repeat
  Pfam module annotation: Pfam domain module=PPR::PPR::PPR::PPR::PPR::PP R; Domain location=193-226::293-327::394-428::429-463::531-565::58-92
MRDVWSPPLSYAHLSGLLARCGRAGDLRLGTSLHAIVAKNPSHFRLCPRRSCLQHVVVVWNSLVAMYGRCGCRGDAVRVFDEMALRDSVSWNSLLSASASATDALALLRRMLSAAPGAAACDHATLTTVLSACARAGGGTGSASLPAVHGLAASCGLDAEVSVGNALITAYFECSSPGSAERVFDGMADRNVITWTAMVSGMARAERYSESLSLFRQMRRAVDANRASYSSSLLACAGSRAAREGQQIHGLAVKAGLETDLHVESELMDMYSKCGLMEDALRVFRSGQDPDEVSLTVILAGFAQNGLEEEAFRLFAEMVGKGIRVDANMVSAVLGAFGASAPFALGKQIHALAIKRCFGGNTYVCNGLINMYSKCGELQESIRVFDGTPSKNTVTWNSIIAAYARHGHGWEVFGLFESMEADGVKPTDVTFLSLLHGCSHVGSPRKGLEILDSMPSKYGIHPKVEHYACVVDMLGRASQLDDAKAFIEDGPFKDSALLWQSLMGACSFHKNSGVGECAAEKLLLLDPDCTAAYVLLSNVYSSEGRWDDRARIMKRMRARGLRKDTGKSWIELEKEVRSFAAGPTRSRPDDVLVQLSAVASDQEDVVESSAL

SEQ ID NO: 57835 - protein, 109 aa, Zea mays
  Coding DNA Sequence Number=SeqID_14460
  Gene Ontology: Mol. function=kinase activity; Cellular component =ornithine carbamoyltransferase complex; Biological process=amino acid metabolic process
  Homolog annotation: Hit_ID=Q6QP54; Match level="QueryCoverage=69%, HitCoverage=26%, E-value=1e-18, Identity=68%"; Hit description =Putative kinase
MEPGGGTAVGAVESLLTSSCFRKGAESRRRHRLESARGRVMMAPPVDVADLRPRLGDVGAPLKPRSSLSSVAEVGSKPQVRARRRSPADARAESEPWGRAKRSSSSSGA

SEQ ID NO: 57836 - protein, 305 aa, Zea mays
  Coding DNA Sequence Number=SeqID_14461
  Subcellular localization annotation: CTP_CleavageSite=94; ConfidenceScore=5.62e-01
MQAACNRAKWARFSDSQHAQHGGPGPRVVQPARRMLRACNNTATRATTVPPRLRSQYRDLRRPSARPSSASLARRTGGASGRRSGRRFAFAIMTASEKAGPPEGFDSRLRSRGPYTHYWSEVRRPAPQKGSTAASGYSGSAPITDQGGNDLVTESHQREASSPQTPSPGDRVRQITRSSPETPCSVPIEGNMALSPLLLAERRRRGARGLLSGTIISGTLKAPNSQLSQSDRRHFAAPLTGLTERQCRLRRSDRGATRQSEADRQSGPVEGTIGSSASPDLGLGLGLSPGRRRTPLRPTQGSDSG

SEQ ID NO: 57837 - protein, 146 aa, Zea mays
  Coding DNA Sequence Number=SeqID_14462
MGKNNKRKREPTPPSEDFGDSEYSEEEFSSEFEGSPAPVSPPASSDDSDDSQGIVEEVWSYIRAIERSGLEGSDESEYSSDEEDSPEEDGEGDDDDDDGGDGSDDGDGGSRGDNSGNRSGSRGGDGGSSKGSNGGGSSKGSNKASG

SEQ ID NO: 57838 - protein, 88 aa, Zea mays
  Coding DNA Sequence Number=SeqID_14463
MKLLYTTTSSASGIGALQSPLALMIEISWKYLPFIASIRLYLIVDFPKMCNIDCYRRLRLLDEGSLSGESMCDMKIQPKGRMVKGAST

SEQ ID NO: 57839 - protein, 104 aa, Zea mays
  Coding DNA Sequence Number=SeqID_14464
MSFPQIKQYPRRKKKGGEASQRRDCSGGRLKSGEDDLGSPVKFCRVRELGKLHKLLAKLTEWLARLGSDRSGLATVAEARVAMAGGRELAGAKRGVWPARVSTG

SEQ ID NO: 57840 - protein, 61 aa, Zea mays
  Coding DNA Sequence Number=SeqID_14465
MAEAGVSGALYAKAMRPGRERGIDGDGTLQDMVDGVTWPTTLPPGWTVDWDAAPAEEEHEE

SEQ ID NO: 57841 - protein, 121 aa, Zea mays
  Coding DNA Sequence Number=SeqID_14466
AGELVGGEESGLSRAQLTNPMGQRASPGIKEDGQLKSGEDDLGSLVKFCRVRELGKLHKLLAKLTERLARLGSDRSGLATVAEARVAMAGGRELAGAKEGRLAGEGEHGVRLVGFADWIKR

SEQ ID NO: 57842 - protein, 387 aa, Zea mays
  Coding DNA Sequence Number=SeqID_14467
  Gene Ontology: Cellular component=exocyst; Biological process=vesicle docking during exocytosis
  Homolog annotation: Hit_ID=A2XCV0; Match level="QueryCoverage=83%, HitCoverage=40%, E-value=1e-142, Identity=79%"; Hit description =Putative uncharacterized protein
  Pfam annotation: Domain name=Sec15; Domain location=29-386; Score= -14.4; E_value=8.4e-09; Accession=PF04091.3; Description=Exocyst complex subunit Sec15-like
MRVESLGKILQSNHMGIILSDFSCSVHEYYDSCAEACVSTLGGVYNFGILLLEMFIVDLYRTCSKIIDMHRLAKTPFIEDSVSYLSYGGLMNIYDVVKAYLDRLLIEVLNDSLLNMIYARSLGMSQMMQLAGNILVLEQACDMYLLHSAQLCGIPKRVAERSHSGLTARAVLKASQNVVYNALINLTNFKVDEFMVLLEEVNWIAEEALDNANDYMNEVLIYLETLVSTAQEILPMEALYKVVSGAMSHISDSIMTTLLNDGVKRFTVNAMLGIDINLKTLEAFADDKFDSTGLSDLGKETTFRDCLVEIRQLTNLLLSSQPENLMNPVIRQRNYGSLDYKKLAIICEKYKDFADSLFGSLSNRNTPQQSARKKSMDVLKRRLKDFS

SEQ ID NO: 57843 - protein, 121 aa, Zea mays
  Coding DNA Sequence Number=SeqID_14468
MGKGKKGRGSPRRSGDKRKRDPSPPSEDFGDSEYLKEVSSKSEGLPVYACNALNLGVVSIATIAQEKMKLWKETTRSSKITTSSRRVLAATPSRLPVKAAFIYVLFSHFDYCKDYVDVSDI

SEQ ID NO: 57844 - protein, 95 aa, Zea mays
  Coding DNA Sequence Number=SeqID_14469
MAITSQCKISLRPGTMFYFGTISSIVDEKGTLQRIADPPEKKLTSKGVAHGKVEQMLQISLELLGHEPTSFLRRPIPPVVLHWPTKEWPSEINRL

SEQ ID NO: 57845 - protein, 70 aa, Zea mays
  Coding DNA Sequence Number=SeqID_14470
MALMTISLGTVGACALRRKNLRTYAWSFCHDVIILDRREEYQVCATFLTAMTKDFAMTAVLPPYEDMVAS

SEQ ID NO: 57846 - protein, 67 aa, Zea mays
  Coding DNA Sequence Number=SeqID_14471
MAELLPGFEPIRTRVSVGCPPLRDIRRQTGASSAGALGVGLCSQGTFRDEVYDIKPRKSLAARAAPP

SEQ ID NO: 57847 - protein, 35 aa, Zea mays
  Coding DNA Sequence Number=SeqID_14472
MGLTWWPTDFGPYKSYPLKNNLVLEISKQKGYTEM

SEQ ID NO: 57848 - protein, 303 aa, Zea mays
  Coding DNA Sequence Number=SeqID_14473
  Subcellular localization annotation: CTP_CleavageSite=9; ConfidenceScore=5.07e-01
MLAPPALPRCSPCSASPSVHGPASRWHAAGAPGALLPLPRLPLAPLLEEDTAVQVSRGSQPSSCWTRRSLDPVPVDIEQSGSVDWDPTIPAPMWNDGIDGSAWPSDNSILARMLRDFGGLARVLFPENRFGGLLGQGVWFLFPAGPSGQKAWEWTMLVIALSFSSGACTFQSATPFRLHRPRRQATKHERQKTKHKRQNSKELAARGLGLLWPAQLRFAAIGWRLRVTAPGGRATSAWAAGGGGLAMAGYGRARWREGRTTGPGHRSQEVSRRVEGGSRQEAALWRLELRLDAGRLPLGHVAR

SEQ ID NO: 57849 - protein, 96 aa, Zea mays
  Coding DNA Sequence Number=SeqID_14474
MARMTPRGSNESEISSNEENSSDSSEGESGGDGDDEGDGTGDDRGGGGGGNGDDDGDKGGSEGSGSKGNGGDGDGGDGGGEGDSGSSKASGKASLI

SEQ ID NO: 57850 - protein, 69 aa, Zea mays
  Coding DNA Sequence Number=SeqID_14475
MPTAQTPREMAPWLKQPRPMLWTILWESGATTMVKEPDLLTAVQQRLSTGLQRQRCGGDRMTIARGPTE

SEQ ID NO: 57851 - protein, 94 aa, Zea mays
  Coding DNA Sequence Number=SeqID_14476
MSETGGFRLSMTVAILAKGSKLILRGATIGGLRLLKVLKNVPAESSCEYTKTWLRRSLTGTAITAKDKTITKLCAEDLRHNGRRGNRLKDEKPD

SEQ ID NO: 57852 - protein, 26 aa, Zea mays
  Coding DNA Sequence Number=SeqID_14477
MRLHTLRDDVVLYPQRCLLLIQGSGK

SEQ ID NO: 57853 - protein, 37 aa, Zea mays
  Coding DNA Sequence Number=SeqID_14478
  Homolog annotation: Hit_ID=Q8W0X3; Match level="QueryCoverage=81%, HitCoverage=2%, E-value=7e-07, Identity=90%"; Hit description =Putative gag protein
MGIKARRSDGSLAFKGVLDDKLYLVDFSKENADLDVA

SEQ ID NO: 57854 - protein, 193 aa, Zea mays
  Coding DNA Sequence Number=SeqID_14479
MGKGTKRKREPTPPSDDFGDSEYSEEEFSSESEGSPAPVSPPASSDDSDDSQGIAAEVWTYIRAVERSGLEGSDESEFSSDEEDSNGGEDEDDDDDDGNGDDGGDGDGDGSNGGGATTTRAVPEAAAVRAAPEAAAAKAAPRAAAAVAAARPVAKRHCVLEATPSGLKVGVGILEVMPSDRIQGQRFRGNAEY

SEQ ID NO: 57855 - protein, 77 aa, Zea mays
  Coding DNA Sequence Number=SeqID_14480
MDGHKDRRSCVLDLYGPESQGSAIIGYGWPRRSLALRDSTDLNNPDDHDSVSRVHILWSSQALEQKPIGLRQRGGAD

SEQ ID NO: 57856 - protein, 199 aa, Zea mays
  Coding DNA Sequence Number=SeqID_14481
  Gene Ontology: Mol. function=translation release factor activity, codon specific; Cellular component=cytoplasm; Biological process =translational termination
  Homolog annotation: Hit_ID=A2Y2P2; Match level="QueryCoverage=69%, HitCoverage=63%, E-value=8e-38, Identity=54%"; Hit description =Putative uncharacterized protein
  Pfam annotation: Domain name=PCRF; Domain location=83-194; Score =24.2; E_value=5.6e-08; Accession=PF03462.9; Description=PCRF domain
MPMRRRRPRRSLAAPPQHFLCRSVASCGLERPCLSPRFYSTAEMSQQLPTNLVEIMEQRMKLIEQRSAYLQEQINQEIEGLKSLVANDREEKDMCEMAAEELLVAVEEEKRLQHELFRSLLPKDEADEKDCILEVRAANVCDHHSMSLSLILLRYRYEKYAQKNGWKFDVIDIMESAVKGYKPKVFSPFLGTNERNQGT

SEQ ID NO: 57857 - protein, 257 aa, Zea mays
  Coding DNA Sequence Number=SeqID_14482
MEVGCEGWGGWEWSNELVVVVRGGGSGEGGGGWGADLAVRRHKPQIEMMSDATEVKNSRTKDAPTSPSSDSRSEKARPKRATGRLCRDAGRARVQGSWHGEGATGSRGAARLLARVRPWSRPGGGRPRRAWAWVRRGAQTVARPQPGRVAGQRAAPGAAAAPGGASGRELGDGRLGRGCCTGPRPVGAAARAERRRARGVGSGGPGGVERQSRERRLGPNVGGAATAALAALGGGEGEPAAGGRRGVVGWGPAAGRD

SEQ ID NO: 57858 - protein, 385 aa, Zea mays
  Coding DNA Sequence Number=SeqID_14483
  Gene Ontology: Mol. function=translation release factor activity, codon specific; Cellular component=cytoplasm; Biological process =translational termination
  Homolog annotation: Hit_ID=A7Q103; Match level="QueryCoverage=87%, HitCoverage=96%, E-value=1e-128, Identity=66%"; Hit description =Chromosome chr7 scaffold_42, whole genome shotgun sequence
  Pfam annotation: Domain name=PCRF; Domain location=88-203; Score =182.1; E_value=1.4e-51; Accession=PF03462.9; Description=PCRF domain
  Pfam annotation: Domain name=RF-1; Domain location=232-347; Score =238.9; E_value=1.1e-68; Accession=PF00472.11; Description=Peptidyl -tRNA hydrolase domain
  Pfam module annotation: Pfam domain module=PCRF::RF-1; Domain location=88-203::232-347
  Subcellular localization annotation: CTP_CleavageSite=46; ConfidenceScore=5.10e-01
MQYHLRRCGGGALAALWRLRHNASSAVASPPVAWRRPCLPPRFYSTAEMSQQLPANLVEIMEQRMKLIEQRSAYLQEQINQEIEGLKSLVANDHEEKDMREMAEEELLVAVEEEKRLQHELFRSLLPKDEADEKDCILEVRAGTGGEEASLFAMDIFRMYEKYAQKNGWKFDVIDIMESAVKGYKEASGTISGPGAFGKLKFESGIHRVQRVPATEKSGRMHTSAVSVAVLPQADEVAVDVQLRNEDLRIDTYRSGGSGGQSVNTTDSAVRITHIPTGTVVAIQDERSQHMNKAKALKVLRARLYELERRRLHMDRSKLRSEQIGSGDRSERIRTYNFPQGRVTDHRVGVTHHSIADVMEGESLDMFVDALLLQEEMDAIASFGA

SEQ ID NO: 57859 - protein, 308 aa, Zea mays
  Coding DNA Sequence Number=SeqID_14484
MEARRASRYRVHGRKSRDQDPRPEVKKKTCGIKVDQGILRQDLLFRCNLLEESVIPLRSGLRVERHPDPVPGQRELSIGIGARPLQCGLSRPEMTISSQEKHFPSDFSREPSNAELRCLSLNHLACNILVDSLSRGAYFAIMSSDSDLFVDAHDLWTKIKLKFFKSICTASAPSIAGSTNLSKGEEQERWTPSDGSTSPTGSSPTSYTCLVANDKSGDESNDEEEYEDEESTSSQGTFSCFASTDNNDRENETDDVEEEEIHHFYTHLNKEDKALLVKLLRRNKKQGETLLRLEETLIKTNDSLEKMT

SEQ ID NO: 57860 - protein, 20 aa, Zea mays
  Coding DNA Sequence Number=SeqID_14485
MATTTSAFTIGVFSNSCVFF

SEQ ID NO: 57861 - protein, 199 aa, Zea mays
  Coding DNA Sequence Number=SeqID_14486
  Gene Ontology: Mol. function=translation release factor activity, codon specific; Cellular component=cytoplasm; Biological process =translational termination
  Homolog annotation: Hit_ID=A2Y2P2; Match level="QueryCoverage=85%, HitCoverage=63%, E-value=2e-68, Identity=77%"; Hit description =Putative uncharacterized protein
  Pfam annotation: Domain name=PCRF; Domain location=74-172; Score =106.1; E_value=1.1e-28; Accession=PF03462.9; Description=PCRF domain
MSQQLPANLVEIMEQRMKLIEQRSAYLQEQINQPAASPEEYLRANKEFRKLESTMELIKDLRSKQEVEIEGLKSLVANDREEKDMREMAAEELLVAVEEEKRLQHELFRSLLPKDEANEKDCILEVRAGTGGEEASLFAMDIFRMYEKYAQKNGWKFDVIDIMESAVEGYKRNRSLAKLIVAPLAHRTVWCLIGQSGEF

SEQ ID NO: 57862 - protein, 603 aa, Zea mays
  Coding DNA Sequence Number=SeqID_14487
  Subcellular localization annotation: CTP_CleavageSite=61; ConfidenceScore=5.35e-01
MEQGIAQDRQGAAQKRQGGPSGLLKPGRRGSGWVRRLRAPAGGKPPLPAKSGAPASSRVPEATAGAGGANSANVVSPSGGVAEVAKAAQALPLSGKRVADFATNISVDDYLVGSDEGQLAIVAPVAATTTAAAVPKAKGGALSAGGEASAFAAVRDEAGAASRRLAEVMEALSQASPREKEVWLTSPTVQRRGPSRRLCLPEVERLRTQHADAVREKSAVDSKCRKLTDKVAVLEKEKADLRRQLAGERRETNDALSKEKAAQAEAKMARAEGNIARERAEQLQERLTALESRMERAEAVARAEAERTRKQLMDTYRELGAWTGEFEVPDREAGLRCLEWVQEELQALPHCCGGVYVVFDQADEDFERDIFKVEDPVVKESAGAIYDRLWGAHGREVVRERAETARAQAARGERVDDFGALNDVLSDSEPAPAEAVPGPVLWPTLETAGDAPGASVAAAAGEGLPPEVAEVAPGASAAAAPSVVEPAAVAVEITAEATAEAPAASGPSQVQDFGPAHTTATTKILAASTAEDGNECGGSASEFLDCANSGSSVEWTEESSEEDLDYFAALDVAAAEASPHVAGAGDVPGPSTGRRRRRAVAKR

SEQ ID NO: 57863 - protein, 84 aa, Zea mays
  Coding DNA Sequence Number=SeqID_14488
MAHEMIKKSEKDSYDSKEATKATEKAAELERRITELSPPLEPFESMANPEVEKEDEVTKVAEAILDEAVNRLLNEAAEAVLKEE

SEQ ID NO: 57864 - protein, 200 aa, Zea mays
  Coding DNA Sequence Number=SeqID_14489
  Pfam annotation: Domain name=zf-CCHC; Domain location=56-73; Score =21.8; E_value=0.00075; Accession=PF00098.14; Description=Zinc knuckle
  Pfam annotation: Domain name=zf-CCHC; Domain location=81-98; Score =15.4; E_value=0.0071; Accession=PF00098.14; Description=Zinc knuckle
  Pfam module annotation: Pfam domain module=zf-CCHC::zf-CCHC; Domain location=56-73::81-98
MAFGRRNDIKLQVYLRLERSSPAHSFGFALSFVPLLVLLHAVVSTQVRSKKKRGKRRCFKCKELGHLIASCPYKDKDEEMRRCFGCNGKDHMITSCPVIKNQGRVPFKMTLTKENDKQQASCRVERRFYYMCGEHGHPPKSQGEKGKMSKKWSNQDLGTSTSRAIGIKVLHLKATKSRSRGAFIFALRESRLLEKAASWI

SEQ ID NO: 57865 - protein, 112 aa, Zea mays
  Coding DNA Sequence Number=SeqID_14490
  Subcellular localization annotation: CTP_CleavageSite=18; ConfidenceScore=5.49e-01
MKLWKETSRSSKTTTSSRCGLAATPSRLPVKAALSTFLFRTLIYWQIPPPPSQLGRSVPLDTVALSKPLPRQSSPYVDRLAFTVKQSRATPGLPRGALIVVNIIGQSEFTIE

SEQ ID NO: 57866 - protein, 574 aa, Zea mays
  Coding DNA Sequence Number=SeqID_14491
  Gene Ontology: Mol. function=ATP binding; Cellular component =intrinsic to membrane; Biological process=apoptosis
  Homolog annotation: Hit_ID=Q7F1U5; Match level="QueryCoverage=82%, HitCoverage=82%, E-value=1e-100, Identity=42%"; Hit description =Putative uncharacterized protein OJ1119_A04.111
  Pfam annotation: Domain name=NB-ARC; Domain location=152-417; Score= -97.3; E_value=0.00046; Accession=PF00931.13; Description=NB-ARC domain
MESFLPAALGELMARHINFIINKCFKPHTMVMEESLQRALLRAQVIDEEAMGRQITNQAMIQQLGMLRDAMHRGYYALDAFRYQPHCGEDCNDPAIRGMLSLSKVPSPKEPYFFSQTAQSRVQLQDALDGLSSMIVDLNESVMFLMSYPRLYRQPYSMHILLANCMFGRHMEAELVVKFLLHTPPHCSRELEVMPIVGPPRVGKSTLVAHVCKDERVCDYFSEILWLCESDFTSDELAGRQGCGMKRHNCMPNLNRGKRLLVVVELCGNLYEDAWNRLYLVSKRSFPSGSKIIVTSHSDTIVKFGTTPALTLKPLSHEAYWYFFKALTFESMDPKKHPTLAQLAMEIARMLHGSFHGAHITSYLLREKFNIHFWFKFMCFLRGFIQKHVSEIGVNPFDLLNQNRPVRHGRMATPSEDLIVCHQYHRSSQEEVPEIRIQDVLYGSTKRHGKFEVLVWRSQIPPYYSYVNVCEIRERKITGTHTHSSYIHFEPIMKCNCYVFISEVSTREAILSIEPHGKGVSKIMDQNPAFASFKVCLYMHDPHEPHLIVVKRILWYLQGTVDYELLLRAPPHMS

SEQ ID NO: 57867 - protein, 145 aa, Zea mays
  Coding DNA Sequence Number=SeqID_14492
MSHHWLDVAGVTVDGDRVVHRGLDAGMRRAKCGSEVAHRLRGEVVKEMGSGVQGLCPVVGRERRLKEEAADHVGSGANVAFDMNVLGRGVGAQETRLNTVGEKEGARDEVVELAAIVTLKGTNRVTELGGDPGEEVCEGGQGVRL

SEQ ID NO: 57868 - protein, 159 aa, Zea mays
  Coding DNA Sequence Number=SeqID_14493
  Homolog annotation: Hit_ID=Q339L0; Match level="QueryCoverage=45%, HitCoverage=80%, E-value=5e-08, Identity=43%"; Hit description =Putative uncharacterized protein
MGKKTQDVHTGSKLGKNTGRQPLGEDVGELQRGRDAENPNATGGDTLVDEVQVDLHVLRSLMLHDIGGEVDRTDFVAIDEGGALEGAVELVEKLTQLGSLDHVLGHIAVVGLSAGVRDNRLALGVPGDEVRAQEHGLTGSGSTRVGAASAVSVGIDHEL

SEQ ID NO: 57869 - protein, 452 aa, Zea mays
  Coding DNA Sequence Number=SeqID_14494
  Gene Ontology: Mol. function=ATP binding; Cellular component =intrinsic to membrane; Biological process=apoptosis
  Homolog annotation: Hit_ID=Q7F1U5; Match level="QueryCoverage=98%, HitCoverage=79%, E-value=1e-95, Identity=42%"; Hit description =Putative uncharacterized protein OJ1119_A04.111
  Pfam annotation: Domain name=NB-ARC; Domain location=117-396; Score= -83.1; E_value=5.7e-05; Accession=PF00931.13; Description=NB-ARC domain
MEESLQRTLLRAQAIDEEAMGRHITNQAMIQQLSMLRDAMHRGSYALDAFRYEPHYGEDDSDQVVSGFMSLSKAPFAKDQYFFSRTAQFREQLQEALDRLGSMIVDLNELVMFLASYPRMHCQPYNMHILLGNCMFGRQMEAELVIKFLLHTQLHSSEELEVLPIVGPPRVGKSTLIAHVCKDERVQDHFSEIVWLNDLDFTDGEHQNQVSNSNKDKRLLVVIELSGNLYEDAWNRFYLASKRSFCSGSKIVLTSSSDRAVKFGTSQALTLNHLSHEAYWYFFKTLAFGSIDPEAHPGLAQVAMEIARTQNRSIPGACIICYLLRNNFNIHFWCKVLRFLRVFVQNHVSKFNKHPYDLLSQNRPIQISRMATPSEYVVIRRQYQCSSQEEVPKIRAQDVVYGSMKTCGKFEVLLWRSPIPPYYSYASTYEIQEPRTTSAKRKRSMKDGVTFC

SEQ ID NO: 57870 - protein, 400 aa, Zea mays
  Coding DNA Sequence Number=SeqID_14495
  Gene Ontology: Mol. function=cysteine-type peptidase activity; Biological process=proteolysis
  Homolog annotation: Hit_ID=Q6Z4S1; Match level="QueryCoverage=90%, HitCoverage=85%, E-value=3e-43, Identity=34%"; Hit description =Putative uncharacterized protein OSJNBa0057M23.130
  Pfam annotation: Domain name=F-box; Domain location=8-58; Score=32.9; E_value=1.2e-06; Accession=PF00646.24; Description=F-box domain
MEADPPLPPASALMVELVEEVLLRFPPADPASLVRAALVCRRWRRIVTGPRFRRRYRDLHLHRGRGGSHPPMLGFLANAGTGTRFVPTSTFRPASARARAAADGLLLLGGWRALDARHGRALLRRDTGRDAPVDCELAVWDPATGRRTDLPRLPWSPYPYSWNAAVLCAATITASACDHLDCCGGGHFLVVVVGTNHAEMFAHVYSSEAGAWNAPASARHPDDNVDFAPSALAGNALYFAFQTGAAALEYDLGTREMAVVRLPPPPRLDWQRAVLATRDDGRLGLATAGKSTIYLWAREAPPRGDGSWVQTRAIELDTLLPVGALSAFVDVVSFVDGVGVVFVRTGDGLFTIDLMSRRVTKVFKDTFFSGIFPYMSFHTPALEVASTGEGPSSACKEILE

SEQ ID NO: 57871 - protein, 62 aa, Zea mays
  Coding DNA Sequence Number=SeqID_14496
MTGANVCAVADLPGGAPRRPDDRRSKKVGLLKTHIQTSSILVRCSMSKECTGLTALRSIEST

SEQ ID NO: 57872 - protein, 246 aa, Zea mays
  Coding DNA Sequence Number=SeqID_14497
MARYVGGGARGSAVPTGVAGRCREGVVACLRTSLEDLLRSSSSCADGGALAVRSQHCCCLLGLQSGPAAVAGFPAVAESGSSVVMCGDGKWAATSNGPGGVCGGARASGYGASQRLLLGMADGSRRVDDPLDGYVWVVWAAVAAEVVALSRVPDRTLCWGFSWAKALATATPMGAASPIEGVGSPALSSVGETLVGACIMKLKLLHLGMWLSNNDVGVNPPFFVGCPPPALASSPVQPLVIALTTS

SEQ ID NO: 57873 - protein, 200 aa, Zea mays
  Coding DNA Sequence Number=SeqID_14498
MGASGQSKGGAEEPGSHRSSGQGKAHACRGDDVRPPDGARMEAGVTQRPGPGWWRTWGGRGGDGGCNGGCGSSREEANYEVIGDNMLTNEVRVDINMLRVLVLDGVDGEVDNTDFVIVDKCTPGEGLVKLLEELERPARLNLPTSDSPISLSTRARDHDLTFGRPGDEVIPRNIAHPKDALTLLENHVIRATLNRIPRKW

SEQ ID NO: 57874 - protein, 422 aa, Zea mays
  Coding DNA Sequence Number=SeqID_14499
  Gene Ontology: Mol. function=ATP binding; Cellular component =intrinsic to membrane; Biological process=apoptosis
  Homolog annotation: Hit_ID=Q7F1U5; Match level="QueryCoverage=97%, HitCoverage=74%, E-value=1e-84, Identity=40%"; Hit description =Putative uncharacterized protein OJ1119_A04.111
  Pfam annotation: Domain name=NB-ARC; Domain location=98-377; Score= -75.0; E_value=1.7e-05; Accession=PF00931.13; Description=NB-ARC domain
MGRHITNQAMIQQLSMLRDAMHRGSYALDAFRYEPHYGEDDSDQVVSGSMSLSKVPFAKDQYFFGRTAQFREQLQEALDRLGSMIVDLNELVMFLASYPRLHCQPYNMHILLGNCMFGRQVEAELVIKFLLHTQLHSSEELEVLPIVGPPRVGKSTLVAHVCKDERVQGHFSEIVWLNDLDFTDGEHQNQVSNSNKDKRLLVVIELSGNLYEDAWNRFYLASKRSFCSGSKIVLTSSSDRAVKFGTSQALTLNHLSHEAYWYFFKTLAFGSIDPEAHPRLAQVAMEIARTQNRSINAAYTICYLMRNNFNIHFWCKVLRFFRVFVQNHVSKFNKHPYDLLNQNRPIQISRMATPSEYVIIRRQYQCSSQEEVPKIRGQDVVYGSMKTCGKFEVLAWRSLIPPYYSSVHTYEIQEPRTTSVGS

SEQ ID NO: 57875 - protein, 326 aa, Zea mays
  Coding DNA Sequence Number=SeqID_14500
  Gene Ontology: Mol. function=cysteine-type peptidase activity; Biological process=proteolysis
  Homolog annotation: Hit_ID=Q2R216; Match level="QueryCoverage=87%, HitCoverage=69%, E-value=3e-27, Identity=34%"; Hit description=F-box domain containing protein
  Pfam annotation: Domain name=F-box; Domain location=8-58; Score=34.7; E_value=3.3e-07; Accession=PF00646.24; Description=F-box domain
MEADPPLPPASALMEELVEEVLLRFPPADPASLVRAALVCRRWRRIVTGPRFRRRYRDLHLHRGRGGSHPPMLGFLANAGAGTRFVPTSTFRLAPARARAPADGLLLGGWRALDARHGRALLRRDTGRDAPVDCELAVWDPATGRRTDLPRLPWSPYPYSWNAAVLCAATITASACDHLDCCGGGGHFLVVVVGTNHAEMFSHVYSSEAGAWNASASASARHPDDNVDFAPSALAGNALYFAFQTGAAALEYDLGTREMAVVRLPPPPRLDWQRAVLATRDDGRLGLATAGKSTIYLWAREAPPRGDGSWVQTNYLLANYKGNEWK

SEQ ID NO: 57876 - protein, 353 aa, Zea mays
  Coding DNA Sequence Number=SeqID_14501
  Gene Ontology: Mol. function=ATP binding; Biological process=apoptosis
  Homolog annotation: Hit_ID=Q8H5J9; Match level="QueryCoverage=98%, HitCoverage=67%, E-value=9e-69, Identity=44%"; Hit description =Fusarium resistance protein I2C-5-like
MESFLSAVLGELISRSINLIINKLSKVNMEESLQRALLRAQVIIEEAMGRHITNQVILLQLGVLRDAMHRGYYALDAFRYQPHYGEDGNPAVRRFVRLSKVPCAKDLYFSGPTVQFQEQLQEALDKLSSMIVDMNELVMFLMSYPRLYRQPYNKHILLGNCMFGRQMEAQLVINFLLHTKPHSSEELDVLPVVGPHRVGKSTLIAHVCKDERVRDYFSEILWLHDSDFTDDELTLRQGCAMKRQFFLSNFKKGKRFLVVIELYGNLCEDARNKFYRSSRQSFLSGSKIIVTSCSDKIVKTLTFGSIDPEMHPRLAQLAMEIARLQIGSINSAHTISYLLRDNFDIHFLCKEDK

SEQ ID NO: 57877 - protein, 105 aa, Zea mays
  Coding DNA Sequence Number=SeqID_14502
MSIDVSETHSVVCMTVFYASLENSEESKGIYKAPFGSLGRAHGTQVPILEDDEDGVDEGDENEDDDNFVLDDLDMDDEEETNNSGGRGDEQDKDDVGLDDLDDGY

SEQ ID NO: 57878 - protein, 493 aa, Zea mays
  Coding DNA Sequence Number=SeqID_14503
  Gene Ontology: Mol. function=ATP binding; Cellular component =intrinsic to membrane; Biological process=apoptosis
  Homolog annotation: Hit_ID=Q7F1U5; Match level="QueryCoverage=98%, HitCoverage=84%, E-value=1e-102, Identity=42%"; Hit description =Putative uncharacterized protein OJ1119_A04.111
  Pfam annotation: Domain name=NB-ARC; Domain location=152-447; Score= -102.1; E_value=0.00093; Accession=PF00931.13; Description=NB-ARC domain
MESFLSAILGELISRSMNFIINKWSKPLTLDMEESIQGALLQAQVIIEEAMGRHITNQAMLLQLGMLRDAMHRGYYTLDAFRYQPHYGEDANDPSARRFLTLSKAPCAKDLYFTRRTVQFQEQLREAHDKLRSMIVDMNQLAMFLMSYPRLYRQPYSMHILLCNCMFGRQMEAQLVISFLLHTKPHSSEELEVLPVVGPLKVGKSTLIAHVCKGERVRDYFSEILWLHDCDFTDDELSFRQGGAMKRQFFLSNFKKGKRLLVVIELYGILCEDRWNRFYRASRRSFLSGSKIIVTSCSDKIVKFGTTPALTLKHLSPEAYWYFFKTLTFGSTDPEMHPRFAQLAMEIARLQIRSINSAYVTSYLLRDNFSIHFWCKVLSFLRGVLQAHISKFGVHPSDLLNKNNLVHLGRMASPSEDLIIYHQYHRSPQEEVPEIRIQDVVYGSIKKQGKFEVLGWRSQIPPYYSYVYVCEIRERKITGAKRKHCVEDGATSS

SEQ ID NO: 57879 - protein, 352 aa, Zea mays
  Coding DNA Sequence Number=SeqID_14504
  Gene Ontology: Mol. function=DNA binding; Cellular component=nucleus; Biological process=regulation of transcription
  Homolog annotation: Hit_ID=A2YHM8; Match level="QueryCoverage=88%, HitCoverage=82%, E-value=1e-66, Identity=53%"; Hit description =Putative uncharacterized protein
  Pfam annotation: Domain name=Myb_DNA-binding; Domain location=247 -298; Score=36.2; E_value=1.2e-07; Accession=PF00249.22; Description =Myb-like DNA-binding domain
MGLDVMEIGMGADLSLDLRHFASKAVRQSKDDTPAPDMDACIRRLEEERGKIEMFKRDLPLCARLLADVIDVMKEEAGKKKTTTRRRSDRRLASAAADDEEEEADGATADKSKWMSTAQLWTGDSGREDAESEKQDKGRCSPEARSRGALLPFKADVGSGAPAFAPLFLRTDDKAAAARVGVPDLSSLLSPPATMPPADAGAEESRRQVVGFAQAAARAAAMAPSAPALGLQSQQQQQQQQQARKARRCWSTELHRKFVAALDQLGGPQVATPKQIRELMKVDGLTNDEVKSHLQKYRLHNRRAPGSGVVYLTERAAKKKEISIRKEPDSTIEQPTKRVAPAPLLFTIINST

SEQ ID NO: 57880 - protein, 558 aa, Zea mays
  Coding DNA Sequence Number=SeqID_14505
  Gene Ontology: Mol. function=ATP binding; Cellular component =intrinsic to membrane; Biological process=apoptosis
  Homolog annotation: Hit_ID=Q8H5J9; Match level="QueryCoverage=79%, HitCoverage=82%, E-value=3e-91, Identity=41%"; Hit description =Fusarium resistance protein I2C-5-like
  Pfam annotation: Domain name=NB-ARC; Domain location=221-512; Score= -73.7; E_value=1.4e-05; Accession=PF00931.13; Description=NB-ARC domain
MAFQRALVVWVLSVMARLRTASEVVLYIHPRTQKSACAHAASVGARWRVGGFQLQGHGDVELDVDGGKGAEDRSRIGSIGDGAHGAGKGKERLSKVNMEESLQRALLRAQVIIEEAMGQHITNQVILLQLGVLRDAMHRGYYTLDAFRYQPHYGEDGNPAVRRFVRLSKVPCAKDLYFFGPTVQFQEQLQEALDKLSSMIVDMNELVMFLMSYPRLYRQPYNKHILLGNCMFGRQMEAQLVINFLLHTKPHSSEELDVLPVVGPHRVGKSTLIAHVCKDERVRDYFSEILWLHDSDFTDDELTLRQGCAMKRQLFLSNFKKGKRFLVVIELYGNLCEDAWNKFYRASRQSFLSGSKIIVTSCSDKIVKFGMAPALTLKHLSPEAYWYFFKTLTFGSTDPEMHPRLAQLAMEIARLQIRSINSAYTTSNLLRDNFSIQFWCKVLSFLRGFIQKHICKFGVHPFELLNKNEPVQLGRMASPSEDFIICHQYHRSPHEEVPEIRLQDVFYGSIKKNGKFEVLVWRSQIPPYYSYVHACEIRERKNTGAKRKRCMKDGTTSS

SEQ ID NO: 57881 - protein, 960 aa, Zea mays
  Coding DNA Sequence Number=SeqID_14506
  Gene Ontology: Mol. function=ATP binding; Cellular component =intrinsic to membrane; Biological process=apoptosis
  Homolog annotation: Hit_ID=A2ZBT0; Match level="QueryCoverage=98%, HitCoverage=99%, E-value=1e-137, Identity=34%"; Hit description =Putative uncharacterized protein
  Pfam annotation: Domain name=NB-ARC; Domain location=620-885; Score= -102.5; E_value=0.00098; Accession=PF00931.13; Description=NB-ARC domain
MEESIQGALLQAQVIIEEAMGRHITNQAMLLQLGMLRDAMHRGYYTLDAFRYQPHYGEGANDPSGRRFLTLSKAPCVKDLYFTSPTVQFQEQLREALDKLRSMIVDMNELVMFLMSYPRLYRQPYSMHILLCNCMFGRQMEAQLVISFLLHTKPHSSEELEVLPVVGPLGVGKSTLIAHVCKYERVRDYLSEILWLHDCDFTDDELTFRQGGAMKRQILLSNLKKGKRLLVVIELYGNLCEDGWNRFYRASRRSFLSGSKIIVTSCSDKIVKFGTTPALTLKHLSPEAYWYFFKTLTFGSTDPEMHPRFAQLVMEIARLQIRSINSAYTTSNLLRDNFSIHFWCKVLSFLRGFIQKHICKFGVHPFELLNKNKPVQLGRMASLSEDFMICHEYRCSPQEGVPEIRMQDVMYGSNKKQGKFEVLGWRSQIPPYYSYVYADSNLGLGFKPVFSFLSFQFNPNLGLLFSFLSLMVMFGALGELMAQHINFIINKCFKPHTMVMEESLQRALLRAQVIDEEAMGRHITNQAMIQQLGMLRDAMHRGYYALDAFRYQPHCGEDCNDPAIRGMLSLSKVPSPKEPYFFSQTAQSRVQLQDALDGLSSMIVDLNESVMFLMSYPRLYRQPYSMHILLANCMFGRHMEAELVVKFLLHTPPHCSRELEVMPIVGPPRVGKSTLVAHVCKDGRVCDYFSEILWLCESDFTSDELAGRQGCGMKRQNCMPNLNRGKRLLVVIELCGNLYEDAWNRLYLVSKRSFPSGSKIIVTSHSDTIVKFGTTPALTLKPLSHEAYWYFFKALTFESMDPKMHPTLAQLAMEIARMLHGSFHGAHITSYLLREKFNIHFWFKFLCFLRGFIQKHVSEIGVNPFDLLNQNRPVQHGRMATPSEDLIVCHQYHRSSQEEVPEIRIQDVLYGSTKRHGKFEVLVWRSQIPPYYSYVNVCEIRERKITGAKRKHPMKDRTTF

SEQ ID NO: 57882 - protein, 137 aa, Zea mays
  Coding DNA Sequence Number=SeqID_14507
MLRLDQNSENTDDGSSLVKILANYEVVGGNMLTNEVKVDINMLRVMVLDGVDGEVDNTDVVVVDKCTPSEGLVKLLEELERPARLNLPTSDSPISLSTGARDHGRLENQEMRLSPRNIAHPKVDQCGSRYPTQSTLV

SEQ ID NO: 57883 - protein, 290 aa, Zea mays
  Coding DNA Sequence Number=SeqID_14508
  Gene Ontology: Mol. function=transferase activity
  Homolog annotation: Hit_ID=A3CBL5; Match level="QueryCoverage=24%, HitCoverage=17%, E-value=3e-23, Identity=73%"; Hit description =Putative uncharacterized protein
  Subcellular localization annotation: CTP_CleavageSite=22; ConfidenceScore=5.20e-01
MCWTETGVTTGDRCEAACARSRAATFGPVRTATCARSRDKTRRRPRAWGRLRPRVTRRPRRGGPGGHGRRWPGAGRPRRPPRRSGQGRRRRLWRASPPGGGGHGRRCPRVWRAPRAAVRGSGDPPVHTFPHHEFAEIPDVSDTAALYGAQELQYRSFCFDPDRLERVRGLTLADGALGRCTTFEALSGLVWRLWRLRRASGAAAARCAGGGTDAGGSADAGGGADVGVRAAARTSTRDVGALCGRRRRTGGGGAVGVRARGCAGVELRRYPSISTSIAIGSSCLWFVLQE

SEQ ID NO: 57884 - protein, 162 aa, Zea mays
  Coding DNA Sequence Number=SeqID_14509
  Subcellular localization annotation: CTP_CleavageSite=39; ConfidenceScore=5.18e-01
MLNCVIANHREHSSVQAIKAGQGRLGPLSRVYSSSIGKRCGARNSPRRERVRNYASECLNTSAEPSSRSQGDVTRHAARAQTLVVCGGGLVRARLLARGRGHWWATEHGGHHHHRLGIKLRGIGHWRCVSATSYKSMWSFTLVTHTSGEDSHTEVASSSYAI

SEQ ID NO: 57885 - protein, 103 aa, Zea mays
  Coding DNA Sequence Number=SeqID_14510
MSGAHRTVRCLLLAVGSATCPAQIAWPTVGPADRWLTGQSGASASASALEEGLRLARPQASASASGGVMSSPDLGLGLRRSLRLARPQAWTDYATGDASLPYS

SEQ ID NO: 57886 - protein, 270 aa, Zea mays
  Coding DNA Sequence Number=SeqID_14511
  Homolog annotation: Hit_ID=Q6J9V9; Match level="QueryCoverage=36%, HitCoverage=34%, E-value=7e-32, Identity=76%"; Hit description =Putative uncharacterized protein
  Subcellular localization annotation: CTP_CleavageSite=25; ConfidenceScore=5.03e-01
MEARAHMSCNRRNGFYVQGNRTATRANAASSRLQNQCCDSRQPAHERKQRSNHLQARTNGREALSHGCKRHLQQEKRALFCLRHDDRVKKGTRKGDILKRILPSEGKGPRALLQIRGSKVAPSGVRQPHQSTRALCPLLIRGSKAGPSEGFDSRPRACRVRDDPGYVRYMVEAWATLPRDRMTPYPDTRASVGKVEASASEEGLRLARPQASASASGGVTSSPDLGLRRSLHLARPQARIDYATWDGSRCFSDSHISPSTGLKALLRQPH

SEQ ID NO: 57887 - protein, 238 aa, Zea mays
  Coding DNA Sequence Number=SeqID_14512
  Gene Ontology: Mol. function=racemase and epimerase activity, acting on carbohydrates and derivatives; Cellular component=integral to membrane; Biological process=carbohydrate metabolic process
  Homolog annotation: Hit_ID=Q304Y2; Match level="QueryCoverage=41%, HitCoverage=22%, E-value=3e-32, Identity=74%"; Hit description=UDP -glucuronic acid 4-epimerase
  Pfam annotation: Domain name=Epimerase; Domain location=1-170; Score=- 33.2; E_value=0.00011; Accession=PF01370.12; Description=NAD dependent epimerasedehydratase family
MAQGHISLSSARCWAATASFVVEGDINDGRLLAKLFDVVPFTHVLHLAARADVRYAMENPAAYVHSNVAGLVSLLEACKDADPQSAVVWASSSSVYGLNDRVPFSGLRGRGHRGRSRAGARSRDPGPPHPPPSRIHHQRRSRRWKVSGAATLMAGSRDRGALMAGSVDCGSRISDRGCIGRAAGAPVRRIDVDGGSASRGWRAAERRWNDYRCNPTETNKALPGRVPPDILSDSLALN

SEQ ID NO: 57888 - protein, 54 aa, Zea mays
  Coding DNA Sequence Number=SeqID_14513
MAYEAKAKGRETKAVHSEHPHRHKFNGCQSSAVTRAFLVPPEPTRTRVDGSLRK

SEQ ID NO: 57889 - protein, 69 aa, Zea mays
  Coding DNA Sequence Number=SeqID_14514
MGKSPPSRTDWCTGARAQPSALGDVPRFEGVVQRLWWGARLCAMENCSSESLRRRKPWAEPYVPRSMLR

SEQ ID NO: 57890 - protein, 167 aa, Zea mays
  Coding DNA Sequence Number=SeqID_14515
MRRESKLGQGEGEGSTSDFIEERERSEGSVFMAAINGIRINGGGNDGIEAPLMKEKRTRASGLHSGAAGTGHGARGLRRGGPWLGVGLQGHRWLCEAGAVLGRVRGRLGSWARAPWAVGAGARARARSAPGGDALGGVRSGWGGLARRAWVALGGPREREQGSGRRG

SEQ ID NO: 57891 - protein, 67 aa, Zea mays
  Coding DNA Sequence Number=SeqID_14516
MTNTEMRKTGEQLTESRRESASRVAWCSRPPSQVMKKPARRGAVAAVRSRDARTGDGAPCLGIPDEI

SEQ ID NO: 57892 - protein, 145 aa, Zea mays
  Coding DNA Sequence Number=SeqID_14517
MSRAFDDYYIEDYGVILAPEPGGDVEEDRQQKKKMVAPKFNGDAAFSLVRRQLESLSVDNMLLRRAVEVLRAEVRSSNSRAARPAASAAGARGLGRVAATAPQTHTQPYHVTKPDHRPRGAAREAAAAPDDVGEELKKALEARLH

SEQ ID NO: 57893 - protein, 118 aa, Zea mays
  Coding DNA Sequence Number=SeqID_14518
MGKVPDPCIYGPDLHGYKPDPWDGSQTPLCGVQATHVRVPGFWDEEFPGLSQGQAGVRSRHVSGPYHVRFCSPLRRRTDAATWPTARDISEWAEPDVRTLNHTSSAFIADKARRLSNW

SEQ ID NO: 57894 - protein, 103 aa, Zea mays
  Coding DNA Sequence Number=SeqID_14519
MARVACTLHGKRLDGGVSMLSLVQRQLHAQQFGGGQQQRSQAEATYQEFLSTQPPLFTKAKDPLDAVVCLRVVDSKFPLLTGVCPDPAKARFVAQQFRGLAKT

SEQ ID NO: 57895 - protein, 72 aa, Zea mays
  Coding DNA Sequence Number=SeqID_14520
MAMMGSTSEKMYLCQSNTRKANTQWEWRDGESSVYPPWQEVRKQQSFAIFALRWCPKKNLNSEAAGGCWPTT

SEQ ID NO: 57896 - protein, 160 aa, Zea mays
  Coding DNA Sequence Number=SeqID_14521
  Subcellular localization annotation: CTP_CleavageSite=27; ConfidenceScore=5.17e-01
MQAACNRAKWAHFSDSQHAQHGGPGPRVMQPACRMLRACDCTATYATAEPPRLRNQYRDSRRPSGPGKGDTPKRILPREGTRLRASLLIRGSKADPSEGFNSRLRARGLHTHYWSGVRRPAPQKGSTAASGYSGSAPTTDQGFEGWPPKGSQPPQTQGEG

SEQ ID NO: 57897 - protein, 168 aa, Zea mays
  Coding DNA Sequence Number=SeqID_14522
MTLYVWHLLREALQVGDEGLGVLHALHIAFERVFVCGADGDDPVGAWHLELQVGSSEPEHLERQGLPSEVGGCSEADGKVELSEGLDALPGVDPMERRSAYPDRGQIDTQEPEGLGVDDVEAAAPVHEDLGEPDVANDGVDDERVFPWARHMVGVVGLVEGDGLVGPV

SEQ ID NO: 57898 - protein, 81 aa, Zea mays
  Coding DNA Sequence Number=SeqID_14523
MEADGNNKEEEDPEEIEPSSSLDTAYSGVLPSPKHPEWVLDGHLFAGIFADGKRTALDVTGDGKRGPVKLITCTATVSHQP

SEQ ID NO: 57899 - protein, 124 aa, Zea mays
  Coding DNA Sequence Number=SeqID_14524
MGGSEVAGDRRERGGNPAAFVRKERIQVYNGGVAECYVSSGGELVAGEILAPSWCDVVAVGGALEPGGGKAVGAVESLLTSSCFRKGAESRRRHRVCGAPSLPIWRSEPDGTPVLFPMARVSLG

SEQ ID NO: 57900 - protein, 93 aa, Zea mays
  Coding DNA Sequence Number=SeqID_14525
MAKVPMIELELKSKKDTPEDALSEQLKKILMGLGSPGVGFGVSRVRDSLLVDLAQYKFAGGMLIAVHHHGLDAVKKQKYMDLSENVSETVNSG

SEQ ID NO: 57901 - protein, 205 aa, Zea mays
  Coding DNA Sequence Number=SeqID_14526
  Subcellular localization annotation: CTP_CleavageSite=41; ConfidenceScore=5.49e-01
MGMEWKRRGASSTWSTRPPSPPSLAMLPPMASPPLRLGATRMSTGGMGGPHERHFEILEKGRALPDSFYHALTEEQSKHVQDYNFDHPRSVYMGVEFCMKFYVVSIVQRVTESNYDAANAGGGTTTTSTSASNISAPLCCDVRFKLAHVRVSKRRADELQIALMEMVKQDIRHQMPSRTHAHDGAGTSHGGEDTPNPPLVPPTLA

SEQ ID NO: 57902 - protein, 59 aa, Zea mays
  Coding DNA Sequence Number=SeqID_14527
MVGCPSGRLRFLIRDCYRRAIVNKLLRGLTTVEESMTEDPGVQQIEVAEQELIEGKLCP

SEQ ID NO: 57903 - protein, 97 aa, Zea mays
  Coding DNA Sequence Number=SeqID_14528
MPPSWGSTGGRLRPCAPPGPREEICGCAVVGCPSGRLRFLIGDCYRRAFVYKLLRGLTTGHMRRHIQLWGRKRCVHWIQDVGMRLDLGIDGSEPLVV

SEQ ID NO: 57904 - protein, 57 aa, Zea mays
  Coding DNA Sequence Number=SeqID_14529
MEQGSARRELRRAQSRQLRAARERSRARREGLGATFYSQREEEFATATIEADLELQR

SEQ ID NO: 57905 - protein, 226 aa, Zea mays
  Coding DNA Sequence Number=SeqID_14530
MAERYQLPRSCVPPTTRRKDGGYPPSGGLEGGKTRRTREREDMVAFQGGHPPFKGGSPYLRPQPSRAESSPTRSKVFPYGAGAGSHTSCKPAQSKEAKSPCATSGRKGGQPCRRHATAPSGHTSPTPNTPGMEAQAHASCNRRAECFVHATQLPLVPQPRLLDCGTNTATRGDPEHDPAAPAWRDGQCGQKWTGSNGGGRRAGAAVTSPAKPTSYPGAARELSLTA

SEQ ID NO: 57906 - protein, 355 aa, Zea mays
  Coding DNA Sequence Number=SeqID_14531
  Gene Ontology: Mol. function=kinase activity; Cellular component =ornithine carbamoyltransferase complex; Biological process=amino acid metabolic process
  Homolog annotation: Hit_ID=Q6QP54; Match level="QueryCoverage=16%, HitCoverage=21%, E-value=1e-23, Identity=93%"; Hit description =Putative kinase
MAPPVDVTGLRPRLGDVEAPPKPRSNLSSVAEVESEPLVRARRRPSAEDRAESEPWGRAKRSSSSSGLSPSPSPGVGRSGVRRLLGQCPSPSPGSGGVEFAVFRGLARVRALGRAERSSPSFWDLARVRALGRAERSSTVLRGLARVRALSRAERSFLWCLRPGLTAYQPHSVKWHRSRSGAGGAVFLSGRSVERRSDGGHFGSVGWGARVRIKLYADGGYQLRIRSLEARVYGRVPSSRAGMLTLSTVRPEPGLREQPPSLCIGREDDQGQTRLFYIRPCVAFPQGGGGKTPCCPRWAPNMVFPVSCRRVIRVDVRAPFVRDWLGAQRHAQKYLRVICRTRSPGDGVRGLDASL

SEQ ID NO: 57907 - protein, 578 aa, Zea mays
  Coding DNA Sequence Number=SeqID_14532
  Gene Ontology: Mol. function=oxidoreductase activity; Biological process=electron transport
  Homolog annotation: Hit_ID=Q6AT30; Match level="QueryCoverage=30%, HitCoverage=22%, E-value=8e-24, Identity=36%"; Hit description =Putative uncharacterized protein OSJNBa0001A14.17
MEELLPASAGSVIEDSLEKEQNDTSEEEGKYLAVSKEGAENEVLQFQLADDEIREDKDNQTEARKGNTANTLQCDLLDSALGLEEKHGDEDASKSQTSNSDRIGFFIPVMSFMGHNGEEGINSTPTKGHISEVDPSEVSGTTSPKLPSNSEEVHVAEEKLDSSTETPASKVGDAESSEVSQSTGHPSTVEDIQVHQVSKHPGPSDEVEPNQLRGSVGDLPEGSASSATTKIHQSGDTETRESIHTRMGLEDTSDRNILQAQLAESALEPAEPEESLAIEEVLVTTSNEADKESAAVIEAVPALCETTGPKEAAATEKAVKEVDNIVKSLDEFTFEEGESKEMQKKQPQDYVSVDIVDNRLLPHLPHGFSQNSEQYKVEQSPQIICEQGSTHPGQYDEDTSLSLTDIHMGVSFQNLLIQRHHLDFYSPINVIFEAYAAKFDSSSGSFAQRNSKLLKETVNMQPEQADYYVVRNHIVVLWCSSPCTNADEYHAIVVAADFGDIVFNQFLDKVCRLRQVVVDVAPHGVEVTLGMALAAFRAARGVAAKHEAKLFLDWHLENLVYAIAASLTDLSMALWGSV

SEQ ID NO: 57908 - protein, 92 aa, Zea mays
  Coding DNA Sequence Number=SeqID_14533
  Homolog annotation: Hit_ID=A2XQ51; Match level="QueryCoverage=76%, HitCoverage=16%, E-value=2e-13, Identity=58%"; Hit description =Putative uncharacterized protein
MESWTLYPQTSAEAASGFSRSADLFADDRVRTLSHQVSTLGDRVWELEHKITQLMGEKAKLEKQLEEAKAISSHKEEVGRSLKAENDKLQSE

SEQ ID NO: 57909 - protein, 126 aa, Zea mays
  Coding DNA Sequence Number=SeqID_14534
  Subcellular localization annotation: CTP_CleavageSite=60; ConfidenceScore=5.34e-01
MGALKRSFLRFSRASSSSGIQVKCSVFLKRRYRGRPFSPSRLKHGAYVVAEHMVHATVIRGSYIAQPEGHVLLHNSLLDLHGTSWMQRPSVVEGSNMVWSRSAAATRLWLTRLRAGGLVASASSSM

SEQ ID NO: 57910 - protein, 147 aa, Zea mays
  Coding DNA Sequence Number=SeqID_14535
  Homolog annotation: Hit_ID=Q2QXR6; Match level="QueryCoverage=53%, HitCoverage=14%, E-value=6e-08, Identity=44%"; Hit description =Leucine Rich Repeat family protein, expressed
MTIPARSGCLLVPGTIFLRGIAAEFSKNWSTDDACAGRWVGGRGLLGGRPPRHLADPAVAGLAQPARPAVPPGHLAELRALDLRENRLNGTLDGVEDAGEVSAANATDDCRRLPFGTASIVSDGVSYEIKDDIYELSEMTSKRNSGM

SEQ ID NO: 57911 - protein, 242 aa, Zea mays
  Coding DNA Sequence Number=SeqID_14536
MKRPWSTLLRRYRARCFDVVDPADSDPRHLPDSTSTTGEVFGKGIPYLLYVYSCHGRPAADLSITLGILQLFGDASGLHNNAQKSNVIPIRCSMEDMVETQAHAHKRSREIERRDLGATNASGRRGGGANLVDIVAHSYSLSFSESSKVVTRSPYAMTRGGDGGGEALRLSNEEQLAPTCPLPPPRALSLGAACSAFSFLCTRRLMKVDGARRASGCCSQFVAVRAMNKGSVSSARRSVSPV

SEQ ID NO: 57912 - protein, 58 aa, Zea mays
  Coding DNA Sequence Number=SeqID_14537
MAYGDRVTTFEDSEKESEYECATMSTREQLQKQPENIGPSPQLPPNDFSPRLPKQGYR

SEQ ID NO: 57913 - protein, 201 aa, Zea mays
  Coding DNA Sequence Number=SeqID_14538
  Gene Ontology: Mol. function=metal ion binding; Cellular component =endoplasmic reticulum lumen; Biological process=auxin mediated signaling pathway
  Homolog annotation: Hit_ID=P33488; Match level="QueryCoverage=95%, HitCoverage=77%, E-value=6e-76, Identity=74%"; Hit description=Auxin- binding protein 4 precursor
  Pfam annotation: Domain name=Auxin_BP; Domain location=4-201; Score =341.1; E_value=1.9e-99; Accession=PF02041.7; Description=Auxin binding protein
  Pfam annotation: Domain name=Cupin_2; Domain location=82-161; Score =41.2; E_value=3.7e-09; Accession=PF07883.2; Description=Cupin domain
  Pfam module annotation: Pfam domain module=Auxin_BP::Cupin_2; Domain location=4-201::82-161
MCTDDILMYPDNSLVRDISRMQQSNYGREGFSHITVTGALAHGTKEIATAQGCLLKYGDLERTQPGSEAVFGVDRVDRVEVWLQTFGPGQRTPIHRHSCEEVFIVLKGKGTLLLGSSSLKYPGQPQEVPVFQNTTFSIPVNDPHQVWNSNEHEDLQVLVIISRPPVKIFIYDDWSMPHTAAKLKFPYFWDEDCLPAPKDEL

SEQ ID NO: 57914 - protein, 198 aa, Zea mays
  Coding DNA Sequence Number=SeqID_14539
  Gene Ontology: Mol. function=microtubule binding; Cellular component =phragmoplast; Biological process=positive regulation of microtubule polymerization
  Homolog annotation: Hit_ID=A2YXF0; Match level="QueryCoverage=61%, HitCoverage=20%, E-value=6e-49, Identity=81%"; Hit description =Putative uncharacterized protein
MAGTLKEQLNSITPALQEMQMRKDARVKQFVEVQTEIHRIASEIAGRLAGGAIAVNEEDLSLKKLEEFQSELRRLKREKSDRLCKVEKYKVLIHNFAKVMGMDPSKILASVHPRLLDGPNEHAAPQAEVVAGGRRRRHLGEPAEHPRDALPGRIAAGARIQDADHLVQPRHVRVEGHAQDVQVAAHAREPPQRHAGRS

SEQ ID NO: 57915 - protein, 113 aa, Zea mays
  Coding DNA Sequence Number=SeqID_14540
PESEPWVGRKRSRRLLGLSLSPSPGSGEAELPMVPEAGPDCLSASLCQVAQQSVRRRRRCPSVRPATFALNAPAIWSVGAAIWSGLLLGEDRASGEPKFCADGGYQLRIRSLE

SEQ ID NO: 57916 - protein, 41 aa, Zea mays
  Coding DNA Sequence Number=SeqID_14541
MDVLMIRYLGEDQQGLGKGQGISLRGEVIRVSRVITNGAVV

SEQ ID NO: 57917 - protein, 205 aa, Zea mays
  Coding DNA Sequence Number=SeqID_14542
  Subcellular localization annotation: CTP_CleavageSite=57; ConfidenceScore=5.77e-01
MPPAPPQGILACNIPKIPTQGGPTPRARASADRSAPPVSDSTPSLSRRSLSLVARARLSAPSSRPCLTGAFAVERLTPCRLAIKACTGLSDHPATVSEPSPHPSPARAVPIAVSSIPAIMASSSALGVPSIPLPLPGAYKRSCPSPVLSTLAPTNSSVSPQANQASAAVLPRHSGHPSPPPIAPDNLTGDLTAVDTRHRAADWPP

SEQ ID NO: 57918 - protein, 446 aa, Zea mays
  Coding DNA Sequence Number=SeqID_14543
MDAATGRLSFASPLKGREPDIKAKESEDASSAELEDGFHHQKLEEEVASRPAREVEPRFTSLSAPARMMKILEAEGGTKIAARLASPHHQTGGHRLGQRGLSLLQHAPRSSPYDTRAGSHASCKLAQGRRSQTAARGTGKGDTPKGILLREGNGPRAPLLIRGSKAGPSEGFNSRLRALGLRAHFWSEVRRPTPQKGSTAASGHSGSAPITDQGFVGWPSKGFDSRLRHRARDDPSGHTFGSPEARSSPRSNLGQIATTTDRIAGAFIAKRRPRCSTAVPLDRVRLTAAKSGLGRHRKLRLARPQGSDSGSAPEDDELRLARHRARTRPGPRKTTNSASPDPGLRLDLGLSRRSPSRPTQGLGLDLDLERQTRPRPRRSLRLALPRARTDHVTGGAIITLPLASSGYGEPDRCPIWLAPRSSDGHDITRTGCQNLSGCHDGMYLGH

SEQ ID NO: 57919 - protein, 146 aa, Zea mays
  Coding DNA Sequence Number=SeqID_14544
MGIVLPPEEDSTASEGHNEHRLSRQEIRVIRHRGDYLLHPEIASGGEARRCREKGDEARRRRRKGGDDDSHGGAEPWRRSSGAGVTCAATIDRADRLRLYPAPLLPAAPPADKDKQKPRGAVFSRSRREHGRAGVQVQGTLVRGAA

SEQ ID NO: 57920 - protein, 222 aa, Zea mays
  Coding DNA Sequence Number=SeqID_14545
  Gene Ontology: Mol. function=DNA-directed DNA polymerase activity; Cellular component=intracellular; Biological process=nucleobase, nucleoside, nucleotide and nucleic acid metabolic process
  Homolog annotation: Hit_ID=A2YRR8; Match level="QueryCoverage=100%, HitCoverage=20%, E-value=2e-38, Identity=43%"; Hit description =Putative uncharacterized protein
MAVRGSSAFKLRFYPNLEVQNIAQEWVKESRRLFYLRTANNVTNNIYKGNTPLWTGMVQNELSEDCRGLNYTYLNNLRERVSSKSIVNRHGNNRELIGHSTINQHVKSVPAPVRVVNDSVKCFSMPRASKVEIPWPAYSPAEDPLLDKSNTEVILELEDKVHDGDDKKKKTVVKKVVSPFPTKAAFSEESLKAREALASIYDKVLVVDDIESARNIVKLLTT

SEQ ID NO: 57921 - protein, 449 aa, Zea mays
  Coding DNA Sequence Number=SeqID_14546
  Gene Ontology: Cellular component=mitochondrion
  Homolog annotation: Hit_ID=A7QLT5; Match level="QueryCoverage=99%, HitCoverage=95%, E-value=5e-39, Identity=39%"; Hit description =Chromosome chr18 scaffold_121, whole genome shotgun sequence
  Pfam annotation: Domain name=DUF292; Domain location=27-126; Score =63.2; E_value=9.1e-16; Accession=PF03398.5; Description=Eukaryotic protein of unknown function, DUF292
MSMLDTFFSKGGGGGFRGAKCKTLLKLSIPRIKLLRNRRELQLRQMRRDIAKLLEAGQEATARIRVEHIIREENMMAAQEILELFCELIAIIELLSIRPPPVDAKLKLLKEIAEEHEVDWDPSETETEFLKPHEDLLNGPTYFNVSTLPLPKEKHEETVVASAAEQPDEDYESDTGLDSLDLPEVPKAAIRPPSDAPLTPDICPHVQGSQSLPHEFSDPGNLEENPTAGGAFNVIQMKSLEHLVYAPSDQSNIPDLPNEKKQFIPFASPPPVLSPSVGKAETVPSPSLSPPVKPTEPEPEILTKKIDEVTTPPVLPSDYIFTKQPEQVRTISPSESGANIDLDDVLSAAQTAAESAERAASAARAAANLAQLRISDLKKNSKVYSNYGDSVQKESHHQTEATQEPVFDHQDSFTNDTQDYVSSHVPQRSSSLEDDPYFSYPNLFSAPKP

SEQ ID NO: 57922 - protein, 195 aa, Zea mays
  Coding DNA Sequence Number=SeqID_14547
MVKNFGSKTVQIAVNAVVTSHLLVCLYSAAGKKAKWQGFYTRRAVTCTRCAVDRKDQTVTLQGGTDTISGNESFLGNELREGVFRTFGFPKLERIFSRFKLVTKNDLAPRKGLLLGPCFVAPKVLREEAASAEIVPRKWPKDRSPSPEDFFGDMTKVTACRRWSNEFTGGYNDPQKEVMKDKPSLSQYVMKNRDI

SEQ ID NO: 57923 - protein, 527 aa, Zea mays
  Coding DNA Sequence Number=SeqID_14548
  Gene Ontology: Mol. function=aspartic-type endopeptidase activity; Biological process=DNA integration
  Homolog annotation: Hit_ID=Q10L75; Match level="QueryCoverage=75%, HitCoverage=18%, E-value=1e-10, Identity=21%"; Hit description =Retrotransposon protein, putative, unclassified
  Pfam annotation: Domain name=zf-CCHC; Domain location=442-459; Score =28.0; E_value=3.4e-05; Accession=PF00098.14; Description=Zinc knuckle
MNTTEAVGKRLHHLASESPDIDAEPDNRIGPLETVDFPKSKWLGLLGTTICTDSFRGHQSGSLHRFGDRNSLRSFGFASLTLNSSGKKVNRQDFYTRQTTAYTRCAVDRRDQIHLRTSPQHGSSSSEEENDEKVAAIARDFSSPPLSPSSTSHLCLMARGERKVQNDIDITDDSDSDSDEEFASPSYDELADLLKEYTQIIRKSKAKCDKLKNENESLNAKYDIVMKVSDEMKEENKTISSTVNELTTSLKDAKDKCDKLNEANRELKDRLVKIKKDYTKIKFDHDNLLVENELLSCNTHEAINPVVKIDVATSCDDLSQGEQTSLHEELTEKVEVLTLDNQKLKRYLTDATTRGKVAIENNDFNNELAVDNERLKNEVKKLKSENEHLATSVQKFSKGQYLQNELLMNTVMKNNKSGIGYNAFVQRKATTQYKPKQTHKPIKCFECGKEGHFAHNCKAKPPTPLPKHSRPFAFNAHYVLRKVANGKVKVTFLGPPSKSRPRQIWVAKSLIERVTGPMQYRALKTQA

SEQ ID NO: 57924 - protein, 150 aa, Zea mays
  Coding DNA Sequence Number=SeqID_14549
  Homolog annotation: Hit_ID=Q7XBD9; Match level="QueryCoverage=28%, HitCoverage=2%, E-value=3e-08, Identity=66%"; Hit description =Putative gag-pol
  Subcellular localization annotation: CTP_CleavageSite=78; ConfidenceScore=5.09e-01
MGLLMGSNGNPVVGMGNPLGTRNPHGYGFGQNFIPVMGMGFLAGVFFLRGYGFGQVIPSGFLPIAISSRVLLANGQARCNRLSQERAQEGCTHVLAVVDKFTKWIEYKPIMLLTVAKAVEFIQKYIQGTKVDVQEHNKKQNISARRDRNT

SEQ ID NO: 57925 - protein, 887 aa, Zea mays
  Coding DNA Sequence Number=SeqID_14550
  Gene Ontology: Mol. function=binding; Biological process=protein folding
  Homolog annotation: Hit_ID=O49385; Match level="QueryCoverage=84%, HitCoverage=93%, E-value=1e-169, Identity=42%"; Hit description =Putative uncharacterized protein F10N7.120
  Pfam annotation: Domain name=PB1; Domain location=285-364; Score =48.2; E_value=2.8e-11; Accession=PF00564.15; Description=PB1 domain
  Pfam annotation: Domain name=TPR_2; Domain location=101-134; Score =10.5; E_value=1.5; Accession=PF07719.8; Description=Tetratricopeptide repeat
  Pfam annotation: Domain name=TPR_2; Domain location=26-59; Score =14.7; E_value=0.34; Accession=PF07719.8; Description=Tetratricopeptid e repeat
  Pfam module annotation: Pfam domain module=PB1::TPR_2::TPR_2; Domain location=285-364::101-134::26-59
MGKPPGARNPAEAEADGDDAVFLELSRELKEEGTRLFNRRDFEGAAFKYDKAVQLLPAGRRVEAAHLRASIAHCYMRMSPAEFHHAIHECNLALEAVPRYSRALLRRAACFEALGRPDLAWGDIRTVLRWEPGNRAARQISDRVRTALEDKGISVALDVLPEDENEIASAKGEERKKSRNKRFDSVAGGREGENGIALLESASTEKQAGPRQTNGTGNHQDHTEDSESNGLEKLEQSTETGEKDMGKKRGAHAAGKKPRCGESKQQKHSAVNHCQDNIGAKEEVMKDVKLVFGEDIRCAQMPANCSLPQLREIVQNKFPSLKAFLIKYKDKEEDLVTITLSEELSWASNLAVSQVPIRFYVVEVNHVQELGVDGVRRRPSFATLERNRDIMLDNGTIGHDVEHKHYADDWMVQFAQIFKNHVGFSSDAYLDLHDLGLRLHYEAMEDTIQREEAQEIFEVAESKFKEMAALALFNCGNVHMSRARRRPCLAEDPLQEFILEKVNVSYDWACTEYAKAGAMFEEAVKTKSDFFEGLIALGQQKFEQAKLSWYYALACKINMETEVLELFNHAEDNMEKGMDMWERMETLRLKGLSKPSKEKVVLEKMVLEGFVKDISADEAFEQASSIRSHINILWGTILYERSVVEFNLGLPSWEESLTVAMEKFKIGGASQADINVIVKNHCANETTQEGTSTIMPKEKQYLRHEFEILGIEFHSNNSNLGLSFKVEEIVQAWSEMHDAKNWRSGPLYFRLQPVRVRRDKLANIARTKWWILKGDTIEVFKKRTIKDGTWKEEVDTNNMWEKIATCIRKVVLELELCGATKGSGDQAKDTLWWNEKVQRAIKENKECYEHLYHDKNVDNIEKYKVAKKTTKFVHLRSFVALTHGKKE

SEQ ID NO: 57926 - protein, 827 aa, Zea mays
  Coding DNA Sequence Number=SeqID_14551
  Gene Ontology: Mol. function=DNA-directed DNA polymerase activity; Cellular component=intracellular; Biological process=nucleobase, nucleoside, nucleotide and nucleic acid metabolic process
  Homolog annotation: Hit_ID=A2YRR8; Match level="QueryCoverage=100%, HitCoverage=73%, E-value=0.0, Identity=74%"; Hit description =Putative uncharacterized protein
  Pfam annotation: Domain name=3_5_exonuc; Domain location=1-195; Score= -31.4; E_value=0.017; Accession=PF01612.11; Description=3'-5' exonuclease
  Pfam annotation: Domain name=DNA_pol_A; Domain location=346-826; Score=-71.3; E_value=3.2e-10; Accession=PF00476.11; Description=DNA polymerase family A
  Pfam module annotation: Pfam domain module=3_5_exonuc::DNA_pol_A; Domain location=1-195::346-826
VANINAKEETPVGHGEVICFSIYSANSDVQAADFGNGKTCIWVDVLDGGRGVLMEFAPFFEDSSIKKVWHNYSFDSHVIENYGIKIAGFHADTMHLARLWDSSRKIDGGYSLEGLTNDRRVMDTVPEDLPKPGKTSMKTIFGRKNIRKDGSEGKVVSVEPVKKLQREDRELWICYSSLDSMSTLRLYDSLKSKLTTRRWILDGCPRGTMYDFYEQYWRPFGALLVKMETEGMLVDRGYLSEIEKAAIAERKLAADKFRKWASKYCPDAKYMNVNSDIQIRQLLFGGIENRHKSGETWPHSKTFKVLNEESVATEGKKTSKYRTIKLCSIVEDLKIDMFTPSGWPTVSGDALRSLAGKIPTEYIYTIDDIQDDDEYTSGSENPDGNSSYGTAYEAFGGGKNGKEACHAIAALCEICSIDSLISNFILPLQGDHISCAEGRIHCSLNINTETGRLSARTPNLQNQPALEKDRYRIRQAFVAAPGNSLIVADYGQAGGDFHSRTAMNMYQHIRDAVQEKKVLLEWHPQPGQEKPPVPLLKGMYNPEPLDWFSKQKIQLRDYTVQWTISKRCLLISCGIGVAEAGYCDGDDQKNPSVGVSQSLECLEASGVWVLGSSFKTRIALFLHGVPEIELPGMVGPAFARAEDAFGAERRKAKMLNFSIAYGKTAVGLSRDWKVSVKEARDTLKLWYRDRKEVLAWQKSQKKLASEKGEVYTLLGRSRHFPYLTQYGPGQRGHIERAAINAPVQGSAADVAMCAMLEIERNVRLKELGWRLLLQVHDEVILEGPSESAEVAKAIVVECMSKPFYGTNILNVDLAVDAKCAKSWYAAK

SEQ ID NO: 57927 - protein, 522 aa, Zea mays
  Coding DNA Sequence Number=SeqID_14552
  Gene Ontology: Mol. function=oxidoreductase activity; Cellular component=epsilon DNA polymerase complex; Biological process =electron transport
  Homolog annotation: Hit_ID=A2XN43; Match level="QueryCoverage=34%, HitCoverage=41%, E-value=2e-58, Identity=53%"; Hit description =Putative uncharacterized protein
  Pfam annotation: Domain name=Rieske; Domain location=216-307; Score =0.9; E_value=0.0018; Accession=PF00355.17; Description=Rieske [2Fe -2S] domain
MEAAALLCASVIFRRPNSSSLSLACEAASWASFAMPIRAYAYTNNHNVVTGSQLHFLKSEVMLIKYLDKLISKWKVMDYQIPSQISTILYESNEGVHHAPAPTVESCNFSRVGPAASRDPSYPTKPVLGFCRRLPSRDGSPLPPAAPSCLAPTAAPGRGRRAIGLREAKHKRRGAPRSEVAAALRRSAVGVLRGDRDAEEQQSSPSGEERFDWLDKWYPLAPVCDLDPHVPHGKTVLGLSIVDWYDRGAGEGRVFDDACLHCLASLSEGRIDDRGRLQTTSCGSTRGLTLEYRDVLQRKRPPLIPEIDDPDFVTVYGIRDLPYGYDILVENLMDPAHAPYAHKGIMRGIRKKEDPGRFSWTLLMSRTVPKFTDTVRRFRDRRYEYKGLNETWKGKLAEAKASGNSMKIQKAQGSKMVLYGNGWCCNIYWCKDYPKCPITCRKIGRPLELDTDGIWCVLPGSFPENFTFKTKAGKKLTISYPCVMLNADVARNNTNDQYQTLKDPVNKTYTTHNYVPWSEYLL

SEQ ID NO: 57928 - protein, 31 aa, Zea mays
  Coding DNA Sequence Number=SeqID_14553
MAHARTQDDQLTNNATIRKDTSMNRPKSTFS

SEQ ID NO: 57929 - protein, 184 aa, Zea mays
  Coding DNA Sequence Number=SeqID_14554
  Homolog annotation: Hit_ID=A2Z762; Match level="QueryCoverage=51%, HitCoverage=12%, E-value=8e-20, Identity=60%"; Hit description =Putative uncharacterized protein
MGLSISYPPDDYLPAVEDDMGRLFIRSLSFDDMEAAADSPSYSPSALPPAFGSRKLIMEGSLGFFERREADSVQMQNVLSIRNPKPPDREACSSVSPGHENLHNSIDEAIMLKVLIKIISRNQNKLCYTYIGYVPLPCAPVVGDRDPVWPQPPQRSTMKNESSSSSSTRPLARSIRSFTPLAAQ

SEQ ID NO: 57930 - protein, 177 aa, Zea mays
  Coding DNA Sequence Number=SeqID_14555
  Gene Ontology: Cellular component=ribosome
  Homolog annotation: Hit_ID=Q5QLQ3; Match level="QueryCoverage=79%, HitCoverage=76%, E-value=4e-26, Identity=47%"; Hit description=60S ribosomal protein L18A-like
  Subcellular localization annotation: CTP_CleavageSite=39; ConfidenceScore=5.02e-01
MGGQMPDADGKARSADSSSSYGYPPSAPPQHQYGTFGPPSGASGEFPQPAVGFPQPAAPPGMQHYPQPPPASYAVYPPPQQPYSAAAPYYAQGYQIAQGYIPVVEGRPVRIRPLPCCGLGMGWFLFIIGFFFAAIPWYLGAFVLICVRVRDYREKPGYVACTIASQLLSLNYTIAFQ

SEQ ID NO: 57931 - protein, 378 aa, Zea mays
  Coding DNA Sequence Number=SeqID_14556
  Gene Ontology: Mol. function=triacylglycerol lipase activity; Biological process=lipid metabolic process
  Homolog annotation: Hit_ID=Q8RZ95; Match level="QueryCoverage=98%, HitCoverage=99%, E-value=1e-134, Identity=64%"; Hit description =Lipase class 3-like
MANALPGQKTGEVTATQNPFEFHVYGPRHLSSPSWWDLLRSSWKDPSYRRMVIACFIQGVYLLELDRQDKRDERTALAPQWWRHFMYRLSQTLVDERDGSIYGAVLEWDRRALLAGYAPFRPAGAPAAVVALRGTLLSGATFRRDVVDDLRFLAWDSLKGSVRFAGALAALRSAARRHGTGNVCVGGHSLGAGFALQVGKALAKEGVFVECHVFNPPSVSLATSLRGFAETAGEMWGYVRAWLPYVGSAAAADAGGEAKEVSLGRAGTAKWLPHLYINTNDYICCYYTDTAAGTATVTARGGSGGSKVAGGDGGIGKPGLARMLTVSKGPTKFLDAHGLQQWWADDVELQVALNHSKLIDRQLRSLYAAQPASPQVNQ

SEQ ID NO: 57932 - protein, 157 aa, Zea mays
  Coding DNA Sequence Number=SeqID_14557
MTGADNAGAAGGCAGQERWQRRGQVGAFWVWTPTGWGSVGGMGSSKAGCQWKETLRLEGRRNVGGERRARDRGETERGHGRYGGRGTVPLLRIGGDLGRNLGERRGLLTLTGRGHVFGRDLRERRGLLTLTGRGHVLQPQREQAGAWWTPSLRSQLQ

SEQ ID NO: 57933 - protein, 344 aa, Zea mays
  Coding DNA Sequence Number=SeqID_14558
  Homolog annotation: Hit_ID=Q6J9V9; Match level="QueryCoverage=33%, HitCoverage=31%, E-value=2e-13, Identity=47%"; Hit description =Putative uncharacterized protein
MGPQILVGVNPQKSFANRREDGCLRDGVEVEIVQLHPVEMQNRPHETACWHSKPPLMERDETQHIPRRRGRGGSARRSHPLRLWVTGEGTKQAIGNKGLQIVHRDGGERPRVARRNDGTGKGDTPKGILPREGSGPRALLLIRGSKVGPSEGFDSRLRALGLRAHYWSDVRRLAPRKGSTAASGHSGSAPTTDQGFKGWSPEGFDNRLRTRRARDDSGYVRYMAEARATLPRGSGAALANPPPAKPLTASTYQPENSEPDHAPGLRPVKAPSTPRTRSRLARAQPRAGTVDPVGFTPRPRASSSNGRTFDLPEAQLGQASRRSNLGQIASPTDRIAGAFNARIA

SEQ ID NO: 57934 - protein, 650 aa, Zea mays
  Coding DNA Sequence Number=SeqID_14559
  Gene Ontology: Mol. function=protein binding; Cellular component =cytoplasm; Biological process=intracellular protein transport
  Homolog annotation: Hit_ID=Q8RZ91; Match level="QueryCoverage=97%, HitCoverage=75%, E-value=0.0, Identity=68%"; Hit description =Vacuolar protein sorting-associated protein VPS16-like
  Pfam annotation: Domain name=Vps16_N; Domain location=7-442; Score =142.9; E_value=8.7e-40; Accession=PF04841.4; Description=Vps16, N -terminal region
MSSSVSIAAEWDLLSDRFYRRLTLYSPLPWSTPAAAGATSSSSGVSGAVIGRLDLSTHIVAAAPFGGPIAAVRDDSKIVQLHSEPSRRRVLLFSSSGHPIASAPWPPLLPRLHSLGFSSSLSLLALLSDGSLLRFRLPDLQPSPCSSPVPLLPPASGGVADALFWGGGVAILTEDNRVVVATDIEVDDPHPRHLADPGIGDEEHVLCMAVVEAQFVMSGSPEVLLAVGDRVIAVDEDGVQVLGEELEIGPVQKMAVSPNGKLLAAFAHDGRLLVIPTDFSRIIFEYECESALPPEQIAWCGLDSVLVYWPEVLLMVGPNGDPVQYNYDEPIKLIPECDGVRILSNSSMEFLHRVSDSTTSIFGIGSMSPAALLYDARDHYDRQSAKAYDNYQLISSSLPEAIEACIDAAGHEFDVSRQRTLLRAATYGLAFCSRFPHERFQEMCKMLRVLNAVRDPEIGMPLTIHQYKLLTTSVLIGRLINANQHLLALRISEYLNLNPIPLLLSIDEQDKALSKAIESGDTDLVYLVLFHIWQKVAVEKKAPLDFFGVINARPVARDLFMAYARHSKHEELKDFFLSTGRLQESWELEKNPMASKGSPLHGPQVRLIEQAHRLFAETKEHVFESKASEEHAKLLRYLMLYYDYDAKFVM

SEQ ID NO: 57935 - protein, 137 aa, Zea mays
  Coding DNA Sequence Number=SeqID_14560
MVKNFGSETVQIAMNAVVGRRSGGNCYTRRAVTHTRCAVDRKDQTVTLQGGTDTCSEVGSFLRNELREGVFWTFGFPKLKRLFSRVKLVTKNDLAPRKGLLLGSCFGAPKVSHEEAASAEVVSKRWPKVPFHGASAF

SEQ ID NO: 57936 - protein, 91 aa, Zea mays
  Coding DNA Sequence Number=SeqID_14561
MGFSELIPAVQMRSQIIMLIRTWRATRENSATTRVEWDALGQVIKKARERLPYPKHSRGEASLQSIGRFSGRTVAMAFRTRDSYASFFQKL

SEQ ID NO: 57937 - protein, 107 aa, Zea mays
  Coding DNA Sequence Number=SeqID_14562
MEREKDQKEEVGVLPESLAQRLPEELEEGQTKLVAAEHRGGGGMGGAEMGAGGGTVEAAAVEVVGMAEVVDGFRATGVDAVGGGVVSLAEGVEGAEERGRDARRRTL

SEQ ID NO: 57938 - protein, 155 aa, Zea mays
  Coding DNA Sequence Number=SeqID_14563
  Subcellular localization annotation: CTP_CleavageSite=74; ConfidenceScore=5.69e-01
MAKGILPAMTSQRRRATARAGSTTGQQVPKSAPRALMKVFRSAAGPLVSEIRLARWTPRNSPRNKEILVTRAILSETQGSSAELGRFYCAAWTGDRGGSDLGGPHASDTGIREDGLPRLTSGPECAEARLRVRRWTASEGWDSGPKSVSRPRRRF

SEQ ID NO: 57939 - protein, 258 aa, Zea mays
  Coding DNA Sequence Number=SeqID_14564
  Subcellular localization annotation: CTP_CleavageSite=52; ConfidenceScore=5.72e-01
MAKGILPAMTSQRRRATTRAGSTTGQQVPKLVPRALMKVFRSAAGPLVSEIRLARRTPRNSPRNMEILVTRAILSETQGSSAELGRFCCAAWTGDRGGSDLGGPHASDTGIREGGLPRLTSGPECAEARLRVGRKPTVPLSPFAGLSSISTDRHDRRVVATAAAGQPITRFAHAERPGHAQLSTSYRVVLFKTGSWRLFRREHRQPLVPSSGRKIESRREGNSEVGGTQAFVLRPTSSAWPKKGGGGRAALNSPPTLL

SEQ ID NO: 57940 - protein, 281 aa, Zea mays
  Coding DNA Sequence Number=SeqID_14565
  Subcellular localization annotation: CTP_CleavageSite=45; ConfidenceScore=5.34e-01
MVAFQGGHPPFKGDSPYLRPQPSWAESSPTRSKVLPLRRGGWVPRVMQAGPEQKKPNRRAWCMQPPSGYEHSSAFAQTSGRKGGQPCRRHATAPSGGAPPTSNAPSAGAHAHASRNRRAGRYVQATAPPLAPLPRLLDCGNGTATRGNPAYDPAVPARRDGQYGQKWAGSNGGGRRSKRRFAFAITTASKKGPGKGDTPKRILPREGNRLRASLLIRGSKAGPSEGFNSRLRARGLHTHYWSEVLRPAPQKGSTAGSGHSGSAPTTDQGFEGWPSKGSQPP

SEQ ID NO: 57941 - protein, 345 aa, Zea mays
  Coding DNA Sequence Number=SeqID_14566
  Gene Ontology: Mol. function=calcium ion binding
  Homolog annotation: Hit_ID=A7QNL9; Match level="QueryCoverage=70%, HitCoverage=67%, E-value=4e-62, Identity=47%"; Hit description =Chromosome undetermined scaffold_133, whole genome shotgun sequence
  Pfam annotation: Domain name=efhand; Domain location=221-249; Score =6.9; E_value=3.4; Accession=PF00036.23; Description=EF hand
  Pfam annotation: Domain name=efhand; Domain location=260-288; Score =19.5; E_value=0.013; Accession=PF00036.23; Description=EF hand
  Pfam module annotation: Pfam domain module=efhand::efhand; Domain location=221-249::260-288
MAPAPAAASAGRKSHVTVLLLYVVCGLILLLLLASYSPRLQPHAHGRSLHRRLKLHPKSSLPSDASSGGNGGQQKTQHQNHHAASFDPTIAELERRLDDKEWEREHYSLLHGGEPDDHMKEWEEFLKEEEDFINDDDRFNIADRIRALFPKIDVAPQDGFVSLDELTAWNLQQARADQHHRSAREMELYNKNGDEIVSFEAFNALRQESHGEGNMLGFEWWKEDHFNASDANADGFLDKTEFNDFLNPSDSDNPKIINLLCKQEIRQRDKDGDGKLNFEEYFTGLHDHIHGYDDENADISQIGNITVAKDRFFKLDKDNDGLLEPKPSHVQGPDKFLETRNAKTA

SEQ ID NO: 57942 - protein, 352 aa, Zea mays
  Coding DNA Sequence Number=SeqID_14567
  Gene Ontology: Mol. function=methyltransferase activity; Biological process=metabolic process
  Homolog annotation: Hit_ID=Q8S0I2; Match level="QueryCoverage=84%, HitCoverage=97%, E-value=1e-141, Identity=82%"; Hit description =Methyltransferase-like
  Pfam annotation: Domain name=Methyltransf_11; Domain location=178 -268; Score=27.4; E_value=5.2e-05; Accession=PF08241.3; Description =Methyltransferase domain
  Subcellular localization annotation: CTP_CleavageSite=65; ConfidenceScore=5.12e-01
MALGGLASRYSPTGTAPRPRSSQQEPMATLAPRPHILLGLTRPQPIALRACAAFSRSRHAPVPPRAAQPRRVFLGLGAAFIDQATRMASGGTSSRSFVAGARPRQGVSPVEQILKNVEWPDEFPFKPEDFSRFDESSDTLFYSVPRFVTHIDDQAIQALTEYYSEVLPPSNTPGVAILDMCSSWVSHYPPGYRQEKIVGMGMNEDELKKNSVLTQYVVQDLNVNPKLPFEDNTFDVITNVVSVDYLTKPIDVFKEMRRILKPSGLAIMSFSNRCFWTKAISIWISTGDADHAWIVGAYFHYVGGFEPPQALDISPNPGRTDPIAIKKQIEGKIQEASCLALIAGPIGELMFP

SEQ ID NO: 57943 - protein, 476 aa, Zea mays
  Coding DNA Sequence Number=SeqID_14568
MQAACNHTKGAHPFDSDASSMEAQAHTSCNRRAGYYAREAAPPLAPVPRLLDCGTSAATRGDPAHGPTVPTEHVDHGSVSRGRRRDGRYDQKWAGSNGGGRRAEAAVKSSAGSRPLLGQRERPLPRSEDDAPVFCSSNGSRTHNGSPANHSSRRINFMAGQATPLAGEAGTGKGDTPKGILLREGSGPRAPLLIRGSKAGPSEGFDSRLRALGPRALLLIRAASGHSGSAPTTDQGFVGWPPKGSIAASEHAERGMTLGTSDTWPRLGLRSRGSGAALANPASAKPLTASTYQLENLEPDYAPRLRPEVPPRLTPGLWLNLDAGRRTPPRPTPGLGLSLDLGRRTPRRPTPGLGLSLDLGRRTPPRPTPGLGLSLDLGRRTPPRPTRGLGLSLDLGRQTPPRPTPGLGLNLDLGRRSPPRPTLGPRLDLDLGGASASPNLGLGPTTSQGSIITLPLASLGYGEQDRHPIWLAPLNK

SEQ ID NO: 57944 - protein, 285 aa, Zea mays
  Coding DNA Sequence Number=SeqID_14569
  Subcellular localization annotation: CTP_CleavageSite=52; ConfidenceScore=5.43e-01
MGSARVAFVFAVGGTQLRGSWYLSVIARLQGFSSGIPAASPCRWSPKTVTTSSMVGRSEPGCGLCPALSFKDLHHPCWGGGRAEPELYLPYGSTGHLFFQLLGVETILQLCGGGALQPCRGRRTVAAQLGCNIPSSVLAFVARTGVRTCRCALGRPALAGAVLVDRWTPPSVLTCVAAGESFSADEPVSATRGPTSGSLALMSGSRPLSGDANKSLPAAASVPGPSLPLQRSLASHQEFVVPQALRCGGCSYPRGRNRSSVCNGTWSVGVCSSWLSGPEHLCILA

SEQ ID NO: 57945 - protein, 156 aa, Zea mays
  Coding DNA Sequence Number=SeqID_14570
MRLRPRSANPTEDEENETRRRINPTGAAEVRRTYHDAGRRRNAGGAMGSRRRRDGLAAAGERRVGYNPREVGAASNRSQVTGASGVKCADGFQRKRVVEKRREKRRVWLQLLLLAARSRPEAEPNSRYIGWDWIGSRGWVRLVRKPTRIEWLHFSF

SEQ ID NO: 57946 - protein, 270 aa, Zea mays
  Coding DNA Sequence Number=SeqID_14571
  Gene Ontology: Mol. function=protein serine/threonine kinase activity; Cellular component=integral to membrane; Biological process=recognition or rejection of self pollen
  Homolog annotation: Hit_ID=Q8LJZ0; Match level="QueryCoverage=26%, HitCoverage=8%, E-value=5e-23, Identity=76%"; Hit description =Receptor-like kinase
MRVLVSEATGERVAEGKEGDGALASPFLLPVGLVSLALTRTRILGDEKTGHLKHLEISPKDCRRNLGEGNDNGCVMWKDNIVDVWYIENGQDLYLGLANSETATRNKMGRVAKISVPVMASVLALRPPACTLFGYASLEGMLGHNVEVAIKRLGQGSGQGAQEFRNEVALNAKLQRRNLVRLIGWCIDGDEKLMVYEYLPNRSLDSVIFGCNSNLVYGCKRLQFVEIPCERVISDIRKIVSLKFGIWITREGLSATLVSWDTTTWSRQAF

SEQ ID NO: 57947 - protein, 229 aa, Zea mays
  Coding DNA Sequence Number=SeqID_14572
  Gene Ontology: Mol. function=DNA binding; Cellular component=nucleus; Biological process=regulation of transcription, DNA-dependent
  Homolog annotation: Hit_ID=A4LBC0; Match level="QueryCoverage=97%, HitCoverage=59%, E-value=2e-53, Identity=52%"; Hit description=LFL1
MNELDLNTAALDPDHYATGLRVLLQKELRNSDVSQLGRIVLPKKEAESYLPILMAKDGKSLCMHDLLNSQLWTFKYRYIGSTTKAGCMCLKIPVLITACCILMKVIGAKKAGDEQTATVPQVHEHMHISAALPAPQAFHDYAGPVAAEAGMLAIVPQGDEIFDGILNSLPEIPVANVRYSDFFDPFGDSMDMANPLSSSNNPSVNLATHFHDERIGSCSFPYPKSGPQM

SEQ ID NO: 57948 - protein, 23 aa, Zea mays
  Coding DNA Sequence Number=SeqID_14573
MTREHPFNKGGLHIIKLRQSFRS

SEQ ID NO: 57949 - protein, 45 aa, Zea mays
  Coding DNA Sequence Number=SeqID_14574
MAKMEVEVEEAMVEVKAIVVEVRGVEVPNVQHKPIKRLKVRVQKK

SEQ ID NO: 57950 - protein, 158 aa, Zea mays
  Coding DNA Sequence Number=SeqID_14575
MVEARSQKPECRNWVSPIVEEPGGEPTVVLFPKADGDVELLGEKPSGAPVVVDFDERQEGLAGGPAQVAGPMSGTPGVRGSPAGPLVDPIEFGVGATGGRPGLLVVPAVKKGDNSNGTETVLGMSSKKSKTALVGGEGSSKKGKEVSSKTTWREMMMR

SEQ ID NO: 57951 - protein, 90 aa, Zea mays
  Coding DNA Sequence Number=SeqID_14576
MATRSDEVEVDLDMLHALVLDGVGGEVGVILVFCPMYQIKIASCQPRFEAQSSHISEFLKEENLVTIILRPIHARKPPITPFRFHEMYRN

SEQ ID NO: 57952 - protein, 691 aa, Zea mays
  Coding DNA Sequence Number=SeqID_14577
  Gene Ontology: Mol. function=nucleotide binding; Cellular component =myosin complex; Biological process=signal transduction
  Homolog annotation: Hit_ID=Q9XEI4; Match level="QueryCoverage=67%, HitCoverage=30%, E-value=0.0, Identity=79%"; Hit description =Unconventional myosin heavy chain
  Pfam annotation: Domain name=Myosin_head; Domain location=15-561; Score=535.8; E_value=4.9e-158; Accession=PF00063.12; Description =Myosin head (motor domain)
MMILLKPLLLDLCTCLLTFVHQSAKADSLETGERLAIPNEERILSAVQHLFLIANQRKNLHLGEAQVFHNLFHGSKFDKSGKISGAAIRTYLLERSRVCQINSPERNYHCFYFLCAAPSEDLKKYKLGDPSSFHYLNQSACIQVDGINDAEEYLATRNAMDTVGITDQEQEAIFRVVAAVLHLGNINFAKGREVDSSIIKDDKSRFHLKTAGELLMCDCEKLENALIKREINTPEGVITTTVGPNSATISRDGLAKQIYSRLFEWLVNRINASIGQDPDSNKLIGVLDIYGFESFKTNSFEQLCINFTNEKLQQHFNQNVFKMEQEEYTREQINWSYIEFVDNQDVLDLIEKKPGGIIALLDEACMFPKSTHETLSQKLYEKFKTHKRFTKPKLSRTAFTIQHYAGDVTYQSDQFLDKNKDYVVAEHQELLNGSKCSFVSGLFPPATEENTKSSKSSIATRFKMQLHELMETLSSTEPHYIRCIKPNSVLKPGIFENTNVLQQLRCSGVLEAIRISCAGYPTRKQFHDFLHRFCVLAPEILKENLMSKDFGQNGTTGLSATTYVETGLKLQEQREWKSLGEGVNKMRGRQDVEDTNIPDRPTLTYDVKIILNMFCALVLDQMSVLLVSGLELVKELTEPIRLNHAISDDAVLSHGTGRETMSWRLEDQEMRLSPRMTTQLKVDERVSGHLA

SEQ ID NO: 57953 - protein, 210 aa, Zea mays
  Coding DNA Sequence Number=SeqID_14578
MRPVAHALAAAVAADALGKGKPSSESTGRVGPVPEAAVVVCMAAVAGGGRDAMEHREQRTRPKKARAGPTAACAVGGPDDSGGAEGGGRDQRGTRSVGPGPLQRGREGNYIGRAPNPNSYANRWIKAAFQPGRRSAILPMREIISALVIFRTESGNPRSPDSPLTSTMVEDDLRSLQRILHHAGQTKVSQYFQKKGPRNRVKSLAYVKFD

SEQ ID NO: 57954 - protein, 21 aa, Zea mays
  Coding DNA Sequence Number=SeqID_14579
MAAGKEPTTTCSRLTATGYQI

SEQ ID NO: 57955 - protein, 20 aa, Zea mays
  Coding DNA Sequence Number=SeqID_14580
MVNSKSLTAKIDNVVVSIGR

SEQ ID NO: 57956 - protein, 317 aa, Zea mays
  Coding DNA Sequence Number=SeqID_14581
MALGLPSPEKSQQKSGSSSSSEPEGPYEGDAQQVLRERAGVVRPLGVGMLRVNGARLCLRREVDARRVPRWGAVDSLDSRRGAASCLALVAPPPPPSAGEATGQTQMLLFRHVGKTSSIPPPAGGLSAAIVAVARRGKEYHVVAVVEGHELKTPETEHRPGMKSLLFVNTQQAPTWRTNCRRFDPGGSLDRRVNCRRVPQPRWVGARRSAKGGKPEGDRRKRGNLRPSCLSCAQVGSSPSPGSGEAETVVFQGRGRVRALGSGEAEFVVFRGRTRVRALGSGEAATFALNAPAIWSVGVAIWLRLLLGEDWASGEPK

SEQ ID NO: 57957 - protein, 46 aa, Zea mays
  Coding DNA Sequence Number=SeqID_14582
MAMMGSTSERMYLCQVRKRQIFAAFVQRWCPKKKIKTKAAGGRVLR

SEQ ID NO: 57958 - protein, 118 aa, Zea mays
  Coding DNA Sequence Number=SeqID_14583
MVNSAEQAVGDWHSSTRRSLLFAHLVALAVEAAMDERRKSAAGLEAFAEPEPPTSSSLSSEDTDDVILAARRSTAATRDAARSEDTDDVLQREGVVWVGQRLRDGGLRREHPAHLSSQ

SEQ ID NO: 57959 - protein, 95 aa, Zea mays
  Coding DNA Sequence Number=SeqID_14584
  Gene Ontology: Mol. function=protein serine/threonine kinase activity; Biological process=protein amino acid phosphorylation
  Homolog annotation: Hit_ID=Q75H77; Match level="QueryCoverage=70%, HitCoverage=18%, E-value=3e-13, Identity=62%"; Hit description =Serine/threonine-protein kinase SAPK10
MSKQYEEPEQPMQSMDEIMQILAEATIPAAGSCGLNQFLNDDLDLDDDMDDLDSDTDLDLESSGEIVVLQQFGSLELVVLEPRSSEKTLCFCITS

SEQ ID NO: 57960 - protein, 60 aa, Zea mays
  Coding DNA Sequence Number=SeqID_14585
MVEAIVKRDEKCCKRIKAAGIDNECPALKLKDAIAMHNTAHCSIGPPVGVGDVGVFGIFQ

SEQ ID NO: 57961 - protein, 116 aa, Zea mays
  Coding DNA Sequence Number=SeqID_14586
  Gene Ontology: Mol. function=transferase activity, transferring glycosyl groups; Cellular component=cytoplasm; Biological process =nucleoside metabolic process
  Homolog annotation: Hit_ID=Q6RYT6; Match level="QueryCoverage=82%, HitCoverage=44%, E-value=3e-33, Identity=76%"; Hit description =Adenine phosphoribosyltransferase
MGEQENNKIGGSGNDNAMAVDEAGAGAAANKGKSLGAADPRLQAISDAIRVVPHFPKPGIMFNDITELLLRPGVFRDAVDMFVERYRGMGIAAVAGKTESGTASHHWFTMQYGLTI

SEQ ID NO: 57962 - protein, 38 aa, Zea mays
  Coding DNA Sequence Number=SeqID_14587
MVRAHRDVGFKAASSHLRMKDFYKLNGKPVYILVESRK

SEQ ID NO: 57963 - protein, 375 aa, Zea mays
  Coding DNA Sequence Number=SeqID_14588
  Gene Ontology: Mol. function=structural molecule activity; Cellular component=protein complex; Biological process=microtubule-based movement
  Homolog annotation: Hit_ID=Q3EA24; Match level="QueryCoverage=37%, HitCoverage=32%, E-value=5e-56, Identity=75%"; Hit description =Uncharacterized protein At4g14960.1
  Pfam annotation: Domain name=Tubulin; Domain location=107-273; Score =143.9; E_value=4.4e-40; Accession=PF00091.16; Description =TubulinFtsZ family, GTPase domain
  Subcellular localization annotation: CTP_CleavageSite=59; ConfidenceScore=5.56e-01
MALSVSSLAVALSHLSLPSTSTPKPHLAPLLRLRSTYCRRRSHRSLRGGPAHGGGDGCRGGGRGGCPVGNRAAKVCEASTAGQEVEADVAFLFSLSDTSVGVAHDAFNTFFSETGSGKHVPRAIFVDLEPTVINEVRTGSYRQLFHPEQLISGKEDAANNFARGHYTVGMVIVDLCMDRVRKLADNCTGLQGFLVFNAVGGGTGSGLGSLLLERLSVDYGRKSKLGFTIYPSPQVAQLFSGLVKAGKQARPEKFEIPAKIKLTLQPWTSSLRGCYLNCCHFFYFAVCWSSFSCLVVLLLLVILALSVSEVEALYKLFKKINNAFIDDGLINKVINGCLLLQANHARRSRRPTTLQARSAAAMQGFPGGAPDPQQL

SEQ ID NO: 57964 - protein, 121 aa, Zea mays
  Coding DNA Sequence Number=SeqID_14589
MAPKRASSKAAPTVDETAKAALLAEKKGKALADTTHQEACEDDALSKRQRNDQPTPEGTLRTCSSGGQPQAPPGFAPLEGEDATEDGEVIGVSAEEQLQLRALRIKNSNLQKQKEILEAKR

SEQ ID NO: 57965 - protein, 110 aa, Zea mays
  Coding DNA Sequence Number=SeqID_14590
  Subcellular localization annotation: CTP_CleavageSite=38; ConfidenceScore=5.03e-01
MAPEGGLGCCQPHPGGWHSSRSGAGGAVFLSGTCVRIRCQMILALNAPAIRSVGEAIWPRLLLCEAFPSWASGESKVRPLLEETLGRDVNPLGSAVLARGWARARRDRVP

SEQ ID NO: 57966 - protein, 200 aa, Zea mays
  Coding DNA Sequence Number=SeqID_14591
  Gene Ontology: Mol. function=voltage-gated anion channel activity; Cellular component=mitochondrial outer membrane; Biological process =anion transport
  Homolog annotation: Hit_ID=Q9SPD7; Match level="QueryCoverage=99%, HitCoverage=72%, E-value=5e-99, Identity=90%"; Hit description =Voltage-dependent anion channel protein 2
  Pfam annotation: Domain name=Porin_3; Domain location=1-193; Score =144.3; E_value=3.4e-40; Accession=PF01459.13; Description=Eukaryotic porin
MVTTTITVHELATPGLKAFLCIPFPYKKSAKAELQYLHHHAGVAASVGLNANPVVKLSGVFGTKTVAVGADVAFDTSSGNLTKYNAGLSYSTSDFVAAATLNNKGDKIAASYYHSVSPTTAVGGELSHSFSTNGNTITFGTQHALDRLTTVKARFNNCGMASALIQHKWRPKSLVTISMEVDTKAIEKSSKIGLSLVLKP

SEQ ID NO: 57967 - protein, 196 aa, Zea mays
  Coding DNA Sequence Number=SeqID_14592
  Gene Ontology: Mol. function=sequence-specific DNA binding; Cellular component=nucleus; Biological process=regulation of transcription, DNA-dependent
  Homolog annotation: Hit_ID=Q20DQ1; Match level="QueryCoverage=70%, HitCoverage=68%, E-value=4e-55, Identity=70%"; Hit description=WRKY transcription factor 7
  Pfam annotation: Domain name=FAR1; Domain location=94-164; Score= -17.5; E_value=0.0047; Accession=PF03101.6; Description=FAR1 family
  Pfam annotation: Domain name=FLYWCH; Domain location=93-161; Score =0.9; E_value=0.058; Accession=PF04500.7; Description=FLYWCH zinc finger domain
  Pfam annotation: Domain name=WRKY; Domain location=104-163; Score =133.5; E_value=6.1e-37; Accession=PF03106.6; Description=WRKY DNA -binding domain
  Pfam module annotation: Pfam domain module=FAR1::FLYWCH::WRKY; Domain location=94-164::93-161::104-163
  Subcellular localization annotation: CTP_CleavageSite=67; ConfidenceScore=5.43e-01
MAAVGARPVLYHHHPHPAPAGGAPAPMSSSYFSRGGGSSSPASSLSAAHLDISEFLFDDASVVVPPDASGGGAISAGGAGSAAAPERPRTDRIAFRTRSEVEVLDDGYKWRKYGKKSVKNSPNPRNYYRCSTEGCNVKKRVERDRDDPGYVVTTYEGTHNHASPSTVYYASQDAASGRFFVAGTQPPGPGPGSLVN

SEQ ID NO: 57968 - protein, 401 aa, Zea mays
  Coding DNA Sequence Number=SeqID_14593
PEASEEWFHSFEVLNALRNASAGLVVPSCELAIARVYGRRPSSRAGMLTLSTVWPEPGLREQPPSLCIGREGDQGQTRLFYIRPYVAFPQGGGGESAMQPSMGTEHGVSGELQAGPTRSEAAVEPFGGPAFEPLISKKARSLVPSRGRIPFGESEKRVHLARLHAACMAARLFRPLVWAKVEVPAPQGGLWSVSEKTQPVTVGAQAGRVAFKRRATPFGRNSVGVGTFQPSFGFKDFHHAARLRPLRRRSPKMAKMEDEASRGAASVGVGCPLLPLASGRERHPPASQRLPPAMPGKAGRRHSARAQHHVLRPDDGCAAHHEGSAHALGGPGKGEDLPACFEASAAGDGFSTDEIANSASSPGSPSPGLNGWLSSSVGESPSAVAPAPKPLLKLLRRSGRG

SEQ ID NO: 57969 - protein, 24 aa, Zea mays
  Coding DNA Sequence Number=SeqID_14594
MAAVQQPNDEGKRSRCRYRTQTPQ

SEQ ID NO: 57970 - protein, 250 aa, Zea mays
  Coding DNA Sequence Number=SeqID_14595
  Gene Ontology: Cellular component=nucleus; Biological process =nucleosome assembly
  Homolog annotation: Hit_ID=Q70Z20; Match level="QueryCoverage=100%, HitCoverage=100%, E-value=7e-55, Identity=60%"; Hit description =Nucleosome assembly protein 1-like protein 2
  Pfam annotation: Domain name=NAP; Domain location=58-192; Score =105.5; E_value=1.6e-28; Accession=PF00956.9; Description=Nucleosome assembly protein (NAP)
MSDGKDSLDLSALGAAIPNSAELSAEDKANLVASIKNTLEGLASRHTDVLESLEPKVRKRVEKLREIQGEHDELEAKFFEERAALEAKYQKLYEPLYSKIQERDEEALKYLKNITWYRISEPKGFKLEFQFDCESFFNFFSPPQVPDDDEEIDEDIAEQLQNEMEQDYDIGSTIRDKIIPHAVSWFTGEAAQDEEFEVMDGEDDDDEDNDDEDEDDEDDDDDDDYDSKKTKGTAGGEGQQGERPAECKQQ

SEQ ID NO: 57971 - protein, 787 aa, Zea mays
  Coding DNA Sequence Number=SeqID_14596
MPSLGGQRVRSPAFALELHGRDPATFVCEAEDGVARIVGRYVPRTEGLWSWDIRGSNVRLNWVFELNCLPYGGYPGEDAAYRRGKKPVDVTEEGPSQEAAPATKKRKLGIAVGVGVSGSFAMDLMGTCAALGGRISSPELRESSARMLEVTGGRWPKNVPIPHASSEDFFTSRMARDLKVFPYGRNIAAVVSAVMERDRQDVAQKRQAVVRIVDPMREAKKARGSTKVAASGGSKPVPAAKPASPGLDKASASTKAAASGRSKPPPGGVVKGRRPLLPARRIANFGTDISVDNYLVGSSEGQLVVVPPPVVTTSPTAMAADFADLVALGALTADVAAEVERLRAQHADAVREKSAAERKNHRLTEKVAAMEAKKTDLQRQLAEERREANKAIADAQAAQAKAKVARAEGSLARQRAEELEARFNALCGRVDKAESSTRAEVERTHAQVVDAYRELGARTADFEVPGQEAGLRLLEWLQEELLVLSTIVTGFMSFASLVTCEGAMNALSREGCRHYEVFDQADENFEREIFKVEDPMVKQSAGALFDRMWGPHDREAVRDRSDRAIEQMAHAEDIEDLVGLDGALPEAAEVGPVPPSDAGEGTSTIPEPTAAGEDPAPAPAPMGEAAPKVVAEPAADPAAEDPTAVVGPSQVLRSGPTHATATDNDIFVAASTVAADDDSFGSVSKCFESDDSGSSIAWTEEFSDEDLDYFAALDVAAAEPSPRAEGSEELPGASTGYRRQRAVVKRRVSELSRSGEGELRNLFEGEELMIMLFNYREMGIIPKVEPV

SEQ ID NO: 57972 - protein, 105 aa, Zea mays
  Coding DNA Sequence Number=SeqID_14597
  Gene Ontology: Mol. function=voltage-gated anion channel activity; Cellular component=mitochondrial outer membrane; Biological process =anion transport
  Homolog annotation: Hit_ID=Q9SPD7; Match level="QueryCoverage=38%, HitCoverage=14%, E-value=3e-14, Identity=92%"; Hit description =Voltage-dependent anion channel protein 2
MAAAGPGLYSDIGKKARGLLYKDYHTDRKFTLTTYAANGAFKARVTMDMKHRVVRAMIAGSMGDGDGAPVHVQDKTESVVVHIGCHAASLQLHLCPNSYMSSSSL

SEQ ID NO: 57973 - protein, 427 aa, Zea mays
  Coding DNA Sequence Number=SeqID_14598
  Homolog annotation: Hit_ID=UPI0000E2386D; Match level="QueryCoverage =25%, HitCoverage=74%, E-value=6e-07, Identity=33%"; Hit description =PREDICTED: similar to opioid growth factor receptor
MSGAPRKGGLRNSPASGINFGCFAKIHRTVRCAPDCPVQQRGNGYFGANGYLRHIKCARCARRGQACPYWRTRQSTVHVRCATGHPGGPRSQNSNGQIPTALVTWLGHRTCPVCTGTVREARSGAKNRHQTLPRVYKDQGETRSTRRPNLPRDSKTQSETTVPRTARTRATAASRTTRPVALTPRRDRRRLRQEKQVTLRLRHNDRVKKGNRPRASLLIRGSKAGPSEGFNSRLRALGFRAHYWSEAGPRRVHSRLRHRARDDPGYVRYIIKAQATLLSAACAAPTAEPLDRVRLTAAKSGLRRHRKLRFARPQGSDSGSAPEDDELRFARPQGSDSGSAPEDDELRFARPQGSDSGSAPEDDELRFARPQGSDSGSAPKDDELRFARPQGSDSGSAPEDEELRFARPQGSDSGSAPEDDELHFARP

SEQ ID NO: 57974 - protein, 279 aa, Zea mays
  Coding DNA Sequence Number=SeqID_14599
  Gene Ontology: Mol. function=protein serine/threonine phosphatase activity; Cellular component=protein serine/threonine phosphatase complex; Biological process=protein amino acid dephosphorylation
  Homolog annotation: Hit_ID=A2Y846; Match level="QueryCoverage=80%, HitCoverage=48%, E-value=2e-45, Identity=45%"; Hit description =Putative uncharacterized protein
  Pfam annotation: Domain name=PP2C; Domain location=49-279; Score =34.5; E_value=6.2e-08; Accession=PF00481.12; Description=Protein phosphatase 2C
MAAAAICVEDEAACAAAECAGIGNLDLAAAGAGAGGKRSVYLMDCAPVWGCASTRGRSTEMEDACAAAPRFADVPVRLLASRRDLDRLGLDADTLRLPAHLFGVFDGHGGAEVASYCRERLQVLLRQELRLLSKDLGETSEADMKEHWDELFTRCFQRLDDEVSGQASRLVGGVQETRPVAAENVGSTAVVAVVCSSHVVVANCGDSRVVLCRGKEPLELSIDHKPDRKDERARIEALGGKVIQWNGYRVSGILAMSRSIGFDCNCLDIGSNPISEALK

SEQ ID NO: 57975 - protein, 78 aa, Zea mays
  Coding DNA Sequence Number=SeqID_14600
MGGEGEGEWGSGHKWPRARWGESHARRGRGEGGREQLGGGYAGTTGLTSRARNAEREKKAGMKWATFVKRSTTTQMES

SEQ ID NO: 57976 - protein, 177 aa, Zea mays
  Coding DNA Sequence Number=SeqID_14601
  Homolog annotation: Hit_ID=Q93FQ9; Match level="QueryCoverage=63%, HitCoverage=52%, E-value=2e-07, Identity=33%"; Hit description=Cell surface mucin-like protein
MALSPLLLAERRRRGENSAACPAPTVVPLARVRPTAAKPSLGRHRKLCLARPQGSAPVSASEDGLCLARPQGSDTTSTPEDGLRLDRPPGSDSTSTSEDGLRLARPQGSDSTSTSEDGLRLARPQGSDSTSTSEDGLRLARHQGSDSASTSEESPPRPTSGSDRPRHRGAHHYPTPS

SEQ ID NO: 57977 - protein, 244 aa, Zea mays
  Coding DNA Sequence Number=SeqID_14602
  Homolog annotation: Hit_ID=Q5ZE20; Match level="QueryCoverage=25%, HitCoverage=51%, E-value=3e-07, Identity=40%"; Hit description =Putative uncharacterized protein P0410E03.6
  Subcellular localization annotation: CTP_CleavageSite=79; ConfidenceScore=5.58e-01
MDRRSMTNTHTSFSFIKSFSAGSMDAHSFQLGKISQAVKAVLPVNTTTYGVSTSLWATNSCSNTQLFQVSLPAAVYKLKSQLVEADFDGDFCGWKKNYMYMKVGFGGFLDLCEKVFFLIQYPGAVLPPAVFVREHNEDGNRGTWCFILVEKSKISSRKVWTWILREFRLYVVLPPNSSRLCSWWSKAAASLEKDLRKGFISLVILVTWELWKHRNDWLTACSMACNLRRKQLSFWWLSRVTCGV

SEQ ID NO: 57978 - protein, 221 aa, Zea mays
  Coding DNA Sequence Number=SeqID_14603
  Gene Ontology: Mol. function=binding; Cellular component=ubiquitin ligase complex; Biological process=protein ubiquitination
  Homolog annotation: Hit_ID=Q6ZIQ0; Match level="QueryCoverage=41%, HitCoverage=25%, E-value=2e-35, Identity=85%"; Hit description=Arm repeat-containing protein-like protein
  Subcellular localization annotation: CTP_CleavageSite=18; ConfidenceScore=5.02e-01
MKLWKETSRSSKTTTSSRCGLAATPSRLPVKVAVIYVSFPHFDLLFHGQPCGDKVHFSRMTAMVQVLEKNNIETITYLFQSDGYGSHAITHWTAFLVSDPLLRVPCAQLLLVQHEEVGLIIPGAQVLVNKKDAATALYALCSGARENRQRAVETGDVRPLLDLMADPESGMVDKAAYVLHSMVTSGRNRAAAVEEGGIPVLVEMVEVGTSRQKEIATLSLL

SEQ ID NO: 57979 - protein, 24 aa, Zea mays
  Coding DNA Sequence Number=SeqID_14604
MACGIKLAGAKGKGLAGEENTDEL

SEQ ID NO: 57980 - protein, 173 aa, Zea mays
  Coding DNA Sequence Number=SeqID_14605
MVEWRGWGVALPSQHMWVSGLVAGARSAGRRKPQRCCLPAYKGVETYSILFARGAHDGGDVKLRLLPVVEASGATEGMASSFSFLLLKPSELVEALHNYDTTTSSSLRTEDIVNLLLLIALVVVAEANIAAGNVAGLGNLYSSRNNPTQLIGLHKSEFEHITDDILKLDGYFA

SEQ ID NO: 57981 - protein, 174 aa, Zea mays
  Coding DNA Sequence Number=SeqID_14606
MLLGALVPFWLLASASPESGGFPDEVLSRRSWPKTFDHGFNDDFIGHYGRLCSQTQEPSDIRLECFLIDVQWLQCNPSAEAFFGGMMKLRNWFNLLPDHAFHIVYSFILRPKVPVNVSNLESMLVAFLRTFGRQRPPTPGSLQDMVDGVTWPSTLPSGWTIEWDAASAGEDQEE

SEQ ID NO: 57982 - protein, 145 aa, Zea mays
  Coding DNA Sequence Number=SeqID_14607
MGKSNKRKREPTPPSEDFSDSEYSEEEFSSEPEGSLASVSPRASSDDSDDSQGIAAEVWTYIRAVERSGLEGSDESEYSSDKEDSLDSSEEGSGGDGGDDDDEGDGDDGDDSGGGGDGGSQGGNGGSSRGSNGGGNSKGSNKASG

SEQ ID NO: 57983 - protein, 101 aa, Zea mays
  Coding DNA Sequence Number=SeqID_14608
MWRRPYVNIHGSTRGRPRSNTLGGWVIVCATHSSWIVSGNTLEGWVAACATHPSRIIPGNTLGCHTRFWKVLTERYSGNSLSPLEYHKINSIIRITVSYHK

SEQ ID NO: 57984 - protein, 62 aa, Zea mays
  Coding DNA Sequence Number=SeqID_14609
MARVACTLRGKRLDGGVSVLSHILESLLLCRVRKRQTFFASALRWYQRKNTRSKATGGKDPP

SEQ ID NO: 57985 - protein, 74 aa, Zea mays
  Coding DNA Sequence Number=SeqID_14610
MTNGQVEHANDMILQGLKPRIYNNLNSPCDATTLEGFGPKTSRWATWCFGYDKTPEGVTSSRLPGKGHSSSPRF

SEQ ID NO: 57986 - protein, 371 aa, Zea mays
  Coding DNA Sequence Number=SeqID_14611
  Subcellular localization annotation: CTP_CleavageSite=41; ConfidenceScore=5.53e-01
MSSHSPHASRPSTFRAPGWGAPALLLSCRRWRNATSRKLIPFSHRTASRIFIRRPGCIPSPVVTQDGDHQFDGGEKQAGLRPLPRPQLQGSSSSLLGRRARRAGALPPARVGGPPLLPAFGGGNRPPALRRRRPPAMPGKANCCCPARVQHSVLCPRFRGEDGSEDLPVRFGAAGARRCGVGGQVDAAVGAEVVAAGESFSADEAISATRGPTSGSLALMSGSRPLSGDANESLLAATSVPGPSLLPQRSLASHPEFVVPQALRCGVGLAARGFSCLVKGTLGRSAMSRSWRQRCRHGQRRSWLEKKLRWPEPGQAVRWRDQRRSRVDEAMSRADVLGGQLAEATERPVEPSAWAGFPEETLAAMAQAWCR

SEQ ID NO: 57987 - protein, 156 aa, Zea mays
  Coding DNA Sequence Number=SeqID_14612
  Subcellular localization annotation: CTP_CleavageSite=72; ConfidenceScore=5.81e-01
MNQLDFSLSSPPCFSLPGIRRPRFQPQGTRHQPAKTQPLPRTSSRRADRAPLRSRPSRRRHPCPEARVPPCSAQAARAQAERVAPLLPLHASHAMRAEWTPCQADRRADRAQDRALPLFKTRLDPNVARARARPCPKSSAPRTAPRVEPRPFLLRE

SEQ ID NO: 57988 - protein, 303 aa, Zea mays
  Coding DNA Sequence Number=SeqID_14613
  Gene Ontology: Mol. function=transposase activity; Biological process= transposition, DNA-mediated
  Homolog annotation: Hit_ID=A3ABR4; Match level="QueryCoverage=51%, HitCoverage=32%, E-value=1e-30, Identity=42%"; Hit description =Putative uncharacterized protein
MDNLDAEENLAAALKYRSTLRRGLDFNAFLEDEESAAISPTPTPATDGELAGTGGLGTTTGVRRGGHDVASVGRGRGQNYPRSSIDVVEDERRAGRGLATASVGMVSAGRGLTTANLGMARAGRGVATQDEAMDRVAGWNSALKTVDAPEDYWNRVTKGNSHWKKLKKGPPDHEELLQQLFAGVVVDGSGACAPGEELGADDVPANYTPEHADTYMSPPGIHETLKNNCKISEMVMLGQHLDEQIKEVQQIAVRCGAREGSGEHFMATELFKKAENRATFKAFETDEGRLLWLKRHCANAGYI

SEQ ID NO: 57989 - protein, 1081 aa, Zea mays
  Coding DNA Sequence Number=SeqID_14614
  Gene Ontology: Mol. function=protein binding; Cellular component =mitochondrion; Biological process=mismatch repair
  Homolog annotation: Hit_ID=A7PEB8; Match level="QueryCoverage=98%, HitCoverage=99%, E-value=5e-88, Identity=28%"; Hit description =Chromosome chr11 scaffold_13, whole genome shotgun sequence
  Pfam annotation: Domain name=DUF292; Domain location=27-148; Score =221.3; E_value=2.3e-63; Accession=PF03398.5; Description=Eukaryotic protein of unknown function, DUF292
  Subcellular localization annotation: CTP_CleavageSite=44; ConfidenceScore=5.16e-01
MHKSKGKFSGVLHKGFKPDKCKTSLRMAVARIKLLRNRKEVQVRQMRREVAQLLEANQDMTARIRVEHVIREEKFMQAYDLIEVYCELIVARLSIIDSQKTCPIDLKEAVASVIFASMRCSDVTELADVRKHFKSKYGKEFEAAALEVRPDSGVNRLIIEKLSAGAPDVQTKIKTLSSIAEEHNIKWEPKAFEEKLQQPTEGHLYGSATYSGGNTSTMGSSTSSISTPQPTYSGVSAAPVDSATIHVPANKTAYGSANSNTFSKESIHNSSSASVPPISQHGPSAYSSAQVPGSNNISHGNPGGPPYPQYSATVPDAVSRNEDSNQNRERKPLVTGANWNVEFKDATSAAQAAAESAEMASIAARAAAELASRGNYSGDKGTGAYDSAAYSSKNTVRKQRAEHVVKDESFHDQSSGVNDPSEMPSNSRNFFGGTETSHVDSENISTAPYQQFHAYNPDSHPYVYEMPTEPPRAHSPDPRFDDLYERESDIGRSEVDPFDFPRENFQDTASVGHNFKDVEIRTPSYDQESTDDYYGNFNSSHDTLAHGSSTTAWDKQNDKAQDNSSPVVFDQYDSDVEQENLLDTFSSKHTEQLPAPGDHMRFSTADWSEQHTSESPSKQRTSALFSRTETQLSDNLGTNKSDIPSPHSYHNMRPAFDSDGGSSDEEIATTTHAVPLRSHSGGSASSVLNKGGGPDASPIFDYSGAHAVRNLNRVQSRDSDLSEEETDLDKFKGSSFARANEQQLLPSAIRTSATSDDKEDDISLNFGKLTPGLRNKPRQPPPYTKVSRESILPKQSLPKVSAGTEESVDSEENTTFKQDRSSPQSSFSARTSSGKDYDSGLYERNRSVGTHWEAKSTIARNSSGLDDAEKLSDLPTNISLPTTKSSERWNSSKVPYHEKPGIGTRREVRSTLARNYFDSDDSEEELEQQQIPQSKQSGVLIQSRRTREVTSDTKRDGRFQTGAQYGDETESVTSKTQVHQGFNSSSTERSERRDPSVYPRVAVQRSSSKAEQIESPMERGKPQGAEMRSTLFRGNEEDTETSSGTPKESTPKTPPAHVHPKLPTDYDSFAAHFRSLRTNRP

SEQ ID NO: 57990 - protein, 71 aa, Zea mays
  Coding DNA Sequence Number=SeqID_14615
  Homolog annotation: Hit_ID=A2WU97; Match level="QueryCoverage=84%, HitCoverage=10%, E-value=8e-16, Identity=72%"; Hit description =Putative uncharacterized protein
MRTQGEGHVEEATGFEVGIVVPRLSRAAAAGATDNCVARLVRELEGAGLLVERVRGVSAEFIKMKLKGSNS

SEQ ID NO: 57991 - protein, 246 aa, Zea mays
  Coding DNA Sequence Number=SeqID_14616
  Homolog annotation: Hit_ID=Q6J9V9; Match level="QueryCoverage=36%, HitCoverage=33%, E-value=3e-08, Identity=43%"; Hit description =Putative uncharacterized protein
MQAACNRTKGAHPFDSDAPNMGAQAHTSCNRRAGYYVRETAPPLAPVPRLLDCGTSAATRGNPAHGPTVPTEHIGHGSVSRGRRRDGRYGQKWAGTDGSGKQAEAADRRHLWQAKQATLHLRHNDRVKKGTEKGDTPKGILLHEGSGPRALLLIRGSKAGPSEGFDSRLRALGLRALLLIRGSKAGPSKGFDSRLRPLGLRAHHWSEVRRLAPRMGSTVASSHSGSAPTTDQGFVGRPLKGSTAAS

SEQ ID NO: 57992 - protein, 172 aa, Zea mays
  Coding DNA Sequence Number=SeqID_14617
  Subcellular localization annotation: CTP_CleavageSite=31; ConfidenceScore=5.36e-01
MADLLTCSIDTLKLSAFRPRGVPGPTSPSPRSGEAEAPPRSRLSPSSEVEAESEPWGRARRSPSSEVEAESEPWGRARQSPSSEVEAESEPWGQARRRPSSDVEVEPELWGRAGQSFLWRPRLDLAAISLTLSSGTAVGAALAALFSCQVGQWSGEVTAVTSALSTEECALG

SEQ ID NO: 57993 - protein, 932 aa, Zea mays
  Coding DNA Sequence Number=SeqID_14618
MCSHFYSAYPPFEVVEEDADEGALRCAAGLSSGRDLVEEFVAYGVWPLAHGWALGEVCPRQMPSHGGKLVRSPAFALDLQSRDPAAFVREAEDGAVRIVGRYMPRTEGQRSWDIRGSNDHLNRVFELNRLPYNGYPGQDDVDRRGKKPVVESGDDPAPAAAPSSKKRKLCTAMGGLGVSDGFARELMRTCAAPGGRMSSPELRESSAQMLRVTGGWWPRNVHIPRAAGEDFFTSRMVREWKVFPYGQNIAVVVSAVMDKDRQGAAQKRQEVVRLHEARPKRQRGAAKAAALGGGKPPSAVPASSKAPEAAAVVGGSKSAKAVPTSSRVPEVAKAARGLPSPGKRVADFATDISVDDYLGGSDEGQLVIVAPAAATTAAAVVPKAKGGALSAGGEMPALAAVRDEAGAVSRWLKEMKEALSQAADFVDRAASGALTAVVSAEVERLRMQHADAVREKSAADSKCRKLADKVATLEGEKTDLRRQLAEERREANEALAKAQAALAEADLARVEGSLTKERAEQLEERLSALQSRVERAEAATRTEAERTRKQLMDSYHELGARTADFEVPDREPGLRCLEWVQEELQALPTIVEGFMSYASLVTCEGAMNVLSREGCRHYEVFDQADEDFERDIYNVEDPIVKESAGAIYDRMWGPHGREVVRERAETARAQAARGERVDDFGALNSALPDPESNPAEAVSEVALEPGGGPPPETAEGAPDAPVAAAPRVEDPATVAAEATAEATAEAPAMAGSSQVQDFGPAHATATTNFLAASTVDDGNKSDGFVSEFSDFADSGSSVEWTEESSEEDLDYFAALDVAAAEASPHAADTEDVPSASTGRRRRRAVAKRRACMMKLCALAHSAMLAKALCTWSGVFVMLDWCAYSRSWRGQFGVVVFAFVTLRPAVPSGNFCADSLRSRLRFFALVVLVRLHP

SEQ ID NO: 57994 - protein, 186 aa, Zea mays
  Coding DNA Sequence Number=SeqID_14619
MAQEESMGSRVAHAGMTGPCEAQTGTTGPRVALEEASRPHVVQQRRKAGCLWGEGNRIELKEGVEIGGWGGASKGKHIFVEDDVTREGDAVAETTMLSGGGGGDRDERWRHVGGGRPEHVEGPDAVTSGNRGPGGQILHRKTRGVKLNGTRIVDGEPTNKNEIMGDMWGYENVVEIERPRENRGTY

SEQ ID NO: 57995 - protein, 126 aa, Zea mays
  Coding DNA Sequence Number=SeqID_14620
  Subcellular localization annotation: CTP_CleavageSite=90; ConfidenceScore=5.65e-01
MATVTVTAAAGAGAAAAAARSVTTAAAGAATRAAAAGATTRAAAAGAAPGAATAAATGQRRPTGRRRRYFRGNAERLNTNSAFWRRRRVIAGHASHFEDDGRVMRWRTGVPEITDGFPRGMLGFWK

SEQ ID NO: 57996 - protein, 208 aa, Zea mays
  Coding DNA Sequence Number=SeqID_14621
MVTSSLMVGESEPGCSLCPSLSLKDFHHQGWGGDCTVPGSRTRVASEPLAAPTSATAAGRGSSADEIARAAHGPTSNSTAFCPSLPHKFGHGRGPPGSSTRPEVSAAAVRPPGAEVVVVAAAGAGDGAPFVGLLLLRRPSPMEWGSGSSVSGTNAGVDQPRPRVRLAPLEDGWPRPQGSNLAKGVIDAEGAAAPFQRQDPSLQDQIVL

SEQ ID NO: 57997 - protein, 92 aa, Zea mays
  Coding DNA Sequence Number=SeqID_14622
MAATSEEDADGGVVDDGAMLTHVVSEMVGKLGGAHWCRDSDRRGLRSGGPDIEGPHRAAAERSRLFATSQKRSPRHPLRRSGSKALVHPPSG

SEQ ID NO: 57998 - protein, 599 aa, Zea mays
  Coding DNA Sequence Number=SeqID_14623
  Gene Ontology: Mol. function=nucleotidyltransferase activity; Cellular component=intracellular; Biological process=DNA repair
  Homolog annotation: Hit_ID=Q654Y6; Match level="QueryCoverage=83%, HitCoverage=44%, E-value=1e-175, Identity=66%"; Hit description =Putative deoxycytidyl transferase
MQETKSVGAEINWGVRFNDNKDAEHFLNNLCKEVSLRLQGCGVQGRTITLKVKTRREGAGEPIKYMGCGDCETTSRSMTIAGATDSFVTLQRIAKQLFSALHLDVKEVRGIGLSLSKLEHADLGRGASQGHMLESWLASPAAKLKKQQSEILGNVNVAASLGTSGLKDLRSGPSHTAEANLRNDRSTVFHNVELPPLSQLDLEVLKNLPPEIMSEMNEMYKGELQSLVDTLNSDKGKENSSKSLALPAVIRKSVPADAKLQGYRDHRDSMHLEEEHTKGKSDKQLSEAKPANNASCSRVSASIEKTTKSVTQLDLMPDSLSQADLTVLQELPEDVKADLFSALPLHRSGDPACSTSNVSESKSPNVVRAENRSSNDGGTDDLKTPRSFLPPGSSQKWIEQFRVSSCLILNVIAEQHTDSSCQRPLSSVLEPVASFLPLCPNPGSEEWNETHSCLSELLRHYIQLKVEYDIEELYKCFCLLKRFSSASEFFLDLHDSILPFLQLVAFLYLCTLLFRFTYFKACLDKPISIHVGFYQPALRWDTAILAPCSSCSHSILLERKKQCRECAERRVMTICASKQLLKSRAGRFLGRVYNFIITN

SEQ ID NO: 57999 - protein, 146 aa, Zea mays
  Coding DNA Sequence Number=SeqID_14624
MGKNNKREREREPTPPSEDFGDSEYSEEEFSSESEGSPAPVSPPASSDDSDDSQGIAAEVWTYIRAVERSGLEGSDESEYSSDEEDSDGGDEGEGDDDDDDDDDDGDGDGSGSGRGGGDGSRDSTKGGSSKGSTKGGGGGRGRASG

SEQ ID NO: 58000 - protein, 503 aa, Zea mays
  Coding DNA Sequence Number=SeqID_14625
  Gene Ontology: Mol. function=hydrolase activity, acting on acid anhydrides, catalyzing transmembrane movement of substances; Cellular component=integral to membrane; Biological process=metal ion transport
  Homolog annotation: Hit_ID=Q654Y9; Match level="QueryCoverage=98%, HitCoverage=60%, E-value=0.0, Identity=81%"; Hit description =Putative cadmium resistance protein
  Pfam annotation: Domain name=E1-E2_ATPase; Domain location=101-337; Score=149.2; E_value=1.1e-41; Accession=PF00122.11; Description=E1 -E2 ATPase
MRVARAIGWANVADALREHLHLCCISLGLLLIAAACPHVALLNSVSRLQAALIAVAFPLVGVSAALDALVNIADGRINIHVLMALAAFASIFMGNALEGGLLLAMFNLAHIAEEYFTSKSMFDVRELKENHPEFALLLETSGEESVQFSNLSYTKVPVHDLDVGSHILVRAGEAVPVDGEVYQGSSTVTIEHLTGETKPLERTVGDAIPGGARNLEGMMIVKVTKSWEDSTLNRIVQLTEEGQLNKPKLQRWLDEFGEYYSRVVVALSLVVALLGPLLFKWPFFGNSVCRGSIYRGLGLMVAASPCALAVAPLAYATAISSLASKGILLKGGHVLDALSSCQSIAFDKTGTLTTGKLMCKAIEPIHGHLGVKSGRSNPSCCTPNCESEALAVAAAMEKGTTHPIGRAVLDHSVGKELPVVAVESFECLPGRGVVATLSGVKVRENENELSEASIGSVDYISSLYRSNGESEQIRAAAKSSAYGPEFVQAALSVDKKESCASLD

SEQ ID NO: 58001 - protein, 294 aa, Zea mays
  Coding DNA Sequence Number=SeqID_14626
MAERYQLPRSCVSPTMRRKDGGYPPSGGLEGGKTRCMREREIMVYFQGGHPPFKGDYPYLRPQPSRAESSPTRSKALSCGAGAGSRMSCKPAQSRRSQTAAREPIPRLEATQRTTQQRQPGAAVNAVKNGSAVMTVAGGREQRSRRRPSSRPIRGQQENPLSRREDNAPVIRSSNGSRTRNGRPANHSPRRIKLRGGTGGASGRRSGRRFAFAVMTAPKKGPGKGDTPKRILPREGTRLRASLLIRGSKAGPPKGSTAASDRVGPTPTTGQRFKGRPPEGFHGRLRLLGLRAHY

SEQ ID NO: 58002 - protein, 429 aa, Zea mays
  Coding DNA Sequence Number=SeqID_14627
MQLVGDLKNDGHDQWMLAKRVSSSKHYLSVKFKASPDSASAPEDDKLCLARPQGSDSALVPEDDELRLARPQGLDSASAPKDDELRLARPPGLRLSPGLSRRSPPRPTQGLGLDLDLGRQTRPRPRRSLRLAPPRARTDHVTGGTIITLPLASSGYGEQDRRPIWLAPVKQIMMAPRVLHDDGGSQPPYGSKETSARIRQPQQLSFRKAPALLRRPRHHTNRVPKPLRLPRRHGPLTEGWPRGEGWDSARIGLSLPPARTLVTPYCKRTRPGRGTNTKAVGFPFYACLPPVFPPFTLHLAPTHLGWGTQRQFTRRSRDPPGVETPTLSEHARRLISSRDLRRGLPFRLWWVQVRSLHDGSRGLSICFTGDGRGHRLPFGEFGRGETEKEKDLAEAAKTQRSLGAPDSVRCARLDSGQQATLGNSSAEYG

SEQ ID NO: 58003 - protein, 63 aa, Zea mays
  Coding DNA Sequence Number=SeqID_14628
  Homolog annotation: Hit_ID=Q653E9; Match level="QueryCoverage=79%, HitCoverage=13%, E-value=7e-11, Identity=57%"; Hit description =Putative uncharacterized protein P0623A10.42
MEPKFVTVQQRDKLMTDILRGLMPGLQPRTWKDVTRQCMQRDERWLCFEVTDGYPALPNELKH

SEQ ID NO: 58004 - protein, 257 aa, Zea mays
  Coding DNA Sequence Number=SeqID_14629
MGRSKPGCDLGPTLSFKDVHHPRWGGGRAEPELYLPRGFVGHPLLRRSRERALAGPAGGSDFDNAGLVDGGRRQPQRVEIVGLAPGGPSCRKAAAAPCAREDRPRCRALLGRRSCSGAVLPLHRTDAGVDQLKPRVGLTSLEDGWPRPREPRTASPSEARSDLAEGVVDAEGAAAPSSVKTRACRIGLSCSVDVCASESCFSRKVMSEKVMSEPKHRVAHLEVSGPDPSGVVASQGLLALVLGEPYSRSVGKTASAP

SEQ ID NO: 58005 - protein, 345 aa, Zea mays
  Coding DNA Sequence Number=SeqID_14630
MAHRRLIAPLLFRSTVCPPCCGAFFSIWVSQRERNCVTSGKGGHALEEETVYPEKGQAEPLIRYFKICWTIFLGRLLPPCLESFLGVIFSTLSGTSQKNQLYQAREAHATELTQVQEKLAQVTLEKDEAVQVRDVAILDNVLWIGECQDYQTLLVEIIRERNATLTEVAQLRATWVNLMQQPNNAEAWNSSLHKEVHQLFAQLNQIKPSEPEEANAAAVDDGGVVSKTGSVQMVTTRRINPGAARASGSGNQEGDQEASVPPPPPFTPEQFFTQFLGAQRNMENLQQNMEAELCNISNNTRHGQHQEAHGVNQYSSFKDFMDTMPPIFKEAAEPLEADEWINTME

SEQ ID NO: 58006 - protein, 94 aa, Zea mays
  Coding DNA Sequence Number=SeqID_14631
MHIHCISIDCNLADGEYVLVPEQGAAQEVAPDPAPEPAPEDLPATALEGKPRNPDEMNTSSLEDMVAGVTWPSILPLGWTVEWDPASAEEEHEE

SEQ ID NO: 58007 - protein, 81 aa, Zea mays
  Coding DNA Sequence Number=SeqID_14632
  Subcellular localization annotation: CTP_CleavageSite=38; ConfidenceScore=5.00e-01
MARARAYKTPRDLDRTPPQALDLTGAQTHRRLPVHGVSAAARFPCHRRPANRAFPNPVQPSEKTVHTSVKLAERGIGVCFA

SEQ ID NO: 58008 - protein, 322 aa, Zea mays
  Coding DNA Sequence Number=SeqID_14633
MAYRLFMATRAGGENNFGGGGTASPSSTELSVGLEKSSEARREYGRGFPALIDVARCTSERGPVWARGRARLGAGARTGVNRACQPRSNTWRHCFCPSSNTDRAQIFANLGKIAVSPWTLGDLRTRRAEFTEEFGHTVASAIAVYIEPLGRLDRLTCSLAPPTSHRGGESGGRIAGHGGRKSDASGKRHRLRVVVGQGASLRFGDSFRGIDVGLGASGANEFYTGSPPFAVNLGARRTALDRILPWAGAFAAYYSGIIPPLALPPSTPRDALNQEIALGDFDLELAGINAAVASLCPAVLSCCLTVDDEGPCAVRPRMGEHD

SEQ ID NO: 58009 - protein, 247 aa, Zea mays
  Coding DNA Sequence Number=SeqID_14634
MGRRETEHEGGRNGKGESRGLRVVVRPGRPRVGRGGDSSEVEVESEPWGRARQSPSSEVEAEFEPWGRARQSPSSEVEAESEPWGRARRSPSSGVEVESEPWGRARQSPSSGVEVESEPWCRARRSFLWCPRLDLAAVSLTLSSGIAVGAGQAALVSCQFGQWSGEVTAVTSALSTEERASGQAWRSGQGCFSAKPARAGLRVSRREYVLIPEQGAVHEEDQEPAPEPAIEDLPASPAIEDKPRFYA

SEQ ID NO: 58010 - protein, 160 aa, Zea mays
  Coding DNA Sequence Number=SeqID_14635
MSSPACASGPTYSDHPWRRSAHRLDRQDLPYTLGHFTGAIPPSFVEDPSNLWSRCNYPPRYLLLDYSGYSVCSPPKPLPVKLRQDHLLLYTTAEHHRRREEERRRFGRRGVFLVGDRSRVAVIPERISPAAKLHRGVTLAPFLFGVGGCGVEDERCAVGF

SEQ ID NO: 58011 - protein, 351 aa, Zea mays
  Coding DNA Sequence Number=SeqID_14636
MTVSTASIPVLHSAEVAHLYPQVMLPICQGIATSHTPTEEARQGFLPDRHRSKINQGPPYIDHSPTALAPFGGSYAKRLGRKGTGNAGRAIKAERVRLDLAYSEPGHVRAVILKSDGAALVLHPASPNTEQERRQSNPAVELRRRLLTRDYGDATSVPDKEHPAAAKSSPLFFSSTMVFLRTGAGYDYGHKRPEIYRGGRPGAQAESARMRNTDGIGSCRAQSSADFCFRPTNFQAAGTASNVPGEPRAADYVRDLSPEIPARAPSYWSRRPCDSHRCCIQEKMILPELDGEGLGWRAHGIARVIEQQISRRVVAMTAKIAGIFNELETKSLDTAECTNASRIHTSDTWES

SEQ ID NO: 58012 - protein, 274 aa, Zea mays
  Coding DNA Sequence Number=SeqID_14637
MASAGLWRDAGHARSGAGVLWRAQNASNTWKCSSARVQTPAEIANVRILAKIRRGPLPGTYGYLQYVYTGHFAECNTRQRGALPSVRVITLGKEHRPGHRLRLFAECYVADTRQRGRLCRVPHGTLDKEPDMGTLSGGLFAECPKWHLAKMDSLPSAAWKTLGKDNFFAECHQGHSAKPPSPSPGAVTAAFLCRVLSGTRQRGLPSAREKALGKEGFADALFAEPSLPSVTLGKAFAECFPGFTECFRHSAKRSIPVVSPTMARSPTMARARID

SEQ ID NO: 58013 - protein, 145 aa, Zea mays
  Coding DNA Sequence Number=SeqID_14638
  Homolog annotation: Hit_ID=Q8W0U4; Match level="QueryCoverage=58%, HitCoverage=9%, E-value=8e-08, Identity=38%"; Hit description =Putative RIRE2 orf3
MNVCELTLVVSHPPQVKNREEVEVGAAVGSPDPPEVVTEVLRKLWDRGLTAAGVVTAFHWRRVLPLSDRRLRLDEMTPETSVKSSQMALEALSTDELLRWVKGIVGKTDYSAALPMRPEQGYVSVTPLVLLALKLEHNIMCINIS

SEQ ID NO: 58014 - protein, 86 aa, Zea mays
  Coding DNA Sequence Number=SeqID_14639
  Subcellular localization annotation: CTP_CleavageSite=19; ConfidenceScore=5.03e-01
MVTMVALGLTLVLGASWARASATTMPLGAASPVGGVVFDEDITMSTTTPAAPPHQAPLPSLAGPITRARAKDLNFVMLLKNEGPEE

SEQ ID NO: 58015 - protein, 47 aa, Zea mays
  Coding DNA Sequence Number=SeqID_14640
MAVRRALTVADNKQSEVPECVVGDLPEQQPGDSGHFPEYLSVDLFVE

SEQ ID NO: 58016 - protein, 395 aa, Zea mays
  Coding DNA Sequence Number=SeqID_14641
  Subcellular localization annotation: CTP_CleavageSite=71; ConfidenceScore=5.29e-01
MAGIPHWNSFGPPEAFSPPFSPLCSQIHGLFPATEFAVASSSSLPNPDDLGATLARACLNSGNLTTVERSSAAHSRSSLPGLISLVRFSSHDPDRGYRFAHARPCSLALGPFDNEQSEVPECVVGDLPEQQPGEGKDAPAPPQGIPTAGGDLDRDGDNDDACGSSSHDTELSEEPEPEGWIARPITHDAARGCHFHDALDTLLRRAFDQHTWSIEYRCVVYQHRRGLYPDQLEATFLVRRPDDDLRGAEAFSDHYSITERDTAEAAMQDAARQALSQYCSLFSGVADGLDLKYYPRRSTDSAGGVIVSPVGKGNPKLNSMVNLAAVLNTELDHALKELGKVRAEVAELRAECATRHYLDGGSPAPVEIQHPYRSPPHGRFDYGTPDCRTRIDLDP

SEQ ID NO: 58017 - protein, 83 aa, Zea mays
  Coding DNA Sequence Number=SeqID_14642
MAFMELEWREREEETETLTRWRMVATGTSVCGSGVGQAPSVAVLGFGSWSRAWRDWASCARRVGRWWRAWAPVVQGSGRRDRA

SEQ ID NO: 58018 - protein, 49 aa, Zea mays
  Coding DNA Sequence Number=SeqID_14643
MAVGGKGAMGGKVGAANLRGVATWTSDYCADGAPWTTDGEPSVVPLVDE

SEQ ID NO: 58019 - protein, 39 aa, Zea mays
  Coding DNA Sequence Number=SeqID_14644
MPLELLHMDLFSPIAYISIGGRKITNPRDLKGILEMVSK

SEQ ID NO: 58020 - protein, 84 aa, Zea mays
  Coding DNA Sequence Number=SeqID_14645
MMSTCLRTILERKVPKNDASSEQNISNKEDHLDSRSDNESQDITMSNNINGEDQLDGADEVKEVKRRGKTKLINVGTFQEAIEL

SEQ ID NO: 58021 - protein, 242 aa, Zea mays
  Coding DNA Sequence Number=SeqID_14646
  Pfam annotation: Domain name=zf-CCHC; Domain location=170-187; Score =27.2; E_value=5.9e-05; Accession=PF00098.14; Description=Zinc knuckle
MSDLGMSTTSDVTKCKECGVLASKNNTINKTADEQTFKTQKDEQPNQQTSDLGTCSCCEYYGIPCRQINANESETTKQKNRILFFGIKRQMSPPKQLIADSLIPNALLVDELQSIPKRKHHKDAQPQEETHECYIDGWTITCTQFQPRGRIRSKKQKGKHGKSQEITSRKACYQCGREGHYFRNCPEKSPLQITSEIKLYQSSVMEYEQKCTETSTNNVKTFPPCNLSSRACFGYGDTGHLF

SEQ ID NO: 58022 - protein, 142 aa, Zea mays
  Coding DNA Sequence Number=SeqID_14647
MAYNRYRAENRRWRHDMVVVSDFQRATRAMQSTLGLVDRRLAKPPDESARATTRRGASNGTESAVAAVRNVRRGAGTTARRGRTAAQRAWCGLGWARREQGMSRSFARPQTAELRRQTADRATTTSSGGKLSTAQTKRERRA

SEQ ID NO: 58023 - protein, 126 aa, Zea mays
  Coding DNA Sequence Number=SeqID_14648
GGPYLGAEPPAWPQSSLRPLEGSDQEDRAFPTFHVVRNELLLEELTMTFEAPTQASALYSTTPGTQASPRGAGPPRSVDRDPRSALPVAPMAPRQHSTTDGGRRPRKGGHGDDDPSRGGSTGQGGA

SEQ ID NO: 58024 - protein, 362 aa, Zea mays
  Coding DNA Sequence Number=SeqID_14649
  Subcellular localization annotation: CTP_CleavageSite=34; ConfidenceScore=5.48e-01
MFSSSLMRRVFPSSKPPDGGPVASPRWWSPKTVTASFGVGRSKPGCDLGPTLSFKDVHHPRWGGGRDEPALYLPRRFAGHPFLRCSRERALTGPVGGADLANVGLIDGGRRHLQRVGVVGLAPGGPPCRRAAAARCAREDHPRCRALLGRRSCSGVALLLHQDGALAQRPVPHSSGRIRVGICRGAGGPRHQRRGGGGSRSPRRRRDHRHHPRPGPPALRTCPRPSSVGVGEGKIAAAPTLRPALLRLGHPERESSSSYSVKGTPWPLFDVPRLGLGCPSAGLTPELISRGLGSGWRPWKMVGRGPRGNRLSRLLGPDSWRSPRTASPSEAGSDLAEGVVDAEGATAPFQREDPSLQDQIIL

SEQ ID NO: 58025 - protein, 57 aa, Zea mays
  Coding DNA Sequence Number=SeqID_14650
MGPTGQPKALGGFHTHAARRRLGEHDARGGWGAGQARAQAARGASWRGVLQWAKKGE

SEQ ID NO: 58026 - protein, 108 aa, Zea mays
  Coding DNA Sequence Number=SeqID_14651
  Homolog annotation: Hit_ID=O48967; Match level="QueryCoverage=84%, HitCoverage=28%, E-value=4e-26, Identity=55%"; Hit description =Putative uncharacterized protein
MAGRRRPTAQYGAFYLDQTNDLRTELNRRRAGEDARVSLERARKRRQNINGRDLDQDFAAVAPQTPMAPSPKWVSPWPVYVTAITAAGGNTAVMATYFHVALSGPART

SEQ ID NO: 58027 - protein, 35 aa, Zea mays
  Coding DNA Sequence Number=SeqID_14652
MTKRRSASRFATVGEGSGVGEEEQGEGIDGQMGHV

SEQ ID NO: 58028 - protein, 176 aa, Zea mays
  Coding DNA Sequence Number=SeqID_14653
MDALNFEYPDYERLDEGAGGAMKKRVVSILKSKAIRSIEKDPRAAKKQKISVEPKDSTPKKQKSSILAPVEAKVQDVPEKTAGTSSSSSAGVTEILKKKSVAPANVEANADAEVDEATPEAENRGGPLRTTMSEIDRIIADVVPEREMDEVTTDRASPLKMKKLEGASLEDIVLDL

SEQ ID NO: 58029 - protein, 124 aa, Zea mays
  Coding DNA Sequence Number=SeqID_14654
MGNLISLPPSAPAVDPPPLGLEQQASGGLLCSAPASLVLALGLARGAPLSKGEHPLRLRGCAVPAGRPSTEGRWRRSTAKTARSTSKTGSKCSRAGVGGNRRCLGRTAGCGASSVTLRRADGRR

SEQ ID NO: 58030 - protein, 130 aa, Zea mays
  Coding DNA Sequence Number=SeqID_14655
  Pfam annotation: Domain name=zf-C2HC_plant; Domain location=34-89; Score=9.9; E_value=0.0029; Accession=PF07567.3; Description=Protein of unknown function, DUF1544
MAGFSTEASAAGSQIRSDGYDPLKDPKRKPKSDDLGWKYAYYVEPGKRELIQCALCPRQIKGAILRVKKDLVGGYKDILKCPNTTTAIARELKEALDEGKRDRPKGQYFDEVESHENLCWLFGIWLDIIA

SEQ ID NO: 58031 - protein, 411 aa, Zea mays
  Coding DNA Sequence Number=SeqID_14656
  Homolog annotation: Hit_ID=Q10BA1; Match level="QueryCoverage=98%, HitCoverage=69%, E-value=5e-60, Identity=50%"; Hit description =Expressed protein
MENGRVREHILGTEANNVLRIRKERPLTSDSIDPLQIGQEASVHQFGNTDVSCSGSSQRYSCGNDSFRKTNRSSSSRICRHAESAVGSKTLAEMFALSDSERLKLNSDSNAPVLCNMIDRDNGHSKDGCFIVLPKHAPVLSIRSSMDMPSCLEGSSQGKNNLNISNIYNNGKFQIDSSRDKPRSLKQIGSGTEAHLSSAHCFQNLTGDNFSTPDCLNDKVLLTTDEDVVRQSAESEPSRFNLQVSRKQRVEENWDFSYLLDILICSGIIVVDWQLICKSWYLPGYPVGPHVFDRLERKYNKIATWAKPERRLLFDLVNSILSEVLAPCVDVHPWVQPSRHCVAFWGPEGPVEKVWQTIVRLQEDCVTRHPDEMVLDTNWLEVGTDINMVGKQIARMLHGDLLEEVIVDFLG

SEQ ID NO: 58032 - protein, 186 aa, Zea mays
  Coding DNA Sequence Number=SeqID_14657
MERGLEAEEVEVVERMVADERLVEWEVSREDGGGGEVDTVLEAEQEIEVEEASVDDDGWEAVAREGGGEAGGCGGLSDAGLAGVTQLHPSDVPLRRPSKMQHVIKEARGGGETEGQAGPEVEAACAGGASWERIDAFASRNSTKLKTNFSSYYNQKKNAACVHLKSRYIFSIICLKFERTPCCRSC

SEQ ID NO: 58033 - protein, 287 aa, Zea mays
  Coding DNA Sequence Number=SeqID_14658
MEARRALRYRVQGRRSWRLRNPNQGVKKKTCKVKVGRVEKRYGSLWRIGTAFPTEVALGQIKIASPTEASRGLGRVVGLRQSKASTKGWRGLGEHYGGIGIAGTGVRQPDGGPGSTLASNRGASKCKTGGISGGVRSVTLRRDFGTLEWQQGHNEGLSRRRWLSGYVRKAPVSADQANQRGREQTEGHPGLRVIRQSLSRQWTRRRLDDEGSTGARPRQAAVELPGRAQSEGEGEGAWLRAQLSGEGRVNEGGVQKRLKRMGAWPEITWTWARPRRGAWAVRRGRVR

SEQ ID NO: 58034 - protein, 95 aa, Zea mays
  Coding DNA Sequence Number=SeqID_14659
MAMMGSTSENMYLCQARKQQTFAVFALRWCPKMWCPRTNLNSEVVAGGMLVSLLKNNIPLYGRGFCLPGLSKVRWTRTTVGGPNDLGGSVTAVVH

SEQ ID NO: 58035 - protein, 161 aa, Zea mays
  Coding DNA Sequence Number=SeqID_14660
MVNLVAMLNIELDHALDELGKAFVKVPSPAKGVPARFVCRTSGCSEGLERRVVSLPSPQHLPSEGPVRQSHLVPKTSLDGGDAALARSGSAGVFDVTVDGRRTVGLRVFRSVAACRIAGFPKSRAPPIKGGGGGAFWTLPSALRKTLAARRLAAPFPPLLP

SEQ ID NO: 58036 - protein, 141 aa, Zea mays
  Coding DNA Sequence Number=SeqID_14661
MTKFTGCENYFDQGIEESNTSKEDIKKIPEKSKNEDLSEYCKITQPLDSCVSRYNCIEWGESCETVTTVFVSQPPPCTGGNEAHGVSAGNSIVETAGSVREEPEAEHHLRVEKARDSLRSYSTEVLGPRVDFPLRRGTNED

SEQ ID NO: 58037 - protein, 73 aa, Zea mays
  Coding DNA Sequence Number=SeqID_14662
MYLRRLKVLGMKMERGKATGITSATISRKGYWTRKVETLERIRTICTKRMSDCLRKWAWTLIGSLSLGPEYCQ

SEQ ID NO: 58038 - protein, 146 aa, Zea mays
  Coding DNA Sequence Number=SeqID_14663
MVTGQTSHLERLHRLLHEEQEHQRQEHEHQDSSPSPQQKVESGRQPSPAPQLEMPLAPPQGILDARGDPDGDDDDDAGGSSSHSTKLSEEQEQEGWIARPITRDVACGCHFHDALDTLLRRAFDRHTCSIEYYSVVYQHRRELYPD

SEQ ID NO: 58039 - protein, 491 aa, Zea mays
  Coding DNA Sequence Number=SeqID_14664
  Homolog annotation: Hit_ID=A2X241; Match level="QueryCoverage=25%, HitCoverage=31%, E-value=8e-35, Identity=60%"; Hit description =Putative uncharacterized protein
  Pfam annotation: Domain name=CRAL_TRIO_N; Domain location=79-167; Score=21.1; E_value=0.00045; Accession=PF03765.6; Description =CRALTRIO, N-terminus
MEVVRHGTLHPELPAPDPFPCVSRKLLCWARQPPLSYPRQHATVVVFIEFANTLLPIRLSSLLRASLRARRGVVYCILTLALPLVPTSAIATSAPSRHPALVLALQETDKCSWLPLFITLYGWSLENMHQGYPKETLVRFLKAREWNVAKAHKMIVECLNWRIQNEIDSVLERPIAPVDLYKSIRDSQLIGLSRYTKEILLYNFDGGTICSVVILKEWLGIHRVAAAEISKVCGLPIFGIGVGHSTYDKASAIATAKIIKVPGLKLSALSQIKLQQSEQLALEFSVDSGSHQVTPPHVDFADVSILVVELRTTIRFLADPRRVKNVDAHVLKVKNVGAVELMGKIRRPPSNLKTHVLNVKFDGTHVLNVKFDGTHVLKVKFDGAVELTSISSSKNCRRLYSSVNPRSYVSCSVDKKPKRVVTPLFPSNRIVVPPRRCCHLPPHCCRSATSLSSCSLQLCLYVLAFDHRCNFRSLSEEVELTGRLPGTRREA

SEQ ID NO: 58040 - protein, 63 aa, Zea mays
  Coding DNA Sequence Number=SeqID_14665
MARVACTLRGKRLDGGVSVLSVGVNPHTLESLFFSRVTSHLIVIGVKRRPFSFEWIDAQGKVH

SEQ ID NO: 58041 - protein, 211 aa, Zea mays
  Coding DNA Sequence Number=SeqID_14666
  Subcellular localization annotation: CTP_CleavageSite=4; ConfidenceScore=5.13e-01
MSSRSLMRRVFPPSKPPDGGYPPSFRLIVGGTQLRGSWYLSAIIRLQGFSSCSPAVSPHRWSPKTVTTSSWVGRSKPGCDLGPTLSFKDVHHPRWGGGRAEPVLYLPRGFVGHPLPRRSGERALTGPAGGPDFDNAGPVDGGRRHLQRVGLVGLAPGGPSRRRAAAALCQRFIYNYTNSTVRNTVDYSGQEKLFGKTGQARTVRAPAADRP

SEQ ID NO: 58042 - protein, 313 aa, Zea mays
  Coding DNA Sequence Number=SeqID_14667
MKKTECISFELKPSHMSPPIVPSSVGSVQDLTKYPEDDIVEDKPCFLHIPINRSGTKTKQAATGLEAMNELVLWHRRDIKLGDEPNSTPMQQKDSSIIPHPMVQENMTPTSKKIIETIISPLAKELDEGDVDKIVPQNVDVNIKKEPKVGTNVEGPTISKKIHMRIATDDVKKPSESVARYLHKLQRVMTNQSKAESASHGVGTWSQIDNFEVWEEYGMIHTRESLRLKTNISVYKKEDVPPKFVNGRPFLTTVQLSKLSTPEIRMHEWYMVASNKYKLEDFTFVVPEDAFWSNDHIDPVRHLFFDDLWSLYH

SEQ ID NO: 58043 - protein, 34 aa, Zea mays
  Coding DNA Sequence Number=SeqID_14668
MSVAISSNLDNATENAALSPRCSNPAASVSRQNL

SEQ ID NO: 58044 - protein, 148 aa, Zea mays
  Coding DNA Sequence Number=SeqID_14669
MANRRRGLVHWAHNNLSEFARASIYRFHQRWHPIWGRHAGSRREGEVTSASYHGIRWSNGSEDKHAIYCDLRRCGNTTDYVAHGRQEADSGEDHFGWLRSKWVRWPAHNHIRGKIFSLSVVIRTPESMNRSASANLGTKVTNGEIQCT

SEQ ID NO: 58045 - protein, 57 aa, Zea mays
  Coding DNA Sequence Number=SeqID_14670
MANFAITEAASTSASLPSVTRVSLTVGAHLAQEITLDHVKAVGFLGDGFGATPDMSK

SEQ ID NO: 58046 - protein, 607 aa, Zea mays
  Coding DNA Sequence Number=SeqID_14671
  Pfam annotation: Domain name=MAP7; Domain location=305-460; Score= -83.7; E_value=0.091; Accession=PF05672.2; Description=MAP7 (E-MAP -115) family
MPSRGGMLVRSPAFALDLQSRDLATFVREAEDGAVRIVGRYVPKTEGQLSWDIRGSNDRLNRVFELNRLPYGGYPGQDDVDRRGKKPAVETGDDPAPAAAPSSKKRKLGTATGGLGVSDGFARELMRTCATPGGRMSSPELRESSARMLRVTGGWWPKNVPIPRAVGEDFFTSRMVHDWRVFPYGRNIAAVVSAVMDKDRQGAAQKRQAVVRLSEARPKRSRGTTKAAAPGGSQPTLAAKSTAPRSGRVPEAVKTAAAGGTKSVPAGAAKARELPPPGKRVADFATDISVDDYLVGSGEGQLVVVPPAVATAAAAVVPRAKGSALSAGGEMPALTAVRDEAGVVSHRLKEALSQVAALEGERTDLRRQLAEERKEANEALAKAQSAQAEANLARAEGSLARQRAEELEERFNALQTRVERAEASTRSEAEQTRKQLMDSYHELGARTAVFEVPDREPELRCLEWLQEELLALPAIVEGFMSYASLVTCEGAMNTLSREGCRHYEVFDQADEDFDREIYKAARNEKVEGFGALNNVQPDSESNPVAAVSEVAPAPPPKTVEGAPDAPAATAAGGGPSPTAAPRAEDPAKMAVEPAAEDPATAGSSQVA

SEQ ID NO: 58047 - protein, 102 aa, Zea mays
  Coding DNA Sequence Number=SeqID_14672
  Subcellular localization annotation: CTP_CleavageSite=64; ConfidenceScore=5.04e-01
MAPKRATLKAAASIDDAAKAALLAEKKGKALADNALRRPSKMTLSTARDSARITPPPMGTMRTCSSEGAPQAPPPCFTPPEGEDTIEDGEVIGISTEDQLKL

SEQ ID NO: 58048 - protein, 154 aa, Zea mays
  Coding DNA Sequence Number=SeqID_14673
MAQWYIPWFGQDQRLPTPRCGVPTNEGCNQPLSSGPKTHLNTTVFCLHYYNPFARNLHTLEPLALTLEIHKEARSAPELLDKFGIFPYLSRNVSPVLQTLQNIGDEEMRKRLHNLHLLKRTTLVQKQQKSATSSPKNNEGINPKYGITQQVLPD

SEQ ID NO: 58049 - protein, 134 aa, Zea mays
  Coding DNA Sequence Number=SeqID_14674
  Gene Ontology: Mol. function=cysteine-type peptidase activity; Biological process=proteolysis
  Homolog annotation: Hit_ID=Q5NKQ2; Match level="QueryCoverage=62%, HitCoverage=9%, E-value=7e-27, Identity=72%"; Hit description =Putative uncharacterized protein 9C20.3a
MSRAFDDYYIEDCGVILAPEVTQRRIDNSDQFVILATVRKLDPIDMTLRIGPDKELKITKHTVHLILGLPNSGGGKPLNIDEANAVATLRSSLSISKDEFVISKLHDRLRLGNDDELSIRCFFDPLQPAAFPNS

SEQ ID NO: 58050 - protein, 273 aa, Zea mays
  Coding DNA Sequence Number=SeqID_14675
MPSSEGQPCSLMLPQPVEVVPRLGAQRSGPVGPSRILGPRESSGPGVAGGSVSTHKDAKASEPAPETGSEEDGVLLQPRLKRKFKPNSKEANSGIKDHRSSDLDSIHYTRRAKTLGAMHPQLKLALEAQTRSFISELDKKFANHDAKWESRVGELEKAAVSAADQFYDLKVDNHTDATAQLDFFVSSVIKQANRVAAATASRVSALESATAAFEAWRPAMESTIAEVKRGIATVQAVVANISQPGEHRPLEPPHLQPASSANLDRAPHAHLTV

SEQ ID NO: 58051 - protein, 322 aa, Zea mays
  Coding DNA Sequence Number=SeqID_14676
MDSYCIEEVHPDTLMKKDLSSYVVEERRSLSYGISVNVILADNTDAALRSWPPFLPADGGGRFTSGLDHSRRMEGGSLACSWGIGLITPGSFGCTAGAINLPEGRGAKEILTEDLGLPRLPDAAGREEDEQFPRGGTADKLNRDGDQAIQSASTVDPSSFPGQADLHSSKTKLKVYSRRKGGPTQEIQVAPNPSSVGAPILDMADGTSSLITDISVPLVDPSTFISRINKRSAHLLPTPRAEQRNLNSQTMTVPRRSRRVAGIGVEFSMQEWRNRSSRKAMGALHIIKESDGVNPEALMGLVLQTGWTTVVVNLCIWALGGC

SEQ ID NO: 58052 - protein, 788 aa, Zea mays
  Coding DNA Sequence Number=SeqID_14677
  Gene Ontology: Mol. function=ATP-dependent helicase activity; Cellular component=intracellular; Biological process=RNA processing
  Homolog annotation: Hit_ID=A7VMN4; Match level="QueryCoverage=37%, HitCoverage=18%, E-value=1e-110, Identity=66%"; Hit description =SHOOT ORGANIZATION1
  Pfam annotation: Domain name=dsrm; Domain location=220-293; Score =34.0; E_value=5.5e-07; Accession=PF00035.16; Description=Double -stranded RNA binding motif
  Pfam annotation: Domain name=dsrm; Domain location=47-111; Score =37.6; E_value=4.4e-08; Accession=PF00035.16; Description=Double -stranded RNA binding motif
  Pfam module annotation: Pfam domain module=dsrm::dsrm; Domain location=220-293::47-111
MQVLGDIVESCVGAVLLDSGFNLNHVWKLMLMLLKPILSFCGMHIDPMRELRETCQYNGFDLGLPEPTKYNGEFHVKVEVNINGKMISCTAANRNSKDARKVAAQETLSKLKNYGYKHKRKSLEEILRSTTKKESELIGYDEEPINVEDDIDMQMNNLLINGERTSIQSTAGDNKVDKNDANSGRNNKSNVVMQNGCLPRGATDKINQKEYHGDMVRKTARSFLYELCAANYWKPPEFELCNDEGPSHLRKFTCKVLIEITGTSVSLLECYSDPKLQKRAAQEHAAEGALCSKQLLLVCHCRYPETGVPLTIVWRRGARAAISSRVVNSTRPHHVDDSGAATWPEKTIYPKVSTVGSDPHGKVPDPCIYGPDLRVRSRTPTGADRTPKTGPGPLCVGFGPLSRVSGFWDKEYPGLNQGQAGVRSRHVSEPYRMRFRSPLRRRPDASTWPTARDVSQRAEPDVRPLGRMASAFIADKACRLSIPLAGDVPPRHLMSPVDSTGKRCAVSAFNGLGIRFLLVSLLDIMVHIVEHQDFMPEDFMVEEAAASSTPRATNLPAPGAAAVHSARQHTPAQTSRASRAAPGALSVATELLRHPPSSTASPGAMKQWCDDVDRLLGMAHSGSARLPRPAAPWPLAALAAPPAGRCRAALAPGQPQPAPARPLANSGRPPRPARLAARLADSAACQPDPPPPPPARPPGRPVQPGQLGRPGPQLGCPRPRQPPARPPSLGPRIRGVVRFAVVPSMGLGVCGSLCQGDNKIDGSDYDYGIGEDEAVEGDFQEFQDYDEF

SEQ ID NO: 58053 - protein, 89 aa, Zea mays
  Coding DNA Sequence Number=SeqID_14678
  Gene Ontology: Mol. function=ATP-dependent helicase activity; Cellular component=intracellular; Biological process=RNA processing
  Homolog annotation: Hit_ID=A7VMN4; Match level="QueryCoverage=93%, HitCoverage=5%, E-value=2e-32, Identity=78%"; Hit description=SHOOT ORGANIZATION1
MVIADSTNFKVQRYYGSGKHSRDHQAWEKEMGEYEVLVMTPQILLHNLRHCFIRMDLIALLIFDECHHAQAQKRHPYAQIMKEVLLWLT

SEQ ID NO: 58054 - protein, 151 aa, Zea mays
  Coding DNA Sequence Number=SeqID_14679
MVRSCSRARVALRSCSWEAAIATWMVAMAATNAGEAGGGGHGRDEVGPRGVGAGEEAKRGAMRVLRSEGSRSAMKGAPSPVRSRVRERKSPLSASSEGSKPTPEGPSGPAPKGACRPTGGNAATKAVSAAVRSPARGGARARASRCSSGRP

SEQ ID NO: 58055 - protein, 41 aa, Zea mays
  Coding DNA Sequence Number=SeqID_14680
MADSFRDLGEPVADRTLVLILLHGLSVPTTLQFIDIFTKGG

SEQ ID NO: 58056 - protein, 79 aa, Zea mays
  Coding DNA Sequence Number=SeqID_14681
  Subcellular localization annotation: CTP_CleavageSite=48; ConfidenceScore=5.35e-01
MSATGPTITGSKEMVGSWLRKHVRMRAPRIWSRRRRRSAAESSTGSVSEMDVGGSDTGMGLTPSGTSVVLASPAHEAMR

SEQ ID NO: 58057 - protein, 127 aa, Zea mays
  Coding DNA Sequence Number=SeqID_14682
MAALGPLTEARGRQQGLDGPDSCPSARLQRSSDGHNITQTGRQNLSGRYDGGPLREGWPRGDEDETGTRVRPLAPSPVWTLVTPYCKRTRPGRGTNTKAAGFPPLSRTSPATSLPPFALGLAPTHLG

SEQ ID NO: 58058 - protein, 53 aa, Zea mays
  Coding DNA Sequence Number=SeqID_14683
MATPRSTRPIALTPQRDRRHHWQEKRATLRLRHNDRVKKGTGKGGYPEKDPSP

SEQ ID NO: 58059 - protein, 514 aa, Zea mays
  Coding DNA Sequence Number=SeqID_14684
MLGVLGVGEVRPLSAVACRLHGCPPFRPLVWAKVESRFPHAVGEDLGACWRRLSPRRLGTQVGKVAFKKRVTLLEGDHIFALPYASCLSTFQAPGWGIPAVFSPRRWRNATPRELVPFSRRSASRIFIRQPGCIPSPAVTQDGDHQLDGGEKRTGLLPPPCPQLQGSSSPLLGRRVRRVGRPPPHGSVTLFFPDVWGRKASPSSAEASLSHAGPHQWVAQHVVCREGGAHVLGGSGEGEDLPVRFEASGARWRGAEVVAAGEGFSVNEIANSARTPGPPSSGLNGWFSSSMNESPPAVAPAQKPLLKLLRRPGRRSLSLLPERATASHPSAFCCSAGPPIAWGCSYLRRWNWSSVCNGTSSAGVSFNAAVEARTGNPRPLFDEPRPGVAVPARTEAELARKEGLVGRSLAGSSVSGADAGIDLPRPRAGLMSLGDSWPRPRGDRPSRLLGPDSRRRPWRRWPGLGDDVVLQSRDPWTVSPSEARSDLAEGVVDAEGVAAPFSRQDPSLQDQIIL

SEQ ID NO: 58060 - protein, 119 aa, Zea mays
  Coding DNA Sequence Number=SeqID_14685
MYHRMRRMEDVKGKCALGPFLSILVIECQHKCLSVNLCQFMDKVQIKSKVLVTGKVQFGKDLAMQPRLCAVWVHRTVRWCTGQCPVRQAGDCQLAALGKRSTAYDYKSPDCPVVHRTVR

SEQ ID NO: 58061 - protein, 54 aa, Zea mays
  Coding DNA Sequence Number=SeqID_14686
MGVKLFGSYGERYHVHAVVGPVRGQDSSCVHPLQVSQVIPMVTSIRNPYTYRTQ

SEQ ID NO: 58062 - protein, 206 aa, Zea mays
  Coding DNA Sequence Number=SeqID_14687
MVSPVSCKRVIRVDVRAPFVGGRLGAQRHAQNPRPAAPWPLAALAAPPAGRCRAALAPGQPQPAPARPLANPGRPPARAPAARLADSAACQPDPPPPPRACLAGRFNRASSAAPAPSSAAQPRAENDPVEEPEEFAGEAPEQQSVGGGNRARGYERPRELQRLVILDQRYFGTGDNEIDGSDYDYGIGEDEAVEGDFQEFQDYDEF

SEQ ID NO: 58063 - protein, 116 aa, Zea mays
  Coding DNA Sequence Number=SeqID_14688
  Subcellular localization annotation: CTP_CleavageSite=48; ConfidenceScore=5.86e-01
MRAPSFSPSSDVSFVFPTFALFFLPNLLPPPMVTAASRPSLVNAGTTRVGHAPSLSPCGQSRRTWWRLPRLGYLSDEESRTAVDGPGPEQQHRAAALAALPLQSEFDKSIFNNSSN

SEQ ID NO: 58064 - protein, 255 aa, Zea mays
  Coding DNA Sequence Number=SeqID_14689
  Homolog annotation: Hit_ID=Q75GL2; Match level="QueryCoverage=94%, HitCoverage=47%, E-value=1e-64, Identity=56%"; Hit description =Expressed protein
  Pfam annotation: Domain name=DUF828; Domain location=1-82; Score= -113.3; E_value=0.059; Accession=PF05703.2; Description=Plant protein of unknown function (DUF828)
  Pfam annotation: Domain name=PH_2; Domain location=146-254; Score =209.8; E_value=6.4e-60; Accession=PF08458.1; Description=Plant pleckstrin homology-like region
  Pfam module annotation: Pfam domain module=DUF828::PH_2; Domain location=1-82::146-254
MAVASAATLVAAQCVEAAEALGAEREQLAAAVASAVSVRTPSDVATVTAAAATALRGAATLRARALKEAWNVAAVTPVEKGAMTGGGGHHLHGGGYKHDGQQQRQRLLREVESSNSSSSCLSDELVLGEENNFLGICTQELLARGTELLKRTRKGSLHWKVVSVYINRAGLVMLKMKSRHVGGTITKKKKSVVVDVCRDVAAWPGRHLLDSGEHRRYFGLRTAEQRVIEFECGSQREHEVWTKGVARLLADARKR

SEQ ID NO: 58065 - protein, 241 aa, Zea mays
  Coding DNA Sequence Number=SeqID_14690
  Subcellular localization annotation: CTP_CleavageSite=64; ConfidenceScore=5.63e-01
MSSSSLMRRVFPSSKPPDGGYPSSFRLLVGGTQLRGSWYLSAIVRLQGFSSASPAAPPRRRSPRMMTTSSWVGKGKPGCDLGPTLSFKDVHHPCWGGGQVEPALDLPCGPAGHLLPQRSGEEALTGPAGGADLDNVGLIDGGRRHPQRVGVVGWVPGGPSGRRAAATPGRCPTRLGGFEWGSAGGGLVAPAISAEAEAAREVPVADGITATIRAPGLRFFVLVLAPRASAWARARLQQRPP

SEQ ID NO: 58066 - protein, 132 aa, Zea mays
  Coding DNA Sequence Number=SeqID_14691
MTAAALSSLTEAGGRQQGLDRSDSCPSAKLRCSSDSHDITPAGCQDLSGCHIGIYCSKAHNYITLAAPELISHKSTKATLMLEAVQKPSDNHSSFLYPPVLSVEACKTTICLNKKTEDADPMGGKIVAGCAF

SEQ ID NO: 58067 - protein, 297 aa, Zea mays
  Coding DNA Sequence Number=SeqID_14692
  Gene Ontology: Mol. function=kinase activity; Cellular component =ornithine carbamoyltransferase complex; Biological process=amino acid metabolic process
  Homolog annotation: Hit_ID=Q6QP54; Match level="QueryCoverage=28%, HitCoverage=36%, E-value=1e-11, Identity=50%"; Hit description =Putative kinase
MALRVDVAGPRPRPGDVGAPPKLGSNLSSVAEAESEPLGRARRKSFGRGQGGVRALGSGEAEFVVFRGRARVQALGSGGAEFAVFRVLARVRALGSGGAEFAVFRVLARVRALGSGGAEFAVFRVRARVRALGSGGAEFAVFRVLARVRALGSGRAEFPMAPLARPDCLSDSLCRVALQSEWRRRRCPSVRPRRAHPATVEPPFVPSSGGRPSVPDGGGEAAADDDQVVEPDELEIARWRKIFRGPNRSMSTIDEGTEKDDTTPAFSTPSASPDRRDARAPALALGMETVAVQLRQA

SEQ ID NO: 58068 - protein, 343 aa, Zea mays
  Coding DNA Sequence Number=SeqID_14693
MAERYQLPWSCVPPTTRRKDCECPPSKGSEGGKTRCIREREDMVAFQGGHPPFKGDSPYLRPQPSWAESSPTCSKVLPLRLGGWVPRVTQAGPEQKKPNCRARCMQLPSGYEHSSAFAQTSGRKGGQPCRRHATAPSGRAPPTSNAPSAGAHAHASRNWRAGRYVQATAPPLAPLPRLLDCGTSTTTRGNPAYDPVVPARRDGQYGQKWAGSDGGGRRAGAAVTSSAKLASHPGAGKRATLRLRHNDRVKKGTEKGGYLKRILLREGTRLRASLLIRGSKAGPSEGFNSRLRARGLHTHYWSEVRRPTPRKGSTAASGHLGSAPTTDQGFEGWPSEGSQPPQT

SEQ ID NO: 58069 - protein, 118 aa, Zea mays
  Coding DNA Sequence Number=SeqID_14694
MSTKKRHLDQIKLLALWLLLNHLLFSCGGGCETARVSSHTFIAQQVVGNNVHELAKGGSSREVTLLGKKWSRAQLVFNELLLSYFYLLLTRILNHGLFYSPQYKQAQYTGKINITPNM

SEQ ID NO: 58070 - protein, 757 aa, Zea mays
  Coding DNA Sequence Number=SeqID_14695
  Gene Ontology: Mol. function=protein dimerization activity; Cellular component=nucleus; Biological process=DNA recombination
  Homolog annotation: Hit_ID=Q8S6T7; Match level="QueryCoverage=82%, HitCoverage=85%, E-value=1e-175, Identity=49%"; Hit description =Putative activator-like transposable element
  Pfam annotation: Domain name=hATC; Domain location=641-726; Score =121.0; E_value=3.5e-33; Accession=PF05699.5; Description=hAT family dimerisation domain
  Pfam annotation: Domain name=zf-BED; Domain location=116-171; Score =37.7; E_value=4.1e-08; Accession=PF02892.6; Description=BED zinc finger
  Pfam module annotation: Pfam domain module=hATC::zf-BED; Domain location=641-726::116-171
MAHNYYSFIWAGLVEKHYVGLLVAGLAAACPASQAHSRRRGARALGPLGQKHSNGRAAQQAVQLSTSPDAGSPIRPSPAGRLSLVPSAASSSPEPAQQVVRQVSISRSQHRLINKVWVWEHFTRYEVEVQEADGSIVKQKWAKCLRCSHKAKAYSYNGTKAFSNHLRMKHQVLKGQQMLSQSGDAIATYKYDENASVRLLYYAIIMHEYPFSIAQHRYFVKFIKSLRPSFPSKSRVTVCKEIMELYKEEKNLLYAQFNKLSCRVSFTMDTWTSIQNKSYLCVTAHWIDDHWKMQKRIINFMHVEGSHGGIKLSDTFFANVLNWNLDKKMFALSLDNAAANKVAVEIVIENAKELLVCDGKFFHVRCANHILNLVARDGLSCLGNVIGNIRQFVTIIKRSPLQLEAFEKCAKECGLDPKKTLSLDVATRWNSTYIMIRDAIYYKNAFDRLAKKDKDKYGHINPSSTDWLNATNISKCLKKFYDVTLLFSGTSYPTANHFFRKFSEIKMAIARWCDSSDLVICTMAFSMRHKFDKYWEMNNLALAVGAFLDPRYKHRMIELYMSKMYGSDKAELEKLVFMNVINELFAYYSAVINAKSTTKGSSSRESEFVPHKNTCLVDEEEDEVDLDELYATTSNDKKVSELDLYMSEDLVKVNDNEATFDILSWWKGQVTNFPILSTLARDVLSMQVSTVASESAFSSGGRIVDAFRSRLKPEFIEALVCCKDWKIASEKDLEIEIKTLSEPMNDVDLEDAAAIGT

SEQ ID NO: 58071 - protein, 235 aa, Zea mays
  Coding DNA Sequence Number=SeqID_14696
  Homolog annotation: Hit_ID=UPI0000F34A83; Match level="QueryCoverage =65%, HitCoverage=73%, E-value=3e-09, Identity=42%"; Hit description =UPI0000F34A83 related cluster
MAVADVPSQKSSVLGMSRAFDDYYIEDCGIILAPEVTQRRTDNNDQFVILATVGAVIVSGTIIRVPSRRLILSWGSDSASADDLRLARPRGSDTASADDLRLARPRGSDSASADDLRLARPRGSDSASADDLRLARPRGSDSASADDLRLARPRGSDSAMAMEDRLDPGFGGASTSPNLGHRPATSTGSAIITLPRADSGRREQDLLRCSSDSHDIAPAGCQDLSGCHIGMYLGH

SEQ ID NO: 58072 - protein, 178 aa, Zea mays
  Coding DNA Sequence Number=SeqID_14697
MVLCICSYMLLVDSGLAITCLKLSLITLMEFVPPMSLYRIIYEFSPPSSSGLFSNFSGVHLGDLSDPETFDYLQHAQARQGGQQAATSRSTTSSHPMGMDKCNANSVDNDNVHKAGMVMNGLPISVYASETLGFGTYTCDACAMSCTLKWDVATAMEYKGLPLQQAVDYYVRGTMQNI

SEQ ID NO: 58073 - protein, 419 aa, Zea mays
  Coding DNA Sequence Number=SeqID_14698
  Gene Ontology: Mol. function=binding; Cellular component =intracellular; Biological process=embryonic development ending in seed dormancy
  Homolog annotation: Hit_ID=Q94DI0; Match level="QueryCoverage=90%, HitCoverage=62%, E-value=1e-127, Identity=48%"; Hit description =Pentatricopeptide (PPR) repeat-containing protein-like
  Pfam annotation: Domain name=PPR; Domain location=219-253; Score =15.0; E_value=0.13; Accession=PF01535.11; Description=PPR repeat
  Pfam annotation: Domain name=PPR; Domain location=254-288; Score=3.9; E_value=2.7; Accession=PF01535.11; Description=PPR repeat
  Pfam annotation: Domain name=PPR; Domain location=326-360; Score =10.4; E_value=0.45; Accession=PF01535.11; Description=PPR repeat
  Pfam annotation: Domain name=PPR; Domain location=361-395; Score =36.0; E_value=1.3e-07; Accession=PF01535.11; Description=PPR repeat
  Pfam module annotation: Pfam domain module=PPR::PPR::PPR::PPR; Domain location=219-253::254-288::326-360::361-395
  Subcellular localization annotation: CTP_CleavageSite=40; ConfidenceScore=5.57e-01
MAAVPFPAQGTPKPPPPTAALPPLRRLLALRGHRRLLSTPAASSNNRLSPEAVLYNIHSLSKDPSQALAVFRRSVAAGQPVGSAAYNLMLRTLASHPSAQRHFWPFLREMQEAGHSVDQGTYLAALASFKKASLTADYASLTAHYDKFRKGAKSATAAAEAVRDHDAAGLDSRLSAIGLLPLTETSVTTVLRELREHPIKALAFFRWAGRQQGYTHSSVAYNAMARVLGREESVPEFWDLIRETKAAGMHVDIDTYLKLSRNFQRRHMVREAVELYELMMDGPFKPAQQDGPIIIRRISMGPSPDLELVNRVVNKFEAVWGVKTKELLDGVHRALTRNGMFDEAAEIVQTMKAQGHQPDNVTYSQLVYGLCKADKLEDARKVLDEMEAEGIHMSMSRLFNLEKFAIMEILTCGFDVLEA

SEQ ID NO: 58074 - protein, 275 aa, Zea mays
  Coding DNA Sequence Number=SeqID_14699
MNKTPALKVSLQTELRFHLRRYEQPHTIGGPAEQQKADGWLAAARSNSDDDDFCSEGPNSSSDDLRADAAAIRPSPMSSLKRQGRAEGRRVGGQSVGGTGYLIGGETSSGCRGGRWRQKRLRSRSGRRAGHVAAASAANGECPSPRSLREGAGRCPRRDRPQLGALPSPALMMNILEAEGGAEAVARLASPHPEAGGHRLGDRERGIPRKGSFSVKERAPSPPTDQRFEGWPLGGVQQPPQSARAPRPLLVRGSKAGPSEGFNGRLRPLGLRAHY

SEQ ID NO: 58075 - protein, 342 aa, Zea mays
  Coding DNA Sequence Number=SeqID_14700
  Gene Ontology: Mol. function=DNA binding; Cellular component=nucleus; Biological process=regulation of transcription
  Homolog annotation: Hit_ID=Q6PT61; Match level="QueryCoverage=61%, HitCoverage=92%, E-value=2e-68, Identity=65%"; Hit description =Induced protein MgI1
  Pfam annotation: Domain name=Myb_DNA-binding; Domain location=241 -291; Score=47.2; E_value=5.9e-11; Accession=PF00249.22; Description =Myb-like DNA-binding domain
  Subcellular localization annotation: CTP_CleavageSite=60; ConfidenceScore=5.28e-01
MYDKLWRRHRLDAVQSGCSALSIVKQGTSWSSPTSMTLGLFWALHSTTTPSRRLAHRPPEAQPATQESSVLGMSRAFDDYYIEDRGIILAPEVTQRKTDNNDQFVILATIGVGWVGAGSSERRMGEEAVDDYELHMVCYGSDEDERVMEWESGLPGADELTPLSQPLVPPGLAAAFRIPPEPGRTLLDLHRASEATVARLRRAPPSSPGTSSSPHGHQEARGGEGADSAAATTTNSNRRPRLVWTPQLHKRFVDVVAHLGIKKAVPKTIMELMNVEGLTRENVASHLQKYRLYVKRMRGQGPSPSDHIFAPTPVHGVAVGMVPMVSGQAYHYLYNGGGGGDR

SEQ ID NO: 58076 - protein, 204 aa, Zea mays
  Coding DNA Sequence Number=SeqID_14701
  Homolog annotation: Hit_ID=UPI000019B7EB; Match level="QueryCoverage =74%, HitCoverage=61%, E-value=6e-07, Identity=28%"; Hit description =Nuclear ubiquitous casein and cyclin-dependent kinases substrate.
DEDANERATYDKKETTKKGNVVIEEIVDEFKDEEEKNEILVSTQDSGIMFGSQEEVDQKEEAEKDMRNPKNKKQVEEKMCAKKEDRRVSERLKKDAGIRIEKKNRRIAAKRNLEELEKDKGKEAAPYMQDDHGSNSDFLYNEEGSESDGFIIVQSRKKKREKRLGIKISPIGKGQENPDPNRKKTKGAGKIPATNEKQTSKGVK

SEQ ID NO: 58077 - protein, 68 aa, Zea mays
  Coding DNA Sequence Number=SeqID_14702
MDTAAAVLLLLALVVVLLWYPLVLPALPPSPPALFVWIPMLMLLLLFALPFFPAARRRITATTMQLDS

SEQ ID NO: 58078 - protein, 563 aa, Zea mays
  Coding DNA Sequence Number=SeqID_14703
  Gene Ontology: Mol. function=ribonuclease H activity; Biological process=DNA integration
  Homolog annotation: Hit_ID=O48967; Match level="QueryCoverage=54%, HitCoverage=98%, E-value=4e-57, Identity=50%"; Hit description =Putative uncharacterized protein
  Pfam annotation: Domain name=Retrotrans_gag; Domain location=395-486; Score=-1.5; E_value=0.076; Accession=PF03732.8; Description =Retrotransposon gag protein
MAVGEGFCRMAHRTVRCATGHYPVRQPRHQAVGFRPLELLTTGPPDSLVAHRTDDHWCEVAVASLAHRTVRLRASWRQEIAQALLALVAPVKVAFSEITLSSPEDAGPLCARPGPPNASPPLGQGSNAATWLIVRDVGQRTARDVRALSRAASAFIAERTLRLSTLLTDDVPPRHLLCPILSTGRRRQGHPTDGAPVQSIVKTVRLCYAVHCTHPLYEKLPPARRDLGMMVQIVEHRVETLVDFVVEEEAASSTPQGVAASPPSSTASPGAMKQWRDDVDRLLSMAHSTSTRSRPRSSRCQHEASASVRSPSVRGAHTNDLLAELNRRRAGEDARVSLERARERRQNFEGHDDARVSLERAREHRQNIEGRNLDQDFVVVAPQTPMGTRSQAGVPLASVGCAALANHLRAASWPPKFWATPAGKEELCARFVANFASAYQQHGVEAHLHAVRQEPRETLRTFISRFTKDGKKKKKKDRDFQRSRSTALVIATATGGWGDRNKRPRPQRGNNGPCPVHPNGRHSAAECREIIDLVKPKRDLGYQSPEGDLKEVFARGSYSGGNN

SEQ ID NO: 58079 - protein, 565 aa, Zea mays
  Coding DNA Sequence Number=SeqID_14704
MPRFSCIHRALLPSEPLDEARRCSLGGSTSGSPSPAVSPPWSSHSSFLARWCCRSCLLAAIGGAQPHGGWRSSAIARLQGFSSCSPAAVSRQWSSIRMTTILVVERSKPGCSLPPTLSFKDVHHPHWGGRRAESGPCPPHGLVTRFFLQHLEKDVHQPCGGGKPRLRGAGWLQVVSCSVSGSLARMALVPPPMLPPTVKWSVVVRPAHGRRSRRAQEDGGEDLSARAEAFVVAGEPPVQRWPLLRMGARTSSQWRVHLGIHHRCYAVLEDSEGTAAANFQRDSTLASGSLYLQSRDGTRIPLEGGCNTFAFCKTNRPGLRGQTSPGWCTRVCYLVTKGKEIRPLRLAPMDSTYRDAPAPDGGTPSVVAERSPSGQRRGGEPSLEDCSCRSLTRFTRSMISRHSAALWRPLGCTGHGPLLPLCGRGRLLRSPQPPVAVAMTRAVDRDLWKSRSFFFFFLPSWGTAPEPHDWATLVCGTKCHARPSAALAHLSARAKSVGTVSTSCVANFSNIFSSRNPYRNAVMMEASEMRGIVPRTLVKREMNVRRVSLGSCLTAWRWASTPCCW

SEQ ID NO: 58080 - protein, 46 aa, Zea mays
  Coding DNA Sequence Number=SeqID_14705
MAVMGSTSEKMYLCQVKKRQTFVVSVPRWSQKKKTKNRAAGGRVPP

SEQ ID NO: 58081 - protein, 252 aa, Zea mays
  Coding DNA Sequence Number=SeqID_14706
  Homolog annotation: Hit_ID=O48967; Match level="QueryCoverage=27%, HitCoverage=14%, E-value=5e-15, Identity=62%"; Hit description =Putative uncharacterized protein
MDRSEAATCPEKVIYSKASTVVRTPTGERRTPGYTVRTPRVGPGPPGLVPDLNVCKPDPWNGIRTPSYGVQAAHSGVPRRRPDAATWPTARDVNQWAEPDAATCPFSRRRAYPFHWQAACHTATCTTPIIARVPSVMFLCPHVRAQHPWRVRSTTRPEISSPTFGTPVRGLGFRFLVVFLLDTMVYIVEHHDFIPEDFPMEEEAASSTPRASNRPAPGAAAVHMAQQHTSAQSSWAPSRAAPGALFATRELL

SEQ ID NO: 58082 - protein, 218 aa, Zea mays
  Coding DNA Sequence Number=SeqID_14707
  Homolog annotation: Hit_ID=A2WZ82; Match level="QueryCoverage=79%, HitCoverage=39%, E-value=6e-57, Identity=61%"; Hit description =Putative uncharacterized protein
MGTGNRVLYKLALVPLREYPFFLAQFATFGYVVVYFSILYLRYQAGIVTDEMLSLPQKPFLVVGLLEAFAAAAGMAAGGSLFVKTYLVWQLLLSAIFLKRRYRINEIAGCFLVTVGVIITVARQEIIFLDASKKLKCGSVDLFVVNSYGSAYQSFKNLCLCKFRCPSTLSPYHCRISVWHHLCHLALLRVQQYSPLAYYCTAYHRHDILEILFHNKND

SEQ ID NO: 58083 - protein, 451 aa, Zea mays
  Coding DNA Sequence Number=SeqID_14708
  Gene Ontology: Mol. function=aspartic-type endopeptidase activity; Cellular component=extracellular region; Biological process =proteolysis
  Homolog annotation: Hit_ID=Q8RYK3; Match level="QueryCoverage=79%, HitCoverage=80%, E-value=1e-152, Identity=75%"; Hit description =Nucleoid DNA-binding-like protein
  Pfam annotation: Domain name=Asp; Domain location=106-447; Score= -129.5; E_value=6.1e-06; Accession=PF00026.14; Description=Eukaryotic aspartyl protease
  Subcellular localization annotation: CTP_CleavageSite=64; ConfidenceScore=5.63e-01
MSPLRLSVLLVLLSSLLAPSTALRSSTLLLARSPQSVSLSAVPGTPVTAWAATLAAQTASDAARAATLATGPRDPPPASAVDAAKKGPRRSFVPIAPGRQLLSIPSYVARARLGTPAQALLVAIDPSNDAAWVPCAACAGCARAPSFDPTRSSTYRPVRCGAPQCSQAPAPSCPGGLGSSCAFNLSYAASTFQALLGQDALALHDDVDAVAAYTFGCLHVVTGGSVPPQGLVGFGRGPLSFPSQTKDVYGSVFSYCLPSYKSSNFSGTLRLGPAGQPKRIKTTPLLSNPHRPSLYYVNMVGIRVGGRPVPVPASALAFDPTSGRGTIVDAGTMFTRLSAPVYAAVRDVFRSRVRAPVAGPLGGFDTCYNVTISVPTVTFSFDGRVSVTLPEENVVIRSSSGGIACLAMAAGPPDGVDAALNVLASMQQQNHRVLFDVANGRVGFSRELCTA

SEQ ID NO: 58084 - protein, 472 aa, Zea mays
  Coding DNA Sequence Number=SeqID_14709
  Homolog annotation: Hit_ID=Q5GAU8; Match level="QueryCoverage=30%, HitCoverage=96%, E-value=2e-50, Identity=69%"; Hit description =Putative uncharacterized protein
  Pfam annotation: Domain name=zf-GRF; Domain location=34-78; Score =7.5; E_value=0.0038; Accession=PF06839.3; Description=GRF zinc finger
MYREALWQKRGRPRELYPDVSSKDAPVPPELPVPNCDCGRLAWVHQSQHPDTAARCYYLCGTLDGHERCFFFQWIDGPDKFDPRYLLFVNWLSGKTSHERFKRWVPPPPNPPPMTDEEKEVATERRMDSPPRCDCGDRAVIDEDYDKQFCCPNIDYPYGWQPEVKEKRYMGWAAEEVKFDPVLCKCGIEAKYGLVPSELGVGYFCGHMVDYDEETRKCSWESYDDKGEVMRTIESKRIMGQKMCCGSRLVDSYINDRIRDMRREAKSAFYDSPKRAEYRRLKAADEKRAQDAREWEAAQAEKQMLDNLADRLKGKIGSGVNYLADEAHARYVQDKMATVELMEEEDDDTSRLSELIALAEAGLHEEEEDDMSRLSELIALAEAGLRAQEEEDEFLSQAAAEVEAAYYKKKSDEAEAEDELFSQAADEAEANYYKRTGDKCDAGQCSKWNEVVVEDCATDDSEDELLIDCDSD

SEQ ID NO: 58085 - protein, 151 aa, Zea mays
  Coding DNA Sequence Number=SeqID_14710
  Gene Ontology: Mol. function=calcium ion binding; Cellular component =flagellin-based flagellum; Biological process=ciliary or flagellar motility
  Homolog annotation: Hit_ID=A2WZ80; Match level="QueryCoverage=96%, HitCoverage=97%, E-value=2e-41, Identity=60%"; Hit description =Putative uncharacterized protein
  Pfam annotation: Domain name=efhand; Domain location=10-38; Score =32.0; E_value=2.2e-06; Accession=PF00036.23; Description=EF hand
  Pfam annotation: Domain name=efhand; Domain location=124-151; Score =25.7; E_value=0.00018; Accession=PF00036.23; Description=EF hand
  Pfam annotation: Domain name=efhand; Domain location=47-75; Score =17.6; E_value=0.047; Accession=PF00036.23; Description=EF hand
  Pfam annotation: Domain name=efhand; Domain location=88-116; Score =10.8; E_value=1.3; Accession=PF00036.23; Description=EF hand
  Pfam module annotation: Pfam domain module=efhand::efhand::efhand::efh and; Domain location=10-38::124-151::47-75::88-116
MAPAARAPSEFSRVFSALDRDGDGKLSAAELRACMRAALGEDVSAEEADRLVASADGDGDGLLSQEELLALAGTTAAEEEEEEERRRGLREAFRMYAVEGQGCITPLSLKRMLARLGSHQDVAECTAMICRFDLDGDGVLSFEEFRVMMDA

SEQ ID NO: 58086 - protein, 399 aa, Zea mays
  Coding DNA Sequence Number=SeqID_14711
  Homolog annotation: Hit_ID=Q5JJT2; Match level="QueryCoverage=46%, HitCoverage=46%, E-value=2e-45, Identity=50%"; Hit description =Putative uncharacterized protein B1139B11.20
MERGEDIIEEKQAGGAATSDERSSSQKVADGKGAEPPAAGVSNRLKPSDDAEKLVAFMEDHYDDVVARVQSFDEFYHAIFELIEMFCEERGQLQYRLAEKKALEEAYNKHHRSDGKVTKEEFEAMSREVVKAGSFRVGKASLELGALLFGAPACALLAKRILPGLGWLSDDVVVPLATSGSVAYLIKSKRLFCPPRFSQKPPAYRKRKATRSTCPLEVGRVGGLEHTPLCSSATFLSSSQGFARAAATPSARLDSSRIATRRQGCTPPVSELLVFAADSIADKAIGRMQEIADKIFSVARETIRPGRGLTSFDATKLRVALEDIACMLEQDSMVLQENLDNVNNVNNQGNSSYEPSALSSPPPADDDLSPDWDFAEHFENFRGLEYDSDQMPSFSDNEV

SEQ ID NO: 58087 - protein, 141 aa, Zea mays
  Coding DNA Sequence Number=SeqID_14712
MGAPDSLVFHRTLSEPARYNSPDYPVYTGQCPMLQEDATLELGSLGNSQRLLRYNSPDMSGVHRTVRCDIKATDTSAPTVTCSALNARQRTQKSGTPMLAHRTLYSTCRVRHRTSRRAQKSELQRSEPNGFGDVAGAPDMS

SEQ ID NO: 58088 - protein, 202 aa, Zea mays
  Coding DNA Sequence Number=SeqID_14713
  Pfam annotation: Domain name=IQ; Domain location=113-133; Score=23.0; E_value=0.0011; Accession=PF00612.18; Description=IQ calmodulin -binding motif
  Pfam annotation: Domain name=IQ; Domain location=71-91; Score=25.0; E_ value=0.00028; Accession=PF00612.18; Description=IQ calmodulin -binding motif
  Pfam module annotation: Pfam domain module=IQ::IQ; Domain location =113-133::71-91
  Subcellular localization annotation: CTP_CleavageSite=48; ConfidenceScore=5.27e-01
MDRRSMTPGISSRLSSPPPAAHPSPPLPPFAAATPSHPLSPTLDAFTRLEEKWDQFVVMFHRYKEKTEKELQAAVRLQAAARGFLARRQVQSLRGEKHLAVASRATPWPSSHEQVVVRLQAAVRGFLVRRAVRKLHLLISSSLHQLAACAPNHQVSSILFESPAEVKIWLEDELVLKGGGDVMGIIGSERQQPGWDKAREQD

SEQ ID NO: 58089 - protein, 71 aa, Zea mays
  Coding DNA Sequence Number=SeqID_14714
MAVGPVDMEPTGFVPDGYGYELKNSPVDHVGSGTRNTSGRVQVEGAVGSVITPKYILNRVGEVWGDRLEKA

SEQ ID NO: 58090 - protein, 292 aa, Zea mays
  Coding DNA Sequence Number=SeqID_14715
  Gene Ontology: Mol. function=nucleic acid binding; Cellular component= nucleus; Biological process=mRNA processing
  Homolog annotation: Hit_ID=Q84L59; Match level="QueryCoverage=38%, HitCoverage=28%, E-value=2e-13, Identity=36%"; Hit description =Polypyrimidine track-binding protein homologue
  Pfam annotation: Domain name=RRM_1; Domain location=48-115; Score =10.7; E_value=0.015; Accession=PF00076.13; Description=RNA recognition motif. (a.k.a. RRM, RBD,
MAWEIGARDYGGLSSDLGRGRNLQNGARKLFGEMPKSDWRSPSRVLEVTIRQVRYPITESMVRVVFAPYGKVEHVHMFGDSDHVLAHVVFETKDEAAGTFGDLHGRNIYDGCCELNIQWGASQDHSNANIDKSCYDHVSSYSSIVKVHVPVTNLANATVSATNDVPGITNIMPSLVLAEGPSVNHVKAASDDINSDKLCVKVAASGAQAVVADVALVPATPTTSLATLTSPPKSVNDDCKSNNDVAMPRLYAAMLHDITKLIKPLPVVVRVVSSTPPPAPLGIQLVFDGMPS

SEQ ID NO: 58091 - protein, 327 aa, Zea mays
  Coding DNA Sequence Number=SeqID_14716
MTTSLVVGRSKPGYGLPHALILKDVHHPRWGGGRAESGLHLSRGLAARFFLQHSGEKGVRQPYEGGKLRLRGVGRLRHRQLPHVWLLGLGGFGAASGAASCRLDGAWLSIHRTGDGRAVRGSVTSTASPAPLAVLGGHTRHHTPRGWQRRSWMVLSSLRGMTGAKTSSRALRQPPSTGAEVAAVVGTEVVAAAEVVAVAGDPSMQRWSPPLVELSGASFQRDSCWLTVWDQVERLHGFRTPQETSARSSEPDLQVLGHPPQSGRACRTTVRDQAERLHGSGPLQETSFLVWDQAKRPHRLRTTQWNGFPFFRTAPRLSGPPAFAKRS

SEQ ID NO: 58092 - protein, 380 aa, Zea mays
  Coding DNA Sequence Number=SeqID_14717
  Homolog annotation: Hit_ID=Q6QP51; Match level="QueryCoverage=15%, HitCoverage=30%, E-value=6e-10, Identity=56%"; Hit description =Putative growth-regulating factor 1
MARVCLGLSGCKKHALQDNPILQARILTAEGSSSTLGVDYTFGEGLLQESGSSRWLGWSPRGLGQLSPEYIRPARGLGRSTPASVLLTDDLARLRPTKSSFRANSASVHADTATPGFGSSKSDRGVPLTKQEKPRIARPTEPRDSYASGIRIPHSSPLHGATHAWYEQPPHRGACGATSSRQLAGDLCSGSHGPRTDAATRRLSFASSLKGCEPAIKAKERAALKRIGSSPSPTWLEDVSSAELEDGLHHQKLEEEVASRPAREVEPRLASLSTPTRMMNILEAEGGTKIAARLASPHLGAGGHHLGGSERRFAFAIMTASKKALSLPTDQRFEGWPLGGVQQPPQSAWAPHPLLVRGSKAVPSEGFNGCLRPLGLRAHY

SEQ ID NO: 58093 - protein, 93 aa, Zea mays
  Coding DNA Sequence Number=SeqID_14718
MGRWLLHGWLLAQMLAAVHVPGMRKKLLLVVSVYALFARDVLVVACWFIYVCLLVLVRLRFALRLDRDLFPHFEESKIKSWRPSDLVLRVLRD

SEQ ID NO: 58094 - protein, 67 aa, Zea mays
  Coding DNA Sequence Number=SeqID_14719
MGSRHSACSAEAECRGSFVLLLLVTLLRGEVEWESRLVGKLCDLCRGLETDISAVLTVMSGLEILFD

SEQ ID NO: 58095 - protein, 112 aa, Zea mays
  Coding DNA Sequence Number=SeqID_14720
HPRRTALRPAVIYHIAQISVARLGASVAREDFAKSPATTSKRPRAHAGSTAKAHHHRRVRFLASSSHSRISRKPEPPLRRLLAGASLSYPPRSSSSSFLPSQPGHEPPLGEA

SEQ ID NO: 58096 - protein, 398 aa, Zea mays
  Coding DNA Sequence Number=SeqID_14721
MGSHDPRAKRESQLMGKVCEYFLSEEVVHIATTAQEKDEVVEGDFQEFQDYDEFLAEGSICHTDRSEQTEEGVEIDSKPRRHLDPIPGHRELSIGIGARPLQCGLSHPEMTMSSQEACNILADSLSRGAYFSIMSSDNDLFVNAHDLWTTIKIKYFESNCATSTPYVACVETKYDDEEEYEDDSKDESSSPQGTFSCIASTNNNDRENETDDVEKEEIRRLYTHLNKEGKMLLVKLLRRNKEQGETLLRLEETLIKTNDSLEKITKEHEELKCSHDNLVQRELVDDHIMLNIAHKLKYYHVLTSTAPKKGQSLIEKQVVGSKRKLLGNKKQRQLRRRRHAQLPQDIDKHVLNKLEEGGTAARVKLREKEAPKAISEAINMNKEKEQKEKRKKEVLQVQ

SEQ ID NO: 58097 - protein, 195 aa, Zea mays
  Coding DNA Sequence Number=SeqID_14722
  Pfam annotation: Domain name=DZC; Domain location=98-133; Score=9.5; E_value=0.018; Accession=PF08381.2; Description=Disease resistancezinc fingerchromo
MDFGYGMPEPVGKMKLCLYVVCCSCVLLMGSMFLLGMLSAELLLNLLISGTSFVTYFGFEQHGHNIADAKKDDPLGLQHLALCHARYRPNDNAVEYGDNKNYLCRNRFNEYFDDAWVEQTWWADNCDCVIVQHKHPSRDVDYDDEDLAAPVLHANPRTTSTNETKLKHPLHSDSIVLGFPTISEFWGAASVLFRS

SEQ ID NO: 58098 - protein, 24 aa, Zea mays
  Coding DNA Sequence Number=SeqID_14723
MAYCALRDYLMGPFCRRRMQVAGK

SEQ ID NO: 58099 - protein, 164 aa, Zea mays
  Coding DNA Sequence Number=SeqID_14724
MANLMVFLARRVADEDVRSTLVGRNRSAKLSTTCSGHPSVQERGAETGARDDETFVGLGSWTTVVSGGAGTSLARDGHGGRLLVEETMRRGRVRARRGQRERVECAAQSRARRPRVQAPATWRTRSARTADASETKRGAQSIAHFSCFVPLSTGYNFSIVIRVV

SEQ ID NO: 58100 - protein, 42 aa, Zea mays
  Coding DNA Sequence Number=SeqID_14725
MAYVTEQRRKGKEEAKALSRHQASYQKALLRPFPTSQVMIAR

SEQ ID NO: 58101 - protein, 458 aa, Zea mays
  Coding DNA Sequence Number=SeqID_14726
MESHDLRAEWESRLVGGYEIDGFGYDYGAASPLQPNRILAEYVDVYSPLLYTPNPPQVVSIATTAQEKMKLWKETSRSSKITTSSRCGLAATPSRLPVKAALSTFLFRTLIYCKTYMDVSDMARLRHTARKSVIPFLPSRLAERPLRRPVAGQSSHLERLHHRLREEQERRRQEQRSSSLSLHQEIESVRSCSPVLPLEPPPAPPLGAPASGVAAGGDPDDGGGDDSSSHDTDFSANPEPEGWVARPITRDAARGCHFHDALDTLLRRAFDRHTWSVEYRCVVYQHSRGVYPDRWEATCLVRCPEDSLQGAEACSEHYSISERDSAEAAMQDAARRALSHYCSVFGGAADGLDLKYYPRRSSGSTGGVIVSPVGEGNPRLSSTVNLAAVLNTELDHALDELSRARAEIALLRAERAERRFLDGGSPAPVGTQHPYRSPQRGHQSYGNPACKTKINLEP

SEQ ID NO: 58102 - protein, 213 aa, Zea mays
  Coding DNA Sequence Number=SeqID_14727
  Subcellular localization annotation: CTP_CleavageSite=63; ConfidenceScore=5.13e-01
MVEAPWVRYLSQKYVPMLTWAATTTAPPLAHISGIFGSKSASQQTRVIRRLIQRRRCKQESFGATTKSETDLKMKRLFRPRQITIELLPSVKGMNHLRTSPQQLVNTISTKLQRPDGRNAGQSSVRSRDTISPRPSSASGRNSRPRQIHASPEGLLKQRAHLRLAQAPAQAGFAVKQPWPDRLANRPNRRSIQCKDRLTPYPVARSSVDRGRK

SEQ ID NO: 58103 - protein, 107 aa, Zea mays
  Coding DNA Sequence Number=SeqID_14728
MTGKKTTTSSDGGTPKKAKVVVEDEEEAGLEDEEEATVTLSVEKDALECDICCLPFQSKVFRGRRITMHVYIQYILIGRLQHDALLCVKSVQERAFWMCKVLQPKCA

SEQ ID NO: 58104 - protein, 200 aa, Zea mays
  Coding DNA Sequence Number=SeqID_14729
  Homolog annotation: Hit_ID=Q6QP51; Match level="QueryCoverage=24%, HitCoverage=22%, E-value=3e-15, Identity=81%"; Hit description =Putative growth-regulating factor 1
  Subcellular localization annotation: CTP_CleavageSite=28; ConfidenceScore=5.02e-01
MQAACNRTTGRHPFDFDASSMESQAHTSCNRRSGYYVRKTAPPLTPMLSLLDCRTGAAIRGNPAHGPTVPAKHNVHGSVSRGRRRDGRYGQKWADNNGGNRRAEVAVKSSAGSRPLLEQQESPLPRDRERGYSERDPSLRRKRTPSPPTDQGFEGWPLGRVRQPPQSTRALRPLLIRGSEASPSEGFDSRLRALGLRAHY

SEQ ID NO: 58105 - protein, 41 aa, Zea mays
  Coding DNA Sequence Number=SeqID_14730
MDVLMIRYLGEDQQALGKGQGISHRGKVIRVSWVITNGAVV

SEQ ID NO: 58106 - protein, 51 aa, Zea mays
  Coding DNA Sequence Number=SeqID_14731
MPRRPDASARVKNVGTHVLKVKNVGTVELNGQPSPTQARPISSTATWPRRT

SEQ ID NO: 58107 - protein, 289 aa, Zea mays
  Coding DNA Sequence Number=SeqID_14732
  Homolog annotation: Hit_ID=Q6Z2B3; Match level="QueryCoverage=70%, HitCoverage=74%, E-value=2e-19, Identity=46%"; Hit description =Putative uncharacterized protein OJ1034_C08.30
  Pfam annotation: Domain name=DUF313; Domain location=90-224; Score= -25.0; E_value=0.027; Accession=PF03754.4; Description=Domain of unknown function (DUF313)
MHQQMCLADAKRSLEIVVYDRAFAESQQRANKRARQDEAAAKSSSSLPEEAMASASAIVPYVGAVHDIAPINSIVVPPSLRPPPPAAGGREEPPCLRRHFLEALGLRADLPVHFIHDKRMSKTDLDGHQSRFRIPRDGVERHLRPILSPQELDAANLLEGPRRRPRRQEPGPSEPQDGNNRRKTSKKKGKAHGGLPVMLVDLNAGAKELRLSRWDSSQGTIVKGEGYLQFMRQCTFKEGDDVAIWAFVQRRFRLFGVDMCHDSLLHLLVVKKQDEARCRVCRAPAQPES

SEQ ID NO: 58108 - protein, 260 aa, Zea mays
  Coding DNA Sequence Number=SeqID_14733
  Gene Ontology: Mol. function=unfolded protein binding; Cellular component=myosin complex; Biological process=tubulin folding
  Homolog annotation: Hit_ID=Q8H291; Match level="QueryCoverage=51%, HitCoverage=36%, E-value=2e-58, Identity=80%"; Hit description =Putative ATP/GTP binding protein
MTHSPVHEGDNHPDHAGVKDWRSTPKNSSPREDLWLSAFPVGTEWENIDKIKEFNWSFENLEKALEEGGELHGKTVYLFGSTEPQLVDVNGESKIVLIPIVVAVDCPFPPSDKIGINSVQRENEEIVPMKAMKMAWVPYVPLEDRLSRIDSLKTKIFTLGCTQWRPDDRKGTYQIEPSRQAMGSGDGAWRGARAPASLRRIEVASSWTCGWEQAGGGGGGWSGGRLAVAECARHEREGRAECGAAGFGRTSGCGRPRWTI

SEQ ID NO: 58109 - protein, 123 aa, Zea mays
  Coding DNA Sequence Number=SeqID_14734
MSKAGARITYVEWPREREAEDRLEGGGASWPCPFSAGGTLLLNPEEEGTLLRPAPAPPSISRLAPPAGGSEGLRSATALIRGGERRAGGTLFLSLPRIGSAPDRLGTGGRRRPETGAKVAARG

SEQ ID NO: 58110 - protein, 660 aa, Zea mays
  Coding DNA Sequence Number=SeqID_14735
  Gene Ontology: Mol. function=catalytic activity; Cellular component =ribonucleoprotein complex; Biological process=metabolic process
  Homolog annotation: Hit_ID=A2WYI2; Match level="QueryCoverage=58%, HitCoverage=76%, E-value=1e-174, Identity=81%"; Hit description =Putative uncharacterized protein
  Pfam annotation: Domain name=CBS; Domain location=18-152; Score=71.4; E_value=2.9e-18; Accession=PF00571.19; Description=CBS domain
  Pfam annotation: Domain name=CBS; Domain location=203-308; Score =35.6; E_value=1.9e-07; Accession=PF00571.19; Description=CBS domain
  Pfam module annotation: Pfam domain module=CBS::CBS; Domain location =18-152::203-308
MALVAVKPPLTGERTVKRLRLSKALTIPDHTTVHEACRRMASRRVDAVLLTDSNALLCGILTDKMFPVSHCTLYFGNAGQDITTRVIARELKMEETLVSKVMTRNPVFVLADTLAVEALQKMVQGKFRHLPVVENGEVIAILDIAKCLYDAIARMERAAEKGKAIAAAVEGVEKHWGTAVSGPNNFIETLRERMFRPSLSTIISENSKVVTVVPSDTVLTASKKMLELKMSSAVVAIESKPGGILTSRDILMRVIAQNLPPESTTVEKANTPILDALHTMHDGKFLHLPVLDRDGNVVTVVDVLHITHAAIATVGNSGAAGSESTSAMMQRFWDSAMSIGPLDDDDDSTRSEGSTKVASEAADIGRSALFPASALSNTFGFKIQDKQGRMHRFNCDAHRRSSLQSLRLHLDYARRKRGDGSSDFEYAGKDAWASAYSAVAAGAALVAGLGVMAYLKRSGHFAAPLTGLKEDSARLRRSDCCATRRVRLTAAKSGLRRHRKLRFTRPQGSDSGSAPEDDELRIARPQGSDSGSAPEDDELRFARPQGSDSGSAPEDDELRFAQPQGSDSGSAPEDDELRFARPQGSDSALASADGLCLARPRGSDSTSASEDRLDLDLGGASTSPNPGLGPTTSQEAPSLPYPKLTQATGNKTGVPSGSPQ

SEQ ID NO: 58111 - protein, 233 aa, Zea mays
  Coding DNA Sequence Number=SeqID_14736
RLRVWRLSERLRCAGKEAGAVAAARCAGKAAGVGRGRKLHVVCSIMAILRTRFCIGLLPAPVPPTLLKIVMAAWRRCWIKLTWGIRCRCGACSNFLVAGPLQTAEGLAYAVAVAVAADAALDWLVLPVRQLAAPCTDGPPSACCRRSKQNGRRAACPGQAPGSQASGDQLGRMTDPARTLSPTHDCAVGTRHWQWQWQCQRALCGTVVTRTRISEGVGVDKGAARSAGTAARA

SEQ ID NO: 58112 - protein, 1031 aa, Zea mays
  Coding DNA Sequence Number=SeqID_14737
  Gene Ontology: Mol. function=transferase activity, transferring phosphorus-containing groups; Cellular component=membrane; Biological process=two-component signal transduction system (phosphorelay)
  Homolog annotation: Hit_ID=Q76H00; Match level="QueryCoverage=100%, HitCoverage=98%, E-value=0.0, Identity=88%"; Hit description =Histidine kinase 2
  Pfam annotation: Domain name=CHASE; Domain location=124-348; Score =242.7; E_value=8.1e-70; Accession=PF03924.4; Description=CHASE domain
  Pfam annotation: Domain name=HATPase_c; Domain location=558-722; Score=116.9; E_value=6.2e-32; Accession=PF02518.17; Description =Histidine kinase-, DNA gyrase B-, and HSP90-like ATPase
  Pfam annotation: Domain name=HisKA; Domain location=409-474; Score =91.2; E_value=3.3e-24; Accession=PF00512.16; Description=His Kinase A (phosphoacceptor) domain
  Pfam annotation: Domain name=Response_reg; Domain location=887-1021; Score=92.9; E_value=9.9e-25; Accession=PF00072.15; Description =Response regulator receiver domain
  Pfam module annotation: Pfam domain module=CHASE::HATPase _c::HisKA::Response_reg; Domain location=124-348::558-722::409 -474::887-1021
MEEKGDAPGLGFLGLDRMRVLLPPLRLPEKLSARALRTHLFTNYRMRKVRDSSSWLIPLWVLFWVLLASVICLWMSNQAVAKRRESLASMCDERARMLQDQFNVSVNHLQALAILVSTFHHSKTPSAIDQTTFARYAERTAFERPLTSGVAYGVRVTHAEREQFERQQGWSIKKMYSSKTKKQSQGPGNAEDAEVREPAEEYAPVIFAQDAYKHVISFDLLSGADDRDNVLRARESGKGVLTAPFKLLNNRLGVISTYAVYKYELPPNARPQERIQAAIGYLGGIFDIEALVDKLLHQLAGKQSIMVNVYDTTNDRRISMYGSNDTGSGMCQVSTLNFGDPSRKHEMHCRFIQSPPWPWMAITTSIGTLVIALLIGYIIYATAKRIARVEDDFQEMSVLKKRAEDADIAKSQFLATVSHEIRTPMNGVLGMLQMLMDTDLDTTQQDYVRTAQASGKALVSLINEVLDQAKIESGKLELEAVPFDLRTVCDDILSLFCGKAQEKGLEVIKDYNHAVTHCTFTVFYYKCTDFILVIPYYDTQREQLAVFVSDQVPQALIGDPGRIRQIITNLVGNSIKFTEKGHIYLTVHVVEEIMNCLEVETGTQSANTLSGYPVANRKRSWENFRVFSRELNSSEMPFAPIASDSISLIISVEDTGVGIPFDAQSRVFTPFMQVGPSIARIHGGTGIGLSISKCLVGLMRGEIGFASKPQVGSTFTFTAVLTRAHSSRNENKSSEFKGINALVVDHRPVRAKVTRYHLQRLGVQTELTTDLDQYISKINCGSQIAKLVLIDKETWLKESHSMPLLVTKLRNKDQPDSTKLFLLENPKSTAKSNSHIFREFNLNVIMKPLRASMLQVSLHRALGGIDKLHCRNGVLGNSTLGSLLHKKRILVVDDNIVNLKVAAGALKKYGAEVTCADSGKKAITQLKPPHSFDACFMDIQMPEMDGFEATKRIRVMERDLNEQIERGEAPPECAGLRQWRTPILAMTADVIQATHEQCLKSEMDGYVSKPFEGEQLYREVARFFQNQDQVQ

SEQ ID NO: 58113 - protein, 130 aa, Zea mays
  Coding DNA Sequence Number=SeqID_14738
MADSKDLNSASPNSNTRLTNLSAAERERLKDDMKKIDEEVQRQADQVLKVADKWFLSHFRVDCHQKAVQEREINAEYMSAVLQQLPTIGDARRQNNCAKYIGNKWVSPAIFWYADGLISRTSVTTIFAKW

SEQ ID NO: 58114 - protein, 163 aa, Zea mays
  Coding DNA Sequence Number=SeqID_14739
  Gene Ontology: Mol. function=protein serine/threonine kinase activity; Cellular component=cytoplasm; Biological process=protein amino acid phosphorylation
  Homolog annotation: Hit_ID=Q5N942; Match level="QueryCoverage=90%, HitCoverage=49%, E-value=3e-73, Identity=79%"; Hit description =Serine/threonine-protein kinase SAPK4
  Pfam annotation: Domain name=Pkinase; Domain location=4-155; Score =17.9; E_value=1.1e-09; Accession=PF00069.16; Description=Protein kinase domain
  Pfam annotation: Domain name=Pkinase_Tyr; Domain location=4-155; Score=-115.9; E_value=2.6e-05; Accession=PF07714.8; Description =Protein tyrosine kinase
  Pfam module annotation: Pfam domain module=Pkinase::Pkinase_Tyr; Domain location=4-155::4-155
MDKYEAVRDIGSGNFGVARLMRNSETRELVAVKCIERGYRIDENVYREIINHRSLRHPNIIRFKEVILTPTHLMIVMEFAAGGELFDQICDRGRFSEDEARYFFQQLICGVSYCHYMSSVLHSRPKSAVGTPAYIAPEVLSRHEYDGKDILLGHLQSSSRHCS

SEQ ID NO: 58115 - protein, 24 aa, Zea mays
  Coding DNA Sequence Number=SeqID_14740
MAPPLCLGAPPPCVLVRGETRDLI

SEQ ID NO: 58116 - protein, 78 aa, Zea mays
  Coding DNA Sequence Number=SeqID_14741
MDVKKKQLKTGFLDPLMISQARYKEVAQRHGEEYKDLDGAEFEKAVKQNQRKKMKVPKSKINVEWLERDMVFVGVAKV

SEQ ID NO: 58117 - protein, 165 aa, Zea mays
  Coding DNA Sequence Number=SeqID_14742
  Gene Ontology: Mol. function=protein serine/threonine kinase activity; Biological process=protein amino acid phosphorylation
  Homolog annotation: Hit_ID=Q5N942; Match level="QueryCoverage=62%, HitCoverage=30%, E-value=7e-29, Identity=64%"; Hit description =Serine/threonine-protein kinase SAPK4
MKEIKSHPWFLKNLPRELTETAQGMYYRRDNKVPSYSDQTSEEIMKIVRDARTMPKSSRSGYGWSAEYSDEEEKEEEHRLEEDEYDRRVKEVHASGELRSSGMYAVLASELLVLGQFSCNIIQYTEADYHVLVLDYNLLLLNSSLYYLLQQISNRRRGIVCAKID

SEQ ID NO: 58118 - protein, 377 aa, Zea mays
  Coding DNA Sequence Number=SeqID_14743
  Subcellular localization annotation: CTP_CleavageSite=38; ConfidenceScore=5.41e-01
MDAVQVKASSTQGARSRLARAQPQAGTVVPDEVTSRPRASSGSGRTLGTPEAQLGWASSRSNLGQIASPTDRIAGAFNENSAARSAPTAVPPTRVRLTNSQVQPQAQQEAPPRPTLGLGLGRRSPPRPTPGLGLNLGLGRWSPPRPTPGLGLNLGLGRNRVLARPRPWPQEESPPRPTLGSDQPRHGGYIITLPLASSGYGGTRPASHLARPGLKHFSDGHVIAYAGLKHFSDSHVGIAFMRKVARENELTNRLTLSLADPGVETPTIIMGQEDIRPLGWDKLRAHHDPYARLGRIPQDATLSSSHSSEFAAKRSTEWRPRRPEWCVPFTHDACDDIDRILEDSRQHQGIVPFVDSASHDAPFAIEDYLVATCHLIG

SEQ ID NO: 58119 - protein, 155 aa, Zea mays
  Coding DNA Sequence Number=SeqID_14744
MVKLDVVNEREPNSTQLWSRLRDKDKENKLQEALVPWTLSLDRTIVASAPRSCCPLASSSYNSPTSPILFFEQEMELSLVGLQNARKTSLAAARSDTPASSSWKLYLFQNKQAESDAFDGNGHKTLVAMDDYLVTDKITAFIVQMQHAATEVLKE

SEQ ID NO: 58120 - protein, 80 aa, Zea mays
  Coding DNA Sequence Number=SeqID_14745
MSSQASWVNGTHHSGLLGRHSVLLLAANSDEWEDESVASWGMPEDRGSEEGVVVGFGFDPAPARSVYSMCGVSNANSPYR

SEQ ID NO: 58121 - protein, 17 aa, Zea mays
  Coding DNA Sequence Number=SeqID_14746
PRVASATSHTIATVEPA

SEQ ID NO: 58122 - protein, 79 aa, Zea mays
  Coding DNA Sequence Number=SeqID_14747
MGKVRVKEAARGSWRSIRVICCDTAWSEMALAGSLRGSPIQHGRGAGPWISAFAGSVGERDAAARVEGSWLWGPTCRHE

SEQ ID NO: 58123 - protein, 256 aa, Zea mays
  Coding DNA Sequence Number=SeqID_14748
  Gene Ontology: Mol. function=kinase activity; Cellular component =ornithine carbamoyltransferase complex; Biological process=amino acid metabolic process
  Homolog annotation: Hit_ID=Q6QP54; Match level="QueryCoverage=46%, HitCoverage=48%, E-value=6e-30, Identity=57%"; Hit description =Putative kinase
MELGRRHHCLSGGAGQMGHRSCSLWPESARGRVVMALPVDVAGPRPRPGDVGAPPKLGSNLSSVAEAESEPLGRARRKSFARGQGGVRALGSGEAESVVFRGRARVRALGSGGAEFAVFRVLARVRALGSGGAEFAVFRVLARVRALGSGGAEFSLAPLARPDCLSDSLYRVALQSEWRRRRCPSVRPGTDRIALDEVAKEWALAPRAILSGNFVTVFQHCHIIKSETMSLNGPFGRALASPKTALALAHEVKPLL

SEQ ID NO: 58124 - protein, 123 aa, Zea mays
  Coding DNA Sequence Number=SeqID_14749
MPCLMWLRHLALPACQEQYKNYPNDSGVNKENSAACTAPTVVPPARVRLTAAKSSLRRHRKLCLARPQDSDSTSTSEDGLRLARPPGLGLHLDLGRRDSASPDPRGSGLKPRPRKTVSASPDP

SEQ ID NO: 58125 - protein, 190 aa, Zea mays
  Coding DNA Sequence Number=SeqID_14750
  Subcellular localization annotation: CTP_CleavageSite=51; ConfidenceScore=5.78e-01
MLVMAAIFSGLASMPRSETMNPRSMPRGTPKTHFSGLSFTPFALRHLNVVSRSERRSEAFLVLTTMSSTHQLVDLLAYGSALFFVESAQRLLHGSGSNSDIQRVLGDIPRYARHVRGTPHKNFSVRAEKFDEHCFLFGVKLRADPDLLGGVIAGVERDNLNRLGWLEVADVALLSHPVLRNKAGCISYMR

SEQ ID NO: 58126 - protein, 258 aa, Zea mays
  Coding DNA Sequence Number=SeqID_14751
  Subcellular localization annotation: CTP_CleavageSite=77; ConfidenceScore=5.07e-01
MAAVSLTLTGGTAVGAAQTTLFSCQVSQWRGEVYMSQERLKSSTTLCIGKQLLVEVNIRPSLMTLHHKMRRRHPPLEAFAVAVGPTETRRRAKTPFTTYDIRRRPATESFNRAASSNTEAHQRASSNIWRPPFVLRENHPRWHPRKQTRRLTRLRRQHYLLQGRARPLALTQSTHQEATEDDVCRTCEDDPLRTCGAEGQSQQPPGFAPLEGADLTEDGEVLGVSAEEQLQLRALRLKNRNLQRQKEAWRPSASACPH

SEQ ID NO: 58127 - protein, 160 aa, Zea mays
  Coding DNA Sequence Number=SeqID_14752
  Homolog annotation: Hit_ID=Q9P785; Match level="QueryCoverage=58%, HitCoverage=36%, E-value=1e-07, Identity=36%"; Hit description=LisH domain-containing protein C1711.05
  Subcellular localization annotation: CTP_CleavageSite=34; ConfidenceScore=5.49e-01
MTWQGAPDCPVCTGLSGKQRRLTAPTVVPPARVRLTAAKSSLRRHRKLRLARPQDSDSTLTSEDGLRLARPQGSDSTSTSEDGLRLARPQGSDSTSTSEDSLRLARPQGSDSTSTSEDSLRLARPQGSDSASTSKESRPRPTSGSDRPRRRGVHHYPTPS

SEQ ID NO: 58128 - protein, 389 aa, Zea mays
  Coding DNA Sequence Number=SeqID_14753
  Gene Ontology: Mol. function=DNA topoisomerase (ATP-hydrolyzing) activity; Cellular component=mitochondrion; Biological process=DNA topological change
  Homolog annotation: Hit_ID=Q5NBJ3; Match level="QueryCoverage=83%, HitCoverage=44%, E-value=1e-153, Identity=85%"; Hit description=DNA gyrase subunit B, chloroplast/mitochondrial precursor
  Pfam annotation: Domain name=DNA_gyraseB; Domain location=53-223; Score=255.5; E_value=1.2e-73; Accession=PF00204.16; Description=DNA gyrase B
  Pfam annotation: Domain name=Toprim; Domain location=250-356; Score =28.8; E_value=2e-05; Accession=PF01751.13; Description=Toprim domain
  Pfam module annotation: Pfam domain module=DNA_gyraseB::Toprim; Domain location=53-223::250-356
MGEKHASIGRFVFFPEGMNRSQHGSFLLPMLTIILTKEEGHTVQRNEYCYAGGLVEYVKWLNTDKKPLHDPIAFRKELDGITVDVSLQWSSDSYSDTVLGYANSIRTIDGGTHIDGLKASLTRTINNLAKKSKTIKDKDITLSGEHVREGMTCIISVKVPSPEFEGQTKTRLGNPEVRRIVEQSVQENLTEYLELHPDVLDSILSKSLNALKAALAAKRARELVRTKSVLKSSSLPGKLADCASANPEESEIFIVEGDSAGGSAKQGRDRRFQAILPLRGKILNIERRDEAAMYKNEEIQNLILALGLGVKGEDFKKEALRYHKIVILTDADVDGAHIRTLLLTFFFRYQLRIGAENRSNMKESLWRFFMGKSFQYSIGNVEKSTNKTG

SEQ ID NO: 58129 - protein, 95 aa, Zea mays
  Coding DNA Sequence Number=SeqID_14754
MASYVAEAVAVFLDVLTPLAKMGVRTYKCAEATVAHRCRGRRGRGPTRNGVHAEMIAAAGESSVQRRPSPSVLMRLSPLASCSGLVIPRPLLVWR

SEQ ID NO: 58130 - protein, 331 aa, Zea mays
  Coding DNA Sequence Number=SeqID_14755
  Homolog annotation: Hit_ID=Q5NBJ0; Match level="QueryCoverage=87%, HitCoverage=62%, E-value=1e-94, Identity=61%"; Hit description =Putative uncharacterized protein P0667A10.4
  Pfam annotation: Domain name=DUF617; Domain location=167-331; Score =200.8; E_value=3.4e-57; Accession=PF04759.4; Description=Protein of unknown function, DUF617
MDNIDEVTDKRLIALGEIEKDKIMVAKAYNKKVKAKSFQVGTYARRLMTHPARRPTTSTDTAEIAFLGATAIPDPQSTLATPMPLPEIPFLHTSTPPPPPPPAPVTQKQKHGSGKQRSRPGRLMRSVRAAFRSFPVIQAPSCRGMPSLHLSGLQGAGVRSHFHGATHATGTLYGHRRARITIALHESPGMPPCVLLDIGVPTAKFIQDVSAAGMVRVTLECEKQHHAVDAGMRRLLDEPVWTTEVNGESVGYASRREATERDECVMRMLHSTSMGVGVLPADMTHPSDGELTYMRVHFDRLVGSKDSETYYMHNPEGSATGPELTIFFIRT

SEQ ID NO: 58131 - protein, 264 aa, Zea mays
  Coding DNA Sequence Number=SeqID_14756
MALPVDVAGLCPRSGDVGAPPKPGSSLSSVAEAEPPGRARRRLFGRGQGGVRALGSGEAEFRRLLGLSPSPSPRVGRSGVRRLPGLSPSPSPGVGRSGVRRFPGLSPSPSPGSGGAEFAVFRVLARVRALGSGGAEFAVFRVLARVRALGSGGAEFPMAPLARPDCLSDSLCRVALQSEWRRRRCPSVRLATFALNAPATWSVGTAIQSGLLLSEAKASGEPELYADGGYQLRIRRLEGTPNYGPRQILSLGDLAIESSTLPTH

SEQ ID NO: 58132 - protein, 172 aa, Zea mays
  Coding DNA Sequence Number=SeqID_14757
MPRAARAAFVFWGGPAFSPGWRPSAEAGAPLVWEDLSGDLPGGRRPPLSAPRRRRPEKSPSPMGSLPPSAPRASGSSYLSSPLERRGGRGQDCSSAHPEACTAVARPSEAELARKWEPGWPEPSRVAHQRGSTSESISRGLGSGWRPWKMLGRGPRGNRPSRLLGPDSWRSP

SEQ ID NO: 58133 - protein, 84 aa, Zea mays
  Coding DNA Sequence Number=SeqID_14758
MPSLYGQSLYGQSLNLNSYGPNPKVMKAGEHREDKKGECFVRFGHGGGLTPSGITAKPPGTSNCITFESQRIWGASCANGRLQK

SEQ ID NO: 58134 - protein, 71 aa, Zea mays
  Coding DNA Sequence Number=SeqID_14759
MAPLARPDCLSVSLCQVVLQSEWRRRRCPSVRPLYANGGYQLRIRRLEGTPNYGPRQYINREPNGRKKLPW

SEQ ID NO: 58135 - protein, 635 aa, Zea mays
  Coding DNA Sequence Number=SeqID_14760
  Gene Ontology: Mol. function=nucleic acid binding; Cellular component= nucleus; Biological process=negative regulation of transcription
  Homolog annotation: Hit_ID=A7QST1; Match level="QueryCoverage=41%, HitCoverage=27%, E-value=2e-81, Identity=57%"; Hit description =Chromosome chr4 scaffold_162, whole genome shotgun sequence
  Pfam annotation: Domain name=DEAD; Domain location=301-479; Score= -34.0; E_value=0.015; Accession=PF00270.20; Description=DEADDEAH box helicase
  Pfam annotation: Domain name=ResIII; Domain location=297-473; Score= -17.5; E_value=0.0014; Accession=PF04851.6; Description=Type III restriction enzyme, res subunit
  Pfam annotation: Domain name=SNF2_N; Domain location=303-595; Score =187.8; E_value=2.7e-53; Accession=PF00176.14; Description=SNF2 family N-terminal domain
  Pfam module annotation: Pfam domain module=DEAD::ResIII::SNF2_N; Domain location=301-479::297-473::303-595
MASPPPFDLCGDLDDDDIDEPVTAVPKDRHLPAAAPTPNGLNDHLLRFTRSLQRPTQNPNPSPNPPPPPPPAAAEEQVEKVKLAGRRRLCKLATTTTATQRVDEEEAEWDNQDDGESILDILDDLTTRFDSLSVQKPSTAASSDEARAPTRRSEVKIETDLVSSACTHYACDDVRGKGKNKGTTKDVGRLNRVSKASSFVDSYSDSDYDDCEEDQGTRTDYAVKQLRSKGFTRRPPNTPTFRNHGVSDDELGQEKENLGAVENNAEDVGWEKTEDFKMDPTGTAATSKPYKLPGKIFKMLFAHQREGLRWLWVLHCRGTGGILGDDMGLGKTMQVAAFLAGLFHSRLVKRVLIVAPKTLLAHWTKELSIVGLKEKIRDYSGPSTNIRNYELQYAFKEGGILITTYDIVRNNYKLIRGNSYNNSNDDDDEEGTLWNYVILDEGHLIKNNKTQRAQSLYEIPCAHRIVISGTPIQNNLKEMWTLFNFCCPDVLGDKQQFKIRYETAILRGNDKNATAREKHVGSNVAKLYIKKLFFLSNDAGELRVISFKKEKVLHEGEVRQPPPLITKKDYNVPPTRMGMTTNSNSGVQPLSPTEQLLENLVSSQTPEPALILHFLTGRRHTRTPTLKHMHSYASK

SEQ ID NO: 58136 - protein, 136 aa, Zea mays
  Coding DNA Sequence Number=SeqID_14761
MGHIYLNCIESCLNSAKKQQFYGLDVPNSLRNIRTLLKKINNTGHYNLCNEVQVDRSRARFHTLCLKCVSPRTSMRCQEMSSTADAFDHAPAPQMGATSFDLGDKTRELEREADNLEEESRSRVVVPTKEGGSKPG

SEQ ID NO: 58137 - protein, 102 aa, Zea mays
  Coding DNA Sequence Number=SeqID_14762
MALPVDVAGLCPRSGDVEAPPKPRSKARAESEPWGRAKRSSSSSGAEPESEPWVGRSGVRRLPGPSPSPSPGSGGAEFAVFRGLARVRALGRAERSSPSSGA

SEQ ID NO: 58138 - protein, 24 aa, Zea mays
  Coding DNA Sequence Number=SeqID_14763
MGKKVSIAHLRAHNRLDLHRVDEE

SEQ ID NO: 58139 - protein, 534 aa, Zea mays
  Coding DNA Sequence Number=SeqID_14764
  Gene Ontology: Mol. function=hydrolase activity, hydrolyzing O -glycosyl compounds; Cellular component=integral to membrane; Biological process=cell wall organization and biogenesis
  Homolog annotation: Hit_ID=Q7XUK4; Match level="QueryCoverage=90%, HitCoverage=77%, E-value=0.0, Identity=82%"; Hit description =Endoglucanase 12
  Pfam annotation: Domain name=Glyco_hydro_9; Domain location=28-495; Score=562.5; E_value=4.2e-166; Accession=PF00759.10; Description =Glycosyl hydrolase family 9
MDLNQAANCVPVDLAEFIPVLSVSPIPSLIKSKRILAAGHLPKNNGIKWRGNSGLSDGSDAKDVKGGLVGGYYDAGDNIKFHFPMAFSMTLLSWSVIEYSAKYKAMGEYDHVRELIKWGTDYLLLTFNSSASTIDKLYAQVGAAKINGSRPDDHYCWNRPEDMAYPRPSLSVSSAPDLGGEVAAALAAASIVFRDNAAYSKKLSQGAATVYKFARQSGRRTPYSLRQPDIEYYYNSTSYWDEYMWSAGWMYYATGNSSYITFATDPRLPKNAKAFFSILDFSVFSWDNKLPGAQLLLSRLRMFLNPGYPYEESLAGYHNATSLNMCMYFPRFAAFNFTKGGMALFNHGRGQPLQYVVANSFIAALYADYMEAVNVPGWYCGPNFMTTNDLREFARSQVNYILGDNPKKMSYVVGFGSKYPRHVHHRGASTPHNGVKYSCTGGYKWRDSKKADPNLLAGAMVGGPDKNDGFKDSRNTFGQNEPTLVGNAGLVAALVALTNSGRGAGVTTVDKNTMFSAVPPMFPATPPPPSSWKP

SEQ ID NO: 58140 - protein, 106 aa, Zea mays
  Coding DNA Sequence Number=SeqID_14765
  Gene Ontology: Biological process=cell redox homeostasis
  Homolog annotation: Hit_ID=Q8H6X5; Match level="QueryCoverage=35%, HitCoverage=28%, E-value=1e-11, Identity=86%"; Hit description =Thioredoxin h-like protein
MADNLWSPQNEKGHILQPQLMAQSTLHQYSFRSRCNMGTGVLQPPMFLHTMEKYTKEVRHDDEEKLDFKGGNVHIITSKEGWDQKIAGANRDKKISNSKSLHINSS

SEQ ID NO: 58141 - protein, 124 aa, Zea mays
  Coding DNA Sequence Number=SeqID_14766
  Subcellular localization annotation: CTP_CleavageSite=47; ConfidenceScore=5.24e-01
MGPVAAATGQHVSASSSDLDVHGKQSDASTRLLRHGSLKSPPPREIRALLLVVVIIFVALTRRARGQKFIAMTDVAGTLSEVAAWQIRKKANNWLIFTWKHSWSKSDGALDRCAKANTCVQRRD

SEQ ID NO: 58142 - protein, 128 aa, Zea mays
  Coding DNA Sequence Number=SeqID_14767
MYLRLDRRHRTQPPKLPCAWLRSNSNLRHDHTFYIVHAFNPSPKFFKLSELRLKRRIFIISEEEMSQDKKVPAETKLTEEEKLFEEKKAVNPYIARFIESMEKTIQRRLLRRYWRAYLKILVTAIVMM

SEQ ID NO: 58143 - protein, 264 aa, Zea mays
  Coding DNA Sequence Number=SeqID_14768
  Gene Ontology: Mol. function=protein binding; Cellular component =integral to membrane; Biological process=lipid metabolic process
  Homolog annotation: Hit_ID=A7Q7E5; Match level="QueryCoverage=92%, HitCoverage=68%, E-value=3e-85, Identity=68%"; Hit description =Chromosome chr18 scaffold_59, whole genome shotgun sequence
  Pfam annotation: Domain name=DUF803; Domain location=21-264; Score =427.0; E_value=2.8e-125; Accession=PF05653.5; Description=Protein of unknown function (DUF803)
MDVTSTAAASASGGGRWYTGMSADNIKGLVLALSSSLFIGASFIIKKKGLKKAASSGVRAGVGGYSYLYEPLWWVGMITMIVGEVANFAAYAFAPAILVTPLGALSIIIRHEFSVIELAVLAHVMLREKLHIFGILGCALCVVGSTTIVLHAPPEREIESVTEVWDLATEPAFMCYAAVVIAIAAILVYRFVPLYGQTHVMVYIGVCSLVGSISVMSVKALGIALKLTFSGTNQLIYPQTWAFSLVVISCIITQMNYLNKKKVF

SEQ ID NO: 58144 - protein, 235 aa, Zea mays
  Coding DNA Sequence Number=SeqID_14769
  Pfam annotation: Domain name=bZIP_Maf; Domain location=136-205; Score= -27.2; E_value=0.038; Accession=PF03131.8; Description=bZIP Maf transcription factor
MDKDHHEVTQKRWAVIRLPEARPKRARGTAKATAPGGSQPTLAAKSAAPGTSKVPDVVKAAGAGGAKSASAGAAKARELPSPGKRIADFDTDISVDDYLTGSGEGRLVVVPPAVANTVSGAKGSALSAGGEISALPVVKDEAGTVSRRLREVSQRLSQAADFADRVALEALMAVVSAEVERLRAHHADAVREKSAADSKCRKLTEKVAALEGERIDLRRHLAEERREANQALAKA

SEQ ID NO: 58145 - protein, 576 aa, Zea mays
  Coding DNA Sequence Number=SeqID_14770
  Homolog annotation: Hit_ID=A2WQE8; Match level="QueryCoverage=55%, HitCoverage=85%, E-value=1e-75, Identity=46%"; Hit description =Putative uncharacterized protein
MTTQGGLQPTSNEANMCTNDNGSQLGTRIVDEIMAGKNVFFDLPDKLTGEIWTLKFHCIGAQPGKEIVTVNIDKAYVAFYNVVYIKSKLGYSGRDFLFYKKRCGIDRSRLLALDYIHQEEAMLSDNMDERTISFVLTKDPPSDLEVSITPIKRPRQRTNVDEETIEVSIDAYKEWLAILQHDNPESVLYERQSNDDLILSDEEIHGSSKPTANWPSHARRHRKRDPDVIGIYVDNDGVFKKEGRGTLKGIAAATKRIKNGDHKLKIEFSSKLGGPVGPNARTFVDEIVLFTKKKAPLIGVKKWKDIELNVRSSIASDVLRRWEFLTNEDAHEKIWSIAKERYKGWRSTLSSTYKAYNSYAERMKNKPEDVDIVEWHYMMLYFGSEKFQKISSQNSENRQKQRTKHIMGSRTFSQISFQQRDPETGIEPTDLSLWMITHCKNDEWSEEASRGIYEKAAEKIVEKIYQTERFKLTREEENAIFQTTFKETTGCKANRLHGHGYLSRYPTRSQVMESKFLEQARATVATNQKNIELKSQVQLLNENLRVRLQNEKEYYRKKCKHCKKKKKEKDKCLEKK

SEQ ID NO: 58146 - protein, 450 aa, Zea mays
  Coding DNA Sequence Number=SeqID_14771
MRGPGGRMSSPELRESSARMLRVTGGWWPKNVPIPRAAGEDFFTSRMVREWKVFPYGRNIAAVVSAVMDKDRQGATQKRQEVVRLHEARPKRQRGAAKATAPSGGQPPLAAKSAVPASSRAPEAAAAAGGSKSAKAAPASGRVPEAVKAARELPPPGKRVADFAIDISVDDYLVGSDKGQLVVVPPAAATTAAAVVPKAKGRRLTFADRAASGALTAVVSAEVERLRTQHADAVREKSAADIKCRKLADKVAVLEGEKTVLRRQLAEERKEANEALAKAQSAQAEANLTRAEGSLAKQRAKQLEERLRALQARVERAEASTRVEAERTRKQLMDSYNELGARTADFEVPDREPGLRCLEWVQEELQALPTIVEGFMSCASLVTCEGAVNALSRKGCRHYEVFDQADEDFERDIYKVEDPIVKESAEALYDRMWGTHGREVSGSGPDGRGQ

SEQ ID NO: 58147 - protein, 205 aa, Zea mays
  Coding DNA Sequence Number=SeqID_14772
  Subcellular localization annotation: CTP_CleavageSite=48; ConfidenceScore=5.63e-01
MARGIVKSAAPGSSMSSLGVKSAAPGPSKPLPTVPTQERRPPSPLHTAEMEVGGAEVSMDISVDDYLVGGDTMFDAHTGQGPFGEFFWDWVFDETMVQDRRLGNWAVVPALVVAGSVAVATGAKGSVQDPWAKFCTNGKIASAAAAKDVTGSVAQQLKHAAAFAKRIASRALTLEFAAERQQLEGRIERLQAQHTEAVRDKLAAT

SEQ ID NO: 58148 - protein, 620 aa, Zea mays
  Coding DNA Sequence Number=SeqID_14773
MLDEVAGWDDLVIGLCPATRGGKGLPEASRPVYIKGAGAARIEIYLSARRENPTLPFKLLACSSALLAPIRRRTGSCEADRAPPSTPSVEVFAKQYYQHWQKRKIGHKIAQFGSCTFTPKSRKTSMEVVELVPCARNKWGNWWDYWFYVSKAEVEDHPGLPAAIMCSHYYVAYPPFEVAEDDENERALRIAARTSSGRDLVEEFIGYEVWPLAHGWALGEVCPRDMPSLGGRKVRSPLFALDVRGRDPAAVVHEAEDGAVRIVGRYVPKTEAQRSWDIRGSNDRLNRVFELNCLPYGGYPGEDVVGRRGKKPAAVTEDDPAPEAAPATKKRKLGTAVGELGISDSFAMELMGTCAAPGGRMSSPELRESSARMLEVTGGRCPKNVPIPRAAGEDFFTSRMARDLRVFPYGQNIFAVVSAVMNKDRQDAAQKRRAVIRLPEARPKRARGTAKATVPGDSQPTLAAKPAAPGSNKVPESAKAVGAGGTKSAPDGAAKVRELPSPGKRVADFDTNISVDDYLVGSGKGQLVVVPPVVVTTVYHDVSAEVERLRAQHVDAVREKSVADSKCCKLVEKVAALEGERTDLRRQLEEERREANQAIAGAQAAQAEAKLARAEGSLAS

SEQ ID NO: 58149 - protein, 133 aa, Zea mays
  Coding DNA Sequence Number=SeqID_14774
MHISYSLHSLYCNLADGEYVLIHEQGAVHEEDQEQAPETAIEDLPAAPAIEGKPRLWTWIQGGCLVHETGKKELRIMCGYLSQAFEMVLSTCREIWVTGTLQDMVDDVTWPTTLPLGWTVEWDAAPAGEEQEE

SEQ ID NO: 58150 - protein, 109 aa, Zea mays
  Coding DNA Sequence Number=SeqID_14775
MATKEERGGGAYQRRDCSGEVVEDVGKVLRVIAMCGSPSGMAGVGWSTLAGFSGWIKRYGGVKLGLSHYQAQREDLGFDVSRARVPMPSSGMRFEGQEEGLGMITNQFP

SEQ ID NO: 58151 - protein, 87 aa, Zea mays
  Coding DNA Sequence Number=SeqID_14776
MAKKCKREPTPPSEDFGDSEYSEEFSSESEGSPAPIPLHSRRATEDIGDNVSVLEMTAELKRAASATFEDNSLVMMWYIGVLEVTAE

SEQ ID NO: 58152 - protein, 197 aa, Zea mays
  Coding DNA Sequence Number=SeqID_14777
  Gene Ontology: Mol. function=translation initiation factor activity; Biological process=cellular metabolic process
  Homolog annotation: Hit_ID=Q5JMI2; Match level="QueryCoverage=100%, HitCoverage=70%, E-value=6e-33, Identity=44%"; Hit description =Eukaryotic translation initiation factor 2B family protein-like
  Pfam annotation: Domain name=DUF567; Domain location=27-197; Score =17.8; E_value=5.8e-06; Accession=PF04525.3; Description=Protein of unknown function (DUF567)
MAVSRIQPLSGHLHPRAATDPAAAAGKQQQQQQVYTVWMKSLVLSGHGCTVYGEDGRVAYRVDNYACSRSREVYVMDSDGRTLLKLLKKSFAAVETWTGYSYGSAGTAPAAGLGQEGSARPWFSVRKAPHRILKKKMKKGGQQEQNGGAGGAVATACVVGGDVVSRFVGAPRKSEFRIVPHGEVVAETKRKQTETNL

SEQ ID NO: 58153 - protein, 274 aa, Zea mays
  Coding DNA Sequence Number=SeqID_14778
MVGRSKSGCGLCPALSFKDLHHPSWGGGRAEPELYLLRGFVGHLLLQHLGEKALTGLAKGADLDNEGPSGRKRRQLQHAWLTGSAGSGTASGATSHRWAERGYLPAVRAVVAPCAPGDRPRRRTLLGRRSCSWVVLPLLRYDASARRLVLARPGEPEWGSAGGQTAAVVGAEMVAAEEVLFVDEITATICAPGLRLFGFDGLSSPLEWGRGRGPYRSSVCPKVIAAAVWPPGAEVVVTAAGVGGGEPPGILSSRRPSNVGVCVGDRYPPGPLKE

SEQ ID NO: 58154 - protein, 127 aa, Zea mays
  Coding DNA Sequence Number=SeqID_14779
MGKNNKRKREPTPPSEEFGDSEYSEEEFSSESEGSPAPIPLRESSDDSDDSQGLAAEDSDGGGEDEDDDDDDDGDGDGDGSGRGSGGGSKDGDGGGSRGSTRGGSGKDGDGGGSKGSTRGGSNRASG

SEQ ID NO: 58155 - protein, 469 aa, Zea mays
  Coding DNA Sequence Number=SeqID_14780
  Gene Ontology: Mol. function=metal ion binding; Cellular component =pre-autophagosomal structure membrane; Biological process=protein transport
  Homolog annotation: Hit_ID=Q8LR61; Match level="QueryCoverage=47%, HitCoverage=49%, E-value=1e-103, Identity=84%"; Hit description =Putative WD repeat domain 45
  Pfam annotation: Domain name=RALF; Domain location=405-469; Score =108.1; E_value=2.6e-29; Accession=PF05498.2; Description=Rapid ALkalinization Factor (RALF)
MEPPASSPAPPNPNPVPDDRPLQQQVEEARAPEPEPERETSPTSLTTSIDPTPSGGEESESDDSSSVSSAPSSASAPAAAAPFPTAKDLLHISFNQDYGCFAAGTKSGFRIYNCDPFREIFRRDLAADGGGAGGGGIGVVEMLFRCNILALVGGGDNPHYPPNKVMIWDDHQSRCIGELSFRSPVRGVRLRRDRIIVVLENKIFVYNFADLKLVHQIETAPNPKGLCAVSQQPGSIVLVCPGAQKGQVRVEHYGARKTKFINAHTSRVSCFALSQDGRLIATASTKGTLVRIYNAAEGNLLQEARPLRRDVQVESRPRGHDGMEALGASVEEGHLRSSERLPSRRMAHVDRPRSRAVLAVAVAVAAAALLLFAAAGVPRAAGQTTTTAVVDLDSWADRGAACTGAVEACGGIGATARRELGSGGYISYDAMSRGRVPCSYRGASYYNCRPGAPANPYSRGCSAITRCRG

SEQ ID NO: 58156 - protein, 133 aa, Zea mays
  Coding DNA Sequence Number=SeqID_14781
MACVVDIGLLRRAAARIETRRGAAGEEIEAVKAKSPWGEEFMHPGAQVGYSTAGAPNHHDRGEEECSPSMKKNPDPPRGNHIPGLEIKNLRYKLVSGSPIWPNGLKCLLPVVKGHCFRVCDPMLNDVEATTMI

SEQ ID NO: 58157 - protein, 126 aa, Zea mays
  Coding DNA Sequence Number=SeqID_14782
MGTTVMTMCSRCCFFPPYCEAYHPAARPFLMERCGSREGRGCIARAVEELGDVVRRRQGKATSSSDEAASRGRWRSWATRSDEGELGLFVSFIERWVVPFSNWVPLLLSFEQPFSFFGSEDIQASE

SEQ ID NO: 58158 - protein, 74 aa, Zea mays
  Coding DNA Sequence Number=SeqID_14783
MAGVRCTLGGERGCQVVRVGMGPASTCGSGGAGDGMCGARMAQSGWGGGGGIHSTDMRSRSSSQVATMEGGVKG

SEQ ID NO: 58159 - protein, 132 aa, Zea mays
  Coding DNA Sequence Number=SeqID_14784
  Pfam annotation: Domain name=RVP_2; Domain location=40-132; Score= -38.4; E_value=0.001; Accession=PF08284.2; Description=Retroviral aspartyl protease
MDNLQDYYNALHEEVHVLYLQLYPNVPANPVGMEAGPSCVTGEALDGEPDLFRPPPSMKLVDEWSSMPNSKATNSKKMAYQVPLTLARQDFPTNMVVLKSQDIDVILGMNWLVQQKAILNPDLRTIRLSYDQ

SEQ ID NO: 58160 - protein, 113 aa, Zea mays
  Coding DNA Sequence Number=SeqID_14785
  Subcellular localization annotation: CTP_CleavageSite=29; ConfidenceScore=5.23e-01
MADVTGGASVASGACGRRLGRTRAGDAARAATARRGRATTETRLTGSGIEKERERTKKESTVLNTLFSADVPVAAENNGFFGGGVLVPPNCYMATENGIQCCCEIFIEESVGW

SEQ ID NO: 58161 - protein, 315 aa, Zea mays
  Coding DNA Sequence Number=SeqID_14786
  Gene Ontology: Mol. function=transcription factor activity; Cellular component=transcription factor complex; Biological process =regulation of transcription, DNA-dependent
  Homolog annotation: Hit_ID=Q2QXF8; Match level="QueryCoverage=37%, HitCoverage=26%, E-value=2e-32, Identity=66%"; Hit description =Transcription factor E2F/dimerisation partner family protein, expressed
  Pfam annotation: Domain name=E2F_TDP; Domain location=117-163; Score=- 1.1; E_value=0.011; Accession=PF02319.11; Description=Transcription factor E2Fdimerisation partner (TDP)
  Pfam annotation: Domain name=WD40; Domain location=143-180; Score =33.3; E_value=8.9e-07; Accession=PF00400.23; Description=WD domain, G-beta repeat
  Pfam module annotation: Pfam domain module=E2F_TDP::WD40; Domain location=117-163::143-180
KKEKQKLQVWSRIMPCKESFAWAMIPLFEAPILTRTFLLQLKRKHNDRTENEATESNDWMSPGYANAGSSPVPTPPSGKGLKASTKPKATKGQKSGPRTPLGFGSPGNPSTPVGGCRYDSSLGLLTKFLNLLKGAPGGIVDLNNAAETLESHTKGVDSVCWDPTGEYVVSVSEDTVKVWSLNDESFVNELSCGGRKARTLAKSRKTANSAPPDPGLGLGLSPGRRRTPLRPTQGSDSGSAPEDDELRFARPQGSDSALASAERPPPRPTQRLGLGHGRQTRPRLRRSLHVAQPRAQASHVNRKHHHHPTPSRLGP

SEQ ID NO: 58162 - protein, 382 aa, Zea mays
  Coding DNA Sequence Number=SeqID_14787
  Homolog annotation: Hit_ID=Q2R3B9; Match level="QueryCoverage=97%, HitCoverage=39%, E-value=1e-78, Identity=45%"; Hit description =Expressed protein
  Subcellular localization annotation: CTP_CleavageSite=73; ConfidenceScore=5.82e-01
MDPSSGSTSRHGRLLISPSLSTPTFSTHSPSPSSAASPAPHRNSTSSPKPLVSFPSPSSANRPRSSYVGAGPRAATAAASASGPAFAHNARLAAALVPAAAFLLDLGGLPVFAVLAIGLAAAYLLDALQLRQGSFFTVWAALLAADVAFFFSASLSSAAAASLPLTVLALLLCAETSFLIGVWASLQFRWIQLENPTIVAALERLLFACVPIAAPALFTWALVSAVGMANASYYFATFCMVFYWLFSIPRRSSFNSRKQDAPMLDSDGILGPLESCVHSLYVLFVPVLFHAVSHRATLFTSLASLYASTRGALWWITRDARTMDQIRIVNGFVALVVVVLCLEVRVVFHSFWKHMLRGRLGDAASSVAFTGFGSASQWSRER

SEQ ID NO: 58163 - protein, 180 aa, Zea mays
  Coding DNA Sequence Number=SeqID_14788
MGIDAEADDDTTEAPVVRRRGTRKGHFVLPPSAPAQSEARVLIIPVGDSQWDDTSFDDRGHHRQVNQVLAQGAVKHDFWRRYRVEPEAQEHADRVLEKNAKKVVNAYMKRRGHSINNFRQYSDVYLTVDQYMEEAQTGVVPSPIDVYRRGHRAKNSEISDELCSQAIVERMVSKVHLQLY

SEQ ID NO: 58164 - protein, 214 aa, Zea mays
  Coding DNA Sequence Number=SeqID_14789
MALSPLLLAERRRRGVCKKVESVPDRPLALCRGSGAALANLAPAKPLTASTYQPENLGPDPSGKDSRPRRISVSLEAPSSDEHTSSSPEAQSSPRSNPGQIATPNDQIAGAFNAKGSDSGSARKTANSATPDPGLGLGLSPGRRRTPLRPTQGSDSGSAPEDGELRSDRPQGSDSGSAPEDAELRLARPRGSDSTSATEDRLDLDPEEPPHRPT

SEQ ID NO: 58165 - protein, 121 aa, Zea mays
  Coding DNA Sequence Number=SeqID_14790
  Gene Ontology: Mol. function=ATP binding; Biological process=protein folding
  Homolog annotation: Hit_ID=A2Y3X6; Match level="QueryCoverage=43%, HitCoverage=88%, E-value=4e-16, Identity=75%"; Hit description =Putative uncharacterized protein
MAKRLLPSLNRVLVEKLVQPKKTAGGILVPETSKQSLVIFFFRVMQIRLMSFLRLLPQRLPQLIRQVEQDVETVIHVLQPGPIGIVEHKFTDAEILEARATVKRAVDNWRRNWTLERNVSR

SEQ ID NO: 58166 - protein, 124 aa, Zea mays
  Coding DNA Sequence Number=SeqID_14791
  Gene Ontology: Mol. function=phosphogluconate dehydrogenase (decarboxylating) activity; Cellular component=mitochondrion; Biological process=valine metabolic process
  Homolog annotation: Hit_ID=A7Q4N0; Match level="QueryCoverage=84%, HitCoverage=33%, E-value=2e-26, Identity=60%"; Hit description =Chromosome chr10 scaffold_50, whole genome shotgun sequence
MAMAISMLGVSEAFALGQNLGIKATTVTDIFNCSSARCWSSDTYNPVPGVMEGVPSSRNYSGGFTSKLMVGGLEEAYLAAKSLLQVMGEKQSTVVVLEMARQVFLTFILHKNSQCDDDSDSLLI

SEQ ID NO: 58167 - protein, 531 aa, Zea mays
  Coding DNA Sequence Number=SeqID_14792
  Gene Ontology: Mol. function=two-component response regulator activity; Cellular component=nucleus; Biological process=two -component signal transduction system (phosphorelay)
  Homolog annotation: Hit_ID=A1A6A7; Match level="QueryCoverage=92%, HitCoverage=83%, E-value=0.0, Identity=74%"; Hit description =Response regulator
  Pfam annotation: Domain name=Myb_DNA-binding; Domain location=107 -157; Score=43.6; E_value=6.8e-10; Accession=PF00249.22; Description =Myb-like DNA-binding domain
MSIDGETSRVMKGVHHGACDYLLKPVRMKELRNIWQHVYRKKMHEVKEIEGNDSCDDLPIFRNGLDGLDERGLFMRADTDTMRKRKEVDKDHADQDSSDGATAKKARVVWSVDLHQKFVNAVNQIGFDKVGPKKILDLMNVHGLTRENVASHLQKYRLYLSRLQKQNEERIMGAARQDFNQKGPSDNLNLRSSFQEQPGNLTNGFQHSSQKVQSQTNILDPHLDDTKTSVPLKVPDKNGTSASDAADHQNITGVSPLGGGGVFSFERMPVNQDTKLSEAMILECQSWSGGVPPKQFMQYPKHNHERCDLLGDYSCLPKPDLEHPIAPSHLYAPPPVISMSCSVEGDVRDFSDVKPDLLGCMKSLSPALTCTVESVSAQLSDSVVSSTNNDKKISSVEGLSSVKDCDFDQERNQAILLTSEEASILCSTDLTCLPDELSGYQLQGVSFGDIGLNSIDLFQCNDTMVLPGLQNNWYDDPDFSNETMEFPLLDGASAVVAKMPRSFLVLLVTLVSAAATLPSEALNVRDQLLKF

SEQ ID NO: 58168 - protein, 294 aa, Zea mays
  Coding DNA Sequence Number=SeqID_14793
  Gene Ontology: Mol. function=RNA binding
  Homolog annotation: Hit_ID=A5AY33; Match level="QueryCoverage=43%, HitCoverage=51%, E-value=1e-27, Identity=47%"; Hit description =Putative uncharacterized protein
  Pfam annotation: Domain name=KH_1; Domain location=83-148; Score =62.3; E_value=1.7e-15; Accession=PF00013.20; Description=KH domain
MAMETSSAPAAATEAGWYVLGPNQEGVGPYAIVELRGGCFLHSPSNSTRFKAARSGHGASIPQLSSQSSAPQYSSYGGYQGTSKKIEIPNGRVGVIIGKAGETIRYIQLQSGAKIQVTRDHEAEPGALTRQVELSGKPEQLSKAEQLIKEVLAEVLLIMLTAFCFVLVILQLISEVTSEVTIRAGDTSTERTVHIDDTQEQIEAAKQLISEVTTYKEKGKVPDRFRKLQHAHHGRAEFTGCASPTGLLDSRDPYDLQQPQIGVSRTIIRGTLKSPNSQLVTPISTKLQRPDGCD

SEQ ID NO: 58169 - protein, 89 aa, Zea mays
  Coding DNA Sequence Number=SeqID_14794
MESSAKTRLPLNSIGTIYPSPSIHTISPHWCQRFIYNYTKSTVRNTVDYSGQEKLFGKSDHARTVRALVADRPRHRFDFDQELNQGQSE

SEQ ID NO: 58170 - protein, 173 aa, Zea mays
  Coding DNA Sequence Number=SeqID_14795
MREKSAGTPGTIRSPVVLAAEMDLTRRQSGEKKNVSKVFRCKRVLVCHTAPALPKAYRTPAPRETSARPHVPRIRRGSRPPPPPADLALAHNRVPSHARWNAPPTTTAQHHPGHGAPRGASTKRSSAEAAEGSGEKEMSSAGEEEKESDAEMRSDESRTDSSGAAHRRPRGRR

SEQ ID NO: 58171 - protein, 117 aa, Zea mays
  Coding DNA Sequence Number=SeqID_14796
MTCGNVLGFGGGKSDRILLLRSPRHQGSSQELASSRCALPIDFAPCPIGIRITNQIKCGTPRVPKPKLRSIIHISHDSFTAVRSSGGLEAMEHATQQQDTGQATDVLRGAVPAQARF

SEQ ID NO: 58172 - protein, 90 aa, Zea mays
  Coding DNA Sequence Number=SeqID_14797
MGMHGGGWLQRAGRRAHQTALSVEMAWKSGSDLTAAATQKQMHASLYGTLSDKLDENLKLATSTTLDFGANLLKKLLRFLVKILAASKSR

SEQ ID NO: 58173 - protein, 221 aa, Zea mays
  Coding DNA Sequence Number=SeqID_14798
MSGGLRNEGASKLEKVEIVSTSSFGADVDPRAIDLAMRIAERMFLKMKEDEAKKSIEEEENDRWRPNDESTSSQGSSFKSTSHMCFVANESDSESESEDEEEHESDSEDEDDLQKFFAQLSKKNRMSLLKLMKRAEEQKEMLHKQEDILIEKIKDLEKLTKEHEKLKCSHDDLVQSVLHAWGGSLGAPSRRGGPDGRGDGARCRGVPGPQALCCVYAREST

SEQ ID NO: 58174 - protein, 136 aa, Zea mays
  Coding DNA Sequence Number=SeqID_14799
MPTEHIGHGSVRRGRRRDDRYGQKWADSNGGGRRAEAAGRRHLWQAKRATLHLRHNDRVKKGTGKGDTPKGTLLREGSGPRALLLIRGSKVGPSEGFDSRLRALGLRALLLIRGSKAGPSGGFDSCLRPLRLRAHY

SEQ ID NO: 58175 - protein, 149 aa, Zea mays
  Coding DNA Sequence Number=SeqID_14800
MGKRNAALQHDDGPDSRNEQNAGTQGAITNGTPVPPPQVRTTPHIGGPAGRPNPKWLVAVHSGSSDNDLRSGKPNSSSDDLRADAAATRPSPTSPLEGRGQATKAIEPEVSPRVAPTISSAEKPLPAASMGGGTGSSAEAARAGEPDTW

SEQ ID NO: 58176 - protein, 106 aa, Zea mays
  Coding DNA Sequence Number=SeqID_14801
MCRYVRQAPAQPPLGRGAERLLRTVHHQAGDLMVVANVGDSRVVLSIAFDDDAINVVQLIIHLKPNLPPQPKVISTRYVARVRRLLYRGLWRHLGARGDAEEDQQQ

SEQ ID NO: 58177 - protein, 190 aa, Zea mays
  Coding DNA Sequence Number=SeqID_14802
MGVRKNSKHPAGIPVGYLLASQNSEPTARGDVGAAAHNTIFPTGISSKTYDASMLTGGSSICMTSRKGSHGGRVQGWVPWNRKGAAGGDGSRELSGHHGWAVEQRELAGENAGGTLRAMGKKPAESSATSSSKGKWRSEWGGLLVSSWQGGELVHGKWRPRLGWRWSCRRETREEEGMWEKKTGRKGCGG

SEQ ID NO: 58178 - protein, 281 aa, Zea mays
  Coding DNA Sequence Number=SeqID_14803
MKLLKKYVTLLKTSKTEGPSTGSFIKRACSTTMDELKTPETEYRPGLKRLLETTHLELDGKLFVNTQQAPTWRANCRRFDTGGSLDRRGRCACSRGLQAFARERERLSASPFSRAATFSYESPGPSFYRQVSAPCSCDVVAVEGVLEPYGKSEPWGRVRRSPSSGAEVEPEPWGRARRSFLWRPRLDLAAVSLTLSSGTAVGAGQAALFSCQVGLWSGKVTAVTSALLTEERALGQAIRLRLLLGEACPSWASGESKLSADGGYQLRFRSLVGTPNYGPRQ

SEQ ID NO: 58179 - protein, 139 aa, Zea mays
  Coding DNA Sequence Number=SeqID_14804
MRKKHGPVPKTHTCSGPDSHNEQDTGTQGAITNETPVLSPQDRRHLWQAKQATLHLRHNDRVKKGTGKGDIPKGILLREGSGLRAPLLIRGSKAGPSEGFNSRLRALGLRAHYWSEVRRLAPRKGSNGRLRPLGLRAHY

SEQ ID NO: 58180 - protein, 483 aa, Zea mays
  Coding DNA Sequence Number=SeqID_14805
  Homolog annotation: Hit_ID=Q6QP51; Match level="QueryCoverage=39%, HitCoverage=90%, E-value=8e-21, Identity=40%"; Hit description =Putative growth-regulating factor 1
  Subcellular localization annotation: CTP_CleavageSite=82; ConfidenceScore=5.26e-01
MQAVCNRTKGAHPFSFDASSMEAQAHTSCNRRAGYYVQENCTATCASTTPPRLRNQCRDSRRPCARPNSANRAHRSRVSQPREKARRSIWPEMGRSNGGGRRAEAAVKLAPRKGSTVASEHSGSAPITGQRFEGWPLGRVQTTASGHSGSAPTTDQGFVRLAPEGFDSRLRRRARDDTGYVRYITKARATLPSSLETPCSAPFEGNMALSPSSLRKGDTWALGGCSRKLGSGQTVDSVNIPAQERGTRLCTRATARLGPRTRPRLRKTTNSASPDPRARTQPRPSEDDELRLARPQGSDSASAPEDDRLRFALTPGLGLSLGPGKTTDSASPARKARIQPWLQTTVSASPDPGLGLDLDLGGASALPDPGLGPTTSQGAIITLPLASSGYREQDRCPIWRAPKCLADQHRRLSQNGSGLVFMYLSACLMSQIGALSTFFPLIALTSSGSSTVSGEASSITVSEPYHHVKRAAKLTSQPKPRNL

SEQ ID NO: 58181 - protein, 247 aa, Zea mays
  Coding DNA Sequence Number=SeqID_14806
  Gene Ontology: Mol. function=RNA binding; Cellular component=protein complex
  Homolog annotation: Hit_ID=A2XNN5; Match level="QueryCoverage=51%, HitCoverage=19%, E-value=7e-39, Identity=67%"; Hit description =Putative uncharacterized protein
MDFYLWQILMFNYFSSLIDTISKLGLQISSVLLHMTIVIDKILEKGTVEYLIVHTAILDYFTIADKTSASDAICQLIPLLTQGALIIDGDEPTNAPELPKKAKAKKKRSKEPLIVRIMQTREGLKLGISCLKYGSAKMIAKIVVVCNDAIIGHSEHQYVATGMPTKAALKGAVIVKLFFYCEIIFHVALEQEMYICKRDGNGGGLARDGGGATAVPQDSEGFRQPDMHHGMEVRLGLSKGPICPSFS

SEQ ID NO: 58182 - protein, 104 aa, Zea mays
  Coding DNA Sequence Number=SeqID_14807
MGMLKNTVALIQCVVKHQSISVLSLFGFARPRVSEFQQSPIKKDANKMVTIEIRNEDVVGEFRPQWWPKALKSFASTIQHFLKILGTRGTHVVLILLKELAASH

SEQ ID NO: 58183 - protein, 287 aa, Zea mays
  Coding DNA Sequence Number=SeqID_14808
  Homolog annotation: Hit_ID=A2XZK5; Match level="QueryCoverage=73%, HitCoverage=70%, E-value=8e-30, Identity=73%"; Hit description =Putative uncharacterized protein
MTKFVAMTQKRDFKYESTRNCATRGCPADCPIWLSSPSVACSLSAPYGHTQSNRPRPPRVGLRGARVAAAAQGPSCLYVGPIETASQEKLEALYHQARDSYYSGQPLIIDDMFDKVELKLRLYGSKSVVKYPRCSLIRHSTYADAEEDQSMFMALSSIWMLLLLFGTSAVLVPTLYTLSIAFGDVFGARHLLYGEKSLDAVTRVNDLALVGLGYLVGYPIASASVGALQGLLSNNLVALKGSCPNCGEQVFAFVKIEKTVRAPHRAECHVCQCPLEYRTKIEYNDIC

SEQ ID NO: 58184 - protein, 132 aa, Zea mays
  Coding DNA Sequence Number=SeqID_14809
  Homolog annotation: Hit_ID=O48967; Match level="QueryCoverage=40%, HitCoverage=11%, E-value=3e-13, Identity=69%"; Hit description =Putative uncharacterized protein
MEPKCGFLQIGPKLRVSFANLQICEPYDLSQAQASVIPVSTRGIGVSALPSVRAAPTEGLRVELNRRRAEEDAPVSLERSNDLQTELNCRRAGEDARVSLERAREHRQNVEGRNLDYDFVAVAPQTPTGAQI

SEQ ID NO: 58185 - protein, 203 aa, Zea mays
  Coding DNA Sequence Number=SeqID_14810
MALSNKNMLRVVPAVRPQLLPRQPAASHALVGDPVAATPASGGVAATEEVPAGGSAPTPDPGGDVGGASSSNPPLAPEEMEVVFGRRLQSGAEQEAAPVPLPRMLSRAHQVLSDTGTVILREWEVLEAEHQRLSDWCTQLEERTRTTSRQFISERSQLEWDHKEYKRDLQRVCARELEASRWEKKVTKREEAVTQREALTIEY

SEQ ID NO: 58186 - protein, 180 aa, Zea mays
  Coding DNA Sequence Number=SeqID_14811
  Homolog annotation: Hit_ID=Q2QMK9; Match level="QueryCoverage=85%, HitCoverage=17%, E-value=4e-08, Identity=31%"; Hit description =Retrotransposon protein, putative, unclassified
MFVGVAPCTSLFRYFFVLVKSGKTRDHIGAYYFQTRPDPAVVYIPTFGGARWENWRSDWVIASAEANDRLVLPSDGQRSTASLRTAILATLPTLDDSGVAVRQTGGQDPHRGIRISDAPVGGPQPAGVARSANPAVAPSPLDKGKGATSGASTPCSSRGSEEERRHRLRRADESLASEPP

SEQ ID NO: 58187 - protein, 37 aa, Zea mays
  Coding DNA Sequence Number=SeqID_14812
TSVQVDMRIDGFDYDYGAGEDEAVEGDFQEFQDYDEF

SEQ ID NO: 58188 - protein, 38 aa, Zea mays
  Coding DNA Sequence Number=SeqID_14813
MRVEWGGNEIDGSGYDYGAGEDEAVEGDFQEFQDYDEF

SEQ ID NO: 58189 - protein, 323 aa, Zea mays
  Coding DNA Sequence Number=SeqID_14814
  Subcellular localization annotation: CTP_CleavageSite=32; ConfidenceScore=5.33e-01
MPAEGSGSHRHTPAGNVASDPSAATTDAPSSSAAMSAGGSGPHQHTSAGNVTGDLPMATAAPLVSAPSPPSTAAKGVPAASAPTVQDDAGVVATPLGSHVPAGGPEAVAQPTAVADRTTVIPSDTPPVVGVGGTSSSAPQPTPEAPEVILGHPLWSGVEPGATLTPLPQVLTHAHQALQETEAAIRREWKALETEHQRLGNWCSQLERRTKATFCQFASERAELEQERENFKEDIWKVSDQEEEELSDKASGIARIEGNLKAREASLAKRTTDLTWQEEDLAFREEMWARQNKLLDELELEVEEKVKCLEGKVRALEGQVRQF

SEQ ID NO: 58190 - protein, 215 aa, Zea mays
  Coding DNA Sequence Number=SeqID_14815
MKGPCTPTCCTLLCASFFCFLLAGSEDEPPMIGSTSFGSEAAPAWSLNEAISSKSGSEFTGGGYEIDGFGYYYGAGKWYSFRLERGISPLYDNPGLRSAVLARLPTLDESGVAVRQTGGRDPHRGIHIPGAPGGGPQPADVAPRVSSVAPSPSDKGKAPASSSSTPDATGRSEEVRRHRLCRADGSLVGDLPRDSGSPQKRQKTAGGAKEPEPRF

SEQ ID NO: 58191 - protein, 103 aa, Zea mays
  Coding DNA Sequence Number=SeqID_14816
  Gene Ontology: Mol. function=electron carrier activity; Cellular component=membrane; Biological process=electron transport
  Homolog annotation: Hit_ID=Q10ME8; Match level="QueryCoverage=31%, HitCoverage=3%, E-value=1e-09, Identity=84%"; Hit description=HAD -superfamily hydrolase, subfamily IA, variant 3 containing protein, expressed
MAGQHQIWKHNLHDGITKVISGDGYERNLNGSRSKLGEYTRRQPLGEDVCELRHGRDAENANIVGDDTLADEVKVDLHVLRALMLHGIGGEVDRADIVAVDKD

SEQ ID NO: 58192 - protein, 947 aa, Zea mays
  Coding DNA Sequence Number=SeqID_14817
  Homolog annotation: Hit_ID=A2YCR2; Match level="QueryCoverage=88%, HitCoverage=100%, E-value=0.0, Identity=61%"; Hit description =Putative uncharacterized protein
MTRRPCGLWLYTLSMVDESSARILSTAALKRRADASGAHTQSHSHQQTASAPPTNPNYSIPHRRPHLAVQCSPSGSRQAPSSSIAGCSKASESETELTSLTPSLLHLPHALMRRKKHLDRGGGGRGGGTELFICFTSRPSAASAAPVAGGSAQSSLRPSSSSKLLSPGRGSASASGAETVPAPPLHPSLSRRLRNSGSLKGGQSPMFPSGSTGGGRRSRGGFEPAEPSSPKVTCIGQVRVKGGKRKPKHTSAATLHSCSRRGGVGSAEVSFRRAGDDRDGPQSKNQGWVYQIPVNICEALKTFGSCGGRSLCSPSRHGGAGERGALPTDANCGKKRRQGAPAGGSWLCGAAVARCLLAIQEEDDDEVGNGKGAAVVPAEEMRTSEVGLVMEGWDVEEEKAVMMGDVEVEKKDEILVVGKEEEGRVSVCIPPRNALLLMRCRSDPVRMAALATRFWGSPAAATVEQVDNEVAGCLNDNEEEEEKEEEAEAEPLECKDGARCSAVSVKDLKCEECGSDENDGAEAGEINQEKAEAEESSKCGDLVEEKEGASCRVGVEEAQIVRKDAELEVPLGEVTEMENQGPDMVELVVSEEEVPGHEKVDEEMMGRRSINSYSPSATLKEDRTKLRRLSSRMCVSTSSRASSSSDRVGRRHSFSAEMEARRSSFSSLKDSRRASFSIDRDGRRWSFSIEQEHLVAQPKVLMASRKGKKTSSEAESEKDCDVVAPNSAEEGQESYDDGKEEDTTENVAEEGKTKSAEANQEVEKVETRAEECEGGTVPVIHRRKKSGELPDCLLLMMYEPKLSMEVSKETWVCSTDFVHWKSYQGKNNRNHWQQKASAAGTVETKEKENAEGTTIANDVQESKDPSTVNSAVPMPCPVVQKTPPLKPATTEQKLKLELPPVTNAAAYAPFVLKRCKSEPMRSSARLAPDACFWKDRHRPLNAAGVGF

SEQ ID NO: 58193 - protein, 217 aa, Zea mays
  Coding DNA Sequence Number=SeqID_14818
MEVGPEPPLLIRGSKVGPSEGFDSRLRALGLRTHYWSEVRRLAPRKGSTAASGHSGSAPTTDQGFEGWPPEGFDSRLRTRRARDDSRYVRYMAEARATLLRSKLRPLKGHDLASPEPSLGQEQKTQENSATCPAPTAVPPARVRLTAAESSLRRHRKLRLARPRGSAPASTSEDGLRLAQPQGSDSTSTSENGLRLARPQDSDSASTSEDGLRLARP

SEQ ID NO: 58194 - protein, 90 aa, Zea mays
  Coding DNA Sequence Number=SeqID_14819
  Subcellular localization annotation: CTP_CleavageSite=18; ConfidenceScore=5.15e-01
MKLPPSSTCTPSEANGPKSSVSSGTSARPPHQQHNRPPSQHSEGGYSHGGHSGQRGKKGKRGGKAYDHTSSGIMGHAPSSNSVGYNYYNP

SEQ ID NO: 58195 - protein, 130 aa, Zea mays
  Coding DNA Sequence Number=SeqID_14820
  Homolog annotation: Hit_ID=Q9FVG4; Match level="QueryCoverage=76%, HitCoverage=13%, E-value=3e-09, Identity=31%"; Hit description =Transposase DOPA
MLRYRLPDDMDYMGYTKHVFQWNAKKRVKDVIYYAYKGFQKASAHHMQCRGIDPNHNFDGDDYLQKAKRLEATSGQKPSDIEVFMAGQKEPDPSNPEQMCNQTAMDRLIGPEDRGDYMRRNINGPYGLGS

SEQ ID NO: 58196 - protein, 238 aa, Zea mays
  Coding DNA Sequence Number=SeqID_14821
MPGKANCCCPARMQHFVLCPRFRGEDGSEDLPVRFGAACACWCGVGGQADAAVSADVVAAGESFSAVEAVSAAYGPTSGSLALMSGSRPLSGDANESLPVAASVLGPWLLLQRSLASRLELVAPQALWCGGCSYPRGRNRSSVCNGTLSAGVCSLWLSGPEHDSVIDIVEKARKIVLAEEFPSIKTCSVSGIAYPSVSYLSQKVMSEVSVSRRRRSPSARSALSAYVYSVVFRIPLSK

SEQ ID NO: 58197 - protein, 232 aa, Zea mays
  Coding DNA Sequence Number=SeqID_14822
  Gene Ontology: Mol. function=transcription regulator activity; Cellular component=nucleus; Biological process=regulation of transcription
  Homolog annotation: Hit_ID=A2XJY8; Match level="QueryCoverage=71%, HitCoverage=35%, E-value=1e-59, Identity=72%"; Hit description =Putative uncharacterized protein
  Pfam annotation: Domain name=HLH; Domain location=18-67; Score=64.2; E_value=4.4e-16; Accession=PF00010.17; Description=Helix-loop-helix DNA-binding domain
MLARKPPQKMTTARRSRAAEVHNLSERRRRDRINEKMRALQELIPHCNKTDKASMLDEAIEYLKSLQLQVQMMWMGSAGIAAPPAVMFPGVHQYLPRMGVGMGAAAAAALPSMPRLPFMAPQPVVPSAPVSVGPVPAYRGHMPAVGITEPYGHYIGVNHLQPAPPPPQVQSGQHYAQGVSYYPPPLGATAKAVQQAAELHHVPGPGGSIMPAGAAPGVLLPESAQGRGPDGG

SEQ ID NO: 58198 - protein, 66 aa, Zea mays
  Coding DNA Sequence Number=SeqID_14823
MTSPVQDLACTTQKPLFDPRWSKRSVPTRKRDRTREYDKSAGPTTGYTDRGESRACEQWGCKNITR

SEQ ID NO: 58199 - protein, 275 aa, Zea mays
  Coding DNA Sequence Number=SeqID_14824
  Gene Ontology: Mol. function=actin binding; Cellular component =nucleus; Biological process=cytoskeleton organization and biogenesis
  Homolog annotation: Hit_ID=Q5N7V5; Match level="QueryCoverage=98%, HitCoverage=62%, E-value=5e-18, Identity=32%"; Hit description=Myb proto-oncogene protein-like
  Pfam annotation: Domain name=Myb_DNA-binding; Domain location=1-37; Score=17.4; E_value=0.054; Accession=PF00249.22; Description=Myb -like DNA-binding domain
MALIKAHKRCGNHWSTIATFLPGRSENAVKNHWNATKRSLKAKRRLKKKSNAQQVPAGQWSVLEEYIRSLYPDLADGAGADQTPPAAEDSPPSSYNLGSYSYGEVISSPASAAAPPGSFDQMTAMGLYLGASSSSPAPAELQGGMSSDIVAPFLHLDLNAYYGGAPAATMRLMAPMGGMAAPVPQMMEHDHYQHQQASYATANQLLTYPFIDNSVMWQQAPYAAHGSAAYGGGADAAGAGPSNVVAVPADDVDVVQMASREFLTPSEDEVTLDLA

SEQ ID NO: 58200 - protein, 244 aa, Zea mays
  Coding DNA Sequence Number=SeqID_14825
MTTSLMVERSEPGYGLPPALIFKDVHHPRWGGRQAELGSCFPHGLVTRFFLQHFGEKDVHQPCGGGELRLRGVGQLRAPSAAACLAPWLGWLWRHLQCHLPPPSRAQLFVHRTGDGRAEGGSKDLFVRGEAVAVAGKPLVWRSLLSVLRWSPPLTSIPEKEFGGGPQESGGVFRPTVRNQAERLHGLRTTPGDKCPFSSSGPQAFGYGTRLSGHIGSGPPHGTGSRSPKPAPRLSGHPAFVERS

SEQ ID NO: 58201 - protein, 102 aa, Zea mays
  Coding DNA Sequence Number=SeqID_14826
MPSKVPMMLSKTFFVTCIKSMLWQISISFQYGRVNREDVPKSKINAEWLERDMVSVGVAKVVKDLFYFMRREVLHQQGLFYNTNGNLQQFPELSLYTISHSV

SEQ ID NO: 58202 - protein, 136 aa, Zea mays
  Coding DNA Sequence Number=SeqID_14827
MKGISRRPSAASICGCKSKFQDENSPPMDLEKSVPRVDPFEGVDVTLREGKLELMSSACQAGTNGSSRKNVLEIGNVTLENDHHVAGAGTNEWREKEEESLDAPLKPWKISTVVVESMREPSVIEYLSNSQVACGC

SEQ ID NO: 58203 - protein, 70 aa, Zea mays
  Coding DNA Sequence Number=SeqID_14828
MALKSWALRGGGQGHTVGAGVGGGRRGHHKGEIESAFIPFVSFGDLDNNTFKGPTGLLSVEQEIQYDKHI

SEQ ID NO: 58204 - protein, 149 aa, Zea mays
  Coding DNA Sequence Number=SeqID_14829
MGKNNKRKREPTPPSEEFGDSEYSEEEFSSESEGSPAPVSPPASSDDSDDSQGIAAEVWTYIWAVERAGLEGSDESECSSDEEDSDGGDEGEDDDDDDDDDGGGGGSGSGRGGGDGSRDSTKGDSRGSTKGSSRGSTKGGGGGRGRASG

SEQ ID NO: 58205 - protein, 40 aa, Zea mays
  Coding DNA Sequence Number=SeqID_14830
MGLGVCGSLCQGCLWCNLCSRKEGVEANLQEFQDFDEFED

SEQ ID NO: 58206 - protein, 157 aa, Zea mays
  Coding DNA Sequence Number=SeqID_14831
MTGTGHARDERRACRDQGDDVAKVGGMFSKIKLDGGSVKGLDGFNIGKDVPLPGLMTEDPLAGHMPRHGIYFSKHFCKTESLIIEKPYLDSLNQHTLESLFFSRVRKQQIFVAFALRCLCNRFRISISPMFCNVCKTGKTLLGKEKGCSSSDKLSID

SEQ ID NO: 58207 - protein, 624 aa, Zea mays
  Coding DNA Sequence Number=SeqID_14832
  Gene Ontology: Mol. function=transferase activity, transferring glycosyl groups; Cellular component=integral to membrane; Biological process=cell wall organization and biogenesis
  Homolog annotation: Hit_ID=A2YU28; Match level="QueryCoverage=97%, HitCoverage=96%, E-value=1e-160, Identity=50%"; Hit description =Putative uncharacterized protein
  Pfam annotation: Domain name=XG_FTase; Domain location=63-598; Score =513.3; E_value=2.8e-151; Accession=PF03254.4; Description=Xyloglucan fucosyltransferase
MKMMGDTASSHKLGDLVAEAWPAATAVTRLGKERRWRKTGAVLVAAGLVTLPFLVFFTSGQESLSRAWESAAAKLTMMAGAGSLEASDARTTTGGGATKVGADELLGGLLVRGGFDRGSCLSRFESAQYYKHSPYAPSPYLLRKLRAYEARHKRCGPGTPLYAKSVEQIRSGGGGGGGAECNYLVWLPYNGLGNRMLSLVSTFLYALLSDRVMLVHFPADFTDLFCEPFPDATWVLPPDFPVANLSDLGMNPEQSYRNLLASKKIANDPTVQSSVPPWVFLNLCHEQDIDKLFYCSDDQLALAKVSWLLLFSDMYFVPSLYSMGEFHGELHRLFPAMESVCHLLSRYLFHPTNSVWGLVARYYNSYLARADQRIGIQIRIFEYFARISADDMYSQILACSRQEHILPETEDDNLTTTEAAAAAGNTTSTAILIASLYPDYYEMLRSRYYEHPAKGGVRVSVFQPTHEKVQWGIAQWGEEELDLKCDTAWWGRGRGIASRSGEEEDWKSSRADVPCSSFPFLVPNVPGTLSLRIFLLSFSEVLVTSGTSTFGYMSGSLAGIRPTMLYSARQHTVPDPPCVRMVTMEPCSHRPASMECQAKAVAKEDLAQHVMACEDEGVGIKLFD

SEQ ID NO: 58208 - protein, 127 aa, Zea mays
  Coding DNA Sequence Number=SeqID_14833
  Gene Ontology: Mol. function=nucleic acid binding; Cellular component= nucleus; Biological process=poly(A) tail shortening
  Homolog annotation: Hit_ID=Q67X81; Match level="QueryCoverage=75%, HitCoverage=46%, E-value=7e-35, Identity=77%"; Hit description =Putative poly(A) binding protein II
  Pfam annotation: Domain name=RRM_1; Domain location=6-78; Score=69.2; E_value=1.4e-17; Accession=PF00076.13; Description=RNA recognition motif. (a.k.a. RRM, RBD,
MDSRSVFVGNWPVVDYACTPEEVQQHFNSCGTVNRVTILTDKFGQPKGFAYVEFVEVEAVQEAIKLNESELHGRQLKVAPKRTNVPGMKQPRGRGFNPYRPYGYSPYGYGYGYGRFPRFRRPRRPYF

SEQ ID NO: 58209 - protein, 57 aa, Zea mays
  Coding DNA Sequence Number=SeqID_14834
  Subcellular localization annotation: CTP_CleavageSite=6; ConfidenceScore=5.03e-01
MQLQTCAANEPVLSPSHPGSTMVQSSEATFNRCTFGAPITKMKIKPQNRKLDLESLG

SEQ ID NO: 58210 - protein, 66 aa, Zea mays
  Coding DNA Sequence Number=SeqID_14835
MKIEAEDSFGEPLCYFAKGVFALRTFGKEDPQQWLTEKQAEPEASALAKRSELSAVPKRKTPESWY

SEQ ID NO: 58211 - protein, 276 aa, Zea mays
  Coding DNA Sequence Number=SeqID_14836
  Homolog annotation: Hit_ID=Q6JAD6; Match level="QueryCoverage=10%, HitCoverage=4%, E-value=1e-07, Identity=86%"; Hit description =Putative uncharacterized protein
MSGGSPDSYCVLSGVHRTGTEGCLVLALSSSPLAISGEVLRKALSLPPLELNPILCANLVTQVVSSQDGVDEECLIVRGGDDEDPPRPFRQVKGKTIYIEQQEGKKKRRMDRAARAALAAAIEFVASHLGLAPLLPPHLTPLCLLHLPLHQLISFQSHPPLPLYPPPPPLHLPLFPLLLPFPLHPFLHLALGSVTRLSPGMSVQTRTRGVLVASLEGPYDYASLQYQDSGVFLLGTADSSDRFASALASGSACFSVSHCWGSSLPKVLKAKTPLAK

SEQ ID NO: 58212 - protein, 139 aa, Zea mays
  Coding DNA Sequence Number=SeqID_14837
MGITLAQGHKRAQTTARQANCGTGLLRREIARATEHGFTELRGQAGCSPLRGSARVAKQRRRRKDSTGRRRRDSGCAKTALVSTDRTKQRVRGCTEGCPEQLTVKRSSPWHWTGHGRDGGQQNRQQSTAGGGGAPYTHG

SEQ ID NO: 58213 - protein, 219 aa, Zea mays
  Coding DNA Sequence Number=SeqID_14838
  Subcellular localization annotation: CTP_CleavageSite=28; ConfidenceScore=5.22e-01
MPHAAELALRVHLLLLQLPRTLRSVATRAPAPASMTGRELQLGRSRCSPTLAAVPLSLLARVDVPSARSCPSSQLPARVKLSARRRFSPARSVPARQRALSDRSALIAITSEVLICLPARRQTWVPCSAFRASASPWCYRLAVIHWWSTSPHVQIVNPMHHLLAKWETNSSLPAPVVHYQLQHVGHARRVSKLAIKFCFRSRAAHTHLCLLAVHLTPLF

SEQ ID NO: 58214 - protein, 92 aa, Zea mays
  Coding DNA Sequence Number=SeqID_14839
SEQRSEVHGQQAKMSVCGTGAKAELDGQLGDSASMTNMLKLIVNDRSRERTVGFPFSKQVVHGVDDLNMRRRGPPVNHGQTVTPRRRASSKG

SEQ ID NO: 58215 - protein, 43 aa, Zea mays
  Coding DNA Sequence Number=SeqID_14840
MNSWFPEQAQQQPFVFPQFQSPMSQWGLHAPPPPPPPQALQFS

SEQ ID NO: 58216 - protein, 143 aa, Zea mays
  Coding DNA Sequence Number=SeqID_14841
MARTDFGAAVSTVSSERSSGMARGGLGGDFGGIGYWRLGKWRKRGCAEARIGERRHGRRVSRRRGRVPQRVERRESSWEEEQESLLLSKALKMQQDDEDRKNVVIIKGLEDKIKELEDSLKEKEKCYVQPKGLFPKRKLRTKG

SEQ ID NO: 58217 - protein, 224 aa, Zea mays
  Coding DNA Sequence Number=SeqID_14842
  Subcellular localization annotation: CTP_CleavageSite=89; ConfidenceScore=5.48e-01
MEAVTAARASAPTFPPTRSWKDGLPDPSLMTLLTGVTSTTRSTPYYARHSTGVLGPSSIAVWSSSTVAGFTRTVGRRPAWCAVRGIVSRDSAEAAMQDVARRALSHYCSVLGGVADGLNLMYYPRRPSSSTGGVIVSPIGEDNPRLSNTVNLAVMLNTELDHALDELSRARSKIAQLRAKRTEHHHLEDGSPAPVETQHPYRSPRRGHQSYGDPDCRTKINLEP

SEQ ID NO: 58218 - protein, 564 aa, Zea mays
  Coding DNA Sequence Number=SeqID_14843
  Gene Ontology: Mol. function=binding; Cellular component=nucleus; Biological process=metabolic process
  Homolog annotation: Hit_ID=Q60EM0; Match level="QueryCoverage=98%, HitCoverage=71%, E-value=0.0, Identity=60%"; Hit description=Unknow protein
  Pfam annotation: Domain name=PPR; Domain location=118-152; Score =35.3; E_value=2.1e-07; Accession=PF01535.11; Description=PPR repeat
  Pfam annotation: Domain name=PPR; Domain location=178-212; Score =20.1; E_value=0.0083; Accession=PF01535.11; Description=PPR repeat
  Pfam annotation: Domain name=PPR; Domain location=213-247; Score=6.9; E_value=1.2; Accession=PF01535.11; Description=PPR repeat
  Pfam annotation: Domain name=PPR; Domain location=280-314; Score =44.1; E_value=4.9e-10; Accession=PF01535.11; Description=PPR repeat
  Pfam annotation: Domain name=PPR; Domain location=377-411; Score =34.4; E_value=4e-07; Accession=PF01535.11; Description=PPR repeat
  Pfam annotation: Domain name=PPR; Domain location=479-513; Score =33.5; E_value=7.6e-07; Accession=PF01535.11; Description=PPR repeat
  Pfam module annotation: Pfam domain module=PPR::PPR::PPR::PPR::PPR::PP R; Domain location=118-152::178-212::213-247::280-314::377-411::479 -513
MDNIDEVTDKRVIALGAIEKDKIMVARAYNKKALDHFLDAHRRQGRCVGGGALLGIIKICGSVPDRVLGKQLHARCVRCGHDHGDIRVGTSLVDMYMNWYSVLNGRKVFEGMLKRNVVTWTSLLTGYIQAGVLLDVMSLFFRMRAEGVWPNPFTFSSVLSVVASQGMVDLGHHTRDMVSWNTLMAGLVLNGRDLEALKLFHDSRSSITMLTESTYSTVIKLCANLKHLGLARQLHSSVLKRGFHSYGNVMTALMDAYSKAGQLDKALDIFLLMSGSQNVVSWTAMINGCIQNGDIPLAAALFSRMREDGVAPNDLTYSTILTVSEASFPPQSHAQVIKTNYECTPIVGTALMVSYSKLCGTEEALSIFKMIDQKDVVSWSAMLTCYAQAGDCNGATNAFIKMSMHGLKPNEFTISSAIDACASPAAGVDLGRQFHAISIRHRCHYALCVSSALVSMYARKGSIENAQCVFEKQTDRDLVSGNSMLSGYAQHGYNQKALDVFRQMEVEGIEMDGLTFLSVIMGCTHAGLVEEGKLDETMSPIEGMPFPAGPTIWRTLLGACNTRL

SEQ ID NO: 58219 - protein, 121 aa, Zea mays
  Coding DNA Sequence Number=SeqID_14844
MGDYLHVASQKNSLTTEAGSLRRKEVRGEELPGPMRANPSSATQGSFPPLQGSLWATLLGRGRRHSTVHARRPVPFAVAKNVLELSRGHLGVKMAVPTPGPIRLNWFGNGNPVLRKSRPVI

SEQ ID NO: 58220 - protein, 278 aa, Zea mays
  Coding DNA Sequence Number=SeqID_14845
  Gene Ontology: Mol. function=binding; Biological process=thiamin biosynthetic process
  Homolog annotation: Hit_ID=Q60EM0; Match level="QueryCoverage=41%, HitCoverage=13%, E-value=3e-46, Identity=78%"; Hit description =Unknow protein
AVRGGRRSATRNCRGPGEQTRAAPPKEAFPHSKGASGQHFEGAVDGNRRFTHGGRFLPRRREMRWSITGAPGGEMAAPTPGHIGLTGSVIGSAVPGDLAPSVELQQPAMALPRLTKRPRVTVQPKSARRRGKWKEKDEVRKLMDTKKVKKEAGCSWIQIKNKVHFFIASDKSHPLSEQIYAKLRSMTAKLKQEGYCPDTSFVLHDVAEDQKEAMLAMHSERLVLAFGLIAIPPGAPLHIFKNLRGSTTSNQGSALVAISGEWILNKMVVHSILSQCPP

SEQ ID NO: 58221 - protein, 83 aa, Zea mays
  Coding DNA Sequence Number=SeqID_14846
MDGGNLPRRGEPSVSQLLQGLQKGLEILLSLAWSPIAPVAAGGGHHSLRKRREPPVVVPEGLGKGILRKGSFSVKEAGPEPSY

SEQ ID NO: 58222 - protein, 74 aa, Zea mays
  Coding DNA Sequence Number=SeqID_14847
MSKLDKTFPLLILPVLPSLLNPGVGPHEFGLSDCPHSLKWLYVKGVQKIYFRKFGLRPFFRGYGFRICGPRFFY

SEQ ID NO: 58223 - protein, 32 aa, Zea mays
  Coding DNA Sequence Number=SeqID_14848
MSTSSYCTSYYDPQAKKKKKDGKKGNNNGEKE

SEQ ID NO: 58224 - protein, 122 aa, Zea mays
  Coding DNA Sequence Number=SeqID_14849
MSKPDKTFPLLILPVLPSLLNPGVGPHEFGLSDCPHSLKWLYVKGVQNVYVNAGHLSLIMQYSPIIPGLGSGRENRYFMHQGKDGLAFVEAFLAQKIYFRKFGLRPFFRGYGFRICGPRFFY

SEQ ID NO: 58225 - protein, 76 aa, Zea mays
  Coding DNA Sequence Number=SeqID_14850
  Homolog annotation: Hit_ID=Q7XBE0; Match level="QueryCoverage=72%, HitCoverage=5%, E-value=2e-07, Identity=50%"; Hit description =Putative gypsy-type retrotransposon
MGVLHLLLILMGVLHPMLIPMAEGLSALEAATAENLAPKDGVDAYPAPEGVAEGDSARVGSAGYCPAPEGFGGRDG

SEQ ID NO: 58226 - protein, 317 aa, Zea mays
  Coding DNA Sequence Number=SeqID_14851
MESHDLRVERESRLVETFWFTGGNETDGLVMTMVLHYVMMSMLCNCCVCELLILARTWFAFGLPSKTGCDIRSAGGDPDDGGGDDSSSHDIDFSADQEPEGWVARPITRDAARGCHFHDALDTLLRRALDRRTWSIEYRCVVYQHSRGVYPDRWEATCLVRRPENSLWGAEICSEHYSISERDSAEAAMQDAAWRALWHYCSVLDGVADGLNLKYYPRCPSGSTGGVIVSPVGEDNPRLSSTVNLAVVLNTELDHALDELSRARAEIALLRAECAEHRHLDDGSPAPVRTQHPYRSPRRGHQSYGNPDCKTKINLEP

SEQ ID NO: 58227 - protein, 77 aa, Zea mays
  Coding DNA Sequence Number=SeqID_14852
  Subcellular localization annotation: CTP_CleavageSite=47; ConfidenceScore=5.60e-01
MAPPPRHRSPSPRARRSAPPRPRPRRPAPPGPRLGRAAPCPAPAPGRAAPAPAAPAPPVPRPCSVLARPPRRALLVS

SEQ ID NO: 58228 - protein, 151 aa, Zea mays
  Coding DNA Sequence Number=SeqID_14853
  Gene Ontology: Mol. function=structural constituent of ribosome; Cellular component=ribonucleoprotein complex; Biological process =translational elongation
  Homolog annotation: Hit_ID=O24415; Match level="QueryCoverage=49%, HitCoverage=65%, E-value=9e-22, Identity=78%"; Hit description=60S acidic ribosomal protein P2B
  Pfam annotation: Domain name=Ribosomal_60s; Domain location=17-108; Score=77.3; E_value=5e-20; Accession=PF00428.10; Description=60s Acidic ribosomal protein
MKVIAAYLLAVLGGNTSPTADDVKSILESVGAEADEEKLEFLLTELKDKDITEVIAAGRERLSSVPSGGGAIDMGAPAAVAGGGAAPAEEAKKEEKVEEKEESDENLRIRKSNFGQKTGIENFGTKLKSLTTYEEGDTTLEGQDMGFSLFD

SEQ ID NO: 58229 - protein, 126 aa, Zea mays
  Coding DNA Sequence Number=SeqID_14854
MKPWKETFRSSKTTTSSRRGLAVTPSRLPVKAAVIYVSFSHFDLLPIGRAYEGGPHRAGVHAKGRKTQPLRLAPMDRTYRDAPRVRKRYSSCGKVVTPGSAHFRHLEGSFPARGEFTGPFSVQYSP

SEQ ID NO: 58230 - protein, 115 aa, Zea mays
  Coding DNA Sequence Number=SeqID_14855
  Gene Ontology: Mol. function=transcription factor activity; Cellular component=nucleus; Biological process=regulation of transcription, DNA-dependent
  Homolog annotation: Hit_ID=Q5GAQ0; Match level="QueryCoverage=47%, HitCoverage=19%, E-value=6e-21, Identity=81%"; Hit description =Putative uncharacterized protein
MGRDLGPNPARYNGPCRPDTKLFRAVPCLGRAFFSVLRAGPSGPAQMYTYTLDAQPEPPGEVQDLHKYKPDPWDGSRTPQEGSGLPTVGSRDSKAKNTQALIKARRGSGADMCPD

SEQ ID NO: 58231 - protein, 754 aa, Zea mays
  Coding DNA Sequence Number=SeqID_14856
  Gene Ontology: Mol. function=two-component response regulator activity; Cellular component=membrane; Biological process=two -component signal transduction system (phosphorelay)
  Homolog annotation: Hit_ID=Q944U1; Match level="QueryCoverage=95%, HitCoverage=85%, E-value=0.0, Identity=70%"; Hit description =Ethylene receptor-like protein 2
  Pfam annotation: Domain name=GAF; Domain location=185-331; Score =43.0; E_value=1.1e-09; Accession=PF01590.17; Description=GAF domain
  Pfam annotation: Domain name=HATPase_c; Domain location=482-608; Score=9.4; E_value=0.0072; Accession=PF02518.17; Description =Histidine kinase-, DNA gyrase B-, and HSP90-like ATPase
  Pfam annotation: Domain name=HisKA; Domain location=367-433; Score =32.1; E_value=2e-06; Accession=PF00512.16; Description=His Kinase A (phosphoacceptor) domain
  Pfam annotation: Domain name=Response_reg; Domain location=637-748; Score=34.8; E_value=3e-07; Accession=PF00072.15; Description =Response regulator receiver domain
  Pfam module annotation: Pfam domain module=GAF::HATPase _c::HisKA::Response_reg; Domain location=185-331::482-608::367 -433::637-748
MRWLLLLAFAAAPAAGEMGYAHCGCDGSGGAGGGSGFWSLDNIFKWQKVSDLLIAAAYFSIPLEILYFVAGLRHLLPFRWVLVQFGAFIVLCGLTHLLAAFTYEPHPFMVVLLLTAAKFLTALVSFLTAITLLTLIPQLLRVKVRESLLWIKARELDREVVLMKRQEEASWHVRMLTQEIRRSLDRHTVLYTTLIELSRVLALDNCAVWMPSEDKSGMCLTHELRRGSDDGEAVVGADDADVLEVKGADGVKLLPPGSVLGSASGGGKEGTGTVAAIRMPMLRVADFKGGTPQVIKASYAVLVLVPPSGRKWAPHELEIVEVVADQVAVALSHASLLEESQAMRDRLAEQNRELLQARRDALMANEARDAFQRVMSQGMRRPIHSVQGLVSVVQEEEGLASEQRLVVDAVARTATVVSTLINDVMEMSAATSQERFPLETRPFRLRSMVRDAACVARCLCDLSGRFGFAVHVENVLPDLVIGDERRIFHVLLHMVGNLIGRVDEGDVTFRVRADDEATEDQRWDPWRPSYSGGHSSVRFVVGVKRQQNAGDSLPRFLRRPRTHDGLDLRLSFSMCRKLVQTMQGNIWAVLDGQGLPESMTLVLRFQLQPSLASSNLLGGSFDQEHYSSLPSNQIAGLKVLLIDDDEINLVVARKLLERLGCTVSSGSGLMDSSSACASFQLVMVNLEMSAIDPLDAASRIRQQYRSSHWPLVMAMTSEQNVWEKCAQSGINGVLKKPLVLLEVKEELERILQNT

SEQ ID NO: 58232 - protein, 60 aa, Zea mays
  Coding DNA Sequence Number=SeqID_14857
MARLGSGREGSDMDTSRGFLSGTVGKFKTVFETKSTGLLLDQVESSTVKVLWGWACSRTF

SEQ ID NO: 58233 - protein, 296 aa, Zea mays
  Coding DNA Sequence Number=SeqID_14858
  Gene Ontology: Mol. function=heat shock protein binding; Cellular component=plasma membrane; Biological process=protein folding
  Homolog annotation: Hit_ID=Q0PMD7; Match level="QueryCoverage=30%, HitCoverage=21%, E-value=4e-34, Identity=76%"; Hit description=J -domain protein
MTPPLAIVAASTLPSAPGAGAGTSGLGGEADEADDEDPPTSTSPPQTPDLSPSVPGRRQRHSSELRAETVTVGRMTRRTPLRPAPHQIARTHPWALAASHHGLLPFAPAATPTPSRGHLRFRAARPLPRPARRPSNSALFDGLVELSVDDLLDWYSFKAINDEGMSMYQRPFMKGKLYIHFSVEFPDSLSLEQCKALEAVLPPKPVSQYTDMELDECEDTMPYDVNIKEEMRRRQQQHQEAYDEEMMCQAVGRGCSAPSSRQLAANLLFRFGRLLSLPACIGLMILLLQECSITKD

SEQ ID NO: 58234 - protein, 480 aa, Zea mays
  Coding DNA Sequence Number=SeqID_14859
  Gene Ontology: Mol. function=sugar binding; Cellular component =cytoskeleton; Biological process=malate metabolic process
  Homolog annotation: Hit_ID=Q7XBE1; Match level="QueryCoverage=20%, HitCoverage=11%, E-value=3e-25, Identity=58%"; Hit description =Putative uncharacterized protein Z013I05_4
MSLDFKLILDELNRRFDELEVRWDRRFSPSVYLDLPPTLLSVHQSSDASASAPPTPTAAVGAVVIADNWGGCFDDGKQYYVAPSVVADNWGGLFEGCDAGGDISSNLLDSDPDEAFVTSHSDKALLDNHHAGELIATGIEYGSYSSVHGSGGAALSHLAHSNTNFAMPTTCSTWGLTEHAMAKAVHRRALWMLRREPLPRLLRASRDNLVVVRFGFGDMESTLKGIRGSDTPFVMDLDDAATVAGGVEDTYGEDRATEEQLATPLDTLMCARLDPVKSHIGCLLLQHLKLSPTLIGAKVVFEEMQQSTILRDAHTTICTTPDPALDAHFANKWRMRCSHNSTSTAEAALEFDPDNCTTCNTSYYHHVAQPRGLLRSDASLLDHRFTRVYVMQVAFGRFDGHFFHDFTIIKSKTDNSSSSPLECSTKCLSLDIGLFSEARAVLNAARPQAMKIAPNMPQHQTCIAVMEEGILCGGQPGTFH

SEQ ID NO: 58235 - protein, 216 aa, Zea mays
  Coding DNA Sequence Number=SeqID_14860
  Gene Ontology: Mol. function=histone-lysine N-methyltransferase activity; Cellular component=nucleus; Biological process=chromatin modification
  Homolog annotation: Hit_ID=Q6K713; Match level="QueryCoverage=90%, HitCoverage=90%, E-value=7e-60, Identity=65%"; Hit description=LOB domain protein-like
  Pfam annotation: Domain name=DUF260; Domain location=22-123; Score =227.9; E_value=2.2e-65; Accession=PF03195.5; Description=Protein of unknown function DUF260
  Subcellular localization annotation: CTP_CleavageSite=14; ConfidenceScore=5.18e-01
MANGGAAAAAAAAAAATGAGSPCGACKFLRRRCVPECVFAPYFSSDQGAARFAAIHKVFGASNASKLLSHLPVADRCEAVVTITYEAQARLRDPVYGCVAQIFALQQQVAILQAQLMQAKAQLACGVQGAAAHSPASHHHHQWPDSASISALLRQDAACSARRTGGPLDDFFTPELVAGFRDDVAAAAGQHCAGKVDAGELQYLAQAMMRSPNYSL

SEQ ID NO: 58236 - protein, 459 aa, Zea mays
  Coding DNA Sequence Number=SeqID_14861
  Gene Ontology: Mol. function=transferase activity; Cellular component= cytoplasm; Biological process=flavonoid biosynthetic process
  Homolog annotation: Hit_ID=A2XB41; Match level="QueryCoverage=97%, HitCoverage=99%, E-value=1e-150, Identity=62%"; Hit description =Putative uncharacterized protein
  Pfam annotation: Domain name=Transferase; Domain location=2-447; Score=58.6; E_value=2.1e-14; Accession=PF02458.6; Description =Transferase family
MAATKILDRLKVGASPPAPGGALPLTFFDVPWLFTGPVERVFFYPYAHTADHFAAHLLPSLVSSLSATLRAFYPLLGRVRPCPDGGGGYEFFCSDGGEAVELIVAESSDDFDELSAGGPRDVARLYALVPRLPSPGADGSFALAAAQVTVFPARGVAVGVSIHHVACDDSSYTHFIRTWAAQCRVASGGADAVPPPPFLDRGVVADPEGLAGRTLDEMRQLAGNGPPPPPPPAAGPQPKLVIASFALTRDRIDALKRRVAAKVAADGGGTGRVHCSAFTVACALAWACLARVGGGERPRAHLLFSVECRRRLAPPIPQEYLGNCLRPCFVEVGTGELLGGDGVAAAAAAIGAAVAALDGGVLDGAGGWFHKILSLVPERPMSVGGSPRYGVYETDFGLGRPAKVELVSIDKTPGTVSLAEARDAGVEVGVVLQEAEMARFGSCFADALEVLCDSVTELN

SEQ ID NO: 58237 - protein, 30 aa, Zea mays
  Coding DNA Sequence Number=SeqID_14862
MAHRTVREQSLSGAHRTVQCDVRCATKIQL

SEQ ID NO: 58238 - protein, 630 aa, Zea mays
  Coding DNA Sequence Number=SeqID_14863
MPSSSSSATATPPAAASSEETLSNVMVEELRAGDSVEFGVSRMTSARIEDMQRLGYFGGGVARAPGTEEVPEPEGELVVFEAFFAAGLRLPAHRVFELNQLPYDGYPGQDEADRRGKKPAVETGGDPALAAATSSKKRKLVMDKDRQGAARKRQATVRVHEARPKRQRGTAKAEASGGGKPPLPAKVGASAPGKAPEATVGAGGPKLSKVVPSVSGVAEAAKAARSLPPSGKRVADFGTEINVEDYLGGSDEGPLALVVPGAAIATAAPAPKAGVETLGVGGEVSALALVRDEAGVATRRLKGATEALSRATEALSQVADFTSRTASGALTAALSAEVERLRTQHADAVREKSASDSKCRKLAEKVAALEKEKADLRRQLTEERREANEAIAKEQAAQAEARLARAEGNIAKELAGELQRRLAAFESRAEGAEAAARAEAERTRTQLMTSYRELGVRTGDFEAMNALSREGCRHYEALDQVDEDFGRDIFEVEDPVVKESAGALYDRMWGSYGREVVRARAEAARAQAERGERVDDFGALNSALPEPETTPAEAATGVAPGLTPVTAEDAPGAPAPAAAGEGLPPKVAEGAPDAPAAAVPSAEDQAEVGAEAATEAAAEAPAAAGPSQVA

SEQ ID NO: 58239 - protein, 45 aa, Zea mays
  Coding DNA Sequence Number=SeqID_14864
MSGAPATSPKPLDSDRWSSDFWARLDVRWRTGTCTVECPVTVGAK

SEQ ID NO: 58240 - protein, 382 aa, Zea mays
  Coding DNA Sequence Number=SeqID_14865
  Subcellular localization annotation: CTP_CleavageSite=39; ConfidenceScore=5.24e-01
MTVAGGREQQSRRQPGSRPIQGQRKSLLSRREDGTPVIRSSNGSRTRNGRPANHSPRRINSTAGQAALLAGEAGDASPSPDRERGIPRKGSFPVKEPGSEPPLLIRGSKAGPPRGSTVASDRVGPTPTTGQRRRARDDQGYVRYITKARAALPSSPETPCSVPIEGNMALSPLLLAERRRRGVCKKAESVPDRPLALCGGSWAALANPAPAEPLTASTYQPENLGPDRAPGLRPVRMREQPDQPKHYGSDSGSAPEDDELRFARPQGSDSALASAERPPPRPTQGLGLGLGHGRQTRPQPRRSPHVARPRARARHVNRRRHHHPTPGPTRAAENKTGGRQQGLDRSDSCPSAGLRHSSDSHDITPTGCQDLSGCHIGMYLGR

SEQ ID NO: 58241 - protein, 422 aa, Zea mays
  Coding DNA Sequence Number=SeqID_14866
  Homolog annotation: Hit_ID=Q8H6I5; Match level="QueryCoverage=18%, HitCoverage=8%, E-value=7e-07, Identity=42%"; Hit description =Putative RIRE2 orf3
MRRHGGAVPARTLVKGGRTGRCRTLPVRRGDGGEGTAVKGRRGVVCGEDDEAADRWGRSASGSERAREGGWQVSLYDVWDPAPTSEGMITSLVVWRSKPGCGLCPALSFKDVHHPGWGGGRAELGPASAWADDPLLPLAFGGEGHPPALRRRRPLAMRGKANCCCLDRVQLSVLHPGGGYIVRRWLLLPVLKWWPPLVRLPTAAIASGDETVSATCAPDLRLFGINGWFSSPVRGLVVDEPPGACYPAGLPMWRSGKPLRVLPTSKSRYHYYPKITYPSVSYLSRKVTSEPGLPEPWLHSSVPGPKLCFARFVTLFLSPFFSLRLKNVVLLSAGFETALDEAVKNCKALAEAAGQKEAERVAMSEAISALEAERVAMSEAILAFCQAFGLDGVPSGSSPLESSAGLGRPCAQQTPRGTAPRR

SEQ ID NO: 58242 - protein, 107 aa, Zea mays
  Coding DNA Sequence Number=SeqID_14867
MAGSKDSSEVSASNIIKPTWETLSAEEQLLFEERQEQLIQEAKAKFLADFKDQSALKWTPRMHLDSDCDGLNMVGKIRRLSNQPNWFHLKIHPESTQPPPHEVLGFA

SEQ ID NO: 58243 - protein, 87 aa, Zea mays
  Coding DNA Sequence Number=SeqID_14868
MTTIIHRSSAGLGLGLGLVYDLVHKPAGRQIPHGNDEKKKEHEKQVEQSKTDRTREKNPIKEPEPKPKNEFEVPKPIPRMSRQGMRE

SEQ ID NO: 58244 - protein, 69 aa, Zea mays
  Coding DNA Sequence Number=SeqID_14869
MQAACNRTKGAHPFDFDASSMEAQAHTSCNRRAGYYVRETTPPLAPGPGKGILRKGSFSAKEAGLEPSY

SEQ ID NO: 58245 - protein, 133 aa, Zea mays
  Coding DNA Sequence Number=SeqID_14870
MPPFPLGLLGSIGLLSCADSARWGYKTYAMPPPPSASNSLEEIATEIGRRISATTPSLAVVASLPRRRGTPSLLDPSADPRAEIEYRFAFCCGSWIGDLTAQITSYPFGRKICKRALRVLGNKPAIQLLFTES

SEQ ID NO: 58246 - protein, 95 aa, Zea mays
  Coding DNA Sequence Number=SeqID_14871
MAEIGKPAEKSLDDVESKSLTEDYHGPIGLFIFKSVQPFASRLRNAEGPKNTFPELIAEKRLKYFECEVAPPCGGYTRSGDSSPTRRGPPFSGCG

SEQ ID NO: 58247 - protein, 144 aa, Zea mays
  Coding DNA Sequence Number=SeqID_14872
MRVAQRLYARLHPLAYAARSRPRGSIGSPPMRGAGVCCTKLGGPDRIYRDPAPSHGGTDLLVIPQIVTGTLVYGYRQSRSNVTPAQPLCDPTGVMFREMSRLLIQDELSVWIHENTWEASTGEVMLLVAAMQRANTHKSRIGYL

SEQ ID NO: 58248 - protein, 249 aa, Zea mays
  Coding DNA Sequence Number=SeqID_14873
MAFFLGFCLRSRLAAGRGGHIKPTFGASTSRMGVVKKEELWELYQGDEDTIPEDVVIEDQITETECLAISIATVKGLELNHTLKLWAHSSRAAHLSSRPPPPAAWRPTPCGQPTPRSPAAARDPARTTLQVSCPARSCSPNPSAATAVGWGPPVGCPGIFFNRSNAPRPRRPQVVSHLLSAALALPLQTASASLSLVPLGATARRPAYATRAAASPGGPRHDGMLMRPWCAVRSRRGRVTPALRAGART

SEQ ID NO: 58249 - protein, 216 aa, Zea mays
  Coding DNA Sequence Number=SeqID_14874
MEQEASNDELRQGGVADGDGCARSDAVGESSGDRSKQQGKKKLDTAHQDKEAEEVVIRAANNKEGLTATTGDGPCWAKRLRKRNPKVFGPARELYVGPDHDLLQASGDYSSQQQHLTPPHGQARCRHVSRKKRHTLRYHQQVCTPMGRCRIPVYTVRASKFGAAPPHMRIGPLEWDPDPLYGVQAVHSGVPGSQDRAYSGLNQDLGRGPMPTHVQA

SEQ ID NO: 58250 - protein, 77 aa, Zea mays
  Coding DNA Sequence Number=SeqID_14875
MQDAARRALSQYCSLFIRVADGLDLNYYSRHSTNSTVDPMDAEDWLRTVERELHTAQCNEREKVLYGPRLLRGAAQS

SEQ ID NO: 58251 - protein, 191 aa, Zea mays
  Coding DNA Sequence Number=SeqID_14876
  Subcellular localization annotation: CTP_CleavageSite=57; ConfidenceScore=5.00e-01
MAAIITTWSSQAAGSLYLKIFIYYTISTIAVRRDLGTVPRPPSSLYNVRCLGELRLLASNSRHRLLFPHRLYSPLLALTRLLDVQPCCRRRRPGAPLYSRHRSSAPELSLETGALRCFCVGVVPMTESVVPSRTCLSPSQRLGPPMCPRPHLWWSSATESDSAAAGSQGRSYPGLPWDVMHPSEIKRPKFN

SEQ ID NO: 58252 - protein, 155 aa, Zea mays
  Coding DNA Sequence Number=SeqID_14877
MARVACTLRGKRLDSGVSVLSVGVNPVWVWAEDGQRINELAADVRRLQDELAERDLAVDWVINPCSFAWDREAKAHARVTELSAALDNLQMPSRTRAQDGVGTSRGREDTPNPPPIPPTLVEAIAALVSAATDNTRFLREMAGNQFQQQGGRAPP

SEQ ID NO: 58253 - protein, 24 aa, Zea mays
  Coding DNA Sequence Number=SeqID_14878
LNDSPFRGTGGGKTKCCNGLAYGH

SEQ ID NO: 58254 - protein, 159 aa, Zea mays
  Coding DNA Sequence Number=SeqID_14879
  Gene Ontology: Mol. function=oxidoreductase activity, acting on sulfur group of donors, disulfide as acceptor; Biological process =sulfate reduction, APS pathway
  Homolog annotation: Hit_ID=Q5EUC8; Match level="QueryCoverage=30%, HitCoverage=10%, E-value=2e-15, Identity=85%"; Hit description =Adenosine 5'-phosphosulfate reductase 2
  Subcellular localization annotation: CTP_CleavageSite=38; ConfidenceScore=5.49e-01
MVDSNGNLKSATVRGQFAQSQSRRQKAHRTVNSTCLVRGTARREFIGFWNPVNSPHMPAEAPRYANGNGSAAAPDIFESPAVVSLTRTGMENLLRLENHAEPWLVVRTGGRSVDLEKRAAELGKRTADERTEAGVSLDPNRYHSGRSSKNTKVDTAPKE

SEQ ID NO: 58255 - protein, 70 aa, Zea mays
  Coding DNA Sequence Number=SeqID_14880
MAVATSGSGKRGFEAEAACDPRLGRVLENILGESPGNGDTSGCSFLLRVRVRFLYVLYFGGVGSDSIPNL

SEQ ID NO: 58256 - protein, 542 aa, Zea mays
  Coding DNA Sequence Number=SeqID_14881
MHVIGDFLKRQIASLQQRARLCCWFTGSNDIGRVQRGLGTDLSWDKLEVLVKGITDSDAPAGGPQSAGAAPSAPARASRASAAAPAPWIRAKGLQAALPPQVALGCRGKRGDAGCVAPTNRLFRTPPPPRWGRGGRLPEALEDYWWGRGDRLPGPGRVEARQSSATTTIGSSATTTATTVGSAAATTTRGRSPPGAPSGSSSKSSGRPASRVVGRSRAPSEWSPFLLIRLIYHADGVLTHPLSVRASSPSTPKAVSPPPLAAAAETAPPGPQALAGGPAAAAPTPSGAAAAEGVPTTPTAAPASTTAMPSSTPSAAAGEAPAAPAPTIKVDAGGVSSSIPPPTPEETEVIFGRWLQSGAEPEATPVPLPRLEERTKAVSCQFASEHSELKRDRKDYKKDLQKEKKRALEELVRQFEAAQAAQAAPGPQTVEAMKKTLEDLQAEQRARVQRIAAWVGEASTTLVPLGVSPIPVLELPTSISDALTVLDSAADLLRRLDQILGARLEAEGGRLCRAVIEYILTCFRSHDLAISLEPVIAGPFRH

SEQ ID NO: 58257 - protein, 161 aa, Zea mays
  Coding DNA Sequence Number=SeqID_14882
MVTSSLMVGESEPGCGLCPSLSLKDFHHQGWGGECAELSVPGFWTRVASGPLAAPASATAAGRGSSAGVIAKAGHGPTSNSTASCPSLPYEFWHGRGPPSSSICPEVSAAAVRPPGAEVVVVAAAGAGDGAPFVGLPLLRRPSPMEWGCSYPRRGEPEFRL

SEQ ID NO: 58258 - protein, 203 aa, Zea mays
  Coding DNA Sequence Number=SeqID_14883
MQAACNRTEGAHPFGFDASSMEAQAHTSCNRRAGRYVQETAPPLAPLPRLLDCGTSTATRGNPAHDPTVPTRHIGHGLTGQSAAGEGATVDAARNGPAVVAVAGERKQRSIRQPSSRPLLGQRESPLPRNRERGYPERDPSPRRKRAPSPPTDQRFKGWPLRGVQQPPQSARAPRPLLVRGSKAGPSEGFNDRLRPLGLRAHY

SEQ ID NO: 58259 - protein, 181 aa, Zea mays
  Coding DNA Sequence Number=SeqID_14884
  Homolog annotation: Hit_ID=O04819; Match level="QueryCoverage=98%, HitCoverage=78%, E-value=3e-50, Identity=53%"; Hit description =Putative uncharacterized protein
MNQSSAYEAAPGPVGTEVKPVNEDQERSSSDALLMSDHFVFPPSEHENLPIQTSFDEIHAEKDVQKPSTSVEDYSIKNDVGSERVQFDDEGKHLSDDDVEMKDDTPGYGSSHAEDDAHGFVAHGDGIESGEDFDEKSGHPLELSDSKSCDTAALVGIVILGRWHKDKFHLNQLKWCSGSAV

SEQ ID NO: 58260 - protein, 271 aa, Zea mays
  Coding DNA Sequence Number=SeqID_14885
  Subcellular localization annotation: CTP_CleavageSite=44; ConfidenceScore=5.32e-01
MAVAGGRKQQSSRQQAHVPSWDSEETFSHDVKTTRPCSVPRTARARTTAAPRTTRPVALTLRQGRRHLWQAKQAMLHLRHDDRVKKGTGKGDTPKGILLREGSGPRAPLLIRGSKAGPSEGFNSRLRALGLRAHYWSEVRRLAPRKGSTAASGYSGSAPTTNQGFVGWPPKGSDSRLRARRARDDPGVRLTTAKSGLGRHRKLRLARPQGSDSALAPEDDELRLARPQGSDSAFASDDGLDLDLGRQTRPRPRKTDSTSTSTSEEPPPHPT

SEQ ID NO: 58261 - protein, 273 aa, Zea mays
  Coding DNA Sequence Number=SeqID_14886
  Subcellular localization annotation: CTP_CleavageSite=41; ConfidenceScore=5.61e-01
MSTHSLHASRPSTFRAPGWGAPAVLPPCRRWRNATSRKLVPFSHRSASRIFIRQPDRIPSPVVTQDGDHQSQGGEKQAGLRPLPLPQLQGCSSSVLGRGVRRVGAGLRAGSGPLLPSVIEGKGVRRSWRWQLPRVWLSGLSGFGAASGAASHRDSRKRFLRRRDSRRHPRADLQLYGLLLLHMPSNVGGCSYLRRRNWSSVCNGTLSASVCSLWLSGPEHYQDLFVGNRIVCPSESYFSRKVMSEPRKPEKPFRQKGFRALRLVRSAESLIRA

SEQ ID NO: 58262 - protein, 341 aa, Zea mays
  Coding DNA Sequence Number=SeqID_14887
  Gene Ontology: Mol. function=monooxygenase activity; Biological process=electron transport
  Homolog annotation: Hit_ID=Q6ZGG6; Match level="QueryCoverage=35%, HitCoverage=57%, E-value=1e-13, Identity=37%"; Hit description =Putative uncharacterized protein OJ1132_G05.2
MTATRARSKYDGPQESGSLFDGEDSEGSEQEEDSHVAKGVHGHNPTHVADKTTQGTRGSKRVVAPDVPGQEIRFTRQRSAAINQQSSLSLTTTTHASSRATTNQASTQNLTTATHFTSSVATEEDYTEGLNTAAQPTSPIQAEAAKFASEGGIILRQHIPIFPHWKEYKKQENEGKITDYIGKLANNCVKNKLNREKVQFPQCTGSQSYVAKAYVVGDMEAMVATPVEDGQLAKSATEVVFNVLPGSSKFLHNAGFLPSSKRSNTGTVSARMHELQSQLDNERREKDGLREDMDTLKAKSESSEATIANQSTEIADLKKSLAENSILLRQILSISRDQANP

SEQ ID NO: 58263 - protein, 88 aa, Zea mays
  Coding DNA Sequence Number=SeqID_14888
MDFPIPSSDVNNSCTISAREENLTVNPGRWRVLYLGDLEDGESWKNIKRMETPCHGNSARTAVDGFKLLLVFPAFGCCGCMESASMSG

SEQ ID NO: 58264 - protein, 378 aa, Zea mays
  Coding DNA Sequence Number=SeqID_14889
MVSPVSCKRVIRVDVRAPFVGGRLGAQRHAQKYLRQLARWLRDAWAWASKLACQKSEKRVHLAWLHAACMAARPFRPLVWAKVGGRFPAAPLHRRSPKMVTSGLMVGESEPGCGPCPSLSLKDFHHQGGGDCSVPGFRTRVASEPLTAPASATAAGRGSSADVIARAGHGLTSNSTAFCPSLPYEFRHGRGPPGSSTRPEVSAAAVRPPGAEVVVVAAAGAGDGAPFIGLPLLRRPSPSEWGCSYLRRGNRSSVCNGTSNASVFVHCGCRGLNMGNRPSRLLGPDSRRSPWIASPSEAGSDLAEGVVDAEGAAAPFSVKTRALAALDVCAGESCFSRKVMSEKVMSEVSISRRRRSPSARSALAAYVYSVVSRIRFSK

SEQ ID NO: 58265 - protein, 17 aa, Zea mays
  Coding DNA Sequence Number=SeqID_14890
MANLDHRGMCCFGPRTR

SEQ ID NO: 58266 - protein, 85 aa, Zea mays
  Coding DNA Sequence Number=SeqID_14891
MVTRRAGEGPIAEGDWARETIDDVRWLCDCEGCVHVSKVQTLAGAAGLCRGGLDAWCPGELVCLVAGPPGVQDVMGSWPICADLP

SEQ ID NO: 58267 - protein, 221 aa, Zea mays
  Coding DNA Sequence Number=SeqID_14892
  Homolog annotation: Hit_ID=Q5NKP3; Match level="QueryCoverage=16%, HitCoverage=14%, E-value=3e-08, Identity=77%"; Hit description =Putative uncharacterized protein 9C20.7
MSRVFDDYYIKDCGIISVPEVTQRRTDNNDHSPSSGQGSPCRCFGSDRTPGVAPQGSGRLEMRNTLRPGEYALCNGLQVDPGDICPPQAPDLWVDFEVISPKIAGPACRSAFRIVGPWTSLGAPEVWTYIRAVERSGLEGSDESEYSSDEEDSSEGDGGDGDDDDDDDDDDGGGGGNDGDDGDDGDGGGSDGRGSSKDGDDGSSRGSNRGGSGRGSNRASG

SEQ ID NO: 58268 - protein, 108 aa, Zea mays
  Coding DNA Sequence Number=SeqID_14893
MVRACRTRDNGQDLQNRIGIQMGQVKMIEIKEATEKGGNGKTEIAEKERNVNYGLMGILCRDSDPMTNPPRTQLPRGKDPDGQKVEKVGLGDNRHVVTCERQLTVGVD

SEQ ID NO: 58269 - protein, 73 aa, Zea mays
  Coding DNA Sequence Number=SeqID_14894
MGSRHSACSAEAGCRGSFVLLLLVTRLRGERYLIRDGWFTDDDDDDGYDYGNGKEEGVEANLQEFQDFDEFKD

SEQ ID NO: 58270 - protein, 187 aa, Zea mays
  Coding DNA Sequence Number=SeqID_14895
MAKNVGEKTGMDDMRNANMEGPLAHGKESGVQADKSEGMDVEIFFEGDKGFMDNLGNEEDGFNESDDDLLGSQDLEEFAKDEDHVLSPFQEKEKMNLSALQSEDVSKEVGDKKGGSMEGEHVEGIRRSNSLESNDEMKIADKATTRAMAKDAFINKGTSSNPFSVLNTGNVVLMDVAQKLGVELGSS

SEQ ID NO: 58271 - protein, 170 aa, Zea mays
  Coding DNA Sequence Number=SeqID_14896
MNQTPALKVPLQTELRFRPRGYEQPPRREAGGATSSGRLTSDLCSSSYGPRTDATTGRLSFASPLKGRGADGLDGGEAAPGCHHVSTDGGVRLSTNAAPANAGRSKAHRQVLAPILAMKARRRTKCCILAGQQQFAFPGMAGGRLLRRAGGWFPPPEAGRGGGPADPCGR

SEQ ID NO: 58272 - protein, 77 aa, Zea mays
  Coding DNA Sequence Number=SeqID_14897
MGQRTLAFTKLLLMDFFCNFLEKHRLPVVYAKSEDLTAKFQGRRVNLQKTGGLFKKFARAKGYRAPTVVGSRINAQD

SEQ ID NO: 58273 - protein, 45 aa, Zea mays
  Coding DNA Sequence Number=SeqID_14898
MNKTGGIFGRRSGRRFAFAIMTASKKGPGKGDTPKGILLHEGNGP

SEQ ID NO: 58274 - protein, 419 aa, Zea mays
  Coding DNA Sequence Number=SeqID_14899
  Gene Ontology: Mol. function=iron ion binding; Cellular component =integral to membrane; Biological process=transport
  Homolog annotation: Hit_ID=A2XSU2; Match level="QueryCoverage=93%, HitCoverage=61%, E-value=0.0, Identity=77%"; Hit description =Putative uncharacterized protein
  Pfam annotation: Domain name=OPT; Domain location=1-400; Score=50.6; E_value=5.5e-12; Accession=PF03169.6; Description=OPT oligopeptide transporter protein
MPLMQIFIGPKVKIVSKLLHLHSIFLGSVISWGFLWPFISAQAGHWYPDNLGNSDFRGLYGYKVFIAISIILGDGLYNLVKIFIVIARELCSMQSKQHELPVQALEDDGSCEQLADEKLQTEIFLKDSISPWFAASGYIVLAAISTASVPAIFPQLKWYLVLLCYFFAPVVAFCNSYGMGLTNLNLAPTYGKIALFALASLVGSDGGGVIAGLAACGIVMSVACSTADLMQDLKSGYLTLSSPRSMFTAQLIGIALGCVIAPLTLWLFWTAFDIGDPDGEYKAPFAIMFREMAILGMEGFSALPLHCLDICYAAFFLALATSLLKDVAPANVSRFIPIPIAMAAPFYVGAYFGVDMFIGTAILYAWQKLNREQADGYAVAVASGLICGDGIWSIPSALLSILGAVPPICMSFEASSAPR

SEQ ID NO: 58275 - protein, 120 aa, Zea mays
  Coding DNA Sequence Number=SeqID_14900
  Gene Ontology: Mol. function=iron ion binding; Cellular component =integral to membrane; Biological process=transport
  Homolog annotation: Hit_ID=A7P9X3; Match level="QueryCoverage=55%, HitCoverage=29%, E-value=2e-17, Identity=62%"; Hit description =Chromosome chr14 scaffold_9, whole genome shotgun sequence
MLTVYNQVRKRKKKRKRRLEINRGWAEIGVLFHFIHKPSTSYGDGCSASYIFAMDRKTYELVGPDYPGNRAEDVKDPSLGWMISFLFLIALVGPFSIVLLRKVMGDDYQLAFPWGDQLQL

SEQ ID NO: 58276 - protein, 126 aa, Zea mays
  Coding DNA Sequence Number=SeqID_14901
MHLGAKGNTFNHEKHQEGLDPEKEVSSLKDDRKFGDLAKLGCISWDTSYWIKVIANVCVYSSQDARITWTKELRKSNTSKEDIKKIKEKSKKKENVLPQVDCLVAHGLSGATRRTVRCTRNCSPNG

SEQ ID NO: 58277 - protein, 77 aa, Zea mays
  Coding DNA Sequence Number=SeqID_14902
  Homolog annotation: Hit_ID=A2ZLQ9; Match level="QueryCoverage=45%, HitCoverage=24%, E-value=1e-10, Identity=82%"; Hit description =Putative uncharacterized protein
MDAEVRSKRMPQLLGAAYVHHAGVVVITTTLKEIPSLQKALPPELADNVLRLYRECLQRAKYIGHQCCKGSYQSYSI

SEQ ID NO: 58278 - protein, 117 aa, Zea mays
  Coding DNA Sequence Number=SeqID_14903
MAVVYSEVAAMMSQGVAQWEIYTVYAESKRCTGFSSPSIIRDGNGYPLPETRWVFALLGYGFGSISLPMGLLMGSNGNPTVGMGNPLGTRNPHGYGFGQNFIPVTAAAENYIDRRKF

SEQ ID NO: 58279 - protein, 230 aa, Zea mays
  Coding DNA Sequence Number=SeqID_14904
  Gene Ontology: Mol. function=transcription factor activity; Cellular component=nucleus; Biological process=regulation of transcription, DNA-dependent
  Homolog annotation: Hit_ID=A2X9Y7; Match level="QueryCoverage=58%, HitCoverage=55%, E-value=2e-33, Identity=58%"; Hit description =Putative uncharacterized protein
  Pfam annotation: Domain name=AP2; Domain location=95-146; Score=81.8; E_value=2.2e-21; Accession=PF00847.11; Description=AP2 domain
MTSRLESGGFQLPNTEQENALLLRALISVVSGDTAAASLVPEAAAAEAPAAAASACGCPGGCDLAAASSSDSDGAECSASGGGAGKRRRRRSRASSYMGVRRRPWGKWAAEIRDPRRAARKWLGTFDTAEDAARAYDAAAVELRGRRAKLNFPDAAAAAAARDVQPRRPLPGQSLRENCGSNAASPLHVAVARAPTTLQGTGPAPPKDQDIWDGLNEIMTMDDGSFWSMP

SEQ ID NO: 58280 - protein, 589 aa, Zea mays
  Coding DNA Sequence Number=SeqID_14905
  Gene Ontology: Mol. function=transferase activity, transferring glycosyl groups; Cellular component=membrane; Biological process =cell wall biogenesis
  Homolog annotation: Hit_ID=A3ABN2; Match level="QueryCoverage=78%, HitCoverage=91%, E-value=0.0, Identity=62%"; Hit description =Putative uncharacterized protein
  Pfam annotation: Domain name=XG_FTase; Domain location=67-556; Score =754.3; E_value=7.9e-224; Accession=PF03254.4; Description=Xyloglucan fucosyltransferase
MQQRKAKVVWGGAESAAAQEIPASSQLAMAHNSSWPEGEGAPEHSPVPRKKRLSLDEKRWNTVVNVMLVAFVMAVPPVVVVFAGGGIAPAVWIAAAKAQLRRGSGDGPPDRLLGGLLADGLDERTCRSRYESSLYSRRPARRPSPHLIAKLRRHEELQRRCGPNTDAYSRAVQQLRAGKSVGSPECKYVVSISYRGLGNRILAAASAFLYAVLTDRVLLVDPSNDMGELFCEPFPGTTWLLPREFPLASYTNFSIDTAESYGNMLKNRVLRADVPPPPTETQLPAFVYLHLDHDYGDEDKMFFCDDDQRLLSSVQWLVMRTDMYTVPGLFLVAAFQEELDVLFPERDAVFHHLARYLFHPTNRVWGLVTRYYRAYLARAELRLGVQVRNFDPWAQQSPVVLRQITSCLWREKLLPEVLDTEEHAVPAPGGARTTAVLVTSLRSWYYERIKGLYWDQATATGEDVSVHQPSHEGQQQYGKKSHDDRAWAEMYLLSLCDVLVTSGWSTFGYVAQGLGGMTPWVLHKPTNATSPPDPPCFRDVSMEPCFHAPHVYDCKLKRGADTGKMLPHVRNCEDVSWGLKLVDTKLYRS

SEQ ID NO: 58281 - protein, 344 aa, Zea mays
  Coding DNA Sequence Number=SeqID_14906
  Gene Ontology: Mol. function=binding; Cellular component=integral to membrane; Biological process=transport
  Homolog annotation: Hit_ID=O80414; Match level="QueryCoverage=96%, HitCoverage=96%, E-value=1e-134, Identity=73%"; Hit description =Mitochondrial phosphate transporter
  Pfam annotation: Domain name=Mito_carr; Domain location=243-326; Score=2.1; E_value=0.0019; Accession=PF00153.18; Description =Mitochondrial carrier protein
  Pfam annotation: Domain name=Mito_carr; Domain location=67-155; Score= 99.8; E_value=8.6e-27; Accession=PF00153.18; Description =Mitochondrial carrier protein
  Pfam module annotation: Pfam domain module=Mito_carr::Mito_carr; Domain location=243-326::67-155
MALSDRSRESLLPSFLYASSARSFAATGAAARLHASAPAPAAAGAGGAVPFSIQAPNEKIEMYSPAFYAACTVGGIASCGLTHMAVTPLDLVKCNMQIDPAKYKSISSGFGVLLKEQGARGFFRGWVPTLLGYSAQGACKFGFYEFFKKYYSDIAGPEYAQKYKTLIYLAGSASAEVIADVALCPFEAVKALQGNCSSLGSSDSFVWLIDDTMMKFASFETIVELIYKHAVPVPKSECSKTTQLGISFAGGYIAGVFCAIVSHPADNLVSFLNNAKDATVGDAVKKLGLWGLFTRGLPLRIVMIGTLTGAQWGIYDAFKVMVGLPTTGGVTPAPAAKAELKASA

SEQ ID NO: 58282 - protein, 384 aa, Zea mays
  Coding DNA Sequence Number=SeqID_14907
  Gene Ontology: Mol. function=hydrolase activity, hydrolyzing O -glycosyl compounds; Cellular component=extracellular region; Biological process=carbohydrate metabolic process
  Homolog annotation: Hit_ID=Q6Z310; Match level="QueryCoverage=87%, HitCoverage=84%, E-value=1e-136, Identity=70%"; Hit description =Putative mannan endo-1,4-beta-mannosidase 9 precursor
  Pfam annotation: Domain name=Cellulase; Domain location=40-356; Score= -53.2; E_value=0.0014; Accession=PF00150.9; Description=Cellulase (glycosyl hydrolase family 5
MAKSRREISFGLAVVLSLTAAALVRTGHGADAAFARASGTRFTIGGRPFYSNGFNAYWLMYMASDPADRSKATAALDEAARLGATLVRTWAFSDGGYRALQVSPGVYDEEVFRGLDYVISEAKKRGIHLILSLVNNWDGYGGKKQYVQWARTQGHSLNSDDDFFTDSVTKGFYKNHAVLTRVNKMTGVAYKDEPAIFAWELMNEPRCQSDLSGKTLQAWITEMASYVKSVDPNHTVEIGLEGFYGDRVHARPQAPVQPGRVHRRHRLHLQQPDPRRRLRHDPLLPRPMVAFMRRWMASHAGDAAAVLRKPLLVAEFGWSARSNSYTVSMRDAYFRMVYEAIYASARAGGPLAGGLFWQVMAERHPSLPRTASCRSVMALLRVDA

SEQ ID NO: 58283 - protein, 152 aa, Zea mays
  Coding DNA Sequence Number=SeqID_14908
  Gene Ontology: Mol. function=aminoacyl-tRNA ligase activity; Cellular component=cytoplasm; Biological process=tRNA aminoacylation for protein translation
  Homolog annotation: Hit_ID=Q6Z302; Match level="QueryCoverage=99%, HitCoverage=47%, E-value=2e-72, Identity=89%"; Hit description =YbaK/prolyl-tRNA synthetase protein-like
  Pfam annotation: Domain name=YbaK; Domain location=14-139; Score= -29.0; E_value=0.018; Accession=PF04073.6; Description=YbaK  prolyl -tRNA synthetases associated domain
MGYTKDQLLAHLQKLKIDFTCYDHPVVLTVEEQAKHVGHLGGALSKNLLLKDKKHRLYVISALAGTKVDMKILSQRLGLGKGGLRMAPEENLLEVLQVPLGCVTPFALINESASAVSLLLDQGFKSKQSCYFHPLTNDVTIGMVQNNNTSFY

SEQ ID NO: 58284 - protein, 245 aa, Zea mays
  Coding DNA Sequence Number=SeqID_14909
MAGGVDGRRGTGAGGGEGTRRRRTSAGAGAGGVAGPCAGAGWRNARPGTVVGSSPYMTQRRGRPAYWCCGWNGCGRKCAGGNPWRAVGGSTSWRKRPKQRGQKTSVDGQEMMRSARPHWGRAVFGDGDLCVAPKRVLLAGQEVVESASRPGGSLASFLCHVEDVLGSRVDAPQKPNCRSPVQGLERHRLRRHLPSRYSVRAESRDGNTLTRRLDSETESVSRVYRVTGVLLYLTSRRGKLKEKGR

SEQ ID NO: 58285 - protein, 350 aa, Zea mays
  Coding DNA Sequence Number=SeqID_14910
  Gene Ontology: Mol. function=amine oxidase activity; Cellular component=intracellular; Biological process=amine metabolic process
  Homolog annotation: Hit_ID=A7PCT5; Match level="QueryCoverage=27%, HitCoverage=14%, E-value=3e-27, Identity=63%"; Hit description =Chromosome chr17 scaffold_12, whole genome shotgun sequence
  Pfam annotation: Domain name=Cu_amine_oxid; Domain location=76-344; Score=-254.6; E_value=0.0055; Accession=PF01179.11; Description =Copper amine oxidase, enzyme domain
MKSVVVASSDPRPPRRRPRPTGPSSTYECILCACCSTSCPSYWWNPEEYLGLAALLHANSYTPTHDLFCDVLAWETKPLILERPVLGMRGPTGGYPGKEKIRIARPDSQGGCLDLLELNLVRLETVRHMLMITVTLSKKPLDTSSPGFPAYPYYSISTLTGNLSLGALMLGESRKYGTTIVPGLYAPVHLHFFVARMDMAVDCKLNEVHNQVVEVNVKVESAGTHNMHNNDFYAKEKLLKSMRDCDPSSLRHWILWQRKFQAPLQHYTALMDLQDYSENGTVTVVYRVILKGTDGEAYRDATGTTQFHEGRREDAVAAAEEAAFSKACAWFGFGLYLYHQDESHYDDHFH

SEQ ID NO: 58286 - protein, 128 aa, Zea mays
  Coding DNA Sequence Number=SeqID_14911
  Subcellular localization annotation: CTP_CleavageSite=26; ConfidenceScore=5.01e-01
MLTLLCEVMTWRITICNTSCRILAARSRSVSQTPKFSTRFCAPRFDEKPATYATPEAALTPPLLPIASPAPALVVGRKPAPFATPAALVSSPIASLAAALVVFAEHFENFWGLEYDSDQMPSFSDNEV

SEQ ID NO: 58287 - protein, 185 aa, Zea mays
  Coding DNA Sequence Number=SeqID_14912
MGFPVPGQLLQLGMGAAGSERGWKGSVVRGGDGRRRDRRRHGEVGLRRLRSVQAAALHRRRAGNWVDTGTRNRGFDGRGDGRKQRRVRRRHWIRCGTVCETGAKADAAADACGVAVLREDCAARHERPGSDPTRAMVGTAGIRRAGRGGRGGTGGRMCEGGNGGEAGAAGFAIGRTWVCTPTLDT

SEQ ID NO: 58288 - protein, 215 aa, Zea mays
  Coding DNA Sequence Number=SeqID_14913
  Gene Ontology: Mol. function=zinc ion binding; Cellular component =vacuole; Biological process=intracellular protein transport
  Homolog annotation: Hit_ID=A7PQN0; Match level="QueryCoverage=90%, HitCoverage=23%, E-value=1e-74, Identity=64%"; Hit description =Chromosome chr6 scaffold_25, whole genome shotgun sequence
MADSLKRWGGTSFNESPEARSISSFIEKYNMYDAIHDKIVNLMIVDNKRTVHLRTQHRDIILPYEVVEQLLHTSKKCDKRYLLHLYLHALFEIDIHAGKDFHDMQVELYADYETRMLLPFLLTSQHYRLDKAYEIFAQKELAVEFVTEQHDDELWEELIRQCLQKPEMVGNLLEHTVGNLDPLYIVSLVPDGLEIPRLQDRLVKIVTDYRTETSL

SEQ ID NO: 58289 - protein, 141 aa, Zea mays
  Coding DNA Sequence Number=SeqID_14914
MVTPTRGKKRLVVDVDVEVDSEAEVAAAFSRLSVSIVAKPTGDGSGKEYSIGKDVTCATTSVLCSIPMALFVVSQLTRFETVRSDLAHAIAKMQVVGKELKELAGDEIMDSLDTTKEVSVNFAMWHVYELAQSLEEEAQRL

SEQ ID NO: 58290 - protein, 449 aa, Zea mays
  Coding DNA Sequence Number=SeqID_14915
  Gene Ontology: Mol. function=DNA binding; Cellular component=nucleus; Biological process=ribosome biogenesis and assembly
  Homolog annotation: Hit_ID=Q10LH5; Match level="QueryCoverage=92%, HitCoverage=75%, E-value=0.0, Identity=83%"; Hit description =Nucleolar protein NOP5, putative, expressed
  Pfam annotation: Domain name=NOP5NT; Domain location=8-73; Score =112.3; E_value=1.5e-30; Accession=PF08156.4; Description=NOP5NT (NUC127) domain
  Pfam annotation: Domain name=NOSIC; Domain location=171-223; Score =131.8; E_value=1.9e-36; Accession=PF08060.4; Description=NOSIC (NUC001) domain
  Pfam annotation: Domain name=Nop; Domain location=264-392; Score =134.9; E_value=2.3e-37; Accession=PF01798.9; Description=Putative snoRNA binding domain
  Pfam module annotation: Pfam domain module=NOP5NT::NOSIC::Nop; Domain location=8-73::171-223::264-392
MLQSQLTLLVLLETPAGFALFKVLDEGKLDKVEDLWKEFTTSDSARKVVELKAFNKFENTSDALSAATLIIDSKPSKGLHKFLQKHCQGETLAVADSKLGNAIKEKLKIDCLHNSVVMELMRGLRNQLTELITGFGAQDLGPMSLGLSHSLSRYKLKFSPEKACLISVDTMIIQAIGLLDDLDKDLNTFAMRVREWYGWHFPELTKIVSDNIQYAKVVKMMGNRANAVNLDFSEILSDEELETQLKEAAVISMGTEVSELDLLNIRELCDQVLALSEYRAQLYDYLRSRMNTIAPNLQHWWLSPLRTKGCVSLYALFKALKTKHSTPNYGLIYHASLIGKASQKHKGKISRSLAAKTTLAIRYDALGDGEDNSIGTESLLKLETRLQVLEGRELGKSAGSTKGKPKIEVYEKDRKNGARALTTPAKMLRLDRKSINTLDGSPLVKMSAM

SEQ ID NO: 58291 - protein, 73 aa, Zea mays
  Coding DNA Sequence Number=SeqID_14916
MDESGVDWDASGGIEAVRFSSDAEEVVEGPQVLHRELPLEGNDRAPEEISGGCHEHNVVNVEQQVRCRCRTGR

SEQ ID NO: 58292 - protein, 63 aa, Zea mays
  Coding DNA Sequence Number=SeqID_14917
  Subcellular localization annotation: CTP_CleavageSite=37; ConfidenceScore=5.31e-01
MRLGAIVLPLLPLMLLTLHLLRFFRHSLSISVTTSVPAASAARPQSESVPAPASTADPVSETD

SEQ ID NO: 58293 - protein, 114 aa, Zea mays
  Coding DNA Sequence Number=SeqID_14918
  Gene Ontology: Mol. function=oxidoreductase activity, acting on the CH-OH group of donors, NAD or NADP as acceptor
  Homolog annotation: Hit_ID=Q8S484; Match level="QueryCoverage=35%, HitCoverage=12%, E-value=6e-11, Identity=85%"; Hit description =Putative NADP-dependent malic enzyme
MMRHVVYSSIDGRNLLESSKMALDKGKLDDANLKLQQINVLDDEAVMRKQLHEAREQLVRQRYFFTIALCSATISQQSRHAISLTITSCALSAFARFRCILFYNQCDHHCKDAF

SEQ ID NO: 58294 - protein, 146 aa, Zea mays
  Coding DNA Sequence Number=SeqID_14919
MGKSKKGGSSSHHSGDKRKRELSPPSEDFGDSEYSKEEFSSKSEGSPTYASPPVSSDDSDDSQGIAAEVWTYIRAIERSGLEGSDESEISSDEEDSSDSSKEGSGDDGDDEGDDGDKGDDGSGKGDGGSSKDDGGSATGLNISIDK

SEQ ID NO: 58295 - protein, 91 aa, Zea mays
  Coding DNA Sequence Number=SeqID_14920
MARVACTLLGKRLDGGVSVLSVGVNPICIPLRVFSLVRLRVILIVIGVKRRWARPSYKELAGLAFNGLLLGLCFVAEGLQGRSSFRLRLFA

SEQ ID NO: 58296 - protein, 248 aa, Zea mays
  Coding DNA Sequence Number=SeqID_14921
MTSHGSSEDGNALSHTDGLAREGFPRILWEQFEKHRVPRCRVRMTLEPHPLQPGWRSLDSESFGYRAEDTIEAIALHGLTTFCGFHPLELATHPIGLFPAEREDDPMWKDRVEHAKDIWAIYPGQTAHLTVRCMNALYRLQVMCGEAMSHLMALLEATKITLDNREELVVDLSTEMVEKDLQVEQLSTDIQELEELVGTRENTIEEIQDMEANEDVDIEGGDEPASSVDTAGSGRPPSPESSVASFAH

SEQ ID NO: 58297 - protein, 113 aa, Zea mays
  Coding DNA Sequence Number=SeqID_14922
MAHRTVNSHCPGPRCFQHVVDEALRATQALRCRNMPRIAAAGAGSSSQPQRTYVRTKKRSRNTTAQDIGEEDSDDQDGVATAQAEQQQTQEANEYMDEDGVAADAFCLDADLL

SEQ ID NO: 58298 - protein, 333 aa, Zea mays
  Coding DNA Sequence Number=SeqID_14923
  Subcellular localization annotation: CTP_CleavageSite=92; ConfidenceScore=5.68e-01
MARSATGFGPRRRVVWSSRLLAAPLLVLFPSTTPPFPAWAPSTTQASSTLWASRLPRRRAGVQAGRHRLSGVLAGCLSCGATNIPGTDERAMCASRPSVLRGYELRSRGPASLGAESLDIAAASRVRVQSGSAQALLKGTPPPTLAFCVFGVSSLRAGRRCEPAMRGLATVLPTSTPYNTFLFFALLPLPASTPPARPVVVPCPAGPAPSPSPFIAIVTLEGTDRATELGGDPSEEVGEGGEHVGLQPEWKSPKKRLKTEKSRDHNGQNQRAEHPWTWKWKKEDVSDDPAGKHDRGAQRSPDYRRYLSSWRAGTSRHVHGARDNDGKGRRWWW

SEQ ID NO: 58299 - protein, 320 aa, Zea mays
  Coding DNA Sequence Number=SeqID_14924
  Gene Ontology: Mol. function=protein binding; Cellular component =cytoplasm; Biological process=vesicle docking during exocytosis
  Homolog annotation: Hit_ID=A2X4G2; Match level="QueryCoverage=77%, HitCoverage=33%, E-value=9e-94, Identity=70%"; Hit description =Putative uncharacterized protein
MGSRNMSDNLRVELDPITENRVHGSIEGHKKALDSLTVVKSDAHNGHGDTGRSRESGGTGGQGRPPGGRRNTMESRGMCAGVLAGLSADDMIVVNNMRCLRGADSKKSSVGAFTLKFDLQKKKPGIRKERTGEESTWMLSRFYPILECTEYHFLCSIIEVLHALMTVQYLSSFTEDLIEKLSKGELPKDEYHCMNDPSPSFRGIPGSTSARTSPAHQPAQSMRSRRIGGTWARPRNSDDGYSSDSVLKHASSDFRKLGQRLFIFVIGGATRSELRVAHKLSGKLKREIILGSSSLDDPPQFITKLKMLSTEELSLDDLQI

SEQ ID NO: 58300 - protein, 29 aa, Zea mays
  Coding DNA Sequence Number=SeqID_14925
MTSRRGPRPWRGRPRPTWGRRSAYHSINR

SEQ ID NO: 58301 - protein, 281 aa, Zea mays
  Coding DNA Sequence Number=SeqID_14926
  Gene Ontology: Mol. function=protein binding; Cellular component =cytoplasm; Biological process=vesicle docking during exocytosis
  Homolog annotation: Hit_ID=Q7XWP3; Match level="QueryCoverage=78%, HitCoverage=33%, E-value=1e-103, Identity=83%"; Hit description =Probable protein transport Sec1a
MVPAQERGRSTNGREGESPAWRELGEAAGRRESPGTGRWLGGGVASPYALPLKRFKSTIPEFPQTETCELLIVDRSIDQIAPIIHEWTYDAMCHDLLCMDGNKYVQEVPSKNGSANEKKEVLLEDHDPVWLELRHAHIAHVNETLHEKMTSFVSKNKAAQLQQARSGGELSTKQLQKMVQALPQYSDQIDKLTLHVEIAGKLNNIIKEHHLKDVGQLEQDLVFGDAGTKELISFLRTRMDVSREHKLRLLMIYASINPEKFFESEKGAKLMQKYKHLLLLT

SEQ ID NO: 58302 - protein, 379 aa, Zea mays
  Coding DNA Sequence Number=SeqID_14927
  Homolog annotation: Hit_ID=A5BA03; Match level="QueryCoverage=11%, HitCoverage=12%, E-value=1e-08, Identity=60%"; Hit description =Putative uncharacterized protein
MALDSQFLHLSFLSLVLERQYLPASSYFSHYKNNGSKSAINRTKIPNPKPAGSNSYQSPASRQQAAVAISRQRRSNSPAAKEQAGTRRSGPGRSIAADRRQQQLASSSRQQEAAGGLGLGVQPRSDDSWQRAHARTPLDHYSGRQRQEASQPRSHQEFFLAESQSLGAKVSSRQGARKSGTGTRTVARIGELEKLKRPSVFCAWRLNRWSGGVPDGPGLGCARAHPDPPVGPPLARRCRKTELKNIASTLTPTQAYMVTKHGEAARPGHMAYVVQLQVGERNWSNFAAIHTKKSNRLEHQRLNKLVYISYNKKMENRFQTLRELGFKGKRSNPLVLEEFMWENEWVEENEDDGDNIWHVKGSRCPRGAVNWAFLKINTN

SEQ ID NO: 58303 - protein, 153 aa, Zea mays
  Coding DNA Sequence Number=SeqID_14928
  Homolog annotation: Hit_ID=A2ZZY7; Match level="QueryCoverage=95%, HitCoverage=24%, E-value=2e-44, Identity=66%"; Hit description =Putative uncharacterized protein
  Subcellular localization annotation: CTP_CleavageSite=63; ConfidenceScore=5.54e-01
MDEIESLIHAAPSPATVLPARPPSPTRASIPVSSSPALAPAPVPTKPPLPAASIPISVSVSPVLTSVSVPIGADGFGPPPNTLTEPVWDTVKRDLARIVSNLKLVVFPNPYREDPGKALRDWDLWGPFFFIVFLGLTLSWSASVKKVPISSRN

SEQ ID NO: 58304 - protein, 361 aa, Zea mays
  Coding DNA Sequence Number=SeqID_14929
  Gene Ontology: Mol. function=carbon-carbon lyase activity; Cellular component=mitochondrion; Biological process=aromatic compound metabolic process
  Homolog annotation: Hit_ID=A2Z3C9; Match level="QueryCoverage=50%, HitCoverage=43%, E-value=8e-70, Identity=59%"; Hit description =Putative uncharacterized protein
  Pfam annotation: Domain name=HpcH_HpaI; Domain location=123-286; Score=68.0; E_value=3.1e-17; Accession=PF03328.5; Description =HpcHHpaI aldolase family
MAADERKTRERAGEGRRIWGAVTPACTATAFCRSRETHPAAASRPTLPRPPINARGHQSTSRPTRDLPSTGHPARDRIHPASFLQYRITDRLPCRGRRSSAAASDLLSPAPSLKSRLADGDTLYVLFLLSFSRTLAALAGYDYVVVDMEHGLGRIPEALACLRVLDAARTPAVLCLPEASACRYPPRGVRGAAHPIVRASAYGFDDSYLSRCEDDTLVICQVETATAIAKIDANATVDGVDVVQMGPLDLSASMGYLKQNDPSEQLKLRGYHMVAGAVDIAMFRKATLDDVRLFREAVMEIDEEDDEDEKCEKENDGYWSDRILIKARDVARSSAQNSLSERNNLKAMGHYGLKGSFFSIL

SEQ ID NO: 58305 - protein, 99 aa, Zea mays
  Coding DNA Sequence Number=SeqID_14930
SGHDGREQRGKTDAFPATRGYSEQIKGGGAQFGRATRRSEGKKKHWPREFVANSVAVTPVSHGDFREGHGDTVKELSHAAHGREAAVDGEHIHIRRGKD

SEQ ID NO: 58306 - protein, 25 aa, Zea mays
  Coding DNA Sequence Number=SeqID_14931
MANDTNAHGVRRGEGAVDGDNKDYN

SEQ ID NO: 58307 - protein, 106 aa, Zea mays
  Coding DNA Sequence Number=SeqID_14932
MDIQWSMPPRGQILPPPQPGMGYWPPPPWGYPTHPMGLGDAPMANTATSITSDSMCVNTNMGQQLTLKSLLKRVNIKNVGTVELNGQPSPTHAGPISSTATWPRRT

SEQ ID NO: 58308 - protein, 150 aa, Zea mays
  Coding DNA Sequence Number=SeqID_14933
MDNLDAEENLAAALKYRSTLRRGLDFNAFLEDEESAATSPTPTPATDGELAGTGGLGTTTGVRRGGHDVASVGRGRGQNYPRSSIDVVEDERRAGRGLATASVGMVSAGRGLTTANLGMARAGRGVATQDEAMDRVTGQLSLEKTEKRSS

SEQ ID NO: 58309 - protein, 213 aa, Zea mays
  Coding DNA Sequence Number=SeqID_14934
  Gene Ontology: Mol. function=carboxyl- or carbamoyltransferase activity; Cellular component=ornithine carbamoyltransferase complex; Biological process=amino acid metabolic process
  Homolog annotation: Hit_ID=Q8SA97; Match level="QueryCoverage=43%, HitCoverage=19%, E-value=2e-18, Identity=52%"; Hit description =Ornithine carbamoyltransferase
  Subcellular localization annotation: CTP_CleavageSite=46; ConfidenceScore=5.05e-01
MAPPVDVAGPRPRLGDAKAPPRLRSSPSSVTEVESEPLGRARRRPLAEARVEFESWAEPKSEPWVGRNGVRRLPGLSPSPSPGSGGAEFTVFRGLARVRALGRAERSSSSSGAEPKSEPWVGRNGVRRLPGLSPSPSPGSGGVEFAVFQGFARVQALGRAKRSFLWCLRPGLTACQPHSVKWHRSRSGTGGAVFLSDRSVERRSDGGHFASVG

SEQ ID NO: 58310 - protein, 132 aa, Zea mays
  Coding DNA Sequence Number=SeqID_14935
MAPPVDVAGPRPRLGDVEAPPRSRSSPSSVVEVESEPLGRARRRPLAEARANPSPSPGSGGAEFAVFRGLAQVRALGRAERSFLWCLRPGLTACQPHSVKWLHSRSGTGGAVFLSDRSVERRSDGGHFGSVG

SEQ ID NO: 58311 - protein, 233 aa, Zea mays
  Coding DNA Sequence Number=SeqID_14936
MVKSLETRQARILGGLGPSGQTRVVGGNLANLVVGFRSWERDYKWVNDGEECSGEQSRSRWGRIWCTNVGVSFGEGSGASEAEIWAQGKATLGGHHGGTMVRHAAAPASSNPPRLDGIKGEEGRGGVPYPGGAQGGLARRREASGHGWLGGYASPASLGRRRFCARWTAGEENEEGGGSRCVQGSRGARVTTDAREEGRHGPASSVCVRVGRRGGSTGGGGRRGRLTSEVARV

SEQ ID NO: 58312 - protein, 31 aa, Zea mays
  Coding DNA Sequence Number=SeqID_14937
MEQSEYSSSNMVVDSVSLNCWWWNRFQKKWI

SEQ ID NO: 58313 - protein, 299 aa, Zea mays
  Coding DNA Sequence Number=SeqID_14938
  Gene Ontology: Mol. function=binding
  Homolog annotation: Hit_ID=Q6Z901; Match level="QueryCoverage=48%, HitCoverage=29%, E-value=3e-44, Identity=57%"; Hit description =Kinesin light chain-like protein
MAERKREETRSSRAASVDARARPELHLDIREEAAKKNREPPTASNIRRHSSSLQVCHWLLPSTAGSVATSTPSLSSSAPSQSWRRHKNRLPTASLRPVQPAATTTSSCSLSSPTRGVSGAAPDEIAGGLMEIPIIYDALGDLDEAQKLLHMALRLLEGSSREWSIIAGVVAQMGVLYYMVGRYANSGNSFKSADANSRAIDEVAQLFEEARAVLEQECGASHPNTLGVYNNLAAIYNAMGRAHITKLENKKTHLQSKLTEEEKENTVLQANLEKRKEALHKRRVEREMCPWAISKYFGD

SEQ ID NO: 58314 - protein, 105 aa, Zea mays
  Coding DNA Sequence Number=SeqID_14939
MLLLNNGTKKTEREVTGRTEIATVEYFDVEVLERGVRVKLIYHCELVQQSVDNYLDVWTFYPSKLCFSKAVVYASICDIDQCWENGRTKMVISSLKGWEESGATE

SEQ ID NO: 58315 - protein, 105 aa, Zea mays
  Coding DNA Sequence Number=SeqID_14940
MGRAPWLRMARDVRGMGGGQCVHKSTKPRRASSRDRSRSYPASGSGNETYGRAHYKYASMCHDAWLSMWTCYGMGNHTKSGNIVNLTSEIASHWECPKVIGSIRV

SEQ ID NO: 58316 - protein, 306 aa, Zea mays
  Coding DNA Sequence Number=SeqID_14941
  Gene Ontology: Mol. function=DNA binding; Cellular component=nucleus; Biological process=response to salicylic acid stimulus
  Homolog annotation: Hit_ID=A2WSB0; Match level="QueryCoverage=100%, HitCoverage=100%, E-value=2e-71, Identity=52%"; Hit description =Putative uncharacterized protein
  Pfam annotation: Domain name=Myb_DNA-binding; Domain location=134 -181; Score=52.5; E_value=1.4e-12; Accession=PF00249.22; Description =Myb-like DNA-binding domain
  Pfam annotation: Domain name=zf-CCHC; Domain location=3-20; Score =9.7; E_value=0.051; Accession=PF00098.14; Description=Zinc knuckle
  Pfam module annotation: Pfam domain module=Myb_DNA-binding::zf-CCHC; Domain location=134-181::3-20
MARKCSHCGNYGHNSRTCGLGLGLGHREIMLCEGGDDNNGRSGLRLFGVQVRIGGGGGAGSASMKKSYSMDCLQLAAPHACSSLVSSPSSSSLCSSSSPSSLLLSIDDGLQRGAADGYLSDGPHGRAVQERKKGVPWSEEEHRQFLAGLDKLGKGDWRGIARSYVPTRTPTQVASHAQKFFLRQSSMGKKKRRSSLFDMRQVPICENSASISDPLDVARHGVASADSERAAVDVDLMNSTTEGDDGRSRDVVSSASGAGTALRFPAAAAQTEPLHPSSSHGHGRGHHCSPLDLELGMSLPAPSVGT

SEQ ID NO: 58317 - protein, 107 aa, Zea mays
  Coding DNA Sequence Number=SeqID_14942
  Subcellular localization annotation: CTP_CleavageSite=25; ConfidenceScore=5.18e-01
MTISSKFEFLPNSSYNSDKEFLSIYSSSGATRNIAVTGSARALSPRFWFVDWISYSLLICETNKMSNSNVRLKGLVGRLFIAHDKVMLVNWNMKNYPRKQCYHKGGM

SEQ ID NO: 58318 - protein, 686 aa, Zea mays
  Coding DNA Sequence Number=SeqID_14943
  Gene Ontology: Mol. function=zinc ion binding; Cellular component =nucleus; Biological process=anti-apoptosis
  Homolog annotation: Hit_ID=A2WSD2; Match level="QueryCoverage=97%, HitCoverage=97%, E-value=1e-73, Identity=54%"; Hit description =Putative uncharacterized protein
  Pfam annotation: Domain name=zf-C3HC; Domain location=92-196; Score =83.5; E_value=6.7e-22; Accession=PF07967.4; Description=C3HC zinc finger-like
  Subcellular localization annotation: CTP_CleavageSite=79; ConfidenceScore=5.10e-01
MAAGEGGGGDIGADSERRLQKAMDKLYHFPKPKSSSTGGSKPSSSTSAPSSGRAVGKAAAEAARRFGVVRGSRLPHQMLAMAAISPPPPCRPWDRADLMRRLGSFKAMTWFAKPKVKYLRFVVVVDNYLLSSVEKAAAVFSLKLDSGHKLLCPWIDNICDESLALFPPTPPPVLVGNYYELLSSLLRLLALPRISCSSLETMKKRNPQLEQFLSEPFSSSVVLKGGLMLTEDSTIKDLDDAFQDADTYYQQALKIISLCGWEPRLLPYAVDCGTEFHSDANSTSKLAQPEQSSKTMEDRVILYSPDGARPSVDVNQEDQHYDPLSVVLDCQFCGACVALWPFSLVQRPLQLFKLISDSNRQDDQDNGHANIVSGVGHSKDANISFNFTIAGGPPPTRQSFRPKVSFPVVSRHLKADLNSRVNLLSSRSDCYMVPVASHASGSMKRKRSTDEPHLLEGDADDVDTSTIGANHDQPGENSEKSISNLVVSTEQKQDGSHSNAAKDTELDEASNETQPETGSPLRKSITSTYADADQHGLEPRFCSVQGTNEEPSGGVTLTEMHANNSRSTEGHLCPSQLALINPNCEFMLSLTEKQGLYDRMNEFDPIKQHRTFCPWTSPDYGEPLPGWRLTLSALLAGDKRSDGDLQVDIQTSLLDEVEEDDPLTSVRKLFMTPPPKRRRIQQSEKS

SEQ ID NO: 58319 - protein, 59 aa, Zea mays
  Coding DNA Sequence Number=SeqID_14944
TVCQSDCQTDWQTDLQAGQTDQKSEGQRPVELPPRTSSAAGVESSTQLKSSSAEKLSCS

SEQ ID NO: 58320 - protein, 125 aa, Zea mays
  Coding DNA Sequence Number=SeqID_14945
MVIPHRFKDTRSHHAAEQKEQQLRTVRAAFGLDRENVHKRGEKEEGRRLILDRTNLRSVKQTQCIQLEGKRHRLIGRCPLMLYRIRAVAWTLEGEAAPPLSGRRRPEKKLLEEDADDGWLAEPKP

SEQ ID NO: 58321 - protein, 200 aa, Zea mays
  Coding DNA Sequence Number=SeqID_14946
MAQSLTRGPGPTSHTPWASVSECKKSEPPLAPVLRLLGAAAEDREAISRRLTRGPAKPSGVGATGQSAAGTDVAVGVTEGGLAEITRGARTAISSRVVNNTLPRHVDGSKAAMWPEKTISSKVSTVGPDPMGRCRTPAYTDRTSGQGPGPPRVQTGPLGWVPDPSVWGPGHPQQGSGISGRSPDAATWPTAHDVMCRLGI

SEQ ID NO: 58322 - protein, 203 aa, Zea mays
  Coding DNA Sequence Number=SeqID_14947
  Homolog annotation: Hit_ID=O48967; Match level="QueryCoverage=99%, HitCoverage=38%, E-value=6e-26, Identity=41%"; Hit description =Putative uncharacterized protein
MVHIVEHHDFMPEDFLVEEEAASSTPRATNRPAPGAAAAVHYARQHTPAQTSRASRAAPGALPAARELLRHPPSSTASPGAMKQWRNDVDRLLGMAHSGSARPRPRSSRRQHEASASVRSPSVRAAPTEDLRAELNRRCAGDDAPVSLERSNDLRAELNCMRAGEDARVSLERARERRLNVEGRNLDYDFAAVAPQTPTGARI

SEQ ID NO: 58323 - protein, 45 aa, Zea mays
  Coding DNA Sequence Number=SeqID_14948
MGLGVCGALCQGGDEDDGFGYDNGNGKEGVEADLQEFQDFDEFED

SEQ ID NO: 58324 - protein, 197 aa, Zea mays
  Coding DNA Sequence Number=SeqID_14949
MAYAHAIECVQENDVYLTTIIHEYLMQIPSCYSAVYHHGIGMGCTMEIDVSYVEGEWYLGPLCLNDWPSESYMIDSSIVVFLLLFCVDLEAGSSGNHAIELGSLGVASMCCGFAGEDGNVHCRIGAGCIAGDDFAMEKIIEPSLLWASVSAPASGCVIDTAGCGGLIYHVRAGTSRAIMKDLAMVVASPPDDATATN

SEQ ID NO: 58325 - protein, 120 aa, Zea mays
  Coding DNA Sequence Number=SeqID_14950
MDTDYKEKETKTHQAALLGGEWNRPPSLTTNQPCLGKNHLSGKLVDEGTDTVTPGDIMKPENETQRSLCREMRSRRWEKLQMNESSGRGGTPADVIIGKLKSRPSRRRDNVERTLSSDEI

SEQ ID NO: 58326 - protein, 83 aa, Zea mays
  Coding DNA Sequence Number=SeqID_14951
MEMRDSAEGKPRPAGNLNVERHERARSWAHGGRNQEAGNGEGVRDRNALEMAGGQADSARQLDDQGHGGEQGDSLGEDHGRSG

SEQ ID NO: 58327 - protein, 144 aa, Zea mays
  Coding DNA Sequence Number=SeqID_14952
MAAPRTTRSVALTPRRDRRRLWQEKQATLRLRHNNRAKKGTRLRASLLIRGSKAGPPEGFDSRLRSRGPYTHYWSEVRRPAPRKGSTAASGYSGSVPITDQGARTRTQPRKTANSAPPDLGLGLRLSPGRRRTPHRPTQGSDSG

SEQ ID NO: 58328 - protein, 115 aa, Zea mays
  Coding DNA Sequence Number=SeqID_14953
MANMLDTILRPSKAATPAPTKIFKDKTEELVKAIDESKSKSSRMEQWSKLQNPPKEQELPKIVSAPSIAPKKGRRMANMLDAILRPSKAATPAPTKISKDKDEELEKTIDESYCS

SEQ ID NO: 58329 - protein, 37 aa, Zea mays
  Coding DNA Sequence Number=SeqID_14954
MADHLFTPSLGALNWYQNRTLHLGTNRPKRWILKARG

SEQ ID NO: 58330 - protein, 127 aa, Zea mays
  Coding DNA Sequence Number=SeqID_14955
MGFNKDACHPMRYFVGFGYSGEEVVGGIIWVSFEENEGAVDVLEDRTRIMERERVSDMLYMGDDCLEHINNEGEEESSLVKVDEGANDWFKVVCEDFRDDFYTTILEADGVVISCGSGIKFFGRRLT

SEQ ID NO: 58331 - protein, 119 aa, Zea mays
  Coding DNA Sequence Number=SeqID_14956
  Subcellular localization annotation: CTP_CleavageSite=2; ConfidenceScore=5.28e-01
MTGMAHRSYSGPPETFSPSFSLLCPWIHGPFPAIKFVMAPSSSLPNSGDPRTPVAHACLNPGDLTAAERSSTARSRSPLSDNEQLVVPECVAEDPFEQQPGGEVGNMDDFEEFQDYDEF

SEQ ID NO: 58332 - protein, 65 aa, Zea mays
  Coding DNA Sequence Number=SeqID_14957
MALALAGATRLGRGPPLARWAEGVQALGMGDPGDLRPRLDHGRVRRDLLNITVPSPGALPPPKVK

SEQ ID NO: 58333 - protein, 436 aa, Zea mays
  Coding DNA Sequence Number=SeqID_14958
  Gene Ontology: Mol. function=hydrolase activity, acting on glycosyl bonds; Cellular component=extracellular region; Biological process =cell wall organization and biogenesis
  Homolog annotation: Hit_ID=A2WR80; Match level="QueryCoverage=94%, HitCoverage=94%, E-value=1e-156, Identity=67%"; Hit description =Putative uncharacterized protein
  Pfam annotation: Domain name=Glyco_hydro_28; Domain location=56-414; Score=242.6; E_value=8.8e-70; Accession=PF00295.8; Description =Glycosyl hydrolases family 28
  Subcellular localization annotation: CTP_CleavageSite=17; ConfidenceScore=5.46e-01
MRSSVASAALLVTCLVVAAAARSTGRTTLSVLSFGAAGNGVTDDAQALVAAWQVACRVPRATVLVLPSGHRFLLSPVTLQGPCSAKLTLQIDGTVLAPPEMGSWPKPRRPLQWLNFKWLQGFSIQGTGAVDGGQQNLDLDMKCCLSITHFYLQTSTGTGHWHSPGVKPTLIRFYNSFNVSVRNIRISNSPQCHLKFDSSGGIRVKNVTISSPGDSPNTDGIHLQNTKDVEIRSSTIGCGDDCVSIQTGCSNVHMKNVVCNPGHGISLGGLGKDNSLACVSDVVAENIVVQNALYGVRIKTWQGGVGSVRNITFSNVRVANVATPIAIDQFYCDRGGARCANRTGAVAIAGVAYRRVVGTYTFQPLRLACSDARPCTGVTMLDVRLSPAAAGGTVAPLCWNSYGEARGTIIQPLSVGCLQRSNGYAMPLTQPFNYTC

SEQ ID NO: 58334 - protein, 118 aa, Zea mays
  Coding DNA Sequence Number=SeqID_14959
MSGAPATSPRPLGSDRWSTVFWARLDVRCDRWREVAVALLVHRTVRCTPDSPVNYSGANSRGWRVPEPLILGAPDTVRCTPDSPVNYSGAPLDFPEGDEFSVKSPGALDTVRWHTGQS

SEQ ID NO: 58335 - protein, 431 aa, Zea mays
  Coding DNA Sequence Number=SeqID_14960
  Gene Ontology: Mol. function=nucleic acid binding
  Homolog annotation: Hit_ID=A2ZER4; Match level="QueryCoverage=83%, HitCoverage=73%, E-value=1e-96, Identity=53%"; Hit description =Putative uncharacterized protein
MPPGREKVGVKRPHGPQLSEPPLHPYEQLRLRQCMRNNSRLQQLGIPALSSMLASTNSISQRNRPSHRNSEDSESDYDISQDETGDDNVKVGSKECNIRTTDNSLGAIKLCSKRVFAQQETTRITRSKKNIAQPDATLTPRHNIDYHTQANGHAHLDENTNMTNEGHVAPFDGKNPTGNEDNVDVLADNNRTIGGQVDDTNQMSNRDLELGQNDRWERGINMGHGLHRINRGLRGKLQVVIPEGKIRPMAPLVAAKFATECNISVRNHVPVFKHWKDYKNHSGLFNLFTGKLSAKFDINTSDAPVQKACSQMMKSAVRQQRYRLKKKYFDPFPLHLVAKKSPIRSMTDEEWNELVEYWKSPKKWYETSQKNKENRSKVKFHQTTGSRSYMVHVENLGDKYIDQEPDALDLFKECHYSKIKKCYSSSVQQVI

SEQ ID NO: 58336 - protein, 88 aa, Zea mays
  Coding DNA Sequence Number=SeqID_14961
MMLVDYTTVLDIPSVSVEGPTQQGIEHVVEVTPTSGVTNDGSSDPSLWLQLLRALRVVARTATGVIVVVSVSVGVSESRLEGGWISGI

SEQ ID NO: 58337 - protein, 26 aa, Zea mays
  Coding DNA Sequence Number=SeqID_14962
MEISAGFIWTHPTLAENVRRFPRCGS

SEQ ID NO: 58338 - protein, 145 aa, Zea mays
  Coding DNA Sequence Number=SeqID_14963
MGKSNKRKREPTPPSEDFDDSEYSEEEFSFESEGSPAPVSPPASSDDSDDSQGIAAEFWTYIRAVERSGLEGSDESEYSSDEEDSDGGEDEDDGDDDDGGDGDGDGSGNGRGSGGGDGSKGSTRGGSSKGSTRVGGGGSSSKASG

SEQ ID NO: 58339 - protein, 62 aa, Zea mays
  Coding DNA Sequence Number=SeqID_14964
MTKGMVITEVLGSVGRVLDGPPELVLQPLRLAVEIKSDKGQGQNWNANDGWLHESVDYLQEM

SEQ ID NO: 58340 - protein, 46 aa, Zea mays
  Coding DNA Sequence Number=SeqID_14965
MAMMGSTSEKMYLCQVRKQQIFVAFVPRWCLRKKVETEASGGSVLL

SEQ ID NO: 58341 - protein, 49 aa, Zea mays
  Coding DNA Sequence Number=SeqID_14966
MVGLQVVTRMMFMIMVMVAFGAIYAQVKKKENGVEADLQEFQDFDKFED

SEQ ID NO: 58342 - protein, 57 aa, Zea mays
  Coding DNA Sequence Number=SeqID_14967
MGNRVANPSKLSVNGGDKDDVYDYGNGKWYSFRLERVKKKENGVEADLQEFQDFDKF

SEQ ID NO: 58343 - protein, 662 aa, Zea mays
  Coding DNA Sequence Number=SeqID_14968
  Homolog annotation: Hit_ID=A2XIQ6; Match level="QueryCoverage=90%, HitCoverage=98%, E-value=7e-72, Identity=30%"; Hit description =Putative uncharacterized protein
  Pfam annotation: Domain name=Transposase_24; Domain location=355-490; Score=-24.4; E_value=0.078; Accession=PF03004.5; Description=Plant transposase (PttaEnSpm family)
MTTQGGLQPTSNEANMCTNDNGSQLGTRIVDEIMAGKNVFFDLPDKLTGEIWTLKFHCIGAQPGKEIVTVNIDKAYVAFYNVVYIKSKLGYSGRDFLFYKKRCGIDRSRLLALDYIHQEEAMLYDNMDERKISFVLTKDPPSDLEVSITPIKRPRQRTNVDEETIEVSIDAYKEWLAILQHDNPETVLYERQSNDDLILSDEEIHGSNKPTTNWPSHARRHRKRDSDVIGIYVDNDGVFKKEGRGTLKGIAAATKRIKNGDHKLKIEFSSKLGGPVGPNARTFVDEIVLFTKKKAPLIGVKKWKDIELNVRSSIASDVLSIAKERYKGWRSTLSSTYKAYNSYAERMKNKPEDVDIVEWHYMVLYFGSEKFQKISSRNSENRQKQRTKHIMGSRTFSQISFQQRDPETGIEPTDLSLWMITHCKNDEWSEEASRGIYENAAEKIAEKIYQTEKFYLTREEENAIFQTTFKETTGCKANRLHGHGYLSRYPTRSQVMESKFLEQARATVATNQKNIELESQVQLLNEKLACEVAERERILQEKMQALQEEEEKKRQVLREEMRQEMVAALAVVAQQSNRESTTPIDPSSVVPTKPPEFIPADSPAPAPSSANNVRTPDTNNKKDNMPANYISSYTLRNAVTRRVQARGNKRSECVWNANVLVL

SEQ ID NO: 58344 - protein, 77 aa, Zea mays
  Coding DNA Sequence Number=SeqID_14969
  Subcellular localization annotation: CTP_CleavageSite=55; ConfidenceScore=5.13e-01
MAHWSCSGPPKAFSPLFSPLCPWIHGPFPAIEFVVAPSSSVPNSGDPRATLAHVCLNSGGEAGNMEDLEEFQDYDEF

SEQ ID NO: 58345 - protein, 329 aa, Zea mays
  Coding DNA Sequence Number=SeqID_14970
  Homolog annotation: Hit_ID=A2XFR6; Match level="QueryCoverage=52%, HitCoverage=49%, E-value=2e-08, Identity=30%"; Hit description =Putative uncharacterized protein
MARIRCTARQSSHLERLHRRLHEEQERRRQEQEQQDSFPSPQREVESERPLSPAPQLEMPPAPPKGIPAAGGDPDGDGDDDDAVGGSSSHDMECSEEPVLEGWITRPITHNAARGCHFHDALDTLLCRDFDRDTWSIEYRCVVYQHRLGLYPDQREATCLVRRLNDDLRGVEAFSEHYSITKRDTIEVAMQDAARRALSQYCSLFSGVADGLDLKYCPHRSTGSARGVIVSPVGEDNPRLSSMVNLAAVLNTELDHALDELSKVRAEVAELRAECVARHYLDGGSPTPVGIQHPYRSPPCGRFDYGTLDCRTRIDLDPLVGGVEVCNNV

SEQ ID NO: 58346 - protein, 254 aa, Zea mays
  Coding DNA Sequence Number=SeqID_14971
  Homolog annotation: Hit_ID=Q2QXG2; Match level="QueryCoverage=23%, HitCoverage=23%, E-value=7e-16, Identity=70%"; Hit description =Uncharacterized plant-specific domain TIGR01568 family protein, expressed
  Pfam annotation: Domain name=DUF623; Domain location=175-234; Score =67.8; E_value=3.6e-17; Accession=PF04844.4; Description=Protein of unknown function, DUF623
HRASNKRRRLAAEAEHTKRPGMSTRARGGGRQLQFPVGRRRRYAPVVDAECGCRPRRPRLLSLPSFLRRPCSQLMDGVKAAATTTTTRGGVGEQYSSCASTSTAASSAATRSTGGYASAYSSDYYYCYPSRVAYGAGAAAKAQQATKKKKKEKEKRGEKAEAEADGLGVAVEKESSDPRADFRDSMVQMVLEMGLCDWDGLRGMLRRLLALNAPRHHAAILTAFAEVCAQLAGAAAAAAPPAHPSPPAPCQYRR

SEQ ID NO: 58347 - protein, 92 aa, Zea mays
  Coding DNA Sequence Number=SeqID_14972
MEAKSHHQPNQGGTCKNYATSKAEYTNTQLDLSVTALVPTITGMGDHVSGRVRRAICGQVHSDNASLWTVVHRPPSLRYQNGYNQFLTSHEC

SEQ ID NO: 58348 - protein, 148 aa, Zea mays
  Coding DNA Sequence Number=SeqID_14973
  Subcellular localization annotation: CTP_CleavageSite=42; ConfidenceScore=5.30e-01
MVLQQHIPLAGIASNTLRTSERSKGRGCPRKATRVLFLGGARAGALRRAVAAFQALQQGEEQGEKGEDCRGAMGARAQGCSWPCLKGRPARGGVRASRCPGRKAEGTEQLEEGGRCHWGKLQRAEEEGAESTQGGGAVAEHRSEVEEG

SEQ ID NO: 58349 - protein, 161 aa, Zea mays
  Coding DNA Sequence Number=SeqID_14974
  Subcellular localization annotation: CTP_CleavageSite=30; ConfidenceScore=5.12e-01
MQQPYSSISPSIGHVRVLLDLPHVSTHKPLCSPFRSWSTSLHLPRHGSQLGILPACVVLRSAPWCLLGARQNAQQATRYSNIDWVCLWSGDVGAPPKPRSSLSSVAEAEARAPGSGEAEIVRPRPGRSPSPGVGRGGVSSSSEPKSEPWGRAERSSPSFGS

SEQ ID NO: 58350 - protein, 240 aa, Zea mays
  Coding DNA Sequence Number=SeqID_14975
MGVTEEEPSQVAAPADKKRKLGTTVGGLGVSDSFAMELMGTCATLGGRMSSPELRESSARMLEVTGGQWPKNVPIPRAAGEDLFTSRMARDLKVFPYGRNIVAVVLAVMNKDRQDAAQNRRAVVRIADPRHEAKRARGSTKAPASGSSQPMPAAKPAAPGPSKASAGAKTAASGGTKPPPGGSAKGRELPSPGRRVADFGTNISVEDFFVGPYGEALEKLLEPPKVSPVQHHNHNDNIVS

SEQ ID NO: 58351 - protein, 456 aa, Zea mays
  Coding DNA Sequence Number=SeqID_14976
MAAEVERLRAQHADAIWEKSAAEKERREANQAIAEAQAARAGAKVAWAESSLASQRTEELEERFNALHGRVDKAEASTRSEVERTHAQFVDAYRELGARTADFEVPDREAGLRFLERLQEELLVLLTIVEGFMSFASLVTCEGAMNALSREGCRHYEVFDQSYENFEREIYKVEDPMVKQSARALFDRMWGPHGREVVRERSDRAIEQMVHAEDVEDLGALVGAPPEAAEVNPVPPLDAGEGSSAAPVPTVAGEDPVSAPAPMAEDALKVVAEQAAEVPTVAAGPSQVQGFGPAHATATDNANFVAALTVVAEGDSDDSVSKFFESDDSGSSIVWMEGSSEEDLDYFAAVDVAAMETPPLVMGAKNHPGASAGRRRRRVVAKRRVGELSRGERRHHGEMEGGRLRADGTGKWELLSLSAGASVGEGELRSLFASEELRIMLFNYREMGIIPKVEPM

SEQ ID NO: 58352 - protein, 237 aa, Zea mays
  Coding DNA Sequence Number=SeqID_14977
MAPRKLCDDGGSQLSYGSRATAWLAVHFVEHLASTTGHYAAPRKQGGCRVASHGGEDAERYGGKGVDKWASIVERSPRELDGAGKNGSAHRDDRAGDRVLAGRGQRWTSCCSPEGGAGHGEPAGGHGARSKEGRDQGESRGVGVLPGSSCSCGKKQREEERRALGQRVGNSRGKGSSAMAAGGARLGREHGEGADFHGEEGPCVGGLTEEAAGESFLRKNREIDEWHVGEEDEGCGD

SEQ ID NO: 58353 - protein, 52 aa, Zea mays
  Coding DNA Sequence Number=SeqID_14978
MARVACTLRGKRLDGGVSMLSVKKQQIFVASVPRWCLKKKIKTQATGGSVLL

SEQ ID NO: 58354 - protein, 124 aa, Zea mays
  Coding DNA Sequence Number=SeqID_14979
ATEQEMGRWLGEGRGGRATARLKGAPAMESLLAAMEKGAEKVTAKGRAGASACSQGGGAQSTGAEGGACWLEEEEGEEGKTPWLLEKSGRYGWSRGTRAHGEASMRRGTTGEKEARPWLLEVLG

SEQ ID NO: 58355 - protein, 86 aa, Zea mays
  Coding DNA Sequence Number=SeqID_14980
MTSTGNRHRASDYRVEVVRWVGMFSKRKTYDGESVKGLDGFNIGKDVPLPGYSFVLLMMVLSAGGLGLLISLSNSSILLIEDGHLS

SEQ ID NO: 58356 - protein, 70 aa, Zea mays
  Coding DNA Sequence Number=SeqID_14981
MARTLLDDTFHGGSVLRCCRLHRPIRDRRNVIAGRFDRVESNLIRSIVIQRSTDEDTLSTVNVAYEPSSF

SEQ ID NO: 58357 - protein, 81 aa, Zea mays
  Coding DNA Sequence Number=SeqID_14982
MELGGWRSNSLAADNAPGAALDGARDVCTAQGGTHKDTEPRHVGPRAKCKEITNACNAWANSERHNVHSPYSIVMTPLLPR

SEQ ID NO: 58358 - protein, 725 aa, Zea mays
  Coding DNA Sequence Number=SeqID_14983
  Homolog annotation: Hit_ID=Q2HPJ0; Match level="QueryCoverage=15%, HitCoverage=36%, E-value=2e-10, Identity=36%"; Hit description =Erythrocyte binding protein-like
  Pfam annotation: Domain name=Transposase_28; Domain location=3-104; Score=-65.3; E_value=0.094; Accession=PF04195.3; Description =Putative gypsy type transposon
MISLGQPDRFQTEATLNVAAIIAHLCEMFVGVAPCTSLFHHFFVLVKSGKARDHLGAYYFQTRPDSAVSYISTLGGTSWENWRADWVIVSVEANDCLVLPSNGPTLDRKLWRTQPSLSPELLPCWTGLSGRWPDLHACALCDDPMLRTTMLASLPTLDESGVAVRQTGGRDPHRRIRIFDAPAGGPQSAGVAPSAPSGASSASAVGPRPLDKGKGAAKAPEGRWWGRGDRLPGLGRAEARQSSASTTIGSAATTTTTTIGFAATTTSRGRSPPGAPPPATTAAAATAAAVAPFPGSLEGPGPQGFLPLCPKIVPPPPPAAAAETAPPGSHAPAGGPTAAAPTPRGTAAAEGAPTAPMATAAPTTVMPSSTPSVAVEEAPTTLGPAIEGDAGGASSSIPPPTPEETDVIFGRQLRSGAEPEAAPVPLSRLLFRAHQALHETEAAILREWEALKAEHQRLGDWRTQLEERTKAASRQFASDGGAGGTGPQVVEVTKKALEDLQAEHRAGVQRIAAWADEASTALVPLGVSPIPVSQLPTSISDALPVLDSVADRLRRLDQILGARLEAKGGRLCRVVVEYVLTCFQSHDPAISLELVIAGPVADTEDTAWEGIKYAVELVAERFQRDPTDDELDVLRLDTSTPKKELVTRLPGGSLNWDLDLTYRIDSGKPSLMSGPTRPTGRAYEGGPHRADVHADTSGSAYFRHLEGSFPTGGEFVEPFSVQYSP

SEQ ID NO: 58359 - protein, 366 aa, Zea mays
  Coding DNA Sequence Number=SeqID_14984
  Gene Ontology: Mol. function=hydrogen ion transporting ATP synthase activity, rotational mechanism; Cellular component=proton -transporting ATP synthase complex, catalytic core F(1); Biological process=ATP synthesis coupled proton transport
  Homolog annotation: Hit_ID=P0C1M0; Match level="QueryCoverage=21%, HitCoverage=29%, E-value=4e-16, Identity=52%"; Hit description=ATP synthase subunit gamma, chloroplast precursor (EC 3.6.3.14) [Contains: Inceptin]
MDATEDELFRLTTKEGKLTVEREKVKIEMQPFSPVESLASELAARMSAMSIASDYAIQLHNARSTEYKSNENQGSIHANVRTNKSSFLGIKTFGSLRKRNDERILEEHYHDLSQFEIVAHRTCRVNTVPSRLDRAYCDDGASGIISSPNPILVHASLTRTRADVGTTAGRIFHLKPGPARPLGSGGEETRKSPSGHLPPPCSRMLLTIFSLGPTSRALLWAAPPSFLVPPTRSTLLRPAMSALPLTSGEPFRVFVGYTRGSTRRTRWAATACVLSRGSRWTCAPSDRMRDLGNTFPGVEVIWEGLTCRDCHEGERGTTAMDGSVSLRPGAICGRFVADPSRAREGGAGRAGGVNRQNTVHDCGRLQ

SEQ ID NO: 58360 - protein, 181 aa, Zea mays
  Coding DNA Sequence Number=SeqID_14985
  Homolog annotation: Hit_ID=Q7G594; Match level="QueryCoverage=24%, HitCoverage=13%, E-value=1e-08, Identity=62%"; Hit description =Retrotransposon protein, putative, unclassified
MRLGVSFIAPRQLGAVEDQLGRPILPSVEWCTGQSGAPPDSYYSCPVLDFFPYKEQPTVGPRDRLAHRTVRCAQPTVGATTCRAKIARLTVGAGDRWLTRQSGAPPDSPVNYSHTPPSKPESGKFTVDQHGALDTVRVVVMTSFPLKAILHNSNAMGNIAKWPAELAEFQLDFQPRHTIKS

SEQ ID NO: 58361 - protein, 159 aa, Zea mays
  Coding DNA Sequence Number=SeqID_14986
MASMAAHSRDHEGKGAQRAQRRKGIAIGRECESVTAARGANPSSRQTLPLVPQDATGNPDQRTPDAQTTARTSLGRLLWASNSTRSHNVDGSGAATWPEKIIYPKVSTVSPKPHGKVPDPCIYRLDLRVRSRTSMGASRTPRIGSGPLCVGSRPLTAGS

SEQ ID NO: 58362 - protein, 350 aa, Zea mays
  Coding DNA Sequence Number=SeqID_14987
  Gene Ontology: Mol. function=inorganic anion exchanger activity; Cellular component=integral to membrane; Biological process=anion transport
  Homolog annotation: Hit_ID=A8WCD9; Match level="QueryCoverage=50%, HitCoverage=26%, E-value=2e-62, Identity=68%"; Hit description=Boron transporter 2
MPSIYRTCIVELDGIVGGDAHGAHPGGELASERLLRDTEELAVEVEREQRVQDLHGVLLELHHGGEGLHLDLHLLALHGELPLLGGEAEELVLGGVHADGGAGGFTRMAAAAGEEALSSATKQKVAAVKQYIENHYMSQMMSLQDGKESLSMPFLGEPGSSPCHASQQDQGRCRLQDLFSVSPAYIFGAILPAFMVAGLYFFDHNVDSQLAQQKEYNLKKPSAYHYNILVLGFVVLLCGLLGIPPSNGVLPQSPMHTKSLAVIKRQFLSKKMVDTAKESIGGSATSLEIYGKMEEVFIKMDSEENTDSVERELKNFKDVVLQEGNEEGRLAREFDPRKHIEAHLPVRVNE

SEQ ID NO: 58363 - protein, 137 aa, Zea mays
  Coding DNA Sequence Number=SeqID_14988
MKALEDLQAEHRAGVQRIAAWASEASTTLVPLGMSPIPVSELPASISDALSVLYSVVDRLRRLDQILGACLEAEGGKLYRAVVEYVLTSFRSHNPAISLAPVIASPVATTEDAARESVQDAVELVAERFQRDPADDL

SEQ ID NO: 58364 - protein, 60 aa, Zea mays
  Coding DNA Sequence Number=SeqID_14989
MARLALRATPAGWGPPTGALEIRIPRVGSVAKIAVLRPGSSQSAGMFWGVSGTQGQKFPQ

SEQ ID NO: 58365 - protein, 109 aa, Zea mays
  Coding DNA Sequence Number=SeqID_14990
MEQRSMKAKGRNRLGQNAKRKSHSTGTKDLGNPVCDTGARVHKSYGLCSEFQASRSSPRPPRVRTGPLEWDPDPLYGVRADHSGVPRFQDRAYPNLNRDPGGGPEPTRV

SEQ ID NO: 58366 - protein, 311 aa, Zea mays
  Coding DNA Sequence Number=SeqID_14991
MGSTRVSFVLLLLEEHDLAGVGTLQPSLGSKDFHHAARLHSLTNASRIFIIRAGEEGGASRGLPPCGPVTCFFLRHSRERALTGLAEGANFDNAGPVGRKRRQLQRAWLTGSAGSVAASDATSCHLIRAWPSVHRTGDCCAVRTRGSSKTPYAAWAAFVFLDCLVLTPARCLRAEVAAVVGAEVVVARAEAALVEAVASADDTAEVIVAAGAVVTSEPPGVCCPAGPLNLRPLCDEPEPEAVVSSWTEAESASKRGFVGPGAGGFLGRGGCDGPSAVLASSFEVEILPPVSPSEAGPDSAEGGNDAEAAEA

SEQ ID NO: 58367 - protein, 315 aa, Zea mays
  Coding DNA Sequence Number=SeqID_14992
  Subcellular localization annotation: CTP_CleavageSite=69; ConfidenceScore=5.15e-01
MQVACNHTVGAHPFGFVASDMEAQAHTSWVRRLAPRKGSTTAQSTRAPCPLLITGSKAGPSEGFDSRPRARRARDDSRSGKSPTEAWGCSRNPAMAKPLTASTNQPKNLEPDQPRAGTVVPDEVTSRPRASSDSGRTLGTPEGPTRAGFVEKQPWPNRLSNRPYHRRIQCEDRLTPYPDTSASVGKVEAQQEALPRPTPGLGLNLGLGRWSPPRPTPGLGLNLGLGRWSPPRLTLGLGLNLGLGRNRVLARPRPRPQEESPSRPTLGSDRPRHGGCIITLPLASSGYGGTRLASHLARPGLRRSSDGHVTAYTGV

SEQ ID NO: 58368 - protein, 133 aa, Zea mays
  Coding DNA Sequence Number=SeqID_14993
MGKSKKGSGSSPRSGDKRKREPTPPSEDFGDSKYSKEEFSSESEGSPAPVSPPASSDDSDDSQGIAAEEYSSDEKDSSDSSEEDSGGDGGDGGDDGGDGDGGGDSGKGSDGGSNGDHGGGSKGSNKGSNKTSG

SEQ ID NO: 58369 - protein, 467 aa, Zea mays
  Coding DNA Sequence Number=SeqID_14994
  Gene Ontology: Mol. function=sequence-specific DNA binding; Cellular component=nucleus; Biological process=regulation of transcription, DNA-dependent
  Homolog annotation: Hit_ID=A2YHW9; Match level="QueryCoverage=34%, HitCoverage=33%, E-value=5e-25, Identity=40%"; Hit description =Putative uncharacterized protein
  Pfam annotation: Domain name=SRF-TF; Domain location=11-61; Score =57.1; E_value=6e-14; Accession=PF00319.9; Description=SRF-type transcription factor (DNA-binding and dimerisation domain)
MARRDRRSGVRFIEDGRDRSLTFFKRRSGLFKAASDLSTLTGARVAVVLESESGRFSSFGTPEASPIVDAFLLGSAPTDLDTSEADKASITNLQNEVFQLEKDKAMEDKRRKESLARSSRKVQQASKVARYVYGSVDDLDATELFEMYRELSRVQQEISDRLPTTLLHDASKADAGGGRGRLRDPSLLRPTWWRASAMPLPPLQQAATPPTKCPPWAPSQARFQFQQHPWAASSTSPPAVLPRSSGSPLPSSAILPSPLAPQNPSFLRHHHPLAPHTTPPTSAGVQFQAPRTPAPTEAQNPYTYYIRGIDIISGNSSHPSSLSPVMPSSSPTPHQQPSSLRAPPSDDSSPLSLSPRVSYPLHVGSPYHQQLPLSAQNHNSVQQPPPPPESCAHVVGSPLIVHSHQVFYSNLSPDLNAELGSVDDGGAGATHADGGLGLSSPQQSDGFDGVTPNKSFSAGQSSGSGWW

SEQ ID NO: 58370 - protein, 101 aa, Zea mays
  Coding DNA Sequence Number=SeqID_14995
  Pfam annotation: Domain name=zf-CCHC; Domain location=56-73; Score =23.1; E_value=0.00048; Accession=PF00098.14; Description=Zinc knuckle
MSCSTSSRYPRTRGEEAEKEETAASVKLHKKDAPKTINEAIQHEQGKSTKKGRGKRRCFKCKELDHFIASCPHKDKEERMRRCFRCNNEDRMITSCLLMNN

SEQ ID NO: 58371 - protein, 104 aa, Zea mays
  Coding DNA Sequence Number=SeqID_14996
MADSKDHSDVSLSNIIKPTIETLSTDDQRDFEEHIEQLIKEAKAKYLANFKPRWVGARPSVKGGKRRPETGVREVEIPRPSCSSRAQVGRKERIQVYNGGVAEC

SEQ ID NO: 58372 - protein, 294 aa, Zea mays
  Coding DNA Sequence Number=SeqID_14997
MHCALPPCEPPDEQRPRCFRLAAVGGAQLRGSWYLSAIARLQGFSSGSPAASPCRWSPKTVTTSLMVGRSKPGCGLCLALSFKDLHHPCWCGGRAEPELYLPYGLASRFFLQLLGVETILQLCGGGALQPCRGRRTVAAQPRCNIPSFVRATDGSEDLPVRFGAAGARWCGVGGQVDAAVSAEVVVAGESFFVDETVSATRRPTSGSLALMSGSCPLSGDANESLPAAASVPGPSLLLQRSLASHQEFVVPQALRCGGCSYPREWNWSSICNGTLSAGVYSLRLSGPEHLCIWV

SEQ ID NO: 58373 - protein, 141 aa, Zea mays
  Coding DNA Sequence Number=SeqID_14998
MAREGGEVVCPQLPQACEHGNQGPGQGSHVGVENCSSRRLQKGENPVGSTGLDGQRGSITEFLFVGRQAYSSMRPAELMKSLNWEQREAPITQEEPAAVLSAQGRTVRARGPDGPRPEAAEVADGGLDLAPGRDPVGEERS

SEQ ID NO: 58374 - protein, 168 aa, Zea mays
  Coding DNA Sequence Number=SeqID_14999
MAARRGLRLGRKGYGRGIRGALEERFGRVVLRVVNDGIPAVGLLRGVDSGEGMGSGERACTGKKGDTNMLVVCIVRRQNRCPRAVGSEETIVEACPKRAGLEDVTGPPPSCLRIREPSLPFSDQGTPATVLPDRGAAAATLLDRGATTSDQGIATAALPDRGAFAPRL

SEQ ID NO: 58375 - protein, 312 aa, Zea mays
  Coding DNA Sequence Number=SeqID_15000
  Homolog annotation: Hit_ID=A2WKB3; Match level="QueryCoverage=13%, HitCoverage=32%, E-value=9e-11, Identity=82%"; Hit description =Putative uncharacterized protein
  Subcellular localization annotation: CTP_CleavageSite=65; ConfidenceScore=5.52e-01
MEESMSPLASSTSLATRASCWNAAPGRGLGVGLPVARTSQSRINSFCLSFRPVVVRFPVTTDYTGADMLEDGRALSEKWKVTFVPTRLLLVGPSFDVRAIGPAHRSIVDTSSGPRKNLGSFTVLPTKFNLVMVVVSTGSDRWIGWFFKLAEFYQDPEFDMVGAAATRDEQSRQRPRVRRGDGCGGVRRGAEAEVADVEGGPSRLQPRRQFLLPHQHRSSTSVRHPLESGSLKHSRLILTRNAMVRSTIRQCTTHRRPFRWRCALSAWGIEVLGQQAKGTERMLERIGQEVAASLKELEAHYYSYVVRSPSYD

SEQ ID NO: 58376 - protein, 373 aa, Zea mays
  Coding DNA Sequence Number=SeqID_15001
MTAAKDRGSFAKCRMETRGRGLILRKYQAKLGLRNTPPAGKDPSSSHHVKHNDIRIEQPGLQFRASMRKQEGPTAWGPALKNGNPFHGVVQSLCGRSTIQKQEKPGGGSKEQMPVPWCGPEPVWPISLVPYPKSCTLHRSVMSALVFGTISPVRPTTWGPELEKRCLSPRVVRSHVAAQPGPVPWACTLHHPVAGVLVPRTTIQGVRTHNLVSRLKSCVHVLLHSASEQTYVITFPYKRGPSSISTGMNHAASVRIVLEAGSGKPHRRRLPPLHQRIASGSNHLYTSSDNDHHSEWFASSSVHLREEAGHQPTWRAGPRLGSPSTPARMMNILEAEARGEPQPDLLLPTARLVVILLDGHWRGTAAGLHDENP

SEQ ID NO: 58377 - protein, 233 aa, Zea mays
  Coding DNA Sequence Number=SeqID_15002
MAVYLGESRSYPNRPPFQVTFIGHRFPDTCQSVARKALKQLCQNYSREIFETPLRYFPPSNKNTPTWRKGLQALSGRDPTEDDPTIVYMAGYLHTLDNHYDDLSSHCTHLNSRVESLEQQVKELKKEKASLQECLDIAEGEEANTREAYRTLKMDYDKKLKKLAPTKKIQKKTKNHGGQAERRKKAPPAPTPARIENLSDIEDMSLASLDDLLKEFGDTLEKEFGSTSENARV

SEQ ID NO: 58378 - protein, 917 aa, Zea mays
  Coding DNA Sequence Number=SeqID_15003
  Homolog annotation: Hit_ID=A2ZNX9; Match level="QueryCoverage=70%, HitCoverage=82%, E-value=1e-168, Identity=52%"; Hit description =Putative uncharacterized protein
MAEDLASSAGHPRDADDSVEEGRLTAWAHVPGRHLLFALTDKGGREATPTLDSLASVYLLAARAEVEEEQGKGSYLPLRASYYTFQLPDRSTGRLKHGAPSGTADLAAASRLFSPRRLLPSSLRSSSPRRLPCPPPAASPPPPTLPHPADGAAPGVVARLMGLESWPATATAAPPRPQKQRKVEASRADGADSAVVLVLPTTRSRRPPASAPVPTARSHHGADLPARSPRRTRLVHAAAAKLLHPGARAGSRASARLALAYACSSPQHRKDDHAGTLFQGSGMTDDFLSRSESLPLERSALLQVQPPGLPAETDCDTAVVSRRHDHCSTNNVDAAISASTVVLPRMGFGDGNRSKRSSDVDAKHKGSGIRNDVTRTCARARSSGAAVQTGDERLLRKRATPTRPEVSGMPESGDLAGSTRLAGGARDLVSATRKFAHGGSGPRREFAGSISGQGSTTHRDLNSQNGLASTSRISSNGSGHKRGSGRKVGHDRAISNRDDRNAIAFTSRSSTKPVARASSQSNLLKSGSPNRLAPDTTRTRVLAPEKRYIEASPSFMSTSEKGEFSRLLKAKINELGMSDRIECTPDDSPSGKLTVPVLQELISALTNDMSTPISQCSNYSAASAPLSCNGNVDCINEPHCIFSNDQSPDFQKCFKGEQDVDSSAASLNNEPNQPSPTSVLEASFSNDTSLGSPVEKNEGKDLIMSIENKMEDLFNLESDIVDLAMSIDTRKTDAEETHRDNDKLSCLQNFLAHDFNILESRLCSIREAISNAELLVGSSLSRSTASGLPLHPFIVEMLENTMDMFSGGEYSGFTEDKKYQRTNFLFDCIIESLDSKFCNFGKCGYKAWLSLPLSLSEDLLKRQVLEDIGNWRESSGTALRQVSDKEVDQVTDRWDASQVEAFDISIAIENDILEALA

SEQ ID NO: 58379 - protein, 111 aa, Zea mays
  Coding DNA Sequence Number=SeqID_15004
MRHPGVNSAVTGVVPIHGGGVAGDWTDAASEGLRSPGLARTGEEGLRYYKSEGGRAATSLIPNMNQVPALSNARLIDPAKTLETVDTTVVCPPPKIRTAPPPIRLGERITQ

SEQ ID NO: 58380 - protein, 148 aa, Zea mays
  Coding DNA Sequence Number=SeqID_15005
MAGERLLQGSSAMAADGDGSRRPWEGKPPARHGQKKGGRKGAVPATRVPSAMAGRGEEGEELSSLCAAVWEDCCAREKKTGRRVAARRIRGDDAREGLAWRMSLWMADMVGALLRRALTAAATWSGYSACALVSSIYKKVELTGGPMA

SEQ ID NO: 58381 - protein, 333 aa, Zea mays
  Coding DNA Sequence Number=SeqID_15006
  Homolog annotation: Hit_ID=Q8H6I5; Match level="QueryCoverage=30%, HitCoverage=11%, E-value=7e-07, Identity=39%"; Hit description =Putative RIRE2 orf3
MMTTNFVVGRSKLGCGLCPALIFKDVHHLGWGGGRTESGPVSAWVGDPLLPLAFGGEGHPPALWRRRPPAMQGKANCCCQDKVQLSVFHPGDGGRLHRGVSQHVVRREGGTRVLGQSRSRSCGESGSEDLPVCFGAAGTRWCGVGGQVATVVGAEVVVAIGEAASAEAVASADETIRATCAPDLRLFGFNGWPSGVEVVHTRESGTGVPFVMNLRPLCDELKPEAAVSAWTEAELARKEASSAREHVASQAEEVQQRRLELGQVIRGWDQPRSHAAEAMSRAEVLGGQLAEATEWPAEASARAGTLAENLTMRAQARCWRLPRGGDPSARVAV

SEQ ID NO: 58382 - protein, 79 aa, Zea mays
  Coding DNA Sequence Number=SeqID_15007
  Homolog annotation: Hit_ID=Q6QP51; Match level="QueryCoverage=58%, HitCoverage=20%, E-value=2e-12, Identity=78%"; Hit description =Putative growth-regulating factor 1
  Subcellular localization annotation: CTP_CleavageSite=54; ConfidenceScore=5.41e-01
MAAYNAQVQQVMNGSGVMGHNTSPPMNPNQLNDFVNDLFTSVGKQRRSTRFDCCASHPGKADNSKFSLGRNRKLRLARP

SEQ ID NO: 58383 - protein, 292 aa, Zea mays
  Coding DNA Sequence Number=SeqID_15008
MARLRHTARKSVIPFLPSRLAERPLRRPVAGQSSHLERLHHRLHEEQEHRRQEQEQQGSSFSLQQETESVRSCSPVLPLEAPPAPPLGAPSSGVAAGGDPDDGGGDDSSSHDTDFSADQEPEGWVARPITRDAARGCHFHDALDTLLRRALNRRTWSIEYRCVVYQHSRGVYPDHWEATFLDAARRALSHYCSVLGGVADGLNLKYYPRRPSSSTRGVIVSPVGEDNPRLSSTVNLAAVLNTELDHALDELSRARAEIALLRAERAERRHLDDGSPAPVGTQHPYRSPRRGR

SEQ ID NO: 58384 - protein, 219 aa, Zea mays
  Coding DNA Sequence Number=SeqID_15009
MPCFQPELVLPDCSAGLLGQEDEVPVDSASGTDLLLADYSGDSNADAEDTAFETAAAAEVDAGWGPLILRLRSSISLRFLSVMIALSIRCWNVGKEHGTDESSSELFPGDGLGVGMGGEHACLWASEASEAEVVPAATAAEWRPESDRCLELPESASETSARSTSGAGAVGAVAGAPHPAERLALAEHAFLLCACSLTSAECNHTSELIWQILQHKKRV

SEQ ID NO: 58385 - protein, 57 aa, Zea mays
  Coding DNA Sequence Number=SeqID_15010
MAPAPWGRRALRLGASTASALGSEAEQGDGVGEKEERVGCHLLSWSSRHGRLHQQVA

SEQ ID NO: 58386 - protein, 445 aa, Zea mays
  Coding DNA Sequence Number=SeqID_15011
  Gene Ontology: Mol. function=acyltransferase activity; Cellular component=plastoglobule; Biological process=metabolic process
  Homolog annotation: Hit_ID=A7Q5S8; Match level="QueryCoverage=99%, HitCoverage=64%, E-value=1e-110, Identity=46%"; Hit description =Chromosome chr14 scaffold_54, whole genome shotgun sequence
  Pfam annotation: Domain name=Acyltransferase; Domain location=180 -317; Score=6.1; E_value=0.00026; Accession=PF01553.12; Description =Acyltransferase
MAVTALLNYNIDNELDMAVSSMLNGKHPLAALNRMTNNMTSFLKHSNILDKIPEDTLKWKMKLIKRAASYANYRLQSVQADVLLLVRLLPSKDEADRLQRLLPKCKIYFFEKHGHSLLLEYGVHVASIIKCTDLYRHSRQHHRVFDYIPPSATELNEVDKATCDLRFRTCPAMYSTLEDGTVVRGLAGVPQDGPVLLVGNHMLLGIELISLAAEFLRLKRVVVRGIAHPLLFPNKKRAWSEGHDFFDFLNLWGGVPMRYKSIYDLLRAGEFVLLYPGGHREALHCKGEEHRLFWPTQTEFVRLAAQFNATIVPFGVVGEDDLLELLCTFDDIRNAPFGKEMIQAYSNHLKLRDVDHEVIFPGMYLKMPGRFYYQFGKPIPTRGRQDVLTDKHAAHHLYMHVKSEVERIISYLLEKRVEDRYRNLIPRMLYQAARGPTCEVPAFDP

SEQ ID NO: 58387 - protein, 120 aa, Zea mays
  Coding DNA Sequence Number=SeqID_15012
  Subcellular localization annotation: CTP_CleavageSite=78; ConfidenceScore=5.51e-01
MAFINGGSVGVAALRLRVRSVGSLPGAGAFGAGRSAPRMDPGARGTWGGRSSVSRGTGGMRRVGGSASCLGRGVDGAQSAARSRLLAWRSGRRWCREAGGAREWERRAWVATDAGEKGSG

SEQ ID NO: 58388 - protein, 352 aa, Zea mays
  Coding DNA Sequence Number=SeqID_15013
  Pfam annotation: Domain name=zf-CCHC; Domain location=284-301; Score =17.3; E_value=0.0037; Accession=PF00098.14; Description=Zinc knuckle
MKKQSDASERTFSLTLKGKGKEREDASHAGRRATSGTTVQIWPNPQRGGAKTRRLQVSKLEMTLQAEMNLQVRVATDPHHAHHASALWQEVQLKTLKNKLISSQDDYNCLLEKFETFGNLNCELSTKIEQLESNAPSSATDDDPIKKNEKLMAKLASSQEAIEILLEKMEILSIHNNKLTTKLENIGSTPGASLVEMPEIIKKDASTSCFDLINDSNPCNHVFVKNVVIETCSDEIAMENEQLKQEVARLGKALYDKKGKAKQIQPPQDNTNVGVNKPVEEETVICRLCHKEGHKSYQCKAKNGDKQRQKLKQKPTSKISNTYINKVNKKAATPYLIKKKKNGKAIAIKANK

SEQ ID NO: 58389 - protein, 108 aa, Zea mays
  Coding DNA Sequence Number=SeqID_15014
MVEASELRQRGKPRYNHMASYGADAEEDEAVALSFVERAFADQLVPSWREQLTVRAFVVRFFLAVMYNVTKAQKTVPLEIDDQAAVKDWRSKRTKKPNAKYVGGPWVN

SEQ ID NO: 58390 - protein, 323 aa, Zea mays
  Coding DNA Sequence Number=SeqID_15015
  Pfam annotation: Domain name=Lem_TRP; Domain location=120-129; Score =3.0; E_value=74; Accession=PF08262.2; Description=Leucophaea maderae tachykinin-related
  Pfam annotation: Domain name=Lem_TRP; Domain location=139-148; Score =3.0; E_value=74; Accession=PF08262.2; Description=Leucophaea maderae tachykinin-related
  Pfam annotation: Domain name=Lem_TRP; Domain location=158-167; Score =3.0; E_value=74; Accession=PF08262.2; Description=Leucophaea maderae tachykinin-related
  Pfam annotation: Domain name=Lem_TRP; Domain location=177-186; Score =3.0; E_value=74; Accession=PF08262.2; Description=Leucophaea maderae tachykinin-related
  Pfam annotation: Domain name=Lem_TRP; Domain location=196-205; Score =3.0; E_value=74; Accession=PF08262.2; Description=Leucophaea maderae tachykinin-related
  Pfam annotation: Domain name=Lem_TRP; Domain location=215-224; Score =3.0; E_value=74; Accession=PF08262.2; Description=Leucophaea maderae tachykinin-related
  Pfam annotation: Domain name=Lem_TRP; Domain location=234-243; Score =3.0; E_value=74; Accession=PF08262.2; Description=Leucophaea maderae tachykinin-related
  Pfam module annotation: Pfam domain module=Lem_TRP::Lem_TRP::Lem _TRP::Lem_TRP::Lem_TRP::Lem_TRP::Lem_TRP; Domain location=120 -129::139-148::158-167::177-186::196-205::215-224::234-243
MAGSIREEPEAEHHLRVEKAHGSCRRFETGGVPKPTTGEIWASCWRDVVAIGGAAEPDGGTAVGAVESLLTLSCCLAVAEPEPGGRARRKSSGRGQGGVRALGSGEAEFRRLPGLSLSPSPGVGRSGVRRLPGLSPSPSPGVGRSGVRRLPGLSPSPSPGVGRSGVRRLPGLSPSPSPGVGRSGVRRLPGLSPSPSPGVGRSGVRRLPGLSPSPSPGVGRSGVRRLPGLSPSPSPGVGRSGVRRLPGLARVRALGSGGAEVAVAPLASLIACQTHSVEWHCRRSGASGPCLLSDWPVKRWNDGGHLGSAGGACQEEGAGPLLR

SEQ ID NO: 58391 - protein, 269 aa, Zea mays
  Coding DNA Sequence Number=SeqID_15016
MGTEHGVSGELQAATGVPVARRVGLGPRLACQKLEKRVHLARLHAACMAARPFCPLVWAEMGGRLAGSSRLPSPRMGDIRRLSASSLEERNSMGVAPGWGETDQAVVPPSASGAFVILAGAGAEASQGSTLTCGSANHLLFQLLVVAIVLPRCDGVVLQSCRGRRTVAVQLGCNIPSSPSHSGRGRQRRSTGALGGGPLFGFDGLFASLEWDREQKPSGDCVHLGPWLPLQRSLPRRPEVACILGDGTGVSFAMALRMPVSSFIVAVEA

SEQ ID NO: 58392 - protein, 254 aa, Zea mays
  Coding DNA Sequence Number=SeqID_15017
  Subcellular localization annotation: CTP_CleavageSite=34; ConfidenceScore=5.31e-01
MTLFPAVSPAVGPSGLPAAPAPGWKALGSLGHPTAQRRKDFLTSYGVEKAEATQTTLPSKSPSSGTASQTLAKALSGRDPTEDDPTIVYMAGYLHTLDNHYDDLFSHYTHLNSWVEGLEQQVKELKKEKASLQECLDIAEGEEANTREAYQTLKMDYDKKLKKLAPTKKIQKKTKNQGGQAERRKKAPPAPAPARIENLSDVEDMSLASLDDLLKEFGDTLEKEFGSTSENARVYRWLRIKPRLPPPGLEQGFP

SEQ ID NO: 58393 - protein, 61 aa, Zea mays
  Coding DNA Sequence Number=SeqID_15018
MTVCKDDKPRWKDETVILFDLRGSQRIFYSHTVLTQKSPLGTMWIVTHFELFEQRQVRRLR

SEQ ID NO: 58394 - protein, 172 aa, Zea mays
  Coding DNA Sequence Number=SeqID_15019
MTSLMRPEMCQSEKDTEKTPSSENDVKKIKKLIEITYPSRVGRLLGWPYRGHSATGRLPRSMVSKRVLKGLRWSSFLTGCSFRENKKMTMKLVGGATIEEKIPGAHQSERAHGTRATRLLGTSGQWVNKGTVYLRSARPQINHKAPSLGSGVAELERGPGRPKRSHLSGFLT

SEQ ID NO: 58395 - protein, 901 aa, Zea mays
  Coding DNA Sequence Number=SeqID_15020
  Gene Ontology: Mol. function=RNA binding; Cellular component=voltage -gated potassium channel complex; Biological process=potassium ion transport
  Homolog annotation: Hit_ID=Q94HK0; Match level="QueryCoverage=98%, HitCoverage=98%, E-value=0.0, Identity=70%"; Hit description =Putative pumilio/Mpt5 family RNA-binding protein
  Pfam annotation: Domain name=NABP; Domain location=214-532; Score =587.2; E_value=1.6e-173; Accession=PF07990.3; Description=Nucleic acid binding protein NABP
  Pfam annotation: Domain name=PUF; Domain location=533-567; Score =37.2; E_value=5.9e-08; Accession=PF00806.10; Description=Pumilio -family RNA binding repeat
  Pfam annotation: Domain name=PUF; Domain location=569-603; Score =37.5; E_value=4.7e-08; Accession=PF00806.10; Description=Pumilio -family RNA binding repeat
  Pfam annotation: Domain name=PUF; Domain location=605-639; Score =29.5; E_value=1.2e-05; Accession=PF00806.10; Description=Pumilio -family RNA binding repeat
  Pfam annotation: Domain name=PUF; Domain location=641-675; Score =32.5; E_value=1.5e-06; Accession=PF00806.10; Description=Pumilio -family RNA binding repeat
  Pfam annotation: Domain name=PUF; Domain location=677-711; Score =41.7; E_value=2.6e-09; Accession=PF00806.10; Description=Pumilio -family RNA binding repeat
  Pfam annotation: Domain name=PUF; Domain location=714-748; Score =39.4; E_value=1.3e-08; Accession=PF00806.10; Description=Pumilio -family RNA binding repeat
  Pfam annotation: Domain name=PUF; Domain location=750-784; Score =29.7; E_value=1e-05; Accession=PF00806.10; Description=Pumilio -family RNA binding repeat
  Pfam annotation: Domain name=PUF; Domain location=792-826; Score =40.4; E_value=6.6e-09; Accession=PF00806.10; Description=Pumilio -family RNA binding repeat
  Pfam module annotation: Pfam domain module=NABP::PUF::PUF::PUF::PUF::P UF::PUF::PUF::PUF; Domain location=214-532::533-567::569-603::605 -639::641-675::677-711::714-748::750-784::792-826
MAARGGEAAAFGAETDRGDFEVFRSGSAPPTVEGALGAAGADGGLLVDDDLRADPAYQSYYYSSAHLNPRLPPPLLSKEDWRSSHHRLRSAGFGGIGDGRRQQQQASAAEGTVGLPGIDLGRQRSFSTIFQEDSYQRDMDRHTASHNSNDLLGSSGIQYGLNRGSGTIGGLHSSNSLRSLDEIQNNDLPSNTFASILGSSLSRSASPDPELVRRAPSPSLPPIGVKVGNTDKKINGGSTSFRRSSSAIGESDDLVAALSGMNLSSRAMSGQTMDQSQLYQDVDNVQKFLFDRQGDQTTGNQQHYMRRPEQGQSKLPDGYSANLANSSTMRNQINAGSFTSFDSLSLGSGFASPRIGSRSPGGTVSSRQNLAGMSNMLNYNGIGSPTASPSLQTSIDPAYIQYLAQLAATCDDPLMDRGHLGNSYMDLLGTHKANIGPLLQSQKQYGYYGNLGFNLGYPGSPLASPVLPSSPIAPGSPLRHGERNMRFPSGMRNFGNSFGSWNSGMGGKMDANLMPSLLEEFKSNKSKSYELSEIAGHVVEFSADQYGSRFIQQKLETASTEEKDMVFSEIMPQALTLMTDVFGNYVVQKFFEHGSTAQIKELAGQLIGRVLALSLQMYGCRVIQKAIEVVDLELQTKMVAELEGHVMRCVRDQNGNHVIQKCIECIPQHAIEFIISTFYGQVVMLSTHPYGCRVIQRVLEHCDDPKTQQIMMDEILQSVCLLAQDQYGNYVVQHVLEHGKPHERSAIIEKLIGQIVQMSQQKFASNVIEKCLVFGNPVERQVLIGEMLGSTSESEPLEVMMKDQFGNYVVQKVLETCDDQQREMILTRIKTHLNTLKKYTYGKHIVARVEKLVAAGGIFIHLCLQDLTLSVYHVGLGTNNDVYVVVPTEKRLGLQPACTAA

SEQ ID NO: 58396 - protein, 125 aa, Zea mays
  Coding DNA Sequence Number=SeqID_15021
MNKAPALKVPLQTELRFHLRRYEQPHTIGGPAEQQKADGWLAASRSNNDDDDFCSEGPNSSSDDLRADAAAIGPSPTSSLERQGRAEGRRVGGANFREVASLQQQGGRIAGVPHPGARKEERRDA

SEQ ID NO: 58397 - protein, 244 aa, Zea mays
  Coding DNA Sequence Number=SeqID_15022
MEVQCQTSFCQNEDGFPKLLRACTVRLGIRSQPEYDGREFVEHGTEKCVVTVYIGSSPHHVEWSVTAAGHRFKDTCQVVARKALRALCQIYEEEVADTPLRFFPPFQRDRPAWMARMRALEGQQLLEDDPTVVYLTAYLLTLDAQYDFLARHHRQMIARAEDSEKRNRQLHVDLTTAQARVAALESREVIAVEALSHPALRNKARCISYMRQEDNIYNNRVYRDKCHNNQSIYYIAEDLLQNKR

SEQ ID NO: 58398 - protein, 175 aa, Zea mays
  Coding DNA Sequence Number=SeqID_15023
  Subcellular localization annotation: CTP_CleavageSite=25; ConfidenceScore=5.36e-01
VKRFTLSQIKRPSFGFNKGAKGQPKAPLVWRTGLSGVPPDMSGAPGGLRLKLATFGNFQRRLDYNSPDCPVYTGHVRCSKEGRPQELASLGFSPSPLRYNSPDCPVCTGLSGATSEQRLLRANGYLQRHLMRAARAGVRIAHAGTPDSKQYMSGVHRTPRRAHKSEAPTVRIQRQ

SEQ ID NO: 58399 - protein, 342 aa, Zea mays
  Coding DNA Sequence Number=SeqID_15024
  Gene Ontology: Mol. function=binding
  Homolog annotation: Hit_ID=A2ZEP4; Match level="QueryCoverage=29%, HitCoverage=30%, E-value=1e-23, Identity=55%"; Hit description =Putative uncharacterized protein
MVAAGACGFLQGLVAAEVEGAKRLAEWLGKGKMLGVFPRTFIVFVFLGDKESRFSWLLLTSDLEKQMRIYACSITIWPAISPVQSQWLCIRCHCPGPIAADRNEWPTVRRSTAKEAALQLCRMNPRCLEVHSDLNEMGLYGWLDLIMINGSDLLFSFPIGDLLLWKDYADVSAVQELQHALEGVLLPVVLGLTTTKESRLESSVQFSWKTLDDDQANLLLLPKNSQGGGERKVSEDGKKDAVGSLLSASGCLHYSVHGILVQIPAQVKYALTLQCTLARGRVPPPWGVMKNMHKEIPDVACKKFQVYRQGTSCRALIHSGRMLMASLRFRVPRSIRTMTKMK

SEQ ID NO: 58400 - protein, 90 aa, Zea mays
  Coding DNA Sequence Number=SeqID_15025
  Subcellular localization annotation: CTP_CleavageSite=34; ConfidenceScore=5.37e-01
MRGVPRYRCIGFENSPSQSSTAAPRRRGTGLLVLAEVKRRTTVGGGALFTRRFGFFVLRNWHASEDEAALLPWGGSTLLARRFAFFVLWD

SEQ ID NO: 58401 - protein, 93 aa, Zea mays
  Coding DNA Sequence Number=SeqID_15026
MARTLRWSPPLERLPGAEVVATASKPSVQRWSPPLASRSEQRWLPPLASRRCRDKITSGKLQDQQVGLMRTDLTGLAYTYALSSYKREKNSTP

SEQ ID NO: 58402 - protein, 352 aa, Zea mays
  Coding DNA Sequence Number=SeqID_15027
  Subcellular localization annotation: CTP_CleavageSite=14; ConfidenceScore=5.49e-01
MGLKTWPPPAPISRAPRAWVFFSRWALGRWAPRKPESFLLFPVTTSNARDARFLRSSLPTALNGIPSPSSRRTRGKPVSPVPPHLPWGVPFVGGAVFSVDLATRPRSLLAASSAIPPESPGGQATCGLGYKSCPGLDYRMSPIAFRPSPSSFHPQYVLRRVLARVRWVDPPLAGPGLWNSSPVSILRRAPWEGYLRPWDLEEPVTEDPGEQQVEVAEQELIEGKFSETTDQAKDGGKKSFEVPSAREKVKEAEEPKAKGEEEGLQSQGQDSAQSGCTGLSGGSPDSVRWCTGQCPVRQAGSSKLAALGNSPATYGYNSPDCPVCTGLSGEPMVGRANGRPRDLRGTRGRANG

SEQ ID NO: 58403 - protein, 77 aa, Zea mays
  Coding DNA Sequence Number=SeqID_15028
CNLADGEYVLVPEQGAAQEVAPDPAPEPAPEDLPATALEGKPRFFGGHGCWSDLASILPPGWTVEWDPASAEEEHEE

SEQ ID NO: 58404 - protein, 159 aa, Zea mays
  Coding DNA Sequence Number=SeqID_15029
MALHELYDDGGPQLSYGSRTTLRRTTDSHDITPAGCPDLSGCHIGMAFSEKVGRAGPRTGQALSWGRSLPSPAWTLVTPLLQAHLTWARDEHEGRGTSTSLTLGSGRLASPPSALAHALDPSGLGHAAHSLVGLGTPLSRNADTKEHPYRIEYALRDPD

SEQ ID NO: 58405 - protein, 220 aa, Zea mays
  Coding DNA Sequence Number=SeqID_15030
MAERYQLPRSCVPPTMRRKDGGYPPSGGLEGGKTRCIRESEDMVAFQGGHPPFKGDYPYLRPQPSRAESSPTRSKALPCGAGAGSHMSCKPAQSRRSQTAVRGGASGRRSRRRFAFAVITAPKKGPGKGDTPKRILPCEGTRLRATLLIRGSKAGPPEGFDSRLRSRGPYTHYWSEVRRSAPRKGSTAASGYSGSAPITDQGFEGWPPKGSQPPQTPSEG

SEQ ID NO: 58406 - protein, 192 aa, Zea mays
  Coding DNA Sequence Number=SeqID_15031
MTASKKAGPSEGFNGRLRALGLRAHYWSEGSDSGSAPEDDELRLARSQGSDSGSALEDDELCLARPQGSDSGSAPEDDDLCLARPQGSDSALASADGLRLARPRGSDSTSASEDRLDLDLGGASASPNPGLGPTTSQEAPSLPYPKLTQAMGNKTGVPSGSPRLQRSSDGHDTTQTGCQNLSGCHDSMYLGH

SEQ ID NO: 58407 - protein, 786 aa, Zea mays
  Coding DNA Sequence Number=SeqID_15032
  Gene Ontology: Mol. function=nucleoside-triphosphatase activity; Cellular component=endoplasmic reticulum; Biological process=cell division
  Homolog annotation: Hit_ID=Q6Z562; Match level="QueryCoverage=98%, HitCoverage=93%, E-value=0.0, Identity=73%"; Hit description =Putative cell division cycle protein
  Pfam annotation: Domain name=AAA; Domain location=240-424; Score =321.2; E_value=1.9e-93; Accession=PF00004.20; Description=ATPase family associated with various cellular activities (AAA)
  Pfam annotation: Domain name=AAA; Domain location=514-701; Score =324.3; E_value=2.2e-94; Accession=PF00004.20; Description=ATPase family associated with various cellular activities (AAA)
  Pfam annotation: Domain name=AAA_2; Domain location=510-643; Score= -31.2; E_value=0.0026; Accession=PF07724.5; Description=ATPase family associated with various
  Pfam annotation: Domain name=AAA_3; Domain location=240-365; Score= -18.2; E_value=0.033; Accession=PF07726.2; Description=ATPase family associated with various
  Pfam annotation: Domain name=AAA_5; Domain location=240-366; Score =9.9; E_value=0.00051; Accession=PF07728.5; Description=ATPase family associated with various
  Pfam annotation: Domain name=CDC48_N; Domain location=19-108; Score =59.5; E_value=1.1e-14; Accession=PF02359.9; Description=Cell division protein 48 (CDC48), N-t
  Pfam annotation: Domain name=Sigma54_activat; Domain location=206 -368; Score=-170.8; E_value=0.0051; Accession=PF00158.17; Description= Sigma-54 interaction domain
  Pfam module annotation: Pfam domain module=AAA::AAA::AAA_2::AAA _3::AAA_5::CDC48_N::Sigma54_activat; Domain location=240-424::514 -701::510-643::240-365::240-366::19-108::206-368
MDADGKKDFSTAILERKKAPNRLLADDGEGEVAIDNSMVALSPATAFQLEIFTGDLVLLRGKRRRETVCYAVFDASCPDGRVRLNRAVRGNIRVHLGDIVSINRIDEVPTGARVQITPFDDTVNGISGNLFDVYLKPYFGNDALRPLCKGDRFIVHGNMHAVEFKVVDAEPADRVVVRPETAIYCSDQPVKREEEERLDGPGYDDVGGVRKQLAQIRELVELPLRHPKLFQTLGVKPPKGILLYGPPGTGKTLLARAIASESGAHFVVVNGPEIMSMIAGQSEANLRKVFEDAEKFAPSVIFMDEIDAIAPNRDKTHGEVERRVVSQLLTLMDGLRPRAQVVVIGATNRPNSLDPALRRFGRFDRELDIGVPDEVGRLEILRIHTKDMPLAEDVDLERIGKDTHGFVGADLAALCSEAALQLIREKMDVIDVEEDTIDVDVLDSLCVCNEHLKHAMEVTKPSALRERGLVEVPKVSWDDIGGLQNVKLELQETVQYPVEHPEMFEMFGMSPSRGVLFYGPPGCGKTMLAKAIAKECKANFISVKGPELLTMWYGESESNVRDLFDKARSAAPCILFFDELDSIAVKRGNSVGDVGGTSDRVLNQLLTEMDGINAKKTVFVIGATNRPDIIDPAMLRPGRLDQLIYIPLPDEPSRLQIFKSCLRRSPVSRHVHLPALARITAGFSGADITEICQRACKLAVRDVIQWSLKVGKAEAMRGAEIGVWHLTEALKHARRSVSDLDVMKYDFFAQRLKGGGFEDETIIAAPMGTQPLTITEIEEEDDSSLY

SEQ ID NO: 58408 - protein, 68 aa, Zea mays
  Coding DNA Sequence Number=SeqID_15033
MSLISWSNSSSWSVGLVAFFSGSELLEEKEFPGLGPVAAVQQPLSLKLSSAPESEVFVLRTFGKREDP

SEQ ID NO: 58409 - protein, 431 aa, Zea mays
  Coding DNA Sequence Number=SeqID_15034
MEREGGKNRRETGVKGETRGLRGNDGPSYDVVGPSPGSGEAEAPPRSRLSLSSEVEVESEPLGRARRSSSSFGAEAESEPWGRARRSSSSSEAEAESEPWGRARRSSSSSEVEAESEPWGRARWSSSSSGAEAKSEPWGQARWSSSSSGAEAESEPWGRARRSSSSSGVEVESEPWGQARRSFLWCPRPDLAAVSLTLSSGTAVGAAQAALSSCQAGQWSGEAILALNATAIWSVGVAIWLRLLLGEGWASGEPKLCADGGYQLRLGALGGCLESRYWFRSRGGTVVAPVAVQFIARSNRPRVVGGGPWSVLEKTQPAMAEDANGEHSQSFRLVVGGTQLRGSWYLSAIVRLQEFSSGSPAASPRRWSPKTVTTSFWVGRSKPGCDLCPALSFKDLHHPCWGGERGEPGLYLPHGSAGHLFFQLLVVETIL

SEQ ID NO: 58410 - protein, 128 aa, Zea mays
  Coding DNA Sequence Number=SeqID_15035
MRGLVLALELLGCSGWLLGQEGEVPSCSDAGTDFLPTGCFDGGMLPLSGDDCYSRPEIHQSCVSCPPSPGPSFQSLWLYRSNAGRAPVASELALEVELGVAAIAPAALLLRSDQSLGLLEFALGTSAQ

SEQ ID NO: 58411 - protein, 249 aa, Zea mays
  Coding DNA Sequence Number=SeqID_15036
MPSWQPERFWHPVHEMSWPSEERWSLGNDGPSCDVVGPSPGSGEAEAPPRSRSSLSSEVEVESEPLGRARQSSSSSVAEAEFEPWGRARRSSSSSGAEAESDPWGRARRSSSSSGAEAESEPWGRARRSSSSSGAEAESEPWGRARQSSSSSGAESEPWGRARRSFLWRPRPDLAVVSLTLSSGTAVGAAQAILALNALAIWSVGVAIWPRLLLGEGWASGEPKLCADGGYQLRLGALGVPLIMVPDSG

SEQ ID NO: 58412 - protein, 80 aa, Zea mays
  Coding DNA Sequence Number=SeqID_15037
MFWNGGAIWGTLDVLFGVDEFEDEFFLRGVECNIPKKMLPKVDFRFHQVNEVLFEVGIVSEDDVVLYPQRCLLLIKGSGK

SEQ ID NO: 58413 - protein, 170 aa, Zea mays
  Coding DNA Sequence Number=SeqID_15038
MELRSSNEEAERRRIPPIRGLGRREDPTLKGGRRHGCLTKGAPLLLKATPPFVRPQAPRAESSPTRSKALPCDSGAGSRMSCKPAQGRRSQTAAHGTGKGGYPERDPSPRRNRAPSPPITDQGFEGWPPEGSTVASDRVGPTPTTGQGFEGQPPEGLHGRLRLLGLRAHY

SEQ ID NO: 58414 - protein, 295 aa, Zea mays
  Coding DNA Sequence Number=SeqID_15039
MRRVGGPPPRGSAAPFFPLRPGVKGVLEPHGDFLQPCQDMQGARGPGSPSPCLNGWFSSSAGGSPSAATPPPKLLLKLLRCLGSTKSRLFDYLNRFTKHELPRAKVTGEPTPKSVSRGLGSGWRPWKPVDRGPRGNRLSRLLGPDSRRSPWTAAPPEAGSGFAEDVVDAEGATAPFGVKTRACRIRSSCSVCFLRPPRPEEHALAALAKLRLFSSCFEHQDSVGNRDESLGSVSLGRLRVPRRFQDPLSEVVKKHERNPAKKRSFFEERFDAEGVSPLLAPEGGSGFAEARPTLP

SEQ ID NO: 58415 - protein, 266 aa, Zea mays
  Coding DNA Sequence Number=SeqID_15040
  Homolog annotation: Hit_ID=Q65XA8; Match level="QueryCoverage=100%, HitCoverage=100%, E-value=2e-40, Identity=45%"; Hit description =Putative uncharacterized protein OJ1654_B10.11-1
  Pfam annotation: Domain name=DUF1635; Domain location=36-266; Score =86.5; E_value=8.2e-23; Accession=PF07795.2; Description=Protein of unknown function (DUF1635)
MAMELPLFLGDGPDAALFSSLWSSFPDDLQPPPQQESVAELKQTLLATTLELEAAREELRRKEQSIAKLSDLVREVAKERDDARDQAQSLRLLAAQAAPPLVTSSVTDSDCSLASSPVDPFFDPVTSADNRRRCKFSPATPPAAPRQQQQRQPGAGLGSAADAALEMLAAKRPLPHRGRLLAAVMEAGPLLQNLLVAGQLPRWRNPPTVRAPDTLPLGASRAAGYADDAVTLAASGCTKRPMAAALPVLPAASCSPGFIAKRQRLH

SEQ ID NO: 58416 - protein, 183 aa, Zea mays
  Coding DNA Sequence Number=SeqID_15041
  Subcellular localization annotation: CTP_CleavageSite=24; ConfidenceScore=5.35e-01
MAGRSAPTLPPLNNRTPTLHPNPLAPASPPHPRVLLPRLVRPYRTINVPPRRPCPPHARHSHPRWLAPLLLPVPSPASALNVAGQPWSKARGFAGFTKRALVAAGAAVVSAILVNPPRRRQGTSMTLSLPLSLPRNFRPQPSRLARNGRHSPLGMALASQQPLLVQHHQQLPTTHSRSPLSLP

SEQ ID NO: 58417 - protein, 156 aa, Zea mays
  Coding DNA Sequence Number=SeqID_15042
  Homolog annotation: Hit_ID=A2XZP0; Match level="QueryCoverage=77%, HitCoverage=44%, E-value=8e-31, Identity=56%"; Hit description =Putative uncharacterized protein
MMQWDIENVPISMTRPCILDPTYQLTHARRRPLTESEVARQIRYVRGETDGSVNEGAWRTMQLNTHNLMQLRLTLACRLGASMDVTRTTLCVRAGRYAHLSPLLVDLPIGNDPIDIVILNHGTEGGTLSSESSDQIRLVDRGSADMIHKLHLSLPF

SEQ ID NO: 58418 - protein, 322 aa, Zea mays
  Coding DNA Sequence Number=SeqID_15043
  Gene Ontology: Mol. function=protein transporter activity; Cellular component=clathrin coat of trans-Golgi network vesicle; Biological process=intracellular protein transport
  Homolog annotation: Hit_ID=A2ZH90; Match level="QueryCoverage=61%, HitCoverage=27%, E-value=4e-62, Identity=85%"; Hit description =Putative uncharacterized protein
  Pfam annotation: Domain name=ATP-synt_ab; Domain location=72-262; Score=-87.6; E_value=0.059; Accession=PF00006.16; Description=ATP synthase alphabeta family, nucleotide-binding domain
  Pfam annotation: Domain name=Clathrin; Domain location=167-309; Score= 100.0; E_value=7.3e-27; Accession=PF00637.11; Description=Region in Clathrin and VPS
  Pfam module annotation: Pfam domain module=ATP-synt_ab::Clathrin; Domain location=72-262::167-309
  Subcellular localization annotation: CTP_CleavageSite=49; ConfidenceScore=5.38e-01
MFADKKNTSSDSSKPAFQFGGNNVIFGGKKDAPVDSSKPFQFGPNNGNRAVYRQGSSINPSERTYPEEMIQTGISTIDVMNSIARGQKIPLFSAAGLPHNEIAAQICRQASLVKTLEKEKHAEQFKSYEGLYFFLGSYLSSSEDPDIHFKYIEAAAKIGQIKEVEHVTRESNLYDAEKTKIDRLSDIEEFSNLVKYLLMVRQKARVTKVDGELIFAYAKIDRLSDIEEFILMPNVANLQNVGDRLYDEELYEAAKIIYAFISNWAKLVVTLVKLKQFQGDVDAARKANSAKTWKEFCFACVDAEEFRFAQICGLNIIIQVYK

SEQ ID NO: 58419 - protein, 141 aa, Zea mays
  Coding DNA Sequence Number=SeqID_15044
  Homolog annotation: Hit_ID=A2Z0E1; Match level="QueryCoverage=24%, HitCoverage=8%, E-value=5e-10, Identity=82%"; Hit description =Putative uncharacterized protein
MSARAISGHCKLKKCTQVIHPVKSKTFESSWVSCVAIDASESWLPFWIGRVDMFLLPSLNRACTSRFKNYALCGADIYRGSWQSMNQEITSYKVVTPYMQFKDLEKENEDDPDMLEMIASELKALSTQLVELEEKMKANTT

SEQ ID NO: 58420 - protein, 72 aa, Zea mays
  Coding DNA Sequence Number=SeqID_15045
MTSQAKAKSSYRYTTHPNQESSVLVMSCAFDDYYIEDCGVILAAEVMQRRIDNSDQFVILATVRVAFVMVCL

SEQ ID NO: 58421 - protein, 140 aa, Zea mays
  Coding DNA Sequence Number=SeqID_15046
  Subcellular localization annotation: CTP_CleavageSite=21; ConfidenceScore=5.48e-01
MALASFATTSFVILLLFSLPSCFHLRATPFSTESVGEGASFPYSSNTSPDTDSRSGYCTSTRMFHIMRAPSFSSSSNVPFVFPGLCPVLPPQPAAPAHGRSREPTDARRRGCGASRSCSWAFSVRVVKEDIVAPATLRLS

SEQ ID NO: 58422 - protein, 775 aa, Zea mays
  Coding DNA Sequence Number=SeqID_15047
  Gene Ontology: Mol. function=protein tyrosine/serine/threonine phosphatase activity; Cellular component=intracellular; Biological process=protein amino acid dephosphorylation
  Homolog annotation: Hit_ID=Q9ATY4; Match level="QueryCoverage=83%, HitCoverage=98%, E-value=0.0, Identity=90%"; Hit description=MAP kinase phosphatase
  Pfam annotation: Domain name=DSPc; Domain location=139-278; Score =127.5; E_value=3.8e-35; Accession=PF00782.11; Description=Dual specificity phosphatase, catalytic domain
  Subcellular localization annotation: CTP_CleavageSite=53; ConfidenceScore=5.09e-01
MATPDDGPAPAGGRKFWRSVSWSEAREPPPPAPPDVAGGQSRRGLPPPPLTPRSMSSKARSCLPPLQPLAITRRSLDEWPKAGSDDVGEWPNPTTPGASRAGGGGGGSSPAKPGEGLRLDLSSLRSQGRKDQIAFFDKECSKVADHVYLGGDAVAKNRDILRKNGITHVLNCVGFVCPEYFKSDLVYRTLWLQDSPTEDITSILYDVFDYFEDVREQGGRVLVHCCQGVSRSTSLVIAYLMWREGQSFDDAFQFVKAARGIANPNMGFACQLLQCQKRVHAIPLSPNSVLRMYRMAPHSQYAPLHLVPKMLNDPSPATLDSRGAFIVHVLSSLYVWVGMKCDPVMEKDAKAAAFQVVRYEKVQGHIKVVREGLEPQEFWDAFSSMPPNSDSNTKISKDQIDSASKSDPGSRKNESYDADFELVYKAITGGVVPAFSTSGAGDETHLPARESSWSLLRHKFISRSLARVYSDSALMKDFDPRVQHLAAEASTSPPFLSPSSLSSDSSVSSKYSSDSPSLSPTTGSPPSFGLSPASSNLTHALVPSSRSPLSQSSNEGASKPSGMESIHSPSKTSSIAERRGGFTLLKLPSLQKDLVLPPRVPSIVLPPRAPSSIRRTEDASDNSTNGVKQLTSEFCSEKCTGNSLSSHSETRLIERTDSNSEVCSNAQLVVYQWPSMGKLTTFARKDLDPKSVLIFVTSNAIRRGEAVKMVYVWVGGENESSKSVDSVDWQQVTSDFLHLKGLSNVLPVKVSADCEPPILSVLRSASELFATIEAV

SEQ ID NO: 58423 - protein, 350 aa, Zea mays
  Coding DNA Sequence Number=SeqID_15048
  Gene Ontology: Mol. function=nutrient reservoir activity; Cellular component=protein body; Biological process=protein oligomerization
  Homolog annotation: Hit_ID=Q6Y4Q3; Match level="QueryCoverage=98%, HitCoverage=95%, E-value=1e-134, Identity=71%"; Hit description =Legumin-like protein
  Pfam annotation: Domain name=Cupin_1; Domain location=183-332; Score =85.4; E_value=1.8e-22; Accession=PF00190.13; Description=Cupin
  Pfam annotation: Domain name=Cupin_1; Domain location=6-140; Score =69.1; E_value=1.5e-17; Accession=PF00190.13; Description=Cupin
  Pfam module annotation: Pfam domain module=Cupin_1::Cupin_1; Domain location=183-332::6-140
MAPVDLTPKQPRKAYGGDGGAYYEWSPADLPMLGVASIGAAKLSLAAGGLALPSYSDSAKVAYVLQGTGTCGIVLPEATKEKVVAVKEGDALALPFGVVTWWHNGPAAPTPLTVLFLGDTSKGHRPGQFTNFQADGRDRHLHGLLHRADAAALVSSQPASGIVRASSSPLPAPSPRDREGVALNCLEAPLDVDIPGGGRVVVLNTANLPLVKEVGLGADLVRIDAHSMCSPGFSCDSAYQVTYIVRGSGRVQVVGPDGVRVLETRVEGGFLFIVPRFHVVSKIADASGMEWFSIITTPNPIFSHLAGKTSVWKAISAEVLQASFNTTPEMEKLFRSKRLDSEIFFAPPSN

SEQ ID NO: 58424 - protein, 144 aa, Zea mays
  Coding DNA Sequence Number=SeqID_15049
  Gene Ontology: Mol. function=3'-phosphoadenosine 5'-phosphosulfate transmembrane transporter activity; Cellular component=integral to membrane; Biological process=positive regulation of I-kappaB kinase/NF-kappaB cascade
  Homolog annotation: Hit_ID=Q65XA4; Match level="QueryCoverage=81%, HitCoverage=32%, E-value=1e-51, Identity=86%"; Hit description =Putative uncharacterized protein OJ1654_B10.14
  Pfam annotation: Domain name=UAA; Domain location=28-144; Score= -108.8; E_value=5.8e-05; Accession=PF08449.2; Description=UAA transporter family
MADEAAPRLLPVAADRDKDDRRRWAARCGFAVLGIMSTLLVYGVLQEKIMRVPYGVEKEFFRYSLFLVFCNRITTSMVSAMVLLASKKSLDPVAPLHKYGVVSISNILTTTCQYEALKYVSFPVQTLAKCAKMIPVMVISASIL

SEQ ID NO: 58425 - protein, 119 aa, Zea mays
  Coding DNA Sequence Number=SeqID_15050
  Gene Ontology: Mol. function=aspartic-type endopeptidase activity; Cellular component=chromatin; Biological process=chromatin assembly or disassembly
MAEPTIADVLAELRALRTDVNTLQSDMAAMKDKSALASDNGGHGRRPEGQRDHDLYIQHRKWDFPRFDSSVDRCCSSTNVDFKLSLAPLSRHGLIFEPSGREITQYLDSTNVTFAAPAR

SEQ ID NO: 58426 - protein, 241 aa, Zea mays
  Coding DNA Sequence Number=SeqID_15051
MSDFKPCSSSFDDFSTVSSLSYGIMRIRETAGLRHHPYVISKIARVPILPKSGDKSKNAGQILEYYPSHHERHLNDLKMDKNQNLAYAPYIMALIKAKTRFKGPCEIVHTPFRPFKNEIGFLTRPLTPFPDDEEDPGYNAGATPDVEAEQMPPPPPPPQPQQYWQPGPGYFDPYFHNMQQGLETHIDTRFEGMMSHVDHRLDDMQSRFDSNWDALNSEFSEFRDHIHTNVTDPIMTWLNNM

SEQ ID NO: 58427 - protein, 49 aa, Zea mays
  Coding DNA Sequence Number=SeqID_15052
MGDVDSFLLKAALLGGAVVVSGTTSVLSRRAAASASEETIPWWGDGCGR

SEQ ID NO: 58428 - protein, 52 aa, Zea mays
  Coding DNA Sequence Number=SeqID_15053
MAVGALQKGCVGGGSALQRGRGAVVVRMEASTRARGTEKTFLKKKENTQTQQ

SEQ ID NO: 58429 - protein, 100 aa, Zea mays
  Coding DNA Sequence Number=SeqID_15054
MDKDRQGAAQKRQAVVRLHEARPKRQWEAAKAAAPGGGKPPLAAKLGVPASSKAPEAAAGAGGSKSAKAVPPSSSVAEVAKAARVLPSSWQARRRLRHRY

SEQ ID NO: 58430 - protein, 106 aa, Zea mays
  Coding DNA Sequence Number=SeqID_15055
MQESLAGPPSQQNPPEGLPRNPLQDRHHSKILPRASPGIPCRTAITAKSSRGPPYTDHSPTALAPFGNSKYYPKSPVVIKFSGLGLKLWKVQGLRCNIPKTQKTMQ

SEQ ID NO: 58431 - protein, 82 aa, Zea mays
  Coding DNA Sequence Number=SeqID_15056
MELPLDAQSSERCLNVDERVEQCRAVAGVLHVLARFVQVLQMQHLRATAAKASSEGWRLCLRPNICPPRDQFDKVTWCRRRR

SEQ ID NO: 58432 - protein, 190 aa, Zea mays
  Coding DNA Sequence Number=SeqID_15057
  Gene Ontology: Cellular component=integral to membrane
  Homolog annotation: Hit_ID=Q2QN95; Match level="QueryCoverage=35%, HitCoverage=11%, E-value=1e-17, Identity=73%"; Hit description=Amino acid transporter family protein, putative, expressed
  Subcellular localization annotation: CTP_CleavageSite=63; ConfidenceScore=5.39e-01
MAPRPAANHQATAEQGAKHLGRPSGAPSARAPRPPPAAPERPTGRRAEQSFNSVPDRVFLIQVAASKTKIYMVLELVNGGELLDRIIVLYLELYASCVEYITPLRDSMSSVFPSAHLAFASIDLNAHTVFAITTALAILQTVCLRNLSLLSYLSGSDTPMCVLPLHQEGRSAIVGGKQHFQNPNPEIAGH

SEQ ID NO: 58433 - protein, 73 aa, Zea mays
  Coding DNA Sequence Number=SeqID_15058
MESRRFWGLLQQQRMRPVNHASDLRGLRQGLWKPDRAFLLFIVHVKIIMLLEHGEPPGKTVLPQGFNGTPLAD

SEQ ID NO: 58434 - protein, 142 aa, Zea mays
  Coding DNA Sequence Number=SeqID_15059
MAHRAQGGDSAPGLDRDLHSGVVFAVVTSREIEGHQSTCNFSPSFALAAKSEQLVDSYNRLLISSEFVPNRSAFVWAPACRTMVFREATAAELGALPYGLGEDESWLSAVDQLMGARDYNPAYRFGGAIMVVDRLTDGWERS

SEQ ID NO: 58435 - protein, 249 aa, Zea mays
  Coding DNA Sequence Number=SeqID_15060
MKVIKGTTCLALEIPVTKVFPPCLDCSSNSRDNREDAYDTEITGMIPNPICPTTMVPHLWRSGNVDAPTNRLPQALPILPDQSSKLDPRRRWRHHADPAVVLLERVEEEGGHGRGGRRGAERGWRGPRSRLERTSCALGLMGEGDPGSVRAATDDARKKLRRIRLGVCVAWPPGPTHQRHKPTPGIGCPWAPQSVGGGASTRTPAVVSGGSGASNWAEPDAGVGQKEKGMGRPGEEMAHAQILGITHVT

SEQ ID NO: 58436 - protein, 78 aa, Zea mays
  Coding DNA Sequence Number=SeqID_15061
MDKERAWVGEEGTWVAEEREQGRGARGGGGHGAGSSVEDGAGRRLETGRTGGGETHTPTSAAPPPPPSTPTVGISPAI

SEQ ID NO: 58437 - protein, 220 aa, Zea mays
  Coding DNA Sequence Number=SeqID_15062
  Homolog annotation: Hit_ID=Q8LND4; Match level="QueryCoverage=40%, HitCoverage=98%, E-value=2e-08, Identity=42%"; Hit description =Putative uncharacterized protein OSJNBa0044A10.15
MGRITRGPLSWTRPHCEMTPSQAFVWCRIERRTSDCSEGLERRVASLPSPQQRGGGDAENPNVAGNHTLADEVQVDLHMLGALVLHGIGGEVDGADVVAVDEGDTLKGAVELVEKLMYPGGLGHAVGHNVVLGLCTGAGDDGMPFGGLGDEDALESGKMGLPWSVHMEADLLDGDVDGVLALLKEDTLGPVLGSDAEEMLEGPQVMMFAIAQVPKFKSYF

SEQ ID NO: 58438 - protein, 114 aa, Zea mays
  Coding DNA Sequence Number=SeqID_15063
MDGKHALQDNQILQARILTLEGSSSALGVDNTFGEGLLRESGLSWRLGRSPRGLGQPSSKGVSPTRGLGWSTPASVPLTDDPTRLRPTRFHFRVDSASVRADTATPGLGSSKSG

SEQ ID NO: 58439 - protein, 363 aa, Zea mays
  Coding DNA Sequence Number=SeqID_15064
  Gene Ontology: Mol. function=molecular_function; Cellular component =membrane; Biological process=auxin mediated signaling pathway
  Homolog annotation: Hit_ID=A2XZH2; Match level="QueryCoverage=94%, HitCoverage=88%, E-value=3e-83, Identity=47%"; Hit description =Putative uncharacterized protein
  Pfam annotation: Domain name=DUF6; Domain location=199-329; Score =32.4; E_value=1.6e-06; Accession=PF00892.11; Description=Integral membrane protein DUF6
  Pfam annotation: Domain name=DUF6; Domain location=20-155; Score =48.6; E_value=2.2e-11; Accession=PF00892.11; Description=Integral membrane protein DUF6
  Pfam annotation: Domain name=TPT; Domain location=190-329; Score= -15.9; E_value=0.0049; Accession=PF03151.7; Description=Triose -phosphate Transporter family
  Pfam module annotation: Pfam domain module=DUF6::DUF6::TPT; Domain location=199-329::20-155::190-329
MAAGALEAKKPYLIALAVQIIGTGMFVISKAAFDDGMSTFVFIFYRMALASLILVPTAIVQQRKNLRPIMSDPRLLLKLFFLALIGNTFSLNTYNLTLKLTSATVGSALANSVPVFTFCLVLLLRMEAANLRTVAGVAKAAGVALCVAGVLVLALYAGPAMSPVNHHRAFAAAAPPRASTSSSRMTWITGTLLMVLANVTWALWIVLQSALLKEYPNRMLVTATQCVFSMLQSFVVAVVAERGDLSKWRLRCDITLVAVLYVGFVVTGLSHYLQAWCMELKGPVFLAMTNPLCFVFTIFSSSFFLGEIVHLGSVLGGALLVAGLYSVHWGKLKEEDMASDQEKTNKQEEEAAAAGASSALQQP

SEQ ID NO: 58440 - protein, 310 aa, Zea mays
  Coding DNA Sequence Number=SeqID_15065
MSEQMLSMFQTIQDRQDTLQQQLLADRAEHRAFMTHILQHTGVLIPLVQFAPPPALQVAVVPAIQSGPQLHSFGPIISPLRPVSLDLSTQVVGPISTQPPVPLVSAVATPVVAVSVSVLAPADPAPDPASELAPALASTADTRSETDFDTLLVFALLPRPRPGYRSEIKSPTLRGYNGDPNRFTQLRISNHTTYVALNPCICQPFPQILHNVNRSALPGSTVLLHPASSQEGTRYSHHLPRPVRGCLFTYGIAGFKLTLSHFQGMWLVKIVLDQQAYIRIQSLINLGGASPVPSPSLELSSSILRIVCIP

SEQ ID NO: 58441 - protein, 79 aa, Zea mays
  Coding DNA Sequence Number=SeqID_15066
MEEGTLGAGAEVFLGPFTELEVMMAPPVDVAGLRPRLGDVEAPSKPRSSLSSVAEVESEPLGRARQSSSSSGAEPESEP

SEQ ID NO: 58442 - protein, 344 aa, Zea mays
  Coding DNA Sequence Number=SeqID_15067
  Homolog annotation: Hit_ID=Q6JAD6; Match level="QueryCoverage=71%, HitCoverage=33%, E-value=3e-60, Identity=53%"; Hit description =Putative uncharacterized protein
MSLTQLKGKCTAQPSQDNHDHMVKKLETGSTVACTKSLEENVKDLRIAKRKEQKKKTNTSAKSLNRASMQNIQVCLLARLRDSSPAWFFSLETYPATHVAIAATADQEEQGGQLRIASNQIAFRVRRLSSRARSTPARFDPSVLVTTTLASSTMPAPAALEPSTTPTVPPASTTPASTAPAPSSAPPIPPPRFRDRNETEVCPLAVDPCLLVLQRATATRVRQFRHVPVESWLPTKRDPAVAPLFHTRTQESFYRAQLTTQIAPRIHRCLDLSSFRSIAGAESEGHITYLPGLYSLLSFGGWYVEEWIRVFYAIVWIDPDHQWMRFRFEHEDVTLQTAQIRKLF

SEQ ID NO: 58443 - protein, 440 aa, Zea mays
  Coding DNA Sequence Number=SeqID_15068
  Homolog annotation: Hit_ID=Q6QP51; Match level="QueryCoverage=45%, HitCoverage=89%, E-value=8e-28, Identity=44%"; Hit description =Putative growth-regulating factor 1
MKILEAERWMKGANPCEVALLRQQQDKGSAGGSPHSRPQASRAKSSPTCSRVLPLRHGGWVPHVMQADPKRKKPNCRTRSIMEAQAHTSCNRRAGYYVQGTALPLAPMSRLLDCGTGAATRGNPAHGPTVPIEHNNHGLAPRKGSTAAPEHSGFKLITDQGFEGWPFKRVRQPPQSTRAPRPLLIRGSKAGPSEGFDSRPRARRARDDSGYIYYMAEARAALPSSGQGFVYPRGAISPRPSPASGGNCSPGGSYVSPEGLLRQWAHPRHARGPTRAGFVEKQPWPNRLSNRPYRRRIQCEDRMTPYPDTCASVGMVEPQAQQETPPRPTLGLGLGRRSPPRPTLGLGLNPGLGREYKLVGRGKGSQILGLIEASANIHVESKTVNCSSSFSEALGTSIYSIKEGYQERWACPIWERREPRPRFRARSRARACPMEELSES

SEQ ID NO: 58444 - protein, 125 aa, Zea mays
  Coding DNA Sequence Number=SeqID_15069
  Subcellular localization annotation: CTP_CleavageSite=48; ConfidenceScore=5.17e-01
MQAACNCTKGTHPFDFDASSMGPRPTRHVTGAPVTTCEKLHRHLRQYRAFSTAEPVPRLEATLRMAPQCQPSTSVTGSGKGDTPKGILLREGSGPRALLLIRGSKAGPSEGFDSRLRPLGLRAHY

SEQ ID NO: 58445 - protein, 307 aa, Zea mays
  Coding DNA Sequence Number=SeqID_15070
  Homolog annotation: Hit_ID=Q5JJU6; Match level="QueryCoverage=95%, HitCoverage=23%, E-value=1e-75, Identity=55%"; Hit description =Putative uncharacterized protein P0458E05.36
MGSTNWKKACPTPVEMVNQKKCRLHKLDKSIQDTKNIEERSLEQHAMNKLVERAYRKLKGGRIGSSHKAGVSKSANKAAKQLALAFAKRTLVRCHKFDETGKSCFSEPSLWSVLSAPLPSSDARFTEGVERLKHQKLDRTPFDQGGAKWKKGDRERDHSRDASAKGSGLKSGRHSSGGSGRSGGGERKNKTKPKQKLAQLSTSGNVLGRVVEPFSSPAAQAQEPPEPASEKKTQHPSRNVAPRLTVDAGLPALPGLDDILDVPGGLDGQGNDISSWFTDGLDDSLQDIDLSGALEIPDDDLTQLGFI

SEQ ID NO: 58446 - protein, 295 aa, Zea mays
  Coding DNA Sequence Number=SeqID_15071
  Subcellular localization annotation: CTP_CleavageSite=21; ConfidenceScore=5.10e-01
MGWPSTLPGRTDTVGSHQGTTARHAGSSHPATPLSSTVPLPEQRQQHKRFLHHEIEPIELSFSSVQLILLTVFSAPSSPLVTGRAADASVCSPTKQDAAGARGEAMANLKDASVCVAMGIAHILKPLLDFPDGVRPRAQPRPRSRRRFAHHLAPALIPHMHHPHWPRRRPCWRPPVRQGAVLAVLALALIALMFLTGDELPWAPATAPSVATAAPAPAPAPTTAASRPSCTGWLTFIGHLKPRRRRGHPPQDPAWLPRPRSERSKTVNVSQSLPRPMQGRREEGRGSTAGQAEAD

SEQ ID NO: 58447 - protein, 141 aa, Zea mays
  Coding DNA Sequence Number=SeqID_15072
  Homolog annotation: Hit_ID=Q69K57; Match level="QueryCoverage=52%, HitCoverage=13%, E-value=3e-29, Identity=85%"; Hit description=Smr domain-containing protein-like
  Pfam annotation: Domain name=Smr; Domain location=74-138; Score=-1.9; E_value=0.036; Accession=PF01713.12; Description=Smr domain
MEPGGGTAVGAVESLLTSSCFRKGAESRRRHRVCGAPSLPIWRSEPDGTPVLSPVARVSSGNLVSSQRGCDRLIDLYGLHVNEAIHILKGELTALKSTARAAGKRMQVMVCVGTGHHTRGSRTARLPIAMEQFLLDEGSPG

SEQ ID NO: 58448 - protein, 258 aa, Zea mays
  Coding DNA Sequence Number=SeqID_15073
MGVTVAETFAQEPPAQRLAETSRHSKLPSPSLVPTPAGAPTPTSTPAHALARDQPAGASDGWHAEAANLARQIQPTARRRRSPWGRQIQPSAHPVREHTAQAHLQPRAAAIAVAARRRRHRASLADAHLAAGPLPEWADAATVGWTRDKAASTRPTPSPLDVRATRQLAPAAARQRDGEGGELAAARDARGRSRGRPRRRATHGDLGGRARPDPPEGDEDAPPPPSPQAAGPSGGQLRQRRGRERPTKGRRRLLGIMG

SEQ ID NO: 58449 - protein, 96 aa, Zea mays
  Coding DNA Sequence Number=SeqID_15074
MTGGPSSLEVRLSVDRRGVGLEVGHASPLQDVDGVLWLVVEETLRPALGGDAEKVVKRPLILHHELPLKGVDCRRVIGSQGSGPLAAIVDEGGIGK

SEQ ID NO: 58450 - protein, 93 aa, Zea mays
  Coding DNA Sequence Number=SeqID_15075
  Subcellular localization annotation: CTP_CleavageSite=40; ConfidenceScore=5.35e-01
AESEPWGRAKRSSSSSGAEHKSEPWVGRSGVRRLPGLSPSSSPRSGGAEFAVFRGLAQGLSPSPSPGSGEAELPMAPEAGPDCLSASLCQVAP

SEQ ID NO: 58451 - protein, 99 aa, Zea mays
  Coding DNA Sequence Number=SeqID_15076
MAAVGALQRGSGAVVVCMEVRHACGEHGLFQASRGFNNNDFMIFQGSYTGLSCGEIHMELTVSLLCIFCSGNHLTVVPSQEIILCIQGEQAKGYFLRPT

SEQ ID NO: 58452 - protein, 145 aa, Zea mays
  Coding DNA Sequence Number=SeqID_15077
MARDSSSLLFLQHPNHVPHLADSNIAHTHSSKALPHVCSVTIYHTILFDRPYLMVVDSTHGTFINVSDGSRCSTLDMCAPAPTLLASDHRSAPPNTAKLMFFRVTGYLQIDVGSMDEHSTKSDEEYEGLAMHDVMATGPMMSSKM

SEQ ID NO: 58453 - protein, 164 aa, Zea mays
  Coding DNA Sequence Number=SeqID_15078
MTGDKQRQKLKQTPSSKVSNTYIKKVDKKAATPYLIKKKKNGKVIAIKVNKQANKGKGAKRIWVPKEIISTMKSTKKEVSGPKVVGKFGDLASWDVYHGIHHIGSSLIAKWSHYKENEVPKERQQSSTTKSLRTLISLKFAIEFQSVSFETTSSIIYMSSPIFD

SEQ ID NO: 58454 - protein, 234 aa, Zea mays
  Coding DNA Sequence Number=SeqID_15079
MGSSSLRAEWESRLVGGYEIDGFGYDYGAASPLQPNRILAEYVDVYSPLLYTPNPPQVVSIATTAQAKMKLWKETSRSSKITTSSRCGLAATPSRLPVKAALSTFLFRTLIYWLVKRATLTNGASRGAGRDASEGVEATRGAGRGMSGGIRAARGASNDAKRGVWGACGGEVGSGVAHRLRWDAVEEMTAHVQGLCRVDGKERHLEEKATDHIGGRVKDVFGPTVLGRGVGAQV

SEQ ID NO: 58455 - protein, 233 aa, Zea mays
  Coding DNA Sequence Number=SeqID_15080
  Gene Ontology: Mol. function=transferase activity
  Homolog annotation: Hit_ID=Q6QP44; Match level="QueryCoverage=25%, HitCoverage=7%, E-value=3e-16, Identity=72%"; Hit description =Putative aminoalcoholphosphotransferase
MVLVSLPGALPPGAPDRGNYQVFSSDLGNYQVLTFLLAPLEQLVVGSFAAAMDKSPRSIPIGSGPARADTRKDVVEAVDGIRRTGIVDTSNIDYGTSRLRPRHRLCRTHDSAQRYNRVWDGLLDAIRQMQLSADELRKLSRRNHVPEYLDMLHKNCLVNAMSDVTEIAKGLDTMSRDLEEVLIGPQPLLEDYEALGMYDDFKSDVHCDCTEQCGSEEDNSSFDSNEIPDRRMK

SEQ ID NO: 58456 - protein, 179 aa, Zea mays
  Coding DNA Sequence Number=SeqID_15081
MAWARGRLGSVAADRVVVTRRPGSRDGGIPCKAALRCEPWRLEPGARRWRSLMAAGPGLPRGWNLEDDEWRFGEGDGRRACAVCGAADCGNQTGRCIPKYHYTHGYLLIPRIPPTGLLQWFEVLKGKCALGPFLSILVIECKHKCLNVNLCPWMNKVQIKSKGMFLGLSTLVLYTNILV

SEQ ID NO: 58457 - protein, 24 aa, Zea mays
  Coding DNA Sequence Number=SeqID_15082
MAGGIKLARAKERWLAGEENTDDL

SEQ ID NO: 58458 - protein, 200 aa, Zea mays
  Coding DNA Sequence Number=SeqID_15083
MCMTHRAVGDSVAGAAQSEASQPARVKASWCRRMQRDAWQTQRKELAVEGWEERVLAAEGWGESLSGKIHRTVRCITGLFSETIEQRSTVRLRAQSAVPEVRRQSATTGHTGLSGVPPDCLVPQEDRRLQRSTAPNPNSRLMWHSPGSEQYSVRCTTGVSGVPIDSKGWNSGWGYKYPQPPPFKPFSSIPTSSFNTRAKE

SEQ ID NO: 58459 - protein, 529 aa, Zea mays
  Coding DNA Sequence Number=SeqID_15084
  Gene Ontology: Mol. function=binding
  Homolog annotation: Hit_ID=Q94D97; Match level="QueryCoverage=98%, HitCoverage=96%, E-value=0.0, Identity=68%"; Hit description=Nodulin- like protein
  Pfam annotation: Domain name=MFS_1; Domain location=106-466; Score= -19.2; E_value=0.081; Accession=PF07690.7; Description=Major Facilitator Superfamily
  Pfam annotation: Domain name=Nodulin-like; Domain location=8-261; Score=367.5; E_value=2.1e-107; Accession=PF06813.4; Description =Nodulin-like
  Pfam module annotation: Pfam domain module=MFS_1::Nodulin-like; Domain location=106-466::8-261
MPSPSSAHWLSLVGSIWLQTINGPNADFPVYSSQLKDLKHITQVQLNFLAFASDAGKLFGWFSGVAALHLPLWLVALVGASFGLVGYGVQYLFLDSAALRYWHLFLLTSLAGNGICWINTVCYLLCIRNFGSSRSRVAVSLAASYLGLSAKVYTSLADSIPGHQATSKAKTYLLLNAVVPMLVTVAVAPSLRAVDLTVTGEGQAGASTDAAFLVMFAITLATGACAVVGSIGSSTSGGGLSSREHVVSLAVLLATPVLIPLALRVRESLDRIRETKRENRIYDLGTDDDGVVVDVAATAESKDGDGGVTEKPQEEVDGLRLLRKLDFWLYFFSYMFSGTLGLVFLNNLGQIAESRRLGQTSTLVSLSSSFGFFGRLLPSFLDYYSAKSGYSISRTGSMASLMAPMSGAFLLLLNRSHFILYLSTAVIGTCTGAITSVAVSATSELFGAKNFGVNHNVVVSNIPVGSLCFGYSAAYLYQRGARGGGHHCVGAACYRETFVVWGATCAVGTLLCAVLYARSRREATGTGGG

SEQ ID NO: 58460 - protein, 419 aa, Zea mays
  Coding DNA Sequence Number=SeqID_15085
  Pfam annotation: Domain name=Transposase_28; Domain location=26-179; Score=-52.6; E_value=0.0097; Accession=PF04195.3; Description =Putative gypsy type transposon
MPSSSSSAADTPPASESSEETLSNVAAEELRPGDTVEFRASRMSSVRVHDMQQLGYFGGGVARVPGAEEVPEPEGELVVFEAFFAAGLRLPVHRFVGEVLHRFEVQVHQLTPNAVVALAKIDRKLRRSAGRSSGSLRPGRRGRGGGGAKATVPGGSQPSLAAKAAAPGYGKLPESAKAADAGGTKSAPEGAAEVRELPSPGKRLADFGTDICVDDYLVGSGEGQLVAVSPAVAATASAAVFGVKGGAFSAGGEVSAATAVKDEAGNVSRRLREASLQLNQLVEERKEANQAITKAQTAQAEAKLARAEESLASHRAEEWEARFNALQARVERAEASTRVEVERTRKQLMDSYRELGARTADFEVPDREAGLRFLEWLQEELQALPTIVAGFMSYASLITCEGAMNALSHEGCSHYEVFD

SEQ ID NO: 58461 - protein, 150 aa, Zea mays
  Coding DNA Sequence Number=SeqID_15086
MARAEEVEDFGRLNSALPEAEADPVMAEAEVYPAPLPETGEGSHTAPASTLSGGGSPAATVPMAEDPPKAATEPAAEDPVAAAGSSQTEESSDEGLDYFAALDVVEAEASPRVTDAEILHGSNVGRRRRRAVAKRRVSELDGGRLRVGRA

SEQ ID NO: 58462 - protein, 131 aa, Zea mays
  Coding DNA Sequence Number=SeqID_15087
MARTGISRVDDVEVAKSAGSTRSADHEQSREDASQKPYSPSPGAGSRRRRVPETCSPDRRCTSAVVFTAETVKLNFRLELQATPTHNFDNGLCLELQVLCEWVSLEVMTSTWLPVVPFSGGAYTSYSKVSS

SEQ ID NO: 58463 - protein, 151 aa, Zea mays
  Coding DNA Sequence Number=SeqID_15088
MALGKEGNLGTGKAIFAECCCQGTRQSDWQRGPLEDSLPSASPLGTETGGGARWTRLCRVPWQQTLGKGSVTVTWRRDGDFSLPSVKWHSSNSLSSARQKVLGKEAVADVQSFLRSGADARSTFHIKSINTLPHHADQRRIKLLHTQVINA

SEQ ID NO: 58464 - protein, 164 aa, Zea mays
  Coding DNA Sequence Number=SeqID_15089
  Homolog annotation: Hit_ID=Q6QP51; Match level="QueryCoverage=70%, HitCoverage=67%, E-value=7e-16, Identity=40%"; Hit description =Putative growth-regulating factor 1
  Subcellular localization annotation: CTP_CleavageSite=44; ConfidenceScore=5.11e-01
MEARAHMSCNRHNGYYVQGNRTATRANAASTRLQNQCRDSRQPCAGSKAGPSEGFDSRPRARRVRDDPGYVRYMAEARATLPSAPLGHYPTLIEWGSGVHSDHPLATHWKHHVRCPPRARPREKASASPDPMPRPSPSLGRSLRLARPGPRTDYATGETSLPYR

SEQ ID NO: 58465 - protein, 112 aa, Zea mays
  Coding DNA Sequence Number=SeqID_15090
MPADPIDGAQRRIAHDNHGGAPTFTLLNTNPTAIAGFGGPRGRSGAGKLGPLGRDLKRTAVCPWSLVERPHATVTDANAVMGWVKEIWAQPYCGFNQSSNEENSRLESNTTE

SEQ ID NO: 58466 - protein, 28 aa, Zea mays
  Coding DNA Sequence Number=SeqID_15091
MARRWPGATVADLRGCTEDGGYEMGHLC

SEQ ID NO: 58467 - protein, 71 aa, Zea mays
  Coding DNA Sequence Number=SeqID_15092
MGNCGTKPKTSDGDDAPPPVEAQVAAGAAEGERKDDEEVAAPEGTSQALVAPQTEVRKNDLSFSEPFRPFL

SEQ ID NO: 58468 - protein, 186 aa, Zea mays
  Coding DNA Sequence Number=SeqID_15093
  Subcellular localization annotation: CTP_CleavageSite=47; ConfidenceScore=5.30e-01
MDPEIVDSLMPPSAAPSSSNLTPTSHNFELMRPVARGLALKPLNPIAAAAKGTVPNRACYGLLRPLLLPRTSHSSPLPAPSCRRSVRGTGRRQCPAPMAKARDETEREPQAPPPAMMAKQGEEEKEAAPERKPAGERSMAYQIFAGLYVCAYVFCWRTGELIFLNAQDALDRLRRHVRDKLFNRKR

SEQ ID NO: 58469 - protein, 315 aa, Zea mays
  Coding DNA Sequence Number=SeqID_15094
MHRVLPPSEPLDGERSRRFCLAVVGGTQLCGSWYLSAIARLQGFSSGSPAASPRRWSPKTVTTSLMVGRSKSGCDLYPALSFKDLHHPGWGGGRTESELYLPCGFVGHLLPQHSGERALTGLAGGSDFDNAGLVGGERRQLQHVGLTGSTGSGSALGAPSRRESGCRAARTKGPPKTSHAARAAFVFLGCPAFAPVRRLCAEMASVVGAEVVAAEEVLVADGITATIRAPGLRLFGFDSLSSPLEWGRGRGARRSSVRPEVIAAAVWPLRAEVVVAAAGAGVGEPPGVLSPRRPSNVGVVRTCGSGTRVPFVMAP

SEQ ID NO: 58470 - protein, 110 aa, Zea mays
  Coding DNA Sequence Number=SeqID_15095
  Gene Ontology: Mol. function=phosphoric ester hydrolase activity; Cellular component=cytoplasm; Biological process=carbohydrate metabolic process
  Homolog annotation: Hit_ID=A7J2C3; Match level="QueryCoverage=100%, HitCoverage=40%, E-value=6e-50, Identity=75%"; Hit description =Fructose-1,6-bisphosphatase 2
  Pfam annotation: Domain name=FBPase; Domain location=13-110; Score= -164.8; E_value=0.0026; Accession=PF00316.11; Description=Fructose-1 -6-bisphosphatase
MDHAAEAQRTDLMTITRHVLNEQSRHPESRGDFTILLSHIVLGCKFVAAAVNKAGLAKLIGLAGETNCVLVSEENEEAIFVDPALRGKYCVCFDPLDGSSNIDCGVSIGT

SEQ ID NO: 58471 - protein, 43 aa, Zea mays
  Coding DNA Sequence Number=SeqID_15096
MAHRTVRCAHRCATGRTLPWTSLAPPGRGCTGQSGAHRTVRCP

SEQ ID NO: 58472 - protein, 128 aa, Zea mays
  Coding DNA Sequence Number=SeqID_15097
MSLQTRPVTQRRPRGARYNGPDHTWALEQDEAVLRGDVTAGLRLVLNEAKGVPARFVFDRLATAAKGVERRVASLPSPQQNCNLADGEYVLIPEQGPVQEEDQEQASEAAFEDLPAAPAIEGKPRFYA

SEQ ID NO: 58473 - protein, 98 aa, Zea mays
  Coding DNA Sequence Number=SeqID_15098
MAGSRDSSDISPSNIIEPTWETLPADEQLQFEEHKERMIQEAKARFLANFKVDRNNKVVRHRATDPASLQPTSDIPNPVQKKRQEEVKFTFNVDSIGH

SEQ ID NO: 58474 - protein, 67 aa, Zea mays
  Coding DNA Sequence Number=SeqID_15099
MSSSTTRMEKGQEHDRLAPYRVDERRLARGCDRGWGQQPLRESVSRLVSNDYREEAHAPMPSVENGA

SEQ ID NO: 58475 - protein, 512 aa, Zea mays
  Coding DNA Sequence Number=SeqID_15100
MNKDPQEAAQKRRAVIRLPEARPKRARGTAKATAPGGSQPTLAAKTAAPGSSKVPESEKAAGAGGTKSAPDEAAKVWELPSPGKRVADFGTNISVDDYLVGSGEGQLVVVPPAVATTVSTAVPGVKGSALSAGGEISAVTAVKDEAGTVSRRLREASQQLSQAADFADRVASGALTADVSAEVERLRAQHADAVRKKSAADSKCRKLAEKVAALEGERMDLWRQLVEERKEANQAIAKAQAAQVESKLAWVEGSLASQRAEEWEVRFNALQARMERAEASTRSEVERTRKQLVDSYRELGARTADFEVPDREAGLRFLEWLQEELLALPIIVEGFMSFASLVTCEGAMNALSREGCSHYEVFDRSDEDFGREIFKVEDPVVKDSAGALFDRMWGPYGREVVRERSDRARDQMARAEDVEDFGPLNSAQPEAEANSVVAEAEVDPAPPPETGEGSLAAPAAIVSGGGSSPATVPMVEDPPKAATELAAEDPPKAATELAAEDPMSAAGSSQVA

SEQ ID NO: 58476 - protein, 50 aa, Zea mays
  Coding DNA Sequence Number=SeqID_15101
MLDEAARWDDLVTCLRPAARGTKARLAKASSEGWRLRLRPNICPPRDQFD

SEQ ID NO: 58477 - protein, 653 aa, Zea mays
  Coding DNA Sequence Number=SeqID_15102
  Gene Ontology: Mol. function=oxidoreductase activity, acting on single donors with incorporation of molecular oxygen, incorporation of two atoms of oxygen; Cellular component=chloroplast; Biological process=fatty acid biosynthetic process
  Homolog annotation: Hit_ID=A1XCI2; Match level="QueryCoverage=93%, HitCoverage=66%, E-value=0.0, Identity=97%"; Hit description =Lipoxygenase
  Pfam annotation: Domain name=Lipoxygenase; Domain location=11-637; Score=902.3; E_value=2.3e-268; Accession=PF00305.10; Description =Lipoxygenase
MAEGVAVAVAVAVARRFRIEPTRSRATLTDANVSSSALADDRAESRVEYPEPIYVSRDEEFEEGKNEMLSEGALKALLHNFMPLLVSSVSPDFRDFAGFHDVDNLFKEGLRLKQALQDQLFQKIPFVRKVQENSEGLLRYDTPDIIKRDKFAWLRDDEFARQALAGINPVNIERLQAFPPMSKLDPAVYGPPESAITEEHIIGRLDGMSVQQALEDNRLYMLDYHDIFLPFLDRINAQDGRKAYGTRTLFFLTGAGTLKPIAIELRLPPMTDGCARAKRVLTPPADATSNWLWQLAKAHVCSNDAGVHQLINHWLRTHACMEPFIIAAHRQMSAMHPIFKLLKPHMRYTLKINALARQILINGDGVIESGFTPGRYCMEMSSFAYRELWRLDQEGLPADLIRRGMAVEDPTKPHGLRLLIEDYPYATDGLLLWSAITRWCGAYVATYYPSDESVQADTELQSWYTEAVQTGHADKRGAPWWPRLTTPGDLASLLTTLLWLTSAQHAALNFGQYPLGGYIPNRPPLMRRLVPAEGDPEHAHLVADPHRFFLSALPGLTQATTFMTVIDTLSTHSADEQYLGERPDEAWTADPAALAAEREFADEVRRAEEEIGRRNTDAGRRNRCGAGVLPYELMAPTSGPGITCRGVPNSVTI

SEQ ID NO: 58478 - protein, 294 aa, Zea mays
  Coding DNA Sequence Number=SeqID_15103
  Gene Ontology: Mol. function=oxidoreductase activity, acting on single donors with incorporation of molecular oxygen, incorporation of two atoms of oxygen; Cellular component=cytoplasm; Biological process=fatty acid biosynthetic process
  Homolog annotation: Hit_ID=A1XCI2; Match level="QueryCoverage=85%, HitCoverage=26%, E-value=3e-87, Identity=67%"; Hit description =Lipoxygenase
  Pfam annotation: Domain name=PLAT; Domain location=110-211; Score =73.7; E_value=6.1e-19; Accession=PF01477.14; Description=PLATLH2 domain
  Subcellular localization annotation: CTP_CleavageSite=65; ConfidenceScore=5.43e-01
MELLGRSFAPGHAAAAPRRGGGPCFAAVGREGSGAHRRRSSSSSSLRSTAPVDALAERVVAPPERAEAVPPEPSVAARAVVTVRRSRKRDAKCRVAERLDACADWVGRSVLLELISTETDPRKGGPKKSRRSALVGWFGEKDVKAERVVYTADFNVDGSFGEPGAVAVLNRHQREFFVESIVVEGFPSGPAHFTCYSWVQPTRVHRDPRVFFTNKPYLPAQTPPGLRELRRLELSDLRGEGAGTGGERRTTDRVWEYDVYNDLGNPDMGAEFARPILGGRPAAAVPAPDADGPA

SEQ ID NO: 58479 - protein, 175 aa, Zea mays
  Coding DNA Sequence Number=SeqID_15104
  Gene Ontology: Mol. function=protein binding; Cellular component =signalosome; Biological process=red or far red light signaling pathway
  Homolog annotation: Hit_ID=A9PEE7; Match level="QueryCoverage=56%, HitCoverage=37%, E-value=1e-39, Identity=80%"; Hit description =Putative uncharacterized protein
  Pfam annotation: Domain name=PCI; Domain location=1-106; Score=38.4; E_value=2.6e-08; Accession=PF01399.18; Description=PCI domain
MEIKMQDLSKKEKELQAKEAELNKRESLGNSGSLPALLPDQVRKLKQLSVLTLVESTKILPYDQLMQELDVSNVRELEDFLINECMYSGIVRGKLDQLRRCFEVQFAAGRDLTPDQLNNMIEILSDWFMGGIDESALDRLSLVTDMTKHIRVRASGGRSTASELGQGMVKETGAF

SEQ ID NO: 58480 - protein, 81 aa, Zea mays
  Coding DNA Sequence Number=SeqID_15105
MAGIAKTQRSLGAPNCPVVHRTVSVGAILRLETCHYAEALWMIASALLLRGSAEGVSSYRIFGDEAYPKHSSPFVVLDHFS

SEQ ID NO: 58481 - protein, 114 aa, Zea mays
  Coding DNA Sequence Number=SeqID_15106
MARSVRAQGRARRRLLLRPRSGSGEDAIPPEAEVEAEPWGRARRRPPSKVEAEAEPWGRARRSPPSEAEVEAEPWDRARRRFLLHLRLNLAVANLTLAGGTAVGAGRATLFSCQ

SEQ ID NO: 58482 - protein, 140 aa, Zea mays
  Coding DNA Sequence Number=SeqID_15107
MVVETISVTPRQLPTRSSLIPNLHCSQGQRIHLMQMCGCEWWNPNSHYSMELAQKSPKSDTDEKKRDRFRRGLSTKLRDRLNTVRANNYNELVNMAISQEDCIIARQAEKKRKTPVAGPSAQPQRFRIVSDTQNRGPQQQ

SEQ ID NO: 58483 - protein, 294 aa, Zea mays
  Coding DNA Sequence Number=SeqID_15108
  Subcellular localization annotation: CTP_CleavageSite=4; ConfidenceScore=5.34e-01
MSSRSLMHRVFPPSKPPDGGCPPPFRLIVGGTQLHGSWYLSAIVRLQGFSSASPVVPPRRRSPKTVTTSSWVGRSKPGCDLGLTLSFKDVHHPRWGGGRAEPALYLPRGFVGHPLLRRSRERALTGPAGGPDFDNAGLADGGRRHPQRVRLVGLAPSGPSCRRVAVAPWAREGRPRCRTLLGRRSCSGVALPLHRYGASTRRPAEAAREVPIADGITATIRAFGPPAPYSPVDYLNRFTKHESPLVKVTSESGDPQTASPSEARSDLAEGVVDAEGATAPFQRQDPSLQDQSVL

SEQ ID NO: 58484 - protein, 80 aa, Zea mays
  Coding DNA Sequence Number=SeqID_15109
  Subcellular localization annotation: CTP_CleavageSite=23; ConfidenceScore=5.23e-01
MASPFFHLRQQGSAPMAPSPSSMAMALPASPIAQQQARLWYCAREGDPSMAASKLVLKIHELRIDGLDVMSFTRSLTEFV

SEQ ID NO: 58485 - protein, 368 aa, Zea mays
  Coding DNA Sequence Number=SeqID_15110
  Homolog annotation: Hit_ID=Q6QP51; Match level="QueryCoverage=17%, HitCoverage=30%, E-value=3e-26, Identity=87%"; Hit description =Putative growth-regulating factor 1
LWGWIRGYLLSSSLLRHEDVLSVNKITVYRNAMNIIRGIDYGGEAYQRQKSSGGVVSDVREVTTVTSVCGSTSEVVGATLATNTGGGGRRRLLFRPNHDGIVQLRLTRSTCAGGFLNSGEHDCAIPVMRVLGSSLSKLHGLTRKLSEGLDQTEEDGKGAGHGGCSRASLAGRGEAARAKGRLGKIRRGTEEATGKAAEHWGGLYSRGAGVVTGGRGRVGVRARACTERAPGCQLASNTWKLASAMVQRRSGEIYSKLRPNSPPNSNSKGKRHLWQAKQASFHLRHDDRVKKAAPKHSSSKPTTDQGFEGWPLGRVRQPPKSARAPRPLLIRGSMAGPSEGFDSRPRARRVRDDSGYVFYMAEARATLP

SEQ ID NO: 58486 - protein, 380 aa, Zea mays
  Coding DNA Sequence Number=SeqID_15111
  Subcellular localization annotation: CTP_CleavageSite=51; ConfidenceScore=5.57e-01
MSSRFLMHRVFPPSKPPDGGYPPSFRLVVGGTQLRGSWYLSAIVRLQGFSSCSPVTPLRRRSPKMVTSSPWMGRGKPGCDLGLALSLKDVRHPCWGGERGEPGLYLPRGPAGHLFFQLLVVATILQLCGGDVLQPCRGRRTVAAQLGCNIPPSSSLSWRGRERGPAGALWSGPLFGFNSWFTSLEREHEQEPSGGRVRPGTMAAAAEVAGGSPGARRPAGSPESLGSVSLVVRGFPCLVKGTPRPLLDEPRLGVAVSARTEAELAQKEDLVGRSLDGSSVSGTDAGIKLPRPRAGLMSLEASWPRPRGDRPSLLLGPDSRRRPWRRWPGLGDDIVLQSRDPWTVSPSEARSGLAEGVVDAEGAAALFSRQDPSLQDRIIL

SEQ ID NO: 58487 - protein, 135 aa, Zea mays
  Coding DNA Sequence Number=SeqID_15112
  Subcellular localization annotation: CTP_CleavageSite=80; ConfidenceScore=5.59e-01
MTIVVLSPLQKQGDVSRIPAASIVVLLQGSGTSSTATLSHTQGSSTSPTAMLASFENKSPTLAPTSGELIRPPSASCDLRHVAEESFSAGAALQPLDVNQETLREARSQKKEGYKSNALGGGVDQEIRNLEAIHQ

SEQ ID NO: 58488 - protein, 139 aa, Zea mays
  Coding DNA Sequence Number=SeqID_15113
MAERYQLPRSCVPPTTRRKDGGYPPSGGLEGGKTRCIRKREDMGPGKGDTPKRILPREGTRLRASLLIRGSKAGPSEGFNSRLRACGLHTHYWSEVRRPAPRKGSTAASGYSGSAPTTDQGFEGWPPKGSQPPQTQSEG

SEQ ID NO: 58489 - protein, 108 aa, Zea mays
  Coding DNA Sequence Number=SeqID_15114
  Gene Ontology: Mol. function=kinase activity
  Homolog annotation: Hit_ID=Q6QP54; Match level="QueryCoverage=82%, HitCoverage=31%, E-value=5e-28, Identity=69%"; Hit description =Putative kinase
MGRREAEREGGKGLRAAVVTEYARRHHCLSGGAIQMGRRSCSPWPESARGRVMMAPPVDVAGLRPRLGDVEAPPKPRSSLSSVAEVESVFRGRGRVRAPGSGEAETVG

SEQ ID NO: 58490 - protein, 137 aa, Zea mays
  Coding DNA Sequence Number=SeqID_15115
MAEKARTGSRRRWNRSYTVSSDGLAFTSASDKPPSILFAFIFVPIPGSSSRIRALDHWWAERSVGTAMVFDLSGVQTLEIIMLIGTWRTTRENSATTRVESDALGQVISKARERLPYPQGASGEASLQEYRVVLGSN

SEQ ID NO: 58491 - protein, 160 aa, Zea mays
  Coding DNA Sequence Number=SeqID_15116
MCRSANLLPICGCSGFKRLELIGVTYIGGISYESERSQISRPLPNDLVVPVHLEVGQELCLCFLDQLLFVLLELELFVSRQGLPSRLYDIAGETSELSLEPAIEGRFDGSLCVFLSGVAKKCVGAFLGANHYVRTARRCSLYRRGRSAARGQTVRDLGQG

SEQ ID NO: 58492 - protein, 67 aa, Zea mays
  Coding DNA Sequence Number=SeqID_15117
MLRHAWPKLRDTPIALQRSTDEEKDEEEEVQHHEEEEVQAHEEEEEEEVAGIDAEADDDTTEAPVVR

SEQ ID NO: 58493 - protein, 73 aa, Zea mays
  Coding DNA Sequence Number=SeqID_15118
EEQNVVDWGDLELSPLAAPSGAKAAKPHAAAKPSHRPAAKPHRRARRPQQRHPCPADAPHASPDAPIDLGSIK

SEQ ID NO: 58494 - protein, 120 aa, Zea mays
  Coding DNA Sequence Number=SeqID_15119
MDPTCHWLMWTHMTVSPTVAKWFVPDARGTMDSVYSQESAESGGTGLSGGAPDSVLWCTGQCPVRQAGSSEVAALGNSPATNGYNSSDCPVYTGLSGEPTVGRANGRPRDLRGTRGRANG

SEQ ID NO: 58495 - protein, 85 aa, Zea mays
  Coding DNA Sequence Number=SeqID_15120
MGSSSLRVERESWLVGGYEIDGSGYDYGAASPLQPNRILAEYVDVYSPLLYTPNPPIPRLSALQPLLTRDESWNETFRVLDYDEF

SEQ ID NO: 58496 - protein, 34 aa, Zea mays
  Coding DNA Sequence Number=SeqID_15121
MGVLYLLLTPMGVLLLLLTPMGRKTYPCCFSRQS

SEQ ID NO: 58497 - protein, 155 aa, Zea mays
  Coding DNA Sequence Number=SeqID_15122
MGKNNKRKREPTHPSEDFGDSEYSEEEFSSESEGSPAPIPLRESSDDSNDSQGLAVEVWTYIQAVERSGLEGSDESEYSSDEEDSSEGGGGDGDDDDDDGGGGGNDDDGGDDGDDGGSGGNKDGDGGSSRGSNRGGSGRGSNRGGSGRGSNRASG

SEQ ID NO: 58498 - protein, 868 aa, Zea mays
  Coding DNA Sequence Number=SeqID_15123
  Gene Ontology: Mol. function=nucleic acid binding; Cellular component= ribonucleoprotein complex; Biological process=mRNA processing
  Homolog annotation: Hit_ID=Q8LJR0; Match level="QueryCoverage=47%, HitCoverage=84%, E-value=0.0, Identity=87%"; Hit description=Water -stress protein
  Pfam annotation: Domain name=Extensin_2; Domain location=417-799; Score=-133.0; E_value=0.043; Accession=PF04554.4; Description =Extensin-like region
  Pfam annotation: Domain name=RRM_1; Domain location=114-187; Score =38.4; E_value=2.5e-08; Accession=PF00076.13; Description=RNA recognition motif. (a.k.a. RRM, RBD,
  Pfam annotation: Domain name=RRM_1; Domain location=17-85; Score =13.2; E_value=0.0089; Accession=PF00076.13; Description=RNA recognition motif. (a.k.a. RRM, RBD,
  Pfam module annotation: Pfam domain module=Extensin_2::RRM_1::RRM_1; Domain location=417-799::114-187::17-85
VRGKQCGVAASHDNDTLFVGNICKTWTKEHLKDKLKSYGVESFDDLLLVEDTNNPGMNRGYALLEFSTRPEAMDAFRILQKRDVVFGVDRSAKVSFADSYPQVDDEIMAQVRTVFLDGLPPSWDEDRVKKYLKKYGAIEKLELARNMPAAKRKDFGFVTFDTHDNAVACAEGISNSEIGEGDHKAKVRARLSRPLQRPPRMKHGLRGNFRVGHGAPRGGRLQYARAPPPRRPPPRLVRPAGSRLPPIRSHPLKRPIYIRDRRPAMPMLDRARRLPPSGRSYDRRPPAPVYLKKSPRREYGRRDELPPPRSRAMIDYSPRVPVDRRPSLRDDYLPRGSGYSDLGPHSAPHLSDRRAYADDSYGGKFDRPLPVYREGRGHDYDTVSGSKRPYADMDDAPRYQEIGVRQSKARLDYDIGGSSARYGDTYNERPGRPHAGYSSSRSIPGHDSAYGSSRNGMSYGGSASSADAGGMYPPSYSGSYGSRGSDVGGSSYSSLYSGRNLGSSSGGYYGDVTTTVHPPSPLGRYRGQIPFRPPKPKHYYQEEDASDYLKSSVHGPRGAAHPVIRRPSPPLPTHRSRPAAEKEDGRPPRNFTSRRTPRAPRAGCRARCPPRAAVGAAVVHRRPACAHRHLLPPKGNASVITHGTIHAVLHHRFTIPARPTTTMASPSPARASGRRVPPPCWTTDETLALARAYTARRLAVGREHLTSADWAAVAAAAPSKTARQCRHKVEKLRRRLRSNRRRPCPLLDAIDLLDVPSPPFFSKSQSRSTSRSSSPPPPAAAISSPSPPSPPASPPRKRRRDDAGDEDGVSDVVGALRAIGEGFLRAEERRMEAARETQRMRMEMALRHLDAQRRLMDALVGRIVDALD

SEQ ID NO: 58499 - protein, 162 aa, Zea mays
  Coding DNA Sequence Number=SeqID_15124
MDECTFSEFVELGIEKCVVTVYIGSKKRNRKLHVDLTTAQARATALESHEVIAVEALKQAKDEHVQKLMEAYLAMDKQEHLESSQDSPPELFEPLTMKKIPAPSLEVKEEATSTPPAPSPFEELQEPVSLEEEFNPVLPSQSPPEEVINLSSLLTHPEDVSN

SEQ ID NO: 58500 - protein, 184 aa, Zea mays
  Coding DNA Sequence Number=SeqID_15125
  Subcellular localization annotation: CTP_CleavageSite=39; ConfidenceScore=5.01e-01
MPPKSKRGGAAAARKAPGTRSRMGRAQAAAAEAPVVEAPAAAVEAPVVEAPAAAAEVPAVEAPAEEAPKVAEELKQQPSPLLPQQPVVEEKGSDGAANSVNRGEEDKGERLEFEDEPEYEEEAAVDYDEKDLEQYEEQYEDGDEEVEYTEDVVEVETDIVGEELDEGGVDAVGEGYENDDEEHH

SEQ ID NO: 58501 - protein, 405 aa, Zea mays
  Coding DNA Sequence Number=SeqID_15126
  Gene Ontology: Mol. function=sequence-specific DNA binding; Cellular component=nucleus; Biological process=regulation of transcription, DNA-dependent
  Homolog annotation: Hit_ID=A9PFA9; Match level="QueryCoverage=68%, HitCoverage=52%, E-value=3e-55, Identity=41%"; Hit description =Putative uncharacterized protein
MGDVDPSYRSSSGSAVSYSESCAPYGAADASEMTGSAQSHAWESLVPSRKRSCVTRPKPSPVEKLAKELNYIMHEEKLYYLSESSEEDLLYHSETPIGSFEIGSGSVLLRHPNSKSLEEESKTSSIPADNKSYITSESYSDSASFVVHSGNKAAINLNLPTARPKKSPLHMEDNARRDKLHYENQHVLESVDSPLVSVDLEDVINYTNFMKYLTKEDRRQLLKFLPPVDSLTPPESLRSMFSCIQFSDAIDSYQMLLREGILDPSLCGDEEWKKVKTLALTNLTKCSWLECYKQKKTWPNPLCSRGNLRARPYNMGRLAHGPLLALRETKPSNPRGLGHPVPEVCDGLRLGSSERRGALGPSHGRRQRPGWQSLLTEPSVCGTLMWKSSSEGNVFVFAPTDPNPN

SEQ ID NO: 58502 - protein, 242 aa, Zea mays
  Coding DNA Sequence Number=SeqID_15127
  Subcellular localization annotation: CTP_CleavageSite=35; ConfidenceScore=5.33e-01
MSSPSLMHRVFPPSKPPDGGPAAPLHRWSPKMVTSSLMVGESEPGCSLCPSLSLKDFHHQGWGGDCTVPGSRTRVASEPLAAPASATAAGRGSSAGEIAKAGHRPTSNSTAFCPSLPHEFGHGRGPPGSSTRPEVSAAAVRLPGEEVVVVAAAGAGDGAPFVGLLLLHRPTPIEWGYSPVDYPNRFTKHESPRVKVTSESGDPRTASPSEARSDVAEGVVDAEGATAPFQRQDPSLQDQSVL

SEQ ID NO: 58503 - protein, 108 aa, Zea mays
  Coding DNA Sequence Number=SeqID_15128
MSSSTARTDKGQEHDRLAPYASASVGRLVAATVGEGSRLGRKNKAKAGKTNGTSDDGENDGAHDVKHPRGRTIATARVGVEAGVGRIRGGGACSYALCREWGGAEVEP

SEQ ID NO: 58504 - protein, 95 aa, Zea mays
  Coding DNA Sequence Number=SeqID_15129
  Subcellular localization annotation: CTP_CleavageSite=37; ConfidenceScore=5.56e-01
MAGSAASLPAGSAAPPPGSAAPAPPPAPPVVMRLMVLVMVLVSGILSVWKGYIGLITWVNVKTWLSTSCQHCNHCSGEDEAVEGDFQEFQDYDEF

SEQ ID NO: 58505 - protein, 127 aa, Zea mays
  Coding DNA Sequence Number=SeqID_15130
MALSPLLLAERRRRGVCKKVESAPDRPLALCRGSGAALANPAPAKPLTASTYQPENLGPDRAPGNDQTSQSIVQGIKTSEESNHSSEASGATPGGRQSRSDRSHIAAPLTDLTEGQRRLCRTDCSAT

SEQ ID NO: 58506 - protein, 327 aa, Zea mays
  Coding DNA Sequence Number=SeqID_15131
  Gene Ontology: Mol. function=protein binding; Cellular component =mitochondrion; Biological process=response to stress
  Homolog annotation: Hit_ID=Q9XI00; Match level="QueryCoverage=90%, HitCoverage=98%, E-value=5e-92, Identity=52%"; Hit description=F-box protein 7
MVPVEKTLKPWPPITNRPINCPLCNGPADISVDIRPDINSFDHFLSMRYIATDRPWLKLYGIRVQPVPPFSSLSYKPDPALIHHCLPDELMLEFHVLMFSSIQFYVVKRSGMEANYMMVRSLYDSSWRRMWLQRPRIRIDGLYVSRNTYIHTGVTEWQFKKTVNVVCYYRYLRFFPSGKFLYKISPDKVKDAVKCMHFRASKADCVFKGDYVLSEDGQIEMALLYPGHRYTLVRMHLRLRGTTVGANNRLDVLKILTTGVNATELQNWKGSILELVEGWEEDETHDPDVPAVSHSRGLSPFVFVPFEEADTSVLNLPVEKMDYYVPG

SEQ ID NO: 58507 - protein, 60 aa, Zea mays
  Coding DNA Sequence Number=SeqID_15132
MSGQGSSNDLVILDQRHCGTGGYEIDGSGYGAGCQHCNHCSGEDEAVEGDFQEFQDYDEF

SEQ ID NO: 58508 - protein, 156 aa, Zea mays
  Coding DNA Sequence Number=SeqID_15133
MRAFSPGPGSNRGAAGSRKEEDQGSKIRDSLDPSSQVLTLARALCGSARGSEGDQERRAPKSLAAFSSKDVVDIARSGELSKAVTGAELSKVTTRTAPLYTTDMTTSRRRCSGPGTLRPSLWRGCSTRGVTPGFRRQTECEPCTCQDQLFTYTAVT

SEQ ID NO: 58509 - protein, 234 aa, Zea mays
  Coding DNA Sequence Number=SeqID_15134
MARVACTLCGKRLDGGVSVLSVGMNLIWSYEPRWRVDICKGNRVQCIGGWESTKADSVIMHASCLKTILIKFPPYGDMPPRTRKTARKSTGPIGLPRHQLAPRHEGSNSDSNDPIRDREAQVEQLRMELRHRNRVWVEDGQCMNELRADVRHLQDELAERDLAIDWAVNSRSIAWDQEAKARAPVAELSAAIDNLQVYCNTLHEEVHVLYSRLHADVPANPVAMGAKPSGTTGE

SEQ ID NO: 58510 - protein, 54 aa, Zea mays
  Coding DNA Sequence Number=SeqID_15135
MAMMGSTSEKMYLCQNKTTRTGSGEMARVACTLRGKRLDVGVSVLSVGVNLIWS

SEQ ID NO: 58511 - protein, 102 aa, Zea mays
  Coding DNA Sequence Number=SeqID_15136
MSLTASTRRERLDLVSVIAVIVDRQIQDRINPIKACSRFTSENEEEVEVEEARATPPPPEEPPAGNCFYFDICGAEPDSPITQGKPRCICHLLSILKSFSLA

SEQ ID NO: 58512 - protein, 175 aa, Zea mays
  Coding DNA Sequence Number=SeqID_15137
MGVTEGRLDDLNCLLSTCDCSVIVGKNKKSRGSSHHSGDKRKREPSPPSEDFGDSEYSEEEFSSESGGSPVYASPPVSSDDSDDSQGIAAEGSDESEVSSNEENYSGSSEEESGTDGDDEGDNGDGGDGSDDSDDDGKGVEGDGGKGDGGNGDKGDGNAKGSGDSSKARGKAPLD

SEQ ID NO: 58513 - protein, 109 aa, Zea mays
  Coding DNA Sequence Number=SeqID_15138
MAGAGDSTQTKKARGDRGLEGSLGSTARDLYRRSPVTNRRNRENGRERREDSAGKFTSGGAGTRARLGLTVAEHDRGRRPSSTGDEFGCRGSGDREAPASLKIGRAQLE

SEQ ID NO: 58514 - protein, 66 aa, Zea mays
  Coding DNA Sequence Number=SeqID_15139
MAQAHPDDPRPPRTRARLVSSDIIVAGMSGAAQSRLEPLNRLGTQSLLPTNDLMAQILGYRFASVH

SEQ ID NO: 58515 - protein, 730 aa, Zea mays
  Coding DNA Sequence Number=SeqID_15140
  Gene Ontology: Mol. function=oxidoreductase activity; Cellular component=integral to membrane; Biological process=electron transport
  Homolog annotation: Hit_ID=A2WLG1; Match level="QueryCoverage=68%, HitCoverage=98%, E-value=0.0, Identity=76%"; Hit description =Putative uncharacterized protein
  Pfam annotation: Domain name=p450; Domain location=130-596; Score =123.7; E_value=5.5e-34; Accession=PF00067.13; Description=Cytochrome P450
MERVEEVEEAAEAMERVEEVEEGGDPAEAMERRRRPKRGSLSDRLRHEPSYKFLSFNSGPRSCIGKDVSLSNMKITAASTIHNFKVELLQESGAMEMVPWLLGFLGRYPELMVSLACFLLLFRRLNQRDGLPTNWPVVGALPAITVNAGRMHEWVTEFLRAAGLSYVMKGPWGSPVDVIMTADPANVAHVFTSNFGNYPKGQEFAALFDVLGDGIFNADGESWAFQRRKAHALLSDARFRAGVAASTARKLRDALVPLLDGIAASGAVVDLQDVFVRLTFDLTAMFVFGIDPGCLAPDFPYVPFAAAMDTVEEVLFYRHVAPVPWLMLQKYLRTGHSKKMWNARRVLDASIAEFISLRRERAAEAEAEADLLTSYLACHDEIGKSGAELERFLRDTTLNLMVAGRDTTSSALTWFFWLLTKHPDVEAKVLEELRAHPPLSGAGGHRTAAELKQLVYLHAALSESLRLYPPVPFEHKAAARTDTLPSGARVGPSRRVIVSFYSMGRMEAVWGKDCSEFRPERWLTAAGRFRHEPSYKFVAFNVGPRTCLGRDLAYSQMKAVVAAVLPRFRVEVDAGAVVRPKLSIILHMKDGLKREHPRLSRGPARAGFAVKQPWPDRLTNRPLRRRIQCRGCLTQYPDTRDSVDQAEAKLTTSHDQPPSSASGAAGSSASPDLRLRPRKEVSASLDPRSREESRPRPTPGLGLRRSPRLARPWARTDRANRGYIIYPIRS

SEQ ID NO: 58516 - protein, 101 aa, Zea mays
  Coding DNA Sequence Number=SeqID_15141
  Subcellular localization annotation: CTP_CleavageSite=73; ConfidenceScore=5.41e-01
MRSRAPPLWSLQLRLGAGATAINTHNHIRVTTAHALCTPMVATAPHSVARSSTSRNASTRDASSLPGMAPHLVADLARKGSTTIRWPWLNRTSGISHQKGS

SEQ ID NO: 58517 - protein, 258 aa, Zea mays
  Coding DNA Sequence Number=SeqID_15142
  Subcellular localization annotation: CTP_CleavageSite=35; ConfidenceScore=5.56e-01
MARARAYKTLPDFGCTLPRTLKPHRSPARRRLLVRSVSAAAQSLCHRRPASRAIPNSVQPSEKTVHTSVKLPERGIGVCFAGEASPRSPELSTPPEYVDRVNHSTILRFPVHTVATLPREAHRALGLNQFAVVWPVYSPPTRTPACVRGPGDSGHPRRQAVPRRDCQSLPEPTPPFAGPPSPPDNLEKPYKNNPKTIQIHYVILKENLSLKDCNLADREYILVPEQGAAQEVAPDPAPEPAPEDLPATALEGKPRFYA

SEQ ID NO: 58518 - protein, 113 aa, Zea mays
  Coding DNA Sequence Number=SeqID_15143
MQGGDTTRSDAEAATGRMRGAKGSQQTNKKTKKGFKQREQKTTKDFWEPLRYNSPDCPVCQRSNGYFAPTVVCREQLMRYNVDPRAIELAMRIAERVFLKMKEDEAKNSIEEQ

SEQ ID NO: 58519 - protein, 280 aa, Zea mays
  Coding DNA Sequence Number=SeqID_15144
  Gene Ontology: Mol. function=kinase activity
  Homolog annotation: Hit_ID=Q6QP54; Match level="QueryCoverage=29%, HitCoverage=29%, E-value=5e-28, Identity=77%"; Hit description =Putative kinase
MAGERTGRARMLFFHHAGKAASIPPPAGGSSAAIVAVARRWKEYHAVAAVEGHELKAPETEHRPGLERLLETAHLELDGKLLVNTQRAPTWRANCRRFETGGSLSRRVSAACPSPDGSSAWASAKGGSEVAGDGRERGGNPAAFVFVPRPGRRIQVYNGGVAECYVSSGGRASALGTCQCGSRRDLGTLLLRAAVVTGLAGRHHCLSGGASRMGHRSCSLWPESARGRVMMALPVDVAGLCPRSGDVEAPPKPGSSLSSMAKAGPELLGRAKRSSSSSGA

SEQ ID NO: 58520 - protein, 259 aa, Zea mays
  Coding DNA Sequence Number=SeqID_15145
MAARRAGRAVLSSLARSLGLRKPKGQAGSGAKNRHRALSGGYKDQGEDGSNVPPGPDAGFKNAKRNGRSSNGSRTRNGGPANYSPRRINSATGQAALSGRSNGRRFAFARNKRAKKGVRRLAPKGFTVASDAERGMTKESHRREASSPRTPSLGDRVRQITRSSPETPCSVPIEGNMALSPLLLAERRRRGVCKKAESVPDRPLALCGGSGAALANPAPAEPLTASTYQPENLGPDRAPGLRPVRMREPPDRPKHYARH

SEQ ID NO: 58521 - protein, 295 aa, Zea mays
  Coding DNA Sequence Number=SeqID_15146
  Pfam annotation: Domain name=DUF26; Domain location=196-247; Score =42.3; E_value=1.7e-09; Accession=PF01657.8; Description=Domain of unknown function DUF26
SEGREIHAANPTPSPSARRGRQIHDGATPELALLLFALAFALLPSRADLSTGLRTVGLRGRTLSEGGGHDPSVAWGGASPAGSTDSGRRREDWDLALLLFAYVEVGCGDGPTGGQWAATAGLLHLPARRREDSSTSRRVKILEQPPDVTLLDGYFFGDAEAEQHVPVQPGVRQPRNDASSPSLFATCTVGAIPDMVYALALCRGDAAANACAAAAFQDAQQLCAYAKDVAIYYDLCYLRFSNWDFNSWPATVLAGGRRPAAASRGAGFFAAGGTLANSRLKDFIIYISFLSNNVL

SEQ ID NO: 58522 - protein, 395 aa, Zea mays
  Coding DNA Sequence Number=SeqID_15147
  Gene Ontology: Mol. function=protein serine/threonine kinase activity; Cellular component=cytoplasm; Biological process=protein amino acid phosphorylation
  Homolog annotation: Hit_ID=Q6TAR9; Match level="QueryCoverage=88%, HitCoverage=62%, E-value=0.0, Identity=89%"; Hit description=Mitogen activated protein kinase 6
  Pfam annotation: Domain name=Pkinase; Domain location=2-155; Score= -101.9; E_value=0.017; Accession=PF00069.16; Description=Protein kinase domain
MSVGKGLHRPMKKAQWLASRTRRIPRTSKADTIWDQVMVTLMTRLWYTPAIDIWSIGCIFAELLTGKPLFPGKNVVHQLDIITDLMGTPSPEAISRIRNEKARRYLSNMRRKKPIPFTQKFPNADPLALGLLERMLAFEPKDRPSAEEALAHPYFKNIANVDREPSAQAVTKLEFEFERRRVTKDDIRELIYREILEYHPKMLKEFIEGTESSGFMYPSAVDNFKKQFAYLEEHYAKGSTGTPPERQHNSLPRPSVVYSDNQSQSTANITEDLSKCIIRENAQKSQQYNASVANKFPSHVPQGAAARPGKAVGSVLQYNLSQASAAEQYEQRRVARHPAVAPNNIPSGSSYPRRNQTCKSETGDTERMDVNQAGQPKSYAANKLPATVDGRGGHW

SEQ ID NO: 58523 - protein, 135 aa, Zea mays
  Coding DNA Sequence Number=SeqID_15148
MAQIKLGSQEDRICKKYFLTYYNIGRITCRTPAWHTTSDFTLAMKIPQFYPCIRSNASLNLSPSAVTVCRHLQLGPTRHIPKSPIEQQNPSQKGRHAALPLPWLQTPSATRLLLTRSPVDIAAAGGRRGGARRCP

SEQ ID NO: 58524 - protein, 104 aa, Zea mays
  Coding DNA Sequence Number=SeqID_15149
MEPGGGTAVGAVESLLTSSCFRKGADSHRRHRVCGAPSLPIWRSEPDGTPVLFPAARVSSGLGDVEAPSKPRSSLSSVAEVESEPLGRARRSSSSSGAEPKSEP

SEQ ID NO: 58525 - protein, 115 aa, Zea mays
  Coding DNA Sequence Number=SeqID_15150
MEAQAHASCNRHAECFVHANAPPLAPPPRLLDCGTNTATRGDPAHDPAAPAWRGGTGKGGYPEKERPAPRKGSTAASGYSGSAPITDQGFEGWPPKGSQPPQTPSEGMTMGTFNT

SEQ ID NO: 58526 - protein, 182 aa, Zea mays
  Coding DNA Sequence Number=SeqID_15151
  Gene Ontology: Mol. function=protein binding
  Homolog annotation: Hit_ID=Q8H3E5; Match level="QueryCoverage=43%, HitCoverage=18%, E-value=4e-26, Identity=74%"; Hit description =Putative zinc finger POZ domain protein
MVNKPLIGLLSDVVPMPYVAIGGNELPSDLIDTLLKWISSNDEELRLRLSSRSTATPHASAAASASAPVSHTAPWLGKFISSESFNVRGFDWAIYFYPNGKSGEDGAAYVSLFIALVSEGTDVRALFELTLVDQSGKGQDKAIIVGGADTDGTPIIAGIAKFMDILTTGLVTSPLYCNTKLQ

SEQ ID NO: 58527 - protein, 264 aa, Zea mays
  Coding DNA Sequence Number=SeqID_15152
  Homolog annotation: Hit_ID=Q2RAC3; Match level="QueryCoverage=64%, HitCoverage=50%, E-value=2e-34, Identity=50%"; Hit description =Harpin-induced protein 1 containing protein, expressed
  Pfam annotation: Domain name=Hin1; Domain location=98-236; Score =82.0; E_value=2e-21; Accession=PF07320.4; Description=Harpin-induced protein 1 (Hin1)
MGYPAPNGNPSAYFAAAPPAAAAANGSAPATFGVAYPYPAPPHHHHPPPHHHYPYPPPPPTHHHYAAHPPPPPTCLRRLLAAVVGAFLLLGAATFIVWLLLRPRAPAFSLTSLALSRVAYSPANSSLSASFDAALLAANPNAKLSVAYFSPLASVSFAPSSPLAVASLAPFGQGPGNTTTIAFRLVVEDAYVGPDDAAALKTGAGGAVDVEVRLMAVAVFDRGGWRTRRRVMRVMCDGVKVVFRGKNSTEAAFDGPPRRCDVVL

SEQ ID NO: 58528 - protein, 362 aa, Zea mays
  Coding DNA Sequence Number=SeqID_15153
  Homolog annotation: Hit_ID=Q6JAD6; Match level="QueryCoverage=95%, HitCoverage=47%, E-value=6e-70, Identity=48%"; Hit description =Putative uncharacterized protein
MGYREATTHIQLWLLGALVSHSEFDVVDFLICEIENTVLDGMRARRQLPYAHYLCHIFAQLIRPPQFQGTLEASRLVFGSYRPAPEDPVPASAPVFDTQAEDAALHQFDAQDATVDDDDYDDDDFGIPPPPPPPMPPRSHDHEAGSSSTTPAAPPAIDPILALILQTLTQQQAHLAAEQTRQAVAHQQLSERMLLMFQTIQDRQDSLQQQLLQDRAESRAFMALMLQHSVVSVPPVQSAPPPPLQAPVVPAIQSGPPLPSVGPSSSPLRPVTLVFTSPVLSSVCPQLPVPPASAVTTTAVAVSVTTSVPAASAARPQSESVPAPASTADPGSETDSDPPPAFVLLPRPRPDAPPPPPPASGV

SEQ ID NO: 58529 - protein, 115 aa, Zea mays
  Coding DNA Sequence Number=SeqID_15154
MGKNNKRKHDSQGLAAEVWTYIRAVERSGLEGSNESEYSSDEEDSDGGGEGEDDDDDDDDDGGDGGGDGSGRGGGDGSKDDDGGGSRGSRGSNQGGSSRGSTRGGSGGGSNRASG

SEQ ID NO: 58530 - protein, 123 aa, Zea mays
  Coding DNA Sequence Number=SeqID_15155
  Homolog annotation: Hit_ID=A2X484; Match level="QueryCoverage=54%, HitCoverage=20%, E-value=2e-13, Identity=52%"; Hit description =Putative uncharacterized protein
MDIKLAPLAVTFRKAIFGDPAFDLGICKGLYGVSFPYYDELSMVYSKDMATGEGAEDMTDVVQNLEEELVRVNANDEEDGEDMTSVETPRSFVDSTSSSSKKRKKEWCWNLLPGARGSNGGES

SEQ ID NO: 58531 - protein, 151 aa, Zea mays
  Coding DNA Sequence Number=SeqID_15156
  Homolog annotation: Hit_ID=Q5QME6; Match level="QueryCoverage=74%, HitCoverage=38%, E-value=9e-17, Identity=47%"; Hit description =Putative uncharacterized protein P0516D04.42
MLDEVARWDDFVTGLRPVTYGAKGESARCLVSVGPTITAKASSEGWRLRLRPNKWKGMNTSSSDPLLDVFNEVSGDLKVATMSIGKMAQAMDLEASNQEKARDEDPQQKLREKAINEVRRLEFTGSEVIKAAGVFVRMPDQMGMLFAFQNH

SEQ ID NO: 58532 - protein, 465 aa, Zea mays
  Coding DNA Sequence Number=SeqID_15157
  Homolog annotation: Hit_ID=Q8H6I0; Match level="QueryCoverage=67%, HitCoverage=18%, E-value=3e-08, Identity=24%"; Hit description =Putative gag-pol polyprotein
  Pfam annotation: Domain name=zf-CCHC; Domain location=155-172; Score =18.5; E_value=0.0024; Accession=PF00098.14; Description=Zinc knuckle
  Pfam annotation: Domain name=zf-CCHC; Domain location=383-400; Score =17.7; E_value=0.0032; Accession=PF00098.14; Description=Zinc knuckle
  Pfam module annotation: Pfam domain module=zf-CCHC::zf-CCHC; Domain location=155-172::383-400
MELEYGYPRIKAIAMSKATTDMQLAMDLLDKARCDADIVRKIISLLPQQRYGSIITILHNMEDLSTMTPTIVIGKIAAFEMSQKMCHGEEPTFSRPYAFACDERKGKKRLPHQVPQVKKRKRKKVMMKEIINHQHHPPKTKKQSNTSEREKQRKRGCFTCREKGHFRDNCATMVEPKKERSKAKALTSVKTWADSSSEDEPPRMRSHRSSSRSSQSSCKCLMARGLLEKIEAFANLNCELSTKIEQLESSATSTATNDGLIKKNEKLKAKLASSQEAIEKLLEKMEILSIHNNELTTKLENISSTLEASLVEIPKIIKKDASTSCFDLIDNSNPCNQVLVKSIVVETCSNEALYNKKGKAKQIQPPQDNTTAGVNKPVEGETVICRLCHKEGHKSFQCKVMTGDKQKLKQKPSSKISNTYINKVDKKVVTPYLIKKKKNGKVIAIKANKQANKGKGAKCIWCQRK

SEQ ID NO: 58533 - protein, 61 aa, Zea mays
  Coding DNA Sequence Number=SeqID_15158
MTTDRPLELLHIDLFSPDAYISIGGRKISNPRNFKGILETGSKRVWIDTGSQRDGVQELSN

SEQ ID NO: 58534 - protein, 107 aa, Zea mays
  Coding DNA Sequence Number=SeqID_15159
MGSHDPRAKWESRLMGKYFLSEEHCVMMFIYVIAVYVNSDPGTYIVRIRFAFRNQMARLRHTARKSVIPFLPSRLAERPLRRTVSGQSSHLERLHHCLREEQERQRQ

SEQ ID NO: 58535 - protein, 144 aa, Zea mays
  Coding DNA Sequence Number=SeqID_15160
MSGAPEDSDFKLVTFGKFQRRLRYNSPDCSVYTGHVRCSKEERPPELASLGNSSQLLRYNSPDCPVYTGLSGVHRTVRCNSGATAISAQTATCDALNARAARAEVRHAHAGAPDNLQCMSGAPTRDIKAGPEVRTPTVGTQRLW

SEQ ID NO: 58536 - protein, 51 aa, Zea mays
  Coding DNA Sequence Number=SeqID_15161
  Homolog annotation: Hit_ID=A2WX32; Match level="QueryCoverage=82%, HitCoverage=13%, E-value=2e-07, Identity=73%"; Hit description =Putative uncharacterized protein
MLASHAQKYTIRLNSDVKDKRHSSIHGITTVNLTNNDISDNPSALSSPLHK

SEQ ID NO: 58537 - protein, 184 aa, Zea mays
  Coding DNA Sequence Number=SeqID_15162
MAASRTTRPVALTPRRDRRRLRQEKRATLRLRHNDHVKKGNRPRASLLIRGSKAGPSEGFNSRLRALGFHAHYWSEVRRPAPRKGSTAASGHSGSAPTTDQGGNDLVTESHQREASSPRTPSKGDRVRQITRIGSGAALANPAPARPLTASTYQPENLGPDRAPGLRPARMRERPDQPKHCARH

SEQ ID NO: 58538 - protein, 298 aa, Zea mays
  Coding DNA Sequence Number=SeqID_15163
  Gene Ontology: Mol. function=protein transporter activity; Cellular component=clathrin adaptor complex; Biological process=intracellular protein transport
  Homolog annotation: Hit_ID=A2Y726; Match level="QueryCoverage=99%, HitCoverage=81%, E-value=1e-131, Identity=72%"; Hit description =Putative uncharacterized protein
  Pfam annotation: Domain name=Adap_comp_sub; Domain location=138-298; Score=195.3; E_value=1.6e-55; Accession=PF00928.12; Description =Adaptor complexes medium subunit family
  Pfam annotation: Domain name=Clat_adaptor_s; Domain location=4-121; Score=-58.6; E_value=0.024; Accession=PF01217.11; Description =Clathrin adaptor complex small chain
  Pfam module annotation: Pfam domain module=Adap_comp_sub::Clat _adaptor_s; Domain location=138-298::4-121
MAGAVSALFLLDMKGRVLVWRDYRGDVSALQAERFFTKLLDKEHNNVFLLTAARQNCNAASILLFLHRVIDVFKHYFEELEEESLRDNFVVVYELLDEMMDFGYPQYTEAKILSEFIKTDAYRMEVTQRPPMAVTNAVSWRSEGIRYKKNEVFLDVVESVNILVNSNGQIVRSDVVGALKMRTYLRCVRLARFENDRTISFIPPDGSFDLMTYRLSTQVKPLIWVEAQIEKHSRSRIELMVKARSQFKERSTATNVEIEVPVPSDATNPNIRTSMGSAAYAPERDAMVWKIKSFPGGK

SEQ ID NO: 58539 - protein, 321 aa, Zea mays
  Coding DNA Sequence Number=SeqID_15164
  Subcellular localization annotation: CTP_CleavageSite=49; ConfidenceScore=5.22e-01
MTSVALNPLRKQGNVSRIHVASPAMLLQGSRHFSDSHVSTRKGLKALLRQPHGNSIKGLTSMLSVEQVLNAKLTEFNTKTTDQAKDGGKKSFDVPSAREKVKETRNPKARGEEEDLQSQAPSSPRNRPPELRAHRGLRAHVARRARNRPALGHLRPQSPTHSPPLICTPVEPHFNPPRCAPAREEPSLSAAVPSLFPRQSRSPAVPSATVSSASTSATRDTLQFLLSLPDFLYPRSPAVFRAVPVPPPLTRAIVAPSPPPRVGWRRRRAVSPWAATLRCPYRDLALAIGFPAPSPTSQTIPVALRPAEPPRPLSPASSPPR

SEQ ID NO: 58540 - protein, 77 aa, Zea mays
  Coding DNA Sequence Number=SeqID_15165
  Gene Ontology: Mol. function=transferase activity; Cellular component= cytoplasm; Biological process=isoprenoid biosynthetic process
  Homolog annotation: Hit_ID=O04882; Match level="QueryCoverage=70%, HitCoverage=15%, E-value=1e-14, Identity=69%"; Hit description =Farnesyl pyrophosphate synthase
MLDYNVLGGKCNRGLSVIDSYRILKGVDVLSKEETFLACTLGCFKLIFLCLMILWTTPRHGVANLAGLECHRSYTLT

SEQ ID NO: 58541 - protein, 246 aa, Zea mays
  Coding DNA Sequence Number=SeqID_15166
  Gene Ontology: Mol. function=transferase activity, transferring nitrogenous groups; Cellular component=endoplasmic reticulum; Biological process=biosynthetic process
  Homolog annotation: Hit_ID=Q10P02; Match level="QueryCoverage=78%, HitCoverage=41%, E-value=6e-88, Identity=81%"; Hit description =Aminotransferase, classes I and II family protein, expressed
MAPRTLCDNGGSLPPYGSKRTAAGPHTIVDGKEVVNFALANYLGLIGNEKIVKYGVGSCGPRGFYGTIGLYYHPQTMTLVENSILYSYGISTIFSVIPAFYKKGDIIVADEGVHWAVQNGLHLSRSTVVYFKHNDMASLASTLEKLTRGNKRAEKIRRYIVVESIYQNSGQIAPLDEIVRLKEKYRFHVILEESHSFGVLGKSGCGLAEHYGVPDLPPLSRSKCLLVPIGVFVGLASFIPNLLSNS

SEQ ID NO: 58542 - protein, 302 aa, Zea mays
  Coding DNA Sequence Number=SeqID_15167
MQPGCAPSPAVTQDGDHQPLGGEKQVGLHLGPTLSFKDVHHPRWGGGRAEPELYLPRGFVGQPLLQRSRERALTGPARGADFDNAGLVGGGRRQLQRVGLAGLAPGVPSCREGGYRAARTGGPPKTSRAARAAFVFWGCPAFAPESLGSVGLVVRGFFCLVKGTPRPLFDEPKPGVAVSARTEAELAQKEDSVGQSLAGLSTGGTDAGIELPRPRAGLMSSGDSWPRPRGDRPSRLLEPDSWRRPWQRRPRRGDDVAHQSGDPPTTSPSEARSDLAEGVVDAEGAAAPFNCQDPSLQDRIIL

SEQ ID NO: 58543 - protein, 324 aa, Zea mays
  Coding DNA Sequence Number=SeqID_15168
  Gene Ontology: Mol. function=kinase activity; Cellular component =ornithine carbamoyltransferase complex; Biological process=amino acid metabolic process
  Homolog annotation: Hit_ID=Q6QP54; Match level="QueryCoverage=23%, HitCoverage=26%, E-value=1e-12, Identity=56%"; Hit description =Putative kinase
MAPPVDVVGPCLGLGDVEAPPRSRSSLSSEAEVESEPLGRARWRPSAEARAESEPWGRAKRSSSSSGVEPESEPWGRAKWRAEPESEPWGRAERSSSSSGTEPESEPWGRAERSSSSSGAEPESVPWGRAERSSSSSGAEPESEPWGRAERSSSSSGAEPESEPWGRAKQSSSSSGAEPESEPWGQAKRSFLWRLRPGLAACQPHSVEWHSSRSGAGGAVLLSGRSVERRSDYGHFGSVDWRARVRIKVLGHLCIKCPCDLVGWRGDLAKVASWRRLGLGRAESMSVAGGGPRARRRSSGLCADGGYQLRIRSLEGTPNYGPRQ

SEQ ID NO: 58544 - protein, 388 aa, Zea mays
  Coding DNA Sequence Number=SeqID_15169
MSSYSLHACVLPPSEPPDGERSHRFRLAVIGGTQLRGSWYLSAIVRLQGFSSGSPAASPRRWSPKTVTTSLVVGRSKPGCDLCPALSFKDLHHPGWGGGRTEPELYLPRGFVGHLLPQHSGERALTGLAGGSDFDNVGLVGGERRQLQRVGLAGSAGSGLAPGAPSRRESGCRAARTGGPPKTSRAARAAFVFLGRPAFAPVRRLCAEVGAARPGGSEWGFSGGQMASIVGAEVVAAERTASALRPSLLPFGQLERRSLSLLPERAAVSHLESRRPAGPLMNPRPLCDEPGSRAAVSARTEAELARKEDFVGRSLAGLSTSGTSTGIELPRPRAGLVSSGDSWLEASGRPAKPSARAGFLEETLAARSDFAEGGVDAEGATAPPPSTS

SEQ ID NO: 58545 - protein, 355 aa, Zea mays
  Coding DNA Sequence Number=SeqID_15170
MGQTRMLFFRHVGKTSLIPPPAGGLTAAIVAVARRRKEYHVVAAVEGHELKTPETENRPGLERLLETTYLELDGKLFVNTQQAPTWRANCRRFDPGGVPGLTSELSPRAPAQMGQRETEHEGGKKTGKGGNPWPSYCPAPRARVRIRCQATLALNAPAIRSVGVAIWPRLLLCEDWASGEPKIPRVMTKLQGHPYGPQRQRRRVTRASVMVPRSNTGDEFVGFGSSSAPVDASRGFSKPRPIPRGPNVARARLLQRRRSSFSLSHDEVCSGLARCFVMMGWERSIVTLIPVRIESEAVGENLSSALANAEEFVTRSEEFGYEVKADSPNPPGRHGTRLQATVRGVELENGPHMSA

SEQ ID NO: 58546 - protein, 44 aa, Zea mays
  Coding DNA Sequence Number=SeqID_15171
MRYLIRDGWFTGGDKDDGYDYGNGKEEGVEANLQEVQDFDEFED

SEQ ID NO: 58547 - protein, 288 aa, Zea mays
  Coding DNA Sequence Number=SeqID_15172
  Homolog annotation: Hit_ID=Q5Z9G5; Match level="QueryCoverage=42%, HitCoverage=48%, E-value=4e-18, Identity=43%"; Hit description =Putative uncharacterized protein P0655A07.24
  Pfam annotation: Domain name=Hin1; Domain location=19-160; Score =58.0; E_value=3.1e-14; Accession=PF07320.4; Description=Harpin -induced protein 1 (Hin1)
MVLAVVVLLGAVAVLVVVLLVQPRAPYVAVRAASLYALVYGQTGALDDVQVTVWVEAHNGNVHSAAYFSRLECRLAFAGATLAVLRAYPFRVPARGVLPLAYVARAQGAPLGDAGSAAMEAALRDGVVPFRVEGEARTRWKVSKKDFVFGFFLIAFYASTKKQIILDRRSFLEKQAKRGPSGLLRRTVRDIGIPLGQNQCKNTSFHYRLSGGKAKTVRALARTVRPQARTIRSPLIYRGGPSALGGRTVRAQQNGPTARKWLVAINTTPTTSIDSTPSIPTFNIQYKS

SEQ ID NO: 58548 - protein, 547 aa, Zea mays
  Coding DNA Sequence Number=SeqID_15173
  Gene Ontology: Mol. function=hydrolase activity, hydrolyzing O -glycosyl compounds; Cellular component=extracellular region; Biological process=cell wall organization and biogenesis
  Homolog annotation: Hit_ID=Q69NF5; Match level="QueryCoverage=97%, HitCoverage=96%, E-value=0.0, Identity=73%"; Hit description =Endoglucanase 23 precursor
  Pfam annotation: Domain name=Glyco_hydro_9; Domain location=51-533; Score=806.4; E_value=1.6e-239; Accession=PF00759.10; Description =Glycosyl hydrolase family 9
MAHACSAPRPSPAHHLCVRILLAYLLAARWLVPSCSAASFFRFPWPAERHDYRDALAKSILFFEGQRSGRLPPGQRASWRGDSGVSDGAAAGVDLEGGYYDAGDNVKFGFPMAFTTTMLAWSVIEFGDSMPRDERRHAAAAVRWATDYLLKTLAHPGVIFLQASARHCCARTATFVHVALAAEQGVGDPWKDHDCWERPEDMDTDRTVYNVSAGRPGSDIAGETAAALAAASMVFRDDDPEYAETLLTSARKAFEFADTYKGAYSDDPDLRAGGCPFYCDFNGYQDELLWGAAWLRRASKDDTFLQYIQNNGKTLGAEDSSNEFGWDNKHAGLNVLVSKEFIEGAALPLQSYKEFADSFVCTLIPESSSSPHITYTPGGMIYKPGGSNMQHVTSISFLLLTYAKYLSKSSHTVDCGDVSVGPETLQLQAKRQVDYLLGDNPMKMSYMIGYGDRYPQRIHHRASSLPSIRDHPQPMACKEGTPYFNSSGANPNPLVGAVVGGPGEDDAYEDDRADFRKSEPTTYINAPLVGVLAYFVGNPNPGHNTRH

SEQ ID NO: 58549 - protein, 364 aa, Zea mays
  Coding DNA Sequence Number=SeqID_15174
  Homolog annotation: Hit_ID=A2XFR6; Match level="QueryCoverage=50%, HitCoverage=52%, E-value=2e-30, Identity=40%"; Hit description =Putative uncharacterized protein
  Subcellular localization annotation: CTP_CleavageSite=56; ConfidenceScore=5.38e-01
MGSYSWLRYFTQGATTIVFRNLSGLLRIKMVRTLQTTRVNTSYAPQPRQVPVYPVVVEEAPANLPSVQVENVINLEDSSEEQLPTPTPLAESLAFAAGSSTSASSAPAFQAPAPGGNDPDDSGDGDDEDDDDDDGEDEHVNQEADYAQQDHFMGIGPVVEHYTSMFETGHFPNLLQAVLHELGAYVRPLYETRRVSEPPRACYYITRIHVRVMDAGDRGFRTLSAQECLIPLSTYAASVSDAARRTLWSLSHTYRQQLQNTRFRHLPQCLRGESQTNIVPGEPGEDRLNTLAGVVAGLNTDLDSATLDLYSVHLELENAHARIAALEAQLQGLDPPEAQVPTVALSPPRKRLRYGEPGSVTRLL

SEQ ID NO: 58550 - protein, 467 aa, Zea mays
  Coding DNA Sequence Number=SeqID_15175
  Homolog annotation: Hit_ID=A2Z3E0; Match level="QueryCoverage=58%, HitCoverage=84%, E-value=2e-82, Identity=61%"; Hit description =Putative uncharacterized protein
  Pfam annotation: Domain name=DUF702; Domain location=93-249; Score =273.5; E_value=4.5e-79; Accession=PF05142.3; Description=Domain of unknown function (DUF702)
MAGFPLGGGGHSRDAPASSVPPVHPSDAASFLYAARAGAGLQLWQQHEQQQQHPFYTSNIIRFSDDPTGAPPSLTGAASSSSSRGTRGGAGSGGGGGGGVSCQDCGNQAKKDCVHQRCRTCCKSRGFTCSTHVKSTWVPAAKRRERQQQLAVLAASAAATTAGAGPSRDPTKRPRARLSVATPATSSGDQQMVTVAERFPREVSSEAVFRCVRLGPVDQAEAEVAYQTTVSIGGHVFKGILHDVGPHSLPAAGVGGGAIEYHFRHAGDGLPPSTAATGEAGGGGVGSVVVSSAVVMDPYPTPGPYAAFPAGAPFFHGHPRQRPTVALHHDRATVALHRELARLAARSVARLPAGAGLDGSGTAEEAEMAAALNDVAAASAAASAAVFSAATSVSAAASSCSNKKAPTAFVAAAFAKKPETPTTADVAQEKHEELERCIDECESGSEVVFSSIVRNRVSLLNIHSPTI

SEQ ID NO: 58551 - protein, 167 aa, Zea mays
  Coding DNA Sequence Number=SeqID_15176
  Gene Ontology: Mol. function=kinase activity; Cellular component =ornithine carbamoyltransferase complex; Biological process=amino acid metabolic process
  Homolog annotation: Hit_ID=Q6QP54; Match level="QueryCoverage=55%, HitCoverage=36%, E-value=3e-10, Identity=49%"; Hit description =Putative kinase
MALPVDVAGPCPRQGDVGAPPKPRLSLSSVAEAEPEPWARVRALGSGGAEFAVFRVLARVRALGSGGAEFAVFRVLARVRALGSGGAEFAVFRVLARVRALGSGGAEFAVFRVLARVRALGSGGAEFAVAPLARPDCLSDSLCRVAPQSEWRRRRCPSVRLARGAVE

SEQ ID NO: 58552 - protein, 38 aa, Zea mays
  Coding DNA Sequence Number=SeqID_15177
MTAKASSTSSDYWQLRSKKLAASSHSTSWEEVGVAASS

SEQ ID NO: 58553 - protein, 202 aa, Zea mays
  Coding DNA Sequence Number=SeqID_15178
  Subcellular localization annotation: CTP_CleavageSite=22; ConfidenceScore=5.61e-01
MALGEQTPRPGSPGSPQLPRPRGQVPSRRFRRRLPREPLPLLSTTELFQGVSSPPPLAGPGLLRVLLFLLLLRGNPPRCSVHRILRDPWQGRLVPPYLLETDGNPDRKNQGQPDARKRKERTLTRVTHPWSGRIKGWEKALVSGFPNATATRPWRTSKGRGSEDIREPSKSASVVISQNGNRRSAKGSTLRRWMAAITPAAV

SEQ ID NO: 58554 - protein, 368 aa, Zea mays
  Coding DNA Sequence Number=SeqID_15179
  Gene Ontology: Mol. function=carboxyl- or carbamoyltransferase activity; Cellular component=ornithine carbamoyltransferase complex; Biological process=amino acid metabolic process
  Homolog annotation: Hit_ID=Q8SA97; Match level="QueryCoverage=29%, HitCoverage=20%, E-value=5e-15, Identity=46%"; Hit description =Ornithine carbamoyltransferase
MAPPVDVVGPRPRLGDVEAPPRSRSSLSSVAGVESEPLGRARRRPSAEARAESEPWGRAKRSSSSSGAEPKSEPWVGRSGVRCLPGLSPSPSPGSGGAEFAVFRGLARVRVLGRAERSSPSSGAEPKSEPWVGRSGPESEPWVGRSEVRRLQGLSPSPSPGSGEAELPMATFALNAPAIWSVGAAIWSGLLLGEDRASGEPELCADKGYQLRIRSLEVGFSCVPITQPLGLRDRPLPSPFDERGAVCWAPSSVSRARSYLSCPGRRAPLLRRRHYLPPETPMASATPCDGGTGKPDAAPAPTPAPTPLPPEKPLPGDCCGSGCVRCVWDIYFDELDAYDKALAARAASSGSGGKDDSADTKPKEGAKS

SEQ ID NO: 58555 - protein, 739 aa, Zea mays
  Coding DNA Sequence Number=SeqID_15180
  Gene Ontology: Mol. function=identical protein binding; Cellular component=cellulose and pectin-containing cell wall; Biological process=negative regulation of catalytic activity
  Homolog annotation: Hit_ID=A7P7W9; Match level="QueryCoverage=94%, HitCoverage=99%, E-value=0.0, Identity=54%"; Hit description =Chromosome chr3 scaffold_8, whole genome shotgun sequence
  Pfam annotation: Domain name=PA; Domain location=338-440; Score=59.7; E_value=9.7e-15; Accession=PF02225.13; Description=PA domain
  Pfam annotation: Domain name=Peptidase_S8; Domain location=68-579; Score=17.1; E_value=1.1e-07; Accession=PF00082.13; Description =Subtilase family
  Pfam annotation: Domain name=Subtilisin_N; Domain location=25-103; Score=37.8; E_value=3.9e-08; Accession=PF05922.7; Description =Subtilisin N-terminal Region
  Pfam module annotation: Pfam domain module=PA::Peptidase _S8::Subtilisin_N; Domain location=338-440::68-579::25-103
MAAPLGFFCMLLLLLLQLGHSSCNNVYIVYMGARNPELHPALVRDAHHGMLAGLLGSEQAAKDAILYSYRHGFSGFAAVLTDSQAARLAVATGIRTDISVRRLRCPGGPRFAGIWPESASFRDDGMSEAPRRWKGQCVAGDRFNVSNCNRKIIGAKWYIKGYEAEYGKMNTTDIYEFMSARDAVGHGTHTASTAAGALVAGASFRGLAGGVARGGAPRARLAVYKVCWATGDCTSADILAAFDDAIHDGVDVLSVSLGQAPPLPAYVDDVLSIGSFHAVARGIVVVCSAGNSGPYSETVINSAPWLVTVAAGTIDRTFLAKIILGNNSTYVGQTLYSGKHPGNSMRIFYAEDVASNNADDTDARSCTAGSLNSTLVKGTVVLCFQTRAQRSAAVAVETVKKARGVGVIFAQFLTKDIASSFDIPCFQVDYQVGTAILAYTTSTRNPTVQFGSAKTILGELMGPEVAYFSSRGPSSLSPAVLKPDIAAPGVNILAAWTPAAAISSAIGSVKFKIDSGTSMSCPHISGVVALLKSMHPNWSPAAVKSALVTTASVHDTYGFEIVSEAAPYNQANPFDYGGGHVDPNSAAHPGLVYDMGTSDYVRFLCSMGYNVSAISSLAQQHETCQHTPKTQLNLNLPSISIPELRGRLTVSRTVTNVGSALTKYRARVEAPPGVDVTVSPSLLTFNSTVRKLTFKVTFQAKLKVQGRYYFGSLTWEDGVHAVRIPLVVRTMISKFYANS

SEQ ID NO: 58556 - protein, 125 aa, Zea mays
  Coding DNA Sequence Number=SeqID_15181
MDIHGGVGRRAHLNTLGGWVAACATHQSRITTGNTLGDWVATCATHQSRITTGDTLRGLGNCQHHPRRLGFLQQPPLRLKAPLSPPWESSNSDQRLGIEDCFPKSMMHEILLGIPPIPRLEFLNK

SEQ ID NO: 58557 - protein, 104 aa, Zea mays
  Coding DNA Sequence Number=SeqID_15182
MATYMELHGDGLQARYGADFMVVAPSDEEFRLTGRTTSPDEEQPSTRGPARAPGVPKCVSNSHVGADPWWRPSSPGSAFGGEVQGYGEDMARFYTCGRSLAKGA

SEQ ID NO: 58558 - protein, 38 aa, Zea mays
  Coding DNA Sequence Number=SeqID_15183
MESHDLRAEWESRLVGKAGEEDVEADLQEFQDFDEFED

SEQ ID NO: 58559 - protein, 149 aa, Zea mays
  Coding DNA Sequence Number=SeqID_15184
MSDQSTTLVRVRTKETNFKGHNIAHSLKGNSKAPSGHQLQGPEAAGASEEDMGINPGKSIAYSVVKTRATLQERARLPFRSKKRLPKQKPGRTSRSRFYILLHATLPTFQNMWAINLQLLLLRQAIHKLPGLSFHYHHHCHLLIPKASS

SEQ ID NO: 58560 - protein, 143 aa, Zea mays
  Coding DNA Sequence Number=SeqID_15185
MGKNNKRKREPTPPSEDFGDSEYSEEEFSSESEGSPAPVSPPASSDDSDDSQGIAAEVWTYIRAVERSGLEGSDESEYSSDEEDSDGGDEGEGDDDDDDDDDGDGDGSGSGRGGGDSSRDSTKGGGSKGSTKGGGGGRGRASG

SEQ ID NO: 58561 - protein, 486 aa, Zea mays
  Coding DNA Sequence Number=SeqID_15186
  Gene Ontology: Mol. function=DNA binding; Cellular component=nucleus; Biological process=regulation of transcription
  Homolog annotation: Hit_ID=A0S5W3; Match level="QueryCoverage=58%, HitCoverage=83%, E-value=1e-110, Identity=74%"; Hit description =KANADI1-like protein
  Pfam annotation: Domain name=Myb_DNA-binding; Domain location=253 -304; Score=37.7; E_value=4.3e-08; Accession=PF00249.22; Description =Myb-like DNA-binding domain
  Subcellular localization annotation: CTP_CleavageSite=67; ConfidenceScore=5.35e-01
MEARAASVPDLSLHISLPSSAASPSPAPGLGAGGVGRGAQPSGGDPWRRLNGSTASTELSLSPPPPRQEAAAGDVLPWRLRPPAANYSSSTAEATFLPVTVPRLSFDAAAEAAPARPINGVPVYSSPRTGAAHPFLGAGGEYRQCHHHKAAVGLYNPYHSSSSWPSSLRSTTTAPLGAVAPPASDPTASSYLSPSAYHRMLSSTGRLHLQGVLADTLRGYGSGHHHRQHLGSLAAARYMPRLPASRRGMRAPRMRWTSSLHARFVHAVELLGGHERATPKSVLELMDVKDLTLAHVKSHLQVEFRPMRTVKSTDKPPAATSSGGGGPPVDGGGGSGDDDHPSDWRRAPSSSAGRDVSPQAFTGHRSASSDGAASHAGGDVECSSADDSDGGRPRSASPPREGATLAARLRTVRAAAEGIARRYTARDEGCRSTKISRKGLNVVSPDSDTRLTNLPIAKHEELEDYREKVDEEFQQQKAQWREVAEK

SEQ ID NO: 58562 - protein, 144 aa, Zea mays
  Coding DNA Sequence Number=SeqID_15187
MGKNNKRKREPTPPSEDFGDSEYSEEEFSSESEGSPAPIPLRESSDDSDDSQGLAAEVWTYIWAVERSGLEGSDESEYSSDEEDSSVEDGGGDGDDDDDDDEGGGGGDGDGSGRGGSSGGKDGDGGSSRGGSGGGGRGSNRASG

SEQ ID NO: 58563 - protein, 114 aa, Zea mays
  Coding DNA Sequence Number=SeqID_15188
MANPKDHNNVVLDINTRLTNSPANEDEKLEDHMKRLDEELQRQQAQISKVAKKWYLSHFKVDHHQKVVKKREVKEDTAPAPRSRTVGAVAEGTTRRSGDLTQAATTVHLAEPNP

SEQ ID NO: 58564 - protein, 204 aa, Zea mays
  Coding DNA Sequence Number=SeqID_15189
  Gene Ontology: Mol. function=pyruvate kinase activity; Cellular component=chloroplast; Biological process=glycolysis
  Homolog annotation: Hit_ID=Q0D867; Match level="QueryCoverage=28%, HitCoverage=10%, E-value=1e-22, Identity=94%"; Hit description =Pyruvate kinase
  Pfam annotation: Domain name=PK; Domain location=2-187; Score=-233.4; E_value=0.00019; Accession=PF00224.12; Description=Pyruvate kinase, barrel domain
TAADGPLPSTAFAECLALGKDIFVKCNSLPRVLLSANEFVTENKTLPSAALDKCFFAECPTKSTRQSAEHSTKPQIPTTVNAPHRRSIQRTPWNGIEGNCAMWMRVKQKIVQLCRQLNKPVIVASQLLESMIEYPTPTRAEVADVSEAVRQRVDALMLSGESAMAEPAVGSDRGGRKEMALHARGRQRRRRNGKQTACVEAVRA

SEQ ID NO: 58565 - protein, 49 aa, Zea mays
  Coding DNA Sequence Number=SeqID_15190
MGTNGHLNLDTGGKSVDQKVVQEEAASAEAVCTRYRRMQFMKLRKCKPT

SEQ ID NO: 58566 - protein, 129 aa, Zea mays
  Coding DNA Sequence Number=SeqID_15191
MSSHDAKVLQNLVLNLASSVETGALNIRSFLEEAFLHLGDEHYLLNALLVIRKEVDLMEQDALESKARSDPEKERMEEEIKLVEPANPVGRQFPFTPLPHQNCMRRVTMTRTTPTGPLGIAFGTSNCGT

SEQ ID NO: 58567 - protein, 277 aa, Zea mays
  Coding DNA Sequence Number=SeqID_15192
  Gene Ontology: Mol. function=DNA binding
  Homolog annotation: Hit_ID=Q9LGH0; Match level="QueryCoverage=48%, HitCoverage=36%, E-value=3e-10, Identity=28%"; Hit description=NAM -like protein-like
MADNNTNTPIRPTTAGPNTGNQIFPPPMWDAQFWQGQGLDPTHPGTITGTTSQMINPTWSQGANDTSSYPFRNPWNPFFGMMNPGGPPPQTSFGQAQFVPPTPYPQVDTHVTNRTDPINLESEAKHSVQEVNSPTKPSDTRGTVRRTKEQNFKPDEDLLLCKTWLEISSDPVISTGQRKEGLWARIEKRYNKLRGEFPMRLNRALSSIWDKIRAKTGKFAGFYARVLRENQSGLTDNDKDSMVHGSPWRGNAGMEPVGSGTPSGSVNDLENEESGSK

SEQ ID NO: 58568 - protein, 30 aa, Zea mays
  Coding DNA Sequence Number=SeqID_15193
MASSELNYPDSFYAAIYAGSGDTAPDGRGA

SEQ ID NO: 58569 - protein, 495 aa, Zea mays
  Coding DNA Sequence Number=SeqID_15194
  Gene Ontology: Mol. function=helicase activity; Cellular component =nucleus; Biological process=RNA-dependent DNA replication
  Homolog annotation: Hit_ID=Q2QRJ3; Match level="QueryCoverage=82%, HitCoverage=64%, E-value=6e-78, Identity=35%"; Hit description =Putative uncharacterized protein
  Pfam annotation: Domain name=DUF889; Domain location=1-118; Score= -142.5; E_value=0.082; Accession=PF05970.5; Description=Eukaryotic protein of unknown function (DUF889)
MDGEAEPSWITIPPDLLIHDDGDKILALITEVYPNFIANHRNYDYLAVRAIICPNNSTVDDINERIVSMMAEVLIGSLMIGNCSDRLCVRVSRMWEFYDPQDESKLLHADMVLIDEEGGSAHAQIYPPLAAVFKPMIKEGNVYNISYVQIRKANRMYKPVDNDIMIGFTKWTTIEALIEVPPAFPEIVYSLTPFDQLTTLVDIREYFIDVIGAVTMISDVATIRTKMRQTQTAKRSITIQNESCTPLEVVLWGEQATSFPADQISIAGQDSLQIIIFVGTLARSYAGSRGNKPCSQKVEWLVTVTVLKIDQLWWYESCRKCLKKTKSHGDAYKCSDSGCGHVGPPNPRYRLLITAGDETGETDFIVFGRMAQRIVKKPLDILIVDNPPGFIPDEITKLMEKVYTFNVNTVVAEIGDGGQVPISPSGSQPSSISSARAASKSTSADSVPTGGISSQTPQSTKNYGKDKTWLKFATLDLQIITLQPNVPFCRYTQLV

SEQ ID NO: 58570 - protein, 254 aa, Zea mays
  Coding DNA Sequence Number=SeqID_15195
  Gene Ontology: Mol. function=nucleotidyltransferase activity; Biological process=biosynthetic process
  Homolog annotation: Hit_ID=A2WTZ9; Match level="QueryCoverage=100%, HitCoverage=81%, E-value=1e-109, Identity=68%"; Hit description =Putative uncharacterized protein
MESWVRAVVEAIHSSRSQTVIYLAGGASQALGWLLSVPGASGTVLEVVVPYSRASMAQLLGKMPLQFTSKQAAEDMALAAYNRALKLSGPGLQVMGVGFTGSLASSRPKHGDHRFYVSTWTHNCLRTSHVTLSKGLRSREEEDKVSSYFLLKAIADTCRVSATIQSDIHKSEIPEEIMEQFDEDQELQQVINGQVCMKVYNFAEIKRRVEQFRKAGKNVIISNQPYFYKKAELFPGSAFIIGADTAARLVNLFY

SEQ ID NO: 58571 - protein, 165 aa, Zea mays
  Coding DNA Sequence Number=SeqID_15196
MGKNNKRKREPTPPSEEFGDSEYSEEEFSSEPEGSPAPVSPPASSDDSDDSPGDSRGGLDIHPGPSSAPGSKARMSRRTPRMRGTRTAAMRVKTTTTTTTTMTTTTAAVAGAAATAGAAPRAAAGAAPRAAAAAAGTAPGAAAGAAPRAAAAAGAGPVARCHWSS

SEQ ID NO: 58572 - protein, 303 aa, Zea mays
  Coding DNA Sequence Number=SeqID_15197
MGCTSVALLLLSLEERGLVEIGALQPSLGFKDFHRAARLHSLTNGSSSSGLRRRSAPSGGLPLRGPVTLFFPQRLGEKGILQPYGGVLQPCEGRRTATPWTGCSFPSFVRAAVVPCAGRPRPSPPRTVSRAGGSPSMSYAARAVLVFWGGLGEDGSEDLPVRFGAAAVRRRGVGGFEPTVGALRLFGLNGLSSPLPPKVEVVVSAAAEVAGKPLGLRHPAGSLNPRLLCDEPEPEAAVLARIEAESAQKETSSAWELVASQAEEDVAAAAGAWPRHPLVRCWRPPLGGGPFARVAARGRARFR

SEQ ID NO: 58573 - protein, 191 aa, Zea mays
  Coding DNA Sequence Number=SeqID_15198
  Homolog annotation: Hit_ID=Q6QP51; Match level="QueryCoverage=45%, HitCoverage=44%, E-value=9e-07, Identity=39%"; Hit description =Putative growth-regulating factor 1
  Subcellular localization annotation: CTP_CleavageSite=53; ConfidenceScore=5.07e-01
MALSPLLLVERGRRGENSAARPAPTAVPTTQAKTDNKSRSTTEFSPGRKRKLRLARPQAPASGGGLRLARPPDSTLVSGGITSSLDPRPRPLEKSLPHPTLGSDRPRQQGIHHYPIPSLLRLQGTRPASHLAYPGDGPTTVLLLLAVVLATTQVTQVLRLRRSKVWNDFDELIHIVNAFVSELSSYLDMKT

SEQ ID NO: 58574 - protein, 326 aa, Zea mays
  Coding DNA Sequence Number=SeqID_15199
  Homolog annotation: Hit_ID=Q8RZY1; Match level="QueryCoverage=45%, HitCoverage=47%, E-value=6e-48, Identity=60%"; Hit description =Putative uncharacterized protein P0034C09.35
  Subcellular localization annotation: CTP_CleavageSite=28; ConfidenceScore=5.02e-01
MVHGLFFSSLRPCSPPPHPPHPTPPPPSGALDATYRRIKSDSPARATHRCLDNGLEPIYAAAPDSPPSHPPHPSPPSPSGAPDVSCHCLNSDSPPRATHRRLNNGSKHIYAAAPASPPPHPPRSSPPPPPQPVSPGATCSRLNNDSATIRDSVAPTSTPPVAPRADAGDHVMMLFPGATERPAQHGTLQSLLSRGVTSVEGQAQCKRCGARKAIAYDLESKFRELHDYIVMNRHAMYNRAPKAWRLPVLPNCDACGQKGSMWPEIASDKREINWLFLFLGEMLGCCTLEQLKYFCMNNGQHHRTGAKDRVLYYAYIEMSNQLFSFD

SEQ ID NO: 58575 - protein, 66 aa, Zea mays
  Coding DNA Sequence Number=SeqID_15200
MGSWHDGTSSPWWGRGEAAAAPDAGFVASLFDSVMFTGRLDDLQLAAATLGNSWAFTCRRRCSPPR

SEQ ID NO: 58576 - protein, 21 aa, Zea mays
  Coding DNA Sequence Number=SeqID_15201
MELMSSRSPGDSSLRIAAVDE

SEQ ID NO: 58577 - protein, 80 aa, Zea mays
  Coding DNA Sequence Number=SeqID_15202
  Subcellular localization annotation: CTP_CleavageSite=52; ConfidenceScore=5.13e-01
AAAAAAPAAARAGWVLVVLGRRGRGVPAGRRPRARNGAGGDAALAACRPDCLAAGVGSGAEELVLAKPKWFRHADPTRWQ

SEQ ID NO: 58578 - protein, 97 aa, Zea mays
  Coding DNA Sequence Number=SeqID_15203
MAKPGHATPPGPLLRKQQPTRPSIPVAGMKAKSHHQPNQGGTCKNYATSKAEYTNTQLDLPGLTALAYNAPLTPTAVVQWPHLYPPYLEWETQSQVA

SEQ ID NO: 58579 - protein, 106 aa, Zea mays
  Coding DNA Sequence Number=SeqID_15204
MAPPVDVAGLRPRLGEVEAPPRPRSSLSSVVEVESEPLGRARRSSSSSRAEPKSEPWVGRSGVHRLPRLSPSPSPGSGGAEFAVFRDLARVRALVWAERSSSSSGT

SEQ ID NO: 58580 - protein, 340 aa, Zea mays
  Coding DNA Sequence Number=SeqID_15205
  Subcellular localization annotation: CTP_CleavageSite=38; ConfidenceScore=5.06e-01
MNKKTGIQGAITNGTPVPSPRLGSNSSPSPTWLEDASSAELGGGFHHQKLEEEVARRPVREVEPRLASLSAPARMGLVVTVFVTTGEGMQPGRVMKILEAERWLKGPSSTNRRGLSLLQHAPSSSPYGAGAGSHASCKLAQGRRSQTAARGACNRPAVTSIPPLPPRPAGERTDSRAGGMQPRQVGAPLRLPTHPAWRPGPTRQATGAPVATYEQLHRRSHHYHASSTAGPVPRLEATLRTTRQCQPGATVNTAKNGTAVMVVASGQELRSRRQPSLRPIRGQRENPLSWREDGAPVFRSSNGSRTRNFHLANHSPRRINSAAGQAAPLAGEASDALPSP

SEQ ID NO: 58581 - protein, 378 aa, Zea mays
  Coding DNA Sequence Number=SeqID_15206
  Gene Ontology: Mol. function=cysteine-type peptidase activity; Biological process=proteolysis
  Homolog annotation: Hit_ID=Q8S456; Match level="QueryCoverage=16%, HitCoverage=7%, E-value=4e-22, Identity=79%"; Hit description =Putative uncharacterized protein 163K15.6
  Subcellular localization annotation: CTP_CleavageSite=32; ConfidenceScore=5.34e-01
MDSAVQLLWTASKRRLRGSLSYTVAHATTQTRVDRKKTPVVAQSFLSSEATRQAIFAAPIQRRSNPAELLQSSSIGARFKSVQCFPRSSRSPDIRSSAFLLDPVYLSTFIDLDEGSGSAHQDDNPHNQKQNEPQPTPVHRFRRKALACRVKTKPPAPFTLSDDDFMDAPALKRQFRSTHYRTQLLCRVSQTLGKGYFTLGKGFAECNTRQRTLGELYIGNSLFAEYFLSGTRQRICRVPFDTRQRKVTVTAPSDGDGSFAECLLWHSAKRPILPSACYHGPRQRRVQWAPPLVPVPRALVGTRQRRTLCRVSSGPALGKESSSGPLCQSLCRVPWQQHSAKMALPVPRFPSLPSAMVSTRQRWLYRFPGFLLCRVPWS

SEQ ID NO: 58582 - protein, 491 aa, Zea mays
  Coding DNA Sequence Number=SeqID_15207
  Subcellular localization annotation: CTP_CleavageSite=42; ConfidenceScore=5.42e-01
MADPAREANRARASAKAAASGSSKPVAPAKAAAPGPSKAAASAKAAASGGGRPPLSEPTKGQELPSPGRRVADFGTNISVEDYLVGGPTSPTVLRQGVLTADVAAEVESLRAQHADAIREKSAAESKNRRLAEKVAALEAEKTDLQCRLAKERREVNQAIAEAQAARAEAKVARAESSLASQRTEEWEARFNALRGRVDKAEASARSEVGRTHVQFVDAYRDLGARTADFEVPDQEAGLRFLEWLQEELLVLPTIVQGFMSFASLVTCEGTLNALSREGCRHYEVFDQSDENFEREVFKTEDPVVKQSAGALSTDVGFARSGGGVLQMARAEDVEDLGDLVGAPPDAEVNPVPPSSASEGSSSAPVPTVAGEGPLPAPAPTAEDPLKVVAEPGSGIFGPAHAISTVNDNFVAAFDRGLLKTIFDDSVSKCFESDDSGSSIVWTEESSDEDLDYFAALDVAAVEASPRVMGGEDLTGASVGHRRRRAVAKRR

SEQ ID NO: 58583 - protein, 422 aa, Zea mays
  Coding DNA Sequence Number=SeqID_15208
  Gene Ontology: Mol. function=phospholipase A1 activity; Biological process=lipid metabolic process
  Homolog annotation: Hit_ID=Q6BTJ4; Match level="QueryCoverage=61%, HitCoverage=28%, E-value=2e-14, Identity=31%"; Hit description =Similar to CA1621|CaIFF6 Candida albicans CaIFF6 unknown function
MATYRRRRQAVCLTRARSSTSRSKEGRRADERTRRFGKPAVQQYRVRQRAHQKPPRNHFERGQRLHHLATSSAPDDSVELVPRRANVEVKAKTLPFAPAFVFLAAPTEAEEPARSTLRLVHYEAKAYGDVAPSHSVTLLYRNIPGIVQVPEADPGGFTSRPRTPYGNERTFGSPEAQSSPRSNLGQIATPTDQIAGAFNAKGSDSGSALEDDELRFARPQGSDLGSAPEDDELRFARPQGSDSGSAPEDDELRFARPQGSDSGSAPEDDELRFARPQGSDSGSAPEDDELRFARPQGSDSGSAPEDDELRFARPQGSDSGSAPEDDELRFARPQGSDSALASADGLRLARPRGSDSTSASEYRLDLDLGGASTSTNLGLGPTTSQEAPSLPYPKLTQATGNKTGVPSGSPCQTSNDGAPHAL

SEQ ID NO: 58584 - protein, 447 aa, Zea mays
  Coding DNA Sequence Number=SeqID_15209
MAERYQLPWSCVPPTTKRKDGGNPPSGGLEGGRTRCIREREDMVAFQGGYPPFKGDSPYLRPQPSRAESSSTRSKVFPYGAGPGSHTSCKPAQSRRSQTAVRGAYNRPAVTSDSPLLPRPAGERAGSHAGGMQPRQLHRHLRHHRASSTAEPIPRLKGPGKGDTPKRILPREGTRLRASLLIRGSKAGPSEGFDNRLRSRGLYTHYWSEVRRPAPRKGSTAASGYSGSAPTTDQGFEGWPPKGDRVRQITRRNFWARLWAPSRPLTNGARTSTRITRLQLTGDTMFGAHRGQHGASPLLLAERRRRGVCKKVESIPDRPLALCRGSGAALANPTPAEPLTASTYQPENLEPERTPGLRPARMRDDQTSRSITRGIKTSEESNHSSEASGATPGGHHRKLRFARPRARTRAKPRKTANSAPPDPGLGLGLSPERRRTPLRPTQGSDSG

SEQ ID NO: 58585 - protein, 202 aa, Zea mays
  Coding DNA Sequence Number=SeqID_15210
  Gene Ontology: Mol. function=kinase activity; Cellular component =ornithine carbamoyltransferase complex; Biological process=amino acid metabolic process
  Homolog annotation: Hit_ID=Q6QP54; Match level="QueryCoverage=56%, HitCoverage=36%, E-value=1e-16, Identity=48%"; Hit description =Putative kinase
MASPVDVAGLRPRLGDVEAPPKPRSSLSSVAEVEFEPLVRARRRPSAEARAESEPWGRAERSSSSSGAEPKSEPWVGRSGPESEPWVGRSGVRRLLGLSPSPSPGSDGAEFAVFRGLARVRALGRAKRSFLWCLRPGLTACQPHSVKWHRSRSGAGGTVFLSGRSVERRSDGGHFGSVGWGARVRIKLYADGGYQLRIRSLE

SEQ ID NO: 58586 - protein, 240 aa, Zea mays
  Coding DNA Sequence Number=SeqID_15211
MSTGMDESGVMEDSLVIRTSYCSEVEGFPHLLRSYTCQNVARKALRQLCQSYNKVIFETPLRYFPPSNKNTPAWRKRLQALSGGDPIEDDPTIVYMAGYLHTLDNQYDDLASHCTHLNSRVESLEQKVRELTKEKASLQESLEIAEGEETNTREAYRTLKMDYDKKLKKLAPARKIRKKTKSQGCQAEQKEEAPPALPPTRIRNSSDTEEMSLASLDDLLKEFGDTLEKEFGSTLDSTRV

SEQ ID NO: 58587 - protein, 148 aa, Zea mays
  Coding DNA Sequence Number=SeqID_15212
  Gene Ontology: Mol. function=protein dimerization activity
  Homolog annotation: Hit_ID=A2ZLQ7; Match level="QueryCoverage=50%, HitCoverage=9%, E-value=2e-10, Identity=47%"; Hit description =Putative uncharacterized protein
MGSAGATLRTGTGRGRAQVRQAAAEAGEVGPRAEESGQGSSAVGSTGFGKFIPATVAENRHVPPLLCVIMSSRRYPSGSEKGKRKKRVDDLIDSQRGAIDKFFKSNTSASTNPNDVFVLAIVPVGTEEPTNEKILEKNMLISTPMITM

SEQ ID NO: 58588 - protein, 209 aa, Zea mays
  Coding DNA Sequence Number=SeqID_15213
  Subcellular localization annotation: CTP_CleavageSite=31; ConfidenceScore=5.48e-01
MAKLPVGAPLPETTSPTPTWAIPQAFNEASRASMRQGNSTTSCTAAELSSRLSCCGEEARSTKRHKHRKVPGRLWCCEYPRTPHHNQSRGKPRQARRWPSTLSWRSLFALSHNGACMRMQKTTFFGRTGDWEGWLGWSYKYTKGVESRPRRMSVRWLQLLGLLRSLELLLMSVSLHEMNDDVSNRSPTRTRQHADLNLHDDVTTCISMT

SEQ ID NO: 58589 - protein, 925 aa, Zea mays
  Coding DNA Sequence Number=SeqID_15214
  Homolog annotation: Hit_ID=Q7XC46; Match level="QueryCoverage=84%, HitCoverage=99%, E-value=0.0, Identity=82%"; Hit description=BZIP, putative, expressed
  Pfam annotation: Domain name=DUF630; Domain location=1-60; Score =121.9; E_value=1.9e-33; Accession=PF04783.3; Description=Protein of unknown function (DUF630)
  Pfam annotation: Domain name=DUF632; Domain location=314-653; Score =588.2; E_value=8.1e-174; Accession=PF04782.3; Description=Protein of unknown function (DUF632)
  Pfam module annotation: Pfam domain module=DUF630::DUF632; Domain location=1-60::314-653
MGCTASKVEQEDTVRRCKERRRHMKDAVAARQLLASAHADYLRSLRVTAAALSRFAKGHPSLAVSHHTTPVLLSAAAPPPAPSAARALPTPAPSTAASSSLPPPTPLAQHPHPPPQPPAAMAAPQPAPARAPRPRRLRVPHILSDSSVASPARSSFRKQPPVGTPSSSSAWDWENFYPPSPPDSEFFDRRKAEVEHASRLRELEEEEKARAYLQHHTQYNLKEEDEAAEDDDGEVDHEPEGMHCGGWEDDEHYASTTTSETRSEDEGEMGDRSECGFAARSECGFVARSEYGGTAPSEYAAVPLPLRRDERSEAGDSSTVTAATEMRMVVRHRTLEEIVAAIEEYFVKAADSGNDVSELLEASRAQLDRNFRQLKKTVYHSNSVLSALSSTWTSKPPLAVRYKLDTNALEMESTEGKSHGSTLERLLAWEKKLYEEVKARESVKIEHEKKLSTLQSLEYRRRDSAKLDKTKASINRLQSLIVVTSQAATTTSSAIVRVRDNELAPQLVQLCFALLGMWRSMNHFHEIQNEIVQQVRGLVDNSMAESTSDLHRLATRDLEAAVAAWHSNFNRLIKYQRDYIRSLYGWLKLTLCQVDSSVPQEVHASMISRELTSFCDEWKQALDRLPDAVASEAIKSFVNVVHVIYTKQAEEMKIKKRAETYSKELEKKANSLRSIEKKYYQSYSMVGLGLPGSGRDGIESHAAYDARDPLAEKKTEIAQCRRKVEDEMTRHAKAVEVTRSMTLNNIQTGLPGIFQAIAGFSGTVVEALDVVCRRAGGLGAAVVIERAERSSSSSGAEPESEPWGRAERRSSSSGAEPESEPWGRAKRSFPWRLGPDLAAVSLTLPSGTTVGAAQAALSSCQSDKWSGEATFALNAPAIWSVGVTIWPRLLLGEDWALGEPKLCADGGYQLRFRSLEGTPNYGPRQ

SEQ ID NO: 58590 - protein, 530 aa, Zea mays
  Coding DNA Sequence Number=SeqID_15215
MVCLGLGGRRKHTLQDNPILQARILTVEGSSSTLGVNYTFGEESGSSRRLDRSPRGLGQLSPEDISPARGLGNSIPALVPPVDDPARLWPTKSSFRANSASVRADTATPGFGSSKSGRGVPLTKQEKPRTARPTQPRDSYASGIRIPHSSPLHGRLTLGEAAPTATMTKRLAFKVPLQTELRFRPRGTDAATGRLSFASPLKGREPDIKAKERAAPKRTGSNSPPPPAWLEDASSAELEDGFHHQKLEEEVASRPVREVEPRLALLSAPARMMNIIEAEGRTKIAARLASPHPGAGGHRLGRRGLSLLQHAPRSSPYGAGAGSHASCKLAQGRRSQTAARGACNRPAVTSVPPLSPRPAGERADSRAGGMQPRQVGAPLRLPTHPAWRPRPTRHATGAPVATCKRLHRHSHHYHASSTAEPVPRLEATLCTTQQCQPGATVNTAKKGLAVMAVAGGQEQRTRRQPSSRHLVGQRENPLSRREDGAPVIRPSNGSHTRNGRPANHSPRRINSAAGQAAPLAGEASDASPSP

SEQ ID NO: 58591 - protein, 222 aa, Zea mays
  Coding DNA Sequence Number=SeqID_15216
  Homolog annotation: Hit_ID=O48967; Match level="QueryCoverage=32%, HitCoverage=15%, E-value=6e-20, Identity=65%"; Hit description =Putative uncharacterized protein
MKTPHPCNTSRPRGEWRLTPPHGQVQGRHVARKGSTSQYSLLGPDLHRRTPDPHAYKSRAPKKARWVPWEGPSPPPNGVRVIQQAARLTGLLANSATVPSGALYSSSLLQEASPARRGYVDLECQGTRRSPQQQAFAAPSAVFAMSLGPMMVQIIEHRTETSEDLVMEQEVASFAPRVPDRPESGAVAVHAVQQHTPAQVSRTPSRAAPTALSVARELLRHP

SEQ ID NO: 58592 - protein, 268 aa, Zea mays
  Coding DNA Sequence Number=SeqID_15217
  Homolog annotation: Hit_ID=O48967; Match level="QueryCoverage=27%, HitCoverage=15%, E-value=5e-25, Identity=74%"; Hit description =Putative uncharacterized protein
MALGPTNRDYPDRWLRCRPRDGKQKKKGRGYERPQSTVLVVAATTGGQGDHNKRPRPQIGNSGSCPVHPNGRHSATECREIIDLTKRVSKRISERREQSSKDDSPPRRCPGKEKVDDGEDLYAKAGGPDNLGASSGEWEPVPWGGPKPVWSVSLVPYPKSCTLHHSMKGTLLFGAISPVATTTWGPELEKRHLSPGVVRSRVAAQPGPVLWACTLHHPAAGVLVPRITIQGSGYTTWLPQARPCKSRACIEGWLVSDDGSYGYTANAP

SEQ ID NO: 58593 - protein, 222 aa, Zea mays
  Coding DNA Sequence Number=SeqID_15218
MNCAALAGVALEASSGWPHRRRRPPLHQRFTDGSDHLCTSSDNHLRSERLARSGDHLRVCAIARRSSSPSSYGGDNEAIKAKESGTRRQVALMVPLAEATTSALGSLTSGDDHLSTDDSAHLCTGGRRLPQHARRGPRSRPPKGVGTRPSKNAAAAPAAYDALYGPPRMASGAGEAVDVADPRTARPSPVRWTDSRAPTRRQEAVSEAAPKPSSPKGQTCCS

SEQ ID NO: 58594 - protein, 309 aa, Zea mays
  Coding DNA Sequence Number=SeqID_15219
MAEEHATAPCLYALHFRSNQWSGRRTTAQGTCNRPAVMRPFIFAKTSGQEGELPHRKRTTAPRLCAPSASLQSAVQHADPGPHVMQPACRLLGAKKSHRRLHQCHVPSGPSQKTEKMSFQNRCSDSRHPAHGPTVTLSTKVMGQSAVGTGMTVGVAIGGPVVIAPTGTQEQQADCQSDSGPTCRLASSLEVGPRATVGTQDQGYPLLQHEDTAPVQHLKATWRMVPNPTTWADDVRVIQQAARLTGLLANSAPVPSGALYSSSRLQEASPTCRGYVDLGCQGTRRSPQQQAFVAPSAVFAMSLGLYVGA

SEQ ID NO: 58595 - protein, 142 aa, Zea mays
  Coding DNA Sequence Number=SeqID_15220
MATRRTTGGTPCPPAYEAEACLPPETILGPPRDLFAKAGGPDSLGASSKEWEPVPWGGPEPVWPLSLVPYPKSCTLHRSVTGTLVLGAISPVGPTTWGPELEKRYLSLRVARSRVAAQPGPVPWAYMLRHSVAGVLVPRTTI

SEQ ID NO: 58596 - protein, 18 aa, Zea mays
  Coding DNA Sequence Number=SeqID_15221
TLWYRWHEIDGSGYDYGA

SEQ ID NO: 58597 - protein, 242 aa, Zea mays
  Coding DNA Sequence Number=SeqID_15222
  Homolog annotation: Hit_ID=Q33AJ2; Match level="QueryCoverage=81%, HitCoverage=71%, E-value=2e-17, Identity=32%"; Hit description =Putative uncharacterized protein
MENPHITDTLLDEVEIELDMLRALMLYGVGGEVHGTDVVKVDKGAPRQRTVQLLEELTKPRRLGDAVSHNAVLNPGARAGDDRLPLQGPGDEAVVVEHSETEGGPTRVRIADLVGIGVDNEVGGSRPSKEEAELGGAPEVSRDPLHSGEMWLPWGVHIEAHLLDDVGDVGASEDEVLQGPGETPIAGRISYRRAIIGGDLALSVHRSRVGLTISHASALEVIDGVLALVEEQALGPVLGGDP

SEQ ID NO: 58598 - protein, 319 aa, Zea mays
  Coding DNA Sequence Number=SeqID_15223
GEEPEPYVHADVAVGEVLEPCSCGVVAIGGALEPCRSTAVGAVGSLLTSPCFRKGLRTAVVMEHAGCHHYLFYRGEPDGTLGLVPHSLGLARGRVMMAPPCGVVGRSKVVAPPRSRLSPSLGAGRGGDRRPEVEVEPEPEGRARRRPSSEVEVESEPWGRARRRPSSEVEVESEPWGRARRRPSSESRLSPSLGVERGGDRRPRSRLSPNPGVGRGGDSYGTRGWTWLLVSLTLVGGTTVGAAQAALFSCQDKVSGDPCIKCSCDPIGWRGDLAKVASPRSLPELASGESKLCADGGYQLRLEASGVPLITVPDKCNYL

SEQ ID NO: 58599 - protein, 237 aa, Zea mays
  Coding DNA Sequence Number=SeqID_15224
  Gene Ontology: Mol. function=hedgehog receptor activity; Cellular component=integral to membrane; Biological process=cholesterol transport
  Homolog annotation: Hit_ID=A7P8Q4; Match level="QueryCoverage=56%, HitCoverage=11%, E-value=1e-54, Identity=77%"; Hit description =Chromosome chr3 scaffold_8, whole genome shotgun sequence
  Subcellular localization annotation: CTP_CleavageSite=35; ConfidenceScore=5.35e-01
MAQALAQTRGLRPGAAQRECGLGKGSRRREGRGGRCAQGRRRVGRPRTPSANGRRQGRQQARVGTIFVVCFIVTSSLWASAIILTVLAMIVLDMMGVMAILGIQLNAISVVNLVMSIGIAVEFCVHITHAFMIGTGDKETRARQALSTMGASVFSGITLTKLVGVIVLRFAKSEVFVVYYFQMYLALVIIGFLHGLIFLPNPVKELHRNLSGPFEFMWPSYKMGEAKRTKSATFSFK

SEQ ID NO: 58600 - protein, 113 aa, Zea mays
  Coding DNA Sequence Number=SeqID_15225
MTCGEPLLRGLDCFGGWANAGGRGGGSRLEVLLVKNRSCLAWGVSWLDNNGALRSFFLLCRCLGVDVVEFLWTCVTVLGESELLVPCVELDNDDSGWALCVGLLMSGLVVRSV

SEQ ID NO: 58601 - protein, 345 aa, Zea mays
  Coding DNA Sequence Number=SeqID_15226
  Gene Ontology: Mol. function=hedgehog receptor activity; Cellular component=integral to membrane; Biological process=cholesterol transport
  Homolog annotation: Hit_ID=A2XWG3; Match level="QueryCoverage=28%, HitCoverage=8%, E-value=1e-48, Identity=89%"; Hit description =Putative uncharacterized protein
MAAPSGIAHGDGDAVNEDDVMKFGVVPGDGHAVVQDVVTKLAGDAAHGDRDDGCQDGVTKVACGATHGDGDVGCQDGVTKVTCDAVYGHGDAGCQDDAAKLVAEAMGSDRNPSYPIPNVMIARSVRDWRGVSMGRNTGRGPLPTAEQEEGPMVAAAAAPPWASLGPDKDYFDDLAKYMKVGPPLYFVVKDFNYSSASVDTNQICSISQCNSNSLLNEISRQSLSPETSYIAKPAASWLDDFLIWMSPEAFGCCRKFVNGSYCPPDDQQLQGTISRLPNILIHLAIYETQYIDYQIYSKKTDVATGPTLREGRRRKPFSEDARELQRCKNMKHMNVTDVHLLTNKV

SEQ ID NO: 58602 - protein, 833 aa, Zea mays
  Coding DNA Sequence Number=SeqID_15227
  Homolog annotation: Hit_ID=A2X857; Match level="QueryCoverage=93%, HitCoverage=99%, E-value=1e-177, Identity=47%"; Hit description =Putative uncharacterized protein
  Pfam annotation: Domain name=DUF630; Domain location=1-60; Score =62.7; E_value=1.3e-15; Accession=PF04783.3; Description=Protein of unknown function (DUF630)
  Pfam annotation: Domain name=DUF632; Domain location=342-664; Score =292.4; E_value=9.2e-85; Accession=PF04782.3; Description=Protein of unknown function (DUF632)
  Pfam annotation: Domain name=Extensin_2; Domain location=55-408; Score=-131.1; E_value=0.036; Accession=PF04554.4; Description =Extensin-like region
  Pfam module annotation: Pfam domain module=DUF630::DUF632::Extensin _2; Domain location=1-60::342-664::55-408
MGCKGSKLDDQEAVALCRARAELLAAAVRHRYALADAHAALADSIDSVAAPLHRLLRLQAQPRGLVLPSARKGGGAPANRLLPRSFDPSSALPAHGHSSQPQFGASPGSEPAPTADSPPRRRRRVPEQLPHPHYAAYGYDYATQPAYAYPAPASSLQFYYARSRPPPASVAVTQRAPGTSERVHFGSFDAAGGYPQHYAYSAQRAQAPPPVAPQRSAPPSPPKASSWDFLNVFENYDSYEHDSYYYDSATAPAAPAAPFMPSRSSREVREEEGIPDLEDDGEEDSVGVVVKEVAGQYSAPGNGGARSRRNSLGGASSTAELDQPENAIAHKDVIGEFRRRPTAHGNVSVHAPPPPARRVVDNASVAGEIKAQLVRTAEAARQLAPMLEVGRPSYQGRSSVYQCSSKMMSAISVAHLGCKDMDVLDVGVVGKMVDTRSLSSALDKLYFWERKLYAEVKAEEKTRLLIAKNSKRLKLLDQKGTEPEKIDETRNLLRKLSTKIRIAVRVIAKISRKINKLRDEELWPQVNALIQGFVLMWQDKLDAYHSQCQVISEAKNFTSVLSGGNGQDLVLELEVELIKWIISFSSWVNSQRNFVKALNGWLALCLNYEPEDNTTGAPSYSPGSIGAPLVFVTCNKWSQAMDRISEKDVVNAMQALVSSVWHLWEQQYLEQSEQIISMREREKWIKILERRTQDINKEADELNKKLALIPSRQRMHVPRRVQLYEAHCVEASNLHINLRLVLEALENFAANSLQAFQDVAKSAEGTRLPRDNMKLGWGLALCHRAFIKSELSDLKMISTEPVNNVGPVGTGLGRDPLAKRLDTDGPRAVQIEY

SEQ ID NO: 58603 - protein, 575 aa, Zea mays
  Coding DNA Sequence Number=SeqID_15228
  Gene Ontology: Mol. function=oxidoreductase activity; Cellular component=cellulose and pectin-containing cell wall; Biological process=electron transport
  Homolog annotation: Hit_ID=A2XWF1; Match level="QueryCoverage=96%, HitCoverage=94%, E-value=0.0, Identity=64%"; Hit description =Putative uncharacterized protein
  Pfam annotation: Domain name=Cu-oxidase; Domain location=156-306; Score=175.4; E_value=1.5e-49; Accession=PF00394.13; Description =Multicopper oxidase
  Pfam annotation: Domain name=Cu-oxidase_2; Domain location=386-551; Score=102.5; E_value=1.3e-27; Accession=PF07731.5; Description =Multicopper oxidase
  Pfam annotation: Domain name=Cu-oxidase_3; Domain location=30-146; Score=191.9; E_value=1.6e-54; Accession=PF07732.6; Description =Multicopper oxidase
  Pfam module annotation: Pfam domain module=Cu-oxidase::Cu-oxidase _2::Cu-oxidase_3; Domain location=156-306::386-551::30-146
MRSVLFFVCICFLFVSTARAEGPYQFFDWEITYGSISPIGSLQQGILINGQFPGPKIECQTNENLIINVRNKLPDPFLLSWNGLQQRKNSWQDGVSGTNCPIPPGHNFTYRMQAKDQIGSFFYFPSLALHKAAGGFGAIRIDSRPMVPVPFPPPAGEYAVLIGDWYTTNHKSLQRMLDSGKELPRPDGVLINGKGGADVVDFAVEQGFKLSRTLRAGKTYRLRISNVGLQNTLNIQIQGHKMTLVEVEGTHTVQNAYASLDVHVGQSLSVLFTANRPAKDYRIVVSTRFTNATRLLSTAVVRYAGSSGPAPGPLPAGPGDDVDFSLNQARSIRTNLTASGPRPNPQGSYRYGSINVTRTIRLASSAGLVRGRRRYAVNGVSFAEADTPLKLADHYNISGVFRLGGIPDAPPPATAEEVRNETAVMDSDHRSFVEVVLENGEGGGVQSWHLDGYSVFVVGMDVGTWSKKSRDGYNLVDAVSRCTVQACCENEMAGQAYSILFRDRAQVYPRGWTAVLVALDNVGMWNMRSEVWARRYLGQQFYLRVYTPSHSFRDELPIPDNALLCGRAAGRHHSQ

SEQ ID NO: 58604 - protein, 374 aa, Zea mays
  Coding DNA Sequence Number=SeqID_15229
MTRGLGPTRHASCPRIEEAKPPRAERVTAQRLQAFLRLRPNQRVKGRTAMQAACNCTKGVHPFDFDASSMEAQAHTSCNRRAGYYMQKTAAPLAPAPRLLDYGTGAATRGNPAHGPAVPTRHTGHGSVIRGRRRDGTGKGDTPKGILLREGSGPRAPLLIRGSKAGPSEGFDSRLRALGLRAHYWSEVRRLAPQKGSIAASGHSGSAPTTDQGFVGWPPDGLGLRSRGTLGHFRDQQERFCNGIPSEGGIEPSDPIERDRVRQITYRGSGAALANPTPAKLLTASTYQPEKSELVTPISTKLQRPDGRNSGKQRRLRCSDCCATRQGEADKQPSPASGAIGISASPDPRVRTQPRPRTTVSASPDPRARAQPRL

SEQ ID NO: 58605 - protein, 491 aa, Zea mays
  Coding DNA Sequence Number=SeqID_15230
  Gene Ontology: Mol. function=protein binding; Cellular component =nucleus; Biological process=cell division
  Homolog annotation: Hit_ID=Q01J96; Match level="QueryCoverage=97%, HitCoverage=96%, E-value=1e-149, Identity=61%"; Hit description =Cyclin-B2-1
  Pfam annotation: Domain name=Cyclin_C; Domain location=357-478; Score= 165.4; E_value=1.5e-46; Accession=PF02984.10; Description=Cyclin, C -terminal domain
  Pfam annotation: Domain name=Cyclin_N; Domain location=208-355; Score= 208.9; E_value=1.2e-59; Accession=PF00134.14; Description=Cyclin, N -terminal domain
  Pfam module annotation: Pfam domain module=Cyclin_C::Cyclin_N; Domain location=357-478::208-355
MAARAADENRRPGVGRPAPCVRDMGSRRALTDIKNLVGVAPNPCAVAKKPVLQYSPAPRSFLCHGSWVQEEQKGRKEDSVAKQPADDKVRTRASCSCALAFLGGFDLIWVLLWLLRKFVASLASKGQPECQPTGADPEPGVDQRKEPIGDGIIDIDVELDEPVDDSDCDVDMGDETENKDIMNQDESLMDIDSADSGNPLAATEYVEELYKFYRENEAKSCVNPDYMSSQQDINAKMRAILIDWLIEVHYKFELMDETLFLTVNVIDRFLEKEVVPRKKLQLVGITALLLACKYEEVSVPVVEDLVLISDRAYTKGQILEMASTQSCFLGCTLDHDDIHIHIEKLILNTLQFNMSVPTPYVFMKRFLKAADADKQLELVSFFMLELCLVEYQMLNYRPSHLAAAAVYTAQCAINRCQQWTKVCESHSRYTGDQLLECSRMMVDFHQKAGTGKLTGVHRKYSTYKFGCAAKILPAQFMLELGGTAPPPSGAI

SEQ ID NO: 58606 - protein, 91 aa, Zea mays
  Coding DNA Sequence Number=SeqID_15231
MNSMSASSLPFLLYETLEVGKQGMGVSDLLPMVPVRWLNFVCLHGLSLTTVSTRPATEAKATSEGWRLCLRPNICPPRDQFDKVTWCRRRR

SEQ ID NO: 58607 - protein, 319 aa, Zea mays
  Coding DNA Sequence Number=SeqID_15232
  Gene Ontology: Mol. function=protein serine/threonine kinase activity; Biological process=protein amino acid phosphorylation
  Homolog annotation: Hit_ID=Q94E23; Match level="QueryCoverage=68%, HitCoverage=44%, E-value=3e-81, Identity=71%"; Hit description=S -receptor kinase homolog-like
MSSPNNSVSAALSETTPVFQLRVWQLIAIAVGIVMAILLVIALCLSLQRKKKTVKGFDNSSLAEIPIVSKEINVDRVGAQSLHDSEAPFMPVRDKYTQTKGAGQLGESRSVDADTFSQFSSVYNVEKGGSSYSEDYSHSSSGPARKGSSPYAYSASPLVGLPELSHLGWGHWFTLRDLECATNRFAKSNVLGEGGYGVVYKGRLVNGTEIAVKKILNNLYVLLDPKERAELWPSRWMKGGLHTQISTSAGGSKSIDDTWWLGAQAASWCSDELISKCSFRTARLTRKPRVTPGFQGHQDPGANIITRCATIKYHTYDES

SEQ ID NO: 58608 - protein, 292 aa, Zea mays
  Coding DNA Sequence Number=SeqID_15233
MPTQGRGAQGIHAGEEVVGTGEDGGARRKAAGRCAWGRGRREGRCAGGAYAEKGRERREGRCVWGRRTHGGAARTPGTARMTRKGAALGARTQGGRCAWGRRTQRRGADAGNSADTKEGRCAGGAYAEEGSPGMAGSGEEWPPGEGGAWTTPAAAPRCASRRRRVAATAGRVTASSPSSSRGAGESRLLGSSDGGADDADPEVDDSGGRGAAYAACSVGLVGGCAAAGRARVRRWARCRSSSARPAVASWRRLEGRQPAGEGVGVRLGGERPPPGGKDEPPGGRRLRSGWRL

SEQ ID NO: 58609 - protein, 263 aa, Zea mays
  Coding DNA Sequence Number=SeqID_15234
MVRERRTQTNTMNKNTRDTRFIPKFGHTTKMPYFLVEAPTKSRVSFNPNPPFADHKGQAHTIIFAQTSGYQSVRAVSWRPDLQVYARLWSQKPVPRALTPFRRCEFSKENVFQNGYDEGLSPLSPFERDDQGLPGLWEGLSPRLGEAEAPPRSRSSLSSEVEVESEPLGRARRRPSAEARAESEPWGRARRSSSSSGAEAESEPWGRARRSSSSSGAEAESEPWVGRGGDRRLRPGLSPSPGVGRGGVRRLPGPRPSPSPGVG

SEQ ID NO: 58610 - protein, 201 aa, Zea mays
  Coding DNA Sequence Number=SeqID_15235
  Homolog annotation: Hit_ID=A3C4M6; Match level="QueryCoverage=40%, HitCoverage=13%, E-value=2e-38, Identity=93%"; Hit description =Putative uncharacterized protein
  Pfam annotation: Domain name=Nodulin-like; Domain location=120-201; Score=-99.1; E_value=4.1e-05; Accession=PF06813.4; Description =Nodulin-like
  Subcellular localization annotation: CTP_CleavageSite=59; ConfidenceScore=5.45e-01
MMNLQIRTRRVLSTPHARESLATTTRYARSQQPPPSSPKNSSSRLVGRRNPSCLQIHSVANLPMPPPPLPYLLLLLLGTHGQAPSEPTRAGLNSKQASDWAGHFLQVFGKALMAGTRWGLWLGLVTAVWVQCISGNNYTFSNYSHALKTLMGLTQLQLNGLSVAKDVGKAFGLLARLASDRVPTWILLAVGSLELRSLALG

SEQ ID NO: 58611 - protein, 769 aa, Zea mays
  Coding DNA Sequence Number=SeqID_15236
  Gene Ontology: Mol. function=catalytic activity; Cellular component =membrane; Biological process=regulation of transcription, DNA -dependent
  Homolog annotation: Hit_ID=Q75HI8; Match level="QueryCoverage=17%, HitCoverage=32%, E-value=1e-58, Identity=84%"; Hit description =Putative phosphatase
  Pfam annotation: Domain name=KH_1; Domain location=42-116; Score =38.2; E_value=3e-08; Accession=PF00013.20; Description=KH domain
  Pfam annotation: Domain name=KNOX1; Domain location=315-359; Score =58.0; E_value=3.2e-14; Accession=PF03790.4; Description=KNOX1 domain
  Pfam module annotation: Pfam domain module=KH_1::KNOX1; Domain location=42-116::315-359
MRQQTGKRPSQHREYEREERKDQHKRSFPRVQESSNNDGLVLYRILCPNSLIGSVIGKHGNVINAIRHQTSAKVKVVDPYPGADKRVTLVYCYVKHRDIDAEGDDNEPVCAAQDALLTASNVIGKSGVVIKHLRSTSRAFIKVSPKDPSDPTHSCAMSFDLFRRAQPVVLPSHSRHLAPRTRFRQSRSAHTPSAPDPDPATIIGATSPPAPNPDPVAPPSSSPVSPVRRLSSPSFPPPPCSVLAHARHRRRHTDPLLCPGASRLQQQTPQAAPERGRTRGSGLAASQGAGGGGSEEAAVASLPNPSSFSPGVGGEREKATIAAHPLYEPLLEAHVPCLRVATPVDQLPRIDAQIAARPPPLATAAGAATAGGPSGGEELDLFMVRLDPPTGSFLSHLLCSCALQLNCYRFADLGCGEFGIWDSRKGNRVMLFRTALAPMELYEDQSNDLTDGDKNQEANCSNVDDMYHGLTINSDSEIDSLPDPKDQAAALAALAGWVWAASFYDLTHRARALVQPWVTRQVHAETPAILRFQKLEHKMLDNFFSVLSCVVSVPFYTGFLPLLFWSGHDRLAGQMTLLMAFYDYLGNSVKDMVSAPRPCSLPIRRVTATEDEKENAMEYGLPSSHALNTVCLTGQSKDVVKALKKRIGHKNPKVQLLALTEDGWTTRPHPCKRVAPYREALLLAEKHQNLETDSDRSAAVVADAPPQQEMVAANRTGQPQLVVDEHKTILEEVPREENGTLSAANYAGNGSINDDDATLSAQQERDVQL

SEQ ID NO: 58612 - protein, 407 aa, Zea mays
  Coding DNA Sequence Number=SeqID_15237
  Homolog annotation: Hit_ID=Q5ZCV7; Match level="QueryCoverage=27%, HitCoverage=32%, E-value=2e-08, Identity=33%"; Hit description =Ribosomal protein-like
MDFLKGEDACRQLEALPFLDTLKHFRGALFYYQRMQRFFEETMIDLLNYEDNSCRYAIPANIQQRLINISTKEYISPGSPMDYKIFSHNNITYLESELFLKLITLSSGQLYREAGNSPSSLLVARFTDSSLLISPKTSGKERLPRSLPSLPVFFCKKTKESTLDEGTVPDRGSRTKQRRRICLVREESFLPDLLCPFTISPVTFLTVATLGLLRSVPPPLSTTKFVGHHSSPGNGTTKEELAGPFPCCRRPQSHPRGRDEPLGAPASCLLLQQRQPLDPLRQQRLGHLTGGHSTTIHPPARASPTTSTFSSLNTGSSPSFAELLHSSDGFMRYMVEEQPQNCSENEHLVGATSHVIQIDDKPDEIRKETRLIWKSDEDVRVMSAWLKHSIDSLSGNNKKEISIGRMW

SEQ ID NO: 58613 - protein, 124 aa, Zea mays
  Coding DNA Sequence Number=SeqID_15238
MYPVKQLQCTDTFLGISLSPDPDGVRAKRPPDKHSGLTEVVLSGSVTLLRSAAGCAGRCRLSWKKTPLSRLALDPEQCYGAKVTHLGAIVYDAEVHAALAQPVRRGADVAPSSAPRSMASSTVV

SEQ ID NO: 58614 - protein, 399 aa, Zea mays
  Coding DNA Sequence Number=SeqID_15239
  Gene Ontology: Mol. function=protein binding; Cellular component =nuclear speck; Biological process=mRNA processing
  Homolog annotation: Hit_ID=Q6BTJ4; Match level="QueryCoverage=54%, HitCoverage=29%, E-value=1e-13, Identity=31%"; Hit description =Similar to CA1621|CaIFF6 Candida albicans CaIFF6 unknown function
  Subcellular localization annotation: CTP_CleavageSite=8; ConfidenceScore=5.08e-01
MEAQAHTSCNRRAGCHVRATAPPLAPLPRLLDRGTSTTTRGNPARDTTVPARRIDHGLVGRGRRRDGRCGQKWVGNNGGGRRAEAAGPGKGIPQKGILLREGNGPRAPLLIRGSKAGPSEGFNNRLRALGLHAHYWSEDISETSGNDLVTESHQREASSPRTPSKRDRVRQITRRVRLTAAKPGPRCYGKLRFARPQGSDSGSAPKDDELRSARPQGSDSGSAPEDDELRSARPQGSGSGSALEDDELRFARPQGSDSGSAPEDDELRFARPQGSDSGSAPEDDELRSTRPQGSDSGSAPKDDELRFARPQGSDSALASADGLRLARPRGSDSTSALEDRLDLDLGGASTSPNPGLGPTTSQEASSLPYPKLTQATGNKTGVPSGSLRYTSNDGAPHAL

SEQ ID NO: 58615 - protein, 239 aa, Zea mays
  Coding DNA Sequence Number=SeqID_15240
MNKTPAFKVPSQTELRFRPRVYEQPPHRGACGATSSGRPANDLCSSSYGPRTDAATGRLSFTSPLKGREPYIKAKEPCGVRLFTNAAPANAGRSKAHRQVLAPVLATKARKRTECCILSGQQQFAFLGMAGGRLRRAGGWFPPPEAGRGGGQPTRAGGRAPAQPGLRPSKDDGWWSPSWVTTGEGMQPGRVMKILEAERWLKGTNFHEVAFLQRQGGRIAGVPHPGGSEGGKTRCIRER

SEQ ID NO: 58616 - protein, 174 aa, Zea mays
  Coding DNA Sequence Number=SeqID_15241
MARIVVGAINTLQPPPFKPSKHLTLFIQYKSKEYTPKTYSKPPILSKCQNQVKCSKVFSDLREGDFQRHLERRKDWRDQQGLAHENQLENHAMSGRMGSNRIASRQYATVAGGVHSPPPFSSIACGQGACAGSSVKPSHKMQPHRQPYLHRARKRHWQRVQSPCLRAAPRMVVD

SEQ ID NO: 58617 - protein, 158 aa, Zea mays
  Coding DNA Sequence Number=SeqID_15242
MRRSPSGRRGRRKPGRRLRHAGGDDARRRSAPRCLSPRRPQGQRAPPPPNAVGRGDPRTLAEGTGKGGYPERDPSPRRNRAPSPPLLIRGSKAGPPKGSTAASDRVGPTPTTGQGFEGQPPEGFHGRLSYSGSAPITDQGFESWPPKGSQSPQTPSEG

SEQ ID NO: 58618 - protein, 473 aa, Zea mays
  Coding DNA Sequence Number=SeqID_15243
  Gene Ontology: Mol. function=saccharopine dehydrogenase (NAD+, L -glutamate-forming) activity; Cellular component=mitochondrial membrane; Biological process=metabolic process
  Homolog annotation: Hit_ID=A2YNC3; Match level="QueryCoverage=93%, HitCoverage=96%, E-value=1e-156, Identity=64%"; Hit description =Putative uncharacterized protein
  Pfam annotation: Domain name=Saccharop_dh; Domain location=11-446; Score=50.9; E_value=4.5e-12; Accession=PF03435.9; Description =Saccharopine dehydrogenase
MAPPEPEMFDVVIFGASGFTGKYVIREALKFLNASSSASPLRSLAVAGRSRDRIAAALRWAAAPAPPPEDVPILVADTSDPASLAALASRARVVLSCAGPFRLHGHAVAAACAAAGADCLDISGEPEFMERVESELHEPAARSGSLIISACGFDSVPAELGFLFHSRQWEPPSAPATVEAYVSLQSTKRIVGNIGTYESAVLGVANAGQLQALRRSRPRRPRPNIPGPPPPKGSLIEGHNPLGMWAMKLPSADTVVVKRTLSTLTEHPEGLPGAEETPEYADHRKKLWSSVKPAHFGVKIASRSLLILVRFIFTGIFIGLLANFSFGRSLLLKYPEFFSAGLFSRAGPTEEEVKSASFKMWFVGHGYSNVDSSLELGRSKPDKEVITKVSGPEVGYVTTPIVLVQCALVLLSQRANLPKGGVYTPGTVFGPTDLQQRLQDNGLSFERGSYGLQCAMPDSACCGRKDAIRATQT

SEQ ID NO: 58619 - protein, 95 aa, Zea mays
  Coding DNA Sequence Number=SeqID_15244
MEQADRGPSRGSSGACRGAWPGATAGAAMEAERAQQLEAELGKSRSQGRKSAGAPAVELHDILIMISSYNKKFDSTCDTVRFNPKSDKLTCGLNI

SEQ ID NO: 58620 - protein, 785 aa, Zea mays
  Coding DNA Sequence Number=SeqID_15245
  Gene Ontology: Mol. function=RNA methyltransferase activity; Cellular component=membrane; Biological process=RNA processing
  Homolog annotation: Hit_ID=A2YNC6; Match level="QueryCoverage=18%, HitCoverage=44%, E-value=1e-53, Identity=76%"; Hit description =Putative uncharacterized protein
MEAAMQTILVGMAHMEFRLTAALAGSGGEQASTSSSFASLFGSFESESAPPPVLYDCYDEPNDDEIAEVLALLEYNEGTSSATVLVDCNTTSKSPTKCSTMEFSDADSSARTRAVTYDEPSFHRFIPPPFRAGETNEEEDSSAEEAMAAMGAAASPSPFLLTVGNLLLPYLALPPTHAAVVDEPYRDAKAARALAETDKAKGCATMEAAAAVQKLAESAVPLHLTTELVQRGPVDIEANSYSVLDDAAPSLAPSILQLAVHAEEEQVLVTTPTKCSTMDLNRGAYSVPNLPVKPQFFDVGKDCNWARGIRRTEIQLADGKNCELHRCWTDILDAISKAQHLIYITGWLTILVRDDINSVDLLTKEGLLTTHDVEIAKGEQEIMNEVLPAESRSSRFGVAMDLADIWPCYESKPSDAQGYAIKGIPNLRNTCYRSAVLQCLLMLGKLLERILPSTWTKVGAGWRRVTGPERPRLYDLRPRSGPSVAAAGVAKVPRLVGARNKKMASLCSPTSHHGLSAAANTRPHREAGGNEMVPVRFCTSNPPCKLAGLAQKDLRKLACYASATVRFSAFCSCPNPEAEAPRPQTSQATPVMATKALSVSSLTSTAFASFSLPRPRRPSPSPPLLRLLGPRPRASTLSAAAPDDEDGVDTVEQLLHPRPPETSAPAGSRGRIDRLMKLQRRADGDAVPGGRRRWFPYLDAFRPAAGGAELSSGEVIDVLEPHILEARRDRIRQAVGNRSYAVCLVVEGLSDFGNVSAAFRSADALGVQSVHVISCDSSKRCRGEE

SEQ ID NO: 58621 - protein, 520 aa, Zea mays
  Coding DNA Sequence Number=SeqID_15246
  Subcellular localization annotation: CTP_CleavageSite=66; ConfidenceScore=5.07e-01
MGEGLRSNRRLTGGLPPPALTATTTTPAPGGRTATAQASGWVVLQSCPRPHRRSRGEDKYKEPEARSANGGGDPIGDRDFSSRLHLGTDDRGCQPSSRSPLRSSRTSGRASPTPNTPSLESQAHVSCNRRAECFVHATAPPLAPSPRLLDCGTNTATQGDPAHDPAAPAWRGGRCSQKWAGSNDGGRRAGAAVTPRSGRRFAFAIMTASVKGPGKGDTPKRILPREGTRLRASLLIRGSKAGPPEGFDSRLRSRGPYTHYWSEVRRPAPQKGSTAASGHSGSAPITDQGFEGWPPKGDRVRQITRRYFWACLWAPSRPLTNGARTSTRITRLQLTGDTMFGVHRGQHGALPPSSLRKGDAGAYVKKPSLSLIALSPCAEARGCSRKPGSGRTVDSVNIPARELGTRPYTRATASSHEGTTRPAEALREALRPRRSETTPPRPRGLHPAGALARTHRNKTQPRKAGPLAKKCDESLQASANTPFEARGLLSGTKIRGTLKAPNSQLVTPISIKLQRPDGCD

SEQ ID NO: 58622 - protein, 82 aa, Zea mays
  Coding DNA Sequence Number=SeqID_15247
  Homolog annotation: Hit_ID=A7P2T8; Match level="QueryCoverage=62%, HitCoverage=15%, E-value=2e-10, Identity=58%"; Hit description =Chromosome chr1 scaffold_5, whole genome shotgun sequence
MNNESSEIIQILNAKFNDIATNLGLDLYLVHLRASIDKVNELVYDAINNNLSGTIIRGTLKAPNSQLVTPISIKLQRPDGCD

SEQ ID NO: 58623 - protein, 123 aa, Zea mays
  Coding DNA Sequence Number=SeqID_15248
MAGRAEGRGGRAPRAGAGAGAGAVSRGGRAGAERRREGPSAAARGRAGERCRGGQPGGADRCRGREARRGSAARGGRAFPRRRTEGSGRWLRRRAEEACRGPRRGCRARVVPPGRPAGVDRRR

SEQ ID NO: 58624 - protein, 57 aa, Zea mays
  Coding DNA Sequence Number=SeqID_15249
MESHDLRAEWESRLVGGYEIDDSGYDYGAGCQHCNLCSGEDEAVEGDFQEFQDYDEF

SEQ ID NO: 58625 - protein, 115 aa, Zea mays
  Coding DNA Sequence Number=SeqID_15250
MAQSMSLIQAVVGPSVDPGRGRGTRWLWIRLVVGVEGEGEHHFLPTPSSMSVASAVDLVIIHALVVGRLARMTQFHLLDPFYDESHRGHLLSEGQDLAALRSRTHNGFLDMVFDN

SEQ ID NO: 58626 - protein, 379 aa, Zea mays
  Coding DNA Sequence Number=SeqID_15251
RAEVRAEPEGAPDSLQDLSDDRWRCSSRYFAGTPDSPVRHQTLSGATPDSPVNYSGAAPRIPEAFPWGSGPTVDTLEYIVSSDHVAALEPPMWVPIVAPGPASGEETSLQVGPKLDWQLARCFCALAGEPAPMEDDSWARAPMPETGLLVSAEVKRRTTAGGGLLLTRRFAFSTHGGRSPRSMTHGPGPPVPEAGSLLSVEMKRRTTAGDGVLLTQRASVGESLFKKGTPPSAVAILITHSALSPLSSLRSSAIVAAMVLLDPPEPLQPEVALNLVRNLLGWGVPAFAGRIRVGASPYGDLAAEEFVLFVSNLPSGLALPILLFFVLLLEELVLQPERFTPCFILQAAIITYLCKMSVGATLLPASSSSIRRKGCSPAL

SEQ ID NO: 58627 - protein, 474 aa, Zea mays
  Coding DNA Sequence Number=SeqID_15252
STQLTPNARGGPWRSMSGQRLRMVVKPVCGGLRQTLLSALAEKENWTQDCTVWIVHVYAEDRKDLKEVVELVPCARNKWGNWWDFWFYVSEGEVKDHPGLPVAVMCSHYYVAYPQFEVAEDDEDEGALRSAARMSSDRDLVEEFIGYGVWPLAHGWALGEVCPREMPSLGGQRVRSSAFALDLHGRDPVAFVREAEDGVARIVGRYVPRTEGLRSWDIRGSNVRLNRVFELNCLPYGGYPGEDAADHAGRNWWTPRGKDVFARAPGVFDTNVGVMERDRQDAAQKRRAVVRIADPMREAKRAQRSAKAAASGGSKPALAVKPAAPLPSKASASAKATAFGGSKPPLGGLVKGRRPPSPARRVADFGTDISVEDYLVGKLKLLFLLDEVFNKYHGAGSGEGQLIVVPPPVTTTLPTAVAGAKGAAWDPWATFCASGEILSAAAAKDVAGSMSQRLREASQQLSQQLKQAADFADL

SEQ ID NO: 58628 - protein, 152 aa, Zea mays
  Coding DNA Sequence Number=SeqID_15253
MSGSLRSSGGESEEGKASKEKEQGGVASGSRGGHRTDRIECWMGQRGSRDAREDMGARNRSETHWIARSTRSGGRPKSGEVDLGPPVKSGRVRGLGKLHGLLAELAEALARLEDGWSGLATVAEALAAMVGGIELAGAKERGLAGEGECGAK

SEQ ID NO: 58629 - protein, 120 aa, Zea mays
  Coding DNA Sequence Number=SeqID_15254
MEAEKTDLRRQLVEERREANKAIADAQAAQAEAKVARGEGSLARQRAEELEARFNTLRSRVDKAETSTRVEVERTHVQFVDAYRELGARTADFEVPGQEAGLRFLEWLQEELLVLPTIVT

SEQ ID NO: 58630 - protein, 176 aa, Zea mays
  Coding DNA Sequence Number=SeqID_15255
MAFSEFFQIWDLVREVRLLSDVPDQHIWTPSSSGSYSSKSAYDRFMMGKLQVGLPGAPGLAAYGEEAKTSPCRCSAVFGDVGCLSVANIEDGAGLRRGGSPPEAVTEPAPGFVDVCDTVEGVASCGIRGEQVQVIADEWVKMNYTINRIWSFTKETEKRVEGLYSDLMKESCASLN

SEQ ID NO: 58631 - protein, 190 aa, Zea mays
  Coding DNA Sequence Number=SeqID_15256
  Homolog annotation: Hit_ID=Q6J9V9; Match level="QueryCoverage=63%, HitCoverage=41%, E-value=3e-51, Identity=82%"; Hit description =Putative uncharacterized protein
MRVTQQCPLSATITGHSAAEIDTTVNMIRGGPTVIAATGVRKQRSNHLQGKLHLRQAKRAPFHLCHDDRIKKGTGKGDIVKRILLGEGNGPRALLLIRGSKVAPSRVRQPPQSTRAPSPLLIRGSKAGPLEGFDNCPRAHRVRDDPGYIRYMVEARAMLPRYPRTFPRPAGTICNGIPPEGSTEPSDPIE

SEQ ID NO: 58632 - protein, 82 aa, Zea mays
  Coding DNA Sequence Number=SeqID_15257
MDSWLGAVIIGAELLCAGANNIGAHTSDGGVTWDLRGMYLGAIDLGAEVDKSEDHDTYRQRYWMCANFAFEPTIVQRRMNLM

SEQ ID NO: 58633 - protein, 178 aa, Zea mays
  Coding DNA Sequence Number=SeqID_15258
MAPKRANSKATPSVDEAAKAALLAEKKGKALADNTHQGAGEDEAHSKRQRNDQHTPEGTLRTCSSEGQPQVPPPGFAPPEGEDAAEDGEVLGVSAEEQLQLRTLRLKNRNLQKQKDILEAKHQRVSTQAKVRQMIRDEEQRAQELEQEIALMQREGQHDLQHGPPLQQRALVGDLFVP

SEQ ID NO: 58634 - protein, 85 aa, Zea mays
  Coding DNA Sequence Number=SeqID_15259
MGWDDGETGFMGRERGWRLAVPGLERRATARDGAAGENLRPPADPATDHCDPVVAASEPQGFVPTLVVGIIRVVCIPELQVNPLD

SEQ ID NO: 58635 - protein, 143 aa, Zea mays
  Coding DNA Sequence Number=SeqID_15260
MARCGPRWCCSSGEESVRHRGPNATITATDGSVRTQPRTPADQRRRRNGMSTAHERDRDSGFVPQGMRREWTSGGERICLGSDDSVLKYPRAGPRARTSYPEISGQGVRVAPVVQETRVSLLGRSDMWFPGAATEESVDHRGW

SEQ ID NO: 58636 - protein, 83 aa, Zea mays
  Coding DNA Sequence Number=SeqID_15261
MKFTSGGAPSLVWRPALLVPGGSIEGVGAQDWGNQSYKVGIERLYHSSWLYGLDVIVDITPQPITLDQRSKSNMYHKNKHSNT

SEQ ID NO: 58637 - protein, 212 aa, Zea mays
  Coding DNA Sequence Number=SeqID_15262
MRKTLMKMLMSTESSDALTPFYPVVVEEVPIELHPLQVRNDVILEDSSKEILATPTLLSEFHAFVAGPSSSAPPVLVAQVPAPGGDDLDDSGDDEDEEEEENNDNIVDANNEQEDNFVGLWPVAEHYTSMFETGHFPNLLHDVLHALGTYVRPLYYTRRVSEPPQACYYITRVHSRVLDAGDRGFRTLSSHESLTPLSTYTASVSNAARRAL

SEQ ID NO: 58638 - protein, 123 aa, Zea mays
  Coding DNA Sequence Number=SeqID_15263
MAQGGPAAETLQRQEIHSAPWLGTGKSARGSRHGSRSSEFTARHGFIALPWNLISRTSASSKLYSEVVCAESARLLRYCRGRRTVCTPGAEEVRFQVQFSAAKFRHDAREAQDSLRPKEIELI

SEQ ID NO: 58639 - protein, 17 aa, Zea mays
  Coding DNA Sequence Number=SeqID_15264
MASAVALYSAAAWACRG

SEQ ID NO: 58640 - protein, 255 aa, Zea mays
  Coding DNA Sequence Number=SeqID_15265
MPGRANCCCPARMQHSVLCPRFRGEDGSEDLPVRFGAACARWCGVGGQADAAVGADVVAAGESFSAVEAVSAAYGPTSGSLALIACPRPLSGDVGEGLMAAASALRSSLLLFGRSEQRSLSLLLFGQWNPQPFFDEPEPEATVSVVAGRAVCSGRVPGGDPGGDGPGAELTSSFGAEILRPCCRPRLGRTSPKVELTPRVLLLPLHRRLSLQDRFACNLALTVGQLVRPGLQNLGDDERPFPGRRELVPPSGILS

SEQ ID NO: 58641 - protein, 159 aa, Zea mays
  Coding DNA Sequence Number=SeqID_15266
  Subcellular localization annotation: CTP_CleavageSite=64; ConfidenceScore=5.30e-01
MQAACNRTKGAHPSDFDTSSMEAQAHTSCGRKQRSSRQQAHVPSWDSKRALSHGVKTTRPCSVPRMARACTTAAPRTTRPVALTLRQDRRHLWQAKQATLHLCHNDRVKKGTRKGDTPKGILLREGSGPRAPLLMRGSKAGPSKGFNSHLRAPGLRAHY

SEQ ID NO: 58642 - protein, 143 aa, Zea mays
  Coding DNA Sequence Number=SeqID_15267
  Homolog annotation: Hit_ID=A2XFR6; Match level="QueryCoverage=93%, HitCoverage=41%, E-value=5e-25, Identity=44%"; Hit description =Putative uncharacterized protein
MDAGDRGFRTLSAHESLTPLSTYAASVSDAARRTLWSLSHTYRQQLHDTRFRHLPLRLSGGSQTSIVPGGASVVAGLNTDLDSATLDLSRVHLELEDAHARIADLEALLQGRDPPEAQVPAMALSPPRKRIRYGEPGSITRQL

SEQ ID NO: 58643 - protein, 62 aa, Zea mays
  Coding DNA Sequence Number=SeqID_15268
MTRTEFGRAVEGDRLDMRAPDDSESEMCPRAASVAVPEDDDTGPLVGAKMLLGRAEEEASWA

SEQ ID NO: 58644 - protein, 60 aa, Zea mays
  Coding DNA Sequence Number=SeqID_15269
MPSGGGGGGDQDERKTGRVKLNGTRIVGGEPTDRKKIVSDVRGYENVVEVERSKEYQGTY

SEQ ID NO: 58645 - protein, 84 aa, Zea mays
  Coding DNA Sequence Number=SeqID_15270
MHDFLLALELCGYSGWLLGQEGEVPGCSDAGTDFLPASCSDGAAAAAEGTASGIAAGANTDAGAIIMALSIKCWKVGKVWFLNW

SEQ ID NO: 58646 - protein, 278 aa, Zea mays
  Coding DNA Sequence Number=SeqID_15271
  Homolog annotation: Hit_ID=Q6QP51; Match level="QueryCoverage=15%, HitCoverage=20%, E-value=2e-13, Identity=81%"; Hit description =Putative growth-regulating factor 1
MAKNFGSETVQIAMNAVVTSHLLVCLYSAAALESKSPTLPQLEDAAGGPHRHANSPFPRRQGKRLHGEEMGPQIPVGVNPQKPFANCREDGCLRDGVRAEIVQLHPVEMQNRPHEATCWHFKPPLMERDETQHIPRRRGQGGSARRGHPLRLRVTGEGTKQTIGNKGLQIVRRDGGERPRVARRNDGYPVDHHQAKEVAAERTRDLERGYSERDPSPRRKRAPSPPTEQRFEGWPLGRVRQPHQSTRAPRPLLVRGSKTGPSEGFDSRLRPLGLHAHY

SEQ ID NO: 58647 - protein, 315 aa, Zea mays
  Coding DNA Sequence Number=SeqID_15272
MGLGVCGSLCQAWVRPLGRSAVAMRLMVLGFDSGNVLFEQCVMMSMLCNCCMARLRHTARKSVIPFLPSRLVERPLRRPVVGQSSHLERQHHRLHEEQERQRQEHQGSCFSLQQEIESVRSCSPVLPLEAPHAPPLDAPVPGVAAGGDPDDGGGDDSSSHDTDFSADQEPEGWVARPITRDAARGCHFHDALDTLLRRALDRRTWSIEYRCVIYQHSRGVHPDCWETTCLVRRPENSLWGAKMSENRHRGGRRAQQEEVPQQATTAPAPDVHRANVPNADSGSSSHRSDSGRHSAAAAIATTSTSDASDAQRQVC

SEQ ID NO: 58648 - protein, 210 aa, Zea mays
  Coding DNA Sequence Number=SeqID_15273
  Gene Ontology: Mol. function=oxidoreductase activity, acting on single donors with incorporation of molecular oxygen, incorporation of two atoms of oxygen; Cellular component=intracellular; Biological process=response ...
  Gene Ontology: Biological process=to salicylic acid stimulus
  Homolog annotation: Hit_ID=A2ZK42; Match level="QueryCoverage=47%, HitCoverage=21%, E-value=1e-31, Identity=72%"; Hit description =Putative uncharacterized protein
  Pfam annotation: Domain name=An_peroxidase; Domain location=1-209; Score=-327.3; E_value=0.0027; Accession=PF03098.6; Description =Animal haem peroxidase
MTGKDKDYRYMATSDLLSELNKESFKADQDLEPKLTIIVQQLEDASGDVSGLAVKCWVGVSILQALFVKEHNAVCDAIKDEHPNLSDEELYRYARLVTSVVIAKVHTVDWTVELLKTKTMRAGMRANCIDIGELVGLKGEERLSKIGFEKKILSMGYQACGALELWNYPSFFRDLIPQNLDRTNRSDRIDLAALEGMKFGPNLYHISRGS

SEQ ID NO: 58649 - protein, 1536 aa, Zea mays
  Coding DNA Sequence Number=SeqID_15274
  Homolog annotation: Hit_ID=A2YHZ9; Match level="QueryCoverage=99%, HitCoverage=88%, E-value=0.0, Identity=54%"; Hit description =Putative uncharacterized protein
  Pfam annotation: Domain name=GYF; Domain location=482-537; Score =51.7; E_value=2.5e-12; Accession=PF02213.7; Description=GYF domain
MAATPDRANADLRHGLSVDTPLPPQIARGLVNAYSFDLCTEEKQGLDTEIPLSPQWLMKVGENKDPVSHGIRSDVSKTSGAGEDQGYNTKKKDVFRASVLDGETGRRDRWRDDEREPNSTHRWSRWRETDKEHGDARKAERWSDDTSKHSVDGRRVPQERWGDSNNKDGSYDQRRENKWTARWGSNDKESENWRDRWGDSGKEGDAYREKGLSHHGKDANSYEKDDNISRSWKPSYSAGRGRGDLPNYTSQTLPKSPAPSGYGRGKLDNDFAKFPNSRGKFTSGTSAISSGSSRPFHLGLLSDRPGGISDRSAFRYSRLKLLDIYRNCDVTDFKLSVDCLEELSVFMQEDVLEPLALSAPVAEEATILKAIDKGDIVNSGVHQASKDGSVGKAGREDQPGGVEVSGLAGNTDLAARGEPMHPATSTYVVPQRSQFIGEHKLGPSEFGHQIPNFLNQESKTVGMLGFDNFASPVHSHPNPENLSLYYKDPQGQIQGPFSGADIIGWFETGYFGIDLLVRPVNAPHDVPFLMLGDVMPHLRAKVRPPPGFATSKPSDMLAPETLPTGKFVSSSMQAGSTGIGIFDSGPIRKDNAVEAQNRFLESLMSNSARNPSAGTISITGGMNELVSTSFGNISVRGGESGVNLNYLLAQKGLLERQNSLQNPVSYWTGDAPASKVHPMADTSRQSLQSQNVDLLAMLQPKEKPQVPTGNSGLPLCSNYPEASIVNPNLHSGDLAQGALNMRQDMQNSQNIGIGVQQHNLMPQNRPALAQLPSEKLAEMSQDPQLLNMIRQDLQNSQNIGIGFQQHNLMPQNRPALAQLPPEKLAEISQDPQMLNMLQQQYLLSQLQLQSQTPFTPQPPLSMLDKMLLLKQQQQQQQLQQQQQQLQQQLEQQQKLLLQQQLLSQMVPHAHPNQHTDDSYALKYTSVPSDDSTSLGFRRMQEAIEVDQKFSVHGMQVGQQPSQSIMNFRNMDGIALLQNPVTALPVPHETAVGALPKEDHSRPGMSEDFANVDLQLKSTMVHSKLVEVADRNEGFKSHEVDTAAEKNKMSEKELNSGSTIIMGSASDEAKNLHEPPLDPKSENLSSDISGQVQESNLSAEDTPPGITAAVATEVKVTDTQETKKAEKKRKQKKKQAAADAGKGTSKAVVAQQQRQETEVDNSDIGGNKHDLTDDTEELFWGSPIRVQNEILPSKSFPEEHDADKAESQFSSLSSDPHSMASQRAWKQPTQGLRPKSLLEIQAEEQLRAQKGLTTETAKPAASVPSISWSGMSISSEQHYGGSNISLGSMESAVERNKRSQLHDLLAEEVLARSSIADNENNANDAFFSPLSPAAVQADAPALDDNDFIEAKDKKNKKRSAKTKASTVKAPSPVVSFDPPAISMPSEKGKSAKQAQQELEILPAPPSGPSFGDFVLWKSDQTSSVPAPAWSNDSAKVQKPLSLRDIQREQERRTASIQQQAPSPTPAKVAPNQRSHVNASSWQASGPPPSQAVAPVQMSSNAPSHSRSSAEDDLFWGPSEHSKQDTKQYVLQQLLHLN

SEQ ID NO: 58650 - protein, 20 aa, Zea mays
  Coding DNA Sequence Number=SeqID_15275
MWPEKMIYSKVSTGMCRLRI

SEQ ID NO: 58651 - protein, 154 aa, Zea mays
  Coding DNA Sequence Number=SeqID_15276
MGQRTLAFTKLLIRDFLCNFLGKHRLPVVYVKGTGGGRSTAKRLGGGAKGLRRAIKRDRGQYKGREGAGEVPYLKADSGDPLMATETRRQPESTVADLGGCAENGGERGQRKLEGGRGNWGVSRVADVEAKLTVAEGTAGLRRRRRNGLGTAAV

SEQ ID NO: 58652 - protein, 19 aa, Zea mays
  Coding DNA Sequence Number=SeqID_15277
MAIFGKMGVLWPLVIDQRL

SEQ ID NO: 58653 - protein, 94 aa, Zea mays
  Coding DNA Sequence Number=SeqID_15278
MGLLCGLGFRARRVDGVEDTRMNPTVPSAPGLEILVCEKVMIIPDRSFLENSPVRGPYWPFWRTIRDTKPLMCRGGPSEPEAQIVRGWQNKGNN

SEQ ID NO: 58654 - protein, 195 aa, Zea mays
  Coding DNA Sequence Number=SeqID_15279
MGSTLVSISAKTESLMIEKPYLDSHITSIPLRVFSLVGWFRKKKNKTEVREDSVLHLGSFAFSFSGGVCASQTGETFLVRSDLWVVDAAIRYLQDQLAKRDLALDWMVNSRLLAWAKEAKARAHVEELSLAMDNVQVYYNTLHEEVHVLYSQLHPNVPADPIGMETGPSHVAGEALDGELDLFRPPLPSMKLVDE

SEQ ID NO: 58655 - protein, 441 aa, Zea mays
  Coding DNA Sequence Number=SeqID_15280
  Gene Ontology: Mol. function=kinase activity; Cellular component =cytoplasm; Biological process=phosphatidylethanolamine biosynthetic process
  Homolog annotation: Hit_ID=Q69QD7; Match level="QueryCoverage=78%, HitCoverage=90%, E-value=1e-159, Identity=79%"; Hit description =Putative ethanolamine kinase 1
  Pfam annotation: Domain name=APH; Domain location=128-360; Score =70.1; E_value=7.2e-18; Accession=PF01636.14; Description =Phosphotransferase enzyme family
  Pfam annotation: Domain name=Choline_kinase; Domain location=151-352; Score=260.4; E_value=3.9e-75; Accession=PF01633.11; Description =Cholineethanolamine kinase
  Pfam module annotation: Pfam domain module=APH::Choline_kinase; Domain location=128-360::151-352
MGSEGRVWNGAGVAAGSGYGGSVEAKATTAAPADVPTSAASVDISLPLPEMSPHIMQVPPPTLLSLFDPLASARTSGWSRAAVRLSAARVMFEHSRARGASYPCPRTSRGLCKELVKGWSSIDSSRFSIETVSGGITNLLLKVSVKGNNGNDSSVTVRLYGPNTDLVIDRKRELQAIPYLSAAGFGARLLGMFENGVVQSFIYARTLSPADMKEPKIAAEIAKELRKFHQVDIPGSKEPQLWNDIFKFLKKAAALKFEDNEQQKRYVKISFTEIQDEVKELKDLLDILHAPVVYAHNDLLSGNLMLNDLEGKLYFIDFEYGSYSYRGYDIANHFNEYAGFDCDFNLYPDKDAQYHFFRNYLHPDRPSEVQAQDMEVLYVETNTFRLASHIYWALWALIQAKVSPIDFDYLGYFFLRYGEYKKQRDSCFALAQSFLSGLRNG

SEQ ID NO: 58656 - protein, 454 aa, Zea mays
  Coding DNA Sequence Number=SeqID_15281
  Homolog annotation: Hit_ID=Q69QD6; Match level="QueryCoverage=13%, HitCoverage=17%, E-value=5e-07, Identity=52%"; Hit description =Putative uncharacterized protein P0556H01.14
MYAAVVAIRFACPTKTSAQVKLLPYLPGSDQSKSKRPDPDDELLLYSHPTNVQIHEPACCPRGKPGARARVRAVVMMATHHDALWVKLHELELQLAAYKLLRAARGDDHAGAVGFASADGADTPGGSACRGRQYDAYMRQRDARRVAALAQQQQQPPHPANNKAQRPRGVRATPMSPRALRCATRNVQEAGATPRLAVTPVKRTPAASIPSTPRRDGAALPRSRTASGGGGTAGSPARSSHHQRRSSLGVLAEFGECATPRPFLKRGTGTGGAAAPVRLRTTRVYDLPSIDVAVTPRPLPHVHAHTHAHAPRHVRSLSELPFDTAALASPQSRARRRWGSPERPAAMFSAAAAAAADSHRDLSKGLKKLLSYVRKGGRSGGGGGGDQPFPAPSPRGSGKPVSKGWSGCSRVDVPFDRASLDVMWFDEPEHHRSLHFPVPPCLLVRNRVQRLAPN

SEQ ID NO: 58657 - protein, 50 aa, Zea mays
  Coding DNA Sequence Number=SeqID_15282
MRDEVARSDDLVTGLRPVTYGMKAITAKASSEGWRLRLRPNICPPRDQFD

SEQ ID NO: 58658 - protein, 115 aa, Zea mays
  Coding DNA Sequence Number=SeqID_15283
AGLSFCQTGQWSGGVTAVTLALPGARVRMKLYADGGYQLRIRRLEAPEPLHRARGRSGTDSTFYIRPYVAFPQGGGGECAMLPSMGTEHGVSGELQAVSEATVNPSGASLRTPDQ

SEQ ID NO: 58659 - protein, 77 aa, Zea mays
  Coding DNA Sequence Number=SeqID_15284
MVHRDTGYRGQPRLKGLPGGQTSRALPPLAERKSKIKTHRGKTKQRRIGLTPQSHLDYLDQGVKYPLGLPPLLGPGP

SEQ ID NO: 58660 - protein, 106 aa, Zea mays
  Coding DNA Sequence Number=SeqID_15285
MAGLWSRGHAQEEQQGGRWEEPQRRGRRSRGANLLLAMEGASTMERKGAVLPVAGVGNPGRKMAWRALENREGRHGCWGRHGSLELGSLRAGCCAVKKKRQGSCGG

SEQ ID NO: 58661 - protein, 105 aa, Zea mays
  Coding DNA Sequence Number=SeqID_15286
MHQGSLCKGYVVYPWPFTLVVKIRCDNDDECVSQLELKEMMRVMTEAFKKYQDSAATSYEQLERQVAELVTHMDVVEARPPAPNPTLAHSPVDDDDDDDDVYAPL

SEQ ID NO: 58662 - protein, 239 aa, Zea mays
  Coding DNA Sequence Number=SeqID_15287
MVENRRYLLVDGRWGSRIGDGLLRYLRYEANAQQVLHESAGIISPLGVDTSRGNDIRRCLGCEDNARHVPRWGAGVADSLDSRRGAASCLAAVAPSPPHAARRVAGKTRMLLFRHGGKTSSSSPPPGELTTIFVAVALRGEEYHVIAAVEGHELETPEAEHRPGLKRLLKTTHLELNGKLFVNMQQAPTRRANCRRFGPRGSPCPGGWHNSRSRVSGAVFLSDRSVKGRSDCGHFDLAD

SEQ ID NO: 58663 - protein, 97 aa, Zea mays
  Coding DNA Sequence Number=SeqID_15288
MNVCELTLAVSHTPQVKTRTPVIYNVVTFDPVPLYIICVRLGPSIPGVYVNPGFWTPKIRCFHLDSYCKGERLQVVEIPRKRERVKKEEHCGIQVDH

SEQ ID NO: 58664 - protein, 237 aa, Zea mays
  Coding DNA Sequence Number=SeqID_15289
  Gene Ontology: Mol. function=transferase activity
  Homolog annotation: Hit_ID=Q6QP44; Match level="QueryCoverage=24%, HitCoverage=7%, E-value=5e-15, Identity=69%"; Hit description =Putative aminoalcoholphosphotransferase
WRFSSSSEHKNKNRYILALKGQMQLQAGAVDSQLTFLLAPLEQLVVGSFGAAMDKSPRSIPIGSGPARGDKRKDVAEVADGIRRTGIVDTSNIDYGTSRIRPRHRLCRTHDPAQRYNRVWDGLLDAIRQMQLSADELRKLTRRNHVPEYYDMVHKNCLVNAMSDVTEIAKGLDSMSRDLEEVLIGPQPLLEDYEALGMYDDFKTDVHCDCTEQCGSDEDNSSFDSDEIPDRRMKGPI

SEQ ID NO: 58665 - protein, 101 aa, Zea mays
  Coding DNA Sequence Number=SeqID_15290
KRRPRKNTTKNWFPTQQEPDSNQQEPDSNQQLVGMVASTVQLPAVEEASTVQEPVNNIPSSSLPIIEEASTIQLSTTEWAPPRRLRTAVNKKLTPKKKIYF

SEQ ID NO: 58666 - protein, 81 aa, Zea mays
  Coding DNA Sequence Number=SeqID_15291
MEEDNLQGEHLVDYGGNPKPYPRSQTVRPLAADRSRLCSEHRRRFPRSDWRPKKAPTVGDGTHTVDSLTLLLCFVVLFRVL

SEQ ID NO: 58667 - protein, 143 aa, Zea mays
  Coding DNA Sequence Number=SeqID_15292
MALSPLLLAKRRRRGGSAPVLASKDGLRLARPQGSDSTSTSDDELRLARPQARTQPWLQKTTNSASPDPRARTQPWLRKTTNSASPDPGLGLSLGLGRRTRPQPRRSLRLARPRARTDHVTGRAIITLSLASSGYGEQDRRPI

SEQ ID NO: 58668 - protein, 490 aa, Zea mays
  Coding DNA Sequence Number=SeqID_15293
MHRILPPSEPPDGEHSRRFRLAVFGGTQLRGSWYLSAIARLQGFSSGGPAASPRRWSPKTVTTSLMVGRSKSGCDLCPALSFKDLHHPGWGGGRTEPELYLPRGFVGHLLPQHSGERALTGLAGGSDFDNAGLVGGERRQLQRVGLTGSAGSGSAPGAPSRCESGCRAACTGGPPKTSRAARAAFVFLDCPAFAPMASVAGAEVVAAKEVLVADGIIATTRAPGLRLFGFDSLSSPLEWGRGRGARCSSVRPEVIAAIVWPPGAEVVVAAAGAGVGEPPGASSPRRPSNVGGCSYLRGQNRSSICNGTLSVGACSLWLSGPEHESLGSVGLAARGFSCLVKGTLGCSAVSRSRGQRCPRGQRQSWLEKKTSSAGAWPGHPLAGPAPESGCRGHEPGWRGADVVLRSGDPSPVLPSEARSDFAEGGVDAEERFPSIKTCSVSGIAYPSVSYLSQKVMSEDPTFEVVKKHERRSGRKTFSEENFDAEGVPPF

SEQ ID NO: 58669 - protein, 95 aa, Zea mays
  Coding DNA Sequence Number=SeqID_15294
MESVLHSSSVYPELKQLHQSPSSFGFSTFGIVILYTTKHYKVEVRPVYNFSVRATSLHKSYICAARSHQGTEVTMPSYNFIKRLNFALNMFESAW

SEQ ID NO: 58670 - protein, 63 aa, Zea mays
  Coding DNA Sequence Number=SeqID_15295
MAPKRATSKATASIDDAAKAALLAEKKGKALADNTPQEAFEDDAVACQTNLEAKPHARIQAID

SEQ ID NO: 58671 - protein, 70 aa, Zea mays
  Coding DNA Sequence Number=SeqID_15296
MILSTGCPLKVPEGAGTVKVREGKICRALEPLCLRVVAAIIGAAGDAIVHAMFVEVNHKIREYHCRLFLN

SEQ ID NO: 58672 - protein, 69 aa, Zea mays
  Coding DNA Sequence Number=SeqID_15297
MGRWKWLQRRVLGARAQRRPSEGHTTMTPSEVGVTAVDFPRHDGGGLPLARVVADPRGEAAVPTAVALF

SEQ ID NO: 58673 - protein, 102 aa, Zea mays
  Coding DNA Sequence Number=SeqID_15298
MELLNKSYPTKEKTLKGMLVMWESRVSRKVIKFKEGNARIVLSSNSYHLMQQASEKDFKNIKGGGKCTRACLRSQVSLARIHKYQSRSSCLPENPMVVVSSL

SEQ ID NO: 58674 - protein, 147 aa, Zea mays
  Coding DNA Sequence Number=SeqID_15299
MDRGGVGSKRGFVGPGAGAVLTSSFEVKILLPVSSSEAGPDPVESGNNAEGAVVPSVDDLFVGSRIVYPSESYFSRKVMSEESLGSVGLAAYVYSVVLRIPLSKQSKSAKDVLAERLFPRKILTQRGFPLLAPEGGSGFTEARLTLP

SEQ ID NO: 58675 - protein, 434 aa, Zea mays
  Coding DNA Sequence Number=SeqID_15300
MSSWQPERFRHPVHVMSWPSEERWSLAEGQLSGLSTEAKSEPWGRARRSSSSSGAEPEFEPWGRARRSSSSSGAEPESEPWGQARRSSSSSGAEPESEPWSRARRSILWRPRPDLAAVSLTLLSGTAVGATQVALSSCQAILALNAPTIRSVGVAIWPRLLLDEDWASGKPKMEVRCQTSFCQNEDGFPKLLRACTVRLGIRSQPEYDGREFVEHGTEKMRALEGQLLLEDDPTVVEAQSSAPWDLTSSQAHVAALESREVIVVEALKQAKDEHVQKLMEAYLVTRNQRRALWIQEPASSNPVQPMRGEDPQILEGHLVSVRGEKKAWELPEGSIVLEGMPVSPKAMDKQEHPESSQGPLPELFEPLTMKKILALSHEVKEEAASTPPTPLPFEELQELVPLEEEFDPVLPSQSLPEEFINIISLLTHPGDVSD

SEQ ID NO: 58676 - protein, 327 aa, Zea mays
  Coding DNA Sequence Number=SeqID_15301
MGRRETEHEGGKKTGERGNPRPSCCPAPRSGALAVGGYKRPRGRERETYASARSPARPTFSYESPGPSFYRCKERDQARRRPSSEAKAESEPWARARRSSSSSGAEAESKPWGRARRSSSSSGAEAESEPWGRARRSSSSSGAEAESEPWGRARRSSSSSGAEAESEPWGRARRSSSSSGAEAEPEPWGRARRSPSSEAKTGAEPWGRVRQSFLWRPRPDLAAVSLTLSSGTAVGATQAALSSCQAILALNAPAIRSVGVAIWPRLLLGEDWASGEPKLCADGGYQLRLGVLGGAEHGVSSELLTGLDASLWWDSVTKLFPSASEMS

SEQ ID NO: 58677 - protein, 283 aa, Zea mays
  Coding DNA Sequence Number=SeqID_15302
MPRVLPPSEPPDGERPRFFRLVVIGGTQLRGSWYLSAIVRLQGFSSGSPAASPRRWSPKTVTTSSRVGRSKPGCGLCPSLSFKDLHHPGWGGGRTEPELYLPRGFVGHLLPQHSGERALTVLAGGSDFDNAGLVGGERRQLQRVGLAGSAGSGSAPGASFRRESGRRAARTGGPSKTSRAARAAFVFLGCPAFAPVRCLCAEAGAALPGGSEWGSAGGKMASIVGAEVVAAEEVLVADGITATIWAPGLRLFGFNVWSVSLEWGREREPSSCSVRPGTIASAA

SEQ ID NO: 58678 - protein, 286 aa, Zea mays
  Coding DNA Sequence Number=SeqID_15303
MATAHGGTGPAKVLRRAIGALPEDIPARKVHEDVRGIGALEGRGVTHLMRSPRSRRGLRIEWNHSETPATQLMRGSAGCYGRGPRSSPFNYQRVERRGEREGKKIHLTGGANRAQGAAQRELGRVGEIPIWADREGNRPRRPTVALHHDRATVALHRELARLAARSVARLPAGARLDGSGTAEEAEMAAALMDVAVASAAASAAVFSAAASVSAAASSCSNKKAPTAFVAAAFAKKPETPTTANVAQEKHEELERCIEECESGSEVVFRSIVRNRVSLLNIHSPAI

SEQ ID NO: 58679 - protein, 478 aa, Zea mays
  Coding DNA Sequence Number=SeqID_15304
  Homolog annotation: Hit_ID=Q69S52; Match level="QueryCoverage=66%, HitCoverage=76%, E-value=2e-28, Identity=30%"; Hit description =Putative uncharacterized protein OSJNBa0058I18.2
MTSRNHRTLPGLEATEPERPAAALSIDLMEEIFLRVASPADLARASTACVSFRRIISDPSFLRRYRSIHPPLLLGLIGVAGFTPADPPHPSAALSRAVARAADISFDFLPRSRTANWRHSHPWYPCDVRDGRVLVKCIREEPVVYLDLAVCDPLSRRYLLLPPLAEDLVLASVGLQKPSVVHSGVSFIPSGGVEETSFRVISWKYSKTRLAVFVFTSSSGSWSVGTSTTRDDLGLDHEFVRLYSVQCVYGHCYWRLCGTSKLIKLDMNSMEFSTVDLPPDHEKRNVIIVESWGSNVAMFSMIDEGASVDYYTSSQNDSEKSHEWHMMISIPLPADYIIGPCFKGPAEGASLGVARWAAAQDPRRQHPPVIRAAINGRCRGSPTPPSTEGVKDLLPLYSAIPVIRGRHQRPPTHAVDGRCPRFHPIAPSYLLCPTFLPTPSMARADPRWPRIRPTLLPHLLGPCRAPACGHEPAIRARR

SEQ ID NO: 58680 - protein, 856 aa, Zea mays
  Coding DNA Sequence Number=SeqID_15305
  Gene Ontology: Mol. function=transferase activity, transferring glycosyl groups; Cellular component=integral to membrane; Biological process=cell wall organization and biogenesis
  Homolog annotation: Hit_ID=Q84S11; Match level="QueryCoverage=98%, HitCoverage=96%, E-value=0.0, Identity=68%"; Hit description=Mixed -linked glucan synthase 2
  Pfam annotation: Domain name=Cellulose_synt; Domain location=73-851; Score=957.9; E_value=4.1e-285; Accession=PF03552.5; Description =Cellulose synthase
MAAAVTRRVGLHVEATNGGADDESRRNSSAADHSPVAKRINDAAANAKRNDVWVAAQEGEMPAAAGNSSQPPLLFRTMKVKGSILHPYRFVILLRLVAIVAFFIWRIRNRNRDGVWLWAMSMVGDVWFGFSWVLNQLPKLNPIKRVPDLAAIRDQYEQPSASGGESNNKLPGIDVFVTTVDPVDEPILYTVNSVLSILATDYPVEKYACYLSDDGGTLVHYEAMLEVASFARLWAPFCRKHSVEPRAPESYFGVKRRQPYTGSVQGEFTSDHRRMRREYEEFKVRIDSLFSTVCQRSQAYNRKHAKDDEAGMVMKATWMADASIDNPFDFSNTDTRLPMLVYMSREKRTGYNHQKKAGAMNAMLRVSALLSNAPFLINFDCDHYVNNSQAFRASMCFMLDPRDGRNTAFVQFPQRFDGVDPTDRYANHNRVFFDGTMLSLNGLQGPSYLGTGTMFRRAALYGMEPPRWRTTGSVKVIDDDDDHKGKEYGRSTLFRNAVLDDAANQERSITPVFLDDDETTTISSEVASLMTCAYEDGTTWGRDVGWVYNIATEDVVTGFRMHRQGWRSMYCSVEPAAFRGTAPINLTERLLQVLRWSGGSLEMFFSHSNAFLAGARMHPLQRVAYLNMSTYPVVTVFILAYNLFPLMWLVSERYYIQRPFGTYVLYLVATIAMIHVIGMFEVRWAGITLLDWCRNEQFYMIGATGVYPTAVLYMALKLVTGKSIHFRLTSKQTEACSGGDKFADLYVVRWVPLLVPTIAVLAVNVAAVGVAVGKAATWGLLTQQAQHALLGMVFNVWILVLLYPFALGVMGRWGKRPAILFGVLVMAIGAVAVVYISFRATYYPTGWSEMETTSAL

SEQ ID NO: 58681 - protein, 143 aa, Zea mays
  Coding DNA Sequence Number=SeqID_15306
MSGAPEDSKLKLVTFGKFQRRLRYNSPDMSGVHRTVRCDKEERPQELASLGNSFGLLRYNSPDMSGDCYVLVAVVNGSLLGVQFGGGRGGAGRALAGHRTPWQNLCHHNLSNRGLGAPGPRAIYSPVNYRRGGFGGATCAGQG

SEQ ID NO: 58682 - protein, 154 aa, Zea mays
  Coding DNA Sequence Number=SeqID_15307
MEGRDRPCEKGPGSNCSRRISDRRPQRLPSTPGRHRWRRQTPHDGSSPASRWPEALAPPSHDSKGSTRSGKNANPGKEVSVYPSTGMAAHGAQQHDSRHMVAQILPWSAMSGEGSPSTAPATTKLDAEKTSVHHRDEHVAVLRSIPQLLSPLFL

SEQ ID NO: 58683 - protein, 311 aa, Zea mays
  Coding DNA Sequence Number=SeqID_15308
  Gene Ontology: Mol. function=enzyme inhibitor activity; Cellular component=cell wall; Biological process=response to stress
  Homolog annotation: Hit_ID=Q7XHV1; Match level="QueryCoverage=68%, HitCoverage=79%, E-value=1e-66, Identity=62%"; Hit description=CHP -rich zinc finger protein-like
  Pfam annotation: Domain name=Usp; Domain location=55-224; Score=78.8; E_value=1.8e-20; Accession=PF00582.17; Description=Universal stress protein family
  Subcellular localization annotation: CTP_CleavageSite=44; ConfidenceScore=5.50e-01
MQAPPAPSSVDLPLAVAPPPVKAPTPRPPPPASLQPESPGVFFSAAAAAAPLGTAHRRIAIAVDLSDESAYAVRWAVANYLRPGDAVILLHVRPTSVLYGADWGAVDVSLPNPSATAASEDGDGDCETAAAARRMEDDYDAFTATKADDFASPLKDAGIPYKIHIVRDHDMKERLCLEVERLSLSAVIMGSKGFGAARRTSKGRLGSVSDYCVHHCVCPVVVVRFPDDGSAEGGEAAGLSAAVGAEDVLHPVPEEEGEYHDAAEEHKEFMAPSSATSAPCQPSSPAEHAPRRQDLWRRTKGPKKRLSHPSV

SEQ ID NO: 58684 - protein, 901 aa, Zea mays
  Coding DNA Sequence Number=SeqID_15309
  Gene Ontology: Mol. function=transferase activity, transferring glycosyl groups; Cellular component=integral to membrane; Biological process=cell wall organization and biogenesis
  Homolog annotation: Hit_ID=Q84S18; Match level="QueryCoverage=95%, HitCoverage=96%, E-value=0.0, Identity=72%"; Hit description =Probable mixed-linked glucan synthase 8
  Pfam annotation: Domain name=Cellulose_synt; Domain location=93-886; Score=986.9; E_value=7.8e-294; Accession=PF03552.5; Description =Cellulose synthase
  Subcellular localization annotation: CTP_CleavageSite=77; ConfidenceScore=5.44e-01
MAPKAPANNGAVVVAGGHHGGSTDVGGVAGGATTTTVPTSVAANGNGKQHGTRKQRRPAAVVVSPMDKYWTPVDDKEAAEAVDDGGEDGRRPLLFRTYKVKGILLHPYRLLTLLRLIAIILFFIWRIRHPHADGMWLWWISIVGDFWFGVTWLLNQVAKLNPTKRVPDLSLLRQQFDLPDGNSNLPRLDVFINTVDPINEPMIYTMNSILSILAVDYPIDRTATYLSDDGGSIIHYEGLLETANFATLWVPFCRKHSIEPRAPESYFAVKSRPYTGNVPDEFADDHRRMSKEYDEFKVRLDALFTKIPERSDAHNAEAKEGVKATWMADGTQWPGTWFDPAENHKKGQHAGIVKVMLNHPGDEPRFGGPASAETPLDFSAVDVRLPMLVYISREKSPSHDHQKKAGAMNVQLRISALLTNAPFIINFDGDHYVNNSQAFRAAMCFMLDRRDGENTAFVQFPQRFDDVDPTDRYCNHNRVFFDATLLGLNGIQGPSYVGTGCMFRRIAVYGIDPPRWRTDAFKLVDNPSKFGSSMLFINSIPSAANQEWSMASPPAHEESVMEELNNVMKCAYEEGTEFGKEIGWVYNIATEDVVTGFRVHRTGWRSMYCRMEPDAFRGTAPINLTERLCQILRWSGGSLEMFFSHCPLLAGRRLNLMQRIAYTNMTAYPISSVFLVFYLLFPVIWIFRGEFYIQKPFPTYVLYLVVIIAMTELIGMVEIKWAGLTLLDWIRNEQFYIIGATAVYPLATLHIVLKLVLRGNGVSFKLTAKQATSAVNEKYAEMYVVQWTPLLIPTIAVIAVNVGAIGAAIGKAVVGGWSLLQMADASLGLVFNAWILLLIYPFALGVMGRWSKRPYILFVLFMIGFAVVAAVVVAIHAARTGSVRFHSGHSGGASFPTSWGF

SEQ ID NO: 58685 - protein, 114 aa, Zea mays
  Coding DNA Sequence Number=SeqID_15310
MASVGAWAWRCRAGGLVAAKKIIQRCFADHAEMRASLQLDAMTRPALGCKWQLRPPVGVGNRYVSGSGSGALALALALALVARLWMNDNREHRGWFALHRSTTVESVTQCRPPA

SEQ ID NO: 58686 - protein, 187 aa, Zea mays
  Coding DNA Sequence Number=SeqID_15311
MSQPKSGRTYTDDRTQRLDNFWNTTLLQKSFTEEKVSICSLDKDEQLHSFTSSTEQYHHELDDLRTHLSFTQATGEAGTQLNLQLACSGRSVSKRVLLIMGIRHEPHPCHRLGKGTMIFMNGDSSGGTPDNHGQQYWSILFWHTVLVDHTPAIFMYEPYGNSATTMDPLIHCVRHADKDYYKVLETT

SEQ ID NO: 58687 - protein, 52 aa, Zea mays
  Coding DNA Sequence Number=SeqID_15312
MGSRHSACSAEAECRGSFVLLFVSHPPAGREDSETDISAVLTVMSSLGILFD

SEQ ID NO: 58688 - protein, 69 aa, Zea mays
  Coding DNA Sequence Number=SeqID_15313
MENAEVHILHLHTAFRDRVHRWKRCGLPNGERFQHRIINNVKNFAHTAYAHGNGMTALPDVVTEALQGH

SEQ ID NO: 58689 - protein, 105 aa, Zea mays
  Coding DNA Sequence Number=SeqID_15314
RPAAQPPSFLLQRPVADEFTSCSNSNAGRLAAGDRWSAVAARSVHELERSRSVHATACATAIPISMHAELPPVTYKSLSLSSPSPSLVVVVIAKGVGVAVSATAS

SEQ ID NO: 58690 - protein, 212 aa, Zea mays
  Coding DNA Sequence Number=SeqID_15315
MGRSTIGGASQSTLRQPMLAQEDKAHGRLGIFDSTIDSRELRRRGRQSTSSSSQSSRSRSAAHEIELAVLRQQAEYHQSVLREQLEYQRQQSEYQRQQAEYQKKRDEYYASLQAQNQALLSQLAQQAGVPMPTYGMPPPDFALPMPMLAPPPPPPPPSQFPMGFQTPPASVAAPGDGSGQDDTTNSWVNTIFNTQSPAGGGGYSNHPDDGYD

SEQ ID NO: 58691 - protein, 53 aa, Zea mays
  Coding DNA Sequence Number=SeqID_15316
MAAPRTARLVALTPRRDRRRLWREKQATLHLHHNDRVKRGTGKGGYPEKDPSL

SEQ ID NO: 58692 - protein, 78 aa, Zea mays
  Coding DNA Sequence Number=SeqID_15317
MEGWIGEMANDDHVEGMVAHTRDDTGGSLGRRVNVVACPSPDGSSARASAKGESEAAGDRRERGGNPAAFVFVPRPSR

SEQ ID NO: 58693 - protein, 101 aa, Zea mays
  Coding DNA Sequence Number=SeqID_15318
MGARTSNRRTRTNRNRAGRGELFFTAAETGFGENGKFARAGGGLRVGAGAIAAWIHGGAGGFSTLTVHRPVVASTMMSENRRRGARRAQSEQQAAQEEAAQ

SEQ ID NO: 58694 - protein, 132 aa, Zea mays
  Coding DNA Sequence Number=SeqID_15319
  Homolog annotation: Hit_ID=Q6J9V9; Match level="QueryCoverage=36%, HitCoverage=25%, E-value=3e-08, Identity=50%"; Hit description =Putative uncharacterized protein
MQPYRDYAPFRLCHIRWTSTEARSHISWNQRGGYYVQGNRTATCANAASSRLRNQCRDSRASDTFGRRSRRCFTSVMMTASEKGPGKGIFRKGSFSTKETGPRALLLIRGSKAGPSEGFDSLPRALGLRAYY

SEQ ID NO: 58695 - protein, 215 aa, Zea mays
  Coding DNA Sequence Number=SeqID_15320
  Homolog annotation: Hit_ID=Q8H6I5; Match level="QueryCoverage=27%, HitCoverage=6%, E-value=6e-09, Identity=58%"; Hit description =Putative RIRE2 orf3
MRGKANCCCLARVQLSVLHPGDGPPCTVGCTEGSRNTSYAARAVLVFWDVLGEYGSEDLPVHFGAAAVCQCGVGGQPPEAEVIVVLLGQRSPAGYSGLVIPQAFWSGQPPIALPTSKSRYHCHPKHPLCDELKLEAAVAWTEAVSARTEAFLAREQVASQAEEMQQRQLEFGQIIRERDQSRSRAVEAVSRAEILGGQLAEAMKRLAEAFARVAI

SEQ ID NO: 58696 - protein, 423 aa, Zea mays
  Coding DNA Sequence Number=SeqID_15321
  Gene Ontology: Mol. function=metal ion binding; Cellular component =Golgi apparatus
  Homolog annotation: Hit_ID=A2XWK0; Match level="QueryCoverage=99%, HitCoverage=86%, E-value=0.0, Identity=70%"; Hit description =Putative uncharacterized protein
  Pfam annotation: Domain name=DUF248; Domain location=74-423; Score =360.2; E_value=3.4e-105; Accession=PF03141.7; Description=Putative methyltransferase
MGLLSSLPPHRRGAFSGGGWQWSFLDVVWGVFLIAVVVFLALVFTPRRGDPILTTPSVARAGGTVPPCAASEVDLLPCEDPRRSSRLSREMNYYRERHCPTRGEALACLVPPPRGYRIPVPWPESLHKLQVVISEIDFLIWHDNMPYGKIAERKGHQGWMKHEGSYFIFPGGGTMFPDGAEQYIEKLSQYVPMKTGVIRTGLDMGCGEKEWDELQAMAGALCYKLITVDGNTAIWKKPAEASCLPNQNGFGLDLCSTDYDPDEAWYFKLNKCVSKISVAEETAIGSILKWPDRLSKPSARASVINNGANLFEVNSQKWVRRVSYYKKSLGVKLGSTNIRNVMDMNAFFGGFAAAIISDPVWVMNVVPGQKPLTLGVIYDRGLIGVYHDWCEPFSTYPRTYDLIHADAIDSLISGPISGTSSVI

SEQ ID NO: 58697 - protein, 301 aa, Zea mays
  Coding DNA Sequence Number=SeqID_15322
  Subcellular localization annotation: CTP_CleavageSite=68; ConfidenceScore=5.38e-01
MSSRSLMHRVFPPSKPPDGGYPPSFRLIVGGSQLRGSWYLSAIVRLQGFSSCSPAAPLRWRSPKMVTSSLMVGESKPGCGLCPSLSLKDFHHQGWGGDCTVPGSRTRVASEPLAAPASATAAGRGSSAGEIAKAGHGPTSNSTAFCPSLPHEFGHGRGPPGSSIRPEVSAAAVRPLGAEVVIVVAAAGAGDGAPFVGLLLLRRPTPIEWGCSYLRRGNRSSVCNGTLNANSPVDYLNRFTKHESPRVKVTSERLSGRDDDFVLQSGDPWTASPSEARSDLAEGVVDAEGVTAPFQHQDPSL

SEQ ID NO: 58698 - protein, 282 aa, Zea mays
  Coding DNA Sequence Number=SeqID_15323
  Gene Ontology: Mol. function=oxidoreductase activity, acting on the aldehyde or oxo group of donors, NAD or NADP as acceptor; Cellular component=cytoplasm; Biological process=amino acid biosynthetic process
  Homolog annotation: Hit_ID=P08390; Match level="QueryCoverage=60%, HitCoverage=61%, E-value=2e-74, Identity=75%"; Hit description=USG-1 protein
  Pfam annotation: Domain name=PseudoU_synth_1; Domain location=190 -281; Score=101.1; E_value=3.5e-27; Accession=PF01416.11; Description= tRNA pseudouridine synthase
  Pfam annotation: Domain name=Semialdhyde_dh; Domain location=6-85; Score=59.1; E_value=1.5e-14; Accession=PF01118.15; Description =Semialdehyde dehydrogenase, NAD binding domain
  Pfam annotation: Domain name=Semialdhyde_dhC; Domain location=105 -255; Score=12.0; E_value=2.1e-06; Accession=PF02774.9; Description =Semialdehyde dehydrogenase, dimerisation domain
  Pfam module annotation: Pfam domain module=PseudoU_synth _1::Semialdhyde_dh::Semialdhyde_dhC; Domain location=190-281::6 -85::105-255
MSEGWNIAVLGATGAVGEALLETLAERQFPVGEIYALARKEATAAWVEEATNSGCLVIDSSGLFALEPDVPLVVPEVNPFVLTDYRNRNVIAVPDSLTSQLLAALKPLIDQGGLSRISVTSLISASAQGKKAVDALAGQSAKLLNGIPIDEEDFFGRQLAFNMLPLLPDSEGVSVLMSDQQQPPVYKIALGIEYDGSKYYGWQRQNEVRSVQEKLEKALSQVANEPITVFCAGRTDAGVHGTGQVVHFETTALRKDAAWTLGVNANLPGDIAVRWVKTVPDL

SEQ ID NO: 58699 - protein, 259 aa, Zea mays
  Coding DNA Sequence Number=SeqID_15324
  Gene Ontology: Mol. function=nucleic acid binding; Cellular component= nucleus; Biological process=RNA metabolic process
  Homolog annotation: Hit_ID=Q5ZDJ7; Match level="QueryCoverage=87%, HitCoverage=78%, E-value=4e-63, Identity=38%"; Hit description=Zinc finger protein 3-like
  Pfam annotation: Domain name=zf-CCCH; Domain location=125-151; Score =45.1; E_value=2.5e-10; Accession=PF00642.15; Description=Zinc finger C-x8-C-x5-C-x3-H type (and similar)
  Pfam annotation: Domain name=zf-CCCH; Domain location=192-218; Score =41.5; E_value=2.9e-09; Accession=PF00642.15; Description=Zinc finger C-x8-C-x5-C-x3-H type (and similar)
  Pfam annotation: Domain name=zf-CCCH; Domain location=62-88; Score =40.2; E_value=7.4e-09; Accession=PF00642.15; Description=Zinc finger C-x8-C-x5-C-x3-H type (and similar)
  Pfam module annotation: Pfam domain module=zf-CCCH::zf-CCCH::zf-CCCH; Domain location=125-151::192-218::62-88
MWRWWPRMLKILILSDQGNQIVLCKFKSKCKFNHPKDMVNALGTGTNNESLIADSAVLPVRPSEPICVFYAKTGKCKFGAICKFNHPKDIKTSPLIAKETIYTATTDAADAPTEACNAKGLPIRQGEVDCSFYMKTGSCKYGSICRFNHPDRPGPAADIAFMVPLVQATLPSSAPIVPAVVEPLPMIYPQRPGETVCDFYMKTGSCKYSQKCKFHHPISRFAPHSKENGDPQQPATLASLPRRETHPRCNGSGPITQVY

SEQ ID NO: 58700 - protein, 166 aa, Zea mays
  Coding DNA Sequence Number=SeqID_15325
MGKGRELAGASPAPWEEAGRHGWGARGAGSLLLAFSKGAELGWKQPRRELARAVKESSAARVPGGRSSPQGRLAPWEQLGRELLCAMSRREEGTGWEKWRRGGTQAGRRGLGVHGCKPCSLLAAVGAREEEGRGMRALAGRRGRNVVAARGVDAIFQIGKGRHFYL

SEQ ID NO: 58701 - protein, 137 aa, Zea mays
  Coding DNA Sequence Number=SeqID_15326
MKAKSHPQPIILRSTCKNCATSKAEYTNTQLDLPGLTALAYNAPLTPTGRRAVAALVPTITGMGDLVSGRVRGKVCGQVHSGTRLTDLPYFSIVFAGGGYSLGEYPLVKSTILQYVHHLHLVGGTTSLAQSSSHGPI

SEQ ID NO: 58702 - protein, 124 aa, Zea mays
  Coding DNA Sequence Number=SeqID_15327
  Subcellular localization annotation: CTP_CleavageSite=38; ConfidenceScore=5.03e-01
MKLSTYPGGGDGAAPLGGAIHFGCGPPERGRSKPLETRASRSSAVTVEKGHGSRGETTVTRSAITKQKRWRRSGQGTGKGDTPKGILLREGSGPRAPLLIRGSKAGPSEGFNSRLRAFGLHAHY

SEQ ID NO: 58703 - protein, 131 aa, Zea mays
  Coding DNA Sequence Number=SeqID_15328
  Subcellular localization annotation: CTP_CleavageSite=45; ConfidenceScore=5.27e-01
MGSSASPDPGLGLSLDPGRQTLPRPTQGSDSASASEDGLRLARPRARTQPRPRKTDSASPDPRARTQPWPRKTFSASPDLGLGLSLDIGRRTPPRPTPGPRLDLDLGGAFASPDLGLGPATSQGRPSLPYP

SEQ ID NO: 58704 - protein, 75 aa, Zea mays
  Coding DNA Sequence Number=SeqID_15329
MGDLVSGRVRGKVCGQVHSGTRLTDLPYFSIVFAGGGYSLGEYPLVKSTILQYVHHLHLVGGTTSLAQSSSHGPI

SEQ ID NO: 58705 - protein, 42 aa, Zea mays
  Coding DNA Sequence Number=SeqID_15330
MTSMVLSSLQKQGNVSRTPGRTVSYASTGLKHFSDGHVSTIG

SEQ ID NO: 58706 - protein, 177 aa, Zea mays
  Coding DNA Sequence Number=SeqID_15331
MARARAYKAQSGVDYTLPRTLEPHRSSVHRHLPVRDVSAATRATATIDRAAQPFPTLSNPLRRVKKNRKYCNLGDGEYVLVPEQGAAQEVAPDPAPEPAPEDLPATALEGKPRRLCPSRDLRRGLPFRLWWVQVRSLRDGSRGSLEDMVAGVTWPSILPPGWTVEWDPTSAEDEHEE

SEQ ID NO: 58707 - protein, 143 aa, Zea mays
  Coding DNA Sequence Number=SeqID_15332
MYCNVCVMGETLLGKDWRVLEVKGLATIVSPNYDTLTVDELFSNLKFTKIDYYTHAKIENLVHLLWLLLQCGGDKEGSFNYEDPNHFISNCPKMKGKQKAGKREYYSDRDKGKHKYSSDKHKSMWRLDKEALKYKYLRKGKLK

SEQ ID NO: 58708 - protein, 286 aa, Zea mays
  Coding DNA Sequence Number=SeqID_15333
  Gene Ontology: Mol. function=ATP-dependent helicase activity; Cellular component=intracellular; Biological process=dosage compensation complex assembly during dosage compensation by hyperactivation of X chromosome
  Homolog annotation: Hit_ID=Q9FW67; Match level="QueryCoverage=88%, HitCoverage=25%, E-value=4e-77, Identity=63%"; Hit description =Putative ATP-dependent RNA helicase
  Pfam annotation: Domain name=Helicase_C; Domain location=162-276; Score=12.9; E_value=0.0033; Accession=PF00271.22; Description =Helicase conserved C-terminal domain
MNEDFLIIILRDLLPRRPDLRLVLMSATINAELFSKCSEQGFTFPVAELFLEHVLEKTRYRINSERDNFAGSSRRKKFSSVKSDPMSDVFEDIDITKEYGNYSSSTRQSLEAWSAAELDLSLVESTIEYICRYEAEGAILVFLTGWVEISKLLDKIKGNNFLGSPNRFLVLPLHGSMPPVNQRKIFDRPPANMSLFVISEKIVLATNITESSITIDDVVYVIDCGKAKETSYDALNKLACLLPSWISKASAHQDSSSHQVTPPPHDDFADRCLISSGGATNNNPMS

SEQ ID NO: 58709 - protein, 114 aa, Zea mays
  Coding DNA Sequence Number=SeqID_15334
  Gene Ontology: Mol. function=ATP-dependent helicase activity
  Homolog annotation: Hit_ID=Q9FW67; Match level="QueryCoverage=35%, HitCoverage=4%, E-value=2e-13, Identity=87%"; Hit description =Putative ATP-dependent RNA helicase
  Subcellular localization annotation: CTP_CleavageSite=42; ConfidenceScore=5.08e-01
MVGTDRHQVKLCISCQFNAITPRTSRLVFSKCSSLCISGEVVQAAFSQVFAIGSPKIIHDAMPQFQLPEILRTPLQELCLTIKSLELGAVSSFLSNLVDIFCSLQPTLTLADAI

SEQ ID NO: 58710 - protein, 321 aa, Zea mays
  Coding DNA Sequence Number=SeqID_15335
  Gene Ontology: Mol. function=carboxyl- or carbamoyltransferase activity; Cellular component=ornithine carbamoyltransferase complex; Biological process=amino acid metabolic process
  Homolog annotation: Hit_ID=Q8SA97; Match level="QueryCoverage=26%, HitCoverage=14%, E-value=3e-10, Identity=56%"; Hit description =Ornithine carbamoyltransferase
  Subcellular localization annotation: CTP_CleavageSite=9; ConfidenceScore=5.14e-01
MVAPPPPPAAGKVTGQARMLLFRHGGKTSSIPPPAGRLTAAIVVVTRRRKEYHVIAAIKGHELETPETEQRPRLERLLETTHLELDGKVFVNTQQAPTWRANCRRFDPWGSLDRRPKVGRGGDSFEVEAESEPWGRARRRPSSEVEAEFEPWGRARRRPSSEVEAESEPWGRARRRPPSEVKVESEPWGRARRSFLWRLRLDLAAVSLTLVGGTTVGEGQATLFSGRLHPVSRGNRELRLLAALYSPSAPRPWPRLRCRTGLPPAHAGLVLVEPKARILVAGGGIGGLAFALTTRRKGFEVLVLERDVSAVRGEGRYRGPI

SEQ ID NO: 58711 - protein, 229 aa, Zea mays
  Coding DNA Sequence Number=SeqID_15336
WSCGDYFKRSDITKHPSTSGHALFLEDNHVALSDPLVYHHQARLMESIPIGQDSVESASARVLMAVLELQLTRGHSRQKWQQLYTGSYAAFKMMEMAKNSACTQAQERLEETKVQAEQVIGLEHQVTELQMQHQADQNRIKELEHQLTNAHSKLKILSQQQEEICLYAVAVREDLKETMSFISHQDQAIKELNRAHPMEFQVAQRLVNHLQQSVHRLNAAFHPTPTSAD

SEQ ID NO: 58712 - protein, 48 aa, Zea mays
  Coding DNA Sequence Number=SeqID_15337
MANSCCMACIVANIAAGTHRVPTRNLRTTPSPTRRHSCLPQGTYNLFL

SEQ ID NO: 58713 - protein, 177 aa, Zea mays
  Coding DNA Sequence Number=SeqID_15338
MGADRRARGAERACAKRYPRSGPCDQDWMGEIRPGRDERLQAALLLSAAVRSLELGQARARVAPGSPELGREGEDATTNSVAGKRPRIRGQRGENGEEKALGGQKGLRSRGDTGTYTGALERAKLAGHRADAADRHSLAPAMPKLAEHRAKLGKLSTGNGISPRGGARGGFVQSPAS

SEQ ID NO: 58714 - protein, 226 aa, Zea mays
  Coding DNA Sequence Number=SeqID_15339
  Homolog annotation: Hit_ID=A2YGC2; Match level="QueryCoverage=81%, HitCoverage=80%, E-value=3e-08, Identity=28%"; Hit description =Putative uncharacterized protein
MPPTPPQGIPAAGGDPDGDGDDDDAGGSSSHDTELSEEPEPEGWIARPITRDAACGCHIHDALDTLLRRAFDRHTWSIEYRCVVYQHRRGLYPDQWEATCLERRPDDDLRGAEAFSEDYSITKRDTVEVAMQDATRCALSQYCSLFSRVDDGLDLKYYPRRSTDSAGGVIVLPVGEGNPRLNSMVNLAAVLNIELDHALDELGKMSENRRRGARRAQLEQQAPKRM

SEQ ID NO: 58715 - protein, 173 aa, Zea mays
  Coding DNA Sequence Number=SeqID_15340
MGATDILCVSTHDAVTKECVAPVSNKTFAEWYSTENVPSATPGVSWTVSTSKWFTFPYWARGYPRLLPPCCIAFCLTVALGAAAAELLSLGNNSPNGLVPHSGNMHDFLLALVLLGCSGWLLGQEDEVPGCSDTDIDFLPAGYSNGTAAAAEEIVSGTAGGGSDADVGVGDPA

SEQ ID NO: 58716 - protein, 130 aa, Zea mays
  Coding DNA Sequence Number=SeqID_15341
  Homolog annotation: Hit_ID=Q6J9V2; Match level="QueryCoverage=21%, HitCoverage=9%, E-value=3e-07, Identity=96%"; Hit description =Putative uncharacterized protein
MRCRVPSSSATDEMVPKQNMDPGRKTILCWKVMAIELAWISDTPPTWRTICRCFGSDRAPGVAPQGANGCREGKRARRKRSTQVTLQAQQATLEENQSLLRQTQEEVKGMHTKFEETNALLRAVLKLQKD

SEQ ID NO: 58717 - protein, 363 aa, Zea mays
  Coding DNA Sequence Number=SeqID_15342
  Gene Ontology: Mol. function=hydrolase activity; Cellular component =ribonucleoprotein complex; Biological process=metabolic process
  Homolog annotation: Hit_ID=A2Y7U0; Match level="QueryCoverage=41%, HitCoverage=32%, E-value=3e-63, Identity=78%"; Hit description =Putative uncharacterized protein
  Pfam annotation: Domain name=KOW; Domain location=280-314; Score =35.7; E_value=1.6e-07; Accession=PF00467.20; Description=KOW motif
MATRRLRPQPTGSQTVSHGVDLEEGGGGCLLSDPPLHHSRSVSPADSESMGLHGSRGSPESWQRKMKVTLRFLRRVSYRWISQLIALLIYAVLLMPGFIKVGYYYFFSRHVIRSVIYGEQPRNRLDLYIPKDNSKSSSVVAFVTGGAWIIGNFPQGTISDMVSDASEAISFICNNVVSFGGDPNKIYLMGQSAGAHIAACALLEQAIKESKGENTYWNSDDEREMCARTIYRTNIDKKVTQADLKLFFESICGELKVCRNGTIKIDLETNKIMDFIKFDVGNVVMVTGGRNTGRVGVIKNREKHKGSFETIHANSKPEEDFTVPANEAQAMTSMRPTEETKRINLEFADERKTAVISSSLDDK

SEQ ID NO: 58718 - protein, 46 aa, Zea mays
  Coding DNA Sequence Number=SeqID_15343
MANCRDALTAIGGDRATSFLRGEVPDSLGAPQVHPMGVAPELRVDY

SEQ ID NO: 58719 - protein, 133 aa, Zea mays
  Coding DNA Sequence Number=SeqID_15344
MGKNKKGGSSSHHSGDKRKREPTPPSEDFGDSEYSEEEFSSESEGLPVHASPPVSSDDLDDSQGIAVEVWTYIRAVERSGLEGSEGSEVSSDGENSSDSSEEGSDGDDDGEGDGDDWGDDKGDSVRGRQCQRQ

SEQ ID NO: 58720 - protein, 315 aa, Zea mays
  Coding DNA Sequence Number=SeqID_15345
  Gene Ontology: Mol. function=sulfate adenylyltransferase (ATP) activity; Cellular component=chloroplast; Biological process=sulfate assimilation
  Homolog annotation: Hit_ID=O48888; Match level="QueryCoverage=43%, HitCoverage=27%, E-value=3e-75, Identity=100%"; Hit description=ATP sulfurylase
  Pfam annotation: Domain name=ATP-sulfurylase; Domain location=61-315; Score=138.6; E_value=1.7e-38; Accession=PF01747.8; Description=ATP -sulfurylase
  Pfam annotation: Domain name=RRF; Domain location=56-182; Score= -28.7; E_value=2.7e-05; Accession=PF01765.10; Description=Ribosome recycling factor
  Pfam module annotation: Pfam domain module=ATP-sulfurylase::RRF; Domain location=61-315::56-182
MDFSCWQVPHVQQAFTWDYGLACVLMVLRTLGIDCCDGIADLERLCRTTRGYVKVMIDKQMEVLRKQISIYATICEQLVEMHRILTEHEDTIAEEDEAKGVFEKNLIFAGELSKTVAKLAEDGKVAIRNIRRDAIKAYDKLEKEKKLSEDNVKDLSADLQKVLDDYMKKIESIQKQKEQVLEEGVLNPESTVVAIFPSPMHYAGPTEVQWHAKARINAGANFYIVGRDPAGMSHPTEKRDLYDADHGKKVLSMAPGLERLNILPFKVAAYDTKQKKMDFFDPSRKDDFLFISGTKMRTLAKNRESPPDGFMCPGG

SEQ ID NO: 58721 - protein, 176 aa, Zea mays
  Coding DNA Sequence Number=SeqID_15346
MRATNREMVKGFTRSTCAGEFLNSDERDLASPVTRALGSSLSKAHGLTRKLSGGLNRTEEDGRGVGHGGCSRAALAGCGEVAGGNGWLGQDRRGTEEAMGKATERWGGFYRRGRGRGVGSTVWRDAGTRGARGRALASSERVEHVARCFCPVFFALLSGQAYESCPTACGRSLPCT

SEQ ID NO: 58722 - protein, 283 aa, Zea mays
  Coding DNA Sequence Number=SeqID_15347
  Subcellular localization annotation: CTP_CleavageSite=28; ConfidenceScore=5.05e-01
MQAACNRTKGAHPFDFDAFSMRAQAHTSCGRKQPSRRQQAHAPSWDSERTLSHGVKTTRIGKGDTPKGILLREGSGPRAPLLIRGSKAGPSEGFNSRLRALGLRAHYWSEVQRPAPRKGSTAASGHSGSAPTTDQRFVGWPPKGSTAASYVERGMTLVSTQVLKRESIPMDEQSANLEQSQQAVSVWGTGLSGGAPDSVRCARLPRAKKSLSGICRRRTAKIHRTVRCAPDCPVSQRSARANGRPRILRVTRGLANGRKEAPDCPVCTGLSGAPDLQRSATVG

SEQ ID NO: 58723 - protein, 233 aa, Zea mays
  Coding DNA Sequence Number=SeqID_15348
  Subcellular localization annotation: CTP_CleavageSite=8; ConfidenceScore=5.15e-01
MGQATHPSASCGSEDSVLWSEPSSSSSSSGGRLQLGNRGAAPHGLHLLLRWGGRALLLPLLTLVLLLLTQAVVQPLQVTRLTGHGAAQRMLRKARWQERDHRLTSSVSKTSHLQKTPQAEAVVTSSASSRPLLGQREDPLPRCEDDASAFRSSNGSRTHNGRPVNHSSRRINSAAGQAAPLAGEVGIGKGDTPKGILLREGSGPRAPLLIRGSKAGPSEGFNSRLRALGLRAH

SEQ ID NO: 58724 - protein, 181 aa, Zea mays
  Coding DNA Sequence Number=SeqID_15349
MRATNREMVKGFTRSTCAGEFLNSDERDLASPVTRALGSSLSKAHGLTRKLSGGLNRTEEDGRGVGHGGCSRAALAGCGEVAGGNGWLGQDRRGTEEAMGKATERWGGFYRRGCGRGVGSTVWRDAGTRGARGRALASSERVASARVLRSAERPGVRILPYRLWEISSLHLELPSSCEFQE

SEQ ID NO: 58725 - protein, 152 aa, Zea mays
  Coding DNA Sequence Number=SeqID_15350
  Subcellular localization annotation: CTP_CleavageSite=73; ConfidenceScore=5.41e-01
MAERQLSPLASSADANQAFSNTLQGPPPTTRGLGPTRHASWPRAEEAKPPRTVHATAQRLRAFLHFRPGQRVKGQTAMQAACNRTQGAHPFDFDAFSMRAQAHTSCNRRAGYYVQVSHPVSEGKPNANYVRARIRIHVHNDYINEHHHTVLE

SEQ ID NO: 58726 - protein, 55 aa, Zea mays
  Coding DNA Sequence Number=SeqID_15351
MSCAARAAFVFWGCPAFAPVRHLCAKKQQKSATSSPKNNEGINPEYGITQQVLPD

SEQ ID NO: 58727 - protein, 178 aa, Zea mays
  Coding DNA Sequence Number=SeqID_15352
  Gene Ontology: Mol. function=metal ion binding; Cellular component =integral to membrane; Biological process=primary shoot apical meristem specification
  Homolog annotation: Hit_ID=Q10Q54; Match level="QueryCoverage=72%, HitCoverage=20%, E-value=1e-39, Identity=67%"; Hit description=Zinc finger family protein, putative, expressed
MGELQVVAIAVFSALGFAFYVFFVPFVGTKPFQIVAMAIYTPLITCVVVLYIWCAATNPRDPGIFDSTKNLKLDKNEKHSYVNSDQGINHGGRPLSETFGTADNSEKLSSMLERNDSPSIFWNSWPRFSGIISLIAGFEEQHDRAKVVDILVNDLKVFSTFNEELYKETTQLLTLENF

SEQ ID NO: 58728 - protein, 70 aa, Zea mays
  Coding DNA Sequence Number=SeqID_15353
MELLSKSYPTKEKTLKGMLVIWESRVSRRVIKIKEGIFGLKSVSQQTRIIRRLIRCRRCEQESFGMIATK

SEQ ID NO: 58729 - protein, 52 aa, Zea mays
  Coding DNA Sequence Number=SeqID_15354
MGLGVCGSLCQVWVRPLGRSGNEIDGFGYDYGAGEDEAVEGDFQEFQDYDEF

SEQ ID NO: 58730 - protein, 585 aa, Zea mays
  Coding DNA Sequence Number=SeqID_15355
  Gene Ontology: Mol. function=aspartic-type endopeptidase activity; Cellular component=cytoplasm; Biological process=DNA integration
  Homolog annotation: Hit_ID=Q10L75; Match level="QueryCoverage=98%, HitCoverage=28%, E-value=6e-21, Identity=23%"; Hit description =Retrotransposon protein, putative, unclassified
  Pfam annotation: Domain name=Vps51; Domain location=229-314; Score= -3.4; E_value=0.1; Accession=PF08700.2; Description=Vps51Vps67
  Pfam annotation: Domain name=zf-CCHC; Domain location=106-123; Score =27.0; E_value=7e-05; Accession=PF00098.14; Description=Zinc knuckle
  Pfam annotation: Domain name=zf-CCHC; Domain location=500-517; Score =25.1; E_value=0.00024; Accession=PF00098.14; Description=Zinc knuckle
  Pfam module annotation: Pfam domain module=Vps51::zf-CCHC::zf-CCHC; Domain location=229-314::106-123::500-517
MDLSVTTPTQILGKINAHEMYMHINDKEESSSKRKDLALKANHERKGKAKIQVEEESSSDDDLDANIALMVRKTTKMLKKLNREGIKFDSRKKKFFSNKRKPISEMDCYNCGELGHLAHQCNKPKKNKFKGKKEDESDDEKKEKKFFKRKDGKQKRLHKKKNGKAYIVGDWLTDIESSSGSSSSEEENDEKVAAIAGDFSSPPPSPSSTSHLCLMARGERKVQNDINIADDSDSDSDEEFASPSYDELADLLKEYTQIIRKSKAKCDRLKNENESLNAKYDIVIKASDEIKEENKTMSSTVNELTNSLKDAKEKYDKLNEANRELQNRLVKIKEDYTQIKFDHDNLLVENELLSCKTHEAINPVVKLDVATSCDDLIQEEQTSLHAELTEKVEVLTLDNQKLKNYLTDATTRGKVAIENNDFNNELAVDNQRLKNEVKKLKSENEHLATSVQKFNKGQYLQNELLMNTVMKNNKSGIGYNAFVQKKAITQYKPKQTHKPIKCFECGNEGHFAHNCKAKPPTPLPKHSRPFAFNAHYVLRKVANGKIKVTFLGPPNKSRPKQIWVAKSLIERVTGPMQYRALKTQA

SEQ ID NO: 58731 - protein, 948 aa, Zea mays
  Coding DNA Sequence Number=SeqID_15356
  Gene Ontology: Mol. function=transcription initiation factor activity; Cellular component=transcription factor TFIID complex; Biological process=transcription initiation
  Homolog annotation: Hit_ID=A2WL29; Match level="QueryCoverage=39%, HitCoverage=93%, E-value=7e-97, Identity=53%"; Hit description =Putative uncharacterized protein
  Pfam annotation: Domain name=SNase; Domain location=237-373; Score =46.7; E_value=8e-11; Accession=PF00565.8; Description=Staphylococcal nuclease homologue
MGNSIYRFLCGLCAPSSSEHGLHGAHPAVAALGRDVLSFQSTSQVPDELSRHVVSSKKAQANWYAISLRLISLAPTLKNHQKADVEGLLSFYGLPHPNAAAAAAGAPAARPPPKKAQQGAKFELHTLPVRHPAGRPASSRFPECFSVVSSRASTGLMKRVSSPVCQIDPKSVADGDTVNVYVDAADPREAGSVPREVQKAAAERARARAAKDYQKADALQKVIVDAGYRPVPNARGEEVLAKKYRIRLRPIMLRAKRFETVKPKKLLGVSYQPEAVLELARKAQAIFTALSRSMGIDAPESAMPYGKEAKEALLKLVQGKSLKVYVYDEDRYGRCVGDIYCDGEQMLKKGFAWHYTAYDQRPELAKAGELKSQVRQGDRRRGHSTQAFFSRASFAGDEHHEDSSAMSKAPDDHLQATEQEGSVHPSQQAGQQHVNAAYQFSKTELTEGSKNEQPVQVEQLSSHLQQAYPEIQLQQAETDSFQLAEKETGYFGQQSFAGAKVDVAQPSVVQQNVKQTVGQQASSGTQDTRKGPSIPFNMLIPILQAHLDRDKDMQLQTVWAKLRRNEVNKDDFLRVTVNIVGDQMLKQAAHKVFVQMQAQMQRNSQANSSQQSLFSQLSAQQMASSGSAQLHDQKIRPPGPPNQGQKNQVSSSPQAFAPPSGTQPQNSVHYLAHDNPNQNPDAKGTNVVPNQPSRMNTSVPLQTKDKQHQPTQLQQASQQIYGANNPGAQAYPRSITGSLRSPSPVPETQPSMHAPGMAPAKMVPPPTHPMMQHNATAWKMHQNRELKTNAPPPNANMKQNSESVGKVRMAGTGNSSAKGKQEEAFTRVLSPDRSSDHVCLCAICPLESATEWSLGTPNSTPNASGGTKSSKKSGGQKKSLEAAGSMQPSSKKQKKSGAPQEQSIDELNDVTAASGVNIRLFVTATKASPRRQPKSPRRSGGGSAPSSA

SEQ ID NO: 58732 - protein, 968 aa, Zea mays
  Coding DNA Sequence Number=SeqID_15357
  Gene Ontology: Mol. function=protein serine/threonine kinase activity; Cellular component=cytoplasm; Biological process=protein amino acid phosphorylation
  Homolog annotation: Hit_ID=A7VL53; Match level="QueryCoverage=80%, HitCoverage=100%, E-value=0.0, Identity=79%"; Hit description =Protein kinase
  Pfam annotation: Domain name=Pkinase; Domain location=587-916; Score =232.6; E_value=9.1e-67; Accession=PF00069.16; Description=Protein kinase domain
  Pfam annotation: Domain name=Pkinase_Tyr; Domain location=587-916; Score=-28.1; E_value=1.1e-10; Accession=PF07714.8; Description =Protein tyrosine kinase
  Pfam module annotation: Pfam domain module=Pkinase::Pkinase_Tyr; Domain location=587-916::587-916
  Subcellular localization annotation: CTP_CleavageSite=47; ConfidenceScore=5.45e-01
MTGVRRSQGLRARFPRGAPSLQSRKCPHRATGQGRAGPPRPSRRLPRAPVAQSHLRRRRCSDEQIDDYALARQGRSCGGRGGGGVRREQRRTRGACDSVSSRFEFPAGDGNATKRKSRLLSASSCHSSTTGKGKGLRDAGGSRPRTAASLLAQVHATDCRCWCLEMRQPFYGRPPVQMKVQLVEQEGSKGMGSSGCAEIVELADDPKAARPAAHLRVRVKPVGQEDGARSCSLEDDLDQLIRSVNVRTSARASGQRSTDRWLIGLGKSPVSGSEIVESVSLKQALRKMCISQASEMAAMKRLSKPTGASTPSDSGATKKLYGSVAVQANGEQDDKSKVGNVYMLPEKLAGSSIGKANEISKGQSKSSAKKNLRSASPTAVKVRKTRIQDVISNKSSEAVEDVSVGATLPRQRKGKSVKTSSPRAVPVGGSRLVRPMFRNKTSTKKKVKPEPAIVPASHKHCETKGPKSHASKQKESLQDEPRTPAPANKKAAVSSTVDGSDFGTKGCGTGVIHGPKVGELSRSKEKGECSQSSKSSIGDYSTSTSISEDSYGSFSANGSRPHMSKDVRWGAIRCMAIQQGSLGLKNFKLLKQLGCGDIGTVYLAELVGSDCMFALKVMDIEYLISRKKMLRAQTEREILQMLDHPFLPTLYSHFTTDNLSCLVMEFCPGGDLHVLRQKQPTKTFSEAAARFYVAEVLLALEYLHMLGVIYRDLKPENILVREDGHIMLSDFDLSLRCSVSPMLVRISSVGRDEPSRPSGPCAQSCIDPLCIQPSWSNSSCFTPRLVSSRRPRAELLKKPSLPQLVVEPTEARSNSFVGTHEYLAPEIIRGDGHGSSVDWWTLGIFLYELLYGKTPFKGPGNEETLSNVISQGLKFPDNPAVSFHARDLIRGLLVKEPEYRLGSSRGATEIKRHPFFEGLNWALIRWTAPPETLKNIDTAPTPVTTRKKKEGKCLEFRLNGDDIEFELF

SEQ ID NO: 58733 - protein, 82 aa, Zea mays
  Coding DNA Sequence Number=SeqID_15358
  Homolog annotation: Hit_ID=Q6QP51; Match level="QueryCoverage=63%, HitCoverage=23%, E-value=2e-10, Identity=63%"; Hit description =Putative growth-regulating factor 1
MHPGYDQIAWGNNQTGQGITKGIKTSKESNHSSEPSGATPGGQQGRSDRSHFALPLTDMTGKQRCSPLSDCYATRQGEADSS

SEQ ID NO: 58734 - protein, 222 aa, Zea mays
  Coding DNA Sequence Number=SeqID_15359
MTICVWDTKTPSLVENLHSDWGNKSIVNYQDNPVPPHYAVVQVLEITDNGCEGWEIDFSVEGIITLQEAMNELVLWHRRDIKLGDELILSHLSHHKSPTPNSTPMQQKDSSIIPYPMVQENIAPTSTKTVETIISPLAKELDEGDIDKIVPQNVDANIKKEAKVDTNVEGPTTSKKVHQRIATDNVKKPLEAVTRYLQKLKRVMTDQSKAESASRGVRTRSK

SEQ ID NO: 58735 - protein, 273 aa, Zea mays
  Coding DNA Sequence Number=SeqID_15360
MQAEGSPPRRRKPAPSSGHHSQGLRKGPGPGKHLDRPLRSLSQLSPEDISPAHGLGSLTPGATHTRLSGSASRQASPSARNEEETRYYTQIPRCSGLDSHNEQTPALKVPLQTELRFHSRGYEQPPYRRACGTTNSGWLAADHCSSDNDLHSGWLNRSSNDLRADAAATRPSPTSSPKGRGQAIKAKEPEIPTQVLADGKAPTSARRRRAGVSTRQSKNTNAALAACDVLDGPPVRTAQQPPIRRADSHTLPQRWEVAPEAALEPAEPASQAC

SEQ ID NO: 58736 - protein, 76 aa, Zea mays
  Coding DNA Sequence Number=SeqID_15361
MGKLSLDWTNTRKAGSQWELRDGESIVYPPGKRLDGGVLSSRLAGTRSGLKKTSGLALCGVKVKQLLLVGQGEALL

SEQ ID NO: 58737 - protein, 73 aa, Zea mays
  Coding DNA Sequence Number=SeqID_15362
MAIESHGDATEAPRHVAQDRKTAVAGELICSSRKAWGYDGVSNICNANVYDVMLKFSNSNTGGVTVVVFLIVE

SEQ ID NO: 58738 - protein, 92 aa, Zea mays
  Coding DNA Sequence Number=SeqID_15363
MSFGLLTFDIVILYTTTQYKASGLVTSQLSTTIRPNLRYESASYASGYIGDGTKVSMPGYYFVERFYFALDMFECVGNVFGQRSKLFSAGHN

SEQ ID NO: 58739 - protein, 125 aa, Zea mays
  Coding DNA Sequence Number=SeqID_15364
MSGKPNCCCPARVQHSVLCPGDGGQPHQGVSQHVVRCEGGTRVLGQSHSRFHGEDGNEDLPVDATVGAEVVAARESFSADETVSATPRADFWLFGFDNLSLPLECGCGRGPCRNSVCPEVIAAAV

SEQ ID NO: 58740 - protein, 122 aa, Zea mays
  Coding DNA Sequence Number=SeqID_15365
MGWFLVILVLTSHGAAPSRAGQHQATHGWLKKAVHGWPERRSQGHTNVRRPETSEQTAGGLELVVGAWTEGEGDIESVDERDGVASDTTRRSGRHGLMFGSHQPAGQARSVNFITSQPNPYS

SEQ ID NO: 58741 - protein, 312 aa, Zea mays
  Coding DNA Sequence Number=SeqID_15366
MALGLLSPEKSQPESGSSSSSEPGGPYEANAQQVLRERAGVIRLLGVGVLRGNDARLRLRREVNARHVPRWGAGAVDSLDSQRGAASCLAMVAPPPPPAAGKVTGQAQMSFFRHAGKTSSIPPPSSGLTAVVVVVARRRKEYHVVAAVEGHELETPETEQRPGLERLLETTHLELDGKLLVNTQQAPTWRANCRRFNPGGGEPEPYVHADVAVEEVLVPCSYDVVAVGGALEPYRSTAVGAVGSLLTDSSEVEVESEPWGRARRRPSSEVEVESEPWGRARWRPSSEVEVESEPWGRARRRPSSEVEAGAEP

SEQ ID NO: 58742 - protein, 213 aa, Zea mays
  Coding DNA Sequence Number=SeqID_15367
  Subcellular localization annotation: CTP_CleavageSite=22; ConfidenceScore=5.08e-01
MPTGLNPSFACQGFLSLYSQGRASTAPGCYRRDSAIGTLGSSCGSGYGGANTKWCRSDGGGPYCPDGCHSLNDGDAVEYTVGSSRGGRSCACRRYRGRRGGCIQLQPAAHSKGDGGDFWVATPREKVISKLQAKLNAYNKMLEEQRDQQVAAVENLRRVQQGLDDRASILALSEENLKEKDEKERMLEEKEWTLGERVRQLEAARAAQTALGP

SEQ ID NO: 58743 - protein, 107 aa, Zea mays
  Coding DNA Sequence Number=SeqID_15368
MPSRRSTSSCHYFMAPGEAVELGGWRSNSLAADSAPGATLDVLDVCAGVCCRTECTAAAALGAGRLVARGVEEAAASSHHEVLGQEIMVLDDVDHGVEQKNKQKPKA

SEQ ID NO: 58744 - protein, 97 aa, Zea mays
  Coding DNA Sequence Number=SeqID_15369
MSGHVSAPDPRLVLIKVRVLFVPESQDPAVSGPDPTQRGLGPIQGVRFVPVEVLDLTRRSDQPLELVWEAQNRRGLEELKSHPSGYFGNLKSSSGLK

SEQ ID NO: 58745 - protein, 95 aa, Zea mays
  Coding DNA Sequence Number=SeqID_15370
MSSQHGSDYDWRTSPIDPQVVYASGGKAHGSYPMFDNVIDSSQVRIQHGGSSRSAARSSRRSTQDPAEVEQLREELRQHKDYLSQQAAQQEYYTT

SEQ ID NO: 58746 - protein, 769 aa, Zea mays
  Coding DNA Sequence Number=SeqID_15371
MGGLGVSDSFARELMRTCAAPGERMSSPELRESSARMLRVTGGCWPRNVPIPCVAEEDCFTSRMVHRWRVFPYGRNIGAVVWAVMDKDRQGAAQKRQATVRLHEARPKRQRGAPKAAASGGGKPPLAAKAGASAPSKAPEATAGAGGSKSTKVVPPASGVAEASKAARALPLSGKRVADFGTDITIDDYLGGSDEGQLAMVAPGAETATAAIVPRTRGEALGAGGEVSALAVVRDEASAATRRLKGVTEALSQATEALSQVADFASRTASGALTASVSAEVERLRTQHADAVREKSASDSKCRKLTDRVAALEREKADLRRQLAAERREANEAVAKGQAAHAEAKLARAKGNLAKELAGHQQKRLTALESRAKEAEAAMHAEAERTRTQLMDTYRELGARTGDFEVPDREPGLRCLQWVQEELLELPAVAGGLMSYASLVTCEGAMNALSREGCRHFEAFDQADEEFDRDIYKVEDPVVKESAGALYDRMWGLYGREVVRERAETARAQAERGERVDDFGALNSALPGPEPTLAEAVTGVALEPTPGTAAIATAAPTSAVAGEDLPPTVAEGAPDAPAAAVPSAEDPAAVAAEPRAEPTAEAPAASGPFAGGVVQDFGPAHATATTEFLAASTAEGGNEYGGSVSEFFDFTDSGSSVEWTGESSEEDLDYFAALDVAAAEASPHATDAPDVPGPSTGRRRRRAVAKRRVSAEEGARLRVSRAGRQELLSLPAAASTGERELRSLFAGEELRIMLFNYREMGLIPKVEPM

SEQ ID NO: 58747 - protein, 89 aa, Zea mays
  Coding DNA Sequence Number=SeqID_15372
MLNPREPPIRSRSNGRNQLRKLVHALKSLPYDGHPTTTALSSTSRSCPHLSTTPVLGGSAGTGGLGEGEILTDDGGGRPTMERAIPPRY

SEQ ID NO: 58748 - protein, 424 aa, Zea mays
  Coding DNA Sequence Number=SeqID_15373
  Homolog annotation: Hit_ID=Q6J9V9; Match level="QueryCoverage=19%, HitCoverage=30%, E-value=3e-10, Identity=53%"; Hit description =Putative uncharacterized protein
MGMSTGRGGIGFLDGFRKERRAAKLSSTNYKLGITPAEQQKADGWLAAARSSSSDDDFCSERPNSSSDDLRADADAIRPSPMSPLEGRGRAEGRRVGGQSAGGTDYLVGGETSSGCRGGRWHRKQRRSRSDRRAGHAAAASATNGERPSPRSLREGAGRCPRGDRPQLCALPSPALMMNILEAEGGAEAAARLASPHPGAGGHRLGHRGLSLLQHAPRSSPYDTEAGSHASCKLAQGRRSQTAACDQWVKGRTAMQAACNRTKGAHPFDFDASSMEAQAHTSWTGKGDTPKGILLREGSGPRAPLLIRGSKAGPSEGFNSRLRALGLRAHYWLALEGFDSRLRRRARDDPGYVQYITKARATLSRVRLTAAKSGLGRHRKLRLARPQGSDSASAPEDDELRLARPQGSDSASAPEDDELRLARP

SEQ ID NO: 58749 - protein, 179 aa, Zea mays
  Coding DNA Sequence Number=SeqID_15374
MCPQTPSLSPEYSHKAGLQAVITRMLLQTRPVTQRRPCGARYNGPDHTWALEQDEAVLRGDVTAGLRLVLNEAKGVPARFVFVKPATVAKGDERRVASLPSPQQRARWRLSNGSRGWRQTGGRRDGTGPRMGWGWQRRTGGGGIGDGSGAARVRRGWDRGWGHGRRGGSATRWSRNTIR

SEQ ID NO: 58750 - protein, 47 aa, Zea mays
  Coding DNA Sequence Number=SeqID_15375
  Homolog annotation: Hit_ID=Q9XEJ4; Match level="QueryCoverage=57%, HitCoverage=2%, E-value=8e-07, Identity=92%"; Hit description=Copia -type pol polyprotein
MTTERPLELLHMDLFGPIAYISIGGRKISNPRDLKRILETSSKMSSD

SEQ ID NO: 58751 - protein, 68 aa, Zea mays
  Coding DNA Sequence Number=SeqID_15376
MAVLGQRILVITAATLLGAFGFRRYLRTRIRKGEAQKIRRLTQRRSCEAGKLRHVRRKGNRLKDEKAI

SEQ ID NO: 58752 - protein, 61 aa, Zea mays
  Coding DNA Sequence Number=SeqID_15377
  Subcellular localization annotation: CTP_CleavageSite=26; ConfidenceScore=5.27e-01
MSRSSSSNGAPASDSGCFSRPRKRRSAMYNSEVRRWATRWAFGPHVNYWAALTDGTGALGY

SEQ ID NO: 58753 - protein, 158 aa, Zea mays
  Coding DNA Sequence Number=SeqID_15378
MMVLASVATTLFVILLLFCLPSCHHLRATPFLTEGVGAGASSPYSSYTSPDTDSRSGYCTSTRTFHIMRAPSFLPSSNVSFVFPTFALIFLPNLFPPPTVAAASRPTLVDADAQVFVSFSSNEQVCRIFPSPPALRNLGSGGGEGWGSDLLPTVPMHS

SEQ ID NO: 58754 - protein, 167 aa, Zea mays
  Coding DNA Sequence Number=SeqID_15379
MAARRVGRAVLSSLARSLGLRKPKGQAGSGAKNRHRTLSGGYKDQGEDGSNVPPGPDAGFKNAKRNGRSSNGSCTRNGCPANYSPRRINSATGQAALLAGAAGDASPSPKQPRQKRGSGAALANPASAKPLTASTYHPENLGPDRAPGLRPARMREQPDQPKHYARH

SEQ ID NO: 58755 - protein, 176 aa, Zea mays
  Coding DNA Sequence Number=SeqID_15380
  Homolog annotation: Hit_ID=Q6QP54; Match level="QueryCoverage=21%, HitCoverage=13%, E-value=2e-07, Identity=78%"; Hit description =Putative kinase
MALPVDVAGLCPRSGDVEAPPKPGSSLSSMAEAEPELLGRARRSPSPSPGSGGAEFAVFRGLSPSPSPGSGGAEFAVFRGLSPSPSPGSGGAEFAVFRGLSPSPSPGSGGAEFAVFRGLSPSPSPGSGGAEFAVFRGLSPSPSPGSGGAEFAVFRGLSPSPSHGSGGASFGAFGKA

SEQ ID NO: 58756 - protein, 27 aa, Zea mays
  Coding DNA Sequence Number=SeqID_15381
MAAARGRTVRDLVQGLVFLPDGPDASA

SEQ ID NO: 58757 - protein, 190 aa, Zea mays
  Coding DNA Sequence Number=SeqID_15382
MDEDCTQPLSSDPMINLNTTTFFLIVFLPFVRNLHKLEPLALTKKISKNAQEVPFIAPRQLGAVGGQQARLSLPSIEWRTGQSGAPPDNHCSLSGARFPSNSSRVDHCSFGPDGAPDTVRAHRTVRCTQLIVGAATRRPRIARLTVALTTVGSPDSPVNYSRTPPSNPESDEFTADQPGAPDTVRCARLS

SEQ ID NO: 58758 - protein, 487 aa, Zea mays
  Coding DNA Sequence Number=SeqID_15383
  Gene Ontology: Mol. function=pectate lyase activity; Cellular component=extracellular region; Biological process=pathogenesis
  Homolog annotation: Hit_ID=A2XQ06; Match level="QueryCoverage=67%, HitCoverage=61%, E-value=0.0, Identity=93%"; Hit description =Putative uncharacterized protein
  Pfam annotation: Domain name=Pec_lyase_C; Domain location=219-404; Score=342.9; E_value=5.7e-100; Accession=PF00544.10; Description =Pectate lyase
MGNRRARSIAMKSVAFFGVSTATGNHAAAATAHNEALEHSAVQPRTGAASSDTPRSPHAPVWGSPACLVAPAFATRIHGVSPSISVPRPPPKFLCKGLLVELVTAADSHLSLLCSGARKSINNITARRNLGYLSCGTGNPIDDCWRCDSDWHNNRKRLADCGIGFGRNAIGGRDGKIYVVTDPSDDDPVNPRKGTLRYAVIQEEPLWIIFKRDMVITLKEELIMNSFKTIDGRGANVHIANGACITIQYITNVIIHGLHIHDCKPTGNAMVRSSPSHYGWRTMADGDGVSIFGSSHVWVDHCSLSNCADGLIDAIMGSTAITVSNNYFTHHNEVMLLGHSDSYVKDKAMQVTIAFNHFGEGLIQRMPRCRHGYFHVVNNDYTHWEMYAIGGSAEPTINSQGNRYLAPTNPFAKEVTKRVETAHTVWKRWNWRSEGDLLLNGAYFTPSGAGASASYSRASSLGAKSSSMVGTITLDAGALSCHKGAAC

SEQ ID NO: 58759 - protein, 359 aa, Zea mays
  Coding DNA Sequence Number=SeqID_15384
MRGKANCCCLDRVQLSVLHPGRQSCCARVAAVTGLAEGVNFDNTSPIGRERRQLQRAWHAGSAGSSAASDVASCRLVRAWLSIHLMGDCCAARSTTPPRGGRCRPVREDLSGDLPVQVGAAAIRWRGAGAQVAAVVGAEVVAAREGFSADETVGATCGQTPDTLALMACPRPSCGGVGEGLSTTVFALRSSLLLFSHSKRRSLLLLNLRPLCDELEPEAAVLAWTEASSARKEASSAQEQVASQAEEVQRQRLELGQVICEQDQPRSHAAEVVSRAKVPGGQLAEATERPTEVSAWAGALAETRAVRAQARCWRPSSRWRSFHPCRRPRPSQIPPKVETTSRVLLLPLPMSEPAGNVCL

SEQ ID NO: 58760 - protein, 240 aa, Zea mays
  Coding DNA Sequence Number=SeqID_15385
  Homolog annotation: Hit_ID=Q6QP51; Match level="QueryCoverage=34%, HitCoverage=29%, E-value=5e-08, Identity=47%"; Hit description =Putative growth-regulating factor 1
MGVPDACALWRALIAVAGDRWREVAVAPLLHRTCPVNYSGAAVMISQGCQVPEPRLLGAPDTVRCTPDSPVNYSASALKIPEAEEFWAKSPGAPDTVRCATGQSGFVVKQPWPNRLTNRPYRRRIQCEDRLTPYPDMCASVGKVEPSSASGATGSSALPDLRPRPRKEVSALLDPMARPQPRPRKEVSASLDSRARPQPRPREESRPCPTPASASGEVSASPDLGARTDRTTGDTSLPYP

SEQ ID NO: 58761 - protein, 218 aa, Zea mays
  Coding DNA Sequence Number=SeqID_15386
MPPPLRHPILDRGLKSMRLLPVFVRHQPRHRLAQWLLHVHEDVHIMRAPSFSSSSDAPFVFPAFALYFLPNLLPPPTVVAASRPTLVNTGMASMRLLPVFVRHQPRHRLAYWLLHVHEDVHIMRALSFSPLSDVPFVFPAFALFFLPNLLPPPTVAVVSRPTLVNAGLRYWTTIALIAVDICYGVGGGVVSLRRVFVVSFSGNEHVCPHLPFSCSSKP

SEQ ID NO: 58762 - protein, 460 aa, Zea mays
  Coding DNA Sequence Number=SeqID_15387
  Gene Ontology: Mol. function=endonuclease activity; Cellular component=intracellular; Biological process=ATP synthesis coupled proton transport
  Homolog annotation: Hit_ID=Q6ZJE3; Match level="QueryCoverage=88%, HitCoverage=39%, E-value=1e-120, Identity=59%"; Hit description =Putative DNA helicase
  Pfam annotation: Domain name=Helicase_C; Domain location=142-220; Score=75.0; E_value=2.4e-19; Accession=PF00271.22; Description =Helicase conserved C-terminal domain
MGVEQNKIRRLKEHLLNELPPKRRQIIRLKLKAPDIRAATSSCGKRVNPNSCNGTLTIELPSKSNDDENTKEEEEDDCKKSPRSLTPQEIGIAKLSGFSEWFSNHFIMNGFDANHNLDPQSSCQKTIIFAHHLKVLDGIQVFISENEIRFVRIDGSTLQRERKEAVDSFRLDPEVKVAIIGITAGGVGLDFSSAQNVIFVELPKSASELLQAEDRAHRRGQRNAVNIYIFCGKNTLDESHWLQLNQSLFRVSSLMNGKKDAVREIEVDQVCQLEEIKDTEETQRKLHPLENHNADLTHVPKKLLESDDLSIDGFLGIEDLEFDLDFTIRTIPLEFEDENPGTSLKNNPTPTVLEDRSCIDVSLSPAAVFCSVLSSCKSIKSRKRLSGNSGSLSQAASVPDFPIQVESLRFEVKALLTYLFILSFACYCDCTLSTFLRLKHSETYAVGRGGGIATAMSAIP

SEQ ID NO: 58763 - protein, 65 aa, Zea mays
  Coding DNA Sequence Number=SeqID_15388
MAMFLVIARCGRVSNYLNERSVTELRARTAAATMGPLRRLRLEGKIWSGSFGRSYWWCKRNLFKP

SEQ ID NO: 58764 - protein, 145 aa, Zea mays
  Coding DNA Sequence Number=SeqID_15389
MGKSKKGGSSSHHSGDKRKREPTPPSEDFGDSEYLEEEFSSESEGSPVYTSPPASSDDSDDSQGIAAEVWTYIRAVERTGLEGSDESEVSSGEEKSSDLSEEERGGDGDDEGDGDDGGDGDGDGDDGKGDGKSGSSKACGKAPLA

SEQ ID NO: 58765 - protein, 220 aa, Zea mays
  Coding DNA Sequence Number=SeqID_15390
MSERQKMISCPSEQSPIALNVRSPGEAIAYPSQYSTDLARCVHGSGEVGVQVHSEKRVLSALSRLLFGLLLSLPTITLRRVPLSGFMVSPDISASVPSSARFPLKEVPPPGAVPEEQLDEPFTSFASFFLVIRVHFSVEEVDSGVLRVDRSSAPGLQEVVFARSAGGCAFSCFALAFLKIIEEGFLSGGSAMRCRVPSSSATDEMVPKQNMDLGRSMILC

SEQ ID NO: 58766 - protein, 53 aa, Zea mays
  Coding DNA Sequence Number=SeqID_15391
MHRAKEHVNLHPPFKHLLQLRMKSKLKMMVIKFNTMSKEPNGSSATNRMSMVW

SEQ ID NO: 58767 - protein, 37 aa, Zea mays
  Coding DNA Sequence Number=SeqID_15392
MGVDDFELLTIIGRGAFGEVSKETMYVFCVCLQLTPL

SEQ ID NO: 58768 - protein, 297 aa, Zea mays
  Coding DNA Sequence Number=SeqID_15393
EGIAAAAARAGTQTGGGAREEELGVCSSPVPRDGSGQTCRRRRSAWGELELQEQQGEEVDGYWLRETVGKKREPALVPTGSREGRERCREHMNSPVSRACRTGSRGKRKRSRGAAVQGWTAMGKEGGRRKGSQLGRRRAPKELLLLRARSRGRRSCRHAWRGRAREENLGAGRWRRHGCWLEEDEGKEGCTPMEEGRTCSLPTPLEPRRGRAPWGGSVSCCKRHGEACCRGDGQLEQRGERNSSAPRKGAGSARVGCSAAQASSVPWEEGSRAPCALGKKGLRVGEKAREKKMAAKE

SEQ ID NO: 58769 - protein, 85 aa, Zea mays
  Coding DNA Sequence Number=SeqID_15394
MGGALCPAASDMGEACYRGDGRLEQRGERNSSAPRKGAGSARVGCSAAQASSVPWEEGSRAPCALGKKALRVGEKAREKKMAAKE

SEQ ID NO: 58770 - protein, 309 aa, Zea mays
  Coding DNA Sequence Number=SeqID_15395
RNWGVVRFAIVPLIGLGVVMRMMVLVMTSDGKWYSFYLERQEIESVRSCSPVPSLEAPPAPPLGVPTTGVAVGGDDGSSSHNTDLSEEQEPEGWVARPITRDAARGCHFHDALDTLLCQALDRRTWSIEYRCVVFLHSREVYPDRWEVTCLVRRPENSLRGAEVCSEHYSISERDSAEAAMQDAARRALSHYCLVFGGVADGLNLKYYPRRPSGSTGGMVVSPVGEDNPRLSSTINLAAVLNMELDHALDELSRARAEIAQLRAERAERRHLEDGSPTPAGTQHPYRSPQRGHHAYGNPDCRTKINLEP

SEQ ID NO: 58771 - protein, 61 aa, Zea mays
  Coding DNA Sequence Number=SeqID_15396
MLGCQESLLLGESLLLLGESLLLLGRRVRLTSSYKYFAAVVKSAGERRDPSVKGGRNRAAT

SEQ ID NO: 58772 - protein, 106 aa, Zea mays
  Coding DNA Sequence Number=SeqID_15397
MARCRLVRGQHPAIPTLWIWERAISASIRNQRLPPAVAFASTRPDAPAPAISAFASTRLDQNLTWRAESPPQSAFASTRPDAPRLPPAAAFASTEDARPLRPPCSR

SEQ ID NO: 58773 - protein, 180 aa, Zea mays
  Coding DNA Sequence Number=SeqID_15398
  Gene Ontology: Mol. function=hydrogen ion transporting ATP synthase activity, rotational mechanism; Cellular component=proton -transporting ATP synthase complex, catalytic core F(1); Biological process=ATP synthesis coupled proton transport
  Homolog annotation: Hit_ID=P0C1M0; Match level="QueryCoverage=51%, HitCoverage=25%, E-value=2e-37, Identity=90%"; Hit description=ATP synthase subunit gamma, chloroplast precursor (EC 3.6.3.14) [Contains: Inceptin]
  Pfam annotation: Domain name=ATP-synt; Domain location=4-173; Score= -69.5; E_value=5.7e-08; Accession=PF00231.10; Description=ATP synthase
  Subcellular localization annotation: CTP_CleavageSite=36; ConfidenceScore=5.16e-01
MYCLMSGAPVWAILTSARAARAFNAPQGAVGAAGSRCSAVVLDVLLRRHHLLLGGARQRLLPRRGGHPRGATGAAVYVDATEDELFRLTTKEGKFTVEREKVKIEMQHFSPVVQFEQDPVQILDTLLPLYLNSQLLRALQESLASELTARMSAMSSATDNAIKLHKNLSRRSILLLGRSR

SEQ ID NO: 58774 - protein, 758 aa, Zea mays
  Coding DNA Sequence Number=SeqID_15399
  Gene Ontology: Mol. function=oxidoreductase activity; Cellular component=integral to membrane; Biological process=electron transport
  Homolog annotation: Hit_ID=A2Z1M4; Match level="QueryCoverage=74%, HitCoverage=55%, E-value=0.0, Identity=62%"; Hit description =Putative uncharacterized protein
  Pfam annotation: Domain name=Ferric_reduct; Domain location=503-742; Score=81.9; E_value=2e-21; Accession=PF01794.10; Description=Ferric reductase like transmembrane component
  Pfam annotation: Domain name=NADPH_Ox; Domain location=180-316; Score= 162.2; E_value=1.4e-45; Accession=PF08414.1; Description=Respiratory burst NADPH oxidase
  Pfam annotation: Domain name=efhand; Domain location=317-345; Score =21.3; E_value=0.0037; Accession=PF00036.23; Description=EF hand
  Pfam module annotation: Pfam domain module=Ferric_reduct::NADPH _Ox::efhand; Domain location=503-742::180-316::317-345
MWTPSRGSNARRSGHRRIADYLADDQTTTTATDASDNESYTTAYGEEFFAAAAAGSGGAGGMLPAFLADQGDLVEVMLELDEESMVVRSVTPTSAALYGAASLPAPPSAGVLGVSPSPRRAPSEGGGRLSRCSSTSSRIRKKFAWLRSPSPSPSPYRPTPAELQREAAMAARERRREQAQLNRSRAGARRALKGLRFISRTTGSVEAAELWRRVEERFNDLAREGLLSRDDFGECIVHIVILRTREETARSYCNCDVLIRDLMALHAQTAGMVDSKEFAVGIFDALARRRRQNLERITKEELYDFWLQISDQSFDARLQIFFDMVDTNVDGRITREEVQELIVLSASANKLAKLKEQAEEYASLIMEELDPEKLGYIELWQLEALLLQRDTYMNYSRPLSTASGAQWSQNLGVGGALTITGGGGDGGCGVDGDHPGPPRERRRSWGVRKAAARVRVAAEENWRRAWVLALWFAAMAALFVWKFVQYRRMAAFQVMGYCLPTAKGAAETLKLNMALVLLPVCRNTLTWLRSSWARFFVPFDDNITFHKVNYERTLLLYCVLHDVRASSPPPAASANIVASDVASHLPTVDSSPMMAKSPSHVPYCTAGSGADTRSNDSVPAMIATAIVVGITLHAGNHLACDFPRVIAASPEEYALVAGAFGADKPTYAGLLSGTEGVTGVAMVVLMTVSFTLATHPFRKGEPKGAGAAAGTSRLPAPLNRLTGFNAFWYSHHLLGIVYALLLAHGYFLFLVRRWYEKT

SEQ ID NO: 58775 - protein, 81 aa, Zea mays
  Coding DNA Sequence Number=SeqID_15400
  Subcellular localization annotation: CTP_CleavageSite=4; ConfidenceScore=5.35e-01
MRPSASYPVPVGRHHRTRQAGRRAALRQRLGGGRWAAHARASDSFAGAASSCFFFPSRLLRGAVLRYLLAIAFRGSATALG

SEQ ID NO: 58776 - protein, 58 aa, Zea mays
  Coding DNA Sequence Number=SeqID_15401
MAALDGSVVRLWDGDLTASPRGRMRSIWGEAPQVWGPGRGHCSTPARAGAVPRSTPSP

SEQ ID NO: 58777 - protein, 354 aa, Zea mays
  Coding DNA Sequence Number=SeqID_15402
  Gene Ontology: Mol. function=kinase activity; Cellular component =ornithine carbamoyltransferase complex; Biological process=amino acid metabolic process
  Homolog annotation: Hit_ID=Q6QP54; Match level="QueryCoverage=34%, HitCoverage=39%, E-value=6e-22, Identity=52%"; Hit description =Putative kinase
MEHRPGLERLLETAHLELDGKLFVNTQQAPTWRANCRRFETGGSLGRRVKCRCVPQPRWVGARPSAKGGERWPEMGVREVEIPRPSCSSRAQVGCACSRGLQASTRVRERAALRERLSRPRPRAAHPLSEGPGPSFYRRKEMIQPESAWGRVMMAPPVDVASPRPRLGNVEAPPKSRSSLSSVAEVESEPLGRARRRPSVEARAESEPWGRAKRSSSSSGAEPKSEPWVGRSGPESEPWVGRSGVRRLPGLSPSLSPGSGEAELSMATFALNAPAIWSVGAAIWSGLLLGEVRASGELKLYADGGYQLRIRRLEEGAHVVGSSWDIRRWVSVVFAGRVGPHTIVISAPTKLEVT

SEQ ID NO: 58778 - protein, 85 aa, Zea mays
  Coding DNA Sequence Number=SeqID_15403
MAHRSFSGPPEAFSPSFSPLCPWIHGPLFAIELVVAPSSSLPNSDDPETPLAHACLNSDDLTAAARSSAARCRSPLPGLIPSVRS

SEQ ID NO: 58779 - protein, 75 aa, Zea mays
  Coding DNA Sequence Number=SeqID_15404
MAMCCTRALGLSGVGCQDQELRRYPLMVLCCAAAMEPLHASDCQNCSPEPLLRRVLRSHVGKVLRNLSAVAINSY

SEQ ID NO: 58780 - protein, 143 aa, Zea mays
  Coding DNA Sequence Number=SeqID_15405
  Subcellular localization annotation: CTP_CleavageSite=50; ConfidenceScore=5.14e-01
MANGPKTDFWPRPRKRARGRAQDPPVVTPRETWKFGSTRPPLPCGRLPAPVSHRSCGHPVPTALRSACVLLPVPREAVLDTRCLRRAHPPGVRLVGSRAPAGVCLVPAVGLLSGGTEDTSLALFGPRMWAHAEGRRRVGVTRP

SEQ ID NO: 58781 - protein, 205 aa, Zea mays
  Coding DNA Sequence Number=SeqID_15406
MPNRERVTRAAGLRPGTLPPPNLPRGRGVPRKRTHGAPGAKEHQYYLLPRGAVGPPSAPRGSGYTLIDTTLGNGYLGSRIDEERSKMRYLGSGWGLATRTGRMRNGSCWSADRLGAWTVVARAGGQSPGALGAPGSRRRRGRYPRASGAPLGALRRNGLRAPHPTRLETRTKESDMRASRRVQKPEMRKEADEREALTGRTAGRP

SEQ ID NO: 58782 - protein, 183 aa, Zea mays
  Coding DNA Sequence Number=SeqID_15407
MARCMGSDQLHGKWVTRLVGKDVQPLQSVKLMVNSRRGDGIDLPPNRHTRWIYRQPQPQPAEMNPPNPPPGEIDPLIVAQMRMMQQMADTMADMRAQMQQGRQEMRQEREEIRQELRQEREEIRQERRAQQQLQQQFQQQQQQQQVPLPPPPPPVPPHDKHREFMSHKPPTFASSPDPLDADD

SEQ ID NO: 58783 - protein, 516 aa, Zea mays
  Coding DNA Sequence Number=SeqID_15408
  Gene Ontology: Mol. function=sugar:hydrogen symporter activity; Cellular component=integral to membrane; Biological process =carbohydrate transport
  Homolog annotation: Hit_ID=Q53WP9; Match level="QueryCoverage=100%, HitCoverage=100%, E-value=0.0, Identity=75%"; Hit description =Putative anion/sugar transporter
  Pfam annotation: Domain name=MFS_1; Domain location=109-474; Score =179.7; E_value=7.6e-51; Accession=PF07690.7; Description=Major Facilitator Superfamily
  Pfam annotation: Domain name=Sugar_tr; Domain location=105-509; Score= -100.2; E_value=4.5e-05; Accession=PF00083.15; Description=Sugar (and other) transporter
  Pfam module annotation: Pfam domain module=MFS_1::Sugar_tr; Domain location=109-474::105-509
  Subcellular localization annotation: CTP_CleavageSite=87; ConfidenceScore=5.55e-01
MASVRSCASVKSAVRSPVSYRSTRAVAAGSGRLRVRSSSLQALAGCASGGGGFGLLGSDDGPRVRRGGREVLATCSASFDGVRPAVVAGAAAQPGSAAFPERAKVVALVATIMLLCNADRVVMSVAVVPLAAQHGWSSSFVGIVQSSFLWGYVFSSMVGGALADRYGGKKVMAGAAALWSLATILTPWAASRSTIMLLAVRALFGLAEGVAFPTMSTFLPKWFPTHERATAVGISMGGFHLGNVISFLATPIIMSHIGLSGTFAFFASLGYLWISVWMMNVESDPLDSHTISKSELQLILAGRAGSKVQGSNKFPSLRELFSRTEFLAVTLANVVNNWGYFVLLSWMPVYFKTVYNVNLKQAAWFSAIPWAVMAMSGYVAGASADFLIKSGFPIGLVRKIMQSIGFMGPCVALLCLRFAQTPSVAAVLMTIALSLSSFSQAGYFCNIQDIAPKYAGSLHGMTNGIGTVAAIVSTIGTGYFVQWLGSFQAFLTLTAALYFSATVFYNVYATGDLIFD

SEQ ID NO: 58784 - protein, 652 aa, Zea mays
  Coding DNA Sequence Number=SeqID_15409
  Gene Ontology: Mol. function=nucleotide binding; Cellular component =Golgi apparatus
  Homolog annotation: Hit_ID=Q53WP4; Match level="QueryCoverage=60%, HitCoverage=54%, E-value=0.0, Identity=85%"; Hit description =Putative auxin-independent growth promoter
  Pfam annotation: Domain name=DUF246; Domain location=177-507; Score =567.7; E_value=1.2e-167; Accession=PF03138.5; Description=Plant protein family
MAAAATTSTTTATIPPGPHRRRQPNDIERDDDTCCGGAGVDRRFPHACGAQHDDDAERGLHHAAAATPCGGTRALLLARRRRAWATAAAAAAGAPPRTAWAWTRGVVLCLLALAAVVVGFQLGSHRGGGSTDAGAGGDGGVRLLHLHRVETADADVVMEWTEENLSALARRSPQPPISDMVAVAKIMNASLVIPTLDHQSFWTDPSDFRDIFDIDHFKESLKEDIVIVDSLPLDYRRAKPYVRAPTSWSRASFYRDCAKVLRKFKVVRFTHTDSRIVNNGLAPSLQKLRCRANYRALQYRKEIQGLGSTLVDRLRNGSAEHYIALHLRYEKDMLAFTGCNHNLTLREAAELTGMRFKVRRWKEKDIDSEEKRLQGGCPMTPREAAVFLKAMGYPSATNIYIVAGEIYGEHSLDALKAEYPNTYTHYSLATVDELEPLELYQNRLAAVDYIVALQSDVFVYTYDGNMARAVQGHRRFEGFRKTINPDRLKFVELIDKLDEGSMSWSEFQIVVRKHHENRLGGPYERLRGASPRQEEYFYSNPRTKGGLAGRIASVGATRLMKAGAKGGVFAFAPTTVTDPLCCDVKAEAPRELDALRFSESHLAIIHQTIRCLPDCPVSQRSNGQLRPTVDYADDGTIIIAEVRSQNYKVRTH

SEQ ID NO: 58785 - protein, 106 aa, Zea mays
  Coding DNA Sequence Number=SeqID_15410
MANSIRARTADGGQRDEGATANGGSQATASDLPRNRTVPSPDAHGMVSATLDDAPKPESEIPTRVPVTESEVTGEHCRGFRERSVGDLVEEAELTCMAHRSVTKRV

SEQ ID NO: 58786 - protein, 446 aa, Zea mays
  Coding DNA Sequence Number=SeqID_15411
  Gene Ontology: Biological process=cell volume homeostasis
  Homolog annotation: Hit_ID=A2WLM0; Match level="QueryCoverage=21%, HitCoverage=27%, E-value=8e-41, Identity=83%"; Hit description =Putative uncharacterized protein
  Pfam annotation: Domain name=Ndr; Domain location=331-444; Score= -76.4; E_value=0.00022; Accession=PF03096.5; Description=Ndr family
MQAACNRAMGMHPFDFDAPSMESQAHTSWIGKEDTPKGILLREGSGPRALLLIRGSKAGPSEGFDSRLRAFRLRNHYWSEVRRLAPRKGSTAASGHSGSAPTTDQGFVGWPPEGFDSRLRTRRARDDSGYVRYMAEARATIPRSIQCKDRLTPYSDARSSVDKAEENSAACATPTAVPPARVRLTAAKSSLGRHRKLRPRPTPGLGLNLDPGRRSPPRPTPGLGLNLDLGRRSPPRPTPGLGLSLDPRRRSPPRPTLGLGLSLDLGGASASPDLGLGRPRRRGHFSHYAEVNPDPNAEHNGENGWFCGEDMPNGGWVHDDEDIVDGYIAKEHLVRTRCGSVTVAVYGDEDKPALITYPDVALNYMSYFQGFFFCPEVASLLLHNFCVYHINPQGHEMGAAPMSSDVPVPSVADLADQVADVLHFFSSTTTSRLDWRQTPLGWLLHP

SEQ ID NO: 58787 - protein, 237 aa, Zea mays
  Coding DNA Sequence Number=SeqID_15412
MGCPSIALLLLPLEEHDLVEIGTFQPSFGFKDFHRAARLHSPTNGQFGGEKRAGLQPPPRPQLQGFSSSRLRQRSEASRGLPSLGLASRFFLLHLVETILQLCGGGVLQPCRGRLTAAAQPGCSIPSSVRATAASRTRGSHNTSYAVRAVEVLLLGSSSEAGPGSVEGGINVEGAAAPPADARTCRNSLYVDLLVGSRIVYPSEGYLSRKVMSEESLGSVGLAAYVYSIVFRIPLST

SEQ ID NO: 58788 - protein, 123 aa, Zea mays
  Coding DNA Sequence Number=SeqID_15413
  Subcellular localization annotation: CTP_CleavageSite=55; ConfidenceScore=5.64e-01
MASSLVLAVSPSPSLPRAPIKGPARAPSSPHNTSHPRCPPPRAVQASAAVPLPCSAEEGSDPPELLAPEEGQEPDPSEINLLCQESFDEGKSILPLMHYLPISLYHCLSLDYGMGIEMHGEYE

SEQ ID NO: 58789 - protein, 224 aa, Zea mays
  Coding DNA Sequence Number=SeqID_15414
  Subcellular localization annotation: CTP_CleavageSite=41; ConfidenceScore=5.17e-01
MPSSPLMPRVFPPFKPPDRGNRRLFAPSLEERNSVGIGSPVAPPRWGSPETVTTSSWVGRGKPDCDLGPTLSFKDVHHPRWGGCRTEPALYLPHGFVGHPLPRRSRERALTGPAGGPDFDNVGWIGGGRRHLQRVGSAGSAPAAPSVGGRLPRRVHGSVEAEAAREVPVADGIIATIRASGLRLFVLVLAPRASAWPRARLQQCLPLRPALLQFGHPEWGPLSS

SEQ ID NO: 58790 - protein, 160 aa, Zea mays
  Coding DNA Sequence Number=SeqID_15415
MEEGRRGGCGLRGTRQVACPYQRRLHPRVPGLSPEYSHEGRLQIVIKENLITDTTLIALVLTGPITMGRIPHGPLLAVTPWEARRLRQGLRLATREQRGPHRSPSSRCLRLVLTCSVNVAFVCTMRRRSHRAKGSMFAFAPTFSLRGASSTKSAGAEDRR

SEQ ID NO: 58791 - protein, 169 aa, Zea mays
  Coding DNA Sequence Number=SeqID_15416
MWGPHGRDTVREWSDRAMEQMANDEEVDDFSGLESLGTRAEDARMGVGEQLVPPTGSSEDPAAAAMPAGEDTPMAPTQAAEDPAAPAAPSQESSDEDLDNFAALDVAAVEAVPRLEVREVSGTSARVRFVEHRRRRVVSKHSVGKMSRSVSEDAALPRLAIKREGSKMR

SEQ ID NO: 58792 - protein, 152 aa, Zea mays
  Coding DNA Sequence Number=SeqID_15417
  Subcellular localization annotation: CTP_CleavageSite=38; ConfidenceScore=5.01e-01
MARTSVKPVALAPASLRLARPAPERRPPSPQRAAETAVGGAKVSMDISVEDYLVSGVTIFDAHTGRGPVGSESGQLAVVPAPAVARSVAVATGAKGSSQDPWSRFCASGEIASAAAAKDVATSIAQQLKHVAAFAEHIASGALTSGFAAERR

SEQ ID NO: 58793 - protein, 102 aa, Zea mays
  Coding DNA Sequence Number=SeqID_15418
MAPKRANSKAAPSIDDAARAALLADKKGKALADSTPQEAFEDDAVNSKRQRQDPPTLDGTVRTCSSEGAPQAPPPGFAPPEGEDTIEDKEVIDISAEDQLKL

SEQ ID NO: 58794 - protein, 176 aa, Zea mays
  Coding DNA Sequence Number=SeqID_15419
MGIRKKPEYVWKEYHENGRDPTEDDPTIVYMVGYLHTLDNHYDDLSSHCTHLNSRVESLERQVRELKQEKASLEECLDIAEGEEANTREAYRTLKMDYDKKLKKLAPKKKIQKKTTNRGCQTEKKKKKTPPAPPPPGVDDWSDAEDLSLASLDDLLKEFGDTLEKEFGSTSGNALM

SEQ ID NO: 58795 - protein, 238 aa, Zea mays
  Coding DNA Sequence Number=SeqID_15420
MSQWELHALPPPPPPQGSRVMGHNMPPPVIPAPGGAYAGEGATPGENPNPLHDFVNEFFASGGSGHNSNEATTPICDGVSFVPNCALEDTAPAPRSRTIRPKAADRSRRCRGHRQTVHHLVIGAAQIGANILFGDSAGEEVADLQNQAYMADSKDLNGASPNSNTRLTNLSTVEHKRLEDDMRKIDEEIHRQKDQVLKVADKWYLSHFRVDCHQKTVQEREINAEYMLAVLQQLPHDR

SEQ ID NO: 58796 - protein, 107 aa, Zea mays
  Coding DNA Sequence Number=SeqID_15421
  Subcellular localization annotation: CTP_CleavageSite=63; ConfidenceScore=5.41e-01
MGPRTSLTANRARASCVTGMRAPHCQWHPRSPTAQARALHQRRQVGPARQSVGRVCMLTEPLRGGTYTSATPSVCYARRNGGVKMAGARRPNPMAAIRNVRTIILGP

SEQ ID NO: 58797 - protein, 119 aa, Zea mays
  Coding DNA Sequence Number=SeqID_15422
  Subcellular localization annotation: CTP_CleavageSite=93; ConfidenceScore=5.34e-01
PIKRPSFGFNKGAKWEPKALWSGSTGLSGVHQTVSGAPPNSVRCTRGLQLKLATFGNFQRHSRYNSPDCYTGQCPSNSYFRANGYLLCIKCARSARRSQARPYWHTGQQTVPVRCAPDT

SEQ ID NO: 58798 - protein, 20 aa, Zea mays
  Coding DNA Sequence Number=SeqID_15423
MESCAPLSGLNGGACGYNDI

SEQ ID NO: 58799 - protein, 300 aa, Zea mays
  Coding DNA Sequence Number=SeqID_15424
MAGLAWYGNMVIIIGISFLNISFFCFGSNLFCIGNGLLCLGSADFFRGHQSGSLHRFGDRNSLHSFSFASLTLNSSGKKVNRQDFYTRQTAAYTRCTVDRRDQIVTLQGGTATRSETESFLDNELREGVFRTFGFLKPKRLFSRIKLVTKNDLAPRRGYCWDHASSPKAAYGEAMSSQHGSDYDWRTAPIDPQVVYASDGKPHGRYSMFDNVIDSSQDTAEVEQLREELRQHQERQRVQEEYLRQHATQQEYYATQFQQQQALIQQLAQAQGIQVPMAPPTSTSHTFSLAFTSTSTYRTS

SEQ ID NO: 58800 - protein, 498 aa, Zea mays
  Coding DNA Sequence Number=SeqID_15425
  Gene Ontology: Mol. function=glucose-6-phosphate dehydrogenase activity; Cellular component=chloroplast; Biological process =carbohydrate metabolic process
  Homolog annotation: Hit_ID=A2YKG1; Match level="QueryCoverage=99%, HitCoverage=75%, E-value=0.0, Identity=83%"; Hit description=Glucose- 6-phosphate 1-dehydrogenase
  Pfam annotation: Domain name=G6PD_C; Domain location=194-491; Score =533.5; E_value=2.4e-157; Accession=PF02781.7; Description=Glucose-6 -phosphate dehydrogenase, C-terminal domain
  Pfam annotation: Domain name=G6PD_N; Domain location=1-191; Score =104.0; E_value=4.5e-28; Accession=PF00479.13; Description=Glucose-6 -phosphate dehydrogenase, NAD bindi
  Pfam module annotation: Pfam domain module=G6PD_C::G6PD_N; Domain location=194-491::1-191
MTDAELRNMVSKTLTCRIDKRENCSEKMEEFLKRCFYHSGQYDSEEHFIDLDKKLKQHEIDIRQGPLGDLLRSAYRPLKDLSPIFAGVGADLMPPIMDSLQQEAQKMDPHGSRVSNRLFYLSIPPNIFLDVVKCASKSASSVNGWTRVIVEKPFGRDSESSAALTSGLKQYLVEDQIFRIDHYLGKELVENLSVLRFSNLVFEPLWSRQYIRNVQLIFSEDFGTEGRGGYFDGYGIIRDIMQNHLIQILALFAMETPISLEAEDIRNEKVKVLRSMKPLQLEDVVVGQYKSHTKGGTTYPGYTDDKTVPKDSVTPTFAAAALFINNARWDGVPFLMKAGKALHTKRAEIRVQFRHVPGNLYKGSFGTDLDRATNELVIRVQPDEAIYLKINNKIPGLGMRLDRSNLNLHYAARYSKEIPDAYERLLLDAIEGERRLFIRSDELDAAWSLFTPLLKELEEKRIAPELYPYGSRGPVGAHYLAAKYNVRWGDLSAEHYKA

SEQ ID NO: 58801 - protein, 175 aa, Zea mays
  Coding DNA Sequence Number=SeqID_15426
MGSAHVAFVSLLEERNLVEVSTFQPSLGFKDFEHQESLGSVGLATQGFSCSVKENPRPLCDEPEPEAAVSAWTQEELARKGGFIGLGQGGVAAMAGACPDPSPVLPSEAESDSAEGGDDAEGAVAPLTDDLFVGSRITCASESYFSRKVMSEESLGSVGLAAYVYSVVFRIPLSK

SEQ ID NO: 58802 - protein, 103 aa, Zea mays
  Coding DNA Sequence Number=SeqID_15427
MQAACNRTTGMRPFDFDASSMESQAHTSWTGKGETPKGILLYEGSGPRAPLLIRGSKAGPSEGFDTRLRALGLRALLLIRGSKAGPSKGFDSRLRPLGLRAHY

SEQ ID NO: 58803 - protein, 189 aa, Zea mays
  Coding DNA Sequence Number=SeqID_15428
  Homolog annotation: Hit_ID=Q6QP51; Match level="QueryCoverage=44%, HitCoverage=38%, E-value=1e-34, Identity=85%"; Hit description =Putative growth-regulating factor 1
MQVACNRTTVAHPFGFVASGMEAQAHTSCNQRAGYYVQETAPPLAPMPRLLDCGTSAATRGSPARDPTVPIGCNDHGSVSRGRRHDGVRRLAPRKGSTAAPEHSGFEPITDQGFKGWPLGRVRQPPQSTRAPRPLLIRGLKAGPSEGFDSRPRARRVRDDSGYVRYMAKARAALPRYPRTFPRPAGAIL

SEQ ID NO: 58804 - protein, 170 aa, Zea mays
  Coding DNA Sequence Number=SeqID_15429
  Subcellular localization annotation: CTP_CleavageSite=87; ConfidenceScore=5.68e-01
MLPQPSPRVRGSQPPMLGFLPSAGAGIRFVLTSTFGPARCVDLGQAARSGAVGRRSGAAARPGAVGRRSGSGRAGAQRTEAGFDLEQASSIWSRRTKDGGRQRRSGAGGVELAAEQGHRGSPERAKQGPGDERRQGLRRCPVSASKKRSCAVAAWRHERGEGLRLGESRG

SEQ ID NO: 58805 - protein, 127 aa, Zea mays
  Coding DNA Sequence Number=SeqID_15430
  Subcellular localization annotation: CTP_CleavageSite=72; ConfidenceScore=5.28e-01
MSGAPGDSNSNSPPSGISRGTRAIIHRTVRCTPDSVRCAKEKQPQELASFGNPQRLVRYNSPDMSGVHRTVRCNSGATAISAPTTTCGALNARAEVRRAHTGTPDSKQYVSGVHRTSRRAHKSEAPT

SEQ ID NO: 58806 - protein, 84 aa, Zea mays
  Coding DNA Sequence Number=SeqID_15431
MAAAGGRKQQSNRLQAHIPSWSSRGALSHDVKTTRLDRKGDISKGILLREGSGPRALLLIRGSKDGPSEGFDSHPKALGLQAHY

SEQ ID NO: 58807 - protein, 348 aa, Zea mays
  Coding DNA Sequence Number=SeqID_15432
MEPEIILDKSPNLVNEQTNLSRIHHTFNIYRNDKVNTTNFLSKSQMNVSTGAPINAAILNGHLWRKEGPRVRWKVGHEESNGELLLGEIVGQRELEAGVFSTKETEQLPPSSEGKRAPLPRDCVGSGTVVGMTIVGRTMGFQIERPTTRSITFGFNMAITDQMGNQEGDSVVAFERMACENFAVAAPVWSHKKKRRQSKRGKGGSELVCNSRQESPTSPDDVETPSFSAMVVEEVAWCYGIEVEALLIHETMPEDFLLFLPDEESATMVFNDGKVFIGPHFSLVFKRWSRFAHASSSLTSSLVDIEIWGIPEHAWFRSMEDSILKDSCCILEVHHNTLMKTNFSSFDV

SEQ ID NO: 58808 - protein, 149 aa, Zea mays
  Coding DNA Sequence Number=SeqID_15433
  Gene Ontology: Mol. function=methyltransferase activity; Biological process=metabolic process
  Homolog annotation: Hit_ID=A3AT25; Match level="QueryCoverage=98%, HitCoverage=48%, E-value=3e-48, Identity=58%"; Hit description =Putative uncharacterized protein
MGVAQTIKSSLDQSAEYCNMRQANAVIRALGNENIIRESYSSSVDVLLSLRDLQLGAIGDLKVIVPGRRRQFILGEQETSLYCYKAILLDAKKQTETFVYHCGVFIVPKVFLDSRHANIDMDIIKKDLSPLVKDLEPGNPEEEAPIPAI

SEQ ID NO: 58809 - protein, 104 aa, Zea mays
  Coding DNA Sequence Number=SeqID_15434
  Gene Ontology: Mol. function=protein-tyrosine kinase activity; Biological process=protein amino acid phosphorylation
  Homolog annotation: Hit_ID=A3AA52; Match level="QueryCoverage=71%, HitCoverage=12%, E-value=5e-30, Identity=81%"; Hit description =Putative uncharacterized protein
  Pfam annotation: Domain name=LysM; Domain location=3-49; Score=11.3; E_value=0.041; Accession=PF01476.11; Description=LysM domain
MRYQIGLGDTYWIVSTTKLQNLTHYQAMERVNPTLVPTDLDVGTMVTFPVFCQCPATADNATTLVTYVMQPVDTRIRRISSSRGSGSGTKEAGAGALPNEPLIL

SEQ ID NO: 58810 - protein, 132 aa, Zea mays
  Coding DNA Sequence Number=SeqID_15435
  Gene Ontology: Mol. function=transporter activity; Cellular component= intracellular; Biological process=transport
  Homolog annotation: Hit_ID=A2X924; Match level="QueryCoverage=96%, HitCoverage=18%, E-value=1e-42, Identity=63%"; Hit description =Putative uncharacterized protein
  Pfam annotation: Domain name=CRAL_TRIO_N; Domain location=60-129; Score=23.9; E_value=0.00022; Accession=PF03765.6; Description =CRALTRIO, N-terminus
MQLTFWRRQCSVAESNVDSILISVSNDERRNRAYAKISEDEPRHTRMRSLKNKALHASARLTHSLKKRGKRKVDYKVPRIAIEDVRDAEEEQATNSFQFLKARKFDFEKAAQMWADMLQWRKEFGTDTRCIL

SEQ ID NO: 58811 - protein, 129 aa, Zea mays
  Coding DNA Sequence Number=SeqID_15436
MEKPQGKNEKPTDSSHKKKDVKKEKDEEEEIIHCNSQATMILLASLCREHYKVSSLHGVNLTLFNGRLSEDGTFGLEMNVHSMKGAVWEKDEPVPKLRMKKLRLSARAAIENGTDLKENILPSHRQITP

SEQ ID NO: 58812 - protein, 156 aa, Zea mays
  Coding DNA Sequence Number=SeqID_15437
MMVLGSVAATLFDILLLFSLPSCLHLRATPFSAEGVGACASSPYSSDTSPDTDSRCGYCTSTRTFHIMRAPSFSSSSDVPFVFPAFTLFFLPNLLPPPKVTAVSRPTLVDAGAGRVGHAPGLSLCVSSRKTWWRLPRLGYLGDEESRSEILDNQSP

SEQ ID NO: 58813 - protein, 134 aa, Zea mays
  Coding DNA Sequence Number=SeqID_15438
  Gene Ontology: Mol. function=transposase activity; Biological process= transposition, DNA-mediated
  Homolog annotation: Hit_ID=A2Y663; Match level="QueryCoverage=100%, HitCoverage=57%, E-value=3e-21, Identity=46%"; Hit description =Putative uncharacterized protein
NTAEGTYNFTSTQPNGPDLTQIGSGDVPINVEDREDVGDPLADHRQNEVEDRVYEVEGVDVNANRQDERSKRTSAVSRNEEEKGPKRPKKSSNIEVLMERYLDIRSKQAKYEATLLAREREAREGDDFSIKNCI

SEQ ID NO: 58814 - protein, 143 aa, Zea mays
  Coding DNA Sequence Number=SeqID_15439
MKRNKFTTRTELKSLTKSIKCAKTECGRLRMLKVCLGDSYMRIGVPFIALRQLGAVGGILGRPKLPSVGWRTGQSGAPPDNHCSCPVRDFLPFLAQLTVVTSGWLAHRTLSGAHQTVRCPQPTVGAGHASPADLAADRYAGGR

SEQ ID NO: 58815 - protein, 47 aa, Zea mays
  Coding DNA Sequence Number=SeqID_15440
MSVSEYHDKFIQLSRYAPDERLLDKALAIEHKRVHLGDLKRRAIAQG

SEQ ID NO: 58816 - protein, 154 aa, Zea mays
  Coding DNA Sequence Number=SeqID_15441
  Homolog annotation: Hit_ID=Q8W0Y2; Match level="QueryCoverage=36%, HitCoverage=2%, E-value=2e-08, Identity=60%"; Hit description =Putative gag-pol
MTPRVHHDAGGSQPLTAARRRQQDPCRTASCAPTGLRRSSDGHAITCTGPKLSPDSHVGMYTGLRHFSAGHQPLQPGTVLRFGSLEFMSLDGSYDMVLLPRGATTATVFDSPGGGELGDSISPRRKRCAPVVLATLLAGGGGDEATMAAQEAAP

SEQ ID NO: 58817 - protein, 199 aa, Zea mays
  Coding DNA Sequence Number=SeqID_15442
  Homolog annotation: Hit_ID=Q6J9V9; Match level="QueryCoverage=41%, HitCoverage=30%, E-value=3e-12, Identity=55%"; Hit description =Putative uncharacterized protein
MQAACNRTKGAHPFDFVASSLEAQAHTSWTGKEDTPKGILLHEGNGPRAPLLIRGSKAGPSEGFDSRLRALGLRAHYWLAPEGFDSRLRARGARDDPGYVRYITKARATLPSTKLRRPDGRDSGQGSTQGTRSRLARAWHRAKTADPGGFTSRPRVPSSNGRTTDSPEAQLEQASRRSNLGQIAMPTDCIAGAFNARIA

SEQ ID NO: 58818 - protein, 220 aa, Zea mays
  Coding DNA Sequence Number=SeqID_15443
MTNSKRLAGNRSGSSDNDLRLGRLDGSGDGLRANATAEGPSFVSLMEDENQPLKPKSRRLGAQVAPTVSSAETTAGARGSLTSGCHHLSTDNSGPLPSNTTPANSGRPEAHRQVLTPVLATRTRTGPSQNTNAALAAYDVLGDPPPPIAGGAARTGGGGRQRRQRQSRSCRGARRAVAASATGGERPSPQITEGRSGPLPMQRQAPAQPALRLSKDDENP

SEQ ID NO: 58819 - protein, 221 aa, Zea mays
  Coding DNA Sequence Number=SeqID_15444
MRERSDRPKHHEKHSDLRGVKPLLRGLSGYTRRVRSRAPTRTRQKPRKAGPLTENAAKASKRVPTLPSRLRGYCQENSAARSAPTAVSTTQAKTDNKSRSTTEFGLGRNRKLRLARPQAPASGGGFRLARPQAPASGGGLHLARPPDSASTPVSGGIASSPDPGLGLKRSLRLVRPWARIDRANRGYIITLFLARSGYKEQDRRPIWLTPATGNDDAPRAP

SEQ ID NO: 58820 - protein, 314 aa, Zea mays
  Coding DNA Sequence Number=SeqID_15445
  Gene Ontology: Mol. function=transcription initiation factor activity; Cellular component=transcription factor TFIID complex; Biological process=transcription initiation
  Homolog annotation: Hit_ID=Q949D7; Match level="QueryCoverage=56%, HitCoverage=25%, E-value=7e-35, Identity=50%"; Hit description =Putative uncharacterized protein C555ERIPDS
MLTKPLPLSCAFWLNLNCGIKRSWDFMRVDPSHSAGILPESRFGEDSIIGVLDTGIWPESASFRDDGMSEAPRRWKGQCIAGDRFNATNCNRMPSQVMDLRRHLSQFSNPTVAASSFSEEQFRLPTERQRNEVNKDDFLRVIVNIVGDQMLKQAAHKVFVQMQAHMQRNRQANSSQQSLFSQLSAQQMASNGSAQLHDQKIRPPGPPNQGQKNQVSSSPQAFAPPSGTQPHNSVHYLAHDNPNQNPDAKGTNVVPNQPSRMNTSVPLQTKNKQHQPTQLQQASQQIYGASNPGAQAYPRSITGSLRSPSPVPET

SEQ ID NO: 58821 - protein, 129 aa, Zea mays
  Coding DNA Sequence Number=SeqID_15446
MARSLGFRAAARGSRSHGDLVKHKNRDQNEKTPCTFTSSRRRRVKIVRDILYGEGNSERHDDGARPTGKGGEEPWENTGRDVRLHMKLEPRAILSTLCHTQFLEGKPNVNHHHLLSTENSGDNLGCGGL

SEQ ID NO: 58822 - protein, 85 aa, Zea mays
  Coding DNA Sequence Number=SeqID_15447
MAHQSFSGPSEATSPLFSPLCPWIHGLFLAIEFAVAPSSPLPNSGDPGGTLAHACFNSGDLTAAERTGAARSHLFSLGLTPLKVA

SEQ ID NO: 58823 - protein, 90 aa, Zea mays
  Coding DNA Sequence Number=SeqID_15448
  Subcellular localization annotation: CTP_CleavageSite=49; ConfidenceScore=5.08e-01
MCAPDSPVRQPRHPTVRVLTVSTVGALTTWGTGQALFTVRKKFDPISLSVTNEKETLNNELKGEKSIDSGYRKKKDRKNKKRIKKIVYSQ

SEQ ID NO: 58824 - protein, 32 aa, Zea mays
  Coding DNA Sequence Number=SeqID_15449
MASNIAHVGSSKRGDLISSSTAHDNKRGGLEG

SEQ ID NO: 58825 - protein, 309 aa, Zea mays
  Coding DNA Sequence Number=SeqID_15450
MAHRTVRCTPDSPVPPATSSLPLDSTVEASDLWARLGVRCTPDIYCSLSGVPEWARLPSARAERALNARQRAVGAEKTVAPESHRTVRCTPDSPVNFSGLAVGVSRSRRVPEADLPWRTGHCPVREVNARRVPRWGAGVVDSLDSQRGAASCLAMAAPPSPPAAKKVTGQAWMLLFRHAGKTSSIPPPAGGLTAAIVVVARRRKEYHVVAVIKGHELKTPETEHRPGLERLLETTHLEPDGKLFVNTQQAPTWRANCRRFDPGGSLDRRVNCRCVSQPRWVSARRNTRGNKERGTAARVVLRPRRMRLQ

SEQ ID NO: 58826 - protein, 355 aa, Zea mays
  Coding DNA Sequence Number=SeqID_15451
  Homolog annotation: Hit_ID=A7R518; Match level="QueryCoverage=18%, HitCoverage=34%, E-value=2e-10, Identity=50%"; Hit description =Chromosome undetermined scaffold_833, whole genome shotgun sequence
MGAPDSPSSGTPDSLVNYSGAALGKPEAKEFELIHPGAPDTVWWHTEHCPVAHWTVRLSTGALSRLILSDDSLRTAANELRASKCFFDCRAPMLYYVLLTLQDSVHKVFYAVVEAAAVRADNNHLGGLVRYPVSTTLPQIGSRLFLTWGVFWSFPEVHKVQHKPTKKSHFTKNHRTIRYATRLSGAPTEQQSSSPTVDCIDDSTMNRAEVRTVKSERTGLSGASRGQRTSTVNRSKPQRSRLRPLKGHDLASPEPSLGQEQQTQENSAACPAPTTVPPARVRLTAAKSSLRRHRKLCLARPQGSDSTSTQEDGLRLARPRGSNSTSTPKDGLRLARPQGSDSTSTPEDGLRLARP

SEQ ID NO: 58827 - protein, 336 aa, Zea mays
  Coding DNA Sequence Number=SeqID_15452
MRRKDSGFPPSGGLEGEKTRCIREQQESLLSRREDDTPVIRPSNGSRTRNGRPANHSPRRINSATGQAAPLAGEAGDASPSPDRERGIPRKGSFPVKEPGSEPPLLIRGSKAGPLRGSIAASDRVGPTPTTGQRLAPEGFTVASDAERGMTRGDRVRQITRRYFWACLWAPSRPPTNGARTSTRITRLQLTGDTMFGAHQGARTRAKPRKTANSAPPDPRLGLGLGPGRRRTPLRPTQGSDSGSTPEDDGLRFARPQGSDSALASTERPPPRPTQGLGLGLGHGRQTRPRLRRSLHVARPRAQASHVNRKRHHHPIPSRLGPQRTRPVSHLASSAR

SEQ ID NO: 58828 - protein, 85 aa, Zea mays
  Coding DNA Sequence Number=SeqID_15453
MAPPVDVVGLRPRLGDVEAPLRSKSSLSSVAVVESEPWGRAKRSSSSSGAEPKSEPWVGRGRVRRLPGLSPSPGSGGAEFVVFRG

SEQ ID NO: 58829 - protein, 204 aa, Zea mays
  Coding DNA Sequence Number=SeqID_15454
  Gene Ontology: Mol. function=protein binding; Cellular component =chromatin; Biological process=auxin mediated signaling pathway
  Homolog annotation: Hit_ID=Q69LJ9; Match level="QueryCoverage=81%, HitCoverage=93%, E-value=3e-57, Identity=66%"; Hit description=Auxin- induced protein-like
  Pfam annotation: Domain name=Auxin_inducible; Domain location=61-154; Score=112.9; E_value=9.9e-31; Accession=PF02519.5; Description=Auxin responsive protein
MGDDDGAKAASGVKQIVRLRELLHRWHFTALGAKQQQQREEEGRGHAGVPEGAVAPAIPPFVLRRLRRTETADSVSDDESCHSPEPPPDVPRGYCPVYVGPEQRRFVIPTSYLAHPVFRLLLEKAEEEFGFRHQGALAIPCETEAFKYILQCVERHDQGLSGGGGGDEAANHPTTTVLEQEPAFGSHWFTASTHTVSREPGRCR

SEQ ID NO: 58830 - protein, 230 aa, Zea mays
  Coding DNA Sequence Number=SeqID_15455
MQAACNHAKWTRFSDSRHTQHGGIGKGDTPKRILPREGTRLRASLLIRGTLGHFRDQRERSCNGIPSEGGIEPSDPVARGPGPADHPQRLGGCSRKPGSGRTVDSVNIPARELGPRPYTRATASSHEGTTRPAEALREALRPRRSETTPPRPRGLHPAGALARTHQNKMQPRKAGPLAKKCDESLQASANTPFEARGLLSGTIIRGTLKTPNSQLVTPISIKLQRPDGCD

SEQ ID NO: 58831 - protein, 258 aa, Zea mays
  Coding DNA Sequence Number=SeqID_15456
MEDEASRGAASAWVGYPLLPLASGGEWHPPASRRLPPAMPGKAGRRHSARAQHYVLRPDDGCAAYREGGAHALGGSGKGEDLLARFEASAAGDGFSTDEIANSASSPGSLSPGLNGWLSSSVASRPEPAGSECLVACAFCGRRGQKTHPRCVVKLRLLSSCVEYLDFFVGNRDVCASESCFLRKVMSEVSVSRRRGSPSARSALPLTRTFTRPRGPVTDSVEKARRIASAEELPNVKTCSVHGITLSERELLIAEGDE

SEQ ID NO: 58832 - protein, 95 aa, Zea mays
  Coding DNA Sequence Number=SeqID_15457
  Gene Ontology: Mol. function=oxidoreductase activity
  Homolog annotation: Hit_ID=Q8LNJ6; Match level="QueryCoverage=43%, HitCoverage=10%, E-value=9e-09, Identity=68%"; Hit description =Putative gibberellin oxidase
MKLHASVNGTSLVALVDLGSMHTLIQKVAATWLGLIVKPHSSIFVKVAFFSDPSPNLVVKCMESCCTEAYPARSTFAPIKSGDYIEKTRETELYL

SEQ ID NO: 58833 - protein, 247 aa, Zea mays
  Coding DNA Sequence Number=SeqID_15458
MALLDPRKRFQPEVALNLVRNPLGWGVLAFAGRICVGVSPLDDLTAEEFVFFVSKLPSGLALPIPSFFVQLVEGLGLQPLPVASCFILQAAIIAYLHGMSVEAMLLPASSSSIRGEDDYQPREGGQLAELRLHPSRPQLFWGGKRAVLWLHLFGFDGFGAASKAASHRRAGHGCPSTARATIAPCVGPRYGTRLSGYTALDHPRRQAFGYGTRLSGHTGSGPPHGTSSRSLEPAPRLSGPPAFAERS

SEQ ID NO: 58834 - protein, 68 aa, Zea mays
  Coding DNA Sequence Number=SeqID_15459
MNSGAREDLEWFRLPERNTLLHWEASRISDDGHSAPRNMGALFDNGLDRHAVCRMALALPASGVDRTH

SEQ ID NO: 58835 - protein, 335 aa, Zea mays
  Coding DNA Sequence Number=SeqID_15460
MASAARLRGWSRQWTTRPGSSHRCYASSAWEVTCFWANEAPFRAKSASVHADTAASGSGSSQSSRGATHTWLSGSASRQASPGVRNEEATRPYAQIYKCSGPESRNEHTPALKVPLQTESPPRSTPGLELNLDLGRRSPPHPTPGLELNLDLRRRSPPRPTPGSDSTSTSDDGLRLARPRARTQPRPRTTVSASLDPRARTQPRPRTTVSASPDPRARTQPRPRTTVSASLDPRARTQPRPRRSHHLARPWARTDHATGGAIITLPLASSGYREQDRRPIWLALVKQVMMAPRVLRDDGGSQPPTEARRHQQGPESPDSCASTGLKRSSDGHNIT

SEQ ID NO: 58836 - protein, 96 aa, Zea mays
  Coding DNA Sequence Number=SeqID_15461
MEARMMAEREARLADHQRMAEMFQYMQSLGAAQGFAPPPPLFPAVDPAIFHTPMSIKIVVRCWANLGRHPTTLMKGSTQRSTSRTAHLHESYVFSV

SEQ ID NO: 58837 - protein, 249 aa, Zea mays
  Coding DNA Sequence Number=SeqID_15462
MFAASSLEEESVVLSSESHSRHTKTAPPALLRLLCHPPGVRLTATKSGLRRHRNLCLARPQGSDSTSTSDVGLCLARPQGSDSTTTSDDGLRLARPQGSDSTLTSDDGLRLARPQGSDSTSTSDDGLRLARPQGLDSTSTSDDGLRLARPQGLDSASTSEESPPRPTLGSDRPRYRGPIITLPLASSGYGEQDWRPIWLTPVKQVMMAPRVLRDDGGSQPPTEARRRQQGPDSCASTGLKRSSDSHDIT

SEQ ID NO: 58838 - protein, 161 aa, Zea mays
  Coding DNA Sequence Number=SeqID_15463
MLVDYTMVLNRPSVMVEGPTQQDVESVVEVTPASGVTSDGSSVPSLWLLILRELRVVARTATSVVVIVSARVSSSSRDALWWCRGHLWLRCRGSLPPRLHVLLRQGGRVLLLLPLASVLLLLGQVTMQSLQVARLTCHRAAQCALRQTRAKRGSLIYMQCI

SEQ ID NO: 58839 - protein, 287 aa, Zea mays
  Coding DNA Sequence Number=SeqID_15464
  Homolog annotation: Hit_ID=A2YGC2; Match level="QueryCoverage=54%, HitCoverage=70%, E-value=1e-09, Identity=30%"; Hit description =Putative uncharacterized protein
EQEQQDSSPSPQREVESERPPSPAPRPEMLPAPPQGIPTIGGDPDGDGDNDDIGGSSSHDTERSEEPELEGWIARPITRDAARGCHFHDALDTLLRRAFDRHTWSIEYGCVVYQHRRELYPDQWEATCLVRRPDDDLRGAEAFSEHYSITERDTAEAAMQDAARWALSQYCSLFSGVADGLDLKYYPCCSTGSAGGVIVSPVGEGNPRLRSMVNLVVVINTELDHALDQLGKVRAEVAELRAECAARHYLDGGSPAPVGIQHPYRSPPRGRFDYGTPDCRTRIDLDP

SEQ ID NO: 58840 - protein, 218 aa, Zea mays
  Coding DNA Sequence Number=SeqID_15465
MGGPAEQQKADERLTIARSSSSDNDPRYGWSNYSSDGLRVDAAATLPSPTPTLEGRGQGPSALRQIPTHILPDEWGTDLRVEAPYRCKGRTAPEHERRPGSARHLGRSSRTHGATTALAAGGGAGSQAGEPNALKLTTPAVGQPRVVEVRLSRRASERPLPQTLRERLTHEPAREVELRLTPASAPARMMNILEAEGGTKIAARLASPHPGAGGHRLG

SEQ ID NO: 58841 - protein, 152 aa, Zea mays
  Coding DNA Sequence Number=SeqID_15466
MGKNNKRKREPTPPSEDFGDSEYSEEEFSSESEGSLAPIPLRESSDDSDDSQGLAVEVWTYIRAVERSGLEGSDESEYSSDEEDSSEGGGGDGDDDDDDDDDGGGGGNDGNGGDDGDGGGRGGSGGSKDGDGGGNRGSNRGGSGRGSNRASD

SEQ ID NO: 58842 - protein, 321 aa, Zea mays
  Coding DNA Sequence Number=SeqID_15467
  Gene Ontology: Mol. function=aspartic-type endopeptidase activity; Biological process=DNA integration
  Homolog annotation: Hit_ID=Q8H8K3; Match level="QueryCoverage=83%, HitCoverage=20%, E-value=3e-16, Identity=26%"; Hit description =Putative retroelement
MSFNLGVWRVTRDGMKPPKNPEKPTTIFTLKTATEIWLKLHELHDGTSNVREQKHCLVLNEYNSFAMKDNELARDMYSCLNLIIIELNSIGINKLGDVDIVRKIISLLPQQRYESIITILHNMEDLSTMTPTIVIGRIAAFEMSQKCVGERSQLPQGHMLLHVMKGRVKRRLPLQVRQVKKREEEESDDDEDNQPSTSSSEDEETIRRIRKFARKFETIANLNYELSTAIEQLESSAPSTATDDGLIKKNEKLKAKLATSQEAIENLLGKMLCHKKDHKSFQYKAKIGDKQKLKKNLTSKIPNTYINKVDKKAATPYLIKK

SEQ ID NO: 58843 - protein, 107 aa, Zea mays
  Coding DNA Sequence Number=SeqID_15468
MSICFAGCSSPGPRKNVLTIYWALGPFVRSFTLLVDPGDICPPQSYLKRFQTMRNRIPEVAEVVVIEDFYQGSNDSAFVRAILQKAPTTFEHLFREADLYITTDEWA

SEQ ID NO: 58844 - protein, 35 aa, Zea mays
  Coding DNA Sequence Number=SeqID_15469
MGKTHPTSGSHTHVAMRKRKGWHGGAWGSDQIRSY

SEQ ID NO: 58845 - protein, 162 aa, Zea mays
  Coding DNA Sequence Number=SeqID_15470
MAGHGCPAPWCFKFKTECRQIVWRTKRRCQETFFLDIVCPHIPPTVQGALRWRPQRLSDFRPRPMPEIPVASVEAWRSRGGEDHPGELQADFARAIAGQRGFVVRFTAWVAHQNGIPISTASTAFMVEGGFCATGPKRQRPGQCCFSADGPRSGVDPVAFGP

SEQ ID NO: 58846 - protein, 1064 aa, Zea mays
  Coding DNA Sequence Number=SeqID_15471
  Gene Ontology: Mol. function=cellulose synthase (UDP-forming) activity; Cellular component=membrane; Biological process=cellulose biosynthetic process
  Homolog annotation: Hit_ID=A2Z1C8; Match level="QueryCoverage=100%, HitCoverage=100%, E-value=0.0, Identity=88%"; Hit description =Cellulose synthase A catalytic subunit 9 [UDP-forming]
  Pfam annotation: Domain name=Cellulose_synt; Domain location=249 -1059; Score=2058.3; E_value=0; Accession=PF03552.5; Description =Cellulose synthase
  Pfam annotation: Domain name=PHD; Domain location=36-85; Score=5.3; E_ value=0.0031; Accession=PF00628.20; Description=PHD-finger
  Pfam annotation: Domain name=zf-C3HC4; Domain location=37-82; Score =3.7; E_value=0.034; Accession=PF00097.16; Description=Zinc finger, C3HC4 type (RING finger)
  Pfam module annotation: Pfam domain module=Cellulose_synt::PHD::zf -C3HC4; Domain location=249-1059::36-85::37-82
MEASAGLVAGSHNRNELVLIRGHEDPKPLRALSGQVCEICGDEVGLTVDGDLFVACNECGFPVCRPCYEYERREGTQNCPQCKTRYKRLKGSPRVAGDDDEEDIDDLEHEFNIDDENQQRQLEGNMQNSQITEAMLHGRMSYGRGPDDGDGNNTPQIPPIITGSRSVPVSGEFPITNGYGHGEVSSSLHKRIHPYPVSEPGSAKWDEKKEVSWKERMDDWKSKQGILGGGADPEDMDADVALNDEARQPLSRKVSIASSKVNPYRMVIVVRLVVLAFFLRYRILHPVPDAIGLWLVSIICEIWFAISWILDQFPKWFPIDRETYLDRLSLSSLSGLDDAARCRYEREGEPSLLSAVDLFVSTVDPLKEPPLVTANTVLSILAVDYPVDKVSCYVSDDGASMLTFESLSETAEFARKWVPFCKKFGIEPRAPEFYFSLKVDYLKDKVQPTFVQERRAMKREYEEFKVRINALVAKAMKVPAEGWIMKDGTPWPGNNTRDHPGMIQVFLGHSGGHDTEGNELPRLVYVSREKRPGFQHHKKAGAMNALIRVSAVLTNAPFMLNLDCDHYINNSKAIREAMCFLMDPQVGRKVCYVQFPQRFDGIDVHDRYANRNTVFFDINMKGLDGIQGPVYVGTGCVFRRQALYGYNPPKGPKRPKMVTCDCCPCFGRKKRKHAKDGLPEGTADMGVDSDKEMLMSHMNFEKRFGQSAAFVTSTLMEEGGVPPSSSPAALLKEAIHVISCGYEDKTDWGLELGWIYGSITEDILTGFKMHCRGWRSVYCMPKRAAFKGSAPINLSDRLNQVLRWALGSVEIFFSRHSPLLYGYKNGNLKWLERFAYINTTIYPFTSLPLLAYCTLPAVCLLTGKFIMPSISTFASLFFIALFMSIFATGILEMRWSGVSIEEWWRNEQFWVIGGVSAHLFAVVQGLLKVLAGIDTNFTVTSKATGDEDDEFAELYAFKWTTLLIPPTTLLIINVIGVVAGISDAINNGYQSWGPLFGKLFFAFWVIVHLYPFLKGLMGRQNRTPTVVVIWSILLASIFSLLWVRIDPFIVRTKGPDVRQCGINC

SEQ ID NO: 58847 - protein, 624 aa, Zea mays
  Coding DNA Sequence Number=SeqID_15472
  Gene Ontology: Mol. function=protein binding
  Homolog annotation: Hit_ID=Q69P50; Match level="QueryCoverage=99%, HitCoverage=98%, E-value=0.0, Identity=59%"; Hit description =Streptococcal hemagglutinin-like protein
  Pfam annotation: Domain name=DUF566; Domain location=217-624; Score =234.4; E_value=2.5e-67; Accession=PF04484.3; Description=Family of unknown function (DUF566)
MDAIKSHAKKVDLVDETLRPPLVPSEKHNAFRVRNVASRCKTDLADATKIRRCTSPSLGQTSAIEGTPAPKRAQSADRRRPTPSTPPSKVSTPSTPVSRSITPVRDTTRDLHKSSKRIASTKAPDGLWPAMRNLSSSFQSESVAAPTTRNDKVVTALDCSKGQVSVLTERKRSPFRRKNIGEHCENAQPSEEPPKRLIEQHRWPAMIAGQAPKNLMSRSIDLSDKANIPVASSNTSRGLSPRKTPSVRPVPSSNTSRGLSPRKTPSVGPVPSSNTSRCPSPMKTPSVEASVKLSNQSLDEVARSLAIQSSRKDDKVDSQTIERSKSLSRPNRTVTFPVPILQRSSSPSRALPATSSTSRAFQSPSRTRPSTPCQSQSVGAIQSSVPSSLINYMVDARKGKKNASQIENIHQVRLLHNRHLQWLFINAYAEDALSFQKATVENTMYNVWRNTVNLRDSVNMKRIMVQHFQQELRLYNILKEQIAYLEQWPTLERENSISLLGATEALKASTLRLPVTLGAKANTIALKNAVSSAVDVMQVLGSSVCCIHSKFEKVCTLRFVLINIRISYQITDSTSLVSELSVIAGQEKIMLDECRELLATAAKLQVQESSLRTHLVQQRQRLQD

SEQ ID NO: 58848 - protein, 249 aa, Zea mays
  Coding DNA Sequence Number=SeqID_15473
MADLEKPVQQGAGKLEKARVIAGAAAHATPRCSATQTAVQYSLKAEAVKPNNRIQICARSPRTSSGRSLPPPPPPYHLPYVPRTRNRKAGPRGGVHVRRGPPSARSPTATLPRGAASPSPITSTAARAPPWSVGGTADGGPHTARSRRLPGASVSRLRDRERPSAHGAWRGVASGAHPPTQTQTQPGAGLGARSRTDKRPATLVTERDSDDDMRVEGSRNERATEVTNHEDHRFVQDLGGLSVMQCNHA

SEQ ID NO: 58849 - protein, 180 aa, Zea mays
  Coding DNA Sequence Number=SeqID_15474
  Subcellular localization annotation: CTP_CleavageSite=51; ConfidenceScore=5.56e-01
MGAIQVKALPTQGTRSRLARAQPRARIADPGGFTSRPRVSSSNGRTFDSPEAQLGQASRRSNLGQIASPTDRLGLHLDLGRRSPPRPTLGLGLHLDLGRRSPPRPTPGLGLNLGLGRRSPPRPTLGLRLSLDLGGVTALPDLGLGPTTSQGGPSYEKVAARENGLTDKLPLSSLPLPHER

SEQ ID NO: 58850 - protein, 49 aa, Zea mays
  Coding DNA Sequence Number=SeqID_15475
MDVGASSATFTLEMAETCKPTGSVLDAEARPMEDFIEQMIGALYDVSVV

SEQ ID NO: 58851 - protein, 129 aa, Zea mays
  Coding DNA Sequence Number=SeqID_15476
MAPAVGAEAEAAREVPITDGITATIRASGLRFFVLVLAPRASPGCPSAGPTPELTSQGLGPSWRPWGMVGRGSWGNRPSRLLGPDSRRSPWTASPSEAGSDLTEGVVDAEGAIAPFQREDPSLQDQIVL

SEQ ID NO: 58852 - protein, 36 aa, Zea mays
  Coding DNA Sequence Number=SeqID_15477
MDLFGPIAYISIGGRKITHPSDLKGISLRWAQIEFD

SEQ ID NO: 58853 - protein, 128 aa, Zea mays
  Coding DNA Sequence Number=SeqID_15478
MAPQEVVLAGSICNLSRVGGGGRAAMALKILSLGEKRFQRQGGKAMGPSKFFGILDGMGRGGGYAFQIWVNFGMGSRARASLFLSGASCLAGARPEKCEESGRSSGRCRSSASQMDETKAVDTVLLLY

SEQ ID NO: 58854 - protein, 177 aa, Zea mays
  Coding DNA Sequence Number=SeqID_15479
MAGPTGVSLTLFKAKAVYRSRPRQGCLPKAVDNPFIYAGAQPRHIEPVPQARGQKYLTKTGKSLGAGSKEQMPVPWGDPEPVWPESHWKLAPSNLCIDGSPGDSNHLCTSSDNDLRSMRLASNSDHLREKGWMCWIHTRRNRHPCGGRTTKPRPKRQEAASEAAPKPSSPKGRTRCS

SEQ ID NO: 58855 - protein, 119 aa, Zea mays
  Coding DNA Sequence Number=SeqID_15480
MLQTHRTYCSKYQSTRYGVVECAGFRVRNQANRPHRLRTIPWNGLPFFRAGPQAVRPSCFRIEVLSRKPGCSIQMSSCLIGWELVGVAPTTSDIDPHTDVTVATSRTSLTTPPELYCRR

SEQ ID NO: 58856 - protein, 133 aa, Zea mays
  Coding DNA Sequence Number=SeqID_15481
  Homolog annotation: Hit_ID=A2Y7U5; Match level="QueryCoverage=76%, HitCoverage=42%, E-value=3e-13, Identity=44%"; Hit description =Putative uncharacterized protein
MTYNLKKEGVLSFIERVEPEAGPVAPVVPRHPKSYMEDINDDPPNPDQPISEPRMAPKPKPWEKQGQGSLACDLKSLPRESDVLRSEVQHDDGTNQVTESADGANQADSLLQAGVAAGSESPGVPDDAASSLE

SEQ ID NO: 58857 - protein, 317 aa, Zea mays
  Coding DNA Sequence Number=SeqID_15482
MSSTLSVASASSGGPSFEDTLNDLMATELQPGHTVEFGTSRISSVRVQEMQQLGYFGDVVCGNLRQELLSALAKRKIGNKIAQFGSCTFTPRTGKTLAEVVEIVPCARNKWGNWWDFWFYVSGGEVKDLHGLPTAIMCSHCNVAFLPFEVAEDDEDEGALRYAARTSSGRDLVEEFIGYGVWPLAHGWVPGEVCPRRMPSLGDQLVRSPTFALDLRGRNLAVFVREVEAEAARIVGRYVPRTETLCSWDIRGSNICLNRVFELNRLSYGGYPGDDDAGVVDRRGKRAVVAVTPGFRRQTECEPSTCQDQQFTYTAVT

SEQ ID NO: 58858 - protein, 53 aa, Zea mays
  Coding DNA Sequence Number=SeqID_15483
MSKTPAEPLRARAASPPSSDVFGTSRWFDEDKTDRDTLRFIQHQTKACGDVSP

SEQ ID NO: 58859 - protein, 145 aa, Zea mays
  Coding DNA Sequence Number=SeqID_15484
MVLNLDVAVDGEVVKGVGPEGRRTTTPKVVAAVRVADRVMPPGTAFFVNGPDCLLDQAFCALSRAPYVACPVTPVSTCGGCLKVHQLQSPVSTLPLPKLQQTCTIEEMSSSSQGSFYSPHLPLLCGSAKLVDVGFHLHLMNHLKS

SEQ ID NO: 58860 - protein, 154 aa, Zea mays
  Coding DNA Sequence Number=SeqID_15485
MDELVWQFFGARDIQHLREYSHTVRTTSSSHRQPLKERPSTTHSYNLRRRGHTNLVSEMPGNDDNTASEVASAAAPNTTSAALEHKMDTMMKALVDLATKVSNLALHVTKIDGRTTPIVSAAGNHLGFPYGLPGYGGIPETGTIDLHQATTSYN

SEQ ID NO: 58861 - protein, 318 aa, Zea mays
  Coding DNA Sequence Number=SeqID_15486
MARTSEALKVKTEPTTACYVCYCASIGCWAGLLPAGHQFVHAAACIWCMAPAHEDGRRRGRWSGLSWGTLFCFGSQKALAAGTTAPWERSRWRKRRTVPVDGDLVVGTAADSEVIIRGSGSGTGTDEEESRQRKGLLRLPGCCFLDPARVPGRKRSTMDSRGGGRNKQRNLDRTESPPPRRRSQSGNNSPSEASQSQIQAAGGSNSTGSRSRGAERPRSVPVQTTQTPTEPSKTGSGGVGAFEFGPVVGLSVVVAVSMAGLLGGWLWAVACVCAWLAALSRLRRRREAAAVDEDSADHEKPAVLRGMLERGRRKAAAT

SEQ ID NO: 58862 - protein, 101 aa, Zea mays
  Coding DNA Sequence Number=SeqID_15487
MCEHAIDTNWSGLIPTGALVVEAVLTCTGPTWSVPTLMSVDSPGNHVLLPISDEAMTFDTNHRQFHVYGDGILHLWMEGRHDSMVANGRVVAMDARDWENY

SEQ ID NO: 58863 - protein, 55 aa, Zea mays
  Coding DNA Sequence Number=SeqID_15488
MAPSANGRLQRYRNSEQCSLRVQKLVRVSPQESARCDSIHFPRRPEAKISPPPKS

SEQ ID NO: 58864 - protein, 83 aa, Zea mays
  Coding DNA Sequence Number=SeqID_15489
MVEPALELAVVQETVEAVAFCEIHEGNWPRPSSGEAEFAPRLRPIGRYQSPLLADEMKPLVEYDNDNDAHSPRDGNGEFPAGE

SEQ ID NO: 58865 - protein, 446 aa, Zea mays
  Coding DNA Sequence Number=SeqID_15490
  Subcellular localization annotation: CTP_CleavageSite=78; ConfidenceScore=5.34e-01
MSSSSLKRCVFPSSKPPDGGYPPPFRLLVGGTQLHGSWYLSAIVRLQGFSSAGPAISPRRRPPRMVTAGFWVGKSKPGCDLGPTLSFKDVHHPRWGGSHAEPALYLPRGSAGRPFPWRLGVEALAGPADGADLDNVGLIDGGRRHLQRVGVVGRASGGPSRRRVTAASGRRPTRLGGFEWGSAGGLVSPAIGAEAEAAREVLVTDGITATTRAPGHHAGVLVLAPRASAGARARSQQRRPTVAVVRMGGGEPALGLLLLRRPSPWSGVVRTCGGGNQSSVRNGTSNASVFCSLWLSGPEHPVDRGPRGNRSSRLLGPDSRRSPWTASPPEAGSDFAEDVVDAEGATAPFSVKTRACRIRSSRSVCFLRPPRPEKHTLAALAKLRLFSSCFEHLDSVGNRDVCVSESCFSRKGRVRYPYPRGVGIPRLGRPCRLRVLSPVHEALSPT

SEQ ID NO: 58866 - protein, 104 aa, Zea mays
  Coding DNA Sequence Number=SeqID_15491
  Subcellular localization annotation: CTP_CleavageSite=40; ConfidenceScore=5.43e-01
MAYFRGPGYIFVGRPTKIRKLFSSVSTPTKMLSIFVGPSPADENKSFIFVGRSVAALLHGRARLRPHPPPRLFRLRRRLSEDPGSLPPEKGEINPKDNHISFQR

SEQ ID NO: 58867 - protein, 132 aa, Zea mays
  Coding DNA Sequence Number=SeqID_15492
MGKNNKSKREPTPPSEDFGDSEYSEEEFSSESEGSPAPVSPPASSDDTDDSQGIAAKVWTYIRAVERSGLEGSDESEYSSDEEDSPEEDDEGDDDGGDGSDDSDGGSRGGDGGSSRGSNGGGSSKGSNRASG

SEQ ID NO: 58868 - protein, 92 aa, Zea mays
  Coding DNA Sequence Number=SeqID_15493
MSKSTGIADKAIILMQDHAKHIYRICNEKLPLGKGLTAFEEEQLEHDEKVALERIESPLPSPDSDCFLSLEEHIEKFWGIDYNSDQMPSYSD

SEQ ID NO: 58869 - protein, 241 aa, Zea mays
  Coding DNA Sequence Number=SeqID_15494
  Homolog annotation: Hit_ID=A2YND2; Match level="QueryCoverage=38%, HitCoverage=20%, E-value=9e-09, Identity=34%"; Hit description =Putative uncharacterized protein
MAAAGSEDDDNLSSPRPQILCMEFQVHVGVKFDGSVDGYSGGRVGYMRFMEPQGVDWFTMQENLVYHGYEGNATLYYLKPSHTAPQGLVLMDNAEHVQQLMKDHEGLKVCKLFILGTEEGDGDVWEGEERDVWEDDEEYVAWETEEDDGDLYVIKNSSDLKQIQKDHTGQLINEIDKRVYLSDEVNEGVHSPVNFDGEDFPDGRSFKIKKYVKEHTCGKSHTVKQMDAKWIGTEYEHFFRK

SEQ ID NO: 58870 - protein, 390 aa, Zea mays
  Coding DNA Sequence Number=SeqID_15495
  Gene Ontology: Mol. function=nucleic acid binding
  Homolog annotation: Hit_ID=Q60EK4; Match level="QueryCoverage=68%, HitCoverage=54%, E-value=2e-15, Identity=27%"; Hit description =Putative uncharacterized protein OSJNBa0032D15.11
MARRRSQKNKKTPPTNATQKEVTLEILFDDCSNYDSWSTSVINAFRTIHPQLEQIIDKSIFPSSFNGKINSEEDQRCYRLNYLAFDILNNSLSKEDYRAFISNYDESIPDAHDIWTRIKIKFDESKHNSSFNASTSFSFCDTNPCKEEGENERWRPNDESTSPKANENDSGSTNEDEEEERSFVHLYARLSQEDKAVMLKLLERAREQSEARQRLEDILSIKMQHFDELTKEHEELKCSHVDLVQSKSSFELEFAGTNDDSYQKLKEENERLKKSLTQLKGKCIAQPSQDNRDHMVKKLETGTIVACTTSLEENGKDLRIAMRRKQKMKFNTSSKSLNHASTKGNIQGNPKLQLVLEKELKNYHVRNFKAYNMEESQRMSHRNRKHLRMF

SEQ ID NO: 58871 - protein, 270 aa, Zea mays
  Coding DNA Sequence Number=SeqID_15496
MDEQSANLEQRNREKKKRRMLAVYSQQAVSVWGTGLSGGAPDSVRCARLPRAKKPLSGIRRRRMAKIHRTVRCAPDCPVLSEVRCQTSFCQNEDGFPKLLRACTVRLGIRSQPEYDGHEFVEHGTEKCVVNVYIGSSPHHVEWSVTAAGHRFKDTCQVVARKALRTLCQIYEEEVADTPLRFFLPFQRNHPVWMARMRALEGKQLLEDDPTVKYLTAYLLTLDAQYDFLARHHRQMIARAEDAEKLNRKLHVDLTTAQARVAALESREVC

SEQ ID NO: 58872 - protein, 403 aa, Zea mays
  Coding DNA Sequence Number=SeqID_15497
  Gene Ontology: Mol. function=nucleic acid binding; Cellular component= nuclear speck; Biological process=RNA splicing
  Homolog annotation: Hit_ID=Q5JN45; Match level="QueryCoverage=20%, HitCoverage=19%, E-value=1e-30, Identity=83%"; Hit description =Putative Ser/Arg-related nuclear matrix protein
  Pfam annotation: Domain name=RRM_1; Domain location=99-170; Score =65.0; E_value=2.5e-16; Accession=PF00076.13; Description=RNA recognition motif. (a.k.a. RRM, RBD,
  Subcellular localization annotation: CTP_CleavageSite=55; ConfidenceScore=6.00e-01
MAKPRRGRSASRSSSGSSSRSLSHSVSSGSVSSRSRSRSRSFSSSSSQSRSRSPPQAKRSYSYTLWHSTELMLSFSSEQSQSLVIGFRKVSPPAESAVLCIDHLSRNVNEAHLKEIFGNFGEVVNVELSMDRMVNLPRGYGYIEFKKRADAEKALLHMDGHLHEGNQLHLYGNDLQIEGLNHPGVHLTHHLGAVLILHLYVADQILLLSDVVTHLAGDHHLQFEGVLLLHHLGGIGHRCVFHLGGGVVAHHHAGAPLGLLGGAVDYTSISLLNVSSILLTWEGAIKRDLKEWNIPMELCLDRSAWKEAIHLTTSKAVEEPTKKATTSTSLQSLSSSPTPSLPLQINFSKKGTRASIEAWGQGGYQGAAALESLLEQEEASPVTAAAAVHLPLDAAEFLSIATV

SEQ ID NO: 58873 - protein, 682 aa, Zea mays
  Coding DNA Sequence Number=SeqID_15498
  Gene Ontology: Mol. function=oxidoreductase activity; Cellular component=cytoplasm; Biological process=electron transport
  Homolog annotation: Hit_ID=Q5JN40; Match level="QueryCoverage=88%, HitCoverage=83%, E-value=0.0, Identity=88%"; Hit description =Putative glucose inhibited division protein A
  Pfam annotation: Domain name=GIDA; Domain location=24-400; Score =656.9; E_value=1.7e-194; Accession=PF01134.13; Description=Glucose inhibited division protein A
  Subcellular localization annotation: CTP_CleavageSite=10; ConfidenceScore=5.09e-01
MPDARPPLLRLASARAPCFLRSTLTGLRGSIRSVVLLQLIFCPTQPCNPAVGGPAKSQLVHEVDALGGEIGKITDRCYLQKRVLNSSKGPAVRALRAQTDKREYAIEMKNSVESTENLFIREAMATEVLIGKNDSIEGVRTFFGMDFYAPSVVLTTGTFMSGKIWVGRTSMPAGRAGESASHGLTENLQFLGFETDRLKTGTPPRIDRRTVDFSGLEPQHGDEEVGWFSFDPEFHVEREQMCCYLTRTTKETHQIVIDNLDETPTYGGWVEAKGPRYCPSIEDKIVRFKDKESHQIFLEPEGRNVPELYLQGFSTGLPERLQLSLVRTIPGLENCLMLRPAYAVEYDYLPAYQCSRSLMTKKIEGLFFSGQINGTTGYEEAAAQGIISGINAARHSDGKSLIILERESSYIGTLIDDLVTKDLREPYRMLTSRSEHRLLLRSDNADSRLTPLGREIGLIDDRRWELYQSKQARIKQEKERLRSTKVPGGEFAAEVTAVSNQPVKDSSTLEAILKKPHVQYKLLDEHGCGNENLSRIEKECVEIDIKYEGFIARQQSQLHQIVNQEHRKLPEDLDYHSMTNLSLEAREKLSKVRPQTIGQASRIGGETARAAGISCSRVGWFFRGGRPSQHGINVGSFWQLNKEQQNSVRHPGSLRVCGMLVEYRLIFAVVELREQTVKNDNK

SEQ ID NO: 58874 - protein, 257 aa, Zea mays
  Coding DNA Sequence Number=SeqID_15499
  Subcellular localization annotation: CTP_CleavageSite=44; ConfidenceScore=5.51e-01
MGATGQSSAGTDVAVGVTEGRLAVITSASARKRRANRQSSFGPTCRLVSSPKVGPGTTVGTLKQGATTWLEKMIYSKVSTVSPDPHGRVSDPCICRPDLRERSGTSTGANRTPRMGSRTPLCGVRATHSRVLGFWDKEYPGLNQGQAGVQSRHVSGPYRVRFSSPLRRRPDAATWPTTRDVSQRAEPDVRPLGRATSAFIADKARRLSIPLAGGDQAIPQAACLSIPLAGTSETADMDFFLAVSSAGRLKEGSQSQL

SEQ ID NO: 58875 - protein, 294 aa, Zea mays
  Coding DNA Sequence Number=SeqID_15500
  Homolog annotation: Hit_ID=O48967; Match level="QueryCoverage=51%, HitCoverage=27%, E-value=1e-26, Identity=50%"; Hit description =Putative uncharacterized protein
MGFRTPLCGVRATHSRVPGFWDEEYPGLNQGQVGVRSRHVSGPYCVRFSSPLKRRPDAATWHTARDVSQRTEPDVRPLGCAASAFIANKARRLSIPLAGGDQAIPQAACLSIPLAGRRVRSATRPENFLSDIWHTRASRAAPGALSAVRELLRHPPSSTASPGAMKQWRDDVDRLLGMAHSGSARPRPRSSRRQHEASASVRSPSVRAAPIEDLRAELNRRRAGEDAPVSLERSNDLRAELNCRRAGEDARVSLERARERRKNVEGCNLDYDFVVVASQTPTGPGSRRVSHWSA

SEQ ID NO: 58876 - protein, 75 aa, Zea mays
  Coding DNA Sequence Number=SeqID_15501
MDDGSGGSLATHTCRSRKSHSVKPRHAIEREDDRILIMPHGDREIETISNYKCTFGLEGDENTSVTQKQMPSQRK

SEQ ID NO: 58877 - protein, 483 aa, Zea mays
  Coding DNA Sequence Number=SeqID_15502
  Homolog annotation: Hit_ID=Q6J9V9; Match level="QueryCoverage=29%, HitCoverage=49%, E-value=6e-59, Identity=80%"; Hit description =Putative uncharacterized protein
  Subcellular localization annotation: CTP_CleavageSite=41; ConfidenceScore=5.19e-01
MASGQTLLLKGPRSRPLTGDENQPLKPKSRRSGAQVALMVSSAEATTAAVGKPHQRWPPLQHRRQQPPAHGTTVVWVEDGQLHPDQAAAVRLPPHSWRTSPPQGWRMPFSPECWRKKRPGCVMKILEAERRLKSTNPHEVALLKQQQKEGNTEPVPRFEAALRVTQQCQLSATIMGQSAARIGAMVDMAKSGPAGKRHLQQEKRAPFHLRHDDRVKKGTGKGDIPKRILLSEGNGPRALLLIRGSKVAPSGVRQPPQSTRAPSPLLIRGSKAGPSEGFDSHPRACRVRDDPGYVRYMVEAQATLSRYPRTFPRPAGTICNGIPPEGGIEPSDPIEWVRVWQITCRDQERGYSKKDPSQQRDDPGYVCYMAKARATLPRYPRTFPRPAGTICNGIPPEGGIEPSDPIEWVQTGKQHCSPRSGYCANHQGEGLRLVRPQASASASASGGVTSSPDLGLGLRRSLRLARPQPQTDYAIGDTSLPYS

SEQ ID NO: 58878 - protein, 68 aa, Zea mays
  Coding DNA Sequence Number=SeqID_15503
MEHRPGLERLLETAHLELDRKLFVNTQQAPTWRANCQRSETGGRKERIQVYNGGVAECYVSSGGELAP

SEQ ID NO: 58879 - protein, 244 aa, Zea mays
  Coding DNA Sequence Number=SeqID_15504
  Homolog annotation: Hit_ID=Q6J9V9; Match level="QueryCoverage=26%, HitCoverage=33%, E-value=2e-07, Identity=45%"; Hit description =Putative uncharacterized protein
MGVQAHASCNRRAKCFVHATAPPLAPLPRLLDCGTDTATRGDPARDPAAPAWRDGGASGRRSGRRFAFAIMTASKKGPGKGDTLKRILPREGTRLRASLLIRGSKAGPSEGFDSRLRSRGPYTHYWSEVRRPAPRKGSTTASGYSSSVPTTDQGARTRAKSRKTANSAPPDPGLGLGLGPRRRRTPLCPTQGSDLGSAPEDGELRSARPQGSDSALAPAGGLRLARPRGSDSTSASEELPRRPT

SEQ ID NO: 58880 - protein, 119 aa, Zea mays
  Coding DNA Sequence Number=SeqID_15505
MVGPTRCFISRFPLCRALLSAIAAADARACLRVPAAAHPPPPAHLQRPCPPAAAAGACPPPPARACLPPTPTPPSARPCLPPPTSPVLAAATVRVAVPTPAAPTHPPSRPRRPPSRRQA

SEQ ID NO: 58881 - protein, 72 aa, Zea mays
  Coding DNA Sequence Number=SeqID_15506
MGGVGRKGRVGPATLETHEVIALEVLKQAKDEHIQKLTEATCSPTTNLELYGSKSLPHPAQFNPCVLKSPRF

SEQ ID NO: 58882 - protein, 44 aa, Zea mays
  Coding DNA Sequence Number=SeqID_15507
MKPELKKNELKKLLSVKKRIAELSPPPEPFDPLADPETNFESNM

SEQ ID NO: 58883 - protein, 144 aa, Zea mays
  Coding DNA Sequence Number=SeqID_15508
MAVLRQQAEYHQLVLREQLEYQRQQSEDQRQQAEYQKKRDEYYANLQAQNQALLSQLAQQAGVPMPTYGMPPPDFALPMPMLAPPPPPPSQFPTGFQTPPATVAAPGDGSGQDVESHSWVNNLFNTHSPAGGGGYSNHPGDGYD

SEQ ID NO: 58884 - protein, 102 aa, Zea mays
  Coding DNA Sequence Number=SeqID_15509
MAPAPARGVLALGVACVALAWPRAPPFTPNAFPRAQPHARENDPVGEPEELAGEALEQQSVAMRLMVLGFDSGNGCQHCNPCSGEDEAVEGDFQEFQDYDEF

SEQ ID NO: 58885 - protein, 1353 aa, Zea mays
  Coding DNA Sequence Number=SeqID_15510
  Gene Ontology: Mol. function=DNA binding; Cellular component =cytoplasm; Biological process=protein import into nucleus
  Homolog annotation: Hit_ID=A2YPA3; Match level="QueryCoverage=100%, HitCoverage=83%, E-value=0.0, Identity=62%"; Hit description =Putative uncharacterized protein
  Pfam annotation: Domain name=SAC3_GANP; Domain location=197-393; Score=20.0; E_value=2.8e-05; Accession=PF03399.7; Description =SAC3GANP family
  Subcellular localization annotation: CTP_CleavageSite=14; ConfidenceScore=5.23e-01
MVKSPPSDTRGNIRSSSVDFGSNNSVQNLHAYADVQKSDASFSKFRNQIQSRIGGACSPSQQMSHLSDSNELNTLAISPPKPSTLSATRRTGISSLDATADDHLTPSTELEREEQAKAKRLARFHVELSRPVENTNDFVKTVKSSADKSKQATSVGRTPLRTNDDTDDNTLVDMDSTALAAIVGLCPDMCPEPERAERERKGDLDRYERLDGDRNLTTELLAVKKIRLHIIAMHELCEYNKGEGFSEGFDAHLNIEQMNKTSVELFQMYDDHRREGVLFSTEKEFRGYYALLKLDKHPGYKVEPAELSLDLAKMSREIRGSPEILFAREVARACRMGNFISFFRLARKATYLQACLMHAHFAKLRRQALASLHSGLQNGQGIPISQVVVWLAMEGEDVENLLEYHGFGLRQYEELYLVKEGPFLNSESDFPSGCSQLVHSKKSQRVVDDVSSGPDCAPTSKEKTVFPYTGQPVAGKRDLFLPQNAPAIPPDGRMDLDPSFPGPISITPDRQISPLFSDPFSPRAASKLFSSTHPKPLSPTEGRKDRFSSVLTAVSPRTGKRDILSKTPKVASPKAEAKTKLVNDLIAEDQDSGVAEIPQKVEMQTDILWSQANTQNANALAEPIISHPLADSMSLNYSSMYGAEDDFRAHVSGIGADMDEGTPPDHECLVIGAGLPISSPLSYHEEYEDHSISNSTNDDWLPIVMPAKKLISDENLKAILRKWRQHAADKRLLREQKNALAVAALCSLSLGPPVHKSTTVSKLAVEELDIGHAFKERQARKQRSWSRLNVSELSGPILNENNPDARCLCWKLLVLVPPGMESQTNSFVSKWLLRKLMGYGIGDIGLVVSSAGLSIWTEWISFPNACCLSVVRASDQQVIDNDIANSTSCIVFVVSESISWEMQKERFNSLLACIPDESNLPLLIFSGDTYNEGYEYASKYIINRLGLNGLNRGKIGSSLVIFLVENYTEDHANGFFDDDKLREGLKWLVSSLPVQPDVTLVKTHELLLEYLNPQLELLNTHVAPGAGPGDCISVFNNAVNQLAEEILAAANANCSQWPAPEIDLLERTSNERIYAEMFLPSIGWSSPSRIQPLLAAINSCKIPEFSYDLSWLNHGSHMGKQIQDQKKLLEECLARYLTESARLLDESQVVTEVNVMVQNCVGLELQDSSYYLAPRWVAIFRRIYNWRLAKLSTGKLSEAYVLTQHLYQAPAAAGSNGTTQGLTANTASSDAVDHIMMPAVSTGITLDEIIEISCDLNVVDAQPVTLPPRLPVHVHEEPQALADTNGVLGVDEMYIPRRVELGEVMPISDDKLSRLRVELGEAMPIKTDDKLSRLLEQCTKLQDRIDETLSIYF

SEQ ID NO: 58886 - protein, 614 aa, Zea mays
  Coding DNA Sequence Number=SeqID_15511
  Gene Ontology: Mol. function=nucleic acid binding
  Homolog annotation: Hit_ID=A2WP36; Match level="QueryCoverage=22%, HitCoverage=82%, E-value=3e-46, Identity=56%"; Hit description =Putative uncharacterized protein
MKGGSGAAVEPIVRNRKVPDLSPTLCILCSFLAAFAALASPAAVAALPPPAVVAAISCALLRARPAAVAATAHCPLAPALLCARQPPSRPLHRSPAPALLCSVCSVARLCSCVATLTRGSASICARPCYICSAARLCSADLPSSVRAPATPAFASSTVRPYSAVAALPPSATAPALPDSTALRGHGLLFHLTEDSPVLAADRSNVAAIKTWQINDGKDNGALLHTLMRQTRVIEQHDMSIDEYYSAFDRLMSALTSMVPACTVVPCPAHKFIEKFFTYRFVMGVRPEFDSLRAMLLHSSDTLTMAQALSELLAEETRLKSMSFITGVSSRSVLAAAQRAEPKVPSTAKRFIIVFGDQKGTNILLATPLGNEVEDLQNQAYMADSKDLNRASPNSSTRLTNLSAAEHKRLKDDMKKIDEEVQRQKDQVLKVADKWFLSHFRVDCHQKTVQEREIDADYMSSVLQQLPTIGDVREDTAPAPRSRTVRAVAEGTTRRSSDLSQAALLFILQSRTQEKLADFRVRRATRGRGTGPSPRGSVAVAATSSAGTLSSSWVLDSGASFHVTSDQSRLASTTPITEGTSVQTADGSQNRGCDWDWPSPGIIVWVTYEDLVCLL

SEQ ID NO: 58887 - protein, 729 aa, Zea mays
  Coding DNA Sequence Number=SeqID_15512
  Homolog annotation: Hit_ID=A2YPA3; Match level="QueryCoverage=79%, HitCoverage=50%, E-value=4e-95, Identity=50%"; Hit description =Putative uncharacterized protein
MVHGLVDYSDTINDENVEASKRMRSPASEFTRMVKSPPSDTRGNIRSSSVDFGSNYSVQNLHAYADVQKRTGISSLDATDDDHLTPSTELEREEQAKAKRLARFHVELSRPVQNTNDFVKTVKSSADKSKQATSVGRTPLRTNDDTDDNTLVDMDSTALAAIVGLCPDMCPEPERAERERKGDLDRYERLDGDRNLTTELLAVKKNGQGIPISQVVVWLAMEDEDVENLLEYHGFGLRQYEELYLVKEGPFLNSESDFPSGCSQLVHSKKSQRVVDDVSSGPDCAPTSKEKTVFPYTGQPVAGKRDLFLPQNAPAIPPDGRMDLDPSFPGPISITPDRQISPLFSDPFSPRAASKLFSSTHPKPLSPTDGRKDRFSSVLTAVSPRTGKRDILSKTPKVASPKAEGKTKLVNGLIAEDQDSGVAEIPQKVEMQTDILWSQANTQNANALAEPIISHPLADSMSLNYSSMYGAEDDFRAHVSGIGADMDEGTPPDHECLVIGAGLPISSPLSYHEEYEDHSISNGTNDDWLPIVMPAKKLISDENLKAILRKWRQHAADKRLLREQKNALAVAALCSLSLGPPVHKTVGSNRPGLHPAARPPPDPPPAAGLPPHLPGAPPFPWGRRSRRCATVAHRGRRPWRGRHSPGAAPPTSRLVVDVPSSEAAQPSAATTAPGHARAAAPGSATQRQELPHRRPTLPAARGQPPRLRDPAPGRLPYLAPSPTRLRSLL

SEQ ID NO: 58888 - protein, 1205 aa, Zea mays
  Coding DNA Sequence Number=SeqID_15513
  Homolog annotation: Hit_ID=A2YPA3; Match level="QueryCoverage=100%, HitCoverage=83%, E-value=0.0, Identity=57%"; Hit description =Putative uncharacterized protein
  Subcellular localization annotation: CTP_CleavageSite=14; ConfidenceScore=5.24e-01
MVKSPPSDTRGNIRSSSVDFGSNNSVQNLHAYADVQKSDASFSKFRNQIQSRIGGACSPSQQMSHLSDSNELNTLAISPPKPSILSATRRTGISSLDATDDDHLTPSTELEREEQAKAKRLARFHVELSRPVQNTNDFVKTVKSSADKSKQATSVGRTPLRTNDDTDDNTLVDMDSTALAAIVGLCPDMCPEPERAERERKGDLDRYERLDGDRNLTTELLAVKKKLILNWELVKSLYAFIFSFKDEDVENLLEYHGFGLRQYEELYLVKEGPFLNSESDFPSGCSHLVHSKKSQRVVDDVSSGPDCAPTSKEKTVFPYTGQPVAGKRDLFLPQNAPAIPPDGRMDLDPSFPGPISITPDRQISPLFSDPFSPRAASKLFSSTHPKPLSPTDGRKDRFSSVLTAVSPRTGKRDILSKTPKVASPKAEGKTKLVNDLIAEDQDSGVAEIPQKVEMQTDILWSQANTQNANALAEPIISHPLADSMSLNYSSMYGAEDDFRAHVSGIGADMDEGTPPDHECLVIGAGLPISSPLSYHEEYEDHSISNGTNDDWLPIVMPAKKLISDENLKAILRKWRQHAADKRLLREQKNALAVAALCSLSLGPPVHKSTTVSKLAVEELDIGHAFKERQARKQRSWSRLNVSELSGPILNENNPDARCLCWKLLVLVPPGMESQTNSFVSKWLLRKLMGYGIGDIGLVVSSAGLSIWTEWISFPNACCLSVVRASDQQVIDNDIANSTSCIVFVVSESISWEMQKERFNSLLAYIPDESNLPLLIFSGDTYNEGYEYASKYIINMLGLNGLNRGKIGLSLVIFLVENYTEDHANGFFDDDKLREGLKWLVSSLPVQPDVTLVKTHELLLEYLNPQLELLNTHVAPGAGPGDCISVFNNAVNQLAEEILAAANANRSQWPAPEIDLLERTSNERIYAEMFLPSIGWSSPSRIQPLLAAINSCKIPEFSYDLSWLNHGSHMGKQIQDQKKLLEECLARYLTESARLLDESQVVTEVNVMVQNCVGLELRDSSYYLAPRWVAIFRRIYNWRLAKLSTGKFSEAYVLTQHLYQAPAAAGSNGTTQGLTANTASSDAVDHIMMPAVSTGITLDEIIEISCDLDAVDAQPVTLAPRLPVHVHEEPQALADNNGVHGVDEMYIPRRVELGEVMPIETDDKLSQLRVELGEVMPIETDDKLSRLLEQCTKLQDRIDETLSIYF

SEQ ID NO: 58889 - protein, 1295 aa, Zea mays
  Coding DNA Sequence Number=SeqID_15514
  Gene Ontology: Mol. function=DNA binding; Cellular component =cytoplasm; Biological process=protein import into nucleus
  Homolog annotation: Hit_ID=A2YPA3; Match level="QueryCoverage=98%, HitCoverage=81%, E-value=0.0, Identity=57%"; Hit description =Putative uncharacterized protein
  Pfam annotation: Domain name=SAC3_GANP; Domain location=174-373; Score=-10.6; E_value=0.0033; Accession=PF03399.7; Description =SAC3GANP family
  Subcellular localization annotation: CTP_CleavageSite=63; ConfidenceScore=5.28e-01
MTVITWGITQTLDGSDASFSKFRNQIQSRIGGACSPSQQMSHLSDSNELNTLAISPPKPSILSATRRTGISSLDATDDDHLTPSTELEREEQAKAKRLARFHVELSRPVQNTNDFVKTVKSSADKSKQATSVGRTPLRTNDDTDDNTLVDMDSTALAAIVGLCPDMCPEPERAERERKGDLDRYERLDGDRNLTTELLAVKKIRLHIIAMHELCEYNKGEGFPEGFDAHLNIEQMNKTSVELFQMYDDHRREGVLFSTEKEFRGYYALLKLDKHPGYKVEPAELSLDLAKMSREIRGSPEILFAREVARACRMGNFISFFRLARKATYLQACLMHAHFAKAAVQFQVHLFFCKLTSEVSSQLRRQALASLHSGLQNGQGIPISQVVVWLAMEDEDVENLLEYHGFGLRQYEELYLVKEGPFLNSESDFPSGCSQLVHSKKSQRVVDDVSSGPDCAPTSKEKTVFPYTSQPVAGKRDLFLPQNAPAIPPDGRMDLDPSFPGPISITPDRQISPLFSDPFSPRAASKLFSSTHPKPLSPTDGRKDRFSSVLTAVSPRTGKRDILSKTPKVASPKAEGKTKLVNGLIAEDQDSGVAEIPQKVEMQTDILWSQANTQNANALAEPIISHPLADSMSLNYSSMYGAEDDFRAHVSGIGADMDEGTPPDHECLVIGAGLPISSPLSYHEEYEDHSISNGTNDDWLPIVMPAKKLISDENLKAILRKWRQHAADKRLLREQKNALAVAALCSLSLGPPVHKSTTVSKLAVEELDIGHAFKERQARKQRSWSRLNVSELSGPILNENNPDARCLCWKLLVLVPTGMESQTNSFVSKWLLRKLMGYGIGDIGLVVSSAGLSIWTEWISFPNACCLSVVRASDQQVIDNDIANSTSCIVFVVSESISWEMQKERFNSLLACIPDESNLPLLIFSGDTYNEGYEYASKYIINRLGLNGLNRGKIGSSLVIFLVENYTEDHANGFFDDDKLREGLKWLKRFWAAANANRSQWPAPEIDLLERTSNERIYAEMFLPSIGWSSPSRIQPLLAAINSCKIPEFSYDLSWLNHGSHMAADPGSDELLEECLARYLTESARLLDESQVVTEVNVWCRIVLALNSGIVYYLAPRWVAIFRRIYNWRLAKLSTGKFSEAYALTQHLYQAPAAAGSNGTTQGLTANTASSDAVDHIMMPAVSTGITLDEIIEISCDLDAVDAQPVTLAPRLPVHVHEEPQALADNNGVHGVDEMYIPRRVELGEVMPIETDDKLSQLRVELGEVMPIETDDKLSRLLEQCTKLQDRIDETLSIYF

SEQ ID NO: 58890 - protein, 451 aa, Zea mays
  Coding DNA Sequence Number=SeqID_15515
  Gene Ontology: Mol. function=protein serine/threonine phosphatase activity; Cellular component=protein serine/threonine phosphatase complex; Biological process=protein amino acid dephosphorylation
  Homolog annotation: Hit_ID=Q8H2T0; Match level="QueryCoverage=74%, HitCoverage=87%, E-value=1e-131, Identity=71%"; Hit description =Putative uncharacterized protein P0503D09.114
  Pfam annotation: Domain name=PP2C; Domain location=46-324; Score =111.1; E_value=3.4e-30; Accession=PF00481.12; Description=Protein phosphatase 2C
MGCAQGKCCLRRHPRRGSAAAAVGGGATLGRAAVPGAGLVLEYAALAVAGLYPDSTARESQDAHLVATRFAGDPDLHLFAVFDGHGTAGTACAGFARDALPRLLASLSLASAADPTAAFREAMLGANAEMHAAPEVDDSMSGTTAVAALVSGGALHVANVGDSRAVAGVWRAGRVVAEDLSWDQTPFRADERERVRACGARVMSVEQVEGMRDPEAERWAPDEGDPPRVWARDGLYPGTAFTRSLGDLAAEAIGVIAEPEVKSVEITPSHLFFVVASDGVFEFLSSQEVVDRVATYQDPRDACSAIAAESYKLWLEHENRTDDITIIIVHIRDMESVGPAGSDKADYGSVGASIAVHAIQSEVPVFVESEASHMNRSFSYTPFADAWQNIRCFQARAKRAASCITTGANLASNGRGYWIGLCSKASHLQPPDESGGTIIVIERPLSFAESY

SEQ ID NO: 58891 - protein, 66 aa, Zea mays
  Coding DNA Sequence Number=SeqID_15516
MAVAGGRKQRSRRQPSLRPIQGQQGNPLPRREDGAPEFRSSNGTGKGGYPEKGSFSVKETGPEPPY

SEQ ID NO: 58892 - protein, 510 aa, Zea mays
  Coding DNA Sequence Number=SeqID_15517
  Gene Ontology: Mol. function=endonuclease activity
  Homolog annotation: Hit_ID=Q8H2T6; Match level="QueryCoverage=83%, HitCoverage=96%, E-value=1e-135, Identity=62%"; Hit description =Putative uncharacterized protein P0503D09.103
  Pfam annotation: Domain name=Exo_endo_phos; Domain location=67-409; Score=31.1; E_value=3.9e-06; Accession=PF03372.14; Description =EndonucleaseExonucleasephosphatase family
MPEDGAPMHVLRRVLDGLQCLHPRRRRRHGGGAGPPKQARVAVRRLGTGKATPCGGGGGGGREVTTIRVATFNAAMFSMAPAVSGEGTSGAGAERGGGLPGSPGGGARRPPKGILKAQAASSLARSPSRPRVSINVQDNEISLERTRLWRGVGGNGKRQQQQQQQQAGPRRRSVEEVLREAGADIIGLQNVRAEEERGMRPLSELAEGLGMRYVFAESWAPQYGNAVLSRWPIKRWKAHRVADQSDFRNVLRVTIEVPDAGEVNFHCTHLDHLDEGWRMKQVDAIMRSGGDGPHILAGGLNALDGTDYSADRWADIVKYYEEIGKPTPKVEVMQYLKAKQYVDAKDFAGECEAVVVVAKGQDVQGTCKYGTRVDYIMASPNCPYKFVPGSYTVVSSKGTSDHHVVRVDVAVPHAREPDDAEATANGQRSRVARSDFGWTFSVVQGIAHCITLTPGCGCPKANSTMIYVDATTNPEILQRQNKEHGPSDRRVYTTYVARYHAGGAGHCRCK

SEQ ID NO: 58893 - protein, 239 aa, Zea mays
  Coding DNA Sequence Number=SeqID_15518
  Homolog annotation: Hit_ID=Q6QP51; Match level="QueryCoverage=25%, HitCoverage=31%, E-value=3e-13, Identity=62%"; Hit description =Putative growth-regulating factor 1
  Subcellular localization annotation: CTP_CleavageSite=54; ConfidenceScore=5.12e-01
MAERYQLPRSCVPPTTRRKDCGHPRPGARKPSRAESSPTRSKVLPLRRGGWVPRVMQAGPEQKKPNRRARCMQPPSGYKRPSTFAQTNGRKGGQPCRRHANRAKWAHFSDFQHAQHGGPGPRVRQPARRMLRASDCTATRATTAPPRLRNQCRDSRRPSSASLARRRSKRRFAFAIMTASKKAPSLPTDQRFEGWPLGRVQQPPQSAWAPHPLLVRGSKAGPSEGFNDRLRLLGLRAHY

SEQ ID NO: 58894 - protein, 156 aa, Zea mays
  Coding DNA Sequence Number=SeqID_15519
MGKNNKRKREPTPPSEEFGDSEYSEEEFSSESEGSPALIPLRESSDDSDDSQGLAAEVWTYIRVVERSGLEGSDESEYSSDEEDSDDGGEDEDDGGDDDDDDGDGNGRGGSGGRKDGDGGGSRDGDGGGSRGSNRGGSSRGSTRGGSGGGSNRASG

SEQ ID NO: 58895 - protein, 278 aa, Zea mays
  Coding DNA Sequence Number=SeqID_15520
  Subcellular localization annotation: CTP_CleavageSite=80; ConfidenceScore=5.34e-01
MALPVDVVGPRPRLGDVEAPPRSRLRLSPSPGVGQSGVRRLPGLSPSPSPRSGGAEFAIFRGLARVRALGRAERSSSSSRAEPKSEPWVGRSGVRRLPGLSPSPSPGSGGAELAVFRGLARVRALGRAERSFLWCLRSGLTACQPHSVKWHCSRCGAGGAVLLSGRSVERRSDCGLLLGEDRASGKPELRADGGYQLRIRSFEGLCIRGLKLDYRQRMLSAFRDRGVPKPTSECRCVPQPRWVERVGERKGGKRKERIQVYNGGVAECYVSSGGELAP

SEQ ID NO: 58896 - protein, 211 aa, Zea mays
  Coding DNA Sequence Number=SeqID_15521
MATRRTTGGPHVLRPTELKPAFLRKPFWVPHGSRLLTDGNPGSGPNLMEIPNQIRAQQHSPAGKDPSRNGLCCTSRNRVEAGFGQPHQWRRPPLHRRIAGDSDHLCTSSDNDLRPERLASSSGHLRAPRVRLIDAKREEGEPPRRERATAPQLCAPSFLGQLVVRKATRRTTPDPTAWAGQRAPRGKKRQHIPVCIVGSGSPRKDTGPLYV

SEQ ID NO: 58897 - protein, 362 aa, Zea mays
  Coding DNA Sequence Number=SeqID_15522
  Gene Ontology: Mol. function=transcription regulator activity; Cellular component=nucleus; Biological process=regulation of transcription
  Homolog annotation: Hit_ID=A2Y911; Match level="QueryCoverage=20%, HitCoverage=67%, E-value=1e-14, Identity=63%"; Hit description =Putative uncharacterized protein
  Pfam annotation: Domain name=Auxin_inducible; Domain location=1-104; Score=74.8; E_value=2.9e-19; Accession=PF02519.5; Description=Auxin responsive protein
MAPPDPEDISREEKRTKASKLQEQGEGEEEEAMRLPSDVSHGHFAVYVGEWWRRFVVHIALLDRPEFRSLLRRAEEEFGFTGAGGALVLPYEEVAFRSLTSALACARRGDVLHRVIGFLTRWTGKYEAHHRPAPPSDRDRPGTSGLTAEETAAWFLNTLDDPLEKDLYTQLWYNTIADAAPQHEGTFPGPTSHPSSPPPPVGSSGVESSWAGDICSTFCGSNQVPRTPTGIRGKDAALQSEVPSDAGAHDGTSSSGGSGSNYGGSGLPSDSVHGHKRKGMCRDESDSRTLLAAADVEKKGPDQRKDACVARADPTLQQEVGSAGAATTGRNRWSSGGYKVVDNLSLNAVSDFVGVNNCSALC

SEQ ID NO: 58898 - protein, 187 aa, Zea mays
  Coding DNA Sequence Number=SeqID_15523
  Gene Ontology: Mol. function=hydrolase activity, acting on acid anhydrides, catalyzing transmembrane movement of substances; Cellular component=integral to membrane; Biological process=calcium ion transport
  Homolog annotation: Hit_ID=Q8RUN1; Match level="QueryCoverage=47%, HitCoverage=7%, E-value=1e-22, Identity=69%"; Hit description =Calcium-transporting ATPase 3, plasma membrane-type (EC 3.6.3.8) (Ca(2+)-ATPase isoform 3)
MGGAKWKEEEMVKTLRPSVWLTEDFPLSVDKFLPLLDILASHVCAVRWLRVLLTTKFPQGTFPVKLFPCLSIIPTSLVLPPSPGTVPMEERRNKIEDYEKYLIQLSKLTKVMARSLPLDKHTLVKNLRGMFREVVAVTGDGTNDAPALHEADIGLAMGIAGTEVLTIPRNSTVLTVDVKTSCKAIRS

SEQ ID NO: 58899 - protein, 88 aa, Zea mays
  Coding DNA Sequence Number=SeqID_15524
  Subcellular localization annotation: CTP_CleavageSite=53; ConfidenceScore=5.35e-01
MEVSPPSNSRSPLHRFASALVVNRSLESFEGAMISRRTPSVTAVARFAVAVVLCAAKTGGDFLLGSANISTSISTKPGIRPGKGFSRI

SEQ ID NO: 58900 - protein, 41 aa, Zea mays
  Coding DNA Sequence Number=SeqID_15525
MDESGMRMRFEKIQNVSAKYPELHIFHALYLISRVKKKEIG

SEQ ID NO: 58901 - protein, 570 aa, Zea mays
  Coding DNA Sequence Number=SeqID_15526
  Gene Ontology: Mol. function=lithium ion binding; Cellular component =integral to membrane; Biological process=calcium ion transport
  Homolog annotation: Hit_ID=Q8GS69; Match level="QueryCoverage=99%, HitCoverage=88%, E-value=0.0, Identity=78%"; Hit description =Putative potassium-dependent sodium-calcium exchanger-like protein
  Pfam annotation: Domain name=Na_Ca_ex; Domain location=143-277; Score= 119.3; E_value=1.2e-32; Accession=PF01699.15; Description =Sodiumcalcium exchanger protein
  Pfam annotation: Domain name=Na_Ca_ex; Domain location=482-568; Score= 20.4; E_value=0.00051; Accession=PF01699.15; Description =Sodiumcalcium exchanger protein
  Pfam module annotation: Pfam domain module=Na_Ca_ex::Na_Ca_ex; Domain location=143-277::482-568
  Subcellular localization annotation: CTP_CleavageSite=62; ConfidenceScore=5.01e-01
MIASQPRRVRPLAAVSLVLFLLLLYSRSGCGPPRAARLLGSGLHPVHRRFLSDADPGGPTSSAANPSGAATLNGEQAEDPAAACADIARHEGFGTQCEFLRAHPQCSSSGLVDYLGFFYCRCERFRLLGYAVLGVCLAALFYMLGNTAADYFCCSLEKMSALLRLPPTVAGVTLLPFGNGAPDVFASIAAFMGSGAGDVGLNSVLGGAVFVTCVVVGAVSLCVAEKNVQIDRRCFVRDVGFFLVTLLTLSIVLIVGKVTVWGAMMFVSIYAVYAFVVAANEVLRKHARKLKFDVVTPLLPVRASIFEQGAEEDESVYSSLLEEDADGDVAQMNTSLPQWMWASHVAIYSNHGNRVGSPDSPRPLWGWSEGEVDNSMFNISKLFLFMKLPLTIPRRLTIPIVEEDRWSKECAVASSCLAPVLLAFLWSSQDTVSTKVSIAAYVMAVILGITLAALAFLFTSNERPPRRFLFPWVFGGFVMSIIWFYIIANELVELLVASGVILGINPSILGLTVLAWGNSMGDLMSNVALAMNGGDGVQIAMSGCYAGPMFNTLAGLGISMLLGAWSTAPN

SEQ ID NO: 58902 - protein, 256 aa, Zea mays
  Coding DNA Sequence Number=SeqID_15527
MVLLPHHVARVTEPGSRRRARRCDGEQPKPYPAHAKTNLSRFLITLQRGEWNVPPQREVRTGLAHTVRRSSTRWERRGSLTPRYQGAPAAAPEAHAAPGLRSGHTNRARVWQMLWSRCLFSLFSFSRRLPRWVLTMAAEVRALWEGRQGLWRRTHGCAQGGRNGCRYISREYPVAGSDLRARQLRDAFGQVGDGADEAGPPVSEEVRRACSRDRPVGQCAGERTDVSASVTGQWAHLAATRRGRKEQTRCGPRWSA

SEQ ID NO: 58903 - protein, 121 aa, Zea mays
  Coding DNA Sequence Number=SeqID_15528
MAAEVRALWEGRQGLWRRTHGCAQGGRNGCRYISREYPVAGSDLRARQLRDAFGQVGDGADEAGPPVSEEVRRACSRDRPVGQCAGERTDVSASVTGQWAHLAATRRGRKEQTRCGPRWSA

SEQ ID NO: 58904 - protein, 255 aa, Zea mays
  Coding DNA Sequence Number=SeqID_15529
MAYLNLVFIISPLMSALSTPPGLQLELVAFGNFQKHSRYNSPDCPVYTGQCSVLQRDATLELGSLGKSERLLRYNSLDCPVYTGLSGEPAEQRLLRANGHLQAHLMHARSAQKSGTRALAHRTLCSTCPVCTGHPGGPRRQKLQRSDPNGLVTWLEHRTCPVCTGLSGTNDDTYQKLKEENERLKMSLTQLKGKGIPQPSQDNRDHMVKKLETGTIEACTKSLEENVKDLRIAKRRKQKKKINTSSKSLNHASIQ

SEQ ID NO: 58905 - protein, 88 aa, Zea mays
  Coding DNA Sequence Number=SeqID_15530
MEKVKVMWVPVDGLRVMKDERWVLTEGLEKPNDQLQIQTRYTTSSTSFSLLEVVVTTLTTPPLAPKNKGLFPADFFWRPEIAENKPKV

SEQ ID NO: 58906 - protein, 60 aa, Zea mays
  Coding DNA Sequence Number=SeqID_15531
MALFSQSLLSAGSGEQAALGTSTAVYGYNSPDCPVVHRTVRLLSSHLAVIALTLNQVFVA

SEQ ID NO: 58907 - protein, 148 aa, Zea mays
  Coding DNA Sequence Number=SeqID_15532
  Homolog annotation: Hit_ID=A3BKW1; Match level="QueryCoverage=44%, HitCoverage=11%, E-value=3e-08, Identity=50%"; Hit description =Putative uncharacterized protein
  Subcellular localization annotation: CTP_CleavageSite=42; ConfidenceScore=5.53e-01
MSGVPPDIQAGPAVRAPTVGTQRPGDVAGAPNTVRRLSLPTSCNTVVDVVKRCQRLFLLADSTGAFDATVAVRVTQMVMSSPTENATPTGSSQESTACWFSCNNKSSKQLQHGGPLLDGSSLGGPSFRAGLQLRRLSGCYECHMVVVP

SEQ ID NO: 58908 - protein, 111 aa, Zea mays
  Coding DNA Sequence Number=SeqID_15533
  Gene Ontology: Mol. function=acyltransferase activity; Biological process=metabolic process
  Homolog annotation: Hit_ID=A7P8K0; Match level="QueryCoverage=46%, HitCoverage=13%, E-value=2e-10, Identity=67%"; Hit description =Chromosome chr3 scaffold_8, whole genome shotgun sequence
MASSSVAADMELDRPNLEDYLPPDSLPQEAPRNLHLRDLLDISPVLTEAAGAIVDHGGALSLEPVLRLQVAVRADGHQRGTLQQVDPMIVGLHMWQLAGCDDFEGLSSFVG

SEQ ID NO: 58909 - protein, 72 aa, Zea mays
  Coding DNA Sequence Number=SeqID_15534
  Gene Ontology: Mol. function=Rab GTPase activator activity; Cellular component=intracellular; Biological process=regulation of Rab GTPase activity
  Homolog annotation: Hit_ID=A3CD01; Match level="QueryCoverage=90%, HitCoverage=15%, E-value=3e-09, Identity=50%"; Hit description =Putative uncharacterized protein
MGKQQVDHRFLDQVCPKCSQNVLNTRVKIKARTTLSVREWHVAITRDGHLDIASVLSHIQRGVLNPFKPRET

SEQ ID NO: 58910 - protein, 326 aa, Zea mays
  Coding DNA Sequence Number=SeqID_15535
MGRRKWPRVRRTLVTPEHAPALGPARAAPRQARPRARAHARAYKADPGLDQPGIELYLAGDTGSTSPDFTRPPAHVDQAPRPEHTPPTSPSACARGPTDSGHHRRRAVPRRDRQDLPELTPPFAVPPSPSNLKDVIRGFKSIQTPKDEDGEYILVPEQGVAQEVAQEPAPEPAIEDLPAPALEGKPWAEDTIESIALHRLTTFCGFHPLELSTHPIGLFPAEKEDDPIWKDRVEHAKDVWALYPGQTAHLTVRCMNALYRLQAVRGEAMSQLMGLVESTKITLDNREDLVVDLSTKLVEKDLQVEQMATQIQELEEQVGARENTIE

SEQ ID NO: 58911 - protein, 175 aa, Zea mays
  Coding DNA Sequence Number=SeqID_15536
  Homolog annotation: Hit_ID=O48967; Match level="QueryCoverage=26%, HitCoverage=10%, E-value=4e-09, Identity=61%"; Hit description =Putative uncharacterized protein
MAHRIARSTRGRGRPKSGKDDLGSLMRFCRVRELGKLHEPLAKLTEGQAQLGRGWSELATVAEAWAVMAGGGKLAEAKEGRLASEGEHGVRLAGFADWIKRYGGDERGKRPWQQGSDSGSWPVHPNSRHSVSECREILKLAKRISERREQSSKDGSPPRRRSGKEKVDEGYMAAG

SEQ ID NO: 58912 - protein, 227 aa, Zea mays
  Coding DNA Sequence Number=SeqID_15537
  Gene Ontology: Mol. function=carboxyl- or carbamoyltransferase activity; Cellular component=ornithine carbamoyltransferase complex; Biological process=amino acid metabolic process
  Homolog annotation: Hit_ID=Q8SA97; Match level="QueryCoverage=74%, HitCoverage=21%, E-value=2e-20, Identity=56%"; Hit description =Ornithine carbamoyltransferase
MAPPVDVARLRPRLGDVEAPPKPRSSLSSVAEVESEPWGRAERSSSSSGAEPKSEPWVGRSGVRRLPGLSPSPSPGSGGAEFAVFRDLARVRALGRAERSSPSSGTLPESEPWAERSSPSSGTLPESEPWVERSGVRRLPGLCPSPSPRSGGAEFAVFRDLARVRALGRAKRSFLWCLRSGLTACQSHSVSAVGVAQAALSFCQAGQWSGEVTAVTSALSARGRASG

SEQ ID NO: 58913 - protein, 378 aa, Zea mays
  Coding DNA Sequence Number=SeqID_15538
  Gene Ontology: Mol. function=kinase activity; Cellular component =ornithine carbamoyltransferase complex; Biological process=amino acid metabolic process
  Homolog annotation: Hit_ID=Q6QP54; Match level="QueryCoverage=49%, HitCoverage=40%, E-value=3e-34, Identity=68%"; Hit description =Putative kinase
  Subcellular localization annotation: CTP_CleavageSite=22; ConfidenceScore=5.09e-01
MEPGGGTAVGAVVSLLTSSCFRKGAESRRRHRVRGAPSLPIWQSELDGTPVLSSWPESARGRVMMAPPVDVAGLRPRLGDVEAPPKSRSSLSSVAEVESEPLGRARQRPSAEARAESEPWGRAEQSSSSSGAEPKSEPWVGRSGVRRLPGLSPSPSPGSGGAEFAVFRDLARVRALGRAKRSSPSFGTLPESEPWAERSSPSSGTLPESEPWVGRSGVRRLPGLCPSPSPRSGRAEFAVFRDLARVRALGRAKQSFLWCLRPGLTACQSHSVKWHRSRSGAGGAVLLSGRSVERRSDGSHFGSAGWGARVRIKVSGHLCIKCSCDLVGRCGDLVRVASWRRQGLGRAGNMFAAGGGPRARRKSSGVGCPCPRLGSGEA

SEQ ID NO: 58914 - protein, 89 aa, Zea mays
  Coding DNA Sequence Number=SeqID_15539
MAGGKELAGAKEGWLAGDETLGDTGVSQPSPLKGISSRDSGQSPPGVKRRIRRAGGGVGCDYVPASLGRQSGKLDLKNSSVSQVVSSSE

SEQ ID NO: 58915 - protein, 163 aa, Zea mays
  Coding DNA Sequence Number=SeqID_15540
MGGMFSKIKLDDGSIKGLDRFNIGKDVPLPGLMIEDPLTGHMPRHGIHFSKHFCKTESLIIEKPYLDSHITSIPLRVFSLVGWFQKKKNKTEVREESVLHLGSFAYSLSGGVCASPVTPAYDINVPNEVADEDMMLNSMDASLVIPPVIFLWMDVLVSLYFDE

SEQ ID NO: 58916 - protein, 92 aa, Zea mays
  Coding DNA Sequence Number=SeqID_15541
MPHNICKEGLRSDTSCDGTSQKQQKSATSSPKNNEGINPEYGITQQVLPDQRKDSQGYAGYMGVKDEVHDGVARRMNSGEHADRPEEDKTSA

SEQ ID NO: 58917 - protein, 334 aa, Zea mays
  Coding DNA Sequence Number=SeqID_15542
MMIRLVGKGTTLTWGPRLSSDHGSEAIAAPAAIAALAVAAFVVAAAAEVAAAAPPAVAVAAAGAPGGDHRWMVVVAHFWAGSKTSDPSAQCNLCRLSSSDPSELPGLEALLAAPLPLSKGLGAMAGLALGTTPMGWGPPAGAPEIRIPRRGSWLPVWRTATPLSSRVGNVARIVVLRPGSSQSDLMSWGMSFGPVNQQDRRGLFCSGVIRCFRRSPTMCIDVKPLVAKTFVGHDSPKPWATTLGQQQHLTPPRGWLWAATCSEKVIYSKASTVSPDPHGKVPDHWIYSLDLQVGPGPPRVRIGPLELDPNPLYGVQAGHSRVLRFQDRTYPGLN

SEQ ID NO: 58918 - protein, 157 aa, Zea mays
  Coding DNA Sequence Number=SeqID_15543
  Homolog annotation: Hit_ID=O48967; Match level="QueryCoverage=99%, HitCoverage=33%, E-value=3e-40, Identity=58%"; Hit description =Putative uncharacterized protein
MVQIVEQRDLSPADFLMEEGATSSVPRGSYRPAPGDAAMHTAQQHTPVQKSRAPSGATHGGPLSAARELLRNPPSSTVSSGAMRQWREDVDRLVGMAHSGSTRPRPRSFWRQREVSASVCSPSVRGARIDDLRAELNRQCAGEDARISLEKADDLRA

SEQ ID NO: 58919 - protein, 343 aa, Zea mays
  Coding DNA Sequence Number=SeqID_15544
  Subcellular localization annotation: CTP_CleavageSite=7; ConfidenceScore=5.00e-01
MKKVPARGSAPTPNTGGDTGGASSSIPPLAPEEMEVVFGRRLWSGAEREAAPVPLPCMLSRAHQVLSETEEAILREWEALVAEHQHLSDWCTQLEEHTKMASRQFTSVRSQLELQKWQQELEGKASDIALAEENLKEKELSLDRRETDLARRETDLAFKEEMLVRRGELLAEHELEAEEKERKLEEQIRQFDAAQAAPGPQAMEATRKALEDLQVEYRTGVQRIAEWAGEASTTLVPLEMSPIPVSESPVSISDALPVLDSATDRLWCLDQILGARLEAVGSKLCRAVVDYVLTCFRSHDPAIFLAPVIDGPVAATEDAAQESVQDAVEMVVACFQRDPTDAE

SEQ ID NO: 58920 - protein, 404 aa, Zea mays
  Coding DNA Sequence Number=SeqID_15545
  Homolog annotation: Hit_ID=A2XHR0; Match level="QueryCoverage=15%, HitCoverage=7%, E-value=2e-09, Identity=51%"; Hit description =Putative uncharacterized protein
MDKNQNLAYAPYIMALIKAKTRFEGPCEVVHTPFRPFKNEIGFLTRPLTPFPDNEEDPGYDAGANPDVEAEQMPPPPPPPQPQQYWQSGPGYFDPYFHTMQQRLETHIDTRFEGMMTHMDHRLDDMQSRFDSNWDALNSEFSEFRDHIHTNVTDPIMTRLNNMQQSFQDNMGALSNQFDNLSTNDSMHDISQRRQQLQQDFGQFSSLFDTFSTHYYNMHPPPSTLTHTGNGRWEARIGRVFGNKYLYLGTFANAATASKRTVNKRTVGSATHAPSAPSTATRAPVAKPDTFWTSCNKCKMNYEYLRWGPFSRAAGAASATASSAAAAQAANMKKAIKKIAVKENGGDNEALGPEDPTAIKDSHDSEQTGSNTSTDDENEDDDHLSYNVPDPDFHDFDKNRTEEC

SEQ ID NO: 58921 - protein, 110 aa, Zea mays
  Coding DNA Sequence Number=SeqID_15546
  Gene Ontology: Mol. function=nucleotide binding; Biological process =defense response
  Homolog annotation: Hit_ID=Q6ZII8; Match level="QueryCoverage=80%, HitCoverage=98%, E-value=2e-26, Identity=64%"; Hit description =Disease resistance protein-like
MAEAIVGPLVGKLQEMAVSEAKALVAVNDDIRGLRDRLMWMQAFLRHADPRRRDTSDELIRVWLKQTRDVAFDAEDAIDDYSLKVDLSSQEPEGRLGVHIATDKSNILSL

SEQ ID NO: 58922 - protein, 272 aa, Zea mays
  Coding DNA Sequence Number=SeqID_15547
MADKGKGKGIVIGDPRMSIISQKKIARKASGEKAKRFEDAGAILDPLLGVIGYGAEVTQLGALAYGAEVGLPEPRQLLGSLLPDGVPLESEIQAPPAIFCRPCARADRPAVRQGTLALRQVVDRPTPGRGPFAPVQRAPPPPSPTPRLRCLPKALPVPPHNMTRIHRLRPLFLFVLLASLQCGNAAKTLAGLSAATVASTLESPLDQSSLLFHSLHGLSLDPIAGAATAAAGYGGGAEGFCSAEPSSKCSGDQPLYWKVTHPTLAPAHLQGA

SEQ ID NO: 58923 - protein, 273 aa, Zea mays
  Coding DNA Sequence Number=SeqID_15548
MNKTPTFKVPLQTEPWFHLRRYEQPHTIGGPAEQQKADGWLAVARSSSSDNDPRSGWPNCSSDGLRADAAATLPSPPPMLEGRGQEPSAHRQIPTRILPDERSTDLHAEAPYRSKGRTAPEHERRPSSARRLGRSSRARGATTALAAGGGTGSQAGKPNALKLTTPAVDQPRVVEVRPSRRATGTGKGDTPKGILLREGNGPRAPLLIRGSKAGPSEGFNSRLRALGLRAHYWSEVRGLAPRKGSTAASGHSGSAPTTDQGFVGWPTKGSQPP

SEQ ID NO: 58924 - protein, 168 aa, Zea mays
  Coding DNA Sequence Number=SeqID_15549
MEEEVESSSAVALLLVLVAPVVVPSMALLVRGRWRRAAPRREEGEGIIIDIMTLESGLREDTHPMGAELRESKLMNKYNELKEAGKLDAFMERRRNSEDLDLSKEDLLKLLLEKDGSLKSKDKEFKDMKDKVLQQTWPCHNKRESENTKKYAIQDLITFGYPWKHAHT

SEQ ID NO: 58925 - protein, 698 aa, Zea mays
  Coding DNA Sequence Number=SeqID_15550
  Homolog annotation: Hit_ID=A3BQI5; Match level="QueryCoverage=30%, HitCoverage=23%, E-value=2e-11, Identity=27%"; Hit description =Putative uncharacterized protein
  Subcellular localization annotation: CTP_CleavageSite=51; ConfidenceScore=5.29e-01
MEDSARLVDGISGGRGRRRTRRGPRKSSRRGSGHDDPPTSSSSPPVPDPATASVRQVCFIKRSRSISQAEEELRRALLVSVIALEGSFCATDVLDALISSFNLEADALDLRMVASNNFIVQFSSVELADRVLAGGGALPQLMELELHGIPAHLWRIETVESLLFGLCMIHEILPSSFEDNNRAIFKLRAWCPVPTLLPSIVDLHVEEPPVAFEVDSSYPRSLVYPISVLASCLDDRMVRETILSHPPLLDQSDDDRDIVQRKRRFGFHDLTVRASVKSRLGPRVSISADKGGPVDSLALPIVLDAELMAPGMGPLISASLMFGSSGPGSLSAALAPPHACFNEGISVETSVNDLWYSVKGGPVDCLALPIASEAELTAPGVRPFIPDSLMNGSSGSVRRAAALASPLACFNTDVLGGAAAVNALARMFNQAVILLTSDISWMTPRVERFRFSATLWEVSSSGSLVSALVPAVLAPSSADSKVDDSLVLSEIGEAHDSLTSALMVSEPAQNGGLALLDTVGSQISVDSDDLSFEQNDNLHSSLDFMWPPPTLVQQPCKVLQVYSRRKLPKQSRIASVEEVAMTFINKIVKPLTNVLPVPSSPKLKARKTIPPNFVPRRSRRVAKLPPLRVNSAAHTICLKLGLKNGDAPVSADDLDRCAREFDKPLSVSQIKALATLFRWEIPDEEFLVCPADGLLQAS

SEQ ID NO: 58926 - protein, 270 aa, Zea mays
  Coding DNA Sequence Number=SeqID_15551
  Homolog annotation: Hit_ID=A5BG04; Match level="QueryCoverage=81%, HitCoverage=41%, E-value=8e-97, Identity=71%"; Hit description =Putative uncharacterized protein
CAYNSAKSKNKFHFWGSHWRHGDALLFSLACAQVMYAFVMRPESLPKSYQEFILKTGPVAEPVYKVVKECCRGGPVDLTALSAHLSNKRNPDLINLTTNPSIIPCSVIHPDRASCLAQNVNVVSSTFKKTFPLYFSLTFVPFVVLRLQKAAICLHRKVANKDHKLVYWFAGLMSGLSILLEKKARRAELALYVLPRAGDSLWYILINRHLLPNIKNAECNPRGKANKIMLLAIMTTKNRSTKSCLKQLWAVCSSAMSQVVCHWLIATEDE

SEQ ID NO: 58927 - protein, 64 aa, Zea mays
  Coding DNA Sequence Number=SeqID_15552
MAERIRDEVDGVFRDKLGGTRIPDFSNFSSEGGKSTHEHISQFISEASPILWDSNVIQLLVPGG

SEQ ID NO: 58928 - protein, 185 aa, Zea mays
  Coding DNA Sequence Number=SeqID_15553
MSAFLPGMFEVCVRCPINVTSSCPIPLRLSCGRTVFNPMSMRWYALGSAYAYPDGLACQRFIYNYTKSTVRNTVDYSGQEKLFGKTDQARTVRDLAADRPQHQDDPQTEPMQKSKSALRTVRRKRKDRPRPCADRPASGADRPFRPIHPPSRRLSSRERLHGRFDDVGGGDLGVILRTGHLWADF

SEQ ID NO: 58929 - protein, 255 aa, Zea mays
  Coding DNA Sequence Number=SeqID_15554
MGGPAEQQKTDERRAVARSGSGDDDDFCSGGPNSDSNDLRADAAARRPPPMPKLVRQGRAEGRRVGGDSPYLRPQPSRAESSPTRSKALLLRRGGWVPHVMQAGSKQKKPNRRARCVQPPSGYKRLSTFAQTSGRKGGQPCRRYATAPSGRTSPTPNTPSMEAQAHASCNRRVECFVHAAAPPLAPPPRLLDCGINTATRGDPAHDPAASAWRDGQCGRKWAGSNGGGRRAGAAVTSSAKLTSHPGAAREPSLTA

SEQ ID NO: 58930 - protein, 26 aa, Zea mays
  Coding DNA Sequence Number=SeqID_15555
MAMMGSTSEKMYLCQPYLDSLKAAYP

SEQ ID NO: 58931 - protein, 67 aa, Zea mays
  Coding DNA Sequence Number=SeqID_15556
MARSRGREGSPGREQGAAARGCAGAGLAGEGLDGGAAGGGLVGSWLAGAGEGAGSAGHGAAARARRA

SEQ ID NO: 58932 - protein, 77 aa, Zea mays
  Coding DNA Sequence Number=SeqID_15557
MSGAHAKKEMVTGEKSAKSQGKAPSGESGNKKREESLPRVKSHWSGDKKKKMKKVVYYETDSFVAFHLRLLHTVRHF

SEQ ID NO: 58933 - protein, 816 aa, Zea mays
  Coding DNA Sequence Number=SeqID_15558
  Gene Ontology: Mol. function=phospholipase D activity; Cellular component=membrane; Biological process=phosphatidylcholine metabolic process
  Homolog annotation: Hit_ID=A7QCN7; Match level="QueryCoverage=99%, HitCoverage=98%, E-value=0.0, Identity=58%"; Hit description =Chromosome chr12 scaffold_78, whole genome shotgun sequence
  Pfam annotation: Domain name=C2; Domain location=20-138; Score=78.4; E_value=2.3e-20; Accession=PF00168.21; Description=C2 domain
  Pfam annotation: Domain name=PLDc; Domain location=322-357; Score =32.0; E_value=2.2e-06; Accession=PF00614.13; Description =Phospholipase D. Active site motif
  Pfam annotation: Domain name=PLDc; Domain location=662-689; Score =39.7; E_value=1e-08; Accession=PF00614.13; Description=Phospholipase D. Active site motif
  Pfam module annotation: Pfam domain module=C2::PLDc::PLDc; Domain location=20-138::322-357::662-689
MASPAGGESPAKPVLLHGDLDLWILEARLLPNMDMFSEHVRRCFAACRPPSSCGTKHPPPAAAGRRHHHHHRNIITSDPYVTLSVSGAVVARTAVIPNSQDPVWEERFAVPLAHRAADLEFQVKDNDTFGAQLIGTVAVPADRVVSGDEVEDWFPVIGTNGKPYKPDTALRLRFKFQPIADNPAYRHGIAGDPDHRGIQDSYFPLRHGGQLTLYQDAHVREGDLPEIELDNGKTFQHNACWEDICHAILEAHHMIYIVGWSVYDKVRLVREPSPSRPLPEGGDLTLGDLLKFKSQEGVRVCLLVWDDKTSHDKFFIKTVVGTLFTHHQKCVLVDTQARGNKRKITAFIGGLDLCDGRYDTPEHRLFKDLDTVFQNDYHNPTFSAGAKGPRQPWHDLHCRIDGPAAYDVLTNFEQRWRKATKWRDRFRRVSHWKDDALIKLERISWILSPSPNVPNNHPSLWVSKEEDHENWHVQVFRSIDSGSLKGFPSDCKAASKLNLVCRKNLVIDKSIHTAYVRAIRSAQHFIYIENQYFLGSSYAWPSYVNSGADNLVPIELALKIASKIKAGERFAVYVVIPMWPEGVPTAASVQEILFFQAQTMEMMYKIIADELKATDNKDMHPEDYLNFFCLGNREEPPSNGSPESEKSTDKSAAALASKYRRFMIYVHAKGMIVDDEYVILGSANINQRSLAGSRDTEIAMGAYQPHYAWSTKNGHPHGQVYGYRTSLWAEHLGTVDDRFKDPSSLECVRFVNQIAVENWQRFTAEEMSTLQGHLLKYPVKVEADGKISPLSDQECFPDVGGKILGAPTSLPDSLTM

SEQ ID NO: 58934 - protein, 511 aa, Zea mays
  Coding DNA Sequence Number=SeqID_15559
  Gene Ontology: Mol. function=catalytic activity; Cellular component =cellular_component; Biological process=polyamine biosynthetic process
  Homolog annotation: Hit_ID=Q7XJ04; Match level="QueryCoverage=80%, HitCoverage=100%, E-value=1e-156, Identity=68%"; Hit description =Putative ornithine decarboxylase
  Pfam annotation: Domain name=Orn_Arg_deC_N; Domain location=158-394; Score=255.2; E_value=1.4e-73; Accession=PF02784.7; Description =Pyridoxal-dependent decarboxylase, pyridoxal binding domain
  Pfam annotation: Domain name=Orn_DAP_Arg_deC; Domain location=397 -506; Score=121.0; E_value=3.5e-33; Accession=PF00278.13; Description= Pyridoxal-dependent decarboxylase, C-terminal sheet domain
  Pfam module annotation: Pfam domain module=Orn_Arg_deC_N::Orn_DAP_Arg_ deC; Domain location=158-394::397-506
MAIGMVPIFAIDLSRDGDSSVDHGGGVDSVVVFPPIHRPAARAIKRKANHGHPCQADQDLFVRRIRFISSSLLALHVVTGEFIHFAKSSRQQQTKTNRDMGGGSRMQTVLLAPGVKDKKLLSYTRRNALKEKDAVTDLIRSIIATSSPVQRTAFHVFRIDNVLELYSAWRRGLPDVRPYYAVKCNPEPALLGALAELGAGFDCASRAEIEAVLALGVPPSSIIYANPCKSEPHLEYAAAAGVNLTTYDTEEEVAKVKRCHPRCELLLRLKGPDGSETTCDLGTKYGARADEVVPLLRAVQRAGVTVAGVSFHVGSPVARVGVYRAAIEAARAAFDEAAALGMPPMRVLDIGGGFTAGASFDDAAAVINDALARSFGDLPCVEVIGEPGRYFCETAFTLAARVIGKRTRGEVREYWIDDGLYGSLNNILMDHKVPRPRPLATPRPGDRTHTSTVFGPTCDSQDEVVTGYQLPEMSVGDWLVFDNMGAYSTGSGSKFNGFDTSEIKIYVAYSS

SEQ ID NO: 58935 - protein, 78 aa, Zea mays
  Coding DNA Sequence Number=SeqID_15560
MGQSAAGTDMAVDVAEGGLTAGASADELKQRANHQSGHVEARRRTQSAIRGSCSYSPLLPRYQEKGNDLLILHGLLSS

SEQ ID NO: 58936 - protein, 508 aa, Zea mays
  Coding DNA Sequence Number=SeqID_15561
MAVRQTGGWDPHCGIRISNAPVGGPQPAGVAPSANPPVAPNPLDKGKGAASGASTPGGAEEASSQAHDAQRRVSPPVSPPPPPSGGDPPQGHQQQQQQQPQQQQQQRRSPRFQGHWKVFTHHLFARASSPSAPKVTPPPPDTRPTDGSASQQQESVEGGAGGSPPAAAKTALAASHAPVGDPAVAAPASGGVAAAEEVPAGGSAPTPDTGGGAGGASSSNPSPAPEEMERVCARELEASQREKKVTKREEVVAHREALTIEFQAKRSALDQTLESQRAQQVKAVERLQKWQQELEGKASGCPPLRPRGNLKAEESSSLDRRETDLARRETDLTFREEMLTRRGELLAEHELEAEEKERKLEEQIRQFNAAQVAPSPQAMEATRKALEDLQAEHRVRVQHIAAWAGEASTTLVPLGMGPITVSELPASISDALPVLDSAADRLRCLDLILGARLEAEGGKLCQAVDEYVLTWFRSHDPAISLAPVIAGPVAATEDAARESVQDTVELVA

SEQ ID NO: 58937 - protein, 751 aa, Zea mays
  Coding DNA Sequence Number=SeqID_15562
  Homolog annotation: Hit_ID=Q7X997; Match level="QueryCoverage=98%, HitCoverage=97%, E-value=0.0, Identity=61%"; Hit description=Bzip -like transcription factor-like protein
  Pfam annotation: Domain name=DUF630; Domain location=1-67; Score =61.6; E_value=2.7e-15; Accession=PF04783.3; Description=Protein of unknown function (DUF630)
  Pfam annotation: Domain name=DUF632; Domain location=241-608; Score =308.8; E_value=1e-89; Accession=PF04782.3; Description=Protein of unknown function (DUF632)
  Pfam module annotation: Pfam domain module=DUF630::DUF632; Domain location=1-67::241-608
MGNCAAYRLAAGGSGDGGDPVAVCRDRKRLIKAAADRRFALAGAHAAYAAALRSVADALDVFVARHTAPAPILITLPTPSSSPSASPKPTQVQVQGLPSLATPPPPPPQEGEEEEEAPASPPAEEDGDGGVQTPEMECPYYYAPPAVTPPPPPLPAASPVGGWDFFNPFYGTEEVAAAISDEEMRAVREREGIPELEEAEEEEGAKAAAAAETKPPKAQPSLGLGVLTPQEEARDACEMAGNNGGLEVAVAPQGRELLAALKEVEELFAAAAEAGKEVSAMLEAATRVPDLKGLSFIAFPPPISLSLQHARSVLQTWCRSENSSKIIHAITWHRSPSSVSSSYRSELGASSNSLSWTDKSETRSDIFEDYGGMKSGSHSQTLGRLYAWEKKLYEEVKVIDQIRQTYEKKCVQLRNQDAKGSELRCAEKTRTTVRDLYTRIWVSLRAAESISDRIQKLRDEELQPQLVELLQGFTKSWKIMVDSHETQRQIMFEVNSFTCPAYGKFCNDAQRHATLKLEVELRNWRSCFTSYFNAQKAYIEALEGWVSKFVLTDTIRYSRGISSIAPDRAGAPTLVVMCHDWYTTMSKFPSKRVSFTMRNFLRSVRVLWLKQGEEQQQKRKVDSLAKELDKKLTAYKRAENRIIGTKLLEHSPETDAKQRMEHLSEKKEVLNLLKRRIEAEKGKHHACMRDTHDVTLNGFKIGLASIFESLAEFSKDSVKLYEDLLGRAHGKDSEKAHIVVDDGNLHVLGPS

SEQ ID NO: 58938 - protein, 291 aa, Zea mays
  Coding DNA Sequence Number=SeqID_15563
MDGGLIPQNPEGSLAKRPDRRGIQRPWPLDRSWTVEIKSSLPPNRAVQFQIDGCTLIFFPRWPNLTERNNRGGAITAEHPIIMPGLDSKHLNGTAHATRTSRRSPPTTVEVLALAQTGKQHTADFSFLPPPSEAPILFPGNGALGCGLGTEERHRSYRKRVRVWLRSACGNRARAELSATADSVSARKLLRGSALRLIHERRRNRRTSACGVRATRASHRGFAADSAHKWGPNVIDEGVCAGDGAWAARAWEGKRKWAEEKWRGIGPEVMRPARIGGRVYDLDKMLHQNYH

SEQ ID NO: 58939 - protein, 74 aa, Zea mays
  Coding DNA Sequence Number=SeqID_15564
MPYMRQAKEKFFSQYTVDRHQKVVEHGETDVASLVSSLQIINSYKDAKSWLTVISGGSGTLETDALKSMSRTKS

SEQ ID NO: 58940 - protein, 53 aa, Zea mays
  Coding DNA Sequence Number=SeqID_15565
MAAPRTARLVALTPRRERRRLWQEKGATLRLHHNDRVEKGTGKGGYPEKDPSP

SEQ ID NO: 58941 - protein, 418 aa, Zea mays
  Coding DNA Sequence Number=SeqID_15566
MDKDRQGAAQKRQAVVRLHEARPKRQRGAAKAAAPGGGKPPLAAKSGVHAFSKAPEAAAGAGGSKSTKAVPPASRVAEVAKAARVLPSSGKRVADFATDISVDDYLGGSDEGQLAIVAPATATTAAVVVPKAKGGALSAGGEMSALATVRDEAGAVSRRLKEVTEALSQVADFANRTASGALTAVVSVEVERLRTQHADAVREKSAADSKCRKLADKVATLEGEKTDLRRQLAGERRETNEALAKAQAAQAEANLARAEGNLARERAEQLQERLIALESRVERAEAATRVEAERTRKQLMDLYHELGARTGDFEVPEREPGLRCLEWVQEELQALPTIVEGFMSYASLVTCKGAMNALSREGCRHFEVFDQADEDFERDIYKVEDPIVKESAGAIYDRMWGPHGREVVRERAGTARAQ

SEQ ID NO: 58942 - protein, 155 aa, Zea mays
  Coding DNA Sequence Number=SeqID_15567
MAPRMLHDNGGSQPSYGSKETSARTRQPDSCPSASLQRSSDGHDITRTGCQNLSGCHDGIKEVHIFQHPLSDKVPKTVPSCAVSLIEPPVASVKRIRTDKRTGDTSAIALAVHFSTCCRGLARVGGCARDDSLHGNHWNRVVGGHGCDDGSRYIV

SEQ ID NO: 58943 - protein, 167 aa, Zea mays
  Coding DNA Sequence Number=SeqID_15568
  Gene Ontology: Mol. function=translation initiation factor activity; Cellular component=transcription factor complex; Biological process =regulation of transcription, DNA-dependent
  Homolog annotation: Hit_ID=Q8W0W3; Match level="QueryCoverage=77%, HitCoverage=41%, E-value=2e-63, Identity=91%"; Hit description =Transcription initiation factor IIB
  Pfam annotation: Domain name=TFIIB_Zn_Ribbon; Domain location=4-47; Score=63.4; E_value=7.5e-16; Accession=PF08271.3; Description=TFIIB zinc-binding
MSDSFCPDCKKHTEVAFDHSAGDMVCTECGLVLEAHSVDETSEWRTFANESNDNDPVRVGGPTNPLLTDGGLSTVIAKPNGAQGDFLSSSLGRWQNRGSNPDRSLILAFRTIANMADRIWRVLVTFMRAARCLILRLGLWNVTRGLVLDDLSLGSTEIPFFIIWEPI

SEQ ID NO: 58944 - protein, 563 aa, Zea mays
  Coding DNA Sequence Number=SeqID_15569
  Gene Ontology: Mol. function=triose-phosphate isomerase activity; Cellular component=chloroplast; Biological process=reductive pentose- phosphate cycle
  Homolog annotation: Hit_ID=A2Z3G7; Match level="QueryCoverage=42%, HitCoverage=91%, E-value=1e-103, Identity=72%"; Hit description =Triosephosphate isomerase
  Pfam annotation: Domain name=TIM; Domain location=354-553; Score =280.6; E_value=3.1e-81; Accession=PF00121.9; Description =Triosephosphate isomerase
MYLDTLVDFVAARPGMHLVSDEVYASTALADPGFVSVLEVAAAAAREDANAGSLAERVHVVYGVVQGPGPAGVPRHLLASLLGDGGFMRRYAAENARRIGARRARLAAGLAAANVACLEGSVGLFCWADMRRLVGLNVSPGSSCHCSEPGWFRVCFANVSAKTLDVALQRLADFAEAKATRGPARRLLAAAGQERTGNIGSRWINGRRVVLHGHRYPWADKGDGSAIQKGRGRGPAHGSLSLACPAAPSPFPPCPVVAAARIIFPPCERGRTATPSPRPRRLLLSSSPPPTAAARARLRMAAAPSSLVSSHLSRLADLRRAAAPATPTVPQQLRVGFSRRRAQRVVAMAGSGKFFVGGNWKCVSACSASSALRGLEMLCTDDPGDAVAEQLVDIGCQWVILGHSERRHIIGENDEFIGKKAAYALSQNVKVIACIGELLEEREAGKTFEVCFEQMKAFADSISNWADVVIAYEPVWAIGTGKVATPEQAQEVHAAVRDWLTTNISPDVASSTRIIYGGSVNAANCAELAKKEDIDGFLVGGASLKAPDFATIINSVTAKKVAA

SEQ ID NO: 58945 - protein, 113 aa, Zea mays
  Coding DNA Sequence Number=SeqID_15570
MGRVGTHGAVHEGSGGVGLWRPGGRPGGVLGGPPSGLAGQVTRGRAPGEVSRKQGVARWAVGMESCPGSSGGLWKKQGGGKRREIKNSESILLRRHTARLRGEIKGCRVGQFG

SEQ ID NO: 58946 - protein, 116 aa, Zea mays
  Coding DNA Sequence Number=SeqID_15571
MTCNVFEKRTLFSLGFLLALHMSLLFMILMFQMGSLMLGAGRGRQERGHLASSYSSGSGRLDTGIVPKALPCSLDYKLVTKFADEVMMLSSMDASLVIPPVIFLWMDVLVSLYFDE

SEQ ID NO: 58947 - protein, 216 aa, Zea mays
  Coding DNA Sequence Number=SeqID_15572
  Pfam annotation: Domain name=AT_hook; Domain location=101-113; Score =8.2; E_value=0.91; Accession=PF02178.10; Description=AT hook motif
  Pfam annotation: Domain name=AT_hook; Domain location=175-187; Score =5.5; E_value=2.7; Accession=PF02178.10; Description=AT hook motif
  Pfam module annotation: Pfam domain module=AT_hook::AT_hook; Domain location=101-113::175-187
MSGAPTALRLPTVDCTIFGKKSGTGQCPDHLFTPPLGALRADLTGLAYTNALCSRDWEEALLQLCAACVALTAVPLDRVRLTAAKPGLRRHKKLRLTRPRARTRARPRKTTNSASPDPGLGLGLGPGRRRTPPRPTQGSDSDLASEDDELRLTQPRARTRPRPQPTVSVSPDPRARTRPRPRKTDSTSTSEEPPPRPTRGSDRPRHRRGHHYPTPS

SEQ ID NO: 58948 - protein, 108 aa, Zea mays
  Coding DNA Sequence Number=SeqID_15573
MNNDCNLADGEYVLVPEQGAAQEVAPDPAPEPAPEDLPATALEGKPRIKCALKCRSCLKPYLHDLRNPVEMNTSSLEEMVAGVTWPSILPPGWTVEWDPTSAEEEHEE

SEQ ID NO: 58949 - protein, 299 aa, Zea mays
  Coding DNA Sequence Number=SeqID_15574
  Gene Ontology: Mol. function=carboxyl- or carbamoyltransferase activity; Cellular component=ornithine carbamoyltransferase complex; Biological process=amino acid metabolic process
  Homolog annotation: Hit_ID=Q8SA97; Match level="QueryCoverage=42%, HitCoverage=23%, E-value=2e-12, Identity=43%"; Hit description =Ornithine carbamoyltransferase
MALPVDVAGLCPRSDDVWAPPKPRSSLSSVAEAEPEPLGRARRRSFGRGQGGVRALWSGEAEFVVFRVLARVRALGRAERRLLLSEAKASGEPEMCPPLKGGPQARRKSLELYADGGYQLRIRCLEGDQPFSVAFCSGGCKRAHPPGVAPEASEECPGARSGPKLSGWYVDAVNGLAKAGFARGSPRAPPQGEKGGSGTDSTFYIRPYVAFPQGGGGESAMLPSMGTEHGVSGELQAGPTRSEATVEPLGGPAFEPLISRGGSEPGSFTGKDPFRGEASPASPARGAACPTAELMRRGE

SEQ ID NO: 58950 - protein, 181 aa, Zea mays
  Coding DNA Sequence Number=SeqID_15575
MSWIPPPAGGLSAAIVVVARRWKEYHVVAAVEGHELKTPETEHRPGPERLLETAHMELDGKLFVSTQQAPTWRANCRRFETGGSLSRQVGRRVGSSEAEVESVFRGRGRARAPGSGEAEIVRQRPGRSPSPVVGRSGVRRLPGLSPSPSPGSGGAEFAVFWVLARVRALGRAERSSPSSGS

SEQ ID NO: 58951 - protein, 461 aa, Zea mays
  Coding DNA Sequence Number=SeqID_15576
  Gene Ontology: Mol. function=triacylglycerol lipase activity; Cellular component=chloroplast stroma; Biological process=lipid metabolic process
  Homolog annotation: Hit_ID=Q8RZ40; Match level="QueryCoverage=99%, HitCoverage=99%, E-value=1e-158, Identity=64%"; Hit description =Lipase-like
  Pfam annotation: Domain name=Lipase_3; Domain location=161-355; Score= 160.7; E_value=4.1e-45; Accession=PF01764.16; Description=Lipase (class 3)
MHRSFLLVCALVATALSTDTTVAAAQSQSQSQSQRSWAELSGRDNWDGLLDPLDGDLRRAVIRYGELAQATSDAFIGDPASPYAGASRYAPGAFLRRAQAPDPDAYNVTRFLYATSSARVPGQFITRPAPPGAWSAESNWMGYVAVATDAGVARLGRRDIVVAWRGTKRAVEWANDLDITLVPAAGVVGPGPGWSQPAVHRGFLSVYASRNSTSRFNKQSAREQEHAFSSCIESCRNGNILGVGVHKNLPRSNKTVLAEIRRLLDAYKGENCSITLTGHSLGAALSTLTAIDIVANGLNVRGPNNDTVPVAAIVFGSPRVGDDQFKKAFDSTPGARLLRVRNAPDVVPTVLPNAFYKDVGVELLLDTRKSPHLKRPGPGPAAWHNLECYLHGVAGTQGAGDAAGFSLEVDRDVALVNKEVDALSDDYPVPAAWWVEGNKGMTRDASGRWVLQDHEEGNLAM

SEQ ID NO: 58952 - protein, 574 aa, Zea mays
  Coding DNA Sequence Number=SeqID_15577
  Gene Ontology: Mol. function=binding; Cellular component=nucleus; Biological process=metabolic process
  Homolog annotation: Hit_ID=A7PWC5; Match level="QueryCoverage=89%, HitCoverage=78%, E-value=1e-145, Identity=43%"; Hit description =Chromosome chr8 scaffold_34, whole genome shotgun sequence
  Pfam annotation: Domain name=PPR; Domain location=189-223; Score =24.9; E_value=0.0003; Accession=PF01535.11; Description=PPR repeat
  Pfam annotation: Domain name=PPR; Domain location=290-324; Score =21.1; E_value=0.0042; Accession=PF01535.11; Description=PPR repeat
  Pfam annotation: Domain name=PPR; Domain location=325-359; Score =24.8; E_value=0.00032; Accession=PF01535.11; Description=PPR repeat
  Pfam annotation: Domain name=PPR; Domain location=360-393; Score=8.9; E_value=0.69; Accession=PF01535.11; Description=PPR repeat
  Pfam annotation: Domain name=PPR; Domain location=84-118; Score=28.9; E_value=1.8e-05; Accession=PF01535.11; Description=PPR repeat
  Pfam module annotation: Pfam domain module=PPR::PPR::PPR::PPR::PPR; Domain location=189-223::290-324::325-359::360-393::84-118
MPAPLILPTVARELAELLVALSAARALPKGQQLHGHLLKAGHVPATASSHALLAHHLLTFYARCALPDLSLRAFLDLPAPPLPAAWSSLISSFAQNGLAAAAFDTFRRMLAAGVPATDRSIPLAAKAVAAAETLSRPPFSPHALHGLAAKTPFAGDVFVGSAIVDMYAKCGHLADARRLFDDMPERNVVSWSALICGYADAGMHPAAMGIFRLALEEAVPVNDYTVSSIIRVCAAATLFELGAQVHARATKTALDASPFVSSSLVSVYSKCGLVECAYRVFNEAPEKNLGIWNAVLIASAQHGHTAAAFERFMEMQKAGFQPNHITFLCLLTACSYAGLVDEGKRYFSIMKDYGIEPQAEHYASMVDLLGRVGLIKEALDLIESMPMEPPESVWGALLMSCRIFKDADTAAIAAKRLFETGSRSSGAHMLLSSTYAAAGRHIDAALARKAMRDAGVRKETGLSWLEAAGEVHTFASNCRRHQRSEEIYKVLENVGEKMEAAGYVADTSAVVKDVDGDEKRATVRYHSERLAIGLGLLIVPHEIIVGSTDLKVGCVLVGISDLFQFSGDMIIKEY

SEQ ID NO: 58953 - protein, 58 aa, Zea mays
  Coding DNA Sequence Number=SeqID_15578
  Subcellular localization annotation: CTP_CleavageSite=50; ConfidenceScore=5.73e-01
MGPSAQSLSPALAPPSLSLVRGVRMSGSSSTARRNKRARTPKLAGNLGVRATIVGALR

SEQ ID NO: 58954 - protein, 39 aa, Zea mays
  Coding DNA Sequence Number=SeqID_15579
MDESGMKKEIGNCITFESQRIWGASGGIKAVRLAAGRNP

SEQ ID NO: 58955 - protein, 328 aa, Zea mays
  Coding DNA Sequence Number=SeqID_15580
MVVRCQTSFCQNEEGFPKLLRACAVRLGIRSQPEYDGREFVEHGTEKCVVTVYIGSSLHHVEWSVTAAGHRFKDTCQVVARKALRALCQIYEEEVADTPLRFFPPFQRDHPVWMAMMRALEDAQYDFLARHHRQMIARAEDAEKLNRKLHVDLTSAQAHVTALESREAIAVEALKQAKDEHVQKLMEAYLPTSSNPVQPIRAEDPQILEGRPVSIRGEKKAWELPEGAIVLERIPVFPQAMDKQEHPESSQDPPSELFEPLTMKKIPAPSLEVKEEAASTPPAPPPSEELQEPVQLEEEFDPVLPSQSPPEEVINISSLLTHPGDVSD

SEQ ID NO: 58956 - protein, 187 aa, Zea mays
  Coding DNA Sequence Number=SeqID_15581
  Subcellular localization annotation: CTP_CleavageSite=95; ConfidenceScore=5.56e-01
MALAGPFAPHACTLLPWAWVSARWARPVGTRVVFPNGLRGCRSRGPGINRNAADSSLASALISTRISLNRSNSSASFPLAPYIKSWPLPPDCFTRATIVEPWSAERNRKPPRPSSCITVAGDSLMVQGVSLGPWERLHSFAGSGGKPGDRELLDGATPPPQICLVVASLAAAPITAPFNLTVVLGEG

SEQ ID NO: 58957 - protein, 112 aa, Zea mays
  Coding DNA Sequence Number=SeqID_15582
  Subcellular localization annotation: CTP_CleavageSite=52; ConfidenceScore=5.16e-01
MQESLAGPPSQQNPPEGLPTLTTPLLPLPLSGNTGVSGQKSLRHKANRAGPRVDSLKGRGLICNIDGRKGIFVCGPLDHDRADQIIFNPIEPTRDNVPSITDLRSGFSEDMI

SEQ ID NO: 58958 - protein, 264 aa, Zea mays
  Coding DNA Sequence Number=SeqID_15583
  Subcellular localization annotation: CTP_CleavageSite=3; ConfidenceScore=5.07e-01
MLLGRMQSSPSCPCPPSFCGWAKIALAGPFAPHACTLLPWAWVSARWARPVGTRVVFPNDLRGCRSRGPGINRNAADSSLASALISTRISLNRSNNSASFPLAPYIKSWPLPPDCFTRATIVEPWSAERNRKPPRPSSCITVAGDSLMVQGVSLGPWERLHSFAGSGGKPGDRELLDGATPPPQICLVVASLAAAPITGKESLIMVTMLRTSCSSVQFDSGARGRLMGVLPRPPPRGHGGGAAAWVVWEEEESLAVCLILNGYD

SEQ ID NO: 58959 - protein, 85 aa, Zea mays
  Coding DNA Sequence Number=SeqID_15584
  Homolog annotation: Hit_ID=Q6JAD6; Match level="QueryCoverage=71%, HitCoverage=10%, E-value=2e-20, Identity=68%"; Hit description =Putative uncharacterized protein
MDESEKGDRPPGTSNCIAFESQRIWGASSFEREDVTLHASQIHQLFGTSDPPRRPHGGVAPATAHVATLFRPPFSDGSRRSPADF

SEQ ID NO: 58960 - protein, 191 aa, Zea mays
  Coding DNA Sequence Number=SeqID_15585
  Subcellular localization annotation: CTP_CleavageSite=48; ConfidenceScore=5.04e-01
MAKGSIFYPDADPSGAFPGTAARCSGEQCHPRQRLPSSERGFAQASPRSNHAQNGGAKISVSGSRDDERMRRPRGFILGQGGRTTLLALPAPSVACLHRNLRSLAVVDVHPPVQPPVEPSSHHHDASMIAVGPSTAGQSSLCSTRDMFADDDDDNAEDDDPEDERDDDVVSAHHDMIGPSQLQDAPLTQLS

SEQ ID NO: 58961 - protein, 141 aa, Zea mays
  Coding DNA Sequence Number=SeqID_15586
  Homolog annotation: Hit_ID=Q6JAD6; Match level="QueryCoverage=42%, HitCoverage=7%, E-value=8e-08, Identity=50%"; Hit description =Putative uncharacterized protein
  Subcellular localization annotation: CTP_CleavageSite=15; ConfidenceScore=5.16e-01
MPHILQHTGVQIPPVQSAPPPALQVAIVPAIQAGPPLPLVGPSTSLIRPVTLDFSSPVISFVSAQPPVPPALAVTTADVAVSVTSSALAAPAAQPQSESVPAPASKADPGSETDSDPQLAFALLPRLRPDAPPPPPSSSTL

SEQ ID NO: 58962 - protein, 59 aa, Zea mays
  Coding DNA Sequence Number=SeqID_15587
MTYDADVVDALDSHLFELGAMIYGTELGHVDVGLAKGGQRNRYLGTLAYDAERRVQKRY

SEQ ID NO: 58963 - protein, 140 aa, Zea mays
  Coding DNA Sequence Number=SeqID_15588
MAARRRAETRRAGPRWAGGRAGKHAGRGTERARPRHDRPAEAEVRGRRREGEGRETRGSPRQTAGGGVGRAGVGQGSGVRERRDPANPLNRSVDTHLVKMLPTLILTDLEELKVAKWIGGRGKNSEKGENFSKAIERQGE

SEQ ID NO: 58964 - protein, 691 aa, Zea mays
  Coding DNA Sequence Number=SeqID_15589
  Gene Ontology: Mol. function=formate-tetrahydrofolate ligase activity; Cellular component=mitochondrion; Biological process=folic acid and derivative biosynthetic process
  Homolog annotation: Hit_ID=Q9SPK5; Match level="QueryCoverage=99%, HitCoverage=99%, E-value=0.0, Identity=80%"; Hit description=Formate- -tetrahydrofolate ligase
  Pfam annotation: Domain name=FTHFS; Domain location=15-691; Score =1357.5; E_value=0; Accession=PF01268.10; Description=Formate- -tetrahydrofolate ligase
MPSPTIRRLDVASPVPADIDIANSVEPLPIADIAAELGLRPEHYDLYGKYKAKVLLSVLDELKAQQDGYYVVVGGITPTPLGEGKSTTTVGLCQALGAFLDKKDIAFSKVDCYVNGVISLSMHCRNNWNNLFFLSWIGFSYSLKFIKEIWHQVVSRSIQVVTCLRQPSQGPTFGIKGGAAGGGYSQVIPMDEFNLHLTGDIHAITAANNLLAAAIDTRIFHENSQSDKALFNRLCPANKEGKRHFADIMFRRLTKLGVSKTDPNELTPDEIRRFARLDIDPESITWRRVMDVNDRFLRKITVGQGPEEKGMVRETGFDISVASEIMAVLALTTSLADMRERLGRMVIGNSKSGEPITADDLGVGGALTVLMKDAIHPTLMQTLEGTPVLVHAGPFANIAHGNSSIVADKIALKLVGKGGFVVTEAGFGADIGTEKFMDIKCRYSGLVPQCAIIVATIRALKMHGGGPEVVAGKPLDHAYVSENVALVEAGCINLAKHISNTRSYGVNVVVAINKFASDTEAEMKAVHSAAMAAGAFDAVVCTHHAHGGKGAVELGLAVQRACESQAEPLKFLYPLESSIKEKIESIAKFYGASGVEYSEQAEKQIEMYTKQGFSSLPICMAKTQYSFSHVPSMKGAPTGFVLPIRDVRASIGAGFIYPLVGTMSTMPGLPTRPCFYQIDVDTATGKVMGLS

SEQ ID NO: 58965 - protein, 31 aa, Zea mays
  Coding DNA Sequence Number=SeqID_15590
MKARRLSRDKYASNHPADKIDKTLIFKTRMA

SEQ ID NO: 58966 - protein, 147 aa, Zea mays
  Coding DNA Sequence Number=SeqID_15591
  Subcellular localization annotation: CTP_CleavageSite=52; ConfidenceScore=5.56e-01
MAATAPALGPGHGGVPTRPGLAPPGALPSPRPGGARSRRGQPARRPGVACLRGGQRGPGMAHGALARPARLEQPRHSHSHHCASCRTGSCRARGYERPRELQRLVILDQRHCGTGGNEIDGSGYDYGLGEDEAVEGDFQEFQDYDEF

SEQ ID NO: 58967 - protein, 62 aa, Zea mays
  Coding DNA Sequence Number=SeqID_15592
MGVVISLICAYELRRPTAFLRQLNGDTTHFIIIRVTSDFKAYIDAKIDSKPDPPPFASPEIE

SEQ ID NO: 58968 - protein, 161 aa, Zea mays
  Coding DNA Sequence Number=SeqID_15593
  Subcellular localization annotation: CTP_CleavageSite=36; ConfidenceScore=5.31e-01
MKLKIKRRNKPVPGPNSHRQPSLPCPLGPFNHPLVRALRLVGPTSQCAKRHRHESGYMACGSCFVRRVPSLARTHFLSPTSVPHPVKFAPIEFVGAVRKSRAESVLAGDAILAETSVAGYKYGCPNSLCYEPHLGFSSSTRISRCQEFCEEGGRGETNRRR

SEQ ID NO: 58969 - protein, 46 aa, Zea mays
  Coding DNA Sequence Number=SeqID_15594
MAVMGSTSEKMYLCQVRKQQIFVAFVPRWCLKKKTRIEALGGSVLL

SEQ ID NO: 58970 - protein, 46 aa, Zea mays
  Coding DNA Sequence Number=SeqID_15595
MAVMGSTSEKMYLCQVRKQQFFVAFVPRWCLKKKTRIEASGGSVLL

SEQ ID NO: 58971 - protein, 190 aa, Zea mays
  Coding DNA Sequence Number=SeqID_15596
MTQLNLIGPVLHDMVMKTGTDDEYIPRIVDAEELPTAKCRRMAELFLRRPIHATSPSKLAWRDYGYHQGVEAKLPQWLRSARRRQSRASATTGSAAAAALGPSPFVVVNVSREKIGSEADTSRSLYLGRGANLYLNPRSKRRLLQWRARHARGEERAGRADSHGPPRSGVEGKRGPGSTRQRVVKEANAK

SEQ ID NO: 58972 - protein, 137 aa, Zea mays
  Coding DNA Sequence Number=SeqID_15597
MRIRFCSRATVRRARLVNRAPQVTYRTTVLTCRAQLASQYSTFGFLIALYLGGSCTLRLIYPKPHEREESIAAASSMWQPVSGSQGRGALVSAGAKGHPRASSWSHASSNFRRFFAEAPCAPASRSDVVGLFGHPID

SEQ ID NO: 58973 - protein, 64 aa, Zea mays
  Coding DNA Sequence Number=SeqID_15598
  Subcellular localization annotation: CTP_CleavageSite=34; ConfidenceScore=5.10e-01
MASYGRIFGRRGRNFSSAHHWSPQSHRAPWAEFYAARFTGRATVSVVLGGRQSLEFGFEMSGED

SEQ ID NO: 58974 - protein, 112 aa, Zea mays
  Coding DNA Sequence Number=SeqID_15599
MESQVAVTAWISADDLFISLLLPHRTPGTGKSINRSLRQNCVAGEDLFCPGFAHDPTDSIGANLTGWGPLVDDQNQDSAQSGCTGLSGGAPDSVRCARLALANWLLSGFIGG

SEQ ID NO: 58975 - protein, 103 aa, Zea mays
  Coding DNA Sequence Number=SeqID_15600
MAIWRRSLARRSHNSVTTREIRCETLESGTRGASIPTGGARSASHARSRPRDPLHLPDLMLSVHLLDPDVGPASSPACSPRCPLRLPDAGPASSPACSPRLRL

SEQ ID NO: 58976 - protein, 245 aa, Zea mays
  Coding DNA Sequence Number=SeqID_15601
  Gene Ontology: Mol. function=transferase activity, transferring hexosyl groups; Cellular component=Golgi apparatus; Biological process=carbohydrate biosynthetic process
  Homolog annotation: Hit_ID=A2YGX4; Match level="QueryCoverage=22%, HitCoverage=9%, E-value=1e-18, Identity=83%"; Hit description =Putative uncharacterized protein
  Pfam annotation: Domain name=Spermine_synth; Domain location=61-244; Score=-74.0; E_value=0.00058; Accession=PF01564.8; Description =Sperminespermidine synthase
MAQNLDGLKLDNVEGVEEDGFGGFAVAHDEVLYHHVLWSNRSWSGETMSGPRMGTQPETKGRIGVRNKMEVVQQDDEALVKLENTGIERSKAVDSAVLGKYSIWRRENENEKADSRVLVIGGGDGGVLREVSRHSSVEQIDICEIDKMVVDVLSMSRVGAPRAVLPLLTESPSLSFANMSSLYSLPRTLHFLVVVLIPDHGVVIQKVAMVFVSTRLKILFKEGGYDTFDPLFLNLIASMQALQPD

SEQ ID NO: 58977 - protein, 350 aa, Zea mays
  Coding DNA Sequence Number=SeqID_15602
  Homolog annotation: Hit_ID=Q6QP51; Match level="QueryCoverage=53%, HitCoverage=80%, E-value=7e-15, Identity=37%"; Hit description =Putative growth-regulating factor 1
  Subcellular localization annotation: CTP_CleavageSite=73; ConfidenceScore=5.04e-01
MQAACNRAKWVHLSDFQRAQHGSPGPCVMQSADRSGGHVVSQAYVPSGGSERTLSHGVKKTRPCSVPRTARARATAAPRTACLVALTPRRDRRRLWQEKQATLRLRHNDRVKKGTRLRASLLIRGSKAGPSKGSTTASERVGSTPTTGQRFEGQPLGRVQRPPQATRALCPLLIRGSKAGPRRVHSRLRHRARDDHGYVRYITKARVALPRGSGAALANPAPAKPLTASTYQPENLGPDRIGPFEGLDHASPEPSLGQGQPTPEDLRLARGPPPATNILPARPRPYLRQEAVRPGLRHHRKLRSARPRARTRAKPWKMANSAPPDPGLGLGLSPGRRRTPLRLTQGSDSG

SEQ ID NO: 58978 - protein, 81 aa, Zea mays
  Coding DNA Sequence Number=SeqID_15603
MRRTRTAAKDEDDDDDDGGDGDGDGSGSGGGSSGGDVSKGSTRCGSSKGSTRGGSSKGSTKGGSSKGSSKGGGGSRGRASG

SEQ ID NO: 58979 - protein, 72 aa, Zea mays
  Coding DNA Sequence Number=SeqID_15604
MAELTEALARLGRDWRELATAAEALKAWRAVARRARGNFRACSREFGTTLIFGSPGFEFRKTENAVDPWKEV

SEQ ID NO: 58980 - protein, 91 aa, Zea mays
  Coding DNA Sequence Number=SeqID_15605
MANFRMIALAQNCNLADGEYVLIPEQGTVQEEDQEQAPEAAIEDLPAAPAIEGKPRYGGYKCGHCTAAAGVSGALYAKALMRLLDPLSYIE

SEQ ID NO: 58981 - protein, 35 aa, Zea mays
  Coding DNA Sequence Number=SeqID_15606
MAGGIELAGAKGKWLAGEGSHKMMVLGLAFEKNPE

SEQ ID NO: 58982 - protein, 131 aa, Zea mays
  Coding DNA Sequence Number=SeqID_15607
MEKQKSLKSWLSNFLPLSTLALNKCEILASVFEALGLVDITWMGETLELFLKTANGRKILHKCGVFCRIVFLDLADNDFGVCLDYAGVHVECFQLAKAQDNGFVLCYVVCAPVGFQSEAEACCVSVLDAGG

SEQ ID NO: 58983 - protein, 339 aa, Zea mays
  Coding DNA Sequence Number=SeqID_15608
MSSTYVKMFRPTWALEHRLGEEREGGPQHSLVPPGILMKQYVPKGRDETGTGLVFLLHVYLVVAGETVKERHDFASGCAIDYLVDPWQRGIILGAGFIEACEIDAHPPLAAFLLHHDYVSEPCRVGDWFDEANFIRHFAQPLLLRPHRRVDAQTVFDDSATNSDQVEGRLGEDVLVSRKTRDEFILILRSQVFAYDDRLPGRCQVKGDRLCFVVALQLCLFKLVGGWVGSLGDLALRLAIECDRALRTQDFHAQVPTCHTAVDYHGVNVGCTAQVDISGVEGQRHMGPLRLHDWAGDGDVVDASVVVPLLSLCVEVDAGPPSDHVNDSAIRLIREVFLF

SEQ ID NO: 58984 - protein, 85 aa, Zea mays
  Coding DNA Sequence Number=SeqID_15609
MRSPSLRYWTTKARSMAAVGICYEVVGGVVSLRRVQGWEHSHSLALLGLMPGADAQVFIVSFSGNEQEAPTTRPVDQAHHPVHPL

SEQ ID NO: 58985 - protein, 465 aa, Zea mays
  Coding DNA Sequence Number=SeqID_15610
  Gene Ontology: Mol. function=oxidoreductase activity, acting on the CH-OH group of donors, NAD or NADP as acceptor; Cellular component =cytoplasm; Biological process=malate metabolic process
  Homolog annotation: Hit_ID=Q5N7X7; Match level="QueryCoverage=30%, HitCoverage=54%, E-value=6e-42, Identity=65%"; Hit description =Putative uncharacterized protein P0470A12.18
  Pfam annotation: Domain name=Malic_M; Domain location=176-358; Score=- 107.5; E_value=0.00013; Accession=PF03949.6; Description=Malic enzyme, NAD binding domain
MPEAENARPTRWWLAAKPKASDPLARSLDCSLDRTDSILTTVHLLLHSMAFDSTTSLSLSDPAAAAAPDLYMSSDTDIVSSGSNSGASDPPRRVISVSARFCQKTNSRLRRILEPRLPLLLSSRRSFSDSPMSPRLPGRSPSPCRESRGGDSPSRGRSWEASPNGHMVQALANAPSIINFAAEWRCINAQTDATLLVQSFTAEGLIVASREETLQSFKKRYAHEHEPVKDLLGAVKAIRPTALIGSAGVGQSFTKEVIEAMSSINELYDQVTGDVICHGEKTSYKMGARAILVAIRVPALRRGALRVRWVTAALFSSGILAGNKPILVRDFVRSALYDPNHGYFSKRAGPVGVLDASIRFNQLEGAMVCLHNSSIDSAYSKSFSPIEVEISSSLAEKQLETVGEVQSHLSKFTVEHRDAINRPGWGRTDPHPCWVLMLENLCCALPQLKIIYVCSRVLCSCGGFS

SEQ ID NO: 58986 - protein, 143 aa, Zea mays
  Coding DNA Sequence Number=SeqID_15611
  Gene Ontology: Mol. function=catalytic activity
  Homolog annotation: Hit_ID=A2Y3P0; Match level="QueryCoverage=56%, HitCoverage=23%, E-value=7e-20, Identity=64%"; Hit description =Putative uncharacterized protein
MTCGCQITRGERELKSPKGSFIGGLARILVQRKLGGGRRVGMVLTCSIPVGMEALALASLINDEKLGDCQFDLWKQSYVAAYAAMYDKLRRSRRLDAVQSGCTTLSIVKQGDLMVVANVDDSRVVLGTASDDGAINPSSSSST

SEQ ID NO: 58987 - protein, 340 aa, Zea mays
  Coding DNA Sequence Number=SeqID_15612
MQAACNHTKGAYPFGFDASSMEAQAHTSSAGEGVTVDMAKSGPAVMAAAGGRKQWSSRLQAHVPSGDSERALSHGVKTTRPCSVPRTARARRTAAPRTTRPVALTLRQDRRHLWQAKQATLHLSHNDRVKKGAPRHPISYPFPLPLSLSCYRDWERGYSERDPSPRRKRAPSPLLIRGSKAGPLEGFDSRLRALGLRALLLIRGSKAGPLEGFDSRLRALGLCAHHWSEVRRLAPRRGSTVASGHSGSAPTTDQGFVGWPPKGSTAASEHAERGMTLGTSDTWPRLGLRSRGTLGHFRDQQERFCNEIPSEGGIEPSDPIKRDRVRQITCMYFWSAPLGH

SEQ ID NO: 58988 - protein, 71 aa, Zea mays
  Coding DNA Sequence Number=SeqID_15613
MATGYTLVLPTFNSAPVKSAPPFTGLEAILTKKWHYDAEAQFKSKVEHLFKAATTLKHKGFNGARFVCTFM

SEQ ID NO: 58989 - protein, 26 aa, Zea mays
  Coding DNA Sequence Number=SeqID_15614
MRPRAAVCLCANDDYSTSSSSTSSNV

SEQ ID NO: 58990 - protein, 650 aa, Zea mays
  Coding DNA Sequence Number=SeqID_15615
  Gene Ontology: Mol. function=hydrolase activity, acting on acid anhydrides, in phosphorus-containing anhydrides; Cellular component =nucleus; Biological process=nucleobase, nucleoside, nucleotide and nucleic acid metabolic process
  Homolog annotation: Hit_ID=Q6AUI3; Match level="QueryCoverage=97%, HitCoverage=95%, E-value=0.0, Identity=77%"; Hit description =Putative nucleotide excision repair protein XP-D
  Pfam annotation: Domain name=DEAD; Domain location=18-269; Score= -42.6; E_value=0.063; Accession=PF00270.20; Description=DEADDEAH box helicase
  Pfam annotation: Domain name=DEAD_2; Domain location=72-259; Score =233.8; E_value=4e-67; Accession=PF06733.6; Description=DEAD_2
  Pfam annotation: Domain name=DUF1227; Domain location=260-416; Score =301.2; E_value=2e-87; Accession=PF06777.2; Description=Protein of unknown function (DUF1227)
  Pfam module annotation: Pfam domain module=DEAD::DEAD_2::DUF1227; Domain location=18-269::72-259::260-416
MRFDLDGLPVHFPYAAIYPEQHAYMGELKRALDARGHALLEMPTGTGKTAALISLITSYSLANPARPLRLIYCTRTVHEMEKTLAELRLLFAHLPPAASRSLLALGLSSRKNLCIHPQASAAAARDSVDTACRRLTASWVREKASSDPDSTPLCEFYETFDRAAAAGDLASFMPPGVYTLADLRALGRERRVCPYFLARQMVKYANVVVYSYQYLLDPKVASIVSREMQKECVVVFDEAHNIDNVCIEALSVSIRKQTLEGAERNLRRISQEIDRFKATDANRLRAEYNRLVDGLAQRGNLPISDAWLANPSLPDDILKEAVPGNIRRAEHFLAVLRRLVRFLDGRLETENVENEMPVSFVASIHSQAGIDQKMLRFCYDRLHSLMMTLEITDTDEFMHIQTICDFATLIGTYTRGFSIIIEPYDDRMPDIRDPVIQLPVSTKFDMRSDPGVVRNYGRLLLEMASAVPDGIDIMQHKLVFIETPDVVETTLALDNYRKACDCGRGAIFFSVARGKVAEGIDFDRHYGRLVIMFGVPFQYTLSRILLARLEYLRETFQIKEGDFLTFDALRQAAQCVGRVIRSKADYGMMIFADKRYSRHDKRSKLPGWILSHLHDAHLNLSTDMALHIAREERYSIRFVAFTTYNLHGPL

SEQ ID NO: 58991 - protein, 39 aa, Zea mays
  Coding DNA Sequence Number=SeqID_15616
MFGLQVTMRLMVFDIDYGNGKEGVEADLQEFQDVDEFED

SEQ ID NO: 58992 - protein, 422 aa, Zea mays
  Coding DNA Sequence Number=SeqID_15617
  Subcellular localization annotation: CTP_CleavageSite=33; ConfidenceScore=5.20e-01
ASPPPPISAPNPIRRLFHFLLPLSKPSDGASARATTGHAEELGVARPCTRMANETGSTPRVDESEHVKEVLTGDWEVDGRHDEIARRIRRGRSLRWPLGNPTQRPPDQRSLAGGGGLHSRELGPWHTAAREPSASTAPVRPCMELRTERRHRLPTPAWTMPNIPGASAVMPVAGEFARHKQGRRRTSVLDRNVKGAREGAVSTSGSWEGDSARRSGRRFAFAVITAPKKGPGKGDTPKRILPREGTRLRASLLIRGSKAGPPKGFNSRLRSRGPYTHYWSEVRRPAPRRVPRPPQATRAPRPLLIRGSKAGPRRVHSRLRHRARDDQGYVRYITKARAALPSRPLTNGARTSTRITRLQLTGDTMFGAHRGGSGAALANPAPAEPLTASTYQPENLGPDHTPGLRSVRMRDPPDQPKHYARH

SEQ ID NO: 58993 - protein, 137 aa, Zea mays
  Coding DNA Sequence Number=SeqID_15618
MAARSWSLLCAPLAPSSPPHIQGCAANCQPPWSALSPSVEHDLGLHNDAGSLGPLLSPRLSLDVVVFIVPLQLACVGFGVLAKAMRDVVSAANSGALSAADLLGGVVREPLPPFPNPTCLIMEDSCCAGEFDVIIFL

SEQ ID NO: 58994 - protein, 266 aa, Zea mays
  Coding DNA Sequence Number=SeqID_15619
  Gene Ontology: Mol. function=ATPase activity, coupled to transmembrane movement of substances; Cellular component=proton -transporting two-sector ATPase complex; Biological process=proton transport
  Homolog annotation: Hit_ID=A3AXY5; Match level="QueryCoverage=100%, HitCoverage=100%, E-value=2e-68, Identity=56%"; Hit description =Putative uncharacterized protein
  Pfam annotation: Domain name=ATP-synt_D; Domain location=15-217; Score=237.8; E_value=2.5e-68; Accession=PF01813.8; Description=ATP synthase subunit D
MAGQGQRLNVVPTVTTLGTVKARLAGAARGHALLKKKSDALTVQFRAILRRIVSAKDAVGDAMRTASLSLAEALYAAGAPLRHAAQQSVSGPARLRVRAHQDNIAGVRLPRFESCLGAADGSSSPASLAGLAGGGQQVSACRAAHARALQVLVELAPLQTSFLALDAAIKTTNRRVNALESVVKPRLENTIAYIRGELDEHEREEFFRLKKIQGYKQRELERQKEAASRYAEEKAAGEVALKRGVSVATAESMLENGDRDEEDIIF

SEQ ID NO: 58995 - protein, 240 aa, Zea mays
  Coding DNA Sequence Number=SeqID_15620
MWRALECGPARQDDIARGEESWAARVKGEEDDCIVRVEETQCKWARFTSGRVPRLRRTPKADGVVPVVGARSKTFLTKWVLHMGKSKKGGSSSHHSSDKRKREPTPPSEDFGDSEYSEEEFSSESEGSPVHASPPASSDDSDDSQGIAAEVWTYIRAVERVGLEGSDESEYSSDEENSSDSSEEGGGDGDGDGGDDDDGGDGDGGSDGDEGNDKGGDDSGKGGSGDGSKGSGRGSNKASG

SEQ ID NO: 58996 - protein, 168 aa, Zea mays
  Coding DNA Sequence Number=SeqID_15621
  Subcellular localization annotation: CTP_CleavageSite=58; ConfidenceScore=5.12e-01
MASPGLPTLRAIGGCSLGQPTTFYHSLIRRAICDTPSTVGGTHGAPSTLRANDDTRTRSVAEKSMTGITASRHGVRPPELSRQRLRLVAPPGDDQGATTTTPLPGTDIIIDDKRTHVEYRHLLRASGPFSGPLTSRSPTLTNMNPSRIREAGWLSTPLPPEPLGQPKM

SEQ ID NO: 58997 - protein, 239 aa, Zea mays
  Coding DNA Sequence Number=SeqID_15622
  Gene Ontology: Mol. function=phosphoglycolate phosphatase activity; Cellular component=mitochondrion; Biological process=metabolic process
  Homolog annotation: Hit_ID=Q6Z026; Match level="QueryCoverage=76%, HitCoverage=75%, E-value=5e-79, Identity=73%"; Hit description =Haloacid dehalogenase-like hydrolase-like protein
  Pfam annotation: Domain name=Hydrolase; Domain location=47-221; Score= 50.5; E_value=6e-12; Accession=PF00702.17; Description=haloacid dehalogenase-like hydrolase
  Subcellular localization annotation: CTP_CleavageSite=35; ConfidenceScore=5.57e-01
MPPAAAALLRCAPAVPFAARSSAVSRSGMARRLVAASAAAGRLAPAYRGLLLDAGGTLLQVARPVAETYASIGRRYGVTKTKKRIMEGFKRAFSAPWPKTLRYQGDGRPFWRIVVAEATDCTDGDYFEEYYAHGDAWRLPTGADAALRELKDAGDLELFRFDAIVVSSEVGYEKPSPEIFNIALDQIGVEASKAIHVGDDETADMAGANATGLECWLWGKDVTTFSEIQERILTTDGPQ

SEQ ID NO: 58998 - protein, 340 aa, Zea mays
  Coding DNA Sequence Number=SeqID_15623
  Subcellular localization annotation: CTP_CleavageSite=69; ConfidenceScore=5.37e-01
MSSRSLMHRVFPPSKPPDGGYPPSFRLIVGGTQLRGSWYLSAIVRLQGFSSGSPAAPLHRRSPKMVTSSLMMGESEPGCGLCPSLSLKDFHHQGWGGESAPCPALGREWLRSHSRAPASATAAGRGSSVGEIAKAGHGPTSNSTAFCPSLPHKFGHGRGPPGSSICPEVSAVAVRPPPPGAEVVVVAAAGAGDGVTFVGLLLLRRPSPMEWGYSPVDYLNRFTKHESPRVKVTSEPGCPLAGPTPELTNRGLGSGWRPWKMVGRGPRGDRPSRLLGLDSRRRPWRRRPGRGDDVVLRSGDLRTASPFEARSNLAKVVVNAEGAAAPFQRQDPSLQDQIVL

SEQ ID NO: 58999 - protein, 327 aa, Zea mays
  Coding DNA Sequence Number=SeqID_15624
  Subcellular localization annotation: CTP_CleavageSite=71; ConfidenceScore=5.54e-01
HGRTRPDEVLSKSPSGAMRSPPPLLSATPSPFLHGFLVRAHSPGAASGRATRPYWRPSLRGRPAGHIASVSASSSHPRLADQQLLGCSSMSRHDPVERLHPCSILVNVVRQSSVSPWDTSSHYYRRCAAGSTSLPSSPSLLLPWPAHAASAAQPSTAPLRAPSHARVPQPLPQPSGRVRVCPAPPLARKSQLPPQRSQDLENRQADLGPCSRRAAVLQPWPNSPRRGPLQIAVWRDAQPASPAERHPHPLHGFLVRTHSPGAASGRATRPCWRPSLRGRPAGHIAFVSASSSHPRLADQQLLGCSSTSRHDPVERLHPCSILVNVIR

SEQ ID NO: 59000 - protein, 409 aa, Zea mays
  Coding DNA Sequence Number=SeqID_15625
MEKDRQDAAQKRRAVIRIVDPIREAKKARGSVKAAASGSSKPVPAAKPAAPRHNKASASAKAAASSGSKPPPGGPLKGRGLPSPARRVVDFGTDISVDDYFVVSWCRVGWGHLVVVPPSVATTSPTAVVGAKGAAQDPWATFCASGEILSAAAANEVAGSMSQRLREASQQLKQAADFADHVALGALTTDVGAEVESLRAQHVHAVREKSAAESKSHRLAEKVAAMEAEKTDLPHQLAEERREANKAIADAQAAQAEAKLERAEGSLARQRAEELEARLNALRSRVDKAEASTRVEVERTHAQFVDAYRELGARTAAFEVPGQEAGLRFLEWLQEELLVLQTIVTGFMSFASLVTCEGAVNALSREGCRHYEVFDQADKNFEREIFKVEDPVLKQSAGALFDRMWGSHR

SEQ ID NO: 59001 - protein, 257 aa, Zea mays
  Coding DNA Sequence Number=SeqID_15626
  Homolog annotation: Hit_ID=Q69TU9; Match level="QueryCoverage=85%, HitCoverage=49%, E-value=2e-27, Identity=52%"; Hit description =Putative uncharacterized protein P0021C04.50
  Subcellular localization annotation: CTP_CleavageSite=38; ConfidenceScore=5.05e-01
MASSISLLVTIMLLLPPPSPACSLLSCRLDFTSLALLSCQETAPQNPTASCCDALLYSIDIWPIYELEKGLCCLCVYMVSRNITFDLPTSYVSSGGKDSSNVLQWNAIIPRPTGCNDPCSRQLEKKGTSPSPPPAPGRLGSGVIAAIAVEAYVAIAGFLRWLDFTSVTLLSCQETAPQNPTASCCDALFYCIDIWPIHELEKGLYCLCVYMVSKNTSFDLPTSYVSCEGKDLSNVLQWNAIIPRRTDCYDKYRTFLN

SEQ ID NO: 59002 - protein, 216 aa, Zea mays
  Coding DNA Sequence Number=SeqID_15627
  Homolog annotation: Hit_ID=Q69TU9; Match level="QueryCoverage=33%, HitCoverage=35%, E-value=7e-17, Identity=51%"; Hit description =Putative uncharacterized protein P0021C04.50
MAPQNPTASCCDALLYSIDIWPIHELEKGPYCLCVYMVSRNTTFDLPTSYVSCGGKDSSNVLQWNAFIPRITDCNVLQINALDSWRRRASSDGVSTTPGFAVHRPKREVTSSSSGGQPQEPPPGFAPLEGEDATEDSKVISVSAEEQLQLWALRIKNRNLQKQKEILEAKRQRVSAQAKVRQMIRDEEQRAQELEQEIALMQREGQHDLQRGPPLQ

SEQ ID NO: 59003 - protein, 57 aa, Zea mays
  Coding DNA Sequence Number=SeqID_15628
MSLSSYPAAAANSNPLILSLIGSAGKQSWRWKEKAEPSGLPFIVAARWTPIYPLFSS

SEQ ID NO: 59004 - protein, 140 aa, Zea mays
  Coding DNA Sequence Number=SeqID_15629
  Homolog annotation: Hit_ID=A2YAM1; Match level="QueryCoverage=27%, HitCoverage=19%, E-value=3e-09, Identity=66%"; Hit description =Putative uncharacterized protein
  Subcellular localization annotation: CTP_CleavageSite=23; ConfidenceScore=5.25e-01
MASSSVSLLVTTMLLLMLPPSPACSSLSCKLDFTSMALLSYQEMAPQNPTASCCDALLYSIDIWPIHELSMLSAAREEGCVPTPPPPPAPVQRPKREVASNSAPPQLSCDAIPLPYSYTFLKHAGMQQQHSQQAELLLGW

SEQ ID NO: 59005 - protein, 100 aa, Zea mays
  Coding DNA Sequence Number=SeqID_15630
  Subcellular localization annotation: CTP_CleavageSite=9; ConfidenceScore=5.01e-01
MATHAMTVMAAMAPDPSPPGAGGGGGDAPFFSSYREHGSVGSLGQGMMAFHCSTLLESLSPDETFVCVAPQPYSCAFIVIFVVRARDSNLWRFLANGKKR

SEQ ID NO: 59006 - protein, 410 aa, Zea mays
  Coding DNA Sequence Number=SeqID_15631
MEVGCEGWGGWEWSNELVVGVVWKEAPESTTQSVVVRGGGSGEGTVTWEDKRSRHVTARLRVDLDAVPKNRVADWIKGHEHGADELAVVEEDTHNHKSGGTAQQVLRLSSPVLRSASNAQGQGAVVARGEAALLAPGRDGHSTPREGERVGALGESLGSLAARSNRPGRRRRLDLRRVGWCRRKKLGRRPGYTEQRLDARGPHKGRSAAALLLPTLWRSALTWPRRSASPEAGVRRGALRRVLAREKRAAVSGPAAALFWEDAAAAESVATHDGIFGTEYNIRIDRGAVIFRELHPDPPHLEEIPRVGFGQALAAAALGDRLLGVEFVRGRPSFPFTSDLLAPRVVLAPPPLKFSAAVDAACDTVSASAAACVVAGDLYATSSVGDIGQILSGLYSETFTEPMLQIFVPY

SEQ ID NO: 59007 - protein, 342 aa, Zea mays
  Coding DNA Sequence Number=SeqID_15632
MDRPVAGEGEREDGANSGELDDGAEGLVVVHSGALGEAPKDPMGLVAVEGAVRDGAPGVGGNRVGLKEGVKIGGWGGACKGKHIFVEDNVTRDDDAVGGEVQAPIPLLVRGVAEEKAASGARRKFVRGGSGNVRVAGTTEHAQVVVGRGCVVQGKVRCRVAHRLRGKMVEKMRGGMKGLCLVGGRERRLKEKAADHVGGGANHALGPTILSRGVGTRETQLDTVSEEERAGGVVVELVAIIALQGTDRAPELGGYPGEEVSEGGKCVGLQPKGESPKEMGVVIQNDQVVFVAGEAKDRRCPEITVDKIKGMNSPGRGSGKRKTGVTTELTSMTEVLRRAPST

SEQ ID NO: 59008 - protein, 144 aa, Zea mays
  Coding DNA Sequence Number=SeqID_15633
MALPQRRRWERSAMEWDVQRRRLQEHELDAKQLALVAGLFGSTPKPPPRATVLPPQMPTDVGNLKRIVKSKYPYVSNLWMLIKNGPHCSLARAADVPCRGGGPWEAGAPAAAAPWQQSRRRQAWETLAMVTALAKVVAMTAPAG

SEQ ID NO: 59009 - protein, 93 aa, Zea mays
  Coding DNA Sequence Number=SeqID_15634
  Gene Ontology: Mol. function=protein serine/threonine kinase activity; Cellular component=integral to membrane; Biological process=recognition or rejection of self pollen
  Homolog annotation: Hit_ID=Q8LLI3; Match level="QueryCoverage=76%, HitCoverage=8%, E-value=1e-27, Identity=83%"; Hit description=S -locus receptor-like kinase RLK13
MARIFCGNEQQANTTQVIGTYGYMSPEYAMEGSFSVKSDTYSFGVLLLEIVSGLKIGSPHLIMDYPNLIAYLSTKEFRTIEQLKNTFGDLTRT

SEQ ID NO: 59010 - protein, 278 aa, Zea mays
  Coding DNA Sequence Number=SeqID_15635
  Gene Ontology: Mol. function=protein serine/threonine kinase activity; Biological process=recognition or rejection of self pollen
  Homolog annotation: Hit_ID=A2XXX8; Match level="QueryCoverage=17%, HitCoverage=77%, E-value=6e-14, Identity=58%"; Hit description =Putative uncharacterized protein
MEGSFSVKSDTYAFGVLLLEIAWSLWKDGNALELVDSSISVSYSLQELVRGKPYGQLSDALPFSLTPDEGEDCALRYALFSRKPAPARDGGKFQVHFASSGRLSGTRARRGDAAADLAAQGRFGAGGEFIGSNLVVAGRIFSSAAHLIMASSTEDNMKALLKVLVDCAEDATKTLGGLVDHALDHMHDEEIVARTLYAIKDKLELLQQDALEAKVQAFPEIVKYDGDDISVEPTSPSTPPTVTEPSIDEEEFYCPDVSDEWYFSDSDRSTRTSYWNIY

SEQ ID NO: 59011 - protein, 93 aa, Zea mays
  Coding DNA Sequence Number=SeqID_15636
MEASLSKSPESRQERRSRGVAERSRESEARAGWAVPPPLLLGTIYIHAGYSEAGAHKRLGLCTSATIYPLVCRSRVYVFKLDSRPQAVGTHDL

SEQ ID NO: 59012 - protein, 935 aa, Zea mays
  Coding DNA Sequence Number=SeqID_15637
MCSHYYSAYPPFEVAEEDADEGALRCAAGQSSGRDLVEEFVAYGVWPLAHGWALGEVCPRQMPFHGGRVVRSPAFALNLRNRDPAAFVRDAEDGAVRLVGRYVLRTEGQRSFDIRGSNDRLNRVFELNQLPYDGYPGQDEADRRGKKPVVETGDDPAPAAAPSSKKRKLGTAMGGLGVSDSFARELMRTCAAPGERMSSPELRESSARMLRVTGGCWPRNVPIPCAADEDCFTSRMVRQWRVFPYGRNIAAVVSAVMDKDRQGAAQKRQAAVRLHEARPKRQRGAAKAAAFGGGKPPLAAKSGASAPSKAPEATAGAGGSKSTKVVPPASGVAEASKAARALPLSGKRVADFGTDITVDDYLGGSDEGQLAIVAPAAAIATAAIVPKARGEALGTGGEVSALAVVRDEAGAATRRLREVTEALSQVADFASRTVSGALTAAVSAEVERLRTQHADAVREKSASDSKCRKLTDKVAALEREKADLRRQLAAERREANEAIAKEQDAQAEAKLARAEGNLAKELAEHLQERLTALESHAKGAEASMRAEAERTRTQLMDTYRELGARTGDFEVPDREPGLRCLQWVQEELQELPTVVGGFMSYASLVTCEGAMNALSREGCRHFEVFDQADEDFERDVYKVEDPVVKESAGALYDRMWGPHGREVVRERAETARAQAARGERVDDFGALNSALPDPEPTPAEAVPGVALEPTPETAAIATAAPTSAAAGEDLPPKVAKGAPDAPAAAVPSAEDPAAVAAETTAEAAAEPTAEAPAASGPSQVQDFGPAHATVTTEFLAASTAEGGNGYGESASEFFDFTDSGSSVEWTEESSEEDLDYFAALDVAAAEATPHAADAPDVPGPSTGRRRRRAVAKRRVSTEEGARLRVSSAGGQELLSLPAAASTGEGELRSLFAGEELRIMLFNYREMRIIPKVEPM

SEQ ID NO: 59013 - protein, 208 aa, Zea mays
  Coding DNA Sequence Number=SeqID_15638
  Gene Ontology: Mol. function=catalytic activity
  Homolog annotation: Hit_ID=A2Y3P0; Match level="QueryCoverage=28%, HitCoverage=16%, E-value=2e-14, Identity=65%"; Hit description =Putative uncharacterized protein
  Subcellular localization annotation: CTP_CleavageSite=49; ConfidenceScore=5.45e-01
MVKNFGSKTVQIAMNAVVTSQLLVSLYSAAGKKAKRRNCYTRRAVTCTRCAVDRKDQTVTLQGGTDTRSEVGSFLRNELREGVFWTFGFPKLKRLFSRVKLVTKNDLAPRKGLLLGLCFGAPKVSHEEAASAEVVSKRWPKSYVAACVTVYGKLQRSRRLDAVQSGCTALSIVKQGDLMVVANATDSRVVLGTSTDDDAVTPSSSSST

SEQ ID NO: 59014 - protein, 50 aa, Zea mays
  Coding DNA Sequence Number=SeqID_15639
MAMMGSTSEKMYLYQVMKEPSFAVSARRWYLRRRQISELVGGRMFYLPDM

SEQ ID NO: 59015 - protein, 88 aa, Zea mays
  Coding DNA Sequence Number=SeqID_15640
MAATRDGNFTHGFGYLSDIRPVRFGFGYIYIYPRVPDTRPIPYGYGHGYNFYSWVQLREGMANTCGYGCGQVFEGCTNVGDLFSNAKN

SEQ ID NO: 59016 - protein, 235 aa, Zea mays
  Coding DNA Sequence Number=SeqID_15641
  Homolog annotation: Hit_ID=Q6QP54; Match level="QueryCoverage=28%, HitCoverage=24%, E-value=2e-07, Identity=48%"; Hit description =Putative kinase
MGRRETEREGGKKPEGDKRERRKERIQGNDGASCDVVGPSPRLGEVESPPRSRSSLSSEAEVESEPLGRARRRPSVEARAESEPWGRAKRSSSSSGVELDSEPWGRAKRSSSSSGAEPESEPWGRVKRSSSSSGAEPESEPWGRAKRSSSSSGAEPESEPWGRVKRSFLWRLGPDLAAATFALNAPAIWSVGVAIWPRLLLGEDWASGEPKLCADGGYQLRFRSLEDTPKYGPQQ

SEQ ID NO: 59017 - protein, 772 aa, Zea mays
  Coding DNA Sequence Number=SeqID_15642
MDKYNRKHPYGGTDAQGEASCRREDEYNASLGTGALGCTTLRQARPDSLCHGPQAAGLRLSGKWRARPGHVSAPDPCSYQGPPCSGILLGFGPIRRLQTYMYRGSVSFCGGSDLLGYVVSPCHVTPFVLPMWWGQAPSPVWLGVVAWVRRLHAIEEGTPDLGYRQWPPGPPQGRMRACRWGAPVFPGGIRVKVVPSGDFTIEERALVVVSPVLMFIIRAGEEGEPSGSFAFRVGWQSASSSSIRGRRAFAGLAEEVNSGCAGPAVCGAVNCRVSGSPAWVALVPPPALPLAAGAERGCPSTVRATIAPRVGWPHPRLLPCRWSHRGVVQDVPLPIGAEVVAATGGTDVVASAGEAAHCRGGCLRWRDRQCHLPPDLWPFGFNGLAVTPVGGRGRGPIRSSAHPEVIAAVGEPLGAEVVVAAGAEVVAVVGGAVRSQLPAQLLLVQRSSFLQKWSWGPTCSRYGTRLSNYMVSGPPQETRFWVQNQANRPHRLRTTLWSGHLFFRTGPQAFPCPRYGTWLSDYTGSGPPQETNVRSLAPVPRLSDRRTYNSRCLVPVTGWRSMGPNLQVWLFNSDVAMSDRWKPYGPIVQVHGGRPTGLSYTAPLGMVSVVGLSLDPGFPSVFDTGALVSGCDHFCVYLSAARTRGGSGRASEGKACFSSVDRGTRGPSRVRLVFFTGVGASGEDIFQVPLGRLVPEALLSRGYLAVVHLLFAGPTARRGAVFGRLLAPLADVFCEVNDLTTLHGVVATMRVHMAWTAATLPRSWAAVDHDFW

SEQ ID NO: 59018 - protein, 71 aa, Zea mays
  Coding DNA Sequence Number=SeqID_15643
MGAEEAEGTPPPLPATGEPATTARAQPISAAQFLSWKQRKVFPSSLTPNKASPTSFTINLGFDLVSCPSGQ

SEQ ID NO: 59019 - protein, 266 aa, Zea mays
  Coding DNA Sequence Number=SeqID_15644
  Gene Ontology: Mol. function=DNA binding; Biological process =regulation of transcription
  Homolog annotation: Hit_ID=Q6QP51; Match level="QueryCoverage=28%, HitCoverage=46%, E-value=2e-07, Identity=39%"; Hit description =Putative growth-regulating factor 1
  Pfam annotation: Domain name=ZF-HD_dimer; Domain location=9-49; Score= 14.2; E_value=0.00051; Accession=PF04770.3; Description=ZF-HD protein dimerisation region
MEFRRQEEEEQPVLEEMGASSAPSDGDSLKCAACGCHRSFHRKDDARCHHHQLMLPATATASRIPLLLPLPNPHYASPPSFLYHGTPSGGGGTATDSSSEERGPPSGAAVVHQRSPHHHTLPAINALLVIIRSPPSMPSSLCYAQLPLTLSSPPSRAHHSLLTINALLPTLCFAPSMEGKQRYSPRSDYCANHQASASGKVSASLDPRPWPQPRPRGKVPVSPDLSLGLREESHPRPTSASGEVTTSPNLGLGIDYTTGDTSLPYC

SEQ ID NO: 59020 - protein, 69 aa, Zea mays
  Coding DNA Sequence Number=SeqID_15645
MPPKRKDGAGVVVPARPARRREDEEEVVCFICFDGGNLVVCDRSYRTLLRIRRVRICLVGRTRSDPPVC

SEQ ID NO: 59021 - protein, 113 aa, Zea mays
  Coding DNA Sequence Number=SeqID_15646
  Subcellular localization annotation: CTP_CleavageSite=67; ConfidenceScore=5.08e-01
MARRSTGCRGRPRLKGLRGGQTSQVHLRKLPAGPHMASLATTSSYFSAVHEPISARTAHSTLLSPVLANNRVESFPVLISAIRDRGDPPRRDSPAPRRGSRPTSSTGPSRQAA

SEQ ID NO: 59022 - protein, 279 aa, Zea mays
  Coding DNA Sequence Number=SeqID_15647
MNALSREGCRHYEVFDQTDESFEREIFKAEDPIVKQSAGALFDRMWGAHGREAVRERSDRAREQMERAEDVEDFGGLVGAPPEAAEGKPVLPSDAGEGPSDALVPAVAGEDPVSAPVPTVEGAQEGFGHAHATATESANFVAASTVVAENDSGDSVSKFFESDDYGSSMVWTEESSDEDLDYFAALDVAAAEASPRVMGAEVPGPSAGRRRRRAVAKRRVSEVEGGRLRVDRAGKRELLSLPVGASVGEGELRSLFEGEELRIMLFNYREMGIIPKVEP

SEQ ID NO: 59023 - protein, 90 aa, Zea mays
  Coding DNA Sequence Number=SeqID_15648
MASTVVLGVKGGAFCAGGEISSATAVKDEAGTMSRRLRLRAQHADTVREKSAAESKSRRLAVKVAALEAEKTDLQRQLVEERREANQAHR

SEQ ID NO: 59024 - protein, 120 aa, Zea mays
  Coding DNA Sequence Number=SeqID_15649
MGGNNQMDCVSDWIGLDIDRTLGDPTQLIIQENIGQLYVAHMCTLYLDVTVRSDLHQLFVKSGSAPAVTRERGPQPCMLRMHHMQQGATYQSPRVTVREVCKGASAKRESKGRKKFVCVN

SEQ ID NO: 59025 - protein, 446 aa, Zea mays
  Coding DNA Sequence Number=SeqID_15650
MSSSSSFAADTPPAGALSEDTLSNVAAEELHPSDTVEFGASRMSSVCVQDMQQLGYFGGGVARVPGAEEVPDPEGELVVFEAFFAAGLRLPAHRFVAEVLRRFEKRKIGHKIAQFGSCTFTLKTGKTLMEVVELVPCARNKWGNWWEFWFYVSEGTVEDHPGLPVVVMCSHYYAAYPQFEVAEDDENEEALRCAARMSSGRDLVEEFVGYGVWPLAHGWALGEVCPRQMPSRGGMLVRSPAFTLDLHGRDPAAFVHEAEDGATRIVGRYVPKTEGLRSWDIRGSNDRLNRVFELNCLSYGGYPGEDAADRRRKKPMGGTEEGTSQVAAPATRKRKLGTIVGGKGVSDNFAVELMGTCAAPGGRMSSPELRESSARMLEVTGSRWPNNLPIAWAEGEDMSMSRIALGLRIFPLRTEYCCCFVGSDEHGSPGCCAKAPGGLQFPLSFS

SEQ ID NO: 59026 - protein, 80 aa, Zea mays
  Coding DNA Sequence Number=SeqID_15651
PSCRQWGSVYAARSAKVDLSLGEECGSVQPEAKRESRLMGKGCSDLQVAMRLMVFGIDYGNGEDEAVEGDFQEFQDYDEF

SEQ ID NO: 59027 - protein, 149 aa, Zea mays
  Coding DNA Sequence Number=SeqID_15652
MGKNNKRKREPTPPSEEFGDSEYSEEEFSSEPEGSPAPVSPPASSDDSDDSQGIAAEVWTYIRAVERAGLEGSDESEYSSDEEDSDGGDGGEDDDDDDDDDDDDGDGSGRGGGDGSGDSTKGGSSRDSTKGSSRGSTKGGGGGRGRASG

SEQ ID NO: 59028 - protein, 53 aa, Zea mays
  Coding DNA Sequence Number=SeqID_15653
MGLSVCGSLCQGGDEDDGFGYDYGNGCPHCNHCSGEDEVVEEDFQEFQEYNKF

SEQ ID NO: 59029 - protein, 783 aa, Zea mays
  Coding DNA Sequence Number=SeqID_15654
  Gene Ontology: Mol. function=catalytic activity; Biological process =proteolysis
  Homolog annotation: Hit_ID=Q8W0S2; Match level="QueryCoverage=88%, HitCoverage=87%, E-value=6e-33, Identity=56%"; Hit description =Putative uncharacterized protein
  Pfam annotation: Domain name=DUF594; Domain location=664-722; Score =39.7; E_value=1e-08; Accession=PF04578.4; Description=Protein of unknown function, DUF594
MERLGAPVLCNFQLGDNRRPQPLVLDTPALDVWASGRWRSILLWFVTRVVWLAYQGAEIAATGALGSLSLSGSDGSAEEQQVIAFWALFLLLHLGGPDTMAAYALEDSALSVRKFLEMVFQVGGAFYAQYKYIYRARTWTPLATASAIMLPIGIVRGRGRGRRRRRRRRRRRRSRARDRDDSHPQDRNKQQRRAVPCSGSVPCLPSCLVRFFGAPGHGEAACQRGDLPAGMGAHVQGGGDGALAHVRGPVHQGHRAAHLPGCRLSQPSSVAPRHRCRSVALQPVYRQPQPPGHHHQEIFRRHHLPLAGCCLRHGPDVAAQSPWSTWTYAALREARPWAWWLRHHLLCSGRWRRIHRAVDALHPLSWLFGSDPVSYYRTWSGTIGRYNLLQACSVAAAHRGARRPWWTVDAVRELAGKKLELEETEYLRELPQDVKESLIQRVQRILVSTKNNNADKKTDENGIGCRYTLVDIRTLWGQQALEDAKTNLFGRGRKNGRKTSNKKPKLPSFGREFEEDVLMWHMATCILFSSSSGKESIVSIPGGSSADAADAHVTAIKVMSEYLMFFVAVRRHMLPGLVLHSLLEKIRQTLHEIWDGGKKKTTGGSSSSSSSSTAAKDTPPPQDRLAEMLLERLKAGRRWFDRNEGRLVVGNAAALANTLIETGISVQKRRQVPQLLEFIFNVWVDKLLYAAARCSVESHAKQLSRGGDLTTILWLIAQHAGLFRIGELKPKEEKEVEKKEEEEEMKSFWPRSKPAYPVHYFEDDEESDNAEEDDDMTRHVILY

SEQ ID NO: 59030 - protein, 81 aa, Zea mays
  Coding DNA Sequence Number=SeqID_15655
MGLGVCGSLCQGGDEDDGFGYDYGNVHYNQTGHIAEYVDVYSPLLYTPNPPPPGCPRCNHCSGEDEVVEEDFQEFQEYDEF

SEQ ID NO: 59031 - protein, 69 aa, Zea mays
  Coding DNA Sequence Number=SeqID_15656
MQATCNRNKGAHPFDFDVSSMEAQAHTSCNRRAGYYVRETAPPLAPGPGKGILRKGSFSAKEAGPEPPY

SEQ ID NO: 59032 - protein, 95 aa, Zea mays
  Coding DNA Sequence Number=SeqID_15657
  Subcellular localization annotation: CTP_CleavageSite=34; ConfidenceScore=5.39e-01
MDFASPDPRARTQPQLRKRRTPPRPTPGLGLNLDAGRRTPPRPTPGLGHSLGLGRRSPPRLTRGSDLTSTSEDGLDLDLRGAFASPDLGLGSTTS

SEQ ID NO: 59033 - protein, 123 aa, Zea mays
  Coding DNA Sequence Number=SeqID_15658
  Homolog annotation: Hit_ID=Q6QP51; Match level="QueryCoverage=57%, HitCoverage=34%, E-value=2e-07, Identity=46%"; Hit description =Putative growth-regulating factor 1
  Subcellular localization annotation: CTP_CleavageSite=50; ConfidenceScore=5.30e-01
MDFASPDHRAQTQPQLRRRWTPPRPTLGLGHSLGLGRRSPPRPTPGLGLNLDAGRRTPPRLTPGLGHSLGPQKTVSASPDPGSDATSTSEDGLDLDLGGASASPDLGLGPTTSQGGHHYPTPS

SEQ ID NO: 59034 - protein, 285 aa, Zea mays
  Coding DNA Sequence Number=SeqID_15659
  Gene Ontology: Cellular component=spliceosome; Biological process=RNA splicing
  Homolog annotation: Hit_ID=A2YMU9; Match level="QueryCoverage=49%, HitCoverage=34%, E-value=2e-28, Identity=50%"; Hit description =Putative uncharacterized protein
  Pfam annotation: Domain name=PRP4; Domain location=144-173; Score =42.2; E_value=1.8e-09; Accession=PF08799.2; Description=pre-mRNA processing factor 4 (PRP4) lik
MRSARDPCHRLGTEIHGAEIHGAEVVPRQSAHTATTRSKSSRVLLYLRERSNTASRRIEAELGVGRNGSAEARTREEAEGGDGRLRGQELRAAVGAGAEAAPEAARRAPPAPRQGRHVGGNSAAAATGSEERRIDELDLPRHEVVRRLRVLREPVTLFGEDDDARLARFKLVLMSGIINDIDMIEGQTNDFLRDMIEMRKRQKAGRDTYAKGKSKRVDDGGAAGASADDGDAKGSGDDANADKDSKRMRTKFEELCNEDKILVFFKKLLKTDRSGRPYRSPSPSS

SEQ ID NO: 59035 - protein, 110 aa, Zea mays
  Coding DNA Sequence Number=SeqID_15660
MDLITGNEKSRVTGQSGEGEGPNEGGMSHPQPECLALDLVRALGPKGLDDRIQIGGVRPRGCPGTEAAGSAARRCSRDSACMAAVGSTKTIQHRVLDLTDKQINHIKLRM

SEQ ID NO: 59036 - protein, 64 aa, Zea mays
  Coding DNA Sequence Number=SeqID_15661
MEVDAEIHGTDLGTEIHGAEIHGAEVVPRQELRARVGQAMCKCPRVVGNHVLIHRNKHVRVSDG

SEQ ID NO: 59037 - protein, 62 aa, Zea mays
  Coding DNA Sequence Number=SeqID_15662
MYSALAVERATEFCFFEAQDTEAHPHYKTWVPSDMDQNHNVKKYKEYEGWCRVEAMRRGASA

SEQ ID NO: 59038 - protein, 276 aa, Zea mays
  Coding DNA Sequence Number=SeqID_15663
MGLTRKSAHLRCGALGPTGRHAALTCGALQSARRSHESELVLPIGRTPWMPGGATLVGSSLALSWALHEAGFRADLCASNADSSTELPWYHKAMRRGLSFFPFSPSNPNRRYRIGGFVGVRDVPRFVSARPVTSRSTPTFGWGRDEPVTEDPSVQQVEVAEQELIEGKFPSRSANGRNVESAPWARAHMPARGEGNSVRGENGGPSTGRKNGPPVARLRFSAGDPVLGGRGGGIAQAGVGGHGGGVDLAGGGSGRTIHSEVAGSRSGEVSNEAYGA

SEQ ID NO: 59039 - protein, 64 aa, Zea mays
  Coding DNA Sequence Number=SeqID_15664
  Homolog annotation: Hit_ID=A3B4R2; Match level="QueryCoverage=82%, HitCoverage=8%, E-value=1e-13, Identity=75%"; Hit description =Putative uncharacterized protein
MEGLIPFIYRAVVRYRKEEGRVSLGDLFFDEPSSPTSYFRLPGGADSARYQQEVLQKERLCALE

SEQ ID NO: 59040 - protein, 385 aa, Zea mays
  Coding DNA Sequence Number=SeqID_15665
  Gene Ontology: Mol. function=oxidoreductase activity; Cellular component=cytoplasm; Biological process=response to stress
  Homolog annotation: Hit_ID=A2WWZ2; Match level="QueryCoverage=56%, HitCoverage=69%, E-value=6e-79, Identity=67%"; Hit description =Putative uncharacterized protein
  Pfam annotation: Domain name=Aldo_ket_red; Domain location=103-342; Score=142.9; E_value=9e-40; Accession=PF00248.12; Description =Aldoketo reductase family
MAQGGGGSGRVPVDSWLRWSRVPSAAVGFSSGTHQCDARGKSCPVLCAHPEGVAADATLRLLRQPTRRCPSGGVHAGCQYGSNGDSWPDDGAGGLLGRKPRRRRRSWASLPLLGASHSCLPWAKAQSISNTRRCHPRRHSLPEGITLKFVSVTASPSVVAFAPRRLIHGPIRIKKGTSTMTPENFLPTDIPATWAAMEKLYDSGKARAIGVSNFSCKKLHDLLAVARVPPAVNQVECHPVWQQDKLRKLCQSNGVHLSAFSPLGSPGSPWINGPSVLKNPIVVSVADKLQKTPAQVALRWGIQMGHSVLPKSANESRIKENIDIFGWSIPEDLMAKFSEIKQACPNATFFMSASCISLVRLLTAEFVVHPQAGYNTLEDFWDGEI

SEQ ID NO: 59041 - protein, 588 aa, Zea mays
  Coding DNA Sequence Number=SeqID_15666
  Gene Ontology: Mol. function=cysteine-type peptidase activity; Biological process=proteolysis
  Homolog annotation: Hit_ID=Q5NKQ2; Match level="QueryCoverage=34%, HitCoverage=25%, E-value=5e-26, Identity=35%"; Hit description =Putative uncharacterized protein 9C20.3a
MRPETVEAGPNEHGRLPNINIQLPLMQDLMSTKIQLLHVHQRSKFQAKLIAYDSEVGKIVATMKQCLNNIGMKQSKLADTFGVLIDEVLWAESYSSDVEDNVTQSCKKYVLASQSGDQLVSEPMMTPTQMESQMTPSQVEKLVIKQKEVRLVFESCPDESVTPNTQGQTVLGGIVDHDSGPIFDKTPIGSVCASGILLSKLECAHALRTYVCSKDIDMDRIVGFAVYRLRSYSCSMFKAYLHLWNSGGPNWFIEWQRYSVEESKSWKLVSHRCSSLASFAKMARKPALSGANSVPLGRPMRYDRSSSGLKQRHSVFDRISFPLCLVSDHEVVVRPHFQNYSNRRIGRKVCSGFRSSLGASRASPWAPRKLVWRPKKILEQCPGNFGQDSVPSLNGSTVPAASGHQHFRDLSLSGNNSQLFGLSGPPLLSLTGGPPPPPSFNNFGEFSQAVLSSTNASPSTELALFTKPHSAPLPWKNPSLSSSLLSVVLPPPSHSDTLGATEDMAFRRVDLAPFLPHGFVAQQVDHHEIMVCTVTRPQPLAHEDWGIVLVQPLPEHEVNFHIFDDIIREYLVEVWRVQVRSIQRSHLG

SEQ ID NO: 59042 - protein, 167 aa, Zea mays
  Coding DNA Sequence Number=SeqID_15667
  Homolog annotation: Hit_ID=Q2R2J6; Match level="QueryCoverage=23%, HitCoverage=2%, E-value=3e-07, Identity=58%"; Hit description =Retrotransposon protein, putative, Ty1-copia subclass
MVLLGYEPGTKGYRMVDLITEKLCISRDVKFEEDEAWNWDSNNKAQLTEVGPENSNFQFQFTVPSQAMLYPSGTGEEGESSGGGEVPSVSPLPQSPVTPQYSRTQAILSGSQAQNPGSVSDTSYNSQPSSSESSGIEMDLTFLWRRSLHYADRAQKPDSPPRIQHSA

SEQ ID NO: 59043 - protein, 321 aa, Zea mays
  Coding DNA Sequence Number=SeqID_15668
  Subcellular localization annotation: CTP_CleavageSite=86; ConfidenceScore=5.37e-01
MAALSAPTNRAQIHGSPALLSSLQSAMILGAHTSAVCPAPRSSLQSTAIHGSSVRAHKSRADSWQPPFRSSTHAIITAAIHGSSVRAHKSRADSCFPLSHSHRLPRSRFLLLQPSEKGAKRPPNSPRPGTTSLHSPGQTSRPPFRSSTHAIITVVFLSLFSSPSIPRHHALGNVACPPHKAPPVPGDRGAEIGAPWPRSEAWTRTVHRTPPLSSSAAASRFSTPPSSPPPPWPHLSVCTGIFFQYVFLHQVTFRIYGCIYERYIAFVCGEIAENFLVFVGVISNAMEKIVEQLSLCLSPWNTESLLLSPHKMYELPKHNLL

SEQ ID NO: 59044 - protein, 273 aa, Zea mays
  Coding DNA Sequence Number=SeqID_15669
  Subcellular localization annotation: CTP_CleavageSite=45; ConfidenceScore=5.10e-01
MPAPPPPPSVGKVTGQTRMLLFRHVGKTSSIPPPAGGLTAAIVVVAQRRKEYHVVAAVEGHELKTPETKHRPGLERLLETTHLELDGKLFVNTQQAPTWRANCRRFDPGGSEPEVGRGGGSSEVEVESEPRGRARRRPSSEVEAESEPWGRARRSPSSGVEVESEPGGRARRRPSSDVEVEPELWGRARHSPSSEVEAESEPWGRARRSFLWRPRLDLTAISLTLSSGTTVGAGQAALFSCQVGQWSGEVTAVTSALWTEERASGYGVRRSLH

SEQ ID NO: 59045 - protein, 616 aa, Zea mays
  Coding DNA Sequence Number=SeqID_15670
  Gene Ontology: Mol. function=cysteine-type endopeptidase activity; Cellular component=vacuole; Biological process=proteolysis
  Homolog annotation: Hit_ID=Q0ZHB0; Match level="QueryCoverage=68%, HitCoverage=85%, E-value=0.0, Identity=93%"; Hit description =Legumain precursor
  Pfam annotation: Domain name=IQ; Domain location=48-68; Score=27.6; E_ value=4.6e-05; Accession=PF00612.18; Description=IQ calmodulin -binding motif
  Pfam annotation: Domain name=Peptidase_C13; Domain location=198-452; Score=573.2; E_value=2.6e-169; Accession=PF01650.9; Description =Peptidase C13 family
  Pfam module annotation: Pfam domain module=IQ::Peptidase_C13; Domain location=48-68::198-452
MGDLWTNIRADLTKMQATLQKVEQGLLQIKAAVQHEQHQLALSARLRTSAAVGIQAAARGFLARQKVREMRRQMLEAALVTVDLGTRRRDLTLSDDHQQWHQAAISKCEHDTCPVGDELQLYDSGGREGTHLVINKGALFSATTFRYRPPRGRLRWCLVLGQVDSVFEHPLCGSSRASCLSRRGVVSGPKEAHGGAAADICHAYQIMKKGGLKDENIIVFMYDDIAHSPENPRPGVIINHPQGGDVYAGVPKDYTGRDVNVDNFFAVLLGNKTALRGGSGKVVDSGPNDHIFVFYSDHGGPGVLGMPTYPYLYGDDLVDVLKKKHAAGTYKSLVFYLEACESGSIFEGLLPNDINVYATTASNADESSWGTYCPGEFPSPPPEYDTCLGDLYSVAWMEDSDFHNLRTESLKQQYKLVKDRTAVHDTFSYGSHVMQYGALELNVQRLFSYIGTDPANDGNTFIEDNSLPSFSKAVNQRDADLVYFWQKYRKLADSSHAKNEARKELLEVMAHRSHVDSSVELIGSLLFGSEDGPRVLKAVRAPGEPLVDDWSCLKSIVRTFEARCGSLAQYGMKHMRSFANMCNAGILPEAVSKVAAQACSSIPSNPWSSIHKGFSA

SEQ ID NO: 59046 - protein, 207 aa, Zea mays
  Coding DNA Sequence Number=SeqID_15671
MGRRETEHKVGKNSKRGTRGLRVVLRPGRVEAESEPWGRARRSPASGVEVESEPGGRARWRPSSDVEVEPELWGRARRSPSYEVEAQSEPGGQARWRPSSDVEVEPELWGRARRSPSSEVEAESEPRGRARRSPSSEVEAESEPWGRARRSFLWRLRVDLAAVSLTLSSGTAVGAGQAALFSCQVGQWSGEVTAVTSALSTEEHASG

SEQ ID NO: 59047 - protein, 203 aa, Zea mays
  Coding DNA Sequence Number=SeqID_15672
  Gene Ontology: Mol. function=structural molecule activity; Cellular component=protein complex; Biological process=microtubule-based movement
  Homolog annotation: Hit_ID=Q01G07; Match level="QueryCoverage=43%, HitCoverage=15%, E-value=2e-37, Identity=82%"; Hit description=TBB1 _VOLCA Tubulin beta chain
  Pfam annotation: Domain name=Tubulin; Domain location=98-203; Score= -61.3; E_value=0.0071; Accession=PF00091.16; Description=TubulinFtsZ family, GTPase domain
  Subcellular localization annotation: CTP_CleavageSite=39; ConfidenceScore=5.79e-01
VQYWWCTVLPSARPCPYAPKSRTARPSPFAATSSSSPPHCATTSSVPCVRDSSQQPPFPWSSLSPHPPRIPPLRCLIYDEHGIDHTGKYAGDSDLQLESINVYYNEASGSRFVPRAILMDLEPGTMDSMRSGPFGQIFYPDNFVFQSGAGNNWAKGHYTEGAGNNRNRTRHPRSKSRCSLPSSTCIAPNLAAHILSAGRMRTS

SEQ ID NO: 59048 - protein, 26 aa, Zea mays
  Coding DNA Sequence Number=SeqID_15673
MRLHTLRDDVVLYPQRCLLLIKGSGK

SEQ ID NO: 59049 - protein, 62 aa, Zea mays
  Coding DNA Sequence Number=SeqID_15674
MKVLLGEGPSATKHGPNSKREPTPPLEDFGDSEYSEKEFSSESEGSPAPASPPASFDDSDDS

SEQ ID NO: 59050 - protein, 58 aa, Zea mays
  Coding DNA Sequence Number=SeqID_15675
MAFGVGIPVKLRRQHEGMIIEVESKLVTPWVDGNFSSKFSLALDPHLIMVGVPRRPNY

SEQ ID NO: 59051 - protein, 396 aa, Zea mays
  Coding DNA Sequence Number=SeqID_15676
  Homolog annotation: Hit_ID=Q6QP51; Match level="QueryCoverage=10%, HitCoverage=19%, E-value=3e-09, Identity=71%"; Hit description =Putative growth-regulating factor 1
MNKRPAFKVPLQTELRFHPRGMDVATGRLSFASPLKGHEPDIKAKERAAPKRTGSNSSPSPAWLEDTSFAELGDGFHHQKLEEEVTSRPVREVEPRLTSLSAPVRMGLVVTVLGDHQRGGCPPSGGSEGGKTRCIREREDMVAFQGGHPPFKGDSPYLRPQPSWAESSPTRSKVLPLRRGGWLPRVAQAGLEQKKPNRCARCMQPTSGYEHSSTFAQTSRRRGGQPCRRHATTPSGRTPPTSNAPSMGAHTHASRNRRAGRYVQATTPPLAPLPRLLDCGTSTVTRGDPAYDPAVPARRDGQYGQKWAGSNGGGRRAGAAVTSGSERRFAFAIMTASKEAPSLPTDQRFEGWPLGGVQQPPQSAWVLRPLLVRGSKAGPSKGFNGRLRLLGLRAHY

SEQ ID NO: 59052 - protein, 87 aa, Zea mays
  Coding DNA Sequence Number=SeqID_15677
MAPRTLYDDDGSQPPYGARGRQQGLDSPDSCPSARLQRSSDGHDTTRTGCQNLSGCHDGMERRSDPVPVGALRSEADGKSSSGHSDV

SEQ ID NO: 59053 - protein, 125 aa, Zea mays
  Coding DNA Sequence Number=SeqID_15678
MVCLGLGGRRKHTLQDNPILQARISIVEWSSSTLGVDYTFGEGLLQESGSSRRLGWSPRGLGQLSPEDISPARGLDRSTPASVPLTDDPARLRLTKSSFRANSSSVRADTATLASAHRRAAEGFL

SEQ ID NO: 59054 - protein, 234 aa, Zea mays
  Coding DNA Sequence Number=SeqID_15679
  Homolog annotation: Hit_ID=UPI00005A9633; Match level="QueryCoverage =17%, HitCoverage=8%, E-value=8e-07, Identity=69%"; Hit description =PREDICTED: similar to Copia protein (Gag-int-pol protein)
MRIKLKMMKMKIKGRTMTKGEMIMIKTRKMSKKYRVKDRLTQESTRRFKEITSVEDALRDSDWELAMQEELNNFTRNEDAKSIKTPMGTNGHLDLDTADKSVDQKAVRPGLRHHRKLRFARPRARTRAQPRKTANSAPPDLGLGLGLSPGRRRTPLRPTQGSDSGSAPEDGELRSARPRARTRAQPRKTTNSAPPDPGLGLGLSPERRRTPLRLTQGSDSGSAPEDDELRFARP

SEQ ID NO: 59055 - protein, 267 aa, Zea mays
  Coding DNA Sequence Number=SeqID_15680
  Homolog annotation: Hit_ID=A2YGI6; Match level="QueryCoverage=40%, HitCoverage=35%, E-value=2e-25, Identity=56%"; Hit description =Putative uncharacterized protein
MPGFTVAQALEASTGGDTVTLPPFDIIAPPPDHRRFVETPRPCLLHQRFGEAMPPSITPPLSSSPPPASSPSTTSTSLRGLATKAEVVEIDLTEEDTSSLAHAPRCRPWTGREERKSIHPAVGCNENLGLLEPGVFVANLRVRYGFRQLDREEGDVLSTIHAQVPNGIVLGDYVIEYGDDDNGEDYEVFRGVRTNWWSCIFYKAFSRSLRSRRRARERRGSGRRIGNQANLENFNIEVPTQSVELRENRFDEIDDEYIVTGALVYID

SEQ ID NO: 59056 - protein, 167 aa, Zea mays
  Coding DNA Sequence Number=SeqID_15681
MTRKVANAPGLALVRRRVGLFYQDIAVSSKSKWGTFWRTFSDNLSWRRLRFLPGAILKELQAFMDSGKFVSLCYNFSTFSSGKQPRTGRLRSYMEFLLTSPRGAQPWLSYAQGHMAVAFKHNGVKALMLEPNYDAHPDPIEQDANNPVDVEDNSRRPPTGVPRDGLR

SEQ ID NO: 59057 - protein, 284 aa, Zea mays
  Coding DNA Sequence Number=SeqID_15682
  Gene Ontology: Mol. function=ribonuclease activity; Cellular component=nucleolar ribonuclease P complex; Biological process=tRNA processing
  Homolog annotation: Hit_ID=A2Y5N2; Match level="QueryCoverage=100%, HitCoverage=78%, E-value=9e-97, Identity=63%"; Hit description =Putative uncharacterized protein
MSTISDQKKRTLEALQQRYTSAKAKKLQDEKVKSQKKSNFNTPKPNFDAPREGKGVAFSSSNYQQKPSTSSGEEINPVYAELSCAFHDNLSKGVISDFDDTEVVYNVINDIIQKGGDAGKITKGAKKLKLERGILLDNYVQRGPRLVDAQARSLLIHSKRSKRHLSLKQHKKCGSFDLDGTLHKYGLYEPMHKIWKDYIRELINVNPYPVAECKAASDKGLNGIMIRDTAETFGIISEDNRFRAVPKAGSVFTLEADCWKCTLIGDKLSPREKLKEDQRQHRAQ

SEQ ID NO: 59058 - protein, 275 aa, Zea mays
  Coding DNA Sequence Number=SeqID_15683
  Homolog annotation: Hit_ID=A2Y9F3; Match level="QueryCoverage=60%, HitCoverage=28%, E-value=3e-32, Identity=49%"; Hit description =Putative uncharacterized protein
  Subcellular localization annotation: CTP_CleavageSite=50; ConfidenceScore=5.23e-01
MVRWLPPPVTADGELPFGHDAVTFSFLVACVAATVTLASSMCSACGRKPKAATNADPAGTGSSVSGGSGSQEAGGAEEAAVEEEVVRLSPELAMHGAIEPVALPSSTSRRRLSISVSKKLSLNIPDKLRLSRREHKDHHHHKVESEDTLWKKGIILGEKCRIPGEREAECADPDDDDIAAANFRRFSLENWAHRCYYPSKNSIPYQKYKAFSRSSIKRGENYDNLIREPKTDEYPEDFDLGTHISDEYPEDFDLGTRISDPKFHEYGCKITFQHW

SEQ ID NO: 59059 - protein, 66 aa, Zea mays
  Coding DNA Sequence Number=SeqID_15684
MAGYAGMYSRDDLMKNNFGTEDDDDEEGDGDEDDNFAKNMGKALKDKGSQKERFEAASCATVQGCQ

SEQ ID NO: 59060 - protein, 176 aa, Zea mays
  Coding DNA Sequence Number=SeqID_15685
MKSIATFALPVRGERNFISRSTEGIFLYTVGVIINKWFTAAGLQPRPPAARPAAAPPSAARRASVLPACIHRAARCLTPLLPLQRAARPGLSAWNADLPARPRPELLVPASRGHARGCLRACAAAHAAGEATPAWRSRWSPAADRTASTHRHSDVLLLLLLHGGWNRRGGRDMWSE

SEQ ID NO: 59061 - protein, 238 aa, Zea mays
  Coding DNA Sequence Number=SeqID_15686
  Homolog annotation: Hit_ID=A2Y9E7; Match level="QueryCoverage=78%, HitCoverage=83%, E-value=2e-37, Identity=50%"; Hit description =Putative uncharacterized protein
MPRADEAFGTAPLRLRSTNRGLGVVAPCHRRRAQIGDRRLNGLPGRAPATPPPTQLMERLSSSDGSAEAEADADRIPAAVFERDPSESNKDWSMMSTESVFGLQVAPSSDFTGFFLAHPELMDIATPPRSSAVIDADNDAKAAPAIVSPPFESIPELPESAMKGNYSFAFPNLIEDKRNYSKKQSHRDHQPEAAAATTEAVKAAPAPPVVEAKAEPQPETRSKPEAGKGGLFSCFPCC

SEQ ID NO: 59062 - protein, 63 aa, Zea mays
  Coding DNA Sequence Number=SeqID_15687
MDHRIQRHMLMDRRVVSTSKTSSSMVLEGVATFLVAEEGVAKTPTARRSEEYTNLENVCVVDD

SEQ ID NO: 59063 - protein, 79 aa, Zea mays
  Coding DNA Sequence Number=SeqID_15688
MRKIEGGSLIVENASNKLSVDGEAKEAQQEHSQFLNPNNSQTQSVQEILVLRSKLKVFTLGHGDASNSKRVVVAETEGQ

SEQ ID NO: 59064 - protein, 332 aa, Zea mays
  Coding DNA Sequence Number=SeqID_15689
MACLRHTTRKSVIPFLPSRLAERPPRRPVTGQSSHLERLHHRLHEEQERRRQEQQGSSFSLQQEIESVRSCSPVLPLEAPHAPPLGDPASGVAAGGDPDDGGGDDSSSHDTDFSTDQEPDGWVARPITRDAARGCHFHDALDTLLRRALDRRTWSIKYRCVVYQQSHGVYPDRWEATCLNSLQGAEVCLEHYSISERDSAEAAMQDAARRALSHYCSVLGGVADGLNLKYYPRRPSGSTGGVIVSPVGEDNPRLSSTVNPAAVLNTELDHALDELSRAHAEIAQLRAERVERRHLDGGSPAPVGTQHPYRSPRRVHQPYGNPDCKTKIDLEP

SEQ ID NO: 59065 - protein, 172 aa, Zea mays
  Coding DNA Sequence Number=SeqID_15690
  Subcellular localization annotation: CTP_CleavageSite=38; ConfidenceScore=5.58e-01
MAPAPLSSKCAVHTKLPCLTAPRPATRSLAPPRPPSLRDRADPPSCTLAPITRSPWPRIPAPPYPRPRPRLILPCPRTAYNVQIQCRRRDACPCHHVRRVEESARNGRRNCSTMEDEKPSCARCSPVVVSGAPVKLGSATTTPAPPPSHATPFDDDALASSSESQVLRQVVA

SEQ ID NO: 59066 - protein, 84 aa, Zea mays
  Coding DNA Sequence Number=SeqID_15691
MAHEIIKKSEKDTHEVQAEARRAEEAAECEKRIAELSPPPEPFDPLADPEIKEALDFINKAESIVDEVVNNLLNEVAEKVLKEE

SEQ ID NO: 59067 - protein, 150 aa, Zea mays
  Coding DNA Sequence Number=SeqID_15692
MGKNNKRKREPTPPSEEFGDSEYSEEEFSSEPEGSPAPVSPPASSDDSDDSQGIAAEVWTYIRAVERAGLEGSDESEYSSDEEDSDGGEEGEDDDDDDDDDDDDGGSSGEGDGDGRGGTKGGSGGSGDSTRGSSRGSTRGSGGGRGRASG

SEQ ID NO: 59068 - protein, 226 aa, Zea mays
  Coding DNA Sequence Number=SeqID_15693
  Gene Ontology: Mol. function=cysteine-type peptidase activity; Biological process=proteolysis
  Homolog annotation: Hit_ID=Q5NKQ2; Match level="QueryCoverage=56%, HitCoverage=15%, E-value=1e-22, Identity=47%"; Hit description =Putative uncharacterized protein 9C20.3a
MADMPMVSYKAEGPGGRKTDGFLYKYRKGEEVPNSINLCRIFWPSITKKSQDTREMMISPKDAASIMRKVDRPPTNPKRLIIESSQECFSVDIPRSTDMADPTNTRSDGDPPQHRKRGVAADVKNIPMPNVDDDDDFEPPKKKCNISMDAPNKTQRLNIRCNPGDVLASIQILNERQRQAIVRKGFSSILDMTIRCNLLSPVSLLYRAEERFRSPAIRGGPDKVIS

SEQ ID NO: 59069 - protein, 90 aa, Zea mays
  Coding DNA Sequence Number=SeqID_15694
MLLDYTTVLDGPRASLARVQGNAASQTPPPAEARGKSPTAPAPDISAPGPHAGDDAITPGDWTDLAPCDAVDAPPDEMAKRGSQTYMQCT

SEQ ID NO: 59070 - protein, 26 aa, Zea mays
  Coding DNA Sequence Number=SeqID_15695
MVVAQGRDRATVAELRLHRKNSGFSI

SEQ ID NO: 59071 - protein, 169 aa, Zea mays
  Coding DNA Sequence Number=SeqID_15696
  Gene Ontology: Mol. function=nucleic acid binding
  Homolog annotation: Hit_ID=Q5NKP8; Match level="QueryCoverage=71%, HitCoverage=19%, E-value=2e-38, Identity=62%"; Hit description =Putative uncharacterized protein 9C20.4c
MADDREEETGEDISVSLHRAESELRAPGDNDGNTIVIETMIAANQMVPMRTISDHDQDTPNILRSHPESIDQTMVPRIGMTFGNVDEAYIFTVVTHMRLVFHLKSIGRERTDTVKKHLQCNKTHDPEYMEFLSSMQQSRIPQHCIMDFVSEMHGGPENVPITAKDIANL

SEQ ID NO: 59072 - protein, 139 aa, Zea mays
  Coding DNA Sequence Number=SeqID_15697
  Gene Ontology: Mol. function=nucleic acid binding
  Homolog annotation: Hit_ID=Q5NKP8; Match level="QueryCoverage=87%, HitCoverage=19%, E-value=1e-46, Identity=74%"; Hit description =Putative uncharacterized protein 9C20.4c
MTLVGNDDCEGTQYGDVRKRLEYDVDGISLVRPNNARPKGRTIKTSEQRVLKLGAKGEKKKTRKCQKCGIADGHNSRTCLSIEENRVKLASLADRKRGRPPGSRNKNSTMAPQWNETSTSKKHKHTDSEEHGSDHDNLT

SEQ ID NO: 59073 - protein, 63 aa, Zea mays
  Coding DNA Sequence Number=SeqID_15698
MAARSAVASVRGGVVAGAAIGCNGGGEAPGGGRGMEDTASNDELAMMAGMALTPIEMARAGGG

SEQ ID NO: 59074 - protein, 155 aa, Zea mays
  Coding DNA Sequence Number=SeqID_15699
  Pfam annotation: Domain name=HALZ; Domain location=61-99; Score=7.1; E_value=0.051; Accession=PF02183.9; Description=Homeobox associated leucine zipper
MGIRKKPEYVWKEYRENGIENNKSTPTWRKRLQALSGGDPTEDDPTIVYMAGYLHTLDNHYDELSSHCTHLNSQVESLEQQVKELKQEKTSLQECLNIAEGEKANTREAYRTLKLDYDKKLKKLAPKKKIQKKTTNQGCQTKKKKKKTPPAPPPP

SEQ ID NO: 59075 - protein, 99 aa, Zea mays
  Coding DNA Sequence Number=SeqID_15700
MEETASTDELAMMAGMALTPIEMARASGGAQVVTSVRVCARALRLVCVALPTLTYVLLCDHLIVRARGSKLWRFLANGKEKRKKNTVVFKLTIGSLERS

SEQ ID NO: 59076 - protein, 144 aa, Zea mays
  Coding DNA Sequence Number=SeqID_15701
MTAAAVSFRLSSGHRARVLPALPISPWRLACDGYGSGSQALTFYSPGGESAWTKPSIPARLARFLVRARLPRGFLAEVGIVAHAAEKVTPAAQRRGPTAQHPIGTASNNQQAKILDKNSESSSLSPVVRAKKMTLGCGSRRSVR

SEQ ID NO: 59077 - protein, 116 aa, Zea mays
  Coding DNA Sequence Number=SeqID_15702
MAHSPPWFQESDEKSTALQLILSSKLPLRYGESQRHAPSDFTRAHTRSTSAPDTTLALQFSLTSGEQKIHGWRPSLALAMATDWFSFSHCANGGSTDSSLDGSEGHGFKPRTESRQ

SEQ ID NO: 59078 - protein, 214 aa, Zea mays
  Coding DNA Sequence Number=SeqID_15703
MALWLHPEHAQTERVLEMVYHLLGWDVLVFAGRTCAAAGGAWPPASTRGILLHLLGGHHRLPPRDVRGGDAPSCFFHQHSGGRMITSLVKVDSGLSHDSIPRAPTLWGGKRAVLRLHLFGFDGFGAASDAASRLQAGVAVRPPHGRWSHRVLIRHIRGIPCTADRTALTPPGGSYKASYAMEVAAAFLDGLVLTPVGGRGQGPFRTRCDGRRRR

SEQ ID NO: 59079 - protein, 137 aa, Zea mays
  Coding DNA Sequence Number=SeqID_15704
  Subcellular localization annotation: CTP_CleavageSite=29; ConfidenceScore=5.06e-01
MAATQGMNPFLKADFPARAPKRHEQGLPRCAPRFPSYDTGARPHMSYKLARSTKKANRRTRSAQPPRGCAPLHLRRNQRSRRRTAAQGACNRPAVVRPFIFAATNGQEDEPPHKECAIVPRLCAPSALPQPVIQPLA

SEQ ID NO: 59080 - protein, 257 aa, Zea mays
  Coding DNA Sequence Number=SeqID_15705
MYQLGRTSAKKHRDPCTRNPDPDYDPRLPSKHTRSLGWGLGSGHNEVPGQGDPGVSKGLVLTRVQALSCALALPAQAESRCCHVVVTRDISQRAEPDVRPLGRAVSAFIAERTRRLSALLTGDVPPRHLMRLVHSPGRRRQGHPADGTPVLSIVKQCARAARRTVLIIPYTRSFPCTSMLHRSRMSGREKIAPAANISSSKYYIHCVPGPTCRGSVPLYVPPLSYKREGTQRYKGARSDQTQTLSSQSSTAIQNTVE

SEQ ID NO: 59081 - protein, 473 aa, Zea mays
  Coding DNA Sequence Number=SeqID_15706
  Gene Ontology: Mol. function=SNAP receptor activity; Cellular component=integral to membrane; Biological process=intracellular protein transport
  Homolog annotation: Hit_ID=Q5KQK6; Match level="QueryCoverage=73%, HitCoverage=95%, E-value=7e-12, Identity=24%"; Hit description =Unknow protein
MEETVANVEGAQGQLLKYLNSISSNRWLMMKIFFVLMSPPSTAPPHLKTLSNRASIGSILTPKYPIQVRSPGGEDPPAPTRPRRSAGGADSDSGPWFARLALAGGPTAAGRGSMVGGGRRGGAAAEEVKLNTGNVFAALESLKKKKKGDKGRAAGPSSRKKHGAGAAQQQQEPPQKDVFWAPAPLTTKSWADVEDDDDDDYFATTAPPRPVWAAAAAAEPAKEEEDVEDAVRAALQECKKNYHIDTEPNCTERKRFSQQASLTHLNEMEHDVESDDEDLDDEDLDDGAEHEVEDAPAELAVKTVEALAAPPKDTERQLSKKELKKRELAELDAVLAELGLSGNSTSAAQDAEKEGANQAGDAEKKEDATVPSESKTSKKKKKKDKSSKEGRKETQEAAEGSEETASAGPDEEDTTAVDVKERLKKMASMKKKRSSKETDTGAKIAAAEATARSARLAAAKKKEKSHYNQQPVR

SEQ ID NO: 59082 - protein, 40 aa, Zea mays; identical to SEQ ID NO: 46809
  Coding DNA Sequence Number=SeqID_15707

SEQ ID NO: 59083 - protein, 71 aa, Zea mays
  Coding DNA Sequence Number=SeqID_15708
MASGRTVEIESMGAGVVGAEVRGDRLRLPALPVMYGRSYARQRRARDRRRAQERDLGDQQEPMESSGQEGN

SEQ ID NO: 59084 - protein, 149 aa, Zea mays
  Coding DNA Sequence Number=SeqID_15709
GGRDGLGSSNGAGDDVEAATGVMTSCLPATKNRGDDEQRTGRGQPRSSSSGRARPRQQRRSPTRGKVDGAQGEDGERRRGAGVGVVRDIGLLACGTRLQGAGARLRASHGSAAWTPARTGGSAACGRLAHGLRRAGAARCRALGARAAC

SEQ ID NO: 59085 - protein, 535 aa, Zea mays
  Coding DNA Sequence Number=SeqID_15710
  Gene Ontology: Mol. function=protein binding; Cellular component =nucleus; Biological process=RNA metabolic process
  Homolog annotation: Hit_ID=Q9AWB3; Match level="QueryCoverage=83%, HitCoverage=47%, E-value=1e-174, Identity=68%"; Hit description =Nuclear cap-binding protein CBP80
  Pfam annotation: Domain name=MIF4G_like; Domain location=35-124; Score=-74.9; E_value=0.0023; Accession=PF09088.2; Description=MIF4G like
  Pfam annotation: Domain name=MIF4G_like_2; Domain location=140-439; Score=232.6; E_value=9e-67; Accession=PF09090.2; Description=MIF4G like
  Pfam module annotation: Pfam domain module=MIF4G_like::MIF4G_like_2; Domain location=35-124::140-439
MRDSILWKWTADGAYSTRLAYRIQFGGSYGPFRFGLIWKAHAENKCNVVFVVLDLGVRVSLFLSCVFEKKTSARSNFQFIWPWQEWSYVKDLPKWAPQRVFVQEVLEREVRLSYFEKIKQSIEDAAELEELLPPKAGPNFKFHSDESNESTDGLKLSKELIGLIRGKKSTYDIILWVEEQIIPKNGTEFALDVVSQTLLDMGSKSFTHLVTILERYNKIISKLCPNEEMQLLLMNGVSAYWKNSTQMTAIAIDRMMGYRLISNLAIVKWVFSPANVEQFHVSDRPWEVHPLSLILPSFVILRNAVSKTYNRISDLRKEIQSLKKGLQVAKEASAKNRKELEEAKSVLEIVEGQPAPAERPGRIRRLESHVKNAEDEERTLEESLEAKGVLLARAHEESKDLLKLLFKSFVDVLTERLPPVSVDGEIPNLRSGDQNVNFAAQNSEAATMEIDNENGADNNSEPNERNTKNAYNVGELEQWCLCTLGYLKSFSRQYASEIWSNIAMLDEVFVGDVHPLIRKAAFSGLRRFTNEGSHP

SEQ ID NO: 59086 - protein, 711 aa, Zea mays
  Coding DNA Sequence Number=SeqID_15711
  Pfam annotation: Domain name=MAP7; Domain location=293-436; Score= -76.3; E_value=0.035; Accession=PF05672.2; Description=MAP7 (E-MAP -115) family
MAPLHGGFSAGKSGLCCDLLARRRGPSGFAPIRGPGGYLSPTVVDRRGKKPAAVTEDDPTPEATLATKKRKLGTAVGELGVSDSFAMELMGTCAALGGRMSSPELREPSARMLEVTGGRWPKNVPIPRAAGEDFFTSRMARDLRVFPYGRNIVVVVSAVMNKDRQGATQKRWAIIRLPDARPKRARGTEKATIPGGNQPPLAAKPTAPGSSKLPESAKVVGAGGTKSASDGAAKVRELPSLGKRVADFGTNISVDDYLVGWRFQRWRRDFGGHCRQGRSGHFVPPAEGGIAVAGAAAESNVAAEVERLRAQHANAVREKSAAESKSRRLAENVASLEGERTDLRRQLVEERREANQAIAKAQAAQAEAKLVRAEGSLASQRAEEWEVRFNALQARMERAKASMRSEVERTRKQLVDSYRELGARTADFEVPDREAGLRFLEWLQEELLALPTIVEGFMSFASLVTCEGAMNALSREGCNHYEGFDRSDEDFGREIFKVEDHVVKDSAGALFDRMWGPTVGRRLGSDGACRGRGGLGHLNSAQPEAEVNLVEAEAEVDPVPPPETGEGSLAAPASTVSGGGSSPATVPMAEDPSKTATELAAEDPMAAARSSQDFGPAHATATANFVAASTVGAGNESDESTSKFSEFDDSGSSVVWTEESSDEDLDYFAALDVAVAEASPRVTDAEVLPGPSAGRKRRRAVVKRRVSEVDG

SEQ ID NO: 59087 - protein, 317 aa, Zea mays
  Coding DNA Sequence Number=SeqID_15712
  Subcellular localization annotation: CTP_CleavageSite=79; ConfidenceScore=5.31e-01
MPHAPAIAPACHTRTNLAARASHRPRALAPTNPAPELARAPISPPVIPPPPTASQSLPTPNYAPCPRPCKGQWPVEVACAVAVRAVENCCDWVSLLRLEEHGGDGVLLGEVEEVVDVSLSGGGGCVQSLGGDGMPGSVVSNERDEKFDGMEQILCLRADFKKYQIKWAEDTIEVIALHGLTTFCGFHPLELSTHPIGLFPAEKEDDPMWKDRVEHAKDIWAIYPGKTAQLTVRCMNALYHLQVMRGEAMSHLMALLEATKITLDNREELVVDLSTEMVEKDLQVEQMSNEIQELEELVGTRENTIEVLEDQLINTQQ

SEQ ID NO: 59088 - protein, 47 aa, Zea mays
  Coding DNA Sequence Number=SeqID_15713
MGKPVPSLLMLLLGRVTALVPTITGMGDYVSGRVRGKVYCQVQSGWV

SEQ ID NO: 59089 - protein, 105 aa, Zea mays
  Coding DNA Sequence Number=SeqID_15714
MAPLARPDCLLDSLCRVALQSEWRRRRCPSVRLLYDDGGYQLRIRRLEGTPNYGPRHEGRCLLWSPCEVFCAVECFEEREASLCGFGDDFVEDSQPACQSLYVSG

SEQ ID NO: 59090 - protein, 116 aa, Zea mays
  Coding DNA Sequence Number=SeqID_15715
MRKKHGSVPKLHTCSGLDSHNEQKHWHSKCHYKRNSGSPSAGTNNPTPWGRPAERQKTDERLVAARSDYDDSDSDYARGSAGLRVGAAAILPSPTPTLEGRGQVRRAGGPERGWWR

SEQ ID NO: 59091 - protein, 61 aa, Zea mays
  Coding DNA Sequence Number=SeqID_15716
MAGGGELAGVGVLARGERQSEGQTVAHPGVFLGYFGATLIFGLYGFEFWKIGNTSELWERV

SEQ ID NO: 59092 - protein, 209 aa, Zea mays
  Coding DNA Sequence Number=SeqID_15717
MEVRCQTSFCQKEDGFPKLLRACTVRLGIKSQPEYDGRKFVEHGTENLHHVEWSVTAGGHRFKDTCQVVARKALRALCQIYEEEVAHTPLRFFPPFQRDRPAWMARMRALEEQQLLEDDPTVVYLTAYLLTLDTQYDFLARHHRQMIARAEDAEKRNRQLHVDLTTAQARATALESREVIAVEALKQAKDEHVQKLMEAVGDLFSNAMS

SEQ ID NO: 59093 - protein, 124 aa, Zea mays
  Coding DNA Sequence Number=SeqID_15718
MDPKGKGIVINDKEKEFLNVDEPKDPHELGCNHIIIWWQYCCHREILRHGSQERGSNMVFFSSTGNNHIVVEAEGFASHQLPGLSDEASDCSSSIPVHAGPLRVFIGVCPKVSTSQSSGANSSK

SEQ ID NO: 59094 - protein, 104 aa, Zea mays
  Coding DNA Sequence Number=SeqID_15719
KHWPAQRMAWRGLGHGGRKLWRQWRAENELAGAKGKVAGPVRMSAGRKWGAPGRAFIGTTRCTGGRGPRHQGASVRMPGPEVKLRQNRAKWIWFEFKLSQNVFK

SEQ ID NO: 59095 - protein, 66 aa, Zea mays
  Coding DNA Sequence Number=SeqID_15720
MKGPCTPTCCTLLYASFFCFLLAGSEHEPPVIGRIDFGAKAVPAWLFQLGSLTKPLSQESGNEFTG

SEQ ID NO: 59096 - protein, 98 aa, Zea mays
  Coding DNA Sequence Number=SeqID_15721
MAHRIARSTGGCGRPKSGEGNPGSPVRLCQVRGLGKLHGPLARLIERLARLGSGWRELAMVAEARAVMAGEGELVGVGVLARGERQSEGQTVAHPGYL

SEQ ID NO: 59097 - protein, 74 aa, Zea mays
  Coding DNA Sequence Number=SeqID_15722
MAPEARLGCCQPHPDRWHSSRSRAGGAVFLSACADGDYQPSLGVLGVPLIMVPDTNLFSLLVYVELDAPEINGN

SEQ ID NO: 59098 - protein, 180 aa, Zea mays
  Coding DNA Sequence Number=SeqID_15723
  Gene Ontology: Mol. function=structural constituent of ribosome; Cellular component=ribonucleoprotein complex; Biological process =translation
  Homolog annotation: Hit_ID=Q5I7L0; Match level="QueryCoverage=80%, HitCoverage=100%, E-value=6e-67, Identity=71%"; Hit description =Ribosomal protein L18
  Pfam annotation: Domain name=Ribosomal_L18e; Domain location=48-178; Score=263.4; E_value=4.7e-76; Accession=PF00828.10; Description =Eukaryotic ribosomal protein L18
MGAVVKPFEPGLRLYYPDILFIDGRVDDDPISDDEPMGIDLVAGGRNKKTKRTAPKSDDVYLKLLVKEKNIAVIVGTVTDDKRIQEVPAMKVTALRFTETARARIVNAGGECLTFDQLALRAPLGENTVLLRGPKNAREAVRHFGKAPGVPHSHTKPYVRSKGRKFEKARGRRNSRGFKV

SEQ ID NO: 59099 - protein, 81 aa, Zea mays
  Coding DNA Sequence Number=SeqID_15724
MSRSRCPLVPMGVLMGLPSFIPNFLKTTDQAKDGGKKSFKVQSAREKVKETRNPKPEVKKKTCKVKVDRVKKSYGASRITT

SEQ ID NO: 59100 - protein, 357 aa, Zea mays
  Coding DNA Sequence Number=SeqID_15725
  Homolog annotation: Hit_ID=Q6J9V9; Match level="QueryCoverage=38%, HitCoverage=46%, E-value=3e-52, Identity=78%"; Hit description =Putative uncharacterized protein
MATAQEIDPFLKADLPTCAPKHHGQSLPRRAPGFPPYDTGARSHMSYKLTRNAKKADRHAKGMQPHHGCAPFQLRCNRRSSMEAWAHMSCNRRTGYHVQRNRTATCANAASSRGYRTSAMTRGSPAHDPTMPIKYDGYGDRKRGYFERILLSKGNGPRAFLPIRGSKVAPCGVQQLPQSTRALSPLLIRGSKAGPSEGFDSRPRACRVRNDPGYVRYMAEARATLPRYPRTFPRPAGTVCNGIPPKGGTEPSDPIKWVRVQQITRRVKLTTVSHDLPRVQPRAQQGAPPRPTPDLGLSLGLGEGLRLARPQASASASASGGVTTSPDLSLGLRRSHRLARPRPRTDYATRDTSLPYP

SEQ ID NO: 59101 - protein, 228 aa, Zea mays
  Coding DNA Sequence Number=SeqID_15726
  Homolog annotation: Hit_ID=Q53PJ5; Match level="QueryCoverage=54%, HitCoverage=19%, E-value=2e-08, Identity=33%"; Hit description =Transposable element protein, putative
  Pfam annotation: Domain name=zf-CCHC; Domain location=62-79; Score =10.9; E_value=0.034; Accession=PF00098.14; Description=Zinc knuckle
MALVFGDGLTSIPSPTMFALSSLLYVTEEQVERLRDEKLTLVASWFTRFHNYQNWRRGGSNDGCFNYDDLDHFVASCPKKGNQHKGKREYTSDKYKSKGGFDKEVLKKYLHKAKIKEHAFITSLSNLDHDSNDATSSSSDEVTDRQVEDKLNKLYFIVDIIGDLCTMALGDDVVGGDDSSSEVSHSVDDLATESIMNKMCANKAQLPYDDHERALKIIHALDQRVWEV

SEQ ID NO: 59102 - protein, 151 aa, Zea mays
  Coding DNA Sequence Number=SeqID_15727
  Subcellular localization annotation: CTP_CleavageSite=54; ConfidenceScore=5.94e-01
MEAKTVATSTTLSPVAPRRASRRLARVTTILVGVRTSRSTPPASTSPREDSTRRCSRRSTSRSPRSSQDKLLRLATRERKDFKFKYENMLRELESPRASVVVSDETECDECALHMSKITTLETKYATLLYERVELRSRSSLLGTCTVYPGL

SEQ ID NO: 59103 - protein, 391 aa, Zea mays
  Coding DNA Sequence Number=SeqID_15728
  Subcellular localization annotation: CTP_CleavageSite=31; ConfidenceScore=5.20e-01
MDKDRQGAAQKRQAVVRLPEARPKRSRGTAKAAAPGGSQPTLAAKLAAPGSGRVLEAVKTAAAGGTKSVPAGAAKARELPPPGKRVADFATDISVDDYLVGSGEGQLVVVPPAVATAAATVVPRAKGSALSAGGEMPALTAVRDEAGAVSHRLKEALSQAEANLARAEGTLARQRAEELEERFNALQTRVERAEASTRSEAERTRKQLMDSYHELGARTADFEVPDREPGLCCLEWLQEELLALPAIVEGFMSYASLVTCEGAMNALSREGCRHYEVFDQADEDFDREIYKVEDPVVKESAGALFDRMWGPHGREVVRERSETMRGQAARNEKVEDFGALNSAQPDSESNPVAAASEVAPAPPPETVEGAPDAPRSHCGWRWPVANCCAEG

SEQ ID NO: 59104 - protein, 396 aa, Zea mays
  Coding DNA Sequence Number=SeqID_15729
MIHIVLPGITAIRQTVQLEDPVQAVVGPAYILATLALRLRHVPTNDLHRPILRLTHKCGRIAALQIQCEGGTSHQHPTTGRHLARAYFAQRPAMRQGPHPICDKLLNQVAPATQTGRAPQGPFICIVLRHFKLRGHHGIRHQLVYLDVESAQDLSHESMRRQAKTSGKERLEDNQLAFWLGDLLRPRDMSDSAAKITKLLHILHADRGHPRHTEIHRVAGAQLLLRHSAQRLLRRRVGRRRSGSRRRRGRHRYVPSAVAGGLLHTGQISGEQEQGGQTSSERIEKAGDASGNPQSNSTASINGHVKKPPRNHFERGQSLRHIATSSAPDDFVELVPQRANVGAKAKTSPFARGLRRTRCANGDKTTGRLTLRLIRRRTKTCDEVVSSRALVQNGGP

SEQ ID NO: 59105 - protein, 145 aa, Zea mays
  Coding DNA Sequence Number=SeqID_15730
MATRPPFFVENSHERPFSIIPKANTYGFLTKKWYAPEIREYDLWQGNICGVRCMNLWSMINGHTTPIFVENSYERPFSIIPKANTYEFLTKKWSPPEIQECDLWQENICGVKCSCLWSMINGHTTPIFVENSHERPFSRTLKANT

SEQ ID NO: 59106 - protein, 217 aa, Zea mays
  Coding DNA Sequence Number=SeqID_15731
  Pfam annotation: Domain name=DUF630; Domain location=58-107; Score =40.7; E_value=5.2e-09; Accession=PF04783.3; Description=Protein of unknown function (DUF630)
  Subcellular localization annotation: CTP_CleavageSite=44; ConfidenceScore=5.24e-01
MHLQRLKHPAPFLPRDFALPRGNGVHDLPRRRRRRCHLLQFPPRARRSSASEPSPRRGDPAALCCERVALIRAAADRRYALAAAHAAYFRSLAVVGDALRRFVASALAPATPGSSPVLTLPPSPAKLVAAASASLPPWPSSTVSPLSHSLAEKGWIFREAALKGSAGERTRSRTQATAAHNCIRIRFRVRAHTCQRRIQDTPVKCGRGFKRGEVLIT

SEQ ID NO: 59107 - protein, 53 aa, Zea mays
  Coding DNA Sequence Number=SeqID_15732
MAMREIKRDNVIVTEAYNKKINNKKFVMDRWYRYYDDEDNQIFWVRNRCLKKT

SEQ ID NO: 59108 - protein, 118 aa, Zea mays
  Coding DNA Sequence Number=SeqID_15733
  Gene Ontology: Mol. function=catalytic activity
  Homolog annotation: Hit_ID=A9P973; Match level="QueryCoverage=65%, HitCoverage=23%, E-value=1e-09, Identity=44%"; Hit description =Putative uncharacterized protein
MGTLPGGLFAECPKWHSAKELSLPSVYPTALGKDNSFVECHWGHSAKPPSPSHGAVYYLTDEPEVHFIWQPSQKSSVLAISRAFDDYYVKDCGVISASEMTQRRTDNKTSSSSSPPSG

SEQ ID NO: 59109 - protein, 141 aa, Zea mays
  Coding DNA Sequence Number=SeqID_15734
  Gene Ontology: Mol. function=nucleic acid binding; Biological process= DNA integration
  Homolog annotation: Hit_ID=Q2QRW3; Match level="QueryCoverage=83%, HitCoverage=8%, E-value=4e-09, Identity=33%"; Hit description =Retrotransposon protein, putative, unclassified
  Pfam annotation: Domain name=zf-CCHC; Domain location=48-65; Score =20.3; E_value=0.0013; Accession=PF00098.14; Description=Zinc knuckle
MFETISLSLTIREEQVESLGDEELALMANWFMRFHNNNMSCQCGGSKDGCYNCSDLDHFVASCPKKGMQEASPCDHHCSQRKGKREYTSGNHKSKGGFNKDALKNCLQKAKIKECAFLASLIDLDHDSEDASSSLSNEESN

SEQ ID NO: 59110 - protein, 404 aa, Zea mays
  Coding DNA Sequence Number=SeqID_15735
  Pfam annotation: Domain name=SPT2; Domain location=281-382; Score= -24.0; E_value=0.05; Accession=PF08243.2; Description=SPT2 chromatin protein
MPDGVLVVSHMARDPVAVALVLTSPVDHNFLLVDKGLENRWLMDSGCSCYMIGSKKWISSLSPVIGKQNITFRDTSRVKDLPLHFGSGIVKHPNPLGLKCDSNTSPRRLVYTFIQQMVPDLLKRDKPIKVTINFKSWSTNRDISSEWGWSSPIYAPKQISSPTATCMVGNRRNSYPINDLLFEKQQISKKTTDQAKDGGKKSFEVPSAWEKVKETRNPKPGVKKKTCKVKVDRVKKSYDPVLGHMELSIGIRARPLQCGLNRPEMTMSSQEGEEKRWQPNDESTSPTGLSSTSYKCLIVNNDSGDESDEEEEYEDDSEDESSSPQGTFSCIASINNNDRENETDDVEEEEIHRFYTHLNKEDKLLLVKLLRRNKEQGETLLRLEETLIKTNDSLEKMTKEHEEL

SEQ ID NO: 59111 - protein, 190 aa, Zea mays
  Coding DNA Sequence Number=SeqID_15736
MTAHQMSRIFSLTLTGKSKEREDASHAERRATSGTAVQLWPIPQIGGAKARHLQVSKLGMTLQAKMNLQGRAATDPHHNHHSHHASALWQEAQLKTLKNKLISSQNDYKDLLGKMEILSIHNDELTTKLENIGSTREVSLVEISEIIKKDASTSCFDLINDSNPCNQVLVKNVVIETCSDEIAMKNEQLK

SEQ ID NO: 59112 - protein, 241 aa, Zea mays
  Coding DNA Sequence Number=SeqID_15737
MLFFRHAGKTSSIPPPAGGLTAAIVVVARRRKEYHVVAAVEGHELETPKTEHRPGLERLLETTHLELDGKLFVNTQQAPTWRANCRRFDPDGSLDRRPKVGRGGGSSEVVAESEPWGRARWRPSSEVEVESEPWGRARRRPSFMVEVESEPWGRARRSPSSEVEVESEPWGRARRRPSSEVEVESEPWGRARRSSSSEVEVESELWGRARRRPSSEVEVESELWGRARRRPSSEVEVESEP

SEQ ID NO: 59113 - protein, 147 aa, Zea mays
  Coding DNA Sequence Number=SeqID_15738
MLLFLLNSPCLTVTVADWLGYINHNIQTRLLAATTFVALWTYVIVKGKCALGPFLSILVTEYQHKCLNVNLYPWMDKVQIKSKLSSSLTPYFFVNLKCKGERLQVVEIPRKRDIERQSKTLWYSSWSLDRLRGVDCNPRPLGRHNVE

SEQ ID NO: 59114 - protein, 1092 aa, Zea mays
  Coding DNA Sequence Number=SeqID_15739
  Gene Ontology: Mol. function=metal ion binding; Cellular component =intrinsic to membrane; Biological process=innate immune response
  Homolog annotation: Hit_ID=A3B3K9; Match level="QueryCoverage=96%, HitCoverage=91%, E-value=0.0, Identity=71%"; Hit description =Putative uncharacterized protein
  Pfam annotation: Domain name=DZC; Domain location=1038-1073; Score =81.7; E_value=2.4e-21; Accession=PF08381.2; Description=Disease resistancezinc fingerchromo
  Pfam annotation: Domain name=FYVE; Domain location=655-723; Score =55.9; E_value=1.3e-13; Accession=PF01363.12; Description=FYVE zinc finger
  Pfam annotation: Domain name=PH; Domain location=27-128; Score=16.7; E_value=0.044; Accession=PF00169.20; Description=PH domain
  Pfam annotation: Domain name=RCC1; Domain location=267-325; Score =10.1; E_value=0.06; Accession=PF00415.9; Description=Regulator of chromosome condensation (RCC1)
  Pfam annotation: Domain name=RCC1; Domain location=328-377; Score =21.9; E_value=0.0025; Accession=PF00415.9; Description=Regulator of chromosome condensation (RCC1)
  Pfam annotation: Domain name=RCC1; Domain location=380-432; Score =24.8; E_value=0.00033; Accession=PF00415.9; Description=Regulator of chromosome condensation (RCC1)
  Pfam annotation: Domain name=RCC1; Domain location=435-484; Score =26.5; E_value=9.6e-05; Accession=PF00415.9; Description=Regulator of chromosome condensation (RCC1)
  Pfam annotation: Domain name=RCC1; Domain location=499-548; Score =34.9; E_value=2.9e-07; Accession=PF00415.9; Description=Regulator of chromosome condensation (RCC1)
  Pfam annotation: Domain name=RCC1; Domain location=551-600; Score =26.1; E_value=0.00013; Accession=PF00415.9; Description=Regulator of chromosome condensation (RCC1)
  Pfam annotation: Domain name=RCC1; Domain location=605-652; Score =24.9; E_value=0.00029; Accession=PF00415.9; Description=Regulator of chromosome condensation (RCC1)
  Pfam module annotation: Pfam domain module=DZC::FYVE::PH::RCC1::RCC1:: RCC1::RCC1::RCC1::RCC1::RCC1; Domain location=1038-1073::655-723::27 -128::267-325::328-377::380-432::435-484::499-548::551-600::605-652
MSDVSLDLGGIRAGPVERDIEQAITALKKGAYLLKYGRRGKPKFCPFRLSNDESVLIWFSGKEEKHLRLSHISKIIPGQRTSIFQRYPRPEKECQSFSLISHDRSLDVICKDKDEAEVWFAGLKTLISRCHQRKWRTESRSDLLSSGATSPRTYTRRSSPLSSPFSSNDSIHKDGSDNYRLRTPYGSPPKNGLEKAFSDVMLYAVPPRGFFPSDSNAGSVHSMSSGHSDNTNGHPRGVPMDAFRASYSSAVSSSSHGSGHDDGDALGDVFIWGEGTGEGILGGGGSRVGSSSGAKMDCLVPKPLEFAVRLDVQNISCGGRHAALVTKQGEIYSWGEESGGRLGHGVDCDVSQPKLIDALSHMNIELVACGEYHTCAVTLSGDLYTWGDGTFKFGLLGHGNDISHWVPKHVNGPLEGIHVSSISCGPWHTAVVTSAGQLFTFGDGSFGVLGHGDRESISVPREVESLKGLRTVRAACGVWHTAAVVEVMAGNSSSSNCSSGKIFTWGDGDKGRLGHGDKGPKLVPTCVAALVEPNFCQVACGHCLTVALTTSGHVYTMGSAVYGQLGNAQADGMLPVRVEGKLHKNFVEEISCGAYHVAVLTSKTEVYTWGKGANGRLGHGDTDDKNTPTLVEALKDKQVRIVVCGINFTAAICIHKWVSGVDQSMCSGCRQPFNLRRKRHNCYNCALVFCHSCSSKKSLKASLAPNTNKPYRVCDTCYSKLTKGLETDMHSSAKRAATVPGVSDANEEDLETRSNAQLSRLSSMESFKHLDSRYSKKNKKFEFNSTRVSPVPNGSSHWSGLNISRSFNPVFGSSKKFFSASVPGSRIVSRATSPISRRASPPRSTTPTPTLGGLTSPRVVPNDGKPTNDALSQEVLNLRSQVESLARKSQLLEVELERTTKQLKEAISIAGEETAKCKAAKEVIKSLTAQLKGMAERLPGGAAKNTKLPPLPGIFIPSDIPSMPTESEGSPSSSGEQIINGHNGLLTSNGQSSIRNKTSHPEVGKNGGRLPDAESCHDAEWVEQDEPGVYITLTALPGGARDLKRVRFSRKRFSETQAEQWWQQNRARVYQQYNVRVIDKSTASVNSDIAAN

SEQ ID NO: 59115 - protein, 111 aa, Zea mays
  Coding DNA Sequence Number=SeqID_15740
MREPCKYLSSRKAVGGNKATTQLRELPEDPSLNLFPSCLSGSGRLLLACCCSAATRHGLSRQSALQDRSRAVFSHDSDGRDGYRVRSGSFWQEAQARKGTQRIRACVHFLQ

SEQ ID NO: 59116 - protein, 147 aa, Zea mays
  Coding DNA Sequence Number=SeqID_15741
  Gene Ontology: Mol. function=oxidoreductase activity, acting on single donors with incorporation of molecular oxygen, incorporation of two atoms of oxygen; Cellular component=cytoplasm
  Homolog annotation: Hit_ID=A2YTP4; Match level="QueryCoverage=62%, HitCoverage=22%, E-value=6e-43, Identity=88%"; Hit description =Putative uncharacterized protein
  Pfam annotation: Domain name=Memo; Domain location=6-146; Score= -134.6; E_value=0.036; Accession=PF01875.8; Description=Memo-like protein
MGRSGLAAHGLVWTARKLEEELNGWLGAAGLTKSPDVRAVIAPHAGYSYSGRCAAYAFGNIDPTNISRVFLLGPSHHYYTPKCALTRASVYCTPIGDLPVDQEGSWTSATEFVVSDNNGVGISPRTPYGEGGEIRKKGDWGNESVIA

SEQ ID NO: 59117 - protein, 163 aa, Zea mays
  Coding DNA Sequence Number=SeqID_15742
  Subcellular localization annotation: CTP_CleavageSite=57; ConfidenceScore=5.45e-01
MAKPTVADAGAVGAPDMSGAHRTVRCPLPTVGSATCPALIARPTVGPGRPLAHRTVRCTPDSPKWPKGTFPFQRLLETAHLELDEKLFVNTQQAPTWRANYRRFETGGSLGRRVKCRRVPQPRWVGARPSAKGGRKAAGDGRERGGNLAAFVFVPRPGRVRLQ

SEQ ID NO: 59118 - protein, 288 aa, Zea mays
  Coding DNA Sequence Number=SeqID_15743
  Homolog annotation: Hit_ID=Q5GAU8; Match level="QueryCoverage=11%, HitCoverage=23%, E-value=3e-09, Identity=87%"; Hit description =Putative uncharacterized protein
MTDAEKEVATERRMDSPPRCDCGDRVVIDEDYDKQFCCPNIDYETRKCSWESYDDKGEVMRTIESKRIMGQKMRCGSRLVDSYINDRIRDMRREAKSAFYDSPKRAEYRRLKAADEKRAQDAREWEAAQAEKQMLDNLADRLKGKIGSGVNYLANEAHARYVQDKMATVELMEEEDDDTSRLSELIALAEAGLHEEEEDDTSRLKEEDEFMSQAAAEVEAAYYKKKSDEAEAEDELFSQAADEAKANYYKRTGDKCDAGQCSKWNEVVVEDCATDDSEDELLIDCDSD

SEQ ID NO: 59119 - protein, 206 aa, Zea mays
  Coding DNA Sequence Number=SeqID_15744
MALLHSAWYQQSLAPCDATMPEGFGPETYRWATWCFGYDKTPEELGTARGRSCTLGFVSTLGETRPGLGQRHKREDFHLEGGRQHRAWARGGRVKPLNFGQGSFVFVGKAVPLADPLQIHIVVGSEYDEGPPNAVIQRLAESAARVVTQGLQATLGGASRGDVVKTKDPAEGRDSLGHGHAVGLLLLSRLGKCLGGLVEGRLELCK

SEQ ID NO: 59120 - protein, 169 aa, Zea mays
  Coding DNA Sequence Number=SeqID_15745
MATTQEVDPFLKATLLTHVLRRRGLSLHQRAQRPSPYDTGAGSHTSCKLARTEEAKPPRVERVTAQRLQALLHLRLTQRVKGRTTMQAADSNGGSRRAEAAVKSSAGSRPLLGQQESPLPRREDDAPVFRSSNGSRNGCPANHLSRRINFVAGQATPLAGEADDASPQP

SEQ ID NO: 59121 - protein, 1305 aa, Zea mays
  Coding DNA Sequence Number=SeqID_15746
  Gene Ontology: Mol. function=oxidoreductase activity; Cellular component=barrier septum; Biological process=fatty acid metabolic process
  Homolog annotation: Hit_ID=Q6L4X3; Match level="QueryCoverage=69%, HitCoverage=98%, E-value=1e-132, Identity=42%"; Hit description =Putative uncharacterized protein OSJNBb0108E17.7
MTAGEVDMFLFIKWSVGARGDWGARSIFLYILKDVMSLIIFHYSFALLIMTNFSQFTIAVANIDPKKMKYSGELNLVCFLLGRFWKKEHDWGWKKFMELSKIQDGFLVDDVLEIIAQVQVIREKVDRPFRCLDRPYRRELIRIYMTNVEQIYRRFIEERRSKLSKLIEDKIKWSSFRAFWSAIDPNTRHRMSREKTDTILKMLVKQFFVEKEVTSTLVMDSLYTSLKALEYQMKGRKGKTKLADLEELPAPMVHVDMDMFILADDVIALLERAALEPLPCQPLAPKDDKTSQPRMKVSTFLALEPRINYVRTIFLLVSHAYLQDGSSGEVYNVSMEREERRLTELGQKILETFVLSHIFSGIEVAYQEAVALKRQEELIREEEEEAGLLEHQMKGKRGGGVNEKDKRAKKKQTKQKKNRKAKDKERDEKCEVKILERLRDETAIDNSDGLPSQVEVIAKIDALEEGSSDGSDMSNRGKNQRNKGLSIISFAEEGDGLPSTSNVTGGLGRNSSGCCTAPKLDQDTVLLTLRDRLRKLGQRLHEKNIEGQKLLKKHFEARDAKAKEEPSDSSNSLDKPPDVPEIPVHSSEDTVDLKVNGTPKKDASVVNPVLEDSVSGIPVTANNEPVPSPTTTKMDPVSNKVNGSSLKMKVTMASPCSKSHPADMDKDASLPSKSPRTNRAAPVPPKLPSADKATLVPSKLPSVDKATPVPQKSPLVNKVAQARPKSPAVDKATPHRPKSPAVDKATPVRSQSPAVDKATLVRPQSPAVDKATPVRPQSAAVDKATPVRPKSPAIDKATPIAPKSPPVDKASPALPKSLSGAKDALFPSRSLQIDKFTPAAPRLSQDDKAALPSSEQSHISPATSSEAQGATTRKVTTTTSLSEAAAAWRPSSAPVLPTPRSTGPAASHIQTSTLLSRSMSEAAGRRPVNDPSFSAPSYTPQTYRNAIIGKSGLSMTSASLAYQPSSLDQDTAPSRPLSAYASSTVMMPPAGRSDQSSARHGFKSGPGKLEAHDGWQQWKGDSNVDMHLWRDHAPYQQMTNSQAYEQSRRDDTYQQACSRGTEKFSRHAGLQARQQFQTETPASHVWHQPQGPVAEEFPHLDIINDLLEEDQINGSIPESFRQDYNVFGLPFSPRGNLSDMEMASVRSPARFNSPKYDGGLSGAYDMNAVNGLRERQFPSLDIYSNGLSDVSASKPWLNGSASPSVSLGVNTNGYHPQLNLAVACGREKNGMKVSVNVEPTTKSGYHLLTQNGTRATLLDYSLLDGATAKGHVAATTDQHVSTSSFDLDVSWQAVGRQHQTDDTGL

SEQ ID NO: 59122 - protein, 84 aa, Zea mays
  Coding DNA Sequence Number=SeqID_15747
MSGAPATSPKPLDSDRWSSDFWACLDVRCTPDMYCSMSGVPARACLTSARFWRALNIPEAAKFQSRVFLEHRTLSGVHRIVGEL

SEQ ID NO: 59123 - protein, 100 aa, Zea mays
  Coding DNA Sequence Number=SeqID_15748
MKFRPNEVLVHHLGLKNKFEAPRKKKKFYKKKKDGKAYLVEWDSDASSDDDDDDDDTSSKLNARIAIKEAPSLFSSPHCLMAKGDAKVNYKAGGNLLGVG

SEQ ID NO: 59124 - protein, 36 aa, Zea mays
  Coding DNA Sequence Number=SeqID_15749
MPPRFPGCGTAPLRRVQPPWSRVGRLTPAWGGEGLP

SEQ ID NO: 59125 - protein, 178 aa, Zea mays
  Coding DNA Sequence Number=SeqID_15750
  Gene Ontology: Mol. function=DNA binding; Biological process=DNA recombination
  Homolog annotation: Hit_ID=A2X5Z5; Match level="QueryCoverage=72%, HitCoverage=49%, E-value=1e-14, Identity=40%"; Hit description =Putative uncharacterized protein
  Subcellular localization annotation: CTP_CleavageSite=30; ConfidenceScore=5.29e-01
MRLCSLHLRTFPFPSATAQAQPSAATAHCSALAVVCGGRPPIAACSRSEGEASPPRKRMLLELPSEHQSQNLTSPPHANMSQPFGVFASSSTPAATSHEQGANPEEGINLDEDDPSKLKQAKKSTSNVWQYFEKYEVVVEENGKSVKQVWAKCKYPGCKNKTSKARAESSRGTTVGLI

SEQ ID NO: 59126 - protein, 191 aa, Zea mays
  Coding DNA Sequence Number=SeqID_15751
MPEVGLPKQQKLQNGCQHILECMRLCPLELGAEGNSVVAPKPEKNIVASVAGFPCRHSGSDMPGVNSPSEAPGHLGEPISFLPSLPKVIVSADVLIHLLKQFLQGLRGFPGEVLGRRSWPKPLDHGLNDNFIRHCWCLCPQSQEPSDIGLEVFFLILRALEQSLSSDRLRVKSLDTGFSKRKGILVRVQWL

SEQ ID NO: 59127 - protein, 510 aa, Zea mays
  Coding DNA Sequence Number=SeqID_15752
  Gene Ontology: Mol. function=kinase activity; Cellular component =nucleus; Biological process=cell division
  Homolog annotation: Hit_ID=Q43693; Match level="QueryCoverage=100%, HitCoverage=100%, E-value=0.0, Identity=67%"; Hit description=Type A- like cyclin
  Pfam annotation: Domain name=Cyclin_C; Domain location=363-501; Score= 106.4; E_value=8.8e-29; Accession=PF02984.10; Description=Cyclin, C -terminal domain
  Pfam annotation: Domain name=Cyclin_N; Domain location=262-396; Score= 199.2; E_value=1e-56; Accession=PF00134.14; Description=Cyclin, N -terminal domain
  Pfam module annotation: Pfam domain module=Cyclin_C::Cyclin_N; Domain location=363-501::262-396
  Subcellular localization annotation: CTP_CleavageSite=35; ConfidenceScore=5.39e-01
MSTHAASRRSSSSSAVAKRPAIAEGATKAAGPGPTAAQAKKRTALVNITNVAAPGARVAAVGKVAPPVTGAYLISGGSRQRFEITCPFCSNSNLMQKLNPATSGAPLKKPSLANARTIRGSAAKSASIKPAPPVSRHDSSSEQKHNVLVPTTVHVPSRAPALVPYSSFVSPGRSRDSVSTDETMSTCDSMKSPDFEYIDNGGCSMLASLQRRADEHLRTSEDRDVEENKWKKNGPAPMEIDSICEVDSNLEDPQLCAALASDIYMHLREAEMKKRPSTDFMKTIQKDVNPSMRAILIDWLVEVAEEYRLAPDTLYLTVNYIDRYLSGNEINRQRLQLLGVACMLIAAKYEEICAPQVEEFCYITDNTYFRDEDPALHLEFLANYIAELSLLEYSLLSYPPSLIAASAIFLARFVLQPTKYPWLLPDENDTVLVADTRYIWKQNSTLAHYTQYKPSELSECVKTLHRLSSVGPGSNLPAIREKYSQHKYKFVAKKQCPPQIPAEFFRDAAC

SEQ ID NO: 59128 - protein, 151 aa, Zea mays
  Coding DNA Sequence Number=SeqID_15753
MWQNAKKSLTQMNVNGNLQNGIGVQMSQVKTIEIKESAEKGRNGESETAEKKRDVNHRFMGILCRDNDPMTNPPRTKLPRGKDPDGHEVEKAPTQLYWQIEREPNYREDLEAGKQELGHGKQRRLKAQYIWDIPESDTVSKNAQTAPGSYF

SEQ ID NO: 59129 - protein, 292 aa, Zea mays
  Coding DNA Sequence Number=SeqID_15754
  Homolog annotation: Hit_ID=A2ZRP7; Match level="QueryCoverage=55%, HitCoverage=30%, E-value=5e-45, Identity=62%"; Hit description =Putative uncharacterized protein
MPPPVSASSSPPTPEPRAPPELHRVIPSFPTEPRRSVREEEDDGPKPVLICLGTLAVAGFVHNCTLPSMLRLYPSPLHSRFLISFPFGRGALARESSDNGWSFGGLVSTFASRSESVLGGYRHDLEDLGSGLRLETVALWAAATRAASALPGALEASASVASNKLESIGQVVDDLDAAAAGLLSHANKALRSAEADGVDGDRAARPSDGSVSSASWRASLPTKKYTRFEAQVLALRADPATFTEEPKDSKGFGKWSALFSIDEMKEQIETVLHESLGLESFVERLVPSVVDY

SEQ ID NO: 59130 - protein, 55 aa, Zea mays
  Coding DNA Sequence Number=SeqID_15755
MGAEPWGRRGGASYGARAPIPAVAELPELFQLKCLSPALEARPHLNGNNPSIPRI

SEQ ID NO: 59131 - protein, 409 aa, Zea mays
  Coding DNA Sequence Number=SeqID_15756
MGSARCPSALSSLEERNFAEVGRWWGISEPGCGLCPALSFKDLHHPGWGGGRAEPELYLPRGFMGHLLPQHSGERALTGLAGGSDFDNAGPVGGERRQLQRVGLAGSVGSGSAPGAPSHRENGCRVVLTGGPPKTSRAARAAFVFLGCPAFAPMASVVGVKVVAAKEVLVVDGITATIRATGLRLFGFDVWFASLEWGREREPSGGYVRPWAMAAAAEVAGESPGACHPTGSPDSPVGKLNRFTKCELPRAKVTSERRSRVAEAMSRADVLGGQLVEAPGWPAEPDPSPVLPSKARSDFAEGGVDAEGATAPPPSRIVCPSESYFSRKVMSEDSAIDIVEKARKIVSAERFPSIKTCSVSGIAYPSVSYLSQKVMSEDPTFEVVEKHERHSGRKIFSEENFDAEGVPPF

SEQ ID NO: 59132 - protein, 203 aa, Zea mays
  Coding DNA Sequence Number=SeqID_15757
MAHTSPEIQLNPLGEGGIFQGQPKPLPLRATITVEFVRAAEEPRRPSLPSTSVRVPTPASTHDRGVLPGFAVLHQLDSERVDPGCGRNLPSSTANGGGVPAHRGQAVRPHHTRCMGVATPWQMGNMTCGYRMVNTRKGGGIDLPPNRHPRRIFRQPQPQPEEMDPPPPPPPAGVDPLVAAQMRMMQQMADTMADMRAQMQQER

SEQ ID NO: 59133 - protein, 74 aa, Zea mays
  Coding DNA Sequence Number=SeqID_15758
MTLSTMVTGQLAAGIGIAVGMAIGGLEVIAATGAQEQRSNRQSDSGPTYRLASSPEAGPGATVGTLNQGYPLLR

SEQ ID NO: 59134 - protein, 160 aa, Zea mays
  Coding DNA Sequence Number=SeqID_15759
MGKNNKRKREPTPPSEEFGDSEYSEKEFSSESEGSLAPIPLRESSDDSDDFQGLAAEVWTYIRAVERSGLEGSDESEYSSDEEDSDGGGEDEDDDDDDGDGSGRGDSGDSKDGDGSGRDGDGGGSRGSNRGGSSRGNTRGGSGGGSNRGGSGGGSNRASG

SEQ ID NO: 59135 - protein, 114 aa, Zea mays
  Coding DNA Sequence Number=SeqID_15760
MDETPVKNRKSERASPYSENGTMPEVRIQMGSSKIEPPARTYGDFTGIWRRRRRAEVLSGPTISGDSGGEERPKLVPGSSMRSETREWARTVKTTAQEKREQASSSFRRQNERA

SEQ ID NO: 59136 - protein, 231 aa, Zea mays
  Coding DNA Sequence Number=SeqID_15761
  Gene Ontology: Mol. function=DNA binding; Cellular component =mitochondrion; Biological process=protein amino acid phosphorylation
  Homolog annotation: Hit_ID=A3BPW9; Match level="QueryCoverage=96%, HitCoverage=42%, E-value=4e-93, Identity=76%"; Hit description =Putative uncharacterized protein
  Pfam annotation: Domain name=PPR; Domain location=108-142; Score=4.1; E_value=2.5; Accession=PF01535.11; Description=PPR repeat
  Pfam annotation: Domain name=PPR; Domain location=150-184; Score=8.7; E_value=0.72; Accession=PF01535.11; Description=PPR repeat
  Pfam annotation: Domain name=PPR; Domain location=38-71; Score=3.6; E_ value=2.9; Accession=PF01535.11; Description=PPR repeat
  Pfam annotation: Domain name=PPR; Domain location=73-107; Score=39.5; E_value=1.2e-08; Accession=PF01535.11; Description=PPR repeat
  Pfam module annotation: Pfam domain module=PPR::PPR::PPR::PPR; Domain location=108-142::150-184::38-71::73-107
TNWSTLEILLILYGYLGKEKELKRTWEIMQDLPHIRSKSFTLAIEAFGKVGSIDQAEKIWIHIKSTKKLSLTEQFNSMLSVYCRHGVVDKASSVFKEMRANGCQPNAITYRHLALGCLKSGLVKEALNTIDMGKKEVVTKKVRSSTPWLETTHLLLENFAEIGDLENAKRLYSELNESKYSLNSFVYNTLLKAYVKAKVYEPDLSRTMILRGAMPDAETYSLLRLIEQFKI

SEQ ID NO: 59137 - protein, 473 aa, Zea mays
  Coding DNA Sequence Number=SeqID_15762
  Gene Ontology: Mol. function=metal ion binding; Cellular component =integral to membrane; Biological process=ubiquitin cycle
  Homolog annotation: Hit_ID=Q84SC7; Match level="QueryCoverage=96%, HitCoverage=95%, E-value=1e-57, Identity=34%"; Hit description=Zinc finger (C3HC4-type RING finger) protein-like
  Pfam annotation: Domain name=zf-C3HC4; Domain location=268-308; Score= 30.6; E_value=5.8e-06; Accession=PF00097.16; Description=Zinc finger, C3HC4 type (RING finger)
MAGKEAAESSRARRRMDLNLYVGLPPLSPPRLWLDTSAPSRTTWVSHSGPGAALDAPRTREPEEPLAPAAAAAAAYSPSNALFAPDPEEHPVFDPLVYSWLDGSGEEYTDAPALSAPAPTPVDGHGVSGPQFLMAATGLDGDDLAVPRPVHPSRVAAAAAAAGGLEMVGTSVLGQSTQGATASEAGELRFLRAIRISQQHNIVRSGPASHTQVAASTDAGSLVMAMQHTQSAFEAAADPDGGGDKVRGSDAAEKDGSCDCNCDSSFECNICLERAKQPVVTSCGHLFCWPCLYRWLHAQSPFCDCPVCKGEVLLTSITPIYGRGGDEEGDSGSSAVPDLPPRPQANRRDSLRQQLQTATDARGIAAVLREMIQNQGIVTSVPAGRQRAGSARRQRRQGSNASRSAVVNAGNAAPEGSDPIQPPHSNGGNGEQVVHAAPQQPPPAVVLGEPGPSRRSRHSESAAIRRTRRRPQQ

SEQ ID NO: 59138 - protein, 272 aa, Zea mays
  Coding DNA Sequence Number=SeqID_15763
  Gene Ontology: Mol. function=kinase activity; Cellular component =ornithine carbamoyltransferase complex; Biological process=amino acid metabolic process
  Homolog annotation: Hit_ID=Q6QP54; Match level="QueryCoverage=32%, HitCoverage=44%, E-value=6e-18, Identity=50%"; Hit description =Putative kinase
MAGERTGRARMLFFHHAGKTSSIPPPAGGLSAAIVVVARRWKEYHVVAAVEGHELKTPEMEHRPGPKRLLETAHLELDGKLFVNTQQAPTWRANCRRFETGGVPKPTSECRCVPQPRWVERVGEREGGKRRWPETGVREVEIPRPSCSSRAQGLRGAIIAYLAELSQMGHRSRSLRPELARGRVMMALPVDVVGLRPRLGDVEAPPKPRSSLSSVAEAESEPLGRARRRSFGRGQGGVRALGSGEAEFVVFWGLARVRALGRAERSSPSSGT

SEQ ID NO: 59139 - protein, 328 aa, Zea mays
  Coding DNA Sequence Number=SeqID_15764
  Gene Ontology: Mol. function=electron carrier activity; Cellular component=chloroplast thylakoid membrane; Biological process =electron transport
  Homolog annotation: Hit_ID=A2YRI0; Match level="QueryCoverage=94%, HitCoverage=100%, E-value=6e-51, Identity=58%"; Hit description =Putative uncharacterized protein
  Pfam annotation: Domain name=Rubredoxin; Domain location=236-271; Score=27.5; E_value=8.6e-06; Accession=PF00301.11; Description =Rubredoxin
  Subcellular localization annotation: CTP_CleavageSite=68; ConfidenceScore=5.63e-01
MAATLSSVAAPSLPKHIPVTRAQQQAPPSIISASTQKTAFHGVSLVVDRRWAAGHRRGGGRRRLLQVNARTAAKNIEVEVEKPLGLALGQKPGGGVVITERFPSLYFIDHKEFMTVKFQRIKQKKALKANSTTTRTHFDYFGSPSSLHSCDEEHLNIGHTRIRKQMANRLPLTTEKTGLSVESGGNAARAGLKTGDQVLYTSSFFGDELWPADKLGFTKTAIQAKSDSVYFVERATHVCLDCGYIYFLPKPFDEQPDDYGCPQCNAPKKRFARYDAATGKAIGGALPPIAVISLTSVGVIFLWDRLIYQIKVSSSSWWRWDGSSAKRP

SEQ ID NO: 59140 - protein, 94 aa, Zea mays
  Coding DNA Sequence Number=SeqID_15765
MATNVGWTDGRSERGSLYFGSGDDGDEQVLLGPGDRGRNPFVDLSLPQQQPPLNYFGLISAFAAEKDEHCEANDIKRVMGSCADFLVGYWLNDW

SEQ ID NO: 59141 - protein, 812 aa, Zea mays
  Coding DNA Sequence Number=SeqID_15766
  Gene Ontology: Mol. function=RNA binding; Cellular component=voltage -gated potassium channel complex; Biological process=potassium ion transport
  Homolog annotation: Hit_ID=A3AR01; Match level="QueryCoverage=80%, HitCoverage=56%, E-value=0.0, Identity=60%"; Hit description =Putative uncharacterized protein
  Pfam annotation: Domain name=PUF; Domain location=308-342; Score =33.3; E_value=9e-07; Accession=PF00806.10; Description=Pumilio -family RNA binding repeat
  Pfam annotation: Domain name=PUF; Domain location=344-378; Score =31.3; E_value=3.5e-06; Accession=PF00806.10; Description=Pumilio -family RNA binding repeat
  Pfam annotation: Domain name=PUF; Domain location=380-412; Score =13.9; E_value=0.27; Accession=PF00806.10; Description=Pumilio-family RNA binding repeat
  Pfam annotation: Domain name=PUF; Domain location=432-465; Score =36.7; E_value=8.3e-08; Accession=PF00806.10; Description=Pumilio -family RNA binding repeat
  Pfam annotation: Domain name=PUF; Domain location=468-503; Score =32.6; E_value=1.4e-06; Accession=PF00806.10; Description=Pumilio -family RNA binding repeat
  Pfam annotation: Domain name=PUF; Domain location=505-539; Score =30.8; E_value=5.1e-06; Accession=PF00806.10; Description=Pumilio -family RNA binding repeat
  Pfam annotation: Domain name=PUF; Domain location=541-575; Score =30.6; E_value=5.6e-06; Accession=PF00806.10; Description=Pumilio -family RNA binding repeat
  Pfam annotation: Domain name=PUF; Domain location=600-634; Score =35.2; E_value=2.3e-07; Accession=PF00806.10; Description=Pumilio -family RNA binding repeat
  Pfam module annotation: Pfam domain module=PUF::PUF::PUF::PUF::PUF::PU F::PUF::PUF; Domain location=308-342::344-378::380-412::432-465::468 -503::505-539::541-575::600-634
MANYAFDMNLLWTDMNPDNAEYHRNIQNHFMSNIENMNAYGNRDLDASSMFDSDISDALSGLRLSNNSVMDQRNNREELADEILERQRDFSKTVDETRSSLVGNVFHAPRSDVHPSRIYGDGILRRQTSACALDGSNVSRINRHHIKGVDRPSLADQLAIMQSGNFPRGTNLSRNVSVTNMSNPMSNRYNSNTDLDLARSRMTFFKEILAQQYLQEDNLSYNDSRIYHDEPCFPCSRMQRSGSHFYSNSRCILSHGDRQSRLLSLNRKAMGRNIGSHAYHDNTLSNYLDVLSLDNADRNGADSVELIDLVGHVKEISMDQYGSRFIQQKLEIASLDDREKIFPEILSNAIALTTDVFGNYVIQKFFEFATERQLIQLADQLKGHILELSLQMYGCRVVQKKSGPGAAVEPTVCNRKVLEVVDKDRKIDIVHELRNHILKCIGDQNGNHVIQKCIECVPEDRIPFVIDPILSQILVLCTHQYGCRVIQRVLEHCHDPVTQSATMNEIVQQTFHLTDDKFGNYVVQHVLKHGKPEERSAIIQKLSGQVVILSKLKYASNVIEKCLEFGTLEERDSLIGEIISSGQTFQFHRSLVEYSGHLSARFQLAQELMKDQFGNYVVQKVLKTCDERYLEMILSSIKLHLNELKNYTYGKHIVTRVEKLIVTGGWFYVTVIEVFELQTVKTTIMIAATSFFIGYENPPQEDDSDPSNNEDEANQYPQILLSKQGIYKIYLIFFALFPLMHHLYYLVYEFSGKPQGYCYKFSIETSIGRLQLMWLYVARNHFLSLLKVITLVHKIPLNSVRRRRLRRSLKGV

SEQ ID NO: 59142 - protein, 189 aa, Zea mays
  Coding DNA Sequence Number=SeqID_15767
  Gene Ontology: Mol. function=carboxyl- or carbamoyltransferase activity; Cellular component=ornithine carbamoyltransferase complex; Biological process=amino acid metabolic process
  Homolog annotation: Hit_ID=Q8SA97; Match level="QueryCoverage=61%, HitCoverage=24%, E-value=2e-19, Identity=44%"; Hit description =Ornithine carbamoyltransferase
MALPVDVAGPRPRLGDVEAPLKPRSSLSSMAEAESEPLGRARRRAESEPWGRAKRRSSSSGAEPESEPWGGTERSSSSSGAEPESEPWVGRSGLYADGGYQLRIRSLEGTPNYGPRHLGNSFVKSIVNKMRVNKAQLLYDDHEKALKLLHALDQRVWEVKVSAIIESPNYETLTMVEIFIKLKSTEIDH

SEQ ID NO: 59143 - protein, 107 aa, Zea mays
  Coding DNA Sequence Number=SeqID_15768
MRCGAQVQWSTVKVKVMQIHGDGSGVVNDECCDLTEGPVSSGDLVSAFRDRGVPKQTSECAACPSPDGSSAWASAKGGSEVAGDGRERGGNPAAFVFVPRPGRVRLQ

SEQ ID NO: 59144 - protein, 105 aa, Zea mays
  Coding DNA Sequence Number=SeqID_15769
MDCAACHLRHAVLATDVPISMCCAVCHLRHAILTTGVPISMGSIACQFCHHILDTGVPISRNNAKFRHIIFVDGVFVPMGDATRGSHDSAITNSINGRLVDQHKG

SEQ ID NO: 59145 - protein, 566 aa, Zea mays
  Coding DNA Sequence Number=SeqID_15770
  Homolog annotation: Hit_ID=Q6QP51; Match level="QueryCoverage=33%, HitCoverage=98%, E-value=3e-11, Identity=36%"; Hit description =Putative growth-regulating factor 1
MDGGNHPRGGEPSILQLLQGLQKGLEILPSLARGPIAPVGVGGGHHSLRKRWELPFIVPKVKPPALPPLVRRSKDGGDVLLRTRLPQLEDASTGPHRHANSPLPCRQGKGLRGEEMGPQIPVGINPQKPFANRREDGCLHDGVGAEIVQLHPVEVQNRPHETTCRHSEPPLVERDETQHIPWLRGWGGSAWGSNPLQLQVTEEGTKQAIGNKGLQIVHCDGRERPRVARRKNGHPVGHHQAKEVAAERTRIGGTFGRRSRRRFTSAMMTASKRLAPRKGSTAASEHSGSAPTTDQRLRLAPWKGSTAASEHSGSTPTTGQRLALEGFDSRLRTRRARDDSGYVRYMAEARATLPRGSGAALANPAPAKPLTASTYQPENLEPDYAPGLRPLVTPINTKLQRPDGRDSGQGSVRSRDTISPRSSPDSGKGSRPRRIHVSPEGSTSTPDDGLRLARPQGSDSTSTPDDGLCLARPQGSGSTLTPDDGLRLARPQGSNSTSTSEDGLRLARPQGSDSASTPEGGLRLARPRARTQPRPRTMVSASTDPWGSDSASTSEEPPPRLTSGSD

SEQ ID NO: 59146 - protein, 135 aa, Zea mays
  Coding DNA Sequence Number=SeqID_15771
MGSVARTGEDSVGQEFFFCLLDHTLLVLLKLELFVSQQGFPSRLYDVTWGISELSLEPAIKGRFDVSIFVVPSGVAKKYVDTFLEAPITSRESAAVLSGQARTGEKEKMTKSRTSLRPGCGGLALAYKELIYTTI

SEQ ID NO: 59147 - protein, 130 aa, Zea mays
  Coding DNA Sequence Number=SeqID_15772
  Subcellular localization annotation: CTP_CleavageSite=58; ConfidenceScore=5.72e-01
GQVRQFLQFSNPPPHKTGRRLVSGTPFPSRPRSFPSLKPIESTDARPDTPAPLSPPRRARAEASLAISRPRHPTAILPPDLPPPPPPPACSQPQVQEDAPSIRRREAGARAPAPRQAPSPDPIARRLGSI

SEQ ID NO: 59148 - protein, 21 aa, Zea mays
  Coding DNA Sequence Number=SeqID_15773
MAQEGQSAAASYNPPEGFNPT

SEQ ID NO: 59149 - protein, 186 aa, Zea mays
  Coding DNA Sequence Number=SeqID_15774
  Subcellular localization annotation: CTP_CleavageSite=36; ConfidenceScore=5.35e-01
MVGGTLALAGRARAGPPCPPGRGRAPVAARCRGRCRRAAVPAWPGLCARAEAACRRPETAVAPTPSQKRTPRPRHARSRTGVGSAVPASWLGPGDGAPALSRGCARAPEGPRLLPRPGGRRAGQRAGPLPRRDACAAESATGPRQSAPCRRGAARRCRPHRHRGLHPRAVQGASRRRMGPRARAPR

SEQ ID NO: 59150 - protein, 22 aa, Zea mays
  Coding DNA Sequence Number=SeqID_15775
MAAVRIDRGTEEVYAWQDSWIV

SEQ ID NO: 59151 - protein, 309 aa, Zea mays
  Coding DNA Sequence Number=SeqID_15776
  Subcellular localization annotation: CTP_CleavageSite=74; ConfidenceScore=5.08e-01
MTLFHRPSDATLQQPTPKHAHASREHWLPRGPDPSLLPTPLSHLTAPLRSRRRRPGPAQAPAPTPPRLSHAAICTALASYAGLLQPRGLLYPALTTASHDDLEGARCVAPASSPELTRTPSSPIPSPSLREDTSMANTSVTSGGHPWRRGIHRIRGGGPWHPPETTPLPPSRCLLHCLDLAPSSTSCETRSTTSTRASTARRPSSYPLRWAPPRVERTLLQRYRFVPRGSALAACARASSAPPPLPLLLLLHLQPTEKSMVKIRTVEVEDKTVKLQILMADAACFNSGTQQGRSGSGPSRAATTEELTG

SEQ ID NO: 59152 - protein, 82 aa, Zea mays
  Coding DNA Sequence Number=SeqID_15777
  Subcellular localization annotation: CTP_CleavageSite=19; ConfidenceScore=5.28e-01
MPSSSSSAAATPLAGSSPSAAASSEETLSSLMAEELRAGDSVDFGVSRMSSARVEDMCDTPVSPRVSLVKAQPRTIISCKSK

SEQ ID NO: 59153 - protein, 264 aa, Zea mays
  Coding DNA Sequence Number=SeqID_15778
MLTPSERNRPSTASAASWRTRWSHWRERRLTSGAQLAGERRETNKALAKAQASQAEAKLARAEGNIARERAEQLQERLIALESRVERAEAAMRAEAERTRTQLVSTYRELGRTAGTPRCRGGFMSYASLVTCEGAMNALSREGCRHFEVFDQVDEDFDRDVYKVEDLVLKDSAGALYDQMWGPHGREVVRERAETAMAQALRGERVDDFGALNSVLPDPEPTPAEARVQGRPGANPGDRGRRTGCPHIRSGRRRPAPEGGRRRT

SEQ ID NO: 59154 - protein, 150 aa, Zea mays
  Coding DNA Sequence Number=SeqID_15779
MLVDYTTVLDRPCVSVEGPMQQGIESVVEVTLTSGITSDGSSDPSLRLWLLRKLRAVARTATGIIVVSVSVKGASLAEVQGKAASRTPPPTEVRGKSPAAPAPGVGALAPHACDDAVSPADWTDLAPCDAGDAPPGEKAKSGSQTYVQCT

SEQ ID NO: 59155 - protein, 117 aa, Zea mays
  Coding DNA Sequence Number=SeqID_15780
MQDAARRALSQYCSLFSGVANGLDLKYYPRHSTRSAGRLNNMVDLAAVLNIELDHALDELGKVRAEVAELRVERAARHYLDGGSPAPVGIQHPYRSPLRGRFDYGTPNCRTWIDLDP

SEQ ID NO: 59156 - protein, 137 aa, Zea mays
  Coding DNA Sequence Number=SeqID_15781
MGKSKKGGSSSHHSGDKRKREPTPPSEDFGDSEYSEEEFSSESEGSPVYTSPPASSDDSDDSRGIAAEVWTYIRAVERAGLEGSDELEVSSDEENSSDSSEEGSGGDGDDEGDDDGRGDGDGDGDDKGDSGSSKASG

SEQ ID NO: 59157 - protein, 298 aa, Zea mays
  Coding DNA Sequence Number=SeqID_15782
  Subcellular localization annotation: CTP_CleavageSite=87; ConfidenceScore=5.06e-01
MGLKRTLRSRLYLWSLSYPFCTPSLFPRSGTLCTLPLDLGYRWGGARSMSSSGSDNCPNKVSFPAGVDASFCLGEFVQERCGGCNILARLGESWWAGPTVGQAVVESRWGGCHDIHHGIGGVPQRVGHEAFLGYVVYMSSPVTTSWGTESEAVEASGNVEQVARWGNQGSGVLAIVLLSLMTKSRLPKRMVVPRVQTTPLLLLAIWSLESSSRTQRPLPSVPTINDLNLCSDKMSLHPVFGGSCYRRLYYSMLVVGVTSGLQADERGIKGSKVSYEGVVLKTMELGPYAKPCLQPLGF

SEQ ID NO: 59158 - protein, 31 aa, Zea mays
  Coding DNA Sequence Number=SeqID_15783
MEKPGRDVSHGPGWRAPGDVEFIAYIVFVGD

SEQ ID NO: 59159 - protein, 333 aa, Zea mays
  Coding DNA Sequence Number=SeqID_15784
  Pfam annotation: Domain name=zf-CCHC; Domain location=30-47; Score =27.0; E_value=7e-05; Accession=PF00098.14; Description=Zinc knuckle
MLKKLNREGIKFDSRKKKFFSNKRKPISEMDCYNCGELGHLAHQCNKPKKNKFKGKKEDDSDDEKKEKKFFKRKDGKQKRFHKKKNGKAYIVGDWLTDIESSSGSSSSEEENDEKVVAIAGDLSSPPPSPSLTSHLCLMARGERKVQNDIDITDDSDEEFASPSYDKLADLLKEYTQIIRKSKAKCDRLKNENESLNAKYDIVMKANAKDKCDKLNESNRELQDRLVKIKEDYTQIKFDHDNLLVENEFLSCKTHEAINPVVKIDVATSCDDLSQGEQTSLHAELTEKVEVLTLDNQKLKKYLIDATTRGKVAIENNDFNNELAVDNQRLKNE

SEQ ID NO: 59160 - protein, 274 aa, Zea mays
  Coding DNA Sequence Number=SeqID_15785
  Gene Ontology: Mol. function=kinase activity; Cellular component =ornithine carbamoyltransferase complex; Biological process=amino acid metabolic process
  Homolog annotation: Hit_ID=Q6QP54; Match level="QueryCoverage=27%, HitCoverage=26%, E-value=5e-14, Identity=57%"; Hit description =Putative kinase
MAPSVDVVGPCPSLGEVEAPPRSRSSLSSKVEVESEPPGRTRRRPSADARAESEPWGRAKRSSSFFGAEPESGPWGRAKRSSSSSRAEPESEPWGRVKRSSSSSRAEPESEPWGRAKRSSSSSGAEPESEPWGRAERSSSSSGAEPESEPWGRAKRSSSSSGAEPESEPWGRAKRDLALSSGFSSRCGRQAALSSVRPATFALNAPVIWSVGVAIWPRLLLGEDWASGEPKLCADGGYQLRFRSLEGAPNMVSLVKLLAGNPEWTPVPHLLGVG

SEQ ID NO: 59161 - protein, 86 aa, Zea mays
  Coding DNA Sequence Number=SeqID_15786
  Gene Ontology: Mol. function=catalytic activity; Biological process =metabolic process
  Homolog annotation: Hit_ID=A2ZFE9; Match level="QueryCoverage=90%, HitCoverage=17%, E-value=2e-18, Identity=63%"; Hit description =Putative uncharacterized protein
MWRLTVAEGGGPWLRSTNGFVGRAVWEFDPDLGTPEERDEVERVRQEFSDHRFQRRESADLLMRMQLLVTKSCCGLPNAQLFSQLL

SEQ ID NO: 59162 - protein, 187 aa, Zea mays
  Coding DNA Sequence Number=SeqID_15787
MPIQEDIAVNTVNDKWIYITGPAASTDDFTVEFKDYKDNGEVIALGETIVYDVELEATDSLGGTATYTIALTVTSENRAPTKKTTVNLNLGTFTVMSGDSYSLVNTRDFEDLDEHEISIACTYKDDFSDNTTILSYAIVGAGFKSGPDNTDFEVSFDDTYTGDGFKYLITGLSFIRDDAYGATVNKI

SEQ ID NO: 59163 - protein, 364 aa, Zea mays
  Coding DNA Sequence Number=SeqID_15788
  Gene Ontology: Mol. function=nucleic acid binding; Cellular component= ribonucleoprotein complex; Biological process=nuclear mRNA splicing, via spliceosome
  Homolog annotation: Hit_ID=Q10MR0; Match level="QueryCoverage=64%, HitCoverage=100%, E-value=1e-86, Identity=72%"; Hit description=RNA recognition motif family protein, expressed
  Pfam annotation: Domain name=RRM_1; Domain location=143-215; Score =28.8; E_value=2.1e-05; Accession=PF00076.13; Description=RNA recognition motif. (a.k.a. RRM, RBD,
  Pfam annotation: Domain name=RRM_1; Domain location=292-359; Score =33.0; E_value=1.1e-06; Accession=PF00076.13; Description=RNA recognition motif. (a.k.a. RRM, RBD,
  Pfam module annotation: Pfam domain module=RRM_1::RRM_1; Domain location=143-215::292-359
  Subcellular localization annotation: CTP_CleavageSite=77; ConfidenceScore=5.42e-01
MAAAPSPSVPACSDLLAAVSAFVDAFVDFAVSDIFFPTFPSSSLLPPRPKTPTTFLPSPSWLVAIGDLHGDLPKSLSALRLAGLTHGGAFLPILGNHEVMNISGDFRFVMLQGFHDRAVNRGGGAAEEVEEMLSGDIPPSQTIYLNNLNEKVKKEELKRSLYALCSQYGRILDVVALKTQKLRGQAWVAFSEITAATNAFRGLQDFDFYSKKMRVQYAKTKSDCIAKEDGTYAPKEKRKKQEEKAAEKKRRTEEAQQAGLNAAAAQSNGTGYQASRLGKASQEPPAPPNNILFIQNLPDQTTSMMLQILFQQYPGFREVRMIEAKPGIAFVEFEDDGQSMVAMQALQGFKITPENPMAISYAKK

SEQ ID NO: 59164 - protein, 59 aa, Zea mays
  Coding DNA Sequence Number=SeqID_15789
MERPTSHLFYLRFKCLTNSRKPARYNSPDCPVCTGHVRCSKEARSPELASLGFARQPLR

SEQ ID NO: 59165 - protein, 128 aa, Zea mays
  Coding DNA Sequence Number=SeqID_15790
  Subcellular localization annotation: CTP_CleavageSite=44; ConfidenceScore=5.31e-01
MGEGLLAAASTLRSALPLFGPPEQKSSSSPLLEQVTARRLLVFRCSAGLPPWSGVARTRGGGTRSSVCDGTLNASVFVHCGCRGLNMDVCVGESCFSRKVMSEVSVSRRRGSPSARSALPLTRTFTRP

SEQ ID NO: 59166 - protein, 167 aa, Zea mays
  Coding DNA Sequence Number=SeqID_15791
  Gene Ontology: Mol. function=kinase activity; Cellular component =ornithine carbamoyltransferase complex; Biological process=amino acid metabolic process
  Homolog annotation: Hit_ID=Q6QP54; Match level="QueryCoverage=32%, HitCoverage=29%, E-value=5e-12, Identity=54%"; Hit description =Putative kinase
MALPVDVAGPRPRPGDVGAPPKLGSSLSSVAEAEPEPLGRPESEPWVGRCGVRRLPGLSPSPSPGSGGVEFAVFRALARVRALGRAERSSPSSGSQPESEPWVGRSGVRRLPGLSPSPSPGSGGAEFPIAPLARPDCLSDSLCRVALQSEWRRRRCPSVRPVSGAVK

SEQ ID NO: 59167 - protein, 60 aa, Zea mays
  Coding DNA Sequence Number=SeqID_15792
MARPGRVSSWEGPAAPSSNRRKAAVLEQAPRRPAVAVWPAGDGSSRFSSHAKNDDVDGNG

SEQ ID NO: 59168 - protein, 335 aa, Zea mays
  Coding DNA Sequence Number=SeqID_15793
  Gene Ontology: Mol. function=oxidoreductase activity; Cellular component=cytoplasm; Biological process=multicellular organismal development
  Homolog annotation: Hit_ID=P50160; Match level="QueryCoverage=90%, HitCoverage=89%, E-value=1e-139, Identity=85%"; Hit description=Sex determination protein tasselseed-2
  Pfam annotation: Domain name=Epimerase; Domain location=46-312; Score= -58.2; E_value=0.0078; Accession=PF01370.12; Description=NAD dependent epimerasedehydratase family
  Pfam annotation: Domain name=KR; Domain location=45-240; Score=-67.6; E_value=0.002; Accession=PF08659.1; Description=KR domain
  Pfam annotation: Domain name=adh_short; Domain location=44-214; Score= 94.0; E_value=4.6e-25; Accession=PF00106.16; Description=short chain dehydrogenase
  Pfam module annotation: Pfam domain module=Epimerase::KR::adh_short; Domain location=46-312::45-240::44-214
MPALDLRPEIAHAHQPVMSPSHHGWDGNGATAVPTPMPKRLDGKVAIVTGGARGIGEAIVRLFAKHGARVVIADIDDAAGEALASALGPQVSFVRCDVSVEDDVRRAVDWALSRHGGRLDVYCNNAGVLGRQTRAARSILSFDAAEFDRVLRVNALGAALGMKHAARAMAPRRAGSIVSVASVAAVLGGLGPHAYTASKHAIVGLTKNAACELGAHGVRVNCVSPFGVATPMLINAWRQGHDDATADADRDLDLDLDVTVPSDQEVEKMEEVVRGLATLKGPTLRPRDIAEAVLFLASDEARAEHPIAWWSCHMNEEPFVRGTKATVEAASVTSS

SEQ ID NO: 59169 - protein, 400 aa, Zea mays
  Coding DNA Sequence Number=SeqID_15794
  Gene Ontology: Mol. function=aspartic-type endopeptidase activity; Cellular component=chromatin; Biological process=chromatin assembly or disassembly
  Homolog annotation: Hit_ID=Q8LNL7; Match level="QueryCoverage=40%, HitCoverage=13%, E-value=1e-09, Identity=30%"; Hit description =Putative retroelement
  Subcellular localization annotation: CTP_CleavageSite=45; ConfidenceScore=5.02e-01
MKRTAAVQCSAGACWAVLVQQASVSQDWRSVERPRSDKIRFAAVAAAARPQTNGAPEAVALVRLPAQESDQASRFWFWRRDCDGDLVFGWRHLHEPMPPGHLSPWFSCRQYHIEGAIKQDNRTEIKILDLLSLQYVPCQPVIHLGSRISWKDVLQMILVAQKLLIELALTAENDKGLYLSLVDGASRYKSALAHSFTAMQPCRLFRSIWTKYINSMDCLGPSSLMETAFSQVQCGKIYSNSLTDNTTTDEILLPSSNRWSNREAQSEPGIISPLCSQSCPKQWSKWLLLADWYSASLHSAFGRSRFEVLYGHSCRHLGVTNAKVRMASLIRCLFRRSTLGYQTKARTLVWRVPAKDNSTATADSRAMAAGDQRRRHLSSAETAGVALPVLLVPELSHSSF

SEQ ID NO: 59170 - protein, 220 aa, Zea mays
  Coding DNA Sequence Number=SeqID_15795
  Homolog annotation: Hit_ID=Q6J9V9; Match level="QueryCoverage=29%, HitCoverage=33%, E-value=4e-07, Identity=44%"; Hit description =Putative uncharacterized protein
MAERYQLPRSCVPPTARRKDCEHPPSGGLEGGKARCIREREDVVALQGGHPPFKGDSPYLRPQPSWAESSPTHSKVLPYGAGAGSHTSCKPTQSRRSQTAVRGGASGRRSERRFAFAIMTASKKGPGKGDTPKRILPREGTRLRASLLIRGSKAGPSEGFNSRLRARGLHTHYWSEVRRPAPRKGSTTASGYSGSAPTTDQGFEGWPPKGSQPPQTQSEG

SEQ ID NO: 59171 - protein, 80 aa, Zea mays
  Coding DNA Sequence Number=SeqID_15796
MEDPNAGPHSWKKIEPGATDPKLGKGDGAGHGSGGGDPERHGRDRAGAGAGGWALGHGRQEGGSAAMEMELDRAASVHGE

SEQ ID NO: 59172 - protein, 246 aa, Zea mays
  Coding DNA Sequence Number=SeqID_15797
  Gene Ontology: Mol. function=protein transporter activity; Cellular component=membrane coat; Biological process=intracellular protein transport
  Homolog annotation: Hit_ID=Q5VQ77; Match level="QueryCoverage=15%, HitCoverage=11%, E-value=3e-11, Identity=84%"; Hit description =Coatomer protein complex, beta prime subunit-like
MEHYMGGEGCCVDRLYIYQSGNKYNGRCMILSQASRMPHQALGDTAIYPSPTYLPTSSIDIHATVAKAAELHAALLQGGSAAASIVGAYASARRSLALICLQPAASWVPTITRSGLLAMAIVDYPVFALINPKAAESLADPSEYPNLFEDWQVALTVEKSVASQSFSYEDVSQGFQLLVDANMNHQKCWQMNAGAPCVQLPCSMGFMPSFFCCFRSTCRGITSKMKLPPFHVEAHTLSIRNTTCIR

SEQ ID NO: 59173 - protein, 108 aa, Zea mays
  Coding DNA Sequence Number=SeqID_15798
MGKVLTSDDDMMKPYHGMVQLAVISQLWVEAKVGVSVNGSEVHGKLRHGRDSVEGEADVAAPFARDCGRARRKTRRQTLTPRAHDTAAPGEDAIERSDGRLAREAWRV

SEQ ID NO: 59174 - protein, 156 aa, Zea mays
  Coding DNA Sequence Number=SeqID_15799
MAPKRVSSKAAPSVDEAAKAALLAKKKGKALAHNTPQKACDDEALSKRQRHEHPTLEGTARTCSSGGQPQAPPPCFAPPEGDDTIEDGEVISISAEEQLQLRALRIKNRNLQKQRDILEAKRQRVTVQAKVRQMIWDEEQRAQELEQEITLMQNES

SEQ ID NO: 59175 - protein, 525 aa, Zea mays
  Coding DNA Sequence Number=SeqID_15800
MELQPGHTVEFSVLRISSAFFVAGLRLPGHRFVVEVLQRFEVQVHQLTPNAVVALAKSKVEDLPGLPMAVMCSHYYVAFPQFDVAEDDEDEGALRCAARMSSGRDLVEEFIGYGVWPLAHGWVLSEVCPRQMPNLGQQLVRSPAFSLDLRGRDPAVFVHEVEDGAVRIVGDGILLLLFDKDGQGSSRCGAKAPGNHKAKPTVPGPSKSSAGSRAAASGAGKPPLIEPAKEPRPPSPVRTDKAATGGADFDTDICVDDYLVGEGFFLDWVLNKIMDPRSKFCASGEISLAAAARDMADIVSQQLKHAAAFIDHVVSGALSLESAAENKSRRLTERLAAAEAEKEDLRRQLTEERRDANKACAEAQSVQAEAKLARAEASLAHQCAEKMETRLSSLRDRLNKMEASTRVEVKRTHTQLVDAYRELGARTTPFEAPGQEVVLRFLGWLQEELEVLPTIVTGLMSFASLVTCEGAVNALSREGCGHFEAFDQSDEGFGREIFQVEDPMMKRSAGALFDRMWGPHGRETV

SEQ ID NO: 59176 - protein, 246 aa, Zea mays
  Coding DNA Sequence Number=SeqID_15801
MARDEEVEDLGDLVSTLPEASGVELAPPSDADEGPSATPTPTGAGEDPAPAAVLTGADAPKVVAEPAVEDSGPSQVPMFGPTQATAAVDTDFVVASTVVPADDNLFGSVSECFEPDGESGSSISWMEESSDEGLDYFATLDVAAAETSPRVEASGGLPSASTRYRRRRAVAKHSESEFSRSGRCRRMGMERGRLRVDRTGKRELLSSAIGASIGEGELQNLFEGEELRIMLFNYREMGIIPKVEPM

SEQ ID NO: 59177 - protein, 70 aa, Zea mays
  Coding DNA Sequence Number=SeqID_15802
MVKNFGRKTVQIAMNAVVTSHLLVCLYSVAGFETPPLWIVALEDQSRQDDVAVLWVNNLFASHSPAGHDE

SEQ ID NO: 59178 - protein, 316 aa, Zea mays
  Coding DNA Sequence Number=SeqID_15803
  Subcellular localization annotation: CTP_CleavageSite=37; ConfidenceScore=5.58e-01
MASSPGAAVSWARGVSVCRRVLRRARPQSLANGAATSASPSTESRPWRSLPWTSEPLTETPTSASTLGTIRISSLLSPPQFRVRHQPPHPLSLRRGLLRVRSARDYRRWNYLATIGEALFVDQGTPKCARVQTKTHARAKLPAAPQNFSSDYALRDRPPCAVGSVLHRGNHDGHLSMYQPKMVNTRRGGGIDLPPNRHTQWIYRQPQPQPAEMNPPNPPPGGVDPLVAAQMAVMQQMADTMADMRAQMQQERQEMRQEREDIRQELRQEREEIRQERRAQQQQLQQQLQQNSSNSNKCHCLHHHHQFHLVISTGSL

SEQ ID NO: 59179 - protein, 127 aa, Zea mays
  Coding DNA Sequence Number=SeqID_15804
MPGWPSLDYRHSRELVPPSHTCQEPRCVESREKTATSIETRRLGAGVPYARRTGHTVVLPSERALRALLEGAEDFRGRTVRRFGVEYTGSPHRTLWIRRGPYLAVVCDTCATIPEDNAVGSTRRLDG

SEQ ID NO: 59180 - protein, 205 aa, Zea mays
  Coding DNA Sequence Number=SeqID_15805
MALSPLLLVERRRRGVCKKVKSVPDRPLALCRGSGAALANPALAKPYTRATASLHEGTTRPAEALREALRPRRSQTTPPRPRGLHPAGALARTHRNKTQPRKAGPLAKKCDESLQASANTPFEARGLLSGTIIRGTLKAPNSQLKDSATCAAPTAVPLDRVRLTGSQARPHTIGNSVPPDPGLGLGLSPGRRRTPLCPTQGSDSG

SEQ ID NO: 59181 - protein, 124 aa, Zea mays
  Coding DNA Sequence Number=SeqID_15806
MAPPVDVAGPRPRLGDVEAPPRSRSSPSSVAKAESEPLGRARRRPLAEARAEFESWSRAKRSSSSSGAEPKSEPWVGQSGVCRLSGLSPSPSPGSGGAEFAVFRGLARVRALGRAERSSPSSGA

SEQ ID NO: 59182 - protein, 138 aa, Zea mays
  Coding DNA Sequence Number=SeqID_15807
MTTEALYLVLVGSGAAERMEDDDDGGEELRLRFSAPIFVGTVDLLSLFAMAVRRRPTPTLAPEFWIFLSSPTTSLFPATESGPPPDPLAHGLFEPSLAGSADEPRCEAPLPRWIEVASDGRTERPNFSPPREPEPSPG

SEQ ID NO: 59183 - protein, 107 aa, Zea mays
  Coding DNA Sequence Number=SeqID_15808
  Gene Ontology: Mol. function=carboxyl- or carbamoyltransferase activity; Cellular component=ornithine carbamoyltransferase complex; Biological process=amino acid metabolic process
  Homolog annotation: Hit_ID=Q8SA97; Match level="QueryCoverage=100%, HitCoverage=20%, E-value=2e-15, Identity=46%"; Hit description =Ornithine carbamoyltransferase
MAPPVDVAGPHPRLGDVEAPPRSRSSLSSVTEVESEPLGRARQRPLAEARAEFEPWGWVKRSSSSSRVEPKSEPWVGRNGVRRLPGLSPSPSPGSGGAEFAVFRGLA

SEQ ID NO: 59184 - protein, 71 aa, Zea mays
  Coding DNA Sequence Number=SeqID_15809
MVKNFGRKTVQIAMNAVVTSHLLVCLYSAAVVQAPIPAVAELPELFQLKCLSPALEARPHLNGNNPSIPRI

SEQ ID NO: 59185 - protein, 302 aa, Zea mays
  Coding DNA Sequence Number=SeqID_15810
MKGTHPHHLGSGMIKDSLMEDSLAIRTSYCSEVEGFPHLLRSCALRVGIRKKPEYVWKEYLESGMEKCSMAVYLGESRYYLNHPSFQVTFTGYRFPDTCQNVARTALRQLCQNYNKVIFETPLRYFPPSNKNTPTWRKRLQALSGGDPIEDDPTIVYMAGYLHTLDNQYDDLTLHCTHLTSRVESLEQKVRELSREKASLQESLATAEGEETNTREAYRTLKMDYDKKLKKLAPARKIHKKTKSQGCQTEQKEEAPPTLPPAGLRNSSDTEEMSLASLDDLLKEFGDTLEKEFGSTLDSTRM

SEQ ID NO: 59186 - protein, 70 aa, Zea mays
  Coding DNA Sequence Number=SeqID_15811
MVTVARGGMGSSQDPWSKFFFWRGEGRGASLAAAVKDVAASVVQQLKHAATFAERIASGALTSEFSAERR

SEQ ID NO: 59187 - protein, 370 aa, Zea mays
  Coding DNA Sequence Number=SeqID_15812
  Pfam annotation: Domain name=Transposase_28; Domain location=3-155; Score=-53.0; E_value=0.011; Accession=PF04195.3; Description =Putative gypsy type transposon
MDESGVRIGDASLGYFCNSVGRAPGAEEISEPEGELIVFEAFFAADVRLPTHRFVVEVLRRFEVQVHQLTPNAVVALAKYVPASVRGQPSMEVFAKNYCLHWQKMKIGNKIAQFGSCTFTPRTGKTLAEVVEIVPCARNKWVEAEAAKIVGKYVPKTETLRSWDIRGSNVRLNRVFELNRLPYAGYPGDDYADVAVRWGKQVMPTADEGPSWDKAPGVAVKKSKLGTTAEGLRASNRFVAELLETCAVPGETMSSPELRESSARMLEVTGVREKDRQDAPRKRRAFARLAYPRREAKMARPSVKPASPSVIMPPPASPTHERRLPSPPHAGKGGLAFVEAFLAQEVYLGGVGFLPFFRSYKFRRIGSLFR

SEQ ID NO: 59188 - protein, 166 aa, Zea mays
  Coding DNA Sequence Number=SeqID_15813
MKEKRKRNLTSFSENWDITAPALWGRTVHGPLFVVREWEVQGSSVGPSSCLLGTKGVEQASVWSMPLAYPAGLADVVFVCAMRGGSRRAKGGVFAFAPTFALQGTSSTKSAGAKDHHVMVKTLPSLEVTVCCRRYVAMSSSSSAASASSAVPSAEDTLSDLAVIEL

SEQ ID NO: 59189 - protein, 218 aa, Zea mays
  Coding DNA Sequence Number=SeqID_15814
MLVDYTTVINRPSVSVEGSMQQGDESVVEVTPAMMQSLQMARLTCHRAAQWALRQARGQKGDHSLTCMASNTGHLQKTSNNKTLMFPHLQQHGFENPEYRVYFRKSYPTKEKDSQGYASLTESRYQGMVINFKRPSDFCFFSKPNLGNGALAVGHLFAQTGHERCRLTKLSVRLAPPIPYESKPCLNCTNPALGSPTRDDGELHGQIKVFQTIEHDLA

SEQ ID NO: 59190 - protein, 94 aa, Zea mays
  Coding DNA Sequence Number=SeqID_15815
MTGTYPWRKNRIHGEGGVASAAGVGERGGVGRKRGHNGQHCDGGKCVGARNRLGDADDQGMRGEDGDVTAMESRASREGATAGFCGVMKSEAGE

SEQ ID NO: 59191 - protein, 120 aa, Zea mays
  Coding DNA Sequence Number=SeqID_15816
MARPSLGRLLWASDSARPLHMDGSGAATWPEKMIYPKVSTASPDPHGEVPDPCIYRPGLRIMLLTGTWRTTRKNSATTRVEWDTLGQVIRKARERLPYPVRGKRGGVAAEYREVLGSNCL

SEQ ID NO: 59192 - protein, 500 aa, Zea mays
  Coding DNA Sequence Number=SeqID_15817
MPALAAVRDEAGAVSRRLKEVEEALSQAAAFADRAASGALTAVVSAEVERLRTQHADAVAALEGEKTDLRRQLAGERREANEALAQAQAALAEAKLARAEGNLARERAEQLGERLSALQSRVERAEAAARTEAERTRKQLMDSYRELGAQTAKFKVPDREPGLCCLEWVQEELQALPTIVEGFMSYASLVTCEGAMNALSREGCRHYEVFDQADEDFERDIYKVEDPIVKESAGAIYDRMWGPHDREVVRERAETARAQAARGERVDDFGALNSALPDPESNPAEPLLPAEARPPETAEGAPNAPAAAAPRAEGPATVAAEAPAEATAEAPATAGSSQVQEFGPAHATATTNFLAASTVDDGNKFDGSASEFFDFTDSGSSVEWTEESSEEDLDYFAALDVAAAEASPHAADTEDVPGRWELFRRLSRCRVWCPRLYMCKGLYDEVVCPRTFGYACEGVAYLVRCICYASSGCALGHFCADSLRGRLRFFALVVLVRLHP

SEQ ID NO: 59193 - protein, 211 aa, Zea mays
  Coding DNA Sequence Number=SeqID_15818
MWALSIGSILFPLRFLSTECEVAQVYRSRIVVFSWLSVNPGRICVHASGALAADPTRQSSFRPRTDYTRCVVDPSSASLAAPRRTPVGTTNHRGFRAETEPFSCATDTEFRVLLRGINWHVPALAHLIRVGDRCRDSHSDWKYVPWAPRLDTSPALRRRNGSIAVAALGSLLSGVASPVRDASVGTEAMATPDEAEMGTGTDAAELEHGAA

SEQ ID NO: 59194 - protein, 148 aa, Zea mays
  Coding DNA Sequence Number=SeqID_15819
  Subcellular localization annotation: CTP_CleavageSite=75; ConfidenceScore=5.64e-01
MGAPWAWSLASLRRTAALLLQASAPSSALQSVRATCSLHARRLVPAPRPSTTCSGAACVFSHGRLQLPARLTPARSPAGSSRAVVFPAPARHPLFLHCEIVRLHQFVGRLRQSPAHRGLVTNPKPPDSIRQVLSPHVTGASASSPRVS

SEQ ID NO: 59195 - protein, 252 aa, Zea mays
  Coding DNA Sequence Number=SeqID_15820
MVSYGEQSTPRGSDVAGVCPNAPRESPILPTVVMQGGSEGELDRGVLTMDFSTGMSNFVEARHPCMVIGTGGHTVEVQVTYPPSCQARDRDTSEMSERQLLSPPNPTEKHRCGNSSILTRGAACDSLFEGKGGDRGFNLYSNGCSRSREVSIEAIPDGSPRNTVAFVEARFDPELGGDLGRGAQVLVMACAESGCNCAEIVSVARDEVGEDRTDEAGPHDGDGEGASVRWLIHGPDVSVTICWTRGLGWRGG

SEQ ID NO: 59196 - protein, 362 aa, Zea mays
  Coding DNA Sequence Number=SeqID_15821
  Homolog annotation: Hit_ID=A2YGC2; Match level="QueryCoverage=48%, HitCoverage=74%, E-value=2e-07, Identity=26%"; Hit description =Putative uncharacterized protein
MVDLRTIDLYSYLDLSVFSKMARIRCTARKSVIPFLPSQLGECPLCRTVLGQSIHLERLHRHLHEEQEHRHQEQEQEQQDYSPSPQHEVESERPPSPTTQPEMPPTPPQGIPAAGGDPDGDGDDDNDVDGSSSHDTERSEEPEPEGWIARAITHDTARECHFHDALDTLLHRAFDRHTWSIEYHCVVYQHRRGLYPDQWEATCWVRRADDDLRGAEAFSEHYSFTERDTTEEAMQDATRWAHSQYCSLFSGVADGLDLKYYPRRSTGSAGGVIVSPVGEGNPRLSSMVNLVVVLNIELDHALDELGKVRAEVAELRVECAACHYLDSGSPAPVGIQHPYRSPPRGCFDYGTPDCRTRIDLDP

SEQ ID NO: 59197 - protein, 269 aa, Zea mays
  Coding DNA Sequence Number=SeqID_15822
  Subcellular localization annotation: CTP_CleavageSite=82; ConfidenceScore=5.17e-01
VDPACRRKPERPLSLALSLLRGTDLSAPLLSPTPAFPLSTPPTPPVSSSLTSRPRSPRRGRAHVRAFFGYNRALAPLLNPTSCSSTSPLPFAPSAQLSRPLARSAHANREPPPPSADVHRLFRGRRCARASSSAIVSVALPSATRDTLRCALPLSGLSGPRSPEWFLPSQSSATVAPSRPCASAVAPCLQRFPSSALWCSHAGVVPSDESARSPRARLGQPQDSDNEQSEVPECVVGDLPEQQPGEGKVLETGISVVLTVKSSLGILFD

SEQ ID NO: 59198 - protein, 107 aa, Zea mays
  Coding DNA Sequence Number=SeqID_15823
MGWVDSSKGWNPQKVVNPCRAIASIVSSARYQKDSESSERQPGYDQLKGPRFLGLDELGRAEGQPALHRRQRDSSETRVRTGRQHGRADMTQRCESAKDANLKGGAT

SEQ ID NO: 59199 - protein, 250 aa, Zea mays
  Coding DNA Sequence Number=SeqID_15824
  Subcellular localization annotation: CTP_CleavageSite=38; ConfidenceScore=5.07e-01
MESGAQLGHRPRRAGVQRRRPTNWCSLAFSQWRNRGCRAGAGKTTTREERLESELELGAQGAAAGHGRTRTQHQSKQQRGAAQGQGSERGGSRWRARSGELSREPTLGEEEQPCVAEKPETKPRAPPTELGRASQGGRERVEGSSGQGRAARDGEPRARQGRKETSAGSLAHGEADSRGSFARRTKGAGEGRARKMRALEEDEDDRVFVTRSDEAGQLEEQTRRNIRGGRESTTGRWEKRLDLYPARSNR

SEQ ID NO: 59200 - protein, 122 aa, Zea mays
  Coding DNA Sequence Number=SeqID_15825
MRIGQGLATTPLLLSCWSSIPLDRPTRWQGGRPSHTINHILKRTCKNYATSKAEYTNTHLDLPGYKGSSSLISCENQTIQIEFLNLAREILDGRLRSWLLDFLVDNSLLRDEHVLSVSEVAI

SEQ ID NO: 59201 - protein, 43 aa, Zea mays
  Coding DNA Sequence Number=SeqID_15826
  Homolog annotation: Hit_ID=Q7XBD4; Match level="QueryCoverage=97%, HitCoverage=4%, E-value=1e-08, Identity=71%"; Hit description =Cinful1 polyprotein
MSKDQLADNFAYNSLKGLILSKALKDQKDAEDESYRIALGNLC

SEQ ID NO: 59202 - protein, 124 aa, Zea mays
  Coding DNA Sequence Number=SeqID_15827
MARHSVPTHINRPPSIPCQQIRAHRLGVQCLIDPDCRRAVTALVPTITGMGDHVSGRVRGKVHCQVQLGFQTTPTPKCTFNPTIIKYGKNSINNRLCIKPGLAFQSSGRQILSCSSGAGSGATS

SEQ ID NO: 59203 - protein, 221 aa, Zea mays
  Coding DNA Sequence Number=SeqID_15828
MTSHGSSDDGNALSHTDGLAREGFPRILWEVLQGAGYTTPPQYAVQQFEKHRVPRCRDTIEEIALHGLTTFCGFHPLELSTHPIGLFPVEREDDPMWKDRVEHAKDICAIYPGQTAHLTVRCMNALYRLQVMRGEAMSHLMALLEATKITLDNREELVVDLSTEMLAEANEHLDMHHQEIQDMEANEDVDIEGGEEPASSVDTAGSGRPPSPESSVASFAH

SEQ ID NO: 59204 - protein, 200 aa, Zea mays
  Coding DNA Sequence Number=SeqID_15829
MAVTNELSAQGGCLPRVRTQERLEDGGEAVKPRVNGDGLRLRKKCFGERGPNEPERERMNRRVSRAEGDAAELTEGKGAARAQRRSRNGGSLCGVADGLDLKHYPRRSTGSAGGVIVLPVGEGNPRLNSMVNLVTVLKIELDHALDELGKVRAEVVELRAERAARHYQDGGFPAPDEIQHPYRSPLRGRFDYGTLTAGPR

SEQ ID NO: 59205 - protein, 56 aa, Zea mays
  Coding DNA Sequence Number=SeqID_15830
MAVGVSEALYAKAVSPDLLMGNRWGRLMISGGHGCWSDLVVHLATGLDYRVGPYLG

SEQ ID NO: 59206 - protein, 23 aa, Zea mays
  Coding DNA Sequence Number=SeqID_15831
VFVDPGVLQETSIPACAKQHNLA

SEQ ID NO: 59207 - protein, 57 aa, Zea mays
  Coding DNA Sequence Number=SeqID_15832
MGTGDQLHHGDVLAAPPHELSCGGCDTARVSLHTFIAQQVVGNNVHELIKGGSSREV

SEQ ID NO: 59208 - protein, 217 aa, Zea mays
  Coding DNA Sequence Number=SeqID_15833
MADYLDYSRILEATEPSGIVDGLFSGHGNRRFLGSWSIGTSPVGEVGGGDPGPAEAGAGVAGHLPHRRGRRTLLRRRRAKLNSPEDAAAHRARDAEAAFAAARAGPPAALLDSQAVGDDMTDYLDYSRILEATEPSGIVDGLFSGHGNGRFLGSGFEMGSAAAGADEGWWGRARAGATEHIHAHRRNNRTEQRQKNEVRSSCIHGTPWAVATITGLK

SEQ ID NO: 59209 - protein, 182 aa, Zea mays
  Coding DNA Sequence Number=SeqID_15834
  Gene Ontology: Mol. function=nucleic acid binding; Cellular component= nucleus; Biological process=mRNA processing
  Homolog annotation: Hit_ID=A2ZSE5; Match level="QueryCoverage=20%, HitCoverage=13%, E-value=3e-12, Identity=91%"; Hit description =Putative uncharacterized protein
MAEVASRVLGVIEESGGGASIFRPPGANKNLQWFCVVHNLLVDSYTTEKALKKVKCLPTLVPQTINVTDVTMEDKGDGELEKQSEQMPSDVQQISKGVMVTGLPSSASWQDLKDHMRCAGDVCFSDVYREVGASSMSIILQYLVLTCGVCETARVSSHTFIAQQVVGNNVHELAKGGSSREV

SEQ ID NO: 59210 - protein, 99 aa, Zea mays
  Coding DNA Sequence Number=SeqID_15835
  Subcellular localization annotation: CTP_CleavageSite=12; ConfidenceScore=5.22e-01
MGSYKKSKGKPKCSLVWRTGLSGVPPDSVRCTRGLQAELLTFGNSQRRFAIIHRTVRLAKRMRKLSSSLLALSSSLEVSYLVEDLDFTFFLLSSFVKVA

SEQ ID NO: 59211 - protein, 152 aa, Zea mays
  Coding DNA Sequence Number=SeqID_15836
  Pfam annotation: Domain name=IQ; Domain location=48-68; Score=24.1; E_ value=0.00051; Accession=PF00612.18; Description=IQ calmodulin -binding motif
MGDLWTNIRTDLTKMQATLQKVEQGLLQIKAAVQHEQHQLALSARLRTSAVVGIQAAGRGFLARQKVREMRRQMLEAALVMVDLGTRRRDLTLSDGPSAVAPVDSVFEHPLCGSSRASCLSRKGVVSGPKETHGGAAVAAAMGLQGGLDKDS

SEQ ID NO: 59212 - protein, 679 aa, Zea mays
  Coding DNA Sequence Number=SeqID_15837
  Gene Ontology: Mol. function=phosphoprotein binding; Cellular component=smooth muscle contractile fiber; Biological process =protein modification process
  Homolog annotation: Hit_ID=Q2QU66; Match level="QueryCoverage=96%, HitCoverage=96%, E-value=0.0, Identity=62%"; Hit description=Myosin heavy chain, putative, expressed
  Pfam annotation: Domain name=DUF827; Domain location=27-574; Score =433.7; E_value=2.6e-127; Accession=PF05701.2; Description=Plant protein of unknown function (DUF827)
  Pfam annotation: Domain name=Pox_A_type_inc; Domain location=123-145; Score=7.1; E_value=7.8; Accession=PF04508.3; Description=Viral A-type inclusion protein repeat
  Pfam annotation: Domain name=Pox_A_type_inc; Domain location=194-216; Score=5.7; E_value=12; Accession=PF04508.3; Description=Viral A-type inclusion protein repeat
  Pfam annotation: Domain name=Pox_A_type_inc; Domain location=364-386; Score=1.1; E_value=58; Accession=PF04508.3; Description=Viral A-type inclusion protein repeat
  Pfam annotation: Domain name=Pox_A_type_inc; Domain location=95-117; Score=2.7; E_value=34; Accession=PF04508.3; Description=Viral A-type inclusion protein repeat
  Pfam module annotation: Pfam domain module=DUF827::Pox_A_type _inc::Pox_A_type_inc::Pox_A_type_inc::Pox_A_type_inc; Domain location= 27-574::123-145::194-216::364-386::95-117
MKANMGTKARPLSVDADKGEIGEIDTRAPFESVKAAVSLFGEVKVSSDISAARKPKVPQAEARSLPRQRTDAYAWPGMPGVSHRAAPDRVLAKETELHLAQKELNKYKEQLNNAETTKVQALSELEKAKKTVEELTTKLDVVNKSKQLAIQATEDAKTRTKQLEGGSTNECLGTDGPLRQELESAREQHAIALAELDAAKQELRKLKKDFETSLDMRLCAAQQEDESLHTTEANKEKANQLLGEIAEIQESLMHVKAATVQAHEEEAQILAEKDVARATYKQALEETQKKLLSLRNDFDPAAYDSLKEKLEQTNSEVASMQKKIEDARAQDLESVAVVSTELDDAKEMLQKVAEEESSLRSLVESLKVELEAVKQEHNQLKEKDTETESIVGDLHVKLQKCKSVLEAAVAAESKATSASDDLMLALQQLSAESNNALQEAEIMQKSAAELREEAKKARAELAEAEQKLQLTLKEAEEAKAAEAMALDRIKQLSDRASAARASTSESGANIAISKEEFESLSRKVEESEKLSEMKVAAAMAQVEAIRASENEAIKKLEAARKEMEDMELATEEALKRAEMAEAAKKAVEGELKRWHEKEQKKTAEAAQPSAGAEELGSAASPPVRQTSAGKASEKNEGHQRSSKALLKRSFMLPNIASMFHKKKSHPSSSPSHLPGEKSV

SEQ ID NO: 59213 - protein, 36 aa, Zea mays
  Coding DNA Sequence Number=SeqID_15838
MARAGRRGPRSAGWGWGTWEGRSEMRGPRGVFGMAT

SEQ ID NO: 59214 - protein, 193 aa, Zea mays
  Coding DNA Sequence Number=SeqID_15839
MVKSPELGRVQARGAPRSPELARTGEKDPKNSLVGFRTRDRDQRRENSRGKAPGGSRFLTLGRSSRWLGMASGELDGCHSGRGSPASVSGEGRARERVSLREMGQGRESGCGRCSKGSWGAWAGDVVRFLTCVRAGPQRFAGKAELTGRPHDAARENRRMEGTPRCADKLGPLCRERTRARERGQLAPTSQPH

SEQ ID NO: 59215 - protein, 106 aa, Zea mays
  Coding DNA Sequence Number=SeqID_15840
  Gene Ontology: Mol. function=catalytic activity; Cellular component =vacuole; Biological process=metabolic process
  Homolog annotation: Hit_ID=A2WP08; Match level="QueryCoverage=65%, HitCoverage=7%, E-value=5e-26, Identity=84%"; Hit description =Putative uncharacterized protein
MALDGLCVWCVYYLGCLCILCRKLESSLFKIGIIIEDKEVVSSIMDGRPWEAGKFSLSLRLSLWAEHLGLLPGEVSCIMDPVDDSAYKNIWMATAKVSISPKFCSS

SEQ ID NO: 59216 - protein, 341 aa, Zea mays
  Coding DNA Sequence Number=SeqID_15841
  Gene Ontology: Mol. function=catalytic activity; Cellular component =endoplasmic reticulum; Biological process=metabolic process
  Homolog annotation: Hit_ID=A2WP08; Match level="QueryCoverage=56%, HitCoverage=20%, E-value=7e-98, Identity=93%"; Hit description =Putative uncharacterized protein
  Pfam annotation: Domain name=PLDc; Domain location=261-288; Score =41.5; E_value=3.1e-09; Accession=PF00614.13; Description =Phospholipase D. Active site motif
MSKINKSWALAAGLAEGGGGAVEVRGHRSVEGGGGAAQWPMARRSGLWVEGGGSRDLYQYTSLLVKHLVQPEDMVEQLGLRLSPGRGRSHMGFDAAVYGWGRGSGVFLTCVVRSVGPWSAGTAQIEGSIHNAYFSLIEKAEHFVYIENQFFISGLSGDDTIKNRVLEALYRRILRAEKEKRRFRVIIVIPLLPGFQGGIDDGGAASVRAIMHWQYRTICRGPNSILKNLYDVVGSKADDYISFYGLRAHGRSDDGGPLVTNQIYVHSKLMIIDDRMALIGSANINDRSLLGSRDSEGWWLVMAWAGARRRRRRLSVRRQLALVVGARAADDSRHRLWHVTV

SEQ ID NO: 59217 - protein, 42 aa, Zea mays
  Coding DNA Sequence Number=SeqID_15842
MEQHRGQKDLHMVFIYLEKAYGKIPKKGFLTLYLFSEKVVKI

SEQ ID NO: 59218 - protein, 339 aa, Zea mays
  Coding DNA Sequence Number=SeqID_15843
  Gene Ontology: Mol. function=phospholipase D activity; Biological process=lipid catabolic process
  Homolog annotation: Hit_ID=Q7F0T4; Match level="QueryCoverage=91%, HitCoverage=27%, E-value=1e-123, Identity=74%"; Hit description =Putative phospholipase D-like protein
  Pfam annotation: Domain name=PX; Domain location=48-207; Score=9.3; E_ value=0.0084; Accession=PF00787.15; Description=PX domain
MTGEEEQEHGGHRYVRMPPEPPEPEGLAAASSASFRLPESVRVFDELPRARIVQVSRPDAGDITPMLLSYTIEVHYKQFRWLLYKKASQVLYLHFALKRRAFLEEFHEKQEQVKEWLQNLGIGEHVPVVHDDDEADDVHVPSQHDENSVKNRNVPSSAVLPVIRPALGRQQSISDRAKAAMQEYLNHFLGNLDIVNSREVCKFLEVSLLSFLPEYGPKLKEDYVTARHLPKIEMDSKERYCSSCCFSFCSSSWQKVWAVLKPGFLALLQDPFDPKLLDIIIFDVSPCTDRDGDDQTTLAKEIKERNPLHFGFEILGSDELPLDPIAKTLADFVQQVASL

SEQ ID NO: 59219 - protein, 259 aa, Zea mays
  Coding DNA Sequence Number=SeqID_15844
  Homolog annotation: Hit_ID=A2XFR6; Match level="QueryCoverage=67%, HitCoverage=49%, E-value=5e-11, Identity=30%"; Hit description =Putative uncharacterized protein
MPLAPPQGIPAAGGDLDGDGDDDDAGGSSSHGTERSEEPEPEGWIARPITRDAARGCHFHDALDTLLRRAFDQHTRSIKYCCVVYQHRRGLYPNQWEATCLMRHPDDDLQAVEAFSEHYSITERDTAKAAMQDATRRALSQYCSLFSGVANGLDLKYYPRRSTGSAGGVIVLPVGEGNPRLSSMVNLAVVLNTELDHALDELGKVWAEVAELHAECAARHYIDGGSPAPVGIQHPYRSPPRGRFNYGTPDCRTRIDLDP

SEQ ID NO: 59220 - protein, 217 aa, Zea mays
  Coding DNA Sequence Number=SeqID_15845
MESGDHLPRLRQGPSPGVGRGGDLLLRPRPKVILALNAPAIWSVGEAIWPRLLHNEACSSWGSGETRNPRLLCDEPEPEAAVSAWTEVEILPPVSPSEAEPDSAEGGNDAEGAAAPSIDDLFVGSRIVYLSESYFSWEVMSEESLGSVGLDAYVYSVVFKILLSKQSKSAKDVLAKRLLPRKILTQRGIPPSSPRGRVGLYRGKADPSLTVRLYLCM

SEQ ID NO: 59221 - protein, 103 aa, Zea mays
  Coding DNA Sequence Number=SeqID_15846
MGAPENAERGEKGSAAAQLTPVSNCAGSGAVLGDLRACEGCSPRVRTPGRLENDGGAVEPRVDDCGASTTQELLRVFNSNSIQVSNSNQIKYVQQFKEYLGSI

SEQ ID NO: 59222 - protein, 159 aa, Zea mays
  Coding DNA Sequence Number=SeqID_15847
MAQRPYVRLCPLAYVTGSIGSSLERGAEAYAIWSGHVSTPNPRLALIKVRVLLLLESRDLVVSDLGPTQGGPGPVSAVQSVLMEVMDPARRFGLCIQGSGTFPWGSGPTFDTMEYIVSSGHVVAPVLPTWRGQALFSTWLEAVAWTPRLHTAVSGTHDS

SEQ ID NO: 59223 - protein, 384 aa, Zea mays
  Coding DNA Sequence Number=SeqID_15848
  Gene Ontology: Mol. function=RNA-directed DNA polymerase activity; Biological process=RNA-dependent DNA replication
  Homolog annotation: Hit_ID=O48967; Match level="QueryCoverage=79%, HitCoverage=100%, E-value=4e-48, Identity=60%"; Hit description =Putative uncharacterized protein
MCRLTIKCALSTLLTSGVQAILQAGGMMVQIVEHRTETSEDFLVEEEAASSTPRVPNRLVPDILDSIKGNSGGVVSARELLRHHPSFTASPGAMKQWRDDVDRLLGMARSGSTRSRIWSSRRQHEAAVSVRSPSVRGAQTDDLRAELNRRRAGEDAWVSLERARERRQNFEGREDARVSLERARERRLNIEGRNLDEDFVAVAPQTPIGAWFQAANFASAYQRHGVEAHLHVVRQEHRETLWTFISRFTQRYEELYPDGKNKKTKNRGSERPPSAAPVVAAATGGRNERNKRPQPQRGNSGSCPVHPNSRHSVVECREIIELVKRVSKQRKQTSKDGSPPHRQPCKERVDSGEVAMGEPDLGYQSPEGVLKDVLTGDSDSSDDN

SEQ ID NO: 59224 - protein, 573 aa, Zea mays
  Coding DNA Sequence Number=SeqID_15849
  Pfam annotation: Domain name=Transposase_28; Domain location=265-445; Score=-39.7; E_value=0.00099; Accession=PF04195.3; Description =Putative gypsy type transposon
MASTSPISRVDMAHLMLRWHIACSWPCGSIGSPPEWGAEAYAIWSVHVSAPDPRLALIKVRVLLLLESRDLVVSDLGPTQGGSGPVSGVQSVLVEVLDPAQRFGLCIQGSDTFPWGSGPTVDTMEYIVSSGHVAAPVLPTWRGQALFSTWLEAAAWTPCLHTVVRGTPDSGYRQWPPSPPQRRKRAYRWGQKLDWRSACCFYALADTIIGAPPKEDDSWARAPMPETGLLVSAGMKRRDEADAKENDSWARDPMLEVGPLLLAGMKRRDAAMALLGPPERLQPEVALNLVRNLPGWGVPAFARRIHVGASPHGDLAAGEFMLFVSNLPSGLALPISSFFLLLLEELGLQPQHFTPCFILQAAIIAYLCKMSVVATLLPPAFGFKDVHQPYGGGERVELRLHLSRSTCRGWIPAYLKELATTTGGSLDWDLDLNTASARERLRYGTRLSGYTSPDHPRRQASILQNRTLGYRTHRTIAPNIRAVGPSYFHRGVLNCKPGYSIRMSSYQQGWETVWVDQHAELMRANLTGLAYTDRHNFSCGEAGTSGSAYFCHLEGSFPTGGEFVEPFSVQYSP

SEQ ID NO: 59225 - protein, 109 aa, Zea mays
  Coding DNA Sequence Number=SeqID_15850
  Homolog annotation: Hit_ID=Q2QRH1; Match level="QueryCoverage=25%, HitCoverage=4%, E-value=2e-07, Identity=85%"; Hit description =Retrotransposon protein, putative, Ty1-copia subclass
MRKWHKKKRIKIKTMSHLKSKTLIKEEMKWIKKKMSKKFKIKDYRTQESTKQFNEITPSTPYFVTSTRGIEDALRDPDWVVAMQEELNNFTRNEVPSGYSTTNKMSMVW

SEQ ID NO: 59226 - protein, 32 aa, Zea mays
  Coding DNA Sequence Number=SeqID_15851
MGSGHSTCFVECSRGDVGNMEDFEEFQDYDEF

SEQ ID NO: 59227 - protein, 158 aa, Zea mays
  Coding DNA Sequence Number=SeqID_15852
  Homolog annotation: Hit_ID=O48967; Match level="QueryCoverage=66%, HitCoverage=82%, E-value=1e-17, Identity=69%"; Hit description =Putative uncharacterized protein
  Subcellular localization annotation: CTP_CleavageSite=38; ConfidenceScore=5.32e-01
MKQWRDDVDRLLGMAHSTSTRSRPRSSRCQREATTSVRSPSVRGAQTDDLRAELNPIGGQGDRNKRPRPQKGSSGSCPVHPHGRHSAAECREIIDLAKRVSERCEQSSKDGSPPRRRPGREKVDDGEVVAAERDLRYQSPEGDLKDIFAGGSYSGDDN

SEQ ID NO: 59228 - protein, 223 aa, Zea mays
  Coding DNA Sequence Number=SeqID_15853
MGVGEQPAPLTGPGEDPAATVVSAGEDTPVAVVPADEDPAAPAAPSQVPTSRPAQATHTDDINFVAAANAMPVNENLSGSETGSWSSNEGEFGSPFSWTEESSGEDLDYFTTLDVVAAESVPRLEVREASDPLAGARTEEHRQRRVVSKHNVGEMSRSGRRRRMGMERIRLRVDRGGQRDLLSSSSGTCIWEGGLRNLFEGEELKMMLFNFREVGLIPKVEPM

SEQ ID NO: 59229 - protein, 752 aa, Zea mays
  Coding DNA Sequence Number=SeqID_15854
  Subcellular localization annotation: CTP_CleavageSite=23; ConfidenceScore=5.20e-01
AHHYGPNHTWASPDDERARAFVYAMRRRSRRAKGGVFAITPTFALRGTSSTKSAGAEDCRWMKSGPHQADRAPPPTVRCNVFFFVCCECVIGRAVVRGYFERFGGDGVAAWPYRGVRHFEDFLGPRAGDVAARVHQLTPNVVVALAKYVGRLLPTAGSLWRNKWGNCWDFWFYVSSGDVEDLPGLPPAILWSHCYVAFPQFEVAKDDDDEGALWYVARLSSGRDLVEELIIYGVWPLAHDWVLGEVCPHRMPTLGDQLVRSPAFVVDLRGRNPAAFVREVEAEAAKIVGRYVPRTETLRSWDIHGSNVWLNHVFEFNRLPYVGYPGGRRCRCCCPPGKKGGDDGRRRPFAGISAERGRQEEEIRYNGCGVEGFRMFCCGFIGDLRGSRIDDVFSRAPGIFCANAEGYRGSPRNVPIPQAAGEDMFTYRLAREMKIFPYGRNVAAVVSAVMEKDRQYAPRKRRPFARVGDPRREVKMAWASVKPAAPARTCLRLACPAPACRSLPCPHKSEGLRRHRVLLRRRWVAPKSPWIFPWRITLWARSRYSTPTQGGDMLVSFLNKVWVSNVTMVQERSLGNWLLSRRRWQLAVVTGTNGSSQDPWSRFCASGEISSATTTKDMVSSVVQQLKHAAAFAKHIASGALTSKFAAERRRLEGRIERLRTQHTEAVRDKSIAENKSRNLMEKLLAAEAEKEDLGRRLAVEKEDVDRARAEAQPARAEANLALQRASNAESGHRSLCGYLDKAEASTRIGVD

SEQ ID NO: 59230 - protein, 227 aa, Zea mays
  Coding DNA Sequence Number=SeqID_15855
MARLRHTARKLVIPFLPSRLAEHPLRHPVTGQSSHLERLHHHLHEEQERQRQELEQQGSSSSLQQEVESVRSCSPVPLLEAPPAPPLGIPASGVAIGGDPDDEVVGFTRTTGRRLVWCTLWRIVSGVQGSAQTITPCLSGIQLRRPYKMPHGVRFRTTAQCSVGWSMGLDLRYYPRHPSGSTGGVVVSPVGEDNPRLSSTVNLADVLNTELDHALDELSRARAKIAQ

SEQ ID NO: 59231 - protein, 470 aa, Zea mays
  Coding DNA Sequence Number=SeqID_15856
MEEHASRWGAPVSSRGIHVKVVSACDFTVGERALVVVSPILSSSCYRWRGATPWGLASFHHHSASRIFLTQPGCSPLPVVIQKDDYQPCGGEKQAGLQPPSCPQLQVCSSFVLGRRVCRVGARLHVGSGWLLPAMSGGEGRLPSVALSAAARAERGCPSTAQAMVASCAGWPHPRLLPRHRLYWEVVQDVVRRAGGGDILGWSCPHSRSEDRSEDLFVRAGAAAFAEAAVAVGADAVASAGEPLGACYPAGLAGVEVVHSYRNGAGVPLVRECNDICLRAKCNNTCSQYGTRLSGYMISRPPKRQVVVERAGPRYGTWLSGYMGSGPPQETNVHSLALVPRLRTTLWNEARFSRAGPQAVGPPYFRVRGPNLQAWLFNSDVAMLDRWNRTGGLAERPIVRVHGGRPTGLSYTAPLGMVSAMGLSPNPGFPSVFDTGALVSGYDHFCIYMSATRTRVGPKGPPEERRASAL

SEQ ID NO: 59232 - protein, 256 aa, Zea mays
  Coding DNA Sequence Number=SeqID_15857
MAPGDAVELGGCRNNSLAADNAPGDALDGVRDVCTTVCCRAACTAGVTGAVRLGACGEASCGREDGCSAPLRTDSQSTNRLVRRAVYWMTLTPPANGLDKAHLMLRGHVACQRSGRRHIFSSINAGAARLLVRFGPVTYVMGHKQRVSACAGSGEQGLHTCQHRTPAHTKVLLVPEPCRVSDLLGGSGPAQSSAWLGDVAWVQCLHAEGEGTPDLGGKWASGAWGLKGRGRAEVARERADVGASKARDVGGRLGTG

SEQ ID NO: 59233 - protein, 352 aa, Zea mays
  Coding DNA Sequence Number=SeqID_15858
MPRTRVGPRAEAAGLFPLASAGGGVWEAAFPCTSARDAPAPPQGIPATGGDPDGDDDNVVGSSSHDTELLEEREPEGWIARSITRDAAARVPSTTLSTPYCVGPSTDTLDNDLRGVEAFSEHYSITKRDTVEAAMQDAARRALSRYCSLFSGVADGRDLKYYPRRSTGSAVGAIVSLVGEGNPRLKNMVNLVTMLNTELDHALDELGKVQAEVVELRADCAARHYLDGELTLGAMDVLMIRNFGEDQQGLGKGLGVEEEEQGRHNRKEIKQELALVVRSIAQCTVDNQRRSGDDEEARIPTDFDECVSRQDLEANNKLLKEQMEETVHKSVHDAFINMDLGRTYERLDRRLS

SEQ ID NO: 59234 - protein, 35 aa, Zea mays
  Coding DNA Sequence Number=SeqID_15859
MRDLLLALELLGCSGWLLRQEATDTDAGDLEGDLA

SEQ ID NO: 59235 - protein, 88 aa, Zea mays
  Coding DNA Sequence Number=SeqID_15860
MALSPALERPPGREAGEREARHWRGESAGESDVARSDWSTDMDPAERRTHGRAVKMVEKELGLLDDEEEEPEAEREEEEDEDEIEESD

SEQ ID NO: 59236 - protein, 94 aa, Zea mays
  Coding DNA Sequence Number=SeqID_15861
MESHDLRAERESRLVGGNENDGWVLTLVMVVSIATTAQEKMKPWKETYRSSKIMTSFRRGLAATPSRLPVKATCIYVSFPHFDYCKDYVDVSDI

SEQ ID NO: 59237 - protein, 87 aa, Zea mays
  Coding DNA Sequence Number=SeqID_15862
MVSPVSCKRVIRVDVRAPFVGGRLGAQRHAQKYLRQLARWLCDAWAWASKPARQKSEKRVHLARLHAACMAARPSRPLVWAKVGNRL

SEQ ID NO: 59238 - protein, 146 aa, Zea mays
  Coding DNA Sequence Number=SeqID_15863
MGKNNKRKREPTPPSEEFGDSEYSEEEFSSESEGSPAPIPLRESDDSQGLAAEVWTYIRAVERSGLEGSDESEFSSDEEDSDGGEDEDDDDDDGDDDDGGDGDGDGDGDGGNGGGGSGGKGGTKGGSSVGSTGGGGGKGSGGRASG

SEQ ID NO: 59239 - protein, 369 aa, Zea mays
  Coding DNA Sequence Number=SeqID_15864
  Gene Ontology: Mol. function=aspartic-type endopeptidase activity; Biological process=DNA integration
  Homolog annotation: Hit_ID=Q8S474; Match level="QueryCoverage=10%, HitCoverage=4%, E-value=1e-08, Identity=76%"; Hit description =Putative pol protein
MVILAKIQEFFAGELGTVVGDDGVWDPEAMDDVGEERHRLLGPDAVQGSDLDPLGEFVDGDQQVCVAPGCLLQGTDEVQTPYSERLGDGYRLQSLSGQVGLLRIELAPFAGADNSSGVNHRRWPVEALPESIPDKGSRRCMMAASPRVYFLAVVPDLRRWRCIAGGCPRGCDGRAPLHRPARRTTWRVALPAEPRLGRGVALLDGDIAAPSDVVELEPEELVFQAPNLVAAGLHLWVAAVGVLHDLVDDELRITAGVEASVGVLGPRKNDLTNYWALGPFVRPFTSLVDPGDIFPPQAPDLWVDLERSAYILSLAAEFAIHPYLARYCNLFASAIDWTFDGRSLSGLHVASVVHILYFAGYIWLSSDPY

SEQ ID NO: 59240 - protein, 146 aa, Zea mays
  Coding DNA Sequence Number=SeqID_15865
MEDGPHEGLIMGPTIEVFNHYHLSDDGNVIPHPPKVLHEGSKGLVVLALDILEIPWLRRFIREQLKVGDKSIEVNLVVDAVVMKVKNPLDDVLLSHPVLEGKPNANHARARIKNSRSSLGEVASLILELVEVLELLEIRLDAFFLT

SEQ ID NO: 59241 - protein, 62 aa, Zea mays
  Coding DNA Sequence Number=SeqID_15866
MEDTTNRLPPTRKKAKRRCFRSIGAILEDLLDPWVRTHTRFRCTMLILLVDVDRIVFFGVSS

SEQ ID NO: 59242 - protein, 223 aa, Zea mays
  Coding DNA Sequence Number=SeqID_15867
MESHDLQAERESRFVGGNENDGFGIDSGNGKWYSFRLERVVSIATTAQEKMKPWKETSRSSKITTSSRRGLATTPSRLPVKAACIYVSFPHFDYCKDNVEEQEQQGSSFSLQQEIESVRSCSPVLPLEAPPAPPLSAPAPGVAAGGDPDDGGGDDSSGFSTDLSADQELEGWVARPITRDAARGCHFHDALDTLLRRALDRHTWSIEYRCVVFQHSRGVYPDH

SEQ ID NO: 59243 - protein, 95 aa, Zea mays
  Coding DNA Sequence Number=SeqID_15868
MGAPDSPMMKRLHASRYGTCPMGMCALRNPKSPHKLKINQHLPIKHLHQLKMRIRLKTMKMKIKRMSHLKRRIMIKGEMKLIKTRKMIKRYRVKV

SEQ ID NO: 59244 - protein, 110 aa, Zea mays
  Coding DNA Sequence Number=SeqID_15869
MGVAMKLLARSRGFCSLAYCGQRRAVVFWNTLEKEQAAHEWSEYTHLRLAGLAKRAEGVGERRGVLLPSTAAAAAAAPAVRRQDVEHSEEVAPVGDVDDVFWLGYGQKTV

SEQ ID NO: 59245 - protein, 72 aa, Zea mays
  Coding DNA Sequence Number=SeqID_15870
MAEGGIDRRWMGTVTLGGRIKPRRGSGADAGGVGNACSDSGRMAWDMCLSGGKLVERKAVMAATKRPRSITA

SEQ ID NO: 59246 - protein, 80 aa, Zea mays
  Coding DNA Sequence Number=SeqID_15871
  Subcellular localization annotation: CTP_CleavageSite=59; ConfidenceScore=5.40e-01
MPGSLAQLALALLLVPLPTAGAGAGFRPPYGRAVAPCPRGTVPRVRTPLGRRPMVLGLSCPHSGHDASVRRVGACPSART

SEQ ID NO: 59247 - protein, 528 aa, Zea mays
  Coding DNA Sequence Number=SeqID_15872
  Homolog annotation: Hit_ID=Q6JAD6; Match level="QueryCoverage=94%, HitCoverage=76%, E-value=1e-172, Identity=61%"; Hit description =Putative uncharacterized protein
METEVQPLAADHRLFDLQRATAARMSAQIALRVHRLLDLPAFLLAAGADSEAHLTYLPGLLTLLTTSGRYVEEWVRVFYASVWIDPDHHWMRFRFEREDVTITASQICQLFGFPESTTRLHSLCYGTSDPPRRPHGGVAPGTAHVAALFRPPFSDGSRRSPTDFTTTAKYLFELIRRTLLPGMGYREATTHIQLWLLGALVSHSEFDVVDFLICEIEDTILDGIRTRRQLPYAHYLCHIFAQLIQPPRFQGTLEASRLVFGSYRPAPETPVPASALVFDSQAEDAALHQFDTQATAVDDDDDDDFGVPPLPPMPPRSHDHEAGSSSAAPPAMDPALASILQSITQQQAHLAAEQARLSKRMLSMFQNMQDRQDALQQQLLQDRAESRAFMALMLQHSGVSVPPVQSAPPPPLQAPVVPAIQTGPPIPSVGPSPLRPVTLAFTSPVLSSVCPQPPVPPASAVTTTDVAVSVTTSVPAAPAARPQSESVPAPASTADPGSETDSDPPPAFALLPRPRPDAPPTPPPASDV

SEQ ID NO: 59248 - protein, 251 aa, Zea mays
  Coding DNA Sequence Number=SeqID_15873
  Subcellular localization annotation: CTP_CleavageSite=80; ConfidenceScore=5.27e-01
MAHRTVNSHCLVHTGQSGAMSDALSALTACPRPSCGDVGEGLPTTAFALRSSLLLFSRLRRRSLSLLLQWWPASYPEFVVPQALRCGGCSYPREWNRSSVCNGTLSAGLRNPRLLYDEPEPEAAVSAWTEAESAREEALSAQGHVASLAEEAQQRRLEPGQVIRERDQLRSHVAEAVSRADVLEGQLAEATERPVEDLFVGSRITYPSESYLSRKVMSEDPAIEAVEKRKRHSGRKIFSEENVDAEGVPPF

SEQ ID NO: 59249 - protein, 450 aa, Zea mays
  Coding DNA Sequence Number=SeqID_15874
MGSTRVAFVLLSLEERNFAEVGSPAASPRRWSPKTVTTSLMVGRSKPGCDLCPALSFKDLYHPSWGGGRTEPELYLPRGFVGHLLPQHSGERALTGLAGGSDFDYAGLVGGERRQLQRVGLAGSAGSGSAPGAPSRRESGCRATRTGGPPKTSRAARAAFVFLGRPAFAPVRRLCVEVGAARPGGSEWGSAGGQMASTVGAEVVAAEEVLVADGITATIRTPGLWLFGFDSLSSPLEWGRGRGARCSIVRPEAIAAAVWPPGAEVVVAAAGAGGGEPPGVSSPRRPSNVGGCSYLWGWNRSSVCNGTLNVGVCSLRLSRPEHRRSRVAEAVSRAGVLGGQLAEASGRPAEPSARVGFLEEPGRGADVVLRSGDPSPVLPSKARSDFAEGGIDAEGAAALPPSTSKPAGSVRLYGIAYPSVSYLSQKVMSETLYVNEVYERLEIILRVEAT

SEQ ID NO: 59250 - protein, 421 aa, Zea mays
  Coding DNA Sequence Number=SeqID_15875
  Subcellular localization annotation: CTP_CleavageSite=45; ConfidenceScore=5.42e-01
MVAFQGGHPPFKGNSPHLCPQPARTESSPTRSKVLPLRHGGWVPRVMQAGPGQKEPKPPRAVRATAQRLQAFLHYRPDQRVKGRTAMQATCNRTKGAHPFDLDASSMEAQAHTSCNRRAGYYVQETAPPLAPVPCLLDCGTGATTRGDPAHDRTVPTEHIGHGDRERGYSERDPSPRRKRAPSPLLIRGSKAGPSEGFNSRLRALGLRAHYWSEVRRLAPRKGSTAASGHSGSAPTTDQGFVGWPPKGSDSRLRARRARDDPRYVRYITKARATLPRLGGCSRKPGSGQTVDIVNIPTRELGTRLCTRATATSGAIGSSASPDPKGSAPVSASEDGLCLARPQGSDFNHDSEDDGLCFARSQGSDSASPSEDDELRHARPQGSDTASASEDGLRLARPRARTRPRKTDSTSTSEEPPPHPT

SEQ ID NO: 59251 - protein, 20 aa, Zea mays
  Coding DNA Sequence Number=SeqID_15876
MARQGGTQGAARLGSAALAS

SEQ ID NO: 59252 - protein, 357 aa, Zea mays
  Coding DNA Sequence Number=SeqID_15877
  Homolog annotation: Hit_ID=A2XFR6; Match level="QueryCoverage=52%, HitCoverage=53%, E-value=4e-30, Identity=40%"; Hit description =Putative uncharacterized protein
MGKTGSGGVGSPRYHGDVFLAKMVRTLQTTHANTSYAHQPRQIPVYPVVVEEVPVDLPHIRVENVVILEDSSKEQLPAPTLLAESLAFAARSSTSTPPTPAIQAPAPGGDDPDDSRDDDDEDDDDDEGGDEHVNEEADYAQQDYFMRFGPVTEHYTSMFEMRHFPNLLQEVMHALGTYVRLLYKTRRVSEPPRARYYITRIHVRVMDAEDRGFRTLSAHESLTPLSTYAASVSDAARRTLWSLSHTYRQQLQDTRFRNLPLRLSGGSQTSIVPGGAGEERLNTLAGVVAGHNTDLNSATLDLSRVHLELEDAHARIATLEAQLQGRHPPEAQVPAMALSPPHKRLRNGEPGSVTRLL

SEQ ID NO: 59253 - protein, 147 aa, Zea mays
  Coding DNA Sequence Number=SeqID_15878
MQYNGSSSLISCEKQTIRIEFLSLQVTALVPTITGMGDYVSGRVRGFGYTLPHTLHTSPELTRRRLPVRSEPAAAQPLCHRRPASRAIPNPVLPSEKLVHTSVRLPEQGIGVSFAGEASPRSPELSPPPEYVDRSLRDPVMLTEPSD

SEQ ID NO: 59254 - protein, 85 aa, Zea mays
  Coding DNA Sequence Number=SeqID_15879
MVAMTSELVMLGSSVHFLENRRNVFTHALVLLLPTTPEIPRVPRAHVCALEFTPKDPDQVLLVVDLDNVPSAESEEASEESHEQQ

SEQ ID NO: 59255 - protein, 254 aa, Zea mays
  Coding DNA Sequence Number=SeqID_15880
MPPRTRRTARKHTGPIGVPCHQLPPRHEDSSSRSNDPIGDLEAQVNRLQTELRRRTDIWVADGNRINELRSDVRRLRDQLADRDLALDWVVQSRSLAWAKEAKAQARVEELSSAIDDLQAYCNTLHEEVHMPYWTRAQDGASTSRGREATPNPPPVPPTLAEVIAALVNATADNTRFLREMAGQQLQQQGGGAISRAPAKDPLEADEWIRVIEQKLVFFGVPKLRSPCSRLSNCVALPAPSGGTLLPYNRLVIK

SEQ ID NO: 59256 - protein, 162 aa, Zea mays
  Coding DNA Sequence Number=SeqID_15881
  Gene Ontology: Mol. function=structural constituent of ribosome; Cellular component=ribonucleoprotein complex; Biological process =translation
  Homolog annotation: Hit_ID=A2YE12; Match level="QueryCoverage=37%, HitCoverage=36%, E-value=5e-24, Identity=86%"; Hit description =Putative uncharacterized protein
  Pfam annotation: Domain name=Ribosomal_S24e; Domain location=41-121; Score=28.6; E_value=2.3e-05; Accession=PF01282.10; Description =Ribosomal protein S24e
  Subcellular localization annotation: CTP_CleavageSite=11; ConfidenceScore=5.26e-01
MAALLRLTAARSALPQRTLAPHRRLRTRKFMTNRLLSRKQFVLEVIHPGRPNVSKAELKERLAKIYEVKDPDCIFVFKFRTNFGGDILCHGRRRNRCWPTPPPWLHLSALCLRSTTIASRSTFSALPAPPTLLGFPEDLIGFPKSGDSIPVVHRQAPNLAKI

SEQ ID NO: 59257 - protein, 239 aa, Zea mays
  Coding DNA Sequence Number=SeqID_15882
  Gene Ontology: Mol. function=protein serine/threonine kinase activity; Biological process=protein amino acid phosphorylation
  Homolog annotation: Hit_ID=A3AAN2; Match level="QueryCoverage=93%, HitCoverage=35%, E-value=2e-51, Identity=43%"; Hit description =Putative uncharacterized protein
  Pfam annotation: Domain name=Lectin_legB; Domain location=10-220; Score=144.2; E_value=3.7e-40; Accession=PF00139.10; Description =Legume lectin domain
  Subcellular localization annotation: CTP_CleavageSite=39; ConfidenceScore=5.88e-01
MQSTTFTGRETTSFSFPKFNQNRLQLSTNLTFTGNSTVSQGALQVTPNSGNNFSTYLANQAGRVFYSTPFVLWAAAANSNASSVVADGRRVASFSNGFAAVELDTMKQPYDPDGNHIGLDVNDVRSSSATCPLAALGIELAPGDTGASDGSNFVWVDYDGAARRLQAYISPNGTKPSAAALNASLDLSAVVAARDAYFGFSASTGTDDYQLNCVKMWNMTVEVLHDDDDDDRLPKKLSG

SEQ ID NO: 59258 - protein, 271 aa, Zea mays
  Coding DNA Sequence Number=SeqID_15883
  Homolog annotation: Hit_ID=Q5GAU8; Match level="QueryCoverage=45%, HitCoverage=95%, E-value=5e-55, Identity=76%"; Hit description =Putative uncharacterized protein
MYREALWQKKSRPRELYPDVSSKDAPVPLELPVSNCDYGRLAWEHLRCFFFQWIDGPDKFDPRYLLFANWLCGRTSHERFKHWVPPPLNPPPMKDAEKEVATERRMDSPPRCDCGDRAVIDEDTAKHFPYGWRKCRFREWLYGPLSHWPEVEETRKCSWESYDDKGEVMRTIESKRLMGQKMRCGSQLVDSYINNRICDMRRYAKSAFFDSPKRAEQRRLKAADEKRAQDAREWEAARAEKQMLDNLADRLKGKIGCGVNYMADEAHARYV

SEQ ID NO: 59259 - protein, 135 aa, Zea mays
  Coding DNA Sequence Number=SeqID_15884
  Gene Ontology: Mol. function=peptidase activity
  Homolog annotation: Hit_ID=Q6Z5N1; Match level="QueryCoverage=69%, HitCoverage=14%, E-value=2e-14, Identity=47%"; Hit description =Putative potyviral helper component protease-interacting protein 2
  Subcellular localization annotation: CTP_CleavageSite=26; ConfidenceScore=5.20e-01
MLLPRSSRASSPPLSAASGTRTPPVRAAAAALASAALRPLTDALLHEQDQCAQLAAALATAAAVEASAVTFDLASYLHRLQPRLLKLLRNNAFKAKPALITLIGACAAMGVNTEVTASITCLHDAIASDGWASRK

SEQ ID NO: 59260 - protein, 351 aa, Zea mays
  Coding DNA Sequence Number=SeqID_15885
MEVRCQISFCQNEDGFPKLLRACTVRLGIRSQPEYDGREFVEHGTEKCVVTVYIGSSPHHVEWSVTAGGHRFKDTCQVVARKALRALCQIYEEVADTPLRFFPPFQRDRPAWMARMRALEEQQLLEDDPTVVYLTAYLLTLDAQYDFLARHHRQMIARAEDAEKRNRQLHVDLTLAQARVAALESREAIAVEALKQAKDEHIQKLMEAYLIQEPASSNPVQPIKAEDPQILEGHPVSTRGEKKAWELPEEAIVLEGIPVSPKAMDKQEHPESSQDPQLELFEPLAMKKILAPSLEVKEEAASTPPAPPPSEELQEPVSLEEEFNPVLPSQSLPEEVINISSLLTHPGDVSD

SEQ ID NO: 59261 - protein, 240 aa, Zea mays
  Coding DNA Sequence Number=SeqID_15886
MSGVMPDPEDKSTEQKLDFLMDAMNRMLGQLTTMNSRLIACSTGVKDSTKTNRKNKTGFKTKEQKETEVLPGLAHRTVRCGTGQCPVHHRTVSGAPPDSVRCTREDCLQTLHLRVSQAQPTIIHRTVRCTTGQCPVLQSEAALNWPASGKWEVAPLKFTGLSGVHRTVRCASEATVICAQRSTLQSVQLNSECQSRSQRGTGLSGAAPDCPVPHEDKASNGRPAPTATDRMTWLAHRTLS

SEQ ID NO: 59262 - protein, 329 aa, Zea mays
  Coding DNA Sequence Number=SeqID_15887
  Homolog annotation: Hit_ID=A2YNN7; Match level="QueryCoverage=87%, HitCoverage=90%, E-value=1e-63, Identity=51%"; Hit description =Putative uncharacterized protein
MGIINWMQDRFNGKHDKRRPEAINSGSARESCRQDDRAREGKSRNDGGDWPAPQHGLLSIGTLGDDDPPPPRASSQADDVLDFTIEEVKKLQDALNKLLRRAKSKSSSSSSSSRGSGASATDEDRRASHSQLPLDRFLNCPSSLEVDRRVSLIRHDGGGESGEFSPDTQIILSKARDLLVHSNGTAIRKKSFKFLLKKMFVCHGGFAPAPSLKDPVESRMEKLFRTMLQKKMNARPSNAAVSSRKYYLDDKPSGRMMTRDGRRRHDGEDDDEKGSDRIKWDKTDTDCNSLLVLKFCGGLIFISQLTSGGDDLESEEKSTTIIRIKGVFS

SEQ ID NO: 59263 - protein, 835 aa, Zea mays
  Coding DNA Sequence Number=SeqID_15888
  Gene Ontology: Mol. function=serine-type endopeptidase inhibitor activity; Cellular component=cell surface; Biological process =hyaluronan metabolic process
  Homolog annotation: Hit_ID=A2YNN6; Match level="QueryCoverage=88%, HitCoverage=86%, E-value=0.0, Identity=73%"; Hit description =Putative uncharacterized protein
  Pfam annotation: Domain name=VWA; Domain location=330-500; Score =49.1; E_value=1.5e-11; Accession=PF00092.19; Description=von Willebrand factor type A domain
MEDFARAVEDGLKLSKRLVLPGGVPPPRPPAGMERTVSAASASGPDPRLLPTAPMAYALVTDPAAVDTPDVPSYQPYVYGDLDPPALIPLQMKEVDLAVDCALDAAHVTLRARWWLHCITRSRDSDVRLVVPLGEQGSILGAEVTVGRRSYNTQVIEVEDHTLEKHAKIESGGLLQPHLFFLTIPQVEGGADICATFQWSQKLLYDSGRFSVDIPFRFPYFVNPLPKVFMKKEKIQLTVHSGFSKEILLQGTSHPLKEKSRQGDKLFFHHEAIVENWSIKDFNFSYNVYSGDLSGGVLVQPATLCDYDDRDMFCIFLLPGSGNRKVFGKAVVFIVDTSGSMQGKPLENVKHAVSTALSELVEGDYFNIITFNDELHSFSSCLEQVNDKAIASATEWMNANFVAEGGTDIMHPLSEAMALLSSVHDTLPQIYLITDGSVDDEHNICRTTKTDLSNRGSRSPRISTFGLGSYCNHYFLRMLASIGKGHYDAALGTASIENQILKWFRRASSTIVANISIDALTHLDEFEVDSEYIPDLSANSPLCVSGKYKGKFPDTIKAKGYLADMKEISVELKVQQLKEIPLDKVLVIQQIDFMTSKAWMSADKQVERKVIKLSTQNGVPSEYTDMIFLQTNLDKVEGTQKVKQKLKGHKGRDEQQIYGLKLGFGNKDATRENLITGFGDMNPAEKSVMLQKGSGCCSRVADCLCCMCCIKACNRMNDQCAVLMAQICAALACLGCYECCAEDPLNLEDVDLEGVEDVLVLNSTGPASLSRFLPNGRTRRMIEKPVYGLVQMNEIFGYTNDLCIALQRREQDIVNAMDLLEFTMVELSVLRENHG

SEQ ID NO: 59264 - protein, 340 aa, Zea mays
  Coding DNA Sequence Number=SeqID_15889
MANWRALVHASTPRLLRPRGRLPGIHRIDSDPKFFFFVRKGITSRGLDGRWVQKRLLPTVERAFWTDPVFINRPRLALSLSDAAANNQSCSAAAGGVTKTMFTPFETTLKSWKTSHSFVEEMLEKVPLAVGHAENLCGATACRTLSEKKRERSKDRRGRDFGHRGWDHDDDEDFQQDRRHGTRRHRSLSGWARSSRCRGGPEDCFSSSGRRRPATPFRRRGLVGRWIPKVKVRSVSFADPLISAVWPPIGVEELEDEIGAIPAGDSISGVLTAQQPRLAVPSKVDLMEQLARHFIRPLTKDQMEAIMELAIQGKEKEGTKKKGRKVAPLKAPFIEAAERI

SEQ ID NO: 59265 - protein, 358 aa, Zea mays
  Coding DNA Sequence Number=SeqID_15890
  Gene Ontology: Mol. function=sugar:hydrogen symporter activity; Cellular component=integral to membrane; Biological process =carbohydrate transport
  Homolog annotation: Hit_ID=Q2R0P9; Match level="QueryCoverage=25%, HitCoverage=19%, E-value=3e-34, Identity=82%"; Hit description=Sugar transporter family protein
MQVSEVVKFSFQSKSSWTAPGHKQVFSTLSNFAGHLTSKEDVFLFEIIGDQLTEWLSLSIILYSEMQQGQIIVHLENLWLKMKQRLLQAALNHPHRPISVATASVCRVATHGNTTLHPGRLISGFDELLMHRRKARDSSRKTVITSNPTDLTVERYDGSVNVSVGLGRKRLKIMKYSTKPKELNKNRANMGISPEEDIVTLPPCIQLITKRDRCAKLMLPTDPYTCPGDLTLMSGAELFMREDVGLTDGEVEVLAGSMNVFMLASILAAGWVADHLGRRRTLVLANAFLMAGALAMSLGTSFAALMAARFVTSVGSGFARRRLGTDADEEGAGEEAVVEGEVQTMRATDASVWLHRIQ

SEQ ID NO: 59266 - protein, 317 aa, Zea mays
  Coding DNA Sequence Number=SeqID_15891
  Gene Ontology: Mol. function=threonine endopeptidase activity; Cellular component=proteasome core complex; Biological process =ubiquitin-dependent protein catabolic process
  Homolog annotation: Hit_ID=Q9LSU3; Match level="QueryCoverage=85%, HitCoverage=95%, E-value=3e-77, Identity=55%"; Hit description =Proteasome subunit alpha type-6
  Pfam annotation: Domain name=Proteasome; Domain location=47-273; Score=116.5; E_value=7.7e-32; Accession=PF00227.17; Description =Proteasome A-type and B-type
MPRAGVSSSESSRRGAGAFRTLSEDRRITVFCSDGRLYQVDYAWNATKLAGVTSVGVRGTDSVCVVGQRRANTHAPKDKLLDMTSVSRLFPITDRLGLLATGIAGEGRALAHEARNQTAEFRFNWGYEMPPDVLAQWIADRAQIWTQYVSKRPSGVVAMILGIDDEKGTPQLFTCDPAGYFFGHKAASAGQRDTEAVNFLEKKMKNNPSLPFQETIQVIFFEKENQHRDQIPDLVVRSNFDLFFSSRFQMAISALQFALKADLKASEVEVGVVRTDDPTFRVLTEAEIDEHLEAINPEPRHSEMLPGLFRDKLTLEN

SEQ ID NO: 59267 - protein, 198 aa, Zea mays
  Coding DNA Sequence Number=SeqID_15892
  Gene Ontology: Mol. function=carboxyl- or carbamoyltransferase activity; Cellular component=ornithine carbamoyltransferase complex; Biological process=amino acid metabolic process
  Homolog annotation: Hit_ID=Q8SA97; Match level="QueryCoverage=46%, HitCoverage=21%, E-value=2e-12, Identity=47%"; Hit description =Ornithine carbamoyltransferase
MALPVDVAGLCPRQGDVGAPSKPRLSLSSVAEAEPEPWGRARQKSFGRGQGGVRALGSGEAEFRRLPARVRALGSGGAEFAVFRVLARVRALGSGGAEFAVFRVLARVRALGSGGAEFAVFRVLARVRALGSGGAEFAVAPLARPDCLSDSLCRVAPQSEWRRRRCPSVRLLYADGGYQLRIRRLEGTPNYGPRQTQN

SEQ ID NO: 59268 - protein, 311 aa, Zea mays
  Coding DNA Sequence Number=SeqID_15893
MAGGSLRGTRGRHPPPGARGRKRQPTHAGAPPRLASSSILAWMTKILEAEGGVEAAAWPAFPTDELEVTILGDRRWRGNSPYVRPQTPRAESSPTRSKALPCDSGAGSRMSSKPAQGRRSQTAARGAHDRPAVTSDPPLLPRPTGGRGGQPCRRHATAPGGRASPTSDTPAWKPRPTRQATGVPVAACKQPHRHSCHRRASSVAEPMPRLEATQQRQPGASVKATESGPAVMAVAGGRAQQSRRQLGSRLILGQQESHPSRREDGAPVTRSSNGSRMRNGRPTNYTPRRINSAAGHAAPLAGEARDASPLP

SEQ ID NO: 59269 - protein, 283 aa, Zea mays
  Coding DNA Sequence Number=SeqID_15894
MGHAVKVDVSCIEGLTFLGAEGVVAVGRDWGFVVGGRDCGFAAGGNIDVCFGIDGGGMVVVDSTHDKDHGGETHRRRNSSGEVVVDVGEVTAVTTVCGELESFTGGQGSRRRKELKNGSPGSPVYVRWRAAEVRRGCARFSGEAMSRLKLGKSSQPLGEAVQGLGRGWGSTGKAGHGGRARAVMGGGGACFPRRTLVISGSGGALALEWIGSWIYEIRGGEVGFVARLKSETKVESNRVKRFLFDVQLCQSMSKLNSVYVKVIFLIFGFKGQGGWVMVPYRFP

SEQ ID NO: 59270 - protein, 181 aa, Zea mays
  Coding DNA Sequence Number=SeqID_15895
MARVACTLRGKRLDGGVSVLSISVNPSCPKSVGQGQLYVGLITWEVPSQLDDQRITELAADVRRLQDELAERDLVVDWAVNSRSIAWDREAKARACVAELSTALDNLQVYCNTLHEEVHVLYARLHPDVPVDPIAMGAGLSGIAGEGPDGKLDLFRPPPSMNLADDQSPAAGNEETKDDED

SEQ ID NO: 59271 - protein, 52 aa, Zea mays
  Coding DNA Sequence Number=SeqID_15896
MGKHVPSLLMLLLSRVTALVPTITGMGDHVSGRVRMAICGQVHSGFRNHYAK

SEQ ID NO: 59272 - protein, 52 aa, Zea mays
  Coding DNA Sequence Number=SeqID_15897
MGKPVPSLLMLLLSRATALVPTITGMGDHVSGRVRRAICGQVHSGFRNHYAK

SEQ ID NO: 59273 - protein, 241 aa, Zea mays
  Coding DNA Sequence Number=SeqID_15898
  Gene Ontology: Mol. function=alpha-N-arabinofuranosidase activity; Cellular component=extracellular region; Biological process=L -arabinose metabolic process
  Homolog annotation: Hit_ID=A3C891; Match level="QueryCoverage=66%, HitCoverage=59%, E-value=2e-74, Identity=77%"; Hit description =Putative uncharacterized protein
MAHQQEEHQFGRLISKELRVSGESNWIKVEQKLVAKGTNRTSRLQITTNKKGVVWFDQVSLMPEDTYKGHGFRTELISMILDLKPRFLRFPGGCFVEGDWLRNAFRWRESIGPWEERPGHFGGVWHYWTDDGLGYYEFLQKVPSCNSGVSHNDEVDTVAIAPFVKREMKNVEKDIRVATKRNDMLSAKVRSEKQAHQQNRSVWKSSSAVSSDNSFMDSMHTTIMTSFFDSDGISVLVNPAL

SEQ ID NO: 59274 - protein, 30 aa, Zea mays
  Coding DNA Sequence Number=SeqID_15899
MGPTRQEKRLLAGLAGLGKDYGSRGVISIH

SEQ ID NO: 59275 - protein, 230 aa, Zea mays
  Coding DNA Sequence Number=SeqID_15900
  Homolog annotation: Hit_ID=Q6AT24; Match level="QueryCoverage=49%, HitCoverage=48%, E-value=4e-32, Identity=60%"; Hit description =Putative uncharacterized protein OSJNBa0029B02.5
MMVRARDAARALLRLAGARAGVHRDYFPPLARATFARAFLDFRKTGNKEAIEKDKARLTDELSRGYFQDFAEIRENAGKIATASKVIIPEVDAVKFPDLDVDSPDGGALHLPLVAPTLQADDGEAGDHKIPGASLVCLSFRASSLVSSAPLLILSLAKISPNRPLALQPLGAFPPTIGMASTVARGPPVAAKAAPVDSRDGNISKLDRILHISAHDHIRGCNQYLRLDWI

SEQ ID NO: 59276 - protein, 298 aa, Zea mays
  Coding DNA Sequence Number=SeqID_15901
  Homolog annotation: Hit_ID=Q6J9V9; Match level="QueryCoverage=42%, HitCoverage=44%, E-value=7e-55, Identity=84%"; Hit description =Putative uncharacterized protein
  Subcellular localization annotation: CTP_CleavageSite=76; ConfidenceScore=5.45e-01
MRASDTSGRRSGRRFASVMMTASTKGPGKGVFRKRTLPSEGNGPRALLLISGSKVASSRVWQPPQSTRAPCPLLIRGSKAGPSEGFDSRPRACRVRDDPGYVRYMAEARATLPRYPRTFPRPAGTICNGIPLEGGIEPLDPIEWVRENSAVRPAPATVPTTKIKQSHDLPRVWTRAQQGAPPRPTSGLGLSLGLGRRSPPRPTLGLSLSLGLGRNHNLARAQPQEKSPPRPTWASNRLRYRGYIITLLLASCPRLRRNKTGVPSKVTPATAVLLQGSRHFSDGHISSCTGLKALLRQP

SEQ ID NO: 59277 - protein, 499 aa, Zea mays
  Coding DNA Sequence Number=SeqID_15902
  Homolog annotation: Hit_ID=Q6JAD6; Match level="QueryCoverage=94%, HitCoverage=68%, E-value=0.0, Identity=71%"; Hit description =Putative uncharacterized protein
MSAQIALRVHRLLDLPAFLLAAGADFEAHLTYLPGLQTLLTISGRYVEEWVRVFYASVWIDPDHHWMRFRFEREDVTITASQIRQLFGFPESTTRLHSLCYNTSDPPRRPHGGVAPGTAHVAALFRPPFTDGSRRSPADFTTAAKYLYELIRRTLLPRMGYREATTHIQLWLLGALVSHSEFDVVDFLICEIEDTVLDGICARRQLPYAHYLCHIFAQLIQPPRFQSTLEASRLVFGSYRPAPEIPVPASAPVFDSQAEDAALRQFDTQGTAADDDDDDDDFGVPPPPPPPMPPRSHDHEAGSSSVAPPPQAMDPALASILANLAAEQARLSERMLSMFQNMQDRQDALQQQLLQDRAETRAFMALMLQHSGISVPPIQSAPPPPLHAPVVPSILSGPPVGTSPLRPVTLAFTSPVLSTVCPQPPVPPASAVTTTAVTVSVTASVPVAPAARPQSESVPAPASTADPGSETDSDPPPAFALLPRPRPDAPPPPPPASDV

SEQ ID NO: 59278 - protein, 74 aa, Zea mays
  Coding DNA Sequence Number=SeqID_15903
MPWKVPPSKDVLAEAHGIERGGVENVEYASHIHQNLRQSLRSDDGVHDERVSPGSGDMLRMIRAVEETILGVFL

SEQ ID NO: 59279 - protein, 79 aa, Zea mays
  Coding DNA Sequence Number=SeqID_15904
MGWRWCSAEWSTDRRVQLRTEPLRWVWGSTLGRATQSGSCPGKTTKRCCPGEMLSREDDEEVEVRVPHEAPSSGVASVS

SEQ ID NO: 59280 - protein, 274 aa, Zea mays
  Coding DNA Sequence Number=SeqID_15905
  Gene Ontology: Mol. function=oxidoreductase activity, acting on the CH-CH group of donors; Cellular component=mitochondrial inner membrane; Biological process=tricarboxylic acid cycle
  Homolog annotation: Hit_ID=Q6ZDY8; Match level="QueryCoverage=48%, HitCoverage=28%, E-value=7e-57, Identity=68%"; Hit description =Succinate dehydrogenase [ubiquinone] flavoprotein subunit, mitochondrial precursor
  Pfam annotation: Domain name=FAD_binding_2; Domain location=2-193; Score=-143.8; E_value=0.023; Accession=PF00890.15; Description=FAD binding domain
MGARGLTISHVKSHLQALTDCFPVGANNRVQIDSKASKLLIPRSLFSINRCTELRGLAQEEESLQPTSYQQRPEKITRERSRGEGGILRNSEGPLKDHIYLHLNHLPPEVLKERLPGISETAAIFAGVDVTKEPIPVLPTVHYNMGGIPTNYHGEVVDIKGDNPDAVIPGLMAAGEAACASVHGANRLGANSLLDIVVLAELVQTGEAMKGLDIRKVLEAPKEVKCVPMKNVLEPGDIPTLAELGLTTPPGMAQVQLERFLAFSTMMRSVVEPV

SEQ ID NO: 59281 - protein, 30 aa, Zea mays
  Coding DNA Sequence Number=SeqID_15906
MAKVMRLRVDGLGAMKDECWDLSRHHISQF

SEQ ID NO: 59282 - protein, 116 aa, Zea mays
  Coding DNA Sequence Number=SeqID_15907
MNVFDISRRSPFAESQVYEVVSHTSPSPQVSSPYKKSEALGGTPSKRHWLVTLGGCRLLDGSGDCLRRALQEDCGEAAMLIVRGLRLPRRSGKGDISGIEVLSDFLSTWLKDQAMT

SEQ ID NO: 59283 - protein, 146 aa, Zea mays
  Coding DNA Sequence Number=SeqID_15908
MGKNNKRKREPTPPSEDFGDSEYSEEEFSSESEGSPAPIPLRESSDDSDDSQGLAAEVWTYIRAVERSGLEGSNESEYSSDEEDSSEEDGGGDGEDDDDDDDGGGGGGDGDGSGSKDGDGDSSRGGSGGGGSSKGSNRGGSSRASG

SEQ ID NO: 59284 - protein, 124 aa, Zea mays
  Coding DNA Sequence Number=SeqID_15909
MNKNGNLQDRIGIQMGQVKMVEIKEAAKKGRNGKTEAAEKERSVNHGLMGILSRDSNPMANPPRTEFPRGKNPDGHEVEKFGLGDDRHVVTCERKLAVGVDRRNHRGRRTRGFPLGRHLDSTGE

SEQ ID NO: 59285 - protein, 28 aa, Zea mays
  Coding DNA Sequence Number=SeqID_15910
MGLLVLLVILLMGLLVLVLLLMSDRCIT

SEQ ID NO: 59286 - protein, 131 aa, Zea mays
  Coding DNA Sequence Number=SeqID_15911
MEEAMREQQEKFCEEMRQQQMAFLQQQSEYMAAYNAQAQQAINQAQQQPFVFPQFQPPMPQWGLHAPPPPPPPQGSGVMGHNTPPPVIPAPGGAYAGEGAYAGEDPTPLHDFVDQLLASGGSGHNSNDPNV

SEQ ID NO: 59287 - protein, 194 aa, Zea mays
  Coding DNA Sequence Number=SeqID_15912
  Homolog annotation: Hit_ID=A2ZBE2; Match level="QueryCoverage=41%, HitCoverage=40%, E-value=2e-10, Identity=39%"; Hit description =Putative uncharacterized protein
  Pfam annotation: Domain name=zf-C3HC4; Domain location=88-143; Score =44.0; E_value=5.2e-10; Accession=PF00097.16; Description=Zinc finger, C3HC4 type (RING finger)
EGAELANRRRRLDLILDDDEEEEDRVALALAPYVDRHYNDPVYYRLISPRTRPRSPSPSSHAGDDDNKRACILGLKEVVPTAKNDDNCAICLNPLADIAGPDPDHKKDDAAATSMLRAMPCSHIFHQHCILQWLHRNAVCPLCRYQLPTTFKDEDTEEEDEDEDEDEEEEEEEETNNSNSRLNQIRRRLQILYN

SEQ ID NO: 59288 - protein, 450 aa, Zea mays
  Coding DNA Sequence Number=SeqID_15913
  Homolog annotation: Hit_ID=Q2RAU0; Match level="QueryCoverage=43%, HitCoverage=42%, E-value=3e-09, Identity=28%"; Hit description =Putative uncharacterized protein
MKGSAHLLDEAESSVGEKGAAHLLPPFDEAESVVWLEVTEEMTEGSVGEKGSAHLLDEAESSVGEKGAAHLLQPFDEAESVVWLEVTEETTEGSVGEKGSAHLLPPFDEAKCVVWLEAIEETTERSCKESLVTQALSGSKIDGEYDPLMLDLFVYWRAVASRDTAWESVPLVLHDERLITVRVGWPPHEPEQPRDLVEAVTRILGHHLGPVSSFCLHSSLSPDGDTLGCWMDLLLDRRVDYLQLVPGRIDRAQLPLQRLKTDMLGTMVIGFFNILPLVLTDNNHWCDGIHNLGTLTLIGYKFSVDDLSVALRMVGCLWSLTLGSCNLVAGNEEATMLIESLSLRNLGFWSCIGKTLVIYYAPVLSFLEIGISSVVASAASVSVELRAAAALREIRRVMLPLHSIEIYGALGPAFMPKRRMSLHCDETGLLDTKMSRRSGPWARTVRVSRD

SEQ ID NO: 59289 - protein, 98 aa, Zea mays
  Coding DNA Sequence Number=SeqID_15914
  Subcellular localization annotation: CTP_CleavageSite=16; ConfidenceScore=5.08e-01
MCGSPSGMVRVGRSTCAGGGARWRRGVWPNQGTIGQSNGSVSFTRGGRPKSGEDDLGSPVRFCRVRALGKLHGPLAKLTEGQARLGRDWSGLAMVAEA

SEQ ID NO: 59290 - protein, 63 aa, Zea mays
  Coding DNA Sequence Number=SeqID_15915
MAQLSDKGVQIIKENLHQKTEKYKCFCQDGKDGIGTRALDPTKPRICLGLGLGDRPDFRVPNL

SEQ ID NO: 59291 - protein, 326 aa, Zea mays
  Coding DNA Sequence Number=SeqID_15916
MDPVWLEWFHMDGAELANRGRRPDHLDDEDDLYVALALAPYVDRHRPRTRPRSPSPSPSPPSHEDAGDDAATARNNKRACIPAYSEAILGLKEVVPTAKHDDDDCGICLNPLADIAGPDHKPSVWLGASVGACPIRCKNKMSVHVWLTVFGFGPGHARANIGLNLGPRDTVEICVPGEPGCAGPFAHTLLLSIRAHARVFISSLPPSSPLALELLSPPSSHSPGSSRPRALPPPAPLALELSHPRLPSLLRIWFLKVSSKGMSSLSPISSPRLLSPSSSPSPVSYRSRALTPSTPLTFEDLVRSGFVKRSENVESMSSSFNSLLSS

SEQ ID NO: 59292 - protein, 117 aa, Zea mays
  Coding DNA Sequence Number=SeqID_15917
MELRSSNEEAERRRIPPIRRKKTWLPSERSLPPFKGNSPYVRPQAPQAESSTTRSKALPCDSGAGSCRCFGSDRTPGVAPQGVFRSRTVSTTVAKWFVPIARGTMDKIYRFGPLRNA

SEQ ID NO: 59293 - protein, 543 aa, Zea mays
  Coding DNA Sequence Number=SeqID_15918
  Gene Ontology: Mol. function=sodium:dicarboxylate symporter activity; Cellular component=membrane; Biological process=dicarboxylic acid transport
  Homolog annotation: Hit_ID=A2WYN3; Match level="QueryCoverage=32%, HitCoverage=42%, E-value=1e-35, Identity=66%"; Hit description =Putative uncharacterized protein
  Pfam annotation: Domain name=Ribosomal_S4e; Domain location=308-379; Score=35.2; E_value=2.4e-07; Accession=PF00900.11; Description =Ribosomal family S4e
MTTGIELTTESDDGAAREAGAETRQHGARQRSASRERDAAAMEMSWASFLARGKSERRENGGAGAGESQMCREMSLRKTRQPGRGSTAAMGKGELGWKELLEAGVVYGYGPLGMIDPTERRWNPGLLPLHPHLHCSTRGAEAIYPPRSPPVAVGAAQQSILLTPPATAPGGDPFQLAKVDMIIARAWRRFLEKTSFGNLFGKVTIQEPTFEEVIVLYRRKCPKGQDDRAIHVKHFKNIPMADMELVLPEKKNPSLTRMDWVQFIVSVVIGLVKEVIIAYYILMENGKATSDEEFGLQCNFEVMDAVQKLERFGVITRDSIGRICCVPLKRANEIIGATTEELKGIPYLNTYDGRTIRYPDPLIKVNDTIKIDLETNKIMDFIKLPRFQNHPSTSPTTSLSMGEWKTTLPLMTNSPWQGKTRSSATCVVTRTGDVTSSVIIMPANVIRLQTSEDSRSKGMLDGRVSMMFKIACMSMSTSMSLPSATNFNHMANYSFRVTCYPTSLDSCKLQVKSERGTYTTDLIVVVTCGAALKHHALDDMKKN

SEQ ID NO: 59294 - protein, 35 aa, Zea mays
  Coding DNA Sequence Number=SeqID_15919
MATPKAVDVARRWLCFELEVSCELENEKNNWVEES

SEQ ID NO: 59295 - protein, 240 aa, Zea mays
  Coding DNA Sequence Number=SeqID_15920
MPPAAGGGADRGNAMGRRILSAINAVAARLQWLDVRLLPLAHVMGHKPCGSSGSPPWGGGAWCKPQTRASTGPLPGQGPGISCPKTQDPVVNRPDLIPKGPGSVPEVRSSCTGSGAFHVAGLDLLQISPPAQRLFLVTGGTPCFKFSAIAVAMATLVPPDHYQTEEALDSVRSMLGWGSLALAGRIRAGTVPLGDLAAGEFVLFVSYLFCGLALPISPFFLLLLEEFGLQLQHVTPHSIL

SEQ ID NO: 59296 - protein, 937 aa, Zea mays
  Coding DNA Sequence Number=SeqID_15921
  Gene Ontology: Mol. function=signal transducer activity; Cellular component=nucleus; Biological process=G-protein coupled receptor protein signaling pathway
  Homolog annotation: Hit_ID=A2Y8G4; Match level="QueryCoverage=99%, HitCoverage=99%, E-value=0.0, Identity=75%"; Hit description =Putative uncharacterized protein
  Pfam annotation: Domain name=G-alpha; Domain location=504-916; Score =24.9; E_value=1.2e-20; Accession=PF00503.11; Description=G-protein alpha subunit
MAEAHAEAMDGSTWEDMMRRILPPGTPIPEAPPNLDYSIALEYDGPPVPYELPRVDPVEIPAIPTAEPVSGSQVLGGLPVAPVVQPIRLPVSRIARCADPVAAQAAGSSESVLHNQEFSDDDEEGDDSRSQSHGSAQSSPGPQNRPERQEGRRGPVVTFGFTPDSKYESKEFEEMSEQYVAVTKKEKRRRACYRCGKRKWESKESCLVCDARYCGYCVLRMMGSMPEGRKCVNCIGQPIDESKRSKLGKNSRTLSRLLSPLEVRQILKAEKECQANQLRPEQLIVNGCPLRPEELTDLLSCSRPPQKLKPGKYWYDKESGLWGKEGEKPDRIISSNLNFTGKLQVNASNGNTQVYMNGREITKIELKVLKRKRAARKYIKKEIKVQKDPKIQIGDEFFAIMEFLANLPPLFVNPPYCHYGILLILQGILLDANTAPIMDFVKWTLLSLLTAIMKHHYQYQLQMFSVPVTLIFGFMTMVVMRKKALARFACALFSLPVPPGNSNGTRDEVPYTARAVPDYLDQKRIQKLLLLGPPGAGTSTIFKQAKYLYGTRFTQEELEGIKLMIQSNMFKYLGILLEGRERFEEEALSRLNYTISQGEETQHDENKANGSNSCIYSINARLKKFSDWLLDIIAMGDLDAFFPAATREYAPFVDEMWKDPAIQATFKRKEELHFLPDVAEHFLSRAVEVSSNEYEPSEKDVIFAEGVTQGNGLAFIEFTLDDRSPMSEPYIDNSEAHSQPLTKYQLIRVSAKGMNDGCKWVEMFEDVRMVIFCVALSDYDQLGPPVSGSSRPLVNKMMQSKELFEATIRQPCFCDTPFVLVLNKYDLFEEKINRAPLSSCEWFNDFCPVRTHHNNQSLAHQAYYYVAMKFKDLYSAQTNRKLFVWQARARERQTVDEAFKYIREVLKWEEEKDDNCYQEESFYSTTEMSSSPFIRAE

SEQ ID NO: 59297 - protein, 379 aa, Zea mays
  Coding DNA Sequence Number=SeqID_15922
MERADASMRSEVERTRKQLVDSYRELGARTADFEVPGREAGLRFLEWLQEELLALPTIVEGFMSFASLVTYEGAMNALSREGCSHYVVFDRSDEDFGREIFKVEDPVVKDSAGALFDRMWGPHSREVVRERSDRARDQAARAEDVEDFGPLNSARPEAEAHPVVPEAEVDPAPPPETGEGALAAPAATVSGGGSSPTAVPRVEDPPKAAAEPAAEDPMAAAGSSQDFGPAHATATANFVAASTVVAGNEWDESTSKFSDFGDSRSSVEWTEESSDEDLDYFAALDVAAVEASPRVADAVVLPGPSAGRRRRRAVAKRRVSEVDGGRLRVGRAGKRELLSSPVGASVGEGELRSLFEGEELRMMLFNYREMGIIPKVEPM

SEQ ID NO: 59298 - protein, 312 aa, Zea mays
  Coding DNA Sequence Number=SeqID_15923
  Gene Ontology: Mol. function=protein disulfide oxidoreductase activity; Biological process=cell redox homeostasis
  Homolog annotation: Hit_ID=Q6YU86; Match level="QueryCoverage=100%, HitCoverage=100%, E-value=3e-58, Identity=44%"; Hit description =Peptide transporter protein-like
  Pfam annotation: Domain name=Glutaredoxin; Domain location=150-224; Score=46.7; E_value=7.9e-11; Accession=PF00462.15; Description =Glutaredoxin
MGCVSSALLEEDGAEDDRRRIISHHHIVSLTSSTYGILTSPRAYCSSSSSSTALGSEPLARCAPPPPPPLPPPPPTTARQQAAPAPKPESQPQAEVINSWELMAGLVDPSTPGKPTKLDGGGQQRRRRIPLRAIDGNSSVSKAPSSSAVVLYTTSLRGVRVTFEACNAVRAALQAHGVAFRERDVSMDRGFRDELRSRLGLGLGGGRAAAAGMLPRLFVRGRHVGGAEDVLRLDEEGLLARLLEGLPRARGGAYCCDGCGGMRFLPCFDCSGSRKLAVALPVVASSRKKAGTVVVRCGECNENGLVLCPICS

SEQ ID NO: 59299 - protein, 115 aa, Zea mays
  Coding DNA Sequence Number=SeqID_15924
  Subcellular localization annotation: CTP_CleavageSite=58; ConfidenceScore=5.54e-01
MVLASIAATSFVILLIFSLPSGLYLRATSFSAEGMGVGVSSSYSSNTSPDTNLLLPPTAAAVSRPMLFDAGIGRVGLAPGLSSYVPLRRTRWHLPRLGYLGDEEYKSEILDKQGS

SEQ ID NO: 59300 - protein, 120 aa, Zea mays
  Coding DNA Sequence Number=SeqID_15925
MRNRIPEVTKAAVIEDFYQGSNDSAFVRAILQKPPPNNCFEKRTSTSPLMNGPRTSSVLETGETIMEKLAVYNQKTARSGCIGLSGGAPDSVQCARLASVNWLLSGLRWQCTAIIHRTVR

SEQ ID NO: 59301 - protein, 159 aa, Zea mays
  Coding DNA Sequence Number=SeqID_15926
MGENPEKGIAQMYKNGNLQNGVRIQMCQVQFIEIKEATEKGGDGKSKTANKKRNVNDIFMGILCRNGDPVANSPRAELFRKQNPNVDKMKEVRLRDDGHVVTREWQLTVGVDWRNDCRNGAWPLPLLRHRSLASETDRNEISGKQRSGSRQKIEVRAQK

SEQ ID NO: 59302 - protein, 188 aa, Zea mays
  Coding DNA Sequence Number=SeqID_15927
MGKGKRGRGSPRHAGDKRKRDPSPPSEDFGDSEYSEEEVSSKSERLLALASPPTSSDDLDDSQGIAAEVWTYIRSIERTGLEESDESEVSSDVEDSFGSSEERSGDDSDDEGGDGGGDSDDGGEGKDGGGKGGKGDSGSGGGKASGKAPLFIHVPNDIGVFRGNHRAIADATSVLEVTTKRCLTLPVF

SEQ ID NO: 59303 - protein, 202 aa, Zea mays
  Coding DNA Sequence Number=SeqID_15928
AAELFSWAELQLNSTSAVNLFDHTPAELASGQLSWDVDPRAIDLAMRIAERMFLKMKEDEAKNIIEEEENDRWRPNDESTSSQGSSFKSTSHMCFVANESDSESESEDEEEHESDSEDEDDLQKFFAQLSKKNRMSLLKLMKRAEEQKEMLHKQEDILIEKIKDLEKLTKEHEKLKCSHDDLVQRYAEWVSNIVPVEKKESG

SEQ ID NO: 59304 - protein, 256 aa, Zea mays
  Coding DNA Sequence Number=SeqID_15929
  Subcellular localization annotation: CTP_CleavageSite=25; ConfidenceScore=5.40e-01
MKLWKETSRSSKTTTSSRCGLAATPQSAASAAELNFSCVELSQLQLNFNFNRGPGRFNRGPERFNRGPRKVQPRFFPRTSLSDLQSASLTGRLTVSLPQAVELVLGADVDPRAIDLAMRIVERMFLKMKEDEAKNIIEEEENDRWRPNDESTSSQGPSFKSTSHMCFVANESDSESESEDEEEHESDSEDEDDLQKFFAQLSKKNRMSLLKLVKRAEEQKEMLHKQEDILIEKIKDLEKLTKEHEKLKCSHDNLVQ

SEQ ID NO: 59305 - protein, 62 aa, Zea mays
  Coding DNA Sequence Number=SeqID_15930
  Homolog annotation: Hit_ID=Q7XBD4; Match level="QueryCoverage=100%, HitCoverage=7%, E-value=3e-08, Identity=49%"; Hit description =Cinful1 polyprotein
MAQEIIRKSEKAALSGPSEPAKPSADPHAKGDDEIRKMAEAIMDKVVDQLLNEAAEVVLREN

SEQ ID NO: 59306 - protein, 365 aa, Zea mays
  Coding DNA Sequence Number=SeqID_15931
  Homolog annotation: Hit_ID=Q6QP51; Match level="QueryCoverage=26%, HitCoverage=32%, E-value=4e-08, Identity=44%"; Hit description =Putative growth-regulating factor 1
MRRKDGGYPPSGVLEDGKTRCIREHEDMVAFRRGTSGRKGAGSHAGGMQPRQVDALLRLPTRPAWRPRPTRHATGAPDASCKQLHCHLRHHRASSIAEPIPRLEATQRTTQQRQPGAAVNATKNGPAVMTVAGGREQRSRRQPSSRPIRGQQENPLSWREDHAPVIRSSNGSRTRNGRPANHSHRCINSAVGQAAPLTGEAGTGKGGYPERDPSPGRNQAPSLPTDQRFEGWPLEGFDSRLRSRGPYTHYWSEVRRPPPRRVLRPPQATRAPRPLLIRGSKAGPRRVHSRLRRRARDDHGYVRYITKARAALPRGSGAALANPALAEPLTASTYQPENLGPDRTPGLRPTRMREQPDQPKHYARH

SEQ ID NO: 59307 - protein, 1231 aa, Zea mays
  Coding DNA Sequence Number=SeqID_15932
  Gene Ontology: Mol. function=binding; Cellular component =cytoskeleton; Biological process=cell division
  Homolog annotation: Hit_ID=A3A935; Match level="QueryCoverage=85%, HitCoverage=78%, E-value=0.0, Identity=58%"; Hit description =Putative uncharacterized protein
  Pfam annotation: Domain name=HEAT; Domain location=1029-1065; Score =1.5; E_value=16; Accession=PF02985.13; Description=HEAT repeat
  Pfam annotation: Domain name=HEAT; Domain location=250-286; Score =17.8; E_value=0.04; Accession=PF02985.13; Description=HEAT repeat
  Pfam annotation: Domain name=HEAT; Domain location=424-460; Score =12.6; E_value=0.35; Accession=PF02985.13; Description=HEAT repeat
  Pfam annotation: Domain name=HEAT; Domain location=525-557; Score =0.5; E_value=23; Accession=PF02985.13; Description=HEAT repeat
  Pfam annotation: Domain name=HEAT; Domain location=861-898; Score =2.6; E_value=11; Accession=PF02985.13; Description=HEAT repeat
  Pfam annotation: Domain name=HEAT; Domain location=907-942; Score =21.8; E_value=0.0025; Accession=PF02985.13; Description=HEAT repeat
  Pfam annotation: Domain name=HEAT; Domain location=947-983; Score =12.1; E_value=0.42; Accession=PF02985.13; Description=HEAT repeat
  Pfam module annotation: Pfam domain module=HEAT::HEAT::HEAT::HEAT::HEA T::HEAT::HEAT; Domain location=1029-1065::250-286::424-460::525 -557::861-898::907-942::947-983
MVISLALTIPQVTVSTVAHQLDPAGYCICMADGVRATEAEGKTKIAKVLCECALVVLVDGHTHACCPSSAHVLLLVPPQLFFYLQLFARTDFSNILAYCIPMPRCTSVVTEVQLTGVHRSFRLPEPRPPSPVHTEAYPATSCSPRLAAGPAPRSPRALPAAWAAGVPGRAERMEAALEAARAKDTKERLAGVERLHEALDAAARRGLAAAEVTALVDTCMDLTRDANFRIAQGGLQALSAAAVVAGDHFKIHLNALVPAAVERLGDGKQPVRDAARQLLITLMEEMYKHMGSQFHEELQRHNLPSYMLKEINSRLDKIEPKVRSSDTAMQYKAVESRSVSANPKRGSPRTKNIPRESTLYGGDTDVTEKPVEPVKVHSEKELLREFEKIAATLVPEKDWSLRIAAMQRIEALVYGGAIDNPSFLMLLKQLVPPLSTQLSDRRSSIVKQACHLLNILSKELLGDFEPFAELFIPILRNCKVARILPRIVDTAKNDRSAILRARCCEYALLVLEYWADAPEIQRSADLYQDMIKCCVADAMSEVRATARTCYRMFAKTWPERSRRLFMSFDPAIQRIINDEDGGVHKRYASPSLRDRVVQPSRASSHSSGTHVPGYGTSAIVAMDKSAAISSDSSFPSNTLRLSQSKTIDRSSERSLESVLSSSKEKVSAIESLLKGVSMSGQNFSAARSTSLDLGVDPPSSRDPPVPLAAPASNVLSLQNSALLDSSLPTIPPSSRNGGSRLLDTMTTHLPTKERSRSPYLSNMSSESMSGLSLPYSRKSLERLQEGGRMDESYDIRSTRRIPQMHLDRNYVDMPYRDSHNNHVPNFQRPLLRKQVMSRASASGRHSFDDSHVPLGDVPGYTDSLASLNDALSEGLSPSSDWVARVSAFEFIRNLLKQGQKGIQEIIQNFEKVMKLFFRHLDDPHHKVAQAAFSTLAEIIPACKKPFESYVERILPYVFSRLIDPKELVKKPCSITLEIVGRTYAIDMLLPALVRSLDEQRSPKAKLAVLEFANKSFSKYSVDSDGYSNSGFLKLWLSKLAPLVNEKNAKLKEASISGIISVYSHFDSTAVLNFILSLSVEDQNLLRRALKIKTPRIEVDLVNYLQSKKERPRPKPYDQVDFGTSSEDGYALTSKKSYPFGRFSSSSLDAEGGKMISSMQEPALHNVSIGRTVSDMSMDHAIQSLESSTGAEVHLTRGREPKNNSNLVAEAARSWTSYPEKTDASVDGETAT

SEQ ID NO: 59308 - protein, 145 aa, Zea mays
  Coding DNA Sequence Number=SeqID_15933
MELLSCMSALDPSNSFASFDAHKEEFSSESEGSPAPVSPPASSDDSDDSQGIAAEVWTYIRAVERPGLEGSDESEYSSDEEDSDGVEDEDDDDNDGGDGDGDGSGSGDGSKGSTRGGSSTGSTRGGSSKGSTKGGGGGSSSKASG

SEQ ID NO: 59309 - protein, 166 aa, Zea mays
  Coding DNA Sequence Number=SeqID_15934
  Subcellular localization annotation: CTP_CleavageSite=44; ConfidenceScore=5.31e-01
MASGQMLLLKSPRSCPLPGDENQPLKPKSRRSGAQAALTVSSVEATATVGSLTSGGHHFSTGDSSHLCTALPSPGWRMDSYTLTRQQQFAFPRMAGGRLLRRARGCPSPPNAGGRSGSPAHTGGRTLLGAPSSSAQMMNILEAEGGAEVVARLASPHHKAGVHPYG

SEQ ID NO: 59310 - protein, 133 aa, Zea mays
  Coding DNA Sequence Number=SeqID_15935
MTHLKMPAIPIAPCQYNAIEQQVTQVSAILEGARSVGRRLDNGESATRCGRVTRGRGSRALGGAPGAGGVSGDAVVLRRSGLRASARRAATAAALWAWAMGGCGSATGGQRLELEEGRGIYAARAGAGRLGWS

SEQ ID NO: 59311 - protein, 448 aa, Zea mays
  Coding DNA Sequence Number=SeqID_15936
  Gene Ontology: Mol. function=transferase activity; Biological process= paclitaxel biosynthetic process
  Homolog annotation: Hit_ID=A2YEM8; Match level="QueryCoverage=100%, HitCoverage=100%, E-value=0.0, Identity=73%"; Hit description =Putative uncharacterized protein
  Pfam annotation: Domain name=Transferase; Domain location=4-446; Score=150.3; E_value=5.3e-42; Accession=PF02458.6; Description =Transferase family
MGIFTVTKLSEGPVRPSADTPSETLPLAWVDRYPTHRGLVESTHIYCCDDVAKTLLLPAAPAEGDADALAPTKKEVITKKSPAAVVRAALADALVHYYPFAGRIVEDVPGRPAVLCSAEGVYFVEAVANCTLADVNFLERPLLLAKEQLVPCPTPELWPVLPHNSLAMIQVTAFTCGGFVVGLRTNHAVADGTGAAQFLSAVGDLARGLPEPRVRPVWGRDRFPDPDIKPGPLPELPALALEYIAFDFPTAYLDELKSQYAASTGGKFCSGFDIVIAKLWQCRTRAIAAALGPDDVRLCFFASVRHVLKLEPGYYGNAIFPVKVCAPAEKVAGSSVVELVGMVRDAKRRMAEECLRWAEGRTGGVDPFQMTFNYESVYVSDWSKLGFADVDYGYGTPMSAGPLVNCDLIASVIVMRAPAPLAGTRLLASCVTKEHADDFACRMREDLV

SEQ ID NO: 59312 - protein, 50 aa, Zea mays
  Coding DNA Sequence Number=SeqID_15937
MVEQTINTWGVTTIRVNGTERDCESGMGTERLRPFDFLERNGSGSEDNIP

SEQ ID NO: 59313 - protein, 152 aa, Zea mays
  Coding DNA Sequence Number=SeqID_15938
  Subcellular localization annotation: CTP_CleavageSite=43; ConfidenceScore=5.17e-01
MAAHGSPAPRLAGRPPARPSTAVAAARLRLWLWLWLAASCGLRSYMAASAFLLCAARWALAARRPHGRAPPPLLHDCFCLPALLLALMFALLCCACSACFGRAPLLRLLALLLANSAACKLQILLDPRHYGRASEIEQNGRSALAADEDERR

SEQ ID NO: 59314 - protein, 16 aa, Zea mays
  Coding DNA Sequence Number=SeqID_15939
IIFVLPLCRRNSDRSF

SEQ ID NO: 59315 - protein, 186 aa, Zea mays
  Coding DNA Sequence Number=SeqID_15940
  Homolog annotation: Hit_ID=Q8H4Y5; Match level="QueryCoverage=21%, HitCoverage=9%, E-value=4e-09, Identity=75%"; Hit description =Nuclear inhibitor of PP1-like
MERPAKEEAIWELAIETTGCRADGLRGGWLEAEPQIDALVARSRHNILCLSAVLKYTKSPKSAKAPAQGWLGKMVMLPSMLGHRINLENIRHLFGRRVLASDFVLDHQSMSRQHAAVIPLGNGRTSTTIHKRNSKKEDTAVYINNKQFFFSDCSIWFSVVFPCHLLIQGYALGCNHEASRSSGTQM

SEQ ID NO: 59316 - protein, 52 aa, Zea mays
  Coding DNA Sequence Number=SeqID_15941
  Subcellular localization annotation: CTP_CleavageSite=19; ConfidenceScore=5.06e-01
MKPWKETSRSSKTTTSSRRGMTKPKNTEPKLRRRSEAQQMVMKLEYLAVEKF

SEQ ID NO: 59317 - protein, 86 aa, Zea mays
  Coding DNA Sequence Number=SeqID_15942
MNKTLENNEQWMNIFFLVYLSNEEPRKNRKNLSPEQIQDCNLADGEYVLIPEQGAVHEEDQEPAPEPAIEDLPAAPAIEGKPHFYA

SEQ ID NO: 59318 - protein, 125 aa, Zea mays
  Coding DNA Sequence Number=SeqID_15943
MVAPNDGARAARGGRHYRAGRIGAPGDPNPNLTGATRFRGKGLRVEEVLTIDGAQQSSIDEGGTATAEAQAPATNSEGSDRQSTVGRVYTMDSKQRRVADHARSPPSTPARASGSVVIHCNAAKD

SEQ ID NO: 59319 - protein, 98 aa, Zea mays
  Coding DNA Sequence Number=SeqID_15944
  Subcellular localization annotation: CTP_CleavageSite=74; ConfidenceScore=5.05e-01
MAGGNTLAGAKERWLAGEGTGSCSVTKVPVSECLVPRLSCAKTVSNGFGLSSNFPRMCSRETLGDTGVSHNLCSGKEVEEEGVDADLQEFQDFDEFED

SEQ ID NO: 59320 - protein, 154 aa, Zea mays
  Coding DNA Sequence Number=SeqID_15945
MGKNNKRKREPTPPSEEFGDSEYSKEQFSSESEGSLAPVPLRESSDDSDDSQGLAAEVWTYIRAVERSGLEGSDESEYSSGEEDSDGGGEDEDDDDDDGDDDDDGGGDDSGSGRGSGGGSKDGDGGGSGGSNRGGSSRGSTRGGSGGDSNRASG

SEQ ID NO: 59321 - protein, 121 aa, Zea mays
  Coding DNA Sequence Number=SeqID_15946
MTTEEVSNRGHNIPPRLRGSNIAILDPQLQGAEAPGASEEDIQNPKSCRSTKTRSKELMDTENISEVTKSRFKKHSSLQRKINADTAEVKGEEAPKGGLQRKINADTAEVKGEEAPKGGLQ

SEQ ID NO: 59322 - protein, 109 aa, Zea mays
  Coding DNA Sequence Number=SeqID_15947
MELKQDLQSGKGGETTKDGIGKTTLTNRSVREEDLKCRNMISIKTNTQQMVDLRQNSQGDKKGEAIKGELGEAPYSNWDGKQEPLKVRFKSSEGVSSYGTFGDEADPQQ

SEQ ID NO: 59323 - protein, 227 aa, Zea mays
  Coding DNA Sequence Number=SeqID_15948
MDQNYQMMVAAQGVQHIESPSQHGSNSRQNSRVHRSDEVAHGYNGNDHSPNMVEDDLQLTRRVASTMGRPRNREDVNTIEEQSRRRDIATMVGKEVILYSMMRSEVPVAIANIISTDATTKVADVPLGREFTQVFVTLDPGDICPPQAPDLWADFGINGPKILGSCFGGQHFALLDFGFHWVGVAPSFEWIFANNPLEAFFFFGDDDSLGAPKVHPMGVAPELRVDF

SEQ ID NO: 59324 - protein, 167 aa, Zea mays
  Coding DNA Sequence Number=SeqID_15949
  Subcellular localization annotation: CTP_CleavageSite=32; ConfidenceScore=5.68e-01
MEVTPASSVASDGSSNPSFRLLVGRKVGVVARATVATSVVWVSSSSSSRGWGVQWWCRGRLQGKHKGAAPHRLYLLLERERRALLLLSSTLLLLMQAVVQPLQVAGLTGHGTAKRTLHETGRKEYHLPLLESKPRTINLIATCKPNISDQVPLITGAPLAAHNCEHD

SEQ ID NO: 59325 - protein, 207 aa, Zea mays
  Coding DNA Sequence Number=SeqID_15950
MQDAARRALSHYYSVLGGVADSLNLKYYPHRPSGSTGGMIVSPVGEDNPRLSSTVNLAAVLNMELDHALDELSRAHAEIALLRAERAERRHLDDGSPAPVGTQHLYRSPRRGHQSYGNPDLLLKNSIPFSYAARFARSVLMCGCILQMSENRRRGGRRAQQEQAAQQDEVPQQHQLPPPPPMSIEQMFLMQTQAVQAIGQTLAAIQQ

SEQ ID NO: 59326 - protein, 163 aa, Zea mays
  Coding DNA Sequence Number=SeqID_15951
MVALPFQLAEQQEIKDPTGARTRLRTTGQPAGGPSLKGQEQGEACSVLPTGQGVGMSLIGDPNIKVVPNSLEHALEKFELKPNSFDTVLAQIDLGTTHSDTGTLVTLQLPVPSLKPRDIHTQKTKQGQVNKSFTTILPKFAKICTQPALELGQRQQAHVFDCG

SEQ ID NO: 59327 - protein, 296 aa, Zea mays
  Coding DNA Sequence Number=SeqID_15952
MHISYTLHSLDCNLADGEYVLIPEQGTVQEEDQEQASEAAIEDLHAAPAIEGKPRYGVYKCGHYTAAAGVSGALYAKAVRFRIWLMMNSPTPASGGDTRFSFDFLSRDGFPSILCEVLNSAGYPTPPLYTMQLYEEHRVPRCRVWLTLEAHPLQPSWRSLDSETIGFRTDDTIEAAAMKTLTTFCGYHPLEMVMHPLGLFPAEKKDDPMWCNRVSHVKDVWAMYPDLVGRVTVQCMSALYSLQALQSDAMAHLANIAQTTKLTLDSREDFVVDLSTELVEKDLRVERLSQRITTLE

SEQ ID NO: 59328 - protein, 124 aa, Zea mays
  Coding DNA Sequence Number=SeqID_15953
MARALFACLALAFCMLAFCMARARKEAETPARKSRREQEKKWEACDCNLSDGEYMLIPEQGTVQEEDQEQASEAAIKDLPAAQLLKASPGALQDMVDGVTWPTTLPPGWTVEWDVAPAGEEHEE

SEQ ID NO: 59329 - protein, 68 aa, Zea mays
  Coding DNA Sequence Number=SeqID_15954
MDCSELAVAHGREPSADASSLLLRMNSTPSTLADCLLFLRSPNVVVVHPGENPVFCVEKKANRSTLVD

SEQ ID NO: 59330 - protein, 180 aa, Zea mays
  Coding DNA Sequence Number=SeqID_15955
MGEKKGRRRGSFNSGALGCWAAHRGQQRKAGAVEKGCSKLLAGARARPWERRGKEEGEPAGGDGRARLHADMELTIWSSGRGRPWLLGELGMEKLLAAVMREEEGAPCSCTLGRRGGRREGAGPWLAEGRSSCRQPCTRRESSGQGESRGALGQGPARGGRRLGRHGEEGGRAPCALGKK

SEQ ID NO: 59331 - protein, 1020 aa, Zea mays
  Coding DNA Sequence Number=SeqID_15956
  Gene Ontology: Mol. function=hydrolase activity, acting on acid anhydrides, catalyzing transmembrane movement of substances; Cellular component=integral to membrane; Biological process=calcium ion transport
  Homolog annotation: Hit_ID=Q10QA3; Match level="QueryCoverage=99%, HitCoverage=99%, E-value=0.0, Identity=87%"; Hit description=Calcium- transporting ATPase 2, plasma membrane-type, putative, expressed
  Pfam annotation: Domain name=Cation_ATPase_C; Domain location=875 -1019; Score=39.2; E_value=1.5e-08; Accession=PF00689.12; Description= Cation transporting ATPase, C-terminus
  Pfam annotation: Domain name=Cation_ATPase_N; Domain location=110 -191; Score=52.4; E_value=1.5e-12; Accession=PF00690.17; Description =Cation transporterATPase, N-terminus
  Pfam annotation: Domain name=E1-E2_ATPase; Domain location=205-446; Score=233.9; E_value=3.5e-67; Accession=PF00122.11; Description=E1 -E2 ATPase
  Pfam annotation: Domain name=Hydrolase; Domain location=450-779; Score=54.8; E_value=2.9e-13; Accession=PF00702.17; Description =haloacid dehalogenase-like hydrolase
  Pfam module annotation: Pfam domain module=Cation_ATPase_C::Cation _ATPase_N::E1-E2_ATPase::Hydrolase; Domain location=875-1019::110 -191::205-446::450-779
MESYLKENFGGVQAKHSSDEALRRWRKVVGLVKNPKRRFRFTANLDKRNEATAMKRNNHVGLRFPDLCSLRFPCFSAGVAPSSEYKVPADVKAAGFGICAEELSSIVEGHDVKKLKSHGGVQGLASKLSTSESDGLTTSADKLATRRDVFGVNKFAEAESRGFLVFVWEALQDMTLMILAACAFFSLIVGIATEGWPKGAHDGLGIVASILLVVFVTASSDYRQSLQFKDLDKEKKKITVQVTRSGYRQKLSIYELLVGDIVHLSIGDQVPADGLFMSGFSLLINESSLTGESEPVAVNVEYPFLLSGTKVQDGSCKMLVTTVGMRTQWGKLMATLSEGGDDETPLQVKLNGVATIIGKIGLIFAVVTFAVLTQSLFRRKIIDGTYLSWTGDDALELLEFFAIAVTIVVVAVPEGLPLAVTLSLAFAMKKMMNDKALVRHLAACETMGSATSICSDKTGTLTTNHMTVVKACICGKIKEVDGVSDIKNLFSELPDSVMAILSQSIFNNTGGDVVLNQDGKREILGTPTETAILEFGLSLGGDFLAVRKASTLVKVEPFNSAKKRMGVVIQLPEGALRAHCKGASEIILASCSKYLNEDGNVIPLDAGTIDHLKATIDSFANEALRTLCLAYIEVEDGFSVNDQIPTDGYTCIGIVGIKDPVRPGVKESVAICRSAGITVRMVTGDNINTAKAIARECGILTEGGIAIEGPDFRTKSEEELTQLIPKIQVMARSSPLDKHTLVKHLRTKLYEVVAVTGDGTNDAPALHEADIGLAMGIAGTEVAKESADVIILDDNFSTIVTVAKWGRSVYINIQKFVQFQLTVNVVALVVNFSSACLTGSAPLTAVQLLWVNMIMDTLGALALATEPPNNELMKRTPVGRKGNFISNIMWRNILGQALYQFLVIWYLQTEGKWLFGIKGDNSDLVLNTLIFNCFVFCQVFNEVSSREMERINVFEGILNNNVFIAVLGSTVIFQFIIIQFLGDFANTTPLTLNQWIACVFIGFIGMPIAAIVKMIPVGST

SEQ ID NO: 59332 - protein, 1787 aa, Zea mays
  Coding DNA Sequence Number=SeqID_15957
  Homolog annotation: Hit_ID=A2XDN6; Match level="QueryCoverage=95%, HitCoverage=88%, E-value=0.0, Identity=54%"; Hit description =Putative uncharacterized protein
METAAATARPGAARKRRWNQSQPCQGEGPSDLKFARLRFDGDGGAKGAWEHLDLVLSLQSKELSLERKIELAVEFLTTLPNNSSCSIQLLRLVSFIGNWLQSILNFPENSKKILHIFDPALDSRCWAILRVCVEKKPSISISLNLLKSLSRVASHGLGRVDSNTSCPDNESIELFEQVFDCMSLLFSSNTRAFFNAGVDLWASCAIEVVNLAQKVSAKKDNFCPVLQKLANCLLGQFACFLRFYANPKNIFHAFVDKVLGPLLELLVLLNSQAHSSEHKQTGTMLKIVEDVFSNGLFHPQHLSGYFGLRSLNKSSAAKDIKGSYHRHLFQRFKGIKTENKAVLLAGFGYLFQLFVRRARNQRTTVAPSRTTLGTLHKSNDGSEEPQHRESLFEVFIMFMEPIVLECKSYSQKDFSKLGVTRLVEVHCMLKSINVMLITLIEEKIYVPTEDTLEGSHFNFLQDIYSVLILISEKMYKFWMSAVHLEDVNIKKIVPLMFAEIISAVGNFLEIEYKVLGDDLVKLWLMIFALSAINTSSKDIEPCFLLASKISSLSAQVICTFSELRQVSRSIFSLCDAVRAFRVEGPDGVHGSFSVASLSSQECLGSLTTLLSSETLMGAIRTSIKSMPQGQSSRCIEELTSDLTETLNWMADCSFEDDVSKLREPSIARKSIFCQKAELLGRHLSEVYASILDSITVTVSNSTLVGKSVERSLYQQSIGLMPPDVAIDATKLVGNPFIVCSGKEWTNPTNILGKGYFALIDENSNSLLDVIESLSESLSTNCASFAPLVYIFHVMVLQRLNDLNRQIKAFQFLLEDDAWQIDNKDIGNTRLLKESCSLEAAKLMSFVMNYVKLLSSGETGPFGSYDVSSSWDLSLCSLDEGSFPIATWQLLCENIDVWSSHVSKKDLKNFFSNLIRFSFTQKRSSLDKENNGTQSSGREMTLHSVSIGVLCDTIIYEKKVILKNLASSFCHALKKSFSFVTNSDGDNVFLDTSPDLMETISNLENEKLIGTGSGATHAHCLDKHWICEDFLNFFSAVPGFHANSKAFIRLINYILHLERQVEKMFTNTYRFHAEVSIKRRLSERAHRARCLARLALWSKASATAALINLILKFGKECPEARQYLSFSNKNGNSYSLVWFLRSVQEIVGSSHKIFDECTDEKQIESSLDGSPIKKETSEHNDQAFDIVEVSALECVRSMAELLQKTATGIPVTIKDSKCVIKIEDCRNTVCWKRLSCSMSCIGGFLQGLNSALESTFNDHPIASPEDRKMLLQYCSRFSSYVAKFGTFVDICVHVLFMDNKDSASIDLVSVHLPQELDCANGFLNIEAIMDELTKCGSHGVDLSKIQYMENVLLENLLKGECPLISFTLREIYSISAAIIKFHGYLSFSSDVSRQTCSPVEQLSLGTMLGIAFITLQKVADMSSWPHMFCLVWIDGVLRYLEVLGSAFTLSELNISIELYTQIINALLRAVGKCILLQQKNATLPTHEIGSSTKTLQLQNASGYAFPKDFIDTQNRLNSLKSRLRLVLGKFVSIASNTHLNAALQVIERALVGVNHCSHSIYQIYTGNPDGGTVSSDVAAGIDCLYMILDFVPGNKRVFKRTVPGLVGALFNIILHLQSPHIFYSQNLPPQGSVFHPDAGATVLIEIGWCVALLEDSVSILLGCLESTDSKMINVAGYFAWNMEEALKCASFFRRIYEEMRQQRETLGKHAMHFLAGYISMFSGQGPFQTGITREIDEVLRPGVYSLIDICEESDFQQLHTYLGEGPCRTTLADLVRDYKLHFQYQGKI

SEQ ID NO: 59333 - protein, 93 aa, Zea mays
  Coding DNA Sequence Number=SeqID_15958
MAGEGRGERRSVARRLRATLAIFPLPVRDSLFMYGIAGFKLIHDEVIKHLKHKEGANAHGKAEDCRGVAYTTMGELEERWRWSRSAVREKQRK

SEQ ID NO: 59334 - protein, 57 aa, Zea mays
  Coding DNA Sequence Number=SeqID_15959
MGKTLSMQVLSKTYPTKEKTIKGMVVLKGFKGSDPVFISEKYGDPNRLIPSWGSPTT

SEQ ID NO: 59335 - protein, 104 aa, Zea mays
  Coding DNA Sequence Number=SeqID_15960
MESHDLRAERESRLVGGNEIDGSGYDYGAGKWYSFRLERVVRIATTAQEKMKPWKETSRSSKTTMNSRRGLAATPSRLPVKAAFIYVSFSHFDYCKYYVDVSDI

SEQ ID NO: 59336 - protein, 131 aa, Zea mays
  Coding DNA Sequence Number=SeqID_15961
MGVAARASRKNSGDLRVNGTERDCESGMGTERLRPRRDRELRVQEADTRSRGEQQARTGGDSIHGFNRIDGEDRNGEDRIENWSREEDVRREGARALGAGRGPSYMAVEGRATGRMELDRQRGPCGLGSWA

SEQ ID NO: 59337 - protein, 58 aa, Zea mays
  Coding DNA Sequence Number=SeqID_15962
MVLPTMRIPRREYAEDSLEHARHMREGRVSARHDTLYTTVRVLAVDENPGGLTTQFEH

SEQ ID NO: 59338 - protein, 53 aa, Zea mays; identical to SEQ ID NO: 54086
  Coding DNA Sequence Number=SeqID_15963

SEQ ID NO: 59339 - protein, 157 aa, Zea mays
  Coding DNA Sequence Number=SeqID_15964
MALPVDVADLCPRSGDVEAPPKPKSSLSCMAEAEPELLGRARRSPSPSPGSGGAEFAVFRGLSPSPSPGSGGAEFAVFRGLSPSPSPGSGGAEFAVFRGLSPSPSPGSGGAEFAVFRGLSPSPSPGSGRAEFAVFRGLSPSPSPGSGGASYGAFGKA

SEQ ID NO: 59340 - protein, 130 aa, Zea mays
  Coding DNA Sequence Number=SeqID_15965
MVTSGLMVGESEPGCGLCPSLSLKDFHHQGWGGECAELSVPGLRMRVASEPLAAPAFATATGRGSSTGATAKAGHGPTSNSTAFCPSLPLEFGQGRGPPSSSIRPEVITAAVRPPGTEVFIVAAAGAGDD

SEQ ID NO: 59341 - protein, 358 aa, Zea mays
  Coding DNA Sequence Number=SeqID_15966
MAERPTGERGGQPCRRHATAPSGRASPTPDTLAWRPRPTRRATGAPDAACKQLYHLCHHRTSSIAEPIPRPEATQRATQQRQPDAAVNAVKSGPVVMTVAGTREQRSRRQPSSRPIRRQRENPLSRREDNTPVTRSSNGSRTRNGSPANYSPRRINSAAGQAALLAGAAGDASPSPKQPHQKRLAPRRVQQPPQIAWALHPLLVRGSKAGPPKGSTAASGYSGSAPITDQGGSDPVTESHRREASSPRTPSPGDRVRQITRSSPETPCSVPIEGNMALSPLLLAERRRRGVCKKAESVPDRPLALCGGSGAALANPAPAKPLTASTYQPENLGPDRAPGLRPVRMREPPDQPKHYARH

SEQ ID NO: 59342 - protein, 53 aa, Zea mays
  Coding DNA Sequence Number=SeqID_15967
MGLGVCGSLCQGGNEIDGSDYDYGAGCPCCNHCSGEDEAVEGDFQEFQDYDEF

SEQ ID NO: 59343 - protein, 73 aa, Zea mays
  Coding DNA Sequence Number=SeqID_15968
  Homolog annotation: Hit_ID=A7PRZ8; Match level="QueryCoverage=83%, HitCoverage=14%, E-value=2e-08, Identity=55%"; Hit description =Chromosome chr14 scaffold_27, whole genome shotgun sequence
MSRAFDDYYIEDCGVILVPEVTQRRIDNSDQFVILATVREFFRHVWNVLVLSNDETIQIVAYIEVCMILMVAM

SEQ ID NO: 59344 - protein, 472 aa, Zea mays
  Coding DNA Sequence Number=SeqID_15969
  Gene Ontology: Mol. function=nucleotide binding; Cellular component =Golgi apparatus
  Homolog annotation: Hit_ID=A2ZPP7; Match level="QueryCoverage=69%, HitCoverage=38%, E-value=1e-143, Identity=78%"; Hit description =Putative uncharacterized protein
  Pfam annotation: Domain name=DUF246; Domain location=122-455; Score =500.2; E_value=2.5e-147; Accession=PF03138.5; Description=Plant protein family
MVAVGGVRRKRAWRWAMRAVASAVVWTAVVQVASIAGLFRPRVVADCGGKGGGGAAAGLAALAGEDSAAARLSPPALVPKTVLVPVPVGARADWVSLIPPLQEFTRATAIYDAAVPSSFCLKFVRNGVLQICDMVTIARHLNLTLVVPELDKRSFWADPSDFGDIFDVDHFINSLRDELMIVKELPLKLQLIRTKKRLYSMSPVSWSNETYYLKRILPLARKHKVIHFDKSDARLANNGLPVQLQMLRCRVNFDALRFTPQIEALGRQLISTLQRSGQFVVLHLRYEMDMLSFSGCTHGCSTEEAEELTRMRYAYPWWKEKEIGSEAKRLQGLCPLTPEEITLVLKALGFTKDTLIYIASGEIYGGERRLAVLKAAYPKLVRKEKILSPDELRPFQNHSTQMAALDYMVDDELDGVMASSSDAVSRTTRESSTLATTMRPLLNDGQRGAAALDRVQAAASRELVVHSGACDH

SEQ ID NO: 59345 - protein, 261 aa, Zea mays
  Coding DNA Sequence Number=SeqID_15970
  Homolog annotation: Hit_ID=A2ZPP6; Match level="QueryCoverage=19%, HitCoverage=15%, E-value=3e-10, Identity=70%"; Hit description =Putative uncharacterized protein
  Subcellular localization annotation: CTP_CleavageSite=52; ConfidenceScore=5.07e-01
MPGRERERIIKRAGHKISSKPPRKIPPTAPATATTTATSTGPLHRLRLRLAACGHRAAPTSSPPPSPSALDAPPPALRRRRRRGGLGLLWKLPSARAPPRPAPMDARAPPPPQPHPPRAPSPQPPPAPSRRYGLHFSASSFIQAPLTALLEYSGILRPDPGGGIQQPGTGARPGEVSIRIVAPGEAGTSSERAEEVIVEEEEEDGQATRTRPEDPSPAAGGGEGGRESSSSYQRYDIQQVARFLCDNLDCCGDVQVQRYPV

SEQ ID NO: 59346 - protein, 196 aa, Zea mays
  Coding DNA Sequence Number=SeqID_15971
MWRRGSSLGVTASVNPTGDRGRDEEPYARDRELERSRGGSGRSRVIDRYREERDSRLPPKNGRMRRECYLLRRDAGGRRERLQARPRGGDHACAAVGATGVAQAKAGRPDPEGQRGGLGKRSLRRMRDSVSILTMAPPAPGLARTKGEADGSAAAPATNVAGGQALPFATAHHDVAAPTLQRRPLPLSPPAAPLLL

SEQ ID NO: 59347 - protein, 357 aa, Zea mays
  Coding DNA Sequence Number=SeqID_15972
MEAQAHASCNRRTGYYVRATAPPLAPLPRLLDCGTSTATRGNPAYDPAVPARRDGQYGQKWADSNGGGRRAGAAVTSSAKAYVPSRGSEITLSHGVKTTRPCSVPRTARTRATAASRTTRPVTLTPRRDRRRLRQEKQATLRLRHNDRVKKGPGKGDTPKRILLREGNMPRASLLIRGSKAGPSEGFNSRLRALGFRAHYWSEVRRPAPRKGSTAASGHSGSVPTTDQGFVGWPSKGSQPPQTQSEGWPWVRSIHNQGSGYAPEGDLSDAADVDSGLRSGWGIGNPGVALPCIVGHQHVGDSSPESSVLRDAAVLRGRGSARLGPIIVVGLGRRGMNSGMGVRRGGVPDAVALDSWR

SEQ ID NO: 59348 - protein, 113 aa, Zea mays
  Coding DNA Sequence Number=SeqID_15973
MAPKRASSKATPSIDKAAKAALLAEKKGKTLADTTHQEACEDYALSKRQRNDQPTPEGSLRTCSSRGQPQEPPPGFAPLEGEDATKDGEIIGIPAEEQLQLRALRIKNRNLQK

SEQ ID NO: 59349 - protein, 364 aa, Zea mays
  Coding DNA Sequence Number=SeqID_15974
  Subcellular localization annotation: CTP_CleavageSite=16; ConfidenceScore=5.50e-01
MAACRGTRPSLAPSRRAAMAAAAPVPGPGPGPPSPRLGRSAMARPRPPVPGGARPVRCGPGSPVRGRGTPPVPPPARGGVRPSAQPPSPWPGAPPGAVASPLPGALARPAARRSVDVARPWRPFPARSVQCAVPSASSPHQRLAVVSLCPGVCATQNDPVEEPEELGGEAPEQQLVGGGMSSEDVGWRDFIVGLRLAVNRAKGWAAPVILPPLVQRVDEGLERRVASSPSLQHLPSEGPVQLSHLVLKTSLDGGGGDAALTRSGSAGVFDVTVDGRVLLDCGLPEASHPVYKKGVGGAAQAFLPFCASQNPSILKPFARSPALLALVHRRSGPRQADRAPPPTVRSHVVFFFIRCEYAAGQIVV

SEQ ID NO: 59350 - protein, 298 aa, Zea mays
  Coding DNA Sequence Number=SeqID_15975
MWPRATIAACVATVGVREATRGKDEGELADVGKVQEWSGRGTGQRSGDRGEGGYGSGADRAVGRDVVQTEVAKEDCCSRWSMGRPKPTNRILTIKSAPTLISRAMSPLVASMVLNCCKTAGERFLGPSMEPRGPFAECRADGPFAARGAASGAGTSAPGASWSPSPVALRRDPQAGPRESGLLPQRNRSVSHSAPLSHPPSPRPPLPWRWMMSLYGAASDAAATPVLPNVYSALLCFDRLSELSSAIDEFSSGYQQDCARAGERGRLKSHRGNSNTIVALAGNKADVLDTRQVSADVC

SEQ ID NO: 59351 - protein, 143 aa, Zea mays
  Coding DNA Sequence Number=SeqID_15976
  Subcellular localization annotation: CTP_CleavageSite=76; ConfidenceScore=5.20e-01
MPRGPATVALRALLLGLTLTIGAHTVSLNTALLHSSVARARSHCSADPAVRPISNTGSFGTNSCADSVRPPRQPTPSMADRERCRPCFGKGEIGVLWRVWIVWVSTGRFGDRRANGNCSPLFALGRILTRCVGGYNRQLITVK

SEQ ID NO: 59352 - protein, 141 aa, Zea mays
  Coding DNA Sequence Number=SeqID_15977
MRAKNWKTVQGLTRSTCAGGFLNSGEHDWASPVTRVPGSSLSKSHGFPRKLTEGLDRTEEDGRGAGHGGCSRAALAGRGEVAGANGWLGQVRRDCNLADGEYVLIPEQGPVQEEDQEQASEAAIEDLPAAPAIEGKPRFYA

SEQ ID NO: 59353 - protein, 126 aa, Zea mays
  Coding DNA Sequence Number=SeqID_15978
MAGGIELAGAKERWLAGEDCNLADGEYVLVPEQGAAQEVAPDPAPEPAPEDLPATALEGKPRRLCPSLDLRRGLPFRLWWVQVRSLHDGSRGSLEDMVAGVTWPSILPPGWTVEWDPTSAEEEHEE

SEQ ID NO: 59354 - protein, 82 aa, Zea mays
  Coding DNA Sequence Number=SeqID_15979
MGKPVPSLLMLLLSRVTALVPTITGMGDHALGRVRSKVCGQVHSGIRTLILIPISSRRPRIPIDPCPQTIIILLSKWIQPIP

SEQ ID NO: 59355 - protein, 51 aa, Zea mays
  Coding DNA Sequence Number=SeqID_15980
MGKPVPSLLMLLLSRVTALVPTITGMGDYVSGRVRGKVCGKVHSGFSNQFA

SEQ ID NO: 59356 - protein, 423 aa, Zea mays
  Coding DNA Sequence Number=SeqID_15981
  Homolog annotation: Hit_ID=Q7XBE0; Match level="QueryCoverage=42%, HitCoverage=24%, E-value=2e-09, Identity=28%"; Hit description =Putative gypsy-type retrotransposon
  Subcellular localization annotation: CTP_CleavageSite=50; ConfidenceScore=5.31e-01
MTNLMSPCSPTRSANGLFSFAATWRRSSSQFPALDSDGERNRDGGGGFVSLDERTANWWLKLNGENEGGEEDSVRSFISARATNLGTTSTAMKIGMAPAELGIRLMMELTRSGHWQEATRTVSRASSTLEGSLAREDTLTFNAADQSHPTSLGTTEGASALEVAAKEDPAPEGVGLGSSSAASIDVHVGSPLVQSKELMVTHLSAALVGPITLEASDPDARSSLPADGAEVPSSRAFNIIPVDTPLNKQCTNASGFGSSLISLQSSALTRRCSNAEEKYTRSQADLNQTSAFLDIACTLNSSLNAQLDSEKIAYEEEKRTLIVQRRGEGSGRRRWRCGYAEEEHYPFGITPSKTKHVFEDLRQTKAPNMGCRELEMVGGGAVATSACDMEAKCMACSQVVLADRRGPRNSGRGCASEWGGADR

SEQ ID NO: 59357 - protein, 151 aa, Zea mays
  Coding DNA Sequence Number=SeqID_15982
MMVLASVATTSFVILLIFSLPSSLHFRTTPCSVEGVGAGASYPYSSDTNPDIDSHNGYCTSTRTFHIMRAPSFSPSSDVSFVFPAFALFFLPNLLPMVAAVSRPTLVDTGTGRVGHAPGLSPCVASRRTWWRLPLLGYLSNEESMPDILDN

SEQ ID NO: 59358 - protein, 181 aa, Zea mays
  Coding DNA Sequence Number=SeqID_15983
  Subcellular localization annotation: CTP_CleavageSite=47; ConfidenceScore=5.12e-01
MPFFLSLNHDRGADHLSGSGDVDQEVFSGGGGTKMGAFVRSAFRFPRASSASEVQVKHSVFLKRRYRAQGRKASHDPLYAFQVLDGPHVGDGRDFLRVGLDAPLGDDEPQEHASGDSEDTLLGIEFYALCLETPECRFKVGKEVRGFPRLDYDVIDISLDRSTNVWRNCTNYSDLSAYVPP

SEQ ID NO: 59359 - protein, 108 aa, Zea mays
  Coding DNA Sequence Number=SeqID_15984
MAPEAGLGCCQPHFVERHSSRSDAGGTVFLSGRVFRLRLKNANFVHTKALHTFMGRFQECNSSAPRSYQGTEITMSSNNIIKVINFTFDVVKGSRLVNDFCKSETFWT

SEQ ID NO: 59360 - protein, 139 aa, Zea mays
  Coding DNA Sequence Number=SeqID_15985
MGKNNKRKREPTPPSEEFGDSEYSEEEFSSEPEGSPAPVSPPASSDDSDDSQGIAAEVWTYIRAVERAGLEGSDESEYSSDEEDSDGGDEGEDDDDDDDDDDGDDSGRDGGDGSRDSTKGDSSRGSTKGGGGGRGRASA

SEQ ID NO: 59361 - protein, 112 aa, Zea mays
  Coding DNA Sequence Number=SeqID_15986
MTFGKEGKKPTNTLRWPGASEEDSTLGMLGQSIMLAQVTTGETILKGSSTALSRRDHNKALLGHRLQEAEGGEASEEDMEISPGNYFVCSTEKIRGIPQGRAKLRFRSRKNL

SEQ ID NO: 59362 - protein, 104 aa, Zea mays
  Coding DNA Sequence Number=SeqID_15987
  Homolog annotation: Hit_ID=Q6QP51; Match level="QueryCoverage=88%, HitCoverage=52%, E-value=4e-15, Identity=45%"; Hit description =Putative growth-regulating factor 1
  Subcellular localization annotation: CTP_CleavageSite=74; ConfidenceScore=5.42e-01
MAGKTSSKQTVKTGKQHYSPRSDYCANHQGKTNISKSRPPPSSAKGATEVSVLPDLGPRPQPRPREESQPRPTSASASGEVSASPNLGLGPTTPQGIHHYPTSS

SEQ ID NO: 59363 - protein, 57 aa, Zea mays
  Coding DNA Sequence Number=SeqID_15988
MARRSWAPCWPPWKPGRKKGHAGHGAPAGNHGKESRGAARFCLYAKLSELEFRRTED

SEQ ID NO: 59364 - protein, 202 aa, Zea mays
  Coding DNA Sequence Number=SeqID_15989
MTTVGVNEALYAKAVSPVLLPRNRWGWLICVGTECLAMSAEDTIKSTALHVLTTFCGFHPLELSTHPIGLLPAEKEDDPMWKDRVEHAKDVWALYPRQTAHLMVRCMNALYHLQAVRGEAMSQLMGIVESTKITLDNREDLVVDLSTEMVEKDLQVEQMATQIQELEDQVGARENTIEVLEDQLQTTQQQLEEANQHLDLHH

SEQ ID NO: 59365 - protein, 121 aa, Zea mays
  Coding DNA Sequence Number=SeqID_15990
MQIIERKCEAQKGAGIRKKTLDKLTDQPGNLIPLDRAGVPDLSFNYLARAQVTGPGGRGSAWTGEDGAWAGEGAAGVDVLVLVLMSSSAGICRNMVILATRKDVLYERDRSPIIIGGEQRS

SEQ ID NO: 59366 - protein, 309 aa, Zea mays
  Coding DNA Sequence Number=SeqID_15991
MPMRNRTRIVAVSPGVNDDDIGAAQKQQTTSERRRRAVHWASRNSEPTARGDVGAATHNIIFPTGILSNTYDASMLWGCGGSLFARSCATEEGNRGAVLGRECSCLSLGTERGRERRCLGARMGEPRGRKGNIAGAPWSRGTGSSACWEEDEQGGRWKIFWAPSMGAAAAALCRSSAMGQKQQGQTSWKPQGAQAPWLDLAAKEEERAERGFSCWFPWPASCSMGAERHGEEKLGSLLAAVETREEEGARWPWSSCWAPWKGEQRCCTAGGGRRAWGGREGCWRLKNFEGWECKIAKCNEGAPLFIEKC

SEQ ID NO: 59367 - protein, 157 aa, Zea mays
  Coding DNA Sequence Number=SeqID_15992
MAVAGGQEQRSRRQPGLRPIRGQRENPLSRREDDAPVFRSSNGSRTRNGRPANRTPRRINFAAGKGQGKGDTPKRILLREGTRLRASLLIRGSKAGPSEGFNSRLRARGPHTHYWSEVRRPAPWKGSTTASGYSGSAPTTDQGFKGWPPKGSQPPQT

SEQ ID NO: 59368 - protein, 61 aa, Zea mays
  Coding DNA Sequence Number=SeqID_15993
RSPSPWGSGGDGVRRSSRVLNPESEPWGSGRERKFPVFRVFSPSPEPWGRAERKFAVFPGS

SEQ ID NO: 59369 - protein, 298 aa, Zea mays
  Coding DNA Sequence Number=SeqID_15994
  Subcellular localization annotation: CTP_CleavageSite=64; ConfidenceScore=5.48e-01
MSSSSLMRRVFPSSKPPDGGYPPPFRLLVGGTQLRGSWYLSAIVRLQGFSSCGPAAPPRRRSPRMVTTSSWVGKSKPGCDLGPTLSFKDVHHPRWGGGHAEPALYLPRGSAGHPFPRRSGVEVLAGPAGGADLDNVGLIDGGRRHLQRVGVVGRAPGGPSCRRAAAAPCAREDHPRCRALLGRRSCSGVALLLHWDGALAQRPAEAAREVLVADGITATIRAPGHCAGVLVLAPRASAWARARSQQRPPTVAVVRTGGGEPLESLGSIGLVVWGSSSLVKETPRPLFDEPRPGVAISV

SEQ ID NO: 59370 - protein, 262 aa, Zea mays
  Coding DNA Sequence Number=SeqID_15995
  Homolog annotation: Hit_ID=Q5JKQ7; Match level="QueryCoverage=71%, HitCoverage=32%, E-value=1e-78, Identity=74%"; Hit description =Putative PPR protein
  Pfam annotation: Domain name=PPR; Domain location=40-74; Score=24.9; E_value=0.00029; Accession=PF01535.11; Description=PPR repeat
  Pfam annotation: Domain name=PPR; Domain location=5-39; Score=10.1; E_ value=0.49; Accession=PF01535.11; Description=PPR repeat
  Pfam annotation: Domain name=PPR; Domain location=89-123; Score=2.8; E_value=3.7; Accession=PF01535.11; Description=PPR repeat
  Pfam module annotation: Pfam domain module=PPR::PPR::PPR; Domain location=40-74::5-39::89-123
MPYGYAFSIMISALHRGGHHQESKQLAKEFESENASYDLVMLNTSLRTYCSTNDMESVMRMLKKMDESNISPDNITFNTLIRYFCNAKELCSHVMVQLGKAGFPSEAFSVYNMLRYSKRTVHKSLHEKVLGILVPAELLKAAYIVVKDNADLISPSSLEKFAKSFMVSGNINLINDVMKALNRSGWRISQTPKQPLTVKELEVPRVTNPHTVKFATSSRTREWENRDEIDSEFDRVHLTPRVLQMIEGDAIAGVKGEMNALV

SEQ ID NO: 59371 - protein, 62 aa, Zea mays
  Coding DNA Sequence Number=SeqID_15996
  Gene Ontology: Mol. function=carboxyl- or carbamoyltransferase activity; Cellular component=ornithine carbamoyltransferase complex; Biological process=amino acid metabolic process
  Homolog annotation: Hit_ID=Q8SA97; Match level="QueryCoverage=100%, HitCoverage=12%, E-value=7e-12, Identity=58%"; Hit description =Ornithine carbamoyltransferase
MTLPVDVAGLCPRRGDVGAPPKPRLSLSSVAEAESEPWGRGEAEPESEPWGRAERSSPSSGS

SEQ ID NO: 59372 - protein, 476 aa, Zea mays
  Coding DNA Sequence Number=SeqID_15997
  Gene Ontology: Mol. function=carbonate dehydratase activity; Cellular component=chloroplast; Biological process=carbon utilization
  Homolog annotation: Hit_ID=Q41728; Match level="QueryCoverage=42%, HitCoverage=73%, E-value=5e-98, Identity=87%"; Hit description =Carbonic anhydrase
  Pfam annotation: Domain name=Pro_CA; Domain location=169-339; Score =302.1; E_value=1.1e-87; Accession=PF00484.10; Description=Carbonic anhydrase
MHIGARNEEYYDGGAESGLGGAPGPGAGGASVAAASTVNDTATQSGVGGAPAWLRCADACCGGGPRLIKNAAALFAAAVSPLHSCEQSTNARACRMPAFPVRASASSSVVGSLTGTRRPRLIKNTTVIFATAPSTLVAMGDAVEHLKSGFQKFKTEVYDKKPELFEPLKAGQAPKYMVFACSDSRVCPSVTLGLQPGEAFTVRNIAAMVPAYDKTKYTGIGSAIEYAVCALKVEVLVVIGHSCCGGIRALLSLQDGAPDNFHFVENWVKIGFPAKVKVKKEHASVPFDDQCSILEKEAVNVSLENLKTYPFVQEGLAKGTLKLVGAHYDFVSGNFLPTEEAHQYSSNRAGLGRIVGLRLVKDYLLRRPAYKKKRMTSPPGMMNENNKVPTPTFFFYLCHPLCIFPSSYLLFVVVLPFSEVLDWSTFSVVLAERRAYRRTSRTSCGTPHATPIKYDFFHMILHSIWLSRANQVELDG

SEQ ID NO: 59373 - protein, 348 aa, Zea mays
  Coding DNA Sequence Number=SeqID_15998
  Gene Ontology: Cellular component=integral to membrane
  Homolog annotation: Hit_ID=Q8LQ55; Match level="QueryCoverage=89%, HitCoverage=80%, E-value=1e-40, Identity=35%"; Hit description =Integral membrane protein-like
  Pfam annotation: Domain name=DUF588; Domain location=217-332; Score =28.8; E_value=2e-05; Accession=PF04535.3; Description=Domain of unknown function (DUF588)
MASTPRTPAPERSPPPVPTPPPPLEDEPPPYLADGSPREEASFSSDGREGAPPKNPQLSPTHHAAPRLVPPPSSPARQDGQEQEGSANKAAAATAEPAREPLRQMATGLARPLSSQTSPATTNSPTPSASPTPSSPAPVANNSKRSGQSTPKRAETKLPLSSPAVAVHFDPVEEAVTSPLRLGKARLDQQQQQQHAAGAAESGASVVPGVAAAVAAVAERRELLLALRLATAVLSLAAFSVIASARTSGWAGDYYARHLQYRYAVAVNVIVFAYSVAQSLGKIRHLVLAYLLMSASSAAASRNDLWVSRFGTDAFVRKITGALWLSFVAFLVLALNAVISTANLFSMV

SEQ ID NO: 59374 - protein, 112 aa, Zea mays
  Coding DNA Sequence Number=SeqID_15999
  Gene Ontology: Mol. function=sequence-specific DNA binding; Cellular component=nucleus; Biological process=regulation of transcription, DNA-dependent
  Homolog annotation: Hit_ID=A2ZQ36; Match level="QueryCoverage=49%, HitCoverage=11%, E-value=2e-10, Identity=69%"; Hit description =Putative uncharacterized protein
  Subcellular localization annotation: CTP_CleavageSite=61; ConfidenceScore=5.43e-01
MVSTAASCLTITLELTSPSPLPPRCTPSCTPPCPTPPSQQQQRWFESKVVPAAWSSGYLRRANSLGGGHGAVAPAVTDTLTKAITSDPSFQSVLVAAITSVMGRGGATATQK

SEQ ID NO: 59375 - protein, 151 aa, Zea mays
  Coding DNA Sequence Number=SeqID_16000
  Subcellular localization annotation: CTP_CleavageSite=20; ConfidenceScore=5.62e-01
MGAIKVKPQSPQGTRSRLARAQPRAKATDPGGFTSRPRAPSSNGHTFGSPEAQSSQRSNLGQIATPTDPSGAIGSSASPDPRARAQPRRWTTDSASPDPRARTQPRPRKTVSASPDPGLGLNLDLGRRTPSRPTQGSDSTSTSEEPPPRST

SEQ ID NO: 59376 - protein, 356 aa, Zea mays
  Coding DNA Sequence Number=SeqID_16001
  Gene Ontology: Mol. function=kinase activity
  Homolog annotation: Hit_ID=Q6QP54; Match level="QueryCoverage=19%, HitCoverage=24%, E-value=2e-22, Identity=80%"; Hit description =Putative kinase
MENRPGLERLLETAHLELDGKLFVSTQQAPTWRANCRRFETGGRKERIQVYNGDVAECYVSSGGRASALSTCQCGSRRDLGTLLLRAAVVTGLAGRHHCLSGGASQMGHRSCSLRPESARGRVMMALPVDVAGLCPRSGDVEVPLKPRSSLSSMAEAEPEPPGRARRRSFGRGQGGVRALGSGEAVSHPGFRDPKPGREHKHQPTACASHDGAITARRELAQRPVPTDADAVIRGARNRYKRNATYHCGDEDEACAHGLKYFFSSFYQFWTLQAEFVVFWGLARVRALGRSERSSSSSGAEPESEPWVGRSGVRRLPGLSPSPSPGSVGAEFAVFRGLARVRALGRAERSSPSSGA

SEQ ID NO: 59377 - protein, 235 aa, Zea mays
  Coding DNA Sequence Number=SeqID_16002
  Homolog annotation: Hit_ID=Q6QP51; Match level="QueryCoverage=20%, HitCoverage=22%, E-value=4e-15, Identity=77%"; Hit description =Putative growth-regulating factor 1
MQAACNRTKGAHPFDFDASSMEAQAHTSCNRHAGYYVRETAPPLAPVPRLLDCGTGAATRGNPAHDPTVPTEHIDHGSVSRGRRRDGRYGQKWAGSNGGGRRAEAAVKSSSSSCPLLGQRENPLPRREDDAPMLCSSNGSRTHNSCPANHSSRRINSAAGQGLGKGYSERDPSPRRKRAPSPPTDQRFEGWPLGRVQQPPQSTRAPRPLLVRGSKAGPSEGFNGRLRPLRLRAHY

SEQ ID NO: 59378 - protein, 268 aa, Zea mays
  Coding DNA Sequence Number=SeqID_16003
MSGKANCCCPARMQHSVLCPCFRGEDGSEDLPMRFGAAGVRWCGVGGQVDTAVGAEVVAAGQSFSAIETVSATCGPTSSSLALMSGSRSLSGDANESLPVAASILGPSLLLQRSLAGRLEFVVPQALRCGGCSYLQECNRSSICNGTLSAGVCSLWLSGPEHESLGSVGLAARGFTCLVEETLGRSAVSRGRRQRCQRGQRQSWLEKGSFLGRGLAGSSTSATNAGVELSRPRAGLVSSGDSWLRLRGRPAEPSARVGFLEETLAAMA

SEQ ID NO: 59379 - protein, 113 aa, Zea mays
  Coding DNA Sequence Number=SeqID_16004
MPWMLEWRLSLTLELRRMMYFYAWLANYIGVEADVPPVPGSSTLSHQEELAQLSQVAREENLHNTITTKRSTQRWHNGLSRGSAKSNTCLLHVVVSQRTRVAINPFQAVQRPT

SEQ ID NO: 59380 - protein, 43 aa, Zea mays
  Coding DNA Sequence Number=SeqID_16005
MAKEGGGREKVSEHFFAPLISVRHSWLWQERVKVDRTEKARAR

SEQ ID NO: 59381 - protein, 152 aa, Zea mays
  Coding DNA Sequence Number=SeqID_16006
MTLEASLESSRMAPTTLTTDDLLKRVKGTVGKADYTVPFPMCPERGNISLAIELPYPQSPKTRLAGRHAGWLKRAAHDALEKHRRAQEREELSLEASPSSDDNDDDDDDEGMEVRLGFSPEPGAQSVCADPTPAKAVKGAEAVRLALGGKTG

SEQ ID NO: 59382 - protein, 67 aa, Zea mays
  Coding DNA Sequence Number=SeqID_16007
  Subcellular localization annotation: CTP_CleavageSite=39; ConfidenceScore=5.19e-01
MVNQRTHTSCLARSAMPRWDDKPSLPQSPPQFICSRTKRLMLQRYNTLNPHPLPFIFIFFTLPGVVQ

SEQ ID NO: 59383 - protein, 177 aa, Zea mays
  Coding DNA Sequence Number=SeqID_16008
  Homolog annotation: Hit_ID=A0EVH6; Match level="QueryCoverage=34%, HitCoverage=17%, E-value=5e-07, Identity=50%"; Hit description=Milt putative polyprotein
MATKKSIVVMEFVGGGSLNAYLVHHDGHGIGEASVRRASSSSSCMHSTTSTRILKPDKILVDATSNIKVTNFGLSTLTRTAQQAAHVYIVYRMSMFRCSYGVLFPLVALKQSQQHTSATNEISQSQPYYGMPMNSYQGQQLLPFALYDRSTLSTTGQSMYNIGPSNPLVDCSTPYAK

SEQ ID NO: 59384 - protein, 123 aa, Zea mays
  Coding DNA Sequence Number=SeqID_16009
  Subcellular localization annotation: CTP_CleavageSite=37; ConfidenceScore=5.19e-01
MVRERRTQTNTMSKNTRDTRFIPRFGHTTKVPYFLVEAPTKSRVSFNPNPPLPTTKYQSSNQEEQEGFRDEAPKSQLFNLTQRFLSKDLKWERQEVCEREWGGVSQVRNGVQVVLFCGGERWE

SEQ ID NO: 59385 - protein, 150 aa, Zea mays
  Coding DNA Sequence Number=SeqID_16010
MGKNNKRKREPTPPSEEFGDSEYSEEEFSSEPEGSPAPVSPPASSDDSDDSQGIAAEVWTYIRAVERSGLEGSDESEYSSDEEDSDGGEEGEDDDDDDDDDDDDGGSGGGGDGDGRGGTKGGSGGSGDSTRGSSRGSTRGGGGGRGRASG

SEQ ID NO: 59386 - protein, 90 aa, Zea mays
  Coding DNA Sequence Number=SeqID_16011
MEQVPRSSKCDKGRGDGVAGGNGGGCAAKGAWVAVVRMEASTRAGSRVSGGVYDLDVCGIWLQESLPLCMLIPGFKGKLPGIFLGKALFS

SEQ ID NO: 59387 - protein, 196 aa, Zea mays
  Coding DNA Sequence Number=SeqID_16012
MAAPSRGKKRLVVDVDVELDSEAKVASAFSRLSVSIVAKPSGEYVRAKEHSSTSVNCAATSGTWYTQQQTPSVVKQCSEPRSVSITRFETVRSDLALAIAKMHVVGNELKDLAGNEIMDSPDTAKEVSVNFSMWRVYELAQSLLDEAQRLEDLEAGPSPPLSECFNNHFAEDEDMGGGEWALDDVDSEELVDRQMK

SEQ ID NO: 59388 - protein, 127 aa, Zea mays
  Coding DNA Sequence Number=SeqID_16013
MGEEGRRRGGRFREAERLSRRHARVRPHARKEKGSGWAPHPPVETASPPAQEVGASTLRAGAIRLFPFASAGGGVWEASFPITSARDASAPAQGIPVAGGDPDGDGDDDDDGGSLSHITELSEEQKP

SEQ ID NO: 59389 - protein, 106 aa, Zea mays
  Coding DNA Sequence Number=SeqID_16014
MAGSKDSSEVSTSNIITPTWEALPAEEQLLFEERQEQLIQEAKAKFLADFKVDRNNKVVPLSCDRSGFAPTYYEYPKFKYKRDPIMLLYSFLVHRFAVLIGINEST

SEQ ID NO: 59390 - protein, 328 aa, Zea mays
  Coding DNA Sequence Number=SeqID_16015
  Homolog annotation: Hit_ID=Q3JWI1; Match level="QueryCoverage=88%, HitCoverage=40%, E-value=1e-07, Identity=26%"; Hit description =Putative uncharacterized protein
MNFMAELAAADARAHGKEASQFDKTVAGRTLWLGLLRDQDSCRDAHDVATPQHHYGQARPWARRAGRTRGQDPGARPAEEHARATPRTRARYNISSSKQRARLRGVAIVVATARPGRGHAQRKDDTREGATKVATHQRCRERPWTDLGVLEIEQRRRERKGYARPPGNGRRPACREGSRGEEHAGMNRQGDDASREKERGGALWGLEGGRSGLGLDAGRGKDEHMGGARSRRGLGWGKGEGARVRDGASAARARGEASREKQRPSSARQEKPASAGRSRAEPRAGARHWRSEQGEQKRWMRREEDCAGRIKTARRRQEKIRARWKTKI

SEQ ID NO: 59391 - protein, 140 aa, Zea mays
  Coding DNA Sequence Number=SeqID_16016
MDEYILADNDFRQRREEAWASEGESTLGMSHQSTTPVRTTTKEVIFKDHSKAHSLQDSSKASLGHQLQEAEAVGALVEDMGISPEKSFAYSVVRTKATIQERARSPSRSKKKLPKQRLGRISQSKSCILLRATPPTYQNM

SEQ ID NO: 59392 - protein, 517 aa, Zea mays
  Coding DNA Sequence Number=SeqID_16017
MELSMDDYLVGRVAMFDAHTRLAPAGAESGQLAVVPVAVSAGLVAAATVAKGDVVSSEDPWSKFCTGGKIASAAATKDVAASVAQQLKYAAAFAKRIASGALTLEFSAERRRLEGTIERLRTQHTEAVRDKSAAENWSRNLLEKLTSAEAEKEDLSRRLAEEREGAQRAHAEAQAARAEASLALKRATDAKSGLKSLCGYAKKMEATTRARVDRAHALLVDAYRQLGVRTAPFDKSGKEVGLRFLGWLQEELESLPSIATGLMSYASLVTCGGAVNALSHEGCRHFEVFDRVTEDFDSGIFQVGDEVLKRSAGMLNDDEDEDFGGIKSLVIQTEEAGVTPQVLSPRALIFSCRLHAVFILPAQSSSLRIHLFCSPCSLLQCLAPAPGSALLLPVLAGFSCRAELGRCFSLEASPRARAAGAPSLTRTPSPFPQPRPLRDRAPPLCSSFPLPVSSPSPDLPPSSPHGTPSFLLSTRVVASPVRPYALLSPRSLPARRTSPVPWWPSIALALAPSLFNF

SEQ ID NO: 59393 - protein, 216 aa, Zea mays
  Coding DNA Sequence Number=SeqID_16018
  Subcellular localization annotation: CTP_CleavageSite=15; ConfidenceScore=5.03e-01
MDDGDRVGRLRPSPPASRGGRCPYSRWGNSPKTRGAGAPWVLRATGWPGRLGKARGTQWRGPIRDRGTGGWRPTTRRHGGGANRLRREIKRNREQGRGKGEGRGGSLPQGVPQGPLSSGEGAMTARVNGGGTGTAWRTAGEREQRKSGRERRNWSVSRVADVEAELTVAESTTGLQRRRGNGLRAAADNDDSSLACAQRGGVEMRLCRCANEGKGE

SEQ ID NO: 59394 - protein, 178 aa, Zea mays
  Coding DNA Sequence Number=SeqID_16019
MGSRAPGTVLALPRLGAEMARLRHTARKSVIPFLPSRLAERPLCRTVSGQSSHLERLHHRLREEQERQLQQREQQGSSSPPEQEVESVRCRFPVPQLEAPPAPPRDAPTAGGGPRGDPNDDDSDHSTEPSEPQEAEGWVARPITRDAARGCHFHDALDTLLRQAFDRHTWSIEYRCVV

SEQ ID NO: 59395 - protein, 98 aa, Zea mays
  Coding DNA Sequence Number=SeqID_16020
MNSTPSPDLKPRRRVQPPGDRARRRVLITGNGEVKEPHHDARAIPRQRRSAGKKLPSHRGTECPSTSVRRHHPLASPKFFSADTGRSERRKASAAAFG

SEQ ID NO: 59396 - protein, 230 aa, Zea mays
  Coding DNA Sequence Number=SeqID_16021
  Subcellular localization annotation: CTP_CleavageSite=60; ConfidenceScore=5.25e-01
MAGKTVQIAVNAVVTSHLLVCLYSAAAFENKSPTVRTVQTTRVNTNYIPPPRQAPIYLVVVEEVPVDLHHLRVENGVILEDSSEEILATPTLLSESQAFAAGASSSAPPTPIAQAPAPGGDDLDDFGDGGEDDEEYHTYRQQLHDTRYIYLPLCLRGERQPDVVPGEAREDRLNTLVGVVACLNTDLDSATLDLSRVHRELEEAHAKIASLQPSKLSSKEGIYPKPKSLP

SEQ ID NO: 59397 - protein, 128 aa, Zea mays
  Coding DNA Sequence Number=SeqID_16022
MQDVAWRALSQYCLLFSGVADGLDLKYYPRHSIGSAGGVIVSPVGEGNPWLKGMVNMAVVLNTELDHTVDELDKARTEIVELHVERVARHYQDGGSPAPVRIQHPYRSPRGRYAYGTPDCMTQIDLEP

SEQ ID NO: 59398 - protein, 217 aa, Zea mays
  Coding DNA Sequence Number=SeqID_16023
MEAGAGVGRSAAGETREHRTHGGRDPATCSRVSIRGLLGAWRELAANSVRRLALGELAANLGGDWRAPAGELLATGEHRLSNSAVAQFRELGLASQMGLVPNGPCALVSKRVCEWLGAWAACLLNAAASSYRGEEEEEAGSDGGVIVAAAATRAPPIEADDAATGQQRLGNRRGALPYPQEGEPSQPHERVTDHSMSDASLLGEPAEGRGGDGGDHH

SEQ ID NO: 59399 - protein, 157 aa, Zea mays
  Coding DNA Sequence Number=SeqID_16024
MHGTQKTTTYTIGIRLFAECRPPLPTAFYPALGKANFAERRTRQSPTLGKDLIYRVWDTRHSPALGKDYFAESQTLGKDGFRQRAVSGRLQLTAVSLCQVPNIGHLAKDALPSVFSRHSAKSLETWKTVHAKMIFMLLSISYDRFQERTGNFEQHAH

SEQ ID NO: 59400 - protein, 135 aa, Zea mays
  Coding DNA Sequence Number=SeqID_16025
MEVIGVSNLALIRYGNGYPNTQQVLPDMKAVIGILEFKTFLAGTGYLTGKITLTRMGYPTGLDEATTLFIIGIRLIHVAFHSDDSIRAKYLEEIANTRCGAQERWSMAEVKVMRARADGPGAVKGECWVLTDGSE

SEQ ID NO: 59401 - protein, 1373 aa, Zea mays
  Coding DNA Sequence Number=SeqID_16026
  Gene Ontology: Mol. function=receptor activity; Biological process =biosynthetic process
  Homolog annotation: Hit_ID=Q6Z027; Match level="QueryCoverage=98%, HitCoverage=62%, E-value=0.0, Identity=79%"; Hit description =Putative death receptor interacting protein
MSSKWRSLQHRHRYTYTSIVFPKHYLEALTLVPAEISSSNFFVRLSNLISLTSTYSQVVVVKDLASAYVQFLSTTGTPDEAVLAATKLYLEILFLENSLPLHRTLISVLAKCKKFSTVISGCFALLCEEYGGSGSKAKKRFMVSRAALSLIGYPKLGFLDEAVERCAEIMALDVVDGLDGVTKDIGEGSRPSPVVMEQCQEAMSCMYYLLQRYPYKFIGLDKASSVFKSAVRTILSVLKSSAFSRDCLVASGVSFCAAIQVFMSTEEISWFISQGLFGIYANHEDRKNQSVHNVFSDFDLCEQIRDLSVLSRLCLLRGILTSIPRTVLNMHQLHSSGPLWTVLYDGILPELCKHCENPVDSHFNFHALTVTQICLQQIKTSVSSDITDFSGDYKPFSRDVVNRILGIIWRNLEDPLSQTVKQVHLIFDLLLDIELCIASEDREHNNNLFLCNVANDLLRLGPRCKGRYVPLASLTKRLGAKSLLTLKSNLLSETAYAYIDDDVCCAVTTFLKSFLETLRGECWNDDGVELGYDAFRALCLPPFMRGLVSGNSKLRSNLNTYALPALIEVDAESIFTMLGFISIGPSTNETKLDVVLKNDQCIAALVSLLKVSRNLALVEGDIDLDPDELSQIQQMDSKGAAVISVKGIKVTVPFNWFALALTHSDESLRIDAAESLFLNPKTSSLPSSLELSLLKEAVPLNMRCSSTAFQMKWTSLFRKFFARVRTALDRQVKQGSWIPSLTSSVKGAGSIDTSKATVVKRAEDLFQFMKWLSSFLFNSCYPSGPYERKTIAMELILTLLDVWPICRSEGKIDLYPYNDSIILPDSTISFVGSIIDSWDRLRENSFRILLQFPTPLPGISLSTSINDVIRWAKKLVLSPRVRESDAGALTFRLIFRKYVLQLGCILVFSKESDCLECYTQSMNGDTEVTSQNPVAQYISSLIQWLCIVVEEGERDLSEACKKSFVHGVLLTLRYTFDEMDWNSEVVQSCISEMRYLVEKLLQLIMRVTSVALWVVSSDALSLPYDMDDMIDDGSFLSDIYDDQPTTTSEREEKNAKPGSNGKPAEQVVMVGCWLAMKEFHAIVALQVSLLFGTIIRKIPLPGCSHSASSQNGLPDSIEETSISEEILDVGQLKMMGDHFLQVLLKMKHNGAIDKTRAGFTALCNRLLCSNDSRLCKMTESWMVLLMDRTIAKGQTVDDLIRRSAGIPAAFIALFLAEPEGTPKKLLPRALEWLIEFAKNSLANFQKDSNQRSGVMKELLESQSETTSVYSNGNLSKGRDEGVVPTVHVFNVLKAAFNDANLATDTSGFSAEATIVAIRAFSSPYWEVRNAACLAYTALVRRMVGFLNVQKRESARRSLTGLEFFHRQVHNVYT

SEQ ID NO: 59402 - protein, 617 aa, Zea mays
  Coding DNA Sequence Number=SeqID_16027
  Gene Ontology: Mol. function=receptor activity
  Homolog annotation: Hit_ID=Q6Z027; Match level="QueryCoverage=99%, HitCoverage=32%, E-value=0.0, Identity=60%"; Hit description =Putative death receptor interacting protein
MAHSVQHTDPAISANMGKANVLLLSKSFNSIHGLLLQLASLLDNNFRGLTDGSMKDQIIGLLLEVLSRCSWLGCTKLCSCPIVITSYLRVLDLMLDVARTGKSRHTEVIQALLLELTSQCLSNTASTQYAFHDPTRIELKQQATESFLSCVGLSKKTDETNDDDVQLQILGEPTLEMPRVDYSLHEVHKEILSCLTDPSYDVRITVLKRILWLTKSIRHGYADNILHQWAGVNLQPALMERLFVEEHPKCLYYNLKIIFSWNMEFPFNNGEDSSTLLSLWDRINEGDGLSDAMLRLNLFVTLVKNQSEPSESMNARRAAAEAIVASGLLEEASYVASSVSNMYSPSEFDEDHTKEKCMEDSVFEFLLEDEDAYLRQKLAKDIQKIIAKGSANTFCDDSTPLQVDRVIELSLDYLTSLFGLWLKYVEFLLRIVLGTGNALNSRGDLVRQIFDKEIDNHHEEKLLICQICCSNIQKLLNSKCQMEAGAETKLFLQNWREIFLKQLTSLTGGYIEKEGKNDWIGGIGNHKDVFISVYAVLLGLYALTQSGSLDQLEDHCAVYLQEFANLERSITPFLKNPLISNLYALVKLSHERFISSDKPEDQVGDSGSSFDPYFLIR

SEQ ID NO: 59403 - protein, 244 aa, Zea mays
  Coding DNA Sequence Number=SeqID_16028
  Gene Ontology: Cellular component=integral to membrane; Biological process=regulation of transcription
  Homolog annotation: Hit_ID=A7PJP3; Match level="QueryCoverage=82%, HitCoverage=97%, E-value=2e-35, Identity=41%"; Hit description =Chromosome chr12 scaffold_18, whole genome shotgun sequence
  Pfam annotation: Domain name=Elongin_A; Domain location=9-142; Score =14.8; E_value=1.3e-05; Accession=PF06881.2; Description=RNA polymerase II transcription facto
MEFGRKPLSLVELCVRKAIDNLRYMGSVDGVEMDLLKRILPHCTMEQLTRVENSTEMDLSLVTDPLWRRFYQREFGQEHTSKVIARLKELGQKTPYTWRELFAAKKEKQKEVEDKMLDKFTKKFQAERAEKQSKQIKLCTKVPPSSKRSFFGGCILAGSGPSSVSSSSYKSPILKKARIEVNSRARLQSAMQKNTFARSSQPIRTTSVSGQPVRTTTIHRPNSTVTITKPMGKSRQIQNSRPKF

SEQ ID NO: 59404 - protein, 159 aa, Zea mays
  Coding DNA Sequence Number=SeqID_16029
MDELFIKLKSTKIDHQTQAKIENREEQKGKYEDIPHDHHSNRCKGKWEYNSSNVTPGFEGCRSPEQVLTERYSGNSLSPLNYHRIIIGITSLSVFWTHEDPQPTSEFDAAYPCPDGLMQDETQGGRMRLILSCTGFPLGKALDIPFYRYKEMVQLYMGV

SEQ ID NO: 59405 - protein, 87 aa, Zea mays
  Coding DNA Sequence Number=SeqID_16030
MAASLVVGKSEPGRGLSLALSFKDVHHPCWGGGQAGLVSCLPHGLATRFFLQHSGEKGVHQPYGGGELPPTAWSGKPPRVLPTSKSR

SEQ ID NO: 59406 - protein, 89 aa, Zea mays
  Coding DNA Sequence Number=SeqID_16031
  Subcellular localization annotation: CTP_CleavageSite=58; ConfidenceScore=5.21e-01
MTPKSKLPAPHLLLAMAAPCAATAHCTSEPSTPSNLICIRGRYALRRQAVPRLHLSPRCALLSPAWPRPAAASPAETGSLRVVLLPGHW

SEQ ID NO: 59407 - protein, 101 aa, Zea mays
  Coding DNA Sequence Number=SeqID_16032
MWCCMACVGARAASYLAWGTRAHQLGCEPSETGWPSAAGLGARWSTGATVGRTKELGAHWAAAGETTQGKRKEKQGKEKGVTSKHKSTGRFDMVALKKKYL

SEQ ID NO: 59408 - protein, 143 aa, Zea mays
  Coding DNA Sequence Number=SeqID_16033
LGVRTSGCLPWSRREGLVVVLHGEPLEAPSFNVVLEGDVKVLYFPPPAKLQTGTTDKLMLSSGHTGPTMVKISPEPKVRKNPKKCLAKVHENGNLKNRVGIQMCKIQIIEIKEAAEKWRNGQGKPSDEERHKDNGFMGVLYRK

SEQ ID NO: 59409 - protein, 209 aa, Zea mays
  Coding DNA Sequence Number=SeqID_16034
  Homolog annotation: Hit_ID=Q7XBE0; Match level="QueryCoverage=60%, HitCoverage=16%, E-value=1e-12, Identity=33%"; Hit description =Putative gypsy-type retrotransposon
MARLQGLSISNFDHALEEIIPKNLLSEPPKVDNPIICLEVLDYVLLPCDPVGQEGGLAREDALALNATDSSPPAPLGMAEGASALEVATREGPAPEGGAGSDLAPEGVGAGSFFAASMDVHVGSPPVQSKEPAVTRLSAALAGLVTLEANDPDARSLPPVDEAKDVLDSISAQLKSYGAPVPDQVSSLMQWNPLLLQKQIEDLKASNIG

SEQ ID NO: 59410 - protein, 133 aa, Zea mays
  Coding DNA Sequence Number=SeqID_16035
  Gene Ontology: Mol. function=catalytic activity
  Homolog annotation: Hit_ID=A3B342; Match level="QueryCoverage=43%, HitCoverage=18%, E-value=1e-12, Identity=62%"; Hit description =Putative uncharacterized protein
  Subcellular localization annotation: CTP_CleavageSite=22; ConfidenceScore=5.12e-01
MRQPTAPLAGGTGLSGVHRTVSGAPRGHQLKLFALGNSRKPARYNSPDCPVSPIHPPPQGDFQYYLADEPGVHFVWQPNQESSVLVMSHAFDDYYIEDCGIILASEVTQRRINNSDQFVILATVMVAFASACL

SEQ ID NO: 59411 - protein, 45 aa, Zea mays
  Coding DNA Sequence Number=SeqID_16036
MVPPRGPRAAALVTVRGKDEQATMESGVQQVEVAEQELIEGKLCP

SEQ ID NO: 59412 - protein, 286 aa, Zea mays
  Coding DNA Sequence Number=SeqID_16037
MVTAHGGTGPAKVLRRAIGALPEDIPARKVHEDVRGIGALEGRGVTHLMRSPRSRRGLRIEWNHSETPATQLMRGSAGCYGRGPRSSPFNYQRVERRGEREGKKIHLTGGANRAQGAAQRELGRVGEIPIWADREGNRPRRPTVALHHDRATVALHRELARLAARSVARLPAGARLDGSGTAEEAEMAAALMDVAVASAAASAAVFSAAASVSAAASSCSNKKAPTAFVAAAFAKKPETPTTANVAQEKHEELERCIEECESGSEVVFRSIVRNRVSLLNIHSPAI

SEQ ID NO: 59413 - protein, 483 aa, Zea mays
  Coding DNA Sequence Number=SeqID_16038
  Homolog annotation: Hit_ID=A3BL18; Match level="QueryCoverage=76%, HitCoverage=85%, E-value=3e-32, Identity=31%"; Hit description =Putative uncharacterized protein
MTSRNHRTLPGLEATEPERPAAALSIDLMEEIFLRVASPADLARASTACVSFRRIISDPSFLRRYRSIHPPLLLGLIGVAGFTPADPPHPSAALSRAVARAADISFDFLPRSRTANWRHSHPWYPCDVRDGRVLVKCIREEPVVYLDLAVCDPLSRRYLLLPPLAEDLVLASVGLQKPSVVHSGVSFIPSGGVEETSFRVISWKYSKTRLAVFVFTSSSGSWSVGTSTTRDDLGLDHEFVRLYSVQCVYGHCYWRLCGTSKLIKLDMNSMEFSTVDLPPDHEKRNVIIVESWGSNVAMFSMIDEGASVDYYTSSQNDSEKSHEWHMMISIPLPADYIIGPCFKGPAEGYIFLEGIRIDHEAGHSGLFSLEIKSFKIERATPPVIRAAINGRCRGSPTPPSTEGVKDLLPLYSAIPVIRGRHQRPPTHAVDGRCPRFHPIAPSYLLCPTFLPTPSMARADPRWPRIRPTLLPHLLGPLPCPPLA

SEQ ID NO: 59414 - protein, 68 aa, Zea mays
  Coding DNA Sequence Number=SeqID_16039
MPGFAPCSPRSDHDFDFPNDAGARCFRCAVYNYDGDYKDKDGVKGLCVVGAINNCTSQLPTYGRSSPP

SEQ ID NO: 59415 - protein, 338 aa, Zea mays
  Coding DNA Sequence Number=SeqID_16040
MSSRSLMQCVFPPFEPLDGEHPQSFRLVVGGMQLRGSWYLSAIIRLQGFSSCSPAASPRRWSPKTVTTSPWMGRSKPGCGPRPSLSFRDVYHPCWGGERGEPGLYLPHGSAGHLLFQLLVVETILQLCEGGVLQPCRGRRTVAAQLGCNILSSSSLSWRGWGRGPAAGRSFPTVEAVSAAYGPASGSLALMSDSPVGYLNRFTKRESPRAKVTSELEQRQSWLRKEDLVGRSLVGSSAGGTDARVELPRPRVGLMSSGDSRPRPRGGRPSRLLEPDSWRRPWRQWPKRGADVVLQSGDPPTASPSEARSDLAEGVVDAEGAAAPFNCQDPSLQDRIIL

SEQ ID NO: 59416 - protein, 121 aa, Zea mays
  Coding DNA Sequence Number=SeqID_16041
  Subcellular localization annotation: CTP_CleavageSite=34; ConfidenceScore=5.56e-01
MGTGASSPYSSDTSPDTDTRSGYCTSTRTIHNMCAPSFSSLLDAPFVFSAFALFFLPNLLPPPTVTAASRSTLVDAGTVRVSLAPSLSPCVPPRRTQWRLPRLGYLGDEEPKSEILDIQGS

SEQ ID NO: 59417 - protein, 253 aa, Zea mays
  Coding DNA Sequence Number=SeqID_16042
  Gene Ontology: Mol. function=kinase activity; Cellular component =ornithine carbamoyltransferase complex; Biological process=amino acid metabolic process
  Homolog annotation: Hit_ID=Q6QP54; Match level="QueryCoverage=29%, HitCoverage=26%, E-value=1e-16, Identity=61%"; Hit description =Putative kinase
MAPPVDVVGPCPRLGEVEAPPRSRSSLSSKVEVESEPPGQTRRRPSADARAESEPWGRAKRSSSSFGAEPESEPWGRAKRSSSSSGAEPKSEPWGRAERSSSSSGAEPESEPWGQAERSSPSSGAEPKSEPWGRAERSSPSSGAEPESEPWGRAERSSLWRLRPDLAAVSLTLSSGTAVGAAQAALSSCQTVGVAIWPRLLLGEDWASGEPKVCPLLEGVFGRDVDPPRSAALARGWARARRDRVPQMDRSLT

SEQ ID NO: 59418 - protein, 220 aa, Zea mays
  Coding DNA Sequence Number=SeqID_16043
  Gene Ontology: Mol. function=binding; Cellular component =mitochondrial inner membrane; Biological process=transport
  Homolog annotation: Hit_ID=A2Y4C0; Match level="QueryCoverage=22%, HitCoverage=15%, E-value=5e-18, Identity=88%"; Hit description =Putative uncharacterized protein
MEMGGMSDAERLFFFEMACKNSEVAYEQNPNDAADGRLPVHQIARMEACKLVVSWFLSVELALEFAGTVLSCAGAPGKVTNDIGLLKINLGCLVLYVLLSYQPLDTAASRMQTSVFGKSKGLSETLAEGTWMEAFDGLGISIILTCNPSIQVLKLKDQFGGTILNLLRRLELHLIERWWSKKVLVAYWVQPRLALPWNNCERTSWWQEVEEGVFYKIKMR

SEQ ID NO: 59419 - protein, 88 aa, Zea mays
  Coding DNA Sequence Number=SeqID_16044
  Subcellular localization annotation: CTP_CleavageSite=32; ConfidenceScore=5.15e-01
MAPEVGPDCLSASLCQVALQSVRRRRRCPSVRCSQLLGPVHALMARRRGERGLGGGCAGDGMGETKELTGGARLPARGSGVRGRGTRR

SEQ ID NO: 59420 - protein, 106 aa, Zea mays
  Coding DNA Sequence Number=SeqID_16045
MAYLFRRGHYGEGEASPASPARGAACPAAELMRRGEWFAGRPLRVHGPFEERNTGASSSHRERGFSRCPRMGRRLESRYWFRSRGGAVVHGRRCSCSHAASGAPVA

SEQ ID NO: 59421 - protein, 142 aa, Zea mays
  Coding DNA Sequence Number=SeqID_16046
  Gene Ontology: Cellular component=integral to membrane; Biological process=vesicle-mediated transport
  Homolog annotation: Hit_ID=Q7XYD1; Match level="QueryCoverage=67%, HitCoverage=62%, E-value=9e-25, Identity=59%"; Hit description =Geranylgeranylated protein ATGP1
  Subcellular localization annotation: CTP_CleavageSite=56; ConfidenceScore=5.10e-01
MKNTTLMVLKLSSSGVGSSSSGGESGSEAVVLANAMDVNHFGYFQRSVAREFIVFVARTIAQRTQPGQRQSVQHDVAFMDDHYPVWSAFSLLNQVLSGTIIRGTLKAPNSQLSRSDCSHFAAPLTDLTEGQRRLRRTDCSAT

SEQ ID NO: 59422 - protein, 42 aa, Zea mays
  Coding DNA Sequence Number=SeqID_16047
MATHEARGSSDVTEGARFLRFNLEMRSPVNNMPYFYAVYRIT

SEQ ID NO: 59423 - protein, 232 aa, Zea mays
  Coding DNA Sequence Number=SeqID_16048
MARKRSQKNKKTQENKEVLKVHTQPIKRSNLDSTQEQRANRRHLWFGAPDCPVHHRTVSGAPPDMSGAPEDSNANSPPSGISRGTRAIIHRTVRCTPDSVRCAKEERPQELASFGKLHRPVRYNSPDCPVYTGLSGATTEQRLSPCQRLSAAHLMRALRAQKSGAPILAHRTANSTCPVCTGHPGGPTSQKLQRSESNGSDDMAGGTGLSGVHRTVRCAIEQPTVKFGGLGL

SEQ ID NO: 59424 - protein, 282 aa, Zea mays
  Coding DNA Sequence Number=SeqID_16049
MNALSREGCRHFEVFDQADEDFERDIYKVEDPIVKESAGAIYDRMWARCLTRSRPRRRPCPGPPPEIAEGAPDTSASAAAGGDLPPETAEGAPDAPAAAAPSAEDPATVAAEATAEATVEATAEAPQVQDFGPAHATATTKFLAASTADGGNECGGSASEFSDFADSGSSVEWTEESSEEDLDYFAALDVAAAEASPHAADTEDVSGPSTGRRRRRAVAKRRVSGAEGGRLRVSRAGRQELLSLPAAVSTGEGELRSLFAGLYDEVVCPRLSMPVKALCTWS

SEQ ID NO: 59425 - protein, 244 aa, Zea mays
  Coding DNA Sequence Number=SeqID_16050
MVREWRVFPYGRNIAAVVSAVIDKDRQGAAQKRQAVVRLVEARPKRQRGAAKAAAPGGGKPPLAAKSGTPASSKAPEATTGAGGSKSTKAVPPSSTVPEAAKAARALPSAGKRVVDFATDISVDDYLGGSDEGQLAIVAPAAATTTAAVVPKAKGGALSAGGEVLALAAVRDEAGAASRRLKEVTEALSQVANFANRTASGALTAVVSAEVERLQTQHADAVREKSATDSKCRKLADKVAALEG

SEQ ID NO: 59426 - protein, 383 aa, Zea mays
  Coding DNA Sequence Number=SeqID_16051
  Pfam annotation: Domain name=Transposase_28; Domain location=26-162; Score=-50.5; E_value=0.0068; Accession=PF04195.3; Description =Putative gypsy type transposon
MPSSSSSAATTPPADASSEDTLSNVAVEELRPGDTVEFSVSRISSVRVQDMQHLEYFGSGVGRVPGAEEVPEPKGELLVFEVFFTADLRLPAHRFVAEVLQRFEVQVHQLTPNVVVALAKKDKAVTSYGELFPCARNKWGNWWDFWFYVSDGELEDHPGLPVAVMCSHYYVAYPQFEVVEDDEDEGALRCAARMSSERDLVEEFIEFGVWPLAHGWALGEVCPCEMPSLGRQRVRSPAFTLDLHGRDPAAFVHEAEDGAARIVGRYVPRIEGLRSWDIRGSNVRLNRVFELDCLSYGGYPGEDTADRRGKKPVDVTEEGPSQEAAPATKKRKLALGGRMSSPELRESSTRMLEVTGGRWPKNVPIPRAVGEDFFTSRMARDLK

SEQ ID NO: 59427 - protein, 116 aa, Zea mays
  Coding DNA Sequence Number=SeqID_16052
MGLPNRGGKTFWQGLAPTSGDLDSRPHIIAAPVEHLCSDPLSSEGPRAPAGEPTSHTERFTQDEDAFGLDDTFKHGLLDPPSVKAGPQREQGDWCSPVFGHDEVDYAVAFGVVGYL

SEQ ID NO: 59428 - protein, 147 aa, Zea mays
  Coding DNA Sequence Number=SeqID_16053
MGKSNKHKREPTPPSEDFGDSEYSEEDFSSESEGSPAPVSPPASSDDSDDSQGLAAEVWTYIQAVERSGLEGSNESEYSSDEEDSSEEGGGGDGGDDDDDDGGDGDDADDDGDGGNRGGNGGSKGGNGGSRGSNGGGSSKGSNKASG

SEQ ID NO: 59429 - protein, 136 aa, Zea mays
  Coding DNA Sequence Number=SeqID_16054
MKTLTTFCGYHPLEMVTHPLGLFPAEKKDDPMWCNRVSHVKDVWAMYPDLVGRVTVQCMSALYRLQALQSDAMCRRFETGGSLSRRVNVAACPSPDGSSAWASAKGGSEVAGDGRERGGNPAAFVFVPRPGRVRLQ

SEQ ID NO: 59430 - protein, 159 aa, Zea mays
  Coding DNA Sequence Number=SeqID_16055
MVCMGLGGHRKHTLQDNPILQARILTVEGSSSTLGVNYTFGKESGSSRRLGWSPRGLGQLSPEDISPARGLGNSILASVPPVDDPARLWPTKSSFRANSASARADTATPGFGSSKSGRGVPLTKQEKPRTARLTEPRDSYASGIRIPHSSPLHGATHAW

SEQ ID NO: 59431 - protein, 99 aa, Zea mays
  Coding DNA Sequence Number=SeqID_16056
  Subcellular localization annotation: CTP_CleavageSite=60; ConfidenceScore=5.06e-01
MRSPIPVMVGTSAVTARRPVGVSEALYAKAVSPDLLTGNRWGRLINSASAFGNQTPQPNSCMSRGSLEEMVAGITWPSTLPPGWTVEWDPASAKEEHEE

SEQ ID NO: 59432 - protein, 237 aa, Zea mays
  Coding DNA Sequence Number=SeqID_16057
MDSVVLTWILGTLKVEMQDNAQSRYAHQRAILTRITSFSSFARVRDDLLLEELMTTAPPPPMPRHLSTVPTPESRPCGPPVLPPGRCPLGRALLHRPPMPLARLPPLAMVVIVAKAVVVAWVVLVVLLRLGAMAPGHPSTTRGPAPSPCGLDHLRALLHHARRPLSQPSTPLHLRWHFRRPRQYLTSSQDLATRTLPARCDNSGPLYTLRLPACLLFIDLHPACFDRCCLHHLAPPP

SEQ ID NO: 59433 - protein, 99 aa, Zea mays
  Coding DNA Sequence Number=SeqID_16058
  Subcellular localization annotation: CTP_CleavageSite=60; ConfidenceScore=5.06e-01
MRSPIPVMVGTSAVTARRPVGVSEALYAKAVSPDLLTGNRWGRLINSASAFGNQTPQPNSCMSRGSLEEMVAGITWSSTLPPGWTVEWDPASAEEEHEE

SEQ ID NO: 59434 - protein, 135 aa, Zea mays
  Coding DNA Sequence Number=SeqID_16059
MEVGKYYLAEPRDKNRVSLDHLFTPPPLGALRRGAAAGGGDAMQSALTMGRARGEGGEDGRLSAHARRRAGMVGCAGGHGSGAYLQELRRRRQDVWGADVAPQHWRQDVWGTDVAEWVGVETGAFKGVDAHTAVL

SEQ ID NO: 59435 - protein, 389 aa, Zea mays
  Coding DNA Sequence Number=SeqID_16060
  Homolog annotation: Hit_ID=Q6EPV2; Match level="QueryCoverage=50%, HitCoverage=82%, E-value=2e-64, Identity=65%"; Hit description =Putative uncharacterized protein OSJNBa0016D04.15-1
MRVAPRVLFLVRDAAGYGAALADALRPPPGLTRESSPFELPLGKYGLDGEKACAELLSFSDSSGSPQVTIFVLPDYKPPLAACVVNGVLELISSEATSTERTLIVPYITRSSSYHHGTEHATKASTVLHGAEIGATTDYTHLLVGGTTKPPTSLQIRSEPILCLLEMVRVLKVPTVLLVTSGGQQQGKSSTVSDLEGSADNRTTELAREWERDGHFPSGSRDAAQLTGTRGLQFSYSLRNAAHCGILSAVFPFSLTPDKADHYSPPGRFSRTPTPTPWRGKFLVDFATPRRVHRAWATWRRICRYNADSDPVDLDDEQEQVHGDEVVTKQSRVRRRTKHRQIRLRRGCSSSPHLSPSTPTVDGILRSGFPPFASDTWTTDLAFLRQFIR

SEQ ID NO: 59436 - protein, 272 aa, Zea mays
  Coding DNA Sequence Number=SeqID_16061
  Homolog annotation: Hit_ID=A3A8E3; Match level="QueryCoverage=90%, HitCoverage=77%, E-value=3e-87, Identity=69%"; Hit description =Putative uncharacterized protein
MQTCASLVHCYLTTALLLAGLANGGVEVKQTPASPVPKSVESSLPLVKIPTPESSKENSGVMWISSPDRLEDPRRPFQYSNSSGSPCVSESGSDIYSKREVIQKLRQHLKKRDEMIMEMQTQIADLKNSLNIQVTQSSNLQSQLDAANRDLFESEREIQHLRKIIADHCVTEALSHDKPLQAAHWQPDAANGHSNGYGDGCVDDADLHCISIEKRKVEVERVEMLKKEVVELKEVIEGKDFVLQSYKEQKVELFSKIRELQEKLSAQVPIIL

SEQ ID NO: 59437 - protein, 182 aa, Zea mays
  Coding DNA Sequence Number=SeqID_16062
MGSSSLRAEGNHGLWVKCTTSAEGLKTDISAVLTVMSGQGSSSGNETDGFGYVYGAAGDRVCEELLPLCFPWRRPPAPTTGRPQPLGIAAGGDPDDGGGDDSSSHDADFPANQEPEGWVARPITRDAARGCHFHDALDTLLRRALNRRTWSHRVSLCGSTSNSRGVYSDPLGGDLLVALEKS

SEQ ID NO: 59438 - protein, 62 aa, Zea mays
  Coding DNA Sequence Number=SeqID_16063
MRPNSPLEPRQCPHSLPRLISHSTALSRALPTLPDAAGDPCPLPRPSSSLETAPSHPELRPE

SEQ ID NO: 59439 - protein, 40 aa, Zea mays
  Coding DNA Sequence Number=SeqID_16064
MWTHIVNGTERDCESGMGTERLRPVDFLERNGSGSEENIP

SEQ ID NO: 59440 - protein, 80 aa, Zea mays
  Coding DNA Sequence Number=SeqID_16065
MGCSSAALLLLSLEERGLVEIGTFQPSLGFKDFRRAGWGGDFWDPRLLCDEPEPEAAVLAQTDVELAQKETSSAREMAVS

SEQ ID NO: 59441 - protein, 111 aa, Zea mays
  Coding DNA Sequence Number=SeqID_16066
MRRQPESTVADLGGCAENGGERGQRDSGRERGNWGASRVADVGAKLTVAEGTAGLQWRRRNELRRRWFNGGGALACAQRGGGGRGVCRDRERGIPRKGSFPVKEPGSEPPY

SEQ ID NO: 59442 - protein, 278 aa, Zea mays
  Coding DNA Sequence Number=SeqID_16067
MNKNIDIRSAITIGTPVPSPRVWTTSTPGKPVERQALGESPANAGRPKAHRQAGQQQPASPSMAGGRLLYRTGGWSPPPEARRGGGRPTRAGGRAPAQPGPHPSEDDEDQLGAGPRSQPSLLLPIQGLVPSWAESSPTHSKVLPYGAGGWVPHVMRAGSEQKKPNRRARCVQPPSGYKRLSTFAQTNGQKGRAAMQAVCNRAKWAHFSDSQHAQHGGPDPRVMQPTRRMLRACNCTATCATTAPPRLRNQYRDSRRPSARPSSASLARRSMRPKMGRQ

SEQ ID NO: 59443 - protein, 146 aa, Zea mays
  Coding DNA Sequence Number=SeqID_16068
MGVPDSPVAHRTVIVHCPVHAMYNQHRGGRFNPDGDQSLSSPPSRPRAFSRHVLQAPVPQRYRRAHQYRKIFGRVKPQPLASRLPTGVPCERSGPRRFHNSQPTPVFGRFGVGMVREHEAWLHPKLARPQGNLYIRRFSRIVQRPN

SEQ ID NO: 59444 - protein, 68 aa, Zea mays
  Coding DNA Sequence Number=SeqID_16069
MEDGATTPGCRAMSHHDDERLSPSNLWQRRVTIVNGTERDCASGLGTERLRPVDFLEWDGSGSEENIP

SEQ ID NO: 59445 - protein, 2177 aa, Zea mays
  Coding DNA Sequence Number=SeqID_16070
  Gene Ontology: Mol. function=binding; Cellular component=cytoplasm; Biological process=regulation of synapse organization and biogenesis
  Homolog annotation: Hit_ID=Q10D20; Match level="QueryCoverage=100%, HitCoverage=59%, E-value=0.0, Identity=84%"; Hit description=WD-40 repeat family protein, putative, expressed
  Pfam annotation: Domain name=Beach; Domain location=1405-1631; Score =372.0; E_value=9.7e-109; Accession=PF02138.9; Description=BeigeBEACH domain
  Pfam annotation: Domain name=WD40; Domain location=1920-1957; Score =19.5; E_value=0.013; Accession=PF00400.23; Description=WD domain, G -beta repeat
  Pfam annotation: Domain name=WD40; Domain location=1967-2005; Score =41.0; E_value=4.3e-09; Accession=PF00400.23; Description=WD domain, G-beta repeat
  Pfam annotation: Domain name=WD40; Domain location=2052-2095; Score =2.6; E_value=15; Accession=PF00400.23; Description=WD domain, G-beta repeat
  Pfam annotation: Domain name=WD40; Domain location=2130-2168; Score =20.2; E_value=0.0079; Accession=PF00400.23; Description=WD domain, G- beta repeat
  Pfam module annotation: Pfam domain module=Beach::WD40::WD40::WD40::WD 40; Domain location=1405-1631::1920-1957::1967-2005::2052-2095::2130 -2168
MQALRGYHLLALFLHRRMSLFDMQSLDIFFRIAACEASFPEPQKSKINRTAGYASGMSPEASLDDLTLPRFADDMSSGGSHGDLDDFSAQKDSFSHLSELENADLAGETSEFIVLSNADMVEHILLDWTIWVAAPISVQITLLGFLERMVSMHWFRNHNLTMLRRINLVQHLLVTLQRGDVEIPVLEKLVVLLGVILEDGFLASELELVVRFIIMTFDPPELTPNRQIVREAMGKHVIVRNMLLEMLIDLQVTINAEELLEQWHKVVSSRLVTYFLDEAVHPTSMRWITTLLGVCLTSSTTFALKFRTSGGFQGLNHVLPSFHDSPEIYYILFCLVFGKPVYPRVPEVRMLDFHALMPSDGNYGELKFVDLLDTIIAMAKATFDSLIMKSMLAHENNNLSHLNGTLVADLVEATSDMGGDLQGEALMHKTYAARLMGGEAAAPAVATSILRFMVDLAKMCPPFSAVCRRHDFLESCIDLYFSCVRSDFALRMAKDLTTVATGEMNEHDDDNGSLKDALSSLPHDQDQSTKTLSATSFPQEQKSSSSESTGMPNPFETAEAKADDSSNQEFSNKILNGEANQIFNNARDQGRITASGANGISEFHHVTDSPNSVAMNNVGSPVLSERSTHRAASTPTASPMAPFTSWPGSAGSYTDGRHLTASPSMASSISGIDLDSSPDLRTNIQGPSAANTLFPINSKLLLDIDDLGYGGGPCSAGATAVLDFVAQILADTISDQLKAALFIENILESVPLFVDIDSALVFQGLCLSRLMNFLERKLLLDDEEDGKKLDKSRWSVNLDPLCWMIVDRVYMGCFPTPLRVLQTLEFLMSMLQLASKDGRVEDAVPPGKGILSIARGSRQLDPYIHAILKNTNRMIMYCFLPIFLKSMGEDDLLANLAFLTETGRSLASKRYQEDFSIDICTVLQLLVANKRLVLCPSNVDTDLMCCFCINLMSLLHDKRVTAQNLAVDLLKYLVVHRRQSLEDLLVCKPNQGQQLDILHGGLDKLVTGSTSTFFEWLQSSQQTISKVLDQCALIMWVQYITGSAKFPGVRIKGMEVRRKKEMGRKFRESAKVDARHWEQINERRYNLDLVRDVMSTELRAIRQDKYGWILHGESEWQSQLQELVHERGIFPMRQPSTEPEWQLCGVEGPYRMRKKLEHSKFKIDTIQNVLTSNLGSNGGKIINKEDGELLLTSGSDTMSGLNLLTYDTEQRDLDAVEFSSFKDDDDIFKGGSTISGPIGWTDDKSSVNEQSLHSATEFGAKSSSLSFHMTESHQGKSELSSPRRAPSVKGTDARTSEDKSEKELLDNGEYLIRPYLEPYEKIRHKYNCERVAGLDKHDGIFLIGELCLYIIENFYIDDSNCICEKGSEDELSVIDQALGVNKDIMGGSESQLKSPTTWGGTAKVLLGGRSWAYNGGAWDYESDVLDLRNPQTFRRLDKPMGCQTEEGEEEFCKRYDSWDDPDVPKFHYGSHYSSAGIVLFYLLRLPPFSTENQKLQGGQFDHADRLFNSVKDTWVSAAGKSNTSDVKELIPEFYYLPEFLENRFNLDLGEKQSGEKVGDVVLPPWAKGSAREFIRKHREALESDYVSENLHHWIDLIFGYKQRGKLAARVRDSWPRVSVWILAHGLAATEREPRTGRTKQHRQCWSEEGCCRGGGEASRVYDSGSRFEELDRCWRGRRPATGGWPAAGDLSHRGRGGARGGVGVLQMGKERRRLGGGAATAQACSWLAASAARALLLAAASRGGIGLTWCRVGVAPGGCRGLRWPRRRRSRRRRDPWGDRRLQDGGAQRAAEDAVNVFYHYTYEGNVDIDAVSDPTMKASILAQINHFGQTPKQLFQKPHPQRRTDRKVPPHPLRYCAYLTQQEIRKTASSVSQIVSYNDKILIAAVNCLLKPLTYNEYISWGFPDRSLRILTYDQDRLLSTHENLHGGSQIQCTGVSHDGNILITGGDDGVVAVWRFVKDGIRRLLRMEKALCAHTGKITCVSVSQPYSLIVSGSDDCSVILWDLTSLVFVKQLPRFPASVSALHVNSLTGEILTGAGVLFAVWSINGDCLAVVNTSQLPSDLILSVTSATHSDWQDTNWYVTGHQSGAVKVWKMLHCSSDEAVNSKSKSPAVSSGGLSLNGQAPEYRLLLQKVLKSHKHPVTALCIPPDLKQLLSGDGSGHLLSWSLKDDSFKGS

SEQ ID NO: 59446 - protein, 357 aa, Zea mays
  Coding DNA Sequence Number=SeqID_16071
  Gene Ontology: Mol. function=aspartic-type endopeptidase activity; Biological process=DNA integration
  Homolog annotation: Hit_ID=Q8S474; Match level="QueryCoverage=31%, HitCoverage=9%, E-value=9e-13, Identity=41%"; Hit description =Putative pol protein
MKKKKVMMKKIINHQNHPLRTKKQSDASEREKHHFKDNCPNMAEPTKRRSKGKTLTSVKTWDDSSSEDEPPKTRSHRSSSRSSRSSRKCLMARGKMSIPSSSDDSSSDDDEGEEKPSLDELAEAVKLFQDVHKVQHKPRKKLSWGLKQVWSKGLGMVLLMEHRTVSGVKGSHSANKKIKFWIQQRSKEATEGTSGLGAPDCPVYTGQCPVHHRTVSGAPEDSNSNLPPSGISRGTRAIIHRTVRCTPDSVRCSKEEPPPELASLGNSLRPLRYNSPDCPVYTGLSGVHRTVRCNSGATAISAPTATCDAFNARAARADVRRAHTGAPDNEQDMSGVHRTSRQAQKSEAPTVRIQWHW

SEQ ID NO: 59447 - protein, 78 aa, Zea mays
  Coding DNA Sequence Number=SeqID_16072
  Subcellular localization annotation: CTP_CleavageSite=65; ConfidenceScore=5.07e-01
MVTCANGRLPKVNNARQKSEQRSVPSLLFFSGSAPSGGGYKYPNRPFGGVGAQATHQGILLTFPSAQTLKCLIESLSD

SEQ ID NO: 59448 - protein, 392 aa, Zea mays
  Coding DNA Sequence Number=SeqID_16073
MRHASWPRTEGAKPPRAERTTAQRLQALLHFRLNQRVKGRTAVQAACNYTKGAHPSDFDASSMEAQAHASCNRRAGYYVRETAPPLAPVPRLLDCGTGAATRGDPAHGPTVPTEHITHGSVRHGRRRGGRYGQRWAGSNGGGRRAKAAVKSSAGSRPLLGQRESPLPRREDNAPVFRSSNGSRTHNGCPANHSSRRINSAAEQATPLAGTGKGDTPKGILLREGSGPRALLLIRGSKAGPSEGFDSRLRELGLRAHYWSEEAPPRPTPELGLNLDAGRRTPPRPTPGLGLSLDAGRRTPLRPTPGLGLSLDLGRRTPPHPTPGLGLSLDLGRRSPPRPTPGLGLNLDHGRRSPPRPTPGPGLSLDLGGASASPDLGLGPTTSQGGHHYPTPS

SEQ ID NO: 59449 - protein, 208 aa, Zea mays
  Coding DNA Sequence Number=SeqID_16074
  Homolog annotation: Hit_ID=A2TJU6; Match level="QueryCoverage=88%, HitCoverage=72%, E-value=3e-99, Identity=95%"; Hit description =Aluminum-induced protein-like protein
MADFDTHGYFIGSFVMLIGYGGRGLFGAVNDIFCLFQGHIENIANLKQHYGLSKTANEVTILIEAYRTLRDRGPVPASQVVRDLSGKFAFILYDTLSKSTFVAADADGSIPFFWGVDYENHLVFSDDVGILKTGCGNSYAPFPKGCFYTTSGGLQSFEHPLHEVKAVPRVDSQGQMCGSIFKVDSESKKKQDASIPRVGSAADWSNQF

SEQ ID NO: 59450 - protein, 121 aa, Zea mays
  Coding DNA Sequence Number=SeqID_16075
MVTTSPWVGRSKPGCDLSPTLSFKDVHHPRWGGGQAELELYLRAGLWLQRVGFAGLAPGAPSCRKGGYRAVRTGGPPKTSRAARVAFVFWGGPAFAPVRRLRAEVGAPLVRGDPSGDLPVG

SEQ ID NO: 59451 - protein, 92 aa, Zea mays
  Coding DNA Sequence Number=SeqID_16076
MQKWLQHEDEDSVIKRRWEPRVGTQSYGKYQTKKGSTTLPQLGRTLQVFRMLFYLTHPNSSHPIKHDGIRIEQPDLQFRTSLRKQECPTAWV

SEQ ID NO: 59452 - protein, 83 aa, Zea mays
  Coding DNA Sequence Number=SeqID_16077
MRIRLKMMKMKIKRMSHLKRRTMIKGEMKRMKARKMIKRYRVKDRHTQESTKQFNEITPPDLQVYARRWSQKPVPQALTPSAG

SEQ ID NO: 59453 - protein, 161 aa, Zea mays
  Coding DNA Sequence Number=SeqID_16078
  Subcellular localization annotation: CTP_CleavageSite=81; ConfidenceScore=5.41e-01
MPCFSPTRGVLSPPSSLRPFAFKVRGLVGAALFHWCLASRMFISLAVVESELSRGPASHMGWWPASSSNIRRKRMITSLVKEANFGYTEGGGEGLFAMAHTLRWSPPLGRLPGAEVVASAGEPLGAKVATAAGEPSVQRWSLPLVEPLGAEVVVAAGGPSG

SEQ ID NO: 59454 - protein, 120 aa, Zea mays
  Coding DNA Sequence Number=SeqID_16079
MQIQREGWTSHPLPAQGGHLARAYFAQRPAMCQGSYPIPDEFLTKSRPLLMRTAHRKGSFRLHHPLPPQIADSNVWRRPPQKADHHTKSPPRHTSPGPPRYSASAGGPRPQISAGPPEST

SEQ ID NO: 59455 - protein, 136 aa, Zea mays
  Coding DNA Sequence Number=SeqID_16080
MSSSSLSAANTPPADTSSEDTLSNMVAEELHPGDTVEFGVLRISSVHVQDMQQLGYFGSGVGRVLGAEEVPEPEGELVVFEAFFTTGLRLPAHRFVAEVKGKCALGPFLCILVIECQHMCLIGNLCTWMNKVKIMK

SEQ ID NO: 59456 - protein, 333 aa, Zea mays
  Coding DNA Sequence Number=SeqID_16081
  Gene Ontology: Mol. function=binding; Cellular component =mitochondrial inner membrane; Biological process=transport
  Homolog annotation: Hit_ID=Q66PW8; Match level="QueryCoverage=94%, HitCoverage=94%, E-value=1e-148, Identity=86%"; Hit description =Mitochondrial 2-oxoglutarate/malate translocator
  Pfam annotation: Domain name=Mito_carr; Domain location=139-234; Score=106.3; E_value=9.5e-29; Accession=PF00153.18; Description =Mitochondrial carrier protein
  Pfam annotation: Domain name=Mito_carr; Domain location=23-133; Score= 48.7; E_value=2e-11; Accession=PF00153.18; Description=Mitochondrial carrier protein
  Pfam annotation: Domain name=Mito_carr; Domain location=238-332; Score=79.5; E_value=1.1e-20; Accession=PF00153.18; Description =Mitochondrial carrier protein
  Pfam module annotation: Pfam domain module=Mito_carr::Mito_carr::Mito_ carr; Domain location=139-234::23-133::238-332
  Subcellular localization annotation: CTP_CleavageSite=12; ConfidenceScore=5.25e-01
MADAKQQQQQPQQAAAAATGVWKTVKPFVNGGASGMLATCVIQPIDMVKVPYHRTALSPGFLHSARGFAPSSKKVRIQLGEGSAGQVTRNMLANEGVRSFYKGLSAGLLRQATYTTARLGSFRVLTNKAVEKNEGKPLPLIQKAFIGLTAGAIGACFGSPADLALIRMQADSTLPAAQRRNYKNAFHALYRISADEGVLALWKGAGPTVVRAMALNMGMLASYDQSVELFRDKFGAGEISTVVGASAVSGFFASACSLPFDYVKTQIQKMQPDANGKYPYTGSLDCAVKTFKSGGPFKFYTGFPVYCVRIAPHVMMTWIFLNQIQKFEKKIGI

SEQ ID NO: 59457 - protein, 70 aa, Zea mays
  Coding DNA Sequence Number=SeqID_16082
  Homolog annotation: Hit_ID=A9P973; Match level="QueryCoverage=85%, HitCoverage=16%, E-value=5e-07, Identity=53%"; Hit description =Putative uncharacterized protein
MSRAFDDYYIKDCDVISAPKVTQRRTDSNDQFVILATVGDTGADVNPGAAPPPWSTLDSAFHRSRKLDLS

SEQ ID NO: 59458 - protein, 158 aa, Zea mays
  Coding DNA Sequence Number=SeqID_16083
  Subcellular localization annotation: CTP_CleavageSite=37; ConfidenceScore=5.28e-01
MVSPTITRRRRRRLLPDQRYRRSSLQTPLERQRRHPPAAGSSSTSSRTATARQPAARAPRPATAASTSRLHVQPQPELAGDPGHRVAHHAGRPCHPGPGCHCLTPSPVTHPNRIEQARSAASLAAQQSLEKSCESSSQTGFVSGYFGLKWHQQDLNLR

SEQ ID NO: 59459 - protein, 795 aa, Zea mays
  Coding DNA Sequence Number=SeqID_16084
  Gene Ontology: Mol. function=transferase activity, transferring glycosyl groups; Cellular component=integral to membrane; Biological process=metabolic process
  Homolog annotation: Hit_ID=Q6I5X0; Match level="QueryCoverage=56%, HitCoverage=93%, E-value=1e-149, Identity=61%"; Hit description =Putative uncharacterized protein OJ1076_H08.4
  Pfam annotation: Domain name=UDPGT; Domain location=107-572; Score= -67.1; E_value=3.2e-07; Accession=PF00201.9; Description=UDP -glucoronosyl and UDP-glucosyl transferase
MATKVKKQTSILRTLSHPDLMANSGRIKVDDRRALEVSKKYTTAQALHFKLPPSPGHHRWRTGGGAHKPFLPCSSSPLSLHRSFRQPAHLTCARAMGPACKTAARPRVLLLCSPCMGHLIPFAELARRLVADHGLSTTLLFASATSPPSEQYLAVAAAVPDAVDLIALPAPPPDALPPATAARERAELAVASNVPRVREIARELGAAAPLVALVVDMVGAAAARDVAAELGVPFYAFFTSPWMTLSLLLRLPEIDAARAGEHRDAAEPIRLPGCVPIHAHELPTSMLADRSSSAYAGFLSMAKGVAGVDGVLVNTFRELEPAVGGDGRLQLPVYPVGPLVWTRPAGVDTDHECMSWLDGQPRGSVAYVSFGSGGTITWQQTAELALGLELSQCRFIWAIKRPHQSSTIAAFFGTQRGDEHSPLDFLPEGFMERTRGMGLVAQSWAPQTAILGHPSIGCFVTHCGWNSVLESVINGVPMVAWPLYAEQNMNAAMMEVQVGVALRAKVGADRFIRKDEVANAIRRAIVGEEAERLRKRSSELRRQSAQALSKDGCSTRPLSSLDWLLSPPPAASLSTSRDLVSCSRHLGCSPSPCHRQGSSRFRPCCKYCRMMLQGASHRGPSPLRGGLGAGVIVASLTTTKSTHARTPSVASVVAAPVIGSGIIAFGLPLPVHRVNCSVQCDHPQQTSTCAKDTSANATAFVLGEKPTRISGTKIHRETNLSTNEAVAGTFEADSRQMMSTEQTIEVPSDTFTLLQAITSVEDVVLVEDASYDEEATLVMQTTFDGPIFITTIDYG

SEQ ID NO: 59460 - protein, 187 aa, Zea mays
  Coding DNA Sequence Number=SeqID_16085
  Subcellular localization annotation: CTP_CleavageSite=60; ConfidenceScore=5.07e-01
MDTKPWEHILQHKFWKISHHTQPVRNVVFRRTTNPMYPINEPSTNNKGLIVPCPCRPSVPDARPRHGTTYQAVPARARHQPCRAVLRAGPISPARLAIYSCGGDGRECRPLGWLLGLPFALLAVLVSVVGAIIWIIGQAAHIVHLPVLPLRDGGAGGGGGAHQGAAARHHLVHIQDTLLDKQSEDGL

SEQ ID NO: 59461 - protein, 61 aa, Zea mays
  Coding DNA Sequence Number=SeqID_16086
MALFCQSQLCLGAPDCPVVHRTVSGSRYGTRLSGYTAPDYFMERAPVLRNWPPGYRTSLLS

SEQ ID NO: 59462 - protein, 379 aa, Zea mays
  Coding DNA Sequence Number=SeqID_16087
  Homolog annotation: Hit_ID=Q6JAD6; Match level="QueryCoverage=31%, HitCoverage=16%, E-value=6e-52, Identity=81%"; Hit description =Putative uncharacterized protein
MRLRFDHLLRIPDSLTFSVLQRHWYVEEWVRVFYASVWIDPDHHWMRFRFEREDVTITATQIRQLFGFPESTTRLHSLCYGTSDPPRRPHGGVAPGTAHVAALFRPPFSDGSRRSPADFTIAANLLGFRAHLRPHASFLDPTVLRLRLLCQLLLLFLTLRPRTLLFVSSTLRIQQLMMMMMMILGFLLRLRLLCLHAHMIMRLGVLVLPLLPLRLWTLLLLRFSSLSLSSRLTWQPSRPGYPRGCSRCFRTCRTGRMRFSSSYSRIGLRARHSWLLCYSSLLLQRGLSPSQYQLQLLPQILDLRLTLTLHRRSLCCLDRDRMRPRRLFPLQMFRFGLETTDQAKDGSKKCFEVPSAWEKVKEAEEPKARVEGDDLLNQG

SEQ ID NO: 59463 - protein, 465 aa, Zea mays
  Coding DNA Sequence Number=SeqID_16088
  Gene Ontology: Mol. function=binding; Cellular component =mitochondrial inner membrane; Biological process=transport
  Homolog annotation: Hit_ID=Q66PW8; Match level="QueryCoverage=66%, HitCoverage=93%, E-value=1e-144, Identity=85%"; Hit description =Mitochondrial 2-oxoglutarate/malate translocator
  Pfam annotation: Domain name=Mito_carr; Domain location=140-235; Score=103.8; E_value=5.2e-28; Accession=PF00153.18; Description =Mitochondrial carrier protein
  Pfam annotation: Domain name=Mito_carr; Domain location=239-333; Score=86.6; E_value=7.8e-23; Accession=PF00153.18; Description =Mitochondrial carrier protein
  Pfam annotation: Domain name=Mito_carr; Domain location=26-134; Score= 45.5; E_value=1.9e-10; Accession=PF00153.18; Description =Mitochondrial carrier protein
  Pfam module annotation: Pfam domain module=Mito_carr::Mito_carr::Mito_ carr; Domain location=140-235::239-333::26-134
  Subcellular localization annotation: CTP_CleavageSite=15; ConfidenceScore=5.22e-01
MADAKQQQQQQQQPQQAAAAATGVWKTVKPFVNGGASGMLATCVIQPIDMVKVPYHRTALSLLHSASFTVLVCELVRIQLGEGSAGQVTRNMLANEGVRSFYKGLSAGLLRQATYTTARLGSFRVLTNKAVEKNEGKPLPLFQKAFIGLTAGAIGACVGSPADLALIRMQADSTLPVAQRRNYKNAFHALYRISGDEGVLALWKGAGPTVVRAMALNMGMLASYDQSVELFRDKFGAGEISTVVGASAVSGFFASACSLPFDYVKTQIQKMQPDANGKYPYTGSLDCAVKTFKSGGPFKFYTGFPVYCVRIAPHVMMTWIFLNQIQKYYRRRPHHHTRLPSPVAPIASPLEIPAAARRKDPTASVALFVVFLIEANRPGCCGAASRPVRLRALVEVGDHAEAAVVALDEGVDGLPHQRCASTEGFFVGTSSRKGIPSALRAPLGSYHDRAEASGERDTGPRLQAA

SEQ ID NO: 59464 - protein, 52 aa, Zea mays
  Coding DNA Sequence Number=SeqID_16089
MTKVMLAESVQDSKNGNKLQMYLRLEGKKIQAWRKSECQVSVHSTGILFTYL

SEQ ID NO: 59465 - protein, 80 aa, Zea mays
  Coding DNA Sequence Number=SeqID_16090
  Subcellular localization annotation: CTP_CleavageSite=53; ConfidenceScore=5.36e-01
MSSQHGPDYDWRTSPIDPQAMYASGGKAHGRYTMFANVIDSSQVTVQRGGSSRSTARSSRRSTQDPAEVEQLREELISTG

SEQ ID NO: 59466 - protein, 115 aa, Zea mays
  Coding DNA Sequence Number=SeqID_16091
  Homolog annotation: Hit_ID=Q6QP51; Match level="QueryCoverage=42%, HitCoverage=22%, E-value=6e-15, Identity=77%"; Hit description =Putative growth-regulating factor 1
MTGMYCCARACLNWRMQPPARTAMQTLFSPVVKAKGSMEKRDQKRGYSERDPSPRRKRAPSPPTDQRFESWPLGRVRQPPQSIRAPRPLLVRGSKAGPSEGFDSRLRPLGLRAHY

SEQ ID NO: 59467 - protein, 292 aa, Zea mays
  Coding DNA Sequence Number=SeqID_16092
MTVAGAREQRSRRQPSSRPIRWQQENPLSRREDNAPVIRSSNGSRTRNGRPANYSPRRINSAAGQAALLAGAAGDASPSPKLPRQKRYAASFGFAPSLLTDQGFEGWPPEGFNSRLRSRGPYTHYWSEVRRPAPRRVPRPPQATQAPRPLLIRGSKAGPRRVHSRLRRRARDDQGYVRYITKARAALPSSPETPCSAPNEGNMALSPPSSLRKGDEARPCQRHHRKLRPTQGSDSGSAPEDGELRSARPRARTRAQPRKMANSAPPDPGLGLGLSPGRRRTPLRPTQGSDSG

SEQ ID NO: 59468 - protein, 335 aa, Zea mays
  Coding DNA Sequence Number=SeqID_16093
  Gene Ontology: Mol. function=kinase activity; Cellular component =microtubule organizing center; Biological process=microtubule cytoskeleton organization and biogenesis
  Homolog annotation: Hit_ID=A7PKP5; Match level="QueryCoverage=49%, HitCoverage=14%, E-value=7e-36, Identity=43%"; Hit description =Chromosome chr7 scaffold_20, whole genome shotgun sequence
MKLLEEGFDLCAHLLALRRYHFMEIADWADSFIALIYNKKRSEIQGLMDFALQRSSCDSDPYKERLFIYIREPPVDSFDASACDLDLLDDILLGYKAEWPVNIVITEDTLKIYAEIFCYLLQVRFAVFSLTEVWRFLKELTQFISRSSHRGSDVLKKLNVVMKVRVLSWCRRFETGGSLRPTSECRVPQPRWVERVGEREGGKGVRRPETGAREVGIPRPSCSSRAQVGQMGHRSCSLRLESARGRVMMTLPVDVAGLRPRLGDVEAPPKPRSSLSSMAEAESEPLGRARRRSSAEAGAVSEPWGRAKRSSSSSGAEPEPEPWGRAKRSSSSSGS

SEQ ID NO: 59469 - protein, 399 aa, Zea mays
  Coding DNA Sequence Number=SeqID_16094
  Gene Ontology: Cellular component=microtubule organizing center; Biological process=microtubule cytoskeleton organization and biogenesis
  Homolog annotation: Hit_ID=A5BDW9; Match level="QueryCoverage=82%, HitCoverage=31%, E-value=1e-64, Identity=41%"; Hit description =Putative uncharacterized protein
MEAAASSLSTLLSTLRVDGPWTPPGTWESAIPESGAARVTDLGGRLQPIYELASVTDDALIHLALHALYGVKSSLDEIEELSVLFSSNPADRTSNRVTNVWLRSSSTISVGSILKSLRSTGLVVFFLCKFVHFYLVQSREMNCASREVHEHEHPGDKDTEQHRPYSLVNQAFAAAVSKVLEGYFCSLNTLPASIRLRRSVGQSGIPSKTSDGMSCNSTAEVTLLEVYLHTEELRRHVKSLGNICFPKFAGATLCHDGLDTEASVEFENFPRGTDLLSYLYVYIRDADPVHYGLLKYLFIRSCEPYFNFIKSWIYRASVDDPYEEFLITQTENKGVQGVSSDITDEFTLFPLKVIPFDTASNILHKRTNLLDTSVSDAELFNGDSDAALPCNMYILISLF

SEQ ID NO: 59470 - protein, 66 aa, Zea mays
  Coding DNA Sequence Number=SeqID_16095
  Gene Ontology: Mol. function=unfolded protein binding; Cellular component=mitochondrion; Biological process=response to stress
  Homolog annotation: Hit_ID=Q10SR3; Match level="QueryCoverage=100%, HitCoverage=9%, E-value=8e-23, Identity=81%"; Hit description=Heat shock 70 kDa protein, mitochondrial, putative, expressed
MATYNKCLGEFDLMGIPPAPRGLPQIEVTFDIDANGIVTILAKYKATRKDQNITIRSSGGLSEADI

SEQ ID NO: 59471 - protein, 445 aa, Zea mays
  Coding DNA Sequence Number=SeqID_16096
  Gene Ontology: Mol. function=DNA binding; Cellular component=nucleus; Biological process=regulation of transcription
  Homolog annotation: Hit_ID=A2X871; Match level="QueryCoverage=73%, HitCoverage=95%, E-value=4e-34, Identity=36%"; Hit description =Putative uncharacterized protein
  Pfam annotation: Domain name=Myb_DNA-binding; Domain location=21-72; Score=28.5; E_value=2.4e-05; Accession=PF00249.22; Description=Myb -like DNA-binding domain
MGGGGRNGTVVRRYIRSKEPRIKWSADLHRSFVQAIDCLGGQHKATPKLILQFMATRGLTISHVKSHLQMYRAARLGAGRRGMQAQLLQRRHSCTGDEQEEFLRPPPPLKRTKAPFPTVSVHLHLFLMGVSGRLLFVGCVNRARMGYESMQGLGSHGVSDARTAAAAGGLYCIDDYMQAMAAMGWRIKEEGLTRWQWQRRDAAAPSDLQAMGCLVQEPDPFKMRRPEARRLGSALRNQQDDSSEEDGNGCPLLSSSSFSNAANDDEPSDEQCSLSLSLGLDTKGARAMATSSPSGESSCILTAASPARRSSSDCCCSGHSGCFVGPGVSLELSLSISGSYLDHSDSPWWPRNPSSLDRSLTSPVSEQAVDEAEVSRPACVTVVWLRPHRSSVTATVLLPRVVELMACGAVANIVKSSLGPVGLDKEEGYVVLFIGSTLPHYLVPC

SEQ ID NO: 59472 - protein, 305 aa, Zea mays
  Coding DNA Sequence Number=SeqID_16097
  Gene Ontology: Mol. function=transcription regulator activity; Cellular component=nucleus; Biological process=regulation of transcription
  Homolog annotation: Hit_ID=A5BTD7; Match level="QueryCoverage=62%, HitCoverage=27%, E-value=3e-79, Identity=78%"; Hit description =Putative uncharacterized protein
  Pfam annotation: Domain name=Not3; Domain location=1-183; Score =186.0; E_value=9.6e-53; Accession=PF04065.6; Description=Not1 N -terminal domain, CCR4-Not complex component
VSASYEQALMDARKQIEREMERFKVCEKETKTKAFSKEGLGQQPKTDPKEKAKAETRDWLNNVMALAMTIICFIVVSDLESQIDNFEAEIEGLSIKKGKQRPPRLVHLEKSITRHKAHIKKLESILRLLDNDELSPEQVNDVKDFLDDYVERNQEDFDEFSDVEDLYSTLPMEKVEALEDMVSLAPSSLVKPKRRRKHSQRERRKHENKWVEAQIKPLPGFELETSVSDTIRMETIMHIVVKEVSGSSTYPLLTNTNYEDWSLFNRAGKKPDTHYPNPNYSNPYLIYPNYPNTSSDPRSENPKLY

SEQ ID NO: 59473 - protein, 153 aa, Zea mays
  Coding DNA Sequence Number=SeqID_16098
MAVTSADEQLLLRKGRGVEEGPEARDVGGPTNSELGKRAGEGVLVGVDAQGGRRTSEGNRVGRAQGGDQRGDRDQGGTDRRQGGDACAQARSDARSWADSSACWQGRDSARALAGSQAGGDGDLAGRGGRALAPARWEMCAMAGARRGGGGGT

SEQ ID NO: 59474 - protein, 303 aa, Zea mays
  Coding DNA Sequence Number=SeqID_16099
  Pfam annotation: Domain name=IQ; Domain location=162-182; Score=26.5; E_value=9.6e-05; Accession=PF00612.18; Description=IQ calmodulin -binding motif
  Subcellular localization annotation: CTP_CleavageSite=44; ConfidenceScore=5.74e-01
MASAANFTASSWQPASPSPWTAPHVTFVTPSWQPTSPSPWAAPHATFVTPSWQLTSLSPWAASPANFVTTSWTLACPSPGTTSNSVTSSSLTASPSPWAMPLGAATAQQSPTPSMGDLWANIRADLTKMQATLQKVEQGLLQIKAAVQHEQHQLALSARLQTSATVGIQAAARGFLARRRVREMRRQMLEAALVTVDLDTRGHDLALLDGHQQRHRAAISKCEHGTCPAHDELQLYGSSAREGTPLVIGKGALFCATTFRYRPPRGRLRWLLLRPTPDSVFEHPPLLQLEDELLVQEGCSVRA

SEQ ID NO: 59475 - protein, 66 aa, Zea mays
  Coding DNA Sequence Number=SeqID_16100
MVGTSAATARRPVGVSGALYAKAVMELPLDAQSSGRRLDVDERVEQCRAVAGVLHVLARFVQVLQM

SEQ ID NO: 59476 - protein, 176 aa, Zea mays
  Coding DNA Sequence Number=SeqID_16101
MRATNREMVKGFTRSTCAGEFLNSDERDLASPVTRALGSSLSKAHGLTRKLSGGLNRTEGDWRGVGHGGGSWSALAGCGEVAGGNGWLGRVRRGTEEAMGKATERWGGFYRRGRGRGVGSTVWRDAGTRGARAGVLWRAQSASNTWRVASARVLRSAEQPGVRISPYRLWRSLPCT

SEQ ID NO: 59477 - protein, 145 aa, Zea mays
  Coding DNA Sequence Number=SeqID_16102
MDVLMIRNRGEDQQGLGKGLVVEEEQQGRTQQEGDQAGISSRDEVNRSARLITRGEVVLRLQAPHTISSDQYRFDLAIAVSLPLGDDEEARIPTDFDECVSRQDLEANNKLLKEQMEETVHKSVHDAFINMDLGRTYERLDRRLS

SEQ ID NO: 59478 - protein, 643 aa, Zea mays
  Coding DNA Sequence Number=SeqID_16103
  Gene Ontology: Mol. function=transferase activity; Cellular component= microtubule associated complex; Biological process=microtubule-based movement
  Homolog annotation: Hit_ID=A2FD36; Match level="QueryCoverage=39%, HitCoverage=58%, E-value=6e-12, Identity=23%"; Hit description=Viral A-type inclusion protein, putative
  Pfam annotation: Domain name=zf-CCHC; Domain location=176-193; Score =27.0; E_value=7e-05; Accession=PF00098.14; Description=Zinc knuckle
  Pfam annotation: Domain name=zf-CCHC; Domain location=558-575; Score =25.1; E_value=0.00024; Accession=PF00098.14; Description=Zinc knuckle
  Pfam module annotation: Pfam domain module=zf-CCHC::zf-CCHC; Domain location=176-193::558-575
MSGGDGPPPIFDGDDFPYWKIRMEAYLEAIDIGVYKFATQGFPEPRDRTNLVGDEFNYEKWNAKAKNTLFRGLCKDVFNRILGKINAHEMYIHINDKDESSSKRKDLALKANQERKGKAKIQVEEESSSDDDLDANIALMVRKTTKMLKKLNREGIKFDSRKKKFFSNKRKPISEMDCYNCGELGHLAHQCNKPKKNKFKGKKEDDSNDEKKEKKFFKRKDGKQKRFPKKKNGKAYIVGDWLTDIESSSGSSSSEEENDEQVVAIVEDFSSPPPSPSSTSHLCLMARGERKVQNDIDITDDSDSDEEFASPSYNELADLLKEYTQIIRKSKAKCDRLKNENESLNAKYDIVMKASDEIKEENKTMSSTVNELTTSLKVAKDKCDKLNEANRELQDRLVKIKEDYTQIKFDHDNLLVENELLSCKTHEAINPVVKIDVATSCDDLSQGEQTSLHDELTEKVEVLTLDNQKLKKYLTDATTRGKVAIENNDFNNELAVDNERLKNEVKKLKSENEHLATSVQKFNKGQYLQNELLMNTVMKTTRLKATTQYKPKQTHKPIKCFECGNEGHFAHNCKAKPPTPLPKHSRPFAFNAHYVLRKVANGKVKVTFLGPPNKSRPRQIWVAKSLIERVTGPMQYRALKTQA

SEQ ID NO: 59479 - protein, 267 aa, Zea mays
  Coding DNA Sequence Number=SeqID_16104
  Gene Ontology: Mol. function=transferase activity, transferring glycosyl groups; Biological process=sucrose metabolic process
  Homolog annotation: Hit_ID=O24301; Match level="QueryCoverage=76%, HitCoverage=34%, E-value=3e-52, Identity=46%"; Hit description =Sucrose synthase 2
MRLTDAGDGQMKTLHLDDGLRVCFKWITIRAIACENYIPRKQDNLQLVMERVHIKKRSNTQKDAAGEIAAELQGTPDFIIGNYSDGNLVASLLSYKMGITHCNIAHALEKTKYPDSDIFWKNFDEKYHFSCQFTTDIIAMNNADFIITSTYQEIAGSGHLDDRSKPILFSMARLDRVKDITGLVEAFAKCAKLRELANLVVVAGYNDVKKSKDREEIAEIEKMHELIKTHKLFRQFRWISAQTNRARNGELYRYIVDTHGAFVQIYS

SEQ ID NO: 59480 - protein, 324 aa, Zea mays
  Coding DNA Sequence Number=SeqID_16105
MNALSHEGCRYFEVFDQADEDFERDIYKVEDPIVKESTGAIYDRMWGPHGREVVRERAETARAQAARGERVDDFGALNSALADPEPTPAEAVSGAALEPPPETAEGAPDTSASAAAGGDLPPETAEGTPDAPAAAAPSAEDPATVAAEATAEATAEATAEAPTTAGSSQVQDFGPAHATATTKFLAASTVDGGNECDGSASEFSDFADSGSSVEWTESLEEDLDYFAALDVAAAEASPHAADTEDVPGPSTGRRRRRAVAKRRVSGAEGGRLRVSRAGRQELLSLPAVVSTGEGELRSLFAGLYDEVVCPRTLGYACEVVVYLV

SEQ ID NO: 59481 - protein, 230 aa, Zea mays
  Coding DNA Sequence Number=SeqID_16106
MNGGKREGDRRKGETRGLCVVLRPGRGNDGLPCDVVGPSPGSGEAVAPPRSRSSLSSEVEVESEPRVGRGGDHCLRPRLSPSPGVGRGGVRRLPEPSRVRALESGEAEFVIFRCRGRVRALGWARRSSPSEAETGAEPWGRARRSFLWCPKPDLAAASLTLSSSIAVDAGGAVLLSGRIRCQAILALNASAIRSVSVAIWPRLLLGEDWASGEPKLCADGGYQLRLGVLG

SEQ ID NO: 59482 - protein, 162 aa, Zea mays
  Coding DNA Sequence Number=SeqID_16107
MTVAGGREQQSRRQPGSRPIQGQQESLLPRREDGAPVIRSSNGSRTRNGRPANHSPRRINSAAGQAAPLGRSSGRRFAFAVITAPKKGPGKGDTPKKILLCEGTGLRAPPLLIRGSKAGPPKGSTVASDRVGPTPTTGQGFEGQPPEGLHGRLRLLGLRAHY

SEQ ID NO: 59483 - protein, 296 aa, Zea mays
  Coding DNA Sequence Number=SeqID_16108
  Gene Ontology: Mol. function=RNA binding; Biological process=transport
  Homolog annotation: Hit_ID=Q25AG5; Match level="QueryCoverage=42%, HitCoverage=86%, E-value=3e-55, Identity=83%"; Hit description =Elicitor-responsive protein 3
  Pfam annotation: Domain name=C2; Domain location=6-87; Score=76.1; E _value=1.2e-19; Accession=PF00168.21; Description=C2 domain
MAQGTLEVLLVGARGLENTDYLSNMDPYALLQCRSHEQKSSVASGKGCEPEWNETFVFTVSDGAAELFIKLLDSDGGTDDDFVGEATIPLEAVYTEGNIPPTVYNVVKDEEYRGEIKVGLTFTPERGASTTKRQLVRAPIGLEPCGTILLDSPSAASVSRSAFVGEGGVARAPAIVVVVASRPCLHAATSALGILWPQQPKEASSVASSRSIASSMAGSRRALMPCRSMLGVGTGRLGAAWESGTDWEDEDAERRALWYDRKRAILFLYASASCARCYVALRAVGDWCCRPAGARC

SEQ ID NO: 59484 - protein, 189 aa, Zea mays
  Coding DNA Sequence Number=SeqID_16109
  Gene Ontology: Mol. function=cysteine-type peptidase activity; Biological process=proteolysis
  Homolog annotation: Hit_ID=Q5NKP7; Match level="QueryCoverage=100%, HitCoverage=21%, E-value=3e-86, Identity=86%"; Hit description =Putative uncharacterized protein 9C20.3c
MKQVDRSPNNPKRITIQSSQECFSVDIPSAEQPNPCPEVENPPNVDSQNLTNETVQIDSDEDDFMPALKKRNVSESHTRVLRKVVTKRIKHEELPRQRLNVRCNPQDVIASINILNERQREAIRRKGFSTILDMTVDALCSRSHLQWLMDKLDPKDMTIRPGPGKELKITKDIVHLILGVDSRLEGGGE

SEQ ID NO: 59485 - protein, 112 aa, Zea mays
  Coding DNA Sequence Number=SeqID_16110
MDYQLERYPLTAANVEDGGERGSSRVGGERRSRSVGGEGRVFSGLRTQRREYWSEDWGHRGRAAQMPFATGSTTSGEGLEESSERGAESPGMKESAEIPGVVAGLGFCGYGN

SEQ ID NO: 59486 - protein, 113 aa, Zea mays
  Coding DNA Sequence Number=SeqID_16111
MDESGKGDRVRVMTVPNLACGCWTADLLRCVHRAAPAPSDVMPRVVDQLLKLFATFIETTDQAKDGGKKSFEVPSAREKVKETRNPKPGVKKKTCKVKVDRVKKSYGASRITT

SEQ ID NO: 59487 - protein, 396 aa, Zea mays
  Coding DNA Sequence Number=SeqID_16112
MGLGVCGSLCQAWVAMRLMVLGFDSGNVIIIWPTKSNCLTYPPHKASPLQPNRILAEYVDVYSPLLYTPTPHPQVVSIATTAQEKMKPWNETTRSSKITTSSRHGLAATPSRLPVKAAFIYQEIESVRSYSPVLPLEAPPAPPLDAPAPGVAAGGDPDDGGGDNSSSHNTDFSADQEPEGWVARPITRDAARGCHFHDALDTLLRRALDRRTWSIEYRCVVYQHSRGVDPDRWEATCLVHHPENSLWGAEICLEHYSISEQDSAEAAMQDATRRALSHYCSVLGGVADGLNLKYYPRRPSGSTGGVIVSPVGEDNPRLSSTINLATVLNTELDHALDELSRARAEIALLRAERAERRHLDDGSPTPVGTQHPYRSPRRGHQSYGNPDCKTKINLEP

SEQ ID NO: 59488 - protein, 165 aa, Zea mays
  Coding DNA Sequence Number=SeqID_16113
MAAQREAPVRERVAESRLGAPTTKLDRWWKLLSTGAPDSPQSPLKIPEGEELGVEFPGAPDTVRWCTGQSGFKVVDLRRALLKIHTPKRYEQIFHGMVRERRTQTNTMSKNTRDTRFIPRFGHTTKVPYFLVEAPTKSRVSFNPNPPFVDHKGQAHTIIFAQTSG

SEQ ID NO: 59489 - protein, 160 aa, Zea mays
  Coding DNA Sequence Number=SeqID_16114
MAAPRTTRPVALTPRRERRRLWQGEQATLRLRHNDRVKKGTRLRATLLIRGSKAGPSEGFNSRLRARGPHTHYWSEVRRPAPRKGSTTASGYSGSAPTTDQGFEGLGLGLSPRRRRTPLRPTQGSDLGSAPEDDELRSARPRARTWAKPRKTANSAPPDP

SEQ ID NO: 59490 - protein, 487 aa, Zea mays
  Coding DNA Sequence Number=SeqID_16115
  Gene Ontology: Mol. function=transposase activity; Cellular component= integral to membrane; Biological process=transposition, DNA-mediated
  Homolog annotation: Hit_ID=A2XR01; Match level="QueryCoverage=29%, HitCoverage=30%, E-value=6e-21, Identity=41%"; Hit description =Putative uncharacterized protein
  Pfam annotation: Domain name=Rer1; Domain location=3-120; Score =126.6; E_value=7e-35; Accession=PF03248.4; Description=Rer1 family
MEPSPVGASGSAERWRAEAARAFQHYLDRSAPHTAGRWAGTLVAAAVYALRVYYVRGFYVVTYGLGIYLINLLIGFLSPMVEPELEAGPGLPTSGSDEFKPFIRRLPEFKFWASDSRTAHDPAARSLRAVDGDASRARHRIPPRRRRPAQDPAARSLRAVDEHASRAQHRIPPCRRRPAQDSAARSLRAVVVVMDPPSEPADIESGVGDVTTPERGRPTMVRGSMTAGRRGAGFTLAGRSAGRGTSCVMRDSRSAGRSIRGGRSVGIDIDLNAQGREDDEPIEVEAEITANNSKEKYDKADWSSMNTRTFCEICVEEVEAVLNIVIVMHGHPDWKKLKYGPPENEDFMTQMFEHIAVDGSTSCALGEFYDVENHETEVDGIDGVDFGTFEADCDAQYDEFVSPFASGSKSTQSKRGVSTQSKKRASPTVVNSPLKRSKNPMVKVMNKIHNTLEINCNISNKVMLGEYRRSIGMYLSHSKQMKEDFYG

SEQ ID NO: 59491 - protein, 106 aa, Zea mays
  Coding DNA Sequence Number=SeqID_16116
  Homolog annotation: Hit_ID=A2Y4L9; Match level="QueryCoverage=58%, HitCoverage=11%, E-value=3e-13, Identity=61%"; Hit description =Putative uncharacterized protein
MAQKIHFTCKLRLGCLETEIGCGFGNKLLETVMVCFQTDTENEFKAIQSKIVRLRAEISGAIDHGDPTHVVDENDLSLKRLGELKEHLNDLQTEKNGRLQKIDIHK

SEQ ID NO: 59492 - protein, 303 aa, Zea mays
  Coding DNA Sequence Number=SeqID_16117
  Subcellular localization annotation: CTP_CleavageSite=49; ConfidenceScore=5.78e-01
MPRSLLHSSHPSAFQASRWGAPVFSGGIRVRAAPSGDLTARRARARGALAATSRQWSSRGMTTSLVVERSEPGCGLPLPSASRMFIIRAGEEGEPSWGPAFRMGWRPASSSSIRGRRAFTSLAEGANFGYAGPTDYRHRQSPRARFLGLDGFSAASNAASCRLVGAWLFVHLTGDGRAVRGFTTSTASPVPPAAPGGLRTGARTSSRVLRQPPPTSAEVAAVVGAEVVAAAEVAAAVGAEVVASAGESLRASYPAALLVWRVVERAGPRYGTRLSGYTGSGPPQETNVHSLASDPRLSDAQDL

SEQ ID NO: 59493 - protein, 95 aa, Zea mays
  Coding DNA Sequence Number=SeqID_16118
MAAQFGCRHVRTDGNRASGLDKRYYLKDCKTNRPGLWGQTPPDWHTRLGPDPGSPSAFDTGALVFGCGHSCMYLSEAWNRGESRRVSGGRQTSAP

SEQ ID NO: 59494 - protein, 127 aa, Zea mays
  Coding DNA Sequence Number=SeqID_16119
  Homolog annotation: Hit_ID=O48967; Match level="QueryCoverage=28%, HitCoverage=7%, E-value=1e-09, Identity=80%"; Hit description =Putative uncharacterized protein
MTWKLSPHSSLWPINAPEPPRAVHGTWPHKPELPSRVARRGNNGSYPVHPNGRHSVEECREIIDLAKRVSERREQSSKDGSPPRRRPSKEKVDDSEVVAAEWDLGYQSPEGDLKDVFAGGSYSDGDN

SEQ ID NO: 59495 - protein, 329 aa, Zea mays
  Coding DNA Sequence Number=SeqID_16120
  Gene Ontology: Biological process=RNA-mediated posttranscriptional gene silencing
  Homolog annotation: Hit_ID=A3B5S9; Match level="QueryCoverage=77%, HitCoverage=80%, E-value=6e-63, Identity=48%"; Hit description =Putative uncharacterized protein
  Pfam annotation: Domain name=Extensin_2; Domain location=14-274; Score=-142.5; E_value=0.1; Accession=PF04554.4; Description=Extensin- like region
  Subcellular localization annotation: CTP_CleavageSite=20; ConfidenceScore=5.31e-01
MSSLFSLFQIILHFTFAQVVLGMVKTPKTTQALDMVQPTAVPTAPSSVKTTAPDHVSLPPPPLPANQQSVAQLSAPFSSGLSNVGSTMDPPTISANPPQSAQAKGYLIHQMPSSAPQPSQHPNMALPHAPPQYSNVPSHIPIVHSQPQQPLQSPAIYNQQLQPPLPQLSRPPFPHQMHSQVPNSFGLTHANAPQHMLQQPMFHPVANPQTNFLPGQPPLPSQPPPQQLYQASSHYNTQNTTPMQVDRGAPWGRAPDAPTPGSHFPGQLPGLPGQMTQGIGGIQAGQAPLTPEMEKMLVQQVLGMSAEQINMLPPEQRQQVLQLRDMLRQ

SEQ ID NO: 59496 - protein, 213 aa, Zea mays
  Coding DNA Sequence Number=SeqID_16121
  Gene Ontology: Mol. function=protein binding; Cellular component =integral to membrane
  Homolog annotation: Hit_ID=Q5TKG9; Match level="QueryCoverage=90%, HitCoverage=40%, E-value=6e-46, Identity=57%"; Hit description =Putative uncharacterized protein B1155G07.13
  Pfam annotation: Domain name=DUF803; Domain location=12-213; Score =56.4; E_value=9.9e-14; Accession=PF05653.5; Description=Protein of unknown function (DUF803)
  Pfam annotation: Domain name=TPT; Domain location=19-181; Score= -34.4; E_value=0.06; Accession=PF03151.7; Description=Triose -phosphate Transporter family
  Pfam module annotation: Pfam domain module=DUF803::TPT; Domain location=12-213::19-181
  Subcellular localization annotation: CTP_CleavageSite=46; ConfidenceScore=5.18e-01
MGGGGGSSGPELSTDNMKGIVLALLSSGFIGASFIIKKKGLRRAAVASGVRAGRPPSCPSRTVDRGSWGRPVFWSKEMSTLVGLERFLNSGDGMRRCRRVLIPHGAPVVFLSEGFPLSVIVGEIANFVAYAFAPAVLVTPLGALSIIVSAVLAHFILNERLHALGVLGCVMCIAGSVVIVIHAPQEQEITSVKEIWNMATQPGKDYHRCDSVL

SEQ ID NO: 59497 - protein, 158 aa, Zea mays
  Coding DNA Sequence Number=SeqID_16122
  Gene Ontology: Mol. function=carboxyl- or carbamoyltransferase activity; Cellular component=ornithine carbamoyltransferase complex; Biological process=amino acid metabolic process
  Homolog annotation: Hit_ID=Q8SA97; Match level="QueryCoverage=59%, HitCoverage=17%, E-value=2e-15, Identity=50%"; Hit description =Ornithine carbamoyltransferase
MVDKVQIKNEGKDQLEMSWLEQPRLCSVWVHRTVRWCTGQCPVLSPRLGDVEAPPKPRSSLSFLAEVESEPLVRVRRRPSAEARAESEPWGRAERSSSSSGAEPKSEPWVGRSGVRRLPGLSPSPSPESGGAEFAVFRGLARVRALGRAERSSPSSGA

SEQ ID NO: 59498 - protein, 386 aa, Zea mays
  Coding DNA Sequence Number=SeqID_16123
  Gene Ontology: Mol. function=carboxyl- or carbamoyltransferase activity; Cellular component=ornithine carbamoyltransferase complex; Biological process=amino acid metabolic process
  Homolog annotation: Hit_ID=A2Y6G3; Match level="QueryCoverage=54%, HitCoverage=67%, E-value=3e-48, Identity=55%"; Hit description =Putative uncharacterized protein
  Pfam annotation: Domain name=TCP; Domain location=152-327; Score= -15.4; E_value=1.6e-06; Accession=PF03634.4; Description=TCP family transcription factor
MAPPVDVAGLRPRLGDVEAPPKPRSSLSSVAEVESEPLVRARRRPSAEARAESEPWGRAERSSSSSGAEPKSEPWVGRSGVRRLPGLSPSPSPGSGGAEFAVFRGLARVRALGRAKRSFLWCLRPGLTACQPHSVKWHRSRSGAGDAVFLSGRSVERRSDGGHFGSVGWGTRVRIKLYDLQDRLGLSQPSKVVDWLLDAAQDEIDKLPPLQFPPQGQDLVAHLPPSMVAPFANVAADRAAAAAAAANASAAMAEGGKRHCHGGIKGLMGMGLNNSIGLANATMPLAHGLYYTPGESWTNGGNAAVHDHQVSHGGTSPQTVAHHSPFSSLLSLAAPGPQLVFYSPEGGGFAMKEATDHQFAVDSLDHSQGQLSLSSARSFLHPGNQG

SEQ ID NO: 59499 - protein, 236 aa, Zea mays
  Coding DNA Sequence Number=SeqID_16124
  Gene Ontology: Mol. function=carboxyl- or carbamoyltransferase activity; Cellular component=ornithine carbamoyltransferase complex; Biological process=amino acid metabolic process
  Homolog annotation: Hit_ID=Q8SA97; Match level="QueryCoverage=36%, HitCoverage=19%, E-value=5e-10, Identity=43%"; Hit description =Ornithine carbamoyltransferase
  Subcellular localization annotation: CTP_CleavageSite=74; ConfidenceScore=5.19e-01
MAPPVDVAGLRPRLGDVEAPPKPRSSPSPWFGRGGDRRLRPGRSPSPGVGRSGPESEPWVGRSGVRRLPGLSPSPSPGSGGAEFAVFRGLARVRALGRAERSFLWCLRPGLTACQPHSVKWHHSRSGAGGAVFLPGWSVEWRSDGGHFGSVGWGARVRIKVSGHLCIKCSCDLVGRCGDLVKVASWRRQGLGRAGNTFAAGGGPRARRKSSGLYADGGYQLRIRSLEGTPNYGPRQ

SEQ ID NO: 59500 - protein, 399 aa, Zea mays
  Coding DNA Sequence Number=SeqID_16125
  Homolog annotation: Hit_ID=A7PN24; Match level="QueryCoverage=80%, HitCoverage=65%, E-value=1e-136, Identity=77%"; Hit description =Chromosome chr14 scaffold_21, whole genome shotgun sequence
  Subcellular localization annotation: CTP_CleavageSite=46; ConfidenceScore=5.64e-01
MAAAAVASSSTPRPLRLAQRGAVSAHASHHVSAPPHRSRRPRLSVSASAGVEGTSGSERFYFNFTGFPFPLGPFLNRRTIRTEAVKGSIWLFEQEQALGFSSVSTNIRMTVIKLKSGGLWVHAPIAPTKECIQARTLPDPIGPYHPLVSSPIEFYSLCCWLQMLKELDAPVEHIVLPTFAYEHKIFVGPFSRKFPKAQIWVAPRQWSWPINLPLEFFGIFRAKPLKDEDDATPWVAEIEQKVLSSPEVGIGPYVEVAFYHKPSRTLLVTDAVIFVPQQPPECISKESLLASAKNGLAVKLLSKGKEVPDEPVVDNKLNRQKGWERMVLQILFLGPSNLLEPNASFAQMSQKLIVSPIVKTLVFSKVPEKEIGTKVILQGRPLDCVNRAHQPMAQQKEIR

SEQ ID NO: 59501 - protein, 324 aa, Zea mays
  Coding DNA Sequence Number=SeqID_16126
  Gene Ontology: Mol. function=oxidoreductase activity; Cellular component=cytoplasm; Biological process=electron transport
  Homolog annotation: Hit_ID=Q5JN40; Match level="QueryCoverage=55%, HitCoverage=35%, E-value=3e-60, Identity=86%"; Hit description =Putative glucose inhibited division protein A
  Pfam annotation: Domain name=GIDA; Domain location=34-204; Score= -73.3; E_value=9.8e-13; Accession=PF01134.13; Description=Glucose inhibited division protein A
  Subcellular localization annotation: CTP_CleavageSite=32; ConfidenceScore=5.47e-01
MARPSPPGHAATSWPRIPLQAPGSVPPPAHPRQRRGTSVACVEDLPPPLRLEEWQALLCLQHCRDVVDAAHLRQGRRTPVVEVEDLTPPPRLEAFTLSRYPSPSLPPSYFEFWGQGFSTGLPERLQLSLVRTIPGLENCLMLRPAYAVEYDYLPAYQCSRSLMTKKIEGLFFSGQINGTTGYEEAAAQGIISGINAARHSDGKSLIILERESSYIGTLIDDLVTKDLREPYRMDSSTLEAILKKPHVQYKLLDEHGCGNENLSRIEKECIEIDIKYEGFIARQQSQLHQMPPWSVETALNALLSLLPDLSLDLLSLVNLLLQFY

SEQ ID NO: 59502 - protein, 97 aa, Zea mays
  Coding DNA Sequence Number=SeqID_16127
MCLTAWQLANIEMRFALLTAERRRQNTAVDPLEGLVGASLRLNHIQNLILETAMQRYHLIEQILFKRFEVQIEAALALLQEFSSWPDASPEKEKCRI

SEQ ID NO: 59503 - protein, 135 aa, Zea mays
  Coding DNA Sequence Number=SeqID_16128
  Subcellular localization annotation: CTP_CleavageSite=64; ConfidenceScore=5.21e-01
MAPQPQPAPFFPMAEHLHGWRSPFLGSPWLLVQRCRSKRQQSRTPSVSLACHPLDQPHRLCATRCFVLRSEQHAVDARRVFAVFAQPHPRRLSPPDRHPVFYVEKKASRSTLVDVRSDAQIGIAIVLTNADWVCL

SEQ ID NO: 59504 - protein, 84 aa, Zea mays
  Coding DNA Sequence Number=SeqID_16129
MESHDLRAKGSHSLWVKCTTSAECMKTDISAVLVVMSGQGSSGGNEIDGFGIDSGNGCQHCNPCSGEDEAVEGDYQEFQDYDEF

SEQ ID NO: 59505 - protein, 214 aa, Zea mays
  Coding DNA Sequence Number=SeqID_16130
  Homolog annotation: Hit_ID=Q6QP51; Match level="QueryCoverage=22%, HitCoverage=21%, E-value=7e-12, Identity=73%"; Hit description =Putative growth-regulating factor 1
MKRLAGTPNPPLVKRDEAQHISRRRGRGGSARRGHPLRLRVTGERTKQTIGNKGLQIVRRDGGERPRVVRRNNGHPVGHHQAEEVVAEWTRTGGTFGRRSRRRFTSAMMTASKRDRERGYSKRDHSLRRKRALSPPTDQRFEGWPLGKVQQPPQSTRAPSPPTDQRFEGWPLGRVRQLPQSTRAPPPPLVRGSKAGPSDGFDSCLRPLGLRALY

SEQ ID NO: 59506 - protein, 220 aa, Zea mays
  Coding DNA Sequence Number=SeqID_16131
MVCGSPSGMAGVGRSTCAGRDARWRRGRGSRDAREDVGARNWTETHRLALSTRGGGRPKSGEVDLGPPVKSGLVRELGKLHGPLAELAEALARLGGGWSGLATVAEALAAIAGGIELAGAKERGLAGEASSTRQRRERSSSNTDWAQIFEIKATIPLRDLFLSGFELGIKVNILDLWLKGMAPAVDGGVNRPSAGENPAAGGLGGDSPSVTQFLGNGQAP

SEQ ID NO: 59507 - protein, 86 aa, Zea mays
  Coding DNA Sequence Number=SeqID_16132
MESHDLWAERESRLVGGNEIDGFGIDSGNASPLQPNRILAEYVDVYSPLLYTPTPPSPGCQHCNPCSGEDEAVEGDYQEFQDYDEF

SEQ ID NO: 59508 - protein, 90 aa, Zea mays
  Coding DNA Sequence Number=SeqID_16133
MGHCEFVAVDESLPRIRRAAWASSQPPQQPVRTSPIAPPWASNAVARVRFVNGGVDGGIDCDRRWCSPRVSTPPCIFRLRSQMASAPSIG

SEQ ID NO: 59509 - protein, 132 aa, Zea mays
  Coding DNA Sequence Number=SeqID_16134
MAERGRARARGRAAGVGRGAGGGLARGGGARQGGGLAEAGSRARSRGGAGRGSPGTRLGGAGWARDRGGRGRGRRAGARPRVTLGPGRRRARGQEGRAEEKKGRGRREREKGRGGEKLTSGDPNSGNLDSKP

SEQ ID NO: 59510 - protein, 73 aa, Zea mays
  Coding DNA Sequence Number=SeqID_16135
  Subcellular localization annotation: CTP_CleavageSite=39; ConfidenceScore=5.71e-01
MDSASPDPRARTQPRLRTTDSTSPDPRAQTQPRLRKAVSASTRTQPRPRRSLRLARPQARTNHVIGGPSLPYP

SEQ ID NO: 59511 - protein, 70 aa, Zea mays
  Coding DNA Sequence Number=SeqID_16136
MKHRPGLERLLETTHVELDGKLFVNTQQAPTWRANCRRFDPVGSLDRRVGCACSRGLQASARESERETVR

SEQ ID NO: 59512 - protein, 43 aa, Zea mays
  Coding DNA Sequence Number=SeqID_16137
HCGTGGYEIDGSDYGYGAALQPLPSEDEAVEGDFQEFQDYDKF

SEQ ID NO: 59513 - protein, 90 aa, Zea mays
  Coding DNA Sequence Number=SeqID_16138
MGEGGEGEGEAHRRRGRGGRAGRPNGDGEGRRPRQGRRLGQGADCNLADGEYVLVPEQEAAQEVAPDSAPEPAPEDLPATALEGKPRFYA

SEQ ID NO: 59514 - protein, 130 aa, Zea mays
  Coding DNA Sequence Number=SeqID_16139
MVDGVTWPTTLPPDWTVEWDAAPTGEEQEGHWLLATTELLSLGNDSPNGLVPQSGNMHGLLLALELLGCSGWLLGQEGEVPGCSDADTDFLPAGGSYNTAAEELPLVLLLLVLTLMLVLVTLLELLRWVA

SEQ ID NO: 59515 - protein, 157 aa, Zea mays
  Coding DNA Sequence Number=SeqID_16140
MATRTGGNKLTDIKHKSIRAKALTRLDGTTLIDARSRSRRRKDLNRVHSQIWIERGRKSGSTERVSAAAFYDGDAVFWDCGCGRVQMADTISNPRIQTRRAMIVIQPFRRHRGPTGKSGTGGQGKILMNLEIQGSKVDPIPLKFRLNHLGVLGSFCK

SEQ ID NO: 59516 - protein, 180 aa, Zea mays
  Coding DNA Sequence Number=SeqID_16141
  Gene Ontology: Mol. function=aspartic-type endopeptidase activity; Cellular component=chromatin; Biological process=chromatin assembly or disassembly
  Homolog annotation: Hit_ID=Q8W1D1; Match level="QueryCoverage=22%, HitCoverage=2%, E-value=1e-08, Identity=65%"; Hit description=Gag-pol
MTIEQMCPMQTQAVQTIGQTLAAMQQQPRHLNLRCKSRCHRDKFLQLSRYAPEDVNTDAKRQYRFLRGLVDPLHYQILCHCHCLVGPLGQLDLLPQQNAISTSPWVSSVGNSLTPAGVPGASRDAVAHARVLGKRRPPPWGRWFLAVVKSGHGPPFTMVDPLFISSFGKDPSTGFAFLSN

SEQ ID NO: 59517 - protein, 77 aa, Zea mays
  Coding DNA Sequence Number=SeqID_16142
MAEMQGKVASQTPPPAEARGKSHAAPAPAPGVGAPAPCAGDDAVSLGDWTDLTLCDAVGAPPGEKTKRGSLTYVQCI

SEQ ID NO: 59518 - protein, 106 aa, Zea mays
  Coding DNA Sequence Number=SeqID_16143
MARGGIGALAKNFDRPRSPQRTGVTDLAPCITVNLPDQQAEILGHKRRIARRRISLFLSFFWRTFLIILFNKDVYADVIMDIDPQPITLNQRSKSNKYHKNKHSSI

SEQ ID NO: 59519 - protein, 123 aa, Zea mays
  Coding DNA Sequence Number=SeqID_16144
MGYRFSGVVRPESNRLGVKRMPTQLKGMSLQSQPDSETWYPMLLVQLHRVQRGRKVTGGVKQFPQDGRKAIVRKEVRAETSVSSTGGGREILDGSLESLLLVFLVDSSLLRDEHVLSVNEIAI

SEQ ID NO: 59520 - protein, 71 aa, Zea mays
  Coding DNA Sequence Number=SeqID_16145
MDLPNSLTKLGPKLLSVPQKPSSNCNLVDGEYVLIPEQGAVHEEDQEQALETAIEDLPAAPAFEDKPRFYA

SEQ ID NO: 59521 - protein, 270 aa, Zea mays
  Coding DNA Sequence Number=SeqID_16146
  Homolog annotation: Hit_ID=Q5GAU8; Match level="QueryCoverage=46%, HitCoverage=97%, E-value=3e-52, Identity=72%"; Hit description =Putative uncharacterized protein
MNVCELTLAVSHPPTQVKNRSPEILYAILDPILGAIGYDAKMKDMYREALWQKRGRPWESYPDVSSKDAPVPPKLPVPNCDCGRLAWEHLRCFFFQWIDGHDKFDPRYLLFANWLCGRTSHERFKRWIPPPPNPPPITDAEKEVATKRRMDSPPRCDCGDRAVIDEDIVKHFVCPNIDYPYGWRKCRFREWLYGPLSHWPEAQETRKCSWESYDDKGEVMRTIESKRLMGQKMRCGSQLVDSYINDRIRDMRRYAKSVFYDSPKRAELGG

SEQ ID NO: 59522 - protein, 163 aa, Zea mays
  Coding DNA Sequence Number=SeqID_16147
MLDNLADRLKGKIECGVNYMADEAHARYVQEKMATVDLMEEEDDDTSRLSEVGLHGEEKDDTSRLSELIALAEAGLRAQEKEDEFMSQAAEEVEAAYYKQKSDEAEAEDELFSQAADEEEANYYKRTIDKCDAGQCSKWNEVVVEDCATDDSEDELLIDCDSD

SEQ ID NO: 59523 - protein, 43 aa, Zea mays
  Coding DNA Sequence Number=SeqID_16148
MGAAAARGAPPWVAVSDGQVTEDSEVQLVETAEQELVEGKLCP

SEQ ID NO: 59524 - protein, 22 aa, Zea mays
  Coding DNA Sequence Number=SeqID_16149
MNESGVVWQLVFCFQKKKKEIG

SEQ ID NO: 59525 - protein, 49 aa, Zea mays
  Coding DNA Sequence Number=SeqID_16150
MGRARERVKLSEMRQGVCAGHQWGSKKGSWGAWAGVVAEKSGFSNPNSN

SEQ ID NO: 59526 - protein, 248 aa, Zea mays
  Coding DNA Sequence Number=SeqID_16151
  Gene Ontology: Mol. function=peptidyl-prolyl cis-trans isomerase activity; Cellular component=Golgi apparatus; Biological process =protein folding
  Homolog annotation: Hit_ID=Q69JF7; Match level="QueryCoverage=24%, HitCoverage=28%, E-value=4e-24, Identity=83%"; Hit description =Peptidyl-prolyl cis-trans isomerase
  Pfam annotation: Domain name=Enolase_N; Domain location=4-147; Score=- 0.8; E_value=0.059; Accession=PF03952.7; Description=Enolase, N -terminal domain
  Pfam annotation: Domain name=Pro_isomerase; Domain location=107-216; Score=27.0; E_value=6.1e-11; Accession=PF00160.12; Description =Cyclophilin type peptidyl-prolyl cis-tr
  Pfam module annotation: Pfam domain module=Enolase_N::Pro_isomerase; Domain location=4-147::107-216
MAVTITWVKARQIFISRGNPTVEVQHFALPSLPGAVDVGLSDGSYARGAVPSGTSTVFRPVCKSLMSPVFYIWVSYGGTPALASDQFAQLHIFMMDSGESCPYFRLHIFMIPLIYAYRRADWYNGEKGVGSNGKPLHYKGTPFHRIIPGFMIQGGDIVRGDDKGSESIYGGIFPDENFTVKHTHPVLHNYYQDKLVSCVVHHVSPMIDLEAAAPEMGDPRNGYRVRHRRGRWDLQWQAKEEGGDHRRW

SEQ ID NO: 59527 - protein, 324 aa, Zea mays
  Coding DNA Sequence Number=SeqID_16152
MARRRSHKNKKTPPKENNETNPLKEEEENERWRPNDESTSPKGTNDDTYQKLKEENERLKMSLTQLKGKCIPQPSQDNRNHMVKKLETGTTEACTNSLEENVKDLRIAKRKEQKKKINTSSKSLNHASIKAQFPGPHTRARPLAHTLEHAPPRGIRLRLFLGRGGERSAAPSVDLEATTKLQAHAPLEMEASAALDETLADVLDHLKPHTIALLHLLYNRCPPLAPPPPYAKWVGIARAQLHLWARWVAARRGSRPGRSSRVVGSQVNLTDSSPYLLLPVWISALDEFQGSVAAAAMDKSPGAASHLRPSSLVNAMRSSQEKNT

SEQ ID NO: 59528 - protein, 284 aa, Zea mays
  Coding DNA Sequence Number=SeqID_16153
MARIRCTARKSMIPFLPTRLAERPLCRTVPGQSSHLERLHRRLHEEQERRRQEQEQQDSSPSPQREVESERPLSLTPQPEMPPAPPQGISAAGGDPDGDGDDDDAGGSSSHDTELSEEPKSEGWIARPITRDAVHQWEATCLVHRPDDDLWGAEAFSEHYSITERDTVEAALKDAARWALSQYCSLFSGVADGLDLKYYPRRSTGSAGGVIASPVGEGNPRLNNMVNLAVVLNTELDHTLDELGKVRAEVAELRAECAARHYLDGGSPAPVGIQHPYHLPLKGK

SEQ ID NO: 59529 - protein, 194 aa, Zea mays
  Coding DNA Sequence Number=SeqID_16154
MTPEASVESSRMASAALPTNELFRWVKGMMGKADYSVVVPMRPEQGYVSLRLRIFTHKSCYPSAKGSRLPIHLYRGGEAGTAIAAKSSRGPPYTDHSPTALAPFGGGEAGVTATKTPTRNGVYMARGAARVQPMLANTEKEMKSDQGGKRQIQSPGPAMRSLFGKLRTGSRLQSNEHARGDWLVEPTRSANAGE

SEQ ID NO: 59530 - protein, 337 aa, Zea mays
  Coding DNA Sequence Number=SeqID_16155
  Subcellular localization annotation: CTP_CleavageSite=40; ConfidenceScore=5.26e-01
MNKKTGIQGAITNGTPVPSPRQQLWSLDGRGHRKALVRVPAQGTRTRHQSQRAGGRPVGGTDGLHGGEASPGCHHVSTDDGVRLSTNAAPANAGRSKAHRQDASSAELGYGFHHQKLEEEVASQPVREVEPRLASLSAPARMVTTGEGMQPGHVMKILEAERWLKAGERADSRAGGMQPRQVGVPLRLPTHPAWRPGPTRHATGAPVATYEQLHRHPHHYHASSTAEPVLRLEATLRTTQQCQPGATVNTAKNGPAVMVVAGGQEQRSRRQPSLRPIQGQRENPLSWREDGAPVFHSSNGSRTCNGHLANHSPRRINSVVGQAAPLAGEASDASPSP

SEQ ID NO: 59531 - protein, 436 aa, Zea mays
  Coding DNA Sequence Number=SeqID_16156
  Gene Ontology: Mol. function=structural constituent of ribosome; Cellular component=intracellular; Biological process=translation
  Homolog annotation: Hit_ID=A2XYT6; Match level="QueryCoverage=99%, HitCoverage=99%, E-value=1e-166, Identity=63%"; Hit description =Putative uncharacterized protein
  Pfam annotation: Domain name=UBX; Domain location=353-435; Score =36.0; E_value=1.4e-07; Accession=PF00789.11; Description=UBX domain
  Pfam annotation: Domain name=UIM; Domain location=297-314; Score =17.9; E_value=0.038; Accession=PF02809.11; Description=Ubiquitin interaction motif
  Pfam module annotation: Pfam domain module=UBX::UIM; Domain location =353-435::297-314
MAGDPPTAAEKETLVSSFIEITAGQTLETATQFLQMTSWHLEEALQLFYIDGEAAHTAAHSVDPSPAAAAPSALAAAAGVEEAMRFAPPPAAALGDAMSHGFGVREDDDVRAPLPVKRETLYGEGIVSVMRPNASAAFRNFEQEARQSAVWDSEQNVASSSGDNLASLYRPPFPLMFNGSFDKAKLEASSLDKWLLINLQSTEEFSSHMVYYDTSEGRKVCTYYHLVSMPAILLIDPVTGQKVHAWNGMVHPDRLLEDLLPYLDKGPKGHHAAQPQKRPRKVDQEASTGKQGKIAVEDEDEELARAIAASLEVVIEASDASDDDMAEAEPEEENEPSLNIKPDYPPLPEEPKGSRELLCRVAIRLPNNQRIQRNFLHTDPIKLLWSFCAPQVEDGEKRAFHFVQAIPGASQKLQFGSDLTFRKAGLANSMINLLWG

SEQ ID NO: 59532 - protein, 312 aa, Zea mays
  Coding DNA Sequence Number=SeqID_16157
  Gene Ontology: Mol. function=phosphotransferase activity, phosphate group as acceptor; Cellular component=chloroplast; Biological process=nucleobase, nucleoside, nucleotide and nucleic acid metabolic process
  Homolog annotation: Hit_ID=A5BR95; Match level="QueryCoverage=83%, HitCoverage=84%, E-value=9e-72, Identity=55%"; Hit description =Putative uncharacterized protein
  Pfam annotation: Domain name=ADK; Domain location=60-278; Score=81.5; E_value=2.7e-21; Accession=PF00406.13; Description=Adenylate kinase
  Subcellular localization annotation: CTP_CleavageSite=39; ConfidenceScore=5.05e-01
MAGMSRAIRNFAAASRRTLTAASGPALPKEAAAAGARVRAAAPGRMGRDQEDGRRVQWVFLGCPGVGKGTYASRLSQLLGVPHIATGDLVRDALATPGPFSNKKFLTKREGRKEAPTAALLFRNLSEQFAEVVSHGKLLAEIVNHGKLVSDEIIINLLSRRLEEGEEKGELGFILDGFPRTIGQAEILEGVTDIDLVINLKLREEALLAKCLGRRMCSQCGGNFNVASIDIEGEDGGPRMYMPPLLPPPQCESKLIARADDTEEVTEPVEEFYRARGKLLEFNLPGGIPESWPKLLQALNIEDPDNKRSAAA

SEQ ID NO: 59533 - protein, 69 aa, Zea mays
  Coding DNA Sequence Number=SeqID_16158
MEATAVLLLPVVPCAAMLQVIRIMISIEKGTLSWCLRFTDASSGLEILGGVMPIEFQQAFAKLHLRKRC

SEQ ID NO: 59534 - protein, 238 aa, Zea mays
  Coding DNA Sequence Number=SeqID_16159
  Homolog annotation: Hit_ID=A2WP06; Match level="QueryCoverage=32%, HitCoverage=30%, E-value=5e-28, Identity=81%"; Hit description =Putative uncharacterized protein
  Pfam annotation: Domain name=HMA; Domain location=13-73; Score=29.6; E_value=1.1e-05; Accession=PF00403.17; Description=Heavy-metal -associated domain
MTAKSEQTPRITELHVRVDCNGCENKIRKALRAIDGVSEVYIDQASHKITVVGMADPWRMVKAIRKAKRVPTIFSHTDPAAAAEADQPPPPAAEAEEAEAKGEAQAPAPAPPPPADPPAAGDRAEETAPADTSAPEEHKEAKPAETPAAVDATVVVRTVRDHPYGYGAGGHGHRMCSEANHPVDSFYSHHRPTSPYVAEYGAGGGYAGFPVQEGRGKEDAINITCMFSDENPNACSIA

SEQ ID NO: 59535 - protein, 68 aa, Zea mays
  Coding DNA Sequence Number=SeqID_16160
MEAKLAALDTAGAEAEWLRDFLLDLPDGIYLNVLQESYKGEMSYRTSFEEYTYMSQTAGQSLWDLGNL

SEQ ID NO: 59536 - protein, 230 aa, Zea mays
  Coding DNA Sequence Number=SeqID_16161
  Subcellular localization annotation: CTP_CleavageSite=35; ConfidenceScore=5.37e-01
MAPPVTWSVRALGWARRRLLRGRVRAPGRTRRRPSSEAKAESDPWARARRSSSSSGAEAEFEPWGRARRSSSSSGAEAESEPWGRARRGSSSSEAEAESEPWGQARRSSSSEAETGAEPWGRARRSFLWHPRLDLAAVSLTLSSGTVVGATQAALSSCQAILALNAPAIRSVGMAIWPRLLLGEDWASGEPKLCADGGYQLRLGVLGGAEHGVSSELLTGNPSGRPCPIR

SEQ ID NO: 59537 - protein, 390 aa, Zea mays
  Coding DNA Sequence Number=SeqID_16162
MPCVLPPSEPPDGERPRSFRLVIVGGTQLRGSWYLSAIVRLQGFSSGSPAASPRRWSPETVTTSLMVGRSKPGCDLSPALSFKDLHHPGWGGGRAEPELYLPRGFVGHLLPQHSRERALTGLAGGLDFDNAGLAGGERRQLQRVGLAGSAGSGSAPGAPSYRESGRRAARTGGPYKTLRAARAAFVFLGCPAFAPMASVVGAEVVAAEEVLVADGITATIRAPGLRLFGFDSLSSPLEWGRGRGPRCSSVRPEAIAAAVWPPGAEVVVAAAGAVVGEPPGVLSSRRPSNVGGCSYLRGWNRSSVCNGTLSVGVCSLWLSGPEHSGDPPTALPSEARSDFAEGGVDAEGAVAPLPSTSEPAGSPRKPEKPFRQKGFRALRLVRSAESLIRA

SEQ ID NO: 59538 - protein, 146 aa, Zea mays
  Coding DNA Sequence Number=SeqID_16163
MVGSRDNSEVSPSNIIEPTWETLSADEQFQFEEHKEQLIQEAKAKFLANFKLDRNNKVVRQRATDLALLRPTATTSEPESEPWVGRSGVRRLPGLSPSPSPGSGGAEFVIFRGLARVRALGRAERSSPSSGAEPKSEPWVGRSGAS

SEQ ID NO: 59539 - protein, 372 aa, Zea mays
  Coding DNA Sequence Number=SeqID_16164
MRSTLAANADREDFPSMEAGADGILESVWDLVLLWFCLFIVRVHLTLSWWLGMNIVSYLEKMRVLQSEIIPGVKAMFLLKVVADEGHLHLDVAKGAREEKHEWANKRSARRRSQSKQKLNHMYLQREEGWHVVEVVVGACLCLQGGSRSCSKPLPPLIAYRWPGDSGERMGWRRSGRERAGIAAREESGARTAGSARRGGDLRHDMGGDRADGWGSTARRAEVGSTVSLPSTERERGHRAPPSSGLDVAPPPGWGLGSVRATSIRHLPSGGRGVAPAVGVAGVGVWRRLWRGGWRPRMERNRGVLARGWKRNTGAEGGEIVGVRRCGRRGHAADLARRMAAADGKNRGVLARGGKRIAACSRRAEQGCGRLH

SEQ ID NO: 59540 - protein, 281 aa, Zea mays
  Coding DNA Sequence Number=SeqID_16165
  Gene Ontology: Mol. function=small conjugating protein ligase activity; Biological process=ubiquitin-dependent protein catabolic process
  Homolog annotation: Hit_ID=O22656; Match level="QueryCoverage=12%, HitCoverage=20%, E-value=4e-11, Identity=88%"; Hit description =Ubiquitin carrier protein
  Subcellular localization annotation: CTP_CleavageSite=85; ConfidenceScore=5.16e-01
MQYSCKRYFVLEDTTLRWFKFAPSSKREASTLSSAHGSASAAATPARALTSAAAMPSALATLRPPPRCPRLRPRDARAYPCDTARARLLPAMPAPVSSTAYNRLRNPRPRAPRVGAGDTMAVPATPLRNPRPRACSLELRWAPALAPDTMLCPTLNLATTPSTTPPSFLATTPSLDGRRDWDVALRSSPPRRWRSRDLLTIVSAREIPPDSPTSPSTAASITHLLHADEKARPPLSPRPPTTRLRNKDLSKHPVDGFSTGLVDDSNVFEWQVTIIGPPDTL

SEQ ID NO: 59541 - protein, 152 aa, Zea mays
  Coding DNA Sequence Number=SeqID_16166
  Homolog annotation: Hit_ID=Q5GAU8; Match level="QueryCoverage=21%, HitCoverage=23%, E-value=1e-09, Identity=87%"; Hit description =Putative uncharacterized protein
MTDAEKEVATERRMDSPPRCDCGDRAVIDEDHEKQFVCPNIDYPYGWRNETRKCSWESYDEKGEVMRTIESKRLMGQKMCCGSQLVDSYINDRIRDMRRAAKSAFYDSPKRAEYRRLKAADEKRAQDAREWEAARAEKQMLDNLADRLKGSE

SEQ ID NO: 59542 - protein, 84 aa, Zea mays
  Coding DNA Sequence Number=SeqID_16167
  Subcellular localization annotation: CTP_CleavageSite=62; ConfidenceScore=5.08e-01
MAYLAERARWDAGLVPRSLSQLGAGPRPRLGDVEAPPRSRSSLSSVAVVESEPLGRARRRPSAEARAESEPWGRAKRSSSSSGA

SEQ ID NO: 59543 - protein, 76 aa, Zea mays
  Coding DNA Sequence Number=SeqID_16168
MVEIHSRRPRLFRKRGTGRLQGQHGECNEMEQRGTVEQELGNEGVDLLPWMSTTSRAKAQGKDGQKFEFYAQTNKF

SEQ ID NO: 59544 - protein, 203 aa, Zea mays
  Coding DNA Sequence Number=SeqID_16169
  Homolog annotation: Hit_ID=A2XF80; Match level="QueryCoverage=76%, HitCoverage=88%, E-value=9e-40, Identity=59%"; Hit description =Putative uncharacterized protein
MEPPCVSGLGSGQGDKLRPALHQRRKEVMDRTYYKGGIKAYWKRRGYYRIDAAAAQRRPPLPTAELGGGVGVAQAQPPAPTLEGASGRRRCRGWRVRRGQLRRRLLRALSPRRWLMRLRDAYVSAMLRLASSPAVGYGAGQPYCGTAAFARPAQLKEYEDKVLVEIYRSILAGGGPGPIAVTTGSNGAGAPAAATLRLPTAAA

SEQ ID NO: 59545 - protein, 323 aa, Zea mays
  Coding DNA Sequence Number=SeqID_16170
  Homolog annotation: Hit_ID=A2YHM2; Match level="QueryCoverage=18%, HitCoverage=28%, E-value=3e-11, Identity=64%"; Hit description =Putative uncharacterized protein
MEGESSRPDSTSAIPSESLSICVRVVHGRRIRHPSLHGREVLSIRVGCQCRPHHFVWQAAGVGWKEVSVNGAVRLGRTQEEVLKRNYGPEVDVWSAGVIMYIFSLPEPSIRGTNMDKGTILKTLTVLDTQLPVKQAFKIMHDEGLALVPLWDDRQGTITGMLTVSDFVLILRKGILCIGVLKRSRQQKAISREQAAKDLQELEKWREEHEALLLAEWFIFIHLNMDIKTRAKMTTILRQRNFLEVHIIGYCMYRGEELLAYWWREDHWLKAMFLHMRSVIKVEEELVGVPVKGGLYEIRDISALVRLRPTWEDLRSYLRPQTF

SEQ ID NO: 59546 - protein, 162 aa, Zea mays
  Coding DNA Sequence Number=SeqID_16171
MELLHYEMEWGQGAPHACRRCQPCPSPPPTMRCDSGRRRGRGRESDASSPSTRCDDGGVEGASRTAPPLPRDATAEGSRARVGRLLPLPRDATAEGSLGDVEDRARGNAEDAEDAEDRAWREAARGISFGGGGGGRGGGMGGEQMTMRGVGDWVSRPRGGQG

SEQ ID NO: 59547 - protein, 223 aa, Zea mays
  Coding DNA Sequence Number=SeqID_16172
MLALLPGGRKKREKGEIVVAVDQLMGGGDGVGAVRSGTNGSHQICGYRMGVNPWPLDHNRAQRSVEIGCGVNYLADEAHARYVQDKMATVELMEEEEDDTSRLSELIALAEAGLHGEEEDDTSRLSELIALAKAGLRAQEEEDEFMSQAAEEVEAAYYKKKSDEAEVDDKLFSQAADEAEANYYKRTVDKCDAGQCSKWNEVVVEDCATDDSEDELLIDCDSG

SEQ ID NO: 59548 - protein, 146 aa, Zea mays
  Coding DNA Sequence Number=SeqID_16173
MMLAEGVRDSENGNKNKLQMYLRLEGEKIQVWRKSECQVSVNNPRGKRMCPFHLRRFHLQENDLKEASKPIGYQNSNVLRVFWREHIRSPILGSGSRASQYGPPVMSRSQLAAYTDATNVVSVAVQLNSEVVLGHGEVGEGDGSGG

SEQ ID NO: 59549 - protein, 136 aa, Zea mays
  Coding DNA Sequence Number=SeqID_16174
MRSSSSSGAEPESEPWGRAKRSSSSSGAEPESEPWGRAKRSSSSSGAEPESEPSGRAMRSFLWRLRPDLAAVSLTLSSGTAVGAVQAALSSCQAEHVKREIVTDEKPEASGKKNDERTSSKEADNKHKESRFYQVT

SEQ ID NO: 59550 - protein, 88 aa, Zea mays
  Coding DNA Sequence Number=SeqID_16175
  Subcellular localization annotation: CTP_CleavageSite=51; ConfidenceScore=5.37e-01
MQLGPDSQATSPQDANNPGPLVSPRSRSCARVCLARYDLGHCSQIRWLRIRRTTSRVIFAKETLGSRCSGGDAGNMEDFEEFQDYDEF

SEQ ID NO: 59551 - protein, 262 aa, Zea mays
  Coding DNA Sequence Number=SeqID_16176
  Subcellular localization annotation: CTP_CleavageSite=54; ConfidenceScore=5.31e-01
MAPRMLYDDGGSQPPYGSKGTALLQRVGRAGKDGTALANSGFTLQNPTSTRKPGAEKRSNGRRQRRGRDELKKRRLQEGSDVTVTPSSPVRDGPGFHPRKIALGCDDLNRGSGTHGCHRRRDFRSRAPSTASGRNLETQQAAFTIVAAPTPHTMMKILGPVATITTLHKPEPLADAAADERRSRHRHSGRLCRPVDAPTPNSTRLMHWPGTSLPAPPMLARGGGRPHARQIQPFAHQLRKHADQAPLQPPEQQRWADAAAVG

SEQ ID NO: 59552 - protein, 56 aa, Zea mays
  Coding DNA Sequence Number=SeqID_16177
MAHRTVRCATGAPTVRHREDTTVDQPGPTGRGCTGQSGAHRTVQAPKPETLNLVFS

SEQ ID NO: 59553 - protein, 534 aa, Zea mays
  Coding DNA Sequence Number=SeqID_16178
  Homolog annotation: Hit_ID=Q6JAD6; Match level="QueryCoverage=87%, HitCoverage=66%, E-value=0.0, Identity=75%"; Hit description =Putative uncharacterized protein
  Subcellular localization annotation: CTP_CleavageSite=92; ConfidenceScore=5.76e-01
SPYSPPPLGDYHSSTHTSASTPPPTLPTPVTPIAPSTSTAIPATSTTPASTTPAPAPASAPPVPPPRFRERDETEVRPLVSDPRLFDLQRATAARVRRFRYVPVESWLPAQRDPTAGVLFSTQIQESFFRAQMSAQIALRVHRLLDLPAFLLAAGAESEAHLTYLPGLLTLLTISGRYVEEWVRVFYASVWIDPDHHWMRFRFEREDVTITASQIRQLFGFPESTTRLHSLCYGSSDLPRRPHGGVAPGTAHVAALFRPPFTDGSRRSPADFTTAAKYLYELIRRTLLPRMGYREATTHIQLWLLGALVSHSEFDVVDFLICEIEDTVLDGIRARRQLPYAHYLCHIFVQLIQPPQFQSTLEASRLVFGSYRPAPEIPVPASASVFDSQAEDAALRQFDTQGTAADDDDDDDDDFGVPPPPPPPMPPRSHDHEAGSSRAAPAPPPAMDPALAAILANLAAEQARLSETMLSMFQSMQDRQDALQQQLIQDRAENRAFMALMLQHSGISAPPVQSAPPPPLHAPVVPSILSGPPV

SEQ ID NO: 59554 - protein, 202 aa, Zea mays
  Coding DNA Sequence Number=SeqID_16179
MTARDRERHHTCCARRESYDDEGMTGLCARGRRSSPYDNGRWRGGSTVHGKIRMRTAIADAAQAPPHNNRTRTDASVRQLRGRDAWRVAVRRLRAWRDDADAAVMTRRWPEEGLRHAVADDGARATGEVDATRGGEDGEEQARVEAMRGLPATGGHHRRDQSKCSARGAATSGLAATGHRTTALGEPRRGAAVRGREVRQGE

SEQ ID NO: 59555 - protein, 624 aa, Zea mays
  Coding DNA Sequence Number=SeqID_16180
  Gene Ontology: Mol. function=transferase activity
  Homolog annotation: Hit_ID=A2WK00; Match level="QueryCoverage=62%, HitCoverage=73%, E-value=0.0, Identity=80%"; Hit description =Putative uncharacterized protein
  Pfam annotation: Domain name=DUF563; Domain location=239-490; Score =312.9; E_value=6.1e-91; Accession=PF04577.5; Description=Protein of unknown function (DUF563)
MKGDKAGGRDRGGASRPLRLESQRFRLLSIVVGCFVICLVFLLSSRPDAAAAFGTVSVSPKASLVAARRPVAVKTVRASSSADGALGGDFHVDILPQHRQEQSLERTGDKTATEWVRDTVIVEERSGAETSEAETEETEPDRHDSATATAAASNTDDQPAVPGAEKAVQDTAAITGQPAAETTSATAPDGTEKTGAATGGGSGQSKVQEQPARQRPQEERHDEPAQSGGDQQQQQPRPPLCDFSDFRSDICDLAGDVRMDANVSAFVVVVDPATSGSDQEEHKVRPYPRKGDETCMGRITEVTVRATGDAAGAPRCTETHGAPAVVFSIGGYTGNIFHDFSDVLVPLYNTARRYRGDVQLVMANAAPWWLVKYDRLLRALSRHAPLDLARAGAAREVHCFPRAVVSLRAHKELIIERDRSLDGLATPDFTRFLRRALSLPRDAPTRLGDGTGRKPRLLVISRHRTRLLLNLDAVVRAAEEVGFEAVVNESDVANDISQVGGLINSCDAMVGVHGAGLTNMMFLPPGAALVQIVPWGGLQWMARADYGDPAEAMGLKYIQYEIGVAESTLKDKFPSGHKIFTNPTALHKKGFMFIRQTLMDGQDITVDVGRFREVLLQVLNSLAQ

SEQ ID NO: 59556 - protein, 56 aa, Zea mays
  Coding DNA Sequence Number=SeqID_16181
MGTGFLMGIDIFHGYGFGMAKPSGRTDELVDGPNASHISALALDYWETRLVEGSGG

SEQ ID NO: 59557 - protein, 570 aa, Zea mays
  Coding DNA Sequence Number=SeqID_16182
  Gene Ontology: Mol. function=transferase activity
  Homolog annotation: Hit_ID=Q2QV89; Match level="QueryCoverage=72%, HitCoverage=71%, E-value=1e-144, Identity=63%"; Hit description=HGA6, putative, expressed
  Pfam annotation: Domain name=DUF563; Domain location=174-436; Score =279.2; E_value=8.5e-81; Accession=PF04577.5; Description=Protein of unknown function (DUF563)
  Subcellular localization annotation: CTP_CleavageSite=41; ConfidenceScore=5.32e-01
MAALARGAAMKGGGDKNKKVAAGGRLLSVVAVGCFLLFVVVVFTLSSRRYATLVLDARDRRGDFHPSQLQGGSHGGGGGEGDLKHLLVAQRSNDDDDKAVTEAELEESGIRGKISINVVGAGGQAEMEEAAPESSAAAAAAADATSNSDDDRARPGDIMTRAAAAASVKQQRQPLCDLSGSRADVCDLTGDIRLNATASEFIVVDPAAADDGPTTAYEIRPYARKGDATSMGRVTAVTVRVRATADAAPRCTVTHAEPAVAFSVGGYTGNLFHDFTDVIVPLYGTAQRYRGDVRLVVTDAGSSSSWWLAKYDAVLRGLSRHPPLHLHLAKAAGEVHCFGHVVLGLRARRELMVEPDPDPDRGRPDGVGMADFARFLRRALSLPRDAPTRPAAASSDDRRKPRLLVVSRRGTRRLLNADAVARVAEEVGFEAVVSELEVSRDAAGVGRLINSFDALVGVHGAGLTNMVFLPPGATVVQIVPWGGLQWIARMDFGDPADAMGLRYIQYEIAVHESSLADKYPRDHEIFTNPTALHKKGFKFLRHTFLIGQDITLDVDRFRVVLLQALRNLTE

SEQ ID NO: 59558 - protein, 170 aa, Zea mays
  Coding DNA Sequence Number=SeqID_16183
  Gene Ontology: Mol. function=nucleic acid binding
MSHSRKNERIKGGIDEQADIEAGEYTCECKQWEHTGYDKAMDVLDELDGFLCRLEPDIGCNESCDVSDDEENQEGEVNNNNAGHGMEDDNSITCHKMDEHNTMTGCEHALTLITAGNQVDNMRIPPEVGDTSSPCHVAHDRMEQIDASSEAKKLQIELDRVSKERNELKN

SEQ ID NO: 59559 - protein, 142 aa, Zea mays
  Coding DNA Sequence Number=SeqID_16184
  Gene Ontology: Mol. function=nucleic acid binding; Biological process= metabolic process
  Homolog annotation: Hit_ID=Q5NKQ1; Match level="QueryCoverage=99%, HitCoverage=22%, E-value=2e-38, Identity=41%"; Hit description =Putative uncharacterized protein 9C20.4a
  Pfam annotation: Domain name=FAR1; Domain location=11-58; Score= -17.8; E_value=0.0051; Accession=PF03101.6; Description=FAR1 family
MTFKDVDDAYKFYKWYAYEVGFPLKKYREKTFSKWINCSREAAKFELVNLEHNHEFITDKAEKQHLRCNKSRDAEFINFVDAMHDSRVPQHCIVDFISDMHDGPENEGSKETKKNCTNDIAKLLAFFMECKKQNPQFFVIFS

SEQ ID NO: 59560 - protein, 445 aa, Zea mays
  Coding DNA Sequence Number=SeqID_16185
MTVAGGREQWSCRRPGSRPIRGQQENPLSRREDRAPVIRSSNGSRTRNGRPANHSPRRINFAAGQAALLAGEAGDASPSPTNHAKKGWPPEGFNSRLRSRGPYTHYWSEVRRPAPRRAPRPPQATRAPRPLLIRGSKAGPRRVHSRLRRRARDDQGYVRYIAEARAALPRARTRAKPQKTANSAPPDPGLGLGLSPGRRRTPLRPTQGSDSGSAPEDDELRFARPQGSDSALASAERPPPRPTQGLGLGLGHGRQTRPRLRRSLHVARPRAQASHVNRKRHHRPTPSRLGPQRTRPGGRQQGLNRSDSCPSARLRCSSDSHDITPAGFQDLSGCHIGVAFLEKVGRAGARTRQALSWGRSLPSPAWTLVTPYCKRTRPGRGTNTKAAGFPPLSRPSPATSLPPFALAHALDPSGLGHATHSLVGLGTPRSRNADRIIHNFKVQNP

SEQ ID NO: 59561 - protein, 137 aa, Zea mays
  Coding DNA Sequence Number=SeqID_16186
MEKTTLGRGNLLARAERAALGRGSPSTKEGSTAVAWPGASMGRQLRGEQSSDREELQRRGLKRQQADGHNVAAMERSLDGGRAKSWGDGCWGGRLGLMPTQREAPWRRGMLMAPSGGLDVWGRGGLNGHRRWRTLRG

SEQ ID NO: 59562 - protein, 305 aa, Zea mays
  Coding DNA Sequence Number=SeqID_16187
  Pfam annotation: Domain name=Transposase_28; Domain location=1-167; Score=-24.6; E_value=6.6e-05; Accession=PF04195.3; Description =Putative gypsy type transposon
MASHLERFQSEVTLNLVRNLLGWGAPAFAGRIRAGASPLGNLAAGEFVLFVSYLSCGLALPISPFFLLLLEELGLQLQHLMPHSILQAAVFAHLCEMFVGVALFHQCSDERVLRSDLPEMESELSCDSIFRMNFIASCSGLISSSLNFTSTSCGQATRRRALPRLHLFGFNGLDVASNDEGSFALMHTSRRPPPPLASCSTGLLLAPLFPVVATVFRLRYDGAEGGCPRAVVVIAGPVADTEDAAREVVQGAVETAVARFQRDRADVELDVSRLDTSIPKKELVTRPQEDLRDLDREANLCVRTP

SEQ ID NO: 59563 - protein, 212 aa, Zea mays
  Coding DNA Sequence Number=SeqID_16188
MADLPPNAHTAGLGHPPLAAGLGAAPASLAAGIASLGLPAAGQTHPMGPGRSLADAEAPYIVGLRPLRDVSSPALRRGSPPGFPALAAPPRAQHKCLSVKRWTKYKSRIKEKSNWKCLGSSSQDSAESESTGLSGGAPDSVRCARLARANWPLSEIHRRRTAIIHRTVWCAPDFPCKGERLQVVEIPRKRDLRISKQNTVVFKWVFGPLERG

SEQ ID NO: 59564 - protein, 566 aa, Zea mays
  Coding DNA Sequence Number=SeqID_16189
  Homolog annotation: Hit_ID=Q6QP51; Match level="QueryCoverage=26%, HitCoverage=76%, E-value=9e-09, Identity=36%"; Hit description =Putative growth-regulating factor 1
MNRHQHFKVPLQTELRFCPHGCHHVSTDGDVRLSTNAALASAGRSKAHRQDASSAKLEDGFHHQKLEEEVASRPVREVEPRLTSLPAPARMMKILEAEGGTKSSWWSPSWVTTNEGMQPGCLMKILEAERWLKGQKEPKPPRAMCATAQRLLAFLHFRPDQRVKGRTAIQATCNHTKRAHTFDFDASSMEAQAHTSCNRRAGYYVRETAPPLTPVPRLLDCRTSAVTRGDPAHGPTVPTEHIDHGSVSRGRRRNGRYGQKWAGSNGGGRRAEAAVKSSASSRPLLGQRENPLPRCEDDAPMFRSSNGSRTHNGRPASHSSRRTEKGDIPKGILLREGSRPRAPLLIRGSKAGPSEGFNSRLRVLGLRAHYWSEVRRPAPRKGSTAASDHSGSVPTTDQGFVGWPPKGSTAASDAERGMTRAKSGLGRHRKLHLARPQGSDSASTPEDDELRLARPQGSDSASTLEDDELRLARPQGSYSAPEDDELRLARPQGSDSDSAPGRRRTPPRPTPGARTRPWPQTMVSASPDPGLGLDLGKQTRPRPRRSLRLARPRARTDHVTGGPSLS

SEQ ID NO: 59565 - protein, 284 aa, Zea mays
  Coding DNA Sequence Number=SeqID_16190
MQQAPTWCANCRRFDPGGVPGPTSKSSSRVPAQIGRRETEHEGGQKREDRQKGKPAAFVLPRAQVGRKERTQSSSSSGAEAESEPWGRARRSSSSSGAEAESEPWGRARRSSSSSGAEAESEPWGRARRSFLWRPRPDLAAVSLTLSSGTTVGAAQATLSSCHAGQWSGEAIHALNAPAIRSVGVAIRPRLLLGEDWASGEPMLCADGGYQLRLGVLGVPLIMAPDKVAERARPELSPPPEPYDPEADPAMKAALETIRIAEEAVDEAVNKLLNEAAEKILKED

SEQ ID NO: 59566 - protein, 55 aa, Zea mays
  Coding DNA Sequence Number=SeqID_16191
MAAAVGVGGAIARVGRVGGRFSIGRIRMIPRYTRCTPLILDPTVGFAYRFAQGSV

SEQ ID NO: 59567 - protein, 68 aa, Zea mays
  Coding DNA Sequence Number=SeqID_16192
MEVQCQTSFCQNEDGFLKLLRACTVCLGIRSQPEYDGHEFVEHGTEKCVMAVLSHPGFRGTGSPGVQT

SEQ ID NO: 59568 - protein, 171 aa, Zea mays
  Coding DNA Sequence Number=SeqID_16193
MTPRTRKIARKSTRPIGVPRHQLAPRHEDSSSGSNDPIGDLEAQVEQLRSELRHRNEVWVEDGQRINELRTDIRHLQDQLAERDLALDWAVNSRSLALSKEAKARARMEELSTVMDNLQVYYNTLHEEVHVLYSQLHPKYMRILSEWKQDLLEQRVKPLVGNWTFLGPLLQ

SEQ ID NO: 59569 - protein, 57 aa, Zea mays
  Coding DNA Sequence Number=SeqID_16194
MGKPGPSLLMLLLCRGWGRQILDGRLWCWLLGYLLSNSLLWNEDVLPVSEIIVYRMQ

SEQ ID NO: 59570 - protein, 63 aa, Zea mays
  Coding DNA Sequence Number=SeqID_16195
MGLGVCGSLCQGGNETDGFGYVYGAGKWYSFRLERVVSIATTAQEKMKLWKETSRKFQDYDEF

SEQ ID NO: 59571 - protein, 49 aa, Zea mays
  Coding DNA Sequence Number=SeqID_16196
MGGGLLAAAPALRSVLPLFGPPEQKSSSSLLLEQGCLCERELLLAEGDE

SEQ ID NO: 59572 - protein, 272 aa, Zea mays
  Coding DNA Sequence Number=SeqID_16197
  Homolog annotation: Hit_ID=Q40443; Match level="QueryCoverage=39%, HitCoverage=39%, E-value=8e-13, Identity=32%"; Hit description=Tumor- related protein
  Subcellular localization annotation: CTP_CleavageSite=8; ConfidenceScore=5.09e-01
MAATTPAPPSHGGGRNGTLPPPLPSNESFSKFFESWISEQSRDLEELRAAASADPPAPESELRRLVGQVLGHYAQYYRAKAAAAADDVLCMFTPSWTSTTENLYLWCGGWRPTAAIQLLYTKSGMQLQHQLPAFLDGGGLKDDLGDLGAAQLQAADQLQRRTIRREREIEDAAASAQEALTTATMVELAGGGGRDAGAMDREMQAKAEGMRRVLEMADALRLETMREVVALLRPAQAVHFLLAAAELHLAVHDFGRRKDGRAGNVAAAAPPE

SEQ ID NO: 59573 - protein, 538 aa, Zea mays
  Coding DNA Sequence Number=SeqID_16198
  Gene Ontology: Mol. function=metal ion binding
  Homolog annotation: Hit_ID=A2WKY3; Match level="QueryCoverage=99%, HitCoverage=99%, E-value=1e-76, Identity=36%"; Hit description =Putative uncharacterized protein
  Pfam annotation: Domain name=PHD; Domain location=492-536; Score= -3.4; E_value=0.033; Accession=PF00628.20; Description=PHD-finger
  Pfam annotation: Domain name=zf-C3HC4; Domain location=493-533; Score= 47.0; E_value=6.6e-11; Accession=PF00097.16; Description=Zinc finger, C3HC4 type (RING finger)
  Pfam module annotation: Pfam domain module=PHD::zf-C3HC4; Domain location=492-536::493-533
MDQIQPKNIPHNESLPLGQKLLLHHGSDAPLRIGHSSHGNMGLRINDLPSSSRTVQTLGYRVGNPGTSHAPFVHFHAGSSGSHLPDPAVNYPHRSEEGFAPVGSHMDNRRAAMKRKGPSVHPAGISATGYYVGSSSSTQPSNSVQPNAAPLAEPFLRQIPLSIDQSGWDIQHLIHQEGFQRNVRARHSSIPLVPRSASTYPLNINSVHVPSFGSTASASSSAPVEMNQVPVSLPTRTLPSGAPGMTSRVPTGRAYYPVVGSSSSSSSVGAVPTIHGSSGAAMFANGGYVPSSVHAGTVPIFPNPAPATSSGSRAMPHQMVIQSHPAATSAATSTSMRTAQPSLPARTAAASRHARHVSAGLANNGRYRRARSSYYRLHPLMVEAEVDSLFLPYCFNEVEFKSLSNLKLMLLLVVKRFMMDHLVFYESRAAAADPHRDMRLDIDNMSYEDLLALGEAMGNVNTGLADEKVSECVKEVVCCSSDHTQMDQDDGSCAICLEDYRDKEALGILKCRHDFHAGCIKKWLQTKNSCPVCKAAAA

SEQ ID NO: 59574 - protein, 81 aa, Zea mays
  Coding DNA Sequence Number=SeqID_16199
MTRNMVNRSLPSSRDLRRGLPFRLWWVQVRSLHDGSRGQWGIVRQGGSLEDMVAAVTWPSTLPPCWTVEWDPASAEEEHEE

SEQ ID NO: 59575 - protein, 37 aa, Zea mays
  Coding DNA Sequence Number=SeqID_16200
MDGSRGTSTVDMRNILYGTSRLCLSHRLCRTHDLAQR

SEQ ID NO: 59576 - protein, 264 aa, Zea mays
  Coding DNA Sequence Number=SeqID_16201
MTSHGSSDDGNALSHTDGLAREGFPRILWEVLQGAGYMTPPQYAVQQFEKHRVPRCRVRMTLEPHPLQPGWHSLDSESFGYRVEDTIEAIALHGLTTFCGFHPLELSTHPIGLFPVEREDDPMWKDRVEHAKDIWAIYLGQTAHLTVRCMNALYRLQVMRGEAMSHLMALLEATKITLDNREELVVDLSTEMVEKDLQVEQLSNEIQELEELVGTRENTIEEIQDMEANEDVDIVGGEEPASNVDTAGSERPPSPESSVASFAH

SEQ ID NO: 59577 - protein, 98 aa, Zea mays
  Coding DNA Sequence Number=SeqID_16202
  Gene Ontology: Mol. function=carboxyl- or carbamoyltransferase activity; Cellular component=ornithine carbamoyltransferase complex; Biological process=amino acid metabolic process
  Homolog annotation: Hit_ID=Q8SA97; Match level="QueryCoverage=88%, HitCoverage=21%, E-value=2e-19, Identity=54%"; Hit description =Ornithine carbamoyltransferase
MALPIDVAVLHPRLGDVEAPPKPRSSLSSVAEAEFEPLGQARRRSFGRGQGGVRALGSGEADPSPSPGSGGAEFAVFRDLARVRALGRAERSSPSSGA

SEQ ID NO: 59578 - protein, 143 aa, Zea mays
  Coding DNA Sequence Number=SeqID_16203
MAPSFWTMPCTTSSPPSMPCTPHCLCSACPVTCTHMACFVKPTHIYHHHGQTAPSVPTAPMDSSYDEPPVYRPVTIHHDPNHVHPMVTRVARSLFSAPIDRLVMMADTPLDTSSVPSSVRASLVDPHWCCAMMEYVTLLVNHT

SEQ ID NO: 59579 - protein, 107 aa, Zea mays
  Coding DNA Sequence Number=SeqID_16204
MVEEETMSLPIGGDLEEVVVRSQVLHHELALKCGDRVLKKSDTRCYEHDAVDVEQEVYGVVAVPMDEHGRVRLGLDEAEGGQVGGKATIPGLWRLLEVVQGVVQSVD

SEQ ID NO: 59580 - protein, 142 aa, Zea mays
  Coding DNA Sequence Number=SeqID_16205
MQYTLMAIFEIVRYFNGDSEFSDHPDSLRVTQLKVYTFSLGEGVSELQHGRDAENANVTGGNTLEDEVKVDLHMLHAWMLVYADIVAVDEGGALEGAMELLEKLAKLGGLGHTVDHSVVLGLGAGAGDDGLLLHNPGYEVGT

SEQ ID NO: 59581 - protein, 792 aa, Zea mays
  Coding DNA Sequence Number=SeqID_16206
  Gene Ontology: Mol. function=protein binding
  Homolog annotation: Hit_ID=Q7XGI7; Match level="QueryCoverage=50%, HitCoverage=99%, E-value=1e-117, Identity=58%"; Hit description =Expressed protein
  Pfam annotation: Domain name=DUF266; Domain location=101-393; Score =580.2; E_value=2.1e-171; Accession=PF03267.5; Description =Arabidopsis protein of unknown function, DUF266
  Subcellular localization annotation: CTP_CleavageSite=9; ConfidenceScore=5.40e-01
MKDTKKPTRASSRLGGRVVGVASMLLFVSLGFVLGVTSSNAMFIRYYLPFMPPLRSSAAPSSSPPPLTTPLTPSQTPPPPPPLPQNPQLRSAGFLSPSGVMHNMTDEELYWRASMAPMVRRTPDSRVPKVAFLFLVRGELPLRPLWEKFFAGHEGRYSIYVHAHPSYTGSPPTDSPFYGRYIPSQITKWGDASLVEAERRLLANALLDLGNERFALFSEACIPVYDFPTVHAFLTGSDTSFVDCYENGGSRSRYRPFFATRNITLARWRKGAQWFEMDRALALESVADGSCFPAFRDFCVGRRECLIDEHYLPTLVSLLGWGRRNANRTLTYADWKRPVNRHPHTHGPDEVTEERIREIREEGGRRCFYNGARRGICNLFARKFSPDTLEPLLRLAPKVMGFGLSWESQAESRLESTIRLSGLRRRISSFFCEPYTQLDKWLPTLFLRHLGLRKGGRMLGRRQRRHPSLEAFAAVVGPAEAKQAFAAVAGPTETKQAFAAVAGPTETKQAFARYGARRRLRRRHLTKRPRPAQRPTNRRAHRSAALFACSLCSGTRSGGQRLSGSGVRPRRACRVRQRQPSQQAAAGQRSGLALAWRPGAGVAAWAVAQSRLAPSGLGAGPPVEDSRGCPEGQKTCAASAALALASPRLDALGAAAAERWTRVATSEAAGLRLKTCSSRYWAATGAAAQAAPVPSTEDVKDLLPLCSAIPVIQGRHQRPPTHAVDGRWPRFHPIVPSSPSALPHHPPHVVDGARRSQVAEDPPHPPPPPSRPLSCPRIARFPSREPLKTASS

SEQ ID NO: 59582 - protein, 87 aa, Zea mays
  Coding DNA Sequence Number=SeqID_16207
MEKRSVLDNGHKIAALYNGYCSAASLRGIGFHARRRSLCFRCKLTWLVRAKAASVHAQPELLGPVRQCKNAASAVSVGATLTMRGLI

SEQ ID NO: 59583 - protein, 156 aa, Zea mays
  Coding DNA Sequence Number=SeqID_16208
MAERYQLPRSCILPTTRRKDGGYPPSGGLEGGKTRCIRERKDTVAFQGGHPPFEGDSPYLRPQPSWAESSPTHSKVLPYGAGAGSHTSCKQAQNRRSQTAARAGPGKGDTPKRILPREGTRLRASLLIRGSKAGPSEGFNSRLRARGLHTHYWSEV

SEQ ID NO: 59584 - protein, 219 aa, Zea mays
  Coding DNA Sequence Number=SeqID_16209
  Gene Ontology: Mol. function=binding
  Homolog annotation: Hit_ID=A2YYR3; Match level="QueryCoverage=67%, HitCoverage=18%, E-value=9e-45, Identity=64%"; Hit description =Putative uncharacterized protein
  Pfam annotation: Domain name=TPR_1; Domain location=133-166; Score =23.2; E_value=0.00098; Accession=PF00515.19; Description =Tetratricopeptide repeat
  Pfam annotation: Domain name=TPR_1; Domain location=59-92; Score=4.2; E_value=1.6; Accession=PF00515.19; Description=Tetratricopeptide repeat
  Pfam annotation: Domain name=TPR_2; Domain location=133-166; Score =25.4; E_value=0.00022; Accession=PF07719.8; Description =Tetratricopeptide repeat
  Pfam annotation: Domain name=TPR_2; Domain location=59-92; Score =21.5; E_value=0.0031; Accession=PF07719.8; Description =Tetratricopeptide repeat
  Pfam module annotation: Pfam domain module=TPR_1::TPR_1::TPR_2::TPR _2; Domain location=133-166::59-92::133-166::59-92
  Subcellular localization annotation: CTP_CleavageSite=39; ConfidenceScore=5.51e-01
MGKSGAKKKKPATAAAAAAAKPPPASVELKATPSSSSLPAANGAAPHQVVDAGVLLRRAHELKEEGNRLFQSRDYAGALRQYELALRLAPRGHPDRAVFHSNRAACLLQLRPVDHEAVAQECSLALQAEPRFPRALLRRARALEALGRHELALADALALLALDPDHREAIDLSYRLRSRVNASSAASASSAPEPTSRPSPAALGGCCFGLIQLGKCAHV

SEQ ID NO: 59585 - protein, 576 aa, Zea mays
  Coding DNA Sequence Number=SeqID_16210
  Gene Ontology: Mol. function=kinase activity; Cellular component =ornithine carbamoyltransferase complex; Biological process=amino acid metabolic process
  Homolog annotation: Hit_ID=Q6QP54; Match level="QueryCoverage=12%, HitCoverage=25%, E-value=1e-24, Identity=82%"; Hit description =Putative kinase
MAPPVDVVGLCPRLGEVEAPPRSRSSLSSKVGVESEPPGRTRQRPSAEAGAESEPWGRAKRSSSSFGAEPESEPWGRAKRSSSSSGAEPESEPWGRAEQSSSSSGAELESEPWGRAERSSSSSRAEPEFEPWGRAKRSSSSSGAEPESEPWGRAKRSFPWHLGPDLAAVSLTLSSGSAVEAAQAALSSCQTDQWSGEATFALNAPAIWSVGVATWPRLLLGEDWASGEPKLCADGGYQLRFRSLEAPEPLHRARGRSRTDSNFFTYAPTSPFRKEEGGKRHVALGGRRTWCLRQPDCIPSPVVTQDGDLQLDGGEKRTGLRPLPLPQLQGSSSSVLGRGVCRVGVGPCAGGGPLLPSVIGRKGIRRSWRWQLPRAWLSEPGGFRATPGAAFRHGSRKRFLHRRASRCRPWTDLQLYGLLPVLASRVGGMGEGLMAAASTLRSSLLLFGPLEQNTGRGRVGFEKEDVVGRSLAGSSAGGTNTGVELPRPQAGLMSSGDSWPRPRGGRPSRLLEPDSWRRPWRRWPGCGADVVLQSGDPPTASPSEARSDPAEGVVDAEGAAAPFNCRRPSLQDRVVL

SEQ ID NO: 59586 - protein, 316 aa, Zea mays
  Coding DNA Sequence Number=SeqID_16211
  Gene Ontology: Mol. function=protein binding
  Homolog annotation: Hit_ID=A2WKC1; Match level="QueryCoverage=100%, HitCoverage=75%, E-value=1e-103, Identity=60%"; Hit description =Putative uncharacterized protein
  Pfam annotation: Domain name=DUF266; Domain location=13-306; Score =552.6; E_value=4.3e-163; Accession=PF03267.5; Description =Arabidopsis protein of unknown function, DUF266
MGLMDLLAPSGVIHNMTDEELFWRASMAPKGHRTPYHRVPKIAFLFLVRGELPLRPLWEKFFAGNDQELYSIYVHPDPSYTGSPPRDSVFYGRMIPSKETKWGHVSLVEAESRLLASALLDHSNERFVLLSEACIPVYNFSTVYAFLAGSATSFVDSYGNGDCRARYDRFFAERTNITIEHWRKGAQWFEMDRALALEVVGDEPYIQMFRDFCVGRWRCLTDEHYLPTLLNLLGWARNANRSLTYADWKRPQGMHPHTHDGAEVTEELLNRIREDGGNRCFYNGARAGICSLFARKFSPDTLQPLLRLAPKVMGFG

SEQ ID NO: 59587 - protein, 173 aa, Zea mays
  Coding DNA Sequence Number=SeqID_16212
MLVDYTMVLDRPSVSVEGPTQQGIESVVEVTPARGVTSDGSSDPSFRLWLLRKLRVVARTATGVVGSVSVRVSSSSRDALRWCRGHLWLRCSGRRPLRLHLPLRRGGRVLLLLLLLLASALLLLVQVTMQSLQLAGLTWHRAMQGTLRQARRQKWDHRLTCGAPDTSHLQKIS

SEQ ID NO: 59588 - protein, 241 aa, Zea mays
  Coding DNA Sequence Number=SeqID_16213
  Subcellular localization annotation: CTP_CleavageSite=60; ConfidenceScore=5.14e-01
MHKNSKPLVSVDGVLSTVLHGTASRQCTETSGLLRILSSTRRACIARDCRETLLQGSTTDCMEGECVVHGWERKTRALVMGKSSEGASSERGAAQGGCFWIEELGAGNSDAMDRELDQGRKKTRRALGCSPWIAGRALLAAGISGRLLFPTQWQGRAGRGNGAAALRMAATGRRPWSSCSPAGSREGIVKGVSLHPGSSCSCCKGQREEDAMDKSSQGRAAAAPWMGGEEDGVGEKKAAGG

SEQ ID NO: 59589 - protein, 112 aa, Zea mays
  Coding DNA Sequence Number=SeqID_16214
  Homolog annotation: Hit_ID=Q6QP51; Match level="QueryCoverage=50%, HitCoverage=25%, E-value=6e-21, Identity=89%"; Hit description =Putative growth-regulating factor 1
MTLGTSVTWPRLGLRSRGTLGHFRDQQERFCNGIPPEGGIEPSDPIEWVRVWQITCSRPGRTDRSHFALSLTDLTGKQRRSTRSDYCASHPGKADNSKFSLGRNRKLRLARP

SEQ ID NO: 59590 - protein, 229 aa, Zea mays
  Coding DNA Sequence Number=SeqID_16215
  Subcellular localization annotation: CTP_CleavageSite=45; ConfidenceScore=5.28e-01
MATVAPSPPSAARRVVRQTQMLLFHHGGKTSSSSPPPSELTTVVVAVALRGEEYHVVAAVEGHELETPEAEHRRGLKRLLKTTHLELNGVLLVNTQQAPTWRANYRRFGPGGSEGPEPPFYRCKERVQVYNGGCSLCANVSGREVLEPCVHANVAVREVLEPCVCDNVAVGEVPEPCRSAADGAVGILLTSPCFRRGLRTTVVMDARGEPSLPVTGTSQMGRRSCSLVA

SEQ ID NO: 59591 - protein, 147 aa, Zea mays
  Coding DNA Sequence Number=SeqID_16216
MAYQRARSTRGGGRPKSGEGDLELPVPSPRTWKASRDNGEANRRFGAAWARLERAGHGGRGLESLAGGGAACSGQIPVISGLGKTCEHARRDGRGSGLLYRHDAAHRRPWTGERAWAGAGERGCANGREPGVSATVKHVEPLPLPKF

SEQ ID NO: 59592 - protein, 131 aa, Zea mays
  Coding DNA Sequence Number=SeqID_16217
  Subcellular localization annotation: CTP_CleavageSite=57; ConfidenceScore=5.47e-01
MAQRTSGMLGVHLNSTFFANKAVVGGLRLPKHLRTSPQHWRPPPVNSLPLFEFRTPSASIDLRHAAKESFSNSDCRSAAAGPQPGDPQSSGGPKPEEEGHQSNASGGRLGSRDQKYGDAPSAGAKEEGKDG

SEQ ID NO: 59593 - protein, 39 aa, Zea mays
  Coding DNA Sequence Number=SeqID_16218
MANSMEGKRPRIHMQRGKNSGEKVSGGREKLRVFKSKFN

SEQ ID NO: 59594 - protein, 44 aa, Zea mays
  Coding DNA Sequence Number=SeqID_16219
MARVACTLRGKRLDGGSTFSKHFCKTESLIIEKPYLDSLKPAYP

SEQ ID NO: 59595 - protein, 204 aa, Zea mays
  Coding DNA Sequence Number=SeqID_16220
MQRKGEWHKGVVTNDYVAVIPAHRDARPAAAMELRRAIPVNPATVLARDVDEDHRCELAKTRGYRMFSQRRSRRRTMVIGDPRRLLSHGRATAAASAHTVETHWRTPRMHKPGPVAKFPGAMAREAQGGHDGGVLTSCGSTQGSAHAHHRGERESGGRREREGNLVRLNESVEEIDTGLGKGMTNRSHMAAVLVWYAWTRLGRW

SEQ ID NO: 59596 - protein, 77 aa, Zea mays
  Coding DNA Sequence Number=SeqID_16221
MEPLAKVELELSSLLSIALTLRKPFAEPDDEDITMSTTTAAAPPHQAPLPSLAGPITRARARDLNFVMLLKNEGPEE

SEQ ID NO: 59597 - protein, 52 aa, Zea mays
  Coding DNA Sequence Number=SeqID_16222
MARRTSTPCRRPMVRVGRALCRAAADHYVNWNMENHPGKQCYHKGLWTPLVD

SEQ ID NO: 59598 - protein, 145 aa, Zea mays
  Coding DNA Sequence Number=SeqID_16223
MARQSRKGNKMCTCEMLSSRSKQDSLFPIFLIKKEKRKQSIQQPHCLIIEGQLEAVDVAVPPGGRLLGADVEAVVGKEADAQRLDPGEVAARGGVVVADEVCVDVEASVGEDAEVPVPAAVEVEGTAANQGDPSEPALTSTISRA

SEQ ID NO: 59599 - protein, 101 aa, Zea mays
  Coding DNA Sequence Number=SeqID_16224
MARPSLRRLFWVHSSARLHRMGGSGAATCPEKVVYSKASTVVRTPTGERRIPGYIVWTPRLVLDLHVCKPDPWDRVRTPCMGSGPPTAASQGPRRGSVKVA

SEQ ID NO: 59600 - protein, 217 aa, Zea mays
  Coding DNA Sequence Number=SeqID_16225
  Gene Ontology: Cellular component=mitochondrion
  Homolog annotation: Hit_ID=A2XXT0; Match level="QueryCoverage=55%, HitCoverage=5%, E-value=4e-41, Identity=70%"; Hit description =Putative uncharacterized protein
MGRRVWVVPTRTRTRTRLPNGMTVSSADDDPRDVGVMTREELKLDFSKSDTRNTENAEITKRRRVLFRENIPVDSKLCAKTSLLYCYKRSTRASVFSLEQLQWDNFADSFEVTSQKMDVQVYDPFFILRFSIHTLHMGYIEPAQFARLGLLAITLVSIASPDHELRMLGYECLGTFKKSLEYAQRSKETWQLQLLLTYLQNGISEQWQLLFLLQKHL

SEQ ID NO: 59601 - protein, 185 aa, Zea mays
  Coding DNA Sequence Number=SeqID_16226
MQLGRLMKILEAERWLKGTNFREVAFLQRRQDESNAGAPHPGAQKPSWTESSPTRSKVFPLRHGGWVPRVMKDGPGQKKPNHRAQRTGKGDTPKGILLHEGSEPRALLLIRGSKVGPSEGFDSRLRALGLRAHYWSEVRRLAPWKGSTAASGRSGSVPTTSQRLAPEGFDSRLRACRARDDSGYV

SEQ ID NO: 59602 - protein, 213 aa, Zea mays
  Coding DNA Sequence Number=SeqID_16227
MTLSPEDIILARGLGNPTPASVPPVDGPARLRLTKPLFELTLPLSVLAPLPPAPAHRRAAEGLDSRNEQTPALKVPLQTELRVPPPQVQTTPHVGGPAGRQNPRWLADARSGISDDDLRSGRPNSNNDDLRADAAATRPSPMTPLEGRGQATKAVEPEVSPLEAPTVSSVEKPLLAASVGGGTGSSAEAARAGEPGTRQLPAPRTTNALPPDH

SEQ ID NO: 59603 - protein, 224 aa, Zea mays
  Coding DNA Sequence Number=SeqID_16228
  Homolog annotation: Hit_ID=A2X1I9; Match level="QueryCoverage=28%, HitCoverage=61%, E-value=9e-16, Identity=69%"; Hit description =Putative uncharacterized protein
  Subcellular localization annotation: CTP_CleavageSite=57; ConfidenceScore=5.36e-01
MTTAVLSPLRKQGDVSKDPTAPIAMLLQGSSAPPTATTSHEQGTNTSPTATSACAIRQEPNNELSVEVELSSQQKRTGRASHGRYGLALGIAYVDHAFSICDEDDLVVSVIRSSRGAHVKEIPFAIVLLAFGALDAIGRLLMAVNRVGGDRTHSAKDSHLANKKTKKWVQPKEQGTTEGCPEELRYNSPDCLVYHRTVSGAPEESDSELASFGFPLRYNSPDMS

SEQ ID NO: 59604 - protein, 348 aa, Zea mays
  Coding DNA Sequence Number=SeqID_16229
  Homolog annotation: Hit_ID=Q6QP51; Match level="QueryCoverage=35%, HitCoverage=76%, E-value=9e-13, Identity=35%"; Hit description =Putative growth-regulating factor 1
MSRLLDCETGVATRGNPAHGPAVPTKRIDHGSVSRGRRRDGRYGQKWAGSNGGSRQTEAAAKSSAGSRSLLEQQGSPLPRREDDAPVFRSSNGSHNGCPANHSSRRIDSAAGQAKRATLHLRHNDRVKKGTGKGDTPKGILLCEGSGPRALLLIRGSKAGPSEGFDSRLRALGLRAHYWSEVQRLAPRKGSTAASGHSGFAPTTDQGFEGWPPEGFDSRLKTRRARDDSGYVRYMAEARATLPSVACPAPTAVPPARVRLAAAKPSLRRHRKLRLARPQGSALASTSDDRLRLARPQGSDSTSTSEDGLPPRPTSGLGLSLDLGGVTASPDLGLGPTTLQGGPSLPYP

SEQ ID NO: 59605 - protein, 242 aa, Zea mays
  Coding DNA Sequence Number=SeqID_16230
MPQTHGPSEHPSLGHDLDHDHEHVAWEIRGQERDARQQRGERKMDDGEARKVAQWRRQGLQTVREPASYEQLGCMKTPSERRPGSTDDLFLDHVKHIDAGETVWSKEEEEDATLPKDVHLISALRENGHPGQRIKVPVVPMHVSGRPELPLIRDMNKFRLFPHGQPNVMHSHVAALNICIREAQNMGKTTITDFVPVTLDEEIHDWVIIPIGFLIYFVYPEGGIELSYHLVVPGVFHGHNVS

SEQ ID NO: 59606 - protein, 45 aa, Zea mays
  Coding DNA Sequence Number=SeqID_16231
DALLGHLGSDQWRVMISGQNGNHGLWRCFGTGGYEIDGYDHAYGN

SEQ ID NO: 59607 - protein, 169 aa, Zea mays
  Coding DNA Sequence Number=SeqID_16232
MSECGVEGYVVLEVLRPDPVFELDPTAMVPCSPGPLLLRSRLQLSLSPSPGTSSAAWQPASSPARRPASSTTRRPAAAYRADGSADERISGAWQIFGARPTGCGRISAAWCPGISSVSRLASSPAPRPDSSKAQRPDSSTERPAGFVQAGRRGSLPVFSRRVDLQRSSS

SEQ ID NO: 59608 - protein, 97 aa, Zea mays
  Coding DNA Sequence Number=SeqID_16233
RSVEESGRCAFEESGRGAGEEASRDTEDIPGHQAAEIRPQPASASSKKQAAAPVKKQAATLPRMCQAKERGRVGVGIGEEEAAQAQERVKVCSGPVL

SEQ ID NO: 59609 - protein, 101 aa, Zea mays
  Coding DNA Sequence Number=SeqID_16234
MTGAQDAEQQRHGSAGDTEQQKQRSRHAGEEEATGPVKIHPPGEDRHACLLQLEERWRSTPVKKQAAAPVKKQAAAPPRMCQAKERGRVGVGIGEEETAQA

SEQ ID NO: 59610 - protein, 90 aa, Zea mays
  Coding DNA Sequence Number=SeqID_16235
MTSRRISEQMERAPGLKTSRAELGSARPFHELAKEARLDLGSRAIFWLATYELERASSARLAAKTSSKKGLGSARSRLASRSELEPAHEL

SEQ ID NO: 59611 - protein, 154 aa, Zea mays
  Coding DNA Sequence Number=SeqID_16236
MGKNKKGGSSSHHSGDKRKHEPSPPSEDFGDSEYSEEEFSSESEGSPVYASTPVSFDDSDDSQGIVAEVWTYIRAIERSGLKGSDESEISSDEENSSDSSEEESGGDGEDDGGDGGDVGGDGDGGVDGDGDGKGDGGNGKGDSGSSKASGKAPL

SEQ ID NO: 59612 - protein, 85 aa, Zea mays
  Coding DNA Sequence Number=SeqID_16237
MAERTSGASGRRSGRCFAFAAITAPKEGPGKGDTPKRILPCEGTGLRAPLTDQRFEGWPSEGFNSRLRSRGPYTHYWSEVQRPAP

SEQ ID NO: 59613 - protein, 79 aa, Zea mays
  Coding DNA Sequence Number=SeqID_16238
MARAKVLKEVRNVAAMISMEKGALAIGKKENLLLPGSSIKKVPWLSAFRTHEDRQPTSEFVAVCPCLDGLMQDGTQEGE

SEQ ID NO: 59614 - protein, 406 aa, Zea mays
  Coding DNA Sequence Number=SeqID_16239
MRTQSWKLQRMVNSFLCFFCLGQPLPPTGLDLNFPPVPVGGEDAPLQNGHILEGHPVVGPVMPGNVSAVLALNAAPINGPQEVDGPVIQLDPLVPESFNWSKSFLSSEIPSTLLEPELESLSFAIPKGYPKDKFLDDVLSEDPQPSNSEQEENISGVPGSAIVESELRTMSSKVIRNLGAKLCNMSDEDLSDNNLKKKKLPHPRASSLLHQLSLQSLQLSLSCRLHSAHRGPASVAPDLVAQCWREIEAIGPTTPRFANTADPGASSSAFDSTGSSFGHIGCLCSIYRAAYPSSFIASVLSFLFHLPRDASPHHRPPASSRRPRSRQTWQWIGCLVLFAVAIGGEQEDTVEALSRAVQRSGSRAPDNVRWCIGLSGVPTEQRLLRANGRLQKALNALQYALESEQS

SEQ ID NO: 59615 - protein, 37 aa, Zea mays
  Coding DNA Sequence Number=SeqID_16240
MARRSRPSRLSRADSAQVPYELRPDREVVDSPDAFPI

SEQ ID NO: 59616 - protein, 161 aa, Zea mays
  Coding DNA Sequence Number=SeqID_16241
MPPRTRLTARKSTGPIGVPRHQLAPRHESSSSGSNDPIGDLEARDQLTDRDLALDWAVQSRLLACAKEARAQARIKELSSTVDDLQVYCNTLHEEVHVLYSQLHPSAPAHPAEAEAGPSHVVGCALGGELDLFEPPPSMRLVDVWTPTPDDEAAKSNGKQD

SEQ ID NO: 59617 - protein, 46 aa, Zea mays
  Coding DNA Sequence Number=SeqID_16242
MDSKIAALCDELRKLNMEMVSLGTLDYISVEPTLQEPIFMAHLGDK

SEQ ID NO: 59618 - protein, 129 aa, Zea mays
  Coding DNA Sequence Number=SeqID_16243
PSGATSNEVGWNGDLERRPAPEKPSRARLGWKPSAGAGQSIGNSMARELGRPEKRGLGQGGARRPWRWGAARYRDGHTARRGALAGAGAAEELGRELDDNRHGKKRRELGLEVADRARPVPSGDEFVGT

SEQ ID NO: 59619 - protein, 157 aa, Zea mays
  Coding DNA Sequence Number=SeqID_16244
  Subcellular localization annotation: CTP_CleavageSite=52; ConfidenceScore=5.07e-01
MAGTDIVRDERTTRRGQGCFWRRNRSLGSFLQLSATVLNSALDSFGVFKKTRASVQVCQRGRGSRSSVKESCIQDLDNISLLSMHSHEHYMAIILIYIPIWLYLEDEEESEVTEEKTPPPLESQAGTWLYFDICESEPDSPINEGKPRCMQPLSSCF

SEQ ID NO: 59620 - protein, 113 aa, Zea mays
  Coding DNA Sequence Number=SeqID_16245
MHISYALHSLDCNLADGEYVLIPEQGPVQEEDQEQASEAAIEDLPVAPAIEGKPRYGGYKCGHCTAAARVSGALYAKAVPMQEMVDGVTWPTTLPPGWTVEWDVAPEGEEHEE

SEQ ID NO: 59621 - protein, 672 aa, Zea mays
  Coding DNA Sequence Number=SeqID_16246
MERDRQDATQKRRAVVRIANPMREAKKARGSVKAAASSGSKPVAAVKPAAPGHSKAAVSAKAAAPSGSKPPPGGLGKGRRPLSPARRIADFGTDISVEDYLVCSGEGQLTIVPPPVATTSPTAVVGAKGAARDPWATFYASGEILSASAAKDVAGSMSQRLREASQQLSQQLKQAADFADLVASGALTADVAAMVERLRAQHADAVREKSAAESKNRKLSEKVAAMEDEKTDLRRQLAEERRLRRPKPKWRWVEGSLARQRAEELEARFNALRSRVDKAESSTSAEELLVLPTIVTGFMSFASLVTCEGAMNALSREGCRHYEVFDQADENFERQIFKVEDPMVKQSAGALFDRMWGPHGREAVRDRSDRAIEQMAHAEDVEDLVGLNGALPEATEVNPVPSSDAGEGTSATPAPTATGEGPAPAPAPTSEGDLKVVAEPAAEPATEDPTAAARPSQVLGFGPAHATATDNAIFVAASTVAADDDSFGSLSKCFESDDSGSSIVWTEESSDEDLDYFAALDVAAAETSPRVVGAEDPPGASTGCRRRRAVAKRRVMELPLDAQSSGRRLDVDERVDQCRAVVGVLHVLARFVLVLQMQHLRGHISNSNRRHCGEMESGRLRVDGTGKRELLSSPAGASVGEGELQNLFEGEELRIMLFNYREMGIIPKVEPM

SEQ ID NO: 59622 - protein, 222 aa, Zea mays
  Coding DNA Sequence Number=SeqID_16247
  Subcellular localization annotation: CTP_CleavageSite=94; ConfidenceScore=5.17e-01
MVPIRGGRTAPPVEAAISVDSVAAAGSTAGASTPVWAAAACAPAWSAVSASAPIRAATTRAPMGMRGCPLCRLLSRCFPRQPELFVGVVVDRSRAASSTAAQNLELCCRRTCSIRRLRCFYFRSRHCQFRHRQPCCPRRCRCSRCCCSLAFLCRGDLGLLLAPRTRSGRAYGHGGLVRGRCVWKRLSQTKGCSSEQGRKEQLELLLSTECGERHGKEMSTRC

SEQ ID NO: 59623 - protein, 367 aa, Zea mays
  Coding DNA Sequence Number=SeqID_16248
  Gene Ontology: Mol. function=kinase activity; Cellular component =intracellular; Biological process=nucleobase, nucleoside, nucleotide and nucleic acid metabolic process
  Homolog annotation: Hit_ID=Q2QPW1; Match level="QueryCoverage=79%, HitCoverage=76%, E-value=1e-138, Identity=82%"; Hit description =Guanylate kinase, putative, expressed
  Pfam annotation: Domain name=Guanylate_kin; Domain location=198-302; Score=170.3; E_value=5.1e-48; Accession=PF00625.12; Description =Guanylate kinase
MGRLEPQAEWESRLMGKVCKLCRVLETGGEASNMDDFEEFQDYDEFYVVDAKDCKQSAFEVGDKTYVICRSDDDLKTSAVKIHDKLTQTWLSPTILGEQPLLTKSQSVIPVSDEKILVIEKGVPLNESIWFLEIDTPFVKQQRKIKETEVVSWSKGVIGVGQKPVVISGPSGVGKGTLIAKLMKDYPSKFGFSVSHTTRSPREKEIDGVHYHFTERIKIEKDISEGKFLEFAHVHGNVYGTSIEAVESVTDEGKRCILDIDVQGARSVRASSLEAIFIFVCPPSFEELEKRLRARGTETEEQIQKRLRNAQAELDQSNEPGLFHHLLVNDDLETCYENLKAVRLDEQGALRLAQLTPFDKGLYWRFR

SEQ ID NO: 59624 - protein, 416 aa, Zea mays
  Coding DNA Sequence Number=SeqID_16249
  Homolog annotation: Hit_ID=A2Y5W0; Match level="QueryCoverage=91%, HitCoverage=93%, E-value=2e-50, Identity=37%"; Hit description =Putative uncharacterized protein
  Pfam annotation: Domain name=DUF295; Domain location=315-360; Score =22.6; E_value=0.0014; Accession=PF03478.9; Description=Protein of unknown function (DUF295)
MAVPPRWANLNIDLVTEIMNRIPCAIDRARMAAVCQAWLAGIARAEDLTFQLPSLFLPPADVTGVYCYLSGCREHSMLPLPGPRYFGSYDGGWFFLAYGQTRGHRLLNIRTGDSHALPDMVLDQAAHETHSMVILAAAISSTPDDLYDAAGIVTYQPDLDAPRRRHFAFWSQGDAVAVCNVLPGAPVAVGAGWEPEDVVYYRRNFLFLTHAGHIVVCTPIYENDDGGNILVVPWKLMPFLERNFRDCVWEWEYPASTVIRACYLVESRGLLHMVVRLAAHHHAPTSWFKVFDMQPFDIIEPDDDNEEADERSWTWYEVEAVLLDRMLFVGRGCSRSYEVSQYPGFKDGIFFLDDQSFYDAEMMFGGVSERQYPCNDIGRIKWQRLSELIALAEAGLRAQEEEDEFMSQAAAEVEAA

SEQ ID NO: 59625 - protein, 407 aa, Zea mays
  Coding DNA Sequence Number=SeqID_16250
  Homolog annotation: Hit_ID=A2Y5W0; Match level="QueryCoverage=97%, HitCoverage=99%, E-value=4e-53, Identity=37%"; Hit description =Putative uncharacterized protein
  Pfam annotation: Domain name=DUF295; Domain location=318-356; Score =13.6; E_value=0.027; Accession=PF03478.9; Description=Protein of unknown function (DUF295)
MAVPPRWANLNIDLVTEIMNRVPCAIDRTRMAAVCQAWLAAVARAERLTFQLPSLLFPPADANDVYCYLSGCREHNMLAGPRYFGSYDDGWFFVAYGHTCGHRLLNIRTGDSHALPDILVDHVAHEIHSMVILAAAISCPPEFAPCAAGIVSYQPELDAPRRRHLAFWRQGDEVAVCNVLPGAPVGPGWEPEDVVYYRRNFLFLTQGGHILVCNPLYENDDSGNILLVPWKLMPFPEWSFFRDCMWEYPGSAVVRACYLVESRASLDMVVRLAAHHHAPTSSFKVFYMDPIDIIEPGDDDEEADEYLRTWNWFGENAWGGRMLFVGRGCSKSYEVREYPGLKDGIFFLDDRSFYDAEMMFGRVNERQYPCSDIGRWSPPEGPLPSHVELYFPERVPSYNSPPAWLLH

SEQ ID NO: 59626 - protein, 101 aa, Zea mays
  Coding DNA Sequence Number=SeqID_16251
MGNDYVELDMLNLEITDRTEGELRGTQCTREGQEDQGIPRLTAIAAKSTQGPPYTDHSPAALAPFGSIRSDVLSSNDLKVNALLHAVRHLRLDAPLPGTSP

SEQ ID NO: 59627 - protein, 64 aa, Zea mays
  Coding DNA Sequence Number=SeqID_16252
MRENGITNLELRYSKQPLNPGHVFQLASKKDANVISLLNYEDNSYRYVISANIQHRLIDIAKKD

SEQ ID NO: 59628 - protein, 606 aa, Zea mays
  Coding DNA Sequence Number=SeqID_16253
  Homolog annotation: Hit_ID=A2XX24; Match level="QueryCoverage=79%, HitCoverage=72%, E-value=1e-130, Identity=53%"; Hit description =Putative uncharacterized protein
  Pfam annotation: Domain name=DUF674; Domain location=1-478; Score =61.2; E_value=2e-23; Accession=PF05056.3; Description=Protein of unknown function (DUF674)
MAKPEGPTIGVKLSVDKEKKKVLFAESNKEFVDVLFSFLTVLLDTIVRLLDKQSQLGCLDQLYKSVEDLNLEYFQTSACKAMLLKPLNAASGHCCRLKINVDGSVPRVVYVCKDTRCSALSDNAFSSFPGTICKCGKVMESIGQCPKYDGDTETAAATCSEDGVFVKGCLKFIVTDDLQVAPASTSLMMSVFEKFGVLDPAVLEQQVLQFSSEKITCLLKRLLTSKQPLTDHYFEAPVPQDDASLEALVQNLHPKQENEDQEMPGNLKIRVLLTKDNSALLYAEVGVDFVDSLFGLLSIPLGSAIKLYGQCSAKGCLGNVYMSIDGSVQVFVREECQSLLLDPKLPPFFGCCASKILQVDELAPRELTIKACFVCFKSLGFSGCSRCHDIPYKNSLRRYEAFCANTVKSIKLCEANPKEPNGGSEKGEVYVSGKTNFLVTDDLRVLPLSLTSTVKIVSDSKIQTSNLVVKEITLTKSKVMELQRVVLLLSRTTLSSVLLHPKKTKKLHHYHRVSQEDKRFALINHYRSDVASTPPRGSKRMRQTGGMCGCEMIGETLPHANIRDESPEKRHREKMGRMRVLLEAEKMEFPSNTFFQGLLAISWRCS

SEQ ID NO: 59629 - protein, 120 aa, Zea mays
  Coding DNA Sequence Number=SeqID_16254
  Gene Ontology: Mol. function=ubiquitin-protein ligase activity; Cellular component=ubiquitin ligase complex; Biological process =protein ubiquitination
  Homolog annotation: Hit_ID=A2XWU5; Match level="QueryCoverage=69%, HitCoverage=9%, E-value=6e-11, Identity=50%"; Hit description =Putative uncharacterized protein
MARGSGTRPRRLLEQRNPTERSNANLQSQIPAARKGDLHVEDRMLEHAGFVDHSWATTATSDAADKEAAKNDAWLRHVAAALLGSRSGIRRPFLEALSRCLGSPDAGLVGACLTMAWWRL

SEQ ID NO: 59630 - protein, 319 aa, Zea mays
  Coding DNA Sequence Number=SeqID_16255
  Homolog annotation: Hit_ID=Q5GAU8; Match level="QueryCoverage=38%, HitCoverage=96%, E-value=9e-49, Identity=72%"; Hit description =Putative uncharacterized protein
MAWKMSPQPPCTSNIWFLYPPRSICVSVCELRALLEPTSHLLARIHTSSDWFGGWLESFHTGYQSSHAGAQSTLAAALDVDSLPTNHTMKDMYREALWQKRGRPRELYPDVSSKDAPVPPELPVPNCDCGRLAWGHERCFFFQWIDGPDKFDPRYLLFVNWLSGKTSHERFKRWVPPPPNPPPMTDEKEVATERRMDSPSRCDCGDRAVIDEDYDKQFCCPNIDYPYGWRKCRFREWLYGPLSHWPEPEVKEKRYMAWAAEEVKFDPVLCKCGIEAKYGLVPSELGVGYFCGHMVDYDEETRICSWESYYDKGERLEAA

SEQ ID NO: 59631 - protein, 55 aa, Zea mays
  Coding DNA Sequence Number=SeqID_16256
  Homolog annotation: Hit_ID=Q9XEJ4; Match level="QueryCoverage=49%, HitCoverage=2%, E-value=3e-07, Identity=96%"; Hit description=Copia -type pol polyprotein
MTTDRPLELLHMDLFGPIAYISIGGRKISYPRDLNGILETGSKRVRLKDQENKKR

SEQ ID NO: 59632 - protein, 194 aa, Zea mays
  Coding DNA Sequence Number=SeqID_16257
  Homolog annotation: Hit_ID=Q6QP51; Match level="QueryCoverage=56%, HitCoverage=43%, E-value=2e-09, Identity=43%"; Hit description =Putative growth-regulating factor 1
MVSQGRTPGASGFTFDNWDERDFRLGRNPGAREHSPRASEERVFASPDPRARTQPRRWMTDSASPDPGLGHSLDLGSRSPPRPTQGSDSASTPGLRLDLDLGGASALPDLGLGPTTSQGGHHYPTPSSLRLWGTRPTSHLARPGKQIMMAPRVLHDGGGSQPLTKARRRQQGFDNPDSYPSTGPKRSSDDHDIT

SEQ ID NO: 59633 - protein, 375 aa, Zea mays
  Coding DNA Sequence Number=SeqID_16258
  Homolog annotation: Hit_ID=Q6QP51; Match level="QueryCoverage=53%, HitCoverage=80%, E-value=4e-17, Identity=36%"; Hit description =Putative growth-regulating factor 1
  Subcellular localization annotation: CTP_CleavageSite=44; ConfidenceScore=5.29e-01
MAVAGGRKQRSSRRHAHVPSWDSERALSHDVKTTRPCSVPRTARARTTAAPRTTRPVALTLRQDRRHLWQAKQATLHLRHNDRVKKGTGKGDTPKGILLREGSGLRAPLLIRGSKAGPSEGFNSRLRALGLRAHYWSEVRRLAPRKGSTAASGHSGSAPTTDQGFVGWPPKGLTAASEHAEQGMTLRSSASPDPRARAQPRHWTTDSASPDPRARTQPRPQKTVSASPDPRARTQPRRWTTDSASPDPGLGHSLDLGRRSPPRPTQGSDSASTPGLGLDLDLGGASASPDLGLGPTTSQGGHHYPTPSSLRLRGTRLASHLAHIGKQIMMAPRVLHDDGGSQPLTKARRRQQGFDSPDSCPSTGPKRSSDGHDIT

SEQ ID NO: 59634 - protein, 255 aa, Zea mays
  Coding DNA Sequence Number=SeqID_16259
  Homolog annotation: Hit_ID=Q8H6I4; Match level="QueryCoverage=22%, HitCoverage=2%, E-value=2e-07, Identity=47%"; Hit description =Putative gag-pol polyprotein
MSGGLRNKSASMLEKVEVASNSSFGADVDPRAIDLAMRIAERMFLKMKEDEAKNNIEEENDRWRSNDESTSSQGSSFKSTSHMCFIANGSDSESESEDEEEQESDSEDEDDLQQFFAQLSKKNQMSLLKLMERAEEQKEMLHKQEDFLIRKIEDLEKLTKEHEKLKCSHDGLVQRASSTGVQRGSTVVQGKFNQGPERFNRGPGKVQSGFFSWTSLSDLQSASLTGKLTVSLPQAVEPVLEAVQPVLHSQNQSNG

SEQ ID NO: 59635 - protein, 218 aa, Zea mays
  Coding DNA Sequence Number=SeqID_16260
  Subcellular localization annotation: CTP_CleavageSite=55; ConfidenceScore=5.21e-01
MVAPPPPPSAGKVMGWTRMLFFRHAGKTSSIPPPTGGLTAAIVAVARRRKEYHVVAAVEGHELETPETERRPGLERLLETTHLELDGKLFVNTQQAPTWRANYRRFDLGGSLDRRVNYRCVSQPGWVGARRSTKGGRNRQRGNPRPSCCPAPRSGALAVGGYKRPRGREREPYASARSPARPTFSYESPGPSFYRHKERVQVYNGGCSSVLTCLAERS

SEQ ID NO: 59636 - protein, 69 aa, Zea mays
  Coding DNA Sequence Number=SeqID_16261
MPPLRAPIYTPSAFQFGGPHLSLIFAILANGRDLQPWDEGVHDMKGTVWEMDDLVPKLPMEKLRLGGGK

SEQ ID NO: 59637 - protein, 102 aa, Zea mays
  Coding DNA Sequence Number=SeqID_16262
MAKALLIRPLKGTVRGYLLGAFGFRRYPRTRVDITVGEAQIIRRLIQRRRCEQESFGVVAEKETDLKMKRPFRPRWITIELLPNVKGMDVILYGLCPVPINR

SEQ ID NO: 59638 - protein, 136 aa, Zea mays
  Coding DNA Sequence Number=SeqID_16263
  Subcellular localization annotation: CTP_CleavageSite=14; ConfidenceScore=5.22e-01
MDPGTHMRCTRLCPSEMGVTPPSQLLSARPSDPAVYRVPATPCQTKRVRFAFTASTTPPRIHYPSPVSRSHSATPAPTAGSKPPPGSCDRIEDEDLEGWTTIRRRRGRAAHAGLSCVQAEPRLLSAHAPASDGKPT

SEQ ID NO: 59639 - protein, 167 aa, Zea mays
  Coding DNA Sequence Number=SeqID_16264
MPETNQTASNTEVDSMNNAPNGPGLEEAPGLVDAAAGLEPEGLSPSLSASFINNFTHPAARPLLQQHQQALSSPKKRGRHGVRPILRSKRLAAVVWPCGNIQERARQVLMKRLGILPSIGQPTTAANGEAALEHYINLFKGPLTTVALQALLPLCGIIPQGQTVQGT

SEQ ID NO: 59640 - protein, 351 aa, Zea mays
  Coding DNA Sequence Number=SeqID_16265
  Gene Ontology: Mol. function=kinase activity; Biological process=D -ribose metabolic process
  Homolog annotation: Hit_ID=Q6S563; Match level="QueryCoverage=100%, HitCoverage=100%, E-value=1e-161, Identity=78%"; Hit description =Putative ribokinase
  Pfam annotation: Domain name=PfkB; Domain location=66-331; Score =82.7; E_value=1.2e-21; Accession=PF00294.15; Description=pfkB family carbohydrate kinase
MGAEAAHGHPQQQPPSSLRPGREAAAPPAVVGLQLSALIDHVARVDWSLLDRVPGDRGGSQQVSIDELNHILDEVNAHILPSRNDLTPVTTIAGGSVANTIRGLSAGFGISTGIIGACGDDNQGLLFVNNMSFSGVDLTRLRAKKGHTAQANEFRKEDFKGSKWLIVRYAQQNMEQIVEAIRIAKQEGLSVSLDLASFEMVRDSRSKLVNLLETGNIDLCFANEDEAREVIGGSLESDPEEALAFLGKYCKWAVVTLASKGCMAKHGKQVVRVPAIGESNAVDTTGAGDLFASGFLYGLVKGLPLEECCKVGACSGGSVTRALGGEVRPENWQWMYKQMHARGLLLPELKN

SEQ ID NO: 59641 - protein, 168 aa, Zea mays
  Coding DNA Sequence Number=SeqID_16266
  Gene Ontology: Mol. function=DNA-directed RNA polymerase activity; Cellular component=nucleus; Biological process=transcription
  Homolog annotation: Hit_ID=Q5VQW7; Match level="QueryCoverage=23%, HitCoverage=18%, E-value=2e-10, Identity=82%"; Hit description =Putative DNA-directed RNA polymerase II 23K chain
  Pfam annotation: Domain name=RNA_pol_Rpb5_C; Domain location=23-87; Score=20.5; E_value=8.5e-06; Accession=PF01191.10; Description=RNA polymerase Rpb5, C-terminal domain
MGGGAAPVPCPQAPASREVEMFINIKEHVLVPEHHVLTNEEKKTLLERYMLKETQAKCELSIKKGIIRITQGVQSGKAGRSVTKLSLTVWDFTLLVTPSLPAVFGVSWQYFFLPCSISIPVLCNCYGTGCNGLRLMGLLGLAEPAATEGSVGIAAALAKPAAGTCLVQ

SEQ ID NO: 59642 - protein, 186 aa, Zea mays
  Coding DNA Sequence Number=SeqID_16267
  Subcellular localization annotation: CTP_CleavageSite=43; ConfidenceScore=5.57e-01
MRAPSFSPSSDVSFVFTAFILFFLPNLLPPPTVATAGRPTLVDAAQGAGDTNFLGSSTNLETPKQPLTVKELEVPRVTNPHTVKFATSSRTREWENRDEIDSEFDRVHLTPRVLQMIEGDAIAGVKALTVRQVRAEVAGEQYRNRLNRFQDRLNRFWGLKPNFGYFEENKRGDFVGSKICFSQGHS

SEQ ID NO: 59643 - protein, 22 aa, Zea mays
  Coding DNA Sequence Number=SeqID_16268
MSHAMRLGALLPTARRIWNRYR

SEQ ID NO: 59644 - protein, 139 aa, Zea mays
  Coding DNA Sequence Number=SeqID_16269
  Homolog annotation: Hit_ID=Q6JAD6; Match level="QueryCoverage=47%, HitCoverage=9%, E-value=2e-11, Identity=59%"; Hit description =Putative uncharacterized protein
  Subcellular localization annotation: CTP_CleavageSite=14; ConfidenceScore=5.57e-01
MALMLQHSSVLVPPVQTAPPPPLQAPIVPALQSGPPFPSVGPSPLRPVTLAFTSPVLSSVCPQPPVPLASVVSTTAVAVSVITSVPAASTARPQSESVPAPASTADPGSETDSDPPPAFALLPRPRLDAPPPPPPASDV

SEQ ID NO: 59645 - protein, 228 aa, Zea mays
  Coding DNA Sequence Number=SeqID_16270
  Homolog annotation: Hit_ID=Q6JAD6; Match level="QueryCoverage=97%, HitCoverage=31%, E-value=6e-30, Identity=73%"; Hit description =Putative uncharacterized protein
MPRTKNVSAPGGGDDEDPRRPFRQVKGKTVHLEQQEGRKKRRMDRAARAAAAAAAAQAEFGDQPQTPSDQIAYRVRRLASRPRSSTHTTASTPPPTLPAPVTPVAPSTTTAIPATSTTPASTAPPPALASAPPIPPPRFRERDETEVRPLVADPRLFDLQRATSAQVRRFRYVPVESWFPAQRNPDAVDLFSTRSQESFCRAQMSARIALRENQLLDNPYFCLFHSCF

SEQ ID NO: 59646 - protein, 116 aa, Zea mays
  Coding DNA Sequence Number=SeqID_16271
  Subcellular localization annotation: CTP_CleavageSite=64; ConfidenceScore=5.04e-01
MAHVSWSEHAPYQWNGQAHVLSIMNVKARVAQRRHARFRPLAYAARSMPHGSIGSPPERGAGVYADRPESHQTRSGHVLALDPAWALIKARVCSVLEPWDPTVGGPDPIRGIWIPF

SEQ ID NO: 59647 - protein, 80 aa, Zea mays
  Coding DNA Sequence Number=SeqID_16272
MAICTQRSTLTDQQCNVEVRAGSQTGTKLSGAARGQSSNEHTKKEIMTGDKSAIGEDSVKRVRQQIEGGILFLHQVASKR

SEQ ID NO: 59648 - protein, 187 aa, Zea mays
  Coding DNA Sequence Number=SeqID_16273
MELGGGTAVGAVESLLTSSCFRKGAESHRRHRACGAPSLPIWRREPDGTPVGRCGSSSEAEVESEPPGRARRRLPAGAGAESEPWGRAKWSSSSSGAEPKSEPWVGRGGDRRLLGPSPSPSPGSGGVRRLPGLSPSPSPGSGGVRRLPGLSPSLSTGSGGAEFAVFRDIARVRALGRAKRSSPSSGT

SEQ ID NO: 59649 - protein, 359 aa, Zea mays
  Coding DNA Sequence Number=SeqID_16274
MTLDDSGVAVRQTSGRDPLRGIRISDAPAEAPQKRQRTADGAKEASSHAHGATIAPLLESLESPGPKASSSAAPKAMPPPPDTRPTDGSGSQQQESAEGGADGPPPAAARTAPAASHALAGGPAAAAPASGSVAVAEEVLVGGFAPTPNTGGDTGGTSSSNPPPAPEEKEVVFGRRLRSGADQEAVPIPLPRMLSRAHQVLSETEAFTSERSQLERDRKEYKKDLQKVCARELEAHRREKQVARREEVVTQREALTTEYQAKLSALDQTLEAQRAQHVKVVETLQKWQQELEGKASNTALAEENLKAKEQSLDRWETDLARRETYLAFREEMLTRRCELLAEHELEAEEKERKLEEQIC

SEQ ID NO: 59650 - protein, 24 aa, Zea mays
  Coding DNA Sequence Number=SeqID_16275
MAAEKWLKRSFREVKKASMMLGSL

SEQ ID NO: 59651 - protein, 181 aa, Zea mays
  Coding DNA Sequence Number=SeqID_16276
MNDSVTDEQVLILETRGKETQLYNTTTVQTSAGGAAAPSASTPPSAESDPASDSDMVEGSPPRRKMSAPHLGHRRQGLLREPGPSRRPDRLLRSLIQLSPEDTSPAHGVGSPTPGLVPPVDDLARSQPPLRRLLGPWKSPTPGPMKFLLQPTLPLSMLTPLPSASAHRRAAEGSSTKQEKP

SEQ ID NO: 59652 - protein, 209 aa, Zea mays
  Coding DNA Sequence Number=SeqID_16277
  Homolog annotation: Hit_ID=Q6Z2W4; Match level="QueryCoverage=17%, HitCoverage=24%, E-value=4e-09, Identity=67%"; Hit description =AvrRpt2-induced protein 2-like
MEHTGRHHYLFYLGGVRALGLGEAEIPMAPEAGLGCCQPHPGGWHSSRSSAGRVVFLSGQSVEGRSDCGHFGLVDWKARVRIRCQAILALNAPAIRSAGEAIWPRLLLREACPNWASGESKVHPLLEETLGRGANLPWSTVPARGWARLCADGGYQLILGALGDAPERNHSPYVYIWSNEGDPDLYGEWDFQERMKVHLKDCLEMTQEF

SEQ ID NO: 59653 - protein, 349 aa, Zea mays
  Coding DNA Sequence Number=SeqID_16278
  Homolog annotation: Hit_ID=Q6J9V9; Match level="QueryCoverage=27%, HitCoverage=41%, E-value=1e-36, Identity=66%"; Hit description =Putative uncharacterized protein
MWPSLRRRHGRKDLHLKKGSQRRAWTLGNRTKPLGLKRDRERRYFERVLLSKGNRPQALLLIRGSKAGPSEGFDSHPRACRVRDDPGYIRYMAEARATLLRYPRTFPRPAGTICNGIPPEGGTEPSNPIKWVRLQRITCRLRPGRMREQQGRPRNNKKSIMTSEESNHSSEASGATPDGCARAHSSEQNTTTKDQSPCKNPDDNTIHPIPTTVPTTRIRLTTVVTASPEFSLGCNREFRLARPRPRPQEESSPRPSTVSASGWIFASLDPGLGLSLGLGRRSTPRSTQALASGGDLRLARPRSQPQPQPREEIFASPDPSLGFGDITASPETASDRLRKRGIRHCPPPS

SEQ ID NO: 59654 - protein, 68 aa, Zea mays
  Coding DNA Sequence Number=SeqID_16279
MDAQTRASYDASSGKLETHYVQNENDLVILEGNDINDQLALSDGVDDEMVDNDDETYDPANPDAYEDY

SEQ ID NO: 59655 - protein, 111 aa, Zea mays
  Coding DNA Sequence Number=SeqID_16280
  Subcellular localization annotation: CTP_CleavageSite=56; ConfidenceScore=5.57e-01
MAERADSAQSVDTLRPRSRPYRQPRPWARIFPLCSLPSRSPSLQRSTGIPRRTFSSAAAVRPAVDIARSGEILGENLPILSASTLCAFCTHPYGFWPAFALCCLLVGPLRR

SEQ ID NO: 59656 - protein, 170 aa, Zea mays
  Coding DNA Sequence Number=SeqID_16281
MALLSTMETCSVSTLSWCCLTILLGDSDVDAEDTAFGTAAAEVLKCGEGMIHQLIVQRINQASQETILPLGICVDILKSIAGQLQKLVSVLTDRHRPLLECQEFLLLHCHQTCRNMVLTEAISEFFLGKSVEVGMGGEASKASEAEVGVAAVAAEWQPESDRWLELLESA

SEQ ID NO: 59657 - protein, 46 aa, Zea mays
  Coding DNA Sequence Number=SeqID_16282
MAMMGSTSEKMYLFQVKKQQIFVASVPRWCPKKKIRTEAAGGRVLR

SEQ ID NO: 59658 - protein, 248 aa, Zea mays
  Coding DNA Sequence Number=SeqID_16283
  Subcellular localization annotation: CTP_CleavageSite=46; ConfidenceScore=5.04e-01
MNSASPDPGLGLGLGPRRQRTPPRLTQGSDSGSAPEDDELRLARPRARTRARPRKTTNSVSPDPGLGLWLGLGRRRTPLRPTQGSNSGSAPEDDELRFSRPQGSDSGSGLSRRSPPRPTQGLGLDLGLGRQTRPQPRRSLRLAQPRARTDHVTGGAIITLPQANSGYGEQDRRPIWLAPINKLQRSSDDHDTTRTGCQNLSGCHDGMALLQRVGRAGKDGTALTSGSWHHREGCIEAKQLHAERVAFR

SEQ ID NO: 59659 - protein, 122 aa, Zea mays
  Coding DNA Sequence Number=SeqID_16284
MQDTARRALSQYYSLFSGVADGLDLKYYPRRSTSSTRGVIVSPVGGMVNLIAVLNTELGHDLDKLGKARVEIAELRAEHAECRHQEDGSTAPIGSQHPYRSPPHGHHAYGTPDCRTKIDLEP

SEQ ID NO: 59660 - protein, 219 aa, Zea mays
  Coding DNA Sequence Number=SeqID_16285
MVTGQSVHLERLHRRLHEEQEHRRQEREQQDSSPLPQQEVESRSQASSVPQLEVPPAPPQGTPAAGRDPDGDDNDSEEQEPEGWIAQPITRDAARGCHFHDALDTLLRRAFDRHTWSLENHCYVYHRSRGLYPDQWEATCFVYRPEDDLQGVEAYLEHYSITKRDTAEAAMQDVAWCALSQYCLLFSGVPDGLDLKYYPIIRPIVPEGKKANRQIVYTD

SEQ ID NO: 59661 - protein, 125 aa, Zea mays
  Coding DNA Sequence Number=SeqID_16286
MAFSPSLPNSGEPGATLARAYLNSGDLTTAERSSAARSRSPLHGLIPSIRSLSHGPDRGIPLRARAPYAPGPPASAQARWRWAHSVSAPSPSIADAPGPPVRARLPTRAPSVADLISAVGFRSDS

SEQ ID NO: 59662 - protein, 47 aa, Zea mays
  Coding DNA Sequence Number=SeqID_16287
MVNLAAVLNTELDHALDELGKHPNRSLPRGRFDYGTPDCRTRIDLDP

SEQ ID NO: 59663 - protein, 168 aa, Zea mays
  Coding DNA Sequence Number=SeqID_16288
  Subcellular localization annotation: CTP_CleavageSite=63; ConfidenceScore=5.69e-01
MGLAIHPSGSGSSESSVSWLKLPSTSSSSPSGPSSSQDAPMVGAGGHPLAEVQGKAAFQTPPSTEARGKSPVVPAPAPGIGAPALHAGDDAVSPVHLIWAIYKRHRKHKSKSGTMRPETSAEQVLCPDPIDGPTAKPTTPLVPLINQLRGGLADSVMGITLAQGHQRA

SEQ ID NO: 59664 - protein, 171 aa, Zea mays
  Coding DNA Sequence Number=SeqID_16289
MALLRTVGGGGRSASLEPERRRAKGAAEEEEQQDGGRLGFNGARKAKFKQRRPPPPFIGRARLFGKPAIRQAATLRETRNPTVRRPSTVTSKTPAEPLRARAASPPSSDVFGTRTQNPNPYPMNFTIDSKNPSFPEIHEENGVGEQVNAKAVLGTTTQWRNLVPANKQRQH

SEQ ID NO: 59665 - protein, 26 aa, Zea mays
  Coding DNA Sequence Number=SeqID_16290
MSFYAKQLNKEMYKGAVLADSVNSED

SEQ ID NO: 59666 - protein, 223 aa, Zea mays
  Coding DNA Sequence Number=SeqID_16291
  Homolog annotation: Hit_ID=Q6J9V9; Match level="QueryCoverage=30%, HitCoverage=23%, E-value=4e-12, Identity=58%"; Hit description =Putative uncharacterized protein
MEAQAHTSCNRRAGCYVRATARHPHHYRASSTAELVPRLEATLRVTRQCQPGASITGQSAAGEGATVDAAKNGPAVMAVAGGQKQRSRHRPSSRHLVGQRENPLSRHEDDAPVLRSSNGPRTRNGCPANHSPHRINSAAGQAAPLAGEGPGKGDTPKRILLRKGNRPRASLLIRGSKAGPSEGFNGRLRALGVPRPLLVRGSKAGPSEGFNGRLRPLGLRAHY

SEQ ID NO: 59667 - protein, 116 aa, Zea mays
  Coding DNA Sequence Number=SeqID_16292
  Subcellular localization annotation: CTP_CleavageSite=32; ConfidenceScore=5.57e-01
MSTHAPSSLFRAPPVPRAHPSPHFARLHPLSRSAHAASHRRRLAPAFPAIQLTGDRPKPPRAPLQVRHPFPCPISLIAPCVRPISPSPVADRDDNEQPEVPECVVGDLPEQQPGEG

SEQ ID NO: 59668 - protein, 78 aa, Zea mays
  Coding DNA Sequence Number=SeqID_16293
MAHRSCSGLPKAFPPPFSLLCPWIHGLFLAIEFAVAPSPSLPNSSDPGATLACACLNSGDLTTVERSGAASRTSVSLV

SEQ ID NO: 59669 - protein, 106 aa, Zea mays
  Coding DNA Sequence Number=SeqID_16294
  Homolog annotation: Hit_ID=A2YUK8; Match level="QueryCoverage=58%, HitCoverage=35%, E-value=5e-07, Identity=51%"; Hit description =Putative uncharacterized protein
MAGSNSSGHGGNHGDGEPPVSRAELHQMADSLVGAMERMLNECLPTTGGRRLHHHNPEEFNHEESRDENSGFGHEFDPFRDGRRGYGDGRHTNFDNLRGRCHAHGH

SEQ ID NO: 59670 - protein, 541 aa, Zea mays
  Coding DNA Sequence Number=SeqID_16295
MPSSSSSATATPPAAASSEETLSHIEDMQRLGYFGGGVARAPGTEEVPEPEGELVVFEAFFAAGLRLPAHRKRVVEGGVAQFGSCTFTPKTGKTTMPVVELVPCARNKWGSWNEFWFYVAEATVEGHQGLPVSEMCSHYYSAYPPFEVAEEDTDEGALRYAAGQSSGRDLVEEFTAYGVWPLAHGWALGEVCPRQMPFHGGREVRSPAFALSLRNRDPAAFVRDAEDLAVRLVGRYVPKTEGQRSFDIRGSNDRLNRVFELNQLPYDGYPGQDEADRRGKKPAVEAGGDPALAAATSSKKRKLVMDKDRQAAARKRQATVRVHEARPKRQRGASKAEASGGGKPPLPAKAGASAPGKAPEATVGAGGPKLSKVVPSASGVAEAAKAARSLPPPGKRVADFGTEIDVEDYLGGLDEGPLALVVPGAAVATAAPAPKAGVETLGAGGEVTALALVRDEADAATRRLKGAMEALSQVADFTSSTASGALTATLSAEVERLRTQHADAVREKSASDSKCRKLAEKVAALEKEKADLRRQLMEERR

SEQ ID NO: 59671 - protein, 128 aa, Zea mays
  Coding DNA Sequence Number=SeqID_16296
DRVRFMSPPKRQRGASKAEASGGGKPPLPAKPGLDEGPLALVVPGAAVTTAAPAPKAGVETLGAGGEVTALALVRDEAEAATRRLKGAMEALSQVADFTSRTASGALTATLSAEVERLGRNTRTLSVR

SEQ ID NO: 59672 - protein, 120 aa, Zea mays
  Coding DNA Sequence Number=SeqID_16297
  Subcellular localization annotation: CTP_CleavageSite=49; ConfidenceScore=5.18e-01
MEGVTSAPNSPGKARSTLYGLPQSTVSCPTAMTLPWLPMEGRGRCDRAPAQHGRRDPLSSPHHRRPLSIEESRLPSPPSPQMAGEPIATVPSGPESVAEADRLLALAESELSRAGTLFAP

SEQ ID NO: 59673 - protein, 295 aa, Zea mays
  Coding DNA Sequence Number=SeqID_16298
  Gene Ontology: Mol. function=translation initiation factor activity; Biological process=RNA metabolic process
  Homolog annotation: Hit_ID=A2WVF9; Match level="QueryCoverage=58%, HitCoverage=41%, E-value=9e-13, Identity=32%"; Hit description =Putative uncharacterized protein
MDSADSIADKAIGRMQEIADKIFSVARETIRPGRGLTSFDATKLRVALEDIACMLEQDSLVLQENLDIVNNMDKYGKVIAKWDSRATKIYTKICVEEFYISIGHLKVGNTMLVQAMPGCIMFKTAPLENEDELKIMFGPIVCTNERTLVPGVEDANSSPDDHVEATLGGGENSTPDPCSNATGKRKVRHDSPKPKKVKDTREEYMKRLVAAFESRSMNTNKSITSAETDPVRVEVIAQLQQVIDDGSPEGSDLHFFATHLLIEKKYRDVFASLKTKEGRNAWLRRAFEMELKKST

SEQ ID NO: 59674 - protein, 123 aa, Zea mays
  Coding DNA Sequence Number=SeqID_16299
  Gene Ontology: Mol. function=protein dimerization activity
  Homolog annotation: Hit_ID=Q6ASZ5; Match level="QueryCoverage=99%, HitCoverage=36%, E-value=4e-16, Identity=38%"; Hit description =Putative uncharacterized protein B1402B06.14
  Pfam annotation: Domain name=zf-BED; Domain location=27-75; Score =50.1; E_value=8e-12; Accession=PF02892.6; Description=BED zinc finger
MDLRISEGSGTNTTLDDQSIQSPTRRAKVWEYFLQELVEVDGVMKAVCKYCGAKLTSKRNSGTNSLRNHVADTCPKIPVEDRKQFIATMRKRTGEGSFVFDPRKTRECMVKWCISAEVAFNKV

SEQ ID NO: 59675 - protein, 83 aa, Zea mays
  Coding DNA Sequence Number=SeqID_16300
  Subcellular localization annotation: CTP_CleavageSite=50; ConfidenceScore=5.12e-01
MTVEKGHGSCGGTMVTRSAITKQKRWRRKGLGDRFPFSGYSLGLRKPKREASSKSKKPSPGSGKGIPRKGSFSVKETGPEPPY

SEQ ID NO: 59676 - protein, 272 aa, Zea mays
  Coding DNA Sequence Number=SeqID_16301
  Subcellular localization annotation: CTP_CleavageSite=51; ConfidenceScore=5.49e-01
MSSSSLMRRVFPSSKPPDGGYPPSFRLLVGGTQLRGSWYLSAIVRLQGFSSAGPAAPPRRRSPKMVTTSSWVGKSKPGCDLGPTLSFKDVHHPRWGGGQAEPALYLPRGSAGHPLPRRSREEALTGPAGGADLDNVGLIDGGRRHLQRVGVVGWAPGGPSGCRAVCTGVPPTMPRAARAAFVFWGGPAFALGWRPRAEAGAPLVWEDLSGDLPGGWWPPPSAPRRRRLEKSPSPTGSPPPSAPRASGSPYLSSPLERRRGRGQDCSSAYPEA

SEQ ID NO: 59677 - protein, 75 aa, Zea mays
  Coding DNA Sequence Number=SeqID_16302
MAGTHGRDERGACHDQGYSWRRIRNPRAFLQSVKREEEVEVPEDKTPPPSESQAGNSFYFDIYGSEPESHVIGVA

SEQ ID NO: 59678 - protein, 772 aa, Zea mays
  Coding DNA Sequence Number=SeqID_16303
  Homolog annotation: Hit_ID=A6NKB9; Match level="QueryCoverage=21%, HitCoverage=7%, E-value=3e-08, Identity=36%"; Hit description =Uncharacterized protein SRRM2
MTELRDSYASGIRIPHSSPSAIKPYERVRVHVSGKADLAEGLLRLRDTDTSLITFRENSTLGVNYTFGKARPSLGRQRGQRISTPKDDISTTPEPSPPGSSPGIWLEQTARPATPKPQLAVPRGHQPGSWPRQLNSGAGPDSHNEQTSALKVPLQTELRFRLRGYEQPQHQGARGATSSGRLASDLCSSSHGGADDLDGGEAFSSCHHVSTDGGVRLSTNAALAGAGSNSSPSPAWLEDASSVEPEDGLHHQKLEEEAASRPVREVEPRLTSLSAPARMMKILEAEGGTKIAARLASPHPGAGDQRVKGRTAMQAACNRTKRAHPFDFDASGMEAQTHTSYNRRAGCYVQETAPPLAPLSRLLDCGTSTATRGNPAHDPTVPTRHIGHGPVNRGRRRDGRYGQKWAGSNGGGRRAKAADRRHLWQEKRAMLHLRHNDRVKKGTGKGDTSKGILLRKGNGPRAPLLIRGSKAGPSEGFNSRLRALGFRAHYWSEVRRPAPRKGSTAASGHSGSAPTTDQGFAGWPSKAKSGLRRHRKLCIARPQGSDSGSAPEDDELRIARPQGSDSGSAPEDDELRIARSQGSDSGSAPEDDELRLARSQGSDSGSVPEDDELRLARPQGSDSGSAPENDKLRLTRPQGSDSALASADGLRLARPRGSDSTSASEDRFDLDLGGASTSPNPGHGPTTSHEAPSLPYPKLTQANGEQRPASHLARPGLRLVPNQAKGVPARFVSVRPAIAAKASSEGWRLCLRPNICPPRDQFDKVTWCRRRR

SEQ ID NO: 59679 - protein, 321 aa, Zea mays
  Coding DNA Sequence Number=SeqID_16304
MNALSREGCRHFEVFDQADEDFERDIYRVEDPIVKDSAGAIYDRMWGPHGREVVRERAETARAQAARGERVDDFRALNSALPDPEPIPAEAVSGAALEPPPETVEGAPDAPAAAAAAGDLPLETAEGAPDASAAAAPSAEDPATVAAEATAEATAEAPATAGSSQVQDFGPAHATATTNFLAASTVDGGNNCDGSASEFSDFADSGSSVEWTEESSEEDLDYFAALDVAVAEASPHAADAEDVPGPSTGRRRRRAVAKRRVSEAEVGRLRVSRAGRQDLLSLPAAASTGEGELRSLFAGEELRIMLFNYREMGIIPKVEPM

SEQ ID NO: 59680 - protein, 361 aa, Zea mays
  Coding DNA Sequence Number=SeqID_16305
  Homolog annotation: Hit_ID=Q8LQ92; Match level="QueryCoverage=13%, HitCoverage=9%, E-value=1e-06, Identity=59%"; Hit description =Endoglucanase 3 precursor
  Subcellular localization annotation: CTP_CleavageSite=33; ConfidenceScore=5.45e-01
MEIAAHKSPHFSHQSHPYRTGISRILQSRPGRSASTPSPHRISQSRLVPILTPFSCVVDRCYPTIPIPFACASGRRVDRGPRPRVGAQSPGQVPSSRRARSTSSCQSWPVAHPGAYAREATRPRVVEFSGLMKSELQHVREVVRWGADYLLKAMARLDTQDHRTDEMKSVGKPMNPHPSRRGPRNTTARCLLKDDGKGVGEPLDEVVCVRLPWAHGVYNLFIRVLSSYPTDVSESWTENADYIMVPAKEQVNALSKELFALSSVTAKGQVDALSKELFALSTVTGVGAKAKTPPFARCLRCNRWSDRDETGRDTLRLIRHQAKACDGVIPQCSLAQLRGPRTYKYRRTVLVRGQINRAIAI

SEQ ID NO: 59681 - protein, 83 aa, Zea mays
  Coding DNA Sequence Number=SeqID_16306
AAQKSEAAAIIGPNLANEHGAGSRDRLREMWRPRSTGEREIGGLWRLRDAIATKILEVAAAGWRGYRDRDFQRQNTAACGRLQ

SEQ ID NO: 59682 - protein, 98 aa, Zea mays
  Coding DNA Sequence Number=SeqID_16307
MTMETTYLWGSFTRVFFVLCHTTYLEFVAFHFIAFSPPRRVAGLVPASGDNLREKKGARSGKLGHEELAASIKQQMRCNLHESLGYYLRMTSILSIQV

SEQ ID NO: 59683 - protein, 94 aa, Zea mays
  Coding DNA Sequence Number=SeqID_16308
MGTHHLAVERPSRASTGQIDPASIIPYLCSCLTTIPSTQNRATSEEPPRNFTGDRFSPAADRLPPDTVTPPPPSNAWARANGAVPALFPSPWAG

SEQ ID NO: 59684 - protein, 217 aa, Zea mays
  Coding DNA Sequence Number=SeqID_16309
MQSSSSSGAEPEFEPWGRAKRSSSSSGAELESEPWGRAKRSFLWRLRPDLAAVSLTLLSGTAVGAALSSCQACQWSGEATFALNAPAIRSAGVATWPRLLLGEDWASGEPKLCADGGYQLRFRSLEGDQPFSVAFCSGGCARAHPPGVAPEASEEWFDSFEGERTVKDILDFFTYAPASPFRKEEGESTMLPLEGAEHGVSSELLTGNPSGRPCPIC

SEQ ID NO: 59685 - protein, 208 aa, Zea mays
  Coding DNA Sequence Number=SeqID_16310
  Subcellular localization annotation: CTP_CleavageSite=67; ConfidenceScore=5.08e-01
MAEDPPDGEYPQSFRLVVGGTQLRRSWYLSAIVRLQGFSSGGPTASPRRWSPKTVTTSPWVGRSKPGCDLGPALSFKDVHHPGWGGGRAEPELYLPHGFVGQPLLQHSRERALTGPARGANFDNAGLADGGRRQLQRVGLAGLAPGAPSCRKGGCRAARTRGPPKSSRAARAAFVFWGCPAFAPVRCLRAEVGAPLVREDPSGDLPVG

SEQ ID NO: 59686 - protein, 138 aa, Zea mays
  Coding DNA Sequence Number=SeqID_16311
MGKNNKRKREPTPPSEDFGDSEYSEEEFSSESEGSPAPVSPPASSDDSDDSQGIAAEVWTYIRAVERSGLEGSNESEYSSDEEDSPEEGGEGDDDDDGGGRGGNGGSRGDNGGSRGSDGGSMGSGGGGSSKGSNKASG

SEQ ID NO: 59687 - protein, 308 aa, Zea mays
  Coding DNA Sequence Number=SeqID_16312
MVGLSPRLGEVEAPPRSRSSLSSEAEVESEPLGRARRRPSAEARAEFEPWGRAKRSSSSSGAEPESEPWGRAKRSSSSSGAEPESEPWGRAMRSSPSSGAEPESEPWGRAMRSASSSGAEPESEPWGRAKWSSSSSGAKPESEPWGRAKRSFLWRLRLDLAAATFALNAPAIRSAGVATWPRLLLGEDWASGEPKLCADGGYQLRFRSLEGTPNYGPRQKKWNLNFDLTTRGRRMSSGTAALGLRDGGALGARARGWRRSGSGTGTAALGLRLGLRDGDDGSLAAQLCQLGRDELGFLQEPTVLLYYK

SEQ ID NO: 59688 - protein, 593 aa, Zea mays
  Coding DNA Sequence Number=SeqID_16313
  Gene Ontology: Mol. function=nucleic acid binding; Cellular component= chloroplast envelope
  Homolog annotation: Hit_ID=A2XRI4; Match level="QueryCoverage=77%, HitCoverage=90%, E-value=1e-170, Identity=76%"; Hit description =Putative uncharacterized protein
  Pfam annotation: Domain name=DUF647; Domain location=169-587; Score =600.9; E_value=1.2e-177; Accession=PF04884.5; Description=Protein of unknown function, DUF647
  Subcellular localization annotation: CTP_CleavageSite=21; ConfidenceScore=5.66e-01
MSMPQSFLLLPSFLPPPPLVRLASRPPSSPSLTALRFHRVDAKLSPPLLAASHSPPGGFRGYCDSGGSDGGSGGDGGRGMDSPGPGDGWWWERWLQALHPEFFLLFLLLQSGAASALAEALSTSGDDAGDVWEVRGGKRTRLMPDPTWTSYLIAGDDGTKREDGDEKVGSISKDLAALRRQLGRSWRRYAEVAVHLLLPDGYPHSVSSDYLNYSLWRGVQGVASQISGVLSTQALLYAVGLGKGAIPTAAAVNWVLKDGLGYLSKIMLSKFGRHFDVNPKGWRLFADFLENMAYGLEILTPVFPHLFVPIGAAAGAGRSAASLIQSATRSCFYAGFAVQRNFAEVIAKGEAQGMVSKFVGIGLGIALANHIGSSVPLALISFAGITAVHMYCNLKSYQSIQLRTLNPYRASLVFSEYLLSGQVPSVKEVNDEEPLFFNLSLGASRQSKILSAEAKDAADRICRRLQMGSKLSEIIESKEDACALFDLYKNEQYLLMDYKGKFCIVLKEGSSPEDMLKSLFHVNYLYWLERYMGFKPSNVASECRPGGRLEVSLDYAQREFSHVKHDGSDGGWVMDGLIARPLPVRIRIGDGTS

SEQ ID NO: 59689 - protein, 125 aa, Zea mays
  Coding DNA Sequence Number=SeqID_16314
MGQGQHAGVGANGGPSGGRRGWKWNRPMVGQAGKGGSPLARGMGAAHTCPGESLPHPTREGRARPGDEGQPRLAYSLLCSRGNGGARPGSPPGAAHEGSRPGFSRGGAAATTRAWPTRGLAGPIR

SEQ ID NO: 59690 - protein, 272 aa, Zea mays
  Coding DNA Sequence Number=SeqID_16315
  Gene Ontology: Mol. function=transcription factor activity; Cellular component=nucleus; Biological process=regulation of transcription, DNA-dependent
  Homolog annotation: Hit_ID=Q6H4L1; Match level="QueryCoverage=86%, HitCoverage=84%, E-value=4e-37, Identity=41%"; Hit description =Branched silkless 1-like
  Pfam annotation: Domain name=AP2; Domain location=40-91; Score=78.0; E_value=3.2e-20; Accession=PF00847.11; Description=AP2 domain
  Subcellular localization annotation: CTP_CleavageSite=58; ConfidenceScore=5.71e-01
MNFSSYFFSSSSSSSDKKSSSSSSKRRQQAAQPQPDANTTRYLGVRRRPWGRYAAEIRDPATKERHWLGTFDTAEEAAVAYDRAARSLRGARARTNFAYPDLPPGSSVTPYLSPDLTSGDNATQLLQPFYADPAASLAAAAAPAATNGAAGYGAAGDYASYGYSAEDMSALMEDLAIPDDLTADYGAEDAGGGSVNMPSMYSGGGGANASSGSGWCDASEFSAYGAPTTAASHGVYFEEGYVHSPLFSPMPAVDDASADGFQLGGSSSSYYY

SEQ ID NO: 59691 - protein, 132 aa, Zea mays
  Coding DNA Sequence Number=SeqID_16316
  Gene Ontology: Mol. function=ubiquitin thiolesterase activity; Biological process=ubiquitin-dependent protein catabolic process
  Homolog annotation: Hit_ID=A7Q028; Match level="QueryCoverage=52%, HitCoverage=4%, E-value=7e-09, Identity=44%"; Hit description =Chromosome chr8 scaffold_41, whole genome shotgun sequence
MRRPPAVICDRMVLKGYQLQRESQLKGLTSLSFFVNQVFSAFGYFHKIATFEKVAGFQWKFAHVAFSKPEYLQDSDIVMNRFHVRYVFLLAKESFRKNIHCNIEGWEQHLGLEHTATTPKMSYLGNNQMNRI

SEQ ID NO: 59692 - protein, 84 aa, Zea mays
  Coding DNA Sequence Number=SeqID_16317
MGSSVQWVGACFVVGSWRVQQQLQVQATAAITSYDYESTMTIASKGACMQGPGMLMSAGTAGSSVQTRIVFRTSFSRAPWAQKL

SEQ ID NO: 59693 - protein, 259 aa, Zea mays
  Coding DNA Sequence Number=SeqID_16318
  Homolog annotation: Hit_ID=A3ATG6; Match level="QueryCoverage=28%, HitCoverage=44%, E-value=1e-18, Identity=54%"; Hit description =Putative uncharacterized protein
MKRSPQHPIQTHIRNRSQPDDGADDDAHRHREPGMLPLQQQDPEDPLRHSARHLRLQTVRFFCSIDRWTCSYACHDNMTCCTTTEGEFTIEKIVYEKDKVLVTGPFDADKLSCKLWCKAGRIIKDIQVAKPKDEKPKNPSCKLVYPYYPCYPFQLCPQQQPGAWPCSGGCPHPHCGCQSKPPPPPVPPPPPPPPPPPMPPACQCSTWPSCYCGGYPPPMPPSCQCSTWPSCYCGGYPPPMPYPMIVCDDSPPYGACTVM

SEQ ID NO: 59694 - protein, 151 aa, Zea mays
  Coding DNA Sequence Number=SeqID_16319
MGKSKKGGGSSHHSGDKRKREPTPPSEDFGDSEYSEEEFSSESEGSPAPASPQASSDDSDDSQGIATEVWTYIRVVERAGLEGSDESEYSSDEENSSDPSEEGSGGNGGDGDDDGGDGDGDSDSGKGGDGSGKGGSGDGGGSSKGSNKASG

SEQ ID NO: 59695 - protein, 62 aa, Zea mays
  Coding DNA Sequence Number=SeqID_16320
MGVLFGLLFNTKYGYTESAREVLEACQDMDITCSSVDHWRVRAVAPLAQRTVRWHTGQSGEL

SEQ ID NO: 59696 - protein, 239 aa, Zea mays
  Coding DNA Sequence Number=SeqID_16321
  Subcellular localization annotation: CTP_CleavageSite=9; ConfidenceScore=5.33e-01
MSSPHLMRRVFSPSKPPDGGNPPSFRLIVGGTQLRGSWYLSAIVRLQGFSPHSPVAPLRWWSPKTVTSSSWMGRGKPGCDPALSIGGVRHPRWGGERGEPGLYLLRGFMGHPLPRRSGERAPTGPAGGPDFDNAGLVDGGRRHLQRVGLVGLAPGGPSCRRAAAAPYSPVDYLNRFTKHESPRVKVTSEKMVGRGPRGNRSSRLLGPDSRRSPWTASPFEAGSDLAEGVVDAEGATAPF

SEQ ID NO: 59697 - protein, 42 aa, Zea mays
  Coding DNA Sequence Number=SeqID_16322
MTDRPLELLHMDLFGPITYISIGGRKITNPRDLKGILETGSK

SEQ ID NO: 59698 - protein, 132 aa, Zea mays
  Coding DNA Sequence Number=SeqID_16323
  Gene Ontology: Mol. function=nucleic acid binding; Cellular component= cytoplasm; Biological process=selenocysteine incorporation
  Homolog annotation: Hit_ID=Q7EZ58; Match level="QueryCoverage=93%, HitCoverage=60%, E-value=3e-42, Identity=66%"; Hit description=RNA Binding Protein-like
  Pfam annotation: Domain name=RRM_1; Domain location=78-132; Score =12.2; E_value=0.011; Accession=PF00076.13; Description=RNA recognition motif. (a.k.a. RRM, RBD,
MVQTAARKIASVKIIRNKQTGHSEGYGFIEFSSRGAAEHTLMNFNGQMMSNVEITFKLNWASASIGDKRGDSGSDHTIFVGDLAHGVTDSMLEDVFRAKYPSVRGANVVVDRMTGWPKGYGFVRFGDLNNAL

SEQ ID NO: 59699 - protein, 121 aa, Zea mays
  Coding DNA Sequence Number=SeqID_16324
  Gene Ontology: Mol. function=hydrolase activity, acting on glycosyl bonds; Biological process=cell wall organization and biogenesis
  Homolog annotation: Hit_ID=Q10SE9; Match level="QueryCoverage=78%, HitCoverage=20%, E-value=7e-33, Identity=68%"; Hit description =Polygalacturonase, putative, expressed
MAYGNRVTTFEDSEKESEYDYVRKDMKHWPLIAPLPSYGRGRDEPGARYNNFIGGSNLTDVIITGKNGTINGKGKVWWDKFHAKELKFIRGHLLELLYSENIIISNVTFVNAPYWNLHLND

SEQ ID NO: 59700 - protein, 245 aa, Zea mays
  Coding DNA Sequence Number=SeqID_16325
MSTCFADCPSPGPRKNDLTIYWSLGPFVRSFTLLVDPGDICSPQAPDLWVDFEVISPKIPGPACRTLNFIGCSPRASSRFWKIIYSKVSIMSSISCFRGKNNKRKREPTPPSEDFGDSEYSEEEFSSESEGSPAPIPLRESSDDSDDSQGLAAEVWTYIRVVERSGLEGSDESEYSSDEEDSSEEDGGGDGEDDDDDDDDEGGGGGDGDGGGRGGSSGSKDGDGGGSRGDSGGGGSSKGSNKASG

SEQ ID NO: 59701 - protein, 534 aa, Zea mays
  Coding DNA Sequence Number=SeqID_16326
  Gene Ontology: Mol. function=small conjugating protein ligase activity; Cellular component=intracellular; Biological process =regulation of protein metabolic process
  Homolog annotation: Hit_ID=A2Y7C1; Match level="QueryCoverage=90%, HitCoverage=98%, E-value=0.0, Identity=66%"; Hit description =Putative uncharacterized protein
  Pfam annotation: Domain name=UQ_con; Domain location=269-413; Score =105.7; E_value=1.4e-28; Accession=PF00179.17; Description=Ubiquitin -conjugating enzyme
MEWHQGKIVVDWTDEELEHTSEAVGYGKIIVDWTDEELEHTSEAVGYGVVKSYLCAGSSSFDDPDVVEVSSATAAAAGWASGHHKRKRSQVMSISHPLFTAPPLDKNKQTVVCPMDWPKHAKDIAGPSTYASKYIDSCVDLKVFQDEAVYNYSDDCPYAGFEDYMYDEDEFEVDGYDALLIESEFKFGLSAKFDNLHAPPVLEVSLPWMQKTAIDIANKTKPTKVVDDKIEEKYKAFKRFDTVDDHSDHYYSKPTSRKVQVPSKDWVKRIQHEWKVLERDLPDTIFVRAYEDRMDLLRGVIMGPAGTPYHDGLFFFDIYFPPRYPNVPPMVNYRAGGLRLNPNLYDCGKVCLSLLNTWDGSGCEKWNPANSTMLQVLVSIQALVLNAKPFFNEPGYAMHANTAHGEKKSLAYNEDTFLLSCRTMLYSLRNPPKNFEDFVAGHFRQHGRNILVACRAYLDGAQVGCLSGDGVQDVDEGDTSCSVRFKQSLKKLVEELLTEFTVKGADCGKFLTEEKAKRSSGACSTWTADTTLRL

SEQ ID NO: 59702 - protein, 68 aa, Zea mays
  Coding DNA Sequence Number=SeqID_16327
MDVGLASAVTALRTCTDVAHVLEQFRLVWCGKLVRDARAVAPSRASASTSSSLGGGNRAFNACWRCAM

SEQ ID NO: 59703 - protein, 706 aa, Zea mays
  Coding DNA Sequence Number=SeqID_16328
  Gene Ontology: Mol. function=transcription factor activity; Cellular component=nucleus; Biological process=regulation of transcription, DNA-dependent
  Homolog annotation: Hit_ID=A3A0K8; Match level="QueryCoverage=79%, HitCoverage=92%, E-value=1e-177, Identity=63%"; Hit description =Putative uncharacterized protein
  Pfam annotation: Domain name=AP2; Domain location=272-329; Score =44.7; E_value=3.3e-10; Accession=PF00847.11; Description=AP2 domain
  Pfam annotation: Domain name=AP2; Domain location=371-423; Score =59.9; E_value=8.8e-15; Accession=PF00847.11; Description=AP2 domain
  Pfam module annotation: Pfam domain module=AP2::AP2; Domain location =272-329::371-423
MATVNNWLAFSLSPQELPPSQTTDSTLISAATADHVSGDVCFNIPQDWSMRGSELSALVAEPKLEDFLGGISFSEQHHKSNCNLIPSTSSTVCYASSAASTGYHHQLYQPTSSALHFADSVMVASSAGVHDGGSMLSAAAANGVAGAASANGGGIGLSMIKNWLRSQPAPMQPRAAAAEGAQGLSLSMNMAGTTQGAAGMPLLAGERARAPESVSTSAQGGAVVVTAPKEDSGGSGVAGALVAVSTDTGGSGGASADNTARKTVDTFGQRTSIYRGVTRHRWTGRYEAHLWDNSCRREGQTRKGRQGGYDKEEKAARAYDLAALKYWGATTTTNFPVSNYEKELEDMKHMTRQEFVASLRRKSSGFSRGASIYRGVTRHHQHGRWQARIGRVAGNKDLYLGTFSTQEEAAEAYDIAAIKFRGLNAVTNFDMSRYDVKSILDSSALPIGSAAKRLKEAEAAASAQHHHAGVVSYDVGRIASQLGDGGALAAAYGAHYHGAAWPTIAFQPGAATTGLYHPYAQQPMRGGGWCKQEQDHAVIAAAHSLQDLHHLNLGAAGAHDFFSAGQQAAAAAAMHGLASIDSASLEHSTGSNSVVYNGGVGDSNGASAVGSGGGYMMPMSAAGATTTSAMVSHEQMHARAYDEAKQAAQMGYESYLVNAENNGGGRMSAWGTVVSAAAAAAASSNDNIAADVGHGGAQLFSVWNDT

SEQ ID NO: 59704 - protein, 473 aa, Zea mays
  Coding DNA Sequence Number=SeqID_16329
MGGSEPGSFAEKDPFRATGVPVARRVGLGSKLACQKSEKRVHLARLHAACMAARPFCPLVWAKMGGRLGGPWSVLEKTRPAAPGGAPPGLPVFQAPGWGISAAFPPPRWRNATPWELVPLSHRSASRIFITQPGRTPSPAVTRDGDLQLDGGGKRAGLRPLPLPQPQGFSSPRLGRGECRVGVGPCVGGGPLLHSVMGGEAGIARGVRQLQRAWSSAASGFGAPCGVGVCHGSRKRFFCRRGGRDRPRADLQLLRPSARPCLTSFGTGGGLLTAASTLRSALPLFGPPEQKSPSSPLLEQAGGSDISMNRGGVDSRMGNLVGRSLAVLPVSGADAQVGQSRPRIGLAPLEAGCPRPQGSPWTSALPEAGSGFAVDVVDAEGATAPFGVKTRACRIRSSCSVRFLRPPRPEEHALAALAKLRLFSSCFEHLDSVGNRDKGTSEVSVSRRRRSPSARSALAAYVYLVVSRIRFPK

SEQ ID NO: 59705 - protein, 114 aa, Zea mays
  Coding DNA Sequence Number=SeqID_16330
  Subcellular localization annotation: CTP_CleavageSite=37; ConfidenceScore=5.24e-01
MGTVARTSSSVAATVDWCWVDAGTSRHLDTSTTPRIAASPGMGATGLPATGGLSTISSVDGTATDGGSASHAQGAQGSEGAVNVQDFLVHGSGGSGHLPGGGGGSGQNSHSPPE

SEQ ID NO: 59706 - protein, 117 aa, Zea mays
  Coding DNA Sequence Number=SeqID_16331
MGTAAHSALGLGGARARGRGRRRSEMETATLGDGDGDARRWRRRRSEMETATLGLGDGDGDGGVGLGDGAVWRAPSSETVALGLGLGDGVAGAHGSETGTGTTAQQPGGVVSAPGET

SEQ ID NO: 59707 - protein, 143 aa, Zea mays
  Coding DNA Sequence Number=SeqID_16332
MELGGWCSNSLATNSAPGAALDALDVCAGVCYRAECTVAAAPEVVRPRGLTLGSALLLTSRAVGHVAASGLRLSGEQEQSRDPAESGPDPTQRGPGLVPGVRFVPAEVLDSARRSGARHFPMGSGPTVDTLEDIVFSGHVAAL

SEQ ID NO: 59708 - protein, 558 aa, Zea mays
  Coding DNA Sequence Number=SeqID_16333
  Gene Ontology: Mol. function=sequence-specific DNA binding; Cellular component=nucleus; Biological process=regulation of transcription, DNA-dependent
  Homolog annotation: Hit_ID=Q2LGI4; Match level="QueryCoverage=12%, HitCoverage=21%, E-value=3e-21, Identity=76%"; Hit description =KNOTTED1 homeodomain protein
  Pfam annotation: Domain name=KNOX2; Domain location=10-61; Score =79.3; E_value=1.2e-20; Accession=PF03791.4; Description=KNOX2 domain
MEARQHTVLDGLAAETEPELDQFMEAYHEVLVKLREELTRLLQEAMKFMQKMELQLSLLSISGRSLHNTLSSERWRKKRRPHEHLAEVGEDGRLKDGVERKVLMLEAELLQQQQDERPDRQHQPTGEAGDEEHELPGGETAEERGADADPSGEHRRAPSEQVAHQVECHLGLEAPGMDWQSHGNYGGGKQRSANAMGKSRSPCTEAAQPMTRGAGPTSHTDGGRASECRTATRSVEKTNRRARPKSEPSPAVVCPFISAKNNGPIADTGGLGPRVILLGSRFLGAEKANRRARPKSEPPPAVVCLFISVARNKPPSLWHGGPGPRVILLGAAAPGCGEGEPPLTPALRLLGAVAEDIEDVAVSVTEGGLAVIMSASARKRRANRQSSFGPTCRLVSSPEGHHVAREDNILQSINGGSGPRGKVSDPCIYGPDLRTGSRTSAGTNWTPGTGLEPLCVEFEPLSAGSRDSGTKNTQALIKARWGSGADTCPDHTEYAPAPRSGGDPMLPRGRLPVTQCAASALNELCPLHWQTMRYAHAVACAALIMTRAYQGSCGEIST

SEQ ID NO: 59709 - protein, 65 aa, Zea mays
  Coding DNA Sequence Number=SeqID_16334
MAHGTLARPARLEQPRHSHSRPCASRRTVRDDDEEDGYDYAYSNGKEEGVKADLQEFQDFDEFED

SEQ ID NO: 59710 - protein, 512 aa, Zea mays
  Coding DNA Sequence Number=SeqID_16335
  Gene Ontology: Mol. function=catalytic activity; Cellular component =intracellular; Biological process=signal transduction
  Homolog annotation: Hit_ID=Q10L77; Match level="QueryCoverage=37%, HitCoverage=21%, E-value=9e-79, Identity=80%"; Hit description =Pleckstriny domain-containing protein, putative, expressed
  Pfam annotation: Domain name=RhoGAP; Domain location=157-274; Score= -8.9; E_value=2.8e-05; Accession=PF00620.18; Description=RhoGAP domain
  Subcellular localization annotation: CTP_CleavageSite=42; ConfidenceScore=5.50e-01
MNLDRSFHPGRSDRAPPPPPPPPPPSSQPSLPLATTPPPSIVVQAPPHSPFGGVTHEADPPPTARHRHHPPPRRLAVPVPALPRGLVRLRRTQGDLLRGRVGGRRAPAPCPTRRAFTIASSRLAALSNVTVCVELCSGTVDWGEAPVLPSVTAGDQPAVLGAAGRACAVLAAALAAPLGALLQDVAGVLPGHNFASVRDPQLLLSCFGKPQTKDARINAMRSAISETFPEPNRRLLQRILKMMHTVASHTSENRMTASAVAACMAPLLLRPLLAGECEMDEVFDMDGDDSAQLLAAANAANSAQGIVATLLEEYEGIFHDEHLICSLSPESQIEDSGTEASTDDGNLEAKGNGFHDAENDVDQELDDDNGVEHILSGKLSESSGYAGSDLYDYKNGNIMIDEKTNVLTIIIFFWCLKYQFYDYNVDTIVKWEYLEHGPTKRGFTMIVEENSVFCIPMILLPHEHADAILGLNDVRVVQPFSPTNDIDPTSIYLSQFAIDREPLLLARFMRTK

SEQ ID NO: 59711 - protein, 122 aa, Zea mays
  Coding DNA Sequence Number=SeqID_16336
  Gene Ontology: Mol. function=alpha-1,4-glucan-protein synthase (UDP -forming) activity; Cellular component=cellulose and pectin -containing cell wall; Biological process=cell wall organization and biogenesis
  Homolog annotation: Hit_ID=A7PAD7; Match level="QueryCoverage=42%, HitCoverage=14%, E-value=2e-22, Identity=90%"; Hit description =Chromosome chr14 scaffold_9, whole genome shotgun sequence
MEIVKTDLRNKMGSDWLNHRMVCGLIRLLMQKQEAKWNKYNNSSSISSATGPKGTLFPMCGMNLAFDRDLIGPAMYFGLMGDGQPIGRYDDMWAGWSSAITWVWALRQGCPTSGTARPATRS

SEQ ID NO: 59712 - protein, 91 aa, Zea mays
  Coding DNA Sequence Number=SeqID_16337
  Homolog annotation: Hit_ID=Q2R4F5; Match level="QueryCoverage=69%, HitCoverage=8%, E-value=1e-08, Identity=44%"; Hit description =Putative uncharacterized protein
MMDCACLEAHPDREFLVTVTVKKIGDRWWYNACKKCTRTAVAHGDSYKCSDQVCANVGTPIQRLLGISSLQLPPFYLCLPTTLAVLTPTHV

SEQ ID NO: 59713 - protein, 173 aa, Zea mays
  Coding DNA Sequence Number=SeqID_16338
  Gene Ontology: Mol. function=phosphotransferase activity, phosphate group as acceptor; Cellular component=mitochondrial intermembrane space; Biological process=nucleobase, nucleoside, nucleotide and nucleic acid metabolic process
  Homolog annotation: Hit_ID=Q08480; Match level="QueryCoverage=83%, HitCoverage=59%, E-value=1e-70, Identity=88%"; Hit description =Adenylate kinase B
  Pfam annotation: Domain name=ADK; Domain location=29-170; Score =201.4; E_value=2.2e-57; Accession=PF00406.13; Description=Adenylate kinase
  Pfam annotation: Domain name=ADK_lid; Domain location=148-172; Score =24.2; E_value=0.00047; Accession=PF05191.5; Description=Adenylate kinase, active site lid
  Pfam module annotation: Pfam domain module=ADK::ADK_lid; Domain location=29-170::148-172
MEITVRNATILCSYFWRSSSSSSIKFRCPPGSGKGTQSPIIKDEYCLCHLATGDMLRAAVAAKTPLGIKAKEAMNRGELVSDDLVVGIIDEAMKKPSCQKGFILDGFPRIVTQAQKLDEMLAKQGANVDKVLNFAIDDVVLEERITGRWIHSASGRTYHSKFAPPKSPGVDDT

SEQ ID NO: 59714 - protein, 47 aa, Zea mays
  Coding DNA Sequence Number=SeqID_16339
MGLLLCQKRFCLRLSVTDKRLVALEEIEKDKIMVAKAYNKKVKAKSS

SEQ ID NO: 59715 - protein, 25 aa, Zea mays
  Coding DNA Sequence Number=SeqID_16340
MGTRSQEDDEESWARHAQGDKGGGL

SEQ ID NO: 59716 - protein, 387 aa, Zea mays
  Coding DNA Sequence Number=SeqID_16341
  Homolog annotation: Hit_ID=Q6QP51; Match level="QueryCoverage=24%, HitCoverage=36%, E-value=1e-10, Identity=45%"; Hit description =Putative growth-regulating factor 1
MAERYQLPRSCVPPTTRRKDCGHPPSGGSEGGKIRCIREQKDMVAFQGGHPPFKGDSPYLRPQPSRAESSPTRSKVLPLWRGGWVPRVMQAGPGRKKPNRRACACNRPAVTSIPPLFAQTSGRKGGQPCRRHATAPSGRTSPTSNAPSMEAHAHASRNRRAGRYVQATAPPLAPPPRLLDCGISTTTRDDPARDPAAPAWRDGQCGQKWAGSNGGGRRAGAAVTSSARLASHPGAEPGKGDNPKRILLREGNRLRASLLIRGSKAGPSEGFNSRLRARGLHTHYCSEVRRPAPRKGSTAASGHSGSAPTTDQGRQSRSDHSHFAAPLTGLTEGQRRLRRSDCCATRQSEADRQSGPASGTIGSSASPDPGLGLGLSPRRRRTPLCPT

SEQ ID NO: 59717 - protein, 375 aa, Zea mays
  Coding DNA Sequence Number=SeqID_16342
MAVAFNWHCWVMCRAASSRGTGSAVEEARHSAQVAVQLFARRNWCAGYMTCRPTSFALVHRMWSKPKGRTVAVRLDACRVAVHPFDHRFLQRWESSCNREAVACLACCGSPSSRFGSARMTCGTQPPCLRGRTLEYVSGDFARDAKGCNIAFLLLSLEERGLVETGALQPQLGFKDFRRAARLHSLTNGERALTGLAEEANFGNAGTVGCKRHQLQRAWLAGSVAASDAASYRLIRAWPSIHRANDCCAAGASAIHRRGAGAQVAAVVGAEVVAAREGFSADGTVGAICGRTPGSLALMACPRPSSGDVGEGLVTAASALRSSLLLFSHPKRGSLSLLNPRLLCDEPEPEAVVLARIEAESARKETSSARELAAS

SEQ ID NO: 59718 - protein, 187 aa, Zea mays
  Coding DNA Sequence Number=SeqID_16343
MSDLLSISRRVRNRRCPCRADSGDSTTEPGGATSDLGQWRQQRGLCISIKFSPSLPLAIVITGEIPPHKPSSRGNSSVRRGTTSIPSLGIRLLALGLHRAALVRPVALAGQVFAQNRELGGPSITELLLVASRTDCARIRAAGLVRQGADLVCSDEVATVDLGGAASGGCWEEDGPRAVGFTSDDLD

SEQ ID NO: 59719 - protein, 100 aa, Zea mays
  Coding DNA Sequence Number=SeqID_16344
MGLGVCGSLCQGGNETDGSGYEYGAVNNNLTNQKELLDLSPHKASPLQPNRILAEYVDVYSPLLYTPNPPSPGCQHCNHCLGEDEAMEGDFQEFQDYDEF

SEQ ID NO: 59720 - protein, 85 aa, Zea mays
  Coding DNA Sequence Number=SeqID_16345
MGKNKKGRGSSHHSSDKRKREPSPPSEDFGDSEYSVEEFSSKSGGGNSRVMLDPVGVFRGNSRVMTDTVGVLEITAELWLTLSMF

SEQ ID NO: 59721 - protein, 130 aa, Zea mays
  Coding DNA Sequence Number=SeqID_16346
MLFFYHVGKTSSIPPPAGGLSAAIVAVARRGKEYHVVAAVEGHELKTPKTEHRPGLERLLETAHLELDGKLFVNTQQAPTWRANCRRFEPGGSLDRRVNCRHVPQPRWVGARRSAKGEEACGGTARIIPA

SEQ ID NO: 59722 - protein, 47 aa, Zea mays
  Coding DNA Sequence Number=SeqID_16347
MGSHDPRAERESRLMDDDDDDYDYGNGKEEGVEANLQEFQDFDEFKD

SEQ ID NO: 59723 - protein, 174 aa, Zea mays
  Coding DNA Sequence Number=SeqID_16348
MGPIDRIVRQLQPGVGPPWNGPRPQCASTIATFETNQEKDKGISFVITIQEDEDRSQTKPEEEDGQVRRGFENYEWDSVVSDLGRMLVNGEQGGYRWDLVVGTIAFLSLSSVGTAPRGDGSDPLGVDMVGTSDVATASTEGVTWGDYAVKRSGLIYGIGVSARQRGACSNIEST

SEQ ID NO: 59724 - protein, 202 aa, Zea mays
  Coding DNA Sequence Number=SeqID_16349
MDPGEPYRRRKKQVGRGVEASRCCGVHAGRLGWMNSSPVGTKRCCPPWNRVTPWPGPHGRVGRPHWDPSALALLPLRLCLPLTLHPIVGRAWSGCARAVPRWPLSASRWDFNVEPLQAGNLRPYGEVVTFVLLNWAGIYLYLVIANKILTNFKKQCSALTILFELLLYSKDVTFDPVPLCIICVRLGPSTPGVYVRARVLDP

SEQ ID NO: 59725 - protein, 94 aa, Zea mays
  Coding DNA Sequence Number=SeqID_16350
MALFPPSSLRKGDAEANVSPVLQTLQNIGDKEMRKRLHNLHLFKKVSRKVIKFKEGNARIVLSINSYHLMQQASEKDFKNIKGGGKCTGACLRS

SEQ ID NO: 59726 - protein, 204 aa, Zea mays
  Coding DNA Sequence Number=SeqID_16351
  Subcellular localization annotation: CTP_CleavageSite=28; ConfidenceScore=5.16e-01
MQSACNRAKWAHPFDSNAPSMEAQAHTSCNRRAGCYVRATAPPLAPLPRLLDCGTSTATRGNPAYDPTVPARRIGHGPVNRGRRRDGRCGQKWAGSNGGGRRAEAAVTSDRERGYPKGILLRERNRPRAPLLIRGSKASPSEGFNSCLRALRLRAHYWSEVRGPAPRKGSTAASGHSGSAPTTDQGFVGWPSKGSQLPQTQSEG

SEQ ID NO: 59727 - protein, 185 aa, Zea mays
  Coding DNA Sequence Number=SeqID_16352
MSLRSLMYRVFPPSEPPDGEHPQSFRLVVGGTQLRGSWYLSAIVRLQGFSSGSPAAPPRRWSPKTVTTSSWVGRSKPGCGLCPSLSFKDVHHPCWGGGRAEPELFLPRGFVGQPLLQHSRERALTSLAGGADFDNAGPIGGVSSASACRACRLSWLWLGSRCLLSPQGRLLRHAHRRTAQDVARY

SEQ ID NO: 59728 - protein, 107 aa, Zea mays
  Coding DNA Sequence Number=SeqID_16353
MAPRTSRARGPTGTCGNPDRLDAKPLEVCERLFQIGDKIIGPLSLYNYVVNIYLDVVAHLVSETPEHTSLISHPTFLRQTIWRHNKGAERGDEGGVVLIALLRGDLV

SEQ ID NO: 59729 - protein, 121 aa, Zea mays
  Coding DNA Sequence Number=SeqID_16354
  Subcellular localization annotation: CTP_CleavageSite=58; ConfidenceScore=5.34e-01
MARCRARSVGARVRSWRGLGRVRLGSRAGHRTPHRTVVPPLPSTKVLATSLPLLKHSRVVSRGNQPPHALNSPFTALLSEQLLAGAELRRRQATPLRIVPSRASAPVSCPRSSPTCHLELA

SEQ ID NO: 59730 - protein, 173 aa, Zea mays
  Coding DNA Sequence Number=SeqID_16355
MVPRVSDVSEGGAGEGRLSHIVSHDTILSLSTRVGENGLRTDEVVSQEYNVAGRRASCVRVAIPVSIGVDNKLGWCESPKEKIEVDGAAKVVKNLLDNNEVWLLRIMHMKAHLLNNIGDIWPSESEVLKKYFKEDQTSKQHILDKNFLKMPHVLRTVRALLADHLRHLNELRT

SEQ ID NO: 59731 - protein, 198 aa, Zea mays
  Coding DNA Sequence Number=SeqID_16356
MGFDWKLPTITPGHWGLAAELPFLDNASPNGLALHNGNMLYLLLALGLLDCYDWLLGQEDKVSVDSASGTNFLLADCSSDTAADVEGTASETAAETCWNMIPTKIISEFLPSDGIEVGMGGEIGLPPRLSCSPQQTGGHKNLLSVITLSGVQLTLHVTQPIFSIHGVSRVSEHWGMTSHEFSTLISGHLRHLYLHLRL

SEQ ID NO: 59732 - protein, 212 aa, Zea mays
  Coding DNA Sequence Number=SeqID_16357
GSSSSPQQEVESVRRCSPVPPLEAPPAPPLGVPTIGVAMGGDPNNRGGDNSSSSHSTDLSEEQEHEGWAQSLGIPRPLGAEAAMQDVAWRALSHYCSVLGGVADGLDLRYYPRHPPGSTGGVIASPVGEGNPRLSSTVNLAAVLNTELDHALDELSRAHAEITQLRAERAERRHLANGSPASVGTQHLYRSPQRGHHVYGNPDCRTKINLGP

SEQ ID NO: 59733 - protein, 984 aa, Zea mays
  Coding DNA Sequence Number=SeqID_16358
MPVVELVPCARNKWGNWNEFWFYVAEGTVEGHEGLPVSEMCSHFYSAYPPFEVAEDDVDEGALRCAAGQSSGRDLVEEFVAYGVWPLAHGWALGEVCPRQMPFRGGEMVRSPAFALNLRNRDPAAFVREAEDEAVRLVGRYVPRTEGQRSWEIRGSNDRLNRVFELNQLPYDGYLGQDDADRRGKKPVVETKDDPAPAAAPSSKKRKLGTAMGGLGVSEGFARELMRTCAAPGERMSSPELRESSARMLKVTGGCWPRNVPIPRAASGDVFTSRMVRKWRVFPYGWNIAAVVSAVMDKDRQGAAQKRQAAIRLVEARPKRQKRGSVKDAAPGGGKPPAAEKSGVPASSRAPEAATGAGGSKVSKAVPPLSRVAEAAKAARALPSAGKRVADFATDICVEDYLGGSDEGQLAMVAPAAAIATAGTVPKARGEALGSEGEVSALAVVRDEAGAATHRLKGVTEALSQVMEALSQVADFASRTASGALTAAVSAEVERLRTQHADAVREKSASDSKCRKLTDKVAVLEKEKADLRRQLAAEKREANEAIAKEQAAQAEAKLARAEGNLAKELAEHLQERLTALESRAKGAEAAVRAEAERTRTQLMDTYRELGARTGDFEVPDREPGLRCLQWVQEELQELPAVVGGFMSYASLVTCEGATNALSREGCRHFEVFDQADEDFDRDVYKVEDLVVKDSTGALYDRMWGPHGREVVRERAETAMAQALRGERVDDLGALNSALPDPEPTPAEAVSRVTLEPTPETALIATAAPTPAAAGEGLPPKVAEGAPDAPAAAVPSAEDLAAEAVEITTEAAAEPAAEAPVASGPSQVQDFGPAHATATAKFLAASTAEGGNECGGSGSEFSEFFDVADSGSSVEWTGSSEEDLDYFAALDVAAAEISPHAADAQDVPCPSTGRRRRRAVAKRRVSTEERSRLRVSRAGRQELLSLPAAASTGEGELRSLFAGEELRIMLFNYREMGIIPKVEPM

SEQ ID NO: 59734 - protein, 61 aa, Zea mays
  Coding DNA Sequence Number=SeqID_16359
  Subcellular localization annotation: CTP_CleavageSite=49; ConfidenceScore=5.18e-01
MAPHASLFLCSSSSCALLSNIIVYSMGLIVDFVFRRVILEFNKNVREVRATSARSSTGCLN

SEQ ID NO: 59735 - protein, 129 aa, Zea mays
  Coding DNA Sequence Number=SeqID_16360
MEDGEVAATERDLGYQSPEGDLKDVFTGGSYSSEETRWTPEGSRAPRSTELKHAFLRKPFWILHGSRLPIDGDPRSGPSPTASTKPRRAPQCSPQLGRTLQGNAYVYDSSVGSVPINPAYRSAHIQDEL

SEQ ID NO: 59736 - protein, 192 aa, Zea mays
  Coding DNA Sequence Number=SeqID_16361
  Subcellular localization annotation: CTP_CleavageSite=20; ConfidenceScore=5.25e-01
MPRSSCHHRALPPSGPPDGRSATPWGLANFRRRSASRIFITQPGRNLRPVVIHKDDYQPCGREKRAVLRPPPALSFKDVHHSCWGGGRAESGLRLPHGLAARFFLQHSREKGVRQPCEGGELRLHGVGRLRRCQLPRAWLLGLGGFGAASGTASCRLCGAWLSVHRTGDGCVVSVRVAKLHVRTPLGRGSRY

SEQ ID NO: 59737 - protein, 153 aa, Zea mays
  Coding DNA Sequence Number=SeqID_16362
  Subcellular localization annotation: CTP_CleavageSite=58; ConfidenceScore=5.01e-01
MSPRELWTRTHRGPVSLCGGPDPTTLPGMYYPSSPRGALRPAHVVRSGAAPRMTQGCRAGAAPSYRRRGYPCFRVPTVAPGPASGEDASLQVGPESDWRLDCCSCAPVDAVTTSPPMVMPTATPIPTADWPVTIVLNVTIGPCTGCLESLHWF

SEQ ID NO: 59738 - protein, 270 aa, Zea mays
  Coding DNA Sequence Number=SeqID_16363
  Homolog annotation: Hit_ID=Q6J9V9; Match level="QueryCoverage=64%, HitCoverage=72%, E-value=4e-10, Identity=31%"; Hit description =Putative uncharacterized protein
  Subcellular localization annotation: CTP_CleavageSite=73; ConfidenceScore=5.11e-01
MQAACNRAKWARPFDSNAPSMEAGRSSGHVVSQAYVPSRGSEGALSHGVKTVRPTGGASGGRSKRRFAFVIMTASKKGPGKGDTPKRTLLREGNRLRASLLIRGSKAGPSEGFNGRLRSIGFCAHYWSERERSCNGIPSEGGIEPSDPVKGDRLTGNTMFGALRGQHGAFPPSSLRKGDAGANGHTIGSPEAQSSPRSNLGHIATPTDQIAGAFNAKPSPASGVIGNSASPDPRARTRAQPRKTANSAPPNLGLGLGLSPGRRRTPLCPT

SEQ ID NO: 59739 - protein, 216 aa, Zea mays
  Coding DNA Sequence Number=SeqID_16364
MQAACNRAKWARPFDSNAPSMEVQARASCNRHAGCYVRATAPLLAPLPRLLDCGVNTATRGNPAVPAKRDGQMRTGGASGGRSKRRFAFAIMTASKKGPGKGDTPKRTLLREGNRLRASLLIRGSKAGPSEGFNGRLRSIGFCAHYWSEGHDRASPEPSLGQGKPTPENLRLARGPPSSNGHTIGSPEAQSSPRSNLGHIATPTDQIAGAFNAKVA

SEQ ID NO: 59740 - protein, 169 aa, Zea mays
  Coding DNA Sequence Number=SeqID_16365
MTIRRRRRSDRGGGIAGTRRVLGPEHQTARRGGDNGRNRWQMCGAYLLEGVQQGGFSPTSLRPSGHSLRRCEIADAKIIRCSNQARVHHPRGPMKLQEPTWGPRRWSTRVSTVRCGTAAKGRVAGRFERRGRAVGVENDGGTCRGGRRRATSRLNNRSTQSGGEARDWS

SEQ ID NO: 59741 - protein, 98 aa, Zea mays
  Coding DNA Sequence Number=SeqID_16366
  Subcellular localization annotation: CTP_CleavageSite=69; ConfidenceScore=5.38e-01
MQAACNRAKWAHLSDFQRAQHGSPGPRVMQPACRMLRASNYTATHATATPPRLRNQYRDSRKPYARPSNASLARRDRERGIPRKGSFSVKEPGSEPPY

SEQ ID NO: 59742 - protein, 128 aa, Zea mays
  Coding DNA Sequence Number=SeqID_16367
  Subcellular localization annotation: CTP_CleavageSite=38; ConfidenceScore=5.15e-01
MARASAYKAPRDLDRTPPHVLDLTGAQPHRRLPVHSVSAAARSPCHRRPANRTLPNPVQPSERTEHTSVKLPERGIGVCFVGEASPRSSDSTRPPASVDRVILYFILRFIVHTASTSPREAHCAFGLN

SEQ ID NO: 59743 - protein, 160 aa, Zea mays
  Coding DNA Sequence Number=SeqID_16368
MGKSKKGGSSSHHSGNKRKREPTPPSEDFGDLEYSEEEFSSESEGSPVHASPPASSDDSDDSQGIAAEVWTYIRAVERAGLEGSDESEYSSDEENSSDSSEEGGGDGDGGDDDDDGGDGDGGGDGGEGDGKGGDSGGKGGSGDGGNGSKGSSRGSNKASG

SEQ ID NO: 59744 - protein, 388 aa, Zea mays
  Coding DNA Sequence Number=SeqID_16369
MGRRETEQEGGKKTEGDRLGGYKRPRGREREAYASAVPSFHARPTLCKRALDLPLIGPERFWRPVRVVSWPSEERWSLAEGQLSGLSSPCLRLLASVRGLRADVVIEHGNDGASCDVVGPSPGLGEVEAPPRSRSSLSSEAEVESEPLGRARRRPSAEARAEFEPWGRAMRSSSSSGAEPESEPWGRAKRSSSSSGAEPESEPWGRAMRSSSSSGAEPESEPWGRAKRSSSSSGAEPESEPWGRAMRSSSSSGAEPESEPWGWAKRSSSSSGAEPKSEPWGRAKRSSSSSGVEPESKPFGRCRVSYGARGRTWMLLASLCRVAQQSERRRRRCPLVRPATFALNAPAIRSVDVATWPRLLLGEDWASGEPKLCADGGYQLRLGVLRVP

SEQ ID NO: 59745 - protein, 33 aa, Zea mays
  Coding DNA Sequence Number=SeqID_16370
MAATVGFARKGRRSRMFTVRWCTGLSGENYVFA

SEQ ID NO: 59746 - protein, 329 aa, Zea mays
  Coding DNA Sequence Number=SeqID_16371
MPSAGGSGSSQCVRLRRGQKRCVVEAVGGEVDAGSRKVYRGQSYHSRREGSGGHKNIAKIERSEKNQITYRDAMKVHPRTGQARPHRDAAGPWVVGKGRRGIPLATPTPIVTLHLIAKTHLKLALPRAWARREGRGAHGQRGQTSVKTSPPRMKSLQTLWKQGKWDRASDPNLEVIVALIEATEEVKDMMRRIRSHSGRMTGEGIGNSAFMLPGESNDAFVLPGGSHYCLSSHEGHDKAGLGSHNVDGWQSIRQSGGGRYREIRGRGVYGPTRKDRGDMGCPGPAPSRGSDRQAPAMAVVPATTAKEVVAPVAGGRGSKGNDGGSVERK

SEQ ID NO: 59747 - protein, 160 aa, Zea mays
  Coding DNA Sequence Number=SeqID_16372
MSGNMVTAGVSGALYAKAVRYMIWLMVVDRREHCLCADVVSEFPKVPIVELFPIVYCQLGGNSEAIDNVLLENFCDVFAVIFYTALASIHVVKYSIATKANLRLPCVVANGLTMSRPQHCSGQVWAMNFVNCEGAPIRGDEDILHYYPLAKTQLAQLAQL

SEQ ID NO: 59748 - protein, 330 aa, Zea mays
  Coding DNA Sequence Number=SeqID_16373
  Subcellular localization annotation: CTP_CleavageSite=64; ConfidenceScore=5.70e-01
MQAACNRAKWAHLSDFQRAQHGSPRPRVMQPARRSLRASNCTATRATTVPPRLQNQYRDSRRPIASERVGSTPTTGQRFEGRPLGRVQRPPQATQAPRPLLIRGSKAGLRRVHSRLGHRARDDHGYVRYITKARAALPRARTRAKPPEDGELHSAGPRARTRAKPRKTANSAPPDPGLGLGLSPGRRRTPLRPTQGSDSGSAPEDDELRFARPQGSDSALASADGLRLARPRGSDSTSATEDRLDLDLGGASTSPNLGCGPATSTGGTIITLPQADSGYGKQDRRPIWLAPPDKVMMAPRTLYDDGGSQPPYGSKRTSARTRQPRQLSFR

SEQ ID NO: 59749 - protein, 36 aa, Zea mays
  Coding DNA Sequence Number=SeqID_16374
MHDLLLALVLLGCSDEETASGTAAGSDADAGVGDLA

SEQ ID NO: 59750 - protein, 219 aa, Zea mays
  Coding DNA Sequence Number=SeqID_16375
  Subcellular localization annotation: CTP_CleavageSite=54; ConfidenceScore=5.24e-01
MGDALFSFRLVVGGTRLRGSWYLSAIVRLQGFSSCSPAAPLRRWSPKTVTSSLMAGESKPGCGLCPSLSLKDFHHQCWGGECAELGSAPAWVVARSFPPVDVVGPRPRLGDVEAPPRSRSSLSSVAEVESEPLGRARRRPSAEARAESEPWGRAKRSSSSSGAEPESEPWVGRSGVRRLPGLSPSPSPGSGGAEFAVFWGLARVRALGRAERSSPSSEA

SEQ ID NO: 59751 - protein, 30 aa, Zea mays
  Coding DNA Sequence Number=SeqID_16376
MAGKFFGLGLNYQKTQGSLRKRYETQCTVR

SEQ ID NO: 59752 - protein, 19 aa, Zea mays
  Coding DNA Sequence Number=SeqID_16377
MAIGVSEALYAKAVPPCFG

SEQ ID NO: 59753 - protein, 92 aa, Zea mays
  Coding DNA Sequence Number=SeqID_16378
MARDPLRGLYKVPLASENPLQFIGRSSTGFLADSHRSKINQGPPRTDLSPTALAPFGYFNLLLTKILSNELFYSPQYKQAQDIGKINITPSM

SEQ ID NO: 59754 - protein, 123 aa, Zea mays
  Coding DNA Sequence Number=SeqID_16379
MRNRARPSPLLLLLLSCWSSIPLDRPTRWQCGRPSHTINHILKSTCKNCATSKVEYTNTQLDLPGYKGSSSLISCEKPAIRIEFLNLAREILDGRLRSWLLVFLVDSSLLRDEHVLSVIEVAI

SEQ ID NO: 59755 - protein, 63 aa, Zea mays
  Coding DNA Sequence Number=SeqID_16380
MAGGNKLTGAKERWLAGEEIWSQEIWSVSLPKPEANPSCFDAHAYFGSHKMMVLGLAFEKNPE

SEQ ID NO: 59756 - protein, 186 aa, Zea mays
  Coding DNA Sequence Number=SeqID_16381
MAAGEVLAPGSCGVVAVGGALKLGGRTAVKAVESLLMSSCFRKGAESRRRHRACGAPSLLVWRSEPDGTPVLFPVAWGRVMMAPPVDVVGPCPRLGDVEAPPRSRSSLSSEAEIESEPLGRARRRPSAEARAESEPWGRAKRSSSSSGAEPESEPWVGQSGVRRLPGLSPSPSPGSGGAEFAVFRG

SEQ ID NO: 59757 - protein, 320 aa, Zea mays
  Coding DNA Sequence Number=SeqID_16382
MGAHAHASRNRRAGCNVRTTAPPLAPLPRLLDCGTSTATRGNPVYDPAVPARRDGQYGQKWVGSDGGGRRVGAAVTSSAKLTSHPGAGKRATLRLRHNDRVKKRLRASLLIRGSKAGPSKGFDSHLRARGIHTHYWSEVRRPAPRKGSSTASGHSGSAPTTDQGGNDLVTESHQREASSPRTPSTGDRVRQITRRYFWARLWASSRPLANGARASTRITRQQLTGDTMFGALRGQHGAFPPPLLLVERRRRGICKNVESVPDRPLALCRGSRATLANSAPAKPLTASTYQPENLEPDRAPGLRPTHMRERPDQPKHCARH

SEQ ID NO: 59758 - protein, 270 aa, Zea mays
  Coding DNA Sequence Number=SeqID_16383
  Subcellular localization annotation: CTP_CleavageSite=26; ConfidenceScore=5.24e-01
MSSRSLMHCVFPPSEPPDGRHPQSFRLVVGGTQLRGSWYLSAIVRLQGFSSVSLAASPRRWSPKTVTTSPWVGRSKPGCDLGPTLSFKDVHHPRWGGGRAEPELYLRAGSWVSLSLSVRGRGRSVALREGRTSTMRGWSMAGLVSFSALGSLAWLPEPPPAARAVIAPCAREDRPRRRALPGRRSCSGAALPLHRYGASARRSVPRSSEWGSAGGLTAPVVGAEAEAAREVPVADGITATIRASGLRLFVLVLAPRASAWARAGLQRRSP

SEQ ID NO: 59759 - protein, 114 aa, Zea mays
  Coding DNA Sequence Number=SeqID_16384
RICPDVSQLSDSPRCQEEVCAGLLQRFARLRPLATFEHWKKQTATCSTPSAAPEHARAAPEPSRCPAIPNPVQPSEKTVHVSVKLPERGIGLCFTGEADPRSPDFNRPPATVNR

SEQ ID NO: 59760 - protein, 150 aa, Zea mays
  Coding DNA Sequence Number=SeqID_16385
MGKNNKRKREPTPPSEEFGDSEYSEEEFSSESEGSPAPIPLRESSDDSDDSQGLAAEVWTYIRAVERSGLEGSDESEFSSDEEDSDGGEDEDDDDDDGGDGDGDGSNGGGGSGGKGDTRGGSSTGSTRGGSGAGSTRGGGGKGSGSKASG

SEQ ID NO: 59761 - protein, 238 aa, Zea mays
  Coding DNA Sequence Number=SeqID_16386
  Subcellular localization annotation: CTP_CleavageSite=28; ConfidenceScore=5.03e-01
MQAACNRAKWAHPFDSNAPSMEAQAHTSCNRRAGCYVRATAPPLAPLPRLLDCGTSTAARGNPAYDQTVPARRIGHGPVSRGEGATVDAAKNGPAVMAVAGGRKQRTGDTFGRRSGRRFAFAMMTASKKAGPSEGFNSRLRALGLRAHYWSEVRRPAPRKGSTAASGHSGSAPTTDQGNDLVTESHQREASSPRTSSKGDRVRQITPQQLHWKTHVRAPSRGNMVLLPLPPGEKRPRA

SEQ ID NO: 59762 - protein, 151 aa, Zea mays
  Coding DNA Sequence Number=SeqID_16387
MAPMCSGIVVKIGSGCRDKAHVHTQRCNSSSQLRPHALTRDATRGGKKINPNCPGGCRDPSAPDPSKSSALSLAAETCFRGKATAAAWLGADYAISMRRDSWNRKLATESDDSDGDDAHAKARRARKRSSAVGTVAMEVGSSANDSRFPWR

SEQ ID NO: 59763 - protein, 146 aa, Zea mays
  Coding DNA Sequence Number=SeqID_16388
  Pfam annotation: Domain name=VQ; Domain location=12-42; Score=24.8; E_ value=0.00032; Accession=PF05678.5; Description=VQ motif
MPPTRPKIKIIHIITPEIMKTDVAHFRAFMQRLTGKPACCSDVTSTPPPPVGERRRQRRPRRGEADTGSGDRRREERFHGARIGGDKERKIKCEVKVEDRKELGFDGYEYELGRSDLWMDMDLSPGGGFLSFLPAFGSSRMDLVGE

SEQ ID NO: 59764 - protein, 87 aa, Zea mays
  Coding DNA Sequence Number=SeqID_16389
MNKNTGIQGAITNGTPVPPPQEALAHAPNSRGKDGQKAVELEVGPRVAPASSSAAEPLPAAVAEGGTGSSSEAARLREPGTLQLPMP

SEQ ID NO: 59765 - protein, 114 aa, Zea mays
  Coding DNA Sequence Number=SeqID_16390
  Homolog annotation: Hit_ID=Q6QP51; Match level="QueryCoverage=44%, HitCoverage=23%, E-value=8e-13, Identity=70%"; Hit description =Putative growth-regulating factor 1
  Subcellular localization annotation: CTP_CleavageSite=16; ConfidenceScore=5.20e-01
MKTTRPCSVPQTARARATATRRTTRPVALTPRRDRRRLWQEKQATLRLRHNDRVKKKAPSLPTDQRFEGWPLGRVQQLPQSTWAPHPLLVRGSKAGPSEGFNDRLRLLGLRAHY

SEQ ID NO: 59766 - protein, 79 aa, Zea mays
  Coding DNA Sequence Number=SeqID_16391
MDGGKKSFEVPSAREKVKETRNPKPGESTILSSAGGETEKLGEEQERFSRKSSQKLKSNGERTEEKSLSVLLAGAQDSE

SEQ ID NO: 59767 - protein, 64 aa, Zea mays
  Coding DNA Sequence Number=SeqID_16392
MAAPRTTRPPVALTPRRYKRRLWQGKRATLRLRHNDRVKKRDRERGIPRKGPFSVKETGSEPPY

SEQ ID NO: 59768 - protein, 175 aa, Zea mays
  Coding DNA Sequence Number=SeqID_16393
  Homolog annotation: Hit_ID=A3BDL2; Match level="QueryCoverage=82%, HitCoverage=48%, E-value=3e-27, Identity=54%"; Hit description =Putative uncharacterized protein
  Pfam annotation: Domain name=VQ; Domain location=23-53; Score=43.6; E_ value=7e-10; Accession=PF05678.5; Description=VQ motif
MRTARPRTPTMLPPTRPKIKIIHIIAPEIIKTDVAHFRDLVQRLTGKAAFCAATDVVTSTPPVGEDDETETSKKRPRPALAPVANDEKSGFTVQVQEETATKKRKIKCEVKVEEGGFGGYELGRSNLWMDLSTGGGFLSFLEEDEGVFQGLAADIDFLQPFGSSRMDFVGEMYAS

SEQ ID NO: 59769 - protein, 22 aa, Zea mays
  Coding DNA Sequence Number=SeqID_16394
MALSRKRFMLSNLPALKIILCF

SEQ ID NO: 59770 - protein, 95 aa, Zea mays
  Coding DNA Sequence Number=SeqID_16395
RHRGDALVVAWRTCGGAWGSRPMGTGIRRRRVAALVAGCDYAMVPRGRGLAAGGDWGLITGGVPLVASWLRLYAACGVPLAGGGLAAGGLRLPWW

SEQ ID NO: 59771 - protein, 143 aa, Zea mays
  Coding DNA Sequence Number=SeqID_16396
MGKSKKGGSSSHHSGDKRKREPTPPSEDFDDSEYSEEEFSSESEGSPVWTYIRAVERAGLEGSDGSEYSSDEENSSDSSEEGDDDGGDGDDDGGNGDGSGDGGEGDGDGKGGSGDGGDGSKGGSGDGGDGSKGSSRGSNKASG

SEQ ID NO: 59772 - protein, 256 aa, Zea mays
  Coding DNA Sequence Number=SeqID_16397
MEDWCKRLEHLGHGICKEPAFSVRAYLINLRSYSGILEPEATNQRREGEQPEAANGGQDSTHARASEMRAKWSRPYAVLKYSSTSGCHRSLGLYVYRAVSAAAGGAAEVGEWESISGEGRRLRAKGGRGGDVGLGREEARNGEHEAGESRTEAAARAEWSKQTMGYVFYSANTFPLLRVGLSPIHSIWKSLLQHLIVFPGANLCIKNSEYLRTRVKTVHDVKSMVETKADVAPKLCARELRLNGRKRNRLKGENAI

SEQ ID NO: 59773 - protein, 76 aa, Zea mays
  Coding DNA Sequence Number=SeqID_16398
MGKRVTRWVTHTHMGMGMGVNPYPPVYMGDPVGLFLCRGLKCLPTPYYGVPKNDGCTQPFSSDLMINLSPWFLKGN

SEQ ID NO: 59774 - protein, 121 aa, Zea mays
  Coding DNA Sequence Number=SeqID_16399
  Subcellular localization annotation: CTP_CleavageSite=60; ConfidenceScore=5.15e-01
MQISKALSNKNVYIYSRRATDRSGVPPDPNVRPQSARSALGLPSTGHQTAMCQSHVEVVVAAKVIVGDRGPTNHQTVNSKVQLFLAKNPECEEFSYSGSSAHEPGPVLQVAEFYLKRSLEK

SEQ ID NO: 59775 - protein, 326 aa, Zea mays
  Coding DNA Sequence Number=SeqID_16400
  Homolog annotation: Hit_ID=A2YGC2; Match level="QueryCoverage=44%, HitCoverage=65%, E-value=8e-10, Identity=30%"; Hit description =Putative uncharacterized protein
MARLRHTARKSVIPFLLSRLAERPLRRTVSGQSSHLERLHHRLREEQERQRQHREQQGSSSPPEQEVESVRRRSSVPQLEAPPAPPWDTPAVGGATGGARSPLSRRRRKGWVARPITRDAARGCHFHDALDTLLRQAFDRHTWSIEYRCVVYQHSRGRYPDRWEATCLVRRPEDDLRGAEAVSEHYSISERDTAEAAMQDAALRALSQYCSLFGGVADGLNLRYYPRRPTGSTESVVVSPVGEGNPRLSSTVNLVAVLNTELDHSLDELSRARTEIAELRAELAERRHQEGGSPAPVGTQLPYRSPPRGHHTYGSPACKTRIDLDP

SEQ ID NO: 59776 - protein, 61 aa, Zea mays
  Coding DNA Sequence Number=SeqID_16401
MTRYGEGEALGLYSIGHEGRQSPTPRIPPDVDVIVDITPQPITLNQESKLDMYHKNKHSSV

SEQ ID NO: 59777 - protein, 205 aa, Zea mays
  Coding DNA Sequence Number=SeqID_16402
  Gene Ontology: Mol. function=RNA binding
  Homolog annotation: Hit_ID=Q7F1D1; Match level="QueryCoverage=41%, HitCoverage=14%, E-value=9e-38, Identity=87%"; Hit description =Putative nucleolar protein
MKNGPGRNNCSGGRVEKSKGFCPNSFDRVLLDAPCSALGLRPRLFAGEETLESLKKHSKYQRKMFDQAVKLVRPGGVIVYSTCYSNLPMANHPVLQPVDPVLSQGIDVLHPTDPTIVDWERVTLAACNAALARMEAADQEAAAAQRERDTADARVRAALARAAQERTTTISHLPDADDATSFRYLRWWHPSSRCLDSSHCSSAPT

SEQ ID NO: 59778 - protein, 186 aa, Zea mays
  Coding DNA Sequence Number=SeqID_16403
  Gene Ontology: Mol. function=phosphoprotein phosphatase activity; Cellular component=nucleus
  Homolog annotation: Hit_ID=Q60EX6; Match level="QueryCoverage=26%, HitCoverage=5%, E-value=1e-17, Identity=84%"; Hit description =Serine/threonine protein phosphatase BSL1 homolog
MEEEVESSSALALLLVLVALVVVPSMALLVRGRWRQAAPWREERPLAVTERARGVTNSVHSYDVETRRWTRLHPAGEPPSPRVAHATAAVGTMVVFQDNLVENYSRVNKIFNVDSQPIKRSFGRDGSMGLIGLENLENTCFMNNSIHKGEMILADDTCRILEILADEYQSNHLARNDYVIVDTCHV

SEQ ID NO: 59779 - protein, 121 aa, Zea mays
  Coding DNA Sequence Number=SeqID_16404
MNTLDQPSASAPAHVSRYAISLSSQQERHSKQADRSSYISNKHSKANNREYGFMLVRYEQRYAVCLTRLWYLSYSTGNTQRSGSYVPLKKGGNSILNDKKNTKIQQCRSIGRCDSSVEVEL

SEQ ID NO: 59780 - protein, 1606 aa, Zea mays
  Coding DNA Sequence Number=SeqID_16405
  Gene Ontology: Mol. function=binding; Cellular component =mitochondrion; Biological process=embryonic development ending in seed dormancy
  Homolog annotation: Hit_ID=A2XCY9; Match level="QueryCoverage=76%, HitCoverage=91%, E-value=0.0, Identity=63%"; Hit description =Putative uncharacterized protein
  Pfam annotation: Domain name=PPR; Domain location=1016-1050; Score =5.4; E_value=1.8; Accession=PF01535.11; Description=PPR repeat
  Pfam annotation: Domain name=PPR; Domain location=1086-1120; Score =16.2; E_value=0.093; Accession=PF01535.11; Description=PPR repeat
  Pfam annotation: Domain name=PPR; Domain location=1222-1256; Score =7.5; E_value=1; Accession=PF01535.11; Description=PPR repeat
  Pfam annotation: Domain name=PPR; Domain location=1292-1326; Score =10.7; E_value=0.42; Accession=PF01535.11; Description=PPR repeat
  Pfam annotation: Domain name=PPR; Domain location=1327-1361; Score =10.2; E_value=0.47; Accession=PF01535.11; Description=PPR repeat
  Pfam annotation: Domain name=PPR; Domain location=1362-1396; Score =11.9; E_value=0.31; Accession=PF01535.11; Description=PPR repeat
  Pfam annotation: Domain name=PPR; Domain location=1432-1466; Score =13.1; E_value=0.22; Accession=PF01535.11; Description=PPR repeat
  Pfam annotation: Domain name=PPR; Domain location=1467-1501; Score =15.5; E_value=0.11; Accession=PF01535.11; Description=PPR repeat
  Pfam annotation: Domain name=PPR; Domain location=1502-1536; Score =16.9; E_value=0.078; Accession=PF01535.11; Description=PPR repeat
  Pfam annotation: Domain name=PPR; Domain location=1537-1571; Score =18.4; E_value=0.026; Accession=PF01535.11; Description=PPR repeat
  Pfam annotation: Domain name=PPR; Domain location=566-600; Score =10.4; E_value=0.45; Accession=PF01535.11; Description=PPR repeat
  Pfam annotation: Domain name=PPR; Domain location=601-635; Score=2.9; E_value=3.5; Accession=PF01535.11; Description=PPR repeat
  Pfam annotation: Domain name=PPR; Domain location=638-672; Score =13.7; E_value=0.18; Accession=PF01535.11; Description=PPR repeat
  Pfam annotation: Domain name=PPR; Domain location=705-739; Score=3.6; E_value=2.9; Accession=PF01535.11; Description=PPR repeat
  Pfam annotation: Domain name=PPR; Domain location=740-774; Score=5.5; E_value=1.7; Accession=PF01535.11; Description=PPR repeat
  Pfam annotation: Domain name=PPR; Domain location=775-809; Score =27.9; E_value=3.7e-05; Accession=PF01535.11; Description=PPR repeat
  Pfam annotation: Domain name=PPR; Domain location=810-844; Score =21.1; E_value=0.0042; Accession=PF01535.11; Description=PPR repeat
  Pfam annotation: Domain name=PPR; Domain location=981-1015; Score =1.0; E_value=5.9; Accession=PF01535.11; Description=PPR repeat
  Pfam module annotation: Pfam domain module=PPR::PPR::PPR::PPR::PPR::PP R::PPR::PPR::PPR::PPR::PPR::PPR::PPR::PPR::PPR::PPR::PPR::PPR; Domain location=1016-1050::1086-1120::1222-1256::1292-1326::1327-1361::1362 -1396::...
  Pfam module annotation: Domain location=1432-1466::1467-1501::1502 -1536::1537-1571::566-600::601-635::638-672::705-739::740-774::775 -809::810-844::981-1015
MAPPVDVAGLCPRRGDVGAPPKPRLSLSSVAEAESEPWGRARRRSFGRGQGGVRALGSGEAEFRRLPGLSPSPSPGVGRSGVRRLPGLSPSPSPRVGRGGGRLAEARAESEPWGRARRSFVVFRVLARVRALGSGGAEFAVFRVLARVRALGSGGAEFAVFRVLARVRALGPSPSPGVGRGGGRLAEARAESEPWGRARRSFVVFRVLARVRALGSGGAEFAVFRVLARVRALGSGGAEFAVFRVLARVRALGSGGAEFAVFRVLARVRALGSGGAEFAVFRVLARVRALGSGGAEFAVFRVLARVRALGSGGAEFAVAPLARPDCLSDSPFALNAPATRLLNKVTKDGIETTRGSELPQSPVSPGVRRASKIVDQGFTNNAPELSTNKGSLLRCSSIRFGEKRNSIFACAPDNLEQKSGQTFEADAHSALKLCSGIGSVVIAKCSHIFERNGDTFDGNCSLQDILKPGLWLSPETLRRFWRVSELKPKDFLDILNGFGLSAVKVRNARFLWNLYRWTSRQSKEFQHLPRSNETMVSILADAHMLSQAESLLLSLIDHMTPAVSSELFSQIIQVYSEAGNLGKSVALYDYARGKHLIPSASCYQVLLHFLTRNRKDELILRVYLDMLEVGFGSCTEGNILDSVVMALIRKGKLLEALGILRQLKSLGLKLSKGALSNIVEEFNKKKDIGDLMNFLEDWRCIPELRLCNRILASLCTNLGTCQAWLVFQSLEALGFAPDATTFGIFIFHSCREMKLKSALVYLSECFARHVKPGVCAYNAILGGVFREGLYRHAKYIFEDMIEREVTPNLSTYKIILAGYCRYRRFDDIEQVLRHMKTNGVNVLLSGNCVLSKALSFLGLDHLGVKIKRDNVTGFPKAEFFDSVGNGLYLDTDSKMFEVSLSQVLDSALLPDINSELIRASQQGDVASALLVKDKAFQWGYDISPDSCSELFKALCVSPAYVIDVIDLMEEMPDILYKLDAQNLDLVAQTLSRNGMSAHAKLVLEKMLREDLSISHNTYTYLMIGLCEERNIAGFWECWNLATKCRWSPDSKDMMGLISYLCKWGVIEEALKLMNSLFDCYHDLFFSAYCALLKELCRTGHTSIGCAMLEALKEKGVAVDRSLFFYVMEGFLKEQRTAESIGMHDMWLSKSKELDVFTYRSVLPSLPWLDTDRAKNLVESMLTVKLTEFSYRGCIVNELMQTRNIKWAIPVLQESAPGKLSATLLNSLLQAYGWLKNWRKLDAVLCKMLKMHATLSISSYRFLVCRMCEQSRFSSASSLRALFQHTDKSRELIACNILIFYLFQRRNSSQIHDLLKDIEGNGISLDKTTYDFLVYGFHKSGDINDSVNALDACIAQGIKPSNRSLRIVLSHYCRLGNHEKSLALFHLIERNGWKHGLIIKTTLASCLLSFGRQLEAKSCLNNLSKGEFIGCSSNFDDLIKEFCILGDLKMTLYLLNTMLKKGTLPNEASYSSVIYKLCTLKEFDQALDFLAEMQLASLKSSEISCDALVHGLCAMGRPSDARKVLEMLTTLGSAPSYGMFRVVFDNYCRSSNLQKAAALLHDMQQAGQVPNFEMHWSVISNLSSTNEKTEGHGECILPNLFLSANSP

SEQ ID NO: 59781 - protein, 555 aa, Zea mays
  Coding DNA Sequence Number=SeqID_16406
  Gene Ontology: Mol. function=protein binding; Cellular component =actin cytoskeleton; Biological process=red or far red light signaling pathway
  Homolog annotation: Hit_ID=Q10R89; Match level="QueryCoverage=68%, HitCoverage=87%, E-value=1e-179, Identity=77%"; Hit description =Kelch motif family protein, expressed
  Pfam annotation: Domain name=F-box; Domain location=188-235; Score =27.9; E_value=3.7e-05; Accession=PF00646.24; Description=F-box domain
  Pfam annotation: Domain name=Kelch_1; Domain location=279-325; Score =22.1; E_value=0.0021; Accession=PF01344.16; Description=Kelch motif
  Pfam annotation: Domain name=Kelch_1; Domain location=327-374; Score =55.9; E_value=1.4e-13; Accession=PF01344.16; Description=Kelch motif
  Pfam module annotation: Pfam domain module=F-box::Kelch_1::Kelch_1; Domain location=188-235::279-325::327-374
MPRAPWQVVRSWSVYGSTLSVGQIIVGNVERGPKDEGHPGPTGPHLSGRCVRGKPSWRLKRKAKFEGVPRPLFSIRNACGRRRRPAAACGGEKRDVGREKESWGGKEKENQVAEGIVRLRGKLQWLSRWRLREVESVSCHCRVDGGLKTVVSARKFVPGAKLCMQPDIIPNKRKSRSSRKERSKTQSPLLPGLPDELAISCLMRAARIEHPNMRLVCKRWNRLLSGNYYYSLRKKFGMAEEWIYVFKRDRDQKLSWYAFDPVNQLWKSLPPVPPEYSEAVGFGSAVLNGCYLYLFGGKDPVHGSMRRVVFYNARINKWLRAPDMLQKRHFFGSCVINNCLYVAGGECVGIQRILRSAEVYDPNRNRWSSIAEMSTGMVPSIGVVHDGKWYLKGLNSHRQVVSEVYLPASKMWSATGNEMVTGWRNPSISLNGHLYSADCRDGCKLRVYNREMGSWTRFIDTRHHMGSSRSLEAAAFVSLNGKLCIIRNNMSITIVDILDPTTATEVDSAPSLSLSMYEVEYTYTTSEPDLEAEMEWQADSSGICTTDTVDVGRRT

SEQ ID NO: 59782 - protein, 195 aa, Zea mays
  Coding DNA Sequence Number=SeqID_16407
  Homolog annotation: Hit_ID=A2Y4A7; Match level="QueryCoverage=62%, HitCoverage=50%, E-value=1e-23, Identity=52%"; Hit description =Putative uncharacterized protein
  Pfam annotation: Domain name=VQ; Domain location=38-68; Score=47.5; E_ value=4.6e-11; Accession=PF05678.5; Description=VQ motif
MDRELSPRGNAPGRGSGGASSSKHKNGGGGKKPIKVLYIANPMRVQTSAEGFRALVQELTGQHADPSKYSPGDLDSGAAAQGLSPRARVADVSSETIVASHSPGSKAAPHGGDYYDVEEDEDDVFRSPHMLLENNYTVFSPPTLLYDHHPHSKLFSMESIKLTKDNCMKKRQRHQIIANGEQEQQPLVHTKIIIL

SEQ ID NO: 59783 - protein, 149 aa, Zea mays
  Coding DNA Sequence Number=SeqID_16408
MKCKCSTCEDDGWKCRSGKESASQRDDISSREGRSNGESGREGHDSDRSNEGDEGEGGEAGPAGQGPAPDLVGRVDASDRRSSKAGTGRHNPVTGALASEHRRRLCWGGVHPSSKAQPTTQQEASWLRVREQQQGRPPGKLLAAAAEAG

SEQ ID NO: 59784 - protein, 96 aa, Zea mays
  Coding DNA Sequence Number=SeqID_16409
MPHFSKHGGLPHEKAAPHLKHPIREEIVEFQPKKGGFDISYPLPVLKGLFHCRRGKSSFGARSLMEHPFSHLSVQKKATSESEAGFAAEHDNFWSK

SEQ ID NO: 59785 - protein, 113 aa, Zea mays
  Coding DNA Sequence Number=SeqID_16410
  Gene Ontology: Mol. function=aspartic-type endopeptidase activity; Cellular component=chromatin; Biological process=chromatin assembly or disassembly
MPHPDVCLMCDQAQETIQHLLTACIFARQFWHKVLAVFGLGHLTPAADEESFADWWGKRNRAVFHGESPSLPRIFRCFSDECVSWAITGAKELESLGLVAALGEVGSSYGTSL

SEQ ID NO: 59786 - protein, 154 aa, Zea mays
  Coding DNA Sequence Number=SeqID_16411
MSPIWVFKYGSLILNPGIADNALVIDFIGDYHHVALLCTQFLLGYKTKMLESVTLRLRTPRILCLATALSPLLLRRVVASLLLHQSLKCCCSGAMGGALWQLAAGGTWRMQNGPGGGDSGGPTTASGTVLLRWLRMQGPGVHNSAHLAGSASWV

SEQ ID NO: 59787 - protein, 58 aa, Zea mays
  Coding DNA Sequence Number=SeqID_16412
VVPSMGLSVCGSLCQAWVRPLGEECGGNEIDGSGYDYGTGKDEAAEGDFQEFQDYDEF

SEQ ID NO: 59788 - protein, 241 aa, Zea mays
  Coding DNA Sequence Number=SeqID_16413
MSPQYIVQLFEKHRVPCCRVRMTLEPHPLQPGWRSLDSESFGYRAEDTIEAIALHGLTTFCGFHPLELSTHPIGLFPAEKEDDPMWKDRVEHAKDATKITLDNREELVVDLSTEMVEKDLQVEQMANQIQELEELVGAKENTIEVLEDQLINTQQQLEEANQHLDMHHQEIQDMEANEDVDIEGGVELEPASSLDIAGSGRPPSPESSVASWQEERVVDRMNAFLHHRHASYHARTDGSAE

SEQ ID NO: 59789 - protein, 272 aa, Zea mays
  Coding DNA Sequence Number=SeqID_16414
MARARAYKTLPDLDCTLPRTLKPHRSLARRRLPVRSESAAAQSLCHHRPASGAIPNSVQPSEKTVHTSVRLPEQGIGVCFTGEASPRSPELSTPPEYVDQVNHSTILRFLVHTVATLPREAHHALGLNQFAVVWPVHSPPTRTPACARGPGDSGHLRRQAVPQRDCQILPEPTPPFAEPPSPPTVILLTESTSSCRSKELLRSGLYPSCDLRRGLQFRLWWVQVRSLHDGQSGSVRHCSLEEMVAGITWPSTLPPGWTVEWDPASAEEEHEE

SEQ ID NO: 59790 - protein, 45 aa, Zea mays
  Coding DNA Sequence Number=SeqID_16415
MGSWRELVGGFICEWGVLGCRVVVMEQVTRGSRGSALILTVGPFD

SEQ ID NO: 59791 - protein, 192 aa, Zea mays
  Coding DNA Sequence Number=SeqID_16416
  Subcellular localization annotation: CTP_CleavageSite=84; ConfidenceScore=5.10e-01
MDKVQINTKNQRKFNWKRLARSSQETAQSGCTGLSGAPGWHPSTTCSRDFVGGVRLKFTRLPGGAPDCPVSQQSVGPTVGRGIRARRVASANGRKGHRTVSGAPTAPKRQWSASPKKERNPHRTVSGGAPDCPVRQATEGKNCLPGMHSTAPNCLGAIKGTPRRMEEYTKYSLSIPKHQDFDSAHLILCDSN

SEQ ID NO: 59792 - protein, 770 aa, Zea mays
  Coding DNA Sequence Number=SeqID_16417
  Homolog annotation: Hit_ID=A2WQE8; Match level="QueryCoverage=41%, HitCoverage=85%, E-value=1e-74, Identity=46%"; Hit description =Putative uncharacterized protein
  Pfam annotation: Domain name=Transposase_24; Domain location=371-506; Score=-18.5; E_value=0.023; Accession=PF03004.5; Description=Plant transposase (PttaEnSpm family)
MTTQGGLQPTSNEANMCTNDNGSQLGTRIVDEIMAGKNVFFDLPDKLTGEIWTLKFHCIGAQPGKEIVIVNIDKAYVAFYNVVYIKSKLGYSGRDFLFYKKRCGIDRSRLLALDYIHQEEAMLSDNMDERKISFVLTKDPPSDLEVSITPIKRPRQRTNVDEETIEVSIDAYKEWLAILQHDNPETVLYERQSNDDLILSDEEIHGSSKPTANWPSHARRHRKRDRDVIGIYVDNDGVFKKEGRGTLKGIAAATKRIKNGDHKLKIEFSSKLGGPVGPNARTFVDEIVLFTKKKAPLIGVKKWKDIELNVRSSIASDVLRRWEFLTNEDAHEKIWSIAKERYKGWRSTLSSTYKAYNSYAERMKNKPEDVDIVEWHYMVLYFGSEKFQKISSRNSENRQKQRTKHIMGSRTFSQISFQQRDPETGIEPTDLSLLMTTHCKNDEWSEEASRGIYENAAEKIAEKIYQTEKYHLTREEENAIFQTTFKETTGCKANRLHGHGYLSRYPTRSQVMESKFLEQARATVATNQKNIELESQVQLLNEKLACEVAERERILQEKMQALQEEEEKKRQVLREEMRQEMVAALAVVAQQSNRESTTPIDPSSIVPTKPPEFIPADSPAPAPSSANNVRTPDTNNKKDNMPANYISSYTLRNAVTRRTIRKCKREASRQRQLFYRNWCLSQRFMVYRNDFCPLQEVNNQKQELLESEFGSLARKNPKVKRAQLAPPLGWVTRCEVLTGRKITVTGVCMTGILVWQVLGVLDSMMDVIDE

SEQ ID NO: 59793 - protein, 142 aa, Zea mays
  Coding DNA Sequence Number=SeqID_16418
GFPSILWEVLNFAGYPTPPLYMVQLTNDTTKAASMKTLTNFCGYHPLEMVMHLLGLFPAEKRDDPMWCNRVSHVKDTTKLTLDSREDFVVDLSSELVEKDLQVEQLRQRIATLEQQLAIRDNSIDVLENQLHDVVASQKFKS

SEQ ID NO: 59794 - protein, 153 aa, Zea mays
  Coding DNA Sequence Number=SeqID_16419
  Homolog annotation: Hit_ID=Q5QLQ8; Match level="QueryCoverage=79%, HitCoverage=42%, E-value=2e-49, Identity=78%"; Hit description =Cytochrome B561-like
MPLLSLHFGHRDKLELKAMKDGSANYATLEKKAKLYEKLSRGELPDEEDKEKYCVDFFQKGFDRVYEPQIPECSHRATDGAEPVNDHEDSMPNAKPLDLGRAGTTIDRDEHKRFVREVHEEVTEARQKASTNMEVAVERSLWSLSSGRDRWIG

SEQ ID NO: 59795 - protein, 99 aa, Zea mays
  Coding DNA Sequence Number=SeqID_16420
  Gene Ontology: Mol. function=alpha,alpha-trehalose-phosphate synthase (UDP-forming) activity; Biological process=trehalose biosynthetic process
  Homolog annotation: Hit_ID=Q0WUI9; Match level="QueryCoverage=67%, HitCoverage=7%, E-value=6e-16, Identity=56%"; Hit description =Probable alpha,alpha-trehalose-phosphate synthase [UDP-forming] 8
MPPKELTGFYYDLEKNRYIPIRGPIPGALWHPRESTALGDDSPKRSVIVLSKFVSCSPSLSSAIRVNPWSVESVEEAMNAALRMPEAEQWLWHEKHYRF

SEQ ID NO: 59796 - protein, 183 aa, Zea mays
  Coding DNA Sequence Number=SeqID_16421
  Gene Ontology: Mol. function=catalytic activity; Biological process =trehalose biosynthetic process
  Homolog annotation: Hit_ID=A2YVQ0; Match level="QueryCoverage=89%, HitCoverage=20%, E-value=1e-38, Identity=51%"; Hit description =Putative uncharacterized protein
  Subcellular localization annotation: CTP_CleavageSite=46; ConfidenceScore=5.61e-01
MSVASPASPTSPPAPAPPSRVIVSHRVPLRALPDPTAPFGFAFSVDAGTVAYQLRSGLPANAPVLHIGTLPAAAAEVASDELSDYLLAIFSCFPVYLPTDLHHRFYHGFCKHYFWPLLHYLLSLTPSSLGGLPFQRTLYHSFLSANRAFADRLTEVLRPDEDLVWIHDYHLLALLTCLCKRFP

SEQ ID NO: 59797 - protein, 150 aa, Zea mays
  Coding DNA Sequence Number=SeqID_16422
  Subcellular localization annotation: CTP_CleavageSite=73; ConfidenceScore=5.12e-01
MATSLSLLRLLPKDSTNPLLLHRSSISASLAACMPPARCIAQPHCRCSLSVNAAPLFSPLAQRPRRLHALPVPCFIKRSEQHAVDTRRLFAVFAQPRRRRRSPRRKPRVCVEKASRSTLVDVRSDAQIGITVVLANADLGLFMICSIEKL

SEQ ID NO: 59798 - protein, 113 aa, Zea mays
  Coding DNA Sequence Number=SeqID_16423
MGAGLAAGASSAMGEGDAEGRWLPAGRGAGDTPRRRTGSALGWRFCLPAGSARLLSIPVGRATAGERGRPSRLLPPAHAGACSRKGRRRHGQGSSLRAGCCAWEEFFLAAENF

SEQ ID NO: 59799 - protein, 179 aa, Zea mays
  Coding DNA Sequence Number=SeqID_16424
MDGGGRHGEEGGAPCSAEQRREGSGVWEKGEGGLPFIEPSSGHVRLHQQVADGDKDDGSGYDYGNTGDRVCEELFSCAPTRSTLFTTTERPSRWSSCWRRPRRQRWRQQLEPQHRPFRVAGAGRMGCPTHHVTPQASHGSSPNSELIDREKQPILEHVKTFNSQNSCRFEDHSRIINLV

SEQ ID NO: 59800 - protein, 40 aa, Zea mays
  Coding DNA Sequence Number=SeqID_16425
MAPFLLGSMVWPSSNLFSLFPEKTPCLRGEGKSLDARRCS

SEQ ID NO: 59801 - protein, 246 aa, Zea mays
  Coding DNA Sequence Number=SeqID_16426
MSHVDDRFDHMQSSFDGQFSDLHDRFTVVDSQLDEVHTQFTDFRSHIQSTMHDPIMSRMNNMQKSFQDNMSALSIQFESRSTSDSIHSLDERQQQLHNDFSQFTSIFDSFSSHFYNMYPRPPPVQMNLKIKISHSKLISNLSYTQNNSFELAQIFFSMVGEPSGPEGRTVRDSAREVSDRLAMVGGPSGLDFYDSSDRFQTVNIAVTGGTSGKRHRLVTLGGCHLLDGSGVVSTELFVKIVEEPRD

SEQ ID NO: 59802 - protein, 259 aa, Zea mays
  Coding DNA Sequence Number=SeqID_16427
  Subcellular localization annotation: CTP_CleavageSite=51; ConfidenceScore=5.14e-01
MIAGFGPRGELPLPSPLPLSLFPSPHLFFLPCGPLARGPGALPPRAPQRVPAAPSGAPSLQPPGASPRGPLGCFPSPPPGAAPPAPVAWPLGPRRRGLPAPCARLPSPDQAAQAHAESRAPTPALGEVHDGVARSRAPANTFGELPSSVHVNRGGGGQMSVFPRAVAGELGETRRGQRKKKALAQALGGFNRGGISGDHRTLLARKAEGKYGGGVTGVASSAWLLPTALSGHRRRESQQWWHESRRGAVVGDEAAALAV

SEQ ID NO: 59803 - protein, 255 aa, Zea mays
  Coding DNA Sequence Number=SeqID_16428
MKPSAWGRATGPRPSGQPAGDADESGWVLVLPWSEVDSPLGAPARRAGYALGDTPLGAPTWRAGRVLGTALGNRPALAGVWTPTGVAEAVVAIIAGGAALAVWRAGRKGAVAVERGLVRVAARSPMWGAFVVAAPGRTPPGAQEPVSAMEREGRRQYDNGQRWRGRGLGGSRAGSCRQRLEVGGKGAGGCREKGRRNLAFFSNAQESYASFILERRKVYLLVALNVPKWVIKPLTKLGEISCGMAEKRLEEETVL

SEQ ID NO: 59804 - protein, 179 aa, Zea mays
  Coding DNA Sequence Number=SeqID_16429
  Gene Ontology: Mol. function=serine-type peptidase activity; Cellular component=integral to membrane; Biological process=proteolysis
  Homolog annotation: Hit_ID=A2XQ98; Match level="QueryCoverage=58%, HitCoverage=62%, E-value=8e-28, Identity=56%"; Hit description =Putative uncharacterized protein
  Pfam annotation: Domain name=Peptidase_S24; Domain location=31-104; Score=27.8; E_value=3.9e-05; Accession=PF00717.14; Description =Peptidase family S24
MAPTRALPALWLSMAAAASYVVGEKYCRLCYLKGSSMVPTIQAQGDVGLLDRRCLAGYDFSHGDVVVFRLSTDHGMKMVQRLIALPGDWIQIPEKRDIRQVPSGHCWVEGDNAGNSWDSRHYGPVRAFSLTIILSRFSSICSVSFFNKNWFGIYVLTLQASGSSGPDGREDHTHNLATP

SEQ ID NO: 59805 - protein, 193 aa, Zea mays
  Coding DNA Sequence Number=SeqID_16430
  Gene Ontology: Mol. function=RNA-directed RNA polymerase activity
  Homolog annotation: Hit_ID=A2ZQA5; Match level="QueryCoverage=87%, HitCoverage=14%, E-value=2e-33, Identity=42%"; Hit description =Putative uncharacterized protein
MTGADACAAVGLPGGAPRRPNDRRSKKVDVDRHLRVKAYPHFMEKKGFESYHSSSILGRIYDETEEIIAQQCDEQIQITTLACFSEVESTPECTSLWEHRYQEYLTKSRGLFDLGKEEKNDEFQKLYQHYKHACAIYRIVYERAWCTRSVSRCRFVWNVAGAALCHLHATKYAAQRGEKTALCPLSVIRQLYI

SEQ ID NO: 59806 - protein, 150 aa, Zea mays
  Coding DNA Sequence Number=SeqID_16431
MPADEVKLDLHVLRALMMHEIGEVDLAEVVARDEGGAGDGVVELMKKLTEQGRPDHVIGHISILGLRVGATSSEHEVLQCPGEAPVDHHIAHWGVIIIGELRLGIDQRGARLAVGHVGPFQNVEVILALVEEEALGVPLRGNPEEVVERT

SEQ ID NO: 59807 - protein, 190 aa, Zea mays
  Coding DNA Sequence Number=SeqID_16432
MKPGQFVLRRGDNPDTGGQIAVEMGEALFLIVLLVKTRFIQIEGYGRQKTFLDLEMRMSFGDIMYNLISIRAKSPKDVNVKAENAPSSAGKKQGRSSKVVPKGMQSLQRKINADSAESKRRRSSKDVPKGMQSLQRKINADSAESKRRRSSKDVPKGMQSLQRKVNADSAEVKGEEAPKGGLQRKVSADM

SEQ ID NO: 59808 - protein, 84 aa, Zea mays
  Coding DNA Sequence Number=SeqID_16433
MAPPCPRQRGFLAPSARPLGPRCVRPLSPLRAAILTPVHAAPGGNEDDGSGYKYGNGCPHCNHCSGEDEVVEEDFQEFQEYDEC

SEQ ID NO: 59809 - protein, 252 aa, Zea mays
  Coding DNA Sequence Number=SeqID_16434
MEIPGHASDGVAVEITTPRGSLLPKVSAAASSWRRRRWGYRDPIYRDEESPGWCECASELRMEEVTAGLSNYRMAICEGQGIASQANQMPMQYGDRDRIQELVSIVPHGVRMLAESLENGRASELQNYGVGPFGHHLGPECAIMIPKPEPNVVVENLFRQIASPHITDNKLRNTASPQIGRSGSGRVEGWPQRSGGSGEGGGTLTAVGCVCGGRAWADASRGLGAGVCHGEGGEEAVEREMCPWAISKDFGD

SEQ ID NO: 59810 - protein, 91 aa, Zea mays
  Coding DNA Sequence Number=SeqID_16435
MRQRLKELAEKASTMIAMHRRMARKKMRLCWTKSKYLGDISRLLECQGWGERAAPHKQSRDGAGVSRHRCSKKAMKSANSRGRPCARGAQR

SEQ ID NO: 59811 - protein, 108 aa, Zea mays
  Coding DNA Sequence Number=SeqID_16436
  Homolog annotation: Hit_ID=A2Z9A3; Match level="QueryCoverage=74%, HitCoverage=24%, E-value=2e-33, Identity=87%"; Hit description =Putative uncharacterized protein
MLNKETTFELGNNLCEDGKKYDTENTCSSGSTLLKAVLSFAKARSMMEKERGNLLKALGTQVAEPLRAMVMGAPLEDAHHLAQRYDRMRQEAEAQQGAEERGVSVTQQ

SEQ ID NO: 59812 - protein, 191 aa, Zea mays
  Coding DNA Sequence Number=SeqID_16437
MGRGRRGHGWPRRADGKCALSPPSKDFGDSEYSEEASSESDHSPTPASPPASFEDSDDSMGLSTMARAYWRFIECAGLGGSDESGVSSDEADSSDSSEEWSGSDGDDEGDGSSSGDDDKGDSGSSDGSKGDGGDDSSDDGKGDGGDDSSDGGKGNGGDNSNDGGKGNESGDGDGGRGDGSSGKASGIMPLV

SEQ ID NO: 59813 - protein, 48 aa, Zea mays
  Coding DNA Sequence Number=SeqID_16438
MASEIGSFGFGMEDFSYDKTKGNKEWATKLEAKGLRLDMLTKLKYDDG

SEQ ID NO: 59814 - protein, 127 aa, Zea mays
  Coding DNA Sequence Number=SeqID_16439
RIENDPVEEPEELAGEAPEQQSIGGGNETLPTHLGSVQGSVQPEAKRESRLMETFWFTGGNEIDGSGYDYGTGTARSSSGFEFACAEEVVDGLVGGMAMNFAKPGLPMIALYPQSKLATSNLRNSVL

SEQ ID NO: 59815 - protein, 285 aa, Zea mays
  Coding DNA Sequence Number=SeqID_16440
  Gene Ontology: Mol. function=DNA binding; Cellular component=nucleus; Biological process=regulation of transcription, DNA-dependent
  Homolog annotation: Hit_ID=O82799; Match level="QueryCoverage=41%, HitCoverage=37%, E-value=2e-27, Identity=55%"; Hit description =Putative RAV-like B3 domain DNA binding protein
  Pfam annotation: Domain name=B3; Domain location=67-175; Score=75.4; E_value=1.9e-19; Accession=PF02362.12; Description=B3 DNA binding domain
  Subcellular localization annotation: CTP_CleavageSite=57; ConfidenceScore=5.17e-01
MEVQMGKAPPCLNPFLMVNPLLPPQHVSPWSSKSVPVFQFGMTNGHGALDLCEESKRARKVVHLEYLFSKVLTPSDVGKLNRLLIPRQCAEGFFPMISEVKSGGDDIFLNFEDTSTGLVWRFRFCLWNNSKTYVLTKGWSVFIKEKNLKKGDILSFYRDASKSIRTNHLFIHIKPHTGTMPLPHHVPSPVFSPSGMVIDDQVHDSLNIGKSHGIAPSWKPLSFGSGELMPSTNPTPQQTTFPESTSLANSIVMAEKHLRLFGVDIDIPTHRYGDESSDGFIKNIA

SEQ ID NO: 59816 - protein, 204 aa, Zea mays
  Coding DNA Sequence Number=SeqID_16441
  Subcellular localization annotation: CTP_CleavageSite=45; ConfidenceScore=5.39e-01
MAYQLEVHAGLSDVHNVFHVSQLKKCLRVPGTVTNGRAQCSRLPFADTGPSPSDSSSNGTPSLVGECDHAAASVAMSRSSVRLYDGEERGWCSERRQLLAGSSSPARFRGVSWASTPAIPTVPAGGRGASPSIGEGASTIFGRTLDRLRGQISRQSTTFAADPPVPRPVVTAYFNTVEESVSEDPGEQQIEVAEQELIEGKLCP

SEQ ID NO: 59817 - protein, 21 aa, Zea mays
  Coding DNA Sequence Number=SeqID_16442
MAQVFNESSNILLEDIRRNTF

SEQ ID NO: 59818 - protein, 270 aa, Zea mays
  Coding DNA Sequence Number=SeqID_16443
MGHVGVSGLERAVEVAWAVESQGLVARVAASGRLLALGSVGFCWVKQGRGGSVREARGKESQGTAGTRRGSCVGLGSPGRLEARPGGAAGKDRGEGAGGRKGREREKKVSQRTTVNGFERVSRRRVGRGSVTSPWLLGSGRGARSAKSGRGLPGVVLLGGVVGFSARCAGRVWVRCGGAAPGLRVSVLATRHGDELLEALRLGRRARVHGTGARLEKCARRLGALLGGQGEVERARGLGARLLGRCRLVNGRARRVRVGAARVGLWQGRA

SEQ ID NO: 59819 - protein, 134 aa, Zea mays
  Coding DNA Sequence Number=SeqID_16444
MGKKRKREPTPPSEDFGDSEYSEEEFSSESEGSPAPIPLRESSDDSDDSQGLAAEVWTYIRAVERSGLAGSDESEYSSDEEDSSEEGGGGDGEGNDGDDDGDDGGDGGDDDGDGGDGGGRGGNGSSRGGSKASG

SEQ ID NO: 59820 - protein, 31 aa, Zea mays
  Coding DNA Sequence Number=SeqID_16445
MWVLHLLLIPMGVLLLLLIPMGRKTYPCIFS

SEQ ID NO: 59821 - protein, 230 aa, Zea mays
  Coding DNA Sequence Number=SeqID_16446
MLGLRRSGEARGMEGIRGCCSARLAAHFDEQPAGTTENSEEGGSLFGERELRRGAARGANHGGNGAPTGFHGRVGRRDQQGALACWEEDNREGRFPGRTGKSRGAMGGEELLRRHGHGPRRGRPKGLLRDQGGKQGRGKAMQGAVTAGRRWSSVCNRGGSARDLHFEQSMQRRSRGKNGIGRGAEVEGKLQGGGAMGRALLWRAAAFQGAEWREATLAQQEQPLPAAPTD

SEQ ID NO: 59822 - protein, 283 aa, Zea mays
  Coding DNA Sequence Number=SeqID_16447
MNALSREGCRHFEVFDQADEDFDRDVYKVEDLVVKDSVGALYDRMWGPHGHEVVRERAETAMAQALRGERVDDLGALNSALPDPEPTPAEAVSGVALEPTPETAAGEDLPPKVAEGAPDAPAAAVPSAEDPAAEAAETTAEAAAEPAAEAPAASGPSQVQDFGPAHATDTTEFLAASTAEGGNGYAEASPHAADARGVPGPSTGRRRRRAVAKRRVSTEEGARLRVSRAGRQELLSLPAAAGTGEGELRSLFAGLYDEVVCPRVPVPARALCTLSGMVGYAVL

SEQ ID NO: 59823 - protein, 385 aa, Zea mays
  Coding DNA Sequence Number=SeqID_16448
MGNTRSSSALSSLEEHNFAEVASPAASPRRWSPKTVTTSSWVGRSKLGYDLCPSLSFKDVHHQCWGGECSELGSVSARAAARSFPQRSGGRAFTVHGAGSCRVSGSPVRAASALLPVPPSAAAAGRGFSADEIVDAARGLTSNSMAFCSSSPLDVRPEFIAAAVQPLGVEVVVAAAGAGGGNPRQLFNEPKPEAAVLAWTEAELARKEDFVGRSLAGPSTGGIDAGVELPRPLAGLVSSGDSWLRLRGGRSSRLLGSDSWRRPWRRWPGRSADVVLRSGDPPTALPSEARSDFAEGGVDAEGAAAPLPSTSEPAGLVHLVDSAINIVEKAQKIVLAEEFSSMKTCSVRGITYPSVSDLSQKVMSEDPTFEVVEKHERRSGRKDLF

SEQ ID NO: 59824 - protein, 336 aa, Zea mays
  Coding DNA Sequence Number=SeqID_16449
  Homolog annotation: Hit_ID=Q6QP51; Match level="QueryCoverage=18%, HitCoverage=30%, E-value=4e-14, Identity=61%"; Hit description =Putative growth-regulating factor 1
MHKGSTKTWLPFKGVTLLLKATLPTCVLSHRGLSLLQHAPRPSPYDTGLGPTLHASWPRAEEAELPRAVRATAQRLRAFLHFRPDQRVKGRTAMQETCNRTKGAHPFDFDASSMEAQAHTSCNWRAGCYVQETAPPLAPLPCLLDCGTSTTTRGNPAHDPTVPTRNIGHGSVKRRRRRDGRYGQKWAGSNGGDKRTEAAVKSSAKLMDRERGYPERDPSPRRKRAPSPPTDQRFEGWPLGRVQQPPQSTRALRPQLIRGSKAGPSEGFNSRLRALGLRAHYWSEVRRLAPRKGSTAASGHSGSAPTTDQGFVGWPPKGSTAASYAERGMTMGTFDT

SEQ ID NO: 59825 - protein, 125 aa, Zea mays
  Coding DNA Sequence Number=SeqID_16450
MAEKGTGLKGKRLFSPHIVVRTVHADAYLFMHYACSFTFYQAEAFENKSPTLPPTSGELFRPPWCLMPKGGEIKDKATGSANHFVNFKILMLRFLGALSKPSYCKNNSLMGEKFEYGKKGEFFYF

SEQ ID NO: 59826 - protein, 80 aa, Zea mays
  Coding DNA Sequence Number=SeqID_16451
MGPSMTILLRHKEGVLCHMIVCCDGVVTKSPLSQKIVMTKNVFVTTSMTLVNVTNRVVNVTKCATTSCHVDDDVAQSYDE

SEQ ID NO: 59827 - protein, 121 aa, Zea mays
  Coding DNA Sequence Number=SeqID_16452
  Subcellular localization annotation: CTP_CleavageSite=50; ConfidenceScore=5.67e-01
MASSPPCFMGAAPSLMRCSRHGVPLRDSPSPNSEPPSSLFSVVPAGCSSKCAASRALQQPRIPSAPRASPDLRSPNIDAVHPGEGKPLNARRCANLCTNRNHRRSCKRRLGLFMICAIEKW

SEQ ID NO: 59828 - protein, 155 aa, Zea mays
  Coding DNA Sequence Number=SeqID_16453
MESLVVGPGVEGKESKTPTEAVVQVLASSKFLQNIGLVPATKKSGNGGDPTRVADLEAEHGSENRALQFMRLLTTVGYRLKNKKAKNRVNVININTNILIPYLPSLIAMGVYIEAFDEVLAGRGDFCACVGVRGAVSLLENVGYEHVKAVIYLEF

SEQ ID NO: 59829 - protein, 201 aa, Zea mays
  Coding DNA Sequence Number=SeqID_16454
MGKRAYQELGEVKNEQGEAAIKWVLSKVQCGLARANELDLKIPRLLHHYRKRALCRMSEALGKAVKTLDKGFTECRTQQRRLGKQCIGKPFFVEYFFSGTRQRGLPSAREHSAKKNGRYGDGVTETASLLSVCLVALGKEPVRQGSGDGDGFFAECLPSSTRQRARQAGFPCQVLCRVLCAALGKACFFAECQRHNTRQSH

SEQ ID NO: 59830 - protein, 647 aa, Zea mays
  Coding DNA Sequence Number=SeqID_16455
  Homolog annotation: Hit_ID=Q6JAD6; Match level="QueryCoverage=97%, HitCoverage=97%, E-value=1e-166, Identity=64%"; Hit description =Putative uncharacterized protein
MPRTKNASAPGGGDGEDPRRPFRQVKGKTVYLEQQEGRKKRRTDREARAAAAAAAAAAQAALGDQPQIPSDQIAFRARRLTSRSRSSSHTSASTPPPTLPAPVTPIAPSTSTAIPTTSSTPASTASPAPAPASAPPVPPPRFRSVMRLRSIPLVSDPRLFDLQRATAARVGVDSEAHLTYLPGLLTLLTISGRYVEEWVRVFYASVWIDPDHHWMRFRFEREDVTITANQIRQLFGFPESTTRLHSLCYGSSDPPRRPHGGVAPGTAHVAALFRPPFTDGSRRSPADFTTAAKYLYELIRRTLLPRMGYREATTHIQLWLLGALVSHSEFDVVDFLICEIEDTVLDGIRARRQLPYAHYLCHIFAQLIQPPRFQSILEASRLVFGSYRPAPEIPVPASASVFDSQAEDAALRQFDTQGTATGDDDDDDFGVPPPPPPPMPPRSHDHEAGSSRAAPAPPPAMDPALATILANLAAELARLSETMLSMFQSMQDMQDALQQQLLQDRAESRAFMALMLQHSGISAPPVQSAPPPPLHAPVVPSILSGPPVGTSPLRPVTLAFTSPVLSSVCLQPPVPPASAVTTTAVAVSVTASVPVAPAARPQSKSVPAPASTADPGSETDSDPPSAFALLPRPRPDAPPPPPPASGV

SEQ ID NO: 59831 - protein, 22 aa, Zea mays
  Coding DNA Sequence Number=SeqID_16456
MGHLDFDRGGKSRRSKGFQANS

SEQ ID NO: 59832 - protein, 142 aa, Zea mays
  Coding DNA Sequence Number=SeqID_16457
  Homolog annotation: Hit_ID=Q6QP51; Match level="QueryCoverage=39%, HitCoverage=25%, E-value=3e-23, Identity=94%"; Hit description =Putative growth-regulating factor 1
SRLRLPKGRDLASHEPSLGQELQSRMKLRLARGPPQAMGAPSACPRPSSGRLRQEAILAKSPLQPTMSQAHSMRGSPDTLSSHARLSRQGRSDRSHFALSLTDLTGKQRRSPCSDCCASHPGKADNSKFSLGRNRKLRLARP

SEQ ID NO: 59833 - protein, 151 aa, Zea mays
  Coding DNA Sequence Number=SeqID_16458
  Homolog annotation: Hit_ID=Q6QP51; Match level="QueryCoverage=32%, HitCoverage=22%, E-value=6e-19, Identity=89%"; Hit description =Putative growth-regulating factor 1
MQVAYNRTAVAHPFGFVRSGMEAQALTSCNRRAGYYVLETAPPLAPMTRLLDCRTGAVTQGSPAHDPTGPIEHNDHGYRERGYFERDPSPRRKRAPSPPTDQGFEGWPLGRVRQPPQSTQAPRPLLMRGSKAGPSEGFDSRPRALGFRAHY

SEQ ID NO: 59834 - protein, 309 aa, Zea mays
  Coding DNA Sequence Number=SeqID_16459
  Homolog annotation: Hit_ID=Q6QP51; Match level="QueryCoverage=20%, HitCoverage=28%, E-value=9e-14, Identity=66%"; Hit description =Putative growth-regulating factor 1
MHPGYNQVARGNNQAGQGITKGIKTSDESNHSSEASGATPGGSGQGFVYPRDAVLPRPSPASGGNCSPGRSYVSPEGLLRQWAHPRHAQGPARAGFVEKQPWPNRISNRPCRRRIQCEDRLTPYPDTRAPVGKVEENNAAHLAPTVVPATRARLTTASSASGATRSFASPDLRPQPREEVSALSDPKTRPQPRPREESRPRPTLASVSGEVSASPDLGLRPTAPQGIHHYPPLASSGYEGTRLASHLARPRLRHFSDGHVIAYAGLKHFSDSHVGMYTGLRHFPARHGHTATNLLVGPGTPWVRNADTG

SEQ ID NO: 59835 - protein, 539 aa, Zea mays
  Coding DNA Sequence Number=SeqID_16460
  Homolog annotation: Hit_ID=Q8H6I5; Match level="QueryCoverage=12%, HitCoverage=6%, E-value=3e-07, Identity=55%"; Hit description =Putative RIRE2 orf3
  Subcellular localization annotation: CTP_CleavageSite=29; ConfidenceScore=5.41e-01
MSSHSPHASCPSTFRALGWGAPVLPSSCCCWRSATSLGLAPFSHRLASRIFIMQPSCIPSPMVIQDDDHQFGGGEKQAGLRPLPRPQLQGSSSSVLGRRARQVGACLRVGRRPAYSSGVRGRGASSSCAEEASSSHAGEGELLLLGQGAAVTSLAEGANFDNAGSVSRERHQLQRAWHAGSAGSGAAFDVASCRLVRAWLSVHRTSDCRVARRSGITTPLRGGRCRPVRKDLSGDLPVQAGAAAIRRRGAGTQVAAVVSGEVVAAREGFSADKTVGATCGRTPGSLALMACPRPSCGGVGLSTAAFALRSSLLLFCHPKRRSLSLLVQWSPASHLEFVVPQALWCGGCSYPREWNRNPESLGSVGLGQHCDELEPEAATSAWTEAESDRKEASLAREHVASQAEEVQQQRLELGQVVRERDQSRSHAAEAGSQAEVLGGQPAEAMERLAGVSARAGTLAENLVVRAQAQCWRPPPRWRSFRPSHRPRLGQDLPRVETSPRVLLLPLLMSEPAGTICLKVLLSKQSKRHESRSGRKVFKR

SEQ ID NO: 59836 - protein, 182 aa, Zea mays
  Coding DNA Sequence Number=SeqID_16461
MARARAYKAPRDFDRTPPHALDLTGAQNHRRLPVHGVPAAALSTRHRRPANRTLPDPVQPSEKTMHTSVKLPKQGIGVCFAGEASPRSPDSTRPPVSVDRIAVVWPEHPPPTRAPACARGPDDSGHPRRRAVHRCDRQNLSEPTPPLAGPLSPPEVAPDPAPEPAPEDLPTTALEGKPRFYA

SEQ ID NO: 59837 - protein, 185 aa, Zea mays
  Coding DNA Sequence Number=SeqID_16462
MDHLRTELCHRNRVWAEDGQRINELAADVRRLQDELAERDLAVDWAVNSRLVAWDREAKARACLTELSAALDNLQEYCNTLHEEMPSRTRAQDGAGTSHGRKDTPNPPPVPTTLAEAIAALVNATADNTRFLREMAGNQFQQQGGRAPPQGPHETSYLDFSEMRPPLFVKAENPLEADEWIRVME

SEQ ID NO: 59838 - protein, 226 aa, Zea mays
  Coding DNA Sequence Number=SeqID_16463
MTLGTSDTWPRLGLHSRGTLGYFRDQQERFYNGISSEGGIEPSDPIKRYRVRQITCRSKLRPLKGHDLASLEPSLEQEQQTQENSAACTAPTAVPPARVRLTGAKSSLGRHRKLRLTRPQGSDSTSTLEDGLRLAPPQGSDSISTLEDGLRLARPQGSDSTSTSEDGLCLARPQGSDSTSTSDDGLRLARPQGSDSASTSEESPPFPTLGSDRPRRRGVHHYPTPS

SEQ ID NO: 59839 - protein, 539 aa, Zea mays
  Coding DNA Sequence Number=SeqID_16464
  Gene Ontology: Mol. function=transferase activity, transferring hexosyl groups; Cellular component=Golgi apparatus; Biological process=carbohydrate biosynthetic process
  Homolog annotation: Hit_ID=Q2RB54; Match level="QueryCoverage=48%, HitCoverage=40%, E-value=1e-114, Identity=80%"; Hit description =Glycosyl transferase family 8 protein, expressed
  Pfam annotation: Domain name=LRR_1; Domain location=107-129; Score =6.4; E_value=20; Accession=PF00560.24; Description=Leucine Rich Repeat
  Pfam annotation: Domain name=LRR_1; Domain location=131-153; Score =9.8; E_value=4.7; Accession=PF00560.24; Description=Leucine Rich Repeat
  Pfam annotation: Domain name=LRR_1; Domain location=155-178; Score =9.6; E_value=5.1; Accession=PF00560.24; Description=Leucine Rich Repeat
  Pfam annotation: Domain name=LRR_1; Domain location=510-532; Score =12.1; E_value=1.7; Accession=PF00560.24; Description=Leucine Rich Repeat
  Pfam module annotation: Pfam domain module=LRR_1::LRR_1::LRR_1::LRR _1; Domain location=107-129::131-153::155-178::510-532
MEQGRELARAGDARAPCAEKKDAASSRARRRPPSRAPRCRQLERPAPPLRALPPPPHAPRSASPRLHPACRPLASPTSPGLLRARRRQGGAAGVPLRRGSRRHRLSALAGLHLHHNAFSGALPAALAGLTTLQVLDLSLNAFDGVVPGALANLTRLVVLDLSNNSLSSRVRVSVLCYAVTVTLNNLPPLVSVLKLLFLEQAEVANQMRFSRHALAGMPIPRFSVLGDHAAKSKAKLKGAFSLLGLNNDTFKGKGPHTSKRLQLKDLSWRSKDTTINVKENHDQETVHEENTKSCEHEYGSYCLWSTEHREVMKDAIVKKLKDQLFMARAHYPSIAKLKQHEAFTSELKQNIQEHERMLSDTITDADLPPFFAKKLEKMEHTIVRAKSSEVGCSNVERKLRQLLDITENEAYFHTRQSAFLYHLGVQTMPKTHHCLNMRLTVEYFKSGSSHVDQLNDQKLESPALHHYVIFSRNVLAASTTINSTVMNSQLVVHGAPVLQMPAATRPEAGELLVLDLSFNAFEGAVPSALANLNRLILDD

SEQ ID NO: 59840 - protein, 182 aa, Zea mays
  Coding DNA Sequence Number=SeqID_16465
MAIIGAIREAVVTCGHEVSHGTGVTESGEIPTRVGLVIFLGTWGPGNDARLRLRCEVNARRIPRWGAGIVGSLDSRRGAASCLAMVAPPPPLSAGKVTGQTWMLLFRHTGKTSSIPPPAGGLKAAIVVVAWRRKEYHVVAAVEGHELETLETEHRPGLERLLETTHLELDGKLFVNTQQAPT

SEQ ID NO: 59841 - protein, 97 aa, Zea mays
  Coding DNA Sequence Number=SeqID_16466
  Gene Ontology: Mol. function=kinase activity; Cellular component =ornithine carbamoyltransferase complex; Biological process=amino acid metabolic process
  Homolog annotation: Hit_ID=Q6QP54; Match level="QueryCoverage=76%, HitCoverage=25%, E-value=4e-10, Identity=53%"; Hit description =Putative kinase
MARVRSTARVTREGEETEATETAPISKVGQGGDSSEVEAESEPWGRARRRPSSKVEVESEPWGRARRRPSSEFEVESEPWGRARRRPSSEVEIESEP

SEQ ID NO: 59842 - protein, 172 aa, Zea mays
  Coding DNA Sequence Number=SeqID_16467
MAPEAGLGCCQPHPGGWHSSRSSAGGAVFLSGQLVEGRNDCGHFCDTPVSPRVSLKNAKSRTIIYVNQKDPNIKVVPNSLEHVLKKFELKPNSFDTVLAQFDLGTRHSHTGTLVTLQLPVPSLKPRDVHTQKTKQGQVNKSFTAILPKFAKICTQPALEHGQRQRAHVFDRG

SEQ ID NO: 59843 - protein, 366 aa, Zea mays
  Coding DNA Sequence Number=SeqID_16468
MVTTSSMVGRSKPGCGLHPALSFKDLHHPCWGGGRAEPELYLPYGPAGHLLLQHSGERALTGLAEGADFDNAGPIGHKRHQLQHAWFASSAGSGIASGATSHHWAECGYLPAVWAAVVPRAPGDRPRLRALLGRRSCSWVVLRLLRHDASARRSVLTHPGGLEWGSAGGQVAAVVGVEVVAAEEVLVADEIAAAICAPGLRLFGFDSLSSPLEWGCGRGPCRSSVCPEVIAAVVWPPRAEVVVAAAGVGGVKETLSRSAMSRSRRQRCQRGQRRSRLEKKLCRPRSGRGADIFLRGGDPSPVLPSEVGSDSAEGGVDAEGAAAPRIDNRSSERELLSRKVMSEESLGLVGLAAYVYSVVFRIPLSK

SEQ ID NO: 59844 - protein, 158 aa, Zea mays
  Coding DNA Sequence Number=SeqID_16469
MGTYMAVDMTEGGLTVGASADVLKQRANHQSGHVEASRVVKELYVGPSHDSPQPRATTLGQQQRLTPPHGRVRCRHVSRESDILWGITSESGPPWEGVGPLYIRSEPPSLVQDLHVSKPDPWNGIRAAHSGVPGFQDRAYPSLNQNPGGGPVPTRVQT

SEQ ID NO: 59845 - protein, 261 aa, Zea mays
  Coding DNA Sequence Number=SeqID_16470
  Homolog annotation: Hit_ID=A2Y0U1; Match level="QueryCoverage=62%, HitCoverage=45%, E-value=1e-80, Identity=85%"; Hit description =Putative uncharacterized protein
  Pfam annotation: Domain name=DUF266; Domain location=2-196; Score =25.2; E_value=7.4e-16; Accession=PF03267.5; Description=Arabidopsis protein of unknown function, DUF266
MAKWVAQARIAGIVIPGCQGRQTPDWPDHDYVARSRHPFSPWAVLIKKHAEVVVDDEVVLPEFQKHCRRRPLPEFWRDWDRPIPAEAWKAHNCIPDEHYVQTLLAQSGLEEELTRRSVTHSAWDLSASKDRERRGWHPVTYKVSDATTRLIKSIKDIDNIYYETENRREWCTSNGKPAPCFLFARKFTRGAGLKLLDSEKLALMVLASLCVTSVPMTMTHVGKVGANETLGDWVLYDRDGSTQGENEHTNQFHALNFEPEI

SEQ ID NO: 59846 - protein, 138 aa, Zea mays
  Coding DNA Sequence Number=SeqID_16471
MGGVIHTEVVATEPRYGKKPTYGMYIDVRAKLGRGGSLPEAMVEFSLTCAIVNGVVVCGIRGGAGSRGLARARRRWCLRASSASGEAEMAPEGKPSVGVGMRIKCGCPPLAFECALSPLSKTGSGETDMVVLGQGVLR

SEQ ID NO: 59847 - protein, 78 aa, Zea mays
  Coding DNA Sequence Number=SeqID_16472
MPSSSSSADATPPAAASSEETLSSVMVEELRAGDSVDFGVSRMTSARVEDMQRLGYFGGGVARAPGTEEVPEPEEEDG

SEQ ID NO: 59848 - protein, 320 aa, Zea mays
  Coding DNA Sequence Number=SeqID_16473
MNALSREGCRHFEAFDQADEDFGRDIYEVEDPVVKESAGALYDRMWGLCGREVVREQAEAARAQAERGERVDDFGALNSALPDPEPTPAEAATGVALEPTMETAGDAPGAPGAPTSAAAGEDLPPKVAEGAPNAPAAVVPSVEDFAAVEAEAAAEAPAAAGPSQVQDFGPAHATATTEFLAASTAEGGNGYGGFVSEFSDFTDSGSSIEWTEESSEEDLDYFAALDVAAAEASPRAADAPDVPGPSTERRRRRAVAKRRVSAEEGARLRVSRAGRQELLSLPAAVGTGEGELRSLFAGEELRIMLFNYREMGIIPKVEPM

SEQ ID NO: 59849 - protein, 124 aa, Zea mays
  Coding DNA Sequence Number=SeqID_16474
  Subcellular localization annotation: CTP_CleavageSite=65; ConfidenceScore=5.16e-01
MSFGLLEEEIFMSSQISGIHNRVGMSASILIMTMMPTMWKGTTPAMRFSPRLNRFKLQATSRLPSSSRSWKKTQYNLEQVMHKEDVAIHSYIKHWRNMKVDISSMFEDMTVDVFYEDLKDRDLS

SEQ ID NO: 59850 - protein, 291 aa, Zea mays
  Coding DNA Sequence Number=SeqID_16475
  Pfam annotation: Domain name=B3; Domain location=188-290; Score=17.6; E_value=0.00076; Accession=PF02362.12; Description=B3 DNA binding domain
  Pfam annotation: Domain name=B3; Domain location=20-120; Score=62.2; E_value=1.7e-15; Accession=PF02362.12; Description=B3 DNA binding domain
  Pfam module annotation: Pfam domain module=B3::B3; Domain location =188-290::20-120
MASQGVVGGGGGGGGGGRHRFFKVLLPGSFEISLSLPPKFAAGLGVLCPAWRAAAKLRDRTGRSWDVELRRDAGHHRVSFTGGGWRGFVSANALSAGQLLVFEHRGCLDFAVDRFDASGCCCDDDQDGGGVVVAEHMATTTTTGTEATADKESGCSGQEAAAAVKRRRRSPLSTTTTVCGGDDNDETLCRRIERAYQLRFLDLSKDFCDRVGWSSSRQVVLCAAGDSGKRWQVSVKVSAKSGMMCAGWAEFAQDNGLTVSDACEFVPPPLHAHGSGSDVLQVHLVRGGGTS

SEQ ID NO: 59851 - protein, 325 aa, Zea mays
  Coding DNA Sequence Number=SeqID_16476
  Gene Ontology: Mol. function=acetylglucosaminyltransferase activity; Cellular component=membrane; Biological process=isopeptide cross -linking via N6-(L-isoglutamyl)-L-lysine
  Homolog annotation: Hit_ID=Q2QLJ7; Match level="QueryCoverage=94%, HitCoverage=72%, E-value=1e-153, Identity=84%"; Hit description=BGGP Beta-1-3-galactosyl-O-glycosyl-glycoprotein, putative, expressed
  Pfam annotation: Domain name=Branch; Domain location=1-185; Score =247.4; E_value=3.2e-71; Accession=PF02485.12; Description=Core-2I -Branching enzyme
NLAADLASHPAIAAAANVRVVDRANLVTYRGPTMVANTLHAAAAFLWGDGASHWDWFINLSASDYPLVTQDDLIHVFSKLPRDLNFIDHTSDIGWKEFQRAKPVIIDPGLYMKKKADVFWIPQRRSVPTAFKLFTGSAWMALSRPFVEYCIWGWDNLPRTVLMYYSNFISSPEGYFHTVVCNAEEFKNTTVNHDLHYISWDNPPKQHPHYLTAEDLDRMVASDAPFARKFHEDDPVLDRIDEEILGRGADVPTPGGWCAGTRENGSDPCSVVGDTGLVVPGRGAARLQRLVTSLLSEEKFHPRQCKLEIATFGMEGYACMGEIES

SEQ ID NO: 59852 - protein, 167 aa, Zea mays
  Coding DNA Sequence Number=SeqID_16477
  Homolog annotation: Hit_ID=A2XKV5; Match level="QueryCoverage=89%, HitCoverage=93%, E-value=2e-57, Identity=75%"; Hit description =Putative uncharacterized protein
  Pfam annotation: Domain name=4HBT; Domain location=44-121; Score =68.0; E_value=3.3e-17; Accession=PF03061.13; Description =Thioesterase superfamily
MDHRQPPPNKTAELDPVLHSIGFQIEEVSPSQVTGRLPVTPRCCQVLHGGVSALVAEGLASMGAHMASGFRRVAGVSLTINHFRSAKVGDVVLVRAAPLHVGRSTQVWDVKLWKEDQQGKKGSQISESRVTLLCNLPVPDILKHAGDALKKYADAPAAQKPTATSRL

SEQ ID NO: 59853 - protein, 202 aa, Zea mays
  Coding DNA Sequence Number=SeqID_16478
MGGRSAIIHRTVRNEQPPHQKACGITNSRRLACDHCTSSDNDLYLGRLDSSSDCLKANATVKRSSLTSPYEGREPAIKAKESEVRSAGGTNGLVGGGNCFGRGSLTYGDHDLSTDDNGHLPTNTAPANGDRPSAHRQVLTPVLATGTRTGPSQNMNTTLAAYDVLCDPPVQPAAPEGPGRGRPVQGATDTHAADGHPRSAQR

SEQ ID NO: 59854 - protein, 53 aa, Zea mays
  Coding DNA Sequence Number=SeqID_16479
MASLIEGKQSEIKNPSMLDSAPSFVRFSYSPSRCREALWTDRHRIRHQCGTLP

SEQ ID NO: 59855 - protein, 243 aa, Zea mays
  Coding DNA Sequence Number=SeqID_16480
  Homolog annotation: Hit_ID=Q6J9V9; Match level="QueryCoverage=41%, HitCoverage=35%, E-value=2e-46, Identity=90%"; Hit description =Putative uncharacterized protein
MNILEAEGRGRPQPGSLFPTTRPTVIILGIGKGDISKKDPSQRRKWAPSPPTDRGSKDAPSGFRQPPQSTRAPSPLLIRGSKAGPSEGFDSRPRACRVRDDPGYVCYMAEARATLPRYPRTFPRPAGTICNGIPPEGGTEPSDPIEWVRVQQITRSHFAPLLTVLTGKQRYSPRSDYYANHQGKTDNASEEGLRLARPWASASALGGVTTSPDLSLGLWRSLRLARPRPRTDYATGDTSLPYH

SEQ ID NO: 59856 - protein, 153 aa, Zea mays
  Coding DNA Sequence Number=SeqID_16481
  Subcellular localization annotation: CTP_CleavageSite=58; ConfidenceScore=5.60e-01
MSGAPRKHGLRNSPASGSRGSRSAKIHRTVRCAPDCPVNQQSNGSLRRQRLPAVHLMRAQRAQTSDMPIPVHRTSNSTCPVCTGHSGGPTSQKLQRLESNGSDDVAGAPDWHLHRRMSGTAARNTLEGLRTSGSAPSPCRDAFPTRLPLDNGW

SEQ ID NO: 59857 - protein, 64 aa, Zea mays
  Coding DNA Sequence Number=SeqID_16482
  Subcellular localization annotation: CTP_CleavageSite=39; ConfidenceScore=5.55e-01
MNIVGGGPSSPKGSEISTLSRKASFRNQKRVANNHVSRLASMFWSLQADKYFWPPMSFSPRFHG

SEQ ID NO: 59858 - protein, 68 aa, Zea mays
  Coding DNA Sequence Number=SeqID_16483
MTKTRKKSWKVQGYLCSVLGDAEGAEEQLELRRSARLRELNEEEFESEEEEFDEDEDEDEDEMDETGV

SEQ ID NO: 59859 - protein, 918 aa, Zea mays
  Coding DNA Sequence Number=SeqID_16484
  Homolog annotation: Hit_ID=Q7XBD1; Match level="QueryCoverage=15%, HitCoverage=38%, E-value=3e-08, Identity=28%"; Hit description =Putative retrotransposon protein
  Pfam annotation: Domain name=MAP7; Domain location=434-602; Score= -75.3; E_value=0.031; Accession=PF05672.2; Description=MAP7 (E-MAP -115) family
MSSSSSSVADTPSVGASSEEMLSNVTAKELRTGDTVEFGVSWMSSVHQLTPNAVVALAKYVWATTSYGGQPLVKVFAKYYCLHWQKRKVGNKIAQFGSCTFTPKTGKTSMEVVELVPCARNKWGNWWEFWFYVAEGTVEDHPGLPVAIMCSHYYSAYPQFEVAEEDEDEGALRCAARMSRGRDLVEEFVGYGMPSRGGMLVRSPAFALDLHGRDPAAFVREAKDGAVRIVGRYVPKTEAQWSWDIRGSNDRLNRVFELNCLPYGGYPGQDVVDRRGKKPAAKTEDDPAPEAAPSTKKRKLCTAMGELGVSNSFAMELMGTCVAPGGRMSSPELRESSVRMLEVTGGRWPKNVPIPRAAGEDFFTSRMARDLRVFPYGRNIATVVSAVMNKDRQEAAQKRRRSSGSGEGQLVVVPPAVATTVSVAVPGVKGSALSAGGEISAVAAVKDEAGTVSRRLREASQQLSQMCLPKSRDFGRSMLTSSGKKSAVDSKCRKLAEKVVALEGERTDLRRQLVEERREANQAIAKAQATQAEAKLVRVEGSLASQRAEEWEVRFNALQARMERAEASTRSEVERTRKQLVDSYRELGARTADFEVPDQEAGLRFLEWLQEELLALPTIVEGFMSFASLVTCEGALNALSREGCSHYEVFDRSDEDFGREIYKVEDPVVKGLRGGPLRPDVGPLRSGGGQGAMARVEDVEDFGPLNSAQPEAEANPVVAEAEVDLAPPPETGEGSLTAPAAAVSGGGSSPAAAPMVENPPKAVQDFGPVHATATANFVAASTVVAGNESDESMFKFSDFDDSGSSVEWTEESSDEDLDYFATLDVAAAEASPHVTDAEVLPGPSAGRRRQRAVAKRRVSEVDGGRLRVGRAGRQELLSSPFGASVGEGELRSLFEGEELRIMLFNYREMGIIPKVEPM

SEQ ID NO: 59860 - protein, 83 aa, Zea mays
  Coding DNA Sequence Number=SeqID_16485
MSDPAGKATTATDPDRETRSSQRDGGSSREGRSNVDPAGKVAAATDPMKARKGRETGRFHPGRALRRTWQAMMTAPIPSPLEA

SEQ ID NO: 59861 - protein, 162 aa, Zea mays
  Coding DNA Sequence Number=SeqID_16486
  Gene Ontology: Cellular component=chloroplast inner membrane
  Homolog annotation: Hit_ID=Q2QTT0; Match level="QueryCoverage=30%, HitCoverage=11%, E-value=4e-16, Identity=85%"; Hit description =Expressed protein
MLATGGGGGDIGKRIGHGGGDGGDDDGDDDDYFDDFDEGEEEGGLFRRRIVVQELFNREFVEAVLQEWYKTMSDLPTGLRQACEMGLVSSAQMDVRDANILNVNPLADEVKINLDMIHMLMKWVALMLEWETGDVQPGEGEILKRSCKTSIASGVTDLASIT

SEQ ID NO: 59862 - protein, 145 aa, Zea mays
  Coding DNA Sequence Number=SeqID_16487
MAGWRSFCPVELLVGDSHGMGLQQRGGLGWLAIAPLLARKWMSTASAWVVAERRPVADEVRRQGCAASRDGSSRALFSFSGMAAATSGPGRRMMVATATERPATADFDCCGVSHSPALSVKPVAARRVAVDVSDHGDHRRELEDA

SEQ ID NO: 59863 - protein, 155 aa, Zea mays
  Coding DNA Sequence Number=SeqID_16488
MGKSKKGGGSSHHSGDKRKREPTPPSEDFGDSEYSEEEFSSESEGSPAPASPPASSDDSDDSQGIAAEVWTYIRAVERAGLEGLDESEYSSDEESSSDPSEEGSGGDGGDGDDDGGDGDGDSDSGKGGDGNDKGGSCDGGDGSKGSSKGSNKASG

SEQ ID NO: 59864 - protein, 123 aa, Zea mays
  Coding DNA Sequence Number=SeqID_16489
  Gene Ontology: Cellular component=chloroplast inner membrane
  Homolog annotation: Hit_ID=Q2QTT0; Match level="QueryCoverage=57%, HitCoverage=16%, E-value=5e-28, Identity=87%"; Hit description =Expressed protein
MVIVSIPRADSRMPPDPAARPHHFLHGEPRGPPCSSLRLMNIQIGEASRRTWLGEEADPQYSDRLLRAYKRPVEVDADQSRWFISKDAIVSGLGLLGIKQGGPEATFSKSRRKRVIRKKVTSG

SEQ ID NO: 59865 - protein, 164 aa, Zea mays
  Coding DNA Sequence Number=SeqID_16490
MAREKTRRCSSTSVIAVLEEGGENAGELDSTSHQALQKVGEVILRRNWTKASCGGGSMFTGGILNSGDGDFTGLVKQSSSSSLGKLYGTQGKPVAGLVRVERSWVQRFIVTGSGRRWRAAMLPAPCPKSFVPGIRRNVIPKFGLSEWQTREKILVISSSSNAIF

SEQ ID NO: 59866 - protein, 249 aa, Zea mays
  Coding DNA Sequence Number=SeqID_16491
  Homolog annotation: Hit_ID=Q6JAD6; Match level="QueryCoverage=71%, HitCoverage=26%, E-value=6e-69, Identity=71%"; Hit description =Putative uncharacterized protein
  Subcellular localization annotation: CTP_CleavageSite=65; ConfidenceScore=5.03e-01
MRLHSLCYGTSDPPRHPHGGVAPPTAHVAALFRPLSTDGSLLSPADFTPATKFLYELMRRTLLPRMGYRETTTHIQLWLLGALISHSEFDVVDFLICEIEDTVLDGLRAMSAALIQPPQFQSTLEASRLQFGFYRLAPEDIVLALSPASQIRVEDEAIRQFEDQGAIADTSSDDDEDLGIPPPPPVPPRSMITRLVAPVLLLRLLLQRLALLWLPSFSRLLSSRLIWPQNRPARQQSRPVWGTDIPRVH

SEQ ID NO: 59867 - protein, 277 aa, Zea mays
  Coding DNA Sequence Number=SeqID_16492
  Gene Ontology: Cellular component=mitochondrion
  Homolog annotation: Hit_ID=Q10NV0; Match level="QueryCoverage=67%, HitCoverage=96%, E-value=8e-48, Identity=53%"; Hit description =Expressed protein
  Pfam annotation: Domain name=DUF292; Domain location=21-142; Score =103.5; E_value=6.5e-28; Accession=PF03398.5; Description=Eukaryotic protein of unknown function, DUF292
  Subcellular localization annotation: CTP_CleavageSite=26; ConfidenceScore=5.18e-01
MGFIQGRTSKQTSRVKTLLRLALSRLAAARRPRLARKSISRSDVGQLLALGHIDRALHRAEQLIEEDNMLEAFNIIELHCNRLIECAKQLDKPHECGDDIREAAAGIMFAARRCGDLPELTFARTILTNKFGGEFAEMAKEGAGVVDPMLVWKLTGNKGDMELKKKVVKEVAAENNVLVDFSELQEVEHGGSGNVSHHHNVSHEGIYQTNMDGSLEPSHDEDPCDTSNSDGAINGHPKQENTRTSTQQQPPAIMIYMIAKKRSPPCHVIYIQPNTGS

SEQ ID NO: 59868 - protein, 390 aa, Zea mays
  Coding DNA Sequence Number=SeqID_16493
  Gene Ontology: Cellular component=mitochondrion
  Homolog annotation: Hit_ID=Q10NV0; Match level="QueryCoverage=47%, HitCoverage=96%, E-value=5e-49, Identity=54%"; Hit description =Expressed protein
  Pfam annotation: Domain name=DUF292; Domain location=161-282; Score =104.2; E_value=4e-28; Accession=PF03398.5; Description=Eukaryotic protein of unknown function, DUF292
MAHRTVRCTQPTVGAGHMSRGDRAVDRLPQAPLAHWTVWHGVQPSCDLANAKGVRLNRTDSMLHTPKLEFPDKRNDSIKTFAPSDRLLHQSTSKPSSSSSPTFSLKASTKQRFDFTYQSNGPSASWNNDQRLRHPVDQRTMGFIQGRTSKQTSRVKTLLWLALSRLAAARRPRLARKSISRSDVGQLLALGHIDRALHRAEQLIEEDNMLEAFNIIELHCNRLIECAKQLDKPHECGDDIREAAAGIMFAAGRCGDLPELTFARTILTNKFGGEFAEMAKEGAGVVDPMLVWKLTSNKGDMELKKKVVKEVAAENNVLVDFSELQEVEHGGSGNVPHHHNVSHEGIYQTDMDGTSEPSHDEDPCDTSNSDGASNGHPKQENTRTSVHTRR

SEQ ID NO: 59869 - protein, 285 aa, Zea mays
  Coding DNA Sequence Number=SeqID_16494
  Homolog annotation: Hit_ID=Q10NV0; Match level="QueryCoverage=68%, HitCoverage=96%, E-value=3e-39, Identity=46%"; Hit description =Expressed protein
  Pfam annotation: Domain name=DUF292; Domain location=21-150; Score =72.7; E_value=1.2e-18; Accession=PF03398.5; Description=Eukaryotic protein of unknown function, DUF292
  Subcellular localization annotation: CTP_CleavageSite=26; ConfidenceScore=5.21e-01
MGFIQGRTSKQTSRVKTLLRLALSRLAAARRPRLARKSISRSDVGQLLALGHIDRALHRVRPHPIIVSNLPARQMEAEQLIEEDNMLEAFNIIELHCNRLIDECGDDIREAAAGIMFAARRCGDLPELTFARTILTTKFGGEFAEMAKEGAGVVDPMLVWKLTGNKGDMELKKKVVKEVAAENNVLVDFSELQEVEHGGSGNVPHHHKVSHEGIYQTDMDGSSEPSHDEDPCDTSNSDGASNGHPKQENTRTSTQQQPPAIMIYMIAKKRSPPCHVIYIQPNTGS

SEQ ID NO: 59870 - protein, 66 aa, Zea mays
  Coding DNA Sequence Number=SeqID_16495
MPKQGSSSDLAEWQVCREHKQTGDGYWVLLLQEAESGPGGECVVLVPACGARAGGWCLERVHGFGS

SEQ ID NO: 59871 - protein, 249 aa, Zea mays
  Coding DNA Sequence Number=SeqID_16496
  Gene Ontology: Cellular component=mitochondrion
  Homolog annotation: Hit_ID=Q10NV0; Match level="QueryCoverage=74%, HitCoverage=96%, E-value=3e-47, Identity=53%"; Hit description =Expressed protein
  Pfam annotation: Domain name=DUF292; Domain location=21-142; Score =93.3; E_value=7.8e-25; Accession=PF03398.5; Description=Eukaryotic protein of unknown function, DUF292
  Subcellular localization annotation: CTP_CleavageSite=26; ConfidenceScore=5.18e-01
MGFIQGRTSKQTSRVKTLLRLALSRLAAARRPRLARKSISRSDVGQLLALGHIDRALHRAEQLIEEDNMLEAFNIIELHCNRLIECAKQLDKPHECGEDIREAAAGIMFAAGRCGDLPELTFARTILANKFEGEFAAMAKEGAGVVDPMLVWKLTGNKGDMELKKKVVKEVAAENNVLVDFSELQEVEHGGSGNGNVPHHHNVSHEGIYQTDMDGSSEPSHECDTSNSDGASNGHPKQENTRTSVRTRR

SEQ ID NO: 59872 - protein, 234 aa, Zea mays
  Coding DNA Sequence Number=SeqID_16497
  Homolog annotation: Hit_ID=A9PDG3; Match level="QueryCoverage=37%, HitCoverage=95%, E-value=3e-22, Identity=62%"; Hit description =Putative uncharacterized protein
  Pfam annotation: Domain name=Complex1_LYR; Domain location=149-213; Score=80.8; E_value=4.4e-21; Accession=PF05347.6; Description =Complex 1 protein (LYR family)
MGDPRSSIVDPMLNIAYRFSEDGLVAARQRSGHGLLNVEAAHRLPVEWTGLIKCRGGTSPASGMDRRRGLSAINAEVAQPRGLTSGSAHWLTSCAVGHVAASGLCLSGEQKRTRVLGPPQRGIRDPSQGSSLRPGVLDLTRSRMAAAAPTRAEVLSLFRSLLRTAKKFSDYNIREYTRRRAADSFRENRALADASAAAAAFSEGKKQLEVAKRQAVVYSLYAPKAKSVMELKVQ

SEQ ID NO: 59873 - protein, 59 aa, Zea mays
  Coding DNA Sequence Number=SeqID_16498
MGDPRSSIVDPMLNIAYRFSELFCYSIYVHVKIINVNWNIELNLRNTCHHKGLWTPLAD

SEQ ID NO: 59874 - protein, 118 aa, Zea mays
  Coding DNA Sequence Number=SeqID_16499
MFERRDKLLAEHELEAEDKEKKLEERIRQFQAAQVAPGPQVVEATKKALEDLQAKHRAGVQRIAAWAGEASMTLVPLGMSPIPVSELPTSISDVLPVLDSAADRLRRLDQILDAHLEA

SEQ ID NO: 59875 - protein, 16 aa, Zea mays
  Coding DNA Sequence Number=SeqID_16500
MASKAGREWRRATACL

SEQ ID NO: 59876 - protein, 145 aa, Zea mays
  Coding DNA Sequence Number=SeqID_16501
MDRGGVGSKRSFVGRSLAGPSTGGTNAGVRRGADIFLRGGDPSTASPSEAGSDSVDGGVDAEGAAAPPIDDLFVGNRIVYPSESYFSRKVMSEESLDSVGLAAYVYSVVFRIPLLKQSKSTKDVLAERPFPRKILTQMGFPPSSP

SEQ ID NO: 59877 - protein, 512 aa, Zea mays
  Coding DNA Sequence Number=SeqID_16502
MQAACNRTKGAHPFNFDASSMEAQAHTSCNRCAGYYVRETAPPLALDRRHLWQAKQATLHLRHDDRVKKGTGKGDTPKGILLREGSGPRALLLIRCSKAGPSEGFDSRLRALGPRAHYWSEVRRLAPRKGSTAASGHSGSAPTTDQGFVGWPPKGSTAASEHVERGMTLGTSDTWPRLGLCSRGTLGHFRDQQERFCNGIPPERGIEPSDPIKRDRVQQITCRHFWSAPLGHQLTLIERGTSVHSDHPLATHWRHHVQRPPRATWRFPPPPCGKATQGRTKKAESVLDRPLALCGGSGAALANPAPAKPLTASTYQPENLEPDYAPGQQPESSAASAAPTAVPPVRVRPTAAKTSLRRHRKLRLARPLSSDSASTPEGGLRLTRPLGSDSTSISDDGLRLARPRGSDSTSNSEDALRLARPPGLGLNLDLGRRSPPRPTPGVRTQPRPLTTVSASPDPRARTQPRPRRSLRPARPRARTDHVTGGAIITLPLASSGYGEQDWRPIWLAPVNK

SEQ ID NO: 59878 - protein, 428 aa, Zea mays
  Coding DNA Sequence Number=SeqID_16503
MGQSAAGGGATVDMAKSGPAVMAAADEWKRRSNRLQAHIPSWSSRGAFSHDAKQASFHLRHNDRVKKAAPEHSGSAPTTDLGFEGWPLERVRQPPRARRARDDSGYVRYMAEARATLPRGSGAALTNSATAKPLTASTNQPENSEPAHAPGLQSETDGRNSGQGFVYSRDAISPRPSPASGGNSSPRRIHASPEGLLKQRAHPRLARSSARAGFVVKQPWPNRLTNRPYRRRIQCEDRFTSYPDNVPQSVGPKVRLTIAKFSLRRNRKLCLARPWASASGGGLLLARPQGSASTSTSGGGLRLARPPGLSLRLCLGRWSPPRPTPGLGLNLDLRRNRVLARPPARPQEESPPRPTLGSDQPRRGGYIITLPLASSGYGGNKTGVPSRLAPVTGNDGFPRASMMKVVLSPLRKQGGVNNIPAAPTAVLL

SEQ ID NO: 59879 - protein, 194 aa, Zea mays
  Coding DNA Sequence Number=SeqID_16504
MKSHMALGLLSPEKSQPKSGSSSSLKPGGLLVETAVSRSQVDHIWYPGRHEDNARHVPHWGAGVVDLLDSRQGVASCLATVAPPPPPTARKAAGQTRMLLFRHGGKTSSCPPPPGELMSVVVAAALRGKEYHVVATIEGHELEAPEAEQRPGLKRLLETTHLELNGKLFVNTQQAPTWRANCRRFDPGGPWTDE

SEQ ID NO: 59880 - protein, 503 aa, Zea mays
  Coding DNA Sequence Number=SeqID_16505
MKATRMLPIRGLRRYKDAMHEGSAKTWLPSKGVTLLLKATLPTCVLSRHGLSLLQHAPRSSPYDTGAGSHASCKLAQTEEVKPPRAERTTAQRLQAFLHYHPDQRVKGWTAMQAACNRTKGAHPFDFDASSMEAQAYTSCNRRAGYYVRETAPPLAPVPRLLDRGTGAATQGNPAHDPMVPTEHIGHGSVSRGRRHDSRYGQKWAGSNGGGRRAEAAAKSSASSRPLLGQRENPLPRREDDAPVFRSSNGSRTHNGCPANHSSRRINFAAGQVAPLAGKAGPSEGFNSRLRALGLRAHYWSEVRRLAPRKGSTAASGHSGFAPTTDQGLEGCSRKPGSGQTVDSVNIPARELGTRLCTRATASLHEGTTQTGRSITKRAKTSKESNHSSEASGATLSGARAQPRRWTTDSASPDPRARTQPWPRKTVSASPDPRARAQPRRWTTDSASPNPGLGLSLGLGRRSPPRLTQGSDSTSTSEDGLRRTRPQGSDSASASEEPPPRPT

SEQ ID NO: 59881 - protein, 188 aa, Zea mays
  Coding DNA Sequence Number=SeqID_16506
DAKPIKTPMGTNGHLDLDTGGLGLNLDAGRRTPPRPTPGLGHSLGLGRRSPPRPTLGLGLNLDAGRRTPPRPTQGSDSALASEDGLRLARPRARTQPRPRKTDSASPDPRARTQPRPRKSIRLARPRARTDHITGGAIITLPLASSGYREQDRCPIWLAPGPPGVETPTFGALGRGLLRVDEQLPVKL

SEQ ID NO: 59882 - protein, 71 aa, Zea mays
  Coding DNA Sequence Number=SeqID_16507
MSWCTLGQSIARTTVVAPLALGDGLPLHLANLNTFVFKSYGLVQKLLERWEANHQPIVDQGSWRGWVAYDS

SEQ ID NO: 59883 - protein, 71 aa, Zea mays
  Coding DNA Sequence Number=SeqID_16508
MGPGRHHGRCGSTEISRSVRHGGVRRCTGTVNGVDSRHGWSWTGDDSSSPSIGRRGTAGRRGQPALTIDWR

SEQ ID NO: 59884 - protein, 113 aa, Zea mays
  Coding DNA Sequence Number=SeqID_16509
MDLTWQHLGAKILGVEVPRWKACLARAASTLAAVPPPPPPMTIEQMFLMQTQAVQAIGQTLAAMQQVQQQPQPRPHVQMPQLPRDKRVEFMRGHPLSSPTLQTPWMPKTGCAQ

SEQ ID NO: 59885 - protein, 308 aa, Zea mays
  Coding DNA Sequence Number=SeqID_16510
  Homolog annotation: Hit_ID=Q5GAU8; Match level="QueryCoverage=10%, HitCoverage=23%, E-value=2e-08, Identity=84%"; Hit description =Putative uncharacterized protein
MMDAEKEVATERRVDSPPRCDCGDRAVIDEDYEKQFCCPNIDYPYGWRKCRFREWLYGPLSHWPEPEVKEKRYNQWVEEEVKFDPVLCKCGIEAKYGLVPSELGVGYFCGHMVDYDEETRKYSWESYDDKGEVMRTIESKRIMGQKMRCGSRLVDSYINDRIRDMRREAKSAFYDSSKRAEYRRLKAADEKRAQDAREWEAAQAEKQIESGVNYLADEAHARYVQDKVATVELMEEEEDDTSRLSELIALAKAGLHEEEEDDTSRLSELIALAEAGLRAQEKEDEFMSQAAEEVDAAYYKKKSDEAEA

SEQ ID NO: 59886 - protein, 180 aa, Zea mays
  Coding DNA Sequence Number=SeqID_16511
  Subcellular localization annotation: CTP_CleavageSite=3; ConfidenceScore=5.04e-01
MSSVSRNWARPSPLLLVLFSCRSNIPLDRPTRWQGGRPSHTINHFLNVTAAEERAEGLTGGEIAQRGSRDAREDMGARNRSETHWIAWSTRGGGRPKSGEVNLGPLVKSGWVRGLGKLHGLLAELVEALACPEDGWSGLATVAEALAAMAGGIKLAGAKGKWLAGEGECGAKWGAPGKAL

SEQ ID NO: 59887 - protein, 32 aa, Zea mays
  Coding DNA Sequence Number=SeqID_16512
MAQRVFFFAAGLDLASRERPRRRGEILGPSSI

SEQ ID NO: 59888 - protein, 149 aa, Zea mays
  Coding DNA Sequence Number=SeqID_16513
MGKNNKHKREPTPPSEDFGDSEYSEEEFSSESEGSPSPIPLRESSDDSDDSQGLAAEVWTYIRAVERSRLEGSDESEYSSDEEDSSEEDGGGDGEDDDDDDDEGGGGGDGDGDDGGRGGSSGNKDGDGGSSRGGSGGGGSSKGSNKASG

SEQ ID NO: 59889 - protein, 137 aa, Zea mays
  Coding DNA Sequence Number=SeqID_16514
  Subcellular localization annotation: CTP_CleavageSite=88; ConfidenceScore=5.60e-01
MAAPSLKSQESGEDGANSIVFTKCATKSSNQSSIISTTTTSKTPPSNNFVSSPFKSESSSIGSSLTSQLQLELIMVNRLGLIIYVLVDLMLGMDVDCYLDCLARLTINNRVMWKKNQVDPKRGLICKLKLKNQPEDG

SEQ ID NO: 59890 - protein, 146 aa, Zea mays
  Coding DNA Sequence Number=SeqID_16515
  Subcellular localization annotation: CTP_CleavageSite=58; ConfidenceScore=5.78e-01
MVFTKCATKSSNQSSIISTTTTSKTPPSNNFVSSPFKSESSSIGSSLTSQLQLELIMVGGMFSKIKLDGGSVKGLDGFNIGKDVPLPGSTRSKLFCKTESLILDKPYLDSHITSIPLRVFSLVGHGNTEKCIVLVTTHLRSGEKVH

SEQ ID NO: 59891 - protein, 64 aa, Zea mays
  Coding DNA Sequence Number=SeqID_16516
MTKVMLAEDIQSSRNGSEFTPRCLTIGAEVEGMPNKSSRHPRMRHPSCLHHHPNDNRADVSDVD

SEQ ID NO: 59892 - protein, 28 aa, Zea mays
  Coding DNA Sequence Number=SeqID_16517
MGSAAIVAENTTIIGARTDGDPPNVAPS

SEQ ID NO: 59893 - protein, 141 aa, Zea mays
  Coding DNA Sequence Number=SeqID_16518
MTTQKFRGKQGFINCLDYAIINRIRDLQHCNLLNRPRPIRSDDPKLTLAIALTIRSQSHSLHPTVEMLISNILIMDVGYLIDGAGATQYLRRRNTAARSPAADAIADDSQMRRPNPFYPTRRYLQRGGYGDLIRTPHTRYW

SEQ ID NO: 59894 - protein, 143 aa, Zea mays
  Coding DNA Sequence Number=SeqID_16519
MGATGILCDSTHDAVTKECVAPVSNKTFAKWYSTENEDELPGCFDAGIDSLPTGYSDGTAAAEETASSTAAAGSNADASAGMIAPSIRCWKVGKSLEHMVAMEVVLEFFPSDGFRVGMGGEALEASGLAPGAKAMVAAAAPAA

SEQ ID NO: 59895 - protein, 147 aa, Zea mays
  Coding DNA Sequence Number=SeqID_16520
TNFEIKNLISHLIQHKGLIAGPKTHPKQGSTIARKREILGEIDNVQPKPSKDLMEHKNIIKEYRFIQSSKGEDCNLADGEYILVPEQGVAQEVVQEPAPESAIEDLPAPALEGSLEDMVAGVTWPSILPPGWTVEWDPTSAEEEHEE

SEQ ID NO: 59896 - protein, 42 aa, Zea mays
  Coding DNA Sequence Number=SeqID_16521
MRLHTLRDGMVLYSKRYLIHVGNEGSSSTSTFTNNNAVQAHP

SEQ ID NO: 59897 - protein, 73 aa, Zea mays
  Coding DNA Sequence Number=SeqID_16522
MVISLFRWGRALILVWRSFTAPRGSCPEAQVMLGVSRNGWPRWPALGWLGRAAKSSPELMTGSGKRGLMGFAD

SEQ ID NO: 59898 - protein, 161 aa, Zea mays
  Coding DNA Sequence Number=SeqID_16523
GGFVSLDELTAWNFQQTKADQYRSRRDRDWGWFSGLVNCLVVDGWLDGGRQIRIRCATRKARGCLAGHCPWSYASCDAPAILLLFYLVAMELAASLCVSSSTFTLLPMVGQPRRCCYLVVASWPDLVIASVLLPCSSSIVALSPDAVAPWMVAAVPQIAGA

SEQ ID NO: 59899 - protein, 37 aa, Zea mays
  Coding DNA Sequence Number=SeqID_16524
MARVACTLYGKRLDDGVSVLSVGVNPGCPKSLGQGQL

SEQ ID NO: 59900 - protein, 62 aa, Zea mays
  Coding DNA Sequence Number=SeqID_16525
MVGGNWLRRRRGTRSRTADEAEQDEAQQAAQQDDLVQQQAAQQDDDEAQQNRLHVREASTCK

SEQ ID NO: 59901 - protein, 99 aa, Zea mays
  Coding DNA Sequence Number=SeqID_16526
MARLACTLRGKRLDSGVSVLSVGVNPIWWYPRMSPSSEVIRGRMLASHFKNNTLLCGRVFCLPGLSKVRRTRTTVDGPNNLEGSVTAGIGVKPISSDTT

SEQ ID NO: 59902 - protein, 71 aa, Zea mays
  Coding DNA Sequence Number=SeqID_16527
MAVMGSTSDKMYLCQVPNFGILNDKAETGLVPERPTRNDSGEMARVACTLRGKRLDGGVSVLSIGVNPVWS

SEQ ID NO: 59903 - protein, 188 aa, Zea mays
  Coding DNA Sequence Number=SeqID_16528
  Gene Ontology: Mol. function=DNA binding; Cellular component=nucleus; Biological process=regulation of transcription
  Homolog annotation: Hit_ID=Q9ZQ25; Match level="QueryCoverage=84%, HitCoverage=47%, E-value=6e-24, Identity=36%"; Hit description=NAM (No apical meristem)-like protein
  Pfam annotation: Domain name=NAM; Domain location=8-90; Score=32.9; E_ value=1.5e-10; Accession=PF02365.6; Description=No apical meristem (NAM) protein
MHTGPLFSGCGYRDGNGSGSDRVWGSKSPSGIRARHATQLGYWKSTGKDKPMHSRSGRLVVGTRKTLVFYRGRAPRGEKTDWVMHEYSMGERRSSALLRGAQSEWVICRVFTRKQHPAVISNDRKLPEMEEAAVHGHDHRSPGHLLATEAADDDYDSEQESAVPKQTPGSHIGGAQAMEGDDDHYQQS

SEQ ID NO: 59904 - protein, 82 aa, Zea mays
  Coding DNA Sequence Number=SeqID_16529
MACRRVVPARHRSAWLWEGGRRDYICTFGLTEGRSLCEITFIPFTIDYNHDTNYHGSICLFIFKSVQPFVSRTFGFEADPQQ

SEQ ID NO: 59905 - protein, 229 aa, Zea mays
  Coding DNA Sequence Number=SeqID_16530
  Subcellular localization annotation: CTP_CleavageSite=43; ConfidenceScore=5.50e-01
MGLSKVLSARTTVGGPNTLGGSVTAGIRVNPSLQILRDMVRTRKTARKSTGPLGVPRHQLASRHEGSSSGSNDPIGDLEARVEQLRLELRHRNRAREQDSHRIAELSAEVSRLQYKISERDTAIDWAVNSRSFAWDYKAKALARVVELSASLKSLQVYCNTLHEEVHVLYARLHLDVPPDVAAMGARPSGTANEEPDGELDLFRPPPSMNLVDERFPVAGNGTTKDEEN

SEQ ID NO: 59906 - protein, 242 aa, Zea mays
  Coding DNA Sequence Number=SeqID_16531
  Subcellular localization annotation: CTP_CleavageSite=36; ConfidenceScore=5.22e-01
MTAVPTASTARTPARRGSHAPHLVPATPRPCPDTVVASSGPAPAPLLGAVARKDARPWHGFPYPPDLATGTDAAGARTIGITRLCSRRVCPGWPRRGPPRTTVEAPVRGRVPPACPARDRGGPARHDRGYGAVGPRHSPTARAACSTPRNRGVVRFAIVPLMGLGVCDSLCQVIPCWVTLVVINGEALALYVDVYSPLLYTPAGDVRIIGGDENDGFGIDYGNGEDEAVEGDFQEFQDYDEF

SEQ ID NO: 59907 - protein, 110 aa, Zea mays
  Coding DNA Sequence Number=SeqID_16532
MQSQKCVAPVPNNTFAEWYLTENVASATPGVSWTMSASSGNMHDLLLALELLGCSGWLLGQEGKVPGCSDTSTDFLPASCSDGTATAAAEETTSGTAGGSGADACASDPA

SEQ ID NO: 59908 - protein, 195 aa, Zea mays
  Coding DNA Sequence Number=SeqID_16533
  Gene Ontology: Mol. function=hydrolase activity; Cellular component =cytoplasm; Biological process=glycine catabolic process
  Homolog annotation: Hit_ID=Q6K837; Match level="QueryCoverage=69%, HitCoverage=42%, E-value=4e-69, Identity=89%"; Hit description =Decapping protein 2-like
  Pfam annotation: Domain name=DCP2; Domain location=19-103; Score =104.5; E_value=3.2e-28; Accession=PF05026.4; Description=Dcp2, box A domain
MAGGGGLNRSSSRGQLLPQELLDDLCSRFLLNVPKEELESFERILFLLEQAHWFYEDNSVEHNPNLKSLSFKDFTSLMFKSCTALRPYIAHLDDIYKDFNNYKFRVPVSGAIILDDTYERCLLVKGWKAGASWSFPRGKRNKDEEDHTCAVREHTVNYVYVIAVMRVRSDGQPRWVGGIGGGAAYSENLVPWGNL

SEQ ID NO: 59909 - protein, 357 aa, Zea mays
  Coding DNA Sequence Number=SeqID_16534
  Gene Ontology: Mol. function=spermidine synthase activity; Cellular component=cytosol; Biological process=spermidine biosynthetic process
  Homolog annotation: Hit_ID=Q9SMB1; Match level="QueryCoverage=81%, HitCoverage=89%, E-value=1e-159, Identity=94%"; Hit description =Spermidine synthase 1
  Pfam annotation: Domain name=Methyltransf_11; Domain location=122 -230; Score=5.5; E_value=0.025; Accession=PF08241.3; Description =Methyltransferase domain
  Pfam annotation: Domain name=Spermine_synth; Domain location=43-288; Score=496.0; E_value=4.4e-146; Accession=PF01564.8; Description =Sperminespermidine synthase
  Pfam module annotation: Pfam domain module=Methyltransf_11::Spermine _synth; Domain location=122-230::43-288
MEAEAAAKRAREGGEDATAPVAGAEAVVAGAGEQAGISAVIPGWFSEISPMWPGEAHSLKVEKVLFQGKSDYQNVMVFQSSTYGKVLVLDGVIQVTERDECAYQEMITHLPLCSIKDPKKVLVIGGGDGGVLREVSRHISVEQIDICEIDKMVVDVSKQFFPHLAVGFEDPRVSLHIGDGVAFLKNAPEGTYDAVIVDSSDPIGPAQELFEKPFFQSVARALRPGGVVCTQAESIWLHMHIIEDIFVNCRQVFKGSVNYAWTTVPTYPSGVIGFMLCSTEGPAVDFQHPVFNIEEDEHSTKSKGPLKFYNSEIHTASFCLPSFAKREGSLEHGLWFYDGFKRVLLKQIEKNTFSSSI

SEQ ID NO: 59910 - protein, 99 aa, Zea mays
  Coding DNA Sequence Number=SeqID_16535
MTSGARVLGRGGGGWCRMKRKDCKRLGCVQPKSSSVWHTGLSGGAPDSVRCARLVSGEQAALEKCLVAYGYNSPDCGGAPDCSGERLQVVEIPRKREKD

SEQ ID NO: 59911 - protein, 153 aa, Zea mays
  Coding DNA Sequence Number=SeqID_16536
  Subcellular localization annotation: CTP_CleavageSite=30; ConfidenceScore=5.20e-01
MEAMEGRWEANATLCCTSAYRFAPVPSLVSAFSVRPTATRIAVRKMGEVAPLIPATRRRTMSRKAAGAVEADQPAEDVSEEKTLKITIALNQEAEAVAIASKEEKGLQDEPKGTAKAQKCSFDLLVTYLIENWQCECVLFKLAICINYHLNNK

SEQ ID NO: 59912 - protein, 136 aa, Zea mays
  Coding DNA Sequence Number=SeqID_16537
MKGPCTPTCCTLLCASFFYLLLVGSELEPPVIGSTSFVAGGATAWLLCEAIVVVMEVTDENARTLARKVVVVKALDGKQALKITIKSTGIGGQDRTRNRQSGDFHHIVQCLVSDIRTIRSRLMTHVKKVDETKKQN

SEQ ID NO: 59913 - protein, 451 aa, Zea mays
  Coding DNA Sequence Number=SeqID_16538
  Gene Ontology: Mol. function=triacylglycerol lipase activity; Cellular component=extracellular region; Biological process=lipid catabolic process
  Homolog annotation: Hit_ID=A7R3D4; Match level="QueryCoverage=100%, HitCoverage=98%, E-value=1e-149, Identity=55%"; Hit description =Chromosome undetermined scaffold_504, whole genome shotgun sequence
MRSWARAALGVAELLVSAAIHLGYAFYIFGTAVAADVSASLVKGLMAGGGVAKDVAVDGEDEAAAVLDDGAVPPIVLVHGIFGFGKGVRSSFCFLLPVVRFVTGSQVDYGEEHSREYGHSRFGRTYARGHYPAWDEEHPVHLVGHSAGAQVIRLLQQMLHDREFEGHGDTSERWVLSVTSLSGALNGTTRAYIDGMRAEKEGGGRWLRPVCLLQICRVGSVLYHWLDLPWLKRYYDFGFDHFGMSRRVVGVAGLAEILLDAGSGGGRRGPFATGDWILPDLTIQGAARINARVRTFPATFYFSYASRRTARSPPGSAGATVPSGVTRIHPLLFIRVLQMCRWRYPAGADPPYQGYRDEDWEDNDGALNTFSMTHPRIPVEHPSVQVEKDEDCRPLRPGIWYYKIVEADHMTFVINRRRGGVQFDLVYDSIFDNCRKHVFRTAPPPTLPVQS

SEQ ID NO: 59914 - protein, 61 aa, Zea mays
  Coding DNA Sequence Number=SeqID_16539
MKHFDISLLLVEWDFAQIVAKVPEEFHDTRDLPKNWHVPDVLFLSTLHPAFSESEYPTKSK

SEQ ID NO: 59915 - protein, 95 aa, Zea mays
  Coding DNA Sequence Number=SeqID_16540
MGTEHGVSGELQAGPLATGSEGSMPPSDGIPLQDRSRWSRKCPRQLACWLRDAWAWATKPACQKSEKRVHLARLHAACMAAHPFRLLVWAKVGNC

SEQ ID NO: 59916 - protein, 199 aa, Zea mays
  Coding DNA Sequence Number=SeqID_16541
  Homolog annotation: Hit_ID=A7QLP4; Match level="QueryCoverage=51%, HitCoverage=33%, E-value=2e-08, Identity=28%"; Hit description =Chromosome chr13 scaffold_120, whole genome shotgun sequence
DKKTRGYVPWNDEMDKVLLDTFVDYYNKGDRCQNGWKSYVYTTAVKNVCEKCNVTITKENISSRSKTFDKHYNIINGLLSTSGFRWDWEKNKLKVDSDTVWDEYVEPRHPIRWVWSWSTVGGFVLMWHRTVRCTLDSPVHIGQSGAPLSFCADFCRVYCCALFAVRVDRWREVAVAPLAHRTVRCTPDSPVYTGQSGEF

SEQ ID NO: 59917 - protein, 83 aa, Zea mays
  Coding DNA Sequence Number=SeqID_16542
RIRVERDPALCGRLNEEVGHLGDIDPRAIDLAMKIAERMFLKMKEDEAKNKIKEVIVKAKVRMRRSKKVIVKMRMIFNNSSLS

SEQ ID NO: 59918 - protein, 90 aa, Zea mays
  Coding DNA Sequence Number=SeqID_16543
  Subcellular localization annotation: CTP_CleavageSite=18; ConfidenceScore=5.15e-01
MQQCKYGSCTAPVSSRSCSSTGTALSQPEPPTWTQTERVDRFWQVATGDARELARVKQTVAAQTIHYGIFFFVTVYRDCVVECAVIGEDN

SEQ ID NO: 59919 - protein, 443 aa, Zea mays
  Coding DNA Sequence Number=SeqID_16544
  Gene Ontology: Mol. function=transcription factor activity; Cellular component=nucleus; Biological process=regulation of transcription, DNA-dependent
  Homolog annotation: Hit_ID=Q8RZX9; Match level="QueryCoverage=78%, HitCoverage=89%, E-value=1e-105, Identity=62%"; Hit description=DNA -binding protein RAV1-like
  Pfam annotation: Domain name=AP2; Domain location=76-125; Score=50.1; E_value=7.8e-12; Accession=PF00847.11; Description=AP2 domain
  Pfam annotation: Domain name=B3; Domain location=212-322; Score =126.1; E_value=1e-34; Accession=PF02362.12; Description=B3 DNA binding domain
  Pfam module annotation: Pfam domain module=AP2::B3; Domain location =76-125::212-322
  Subcellular localization annotation: CTP_CleavageSite=49; ConfidenceScore=5.14e-01
MDSASSLVDDTSSGGGGGASTDKLRALAVFAAASGTPLERMGSGASAVVDAAEPGAEADSGSGAAAVSVGGKLPSSRYKGVVPQPNGRWGAQIYERHQRVWLGTFAGEADAARAYDVAAQRFRGRDAVTNFRPLADADPDAAAELRFLASRSKAEVVDMLRKHTYFDELAQNKRAFAAASASAATASSLANNPSSYASLSPATATAAAREHLFDKTVTPSDVGKLNRLVIPKQHAEKHFPLQLPSAGGESKGVLLNLEDAAGKVWRFRYSYWNSSQSYVLTKGWSRFVKEKGLQAGDVVGFYRSAAGADTKLFIDCKLRPNSVVVASTAGPSPPAPVAKAVRLFGVDLLTAPATAAAPAEAVAGCKRARDLDRKILRHFEFPDSRCSLPSMIHLHLQVAGELVQAADTPHTHSPQNTDGSWMHVSRLQKALGSSWQWPSKLPI

SEQ ID NO: 59920 - protein, 68 aa, Zea mays
  Coding DNA Sequence Number=SeqID_16545
MEIEGFVGERSTADESASPKSSSHLAVVAAVGQEQGAERREQSARNRESSVMQSDAASKEQSDAASRE

SEQ ID NO: 59921 - protein, 476 aa, Zea mays
  Coding DNA Sequence Number=SeqID_16546
MTVAGAWEQRSRRQPSSRPIRGQQENPLPRREDNTPEQRATLRLRRNNRAKKGIEKGDTPKGILPREGTRLRASLLIRGSKAGPPKGSTAASDRVGPTPTTGVRRLAPEGFTAASDAERGMTRGDRVRQITRMYFWACLWAPSRPLTNGARTSTRITRLQLTGDTMFGAHRGLGGCSRKPGSGQTVDSVNIPARELGPRPYTRAMARSHEGTTRPAEALRKALRPRRSETTPPRPRGLHLAGALARTHRNKMQPRKAGPLAKKCDESLQASANTPFEARGLLSGTIIRGTLKTPNSQLVTPISIKLQRPDGARTRAKTRKTANSAPPDPGLGLGLRPGRRRTPLRPTQGSDSGSAPEDDELRFARPQGSDTALASADDLRLARPRGSDSASAMKDRLYLGFGGASTSPNLGRRPATSTGSAIITLPRADSGRRKQDRCPIWLSPPDRLRHSSDGHDTTLVGFQDLSGCHIGMYSGH

SEQ ID NO: 59922 - protein, 75 aa, Zea mays
  Coding DNA Sequence Number=SeqID_16547
MVVAPWVRYLSQEYVPMLTWAASTYRSPSYPYFKIWRGVGARLEREVGSAGAGGASGAWAARQPGSRGSDALDRE

SEQ ID NO: 59923 - protein, 109 aa, Zea mays
  Coding DNA Sequence Number=SeqID_16548
  Gene Ontology: Mol. function=aminoacyl-tRNA hydrolase activity; Cellular component=mitochondrion; Biological process=translation
  Homolog annotation: Hit_ID=A2WU14; Match level="QueryCoverage=37%, HitCoverage=19%, E-value=2e-14, Identity=95%"; Hit description =Putative uncharacterized protein
  Pfam annotation: Domain name=Pept_tRNA_hydro; Domain location=21-105; Score=-76.4; E_value=0.016; Accession=PF01195.10; Description =Peptidyl-tRNA hydrolase
MATHLHADANSPITPAEIPDVDQDWEKKSRIGDASIMLAKPQTFMNASGESMYDDLDLPFAKLRLLPKGGHGGHNGSNCGIVDRCLETDYKQSVRVLDFLRDLLAKSTR

SEQ ID NO: 59924 - protein, 46 aa, Zea mays
  Coding DNA Sequence Number=SeqID_16549
MDNAVMTSQSHGYALDESSNAPTRVSDGPRAASGMEWILSSADLVF

SEQ ID NO: 59925 - protein, 53 aa, Zea mays
  Coding DNA Sequence Number=SeqID_16550
MAEDKVGRILIGGLSWDTTERTFGQYGKVIEAHGYFGNLKSPSRLQGIEVEMN

SEQ ID NO: 59926 - protein, 131 aa, Zea mays
  Coding DNA Sequence Number=SeqID_16551
  Subcellular localization annotation: CTP_CleavageSite=56; ConfidenceScore=5.66e-01
MAASLLTCAPSSFPSSADVRAPGVSHLRAQDRSRTRGASLSVPHLNGMQLRLPRAVCSADSAQHALGCCAAVDHARVPRVRPSFFHVRAHRLSRSAPIARISAISVEIHADRWTRPRWTNFGGPESIPLHL

SEQ ID NO: 59927 - protein, 245 aa, Zea mays
  Coding DNA Sequence Number=SeqID_16552
MAFCPYLPHKFWHGRGPPGSGIEPEVGVTAAWSLGAEGVVVAAAGAGDGASFVGLPLLRRPSPSEWGCSYLRRGNRSSVGSGTLNASVFCSLRLSRPERPVDRGPRGNRLSRLLGPDSRRSPWTAAPPEAGSGFAEDVVDAEGATAPFSVKIRACRIRSSCSVCFLRPPRPEEHTLAALAKLRLFSSCFEHLDSVGNRDVCVSESCFSWKGRVRYLYPGGVGIPRLGRPCGLRVLSLVHEALSPT

SEQ ID NO: 59928 - protein, 82 aa, Zea mays
  Coding DNA Sequence Number=SeqID_16553
MASRRVEEGASKRRRGGEQGAAGGGGGEQAAAGWRVGVAAGGGEVVMKKSGKLTVCIAFRDLINGATPKDEYHMTLANMFIA

SEQ ID NO: 59929 - protein, 85 aa, Zea mays
  Coding DNA Sequence Number=SeqID_16554
MATLWQQTQFCKGPTKSHGFREPPSPAPAADEEDARQAREEDGTHLVLARGCKKREEGRRDAEAADGNRIAVAAAVAAAPQLLGE

SEQ ID NO: 59930 - protein, 214 aa, Zea mays
  Coding DNA Sequence Number=SeqID_16555
  Gene Ontology: Mol. function=nitric-oxide synthase activity
  Homolog annotation: Hit_ID=Q6YPG5; Match level="QueryCoverage=25%, HitCoverage=10%, E-value=5e-18, Identity=87%"; Hit description =Putative nitric oxide synthase
MGPPCLACETLGAAIGEAWLAAMDVDSRMATESDSDAHGGSGSGSETPTASPSVSPYPSAEDDSKVQAFLAEMESSIRDPSLRANATDQEIDHALEVKPYPALPLTESPFLVFRLGVPDEAFFGTTAGSANVGKSVFISAMLRTMAYKELVAAAAQKYKPIQSDVPRTTLGPIQIEAYLGKGANDIDVELNNALFIVCMIEQCSLYNKSEHYAF

SEQ ID NO: 59931 - protein, 187 aa, Zea mays
  Coding DNA Sequence Number=SeqID_16556
  Subcellular localization annotation: CTP_CleavageSite=62; ConfidenceScore=5.16e-01
MGGLAPVRNCDATVQVLGWGGHDTTGTPLRPSQVTNRERSMTQDVGRRRRSSASDSIGDWVLDEMEKGAGAVGLYRGGGESELRFTRIRNDPARNQRVAPAVAGVRCLVAAAITIRFELGETPAIPCPHARESTARLEGALTGGPHPSARMRLGLALDVIVDITPQLITLNQRSKSNKYHKNKHSSS

SEQ ID NO: 59932 - protein, 313 aa, Zea mays
  Coding DNA Sequence Number=SeqID_16557
  Subcellular localization annotation: CTP_CleavageSite=35; ConfidenceScore=5.48e-01
MARARAYKALPGFDCTLPRTLKPHRSLARRRLPVRSVSAAAQSLCHRRPANRAIPNPVQPSEKTVHTSVKLPERGIGVCFAGEASPRSPELSTPPEYVDRVIHSTILRFLVHTVTTLPREAYHALGLNQFAVVWPVHSPPTRTPACARGPGDSGHPRRQAVPRRDRQSLPEPTPPFAGPPSPPVKKNRKCDLNNEPEDCNLADGEYVLVPEQGVAQEVVPDPALESAPEDLLATALEGKPRHIPSRDLRRGLPFRLWWVQVRSLHDDSRVSGALYAKAVLLEEMVAGVTWPSILPPGWTVEWDPASAEEEHEE

SEQ ID NO: 59933 - protein, 225 aa, Zea mays
  Coding DNA Sequence Number=SeqID_16558
  Homolog annotation: Hit_ID=Q6J9V9; Match level="QueryCoverage=52%, HitCoverage=41%, E-value=1e-50, Identity=80%"; Hit description =Putative uncharacterized protein
MEAEGTRDRERRHFEGVLLSKGNGPRALLLIRGLKVAPCGVRRPPQSTRAPSPLLIRGSKAGPSEGFDSCPRTCGVRDDPGHVRYMAKARATLSRYPKTFPRPAGTVCNGIPPKGGTEPLDPIKWVRVQRITCRQRPGHIKEQQGRPRSNKKSVKDLRGVEPLLRGLEGYTRRDNNTIHTVLTTVPTTRVRLTTLSTKAKKRQQDLRLHSQLRFYRAQALLRRPR

SEQ ID NO: 59934 - protein, 107 aa, Zea mays
  Coding DNA Sequence Number=SeqID_16559
MGQLETEHEGGKKGGDKRKGKPAAFVLSCAQVGRKERAQAILALNAPAIRSVGVAIWPRLLLGEDWASGEPKLCADGGYQLRLGVLGVSIAHLRAHNRLDLHQVDEE

SEQ ID NO: 59935 - protein, 213 aa, Zea mays
  Coding DNA Sequence Number=SeqID_16560
  Gene Ontology: Mol. function=microtubule motor activity; Cellular component=microtubule associated complex; Biological process =microtubule-based movement
  Homolog annotation: Hit_ID=A7NSU1; Match level="QueryCoverage=86%, HitCoverage=74%, E-value=2e-45, Identity=52%"; Hit description =Chromosome chr18 scaffold_1, whole genome shotgun sequence
  Pfam annotation: Domain name=DUF615; Domain location=51-213; Score= -72.9; E_value=0.0045; Accession=PF04751.5; Description=Protein of unknown function (DUF615)
MAHAAAAAAVPLRRPLLFLKEARLLSTLATPLPGLRHPRALRPTGPLPSDAEDTDDPDAGDGAAVSFKKSRNELKREARRAVKWGMDLAKFSPPQIKRILSAASLEREVFDALMLVKKFGPDVREGRRRQFNYIGSLLRDAQPELMDTLIQASKDGDERKLYTLLSEDRWFDGLLCKDISVTNEVYSVHSVEFDRQHYIFLYTAQMISGLQLN

SEQ ID NO: 59936 - protein, 118 aa, Zea mays
  Coding DNA Sequence Number=SeqID_16561
  Subcellular localization annotation: CTP_CleavageSite=62; ConfidenceScore=5.18e-01
MGGLAPVRNCDATVQVLGWGGHDTTGTPLRPSQVTNRERSMTQDVGRRRRSSASDSIGDWVLDEMEKGAGAVGLYRGGASPSSRFTRIRNDPARNQRVARRSREFVAWLRPLSPSDLS

SEQ ID NO: 59937 - protein, 99 aa, Zea mays
  Coding DNA Sequence Number=SeqID_16562
  Homolog annotation: Hit_ID=A7PGG5; Match level="QueryCoverage=29%, HitCoverage=5%, E-value=9e-09, Identity=82%"; Hit description =Chromosome chr17 scaffold_16, whole genome shotgun sequence
MTTRRGGAVEPSRRSSGAGVGAVTLATVKGQRTSEAAADACKPRTISLFILIQIITRYIGSRPITLDCFLRHDYPWWKEKVIDSDLKRKDGLCPLTPEI

SEQ ID NO: 59938 - protein, 316 aa, Zea mays
  Coding DNA Sequence Number=SeqID_16563
  Subcellular localization annotation: CTP_CleavageSite=68; ConfidenceScore=5.38e-01
MQAACNRTKGAHHFDFDTFSMRAQAHTSCGRKQRSSRQQAHVPSWDSERTLSHGVKTTCPCSVPRTARARTTAAPRATRPVVLTLRQDRRHLWQAKQATLHLRHNDRVKKGIGKGDTPKGILLREGSGPRAPLLIRGSKAGPSEGFNSRLRALGLRAHYWSEVRRPAPRKGSTAASGHSGSAPTTDQGFVGWPPKGSTAASDAERGMTLASGAIGKLRLARPQGSDSGSAPEDDELRLARPQGSDSALASDDGLRLARPGVQTRPRKTDSTSTSEEPPPRPTQGSDRPRHRGAIITLPLASSGYREQDRRPIWLAP

SEQ ID NO: 59939 - protein, 287 aa, Zea mays
  Coding DNA Sequence Number=SeqID_16564
MPGKANCCCPARMQHSVLCPRFRGEDGSEDLPVRFGVARARWCGVGGQADAAVGADVVGAGESFSAVEAISAAYGPTSGSLALMSGSRPLSGDANESLPGAASVLGPWLLLQRSLASHPELVAPQALRCGGCSYPWGRNQSSVCNGTLSAGVCSLWLSRPEHPKPEAAVLAWTEAELARKEDFIGRSLAGPSTGGTDAGVELPRPRAGLVSSEDRWLRLRGGRPSRRLRPYSRRRPRRRWPGRGADVVLRSGDPPAVLPSEARSDFTEGGVDAEGAASPPPSTSEPA

SEQ ID NO: 59940 - protein, 122 aa, Zea mays
  Coding DNA Sequence Number=SeqID_16565
MTEDPGDQQIEVAEQELIEGNYFVILFMFMSRSLMMVNTRKGGGIDLPPNRHTRRIFRQPQPQPAEMDPPPPPPPAGVDPLVAAQMRMMQQMADIMADMRAQMQQERQEMRQEREEIRRELR

SEQ ID NO: 59941 - protein, 319 aa, Zea mays
  Coding DNA Sequence Number=SeqID_16566
  Subcellular localization annotation: CTP_CleavageSite=35; ConfidenceScore=5.45e-01
MAHARAYKALPGFDCTLPRTLKPHRSLARRRLPVRSVSAAAQSLCHCRPANRAIPNPVQPSEKTVHTSVKLPERGIGVCFAGEASPRSLELSTPPEYVDRVIHSTILRFLVHTVTTLPREAHRALGLNQFAVVWPVHSPPTRTPACARGPGDSGHPRHQAVPRRDRQSLPEPTPPFAGPPSPPVSRATLFFPVVTVYIGGRTADCNLADGEYVLVPEQGVAQEVVPDPTPESAPEDLPATALEGKPRHIPSRDLRRGLPFRLWWVQVRSLHDGSRGQWGIVRQGGSLEEMVAGVTWPSILPPGWTVEWDPASAEEEHEE

SEQ ID NO: 59942 - protein, 210 aa, Zea mays
  Coding DNA Sequence Number=SeqID_16567
MTFGKEGKKPTDTLRWPGASEEDSTLGMLGQSIMPPQVTTGETIPKGSSTALSRQEHNKALSGHRLLEAEGVETSEEDMEISLGNCFVYSAVKIRGTPQERAKLRFGSRKKLPKLKHGRISRNRFCIPLRATLPMSRINSQKGTTTLSNSATFGRSPKLAQSTTLCLSRSTSIKGEFVDSFVNGFFGNPYCFKCCPHGLIGLEIIWFRRR

SEQ ID NO: 59943 - protein, 277 aa, Zea mays
  Coding DNA Sequence Number=SeqID_16568
MTATPRCGSGQGRRAQYGPVLPKQYLGSAQIEIWSSSGCRTAHCAAARSAAPPPWVRAAGSRPADYSLQDLRAGRLWLGAGCLVACLYSSATFTERHPQCPSSPEPVTEAKQEVQTGINQGGGHERTWTDTKGAASASKNQTPWKPSHHSGPPIRRREGRTLAVALDFLVMASGRSGVGGWVRDAVAYSLRTARQQGVARGGCGTRRSGGPGLCIYGPRGARERPWRLPSRENRSRHNQPGKKTGLANGPHAAVSRQRDRRAPLGPACQSRSAQSGG

SEQ ID NO: 59944 - protein, 103 aa, Zea mays
  Coding DNA Sequence Number=SeqID_16569
MAWSGRAPWRGSNGFWRHGLGKQRGIPRLTTIAAKSTQGPPYTYHSPTALAPFGEKVKVLPPLEGCGRGGIRTPDTVDLPYSIVTAVEFNHQIRDGFVWFLYA

SEQ ID NO: 59945 - protein, 133 aa, Zea mays
  Coding DNA Sequence Number=SeqID_16570
  Subcellular localization annotation: CTP_CleavageSite=56; ConfidenceScore=5.30e-01
MASARSVDPSLEAAIVLVSQAINLSSSGRTSVHLSSSSSFKGSILSISIRIARIISQEEVEQQQDYPIVHLFVRCRVNKIGVLPQKLGFGFLNLAFMHSNTYNQANNGYGNITPKHMNKQRAHLQTYPAKGYE

SEQ ID NO: 59946 - protein, 260 aa, Zea mays
  Coding DNA Sequence Number=SeqID_16571
MAHRHKDGDSGQDKLQRRSHSGPVLGGRRHLQALGRLHHPKDRSKSRDGCHRSPSHRRALSHFKRGWHRHRRGGCHHLWGGQHNSTRGCMHSLLLTMDHRVQRHMLMDRRVVSTSKTSSSMVLEGVATFLVAEEGVAKTPTARRSEEDFDRTPPHTLDLTGARNHRRLPRARRARGHPSPYHRRPANRALPNPVQPSEKTVHASVKRPEQGIRVCFTGGASPRSPDFTQPPVNVDRRCDRQDLPEPTPPLAGPISPPGYN

SEQ ID NO: 59947 - protein, 107 aa, Zea mays
  Coding DNA Sequence Number=SeqID_16572
MGSKTLSTKCTFASLTRLRKKTLMDMLALWESRYGFLRPDPVHANREHRYITVQPLATEGHATLAISPLPLRVDLYGISWPEAKLTHDEACGQLKGPQSSSLHRHGP

SEQ ID NO: 59948 - protein, 128 aa, Zea mays
  Coding DNA Sequence Number=SeqID_16573
MGMLWEWSEYPDHHSRAPSEYSTAATARIDRGSLPFFFPLSGHGGRGSRFVNGGQGTRETGIYTPDEENPADIARFERTELDAGRGFRPPGSRSVGEETTAKWVPDDSEMSASRVRLLEGLTNGPTPQ

SEQ ID NO: 59949 - protein, 307 aa, Zea mays
  Coding DNA Sequence Number=SeqID_16574
  Homolog annotation: Hit_ID=A2XFR6; Match level="QueryCoverage=52%, HitCoverage=48%, E-value=5e-25, Identity=41%"; Hit description =Putative uncharacterized protein
MAHRTVRVECPGAPDTVRWHIGQSVVVKEIPMDLPHIRVEHGVILEDSSEELLPTPTPLVESLAFAARSSTSAPPTPAVHAPAPGGDDPDDSGDDDEDDDDDEDDEENVNKEANNVQQDYFMGFGPVTKHYTSMFEIVHFPNLLQDVLHALGTYVRPLYETRRVCEPPRACYYITRIHIKVMDAGDRGFRTLSAHESLTPLSTYAASVSDAARRTLWSLSHTYRQQQHDMKFRHLPLHLSGGSQTSIIPGGAGEDRLNTLAGVVAGLNTDLDSATLDLSRVHLELEDAHARITALEAQLQGWDPPEA

SEQ ID NO: 59950 - protein, 147 aa, Zea mays
  Coding DNA Sequence Number=SeqID_16575
MEARWRWRPSPAGRERAEGEDEGARQLEGTGKPRHRRSRRDGRARTKLDGGHGNELEGAPAMGEREKQEAPWETRERGAPGRGSVQGEMPASQGAGEGTQGEGDLGELEQRPSAASRTRHREGEAEEVGTAREEDARRGAERRENDD

SEQ ID NO: 59951 - protein, 71 aa, Zea mays
  Coding DNA Sequence Number=SeqID_16576
  Subcellular localization annotation: CTP_CleavageSite=34; ConfidenceScore=5.22e-01
MASAVVCHTPSALAYFLKSPSPFSDSTRHPLELCSVSGESFLEPPYFSRNCGPVQSLEKIGKMNLEIEFPM

SEQ ID NO: 59952 - protein, 144 aa, Zea mays
  Coding DNA Sequence Number=SeqID_16577
MSEIHRIIADMVPEKDMAEVTTDRASPLKMKELEGTYSEDIELDIGHLPLEEAHSNLKEAGNRYEHEVNGLKDKVKAKAEKSSKLSEALKTLWAPALASLLDAPFACARSLVQSEQYQEKRNILPMIFRRHSSLWKKKSMNLTK

SEQ ID NO: 59953 - protein, 130 aa, Zea mays
  Coding DNA Sequence Number=SeqID_16578
MEIIIPFIIIVGIVLTKLSALRSSILVILSEMTHFLSSLIDLLLKIGKTKNLLLLPLDLLVDGFESRRLVNPIFVPTVEIKMQLHDQASLRRIASAQRRDVVVSAMASPSLESAAVACERKVEEVRVSVD

SEQ ID NO: 59954 - protein, 112 aa, Zea mays
  Coding DNA Sequence Number=SeqID_16579
MARAGGWGPLVCNRERGSTSAVQALGRGWQGQSREERRPAAQGQWSRASEGELDHNREGRTLDEAGRAMEKRKARWRRWEQRARRPPWLGRGAEGGAEADGQGGALGLGDHG

SEQ ID NO: 59955 - protein, 62 aa, Zea mays
  Coding DNA Sequence Number=SeqID_16580
MEAKSHQQSIILRSTCKNCATMTALVPTITGMGDHVSGRVRGYVHCQVHSGKREEKQMFTTN

SEQ ID NO: 59956 - protein, 61 aa, Zea mays
  Coding DNA Sequence Number=SeqID_16581
MSKLFYTQLRLCANLRVLCASSYRGSDPSPKIPVNASISGKRRGTCAKDPKTQRTARWNAG

SEQ ID NO: 59957 - protein, 363 aa, Zea mays
  Coding DNA Sequence Number=SeqID_16582
MGGIRRLFASSFEERNSAGVGTFQPSFGFKDFHHAARSLPPASGHPRCFKDVHHPRWGGGRAEPALYLPRGFASHPFPRRSGERALTGPAGGPDFDNAGLVDGGRRHLQRVGPVGLAPGGPSCRRAAAALAAFVFWGGPAFAPGWRLHAEVGAPLAREDLSGDLPGSRWALPSVPRRRRLEKSPSPTGSPPPSAPLASGSSHLSSPLERRCGRGQDCSSAHPEACAAAARPSGAGVIVVVVRAGGGEPLVGLLLLRRPTPMEWGCSYLRRGNRSSVCNGTLDASHEQRRSWLENGNLVGRSLAGLSASGTDAGVDQPRPRVGLAPLEDGRPRLLRQPAEPPARTGFPEKSLDRVAVRGWVGSR

SEQ ID NO: 59958 - protein, 84 aa, Zea mays
  Coding DNA Sequence Number=SeqID_16583
MRGKPSRVRLFVWESANPPSVGTWEVIYARRKLTNGKNKREDGEAWPITPHAPLPLRWGPTRLSNPMAGWTAKSLQQPYPPEYL

SEQ ID NO: 59959 - protein, 328 aa, Zea mays
  Coding DNA Sequence Number=SeqID_16584
MEVRCQTSFCQNEDGFPKLLRACTVRLGIRSQPEYDGREFVEHGTEKCVMTAYIGSSPHHVEWSVTAAGHRFKDTCQVIARKALRALWQQLLEDDPSVVYLTAYLLTLDAQYDFLAWHHRQMIARAEDAEKRNRKLHVDLTTAQARVAALESHEVIVVEALKQAKDEHVQKLMEAYMVTHNQRRALRIQEPASSNPVQPMRAEDPQILEGHSVSTRGEKKAWELPEGAIVLEGIPVSPQAMDKQEHPESSLDPPPELFELLTMKKILAPSREIKEKAASTPPAPPPSKELQEPVPLEEECKPVLPSQSPPEEVINISSLLTHPGDISD

SEQ ID NO: 59960 - protein, 78 aa, Zea mays
  Coding DNA Sequence Number=SeqID_16585
  Subcellular localization annotation: CTP_CleavageSite=32; ConfidenceScore=5.39e-01
MTAHALPLPLSLPLLGGTGLSAPIRPRTRPLSLAARWDLPVSADRSFACSPSLPESRLEGVDRRKLKFTNFKHTSSQG

SEQ ID NO: 59961 - protein, 106 aa, Zea mays
  Coding DNA Sequence Number=SeqID_16586
MPTVARGPQVGGLNRYLRARSVSPYKWAHLASHFRSRVEPGHPERTPATATRDHLVSTFLATEAKSASLVNGTRQNREPNLSISPRLGDKNGSPSPRPVNLAPRSN

SEQ ID NO: 59962 - protein, 304 aa, Zea mays
  Coding DNA Sequence Number=SeqID_16587
  Homolog annotation: Hit_ID=Q6K2U1; Match level="QueryCoverage=54%, HitCoverage=52%, E-value=2e-30, Identity=47%"; Hit description =Putative uncharacterized protein OSJNBb0026F09.2
  Pfam annotation: Domain name=Hin1; Domain location=118-267; Score =66.7; E_value=7.8e-17; Accession=PF07320.4; Description=Harpin -induced protein 1 (Hin1)
  Subcellular localization annotation: CTP_CleavageSite=56; ConfidenceScore=5.35e-01
MAEKPPKPKPPLPSKPRPAAGIPTSTPGPGSRLAAPPLKKPTLAPPPQVLPLKPPPAHQYRQQQQQPGGARKPRGYRQQQQQAHRRGGGCSCRRACCLATGLALLALCLALAAACLAYLYYRPRAPSFHLRPLAPVRLRLGGNSSSAVPAMDATVGARLVSWNPNERVAFRYGDGEGRVALAGDGDGDGDVALGWAPVRGFAHAPRSVAAVAFVATARGVVLDDAVAARVRDRYRRRQQRFRVVVDAHVGVRVGALRTGMVPLRLLCDDGVMAAGSPDGTAAGPMSKCQTVELIPQAPAELKTA

SEQ ID NO: 59963 - protein, 154 aa, Zea mays
  Coding DNA Sequence Number=SeqID_16588
MARLACTLYGKRLDGGVFVLSVDMMRTKTTQRKLTGAHGVPRHQLAFRHEGRVVAVMTQLETWKPGWSNSGQNYATRIGHMPSRTRAHDGARTSRGGEDTPNPPPVPPTLAEAIAALVNATADNTCFLREMAGNQFQRYGGRVPPQGPRDTTYL

SEQ ID NO: 59964 - protein, 70 aa, Zea mays
  Coding DNA Sequence Number=SeqID_16589
MHLTAGDLPPQFAPAWEICVAGEVPSDIYQRGRTSKDTKVGSAEAVKQESFGMFAEKGTDLKMKRPFRPR

SEQ ID NO: 59965 - protein, 298 aa, Zea mays
  Coding DNA Sequence Number=SeqID_16590
  Gene Ontology: Cellular component=chloroplast outer membrane; Biological process=chloroplast fission
  Homolog annotation: Hit_ID=Q6EPA2; Match level="QueryCoverage=75%, HitCoverage=83%, E-value=2e-69, Identity=63%"; Hit description =Putative uncharacterized protein OSJNBa0011J03.48-1
MRWDAAEAEAALERIWDLHDRLSDAILAVSRAHLLLPAPPPPPVPSAPSAKGAHRIGVGRNGCVFVKDGAAGGGGEALAAAAEALAEARSLHAIRSALEDVEDHLEFLHTVQSQQRAERDAAIARLEQSRLVLAMRLAEHRGKKYKVIDEALAFVGEVSDKSQFISPEDVRATHSRSEDNADDNRGSGSRIMSNVLSCSLSLAKNSFRLDKIGGTLGNAAVFAIVPVPSFVRPSPVHYIFHSLFQTLLELALLLSLLTHALPTGGLHLGLIWLEPSTLHVRQTISSPGVQNPTSGSAA

SEQ ID NO: 59966 - protein, 162 aa, Zea mays
  Coding DNA Sequence Number=SeqID_16591
MDGRAVAPASLYRPDNAMTSAQERVLWLRDYLTELVDAWRTIVKQLTPVRIIPASRSPSGYDELTVDRVRANLSAKIFTPLSYPLALGMNRGGWDRGGGLAWPEPDEHGSGANLASGALRGADHGEVVGSLAVLGGGEERRLAGTGEVHSDGDNGGTVVAMG

SEQ ID NO: 59967 - protein, 237 aa, Zea mays
  Coding DNA Sequence Number=SeqID_16592
  Gene Ontology: Cellular component=endoplasmic reticulum; Biological process=intracellular protein transport
  Homolog annotation: Hit_ID=A2X450; Match level="QueryCoverage=99%, HitCoverage=99%, E-value=4e-79, Identity=69%"; Hit description =Putative uncharacterized protein
  Pfam annotation: Domain name=Bap31; Domain location=4-213; Score= -27.7; E_value=3.3e-06; Accession=PF05529.3; Description=B-cell receptor-associated protein 31-like
MIQLLFVVLVAEASLTAALLFKTPLRKLAVLVIDRLKRGRHAPVVVKTVAGVILALLASTLYSMTQIAGSTSDSDSGGGPTPTDQVLFSRHLLEACLMGGCSSGCVDSELSTILSGYSLFLALVIDRLHQYIRDLRRFKKDLEAVRKHNKMLEEAKHGNSEEAKKYQEEIATLNKEMKKLKLQVQEKTEEVHVSEDKALAIQKQSEGLLTEYDRLLEDNQHLRTQLLSIDRRLSNSS

SEQ ID NO: 59968 - protein, 220 aa, Zea mays
  Coding DNA Sequence Number=SeqID_16593
  Subcellular localization annotation: CTP_CleavageSite=48; ConfidenceScore=5.71e-01
MVAPTSARFPSTTHTPDPYSNPLPPALPFPPLTDSSQSTLDCALSLPRAQRTTVVHRVRAPVLLPLLRPRRAHYLGEFRLGVHNSRHASIYSLPLWFSRPCSPELLRAAGEPPPLTHALAMSLSPFKGPRISSQAEQPLRLPEAGEFWRPLFLGAPDTVRCTPDSPVNYSGVPPKIPEGGKFELKSSGAPDTVRWCTGQSGAPDQRCLRLSLSSFVESNI

SEQ ID NO: 59969 - protein, 123 aa, Zea mays
  Coding DNA Sequence Number=SeqID_16594
  Subcellular localization annotation: CTP_CleavageSite=58; ConfidenceScore=5.79e-01
MVFTKCATKSSNQSSIISTTTTSKTPPSNNFVSSPFKSESSSIGSSLTSQLQLELIMVGGMFSKIKLDGGSVKGLDGFNIGKDVPLPGSNFVLLLMVLSAGGLGLLISLSNPSILLIEDDPLS

SEQ ID NO: 59970 - protein, 117 aa, Zea mays
  Coding DNA Sequence Number=SeqID_16595
  Homolog annotation: Hit_ID=A2Y8T4; Match level="QueryCoverage=84%, HitCoverage=24%, E-value=2e-24, Identity=60%"; Hit description =Putative uncharacterized protein
MCAASTAPANSQTTWTMRATFPEYVVALTTIVGSVLFTEATELGKKARELKKAAEALHQEERSGNKGRKWRKNVKALEKELLLLEDDMKALEEMYPQGEQVNCFNSLGCTYCHILVD

SEQ ID NO: 59971 - protein, 105 aa, Zea mays
  Coding DNA Sequence Number=SeqID_16596
MSDQRVGGLPPAAIDIVREEIAGAFRDKLGGYPLLQYEDTVPVRLSLATRWTAPDPNTWAVPKDAMWTEEVIYSRIPSVGPYLLKKALDPCTHSPDLRVRPGTPK

SEQ ID NO: 59972 - protein, 197 aa, Zea mays
  Coding DNA Sequence Number=SeqID_16597
MPDHHNSLTTISWNTLRVGDVSQTAVHLDEAGGDVNVGDHVADADEGVELSSCVQREAHGGPEIYSGWGHEAKGGEDEQKVGAGGADRRLGLGKRKLQFEEHKEQLIQEAKVKFLANFKVDRNNKVVWQRETDLASLRPTTTTPRLSRPVTTPLWDDDRHVPWETTTSHAYRRIYTCLDRPHVSATLRASGGQSYFK

SEQ ID NO: 59973 - protein, 139 aa, Zea mays
  Coding DNA Sequence Number=SeqID_16598
MAARRAGRAVLSSLARSLGLRKPKGQAGSGAKNRHRALSGGYKDQGEDGSNVLPGPDAGFKNAKRNGRSSNGSRTRNGDPANYSPRRINSTTGQAALLAGATGDASPSPEQPRQKRDRERGIPRKGSFPVKEPGSEPPY

SEQ ID NO: 59974 - protein, 237 aa, Zea mays
  Coding DNA Sequence Number=SeqID_16599
  Subcellular localization annotation: CTP_CleavageSite=32; ConfidenceScore=5.19e-01
MTNSASPDPRARTPPWPLPNDLRLARPRNSASASAMEDRLDPGFGGASTSPDLGHRPATSTGSAIITLPRADSGRREQDRGMSARTQPLRQLSLRQAPLLLRQPRHHTSRVPRSLRLPHWHGLLREGWPRGDEDGTGALLGPLASLTRVDACNPLLQAHPTWARDEHEGRGISTSLTPVSGHLASPFTLAHVLDPSGLGHAALTRRLRDPPVSKRRQGLSAKRIALSLSHRSRSFSD

SEQ ID NO: 59975 - protein, 58 aa, Zea mays
  Coding DNA Sequence Number=SeqID_16600
MVSHSGYGGYKCDHCTTVVGVSEALYAKAIGALEDMVAGVLGRPPCHRVGQSSGPTNL

SEQ ID NO: 59976 - protein, 289 aa, Zea mays
  Coding DNA Sequence Number=SeqID_16601
MTSHGSSNEGNAQSHTDGLARQGFPRILWEVLQGARYTMPPQYAVQLFEKHRVPRCRVRMTLEPHPLQPGWRSLDSESFGYRAEDTIEAIALHGLTTFCGFHPLELSTHPIGLFPVEKEDDPMWKDRVENAKDIWAIYPGQTAHLTVRCMNALYRLQVMRGEAMSHLMALLEATKITLDNREELVVDLSTEMVEKDLQVEQLSDEIHELEELVGTRENTIEVLEDQLINTQQQLAEANHHLDMHHQEIQDMEANEDVDIEGGDEPASSLDTAGLGRPPSPESTVASFAK

SEQ ID NO: 59977 - protein, 79 aa, Zea mays
  Coding DNA Sequence Number=SeqID_16602
MVSHSGYGGYKCGHCTTAVGVSEALCAKAVYLARIKTRFESSASRALEDMVAGVTWPSTLPPGWTVEWDPTSAEEEHEE

SEQ ID NO: 59978 - protein, 127 aa, Zea mays
  Coding DNA Sequence Number=SeqID_16603
MEEEKKQLGRSSKKMSLHSRTRLKISAAVDMMATNKSLEQNLRKTSVLDEEAESLLGEANVRLERADAEPLRECSTTGDGSFFEAQEAKKMEEEAKARMRELLLAHDGGVAVTAEASIAPSKRSVEL

SEQ ID NO: 59979 - protein, 153 aa, Zea mays
  Coding DNA Sequence Number=SeqID_16604
  Subcellular localization annotation: CTP_CleavageSite=21; ConfidenceScore=5.13e-01
MMCVGAKAKTPPFAQSLRRPRCTDEGKTTGRPTLRPTRRRTKACDEVVSSCDLARHGGPRMIRPIVTGPARPPRFTGLICKGLHVITESKCQHLAPTVRATKTPPAMAPKRTSSKADEAAKAALLAEKKGKALVENTLQELSGRRCKQQEAAQ

SEQ ID NO: 59980 - protein, 173 aa, Zea mays
  Coding DNA Sequence Number=SeqID_16605
MGNRGTYTTAPATRGKESRILIPEFPILLASKTTDAKERQDGLRVSKWTRMPTLTSDAIIASPRWGVLPLCGGGRSGGPRTRRPSSSGGHGCGWPPLDRVAVWVGGGIAAVFFASLERCSCVNVRTHDDLLDDERRDSEAPLMMFDDGNGNSCVQRRGARWCGKGKGTGSGDC

SEQ ID NO: 59981 - protein, 487 aa, Zea mays
  Coding DNA Sequence Number=SeqID_16606
  Gene Ontology: Mol. function=metal ion binding; Cellular component =integral to membrane; Biological process=ubiquitin cycle
  Homolog annotation: Hit_ID=A2XKL4; Match level="QueryCoverage=41%, HitCoverage=86%, E-value=2e-74, Identity=68%"; Hit description =Putative uncharacterized protein
  Pfam annotation: Domain name=VQ; Domain location=333-363; Score=47.4; E_value=5e-11; Accession=PF05678.5; Description=VQ motif
  Pfam annotation: Domain name=zf-C3HC4; Domain location=24-64; Score =28.1; E_value=3.2e-05; Accession=PF00097.16; Description=Zinc finger, C3HC4 type (RING finger)
  Pfam module annotation: Pfam domain module=VQ::zf-C3HC4; Domain location=333-363::24-64
MSANVGESTSGVSSSDAAGGSFECNICFELPQEPIVTLCGHLFCWPCLYRWLHIHAHSPECPVCKALVEEDKLVPLYGRGKDRVDPRSKNMPEGEIPHRPTGQRPATAPRADANSNFANANANPWFPGPGVPLANARWGNYAFSAAFGGLFPMLSFQVHGFPDAAAYAQPAGFHYGYGHGHGHGFHHGGHMGQAQAHGVHRQAPLGQQQQQADIYLKALLFMINMFASREVVFRTRTRRQGRQAGRQPCPKSSRLVSPPSDRNEPRTAHGDRVGNLPPPISIYLHSAGWALVLCLVPASARTEHEARSFYFHSMDHGGRRRSGAGAAGGGQPPPPPPKVYRVEPRDFRELVQRLTGAGTPAAAAAATGPATLAAHQRVPVTPAMAAAPPAPGTAEQFDYAPWFSAPLLSPASYGAPGFGAAAGYPHHGSAEHSEGGGSHLGEGHGIEKGGGVRVKEVEASGGVNSEVVALVGGGIELNHIKSIMEGS

SEQ ID NO: 59982 - protein, 421 aa, Zea mays
  Coding DNA Sequence Number=SeqID_16607
  Homolog annotation: Hit_ID=A2XKK6; Match level="QueryCoverage=72%, HitCoverage=95%, E-value=5e-42, Identity=40%"; Hit description =Putative uncharacterized protein
MAAARRLSELLQEQQEPFLVETARARRPRRGRGAVGAGVAGGGLGCCPAAACRRLFRLCNQGFKKRRAAAAAGGGSGSGVASGLRLALSKVLCGRGMRRVLRLDDLCGGGGCFSGASACGAREFRRLRRSLGDSGECDPRAMVLPGDDGEEEQMGWKADMDVDSSRQLSPVSVLELHSDDDDDESPVHSHWGDEKPSTSGTGSSPPSESFLGPTPTSPCFSYDLQDKFCEMEVDEAEEEETVRTGRSIEEQVSSWEKIAGDISRIPAMMELDLSRSTRQWREPEPEVREVGARIEVLIFDDIRRETVLQQQHVLPQLRAAAGSTAICMPAHLLAGFRASCRQRYRQPRMPFHTQPPRLDTTCLSEEQADLSRSALVVATSLLQFPFLFLKSIPTFAICVFSRGFRPSFGRSQISTEVLEQV

SEQ ID NO: 59983 - protein, 69 aa, Zea mays
  Coding DNA Sequence Number=SeqID_16608
MRRCPALPCLLSGEQSSQAQASCHVVGDALTTSRPVQRGYYEWYDLNITLTNVDLVIETVTINGHIVLH

SEQ ID NO: 59984 - protein, 221 aa, Zea mays
  Coding DNA Sequence Number=SeqID_16609
  Homolog annotation: Hit_ID=A2YCV7; Match level="QueryCoverage=25%, HitCoverage=16%, E-value=9e-08, Identity=43%"; Hit description =Putative uncharacterized protein
MGHDHMSRIKMHMAEGSFGGMSSPCLNVSIACDFARSGLESSGLSVRPVNDSQFKGSVSIAAVPCTEQELHVKHEGGDRACGQGRSDRCVRHGGGKRCKFEGKSLLGGDNAIPEALAAPSEKRRRAKTPQREAKPSEVFQENVTTAATAGNSTQHTGFLLVAAPVANRDILTNGMAVTGQAAIAPQRIVAPMFMRSPTPSGSVAASAQRWEAGASRGMLGL

SEQ ID NO: 59985 - protein, 146 aa, Zea mays
  Coding DNA Sequence Number=SeqID_16610
  Subcellular localization annotation: CTP_CleavageSite=60; ConfidenceScore=5.12e-01
MVPIRGGRVTLPVEAAISVDSVAAAGSTAGVSTPVWAAAACTLSRSVGGASAPIWAAATRAPMGMCGCPLCRLLSRCFPRQPELFVGVVVDRSRAAGSTAAQSLELCCRRTCSIRRLRCFYFRSRCCQFRRRQPCCPRRCRCSCGG

SEQ ID NO: 59986 - protein, 65 aa, Zea mays
  Coding DNA Sequence Number=SeqID_16611
ALKIERPHLSVKVAILAKGRYLRTQNYEHEVRSRRSLNQTKDGLITKLHEGWCTAEAVRREASSR

SEQ ID NO: 59987 - protein, 154 aa, Zea mays
  Coding DNA Sequence Number=SeqID_16612
  Subcellular localization annotation: CTP_CleavageSite=79; ConfidenceScore=5.66e-01
MYSSYRSYIQHSRNLNIQLGQSRPNPARALSPPLSLPWRARRQRSASRAPASALLSLCSRARAVSPSSPRNRRRAVRARFSAPTSRVELATDPPLALEPRAPLALAPSPICALGTPLPPLPRCGTQSPRHESPRPSSFLGAVELRVSVPRELRP

SEQ ID NO: 59988 - protein, 238 aa, Zea mays
  Coding DNA Sequence Number=SeqID_16613
MAPRMLCDDGGSQPPYESKRTALLERVGRAGTRTRQALSWGRSLPSPAWTLVTPYCKRTRPGRGTNTKAAGFPPLSRGLRPPRSSPFALALALDPSVLGHAATLTRRPKGPPGLGTPTAAKHAGSRARPQEMQSPARGRRRRKFSRGGWWRSCADSALSEASTFRNPLQGVVGDSLTIRGLGLGSPQAAVPLSALCLLQCCRPPPAQPLFVLCRSPAPRSPLCVLLVCCCVCGLPAGG

SEQ ID NO: 59989 - protein, 145 aa, Zea mays
  Coding DNA Sequence Number=SeqID_16614
  Subcellular localization annotation: CTP_CleavageSite=23; ConfidenceScore=5.06e-01
MAKCNPSLCAGCACVCCVAWCVRAAAQPQAAVPLSTLCLLQCCRPPPAQPLFVLCRSPAPRSPLCVLLVCCCVCGLRATGWWLSKVAEGDSGGLLHARTHQQQASGLEHATDWGCCCRWLCCGLVIIGIQGQALHPGSTIAGGGA

SEQ ID NO: 59990 - protein, 183 aa, Zea mays
  Coding DNA Sequence Number=SeqID_16615
MARDPLRGFYKVPLASENPLQFIGRSSTGFLADSHRSKINQGPPRTDLSPTALAPFGFSILSDLGTGPQFLGSAGVLGQETRNSVNSVHWTAGSFLTNRGALLKDCQGEGVRVNHSRPIINYRSRLDPPITNRSNGRTPLSFLLTSGMAAPPRPHGGARRRESGNAPGDPKPHTDYSKLVQGQ

SEQ ID NO: 59991 - protein, 79 aa, Zea mays
  Coding DNA Sequence Number=SeqID_16616
MGRGLVVDDDGGGGCSAKGSGAVVVRMAAGTRAGARVSGGVNDPDVCGLWFQESLPLCMLIPGFKGKLLGIFLGRVLFS

SEQ ID NO: 59992 - protein, 66 aa, Zea mays
  Coding DNA Sequence Number=SeqID_16617
MPATRKVSLCLQSTLLSLNLNSYGPNPRVMKAGEHREDKEGECFIWFGHGGGLTPSGITVKKKEIG

SEQ ID NO: 59993 - protein, 140 aa, Zea mays
  Coding DNA Sequence Number=SeqID_16618
MGRHGPLWREIGCRRADDSPAPRSQAWHEGGGESEIETPPCGSSSSADCSGSGAGDLRNSSSVRLPRCHAVAGSPTFTSVFVYFMFRAPVAALGCHQPWHHRAGRRVAAGVPSGVSMQSRVIETGPWMVDPAATIAYRFG

SEQ ID NO: 59994 - protein, 121 aa, Zea mays
  Coding DNA Sequence Number=SeqID_16619
  Homolog annotation: Hit_ID=Q6QP51; Match level="QueryCoverage=47%, HitCoverage=26%, E-value=2e-19, Identity=79%"; Hit description =Putative growth-regulating factor 1
MQEACNRTTIVHPFGFIASGGDRERGYFEKGSFSAKETGPRALLLIRGSKAGPSEGFDSQPEHSGFEPITDQGFEGWPLGRVQQMPQSTRAPRPLLINGSKAGPSEGFDSCPRAFGLRALY

SEQ ID NO: 59995 - protein, 125 aa, Zea mays
  Coding DNA Sequence Number=SeqID_16620
MKVVMIVYIIILVHVVVHVFVRFDVAHLFGYFINLHLRLRKTKHFLLALLNLLVDEFKVADLIIKFLFLGCSVNYIVTSISQQQQQNGSRNNKFYLLQAFASKGPKESGESGDTVASAAKECPPP

SEQ ID NO: 59996 - protein, 152 aa, Zea mays
  Coding DNA Sequence Number=SeqID_16621
MSLTPLSDVPEMRVKEFALAAGATASQAEAISMNPSKDNDNIGIEEDSRIIRPTKPSHVDFDKSKMKGEHIEDSKKRKKKVTTRQSKVLKVQVESTPQASEVAPVAKVAAEIDELPPMGAKEAKIREVITLIAQGVTPLELFLESEEEEEEE

SEQ ID NO: 59997 - protein, 42 aa, Zea mays
  Coding DNA Sequence Number=SeqID_16622
MAATPYLIKRKKNGKIDDEPKIQSINRKSGDEAITETVTTMF

SEQ ID NO: 59998 - protein, 178 aa, Zea mays
  Coding DNA Sequence Number=SeqID_16623
  Homolog annotation: Hit_ID=A5C0D0; Match level="QueryCoverage=79%, HitCoverage=56%, E-value=6e-11, Identity=28%"; Hit description =Putative uncharacterized protein
MDTYRLPHFDGTNFPYYSARMACYLEVIDLGVWRVTRDGMKPPKNPEKLTINNDLVRDMYSRLNLIINELNSIGINKLGDVDIVRKIISLLPQQKYGSIITVLCNMEDLSTITLTIVIGKIAAFEMSQKMGQEEPTSSRPYAFACDEKKKGKKKAPTLSSSSEEEEEEENDDDEDGQP

SEQ ID NO: 59999 - protein, 82 aa, Zea mays
  Coding DNA Sequence Number=SeqID_16624
MAKTMFERQGDWTSHDACMNAIEHAAACRIDSDGQSSEPKCRCAPIAAMRPAASVHMADGDAGACDILIYVEGAHSFRSINW

SEQ ID NO: 60000 - protein, 244 aa, Zea mays
  Coding DNA Sequence Number=SeqID_16625
  Gene Ontology: Mol. function=carboxyl- or carbamoyltransferase activity; Cellular component=ornithine carbamoyltransferase complex; Biological process=amino acid metabolic process
  Homolog annotation: Hit_ID=Q8SA97; Match level="QueryCoverage=46%, HitCoverage=20%, E-value=6e-19, Identity=47%"; Hit description =Ornithine carbamoyltransferase
MAPPVDVAGLRPRLGDVEAPPKPRSSLSSVAEVESEPLGRARRMPPSEAQGGVRSPGVEQSGVRRLLGLKPQVRALGRAERSSPVFRDLARVPSPGSGGAEFVVFRDLTRVRALGRAERSSSSSGAEPKSEPWVGRSGVRRLPGLSPSPSPGSGGAEFAVFRDLARVRALGRAERIGVAQAALSFCQAGQWSGEVTAGLGRARDMFAAGGGPRARRKSSGLYADGGYQLRIRSLEGTPNYGPRQ

SEQ ID NO: 60001 - protein, 107 aa, Zea mays
  Coding DNA Sequence Number=SeqID_16626
MVPAMFPRVQHPTFQSLATEDGRPFLLNVWSHIKLFLKTWYLSEDIAVSSKSKWDTLRRTFSDSLIWRSFRWRNRLPFYFNFKFFFKPLRLAIDDLLRRRQPIIHEP

SEQ ID NO: 60002 - protein, 166 aa, Zea mays
  Coding DNA Sequence Number=SeqID_16627
MTRFSGWCSACPLLPDSLPELHKLSCFLVEPGLCWGPSASEGPQKHDLTMPLEYNVWTGIFEQEPTHLRTSPQHWRPPPVNSLPLFEFRTPSASIDLRHAAQESFSNRGCRSAAAGPQPGDPLSSGGPKPEEEGHQSNTSGGRLGPRDQKYGDAPSAGAKEEGKDG

SEQ ID NO: 60003 - protein, 289 aa, Zea mays
  Coding DNA Sequence Number=SeqID_16628
MAGASDPSIATALAAQSKQLDAQSRNIAAQSKILQQLCDRFESQEARWSSLEKSVAHNSDDIAILQSQLADRADRGSGVDTSVEFVSHTNTRVAALENVQSVFDSWRTRMDASVDGMRAYLTKVSRFLERGVMAKAEAPSGVLGPYQSATAERPPAPAWTADGPIGHHADLQPRGLGFGVPYTHHPPPTLVQRPRDLDTVYVLAQLQEEVHDAHKPHETKTYARGVPRPYASSVATLDIKNPSSAKLDTSTSKPSTVEDKLTALSLKVYHRIENVTIAFHSSTELVRCN

SEQ ID NO: 60004 - protein, 393 aa, Zea mays
  Coding DNA Sequence Number=SeqID_16629
  Gene Ontology: Mol. function=sugar:hydrogen symporter activity; Cellular component=integral to membrane; Biological process =carbohydrate transport
  Homolog annotation: Hit_ID=A3CHT8; Match level="QueryCoverage=35%, HitCoverage=35%, E-value=1e-23, Identity=50%"; Hit description =Putative uncharacterized protein
  Subcellular localization annotation: CTP_CleavageSite=51; ConfidenceScore=5.41e-01
MSSRSLMHRVFPPSKPPDGGYPPSFRLIVGGTQLRGSWYLSAIVQLQGFSSCSPAASLRRRSPKMMTSSLMVGESKPGCDFGPTLSFKDVHHPRWGGGRAEPELYLPRGFVGHPPLRRSRERALAGPAGGSDFDNAGLVDGGRRQPQRVELVGLAPGVPSCRRAAVAPCAREDRPRCHALLGRRSCSGAVLPLHRYGASARRPIAGNSGILLSYIVHFALAGLPTPLNWRLMIGIGAVPPLFLAAAAALAMPETPRSLVVHDHRDEARRVLVRTVGDADRRLQEIVTSVQEATKQAGSGGERAARDPAPADARRPPRDAGHPGAAGVPGFQQACGVAAMVLYAVSTTHAMQDHDIDKAKPESSQQQLGHRASVRTCVTWAQSGLCKGRYMYES

SEQ ID NO: 60005 - protein, 719 aa, Zea mays
  Coding DNA Sequence Number=SeqID_16630
  Homolog annotation: Hit_ID=Q6QP51; Match level="QueryCoverage=12%, HitCoverage=42%, E-value=3e-16, Identity=53%"; Hit description =Putative growth-regulating factor 1
MLQGPPPTTWGLGPARHASWPRAKEAKPPRAERVTAQRLQALLHFRPNQRVKGWTAMQAACNCTKGARPFDFDTSSMGPRPTRHVTGVPVTTCEKLHRHLRQYRAFSTAEPVSRLEETLRTAQQCQPSTSVTGRSAAGEDATVDMAKSGPTVMVAAGGRKQQSSRLQAHVPSWDSERALSHGVKTTRPCSVPRTARARTTTAPRTTRPVALTLRQGRRHLWQAKRATLHLRHNDCVKKGTGKGDTPKGILLREGSGPRALILIRAALEHSGPAPTTDQRFEGWPLGRVRHPPQSTRATRLLLIRGSKASPSDGFDNRLRALGLRAHYWSEVRRLAPRRGSTTASGHSGFVPTTDQGFVGWPPKGLTATSEHAERGMTLGTSDTWPRLGLRSRGSLGHFRDQQERFCNGIPSEGGIEPSDPIKRDRVRQITCRSRLRPLKGHDLASPEPSLGQRQPTQENSRLTRGRQSRSDRSHFAAPLTDLTGKQCRMCCSDCCATRQGLGLNLDLGRWTPPHPTPGLGLNLDAGRRTLPLPTPGIGLSLDLRRRTLPRPTPGPGLSLDSGRRSPPCPTPGLGPNLDLGRRSPPRSTPGARTQPRPRTTVSASPDPWAQTQPRPRRSLRLARPRARTDHVTGGAIITLPLASSGYGEQDRRPICLAPGPPGVETPTVSPHPAESAAACPEVWDAEGDSRDLTEMTLDKESALPSAGFRPSAKADGRQL

SEQ ID NO: 60006 - protein, 136 aa, Zea mays
  Coding DNA Sequence Number=SeqID_16631
  Gene Ontology: Mol. function=sugar:hydrogen symporter activity; Cellular component=integral to membrane; Biological process =carbohydrate transport
  Homolog annotation: Hit_ID=A3CD52; Match level="QueryCoverage=38%, HitCoverage=11%, E-value=1e-21, Identity=94%"; Hit description =Putative uncharacterized protein
  Pfam annotation: Domain name=RAMP4; Domain location=77-133; Score =81.2; E_value=3.4e-21; Accession=PF06624.3; Description=Ribosome associated membrane protein RAMP4
MAENLDALKCGGWGVFIAPTTKLTVGEGFCRMAHRTVRKTNAMQRSTYENDDKHCKTVYSKRESRSVTKGPCSVDRQTTSRRLADRKSAKFQKNITKRGSVPETTVKKSNDYPVGPIVLGFFIFVVIGSYFGNLLA

SEQ ID NO: 60007 - protein, 104 aa, Zea mays
  Coding DNA Sequence Number=SeqID_16632
  Gene Ontology: Mol. function=sugar:hydrogen symporter activity; Cellular component=integral to membrane; Biological process =carbohydrate transport
  Homolog annotation: Hit_ID=Q2QPZ5; Match level="QueryCoverage=41%, HitCoverage=8%, E-value=3e-12, Identity=81%"; Hit description=Sugar transporter family protein, expressed
MKKDDDLESALLAAKEPAPAPAKGYAYALICALLAGFPHLYHLRLQTMKKRKRHACIIKPSHHRGVMSGAQKFVQADLGVTDTQLEVLIGATSVYSLVGSLAAG

SEQ ID NO: 60008 - protein, 32 aa, Zea mays
  Coding DNA Sequence Number=SeqID_16633
MAREIIQRSERGIHDAREVAKAARKSTEPEGF

SEQ ID NO: 60009 - protein, 446 aa, Zea mays
  Coding DNA Sequence Number=SeqID_16634
  Homolog annotation: Hit_ID=Q6J9V9; Match level="QueryCoverage=21%, HitCoverage=35%, E-value=7e-14, Identity=45%"; Hit description =Putative uncharacterized protein
  Subcellular localization annotation: CTP_CleavageSite=45; ConfidenceScore=5.29e-01
MAAFQGDHPPFKGDSPYLRPQPLRAESSPTRSKVLPLRRGGWVPRVMQAGPGQKKPNRRAQGIQLPSGYKHSSTFAQTSGRSKRRFAFAIMTASKKGPGKGDTLKRILLREGNRPRATLLIRGSKAGPSEGFNGRLRALGFCAHYWSEAGPRRVHSRLRHRARDDPGYVRYITKARATLPRHPLGLPANSSPETPCSAPSEGNMALSPLLLAERRRRGVCKKVESVLDRPLALCRGSGAALANPAPANPLTASTYQPENLGPDRAPGLRPARMREQLDQPNAACAAPTAEPLDRVRLTAARSGLRRHRKLRLARPQGSDTGSALEDDELRFARPQGSDTGSAPEDDELRFARPQGSDTGSAPEDDELRFARPQGSDSALASADGLRLVRPGGSDSTSTLEDRLDLDLGGASTSPNLGHEPTTSTGGAIIILPRADSGYEEQDRRPI

SEQ ID NO: 60010 - protein, 150 aa, Zea mays
  Coding DNA Sequence Number=SeqID_16635
MGKNNKRKREPTPPSEEFGDSEYSEEEFSSESEGSLAPIPLRESSDDSDDSQGLVAEVWTYIRAVERSGLEGSDESEYSSNEEDSDGGGEDEDDDDDDDGGDGDGDGSGRGGGGGSKDGDGGSSRGSNRGGSSRGSTRGGSGGGSNKASG

SEQ ID NO: 60011 - protein, 141 aa, Zea mays
  Coding DNA Sequence Number=SeqID_16636
MASDGDASPPRKRMLLEFPCDEEGVNVSQTVGVSASSATPAAARASDEQGENPEGESNVDGDDSSKQKQSKKSTSDVWQYFEKYEVVVEENGKSVKQIWAKCKTARSVRFYTEIERELGSSYLARHDGRIHLAKYVGDPLA

SEQ ID NO: 60012 - protein, 222 aa, Zea mays
  Coding DNA Sequence Number=SeqID_16637
MQQGLQTHMDSHFKGMMTHMDQRMDAMQSRFDDNWDALNTEYSEFRSHIQDHVTDPIMNSLNNMQQSFQDNMGALSSQFDNLSTNDSMQEISQRQQQLQQDFGTHYYSMHPPPGGAKGSQQTNTKIKERVQHKGAKCTEGSLGLAHRTVRSQSRHQKAHRTVYRTCPVHHQTVRWLQKSELQQSEPNGLVTWLAHQTVSGGTSDCPGLSDPGNQGRKLTRSK

SEQ ID NO: 60013 - protein, 262 aa, Zea mays
  Coding DNA Sequence Number=SeqID_16638
  Gene Ontology: Mol. function=aspartic-type endopeptidase activity; Biological process=DNA integration
  Homolog annotation: Hit_ID=Q850V8; Match level="QueryCoverage=85%, HitCoverage=83%, E-value=2e-15, Identity=29%"; Hit description =Putative uncharacterized protein OSJNBa0037J17.18
MDVSHIYCSGLGGLRKKLTGRFKSKRPRVDDVDYNPTTDSEAQSSARGSVSMDTEDVTHTHPDYPIDITGWTYPKRRFSMAEYCSRRTVNQYTLPSDTNVQFFHTQLQFDVFWGHIDGYQLSQTSIMEDLIPKFETYGLYHFMGQRTDFSEMAVKQFLATAEIDIDEESITWMTGFKRYSATFAEFVAANSLDYGTISAGIDLYNKDNFEDFVQFYEPARLGIPRRFGETAGLRHHPAVINKIARVIILPKSGDKSKIRDNF

SEQ ID NO: 60014 - protein, 514 aa, Zea mays
  Coding DNA Sequence Number=SeqID_16639
  Homolog annotation: Hit_ID=A7QYN3; Match level="QueryCoverage=80%, HitCoverage=98%, E-value=6e-40, Identity=32%"; Hit description =Chromosome undetermined scaffold_252, whole genome shotgun sequence
  Pfam annotation: Domain name=CBS; Domain location=315-510; Score =15.1; E_value=0.0017; Accession=PF00571.19; Description=CBS domain
MTSLILLVLDALIPRGVPHGDKFPDGDGDRRKSSPGLQQIFSPPTPQRAAVETKTPLPPPRLPHKSHPKKKTPPGCSPLSALKIFERGFDPETAKGPPRKCMAVNFLANELSDLCIGKPAVRSLPLSAATGDLAAALRRVSRSGAAACVAVTGPARAVVGRVGPADVLCLLCTDPEALARPAAVFSKPVSALLPKDGAGEVRRVDPRSRQGSTVNSYPSSALLGLCKRRVGFVRDWKNAKAVHHEETRILEALDAILSGAQVLAVPLRAGGRKKQLVGAADGDFCWLTQEDLVRYFLNYICLVYNVAARSVSSLGLVRADFLSVRPGEAALSAVPLIRRAVATETAVAVVAEDGHLVGEISPALLAACDETAAAAIATLSAADLMAYIDHYVSPPEHILRAVKAGLKDKGLDALLALVEDETLSSFSSLSSASSSSDEEAGRAQLRRPSSGSYGRRAADEPVVCSPASSLVAVLVQALAHRVSYVWVLDEDNDCRLAGIVTFADVLRVFREQLL

SEQ ID NO: 60015 - protein, 109 aa, Zea mays
  Coding DNA Sequence Number=SeqID_16640
  Subcellular localization annotation: CTP_CleavageSite=38; ConfidenceScore=5.00e-01
MGMDVTVGMAIGGPAVIAPAGPQEQHADRQSGSSPTCRLASSPEAGPGATISTLNQGSAAWQGKEYILLFVARAGPPQEDTGPLYILVRDPRRPCPALPNAVAWLVPDT

SEQ ID NO: 60016 - protein, 115 aa, Zea mays
  Coding DNA Sequence Number=SeqID_16641
  Subcellular localization annotation: CTP_CleavageSite=24; ConfidenceScore=5.05e-01
MKVQIHQLKVKRYGSAGKVSCGLRLRMAESPRLKSSPRITAFIGRKKGKVVVTAARKKKKVEVKVKGTTKASGAARALEGFVHELTETCANPGEVMTLSDLQTPSSGMLKVTRGE

SEQ ID NO: 60017 - protein, 104 aa, Zea mays
  Coding DNA Sequence Number=SeqID_16642
MKGAAAAATIQLETWKPKWNSFGQSYVTETGCTANTLHEEVHVLYSRLHLDVPADPVAMGAGPSVTAGEEPDGELDLFRPPPSMNLADDRSPTAGNEESKDDED

SEQ ID NO: 60018 - protein, 207 aa, Zea mays
  Coding DNA Sequence Number=SeqID_16643
  Homolog annotation: Hit_ID=A2ZUB4; Match level="QueryCoverage=100%, HitCoverage=28%, E-value=7e-32, Identity=53%"; Hit description =Putative uncharacterized protein
MAPQRRRERAVGEARPSSSAPTPAGPGWVEVQRRRVGGGWTSRRISIYASRVYFLLLMLQIPLFRSVGGGDSPIQRASDGGPLCGQATVSPGHRGGGTPKADEQAAPPDVRVATAPQEARGSSSVMEGARVPCRAGTCTTPIQVTSSQLVSNEIFPPAVVKAMLYPGAIVSSLTKSKAFPSWSDLFDMYNLTEAKNASAVVDLQRLE

SEQ ID NO: 60019 - protein, 506 aa, Zea mays
  Coding DNA Sequence Number=SeqID_16644
MNRHRHSRCHYKRNSGSVPEGGADDLDGGEASSSYHHVSTDGGICLSTNAAPASAGRSEARRQDASAAEPEDGLHHQKLEEEVASRPVREVEPQLTSLHAPARMMKILEAEGGTKITARRWKDTMHEGSAETWLPFKGVTLLLKATLPTCVLSPRGLSLLQHAPRSSPYDMGAGSHASCKLAQGRRSQIAARGARNCPAVTSIPPLSPRPADERADRHAGGMQPHQVSAPFRLRRTQHGGPRPTRHATGAPVATCKQLHRHSCHYHASSTAEPVPRLEATLRMTQQCQPGTSVTGQSAVGEGATVDTAKNGLAVMAVAGGRKQRDRERGYPVRVPLLEGNGPRAPLLIRGSKAGPSEGFNSRLRALVLRAHYWGFVGWALEGFTAASDAEREMTRGYVRYITKARAMLPSSLETPCSAPSKGNMALSPLLLAERRHRGICKKVESALDRPLALCGGSGAALANPAPAKPLTASTYQPENLGPDRAPGLRPARMREQPDWPKHRETH

SEQ ID NO: 60020 - protein, 17 aa, Zea mays
  Coding DNA Sequence Number=SeqID_16645
MAKSFIIALEGPALTWL

SEQ ID NO: 60021 - protein, 38 aa, Zea mays
  Coding DNA Sequence Number=SeqID_16646
MAGVPPHPSVSLPPLSCCWAMGGFGFRIKVFSYNKVNM

SEQ ID NO: 60022 - protein, 690 aa, Zea mays
  Coding DNA Sequence Number=SeqID_16647
  Pfam annotation: Domain name=HR1; Domain location=263-333; Score=3.8; E_value=0.089; Accession=PF02185.7; Description=Hr1 repeat
MRGPRGEDVFARAPGVFGADAEECFMYGRNIAAVVSAVMDKDRQGAAQKRQAVVRLHEARPKRPRGTAKAAAPGGSQPPLAPKSAAPVSSRAPEAAKAAAAGGTKSAKAAPRSSRAPEAAKAARELPPPGKRVADFATDISVEDYLFGSDEGQLVVVPPAVATAAAAVVPRVKGSALGAGGEIPALTAVRDEAGAVSRRLKKLKEALSQAADFADRAASGALTAVMSAEVERLQTQHANAVREKSAADSKCRKLADKVAVLEGERTDLRRQLAEERKEANEALAKAQSAQAEANLARAEGSLARQRAEELEERLSALQTRVERVEASTRLEVERTRKQLMDSYHELGARTADFEVPDREPGLRCLEWIQEELLALPAIVEGFMSYASLVTCEGAMNALSREGCRHYEVFDQADEDFERDIYKVEDPVVKESAGALYDRMWGPHGREVVRERAEMARGQAARGEKVEDFGALNSAQPDSELNPMVAAPETAPEPPPETVESVPDAPAATVAGGGPSPTVTPRAEDPVKMAAEPAAEDPATAGSVEWTKESSDEDLDYFAALDVVAAEASPHAVDAEVVPGPSTGRRRRRAVAKRRVSEADGGRLRVSRASRQELLSLPAAVSSGVLQVFAVWCCEPVCAGGGLRLDNEWALPLGLQLAPGLCPSCSDEYESEDSVSIDEILRSGFVHFGDS

SEQ ID NO: 60023 - protein, 151 aa, Zea mays
  Coding DNA Sequence Number=SeqID_16648
  Subcellular localization annotation: CTP_CleavageSite=40; ConfidenceScore=5.36e-01
ALTGGTQRQSARARTVIHGSEPLDQGRTFAMGRTRLNNLVADVASSVAARSPEMRQTRSLGRLGSPGRDGTGPEGLVNSLADYRPQEHDQRRKNNEGKVLRGHWFGLNQLVTARARQTGTTITGEAKLANNREELGEIECGSRHLTSGWSL

SEQ ID NO: 60024 - protein, 83 aa, Zea mays
  Coding DNA Sequence Number=SeqID_16649
MAGIHAFCPITITKRSRLLAAALCRVPDPDSFVRAALILAAALALLADAVLHKPDQCAQLAAVLAAAATVEALEPTDDLASYL

SEQ ID NO: 60025 - protein, 119 aa, Zea mays
  Coding DNA Sequence Number=SeqID_16650
MTGDKQRQKLKQKPTSKISNTYIKKVDKKAATPYLIEKKKNGKVIAIKANKQANKGKGAKRIWVPKEIISTMKSTKKVWIPKGNSQDAKVTWTKTLRKATLTGQSGGAPDSALFSVRCA

SEQ ID NO: 60026 - protein, 111 aa, Zea mays
  Coding DNA Sequence Number=SeqID_16651
MRDSKLEVERGEAVLFTSWHGGCRCTAKSRGHDARLDGDVHGCGDDAELRLRRGWGRAKEGAPTGVRRDITARRQRNDSRGGAVRGSASRARVHFFGGMREGGGELLLAFI

SEQ ID NO: 60027 - protein, 204 aa, Zea mays
  Coding DNA Sequence Number=SeqID_16652
  Gene Ontology: Mol. function=nucleic acid binding
  Homolog annotation: Hit_ID=Q5NKQ1; Match level="QueryCoverage=87%, HitCoverage=25%, E-value=1e-43, Identity=42%"; Hit description =Putative uncharacterized protein 9C20.4a
  Pfam annotation: Domain name=FAR1; Domain location=98-145; Score= -24.3; E_value=0.024; Accession=PF03101.6; Description=FAR1 family
MAGSGQSPAMVGDDVRLDPETERVVDGNLLVTPPPALLGPVIDEMSIGEEGEQRVRPPMSNICSREMDTPQILHSKNIDPNIVPTVGMTFKDIDDAYKFYKRYAYEVEFRLKKYREKTFSKWINRSREAVKIELVNLEHNHEFITDEAEKQHLRCNKSQDAEFINFVDAMHDSRVPQHCIIDFISDMHDGPENVSVTTQDLKNM

SEQ ID NO: 60028 - protein, 134 aa, Zea mays
  Coding DNA Sequence Number=SeqID_16653
  Subcellular localization annotation: CTP_CleavageSite=55; ConfidenceScore=5.14e-01
MDNRSVPWSGAPDCPVCHRTVSGAPGNSMPNSSPSGIFRGLRYNSSDYPVHHRTVSDAPGESDSEPASFGNPLRYNSPDMSGAHRTVRPCPVRHRTARQAHKSELQRSEPNGLVTWLAHRTVWCAHRQQPSPNG

SEQ ID NO: 60029 - protein, 201 aa, Zea mays
  Coding DNA Sequence Number=SeqID_16654
  Gene Ontology: Mol. function=cysteine-type peptidase activity; Biological process=proteolysis
  Homolog annotation: Hit_ID=Q5NKQ2; Match level="QueryCoverage=81%, HitCoverage=19%, E-value=6e-38, Identity=51%"; Hit description =Putative uncharacterized protein 9C20.3a
MDFLAVDDKEITVSHWINIVLYEHSVGPYNIIKATASMMWKVDRLPTNPKRLIIESSQECFSVDIPRSTDTGDPPNTRCDGDPLQHRKRGVVADAKKLPMCSMDDDDDFEPQKKKCNIKMDAPNKTQRLNIRCNPGDVLASIQIMNERQRQAIVRKGLSSILDMTIDAIGCRTLLCWLMQKLDPRDMTLRIGPDKELKITK

SEQ ID NO: 60030 - protein, 285 aa, Zea mays
  Coding DNA Sequence Number=SeqID_16655
  Gene Ontology: Mol. function=metal ion transmembrane transporter activity; Cellular component=membrane; Biological process=metal ion transport
  Homolog annotation: Hit_ID=Q10D38; Match level="QueryCoverage=33%, HitCoverage=25%, E-value=2e-39, Identity=85%"; Hit description =Magnesium transporter CorA-like family protein, putative, expressed
  Pfam annotation: Domain name=CorA; Domain location=5-267; Score=14.4; E_value=6.1e-07; Accession=PF01544.9; Description=CorA-like Mg2+ transporter protein
MLPCQGRYINMRLNKVEVNIIRLLEAAPRQQNQAKLLYVLIENNLRIFCFSINTRCLKLPNGLDCGVERDQCQLGLLDGLVQVPQVRDELEQLLDDDDDMADLYLSRKLAGASSPVSGSVRPNWFPASPTIGSKISRASRASAATVHGNENDVEELEMLLEAYFMQIDGTLTKLTTLREYIDDTEDYINIQLDNHRNQLIQWHRPCTASDKHSEGTAEEIDCRSSPTTDLDLLESIAGKCHLVLFVLMVYLFLQDIHVYYLQKPSQFLVSIGCEFEAMEIIQDHN

SEQ ID NO: 60031 - protein, 472 aa, Zea mays
  Coding DNA Sequence Number=SeqID_16656
MEGKKIIGSYQAPCLVSGRRGGWGRAGVTGDGGAGNGDAPPRESADQDGGSPALIHDWRYRPARGGGEVSRSSTLNGIESGPISASTEIGLRSRGGDLGRLERRLGGSRLVRGILVVGREAAVAQGFVTSLPPPPFVVRTAASIPHPHHRRPCWSPPFPIHTSDSGQGRPLSNNRELEERLARVRGEAAAWQAKALFEQAAAAARASIEELATAVQAESSAFVDPRRAGPPPDHAHAPAPSHGFVTSLPPPPFVVRTAASIPHPHHRRPCWSPPFPIHTSDSGQGRPLSNNRELEERLARVRGEAVAWQAKALFEQAAAAARASVEELATAVQAESSAFVDPRRAGPPPDHAHAPAPSHARGLSFPATPKSCHGRGLPHSAAFLPRGAQNHAMAEGFLLRRLPITAWPRQRQQRVASKSPSLPRHRPKPRPKPTQTFHRRRFGSCLKTMPANNSLSNRLPHRLLLWLRLSRS

SEQ ID NO: 60032 - protein, 96 aa, Zea mays
  Coding DNA Sequence Number=SeqID_16657
  Gene Ontology: Mol. function=cysteine-type peptidase activity; Biological process=proteolysis
  Homolog annotation: Hit_ID=Q5NKP7; Match level="QueryCoverage=100%, HitCoverage=11%, E-value=3e-33, Identity=73%"; Hit description =Putative uncharacterized protein 9C20.3c
MKHVDRPPNNPKRITIQSSQECFSVDIPCAEQSNPSQLVGNPSNVESQTFINETVELDSDDDDFMPAVKKHNVSGSNTIVLRKVVTKRIKAEDLPR

SEQ ID NO: 60033 - protein, 404 aa, Zea mays
  Coding DNA Sequence Number=SeqID_16658
  Homolog annotation: Hit_ID=A2XER1; Match level="QueryCoverage=30%, HitCoverage=13%, E-value=6e-29, Identity=57%"; Hit description =Putative uncharacterized protein
MEILKPRVECNINSEWMFCSQLQDGLAFLIGKFSILEDFPLEKILYIIMMLVYRTDGILGAKDQRTVTSKARPRLLLQGDVQSYVQRVPDKLQIWHLISCSRNNMLYINSIFYRQKQMEEVVHALATGQASTDAMTKQPVKVYKWDMDETLILLKSLLVGSYARDFEGLKDREKSTQTRKRWENLILQLCDEHFFYEERSAGPREIHQAFSVMPGASCTPSRRRRLTCSRLYVPDVPRITNRKHTSLVDFGLLGRDGSDANENAAVPANGGAVRDKEALQLLNQLVSKWARDEQELERELELYRQKVQHYEDKERRRTASFKANGVSPSGSGTSVSSRGEDSDGHSDDYYELSDSPDDGNVQSSSDAALSSMRDQDDMKHLAALDDSLTYFEMERLYPRGTRDV

SEQ ID NO: 60034 - protein, 143 aa, Zea mays
  Coding DNA Sequence Number=SeqID_16659
MWNWSFNYFHVQIESMHSEVYHAKADRNMVEWAQAMGGMNALVLNNTTGRGNYVVKRVLPMYSVGHGRVGPSNVSVGVFIGNQIVGVDVEGPTEHARMCFCSKLTDERLQATRGAERVPEWLVGLDPSVNGLGSSTKPDFEVR

SEQ ID NO: 60035 - protein, 227 aa, Zea mays
  Coding DNA Sequence Number=SeqID_16660
MNVDSQLFPSVNMVKRAGQGFTFDINMVGPARRYDKLGDNVDLGDQPQKEIGNTSWRRRFDMGHDLASPEPSLGRDRSPRRILALPEGLLKQRENRTARPAPTAVPPARVRLATTKFSLRRNRKLRLARPWASASGGGLRLARPQGSAPASASEGGLRLARPQGSASTPASKGGLRLARPQGSASTSASGGIASSPDPGLGLRRSLRLARPWARTDRAMEDASLPYP

SEQ ID NO: 60036 - protein, 539 aa, Zea mays
  Coding DNA Sequence Number=SeqID_16661
  Homolog annotation: Hit_ID=Q6QP51; Match level="QueryCoverage=15%, HitCoverage=55%, E-value=6e-26, Identity=54%"; Hit description =Putative growth-regulating factor 1
MEAQAHTSCNRRTGYYVQETAPPLAPMSRLLDCGTSAATRGNPAHGPTVPIEHIDHRDRERGYFERDPSPRRKRAPSPPTDQGFEGWPPQRGSTAAPEHLGFRLITDQGFEGWPLGRVQQPPQSTQAPRPLLIRGSKAGPSRFALPLTDLTGKQCRSPRSNCCATRQSEAGNSQVQPQAQQEAPPRPTLGLGLRRRSPPRPTPGLGPHLDLGRWSPPRPTPGLGLNPGLGRWSPPRLTLGLGLNPGLGRWSPPCPTPGLGLNLGLGRNRVLALPRPRPQEESPPRPTLGSDRPCHGGCIIILPLASSGYGGTRPASYPDSPRPDSCASTGLKRSSDDHDTAALMREGRAGGRADEQAHSLSLANACNPYCKRIPLAQNNTSRVFPLEPPGSKRLVFQCFGPVARQDRRVGPPRRGDFEDEENKYHRPWWCPDGLSHTQKHRVQRLRNLEEAEAKYLEVHRKAHPNLLVKVWCPRRAEQRSQKKEWCPKQQEADAEVDEEADETPLASINMWDGDEVEVVHMDDSSEISLTDMNMWDAEL

SEQ ID NO: 60037 - protein, 383 aa, Zea mays
  Coding DNA Sequence Number=SeqID_16662
MVTTSSMVGRSKPGCGLCPALSFKDLHHPSWGGGRGKSGPASAWAGDPLLPPAPGGARHPPALRRRRPPAMRGKANCCCLARVQHFVLHPGDCGRLHRGVAQHVVRSEGGTRVLGRSRSRSRGENGSEDLPVCFGAAAARWCGVGGQVAAVVGAEVVVARGGFSADEIVGATRGQTSGSLALIARPRPSSGDVGEVLVTAASALRSSLLLFSHPKRRSLSLLQWSAASHLEFVIPQALCRVSSSFRALGLACRLAEPLNREQVASYAEEVQQRRLELGQVIHERDQPRSHAAEADPGGDPGCGGPSAVLASSFEVEILLPESPSEAGPDSAEGGNNAEGAAAPSVDDLFVGSRIAYPSESYFSWKVMSEDSVIDIVEKARKSF

SEQ ID NO: 60038 - protein, 127 aa, Zea mays
  Coding DNA Sequence Number=SeqID_16663
MGVGKGRLDGWECLLNALRLFSDRDDSQGIAAEVWTYIRAVECSGLEGSDESEFSSDEEDSDGGEDEDDDDDDDGDDDDGGGSNGGGGSGGKGSTRGGSSTGSTRGGSSTGSTRGGGGKGNSSKASG

SEQ ID NO: 60039 - protein, 154 aa, Zea mays
  Coding DNA Sequence Number=SeqID_16664
MQMTVDEAEVNAILSMLASESIDSACTEWVSAAAGHCLGEDEGVYSPGSVRRKRLRRTSHLAMPAEGKKRKKRLRRSSGLELGTDSTPFVLDDGSTSANLENDIENCDGARVGGHVLDEDEEEEEEVVPMILKNSRSNSSNDVPIQALSGLVSL

SEQ ID NO: 60040 - protein, 48 aa, Zea mays
  Coding DNA Sequence Number=SeqID_16665
MAMMGSTSEKRYLYQVMKRLSSAVSVPRWFPSRRMNTKLIWGGCFASQ

SEQ ID NO: 60041 - protein, 74 aa, Zea mays
  Coding DNA Sequence Number=SeqID_16666
MAMMGSTSEKRYLCQLHPKVPPEVAAMGAGAFGVVGGGPYGELDLFEAPPSMNLTDERSPEAGSGAGAAKDEDN

SEQ ID NO: 60042 - protein, 134 aa, Zea mays
  Coding DNA Sequence Number=SeqID_16667
MRLLVTAVLFLPPLTILGDGTRATRLGIPDLWCRVPRTALGGPGALVGQSEESGDSFHVMRSQLFQHLFITHSLAKGRDDRSIGDARYSTSHLGEAEINVWRVSPGSYLIVWRWASTPCCWCGRNMDGQGAARR

SEQ ID NO: 60043 - protein, 58 aa, Zea mays
  Coding DNA Sequence Number=SeqID_16668
MHQGSLCKGYVVYPWPFTSVVKIGHVQPRLERDHGLWCSGGDAGNMEDFEEFQDYDEF

SEQ ID NO: 60044 - protein, 88 aa, Zea mays
  Coding DNA Sequence Number=SeqID_16669
  Subcellular localization annotation: CTP_CleavageSite=33; ConfidenceScore=5.64e-01
MPTVGLAPMGKRRTPVQIDQTSGARSRTPTRVRCRHVSRPSLVRTCPHNATAPRSGGDPMLPRVTQRLGHPAGGVPVHPIAKQYAHAA

SEQ ID NO: 60045 - protein, 367 aa, Zea mays
  Coding DNA Sequence Number=SeqID_16670
MEKQLENPGKKEKPKQPKPVHQAQQRAPAPALLPPLTGGPRLSAPGLPRTLLSLLLAAQWGQDVGAGFFDRAPLFPLCLAGPNSRPQRPPTRPSSLFEPRPCPHSLPRLISRSPAPARALPTLSDLAGDPRPPPRSSSSPEATPSDPELRPEVRHPPRARFALFMPALSQFGLAGVRPRFLAALARISHRSYLGLPGAFPPPFSPLCPRSRGHNPAIEFAESSSPPLTNSDDPGTAVARTHPNSGDFTAAGRSGAARSRSPPRSDNEQSEVPECVTGDLPEQQPGEGKERGTLQDANSGSSPHGKASDPCTNRPDLRGKVQDPYEYGPDLRIGSRIPLHGVQTTHSRVPELLGENTQALLRQGSGAD

SEQ ID NO: 60046 - protein, 45 aa, Zea mays
  Coding DNA Sequence Number=SeqID_16671
MAQGAGYSHGGIDGEAHRPDIQFAITSCRGVCWEDGRCTGAVAAE

SEQ ID NO: 60047 - protein, 533 aa, Zea mays
  Coding DNA Sequence Number=SeqID_16672
  Gene Ontology: Mol. function=hydrolase activity, acting on carbon -nitrogen (but not peptide) bonds; Cellular component=cytoplasm; Biological process=nitrogen compound metabolic process
  Homolog annotation: Hit_ID=Q10R10; Match level="QueryCoverage=58%, HitCoverage=90%, E-value=1e-124, Identity=73%"; Hit description =Hydrolase, carbon-nitrogen family protein, expressed
  Pfam annotation: Domain name=CN_hydrolase; Domain location=31-242; Score=158.5; E_value=1.9e-44; Accession=PF00795.13; Description =Carbon-nitrogen hydrolase
MASAPNPSFRPEEARSPPALELPTPPLSKFKVALCQLSVTADKNRNIAHARAAIEKAASEGAKLVLLPVIGDTKITNLLFSLKPKTHCGNDGKANFQGWAVEIWNGPYSNDSFPEYAEDIEAGGDAAPSFSMMSEVARILQVTLVGGSIAERSGNNLYNTCCIFGSDGKLKGKHRKIHLFDIDIPGKITFKESKTLTAGQNPTVVDTDVGRIGIGICYDIRFQELAMLYAARGAHLLCYPGAFNMTTGPLHWELLQRARATDNQLFVATCGPARDTSAGYVAWGHSTLVGPFGEVIATTEHEEATIIAEIDYSLIEQRRKIEITWENMIARLALSVNVSMSRAVLPKGYAPTPSYPSTGEVLLVAGLEKRGRDLIGKGKPVNRFPVDAAEGGRPARCTTVSCLLQHALRVEIPYQCSRSGNGSSHHLFGHQQPQYKSKLVMYDGRVGQQTCELREAGKHNEGVSSRRNPGGAAESGPRHCSTATAAQELPLLTGTAHCYRRWLCLTLSVRQARHGELMSQQLKKPPAFWWPEL

SEQ ID NO: 60048 - protein, 228 aa, Zea mays
  Coding DNA Sequence Number=SeqID_16673
MAGWRPPITRVVCRSDGRTPANRIVIGLPGLSRQPTTAGYVLDPSSRPADLHCIALNGRDGMADAVRSRQPGLAITASPRPRDCWAWAPAGSVEETGVPAQSARSIPRGVTPPGAGDRECLRGLTRREIAITQSRPHVPTRTPNGRHTPFRFHLPVATSAPPSAPPPPRRYIFTPVAPLFLPSFPPPFRHTALDTTQRARSASLAATTTKRPLLQLSCSMHHRSLLVS

SEQ ID NO: 60049 - protein, 83 aa, Zea mays
  Coding DNA Sequence Number=SeqID_16674
MSGAPEDSDFKLVTFGKFQRQLRYNSPDCPVYTGHVRCSKEERPPELASLGNSFGHSAIIHRTVRCNSGATATTAPTATCRRN

SEQ ID NO: 60050 - protein, 168 aa, Zea mays
  Coding DNA Sequence Number=SeqID_16675
MGKNNKRKREPTPPSEDFGDSEYSEEEFSSESERSPAPVSPPASSDDSDDSQGIAAEVWTYIRAVERSGLEGSDESEYSSDEEDSDGGDEGEDDDDDDDDDDGDGDGSGSGRGGGDGSRDNTKGVSSKGSIKGDSSKGSTKGSSRGSTKGSSRGSTKGGGGGRGRASG

SEQ ID NO: 60051 - protein, 266 aa, Zea mays
  Coding DNA Sequence Number=SeqID_16676
  Homolog annotation: Hit_ID=Q65XA8; Match level="QueryCoverage=84%, HitCoverage=77%, E-value=3e-34, Identity=48%"; Hit description =Putative uncharacterized protein OJ1654_B10.11-1
  Pfam annotation: Domain name=DUF1635; Domain location=36-266; Score =89.5; E_value=1.1e-23; Accession=PF07795.2; Description=Protein of unknown function (DUF1635)
MAMELPLFLGDGPDAALFSSLWPSFLDDLQQPPQEQSVAELKQALLATTLELEAAREELRRKEQSIAKLAGLVREVARERDDARDQLQSLRLLAAQAAAAAPPLVTSSVTDSDGSLASSPADPFFDPVTSADRRCKLSPATPPAPPPKPVQQRHCQPGACGRGSAPAADAVLETLASKRPLPQRGRLLAAVMEAGPLLQNLLVAGQLPRWRNPPTVRAPDTTLPLGAATLASTACMKRPVAAAAMSVLPAASCPPAFIAKRQRLLH

SEQ ID NO: 60052 - protein, 43 aa, Zea mays
  Coding DNA Sequence Number=SeqID_16677
MSRAFDDYYIKDCGVISAPEDHLFTPSLGALNWYRSRSLQERD

SEQ ID NO: 60053 - protein, 113 aa, Zea mays
  Coding DNA Sequence Number=SeqID_16678
  Homolog annotation: Hit_ID=A3BIK8; Match level="QueryCoverage=27%, HitCoverage=12%, E-value=4e-08, Identity=83%"; Hit description =Putative uncharacterized protein
MPLDDGAEAADFVLLDELLAALPRDPYEQLASTKRSSPLTMRRFMLMEIAQCRHMKGGQALGNSMQLESSLIESDLKGKGRCKDIVSRRRMEDWKKNSTHATRNTSYDSVGNG

SEQ ID NO: 60054 - protein, 230 aa, Zea mays
  Coding DNA Sequence Number=SeqID_16679
  Gene Ontology: Mol. function=ubiquitin thiolesterase activity; Cellular component=nucleus; Biological process=ubiquitin-dependent protein catabolic process
  Homolog annotation: Hit_ID=Q8L819; Match level="QueryCoverage=58%, HitCoverage=26%, E-value=4e-58, Identity=85%"; Hit description=SET domain-containing protein SET102
MSALVPVKPAPKRRGRKPKRIVHKQLDIPDICDRLTSSVACEEILYCEEVKNQSVSEIDALYDEIRPAVEEHERDSQDSVSTSLAEKWIEASCRKYKAEFDLYAAVLKNVASTPLRSKDDVAPRVQNGLKYLENGGSHLLCHPTEALNVKMNPHLLLVEVGLLRLLQNTYTQGDLDSNKGCSAYATKVSDILHNSSAPVKNASAFQTKFEACLPDVMENFNDLYHWKDYR

SEQ ID NO: 60055 - protein, 286 aa, Zea mays
  Coding DNA Sequence Number=SeqID_16680
  Gene Ontology: Mol. function=3'-phosphoadenosine 5'-phosphosulfate transmembrane transporter activity; Cellular component=integral to membrane; Biological process=positive regulation of I-kappaB kinase/NF-kappaB cascade
  Homolog annotation: Hit_ID=Q65XA4; Match level="QueryCoverage=84%, HitCoverage=66%, E-value=1e-114, Identity=83%"; Hit description =Putative uncharacterized protein OJ1654_B10.14
  Pfam annotation: Domain name=UAA; Domain location=24-281; Score =192.0; E_value=1.5e-54; Accession=PF08449.2; Description=UAA transporter family
MADAAADRERDKGKDDRRRWAARCGFAVLGIMSTLLVYGVLQEKIMRVPYGADKEFFRYSLFLVFCNRITTSMVSAMVLLASKKSLDPVAPLHKYGVVSISNILTTTCQYEALKYVSFPVQTLAKCAKMIPVMIWGTIIMRKKYGGKDYFFAVIVTLGCALFILYPAMMDVSPFNKGRESTIWGVSLMFGYLGFDGFTSTFQDKLFKGYDMEIHNQIFYTTVCSCLLSLSGLILQNHLIPAVDFMFHHPDCFSDVLILSSNVSAQNVKQNHLRVDASVRCRVQARG

SEQ ID NO: 60056 - protein, 315 aa, Zea mays
  Coding DNA Sequence Number=SeqID_16681
MARLRHTARKSVIPFLPSRLAERPLRRTVSGQSSHLERLHHRLREEQERQRQHREQQGSSSPPEQEVESVRRRSSVPQLEAPLAPSRDAPAVGGATGGGPGGDPDDDDSDHSTESSEPQEAEGWVARPITRDAARGCHFHDALDTLLRQAFDRHTWSIEYRCVVYQHSRGRYPDRWEATYLVRRPEDDLRGAEAVSEHYSISERDTAEAAMQDAARRALSQYCSLFGGVADGLNLRLSSTVNLVAVLNTELDHSLDELSRARTEIAELRAELAERRHQEGGSPAPAGTQHPYRSPPRGHHTYGSPACKTRIDLDP

SEQ ID NO: 60057 - protein, 112 aa, Zea mays
  Coding DNA Sequence Number=SeqID_16682
METRALLFCLGIREKIEREKDLNMLDSDCRRTPTCDGHHGQMRGSDWNVQAQHGKLIKSTFIWIRNYSHICSEAANECPSGQGVTLHKIVTAIGGGVSVDKAQRLWKAVVGP

SEQ ID NO: 60058 - protein, 74 aa, Zea mays
  Coding DNA Sequence Number=SeqID_16683
METRALLFCLGIREKTEREKDLNMLDSDCRRTPTCDGHHGSLEDMVAGVTWPSILPSGWTVEWDPTSAEEEHEE

SEQ ID NO: 60059 - protein, 76 aa, Zea mays
  Coding DNA Sequence Number=SeqID_16684
MVLTSRAQLLVTQAGERERDMFFRTFVQDSLYPKGNNVLKDEGVEHRGWWSTTKVKVMQVHVDGTRMAKDKRWDLT

SEQ ID NO: 60060 - protein, 407 aa, Zea mays
  Coding DNA Sequence Number=SeqID_16685
  Homolog annotation: Hit_ID=A2WQE8; Match level="QueryCoverage=60%, HitCoverage=69%, E-value=7e-60, Identity=46%"; Hit description =Putative uncharacterized protein
MMKVNACRRWSKRVHRRTFGSRRPPTVAIFYFEYFYPNDGVFKKEGRGTLKGIVAATKRIKNGDHKLKIEFSSKLGGPVGPNTRTFVDEIVLFTKKKAPLIGVKKWKDIELNVRSSIASNVLRRWEFLTNEDAHEKIWSIAKERYKGWRSTLSSTYKAYNSYAERMKNKPEDVDIVEWHYMMLYFGSEKFQKISSRNSENRQKQRTKHIMGSRTFSQISFQQEKATEKIVVKMYPTRSQVMESKFLEQARATVVTNQKNIELESQVQLLYEKLACEVGERERILQEKMQALQEEEERKRQVLREEMRQEMVAALAAVAQQSNRESTTPIDPSSVVPTKPPELIPADPPAPAPSSANNVRTPDTNNKKDNMPANYISSYTLRNAVTRRVQARGNKTSECVWNANVLVL

SEQ ID NO: 60061 - protein, 100 aa, Zea mays
  Coding DNA Sequence Number=SeqID_16686
MVGVMRAPKVTGMTMLLILNKMTKKHLIAAHYVLTVEVWVVFTDVRKIYTMATAHDYVHDRSYTSTNSLAKSTSTPAFLQRQTTCIFHKFNNQICPETSR

SEQ ID NO: 60062 - protein, 120 aa, Zea mays
  Coding DNA Sequence Number=SeqID_16687
  Homolog annotation: Hit_ID=Q6QP51; Match level="QueryCoverage=52%, HitCoverage=29%, E-value=2e-15, Identity=64%"; Hit description =Putative growth-regulating factor 1
MQAACNRTKGAHPFDFDASSMEAQAHTSCNHRAGYYVQETAPPLAPGPRKGILRKGSFSAKEAGPEPPTDQRFEGWPLGRVQQPPQSTRAPRPLLVRGSKAGPSEGFNGRLRPLKLHAHY

SEQ ID NO: 60063 - protein, 110 aa, Zea mays
  Coding DNA Sequence Number=SeqID_16688
MAQVLRGEWVHDLGALNSVLPDPEPTPAEAVSAVALEPTPETAAIATAAPTSAAADEDLPPKVAEGAPDAPAAAVPSAEDPAAEAAETTAEAAAEPAAEAPAASGPSQVA

SEQ ID NO: 60064 - protein, 89 aa, Zea mays
  Coding DNA Sequence Number=SeqID_16689
MAVGVSEALYAKATMETRALLFCLGIREKTEREKDLNMLDSDCRRTPTCDGHHGQMRARIGMFKHNMESLSSLLSYGSGIIVISVLRPP

SEQ ID NO: 60065 - protein, 64 aa, Zea mays
  Coding DNA Sequence Number=SeqID_16690
MARHSVPTHINRPHRFPVSREGLTALAYNASLTPTAIVQQILYGRLWCWLMGYHLSNSLLQNED

SEQ ID NO: 60066 - protein, 104 aa, Zea mays
  Coding DNA Sequence Number=SeqID_16691
  Homolog annotation: Hit_ID=Q6QP51; Match level="QueryCoverage=42%, HitCoverage=20%, E-value=2e-12, Identity=75%"; Hit description =Putative growth-regulating factor 1
  Subcellular localization annotation: CTP_CleavageSite=81; ConfidenceScore=5.31e-01
MTWPSSNCCRCASALAAAASAPRSTQSNRRDRERGYSERDPSPRRKRAPSPPTNQRFKGWPLGRVQQPPQSTRALRPLLVRGSKAGPSEGFNGRLRPLGLHAHY

SEQ ID NO: 60067 - protein, 460 aa, Zea mays
  Coding DNA Sequence Number=SeqID_16692
  Gene Ontology: Mol. function=molecular_function; Cellular component =spliceosome; Biological process=nervous system development
  Homolog annotation: Hit_ID=A3BC40; Match level="QueryCoverage=92%, HitCoverage=87%, E-value=1e-157, Identity=70%"; Hit description =Putative uncharacterized protein
  Subcellular localization annotation: CTP_CleavageSite=30; ConfidenceScore=5.59e-01
MLRSPGNSPRLLSPSPTPAPSTPRPASPPPSNAPSSKRRRSEVLDEDTYVAAIERIIERDYFPDLPRLRDRLDWLQAVRSHDPLILRDAQLKILDRRRRAQRHAGGARPHADAGHLHRAPLPVLSHHPRRDPSPAAEDNDSFSRILDKVNQRRRERYAHLLEPPPPAEAGSKPSEDAKRNRITDGYGTSGQPPSTLEVAKFTAKNQLMYYPADQGEAPLTEEERAERLRGMTKEINKSNTRLHGRATADDARPKEEEGAAILYALVAGSTPGGMAYHDPDKLKKYDLEDLRKTPNPFYLESDKKAGNGYSFVRTPSPAPGVDESPFMTWGEIDGTPLRLDSDETPGGSERAHFKMPPPPARDVKAHLLSRDAARKIKERSNTFHRPPLPSPARGVSASPRTLSRAAQKFVRNAISKSAKSSSAIDESLRASYRGSTPSASTPKSRFSRDPGLASRSPSTR

SEQ ID NO: 60068 - protein, 487 aa, Zea mays
  Coding DNA Sequence Number=SeqID_16693
  Gene Ontology: Mol. function=phosphotransferase activity, alcohol group as acceptor; Cellular component=cytoplasm; Biological process =isoprenoid biosynthetic process
  Homolog annotation: Hit_ID=A3C3L4; Match level="QueryCoverage=57%, HitCoverage=67%, E-value=1e-119, Identity=79%"; Hit description =Putative uncharacterized protein
  Pfam annotation: Domain name=GHMP_kinases_N; Domain location=120-203; Score=57.4; E_value=4.9e-14; Accession=PF00288.17; Description=GHMP kinases N terminal domain
  Subcellular localization annotation: CTP_CleavageSite=20; ConfidenceScore=5.01e-01
MASSDSSCRRVAVAASTLLTASLPRSHPGEGGGAGSSAVELDLRDSGLTFSWPCSRLRGALGEEISANPGAPAPCSPDQLAAIARLLQDQDIPEAKIWLSAGLSAFLFLYTSILGCRPGKAVVSSDLPMGAGLGSSAAFCVSMSGALLTAAGAVSVGAHRGAEGWEVLEKGALELVNQWAFQGEKIIHGKPSGIDNSVSTFGKMIKFKKGELTNLESRNPVKMLITDTRVGRNTKALVAGVSERASRHPDAMASVFHAVNTISEELSSIVELVAEDEIAITSKEDKLAELMEMNQVSSNIVLEKVTRELESHGYRCFKVEAASTAPHFNTSDLAVGWSPPMRPPRSQVPKPSMDLAPPIYSSGVPSCPVNSAHQFSCVALLVYFVHSSGNLQTMNEDLLKTYHERAVSTDARSLITLFRELTNSQQLSGSCLSAFVLEMAALIVNLQPHRSVHEHQGKKAEQEYPLKSKTGGNYQINIHHQNQNERF

SEQ ID NO: 60069 - protein, 84 aa, Zea mays
  Coding DNA Sequence Number=SeqID_16694
MAHQPGFGPAYRLVTSPEAGPGATVGTLEQGYPLLIAVCQSNQIADSTLTQLHARSDHHDLYDTKEPSAARQSNSSGGCRDTGR

SEQ ID NO: 60070 - protein, 292 aa, Zea mays
  Coding DNA Sequence Number=SeqID_16695
MVDEVQIINKNQRKYKRKKTWLEQPRLCAVWVHQTVRWCTRQCLVRQAGVWSTDRSREFVGGVRLKFTRLSGGAPNCPAAQGSQAVEATRKALEDLQAEHRAGVQRIAAWAGEASTALVPLGMSPIPVSELPTSISDALPVLDSAADRLQRLDQILSARLETEGGRLCRVDLQDLVWEAKPYARTLESKFQILGHPSQSGGACQQAGLTRADLTGLTYTYAQPSYEGRKLNPLVSLLWEELTEMLYVPGVGKRHSFSCGKADTPGSAYFRHLEGSFPTGGEFVEPFLVQYSP

SEQ ID NO: 60071 - protein, 138 aa, Zea mays
  Coding DNA Sequence Number=SeqID_16696
MSKNTRDTRFIPRFGHTTKVPYFLVEAPTKSQVSFNPNPTFADHKGQAHTIIFAQTSGSNQEEQEGFRDEAPKSQLFNLTQRFLSKDLKWERQEVCEREWEVFLRLEVEFCACSPVGKSVAGVYKGAPKSWWPLGKSD

SEQ ID NO: 60072 - protein, 602 aa, Zea mays
  Coding DNA Sequence Number=SeqID_16697
  Gene Ontology: Mol. function=DNA binding
  Homolog annotation: Hit_ID=A2X045; Match level="QueryCoverage=89%, HitCoverage=97%, E-value=1e-159, Identity=60%"; Hit description =Putative uncharacterized protein
  Pfam annotation: Domain name=Remorin_C; Domain location=435-545; Score=130.5; E_value=4.9e-36; Accession=PF03763.4; Description =Remorin, C-terminal region
MEYERIEKPFPVQQGGGFSPKRLRAMLLGVDKRRKGQDGAAEEDEDGGGDYGALPKAHARSGAGDGGGGGGATCEEYKDVDVVSTTSEFSSSLETAGGHRPRDAHPVATGSRTRVPPEEDSCDSESVASNFEFHKERRAAASAAASVVPPFSKPAPSKWDDAQKWIASPTANCPGRGGAAPAPKKTEKPGSGIGRLPLPATKVVVEATEEIDTKRMDPSQEKREIGWQKAARWAPPDPCPEAEPCPTKTTLLAVETTVAAASAAGKGCAVLTSPSPHDMILLSSSNWKKVALDAVNFNRHDASTTLQSAATCIPPPTTVRSVSMRDMGTEMTPIASQEPSRTGTPVRATSPNCSQPTTPRRTLGGPSAVGSFISHGGECSSSELSEQELQTKTRREIMLLGTQLGKTSIAAWASKKEEEKDASLSLKPVPMDQSTQNITAIRAAAWEEAEKAKYLARFKREEIKIQAWEDHQKAQIEAEMRKIEVEVERMRARAQDKLMTKLASARHSADEKRATAELKRNRAAARTAEQAEHIRRTGRNTNLSTGKKKMCRRVFSSGPAVSIWEGVYYSMKEQELKNIYWMFVHFCLERVLQHEGTEESRT

SEQ ID NO: 60073 - protein, 154 aa, Zea mays
  Coding DNA Sequence Number=SeqID_16698
  Homolog annotation: Hit_ID=A2Y8I7; Match level="QueryCoverage=97%, HitCoverage=24%, E-value=2e-39, Identity=58%"; Hit description =Putative uncharacterized protein
MSEQQQPLSQPRSSIREALEKEDKEKAAVAKEKAAVPKNGNGDKNGSGAGSGNGNGGAPPQSGEEAVREIQVVREAYCRETAAPAYVIPEEPPAMVELVGWYIYGFWSYFITHLLLSVLFTAIITQVAFPNSDFTPDPKYTLKGVTCSVHEMSM

SEQ ID NO: 60074 - protein, 136 aa, Zea mays
  Coding DNA Sequence Number=SeqID_16699
MEHRPGLERLLETAHLELDGKLFVNTQQAPTWRANYRRFETGGSLSRRVSVPRAPAQMGRARGRARRGEARRPETGVREVEIPRPSCSSRAQVGRKERIQVYNGGVAECYVSSGGRASALSTCQCGSRRDLDTQLA

SEQ ID NO: 60075 - protein, 339 aa, Zea mays
  Coding DNA Sequence Number=SeqID_16700
MAILRPHQEPHPCSPQTCRRRTKYHHLLAQTSVARDRTCPLPPRRDASALPPPDPTCGLENASTTRSFLASHTGGASAARSPVCCWCGSFSLLHPLAATSLPPSPCYLITSFSLLHPLAAAPRRQSAVAAFWFWLPTIPRPRGYQYQDHLMQRWPDIFILTRALRQSRSDRRHFAAPLTGLTEGQRRLRHSDYSATRQSETDRRARTRAKTRKTANSAPPDPGLGLGLRPGRRRTLLRPTQGSDSGSAPEDDELRSARPQGSDSALASADDLRLARPRGSDSASAMEDRLDLGFGGASTSPSLGRRPATSTGSAIITLPQADSGHREQDRCPIWPAPPR

SEQ ID NO: 60076 - protein, 164 aa, Zea mays
  Coding DNA Sequence Number=SeqID_16701
MEIASLCEDGKGNGSNSAKTSLPLNFHWYYPLFAGIPPSLRLWCQRFIYNYTKSTVRNTVDYSGQEKLFGKTDYERTVRALAADSPRHRVDFDQELQIRDSPTKPRTVQLQRADRPAIIRGQSAGEDLVQPEGDKLIKRNYIAGADRPGPRADRPRGVTEAESR

SEQ ID NO: 60077 - protein, 456 aa, Zea mays
  Coding DNA Sequence Number=SeqID_16702
  Gene Ontology: Mol. function=metal ion binding; Cellular component =integral to membrane; Biological process=multicellular organismal development
  Homolog annotation: Hit_ID=A2YXH4; Match level="QueryCoverage=87%, HitCoverage=76%, E-value=1e-179, Identity=73%"; Hit description =Putative uncharacterized protein
  Pfam annotation: Domain name=zf-DHHC; Domain location=167-231; Score =116.3; E_value=9.1e-32; Accession=PF01529.11; Description=DHHC zinc finger domain
MYGPPSRGGGGAGAAGEQPRVYQVWHGSNCVWIWAYGDYQGFCEKTFEFVSGSQEFFLQGRFIFGPDVRSLFLTIFLILAPVVVFCIFVARHLINDFPDHWGVSVMVIVIVFTIYDLTLLLLTSGRDPGIVPRNTHPPEPEAIDMNNDAGNGQTPQQLRLPRTKDVIVNGTIVKVKYCDTCMLYRPPRCSHCSICNNCVERFDHHCPWVGQCIGLRNYRFFYMFVFSTTLLCLYVFGFCFVYIVKIKDAEQSTFWKAMLKTPASIVLIIYCFICVWFVGGLSVFHFYLMSTNQTTYENFRYRYDRRDNPYNRGTVNNFMEIFCTSVAPSKNNFRARVPAEQGLQQARAPARGFMSPNMGKPIGELELGRKPISWDEPRSAADIRDLEVGLGSLLDEKEGRVAHASPDLSREALPELVEGRAGTHSRRSSWGHRSGTSASMDSLAAQMGTAESMGLH

SEQ ID NO: 60078 - protein, 72 aa, Zea mays
  Coding DNA Sequence Number=SeqID_16703
MGTYGFLRTHPGTFLPRIHYLQITNRASILDFALAHEKSGTTLGAVVKSLSFDAQVVKPLPVSRLTHTQKTS

SEQ ID NO: 60079 - protein, 591 aa, Zea mays
  Coding DNA Sequence Number=SeqID_16704
  Gene Ontology: Mol. function=cyclopropane-fatty-acyl-phospholipid synthase activity; Cellular component=cytoplasm; Biological process =lipid biosynthetic process
  Homolog annotation: Hit_ID=A2YL70; Match level="QueryCoverage=97%, HitCoverage=67%, E-value=0.0, Identity=71%"; Hit description =Putative uncharacterized protein
  Pfam annotation: Domain name=CMAS; Domain location=292-571; Score =342.7; E_value=6.4e-100; Accession=PF02353.11; Description =Cyclopropane-fatty-acyl-phospholipid synthase
  Pfam annotation: Domain name=MTS; Domain location=344-458; Score= -79.7; E_value=0.0083; Accession=PF05175.5; Description =Methyltransferase small domain
  Pfam annotation: Domain name=Methyltransf_11; Domain location=358 -457; Score=42.9; E_value=1.1e-09; Accession=PF08241.3; Description =Methyltransferase domain
  Pfam annotation: Domain name=Methyltransf_12; Domain location=358 -455; Score=47.9; E_value=3.5e-11; Accession=PF08242.3; Description =Methyltransferase domain
  Pfam annotation: Domain name=NodS; Domain location=326-500; Score= -83.1; E_value=0.0084; Accession=PF05401.2; Description=Nodulation protein S (NodS)
  Pfam module annotation: Pfam domain module=CMAS::MTS::Methyltransf _11::Methyltransf_12::NodS; Domain location=292-571::344-458::358 -457::358-455::326-500
MGCQIKTSCEIKSVSSSEGGFRVTVFDGSEETYDRIIFGVHAPDALKILGAEATHEELRILGAFQYVYSDIYLHSDKSLMPRSLSAWSSWNFLGTTSKGVCVTYWLNLLQNIESTSRPFLVTLNPPHVPDHVFLKWYTSHPVPSVAAAKASLELHHIQGNRGIWFCGAYQGYGFHEDGLKAGKAAAQDLLGKESDLLVNPKQMIPSWSEAGARLLVATEADLGLADAYINGYFSFVDKREGLLNLFLILIANRDANKSSSSAAGKRGWWTPLLLTAGVASAKYFLRHIARRNSVSQTRQNISQHYDLSNEFFSLFLDPSMTYSCAIFKTEDQSLEAAQLQKVCLLIDKAKVERDHHVLEIGCGWGSLAIQLVKQTGCKYTGITLSVEQLKYAQRKVKEAGLEDHISFMLCDYRQIPTQRKYDRIISCEMIEGVGHEYMDDFFGCCESLLAQDGIFVLQFISIPEERYEEYRRSSDFIKEYIFPGGCLPSLARITSAMSAASRLCIEHLENIGYHYYPTLIQWRDNFMANKDAILALGFDEKFIRIWEYYFIYCAAGFKSRTLGNYQIVFSRPGNDKLGDSGIHSLSKLSGS

SEQ ID NO: 60080 - protein, 108 aa, Zea mays
  Coding DNA Sequence Number=SeqID_16705
  Homolog annotation: Hit_ID=Q2QU14; Match level="QueryCoverage=42%, HitCoverage=26%, E-value=1e-09, Identity=76%"; Hit description =Expressed protein
  Subcellular localization annotation: CTP_CleavageSite=73; ConfidenceScore=5.40e-01
MAMTVAVTWLPSTASRGRTLAAPLPPFAGPISIHMPLRAPPPIPFPTSRASPSPPHSSISPEAMMGLIYLGFLAMNPKEASDSRLDEATGDPSEDQIEEARRIMEKYK

SEQ ID NO: 60081 - protein, 446 aa, Zea mays
  Coding DNA Sequence Number=SeqID_16706
  Gene Ontology: Mol. function=structural constituent of ribosome; Cellular component=ribonucleoprotein complex; Biological process =ribosome biogenesis and assembly
  Homolog annotation: Hit_ID=P35685; Match level="QueryCoverage=57%, HitCoverage=100%, E-value=1e-111, Identity=79%"; Hit description=60S ribosomal protein L7a
  Pfam annotation: Domain name=Auxin_inducible; Domain location=5-96; Score=76.6; E_value=8e-20; Accession=PF02519.5; Description=Auxin responsive protein
  Pfam annotation: Domain name=Ribosomal_L7Ae; Domain location=301-396; Score=109.5; E_value=1e-29; Accession=PF01248.17; Description =Ribosomal protein L7AeL30eS12eGadd45 family
  Pfam module annotation: Pfam domain module=Auxin_inducible::Ribosomal_ L7Ae; Domain location=5-96::301-396
  Subcellular localization annotation: CTP_CleavageSite=40; ConfidenceScore=5.25e-01
MAMATEKGRKPGLITKTLGRCRGARRRSRPPAPEGCFAVRVGAGRQRFVVRTECVNHPLFRALLEEAEEAFGYAAAGPLVLPCDADAFVRVLEQIQEEEEDAAGQAAPAVARCGLVRGHSAYRLLLVPARPLLVGRSYPRQKHRHIDQDGRERTEESPLRLQAPVAASPHSLSSPSSPVRNATLPTAEMAPKRGGRAPVPAKKKTDKVTNPLFEKRPKQFGIGGALPPKKDLHRFVKWPKVVRIQRQRRILKQRLKVPPALNQFTRTLDKNLATNLFKMLLKYRPEDKAAKKERLLKRAQAENEGKTVESKKPIVVKYGLNHVTYLIEQNKAQLVVIAHDVDPIELVVWLPALCRKMEVPYCIVKGKARLGSIVHKKTASVLCLTTVKNEDKLEFSKILEAIKANFNDKFDEVRKKWGGGIMGSKSQAKTKAREKLLAKEAAQRMT

SEQ ID NO: 60082 - protein, 525 aa, Zea mays
  Coding DNA Sequence Number=SeqID_16707
  Gene Ontology: Mol. function=double-stranded RNA binding; Cellular component=intracellular
  Homolog annotation: Hit_ID=A2Z2Y5; Match level="QueryCoverage=71%, HitCoverage=99%, E-value=6e-97, Identity=55%"; Hit description =Putative uncharacterized protein
  Pfam annotation: Domain name=dsrm; Domain location=144-210; Score =67.2; E_value=5.5e-17; Accession=PF00035.16; Description=Double -stranded RNA binding motif
  Pfam annotation: Domain name=dsrm; Domain location=259-324; Score =70.8; E_value=4.5e-18; Accession=PF00035.16; Description=Double -stranded RNA binding motif
  Pfam module annotation: Pfam domain module=dsrm::dsrm; Domain location=144-210::259-324
  Subcellular localization annotation: CTP_CleavageSite=55; ConfidenceScore=5.50e-01
MPNLVNPRLLSGSAGSPAASGRRPVHLQLPPAAAPKSGISRTERTQRTTRRLGLGAATPAPTPAVEPYRGKNDEKERGRCDGAAERRGKTADVGEKKTEQASPRALATEMRLRERARPGGYYRIRTIQLGGSGGRSTPPAVGMYKNQLQELAQRSCFSLPSYVCTREGPDHAPRFRAAVTFNGETFEGPSGCTTLRQAEHAAAEVALARLSLRGPSTTLAARVLVSHRPSSSRALLLAGAELDVEVKPCPLCQDETGVYKNLLQETAHRAGLKLPAYTTVRSGPGHSPVFSSTVELAGLSFAGDPARTKKQAEKNAAMAAWSSLKQMPEARKEPGAGDEQEHVAVARALAALKPRDGGDGKAAPPLQKHSSNGSSSSALPNPSLYRHQWRPRTSTPAQAQPLPPRTGALPLQPPAGPRILPPLHLLQRPACGSRDAAAAELVRMLERAMVRDREATPPSPCYYAAPAASAYRHGSAPRTFAAGGFHAPAVSVRSVIPVCAAPPPQTPVKEERNGPATPSGACKRA

SEQ ID NO: 60083 - protein, 61 aa, Zea mays
  Coding DNA Sequence Number=SeqID_16708
YTRDNVGGFFVAPCVNVEEREARELLRTDGRASCASGLGTERLRPIDFLEWDGSGSEENIP

SEQ ID NO: 60084 - protein, 346 aa, Zea mays
  Coding DNA Sequence Number=SeqID_16709
  Gene Ontology: Mol. function=DNA binding; Cellular component=nucleus; Biological process=regulation of transcription
  Homolog annotation: Hit_ID=A7QUT1; Match level="QueryCoverage=69%, HitCoverage=90%, E-value=1e-21, Identity=33%"; Hit description =Chromosome chr1 scaffold_180, whole genome shotgun sequence
  Pfam annotation: Domain name=NAM; Domain location=11-147; Score =151.7; E_value=2e-42; Accession=PF02365.6; Description=No apical meristem (NAM) protein
MERPAQAPTQLPPGFRFHPTDEELVVLYLRRKALARPLPAAVIPVVHDVAGLDPWDLPGASEGEGYFFSLRRAPATGRGSRRRRAGSGYWKATGKEEPVFLQCGGGGVGGKRQLLVGGKTALAFHRSEPSPPSSSRTGWVMHEYRLAAASRGVAEQRKKNASHGCCDAEPGEWVVCRVFLKKGARRSRPGRDGNHSRALRHRASAAPPQLREGVGGRQPLLFPAPQSPSSSCVTGVTDLSDEEDEVSSGSITRDTRYRSTLGKSMFAECQTLGKWGSRQRAVSGRPKADGRQSLPSANSRLSAKMLLCRVPRIWHSAKDDLPSVLSRHSAKYALPTVPRLTLGKDV

SEQ ID NO: 60085 - protein, 111 aa, Zea mays
  Coding DNA Sequence Number=SeqID_16710
MSGGDGPPPVFDGDDFPYWKICMEAYLESIDIGVYKAATQGFPEPRDPTNLVGEEFNYEKCDADINTNTSTSTPAAPSPAQAPPLPPGPVTRARARELNYIMLLKNEGPEE

SEQ ID NO: 60086 - protein, 169 aa, Zea mays
  Coding DNA Sequence Number=SeqID_16711
MDPLPRVPAPIATTAPTPKLSAQTKILLEVMTNKERDDVDRWYRVMAQLDRLTEKVMSKDDVQQQLLAQAGLAADVARQAMEELVRFAQQLDQAEKALAELRLEQTAWDMESAQSVRSEQHRGGPPPSPLLAPPCPQRRYAGVPLGHPRETGGRRVDDFEGGHLPIPRM

SEQ ID NO: 60087 - protein, 61 aa, Zea mays
  Coding DNA Sequence Number=SeqID_16712
  Subcellular localization annotation: CTP_CleavageSite=26; ConfidenceScore=5.52e-01
MTLGQNQCKNTSFHYGLSRGKAKTVRALARTVRPQARTVRSGRNVRDWLADPSRSAEWPNG

SEQ ID NO: 60088 - protein, 162 aa, Zea mays
  Coding DNA Sequence Number=SeqID_16713
MAPKRTSSKADEAAKAALLAEKKGKALVDNTLQEPCEDDANSKKQRNEQPTTKGSLHTCSSGGPQQPPPGFAPPEGADATEDGEVIGVSAEEQLQLRALRIKNRNLQKQKEILEAKRQRVSAQAKVRQMIRDEEQKAQELEQEIALMQREGQLGLQHGPPLQ

SEQ ID NO: 60089 - protein, 119 aa, Zea mays
  Coding DNA Sequence Number=SeqID_16714
MDQMRSSPEDAQSRRIGGYRRRRMPKAAESEDATRTVVQMANLSCALPRSRHCHASGSGISHRSRIQRPPPRLRIGDQPSISHPEAAAAARVSGFYHCCLLLGNPYCHAHLGELSLPHA

SEQ ID NO: 60090 - protein, 690 aa, Zea mays
  Coding DNA Sequence Number=SeqID_16715
  Homolog annotation: Hit_ID=Q7XBD1; Match level="QueryCoverage=21%, HitCoverage=38%, E-value=4e-08, Identity=27%"; Hit description =Putative retrotransposon protein
  Subcellular localization annotation: CTP_CleavageSite=39; ConfidenceScore=5.22e-01
MSSSSSSAANVSSADSSSKDTSSDLAAVELQPGHIVEFSVSMISSVHQLTPNAVVALAKYVWAVTSYGGQPSIEVFAKNYCLHWQKRKIGSKIAQFGLCTFTPRTGKTSVEVVELVPCARNNWGNWWDYWFYVLGSDVENLLGLPMAVMCSHYYVAFLSFEVAEDDEDEGALRCAARMSSGRDLVEEFIGYGLVRSPAFALDLRGQDPATFVREVEDGAVRIVGRYTLRTESLRSWDIRGSNVRLNRVFELNCLPYCGYPGDNVAAAVDRGGKNTVAVAEEGPLREAAPATKKRKIGTAVGGLGLPGVDGQGTFRFLGRLARTYLRLVWPAFTRVGDPSREVKKAWGGTKSTAPGSGKPPPTAKSAVPGPSKSSAGLRTVASGTGKPPSAEPTKERRSPSPVRTDEAAVGGADFYTDICVEDYLVVGAKGTSQDPWSKFCTSGEISLAATAKDVAGSVSQQLRHASRQLKHVAAFSDHVVSGALTSEFAAERQRLEGRIERLRAQHTDVVWDKSATENMSCRLGERLAAAEAEKEDLMRQLAEERRDANRACAEAQAAQAKAKLAREEASLTRQRFKEMETRLGGLRDRLDKMEASTRAEVERTHTQLVDAYWELGARTAPFEVPSQEVGLRFLGWLQEELEVLPTIVTGLMSFASLITCEGAVNALSHEGCGHFEVFDQSDEGFERGIF

SEQ ID NO: 60091 - protein, 149 aa, Zea mays
  Coding DNA Sequence Number=SeqID_16716
MALAARRGRRLSYARDSRDGTWPRVLGIGRGSAVRLHSGGRRLPEVRGRLGRGRARSAFAEQGREGSELTENEELAGDGGLDAVGGEPRGQASLASEQRLKTRRRRLRGEWGVAAVLLDVERHGAMTSTAVSTARAVVAIASTRENRAE

SEQ ID NO: 60092 - protein, 149 aa, Zea mays
  Coding DNA Sequence Number=SeqID_16717
  Homolog annotation: Hit_ID=Q6JAD6; Match level="QueryCoverage=58%, HitCoverage=12%, E-value=3e-33, Identity=79%"; Hit description =Putative uncharacterized protein
MPRMKNVLAPGGGDDEDPPCPFKEVKGKNDYLEQQEGRKKRCLDRAARAALAAAAAEQAEREFDVVDFLICEIEDTLLDGLRAWRQLPYAHYLCHIFAQLIRPPQFQGTLEASRLLFGSYRPAPEDLVSAPNPVIDTQEEDTAFHQFET

SEQ ID NO: 60093 - protein, 71 aa, Zea mays
  Coding DNA Sequence Number=SeqID_16718
MAHDVDGKRGKEGLTELYKGEAQSDDDERISEMPLGPWIVAGAVVAACFQIERRWASRQRGAEASVKRARY

SEQ ID NO: 60094 - protein, 255 aa, Zea mays
  Coding DNA Sequence Number=SeqID_16719
  Gene Ontology: Mol. function=RNA-directed DNA polymerase activity; Cellular component=nucleus; Biological process=RNA-dependent DNA replication
  Homolog annotation: Hit_ID=Q7XEN8; Match level="QueryCoverage=51%, HitCoverage=36%, E-value=1e-16, Identity=34%"; Hit description =Transposon protein, putative, Pong sub-class, expressed
  Subcellular localization annotation: CTP_CleavageSite=48; ConfidenceScore=5.00e-01
MDRRPAQKSRRSALNAAIGTISGGWHPSSQDNRRSPTNDSHATHAKPEASSVAASVQNPLDNSIDASWMLPDYNILPSQDNYYRNLMNQDDTDNLGSEDYVQVDPLVANMNSQTKPKGLTENFTDDEDILLLSAYLNVSKDPIAGRDQKDGRFWERIEKYYHVNLTFESLFIASSMGYNPKESKSFQSYYEAIQRKNESGKTMNDKIADAKAMFQTLRKKAFTLFHAWNILRHEPKWSSIKDFTMTTKKLDPSQR

SEQ ID NO: 60095 - protein, 44 aa, Zea mays
  Coding DNA Sequence Number=SeqID_16720
MDQVLNKVGSYWFSKRASKEIDSIGDDISISSTDSLTKHQNQIR

SEQ ID NO: 60096 - protein, 217 aa, Zea mays
  Coding DNA Sequence Number=SeqID_16721
MVVATAVLAHAALLWAVAVVVYLWGCRSESCAQLRVAAGDDDTHGYHVPPWRHHHHHPAYTDTTMILWVKTQFGSSGCASFKENASSCLWSVMAMLRDHWVLYFIILLLLVVLELALSSKKANKEAATRGPLQWARSHVGLGTERGRAVAGRRRRPSSKCRVLRRVSLPALSLSDQRLQRRPRAKGGVFAFAPTSGNINLMPGGPMISPSSKRLPPL

SEQ ID NO: 60097 - protein, 88 aa, Zea mays
  Coding DNA Sequence Number=SeqID_16722
MSLPCKGRSLPSAKRGDGGTDTKTYNDIMKPGNGIRHSPYPEMKPQRWEKLPMSECTEKGTMRNRIPEVAEAAVIEDFYRGSNDSAFV

SEQ ID NO: 60098 - protein, 263 aa, Zea mays
  Coding DNA Sequence Number=SeqID_16723
MGTRTHYTQPRPALSNVDDARDRRQGLGWKRASSVRLAHVTSRDWLVPFGELEKAARLSSVHRANKPSHKPSIAQRSIPLQASSKEQGSGPVDVEGGQHQPPSSAAAGHPRMCFPIDCWLCMPHTDDDDLAPASRAQPPPPPPAQRNGSHYNGDGHYRPAHYSAAAEADRKASNDARRGPAHHGATGAQAKSAYPYAAEAADGDGALKQQPEAPNGRVAAADGHGARAAPRHDYERAQPPARKEDAADSYYPAATAAAYRERY

SEQ ID NO: 60099 - protein, 295 aa, Zea mays
  Coding DNA Sequence Number=SeqID_16724
MNKNTGIQSVITNGTPVPPPQVRTTPLDGGEPAEQQKTDGRLAVARSGSNNNDPRSGWPNCSRDGLRADAATTLPSPTPTLEGRGQGPSALRQIPTQILPDEWGIDLRVEAPYRCKGRTAPEHECRPGSARYLGRSSRAHGATTAFAAGGGTGSQAGESNASRLTTPAVGQPRVVEVRPSRRATTRRKDCGHPPSGGSEGGKTRCIREREDMVAFQGGHPPFKGDSPYLRPQLSWAESSPTRSKVLPLRRGGWVPHVMQAGPEQKKPNRRARCMQPPSGYKWPSTFAQTSGRKGG

SEQ ID NO: 60100 - protein, 724 aa, Zea mays
  Coding DNA Sequence Number=SeqID_16725
  Gene Ontology: Mol. function=aspartic-type endopeptidase activity; Cellular component=extracellular region; Biological process =proteolysis
  Homolog annotation: Hit_ID=Q9AWT3; Match level="QueryCoverage=66%, HitCoverage=96%, E-value=1e-174, Identity=67%"; Hit description =Putative aspartic proteinase nepenthesin I
  Pfam annotation: Domain name=Asp; Domain location=165-504; Score= -83.1; E_value=1.1e-08; Accession=PF00026.14; Description=Eukaryotic aspartyl protease
  Subcellular localization annotation: CTP_CleavageSite=51; ConfidenceScore=5.28e-01
MQPPTLLPLGAVVVAILLLATAPSPAVSRHRHSSAADTETLDVAASLSRARAALSTDAVSLHQSAAAAAGAKRSPRAREGGLTLRLHSRDFLPEEQGRHETYRSLVLSRLRRDSARAAAVSARATLAADGVTRLDLRPANGSAVFAASAAIQGPVVSGVGQGSGEYFSRVGIGSPARQLYMVLDTGSDVTWVQCQPCADCYQQSDPVFDPSLSASYAAVSCDSQRCRDLDTAACRNATGACLYEVAYGDGSYTVGDFATETLTLGDSTPVGNVAIGCGHDNEGLFVGAAGLLALGGGPLSFPSQISASTFSYCLVDRDSPAASTLQFGDGAAEAGTVTAPLVRSPRTSTFYYVALSGISVGGQPLSIPASAFAMDATSGSGGVIVDSGTAVTRLQSAAYAALRDAFVQGAPSLPRTSGVSLFDTCYDLSDRTSVEVPAVSLRFEGGGALRLPAKNYLIPVDGAGTYCLAFAPTNAAVSIIGNVQQQGTRVSFDTARGAVGFTPNKTAIGRAKRCRRRRLFSWDPEVTARTSREEVDEIEGGPALPLLAAASASQMPWGWGGAGLSTPQRIKETRRLVENSRHAVYLAKDDGAGESEKHSGGTPALPPPPLATLHARTQLAWPGLSTSSEAPSPAAEDAGAGGVEEKEEGVAHAPSLPNREQAQADVSSRADWPDLLSGLSWDGVLGCLMINLHINHQYTIPLARPSNVWYKRIKRFSTLSNSVL

SEQ ID NO: 60101 - protein, 113 aa, Zea mays
  Coding DNA Sequence Number=SeqID_16726
MEKDQRESSKKRKAPLRLVDPRHEMSALQATRAGVSKSQGTMAAATTEAMPPRAMLAIVVAVPPSMKKVARDEVVRVVDGEGGGTIPELSMEDYLIEGVLEFDAHTPLAGKEI

SEQ ID NO: 60102 - protein, 234 aa, Zea mays
  Coding DNA Sequence Number=SeqID_16727
MTSHGSSDDGNALSHTDGLAREGFPRILWEVLQGAGYMTPPQYAVQQFEKHRVPRCRVRMTLEPHPLQPGWRSLDSESFGYRAEDTIEAIALHGLTTFCGFHPLELATHPIGLFPAEKGGRPNVEGSGGACQGHLGYLPRTDCALDCTVHECSVPTASDAWENTIEVLKDQLINTQQQLAEANEHLDMHHQEIRDMEANEDVDIEGGEEPASSVDTAGSGRPPSPESSVASFAH

SEQ ID NO: 60103 - protein, 101 aa, Zea mays
  Coding DNA Sequence Number=SeqID_16728
MHWEIESFLDNELREDCNLADGEYVLVPEQGAAQEVAPDPAPEPAPEDLPATALEGKAGNPFELDTSSLEDMVAGVTWPSILPLGWTVEWDPTSAEEEHEQ

SEQ ID NO: 60104 - protein, 45 aa, Zea mays
  Coding DNA Sequence Number=SeqID_16729
MDNIDEVTDKRLTALGEIDQDKIIVAKAYNKKVNAKSFHLGDLLR

SEQ ID NO: 60105 - protein, 94 aa, Zea mays
  Coding DNA Sequence Number=SeqID_16730
MAALGPLTEARGRQQGLDSPDSCPSARLQRSSDGHDITQTGRQNLSDRHNGVARTRAEPRKTANSAPPDPGLGLGLSPGRRRTPLRPTQGSDSG

SEQ ID NO: 60106 - protein, 320 aa, Zea mays
  Coding DNA Sequence Number=SeqID_16731
MAERYQLPRSCVPPMTRRKDGGYPPSGGLEGGKTRCIREREDMVAFQGGRPPFKGDSPYLRPQPSWAESSPTRSKVLLLRRRGWVPHVIQAGPEQKKPNRRARCVQPPSGYKRLSTFAKTSGRKGGQPCRRHATAPSGRTSPTPNTPSMEAQAPASCNRRAECFVHATAPPLTPPPRHLDCGTNTATRGDPAHDPAAPAWRDGGASGRRSELRFAFAITTASKKGPGKGDTPKRILPREGTRLRASLLIRGSKAGPSEGFNSRLRARGLHTHYWSGVRRPAPRKGSTAALGYSGSAPTTDQGFEGWPPKGSQPPQTQSEG

SEQ ID NO: 60107 - protein, 132 aa, Zea mays
  Coding DNA Sequence Number=SeqID_16732
  Subcellular localization annotation: CTP_CleavageSite=46; ConfidenceScore=5.27e-01
MPGSRQFAHQRPAVHARSLSPVHARPQSLTGDPGSPSPDFGHPPPRVNQANQPDSSPPTSSPACASGPTYSDHHRRRSAPRRDRQRPPDLARPFTGAMSPPDMVDGVTWPTTLPPGWMVEWDAAPAGEEQEE

SEQ ID NO: 60108 - protein, 27 aa, Zea mays
  Coding DNA Sequence Number=SeqID_16733
MGDHVSGRVRRAICGQVHSGFSKHYAK

SEQ ID NO: 60109 - protein, 289 aa, Zea mays
  Coding DNA Sequence Number=SeqID_16734
MTSHGSSDEGNAQSHTDGLAREGFPRILLEVLQGAGYTTPPQYAVQLFEKHRVPRCRVRMTLEPHPLQPGWRSLDSEAFGYRAEDTIEAIALHGLTTFCGFHPLELSTHPIGLFPAEKEDDPMWKDRVEHAKDIWAIYPGQTAHLTVRCMNALYRLQVMRGEAMSHLMALLEATKITLDNREELVVDLSTEMVEKDLQVEQLSNGIQELEELVGTRENTIEVLEDQLVNTQQQLAEANQHLDMHHQEIQDMEANEDVDIEGGEEPASSLDTAGLGRPPSPESSVASFAH

SEQ ID NO: 60110 - protein, 194 aa, Zea mays
  Coding DNA Sequence Number=SeqID_16735
MEAPGFQTLCRQVATAPGSHAVPGLFTATRTEGEVLGIDREWRKEHGAPLLTTESWTPESNAEVSTITVESHRAQRHISNNHYSGWRKGKREYTSCKHKSKGGFNKKALKKKYLQKTKIKERAFLTSISDPDHDSDDTSFSSSDVESDRRKRDELQVSESSRKNMNCPSHGVHAQPVQRRHARLIGALPLAAMP

SEQ ID NO: 60111 - protein, 122 aa, Zea mays
  Coding DNA Sequence Number=SeqID_16736
MGKPVPSLLMLLLSRGKQHGSSSLISCEKQTILIEFLNLTSDRTCTHHNRNGRPCLRSRDEGNLRAGSLRLCIKPGLAFQSWGRQILWDRLWCWIRGYLLSSSLLRHEDVLSISEVAIYRMQ

SEQ ID NO: 60112 - protein, 202 aa, Zea mays
  Coding DNA Sequence Number=SeqID_16737
MARVACTLHGKRLDDGVSVLSVGVNPGCPRDKTLSRQLLSKTYPTKEKTQGYAGLKGFKVRATREHTTPFRWSFARRVRATLAISPLPVRDCLFMYGIFGFRLTHDEEGGKCTGACLIVGEGPKIILLCDTHYRPGRTGDNVCEPQGDSRRGLQARARSENADEILDVENGGSGTSAGELTRVADRELRQARVKLDAKLLLF

SEQ ID NO: 60113 - protein, 95 aa, Zea mays
  Coding DNA Sequence Number=SeqID_16738
  Subcellular localization annotation: CTP_CleavageSite=50; ConfidenceScore=5.21e-01
MEAPGFQTPCRQVATAPGSHVAPGLFTATRTEGKRMPTTGDVHSLSLSSACSLYWDRVCCCSLGLITSGERSTRTAFNHEVVDSRVERRGLRDYG

SEQ ID NO: 60114 - protein, 65 aa, Zea mays
  Coding DNA Sequence Number=SeqID_16739
  Subcellular localization annotation: CTP_CleavageSite=51; ConfidenceScore=5.53e-01
MPTVSYGKKTPSLPLVNRTHQSSTSSAQEERNVPTRRGHMKVTQGGRHSVRCTTRGPPVFTYDGK

SEQ ID NO: 60115 - protein, 39 aa, Zea mays
  Coding DNA Sequence Number=SeqID_16740
MPNWGSLHDTHLKIYRRTQEQTVNPHRVHTAQVQAHSLS

SEQ ID NO: 60116 - protein, 147 aa, Zea mays
  Coding DNA Sequence Number=SeqID_16741
MDSIYPHDPERPAWIEEDRSDRMVPRCSDTARTDRWTRYWRVGPVPQCPNMQAQLQGRRWAGAAYRVLNRDTTRNLETCEGTFDETAPCPSHDFESIGLDRMVQTIFVEEEHDDSDWGYPELTPLTALVKPASTTLTDGLDPTSSTT

SEQ ID NO: 60117 - protein, 57 aa, Zea mays
  Coding DNA Sequence Number=SeqID_16742
MESHDLRAEWESRLVGGYEIDGFGYDYGAGCQRCNHCSGEDEAVEGDFQEFQDYDEF

SEQ ID NO: 60118 - protein, 164 aa, Zea mays
  Coding DNA Sequence Number=SeqID_16743
MASGSSRRQRVREMRDERMKGKLNSNVFSMALLVQIFLKEAVLLSQFKVKKDFNKEHSLVKENCEFTRWVDPRPIFPHAEYISYLQNRIFDLEREVSNRNDEEERDNNNGGVSQVQVCPDPYCCCPCHNKNVGPSTSPPLPQQTTKMGGYYGEGSTQFGMWEHY

SEQ ID NO: 60119 - protein, 73 aa, Zea mays
  Coding DNA Sequence Number=SeqID_16744
MDLNLGAIIIGAEVDLWRRPPRTCHIVCHVEKVGANYVGATVRYLGANDDGARKEQERSGNRDVPGQWPLEQV

SEQ ID NO: 60120 - protein, 75 aa, Zea mays
  Coding DNA Sequence Number=SeqID_16745
MAPGEAVELGGCRNNSLAADNALGVALDGVRDVCAAVLHLEHLDEPCEDVKDVGDCTALLDAFVYIETSSAALRV

SEQ ID NO: 60121 - protein, 315 aa, Zea mays
  Coding DNA Sequence Number=SeqID_16746
  Pfam annotation: Domain name=Toxin_32; Domain location=144-176; Score= 13.1; E_value=0.081; Accession=PF08120.2; Description=Tamulustoxin family
MHCALPPSEPPDGEHPRCFRLAAVGGAQLRGGWHLSAIARLQGFSSGSLAASPHQWSRRKVTTGSMVGRSKLGCGLCPALSFKDLHHPCWGGGRGEPGPAFAWAGVPLSPPASGGGNHPPTLWRRHPPAMRGKANCCCLARVQHFVLCPGDCGRPHRGVSQHVVRREGGTRVLGRSRSRFRGKDGSEDLPVRFGAAGTRRCDVGGQVDAVVGAEAAAAGEGFSTDETVGAPRGLTSSSLALIACPRPSSGDAGEGLVAAVSALRSSLLLFSRPERRSLSLLMERAAASHLEFVVPQALRCGGLFIPAGVELEFRS

SEQ ID NO: 60122 - protein, 340 aa, Zea mays
  Coding DNA Sequence Number=SeqID_16747
MVTRSTITKTEGMAEQGAGRAGPGKGDTPKRILPREGTRLRASLLIRGSKAGPPKGSTAASDRVGPTPTTGQRFEGRPPEGFHGRLRLLGLRAHYCSGVRRLAPEGFTVASDAERGMTRGDRVWQITRRYFWACLWAPSRPLTNGAQTSTRITRLQLTGDTMFGAHRGLGGCSREPGSGRTVDSVNIPARELGPRPYTRATASSHEGTTRPAEALRKALRPRRSNTTPPRPRGLHPAGALARTHRNKMQPRKAGPLAKKCDESLQASANTPFEARVLLSGTIIRGTLKTPNSQLSETDRLSGPTKGTLGSSAPPDPGLGLGLSPERRRTPLRPTQGSDSG

SEQ ID NO: 60123 - protein, 142 aa, Zea mays
  Coding DNA Sequence Number=SeqID_16748
MAGSKDSSEVSTNNIIEPIWKTLPDDEQLQFEEHKEQLIQEAKAKFLANFKVDRNNKVVRQRTTDLASLRHTTDTAIGLPPAAIDIVREEIAGAFRVKLEAQAGNQALAPVLRITDGLTHRRGRSGTPPDSPDHSSRQSGNA

SEQ ID NO: 60124 - protein, 313 aa, Zea mays
  Coding DNA Sequence Number=SeqID_16749
  Gene Ontology: Mol. function=phosphoric monoester hydrolase activity; Cellular component=cytoplasm; Biological process=dephosphorylation
  Homolog annotation: Hit_ID=A7PX96; Match level="QueryCoverage=81%, HitCoverage=74%, E-value=2e-38, Identity=79%"; Hit description =Chromosome chr12 scaffold_36, whole genome shotgun sequence
  Pfam annotation: Domain name=Y_phosphatase2; Domain location=58-313; Score=160.9; E_value=3.5e-45; Accession=PF03162.4; Description =Tyrosine phosphatase family
MKLEVMPKPKQRVLEAQQREEAMEMSGLDLWKHEKPPRICPLPPSLPPPPPAFDEAALVPPLNFAVVDDGIFRSGFPGTANFRFLKSLNLRSIVYLCPEPYPGTNTEFLEKNGIRLHQFGIEGRKPNLSWDHYVATAQRFKTDCRYLSANGRAKQHTRFYLEMYRFIFSYIMIFEMYFHTNSGYPYVMSLCKNWISKHGRFEQLFLIRKHDLKGNIYLLDLFEPFVNIPDDKIREALKVVLDPRNQPLLIHCKRGKHRTGCVVGCLRKLQEWCLSSVLDEYHRFAAAKARITDQRFMELFDVSSLKHLTPSHC

SEQ ID NO: 60125 - protein, 546 aa, Zea mays
  Coding DNA Sequence Number=SeqID_16750
  Gene Ontology: Mol. function=DNA binding; Cellular component=nucleus; Biological process=translational initiation
  Homolog annotation: Hit_ID=A2ZPF8; Match level="QueryCoverage=23%, HitCoverage=52%, E-value=1e-32, Identity=55%"; Hit description =Putative uncharacterized protein
  Pfam annotation: Domain name=eIF-5a; Domain location=37-88; Score =46.2; E_value=1.1e-10; Accession=PF01287.11; Description=Eukaryotic initiation factor 5A hypusine, DNA-binding OB fold
MPLIKVYNIDSDLYGLKSHSIFKSDLQRRSMVPTIPHVNRTEYQLIDISEDGFVSLLTSDGNTKDDLRLPTDETLVAQRLRRASTSFTVAPPAPSPRLAVVLAASPHLSQPSPAGSSMVPRDPCLCPHPPPRSPHFAARPIPASRSHTPSPYLAAAPHPWRRGIHALALPPSPHLTARPIPASRSHTYRSSASVLASPIHDHRHDDENHWGLPRLAAQVGNPLAGRLPDLRQTVARWAPRARSPDLGAGGDGAVEGLAAQEVSEIMIAFPGASAYLLAMLALVIVLFYFTIFAFIVTHRGTRNWDRIRSCLQDSKCRLPPLLPARARPARNGPTPRTARRPPRAHALPNAVAKPPHDRASESHNGRRETSAAQHPPPKRGGVKYLHLEWAAGASVPGAAAAARVNADAQRQSAPPLFAAGGSRFIGAPSLSDTSIDWAGGGGVTGSASEAPAMGAVQDQQQIELPLSPEDVPFAQVYRFVGDMFDADAPVPAEAHLQKLKEMDDITAKTVLLVLRNLENHLSVPQFERVRRLLSTYDPTRAMSGQL

SEQ ID NO: 60126 - protein, 415 aa, Zea mays
  Coding DNA Sequence Number=SeqID_16751
  Homolog annotation: Hit_ID=Q60DK0; Match level="QueryCoverage=31%, HitCoverage=61%, E-value=3e-26, Identity=50%"; Hit description =Expressed protein
  Pfam annotation: Domain name=GCK; Domain location=319-395; Score =114.1; E_value=4.1e-31; Accession=PF07802.2; Description=GCK domain
  Subcellular localization annotation: CTP_CleavageSite=67; ConfidenceScore=5.43e-01
MEPPVDVAGPRPRLGDVEAPPKSRSRWSPSPGVGRSGVRRLPGLSPSPSPGSGRAEFAVFRGLARVRALGRAEWSSPSSGAEPESEPWVGWSGVRRLPGLIPSPSPGSGGAEFAVFRGLARVRALGRAKRSFLWCLRPGLTACQPHSVKWHCSRSGAGGAVFLSGRSAEQRSDGGLLLGEDRASDEPEVCSSLEGGLGRDRDPPGFMLMGFTSGELGDLRVPLIMVPDKAAAICWPQNPSLMGAAAAAAGADPPPSEAAATPAREDQQHYVAAATGGVSGESCDAAAPPAGGGGADDAVEPVVIDASAVAGGAGEEEQGECGFCLFMKGGGCKDEFVAWEKCVEEAEAAGPSVDVVELCQDATAALRKCMDAHAAYYEPILRAERAMAADLESFQTEEAASHSAASALASEEGQR

SEQ ID NO: 60127 - protein, 295 aa, Zea mays
  Coding DNA Sequence Number=SeqID_16752
  Gene Ontology: Mol. function=kinase activity; Cellular component =ornithine carbamoyltransferase complex; Biological process=amino acid metabolic process
  Homolog annotation: Hit_ID=Q6QP54; Match level="QueryCoverage=30%, HitCoverage=39%, E-value=6e-22, Identity=53%"; Hit description =Putative kinase
MAGSKEHTKISTANIIKPAMEALPTDDQRPFEDLVMRDEKEVMRQWNEQRDKEEAELLHKLFERRKEAADKYLSHFTVDRHQKIVRQGEIDMESLLPPLQGPAVSTPDLSLTTFMDQRGDQLKQYVDESIKMHLRAYEKSAAPNFPSRESNTVPPASNTSAINGSPLTQPSYGMPMHAFVPPSHPQPLGTRVMMALPVDVAGLRPRSGDVEAPLKPRSKARAESEPWGQAKRSSSSSGAEPESEPWVGRSGVRRLPGLSPSPSPESGGAEFAVFWGLARVRALGRAVRSSPSSGA

SEQ ID NO: 60128 - protein, 70 aa, Zea mays
  Coding DNA Sequence Number=SeqID_16753
MVEAPWVRYLSQEYVPMLTWAANTYRSPSCPYFRSDCIKLSCSNSIAAKSMQKGEVHLPLLIENLRFFHG

SEQ ID NO: 60129 - protein, 91 aa, Zea mays
  Coding DNA Sequence Number=SeqID_16754
  Subcellular localization annotation: CTP_CleavageSite=75; ConfidenceScore=5.07e-01
MSKNTRDTRFIPRFGHTTKVPYFFVEAPTKSRVSFNPNPPFADHKGQAHTIIFAQTSGFYLLPQTSISSIAAVIQGSISKALRVLMRIDVE

SEQ ID NO: 60130 - protein, 295 aa, Zea mays
  Coding DNA Sequence Number=SeqID_16755
  Homolog annotation: Hit_ID=Q8H6I4; Match level="QueryCoverage=18%, HitCoverage=2%, E-value=2e-07, Identity=50%"; Hit description =Putative gag-pol polyprotein
MSGGLRNESASKLEKVEVASTLSFGADVDPRAIDLAMRIAERMFLKMKEDEAKNKIEEENDRWRPNDESTSSQGSSFKSTSHMCFIANGSDSESESEDEEEQESDSEDEDDLQQFFAQLSKKHRMSLLKLMKRAEEQKEMLHKQEDFLIRKIEDLEKLTKEHEKLKCSHDYLVQSRQLPSSATRKAAQAPRLCIRPPGAAPLQPALKTRRPEPRATPFAAPPSVSRRLAPALRQLPLPGIVCHQGLPVRPSCVQQSGTGGRRPLAPAAWALGHSQCGPCGSVHSGLGQLLANPNQ

SEQ ID NO: 60131 - protein, 362 aa, Zea mays
  Coding DNA Sequence Number=SeqID_16756
MVSPVSYKRVIRVDVRAPFVGGRLGAQRHAQKYLRQLARWLRDAWAWASKPACQKSEKRVHLARLHAACMAARPFRPLVWAKPGRTPSPAVTQDGDLQLDGGGKRAGLRPLPLPQPQGFSSPRLGRGECRVGLQRARSSDASGFGAARGAGVCHGSWKRFFRRSDSPGRPRTDLQLYGLLPVLASRVFGVGGGLLAAAPALRSVLPLFDPPEQKSSSSPLLEQTPRPLFDEPRPGVAISVRTEAELARKWEPGWPEPSRVARQRGSTSESISRGLGSGWRPWKMLGRGPRGNRPSRLLGPDSGRSPRTASPSEAGSDLAEDVVDAEGVAAPFSVKTRACRIRLSCSVCLLRPPRPENTPSLR

SEQ ID NO: 60132 - protein, 811 aa, Zea mays
  Coding DNA Sequence Number=SeqID_16757
MASGCAEGASLAWCAAVRTEGSAGFSALYRGLAAGYGQRTRAEKERKGSRSGSIYRWRREPGGCYRPLAHGWALGEVCPRQMPFHGGRVVRSPAFALNLRNRDPTAFVRDAEDLAVRLVGRYVPRTEGQRSFDIRGSNERLNRVFELNQLPYDGYPGQDEADRRGKKPAVETGGDPALAAAPSSKKRKLGTAMGGLGVSDSFARELMRTCAAPGERMSSPELRESSARMLRVTGGCWPRNVPIPCAAEEDCFISRMVHWWRVFPYGRNIGAVVWAVMDKDRQGAAQKRQATVRVHEARPKRQRGTAKAAASGGGKPPLPAKAGASAPSKASEATVGAGGSKLTKVVPPVSGVAEAAKAARTLPPPGKRVADFGTEINVEDYLGGSDGGQLALVVPGAAIATAALAPKARGETLGVGGEVSALALVRDEAGVATRRLKGVTEALSQATEALSNGLTCALQVADFTSRTASGALTAALSAEVERLRTQHADAVREKSASDSKCRKLADKVVALEKEKADLRRQLAGERREANEAIAKEQAAQAEARLARAEGNIAKELAGELQGRLTALESRAEGAEAAMRAEAERTRTQLMAAYRELGARTGDFEVPEREAGLRCLEWVQEELQELPTVLEGLMSFTSLVTCEAAMNALSREGCRHFEALDQADEDFGRDIFEVEDPVVKESAGALYDRMWGSYGREVVRERAEAARAQAERGERVDDFGALNSALPDPETTPAEAATGVALGPTPETAGDAPGAPASAAAGEDLPPKVAEGAPDAPAAAVPSAEDPAAVVAEAAAEASAEASAAAGPSQVA

SEQ ID NO: 60133 - protein, 149 aa, Zea mays
  Coding DNA Sequence Number=SeqID_16758
  Subcellular localization annotation: CTP_CleavageSite=45; ConfidenceScore=5.71e-01
MPRPLFPPPPRAHDSLPSAHFRPAPTRAPARPALSLSLTSRPHPSAAPSLASLAITPTGSVAPLVSRFVVFPAVPSSRSPPAIASVPFFVFSPHREVCHRSVLPPSTSVLAGTALPWCLIGGAVRHLWAALCKLTGTAKPHRSPSLARL

SEQ ID NO: 60134 - protein, 122 aa, Zea mays
  Coding DNA Sequence Number=SeqID_16759
  Homolog annotation: Hit_ID=A3BU59; Match level="QueryCoverage=46%, HitCoverage=5%, E-value=2e-07, Identity=51%"; Hit description =Putative uncharacterized protein
MEFSQIYDPTYDDIGDIFHQLHREVKARAKEMKKAKQALSTPPQPVLTQKNLGSKGSGSDSSPEFRSTRRLEGLAKDFGPIILQDFLQTCAILETIHAAISEMNYGPPLIFPYSNDVIDVVE

SEQ ID NO: 60135 - protein, 64 aa, Zea mays
  Coding DNA Sequence Number=SeqID_16760
MDPKGKVKVTEEKEKDNPSGDTPKGGETVDYGFDKRRKCIKKIRSNGYFAPTVVCNALNARQRA

SEQ ID NO: 60136 - protein, 107 aa, Zea mays
  Coding DNA Sequence Number=SeqID_16761
  Subcellular localization annotation: CTP_CleavageSite=42; ConfidenceScore=5.25e-01
MALPIDVVGPRPRLGDVEAPPRSRSSLSSVAVVESEPLTNASSSVVQSPASFTSSHGSSKCSKCSTSEGPSPSPSPGSGGAVFAVFRGLARVRALGRAERCSPSSGA

SEQ ID NO: 60137 - protein, 81 aa, Zea mays
  Coding DNA Sequence Number=SeqID_16762
MPPRRADLEPGRRIEEIEDCVVGSMENCSQFDGLQPYTSVLDSGYYTDLLVNVVEESQVGLETSRAELGSARLGVARYSSN

SEQ ID NO: 60138 - protein, 281 aa, Zea mays
  Coding DNA Sequence Number=SeqID_16763
MVASVITSKHRPHLSHPVLEGHRQVAHLEQKRWRREATTEAQGLDGATVVELRLREDCSGEHGLDAAWGKGHTEGCLEQLTVRQSSPWHWTRHVRDGGHRQAVVDGGRWRSSLHAWAERERGREGGAEGANERGEVGEQGARFKRGVGARTWPENARSWARPLREDRGREVEDELTGGDAICATTASEIQAATLACARALWLVSSGKPQIVLQYNTLGTTPPPSRPHYTDPCASVDGILEDSAIPCHVNQGPSRYSVDKEVWEGEDYGKGKRTGAYKFGHR

SEQ ID NO: 60139 - protein, 118 aa, Zea mays
  Coding DNA Sequence Number=SeqID_16764
  Subcellular localization annotation: CTP_CleavageSite=68; ConfidenceScore=5.04e-01
MQESLAGPPSQQNPPEGLPTLTTPLLPLPLSGKVCPRRSTDLQWRRRIPGATVGDSARLHAHTVPDTRVFTRFPHTSQIDGPPRDVPSRGAFLTALHSDDVFLAHVEVLLYGRRKEGL

SEQ ID NO: 60140 - protein, 108 aa, Zea mays
  Coding DNA Sequence Number=SeqID_16765
  Homolog annotation: Hit_ID=P15268; Match level="QueryCoverage=66%, HitCoverage=11%, E-value=1e-07, Identity=41%"; Hit description =Autonomous transposable element EN-1 mosaic protein
MEIGIGRTCPSTARDTTLRLTLRWVLFAAFTTLVMVPWMAPVPDAYYAWCRYWASEGFQKASAHHRQCRGTNPNHKFGGDDMIRKAKRMEATSGQKPSDIEVYQEGHL

SEQ ID NO: 60141 - protein, 478 aa, Zea mays
  Coding DNA Sequence Number=SeqID_16766
  Gene Ontology: Mol. function=microtubule motor activity; Cellular component=microtubule associated complex; Biological process =microtubule-based movement
  Homolog annotation: Hit_ID=A3BXJ1; Match level="QueryCoverage=28%, HitCoverage=11%, E-value=1e-34, Identity=57%"; Hit description =Putative uncharacterized protein
  Pfam annotation: Domain name=Kinesin; Domain location=296-478; Score=- 164.7; E_value=0.00023; Accession=PF00225.14; Description=Kinesin motor domain
  Subcellular localization annotation: CTP_CleavageSite=79; ConfidenceScore=5.53e-01
MAATGQHYYNSEGGRAATSLIPNMNQAFTFFGARFCRRPLSSLAPPLSAVRRQTRNLRAILSPDPPPLSPLCCLSRPPSARSLAAISAPPLSSLQSATIYGNLCPRPQIVHASWQPRPAPKLPLRAPSRPPPRALKSRQPLPAVIHCRKSACDPPPSMATFHRPRVCPTRLCVSLPALCRRASPVAREEASTLDCQRGRARARLAREAAASTIAQAAADLLERAEPSPSRRRPRPSHSPPRFSFSRGATARPSSENQRAAGLKLRVASPSAPVRSWAAAAAGRRSTAYLPRLPSVPALDTQLVSFATTCISYRSVSELQNFGFGGNERITVKAAGIKKEFGADRCVVPTEDVFEEVKPILRSALDGHNVCILAWVALQEGTNGNKLGVVPRTIQELFSRASEDGSCAYSFSISMLEIYLGSLRDLLAAPRQPLFRQTECKAAAWLMVVTGAGMSTESGIPDYRSPNGAYSTGFKPLSH

SEQ ID NO: 60142 - protein, 105 aa, Zea mays
  Coding DNA Sequence Number=SeqID_16767
MSSSSSSAADTPPTGASSEGTLSNVAAEELHPSDTVEFGASRMSSVRVHDMQQLGYFGGGVARVPGAEEVPEPEGELVVFEAFFAADLRLHAHQFMAEVLRRFEL

SEQ ID NO: 60143 - protein, 377 aa, Zea mays
  Coding DNA Sequence Number=SeqID_16768
MGRPRHRSSSFGVSDEGIERRVASSPSPQHMYRGPVSLYGGVVRVQRLHTIEEGTPDSGPAATSDRWSSTRMTTSLVVERSEPGCSLPLASASRMFIILAGVEGEPSWGSAFRMGWRPASSSSIRGRRAFTSLAEEANFGYAGVRVLGWSCPHYRSEDGSEDLFAHAGAAASCRYDTSAQVAAVVGAEVVAAAAVAAAVGAEVVASAGEPLGASYPTVLPMWGAVERAGPRYGTRLSICTGSGPPQETNVHSLAPVPRPTVRDQAERLHGIRTTPWNGVSFSRASPQAVGPPNFRIRGPKLQVWLLNSDVVIPIGRVYGDRPPPGCRTRLGPDPGFPSAFYTGALIFGCGHSRVYLSAAWTHGESRRVSKGRHASAP

SEQ ID NO: 60144 - protein, 176 aa, Zea mays
  Coding DNA Sequence Number=SeqID_16769
  Homolog annotation: Hit_ID=Q6J9V9; Match level="QueryCoverage=24%, HitCoverage=23%, E-value=9e-07, Identity=51%"; Hit description =Putative uncharacterized protein
MPRLLDYGTSAATRGSPAHDPTVPIGHNDHRSVSRKGRRDGRYGQKWAGSNCSSRRAEAAVKSPAGLRPLLKRQKSPLPRHEDDAPVFRSSNDSSTHNGRPANRSSHHINSSAGQATPLAGEAGVVSRIGKGDTSKGILLREGSGPRALLLIRGSKAGPSEGFDSRPRALRLQAHY

SEQ ID NO: 60145 - protein, 108 aa, Zea mays
  Coding DNA Sequence Number=SeqID_16770
MARSVQAQGRARRRLLLRPRLGSGEDVIPPEAEAEAESWGRARRRPLPEAEAQGRARRSFLLRPRLNLLLLALPGWLAQQSERGERRCFLSGRSVEGRSDCGHFDLAD

SEQ ID NO: 60146 - protein, 196 aa, Zea mays
  Coding DNA Sequence Number=SeqID_16771
  Gene Ontology: Mol. function=NAD-dependent histone deacetylase activity; Cellular component=chromatin silencing complex; Biological process=regulation of transcription, DNA-dependent
  Homolog annotation: Hit_ID=Q2QWW9; Match level="QueryCoverage=20%, HitCoverage=10%, E-value=2e-11, Identity=78%"; Hit description =Transcriptional regulator, Sir2 family protein, expressed
MELGGCRNNSLAADNAPGVTLDGVRDVCAAVCCRAACTAAVPDIGWLGTCDLACWLMSRATSHAAAAGFRLSGKRRASSFFFLALLLLHHRAGSNPLELHGSVYEVICLECGTSISRESFQEEVKNLNPKLAVYAHLFLPHRDPSRGDFEDLRHRRRAKPHRQLCLKLTRVHSRCLLKDDGKGVREPLDEVVCVCL

SEQ ID NO: 60147 - protein, 51 aa, Zea mays
  Coding DNA Sequence Number=SeqID_16772
MVLVCGQQSMGIGYLRGSLKDMVAGVTWPSTLPPGWTVEWDPASAEEEHEE

SEQ ID NO: 60148 - protein, 223 aa, Zea mays
  Coding DNA Sequence Number=SeqID_16773
  Homolog annotation: Hit_ID=O48967; Match level="QueryCoverage=29%, HitCoverage=14%, E-value=8e-09, Identity=53%"; Hit description =Putative uncharacterized protein
MGVPHACALWRALIAVAGDRWREGGWATHNRDSGFWEKEYPDLNQGQVGVRSRHVSGSYRIRLCSPLRQRPEAATWPAARDHLMSHVHSAGRRCAASAFNVPCPLRWQAVTGLSRGRRACPSIGRHMMVQIVEHRAETLEDFLVEEEAATFTPRVPNRLVLGATAMHAAQQHTTAQTSWTPSRAASGALVSWGGLEPYERVEQCRAVAGVLHVLARFAQVLQM

SEQ ID NO: 60149 - protein, 51 aa, Zea mays
  Coding DNA Sequence Number=SeqID_16774
MVLVCGQQSMGIGYLRGSLEDMVAGVNWPSTLPPGWTVEWDPASAEEEHEE

SEQ ID NO: 60150 - protein, 174 aa, Zea mays
  Coding DNA Sequence Number=SeqID_16775
  Subcellular localization annotation: CTP_CleavageSite=38; ConfidenceScore=5.13e-01
MDPPVTWSVRALGRARRRLLRGRGRVCLPRSRSSPSPRSGEAETIVWGQGRVRALGSGEAEFVVFRGRARVRALGSGEAELPMAPEAGLGCCQPHSVERHSSHSNAGGAIFLIRCQAILALNAPAIRSVGVAIWPRLLLGEDWASGEPKLCADGGLPAEIRSLGGTPNYGPQQF

SEQ ID NO: 60151 - protein, 120 aa, Zea mays
  Coding DNA Sequence Number=SeqID_16776
  Subcellular localization annotation: CTP_CleavageSite=42; ConfidenceScore=5.08e-01
MHPISVMHVPPPPPARDPPRSLYAPASSSARIPPPAPDMEMKASASDETLAAVLDHLKPHTVGTFLPPRCTGPQSASAIALLRAYDLRRRSELRTAAAGMTKTTTPWRAAGTTYNELKVR

SEQ ID NO: 60152 - protein, 203 aa, Zea mays
  Coding DNA Sequence Number=SeqID_16777
  Homolog annotation: Hit_ID=A2YZ16; Match level="QueryCoverage=87%, HitCoverage=44%, E-value=8e-57, Identity=68%"; Hit description =Putative uncharacterized protein
MAATSEEAIKQFSALMEQRESSSLVLLLFFAKNQEKIRLFSSSWPLNCSNFFLAVEEPLKSTFQLMDCLNWRVQNEIDIVLAKPILPSDIYRVIRDTLLVGLTGYSKQGQPVYAFGVGLSTFDKASVNYYVQSHIQMNEYRDRVVLPAASKKFGRQINTCLKVMDMTGLKLSALSQIKSYFTAIRQFEYCAHILYSILKPTGV

SEQ ID NO: 60153 - protein, 126 aa, Zea mays
  Coding DNA Sequence Number=SeqID_16778
  Gene Ontology: Mol. function=catalytic activity
  Homolog annotation: Hit_ID=A2Y3P0; Match level="QueryCoverage=65%, HitCoverage=24%, E-value=1e-21, Identity=65%"; Hit description =Putative uncharacterized protein
MEARRASRYRVRERRSWRPRNPKPGLKKKTCKVKEALALVSLIDDEKKLGDCQFDLLKQSYVVVCAAVFGKLRRSRRLDAVQSGCTALSIVKQGDLMVVANAGDSRVVLGTAPDDGATTPSNSSST

SEQ ID NO: 60154 - protein, 159 aa, Zea mays
  Coding DNA Sequence Number=SeqID_16779
MPLIHYEQILLDVYSKTNKVRGSSPRIMAVVDPDTRWRSIVAEFELRRAIVATVPAQFSNYAHQSFRDDPPADQIHERRRGDSGIPRGGGNAAASAHLRLQARDDDVTRLGRGTMRMVRRSRKVRAHPLWARESVPRWRGAWWSARHWRGGGSRLRRKR

SEQ ID NO: 60155 - protein, 133 aa, Zea mays
  Coding DNA Sequence Number=SeqID_16780
MEQTPPRRCISPEHPHTELWPPSTQRNDAIREWKWIEPRRCKLIADCRVIGYGLLAMRSMDDGDANSVLYPERCTLVGKAVTAATRLSRSLLSGREHRRKVGVEPDQWGSQGSGKGARARGAGQWGPGICVLG

SEQ ID NO: 60156 - protein, 73 aa, Zea mays
  Coding DNA Sequence Number=SeqID_16781
MGQSPEYKVYFRKSYPTKEKDSQGYAGFRNQGEALSKNQLRYFCRNSLLKLEIKSPLFRDIRRSESIYSAEDL

SEQ ID NO: 60157 - protein, 213 aa, Zea mays
  Coding DNA Sequence Number=SeqID_16782
VGLPEPRQPLGSLLPDGVPLGSEIQAPPAIFRRPCARADRPALGRGPSGRQAGNPCLCARSRTVRPQAADRPSLTREHRRRFFLSIWRSKKASTYFLATPLGKTNIDASNQPSMAGSRDSSDISPSNIIEPTWETLPADEQLQFEEHKERMIQEAKAKFLADFKVDRNNKVVRHRATDPASLQPTPNIPNVSSDSYQKGRSSKDTKVDTAPKL

SEQ ID NO: 60158 - protein, 410 aa, Zea mays
  Coding DNA Sequence Number=SeqID_16783
MNKTPALKVPLQMELRFHLRRNKQPHTIGGPAEQQKADGWLAAARSNSDDDDFCPEGPNSSSDDLRADAASIRPSPTSSLERRGQAEGRRVGGQSVGGTGYLVGGETSSGCHGGRGWWSPSWVTTGEGMRPSCLMKILEAERWLKDQRLKGRTAMQSACNRAKWAHPFDSNAPSMEAQAHTACNRRAGCYVRATAPPLAPLPRLLDCGTSTATRGNPAYDPTVPARRIGHEPAGGSSGHVVSQAHVPSWDSERTLSHGVKTARPCSVPRTARSRATAAPRTTRPVALTPRRDRRHLWQEKRATLRLRHNDRVKNGTGKGDTPKGILLREGNGLLAPLLIRGSKAGPSEGFNSRLRALGLRAHYWSEVQRPPPQKGSTTASGHSGSAPTTDQGFVGWPSKGSQPPQTQSEG

SEQ ID NO: 60159 - protein, 217 aa, Zea mays
  Coding DNA Sequence Number=SeqID_16784
  Gene Ontology: Mol. function=kinase activity; Cellular component =ornithine carbamoyltransferase complex; Biological process=amino acid metabolic process
  Homolog annotation: Hit_ID=Q6QP54; Match level="QueryCoverage=29%, HitCoverage=22%, E-value=1e-13, Identity=61%"; Hit description =Putative kinase
MEHRPGLERLLETAHLELDGKLFVNTQQAPTWRANYRRFEPGGSLGRRVNCRRVPQPRWVGARRSAKGGKSRRETGVKGETHDLRVCPAPRSGALAVGGYKRPRGREREAYASAVPSFPARQTLRKRALDLPFIGAEVESEPLGRVRRRPSAEIRAESEPWGRVMRSSSSSGAEPKSEPWCGAMRSLSSSGAEPESEPWGLVMRSSSSSGAEPESEP

SEQ ID NO: 60160 - protein, 136 aa, Zea mays
  Coding DNA Sequence Number=SeqID_16785
MTVAGGREQRSRRQPSSRPIRGQQENLLSRREDNAPVIRSSNGSRTRDDRPANHSPRRINSAGPGKGDTPKRILPREGTGLRASLLIRGSKAGPPRGSTAASDRVGPTPTTGQRFEGRPPEGFHGRLRLLGLRAHY

SEQ ID NO: 60161 - protein, 261 aa, Zea mays
  Coding DNA Sequence Number=SeqID_16786
  Homolog annotation: Hit_ID=Q76SB0; Match level="QueryCoverage=45%, HitCoverage=10%, E-value=8e-07, Identity=25%"; Hit description=ORF 73
MTSHESSEGGNAHSHTDRLAREGFPRISWEVLQGAGYTTPPQYAVQLFEEHRVPRCRVRMTLEPHPLQLGWRSLDSESFGYRAKDTLEAIALHGLTIFCGFHPLELSTHPIGLFPAEKEDDPMWKDRVEHAKDLMGLVEATKITLDNREDLVVDLSTELVEKDLLVEQMATQIQELEEQVGARENTIEVLEDQLLNTQQQLEEANQHLDMHHQEIQDMEAERADEDVDIEGGEETEPASSLDTAGSGRPPSPESSVASFSH

SEQ ID NO: 60162 - protein, 116 aa, Zea mays
  Coding DNA Sequence Number=SeqID_16787
MQSQKNVLLQYQIRHLQNGHWELAAAELLSLGNDLPNGLVPHNGNMHDFLLELALLDCSGWLLGQEDGLPGCSNADIDFLLAGCSDGTAAVAEETASGTAAAGSDANPGVGAGDPA

SEQ ID NO: 60163 - protein, 314 aa, Zea mays
  Coding DNA Sequence Number=SeqID_16788
  Homolog annotation: Hit_ID=A2YGC2; Match level="QueryCoverage=51%, HitCoverage=68%, E-value=1e-12, Identity=30%"; Hit description =Putative uncharacterized protein
MARLRCTTRKSMIPFLPSRLAERPLRHTVPAAGGDPDGDGDDDDAGGSSSHGTELSEEPEPEGWIARPITRDAAHGCHFHDALDTLLRRAFDRHTWSIEYRCVVYQHRHGLYPDQWEATCLVRRPDDDLWGAEAFSEHYSITERDTIEVAMQDAARRALSQYCSLFSGVADGLDLKYYPRRSTGSARGVIASPVGEGNPRLNNMVNLAVVLTQSWITPLTSWARFGRRLRNCVMSVQHTTIWMVVHPPLSRFSTLTVRRPVVASTMMSENRHRGARRAQPEQQAPQEEAAPQQHLPPPPPMTIEQMFLMQTQAV

SEQ ID NO: 60164 - protein, 288 aa, Zea mays
  Coding DNA Sequence Number=SeqID_16789
  Gene Ontology: Mol. function=xylose isomerase activity; Cellular component=cytoplasm; Biological process=carbohydrate metabolic process
  Homolog annotation: Hit_ID=A3A7I4; Match level="QueryCoverage=51%, HitCoverage=43%, E-value=4e-43, Identity=51%"; Hit description =Putative uncharacterized protein
MGQVPWVRKFSAIMNWRPRINGLLGNINANTGDPQVGWDIDQFMTDIAEATLVMSSVVKNGGLAPGGFNFDAKLSVPFVIFCSSKIALVRFVIDKRTGGSHGFCHVDFQDDEALEIAIVLDQSKLEGFPLLGPTEAVSIAYSILLYDIYVPDWEYQIAGPGSSSIEKSFSFSAPLSQSSNKKLQQGCNIDYPENGSLPPDAPSWCQAPFDPEGLLSSVMAIVTCLTGLQFGHVIIHFESTVLNFVLAFVMDFVGMRMNKPLYTMSYTLATAGAVGLLFAGIYALVGPS

SEQ ID NO: 60165 - protein, 356 aa, Zea mays
  Coding DNA Sequence Number=SeqID_16790
  Gene Ontology: Mol. function=oxidoreductase activity; Cellular component=endoplasmic reticulum; Biological process=electron transport
  Homolog annotation: Hit_ID=Q9ATV0; Match level="QueryCoverage=61%, HitCoverage=42%, E-value=9e-93, Identity=73%"; Hit description =Putative cytochrome P450
  Pfam annotation: Domain name=p450; Domain location=25-351; Score= -20.1; E_value=3e-12; Accession=PF00067.13; Description=Cytochrome P450
MNTRCVASHGGNSRAAAAEGRCKEPRPGRLLCHWVTNALAQAGLESSNLIVGIDFTKSNEWTAAIYTKESLLNNVLAAIPPNLTSEEWSAALPRARALVVGFVKTDKDFQTKANQELKTIFIVSVNVSVLVFLVHQLDGANQSPSYCSAPEDFIVDNCKNIYFAGHETTAVTATWCLMLLAAHPDWQDRARAEVLEVCRGQTAMDIDVLRQLKILTMVIQETLRLYPSGSLIMREALTGISLGGVDVPRGTIIQVAISVLHLDMEAWGPDANEFRPDRLANGAAAACKPAHMYMSFGYGPRLCTGQNLAMAKLKVVLARLLSKFSFSVSPGYQHSPVFRLTIEPESGMPLVVTRLA

SEQ ID NO: 60166 - protein, 571 aa, Zea mays
  Coding DNA Sequence Number=SeqID_16791
  Gene Ontology: Mol. function=cysteine-type peptidase activity; Biological process=proteolysis
  Homolog annotation: Hit_ID=Q5NKP7; Match level="QueryCoverage=94%, HitCoverage=62%, E-value=0.0, Identity=85%"; Hit description =Putative uncharacterized protein 9C20.3c
MKHVDRPPNNPKRITIQSSQECFSVDIPSAEQSNPCPEVGNPPNVDSQNLINETVQLDSDEDDFMPALKKRNVSESHTRVLRKVVTKRIKHEELPRQRLNVRCNPQDVIASINILNKRQREAIRRKGFSNILDMTVDALCSRSHLQWLMDKLDPKDMTICPRPGKELKITKDIVHLVLGVPNHGGGKPLGIDEAVAASNLRAELGLAKDEFNVTFLQDRLRKGKDDDLTIRCFFLILFNRLLFPTASWGITYHEVLLTEEMHRFHETDWCQLIFNDLCEAAKKWHNRITTNVSTTIYRCSIVILLYYLDHLHAAAAPQNKIGTPRIKFFDKNIIKALTKADKRKVRHGAEPFGHCEEGGHGFLLILLNNQPECRTNIFDAPRPAPTPRPTFNIQLPSIKEMMSSKINDLPPCHRSKFTDILAAYDLEVDKSCIAIKDSIDKIIEKQYDIADKFIELIDEVLCAESDNLENETDEPQHPRNSADSAGHTVHATQPTPDMPSQASQLETQLGGTQFEEIHERQQHIRRVLETCPDESDVVTGQQDFCFDVRNNNLRNTNITPQTTPACTLKGN

SEQ ID NO: 60167 - protein, 846 aa, Zea mays
  Coding DNA Sequence Number=SeqID_16792
  Gene Ontology: Mol. function=RNA-directed DNA polymerase activity; Biological process=RNA-dependent DNA replication
  Homolog annotation: Hit_ID=A2Y9N4; Match level="QueryCoverage=44%, HitCoverage=18%, E-value=5e-17, Identity=24%"; Hit description =Putative uncharacterized protein
  Pfam annotation: Domain name=zf-CCHC; Domain location=135-152; Score =12.0; E_value=0.024; Accession=PF00098.14; Description=Zinc knuckle
  Pfam annotation: Domain name=zf-CCHC; Domain location=154-171; Score =10.4; E_value=0.042; Accession=PF00098.14; Description=Zinc knuckle
  Pfam module annotation: Pfam domain module=zf-CCHC::zf-CCHC; Domain location=135-152::154-171
  Subcellular localization annotation: CTP_CleavageSite=64; ConfidenceScore=5.72e-01
MCFPTPTIPSLPGASPTPPHSPTSVPTPGPAATPSSPLAPEATPVPLAVGRSKALRWRDDGSPESSSVASLGLHRRRPSYKEALLLPRPAPFLGREDDFGAGWVTVEGRQARRRRLRHLKPPPLSPRVVPSDLRGKCFNCFSPSHRAAVCRRQVRCFCCRLPGHRAYVCPRRRSAAPLPQRGLVWRPVSLSSGMAGSNDSLAGRVVDGGEDGGGVLKRRTRRGLRRRRSGNLRDSADQDAIVAVPSQRPADQCHDRALGRPRRIIKHSRMILQAEDNLRRALIITVIDQSNSGCAADVSDALAVRFNLDAQTLDLRRAAPNSFIAFLPNEEVACRVFNGGIPFVSPTVRLHIKRWSRHAMAVGGRELPVPVDIELRGIPAHLWGLETATQLLDEYCLIRDVHPDSAEGGDLSVFKLSAWCDEPELVPAELDLLAEEPQLGASDFGSFPHTLVFPITVRVCRSDAILDRRPSPPPQPPFSGDDREQNHGKRRRDQHSISSVPGRRPVHARLGPCVRTDSAPGGTCETIALPVPLGAVSTASASRPRARLGPCGGAGSAPGCTVGTFSAPGPLSAVVAVGAEEAASGSTIPTPAPLVSPPTALVTSVIVPGAANALTTGSPSEDPGPASLIGAISSGLLDSERPILHDNSFNVAAFEEAGGFQRLGQGPENLCADASGRASVPFSHVPHVPDVPADNAAQVRNPWDIIKYSLQAKPPCFKVYSRRRDTVPVQSQEVSSPSPTPLQEFSQHISKAINGLLSPPPIPKRRKKTLPRNFRPRRSRRVAKFPPELGSDAAASVCKKLGFCDDHGNITLEDASKYAVLFNSPLSREHIAALAALFGWDTSELA

SEQ ID NO: 60168 - protein, 744 aa, Zea mays
  Coding DNA Sequence Number=SeqID_16793
  Gene Ontology: Mol. function=nucleic acid binding; Cellular component= nuclear speck; Biological process=ubiquitin cycle
  Homolog annotation: Hit_ID=A2XZW3; Match level="QueryCoverage=58%, HitCoverage=35%, E-value=1e-160, Identity=66%"; Hit description =Putative uncharacterized protein
MAHRTVRCTPDSPVPLPRHHCRWILTVGASDLWARLGVRCTPDMHCLMSGAPAWAFLPSARAARALNAAQGAVGAETTVASESHRTVRRDALEIPEGGEFESESPGAPDSVRTSDGDSNNFPIRLEQLHQGLALSHYLFALVMDEKPTEAPVCSGILKCDSNGKGGKGRPKLTWEEIVKQDLKVSASYFMPYARICYLHNCSEDVNELDVKPDGSWRVMGDAATRDLSQWHMPDGTLCDSKEDTNPGVASVNEFKREGASDEHRTLKLGIKKNPIGLWQVSSKADDMKPVVRNHIQNNTGFSTPNIVPMISSPTGSYRDGEDVSVNQEGGGIQFDISLNQEFDSFAHNFGQTYNTEDRPQHPHHNAADVIVLSDSDEENDPTVQPPAVYENTPTNDDSFPFVTDAAGSGYPERYQEDASVGTSGLGLLRQNTGEFEINNWQMLSYPQPEQGFQFFVTDTDVGNPFVAPHNSFTIAPEDYSLGCNVGIEDPSAAHDVSICRNSNDVHGSLVDNPLALTGDDPSLQIFLPSQPSTVPLQQELSERSDTPNGVHPNDWRISLTLAAGGGGNEESTSVGGLKSQPKVSSKEAGVEPLLDAASALGSMNNDRCTGSNLNPKRIENIFSHPRQPRVSSLYNLLATHVVHIALARACSLASTLLPLTAAPRYSSLTDRSLSCIPSGSRCRCRAAADDPGGGWYRIFSNWEWFNVASGAGCTLSLTFTGYKGIGGHHLAQDKYMCCVYHHCI

SEQ ID NO: 60169 - protein, 401 aa, Zea mays
  Coding DNA Sequence Number=SeqID_16794
  Homolog annotation: Hit_ID=A2XZW4; Match level="QueryCoverage=59%, HitCoverage=63%, E-value=2e-38, Identity=43%"; Hit description =Putative uncharacterized protein
  Subcellular localization annotation: CTP_CleavageSite=54; ConfidenceScore=5.62e-01
MKPPAASPGRAEKPQLAAPGLARLLLSKSRRGARSRRAPPATSPMFVSRGARTRAANDGEPSSPKVTCIGQVRMRKGKKPATATAPAVGKAAARDKGAARGGYYYYCRCLKRAFLCGGLFASDARKRRHEPPAERGRRSPWVFSSRDVAVAAAPKPPADPSSGRRAEDEVQLGVGDVDLGSTGRDGEQEVGIGDGDGDRDAPLAVSSATTTPPKNALLLMRCRSAPQNRTSPLTSRFPSTATAPTPAPARDALAAAASPLASPSPSPSPSPRKAPASANEDGVATQQTGAVAAPAREPQLVLSGEGEEEEEEEVEVEDDDEFDEYDEEEEEEDETVRCSSARPLVLQRCKSEPATTAAAKMAAGPATSAGCFWAHGGSGGRRRHAPPPPGAAPAAVALTGH

SEQ ID NO: 60170 - protein, 340 aa, Zea mays
  Coding DNA Sequence Number=SeqID_16795
  Homolog annotation: Hit_ID=Q2R303; Match level="QueryCoverage=19%, HitCoverage=14%, E-value=3e-09, Identity=52%"; Hit description =Putative uncharacterized protein
  Subcellular localization annotation: CTP_CleavageSite=60; ConfidenceScore=5.34e-01
PPLTPPSPPSPTARSRQPPRPDPDPPVLDLTASASAFLYVVDRDVLGRVRRADLPWRRCSSSLRRPPLQAPTGEMELPSNAGDGELLPMEEHKERALRHLLRRSKRPLEEFVAAVADVAEQLVSAYLDLGVEWRGADWRERFLASPGSSLACLPITSGGTQLSDSPSTAKPKSADAIAILASVGVDPQLRLPPNAHQPDPSAALVPISASLGPVRAIPTSRNPTLVENQRERVGEVARCRRGGISDSIVVRTVEGAWGLPRARGKAAVAASPRIGYLWCRNCLPELGIRRSPWAEQGASRFDSRPWRRRRNPGATVCAASGGGACAGVLWTIDSLRNGQD

SEQ ID NO: 60171 - protein, 86 aa, Zea mays
  Coding DNA Sequence Number=SeqID_16796
MSTEKRHLDQIKLLAMWLLLNHLFFSCGGCETARVSSHTFIAQQVVGNNVARTHQRWEFMKCKVASCFTIAPHTGIFGGLLSIQWI

SEQ ID NO: 60172 - protein, 400 aa, Zea mays
  Coding DNA Sequence Number=SeqID_16797
  Gene Ontology: Mol. function=nucleic acid binding; Cellular component= nuclear speck; Biological process=ubiquitin cycle
  Homolog annotation: Hit_ID=A2XZW3; Match level="QueryCoverage=36%, HitCoverage=21%, E-value=1e-36, Identity=66%"; Hit description =Putative uncharacterized protein
  Pfam annotation: Domain name=SAP; Domain location=43-77; Score=43.9; E_value=5.9e-10; Accession=PF02037.18; Description=SAP domain
MSDLASTSKVYARPSPVRHLIPVDFPLEFPGGFPPRCRPADKLAYFRIKELKDILNQLGLPKHGKKQDLVDRVLAELSDEQGQRHHGWGRKNALTREAVAKVVDDTYRPKEEATDFYYVETKVRCLCNSTMLNDKIIKVWCILVNDKVQFRMQWPQYAELQVNGIPVRVMTRPGSQLLGINGRDDGPLPPAAQLPPASPSPLPSRWRAPALIDDVGHLSYVAAAAAPGVGLAASAAAPGVGLAAASAPDTLLATSDAYCASPFLPAPLGAAPSLAAGLAAHLGAVPSLAAGWAASLAVAPTLHAGLATPMAAGPSLPGLTALAASTLVEVLPTSPASGPSATPLLWPCVEAPRRAAVVASREREHATSLALEQERALGAALTTQMATAQRLLLGCPVGHS

SEQ ID NO: 60173 - protein, 132 aa, Zea mays
  Coding DNA Sequence Number=SeqID_16798
MMGSDTASHDLVTVGAALVPPHGRFSLSWEAALAGGACERSRSGGPQDLRRPLRPDNLDLYICLFWYSQIFCEPFQAQYHDVHNFSARNVGSSSTGTINALKAASATNARAHAPCIQSIIFENFFTFHKHFF

SEQ ID NO: 60174 - protein, 174 aa, Zea mays
  Coding DNA Sequence Number=SeqID_16799
  Gene Ontology: Mol. function=carboxyl- or carbamoyltransferase activity; Cellular component=ornithine carbamoyltransferase complex; Biological process=amino acid metabolic process
  Homolog annotation: Hit_ID=Q8SA97; Match level="QueryCoverage=48%, HitCoverage=13%, E-value=3e-17, Identity=58%"; Hit description =Ornithine carbamoyltransferase
MVPPVDVVGPRPRLGDVEAPPRSRSSPSSVVEVESEPLGRARRRLLAEARAEFESWGQAKRSSSSSGAEPKSEPWVGRSGIRRLLGLSPSPSPGVGRNGVRRLPGLSPSPSPGSGGAEFAVFRLYADGGYQLRIRSLEVNSPRPSAKDLAATTRVHHSSPRYTARNILRLPLPV

SEQ ID NO: 60175 - protein, 190 aa, Zea mays
  Coding DNA Sequence Number=SeqID_16800
MVTSSSMAGKSELGRGLCPSLSPKDFHHQGWGGECAELGSAPAWALPRAWLSDPSGFGAVLGAGFRHGSLKSIRPEVIAAAVRPPGAEVVVVAAAGAGDGAPFVGLLLLRRPPPPSSGVVRTRGDSPVGCLNRFTKRESPRVKVTSESGDPWTASPSEARSDLAEGVVDAEGAAAPFSRQDPSLQDRIIL

SEQ ID NO: 60176 - protein, 667 aa, Zea mays
  Coding DNA Sequence Number=SeqID_16801
  Gene Ontology: Mol. function=cysteine-type peptidase activity; Biological process=proteolysis
  Homolog annotation: Hit_ID=Q5NKP7; Match level="QueryCoverage=96%, HitCoverage=89%, E-value=1e-118, Identity=51%"; Hit description =Putative uncharacterized protein 9C20.3c
MKNVDRPPSNPKRIIIQSTQECFSVDIPRVPAETFRPETRQAANEDDDFMPLSKKRNLDDSPGCKCLRYSLYTFFQQRLNVTCNPQDVLVSIQILNDRQRQAIARRGFSSILDMRLDALGSRSHLAWLMEKLDHNDMTIRAGPGKELKITKDTVHLILGLPNAGGGTALGIDEAVAANNLRAELGLSKEDFGLYYLDHLHDSAAPQNKRGTPRIKYFDRNIIQALTRADKGKIRKGEEAFGHCSHKTRTNTFDVPRPDPSGQHSIHIELRLIRDLISSKLNQLPSRHRLGFIEKLSHFDTEVGKACSVIKQTLQQIVEKQYNLSDVFGELIDEVLRAESGDNEDGYDVQKTTSKSDDILPQTAEGCTCPAPTTVPDMSTSVSQQDTQFTDTQGKHGDGGKNMPTNTNVTPKATPHMDPDAPIFDATPQIKVSVETDPSTNTPQVGQASLDSEMQTVLALREYLCGMQSDISRTIIDYGEYSATCSDIYESFADGKCLDNVFMQCFIQCVIDDAKNQQTSMSSNSLILDVNVGSLLNFEEQERHSRNPQPFDESVLHTLLDNSLPETDELDQCKAIMVPMVSRGHWTLYVVNKVKKCIHILDSNPYGPTLDGTTWKDYHFAHLGSGGRKLPWAKGNTSEIRSLALHYITFHPKNKALSLLEDIQRFKV

SEQ ID NO: 60177 - protein, 337 aa, Zea mays
  Coding DNA Sequence Number=SeqID_16802
  Gene Ontology: Mol. function=oxidoreductase activity; Cellular component=intracellular; Biological process=electron transport
  Homolog annotation: Hit_ID=A3BMR4; Match level="QueryCoverage=42%, HitCoverage=27%, E-value=4e-48, Identity=68%"; Hit description =Putative uncharacterized protein
  Pfam annotation: Domain name=p450; Domain location=13-334; Score= -197.0; E_value=0.012; Accession=PF00067.13; Description=Cytochrome P450
MSTSDDTSRDDAFPCGHDAIRTRKKTMSSSLMMNQDTPGRPRRDISEMVHEMRMERHEYLTLANLGIQKIELGKYSQVVREAAMLSTSDPNFWTIRPLSDMMVRVATDVVCFLLNIYEKMMGQLIKVSLWRLAVCNELHCSVCTDCFSMFVIDDIEADVYVHEADILSVLDVPPGKMGELLAKRGSTAMAVKESCKQDLTLGSGVTVPARSILIVPLHLVQMDASVWGDDADQFNPHRFLKRDIDLGEILGAPKGSTTINIFSECTKAESFLPFGSGSRACVGQKFVVLAISMLIASLLFSYEVQPHPSLSKEMDTTVDSSHLHLPNPKIILTKRRI

SEQ ID NO: 60178 - protein, 177 aa, Zea mays
  Coding DNA Sequence Number=SeqID_16803
MTGRRAWTSTTMRALGSAVARVVRRGGKREWARRHYEGGVSSGLGGAVRREIVGAVAAARVVVKQDEWAAALGDVAAALASTRRGEGELGRAARVTRSMRGGLATRPDGLARGQGRVSWATWSSRAKLAHGMGREERECELGRGGWLGWATSGGGEPGGLAGKGRKGRAHKARGRPS

SEQ ID NO: 60179 - protein, 103 aa, Zea mays
  Coding DNA Sequence Number=SeqID_16804
MALSSSGNSYKHCQDLLSHGIKLIDEGTINADLLKSMKKGKKVATSNVATFQNDLDIQNSKLSPSMKARLSAGGCTPQEVEPPRHKDQESVDSNSQDDLLYDE

SEQ ID NO: 60180 - protein, 209 aa, Zea mays
  Coding DNA Sequence Number=SeqID_16805
MNALSREGCRHFEVFDQADEDFERDIYKVEDPIVKESAGAIYDRMWGPHGREVVRERAETARAQPLRPAEARPQRPPEALLMPPAAAAPRAEDPATVAAEVQDFGPAHTTATTNFLAASTVDDGNESDGSISKFSDFGGSGSSIEWTEESSDEDLDYFAALDVAAAEASPCAADAEGEGELRSLFAGEELRIMLFNYREMGIIPKAEPM

SEQ ID NO: 60181 - protein, 361 aa, Zea mays
  Coding DNA Sequence Number=SeqID_16806
MRGPGGRMSSPELRESLARMLRVTGGWWPRNVPIPCAAGEDFFTSRMVREWKVFPYLRNIAAVVLAVMDKDRQGAAQKRQAVVRLHEARPKRQQGAAKATAPGGGQPPLAAKSVVPASGRASEATAAAGGSKTAKAASASGRVSEAVKSARGLPPPGKRVADFATDISVDDYLVGSDEGQIVVVPPVAATTAAAVLPKAKGGALSAGGEMPALAAVWDEAGTVSRRLEEMKEALSQATDFAGRAASGALMAVVSAEVERLRTQHADAVREKSTADSKCRKLADKVVVLEGEKTDLRRQLVEERREANEALAKAQAALAEANLARAEGSLARERAAQLEERLNALQSRVERTEAVARAEADW

SEQ ID NO: 60182 - protein, 225 aa, Zea mays
  Coding DNA Sequence Number=SeqID_16807
MELLSKSYPTKEKTLKGMLVIWESRVLGQQAYIDKVLNRLRRRHYTETLFSCKSPARSQLNHLTPKGFKEGNQDQGSSGVKRKRKQMNSTGLISAQSAQVYAECAGPRPRPGGFAERASVSYLFGDSFTTLRSSGRGQFIVLAGGGREFRARRAAVGGGEEHWRTRISVLRRGNLTGVDLIAVASYSDAVEGLSHAAHGREAAVDGELIGYSRKAEGQSRKVIEL

SEQ ID NO: 60183 - protein, 165 aa, Zea mays
  Coding DNA Sequence Number=SeqID_16808
MAPKKATSKATTSIDDAAKAVLLAKKKGKAALVGDVPHEALKDGAINSKRDIAKRTPAWSVKRAPFEYATLRDYLRNPRQASPPEADNIIEDGEILGMSAKDQLKLHTLHIKNNHLQKQKEILAAKRQRITMQTKVKQMILNEEHKAKELEQHIAEMQGEDPHHQ

SEQ ID NO: 60184 - protein, 63 aa, Zea mays
  Coding DNA Sequence Number=SeqID_16809
MAPQAWVVAENGEDLQQPREFLPLSKLEGRGARGTFVALRNTPTAQQEIAQIRRITLNRKGRQ

SEQ ID NO: 60185 - protein, 87 aa, Zea mays
  Coding DNA Sequence Number=SeqID_16810
MATRDRCQRFNSKPIKRTRQGSKERSKEKPKCSLVWRTGLSGVPPDSVRCTREDCLQTLHLRVSQAQPTIIHPDCPVHHRTVSGAPE

SEQ ID NO: 60186 - protein, 299 aa, Zea mays
  Coding DNA Sequence Number=SeqID_16811
  Homolog annotation: Hit_ID=Q6QP51; Match level="QueryCoverage=25%, HitCoverage=35%, E-value=7e-31, Identity=85%"; Hit description =Putative growth-regulating factor 1
MAAAGERKQQSNHLQAHVPSWSSRGALSHDGKRHLWQAKQASFHLRHDDRVKKAALEHSGFRLITDQRFEGWPLGRVRQPPQSTRAPRPLLIKGSKAGPSEGFDSHPRARRARDDSGYVRYMAEARATLPRGDSAIIHRTVRCTPDSVRCAKGGRPQELASFGKLQRLVHYNSPDCPVRLRSNDYLRANGSLRCNKCARSARRWQACPYWHTGQGTVDVRCAPDTLEGPQVRSSNGQNPTAVMTWREAPDCPVRHRTGSLPTATFGGWGGLKIPHHTPPNSLHPSFPLLNYYKSSSIQF

SEQ ID NO: 60187 - protein, 195 aa, Zea mays
  Coding DNA Sequence Number=SeqID_16812
MKNKSSSFIKCIFRDFATSYAEAIVRIEPVFDSSGVIALSSYKSLNEGAKNRRRHGRTRGAIITCYQGEPGWDAGLVPPTVGPSPRSGEAETPPEAEVEAEPTGQARRRPPSRAEVEAEPWGRARRSPPSEAEVEAEPWGWARRRPPSEAGAQGRARRSFLLRLRLDLAVVSLSWRVAQQSERGCNTPGVTITKT

SEQ ID NO: 60188 - protein, 166 aa, Zea mays
  Coding DNA Sequence Number=SeqID_16813
  Subcellular localization annotation: CTP_CleavageSite=69; ConfidenceScore=5.43e-01
MPGSLAQLALALLPVPPPTVGAERGCPPTVRAAVASCAPGDRPRRRTPLGRRSCSWIVLSSLRHDASVRSHLRRRSLSMLLQWSLASHPEFVVPQALRCGGCSYPQEWNRSSVCNGTLSADFKNPRLLYDELEPEAVVSAWTEAESARKGASSAQEQVASQAKEVQ

SEQ ID NO: 60189 - protein, 90 aa, Zea mays
  Coding DNA Sequence Number=SeqID_16814
MGKLSLGWTNTRKADPQWEWRDGKSVVYPPSKRLDGGNLFPLQMLVCDLCLLNLVILVIVKQPDYKVSLDHIERSSSKASNFGRRFFTNA

SEQ ID NO: 60190 - protein, 346 aa, Zea mays
  Coding DNA Sequence Number=SeqID_16815
MACYLEVVDLDVWRVTRDEMKPPKNPEKLTVSDKKEIHLNARAKNCLKMKGKKDKSSSSSSEEEEEEDDEEEEDDQASTSSSKDEEMVQRVEKFEDLLFNIDRKKHMKRGVKGNTSIPSSSDSNSDDEDKLSLDEFVHAIKFFEEEGHKSYQFNAKTGKKQKKKPTRKISNTYINMVDKKATTPNLIKKKKNGKENNTIHPVPTTVPTTRVKLTTVSHDLPRVQPRAQQEAPPRPTPGLGLGRRSPPCPTLGLGLSLGLGRSHNLTRPQPRPQEKSPPHPTSASDRLRHRGYIITLPLASCLRLRRNKIGVPSRLLRKQAKKHQQDLGPHRQLRFYRALALLRLPC

SEQ ID NO: 60191 - protein, 221 aa, Zea mays
  Coding DNA Sequence Number=SeqID_16816
MQSLQRKINADSAKVKGEEAPKGGLQRKINADSAEVKGEEAPKGGLQRKVSADTPKSIHRITIIISYRKGRCFGYEDKASEKEEIFMLRCVRKEGKVFFAFGSKIKFRPQQSRLYTDKGEKIYYKNHMQKRLSEYLLSFSSSFFSFIILYVLKWNEKGPEFKEKPAFRKAVAVPREANRAQKSACPAITSSSASTSPSMYSKVLGRFSAEDVNLSELVPIE

SEQ ID NO: 60192 - protein, 155 aa, Zea mays
  Coding DNA Sequence Number=SeqID_16817
MMRVLERVDQRLEAVEVGQQWLQTQADQSSNAVRRSKVDRTILARQVEETGKALARMCLELMAKELEGNESNSERENRGGRWFDRGGVISGLIGHENRMNSVEVIYIQGHCRSWRSVEEYIQDFEDARYATSVHNPKMDETFYVTQFVKGLKGEI

SEQ ID NO: 60193 - protein, 181 aa, Zea mays
  Coding DNA Sequence Number=SeqID_16818
MPSRGGQWVRSPAFMLDLRGRDPAAFVREVEDGVVRIVGRYVPKTEGLQSWDISGSNDILNQVFELNRLPYSGYHGEDATDRRGKKPMGVTEEGPSQDAAPAAKKRKLALGGRMSSTELRESSARMLEITGGRWPKNVPIPRAAGEDFYTSRIARDLKVFPYGRNIAAVVSVVESRLEGGE

SEQ ID NO: 60194 - protein, 125 aa, Zea mays
  Coding DNA Sequence Number=SeqID_16819
  Subcellular localization annotation: CTP_CleavageSite=19; ConfidenceScore=5.29e-01
MPSSSSSAAATPPADPSPPAAASSEETLSSLMAEELRVGDSVDFGVSRVTPQVLLRVSTPGSRRRPPPPVLVARVAPTTSDTDPHTDVTAATSRTSLTTPPELYCRRGLCAMSVTQANSGPWAVL

SEQ ID NO: 60195 - protein, 259 aa, Zea mays
  Coding DNA Sequence Number=SeqID_16820
MLIQNRRSSDPRPRFYVDEGPRRRRIPTRRRDPPELAYLCASMPYPDSTALLVAPTEVNTDKGSVPGITDAGELSTGGGSSAPDSRSGEEFTSIRNARLESRARTDFPGAGESHTTMRRGRNTAADGFHRWRATSPVTGARRLFQLGTGRGGREVKKSSSWRLPSSAMEAIWSRDRGAQTLVLIPRDKVGLGVGPGGHGELLQRTPKEAEAPHSEASCEAKTMPWRDLGFRRIPFLKYGFKGYNPGMGILQLQVHPREI

SEQ ID NO: 60196 - protein, 189 aa, Zea mays
  Coding DNA Sequence Number=SeqID_16821
MGGLLDVGQISDKQEQGGQARGRGMLRTLQTTRVNTSYAPPPRQIPVYQVVIEEVPVDLPHIRVEHGVILEDSSEDLLPMPTPLVESLAFTARSSTSTPPTPAVQAPVPRGDDPDDSGDDDDEMTTTTKTKRNKSMRSPTTPSRTTSWGDRGFRTLSAHESLTLLSTYAASEARPASFQVELVRIASTP

SEQ ID NO: 60197 - protein, 167 aa, Zea mays
  Coding DNA Sequence Number=SeqID_16822
MTGFMSFASLVTCEGAMNALSREGCRHYEVFDQADENFEREIFKVEDPVVKQSAGALFDRMWGPHAREAIRDRSDRVIEQMAHAEDVEDLVGLDGALPEAAAVEPVPPPDAGEGTSAIPASAAAGENPAPAPVPTGKAALKVAAEQAAAPAAEDPAAVAGIPPHVAE

SEQ ID NO: 60198 - protein, 172 aa, Zea mays
  Coding DNA Sequence Number=SeqID_16823
MTRTKTTQRKATRPSGVPWYELAPRHEGSSSGSNDPIGDMEARVEQLMLELCHGNRERARDSHRIAELSAEVNLLQQEIVERDMAIDWVVNSCSFAWDCEANALAWVHMLYDRLHPNVPPEVAAMGVGPSGAASGGPNGELDLFGAPPSMNLTDECSPEAGSGAGAAKDEDN

SEQ ID NO: 60199 - protein, 127 aa, Zea mays
  Coding DNA Sequence Number=SeqID_16824
  Subcellular localization annotation: CTP_CleavageSite=62; ConfidenceScore=5.12e-01
MPVTQFARRHAKPPEQRPKPRNHRSLHPPRLRRPHRREQERRRMQPLTLPVLDSSRPIFIVRAGSPDTALRTRTLRLDPTYRPSVSLALGSAGNEQPVVPECVAEDLLDQQPGEGKCPLTFYVVHTL

SEQ ID NO: 60200 - protein, 260 aa, Zea mays
  Coding DNA Sequence Number=SeqID_16825
  Homolog annotation: Hit_ID=A2XFR6; Match level="QueryCoverage=49%, HitCoverage=41%, E-value=2e-20, Identity=39%"; Hit description =Putative uncharacterized protein
MVRTIQTTRTNTNYTPPPRQAPVYPVVVEEILVDIPHIRVENRVILEDSSEEFLPTPTPLAESLAFTAGSSSSAPPAPAVQALAPRGDDPNDSGDDDEDEEEEEEKENINEEANSDRGFRSLSAHESLTSLSTYTASVSDAARQTLWSLSHTYRQQLHNTKYRHLPVRLRGESQTSIVLGLNTDLDSATLDLSRAHLELEDAHARIASLEAQLERRDPPEAQVPAMVLSPPHKRIRYGEPGSITRLLKIFIYIVIRQLLL

SEQ ID NO: 60201 - protein, 192 aa, Zea mays
  Coding DNA Sequence Number=SeqID_16826
MAQSTVGSLRVVGAPDMSGAHRDSPVPPSSRWLGHVSRADKLLPESGKIRMKECFKKEYLLHNRVFECGTYYYIIGRQNTLPQTSLVIFLLLGHHLRAETAELDCFIIYDNMGLKTLSMECTFASLTHQRKRLSRICWPLGIKVKLIQNSKTLFAEKLTMSGSLKIHFYYQEVLVYSTDVKVEVILGWRFLS

SEQ ID NO: 60202 - protein, 101 aa, Zea mays
  Coding DNA Sequence Number=SeqID_16827
  Subcellular localization annotation: CTP_CleavageSite=33; ConfidenceScore=5.58e-01
MTLAHAPSSLFRAPPVPRTHPLPHFAQLHPLSRSAHAASRRRRPAPVFPAIQLAGDRAKPPRAPPRDNKQSEFPECVVGDLPEQQPGEGKCHLTHYVLHTL

SEQ ID NO: 60203 - protein, 121 aa, Zea mays
  Coding DNA Sequence Number=SeqID_16828
  Subcellular localization annotation: CTP_CleavageSite=62; ConfidenceScore=5.28e-01
MGSLAHHSSCSSSAKYNGSSSLISCEKQTIRIKFLSLQVTTLVPTITGMGDYVSGRVRSKVCGQVHSGIHTLILIPISSHRPCIPMDPCPQTIIIPLSKWIQSIPDLTRVLEKSLDFYRDP

SEQ ID NO: 60204 - protein, 95 aa, Zea mays
  Coding DNA Sequence Number=SeqID_16829
MLLLVLLLLLVSALLLLMQARMQSLQHHLLSTEYSGDNLGWGWFVKQGGCTLYPQVVISLCLWSIKPSNIAKVLTERYSGKMARAPKNITISSSG

SEQ ID NO: 60205 - protein, 111 aa, Zea mays
  Coding DNA Sequence Number=SeqID_16830
MAAEEERGGGAYRRRDCSGEVVEYVGEVMRVTAMCGSPSGMGASPEIKEDMCARNRRKTHQIARSTRAGGQPKSGEDDLGSSVRFCQVQALGKLHRPLAKLTEGQARLGRN

SEQ ID NO: 60206 - protein, 215 aa, Zea mays
  Coding DNA Sequence Number=SeqID_16831
MEEERGGGAYRRRDCSGEVVEDVGEVLRVTTMCGSPSGMVGVSRSTCSGGGALRRRGVRPNQGAIGQSNGSGSFTRDQGRHVCKESEKDSPDCSVYARRRATEVRRGRSWVFSEVLPGPSARKASQATSEANRGAGAAWTRLERAGRGGQGFGGGGGRRKSSPELWRGVWPARDFAYWFQRFGALKSGMSPSPSPRQILGFVMSGARVPMPSSGK

SEQ ID NO: 60207 - protein, 152 aa, Zea mays
  Coding DNA Sequence Number=SeqID_16832
MKTLTTFYGYHPLEMVMHPLGLFPAEKKDDPIWCNHVSHVKDVWAMYPDLAGRVTVQCMSALYRLQALQSDAMAHLANIAQTTKLTLDTREDFVVDLSSELVEKDLQEMEANEAGSEGEEAPEELGPAPGANGTTSVMPPSPASSVASTAQG

SEQ ID NO: 60208 - protein, 253 aa, Zea mays
  Coding DNA Sequence Number=SeqID_16833
  Homolog annotation: Hit_ID=Q7XBD3; Match level="QueryCoverage=17%, HitCoverage=8%, E-value=9e-07, Identity=64%"; Hit description=Zeon1 gag protein
MEKLLQKMDEYIRADSDFRQRREEAYRVMTEEVNSRGRSILRKLRGSNKGLSGRQLQEAEAPGASEKDMGTSPGRSTAYFVVKTKATIQERVKSPSKSKKRLQKPKPNKVNRSKSYTLLRVIHPTYQNMWVIIPQLLLLRLVSRKFLGHSFHLRHHYSMPTLEASSQKGVNRPISSEISGRGPKLAQLIALCQNQNTYTDTYPTFGTVFTFIVIFLFNKEQSIQLFPKVFNFTFLGFSLGFGSSLVFFYFAHQ

SEQ ID NO: 60209 - protein, 169 aa, Zea mays
  Coding DNA Sequence Number=SeqID_16834
  Subcellular localization annotation: CTP_CleavageSite=45; ConfidenceScore=5.10e-01
MPWLGGASLHPRSGPSERTPSWPSRWCGSWQFRSYVRDTVQDSLSVNNAREGFKVQNLSSVKDDHGVEDDCYGAVVNRRSTPYLVRQLLMFGPDCALQGSSCSAFGRTTTSIAARGIPIPLVFGFLLRVILRLIRCFAVHKTRLQTPGGYFAQHLRDEFACALYSVPSL

SEQ ID NO: 60210 - protein, 388 aa, Zea mays
  Coding DNA Sequence Number=SeqID_16835
  Gene Ontology: Mol. function=aspartic-type endopeptidase activity; Cellular component=chromatin; Biological process=chromatin assembly or disassembly
  Homolog annotation: Hit_ID=Q53NQ5; Match level="QueryCoverage=37%, HitCoverage=8%, E-value=2e-09, Identity=29%"; Hit description =Retrotransposon protein, putative, Ty3-gypsy sub-class
  Pfam annotation: Domain name=zf-CCHC; Domain location=369-386; Score =28.9; E_value=1.9e-05; Accession=PF00098.14; Description=Zinc knuckle
MARVACTLRGKRLDDGVSVLSVGVNLVCIPLRVFSLVGLRVTLIVIGVKRCGLSEVLGTLRRILLSYVVHMHSHLRSVRQGQRYGTYKENNTQIYWTFWRASSSVSPPDMKGVVVAAMTQLETCKPRWNNFDQSYVTGIGHGRKTASMPSRTRAHDGAGTSRDREDTPNPPPVPPTLAEAIAALVDATANNTHFLREMAGNQFQQHRGRAPPQGPRETTYLEFSETRPPLFIKAEEPLQANEWYAIDQVNTDLKKKNCFMRGLNDRLQQKMATCLDLTYSRAVSTALAVEAKNAGHGKSKGFGGERSNQGHEKRTRLVIRPFNQNRSSPRPPSYPFKQPVFIRPTSAPAPTNQSSAPGTRFPALPSSSTGCFNCGKSGHFIKDCPYPK

SEQ ID NO: 60211 - protein, 235 aa, Zea mays
  Coding DNA Sequence Number=SeqID_16836
  Subcellular localization annotation: CTP_CleavageSite=5; ConfidenceScore=5.19e-01
MARVACTLRGKRLDGGVSVLSVGVNSVRKQQSFAVSTQGWYPRKSPSNEVGHGRMFASHFEINKLLAPRHEGSSSGSNDPIGDLETKVEQLRSELRHRNRAWAHDNQHIAELSADVSRLQYEISERDSAIDWAVNSRSIAWDREAKARARVAELSAALDNLQVYCNTLHEEVHVLYARLHSNVPSDIAAVGARPSGTANEGPDEELDLFRPPPSMNLADERSPAVENEATKDDED

SEQ ID NO: 60212 - protein, 342 aa, Zea mays
  Coding DNA Sequence Number=SeqID_16837
MYASVKLPEQGIGPCFAEEASPRSPDFARPPVNPEHPPPTRSPACARGPDDSGHLHRRAVHRCDRQDLPEPTPPLAGPLSPPEVLQGAGYTTPPQYAVQQFEKHGVPRCRVRMTLEPHPLHPGWRSLDSESFGYRAEDTIEAIALHGLTTFCGFHPLELSTHPIGLFLAEREDDPMWKDRVEHAKDIWAIYPGQTAHLTVRCMNALYRLQVMRGEAMSHLMALLEATKITLDNREELVVDLSTEMVEKDLQVEQLSNEIQELEELVGTRENTIEVLEDQLINTQQQLAEANEHLNMHHQEIQDLEANEDVDIEGGEEPASNLDTAGSGRPPSPESSVASFAH

SEQ ID NO: 60213 - protein, 235 aa, Zea mays
  Coding DNA Sequence Number=SeqID_16838
MTMVCGHGSMGMRGLRDEIGIRLTCGYLCQAFECTKHMPKNMVNRFSGGHGCWSDLVVHLATRSVDVRSLRMNMHASFYSNYLVSGQESLKAMRHDDFSRILEWRECTFPHGRTCARGFSPHFVGGAAGSRLYDASQYAVHLFEEHRVPRCRVRMTLETHPLQPGWRSLDSESFGFRAEDTIESIALHGLTTFCGFHPLELSTRPIGLFPTEKEDDPMWKDRVEHAKDVWALYPG

SEQ ID NO: 60214 - protein, 118 aa, Zea mays
  Coding DNA Sequence Number=SeqID_16839
  Gene Ontology: Mol. function=kinase activity; Cellular component =ornithine carbamoyltransferase complex; Biological process=amino acid metabolic process
  Homolog annotation: Hit_ID=Q6QP54; Match level="QueryCoverage=55%, HitCoverage=36%, E-value=2e-13, Identity=46%"; Hit description =Putative kinase
MAPPVDVAGLRPRLGDVEAPPKPRSSLSSVAEVESKPWVGRSGIHRLPGLSPSPSPGSGGAEFAVFRGLARVRALGRAERRLLLGEDRASGEPEICSPLEGGLRQDGDPPGSAALVRG

SEQ ID NO: 60215 - protein, 70 aa, Zea mays
  Coding DNA Sequence Number=SeqID_16840
MAPPVDVAGLHPRLGDVEAPPKPEVEVRRLPGLSPSPSPGSGGAEFAVFRGLARVRALGRAERSSPSFGA

SEQ ID NO: 60216 - protein, 167 aa, Zea mays
  Coding DNA Sequence Number=SeqID_16841
MGRGKPGCDLGPALSLEGVRHPRWGGERGELGLYLPRGPAGHLFFQLLVVATIFRLCGGDILQPCRGRRTIAAQLGRNIPPSSSLSWRGRERGPAGALWSGPLFGFNSWFASLEREREREPSGGRIRPGTMAAAAEVAGGSPGARRPAGSPMWRLYIPAGTEPEFHL

SEQ ID NO: 60217 - protein, 270 aa, Zea mays
  Coding DNA Sequence Number=SeqID_16842
MAAMDAGKGAPRAGVEQLERARGTRRDAGGSAGVHAGRIHGERARGGEAAMGTKAEQGELAAGGGSFGEGRNRGQEAGVSGGRETGRRAGPSAMGERRSGRWNPSKGRRHGREQRERREGATMDEGRCDGAQERRTEEQRLGARHGGNLEGSACVHGEELETASPRAQRSRARRGGRSGWARGREGQGGTPASAGASRAQGGRHGRELGGGSHGVQFGRAERGVLEEGGKQGPSGAGGTEQSEGDKRAGFFFFSALSGGRRKFRAWTASG

SEQ ID NO: 60218 - protein, 163 aa, Zea mays
  Coding DNA Sequence Number=SeqID_16843
MMTKGASFRDHNIAHSLQDSSKAPSGHQLQGAEATGALEEDMGINPGKSIAYFVEKTRATLQERARLPFRSRRRLPKQKPGRTSRSKFYILLRATLPTYQNMWAINLQLLSLRQAIHKLPGPSFHCYHHCHLLLPKASSQKGAPNSNATSGRSPKLVQSTTLY

SEQ ID NO: 60219 - protein, 265 aa, Zea mays
  Coding DNA Sequence Number=SeqID_16844
  Gene Ontology: Mol. function=metal ion binding
  Homolog annotation: Hit_ID=Q6ZJI1; Match level="QueryCoverage=25%, HitCoverage=26%, E-value=8e-09, Identity=47%"; Hit description =Putative NEP1-interacting protein
  Pfam annotation: Domain name=zf-C3HC4; Domain location=203-243; Score= 29.2; E_value=1.5e-05; Accession=PF00097.16; Description=Zinc finger, C3HC4 type (RING finger)
MEFVKSSVKYCLTLFSNVFDPNNSWSRPRWIHFLASPQGTIGISSSLTAERRIEAYRTSIEFLSRQSMTSGDRRFTLHLRCYVSVHISTGNGRPNLVLMYRRQDADTSCLALPDDEDGVRDVLHGLLRSTQPLQHLGLTDLEWESLLSQQNVSWLVDPVLRARYAVVSVWQAVELHMCYDAVQMLMMTCKESGAVGGDVEAECSVCLVALRESEAVELPACAHAFHRRCISEWFSHKSTCPLCRDDVAKYLEPELQRHFANFDYA

SEQ ID NO: 60220 - protein, 308 aa, Zea mays
  Coding DNA Sequence Number=SeqID_16845
  Gene Ontology: Mol. function=metal ion binding
  Homolog annotation: Hit_ID=A7PJE0; Match level="QueryCoverage=24%, HitCoverage=29%, E-value=7e-10, Identity=42%"; Hit description =Chromosome chr12 scaffold_18, whole genome shotgun sequence
  Pfam annotation: Domain name=zf-C3HC4; Domain location=203-243; Score= 27.9; E_value=3.6e-05; Accession=PF00097.16; Description=Zinc finger, C3HC4 type (RING finger)
  Subcellular localization annotation: CTP_CleavageSite=65; ConfidenceScore=5.06e-01
MEFVKSSVKYCLTLFSNVFDPNNSWSRPRWIHFLASPQGTIGISSSLTAERRVEAYRTSIEFLSRQSTTSGDRRFTLHLRCYVSVHVSTGNGRPNLVLMYRRQDADTSCLALPDDENGVRDVLHGLLRSTRPLQHLGLTDLEWESLLSQQNVSWLVDPVLRARYAVVSVWQAVELHVCYDAVQMLMMTCKDSGAVGGDTEAECSVCLVALRESEAVELPACAHAFHRRCISEWFGHKSTCPLCRDDVAKYLEPELQRHFANFDYADEEACSLLGDSGCSWPVIGGNADPETRWSKNARGSEGVEHCRS

SEQ ID NO: 60221 - protein, 429 aa, Zea mays
  Coding DNA Sequence Number=SeqID_16846
  Gene Ontology: Mol. function=aspartic-type endopeptidase activity; Biological process=xylan catabolic process
  Homolog annotation: Hit_ID=A2WYV0; Match level="QueryCoverage=92%, HitCoverage=92%, E-value=1e-114, Identity=54%"; Hit description =Putative uncharacterized protein
  Subcellular localization annotation: CTP_CleavageSite=19; ConfidenceScore=5.27e-01
MAQLLLLAVVSALSLLSPRTAAAATSTTSGGKPLVTAITRDAATKLYTAPLKDELPLVLDLSGPLLWATCAAPHPSYECHHAACAHAHAHHPPGCPRTGHGVADEFDPFRCRCRAHPYNPFARRAGSGDLTRARVTANTTDGANPLAAASFTAVAACAPPTLLAGLPAGAVGVAGLARSRLALPAQVARKQKVARRFALCLPGEGGGMGVAIFGGGPLFLLPPGRPDVTASLAGTTPLRRNPGVPGYFVSATGIAVNHVQVQVQQQGPLTVALCSRVPYTVLRPDVYAPFVRAFEAMAMAGRKRMTPPTPPFELCYDSRELGSTRLGYAVPQVDLMLESGTNWTVFGGNSMVQVSDDTACFAFLEMKEEKQQGGHGYGGGAPAPTVVIGGFQMENNLLVFDEENGQLGFSGLLFGRQTTCSNFNFTLAG

SEQ ID NO: 60222 - protein, 54 aa, Zea mays
  Coding DNA Sequence Number=SeqID_16847
MGQDLVEIHPRELQFTCRLCGASGCKSPVAAAAGGACVSVLGKHGRTCLDVGSC

SEQ ID NO: 60223 - protein, 193 aa, Zea mays
  Coding DNA Sequence Number=SeqID_16848
MKKKHGSVPRIHTCSGLDSHNEQKHRHSRCHYKRNSGSDPTAAAMILVRARPPEGFRSRPYSRDAKQTSKPKSRGPARRRHQWPQWGGKLPPAATTSARTAASASPPTPTLDSNSSPSPTWLGDASSARLEDGFHHQKLEEEVTSRPAREVELRLSPASAPARMTNILGAEGGTKIAARLAPPHREAGGHRLG

SEQ ID NO: 60224 - protein, 79 aa, Zea mays
  Coding DNA Sequence Number=SeqID_16849
MAPRTLCDDGGSRPPYGSKRTTFNRILDETRIVIKYITLGSFPVDLIDAVLRHLKVILRKCAFSLLIFQVIMSVEPRSR

SEQ ID NO: 60225 - protein, 129 aa, Zea mays
  Coding DNA Sequence Number=SeqID_16850
MEVAVSARTEVELASKRSWPRPRGGRPSRLLGPDSQRRPWRRWPGCGADVVLQSGGPPTASPFEAGSDPTEGVVDAEGAVAPFGCRRPSLQDQYLDSFVGNRIVYAGESCFSRKAMSEENFDAEAVAPF

SEQ ID NO: 60226 - protein, 93 aa, Zea mays
  Coding DNA Sequence Number=SeqID_16851
  Subcellular localization annotation: CTP_CleavageSite=53; ConfidenceScore=5.29e-01
MEQNGTDRAIRSHGVHPVSLEASSPRQSGRASHSSPAIHPGSRRLAAPPTPTVTMIGTENRSVGMRDRLEKMVERECQKELHSVVDDLEEAGR

SEQ ID NO: 60227 - protein, 71 aa, Zea mays
  Coding DNA Sequence Number=SeqID_16852
MVTSGLMVGESEPGCGLCPSLSLKDFHHQGWGGECAELSPCLTSFVVGGGLLAAASALGSVLPLFDPPEQK

SEQ ID NO: 60228 - protein, 94 aa, Zea mays
  Coding DNA Sequence Number=SeqID_16853
  Subcellular localization annotation: CTP_CleavageSite=44; ConfidenceScore=5.15e-01
MSRSRARTTVTSSPRRLNAGSSSSWLQHSLPMLLAVAKLGGMVKEAREGEGAIRGLPPGWCTFSLRPQLTAGWMEGRSFNSLVDMPAAVGPSAG

SEQ ID NO: 60229 - protein, 121 aa, Zea mays
  Coding DNA Sequence Number=SeqID_16854
MAHRSYSGPPETFSPPFSLLCPWIHGLFPAIEFAVMPSPSLPNFGDPRATLARACLNSGDLTAAERSSAARSCSPLPDNKQSKVPECVVGDLPEQQPGEGKCPQTYHVILYFIIHCPALLY

SEQ ID NO: 60230 - protein, 391 aa, Zea mays
  Coding DNA Sequence Number=SeqID_16855
MVTQDGDHQFDGGEKQVGLRPLPRPQLQGSSSSLLGRRARRAGACLRVGWHPASSSGIWGWKPSSSSAEEASSSHAGKGELLLPGQGAAFRPLPGRLWPAAPEGLTTRRTPRGWYSCSGDGPVLIFVARTGVRTCRCALGRPALAGAVLVGRWTPPSVLRWWQPEKVSPPTRSLASPALRASGSLALMASSRPSRGDTNESHPAVAFALGPSLLLQRSPASHPEFVILQALRCGGCSYPREWNQSSVCNGTLSAGVTSEVSVSRRRRSPSARSALPLKTSLAQLRNPRLLCGELEPEAAVSAWTEVESARKEASSAQEQVASQAEEVQQQRPEPGRVIHERDHLRSYASDTVSRADVLGGQLAEATERPAEPSARAGFLEETLAAMAPARC

SEQ ID NO: 60231 - protein, 249 aa, Zea mays
  Coding DNA Sequence Number=SeqID_16856
MQVACNCTTGMHPFDFDASSMEAQAHTSCNRRAGYYVRKIAPPLAPIPRLLDCRTGAATRGNPAHGPTVPTKHIGHRDRERGYSERDPSLRRKRASSPPTDQGFESWPLGRENSAACLAPTAVPPARVRLTTTKSCLRRNRRSPPRPTPGLGPRLGLGRWTPPRPTLGLGLDLGLGRWTPSCPTPGLGLDLERWSPHHPTPGPGLNLDLGRNCVLARPRPRPQEESPPHPTLGSDRPCHRGDHHYPTPS

SEQ ID NO: 60232 - protein, 94 aa, Zea mays
  Coding DNA Sequence Number=SeqID_16857
MAHRTVRCAVRGLDAFNYDLAIMRTILDFAFYKPTDKLKVLICCGSLGLRSGDRSKAWDWRRDLSGYGDRAAGELIPLASARCARMTKEASPSR

SEQ ID NO: 60233 - protein, 458 aa, Zea mays
  Coding DNA Sequence Number=SeqID_16858
  Homolog annotation: Hit_ID=Q6JAD6; Match level="QueryCoverage=100%, HitCoverage=73%, E-value=1e-81, Identity=51%"; Hit description =Putative uncharacterized protein
MPRTKNVSALGGGDDEDPPRPFRQVKGKKVYLEQQEGRKKWRLDRAARAALAAAVAEQAERGDQLQISSYQIAYRVRRLASRPRSSAPTTPTTATTPPPTSPAPVTPAPSTTSAIPTTSTTPATTAPPLAPLSAPPIPPACFWERDETDVRPLAADPRLFDLQRAIVARMSAQIALRVHRLLDLPAFLLAAGADSEVHLSYLLGLLTLLTTSGRYVEEWVQVFYASVWINPDHQWMRFRFEREDVTLHASQIRQLFGFNESSTRLHGLCYGTSDPPHHPHGGVAPGTAHVVALFRPPFSDGSRRSPVDFTTMTKFLYQLMRQMLLPRMGYREAATHIQLWLLGAWSLTQSLMLWTSLFGTLEASRLLFGSYRPAPEDPVPTPAPVTDTQAEDTTFHQFETQAAAVHDDDYDDDDDDDFGVPPPPPRSHDHEAGSSSVVLAAAPAVDPALAAILQTLTQ

SEQ ID NO: 60234 - protein, 228 aa, Zea mays
  Coding DNA Sequence Number=SeqID_16859
  Homolog annotation: Hit_ID=Q10717; Match level="QueryCoverage=22%, HitCoverage=14%, E-value=4e-08, Identity=62%"; Hit description =Cysteine proteinase 2 precursor
MPSLPHAQRHPKFGRFPLIQSLRRDPGGLISCALLIPTGPPRHGGVLACPVVDSAPPLDPSDWRAPTEVRERRRAPRDREDLLRMLTARILLASTTTALNSGITDPNSIRLVVDRATSALESTFFVALSRTRGALRFAILDTPGAGLGVATCRRGELHYGHHIWYGLRSPVHQSVRFGWDLLMPRITRQGESSRAPTMAPSRCACAAALLRKGKKKLRAPLDLMNGPD

SEQ ID NO: 60235 - protein, 40 aa, Zea mays
  Coding DNA Sequence Number=SeqID_16860
MEKRPQELFSFGKSQRLVRYNSPDMSVQRLSRANGYLQRH

SEQ ID NO: 60236 - protein, 109 aa, Zea mays
  Coding DNA Sequence Number=SeqID_16861
MSQDKKIAAETKLTKEEKLFEEKKAVNPYIAGFVESMAKTNTEKITKEILEGPSEDTERLTKAGVKGSDFAFAPTFALRGTSLTKSSGAEDVARCWRRCPRSKWFREGF

SEQ ID NO: 60237 - protein, 134 aa, Zea mays
  Coding DNA Sequence Number=SeqID_16862
MELIFGLLHLLESFDKYDICDTACVDQNIIDYETFDYIGHNHGISERIIFKTKIIQREGRLPYFPCLRAAAEEECPYHGHDYLSLPRCYKEGVRRMPRDPRPCPHYPFHRRLIHAQRPIRAATGTMGFMDLATP

SEQ ID NO: 60238 - protein, 231 aa, Zea mays
  Coding DNA Sequence Number=SeqID_16863
  Homolog annotation: Hit_ID=A2WTH5; Match level="QueryCoverage=18%, HitCoverage=9%, E-value=8e-07, Identity=60%"; Hit description =Putative uncharacterized protein
MADEAKSGRRTTAGLIRTRMIEIVSHGLANLESVIFFILAVASCGGAWDQHQLAEEEDVDPLPEHQLAEEEDVDRLPEMPTIRHDSILEDPDGDISQPQHILDYYHISQTPIYRCTSKRFMNILINAVITEINENIGTTGVVSQECKAIVSQCGQQILDLLLAELLLKYSSKRQPFRSYDIKIFSGPKPMKGSSSEIELRRVDYFSSKELPQVLERIMRKKLRFLSYCICF

SEQ ID NO: 60239 - protein, 63 aa, Zea mays
  Coding DNA Sequence Number=SeqID_16864
MGDHDSCRVRRSIHGQVHSGTFGLISKRENLKRYEGWQCRRCEAGKLRHVRRKGNRLKDEKAI

SEQ ID NO: 60240 - protein, 216 aa, Zea mays
  Coding DNA Sequence Number=SeqID_16865
MTSPTPANGGDTRFSSDFLSHDGFPSILWEVLNSADDTTEAIALKTLMTFYGYHPLEMVIHPLGLFPAKKRDDPMWCNRVSHVKDTTKLTLDSQEDFMVDLSSELVEKDLQLYDVQQELEEANDYLDMQHLEMEANEAGSEGEEAPEELGPAPGTNATASEMPPSPMAARQHHGQNEQVPPPPPLALTVQELMAQQNEILLLQRQPHPQQHGGGEP

SEQ ID NO: 60241 - protein, 93 aa, Zea mays
  Coding DNA Sequence Number=SeqID_16866
MGLGVCGSLCQGGNDNDYFGIDFGNGKWYSFRSERKASPPQQSRTFAKYVDVYSPLLYTPNLPLPGCPHCNHCSGEDEAMDEDFQEFQDYDEF

SEQ ID NO: 60242 - protein, 52 aa, Zea mays
  Coding DNA Sequence Number=SeqID_16867
MSKETITNSNEGDLVRVGGLRLPKVSSESGYEYTRVWSGRSLSETKGDYDEG

SEQ ID NO: 60243 - protein, 84 aa, Zea mays
  Coding DNA Sequence Number=SeqID_16868
MAMSAEADRAAAGTGAREREPGPTGRCHGRGREGRGKEERREGAYRAFTNIFPSGALMVFLDLKGHLKIPYFVANWALIKECFV

SEQ ID NO: 60244 - protein, 59 aa, Zea mays
  Coding DNA Sequence Number=SeqID_16869
MPNLAFLLIALKVQMHSGDNEIDGSDYDYGIGCQHCNHCSVEDEAVEGDFQEFQDYDEF

SEQ ID NO: 60245 - protein, 362 aa, Zea mays
  Coding DNA Sequence Number=SeqID_16870
MESHDLRAERESQLVGKVAMRMMVLVLTLVMQEIESVRSCSPMLPLEAPPAPPLSAPAAGVAAGGDPDGGGGNNSSSHNTNLSADQEPKGWVARPITRDAARGCHFHDALDTLLRQALDRRTWSIEYPCVVFQHSREVYPDRWGGDLLGAPFGEQSLGGVANGLKLKYYPRRPSGSTGGVIVSPVGEDNPRLSSIVNLAVVLNTELDHALDELSRARAEIAQLRAERVEHRHLEDGSPAPVGTQHSCQKTCAEEEGVLSRSRQPHRTRHPVSSCHPPMSVKQMFLMQTQAVQAIGQTLAAIQQQQPPPHPQMPQMPRDKRAEFMRGHPPVEKVLYGPRMLRGAAQSWWESYLATHDNSDAIT

SEQ ID NO: 60246 - protein, 123 aa, Zea mays
  Coding DNA Sequence Number=SeqID_16871
  Gene Ontology: Mol. function=DNA binding; Cellular component=nucleus; Biological process=regulation of transcription
  Homolog annotation: Hit_ID=A7QNL8; Match level="QueryCoverage=73%, HitCoverage=34%, E-value=8e-21, Identity=61%"; Hit description =Chromosome undetermined scaffold_133, whole genome shotgun sequence
MRRRNSMDKERRRSSIPDITSVDNGDAQGPITGQTNGQAANPGKPPSKQPPCPANTPLGVDAYGTTIGQPVGGPLVSVVGTPVSAPSHLAYGMHVPVPGVVVLDAVVNLAPMPYPMPPPSSHA

SEQ ID NO: 60247 - protein, 311 aa, Zea mays
  Coding DNA Sequence Number=SeqID_16872
  Gene Ontology: Mol. function=microtubule motor activity; Cellular component=nuclear chromosome, telomeric region; Biological process =microtubule-based movement
  Homolog annotation: Hit_ID=A7PH82; Match level="QueryCoverage=80%, HitCoverage=56%, E-value=5e-40, Identity=38%"; Hit description =Chromosome chr17 scaffold_16, whole genome shotgun sequence
  Pfam annotation: Domain name=Telo_bind; Domain location=58-161; Score= 78.7; E_value=1.9e-20; Accession=PF02765.8; Description=Telomere -binding protein alpha subunit, cen
MEPNRLREAEAAAGELKRLREAGQSQYMYRSIADARVVGGRVCLFAVVSEIGATVHSRGTDFTVTLRVIDESYKSGISVTFFADSTALLPCVKSCGDVISLHNVVIKKYRDFFVQFDKKYSSFALFEGKTYTECSPYQTSIRYHDSEHDKDFLNQMRTWLPQGLKDFTSNNSELYLMNLKSDSTFDLVCKVFHVHVENNNSIFYVWDGTDTPAAEFPAILDAEAAKSLSLHEGPPLSREILCTMPDFGTVLRIFSDRFVNKVSYMQKNIYWARFWNITCKQNFGIWKGTFSDSGGVRLLSNKDDSVVDRLK

SEQ ID NO: 60248 - protein, 219 aa, Zea mays
  Coding DNA Sequence Number=SeqID_16873
MAMLVHPDHYQTEEALNSVRHMLRWGSPAFAGRIRADTTPLGDLATGEFVLFVSYLFCGSRKDKDHLGAYYFQTRSDPIVTYIASLGGARWENWRHDWVIATVEVSDCLALPSDGPGLDRKQWREKPCLVPEFEPVLDRIKELAGISPLCDKPGLRSAVLARLPTLDESGVAVCQIGGWDPHRGIHILGASDGGPSLLMWPPESPCGPQFLGQGKGARM

SEQ ID NO: 60249 - protein, 66 aa, Zea mays
  Coding DNA Sequence Number=SeqID_16874
MEPGRGTAVGAVESLLTSSCFRKGAESHRRHRVGRCGSSSEAEVESVFRGRGRVRAPGSGEAETVG

SEQ ID NO: 60250 - protein, 132 aa, Zea mays
  Coding DNA Sequence Number=SeqID_16875
MGAPAPLLIELPTAPFLDELSMAFFGRPDDVMEEPGPLSPLLRDGSLSVGVSVASYLILVTSSSENGPGRTRKWPSSAERTRATQVAVGQMGDRQQQRPAVDVWQAGRQGKGGEETCVTATAVRVALGGMAA

SEQ ID NO: 60251 - protein, 469 aa, Zea mays
  Coding DNA Sequence Number=SeqID_16876
  Gene Ontology: Mol. function=dihydroorotate dehydrogenase activity; Cellular component=membrane; Biological process='de novo' pyrimidine base biosynthetic process
  Homolog annotation: Hit_ID=P32746; Match level="QueryCoverage=89%, HitCoverage=90%, E-value=1e-176, Identity=74%"; Hit description =Dihydroorotate dehydrogenase, mitochondrial precursor
  Pfam annotation: Domain name=DHO_dh; Domain location=132-452; Score =435.0; E_value=1e-127; Accession=PF01180.12; Description =Dihydroorotate dehydrogenase
  Subcellular localization annotation: CTP_CleavageSite=69; ConfidenceScore=5.10e-01
MSSSTALAWRRTLRNALLRGFPRRGAAPERYASTASASGAAADAAAAAAPKKVPPSPRKGRLLTGAMIALAIGGGAYVSTTDEGKFCGWLFKSTELVNPLFALLDAEFAHSLAVKAAAHGFVPREKRPDPSVLGVEVWGRKFSNPIGLAAGFDKNAEAVEGLLGLGFGFVEVGSVTPLPQEGNPKPRIFRLKEHGAVINRCGFNSEGIVVVAKRLGAQHGKRKMEETSSSTLPSTSDIKQGGKAGPGILGVNLGKNKTSEDAAADYVQGVHTLSQYADYLVINISSPNTPGLRKLQGRKQLKDLVKKVQAARDEMQWAEDGPPPLLVKIAPDLSKQDLEDIAAVALALRLDGLIISNTTVSRPSPADKHPLAQETGGLSGKPLLDLSTNILRDMYMLTRGKIPLIGCGGVSSGEDAYKKIRSGATLVQLYTALAYGGPALIPRIKAELAECLERDGFKSVQEAVGADFR

SEQ ID NO: 60252 - protein, 56 aa, Zea mays
  Coding DNA Sequence Number=SeqID_16877
MMSAYSLAAVKDGRQPAPPAIPEHQSQIDHVVVLAGLNTKLVLRCERVGMTPSSII

SEQ ID NO: 60253 - protein, 695 aa, Zea mays
  Coding DNA Sequence Number=SeqID_16878
  Gene Ontology: Mol. function=iron ion binding; Cellular component =integral to membrane; Biological process=transport
  Homolog annotation: Hit_ID=Q6H7J6; Match level="QueryCoverage=96%, HitCoverage=90%, E-value=0.0, Identity=65%"; Hit description =Oligopeptide transporter OPT-like
  Pfam annotation: Domain name=OPT; Domain location=35-668; Score =627.5; E_value=1.1e-185; Accession=PF03169.6; Description=OPT oligopeptide transporter protein
MSRRRAQEEEEDDEDVVESVERVFEGREVPGWREQVTARALAVSALLGAMFSVIVMKLNLTTGIIPSLNVSAGLLGFFLLTSWTKLLAKAGLTGVRPFTRQENTVVQTCVVACSGIAFSGGFGSYMFAMSERISEQSGETWDAHNIKNPGLGWMIGFLFIVSFLGLFSVVPLRKIMIIDYKLIYPSGTATAHLINSFHTPQGAKLAKRQVKTLGKFFAGSFTWGFFQWFYTAGEGCGFMSFPTLGLEAYRQKFFFDFSATYVGVGMICPYLVNASVLLGGVVSWGIMWPLIEQKKGDWYPADLKPSSLRGIVGYRVFVSIALILGDGLYNFLKVMTRTVTALVVQVRRMMSEPTLPISGGGGEGGGIPLPAPEETFDDRRRTELFLKDQIPNTLALGAYLVIAVVSIVTVPHIFHQLRWYHVAASYVVAPVLAFCNAYGCGLTDWSLATTYGKLAIFTVGAWAAATDDSGGGGGGIIAGLAACGVMIGIVSTASDLTQDFKTGYMTLASPRSMFVSQVIGTAMGCVVAPSVFWLFYNAFRDIGMPGSEYPSPNALVYRNMAILGVQGLGSLPRHCLDLCIAFFAAAIAINLARDLAGARAAAYIPLPMAMAIPFYLGPYFGIDMCIGSLVRLVWDRLDPARAKAFAPPVASGLICGDGIWTLPQSVLALAGVKPPICMKFLSRSTNVKVDAFLRS

SEQ ID NO: 60254 - protein, 609 aa, Zea mays
  Coding DNA Sequence Number=SeqID_16879
  Gene Ontology: Mol. function=hydrolase activity, hydrolyzing O -glycosyl compounds; Cellular component=extracellular region; Biological process=cell wall organization and biogenesis
  Homolog annotation: Hit_ID=A2XYW8; Match level="QueryCoverage=93%, HitCoverage=94%, E-value=0.0, Identity=71%"; Hit description =Endoglucanase 13 precursor
  Pfam annotation: Domain name=CBM49; Domain location=515-595; Score =109.8; E_value=8e-30; Accession=PF09478.1; Description=Carbohydrate binding domain CBM49
  Pfam annotation: Domain name=Glyco_hydro_9; Domain location=39-501; Score=794.4; E_value=6.7e-236; Accession=PF00759.10; Description =Glycosyl hydrolase family 9
  Pfam module annotation: Pfam domain module=CBM49::Glyco_hydro_9; Domain location=515-595::39-501
MPRLMKTSTKTPATLAVAASFLLLLATAAGGASTPAPFDYAGAFDKCLQFFEAQRSGKLPADRRVHWRGDSALTDGFSQGVDLVGGYYDSGDHVKFGFPMAYAVTMLAWGVLEFEKEMVAANNHQRALDAIRWGTNYFVKAHTEPNSLWVQVGDGDSDHLCWERAEDMSTPRTAFKINMTHPGSEVAGETAAALAAASKAFRPYDSMYADLLLLHAKQLFTFADTFRGRYDDSLQSTKKFYPSGSGYQDELLWAAAWLHEATGDEEYLQYVSRNAEEFGGIGWSVLEFSWDNKYAGLQVLLSKALLAGGGGEHADTLRQYQAKAEFFLCACLQKNGGHNMKLTPGGLLHTDEWNNMQYVSSATFLLAVYADYLAASRGALRCPDGEVAPGEMVRFARSQADYVLGKNPRGMSYMVGYGSYFPTHVHHRGASIPSVYAMDSRVGCMDGFDRYYNSKGADPNVLHGAVVGGPDAADGFVDDRCNYQQAEPTLAGNAPICGVFARLASEPADASGSPLEFVHTVSNSWTTNGVEYYRHVVTAKNTCGHPITYLKLHVKGLSGPIYGVSAAKEKDTYELPTWLTSLAAGEQFTIVYIQGGPAARFSVASYKTA

SEQ ID NO: 60255 - protein, 145 aa, Zea mays
  Coding DNA Sequence Number=SeqID_16880
MGKNNKRKREPTPPSEDFGDSEYSEEEFSSESEGSSAPIPLRESSDDSDDSQGLAAEVWTYIRAIERSGLEGSDESEYSSDEEDSSEEDGGGDGEDDDNDDDDEGGGSGDGDGGGRGGSKGDGDGSSRGGSSKGSNRGGSSRASG

SEQ ID NO: 60256 - protein, 224 aa, Zea mays
  Coding DNA Sequence Number=SeqID_16881
MGAPTLVYACVDGAMRHRGGGALAETGGRKGGPPRDRHPTTPQLCAPSAPSTSGGPAQRKRARMSCNRCPGYDVREATPPLTPMLRLLDCGTSTATRGSPAHDPTVPIKGDGHGSVSRGVGTTVGMVKSGPAVTAAADERKQWSNRLQARVPSRSDGRALSHGVKTTRSCPVPRTACTRNGRHVNRSSHRINSPTEQATPLGLGLGTWWKGSFSVEEAGPEPSY

SEQ ID NO: 60257 - protein, 79 aa, Zea mays
  Coding DNA Sequence Number=SeqID_16882
MRGEGESLLPGQGAAVRPPPGQRSCRTSVAAVTALTERADFDNVGSVEVLLPGSPSEAGPGSVEGGINTEGAVAPPADA

SEQ ID NO: 60258 - protein, 83 aa, Zea mays
  Coding DNA Sequence Number=SeqID_16883
MSVPGASSGLVVDVCVLDLGGVDRDYGNLSPELALRRVAARRRGRLSLLRRRQQTTLWCAFGCGSSEPATALGARCRRQGFDR

SEQ ID NO: 60259 - protein, 84 aa, Zea mays
  Coding DNA Sequence Number=SeqID_16884
MAAPSRGKKRLVVDVDVELDSEAEVASAFSRLSVSIVAKPSGEYVRAKEHSSPSVNCAATSGTGYTQQQTPSVAKQCSEPRSVS

SEQ ID NO: 60260 - protein, 437 aa, Zea mays
  Coding DNA Sequence Number=SeqID_16885
  Homolog annotation: Hit_ID=A3C7B9; Match level="QueryCoverage=21%, HitCoverage=30%, E-value=5e-11, Identity=37%"; Hit description =Putative uncharacterized protein
  Subcellular localization annotation: CTP_CleavageSite=42; ConfidenceScore=5.22e-01
MAETAGAAPAQQPARVATTTTNSDVSTWAWLQQVLALLFPSSLAAKAALFALVVALLPLLPSGQAPRIWELPHLLLLGIIISYGVFGQKNADAEVATAAYATPVDVEASVEAYVSQMMQGSLVFDENDGNDGANKDGSVQQQAWSSRYLPDDPLVVVADTSAPGTNSGNGDTDTGGKGKPLLLPVRKLKPAAAAPTGDMMSDVSGIEDEGEEEEEEELLLAPKSGTGYGVVREHAFPSPSSVLDADLTLSPSSPPLLPPPPPPPPFLGRGRSGLLKAKARSFNEFGFGVLSSDRSPNGSLGSHSHSAAGSSRKFRPRYAVQATRSSTFGRYDPVVPIHDDEAGDETLGEMVATSDSSFSSDLDDDTIKEENSCEDDGVSEDDGVNSCNEELFELATRPGLEGETETEVEGEVDRKADEFIAKFREQIRMQKVEQARR

SEQ ID NO: 60261 - protein, 42 aa, Zea mays
  Coding DNA Sequence Number=SeqID_16886
MSVCPFELWFTGCGCGAEADHERASENVWNGPGFFFGFFFSE

SEQ ID NO: 60262 - protein, 386 aa, Zea mays
  Coding DNA Sequence Number=SeqID_16887
  Gene Ontology: Mol. function=transferase activity, transferring glycosyl groups; Biological process=metabolic process
  Homolog annotation: Hit_ID=Q7XI34; Match level="QueryCoverage=72%, HitCoverage=71%, E-value=1e-81, Identity=54%"; Hit description =Putative UDP-glucosyltransferase
MRAARRLRFYGTEPGWIMDCARAEHFEPPAVAFGIPKESTPGRSTDDPAGEMRPSSDRRHRLASRPTVDADGDDDSHISPTLQLAALLHARGLAVTVLHTGLNAPDASRHPELTFVLIHESSFPDEVTSPGTDIVTQLLALNVACEAPFREALASYSVCYSALRAAHRLGVPALPLRTDSAATFRSMLDGSDTDALCGFVGHVADAVRASASGVVINTFERMEASELAKIQRELSRPAFAVGPLHLLSPAPTEQSLHAPDRGCLAWLDDHPLRSVLYVSLGSVACVDRGAFVEMAWGLARSGVSFLWVGRPGLVGGVARAGPTQTGRAGGRSSSRACCGGPGPAGGAGSGGAGLNVGWAGSRSSSRADGGVGPNSEEPTVTAVDGC

SEQ ID NO: 60263 - protein, 416 aa, Zea mays
  Coding DNA Sequence Number=SeqID_16888
  Gene Ontology: Mol. function=catalytic activity; Cellular component =cytoplasm; Biological process=metabolic process
  Homolog annotation: Hit_ID=A2XAQ6; Match level="QueryCoverage=99%, HitCoverage=98%, E-value=1e-130, Identity=55%"; Hit description =Putative uncharacterized protein
  Pfam annotation: Domain name=MoeZ_MoeB; Domain location=176-262; Score=100.1; E_value=6.8e-27; Accession=PF05237.4; Description =MoeZMoeB domain
  Pfam annotation: Domain name=Rhodanese; Domain location=300-407; Score=39.8; E_value=9.5e-09; Accession=PF00581.11; Description =Rhodanese-like domain
  Pfam annotation: Domain name=ThiF; Domain location=76-173; Score =64.1; E_value=4.7e-16; Accession=PF00899.12; Description=ThiF family
  Pfam module annotation: Pfam domain module=MoeZ_MoeB::Rhodanese::ThiF; Domain location=176-262::300-407::76-173
MGVAGGGRTEAIMREIARLRAQRDELDSRIRFFESQLRVGAAPATLPPSLSTKLDAMGLHAAARGGSGLSPDAVRRYSRQLLLPDFGVQGSLGVVDGDDVELGNLHRQVIHVEAYVGQPKVKSAAAACRAYDIVVDATNSPASRYMLSDCCVLLNKPLISGSTIGLEGQLMVYNHNGSPCYRCHFPNPTTTCQTASSANYTLGVVPGVNGCLQALETIKVATRVGEPLCGRMLLFDALSSRFKTVNKIHKRSSTCTVCGDNPDLTQDSFVTFDYDSLTQSTKSSKPMAIQTPLPKSARTSCREYKRVVDSGRTHLLLDVRPVHHFQIASIANSVNIPLHELRERLPRLRDALTEVAGVSHSHGKHYCPLYFVCQNGDDSEAAVGVLRESGFPYAGAIAGGLECWAREVDPGFPVYW

SEQ ID NO: 60264 - protein, 226 aa, Zea mays
  Coding DNA Sequence Number=SeqID_16889
  Gene Ontology: Mol. function=transcription activator activity; Cellular component=nucleus; Biological process=regulation of transcription, DNA-dependent
  Homolog annotation: Hit_ID=P92953; Match level="QueryCoverage=59%, HitCoverage=41%, E-value=3e-58, Identity=84%"; Hit description =Homeobox-leucine zipper protein ATHB-4
  Pfam annotation: Domain name=HALZ; Domain location=131-175; Score =81.9; E_value=2e-21; Accession=PF02183.9; Description=Homeobox associated leucine zipper
  Pfam annotation: Domain name=Homeobox; Domain location=76-130; Score =68.5; E_value=2.2e-17; Accession=PF00046.20; Description=Homeobox domain
  Pfam module annotation: Pfam domain module=HALZ::Homeobox; Domain location=131-175::76-130
MERVEDLGLSLSLSSSLASPRTHHVATMLLRAPEKRFLEMPLLLPAKRTTEVTGEDGLRGGSDEEDGGCGIDGSRKKLRLSKDQSAVLEDSFREHPTLNPRQKAALAQQLGLRPRQVEVWFQNRRARTKLKQTEVDCEYLKRCCETLTEENRRLQKEVQELRALKLVSPHLYMHMSPPTTLTMCPSCERVSSSNGNSAAATAAARARAGAGAGAIVCHPIDRATST

SEQ ID NO: 60265 - protein, 109 aa, Zea mays
  Coding DNA Sequence Number=SeqID_16890
MPSRQVGLLIQPLDSTFGVLGLWLWWREVRSGARSEEVTTPAAATTMLILDLAIWIIPVTLVLVPFRRLVVLVARLQELEECIMRPRPPLMDSWAWGRVGGLHTMSIMM

SEQ ID NO: 60266 - protein, 481 aa, Zea mays
  Coding DNA Sequence Number=SeqID_16891
  Subcellular localization annotation: CTP_CleavageSite=38; ConfidenceScore=5.75e-01
MNKNTGTQGANTHGTPVLSPRQQRWPQGGSRCNLALARADARGARTSTKSRRPGARMVAVIPSATGTSRAASTSAPSSGASAHRQIPTRILPDERSTDLLAEAPYRCKGRTALEHERRSSGARCLGRSTRAHDATTALAAGGGTGSQASEPNVLELATTAVDRPRIVEVCPARRAIERPLPWMLKGRLTHEPAREVELRLSPAFAPARMMNILEAEGGARIAAQLASPRQEAGGHRLGGEEAKPLRAVHATAQRLQAVLHFCPDQRAKGWAAMQAACNRAKWAHLFDFQQAQHGGPGPRVMQPARRLLRVSNCTATHATTAPPRLRSQYRDSRQPCSASQARRSNAVKIGPAVMAVTGGQKQRSRRQPSSRPIQGQRGSPLSRREDGAPGPGKGDTPKRTLLREGNRLRASLLIRGSKAGPSEGFNGRLRSIGFCAHYWSEVRWPAPRRVQRSPQATRGSAPTTDQGFVGWPSKGSQSPQT

SEQ ID NO: 60267 - protein, 202 aa, Zea mays
  Coding DNA Sequence Number=SeqID_16892
MTGQSSYLERLHHHLHKEQERRRQELEQQGSSFSLQQEIESVRSCSPVLPLEAPPAPPLSALAPGVAAGGDLDDGGGNDSSSHSTDLSADHEPEGWVARPITRDAARGTGGVIVSPVGEDNPRLSSIVNLAAVLNTELDHALDELSRARAEIAQLRAKRAEHRHLEDGSPTPVGTHHPYRSPWRGHQSYGNPDCRTKINLEP

SEQ ID NO: 60268 - protein, 157 aa, Zea mays
  Coding DNA Sequence Number=SeqID_16893
MGKSKKGGSSSHHSGDKQKRKPTPPSEDFGDSEYSEEEFSSGTEGSPTPTSLLMSSDDSDDSQRIAAEVWSYIRAVERAELEGSDESEVSSDEENSSDSFEEGGGGGDGEGDDDSGGDGNGDGEGDGKGKGDGGNGSDSGKGDGGDGSGSDSNKASG

SEQ ID NO: 60269 - protein, 115 aa, Zea mays
  Coding DNA Sequence Number=SeqID_16894
MLCFRLELMLLDCSAGLLGQEDEVPADSAFGTGLLLTDCSGDFDAGAEGTASKTTDAEVLECWEGMIHQLILQRVDQASQETILSLGVGVDIFSSIARQLQKPVSVLTNRTLTLA

SEQ ID NO: 60270 - protein, 129 aa, Zea mays
  Coding DNA Sequence Number=SeqID_16895
MHVSHSLHSLYCNLADGEYVLIPEQGAVHEEDQEQAPETAIEDLPATPAIEGKPRYGGDKCGHCTAAAGVSGALYAKAVYLARIKLDSNRLLLAGTLQDMVDGVTWPTTLPQGWMVEWDAAPTGEEQEE

SEQ ID NO: 60271 - protein, 267 aa, Zea mays
  Coding DNA Sequence Number=SeqID_16896
MARLRHTARKSVIPFLPSRLAERPLRRPVAGQSSHLERLHHRLREEQERRRQEQQSSSFSLHQEIESVRSCSPVLPLEPPPAPPLGAPASGVAAGGDPDDGDGDDSSSHDTDFSANPEPEGWVARPITRDAARGCHFHDALDTLLRRAFDRHTWSVEYRCVVYQHSRGVYPDRWEATCLVRCPEDSLQGAEACSEHYSISERDSAEAAMQEARAEIALLRAERAERRYLDGGSPARAEIDGFGYDYGIGEDEAVEGDFQEFQDYDEF

SEQ ID NO: 60272 - protein, 57 aa, Zea mays
  Coding DNA Sequence Number=SeqID_16897
HLSSFGSLFLNFVILYISKRYEKSANFEEKGTEIAVSIYNFIKSINFALNVFEGPWQ

SEQ ID NO: 60273 - protein, 196 aa, Zea mays
  Coding DNA Sequence Number=SeqID_16898
  Homolog annotation: Hit_ID=Q0WWS3; Match level="QueryCoverage=20%, HitCoverage=51%, E-value=5e-17, Identity=95%"; Hit description =Putative uncharacterized protein
MKNVAKCDTWCELQNPANHRVFERKLRPKPSGGGHVCLGVTPKDTPNTPPRGEGRGVWPPAPQGEVGRSRGCRRTAPGAAREASSATDRAQVLWKGTPGRVRAPSGPDPVAPRGAVNESGCLGMQPKSGGFELEHACRDPKDGELCLSGAKPEETLVEARSDTDDSWSPHEFYRVKPMIRGIGGATPSTYSQTLNR

SEQ ID NO: 60274 - protein, 155 aa, Zea mays
  Coding DNA Sequence Number=SeqID_16899
MGKNNKRKREPTPPSEDFGDSEYSEEEFSSESEGSPTPIPLRESSDDSDDSQGLAAEVWTYIRAVERSGLEGSDESEYSSDEEDSDGGGEDEDDDDDNDDDDDEGGGGGDGSGRGSGSGSKDGDGGGSRGGSGGGGSSRGSNRGGSGGGTNRARG

SEQ ID NO: 60275 - protein, 309 aa, Zea mays
  Coding DNA Sequence Number=SeqID_16900
MARHSVPTHINRPHRFPVNRSGLTALAYNASLTPTAVVQQILDGRFWCWILGYLLSNSLLRHEDAAEVVGGTCSSQITAVGFNQVARGAPLGDVEAMRARNREMVQWITRSTCSGGVTNSGERDLTVPVGLVLGSSLGKLHGLPRKLSTGSDRADVGENGLATAGGSGGSRGASSQAIPGPVGGYLVGVPFGRWSPGGVADSLDLKYYPRRSTDSAGGVIVSPVGEGNPRLNSMVNLVAVLNTELDYALDELGKVWAEVAELRVECAAHHYLDGGSPAPVGIQHPYRLPPRGCFDYGTPDCRTRIDLDP

SEQ ID NO: 60276 - protein, 167 aa, Zea mays
  Coding DNA Sequence Number=SeqID_16901
  Subcellular localization annotation: CTP_CleavageSite=33; ConfidenceScore=5.70e-01
MTPAHAPSSLFRALPVPRAHPSPHFTHPRPLSRSALVARRRRRSAPAFPTIQLAGDRAKPPRAPPRDNEQSEVPECVVGDLPEQQPGEGKRAVNGGRGVVLALPRLGCRGSFDLVLLVTHLGEVCTTQAGKGSRLVGTVYNLCRVLKTGGDAGNMDDFEEFQEYNGF

SEQ ID NO: 60277 - protein, 102 aa, Zea mays
  Coding DNA Sequence Number=SeqID_16902
MLLLVLLLLLASALLLLVQATMQSLQPGLYRPDLHYQGEWLGIHYVAFTKTPLVHSCSLGFASRTNAVYLPKVLTERYSGKRPEPPKVPQNHPHNQDNNIVS

SEQ ID NO: 60278 - protein, 125 aa, Zea mays
  Coding DNA Sequence Number=SeqID_16903
MASHVSTEGGNAHSHTDGLAREGFPRIFWEVLQGAGYATPPQYAVQLFEEHRVPRCRDTIESTALHVLTTFCGFHPLELSTHPIGLFPSEKEDDPMWKDRVEHAKDVWALYPGHTAHLTVRCLAR

SEQ ID NO: 60279 - protein, 101 aa, Zea mays
  Coding DNA Sequence Number=SeqID_16904
MQELMAQQNEILRQLAQHQPPPQHYGGGDHNQRPPAAATYQEFLSTQPPLFTRAEDPLDADLHGPVRTRWDHFLAMQLVDYMFEWGESRQHYRDITYPQAS

SEQ ID NO: 60280 - protein, 54 aa, Zea mays
  Coding DNA Sequence Number=SeqID_16905
MAMMGSTSEKMYLSQDPLLVSISANKVLIKPYLVSQKDSISLRVFYFDGTSSMS

SEQ ID NO: 60281 - protein, 168 aa, Zea mays
  Coding DNA Sequence Number=SeqID_16906
MRIQSHPHPTAGYPVLLEQLYRVLGRRSITGSLQYLPENAGKTLSCKPVCVGMQVLSSRLGCWLLDYLLSNSLLRNEDAVGLVGSVCFGLLTAVGFNQMAQGASLDAKDAIGTRNRRMAYRGAWSTCDGGRLKSGDVDPVSPVRRVREVDTARGCAHGLSAEGVLWRC

SEQ ID NO: 60282 - protein, 83 aa, Zea mays
  Coding DNA Sequence Number=SeqID_16907
MKIRSTGRSLSLLPRSLSAGIWLAPSADRFFGRGEPKPTHGGSIPAHPLTAFSLYRRGAHGPQFLRFARLQMGYAIGRVFLNI

SEQ ID NO: 60283 - protein, 188 aa, Zea mays
  Coding DNA Sequence Number=SeqID_16908
MTGFKRHVATFAEFAAAKSLDYAIISQGVDLYTEDQFEDFAQYYEPARLGIPRCFGETPGLRHHLAVIKKIARVTIIPKSGDKREVMSVVLFMMHQLNDLKMDKNQNLAYAPYIMALIKTKTRFKGWCETAHTPFRPFKNEIGFLTRPLTPFANDEGAQGDAFPAQPEAHPAQQMPPPPPPPQQGQYW

SEQ ID NO: 60284 - protein, 38 aa, Zea mays
  Coding DNA Sequence Number=SeqID_16909
MRVEWGGYEIDGSGYDYGAGEDEAVEGDFQEFQDYDEF

SEQ ID NO: 60285 - protein, 436 aa, Zea mays
  Coding DNA Sequence Number=SeqID_16910
MGLGVCGSLCQGGYEIDGSGYDYGAGKWYSFRLERVVSIATTAQEKMKLWKETSRSSKITTSSRCGLAATPSRLPVKAALSTFLFRTLIYCKNYMGVSDMARLRHTARKSVIPFLPSRLAERPLRRPVAGQSSHLERLHHRLREEQERRRQEQQGSSFSLHQEIESVRSCSPVLPLEPPPAPPLGAPASGVAAGGDPDDGDGDDSSSHDTDFSANPEPEGWVARPITRDAARGCHFHDALDTLLRRAFDRHTWSVEYRCVVYQHSRGVYPDRWEATCLVRCPEDSLQGAEACSEHYSISERDSAEAAMQDAARRALSHYCSVFGGAADGLDLKYYPRRSSGSTGGVIVSPVGEGNPRLSSTVNLAAVLNTELDHALDELSRARAEIALLRAERAERRFLDGGSPAPVGTQHPYRSPQRGHQSYGNPACKTKINLEP

SEQ ID NO: 60286 - protein, 256 aa, Zea mays
  Coding DNA Sequence Number=SeqID_16911
  Gene Ontology: Mol. function=nucleoside-triphosphatase activity
  Homolog annotation: Hit_ID=A2WNT1; Match level="QueryCoverage=40%, HitCoverage=29%, E-value=3e-25, Identity=61%"; Hit description =Putative uncharacterized protein
MEHQTGGEDESVAPLGGGRTGHRLCPPRRAARCDTTREPRNEGERRILTDWMVPPCPLFWTYLNLFLRRRARRLLNVVDPYVTIDISEPGGEVRYSRYGPVSDNDSTYEEVKAYLSGAVRSQDARELRVEGAREGNGLVVSMRDGQDVADEFRGVPLWWSSVVAAEREEVAWEWSRLLRSAVGRHRGGSQRRMRRRWYEASATPSRRPTAAIGEGEFWRRERDAGSLRVTAWADPESETEREGARGGRNSIVLLLD

SEQ ID NO: 60287 - protein, 140 aa, Zea mays
  Coding DNA Sequence Number=SeqID_16912
MAAGRMPLQQRPRPRLRSRGEDKCKEPEARSADGGGDPVGDGDFSSHRYLGTGDRSRLPTRILTDERSTDLRAETRTGAKAGQPQNTNAALAARDVLGGPPPSWAESSPTRSKVLPLRHGGWAPRVMQAGPGQKEPNRRA

SEQ ID NO: 60288 - protein, 473 aa, Zea mays
  Coding DNA Sequence Number=SeqID_16913
  Homolog annotation: Hit_ID=A3CF31; Match level="QueryCoverage=94%, HitCoverage=42%, E-value=5e-63, Identity=34%"; Hit description =Putative uncharacterized protein
MAHLAPTQQFQQQHPAMLRTESPAAGHSIGQGPLDLEKHTSKSGKLDNATIAAVGENKNSGPESVVMRPTKSQLGDENMNSEHNGFVGVRKDAVQTGIVSHNLDGSIRRDGNTDQAGNSHGPLVQGGKDHKASDASTDHEKGRLFQQASLQNAGAPGSYVPPGVVPHPSGPDKMLPQHMTNHGHMHGFSENIRPPLQQPYGVFHSGTITRPFGENQIQMPMPQPGGIRPGDGMLNSNDFGGEGFNASGGAAYPERHDNTEDSRKHFPAPAPLDDQGLRRDPRHFERALGRPDGFLDSVPGRPPFANHRSAGLHEDFPRKQNATASHPDFLSHGAEFDHHRAIGMPNFRNPGPFAQGTSGGPGGPPKHQLGSGNLPGNLHSFEGLDFPPAPFNLGDSFPCTSLHGQCGEPHGDMHPGDPHLVAEYAQHGFPKTAAHFGLAHAFSNGDLIIDHAGTFTKRLVIVSSDIHNMFCIV

SEQ ID NO: 60289 - protein, 281 aa, Zea mays
  Coding DNA Sequence Number=SeqID_16914
MKDCRDSPYCATAVPVLAGRRKQYLCSEERIDNDGGWGDDEEVDGWGDDEEVDGWGCGDEDGAVDAAARWTDGAVDAVGGGGCSSEVDDGAVATRMGRWMRRRGGRMAWWMRLVVEFLLGLELKAMPTVCAVFPSARLLSLPGARRARLGSPTVFPGALPPERSPRPCRSSYALVCARAGARLHPRLRSSAPALSLQALQGILASAPFSSLALLSLVVGRVAVNLEQLVVGSFPAAMEKSPRSIPIGSGPARADTRKDVAEAADGSRRTGIVDTSNIDYGS

SEQ ID NO: 60290 - protein, 18 aa, Zea mays
  Coding DNA Sequence Number=SeqID_16915
MKTMRPTSTNKEIGKRKG

SEQ ID NO: 60291 - protein, 53 aa, Zea mays
  Coding DNA Sequence Number=SeqID_16916
MVGLQVVMRKMVFYYDYGNGKEREEGVEADLQEFQDFDESRIRLATSPSQLPV

SEQ ID NO: 60292 - protein, 104 aa, Zea mays
  Coding DNA Sequence Number=SeqID_16917
RTRLYFAVRGLHAAPMSYPPSSPLALDVPQHALRRCRCDNPDGCGLASAAPFATRSVAEAPARIIQEVADGGSCSVVWLKNVTSGHGDTHGLLAICMGSGITGA

SEQ ID NO: 60293 - protein, 82 aa, Zea mays
  Coding DNA Sequence Number=SeqID_16918
  Subcellular localization annotation: CTP_CleavageSite=45; ConfidenceScore=5.39e-01
MARARATAAPPTTRPVALTPRRDRRRFWQEQRATLRLRRNNSAKKAASDRVGPTPTTGQRFKGRPPEGFNGRLRLLGLRAHY

SEQ ID NO: 60294 - protein, 528 aa, Zea mays
  Coding DNA Sequence Number=SeqID_16919
MNKNTGIQSAITNGTPVPPPQVRTTPLHGGGPAEQQKTDERRAVACSSSSDDDDFCSGGPNSGSADLRAGAAVRRPPPMPKLVRQGRAEGCRVGGRSVGGPGYLVGGRTSSSCRGRCRRRERLRSHSRPRARHGAAAGATDDDCPSLRSLSEGAGHRPRRGRPQLGTLPSPALVMEILEAEGGAEAAARLAFPHHQAGGHHLGPTRHATGAPTASCMQLHRHLRHHRASSIAEPIPRLEATQRTTQQRQPGAAVNAAKNGLAVMTVAGGREQRSRRQPSSCPIRGQQGNPLSRREDNAPVIRSSNGSRTRNGRPANHSPRRITPWRDRRRLWQEKRATLRLRHNDRVSKGTGKGGYPEKDPSPGRNQAPSLPTDQRFEGWPPEGFDSRLRSRGPYTHYWSERLGGCSRKPGSGRTIDSVNIPARELGIRPYTRATASSHEGTTRPAEALREALRPRRSETTPPRPRGLHPAGALARTHRNKMQPRKAGPLAKKCDKSLQASANTPFEARGLLSGTKIRGTLKSPNSQL

SEQ ID NO: 60295 - protein, 100 aa, Zea mays
  Coding DNA Sequence Number=SeqID_16920
MATHILCDDGGSQPRYAARGHQQGVNRSNSCLYTRLHCSSYVHDITPAGCQNLSGCHIGMQLKMRIDLFYGRSVEDGFGEGNVLLASSKWRHHNPYKLVP

SEQ ID NO: 60296 - protein, 396 aa, Zea mays
  Coding DNA Sequence Number=SeqID_16921
  Gene Ontology: Mol. function=sequence-specific DNA binding; Cellular component=nucleus; Biological process=regulation of transcription, DNA-dependent
  Homolog annotation: Hit_ID=P24345; Match level="QueryCoverage=12%, HitCoverage=13%, E-value=3e-10, Identity=71%"; Hit description =Homeotic protein knotted-1
  Subcellular localization annotation: CTP_CleavageSite=13; ConfidenceScore=5.25e-01
MASGDPKCTVQPSAQGATTQRFVHSREPGIPGPGPKANPKPRRAPQTPLQLGRTLQGDGNSRCYYLLSNPPIQSATLAGMMTSELSSQVQVPAEATSWGRDTNSFLGMLVSSLDTTSLHPRGPSTRRGVDKTTHSKNKHHTDKSCLIESSQKYLTKTKVIAFAFKRSPSLISTGRSLTLNTVAATGNSDAGGNPVLQLASGGGLPNTCAKAKEPSSLEVASKPLKPKRWRRERWSCSSARLPPHGVGARPVHGGAPRDAGEAHAKDGAAAQLAFHPRKVAAQHPSVQMLAEEASPPQTSRGEKSNRRLRQYRVSSGPQQKTEKVNFQNQCSGIEAPRAWPSKTIKCEGHGSVSRGDRRGSWRDRRRTGSDYVSKRTKAARQSPVKLWPHLQARILP

SEQ ID NO: 60297 - protein, 152 aa, Zea mays
  Coding DNA Sequence Number=SeqID_16922
MPPAPPQGIMVAGGDPDRDNDNAEAFLEHYSIIERDTAEYCSLFSEVADGLDLKYYPRYSTGSVGGVIVLTVGEGNPRLNNMVNLVVMLNVELDHTLDELGKVRAEVVELCVERAARHYQDGGSPAPVGIQHPYRSPPHGRFDYDTLTAGPR

SEQ ID NO: 60298 - protein, 91 aa, Zea mays
  Coding DNA Sequence Number=SeqID_16923
MGVWPESRGAHGGGFAAVLLGSEGDAEADKVGSMRRCQNRPVVRRSGGLTDPQVDPVMKEALDVMSVANSIVDEVIDRLLNEAAEKILKED

SEQ ID NO: 60299 - protein, 75 aa, Zea mays
  Coding DNA Sequence Number=SeqID_16924
MQEKDPKRNTSPALKVTGVFKMIAMESTWINAAPPSGAPDVSVYDPTAPRGSPRDAFESDDVVDCDSMGYPLSII

SEQ ID NO: 60300 - protein, 219 aa, Zea mays
  Coding DNA Sequence Number=SeqID_16925
MGATGALELVVAELLSLGNDSPSGLVPHSGNMHGLLLALELLGCSLVGCWGGKARCLVVLPLVRISSLRVVLTVLLLLLRKLPLELLLLVLTLMLVLGRHGWRGKTPTKTVLLPLADRDRSTEWAKTEGWPLMNSASCLWAPVASELAPEVEVGVATAPPAALLLKSDQLVGLLGFASGTSVQWSSGVAVATAVELPPPRVPAAPAEHVSTSASVLRHM

SEQ ID NO: 60301 - protein, 275 aa, Zea mays
  Coding DNA Sequence Number=SeqID_16926
MELSKKGFLPMSHGIHLSQKQCAATAYEQEHMSKEIVIDSTTKAEYIVASESAKVDVWIKKFLIELATEGEEADRPVGSSARDIGGRQMGPSVGRACEKRYPEIWAMRSGSNGGDQRRGGYSYGRWRSCSSMVKPPELGRVWATRVPRSPGLARIGEENPMNTLVGFWPRDQGQRWENGGGRASGGSGLTPVRNPGRGERQSSAIGLGLALVAVGECYGLTPGHGTGLSWLDTVRGTASKRSRTPGRESGCGLCSKGSWGAWPGDVAKVLGVRAS

SEQ ID NO: 60302 - protein, 53 aa, Zea mays
  Coding DNA Sequence Number=SeqID_16927
MVKNFGSKTVQIAMNAVVTSHLLVCLYSVAGKEREEGVEADLQEFQDIDEFED

SEQ ID NO: 60303 - protein, 101 aa, Zea mays
  Coding DNA Sequence Number=SeqID_16928
MGTPDIRCANGHSLFSVSHYLILFCKLLMLNQINSFFGYGEGGYLDGCGEGHGEDEYGVEKVLEPLMTMLVAVILTLAIWQLSKLKVPKVIESRSMKELQS

SEQ ID NO: 60304 - protein, 32 aa, Zea mays
  Coding DNA Sequence Number=SeqID_16929
MMGDGTVGGLLLRRRFSKQKHLRQDDMQAGVT

SEQ ID NO: 60305 - protein, 862 aa, Zea mays
  Coding DNA Sequence Number=SeqID_16930
  Gene Ontology: Mol. function=zinc ion binding; Cellular component =intracellular
  Homolog annotation: Hit_ID=A3CCU1; Match level="QueryCoverage=80%, HitCoverage=85%, E-value=1e-134, Identity=42%"; Hit description =Putative uncharacterized protein
  Pfam annotation: Domain name=TPR_4; Domain location=11-36; Score=3.6; E_value=15; Accession=PF07721.5; Description=Tetratricopeptide repeat
  Pfam annotation: Domain name=TPR_4; Domain location=260-285; Score =16.4; E_value=0.11; Accession=PF07721.5; Description=Tetratricopeptid e repeat
  Pfam annotation: Domain name=TPR_4; Domain location=38-66; Score=5.7; E_value=8.1; Accession=PF07721.5; Description=Tetratricopeptide repeat
  Pfam module annotation: Pfam domain module=TPR_4::TPR_4::TPR_4; Domain location=11-36::260-285::38-66
MTDAEADTEAVRAAAWEVLRLDHDGHTHEALTRARDLMLAHQDMAITHRLLGDLSYGAAARACLEEGTRKAGLAAAAPHLHVAREAFAAARRLAPDCIDIADALGDAFAASWMFREAECEYKRAQHTPQPTDPALHNAAYGMCMSGGHEHDRDPDFMSVRVEEVRARARASYSRMKTEQLLPIAIHRVLEAGMQLGAAEGRKQAKGIAEVFPDLGRAQYLAAYMDLEFVRSLDAAIDKRLFLRRTLVITERVARDYPKSPVFASFHAKLLFVLGEYDAAETECRRALEMVEPNDPQDDCIPVGSISGENRGVRLVSVACEFHELINKIVMLASDYWDSMSSERQRHSFLQVRLDVLQHEYNKVDPSHAFAMSDVRSFVKEHESWRFWICPLCHCKKFMYTGLLLSHMCTRHPRAVLPRLQSVLDQKLSDEALESDDSLHAVTFCEDSEQQDVTICFNKSSEVFKWLFYAPSSGVRPKPFLEIRQMKCDKGRMLLESIKDKMKTLPADRSSTEFAKAIPEIEEQWQNFLKCSVLDYREVILQLARSFLWRDLKKCMTEDPELAAKPISAADIDAIFTKEVVNPASNAVESSQTVGAQMVSGNCQESVHDEGDSSDNHGKNTESSDQTTDMVERETGLAAKLDKLENGPKISESNPEGNVHDKWESSNNHGKITESSHQAIGMVESETDLAAKSVMTFCNVHDEEESCDNQGKNTESSDQAICMVESETDLATKLNKLEIDPKISESNQESNVHDNGESSGNQGKNTKSLDQAIGMAESETDLAGKLDKLGTDPKISESNQESELHAEHESSDSPVSRSDVALSSKGTSEATVTDTKLPRLPTNTMEGVSDFDTNLLAYTLGSI

SEQ ID NO: 60306 - protein, 238 aa, Zea mays
  Coding DNA Sequence Number=SeqID_16931
MKLPVLGPSVLVILSKGTHFFGSFVDLSLKVGEPSHLFPLPLHLLVNSLQVPNLLIQLLLLRAAPSAIVFFGGMVKVDACRRCSFEFTGAGASTPRHHRAPACLPTRGFLPPHAAFNAGDRTPNSSPCAAFSPPTAPFPNGCRDAHAAAATLAPNPRPPSTPTAAPQIPPHALFSPHQWRPSPTAVNAFPNGCERPSPMAAIVSAGLPSSSFTLRRATEPMKKPYFLLLFANSKQIAR

SEQ ID NO: 60307 - protein, 59 aa, Zea mays
  Coding DNA Sequence Number=SeqID_16932
MTRPKTQSYKDKGAKPTNDENKFFVDSFFLELQAPRRLGVTFESPKLVEDRNKLVLPLF

SEQ ID NO: 60308 - protein, 351 aa, Zea mays
  Coding DNA Sequence Number=SeqID_16933
MDIVVEEGNTDVGNTVEPSYEVVARSGCSAQLSTNDTNEHELESEDSKVSVGNAAKQSHDVVGVGIDCIFNHVKVSTEADLGTQPDVIHLTSLDVPNESSQISSEQNKQDALDTLIRISQHKKPKKLNVARVVSEDYKCTPEDVQLIEYIKTLPGKQVVVDIDSAWLNRNDMECLFHGDIQVSGEALSAYIHCIRNEEHLLHREGGKSFLGSFVARQGCHPQVPKIGCLETPTVPVKAAWEQRKQVNQGCFEMPANIDCSEDLFQSHEDLQNQSRTSNLDNEHFPRDASNHANVEATGPPYDLSNADERTISGQEGDYEQAPAVASGCPLRNVQYTARTDSNISEAACSCD

SEQ ID NO: 60309 - protein, 292 aa, Zea mays
  Coding DNA Sequence Number=SeqID_16934
  Gene Ontology: Mol. function=metal ion binding
  Homolog annotation: Hit_ID=A2XCE0; Match level="QueryCoverage=28%, HitCoverage=32%, E-value=3e-36, Identity=90%"; Hit description =Putative uncharacterized protein
MALAPFGAESLAAPLLLLLCDASKRHRLPLATTELSTPLVLLSYVANRWRKTSPTTAAQASPGAEHGGGHAGEHRAAASAQVEGAGWGGGVEALPSMLHRNYSLMRELDKSLHGVQLENEQRCQQEIEDIKHGLESGSITYDPAKLKFSEEAMEEQKHCVRIADEKVALATQTYDLVITIDVETGLKLLKHRRREALGEDIDELRNGRDMKNPHIPDGDTLTNEVEVELDMLRVLMLDGVSGEVHGADVVTIDKGAPRQRTVRLLKQLTKPRRLSDVVSHNSASTLERETTG

SEQ ID NO: 60310 - protein, 143 aa, Zea mays
  Coding DNA Sequence Number=SeqID_16935
  Subcellular localization annotation: CTP_CleavageSite=63; ConfidenceScore=5.59e-01
MVVIASVTATSFVVLLLFSLPSCIRLRTTPFSAEGVGSGASSPYSSNTSFNTDPRSGYCTSTRMFHGMRTPLFSPSSDVPFIFPAFVLFFLPNLLPLPTVAATSRPMLFDAYGASQPYFWPFFVHATEEEDMVAPATLSLSWR

SEQ ID NO: 60311 - protein, 139 aa, Zea mays
  Coding DNA Sequence Number=SeqID_16936
MERNKGNALHPAPTSSGCGLWLLVIYFHLAVLRATAHTRPFPPHKLTDIKNYPSFNLRKEGVRVEVLEWIAELDPLEELQEAWLQIKGIPLHDDAIGKLFDMDHKLFLVSFMVEMDEKEVDWLIEQTSKSLNGRNSGKQ

SEQ ID NO: 60312 - protein, 1215 aa, Zea mays
  Coding DNA Sequence Number=SeqID_16937
  Gene Ontology: Mol. function=transferase activity, transferring glycosyl groups; Cellular component=membrane; Biological process =electron transport
  Homolog annotation: Hit_ID=Q10RW1; Match level="QueryCoverage=36%, HitCoverage=86%, E-value=0.0, Identity=73%"; Hit description =Xyloglucan galactosyltransferase KATAMARI 1, putative, expressed
  Pfam annotation: Domain name=Exostosin; Domain location=762-1119; Score=411.1; E_value=1.7e-120; Accession=PF03016.6; Description =Exostosin family
  Pfam annotation: Domain name=p450; Domain location=168-636; Score= -165.5; E_value=0.00022; Accession=PF00067.13; Description=Cytochrome P450
  Pfam module annotation: Pfam domain module=Exostosin::p450; Domain location=762-1119::168-636
MDHTDVVVRKLLDAMALMEKRLTAALAGSHGEQTARGCTAFFDDGRIDELDVWDEDATSVDADDSVSASMVDRELRFDEFTFNDKSAQYHLSSTHEALFSDGANPFFDEACYALTVFDQMPSPCFDGEPIFDEVPNDSITEYELSFMEVPHFALRCEKIQQHVDVAALRGEEHLVSLETMKSKVEAGNTMAAMAAAASPLPSLLAVGNLTPSSIAQPHPQAGAVGSSESELAAPSSVHDDSVALIAVSGRCDYARANEMTSAQIDAMAQDETDEIANTVEQLTGLGVEKVVATALPPIGCTPWLSRSNNYGSCSTLDTLFQVVAVYKFRDPKTSDQEMLESICGVLMPLKLQAKVSRPMDIIINSLYNNKDIFVWESISNVSDALERIRILSLTDKEVLVEGDTEKLEIQLDKEKKMLSMQDKSIGMTIIANGVQVRPLPWPSFYYYAAWVRWMKSLVMALCWDLFGAGTETTLVTTEWAPSLLLNHPEALKKAQAELDALVGSSHLITTDDMCYLGYLHCIINETLHMYSAAMLLLPHESMVDCKVDGYDGTLSKDDGLVDGLRKCEQWKWQDIFASKETKTSSWFHEFIGRAKKPEMGCPPFGCGCGWDVVPYKQPWPPPMQFMLLGDGVQIVHCCSYTFHTMKRSAANTIVQLVRHILRFPPSNPILPKLSSSWSFCCFTLAKSARKAGGGARSRRAVGVEAAAAKVLPRLRILAVLAVVAWTFFLYYVHFTVISSSTVEVGNGDEDGGAADPCRGRYVYMHDLPPRFNADIVRDCRKTEDHWGDMCGFVSNAGLGRPLAADDDGVITGEAGWYGTHQFALDAIFHNRMKQYECLTNHSAVASAVFVPFYAGFDFARYHWGYDNATRDAASADLMEWLMARPQWRRKWGHDHFLVAGRTGWDFRRSSNVNPDWGTDLLDMPAGRNMTVLVLESTLKYTSDFSVPYPTYFHPRSDADVLRWQDRVRGRRRTWLMAFVGAPRPDVPMSIRIRDHVIAQCRASSACAMLGCARTLGSTQCHTPASIMRLFQKSVFCLQPPGDSCTRRSVFDSMVAGCIPVFFHTGSAYEQYPWHLPRDDGHLRYSVFIPDADVRRRNVSVEAVLRAIPPPTVERMRQEVIRLIPTLLYADPRSKLETLKDAVDVAIDGILDTMAGTKDTPSLFAAIFSSSKGPLWARIRNDEDDDSGGRVTEDPPDLFASTESRFRFRPVQADHP

SEQ ID NO: 60313 - protein, 45 aa, Zea mays
  Coding DNA Sequence Number=SeqID_16938
MDDGGLRACGLAKRRELKLTFSLEKDPSSVYHVHVRQQPGEVGSN

SEQ ID NO: 60314 - protein, 224 aa, Zea mays
  Coding DNA Sequence Number=SeqID_16939
  Gene Ontology: Mol. function=sequence-specific DNA binding; Cellular component=nucleus; Biological process=regulation of transcription, DNA-dependent
  Homolog annotation: Hit_ID=A2XCF9; Match level="QueryCoverage=90%, HitCoverage=90%, E-value=9e-37, Identity=46%"; Hit description =Putative uncharacterized protein
  Pfam annotation: Domain name=GATA; Domain location=131-166; Score =66.6; E_value=8.6e-17; Accession=PF00320.18; Description=GATA zinc finger
MAGCGAAADENPAAEELASGADASLNAFFDHAGLELAAAAGGGQGADDDEEEELEWLSNMDAFPSVETMSAEVEAAPSAAPPARLEPLPHASHAVGPRTKGLRRRRRVTAPWSVPPVLPPPAGSGAPRRRCTHCASEETPQWRQGPAGPSTLCNACGVRFKSGRLFPEYRPILSPTFSPLLHSNSHRRVMEMRRHVEAEEGRPPRSAAPAPEFRRGQARRARAR

SEQ ID NO: 60315 - protein, 161 aa, Zea mays
  Coding DNA Sequence Number=SeqID_16940
MNKDGDLQNGIGVHMGQIQVVEIEDTAEKGRNRKSKAMEEKWNVDDRLMSVFCWNSDPTADPLGTEFFRRKNSDGHEMEKVFRLGAISTSPASGADAESQRGREGLDAGKQELGHGAWSRATVQYIWGFPGPDAVSKKRPVITRRLLLKRWRAMSAPDGYF

SEQ ID NO: 60316 - protein, 68 aa, Zea mays
  Coding DNA Sequence Number=SeqID_16941
MGTLPGGLFAECPKWHSAKKAALPSAARRTLGKDIFVAECFAECFRHSAKRLIPVVVGGSVDATDALL

SEQ ID NO: 60317 - protein, 68 aa, Zea mays
  Coding DNA Sequence Number=SeqID_16942
MADFDTHGYFIGSFVMPIGYGGLDDNSNHWPIDRKILTKPNFDLVSFVRLRHNGTEQSQFSAGSYALR

SEQ ID NO: 60318 - protein, 18 aa, Zea mays
  Coding DNA Sequence Number=SeqID_16943
MAMGLTPSGITVKKKEIG

SEQ ID NO: 60319 - protein, 163 aa, Zea mays
  Coding DNA Sequence Number=SeqID_16944
  Homolog annotation: Hit_ID=Q8SA97; Match level="QueryCoverage=34%, HitCoverage=12%, E-value=1e-07, Identity=53%"; Hit description =Ornithine carbamoyltransferase
MGARGVPSLLVYWDEPDGTLAEPWGRARRRPSSKVEVEAEPWGRARRRPSSEVEVKAEPWGRARRRPPSETKAGAELRGRARRSFLWRLRLDSAAVSLTLAGGTAVGAGQATLFSCQVILASNAPAIQSVGEAIWPRLLHCEACPSWASGESKLVLMVITSRV

SEQ ID NO: 60320 - protein, 197 aa, Zea mays
  Coding DNA Sequence Number=SeqID_16945
  Homolog annotation: Hit_ID=Q6J9V9; Match level="QueryCoverage=42%, HitCoverage=31%, E-value=3e-17, Identity=56%"; Hit description =Putative uncharacterized protein
MQVACNCTTETHPFNFDASSVEAQAHTSCSRPLLEQQGSPLPRREDDAPVFRPSNGSHNGCPANHPSRRINFAAGQVTPLAGTGKGDTPEGILLHEGSGPRALLLIRVRSLAPRKGHSGSAPTTDQGFEGWPPEGFDSRPRTRRARDDSGYVRYMAETRATLPRGSGAALANPAPPKPLTASTYQPENSKPDHAPEL

SEQ ID NO: 60321 - protein, 96 aa, Zea mays
  Coding DNA Sequence Number=SeqID_16946
MAILHLLQLPGLGDNPCHLRRLLSPDNKAKLTLENAYSSELQLMHSPNSGTSNWEHNMWGAAPESARTVVTRQVWERVCDIVKFGGLAPYGGVHGK

SEQ ID NO: 60322 - protein, 503 aa, Zea mays
  Coding DNA Sequence Number=SeqID_16947
  Gene Ontology: Mol. function=hydrolase activity, acting on acid anhydrides, catalyzing transmembrane movement of substances; Cellular component=integral to membrane; Biological process=calcium ion transport
  Homolog annotation: Hit_ID=Q10DF1; Match level="QueryCoverage=75%, HitCoverage=31%, E-value=1e-160, Identity=78%"; Hit description =Calcium-transporting ATPase 3, endoplasmic reticulum-type, putative, expressed
  Pfam annotation: Domain name=Cation_ATPase_C; Domain location=299 -480; Score=217.6; E_value=2.9e-62; Accession=PF00689.12; Description= Cation transporting ATPase, C-terminus
  Pfam annotation: Domain name=Hydrolase; Domain location=2-171; Score =0.8; E_value=0.045; Accession=PF00702.17; Description=haloacid dehalogenase-like hydrolase
  Pfam module annotation: Pfam domain module=Cation_ATPase _C::Hydrolase; Domain location=299-480::2-171
MTLVGDGRIPGGQVLHGRSDAVRTTKGERRRTQASRRIRRDRIHADGPGVQMADDGADPGQKTTTSNGLGGSGAERRMTSRIQRKGSICFKESEHNVIEKFLVKNGNKRLLLVLYIIVCLPLYRLVEPSHKKMLVEALQAHNEVVAMTGDGVNDAPALKKADIGIAMGSGTAVAKSASDMVLADDNFATIVAAVAEGRAIYNNTKQFIRYMISSNIGEVVCIFVAAVLGMPDTLIPVQLLWVNLVTDGLPATAIGFNKPDGNIMSVKPRKACDFKNIERSKKIYWNGREHSLDKGDSPRQIQKVNEAVVSGWLFFRYLVIGAYVGLATIAGFVWWFVYSDNGPKLPYSELCVFTGTIVPWPAVNFDSCSTRQTSYSCSIFEDRHPSTVSMTVLVVVEMFNALNNLSENQSLLVIHPWSNLWLVGSIILTMLLHVAVLYIEPLSALFSVSPLSWVEWKIVLYLSFPVILIDEVLKFFSRRSPRGRRFPLRLWRREILPKESRDN

SEQ ID NO: 60323 - protein, 16 aa, Zea mays
  Coding DNA Sequence Number=SeqID_16948
MAPPRPSQPSNKIHSL

SEQ ID NO: 60324 - protein, 245 aa, Zea mays
  Coding DNA Sequence Number=SeqID_16949
  Homolog annotation: Hit_ID=Q851E9; Match level="QueryCoverage=59%, HitCoverage=93%, E-value=7e-36, Identity=58%"; Hit description =Putative uncharacterized protein OSJNBb0011H13.13
QTKTPRSQHAVPDSLVSSVTRNQRERDGHRSELRAPATGDRRFGFGVYHFQVPHCHPPRSREQSYDVQDSEKQPVRTFDPSRPADRTMAAAVTASRGTRALAILGRCVRAPFRALVRARDLYVSRMAACAGGGGGRGGLAPVGLVAMPRCQSHGFYRSAAGGGTDEDVRELIRAASRAGPPRAPAGVGPRSQSVAIGRIDEDRPCEFGLGEEEKAQALMGPRSKSCAVGPSSRTAARRAGVAVAA

SEQ ID NO: 60325 - protein, 109 aa, Zea mays
  Coding DNA Sequence Number=SeqID_16950
  Subcellular localization annotation: CTP_CleavageSite=43; ConfidenceScore=5.61e-01
MAARRPAKTRAPPPLTLAWPDMAARRAPPRPRALARPAFRPARAASTPSRPWRPAVVHGVLAPPGEPPAPTPAPCARARSAPIPAMAARPRQLWRVAMARPPRRVLLAS

SEQ ID NO: 60326 - protein, 74 aa, Zea mays
  Coding DNA Sequence Number=SeqID_16951
MAQGHISLSTKKEHKLLASLQECIEEAVPAAFDHPDELQVVGGGRWLRATRTAITAKASRSQGGKAPELLLNPS

SEQ ID NO: 60327 - protein, 545 aa, Zea mays
  Coding DNA Sequence Number=SeqID_16952
  Gene Ontology: Mol. function=Rab GTPase activator activity; Cellular component=intracellular; Biological process=regulation of Rab GTPase activity
  Homolog annotation: Hit_ID=Q69UB8; Match level="QueryCoverage=80%, HitCoverage=96%, E-value=0.0, Identity=82%"; Hit description=GTPase activating protein-like
  Pfam annotation: Domain name=TBC; Domain location=143-356; Score= -18.9; E_value=3e-06; Accession=PF00566.9; Description=TBC domain
MIKWGLSSGTPADSYYEVRSDCTDGVPKSKFKIKAGKTLSARKWQAAFSPDGCLDIASVLSRIQRGGVHPTVRGEVWEFLLGCFDPRSTFDEREEIRQIRRIQYARWKEDCRQMDSHVGSGKVITAPLITEDGRPIKDPLVLLEATSDTNTSGDAPTTSINGNEVDESAERITDKQIIEWKLTLHQIGLDVLRTDRTMVFYENKENLSKLWDILAVYAWIDKDVGYCQGMSDLCSPMIVLLNDEADAFWCFEKLMRRLRGNFRCTDQSVGVANQLQHLASIIQVLDPKLHDHLETLGGGDYLFAFRMFMVLFRREVSFGDSLYLWEMMWALEYDPDIFFAACEEQGAVNKNKVSKSKLKGLRHFGKWDNKDKDKDKEDAKNGAEDGEDGPVPISVFMVASVLKEKREKLLQEARGLDDLIRILNDVNGNLDAKKACAGALKLHKKYLKKRTKSLQQSFAVVGQQHALQQCSAQQQQCSLFDCTMAAAGKQYSVTGSAVHSSNSAVFLTALWQQQTGSSVQSVDCTLSSKGQHICAAVCGVVCSVF

SEQ ID NO: 60328 - protein, 112 aa, Zea mays
  Coding DNA Sequence Number=SeqID_16953
MKNTQFGKVFVPASIRGMLRNECAVENSRRTGNLQAHGLKTGHNTVRLTTVALVDVDRQTSHVAPYPWREGSLEEAHGVGRRSWGWSGVCEKSMGHGLLPGSPSFTEKAEGS

SEQ ID NO: 60329 - protein, 101 aa, Zea mays
  Coding DNA Sequence Number=SeqID_16954
  Subcellular localization annotation: CTP_CleavageSite=39; ConfidenceScore=5.03e-01
MGSSSFSPSLSAASFSLCSFSAACIAARCKDKGIQTFISADQKKLQLFWLRLPLKKFEPKDNDLDKHLIFGSIHSFSLSKDLLLFTRSTLPPINYSDLGSL

SEQ ID NO: 60330 - protein, 216 aa, Zea mays
  Coding DNA Sequence Number=SeqID_16955
  Homolog annotation: Hit_ID=A3BKH1; Match level="QueryCoverage=88%, HitCoverage=85%, E-value=1e-32, Identity=44%"; Hit description =Putative uncharacterized protein
  Pfam annotation: Domain name=Hin1; Domain location=34-171; Score =22.9; E_value=1.9e-05; Accession=PF07320.4; Description=Harpin -induced protein 1 (Hin1)
MGTAKAKRRPVLICCGVLVAAIAVLAVVFVALYFTVFRPRSPKVVATAVVADLLPKGDGGGGQDLNLTVHVDVTVNNPNYAAFRYGDVVTLVRYHGSDVGMSVVPAGEIGARETLTVAAAVEVDTLKVAATPYFYVEFPTGKLPFETATAVAGEAVVLGAFKISASSQVACQVTVHLLPPNATSECTSTVHIGRPYLYPQNLSPSAQLALSFSVDP

SEQ ID NO: 60331 - protein, 220 aa, Zea mays
  Coding DNA Sequence Number=SeqID_16956
  Homolog annotation: Hit_ID=A2YM03; Match level="QueryCoverage=63%, HitCoverage=64%, E-value=3e-40, Identity=62%"; Hit description =Putative uncharacterized protein
  Pfam annotation: Domain name=Hin1; Domain location=40-174; Score =27.5; E_value=7.5e-06; Accession=PF07320.4; Description=Harpin -induced protein 1 (Hin1)
MSDDNNNKGSSKARRRAHRLACCVALGVLVILGALALAFYLRYRPRPPRVVATPVDVGIEEFRLLPHPALKLSVGVHVVVSNPSNAPFRYGAALSAVTYHGAPVGETLVPAGEVGGGATARVEPATVVDGVKVAESPHFASDAVAGVLPFVAVARVVGKALVLRAFEVPVSVEVVCLVRIYVFHGESSSRCVATVRTGSGAGSGSGAGFPEGAGRAQEHD

SEQ ID NO: 60332 - protein, 144 aa, Zea mays
  Coding DNA Sequence Number=SeqID_16957
MAPRVLRDDDDSQPLTEARRRLSYEKVGRAGARTRQALSWVRSLPSPAWTLVTPYCKRTRPRRGTNTKAAGFPPLSRPSLATSLPPFALAHALDPSGLGHAAHSLVGLGTPRSRNADSWRASASTGGASGVDLAFETKASAVHP

SEQ ID NO: 60333 - protein, 630 aa, Zea mays
  Coding DNA Sequence Number=SeqID_16958
  Homolog annotation: Hit_ID=Q6JAD6; Match level="QueryCoverage=71%, HitCoverage=68%, E-value=4e-82, Identity=56%"; Hit description =Putative uncharacterized protein
  Subcellular localization annotation: CTP_CleavageSite=59; ConfidenceScore=5.51e-01
MMRILVAPSGRSRARQFSWSSRKAARSGVRTQQHVQRQQQQQPLRRPSLEISRRLRQIRLHTVFVVSPPDLAPPLTPLLPLHHPLHLLPSPLLRHPPPQPYPLPPLRQLPLLLLPLPLQLLLSLHLDSGSAMRLRFDPLLRILDYLTFSVLQRHGAQMSAQIALRVHRLLDLPAFLLAAGADSEAHLTYLPGLLTLLTTSDRFASSLDFPSRRLDFTASATAPLTLLDALTAVWLRVQLPSRLCSARPSLMGRDVHQQIFTTVAKYLFELIRRTLLPRMGYREATTHIQLWLLGALVSHSEFDIVDFLICEIEDIVLDGIRARRQLSYAHYLCHIFVQLIQSPRFQGTLEASRLVFGSYRPAPEAPVPASAPVFDSQAEDAALRQFDTQDTAADDDDDDDDFGVPPPPPPPMPPRSHDHEAGSSSVAPAAPPAMDPALASILQSITQQQAHLSAKQARLSERMLSMFQNMQDRQDSLQQQLLQDRAESRAFMALMLQQSGISVPPVQSAPSPPVHAPVVPAIQSGPPVPTVGPSPLRPVTLAFTSPVLSSICPQPQVPPASAVTTTDVAVSVTSSVPAAPAARPQSESVPAPASTADPGSETDSDPPPAFALLPRPRPDAPPPPPPASDV

SEQ ID NO: 60334 - protein, 488 aa, Zea mays
  Coding DNA Sequence Number=SeqID_16959
  Homolog annotation: Hit_ID=A2FD36; Match level="QueryCoverage=41%, HitCoverage=26%, E-value=3e-11, Identity=25%"; Hit description=Viral A-type inclusion protein, putative
  Pfam annotation: Domain name=zf-CCHC; Domain location=451-468; Score =25.1; E_value=0.00024; Accession=PF00098.14; Description=Zinc knuckle
  Pfam annotation: Domain name=zf-CCHC; Domain location=87-104; Score =27.0; E_value=7e-05; Accession=PF00098.14; Description=Zinc knuckle
  Pfam module annotation: Pfam domain module=zf-CCHC::zf-CCHC; Domain location=451-468::87-104
MYMQKNDKEESSSKRKDLALKANHDRKGKAKIQIEEESSSDDDLDANIALMVRKTTKMLKKLNREGIKFDSRKKKFFSNKRKPISEMDCYNCGELGHLAHQCNKPKKNKFKGKKEDDSDDEKKEKKFFKRKDGKQKRFHKKKNGKAYIVGDWLTDIESSSGSSSSEEENDEKVAAIAGDFSSPPPSPSSTSHLCLMARGERKVQNDINIADDSDSDSDEEFASPSYDELADLLKEYTQIIRKSKAKCDRLKNENESLNAKYDIVIKASDEIKEENKTMSSTVNELTNSLKDAKEECDKLNEANRELQNRLAINPVVKIDVATLCDDLSQEEQTSLHAELTEKVEVLTLDNQKLKNYLTNATTRGKVAIENNDFNNELAVDNQRLKNEVKKLKSENEHLATSVQKFNKGQYLQNELLMNTVMKNNKSGIGYNAFVQKKATTQYKPKQTHRPIKCFECGNEGHFAHNCKAKPPTPLPKHSRPLLSMLIMF

SEQ ID NO: 60335 - protein, 153 aa, Zea mays
  Coding DNA Sequence Number=SeqID_16960
MPMTIASVPQVLPRRILVTQSIRRKLPPSMIDRLLLHRTWHRPRTRMTPWDCPLRPEHNGAPLSVPGSSGGEGDGSEDDGSSSNDDGKGGGGSDDEGGNGEGDGDNKGDGKGNSGDGKGDGDGGDGKGDDDCDGKGDGDRKGDDKADGIMLLV

SEQ ID NO: 60336 - protein, 237 aa, Zea mays
  Coding DNA Sequence Number=SeqID_16961
MALTVSSAEATASGGGSLTYGDHHLSTDDSGHLRANATPANGGCPSAHQQVLTPVLGTGARARLSQSTNTALAAYDVLCDPLVQPTAREGPGRGRPAHGATDTRAADGQPCFAPAVGGGTESSTRATQAGEPDTRQLTAPRTANALLPRTLREGAGRCPRGGGTQLGTPSSPARMMNILEAKGRGRPRPGSLFPTTRPTVIILVDLGDICPPQAPDLWVDFEIIGPKILGPACGLRL

SEQ ID NO: 60337 - protein, 114 aa, Zea mays
  Coding DNA Sequence Number=SeqID_16962
MMSSASGVEGNEDRPTTIALLTILVGQDAAHAPLDRILTERTRGDRGVEDPESKRSGPQFLNAAGDEHHSGSMGEHFPRMQNPKVVEYEVEGRGQIGALSAKDSEALLRTRKLL

SEQ ID NO: 60338 - protein, 72 aa, Zea mays
  Coding DNA Sequence Number=SeqID_16963
MTNMMSIPIGLDSTEKHKGIASQIEIENPNLVKTKNVKVKDIDTAYWLIALLKFMEPYPRGVAGAIYHEYDQ

SEQ ID NO: 60339 - protein, 127 aa, Zea mays
  Coding DNA Sequence Number=SeqID_16964
MQMINICRESLIYTFQVRVQEPPTGLLGGAVGGMEDNYLVIFMAWEKDTDIDFAQDAIDEYKLFGSLDYIDVDYNLLIVIITCLADRQLKMRIDLFYGRSVEDGFGEGNVLLASSKWRHHNPYKLVP

SEQ ID NO: 60340 - protein, 52 aa, Zea mays
  Coding DNA Sequence Number=SeqID_16965
MGKPVPSLLMLLLSREDSAACAAPTVEPLDRVRLTAVKSGPRHHGKLRFARP

SEQ ID NO: 60341 - protein, 142 aa, Zea mays
  Coding DNA Sequence Number=SeqID_16966
MGGPAEQQKTDEQRAVARSGSGNDDDFCSGGPNSGSDDLRADAAARRPPPVPKLVRQGRAEGHRVGGGQEQRPRRQPSSRPIRGQQENPLSRREDNAPMLRFSNGSRTRNGRPANHSPRRINSAAGQAAPLAGEAGDASPSP

SEQ ID NO: 60342 - protein, 71 aa, Zea mays
  Coding DNA Sequence Number=SeqID_16967
MEYNGSSSLISCEKQTIRIEFLSLQVTALVPTITGMGDHVSGRVRRAICGQVHSGTRLTDLPYFSDLITLC

SEQ ID NO: 60343 - protein, 120 aa, Zea mays
  Coding DNA Sequence Number=SeqID_16968
  Subcellular localization annotation: CTP_CleavageSite=82; ConfidenceScore=5.04e-01
MAQWLTRSMLAGGRRESGDRGLASPAKQTSIPRSGSFTEVCSVFSEGRTGLGKAGLAGLRRQGLRWPRTRRARATDGEFELRCALAMVTPEVLHDLRMKVMKDAPSSSQYVLMKDEAYET

SEQ ID NO: 60344 - protein, 337 aa, Zea mays
  Coding DNA Sequence Number=SeqID_16969
  Homolog annotation: Hit_ID=Q5WMS9; Match level="QueryCoverage=86%, HitCoverage=72%, E-value=8e-90, Identity=61%"; Hit description =Putative uncharacterized protein OJ1333_C12.2
  Subcellular localization annotation: CTP_CleavageSite=62; ConfidenceScore=5.37e-01
MAYRRKPQPHPQPQPTPSLEHHYPSSVGPASPDSLAAQAMRASAAHRDASSLTSAYSASASLAASRRSHHEPSVSTPSLDSSGYEYTSMKNLNEAKYGFWGTLARKAKSFLDEDCSPEQYKSPRDDVHVGVQLPHSKQLPGETWKPETPPSQKRSESITSSLTYIGGTIKNALEEGRTIVENKTADIIQETRKLNIRRKGAGLNTQGEAGHKIAQRHLPQNPLDHETQLKASRDVANAMAAKAKLLLRELKTVKADLAFAKERCAQLEEENKMLRESYDKGDNPEDDDLLSRSTQSAVLCQWHPVSSVITPFRAPAGPIFPPVMCYRYVMAFSLPPA

SEQ ID NO: 60345 - protein, 203 aa, Zea mays
  Coding DNA Sequence Number=SeqID_16970
  Gene Ontology: Cellular component=endoplasmic reticulum
  Homolog annotation: Hit_ID=Q9SUR3; Match level="QueryCoverage=95%, HitCoverage=74%, E-value=2e-44, Identity=44%"; Hit description =Putative uncharacterized protein F9D16.100
  Pfam annotation: Domain name=Reticulon; Domain location=63-202; Score= 113.0; E_value=9e-31; Accession=PF02453.8; Description=Reticulon
MSESDEHGSLLDKINEKIHEYKHSSSSSSSDSDDDKKSKKSKKKKKLFGRKHPLHHVLGGGKAADLVLWRNKQASGSILAGVTVIWLLFEGIGYHLLTFLCHALIVFLTVWFVWSNVASFVNRSPPKFPEVILSEAQCLKVAHIARKEINEAFYTLRNVASGKDLKTYLMSIAVLWFISIIGSCFSFLTVSYTSKFLVYIMIH

SEQ ID NO: 60346 - protein, 108 aa, Zea mays
  Coding DNA Sequence Number=SeqID_16971
MEKEPLDMVESSVRVIETHVDIIRSLVTDGVVDTSEPESVYTLKTTLFQIGDNGIGGMPESADPKKRLSPVVYHLPLFVGFTDGWKHLVIANDLRVEDVCELVKGPDD

SEQ ID NO: 60347 - protein, 77 aa, Zea mays
  Coding DNA Sequence Number=SeqID_16972
METATLGLGDGDGDGGVGLGDDGVGLGDGAAWRALSSETVALGLGLGDGVAGAHSSETGTGTAAQQPSGVVSAPGET

SEQ ID NO: 60348 - protein, 224 aa, Zea mays
  Coding DNA Sequence Number=SeqID_16973
  Subcellular localization annotation: CTP_CleavageSite=51; ConfidenceScore=5.11e-01
MAVRPAERVAARLSSSRWWRAPQQAGKPSLARLRRVVWMATAAVAAPAGARAGAGDGGWGRWPVAQAVDSGARGPDLDPVDRICLNSWQLVRLRWRLRWRLRWRQLVGACAGFSWVKALATAAPLGVASPVEGVVLPSTVLHGRKPRPFWTGDGGVLDVTLFLKASLLLAGAGQRFKVLEVSLPCAAYLGESELLVTYVELGNDDSGCVLCGGLLLSGLFICPV

SEQ ID NO: 60349 - protein, 185 aa, Zea mays
  Coding DNA Sequence Number=SeqID_16974
  Gene Ontology: Mol. function=electron carrier activity; Cellular component=anchored to membrane; Biological process=electron transport
  Homolog annotation: Hit_ID=A2YII1; Match level="QueryCoverage=55%, HitCoverage=60%, E-value=9e-22, Identity=48%"; Hit description =Putative uncharacterized protein
  Pfam annotation: Domain name=Cu_bind_like; Domain location=39-119; Score=95.1; E_value=2.2e-25; Accession=PF02298.8; Description =Plastocyanin-like domain
MASANSKQVLLLLAAVACLASLASATQWTVGDVGGWRAKFNETGWTDGKTFTVGDTLLFVYPKENHTVVKVGKDAFAACDLSANLQLGNWTSGSDVVPLDQPGMVWFICNKPNHCLNGMNLAINVVDAATPGAPMAPMTPGAPMAPMTPAPSPAASSPPSAAVRCPVGGAVAAAAAVVVAAALAF

SEQ ID NO: 60350 - protein, 546 aa, Zea mays
  Coding DNA Sequence Number=SeqID_16975
  Gene Ontology: Mol. function=aminoacyl-tRNA ligase activity; Cellular component=mitochondrion; Biological process=tRNA aminoacylation for protein translation
  Homolog annotation: Hit_ID=Q9FYR6; Match level="QueryCoverage=89%, HitCoverage=88%, E-value=0.0, Identity=82%"; Hit description=Prolyl tRNA synthetase
  Pfam annotation: Domain name=HGTP_anticodon; Domain location=342-445; Score=74.4; E_value=3.7e-19; Accession=PF03129.11; Description =Anticodon binding domain
  Pfam annotation: Domain name=ProRS-C_1; Domain location=480-546; Score=106.4; E_value=8.7e-29; Accession=PF09180.2; Description =Prolyl-tRNA synthetase, C-terminal
  Pfam annotation: Domain name=tRNA-synt_2b; Domain location=99-274; Score=58.2; E_value=2.8e-14; Accession=PF00587.16; Description=tRNA synthetase class II core domain (G, H, P, S and T)
  Pfam module annotation: Pfam domain module=HGTP_anticodon::ProRS-C _1::tRNA-synt_2b; Domain location=342-445::480-546::99-274
  Subcellular localization annotation: CTP_CleavageSite=30; ConfidenceScore=5.39e-01
MASLLRLPSLLSPSKPLLRRRLPAARLAASAASRGQASATAGAAAPAAAETRGGDREGQVTPRSADFNAWYTDVIAAAELADYGPVRGTMVIRPYGYAIWEAIQDYLNVKFKETGHSNMYFPQFIPYSFIEKEASHVEGFSPELALVTIGGGKELEEKLVVRPTSETIVNHMFTKWIQSYRDLPLMINQWANVTRWEMRTKPFIRTLEFLWQEGHTAHATLEEAEKEAMQMIDVYTKFAFEHAAIPVIPGRKSRVETFAGANRTYTIEAMMGDKKALQAGTSHNLGQNFSRAFGTQFMDENGQIEHVWQTSWAISTRFVGGIIMTHGDDAGLMLPPRIAPIQVIIVPIWKKGDEKAVVVEAVDSVQKILKEAGIRVKVDDSELRTPGWKFNHYEMKGVPVRIEIGPRDVTNKSVVVSRRDVPGKQGKEFGVSMEPSILVNHIKGRLDDIQASLLQKAITFRDSRDGILDLRHNIVDVSSYGELKEAISEGKWARGPWSASDADELKVKEETSATIRCYPFEQPEGTKKCFMTGNPAEEVAIFAKSY

SEQ ID NO: 60351 - protein, 1070 aa, Zea mays
  Coding DNA Sequence Number=SeqID_16976
  Gene Ontology: Mol. function=transferase activity; Cellular component= endoplasmic reticulum
  Homolog annotation: Hit_ID=Q9FJG3; Match level="QueryCoverage=99%, HitCoverage=99%, E-value=0.0, Identity=55%"; Hit description =Phosphoribosylanthranilate transferase-like protein
  Pfam annotation: Domain name=C2; Domain location=316-401; Score=23.5; E_value=0.0008; Accession=PF00168.21; Description=C2 domain
  Pfam annotation: Domain name=C2; Domain location=484-568; Score=15.0; E_value=0.0055; Accession=PF00168.21; Description=C2 domain
  Pfam annotation: Domain name=C2; Domain location=651-748; Score=58.1; E_value=2.9e-14; Accession=PF00168.21; Description=C2 domain
  Pfam annotation: Domain name=C2; Domain location=8-97; Score=91.1; E _value=3.4e-24; Accession=PF00168.21; Description=C2 domain
  Pfam annotation: Domain name=PRT_C; Domain location=914-1070; Score =343.8; E_value=2.9e-100; Accession=PF08372.1; Description=Plant phosphoribosyltransferase C-ter
  Pfam module annotation: Pfam domain module=C2::C2::C2::C2::PRT_C; Domain location=316-401::484-568::651-748::8-97::914-1070
MAATARKLIVEVVEARNLVPKDGTGTSSPYARADFDGQRRKTRTVARDLNPAWNEALEFDFPPAGVDPVAGEPLEVTVLHDLRIGPTRRNNFLGRVRLDARQFVRKGEEALIYFPLEKNKGLFNFNWVRGDIGLKVYYVDVPLAPPEPEPEASVAPPDATVAEAAAPPPPPPDATATASADEPPKAEELVDAAPAPQPEPAEASAGDGATTEKPSEADSEPATLAPEDAQVMTAEAVAASEEKPPEEEPVLSPPPLPTPTLMPRQVSMPVRQLEPTPTLMPRQVSMPVRQLAPPPPQLEEPMVQSKHDLVDRMPYLFVRVVRARGLPAGAHPHVRVAAGGHHASTREARRGAFFEWDQTFAFVRDPATDSPGPTLEVSVWDLPPDADVSIADDRHFLGGLCFDTADVHARDPPDGPLATQWYRLEGGRRLGGADLMVATWAGTQADEAFADAWKADSPAATTATAAAAATSRAKVYVSPKLWLLRLTVIEAQDTLTAPPPRDAGIAVRATLGSQALKTRTTPVARNGGPAWNEDLLFVAAEPFTDDDCLVISLEVRHGKEAFPVGSASISLATVERRVDDRKVASKWLDLLPSDEAAMRVGKRAAMHMHGGRLHVRVCLDGGYNVADEPSYACSDFRPSARQLWSPPLGVVELGIIGCKGLLPMRAADGKGCTDAYAVAKYGPKWARTRTIADSYDPAWNEQYTWPVYDPCTVLTVGVFDDPLPLQPSEGGGKDAAAVACSRPMGKVRIRLSTLERGRAYRGLYPLIMMLPTGAKRMGDVELAIRFSTSGSMLDVLHAYGRPLLPAMHHQRPIPLVNREALRLAAVRISAAHLARSAEPPLRREVSTWMLDAAEPRGFSMRKFRANWNRAVAALSWVTDAARWVEDTRSWRNPTATAMAHAVLVLLAWHPDLVVPTLTLHAAAVGVWKYRRRPRAPAAHPCVRASMAEAPDREELDEEFDTIPSARPPDVVRARYDRARMVGVRLQQTVGDVATQAERLQALVSWRDPRATGLFVALCVLVAMVLYMVPMKMVAVVAGFYYLRHPMFRNRMPAPVINFFRRLPSMSERIM

SEQ ID NO: 60352 - protein, 64 aa, Zea mays
  Coding DNA Sequence Number=SeqID_16977
MACQDRRSLNRRPWCDDGRRVFRTVGCPLIGYDGTLGYEQATVESEVQQVEVAEQELIEVKLCP

SEQ ID NO: 60353 - protein, 248 aa, Zea mays
  Coding DNA Sequence Number=SeqID_16978
  Gene Ontology: Mol. function=2 iron, 2 sulfur cluster binding; Cellular component=peroxisome; Biological process=electron transport
  Homolog annotation: Hit_ID=A2YIH1; Match level="QueryCoverage=79%, HitCoverage=13%, E-value=6e-96, Identity=88%"; Hit description =Putative uncharacterized protein
MKWWLRLLRWIALWVILMRGDDSNGQRRVNEVVAMTLPLTEIGYMCRDEEAIMIGVDLSAREYYIPGPSGSYLNYGAAASEVEIDLLTGASTIVRSDLIYDCGQSLNPAVDLGQVEGAFVQGIGYFMSEEYVTNSDGLLISDGTWTYKIPTVDTIPKQFNVKLLNSGFHKKRVLSSKASGEPPLLLAASVHCATREAIRAARNEQHCSGSKPSPSHFDLEVPAIMPVVKELCGLDNVERYLESLLSSE

SEQ ID NO: 60354 - protein, 154 aa, Zea mays
  Coding DNA Sequence Number=SeqID_16979
MASSELYGPGAPDTVRWHTGQSAGEIWAPCWRDVVAVGGAAEPGGGTAVGAVESLLTSSCFRRRGGSSEAEVEFAFRCRGRARAKGSGEAEVVRPRPGRSPSPGGRAKRSFVVFRVLARVRALGSGGAEFAVFRVLARVRALGSGGAEFAVFGS

SEQ ID NO: 60355 - protein, 48 aa, Zea mays
  Coding DNA Sequence Number=SeqID_16980
MGLSLPAKETSRIAGSEEPAEPLQKPERTKPIVTNEDQHHDLCSDSLG

SEQ ID NO: 60356 - protein, 344 aa, Zea mays
  Coding DNA Sequence Number=SeqID_16981
  Gene Ontology: Mol. function=translation initiation factor activity; Cellular component=eukaryotic translation initiation factor 3 complex; Biological process=translation
  Homolog annotation: Hit_ID=A2Y2H8; Match level="QueryCoverage=93%, HitCoverage=95%, E-value=1e-163, Identity=85%"; Hit description =Putative uncharacterized protein
  Pfam annotation: Domain name=WD40; Domain location=1-38; Score=6.4; E_ value=5.1; Accession=PF00400.23; Description=WD domain, G-beta repeat
  Pfam annotation: Domain name=WD40; Domain location=136-174; Score =24.4; E_value=0.00043; Accession=PF00400.23; Description=WD domain, G-beta repeat
  Pfam annotation: Domain name=WD40; Domain location=181-219; Score =26.2; E_value=0.00012; Accession=PF00400.23; Description=WD domain, G-beta repeat
  Pfam annotation: Domain name=WD40; Domain location=278-317; Score =8.7; E_value=2.7; Accession=PF00400.23; Description=WD domain, G -beta repeat
  Pfam annotation: Domain name=WD40; Domain location=42-80; Score=41.8; E_value=2.4e-09; Accession=PF00400.23; Description=WD domain, G-beta repeat
  Pfam module annotation: Pfam domain module=WD40::WD40::WD40::WD40::WD4 0; Domain location=1-38::136-174::181-219::278-317::42-80
MRPILMKGHERPLTFLRYNRDGDLLFSCAKDHTPTVWYADNGDRLGTYRGHNGAVWTCDVSRDSARLITGSADQTAKLWDVSTGKELFSFRFDAPARSVEFAIGDALAVVTTDNFMDHVPTVQVKRIAEDIDDQTEESALVITGIKGRINRAVWGPLNRTIITAGEDATVRIWDSETGQLLKESDKESGHQKTISSLSKSLDWSHFITGSLDKSAKLWDTRTLTLIKTYVTERPVNAVDISPTHDTVVLGGGQDAMNVTMTDRRAGKFEAKFYHKILQEEIGGVKGHFGPINALAFNPDGRSSVIVANYIGNIRYADLSLMNIFTESCILPTIALPVIWDLMAQ

SEQ ID NO: 60357 - protein, 33 aa, Zea mays
  Coding DNA Sequence Number=SeqID_16982
MAAAKALAARGKGRGGMSMDETGMGLTGDGHGS

SEQ ID NO: 60358 - protein, 117 aa, Zea mays
  Coding DNA Sequence Number=SeqID_16983
MAPQSYYFPYACQTKDIVRGWILCIRLRHIGRRVFQEDGLEGRFEIDLPEAIGMEVDIEMVVDEEDDEVQSENDLEILEGNDINDELAPSDGVDYEMIDSDDETYDPANPDTYEDYF

SEQ ID NO: 60359 - protein, 103 aa, Zea mays
  Coding DNA Sequence Number=SeqID_16984
MGRDKARPREEGGTELGRRPPTPSLWPPSLVAPHGERSGRTEGGELDPVKGAGSREGAAEDAGADVGGEDAARERQRWMGEEMVSGGGEQSSGVATRERLMEG

SEQ ID NO: 60360 - protein, 67 aa, Zea mays
  Coding DNA Sequence Number=SeqID_16985
MTAMLAEGDLAALSWDRAADAVRMAAHHQLAAQAGARRSMQPGRPSQGGPAGRGPMQSWERGAQKAV

SEQ ID NO: 60361 - protein, 414 aa, Zea mays
  Coding DNA Sequence Number=SeqID_16986
  Gene Ontology: Mol. function=protein serine/threonine kinase activity; Cellular component=plasma membrane; Biological process=two- component signal transduction system (phosphorelay)
  Homolog annotation: Hit_ID=A3AS63; Match level="QueryCoverage=48%, HitCoverage=20%, E-value=1e-103, Identity=91%"; Hit description =Putative uncharacterized protein
  Pfam annotation: Domain name=Pkinase; Domain location=184-412; Score =88.3; E_value=2.4e-23; Accession=PF00069.16; Description=Protein kinase domain
  Pfam annotation: Domain name=Pkinase_Tyr; Domain location=194-414; Score=-129.7; E_value=0.00018; Accession=PF07714.8; Description =Protein tyrosine kinase
  Pfam module annotation: Pfam domain module=Pkinase::Pkinase_Tyr; Domain location=184-412::194-414
MTPWELAATPVCAQERPQERSGSSEERPDQLERVWVLAGEGDEPSGGRDDSGQSPSRHQHSPPLTEKQGAVRKPAHPCRSGDSETGHPRPPGQHPRSPRPPRLLRHPHTTAAPWNDHRMQRAPPTPGKRRGDWPPGSEWSPAWGWWRKLVMTCDLAWLRPNCDWLQQYEGAGIHTRSALSLDFFVTVSLFKKGVHLVELQGSGELFAMKAMDKSVMLNRNKVHRACMEREIYSLLDHPFLPTLYTSFQTPTHVCLITDFCPGGELFALLDMQPMKLFREESARFYAAEVVIGLEYLHCLGIIYRDLKPENILLQEDGHIVLTDFDLSFLTSSKPHVIKHSTSRRRRSKEYLPPSFVSDPATPSNSFVGTEEYIAPEVITGVPHTSAIDWWALGYELSPERCRQVKRCRINSVSE

SEQ ID NO: 60362 - protein, 192 aa, Zea mays
  Coding DNA Sequence Number=SeqID_16987
MNSGYAAATETTARAGDLMRSRSGRAEVGADGCPDSESSQTWQTSRTATEKKSATSLGTAQRTRRQLRAVPDEVEDPWRRLWGAKRRRSGCADSCAQTAATPAASLVRQRILPGESDAQTAPNADGGADEADGGAQIRRTTVDGAQIQRMAADGAQTAADEADDGAQIRRTTQRMAEDGARDGAQTAADEAD

SEQ ID NO: 60363 - protein, 243 aa, Zea mays
  Coding DNA Sequence Number=SeqID_16988
MVWEVKVSTIIELYNYETLTMDELFSKLKSTEIDNKTQAKIENPSAPTMTLVSRDSRTGGMAGQRMYDVTVVTPTTSTLVALRKGKQEVGPRDHHSGRRKGKREYTYGKYKSKGGFNNGADISYDSTSNVSHFTDDLSVEVEELMSTLASQDKLLRLAARERKDFKSKYESIHRDLESARVSFMVSDETECDGCALHMSNITTLQTKYATVIGEHEKLRTRSSILGVCTVSPGLQIEPAKRNI

SEQ ID NO: 60364 - protein, 167 aa, Zea mays
  Coding DNA Sequence Number=SeqID_16989
  Gene Ontology: Mol. function=aspartic-type endopeptidase activity; Biological process=DNA integration
  Homolog annotation: Hit_ID=Q2QNH3; Match level="QueryCoverage=94%, HitCoverage=9%, E-value=4e-14, Identity=31%"; Hit description =Retrotransposon protein, putative, Ty1-copia subclass
MEGLIAKFQSCGLYEFMRQRTDFNELIVKQFLATVEVNIQDQLIVWMTRFKRYVATFTEFATANSLYYDMISQGVDLYAEDQFEEYAQYYEPARLGIPRHFGETPGLRHHPAVINKIDRVTFLPKSGDKSRIRDKFWNIIDHVMQGEVMNVVLFMMRQLNDLKMDKN

SEQ ID NO: 60365 - protein, 216 aa, Zea mays
  Coding DNA Sequence Number=SeqID_16990
  Homolog annotation: Hit_ID=Q7XBD4; Match level="QueryCoverage=64%, HitCoverage=14%, E-value=3e-19, Identity=37%"; Hit description =Cinful1 polyprotein
MAAAVTPSADVVAEEKGSSKPVPTKDKDDTPLRECPFDQDLGGRRYKVHHAAKKVMGAKQLAKAISFAKQLGYPSRSTIVWGGPDNYLYCCPDNMETEVCRYMTDNIGFTKLEAMLSTMSSQDFYDCLAYTHLKALFLSKALKNKRNVEGEATRKEIVKLRSKVVIEVKHTEAEAKDATIEAEAIADMAAKKATDDIVLKIYEQIYDEVMQGNKGN

SEQ ID NO: 60366 - protein, 251 aa, Zea mays
  Coding DNA Sequence Number=SeqID_16991
MSWGLRNESASKLEKVEVALTSSFLADVDPRAIDLAMRITERMFLKMKEDEAKNKIEEENDRWRPNDESTSSQGSSFKSTSHMCFIANGSDSESESEDEEEQESDSEDEDDLQQFIAQLCKKHRMSLLKLMKRPEEQKEMLHKQEDFLIRKIEDLEKLTKEHEKLKCSHDDLVQRYLRTQVDITVGEAQIIRRLIQRRRCEQESFGVVAEKETDLKMKRLFRPRWITIELLPNVKGMDVILYGLCPVPINR

SEQ ID NO: 60367 - protein, 144 aa, Zea mays
  Coding DNA Sequence Number=SeqID_16992
MGKSKKGGSSSHHSSDKRKREPTPPLEDFGDSEYSEEEFSSESEGSPVPASPPVSSDDSDDSQGIAAEGSDESEVSSDEKNSSDSSEEGGSDGDGGGDSDDGGGGDGDGGEGGGDGGKGGGRGGSGDGRDGSKGNSKGSNKASG

SEQ ID NO: 60368 - protein, 104 aa, Zea mays
  Coding DNA Sequence Number=SeqID_16993
MRGGARVRSGDDGAGDTRQQVRWRGGGVAGGDGGGECAAKGVDGGGSALQRGVWVVVVRMEEGTRAGARLIPGFKGKLPDIFLGKGSSQSEEKLHYPMHAEDWA

SEQ ID NO: 60369 - protein, 107 aa, Zea mays
  Coding DNA Sequence Number=SeqID_16994
  Subcellular localization annotation: CTP_CleavageSite=17; ConfidenceScore=5.13e-01
MGISPGKPIAYSMVRTRATLQERVRSPFRSKKRLLKQKPGKISRSRSYILLHATLPTYQSMWAINLQLLLLRQAIHKLPGLSSHHHHHCNLLIPEASSQKGANIEST

SEQ ID NO: 60370 - protein, 77 aa, Zea mays
  Coding DNA Sequence Number=SeqID_16995
MVLQVGWDVFKIKLDGGSIMAVMGSTSKKMYLCQTNTKNKITRNGSGEMARVACTLHGKRLDGGVSMLSVGMNLIWS

SEQ ID NO: 60371 - protein, 108 aa, Zea mays
  Coding DNA Sequence Number=SeqID_16996
  Gene Ontology: Mol. function=carboxyl- or carbamoyltransferase activity; Cellular component=ornithine carbamoyltransferase complex; Biological process=amino acid metabolic process
  Homolog annotation: Hit_ID=Q8SA97; Match level="QueryCoverage=100%, HitCoverage=23%, E-value=7e-11, Identity=40%"; Hit description =Ornithine carbamoyltransferase
MAPPVDVAGLRPRLGDVEAPPKPRSSLSSVAEVESEPPGGAVLLSGRSVERRSDGGHFGSAGWGARIRIKGLGQAGNMFAAGGGPRARQKSPGLYADGGYQLRIRSLE

SEQ ID NO: 60372 - protein, 96 aa, Zea mays
  Coding DNA Sequence Number=SeqID_16997
MAERLSPVCSPFTMREPRLRKFIASINFKYYLEAIENEEEIEVEEARATPPPPEDPPAENYFYFDICGAEPDSPITQGKPRCISHLLAILKSFSLA

SEQ ID NO: 60373 - protein, 41 aa, Zea mays
  Coding DNA Sequence Number=SeqID_16998
MARQSTTPQSSRDYVNYQVQNEIGIWAERRRYSIPVMQYPK

SEQ ID NO: 60374 - protein, 210 aa, Zea mays
  Coding DNA Sequence Number=SeqID_16999
MGLPVAFLNPSKDLRHRVISFRWRHLFSLGLQPRPDFTPIRVQHRRMRIRTGNKPAAANSLVVDLQWHCLLGLGDIQTLPLQLIEDFFPSTQRGATLWRLVQCCAALRCAWLVTVRQGCSRHRAAKIQAALGPTSKEWSSVRRTAMEPSSKAIGQKPRFRQGSRRRSRLHVLDDGRESKGDFEDRDLVHVCTDNAGLDNMGVVPTYRGFP

SEQ ID NO: 60375 - protein, 144 aa, Zea mays
  Coding DNA Sequence Number=SeqID_17000
MAVEVEMPELQEVRLQSSEVVEIETEAHGRKDDGSTVVVGEEAATPEGEDELATSMTEEKIVEEIQRAEATENSGRGWCTDEERGRREDERGWAKRSYRPLPLAPRRRPDLVAVVTYLPSRLLAVADRVAMPGVEEDDAGDDML

SEQ ID NO: 60376 - protein, 347 aa, Zea mays
  Coding DNA Sequence Number=SeqID_17001
MGRTGVALLLLLLEERGLVEIGALQPSLGFKNFRHAARLHSLTNGQFGGEKQAGLRPLPRPQLQGSSSSGLRRRSAPSGGPPLRGSVTLFFPSVRGRRASSSPVEASSSHAGEGELLLLGQGAAFHPPSGRWSCRARAGHVQALLAPSAVLGGHSARRTPRGRYSCSGTASARTGVRTCRCALGRPLFAGAVLVGGWPLSSVLRWWQPEEVVSTDEIVSATRGQTSDSSASTACPRLSCGDGGEGLFTAASVLMSSLLLFSRPRWRSLSLLLQRSLASRLEFVIPWAPWCGGCSYPWDWNRSPNLRPLCDEPKPKAAVAWTEAMSTRTEAFSMRGQVVSQAEEAQQR

SEQ ID NO: 60377 - protein, 170 aa, Zea mays
  Coding DNA Sequence Number=SeqID_17002
MTLVVLKPLTEARRRQQDPYSTDSCTATGLKALLRRPRYYLYRTRDIPPTATLLSVQGSGHFPASHISSQLHPIGHAATNLLIGPGTPRVRNPDSELVALRKRISGVRLKFTGLSGSPIHPPLGALTESTTGTWGQSVRRVVPSVDLVSTERDVGGGSAGISLGWLLKVA

SEQ ID NO: 60378 - protein, 173 aa, Zea mays
  Coding DNA Sequence Number=SeqID_17003
  Homolog annotation: Hit_ID=Q6QP51; Match level="QueryCoverage=72%, HitCoverage=60%, E-value=6e-14, Identity=38%"; Hit description =Putative growth-regulating factor 1
MAEPQAISRGTLGHFRDQRERLVMESHRREASSPQTLSKRGQVQRITCSWQGRSDRSHFTLSLTDLTGKQCRLPRSGCCANHPGETDNSQDKPRAQQEAPPRPTPGLGLGLGRRSLPRPTPGLGLDLGLGKESHPRPTLGLGPSLGLGGAAASTDLRLGSTAPQGMHHYPTPS

SEQ ID NO: 60379 - protein, 318 aa, Zea mays
  Coding DNA Sequence Number=SeqID_17004
MARFEGKMGHPFKRHHWWQVVRHEPKWSAKHGLGSGSDSTANKRTRLGVSGEYSSGGTEDTEEEAMAPRCVLRWPNLNDVAPTWYRARRQDLWRRARICNSKLGAKIYGAELGSVSVPRRCHDVRLCQRNTHLGAIAYGAELCYLGAIGYGAEQRGASRVEGSSCEGVLFLVKGKGSEDALLLEGGMDPTHASRSTGRSGSSGSLFMSSAVLRITLAFFTVGTFSPTAQSSSDSYGARSTKTHAVVRGRVEGGDPATLVLHEYFGQSCHTIEGVDAQLMHLGFFGGPRDESTDNVGVYKVDQLVALSRKALDVVPQGL

SEQ ID NO: 60380 - protein, 67 aa, Zea mays
  Coding DNA Sequence Number=SeqID_17005
MYENVFARLASLIKAGKLKAVETMIESGIDKKLLMLLDNDDKDGADEVQGDGVQVPLVPGEAAALDG

SEQ ID NO: 60381 - protein, 118 aa, Zea mays
  Coding DNA Sequence Number=SeqID_17006
  Homolog annotation: Hit_ID=A2X987; Match level="QueryCoverage=72%, HitCoverage=12%, E-value=1e-20, Identity=63%"; Hit description =Putative uncharacterized protein
METVFDSSRLGIEPYSREVTQSGELLVMDSMNSNIYRMALSLSRSDNLSHIRFISSSEIGLNNVDSRPKLVAGSPEGFPGHIDGKLLRTELKSGIQYWSLKRKLCQALLRTDQARFQH

SEQ ID NO: 60382 - protein, 196 aa, Zea mays
  Coding DNA Sequence Number=SeqID_17007
  Gene Ontology: Mol. function=transferase activity, transferring hexosyl groups; Biological process=metabolic process
  Homolog annotation: Hit_ID=Q7G4F3; Match level="QueryCoverage=61%, HitCoverage=47%, E-value=1e-20, Identity=57%"; Hit description =Glucosyltransferase, putative
MVAPVEQLLDRLSLEQKPDAIVADTFLAWGIGVGSAWGIPVCSLWTQPATFFLALWHLDRWPPVDGQVVRLATIPNVIPSERVRSTDFAVFIEVVHIKMVAPIERLLDRLSLEQKSDAIVTCDVCEYLGSSRGMLTAAVESLVSGIQSRIQHVPCSLASMEGVPSVVSGFFSNAVSAVVERLWSLSLKSTTKIGDY

SEQ ID NO: 60383 - protein, 157 aa, Zea mays
  Coding DNA Sequence Number=SeqID_17008
  Gene Ontology: Mol. function=transferase activity, transferring hexosyl groups; Biological process=metabolic process
  Homolog annotation: Hit_ID=A3C3A0; Match level="QueryCoverage=62%, HitCoverage=56%, E-value=7e-28, Identity=64%"; Hit description =Putative uncharacterized protein
MEVLMVRDRPRNQRHGGWQDRLEVDAGFGRGTAALGAQPKTSGSVVISNSASAPLLAAAGVPDTLLDRVRLATIPNVIPFERVRDADFAGFVEAVHIKMVAPVERLLDRLSLERKPYAIVADTFLAWGIGVGSARGIPVCSLWTQPTTFFLALWHLD

SEQ ID NO: 60384 - protein, 429 aa, Zea mays
  Coding DNA Sequence Number=SeqID_17009
  Gene Ontology: Mol. function=kinase activity; Cellular component =ornithine carbamoyltransferase complex; Biological process=amino acid metabolic process
  Homolog annotation: Hit_ID=Q6QP54; Match level="QueryCoverage=19%, HitCoverage=29%, E-value=6e-12, Identity=50%"; Hit description =Putative kinase
MEAIGNTMLALGILADYDVTLRPPLVSTATEAVEGRWEANATLRCTSAHRPAPIPSPVSTFSVRPTATRIAVRKMGEVAPLIPATRRRTMSRKAAAAVEADRPAEDVSGEKTLKITIALNQEAEAVAIASKEEKGLQDEPKGEKEDKKTLVEWYIVKETQKEEQTLRPPLVITAPEAVEGVWEANAVLRCTSAHRLASLLRLSFSSLAPLFLYFIQWLDFGCCYALPSYLGLFHILICKVYADGDCRRFEPGGSLDRRGNDGASCDVVGPSPGLGEVEAPPRSRSSLSSKAEVKSEPLGRARRRPLAEARAESEPWGRAKRSSSSFGAEPESEPWGRAKRSSSSSGVEPESEPWGRAKRSSSSSGAEPESEPWGRAKRSSSSSGAEPESEPKGQAKRSSSSSGAEPESEPWGRAKRSSSSSGAEPEFEP

SEQ ID NO: 60385 - protein, 164 aa, Zea mays
  Coding DNA Sequence Number=SeqID_17010
  Gene Ontology: Mol. function=metal ion binding
  Homolog annotation: Hit_ID=A3BIK8; Match level="QueryCoverage=29%, HitCoverage=18%, E-value=7e-10, Identity=64%"; Hit description =Putative uncharacterized protein
MAPEAGLGCCQPHSVEWHSSQIGAGGAVLLSGRSVERRSDCGHFGSVNWRARVRIKQLESSLIERDLKGKGRCKDIVSRRRMEDWKKLADIGWPRKRCQQCGARRLLVATDAVFWRMVVHGDGRLNGINFETRLPRVNRRRGMEMGGHREIYGEGSKVTKVKIM

SEQ ID NO: 60386 - protein, 48 aa, Zea mays
  Coding DNA Sequence Number=SeqID_17011
MLLLSSMFLLLMHAVVQPLQVTGLTGHGTAKRTLRETRGLAVLQSARL

SEQ ID NO: 60387 - protein, 179 aa, Zea mays
  Coding DNA Sequence Number=SeqID_17012
  Subcellular localization annotation: CTP_CleavageSite=44; ConfidenceScore=5.16e-01
MKPWKETIRSSKIMMSSRHGWLVLDTPHGSLSSPSYPLVSRSVRFAVPWPEIESMRSCSPVLPLETPPAPPLDAPTPGVAAGGDPDDGGGDDSSSHDTDFSADQEPEGWVARPITRDAARGCHFHDALDTLLRRALDRRTWSIEYRCVVYHHSRGVYPDRWEATCLVRRPENSLRGAEV

SEQ ID NO: 60388 - protein, 458 aa, Zea mays
  Coding DNA Sequence Number=SeqID_17013
MDKDRQGAAQKRQATVRIHEAQPKRQRGTAKAVASGGGSDEGQLAMVAPGAEIASAAIVPKARGEALDAGGEVSALAVVRGEAGAATRRLKGVTEALSQATEALSQVADFASRTASGALTAAVSAEVERLRTQHADAVREKSASDSKCRKLTDRVAALEREKADLRRQLAAERREANEAVAKGQAAQAEAKLARAESNLAKELAEHLQERLTALESRAKEAEAAVHAEAERTRAQLMDTYRELGARTGDFEVPDREPGLRCLQWVQEELLELPAVVGGSMSYASLVTCEGAMNALSREGCRHFEALDQVDEDFGRDIYEVEDPVVKESAGALYDRMWGLYGREVVRERAEAARAQAERGERVDDFGALNSALPGPEPTPAEAATGVALETTPEPAEDAPSVPTSAVAGEDLPPKVAEGAPDAPAAAAPSAEDSAAVVAETAAEETAEAPAAAGPSQVA

SEQ ID NO: 60389 - protein, 81 aa, Zea mays
  Coding DNA Sequence Number=SeqID_17014
MAGSKDHANISKDNIVKPVIKSLMENEQQQYEDYMRQAKDKFLSQYTVVGYRPRLPRDATSSVPILGLERKSPDGIHVSPD

SEQ ID NO: 60390 - protein, 128 aa, Zea mays
  Coding DNA Sequence Number=SeqID_17015
MGDEWDGDASRHAERGQVRAAGPGVYGILRTDESARHHGFEMRLIDPCLPALLAPDSSDQLELVILVHGRWILLHQVAAGTTTTTKAARLNQVDDKWENFLYQSAFCLGANESFTSSQVVWWSSRLWE

SEQ ID NO: 60391 - protein, 148 aa, Zea mays
  Coding DNA Sequence Number=SeqID_17016
MQQKMGAIKKKCTLDLDDLLGSYRSITLKWVLKASLPASYRAEALNTATHLLNRLPSKVPPPTTTSMCSVAPAIPTLPPLLPRSYLTVPLVVSSSATPLRRNSDEKRSGRPKLTREEALKGYLKGWDILKDLALNMSAWKTAMHVPET

SEQ ID NO: 60392 - protein, 159 aa, Zea mays
  Coding DNA Sequence Number=SeqID_17017
MEFKIQDWGKRSTKKAKRALQIIDENDGISRQALDDYAKLFKHPLSHSHVQALAALFGWSIPDNLDYVDDVGEKLLIWNVRGLNSMARQNSVCDLLNSCCADVIAWSSIPASHCPYLTLDLKFKATGGMSPFYSREVAVDQTEKAFAGFSFTQAHYCPP

SEQ ID NO: 60393 - protein, 194 aa, Zea mays
  Coding DNA Sequence Number=SeqID_17018
MELERCADGQGSSPAFDQSVLPPPPPASGRRSVLDRLGPLGESNDHTKRSLVQGLAHNSNGLACEISHPREATHGARDALVAPIVIKNISFSTAEKPVNDAAPMTKEMRIMKVYFQRKYKENLPQGQGMVSSGILPLSPGGSTLPLESADATGAASKAMDLPEDGVPLPTPSIQYSSANVAAAPVTPSELSWTL

SEQ ID NO: 60394 - protein, 48 aa, Zea mays
  Coding DNA Sequence Number=SeqID_17019
MASAGNSGSGDDDAGGKLLADRYQKGEVLGEGTYGVVFKAIDTKLRVD

SEQ ID NO: 60395 - protein, 208 aa, Zea mays
  Coding DNA Sequence Number=SeqID_17020
MPSRGGVLVRSPAFTLDLHGRDPAAFVREAEDGAVRIVGRYVPKTEAQRSWDIRGSNNRLNRVFELNCLSYGGYPGQYVIDRRGKKSAAETEDDPAPEAAPSTKKRKLGTTMGELGVSDSFAMELMGTCAAPGGRMSSSELRESSARMLEVTGGRWPKNVPIPRAADEDFFTSRMARDLRVFLTDGYTAVVSAVMNKDRQEAAQKTSG

SEQ ID NO: 60396 - protein, 326 aa, Zea mays
  Coding DNA Sequence Number=SeqID_17021
  Gene Ontology: Mol. function=transferase activity, transferring hexosyl groups; Biological process=carbohydrate biosynthetic process
  Homolog annotation: Hit_ID=Q6Z5N7; Match level="QueryCoverage=30%, HitCoverage=26%, E-value=9e-28, Identity=70%"; Hit description =Putative Avr9/Cf-9 rapidly elicited protein 231
  Subcellular localization annotation: CTP_CleavageSite=88; ConfidenceScore=5.31e-01
MPQWRRDPRTHAPASDSPPRARGPTAVLATADEDSRLARTRFLSMSSRPPLWPSSRVSWKIRAAQSVGIQIRRPLPSTLVCRSLLELRLGASACCLLSPGCATTCSCCCSFYKCKLQYGGGIARPPGSTDLLYWDEAFYDNLHNRIGGGKPKMRWYFGENGWPSSKIFETPPSTDSDKEKLVDIVQEWGGVPGPCGGRGDLVHIAMALDAHYLRGSMAAIYSLLKHASCPESLFFHFLAAAEGSGAPAAAELRAVVAASFLSLRFEIYPFRADAVAGLISASMCATLEAPLNYARNNLVGHQAYLLMMHVCLYVFCWLNIIYIQTG

SEQ ID NO: 60397 - protein, 221 aa, Zea mays
  Coding DNA Sequence Number=SeqID_17022
  Gene Ontology: Mol. function=protein serine/threonine kinase activity; Cellular component=nucleus; Biological process=protein amino acid phosphorylation
  Homolog annotation: Hit_ID=A2Y4B6; Match level="QueryCoverage=93%, HitCoverage=48%, E-value=1e-102, Identity=87%"; Hit description =Cyclin-dependent kinase D-1
MVLTFENGNIIFYVQEGSSDIDQLGKIFAALGTPKSSQWPDMVYLPDYVEYQYVAAPPLRTLFPMASDDALDLLSKMLTYDPKARISAQQALEHRYFSSLPAPTRPSQLPRPRRKGDQGNNKIPDLNLQDGPMVLSPPRKLRRVTAHEGMEGMHRTDKVDEHPSGMRHTDDMPSQSSRIPMSVDVGAVFGTRPAPRPTLNSADKSRLKRKLDMDPEFGYAE

SEQ ID NO: 60398 - protein, 286 aa, Zea mays
  Coding DNA Sequence Number=SeqID_17023
HYEVFDQSDEDFGRDIYKVEDPVVKDSAGALFDRMWGPYGREVMVRAEDVEDFGPLNSAQPEAEANPVEAEAEVDPAPPPETGEGSLAAPVAAMSGRGSSSATVPMVENPAKAATEPAAEDPTAAAGSSQVQDFGPAHATATANFVVASTVVARNEMDESAFKFFDFDDSGSSVEWTEESSDEDLDYFAALDVAATEASPHVTDAEVLPGPSAGRRRRRAVAKRRVSEVDGGRLRVGRVGKRELLSSPVGASVGEGELRSLFEGEELRIMLFNYREMGIIPKVEPM

SEQ ID NO: 60399 - protein, 200 aa, Zea mays
  Coding DNA Sequence Number=SeqID_17024
MTLGMSVTWPRLGLRSREAQGLLSHRATAELLTTSTNQRENSKPDRAPGLRPGRMREQQGRPRHRKKLRPQRSQTTPPRPRGLHPAGKKRRSPRSGYCANHQGKTESRSPTSQASGATGSSASPDLRLRPREESQPRPSPASASEEDLRLARPQASASASASGRVTTSPEPSLGLRRSLRHARPGLQTDYATGDTSLPYS

SEQ ID NO: 60400 - protein, 134 aa, Zea mays
  Coding DNA Sequence Number=SeqID_17025
  Subcellular localization annotation: CTP_CleavageSite=48; ConfidenceScore=5.21e-01
MSYAVRQPMSVWYSMFTSMIDSTELWSRGGSSLQAGCGSSRSHRSQLSSMEETMREQQERFREEMWQQQMAIIQQLSEYMAAYNTQAQQAMKMSAIFILNTGPGVMGNNTPPPVIPAPEGASGGEEATTKETPN

SEQ ID NO: 60401 - protein, 167 aa, Zea mays
  Coding DNA Sequence Number=SeqID_17026
MLKKMQESCPVKLLGASAWLSKVLGTRTDEEEEEVQRHEEEVATTDAGVQGHKEEGHFVLPLSAHAQSEAQLLIIPVGDSQWDDMPFDGRGHQRQVNQVLERRYRVELKAQEHIDRVLEKNEKKVCKDAISNAHLHVVNAYMKHRGHSINNFRQYSNVYLTVDQYME

SEQ ID NO: 60402 - protein, 90 aa, Zea mays
  Coding DNA Sequence Number=SeqID_17027
MAGGGASCSGESPANSGLGRTEGVRGSTMEALGEFIGTGAGEGVGSGVARRGRAGSGARACSGAPGKGRTHGGVSFIIRATSDNGRKLGY

SEQ ID NO: 60403 - protein, 50 aa, Zea mays
  Coding DNA Sequence Number=SeqID_17028
MPKLPCAQLWLYANLRILCTSSDCGSDPSPKVLVAHQGKWEVAAHPPPLS

SEQ ID NO: 60404 - protein, 209 aa, Zea mays
  Coding DNA Sequence Number=SeqID_17029
MPRLKLGKASQPLGEAVRGLGHGWGSTGRAGHSGRARAVMAGDGASCSGQSLANSGLGGTEGVRGSTVEALGGFIGAGVGEGEGSGVARCGRAGSDAPTCFSAPGKGQTCGVQSTYYLKKPHFTSYSMQYKGSSSLISCEKQTIQIKFEPCQIRAHDLGIQCSIDPGPHRPMVALVLTIASMGGSISNPMRRKVCGQVQSVVQQWLSDY

SEQ ID NO: 60405 - protein, 192 aa, Zea mays
  Coding DNA Sequence Number=SeqID_17030
MTSSTPTNGGDTRFSSDYLSHEGFPSILWEVLSSAGYPTPPLYTVQLYEEHRVPCCRVWLTLEAHPLQPGWRSLDSETIGFRADDTTKAVAMKTLTTFCGYHPLEMVMHPLGLFPAEKRDDPMWCNQSDTMAHLTNLAQTTKLTLDCRKDFVVDLSSELVEKDLQVEQLSQRIATLEQHVEIQNNTIDVLEI

SEQ ID NO: 60406 - protein, 90 aa, Zea mays
  Coding DNA Sequence Number=SeqID_17031
MEEWVRQFQAELAAQAASGPHAVEAMKKTFEDLRAEHRVGVQRIAAWAGEASTTLVPLGVSPILVSELPTSISDALPVLDSAADRLRRLD

SEQ ID NO: 60407 - protein, 121 aa, Zea mays
  Coding DNA Sequence Number=SeqID_17032
MGTEGPASTSTRVVAASVASFAEAGVGALVDSKIVSSMLAILLLLGVNAGTLDSFGNSGSGSGFLAALPTPPVMEQGVPAQRRKRSPWHRQEQGPKQFITNCLNTVQPVIVWLIKLISISE

SEQ ID NO: 60408 - protein, 246 aa, Zea mays
  Coding DNA Sequence Number=SeqID_17033
  Subcellular localization annotation: CTP_CleavageSite=33; ConfidenceScore=5.33e-01
MTKPETILNYKCTFGLTEGRFLFPLFSRNSLARSFGATQTFVTIKLFTSYMLFPRVRRYLFICHTWKILLNYVFEDLRRTKASNREVGWDQPQKNQDAERDIAIGIPSETMSASSWERELQSATPSYQKAPRGYPWVCGRILNIDRGGDARTGIEETKKLHGQQWRKGSPEKKTSSEPRRQTLIGDETSVESMNRKHQDEPLCETNTTVHSDSTDDARIEINCSPEFVIGVGTVPNFGEQIQEFRI

SEQ ID NO: 60409 - protein, 156 aa, Zea mays
  Coding DNA Sequence Number=SeqID_17034
MGKNNKRKREPTPPSEEFGDSEYSEEEFSSEPEGSPAPVSPPASSDDSDDSQGIAAEVWTYIRAVERAGLEGSDESEYSSDEEDSDGGDEGEDDDDDDDDDDGDGSGRGSGDGSRDSTKGSSRGSTKGGGGDSTKGSSRGSTKGGGGGRGRGRASG

SEQ ID NO: 60410 - protein, 224 aa, Zea mays
  Coding DNA Sequence Number=SeqID_17035
MRQHAKISFAKVNENRDLENGVRVQLGQWSRGKNAKNRVPVEGEPRWKQGGEAQLQKSQTYGYLRKEVNELQTNSLRVGTSLILHSEEFGDSEYSEEEFSSEPEGSPAPVSPPASSDDSDDSQGIAAEVWTYIRAVERAGLEGSDESEYSSDEEDSDGGDEGEDDDDDDDGDGSGRGGGDGSRDSTKGSSRGSTKGGGGDSTKGSSRGSTKGGGGGRGRGRASG

SEQ ID NO: 60411 - protein, 26 aa, Zea mays
  Coding DNA Sequence Number=SeqID_17036
MAPKRKTANLFAAVIPAIDPNSQVPI

SEQ ID NO: 60412 - protein, 170 aa, Zea mays
  Coding DNA Sequence Number=SeqID_17037
MASRRSSMAFTELEWRERNRRVDSPITQIRTVSRVAQRRSGRALGVQARSRLRGTTRSTSGLAWRASWSRLERRGNRARAQSAVGRLGLGPGHRSGTWQRVEVAPRALRGGGRVPGRALGRLGGCGRVRQRGREEEREAGEGRKWSWRRRPGGEETRAAARRWDKWAGLV

SEQ ID NO: 60413 - protein, 154 aa, Zea mays
  Coding DNA Sequence Number=SeqID_17038
MGKNNKRKREPTPPSEEFGDSEYSEEEFSSEPEGSPAPVSPPASSDDSDDSQGIAAEVWTYIRAVERAGLEGSDESEYSSDEEDSDGGDEGEDDDDDDDDGDGSGRGGGDGSRDSTKGSSRGSTKGGGGDNSKGSSRGSTKGGGGGRGRGRASG

SEQ ID NO: 60414 - protein, 95 aa, Zea mays
  Coding DNA Sequence Number=SeqID_17039
MALDISIQNSPPACRKRGGRTVVIVSELPTGSAANTAAVPWAEQACMMHAGLLEEPLVEAEPGASVAKVDRAIEGLDCRVREPGGGTVGVLASLK

SEQ ID NO: 60415 - protein, 58 aa, Zea mays
  Coding DNA Sequence Number=SeqID_17040
MGKLVPSLLMLLLSRVTALVPTITGMGDHISGRVRGKVCCQVQSGLRFCLEGGFDLQQ

SEQ ID NO: 60416 - protein, 357 aa, Zea mays
  Coding DNA Sequence Number=SeqID_17041
  Homolog annotation: Hit_ID=A3ABZ8; Match level="QueryCoverage=21%, HitCoverage=21%, E-value=4e-10, Identity=40%"; Hit description =Putative uncharacterized protein
MVVFVMQQAVWNVDTNNEAVQGFRRSLHDEAAQHEESEVMDGEDDDDEDDDDEDDDDYDTKKNKGTAGGEGQQGKRPTKCKQQYCVLMLGVKMVATLVLHYLLFHNEETLAFSALRHMEPLVVTLVHIFVGKKSTSCPVYKRFMSFKKKHRGREVTVIDCTSPPAACAAAVCSLQSLGAASPTKSELAEIVPQEKSPKGNASFFSFHSTNAAESKVFYLKMKGDYHRKDAAGSTMNSYKVAQVSSDCSPLLEAGQAESLGTELLEMVPSREEEIKLKEYREDAVSTFVVDDYVRLEFKGSTFSGSWKSFSSPKISSTFLVVIAIVSNEIVMFERRIGRLSTLFLAMEEGFLALVSSL

SEQ ID NO: 60417 - protein, 464 aa, Zea mays
  Coding DNA Sequence Number=SeqID_17042
  Subcellular localization annotation: CTP_CleavageSite=51; ConfidenceScore=5.30e-01
MSSFSLKRRVFPSSKPPDGRYPPPFRLLVGGTQLHGSWYLSAIVRLQGFSSAGPAVPPCRRSPRMVTAGFWVGKSKSGCDLGPTLSFKDVHHPRWGGSHAEPALYLPRGSAGRPFSRRLGVEALAGPVDGADLDNVGLIDGGRRHLQRVGVVGRASGGPSRRRVTAASGRRPTRLGGFEWGSAGGLVSPAIGAEAEAAREVLVTDGITATTRAPGHRAGVLVLAPRASAGARARSQQRRPTVAVVRMGGGEPAVGLLLLRRPSPWSGVVRTCGGGNRSSVRNGTSNASVFCSLWLSGPEHPTPKSISRGLRSGWRPWKPVDRGPRGNRSSRLLGPDSRRSPWTASPPEAGSDFAEDVVDAEGATTPFSVKTRACRIRSSCSVCFLRPPRPEKHTLAALAKLRLFSSCFEHLDSVGNRDVCVSESCFSRKGRVRYPYPRGVGIPRLGRPCRLRVLSPVHEALSPT

SEQ ID NO: 60418 - protein, 398 aa, Zea mays
  Coding DNA Sequence Number=SeqID_17043
  Gene Ontology: Mol. function=metal ion binding; Cellular component =integral to membrane; Biological process=ubiquitin cycle
  Homolog annotation: Hit_ID=A2YWD6; Match level="QueryCoverage=90%, HitCoverage=88%, E-value=7e-78, Identity=47%"; Hit description =Putative uncharacterized protein
  Pfam annotation: Domain name=PHD; Domain location=123-168; Score= -4.2; E_value=0.04; Accession=PF00628.20; Description=PHD-finger
  Pfam annotation: Domain name=zf-C3HC4; Domain location=124-165; Score= 38.3; E_value=2.7e-08; Accession=PF00097.16; Description=Zinc finger, C3HC4 type (RING finger)
  Pfam module annotation: Pfam domain module=PHD::zf-C3HC4; Domain location=123-168::124-165
MVRGNGRLLPLSLLLLAAADFTTVHGQGQQPEGPYYSRSFNPSMAIVIVVLIAAFFFLGFFSVYVRHCYGDGSSGYSASPAPGGAAARSRRQQRGLDSAVLESFPTMAYADVKAHKAGKGALECAVCLSEFDDDETLRLLPKCSHVFHPDCIDTWLASHVTCPVCRTNLALGPDANAPPPDDDTPELLPAPEAQELPSPTSAPPPSAAVVIDVEETEEERIIRAEADELMRIGSVKRALRSKSGRAPARFPRSHSTGHSLAASACATTGTERFTLRLPDHVLRDLTAAGKLQRTTSLVAFRSSRGGSTRRGVSVRTGGGGGEGTSRAGRSIRLGQSGRWPSFLARTLSARLPAWGSRSTRRSVQTDGSSKGGRTVGDAGAGAKSSEHDDQACAPGQRV

SEQ ID NO: 60419 - protein, 301 aa, Zea mays
  Coding DNA Sequence Number=SeqID_17044
  Gene Ontology: Mol. function=racemase and epimerase activity, acting on carbohydrates and derivatives; Cellular component=Golgi apparatus; Biological process=carbohydrate metabolic process
  Homolog annotation: Hit_ID=Q8W3J0; Match level="QueryCoverage=39%, HitCoverage=40%, E-value=3e-44, Identity=70%"; Hit description=UDP -glucuronic acid decarboxylase
MAEGIARREGRRGSSDKVAKTTWCDVSYQITKINMYKDGRHVQDMLKGFAIGSGALVVPGAVWCLRWQSWSEGCRCSLPKVFIGLIVGAMFSYWFSAMTMKSVGSVALKMVEEVRRQFNTILGLMEGTGKPDYATYVKICTDASINEMIPRGALVMLTPSLLEPLWHRDSLWRSCWCPDFWSVDVTEPLLVEVDQIYHLACPASPIFYKHNSVKTIKTNVIGTLNMLGLAKRVGARILLTSTSEVYGDPLEHPQIEAYWGNVLGVVMMRKSGLPGFLTPMGLRMNIDDGRVVSNFIAQAVR

SEQ ID NO: 60420 - protein, 80 aa, Zea mays
  Coding DNA Sequence Number=SeqID_17045
MMHGLRRMFMSQKGKIQVIEDMKQFIFVYYELGNFYQNHRSLVDNNNLSGPLPPELVDTLPPELVDTRSLLAILAPMAAK

SEQ ID NO: 60421 - protein, 197 aa, Zea mays
  Coding DNA Sequence Number=SeqID_17046
MAPSLEKAQKRHAPWGRQPQIKPLSVPTLVRQGKGNQDILTRPSSAKADTGAPDWPHLHYFSLLLSQQLDAEKSIAIRLDWARCPDQVLEGHRQSTLRNHHQSTKIDPSVEQSDGKSNGGPTVNVVDHDFLETTGDVKPALEAGYPAGMDTLSRCIDLLTKPCQLSFLPSLETKNGDLNILGKQGDMKSRVNGLLDA

SEQ ID NO: 60422 - protein, 107 aa, Zea mays
  Coding DNA Sequence Number=SeqID_17047
  Subcellular localization annotation: CTP_CleavageSite=90; ConfidenceScore=5.59e-01
MSSSSHRLTLLASPARNSPNENTATDAPVRPVMQPASLSAMRAVLGGTRSSIHGNSSNTIILWPGRCSLPLRLSLRPQAQITAPRPTAPVAWEEGERKERGGGCRAR

SEQ ID NO: 60423 - protein, 60 aa, Zea mays
  Coding DNA Sequence Number=SeqID_17048
MEQVPRGSRCDKGKGDGVAGGNGGGCAAKGAWGGGWRQGTRAGGTEKTFLNKKENTEAQQ

SEQ ID NO: 60424 - protein, 122 aa, Zea mays
  Coding DNA Sequence Number=SeqID_17049
MTDSASPDPMARTQPWPRKTVSASPDPGLELNLDLGRRTPPHPTPGLGHSLGLGRWSPPRPTQGSDSTSTSEDGLRLARPQGSDSASTSEDGLNLELRGIATSPKLRLGPTTSPGGPSLPYS

SEQ ID NO: 60425 - protein, 235 aa, Zea mays
  Coding DNA Sequence Number=SeqID_17050
  Homolog annotation: Hit_ID=Q6QP51; Match level="QueryCoverage=27%, HitCoverage=29%, E-value=2e-13, Identity=63%"; Hit description =Putative growth-regulating factor 1
MGPQVLVGGNPQKSFTNRREDGCLRDGVGTEIVQLHPVDVQNRSHKMTCRHSEPPLVKRDEAQHIPWRRGRGGSARRGHPLRLRVTGERTKQTISNKGLQIIRCDGGERPRVARRNNGHPVGHHQAEEVAVERTRTGGTFGRQSRRRFTSAMMTASKKERHGPGKGILRKGSFSAKEAGPEPPTDQRFEGWPLGRVQQPPQSTRAPRPLLIRGLKAGPSEVFNDRLRPLGLRAHY

SEQ ID NO: 60426 - protein, 300 aa, Zea mays
  Coding DNA Sequence Number=SeqID_17051
  Gene Ontology: Mol. function=peroxidase activity; Cellular component =cytoplasm; Biological process=response to oxidative stress
  Homolog annotation: Hit_ID=O23983; Match level="QueryCoverage=42%, HitCoverage=50%, E-value=7e-64, Identity=92%"; Hit description =Ascorbate peroxidase
  Pfam annotation: Domain name=peroxidase; Domain location=2-130; Score= 3.1; E_value=5.8e-07; Accession=PF00141.14; Description=Peroxidase
MSAESAYSGWLVSRNLPDVFAVQDKPQPPPEGRLPDATKGSNHLRQVFGKQMGLSDQDIVALSGGHTLGRCHKERSGFEGAWTTNPLVFDNSYFKELLSGDKEGLLQLPSDKALLSDPVFRPLVEKYAADEKAFFDDYKEAHLKLSELGILTGLLSFMMDDALTTGSIKTSDAEKRRLAKASLAYNCESKNCPHFRKLFPEYVEKYNQQLQLENTAAEPVPQENPAPAPSPAAQQAPTVANRAQPLAEARRDKNQKKAVPFWMVLCWRAASFLKYTELNRRESLALASDGLNYECNEAPS

SEQ ID NO: 60427 - protein, 341 aa, Zea mays
  Coding DNA Sequence Number=SeqID_17052
  Homolog annotation: Hit_ID=A2Z273; Match level="QueryCoverage=97%, HitCoverage=99%, E-value=4e-66, Identity=47%"; Hit description =Putative uncharacterized protein
  Subcellular localization annotation: CTP_CleavageSite=75; ConfidenceScore=5.13e-01
MGGLKLRRLASTFLSPGPASPGSAADAHHSVWRATAHHPSTAPPSAQHMDALLAFGRGSRLSAASLAAALVDRLRAAASGQGDAAVALKCLVALRVLLARGAFILRDQLLAALARHPASGRNPLALSSFPLGRSSFAAASWVRFSARLLELLLLLPDASASADADAEYLTALPNPHLVAELAAFVSVADAVRQAPPPPPSGPQPNALIWEAVRLADEDRVAAERSIVARVQEMGERLDTLSLADAVELVCVLRRVEDGTASDCKWAGLDEGVARAARGLRERAEDVVLRRTVEERRLVRRDAAGSASARTILPIRAAAGDGGAVRFGSTRWAGTVSAPRRR

SEQ ID NO: 60428 - protein, 162 aa, Zea mays
  Coding DNA Sequence Number=SeqID_17053
  Homolog annotation: Hit_ID=A2YVA0; Match level="QueryCoverage=80%, HitCoverage=21%, E-value=1e-08, Identity=30%"; Hit description =Putative uncharacterized protein
MAEAQRLFGRVDSSTPVVHPTPGLDVATITALHAQAAEVHNIRSLVPVVLDPASPHFARLRDEVLLTLQRYALTDHNIIRKQGAPLARPRSPSKLSSSPCYNHLKDLNKRTVSFPSFGNVRNKLLLEKLTMEAESSTPAMSLYASPPPTDGDPYAPYDRFHH

SEQ ID NO: 60429 - protein, 300 aa, Zea mays
  Coding DNA Sequence Number=SeqID_17054
  Homolog annotation: Hit_ID=Q60F01; Match level="QueryCoverage=57%, HitCoverage=12%, E-value=6e-84, Identity=90%"; Hit description =Putative uncharacterized protein OJ1111_A10.12
MESTGGKSSGCLDNAGAAGTLYEAVPKSITVSNNNLSTQTDTVFLDPPYEPLWTNVFVRNCAKVSLPLRWSRIQAQGQILLSGATLTFGLTHYPYSEFELLAEELLMSDSTIKVFGALRMSVKMLLMWNSRMTIDGGRELGVGTSLLEGSNLIVLKEASVIHSNANLGIHGQGVLNLSDVETGLKLNEYTRRQPLVEDANELRGGRDLENANITDGDALADKVKVEFHVLRVLMLHMVGEVDHANIVAADKGGALEGLWSSEGASGAKMPRSHRWPQRDTRPQRWSGRRHAFALRPKGRG

SEQ ID NO: 60430 - protein, 175 aa, Zea mays
  Coding DNA Sequence Number=SeqID_17055
MAIIFVNNIKSITSDMFHFGSISSIVDQNDDLHRIYDVVEETRGWARWRLLRGRGRGRVCLPRSRSSPDPPGRTRRRPSAEARAKSEFEPWGRAKRSSSSFGAEPVSEPWGRAMRSSSSSGAEPVSEPWGRARRSSSSSGAEPVSEPWGRAKRSSSSSGAEPVSEPWGRARQSFL

SEQ ID NO: 60431 - protein, 312 aa, Zea mays
  Coding DNA Sequence Number=SeqID_17056
ALCFGHYLGSSRCSRTRRTAARKTGIPHRTWSSAADPHHAVDSFSGSAIPGREDLRGRSWRRRIALSAARFGAACAAPTAEPPDRVRLTAAKTGLGRHRKLCLARPQGSDTGSAPEDDELRFARPQGSDTGSAPEDDELRLARPQGSDTGSAPEDDELRIARPQGSDTGSAPKDDELRFARPQGSNSDLALASADGLRLVRPGGSGLDLDLGRQTRPRPRPRRSLHLAQPRARTDHVNRKLQRSSDGHDTTRTGCQDLSGCHDDMALLQEVGHAGNDGTALAQGHSLPPAWTLVTPYCKRTRPRRGANTKAA

SEQ ID NO: 60432 - protein, 101 aa, Zea mays
  Coding DNA Sequence Number=SeqID_17057
MEKHHHIESHHMSSPRAEYRLGCGPVAEDHHGYGLHAKYPLMMLHQFASGVEKVEAFFICVLNLLMDSLEVTDLLIEFIILWVQCSRSEKGTSQNPHTKKI

SEQ ID NO: 60433 - protein, 235 aa, Zea mays
  Coding DNA Sequence Number=SeqID_17058
  Subcellular localization annotation: CTP_CleavageSite=26; ConfidenceScore=5.34e-01
MSSRSLMHRVFPPSKPPDGGDPPSFRLVVGGTQLRGSWHLSAIVRLQGFSSHSPVAPLRWWSPKTVTSSPWTGRGKPGCDLGPALSLEGVRHPRWGGERGEPGLYLPRGPAGHLFSQLLVVANTLQFCGGDVLQPCRGRRTVAAQLGCNIPPSSLHSRQGRQRGPAGALGSGPLFGFNSWFASLEREREREPSGGRVRPGTMAAAAEVAGGSPGVRRPVGPRVFVPAGTEPEFRL

SEQ ID NO: 60434 - protein, 299 aa, Zea mays
  Coding DNA Sequence Number=SeqID_17059
MEAQAHASCNRCAGCYVRSERRFAFAVMTASKKGTGKGGYPEKDPSPRRNQAPSPPTDQRFEGWPPEGFDSRLRSRGPYTHYWSEVRRPAPRKGSTAASGYSGSAPITDQGFEGWPPKESHQREASSPRTPSPGDRVWQITRGSSETPCSAPIEGNKALSPPPPSSLRKGDVGAVNIPARELGTRPYTWATASSHEGTTRPAEALRKALRPRRSETTPPRPRGLHPAGALARTHRNKTQPRKAGPLAKKCDESLQASANTPFEARGLLSGTIIRGTLKAPNSQLVTPISTKLQRPDGCD

SEQ ID NO: 60435 - protein, 157 aa, Zea mays
  Coding DNA Sequence Number=SeqID_17060
MQTHTSITKVYTRRKQNPLQDQDVDVGLTGGRCNDLGKNLSVDFALDSQTHTNQDQASDCCIDSGIDAFICKISRKTAGLLPAPKPSLKTASSQVINAPRRSRRVAGISVEFEMYDCRSRTSRKAMRVLQIITESEDMNKEALQKYGVLFNHPLNQI

SEQ ID NO: 60436 - protein, 87 aa, Zea mays
  Coding DNA Sequence Number=SeqID_17061
MKTGNWPIGGTSKAAKDSGEGSTTFDGEQTWRKSEQEKQRSLIGEEMARKETVTTGCGHARLGMATMVVSTGNADGQAGNWELERRG

SEQ ID NO: 60437 - protein, 87 aa, Zea mays
  Coding DNA Sequence Number=SeqID_17062
MRTGNWPIGGTSKAAKDSGEGSTTFDGEQTWRKSEQEKQRSLIGEEMARKETVTTGCGHARLGMATMVVSTGNADGQAGNWELERRG

SEQ ID NO: 60438 - protein, 604 aa, Zea mays
  Coding DNA Sequence Number=SeqID_17063
  Homolog annotation: Hit_ID=A2Y150; Match level="QueryCoverage=95%, HitCoverage=97%, E-value=1e-165, Identity=56%"; Hit description =Putative uncharacterized protein
MPKPGDCSSSGVGGPSAGDAKDLPQLFLRVGAAVTLSVAESDDACSMKARTGLKELRILKNEDTKAKIISGNSVHTTTTTTTITTTALVPLAPKCRSLADDEGYLLPEFNDMVLREFGQDIDSIPSTPAARVREDVSNDHEVHKLRDLVRSLQEREKTLELQLLECYGLQEQDAAVRELENQLKINNVESKLYLLKIESLQTENQRLQTQLSENSKIFSELEATRTKCKFLKKKFISDAEQAKEQIISLQKMVDSLQNKQTDEEKKFIEFENKLKRLEELEKEATELRAANSRLQQENAHLIRRLEVTRLPPVPKPKTSMEVKALEEADRLKQETDRLAKEVEQLQSGRFADVEELVYLKWINACLRYELRNKDAPSGKTVARDLSKTLSPKSELKAKQLIMEYANVGAEDSHLGHVEFGSECSSSRASSGEPDDVSIDIASMTKHTNKNPKKKKFFSKLRKLVLGKGKENREISTLERRVSISSCSFDDFTGRDSHDSYSSFMAEPNMPDSRRHGDHGFGTHSSLDSAKSSPLGTEIVGERSDHSVVKSVSSREEKVNAFGPSIGLDSSKAIPEDVEIHKFADALITSRSGSMSSRRSASFRH

SEQ ID NO: 60439 - protein, 779 aa, Zea mays
  Coding DNA Sequence Number=SeqID_17064
  Homolog annotation: Hit_ID=Q60F01; Match level="QueryCoverage=97%, HitCoverage=61%, E-value=0.0, Identity=62%"; Hit description =Putative uncharacterized protein OJ1111_A10.12
MDQYKKTPITVPFLLGSLDGFIKAGRKAVKNTGVSVWGCPTLAGCRGGIGRGKMLSSGFSGGGGHGGKGGDGIYNGGHVEGGSAYGHADLPCELGSGSGNVSGSSTAGGGIIVMGSLEQSLPNLSLSGSIEANGGNFTGLMSHATIGGPGGGSGGTILLFVRTLLLKKDSVLSSVGGVGGNGSGGGGGGRIHFHWFDIPTGDDYIPFATIKGTILARGGVSEGQGFSGENGTITGKDCPKGLYGTFCKECPSGTYKNITGSSKSMCSPCPPNELPRRAVYISVRGGVAEPPCPYKCVSDRYSMPHCFTALEELIYTFGGPWLFGLLLSGLLVLLALVLSIARMKFVGTDELPGPAPTQQSSQIDHSFPFLESLNEVLETNRAEESHCHVHRMYFMGPNTFSEPWHLPHTPPEQISEIVYEDAFNKFVDEINALAAYQCFMVGLSGAKSVAATPDLMLGYLDFFLGGDEKRTDLPPRLHQRFPMSLIFGGDGSYMAPFSLHSDRVVTTLISQAVPSSIWHRLVAGLNAQLRLVRRGNLNTSLLPVLKWLESHANPELNTYRVRVDLAWFQTTALGYLQFGLVLHAVGGVVAAELQDGCTSKTDQHSVNQNTCTDSQMGHSRTNDVLRKRITGTILNVDNLRMLGGRRGFFYLLSLILHNTKPVGHQDLVGLVISILLLADFSLVLLTFLQLYSYSMVDVLLVLFILPLGILAPFPAGINALFSHEQRRSAGLARVYALWNITSLVNVVVAFVCGFLHYKSSSKKHPSMQPWSFGGYWAIF

SEQ ID NO: 60440 - protein, 295 aa, Zea mays
  Coding DNA Sequence Number=SeqID_17065
  Homolog annotation: Hit_ID=A3BQI5; Match level="QueryCoverage=76%, HitCoverage=22%, E-value=3e-14, Identity=28%"; Hit description =Putative uncharacterized protein
MDPNGLVDSQRFLRLKKKRRRSKGGKTGVGASRIVSPGSADGVDAILPMPRLVELGDSRPPLVESRVLAFYDELAREEIKLRRALFVTIVETRPEVHGSDVLEEVARSFEVNVRDMSIHQANPEDFLLFLPGEDTATRVLNGGRFFVDPRFNLLFKSWSRFSHASSSVMYQLVDVVVRGLPEHAWFRSTAEVILEDSCFIEEVHLDIVHKRDFSSFAVRTRCFDPERLQRNMILHISEPGPQSNEARFLSYNISVQAIPVNANEASMRPPADPSTRTGGDDRSSASNDDVSDPSP

SEQ ID NO: 60441 - protein, 151 aa, Zea mays
  Coding DNA Sequence Number=SeqID_17066
  Subcellular localization annotation: CTP_CleavageSite=55; ConfidenceScore=5.19e-01
MGVIKENSAACAAPTAVPLDRVRLTAAKSSLGRHEKLRLARPRSRTQPRPRKTVSASPDPGLGFGLGLGRRSLSAFRDRGVPKPTSECAACPSPDGSSAWASAKGGEARWPEPSVREVEIPPAFVFVPRPGHVHLQKGVTSSPRVRETSVP

SEQ ID NO: 60442 - protein, 177 aa, Zea mays
  Coding DNA Sequence Number=SeqID_17067
  Subcellular localization annotation: CTP_CleavageSite=80; ConfidenceScore=5.09e-01
AESEPWGRGRRSFVVFRVLARVRALGSGGAEFAVFRVLARVRALGSGGAEFAVFRVLARVRALGSGGAEFTVFRVLSRVRALGSSGAEFAVAPLARPDCLSDSLCRVAPQSEWRRRRCPSSDWPVERRSDGGHFGSAGGAWLGLSLDPGRRTPPRPTPGLGLSLGLGGASASPDLGL

SEQ ID NO: 60443 - protein, 239 aa, Zea mays
  Coding DNA Sequence Number=SeqID_17068
MECPTARGDPVPEARALKVTNNPCDVREPFQLPASPVSLSQLPQGGAVNQRREKKRSRGKTGRRRSQELGRTLQEIDRAWRKAGGKGKSRPDRSRHHDTRIRFLGDSDRKTVERSRGTATNTRTGAGGGFRLAGSRGAGGLRGAGGHTAGDRSLLPSDVGVDGSRSSSSAAFALSTADDAGDGEDEAEAEAEDVAVADDGTGGGRGVVLMGGNPGRSSSTGDAIISPRSNYRRTYSTAL

SEQ ID NO: 60444 - protein, 28 aa, Zea mays
  Coding DNA Sequence Number=SeqID_17069
MAFKGARAVSRVPLRDNETDGFGYDYGA

SEQ ID NO: 60445 - protein, 190 aa, Zea mays
  Coding DNA Sequence Number=SeqID_17070
MNELTGIRSAITNGTPVPPPQVRTTPLRGGRPAEQRKADKWCAVTRSSSGDDDAFCSEGPSSGNADLRLDAAARRPPPVPKLVRQGRAEGHRVGGTGKGGYPERDPSPRRNRAPSPPLLIRGSKAGPPRVQQSPQIARARHPVLVRGSKASPPKGSMAASGYSGSAPITDQGFEGWPPKGSQSPQTPSEG

SEQ ID NO: 60446 - protein, 248 aa, Zea mays
  Coding DNA Sequence Number=SeqID_17071
  Homolog annotation: Hit_ID=Q6J9V9; Match level="QueryCoverage=41%, HitCoverage=35%, E-value=2e-47, Identity=89%"; Hit description =Putative uncharacterized protein
  Subcellular localization annotation: CTP_CleavageSite=44; ConfidenceScore=5.38e-01
MMTASKKRRKRTPSPPTDQGFEVAPCGVRQPPQSTRAPSPLLIRGSKAGPSEGFDSRPRACRVRDDPGYVRYMAEARATLPRYPRTFPRPAGTICNGIPPEGGTEPLDPIKWVRVQQITCSYFAPLLIVLTGKQHYSPCSDYCANHQGKTNNSKSRPPLSSASGATGSSASPDLRPQPQLWPREKVSASPDPRPRPQPRPREKVSTSLDLGPRPQPRPREESQPRPTSASASGEVSASPDLGLGPTTP

SEQ ID NO: 60447 - protein, 40 aa, Zea mays
  Coding DNA Sequence Number=SeqID_17072
MQAACNRTKGAHPFDFDASSMGAQAHTDWERGYSERDPSP

SEQ ID NO: 60448 - protein, 75 aa, Zea mays
  Coding DNA Sequence Number=SeqID_17073
  Subcellular localization annotation: CTP_CleavageSite=34; ConfidenceScore=5.65e-01
MAHHASPPVFGALASPSFSPRRRYWLPLPTTPPSSSSLVPTAVGRAKETGVMEATDHRRLRHEGGSKIWLDFRCT

SEQ ID NO: 60449 - protein, 80 aa, Zea mays
  Coding DNA Sequence Number=SeqID_17074
  Gene Ontology: Mol. function=GTP binding; Cellular component=cytoplasm
  Homolog annotation: Hit_ID=Q6Z2M1; Match level="QueryCoverage=36%, HitCoverage=12%, E-value=3e-09, Identity=79%"; Hit description =Fibroin heavy chain-like protein
MKKLRLGAEFNVVSMRIVALALVALLVVAAAAPVATAYGCYDDCYERCANGKKDPACTKMCNQACGSTDQGAGAAGAAPA

SEQ ID NO: 60450 - protein, 247 aa, Zea mays
  Coding DNA Sequence Number=SeqID_17075
MINCACGEVSRTSTPEAEGSSIPSVCPRSSDRDPDVPAPETDGASPLGGWLDNSWPSLRSGLMPRRAAISSSSSSSSSSSSSGLSGDGSLGSPSLSCRRRSLSKASRARIRSWARAFFASFFSFLFSAATLCAARSTASSGTGGREGLCHPTSWGQTESLGCENQGQSDVRRKKERTLTRDTHPRSGRIKGWERAPASGFPNAAATRPWRSPTERVSEDIREPSKSASGVISQSGNRRSVKGSTLRR

SEQ ID NO: 60451 - protein, 189 aa, Zea mays
  Coding DNA Sequence Number=SeqID_17076
MEMTVRGASLRLRGPRSCGMEGGKGARGFIAVVKRFAAEKPGGSCASRSRVMETIWAPRSMTPGTHAASSPSTPKARLLRQIPAGGPAPAPDIGGDLGGASSAVPPPAPEELEVIFGRRLRSGAEPDVAPIPLPRVLSRAHQVLNETEAAIRREWEALESKHQRLSDWRTQQEERTKAASRYGSNKWKP

SEQ ID NO: 60452 - protein, 19 aa, Zea mays
  Coding DNA Sequence Number=SeqID_17077
MAGKKGSDKKYPRRGINGF

SEQ ID NO: 60453 - protein, 188 aa, Zea mays
  Coding DNA Sequence Number=SeqID_17078
MHVVGDILKRRVMPLQRRSRLCWWFTSPNDIGRIQRGPDTDLSSEELELLVKGITGLRTTVLATLPTLDESGVAVHQTSGPDPLHGIQIPGVPARGLQTAGPAPCVGPAAALSPLDKGKGAASSASGPGSSRESEEERRQRLRRVDGLLASDPPEAPKNCWWGQGIRLPSSGRVEACQSSDATAIATL

SEQ ID NO: 60454 - protein, 347 aa, Zea mays
  Coding DNA Sequence Number=SeqID_17079
MGGPAEQQKTDERHAVTRSSSGDDDDFCSGGPNSGNDDLRADAAARRPPPMPKLVRQGRAEGRRVGGRSVGGPGYLVGERTSSSCRGGSRLRSHSGLRARHEAAASATDSNRPSPRSLREGAGHHPRRGRPQLDTLPSPALVMKILEAEGGAEAAAWLAFPRHRTGGHHLGTLQGSPPTVRGLGPTRHASRPRAEEAKPPRAVHATAQRLQAIPHFRPDQRAKGRAAMQAACNRAKWAHLSDFQRAQHGSPRPRVMQPARRSLRASNCTATCATATPPRLRNQYRDSRQPYARPSSASLARRKGGASGSGSERRFTFAIMTASKEAPSLPTDQRFEGWSLGRVQQPP

SEQ ID NO: 60455 - protein, 24 aa, Zea mays
  Coding DNA Sequence Number=SeqID_17080
MRVREKDTDIDFAQDAIDEYKTGN

SEQ ID NO: 60456 - protein, 58 aa, Zea mays
  Coding DNA Sequence Number=SeqID_17081
MAESGDLMREKEGTGRWRLARGPRHDGAVPVKIKEEMQTLVDDAGIFTEVSGTMQVSD

SEQ ID NO: 60457 - protein, 69 aa, Zea mays
  Coding DNA Sequence Number=SeqID_17082
MAVEGMGKLAGGARRAVAQAHGRATGRGVDGWGHWAENAWMRGRARESADRAGSSVSGRGRAGGLGLVA

SEQ ID NO: 60458 - protein, 69 aa, Zea mays
  Coding DNA Sequence Number=SeqID_17083
MQAACNCTKGAHPFDFDASSLEVQAHTSCNRRAGYYVREAAPPPTPGLGKRILRKGSFSAKETGPEPSY

SEQ ID NO: 60459 - protein, 151 aa, Zea mays
  Coding DNA Sequence Number=SeqID_17084
MGKSNKRKREPTPPSEDFGDSEYSEEEFSSESEGSPAPVSPPASSDDSDDSQGIAAEVWTYIRAVERSGLEGSDESEFSSEEEDSDGGEGEEDDDDDDSGDGDGDGSGSGGGSGGKGSTRGGSSTGSTRGGSSKGSTKGGGGKGSSSKASG

SEQ ID NO: 60460 - protein, 116 aa, Zea mays
  Coding DNA Sequence Number=SeqID_17085
  Subcellular localization annotation: CTP_CleavageSite=64; ConfidenceScore=5.17e-01
PIKRSSFGFNKGAKRQPKAPLVWGHRTVSGAPEDSNLNSPPSGISRGTRAIIHRTVRCTPDSVRCSKEEPPPELACLGNSLQPLRYNSPDCPVYTGLSGVTAEQRLFRRQRLPAMH

SEQ ID NO: 60461 - protein, 117 aa, Zea mays
  Coding DNA Sequence Number=SeqID_17086
MEAAGDGGRRRAVATAGAGNRQEQRSQSAARKEKRPLAWLGLEAVFLKRDMGTPDSLQWLSGAHRTAHSRCPVNHRTAHRKRGTSRAAAGAPDIAQCSVRCTPDCPVRQALDAIQGI

SEQ ID NO: 60462 - protein, 120 aa, Zea mays
  Coding DNA Sequence Number=SeqID_17087
  Gene Ontology: Mol. function=protein disulfide oxidoreductase activity; Cellular component=cytoplasm; Biological process=cell redox homeostasis
  Homolog annotation: Hit_ID=Q5SMY5; Match level="QueryCoverage=99%, HitCoverage=99%, E-value=1e-37, Identity=72%"; Hit description =Monothiol glutaredoxin-S2
  Pfam annotation: Domain name=Glutaredoxin; Domain location=34-93; Score=33.4; E_value=8.3e-07; Accession=PF00462.15; Description =Glutaredoxin
MQAVGIRRGLTIDPAGEEEAPAARVWRLVRESPVVIFARRGCCMAHVMRRLLAAVGAHATVIELDAGAAEEQELAAAVEGGGVPALFVGGDPVGGLEGLMGLHLSGRLVPRLRELGALCA

SEQ ID NO: 60463 - protein, 589 aa, Zea mays
  Coding DNA Sequence Number=SeqID_17088
  Gene Ontology: Mol. function=protein binding; Biological process =plant-type hypersensitive response
  Homolog annotation: Hit_ID=Q5D0W8; Match level="QueryCoverage=93%, HitCoverage=93%, E-value=0.0, Identity=79%"; Hit description=NPR1 -like 1
  Pfam annotation: Domain name=Ank; Domain location=296-329; Score =22.1; E_value=0.0021; Accession=PF00023.21; Description=Ankyrin repeat
  Pfam annotation: Domain name=Ank; Domain location=330-362; Score =23.9; E_value=0.00058; Accession=PF00023.21; Description=Ankyrin repeat
  Pfam annotation: Domain name=BTB; Domain location=47-161; Score=10.4; E_value=0.00039; Accession=PF00651.22; Description=BTBPOZ domain
  Pfam module annotation: Pfam domain module=Ank::Ank::BTB; Domain location=296-329::330-362::47-161
MEPMDSQLTALALSDSDSASVEGAAADAADADLQALRRLSDNLAAAFRSPDDFAFLADARIVVPGAPDLRVHRCVLCARSPFLRDAFARRAASAGEEEKDKDSYMCKVELRDLLGDEVEVGYDALRLVLDYLYSGRVAALPKAACLCVDEDACAHVGCRPAVAFMAQVLFAASTFDVAELTNLFQRRLLDVLDKVEVDNLPLVLSVANLCSKSCVKLLERCLDVVVRSNLDMIALEKKLPPDVVKEIVDARVSLGLVSPEDKGFPNIHVRRIHRALDSDDVELVRMLLKEGKTNLDDAYALHYAVEHCDSKITTELLDLALADVNHRNPRGYTVLHIAAMRREPKIIVSLLTKGARPSDLTFDDRKAVQISKRLTKHGDYFGPTEDGKPSPKDRLCIEVLEQAERRDPQLGEASVSLAIEGDSARGRLLYLENRVALARILFPMEARVAMDIAQVDGTLEFTLVSSVNLPAEIQRTVDLNDTPFTMKEEHLARMRALSKTAEFGVPVEVGKRFFPRCSKVLDTIMDDEAEMASLGRDTSAEKKRRFHDLQDLVQKAFSEDKEENDRSAARSPSSSSTTTTSIGAVRPRR

SEQ ID NO: 60464 - protein, 117 aa, Zea mays
  Coding DNA Sequence Number=SeqID_17089
  Homolog annotation: Hit_ID=Q1KSA8; Match level="QueryCoverage=67%, HitCoverage=9%, E-value=2e-08, Identity=50%"; Hit description =Putative uncharacterized protein
MAQAFTRLQRKSCMECSRLDRINGTGQPFTLILFHNTVLSLDALAASCVPHHARRRPLASTVSPSPIVVKGCRAAARLGEGCGAHTAVIKLGLGTDVYTASLIIIVLYASGGGRLKA

SEQ ID NO: 60465 - protein, 189 aa, Zea mays
  Coding DNA Sequence Number=SeqID_17090
  Homolog annotation: Hit_ID=A7P6M7; Match level="QueryCoverage=31%, HitCoverage=77%, E-value=1e-09, Identity=45%"; Hit description =Chromosome chr9 scaffold_7, whole genome shotgun sequence
  Subcellular localization annotation: CTP_CleavageSite=39; ConfidenceScore=5.27e-01
MERVSPGNSLPLASLLAQLWPAEEKKRVPVTTPFACCRRCAMSAGAARSVLVVVFFALPLLVSMTHGELRRPPFRLKRFPCVSAPDERSSVANLLCRRPPAAGACRSGPALTTGKAIDGGEHAEQRQQLSRLGSRPPCCDRKCGACAPCKAVQVRAGAGAAAERRLRPRCANYEPVGWKCRCGAAVFDP

SEQ ID NO: 60466 - protein, 519 aa, Zea mays
  Coding DNA Sequence Number=SeqID_17091
  Gene Ontology: Mol. function=calmodulin binding; Cellular component =nucleus; Biological process=glucosinolate biosynthetic process
  Homolog annotation: Hit_ID=A2WLM8; Match level="QueryCoverage=86%, HitCoverage=99%, E-value=1e-129, Identity=57%"; Hit description =Putative uncharacterized protein
  Pfam annotation: Domain name=IQ; Domain location=118-138; Score=27.5; E_value=4.9e-05; Accession=PF00612.18; Description=IQ calmodulin -binding motif
  Pfam annotation: Domain name=IQ; Domain location=140-160; Score=9.7; E_value=4; Accession=PF00612.18; Description=IQ calmodulin-binding motif
  Pfam annotation: Domain name=IQ; Domain location=166-186; Score=5.4; E_value=11; Accession=PF00612.18; Description=IQ calmodulin-binding motif
  Pfam module annotation: Pfam domain module=IQ::IQ::IQ; Domain location=118-138::140-160::166-186
MGGSGKWVKSLIGLKKQPEKEDCKMSNVSVPAQDKLQLPSVHGGGLRGKGRRWKLWRTSSGDQGSMWRGSRGGSQRSAASEASDDASSVAAVPADPFTAAVATVARAPARDFMAVRQEWAAIRVQTAFRGFLARRALRALKGLVRLQAIVRGRQVRKQAAVTLRCMQALVRVQARIRARRVRMSTEGQAVQKLLEARRTQMDILREAEEGWCDSQGTLEQVRVKLQKRQEGAIKRERAIAYAYSQQADGAAKCNPPKLTSNGLVNHSGMLLKHQNLDKGNGNWSWLERWMAARPWENRLMEEHNSSSPDFRSSKNCEDSFGVLGDFSEPNSVKVRKNNVSKRVCAKPPGPTHAHGHHQRLKAQSISSLSTELHNDESSASSSSCFASTPISFTLVASEKTEDSVRTRPNYMSMTESIKAKQKACSAQRTVALKQCDDRKAMSAELKVAQWLGAAFLSCPPVAGCLIVQLLVVRLHLCSLIVAASLFSRCGFVSGRVSVGPGSMNALMTGTQTQDLETQV

SEQ ID NO: 60467 - protein, 57 aa, Zea mays
  Coding DNA Sequence Number=SeqID_17092
MAMWQCSEIKFSGANIDVEEVGGSAEIEKRGVWAIKVEEGNGCHGVHLNVVGETYES

SEQ ID NO: 60468 - protein, 82 aa, Zea mays
  Coding DNA Sequence Number=SeqID_17093
MATATAAPASVARRRIWGHARDGGSLRRDGGSGDTLAMADSCGATANLGTRCGIRSRGHARGGGPMRCARRRCASGRDGGFP

SEQ ID NO: 60469 - protein, 211 aa, Zea mays
  Coding DNA Sequence Number=SeqID_17094
VPKSKINAEWLERDMVSVGVAKVGGVDEEGTGGRVDAHLWHGNTTASTVELRKRQLRAPEAVTVAQHSTRGWGRGWWGSTATPARGRRSDARTSTQHYGTEYGGSEQGRTRWRGHDKRWYRTRRRDGRGGEMGRATGVIACVGGYAPAGAIKIGGVFERSGWGGLPWERGRQVGPICRRDGVGAGAHSGWVVGGTGKARRLRQRATRWARD

SEQ ID NO: 60470 - protein, 156 aa, Zea mays
  Coding DNA Sequence Number=SeqID_17095
MDESEKGDRVHNIANQHPIGETSRRQEYPPKVAATAQEEEATDGHNSPTYYITCFTAKTARTQQGIVRRPRPPGIECPEHNQPTTRGSSRTHTITSNPTTTSKSSTYPTMLTNTIKRSRFYHHRLRITQILYTTTTPHKHPNKKTSLNHHIAESST

SEQ ID NO: 60471 - protein, 204 aa, Zea mays
  Coding DNA Sequence Number=SeqID_17096
  Gene Ontology: Mol. function=peptidyl-prolyl cis-trans isomerase activity; Cellular component=chloroplast; Biological process=protein folding
  Homolog annotation: Hit_ID=Q7XIJ9; Match level="QueryCoverage=42%, HitCoverage=19%, E-value=7e-29, Identity=80%"; Hit description =Putative peptidyl-prolycis-trans isomerase protein
MDNKEAILASIPEEHKEEGAKLYTSLLEEKTGLQTLLKYIKENNPDKLSIALASSLDTVAELELLQAPGLSFLLVCPFSVEERLAGCRYLAPEYAVHRQHSLALNPHLSDPAPRSPPNQQLRRCRHIRAKVEASASTHLALATAVPREDTEVQRRHGGAVRARSLHMVLESGREEDFSSISVDHFNQQPCCIYEISFTCSGYIQ

SEQ ID NO: 60472 - protein, 210 aa, Zea mays
  Coding DNA Sequence Number=SeqID_17097
  Gene Ontology: Mol. function=sterol carrier activity; Cellular component=endoplasmic reticulum; Biological process=steroid metabolic process
  Homolog annotation: Hit_ID=Q10NC7; Match level="QueryCoverage=77%, HitCoverage=34%, E-value=1e-67, Identity=73%"; Hit description =Oxysterol-binding protein, expressed
MTSPSPPQKTNISRSTTMMQTPTDAGNWKWNKSLSCQPCDQEGDSLPGTELKEVGDKYQYTQFAHKINSFDTAPKKLLASDSRLRPDRYALKKGDMSKSGAEKSRLEEQQRAEKRTREAKGEQFTPRWFNLTDVVSPTPWGDLEIYEYNGKYTEHRAAIDGSDVTDETDMNLIRVCQLGHPKRKDYVPWFYGLTQTLKSIRIQATLDLFT

SEQ ID NO: 60473 - protein, 167 aa, Zea mays
  Coding DNA Sequence Number=SeqID_17098
MGCNLLLVPGIREVDMGAPVHNLEVRISKLSKRLLEIFTKITDNMYLMQFNMIMLMFHWEHLVVWLNGCPSGRDDRAVQCNTALVDDRSSSCPRLEVVIDELGRDYLIGGVQFLDRIQVPVFGPLVQELFHLHVYSVHSYNGNRQISISFFGYRVIIRFRCNARAPT

SEQ ID NO: 60474 - protein, 1601 aa, Zea mays
  Coding DNA Sequence Number=SeqID_17099
  Gene Ontology: Mol. function=nucleic acid binding; Cellular component= nucleus
  Homolog annotation: Hit_ID=A2Z3D4; Match level="QueryCoverage=97%, HitCoverage=94%, E-value=0.0, Identity=46%"; Hit description =Putative uncharacterized protein
  Pfam annotation: Domain name=GYF; Domain location=1088-1143; Score =39.3; E_value=1.4e-08; Accession=PF02213.7; Description=GYF domain
  Pfam annotation: Domain name=Plus-3; Domain location=803-895; Score =103.0; E_value=8.9e-28; Accession=PF03126.9; Description=Plus-3 domain
  Pfam annotation: Domain name=SWIB; Domain location=665-740; Score =86.4; E_value=9.2e-23; Accession=PF02201.9; Description=SWIBMDM2 domain
  Pfam module annotation: Pfam domain module=GYF::Plus-3::SWIB; Domain location=1088-1143::803-895::665-740
MEVATLTTPDVMLGEDYKDIEAIEGQKDYETCYGGGGSVIVANELVGISEDPNQPDIATADEPEEGADVEGQTNDISAAVSTSKLVDDPMEVGMQTEVSAAADDLIEVGAALVSSAEDCTAVAACLVNDDCNIIFPGGVHRSDDQTDQEFGGNSLDADEVALLVNDIQDDSARMDMDVSAHGDVHAQDRESSQLDVATALLNEVGTELVEAGDHAVQECTNMDMRIQAGDNNEAERVGTIADTATNEEHRHMGEVTMTRDDSEKHDVAGGVDVPDERIQMGRGGLPGDDNEQKEVATADEDRVEDEGMQVDAVNITGDMVEEGRIAVEYIAGEAVIGEGGIDVPEEKAAQIDRAGNDIPEEEGLQMGEAGLIGSDNGLKEAVIADHDGVEVNAIPTEATGTTNDDDENNTIVGEDVAEAVNDITGDDVPDEEAAHMEDDDDDEPPPLVEKKGGGRRKRGRPSSKVQGVVKPSVKRKDEEEVCFICFDGGDLVICDRVALKPTILLVLTGMMTSSSQRVGGTVEVDFDDKGSWWYLFKDYWLNLKTNLSLTVEEISAAKSRKSGELPDTNDEVNSESSSGRNLESNTSKKRGRKRSKQAAINEGSEGKASTRKSAKRDLSGIHDVQTSSGKKVRKLSRRSLSSQHSSKDSESVGTSTSSAEEDSWASKELINFVAHVRNGDKSVISRYDVQPLLLDYIKRNKLRDPRRKSQIICDSLLQSLFAKERVGHFEMLKLLESHFFMSEVSPIDADENHGGVVDPDPSQDADGNSEASVVMSSEKRRKSRKYDLRHQPNLDDYAAIDNHNIGLMYLRRNLMEELIGDVDTFDEKVVGSFVRIKIPGTGRSAEKYKYGKRTTDITLEILNLDKREAVTIDIISNQEFTEEECKRLRQSIKYGFIPRLTVGEVQEKARVLQTLKVNDKLRLLSTPEERARRLNEELEIHADPAMDPYYESPEEQEQEIEKSSFNKSRGSFLRKDGNPVPPGKGDGRNAAQRDSKTNWESNRNTWAESSSHMESPLPRRSTFSSQGESAGYTSKSESPNTGAQTVKLEGTTRSAPQGSPGASSGILANNICSGAKTAPQSAINESEKIWLYMDPSNKIQGPFSIIQLRKWNSNGYFPPSLKIWKASEKQDDSILLTDALAGKFEKDLPPWEPPHVSLFQINKTPLEQSTIAGEQTPKSVVAKSFSSSNQRHGYSSTNLGTTMIHSGTQGYYGMQNSHAAYTSQHSLTGSWNATSSQFGVAVNPVTPTQPAMGSFSGQNIVSAENMGHLTPGTAPAAANAEMVNSDLTSQKQISYLPQTDGILADDIESKSGEDVSHGKVSSSAKAIGPLGAQLGQGQLNTQQHEADIKNQMSSTDVSNSTMPSQMMSTPSAASVQPSLSTIAGSDNQSSGWAVPTQVVNTSGQSQITGNLTWGNTPQGDASLGWGMMGQNNMNMPWVASAQGASGYNMGAAMPTQPNAVPNMGWLPNPGNTNMNMIWAATQGQGIPNAAAMMGGQMQGVAVAPWGGVAAGNANSYPAWGNQQVGNMNQNVRWSAPVQGNPSQENNNMNWNAPNGNPNNWNNQQRENEGRHSGHRGAFSAGDSGRKSWKPRSGADGGSWGT

SEQ ID NO: 60475 - protein, 117 aa, Zea mays
  Coding DNA Sequence Number=SeqID_17100
MAEGSSSTLGIDDTFGEGLLRESGPSRRLGWSTPASVPLTDDPARLRPTRFPFRANLASVHADTATPGLGSSKSGRGVPLIKLEKPRTTRPAEPRDSYASGIWIPHSSPLHGATHAW

SEQ ID NO: 60476 - protein, 75 aa, Zea mays
  Coding DNA Sequence Number=SeqID_17101
  Subcellular localization annotation: CTP_CleavageSite=27; ConfidenceScore=5.09e-01
MVVIAYSGRSGGRPRPAATPSRSGAVLSSEKAKIQPPSSLRVIQMMRLVDAMHTDMEVVFEVLKSLEDVEELDPE

SEQ ID NO: 60477 - protein, 179 aa, Zea mays
  Coding DNA Sequence Number=SeqID_17102
  Homolog annotation: Hit_ID=Q6QP51; Match level="QueryCoverage=62%, HitCoverage=55%, E-value=1e-10, Identity=38%"; Hit description =Putative growth-regulating factor 1
  Subcellular localization annotation: CTP_CleavageSite=43; ConfidenceScore=5.11e-01
MMKTIANSMKKTDVLLVVKKVHFTPSLTDLTGKQRRSPRSDCCANRPGKADDSRVQTRAQQEALPRPTLGLGLGRRSPPRPTPRLGLSLGLGRNRVLARPRASALGEVSASPDLGLDPSRTASCASTGLKHFSDGHVIAYTGLKHFSDGHVIAYTRLKHFSDSHVGMAFLRGEVARGTS

SEQ ID NO: 60478 - protein, 300 aa, Zea mays
  Coding DNA Sequence Number=SeqID_17103
  Subcellular localization annotation: CTP_CleavageSite=44; ConfidenceScore=5.19e-01
ACRGHARGLLGPAPCQHPPAADRPACLPLAPALPAGSPVSRRAPAAHPAPPVRRSGRRELARPPADLFCGVQKRGRGQYTGLEGAGEVLYLKAGSGDSSVAAMTQRRPGATVADLRGCTEDGGGGAVASSTRDVGAEKAAARSSGGGYARTTGLTGRAREQKERGKRGVTSMPDAPPVGALGPLTRSIVDEALPPAWPWLPRLFRRRGRRRAAVEGHELKTPEMEHRPGLERLLETAHLELDGKLFVNTQQSPTWRANCWRFETGGSLGRRVNVAACPSPDGSSARPGAKGGERGGRRPA

SEQ ID NO: 60479 - protein, 144 aa, Zea mays
  Coding DNA Sequence Number=SeqID_17104
MGQRTLAFTKLLIRDFLCNLLGKHRLLVVYAGPNGREAGCGGSGPGPLDLRRTARIGLGLIKTGPPDLGRTTGIGWAALASPTALAPNLLRRGIKRGRRQYTGLEGAGEVLYLKAGSGDSSVAAMTQRRPGATVADLRGCTEDG

SEQ ID NO: 60480 - protein, 143 aa, Zea mays
  Coding DNA Sequence Number=SeqID_17105
MGKGTKRKREPTPPSDEFGDSEYSEEEFSSESEGSPAPVSPPASSDDSDDSQGIAAEVWTYIRAVERSGLEGSDESEYSSDEEDSDVGDEGEGDDDDDDDDDDGDGDGSGSGRGGGDGSRDSTKGGSSKGSTKGGGGRGRASG

SEQ ID NO: 60481 - protein, 156 aa, Zea mays
  Coding DNA Sequence Number=SeqID_17106
MAFRPISLSGSRECDEWREQGVWRVRRVAQREGGGDQSEQGRQQAGSVASTHLVLPNPYAMSVLPPAPAKSTDAGNPDLQSRPEAMPRLDLSIADPPLPPRLTLCSATVCGPSCIPRAGNTGEIRGRGHLNFCSQSSPRTPPLSLGRSCNPAAEST

SEQ ID NO: 60482 - protein, 579 aa, Zea mays
  Coding DNA Sequence Number=SeqID_17107
MPSSSSSATATPPAAASSEETLSNVMVEELRAGDSVEFGVSRMTSARIEDMQRLGYFGGGVARAPGTEEVPEPEGELVVFEAFFAVGLRLPAHRVFELNQLPYDGYPGQDEADRRGKKPAVETGGDPALAAATSSKKRKLVMDKDRQGAARKRQATVRVHEARPKRQRGTAKAEASGGGKPPLPAKVGASTPGKAPEATVGAGGPKLSKVVPSVSGVAEAAKAARSLPPSGKRVADFGTEINVEDYLGGSDEGPLALVVPGAAIATAAPATRAGAETLGAGGEVSALALVRDEAGVATRRLKGATEALSRATEALSQVADFTSRTASGALTAALSAEVERLRTLMRTLSVRSRPPTASAANWRRRWPPLRRRRQTSGAQLTEERREANKAIAKEQAAQAEARLARAEGNIAKELAGELQRRLAAFESRAEGAEAAARAEAERTRTQLMTSYRELGVRTGDFEVPERKAGLRCLEWVQEELQELPTVLAGLMSFTSLVTCEAAMNTLSREGCRHYEALDQVDEDFGRDIFEVEDPVVKESAGALYDRMWGSYGREVVRARAEAARAQAGARRAGWVTLGR

SEQ ID NO: 60483 - protein, 281 aa, Zea mays
  Coding DNA Sequence Number=SeqID_17108
MTEDPLAGHMPRHGIHFSKHFCKTESLIIEKPYLDSLNQHTLESLFFSRVRKLQIFLASALRWCQKKNTRNDAGGPGPPYRTFKYQLSGGVFASLGIVIILLCTPRITLLAPRHDNSSRGSNDPIGDLEAEVSRLQVELRRRTAIWVVDGDRINELRRDVRHLRYQLTDRDLALDWVVQSRSLAWDKEQKAQVRVVELNLAVEDLQTYCNTLHEEVHVLYSQLHPSEPTNPVESEAGPSHVAGHALGGELDLFQPPPSMRLVDEWSPTPDDEAAKSNGKQE

SEQ ID NO: 60484 - protein, 55 aa, Zea mays
  Coding DNA Sequence Number=SeqID_17109
MTHLKKKASIKGEMKLIKKRRMNKRFKIKDYLTQESTKQFNEITLSTPYLDRGCT

SEQ ID NO: 60485 - protein, 63 aa, Zea mays
  Coding DNA Sequence Number=SeqID_17110
MWGQKGASQSFVERVDGYNRAPVDVNLWQLLVVLPSGAKPMAIVALASLGRGTGSRHRESVLV

SEQ ID NO: 60486 - protein, 120 aa, Zea mays
  Coding DNA Sequence Number=SeqID_17111
MAHRSVQSTRAGGRPKSGEVDLRLPVKFCRVRGLGKLHGPMAELTEALVRLGGDWSGLATVAEALAAMAGGKELAGDKEGCLAGDGSLEDMVAGVTWPSILPPGWTVLWDPTSAEEEHEE

SEQ ID NO: 60487 - protein, 119 aa, Zea mays
  Coding DNA Sequence Number=SeqID_17112
MSRQLQGVKTIEGGQPVESNRLDGILSLVSERLGVQRTPKTRSPTNASLAIRDEALGSSSPYSGALGASRTAAPCTGQASCNRLPEVPPTRYGENPLVQVRSCGTVRSLRSRIREKSSM

SEQ ID NO: 60488 - protein, 498 aa, Zea mays
  Coding DNA Sequence Number=SeqID_17113
MRKKHGFMPKIHTCSGPDSHNEQTPALKVPLQTELRFRPRGYEQPPHRRAYGATSSGRLASDLFSSSHGPRTDAATRRLSFASPLKGREPDIKAKEPEVGSQVALTASTAEKLSPAATTSAPTAASACPPTPHQRTPVAPKRTGRSWKKRWSADPARELELRLASLSAPARMMKILEAEGRGRGRSPACFSSPSNWWSPSWVTTGERMQPGCLMKILEAERWLKAVADRAFSNTLQGPPPTTRGLGPTRHASWPRAEEAKPPRAVRVTAQRLQALLHFRPDQRVKERTAMQAACNRTKGAHPFDFDASSMEAQAHTSCNRRADYYVRETAPPLAPVQRLLDCGTGAATRGNLAHDPTVPTEHIDHGSVSRGRRRGGRYSQKWAGSNGGGRRAEAAVKSSASSRPLLGQRESPLPLHEDDAPAKQATLHLRHDDHVKKGTEKGDTPKRILLREGSRPRAPLLIRGSKAGPSEGFNNRLRALGLRARYWSEVRRQAPEGF

SEQ ID NO: 60489 - protein, 103 aa, Zea mays
  Coding DNA Sequence Number=SeqID_17114
MVQRVTRSTCSGGFTNSGERDYTIPVGLVLSSSSGKLHGLLGKLSEGSDRAEVGGKGFGHGGYPRAALAGHGEVTGAASELGRVRRSAGGGNGEDDRARGWAL

SEQ ID NO: 60490 - protein, 232 aa, Zea mays
  Coding DNA Sequence Number=SeqID_17115
  Subcellular localization annotation: CTP_CleavageSite=8; ConfidenceScore=5.15e-01
MGQATHPSASCGSEDSVLWSEPSSSSSSSGGRLQLGNRGAAPHGLHLLLRWGGRALLLPLLTLVLLLLTQAVVQPLQVTRLTGHGAAQRMLRKARWQERDHRLTSSVSKTSHLQKTPQAEAVVTSSASSRPLLGQREDPLPRCEDDASAFRSSNGSRTHNGRPVNHSSRRINSAAGQAAPLAGEVSGKGILRKGSFSAKEAGPEPPLLIRGSKAGPSEGFNSRLRALGLRAH

SEQ ID NO: 60491 - protein, 152 aa, Zea mays
  Coding DNA Sequence Number=SeqID_17116
MEAPPRSRSSLSSEVEVEFEPWVGRGGDRRPRPRLSPSLGSGEAQFVVFWGRARVQALGSREAEFVVFRGRARVRALGSGEAEFVVFRSRGQVRALGSGEAEFPMAPEAGLGRCQPHSVEWHNSRSDAGGAVFLSGRSVERRSDCGRFGSVD

SEQ ID NO: 60492 - protein, 151 aa, Zea mays
  Coding DNA Sequence Number=SeqID_17117
MASDIGAEVVAAEEVLVADGVTATIRAPGLRLFGFDSLSSPLEWGRGRGHCCSGVRPEAIVVAVWPPGAEVVVAATGAGGGEPPGAMSPRGPPNVGGCSYPRGRNRSSVCNGTLNAGVCSLWLSGPEHVCIFGVKSCFSLIPSTRTRLSAN

SEQ ID NO: 60493 - protein, 123 aa, Zea mays
  Coding DNA Sequence Number=SeqID_17118
MAERYQLPRSCVPPTMRRKDGGYPPSGGLEDGKTRRIREEEDMVAFRKGDRERGIPRKGSFPVKEPGSEPPLLIRGSKAGPSRGSTVASDRVGPTPTTGQRFEGRPPEGLHGRLRLLGLRAHY

SEQ ID NO: 60494 - protein, 96 aa, Zea mays
  Coding DNA Sequence Number=SeqID_17119
  Homolog annotation: Hit_ID=A3AA52; Match level="QueryCoverage=58%, HitCoverage=9%, E-value=2e-19, Identity=75%"; Hit description =Putative uncharacterized protein
MQNLTQYQAVERMNPMLVPTDLDVGTMVTFPVLCQCPAAAENATTLITYVMQPRDTCRLICLRLICCRLSLHLISYRLICLVICHNDSILCRSGFC

SEQ ID NO: 60495 - protein, 93 aa, Zea mays
  Coding DNA Sequence Number=SeqID_17120
MGLRASPGIKEGGRPKSGEDDLGSPVKFCRVRELGKLHKLWAKLTERLARLGSDWSGLAAVAKARVAMAGENELARAKEGRLASEGFADWIKR

SEQ ID NO: 60496 - protein, 136 aa, Zea mays
  Coding DNA Sequence Number=SeqID_17121
MKDELDEEGRSSREQRGLDGVQARLWGAGEWARSSVDGEGRRAWAGRRVLAGRVGRVLGIARRSRARLSRLLDAAGAWAGAVAGLGGCTCRGARQAPAWRVLQINVFASVCACSSQDAKVTWTKALRKASPKKKTL

SEQ ID NO: 60497 - protein, 127 aa, Zea mays
  Coding DNA Sequence Number=SeqID_17122
MQIIERKCEAQKGARIRSNLNFDVVLWTVGETTLDKLTDQPGNLIPLDRAGVPDLSSMHILFVPSFFSTNNTDAAHGEEGGLPGCSDAGIDFLLAGYSDGTAAAEETASSTAGGSNTDAGAGAGDLA

SEQ ID NO: 60498 - protein, 82 aa, Zea mays
  Coding DNA Sequence Number=SeqID_17123
MVLPLVPFSSSLPRTPGRLPLPEVADAGLHHAAEGGAGAARAIAESHSAGPSAPARWEMEDVTPQVSISCYVGRLILISDAQ

SEQ ID NO: 60499 - protein, 174 aa, Zea mays
  Coding DNA Sequence Number=SeqID_17124
  Subcellular localization annotation: CTP_CleavageSite=47; ConfidenceScore=5.62e-01
MKLWKETSRSSKTTTSSRRGLAATPSRLPVKAAFIYVSFSHFDLFPRSGEAVTPPRSRLSPSPGVGRGGDRLPRSRRGPSPGVGRGGDCLPEVEAGAEPRGRARRRPSSRGRGGGQAPGSGEAELPMAPEAGLCRCQPHPGGWHCSRSRAGGAVFLSGQSVEGRSDCGHFGPTD

SEQ ID NO: 60500 - protein, 279 aa, Zea mays
  Coding DNA Sequence Number=SeqID_17125
  Gene Ontology: Mol. function=selenium binding; Biological process =cell redox homeostasis
  Homolog annotation: Hit_ID=Q53NN8; Match level="QueryCoverage=27%, HitCoverage=47%, E-value=3e-32, Identity=89%"; Hit description =SelT/selW/selH selenoprotein domain, putative
MGICGDLSAERDRLIARSHQYDLLHMIYGKNMWNCETSETHNTRAQTFGARSSMQHPNKPPICLKMCHFYCRHEIVNQRQRNSAFWLTHTVKALPRSLLVCLCKPHPPYLQRPAHIFKVENAQPTILKRPLHFVPRNQTIATIYLLKRKVRQCLDARQNRCLPVLSVILLSYLIPTTNTHDTPSFNMQKVQSRRLALSLSSTQCRQFKIRAQKVKEDLESYVSGVSVIINPQKPRRGCLEIREEGGEVFISLLNMPRPFTPMKKLDMDKVIKDIAKKIS

SEQ ID NO: 60501 - protein, 104 aa, Zea mays
  Coding DNA Sequence Number=SeqID_17126
  Subcellular localization annotation: CTP_CleavageSite=22; ConfidenceScore=5.29e-01
MQSLCARALPFSRARTHHLTARGTHDVSVNRLRQQCAARKPPRARELRLPLRTSLTNRSDHYVNGNMERPPGKTVLPQGYNGTPLASGGLPYPKGARAVGEWSV

SEQ ID NO: 60502 - protein, 596 aa, Zea mays
  Coding DNA Sequence Number=SeqID_17127
MHRILPPSEPPDGERPRCLRLVVGGAQPYRGGHPSAIARLQGFSSGSPAAFPHRWSPRMVTTSSIVGRSKPGCGLCPALSFKDLHHPCWGGGRGEPELYLPYGPAGHLFLQHSGERALTGLAEGADFDNAGPVGRRRRQLHHAWLAGSAGSGASSGATSHRWGRAWLSVRRTGGCCAMRTRGPPKTSHAPRAVFMFLGCLVLTPGTTPLRGGRCSPIMEDLSGDLPVGRWLPVVSAEEVAAGEGFSADETVSATRGLTSGSLALIACPRPSSGDTGEGLVAAASALRSSLLLFSRPERRSLSLLLQWSAASHPESPSARSALPPKASLAQLKNPRLLCDEPELEATVSAWTEAESAREEASLAREHVAFLAEEVQRRRLELGQVIRWRDQPRSQAAEAMSRADVLRGQLAEATERPVEILPPASSSEAGPDSSEGGDDAEGAAAPFVDDLFVGNRIIYPSKSYFSRKVTSEESLGSVGLAAYVYSVVFRIHLSKQSKSAKDVLAERLFPRKILTQRGKRVSGTIIRGTLKAPNSQLAVRPCRRHHRKLRFARPRARTRAKPRKTANSAPPDPGLGHGLSPGRWRTPLRPTQGSDTG

SEQ ID NO: 60503 - protein, 76 aa, Zea mays
  Coding DNA Sequence Number=SeqID_17128
  Subcellular localization annotation: CTP_CleavageSite=53; ConfidenceScore=5.53e-01
MVAQSVRGGGPPAGGRNSMTSTRGGGGSSIQSSGGGSQVGGGGFPIQRVSDPCAGKRRRPRGPEEAALPRPRFVHQ

SEQ ID NO: 60504 - protein, 146 aa, Zea mays
  Coding DNA Sequence Number=SeqID_17129
MTDRQADPTRRGGIADQPAHRTNIAEQRSEAGPWTNLPTEQPSEAGPLTNLPAKQPSEAGLPTNLPVEQPSNMIASPQASTSTEGKSYNTLNLGSRSHGQNPATEFVGSPSLALAYFDDPRPTGTHARLVSGDFTTADGSGVAQSR

SEQ ID NO: 60505 - protein, 218 aa, Zea mays
  Coding DNA Sequence Number=SeqID_17130
  Gene Ontology: Mol. function=catalytic activity; Cellular component =nucleus; Biological process=regulation of transcription
  Homolog annotation: Hit_ID=Q6H878; Match level="QueryCoverage=82%, HitCoverage=87%, E-value=2e-32, Identity=45%"; Hit description=TCP family transcription factor-like
  Pfam annotation: Domain name=TCP; Domain location=24-211; Score =126.1; E_value=1e-34; Accession=PF03634.4; Description=TCP family transcription factor
  Subcellular localization annotation: CTP_CleavageSite=60; ConfidenceScore=5.02e-01
MATTRDVSAASAAAMFHVYQPMPMPSTAAAPAKAGKKEGGKDRHSKVNGRGRRVRMPIVCAARVFQLTRELGLKSDGQTIEWLLRQAEPSIVAATGSGTTPAVFVSSSAPSTSSSSHSHYQQQQQQQQATVVVLGKRPREEGGDAAAASVPAFWAAAPRTTAAADASWGFSPLEAQQAAAGYVPMAQAQQQQHHHHHLNLLAALSGAARRAEAAEETR

SEQ ID NO: 60506 - protein, 364 aa, Zea mays
  Coding DNA Sequence Number=SeqID_17131
  Gene Ontology: Mol. function=hydrolase activity, acting on carbon -nitrogen (but not peptide) bonds; Cellular component=plasma membrane; Biological process=nitrogen compound metabolic process
  Homolog annotation: Hit_ID=A4ULE1; Match level="QueryCoverage=82%, HitCoverage=81%, E-value=1e-161, Identity=94%"; Hit description =Nitrilase 2
  Pfam annotation: Domain name=CN_hydrolase; Domain location=42-223; Score=127.2; E_value=4.7e-35; Accession=PF00795.13; Description =Carbon-nitrogen hydrolase
MEKGRDDREGATVLEKGGCDGEGRLRWRRGIGAGEGCMLEFGLACGGWYGHHGWGWWQCGGRHDMVAREAFIGGYPRGSTFGFGISISIINPKDKGKEAFRRYHASAIDVPEESTGPEVTRLAAMAAKYKVFLVMGVIEREGYTLYCSVLFFDPLGRYLGKHRKLMPTALERIIWGFGDGSTIPVYDTPLGKIGALICWENKMPLLRTALYGKGIEIYCAPTADSRPVWQASMTHIALEGGCFVLSANQFCRRKDYPPPPEYEFAGLGEEPSADTVVCPGGSVIISPSGEVLAGPNYEGEALITADLDLGEIVRAKFDFDVVGHYSRPEVLRLVVNDQPQLPVSFTSAAERTPAAKSDIDTKSY

SEQ ID NO: 60507 - protein, 155 aa, Zea mays
  Coding DNA Sequence Number=SeqID_17132
  Gene Ontology: Biological process=transcription
  Homolog annotation: Hit_ID=Q5Z6G3; Match level="QueryCoverage=26%, HitCoverage=10%, E-value=3e-09, Identity=75%"; Hit description =Putative RNA polymerase I, II and III 16.5 kDa subunit
  Pfam annotation: Domain name=PHD; Domain location=64-108; Score=-7.2; E_value=0.092; Accession=PF00628.20; Description=PHD-finger
MCMQLDVATEVYSMRVGDTFNMVLALTLNLDRSTDTGYYTQIHYYEKYFNSIYSSHVAGVGDLLCDTCGSGDLLLYDRSHHTFCLPPIATKVPIQSPPHPATPPCCQRPRASQLDTSSALPLHRKPSASRLLRFQSGLFSAQLIPPPFPQTRFQD

SEQ ID NO: 60508 - protein, 685 aa, Zea mays
  Coding DNA Sequence Number=SeqID_17133
MDKDRQGAAQKRQAAVRLVEARPKRQRGAAKAAAPGGGKPPLSAKSGAPASSKAPEATAGAGGSKSTKVVPPAGGVAEVAKAAQALSLSGKRVADFATNISVDDYLGGSDEGQLAIVAPVAATTTAAVVPKAKGGALSAGGEASAFTAVRDEAGAASRRLEEATEALSQASRRLKKVADFANRTASGALTAAVSAEVERLRTQHADAVREKSAADSKCRKLTDKVVILEKEKADLRRQLAGERREINEALAREKAAQAEAKLARAEGNISRERAEQLQERLTALESRMERAEAVSRAEAERTRKQLMDTYRELGAGTGEFEVPGREAGLHCLEWVQEELQALPTIVEGFMSYASLVTCEGAMNALSREGCRHFEVFDQADEDFERDIFKVEDPVVKESAGAIYDRMWGAHGREVVRERAETARAQVARGERVDDFGALNSASPEPEPTPAEAVSGAALEPTPETAEDAPDASASAAAGEDLPPEVAEGAPDAPAAAAPSAEDPVVVAETTAEATAEPAAEAPATSGPSQVQDFGPAHATATTKFLAASTAEGGNECGGSASESFDFADSGSSVEWTEESSEEDLDYFAALDVATAEASPHAADAGDVPGPSTGRRRRRAVAKRRVSGAEGARLRVSRAGRRELLSLPAAESTGEGELRSLFAGEELRIILFNYREMGIIPKVEPM

SEQ ID NO: 60509 - protein, 70 aa, Zea mays
  Coding DNA Sequence Number=SeqID_17134
MYNGSSSLISCEKQTIRIKFLSLQVTALVPTITGMGDHVSGRVRGKVCGQVHSSTRLTDLPYFSDLITLR

SEQ ID NO: 60510 - protein, 73 aa, Zea mays
  Coding DNA Sequence Number=SeqID_17135
  Subcellular localization annotation: CTP_CleavageSite=47; ConfidenceScore=5.32e-01
MAIGGGAWRVGAGRHSRGGPVRPPLPRTQFRSFRLSHPPRRETWPPGADQPQSNMEINPYYERLLATVATGLA

SEQ ID NO: 60511 - protein, 276 aa, Zea mays
  Coding DNA Sequence Number=SeqID_17136
  Gene Ontology: Mol. function=catalytic activity; Cellular component =nucleus; Biological process=regulation of transcription
  Homolog annotation: Hit_ID=Q5JJP7; Match level="QueryCoverage=27%, HitCoverage=25%, E-value=1e-21, Identity=68%"; Hit description =Putative transcription factor PCF3
  Pfam annotation: Domain name=TCP; Domain location=127-261; Score= -10.0; E_value=5.1e-07; Accession=PF03634.4; Description=TCP family transcription factor
MTVLHHSHLPTDTKAGAPVTKQKKGSESTKPDLVCFLLPRLGGSWCLCVSVCGDGPQVPPPPPLNKTEPTTATTTTTSTAQQQQLDPKDYHQQQQPAQHLQIQIHQSPQQDGGGRGKEEEQLQVVAQPGERRQQPLAPKRSSNKDRHTKVDGRGRRIWMPALCAARIFQLTRELDHNGEREDMERNRVRAWRLSSSVVARTAAGAAGAGRGIAGGGMRPRILPPARYGGGIGMEEESRDGTGRPVFAAGMAAGGSWQTSGRTGLGSGGSLQSSLNS

SEQ ID NO: 60512 - protein, 121 aa, Zea mays
  Coding DNA Sequence Number=SeqID_17137
MACWMTGRRLAVNHSASCYWLVEWRCRAYVVGPAAGVSSGTQQAARMQGSSGAGNHGQEQERVWLSRAPRCGDGCGVSPSAGFLPSLFAEPDHRACVTWQGEVPGSQFPHFHQHQHSADTF

SEQ ID NO: 60513 - protein, 529 aa, Zea mays
  Coding DNA Sequence Number=SeqID_17138
MGTEHGVSDELQAGPTRSEAAVEPFGGPAFEPLISKEARSLVPSRGRVLFGRRRSVARFSCQKRRLSCRGVNATGRVHPARRLRDAWAWASTLACRGSEKRVHLARLHAACMAARLFRPLVWAKVEAPTPQGRTLGCVGEDSARDGWRRKQGEWPLKGGRSLSEGDHVFSLPYASRLSTFQAPGWGMPAVFSPYRWRNATPWELVPFSHRSASRIFIMQPDCTPPPAVTQDGDLQLDGGGKRAGLRPLPLPQPQGFSSPRLGRGVCRVGVGPCVGGGPLLHSVIGGKGGRRPWRRQLHRAWLSDASGFGAARSAGVCHDSLKRGLLAAASALRSVLPLFGPLGQKSSSSPLLEQLGCPSAGPTPESISRGLGSGWRPWKMVGRGLWGNRPSRLLGPDSRRSPWQRLPERDDDVVLQSGDPQTASPSEARSDLAEGVVDAEGAAAPFQRQDPSLQDQSVLLRVPSAAAEARIHTLAVLDVCTGESCFSRKVTSEKVMSEVSVSRRRRSPSARSALAAYVYSVVFRIHFSK

SEQ ID NO: 60514 - protein, 168 aa, Zea mays
  Coding DNA Sequence Number=SeqID_17139
RAKGIPKGSLVWRTGLSGVPPDSVRCTRGLRAELLSLGNFQSRRAIIHRTVRCTPDSVRCYKRTRLWNLAASGIHDGRSAIIHRTCPVYTGLSGVTAGQRLLRHQRLPARALNARQRAQKSGTPMLAHRTLYSTCPVRHRTSKRAQKIELQRSEPNDFGDVAGAPDMS

SEQ ID NO: 60515 - protein, 200 aa, Zea mays
  Coding DNA Sequence Number=SeqID_17140
  Homolog annotation: Hit_ID=Q2QSP4; Match level="QueryCoverage=27%, HitCoverage=16%, E-value=4e-07, Identity=41%"; Hit description =Putative uncharacterized protein
  Pfam annotation: Domain name=zf-C2HC_plant; Domain location=38-79; Score=10.3; E_value=0.0026; Accession=PF07567.3; Description=Protein of unknown function, DUF1544
MADGWLPGQAYDRQHRRAGCRGRETCQMKIEIKKEKEIESGCTKRRETKSGGDGTRLKEHLAHRGKNVKKCRSVPPDIKAYFQLDIDKTKENKSSRFRQQLRVDGGSTNPFLGTMSMRMNLKQLCISHVLSTNLVRGLVQGMIGAWWILQPEGMSHPVLEGKPNANHPGLARPLFTPEVIGQGFPYEAFTKIPPGAGSHP

SEQ ID NO: 60516 - protein, 263 aa, Zea mays
  Coding DNA Sequence Number=SeqID_17141
  Gene Ontology: Mol. function=receptor activity
  Homolog annotation: Hit_ID=Q5S1T9; Match level="QueryCoverage=69%, HitCoverage=82%, E-value=1e-60, Identity=69%"; Hit description =Prenylated Rab acceptor protein 1
  Pfam annotation: Domain name=PRA1; Domain location=47-200; Score =227.3; E_value=3.4e-65; Accession=PF03208.10; Description=PRA1 family protein
  Subcellular localization annotation: CTP_CleavageSite=45; ConfidenceScore=5.65e-01
MASAPTPPPLLPVTNPAPGSSPAAAGGSDAPIATPAFRLLLSRLSDTARRSLSDRRPWGELLDRSAFSKPDSLSDATSRLRRNLAYFRVNYAAVVAFALGASLLAHPFSLLILLGLLAAWCFLYLFRASDQPVALFGRAFSDRETLLGLVGASFVLLFFTSVASLIISGLLVGGALVAAHGAFRVPEDLFLDEPNAAPGNSAAQGLLSFLGAPGSGEALALASFIDDEKKLGDRQFDLWKQYYVATCVAVFGKLRRSRRLDAV

SEQ ID NO: 60517 - protein, 154 aa, Zea mays
  Coding DNA Sequence Number=SeqID_17142
  Gene Ontology: Mol. function=transcription factor activity; Cellular component=nucleus; Biological process=regulation of transcription, DNA-dependent
  Homolog annotation: Hit_ID=A2Y5N6; Match level="QueryCoverage=94%, HitCoverage=75%, E-value=1e-17, Identity=34%"; Hit description =Putative uncharacterized protein
  Pfam annotation: Domain name=AP2; Domain location=9-60; Score=76.7; E_ value=7.4e-20; Accession=PF00847.11; Description=AP2 domain
MGGPDNTRHNYRGVRQRRWGKWVAEIREPNRGKRHWLGTFDNPVDAAVAYDRAAVSIHGAHAHLNFPCSAATTADASLEHEAKPMVAAAALGGGGAEAVSQRQEDDDPHDIAMYIDFDAVFDMVPFCHGIKREDCQHEGFDGDAVHSPLWALGD

SEQ ID NO: 60518 - protein, 141 aa, Zea mays
  Coding DNA Sequence Number=SeqID_17143
  Homolog annotation: Hit_ID=Q6YZD9; Match level="QueryCoverage=32%, HitCoverage=7%, E-value=6e-10, Identity=63%"; Hit description =Nodulin-related protein-like
MRDLRCPQAHHRPLHVCVTRSDARHKAAISAVLTLMCVLIYVGTNGETFFNTTALVTCIQNFPKSRGQTVTRNMTTAYQNDQMLDKVMVVMGAPQGQQNGFKEAANSVEFLGREMLGMQLRAAKPDTDDLYVLIFLFLWQE

SEQ ID NO: 60519 - protein, 658 aa, Zea mays
  Coding DNA Sequence Number=SeqID_17144
MGRVELDFQSTCTSRARSDHHGRGCYISGVECEACLRWSEGLLDLLARGEESIVDKETKRVADPDIHDELPHVNSTQFALELHVNAASMVPLENEMVENKDAEKFREKMPFDNIVWDEELASDGNTHDGLLQQLAEVEDQTQYKKVCTVLSESEAQVYDEILGKVVWDEEMSSELDMDNDLLGLLVSGGEYPVDEQVVDDSSDFKEFGLVDADHVFVEGLDEDSKAVCKASMSDELTLEINTPFLFGVAIDHVNEMPVNINLQDGLSQERASGREYVYDDKMDPIVEPDFDLSFAVSIQEEWDIQSLVRVPEQDLILKICEQYHGGQPIVLTCQYMIQTDHHFGGTRKGDNEQRGVCFARTHVAWGQAVLQPWARNAFSPGQVEQLHQIDSAAHKVALELGINLPSDPSVRMQWDPGISTATAWGQAVFRGAGKCHDPSVAQKKPSLPAHLPRPKPTLSNPIAEAKDHEDKEELRHRCRGQEIIQKEERPRNTGSSSSSSGCGRRVADGNGTATTTLLRSPSALCLLARRGLGSGFYEMGVWDELSSNQAPAGQPTETVVIHWTHLFAVASPVPTAASLRPPQSPAAGAPHSVVRPRRFISSDRRLQQGGGSSQSRARTMEHAKRVKKFGQRGEVPRQNRLGLARPRWKASRVVRAMQ

SEQ ID NO: 60520 - protein, 320 aa, Zea mays
  Coding DNA Sequence Number=SeqID_17145
  Gene Ontology: Mol. function=protein disulfide oxidoreductase activity; Biological process=cell redox homeostasis
  Homolog annotation: Hit_ID=Q6ATX0; Match level="QueryCoverage=67%, HitCoverage=84%, E-value=6e-69, Identity=68%"; Hit description =Putative uncharacterized protein P0015C02.6
  Pfam annotation: Domain name=Glutaredoxin; Domain location=172-236; Score=59.5; E_value=1.1e-14; Accession=PF00462.15; Description =Glutaredoxin
MGQGGSGLDQGTARRNGARATRAQEHQRRRGGEHRRRCNSTAATPTPRITGSDTTVIPVATPARSIREPIGLDRVGFGLGKWAALVPAAGAGASSRLSIPNPSLKDLRSLLAPDSAATAPPSASPSPRVLHRIRVAASALRALRTLHQPPSRPPAAPVGKDKEPVPGGGRVVLYFTSLRVVRGTYEDCRAVRAILRGLRAAVDERDLSMDPGHLPELAALLPRVALPQVFVGGRHLGGADEVRRLHESGELRRIVAPAPGPAFSGSCARCGGERYLLCGACDGSHKRYSLKGGGGFRACAECNENGLVRCPACCVPVPVA

SEQ ID NO: 60521 - protein, 96 aa, Zea mays
  Coding DNA Sequence Number=SeqID_17146
  Homolog annotation: Hit_ID=A2WWL4; Match level="QueryCoverage=52%, HitCoverage=48%, E-value=1e-08, Identity=50%"; Hit description =Putative uncharacterized protein
  Pfam annotation: Domain name=Gamma-thionin; Domain location=33-84; Score=-2.5; E_value=0.088; Accession=PF00304.11; Description=Gamma -thionins family
MEVPRKAMASSLVVWLLLVHSCRLQVPCALGADDCWVLDRDRYRFCFRTAKCRAACAEDRFVDGRCKHGFPYLLPLCECLRPQCAAPGPSSHSELG

SEQ ID NO: 60522 - protein, 76 aa, Zea mays
  Coding DNA Sequence Number=SeqID_17147
MEALYVRPAVLPFRSFFAFAVWPRFVLTSEQSESVFCSARTIKHRPDDRQTDTVAYIRRNQRDSCVRVDRTDHVPS

SEQ ID NO: 60523 - protein, 340 aa, Zea mays
  Coding DNA Sequence Number=SeqID_17148
  Gene Ontology: Mol. function=aldehyde reductase activity; Cellular component=cytosol; Biological process=response to stress
  Homolog annotation: Hit_ID=P23901; Match level="QueryCoverage=100%, HitCoverage=100%, E-value=1e-158, Identity=79%"; Hit description =Aldose reductase
  Pfam annotation: Domain name=Aldo_ket_red; Domain location=17-310; Score=408.7; E_value=8.8e-120; Accession=PF00248.12; Description =Aldoketo reductase family
MASAQAVGQGERGHFVLKSGHTIPAVGLGTWRAGSDTAHSVRTAIAEAGYRHVDTAAQYGVEKEPSQRPKQQVVTVCRKTSCVDQVGRGLKAAMEGGINRKDLFVTSKLWCTELAPDRVRPALEKTLKDLQLDYLDLYLIHWPFRLKDGAHMPPEAGEVLEFDMEGVWREMEGLVKDGLVKDIGVCNYTVAKLNRLMRSANVPPAVCQMEMHPGWKNDRIFEACKKHGIHVTAYSPLGSSEKNLAHDPLVEKVANKLDKTPGQVLLRWALQRGTSVIPKSTRDERIKENIQVFGWEIPEEDFRALCGIKDEKRVLTGEELFVNKTHGPYKSATEVWDHED

SEQ ID NO: 60524 - protein, 256 aa, Zea mays
  Coding DNA Sequence Number=SeqID_17149
  Homolog annotation: Hit_ID=A2Y5P5; Match level="QueryCoverage=64%, HitCoverage=77%, E-value=2e-43, Identity=61%"; Hit description =Putative uncharacterized protein
  Subcellular localization annotation: CTP_CleavageSite=17; ConfidenceScore=5.06e-01
MPLNVLTRQLANADHPRVALSSQKLPFPPGDQGGCAQKRRTPQTPLPRHHPPTPQQSPSAISASKPPCTPAPLRAARRASMGNSLRCCLACMLPCGALDVVRVVHLSGRVDELGCPLTAADVLAAHPSHALTDAWSAAGAARKVVVLAPDSELKRGRIYFLVPSSACSTPAAAAADERTKKRRSRASSRKKHGHRKGGGASVAPSLMSAAEQDNYLRELLSEKREASLVSHRRRRSGARPGVWRPRLESIAEEPSE

SEQ ID NO: 60525 - protein, 446 aa, Zea mays
  Coding DNA Sequence Number=SeqID_17150
  Gene Ontology: Mol. function=sequence-specific DNA binding; Cellular component=nucleus; Biological process=regulation of transcription, DNA-dependent
  Homolog annotation: Hit_ID=Q65WW1; Match level="QueryCoverage=89%, HitCoverage=75%, E-value=1e-116, Identity=56%"; Hit description=WRKY transcription factor 70
  Pfam annotation: Domain name=WRKY; Domain location=116-174; Score =146.7; E_value=6.7e-41; Accession=PF03106.6; Description=WRKY DNA -binding domain
  Pfam annotation: Domain name=WRKY; Domain location=294-353; Score =141.4; E_value=2.6e-39; Accession=PF03106.6; Description=WRKY DNA -binding domain
  Pfam module annotation: Pfam domain module=WRKY::WRKY; Domain location=116-174::294-353
MGTAENDLSGSGVEAEQRQQYTDFAFQTAAAATSTIITGAAHTASFPQSSVLMPPSGRVGDSYSGEMLQQQPWTYQEPTAQFEAPAAQAGNMFGTGGGYGAAPGFREQRQSHRPSSDDGYNWRKYGQKQMKGSENPRSYYKCSFPGCPTKKKVEQSPDGQVTEIVYKGTHNHPKPQSTRRGASSAPASYVVQSASDAVMPEHSWGALSGTPVVTPENSSGSFGGDGDEVNGMSSRLGGSFGADDLDDDEPDSKRWRKDGGDADAAGCSVSVASNNRTVREPRVVVQTMSDIDVLDDGYRWRKYGQKVVKGNPNPRSYYKCTGAGCLVRKHVERACHDTCAVVTTYEGKHNHDVPPARGSASLYRAALAAQMPPQQAASYQGAPMPAAERGSFALSGFGDPVGTAYSYYTNHHQEQEQQQQQPNQAMRYAKDEPQDCMSFFEQQLLF

SEQ ID NO: 60526 - protein, 50 aa, Zea mays
  Coding DNA Sequence Number=SeqID_17151
MDSLDRLFLSQTSAPTDDYDISLRSVLPNKVMRSRPFAPELVKTYEVTRC

SEQ ID NO: 60527 - protein, 122 aa, Zea mays
  Coding DNA Sequence Number=SeqID_17152
  Pfam annotation: Domain name=HLH; Domain location=65-103; Score=4.4; E_value=0.052; Accession=PF00010.17; Description=Helix-loop-helix DNA-binding domain
MEYRHSPAAPPNAKGGSGSGCCPENKDVAAPNLSSAAEEVSATVATSDDDGLCKGNKNVAAASKKLKPHIVAERKRRDRMRDYFGELLALMPQIPAKVIEDSHMLGVSGNQHFHWRLFWNRQ

SEQ ID NO: 60528 - protein, 100 aa, Zea mays
  Coding DNA Sequence Number=SeqID_17153
  Subcellular localization annotation: CTP_CleavageSite=38; ConfidenceScore=5.19e-01
MAVAGGRAQQSRRQPGSRLILGQQESLLPRGSKTGPPKGSTVASDRVGPTPTTGQGFEGQPPPKGSMAASGYSGSVPITDQGFEGWPPKGSQSPQTPSEG

SEQ ID NO: 60529 - protein, 336 aa, Zea mays
  Coding DNA Sequence Number=SeqID_17154
MGYKQEVTKDKGDDDEQDEEFDGLDEYIHKTDAAFQDTEMEDKSTNNNGNPKTTMMAAVHHDYEASAVLGDAVLPHLVNTQEGQNILGVYSNTDPDALSCTASVKPDVLLQGFGTISASNLGIVSASVGCPGSTSLLNICLPHEIQQHGPDAFLHRFPGIVGFHEQLTAGGVAPSKLLNKVTSPKATTGISFTTLDMPTDDNFTSLLHTKRNDSSDLLSVPARVKAQESSCSDHTQELGPSSVVPFVDPGAGVPFVGSLHVSPGGKHPACQVVLAPKDVFSCQSDAAVLDGNLAISDSFTEEAVDSFSLTQRVKKNIVDLAEQKISARRTDKMKIP

SEQ ID NO: 60530 - protein, 52 aa, Zea mays
  Coding DNA Sequence Number=SeqID_17155
MAQSPVFTDDETFAPGHCITFGSLDFLTTATGISLRDEVTHVSRVITDIAVV

SEQ ID NO: 60531 - protein, 181 aa, Zea mays
  Coding DNA Sequence Number=SeqID_17156
  Gene Ontology: Mol. function=ubiquitin-protein ligase activity; Cellular component=ubiquitin ligase complex; Biological process =protein ubiquitination
  Homolog annotation: Hit_ID=A2X5X1; Match level="QueryCoverage=33%, HitCoverage=18%, E-value=6e-22, Identity=86%"; Hit description =Putative uncharacterized protein
MDGLVALAEEEKANNARAVRVGVRALFSLCLAKENRARAVAAGAAAALARRVAEGGAGEPERALAAVERLCRAEGGRDAVVAGAGGGPAAVAALVRAMSGRGAEHAAGALAAVVVGAGGSEALQAEAVRAGAMGRLLLMVQGGCSERAKRKAQHLLKLLRSAWPSADCVANSDDFLQHYHY

SEQ ID NO: 60532 - protein, 149 aa, Zea mays
  Coding DNA Sequence Number=SeqID_17157
MPPPISLARWSHKDTRLHPQMRERESIGHQHLASPPLPTVRPPRPCLCIHPRLLPCPRPGAPPPSRSRTRCPAVTAAAPSTASPSFLHRPARTNLVRSDAIAGLWCKETATLAVGASALSSWHDGGTRLMGLAPSGPPRSPPGDAICRR

SEQ ID NO: 60533 - protein, 574 aa, Zea mays
  Coding DNA Sequence Number=SeqID_17158
  Gene Ontology: Mol. function=nucleic acid binding
  Homolog annotation: Hit_ID=A2X5U8; Match level="QueryCoverage=19%, HitCoverage=30%, E-value=1e-45, Identity=78%"; Hit description =Putative uncharacterized protein
MQHLSPVWHGRLRPALWAALALATAARAPFYRRWGAEVRAAPRFFAAMAFMLAALLCEAISVRFVSTVLGLQWHRGHMFVAVLTAMAWAEAYGGWSSVVIWFLVIHSAQREVRERHHYSVDCVVAIYIGILLWRMTAFLWSTMESNRSRRLSKLDEVQKRLFRAAKDSDVLEIRSLLNEVELAELMKDRIYDQRVNRRLATCERPRSRISSYARRSSEDDPPPAPLLPASMSAGRGFELIAICIEEKLAKELLFAKKGEEFFSKLHRRLVTPQPSSASVCWEDLRASFLAAGDPEAEWAFFRQTHKSNSHSKSDPTLPPFPKFTQFELTQLRKGLNRNGPGYHSMGPLSKTWPARNPGMSYAQALMDGRGAVRDGKAMAWKEVDRRRHPRIEVKTEQQHLGGHRLSRGRGPSEDRGRRTWHSRGGRYGGRPFHGAFRAPQDFAESSEGGGSRVREEAEKKRAAVDGPAADDQGNKRKEKLCCELCEMDHTPQVCPTFNGPKPHALLCGFAGGDSGFFQIPTSGAKGMAPKKDNATTFITAMEGNITTDLVKAELARLIPVNWTWSVQQHADGFE

SEQ ID NO: 60534 - protein, 79 aa, Zea mays
  Coding DNA Sequence Number=SeqID_17159
MQFNQQLRTKYVPYGYFSKGEVSIVSRMVPTPVNIKARYLFYLDTIKICPEQQIHEPVRGYIKWTQGDEWMSIYIQSSY

SEQ ID NO: 60535 - protein, 715 aa, Zea mays
  Coding DNA Sequence Number=SeqID_17160
  Homolog annotation: Hit_ID=Q6JAD6; Match level="QueryCoverage=96%, HitCoverage=96%, E-value=1e-179, Identity=62%"; Hit description =Putative uncharacterized protein
MPHTKNVSAPGGGDDEDPRRPFRQVKGKTVYLEQQEGRKKRRTDRAARAAAAAAAAAQAELGDQPQTPSDQIAYRVRRLASRSRSSTHTTASTPPPTLPAPVTPVAPSTTTAIPATSTTPASTAPPTAPASAPPIPPPRFRERDETEVQPLAADPRLFDLQRATAAQVRRFRYVPMESWLPAQRDPAAVDLFSTRIQESFFRAQMSAQIALHAHRLLDLPAFLRAAGADSEVHLTYLPDLLTLLTTSGRYVEEWVRVFYATVWIDPDHHWMRFRFEREDVTITASQIRQLFGFHESSTRLHSLCYGTSDPPRRPHGGVAPGTAHVAALFRPPFSDGSRCSPTDFTTAVKFLFELMRRTLLPRMGYREATTHIQLWLLGALVSHSEFDVVDFLICEIEDTVLDGMRARRQLPYAHYLCHIFTQLIQPPQFQGTLEASRLGFGSYRPAPEDPVPASAPLFSTQAEDAAHHQFAAQDAAVNDDDDDDDDFGIPPPPPMPPRSHDHEAGSSSATPAAPLAIDPAIASILQSLTQQQAHLAAEQSRLSERMLSMFQTMQDRQDSLQQQLLQDRAESRAFMALMLQHSGVSVPQVQSAPPPPLQAPVVPALQSGPPLTSVGPSSSPLRPVTLAFTSPVLSSVCPQPPVPPASAVTTPTVAVSVTTSVPAASAARPQSESVPAPASTADPRFETDSDPPPAFALLPRPRPDAPPPPPPASDI

SEQ ID NO: 60536 - protein, 140 aa, Zea mays
  Coding DNA Sequence Number=SeqID_17161
MVWLVVAVGADGRCETVVGDFSRSRSGGRVMWSNEGVLSARGPPPTMYCIVQLAVPLSGIDQMLAPIKYKGQARKEQIYCYSVDKVQGPVFPGFLSLGPNTTCNVQKLIGKVAFSIHNNLSFKDDPTSGRMIASLQPQRY

SEQ ID NO: 60537 - protein, 1043 aa, Zea mays
  Coding DNA Sequence Number=SeqID_17162
  Homolog annotation: Hit_ID=A3A7V7; Match level="QueryCoverage=62%, HitCoverage=76%, E-value=1e-121, Identity=42%"; Hit description =Putative uncharacterized protein
MAVEFNWSVRGALPGDAEAVRTRNLRIVQRLTRSTLSGGRRKSGEGLGKLHESLVKLSEQLAWVRGGWGELATVARARVARRAVSSRFTVRAPVIEREFLTNFSWIPWRKSVTFPMQYNHRSRLPPPPLPFGRGGHPRGPKQPCYAPLPPPPFPPAPPPPPPSLERKYEVLMEAGRLATEYLVAQGVLPPAALQRGAGISGAWPDHPLPPPPQLQQQEPRGGRGSYNGRGKMKYGKYRRGYLDSGRDREKERRRPFPNGRRYEEDKDEDGAPGFRRERHGNRGSDEVRPHDTEALREGTPLTAKAVEGFCMEDATSKIMSSFKDTIKDSNDAPKVPEETEEGEVEDDRETQNSETEVVKQGIDTDVNHASCYVITESNPNQLSDGKIQDEIPDEEAEDDKKVMDEATLDHNTCDGEVTNMEVEMHVGKESLIDYCNFTRTPTRPRSARAHRNAASIPGEPAVVETFDLVSSGQASHMVSAESAERFFTKIVSENTEDKFCQENTSSGDVRAPPKELMLLQENGITVVTENMAEDNVDAEPHVVVQQYKEETNLSPLTDALEKSLRQEITLSPFAASHKDSLMQEGGLMQEVDLSPLTANHRESFTEETELPPSTASHKDSLIEGTDLTQTISSYNNNLKLQFKEGTQVCDIDMLPQDVNLIELPDQRKIIGRDVGAKAVTGMEEGKLDQSSSLNLSDVDLVGGTEVAAIHNNPVLVQLSAAGSSTESNNKQQQDPETFTGANASPTDDLCQLPLDNKDVQVVNIECGTPVEVGGFGLSKSIHNNPVLVQMSVAGSSAELINKQQEDPETFTGANANPTDDLCQLPLDNKDVQVIDIECGTPVEVGGFDLSKSNSDIPCYPSMQSDLHAGISANDSEVRREASCSASGRASRRIWHLLSSLDPPHHNRRRLKCCPSEASKGGEAATAASTPSSSSNCTLPSNPNDGGKLLVHAYYSTASCLYECCFGFTTSPCPLLPPDACHQAHLPQVEQQMLRHACACSRTVCQQHQRAVVSLAAIEEKPRNREEMGLQTKTRIEDDLIRAE

SEQ ID NO: 60538 - protein, 219 aa, Zea mays
  Coding DNA Sequence Number=SeqID_17163
MAAPPTTRPIALTPRRDRRHLWQEKRATLHLRRNNRAKKGWPPEGFDSRLRSRGPYTHYWSEVRRPAPRRVPRPPQATRAPRPLLIKGSKAGPRRVHSRLRRRARDDHGYVQYITEARAALPSSPETPCSAPIEGNMALSPLLLAERRRRGVSKKAESVPDRPLALCRGSGAARANPAPAEPLIASTYQPENLGPDRTPGLRPARMREQPDQPKHYARH

SEQ ID NO: 60539 - protein, 227 aa, Zea mays
  Coding DNA Sequence Number=SeqID_17164
MAPRILRDDGGSQPPYGSKRTTLLHPHCTPGSSPYAYKRKDQGPLREGWSRGDEDETCALSGPLVSLSRVDACNPLLQAHPTWARDEHEGHGIPTSLTPVSGRLASPPFALALALDPSGLGHAATLTRRPQGTPRSRNADNDQENVHRVNPCGSCYTKETRSVCREFFHKITGLTITDATLRNKEVLAYLLAGLPIDYDPFITSMMTKIEPLSIDCVFAHLDAFEAS

SEQ ID NO: 60540 - protein, 272 aa, Zea mays
  Coding DNA Sequence Number=SeqID_17165
MEQRPRRKKGAEGLTGGETALGASPEIKEDVCARNLRMTHRIARSTCGRGRPKSGEDDLGSPVRFCRVRELGKLHEPLAKLTEGQTQLGHGWSELDAVAEARAVMVGGGKLAGAKEGRLASEGEHGVRNHNSLPELILRCQADTAQRRPPRGPTPPSPSWAPATPPSLSPTPPYPSPTPPYPRPNTVVFELGAHHAAVHEPNTVVPEPNPDSMDQAVSLTARIRRFESSFNLARQILDGRLWCWIRGYLLSNSLLQHEDVLSVSEVAIYRMQ

SEQ ID NO: 60541 - protein, 109 aa, Zea mays
  Coding DNA Sequence Number=SeqID_17166
MDRLEHTLPTSSPACARGPADFGHHHRRAAPRCDRKDLPKPTPPFVGPPSPPVSRAAVFPFADCNLADGEYILVLEQGVAQKVAPDPAPEPAIEDLPAPALEGKPRFYA

SEQ ID NO: 60542 - protein, 152 aa, Zea mays
  Coding DNA Sequence Number=SeqID_17167
MGKNNKRKHEPTPPSKEFGDSEYSEEEFSSESEGSPAPISLRESSDDSDDSQGLAAEVWTYIRAVERSGLEGSDESEYSSDEEDSDGSGEDEDDDDDDDDSDGSGRGGSGGSKDGDGSGRDGDGGGSRGRNRGGSNRGSTRGGSGGSNRASG

SEQ ID NO: 60543 - protein, 363 aa, Zea mays
  Coding DNA Sequence Number=SeqID_17168
  Subcellular localization annotation: CTP_CleavageSite=58; ConfidenceScore=5.83e-01
MESPSPAASAPSRPTHACRMRSSSSSPARALCPTVFSSPRTAFRSLLNCGPGFSTALRAQDFPAQTAPLQRGAHAELLARSRASFSSHAIHLVAVSVHSNVPYRAGPLQNYTAAASPLPPNARLQLSLSLVRLAACFSHLRTRRGAWPTDRRRGRRLLHRKTCCCFVPPTTGCFVGALCREGRSQPPPGGNKPAAEQFTGAATCVFNGLAAATSRGAPSRIPPIPSSNSTASCFVGAPCREGRSQDLLLPRAPIPPRGPAAAPCSNSTARTCCCPVPPAIGCFVGAPCREGRSQLPPGGRNPRAVGGDQEGGRKSAAGREESASSGGDRIQRPCSRSRAPARAQILDSSNSLLQARSITLYSL

SEQ ID NO: 60544 - protein, 121 aa, Zea mays
  Coding DNA Sequence Number=SeqID_17169
MAGGTGQQQVLAVELEHGAAAGPRGGIGARGSSRSWLLPSRQGAPTKQLAVELELGIGGIRLGAPLDVAAAKPLKTQVAAPVNCSAAGLFPPGGGWLLPSRQSAPTKQPVVGGTKQQQVLR

SEQ ID NO: 60545 - protein, 225 aa, Zea mays
  Coding DNA Sequence Number=SeqID_17170
MVTCERAMNALSREGRRVASGWTTLGALNSVLPDPEPTPAEAVSGVALEPTPEAAEDAPEAPASAAAGEDLPPKVAEGAPDAPAAAAPSAEGPAAEAAETTAGATAEPSAEAPATSGPSQVQDFGPAHATATTKFLAASTAEGGNECGGSASEFFDFADSGSSVEWTEESLSEDLDYFAALDVAAAEASPHAADAQDVPGPSTGRRRRRAVAKRRVSGEEGARLH

SEQ ID NO: 60546 - protein, 65 aa, Zea mays
  Coding DNA Sequence Number=SeqID_17171
MAKSMAFPKLEVGLSAMSKDELADNLACNSLKPKLKTFGKNLPKPMRTLLLQKLVKKLVNGRKLG

SEQ ID NO: 60547 - protein, 144 aa, Zea mays
  Coding DNA Sequence Number=SeqID_17172
MELDAAATQTEPTQGREGAATAMETEVRPWAPTGAGHLQRPWEFHWGVERPSKATKHHGFKEERRSDAGRAGHAMARRGEQGRQRVLREMAGWSRGAREARLCQGREQGAPGLGARLLEPRRCHGRKGAELPVRWGRRQGGYGG

SEQ ID NO: 60548 - protein, 89 aa, Zea mays
  Coding DNA Sequence Number=SeqID_17173
  Gene Ontology: Mol. function=serine-type peptidase activity; Cellular component=integral to membrane; Biological process=proteolysis
  Homolog annotation: Hit_ID=Q8H6I7; Match level="QueryCoverage=57%, HitCoverage=19%, E-value=8e-16, Identity=82%"; Hit description =Putative uncharacterized protein ZMRS072.8
MLPALNLAGDVVVMDRVSMRLGRVTPRDIVLMISPEDPRKWLVKRVVGMQGTPSPTLSTPTTATPPPEPSWSKVSFVDKIMYHMSTARK

SEQ ID NO: 60549 - protein, 328 aa, Zea mays
  Coding DNA Sequence Number=SeqID_17174
  Gene Ontology: Mol. function=methyltransferase activity; Cellular component=ribonucleoprotein complex; Biological process=metabolic process
  Homolog annotation: Hit_ID=Q33AG7; Match level="QueryCoverage=52%, HitCoverage=46%, E-value=5e-73, Identity=80%"; Hit description=CMV 1a interacting protein 1, putative, expressed
  Pfam annotation: Domain name=Methyltransf_11; Domain location=46-147; Score=87.9; E_value=3.3e-23; Accession=PF08241.3; Description =Methyltransferase domain
  Pfam annotation: Domain name=Methyltransf_12; Domain location=46-145; Score=62.5; E_value=1.4e-15; Accession=PF08242.3; Description =Methyltransferase domain
  Pfam annotation: Domain name=Ribosomal_S8e; Domain location=130-309; Score=138.5; E_value=1.9e-38; Accession=PF01201.13; Description =Ribosomal protein S8e
  Pfam annotation: Domain name=Ubie_methyltran; Domain location=11-209; Score=-146.5; E_value=0.071; Accession=PF01209.9; Description =ubiECOQ5 methyltransferase family
  Pfam module annotation: Pfam domain module=Methyltransf _11::Methyltransf_12::Ribosomal_S8e::Ubie_methyltran; Domain location= 46-147::46-145::130-309::11-209
MSIAKRAIPEATPIEEASQIIRDNWLNVIEEHHLKYSGNSQVNDILDIGCSIGVSTRYLTEKFPSAQAVGLDLSSYFLAVVAQREEKLSRPKPIRWVHANGEATGLSSNSFDLVSLAYVCHECPARAITGLVKEAFKVLRPGGTIALTDNSPKSKVLQFVVGASPTTFKTILSKHAQEESKALTRKTRILDVVYNSSNNELVRTQTLVNSAIVQVDAAPFKQWYLTHCGVDIGRKKKMHVAKKDATEEQDGEAIVEETKKSNHVQKKIEKRQQDRAVDTHIEEQFGSGRLLACISARPGQCGRANGYILEGKELEFDMKKLQSITHRK

SEQ ID NO: 60550 - protein, 94 aa, Zea mays
  Coding DNA Sequence Number=SeqID_17175
MALFSQSQLCLGAPDCPVRQASSGELAALGKKLTVYDYNSPDCPCKGERLQVVEIPRKRDIEKQSKTPWYSSGSLDRLRGVDCNPRPLGRHNVD

SEQ ID NO: 60551 - protein, 159 aa, Zea mays
  Coding DNA Sequence Number=SeqID_17176
MGKNNKRKREPTPPSEEFGDSEYSEEEFSSEPEGSPAPASPPASSDDSDDSQGIAAEVWTYIRAVERAGLEGSDESECSSDEEDSDGGDEGEDDDDDDDDDDDDDDGWGGGDGSRDNTKGSSRGSTKGGGGGSRDSTKGSSRGSTKGGGGGRGRGRASG

SEQ ID NO: 60552 - protein, 183 aa, Zea mays
  Coding DNA Sequence Number=SeqID_17177
  Pfam annotation: Domain name=efhand; Domain location=46-74; Score =7.6; E_value=2.8; Accession=PF00036.23; Description=EF hand
  Pfam annotation: Domain name=efhand; Domain location=9-37; Score =13.4; E_value=0.67; Accession=PF00036.23; Description=EF hand
  Pfam module annotation: Pfam domain module=efhand::efhand; Domain location=46-74::9-37
MGHAVTDDKVSCMMEEVDADGEGCINLPVFAALMESASAAAAVEDDVDHAFMVFYTDDNDLITLAELACVLRSLGGACHRRPHLTPSTTPLGTEPCNFVMPAISWVLASNMGSANDAKHADLYTMLNKQSSRGQNGSGVTAELYSGRLLSSHDFMANVQTGSGKPMTFYFPITGIVMQPARMP

SEQ ID NO: 60553 - protein, 55 aa, Zea mays
  Coding DNA Sequence Number=SeqID_17178
MNSTPVLFTLSCIRSRATLGFLPSVKPKALQLGFPQQLQQFLPQPYSKSFHQCQK

SEQ ID NO: 60554 - protein, 46 aa, Zea mays
  Coding DNA Sequence Number=SeqID_17179
MAMMGSTSKKMYLCQVRKRQTFVAFVQRWCPKKKTRSEASGGRVLS

SEQ ID NO: 60555 - protein, 160 aa, Zea mays
  Coding DNA Sequence Number=SeqID_17180
  Subcellular localization annotation: CTP_CleavageSite=59; ConfidenceScore=5.05e-01
MASANVGGTGGGLGVASLPRELLITFGSFTIGRRRPFINQLHRGRRPEKVQFATKCFSRYSRRSGFHPNRIRSVLQYTCKWSTTVLSSSTRAQALASLAQASEQMGFAPIPVVTEPPKSLGPPTVVLVQWTSDNPAGAPDHLTSSVPEFLTLPKSVSPIT

SEQ ID NO: 60556 - protein, 170 aa, Zea mays
  Coding DNA Sequence Number=SeqID_17181
  Gene Ontology: Mol. function=aspartic-type endopeptidase activity; Biological process=DNA integration
  Homolog annotation: Hit_ID=Q8S474; Match level="QueryCoverage=70%, HitCoverage=15%, E-value=1e-08, Identity=36%"; Hit description =Putative pol protein
MSLTQLKGKYIAQPSQDNRDHMVKTLETGTTVAYTKSLEENVKDLRIVKRKEQKIKINASFKSLNHVSIKGAKGSHQANTKSKERAQKIGAKETEVLPGLAHRTVSSAPSDSVRCTKEDRPQTLQLRVSQAQLRYHSPDCPVDHRTVRCASGATTNCAQWLTLTVNSAAQ

SEQ ID NO: 60557 - protein, 266 aa, Zea mays
  Coding DNA Sequence Number=SeqID_17182
  Homolog annotation: Hit_ID=Q6QP51; Match level="QueryCoverage=39%, HitCoverage=69%, E-value=6e-15, Identity=41%"; Hit description =Putative growth-regulating factor 1
  Subcellular localization annotation: CTP_CleavageSite=78; ConfidenceScore=5.11e-01
MATTREIDPFLKAALPTRIPKRHGQSLHRCASAPSPYDTGVGSHMSGGLTQSRRSQIAARGACNRPAVISVPPSSPKPAGKKADRHTGMQLHHGCASFWLHRIRRDSVKAWARMSCNRRDGYCAQGNRTTTLANVASPRLRNQCRDSRQPCADRERRYFRKGSFSAKEAGFEPITDQGFEGWPLGRAGPLEGFDSRPRAHRVMDDSGYVCYMAEAQATLPRKTTPLTSRGITSSPDPGLGLRRSLRLAQPWARTDRATRDTSLPYP

SEQ ID NO: 60558 - protein, 271 aa, Zea mays
  Coding DNA Sequence Number=SeqID_17183
MSDTPEFIIKNLYPMIWKAYLRKTQSTIFGPNLQFLLIGTFTLAKQPQAGSAGIQILVELVFRLVQLLWYYIEFFVDSLLLELLAPRRLGVSYIDPRAIDLAMRIAERMFLKMKEDEAKNKIEEENDRWRPNDKSTSSQGSSFKSTSHMCFIANGSDSESESEDEEEQESDSEDEDDLQQFFAQLSKKHRMSLLKLMKRAEEQKEMLHKQEDILIRKIEDLEKLTREHEKLKCSYDDLVQRYEDISIEQIKLVNHSSYIAQLENKMLSSRT

SEQ ID NO: 60559 - protein, 180 aa, Zea mays
  Coding DNA Sequence Number=SeqID_17184
  Subcellular localization annotation: CTP_CleavageSite=60; ConfidenceScore=5.37e-01
MSSSSLKRRVFPSSKPPDGGYPPPFRLLVGGTQLHGSWYLSAIVRLQGFSSAGPAVPPCRRSPRTVTAGFWVGKSEPGCDLGPTLSFKDVHHPRWGGSHAEPVLYLPRGSAGRPFPRRLGVEALAGPADGADFDNVGLNDGGRRHLQRIGVVGRASGGPSCRRVAAASCAREDHPGSARR

SEQ ID NO: 60560 - protein, 104 aa, Zea mays
  Coding DNA Sequence Number=SeqID_17185
MARSVRAQGRARQRLLLRPRPGSGEDAIPPEAEVEAEPWGQTRRRPPSEAEPCPGGWHSSRSKAILALNAPAIRSVGEAIWPRLLLDEFPPEAGLERGEIASLG

SEQ ID NO: 60561 - protein, 429 aa, Zea mays
  Coding DNA Sequence Number=SeqID_17186
MTVGLVVGRSKPGYGLCPALSFKDVHHPRCGGGRAEPGFHLPHGPTGHLFLQHSEERALTGLAEGANFDNAGPVGRKRRQLQRAWLASSACSGTASDAASCRLVRAWPSVHRTGDRRAVRTRISYKTSMGRPPFVGMAPASRWPLSSVFWWWPPEEVVSADETVGATCGQTSRSLALMACPHPSCGDVGEGLFTAAFALRSSLLLFSRPRRRLSSLLLERWSPASHPEFVIPQALRCGGCSYSREWNQSPNPRSLYDELKPEAAASAWTEAKSARKEASSAREHVASQAEEVQQRRLELGQVVRERGQSRIHAAEAGSRAEVLRGQPAGPTDALAGVSAQAGILAENLVVRAQARCWRPPSRWRSFRPSRRLRLGQDLPRVETSPRVLLLPLPMSEPAGTVCLNRNDMKDVLAKDFSDENFDAEGVPPF

SEQ ID NO: 60562 - protein, 346 aa, Zea mays
  Coding DNA Sequence Number=SeqID_17187
  Homolog annotation: Hit_ID=A3C7M8; Match level="QueryCoverage=22%, HitCoverage=20%, E-value=2e-07, Identity=41%"; Hit description =Putative uncharacterized protein
  Subcellular localization annotation: CTP_CleavageSite=56; ConfidenceScore=5.08e-01
MPNSQSGRQMQLAFQALAHSPRYATSSGPLCRTAHTGWLHQKSKRKGYFAQGHVPSFSMSWDIESDDEDLDDEVDDGAEGLLATLKMVRGTLTEQTYVFLSAGESYLMYLCINSDTRHTGIQYLPLGTGLKSGSSCRVIEGVGVWECNVNMVSYLLYKYPNLAGMVVTTGMKKYLASSSRVDDVEVILLCDGNATGKLGGVAAPLQLHVPCPLILTAEDFLYDAVLALGTWKLRSDPIIVGSGPTSSFSQPDYICTQGDLALIDFIKEIPCEPRVEVVLIDDAFVERKSMECLFQPNAYLGDEVFIPINIRETHWYLVVINARNIEIQVFDSLGTSQDRKDLTYSG

SEQ ID NO: 60563 - protein, 365 aa, Zea mays
  Coding DNA Sequence Number=SeqID_17188
  Homolog annotation: Hit_ID=Q0Q610; Match level="QueryCoverage=65%, HitCoverage=68%, E-value=1e-07, Identity=28%"; Hit description =Hypothetical accessory gland protein
MKHRPGPERLLETAHLELDGELFVSTQQAPTWRANCRRFETGGSLSRRGDVGVPPKPRLSLPSVVVAEPEPRGRARRKSFGRGQGGVRALGSGEAEFCRLPGLSPSPSPGSGGAEFAVFRVLARVRALGSGGAEFTVFRVLARVRALGSGGAEFTVFRVLARVRALGSGGAEFAVFRVLARVRALGSGEAEFCRLPGLSPSPSPGSGGAEFAVFRVLARVRALGSGGAEFTVFRVLARVRALGSGGAEFTVFRVLARVRALGSGGAEFAVFRVLARVRALGSGGAEFAVFRVLARVRALGSGGAEFTVFRVLARVRALGSGGAEFAVAPLARPDCLSDSFCRVALQSEWRRRRCPSVSLASGAVE

SEQ ID NO: 60564 - protein, 225 aa, Zea mays
  Coding DNA Sequence Number=SeqID_17189
  Homolog annotation: Hit_ID=A2X943; Match level="QueryCoverage=88%, HitCoverage=51%, E-value=9e-64, Identity=66%"; Hit description =Putative uncharacterized protein
  Pfam annotation: Domain name=TPT; Domain location=47-182; Score= -24.5; E_value=0.016; Accession=PF03151.7; Description=Triose -phosphate Transporter family
MGIWDSILPGGGRRFIKRKDSDAGEAGAVMSFSTGLANISLKHNSVGFYQMAKIAVTPTIVVAEFILFKKKVSLRKVSTLVVVSFGVAVATVTDLEFNFFGACVALAWIIPSAVNKILWSNLQQSGNWTALAATSALAHVVLGQFKTIVIMLSGYLVFKSDPGFTSLCGAVIALAGMSVYTYLGMKESAANARRNSLNSRQNSHLKKAKAIVDGENPETKPMDSV

SEQ ID NO: 60565 - protein, 190 aa, Zea mays
  Coding DNA Sequence Number=SeqID_17190
  Subcellular localization annotation: CTP_CleavageSite=28; ConfidenceScore=5.21e-01
MQSACNRAKWAHPSDSNAPSMEAQAHTSCNRRAGCYMRATAPPLAPLPRLLDCGTSTATRGNPACDPTVPARRDGQYDQKWAGSNDGGRRAEAAGPGKGDTPKGILLREGNRPRASLLIRGSKAGPSEGFNSRLRALGLRAHYWSEVRRPAPRKGSTAASGHSGSAPTTDQGFVGWPSKGSQPPQTQSEG

SEQ ID NO: 60566 - protein, 662 aa, Zea mays
  Coding DNA Sequence Number=SeqID_17191
  Homolog annotation: Hit_ID=A2XR46; Match level="QueryCoverage=26%, HitCoverage=39%, E-value=2e-43, Identity=51%"; Hit description =Putative uncharacterized protein
  Pfam annotation: Domain name=DUF679; Domain location=454-629; Score =122.5; E_value=1.2e-33; Accession=PF05078.3; Description=Protein of unknown function (DUF679)
MGRREKEREGGKKPEGDRRERRKERIQGNDGASCDVVGPSPRLGEVEAPPRSRSSLSSEVESEPLGRARRRPSAEARAESEPWGRAKRSSSSSGAEPESEPWGRAMRSSSSSGAEPESEPWGRAKRSSSSPGAQPESEPWGRAKRSSSSFGAEPESEPWGRAMRSSSSSGAEPESEPWGRVKRSLSSSGAEPESEPWGRAKRSSSSSGADPESEPWSRTMRSSSSSGAEPESEPWGRAKRSFLWCLRPGLVALSLTLSSGTAVGAAQAALSSCQACQWSGEATFALNAPAIWSVGVAIWPRLLLGEDWSSGESKLCADGGYQLRFRSLEGRTCAVKAAYIISSSVAWIVVHGEDEESDREYVANLKLEASQDLKVPQRKIRMANVNVNVAQESAQLPAATSNDNNSSKDEGSNQLKQTTPTSSNINIGGVTNVIAGDSGGIDGKSRKANVAAEKVLSVSANLAKLLPSGAVLVFQTLSANFTNQGSCNTANRWLSGLLVAFLTAACIFLTFTDSILHKGKIYYGVALPERLNVFGLTKKEERQLLKEIGPDLRERRLKTLDWVHAFFTAIVFISIAMGDVGLQQCFVPNLDSPDMVNVKELLRNAPLGLALLSSFVFMIFPTRRRGVGFDNGERGDVDTSSAEANKTAAPNQPQTKDALSNV

SEQ ID NO: 60567 - protein, 196 aa, Zea mays
  Coding DNA Sequence Number=SeqID_17192
MNKTPAFKVPLQTELRFHLRGYEQPPTTGGPAEQQKADGWLAVDDDDFCSRGPNSSSNDLRADAAAIRPSPMPSLERQGRAEGRRVGGQSVGGTGYLVGGETSSGCRGGRRRRKRLRSHSGQRAGHAAAASATNGERPSPRSLREGAGRRPRRDRPQLGALPSPALTMKILEAEGGAEITARLASPHPGASGHRLG

SEQ ID NO: 60568 - protein, 1191 aa, Zea mays
  Coding DNA Sequence Number=SeqID_17193
  Gene Ontology: Mol. function=binding; Cellular component=integral to membrane
  Homolog annotation: Hit_ID=O24564; Match level="QueryCoverage=97%, HitCoverage=88%, E-value=0.0, Identity=75%"; Hit description =Embryogenesis transmembrane protein
  Pfam annotation: Domain name=DctM; Domain location=181-977; Score= -244.6; E_value=0.084; Accession=PF06808.3; Description=DctM-like transporters
MASTAATPEAGSNHSEDGTTVELPIVVTGSTSQESIDTPSTRYLLAPSHVSSSSFTADIELLWRLRKYLLLLGILAVGVTYNAGLTPPGGFWSKNTQGQSGHEAGDPVLRALFFPRHEVFFYCNATAFAASLVLIILLLSKNVARQRLWLRSMQLTMVLDLFSLMGAYAAGSCRAVKSSIYIWVLVLSVFTYIMIHILVFMKVVPRFVSEKRFVPKRLKDVARSVERWILSRCGVHRSEKNSSHEKDLEEARKFTLVLVTFAATVAYQAGLSPPGGFWAENDENKTPATSMLRSGNLPRYNTFVVCNSTSFVASLVTIILLLSPELSRHGIRSRAVTVCVVVDILGLVGAYAAGSCRSVVTSVSAVLVAVLVWICFAVLAGIFVNRSVAEWFGKKIKPDIMRCIDRFGRVFSSNHGRKRSRNPEGENSIASHQQTEESIKGEAEAETARVPEYQLPYHQLAPDIEEGECPGEQQSPGKQQPTNIEVVSISEHASVNEKQAENSSSVMCKLGSQSTDPNSAANEAMTETETENIQDANMEEQQSSLVDGLKTPTTVADQESTTVECLSDIAPNNHNGATNSFKEEKEASEQHLQANEIESFRTNNVARPVENGNVGMYEVTPRQDDGDVNAGANPTDEHLKKSRTYLLLLAILAVSLAYQSGLNPPGGFWTQRGTNNSPKSTHHRPYHLPGDPILEDTRHRRYIAFFYLNAIAFVASLVMIIMLLNRRMSYKGIKRYALQMAMIVDLLALTGSYIMGSSRGTKSSIYIWLLVCLVLVYVAVHVLIATHVIPEGCKKVVAQKIENFSCRYIWTKASFRNRGIDGNGSDCEAGQSQRSDADDKTWERRRNLLLMLAVLAATVTYQAGINPPGGVWSDDSSASGKPGDPILQHNNSKRYDVFYYSNSLSFVASVVITILLVNKESCEHGIKSYALRVCLVVGLVSLLIAYSAGSSRKARESIYLIVIAVAVLIALVIQVLLLSCTQDSLRGPTGQFIERLLQLLFGTDKAWHGDTSKQKESSGRPEKKVRKRHKYLMLLAVLAASITYQAGLNPPGGFWSDDNEGHVEGNPGLKPPGALWSDNKGHLAGNPVLLDINPRRYEIFFCFNSISFMASIVVVMFLLNKSARKKAVPLEVLHLIMILDLLALMTAFAAGSCRKFRTSVYVYGLVLGVVQAQGYLETMLDGSIPLVIVLV

SEQ ID NO: 60569 - protein, 54 aa, Zea mays
  Coding DNA Sequence Number=SeqID_17194
MDMCAWLSEWKSNPVVRPVEVYMQGHRGFDPQNPDVLCTQTATDCLASYGQEMV

SEQ ID NO: 60570 - protein, 225 aa, Zea mays
  Coding DNA Sequence Number=SeqID_17195
MPTYGMPPPEFVLSMPMLSPPPPPPPQFPMRLELVGVTYIGDIRCGSEQSRISRPLPNDLVVPIHVEVGQEFCLRFLDQLLLVLLELELFVSRQDLPSRLYNIAGEMSDLSLELAIEGRFDESICVVPSGIAKKGVGAFLGRQSLCENRRRCSLHRRPDGPRLGAGRSATWDRAKDFLPDGRTVRACAGAAEVTGGARISLPGGTPSGSRDPRCCLGSAGQPRLV

SEQ ID NO: 60571 - protein, 151 aa, Zea mays
  Coding DNA Sequence Number=SeqID_17196
MGKNNKRKREPTPPSDDFGDSEYSEEEFSSESEGSPAPVSPPASSDDSDDSQGIAAEVWTYIRAVERSGLEGSDESEYSSDEEDSDGGDEDEDDDDDDDDDDGDGDGSGSGRGGGDGSRGSTKGDSSKGSTKGGSSSGRGGGDGSRGRASG

SEQ ID NO: 60572 - protein, 542 aa, Zea mays
  Coding DNA Sequence Number=SeqID_17197
MSVGDWGLDTPAGGRHAGQWVAGIIVQLRPIGNQWTRLASGEHCSPCGLELSACGDTLCVGREAAGGWRSRPAGHDEENVSHDVYHEAVEVTLLVIWERRGCSFPPVFYAGEVSRGNDGASCDVVGPSPRLGEVEAPPRLRSSLSSEAEVESEPLGRARRRPSAEARAESEPWGRAKRSSSSSGAEPESEPWGRVMRSSSSAGAEPESEPWGRAKRSSSSPGAQPESKPWGRAKRSSSSSGAEPESEPWGRAMRSSSSSGAEPESEPWGRAKRSSSSSGAEPESEPWGRAMRSSSSSGAEPESEPWGRAKRSSSSSGAEPESEPWGRAKRSSSSSGAKPDSEPLGRAKRSFLWRLRPGLAAVSLTLSSGTTVGAAQAALSSCQACQWSGEATFALNAPAIWSVGVAIWPRLLLGEDWASGEPKLCADGGYQLRFRSLEARVHGRVPSSRAGILTLSTVWPEPGCESSPRASTQGERTVKDKLDFFTYAHASPFRKEEGGKCHVALGGRRTWCLQRAADGVIPRSVSEAAVNPSRASLRTPDQ

SEQ ID NO: 60573 - protein, 298 aa, Zea mays
  Coding DNA Sequence Number=SeqID_17198
MKILDAEGGAEAAARLASPHHRTGGHRLGTEEAKLPRVERVTAQRLQALLHLRLNQRVKGRTAMQAACNHATGMHFFDFNASSMESQAHTSCNRRAGYYVRKTAPPLAPVSRLLDYGTGAAIRGNPAHGPTVPAKHAGHGSVSRGRRRDGRYGQKWADSNGGSRRAKTAVKSCAGSRPLLEQQKSPLPRREDDAPVFRSSNGSRMHNVCPANHSSRCINSAVGDRERGYFERDPSLRRKRALSPPTDQRLAPRKGSTAASGHSGSAPTTDQGFVGWPLEGFDSRLRTRRARDDSGYVR

SEQ ID NO: 60574 - protein, 210 aa, Zea mays
  Coding DNA Sequence Number=SeqID_17199
MARARAYKAPRDLDRTPPHALDLTGAQTHRRLPVHGVSAAARSPCHRRPANKTLPNPVRPSEKTEHTSVKLPERGIGVCFAGEASPRSPDSTRPPASVDRDLPEPTLPLAGPLSPPFRHKNSAACAAPTAVPPTRVRLTAAKSGLRRHRKLCLARPQGSDSTSTSEDGLRLARPQGSDSTSTPEDGLYLARPQGSDSTSTSEDSLRLARP

SEQ ID NO: 60575 - protein, 259 aa, Zea mays
  Coding DNA Sequence Number=SeqID_17200
MGAPAFCARRACIKCAAGAKGSQQANKKTKKRIQTIEQKTTWKAPWYGAPDCPVCHRTVSGAPPDSVRCTRAVEAKLATFGNFQGRSAIIHRTVRVQHSVFRPGDGGQPHRGVSQHVVRREGGTRVLGRSHSRFRGEDGSEDLSVRFGAAGARWRGVGGQVDVAAGAEVVAAGESFSADETISATRGPTSASLALMSGSHPSSGDTNESLLAVASTLGPSLLLQRSLASHPEFVVPQVSDVEVVHTRGSGTGVPFVMAS

SEQ ID NO: 60576 - protein, 144 aa, Zea mays
  Coding DNA Sequence Number=SeqID_17201
MEQRPRLKRLLETTHLELDWKLFVNTQQAHTWHANCRRFDPGGSLDRRQYANVSGREEPEPYVHANVAVGEVLKPCVRGVVAVGGVFEPCRSIAVGAVGTLLTSPCFRKGLRATVVMDARGEPSLLVTGASMDGTPVLFPRSLS

SEQ ID NO: 60577 - protein, 95 aa, Zea mays
  Coding DNA Sequence Number=SeqID_17202
MASSLESIGRVVSDGSLELMAFGASTDRLLQALPLTIAKAERATAYPSSLKANSGSSRAGGVSTTATPTSAKRLSPPTEPSPRPSLGKHRIMLTF

SEQ ID NO: 60578 - protein, 182 aa, Zea mays
  Coding DNA Sequence Number=SeqID_17203
MAGSAAPCPCAPPVRPPPPPRQLGRPRPCPGRFNRPLAGGYEIDGFGYDYGADSAGILYRFNAYLIASPGFSEAGSAVDSIKWVRDLRHQSESRTLPRRGTARDWERGGREKKFVAAMKSSSNSSPLPIVDSAHLPVVSDSLLVPGQDHVVKHSTMCSVAPAIVTIIGGGISGSRCASLLVA

SEQ ID NO: 60579 - protein, 64 aa, Zea mays
  Coding DNA Sequence Number=SeqID_17204
MELSQVQEGWAADFDEYRIDDLMTKIKPIAADIELDRDLLSRDLIVRPRLTDFLDGDFVVHPTS

SEQ ID NO: 60580 - protein, 53 aa, Zea mays
  Coding DNA Sequence Number=SeqID_17205
MVGTSAVTARRQPGSVEHCTMQDVVDGVTWPTTLPPGWTVEWDIAPAGEEYEE

SEQ ID NO: 60581 - protein, 123 aa, Zea mays
  Coding DNA Sequence Number=SeqID_17206
MGTGKRGRGLPRRADGKHKRAPSPPSEDFGDSEYSNEASPELGGSNDSEEVSSEEVDSSDSSEEWSGSEGDGGENDGSSGDDDGEGGGGGDGEGDGDGDVEGDDNSNDEGDGDGKASGIMLLV

SEQ ID NO: 60582 - protein, 45 aa, Zea mays
  Coding DNA Sequence Number=SeqID_17207
MGSRQSACSAEAECRGCLWCNLCSSKGESVEADLQEFQDFDEFED

SEQ ID NO: 60583 - protein, 35 aa, Zea mays
  Coding DNA Sequence Number=SeqID_17208
MAARLLLHTRLGGSTDEKGEGKQRKERVTPEFDGY

SEQ ID NO: 60584 - protein, 45 aa, Zea mays
  Coding DNA Sequence Number=SeqID_17209
MGSRHSACSAEAECRGCLWCNLCSSKGESVEADLQEFQDFDEFED

SEQ ID NO: 60585 - protein, 685 aa, Zea mays
  Coding DNA Sequence Number=SeqID_17210
  Gene Ontology: Mol. function=binding; Cellular component=nucleus; Biological process=mRNA modification
  Homolog annotation: Hit_ID=A7PPW6; Match level="QueryCoverage=85%, HitCoverage=96%, E-value=1e-161, Identity=36%"; Hit description =Chromosome chr18 scaffold_24, whole genome shotgun sequence
  Pfam annotation: Domain name=PPR; Domain location=268-302; Score =24.8; E_value=0.00032; Accession=PF01535.11; Description=PPR repeat
  Pfam annotation: Domain name=PPR; Domain location=371-405; Score =32.9; E_value=1.2e-06; Accession=PF01535.11; Description=PPR repeat
  Pfam annotation: Domain name=PPR; Domain location=472-506; Score =23.5; E_value=0.00078; Accession=PF01535.11; Description=PPR repeat
  Pfam annotation: Domain name=PPR; Domain location=573-607; Score =16.8; E_value=0.08; Accession=PF01535.11; Description=PPR repeat
  Pfam annotation: Domain name=PPR; Domain location=608-641; Score=9.3; E_value=0.62; Accession=PF01535.11; Description=PPR repeat
  Pfam annotation: Domain name=PPR; Domain location=61-95; Score=3.3; E_ value=3.2; Accession=PF01535.11; Description=PPR repeat
  Pfam module annotation: Pfam domain module=PPR::PPR::PPR::PPR::PPR::PP R; Domain location=268-302::371-405::472-506::573-607::608-641::61-95
  Subcellular localization annotation: CTP_CleavageSite=59; ConfidenceScore=5.58e-01
MASSAAFSHAGISHPRFLHAKPACPPKPVPAQRPSRPELISAASTPRTSQAELRPDSKNASALSAELRRLARAGRLPSALSLLDHLSHRGVPATASAFATLLSACRSLLHARQIHAHLRIHGLDTNEFLLARLVELYITLGATDDARGVLDGMQQHGATAYSWNALLHGHVRWGRGEAAGPVADAFAEMRAAGANANEYTYGCVLKSISGSVRPSMTMATATHATLVKNAFAGAPGMLMTGLMDVYFKCGKVKLAVRVFEEMPERDVVAWGAAIAGFAHKGMKREALEHFRWMVEDGVKVNCVVLSSIVPVIGELRARNLGREVHGFVLKKFGNRKDVAKVQAGLVDMYCKCGDMISGRRVFYNSKKRNAVSWTALMSGYASNSRPDQALRCIAWMQQEGIRPDLIAVGTVLPVCTKLKALREGKQLHAYALRRWFLPNVSLCTSLITMYGTCDHLEYSHRVFHDMDKKTVQAWTALVDANLKNGDPFTAMDLFRSMLLTNRRPDAVAITRMLSACTDIGALRVGKEVHRQVLQLRMEQLPLVAAEVVNMYGRCGDLKAAQRVFNRTESKGSMTCTAIIEAYAVNQRHKDALHLFTWMLSNKFVPTKATFDVVLKICEAAGLHDEALGIFNSMVQEYKLETSQENFDCIIRLLTDAGRISEAQRFADLKSTLFNLPTPLLNSEQE

SEQ ID NO: 60586 - protein, 250 aa, Zea mays
  Coding DNA Sequence Number=SeqID_17211
  Gene Ontology: Mol. function=methyltransferase activity; Cellular component=extracellular region; Biological process=metabolic process
  Homolog annotation: Hit_ID=A7PQ00; Match level="QueryCoverage=69%, HitCoverage=58%, E-value=2e-46, Identity=55%"; Hit description =Chromosome chr18 scaffold_24, whole genome shotgun sequence
  Subcellular localization annotation: CTP_CleavageSite=33; ConfidenceScore=5.44e-01
QPKLRVAKSQISLNGPSNRVTVFSIAGAPLLSMASSAAARRLLLLRHRHGNLLPKRHFSSSSAPDGLDDGGGRVKIFDRDLKRRHRDRAAWVMRETDGLVDAVAENLLDRLEDCRKAFPSALCLGGSAGAVRRLLRGRGGIERLIMMDMSADMVKKWRESENATGDGPETHFVIGDEEFLPIKERLALQPDGLFLAAILGGETLKELRIACTVAQMEREGGISPRMSPLAQTEKTLEPLPHPYTAASKPM

SEQ ID NO: 60587 - protein, 205 aa, Zea mays
  Coding DNA Sequence Number=SeqID_17212
MDTAEAATQDAARRALSQYCSLFSGVADGLDLKYYPRRLTGSAGGVIVSLVGEGNPRLNNMVNLVAVLNIELDHTLDKLGKVRAEVAELRAETTPLSLSSRTAPRHGRYARLALPEGVNRDDPVSGSEGARAGGRRRHRFSLPLFLDRKSRPIITVALINIVGPKATCVEPISRRGENVVYPSSSTPRRLPAPAPRLRGMPSHEI

SEQ ID NO: 60588 - protein, 55 aa, Zea mays
  Coding DNA Sequence Number=SeqID_17213
MENGSFWAEWESRLVGKVCDLCKVLETGISAMLMCSGGDAGNLKDFEEFLDYDEF

SEQ ID NO: 60589 - protein, 127 aa, Zea mays
  Coding DNA Sequence Number=SeqID_17214
MLVDYTTVLDGPSVSVEGLTQQGVESVVEMAPMSGVGLLQQLGCPMVVQGASLAEVQGKTTSQTPPLAKVRGKSPAAPATGVGAPAPRAGDDAVSPGDWTDLSLCGVVGAPPGERAKRGSLTYVQCI

SEQ ID NO: 60590 - protein, 141 aa, Zea mays
  Coding DNA Sequence Number=SeqID_17215
MSLGSDDSLNTYVQNGDGISSRAGSTTDNGHGRFETAIGARKRVRVRRDEPWLGAHTRELRGERRGELGSRSRGWASCKGGARHGRGHGDARIEDLGWGHGEAMASKDLGTVHMETREKRPSAREEEEERAGDKHREQGKR

SEQ ID NO: 60591 - protein, 238 aa, Zea mays
  Coding DNA Sequence Number=SeqID_17216
MGGARSRAQQWTPAEMRAVRVKLGRAPDLGTGKAPSAGWNARTGKKIWAHKGALLGTASNIAAHRRAEQGGGRWEHEAKRHRNDAEKGDEGAPAMEQRRTAREIHELGTRRNSVGSAAARRGASRARRVHMMARAGRRPSRESRRARGTQRGTSKGARLRGMAREERWRGDVLGAAAMEESRGMGAPSWESARELRGPSTMGRGGVRGGARRWCVRRELGAGWLGLGLGREGRSRDGQ

SEQ ID NO: 60592 - protein, 48 aa, Zea mays
  Coding DNA Sequence Number=SeqID_17217
MGRGISRAKFPRVGGEVGVVDVAGVGAAAEIAGEARSGESDAEAEHGA

SEQ ID NO: 60593 - protein, 182 aa, Zea mays
  Coding DNA Sequence Number=SeqID_17218
  Gene Ontology: Mol. function=translation elongation factor activity; Cellular component=mitochondrion; Biological process=translational elongation
  Homolog annotation: Hit_ID=A2XP46; Match level="QueryCoverage=50%, HitCoverage=20%, E-value=9e-35, Identity=78%"; Hit description =Elongation factor Tu
  Pfam annotation: Domain name=GTP_EFTU_D3; Domain location=68-146; Score=76.2; E_value=1.1e-19; Accession=PF03143.8; Description =Elongation factor Tu C-terminal domain
MREVVAAGGRLLQWQMGGIAVHVLSGRVDLRAAPNIKFLETIFKQSVGVALKRGDVERVQVVCKPGSLKTYKKFEAEIYVLTKDEGGWHTAFVTNYSPQFYFRTTDVTGRVELLGEMKMVLPGDNVTTNFELISLVPLEPGNDCILNFFRQYRTIDQVSESQEVRFQQDNANVVRDVESQEV

SEQ ID NO: 60594 - protein, 71 aa, Zea mays
  Coding DNA Sequence Number=SeqID_17219
MGFSGGGLMGRFCSPFATNNIYLTYTKGLFGWAVAVEKVAVGWGKSQSQKPNQTHPKAIRSGGYPISLFIV

SEQ ID NO: 60595 - protein, 301 aa, Zea mays
  Coding DNA Sequence Number=SeqID_17220
MGGPAEQRKTDERRAVARSGSGDDDDFCSGGPNNGSDDLRADAAARRPPPMPKLVRQGRAEGRRVGGRSVGGPGYLVGGRTSSSCRGGSWRRERLRSRSGPRARHAAAASATDDNRPSPRSLREGAGHRPHRGRPRLGTLPSPALVMKILEAEGGAEAAAWPTRHATGAPDASCKQLHHHLRHYRASSTAEPIPRLEATQRTTQQRQPGATINAAKNGSAVMAVAGGQEQRSRRQPSLCPIRGQRENPLSRREGDAPVFCSSNGPRTRNGRPANRTPRRINSAAGKAAPLAGEASGASPSP

SEQ ID NO: 60596 - protein, 294 aa, Zea mays
  Coding DNA Sequence Number=SeqID_17221
MLGPPNKLQAPPVRSGSWQGPGMTRTPTWAEPDAKSIQPYNLRLYCGGDAPSATTLTGDVPSRDLMRPVPSAGRRCQTHPADNTSDQSTGKQCARAERRAVLIFPSTRSFPCTPRIWRSRASGYKKIASTTDISGSKRYILYVPGPTCRGPAPLCMPPFSYKRGDSAYSPPSRRLSLSMDSASSAQIDAIPALSPRPSLSNRVRAMLSMDSASSAQIDAIHGVSSPQPLHVLQILHPVVKIENMYVMNNADEAALKREVHKKPVSMLIDARGINYYIEGVFTGPRTKKRSLTNP

SEQ ID NO: 60597 - protein, 32 aa, Zea mays
  Coding DNA Sequence Number=SeqID_17222
MAHTRTRDDQIVFSSALNMTLGQKSKETASTS

SEQ ID NO: 60598 - protein, 139 aa, Zea mays
  Coding DNA Sequence Number=SeqID_17223
  Gene Ontology: Mol. function=translation initiation factor activity; Cellular component=transcription factor complex; Biological process =regulation of transcription, DNA-dependent
  Homolog annotation: Hit_ID=A2Y2Z8; Match level="QueryCoverage=60%, HitCoverage=12%, E-value=1e-19, Identity=64%"; Hit description =Putative uncharacterized protein
MYNSESSYLQTLQTEEFLATADESNEEPVSKHSPKSGEILCKHKGKGFEHFAHGLCEKCYNKTRLHLLLTIRLIAQFTKLSGGLEGGSDPPAFQRAEKKRLEAAKRAEEAAAAKEAALEECLCDAQNSEVESAMTPRKV

SEQ ID NO: 60599 - protein, 92 aa, Zea mays
  Coding DNA Sequence Number=SeqID_17224
  Subcellular localization annotation: CTP_CleavageSite=52; ConfidenceScore=5.35e-01
MANQEIRSLPTKWVTMMLSKGSSGCACDSSLASSRNSWLSDPPSTHRPKFTRFMPLVPLPDHTTGTPEFHHLVRITTFIPNRNNSWALREIS

SEQ ID NO: 60600 - protein, 124 aa, Zea mays
  Coding DNA Sequence Number=SeqID_17225
MMPAKDELIVVGDGHSGTIYVHAAENTYGINLFQLGIDRSKWPCIALFKVHDAENLLTRAGFTTPGVDVDHYTVRISCYIYQITGPTIVAWHLMGSSDMIMQFELALRSGEPDVITRRTSDYFL

SEQ ID NO: 60601 - protein, 61 aa, Zea mays
  Coding DNA Sequence Number=SeqID_17226
  Subcellular localization annotation: CTP_CleavageSite=42; ConfidenceScore=5.01e-01
MAPAAGPDCLSASLCQVAPQSERRRRRCLSVRPKVIPDVYVLSAAVFNGIIRYADYTLIIT

SEQ ID NO: 60602 - protein, 94 aa, Zea mays
  Coding DNA Sequence Number=SeqID_17227
MGVLTWRTSDSEQYMSGVPPDCPILHPKWYAGDIILAIHSDLTVHDTIPILRSEHGSGGVRTMANQEIRSLPTMRVMMTLSMGSSGCAAVALLH

SEQ ID NO: 60603 - protein, 226 aa, Zea mays
  Coding DNA Sequence Number=SeqID_17228
MTTSLVVERSEPGCGLLLPSASRMFIIRAGEEGEPSGSFAFRVGWQSASSSSIRGRRVFASLAEEANFGYVEPAVCGAVSCRVPGSPSWVALVPPPGLPPAAGVERGCPSTARATVAPCVGWPHPRLLSRHRPHREVVQDVVCRGGGDGVLGWSCPHSRSEDGSEDLFVGAGAVVVASADEAAHCRGGCLRWRDRQCHPPPDLRLFGFNGLVVVPRRRMEAKTYSQ

SEQ ID NO: 60604 - protein, 330 aa, Zea mays
  Coding DNA Sequence Number=SeqID_17229
  Homolog annotation: Hit_ID=Q6QP51; Match level="QueryCoverage=13%, HitCoverage=20%, E-value=2e-13, Identity=84%"; Hit description =Putative growth-regulating factor 1
  Subcellular localization annotation: CTP_CleavageSite=56; ConfidenceScore=5.25e-01
MATAWGIDPFLKAALPQASRAKSSSTCSRVLPLRHGGWVPHVMQAGPERKKPKPPYAERVTAPRLQALLHPRRNQRLKGRTAMQVACNRTTGTHPFDFNASSMEAQAHTSLPRFEATLRMAQQCQSSTSVTGQSAAGRGATVDIAKSGPTVMAVANERKQQSNRLRAHVPSWSSRGAFSHGVKTTHPCSIPRTARVRGRPANHPSRRINSAAGQATPLASEAALFHLHHDDRVKKGAPHHLNLYPFPLPLSLSCHRDRERGYFERDPSPRRKRASSPPTDQGFEGWPLGRVRQPPQSTRASGSLLIRGSKADPSEGFDSRLRALGLCAHY

SEQ ID NO: 60605 - protein, 240 aa, Zea mays
  Coding DNA Sequence Number=SeqID_17230
MLCFQPELVLPDCSAGLLGQEDEAPVDSASETDLLTDCSDGSGIDAEDTAFWNCLMLLRGSTKPLRKRYCPLGVGVDIFRSIARQLQKPVPVLTDRQWPLLEGQELLLLHCHQTCRNMVLTKASSELFPGDGVGVGMVGEHACLWASEASEAKVVLAAVAAEWRPESDRWLELPESASETSARSTSGAGAAGAVAGAPPPVERLAPAEHAFLLYACSLTSAECNHTSELIWQILQHKKRV

SEQ ID NO: 60606 - protein, 441 aa, Zea mays
  Coding DNA Sequence Number=SeqID_17231
MESHDLRAERESQLVGGYEIDGSGYDYGAGKWYSFRLERVVSIATTAQEKMKPWKDTSRSSKTTTSSRRGLAATPSRLPVKAVFIYVSFPHFDFYCKDYVDVSDMARLRHTARKSVIPFLPSRLADRPLRRLVVGQSSHLERLHHRLHEEQGRRREEQQGSSFSLQQEIESVRSCSPVLPLEAPPAPPLGAPASGVAAGGDPDDRGGDDSSSHDTDFSTNQEPEGWVARPITRDAARGCHFHDALDTLLHRALNRRTWSIEYRCVVYQHSRGVYPDHWEATCLVRRPENSLQGVEACSEHYSISERDSAEAAMQDAARRALSHYCSVLGGVADGLDLKYYPRHPSGSTGGVIVSPVDEGNPRLSSTVNLAAVLNMELDHALDELSRARDEIALLRAERAECRHLDDGSPAPVGTQHPYRSPRRGHQPYGNPDCKTKINLEP

SEQ ID NO: 60607 - protein, 117 aa, Zea mays
  Coding DNA Sequence Number=SeqID_17232
MAPEAGLSCCQPHSVEWYRSRSGAGGAVFLSGRSVERRSDCGHFGSVDRRARVRIRCQAILALNAPAIRSVGVAIWPRLLLREDWASGEPKLCADGGYQLRLGVLGVPLIMVPDSSP

SEQ ID NO: 60608 - protein, 133 aa, Zea mays
  Coding DNA Sequence Number=SeqID_17233
  Homolog annotation: Hit_ID=Q6QP51; Match level="QueryCoverage=27%, HitCoverage=16%, E-value=1e-07, Identity=77%"; Hit description =Putative growth-regulating factor 1
  Subcellular localization annotation: CTP_CleavageSite=56; ConfidenceScore=5.63e-01
MGVHPFDSDASSMEAQAHTSCGTFGRRSRRRFTFAIMTASKKPPQSTQAPRLLLIRGSKAGPSEGFDSRLRALGLRAHYWLAPEGFDNRLRARRARDDSGIPSEGGIEPSDPIKRDRVRQITCRYFWSAPLGH

SEQ ID NO: 60609 - protein, 571 aa, Zea mays
  Coding DNA Sequence Number=SeqID_17234
  Gene Ontology: Mol. function=cysteine-type peptidase activity; Biological process=proteolysis
  Homolog annotation: Hit_ID=Q109R5; Match level="QueryCoverage=35%, HitCoverage=20%, E-value=6e-21, Identity=28%"; Hit description=Ulp1 protease family, C-terminal catalytic domain containing protein
MIIGFCLLWMESKEENVALTIIQRDNTLSIDESLLMSLSHNKPKKSVTTTIIPKDYICTQGDLALIDWIKEIPCEPRVEVVLIDDAFVERKWMECLFQPDAYLGDEVIDCYINLIKAQEHLKCRSGGRVHIENAFQFNFLKRDGDVETKTDELYPSKDMSQISSAERRVLLYLDHDMDGMSHFRKKLAAILLSSDINKRKGCPLYKYDKEVDAGCSSDVQILDSPTNPKKRKLLCVSEENEVLMEDDDGPITQADLERWFVHDWDKRTPIKIPTDECTNEFLLSGLSTKDMPVTKADLIDVLCDYIMTIQDDTTLEMTWVRSFNPFKIEISVKDLQNVLRVNLDMTLKCFDMAVRLLAIKESHMSKDEMIKDKKHYMDMRFWRMVGFGKLPKYHQDPIAEELAKTLDCWPSLNYYITGCKYVLMPWKFNGCYALFIIDHGKKHVTFIDFTPTQDWCKHMPYKRFAEAIIMASKKYKIAYNKKRSGWADDIFKWEHTIRSGLPLDLKGVNTSYFVLQAMVMWGSGRRMEFNRDTKILRRNFIIDLLSYEENSCRYAIPPNIQQRFISIAKKD

SEQ ID NO: 60610 - protein, 549 aa, Zea mays
  Coding DNA Sequence Number=SeqID_17235
  Gene Ontology: Mol. function=transcription regulator activity; Cellular component=nucleus; Biological process=regulation of transcription
  Homolog annotation: Hit_ID=Q5DM34; Match level="QueryCoverage=37%, HitCoverage=72%, E-value=1e-86, Identity=77%"; Hit description=BHLH transcription factor
  Pfam annotation: Domain name=HLH; Domain location=445-494; Score =35.4; E_value=2e-07; Accession=PF00010.17; Description=Helix-loop -helix DNA-binding domain
MPLHLAAMQGRPAYMQAPVSCPECDCDCSLCCWVRLIRPEADGPLPRDFSSVPFRLVGIMVMKMEHEDNGAIGGTDGTWTEDDRALGAAVLGADAFAYLTKGGGAISEGLVATSLPGDLQNKLQELVESESPGTSWNYAIFWQLSRTKSGDLVLGWGDGWCGEPRDGELGAAASAGSDDSKQRMRKRVLQRLHIAFGVADEEDYSPGIDQVTDTEMFFLASMYFAFPRHAGGPGQAFAAGIPSGFPIRHEAERSPGLAKIFGKDLNLGRPSVGLAVGLSNSKVDERTWEQRSAVGGTSLLPSVQKGLQNFSWSQARGLNSHQQKFGNGVLIVSNNEGAHRNNGAVDSPSAAQFQLRKAPQLQKLSVVQKTPQLVNQQPMQAHVPRQIDFSAGSSSKPGVLVTRAGVLDGESAEVDGLCKEEGPPPVMEDRWPRKRGRKPANGREEPLNHVEAEHQRREKLNQRFYALRAVVPNISKMDKASLLGDAITYIPDERVALPPLPSRRPCRSGGAHLHGLVVELLLSPSAPPEAKSVSFVELLALPDMEMGSC

SEQ ID NO: 60611 - protein, 526 aa, Zea mays
  Coding DNA Sequence Number=SeqID_17236
MHRALPPSEPPDGERSWFFRLVVVGGTQLRGSWYLSAIARLQGFSSGSPAASPRRWSPKIVTTSSMVGRSEPGCGLRPSLSFKDVHHPGWGGGRAEPELYLPRGFVGHLLPQHSGERALTGLAGGSDFDNAGPVGRERRQLQRVGLAGSAGSGSAPGAPSRRESGCRAARTGGPPKMSRAARAAFVFLGCPAFAPMASVVGVEVVAAEEVLVADGITATIHAPGLRLFGFDSLSSPLEWGRGRGARCSSVRPEAIAAAVWPPGAEVVVAAAGAGVGEPTRVSSPRRPSNVGGCSYLQGRNRSSICNGTLSAGVCSSWLSGPEHESLGSVGLAARGFSCLVKGTFGRSAMSWSQRQRCQHGQRQRWLEKKLRQPEPGRVIHWRDRHRSWVAEATSRLMSSGDSWLRLRSGRSGRLLGPGSRRRPRRRWPKRGANRFLRGGDPPTVLPFEAGSDSAKGGVDAEGAAAPPLMSDPAGTVYLVKVMSEVSVSQRRRSPSAWSALAAYIGGSPLLAPEGGSGFAEARLTLP

SEQ ID NO: 60612 - protein, 175 aa, Zea mays
  Coding DNA Sequence Number=SeqID_17237
MASTGSEQVRLGWATMARELGRKATAQEAGRPNAWEIQGAQYRELQRRAQGRGAATMAELEPGTAPSKEGSCEKEKNGYPNSGYPYPTRLSGYLSGSTRSVSDPNPKLYYSGITRIRPEYKNTRIRIRKMVPNQYRIRYPFRVPCPFSPLDGTSARGGREAMQPGNFDDTQGDEG

SEQ ID NO: 60613 - protein, 235 aa, Zea mays
  Coding DNA Sequence Number=SeqID_17238
MSWPSEERLGPVEGQLSGLSGSSKVEAESEPWGWARRSPSSEVEAESEPWGRARRSPSSEVEAESEPWGRARRSPSSGVEVGQWSGEVTAVTSALSTEERAFMDKRPLRRMVPGQSSHLERLHHRLHEEQECRCQEQEQQDSSPSPQQEVESKRPPSPAPQPEMPLAPPQGIPAAGGDPDGDGDDDDAGGSSSHGTELSEEPEPEGWITRPIIRDATRGCHFHDALDTLLRRAFD

SEQ ID NO: 60614 - protein, 115 aa, Zea mays
  Coding DNA Sequence Number=SeqID_17239
MARGRGRASAERRARGVGRACAKQYPRSGPCDQDRTREIRPGRDERLREALLLSAAMMSPKLRQAHARVVLGSPGLGREGEDATANLVAGKRPRIRGQRGENGGEKASGGPEELR

SEQ ID NO: 60615 - protein, 238 aa, Zea mays
  Coding DNA Sequence Number=SeqID_17240
MTSHEFGTLIPGHLRHLRLRWWLLLLLLNGGQSLTDGLNCLSLHQEHLLDGHRGRGRQLLLLGRDCHKTGDHAEVSGTQPYSAPHEPAVRSRAISARALLSSSSAWSNSVFSTAARLTVLLNLGLSSPTGLRTLETVLRTAHQAGRLPAVRVDPTTMLVDHTAILDGPSTSVKCPTQQGVERIVEVTPASSVASDGSSNPAAPTVDVPAPHAGGGAASPSDWTDRPRDDEADAPRDER

SEQ ID NO: 60616 - protein, 82 aa, Zea mays
  Coding DNA Sequence Number=SeqID_17241
MTWLAHRTCPVCTGLSGLLVANLKAKKPKEPKKNNFKGKKDNAIEDDKKNKNIFKKDGKIRQLRNGEKLILLVIGSPTLTIW

SEQ ID NO: 60617 - protein, 290 aa, Zea mays
  Coding DNA Sequence Number=SeqID_17242
MQESLAGPPSQQNPPEGLPRNPLQDRHHSKILPRAFPGIPCRTAITAKSSRGPPYTDHSPTALAPFGYQGDSSDPRDLTASRSNTNKHGSSCKQLLSPSVFLLPPINEQPWLGEKGRGVGQDARPHRPALHRVGLRRRGGWVAGEPGARHASRGHIGAAELRRRAISRLRATHKLHCFVAIAYVAKLCRETKREGDLTFNEADWLTTARRSALRCRFYGGQGQALVERFHGAPERRRTQKSVAAPREDHQTDEGGSRWPAIYTQAVDGAPGAWAYDASDRAQCRRVALQS

SEQ ID NO: 60618 - protein, 42 aa, Zea mays
  Coding DNA Sequence Number=SeqID_17243
MARDLYPGGKSEGDGGRGEILGRNRATEQSLLGCFVMAVCKA

SEQ ID NO: 60619 - protein, 186 aa, Zea mays
  Coding DNA Sequence Number=SeqID_17244
MTSHGSSDEGNAQSHTDELAREGFPRTLWEVLQGAGYTTPTQYAVQLFEKHRVPRCRPGWRSLDSESFGYRAEDTIEAIALHGLTTFYGFHPLELSTHPIGLFPVEKGDDPMWKDRVEHAKDIWAIYPGQTAHLMVRCMNALYRLQVMRGEAMSHLMALLEATKITLDNREELVVDLSTEMVEKDL

SEQ ID NO: 60620 - protein, 640 aa, Zea mays
  Coding DNA Sequence Number=SeqID_17245
  Gene Ontology: Mol. function=helicase activity; Biological process =viral genome replication
  Homolog annotation: Hit_ID=Q9AYF0; Match level="QueryCoverage=100%, HitCoverage=51%, E-value=1e-177, Identity=49%"; Hit description =Helicase-like protein
  Pfam annotation: Domain name=DUF889; Domain location=546-639; Score= -78.9; E_value=4e-06; Accession=PF05970.5; Description=Eukaryotic protein of unknown function (DUF889)
MALVQKFGKPDIFLTMTCNPHWDEIRRELLPEQTPQDHPDLVVRVFHAKLQELKHRLTKHDFLGKVRAYVYVVEFQKRGLSHTHFLLIKQRKYKLTCPEQYDLLISAEIPSNKYPELRKMVIKHMMHGPCGSVRGCELDNRWVVPYNPYLLRLFNCHINVEACGSIKAVKYLFKYIYKGHDRASVVMRDASKADDDVDEIKQYRDARWVTPPEALWRSYGFELSQISPPVMQLQLHLPNMHMVAFHERQMVERVTNHPVDLKTVDDVTLPTFCEAAERRGLLESDNTLDECLTERALFQMPSVLLRLFATILVYCEPSDVVVLWQKHKDSMSEDYQHRSQNKTQVEQMVLIDIRNMLQSMVKDINTFPLPPIIDAYDDAIGNAREVYEEESIKPTEGDVALKDSLNKEQRAAYNKIMSVVDTDQGGLFFVDGPGGTRKTYLYRVLLVTLRNQGKIAVATSTYGVAASIMPGGRTAHSHFKIPLTIDDGVVCSFTKQSGTTELLQKAYLIIWDEASLTKRQVVEALDNSMRDIMGRPRLPFGGKTIVFGGDFRHVSPVVRKGGSGSDLDNLIDFSFPNLNENMSDSTYITSRAILSTRNDWVDMINVKMIDHFQGEHMVYHSFNSAMDDPHNYYPPEFLNT

SEQ ID NO: 60621 - protein, 582 aa, Zea mays
  Coding DNA Sequence Number=SeqID_17246
  Gene Ontology: Mol. function=DNA binding; Biological process =regulation of transcription, DNA-dependent
  Homolog annotation: Hit_ID=A3ASL8; Match level="QueryCoverage=89%, HitCoverage=86%, E-value=8e-50, Identity=38%"; Hit description =Putative uncharacterized protein
  Pfam annotation: Domain name=B3; Domain location=151-248; Score=53.6; E_value=6.9e-13; Accession=PF02362.12; Description=B3 DNA binding domain
  Pfam annotation: Domain name=B3; Domain location=27-128; Score=53.6; E_value=6.9e-13; Accession=PF02362.12; Description=B3 DNA binding domain
  Pfam annotation: Domain name=B3; Domain location=315-411; Score=36.5; E_value=9.3e-08; Accession=PF02362.12; Description=B3 DNA binding domain
  Pfam annotation: Domain name=B3; Domain location=485-582; Score=30.2; E_value=7.4e-06; Accession=PF02362.12; Description=B3 DNA binding domain
  Pfam module annotation: Pfam domain module=B3::B3::B3::B3; Domain location=151-248::27-128::315-411::485-582
  Subcellular localization annotation: CTP_CleavageSite=33; ConfidenceScore=5.04e-01
MSKQFKVLLPTSFHKLVSTAFLDRRSISVADVSLSSRNPLIPQRISDELAGCFDAGEGEGAPEPTALVVSPFGKVWRVEVVRDGHGASLGRGWAEFLAAHGVGIGWFVVLRYEGGGALTVKVFDTSLCIKEFGAPAAVMPSKSCKSIFCKPQFIRIFHSNLSEKMMLPARFVKDYVSEECLNSRIAIIFSPIAKFWRVELKNDQSGIFFTGGWSQFLDFHGIKNGEVLLLKYEGNMVFKFKAFGLSGCQKDFKNQNAGIQLNTKKQQETPPIRKRKSNDEKSSSEENKRLKTPVTSPSPSDPSLEKPYQIGTSSWIKKRINTYALEQFLALSVKFCNSIGFRMACTITLKTATNSTRSWQVRGTAYKWHRYIIGVGWKSFCQDNRLKAGDLCTFNIIETTLWHVTITRSALAADTFNKQKKPPCSSSRDKKGSSSREGAKRPKPSMAHFSKVQVPPSYARRCAYDVGPPPWIRKQMNASTIRNRLVRMVILAFDSRKLVIGCLAPAFCNQIELRRRCEIVLKTSINSNHSWRVGGLSQKKGSYIIGPGWKKFCTENRVKVGDVCTFNVIETQLWHVVITRRC

SEQ ID NO: 60622 - protein, 151 aa, Zea mays
  Coding DNA Sequence Number=SeqID_17247
MAAILLSSDLNKRRGCLLYKYEKEVDSGSLSDVEILENPTNFKKRKLPHMLDDSEVVFEDEEGPITQADLQRWFVDDWDKRTPVKVSTDGCTNDFLMVGLSTKDMLVTKSDSIDVLCDYIMAIEDDTTLEYDAKILRRNFVIDLLSYENNS

SEQ ID NO: 60623 - protein, 169 aa, Zea mays
  Coding DNA Sequence Number=SeqID_17248
  Gene Ontology: Mol. function=phosphatidylinositol binding; Cellular component=clathrin coat; Biological process=clathrin cage assembly
  Homolog annotation: Hit_ID=Q5N9P9; Match level="QueryCoverage=36%, HitCoverage=11%, E-value=3e-15, Identity=64%"; Hit description =Clathrin assembly protein AP180 short form-like
MECAMGQTVVGPSVIRQSSGCTTENRAEDGVRLDAAIRALEVEARDAKMRLVVTAQLPRRTRRMLGFCRGGLLDLPHLRLARCAASPSCWICRLSVSFSSSAGILHKFLINPATVQVLRENIYCAINDGIINLIDKMPKHEALKALDVYKRAIQQARILSDFYESCQGL

SEQ ID NO: 60624 - protein, 104 aa, Zea mays
  Coding DNA Sequence Number=SeqID_17249
MKGPCTPTCCTLLYASFFCLLLAGSEVEPPVIGSTSFVAEGAERSPDTITFMSLSFTCTYNEHYWVKKSDQGHNLSGTRDSRYQDDLQILITSLLIVAIQTNMA

SEQ ID NO: 60625 - protein, 128 aa, Zea mays
  Coding DNA Sequence Number=SeqID_17250
  Subcellular localization annotation: CTP_CleavageSite=53; ConfidenceScore=5.73e-01
MAGAVIAVVERRSSSRSRLFLASVKVGNGFMQVRMGVTRSKRGLKPQRRLSTRLSSVMGPRGCGECQPSSSSDDSTRPQRDRPEQAGGKRSQGTESESSGCRETEPQGHPRSGEQYRPTLEPCPEVRP

SEQ ID NO: 60626 - protein, 100 aa, Zea mays
  Coding DNA Sequence Number=SeqID_17251
MGKTRRQQLGAKQGGIRQGEHAGGGEDCGGRQGNNRGRPRPVGARDDREGGRWGRRGSGGQRGGRRGSGGGGKAGAAVSGVGAGEGGASCRGGATAATKT

SEQ ID NO: 60627 - protein, 49 aa, Zea mays
  Coding DNA Sequence Number=SeqID_17252
MVGLQVVTRMMFMTMVMVAFGAIYAQVKKKENGVEADLQEFWDFDEFED

SEQ ID NO: 60628 - protein, 121 aa, Zea mays
  Coding DNA Sequence Number=SeqID_17253
MKAARFPPLSRPSPATSLPPFALAHALDPSGLGHAAHSLVGLRDPPNPKSLHKHKINHHLPCKHLHQLKMRTRLRKKKKKKMKIKIKTISHLKRRTLIKGEIKMIKTRKMIKKLGIKDRHT

SEQ ID NO: 60629 - protein, 61 aa, Zea mays
  Coding DNA Sequence Number=SeqID_17254
MVNGEPAVIGKRERRHGYNSPDCLVMHQTVRRSERYLVSLPLSDDFLMPVHLEIGQPIVSP

SEQ ID NO: 60630 - protein, 186 aa, Zea mays
  Coding DNA Sequence Number=SeqID_17255
MNLHGDRSQSVCTELTASSKGSSPDSPLGRSSIEVHLLKSISLPVIHTCDPLPSATRTAVVLVLQIAVAIHKRIRFNTNQERNSVGGTIKFGARQESVLPSGAPATIGYSRGALHYNSPDCLVSLRSNDSLRSNGQLQKCTVINSATQKSEQRSQRSPNMSGVPPDCSVSFEDKRCQQSTAPNPNG

SEQ ID NO: 60631 - protein, 464 aa, Zea mays
  Coding DNA Sequence Number=SeqID_17256
  Subcellular localization annotation: CTP_CleavageSite=26; ConfidenceScore=5.45e-01
RRDGANVAAGVETVVCSKKTIAPRCRGSRSRGGRGRKTRSKSLLFGRGRRSSVNDRQGDTAKGHRQADLPASSIVRASRSPAREADSSARVYAGHGVRARGGIEGETADPAGKATTATDPAGKPRSSQRGRRIEPERSQQRGSGREGRDSDGSSEGDEGVVGGACPAGQGPAPDLAKGVDGTGDGRSSKGEVALGPTMKALRWLHSTREEEKACAWERCRTEERTMTVGEGSAREVVAAAAPLRPAAAAAHAPTWPQRAGGELGGTARPRCDRPEERGDGREGRRQSGHLGQPVQGPRQQSRGEVDDATWREAPASSTPARTCRAVAGEGGSRPRDGGGSGPRVGPVERAADVAGGREGKGRLRRDDRRVGELARGPDGGEVAARGGAEARRGGGRIPRLRPWQRRPRPGLRGGGSVCALPWRRGPCGCAPARPRHAALTSREGERLVKSADLDLLTNLVHEQF

SEQ ID NO: 60632 - protein, 629 aa, Zea mays
  Coding DNA Sequence Number=SeqID_17257
  Homolog annotation: Hit_ID=A2YX13; Match level="QueryCoverage=76%, HitCoverage=94%, E-value=1e-156, Identity=59%"; Hit description =Putative uncharacterized protein
  Pfam annotation: Domain name=DUF1336; Domain location=266-486; Score =376.7; E_value=3.8e-110; Accession=PF07059.3; Description=Protein of unknown function (DUF1336)
  Subcellular localization annotation: CTP_CleavageSite=32; ConfidenceScore=5.04e-01
MGSCTSKSALDHRRPARYYTRGRRVHSRRSIMPEAPQSQQLGDASRGRMTGFSMSEIVHVETANRGKSEHSKTFHLTQMEWHHSQRDSKGCSNEDAWFDSVSILEDDSDDEFKSVDGDSDEDEEQAEKQQYASVSSFADALSRIGDICRGVPLPDILALKGDGRRSQQSMPSSFGLKAVLIKDKSDAADDDDDDGDGGGGKETSTPSRLRKLLQSISFNERVQQLTGGSPAKKKSTVIRLSYKTTSSCGGDDYEDGGGGGGGECGRSKKDKKKCAAPNYAAYYPIGVDLFACPKKVHHIAQHLDLPQIKTHPKIPSLLIVNIQMPTYPAAMFLGDSDGEGLSLVLYFRVSECYDKEVSEHFKESMMRFFEDETEKVKGFTSESTVSYRDRLKIMAGLVNPDDLQLGSTERKLVQAYNEKPVLSRPQHSFYEGEDYLEVDLDIHRFSYIARKGLDSFRARLKNGILDLGLTIQAQKQSELPEQMQKDIEPDNIQMPMHQTDMYIHNRILTEIAAGAPVVKVVIYYSSPGERLLAFTTNGLNDNIIYATQPAGCIEEAEDVFCKSAILRLLDAELWTLCATLVEHDPLALAAAWLLFLAAGTSWLCFPSYVVMMAFGSWDDLSICFFTSHP

SEQ ID NO: 60633 - protein, 136 aa, Zea mays
  Coding DNA Sequence Number=SeqID_17258
  Homolog annotation: Hit_ID=A3CAT1; Match level="QueryCoverage=58%, HitCoverage=34%, E-value=1e-12, Identity=57%"; Hit description =Putative uncharacterized protein
  Subcellular localization annotation: CTP_CleavageSite=54; ConfidenceScore=5.30e-01
MAAREASAPAPSTPHAGDGVSRPPRPTLALPPRSVIESLFAAGAAETSPGPLTLAAALFPDAPSPAFHGSFTQLLVGAIGSPAVPSSPSPFAVPPRLSPATLLGSPGFFSPTAFPQLRLRIGPPDALITAPVPLYQ

SEQ ID NO: 60634 - protein, 42 aa, Zea mays
  Coding DNA Sequence Number=SeqID_17259
MERRRYEEDEHGRQRNGDNAYVTFAGAVKMLGFAVKCGVTIG

SEQ ID NO: 60635 - protein, 154 aa, Zea mays
  Coding DNA Sequence Number=SeqID_17260
MEDSFVIRTSYSSEVEGFPHLLWSCALRMGIRKKPDNKNTPTWRKRLQALSGRDPNEDDPTIVYMVGYLHTLDNHYDDLFSHCTHLNSRVESLEQQIKELKKEKVSLQESLEIAEGEKANTREAYRTLKMNYDKKLKKLAPTKKIWKRTKSQGC

SEQ ID NO: 60636 - protein, 407 aa, Zea mays
  Coding DNA Sequence Number=SeqID_17261
  Subcellular localization annotation: CTP_CleavageSite=38; ConfidenceScore=5.05e-01
MVTQDGDHQFDGGEKQAGLRPLPRPQLQGSSSSLLGRRASSAKEASSSHAGEGELLLPSQGAAFRPPSGRLWPAAPGVAQHVVRREGGTRVLRRSRSRSCGEDVSEDLPVRFGAAGARWCGVGGQVAAVVGAEVVAAREGFSADEIVGATCGRTSGSSALAACPRPSCGDVGEGPPAAAFALRSSLQLSCRPRRRSLTLLQWLAASHPEFVVLQALRCGGCSYPREWNRSSVCNGTLSAAWTEAESAREEASSAREHVASLAEEVQQRRLELGQVEILSPVSPSKAGPDSAEGGDDAEGVAAPSVDDLFVGSRIVYPSESYFSRKVMSDKVMSEVSVSRRRRSPSVGLAAYVYSVVFRILLSKQSKSAKDVLAERLFPRKILTQRGFPPLLAPEGGSGFAEARLTLP

SEQ ID NO: 60637 - protein, 89 aa, Zea mays
  Coding DNA Sequence Number=SeqID_17262
MSGAPEDSDFKLVTFGKFQRRLRYNSPDCPVYTGYVWCSKEVRPSELASLGISLQPLRYNSPDCPVYTGLSGVTAGQRLFRRQRLPATH

SEQ ID NO: 60638 - protein, 172 aa, Zea mays
  Coding DNA Sequence Number=SeqID_17263
  Subcellular localization annotation: CTP_CleavageSite=94; ConfidenceScore=5.60e-01
MQAACNRAKWTRFSDSRHAQHGGPGPRVTQPARRMLRASNYTATCATTSPPRLRNQYHDSRRPSARPSYASLARRTDGASGRSSGRRFAFVVITAPKKGPGKGDTPKRILPREGTRLRASLLIRGSKAGPPKGSTAASDRVGPTPTTGQRFEGRPPEGFHGRLKLLGLRAHY

SEQ ID NO: 60639 - protein, 137 aa, Zea mays
  Coding DNA Sequence Number=SeqID_17264
MGKKRKREPTPPSEDFGDSEYSEEEFSSESEGSPAPIPLRESSDDSDDSQGLAAEVWTYIRAVERCGLEGSDEEDSDGGGEDEDGDDDNDDDDEGGGGGDDDGSGRGGSEDGDGDGSRSGDGSGRGGSGGSNNRASG

SEQ ID NO: 60640 - protein, 355 aa, Zea mays
  Coding DNA Sequence Number=SeqID_17265
  Gene Ontology: Mol. function=protein dimerization activity; Cellular component=nucleus; Biological process=regulation of transcription, DNA-dependent
  Homolog annotation: Hit_ID=A3AYI3; Match level="QueryCoverage=100%, HitCoverage=56%, E-value=2e-97, Identity=46%"; Hit description =Putative uncharacterized protein
  Pfam annotation: Domain name=Auxin_resp; Domain location=9-74; Score =84.5; E_value=3.5e-22; Accession=PF06507.4; Description=Auxin response factor
  Subcellular localization annotation: CTP_CleavageSite=74; ConfidenceScore=5.41e-01
MHIGLLAAAAHAAATNSRFTIFFNPRASPSEFVIPLSKYIKAVFHTRISVGMRFRMLFETEESSVRSNALMWLRGVAGEGGFQSLNFQSPGVGSWGQQRLHPSLLSNDHDQYQAVVAAAAASQSDGYLKQQFLHLQQPMQSPQEQCNLNPLLQQQILQQGSQQQMVSPDAQNIQSVLNPNAIQQQLQQFQQMQHAHNDQKQKIQPDQPYQVPSSAVLSSPTSLPSHLREKFGFSDPNVNSSSFISSSSNENMLESNFLQGSSKSVDLSRFNQPVNQTLFSPQVDSSSLLYNMVYKSGSVGRSLDITRFSNYAELREELGQMFGIKGQLDDPDRSGWQLVFVDRENDVLLLGDDPW

SEQ ID NO: 60641 - protein, 176 aa, Zea mays
  Coding DNA Sequence Number=SeqID_17266
  Subcellular localization annotation: CTP_CleavageSite=43; ConfidenceScore=5.07e-01
MGEAKPNCRGNPHVGYSHYKDSNPAQVHHNKQLLRLRVTAAVRAAVSAPTSRVGLAPPRPRPLEPRALLAISPSLICAPTGPPLPPLPRCAHAKTAAVNPAVPSSVPGRRWSSAVSIATVSFAPTSATRNAHRFPLPLPISLCPRSPAVLRAAATVAPGRRRVSVATEESPEAALR

SEQ ID NO: 60642 - protein, 224 aa, Zea mays
  Coding DNA Sequence Number=SeqID_17267
MSRPSSRRQPHQWVAQHVVCREGGAHVLGGSGEGEDLPVRFEASGARWCGAEVVAAGEGFSVNEIANSGRTPGPPSSGLNGWFSSSVNESPRAVAPARKPLLKLLRRPGRRSSLLLPERATASHPSAFCCSAGPPIAWGCSYLRRWNRSSVCNGTLDANSPVGCLNRFTKRESPRVKVTSESGDLRTASPSEARSDLAEGVVDAEGAAAPFSRQDPSLQDRIVL

SEQ ID NO: 60643 - protein, 80 aa, Zea mays
  Coding DNA Sequence Number=SeqID_17268
  Subcellular localization annotation: CTP_CleavageSite=41; ConfidenceScore=5.01e-01
MAGARLSRPGCPVLLRPIVPSVEYPSPAVVSPVGPCAVLVRALALACAQCVDGTPSTFAYPSSTPRRLSSTPVYPRLPLA

SEQ ID NO: 60644 - protein, 144 aa, Zea mays
  Coding DNA Sequence Number=SeqID_17269
  Homolog annotation: Hit_ID=Q8S474; Match level="QueryCoverage=48%, HitCoverage=9%, E-value=2e-07, Identity=43%"; Hit description =Putative pol protein
MIKGILMSYVCKLAKEISRIKNIELMPKFGKRLFIKWLGAQGSHLANKKTKYWVQQRSKGQPKAPLVWRTGLSGVPPDMSGAPEDSDFKLVTFGKFQRRLRYNSPDCPVYTGHVRCSKEVRPSELASLGISLQPLRYNSPDCPV

SEQ ID NO: 60645 - protein, 142 aa, Zea mays
  Coding DNA Sequence Number=SeqID_17270
MAKNNKRKREPTPPSEDFGDSEYSEEEFSSESEGSPAPVSPPASSDDSDDSQGLAAEVWTYIRAVERSGLEGSDESEYSSDEEDSDGGGEDEDDDDDGDDDDGGDGDGSGSGRGSGDGNSSRGSTKGSTKGGGGGSSGKASG

SEQ ID NO: 60646 - protein, 115 aa, Zea mays
  Coding DNA Sequence Number=SeqID_17271
MAGARLSRPGCPVLLRPIVPSVEYPSPAVVSPVGPCAVLVRALALACAQCVDGTPSTFAYPSSTPIRLSSTPRLPPSTPRLTPYAFVSFAIARASRNKSSRDVRTRCACCSHVSR

SEQ ID NO: 60647 - protein, 236 aa, Zea mays
  Coding DNA Sequence Number=SeqID_17272
MAASIHAPLRRGPLPRPPTGGGNEAIKAKELEARRQVALVVSPAEATTSAVGSLTSGGDHLSTDDSSHLRTGGLPATAAASPRMKRSSLPPSYGVRTIPSKNAAATSTVYDVLYDPPDGVRTVRLAAREMPRIWQTCARRDRRPCGRQTATPRSAAGGSVGGGTKAIQAKEPDTRQLTTPTADRLRVAEVRLLRKAGEHPSPPNARGRSGSPAHAEGGTPTRLAFHPSEDDEHPWS

SEQ ID NO: 60648 - protein, 41 aa, Zea mays
  Coding DNA Sequence Number=SeqID_17273
MASAKVEGEWGDRKRRGPWQFNMGRRAGGEAGRPGRLKSII

SEQ ID NO: 60649 - protein, 350 aa, Zea mays
  Coding DNA Sequence Number=SeqID_17274
MPPSCGASGIREETGGTDQELSVDDYLVGGVTMFGAQTGLPPAKKSPPHLRPKGWRRLLHDSYVMALVNVATSQLRSERRRVEGKIERLQMQHTKAVKDKLAAENRSRNLLGKVTTLENENEDLGRQLNDEKKATAEAKTEGKSARAEAQAARKRVGELELELELESLLSIVTSLMSYASLVSCEGVVNALAREGCMHFEAFARSNKDFNAGVFQVEDDTTRDKEVEDLAGLESSVARKDVEVEAGAEEQSSLAKVDVEDPTAVLVPGPTQTDFDDIGNDKSSMCQSLIVLSSGESHVDLWSLESEELLSPFARMDDESSEDDLGYFMALDLYVVESSPTVAPDSGVVFV

SEQ ID NO: 60650 - protein, 119 aa, Zea mays
  Coding DNA Sequence Number=SeqID_17275
  Subcellular localization annotation: CTP_CleavageSite=34; ConfidenceScore=5.24e-01
MVVSVLVSVLVPALAPVLAPTSQAQQSVSSEFVSAPASESAPEYMVLISASESHLEYTPHALGFSWSSESLWLITFGDRHHLDGLVAFGAVITPEDLLVTRLKFVRGREASRRRANLVK

SEQ ID NO: 60651 - protein, 422 aa, Zea mays
  Coding DNA Sequence Number=SeqID_17276
  Gene Ontology: Mol. function=nucleoside-triphosphatase activity; Cellular component=cytoplasm; Biological process=defense response
  Homolog annotation: Hit_ID=Q6Z9W0; Match level="QueryCoverage=74%, HitCoverage=70%, E-value=1e-162, Identity=85%"; Hit description =Putative Trp-Asp repeat protein
  Pfam annotation: Domain name=WD40; Domain location=185-239; Score =11.5; E_value=1.2; Accession=PF00400.23; Description=WD domain, G -beta repeat
  Pfam annotation: Domain name=WD40; Domain location=284-322; Score =40.9; E_value=4.7e-09; Accession=PF00400.23; Description=WD domain, G-beta repeat
  Pfam annotation: Domain name=WD40; Domain location=327-365; Score =13.7; E_value=0.65; Accession=PF00400.23; Description=WD domain, G -beta repeat
  Pfam module annotation: Pfam domain module=WD40::WD40::WD40; Domain location=185-239::284-322::327-365
MRYGFGTTTYEEGNVRGQVVPRKDTFKYLGSIPQSTERRDIDEECWPTKRRHVLIRAELYSVLGWPDLHGSRLINRMIGYKGNENNKIESKSTRFRCFSPRRLVTSDLDQLRNLVWATTKHDVYTMHDQSVTHWSSLEQTSTELINADDCIVPKQRGHGSQSVAMVQVTTMAVDSNLLVVGGFQGEIICKRLDDEGVVYSTRVTDDENAITNSLEMYQDPSGSRRLVAANNDCSIRIFDTEYFDLLKHYVFPWSVNSVSVSPNGKLFAVLGDHEDGCVVDPKCGKAIGSLRGHLDYSFASAWHPDGNIVATGSQDTTCRLWDIRNLSQSVAVLGGRMGSIRCVKFSSDGRFLATAEPVDFVHMYDAYADYSRSHEIDLFGEIGGLAFSPDTEAFYVGLADQTYGGMIEFSKRHQHHYLNSLW

SEQ ID NO: 60652 - protein, 346 aa, Zea mays
  Coding DNA Sequence Number=SeqID_17277
MAPIRPLQLYADEGYQLRIRRLEAQTTSVFLYPKHHPRFFVSHFPPRHRAAIIFLRSLMGTMPPPSPPSPTPRSRQPPCPDPDPPSAARSWLPDLTVSADAAPSPPPLKFDQRLVEVFTPFLEKHISLRRAPFRHPGLRRPPCRRSNTDPVGLQAFCKRHGLSARGSNADLIARLDVALGRAAGAEEEVAGVAAMKGYCELRFQATCSPVVAKTRGKSAQAGSVEVGAVVPLRRSRRNSLRAAESEEVQVAVFVDRKRKCKNQENDKGVALSAQVGASSRVTRRPSLAVAAAVLPPLVGPKRGRGEAAGVQTSTQVEVPARMTKSRSIDICIIISSGLLFFMGLLG

SEQ ID NO: 60653 - protein, 203 aa, Zea mays
  Coding DNA Sequence Number=SeqID_17278
  Gene Ontology: Mol. function=transferase activity, transferring glycosyl groups; Cellular component=cytoplasm; Biological process =metabolic process
  Homolog annotation: Hit_ID=A2X6F5; Match level="QueryCoverage=63%, HitCoverage=14%, E-value=1e-46, Identity=69%"; Hit description =Putative uncharacterized protein
MVPLQALLSMQWLGTTVSVLKRHTPDVGGGGAGATADRPRFTIPFSDLKVTFSGVETIRGHLASWCPQEVVLRHEAVGVFLTHCGWNSTMESLCVGVPMLCWPFFVEQQTNCRYTCMKWGVAMEIGQDVRQEAVEEKIREAMGGEKGMEMQRRAGEWQQTGLRATRPGGRSYANLDKLVADVLLSGGGKSSQEGFSSHTATVQ

SEQ ID NO: 60654 - protein, 166 aa, Zea mays
  Coding DNA Sequence Number=SeqID_17279
  Homolog annotation: Hit_ID=A2XR58; Match level="QueryCoverage=68%, HitCoverage=37%, E-value=8e-07, Identity=34%"; Hit description =Putative uncharacterized protein
MEDHENLVVLRDHGADNQHLQSLTLSFACEDSSTIDDHRVDDQQKMQAPHTASLAICENAQNDGNRIPESMVYQDVNKHGPTMNVPEVGMSFESGENAYEMYNTYAGPGVSTRKSQRQSGKAAAVELNGMNMFVHIMGEGPMGSFFVARKLFSVQLVGGHIKCGLC

SEQ ID NO: 60655 - protein, 421 aa, Zea mays
  Coding DNA Sequence Number=SeqID_17280
  Homolog annotation: Hit_ID=Q6QP51; Match level="QueryCoverage=24%, HitCoverage=49%, E-value=6e-14, Identity=44%"; Hit description =Putative growth-regulating factor 1
  Subcellular localization annotation: CTP_CleavageSite=2; ConfidenceScore=5.08e-01
MVALQGGHPPFKGDSPYLCPQPSWAESSPTRSKVLPLRRGGWVPHVMQTGPEQKKPNRHARCMQPPSGYERSSTFAQTSGRKGGQPCRRHATAPSGCAPPTSNAPSMGAHAHTSRNRRAGCNVRATAPQLAPLPRLLDCGTSTATRGNPAYNPAVLARRDGQYGQNGPAVMTVAGGREQRKGGASGRGSERRFAFAIMTASKKGNRLRASLLIRGSKAGPSEGFDSRLRARGLHTHYWLALEGFTAASDTARDDHGYVQYITKARATLPSHSATPLTGLTEGQRRLRRSDCCATRQSEADRQSGPASGTIGNSAPPDPGLGLGLSPGRRRTLLRPTQGSDSGSAPEDGELRSARPRARTQAQPRKTTNSAPPDPGLELGLSPRRRQTLLRLILGLGLSPGLSQRSSPRPTQGLGLDLGLRR

SEQ ID NO: 60656 - protein, 75 aa, Zea mays
  Coding DNA Sequence Number=SeqID_17281
  Subcellular localization annotation: CTP_CleavageSite=27; ConfidenceScore=5.06e-01
MATAVVPHSRPRRRAPPSPALEALPCRRASVSFVPLQARHRPIFDPGPPREFSDFIEFHIIISVFSHFSCGNLHV

SEQ ID NO: 60657 - protein, 161 aa, Zea mays
  Coding DNA Sequence Number=SeqID_17282
  Homolog annotation: Hit_ID=Q6QP51; Match level="QueryCoverage=31%, HitCoverage=23%, E-value=2e-10, Identity=64%"; Hit description =Putative growth-regulating factor 1
  Subcellular localization annotation: CTP_CleavageSite=46; ConfidenceScore=5.17e-01
MTVAGGQEQRSRRQPSSRPIRGQRENPLSRREDNAPVFRPRTARACATAAPPTTRPVALTSRRDRRRLWQEKRATLRLRHNDRISKGTGKGGYPEKDPSPGRNQAPSLPTDQRFEGWPPGRVRQPPQIAWALHPLLVRGSKVGPSEGFHGRLRLFGLRAHY

SEQ ID NO: 60658 - protein, 67 aa, Zea mays
  Coding DNA Sequence Number=SeqID_17283
  Subcellular localization annotation: CTP_CleavageSite=55; ConfidenceScore=5.07e-01
MEPDGGTAIGAVESLLTSSCFRKGAESRRRHRVGRCGSSSEAEVESVFRGRGRVRAPRSGEAEFVVF

SEQ ID NO: 60659 - protein, 235 aa, Zea mays
  Coding DNA Sequence Number=SeqID_17284
VVVSTALRKFCADAEKIGDGAKGARVKDVRAGAIADTPVSTKPAMSSPPRAGPHRGWGPGHVFGFAEKQPWPDRLASRPDRRSIQCKDRLTPYPDARSSVDKAEEAPPRPTPGLGLHLDTGRRSLPRPTLGLGLNLDTGRRSPPHPTPGLGLHLDLGRRSPPRPTPGLGLYLDLGRRSPPRPTPGLGLSLDLGRRSPPHPTPGLGLSLDLGGITASPDLGLGPTTLQGGPSLPYP

SEQ ID NO: 60660 - protein, 88 aa, Zea mays
  Coding DNA Sequence Number=SeqID_17285
MEPSGGIAVGAVESLLTSSCFRKGAESRRRHRVGRCGSSSEAEVESIFHGRGRVRAPGSGEAEFAVFRDLARVRALGRAERSSPSSGT

SEQ ID NO: 60661 - protein, 153 aa, Zea mays
  Coding DNA Sequence Number=SeqID_17286
MEQRPGLERLLETTHLELDGKLFVNTQQAPTWRANCRHFDPGGSLDRRVNCRCMSQPRWVGTRRNTKGETGGCACSRGLQAFARERESLCVSPSSRAATFSYEGPGPSSREEPESYVHANVGVGEHKALNLVVVGSSPTVGANVGDLFSNAMS

SEQ ID NO: 60662 - protein, 146 aa, Zea mays
  Coding DNA Sequence Number=SeqID_17287
MSELRHGNRERARDSQCIAELSTEVNRLQQEIVERDTAIDWAVNSCSFAWDWEANALARVAEVSTSLENLQAYCNTLHEEVHLLYDRLHPNMPSEVAATGAGTSGAASGGPEGELDLFGAPPSMNLADERSLEAGSGAGTTKDEDN

SEQ ID NO: 60663 - protein, 231 aa, Zea mays
  Coding DNA Sequence Number=SeqID_17288
MGRAERSSPSSGAEPESEPWVGRSRVSYGRSVERRSDCGHFGSVDWRTCVRIKLCADGGYQLRIRSLEALGPLGTTMRDPVRPEAGFGADTWPPPVRLPCVVGDYLGTNVVAPLVSSSSSTTKPNSMDTIAMFVAVGVDPPRSPSPHTYKRTESQPSLLPQPLTHIRLRRVPHREPHPQLAAANVELPYHHRLRTIGHRRALSDVPWAPPGAVTRVGGIALAVDRRMDDHD

SEQ ID NO: 60664 - protein, 273 aa, Zea mays
  Coding DNA Sequence Number=SeqID_17289
HLERLHHRLHEEQERRRQEQQGSSFSLHQEIESVRSCSPVLPLEPPPAPPLGVPASGVAAGGDPDDGGGDDSSSHDTDFSANLEPEGWVARPITRDAARGCHFHDALDTLLRRAFNRHTWSIEYRCVVYQHSRGVYPDRWEAICLVRRPENSLQGAEVCSEHYSISERDSAEAAMQDAARRGVIVSPVGEGNPRLSSTVNLAAVLNTELDHALDELSRARAEIALLRAERAEHRHLDGGSPAPVGTQHPYRSPQRGHQSYGNPDCKTKITLEP

SEQ ID NO: 60665 - protein, 370 aa, Zea mays
  Coding DNA Sequence Number=SeqID_17290
  Gene Ontology: Cellular component=endoplasmic reticulum
  Homolog annotation: Hit_ID=Q2QMH2; Match level="QueryCoverage=72%, HitCoverage=35%, E-value=5e-94, Identity=60%"; Hit description=Root hair defective 3 GTP-binding protein containing protein, expressed
  Pfam annotation: Domain name=RHD3; Domain location=1-368; Score= -252.1; E_value=4.8e-05; Accession=PF05879.3; Description=Root hair defective 3 GTP-binding protein (RHD3)
  Subcellular localization annotation: CTP_CleavageSite=51; ConfidenceScore=5.00e-01
MARVACTLCGKRLDSGVFVFSVGVNPFCVSALQALQQLQLGRSAAGYSAVACSLADAACSRLAISLLLALVLRYSVLALQPPAQVLGDFLISKKQYWIETRHAKDKLRKALAEPVESLFDVADQTTWQSLRNIYKRETEAILPEFLNNLCQFEMEYAPAEEMVSKLKDYAQSVVESKAKEESSKGDSDTVSSVARFTTVFSHDKDSNPRVWTGKEDVRAIAKEARSAALKLLSVMAAIRWDDEPDRIESILTSTLLEGSVISKIASAASADPLASTTWEEQAHRRGNSKLPPPWAIMAIAILGFNEIMVLIRNPIYLFLLFVGYLMVKALEMQLDVSREFQNGVVPGIISVSVKLLPTIQNLLSKLSYFV

SEQ ID NO: 60666 - protein, 119 aa, Zea mays
  Coding DNA Sequence Number=SeqID_17291
  Homolog annotation: Hit_ID=Q41865; Match level="QueryCoverage=100%, HitCoverage=13%, E-value=1e-39, Identity=63%"; Hit description =Putative uncharacterized protein
AFAAKEITIFSSQYLSHTNNVNAQSTRYHTEEEGPSTDLSVFLWKGKGVEASTAHYVDIRERNFTMLYLYTNMEELDPYFEMFDSIYLAGHKPTPKELDNLRMKGMNGGPCFVEWFHEH

SEQ ID NO: 60667 - protein, 181 aa, Zea mays
  Coding DNA Sequence Number=SeqID_17292
MADSKDSSNVSYNKIIEPTMETLSAEDQQEFEGHKEQWIKEAQLPPKVSETKEIQYVRAYMDEQRDQMQQIIGVVVEEVPVGLPHIRGEHGVILEDSSEELLPTPTSLAESLAFASRSSTSAPPAPAVQAPAPGGDDPDDSRDDDEDDDNDEDDEEHVNEEANYAQQDYFMGFGPVTEHYT

SEQ ID NO: 60668 - protein, 500 aa, Zea mays
  Coding DNA Sequence Number=SeqID_17293
  Gene Ontology: Mol. function=RNA binding; Cellular component =ribonucleoprotein complex; Biological process=regulation of translation
  Homolog annotation: Hit_ID=Q9FYT6; Match level="QueryCoverage=89%, HitCoverage=63%, E-value=0.0, Identity=85%"; Hit description =Chloroplastic group IIA intron splicing facilitator CRS1, chloroplast precursor
  Pfam annotation: Domain name=CRS1_YhbY; Domain location=309-396; Score=127.1; E_value=5.2e-35; Accession=PF01985.12; Description=CRS1 YhbY domain
MHFVYRGSKYQQNAKHSHTFLTNVHKGYLVKHNVHTTLLKYGSIGPVLINNYGEADDAFQENDQSICGQKDEEPVKGTLYEREVNRLLDTLGPRFVDWWWDTPLPVDADLLPEFVPGFKTPYRLCPPGVRPTLADEELTYLRKLARLLPTHFALGRNTRLQGLAAAILKLWEKSLIAKIAVKIGIQNTNNEQMAWNLKASTIPDEVKEEEARLKAVDSLQMVGELSEESSLGTFREYQGFHAKFVHENTENSNTMIELEAEKYRLEKELKDHEWKLSVLNKKIERSNQALAKLHSSWSPSEQSADREHLTEEEKIMFRRIGRKMDGLVLLGRRGIFDGVIEEIHQHWKHKEVVKVITKQNQTRQIMYAASLLEVETGGILIAVEKLTTSHAIILYRGKNYRRPAKSSFSNLLTKREALRRSIEVQRRGSMKYFVRERQKSILELKRKLVEVCDKANQVSNPMIMKSLDSMVGHTYHEHLLPPAPDGTSKFKDKFICVSNL

SEQ ID NO: 60669 - protein, 58 aa, Zea mays
  Coding DNA Sequence Number=SeqID_17294
MGISYTSNGALGTAPMANTATSITSVLDWFYRLALVTFREGPQCTIFLVISVGNHSVP

SEQ ID NO: 60670 - protein, 233 aa, Zea mays
  Coding DNA Sequence Number=SeqID_17295
  Gene Ontology: Mol. function=signal transducer activity; Cellular component=cell surface; Biological process=G-protein coupled receptor protein signaling pathway
  Homolog annotation: Hit_ID=Q6BTJ4; Match level="QueryCoverage=69%, HitCoverage=27%, E-value=1e-12, Identity=35%"; Hit description =Similar to CA1621|CaIFF6 Candida albicans CaIFF6 unknown function
MGGSLLPEKRGALLQPWRGRESCCAREKKTGKSAGEERRRHRKLRFARPQGSDSGSAPEDDELRIARPQGSDSGSAPEDDELRIARPQGSDSGSAPEDDELRFARPQGSDSGSAPEDDELRIARPQGSDSGSAPEDDELRFARPQGLDSGSAPEDDELRVARPQGLDSGSAPEDDEPRFVRPQGSDSALASADGLRLTRPMGSDSTSEEPPPRPTQGSDRPHHRRRHHYPTPS

SEQ ID NO: 60671 - protein, 113 aa, Zea mays
  Coding DNA Sequence Number=SeqID_17296
  Subcellular localization annotation: CTP_CleavageSite=40; ConfidenceScore=5.42e-01
MAQWITRSTHSGGVVNSGDRGLASPAKQTSIPRSGSFSEVCSLVSEGWTGSGKAGLAGLRRQGLGWPRTRRARASDAHPSRKRANLGKNPARVFSWHLGLSLIRELPWQIWPR

SEQ ID NO: 60672 - protein, 330 aa, Zea mays
  Coding DNA Sequence Number=SeqID_17297
  Subcellular localization annotation: CTP_CleavageSite=40; ConfidenceScore=5.37e-01
MAQWITRSTHSGGVANSGDRGLASPAKQTSIPRSGSFSEVCSLVSEGWTGSRKAGLADEHLHVFDAFCARQSTPAPDLACPASCQRPADAMARARAYKTPRDFGRTPPRTLDLTGAQTHRRLPVHGVSAAARPPCHRRPANQALTNPVRPSERTEHTSVKLPEQGIGVCFAGEASPWSSDSTRPPASVDRVILCTILRFLVHMASTSPREAHRAIGLNQVAVVWPAHPSPTRAPACARGSSDSGHPCRQVVHRCDRQSLPEPTPPLAGPLSPPISRATLSFRTDCNLADGEYVLVPEQGAAQEVAPDPAPEPAPEDLPATALEGKPRFYA

SEQ ID NO: 60673 - protein, 123 aa, Zea mays
  Coding DNA Sequence Number=SeqID_17298
  Subcellular localization annotation: CTP_CleavageSite=54; ConfidenceScore=5.11e-01
MEPGGGTAVGAVVSLLTSSCFRKRAESRRRHRAYGAPSLSIWWRQPDGTPVLFSAARVSSGDWLPVSITLSSGAAVGVAQAALSFCQTGSLEDMVAGVTWPSILPPGWTVEWDPASAAEEHEE

SEQ ID NO: 60674 - protein, 348 aa, Zea mays
  Coding DNA Sequence Number=SeqID_17299
  Subcellular localization annotation: CTP_CleavageSite=68; ConfidenceScore=5.27e-01
MSSRSLMRRVFPPSKPPDGGNPPSFCLVVGGTQLRGSWYLSAIIRLQGFSSCSPAAPLHQRPPKMVTSSLMVGESEPGCGLCPSLSLKDFHHRGWGGEEQRSSSVAPAAAPCLALGREWLQSRSLRRRLPRQLEEVLPPALIAKAGHRLTSNSTAFCPSLPHEFGRGRGPPSSSIRPEVGAAAVRPPGAEVVVVAAAGAGDGAPFVGLPLLRRPTPIEWGYSSVDYLNRFTKHESPRVKVTSEPGCPLAGPTSELISRGLRSGWRPREMVGRGPRGDRPSRLLGPDSRRSPWQRLPGRGDDVVLQSGDPRTASSSEARSGLAEGVVDAEGVAAPFQRQDPSLQGQSVL

SEQ ID NO: 60675 - protein, 203 aa, Zea mays
  Coding DNA Sequence Number=SeqID_17300
MEAQAHASRNWRAGCCMQITAPPLAPPSRLFGCGTNTATRGDPAHDPAAPAWRDGQGGRKSSGRRFAFAAITVPKKRERSCNGIPSEGGIEPSDPVAKGPGPADHPQLIGDTMFGAHRGNMALSALLLAERRRRGVCKKAESVPDRTLALCRGSGAALANPAPAKPLTASTYQPENLGPDRTPGLRPARMREQPDQPKHYTRH

SEQ ID NO: 60676 - protein, 217 aa, Zea mays
  Coding DNA Sequence Number=SeqID_17301
MALPVDVAGQRPRLGDVEAPPKPRSSLSSMAEAESEPLGRARRKSSAEARAPESEPWVGRSRVCRLPGLSPSPSPGSGGAEFAVFRPESEPWVGRSGVRRLPGLSPSPSPGSGGASYGAFGRDWLPVSITLSSGAAVGVAQAALSFCQTGQWSGEVTAVTSALPEGACQDKGGLGRAKDMSAVGGGPRARRKSSGLYADGGYQLRIRSLEGTPNYGP

SEQ ID NO: 60677 - protein, 87 aa, Zea mays
  Coding DNA Sequence Number=SeqID_17302
MPPLAPSPAGVFEAPAPVLCALPHSPTPEIIIESTVPARLSHLDEIEERGVGQGVGGGHGEQRHGLGELGHSSTRAKGSGAAATSFG

SEQ ID NO: 60678 - protein, 66 aa, Zea mays
  Coding DNA Sequence Number=SeqID_17303
MGKTGSTHVGIEGDRREQEYCNLADGEYVLVPEQGAAQEVAPDPAPEPAPEDLPATALEGKPRFYA

SEQ ID NO: 60679 - protein, 69 aa, Zea mays
  Coding DNA Sequence Number=SeqID_17304
MHEWRQRRLKKLLNALIIAGPSPPPEPYNPEAGPIMKEALDVMKIANEVVDEVVDKLLHEATERILKEN

SEQ ID NO: 60680 - protein, 237 aa, Zea mays
  Coding DNA Sequence Number=SeqID_17305
METPRAPTMALASRGGSASNPSPALFALSSLLSIIEEQVESLGDEELALMASRFTLHNNQFEPAAWRFPKKGKQEVGSCDHHSGRCKGKQEHTSGKHKSRGRFDKEVLKKYLQKAKIKECAFLTSLSDLNHDSDESTSSSSDTELERHVENKPNGLCFIADPVGGHCTMALGDDAVGNDVKDISGNSASEVSHSTDDLAAEVEELTAALASQDKLLWLVAHERKYFKSKYESMLREL

SEQ ID NO: 60681 - protein, 199 aa, Zea mays
  Coding DNA Sequence Number=SeqID_17306
MALRNIWAQSLSRGLLAFQWTQGISVPHNCRETKTELSSTPDEALRSTRHDVQLRMHKGRGASCSKEGADWTSLGHKERSRETGAERRIRARASSRGNRAGAERWTHRASLAARGMGERAKELRPASMRRKQARAREPLGWRRELEGKGGYHGKGSRAGRDARRSGRAPELEEEGARGRDLGCARGEEDRATEEGDACR

SEQ ID NO: 60682 - protein, 439 aa, Zea mays
  Coding DNA Sequence Number=SeqID_17307
  Gene Ontology: Mol. function=binding
  Homolog annotation: Hit_ID=Q6ASS1; Match level="QueryCoverage=84%, HitCoverage=77%, E-value=1e-152, Identity=74%"; Hit description =Unknow protein
  Pfam annotation: Domain name=PPR; Domain location=11-45; Score=25.3; E_value=0.00023; Accession=PF01535.11; Description=PPR repeat
  Pfam annotation: Domain name=PPR; Domain location=231-265; Score=8.6; E_value=0.74; Accession=PF01535.11; Description=PPR repeat
  Pfam annotation: Domain name=PPR; Domain location=46-80; Score=21.6; E_value=0.0029; Accession=PF01535.11; Description=PPR repeat
  Pfam annotation: Domain name=PPR; Domain location=81-115; Score=17.2; E_value=0.064; Accession=PF01535.11; Description=PPR repeat
  Pfam module annotation: Pfam domain module=PPR::PPR::PPR::PPR; Domain location=11-45::231-265::46-80::81-115
MMLDGVKPERETFHTLIVGTMKGSRLQDALYFRDQMKEMGLKPDVNLYNFLISTCGKCKNSDAAIMLLEEMKAHDVKLKGETYICLLNALASTGQTDQVYAIVSDMSAAGLGLNKFCYAGLITAFKNKTPTAEETMAKILDFVGQSKGWQYVERVSKDIAENIMMNVSEEELYNLPTAEYVNRRGGFVFKQHTVYHVALQACAELRSKETLEALLEMFNKDNRDGSTYDAYMVMQAMRCYLRCGDIDSAVKMFEEYSSSRSPPAELYATLAEGAMIGYTPRGMQLAQETIEKMTSRNFFLNAKMGTDLLLAAAGETAGGYTTANYVWDLLQSRKITPTLPAVEAYHKGLTVSGCEGMFTVRKTKEVHQDDVKQNHQAFEGHGRCGNQGPETEASCFQGFLEKSSPAKPEDLNSDALGFDLKFNVSYVAYHCLTTIYPNF

SEQ ID NO: 60683 - protein, 123 aa, Zea mays
  Coding DNA Sequence Number=SeqID_17308
MSGGDGPPPIFYGDDFPYWKIRMEAYLEAIDIGVYKAATQGFPEPRDPINLVGDEFNYEKWNAKAKNTLFRGLCKDVFNRVMELPLDAQSSGRRLDVDKRVEQCRAVAGVLHVLARFAQVLQM

SEQ ID NO: 60684 - protein, 83 aa, Zea mays
  Coding DNA Sequence Number=SeqID_17309
  Gene Ontology: Mol. function=cycloartenol synthase activity; Biological process=metabolic process
  Homolog annotation: Hit_ID=Q6Z2X6; Match level="QueryCoverage=80%, HitCoverage=9%, E-value=5e-13, Identity=54%"; Hit description =Putative cycloartenol synthase
MWRLRIAEGGGDPWLRTKNAHVGRQVWEFDASADPDPAVDAARRAFAGSRGHLKHSADLLMRIQVGRRILACGTALPLPLLGY

SEQ ID NO: 60685 - protein, 168 aa, Zea mays
  Coding DNA Sequence Number=SeqID_17310
  Gene Ontology: Biological process=Mo-molybdopterin cofactor biosynthetic process
  Homolog annotation: Hit_ID=A2X0R4; Match level="QueryCoverage=85%, HitCoverage=73%, E-value=2e-25, Identity=48%"; Hit description =Putative uncharacterized protein
  Pfam annotation: Domain name=MoaE; Domain location=27-137; Score =96.7; E_value=7.1e-26; Accession=PF02391.8; Description=MoaE protein
MAGGDLTPPPPPPEETPPAAAAEDLIEIVEEGSGRLDIARYVDHVRDLSAGAIATFEGTTRDHFAGRRVVELRYEAYAAMARRRLAAILREARSRHALRRLAVAHRLGAVPAGENSVFVAASATHRADAMEACPLRHRRAQGVRAHLEEGVVSPPPAIWKVNREKLFF

SEQ ID NO: 60686 - protein, 842 aa, Zea mays
  Coding DNA Sequence Number=SeqID_17311
  Gene Ontology: Mol. function=phosphotransferase activity, alcohol group as acceptor; Cellular component=cytoplasm; Biological process =metabolic process
  Homolog annotation: Hit_ID=Q6YX79; Match level="QueryCoverage=96%, HitCoverage=81%, E-value=0.0, Identity=86%"; Hit description=GHMP kinase-like protein
  Pfam annotation: Domain name=GHMP_kinases_C; Domain location=711-809; Score=24.6; E_value=0.00035; Accession=PF08544.4; Description=GHMP kinases C terminal
  Pfam annotation: Domain name=GHMP_kinases_N; Domain location=479-547; Score=70.6; E_value=5.3e-18; Accession=PF00288.17; Description=GHMP kinases N terminal domain
  Pfam module annotation: Pfam domain module=GHMP_kinases_C::GHMP _kinases_N; Domain location=711-809::479-547
MCSAHLAGCSVAAGLPVLHGLCIAEDYSHCEFLLRLPGYCPMPAFRDVIDVPLVVRRLHRSRTEVRKELGIANDVKVVIFNFGGQPAGWELKKEWLPDGWLCLVCGASDTQELPLNFIKLAKDAYTPDLMAASDCMLGKIGYGTVSEALAYNLPFVFVRRDYFNEEPFLRNMLEHYQCGIEMIRRDLLTGHWKPYLQRAITLQPCYDGPINGGKVAAHILQDTAVGKKYISGKLSGARRLRDAIVLGYQLQRAPGRDVGIPYWYSHSEKEISVGPAPTSHDMNGSDESSFEDFEILHGDMQGLTDTMSFLKSLSGLVGNDLRSPEKQTRERAAASVLFDWEEEIYVARAPGRLDVMGGIADYSGSLVLQMPIREACHVAVQRSDPTKQKQWKHTQARQLANGGAVPVLQIVSFGSELSNRAPTFDMDLSDFMDGDKPISYDNVKEYFSRDPSQKWAAYVAGTIFVLMAELGVRFKDSMSILVSSSVPEGKGVSSSASVEVASMSAIAAAYGLNIAPRDLALLCQKVENRVVGAPCGVMDQMTSACGEANKLLAMVCQPAEVKELVNIPTHIRFWGLDSGIRHSVGGTDYGSVRVGTYMGRKMIKCAASNLLSELLLSCTSTQPGDSSPDEYEGHGVDLLKSEASMEYLCNLPPHRYEAVFAKEIPETITGDAFLEKYGDHNDAVTEVDPKRSYCVKAPTRHPIYENFRVEAFKALLTAAKTDEQLSALGELMFQCHYSYNACGLGSDGTDRLVNLVQEIRHRKSSRAGGPSLFGAKITGGGSGGSVCVMGKNCLKSSEEILEIQKRYKAATGYLPTVFDGSSPGAGKFGYLKIRRRSTSPSD

SEQ ID NO: 60687 - protein, 140 aa, Zea mays
  Coding DNA Sequence Number=SeqID_17312
MGRDPDLGQTGVGALRMGRSGDIGSIACVIDGARYHAAILFRNLRGSSVLLLRRINTETGGQRCSCWGEECGVATQMRNGARATESTTSEARDVQTDRQADSSDLMSLHCTLNDQEQAGRHPDLVAPEFTGSQPFAEPLN

SEQ ID NO: 60688 - protein, 122 aa, Zea mays
  Coding DNA Sequence Number=SeqID_17313
  Subcellular localization annotation: CTP_CleavageSite=50; ConfidenceScore=5.30e-01
MELLEICVPCSSLRLLSAQPGNHSIAKSSTATPGLRRHRGSSSSTAATGRASSGEGKPAQRLSETQKARQSGEERGADEEDKTPPIIDTAVHGWLLALGSGCGLPPPQPQPPWHGRKAHGRP

SEQ ID NO: 60689 - protein, 482 aa, Zea mays
  Coding DNA Sequence Number=SeqID_17314
  Gene Ontology: Mol. function=metal ion binding; Cellular component =nucleus; Biological process=regulation of transcription, DNA -dependent
  Homolog annotation: Hit_ID=A2X0Q6; Match level="QueryCoverage=79%, HitCoverage=82%, E-value=7e-70, Identity=44%"; Hit description =Squamosa promoter-binding-like protein 3
  Pfam annotation: Domain name=SBP; Domain location=161-239; Score =181.2; E_value=2.6e-51; Accession=PF03110.5; Description=SBP domain
MGSFGMDMDWNQKASVLLWDWENLPPAAANGSESHRTTAAAPQFAGLEATGHEPAPSSVSSSIHSLPSAKGNKNKNNMELISFAPAKAPDKDTGSVLSSGEPVVLGLKLGKRTYFEDGCGLGQSGKSSAALGTASAATPPGPAKKAKAAAAAPTAQQQKSYCQVEGCRTDLSSAKDYHRKHRVCEPHSKAPKVVVAGLERRFCQQCSRFHGLAEFDQKKKSCRRRLNDHNARRRKPQPEALPFGSSRLSAMFYDTRRQASLLFGEGPYGQMRSCASSWWDSPGAGGGGFKFAETRGAPWLKPARAAADGLLPLSGQQQQQVWNDSIPHVAHQEDFDGFTVTAFKGISPKTLDHQGAGVEACAAVSSPDGAPDLQRALSLLSNSPAGGGGTNTNHPPPPPAAELHHHRAAPSSCLAAGSVSVLQEASSPGLWQDGGGSAALGHHAHARLQALDAAMATAQELLQLPRPPPSYGGSSSHYDLMR

SEQ ID NO: 60690 - protein, 124 aa, Zea mays
  Coding DNA Sequence Number=SeqID_17315
MAPVVLLVSGLGLASPGLTAASLHVIGVASSGLDTAIAFGITPSISGAYCAPPPTTLPQSNVATTQSTLVAALRLPRPLWLLLGSANASLLLPGSMNALLSIPSPRSLLRLSAICVALPTLSLS

SEQ ID NO: 60691 - protein, 154 aa, Zea mays
  Coding DNA Sequence Number=SeqID_17316
  Homolog annotation: Hit_ID=A2YG74; Match level="QueryCoverage=99%, HitCoverage=5%, E-value=5e-58, Identity=72%"; Hit description =Putative uncharacterized protein
MAAVVVTGGISSALGGKTNKVADKAMMLRGERFPRIIFHLIIMYLCKAGLENASKCVQQFISLLPNIISEDDQCKNRLHFLIWSLLRVRSQYGQLDDGARFHVMSHLILETVIYGKSMLTTNIVGRDDSTEANNSKEAGFILNLVQKDRVLTAL

SEQ ID NO: 60692 - protein, 93 aa, Zea mays
  Coding DNA Sequence Number=SeqID_17317
MVLVVERTTPEGQEPEDSGPAAGVRTVQRPVYYVSEVLHEAKTRGVGGVCVAAPASSSVAVAYHQPDEVICAPSCLLPNEFDSGETAKACPDK

SEQ ID NO: 60693 - protein, 166 aa, Zea mays
  Coding DNA Sequence Number=SeqID_17318
MGWDLWGALQGVGFLAFHGHVALCFQSIWHIGTSLAFPSWPRRSRQLHAAGIRIPCGLWFVDVHACKVLLSFCAVVPALQAKASYAVANEALDLEEDDLADEAGDDALFFFFAFVFLFFAFLGPLGMPGLSLSWKISMGTSMLLGCSKSARRIENFSTFSSGRICA

SEQ ID NO: 60694 - protein, 181 aa, Zea mays
  Coding DNA Sequence Number=SeqID_17319
  Subcellular localization annotation: CTP_CleavageSite=37; ConfidenceScore=5.32e-01
DQLDSFATPAARPPVPVPGEFPLPLSSLPHLPSPFPLAARPPAAQLGCHGRLGRPRAPCPVPARLGRPCGRPASAAPAPAQPPAAPARPALPPDGSAAPARQLGRPLAGSAAPCPAPPAGLAALAQPPLRAAGSAAPRPCPRPRYFGTGGYEIDDSGYDYDAVEDEAVEGDFQEFQDYDEF

SEQ ID NO: 60695 - protein, 144 aa, Zea mays
  Coding DNA Sequence Number=SeqID_17320
  Homolog annotation: Hit_ID=Q2QV41; Match level="QueryCoverage=71%, HitCoverage=65%, E-value=4e-27, Identity=65%"; Hit description =Expressed protein
MVYFMYHNLCSKCCFVIPEVKDAITSLNAKKTINKQKNTRSRRQKKLKAYDLSALSESLPEPGAPKQKPEAKLNCKLREAAHLKAVLGKMQFQLDPFAAIHQHLLATQPPAAAKDDAVKQGKDSKNKKRRRKKGTSSSSQAMDI

SEQ ID NO: 60696 - protein, 221 aa, Zea mays
  Coding DNA Sequence Number=SeqID_17321
  Homolog annotation: Hit_ID=A2X176; Match level="QueryCoverage=48%, HitCoverage=86%, E-value=2e-39, Identity=74%"; Hit description =Putative uncharacterized protein
  Pfam annotation: Domain name=PBD; Domain location=89-150; Score=17.4; E_value=0.0015; Accession=PF00786.19; Description=P21-Rho-binding domain
  Subcellular localization annotation: CTP_CleavageSite=63; ConfidenceScore=5.11e-01
MVVARLGGGSGSAAASIWMRCCEGRVNFAPKIQKRKLLVGAAQLREQFQRSSLSSCRRVSPVMAKKMKGIFKGLKIISQMFVHKEHEMEIGYPKDVKHVAHIGLGTSDTSPSWTAEFKGTDDSSAGSVRSTAAQSRQTSWASADFEQPRSMLVPIEIFQDNDRPGMPRGPRKAKKRKTKAKKKNRASSPASSARSSSSRSRASFATAYDAFCESRRGFRVA

SEQ ID NO: 60697 - protein, 196 aa, Zea mays
  Coding DNA Sequence Number=SeqID_17322
  Homolog annotation: Hit_ID=Q6QP51; Match level="QueryCoverage=25%, HitCoverage=22%, E-value=1e-16, Identity=85%"; Hit description =Putative growth-regulating factor 1
MGAGSHTSCKLARTEEAKPPHTERVTAQRLQALLHLRLNQRVKGRTAMQATCNCTTGTHPFDASSMEAQAHTSCNRRAGYYVRKTAPPLTPMPRLLDCGAGAATRGNPAHGPTVPTKRIGHGDRERGYSERDPSPQRKRAPSPPTDQGFEGWPLRRVRQPPQSTRAPRPLLIRGSKAGPSEGFDSRLRALGLRAHY

SEQ ID NO: 60698 - protein, 145 aa, Zea mays
  Coding DNA Sequence Number=SeqID_17323
  Gene Ontology: Mol. function=transferase activity, transferring glycosyl groups; Cellular component=integral to membrane; Biological process=cell wall organization and biogenesis
  Homolog annotation: Hit_ID=A2Y0X2; Match level="QueryCoverage=44%, HitCoverage=6%, E-value=2e-26, Identity=84%"; Hit description =Probable cellulose synthase A catalytic subunit 1 [UDP-forming]
MPGFAPCSPRSDRDFDFPTDAGAVGLTGRDLSSHGRLLAKPTKSANGQVCQICVDSICVSATGDVFVACNECAFPVCRPCYEYEREGDQCCPQYKTRYKRQKCWFPGNFFEWDYKDKDGVKGLCVVGAINNYTSQLPTYGRSSPP

SEQ ID NO: 60699 - protein, 68 aa, Zea mays
  Coding DNA Sequence Number=SeqID_17324
MGEEERGGDLTGDGDVRPSGGGGARAGAALGQGAAFGARGGGRLGPAVLGQGRPYGAGERKREGIEYD

SEQ ID NO: 60700 - protein, 947 aa, Zea mays
  Coding DNA Sequence Number=SeqID_17325
  Gene Ontology: Mol. function=binding; Cellular component=cellular _component; Biological process=biological_process
  Homolog annotation: Hit_ID=A2X183; Match level="QueryCoverage=94%, HitCoverage=29%, E-value=0.0, Identity=77%"; Hit description =Putative uncharacterized protein
  Pfam annotation: Domain name=Beach; Domain location=398-676; Score =657.0; E_value=1.5e-194; Accession=PF02138.9; Description=BeigeBEACH domain
  Pfam annotation: Domain name=WD40; Domain location=809-847; Score =32.9; E_value=1.1e-06; Accession=PF00400.23; Description=WD domain, G-beta repeat
  Pfam annotation: Domain name=WD40; Domain location=888-925; Score =9.5; E_value=2.1; Accession=PF00400.23; Description=WD domain, G -beta repeat
  Pfam module annotation: Pfam domain module=Beach::WD40::WD40; Domain location=398-676::809-847::888-925
MKLVQELHSKLDERSIQDVEQLQSFEDDVQFAKTAAIAADDSRKAAFQLAFDEDQQIVADKWIHILRALSDERGPWSAAPFPNNIVTYWKLDKTEDKWRRRLKLKRNYKFDECLCHPSSIKSSNDNAAPTVDPSANAKITEKMKHLLLKGVRGITGDISSESCEDSNDMIDPPQNVPPENHTVSDTSDSADSSDYPAIVQNRKESSSTSSDNDYIEVLSSVHCVLVTPKRKLAGQLTITRNALHFSFEFLVEGTGGSSVFDRFHDKKDSDSKNEMGGVEKLKGNLDGGRGNAAESSDTQIKNQSGKIKHHRRWKITRIKAVHWTRYLLQYTATEIFFDDANAPVFLNFSSQNDAKSVGSLLVSLRNDALFPKGTTRDKNSLISFVDRKVALEMSESARESWRRREISNFEYLMILNTLAGRSYNDLTQYPIFPWILADYSSEKLDFNKSSTFRDLSKPVGALDAKRFKAFEDRYLNFVDPDIPSFYYGSHYSSMGIVLYYLLRLEPFTALHRNLQGGKFDHADRLFQSIESTYSNCLSNTSDVKELIPEFFYMPEFLENSNSYHLGIKQDGEPLGDVGLPPWAKGSPEEFIHISREALESEYVSSNLHHWIDLIFGYKQRGKPAVEAANIFYYLTYEGAVDLENMDDMLQKSAIEDQIANFGQTPIQIFRKKHPRRGPPIPIVHPLYFAPQSITVTSVVPTIVTPLSVLFIGLLDSNVVMMNEGLILSVKLWLTTQLQSGGNFTFSGSLEPFFGIGSDVISPRKIGTSLAENVEFGRQCLATVQIRGDNYLILCGNWENSFQIISLSDGKIVQSIRQHKDVVSCVAVSSDGSVIATGSYDTTVMICTELDIVISGSKDGTCMFHTLREGTYVRSIRHPSGAGLSKMVTSQHGRYEGAGKTITSLVVTPEECFLAGTKDGSLIVFSIENPLLRKNAMQRHKAKPSIGG

SEQ ID NO: 60701 - protein, 95 aa, Zea mays
  Coding DNA Sequence Number=SeqID_17326
MAGGKELAGAKEGWLAGDGFELGIKVNRLDLWLKPSPLKGISSRDSSQSPPGVKRRIRRAGGGVGCDYVPASLGRQSGKLDLKNSSVSQVASSSE

SEQ ID NO: 60702 - protein, 50 aa, Zea mays
  Coding DNA Sequence Number=SeqID_17327
MAGGKELAGAKEGWLAGDVLNLCSLIIYTLFKYVHHTEFPVQHLANLLDL

SEQ ID NO: 60703 - protein, 79 aa, Zea mays
  Coding DNA Sequence Number=SeqID_17328
  Subcellular localization annotation: CTP_CleavageSite=46; ConfidenceScore=5.05e-01
MAKLNFTSTGVQGKFNRGPERFNRGPGKVQPGFFLGPHWSIPVEPVLGVVQPVSGSPDRPDLLTGRLTVNLATRQLNQP

SEQ ID NO: 60704 - protein, 1024 aa, Zea mays
  Coding DNA Sequence Number=SeqID_17329
  Gene Ontology: Mol. function=helicase activity; Cellular component =proteasome core complex; Biological process=viral genome replication
  Homolog annotation: Hit_ID=Q1EPC6; Match level="QueryCoverage=86%, HitCoverage=55%, E-value=0.0, Identity=73%"; Hit description=DNA helicase homolog, putative
  Pfam annotation: Domain name=DUF889; Domain location=586-822; Score =457.4; E_value=1.9e-134; Accession=PF05970.5; Description=Eukaryotic protein of unknown function (DUF889)
  Pfam annotation: Domain name=Proteasome; Domain location=855-1002; Score=45.9; E_value=1.5e-10; Accession=PF00227.17; Description =Proteasome A-type and B-type
  Pfam module annotation: Pfam domain module=DUF889::Proteasome; Domain location=586-822::855-1002
MQRKYKLTCPEQYDLLISAEIPHNKYPELRKMVIKHMMHGPCGSLNPNCPCTKGHVSCKNHYPRPFSDTTLQGKDSYPIYRRRDDGRKEKVRGCELDNRWVVPYNPYLLRLFNCHINVEACGSIKAVKYLFKYIYKGHDRASVVMRDASKADDDVDEIKQYRDARWVTPPEALWRIYGFELSQNSPPVMQLQLHLPNMHMVAFHERQMVERVVNRPGADRSMLTAYFEANRLHEGARGILYRDFPEWYTWQSGKGKVWQRRKRDTGGQVGRIVSAHPAEGERYYLRVLLNHVTCATSYVDLRTVDGVPLPTFREAAERRGLLESDNTLDDCLTERALFQMPSALRRLFATILVYCEPSDVAVLWQNHLDVMSEDYQHRSQGKTHVEQMVLIDIRNMLQSMGKDIKTFPLPPIIDAYDDAIGTAREVYEEESIEPAVGDVALKDSLNEEQRVAYDKILSAVDTDKGGLFFVDGPGGTGKTYLYRVLLATLRSQGKIAVATATSGVAASIMPGGRTAHSRFKIPLTIDDGAVCSFTKQSGTAELLRKASLIIWDEASMTKRQAVEALDNSMRDIMGRPELPFGGKTIVFGGDFRQVLPVVRKGSRAQVVASSLRMSYLWESMSHLKLVSNMRAKNDPWFAEYLLRVGGGTEDTNSDGDICLPDEVCVPYSGSDNDLDNLIDFVFPNLNENMSDSTYITSRAILSTRNDWVDMINAKMIDRFQGEHMLYHSFDSAMDDPHNYYPPEFLNTLTPNGLPPHVLKLKIGCPIILLRNIDPANGLCNGTRLVIRGFQRNSIDAEIVLGQHAGKRIFLPRIPLCPSDEEMFPFQFKRKQFPVRLSFAMTVNKAQGQTIPNVGVYLPEPVFSHGQLYVALSRAIARSNIKILAIPTVDGKKSFNTSKDESSKTVDGSREADVRGVRPFGVSLLIAGYDDNGPQLYQVDPSGSYFSWKASAMGKNVSNAKTFLGKRYTEDIELDDAIHTAILTLKEGYEGQISSNNIEIGIIRADREFKVLSPSEIKDFLEEVE

SEQ ID NO: 60705 - protein, 106 aa, Zea mays
  Coding DNA Sequence Number=SeqID_17330
MDPLDMSKSLYEETQGERRMEQSRSCEQYSRTVHADWPFAFASRLYFCFLSSQRYFRIQNYGYGARPGRRLSQAKVEGSRSCTQGSFGAIAQGGTDLKIKRLRGPQ

SEQ ID NO: 60706 - protein, 26 aa, Zea mays
  Coding DNA Sequence Number=SeqID_17331
MDGLATQVHCDVLSFQDAWRMIALQI

SEQ ID NO: 60707 - protein, 69 aa, Zea mays
  Coding DNA Sequence Number=SeqID_17332
MAENRFWRTERSSDSGEQLEANAGAMNGSLEWWPVNLSLHGDGRREGGALAQAFGGSYRGKLTGDHRIG

SEQ ID NO: 60708 - protein, 83 aa, Zea mays
  Coding DNA Sequence Number=SeqID_17333
MAMMGSPSKKMYLCQFSPLWRYAAAYEENRMFTAIHYMRKFMNFIRDCTPTYLPTLSEWELDLLEQQVKHLVGKWIFSSPVLL

SEQ ID NO: 60709 - protein, 101 aa, Zea mays
  Coding DNA Sequence Number=SeqID_17334
MSGGLRNESASKLEKVEVASTSSFGADVDPRAIDLPMRITERMFLKMKEDEAKNKIEEEENDQWRPNDESTSSQAKQEKSDELAQTHCWGPSSIEGPQKHD

SEQ ID NO: 60710 - protein, 89 aa, Zea mays
  Coding DNA Sequence Number=SeqID_17335
  Homolog annotation: Hit_ID=Q6UUN3; Match level="QueryCoverage=51%, HitCoverage=4%, E-value=6e-07, Identity=45%"; Hit description =Putative gag-pol polyprotein
MMPSRTRAHDDAGTSRGQEDTPNPPPQQGGRAYPQGPRETLYLDFAETRPPLFVKAEDPLEADEWIQVIEQKFGLIRCMETQKPLFAAQ

SEQ ID NO: 60711 - protein, 200 aa, Zea mays
  Coding DNA Sequence Number=SeqID_17336
MAMMGSTSDKMYLCQTNTRKANTQWEWRDGDSSVYPPWQEAGRWCICALGWREPSLVLRNPVVLFLKDQDSQRIAELSADVKRLQDELAERDLAVNWAVNSRSVAWDREAKARAHVTELSAALDSLQVYCNTLHEEVHVLYARLHPDVPSDTAAMGDGPSGIANKGPDEELDLFKPPPSMNLADERSPAAGNGATKDDED

SEQ ID NO: 60712 - protein, 107 aa, Zea mays
  Coding DNA Sequence Number=SeqID_17337
  Subcellular localization annotation: CTP_CleavageSite=26; ConfidenceScore=5.08e-01
MVIGQSRRCRPPFSNAKAATHPADTRESPGGSSRVRPRWITESLHGCASLPPTNFFHLCADWMKGPREYVNAPGVYVDAVVDITPQPITLKQRSKSDKYHKNKHSSI

SEQ ID NO: 60713 - protein, 182 aa, Zea mays
  Coding DNA Sequence Number=SeqID_17338
MNDCDTNRPPPSTTVKLNGATRCARHHGHNGCILTDIKVRTKLGHGARRMTTSSDGDRAIPVVQAAILERQGRHAPNRYQRITWRVFEGATAMDYRIPPRLRQSFLDQFLSPVCGLDEGTEGVRQRARTRVIRCREVNLTKRARMPVTEEFAQEEEWRTAWGPHVSAQNWVDWRVRFVEEVG

SEQ ID NO: 60714 - protein, 189 aa, Zea mays
  Coding DNA Sequence Number=SeqID_17339
  Gene Ontology: Mol. function=sequence-specific DNA binding; Cellular component=nucleus; Biological process=regulation of transcription, DNA-dependent
  Homolog annotation: Hit_ID=A2X520; Match level="QueryCoverage=33%, HitCoverage=13%, E-value=1e-15, Identity=65%"; Hit description =Putative uncharacterized protein
  Pfam annotation: Domain name=HSF_DNA-bind; Domain location=22-165; Score=12.8; E_value=4e-11; Accession=PF00447.8; Description=HSF-type DNA-binding
MEVAGAREPGSGGGGGGGGGGPAPFLLKTYEMVDDPSSDAVVSWSDASDGSFVVWNQPEFAARMLPTYFKHNNFSSFIRQLNTYVRNNGSTSLLCAVWLLAPTAERVTARRARTLVRHFAGSPRAAPRPTVPVLRAPHLVPVRRSPASRSAEAERSPSGQRGSGLAGSPDAQSASAERRAGAHQPAARA

SEQ ID NO: 60715 - protein, 173 aa, Zea mays
  Coding DNA Sequence Number=SeqID_17340
MSKVTCSVIALGVVPRDNNSSILPNGNVLLLLKPYKGLSVGWSRLWFHPAILQFITSAFAWGALRRSTSIASKRGVEVAIFLGVAVVGDEGIFGCSFAVIGGGVGVRFHSGDIESGVCSIVVWPWCSLELCEEGVALVKLSDSNLLVGSLPLGYEDLPLPLKMAPSNAKAAQF

SEQ ID NO: 60716 - protein, 29 aa, Zea mays
  Coding DNA Sequence Number=SeqID_17341
MALSAMAWVPRKGIGLIGGGTESSEFTAR

SEQ ID NO: 60717 - protein, 37 aa, Zea mays
  Coding DNA Sequence Number=SeqID_17342
MALSAMAWVPRKGIGLIGGGTEVNNNKVNLPFGTLIS

SEQ ID NO: 60718 - protein, 113 aa, Zea mays
  Coding DNA Sequence Number=SeqID_17343
  Homolog annotation: Hit_ID=Q94EV4; Match level="QueryCoverage=35%, HitCoverage=15%, E-value=9e-09, Identity=70%"; Hit description=RIRE2 orf3
MADKAIVIPPRDPWPFSTVSVEDLEALVTDGLLCPCSWGPNHSYPKITYPSVSYLSRKVMSKATARAGTLAESLVVAVGSARSTQAMASQQRAQAEGLETALDESVKNYKALA

SEQ ID NO: 60719 - protein, 212 aa, Zea mays; identical to SEQ ID NO: 55581
  Coding DNA Sequence Number=SeqID_17344
  Homolog annotation: Hit_ID=A2X003; Match level="QueryCoverage=82%, HitCoverage=7%, E-value=2e-19, Identity=37%"; Hit description =Putative uncharacterized protein

SEQ ID NO: 60720 - protein, 91 aa, Zea mays
  Coding DNA Sequence Number=SeqID_17345
  Subcellular localization annotation: CTP_CleavageSite=32; ConfidenceScore=5.15e-01
MAALVVPTATPDVPLPLSRGCRPAPTSLIHPGAALESAPLISALCSPSLLSRTLRSFHLRQHTTITIKEWEMGAIGDVVTHRADNGGHNIA

SEQ ID NO: 60721 - protein, 129 aa, Zea mays
  Coding DNA Sequence Number=SeqID_17346
  Subcellular localization annotation: CTP_CleavageSite=57; ConfidenceScore=5.56e-01
MGATGLPATDGLSAISSVDGTATDGVGATTSGVASTTVSVDAFTASSSLWITGFSVTCSGIGGCCQRPRLLRPWFWRQWPKLPQPAGADENTAQLFSSATTGTDENMTQLFSSATIGADENQAPIFVGH

SEQ ID NO: 60722 - protein, 816 aa, Zea mays
  Coding DNA Sequence Number=SeqID_17347
  Gene Ontology: Mol. function=4 iron, 4 sulfur cluster binding; Cellular component=nucleus; Biological process=base-excision repair
  Homolog annotation: Hit_ID=A2X524; Match level="QueryCoverage=50%, HitCoverage=40%, E-value=2e-29, Identity=40%"; Hit description =Putative uncharacterized protein
  Subcellular localization annotation: CTP_CleavageSite=76; ConfidenceScore=5.27e-01
EGAHGWNIKSNSGRRAHRSRTAARLLGLSDTRRLSGSVSAGGGSRRLGEVRQWASGQWACGGRRRCSGRRVGAWTRGAVSRGRLGGGADAHARCRHAACRGGQWPVDGGRVRPCVPAATALALLDAAAAGRLKRKAFNGRGPRGRIGQANRHARGDRWWRTACPPPPVPSFGPPVAPTSVRAEKHVPGLPAGRGLALAVKCIERATRAREIPTTARVEGPPGSERRGSGGRKRRERQAAAPGSSSVRGAQREEGEAWVCGWSAFAFRSPACRNVGRVAGSLAGFAEGHKGYNEDFALWEADLLIRPIRTLSARSIEDPKDYDEAFVRTTRRGKALRGGLHLSVSRTQSLIECGGRTTEDFANPRTSQKPKEIARDSVEATAQMWGPLSWREAQLVRNMRKLVLVRVESSIELGTAEVNPVPSEKLSANSQAVRDDAGAVEGIDMNGKPVQKPKRKKHRPKVIKEGQSAKLQKPKTPKPPKENGNQPTGKRKYVRKKGLSTPAKQIPSEGADTHTRAKPGIAQRCLDFDVEDQHGHLDLVSQTQETEIQTGPGDTQPSISGVERSNAQEGHNHSTAATNEHIRTTSEEVVRSFTQRASEPTTHGNYNLNSSRVTAEANSTEKPRKRGRPRKVVKPNGEPKERGTKGKQNVSHEKPTSQKGSHTDILKTNGISYASEPSTGITPRMAIVESKSSDQDKEIHGGVIPQATAISVDLLDGIIQKIKLLSISRPDNVVAEIPKDALVPYEGEFGALVAFEGKTKKNRSRAKVNIDPVTTMMWNLLMGPDMGDGAEGLDKDKEKWLDEERKVFRGRVDSFIA

SEQ ID NO: 60723 - protein, 756 aa, Zea mays
  Coding DNA Sequence Number=SeqID_17348
  Gene Ontology: Mol. function=galactosylgalactosylxylosylprotein 3 -beta-glucuronosyltransferase activity; Cellular component=membrane; Biological process=regulation of transcription, DNA-dependent
  Homolog annotation: Hit_ID=Q4VYU4; Match level="QueryCoverage=35%, HitCoverage=59%, E-value=1e-112, Identity=78%"; Hit description =Glycosyltransferase
  Pfam annotation: Domain name=Glyco_transf_43; Domain location=176 -449; Score=-2.4; E_value=2.4e-09; Accession=PF03360.7; Description =Glycosyltransferase family 43
  Subcellular localization annotation: CTP_CleavageSite=34; ConfidenceScore=5.40e-01
MRGLLASVISLDFFLLSSKLKSVCAAMTSQRHSRSQERSKSKGLTCRRVAVHLLFFFMVGIFIGFMPLFSVDVYKKIVSENERLPFHDGVIEVEMMGTKVKELETVVVEKEVELIDEPQVQESPPVPAMLDDEADFAESSPALPAIEESDIPVKKLLIIVTITSVRPQQAYYLNRLAHVLKAVQAPLLWLVVEWPEQSYETAEILRSSGVMYRHLICRKNTTSVRKIAVCQRNNAIYHVKRHHLDGIMHFADEERSYSADVFEEMQKISQSTPSIYMRQIITVRPSPPLQASDTVVAPGSPSSSPHSPWTHATVSLPRSRCIPRNPRPSAMRSRLLLPPSWRSRAPPPRQRHRRDRPLPPRAPHAQPPPRERCPTPRPSTTRSSSPPISVTAFSAVASASTPSPRSTSTISSPRTSPPSSTSAVTTPMGSSSPMRSRRSQQQDQPRTLASRSLMDHDVRADAHLYNALMKANVAADDPGAVLRVFRQVSVTGTFLVNKEHVESHRWSCMFGDVEVPAEVLTDGTLRCYAPAHQSGRVPFYVTCSNMVACSEVREFEYRDSEAHYMETSRSQANGVNEMHLHIRLEKLLTLGPDDHQMLAINSLMLDGKWSNQESSVKEVVSTARVQSLKKLVKEKLHQWLICKVNDDGKGPNVLCKEGQGVIHLVAALGYDWAIRPIIIAGVNVNFRDAHGWTTLHWVASLGSKWTQDPDAAVADSNGRSTPSRLLRTHGEMCGLDLESKDFPNTLSSIGATSASS

SEQ ID NO: 60724 - protein, 219 aa, Zea mays
  Coding DNA Sequence Number=SeqID_17349
  Homolog annotation: Hit_ID=Q6K6Q8; Match level="QueryCoverage=27%, HitCoverage=49%, E-value=9e-18, Identity=72%"; Hit description =Putative uncharacterized protein P0040H05.31
MGQVNRERLAEFLGELQRKEDTNDRYVAALRGETLTRKRYERIQPLPAANAQASQETAGASAEEERPKAKRIPTDRTKADDEHQIRGLLLCLWWLNEPAFGVARSAFASPWVSLPLACLACEVLDASTARADRGQMSHPDFRDPKPGREYNHQDRHHSKILPRAFPGIPCRTAITAKSSRGPSQESLARPPSQQNPPEGLPTLTTPLLPLPLSGKVVLH

SEQ ID NO: 60725 - protein, 120 aa, Zea mays
  Coding DNA Sequence Number=SeqID_17350
MAHMSARVSVRKAGVGPRGWETREWAEMDFCGPCVGEQVERDLELPEKGDILWQVPSDDHAVEQWRLEVVHNVEHLNTTVTEPSRSMLGLCCDRCSYVNYVESVRQFVRVAIETCKGMTA

SEQ ID NO: 60726 - protein, 195 aa, Zea mays
  Coding DNA Sequence Number=SeqID_17351
MRAVSQRLVAHRTLMSGVHRTVRKGRIRVERDPALCGRLNEEVGHLGDVDPRAIDLAMRITERMFLKMKEDEAKNKIEEENDRWRPNDESPSSQGSSFKSTSHMCFIANGSDSESKSEDEEEQESDSEDEDDLQQFFAQLSKKHRMSLLKLMKRAEEQKEMLHKQEDFLIRKIEDLEKLTKEHEKLKCSHDDLVQ

SEQ ID NO: 60727 - protein, 295 aa, Zea mays
  Coding DNA Sequence Number=SeqID_17352
  Gene Ontology: Mol. function=transcription regulator activity; Cellular component=nucleus; Biological process=regulation of transcription
  Homolog annotation: Hit_ID=A2Z369; Match level="QueryCoverage=90%, HitCoverage=90%, E-value=4e-51, Identity=49%"; Hit description =Putative uncharacterized protein
  Pfam annotation: Domain name=HLH; Domain location=128-177; Score =43.3; E_value=8.8e-10; Accession=PF00010.17; Description=Helix-loop -helix DNA-binding domain
AAVTMDDLLSPCSSFSPPSPPPFFSHAGNPVIEFASCEVPEQWLLDDVVLDKNEGRYDDVDDLWPVAGRSLSPDSELSEQPLPTQPVPLPPPQQQQQELTSVTAAPAQQQRPGGKRRGRKPGPRPDGPTVSHVEAERQRREKLNRRFCDLRAAVPTVSRMDKASLLADAAAYIAELRGRIARLEADSRRAAAARWVDPVAAAASCGADEAVEVRMLGPDVAAVRATSAAPHAPARLMSALRSLELHVQHACVTRVNGMTVQDVVVDVASPLQVQDDDHDGLRAALLQRMQDSAAT

SEQ ID NO: 60728 - protein, 68 aa, Zea mays
  Coding DNA Sequence Number=SeqID_17353
MGQQENPLPRREDDAPVFRSSNGSRTHNGCPANHSSRRINSAAGQGPGKGILRKGSFSMKEAGPEPPY

SEQ ID NO: 60729 - protein, 53 aa, Zea mays
  Coding DNA Sequence Number=SeqID_17354
MAAPRTACHVALTPQRDRRRLWQEKQATLRLRHNDRVKRGTGKGGYPEKDPSP

SEQ ID NO: 60730 - protein, 89 aa, Zea mays
  Coding DNA Sequence Number=SeqID_17355
MRGFNNVLIKLSSLTGTDYSRLPFDVCTKLTKVFQLYETKFGDTRMCGAHQPSSHLSDIDINIFELQMYLQLEGDDSTSVTQKANAKSA

SEQ ID NO: 60731 - protein, 269 aa, Zea mays
  Coding DNA Sequence Number=SeqID_17356
  Homolog annotation: Hit_ID=A3AFL4; Match level="QueryCoverage=17%, HitCoverage=8%, E-value=3e-10, Identity=70%"; Hit description =Putative uncharacterized protein
MVQVDIYTSDDHKLFTTLLCIDASFVMMSMCHPNDWLSESCLKPLPPEPKKGSEVDDAAVRQFKEKAVLIIKEYFLTDDIIEIRRPACFGPARQDKWVGPMAAHVSPTADPESPTLVAWLDALSALGLAAAAPFSLCPPCSSVVLALLVSRARLLALLVASSVVLELLASAPCSSVVLALLVSRARLLASAPCCRLGISRSLVHRAAHHRPHVVSGAPAMKELTLGAMNVLRIRNLGEDQQGLGKGLGIEEEQQGRPQQEGDQVRVSCD

SEQ ID NO: 60732 - protein, 128 aa, Zea mays
  Coding DNA Sequence Number=SeqID_17357
MERGEVVLAGDRKGGKWRRDGSGWNWEVRLGLHGRGDVNTSPWSMALFIATAVRLTINDRGRLCSRMATTYRRGRVREEQGMDDTAVELTEPRRPQVNNSGHARLNSRDGATFEAILPQIDSPTGIFA

SEQ ID NO: 60733 - protein, 124 aa, Zea mays
  Coding DNA Sequence Number=SeqID_17358
MTSTDAQLAQQQPLHQGKKLQRRPFIELVEWVKPQILTQGLSLDGKRAVEHRKRIRGRSGLRTVHDGGADGPQMVGSKDHTDIFPDNILKPIVESLAADEQQQYEDYMRQAKEKLLSQYTVDRH

SEQ ID NO: 60734 - protein, 143 aa, Zea mays
  Coding DNA Sequence Number=SeqID_17359
MATTRWTSVTPRLVLAMTGGDCQISYGKRGKMASRRFWVELGGGDVNTSPWSMALFIATAVQLTINDRGRLCSRMATTYRRGIVREEQGMDDTTVELTKPQRPPVNNSGHAWLNSRDDATFEAIVPRIDPPLDHSSSSDSTVL

SEQ ID NO: 60735 - protein, 96 aa, Zea mays
  Coding DNA Sequence Number=SeqID_17360
MEHKNRSSQAHSKIPLQRFEMGEARDVCEGEGGVSWVRNGVQIVLTAVGGAVEPPLTAPGDLFASLTGRLQIRGQRGQRPAELPLRTSSTGLDQRV

SEQ ID NO: 60736 - protein, 363 aa, Zea mays
  Coding DNA Sequence Number=SeqID_17361
  Gene Ontology: Mol. function=nucleic acid binding
  Homolog annotation: Hit_ID=Q2QUK2; Match level="QueryCoverage=64%, HitCoverage=45%, E-value=5e-40, Identity=37%"; Hit description =Putative uncharacterized protein
  Subcellular localization annotation: CTP_CleavageSite=40; ConfidenceScore=5.81e-01
MSSPGANPHHSPPRFTRASAAMSSPGANPHHSPPRFTRASAAMSSPSANPHHNTLAATAIVSHQPSPTTIVNKTVPTDNSPGGHSSRQSNAIIESAEQFDAATSEGNPNEGELVGDLVPALLAPKKNVRKKTMGHGLEKMLNRGNRLAIHVAEGKKRPEVPLQAAKLASETGVALRDNLPIYKSWKLYDNVVGQAESRLDVDVKNEGPSKDACTYIIKRGVRQTRYNLKRKYFDESLTKEQLLAMQPPPKMNKEDWTGLVEYWCDPKNQEKSAKNKANRANVQLHQRTGARSYIAHRYSLRTKYNNMEPDVVDFFGECMNSPRNGRTPLANEIYEQMVAEKERELEEGEAQKSPSKIVVDSLS

SEQ ID NO: 60737 - protein, 184 aa, Zea mays
  Coding DNA Sequence Number=SeqID_17362
  Subcellular localization annotation: CTP_CleavageSite=69; ConfidenceScore=5.88e-01
MKATTRASPPPTKAAAATAYASSACSAVATSLSSPWWRTRARKIASRSSCNRRWWQHRRPCQGEWRRATCSRGSGRTLRELGWLEELRDGEGRVDERWQWRRPCRGEQHRAAIVEDAEELLTNWDGRKSSEVGTYEWRKKPMRARNDLWQRMVGSAILFGSDRFVGIWEMGEASLWRRPETRMK

SEQ ID NO: 60738 - protein, 689 aa, Zea mays
  Coding DNA Sequence Number=SeqID_17363
  Gene Ontology: Mol. function=potassium ion transmembrane transporter activity; Cellular component=membrane; Biological process=potassium ion transport
  Homolog annotation: Hit_ID=Q1T762; Match level="QueryCoverage=99%, HitCoverage=97%, E-value=0.0, Identity=80%"; Hit description=High -affinity potassium transporter
  Pfam annotation: Domain name=K_trans; Domain location=12-689; Score =778.6; E_value=3.9e-231; Accession=PF02705.7; Description=K+ potassium transporter
MRGKKRIYKDLLLAYKTLGVVFGGLVTSPLYVYPSMNLTNPTEEDYLGIYSIMFWTLTLIGVVKYICIALNADDHGEGGTFAMYSLLCQHANIGILPSKKIYTEEEQGLVPARPVAARRPSKVRRFIERSITARRLLQLTAILGMCMLIGDGILTPAISILSAVDGLRGPFPSVSKPTVEALSAGILIGLFLLQKYGTSKVSFMFSPIMAAWTFTTPIIGIYSIWRYYPGIFKSVSPYYVVHFFVTNRKRGWQLLGGTVLCITGAEAMFADLGHFNKRSIQIAFLSSIYPSLVLTYAGQTAYLINHVGDFGDGFYKFVPRPVYWPMFVIATLAAIVASQSLISATFSVVKQSVALDYFPRVRVVHTSKDKEGEVYSPETNYLLMLLCVGAIIGFGDGKDIGNAFGVVVILVMLITTILLSLVMLIVWGTHVVLVALYLVPFLILEGTYVSAVCTKIMKGGWLPFAISLVLALVMFSWYYGRQRKAEYEMANKVTLERLSELLAAPDVRRAPGLCLFYSNMQEWRWLTPVLAHYIKNMRSLHGVTIFVTLRYQLVAKVDAESRMAVRRFGPRGVYGCTIQYGYAGPLYEEEEEDLAGQVVRAVRQHIEREAAASSTAEVEEEAAELEEARAAGVVHVMGKTRFHVGRNTGLFDRVLLGFYEFLHTTCRSALPALGIPLQQRVEIGMLYKA

SEQ ID NO: 60739 - protein, 135 aa, Zea mays
  Coding DNA Sequence Number=SeqID_17364
  Subcellular localization annotation: CTP_CleavageSite=27; ConfidenceScore=5.14e-01
MKVTTTSGVMGDGSGDPSFWLLLLRKRGAMARAATIIVSIGVSSSSFSCSRDALWWCWGASSKGTGERRLADSASCCGGKKNPAAPSPIANVPAPQASGGAASPSDSTDRSLCGEADAPQDKRAGKESLICELCV

SEQ ID NO: 60740 - protein, 72 aa, Zea mays
  Coding DNA Sequence Number=SeqID_17365
MQDAARHAISQYCSLYNGVAGGLNLKYYPRHSTGSTGSVIVSPVGEGNPRLNITVNLVTLLNTELDHTRDVE

SEQ ID NO: 60741 - protein, 138 aa, Zea mays
  Coding DNA Sequence Number=SeqID_17366
MKIELAERDAMIAFLEKARSVSAPTPMQCALCEGLESTLESCRYDKTRIEEENTYLRRKRDEWLVSELSRGNMNRPTHAIHDPPVQRHPTRPRGALPLAARTQAVRPRGGHAQWGAGHVSYGQGPHGSGFGFYFPSGP

SEQ ID NO: 60742 - protein, 511 aa, Zea mays
  Coding DNA Sequence Number=SeqID_17367
  Gene Ontology: Mol. function=protein serine/threonine kinase activity; Cellular component=plasma membrane; Biological process =protein amino acid phosphorylation
  Homolog annotation: Hit_ID=A7PXR1; Match level="QueryCoverage=48%, HitCoverage=38%, E-value=1e-66, Identity=58%"; Hit description =Chromosome chr15 scaffold_37, whole genome shotgun sequence
  Pfam annotation: Domain name=Pkinase; Domain location=173-396; Score=- 2.4; E_value=1.8e-08; Accession=PF00069.16; Description=Protein kinase domain
  Pfam annotation: Domain name=Pkinase_Tyr; Domain location=173-417; Score=-123.5; E_value=7.5e-05; Accession=PF07714.8; Description =Protein tyrosine kinase
  Pfam annotation: Domain name=WD40; Domain location=309-348; Score =17.4; E_value=0.055; Accession=PF00400.23; Description=WD domain, G -beta repeat
  Pfam annotation: Domain name=WD40; Domain location=353-391; Score =17.5; E_value=0.051; Accession=PF00400.23; Description=WD domain, G -beta repeat
  Pfam module annotation: Pfam domain module=Pkinase::Pkinase _Tyr::WD40::WD40; Domain location=173-396::173-417::309-348::353-391
MGQCYARNVHGVDADDGGMEATTIMVSAAGGPEDAGSVGGGQGGEGRRSARPSPAGKPRGGRAGATPERLSTAGSPWTGSPLDLPDGIAPSPATSVSTPRRFFRRPFAPPSPAKHIKASLARRLDHRSPPSASQVPRPPVEVPIPEQGASGAGEVERELDKSFGYDRHFAAKYELGKEVGRGHFGHTCLACPCKGDMRGQVMAVKGDQFFFPMVLALALAFPRRMTTTISIEDVRKEVKILKALSGHSNLVKFYDACEDALNVYIIMELCEGGELLDRILSRGGRYNEGDAKIIVEQILKVVAFCHLQGVVHRDLKPEGDQGVNATQWLHNEPVLVTVSGDSSVGMWDVTLGQPCVRHIVAHTRCANAVAVAPNDKYLCTGGSDQKVAVAPNDKYLCIGGSDQKVVSCLFVLLVSYVAYVMSYWKRRVVYLYIIEREKRDINLYKATGNLYASTMRQQKLVLSLTIGLKRDKNVGTHVLKVKNVGTVELNVQPTQTHAGHISSTATRPRRT

SEQ ID NO: 60743 - protein, 267 aa, Zea mays
  Coding DNA Sequence Number=SeqID_17368
MAHLRHTAQKLVIPFLPSRLAERPLHCPVTGQSSHLERLHHRLHEEQERRRQMLEQQGSSSSLQQEVESVRSCSLMPPLEAPHAPPLGVAAAGVAVAGDPDDGGDDSSLSHITDLSEEQKPEGWVARPITRDAARGTAGRRLAWCAVRRTVFGVRRVADGLNLRYYPHRPSGSTGGMVVSPIGEDNPRLRSIVNLAAVLNTELDHALDELSRAHAEIAQLWAERAEHRHQEDGSLTPVGTQHPYHSPPRGHHAYGNPDCRTRINLEP

SEQ ID NO: 60744 - protein, 83 aa, Zea mays
  Coding DNA Sequence Number=SeqID_17369
MVGLPLGEECECYEIDISAVLAVMSGQGSSIDLRYLIRDGWFTGGDEDDGYDNGNGCPCCNHYSGEDEVVEEDFQEFQEYDEF

SEQ ID NO: 60745 - protein, 1007 aa, Zea mays
  Coding DNA Sequence Number=SeqID_17370
  Pfam annotation: Domain name=HR1; Domain location=726-796; Score=4.3; E_value=0.082; Accession=PF02185.7; Description=Hr1 repeat
MCSHYYSAYPSFEVAEEDADEGGLWCAAGLSSGRDLVEEFVAYGVWPLAHGWALGEVCPRQIPSHGGKLVRSPAFALDLRSRDPVAFVREAEDGAMRIVGRYVAKTEGQRSWDIRGSNDRLNRVFELNRPPYGGYPGQDDVDRRGKKPVVETGDDFVPAAAPSSKKRKLGIAMGGLGVSDGFARELMRTCAAPGGRMSSPELWESSARMLRVTEGWWPRNVPIPHTAGEDFFTSRMVRDWKVFPYGRNIAAVVSAVMDKDRQGATQKRQAVVRLQARPKRPRGAAKAAAPGGSQPPLAAKSAAPASSRATEAAAAGGSKSAKAAPVSSRVPEAAKAARELPPPGKRVADFATDISVEDYLVGSDEGQLVVVPPVVATAAAAVVPRAKGSALSASGEIPALTAVRDEASAVSRRLREMKEALSHPDFRVQNPGANIITRGCASLPTSHVTRLPRDRDFPYTSTEEARQGIPCRTAIAAKSSRGPPYTDHSPTALAPFGYQDDLQVTRDLTLVVAIQTNMRSLAPNNRGPTVAQNRRRRNPGIPGHHRAREYLSHVHAMLANPIRCAGVAADPPTASCRGGVFQLLPRAQSSSTRDGSGLQTCDDRDGGRGRHIGRRVRATAMARRSRPSRLSRADSAQVPYELRPDREVVDSPDAGVVALGWRDGKWAEARFGLGTNTDRAASGALTAVVSAEVERLRTQHADAVREKSAADSKCRKLADKVATLEGEKTDLRRQLAEERKEANEALAKAQSAQAEANLARVEGSLARQRAEQLEERLSALQARVERAEASTRSEAEWTRKQLMDSYHELGARTADFEVPDREPGLRCLEWIQEELLALPAIVKGFMSYASLVTCEGAMNALSREGCQHYEVFDQADEDFERDIYKVEDPVVKESAGALYDRMWGPHGREVVRERAETARGQAARGERVDDFGALNSVLPDPEPNPAVAVSEAALQLPPETTEGVPDAPAATAAGGGPSPTAALRAEDPMMVAAEPTAEDPATAGSSQ

SEQ ID NO: 60746 - protein, 122 aa, Zea mays
  Coding DNA Sequence Number=SeqID_17371
MGKNNKRKREPTPPSEEFGDSEYSEEEFSSESEGSPAPVPLRSDESEYSSYEEDSDGGGEDEDDDDDDDGDDDGDGDGDGSGRGGGDGSKDGDGSGKGSNRGSSSRGSTRGGSGGGSNRASG

SEQ ID NO: 60747 - protein, 238 aa, Zea mays
  Coding DNA Sequence Number=SeqID_17372
MDKVLVAYLVILESGMVKFKWSDYFSVQLTFSVLVKSLSRSLVKSLWSKFELQHSFKNFQKFYKNYSGFSLVYIFHSKKLRLKTWHFCRLILAWPQLHGGSGAGKSDLCCGHSLDIVGRPGLHQSGLMSICFAGYLSPGPRKNDLTIYWALGPFVRSFTLLVDPGDIYPPQSPDLWVNLEKLARSYSHYALEVSIMSSIFCFRGIHCVPCTDVTVLKNILIIPGRPPQWVWARDGLVR

SEQ ID NO: 60748 - protein, 83 aa, Zea mays
  Coding DNA Sequence Number=SeqID_17373
MGRQGGGAAIWVVAGGVAGVAARHLATGMGWRHGHLAAGSGWRGRLLGDGSARSWKQAASRAYGGRTLEVRLPPERKNTLGVD

SEQ ID NO: 60749 - protein, 210 aa, Zea mays
  Coding DNA Sequence Number=SeqID_17374
MATTRGVDPFLKVTLPTRVLWRHGLSLPDVLQGPPPTTRGLGPTRHASWHGTEEAKPSRVERVTAPRLQALLHPRQNQRLKGRTAMQVACNRTMETHPFDFNASSMEAQAHTSCNRRAGYYVRETALPFAPMSRLLDYGTGVATRGNPAHGPTVPTEHIGHGDRERGYFKRDPSHEGSGPRALLLIKGSKAGPSEGFDTRPRALGLQAHY

SEQ ID NO: 60750 - protein, 264 aa, Zea mays
  Coding DNA Sequence Number=SeqID_17375
MVTQDGDHQFDGGEKQAGLRPLPRPQLQGSSSSLLGRRARRAGACLHVGWRPASSSGIWGGNHPPALRRRRPPAMRGKANCCCLARVQHSVLRPGGRGRLHRGVAQHVERREGGTRVLRRSRSRSCGEDGSEDLPVHFGAAGARWCGVGGQVAAVIGAEVVAAREGFSADEIVGATCGRTSGSSALIACPRPSSGDVGEGLVAAASALRSSLLLFSRLEQRSLSLLLQWSAAEILPPVPPSEAGPDSTEGGDNAEGAVAPSVDV

SEQ ID NO: 60751 - protein, 325 aa, Zea mays
  Coding DNA Sequence Number=SeqID_17376
MNALSREGCRHFEVFDQADEDFDRDIYKVEDLVVKDSAGALYDRMWGPHGREVVRERAETAMAQALRGERVDDLGALNSALPDPEPTPAEAVSGVALEPTSETAEDAPDAPTSAAAGEDLPPKVAEGAPDAPAAAAPSAEDPAAVAAETTTEAAAEPMGEASAAPGPLQVQDFGPAHATATTEFLAASTAEGGNEYGGSASEFFDFTDSGSSIEWTEESSEEDLDYFAALDVAAAEASPHAADAQDVPGPSTGRRRRRAVAKRRVSMEERGRLRVSRAGRQELLSLPAAASTGEGELRSLFAGEELRIMLFNYREMGIIPKVEPM

SEQ ID NO: 60752 - protein, 98 aa, Zea mays
  Coding DNA Sequence Number=SeqID_17377
MAGAGDSARANKARGGRGWPGDLGSMTRDRYRRSPATNRWDRENGGERREGLVGKFTSGGAGTMARLGMTVAEHGRGRWSSSTGDEFGRRGLATGELQ

SEQ ID NO: 60753 - protein, 201 aa, Zea mays
  Coding DNA Sequence Number=SeqID_17378
MATPARGKKRLVVDVDLELDSEVEVASAFSRLSFSVVAKRTGDGCGFEHSTGKERTTGKERTTGKELTCAATSELTTVVNHCSAPRSASITRFETVRSDLAQAITKMRVVGKELKDLAGDEIMNSPDTAKEVSVNFAMWRVYELAQSLEDEAQHLEDLEAGPSPPLSEWFNNQFAEDEYMGGGEWALDDVSSEELSDHQMK

SEQ ID NO: 60754 - protein, 119 aa, Zea mays
  Coding DNA Sequence Number=SeqID_17379
MGKLVPSLLMLLLCRGRIQLDYPTRWQDGMAKSLQQPCPPENLAHRLGVQCLTDPDCRRVVTALVPTITGMGDHVSGHMRDKVCGQVHSDNASPWIVVPRPSSLRYKNGYNQFLTSREC

SEQ ID NO: 60755 - protein, 128 aa, Zea mays
  Coding DNA Sequence Number=SeqID_17380
MKTNNPGHVQLHQYCTVVASLDRVYGISYLMSFLEDQLPNRLDIGNTQTKSEAQPVKLFGQLIRHRMSDHHIDLTFPGQGICYHIRFAWMLLLGEYVLQTLVVCVDITLLSIQIMPPCLQCMNHFCQL

SEQ ID NO: 60756 - protein, 259 aa, Zea mays
  Coding DNA Sequence Number=SeqID_17381
  Subcellular localization annotation: CTP_CleavageSite=64; ConfidenceScore=5.56e-01
MGRIARGPLSWTRPHCGMPSSPVFVWCRSSERGRRPYAAVAPRRPRPRRPSSPRLVPPPGPPAPAARRPAPASPLLPPSQPPAPPPPPSLPNRRRLLPLPLRRHVARASCCLRLLPARPVGHRARAACTPVHSSPFTAARQQPFAALRHALLTPWRTLPPEAAHHRPGRNPPPGPRALGRRPPLPLAARHRPPWASLPAGQTHPMGPPARLPGKMAEAPLHRRPQAPSANVLFPALVEALHGFPGLRDPRIRLNIGTLR

SEQ ID NO: 60757 - protein, 27 aa, Zea mays
  Coding DNA Sequence Number=SeqID_17382
MARGVPRCDFPSPVLGRRRELPCASML

SEQ ID NO: 60758 - protein, 231 aa, Zea mays
  Coding DNA Sequence Number=SeqID_17383
MTSHGSSDDGNTLSHTDGLAREGFPRILWEVLQGAEYTTPPQYAVQQFEKHRVPRCRVRMTLEPHPLQPGCRSLDSESFGYRAEDTIEAIALHGLTTFCGFHPLELSTHPIGLFPPRRGRTTQCGRIGWSMPRTSGLSTQVEQLSNEIQELEELVGTRENTIEVLEDQLINTQQQLAEANEHLDMHHQEIQDMEANEDVDIEGGEEPASSLDTAGSGRPPSPESSVASFAH

SEQ ID NO: 60759 - protein, 109 aa, Zea mays
  Coding DNA Sequence Number=SeqID_17384
MGKSNKRKREPTPPSEDFGDSEYSEEEFSSESEGGELPKTLKQTPLDNGNPRYCNLADGEYVLVPEQGAAQEVAPDPAPEPAPQDLPATALEGKPRFMHNMLFMLFCHT

SEQ ID NO: 60760 - protein, 119 aa, Zea mays
  Coding DNA Sequence Number=SeqID_17385
MERVLLLLRGLPEENNWGAGEGNPASSPAHEQSRQRPRGEQGRHGRELLLACCKGAEHMASRSWAPCCSRGEEGLSAAEHRGKGEEEGELAGAGLNKGEGAGRALGLGGRCPYAGVLLP

SEQ ID NO: 60761 - protein, 87 aa, Zea mays
  Coding DNA Sequence Number=SeqID_17386
MEANSHHQPQQGGTCKNYATSKAEYTNTQLYLPDHGSSSLISCEKQTIRIEFLNLASDRTCTHHNRNGRPRLRSREEGNLLPGSLRY

SEQ ID NO: 60762 - protein, 118 aa, Zea mays
  Coding DNA Sequence Number=SeqID_17387
MEKCTRTMLRTKNTLHHDALKVHRSISTKHGIIISSNITGVIIVTLTDGSTNVAIIRSNVLVNSISWRVPAKEGYQHVQQVSREYDSRQVQGGQQNSVLSSSPNQDIPQHHNDPKKME

SEQ ID NO: 60763 - protein, 128 aa, Zea mays
  Coding DNA Sequence Number=SeqID_17388
  Gene Ontology: Mol. function=nucleic acid binding; Biological process= DNA integration
  Homolog annotation: Hit_ID=Q53JK4; Match level="QueryCoverage=35%, HitCoverage=3%, E-value=7e-09, Identity=65%"; Hit description =Retrotransposon protein, putative, Ty3-gypsy sub-class
MVGVIHTLLAVPRCFPSELPPGLPSIRGIEHQIDLILGASLPNRAAGPFKISDLKPYLGKEDELDSRATPLQEVEDDEDMDVFLSEIPLDYHLSCLQIFGQELALVARSIAQCTVDNQRRSGATIAGF

SEQ ID NO: 60764 - protein, 115 aa, Zea mays
  Coding DNA Sequence Number=SeqID_17389
MAEAEGHANHQLPRVSDKVGHCSGFVLVYADHEEYLQAKPPQTLEKLLQKMDEYIPGHQSQGAGVAEASEERMGISPESSIAYSVVKIRATLQEHARSLFRSKRRLPKQRRDKIS

SEQ ID NO: 60765 - protein, 111 aa, Zea mays
  Coding DNA Sequence Number=SeqID_17390
MEELSVQGDLTYTEYPIKILDTLTRVTRNKPTRNPHALGPFLFFSLEFTHARAHRRSATDDWTPDSGASFPSGIGTRRSGAGRLPPAEFGAGCAKIRKARRAGGVVVRIGP

SEQ ID NO: 60766 - protein, 57 aa, Zea mays; identical to SEQ ID NO: 44635
  Coding DNA Sequence Number=SeqID_17391

SEQ ID NO: 60767 - protein, 222 aa, Zea mays
  Coding DNA Sequence Number=SeqID_17392
  Gene Ontology: Mol. function=RNA-directed DNA polymerase activity; Cellular component=chromatin; Biological process=chromatin assembly or disassembly
  Homolog annotation: Hit_ID=Q2QTW2; Match level="QueryCoverage=32%, HitCoverage=6%, E-value=1e-08, Identity=40%"; Hit description =Retrotransposon protein, putative, Ty3-gypsy subclass
MEVGSSQGLSGDCPSPGGRAEPVLGKHLHPNVPPEVAEMGVGAAGAGEGGPYGELDIFGAPPSMNILDVRPPKYSSMPIRTCGHDGAGTSRDSGEETPIPPHVPPTLAEQGGDSKQNKHNFQMTSGNTSQGKGNMTSNQATKGEKRIGQIYYTQMTQASKGEKSIGQIYYTQVATTPEGESVLMDLPGLTPKRDVEFVFELKPGMTPISRRSYRTPPNELAE

SEQ ID NO: 60768 - protein, 105 aa, Zea mays
  Coding DNA Sequence Number=SeqID_17393
MPLSWPAIFTTIWSPVRGLGDSSHPGGGSCGVIGRIGLPDPTEFLAGAMMTAADHASPRTGHLAVLTMIINVNWNVPPQGWNGMPLADKLGKLVEDYLTRKGQGQ

SEQ ID NO: 60769 - protein, 242 aa, Zea mays
  Coding DNA Sequence Number=SeqID_17394
  Homolog annotation: Hit_ID=Q656G9; Match level="QueryCoverage=91%, HitCoverage=92%, E-value=1e-43, Identity=47%"; Hit description =Putative uncharacterized protein B1012D10.48
MTPRAPQLRHHPPHLLLAEAVASWHPFHKKPCRSDRSTAPPSSARLPDAETPTPAPSGGASGGSFRWFGLRKRRRRGAGSRSVSGRSSDRRRSGTCSDFHFTCGGGGGGGGGGGGATDSSGEMWASDVGEVRMRDVSMATEFGPAPVSGVGVGGGGVGAAAEAAATDSGYGSEPGYRGDVELGYGDEMDEEDEDGRQQLFWDGVIGDMTKMKIDGDNNFGEQKSHHRCRRKKHDARVLDSLS

SEQ ID NO: 60770 - protein, 360 aa, Zea mays
  Coding DNA Sequence Number=SeqID_17395
  Subcellular localization annotation: CTP_CleavageSite=35; ConfidenceScore=5.44e-01
MSSRSLMHRVSPPSKPPDGGPAAPLRRRSPKTVTSSLMVGESEPGCGLCPSLSLKDFHHQGWGGEAVVVRGTGSCRVPGSRTRVASEPLSAPVSAMAAGRGSPASETARAAHGPTSNSKAFCPSLPHEFGHGRGPPGSSIRPEVIAAAVRLLEAEVVVVAAAGAGDGAPFVGLLLLRRPPSIEWGYSPVGCLNRFTKRESPRAKVTSEESLGSVGLVARGFSCSVKGTPRPPFDEPRLGVAVSARTEAELARKEDLVGRSLAGSSISGTDAGIDQPRPRVGLASSEDSWPRPRGDRPSRLLRPDSRRRPWRRWPGRGDDVVLQSGDLQTVSPSEARSDLAEDVVDAEGAAAPFKRQDPSL

SEQ ID NO: 60771 - protein, 278 aa, Zea mays
  Coding DNA Sequence Number=SeqID_17396
MEAQAHASCNRRTECFVHATTPPLAPPPRLLDCGTDTATRGDPEHDPAAPAWRDGQCGQKWASSNGGGRRAGATGPGKGDTPKRILPREGTRLRASLLTRGSKAGPSKGFDSRLRSRGPYTHYWLEVRRPAPRKGSTAASGYSGSAPTTDQGFEGWPPKGLGLGLSPERRRTPLRPTQGSDSGSAPEDDELRFARPQGSDYALASADGLRLARPRGSDSTSATEDRLDLGFGGASTSPNLGRRPATSTGGAIITLPRADSGHGGQDRRPIWLAPPDRQ

SEQ ID NO: 60772 - protein, 105 aa, Zea mays
  Coding DNA Sequence Number=SeqID_17397
  Pfam annotation: Domain name=Rad50_zn_hook; Domain location=7-54; Score=14.4; E_value=0.029; Accession=PF04423.5; Description=Rad50 zinc hook motif
MASLKDSSNVSHSNIIEPTMEILSAEDQRKFEEHKEQLIKKAQTKLLATFKDKTRENTCDPSTANWHDQSQPLYEMSMDTYPGQPQPPAHIGVNHRSAHNRTVRA

SEQ ID NO: 60773 - protein, 386 aa, Zea mays
  Coding DNA Sequence Number=SeqID_17398
  Gene Ontology: Mol. function=cysteine-type peptidase activity; Biological process=proteolysis
  Homolog annotation: Hit_ID=A3BIN1; Match level="QueryCoverage=45%, HitCoverage=20%, E-value=2e-18, Identity=31%"; Hit description =Putative uncharacterized protein
MAATSARGLNANMPTPGAWLAVAACWGTDSVDAVAVHELSVVEPELEAQEHQAEYQQDSPPGLEDPALASQFLTMWLVSKVDCVLNALLLGGTLEVKEGNWKCSKALKQRYTSAGRGKHVDSIQKELKGLMGEDDKANFCISFMLFALAHYLAPNTTLQVNREFLNSLEDVSKIKEFNWCAYVAQYLISGIKAYQTSNLEYVYRCVHILHLIYFDFLHKLNICQTPRIHYVRDEDLHDLQPLDFSSKKTNADGTSDDWKIFEDFTESNSAWDQLVYEHMLVTKQMSEALKANEEFLCKLKHYKVSFDAKLHNVAQLVLKNRTNMTQDKSGTTVLSASEHTFGLTDELGCPTDGAPELLPDNDGQEPTARPQEGASHARQDKQPVPL

SEQ ID NO: 60774 - protein, 172 aa, Zea mays
  Coding DNA Sequence Number=SeqID_17399
MTMQASLAHEGTVYGEQKKNELSSEKYALIVEFETELDEIFCFCDEFKTSAVMACRTMSPTQRSSSNTGSIQPFTLQTRRRSSEVGTPESSHRMTHSSAMKYLRQNDIKGDSDQYAIANEVHKDEANLDAFAWLPDIKERMVFVLRTWNVKVHGSLNAGDMNSSAPACWPSP

SEQ ID NO: 60775 - protein, 188 aa, Zea mays
  Coding DNA Sequence Number=SeqID_17400
MTGLDLEKTDLEKRFKKLRSLWGKYTMTMEASLALEGTVYGEQKKNELSSEKYALIVEFETELDEIFCFCDEFKTPANDIKGESDQYAIANEVLKDEANLDAFAWLPDIKERMGFVLRTWNVKLYLFNLTVLKVGQAPGAGIFAFRPLARVAAIAMKLCPHIFFHTYDLWVAAVASNRHSSPSLTTAA

SEQ ID NO: 60776 - protein, 164 aa, Zea mays
  Coding DNA Sequence Number=SeqID_17401
  Subcellular localization annotation: CTP_CleavageSite=29; ConfidenceScore=5.47e-01
MACRTMSPTKHSSNNKGSIQPFARQTRRRSSEVGTPESSHRMTHSSAMKYLRQNDIKGDSDQCAIANEVLKDEANLDAFAWLPDIKERMSFVLQTWNVKLYLFKLTVLKAGQAPGAGIFAFRPLARVAAIAVKLCPHSFFHTYDLWVAVVASNRHSSPSLTTAA

SEQ ID NO: 60777 - protein, 163 aa, Zea mays
  Coding DNA Sequence Number=SeqID_17402
MTMQASLAHEGTVYGEQKKNQLSSEKYALIVEFETELDEIFCFCDEFKTPAVMACRTMSPTKRISNNTGSIQPFTRQTRRRCSEVGTPESSHRMTHSSAMKYFRQNYFKGDSDQYAIANEVLKDEANFDASAWLPDIKERMGFVLRTWNIKVHGSLNAEDMNS

SEQ ID NO: 60778 - protein, 369 aa, Zea mays
  Coding DNA Sequence Number=SeqID_17403
  Subcellular localization annotation: CTP_CleavageSite=44; ConfidenceScore=5.51e-01
MGGRRCVQSPFLSIADNNRMKQPQLLPSSSPSFFCALKPNLLLLASLVVPLRGGLAGVLVVLLHRGPSEASPLAHLAGLTRLIPGACARPQVVDLVSLHPVDSQECGCCPEESLLVFYGDLKQQMSSVTGLDLEKKDLGKRFKKLRSLWGKYTTTMQASLAHEGTVYGEQKKNELSSEKYALIVEFETELDEIFCFCDEFKTPAVMACRTMSPTKCSSSNTGSIQPFTRQTQRRSSEVGTPESSHRMTHSSAMKYLRQNDIKGDSHQCAIANEVLKDEANLDAFAWLPDIKERMSFVLQTWNVKLYLFKLTVLKAGQAPGAGIFAFRPLARVAAIAVKLCPHSFFHTYDLWVAAVASNRHSSPSLTTAA

SEQ ID NO: 60779 - protein, 98 aa, Zea mays
  Coding DNA Sequence Number=SeqID_17404
MTMQASLAHEGTVYGEQKKNQLSSEKYALIVEFETELDEIFCFCDEFKTPAVMACRTMSPTKRISNNTGSIQPFTRHVTPQVSISCYVGRFIRISDAQ

SEQ ID NO: 60780 - protein, 89 aa, Zea mays
  Coding DNA Sequence Number=SeqID_17405
MKIDRNNIELHLYLRLDRRTFGEEADPQHSLFEESNIFLTFTTSVPTKKMFLVFNLSINSNQVKTLSLFEHLDSQIQRKGFGGFTFLKV

SEQ ID NO: 60781 - protein, 284 aa, Zea mays
  Coding DNA Sequence Number=SeqID_17406
MVLGPRMGYPLGDADIVRKIISLLPQQRYGSNITILNNMEDLSTMTPTIVTIKIVAFEMSRKMDQEEPTSSRPYAFASDEKKKGEKKAPTPSSSSEEEEEEESDDDEDDQPSTSSSKDEEIVRRVGKVEDLLFNIDRKNKEREDASHAGRRDTSGTTVQIWLNPQKGGAKARRLQVSRHGMNLQVKMNLQGHVAIVPHHAHYEKFETFANSNCELITKIEQLESNAPSSTIDDSLVKKNEKPKAKLASSQEAIKNLLEKMEILSIHNNELTTKVENIGSTQEHL

SEQ ID NO: 60782 - protein, 44 aa, Zea mays
  Coding DNA Sequence Number=SeqID_17407
MAPTCRSWRSAAAWVGYEEPVTEDPGDQQIEVVEQELIEGKLCP

SEQ ID NO: 60783 - protein, 252 aa, Zea mays
  Coding DNA Sequence Number=SeqID_17408
MGRTKTTSEMGRSKKHEPSSYNQQHHPTQKHYKGIPGRRRDPTPHSRTTREEAFLGNPKGSRSKTTDSTPTRSSGENDPLRTEIREHSGKERSVGRSLAYPKNFVVHLAHKGVDTDHSEEGNKRLESGDENTPSQLSDTSTLKGGREEEHRRADSFSTPTSSSSWGDWSQRPSPTMSLPYKGRNLPSVKLGDGEIDAGTCGYIMMPGNGIRRSPYPGMKPQKWEKLLTNECTKKGVTPAAAIVDKLKIESES

SEQ ID NO: 60784 - protein, 61 aa, Zea mays
  Coding DNA Sequence Number=SeqID_17409
MAAAGVSGALYAKAVSFGREWGIDGDGMLQDIVDGVTWPATLPPGWTVEWDAAPAGEEQEE

SEQ ID NO: 60785 - protein, 127 aa, Zea mays
  Coding DNA Sequence Number=SeqID_17410
MGLSAGLTVKPKLSKKFSTTEEIFVPLPVSEGKFYSEVWLKGGQEIADEDIRRNEKDSHDALEEAKRAEETAERAKLIAELSLLPEPYDPEADPSLKGALDIIRIANETVDEVVNRLLNEVADKVLK

SEQ ID NO: 60786 - protein, 114 aa, Zea mays
  Coding DNA Sequence Number=SeqID_17411
MTKDEGLSRELRQKVQSMMMNGIDDFHHGNFAFDYASPLAAEFAGYPMATILQATAASHVRWAFRSEAISHELRSNHILIWWQHSCHGEILRHGSQEPVNPKPFARKRSRHGKS

SEQ ID NO: 60787 - protein, 122 aa, Zea mays
  Coding DNA Sequence Number=SeqID_17412
  Homolog annotation: Hit_ID=A3B036; Match level="QueryCoverage=55%, HitCoverage=17%, E-value=4e-08, Identity=44%"; Hit description =Putative uncharacterized protein
MGENFHPEVEAPCSNPCYAKSRWLVIFLRIFGRVRPQQPRRKKKPRKNATKGWLSKDSTPERPIDRREQILQESPGIVTRRPLALLMEEGTTMEASSSQILEITTSAPRKLTPKKAKRNLNV

SEQ ID NO: 60788 - protein, 118 aa, Zea mays
  Coding DNA Sequence Number=SeqID_17413
MATTTPRKRRMASVLDVVMESLKTATLASAKASSEKIKDTREVVTASTASIHAEAGSSGARLAKLIEESLPEKPTSPAPEAPSQSVGNGNIKSKVEKQTLVDDASIFTEVSGTAQGPD

SEQ ID NO: 60789 - protein, 92 aa, Zea mays
  Coding DNA Sequence Number=SeqID_17414
  Subcellular localization annotation: CTP_CleavageSite=46; ConfidenceScore=5.04e-01
MDAGLASAVTTLRTCTDVAHVLEQFRLAWCGKLVRDARTVVPSRTSASTSSSLGVETELSMHAGEGTEDDLMLKNDHIPAEIRMEYDKDNPR

SEQ ID NO: 60790 - protein, 121 aa, Zea mays
  Coding DNA Sequence Number=SeqID_17415
MAYEIYCFSKGAGSAYAFGSLTSTNRQGTYVEHQKRPRRTVRHQEEDWRSFKTWNWEKQKHWTSIKTWNGEMAWRVQRDGCGRNRTGVYPWTGRPVETYWSLNQDIAMESLQFHDYIKHLH

SEQ ID NO: 60791 - protein, 95 aa, Zea mays
  Coding DNA Sequence Number=SeqID_17416
MTASVDSTLGRLYSLGMWFGVFVRDTRTWARRSPVDWASHGREIPRRASTLAVNPHVSVGGESCYSIHEEPVTEDPGEQQVEVAEQELIEGKLCP

SEQ ID NO: 60792 - protein, 90 aa, Zea mays
  Coding DNA Sequence Number=SeqID_17417
MEDGYHRGRGRPAKGEKKGVAAKRGGEGKKRGGHLGSQKIIAQQVMGNNVHELTKGGSPCEVGCASLPISHVTHLPRDHDFPFISTEETR

SEQ ID NO: 60793 - protein, 50 aa, Zea mays
  Coding DNA Sequence Number=SeqID_17418
MAPSWEQCFTVDRWIVVKWIGLDQGIGVQSRSSLIKSWSFIYNPRDPEPY

SEQ ID NO: 60794 - protein, 139 aa, Zea mays
  Coding DNA Sequence Number=SeqID_17419
MALGDDAVGGNGKDLGDDSTSEVLRSVDDLAAEVKEMTTTLASQDKLLRHDKTQNEEENTYLQLILSWVSSIKPQLGKVVSQFKRGNGEQGISFALGLGVTLNSERETFSHSQDYQNHPPKPIALVRNGVIEELVRDPP

SEQ ID NO: 60795 - protein, 129 aa, Zea mays
  Coding DNA Sequence Number=SeqID_17420
  Homolog annotation: Hit_ID=Q6QP51; Match level="QueryCoverage=39%, HitCoverage=23%, E-value=1e-12, Identity=68%"; Hit description =Putative growth-regulating factor 1
MEAQAHTSCNRRAGCYVRATAPPLAPLPRLLDCGTSTATRDDPAYDPTVPARRDGTGKGGYPERDPSPRRKQVPSLPTDQRFKGWPLGGVQQPPQSAWAPRPLLVRGSKAGPSEGFNGRLRPLGLRAHY

SEQ ID NO: 60796 - protein, 219 aa, Zea mays
  Coding DNA Sequence Number=SeqID_17421
MSFRPLMHRVFPPSEPPDGELPQSFRLVVGGTQLRGSWYLSAIVRLQGFSSCSPAASPRRWSPKTVTTSPWVGRSKPGCDLGPALSFKDVHHPSWGGGRAEPELYLPRGFVGQPLLQHSRERALTGPARGADFDNAGLVDGGRRQLQRVGLAGLTPGAPSRRKGGCHAARTGGPPKTSRAARATFVFWGCPAFAPVRRLRAEVDAPLFREDPSGDLPVG

SEQ ID NO: 60797 - protein, 121 aa, Zea mays
  Coding DNA Sequence Number=SeqID_17422
MTELYANYIRSPTENEIIVEHHYRYDIFTSAVDQQAHEINHRLIRLVLTLQVSTTMIKRAFSAMKLVKIRLRSRMEARTVRDLEQGSGSLPDEPDGPRLEAGRSARAQGQWSSSAAPESRS

SEQ ID NO: 60798 - protein, 142 aa, Zea mays
  Coding DNA Sequence Number=SeqID_17423
MTTTTLETMMTTTEADNRTRSARGRWGHTRIRVHALEVAECHRGVDGGRDRRHEFLEQVIIVDLDDGWKWSDPREDGPQVLVSWNEPAQEVENESLICDQWGGQGVYHGLHPLMVLIDIEIPVNNLAKGGIQMVDLDLAVIE

SEQ ID NO: 60799 - protein, 167 aa, Zea mays
  Coding DNA Sequence Number=SeqID_17424
MVSPTFSLHDITVIYVELLAPHFPFMGVVTREWGPRDRRWGRHTPAFDPQCLHIANLQSQFGGHRLPTISPLPLPLSIIVRSTTRQLQGVSGDDSHRVHDIDDDDALPTPDVSVIISLHAQATGLHSIWTLISVVLTPDWRDQVLLTLHRYALDDHVLIEVAVSTCS

SEQ ID NO: 60800 - protein, 196 aa, Zea mays
  Coding DNA Sequence Number=SeqID_17425
MRHLGSSALRADRPVRRREGVAPAPRSRTVRAAAEGTARRTAPTHFLATPLGNKVADLQNQAYMTDSKDLNGASPNSDTRLVNLSAAEHKKLEHDMKKMDEEIQRQQDQVLKVAEKWYLSHFRVHYKSYSDFRRPGTAKNKACAAENKLFSAALGLFLAVSGRQKKLAENKAIFSAARVQPPKITYFRRPPDGRRK

SEQ ID NO: 60801 - protein, 236 aa, Zea mays
  Coding DNA Sequence Number=SeqID_17426
MELDRTKAITGHLISAPASCPNIHEPKVTGGPNPSAKRKISQLRIIEAKEGHVNNDGLSSTVNADSRAATHNTTGRTKLNKKTREVAREVYSADVVTLDKSALFQRTVEFLKQLTKPCCLDNVVSHNVVLALGARAGNDWCCFKDHETRLSRETHYSLRCTGDVGRGEDEVLQGLDKTSVAGGIDHWGIVGGGLILSVHRSHTWLTIGHAGTLEDVDYVLALVEKHALVLALNGDS

SEQ ID NO: 60802 - protein, 81 aa, Zea mays
  Coding DNA Sequence Number=SeqID_17427
MEENTKQPLSIVDHSHFILAHLFDILSDLSSVLGERLQVVEIPRKREKSKVKKNIVVFKLIIGSLERVECNSRPLGRHNME

SEQ ID NO: 60803 - protein, 313 aa, Zea mays
  Coding DNA Sequence Number=SeqID_17428
  Subcellular localization annotation: CTP_CleavageSite=28; ConfidenceScore=5.15e-01
MQAACNRAKWAHPFDSNAPSMEAQAHTSCNRRAGCYVRATAPPLAPLLRLLDCRTSTATRGNPAYDPTVPARRDGQFDQKWAGSNGGGRRAEAAVTSGTCDIFGRRSGRRFAFAIMTTSKKQGPGKGDTPKGILLHEGNGPRAPLLIRRSKAGPSEGFNSRLRALGLRAHYWSEVRGPAPRKGSTAASGHSSSTPTTDQGVRRLAHEGFTSASDAERGMTLAAKSGLRRQRKLRITRPQGSGSASALEDDELHFAQPQGPDSGSALEDDELCFYRPQASDSGSASDDANSASPTPGLGLGLCPETTKTRRPTL

SEQ ID NO: 60804 - protein, 96 aa, Zea mays
  Coding DNA Sequence Number=SeqID_17429
  Homolog annotation: Hit_ID=O48967; Match level="QueryCoverage=92%, HitCoverage=21%, E-value=2e-35, Identity=76%"; Hit description =Putative uncharacterized protein
MASMRSPSVRGAQTNDLRTELNRRRAGEDARVSLERTRERRQNFEGRNLDQDFVAAGVPLVGVGCAALVDHLRVATWPPKFRPHLPEKYDGVRHCH

SEQ ID NO: 60805 - protein, 180 aa, Zea mays
  Coding DNA Sequence Number=SeqID_17430
MEHRPGLERLLETAHLELDGKLFVNTQQAPTWRANCRRFEPGGSLGRRLNCRRVPQPRWVSARRSAKGGKKPEGDRRERRKERIQGNDGASCDVVGPSPGLGEVEAPPRSRSSLSSGAEVESEPLGRARRRPSAEARAESEPWGRAKRSSSSSGAEPESEPWGRAKRSSSSSEAEPESEP

SEQ ID NO: 60806 - protein, 141 aa, Zea mays
  Coding DNA Sequence Number=SeqID_17431
  Gene Ontology: Mol. function=nucleic acid binding; Cellular component= intracellular; Biological process=regulation of transcription
  Homolog annotation: Hit_ID=A2Z1I0; Match level="QueryCoverage=99%, HitCoverage=96%, E-value=2e-22, Identity=50%"; Hit description =Putative uncharacterized protein
  Pfam annotation: Domain name=zf-C2H2; Domain location=28-50; Score =20.4; E_value=0.0067; Accession=PF00096.17; Description=Zinc finger, C2H2 type
MEREQELDLELTLLPSAWATQEEAPGFFLCTYCGRKFCTSQALGGHQNAHKYERALAKRRRDIAAALRKHGVPVTRAGQFHAGASPSARATAGVAGSERPDAGRERPVAVDELQGAPAPWQSGGLLHQVERTEELDLSLGL

SEQ ID NO: 60807 - protein, 77 aa, Zea mays
  Coding DNA Sequence Number=SeqID_17432
  Gene Ontology: Mol. function=nucleic acid binding; Cellular component= intracellular; Biological process=regulation of transcription
  Homolog annotation: Hit_ID=A2Z1I9; Match level="QueryCoverage=90%, HitCoverage=51%, E-value=1e-17, Identity=65%"; Hit description =Putative uncharacterized protein
  Pfam annotation: Domain name=zf-C2H2; Domain location=30-52; Score =20.4; E_value=0.0067; Accession=PF00096.17; Description=Zinc finger, C2H2 type
MEREPEQELDLELTLLPSAWATQEEAPGFFLCTYCGRKFCTSQALGGHQNAHKYERALAKRRRDIAAALRTKNVVSD

SEQ ID NO: 60808 - protein, 160 aa, Zea mays
  Coding DNA Sequence Number=SeqID_17433
  Homolog annotation: Hit_ID=O48967; Match level="QueryCoverage=63%, HitCoverage=21%, E-value=2e-31, Identity=67%"; Hit description =Putative uncharacterized protein
MRQGVLDEKMLEKLATHDVETVTTLFALADKCARTAEGRAWHSAPQTGIAQTGGSGAVSHGGKNKKKKKCGSERPPSAAPVIAAVTGGRNERNKRPRPQRGNKRLNALTFSPETPTPAMTTSRAIGETPSFLVYGAEACFPSKTFMGSSWAQYFNESMQE

SEQ ID NO: 60809 - protein, 318 aa, Zea mays
  Coding DNA Sequence Number=SeqID_17434
MNGGNHSRSGEPSFPRLPQGLQKGLEILLSVVWGPVAPVIGGGGHHSLRKRREHPVVISEIEPLALPPFVRGRKDGGDILWRPRLPQLEDTATSPHCRADPSLPRRQGKKLRGEEMSPQVPVRVNPQVSFTNRREDGGLRDGVRTEVVQLHPVDVQNRSHKTACQHSEPPLVKGDEAHDIPRRRGRGGSAQGASTPAAGHWREGEVNPQQRGPPGTRKGDTPKGILLREGSGPRAPLLIRGSKAGPSEGFNSRLRALGLRAHYWSEVRRPAPRKGSTAASGHSGSAPTTDQGFVGWPSKGSTVASNAERGMTLGTFDT

SEQ ID NO: 60810 - protein, 380 aa, Zea mays
  Coding DNA Sequence Number=SeqID_17435
MASIKSWVFFALGYRDPTVSSPDPPEGSGTRLRGLVCTCGGLEPRPEVRTVHPGVRHFPVGVRTHYRHLGVYRLLWPRGGPGAVHVEGSGAVHCATRDSRVGTMPSYCRCLDTAALVLKIHLLCLLRRPRGGAEPVPKEDDSWARAPVPETGLSVSAEVKRRTTAGGGVLLTRRDWSTAFGGGEEAHYHRRWRAPHAAIRLLRIRRLTPKEYDSWAQAPVSETGSPWRASGEIFSGVSGHQWGNLSLKGIPPSAVAILITRSALSPSSSPRSSAIVATMALLDPPEHLQPEVVLNLVLNLLEWGVPAFAGKIRVGASPHGDLAAGEFVLFVSNLPSGLALPISSFFMLLLEELGLQPQHFTPCFILQAAIIAYLHKMSMG

SEQ ID NO: 60811 - protein, 220 aa, Zea mays
  Coding DNA Sequence Number=SeqID_17436
MPINPGSSLSLNTYRTVSRDTRQNPERDAGDFAMGSEARKEDREGAGQEHQGRPGGTRTSSSTERHDEEETQCHREDGVEGCWPAAGKGGLHLWKKLEPSRKGEALLQERDMLGRWPERAGGVARRAIRPRHNIVEARLGQGPGACSGGGRERSGRRHSDVCETRSSHGVASMGARTVAAGRAEDMNARYRGKWSRGRRLWRDLNRALAHGRCRARWPWR

SEQ ID NO: 60812 - protein, 47 aa, Zea mays
  Coding DNA Sequence Number=SeqID_17437
MARVARTLLAKDRLKRVHILESLFFSRVIVFVLLLMVLSAGGLGLLI

SEQ ID NO: 60813 - protein, 187 aa, Zea mays
  Coding DNA Sequence Number=SeqID_17438
MGSEARKEDREGAGREHQGRPGGTRTSSSTERHDEEETQCHREDGVEGCWPAAGKGGLHLWKKLEPSRKGEALLQERDMLGRWPERAGGVARRAIRPRHNIVEARLGQGPGACSGGGRERPGRRHSDACETRSSHGVASMGARTAAAGRAEDMNARYRGKWSRGRRLWRDLKRALAHGRCRARWPWR

SEQ ID NO: 60814 - protein, 189 aa, Zea mays
  Coding DNA Sequence Number=SeqID_17439
  Gene Ontology: Mol. function=24-methylenesterol C-methyltransferase activity; Cellular component=integral to membrane; Biological process=steroid biosynthetic process
  Homolog annotation: Hit_ID=O82427; Match level="QueryCoverage=49%, HitCoverage=25%, E-value=3e-33, Identity=74%"; Hit description=24 -methylenesterol C-methyltransferase 2
MSELQEVRPQSSEVMETETEAHERTDDGSPAIVGEEAATPEGEDELATSMAEEIIEEIQWAEATENSGRGWCTGQEGGRSQDGIHHAGQGVEQETATKAASAEKVPALVDTFYNLVTDIYEWGWGQSFHFSPSLPSHSHRDATHVHEERVADLLDARPGHRLLDVSCGVGGPMRAIAAHSGSTVTGSRR

SEQ ID NO: 60815 - protein, 1259 aa, Zea mays
  Coding DNA Sequence Number=SeqID_17440
  Gene Ontology: Mol. function=RNA binding; Cellular component=protein complex; Biological process=microtubule-based movement
  Homolog annotation: Hit_ID=Q10KN9; Match level="QueryCoverage=39%, HitCoverage=91%, E-value=0.0, Identity=78%"; Hit description=KH domain-containing protein, putative, expressed
  Pfam annotation: Domain name=DUF594; Domain location=379-430; Score =57.1; E_value=5.9e-14; Accession=PF04578.4; Description=Protein of unknown function, DUF594
  Pfam annotation: Domain name=KH_1; Domain location=510-575; Score =43.5; E_value=7.4e-10; Accession=PF00013.20; Description=KH domain
  Pfam annotation: Domain name=KH_1; Domain location=608-675; Score =59.2; E_value=1.5e-14; Accession=PF00013.20; Description=KH domain
  Pfam annotation: Domain name=KH_1; Domain location=750-805; Score =31.0; E_value=4.3e-06; Accession=PF00013.20; Description=KH domain
  Pfam annotation: Domain name=KH_1; Domain location=837-904; Score =57.5; E_value=4.7e-14; Accession=PF00013.20; Description=KH domain
  Pfam annotation: Domain name=KH_2; Domain location=837-882; Score =12.6; E_value=0.014; Accession=PF07650.8; Description=KH domain
  Pfam module annotation: Pfam domain module=DUF594::KH_1::KH_1::KH _1::KH_1::KH_2; Domain location=379-430::510-575::608-675::750 -805::837-904::837-882
MLVFVSGIIKYGERVWALKTRGFFVGRTMLLMGQGPASTLWFYLKTKYQGREEKLKMVMMVMMELGMMFDLLYTKANVLQRRIGVLFRCASQALMVVALVLFMIRREEGAHNNKVNVAITYTLFSGAIFVETCCVAAAIASPWTRAHLKESSCLHGLSDSLFEAVHLCKSTANNMAQFNLLDHCISVNSKPRVFSKALSAIGLDKQWYVHHMDKQCYWWIINRVLEHLATLPDEFSGLATVHFTINAPTEHPVWFNQLSTSFEQVLYGLHLYTDLHLSRHFNNCSTGSVVQPPPPEIMRLKEECETLSNYMMYLMVVHPSMLPVNTVAAGDLVQQLIGWVTNHPGHGATTTKLAILRGYSRTFYILVIDEPGQHRSFYYLHHLLTQIKEMWVRLLMYAAGKCSGEVHARQLGEGRELITFVWLLMLHHGLGDMAAEFKLLRSNDPNVAERGAWIVSPPGNYQEPTCAFNHIMSGHRNSHGKRYSDYTETGGGKRRNPGDDTYAPGPDDTVYRYLCASRKIGSIIGRGGEIAKQLRTETQAKIRIGESVPGCEERVITIFSSSRRTNTIDDAEDKVCPAQDALFRVHERLATDESFGNEDSEEISPQVTVRLLVPSDQIGCILGKGGHIIQGIRSETGAQIRVLSKDHIPACAISGDELLQISGDMVVVKKALCQVSSRLHNNPSKSQHLLASSLTQPYPGGTHLGGSSAAPVVGITPVIPPYGGYKGDVAGDWPSLYQPRRDESSAKEFSLRLLCAAANVGGVIGKGGGIIKQIRQESGALIKVASSNSDPDDDCIITVSAKEFFEDPVSPTIDAAVRLQLRCSEKSDSELAEQSYTTRLLVSTSRIGCLIGKGGSIITEIRRTSRANIRILSKENVPKVAAEDEEMVQISGGLDVARHALVQIATRLKANFFEREGSLSAFPSVIPYHPLPAGVSVSDEPKYLSRDTKPVGHYLYSSAFRTSDDMIPSDSYASYGGSQAPGGGYAAYSGYSARSSSSGQLFTLFFVTDNNFHQSVDVHTVGSASAFVRPCTPKSRTAPLRHLLLLSPHCAATSSVPRVRAFGCLTTHSNRRPLSRPHPQRIPPPRCLICDEHDIDHTGKYASDSDLQLERALVYYNEASGGRFIPRAVLMDLEPDTMDSVRSGPFGQIFRPFGPTAPSAAPHPRLPQIWIPPPSSTPPPRPPETRILPLHRDGTPPKGTTTWPPPLKPSDDGSGAKQREMGGDDDGAPCPGPVVGRVLQAPKPREFTLAELRAATRGF

SEQ ID NO: 60816 - protein, 111 aa, Zea mays
  Coding DNA Sequence Number=SeqID_17441
MDESASPHADVPRPSVSPLLLKASPTSADRCVVYVRLIIMARSVLGSGCSCAIVWRNEKGKTYDGGSITAVMGSSSEKMYLCQDPLIVSFSAKESLNLNKLYLDSQKLAYP

SEQ ID NO: 60817 - protein, 170 aa, Zea mays
  Coding DNA Sequence Number=SeqID_17442
MTTNSSSNYSSRTQRVADKNRVAELATSTKETTTTLLLKMIVITEVEDRRTRRDRSCKQIFDYILKHGKPSKPHSELRVAPDDLKRSCVHGGDEDARCPWSRRGRALWTDEAKFDDKHHGGIGDVATHDAETNDDNPQQHHTYGINTLSSGCASVVRRLEPGLDVGVMAG

SEQ ID NO: 60818 - protein, 112 aa, Zea mays
  Coding DNA Sequence Number=SeqID_17443
MAPRVRPWLTRLVHASSRALADPRPPLHRAVPIKQPKASAVPPHALSILPEPKFTGLRLEHVVPPPAKPPEPRPPRPAPSSHFQAASVTQLASPVAREAFEVLRPGRASPET

SEQ ID NO: 60819 - protein, 135 aa, Zea mays
  Coding DNA Sequence Number=SeqID_17444
MGKNNKRKREPTPPSEEFGDSEYSEEEFSSESEGSPAPVPLRESSDDSDDSQGLAAEGSDESEYSSDEEDSDGGGEDVDDDDDDGDGDGSGSGRGSGDGSKDGDGGGSSRGSNRGGSSRGSTRGGGGGGSNRASG

SEQ ID NO: 60820 - protein, 116 aa, Zea mays
  Coding DNA Sequence Number=SeqID_17445
MVLRVTRSTRSSGVTNSGERERIVPMGLVLGSSSGKLHGLSRKLSEALDRAEVGGKGFGHAGRPRAAVAGRGEVAGAAGELGRVRRGAEGITGKMCSSGFDLGLASYEEVKLGLSD

SEQ ID NO: 60821 - protein, 132 aa, Zea mays
  Coding DNA Sequence Number=SeqID_17446
MVEWLTRSTCSGGGESSGERGLASPAKETPIPCSGSLTEVCTSFSEGRTGLGMALLAGLRWQRGWAAAGSLRTGKRRRANSASSAKVALAKVGLLILSHALEVGTILVWNDDPWGAPEVHPMGVAPDLQMDF

SEQ ID NO: 60822 - protein, 101 aa, Zea mays
  Coding DNA Sequence Number=SeqID_17447
MPRNMVNRRLPSSRDLRRGLPFRLWWVQVRSLHDGQSGSVRHYTPRRNSANAFGNQTPQPNSCMSRGSLEEMVAGITWPTTLPPGWTVKWDPASAEEEHEE

SEQ ID NO: 60823 - protein, 137 aa, Zea mays
  Coding DNA Sequence Number=SeqID_17448
MVQRVTRSTRFGGVMNSGERERTVPVGLVLGSSLGKLHGLSRKLSEGLDRAEVGGKGFGHGGRPRVALAGRGEVAGATGELGRVRRGAEGCSSGFDLGLASYEEVKLGLSDQTCLVETGRQNMSNQLGLLSNFSRVS

SEQ ID NO: 60824 - protein, 220 aa, Zea mays
  Coding DNA Sequence Number=SeqID_17449
MALVDALPGRVCLGYRAHAELSLPRVFLPRAQLALAPAPSGWLRAHPSARSSGRRPAEILPHPHGALLLVPSSPMATGCSSPHLPSPHARAGFLLARLPSSPFPWPSSSLLSVRARLLLCPPMAAVPSLVAGVRPASSRRTHPSLASPWKRALLQLGPTVELFSGAKMQSVFLNFALAVGAVAMAFCPRFWPSPLPPIYGAIASSPAAVLLASSPVVDLA

SEQ ID NO: 60825 - protein, 165 aa, Zea mays
  Coding DNA Sequence Number=SeqID_17450
MSSSSLFAANTPPAGALSEDTLSNVAVEELQPGDTVVFGVSRISSVRVQDMQQLGYFGSGVGRVPGAEEVPVPEGELVVFEAFSPLAFASLHIALWRSPRVKDVFDRAPGVFGVNAGGSGEGQLTVVPPPVVTTSPKAVVGAKGAARGPVGHFLRERRDSIGRCR

SEQ ID NO: 60826 - protein, 404 aa, Zea mays
  Coding DNA Sequence Number=SeqID_17451
MNGGNHPRGGEPSFLQLLQGLQKGLEILLSVARGPVAPVIDGGGHHSLRKRREPLVVISEIKPPALPPFVRRREDGRDVLQRPRLPQLEDAATGPHCLADPSFPRRRGKKLHGEEMGPQVPVRVNPQVSFTNRREDGGLRDRVGTEDRRHLWQAKQATLHLRHNDHVKKGTRKGDTPKGIPLREGSGPRAPLLIRGSKAGPSEGFNSRLRALGLHTHYWSEVRRLAPRKGSTAASGHSGSAPTTDQGFVGWPQKGSTTASDAERGMTLEDSAAYVAPTAVPLDRVRLTAAKFGLGRHRKLRLARPQGSAPGSASDDELCFARPQGSDSASAPEDDKLCLARPQGSDSTSAPEDDELRLARPQGSDSALASDDGLRLARPRARTRPRPRKTDSTSTSEEPPPRPT

SEQ ID NO: 60827 - protein, 267 aa, Zea mays
  Coding DNA Sequence Number=SeqID_17452
  Pfam annotation: Domain name=zf-CCHC; Domain location=188-205; Score =17.9; E_value=0.0029; Accession=PF00098.14; Description=Zinc knuckle
MRKQSDASERSRTLSLTLTGKSKEREDALHEGRRVTSGTVVQIWPNPQRRGAKARRLQVSKLEMTLQVNMNLQGHTATNPHQVIRQMPYGKSTPGVSLVEMPKVIKKDVSTSRFDLIDESNLYNQVLVKNVVIETCSNEIAMENEKLKQEVARLCKALYDKKGKAKQIQPPHYDTNVGVNKPMEGENVICRLCHKEGHKSYQCKEKTGDKQKQKPTSKISSTYINKVDKKAVTPYLIKKEKEWKGDSNQGQQASQQRKMGQTYLGAK

SEQ ID NO: 60828 - protein, 22 aa, Zea mays
  Coding DNA Sequence Number=SeqID_17453
MGKPGPSLLMLLLCREKDPLDI

SEQ ID NO: 60829 - protein, 243 aa, Zea mays
  Coding DNA Sequence Number=SeqID_17454
  Gene Ontology: Mol. function=transcription regulator activity; Cellular component=nucleus; Biological process=regulation of transcription
  Homolog annotation: Hit_ID=A2YJA5; Match level="QueryCoverage=79%, HitCoverage=28%, E-value=8e-72, Identity=71%"; Hit description =Putative uncharacterized protein
  Pfam annotation: Domain name=WD40; Domain location=125-196; Score =26.2; E_value=0.00012; Accession=PF00400.23; Description=WD domain, G-beta repeat
  Pfam annotation: Domain name=WD40; Domain location=41-79; Score=37.4; E_value=5.2e-08; Accession=PF00400.23; Description=WD domain, G-beta repeat
  Pfam annotation: Domain name=WD40; Domain location=83-121; Score =50.3; E_value=6.9e-12; Accession=PF00400.23; Description=WD domain, G-beta repeat
  Pfam module annotation: Pfam domain module=WD40::WD40::WD40; Domain location=125-196::41-79::83-121
MVSVTLRVKPELTLPATSAQLAITLLVLHMTGLLEFGQLINPAFVNNGWHLSDVDCVQWHVNCNYIATGSSDKTVRLWDVQTGECIRMFIGHRSMVLSLAMSPDGRYMASGDEDGTIMIWDLSTGRCVSPLLGHNSCVWTLAFSSPQVSFYLNASCMSLPKEQVFITVKGKPGLISCCEGALLESGSADCTVKLWDVAFSTKALRTEDTKGSSSANRLRLLKSLPTKSAPVYSLRSSRKCLSG

SEQ ID NO: 60830 - protein, 191 aa, Zea mays
  Coding DNA Sequence Number=SeqID_17455
  Subcellular localization annotation: CTP_CleavageSite=51; ConfidenceScore=5.57e-01
MSLISWSNSSSWSVGLVAFLFWLQASRRERVSWFGSSGCSAEVPVAEAFFSSMTKVSACRRWSKEFTEALFPLGYNDLQTKVMKDIPSSTLYMLIREEACWGEGKDATLRYSLRLSRCTNRSKTTGEVHPSSSAEEQLQLRALRIKNRNLQKLKEILEAKRQRVSVQAKVRQMIRDEEQRAQELEQEIALM

SEQ ID NO: 60831 - protein, 184 aa, Zea mays
  Coding DNA Sequence Number=SeqID_17456
MTLGTSDTWPRLGLCSRGTLGHFRDQQERFCNGIPSEGGIEPSDPIKRDRVRQITCSRQGQSDRSHFAAPLTDLTENSAACPAPTAVPLDRVRLTAAKSSLRRHRKLRLARSQSSGSTSTPDDGLRLAQPQGSDSASTSDDGLRLARPQGSDSASTSDNGLCLARPQGSDSASTSNDGLHLARP

SEQ ID NO: 60832 - protein, 284 aa, Zea mays
  Coding DNA Sequence Number=SeqID_17457
MALTMRLPASKSEFPKLKMARVQLLAPSRVTGGRPRHHAQWDSDGGGDMGTGERSRGVWKSCDVRRRRKLDSRFQTLTAPSLSGRRHEQQGLPARPREQPPSDILSDQAPAATTDGARRGCPTTGRALGRRPSPGTAAPILGGARRGCPRPARVRGPQREAGSPGGAGAVGRALPRPGASAAAARARPRAGVTSTATTRTLDHPRCRRLAACLRMRAWLGASPVWARLGLAPGAADLDATDSGGSSAWEPGKGARSRHGRGWLRALKPRRGLVWPGLRITQDNV

SEQ ID NO: 60833 - protein, 246 aa, Zea mays
  Coding DNA Sequence Number=SeqID_17458
  Gene Ontology: Mol. function=binding
  Homolog annotation: Hit_ID=Q6H7Q8; Match level="QueryCoverage=76%, HitCoverage=31%, E-value=1e-73, Identity=79%"; Hit description =Tubulin-specific chaperone C-like protein
  Subcellular localization annotation: CTP_CleavageSite=57; ConfidenceScore=5.17e-01
MADEALDQPPDATPSPTPATPPVPATPSPTVLLRPRREAFEHGLLPIPKLIFPEGTLAQTLAQLKEKLAASAPDGRVRAAALAEALQIPQEQAALALATLAAVLPAEDPALGDGAVDGSAADIRDMLLFLYIQSYKRLVPRSAHKDSPVVADVWPSTSAFDGYLSALSPIQLVRSNSRRFMPSQADEEIHQLSYLQKHMANILTLLADSVEGDGDDSLAAMARGLGRCVARMHVRLKHVAQLHVCT

SEQ ID NO: 60834 - protein, 291 aa, Zea mays
  Coding DNA Sequence Number=SeqID_17459
MSGGSAKREMEMTTSHGKAPSKESDTKGREESPPRVKSHRSGDKKKKMKKVVPSVGDEAYDSDEVACRYPEIGHQTPPRGWLRGRHVAREDNIPKVSRVGPDPHGKVLDPCVYRPDLRVRSMTSTGANRTPRMDSGPPLCGVQATHSRAPGFRDKEYPGLNQGQAGVRSQHVSGPYRVRPCSPLRQSPDAATWPTTRDVSQRAEPDVRSLGRAASAFITDKARRLSIPLAGDVSPQHLMSPVHSSDRRCAASAFNAVRSCCGVHYAHHHSRVTEEAAATYQYRVGYGHYGA

SEQ ID NO: 60835 - protein, 132 aa, Zea mays
  Coding DNA Sequence Number=SeqID_17460
MTNNCKPRVISNLDYCSEPPWVGPRASHGPIRSLGRGSGRAPRPKYKDDLNRGVSADICRMTEKQRLKRFTINLRRCLNRHTTAIKRKAMGASPTTKKSTAATFPPISIMPEVTSVYPQPELTRLEAHTIGQ

SEQ ID NO: 60836 - protein, 37 aa, Zea mays
  Coding DNA Sequence Number=SeqID_17461
MGTNGHLDLDTGGKSVDQKLEGKQGYKRDAKANAKSA

SEQ ID NO: 60837 - protein, 171 aa, Zea mays
  Coding DNA Sequence Number=SeqID_17462
MAERYQLLRSCIPPTTRRKDCGCSPSGGSEGGKTRCIREREDMVALQGGHPPFKGDSPYLRPQPSWAESSPTRSKGPGKGDTPKRILPREGNRPRASLLIRGSKAGPSEGFNSRLRALGFCAHYWLEVRRPAPRKGSTAASGRSGSAPTTDQGFVGWPSKGSQPPQTQSEG

SEQ ID NO: 60838 - protein, 308 aa, Zea mays
  Coding DNA Sequence Number=SeqID_17463
  Gene Ontology: Mol. function=kinase activity; Cellular component =ornithine carbamoyltransferase complex; Biological process=amino acid metabolic process
  Homolog annotation: Hit_ID=Q6QP54; Match level="QueryCoverage=23%, HitCoverage=25%, E-value=2e-12, Identity=57%"; Hit description =Putative kinase
MAPPVDVVGPRPSLGEVEAPPRSRSSLSSKVEVESEPPGRTRRRPSADAGAKSEPLGRAKRSSSSFGAEPESEPWGRAKRSSSSSGAEPESEPWGRAERSLSSSGAEPESEPWGRAERSLSSSGAEPESEPWGRAEQSSSSSGAEPESEPWGRAKRSSSSSGAEPESEPWGRAERSFLWRLRPDLDAVSLTLSSGTAVGAVQAALSLCQTGVHRTVSGAPTTPKRQRSASPKKERNPHRTVSGGAPDCPMRQATEGKICLPGMLSTAPSCLGAIKGTPRRMEEDTKHSLSIPKHQDFDSAHLILCDSN

SEQ ID NO: 60839 - protein, 827 aa, Zea mays
  Coding DNA Sequence Number=SeqID_17464
  Gene Ontology: Mol. function=catalytic activity; Biological process =polysaccharide catabolic process
  Homolog annotation: Hit_ID=A2X202; Match level="QueryCoverage=98%, HitCoverage=99%, E-value=0.0, Identity=73%"; Hit description =Putative uncharacterized protein
  Pfam annotation: Domain name=DUF1680; Domain location=131-601; Score =494.8; E_value=1e-145; Accession=PF07944.3; Description=Putative glycosyl hydrolase of unknown
MARAPSMPAATAVGIVVVMLLAAGFRGAEGKSCTNAFPGLTSHTERAAAQLRPGPPATVLQPIIHHHRHGREQHLTPTDESTWMSLMPRRALRREEAFDWLMLYRELRGGGGSARPGVAAGAFLSEASLHDVRLEPGSMYWRAQQTNLEYLLLLDVDRLVWSFRKQAGLTAPGTPYGGWEGPGIQLRGHFVGHYLSATAKMWASTHNDTLNAKMSSVVDALYDCQKKMGTGYLSAFPSDFFDCLEAIKSVWAPYYTIHKIMQGLLDQYTVAGNSMALDMVIKMANYFSDRVKNVIQNYSIERHWESLNEETGGMNDVLYQLYTITHDMKHLTLAHLFDKPCFLGLLAVQADSISGFHSNTHIPVVIGAQMRYEVTGDPLYKVSRNLFRWTKEIAYADYYERALINGVLSIQRGTDPGVMIYMLPQAPGHSKAVSYHGWGTKYDSFWCCYGTGIESFSKLGDSIYFEEKGDPPALNIIQYIPSTYNWKAAGLTVTQQIKTLSSSDQYLQISFSISANTSGQTANINFRIPSWTFADGAGATLNGKDLGSISPGSFLSITKQWNSDDHLALHFPIRLRTEAIKDDRLEYASLQAVLFGPFVLAGLSTGDWDAKAGNGSAISDWIAAVPPAHNSQLVTFTQVSNGKAFVLSSANGTLTMQERPEVDGTDAAIHATFRAHPQEDSTELHDIYSTTLTGTSILLEPFDLPGTVITNNLTLSAQKSSDSLFNIVPGLDGNPNSVSLELGTKPGCFLVTGTNYSAGTRIEVNCKSSLESIGGILEQAASFSQTDPLRQYHPISFVAKGVARNFLLEPLYSLRDEFYTVYFNVRV

SEQ ID NO: 60840 - protein, 65 aa, Zea mays
  Coding DNA Sequence Number=SeqID_17465
MKPCLVNLAFSPPLAKPPTISELIVAFLDQKFADEDFDGELDGWSSDPPGHLHVEGCHVLLYFYE

SEQ ID NO: 60841 - protein, 586 aa, Zea mays
  Coding DNA Sequence Number=SeqID_17466
  Gene Ontology: Mol. function=DNA binding; Cellular component=nucleus; Biological process=embryonic development ending in seed dormancy
  Homolog annotation: Hit_ID=Q53WJ1; Match level="QueryCoverage=99%, HitCoverage=45%, E-value=0.0, Identity=78%"; Hit description =Putative uncharacterized protein P0617H07.8
  Pfam annotation: Domain name=JmjC; Domain location=397-513; Score =237.3; E_value=3.4e-68; Accession=PF02373.13; Description=JmjC domain
  Pfam annotation: Domain name=JmjN; Domain location=159-203; Score =92.3; E_value=1.5e-24; Accession=PF02375.8; Description=jmjN domain
  Pfam module annotation: Pfam domain module=JmjC::JmjN; Domain location=397-513::159-203
MGIEGIAATVTEDPEPSIPPGFGPFAASASWGIQNDVKPADDHSSSVLALQSIDDDVEILEYLSSSVDHQSDTGCCISGSNTCRKSLRNRPPIDYSRFDQIADEDSDAEVADKGVNAVKHRQQFPKGVLRGCPECANCQKVIARWNPSGARRPVLDEAPVYYPTEEEFQDTLKYIEIIRPTAEPYGICRIVPPASWKPPCLLKEKNIWECSKFSTRVQKVDKLQNRKSPKKSRRGGMMKKRRKISETEENNHHQIGMQQNQERFGFEPGPEFTLQMFQKYADDFSDQYFMKDKCRDSPPSVEDIEGEYWRIVERPTEEIESHYLPTDQKIHSHKVIYGADLETGTFGSGFPKLCPEMKSDVEDKYAQSGWNLNNLPRLQGSVLSFEGGDISGVLVPWLYVGMCFSSFCWHVEDHHLYSLNYMHWGAPKMWYGVPGKDAVNLEAAMRKHLPELFEEQPDLLHNLVTQFSPSLLKSEGVPVYRCVQHEGEFVLTFPRAYHAGFNCGFNCAEAVNVAPIDWLPVGQNAVDLYREQARKITISHDKLLLGAAREAIRAQWDILFLKRNSSVNLRWKSICGPDSTICKSLK

SEQ ID NO: 60842 - protein, 287 aa, Zea mays
  Coding DNA Sequence Number=SeqID_17467
MELFQGVSSPHPLVGPGLLRVLLFLLLLRGNPPRCSVHRILWDPWQGRLVPPYLLETNGNPDSKNQGQPDARRRKEWTLTRVTHPWSGRIKGWERALASGFPNATATRPWRTSTGRGSEDIREPSKSASGVISQSGNRRSAKGSTLRRWMAAITPAAVSPPFRSASRALRRGSRFFCLSCGVPWRQASAATVTTRWEDGGSISPSFRSRRPALPRGPFSPPSAKQKAPQKRDESTSPSGGDPQIPFAHRYEDGGLRDGVGAKVVQLHPIVVQDRRIKRLAGTPNPRS

SEQ ID NO: 60843 - protein, 93 aa, Zea mays
  Coding DNA Sequence Number=SeqID_17468
  Subcellular localization annotation: CTP_CleavageSite=59; ConfidenceScore=5.39e-01
MAYFFRGFVNLPLKVGYISMFLISWSNSSSWGVGLVAFLFWLRASRRERVSWFGSSGCRAAAPVAEAFFGGMTKVMKDEPSSIQHINNEEGII

SEQ ID NO: 60844 - protein, 103 aa, Zea mays
  Coding DNA Sequence Number=SeqID_17469
MGMSAVERAYIYSVERAGLGKSDGLEKKVSSEEAKDSLDSEEASDDEGNNGEGDDGSSDGGDDSTEGSVGSGKGSDGGDGGDGGSGDDKSSGDGDAGGNVPLT

SEQ ID NO: 60845 - protein, 230 aa, Zea mays
  Coding DNA Sequence Number=SeqID_17470
  Homolog annotation: Hit_ID=Q6BTJ4; Match level="QueryCoverage=90%, HitCoverage=29%, E-value=9e-08, Identity=29%"; Hit description =Similar to CA1621|CaIFF6 Candida albicans CaIFF6 unknown function
MGATKSRIGPFEGRDHASPEPSLGQGQPTPEDLRLARGPPSSNGHTFGSLEAQSSPRSNLGQIATPTDQIAGAFNAKGSDSGSAPEDDELRFARPQGSDSGSAPEDDELRFARPQGSDSGSAPEDDELRFARPQGSESGSAPEDDELRFARPQGSDSALASADNLCLARPRGSDSTSALEDRLDLDLGGASTSPNPGLGPTTSLESPSLPYPKLTQATGNKTGVPSGSLH

SEQ ID NO: 60846 - protein, 307 aa, Zea mays
  Coding DNA Sequence Number=SeqID_17471
  Homolog annotation: Hit_ID=Q2QMH2; Match level="QueryCoverage=38%, HitCoverage=25%, E-value=3e-20, Identity=53%"; Hit description=Root hair defective 3 GTP-binding protein containing protein, expressed
MAIISKIWGQSALELDLSLRCLVLDAVPDARARTGLYKPSDLAELHRKAKIDLTGLRPPACARRLGTPNLPYTLDHLIGAISPPLQLGRSAAGCSAVACSLADAGCSRLAVSLLLALVLRYSVLALQPPAQVLGDQTTWQSIRNIYKRETEAILPEFLNNLCQFEMEYAPAEEMALKLLSVMAAIRWDDEPDRIESILTSTLLEGSVVSKIASAASADPLASTTWEEQAHRRGNSKLPPPWAIVAIAILGFNEIMESHLSVLAICGLLDGQSFGDAARCQQRIPEWSGSWDNLCVGEAPTNDTEPTF

SEQ ID NO: 60847 - protein, 162 aa, Zea mays
  Coding DNA Sequence Number=SeqID_17472
MGKNKKGGSSSHHSGNKWKSEPSLPSEDFGDSEYSEEEFSSESEGAPVYASPPVSSDDSDDSQGIAAEVWTYIRVVARFGLEGSDESEVSSDEENSSDSSEEESGDNDDDEGDGGDGGDDGDSDGKGDGGNSGKGDDDGGKGDGDDKGSGGSSKASGKAPLV

SEQ ID NO: 60848 - protein, 53 aa, Zea mays
  Coding DNA Sequence Number=SeqID_17473
MVGTSAVTARRQPGSVEHCLPCKDKNSIRIVYFSQLMRLLDPLYYIEYDLGYG

SEQ ID NO: 60849 - protein, 190 aa, Zea mays
  Coding DNA Sequence Number=SeqID_17474
MEMKYTCANPIFLKSMEIFRSYNYIGKASSRFIETEPGRATKSIYQINHTRLQEPMMEGEISFLTPPRSRNVGGTNVQTGPKLQKYRRRHAFGENIDVLGSRWNMENMDSPSSHTLPDKMEKLMKPGGFSNTVGNNTIFSFGTGAGDSLLALAVPRDEVVTEEYCIARGRTTSIGTSGPVSISVDSEGDG

SEQ ID NO: 60850 - protein, 143 aa, Zea mays
  Coding DNA Sequence Number=SeqID_17475
  Gene Ontology: Mol. function=binding
  Homolog annotation: Hit_ID=Q2R300; Match level="QueryCoverage=100%, HitCoverage=18%, E-value=1e-54, Identity=62%"; Hit description =Importin, putative, expressed
MHRGAALAAMSYMSCFLETALAAVLESPECIPNGSPGVALIQILARCGEGLLSNVLYALLGVSALSRVKSLPSEYLKQGEAEIIVPSWLKVLQDAGSDYLHSRTGDNIRSHQGYMQGKGGRTLKRIIRDFAESHRNVPIPSPT

SEQ ID NO: 60851 - protein, 223 aa, Zea mays
  Coding DNA Sequence Number=SeqID_17476
  Gene Ontology: Mol. function=catalytic activity
  Homolog annotation: Hit_ID=A2ZBF6; Match level="QueryCoverage=52%, HitCoverage=20%, E-value=2e-36, Identity=66%"; Hit description =Putative uncharacterized protein
MVNREPYPLDIRGELDDTTAFKNFKKWGGIEFRLPFGRVLSPTESFIHELDEKVLFHEQVQALEKSGDCLSNLAIYTSIKTDCRGPLWATEDTDIAVELYKLSVSTLDLLKLASKEEHGAYVSAWYNMLLSCAQELKHGVALWQEFYHANVCDRVVSEGGHYLIALREIYRVAQILYLSLQCFKTWVLANPGMLSKMLSCLDSCTYIRKPNKYRADSRVVLGR

SEQ ID NO: 60852 - protein, 60 aa, Zea mays
  Coding DNA Sequence Number=SeqID_17477
MEVLRLELRRRATSTSNGWVAIKGAHESDVVGFSVGINPGTCGLPGRSSELVTDDGTGLP

SEQ ID NO: 60853 - protein, 450 aa, Zea mays
  Coding DNA Sequence Number=SeqID_17478
  Homolog annotation: Hit_ID=Q2R303; Match level="QueryCoverage=89%, HitCoverage=89%, E-value=1e-158, Identity=66%"; Hit description =Putative uncharacterized protein
  Pfam annotation: Domain name=DUF247; Domain location=30-421; Score =425.1; E_value=1e-124; Accession=PF03140.6; Description=Plant protein of unknown function
MAAAAGGGRRPWVVDVEKKLGEADASVEVSRWQRHCIYRVPACIKDLKPKAYKPQVVSLGPFHHGDAELVPMEEHKRRALRHLLRRAKRPLEDFVAAVEEIAEPLESAYLDLGAEWRGGGRERFLEVMIVDGCFLLEVMRATVLDGKNTADYAPNDPIFSHHGVLYMVPYIRRDMLMLENQLPLILLEKLVAVETGKPTNGDAINRMVLRFLSPTPRLPPTGVGIGLHALDVHRRNMLYGHYQHRPRRDVPETDIIRSAVELYEAGIRFRKSVSDSLHDIRFRHGVLSMPAVTVDDSTEYMFLNMMAFERLHVGAGNDVTAYVFFMDNIIDSAKDVALLSSRGVIQNAVGSDKAVAKLFNSISKDVVLEPESALDAVHREVNAYCRKPWNMWRANLIHTYFRSPWAFLSLAAAVFLLVMTVMQTVYTVMQFYQGGGSGSDGGSSAAPAPA

SEQ ID NO: 60854 - protein, 139 aa, Zea mays
  Coding DNA Sequence Number=SeqID_17479
  Gene Ontology: Mol. function=protein kinase activity; Biological process=protein amino acid phosphorylation
  Homolog annotation: Hit_ID=A2XAK3; Match level="QueryCoverage=65%, HitCoverage=7%, E-value=3e-36, Identity=81%"; Hit description =Putative uncharacterized protein
MGHKIARTTQASTEYYLHDLLSTYNLMLLDVDSRGRFLKSVRCKHDEGLLLVKVYFKPVGESIDLKEHDLRLEWIRNAFKGIEGSHVWPFQGRYDVCCPMMSAWDLQRLGLKQNSRDSTATRFDDHGSATCIAVGLGIL

SEQ ID NO: 60855 - protein, 350 aa, Zea mays
  Coding DNA Sequence Number=SeqID_17480
  Gene Ontology: Mol. function=metal ion binding
  Homolog annotation: Hit_ID=Q2R310; Match level="QueryCoverage=78%, HitCoverage=91%, E-value=4e-23, Identity=48%"; Hit description =Expressed protein
  Pfam annotation: Domain name=zf-C3HC4; Domain location=291-325; Score= 4.8; E_value=0.026; Accession=PF00097.16; Description=Zinc finger, C3HC4 type (RING finger)
MAVQAQFGGLAAGCLLPYGGGGGLAEEQLHLQALLSAAAGSKAAQQQRHCAAGVASAAQSELTCNGVVGLGGVVASRKRGRDGELEEYQQYVPPSSTALLPIPGAHHQRPAAGSVPMAAATATTSGRALLVVVAEAELRRQGAEVDALVRAGCERLRAGLERARGRQREAVARAAARALREKEAELAAARARAAELEERLRLAAAEAQAWCGLARSNEAAASGLRATLDALLLRCAGAAGGGATGGAATRPAATAAEEVEEGFGESGGTDNDAESCCFGGDAASPARWAWCRACGERKASVLLLPCRHLCLCKACEPRTDACPVCSGARTRPSTSRPTDGVGSGDLGQRH

SEQ ID NO: 60856 - protein, 194 aa, Zea mays
  Coding DNA Sequence Number=SeqID_17481
  Homolog annotation: Hit_ID=A2YMF1; Match level="QueryCoverage=64%, HitCoverage=55%, E-value=1e-36, Identity=66%"; Hit description =Putative uncharacterized protein
  Pfam annotation: Domain name=DUF538; Domain location=1-119; Score =17.2; E_value=8.3e-07; Accession=PF04398.3; Description=Protein of unknown function, DUF538
  Subcellular localization annotation: CTP_CleavageSite=33; ConfidenceScore=5.09e-01
MASLLQVPPQSTPLPPASPSLRVRSILGLVQVRLSAPCYAKYDNGDLAYFDNVVRGNLSNGALRGVEGLSQEELFVWLPVKGILVQEELGVILFDIGFAHKSLSRSLFEDPPDYKPSAASGMSAAAARWKGRQGEIPTRHCFTTLHHAPALTPPLVMSCPSSRPPRDPRPSPPNPVLHLVAPPPLAMLLTASPP

SEQ ID NO: 60857 - protein, 66 aa, Zea mays
  Coding DNA Sequence Number=SeqID_17482
  Subcellular localization annotation: CTP_CleavageSite=55; ConfidenceScore=5.15e-01
MEPGGGTTVGAVESLLTSSCFRKGAESRRRHRVGRRGSSSEAEVESVFRGRGRVRAPGSGEAETVG

SEQ ID NO: 60858 - protein, 203 aa, Zea mays
  Coding DNA Sequence Number=SeqID_17483
MNKNTGIQSAITNRTPVPPPQVRTTPLDGGGPAEQQKTDERRAVARSSSSDDDDFCSGGPNSGSTDLRADAAAKRPPPMPKLVRQGQAEGRRVGGGASGRRSRRRFALAVITAPKKGPGKGDTPKRILPCEGTRLRATLLIRGSKAGPPEGFDSRLRSRGPYTHYWSEVRRPAPRKGSTAASGYSGSAPITDQGFEGWPPKGS

SEQ ID NO: 60859 - protein, 296 aa, Zea mays
  Coding DNA Sequence Number=SeqID_17484
  Gene Ontology: Mol. function=metal ion binding
  Homolog annotation: Hit_ID=Q2R310; Match level="QueryCoverage=73%, HitCoverage=79%, E-value=9e-26, Identity=33%"; Hit description =Expressed protein
  Pfam annotation: Domain name=zf-C3HC4; Domain location=249-283; Score= 3.3; E_value=0.038; Accession=PF00097.16; Description=Zinc finger, C3HC4 type (RING finger)
MAVQAQFGGLLLPPYAVEDQMRALKDYGVLLSAAQSELTRNVVVGGGGAAAMPLPSRKRHRREDEHRHYNVDVPLPGMGSLAADPTAAASTSGRAPADAEVDALVRAECEQLRAGLEAARARQRRALLARAAASVLARRAREAEARLEAARRRAAELDEWVRLAAAEAQAWCGVARANEAVAAGMRATLDALLLRSSAAAAGREGEGDSSEPGPEDAQSRCSCCYVEDVEATGTAAATPSPLWNGRWACRACGEGEASVLLLPCRHMCLCKACEPRTDACPVCSGAKNASIHIAPS

SEQ ID NO: 60860 - protein, 224 aa, Zea mays
  Coding DNA Sequence Number=SeqID_17485
  Gene Ontology: Mol. function=carboxyl- or carbamoyltransferase activity; Cellular component=ornithine carbamoyltransferase complex; Biological process=amino acid metabolic process
  Homolog annotation: Hit_ID=Q8SA97; Match level="QueryCoverage=49%, HitCoverage=20%, E-value=5e-14, Identity=43%"; Hit description =Ornithine carbamoyltransferase
MAPPVDVAGLRPRLGDVEAPPKPRSSLSSVAEVESEPLGRARRRPSAEARAESEPWGRAKRSSSSSGAEPESEPWVGRSGVRRLPGLSPSPSPGSGGAEFAVFQDLARVRALGRAERSSPSSGAEPESEPWVGRSGASYGAFGRADCLSVSLCQVAPQSEWRRRRCPFVRPGCFLAKAGPRASRKYVRRWRGASGETEILRGRLPLSEAGLGRGVIESLEWTDP

SEQ ID NO: 60861 - protein, 129 aa, Zea mays
  Coding DNA Sequence Number=SeqID_17486
MAFPKSLLILSKVPKQQNINDRMYLRDRHPSFGRLPDALTFACDRCWVARTAAVRSPQPDSPTSAPPPSVLRLWPFAVAPDPLAFTTMVLHLEHLDEPCEDVKDAGDCTALLDAFVYIETSSAALRVWW

SEQ ID NO: 60862 - protein, 117 aa, Zea mays
  Coding DNA Sequence Number=SeqID_17487
MELPPDAQSSGRRLDVDERVEQCRAVAGVLHVLARFVQVLQMQHLRGTLERISNDLGKAMVLRRRRKGVRNRKEIKSNSHAIPSRVSRPVCIKTDAQDASELRLGHACHGCKDKEIS

SEQ ID NO: 60863 - protein, 182 aa, Zea mays
  Coding DNA Sequence Number=SeqID_17488
  Subcellular localization annotation: CTP_CleavageSite=45; ConfidenceScore=5.38e-01
MQAACNRAKWANPFDSNAPSMEAPGPHVMQPARRLLRASNCTATRATTGPPRLRNQYRDSRQPCDRRHLWQAKQATLHLRHNDRVKKGAPRHSISYPFPFPLSLSYNRDRERGYLERDPSPRRKRAPSPPIDKRFEGWPLGGVQQPPQNARAPRPLLVRGSKAGPSEGFNGRLRPLGLRVHY

SEQ ID NO: 60864 - protein, 386 aa, Zea mays
  Coding DNA Sequence Number=SeqID_17489
  Subcellular localization annotation: CTP_CleavageSite=72; ConfidenceScore=5.19e-01
MVTQDGDHQFDGGEKQAGLWPLPRPQLQGSSSSLLGRRARRAGACLRVGWCPTSSSSFWGWKPSSSSTEEPSSSHAGEGELLLPSQGAAFRPLSGRRWSAAPGVSQHVVRREGGTRVLGWSHSRFRGEDGSEDLPVRFGAGCIRWCGDGGQVDAVVGDEVVAAGESFSADETVSVTRGPTSGSLALMSGSHPSSGDANKSLPAVASAPGPSLLLQRSPSRLEKELRRPRSRWLPRPKRRSSGGWNLARSSTGGTDAGVGLPRPRAGLMSSGDSWLRLWSNRLSRLLGPGFWRRPYRRWPRRSADIFLRGGDPSPVSPSEAGSDSAEGGDDAEGAAAPPIDDLFVGSRIAYPSESYLSRKVMSEESLGSVFLAAYVYFVVFRIPLSK

SEQ ID NO: 60865 - protein, 87 aa, Zea mays
  Coding DNA Sequence Number=SeqID_17490
  Subcellular localization annotation: CTP_CleavageSite=39; ConfidenceScore=5.10e-01
MAVAGGQEQRSRRRPSLRPIQGRRENPLSRREDNAPVFRSSNGPRTRNGRPVALTPRRDRRRLWDRERGIPRKGSFPMKEPGSEPPY

SEQ ID NO: 60866 - protein, 366 aa, Zea mays
  Coding DNA Sequence Number=SeqID_17491
  Subcellular localization annotation: CTP_CleavageSite=68; ConfidenceScore=5.17e-01
MSSRFLMHRVFPPSKPRMGDTRRLSALSLGERNSAGVGTSQSSFGFKDFHQPARLYPYAGASRMFIILAGVEVGLSQSSTSRAGSWVGLSFGVRGRGRSLALRAGWTSTTRGRSTAGVVSLSASGSSAWLPVPPPAGRRLLRRVHGRTTQDIVRCQGGVRVLGRSCLCTGTAPPCGGRCPTRPGGSEWGSAGGLTAPVVGAEVEAAREESLGSVSLVARGFSCSVKGTPRPPFDEPRPGVAASARTEAELARKEGLVCRSLAGPSVSGTDAGIDLPRPRAGLMSLEDSLPRPRGDRPSRLLGPDSRRRPWRRWPGLGDDVVLRSRDPWTASPSEARSGLAEGVIDAEGAAAPFSRQDPSLQDRIIL

SEQ ID NO: 60867 - protein, 43 aa, Zea mays
  Coding DNA Sequence Number=SeqID_17492
  Homolog annotation: Hit_ID=Q9XEJ4; Match level="QueryCoverage=62%, HitCoverage=2%, E-value=3e-07, Identity=96%"; Hit description=Copia -type pol polyprotein
MTTDRPLELLHMDLFGPIAYISIGGRKISNPRDLKGILETGSK
